(19) United States
(12) Patent Application Publication
(10) Pub. No.: US 2011/0034534 A1
(43) Pub. Date: Feb. 10, 2011

(54) siRNA compounds and methods of use thereof

(76) Inventors: Elena Feinstein, Rehovot (IL); Hagar Kalinski, Rishon-le-Zion (IL); Igor Mett, Rehovot (IL); Evgenia Alpert, Jerusalem (IL)

Correspondence Address: COOPER & DUNHAM, LLP, 30 Rockefeller Plaza, 20th Floor, NEW YORK, NY, 10112, US

(21) Appl. No.: 12/804,255

(22) Filed: Jul. 15, 2010

Related U.S. Application Data
(63) Continuation of application No. PCT/IL2009/000053, filed on Jan. 14, 2009.
(60) Provisional application No. 61/011,337, filed on Jan. 15, 2008.

(51) Int. Cl. A61K 31/713; C07H 21/02; A61P 9/00; A61P 11/00; A61P 13/12; A61P 25/28; A61P 27/16; A61P 27/02

(52) U.S. Cl. 514/44 A; 536/24.5

(57) ABSTRACT

The present invention relates to compounds, pharmaceutical compositions comprising same and methods of use thereof for the inhibition of certain genes, including SOX9, ASPP1, CTSD, CAPNS1, FAS and FAS ligand. The compounds and compositions are useful in the treatment of subjects suffering from diseases or conditions and or symptoms associated with diseases or conditions in which gene expression has adverse consequences.

[0001] This application is a continuation of PCT Application No. PCT/IL2009/000053, filed Jan. 14, 2009 designating the United States and claims the benefit of U.S. provisional application No. 61/011,337, filed Jan. 15, 2008, the contents of both of which are hereby incorporated by reference in their entireties into this application.

[0002] This application incorporates-by-reference nucleotide and/or amino acid sequences which are present in the file named “189-PCT1-US1.ST25.txt,” which is 7.49 megabytes in size, was created on Jul. 13, 2010, in the IBM-PCT machine format, having an operating system compatibility with MS-Windows, and are contained on two identical duplicate compact discs labeled COPY 1 and COPY 2 submitted herewith.

[0003] Throughout this application various patents and publications are cited. The disclosures of these documents in their entireties are hereby incorporated by reference into this application to more fully describe the state of the art to which this invention pertains.

### FIELD OF THE INVENTION

[0004] The present invention relates to compounds, pharmaceutical compositions comprising same and methods of use thereof for the inhibition of certain genes, including SOX9, ASPP1, CTSD, CAPNS1, FAS and FAS ligand. The compounds and compositions are thus useful in the treatment of subjects suffering from diseases or conditions and or symptoms associated with such diseases or conditions in which gene expression has adverse consequences. In particular embodiments, the invention provides chemically modified siRNA oligonucleotides, compositions comprising same and methods of use thereof in the treatment of a neurodegenerative disease or disorder including spinal cord injury, Alzheimer's disease (AD) and Amyotrophic Lateral Sclerosis (ALS); acute renal failure (ARF); hearing loss; an ophthalmic disease including glaucoma and ischemic optic neuropathy (ION); a respiratory disease including acute respiratory distress syndrome (ARDS), chronic obstructive pulmonary disease (COPD) and other acute lung and respiratory injuries; injury (e.g. ischemia-reperfusion injury) in organ transplant including lung, kidney, bone marrow, heart, pancreas, cornea or liver transplantation; nephrotoxicity, pressure sores, dry eye syndrome or oral mucositis.

### BACKGROUND OF THE INVENTION

### siRNAs and RNA Interference

[0005] RNA interference (RNAi) is a phenomenon involving double-stranded (ds) RNA-dependent gene-specific posttranscriptional silencing. Initial attempts to study this phenomenon and to manipulate mammalian cells experimentally were frustrated by an active, non-specific antiviral defense mechanism which was activated in response to long dsRNA molecules (Gil et al., Apoptosis, 2000. 5:107-114). Later, it was discovered that synthetic duplexes of 21 nucleotide RNAs could mediate gene specific RNAi in mammalian cells, without stimulating the generic antiviral defense mechanisms Elbashir et al. Nature 2001, 411:494-498 and Caplen et al. PNAS 2001, 98:9742-9747). As a result, small interfering RNAs (siRNAs), which are short double-stranded RNAs, have been widely used to inhibit gene expression and understand gene function.

[0006] RNA interference (RNAi) is mediated by small interfering RNAs (siRNAs) (Fire et al, Nature 1998, 391:806) or microRNAs (miRNAs) (Ambros V. Nature 2004, 431:350-355); and Bartel D P. Cell. 2004 116(2):281-97). The corresponding process is commonly referred to as specific post-transcriptional gene silencing when observed in plants and as quelling when observed in fungi.

[0007] An siRNA is a double-stranded RNA which down-regulates or silences (i.e. fully or partially inhibits) the expression of an endogenous or exogenous gene/mRNA. RNA interference is based on the ability of certain dsRNA species to enter a specific protein complex, where they are then targeted to complementary cellular RNAs and specifically degrades them. Thus, the RNA interference response features an endonuclease complex containing an siRNA, commonly referred to as an RNA-induced silencing complex (RISC), which mediates cleavage of single-stranded RNA having a sequence complementary to the antisense strand of the siRNA duplex. Cleavage of the target RNA may take place in the middle of the region complementary to the antisense strand of the siRNA duplex (Elbashir, et al., Genes Dev., 2001, 15:188). In more detail, longer dsRNAs are digested into short (17-29 bp) dsRNA fragments (also referred to as short inhibitory RNAs or “siRNAs”) by type III RNAses (DICER, DROSHA, etc., (see Bernstein et al., Nature, 2001, 409:363-6 and Lee et al., Nature, 2003, 425:415-9). The RISC protein complex recognizes these fragments and complementary mRNA. The whole process is culminated by endonuclease cleavage of target mRNA (McManus and Sharp, Nature Rev Genet, 2002, 3:737-47; Paddison and Hannon, Curr Opin Mol Ther. 2003, 5(3): 217-24). (For additional information on these terms and proposed mechanisms, see for example, Bernstein, et al., RNA. 2001, 7(11):1509-21; Nishikura, Cell. 2001, 107(4):415-8 and PCT Publication No. WO 01/36646).

[0008] Studies have revealed that siRNA can be effective in vivo in both mammals and humans. Specifically, Bitko et al., showed that specific siRNAs directed against the respiratory syncytial virus (RSV) nucleocapsid N gene are effective in treating mice when administered intranasally (Nat. Med. 2005, 11(1):50-55). For reviews of therapeutic applications of siRNAs see for example Barik (Mol. Med 2005, 83: 764-773) and Chakraborty (Current Drug Targets 2007 8(3):469-82). In addition, clinical studies with short siRNAs that target the VEGFR1 receptor in order to treat age-related macular degeneration (AMD) have been conducted in human patients (Kaiser, Am J Ophthalmol. 2006 142(4):660-8). Further information on the use of siRNA as therapeutic agents may be found in Durcan, 2008. Mol. Pharma. 5(4):559-566; Kim and Rossi, 2008. BioTechniques 44:613-616; Grimm and Kay, 2007, JCI, 117(12):3633-41.

Chemically Modified siRNA

[0009] The selection and synthesis of siRNA corresponding to known genes has been widely reported; (see for example Ui-Tei et al., 2006. J Biomed Biotechnol.; 2006:65052; Chalk et al., 2004. BBRC. 319(1): 264-74; Sioud & Leirdal, 2004. Met. Mol Biol.; 252:457-69; Levenkova et al., 2004, Bioinform. 20(3):430-2; Ui-Tei et al., 2004. NAR 32(3):936-48).

[0010] For examples of the use of, and production of, modified siRNA see for example Braasch et al., 2003. Biochem., 42(26):7967-75; Chiu et al., 2003, RNA, 9(9):1034-48; PCT publications WO 2004/015107 (atugen AG) and WO 02/44321 (Tuschl et al). U.S. Pat. Nos. 5,898,031 and 6,107,094 teach chemically modified oligomers. U.S. Pat. No. 7,452,987 relates to oligomeric compounds having alternating unmodified and 2′ sugar modified ribonucleotides. US patent publication 2005/0042647 describes dsRNA compounds having chemically modified internucleoside linkages.

[0011] The inclusion of a 5′-phosphate moiety was shown to enhance activity of siRNAs in Drosophila embryos (Boutla, et al., 2001, Curr. Biol. 11:1776-1780) and is required for siRNA function in human HeLa cells (Schwarz et al., 2002, Mol. Cell, 10:537-548).

[0012] Amarzguoui et al., (2003, NAR, 31(2):589-595) showed that siRNA activity depended on the positioning of the 2′-O-methyl modifications. Holen et al (2003, NAR, 31(9):2401-2407) report that an siRNA having small numbers of 2′-O-methyl modified nucleosides showed good activity compared to wild type but that the activity decreased as the numbers of 2′-O-methyl modified nucleosides was increased. Chiu and Rana (2003, RNA, 9:1034-1048) teach that incorporation of 2′-O-methyl modified nucleosides in the sense or antisense strand (fully modified strands) severely reduced siRNA activity relative to unmodified siRNA. The placement of a 2′-O-methyl group at the 5′-terminus on the antisense strand was reported to severely limit activity whereas placement at the 3′-terminus of the antisense and at both termini of the sense strand was tolerated (Czauderna et al., 2003, NAR, 31(11), 2705-2716).

[0013] PCT Patent Publication Nos. PCT/IL2008/000248 and PCT/IL2008/001197 assigned to the assignee of the present invention disclose motifs useful in the preparation of chemically modified siRNA compounds.

[0014] Stable and active siRNA compounds useful in treating the above mentioned diseases and disorders would be of great therapeutic value.

### SUMMARY OF THE INVENTION

[0015] The present invention provides inhibitors of a target gene selected from the group consisting of SOX9, ASPP1, CTSD, CAPNS1, FAS and FAS ligand (See Table 1, infra, for genes' details). In various embodiments the inhibitor is selected from the group consisting of unmodified or chemically modified siRNA, shRNA, an aptamer, an antisense molecule, miRNA, and a ribozyme. In the presently preferred embodiments the inhibitor is chemically modified siRNA.

[0016] In one aspect the present invention provides novel double stranded oligoribonucleotide compounds that inhibit expression of a gene selected from the group consisting of SOX9, ASPP1, CTSD, CAPNS1, FAS and FAS ligand. In particular embodiments the double stranded oligoribonucleotide compounds are chemically modified siRNA.

[0017] The present invention provides a compound having the structure:

5′(N)ₓ—Z3′ (antisense strand)

3′Z′—(N′)_{y}-z″5′ (sense strand)

wherein each of N and N′ is a ribonucleotide which may be unmodified or modified, or an unconventional moiety;
wherein each of (N)x and (N′)y is an oligonucleotide in which each consecutive N or N′ is joined to the next N or N′ by a covalent bond;
wherein Z and Z′ may be present or absent, but if present is independently 1-5 consecutive nucleotides covalently attached at the 3′ terminus of the strand in which it is present;
wherein z″ may be present or absent, but if present is a capping moiety covalently attached at the 5′ terminus of (N′)y;
each of x and y is independently an integer between 18 and 40;
wherein the sequence of (N′)y is substantially complementary to the sequence of (N)x; and
wherein (N)x comprises an antisense sequence to an mRNA set forth in any one of SEQ ID NOS: 41025-41038.

[0018] In some embodiments (N)x is present in any of Tables A-AQ.

[0019] In some embodiments the covalent bond joining each consecutive N or N′ is a phosphodiester bond. In various embodiments all the covalent bonds are phosphodiester bonds.

[0020] In various embodiments the compound comprises ribonucleotides wherein x=y and each of x and y is 19, 20, 21, 22 or 23. In some embodiments x=y=23. In other embodiments x=y=19.

[0021] In some embodiments the compound is blunt ended, for example wherein both Z and Z′ are absent. In an alternative embodiment, the compound comprises at least one 3′ overhang, wherein at least one of Z or Z′ is present. Z and Z′ can independently comprise one or more covalently linked modified or non-modified nucleotides, for example inverted dT or dA; dT, LNA, mirror nucleotide and the like. In some embodiments each of Z and Z′ are independently selected from dT and dTdT.

[0022] In some embodiments each of (N)x and (N′)y consist of unmodified nucleotides.

[0023] In some embodiments N or N′ comprises a modification in the sugar residue of one or more ribonucleotides. In other embodiments the compound comprises at least one ribonucleotide modified in the sugar residue. In some embodiments the compound comprises a modification at the 2′ position of the sugar residue. In some embodiments the modification in the 2′ position comprises the presence of an amino, a fluoro, an alkoxy or an alkyl moiety. In certain embodiments the 2′ modification comprises a methoxy moiety (also known as 2′-O-methyl; 2′-O-Me; 2′-O—CH₃). In some embodiments in each of (N)x and (N′)y the ribonucleotides alternate between modified ribonucleotides and unmodified ribonucleotides each modified ribonucleotide being modified so as to have a 2′-O-methyl on its sugar and the ribonucleotide located at the middle position of (N)x being unmodified and the ribonucleotide located at the middle position of (N′)y being modified.

[0024] In some embodiments the siRNA compound comprises modified alternating ribonucleotides in one or both of the antisense and the sense strands. In other embodiments the compound comprises modified alternating ribonucleotides in the antisense strand (N)x only. In certain embodiments the middle ribonucleotide of the antisense strand is not modified; e.g. ribonucleotide in position 10 in a 19-mer strand or position 12 in a 23-mer strand.

[0025] In additional embodiments the compound comprises modified ribonucleotides in alternating positions wherein each N at the 5′ and 3′ termini of (N)ₓ are modified in their sugar residues, and each N′ at the 5′ and 3′ termini of (N′)_{y} are unmodified in their sugar residues. In some embodiments, neither (N)ₓ nor (N′)_{y} are phosphorylated at the 3′ and 5′ termini. In other embodiments either or both (N)ₓ and (N′)_{y} are phosphorylated at the 3′ termini.

[0026] In some embodiments (N)x comprises modified and unmodified ribonucleotides, each modified ribonucleotide having a 2′-O-methyl on its sugar, wherein N at the 3′ terminus of (N)x is a modified ribonucleotide, (N)x comprises at least five alternating modified ribonucleotides beginning at the 3′ end and at least nine modified ribonucleotides in total and each remaining N is an unmodified ribonucleotide. In some embodiments, (N)x comprises 2′O Me modified ribonucleotides at positions 2, 4, 6, 8, 11, 13, 15, 17 and 19. In other embodiments (N)x comprises 2′O Me modified ribonucleotides at positions 1, 3, 5, 7, 9, 11, 13, 15, 17 and 19.

[0027] In some embodiments the unconventional moiety is selected from a mirror nucleotide and a nucleotide joined to an adjacent nucleotide by a 2′-5′ internucleotide phosphate bond. In some embodiments the mirror nucleotide is selected from an L-ribonucleotide (L-RNA) and an L-deoxyribonucleotide (L-DNA). In some embodiments (N′)y comprises at least one unconventional moiety.

[0028] In one embodiment of the above structure, the compound comprises at least one mirror nucleotide at one or both termini in (N′)y. In various embodiments the compound comprises two consecutive mirror nucleotides, one at the 3′ penultimate position and one at the 3′ terminus in (N′)y. In one preferred embodiment x=y=19 and (N′)y comprises an L-DNA at position 18.

[0029] In some embodiments x=y=19 and (N′)y, consists of unmodified ribonucleotides at positions 1-17 and 19 and one L-DNA at the 3′ penultimate position (position 18). In other embodiments x=y=19 and (N′)y consists of unmodified ribonucleotides at position 1-16 and 19 and two consecutive L-DNA at the 3′ penultimate position (positions 17 and 18).

[0030] In another embodiment of the above structure, (N′)y further comprises one or more nucleotides containing an intra-sugar bridge at one or both termini.

[0031] In one embodiment the present invention provides a compound having the structure (Structure 1):

5′(N)x—-Z3′ antisense strand (1)

3′Z′—(N′)y5′ sense strand

wherein each of N and N′ is a nucleotide selected from an unmodified ribonucleotide, a modified ribonucleotide, an unmodified deoxyribonucleotide and a modified deoxyribonucleotide;
wherein each of (N)x and (N′)y is an oligomer in which each consecutive nucleotide is joined to the next nucleotide by a covalent bond and each of x and y is an integer between 18 and 40;
wherein in (N)x the nucleotides alternate between modified ribonucleotides and unmodified ribonucleotides, each modified ribonucleotide being modified so as to have a 2′-O-methyl on its sugar and the ribonucleotide located at the middle of (N)x being unmodified;
wherein (N′)y comprises unmodified ribonucleotides in which three nucleotides at the 3′ terminus of (N′)y are joined by two 2′-5′ phosphodiester bonds; and
wherein (N)ₓ and (N′)_{y} together are a pair of oligonucleotides present in any of Tables A-AQ.

[0032] In another embodiment the present invention provides a compound having the structure (Structure II):

5′(N)x-Z3′ antisense strand (II)

3′Z′—(N′)y5′ sense strand

wherein each of N and N′ is a nucleotide selected from an unmodified ribonucleotide, a modified ribonucleotide, an unmodified deoxyribonucleotide and a modified deoxyribonucleotide;
wherein each of (N)x and (N′)y is an oligomer in which each consecutive nucleotide is joined to the next nucleotide by a covalent bond and each of x and y is an integer between 18 and 40;
wherein (N)x comprises unmodified ribonucleotides in which three consecutive nucleotides at the 3′ terminus are joined together by two 2′-5′ phosphodiester bonds; and (N′)y comprises unmodified ribonucleotides in which four consecutive nucleotides at the 5′ terminus are joined together by three 2′-5′ phosphodiester bonds; and
wherein (N)ₓ and (N′)_{y} together are a pair of oligonucleotides present in any of Tables A-AQ.

[0033] In another aspect the present invention provides a compound having the structure (Structure III):

5′(N)x-Z3′ antisense strand (III)

3′Z′—(N′)y5′ sense strand

wherein each of N and N′ is a nucleotide selected from an unmodified ribonucleotide, a modified ribonucleotide, an unmodified deoxyribonucleotide and a modified deoxyribonucleotide;
wherein each of (N)x and (N′)y is an oligomer in which each consecutive nucleotide is joined to the next nucleotide by a covalent bond and each of x and y is an integer between 18 and 40;
wherein (N′)y comprises unmodified ribonucleotides in which two consecutive nucleotides at the 3′ terminus are replaced by two consecutive mirror deoxyribonucleotides; and (N)x comprises unmodified ribonucleotides in which one nucleotide at the 3′ terminus is replaced by a mirror deoxyribonucleotide; and
wherein (N)ₓ and (N′)_{y} together are a pair of oligonucleotides present in any of Tables A-AQ.

[0034] In a second aspect the present invention provides pharmaceutical compositions comprising one or more such compounds according to the present invention; and a pharmaceutically acceptable excipient.

[0035] In a third aspect the present invention relates to a method for treating or preventing the incidence or severity of a disease or condition in a subject in need thereof wherein the disease or condition and/or symptoms associated therewith is selected from the group consisting of a neurodegenerative disease or disorder including spinal cord injury, Alzheimer's disease (AD) and Amyotrophic Lateral Sclerosis (ALS); acute renal failure (ARF); hearing loss; an ophthalmic disease including glaucoma and ischemic optic neuropathy (ION); a respiratory disease including acute respiratory distress syndrome (ARDS), chronic obstructive pulmonary disease (COPD) and other acute lung and respiratory injuries; injury (e.g. ischemia-reperfusion injury) in organ transplant including lung, kidney, bone marrow, heart, pancreas, cornea or liver transplantation; nephrotoxicity, pressure sores, dry eye syndrome or oral mucositis.

[0036] Such methods involve administering to a mammal in need of such treatment a prophylactically or therapeutically effective amount of one or more such compounds which inhibit or reduce expression or activity of at least one such gene. In another aspect, the present invention relates to a method for the treatment of a subject in need of treatment for a disease or disorder or symptoms associated with the disease or disorder, associated with the expression of a gene selected from SOX9, ASPP1, CTSD, CAPNS1, FAS and FAS ligand, comprising administering to the subject an amount of an siRNA which reduces or inhibits expression of at least one of those genes.

[0037] In one embodiment, the present invention provides a method of treating a neurodegenerative disease or disorder in a subject in need thereof, comprising administering to the subject an siRNA compound which inhibits expression of SOX9, CTSD or CAPNS1 in an amount effective to treat the neurodegenerative disease or disorder. In some embodiments the neurodegenerative disease or disorder is selected from spinal cord injury, Alzheimer's disease and amyotrophic lateral sclerosis.

[0038] In another embodiment, the present invention provides a method of treating an ophthalmic disease in a subject in need thereof, comprising administering to the subject an siRNA compound which inhibits expression of SOX9, ASPP1, CTSD or CAPNS1 in an amount effective to treat the ophthalmic disease. In some embodiments the ophthalmic disease is selected from glaucoma, ION and AMD.

[0039] In another embodiment, the present invention provides a method of treating dry eye in a subject in need thereof, comprising administering to the subject an oligonucleotide which inhibits expression of FAS and FAS ligand, in an amount effective to treat the dry eye.

[0040] Lists of 19-mer, 21-mer and 23-mer sense and corresponding antisense oligonucleotides useful in the preparation of siRNA compounds are provided in Tables A-AQ, set forth in SEQ ID NOS:1-41,024.

### DETAILED DESCRIPTION OF THE INVENTION

[0041] The present invention relates generally to compounds which down-regulate expression of various genes, particularly to novel chemically modified small interfering RNA oligonucleotides (siRNAs), and to the use of these novel siRNAs in the treatment of various diseases and medical conditions. According to one aspect the present invention provides inhibitory oligonucleotide compounds comprising unmodified and modified nucleotides and or unconventional moieties. The compound comprises at least one modified nucleotide selected from the group consisting of a sugar modification, a base modification and an internucleotide linkage modification and may contain DNA, and modified nucleotides such as LNA (locked nucleic acid), ENA (ethylene-bridged nucleic acid, PNA (peptide nucleic acid), arabinoside, PACE, mirror nucleotide, or nucleotides with a 6 carbon sugar.

[0042] Particular diseases and conditions to be treated are a neurodegenerative disease or disorder including spinal cord injury, Alzheimer's disease (AD) and Amyotrophic Lateral Sclerosis (ALS); acute renal failure (ARF); hearing loss; an ophthalmic disease including glaucoma and ischemic optic neuropathy (ION); a respiratory disease including acute respiratory distress syndrome (ARDS), chronic obstructive pulmonary disease (COPD) and other acute lung and respiratory injuries; injury (e.g. ischemia-reperfusion injury) in organ transplant including lung, kidney, bone marrow, heart, pancreas, cornea or liver transplantation; nephrotoxicity, pressure sores, dry eye syndrome or oral mucositis.

[0043] Lists of preferred siRNA to be used in the present invention are provided in Tables A-AQ. For each gene there is a separate list of 19-mer, 21-mer and 23-mer sequences, which are prioritized based on their score in the proprietary algorithm as the best sequences for targeting the human gene expression. 21- or 23-mer siRNA sequences can also be generated by 5′ and/or 3′ extension of the 19-mer sequences disclosed herein. Such extension is preferably complementary to the corresponding mRNA sequence. Certain 23-mer oligomers were devised by this method where the order of the prioritization is the order of the corresponding 19-mer.

[0044] Methods, molecules and compositions which inhibit the genes of the invention are discussed herein at length, and any of said molecules and/or compositions may be beneficially employed in the treatment of a subject suffering from any of said conditions.

[0045] Tables A, E, I, L, O, S, W, AA, AD, AF, AJ, AN, set forth 19-mer oligomers. Tables B, F, J, M, P, T, X, AB, AG, AK, AO, set forth 21-mer oligomers. Tables C, D, G, H, K, N, Q, R, U, V, Y, Z, AC, AE, AH, AI, AL, AM, AP, AQ, set forth 23-mer oligomers.

[0046] Tables A-D and AN-AQ provide siRNA sense and antisense oligonucleotides to SOX9, set forth in SEQ ID NOS:1-4686 and SEQ ID NOS:37133-40972. Tables E-H and W-Z provide siRNA sense and antisense oligonucleotides to ASPP1, set forth in SEQ ID NOS 4687-10192 and SEQ ID NOS:24921-29288. Tables I-K and AA-AC provide siRNA sense and antisense oligonucleotides to CAPNS1 set forth in SEQ ID NO:10193-13428 AND SEQ ID NOS:29289-29718. Tables L-N and AD-AE provide siRNA sense and antisense oligonucleotides to CTSD set forth in SEQ ID NOS:13429-16016 and SEQ ID NOS:29719-30216 and 40973-41024. Tables O-R and AF-AI provide siRNA sense and antisense oligonucleotides to FAS set forth in SEQ ID NOS:16017-20608 and SEQ ID NOS:30217-33810. Tables S-V and AJ-AM provide siRNA sense and antisense oligonucleotides to FAS LIGAND set forth in SEQ ID NOS: 20609-24920 and SEQ ID NOS:33811-37132.

[0047] The siRNAs of the present invention possess structures and modifications which may increase activity, increase stability, and or minimize toxicity; the novel modifications of the siRNAs of the present invention can be beneficially applied to double stranded RNA useful in preventing or attenuating one or more of the target genes' expression.

[0048] Table 1, below, sets forth the gene identification number (gi) with an NCBI accession number for the respective mRNA sequences, the SEQ ID NO for the corresponding mRNA and polypeptide, and a description of the gene/protein function.

TABLE 1
Target genes of the present invention

| | | Certain |
|---|---|---|
| | Full name and Human Gene ID | preferred |
| Gene | Short description | indications |
| SOX9 | SRY (sex determining region Y)-box 9 (campomelic dysplasia, | ARF, ARDS, |
| | autosomal sex-reversal) gi\|37704387\|ref\|NM_000346.3\| | glaucoma, |
| | (mRNA is set forth in SEQ ID NO: 41025 polypeptide | ION, SCI, |
| | sequence is set forth in SEQ ID NO: 41039) | COPD, |
| | Description: SOX9 protein recognizes the sequence CCTTGAG | |
| | along with other members of the HMG-box class DNA-binding | |
| | proteins. It acts during chondrocyte differentiation and, with | |
| | steroidogenic factor 1, regulates transcription of the anti- | |
| | Muellerian hormone (AMH) gene. Deficiencies lead to the | |
| | skeletal malformation syndrome. | |
| ASPP1 | protein phosphatase 1, regulatory (inhibitor) subunit 13B | ARF, hearing |
| | (PPP1R13B) gi\|121114286\|ref\|NM_015316.2\| | loss, |
| | (mRNA is set forth in SEQ ID NO: 41026; polypeptide | glaucoma, |
| | sequence is set forth in SEQ ID NO: 41040) | ION, SCI, |
| | Description: This gene encodes a member of the ASPP | COPD, DR, |
| | (apoptosis-stimulating protein of p53) family of p53 interacting | ARDS, |
| | proteins. ASPP proteins are required for the induction of | |
| | apoptosis by p53-family proteins. They promote DNA binding | |
| | and transactivation of p53-family proteins on the promoters of | |
| | proapoptotic genes. | |
| CTSD | Cathepsin D gi\|23110949\|ref\|NM_001909.3\| | ARF, hearing |
| | (mRNA is set forth in SEQ ID NO: 41027 | loss, ARDS, |
| | polypeptide sequence is set forth in SEQ ID NO: 41041) | glaucoma, |
| | Cathepsin D is a lysosomal aspartyl protease composed of a | ION, SCI, |
| | dimer of disulfide-linked heavy and light chains, both produced | COPD, DR, |
| | from a single protein precursor. Transcription of this gene is | ND, |
| | initiated from several sites, including one which is a start site for | transplant |
| | an estrogen-regulated transcript. Mutations in this gene are | |
| | involved in the pathogenesis of several diseases, including breast | |
| | cancer and possibly Alzheimer disease. | |
| CAPNS1 | Calpain small subunit 1 | ARF, hearing |
| | gi\|51599152\|ref\|NM_001749.2\| Variant 1 (mRNA is set forth in | loss, ARDS, |
| | SEQ ID NO: 41028; polypeptide sequence is set forth in | glaucoma, |
| | SEQ ID NO: 41042) | ION, SCI, |
| | gi\|51599150\|ref\|NM_001003962.1\| variant 2 (mRNA is set forth | COPD, DR, |
| | in SEQ ID NO: 41029; polypeptide sequence is set forth in | ND (ALS, |
| | SEQ ID NO:41043) | AD, SCI) |
| | Description: Calpains are a ubiquitous, well-conserved family of | |
| | calcium-dependent, cysteine proteases. Calpain families have | |
| | been implicated in neurodegenerative processes, as their | |
| | activation can be triggered by calcium influx and oxidative stress. | |
| | Two transcript variants encoding the same protein have been | |
| | identified for this gene. | |
| FAS | (TNF receptor superfamily, member 6) | Dry eye |
| | gi\|23510419\|ref\|NM_000043.3\| variant 1 (mRNA is set forth in | ARF, hearing |
| | SEQ ID NO: 41030; polypeptide sequence is set forth in | loss, ARDS, |
| | SEQ ID NO: 41044) | glaucoma, |
| | gi\|23510422\|ref\|NM_152872.1\| variant 3 (mRNA is set forth in | SCI, COPD, |
| | SEQ ID NO: 41031; polypeptide sequence is set forth in | DR, ND, |
| | SEQ ID NO: 41045) | transplant |
| | gi\|23510420\|ref\|NM_152871.1\| variant 2 (mRNA is set forth in | |
| | SEQ ID NO: 41032; polypeptide sequence is set forth in | |
| | SEQ ID NO: 41046) | |
| | gi\|23510424\|ref\|NM_152873.1\| variant 4 (mRNA is set forth in | |
| | SEQ ID NO: 41033; polypeptide sequence is set forth in | |
| | SEQ ID NO: 41047) | |
| | gi\|23510426\|ref\|NM_152874.1\| variant 8 (mRNA is set forth in | |
| | SEQ ID NO: 41034; polypeptide sequence is set forth in | |
| | SEQ ID NO: 41048) | |
| | gi\|23510428\|ref\|NM_152875.1\| variant 5 (mRNA is set forth in | |
| | SEQ ID NO: 41035; polypeptide sequence is set forth in | |
| | SEQ ID NO: 41049) | |
| | gi\|23510433\|ref\|NM_152877.1\| variant 7 (mRNA is set forth in | |
| | SEQ ID NO: 41036; polypeptide sequence is set forth in | |
| | SEQ ID NO: 41050) | |
| | gi\|23510430\|ref\|NM_152876.1\| variant 6 (mRNA is set forth in | |
| | SEQ ID NO: 41037; polypeptide sequence is set forth in | |
| | SEQ ID NO: 41051) | |
| | Description: The protein encoded by this gene contains a death | |
| | domain and is a member of the TNF-receptor superfamily. It has | |
| | been shown to play a central role in the physiological regulation | |
| | of programmed cell death, and has been implicated in the | |
| | pathogenesis of various malignancies and diseases of the immune | |
| | system. The interaction of this receptor with its ligand allows the | |
| | formation of a death-inducing signaling complex that includes | |
| | Fas-associated death domain protein (FADD), caspase 8, and | |
| | caspase 10. The autoproteolytic processing of the caspases in the | |
| | complex triggers a downstream caspase cascade, and leads to | |
| | apoptosis. At least eight alternatively spliced transcript variants | |
| | encoding seven distinct isoforms have been described. The | |
| | isoforms lacking the transmembrane domain may negatively | |
| | regulate the apoptosis mediated by the full length isoform. | |
| FASLG | Fas ligand (TNF superfamily, member 6) | Dry eye |
| | gi\|4557328\|ref\|NM_300639.1\| (mRNA is set forth in | ARF, hearing |
| | SEQ ID NO: 41038; polypeptide sequence is set forth in | loss, ARDS, |
| | SEQ ID NO: 41052) | glaucoma, |
| | Description: The protein encoded by this gene is the | SCI, COPD, |
| | ligand for FAS. Both are transmembrane proteins. Interaction of | DR, ND, |
| | FAS with this ligand is critical in triggering apoptosis of some | transplant |
| | types of cells such as lymphocytes. Defects in this gene may be | |
| | related to some cases of systemic lupus erythematosus (SLE). | |

ND: neurodegenerative diseases and disorders; AD: Alzheimer's disease;
ALS: Amyotrophic Lateral Sclerosis; ARF: acute renal failure,
ARDS, acute respiratory distress syndrome, COPD chronic obstructive pulmonary disease,
DR: diabetic retinopathy; SCI spinal cord injury.

[0049] In non-limiting examples, siRNA to SOX9 is useful in treating, inter alia, a neurodegenerative disorder, in particular spinal cord injury and Alzheimer's disease; siRNA to ASPP1 is useful in treating, inter alia, hearing loss, acute renal failure, glaucoma, neurodegenerative disease; siRNA to Fas (CD95) or Fas ligand is useful in treating dry eye; siRNA to cathepsin D (CTSD) or to Calpain small subunit 1 (CAPNS1) is useful in treating hearing loss and neurodegenerative disorders including spinal cord injury, Alzheimer's disease and ALS.

### DEFINITIONS

[0050] For convenience certain terms employed in the specification, examples and claims are described herein.

[0051] It is to be noted that, as used herein, the singular forms “a”, “an” and “the” include plural forms unless the content clearly dictates otherwise.

[0052] Where aspects or embodiments of the invention are described in terms of Markush groups or other grouping of alternatives, those skilled in the art will recognize that the invention is also thereby described in terms of any individual member or subgroup of members of the group.

[0053] An “inhibitor” is a compound, which is capable of reducing (partially or fully) the expression of a gene or the activity of the product of such gene to an extent sufficient to achieve a desired biological or physiological effect. The term “inhibitor” as used herein refers to one or more of an oligonucleotide inhibitor, including siRNA, shRNA, synthetic shRNA; miRNA, antisense RNA and DNA and ribozymes.

[0054] A “siRNA inhibitor” is a compound which is capable of reducing the expression of a gene or the activity of the product of such gene to an extent sufficient to achieve a desired biological or physiological effect. The term “siRNA inhibitor” as used herein refers to one or more of a siRNA, shRNA, synthetic shRNA; miRNA. Inhibition may also be referred to as down-regulation or, for RNAi, silencing

[0055] The term “inhibit” as used herein refers to reducing the expression of a gene or the activity of the product of such gene to an extent sufficient to achieve a desired biological or physiological effect. Inhibition may be complete or partial.

[0056] As used herein, the term “inhibition” of a target gene means inhibition of the gene expression (transcription or translation) or polypeptide activity of a gene selected from the group SOX9, ASPP1, CAPNS1, CTSD, FAS or Fas ligand or an SNP (single nucleotide polymorphism) or other variants thereof. The gi number for the mRNA of each target gene is set forth in Table 1. The polynucleotide sequence of the target mRNA sequence, refers to the mRNA sequences set forth in SEQ ID NO:41025-41038, or any homologous sequences thereof preferably having at least 70% identity, more preferably 80% identity, even more preferably 90% or 95% identity to any one of mRNA set forth in SEQ ID NO:41025-41038. Therefore, polynucleotide sequences derived from any one of SEQ ID NO:41025-41038 which have undergone mutations, alterations or modifications as described herein are encompassed in the present invention. The terms “mRNA polynucleotide sequence” and “mRNA” are used interchangeably.

[0057] As used herein, the terms “polynucleotide” and “nucleic acid” may be used interchangeably and refer to nucleotide sequences comprising deoxyribonucleic acid (DNA), and ribonucleic acid (RNA). The terms should also be understood to include, as equivalents, analogs of either RNA or DNA made from nucleotide analogs. Throughout this application, mRNA sequences are set forth as representing the corresponding genes.

[0058] “Oligonucleotide” or “oligomer” refers to a deoxyribonucleotide or ribonucleotide sequence from about 2 to about 50 nucleotides. Each DNA or RNA nucleotide may be independently natural or synthetic, and or modified or unmodified. Modifications include changes to the sugar moiety, the base moiety and or the linkages between nucleotides in the oligonucleotide. The compounds of the present invention encompass molecules comprising deoxyribonucleotides, ribonucleotides, modified deoxyribonucleotides, modified ribonucleotides and combinations thereof.

[0059] “Nucleotide” is meant to encompass deoxyribonucleotides and ribonucleotides, which may be natural or synthetic, and or modified or unmodified. Modifications include changes to the sugar moiety, the base moiety and or the linkages between ribonucleotides in the oligoribonucleotide. As used herein, the term “ribonucleotide” encompasses natural and synthetic, unmodified and modified ribonucleotides. Modifications include changes to the sugar moiety, to the base moiety and/or to the linkages between ribonucleotides in the oligonucleotide.

[0060] According to some embodiments the present invention provides inhibitory oligonucleotide compounds comprising unmodified and modified nucleotides and or unconventional moieties. The compound comprises at least one modified nucleotide selected from the group consisting of a sugar modification, a base modification and an internucleotide linkage modification and may contain DNA, and modified nucleotides such as LNA (locked nucleic acid), ENA (ethylene-bridged nucleic acid. PNA (peptide nucleic acid), arabinoside, PACE, mirror nucleotide, or nucleotides with a 6 carbon sugar.

[0061] All analogs of, or modifications to, a nucleotide/oligonucleotide may be employed with the present invention, provided that said analog or modification does not substantially adversely affect the function of the nucleotide/oligonucleotide. Acceptable modifications include modifications of the sugar moiety, modifications of the base moiety, modifications in the internucleotide linkages and combinations thereof.

[0062] In one embodiment the compound comprises a 2′ modification on the sugar moiety of at least one ribonucleotide (“2′ sugar modification”). In certain embodiments the compound comprises 2′O-alkyl or 2′-fluoro or 2′O-allyl or any other 2′ modification, optionally on alternate positions. Other stabilizing modifications are also possible (e.g. terminal modifications). In some embodiments a preferred 2′O-alkyl is 2′O-methyl (methoxy) sugar modification.

[0063] In some embodiments the backbone of the oligonucleotides is modified and comprises phosphate-D-ribose entities but may also contain thiophosphate-D-ribose entities, triester, thioate, 2′-5′ bridged backbone (also may be referred to as 5′-2′), PACE and the like.

[0064] As used herein, the terms “non-pairing nucleotide analog” means a nucleotide analog which comprises a non-base pairing moiety including but not limited to: 6 des amino adenosine (Nebularine), 4-Me-indole, 3-nitropyrrole, 5-nitroindole, Ds, Pa, N3-Me ribo U, N3-Me riboT, N3-Me dC, N3-Me-dT, N1-Me-dG, N1-Me-dA, N3-ethyl-dC, N3-Me dC. In some embodiments the non-base pairing nucleotide analog is a ribonucleotide. In other embodiments it is a deoxyribonucleotide.

[0065] Other modifications include terminal modifications on the 5′ and/or 3′ part of the oligonucleotides and are also known as capping moieties. Such terminal modifications are selected from a nucleotide, a modified nucleotide, a lipid, a peptide, and a sugar.

[0066] A sugar modification includes a modification on the 2′ moiety of the sugar residue and encompasses amino, fluoro, alkoxy e.g. methoxy, alkyl, amino, fluoro, chloro, bromo, CN, CF, imidazole, carboxylate, thioate, C₁ to C₁₀ lower alkyl, substituted lower alkyl, alkaryl or aralkyl, OCF₃, OCN, O-, S-, or N-alkyl; O-, S, or N-alkenyl; SOCH₃; SO₂CH₃; ONO₂; NO₂, N₃; heterocycloalkyl; heterocycloalkaryl; aminoalkylamino; polyalkylamino or substituted silyl, as, among others, described in European patents EP 0 586 520 B1 or EP 0 618 925 B1.

[0067] The present invention provides methods and compositions for inhibiting expression of the target gene in vivo. In general, the method includes administering oligoribonucleotides, in particular small interfering RNAs (i.e. siRNAs) or a nucleic acid material that can produce siRNA in a cell, that target an mRNA transcribed from the target gene in an amount sufficient to down-regulate expression of a target gene by an RNA interference mechanism. In particular, the subject method can be used to inhibit expression of the target gene for treatment of a disease. In accordance with the present invention, the siRNA molecules or inhibitors of the target gene are used as drugs to treat various pathologies.

siRNA Oligoribonucleotides

[0068] Tables A-AQ provide nucleic acid sequences of sense and corresponding antisense oligonucleotides, useful in preparing unmodified and chemically siRNA compounds.

[0069] The selection and synthesis of siRNA corresponding to known genes has been widely reported; see for example Ui-Tei et al., J Biomed Biotechnol. 2006; 65052; Chalk et al., BBRC. 2004, 319(1):264-74; Sioud and Leirdal, Met. Mol Biol.; 2004, 252:457-69; Levenkova et al., Bioinform. 2004, 20(3):430-2; Ui-Tei et al., NAR 2004, 32(3):936-48. For examples of the use of, and production of, modified siRNA see Braasch et al., Biochem., 2003, 42(26):7967-75; Chiu et al., RNA, 2003, 9(9):1034-48; PCT publications WO 2004/015107 (atugen); WO 02/44321 (Tuschl et al), and U.S. Pat. Nos. 5,898,031 and 6,107,094.

[0070] Several groups have described the development of DNA-based vectors capable of generating siRNA within cells. The method generally involves transcription of short hairpin RNAs that are efficiently processed to form siRNAs within cells (Paddison et al. PNAS USA 2002, 99:1443-1448; Paddison et al. Genes & Dev 2002, 16:948-958; Sui et al. PNAS USA 2002, 8:5515-5520; and Brummelkamp et al. Science 2002, 296:550-553).

[0071] These reports describe methods of generating siRNAs capable of specifically targeting numerous endogenously and exogenously expressed genes.

[0072] The present invention provides double-stranded oligoribonucleotides (eg. siRNAs), which down-regulate the expression of the target genes according to the present invention. An siRNA of the invention is a duplex oligoribonucleotide in which the sense strand is derived from the mRNA sequence of the target gene, and the antisense strand is complementary to the sense strand. In general, some deviation from the target mRNA sequence is tolerated without compromising the siRNA activity (see e.g. Czauderna et al., 2003, NAR 31(11), 2705-2716). An siRNA of the invention inhibits gene expression on a post-transcriptional level with or without destroying the mRNA. Without being bound by theory, siRNA may target the mRNA for specific cleavage and degradation and/or may inhibit translation from the targeted message.

[0073] According to the present invention the siRNA compounds are chemically and or structurally modified according to one of the following modifications set forth in Structures (A)-(P) or as tandem siRNA or RNAstar.

[0074] In one aspect the present invention provides a compound set forth as Structure (A):

5′(N)ₓ—Z3′ (antisense strand) (A)

3′Z′—(N′)_{y}5′ (sense strand)

wherein each of N and N′ is a nucleotide selected from an unmodified ribonucleotide, a modified ribonucleotide, an unmodified deoxyribonucleotide and a modified deoxyribonucleotide;
wherein each of (N)ₓ and (N′)_{y} is an oligonucleotide in which each consecutive N or N′ is joined to the next N or N′ by a covalent bond;
wherein each of x and y is an integer between 18 and 40;
wherein each of Z and Z′ may be present or absent, but if present is 1-5 consecutive nucleotides covalently attached at the 3′ terminus of the strand in which it is present;
wherein the sequence of (N′)_{y} is a sequence substantially complementary to (N)x; and
wherein the sequence of (N)ₓ comprises an antisense sequence substantially identical to an antisense sequence set forth in any one of Tables A-AQ.

[0075] In certain embodiments the present invention provides a compound having structure (B)

5′(N)x3′ antisense strand (B)

3′(N′)y5′ sense strand

wherein each of (N)ₓ and (N′)_{y} is an oligomer in which each consecutive N or N′ is an unmodified ribonucleotide or a modified ribonucleotide joined to the next N or N′ by a covalent bond;
wherein each of x and y=19, 21 or 23 and (N)ₓ and (N′)_{y} are fully complementary wherein alternating ribonucleotides in each of (N)ₓ and (N′)_{y} are modified to result in a 2′-O-methyl modification in the sugar residue of the ribonucleotides;
wherein the sequence of (N′)_{y} is a sequence substantially complementary to (N)x; and
wherein the sequence of (N)ₓ comprises an antisense sequence substantially identical to an antisense sequence set forth in any one of Tables A-AQ.

[0076] In some embodiments each of (N)ₓ and (N′)_{y} is independently phosphorylated or non-phosphorylated at the 3′ and 5′ termini.

[0077] In certain embodiments wherein each of x and y=19 or 23, each N at the 5′ and 3′ termini of (N)ₓ is modified; and

each N′ at the 5′ and 3′ termini of (N′)_{y} is unmodified.

[0078] In certain embodiments wherein each of x and y=21, each N at the 5′ and 3′ termini of (N)ₓ is unmodified; and

each N′ at the 5′ and 3′ termini of (N′)_{y} is modified.

[0079] In particular embodiments, when x and y=19, the siRNA is modified such that a 2′-O-methyl (2′-OMe) group is present on the first, third, fifth, seventh, ninth, eleventh, thirteenth, fifteenth, seventeenth and nineteenth nucleotide of the antisense strand (N)ₓ, and whereby the very same modification, i.e. a 2′-OMe group, is present at the second, fourth, sixth, eighth, tenth, twelfth, fourteenth, sixteenth and eighteenth nucleotide of the sense strand (N′)_{y}. In various embodiments these particular siRNA compounds are blunt ended at both termini.

[0080] In some embodiments, the present invention provides a compound having Structure (C):

5′(N)x-Z3′ antisense strand (C)

3′Z′—(N′)y5′ sense strand

wherein each of N and N′ is a nucleotide independently selected from an unmodified ribonucleotide, a modified ribonucleotide, an unmodified deoxyribonucleotide and a modified deoxyribonucleotide;
wherein each of (N)x and (N′)y is an oligomer in which each consecutive nucleotide is joined to the next nucleotide by a covalent bond and each of x and y is an integer between 18 and 40;
wherein in (N)x the nucleotides are unmodified or (N)x comprises alternating modified ribonucleotides and unmodified ribonucleotides; each modified ribonucleotide being modified so as to have a 2′-O-methyl on its sugar and the ribonucleotide located at the middle position of (N)x being modified or unmodified preferably unmodified;
wherein (N′)y comprises unmodified ribonucleotides further comprising one modified nucleotide at a terminal or penultimate position, wherein the modified nucleotide is selected from the group consisting of a mirror nucleotide, a bicyclic nucleotide, a 2′-sugar modified nucleotide, an altritol nucleotide, or a nucleotide joined to an adjacent nucleotide by an internucleotide linkage selected from a 2′-5′ phosphodiester bond, a P-alkoxy linkage or a PACE linkage;
wherein if more than one nucleotide is modified in (N′)y, the modified nucleotides may be consecutive;
wherein each of Z and Z′ may be present or absent, but if present is 1-5 deoxyribonucleotides covalently attached at the 3′ terminus of any oligomer to which it is attached;
wherein the sequence of (N′)_{y} comprises a sequence substantially complementary to (N)x; and wherein (N)ₓ comprises an antisense sequence substantially identical to an antisense sequence set forth in any one of Tables A-AQ.

[0081] In particular embodiments, x=y=19 and in (N)x each modified ribonucleotide is modified so as to have a 2′-O-methyl on its sugar and the ribonucleotide located at the middle of (N)x is unmodified. Accordingly, in a compound wherein x=19, (N)x comprises 2′-O-methyl sugar modified ribonucleotides at positions 1, 3, 5, 7, 9, 11, 13, 15, 17 and 19. In other embodiments, (N)x comprises 2′O Me modified ribonucleotides at positions 2, 4, 6, 8, 11, 13, 15, 17 and 19 and may further comprise at least one abasic or inverted abasic unconventional moiety for example in position 5. In other embodiments, (N)x comprises 2′O Me modified ribonucleotides at positions 2, 4, 8, 11, 13, 15, 17 and 19 and may further comprise at least one abasic or inverted abasic unconventional moiety for example in position 6. In other embodiments, (N)x comprises 2′O Me modified ribonucleotides at positions 2, 4, 6, 8, 11, 13, 17 and 19 and may further comprise at least one abasic or inverted abasic unconventional moiety for example in position 15. In other embodiments, (N)x comprises 2′O Me modified ribonucleotides at positions 2, 4, 6, 8, 11, 13, 15, 17 and 19 and may further comprise at least one abasic or inverted abasic unconventional moiety for example in position 14. In other embodiments, (N)x comprises 2′O Me modified ribonucleotides at positions 1, 2, 3, 7, 9, 11, 13, 15, 17 and 19 and may further comprise at least one abasic or inverted abasic unconventional moiety for example in position 5. In other embodiments, (N)x comprises 2′O Me modified ribonucleotides at positions 1, 2, 3, 5, 7, 9, 11, 13, 15, 17 and 19 and may further comprise at least one abasic or inverted abasic unconventional moiety for example in position 6. In other embodiments, (N)x comprises 2′O Me modified ribonucleotides at positions 1, 2, 3, 5, 7, 9, 11, 13, 17 and 19 and may further comprise at least one abasic or inverted abasic unconventional moiety for example in position 15. In other embodiments, (N)x comprises 2′O Me modified ribonucleotides at positions 1, 2, 3, 5, 7, 9, 11, 13, 15, 17 and 19 and may further comprise at least one abasic or inverted abasic unconventional moiety for example in position 14. In other embodiments, (N)x comprises 2′O Me modified ribonucleotides at positions 2, 4, 6, 7, 9, 11, 13, 15, 17 and 19 and may further comprise at least one abasic or inverted abasic unconventional moiety for example in position 5. In other embodiments, (N)x comprises 2′O Me modified ribonucleotides at positions 1, 2, 4, 6, 7, 9, 11, 13, 15, 17 and 19 and may further comprise at least one abasic or inverted abasic unconventional moiety for example in position 5. In other embodiments, (N)x comprises 2′O Me modified ribonucleotides at positions 2, 4, 6, 8, 11, 13, 14, 16, 17 and 19 and may further comprise at least one abasic or inverted abasic unconventional moiety for example in position 15. In other embodiments, (N)x comprises 2′O Me modified ribonucleotides at positions 1, 2, 3, 5, 7, 9, 11, 13, 14, 16, 17 and 19 and may further comprise at least one abasic or inverted abasic unconventional moiety for example in position 15. In other embodiments, (N)x comprises 2′O Me modified ribonucleotides at positions 2, 4, 6, 8, 11, 13, 15, 17 and 19 and may further comprise at least one abasic or inverted abasic unconventional moiety for example in position 7. In other embodiments, (N)x comprises 2′O Me modified ribonucleotides at positions 2, 4, 6, 11, 13, 15, 17 and 19 and may further comprise at least one abasic or inverted abasic unconventional moiety for example in position 8. In other embodiments, (N)x comprises 2′O Me modified ribonucleotides at positions 2, 4, 6, 8, 11, 13, 15, 17 and 19 and may further comprise at least one abasic or inverted abasic unconventional moiety for example in position 9. In other embodiments, (N)x comprises 2′O Me modified ribonucleotides at positions 2, 4, 6, 8, 11, 13, 15, 17 and 19 and may further comprise at least one abasic or inverted abasic unconventional moiety for example in position 10. In other embodiments, (N)x comprises 2′O Me modified ribonucleotides at positions 2, 4, 6, 8, 13, 15, 17 and 19 and may further comprise at least one abasic or inverted abasic unconventional moiety for example in position 11. In other embodiments, (N)x comprises 2′O Me modified ribonucleotides at positions 2, 4, 6, 8, 11, 13, 15, 17 and 19 and may further comprise at least one abasic or inverted abasic unconventional moiety for example in position 12. In other embodiments, (N)x comprises 2′O Me modified ribonucleotides at positions 2, 4, 6, 8, 11, 15, 17 and 19 and may further comprise at least one abasic or inverted abasic unconventional moiety for example in position 13.

[0082] In yet other embodiments (N)x comprises at least one nucleotide mismatch relative to the one of the SOX9, ASPP1, CTSD, CAPNS1, FAS and FAS ligand genes. In certain preferred embodiments, (N)x comprises a single nucleotide mismatch on position 5, 6, or 14. In one embodiment of Structure (C), at least two nucleotides at either or both the 5′ and 3′ termini of (N′)y are joined by a 2′-5′ phosphodiester bond. In certain preferred embodiments x=y=19 or x=y=23; in (N)x the nucleotides alternate between modified ribonucleotides and unmodified ribonucleotides, each modified ribonucleotide being modified so as to have a 2′-O-methyl on its sugar and the ribonucleotide located at the middle of (N)x being unmodified; and three nucleotides at the 3′ terminus of (N′)y are joined by two 2′-5′ phosphodiester bonds (set forth herein as Structure I). In other preferred embodiments, x=y=19 or x=y=23; in (N)x the nucleotides alternate between modified ribonucleotides and unmodified ribonucleotides, each modified ribonucleotide being modified so as to have a 2′-O-methyl on its sugar and the ribonucleotide located at the middle of (N)x being unmodified; and four consecutive nucleotides at the 5′ terminus of (N′)y are joined by three 2′-5′ phosphodiester bonds. In a further embodiment, an additional nucleotide located in the middle position of (N)y may be modified with 2′-O-methyl on its sugar. In another preferred embodiment, in (N)x the nucleotides alternate between 2′-O-methyl modified ribonucleotides and unmodified ribonucleotides, and in (N′)y four consecutive nucleotides at the 5′ terminus are joined by three 2′-5′ phosphodiester bonds and the 5′ terminal nucleotide or two or three consecutive nucleotides at the 5′ terminus comprise 3′-O-methyl modifications.

[0083] In certain preferred embodiments of Structure C, x=y=19 and in (N′)y, at least one position comprises an abasic or inverted abasic unconventional moiety, preferably five positions comprises an abasic or inverted abasic unconventional moieties. In various embodiments, the following positions comprise an abasic or inverted abasic: positions 1 and 16-19, positions 15-19, positions 1-2 and 17-19, positions 1-3 and 18-19, positions 1-4 and 19 and positions 1-5. (N′)y may further comprise at least one LNA nucleotide.

[0084] In certain preferred embodiments of Structure C, x=y=19 and in (N′)y the nucleotide in at least one position comprises a mirror nucleotide, a deoxyribonucleotide and a nucleotide joined to an adjacent nucleotide by a 2′-5′ internucleotide bond.

[0085] In certain preferred embodiments of Structure C, x=y=19 and (N′)y comprises a mirror nucleotide. In various embodiments the mirror nucleotide is an L-DNA nucleotide. In certain embodiments the L-DNA is L-deoxyribocytidine. In some embodiments (N′)y comprises L-DNA at position 18. In other embodiments (N′)y comprises L-DNA at positions 17 and 18. In certain embodiments (N′)y comprises L-DNA substitutions at positions 2 and at one or both of positions 17 and 18. In certain embodiments (N′)y further comprises a 5′ terminal cap nucleotide such as 5′-O-methyl DNA or an abasic or inverted abasic moiety as an overhang.

[0086] In yet other embodiments (N′)y comprises a DNA at position 15 and L-DNA at one or both of positions 17 and 18. In that structure, position 2 may further comprise an L-DNA or an abasic unconventional moiety.

[0087] Other embodiments of Structure C are envisaged wherein x=y=21 or wherein x=y=23; in these embodiments the modifications for (N′)y discussed above instead of being on positions 15, 16, 17, 18 are on positions 17, 18, 19, 20 for 21 mer and on positions 19, 20, 21, 22 for 23 mer; similarly the modifications at one or both of positions 17 and 18 are on one or both of positions 19 or 20 for the 21 mer and one or both of positions 21 and 22 for the 23 mer. All modifications in the 19 mer are similarly adjusted for the 21 and 23 mers.

[0088] According to various embodiments of Structure (C), in (N′)y 2, 3, 4, 5, 6, 7, 8, 9, 10, 11, 12, 13 or 14 consecutive ribonucleotides at the 3′ terminus are linked by 2′-5′ internucleotide linkages In one preferred embodiment, four consecutive nucleotides at the 3′ terminus of (N′)y are joined by three 2′-5′ phosphodiester bonds, wherein one or more of the 2′-5′ nucleotides which form the 2′-5′ phosphodiester bonds further comprises a 3′-O-methyl sugar modification. Preferably the 3′ terminal nucleotide of (N′)y comprises a 2′-O-methyl sugar modification. In certain preferred embodiments of Structure C, x=y=19 and in (N′)y two or more consecutive nucleotides at positions 15, 16, 17, 18 and 19 comprise a nucleotide joined to an adjacent nucleotide by a 2′-5′ internucleotide bond. In various embodiments the nucleotide forming the 2′-5′ internucleotide bond comprises a 3′ deoxyribose nucleotide or a 3′ methoxy nucleotide. In some embodiments the nucleotides at positions 17 and 18 in (N′)y are joined by a 2′-5′ internucleotide bond. In other embodiments the nucleotides at positions 16, 17, 18, 16-17, 17-18, or 16-18 in (N′)y are joined by a 2′-5′ internucleotide bond.

[0089] In certain embodiments (N′)y comprises an L-DNA at position 2 and 2′-5′ internucleotide bonds at positions 16-17, 17-18, or 16-18. In certain embodiments (N′)y comprises 2′-5′ internucleotide bonds at positions 16-17, 17-18, or 16-18 and a 5′ terminal cap nucleotide.

[0090] According to various embodiments of Structure (C), in (N′)y 2, 3, 4, 5, 6, 7, 8, 9, 10, 11, 12, 13 or 14 consecutive nucleotides at either terminus or 2-8 modified nucleotides at each of the 5′ and 3′ termini are independently mirror nucleotides. In some embodiments the mirror nucleotide is an L-ribonucleotide. In other embodiments the mirror nucleotide is an L-deoxyribonucleotide. The mirror nucleotide may further be modified at the sugar or base moiety or in an internucleotide linkage.

[0091] In one preferred embodiment of Structure (C), the 3′ terminal nucleotide or two or three consecutive nucleotides at the 3′ terminus of (N′)y are L-deoxyribonucleotides.

[0092] In other embodiments of Structure (C), in (N′)y 2, 3, 4, 5, 6, 7, 8, 9, 10, 11, 12, 13 or 14 consecutive ribonucleotides at either terminus or 2-8 modified nucleotides at each of the 5′ and 3′ termini are independently 2′ sugar modified nucleotides. In some embodiments the 2′ sugar modification comprises the presence of an amino, a fluoro, an alkoxy or an alkyl moiety. In certain embodiments the 2′ sugar modification comprises a methoxy moiety (2′-OMe). In one series of preferred embodiments, three, four or five consecutive nucleotides at the 5′ terminus of (N′)y comprise the 2′-OMe modification. In another preferred embodiment, three consecutive nucleotides at the 3′ terminus of (N′)y comprise the 2′-O-methyl modification.

[0093] In some embodiments of Structure (C), in (N′)y 2, 3, 4, 5, 6, 7, 8, 9, 10, 11, 12, 13 or 14 consecutive ribonucleotides at either or 2-8 modified nucleotides at each of the 5′ and 3′ termini are independently bicyclic nucleotide. In various embodiments the bicyclic nucleotide is a locked nucleic acid (LNA). A 2′-O, 4′-C-ethylene-bridged nucleic acid (ENA) is a species of LNA (see below).

[0094] In various embodiments (N′)y comprises modified nucleotides at the 5′ terminus or at both the 3′ and 5′ termini.

[0095] In some embodiments of Structure (C), at least two nucleotides at either or both the 5′ and 3′ termini of (N′)y are joined by P-ethoxy backbone modifications. In certain preferred embodiments x=y=19 or x=y=23; in (N)x the nucleotides alternate between modified ribonucleotides and unmodified ribonucleotides, each modified ribonucleotide being modified so as to have a 2′-O-methyl on its sugar and the ribonucleotide located at the middle position of (N)x being unmodified; and four consecutive nucleotides at the 3′ terminus or at the 5′ terminus of (N′)y are joined by three P-ethoxy backbone modifications. In another preferred embodiment, three consecutive nucleotides at the 3′ terminus or at the 5′ terminus of (N′)y are joined by two P-ethoxy backbone modifications.

[0096] In some embodiments of Structure (C), in (N′)y 2, 3, 4, 5, 6, 7 or 8, consecutive ribonucleotides at each of the 5′ and 3′ termini are independently mirror nucleotides, nucleotides joined by 2′-5′ phosphodiester bond, 2′ sugar modified nucleotides or bicyclic nucleotide. In one embodiment, the modification at the 5′ and 3′ termini of (N′)y is identical. In one preferred embodiment, four consecutive nucleotides at the 5′ terminus of (N′)y are joined by three 2′-5′ phosphodiester bonds and three consecutive nucleotides at the 3′ terminus of (N′)y are joined by two 2′-5′ phosphodiester bonds. In another embodiment, the modification at the 5′ terminus of (N′)y is different from the modification at the 3′ terminus of (N′)y. In one specific embodiment, the modified nucleotides at the 5′ terminus of (N′)y are mirror nucleotides and the modified nucleotides at the 3′ terminus of (N′)y are joined by 2′-5′ phosphodiester bond. In another specific embodiment, three consecutive nucleotides at the 5′ terminus of (N′)y are LNA nucleotides and three consecutive nucleotides at the 3′ terminus of (N′)y are joined by two 2′-5′ phosphodiester bonds. In (N)x the nucleotides alternate between modified ribonucleotides and unmodified ribonucleotides, each modified ribonucleotide being modified so as to have a 2′-O-methyl on its sugar and the ribonucleotide located at the middle of (N)x being unmodified, or the ribonucleotides in (N)x being unmodified

[0097] In another embodiment of Structure (C), the present invention provides a compound wherein x=y=19 or x=y=23; in (N)x the nucleotides alternate between modified ribonucleotides and unmodified ribonucleotides, each modified ribonucleotide being modified so as to have a 2′-O-methyl on its sugar and the ribonucleotide located at the middle of (N)x being unmodified; three nucleotides at the 3′ terminus of (N′)y are joined by two 2′-5′ phosphodiester bonds and three nucleotides at the 5′ terminus of (N′)y are LNA such as ENA.

[0098] In another embodiment of Structure (C), five consecutive nucleotides at the 5′ terminus of (N′)y comprise the 2′-O-methyl sugar modification and two consecutive nucleotides at the 3′ terminus of (N′)y are L-DNA.

[0099] In yet another embodiment, the present invention provides a compound wherein x=y=19 or x=y=23; (N)x consists of unmodified ribonucleotides; three consecutive nucleotides at the 3′ terminus of (N′)y are joined by two 2′-5′ phosphodiester bonds and three consecutive nucleotides at the 5′ terminus of (N′)y are LNA such as ENA.

[0100] According to other embodiments of Structure (C), in (N′)y the 5′ or 3′ terminal nucleotide, or 2, 3, 4, 5 or 6 consecutive nucleotides at either termini or 1-4 modified nucleotides at each of the 5′ and 3′ termini are independently phosphonocarboxylate or phosphinocarboxylate nucleotides (PACE nucleotides). In some embodiments the PACE nucleotides are deoxyribonucleotides. In some preferred embodiments in (N′)y, 1 or 2 consecutive nucleotides at each of the 5′ and 3′ termini are PACE nucleotides.

[0101] In additional embodiments, the present invention provides a compound having Structure (D):

5′(N)x-Z3′ antisense strand (D)

3′Z′—(N′)y5′ sense strand

wherein each of N and N′ is a nucleotide selected from an unmodified ribonucleotide, a modified ribonucleotide, an unmodified deoxyribonucleotide or a modified deoxyribonucleotide;
wherein each of (N)x and (N′)y is an oligomer in which each consecutive nucleotide is joined to the next nucleotide by a covalent bond and each of x and y is an integer between 18 and 40;
wherein (N)x comprises unmodified ribonucleotides further comprising one modified nucleotide at the 3′ terminal or penultimate position, wherein the modified nucleotide is selected from the group consisting of a bicyclic nucleotide, a 2′ sugar modified nucleotide, a mirror nucleotide, an altritol nucleotide, or a nucleotide joined to an adjacent nucleotide by an internucleotide linkage selected from a 2′-5′ phosphodiester bond, a P-alkoxy linkage or a PACE linkage;
wherein (N′)y comprises unmodified ribonucleotides further comprising one modified nucleotide at the 5′ terminal or penultimate position, wherein the modified nucleotide is selected from the group consisting of a bicyclic nucleotide, a 2′ sugar modified nucleotide, a mirror nucleotide, an altritol nucleotide, or a nucleotide joined to an adjacent nucleotide by an internucleotide linkage selected from a 2′-5′ phosphodiester bond, a P-alkoxy linkage or a PACE linkage;
wherein in each of (N)x and (N′)y modified and unmodified nucleotides are not alternating;
wherein each of Z and Z′ may be present or absent, but if present is 1-5 deoxyribonucleotides covalently attached at the 3′ terminus of any oligomer to which it is attached;
wherein the sequence of (N′)_{y} is a sequence substantially complementary to (N)x; and
wherein (N)ₓ comprises an antisense sequence substantially identical to an antisense sequence set forth in any one of Tables A-AQ.

[0102] In one embodiment of Structure (D), x=y=19 or x=y=23; (N)x comprises unmodified ribonucleotides in which two consecutive nucleotides linked by one 2′-5′ internucleotide linkage at the 3′ terminus; and (N′)y comprises unmodified ribonucleotides in which two consecutive nucleotides linked by one 2′-5′ internucleotide linkage at the 5′ terminus.

[0103] In some embodiments, x=y=19 or x=y=23; (N)x comprises unmodified ribonucleotides in which three consecutive nucleotides at the 3′ terminus are joined together by two 2′-5′ phosphodiester bonds; and (N′)y comprises unmodified ribonucleotides in which four consecutive nucleotides at the 5′ terminus are joined together by three 2′-5′ phosphodiester bonds (set forth herein as Structure II).

[0104] According to various embodiments of Structure (D) 2, 3, 4, 5, 6, 7, 8, 9, 10, 11, 12, 13 or 14 consecutive ribonucleotides starting at the ultimate or penultimate position of the 3′ terminus of (N)x and 2, 3, 4, 5, 6, 7, 8, 9, 10, 11, 12, 13 or 14 consecutive ribonucleotides starting at the ultimate or penultimate position of the 5′ terminus of (N′)y are linked by 2′-5′ internucleotide linkages.

[0105] According to one preferred embodiment of Structure (D), four consecutive nucleotides at the 5′ terminus of (N′)y are joined by three 2′-5′ phosphodiester bonds and three consecutive nucleotides at the 3′ terminus of (N′)x are joined by two 2′-5′ phosphodiester bonds. Three nucleotides at the 5′ terminus of (N′)y and two nucleotides at the 3′ terminus of (N′)x may also comprise 3′-O-methyl modifications.

[0106] According to various embodiments of Structure (D), 2, 3, 4, 5, 6, 7, 8, 9, 10, 11, 12, 13 or 14 consecutive nucleotides starting at the ultimate or penultimate position of the 3′ terminus of (N)x and 2, 3, 4, 5, 6, 7, 8, 9, 10, 11, 12, 13 or 14 consecutive ribonucleotides starting at the ultimate or penultimate position of the 5′ terminus of (N′)y are independently mirror nucleotides. In some embodiments the mirror is an L-ribonucleotide. In other embodiments the mirror nucleotide is L-deoxyribonucleotide.

[0107] In other embodiments of Structure (D), 2, 3, 4, 5, 6, 7, 8, 9, 10, 11, 12, 13 or 14 consecutive ribonucleotides starting at the ultimate or penultimate position of the 3′ terminus of (N)x and 2, 3, 4, 5, 6, 7, 8, 9, 10, 11, 12, 13 or 14 consecutive ribonucleotides starting at the ultimate or penultimate position of the 5′ terminus of (N′)y are independently 2′ sugar modified nucleotides. In some embodiments the 2′ sugar modification comprises the presence of an amino, a fluoro, an alkoxy or an alkyl moiety. In certain embodiments the 2′ sugar modification comprises a methoxy moiety (2′-OMe).

[0108] In one preferred embodiment of Structure (D), five consecutive nucleotides at the 5′ terminus of (N′)y comprise the 2′-O-methyl modification and five consecutive nucleotides at the 3′ terminus of (N′)x comprise the 2′-O-methyl modification. In another preferred embodiment of Structure (D), ten consecutive nucleotides at the 5′ terminus of (N′)y comprise the 2′-O-methyl modification and five consecutive nucleotides at the 3′ terminus of (N′)x comprise the 2′-O-methyl modification. In another preferred embodiment of Structure (D), thirteen consecutive nucleotides at the 5′ terminus of (N′)y comprise the 2′-O-methyl modification and five consecutive nucleotides at the 3′ terminus of (N′)x comprise the 2′-O-methyl modification.

[0109] In some embodiments of Structure (D), in (N′)y 2, 3, 4, 5, 6, 7, 8, 9, 10, 11, 12, 13 or 14 consecutive ribonucleotides starting at the ultimate or penultimate position of the 3′ terminus of (N)x and 2, 3, 4, 5, 6, 7, 8, 9, 10, 11, 12, 13 or 14 consecutive ribonucleotides starting at the ultimate or penultimate position of the 5′ terminus of (N′)y are independently a bicyclic nucleotide. In various embodiments the bicyclic nucleotide is a locked nucleic acid (LNA) such as a 2′-O, 4′-C-ethylene-bridged nucleic acid (ENA).

[0110] In various embodiments of Structure (D), (N′)y comprises a modified nucleotide selected from a bicyclic nucleotide, a 2′ sugar modified nucleotide, a mirror nucleotide, an altritol nucleotide or a nucleotide joined to an adjacent nucleotide by an internucleotide linkage selected from a 2′-5′ phosphodiester bond, a P-alkoxy linkage or a PACE linkage;

[0111] In various embodiments of Structure (D), (N)x comprises a modified nucleotide selected from a bicyclic nucleotide, a 2′ sugar modified nucleotide, a mirror nucleotide, an altritol nucleotide or a nucleotide joined to an adjacent nucleotide by an internucleotide linkage selected from a 2′-5′ phosphodiester bond, a P-alkoxy linkage or a PACE linkage;

[0112] In embodiments wherein each of the 3′ and 5′ termini of the same strand comprises a modified nucleotide, the modification at the 5′ and 3′ termini is identical. In another embodiment, the modification at the 5′ terminus is different from the modification at the 3′ terminus of the same strand. In one specific embodiment, the modified nucleotides at the 5′ terminus are mirror nucleotides and the modified nucleotides at the 3′ terminus of the same strand are joined by 2′-5′ phosphodiester bond.

[0113] In one specific embodiment of Structure (D), five consecutive nucleotides at the 5′ terminus of (N′)y comprise the 2′-O-methyl modification and two consecutive nucleotides at the 3′ terminus of (N′)y are L-DNA. In addition, the compound may further comprise five consecutive 2′-O-methyl modified nucleotides at the 3′ terminus of (N′)x.

[0114] In various embodiments of Structure (D), the modified nucleotides in (N)x are different from the modified nucleotides in (N′)y. For example, the modified nucleotides in (N)x are 2′ sugar modified nucleotides and the modified nucleotides in (N′)y are nucleotides linked by 2′-5′ internucleotide linkages. In another example, the modified nucleotides in (N)x are mirror nucleotides and the modified nucleotides in (N′)y are nucleotides linked by 2′-5′ internucleotide linkages. In another example, the modified nucleotides in (N)x are nucleotides linked by 2′-5′ internucleotide linkages and the modified nucleotides in (N′)y are mirror nucleotides.

[0115] In additional embodiments, the present invention provides a compound having Structure (E):

5′(N)x-Z3′ antisense strand (E)

3′Z′—(N′)y5′ sense strand

wherein each of N and N′ is a nucleotide selected from an unmodified ribonucleotide, a modified ribonucleotide, an unmodified deoxyribonucleotide or a modified deoxyribonucleotide;
wherein each of (N)x and (N′)y is an oligomer in which each consecutive nucleotide is joined to the next nucleotide by a covalent bond and each of x and y is an integer between 18 and 40;
wherein (N)x comprises unmodified ribonucleotides further comprising one modified nucleotide at the 5′ terminal or penultimate position, wherein the modified nucleotide is selected from the group consisting of a bicyclic nucleotide, a 2′ sugar modified nucleotide, a mirror nucleotide, an altritol nucleotide, or a nucleotide joined to an adjacent nucleotide by an internucleotide linkage selected from a 2′-5′ phosphodiester bond, a P-alkoxy linkage or a PACE linkage;
wherein (N′)y comprises unmodified ribonucleotides further comprising one modified nucleotide at the 3′ terminal or penultimate position, wherein the modified nucleotide is selected from the group consisting of a bicyclic nucleotide, a 2′ sugar modified nucleotide, a mirror nucleotide, an altritol nucleotide, or a nucleotide joined to an adjacent nucleotide by an internucleotide linkage selected from a 2′-5′ phosphodiester bond, a P-alkoxy linkage or a PACE linkage;
wherein in each of (N)x and (N′)y modified and unmodified nucleotides are not alternating;
wherein each of Z and Z′ may be present or absent, but if present is 1-5 deoxyribonucleotides covalently attached at the 3′ terminus of any oligomer to which it is attached;
wherein the sequence of (N′)_{y} is a sequence substantially complementary to (N)x; and
wherein the sequence of (N)ₓ comprises an antisense sequence substantially identical to an antisense sequence set forth in any one of Tables A-AQ.

[0116] In certain preferred embodiments the ultimate nucleotide at the 5′ terminus of (N)x is unmodified.

[0117] According to various embodiments of Structure (E) 2, 3, 4, 5, 6, 7, 8, 9, 10, 11, 12, 13 or 14 consecutive ribonucleotides starting at the ultimate or penultimate position of the 5′ terminus of (N)x, preferably starting at the 5′ penultimate position, and 2, 3, 4, 5, 6, 7, 8, 9, 10, 11, 12, 13 or 14 consecutive ribonucleotides starting at the ultimate or penultimate position of the 3′ terminus of (N′)y are linked by 2′-5′ internucleotide linkages.

[0118] According to various embodiments of Structure (E), 2, 3, 4, 5, 6, 7, 8, 9, 10, 11, 12, 13 or 14 consecutive nucleotides starting at the ultimate or penultimate position of the 5′ terminus of (N)x, preferably starting at the 5′ penultimate position, and 2, 3, 4, 5, 6, 7, 8, 9, 10, 11, 12, 13 or 14 consecutive nucleotides starting at the ultimate or penultimate position of the 3′ terminus of (N′)y are independently mirror nucleotides. In some embodiments the mirror is an L-ribonucleotide. In other embodiments the mirror nucleotide is L-deoxyribonucleotide.

[0119] In other embodiments of Structure (E), 2, 3, 4, 5, 6, 7, 8, 9, 10, 11, 12, 13 or 14 consecutive ribonucleotides starting at the ultimate or penultimate position of the 5′ terminus of (N)x, preferably starting at the 5′ penultimate position, and 2, 3, 4, 5, 6, 7, 8, 9, 10, 11, 12, 13 or 14 consecutive ribonucleotides starting at the ultimate or penultimate position of the 3′ terminus of (N′)y are independently 2′ sugar modified nucleotides. In some embodiments the 2′ sugar modification comprises the presence of an amino, a fluoro, an alkoxy or an alkyl moiety. In certain embodiments the 2′ sugar modification comprises a methoxy moiety (2′-OMe).

[0120] In some embodiments of Structure (E), in (N′)y 2, 3, 4, 5, 6, 7, 8, 9, 10, 11, 12, 13 or 14 consecutive ribonucleotides starting at the ultimate or penultimate position of the 5′ terminus of (N)x, preferably starting at the 5′ penultimate position, and 2, 3, 4, 5, 6, 7, 8, 9, 10, 11, 12, 13 or 14 consecutive ribonucleotides starting at the ultimate or penultimate position of the 3′ terminus of (N′)y are independently a bicyclic nucleotide. In various embodiments the bicyclic nucleotide is a locked nucleic acid (LNA) such as a 2′-O, 4′-C-ethylene-bridged nucleic acid (ENA).

[0121] In various embodiments of Structure (E), (N′)y comprises modified nucleotides selected from a bicyclic nucleotide, a 2′ sugar modified nucleotide, a mirror nucleotide, an altritol nucleotide, a nucleotide joined to an adjacent nucleotide by a P-alkoxy backbone modification or a nucleotide joined to an adjacent nucleotide by an internucleotide linkage selected from a 2′-5′ phosphodiester bond, a P-alkoxy linkage or a PACE linkage at the 3′ terminus or at each of the 3′ and 5′ termini.

[0122] In various embodiments of Structure (E), (N)x comprises a modified nucleotide selected from a bicyclic nucleotide, a 2′ sugar modified nucleotide, a mirror nucleotide, an altritol nucleotide, or a nucleotide joined to an adjacent nucleotide by an internucleotide linkage selected from a 2′-5′ phosphodiester bond, a P-alkoxy linkage or a PACE linkage at the 5′ terminus or at each of the 3′ and 5′ termini.

[0123] In one embodiment where both 3′ and 5′ termini of the same strand comprise a modified nucleotide, the modification at the 5′ and 3′ termini is identical. In another embodiment, the modification at the 5′ terminus is different from the modification at the 3′ terminus of the same strand. In one specific embodiment, the modified nucleotides at the 5′ terminus are mirror nucleotides and the modified nucleotides at the 3′ terminus of the same strand are joined by 2′-5′ phosphodiester bond.

[0124] In various embodiments of Structure (E), the modified nucleotides in (N)x are different from the modified nucleotides in (N′)y. For example, the modified nucleotides in (N)x are 2′ sugar modified nucleotides and the modified nucleotides in (N′)y are nucleotides linked by 2′-5′ internucleotide linkages. In another example, the modified nucleotides in (N)x are mirror nucleotides and the modified nucleotides in (N′)y are nucleotides linked by 2′-5′ internucleotide linkages. In another example, the modified nucleotides in (N)x are nucleotides linked by 2′-5′ internucleotide linkages and the modified nucleotides in (N′)y are mirror nucleotides.

[0125] In additional embodiments, the present invention provides a compound having Structure (F):

5′(N)x-Z3′ antisense strand (F)

3′Z′—(N′)y5′ sense strand

wherein each of N and N′ is a nucleotide selected from an unmodified ribonucleotide, a modified ribonucleotide, an unmodified deoxyribonucleotide or a modified deoxyribonucleotide;
wherein each of (N)x and (N′)y is an oligomer in which each consecutive nucleotide is joined to the next nucleotide by a covalent bond and each of x and y is an integer between 18 and 40;
wherein each of (N)x and (N′)y comprise unmodified ribonucleotides in which each of (N)x and (N′)y independently comprise one modified nucleotide at the 3′ terminal or penultimate position wherein the modified nucleotide is selected from the group consisting of a bicyclic nucleotide, a 2′ sugar modified nucleotide, a mirror nucleotide, a nucleotide joined to an adjacent nucleotide by a P-alkoxy backbone modification or a nucleotide joined to an adjacent nucleotide by a 2′-5′ phosphodiester bond;
wherein in each of (N)x and (N′)y modified and unmodified nucleotides are not alternating;
wherein each of Z and Z′ may be present or absent, but if present is 1-5 deoxyribonucleotides covalently attached at the 3′ terminus of any oligomer to which it is attached;
wherein the sequence of (N′)_{y} is a sequence substantially complementary to (N)x; and
wherein the sequence of (N)ₓ comprises an antisense sequence substantially identical to an antisense sequence set forth in any one of Tables A-AQ.

[0126] In some embodiments of Structure (F), x=y=19 or x=y=23; (N′)y comprises unmodified ribonucleotides in which two consecutive nucleotides at the 3′ terminus comprises two consecutive mirror deoxyribonucleotides; and (N)x comprises unmodified ribonucleotides in which one nucleotide at the 3′ terminus comprises a mirror deoxyribonucleotide (set forth as Structure III).

[0127] According to various embodiments of Structure (F) 2, 3, 4, 5, 6, 7, 8, 9, 10, 11, 12, 13 or 14 consecutive ribonucleotides independently beginning at the ultimate or penultimate position of the 3′ termini of (N)x and (N′)y are linked by 2′-5′ internucleotide linkages.

[0128] According to one preferred embodiment of Structure (F), three consecutive nucleotides at the 3′ terminus of (N′)y are joined by two 2′-5′ phosphodiester bonds and three consecutive nucleotides at the 3′ terminus of (N′)x are joined by two 2′-5′ phosphodiester bonds.

[0129] According to various embodiments of Structure (F), 2, 3, 4, 5, 6, 7, 8, 9, 10, 11, 12, 13 or 14 consecutive nucleotides independently beginning at the ultimate or penultimate position of the 3′ termini of (N)x and (N′)y are independently mirror nucleotides. In some embodiments the mirror nucleotide is an L-ribonucleotide. In other embodiments the mirror nucleotide is an L-deoxyribonucleotide.

[0130] In other embodiments of Structure (F), 2, 3, 4, 5, 6, 7, 8, 9, 10, 11, 12, 13 or 14 consecutive ribonucleotides independently beginning at the ultimate or penultimate position of the 3′ termini of (N)x and (N′)y are independently 2′ sugar modified nucleotides. In some embodiments the 2′ sugar modification comprises the presence of an amino, a fluoro, an alkoxy or an alkyl moiety. In certain embodiments the 2′ sugar modification comprises a methoxy moiety (2′-OMe).

[0131] In some embodiments of Structure (F), 2, 3, 4, 5, 6, 7, 8, 9, 10, 11, 12, 13 or 14 consecutive ribonucleotides independently beginning at the ultimate or penultimate position of the 3′ termini of (N)x and (N′)y are independently a bicyclic nucleotide. In various embodiments the bicyclic nucleotide is a locked nucleic acid (LNA) such as a 2′-O, 4′-C-ethylene-bridged nucleic acid (ENA).

[0132] In various embodiments of Structure (F), (N′)y comprises a modified nucleotide selected from a bicyclic nucleotide, a 2′ sugar modified nucleotide, a mirror nucleotide, an altritol nucleotide, or a nucleotide joined to an adjacent nucleotide by an internucleotide linkage selected from a 2′-5′ phosphodiester bond, a P-alkoxy linkage or a PACE linkage at the 3′ terminus or at both the 3′ and 5′ termini.

[0133] In various embodiments of Structure (F), (N)x comprises a modified nucleotide selected from a bicyclic nucleotide, a 2′ sugar modified nucleotide, a mirror nucleotide, an altritol nucleotide, or a nucleotide joined to an adjacent nucleotide by an internucleotide linkage selected from a 2′-5′ phosphodiester bond, a P-alkoxy linkage or a PACE linkage at the 3′ terminus or at each of the 3′ and 5′ termini.

[0134] In one embodiment where each of 3′ and 5′ termini of the same strand comprise a modified nucleotide, the modification at the 5′ and 3′ termini is identical. In another embodiment, the modification at the 5′ terminus is different from the modification at the 3′ terminus of the same strand. In one specific embodiment, the modified nucleotides at the 5′ terminus are mirror nucleotides and the modified nucleotides at the 3′ terminus of the same strand are joined by 2′-5′ phosphodiester bond.

[0135] In various embodiments of Structure (F), the modified nucleotides in (N)x are different from the modified nucleotides in (N′)y. For example, the modified nucleotides in (N)x are 2′ sugar modified nucleotides and the modified nucleotides in (N′)y are nucleotides linked by 2′-5′ internucleotide linkages. In another example, the modified nucleotides in (N)x are mirror nucleotides and the modified nucleotides in (N′)y are nucleotides linked by 2′-5′ internucleotide linkages. In another example, the modified nucleotides in (N)x are nucleotides linked by 2′-5′ internucleotide linkages and the modified nucleotides in (N′)y are mirror nucleotides.

[0136] In additional embodiments, the present invention provides a compound having Structure (G):

5′(N)x-Z3′ antisense strand (G)

3′Z′—(N′)y5′ sense strand

wherein each of N and N′ is a nucleotide selected from an unmodified ribonucleotide, a modified ribonucleotide, an unmodified deoxyribonucleotide or a modified deoxyribonucleotide;
wherein each of (N)x and (N′)y is an oligomer in which each consecutive nucleotide is joined to the next nucleotide by a covalent bond and each of x and y is an integer between 18 and 40;
wherein each of (N)x and (N′)y comprise unmodified ribonucleotides in which each of (N)x and (N′)y independently comprise one modified nucleotide at the 5′ terminal or penultimate position wherein the modified nucleotide is selected from the group consisting of a bicyclic nucleotide, a 2′ sugar modified nucleotide, a mirror nucleotide, a nucleotide joined to an adjacent nucleotide by a P-alkoxy backbone modification or a nucleotide joined to an adjacent nucleotide by a 2′-5′ phosphodiester bond;
wherein for (N)x the modified nucleotide is preferably at penultimate position of the 5′ terminal;
wherein in each of (N)x and (N′)y modified and unmodified nucleotides are not alternating;
wherein each of Z and Z′ may be present or absent, but if present is 1-5 deoxyribonucleotides covalently attached at the 3′ terminus of any oligomer to which it is attached;
wherein the sequence of (N′)_{y} is a sequence substantially complementary to (N)x; and
wherein the sequence of (N)ₓ comprises an antisense sequence substantially identical to an antisense sequence set forth in any one of Tables A-AQ.

[0137] In some embodiments of Structure (G), x=y=19 or x=y=23.

[0138] According to various embodiments of Structure (G) 2, 3, 4, 5, 6, 7, 8, 9, 10, 11, 12, 13 or 14 consecutive ribonucleotides independently beginning at the ultimate or penultimate position of the 5′ termini of (N)x and (N′)y are linked by 2′-5′ internucleotide linkages. For (N)x the modified nucleotides preferably starting at the penultimate position of the 5′ terminal.

[0139] According to various embodiments of Structure (G), 2, 3, 4, 5, 6, 7, 8, 9, 10, 11, 12, 13 or 14 consecutive nucleotides independently beginning at the ultimate or penultimate position of the 5′ termini of (N)x and (N′)y are independently mirror nucleotides. In some embodiments the mirror nucleotide is an L-ribonucleotide. In other embodiments the mirror nucleotide is an L-deoxyribonucleotide. For (N)x the modified nucleotides preferably starting at the penultimate position of the 5′ terminal.

[0140] In other embodiments of Structure (G), 2, 3, 4, 5, 6, 7, 8, 9, 10, 11, 12, 13 or 14 consecutive ribonucleotides independently beginning at the ultimate or penultimate position of the 5′ termini of (N)x and (N′)y are independently 2′ sugar modified nucleotides. In some embodiments the 2′ sugar modification comprises the presence of an amino, a fluoro, an alkoxy or an alkyl moiety. In certain embodiments the 2′ sugar modification comprises a methoxy moiety (2′-OMe). In some preferred embodiments the consecutive modified nucleotides preferably begin at the penultimate position of the 5′ terminus of (N)x.

[0141] In one preferred embodiment of Structure (G), five consecutive ribonucleotides at the 5′ terminus of (N′)y comprise a 2′-O-methyl modification and one ribonucleotide at the 5′ penultimate position of (N′)x comprises a 2′-O-methyl modification. In another preferred embodiment of Structure (G), five consecutive ribonucleotides at the 5′ terminus of (N′)y comprise a 2′-O-methyl modification and two consecutive ribonucleotides at the 5′ terminal position of (N′)x comprise a 2′-O-methyl modification.

[0142] In some embodiments of Structure (G), 2, 3, 4, 5, 6, 7, 8, 9, 10, 11, 12, 13 or 14 consecutive ribonucleotides independently beginning at the ultimate or penultimate position of the 5′ termini of (N)x and (N′)y are bicyclic nucleotides. In various embodiments the bicyclic nucleotide is a locked nucleic acid (LNA) such as a 2′-O, 4′-C-ethylene-bridged nucleic acid (ENA). In some preferred embodiments the consecutive modified nucleotides preferably begin at the penultimate position of the 5′ terminus of (N)x.

[0143] In various embodiments of Structure (G), (N′)y comprises a modified nucleotide selected from a bicyclic nucleotide, a 2′ sugar modified nucleotide, a mirror nucleotide, an altritol nucleotide, or a nucleotide joined to an adjacent nucleotide by an internucleotide linkage selected from a 2′-5′ phosphodiester bond, a P-alkoxy linkage or a PACE linkage at the 5′ terminus or at each of the 3′ and 5′ termini.

[0144] In various embodiments of Structure (G), (N)x comprises a modified nucleotide selected from a bicyclic nucleotide, a 2′ sugar modified nucleotide, a mirror nucleotide, an altritol nucleotide, or a nucleotide joined to an adjacent nucleotide by an internucleotide linkage selected from a 2′-5′ phosphodiester bond, a P-alkoxy linkage or a PACE linkage at the 5′ terminus or at each of the 3′ and 5′ termini.

[0145] In one embodiment where each of 3′ and 5′ termini of the same strand comprise a modified nucleotide, the modification at the 5′ and 3′ termini is identical. In another embodiment, the modification at the 5′ terminus is different from the modification at the 3′ terminus of the same strand. In one specific embodiment, the modified nucleotides at the 5′ terminus are mirror nucleotides and the modified nucleotides at the 3′ terminus of the same strand are joined by 2′-5′ phosphodiester bond. In various embodiments of Structure (G), the modified nucleotides in (N)x are different from the modified nucleotides in (N′)y. For example, the modified nucleotides in (N)x are 2′ sugar modified nucleotides and the modified nucleotides in (N′)y are nucleotides linked by 2′-5′ internucleotide linkages. In another example, the modified nucleotides in (N)x are mirror nucleotides and the modified nucleotides in (N′)y are nucleotides linked by 2′-5′ internucleotide linkages. In another example, the modified nucleotides in (N)x are nucleotides linked by 2′-5′ internucleotide linkages and the modified nucleotides in (N′)y are mirror nucleotides.

[0146] In additional embodiments, the present invention provides a compound having Structure (H):

5′(N)x-Z3′ antisense strand (H)

3′Z′—(N′)y5′ sense strand

wherein each of N and N′ is a nucleotide selected from an unmodified ribonucleotide, a modified ribonucleotide, an unmodified deoxyribonucleotide or a modified deoxyribonucleotide;
wherein each of (N)x and (N′)y is an oligomer in which each consecutive nucleotide is joined to the next nucleotide by a covalent bond and each of x and y is an integer between 18 and 40;
wherein (N)x comprises unmodified ribonucleotides further comprising one modified nucleotide at the 3′ terminal or penultimate position or the 5′ terminal or penultimate position, wherein the modified nucleotide is selected from the group consisting of a bicyclic nucleotide, a 2′ sugar modified nucleotide, a mirror nucleotide, an altritol nucleotide, or a nucleotide joined to an adjacent nucleotide by an internucleotide linkage selected from a 2′-5′ phosphodiester bond, a P-alkoxy linkage or a PACE linkage;
wherein (N′)y comprises unmodified ribonucleotides further comprising one modified nucleotide at an internal position, wherein the modified nucleotide is selected from the group consisting of a bicyclic nucleotide, a 2′ sugar modified nucleotide, a mirror nucleotide, an altritol nucleotide, or a nucleotide joined to an adjacent nucleotide by an internucleotide linkage selected from a 2′-5′ phosphodiester bond, a P-alkoxy linkage or a PACE linkage;
wherein in each of (N)x and (N′)y modified and unmodified nucleotides are not alternating;
wherein each of Z and Z′ may be present or absent, but if present is 1-5 deoxyribonucleotides covalently attached at the 3′ terminus of any oligomer to which it is attached;
wherein the sequence of (N′)_{y} is a sequence substantially complementary to (N)x; and
wherein the sequence of (N)ₓ comprises an antisense sequence substantially identical to an antisense sequence set forth in any one of Tables A-AQ.

[0147] In one embodiment of Structure (H), 2, 3, 4, 5, 6, 7, 8, 9, 10, 11, 12, 13 or 14 consecutive ribonucleotides independently beginning at the ultimate or penultimate position of the 3′ terminus or the 5′ terminus or both termini of (N)x are independently 2′ sugar modified nucleotides, bicyclic nucleotides, mirror nucleotides, altritol nucleotides or nucleotides joined to an adjacent nucleotide by a 2′-5′ phosphodiester bond and 2, 3, 4, 5, 6, 7, 8, 9, 10, 11, 12, 13 or 14 consecutive internal ribonucleotides in (N′)y are independently 2′ sugar modified nucleotides, bicyclic nucleotides, mirror nucleotides, altritol nucleotides or nucleotides joined to an adjacent nucleotide by a 2′-5′ phosphodiester bond. In some embodiments the 2′ sugar modification comprises the presence of an amino, a fluoro, an alkoxy or an alkyl moiety. In certain embodiments the 2′ sugar modification comprises a methoxy moiety (2′-OMe).

[0148] In another embodiment of Structure (H), 2, 3, 4, 5, 6, 7, 8, 9, 10, 11, 12, 13 or 14 consecutive ribonucleotides independently beginning at the ultimate or penultimate position of the 3′ terminus or the 5′ terminus or 2-8 consecutive nucleotides at each of 5′ and 3′ termini of (N′)y are independently 2′ sugar modified nucleotides, bicyclic nucleotides, mirror nucleotides, altritol nucleotides or nucleotides joined to an adjacent nucleotide by a 2′-5′ phosphodiester bond, and 2, 3, 4, 5, 6, 7, 8, 9, 10, 11, 12, 13 or 14 consecutive internal ribonucleotides in (N)x are independently 2′ sugar modified nucleotides, bicyclic nucleotides, mirror nucleotides, altritol nucleotides or nucleotides joined to an adjacent nucleotide by a 2′-5′ phosphodiester bond.

[0149] In one embodiment wherein each of 3′ and 5′ termini of the same strand comprises a modified nucleotide, the modification at the 5′ and 3′ termini is identical. In another embodiment, the modification at the 5′ terminus is different from the modification at the 3′ terminus of the same strand. In one specific embodiment, the modified nucleotides at the 5′ terminus are mirror nucleotides and the modified nucleotides at the 3′ terminus of the same strand are joined by 2′-5′ phosphodiester bond.

[0150] In various embodiments of Structure (H), the modified nucleotides in (N)x are different from the modified nucleotides in (N′)y. For example, the modified nucleotides in (N)x are 2′ sugar modified nucleotides and the modified nucleotides in (N′)y are nucleotides linked by 2′-5′ internucleotide linkages. In another example, the modified nucleotides in (N)x are mirror nucleotides and the modified nucleotides in (N′)y are nucleotides linked by 2′-5′ internucleotide linkages. In another example, the modified nucleotides in (N)x are nucleotides linked by 2′-5′ internucleotide linkages and the modified nucleotides in (N′)y are mirror nucleotides.

[0151] In one preferred embodiment of Structure (H), x=y=19; three consecutive ribonucleotides at the 9-11 nucleotide positions 9-11 of (N′)y comprise 2′-O-methyl modification and five consecutive ribonucleotides at the 3′ terminal position of (N′)x comprise 2′-O-methyl modification.

[0152] For all the above Structures (A)-(H), in various embodiments x=y and each of x and y is 19, 20, 21, 22 or 23. In certain embodiments, x=y=19. In yet other embodiments x=y=23. In additional embodiments the compound comprises modified ribonucleotides in alternating positions wherein each N at the 5′ and 3′ termini of (N)x are modified in their sugar residues and the middle ribonucleotide is not modified, e.g. ribonucleotide in position 10 in a 19-mer strand, position 11 in a 21 mer and position 12 in a 23-mer strand.

[0153] In some embodiments where x=y=21 or x=y=23 the position of modifications in the 19 mer are adjusted for the 21 and 23 mers with the proviso that the middle nucleotide of the antisense strand is preferably not modified.

[0154] In some embodiments, neither (N)x nor (N′)y are phosphorylated at the 3′ and 5′ termini. In other embodiments either or both (N)x and (N′)y are phosphorylated at the 3′ termini. In yet another embodiment, either or both (N)x and (N′)y are phosphorylated at the 3′ termini using non-cleavable phosphate groups. In yet another embodiment, either or both (N)x and (N′)y are phosphorylated at the terminal 2′ termini position using cleavable or non-cleavable phosphate groups. These particular siRNA compounds are also blunt ended and are non-phosphorylated at the termini; however, comparative experiments have shown that siRNA compounds phosphorylated at one or both of the 3′-termini have similar activity in vivo compared to the non-phosphorylated compounds.

[0155] In certain embodiments for all the above-mentioned Structures, the compound is blunt ended, for example wherein both Z and Z′ are absent. In an alternative embodiment, the compound comprises at least one 3′ overhang, wherein at least one of Z or Z′ is present. Z and Z′ independently comprises one or more covalently linked modified or non-modified nucleotides, for example inverted dT or dA; dT, LNA, mirror nucleotide and the like. In some embodiments each of Z and Z′ are independently selected from dT and dTdT. siRNA in which Z and/or Z′ is present have similar activity and stability as siRNA in which Z and Z′ are absent.

[0156] In certain embodiments for all the above-mentioned Structures, the compound comprises one or more phosphonocarboxylate and/or phosphinocarboxylate nucleotides (PACE nucleotides). In some embodiments the PACE nucleotides are deoxyribonucleotides and the phosphinocarboxylate nucleotides are phosphinoacetate nucleotides. Examples of PACE nucleotides and analogs are disclosed in U.S. Pat. Nos. 6,693,187 and 7,067,641, both incorporated herein by reference.

[0157] In certain embodiments for all the above-mentioned Structures, the compound comprises one or more locked nucleic acids (LNA) also defined as bridged nucleic acids or bicyclic nucleotides. Preferred locked nucleic acids are 2′-O, 4′-C-ethylene nucleosides (ENA) or 2′-O, 4′-C-methylene nucleosides. Other examples of LNA and ENA nucleotides are disclosed in WO 98/39352, WO 00/47599 and WO 99/14226, all incorporated herein by reference.

[0158] In certain embodiments for all the above-mentioned Structures, the compound comprises one or more altritol monomers (nucleotides), also defined as 1,5 anhydro-2-deoxy-D-altrito-hexitol (see for example, Allart, et al., 1998. Nucleosides & Nucleotides 17:1523-1526; Herdewijn et al., 1999. Nucleosides & Nucleotides 18:1371-1376; Fisher et al., 2007, NAR 35(4):1064-1074; all incorporated herein by reference).

[0159] The present invention explicitly excludes compounds in which each of N and/or N′ is a deoxyribonucleotide (D-A, D-C, D-G, D-T). In certain embodiments (N)x and (N′)y may comprise independently 1, 2, 3, 4, 5, 6, 7, 8, 9 or more deoxyribonucleotides. In certain embodiments the present invention provides a compound wherein each of N is an unmodified ribonucleotide and the 3′ terminal nucleotide or 2, 3, 4, 5, 6, 7, 8, 9, 10, 11, 12, 13 or 14 consecutive nucleotides at the 3′ terminus of (N′)y are deoxyribonucleotides. In yet other embodiments each of N is an unmodified ribonucleotide and the 5′ terminal nucleotide or 2, 3, 4, 5, 6, 7, 8, 9, 10, 11, 12, 13 or 14 consecutive nucleotides at the 5′ terminus of (N′)y are deoxyribonucleotides. In further embodiments the 5′ terminal nucleotide or 2, 3, 4, 5, 6, 7, 8, or 9 consecutive nucleotides at the 5′ terminus and 1, 2, 3, 4, 5, or 6 consecutive nucleotides at the 3′ termini of (N)x are deoxyribonucleotides and each of N′ is an unmodified ribonucleotide. In yet further embodiments (N)x comprises unmodified ribonucleotides and 1 or 2, 3 or 4 consecutive deoxyribonucleotides independently at each of the 5′ and 3′ termini and 1 or 2, 3, 4, 5 or 6 consecutive deoxyribonucleotides in internal positions; and each of N′ is an unmodified ribonucleotide. In certain embodiments the 3′ terminal nucleotide or 2, 3, 4, 5, 6, 7, 8, 9, 10, 11, 12 13 or 14 consecutive nucleotides at the 3′ terminus of (N′)y and the terminal 5′ nucleotide or 2, 3, 4, 5, 6, 7, 8, 9, 10, 11, 12 13 or 14 consecutive nucleotides at the 5′ terminus of (N)x are deoxyribonucleotides. The present invention excludes compounds in which each of N and/or N′ is a deoxyribonucleotide. In some embodiments the 5′ terminal nucleotide of N or 2 or 3 consecutive of N and 1, 2, or 3 of N′ is a deoxyribonucleotide. Certain examples of active DNA/RNA siRNA chimeras are disclosed in US patent publication 2005/0004064, and Ui-Tei, 2008 (NAR 36(7):2136-2151) incorporated herein by reference in their entirety.

[0160] Unless otherwise indicated, in preferred embodiments of the structures discussed herein the covalent bond between each consecutive N or N′ is a phosphodiester bond.

[0161] An additional novel molecule provided by the present invention is an oligonucleotide comprising consecutive nucleotides wherein a first segment of such nucleotides encode a first inhibitory RNA molecule, a second segment of such nucleotides encode a second inhibitory RNA molecule, and a third segment of such nucleotides encode a third inhibitory RNA molecule. Each of the first, the second and the third segment may comprise one strand of a double stranded RNA and the first, second and third segments may be joined together by a linker. Further, the oligonucleotide may comprise three double stranded segments joined together by one or more linker.

[0162] Thus, one molecule provided by the present invention is an oligonucleotide comprising consecutive nucleotides which encode three inhibitory RNA molecules; said oligonucleotide may possess a triple stranded structure, such that three double stranded arms are linked together by one or more linker, such as any of the linkers presented hereinabove. This molecule forms a “star”-like structure, and may also be referred to herein as RNAstar. Such structures are disclosed in PCT patent publication WO 2007/091269, assigned to the assignee of the present invention and incorporated herein in its entirety by reference.

[0163] A covalent bond refers to an internucleotide linkage linking one nucleotide monomer to an adjacent nucleotide monomer. A covalent bond includes for example, a phosphodiester bond, a phosphorothioate bond, a P-alkoxy bond, a P-carboxy bond and the like. The normal internucleoside linkage of RNA and DNA is a 3′ to 5′ phosphodiester linkage. In certain preferred embodiments a covalent bond is a phosphodiester bond. Covalent bond encompasses non-phosphorous-containing internucleoside linkages, such as those disclosed in WO 2004/041924 inter alia. Unless otherwise indicated, in preferred embodiments of the structures discussed herein the covalent bond between each consecutive N or N′ is a phosphodiester bond.

[0164] For all of the structures above, in some embodiments the oligonucleotide sequence of (N)x is fully complementary to the oligonucleotide sequence of (N′)y. In other embodiments (N)x and (N′)y are substantially complementary. In certain embodiments (N)x is fully complementary to a target sequence. In other embodiments (N)x is substantially complementary to a target sequence.

[0165] In some embodiments, neither (N)x nor (N′)y are phosphorylated at the 3′ and 5′ termini. In other embodiments either or both (N)x and (N′)y are phosphorylated at the 3′ termini (3′ Pi). In yet another embodiment, either or both (N)x and (N′)y are phosphorylated at the 3′ termini with non-cleavable phosphate groups. In yet another embodiment, either or both (N)x and (N′)y are phosphorylated at the terminal 2′ termini position using cleavable or non-cleavable phosphate groups. Further, the inhibitory nucleic acid molecules of the present invention may comprise one or more gaps and/or one or more nicks and/or one or more mismatches. Without wishing to be bound by theory, gaps, nicks and mismatches have the advantage of partially destabilizing the nucleic acid/siRNA, so that it may be more easily processed by endogenous cellular machinery such as DICER, DROSHA or RISC into its inhibitory components.

[0166] In the context of the present invention, a gap in a nucleic acid refers to the absence of one or more internal nucleotides in one strand, while a nick in a nucleic acid refers to the absence of an internucleotide linkage between two adjacent nucleotides in one strand. Any of the molecules of the present invention may contain one or more gaps and/or one or more nicks.

[0167] In one aspect the present invention provides a compound having Structure (I):

5′(N)x-Z3′ (antisense strand) (I)

3′Z′—(N′)y-z″5′ (sense strand)

wherein each of N and N′ is a ribonucleotide which may be unmodified or modified, or an unconventional moiety;
wherein each of (N)x and (N′)y is an oligonucleotide in which each consecutive N or N′ is joined to the next N or N′ by a covalent bond;
wherein Z and Z′ may be present or absent, but if present is independently 1-5 consecutive nucleotides covalently attached at the 3′ terminus of the strand in which it is present;
wherein z″ may be present or absent, but if present is a capping moiety covalently attached at the 5′ terminus of (N′)y;
wherein x=18 to 27;
wherein y=18 to 27;
wherein (N)x comprises modified and unmodified ribonucleotides, each modified ribonucleotide having a 2′-O-methyl on its sugar, wherein N at the 3′ terminus of (N)x is a modified ribonucleotide, (N)x comprises at least five alternating modified ribonucleotides beginning at the 3′ end and at least nine modified ribonucleotides in total and each remaining N is an unmodified ribonucleotide;
wherein in (N′)y at least one unconventional moiety is present, which unconventional moiety may be an abasic ribose moiety, an abasic deoxyribose moiety, a modified or unmodified deoxyribonucleotide, a mirror nucleotide, and a nucleotide joined to an adjacent nucleotide by a 2′-5′ internucleotide phosphate bond; and
wherein the sequence of (N′)_{y} is a sequence substantially complementary to (N)x; and
wherein the sequence of (N)ₓ comprises an antisense sequence substantially identical to an antisense sequence set forth in any one of Tables A-AQ.

[0168] In some embodiments x=y=19. In other embodiments x=y=23. In some embodiments the at least one unconventional moiety is present at positions 15, 16, 17, or 18 in (N′)y. In some embodiments the unconventional moiety is selected from a mirror nucleotide, an abasic ribose moiety and an abasic deoxyribose moiety. In some preferred embodiments the unconventional moiety is a mirror nucleotide, preferably an L-DNA moiety. In some embodiments an L-DNA moiety is present at position 17, position 18 or positions 17 and 18.

[0169] In other embodiments the unconventional moiety is an abasic moiety. In various embodiments (N′)y comprises at least five abasic ribose moieties or abasic deoxyribose moieties.

[0170] In yet other embodiments (N′)y comprises at least five abasic ribose moieties or abasic deoxyribose moieties and at least one of N′ is an LNA.

[0171] In some embodiments (N)x comprises nine alternating modified ribonucleotides. In other embodiments of Structure (I) (N)x comprises nine alternating modified ribonucleotides further comprising a 2′O modified nucleotide at position 2. In some embodiments (N)x comprises 2′O Me modified ribonucleotides at the odd numbered positions 1, 3, 5, 7, 9, 11, 13, 15, 17, 19. In other embodiments (N)x further comprises a 2′O Me modified ribonucleotide at one or both of positions 2 and 18. In yet other embodiments (N)x comprises 2′O Me modified ribonucleotides at positions 2, 4, 6, 8, 11, 13, 15, 17, 19.

[0172] In various embodiments z″ is present and is selected from an abasic ribose moiety, a deoxyribose moiety; an inverted abasic ribose moiety, a deoxyribose moiety; C6-amino-Pi; a mirror nucleotide.

[0173] In another aspect the present invention provides a compound having Structure (J) set forth below:

5′(N)x-Z3′ (antisense strand) (J)

3′Z′—(N′)y-z″5′ (sense strand)

wherein each of N and N′ is a ribonucleotide which may be unmodified or modified, or an unconventional moiety;
wherein each of (N)x and (N′)y is an oligonucleotide in which each consecutive N or N′ is joined to the next N or N′ by a covalent bond;
wherein Z and Z′ may be present or absent, but if present is independently 1-5 consecutive nucleotides covalently attached at the 3′ terminus of the strand in which it is present;
wherein z″ may be present or absent but if present is a capping moiety covalently attached at the 5′ terminus of (N′)y;
wherein x=18 to 27;
wherein y=18 to 27;
wherein (N)x comprises modified or unmodified ribonucleotides, and optionally at least one unconventional moiety;
wherein in (N′)y at least one unconventional moiety is present, which unconventional moiety may be an abasic ribose moiety, an abasic deoxyribose moiety, a modified or unmodified deoxyribonucleotide, a mirror nucleotide, a non-base pairing nucleotide analog or a nucleotide joined to an adjacent nucleotide by a 2′-5′ internucleotide phosphate bond; and
wherein the sequence of (N′)_{y} is a sequence substantially complementary to (N)x; and
wherein the sequence of (N)ₓ comprises an antisense sequence substantially identical to an antisense sequence set forth in any one of Tables A-AQ.

[0174] In some embodiments x=y=19. In other embodiments x=y=23. In some preferred embodiments (N)x comprises modified and unmodified ribonucleotides, and at least one unconventional moiety.

[0175] In some embodiments in (N)x the N at the 3′ terminus is a modified ribonucleotide and (N)x comprises at least 8 modified ribonucleotides. In other embodiments at least 5 of the at least 8 modified ribonucleotides are alternating beginning at the 3′ end. In some embodiments (N)x comprises an abasic moiety in one of positions 5, 6, 7, 8, 9, 10, 11, 12, 13, 14 or 15.

[0176] In some embodiments the at least one unconventional moiety in (N′)y is present at positions 15, 16, 17, or 18. In some embodiments the unconventional moiety is selected from a mirror nucleotide, an abasic ribose moiety and an abasic deoxyribose moiety. In some preferred embodiments the unconventional moiety is a mirror nucleotide, preferably an L-DNA moiety. In some embodiments an L-DNA moiety is present at position 17, position 18 or positions 17 and 18. In other embodiments the at least one unconventional moiety in (N′)y is an abasic ribose moiety or an abasic deoxyribose moiety.

[0177] In yet another aspect the present invention provides a compound having Structure (K) set forth below:

5′(N)ₓ—Z3′ (antisense strand) (K)

3′Z′—(N′)_{y}-z″5′ (sense strand)

wherein each of N and N′ is a ribonucleotide which may be unmodified or modified, or an unconventional moiety;
wherein each of (N)x and (N′)y is an oligonucleotide in which each consecutive N or N′ is joined to the next N or N′ by a covalent bond;
wherein Z and Z′ may be present or absent, but if present is independently 1-5 consecutive nucleotides covalently attached at the 3′ terminus of the strand in which it is present;
wherein z″ may be present or absent but if present is a capping moiety covalently attached at the 5′ terminus of (N′)y;
wherein x=18 to 27;
wherein y=18 to 27;
wherein (N)x comprises a combination of modified or unmodified ribonucleotides and unconventional moieties, any modified ribonucleotide having a 2′-O-methyl on its sugar;
wherein (N′)y comprises modified or unmodified ribonucleotides and optionally an unconventional moiety, any modified ribonucleotide having a 2′OMe on its sugar;
wherein the sequence of (N′)_{y} is a sequence substantially complementary to (N)x; and
wherein the sequence of (N)ₓ comprises an antisense sequence substantially identical to an antisense sequence set forth in any one of Tables A-AQ.

[0178] In some embodiments x=y=19. In other embodiments x=y=23. In some preferred embodiments the at least one preferred one unconventional moiety is present in (N)x and is an abasic ribose moiety or an abasic deoxyribose moiety. In other embodiments the at least one unconventional moiety is present in (N)x and is a non-base pairing nucleotide analog. In various embodiments (N′)y comprises unmodified ribonucleotides. In some embodiments (N)x comprises at least five abasic ribose moieties or abasic deoxyribose moieties or a combination thereof. In certain embodiments (N)x and/or (N′)y comprise modified ribonucleotides which do not base pair with corresponding modified or unmodified ribonucleotides in (N′)y and/or (N)x.

[0179] In various embodiments the present invention provides an siRNA set forth in Structure (L):

5′(N)ₓ—Z3′ (antisense strand) (L)

3′Z′—(N′)_{y}5′ (sense strand)

wherein each of N and N′ is a nucleotide selected from an unmodified ribonucleotide, a modified ribonucleotide, an unmodified deoxyribonucleotide and a modified deoxyribonucleotide;
wherein each of (N)ₓ and (N′)_{y} is an oligonucleotide in which each consecutive N or N′ is joined to the next N or N′ by a covalent bond;
wherein Z and Z′ are absent;
wherein x=y=19;
wherein in (N′)y the nucleotide in at least one of positions 15, 16, 17, 18 and 19 comprises a nucleotide selected from an abasic unconventional moiety, a mirror nucleotide, a deoxyribonucleotide and a nucleotide joined to an adjacent nucleotide by a 2′-5′ internucleotide bond;
wherein (N)x comprises alternating modified ribonucleotides and unmodified ribonucleotides each modified ribonucleotide being modified so as to have a 2′-O-methyl on its sugar and the ribonucleotide located at the middle position of (N)x being modified or unmodified, preferably unmodified; and
wherein the sequence of (N′)_{y} is a sequence substantially complementary to (N)x; and
wherein the sequence of (N)ₓ comprises an antisense sequence substantially identical to an antisense sequence set forth in any one of Tables A-AQ.

[0180] In some embodiments of Structure (L), in (N′)y the nucleotide in one or both of positions 17 and 18 comprises a modified nucleotide selected from an abasic unconventional moiety, a mirror nucleotide and a nucleotide joined to an adjacent nucleotide by a 2′-5′ internucleotide bond. In some embodiments the mirror nucleotide is selected from L-DNA and L-RNA. In various embodiments the mirror nucleotide is L-DNA.

[0181] In various embodiments (N′)y comprises a modified nucleotide at position 15 wherein the modified nucleotide is selected from a mirror nucleotide and a deoxyribonucleotide.

[0182] In certain embodiments (N′)y further comprises a modified nucleotide or pseudo nucleotide at position 2 wherein the pseudo nucleotide may be an abasic unconventional moiety and the modified nucleotide is optionally a mirror nucleotide.

[0183] In various embodiments the antisense strand (N)x comprises 2′O-Me modified ribonucleotides at the odd numbered positions (5′ to 3′; positions 1, 3, 5, 7, 9, 11, 13, 15, 17, 19). In some embodiments (N)x further comprises 2′O-Me modified ribonucleotides at one or both positions 2 and 18. In other embodiments (N)x comprises 2′O Me modified ribonucleotides at positions 2, 4, 6, 8, 11, 13, 15, 17, 19.

[0184] Other embodiments of Structures (L) are envisaged wherein x=y=21 or wherein x=y=23; in these embodiments the modifications for (N′)y discussed above instead of being in positions 17 and 18 are in positions 19 and 20 for 21-mer oligonucleotide and 21 and 22 for 23 mer oligonucleotide; similarly the modifications in positions 15, 16, 17, 18 or 19 are in positions 17, 18, 19, 20 or 21 for the 21-mer oligonucleotide and positions 19, 20, 21, 22, or 23 for the 23-mer oligonucleotide. The 2′O Me modifications on the antisense strand are similarly adjusted. In some embodiments (N)x comprises 2′O Me modified ribonucleotides at the odd numbered positions (5′ to 3′; positions 1, 3, 5, 7, 9, 12, 14, 16, 18, 20 for the 21 mer oligonucleotide [nucleotide at position 11 unmodified] and 1, 3, 5, 7, 9, 11, 13, 15, 17, 19, 21, 23 for the 23 mer oligonucleotide [nucleotide at position 12 unmodified]. In other embodiments (N)x comprises 2′O Me modified ribonucleotides at positions 2, 4, 6, 8, 10, 12, 14, 16, 18, 20 [nucleotide at position 11 unmodified for the 21 mer oligonucleotide and at positions 2, 4, 6, 8, 10, 13, 15, 17, 19, 21, 23 for the 23 mer oligonucleotide [nucleotide at position 12 unmodified].

[0185] In some embodiments (N′)y further comprises a 5′ terminal cap nucleotide. In various embodiments the terminal cap moiety is selected from an abasic unconventional moiety, an inverted abasic unconventional moiety, an L-DNA nucleotide, and a C6-imine phosphate (C6 amino linker with phosphate at terminus).

[0186] In other embodiments the present invention provides a compound having Structure (M) set forth below:

5′(N)ₓ—Z3′ (antisense strand) (M)

3′Z′—(N′)_{y}5′ (sense strand)

wherein each of N and N′ is selected from a pseudo-nucleotide and a nucleotide;
wherein each nucleotide is selected from an unmodified ribonucleotide, a modified ribonucleotide, an unmodified deoxyribonucleotide and a modified deoxyribonucleotide;
wherein each of (N)ₓ and (N′)_{y} is an oligonucleotide in which each consecutive N or N′ is joined to the next N or N′ by a covalent bond;
wherein Z and Z′ are absent;
wherein x=18 to 27;
wherein y=18 to 27;
wherein the sequence of (N′)_{y} is a sequence substantially complementary to (N)x; and
wherein the sequence of (N)ₓ comprises an antisense sequence substantially identical to an antisense sequence set forth in any one of Tables A-AQ.

[0187] In other embodiments the present invention provides a double stranded compound having Structure (N) set forth below:

5′(N)ₓ—Z3′ (antisense strand) (N)

3′Z′—(N′)_{y}5′ (sense strand)

wherein each of N and N′ is a nucleotide selected from an unmodified ribonucleotide, a modified ribonucleotide, an unmodified deoxyribonucleotide and a modified deoxyribonucleotide;
wherein each of (N)ₓ and (N′)_{y} is an oligonucleotide in which each consecutive N or N′ is joined to the next N or N′ by a covalent bond;
wherein Z and Z′ are absent;
wherein each of x and y is an integer between 18 and 40;
wherein the sequence of (N′)_{y} is a sequence substantially complementary to (N)x; and
wherein the sequence of (N)ₓ comprises an antisense sequence substantially identical to an antisense sequence set forth in any one of Tables A-AQ;
wherein (N)x, (N′)y or (N)x and (N′)y comprise non base-pairing modified nucleotides such that (N)x and (N′)y form less than 15 base pairs in the double stranded compound.

[0188] In other embodiments the present invention provides a compound having Structure (O) set forth below:

5′(N)ₓ—Z3′ (antisense strand) (O)

3′Z′—(N′)_{y}5′ (sense strand)

wherein each of N is a nucleotide selected from an unmodified ribonucleotide, a modified ribonucleotide, an unmodified deoxyribonucleotide and a modified deoxyribonucleotide;
wherein each of N′ is a nucleotide analog selected from a six membered sugar nucleotide, seven membered sugar nucleotide, morpholino moiety, peptide nucleic acid and combinations thereof;
wherein each of (N)ₓ and (N′)_{y} is an oligonucleotide in which each consecutive N or N′ is joined to the next N or N′ by a covalent bond;
wherein Z and Z′ are absent;
wherein each of x and y is an integer between 18 and 40;
wherein the sequence of (N′)_{y} is a sequence substantially complementary to (N)x; and
wherein the sequence of (N)ₓ comprises an antisense sequence substantially identical to an antisense sequence set forth in any one of Tables A-AQ.

[0189] In other embodiments the present invention provides a compound having Structure (P) set forth below:

5′(N)ₓ—Z3′ (antisense strand) (P)

3′Z′—(N′)_{y}5′ (sense strand)

wherein each of N and N′ is a nucleotide selected from an unmodified ribonucleotide, a modified ribonucleotide, an unmodified deoxyribonucleotide and a modified deoxyribonucleotide;
wherein each of (N)ₓ and (N′)_{y} is an oligonucleotide in which each consecutive N or N′ is joined to the next N or N′ by a covalent bond;
wherein Z and Z′ are absent;
wherein each of x and y is an integer between 18 and 40;
wherein one of N or N′ in an internal position of (N)x or (N′)y or one or more of N or N′ at a terminal position of (N)x or (N′)y comprises an abasic moiety or a 2′ modified nucleotide;
wherein the sequence of (N′)_{y} is a sequence substantially complementary to (N)x; and
wherein the sequence of (N)ₓ comprises an antisense sequence substantially identical to an antisense sequence set forth in any one of Tables A-AQ.

[0190] In various embodiments (N′)y comprises a modified nucleotide at position 15 wherein the modified nucleotide is selected from a mirror nucleotide and a deoxyribonucleotide.

[0191] In certain embodiments (N′)y further comprises a modified nucleotide at position 2 wherein the modified nucleotide is selected from a mirror nucleotide and an abasic unconventional moiety.

[0192] In various embodiments the antisense strand (N)x comprises 2′O-Me modified ribonucleotides at the odd numbered positions (5′ to 3′; positions 1, 3, 5, 7, 9, 11, 13, 15, 17, 19). In some embodiments (N)ₓ further comprises 2′O-Me modified ribonucleotides at one or both positions 2 and 18. In other embodiments (N)x comprises 2′O Me modified ribonucleotides at positions 2, 4, 6, 8, 11, 13, 15, 17, 19.

[0193] An additional novel molecule provided by the present invention is an oligonucleotide comprising consecutive nucleotides wherein a first segment of such nucleotides encode a first inhibitory RNA molecule, a second segment of such nucleotides encode a second inhibitory RNA molecule, and a third segment of such nucleotides encode a third inhibitory RNA molecule. Each of the first, the second and the third segment may comprise one strand of a double stranded RNA and the first, second and third segments may be joined together by a linker. Further, the oligonucleotide may comprise three double stranded segments joined together by one or more linker.

[0194] Thus, one molecule provided by the present invention is an oligonucleotide comprising consecutive nucleotides which encode three inhibitory RNA molecules; said oligonucleotide may possess a triple stranded structure, such that three double stranded arms are linked together by one or more linker, such as any of the linkers presented hereinabove. This molecule forms a “star”-like structure, and may also be referred to herein as RNAstar.

[0195] Said triple-stranded oligonucleotide may be an oligoribonucleotide having the general structure:

| | | | | |
|---|---|---|---|---|
| 5′ | Oligo1 (sense) | LINKER A | Oligo2 (sense) | 3′ |
| 3′ | Oligo1 (antisense) | LINKER B | Oligo3 (sense) | 5′ |
| 3′ | Oligo3 (antisense) | LINKER C | Oligo2 (antisense) | 5′ |

or

| | | | | |
|---|---|---|---|---|
| 5′ | Oligo1 (sense) | LINKER A | Oligo2 (antisense) | 3′ |
| 3′ | Oligo1 (antisense) | LINKER B | Oligo3 (sense) | 5′ |
| 3′ | Oligo3 (antisense) | LINKER C | Oligo2 (sense) | 5′ |

or

| | | | | |
|---|---|---|---|---|
| 5′ | Oligo1 (sense) | LINKER A | Oligo3 (antisense) | 3′ |
| 3′ | Oligo1 (antisense) | LINKER B | Oligo2 (sense) | 5′ |
| 5′ | Oligo3 (sense) | LINKER C | Oligo2 (antisense) | 3′ |

wherein one or more of linker A, linker B or linker C is present; any combination of two or more oligonucleotides and one or more of linkers A-C is possible, so long as the polarity of the strands and the general structure of the molecule remains. Further, if two or more of linkers A-C are present, they may be identical or different.

[0196] Thus, a triple-armed structure is formed, wherein each arm comprises a sense strand and complementary antisense strand (i.e. Oligo1 antisense base pairs to Oligo1 sense etc.). The triple armed structure may be triple stranded, whereby each arm possesses base pairing.

[0197] Further, the above triple stranded structure may have a gap instead of a linker in one or more of the strands. Such a molecule with one gap is technically quadruple stranded and not triple stranded; inserting additional gaps or nicks will lead to the molecule having additional strands. Preliminary results obtained by the inventors of the present invention indicate that said gapped molecules are more active in inhibiting certain target genes than the similar but non-gapped molecules. This may also be the case for nicked molecules.

[0198] According to one preferred embodiment of the invention, the antisense and the sense strands of the siRNA are phosphorylated only at the 3′-terminus and not at the 5′-terminus. According to another preferred embodiment of the invention, the antisense and the sense strands are non-phosphorylated. According to yet another preferred embodiment of the invention, the 5′ most ribonucleotide in the sense strand is modified to abolish any possibility of in vivo 5′-phosphorylation.

[0199] The invention further provides a vector capable of expressing any of the aforementioned oligoribonucleotides in unmodified form in a cell after which appropriate modification may be made. In preferred embodiment the cell is a mammalian cell, preferably a human cell.

### Pharmaceutical Compositions

[0200] While it may be possible for the compounds of the present invention to be administered as the raw chemical, it is preferable to present them as a pharmaceutical composition. Accordingly the present invention provides a pharmaceutical composition comprising one or more of the compounds of the invention; and a pharmaceutically acceptable carrier. This composition may comprise a mixture of two or more different siRNAs.

[0201] The invention further provides a pharmaceutical composition comprising at least one compound of the invention covalently or non-covalently bound to one or more compounds of the invention in an amount effective to inhibit the target genes of the present invention; and a pharmaceutically acceptable carrier. The compound may be processed intracellularly by endogenous cellular complexes to produce one or more oligoribonucleotides of the invention.

[0202] The invention further provides a pharmaceutical composition comprising a pharmaceutically acceptable carrier and one or more of the compounds of the invention in an amount effective to inhibit expression in a cell of a human target gene of the present invention, the compound comprising a sequence which is substantially complementary to the sequence of (N)ₓ.

[0203] Substantially complementary refers to complementarity of greater than about 84%, to another sequence. For example in a duplex region consisting of 19 base pairs one mismatch results in 94.7% complementarity, two mismatches results in about 89.5% complementarity and 3 mismatches results in about 84.2% complementarity, rendering the duplex region substantially complementary. Accordingly substantially identical refers to identity of greater than about 84%, to another sequence.

[0204] Additionally, the invention provides a method of inhibiting the expression of the target genes of the present invention by at least 40%, preferably by 50%, 60% or 70%, more preferably by 75%, 80% or 90% as compared to a control comprising contacting an mRNA transcript of the target gene of the present invention with one or more of the compounds of the invention.

[0205] In one embodiment the oligoribonucleotide is inhibiting one or more of the target genes of the present invention, whereby the inhibition is selected from the group comprising inhibition of gene function, inhibition of polypeptide and inhibition of mRNA expression.

[0206] In one embodiment the compound inhibits the target polypeptide, whereby the inhibition is selected from the group comprising inhibition of function (which may be examined by an enzymatic assay or a binding assay with a known interactor of the native gene/polypeptide, inter alia), inhibition of protein (which may be examined by Western blotting, ELISA or immuno-precipitation, inter alia) and inhibition of mRNA expression (which may be examined by Northern blotting, quantitative RT-PCR, in-situ hybridisation or microarray hybridisation, inter alia).

[0207] In additional embodiments the invention provides a method of treating a subject suffering from a disease accompanied by an elevated level of the target genes of the present invention, the method comprising administering to the subject a compound of the invention in a therapeutically effective dose thereby treating the subject.

[0208] More particularly, the invention provides an oligoribonucleotide wherein one strand comprises consecutive nucleotides having, from 5′ to 3′, the sequence set forth in Tables A-AQ, or a homolog thereof wherein in up to two of the ribonucleotides in each terminal region is altered.

[0209] It will be understood by one skilled in the art that given the potential length of the nucleic acid according to the present invention and particularly of the individual strands forming such nucleic acid according to the present invention, some shifts relative to the coding sequence of the target genes of the present invention to each side is possible, whereby such shifts can be up to 1, 2, 3, 4, 5 and 6 nucleotides in both directions, and whereby the thus generated double-stranded nucleic acid molecules shall also be within the present invention.

### Delivery

[0210] The siRNA molecules of the present invention may be delivered to the target tissue by direct application of the naked molecules prepared with a carrier or a diluent.

[0211] The term “naked siRNA” refers to siRNA molecules that are free from any delivery vehicle that acts to assist, promote or facilitate entry into the cell, including viral sequences, viral particles, liposome formulations, lipofectin or precipitating agents and the like. For example, siRNA in PBS is “naked siRNA”.

[0212] However, in some embodiments the siRNA molecules of the invention are delivered in liposome formulations and lipofectin formulations and the like and can be prepared by methods well known to those skilled in the art. Such methods are described, for example, in U.S. Pat. Nos. 5,593,972, 5,589,466, and 5,580,859, which are herein incorporated by reference.

[0213] Delivery systems aimed specifically at the enhanced and improved delivery of siRNA into mammalian cells have been developed, (see, for example, Shen et al., FEBS Let. 2003, 539:111-114; Xia et al., Nat. Biotech. 2002, 20:1006-1010; Reich et al., Mol. Vision 2003, 9: 210-216; Sorensen et al., J. Mol. Biol. 2003. 327: 761-766; Lewis et al., Nat. Gen. 2002, 32: 107-108 and Simeoni et al., NAR 2003, 31, 11: 2717-2724). siRNA has recently been successfully used for inhibition of gene expression in primates (see for example, Tolentino et al., Retina 24(4):660).

[0214] The pharmaceutically acceptable carriers, solvents, diluents, excipients, adjuvants and vehicles as well as implant carriers generally refer to inert, non-toxic solid or liquid fillers, diluents or encapsulating material not reacting with the active ingredients of the invention and they include liposomes and microspheres. Examples of delivery systems useful in the present invention include U.S. Pat. Nos. 5,225,182; 5,169,383; 5,167,616; 4,959,217; 4,925,678; 4,487,603; 4,486,194; 4,447,233; 4,447,224; 4,439,196; and 4,475,196. Many other such implants, delivery systems, and modules are well known to those skilled in the art. In one specific embodiment of this invention topical and transdermal formulations may be selected. The siRNAs or pharmaceutical compositions of the present invention are administered and dosed in accordance with good medical practice, taking into account the clinical condition of the individual subject, the disease to be treated, the site and method of administration, scheduling of administration, patient age, sex, body weight and other factors known to medical practitioners.

[0215] In another embodiment the administration comprises topical or local administration such as via eye drops or eardrops. In a non-limiting example, siRNA compounds that target SOX9, ASPP1, CTSD, CAPNS1, are useful in treating a subject suffering from a hearing loss or in preventing hearing loss in a subject receiving chemotherapy wherein the siRNA compounds are delivered to the ear via transtympanic injection or via eardrops.

[0216] In a non-limiting example, siRNA compounds that target SOX9, ASPP1, CTSD, CAPNS1, FAS and FAS ligand are useful in treating a subject suffering from a neurodegenerative disease (AD, ALS) and the siRNA compounds are delivered to the CNS by intranasal administration.

[0217] In particular embodiments the SOX9, ASPP1, CTSD, CAPNS1, FAS and FAS ligand siRNA compounds are formulated as eye drops for administration to the surface of the eye. In other embodiments the siRNA compounds are administered to the lung by inhalation.

[0218] In addition, in certain embodiments the compositions for use in the novel treatments of the present invention may be formed as aerosols, for example for intranasal administration.

[0219] The “therapeutically effective dose” for purposes herein is thus determined by such considerations as are known in the art. The dose must be effective to achieve improvement including but not limited to improved survival rate or more rapid recovery, or improvement or elimination of symptoms and other indicators as are selected as appropriate measures by those skilled in the art.

[0220] In general, the active dose of compound for humans is in the range of from 1 ng/kg to about 20-100 mg/kg body weight per day, preferably about 0.01 mg to about 2-10 mg/kg body weight per day, in a regimen of one dose per day or twice or three or more times per day for a period of 1-4 weeks or longer. The compounds of the present invention can be administered by any of the conventional routes of administration. It should be noted that the compound can be administered as the compound or as pharmaceutically acceptable salt and can be administered alone or as an active ingredient in combination with pharmaceutically acceptable carriers, solvents, diluents, excipients, adjuvants and vehicles. The compounds can be administered orally, subcutaneously or parenterally including intravenous, intraarterial, intramuscular, intraperitoneally, and intranasal administration as well as intrathecal and infusion techniques. Implants of the compounds are also useful. For treating spinal-cord injury, local delivery of the siRNA molecules is preferable for example by using direct injection to the spinal cord or by using intrathecal delivery (such as using Alzet pump). Liquid forms may be prepared for injection, the term including subcutaneous, transdermal, intravenous, intramuscular, intrathecal, and other parental routes of administration. The liquid compositions include aqueous solutions, with and without organic co-solvents, aqueous or oil suspensions, emulsions with edible oils, as well as similar pharmaceutical vehicles. In a particular embodiment, the administration comprises intravenous administration. In another embodiment the administration comprises topical or local administration. In addition, in certain embodiments the compositions for use in the novel treatments of the present invention may be formed as aerosols, for example for intranasal administration. In certain embodiments, oral compositions (such as tablets, suspensions, solutions) may be effective for local delivery to the oral cavity such as oral composition suitable for mouthwash for the treatment of oral mucositis.

### Methods of Treatment

[0221] In another aspect, the present invention relates to a method for the treatment of a subject in need of treatment for a disease or disorder associated with the abnormal expression of the target genes of Table 1, comprising administering to the subject an amount of an inhibitor, which reduces or inhibits expression of these genes.

[0222] In preferred embodiments the subject being treated is a warm-blooded animal and, in particular, mammals including human.

[0223] The methods of the invention comprise administering to the subject one or more inhibitory compounds which down-regulate expression of the target genes of Table 1; and in particular siRNA in a therapeutically effective dose so as to thereby treat the subject.

[0224] In various embodiments the inhibitor is selected from the group consisting of siRNA, shRNA, an aptamer, an antisense molecule, miRNA, and a ribozyme. In the presently preferred embodiments the inhibitor is siRNA.

[0225] The term “treatment” refers to both therapeutic treatment and prophylactic or preventative measures, wherein the object is to prevent or slow down (lessen) related disorders as listed above. Those in need of treatment include those already experiencing the disease or condition, those prone to having the disease or condition, and those in which the disease or condition is to be prevented. The compounds of the invention may be administered before, during or subsequent to the onset of the disease or condition or symptoms associated therewith. In cases where treatment is for the purpose of prevention, then the present invention relates to a method for delaying the onset of or averting the development of the disease or disorder.

[0226] The present invention relates to the use of compounds which down-regulate the expression of the target genes of the invention particularly to novel small interfering RNAs (siRNAs), in the treatment of the following diseases or conditions in which inhibition of the expression of the target genes is beneficial.

[0227] Specifically, inhibition of SOX9, CTSD, CAPNS1 genes by siRNA molecules is beneficial in the treatment or prevention of spinal-cord injury or any other related injury. The compounds of the invention are used for treating or preventing the damage caused by spinal-cord injury especially spinal cord trauma caused by motor vehicle accidents, falls, sports injuries, industrial accidents, gunshot wounds, spinal cord trauma caused by spine weakening (such as from rheumatoid arthritis or osteoporosis) or if the spinal canal protecting the spinal cord has become too narrow (spinal stenosis) due to the normal aging process, direct damage that occur when the spinal cord is pulled, pressed sideways, or compressed, damage to the spinal-cord following bleeding, fluid accumulation, and swelling inside the spinal cord or outside the spinal cord (but within the spinal canal). The compounds of the invention are also used for treating or preventing the damage caused by spinal-cord injury due to disease such as polio or spina bifida.

[0228] Inhibition of FAS and FAS ligand genes by siRNA molecules is beneficial in the treatment of dry eye syndromes or any other related lacrimal gland dysfunctions. There are two major types of dry eye syndromes: aqueous-deficient dry eye due to lacrimal gland diseases and evaporative dry eye mainly due to meibomian gland diseases. Disorders of the lacrimal gland include for example Sjogren's syndrome (focal lymphocytic infiltration of the lacrimal and salivary glands), Sarcoidosis (non-caseating granulomas in multiple organs including lacrimal glands), Chronic graft-versus-host disease (prominent fibrosis and an increase in stromal fibroblasts in the lacrimal gland) and decrease in lacrimal gland secretion in aging.

[0229] The compounds of the invention are used for treating acute renal failure, in particular acute renal failure due to ischemia in post surgical patients, and acute renal failure due to chemotherapy treatment such as cisplatin administration or sepsis-associated acute renal failure. Another use of the compounds of the invention is for the prevention of acute renal failure in high-risk patients undergoing major cardiac surgery or vascular surgery. The patients at high-risk of developing acute renal failure can be identified using various scoring methods such as the Cleveland Clinic algorithm or that developed by US Academic Hospitals (QMMI) and by Veterans' Administration (CICSS). Other uses of the compounds of the invention are for the prevention of ischemic acute renal failure in kidney transplant patients or for the prevention of toxic acute renal failure in patients receiving chemotherapy.

[0230] In another preferred embodiment, the compounds of the invention are used for treating or preventing the damage caused by nephrotoxins such as diuretics, β-blockers, vasodilator agents, ACE inhibitors, cyclosporin, aminoglycoside antibiotics (e.g. gentamicin), amphotericin B, cisplatin, radiocontrast media, immunoglobulins, mannitol, NSAIDs (eg aspirin, ibuprofen, diclofenac), cyclophosphamide, methotrexate, aciclovir, polyethylene glycol, β-lactam antibiotics, vancomycin, rifampicin, sulphonamides, ciprofloxacin, ranitidine, cimetidine, furosemide, thiazides, phenyloin, penicillamine, lithium salts, fluoride, demeclocycline, foscarnet, aristolochic acid.

[0231] The compounds of the invention are also used for treating glaucoma. Main types of glaucoma are primary open angle glaucoma (POAG), angle closure glaucoma, normal tension glaucoma and pediatric glaucoma. These are marked by an increase of intraocular pressure (IOP), or pressure inside the eye. When optic nerve damage has occurred despite a normal IOP, this is called normal tension glaucoma. Secondary glaucoma refers to any case in which another disease causes or contributes to increased eye pressure, resulting in optic nerve damage and vision loss.

[0232] The methods of the invention are applied to various conditions of acute hearing loss. Without being bound by theory, the hearing loss may be due to apoptotic inner ear hair cell damage or loss, wherein the damage or loss is caused by infection, mechanical injury, loud sound, aging (presbycusis), or chemical-induced ototoxicity. Ototoxins include therapeutic drugs including antineoplastic agents, salicylates, quinines, and aminoglycoside antibiotics, contaminants in foods or medicinals, and environmental or industrial pollutants. Typically, treatment is performed to prevent or reduce ototoxicity, especially resulting from or expected to result from administration of therapeutic drugs. Preferably a therapeutically effective composition is given immediately after the exposure to prevent or reduce the ototoxic effect. More preferably, treatment is provided prophylactically, either by administration of the composition prior to or concomitantly with the ototoxic pharmaceutical or the exposure to the ototoxin.

[0233] By “ototoxin” in the context of the present invention is meant a substance that through its chemical action injures, impairs or inhibits the activity of the sound receptors component of the nervous system related to hearing, which in turn impairs hearing (and/or balance). In the context of the present invention, ototoxicity includes a deleterious effect on the inner ear hair cells. Ototoxic agents that cause hearing impairments include, but are not limited to, antineoplastic agents such as vincristine, vinblastine, cisplatin and cisplatin-like compounds, taxol and taxol-like compounds, dideoxy-compounds, e.g., dideoxyinosine; alcohol; metals; industrial toxins involved in occupational or environmental exposure; contaminants of food or medicinals; and over-doses of vitamins or therapeutic drugs, e.g., antibiotics such as penicillin or chloramphenicol, and megadoses of vitamins A, D, or B6, salicylates, quinines, loop diuretics, and phosphodiesterase type 5 (PDE5) inhibitors such as sildenafil citrate (Viagra®).

[0234] Hearing loss may be due to end-organ lesions involving inner ear hair cells, e.g., acoustic trauma, viral endolymphatic labyrinthitis, Meniere's disease. Hearing impairments include tinnitus, which is a perception of sound in the absence of an acoustic stimulus, and may be intermittent or continuous, wherein there is diagnosed a sensorineural loss. Hearing loss may be due to bacterial or viral infection, such as in herpes zoster oticus, purulent labyrinthitis arising from acute otitis media, purulent meningitis, chronic otitis media, sudden deafness including that of viral origin, e.g., viral endolymphatic labyrinthitis caused by viruses including mumps, measles, influenza, chicken pox, mononucleosis and adenoviruses. The hearing loss can be congenital, such as that caused by rubella, anoxia during birth, bleeding into the inner ear due to trauma during delivery, ototoxic drugs administered to the mother, erythroblastosis fetalis, and hereditary conditions including Waardenburg's syndrome and Hurler's syndrome.

[0235] The hearing loss can be noise-induced, generally due to a noise greater than 85 decibels (db) that damages the inner ear. In a particular aspect of the invention, the hearing loss is caused by an ototoxic drug that effects the auditory portion of the inner ear, particularly inner ear hair cells. Incorporated herein by reference are chapters 196, 197, 198 and 199 of The Merck Manual of Diagnosis and Therapy, 14th Edition, (1982), Merck Sharp & Dome Research Laboratories, N.J. and corresponding chapters in the most recent 16th edition, including Chapters 207 and 210) relating to description and diagnosis of hearing and balance impairments.

[0236] Methods, molecules and compositions which inhibit the target genes of the invention are discussed herein at length, and any of said molecules and/or compositions may be beneficially employed in the treatment of a subject suffering from any of said conditions. Preferred oligomer sequences useful in the preparation of siRNA directed to selected target genes are listed in Tables A-AQ.

[0237] The present invention further relates to methods for treating or preventing the incidence or severity of various diseases or conditions in a subject in need thereof wherein the disease or condition and/or symptoms associated therewith is selected from the group consisting of a neurodegenerative disease or disorder including spinal cord injury, Alzheimer's disease (AD) and Amyotrophic Lateral Sclerosis (ALS); acute renal failure (ARF); hearing loss; an ophthalmic disease including glaucoma and ischemic optic neuropathy (ION); a respiratory disease including acute respiratory distress syndrome (ARDS), chronic obstructive pulmonary disease (COPD) and other acute lung and respiratory injuries; injury (e.g. ischemia-reperfusion injury) in organ transplant including lung, kidney, bone marrow, heart, pancreas, cornea or liver transplantation; nephrotoxicity, pressure sores, dry eye syndrome or oral mucositis.

[0238] In other embodiments the compounds and methods of the invention are useful for treating or preventing the incidence or severity of other diseases and conditions in a patient. These diseases and conditions include stroke and stroke-like situations (e.g. cerebral, renal, cardiac failure), neuronal cell death, brain injuries with or without reperfusion issues, chronic degenerative diseases e.g. neurodegenerative disease including Alzheimer's disease, Huntington's disease, Parkinson's disease, multiple sclerosis, amyotrophic lateral sclerosis, spinobulbar atrophy, prion disease, and apoptosis resulting from traumatic brain injury (TBI).

[0239] The compounds and methods of the invention are directed to providing neuroprotection, or to provide cerebroprotection, or to prevent and/or treat cytotoxic T cell and natural killer cell-mediated apoptosis associated with autoimmune disease and transplant rejection, to prevent cell death of cardiac cells including heart failure, cardiomyopathy, viral infection or bacterial infection of heart, myocardial ischemia, myocardial infarct, and myocardial ischemia, coronary artery by-pass graft, to prevent and/or treat mitochondrial drug toxicity e.g. as a result of chemotherapy or HIV therapy, to prevent cell death during viral infection or bacterial infection, or to prevent and/or treat inflammation or inflammatory diseases, inflammatory bowel disease, sepsis and septic shock, or to prevent cell death from follicle to ovocyte stages, from ovocyte to mature egg stages and sperm (for example, methods of freezing and transplanting ovarian tissue, artificial fertilization), or to preserve fertility in mammals after chemotherapy, in particular human mammals, or to prevent and/or treat, macular degeneration, or to prevent and/or treat acute hepatitis, chronic active hepatitis, hepatitis-B, and hepatitis-C, or to prevent hair loss, (e.g. hair loss due-to male-pattern baldness, or hair loss due to radiation, chemotherapy or emotional stress), or to treat or ameliorate skin damage whereby the skin damage may be due to exposure to high levels of radiation, heat, chemicals, sun, or to burns and autoimmune diseases), or to prevent cell death of bone marrow cells in myelodysplastic syndromes (MDS), to treat pancreatitis, to treat rheumatoid arthritis, psoriasis, glomerulonephritis, atherosclerosis, and graft versus host disease (GVHD), or to treat retinal pericyte apoptosis, retinal damages resulting from ischemia, diabetic retinopathy, or to treat any disease states associated with an increase of apoptotic cell death.

[0240] Details of certain indications in which the compounds of the present invention are useful as therapeutics are provided below.

### Respiratory Diseases

### Emphysema and COPD

[0241] Among the mechanisms that underlie lung destruction in emphysema, excessive formation of reactive oxygen species (ROS) should be first of all mentioned. It is well established that prooxidant/antioxidant imbalance exists in the blood and in the lung tissue of smokers (Hulea S A, et al: 1995. J Environ Pathol Toxicol Oncol. 14(3-4):173-80.; Rahman I, MacNee W. 1999. Am J. Physiol 277(6 Pt 1):L1067-88.; MacNee W. 2000 Chest. 117(5 Suppl 1):303S-17S; Marwick J A, et al., 2002. Ann NY Acad Sci. 973:278-83; Aoshiba K, et al., 2003. Inhal Toxicol. (10): 1029-38; Dekhuijzen P N. 2004. Eur Respir J. 23(4):629-36; Tuder R M, et al., 2003. Am J Respir Cell Mol Biol, 29:88-97). After one hour exposure of mice to CS, there is a dramatic increase of 8-hydroxy-2′-deoxyguanosine (8-OHdG) in the alveolar epithelial cells, particularly of type II (see Inhal Toxicol. 2003 15(10): 1029-38, above).

[0242] Overproduced reactive oxygen species are known for their cytotoxic activity, which stems from a direct DNA damaging effect and from the activation of apoptotic signal transduction pathways (Takahashi et al., 2004. Brain Res Bull. 62(6):497-504; Taniyama Y, Griendling K K. 2003. Hypertension. 42(6):1075-81; Higuchi Y. 2003. Biochem Pharmacol. 66(8):1527-35; Punj V, Chakrabarty A M. 2003. Cell Microbiol. (4):225-31.; Ueda et al., 2002 Antioxid Redox Signal. 4(3):405-14).

### Acute Respiratory Distress Syndrome

[0243] Acute respiratory distress syndrome (ARDS), also known as respiratory distress syndrome (RDS) or adult respiratory distress syndrome (in contrast with infant respiratory distress syndrome, IRDS) is a serious reaction to various forms of injuries to the lung. This is the most important disorder resulting in increased permeability pulmonary edema.

[0244] ARDS is a severe lung disease caused by a variety of direct and indirect insults. It is characterized by inflammation of the lung parenchyma leading to impaired gas exchange with concomitant systemic release of inflammatory mediators causing inflammation, hypoxemia and frequently resulting in multiple organ failure. This condition is life threatening, usually requiring mechanical ventilation and admission to an intensive care unit. A less severe form is called acute lung injury (ALI).

### Kidney Diseases and Disorders

### Acute Renal Failure

[0245] Acute renal failure (ARF) is a clinical syndrome characterized by rapid deterioration of renal function that occurs within days. The principal feature of ARF is an abrupt decline in glomerular filtration rate (GFR), resulting in the retention of nitrogenous wastes (urea, creatinine). Worldwide, severe ARF occurs in about 170-200 per million population annually. To date, there is no specific treatment for established ARF. Several drugs have been found to ameliorate toxic and ischemic experimental ARF, as manifested by lower serum creatinine levels, reduced histological damage and faster recovery of renal function in different animal models. These include anti-oxidants, calcium channel blockers, diuretics, vasoactive substances, growth factors, anti-inflammatory agents and more. However, the drugs tested in clinical trials showed no benefit, and their use in clinical ARF has not been approved.

[0246] In the majority of hospitalized ARF patients, ARF is caused by acute tubular necrosis (ATN), which results from ischemic and/or nephrotoxic insults. Renal hypoperfusion is caused by hypovolemic, cardiogenic and septic shock, by administration of vasoconstrictive drugs or renovascular injury. Nephrotoxins include exogenous toxins such as contrast media, aminoglycosides and cisplatin and cisplatin-like compounds as well as endogenous toxin such as myoglobin. Recent studies, however, support the theory that apoptosis in renal tissues is prominent in most human cases of ARF. The principal site of apoptotic cell death is the distal nephron. During the initial phase of ischemic injury, loss of integrity of the actin cytoskeleton leads to flattening of the epithelium, with loss of the brush border, loss of focal cell contacts, and subsequent disengagement of the cell from the underlying substratum. It has been suggested that apoptotic tubule cell death may be more predictive of functional changes than necrotic cell death (Komarov et al., Science 1999, 10; 285(5434):1733-7); Supavekin et al., Kidney Int. 2003, 63(5):1714-24).

[0247] In conclusion, currently there are no satisfactory modes of therapy for the prevention and/or treatment of acute renal failure, and there is a need therefore to develop novel compounds for this purpose.

### Microvascular Diseases of the Kidney

[0248] The kidney is involved in a number of discreet clinicopathologic conditions that affect systemic and renal microvasculature. Certain of these conditions are characterized by primary injury to endothelial cells, such as: Hemolytic-uremic syndrome (HUS) and thrombotic thrombocytopenic purpura (TTP) and Radiation nephritis—The long-term consequences of renal irradiation in excess of 2500 rad.

[0249] Taken as a group, diseases that cause transient or permanent occlusion of renal microvasculature uniformly result in disruption of glomerular perfusion, and hence of the glomerular filtration rate, thereby constituting a serious threat to systemic homeostasis.

### Ophthalmic Diseases and Disorders

[0250] Certain of the compounds of the invention are useful in treating patients suffering from diseases and disorders in which neuroprotection of the optic nerve would be of benefit, for example in:

1. open angle primary/secondary glaucoma
2. multiple sclerosis (optic neuritis)
3. central or brunch retinal vein occlusion
4. ischemic optic neuropathy (in status epilepticus, HIV-1 infection)
5. optic nerve injury
6. tumors extending into the suprasellar region (above the sella turcica)
juxta chiasmal tumors (the visual loss associated with compression of the optic chiasm by pituitary tumors may be transient or permanent, possibly related to the extent of irreversible retrograde degeneration to the retinal ganglion cells.

### Retinoblastoma

### Glaucoma

[0251] Glaucoma is one of the leading causes of blindness in the world. It affects approximately 66.8 million people worldwide and at least 12,000 Americans are blinded by this disease each year (Kahn and Milton, Am J Epidemiol. 1980, 111(6):769-76). Glaucoma is characterized by the degeneration of axons in the optic nerve head, primarily due to elevated intraocular pressure (IOP). One of the most common forms of glaucoma, known as primary open-angle glaucoma (POAG), results from the increased resistance of aqueous humor outflow in the trabecular meshwork (TM), causing IOP elevation and eventual optic nerve damage.

### Primary Open-Angle Glaucoma:

[0252] The majority of the cases of glaucoma are the form known as primary-open-angle glaucoma POAG, also called chronic open-angle glaucoma). POAG results from a build up of aqueous humor fluid within the anterior chamber of the eye resulting in intraocular pressure (IOP). If too much fluid is entering the eye, or if the trabecular meshwork “drain” gets clogged up (for instance, with debris or cells) so that not enough fluid is leaving the eye, the pressure builds up in what is known as “open angle glaucoma.” Open angle glaucoma also can be caused when the posterior portion of the iris adheres to the anterior surface of the lens creating a “pupillary block”, and preventing intraocular fluid from passing through the pupil into the anterior chamber.

[0253] If the angle between and iris and the cornea is too narrow or is even closed, then the fluid backs up, causing increased pressure in what is known as “closed angle glaucoma.”

[0254] Untreated glaucoma eventually leads to optic atrophy and blindness.

[0255] Normal Tension Glaucoma refers to optic nerve damage when intraocular eye pressure is normal (between 12-22 mmHg). This occurs in about 25-30% glaucoma cases in the US but in Japan, the rates may be as high as 70%. Other factors are present that cause optic nerve damage but do not affect LOP.

[0256] Closed-Angle Glaucoma, (also called angle-closure glaucoma) is responsible for 15% of all glaucoma cases. It is less common than POAG in the U.S., but it constitutes about half of the world's glaucoma cases because of its higher prevalence among Asians. The iris is pushed against the lens, sometimes sticking to it, closing off the drainage angle. This can occur very suddenly, resulting in an immediate rise in pressure. It often occurs in genetically susceptible people when the pupil shrinks suddenly. Closed-angle glaucoma can also be chronic and gradual, a less common condition.

[0257] Congenital Glaucoma, in which the eye's drainage canals fail to develop correctly, is present from birth. It is very rare, occurring in about 1 in 10,000 newborns. This may be an inherited condition and often can be corrected with microsurgery.

[0258] Optic neuritis is an inflammation of the optic nerve that may affect the part of the nerve and disc within the eyeball (papillitis) or the portion behind the eyeball (retrobulbar optic neuritis). Optic neuritis may be caused by any of the following: demyelinating diseases such as multiple sclerosis or post infectious encephalomyelitis; systemic viral or bacterial infections including complications of inflammatory diseases (e.g., sinusitis, meningitis, tuberculosis, syphilis, chorioretinitis, orbital inflammation); nutritional and metabolic diseases (e.g., diabetes, pernicious anemia, hyperthyroidism); Leber's Hereditary Optic Neuropathy, a rare form of inherited optic neuropathy which mainly affects young men; toxins (tobacco, methanol, quinine, arsenic, salicylates, lead); and trauma.

[0259] Optic atrophy is a hereditary or acquired loss of vision disorder that results from the degeneration of the optic nerve and optic tract nerve fibers. It may acquired via occlusions of the central retinal vein or artery, arteriosclerotic changes, may be secondary to degenerative retinal disease, may be a result of pressure against the optic nerve, or may be related to metabolic diseases (e.g., diabetes), trauma, glaucoma, or toxicity (to alcohol, tobacco, or other poisons). Degeneration and atrophy of optic nerve fibers is irreversible, although intravenous steroid injections have been seen to slow down the process in some cases.

[0260] Papilledema is swelling of the optic disc (papilla), most commonly due to an increase in intracranial pressure (tumor induced), malignant hypertension, or thrombosis of the central retinal vein. The condition usually is bilateral, the nerve head is very elevated and swollen, and pupil response typically is normal. Vision is not affected initially and there is no pain upon eye movement. Secondary optic nerve atrophy and permanent vision loss can occur if the primary cause of the papilledema is left untreated.

[0261] Ischemic optic neuropathy is a severely blinding disease resulting from loss of the arterial blood supply to the optic nerve (usually in one eye), as a result of occlusive disorders of the nutrient arteries. Optic neuropathy can be anterior, which causes a pale edema of the optic disc, or posterior, in which the optic disc is not swollen and the abnormality occurs between the eyeball and the optic chiasm. Ischemic anterior optic neuropathy usually causes a loss of vision that may be sudden or occur over several days. Ischemic posterior optic neuropathy is uncommon, and the diagnosis depends largely upon exclusion of other causes, chiefly stroke and brain tumor.

[0262] Other diseases and conditions include dry eye, diabetic retinopathy and diabetic macular edema.

### Dry Eye

[0263] Dry eye, also known as keratoconjunctivitis sicca or keratitis sicca, is a common problem usually resulting from a decrease in the production of tear film that lubricates the eyes. Most patients with dry eye experience discomfort, and no vision loss; although in severe cases, the cornea may become damaged or infected.

[0264] Dry eye is a multifactorial disease of the tears and ocular surface that results in symptoms of discomfort, visual disturbance, and tear film instability with potential damage to the ocular surface. It is accompanied by increased osmolarity of the tear film and inflammation of the ocular surface.

[0265] The lacrimal gland is a multilobular tissue composed of acinar, ductal, and myoepithelial cells. The acinar cells account for 80% of the cells present in the lacrimal gland and are the site for synthesis, storage, and secretion of proteins. Several of these proteins have antibacterial (lysozyme, lactoferrin) or growth factor (epidermal growth factor, transforming growth factor α, keratocyte growth factor) properties that are crucial to the health of the ocular surface. The primary function of the ductal cells is to modify the primary fluid secreted by the acinar cells and to secrete water and electrolytes. The myoepithelial cells contain multiple processes, which surround the basal area of the acinar and ductal cells, and are believed to contract and force fluid out of the ducts and onto the ocular surface.

### Mechanisms of Lacrimal Gland Dysfunction

[0266] Apoptosis, hormonal imbalance, production of autoantibodies, alterations in signaling molecules, neural dysfunction, and increased levels of proinflammatory cytokines have been proposed as possible mediators of lacrimal gland insufficiency. One of the primary symptoms of Sjögrens Syndrome is dry eye. Apoptosis of the acinar and ductal epithelial cells of the lacrimal glands has been proposed as a possible mechanism responsible for the impairment of secretory function (Manganelli and Fietta, Semin Arthritis Rheum. 2003. 33(1):49-65). Without wishing to be bound by theory, apoptotic epithelial cell death may be due to activation of several apoptotic pathways involving Fas (Apo-1/CD95), FasL (FasL/CD95L), Bax, caspases, perforin, and granzyme B. Cytotoxic T cells through the release of proteases, such as perforin and granzyme B, or the interaction of FasL expressed by T cells with Fas on epithelial cells, can lead to apoptosis of the acinar cells.

[0267] The current treatment for dry eye is mainly local and symptomatic such as: tear supplementation with lubricants; tear retention with therapies such as punctal occlusion, moisture chamber spectacles or contact lenses; tear stimulation for example by secretagogues; biological tear substitutes; anti-inflammatory therapy (Cyclosporine, Corticosteroids, Tetracyclines); and dietary essential fatty acids.

[0268] In one aspect the present invention provides a method of treating dry-eye in a subject in need thereof, comprising topically administering to the eye of the subject a chemically modified siRNA which inhibits expression of a gene associated with dry-eye. In some embodiments the gene is selected from FAS and FASL. In a currently preferred embodiment the siRNA is formulated for delivery as eye drops. In various embodiments the subject is suffering from Sjögrens syndrome.

### Diabetic Retinopathy

[0269] Diabetic retinopathy is a complication of diabetes, secondary to diabetes, and a leading cause of blindness. It occurs when diabetes damages the tiny blood vessels inside the retina. Diabetic retinopathy has four stages:

[0270] Mild Nonproliferative Retinopathy: microaneurysms in the retina's blood vessels.

[0271] Moderate Nonproliferative Retinopathy. As the disease progresses, some blood vessels that nourish the retina are blocked.

[0272] Severe Nonproliferative Retinopathy. Many more blood vessels are blocked, depriving several areas of the retina of a blood supply, which is overcome by the growth of new blood vessels.

[0273] Proliferative Retinopathy. The new blood vessels grow along the retina and along the surface of the vitreous gel. When the vessels leak blood, severe vision loss and even blindness can result.

[0274] During pregnancy, diabetic retinopathy may be a problem for women with diabetes.

[0275] Without wishing to be bound to theory, blood vessels damaged from diabetic retinopathy can cause vision loss in two ways: Fragile, abnormal blood vessels can develop and leak blood into the center of the eye, blurring vision. This is proliferative retinopathy and is the fourth and most advanced stage of the disease. Fluid can leak into the center of the macula, resulting in blurred vision. This condition is called macular edema. It can occur at any stage of diabetic retinopathy, although it is more likely to occur as the disease progresses and is known as diabetic macular edema (DME).

### Age Related Macular Degeneration (AMD)

[0276] The most common cause of decreased best-corrected, vision in individuals over 65 years of age in the United States is the retinal disorder known as age-related macular degeneration (AMD). The area of the eye affected by AMD is the macula, a small area in the center of the retina, composed primarily of photoreceptor cells. As AMD progresses, the disease is characterized by loss of sharp, central vision. So-called “dry” AMD accounts for about 85%-90% of AMD patients and involves alterations in eye pigment distribution, loss of photoreceptors and diminished retinal function due to overall atrophy of cells. “Wet” AMD involves proliferation of abnormal choroidal vessels leading to clots or scars in the sub-retinal space. Thus, the onset of “wet” AMD occurs because of the formation of an abnormal choroidal neovascular network (choroidal neovascularization, CNV) beneath the neural retina. The newly formed blood vessels are excessively leaky. This leads to accumulation of subretinal fluid and blood leading to loss of visual acuity. Eventually, there is total loss of functional retina in the involved region, as a large disciform scar involving choroids and retina forms. While dry AMD patients may retain vision of decreased quality, wet AMD often results in blindness. (Hamdi & Kenney, Frontiers in Bioscience, e305-314, May 2003).

### Ocular Ischemic Conditions

[0277] Ischemic optic neuropathy (ION) includes a variety of disorders that produce ischemia to the optic nerve. By definition, ION is termed anterior if disc edema is present acutely, suggesting infarction of the portion of the optic nerve closest to the globe. ION also may be posterior, lying several centimeters behind the globe. Ischemic optic neuropathy usually occurs only in people older than 60 years of age. Most cases are nonarteritic and attributed to the effects of atherosclerosis, diabetes, or hypertension on optic nerve perfusion. Temporal arteritis causes about 5% of cases (arteritic ION).

### Ischemic Optic Neuropathy (ION)

[0278] A severely blinding disease resulting from loss of the arterial blood supply to the optic nerve (usually in one eye), as a result of occlusive disorders of the nutrient arteries. Optic neuropathy can be anterior (AION), which causes a pale edema of the optic disc, or posterior, in which the optic disc is not swollen and the abnormality occurs between the eyeball and the optic chiasm. Ischemic anterior optic neuropathy usually causes a loss of vision that may be sudden or occur over several days. Ischemic posterior optic neuropathy is uncommon, and the diagnosis depends largely upon exclusion of other causes, chiefly stroke and brain tumor.

### Bone Marrow Transplantation (BMT) Retinopathy

[0279] Bone marrow transplantation retinopathy was first reported in 1983. It typically occurs within six months, but it can occur as late as 62 months after BMT. Risk factors such as diabetes and hypertension may facilitate the development of BMT retinopathy by heightening the ischemic microvasculopathy. Patients present with decreased visual acuity and/or visual field deficit. Posterior segment findings are typically bilateral and symmetric. Clinical manifestations include multiple cotton wool spots, telangiectasia, microaneurysms, macular edema, hard exudates and retinal hemorrhages.

[0280] Cyclosporine is a powerful immunomodulatory agent that suppresses graft-versus-host immune response. It may lead to endothelial cell injury and neurological side effects, and as a result, it has been suggested as the cause of BMT retinopathy. Total body irradiation has also been implicated as the cause of BMT retinopathy. Radiation injures the retinal microvasculature and leads to ischemic vasculopathy. Chemotherapeutic agents have been suggested as a potential contributing factor in BMT retinopathy. Medications such as cisplatin, carmustine, and cyclophosphamide can cause ocular side effects including papilledema, optic neuritis, visual field deficit and cortical blindness. It has been suggested that these chemotherapeutic drugs may predispose patients to radiation-induced retinal damages and enhance the deleterious effect of radiation. In general, patients with BMT retinopathy have a good prognosis. The retinopathy usually resolves within two to four months after stopping or lowering the dosage of cyclosporine. In one report, 69 percent of patients experienced complete resolution of the retinal findings, and 46 percent of patients fully recovered their baseline visual acuity. Because of the favorable prognosis and relatively non-progressive nature of BMT retinopathy, aggressive intervention is usually not necessary.

### Neurodegenerative Disease

### Spinal Cord Injury

[0281] Spinal cord injury or myelopathy, is a disturbance of the spinal cord that results in loss of sensation and/or mobility. The two common types of spinal cord injury are due to trauma and disease. Traumatic injury can be due to automobile accidents, falls, gunshot, diving accidents inter alia, and diseases which can affect the spinal cord include polio, spina bifida, tumors and Friedreich's ataxia.

### Neuropathy

[0282] Neuropathy affects all peripheral nerves: pain fibers, motor neurons, autonomic nerves. It therefore necessarily can affect all organs and systems since all are innervated. There are several distinct syndromes based on the organ systems and members affected, but these are by no means exclusive. A patient can have sensorimotor and autonomic neuropathy or any other combination. Despite advances in the understanding of the metabolic causes of neuropathy, treatments aimed at interrupting these pathological processes have been limited by side effects and lack of efficacy. Thus, treatments are symptomatic and do not address the underlying problems. Agents for pain caused by sensorimotor neuropathy include tricyclic antidepressants (TCAs), serotonin reuptake inhibitors (SSRIs) and antiepileptic drugs (AEDs). None of these agents reverse the pathological processes leading to diabetic neuropathy and none alter the relentless course of the illness. Thus, it would be useful to have a pharmaceutical composition that could better treat these conditions and/or alleviate the symptoms.

### Ischemia Reperfusion Injury Following Lung Transplantation

[0283] Lung transplantation, the only definitive therapy for many patients with end stage lung disease, has poor survival rates in all solid allograft recipients. Ischemia reperfusion (IR) injury is one of the leading causes of death in lung allograft recipients.

[0284] International patent application no. WO 2006/035434 assigned to the assignee of the present invention discloses p53 inhibitors for the treatment of, inter alia, acute renal failure and hearing loss.

### Oral Mucositis

[0285] Oral mucositis, also referred to as a stomatitis, is a common and debilitating side effect of chemotherapy and radiotherapy regimens, which manifests itself as erythema and painful ulcerative lesions of the mouth and throat. Routine activities such as eating, drinking, swallowing, and talking may be difficult or impossible for subjects with severe oral mucositis. Palliative therapy includes administration of analgesics and topical rinses.

[0286] More effective therapies to treat the above mentioned diseases and disorders would be of great therapeutic value.

[0287] The present invention also provides for a process of preparing a pharmaceutical composition, which comprises:
[0288] providing one or more double stranded compound of the invention; and
[0289] admixing said compound with a pharmaceutically acceptable carrier.

[0290] The present invention also provides for a process of preparing a pharmaceutical composition, which comprises admixing one or more compounds of the present invention with a pharmaceutically acceptable carrier.

[0291] In a preferred embodiment, the compound used in the preparation of a pharmaceutical composition is admixed with a carrier in a pharmaceutically effective dose. In a particular embodiment the compound of the present invention is conjugated to a steroid or to a lipid or to another suitable molecule e.g. to cholesterol.

### Chemical Modifications

[0292] Modifications or analogs of nucleotides can be introduced to improve the therapeutic properties of the nucleotides. Improved properties include increased nuclease resistance and/or increased ability to permeate cell membranes.

[0293] Accordingly, the present invention also includes all analogs of, or modifications to, a oligonucleotide of the invention that does not substantially affect the function of the polynucleotide or oligonucleotide. In a preferred embodiment such modification is related to the base moiety of the nucleotide, to the sugar moiety of the nucleotide and/or to the phosphate moiety of the nucleotide.

[0294] In one embodiment the modification is a modification of the phosphate moiety, whereby the modified phosphate moiety is selected from the group comprising phosphothioate.

[0295] The compounds of the present invention can be synthesized by any of the methods that are well-known in the art for synthesis of ribonucleic (or deoxyribonucleic) oligonucleotides. Such synthesis is, among others, described in Beaucage and Iyer, Tetrahedron 1992; 48:2223-2311; Beaucage and Iyer, Tetrahedron 1993; 49: 6123-6194 and Caruthers, et. al., Methods Enzymol. 1987; 154: 287-313; the synthesis of thioates is, among others, described in Eckstein, Annu. Rev. Biochem. 1985; 54: 367-402, the synthesis of RNA molecules is described in Sproat, in Humana Press 2005 edited by Herdewijn P.; Kap. 2: 17-31 and respective downstream processes are, among others, described in Pingoud et. al., in IRL Press 1989 edited by Oliver R. W. A.; Kap. 7: 183-208.

[0296] Other synthetic procedures are known in the art e.g. the procedures as described in Usman et al., 1987, J. Am. Chem. Soc., 109, 7845; Scaringe et al., 1990, NAR., 18, 5433; Wincott et al., 1995, NAR. 23, 2677-2684; and Wincott et al., 1997, Methods Mol. Bio., 74, 59, and these procedures may make use of common nucleic acid protecting and coupling groups, such as dimethoxytrityl at the 5′-end, and phosphoramidites at the 3′-end. The modified (e.g. 2′-O-methylated) nucleotides and unmodified nucleotides are incorporated as desired.

[0297] The oligonucleotides of the present invention can be synthesized separately and joined together post-synthetically, for example, by ligation (Moore et al., 1992, Science 256, 9923; Draper et al., International Patent Publication No. WO 93/23569; Shabarova et al., 1991, NAR 19, 4247; Bellon et al., 1997, Nucleosides & Nucleotides, 16, 951; Bellon et al., 1997, Bioconjugate Chem. 8, 204), or by hybridization following synthesis and/or deprotection.

[0298] It is noted that a commercially available machine (available, inter alia, from Applied Biosystems) can be used; the oligonucleotides are prepared according to the sequences disclosed herein. Overlapping pairs of chemically synthesized fragments can be ligated using methods well known in the art (e.g., see U.S. Pat. No. 6,121,426). The strands are synthesized separately and then are annealed to each other in the tube. Then, the double-stranded siRNAs are separated from the single-stranded oligonucleotides that were not annealed (e.g. because of the excess of one of them) by HPLC. In relation to the siRNAs or siRNA fragments of the present invention, two or more such sequences can be synthesized and linked together for use in the present invention.

[0299] The compounds of the invention can also be synthesized via tandem synthesis methodology, as described for example in US Patent Publication No. US 2004/0019001 (McSwiggen), wherein both siRNA strands are synthesized as a single contiguous oligonucleotide fragment or strand separated by a cleavable linker which is subsequently cleaved to provide separate siRNA fragments or strands that hybridize and permit purification of the siRNA duplex. The linker can be a polynucleotide linker or a non-nucleotide linker.

[0300] The present invention further provides for a pharmaceutical composition comprising two or more siRNA molecules for the treatment of any of the diseases and conditions mentioned herein, whereby said two molecules may be physically mixed together in the pharmaceutical composition in amounts which generate equal or otherwise beneficial activity, or may be covalently or non-covalently bound, or joined together by a nucleic acid linker of a length ranging from 2-100, preferably 2-50 or 2-30 nucleotides. In one embodiment, the siRNA molecules are comprised of a double-stranded nucleic acid structure as described herein, wherein the two siRNA sequences are selected from the nucleic acids set forth in Tables A-AQ.

[0301] Thus, the siRNA molecules may be covalently or non-covalently bound or joined by a linker to form a tandem siRNA compound. Such tandem siRNA compounds comprising two siRNA sequences are typically of 38-150 nucleotides in length, more preferably 38 or 40-60 nucleotides in length, and longer accordingly if more than two siRNA sequences are included in the tandem molecule. A longer tandem compound comprised of two or more longer sequences which encode siRNA produced via internal cellular processing, e.g., long dsRNAs, is also envisaged, as is a tandem molecule encoding two or more shRNAs. Such tandem molecules are also considered to be a part of the present invention. A tandem compound comprising two or more siRNAs sequences of the invention is envisaged.

[0302] siRNA molecules that target the target genes of the invention may be the main active component in a pharmaceutical composition, or may be one active component of a pharmaceutical composition containing two or more siRNAs (or molecules which encode or endogenously produce two or more siRNAs, be it a mixture of molecules or one or more tandem molecules which encode two or more siRNAs), said pharmaceutical composition further being comprised of one or more additional siRNA molecule which targets one or more additional gene. Simultaneous inhibition of said additional gene(s) will likely have an additive or synergistic effect for treatment of the diseases disclosed herein.

[0303] Additionally, the siRNA disclosed herein or any nucleic acid molecule comprising or encoding such siRNA can be linked or bound (covalently or non-covalently) to antibodies (including aptamer molecules) against cell surface internalizable molecules expressed on the target cells, in order to achieve enhanced targeting for treatment of the diseases disclosed herein. For example, anti-Fas antibody (preferably a neutralizing antibody) may be combined (covalently or non-covalently) with any siRNA. In another example, an aptamer which can act like a ligand/antibody may be combined (covalently or non-covalently) with any siRNA.

[0304] The compounds of the present invention can be delivered either directly or with viral or non-viral vectors. When delivered directly the sequences are generally rendered nuclease resistant. Alternatively the sequences can be incorporated into expression cassettes or constructs such that the sequence is expressed in the cell as discussed herein below. Generally the construct contains the proper regulatory sequence or promoter to allow the sequence to be expressed in the targeted cell. Vectors optionally used for delivery of the compounds of the present invention are commercially available, and may be modified for the purpose of delivery of the compounds of the present invention by methods known to one of skill in the art.

[0305] It is also envisaged that a long oligonucleotide (typically 25-500 nucleotides in length) comprising one or more stem and loop structures, where stem regions comprise the sequences of the oligonucleotides of the invention, may be delivered in a carrier, preferably a pharmaceutically acceptable carrier, and may be processed intracellularly by endogenous cellular complexes (e.g. by DROSHA and DICER as described above) to produce one or more smaller double stranded oligonucleotides (siRNAs) which are oligonucleotides of the invention. This oligonucleotide can be termed a tandem shRNA construct. It is envisaged that this long oligonucleotide is a single stranded oligonucleotide comprising one or more stem and loop structures, wherein each stem region comprises a sense and corresponding antisense siRNA sequence of the target genes of the invention. In particular, it is envisaged that this oligonucleotide comprises sense and antisense siRNA sequences as depicted in Tables A-AQ.

[0306] All analogues of, or modifications to, a nucleotide/oligonucleotide may be employed with the present invention, provided that said analogue or modification does not substantially affect the function of the nucleotide/oligonucleotide. The nucleotides can be selected from naturally occurring or synthetic modified bases. Naturally occurring bases include adenine, guanine, cytosine, thymine and uracil. Modified bases of nucleotides include inosine, xanthine, hypoxanthine, 2-aminoadenine, 6-methyl, 2-propyl and other alkyl adenines, 5-halo uracil, 5-halo cytosine, 6-aza cytosine and 6-aza thymine, pseudo uracil, 4-thiuracil, 8-halo adenine, 8-aminoadenine, 8-thiol adenine, 8-thiolalkyl adenines, 8-hydroxyl adenine and other 8-substituted adenines, 8-halo guanines, 8-amino guanine, 8-thiol guanine, 8-thioalkyl guanines, 8-hydroxyl guanine and other substituted guanines, other aza and deaza adenines, other aza and deaza guanines, 5-trifluoromethyl uracil and 5-trifluoro cytosine. In some embodiments one or more nucleotides in an oligomer is substituted with inosine.

[0307] In addition, analogues of polynucleotides can be prepared wherein the structure of one or more nucleotide is fundamentally altered and better suited as therapeutic or experimental reagents. An example of a nucleotide analogue is a peptide nucleic acid (PNA) wherein the deoxyribose (or ribose) phosphate backbone in DNA (or RNA is replaced with a polyamide backbone which is similar to that found in peptides. PNA analogues have been shown to be resistant to enzymatic degradation and to have extended stability in vivo and in vitro. Other modifications that can be made to oligonucleotides include polymer backbones, cyclic backbones, acyclic backbones, thiophosphate-D-ribose backbones, triester backbones, thioate backbones, 2′-5′ bridged backbone, artificial nucleic acids, morpholino nucleic acids, locked nucleic acid (LNA), glycol nucleic acid (GNA), threose nucleic acid (TNA), arabinoside, and mirror nucleoside (for example, beta-L-deoxynucleoside instead of beta-D-deoxynucleoside). Examples of siRNA compounds comprising LNA nucleotides are disclosed in Elmen et al., (NAR 2005, 33(1):439-447).

[0308] The compounds of the present invention can be synthesized using one or more inverted nucleotides, for example inverted thymidine or inverted adenine (see, for example, Takei, et al., 2002, JBC 277(26):23800-06).

[0309] The term “unconventional moiety” as used herein refers to abasic ribose moiety, an abasic deoxyribose moiety, a deoxyribonucleotide, a modified deoxyribonucleotide, a mirror nucleotide, a non-base pairing nucleotide analog and a nucleotide joined to an adjacent nucleotide by a 2′-5′ internucleotide phosphate bond; bridged nucleic acids including LNA and ethylene bridged nucleic acids.

[0310] The term “capping moiety” as used herein includes abasic ribose moiety, abasic deoxyribose moiety, modifications abasic ribose and abasic deoxyribose moieties including 2′O alkyl modifications; inverted abasic ribose and abasic deoxyribose moieties and modifications thereof; C6-imino-Pi; a mirror nucleotide including L-DNA and L-RNA; 5′OMe nucleotide; and nucleotide analogs including 4′,5′-methylene nucleotide; 1-(β-D-erythrofuranosyl)nucleotide; 4′-thio nucleotide, carbocyclic nucleotide; 5′-amino-alkyl phosphate; 1,3-diamino-2-propyl phosphate, 3-aminopropyl phosphate; 6-aminohexyl phosphate; 12-aminododecyl phosphate; hydroxypropyl phosphate; 1,5-anhydrohexitol nucleotide; alpha-nucleotide; threo-pentofuranosyl nucleotide; acyclic 3′,4′-seco nucleotide; 3,4-dihydroxybutyl nucleotide; 3,5-dihydroxypentyl nucleotide, 5′-5′-inverted abasic moiety; 1,4-butanediol phosphate; 5′-amino; and bridging or non bridging methylphosphonate and 5′-mercapto moieties.

[0311] Abasic deoxyribose moiety includes for example abasic deoxyribose-3′-phosphate; 1,2-dideoxy-D-ribofuranose-3-phosphate; 1,4-anhydro-2-deoxy-D-ribitol-3-phosphate. Inverted abasic deoxyribose moiety includes inverted deoxyriboabasic; 3′,5′ inverted deoxyriboabasic 5′-phosphate.

[0312] A “mirror” nucleotide is a nucleotide with reversed chirality to the naturally occurring or commonly employed nucleotide, i.e., a mirror image (L-nucleotide) of the naturally occurring (D-nucleotide). The nucleotide can be a ribonucleotide or a deoxyribonucleotide and my further comprise at least one sugar, base and or backbone modification. U.S. Pat. No. 6,602,858 discloses nucleic acid catalysts comprising at least one L-nucleotide substitution. Mirror nucleotide includes for example L-DNA (L-deoxyriboadenosine-3′-phosphate (mirror dA); L-deoxyribocytidine-3′-phosphate (mirror dC); L-deoxyriboguanosine-3′-phosphate (mirror dG); L-deoxyribothymidine-3′-phosphate (mirror image dT)) and L-RNA (L-riboadenosine-3′-phosphate (mirror rA); L-ribocytidine-3′-phosphate (mirror rC); L-riboguanosine-3′-phosphate (mirror rG); L-ribouracil-3′-phosphate (mirror dU).

### Screening of Inactivation Compounds for Target Genes:

[0313] Some of the compounds and compositions of the present invention may be used in a screening assay for identifying and isolating compounds that modulate the activity of a target gene, in particular compounds that modulate a disorder accompanied by an elevated level of the genes of the invention. The compounds to be screened comprise inter alia substances such as small chemical molecules and antisense oligonucleotides.

[0314] The inhibitory activity of the compounds of the present invention on target genes or binding of the compounds of the present invention to target genes may be used to determine the interaction of an additional compound with the target polypeptide, e.g., if the additional compound competes with the oligonucleotides of the present invention for inhibition of a target gene, or if the additional compound rescues said inhibition. The inhibition or activation can be tested by various means, such as, inter alia, assaying for the product of the activity of the target polypeptide or displacement of binding compound from the target polypeptide in radioactive or fluorescent competition assays.

[0315] The present invention is illustrated in detail below with reference to examples, but is not to be construed as being limited thereto.

[0316] Citation of any document herein is not intended as an admission that such document is pertinent prior art, or considered material to the patentability of any claim of the present application. Any statement as to content or a date of any document is based on the information available to applicant at the time of filing and does not constitute an admission as to the correctness of such a statement.

### EXAMPLES

### General Methods in Molecular Biology

[0317] Standard molecular biology techniques known in the art and not specifically described were generally followed as in Sambrook et al., Molecular Cloning: A Laboratory Manual, Cold Spring Harbor Laboratory Press, New York (1989), and as in Ausubel et al., Current Protocols in Molecular Biology, John Wiley and Sons, Baltimore, Md. (1989) and as in Perbal, A Practical Guide to Molecular Cloning, John Wiley & Sons, New York (1988), and as in Watson et al., Recombinant DNA, Scientific American Books, New York and in Birren et al (eds) Genome Analysis: A Laboratory Manual Series, Vols. 1-4 Cold Spring Harbor Laboratory Press; New York (1998) and methodology as set forth in U.S. Pat. Nos. 4,666,828; 4,683,202; 4,801,531; 5,192,659 and 5,272,057 and incorporated herein by reference. Polymerase chain reaction (PCR) was carried out generally as in PCR Protocols: A Guide To Methods And Applications, Academic Press, San Diego, Calif. (1990). In situ (In cell) PCR in combination with Flow Cytometry can be used for detection of cells containing specific DNA and mRNA sequences (Testoni et al., 1996, Blood 87:3822.) Methods of performing RT-PCR are also well known in the art.

### Example 1

### Generation of Sequences for Active siRNA Compounds to SOX9, ASPP1, CTSD, CAPNS1, FAS and FAS Ligand Genes and Production of the siRNAs

[0318] Using proprietary algorithms and the known sequence of the target genes, the sequences of many potential siRNAs were generated. In addition to the algorithm, some of the 23-mer oligomer sequences were generated by 5′ and/or 3′ extension of the 19-mer sequences. The sequences that have been generated using this method are fully complementary to the corresponding mRNA sequence.

[0319] Tables A-AQ provide siRNAs for the following target genes: SOX9, ASPP1, CTSD, CAPNS1, FAS and FAS ligand. For each gene there is a separate list of 19-mer, 21-mer and 23-mer siRNA sequences, which are prioritized based on their score in the proprietary algorithm as the best sequences for targeting the human gene expression.

[0320] The following abbreviations are used in the Tables A-AQ herein: “other spec or Sp.” refers to cross species identity with other animals: RB—Rabbit, CHMP—Chimpanzee, GP—Guinea-Pig, MS—Mouse; ORF: open reading frame. 19-mers, 21-mers and 23-mers refer to oligomers of 19, 21 and 23 ribonucleic acids in length.

In Vitro Testing of the siRNA Compounds for the Target Genes

### 1. General

[0321] About 1.5-2×10⁵ test cells (HEPG2 or PC3 cells for siRNA targeting the human gene) were seeded per well in 6 wells plate (70-80% confluent).

[0322] After 24 h cells were transfected with siRNA oligomers using Lipofectamine™ 2000 reagent (Invitrogene) at final concentration of 500 pM, 5 nM, 20 nM or 40 nM. The cells were incubated at 37° C. in a CO2 incubator for 72 h.

[0323] As positive control for cells transfection PTEN-Cy3 labeled siRNA oligos was used. As negative control for siRNA activity GFP siRNA oligos were used.

[0324] About 72 h after transfection cells were harvested and RNA was extracted from cells. Transfection efficiency was tested by fluorescent microscopy.

[0325] The percent of inhibition of gene expression using specific siRNAs was determined using qPCR analysis of target gene in cells expressing the endogenous gene. Other siRNA according to Tables A-AQ are tested in vitro where it is shown that these siRNA compounds inhibit gene expression.

TABLE 2
Percent of knockdown of the expression of Human ASPP1, Human
SOX9 in cells using chemically modified 19-mer siRNA molecules.

| | | | | % of |
|---|---|---|---|---|
| Table/ | Cell | | | control** |
| cmpd # | line* | siRNA | Sequence (5′ > 3′) | (inhibition) |
| Table E | HEPG2 | ASPP1_1 | Sense: GCAAAAUCAUGAACGGCAA | 100, 49 |
| #7 | cells | | AS: UUGCCGUUCAUGAUUUUGC | |
| Table E | HEPG2 | ASPP1_2 | Sense: CGAACUCAGAGAAAUGUAA | 48, 48, 43 |
| #17 | cells | | AS: UUACAUUUCUCUGAGUUCG | |
| Table E | HEPG2 | ASPP1_3 | Sense: CCUUUGAUCAUAUGAUGUA | 72, 74 |
| #306 | cells | | AS: UACAUCAUAUGAUCAAAGG | |
| Table E | HEPG2 | ASPP1_4 | Sense: GGAGAAAAACGUACUGAAA | 57 (5 nM), 38 |
| #385 | cells | | AS: UUUCAGUACGUUUUUCUCC | |
| Table E | HEPG2 | ASPP1_5 | Sense: GACAAGUCGACUACAGCAA | 64, 100 |
| #215 | cells | | AS: UUGCUGUAGUCGACUUGUC | |
| Table A | PC3 | SOX9_1 | Sense: CCGAGAUGAUCCUAAAAAU | 40, 28, 58 |
| #2 | cells | | AS: AUUUUUAGGAUCAUCUCGG | |
| Table A | PC3 | SOX9_2 | Sense: GCCGAGAUGAUCCUAAAAA | 64, 45, 57 |
| #81 | cells | | AS: UUUUUAGGAUCAUCUCGGC | |
| Table A | PC3 | SOX9_3 | Sense: CCUUCAACCUCCCACACUA | 58, 41, 23 |
| #5 | cells | | AS: UAGUGUGGGAGGUUGAAGG | |
| Table A | PC3 | SOX9_4 | Sense: CUCGUACCCAAAUUUCCAA | 81, 57, 100 |
| #29 | cells | | AS: UUGGAAAUUUGGGUACGAG | |
| Table A | PC3 | SOX9_5 | Sense: CCUUCAUGAAGAUGACCGA | 65, 46, 64 |
| #50 | cells | | AS: UCGGUCAUCUUCAUGAAGG | |

* cell line used in assay

TABLE 3
knockdown of expression of mouse rat and human CAPNS 1

| | | | | KD (in % of control)** | | |
|---|---|---|---|---|---|---|
| Table | siRNA | Sense seq (5′ > 3′) | | | RAT | |
| cmpd # | ID | AS sequence (5′ > 3′) | species | HUM | (PC12) | Mouse |
| | CAPNS1_7 | CCUCUGGAACAACAUUAAA | ms, | | 79, 19, | 46, 37, 34 |
| | | UUUAAUGUUGUUCCAGAGG | rat | | 18 | (50 nM) |
| | CAPNS1_8 | GCUAGCUUGUUCUACUGAA | ms | | | 37,30,22 |
| | | UUCAGUAGAACAAGCUAGC | | | | (50 nM) |
| | CAPNS1_9 | GGAACAUGGAUUUCGAUAA | ms, rat | | 3, 56, 22 | 40, 24, 29 |
| | | UUAUCGAAAUCCAUGUUCC | | | | (50 nM) |
| | CAPNS1_{—1}0 | GGAGGGAACAUGAGCUCUA | ms | | | 73,73 |
| | | UAGAGCUCAUGUUCCCUCC | | | | |
| | CAPNS1_11 | CGUAGUCAUUACUCCAAUA | ms | | | 48,68 |
| | | UAUUGGAGUAAUGACUACG | | | | |
| | CAPNS1_12 | CCACGUAGCCAUUACUCUA | rat | | 12, 32, 2 | 43, 53 |
| | | UAGAGUAAUGGCUACGUGG | | | | |
| | CAPNS1_13 | GCUACAGAACUCAUGAAUA | rat | | 7, 43, 3 | 37, 37, 36 |
| | | UAUUCAUGAGUUCUGUAGC | | | | (50 nM) |
| Table I | CAPNS1_14_{—} | GCGCCACAGAACUCAUG [symbol] A | Hu, | | | |
| #6 | S129 | UUCAUGAGUUCUGUGGCGC | ms, mn | | | |
| Table I | CAPNS1_14_{—} | GCGCCACAGAACUCAUG [symbol] A | Hu, | | | |
| #6 | S505 | UUCAUGAGUUCUGUGGCGC | ms, mn | | | |
| Table I | CAPNS1_15_{—} | CUGACUAUGUAUUCCUG [symbol] A | Hu, | | | |
| #13 | S129 | UUCAGGAAUACAUAGUCAG | ms, mn | | | |
| Table I | CAPNS1_15_{—} | CUGACUAUGUAUUCCUG [symbol] A | Hu, | | | |
| #13 | S505 | UUCAGGAAUACAUAGUCAG | ms, mn | | | |
| Table I | CAPNS1_16_{—} | GCUGACUAUGUAUUCCU [symbol] A | Hu, ms, | | | |
| #55 | S129 | UCAGGAAUACAUAGUCAGC | mn, rat | | | |
| Table I | CAPNS1_16_{—} | GCUGACUAUGUAUUCCU [symbol] A | Hu, ms, | | | |
| #55 | S505 | UCAGGAAUACAUAGUCAGC | mn, rat | | | |
| Table I | CAPNS1_17_{—} | UGGGCUUUGAGGAAUUC [symbol] A | Hu, mn | | | |
| #36 | S129 | UUGAAUUCCUCAAAGCCCA | | | | |
| Table I | CAPNS1_17_{—} | UGGGCUUUGAGGAAUUC [symbol] A | Hu, mn | | | |
| #36 | S505 | UUGAAUUCCUCAAAGCCCA | | | | |
| Table I | CAPNS1_18_{—} | GGCUUUGAGGAAUUCAA [symbol] U | Hu, mn | | | |
| #61 | S129 | ACUUGAAUUCCUCAAAGCC | | | | |
| Table I | CAPNS1_18_{—} | GGCUUUGAGGAAUUCAA [symbol] U | Hu, mn | | | |
| #61 | S505 | ACUUGAAUUCCUCAAAGCC | | | | |

Legend Table 3: ** % of control in separate tests using 20nM concentration of siRNA
molecules (unless indicated otherwise). All sequences are presented in a 5′-3′ orientation.
cross species specificity: mn: Macaca mulatta and Chimpanzee, hu: human; ms:mouse

[0326] The above-mentioned SOX9_{—}1 to SOX9_{—}5, ASPP1_{—}1 to ASPP1_{—}5 and CAPNS1_{—}7-CAPNS_{—}13 siRNA compounds were synthesized with single alternating unmodified and 2′OMe modified ribonucleotides on both strands. The sense strands comprise unmodified ribonucleotides at the 3′ and 5′ termini, and the antisense strands comprising 2′OMe modified ribonucleotides at the 3′ and 5; termini. The CAPNS1_{—}14 to CAPNS1_{—}18 siRNA comprise sense strands comprising an L-DNA moiety at position 18 (bold, italicized and underlined) and antisense strands with variant alternating patterns of unmodified and 2′OMe modified (underlined) ribonucleotides. A preferred structure for the siRNA according to the present invention is an siRNA wherein (N)x comprises 2′O Me modified ribonucleotides at positions 2, 4, 6, 8, 11, 13, 15, 17, 19 and (N′)y comprises at least one L-deoxyribonucleotide at the 3′ penultimate position.

### Example 2

### Model Systems of Acute Renal Failure (ARF)

[0327] ARF is a clinical syndrome characterized by rapid deterioration of renal function that occurs within days. Without being bound by theory the acute kidney injury may be the result of renal ischemia-reperfusion injury such as renal ischemia-reperfusion injury in patients undergoing major surgery such as major cardiac surgery. The principal feature of ARF is an abrupt decline in glomerular filtration rate (GFR), resulting in the retention of nitrogenous wastes (urea, creatinine). Recent studies, support that apoptosis in renal tissues is prominent in most human cases of ARF. The principal site of apoptotic cell death is the distal nephron. During the initial phase of ischemic injury, loss of integrity of the actin cytoskeleton leads to flattening of the epithelium, with loss of the brush border, loss of focal cell contacts, and subsequent disengagement of the cell from the underlying substratum.

[0328] Testing an active siRNA compound is performed using an animal model for ischemia-reperfusion-induced ARF. Ischemia-reperfusion injury is induced in rats following 45 minutes bilateral kidney arterial clamp and subsequent release of the clamp to allow 24 hours of reperfusion. siRNA compounds are injected into the jugular vein of individual experimental animals 30 minutes prior to and 4 hours following the clamp. ARF progression is monitored by measurement of serum creatinine levels before (baseline) and 24 hrs post surgery. At the end of the experiment, the rats are perfused via an indwelling femoral line with warm PBS followed by 4% paraformaldehyde. The left kidneys are surgically removed and stored in 4% paraformaldehyde for subsequent histological analysis. Acute renal failure is frequently defined as an acute increase of the serum creatinine level from baseline. An increase of at least 0.5 mg per dL or 44.2 μmol per L of serum creatinine is considered as an indication for acute renal failure. Serum creatinine is measured at time zero before the surgery and at 24 hours post ARF surgery.

[0329] SiRNA molecules according to Tables A-AQ are tested in this animal model which show that these siRNA compounds treat and/or prevent ARF.

### Example 3

### Model Systems of Spinal Cord Injury

[0330] Spinal cord injury, or myelopathy, is a disturbance of the spinal cord that results in loss of sensation and/or mobility. The two common types of spinal cord injury are due to trauma and disease. Traumatic injury can be due to automobile accidents, falls, gunshot, diving accidents inter alia, and diseases which can affect the spinal cord include polio, spina bifida, tumors and Friedreich's ataxia.

Uptake of siRNA Molecules into Neurons Following Injection into Injured Spinal-Cord:

[0331] The uptake of Cy3 labeled siRNA (delivered by injection into the injured cord) in different types of cells was examined following spinal cord contusion in 18 rats and in uninjured rats (9 rats). Sagittal cryosections were produced and immunostaining using four different groups of antibodies was performed in order to determine whether uptake has occurred in neurons, astroglia, oligodendroglia and/or macrophages/microglia. Markers for neurons were NeuN, or GAP43; markers for astroglia and potential neural stem cells were GFAP, nestin or vimentin; markers for oligodendroglia were NG2 or APC; markers for macrophages/microglia were ED1 or Iba-1 (Hasegawa et al., 2005. Exp Neurol 193 394-410).

[0332] Six rats were injected with two different doses of Cy3 labeled siRNA (1 μg/μl, 10 μg/μl) and were left for 1 and 3 days before sacrifice. Histological analyses indicate that many long filamentous profiles have taken up the labeled siRNA as well as other processes and cell bodies. Immunostaining with antibodies to MAP2 has identified uptake of label into dendrites and into cell bodies of neurons including motor neurons. Staining with other antibodies specific to astrocytes or macrophages revealed lower uptake of Cy3 labeled siRNA as compared to neurons. These results indicate that siRNA molecules injected to the injured spinal-cord reach the cell body and dendrites of neurons including motor neurons.

### The Spinal-Cord Injury Animal Model:

[0333] Adult female Sprague-Dawley rats are anesthetized with 40 mg/kg of pentobarbital and the spinal thoracic T9-10 is exposed by laminectomy. Contusive injury are produced by dropping a 10 gm rod onto the exposed spinal cord from a height of 12.5 mm using MASCIS (Multicenter Animal Spinal Cord Injury Study) impactor (as described In Basso et al., Journal of Neurotrauma Vol 12 (1), p 1-21 1995 and in Basso et al., Journal of Neurotrauma Vol 13 (7), p 343-59 1996). Prior to injury, three point injections of the tested siRNA are performed at the injury epicenter 2 mm rostral and caudal to the epicenter. GFP siRNA is injected in additional five rats as a control. Each injection is conducted slowly during a period of 10 min into dorsal column (˜1 mm depth) of T10 using a Hamilton syringe. Following injections, muscles and skin are closed separately. The behavioral assessment of the recovery following the spinal cord contusion is preformed using an open field locomotor test as described by Basso et al (the BBB locomotor rating scale).

[0334] Instead of using direct injection to the spinal cord, it is possible to deliver the siRNA molecules to the spinal-cord by using intrathecal delivery (such as using Alzet pump).

[0335] siRNA according to Tables A-AQ, in particular to the SOX9, CTSD, CAPNS1 genes are tested in this animal model which show that these siRNA compounds treat and/or prevent spinal-cord injury.

### Example 4

### Model Systems of Hearing Loss Conditions

### (i) Knock Down of Target Gene in Cochlea of Chemotherapeutic Treated Animals

[0336] The aim of this study is to evaluate siRNA-induced knockdown of target gene mRNA or protein expression level in rat inner ear tissues when siRNA delivered by eardrops or transtympanic injection in cisplatin-treated rats.

[0337] In previous experiments in which cisplatin treated rats were treated with siRNA compounds, daily body weight loss and increased levels of serum creatinine at the termination day were shown to correspond to cisplatin induced nephro- and ototoxicity.

### Experimental Design

[0338] The experiment includes the following experimental groups: CAPNS1 siRNA treated (15 rats/group) and untreated control group (12 rats) as described below. CAPNS1 siRNA is tested with various chemical modifications including siRNA shown in Table 3.

[0339] Experimental group I: is treated with single siRNA administration: at a dose of 100 μg/vehicle/10 μl, delivered by transtympanic injection or eardrops. siRNA treatment is performed on day 1 (study initiation), prior to the 1^{st} Cisplatin administration. The contralateral, Left ear serves as untreated control. Cisplatin is injected (i.p.) at daily dose of 2 mg/kg for five consecutive days; injection volume: 0.6 ml for 300 g BW (stock concentration: 50 mg/ml; LD50 I.P. dose 6.4 mg/kg). Termination step will be −3 days (72 hrs) after the last Cisplatin administration (Day 8 after study initiation)

[0340] Experimental group II: is treated with two doses of siRNA in the same dose regime and delivery route used for group I. 1^{st} siRNA treatment is given on day 1 (study initiation) immediately after the 1^{st} Cisplatin administration, 2^{nd} siRNA treatment is given on Day 8 (after study initiation). During the second week of the study Cisplatin is administered i.p. in the same dose and design regimes as done during the 1^{st} experimental week, 4 additional Cisplatin injections (Days 8-11). Termination step is performed 24 hrs after the last Cisplatin administration on Day 12 after study initiation.

[0341] Experimental Group III (untreated normal control rats) are sacrificed on Days 9 or 11.

### For All Groups:

[0342] Anesthesia: Rats are anesthetized with 4 ml/kg body weight (BW) of Equithesine (i.p.).

[0343] Right ear: A 10 μl sample volume eardrops is slowly instilled into the external REAC (Right external auditory canal), using blunt pipette tip. This volume is delivered into the right ear of all rats from groups I and II according study design. During and after REAC instillations, rats are kept on the contra lateral side for one hour, and are returned to cage after regaining consciousness. Alternatively a 10 μl sample volume eardrops is injected transtympanically to the right ear.

[0344] Cisplatin Administration: Rats (experimental groups I and II) are subjected to consecutive i.p. injections of Cisplatin according to the experimental design at a daily dose of: 2 mg/kg (i.p.); (injection volume: 0.6 ml per 300 g BW.).

[0345] Body weight is recorded daily for all experimental groups. Serum samples are collected from experimental groups I-II) for serum Creatinine (CREA) baseline/termination levels (all groups).

[0346] Clinical signs are recorded 30 minutes after single i.p. administration (for all cisplatin injected animals). Observations include: morbidity/mortality, autonomic activity (lacrimation, salivation piloerection), changes in gait, posture and response to handling as well as the presence of unusual behavior, tremors and convulsions etc.

[0347] Scheduled euthanasia: Rats from groups I-III are euthanized at 24 hrs or 72 hrs after last Cisplatin injection in order to assess target gene mRNA and protein time course accumulation and its knock down by siRNA treatment.

### Termination Step: by Cardiac Puncture and Blood Collection

### Tissue Collection:

### Inner Ear Soft Tissues (Modiolus Connected to it Soft Tissue and Base of the Cochlear Nerve):

[0348] All rats from all groups are decapitated. Left and right temporal bones including cochlea are gently harvested from all animals; modiolus connected to soft tissue and the base of the cochlear nerve is dissected on ice, snap frozen in liquid nitrogen, analyzed for target mRNA (qPCR) and protein (ELISA).

[0349] Kidneys (left and right) are snap frozen in liquid nitrogen in labeled 50 ml round bottom tubes and analyzed for target mRNA and protein.

### Serum/Whole Blood is Analyzed for Serum Creatinine (CREA)

[0350] (ii) Distribution of Cy3-PTEN siRNA in the Cochlea Following Local Application to the Round Window of the Ear:

[0351] A solution of 1 μg/100 μl of Cy3-PTEN siRNA (total of 0.3-0.4 μg) PBS was applied to the round window of chinchillas. The Cy3-labelled cells within the treated cochlea were analyzed 24-48 hours post siRNA round window application after sacrifice of the chinchillas. The pattern of labeling within the cochlea was similar following 24 h and 48 h and includes labeling in the basal turn of cochlea, in the middle turn of cochlea and in the apical turn of cochlea. Application of Cy3-PTEN siRNA onto scala tympani revealed labelling mainly in the basal turn of the cochlea and the middle turn of the cochlea. The Cy3 signal was persistence to up to 15 days after the application of the Cy3-PTEN siRNA. These results indicated for the first time that local application of siRNA molecules within the round window led to significant penetration of the siRNA molecules to the basal, middle and apical turns of the cochlea. The siRNA compounds of the invention are tested in this animal model which shows that there is significant penetration of these siRNA compounds to the basal, middle and apical turns of the cochlea, and that these compounds may be used in the treatment of hearing loss.

(iii) Chinchilla Model of Carboplatin-Induced or Cisplatin-Induced Cochlea Hair Cell Death

[0352] Chinchillas are pre-treated by direct administration of specific siRNA in saline to the left ear of each animal. Saline is given to the right ear of each animal as placebo. Two days following the administration of the specific siRNA compounds of the invention, the animals are treated with carboplatin (75 mg/kg ip) or cisplatin (intraperitoneal infusion of 13 mg/kg over 30 minutes). After sacrifice of the chinchillas (two weeks post carboplatin treatment) the % of dead cells of inner hair cells (THC) and outer hair cells (OHC) is calculated in the left ear (siRNA treated) and in the right ear (saline treated). It is calculated that the % of dead cells of inner hair cells (IHC) and outer hair cells (OHC) is lower in the left ear (siRNA treated) than in the right ear (saline treated).

### (iv) Chinchilla Model of Acoustic-Induced Cochlea Hair Cell Death:

[0353] The activity of specific siRNA in an acoustic trauma model is studied in chinchilla. The animals are exposed to an octave band of noise centered at 4 kHz for 2.5 h at 105 dB. The left ear of the noise-exposed chinchillas is pre-treated (48 h before the acoustic trauma) with 30 μg of siRNA in ˜10 μL of saline; the right ear is pre-treated with vehicle (saline). The compound action potential (CAP) is a convenient and reliable electrophysiological method for measuring the neural activity transmitted from the cochlea. The CAP is recorded by placing an electrode near the base of the cochlea in order to detect the local field potential that is generated when a sound stimulus, such as click or tone burst, is abruptly turned on. The functional status of each ear is assessed 2.5 weeks after the acoustic trauma. Specifically, the mean threshold of the compound action potential recorded from the round window is determined 2.5 weeks after the acoustic trauma in order to determine if the thresholds in the siRNA-treated ear are lower (better) than the untreated (saline) ear. In addition, the amount of inner and outer hair cell loss is determined in the siRNA-treated and the control ear.

[0354] siRNA molecules according to Tables A-AQ are tested in this animal model which shows that the thresholds in the siRNA-treated ear are lower (better) than in the untreated (saline) ear. In addition, the amount of inner and outer hair cell loss is lower in the siRNA-treated ear than in the control ear.

### Example 5

### Model Systems of Dry Eye

### Mouse and Rat Models for Lacrimal Inflammation (Dacryoadenitis):

[0355] 1. The nonobese diabetic (NOD) mouse model. Male NOD mice show significant inflammatory lesions of the lacrimal gland from the age of 8 weeks.

[0356] 2. The MRL/MpJ-fas_/fas_ (MRL/_) and MRL/MpJ-faslprl/faslpr (MRL/lpr) mouse models of Sjo\ddot{}gren's syndrome exhibit lacrimal gland infiltrates characterized by a predominance of CD4 T cells. The extent of the lacrimal gland inflammation is significantly greater in lacrimal glands of female MRL/_ and MRL/lpr mice.

[0357] 3. The IQI/Jic has recently been established as a new mouse model for primary Sjo\ddot{}gren's syndrome. The lymphocytic infiltration is well restricted to salivary and lacrimal glands.

[0358] 4. Rat Model: Experimental immune dacryoadenitis may be produced also in Lewis rats by sensitization with a single intradermal administration of an extract of lacrimal gland in complete Freund's adjuvant (CFA) and simultaneous intravenous injection of killed Bordetella pertussis.

### Models for Evaporative Dry Eye:

[0359] The tear film is constantly exposed to multiple environmental factors, including variable temperatures, airflow, and humidity, which may stimulate or retard its evaporation. The lipids produced by the Meibomian glands and spread onto the aqueous phase by the shear forces produced by each blink, protect the tear film from excessive evaporation. Short-term models for hyperevaporative dry eye have been created by preventing rabbits from blinking through placement of lid specula or sutures. After 2 hours of desiccation induced by lid specula, dry spots appear on the rabbit corneal epithelial surface and stain with methylene blue.

[0360] siRNA according to Tables A-AQ, in particular to the FAS and FAS ligand genes are tested in this animal model which show that these siRNA compounds treat and/or prevent dry eye.

### Example 6

### Model Systems of Glaucoma and Ischemic Optic Neuropathy

[0361] Testing the active siRNA of the invention for treating or preventing glaucoma is preformed in rat animal model for optic nerve crush described for example in: Maeda, K. et al., “A Novel Neuroprotectant against Retinal Ganglion Cell Damage in a Glaucoma Model and an Optic Nerve Crush Model in the Rat”, Investigative Ophthalmology and visual Science (IOVS), March 2004, 45(3)851. Specifically, for optic nerve transection the orbital optic nerve (ON) of anesthetized rats is exposed through a supraorbital approach, the meninges severed and all axons in the ON transected by crushing with forceps for 10 seconds, 2 mm from the lamina cribrosa.

[0362] siRNA compounds of the invention and in particular, siRNA to ASPP1, CTSD and CAPNS1, are tested in this animal model and the results show that these siRNA compounds are useful in treating and/or preventing glaucoma.

[0363] Other animal models for glaucoma and ischemic optic neuropathy for testing the siRNA compounds of the invention are as following:

[0364] For optic ischemia reperfusion model: Tsujikawa A. et al., “In Vivo Evaluation of Leukocyte Dynamics in Retinal Ischemia Reperfusion Injury”, Invest Ophthal and Visual Science (IOVS), April 1998, 39(5):793-800.

[0365] For elevated intraocular pressure model: Morrison, J C et al., “A rat model of chronic pressure-induced optic nerve damage”. Exp Eye Res. 1997. 64, 85-96.

[0366] For pharmacological ischemia reperfusion model: Masuzawa, K. et al., “A Model of Retinal Ischemia-Reperfusion Injury in Rats by Subconjunctival Injection of Endothelin-1”. Exp. Biol. Med. 2006. 231(6):1085-9.

### Example 6A

### Optic Nerve Axotomy Model

[0367] The purpose of the present study was to use a model of Retinal Ganglion Cell (RGC) apoptosis induced by axotomy of the optic nerve (ON) in adult Sprague-Dawley rats. The onset and kinetics of RGC death in this model system are reproducible and allow for the establishment of the neuroprotective efficacy of siRNA in vivo. Using this method, the time course of RGC death follows a predictable course: cell death begins on day 5 and proceeds to the rapid loss of more than 90% of these neurons by 2 weeks.

### Methods

[0368] Retrograde labeling of RGCs: For the purpose of this study, RGCs were labeled by application of the retrograde tracer FluoroGold (2%, Fluorochrome, Englewood, Colo.) in the superior colliculus. Briefly, both superior colliculi were exposed and a small piece of gelfoam soaked in FluoroGold was applied to their surface. In adult rats, the time required to obtain full labeling of all RGCs following this procedure is ˜1 week. For this reason, optic nerve axotomy and intraocular injection of siRNA molecules were performed one week after retrograde labeling of RGCs.

[0369] Optic nerve axotomy: The entire population of RGCs were axotomized by transecting the optic nerve close to the eye (0.5 to 1 mm). Retinal fundus examination was routinely performed after each axotomy to check the integrity of the retinal circulation after surgery. Animals showing signs of compromised blood supply were excluded from the study.

[0370] For intravitreal injection 10 μg in 5 μl of PBS each of the reagents, either ASPP1 siRNA or GFP siRNA were microinjected into the vitreous body 2 mm anterior to the nerve head, perpendicular to the sclera, using a glass micropipette at the time of surgery, day 0, and then repeated at day 7.

[0371] Quantification of RGC survival: Experimental and control animals were perfused transcardially with 4% paraformaldehyde at 14 days after optic nerve axotomy. The left retinas (treated) and the right retinas (untreated controls) were dissected out, fixed for an additional 30 min and flat-mounted vitreal side up on a glass slide for examination of the ganglion cell layer. RGCs backfilled with FluoroGold were counted in 12 standard retinal areas. Microglia that may have incorporated FluoroGold after phagocytosis of dying RGCs were distinguished by their characteristic morphology and excluded from our quantitative analyses.

### Experimental Design

[0372] Test article: ASPP1, CTSD, CAPNS1 siRNA: a double-stranded 19-mer oligonucleotide stabilized by 2′O-methylation on the antisense strand and L-DNA on the sense strand.

### Control Articles:

### PBS

[0373] siRNA targeting GFP—a double-stranded 21-mer oligonucleotide stabilized by 2′O-methylation on both strands.

[0374] CNL—siRNA with no match to any known mammalian transcript; a double-stranded 19-mer oligonucleotide stabilized by 2′O-methylation on both strands.

[0375] Overview of the experimental protocol: RGCs were selectively labeled first by application of the retrograde tracer FluoroGold to the superior colliculus. One week later, animals were subjected to optic nerve transection concomitantly with intravitreal injections of siRNA. The second intravitreal injection was performed on day 7 of the experiment. The quantification of surviving RGCs was carried out at 14 days after optic nerve axotomy by counting FluoroGold-labeled RGCs on flat-mounted retinas. Table 4 shows an example of groups' treatments.

TABLE 4

| | | Time of | Time of | Number of | |
|---|---|---|---|---|---|
| | SiRNA | administration | analysis | animals per | Sample |
| siRNA | Dose | (post axotomy) | (post axotomy) | group | preparation |
| siGFP, | 10 ug × 2 | Time 0 | 2 weeks | 8 | Flat mounts |
| axotomy (OS) | | 1 week | | | |
| Test siRNA | 10 ug × 2 | Time 0 | 2 weeks | 8 | Flat mounts |
| Axotomy (OS) | | 1 week | | | |

[0376] The siRNA compounds of the invention are tested in this animal model and the results show that these siRNA compounds are useful in effecting neuroprotection of the retinal ganglion.

### Example 6B

### Rat Optic Nerve Crush (ONC) Model: Intravitreal siRNA Delivery and Eye Drop Delivery

[0377] For optic nerve transection the orbital optic nerve (ON) of anesthetized rats is exposed through a supraorbital approach, the meninges severed and all axons in the ON transected by crushing with forceps for 10 seconds, 2 mm from the lamina cribrosa.

[0378] The siRNA compounds are delivered alone or in combination in 5 uL volume (10 ug/uL) as eye drops. Immediately after optic nerve crush (ONC), 20 ug/10 ul test siRNA or 10 ul PBS is administered to one or both eyes of adult Wistar rats and the levels of siRNA taken up into the dissected and snap frozen whole retinae at 5 h and 1 d, and later at 2 d, 4 d, 7 d, 14 d and 21 d post injection is determined. Similar experiments are performed in order to test activity and efficacy of siRNA administered via eye drops.

### Example 7

### Model Systems of Ischemia Reperfusion Injury Following Lung Transplantation in Rats

[0379] Lung ischemia/reperfusion injury is achieved in a rat animal model as described in Teruaki Mizobuchi et al., The Journal of Heart and Lung Transplantation, Vol 23 No. 7 (2004) and in Kazuhiro Yasufuku et al., Am. J. Respir. Cell Mol Biol, Vol 25, pp 26-34 (2001).

[0380] Specifically, after inducing anesthesia with isoflurane, the trachea is cannulated with a 14-gauge Teflon catheter and the rat is mechanically ventilated with rodent ventilator using 100% oxygen, at a rate of 70 breaths per minute and 2 cm H₂O of positive end-respiratory pressure. The left pulmonary artery, veins and main stem bronchus are occluded with a Castaneda clamp. During the operation, the lung is kept moist with saline and the incision is covered to minimize evaporative losses. The period of ischemia is 60 minutes long. At the end of the ischemic period the clamp is removed and the lung is allowed to ventilate and reperfuse for further 4 h, 24 h, and 5 d post induction of lung ischemia. At the end of the experiment, the lungs are gently harvested and either frozen for RNA extraction or fixed in glutaraldehyde cocktail for subsequent histological analysis.

[0381] The siRNA compounds of the invention are tested in this animal model and the results show that these siRNA compounds are useful in treating and/or preventing ischemia reperfusion injury following lung transplantation.

### Example 8

### Model Systems for Acute Lung Injury (ALI)

[0382] Intratracheal (i.t) administration of LPS (Lipopolysaccharide), a bacterial cell wall component, is an accepted experimental model of acute lung injury (ALI), as LPS stimulates profound lung recruitment of inflammatory cells and the subsequent development of systemic inflammation.

[0383] (See, for example, Fang W F, et al., Am J Physiol Lung Cell Mol Physiol. 2007 293(2):L336-44; Hagiwara S, Iwasaka H, Noguchi T. J Anesth. 2007; 21(2):164-70).

[0384] The siRNA compounds of the invention are tested in this animal model and the results show that these siRNA compounds are useful in treating and/or preventing acute lung injury.

### Example 9

### Model Systems of Acute Respiratory Distress Syndrome

[0385] The active siRNA compounds of the invention are tested in an animal model for acute respiratory distress syndrome as described, for example, by Chen, et al. J Biomed Sci. 2003; 10(6 Pt 1):588-92).

[0386] The results show that the siRNA compounds according to the present invention are useful in treating and/or preventing acute respiratory distress syndrome.

### Example 10

### Model Systems of Chronic Obstructive Pulmonary Disease (COPD)

[0387] Chronic obstructive pulmonary disease (COPD) is characterized mainly by emphysema, which is permanent destruction of peripheral air spaces, distal to terminal bronchioles. Emphysema is also characterized by accumulation of inflammatory cells such as macrophages and neutrophils in bronchioles and alveolar structures. Emphysema and chronic bronchitis may occur as part of COPD or independently and involve apoptosis.

[0388] Testing the active inhibitors of the invention (such as siRNA) for treating COPD/emphysema/chronic bronchitis is done in the following animal models:

[0389] Cigarette smoke-induced emphysema model: chronic exposure to cigarette smoke causes emphysema in several animals such as, inter alia, mouse, guinea pig.

[0390] Lung protease activity as a trigger of emphysema.

[0391] VEGFR inhibition model of emphysema.

[0392] Bronchial instillation with human neutrophil/pancreatic elastase in rodents.

[0393] MMP (matrix metalloprotease)-induced emphysema.

[0394] Inflammation-induced emphysema.

[0395] These models and others are described in co-assigned PCT patent application WO 2006/023544, and PCT/IL2008/000522 which are hereby incorporated by reference into this application. The siRNA compounds of the invention prevent formation of emphysema.

### Example 11

### Model Systems for Transplantation-Associated Acute Kidney Injury

[0396] Warm ischemia—A left nephrectomy is performed, followed by auto transplantation that resulted in a warm kidney graft preservation period of 45 minutes. Following auto transplantation, a right nephrectomy is performed on the same animal. An siRNA compound is administered intravenously via the femoral vein either before harvesting of the kidney graft (mimicking donor treatment) (“pre”), or after the kidney autotransplantation (mimicking recipient treatment), or both before harvest and after transplantation (combined donor and recipient treatment) (“pre-post”).

[0397] Cold ischemia—A left nephrectomy is performed on a donor animal, followed by a cold preservation (on ice) of the harvested kidney for a period of 5 hours. At the end of this period, the recipient rat undergoes a bilateral nephrectomy, followed by transplantation of the cold-preserved kidney graft. The total warm ischemia time (including surgical procedure) is 30 minutes. SiRNA is administered intravenously via the femoral vein, either to the donor animal prior to the kidney harvest (“pre”), or to the recipient animal 15 minutes (“post 15 min”) or 4 hours (post 4 hrs) post-transplantation.

[0398] To assess the efficacy of the siRNA compound in improvement of post-transplantation renal function, serum creatinine levels are measured on days 1, 2, and 7 post-transplantation in both warm and cold ischemia models.

### Example 12

### Model Systems for Neurodegenerative Diseases and Disorders

### Example 12A

### Evaluating the Efficacy of Intranasal Administration of siRNA Compounds in the APP Transgenic Mouse Model of Alzheimer's Disease

[0399] Animals and Treatment. The study includes twenty-four (24) APP [V717I] transgenic mice (female), a model for Alzheimer's disease (Moechars D. et al., EMBO J. 15(6):1265-74, 1996; Moechars D. et al., Neuroscience. 91(3):819-30), aged 11 months that are randomly divided into two equal groups (Group I and Group II).

[0400] Animals are treated with intranasal administration of SOX9, ASPP1, CTSD, CAPNS1, FAS and FAS ligand siRNA (200-400 μg/mice, Group I) and vehicle (Group II), 2-3 times a week, during 3 months.

[0401] Termination. Mice are sacrificed; brains are dissected and process one hemisphere for histology and freeze one hemisphere for shipment.

[0402] Evaluation. The following histological analysis is performed:

1. Anti-Aβ staining and quantification (4 slides/mouse):
2. Thio S staining and quantification (4 slides/mouse):
3. CD45 staining and quantification (4 slides/mouse):
4. GFAP (astrocytosis) staining and quantification:

### Example 12B

### Evaluating the Efficacy of Intranasal Administration of Specific siRNAs in a BACE-Transgenic Mouse Model of Alzheimer's Disease

[0403] Objective. The objective of this study is to test the efficacy of intranasal delivery of specific siRNA in BACE-transgenic mouse model for Alzheimer disease.

[0404] Animals and Treatment. The study includes twenty (20) BACE-1 transgenic mice (female/male), aged 4 months that are randomly divided into two equal groups. siRNA treatment is initiated at age 4 months. siRNA is administered intranasally.

### Evaluation.

[0405] 1. Behavioral test. All animals are monitored and tested for behavioral changes by subjecting the animals to periodical behavioral analysis. Spatial learning and memory in the Morris water maze is used.

[0406] 2. Brain biochemistry. The brains of five (5) mice in each group are subjected to biochemical analysis. Western blot analysis of BACE, APP, CTFs and Aβ is carried out. Assay for BACE enzymatic activity is performed.

[0407] 3. Immunohistochemistry. The left hemibrain of five (5) mice in each group is subjected to immunohistochemical analysis. Expression levels of BACE, APP and CTF are determined.

[0408] 4. Analysis of gene knockdown by qPCR are performed in the right hemibrain of five (5) mice in each group

### Example 12C

### Evaluating the Efficacy of Intranasal Administration of siRNA in a Mouse Model of ALS

[0409] Objective. To examine the efficacy of siRNA directed to the SOX9, ASPP1, CTSD, CAPNS1, FAS and FAS ligand genes in the mutant SOD1^{G93A} mouse model of ALS.

[0410] Animals and Treatment. The following experimental groups are used for studying disease progression and lifespan:

1. Group 1—Mismatch siRNA—wild-type (n=10) and SOD1^{G93A} mice (n=10)
2. Group 2—SOX9, ASPP1, CTSD, CAPNS1, FAS and FAS ligand siRNA—wild-type (n=10) and SOD1^{G93A} mice (n=10)
3. Group 3-Untreated controls—wild-type (n=10) and SOD1^{G93A} mice (n=10)

[0411] Each experimental group is sex matched (5 male, 5 female) and contain littermates from at least 3 different litters. This design reduces bias that may be introduced by using mice from only a small number of litters, or groups of mice with a larger percentage of female SOD1^{G93A} mice (since these mice live 3-4 days longer than males).

[0412] Administration of siRNA. The route of administration of the siRNA is intranasal, with administration twice weekly, starting from 30 days of age.

[0413] Analysis of disease progression. Behavioral and electromyography (EMG) analysis in treated and untreated mice is performed to monitor disease onset and progression. Mice are pre-tested before start of siRNA treatment, followed by weekly assessments. All results are compared statistically. The following tests are performed:

[0414] 1. Swimming tank test: this test is particularly sensitive at detecting changes in hind-limb motor function (Raoul et al., 2005. Nat Med. 11, 423-428; Towne et al, 2008. Mol Ther. 16: 1018-1025).

[0415] 2. Electromyography: EMG assessments are performed in the gastrocnemius muscle of the hind limbs, where compound muscle action potential (CMAP) is recorded (Raoul et al., 2005. supra).

[0416] 3. Body weight: The body weight of mice is recorded weekly, as there is a significant reduction in the body weight of SOD1^{G93A} mice during disease progression (Kieran et al., 2007. PNAS USA. 104, 20606-20611).

[0417] Assessment of lifespan. The lifespan in days for treated and untreated mice is recorded and compared statistically to determine whether siRNA treatment has any significant effect on lifespan. Mice are sacrificed at a well-defined disease end point, when they have lost >20% of body weight and are unable to raise themselves in under 20 seconds. All results are compared statistically.

[0418] Post mortem histopathology. At the disease end-point mice are terminally anaesthetized and spinal cord and hind-limb muscle tissue are collected for histological and biochemical analysis.

[0419] Examining motor neuron survival. Transverse sections of lumbar spinal cord are cut using a cryostat and stained with gallocyanin, a nissl stain. From these sections the number of motor neurons in the lumbar spinal cord is counted (Kieran et al., 2007. supra), to determine whether siRNA treatment prevents motor neuron degeneration in SOD1^{G93A} mice.

[0420] Examining spinal cord histopathology. Motor neuron degeneration in SOD1^{G93A} mice results in astrogliosis and activation of microglial cells. Here, using transverse sections of lumbar spinal cord the activation of astocytes and microglial cells is examined using immunocytochemistry to determine whether siRNA treatment reduced or prevented their activation.

[0421] Examining muscle histology. Hind-limb muscle denervation and atrophy occur as a consequence of motor neuron degeneration in SOD1^{G93A} mice. At the disease end point the weight of individual hind-limb muscles (gastrocnemius, soleus, tibialis anterior, extensor digitorium longus muscles) is recorded and compared between treated and untreated mice.

[0422] Muscles are then processed histologically to examine motor end plate denervation and muscle atrophy (Kieran et al., 2005. J Cell Biol. 169, 561-567).

[0423] For further elaboration on model systems which are used to test the compounds of the present invention, see International patent publication Nos. WO 06/023544A2, WO 2006/035434 and WO 2007/084684A2, co-assigned or assigned to the assignee of the present invention, which are hereby incorporated by reference in their entirety.

Lengthy table referenced here
US20110034534A1-20110210-T00001
Please refer to the end of the specification for access instructions.

Lengthy table referenced here
US20110034534A1-20110210-T00002
Please refer to the end of the specification for access instructions.

Lengthy table referenced here
US20110034534A1-20110210-T00003
Please refer to the end of the specification for access instructions.

Lengthy table referenced here
US20110034534A1-20110210-T00004
Please refer to the end of the specification for access instructions.

Lengthy table referenced here
US20110034534A1-20110210-T00005
Please refer to the end of the specification for access instructions.

Lengthy table referenced here
US20110034534A1-20110210-T00006
Please refer to the end of the specification for access instructions.

Lengthy table referenced here
US20110034534A1-20110210-T00007
Please refer to the end of the specification for access instructions.

Lengthy table referenced here
US20110034534A1-20110210-T00008
Please refer to the end of the specification for access instructions.

Lengthy table referenced here
US20110034534A1-20110210-T00009
Please refer to the end of the specification for access instructions.

Lengthy table referenced here
US20110034534A1-20110210-T00010
Please refer to the end of the specification for access instructions.

Lengthy table referenced here
US20110034534A1-20110210-T00011
Please refer to the end of the specification for access instructions.

Lengthy table referenced here
US20110034534A1-20110210-T00012
Please refer to the end of the specification for access instructions.

Lengthy table referenced here
US20110034534A1-20110210-T00013
Please refer to the end of the specification for access instructions.

Lengthy table referenced here
US20110034534A1-20110210-T00014
Please refer to the end of the specification for access instructions.

Lengthy table referenced here
US20110034534A1-20110210-T00015
Please refer to the end of the specification for access instructions.

Lengthy table referenced here
US20110034534A1-20110210-T00016
Please refer to the end of the specification for access instructions.

Lengthy table referenced here
US20110034534A1-20110210-T00017
Please refer to the end of the specification for access instructions.

Lengthy table referenced here
US20110034534A1-20110210-T00018
Please refer to the end of the specification for access instructions.

Lengthy table referenced here
US20110034534A1-20110210-T00019
Please refer to the end of the specification for access instructions.

Lengthy table referenced here
US20110034534A1-20110210-T00020
Please refer to the end of the specification for access instructions.

Lengthy table referenced here
US20110034534A1-20110210-T00021
Please refer to the end of the specification for access instructions.

Lengthy table referenced here
US20110034534A1-20110210-T00022
Please refer to the end of the specification for access instructions.

Lengthy table referenced here
US20110034534A1-20110210-T00023
Please refer to the end of the specification for access instructions.

Lengthy table referenced here
US20110034534A1-20110210-T00024
Please refer to the end of the specification for access instructions.

Lengthy table referenced here
US20110034534A1-20110210-T00025
Please refer to the end of the specification for access instructions.

Lengthy table referenced here
US20110034534A1-20110210-T00026
Please refer to the end of the specification for access instructions.

Lengthy table referenced here
US20110034534A1-20110210-T00027
Please refer to the end of the specification for access instructions.

Lengthy table referenced here
US20110034534A1-20110210-T00028
Please refer to the end of the specification for access instructions.

Lengthy table referenced here
US20110034534A1-20110210-T00029
Please refer to the end of the specification for access instructions.

Lengthy table referenced here
US20110034534A1-20110210-T00030
Please refer to the end of the specification for access instructions.

Lengthy table referenced here
US20110034534A1-20110210-T00031
Please refer to the end of the specification for access instructions.

Lengthy table referenced here
US20110034534A1-20110210-T00032
Please refer to the end of the specification for access instructions.

Lengthy table referenced here
US20110034534A1-20110210-T00033
Please refer to the end of the specification for access instructions.

Lengthy table referenced here
US20110034534A1-20110210-T00034
Please refer to the end of the specification for access instructions.

Lengthy table referenced here
US20110034534A1-20110210-T00035
Please refer to the end of the specification for access instructions.

Lengthy table referenced here
US20110034534A1-20110210-T00036
Please refer to the end of the specification for access instructions.

Lengthy table referenced here
US20110034534A1-20110210-T00037
Please refer to the end of the specification for access instructions.

Lengthy table referenced here
US20110034534A1-20110210-T00038
Please refer to the end of the specification for access instructions.

Lengthy table referenced here
US20110034534A1-20110210-T00039
Please refer to the end of the specification for access instructions.

Lengthy table referenced here
US20110034534A1-20110210-T00040
Please refer to the end of the specification for access instructions.

Lengthy table referenced here
US20110034534A1-20110210-T00041
Please refer to the end of the specification for access instructions.

Lengthy table referenced here
US20110034534A1-20110210-T00042
Please refer to the end of the specification for access instructions.

Lengthy table referenced here
US20110034534A1-20110210-T00043
Please refer to the end of the specification for access instructions.

Lengthy table referenced here
US20110034534A1-20110210-T00044
Please refer to the end of the specification for access instructions.

LENGTHY TABLES
The patent application contains a lengthy table section. A copy of the table is available in electronic form from the USPTO web site (http://seqdata.uspto.gov/?pageRequest=docDetail&DocID=US20110034534A1). An electronic copy of the table will also be available from the USPTO upon request and payment of the fee set forth in 37 CFR 1.19(b)(3).

The application's sequence listing, which the Patent Office published only in electronic form, follows.

SEQUENCE LISTING (41052 sequences)

SEQ ID NO: 1 - RNA, 19 nt, Artificial
  Chemically synthesized
gacagaccuuaaucuuaau

SEQ ID NO: 2 - RNA, 19 nt, Artificial
  Chemically synthesized
ccgagaugauccuaaaaau

SEQ ID NO: 3 - RNA, 19 nt, Artificial
  Chemically synthesized
ggagcugccuuaaaaaaaa

SEQ ID NO: 4 - RNA, 19 nt, Artificial
  Chemically synthesized
cgagaugauccuaaaaaua

SEQ ID NO: 5 - RNA, 19 nt, Artificial
  Chemically synthesized
ccuucaaccucccacacua

SEQ ID NO: 6 - RNA, 19 nt, Artificial
  Chemically synthesized
ggaggagcugccuuaaaaa

SEQ ID NO: 7 - RNA, 19 nt, Artificial
  Chemically synthesized
gagguaaaaggcaagcaaa

SEQ ID NO: 8 - RNA, 19 nt, Artificial
  Chemically synthesized
cagcgaaaucaacgagaaa

SEQ ID NO: 9 - RNA, 19 nt, Artificial
  Chemically synthesized
gauccuaaaaauaaccgaa

SEQ ID NO: 10 - RNA, 19 nt, Artificial
  Chemically synthesized
ugacagaccuuaaucuuaa

SEQ ID NO: 11 - RNA, 19 nt, Artificial
  Chemically synthesized
cgaagauggccgagaugau

SEQ ID NO: 12 - RNA, 19 nt, Artificial
  Chemically synthesized
ccuuaaucuuaauuacugc

SEQ ID NO: 13 - RNA, 19 nt, Artificial
  Chemically synthesized
ccuaaaaauaaccgaagaa

SEQ ID NO: 14 - RNA, 19 nt, Artificial
  Chemically synthesized
ggccgagaugauccuaaaa

SEQ ID NO: 15 - RNA, 19 nt, Artificial
  Chemically synthesized
cgaagaaagagaggaccaa

SEQ ID NO: 16 - RNA, 19 nt, Artificial
  Chemically synthesized
aguugaacagugugcccua

SEQ ID NO: 17 - RNA, 19 nt, Artificial
  Chemically synthesized
gccuguuuggacuuuguaa

SEQ ID NO: 18 - RNA, 19 nt, Artificial
  Chemically synthesized
agaacaagccgcacgucaa

SEQ ID NO: 19 - RNA, 19 nt, Artificial
  Chemically synthesized
ugauccuaaaaauaaccga

SEQ ID NO: 20 - RNA, 19 nt, Artificial
  Chemically synthesized
aauggagcagcgaaaucaa

SEQ ID NO: 21 - RNA, 19 nt, Artificial
  Chemically synthesized
gaagagaaaaacaccuuga

SEQ ID NO: 22 - RNA, 19 nt, Artificial
  Chemically synthesized
caauuaugggaguaaacaa

SEQ ID NO: 23 - RNA, 19 nt, Artificial
  Chemically synthesized
cgugaaacuuaccuuuccc

SEQ ID NO: 24 - RNA, 19 nt, Artificial
  Chemically synthesized
agagguaaaaggcaagcaa

SEQ ID NO: 25 - RNA, 19 nt, Artificial
  Chemically synthesized
gaauguuucagcagccaau

SEQ ID NO: 26 - RNA, 19 nt, Artificial
  Chemically synthesized
uguugaaaacaaacuggaa

SEQ ID NO: 27 - RNA, 19 nt, Artificial
  Chemically synthesized
gugugaucagugugcuaaa

SEQ ID NO: 28 - RNA, 19 nt, Artificial
  Chemically synthesized
cgagaaacuggacuuuuua

SEQ ID NO: 29 - RNA, 19 nt, Artificial
  Chemically synthesized
cucguacccaaauuuccaa

SEQ ID NO: 30 - RNA, 19 nt, Artificial
  Chemically synthesized
cagcgaacgcacaucaaga

SEQ ID NO: 31 - RNA, 19 nt, Artificial
  Chemically synthesized
agaaagagguaaaaggcaa

SEQ ID NO: 32 - RNA, 19 nt, Artificial
  Chemically synthesized
uccuaaaaauaaccgaaga

SEQ ID NO: 33 - RNA, 19 nt, Artificial
  Chemically synthesized
ggaauguuucagcagccaa

SEQ ID NO: 34 - RNA, 19 nt, Artificial
  Chemically synthesized
agacauuccacuugcuaaa

SEQ ID NO: 35 - RNA, 19 nt, Artificial
  Chemically synthesized
caaccagaguauuuuugua

SEQ ID NO: 36 - RNA, 19 nt, Artificial
  Chemically synthesized
ggcaagcaaaggagaugaa

SEQ ID NO: 37 - RNA, 19 nt, Artificial
  Chemically synthesized
agcucuggagacuucugaa

SEQ ID NO: 38 - RNA, 19 nt, Artificial
  Chemically synthesized
ccgugaaacuuaccuuucc

SEQ ID NO: 39 - RNA, 19 nt, Artificial
  Chemically synthesized
gcuaaauggagcagcgaaa

SEQ ID NO: 40 - RNA, 19 nt, Artificial
  Chemically synthesized
aagagaggaccaaccagaa

SEQ ID NO: 41 - RNA, 19 nt, Artificial
  Chemically synthesized
ggagcagcgaaaucaacga

SEQ ID NO: 42 - RNA, 19 nt, Artificial
  Chemically synthesized
caagcaaaggagaugaaau

SEQ ID NO: 43 - RNA, 19 nt, Artificial
  Chemically synthesized
aagaaaccuggcauuuaaa

SEQ ID NO: 44 - RNA, 19 nt, Artificial
  Chemically synthesized
ggaugauggagaaucgugu

SEQ ID NO: 45 - RNA, 19 nt, Artificial
  Chemically synthesized
ccaaauuuccaagacacaa

SEQ ID NO: 46 - RNA, 19 nt, Artificial
  Chemically synthesized
gagcugccuuaaaaaaaaa

SEQ ID NO: 47 - RNA, 19 nt, Artificial
  Chemically synthesized
gagcuuuccucaaagggua

SEQ ID NO: 48 - RNA, 19 nt, Artificial
  Chemically synthesized
caaaaacaaugcaagcaug

SEQ ID NO: 49 - RNA, 19 nt, Artificial
  Chemically synthesized
ccaccuucaccuacaugaa

SEQ ID NO: 50 - RNA, 19 nt, Artificial
  Chemically synthesized
ccuucaugaagaugaccga

SEQ ID NO: 51 - RNA, 19 nt, Artificial
  Chemically synthesized
cagucuuaagaaagaggua

SEQ ID NO: 52 - RNA, 19 nt, Artificial
  Chemically synthesized
gcuaaaucucucugccugu

SEQ ID NO: 53 - RNA, 19 nt, Artificial
  Chemically synthesized
cgcucacaguacgacuaca

SEQ ID NO: 54 - RNA, 19 nt, Artificial
  Chemically synthesized
ggugcugcugggaaacauu

SEQ ID NO: 55 - RNA, 19 nt, Artificial
  Chemically synthesized
ugacacaaaaacaaugcaa

SEQ ID NO: 56 - RNA, 19 nt, Artificial
  Chemically synthesized
cccaaauuuccaagacaca

SEQ ID NO: 57 - RNA, 19 nt, Artificial
  Chemically synthesized
guuuuagaagucaguagaa

SEQ ID NO: 58 - RNA, 19 nt, Artificial
  Chemically synthesized
caaaggagaugaaaucugu

SEQ ID NO: 59 - RNA, 19 nt, Artificial
  Chemically synthesized
aaaggcaacucguacccaa

SEQ ID NO: 60 - RNA, 19 nt, Artificial
  Chemically synthesized
ggcuaaauggagcagcgaa

SEQ ID NO: 61 - RNA, 19 nt, Artificial
  Chemically synthesized
gaacgcacaucaagacgga

SEQ ID NO: 62 - RNA, 19 nt, Artificial
  Chemically synthesized
gagaaacuggacuuuuuaa

SEQ ID NO: 63 - RNA, 19 nt, Artificial
  Chemically synthesized
augagagauugcaaaugua

SEQ ID NO: 64 - RNA, 19 nt, Artificial
  Chemically synthesized
aagcguggaggaugaugga

SEQ ID NO: 65 - RNA, 19 nt, Artificial
  Chemically synthesized
ggguuaacuuugcuuaauu

SEQ ID NO: 66 - RNA, 19 nt, Artificial
  Chemically synthesized
agaccuuugggcugccuua

SEQ ID NO: 67 - RNA, 19 nt, Artificial
  Chemically synthesized
gaugaaaucuguucuggga

SEQ ID NO: 68 - RNA, 19 nt, Artificial
  Chemically synthesized
guugaaaacaaacuggaaa

SEQ ID NO: 69 - RNA, 19 nt, Artificial
  Chemically synthesized
ccucaaaggguauggucau

SEQ ID NO: 70 - RNA, 19 nt, Artificial
  Chemically synthesized
acggcuccagcaagaacaa

SEQ ID NO: 71 - RNA, 19 nt, Artificial
  Chemically synthesized
acauuuaagcuaaaggcaa

SEQ ID NO: 72 - RNA, 19 nt, Artificial
  Chemically synthesized
caguguuuucugccacaga

SEQ ID NO: 73 - RNA, 19 nt, Artificial
  Chemically synthesized
aagacauuccacuugcuaa

SEQ ID NO: 74 - RNA, 19 nt, Artificial
  Chemically synthesized
cauccauauuucucuacau

SEQ ID NO: 75 - RNA, 19 nt, Artificial
  Chemically synthesized
caagcaugugucauccaua

SEQ ID NO: 76 - RNA, 19 nt, Artificial
  Chemically synthesized
cccacugacagaccuuaau

SEQ ID NO: 77 - RNA, 19 nt, Artificial
  Chemically synthesized
ccuggcauuuaaaucauau

SEQ ID NO: 78 - RNA, 19 nt, Artificial
  Chemically synthesized
ggccuuauuuugcaauuau

SEQ ID NO: 79 - RNA, 19 nt, Artificial
  Chemically synthesized
cugugaggaauauucucua

SEQ ID NO: 80 - RNA, 19 nt, Artificial
  Chemically synthesized
aaaucaacgagaaacugga

SEQ ID NO: 81 - RNA, 19 nt, Artificial
  Chemically synthesized
gccgagaugauccuaaaaa

SEQ ID NO: 82 - RNA, 19 nt, Artificial
  Chemically synthesized
ugaagaugaccgacgagca

SEQ ID NO: 83 - RNA, 19 nt, Artificial
  Chemically synthesized
uugcaauuaugggaguaaa

SEQ ID NO: 84 - RNA, 19 nt, Artificial
  Chemically synthesized
cgcguaugaaucuccugga

SEQ ID NO: 85 - RNA, 19 nt, Artificial
  Chemically synthesized
gcccuagcuuuucuugcaa

SEQ ID NO: 86 - RNA, 19 nt, Artificial
  Chemically synthesized
agcucgaaacugacuggaa

SEQ ID NO: 87 - RNA, 19 nt, Artificial
  Chemically synthesized
cauaauauggcauccuuca

SEQ ID NO: 88 - RNA, 19 nt, Artificial
  Chemically synthesized
cucaggcuuugcgauuuaa

SEQ ID NO: 89 - RNA, 19 nt, Artificial
  Chemically synthesized
accuggcauuuaaaucaua

SEQ ID NO: 90 - RNA, 19 nt, Artificial
  Chemically synthesized
gaggagcugccuuaaaaaa

SEQ ID NO: 91 - RNA, 19 nt, Artificial
  Chemically synthesized
ccggaaacuuuucuuugca

SEQ ID NO: 92 - RNA, 19 nt, Artificial
  Chemically synthesized
cuccgugaaacuuaccuuu

SEQ ID NO: 93 - RNA, 19 nt, Artificial
  Chemically synthesized
aaggcaacucguacccaaa

SEQ ID NO: 94 - RNA, 19 nt, Artificial
  Chemically synthesized
cuuuguauuccucacccua

SEQ ID NO: 95 - RNA, 19 nt, Artificial
  Chemically synthesized
cuuuuguucucuccgugaa

SEQ ID NO: 96 - RNA, 19 nt, Artificial
  Chemically synthesized
uggagacuucugaacgaga

SEQ ID NO: 97 - RNA, 19 nt, Artificial
  Chemically synthesized
ccauauuucucuacaucuu

SEQ ID NO: 98 - RNA, 19 nt, Artificial
  Chemically synthesized
uguggauguccaagcagca

SEQ ID NO: 99 - RNA, 19 nt, Artificial
  Chemically synthesized
acucguacccaaauuucca

SEQ ID NO: 100 - RNA, 19 nt, Artificial
  Chemically synthesized
cauuccacuugcuaaaauu

SEQ ID NO: 101 - RNA, 19 nt, Artificial
  Chemically synthesized
ucuagagaagcauuuggua

SEQ ID NO: 102 - RNA, 19 nt, Artificial
  Chemically synthesized
ccuguuuggacuuuguaau

SEQ ID NO: 103 - RNA, 19 nt, Artificial
  Chemically synthesized
ggagacucgccaguuucaa

SEQ ID NO: 104 - RNA, 19 nt, Artificial
  Chemically synthesized
gcuuguucacugcagucuu

SEQ ID NO: 105 - RNA, 19 nt, Artificial
  Chemically synthesized
ucgagaccuucgaugucaa

SEQ ID NO: 106 - RNA, 19 nt, Artificial
  Chemically synthesized
cuguggcuagagaguuuga

SEQ ID NO: 107 - RNA, 19 nt, Artificial
  Chemically synthesized
ucgugugaucagugugcua

SEQ ID NO: 108 - RNA, 19 nt, Artificial
  Chemically synthesized
gcccacugacagaccuuaa

SEQ ID NO: 109 - RNA, 19 nt, Artificial
  Chemically synthesized
gggaauguuucagcagcca

SEQ ID NO: 110 - RNA, 19 nt, Artificial
  Chemically synthesized
ggaccaaccagaauucccu

SEQ ID NO: 111 - RNA, 19 nt, Artificial
  Chemically synthesized
acuacaccgaccaccagaa

SEQ ID NO: 112 - RNA, 19 nt, Artificial
  Chemically synthesized
aguuaaccuucaagacauu

SEQ ID NO: 113 - RNA, 19 nt, Artificial
  Chemically synthesized
ucuggagacuucugaacga

SEQ ID NO: 114 - RNA, 19 nt, Artificial
  Chemically synthesized
ccuuuuuguccaucccuuu

SEQ ID NO: 115 - RNA, 19 nt, Artificial
  Chemically synthesized
uauggucaucuguuguuaa

SEQ ID NO: 116 - RNA, 19 nt, Artificial
  Chemically synthesized
acagcucacucgaccuuga

SEQ ID NO: 117 - RNA, 19 nt, Artificial
  Chemically synthesized
gaaacauuugcacucuuuu

SEQ ID NO: 118 - RNA, 19 nt, Artificial
  Chemically synthesized
agcuuuucuugcaaccaga

SEQ ID NO: 119 - RNA, 19 nt, Artificial
  Chemically synthesized
ccgaagaaagagaggacca

SEQ ID NO: 120 - RNA, 19 nt, Artificial
  Chemically synthesized
uuguauuccucacccuaga

SEQ ID NO: 121 - RNA, 19 nt, Artificial
  Chemically synthesized
agaaaaacaccuugagccu

SEQ ID NO: 122 - RNA, 19 nt, Artificial
  Chemically synthesized
guauguacuguguaugauu

SEQ ID NO: 123 - RNA, 19 nt, Artificial
  Chemically synthesized
ccuuuuguucucuccguga

SEQ ID NO: 124 - RNA, 19 nt, Artificial
  Chemically synthesized
gaaacuuuucuuugcagga

SEQ ID NO: 125 - RNA, 19 nt, Artificial
  Chemically synthesized
guuucagcagccaauaagu

SEQ ID NO: 126 - RNA, 19 nt, Artificial
  Chemically synthesized
aaaaggcaagcaaaggaga

SEQ ID NO: 127 - RNA, 19 nt, Artificial
  Chemically synthesized
uccucacccuagauuugua

SEQ ID NO: 128 - RNA, 19 nt, Artificial
  Chemically synthesized
ccaacaucgagaccuucga

SEQ ID NO: 129 - RNA, 19 nt, Artificial
  Chemically synthesized
agguaaaaggcaagcaaag

SEQ ID NO: 130 - RNA, 19 nt, Artificial
  Chemically synthesized
ggcuagagaguuugaggau

SEQ ID NO: 131 - RNA, 19 nt, Artificial
  Chemically synthesized
aggagcugccuuaaaaaaa

SEQ ID NO: 132 - RNA, 19 nt, Artificial
  Chemically synthesized
gccuuuuuguccaucccuu

SEQ ID NO: 133 - RNA, 19 nt, Artificial
  Chemically synthesized
cagaguauuuuuguacaga

SEQ ID NO: 134 - RNA, 19 nt, Artificial
  Chemically synthesized
cgugugaucagugugcuaa

SEQ ID NO: 135 - RNA, 19 nt, Artificial
  Chemically synthesized
agagaggaccaaccagaau

SEQ ID NO: 136 - RNA, 19 nt, Artificial
  Chemically synthesized
gucuuaagaaagagguaaa

SEQ ID NO: 137 - RNA, 19 nt, Artificial
  Chemically synthesized
auggucaucuguuguuaaa

SEQ ID NO: 138 - RNA, 19 nt, Artificial
  Chemically synthesized
caggccaaccuuggcuaaa

SEQ ID NO: 139 - RNA, 19 nt, Artificial
  Chemically synthesized
acguguggauguccaagca

SEQ ID NO: 140 - RNA, 19 nt, Artificial
  Chemically synthesized
cagaauuguguuaugugau

SEQ ID NO: 141 - RNA, 19 nt, Artificial
  Chemically synthesized
ccuucaagacauuccacuu

SEQ ID NO: 142 - RNA, 19 nt, Artificial
  Chemically synthesized
uaaaggccuuauuuugcaa

SEQ ID NO: 143 - RNA, 19 nt, Artificial
  Chemically synthesized
aguuuuagaagucaguaga

SEQ ID NO: 144 - RNA, 19 nt, Artificial
  Chemically synthesized
gauucauuaccauuuugag

SEQ ID NO: 145 - RNA, 19 nt, Artificial
  Chemically synthesized
accagcaguuaaccuucaa

SEQ ID NO: 146 - RNA, 19 nt, Artificial
  Chemically synthesized
ugucauccauauuucucua

SEQ ID NO: 147 - RNA, 19 nt, Artificial
  Chemically synthesized
ggagacuucugaacgagag

SEQ ID NO: 148 - RNA, 19 nt, Artificial
  Chemically synthesized
aggaccacccggauuacaa

SEQ ID NO: 149 - RNA, 19 nt, Artificial
  Chemically synthesized
gcgaaaucaacgagaaacu

SEQ ID NO: 150 - RNA, 19 nt, Artificial
  Chemically synthesized
gagaguuugaggauugcuu

SEQ ID NO: 151 - RNA, 19 nt, Artificial
  Chemically synthesized
aacagugugcccuagcuuu

SEQ ID NO: 152 - RNA, 19 nt, Artificial
  Chemically synthesized
aaaaacaccuugagccuua

SEQ ID NO: 153 - RNA, 19 nt, Artificial
  Chemically synthesized
uguguaugauucauuacca

SEQ ID NO: 154 - RNA, 19 nt, Artificial
  Chemically synthesized
gcauccuucaauuucugua

SEQ ID NO: 155 - RNA, 19 nt, Artificial
  Chemically synthesized
acagugugcccuagcuuuu

SEQ ID NO: 156 - RNA, 19 nt, Artificial
  Chemically synthesized
cuucuucuucuuccuuaaa

SEQ ID NO: 157 - RNA, 19 nt, Artificial
  Chemically synthesized
gaugauccuaaaaauaacc

SEQ ID NO: 158 - RNA, 19 nt, Artificial
  Chemically synthesized
cuuugcgauuuaaggagga

SEQ ID NO: 159 - RNA, 19 nt, Artificial
  Chemically synthesized
cuuauuuuuccaacagcua

SEQ ID NO: 160 - RNA, 19 nt, Artificial
  Chemically synthesized
guaaaaggcaagcaaagga

SEQ ID NO: 161 - RNA, 19 nt, Artificial
  Chemically synthesized
gaguaaacaauagucuaga

SEQ ID NO: 162 - RNA, 19 nt, Artificial
  Chemically synthesized
cauuuaagcuaaaggcaac

SEQ ID NO: 163 - RNA, 19 nt, Artificial
  Chemically synthesized
gagagauugcaaauguagu

SEQ ID NO: 164 - RNA, 19 nt, Artificial
  Chemically synthesized
cuucugaacgagagcgaga

SEQ ID NO: 165 - RNA, 19 nt, Artificial
  Chemically synthesized
aagagaaaaacaccuugag

SEQ ID NO: 166 - RNA, 19 nt, Artificial
  Chemically synthesized
aaauguaguguaucacuga

SEQ ID NO: 167 - RNA, 19 nt, Artificial
  Chemically synthesized
aaauaaccgaagaaagaga

SEQ ID NO: 168 - RNA, 19 nt, Artificial
  Chemically synthesized
ugcucuuauuuuuccaaca

SEQ ID NO: 169 - RNA, 19 nt, Artificial
  Chemically synthesized
gccuuauuuugcaauuaug

SEQ ID NO: 170 - RNA, 19 nt, Artificial
  Chemically synthesized
cguacccaaauuuccaaga

SEQ ID NO: 171 - RNA, 19 nt, Artificial
  Chemically synthesized
agaaaaaaguccucuguga

SEQ ID NO: 172 - RNA, 19 nt, Artificial
  Chemically synthesized
ggguauggucaucuguugu

SEQ ID NO: 173 - RNA, 19 nt, Artificial
  Chemically synthesized
ucaacgaguuugaccagua

SEQ ID NO: 174 - RNA, 19 nt, Artificial
  Chemically synthesized
aaacugacuggaaacuuca

SEQ ID NO: 175 - RNA, 19 nt, Artificial
  Chemically synthesized
ccuugagccuuaaaacggu

SEQ ID NO: 176 - RNA, 19 nt, Artificial
  Chemically synthesized
acaaaaacaaugcaagcau

SEQ ID NO: 177 - RNA, 19 nt, Artificial
  Chemically synthesized
gacauuuaagcuaaaggca

SEQ ID NO: 178 - RNA, 19 nt, Artificial
  Chemically synthesized
cuaaauggagcagcgaaau

SEQ ID NO: 179 - RNA, 19 nt, Artificial
  Chemically synthesized
cucaaaggcuacgacugga

SEQ ID NO: 180 - RNA, 19 nt, Artificial
  Chemically synthesized
uguaaggagagguuuuaau

SEQ ID NO: 181 - RNA, 19 nt, Artificial
  Chemically synthesized
accagaguauuuuuguaca

SEQ ID NO: 182 - RNA, 19 nt, Artificial
  Chemically synthesized
cuucaaccucccacacuac

SEQ ID NO: 183 - RNA, 19 nt, Artificial
  Chemically synthesized
acuccaccuucaccuacau

SEQ ID NO: 184 - RNA, 19 nt, Artificial
  Chemically synthesized
guguaugauucauuaccau

SEQ ID NO: 185 - RNA, 19 nt, Artificial
  Chemically synthesized
aggcuuugcgauuuaagga

SEQ ID NO: 186 - RNA, 19 nt, Artificial
  Chemically synthesized
gacauuccacuugcuaaaa

SEQ ID NO: 187 - RNA, 19 nt, Artificial
  Chemically synthesized
caugaccuauccaagcgca

SEQ ID NO: 188 - RNA, 19 nt, Artificial
  Chemically synthesized
uuguaaggagagguuuuaa

SEQ ID NO: 189 - RNA, 19 nt, Artificial
  Chemically synthesized
acgagaaacuggacuuuuu

SEQ ID NO: 190 - RNA, 19 nt, Artificial
  Chemically synthesized
ccuucgaugucaacgaguu

SEQ ID NO: 191 - RNA, 19 nt, Artificial
  Chemically synthesized
uugcaggaggagaagagaa

SEQ ID NO: 192 - RNA, 19 nt, Artificial
  Chemically synthesized
gacacaaaaacaaugcaag

SEQ ID NO: 193 - RNA, 19 nt, Artificial
  Chemically synthesized
aggccaaccuuggcuaaau

SEQ ID NO: 194 - RNA, 19 nt, Artificial
  Chemically synthesized
caauagucuagagaagcau

SEQ ID NO: 195 - RNA, 19 nt, Artificial
  Chemically synthesized
aaaacaccuugagccuuaa

SEQ ID NO: 196 - RNA, 19 nt, Artificial
  Chemically synthesized
caaguuucuuuguauuccu

SEQ ID NO: 197 - RNA, 19 nt, Artificial
  Chemically synthesized
cauuugguaagcuuuauca

SEQ ID NO: 198 - RNA, 19 nt, Artificial
  Chemically synthesized
cuguucugggaauguuuca

SEQ ID NO: 199 - RNA, 19 nt, Artificial
  Chemically synthesized
agaaggaccacccggauua

SEQ ID NO: 200 - RNA, 19 nt, Artificial
  Chemically synthesized
acgucaucuccaacaucga

SEQ ID NO: 201 - RNA, 19 nt, Artificial
  Chemically synthesized
aaacaaacuggaaacuugu

SEQ ID NO: 202 - RNA, 19 nt, Artificial
  Chemically synthesized
aaacaccuugagccuuaaa

SEQ ID NO: 203 - RNA, 19 nt, Artificial
  Chemically synthesized
gauacuucuguaacuuaag

SEQ ID NO: 204 - RNA, 19 nt, Artificial
  Chemically synthesized
aaaacggugcugcugggaa

SEQ ID NO: 205 - RNA, 19 nt, Artificial
  Chemically synthesized
cuaaacuacucuuaguuga

SEQ ID NO: 206 - RNA, 19 nt, Artificial
  Chemically synthesized
auguuucagcagccaauaa

SEQ ID NO: 207 - RNA, 19 nt, Artificial
  Chemically synthesized
aaaggagaugaaaucuguu

SEQ ID NO: 208 - RNA, 19 nt, Artificial
  Chemically synthesized
aaagagaggaccaaccaga

SEQ ID NO: 209 - RNA, 19 nt, Artificial
  Chemically synthesized
ugaagaaggagagcgagga

SEQ ID NO: 210 - RNA, 19 nt, Artificial
  Chemically synthesized
cucucugccuguuuggacu

SEQ ID NO: 211 - RNA, 19 nt, Artificial
  Chemically synthesized
acuuuucuuugcaggagga

SEQ ID NO: 212 - RNA, 19 nt, Artificial
  Chemically synthesized
guauaaaugagagauugca

SEQ ID NO: 213 - RNA, 19 nt, Artificial
  Chemically synthesized
uaaccuucaagacauucca

SEQ ID NO: 214 - RNA, 19 nt, Artificial
  Chemically synthesized
gaaagagaggaccaaccag

SEQ ID NO: 215 - RNA, 19 nt, Artificial
  Chemically synthesized
agaaaccuggcauuuaaau

SEQ ID NO: 216 - RNA, 19 nt, Artificial
  Chemically synthesized
aacaccuugagccuuaaaa

SEQ ID NO: 217 - RNA, 19 nt, Artificial
  Chemically synthesized
cauccuucaauuucuguau

SEQ ID NO: 218 - RNA, 19 nt, Artificial
  Chemically synthesized
cuguauaaaagcagaucuu

SEQ ID NO: 219 - RNA, 19 nt, Artificial
  Chemically synthesized
gagucauuugcaguguuuu

SEQ ID NO: 220 - RNA, 19 nt, Artificial
  Chemically synthesized
acugcagucuuaagaaaga

SEQ ID NO: 221 - RNA, 19 nt, Artificial
  Chemically synthesized
aaggaggagcugccuuaaa

SEQ ID NO: 222 - RNA, 19 nt, Artificial
  Chemically synthesized
cuacacacagcucacucga

SEQ ID NO: 223 - RNA, 19 nt, Artificial
  Chemically synthesized
gguuuguguucguguuuug

SEQ ID NO: 224 - RNA, 19 nt, Artificial
  Chemically synthesized
aagaaagagguaaaaggca

SEQ ID NO: 225 - RNA, 19 nt, Artificial
  Chemically synthesized
aucugaagaaggagagcga

SEQ ID NO: 226 - RNA, 19 nt, Artificial
  Chemically synthesized
uuucuuugcaggaggagaa

SEQ ID NO: 227 - RNA, 19 nt, Artificial
  Chemically synthesized
gaccaaccagaauucccuu

SEQ ID NO: 228 - RNA, 19 nt, Artificial
  Chemically synthesized
cugccuguuuggacuuugu

SEQ ID NO: 229 - RNA, 19 nt, Artificial
  Chemically synthesized
cggaaacuuuucuuugcag

SEQ ID NO: 230 - RNA, 19 nt, Artificial
  Chemically synthesized
aggccuuauuuugcaauua

SEQ ID NO: 231 - RNA, 19 nt, Artificial
  Chemically synthesized
gcgacgucaucuccaacau

SEQ ID NO: 232 - RNA, 19 nt, Artificial
  Chemically synthesized
cacugacagaccuuaaucu

SEQ ID NO: 233 - RNA, 19 nt, Artificial
  Chemically synthesized
aauguuucagcagccaaua

SEQ ID NO: 234 - RNA, 19 nt, Artificial
  Chemically synthesized
ugaacagugugcccuagcu

SEQ ID NO: 235 - RNA, 19 nt, Artificial
  Chemically synthesized
cagugugcuaaaucucucu

SEQ ID NO: 236 - RNA, 19 nt, Artificial
  Chemically synthesized
aacuuugcuuaauuccuca

SEQ ID NO: 237 - RNA, 19 nt, Artificial
  Chemically synthesized
uaguauguacuguguauga

SEQ ID NO: 238 - RNA, 19 nt, Artificial
  Chemically synthesized
caauaagugcccgagcaca

SEQ ID NO: 239 - RNA, 19 nt, Artificial
  Chemically synthesized
cagcaguuaaccuucaaga

SEQ ID NO: 240 - RNA, 19 nt, Artificial
  Chemically synthesized
uaaggaggagcugccuuaa

SEQ ID NO: 241 - RNA, 19 nt, Artificial
  Chemically synthesized
acaaacaugaccuauccaa

SEQ ID NO: 242 - RNA, 19 nt, Artificial
  Chemically synthesized
ucguguuuuguuuguuuca

SEQ ID NO: 243 - RNA, 19 nt, Artificial
  Chemically synthesized
gaggaugauggagaaucgu

SEQ ID NO: 244 - RNA, 19 nt, Artificial
  Chemically synthesized
ccucacccuagauuuguau

SEQ ID NO: 245 - RNA, 19 nt, Artificial
  Chemically synthesized
caggcuuugcgauuuaagg

SEQ ID NO: 246 - RNA, 19 nt, Artificial
  Chemically synthesized
cucauaauauggcauccuu

SEQ ID NO: 247 - RNA, 19 nt, Artificial
  Chemically synthesized
aaaaguccucugugaggaa

SEQ ID NO: 248 - RNA, 19 nt, Artificial
  Chemically synthesized
guguuuuguuuguuucacu

SEQ ID NO: 249 - RNA, 19 nt, Artificial
  Chemically synthesized
cucucagaacaccagcagu

SEQ ID NO: 250 - RNA, 19 nt, Artificial
  Chemically synthesized
gcugggaaacauuugcacu

SEQ ID NO: 251 - RNA, 19 nt, Artificial
  Chemically synthesized
agcagcgaaaucaacgaga

SEQ ID NO: 252 - RNA, 19 nt, Artificial
  Chemically synthesized
uggcuagagaguuugagga

SEQ ID NO: 253 - RNA, 19 nt, Artificial
  Chemically synthesized
agauugcaaauguagugua

SEQ ID NO: 254 - RNA, 19 nt, Artificial
  Chemically synthesized
aaaggcaagcaaaggagau

SEQ ID NO: 255 - RNA, 19 nt, Artificial
  Chemically synthesized
uucacugcagucuuaagaa

SEQ ID NO: 256 - RNA, 19 nt, Artificial
  Chemically synthesized
cuucgaugucaacgaguuu

SEQ ID NO: 257 - RNA, 19 nt, Artificial
  Chemically synthesized
aauuccucaggcuuugcga

SEQ ID NO: 258 - RNA, 19 nt, Artificial
  Chemically synthesized
guuguuggagcuuuccuca

SEQ ID NO: 259 - RNA, 19 nt, Artificial
  Chemically synthesized
cugagucauuugcaguguu

SEQ ID NO: 260 - RNA, 19 nt, Artificial
  Chemically synthesized
ucuccgugaaacuuaccuu

SEQ ID NO: 261 - RNA, 19 nt, Artificial
  Chemically synthesized
agcccgaucugaagaagga

SEQ ID NO: 262 - RNA, 19 nt, Artificial
  Chemically synthesized
aagcacucauaauauggca

SEQ ID NO: 263 - RNA, 19 nt, Artificial
  Chemically synthesized
gcaaccagaguauuuuugu

SEQ ID NO: 264 - RNA, 19 nt, Artificial
  Chemically synthesized
cucagaacaccagcaguua

SEQ ID NO: 265 - RNA, 19 nt, Artificial
  Chemically synthesized
aguccucugugaggaauau

SEQ ID NO: 266 - RNA, 19 nt, Artificial
  Chemically synthesized
agagaaaaacaccuugagc

SEQ ID NO: 267 - RNA, 19 nt, Artificial
  Chemically synthesized
guuggagcuuuccucaaag

SEQ ID NO: 268 - RNA, 19 nt, Artificial
  Chemically synthesized
uuugcaggaggagaagaga

SEQ ID NO: 269 - RNA, 19 nt, Artificial
  Chemically synthesized
guugaacagugugcccuag

SEQ ID NO: 270 - RNA, 19 nt, Artificial
  Chemically synthesized
cuguuuggacuuuguaauu

SEQ ID NO: 271 - RNA, 19 nt, Artificial
  Chemically synthesized
uggucaucuguuguuaaau

SEQ ID NO: 272 - RNA, 19 nt, Artificial
  Chemically synthesized
gaagaaagagaggaccaac

SEQ ID NO: 273 - RNA, 19 nt, Artificial
  Chemically synthesized
ccaaccuuggcuaaaugga

SEQ ID NO: 274 - RNA, 19 nt, Artificial
  Chemically synthesized
gucuuuagguaaaagcuuu

SEQ ID NO: 275 - RNA, 19 nt, Artificial
  Chemically synthesized
ucaugaagaugaccgacga

SEQ ID NO: 276 - RNA, 19 nt, Artificial
  Chemically synthesized
aggcaagcaaaggagauga

SEQ ID NO: 277 - RNA, 19 nt, Artificial
  Chemically synthesized
ucaccugugccucucagaa

SEQ ID NO: 278 - RNA, 19 nt, Artificial
  Chemically synthesized
gaaagagguaaaaggcaag

SEQ ID NO: 279 - RNA, 19 nt, Artificial
  Chemically synthesized
aaguccucugugaggaaua

SEQ ID NO: 280 - RNA, 19 nt, Artificial
  Chemically synthesized
uucugaacgagagcgagaa

SEQ ID NO: 281 - RNA, 19 nt, Artificial
  Chemically synthesized
cagcuaaacuacucuuagu

SEQ ID NO: 282 - RNA, 19 nt, Artificial
  Chemically synthesized
ucacccuagauuuguauaa

SEQ ID NO: 283 - RNA, 19 nt, Artificial
  Chemically synthesized
agucuuaagaaagagguaa

SEQ ID NO: 284 - RNA, 19 nt, Artificial
  Chemically synthesized
gcguaugaaucuccuggac

SEQ ID NO: 285 - RNA, 19 nt, Artificial
  Chemically synthesized
gaagcauuugguaagcuuu

SEQ ID NO: 286 - RNA, 19 nt, Artificial
  Chemically synthesized
gaauuguguuaugugauca

SEQ ID NO: 287 - RNA, 19 nt, Artificial
  Chemically synthesized
gguuaacuuugcuuaauuc

SEQ ID NO: 288 - RNA, 19 nt, Artificial
  Chemically synthesized
uucaaccucccacacuaca

SEQ ID NO: 289 - RNA, 19 nt, Artificial
  Chemically synthesized
agagcgaggaggacaaguu

SEQ ID NO: 290 - RNA, 19 nt, Artificial
  Chemically synthesized
cucuacaucuucucuugga

SEQ ID NO: 291 - RNA, 19 nt, Artificial
  Chemically synthesized
ucuacuccaccuucaccua

SEQ ID NO: 292 - RNA, 19 nt, Artificial
  Chemically synthesized
caaugcaagcaugugucau

SEQ ID NO: 293 - RNA, 19 nt, Artificial
  Chemically synthesized
caaacaugaccuauccaag

SEQ ID NO: 294 - RNA, 19 nt, Artificial
  Chemically synthesized
uuuuguucucuccgugaaa

SEQ ID NO: 295 - RNA, 19 nt, Artificial
  Chemically synthesized
accugugccucucagaaca

SEQ ID NO: 296 - RNA, 19 nt, Artificial
  Chemically synthesized
ccacuuguggccaaucagu

SEQ ID NO: 297 - RNA, 19 nt, Artificial
  Chemically synthesized
ccagaguauuuuuguacag

SEQ ID NO: 298 - RNA, 19 nt, Artificial
  Chemically synthesized
augaaaucuguucugggaa

SEQ ID NO: 299 - RNA, 19 nt, Artificial
  Chemically synthesized
guucucuccgugaaacuua

SEQ ID NO: 300 - RNA, 19 nt, Artificial
  Chemically synthesized
ugugaggaauauucucuau

SEQ ID NO: 301 - RNA, 19 nt, Artificial
  Chemically synthesized
guguuaugugaucaguuuu

SEQ ID NO: 302 - RNA, 19 nt, Artificial
  Chemically synthesized
guucacugcagucuuaaga

SEQ ID NO: 303 - RNA, 19 nt, Artificial
  Chemically synthesized
gaaacuggacuuuuuaaac

SEQ ID NO: 304 - RNA, 19 nt, Artificial
  Chemically synthesized
ggagcuuuccucaaagggu

SEQ ID NO: 305 - RNA, 19 nt, Artificial
  Chemically synthesized
accagaacuccagcuccua

SEQ ID NO: 306 - RNA, 19 nt, Artificial
  Chemically synthesized
guaguguaucacugaguca

SEQ ID NO: 307 - RNA, 19 nt, Artificial
  Chemically synthesized
caacaucgagaccuucgau

SEQ ID NO: 308 - RNA, 19 nt, Artificial
  Chemically synthesized
acuuuuuaaacccucuuca

SEQ ID NO: 309 - RNA, 19 nt, Artificial
  Chemically synthesized
acaguuuuagaagucagua

SEQ ID NO: 310 - RNA, 19 nt, Artificial
  Chemically synthesized
uuguguucguguuuuguuu

SEQ ID NO: 311 - RNA, 19 nt, Artificial
  Chemically synthesized
acuuaagaaaccuggcauu

SEQ ID NO: 312 - RNA, 19 nt, Artificial
  Chemically synthesized
cgagaccuucgaugucaac

SEQ ID NO: 313 - RNA, 19 nt, Artificial
  Chemically synthesized
cuggaaacuuguuucuuuu

SEQ ID NO: 314 - RNA, 19 nt, Artificial
  Chemically synthesized
aagcauuugguaagcuuua

SEQ ID NO: 315 - RNA, 19 nt, Artificial
  Chemically synthesized
aagcuaaaggcaacucgua

SEQ ID NO: 316 - RNA, 19 nt, Artificial
  Chemically synthesized
ugcaguguuuucugccaca

SEQ ID NO: 317 - RNA, 19 nt, Artificial
  Chemically synthesized
acaccuugagccuuaaaac

SEQ ID NO: 318 - RNA, 19 nt, Artificial
  Chemically synthesized
cuucuuccuuaaagacauu

SEQ ID NO: 319 - RNA, 19 nt, Artificial
  Chemically synthesized
auaauauggcauccuucaa

SEQ ID NO: 320 - RNA, 19 nt, Artificial
  Chemically synthesized
uaaacccucuucagagcaa

SEQ ID NO: 321 - RNA, 19 nt, Artificial
  Chemically synthesized
aucuguucugggaauguuu

SEQ ID NO: 322 - RNA, 19 nt, Artificial
  Chemically synthesized
ucaaccucccacacuacag

SEQ ID NO: 323 - RNA, 19 nt, Artificial
  Chemically synthesized
uacuccaccuucaccuaca

SEQ ID NO: 324 - RNA, 19 nt, Artificial
  Chemically synthesized
gaguuugaggauugcuuuu

SEQ ID NO: 325 - RNA, 19 nt, Artificial
  Chemically synthesized
aaauggagcagcgaaauca

SEQ ID NO: 326 - RNA, 19 nt, Artificial
  Chemically synthesized
gaacaacccgucuacacac

SEQ ID NO: 327 - RNA, 19 nt, Artificial
  Chemically synthesized
cccgaucugaagaaggaga

SEQ ID NO: 328 - RNA, 19 nt, Artificial
  Chemically synthesized
acauuugcacucuuuuagu

SEQ ID NO: 329 - RNA, 19 nt, Artificial
  Chemically synthesized
ccagcaguuaaccuucaag

SEQ ID NO: 330 - RNA, 19 nt, Artificial
  Chemically synthesized
uacccaaauuuccaagaca

SEQ ID NO: 331 - RNA, 19 nt, Artificial
  Chemically synthesized
cacaguacgacuacaccga

SEQ ID NO: 332 - RNA, 19 nt, Artificial
  Chemically synthesized
ucuucagagcaagcgugga

SEQ ID NO: 333 - RNA, 19 nt, Artificial
  Chemically synthesized
caagacauuccacuugcua

SEQ ID NO: 334 - RNA, 19 nt, Artificial
  Chemically synthesized
uguucacugcagucuuaag

SEQ ID NO: 335 - RNA, 19 nt, Artificial
  Chemically synthesized
ucuucuuccuuaaagacau

SEQ ID NO: 336 - RNA, 19 nt, Artificial
  Chemically synthesized
gguuguuggagcuuuccuc

SEQ ID NO: 337 - RNA, 19 nt, Artificial
  Chemically synthesized
cgaaacugacuggaaacuu

SEQ ID NO: 338 - RNA, 19 nt, Artificial
  Chemically synthesized
ugugaucagugugcuaaau

SEQ ID NO: 339 - RNA, 19 nt, Artificial
  Chemically synthesized
acauuccacuugcuaaaau

SEQ ID NO: 340 - RNA, 19 nt, Artificial
  Chemically synthesized
agcuuuccucaaaggguau

SEQ ID NO: 341 - RNA, 19 nt, Artificial
  Chemically synthesized
agcuuugguuuguguucgu

SEQ ID NO: 342 - RNA, 19 nt, Artificial
  Chemically synthesized
uguacuguguaugauucau

SEQ ID NO: 343 - RNA, 19 nt, Artificial
  Chemically synthesized
aggguauggucaucuguug

SEQ ID NO: 344 - RNA, 19 nt, Artificial
  Chemically synthesized
ucauccauauuucucuaca

SEQ ID NO: 345 - RNA, 19 nt, Artificial
  Chemically synthesized
aauagucuagagaagcauu

SEQ ID NO: 346 - RNA, 19 nt, Artificial
  Chemically synthesized
aucucucugccuguuugga

SEQ ID NO: 347 - RNA, 19 nt, Artificial
  Chemically synthesized
ugaucagugugcuaaaucu

SEQ ID NO: 348 - RNA, 19 nt, Artificial
  Chemically synthesized
uggcuaaauggagcagcga

SEQ ID NO: 349 - RNA, 19 nt, Artificial
  Chemically synthesized
uuccaagacacaaacauga

SEQ ID NO: 350 - RNA, 19 nt, Artificial
  Chemically synthesized
aguauguacuguguaugau

SEQ ID NO: 351 - RNA, 19 nt, Artificial
  Chemically synthesized
agaaagagaggaccaacca

SEQ ID NO: 352 - RNA, 19 nt, Artificial
  Chemically synthesized
gauggccgagaugauccua

SEQ ID NO: 353 - RNA, 19 nt, Artificial
  Chemically synthesized
caguuuuagaagucaguag

SEQ ID NO: 354 - RNA, 19 nt, Artificial
  Chemically synthesized
cucacccuagauuuguaua

SEQ ID NO: 355 - RNA, 19 nt, Artificial
  Chemically synthesized
auaaaggccuuauuuugca

SEQ ID NO: 356 - RNA, 19 nt, Artificial
  Chemically synthesized
acaucaagacggagcagcu

SEQ ID NO: 357 - RNA, 19 nt, Artificial
  Chemically synthesized
aggcaacucguacccaaau

SEQ ID NO: 358 - RNA, 19 nt, Artificial
  Chemically synthesized
aacuccagcuccuacuaca

SEQ ID NO: 359 - RNA, 19 nt, Artificial
  Chemically synthesized
ccuccugccuuugcuuguu

SEQ ID NO: 360 - RNA, 19 nt, Artificial
  Chemically synthesized
gcuuaauuccucaggcuuu

SEQ ID NO: 361 - RNA, 19 nt, Artificial
  Chemically synthesized
aaucuuaauuacugcugug

SEQ ID NO: 362 - RNA, 19 nt, Artificial
  Chemically synthesized
gcaagcucuggagacuucu

SEQ ID NO: 363 - RNA, 19 nt, Artificial
  Chemically synthesized
gugucauccauauuucucu

SEQ ID NO: 364 - RNA, 19 nt, Artificial
  Chemically synthesized
ucuucuucuuccuuaaaga

SEQ ID NO: 365 - RNA, 19 nt, Artificial
  Chemically synthesized
ugcaggaggagaagagaag

SEQ ID NO: 366 - RNA, 19 nt, Artificial
  Chemically synthesized
aauuacugcuguggcuaga

SEQ ID NO: 367 - RNA, 19 nt, Artificial
  Chemically synthesized
cuuuuuaaacccucuucag

SEQ ID NO: 368 - RNA, 19 nt, Artificial
  Chemically synthesized
gccuuaaaacggugcugcu

SEQ ID NO: 369 - RNA, 19 nt, Artificial
  Chemically synthesized
aagaacaagccgcacguca

SEQ ID NO: 370 - RNA, 19 nt, Artificial
  Chemically synthesized
gugcugcugggaaacauuu

SEQ ID NO: 371 - RNA, 19 nt, Artificial
  Chemically synthesized
acugggaacaacccgucua

SEQ ID NO: 372 - RNA, 19 nt, Artificial
  Chemically synthesized
accuuugggcugccuuaua

SEQ ID NO: 373 - RNA, 19 nt, Artificial
  Chemically synthesized
uuuuuaaacccucuucaga

SEQ ID NO: 374 - RNA, 19 nt, Artificial
  Chemically synthesized
ugcuguggcuagagaguuu

SEQ ID NO: 375 - RNA, 19 nt, Artificial
  Chemically synthesized
uuguuggagcuuuccucaa

SEQ ID NO: 376 - RNA, 19 nt, Artificial
  Chemically synthesized
aguuucuuuguauuccuca

SEQ ID NO: 377 - RNA, 19 nt, Artificial
  Chemically synthesized
cacugcagucuuaagaaag

SEQ ID NO: 378 - RNA, 19 nt, Artificial
  Chemically synthesized
aaccuggcauuuaaaucau

SEQ ID NO: 379 - RNA, 19 nt, Artificial
  Chemically synthesized
cccuagauuuguauaaaug

SEQ ID NO: 380 - RNA, 19 nt, Artificial
  Chemically synthesized
agaacuccagcuccuacua

SEQ ID NO: 381 - RNA, 19 nt, Artificial
  Chemically synthesized
auggccgagaugauccuaa

SEQ ID NO: 382 - RNA, 19 nt, Artificial
  Chemically synthesized
gaggaagucggugaagaac

SEQ ID NO: 383 - RNA, 19 nt, Artificial
  Chemically synthesized
aaaggguauggucaucugu

SEQ ID NO: 384 - RNA, 19 nt, Artificial
  Chemically synthesized
ccaacagcuaaacuacucu

SEQ ID NO: 385 - RNA, 19 nt, Artificial
  Chemically synthesized
guggaggaugauggagaau

SEQ ID NO: 386 - RNA, 19 nt, Artificial
  Chemically synthesized
ugcaauuaugggaguaaac

SEQ ID NO: 387 - RNA, 19 nt, Artificial
  Chemically synthesized
aacaguuuuagaagucagu

SEQ ID NO: 388 - RNA, 19 nt, Artificial
  Chemically synthesized
cuuugguuuguguucgugu

SEQ ID NO: 389 - RNA, 19 nt, Artificial
  Chemically synthesized
caaccuuggcuaaauggag

SEQ ID NO: 390 - RNA, 19 nt, Artificial
  Chemically synthesized
ccaugaacgccuucauggu

SEQ ID NO: 391 - RNA, 19 nt, Artificial
  Chemically synthesized
cuugcaaccagaguauuuu

SEQ ID NO: 392 - RNA, 19 nt, Artificial
  Chemically synthesized
agaccuucgaugucaacga

SEQ ID NO: 393 - RNA, 19 nt, Artificial
  Chemically synthesized
ggcaacucguacccaaauu

SEQ ID NO: 394 - RNA, 19 nt, Artificial
  Chemically synthesized
auggcauccuucaauuucu

SEQ ID NO: 395 - RNA, 19 nt, Artificial
  Chemically synthesized
ucuuauuuuuccaacagcu

SEQ ID NO: 396 - RNA, 19 nt, Artificial
  Chemically synthesized
uuguugaaaacaaacugga

SEQ ID NO: 397 - RNA, 19 nt, Artificial
  Chemically synthesized
gcaaauguaguguaucacu

SEQ ID NO: 398 - RNA, 19 nt, Artificial
  Chemically synthesized
gagaaaaacaccuugagcc

SEQ ID NO: 399 - RNA, 19 nt, Artificial
  Chemically synthesized
ugagagauugcaaauguag

SEQ ID NO: 400 - RNA, 19 nt, Artificial
  Chemically synthesized
agcaagcguggaggaugau

SEQ ID NO: 401 - RNA, 19 nt, Artificial
  Chemically synthesized
ccuuauuuugcaauuaugg

SEQ ID NO: 402 - RNA, 19 nt, Artificial
  Chemically synthesized
cgaguuugaccaguaccug

SEQ ID NO: 403 - RNA, 19 nt, Artificial
  Chemically synthesized
ccaucccuuuuuucuuugu

SEQ ID NO: 404 - RNA, 19 nt, Artificial
  Chemically synthesized
cgaaaucaacgagaaacug

SEQ ID NO: 405 - RNA, 19 nt, Artificial
  Chemically synthesized
uuguucacugcagucuuaa

SEQ ID NO: 406 - RNA, 19 nt, Artificial
  Chemically synthesized
ccgaucugaagaaggagag

SEQ ID NO: 407 - RNA, 19 nt, Artificial
  Chemically synthesized
cgaugucaacgaguuugac

SEQ ID NO: 408 - RNA, 19 nt, Artificial
  Chemically synthesized
uccugccuuugcuuguuca

SEQ ID NO: 409 - RNA, 19 nt, Artificial
  Chemically synthesized
guacuguguaugauucauu

SEQ ID NO: 410 - RNA, 19 nt, Artificial
  Chemically synthesized
uggagaaucgugugaucag

SEQ ID NO: 411 - RNA, 19 nt, Artificial
  Chemically synthesized
guuucuuuguauuccucac

SEQ ID NO: 412 - RNA, 19 nt, Artificial
  Chemically synthesized
ugauggagaaucgugugau

SEQ ID NO: 413 - RNA, 19 nt, Artificial
  Chemically synthesized
acugacagaccuuaaucuu

SEQ ID NO: 414 - RNA, 19 nt, Artificial
  Chemically synthesized
gaagauggccgagaugauc

SEQ ID NO: 415 - RNA, 19 nt, Artificial
  Chemically synthesized
ucaggcuuugcgauuuaag

SEQ ID NO: 416 - RNA, 19 nt, Artificial
  Chemically synthesized
gaaaaacaccuugagccuu

SEQ ID NO: 417 - RNA, 19 nt, Artificial
  Chemically synthesized
ccucugugaggaauauucu

SEQ ID NO: 418 - RNA, 19 nt, Artificial
  Chemically synthesized
aagacacaaacaugaccua

SEQ ID NO: 419 - RNA, 19 nt, Artificial
  Chemically synthesized
uguauuccucacccuagau

SEQ ID NO: 420 - RNA, 19 nt, Artificial
  Chemically synthesized
cacuuuugcucuuuuuccu

SEQ ID NO: 421 - RNA, 19 nt, Artificial
  Chemically synthesized
auaaaugccuuuuugucca

SEQ ID NO: 422 - RNA, 19 nt, Artificial
  Chemically synthesized
acccacuuguggccaauca

SEQ ID NO: 423 - RNA, 19 nt, Artificial
  Chemically synthesized
uuuuguccaucccuuuuuu

SEQ ID NO: 424 - RNA, 19 nt, Artificial
  Chemically synthesized
ggcuuugcgauuuaaggag

SEQ ID NO: 425 - RNA, 19 nt, Artificial
  Chemically synthesized
gucuagagaagcauuuggu

SEQ ID NO: 426 - RNA, 19 nt, Artificial
  Chemically synthesized
gaugauggagaaucgugug

SEQ ID NO: 427 - RNA, 19 nt, Artificial
  Chemically synthesized
acuggaaacuuguuucuuu

SEQ ID NO: 428 - RNA, 19 nt, Artificial
  Chemically synthesized
aguguaucacugagucauu

SEQ ID NO: 429 - RNA, 19 nt, Artificial
  Chemically synthesized
ucaacggcuccagcaagaa

SEQ ID NO: 430 - RNA, 19 nt, Artificial
  Chemically synthesized
cucuuuuagugcauuuccu

SEQ ID NO: 431 - RNA, 19 nt, Artificial
  Chemically synthesized
cuuugcaggaggagaagag

SEQ ID NO: 432 - RNA, 19 nt, Artificial
  Chemically synthesized
gagcucgaaacugacugga

SEQ ID NO: 433 - RNA, 19 nt, Artificial
  Chemically synthesized
augugucauccauauuucu

SEQ ID NO: 434 - RNA, 19 nt, Artificial
  Chemically synthesized
gcagucuuaagaaagaggu

SEQ ID NO: 435 - RNA, 19 nt, Artificial
  Chemically synthesized
cucgaaacugacuggaaac

SEQ ID NO: 436 - RNA, 19 nt, Artificial
  Chemically synthesized
uugacacaaaaacaaugca

SEQ ID NO: 437 - RNA, 19 nt, Artificial
  Chemically synthesized
agaugaaaucuguucuggg

SEQ ID NO: 438 - RNA, 19 nt, Artificial
  Chemically synthesized
uauccaagcgcauuaccca

SEQ ID NO: 439 - RNA, 19 nt, Artificial
  Chemically synthesized
ugggaacaacccgucuaca

SEQ ID NO: 440 - RNA, 19 nt, Artificial
  Chemically synthesized
auccuaaaaauaaccgaag

SEQ ID NO: 441 - RNA, 19 nt, Artificial
  Chemically synthesized
uuuuguaaggagagguuuu

SEQ ID NO: 442 - RNA, 19 nt, Artificial
  Chemically synthesized
aggagaugaaaucuguucu

SEQ ID NO: 443 - RNA, 19 nt, Artificial
  Chemically synthesized
ggccaaccuuggcuaaaug

SEQ ID NO: 444 - RNA, 19 nt, Artificial
  Chemically synthesized
gguaaaaggcaagcaaagg

SEQ ID NO: 445 - RNA, 19 nt, Artificial
  Chemically synthesized
ugaccuauccaagcgcauu

SEQ ID NO: 446 - RNA, 19 nt, Artificial
  Chemically synthesized
ccuagauuuguauaaaugc

SEQ ID NO: 447 - RNA, 19 nt, Artificial
  Chemically synthesized
cacaaacaugaccuaucca

SEQ ID NO: 448 - RNA, 19 nt, Artificial
  Chemically synthesized
guccaucccuuuuuucuuu

SEQ ID NO: 449 - RNA, 19 nt, Artificial
  Chemically synthesized
uuugguuuguguucguguu

SEQ ID NO: 450 - RNA, 19 nt, Artificial
  Chemically synthesized
ucuugcaaccagaguauuu

SEQ ID NO: 451 - RNA, 19 nt, Artificial
  Chemically synthesized
aacaacccgucuacacaca

SEQ ID NO: 452 - RNA, 19 nt, Artificial
  Chemically synthesized
cgaucugaagaaggagagc

SEQ ID NO: 453 - RNA, 19 nt, Artificial
  Chemically synthesized
cucuccgugaaacuuaccu

SEQ ID NO: 454 - RNA, 19 nt, Artificial
  Chemically synthesized
aguacccgcacuugcacaa

SEQ ID NO: 455 - RNA, 19 nt, Artificial
  Chemically synthesized
auguacuguguaugauuca

SEQ ID NO: 456 - RNA, 19 nt, Artificial
  Chemically synthesized
cuucucuuggagugaggga

SEQ ID NO: 457 - RNA, 19 nt, Artificial
  Chemically synthesized
ggacuuuuuaaacccucuu

SEQ ID NO: 458 - RNA, 19 nt, Artificial
  Chemically synthesized
agaagcauuugguaagcuu

SEQ ID NO: 459 - RNA, 19 nt, Artificial
  Chemically synthesized
cuuuuuguccaucccuuuu

SEQ ID NO: 460 - RNA, 19 nt, Artificial
  Chemically synthesized
guuuguguucguguuuugu

SEQ ID NO: 461 - RNA, 19 nt, Artificial
  Chemically synthesized
uuuuccaacagcuaaacua

SEQ ID NO: 462 - RNA, 19 nt, Artificial
  Chemically synthesized
agaagagaaaaacaccuug

SEQ ID NO: 463 - RNA, 19 nt, Artificial
  Chemically synthesized
uaaaucucucugccuguuu

SEQ ID NO: 464 - RNA, 19 nt, Artificial
  Chemically synthesized
ccuucuuuaaaauagguug

SEQ ID NO: 465 - RNA, 19 nt, Artificial
  Chemically synthesized
cccggaaacuuuucuuugc

SEQ ID NO: 466 - RNA, 19 nt, Artificial
  Chemically synthesized
ggaaacuuuucuuugcagg

SEQ ID NO: 467 - RNA, 19 nt, Artificial
  Chemically synthesized
uuaugggaguaaacaauag

SEQ ID NO: 468 - RNA, 19 nt, Artificial
  Chemically synthesized
uuuguaaggagagguuuua

SEQ ID NO: 469 - RNA, 19 nt, Artificial
  Chemically synthesized
uacagauuugcuuucucuu

SEQ ID NO: 470 - RNA, 19 nt, Artificial
  Chemically synthesized
aguaaacaauagucuagag

SEQ ID NO: 471 - RNA, 19 nt, Artificial
  Chemically synthesized
ugccuguuuggacuuugua

SEQ ID NO: 472 - RNA, 19 nt, Artificial
  Chemically synthesized
ucuccaacaucgagaccuu

SEQ ID NO: 473 - RNA, 19 nt, Artificial
  Chemically synthesized
aaggccuuauuuugcaauu

SEQ ID NO: 474 - RNA, 19 nt, Artificial
  Chemically synthesized
auagguuguuggagcuuuc

SEQ ID NO: 475 - RNA, 19 nt, Artificial
  Chemically synthesized
caucccuuuuuucuuuguu

SEQ ID NO: 476 - RNA, 19 nt, Artificial
  Chemically synthesized
uuguguuaugugaucaguu

SEQ ID NO: 477 - RNA, 19 nt, Artificial
  Chemically synthesized
aggugcucaaaggcuacga

SEQ ID NO: 478 - RNA, 19 nt, Artificial
  Chemically synthesized
guggcuagagaguuugagg

SEQ ID NO: 479 - RNA, 19 nt, Artificial
  Chemically synthesized
acgaguuugaccaguaccu

SEQ ID NO: 480 - RNA, 19 nt, Artificial
  Chemically synthesized
ugcaagcaugugucaucca

SEQ ID NO: 481 - RNA, 19 nt, Artificial
  Chemically synthesized
aaaauagguuguuggagcu

SEQ ID NO: 482 - RNA, 19 nt, Artificial
  Chemically synthesized
gcacucuuuuagugcauuu

SEQ ID NO: 483 - RNA, 19 nt, Artificial
  Chemically synthesized
uuuucuuugcaggaggaga

SEQ ID NO: 484 - RNA, 19 nt, Artificial
  Chemically synthesized
aauuuccaagacacaaaca

SEQ ID NO: 485 - RNA, 19 nt, Artificial
  Chemically synthesized
gacuucugaacgagagcga

SEQ ID NO: 486 - RNA, 19 nt, Artificial
  Chemically synthesized
agcaguuaaccuucaagac

SEQ ID NO: 487 - RNA, 19 nt, Artificial
  Chemically synthesized
acaucuucucuuggaguga

SEQ ID NO: 488 - RNA, 19 nt, Artificial
  Chemically synthesized
gugcucaaaggcuacgacu

SEQ ID NO: 489 - RNA, 19 nt, Artificial
  Chemically synthesized
uuaaggaggagcugccuua

SEQ ID NO: 490 - RNA, 19 nt, Artificial
  Chemically synthesized
agaaucgugugaucagugu

SEQ ID NO: 491 - RNA, 19 nt, Artificial
  Chemically synthesized
augucaacgaguuugacca

SEQ ID NO: 492 - RNA, 19 nt, Artificial
  Chemically synthesized
caugaagaugaccgacgag

SEQ ID NO: 493 - RNA, 19 nt, Artificial
  Chemically synthesized
acagcuaaacuacucuuag

SEQ ID NO: 494 - RNA, 19 nt, Artificial
  Chemically synthesized
gaguuugaccaguaccugc

SEQ ID NO: 495 - RNA, 19 nt, Artificial
  Chemically synthesized
ugcccuagcuuuucuugca

SEQ ID NO: 496 - RNA, 19 nt, Artificial
  Chemically synthesized
gugugcccuagcuuuucuu

SEQ ID NO: 497 - RNA, 19 nt, Artificial
  Chemically synthesized
acugcuguggcuagagagu

SEQ ID NO: 498 - RNA, 19 nt, Artificial
  Chemically synthesized
aacuuaagaaaccuggcau

SEQ ID NO: 499 - RNA, 19 nt, Artificial
  Chemically synthesized
uugcaaccagaguauuuuu

SEQ ID NO: 500 - RNA, 19 nt, Artificial
  Chemically synthesized
uaugggaguaaacaauagu

SEQ ID NO: 501 - RNA, 19 nt, Artificial
  Chemically synthesized
auuaagauuaaggucuguc

SEQ ID NO: 502 - RNA, 19 nt, Artificial
  Chemically synthesized
auuuuuaggaucaucucgg

SEQ ID NO: 503 - RNA, 19 nt, Artificial
  Chemically synthesized
uuuuuuuuaaggcagcucc

SEQ ID NO: 504 - RNA, 19 nt, Artificial
  Chemically synthesized
uauuuuuaggaucaucucg

SEQ ID NO: 505 - RNA, 19 nt, Artificial
  Chemically synthesized
uagugugggagguugaagg

SEQ ID NO: 506 - RNA, 19 nt, Artificial
  Chemically synthesized
uuuuuaaggcagcuccucc

SEQ ID NO: 507 - RNA, 19 nt, Artificial
  Chemically synthesized
uuugcuugccuuuuaccuc

SEQ ID NO: 508 - RNA, 19 nt, Artificial
  Chemically synthesized
uuucucguugauuucgcug

SEQ ID NO: 509 - RNA, 19 nt, Artificial
  Chemically synthesized
uucgguuauuuuuaggauc

SEQ ID NO: 510 - RNA, 19 nt, Artificial
  Chemically synthesized
uuaagauuaaggucuguca

SEQ ID NO: 511 - RNA, 19 nt, Artificial
  Chemically synthesized
aucaucucggccaucuucg

SEQ ID NO: 512 - RNA, 19 nt, Artificial
  Chemically synthesized
gcaguaauuaagauuaagg

SEQ ID NO: 513 - RNA, 19 nt, Artificial
  Chemically synthesized
uucuucgguuauuuuuagg

SEQ ID NO: 514 - RNA, 19 nt, Artificial
  Chemically synthesized
uuuuaggaucaucucggcc

SEQ ID NO: 515 - RNA, 19 nt, Artificial
  Chemically synthesized
uugguccucucuuucuucg

SEQ ID NO: 516 - RNA, 19 nt, Artificial
  Chemically synthesized
uagggcacacuguucaacu

SEQ ID NO: 517 - RNA, 19 nt, Artificial
  Chemically synthesized
uuacaaaguccaaacaggc

SEQ ID NO: 518 - RNA, 19 nt, Artificial
  Chemically synthesized
uugacgugcggcuuguucu

SEQ ID NO: 519 - RNA, 19 nt, Artificial
  Chemically synthesized
ucgguuauuuuuaggauca

SEQ ID NO: 520 - RNA, 19 nt, Artificial
  Chemically synthesized
uugauuucgcugcuccauu

SEQ ID NO: 521 - RNA, 19 nt, Artificial
  Chemically synthesized
ucaagguguuuuucucuuc

SEQ ID NO: 522 - RNA, 19 nt, Artificial
  Chemically synthesized
uuguuuacucccauaauug

SEQ ID NO: 523 - RNA, 19 nt, Artificial
  Chemically synthesized
gggaaagguaaguuucacg

SEQ ID NO: 524 - RNA, 19 nt, Artificial
  Chemically synthesized
uugcuugccuuuuaccucu

SEQ ID NO: 525 - RNA, 19 nt, Artificial
  Chemically synthesized
auuggcugcugaaacauuc

SEQ ID NO: 526 - RNA, 19 nt, Artificial
  Chemically synthesized
uuccaguuuguuuucaaca

SEQ ID NO: 527 - RNA, 19 nt, Artificial
  Chemically synthesized
uuuagcacacugaucacac

SEQ ID NO: 528 - RNA, 19 nt, Artificial
  Chemically synthesized
uaaaaaguccaguuucucg

SEQ ID NO: 529 - RNA, 19 nt, Artificial
  Chemically synthesized
uuggaaauuuggguacgag

SEQ ID NO: 530 - RNA, 19 nt, Artificial
  Chemically synthesized
ucuugaugugcguucgcug

SEQ ID NO: 531 - RNA, 19 nt, Artificial
  Chemically synthesized
uugccuuuuaccucuuucu

SEQ ID NO: 532 - RNA, 19 nt, Artificial
  Chemically synthesized
ucuucgguuauuuuuagga

SEQ ID NO: 533 - RNA, 19 nt, Artificial
  Chemically synthesized
uuggcugcugaaacauucc

SEQ ID NO: 534 - RNA, 19 nt, Artificial
  Chemically synthesized
uuuagcaaguggaaugucu

SEQ ID NO: 535 - RNA, 19 nt, Artificial
  Chemically synthesized
uacaaaaauacucugguug

SEQ ID NO: 536 - RNA, 19 nt, Artificial
  Chemically synthesized
uucaucuccuuugcuugcc

SEQ ID NO: 537 - RNA, 19 nt, Artificial
  Chemically synthesized
uucagaagucuccagagcu

SEQ ID NO: 538 - RNA, 19 nt, Artificial
  Chemically synthesized
ggaaagguaaguuucacgg

SEQ ID NO: 539 - RNA, 19 nt, Artificial
  Chemically synthesized
uuucgcugcuccauuuagc

SEQ ID NO: 540 - RNA, 19 nt, Artificial
  Chemically synthesized
uucugguugguccucucuu

SEQ ID NO: 541 - RNA, 19 nt, Artificial
  Chemically synthesized
ucguugauuucgcugcucc

SEQ ID NO: 542 - RNA, 19 nt, Artificial
  Chemically synthesized
auuucaucuccuuugcuug

SEQ ID NO: 543 - RNA, 19 nt, Artificial
  Chemically synthesized
uuuaaaugccagguuucuu

SEQ ID NO: 544 - RNA, 19 nt, Artificial
  Chemically synthesized
acacgauucuccaucaucc

SEQ ID NO: 545 - RNA, 19 nt, Artificial
  Chemically synthesized
uugugucuuggaaauuugg

SEQ ID NO: 546 - RNA, 19 nt, Artificial
  Chemically synthesized
uuuuuuuuuaaggcagcuc

SEQ ID NO: 547 - RNA, 19 nt, Artificial
  Chemically synthesized
uacccuuugaggaaagcuc

SEQ ID NO: 548 - RNA, 19 nt, Artificial
  Chemically synthesized
caugcuugcauuguuuuug

SEQ ID NO: 549 - RNA, 19 nt, Artificial
  Chemically synthesized
uucauguaggugaaggugg

SEQ ID NO: 550 - RNA, 19 nt, Artificial
  Chemically synthesized
ucggucaucuucaugaagg

SEQ ID NO: 551 - RNA, 19 nt, Artificial
  Chemically synthesized
uaccucuuucuuaagacug

SEQ ID NO: 552 - RNA, 19 nt, Artificial
  Chemically synthesized
acaggcagagagauuuagc

SEQ ID NO: 553 - RNA, 19 nt, Artificial
  Chemically synthesized
uguagucguacugugagcg

SEQ ID NO: 554 - RNA, 19 nt, Artificial
  Chemically synthesized
aauguuucccagcagcacc

SEQ ID NO: 555 - RNA, 19 nt, Artificial
  Chemically synthesized
uugcauuguuuuuguguca

SEQ ID NO: 556 - RNA, 19 nt, Artificial
  Chemically synthesized
ugugucuuggaaauuuggg

SEQ ID NO: 557 - RNA, 19 nt, Artificial
  Chemically synthesized
uucuacugacuucuaaaac

SEQ ID NO: 558 - RNA, 19 nt, Artificial
  Chemically synthesized
acagauuucaucuccuuug

SEQ ID NO: 559 - RNA, 19 nt, Artificial
  Chemically synthesized
uuggguacgaguugccuuu

SEQ ID NO: 560 - RNA, 19 nt, Artificial
  Chemically synthesized
uucgcugcuccauuuagcc

SEQ ID NO: 561 - RNA, 19 nt, Artificial
  Chemically synthesized
uccgucuugaugugcguuc

SEQ ID NO: 562 - RNA, 19 nt, Artificial
  Chemically synthesized
uuaaaaaguccaguuucuc

SEQ ID NO: 563 - RNA, 19 nt, Artificial
  Chemically synthesized
uacauuugcaaucucucau

SEQ ID NO: 564 - RNA, 19 nt, Artificial
  Chemically synthesized
uccaucauccuccacgcuu

SEQ ID NO: 565 - RNA, 19 nt, Artificial
  Chemically synthesized
aauuaagcaaaguuaaccc

SEQ ID NO: 566 - RNA, 19 nt, Artificial
  Chemically synthesized
uaaggcagcccaaaggucu

SEQ ID NO: 567 - RNA, 19 nt, Artificial
  Chemically synthesized
ucccagaacagauuucauc

SEQ ID NO: 568 - RNA, 19 nt, Artificial
  Chemically synthesized
uuuccaguuuguuuucaac

SEQ ID NO: 569 - RNA, 19 nt, Artificial
  Chemically synthesized
augaccauacccuuugagg

SEQ ID NO: 570 - RNA, 19 nt, Artificial
  Chemically synthesized
uuguucuugcuggagccgu

SEQ ID NO: 571 - RNA, 19 nt, Artificial
  Chemically synthesized
uugccuuuagcuuaaaugu

SEQ ID NO: 572 - RNA, 19 nt, Artificial
  Chemically synthesized
ucuguggcagaaaacacug

SEQ ID NO: 573 - RNA, 19 nt, Artificial
  Chemically synthesized
uuagcaaguggaaugucuu

SEQ ID NO: 574 - RNA, 19 nt, Artificial
  Chemically synthesized
auguagagaaauauggaug

SEQ ID NO: 575 - RNA, 19 nt, Artificial
  Chemically synthesized
uauggaugacacaugcuug

SEQ ID NO: 576 - RNA, 19 nt, Artificial
  Chemically synthesized
auuaaggucugucaguggg

SEQ ID NO: 577 - RNA, 19 nt, Artificial
  Chemically synthesized
auaugauuuaaaugccagg

SEQ ID NO: 578 - RNA, 19 nt, Artificial
  Chemically synthesized
auaauugcaaaauaaggcc

SEQ ID NO: 579 - RNA, 19 nt, Artificial
  Chemically synthesized
uagagaauauuccucacag

SEQ ID NO: 580 - RNA, 19 nt, Artificial
  Chemically synthesized
uccaguuucucguugauuu

SEQ ID NO: 581 - RNA, 19 nt, Artificial
  Chemically synthesized
uuuuuaggaucaucucggc

SEQ ID NO: 582 - RNA, 19 nt, Artificial
  Chemically synthesized
ugcucgucggucaucuuca

SEQ ID NO: 583 - RNA, 19 nt, Artificial
  Chemically synthesized
uuuacucccauaauugcaa

SEQ ID NO: 584 - RNA, 19 nt, Artificial
  Chemically synthesized
uccaggagauucauacgcg

SEQ ID NO: 585 - RNA, 19 nt, Artificial
  Chemically synthesized
uugcaagaaaagcuagggc

SEQ ID NO: 586 - RNA, 19 nt, Artificial
  Chemically synthesized
uuccagucaguuucgagcu

SEQ ID NO: 587 - RNA, 19 nt, Artificial
  Chemically synthesized
ugaaggaugccauauuaug

SEQ ID NO: 588 - RNA, 19 nt, Artificial
  Chemically synthesized
uuaaaucgcaaagccugag

SEQ ID NO: 589 - RNA, 19 nt, Artificial
  Chemically synthesized
uaugauuuaaaugccaggu

SEQ ID NO: 590 - RNA, 19 nt, Artificial
  Chemically synthesized
uuuuuuaaggcagcuccuc

SEQ ID NO: 591 - RNA, 19 nt, Artificial
  Chemically synthesized
ugcaaagaaaaguuuccgg

SEQ ID NO: 592 - RNA, 19 nt, Artificial
  Chemically synthesized
aaagguaaguuucacggag

SEQ ID NO: 593 - RNA, 19 nt, Artificial
  Chemically synthesized
uuuggguacgaguugccuu

SEQ ID NO: 594 - RNA, 19 nt, Artificial
  Chemically synthesized
uagggugaggaauacaaag

SEQ ID NO: 595 - RNA, 19 nt, Artificial
  Chemically synthesized
uucacggagagaacaaaag

SEQ ID NO: 596 - RNA, 19 nt, Artificial
  Chemically synthesized
ucucguucagaagucucca

SEQ ID NO: 597 - RNA, 19 nt, Artificial
  Chemically synthesized
aagauguagagaaauaugg

SEQ ID NO: 598 - RNA, 19 nt, Artificial
  Chemically synthesized
ugcugcuuggacauccaca

SEQ ID NO: 599 - RNA, 19 nt, Artificial
  Chemically synthesized
uggaaauuuggguacgagu

SEQ ID NO: 600 - RNA, 19 nt, Artificial
  Chemically synthesized
aauuuuagcaaguggaaug

SEQ ID NO: 601 - RNA, 19 nt, Artificial
  Chemically synthesized
uaccaaaugcuucucuaga

SEQ ID NO: 602 - RNA, 19 nt, Artificial
  Chemically synthesized
auuacaaaguccaaacagg

SEQ ID NO: 603 - RNA, 19 nt, Artificial
  Chemically synthesized
uugaaacuggcgagucucc

SEQ ID NO: 604 - RNA, 19 nt, Artificial
  Chemically synthesized
aagacugcagugaacaagc

SEQ ID NO: 605 - RNA, 19 nt, Artificial
  Chemically synthesized
uugacaucgaaggucucga

SEQ ID NO: 606 - RNA, 19 nt, Artificial
  Chemically synthesized
ucaaacucucuagccacag

SEQ ID NO: 607 - RNA, 19 nt, Artificial
  Chemically synthesized
uagcacacugaucacacga

SEQ ID NO: 608 - RNA, 19 nt, Artificial
  Chemically synthesized
uuaaggucugucagugggc

SEQ ID NO: 609 - RNA, 19 nt, Artificial
  Chemically synthesized
uggcugcugaaacauuccc

SEQ ID NO: 610 - RNA, 19 nt, Artificial
  Chemically synthesized
agggaauucugguuggucc

SEQ ID NO: 611 - RNA, 19 nt, Artificial
  Chemically synthesized
uucugguggucgguguagu

SEQ ID NO: 612 - RNA, 19 nt, Artificial
  Chemically synthesized
aaugucuugaagguuaacu

SEQ ID NO: 613 - RNA, 19 nt, Artificial
  Chemically synthesized
ucguucagaagucuccaga

SEQ ID NO: 614 - RNA, 19 nt, Artificial
  Chemically synthesized
aaagggauggacaaaaagg

SEQ ID NO: 615 - RNA, 19 nt, Artificial
  Chemically synthesized
uuaacaacagaugaccaua

SEQ ID NO: 616 - RNA, 19 nt, Artificial
  Chemically synthesized
ucaaggucgagugagcugu

SEQ ID NO: 617 - RNA, 19 nt, Artificial
  Chemically synthesized
aaaagagugcaaauguuuc

SEQ ID NO: 618 - RNA, 19 nt, Artificial
  Chemically synthesized
ucugguugcaagaaaagcu

SEQ ID NO: 619 - RNA, 19 nt, Artificial
  Chemically synthesized
ugguccucucuuucuucgg

SEQ ID NO: 620 - RNA, 19 nt, Artificial
  Chemically synthesized
ucuagggugaggaauacaa

SEQ ID NO: 621 - RNA, 19 nt, Artificial
  Chemically synthesized
aggcucaagguguuuuucu

SEQ ID NO: 622 - RNA, 19 nt, Artificial
  Chemically synthesized
aaucauacacaguacauac

SEQ ID NO: 623 - RNA, 19 nt, Artificial
  Chemically synthesized
ucacggagagaacaaaagg

SEQ ID NO: 624 - RNA, 19 nt, Artificial
  Chemically synthesized
uccugcaaagaaaaguuuc

SEQ ID NO: 625 - RNA, 19 nt, Artificial
  Chemically synthesized
acuuauuggcugcugaaac

SEQ ID NO: 626 - RNA, 19 nt, Artificial
  Chemically synthesized
ucuccuuugcuugccuuuu

SEQ ID NO: 627 - RNA, 19 nt, Artificial
  Chemically synthesized
uacaaaucuagggugagga

SEQ ID NO: 628 - RNA, 19 nt, Artificial
  Chemically synthesized
ucgaaggucucgauguugg

SEQ ID NO: 629 - RNA, 19 nt, Artificial
  Chemically synthesized
cuuugcuugccuuuuaccu

SEQ ID NO: 630 - RNA, 19 nt, Artificial
  Chemically synthesized
auccucaaacucucuagcc

SEQ ID NO: 631 - RNA, 19 nt, Artificial
  Chemically synthesized
uuuuuuuaaggcagcuccu

SEQ ID NO: 632 - RNA, 19 nt, Artificial
  Chemically synthesized
aagggauggacaaaaaggc

SEQ ID NO: 633 - RNA, 19 nt, Artificial
  Chemically synthesized
ucuguacaaaaauacucug

SEQ ID NO: 634 - RNA, 19 nt, Artificial
  Chemically synthesized
uuagcacacugaucacacg

SEQ ID NO: 635 - RNA, 19 nt, Artificial
  Chemically synthesized
auucugguugguccucucu

SEQ ID NO: 636 - RNA, 19 nt, Artificial
  Chemically synthesized
uuuaccucuuucuuaagac

SEQ ID NO: 637 - RNA, 19 nt, Artificial
  Chemically synthesized
uuuaacaacagaugaccau

SEQ ID NO: 638 - RNA, 19 nt, Artificial
  Chemically synthesized
uuuagccaagguuggccug

SEQ ID NO: 639 - RNA, 19 nt, Artificial
  Chemically synthesized
ugcuuggacauccacacgu

SEQ ID NO: 640 - RNA, 19 nt, Artificial
  Chemically synthesized
aucacauaacacaauucug

SEQ ID NO: 641 - RNA, 19 nt, Artificial
  Chemically synthesized
aaguggaaugucuugaagg

SEQ ID NO: 642 - RNA, 19 nt, Artificial
  Chemically synthesized
uugcaaaauaaggccuuua

SEQ ID NO: 643 - RNA, 19 nt, Artificial
  Chemically synthesized
ucuacugacuucuaaaacu

SEQ ID NO: 644 - RNA, 19 nt, Artificial
  Chemically synthesized
cucaaaaugguaaugaauc

SEQ ID NO: 645 - RNA, 19 nt, Artificial
  Chemically synthesized
uugaagguuaacugcuggu

SEQ ID NO: 646 - RNA, 19 nt, Artificial
  Chemically synthesized
uagagaaauauggaugaca

SEQ ID NO: 647 - RNA, 19 nt, Artificial
  Chemically synthesized
cucucguucagaagucucc

SEQ ID NO: 648 - RNA, 19 nt, Artificial
  Chemically synthesized
uuguaauccgggugguccu

SEQ ID NO: 649 - RNA, 19 nt, Artificial
  Chemically synthesized
aguuucucguugauuucgc

SEQ ID NO: 650 - RNA, 19 nt, Artificial
  Chemically synthesized
aagcaauccucaaacucuc

SEQ ID NO: 651 - RNA, 19 nt, Artificial
  Chemically synthesized
aaagcuagggcacacuguu

SEQ ID NO: 652 - RNA, 19 nt, Artificial
  Chemically synthesized
uaaggcucaagguguuuuu

SEQ ID NO: 653 - RNA, 19 nt, Artificial
  Chemically synthesized
ugguaaugaaucauacaca

SEQ ID NO: 654 - RNA, 19 nt, Artificial
  Chemically synthesized
uacagaaauugaaggaugc

SEQ ID NO: 655 - RNA, 19 nt, Artificial
  Chemically synthesized
aaaagcuagggcacacugu

SEQ ID NO: 656 - RNA, 19 nt, Artificial
  Chemically synthesized
uuuaaggaagaagaagaag

SEQ ID NO: 657 - RNA, 19 nt, Artificial
  Chemically synthesized
gguuauuuuuaggaucauc

SEQ ID NO: 658 - RNA, 19 nt, Artificial
  Chemically synthesized
uccuccuuaaaucgcaaag

SEQ ID NO: 659 - RNA, 19 nt, Artificial
  Chemically synthesized
uagcuguuggaaaaauaag

SEQ ID NO: 660 - RNA, 19 nt, Artificial
  Chemically synthesized
uccuuugcuugccuuuuac

SEQ ID NO: 661 - RNA, 19 nt, Artificial
  Chemically synthesized
ucuagacuauuguuuacuc

SEQ ID NO: 662 - RNA, 19 nt, Artificial
  Chemically synthesized
guugccuuuagcuuaaaug

SEQ ID NO: 663 - RNA, 19 nt, Artificial
  Chemically synthesized
acuacauuugcaaucucuc

SEQ ID NO: 664 - RNA, 19 nt, Artificial
  Chemically synthesized
ucucgcucucguucagaag

SEQ ID NO: 665 - RNA, 19 nt, Artificial
  Chemically synthesized
cucaagguguuuuucucuu

SEQ ID NO: 666 - RNA, 19 nt, Artificial
  Chemically synthesized
ucagugauacacuacauuu

SEQ ID NO: 667 - RNA, 19 nt, Artificial
  Chemically synthesized
ucucuuucuucgguuauuu

SEQ ID NO: 668 - RNA, 19 nt, Artificial
  Chemically synthesized
uguuggaaaaauaagagca

SEQ ID NO: 669 - RNA, 19 nt, Artificial
  Chemically synthesized
cauaauugcaaaauaaggc

SEQ ID NO: 670 - RNA, 19 nt, Artificial
  Chemically synthesized
ucuuggaaauuuggguacg

SEQ ID NO: 671 - RNA, 19 nt, Artificial
  Chemically synthesized
ucacagaggacuuuuuucu

SEQ ID NO: 672 - RNA, 19 nt, Artificial
  Chemically synthesized
acaacagaugaccauaccc

SEQ ID NO: 673 - RNA, 19 nt, Artificial
  Chemically synthesized
uacuggucaaacucguuga

SEQ ID NO: 674 - RNA, 19 nt, Artificial
  Chemically synthesized
ugaaguuuccagucaguuu

SEQ ID NO: 675 - RNA, 19 nt, Artificial
  Chemically synthesized
accguuuuaaggcucaagg

SEQ ID NO: 676 - RNA, 19 nt, Artificial
  Chemically synthesized
augcuugcauuguuuuugu

SEQ ID NO: 677 - RNA, 19 nt, Artificial
  Chemically synthesized
ugccuuuagcuuaaauguc

SEQ ID NO: 678 - RNA, 19 nt, Artificial
  Chemically synthesized
auuucgcugcuccauuuag

SEQ ID NO: 679 - RNA, 19 nt, Artificial
  Chemically synthesized
uccagucguagccuuugag

SEQ ID NO: 680 - RNA, 19 nt, Artificial
  Chemically synthesized
auuaaaaccucuccuuaca

SEQ ID NO: 681 - RNA, 19 nt, Artificial
  Chemically synthesized
uguacaaaaauacucuggu

SEQ ID NO: 682 - RNA, 19 nt, Artificial
  Chemically synthesized
guagugugggagguugaag

SEQ ID NO: 683 - RNA, 19 nt, Artificial
  Chemically synthesized
auguaggugaagguggagu

SEQ ID NO: 684 - RNA, 19 nt, Artificial
  Chemically synthesized
augguaaugaaucauacac

SEQ ID NO: 685 - RNA, 19 nt, Artificial
  Chemically synthesized
uccuuaaaucgcaaagccu

SEQ ID NO: 686 - RNA, 19 nt, Artificial
  Chemically synthesized
uuuuagcaaguggaauguc

SEQ ID NO: 687 - RNA, 19 nt, Artificial
  Chemically synthesized
ugcgcuuggauaggucaug

SEQ ID NO: 688 - RNA, 19 nt, Artificial
  Chemically synthesized
uuaaaaccucuccuuacaa

SEQ ID NO: 689 - RNA, 19 nt, Artificial
  Chemically synthesized
aaaaaguccaguuucucgu

SEQ ID NO: 690 - RNA, 19 nt, Artificial
  Chemically synthesized
aacucguugacaucgaagg

SEQ ID NO: 691 - RNA, 19 nt, Artificial
  Chemically synthesized
uucucuucuccuccugcaa

SEQ ID NO: 692 - RNA, 19 nt, Artificial
  Chemically synthesized
cuugcauuguuuuuguguc

SEQ ID NO: 693 - RNA, 19 nt, Artificial
  Chemically synthesized
auuuagccaagguuggccu

SEQ ID NO: 694 - RNA, 19 nt, Artificial
  Chemically synthesized
augcuucucuagacuauug

SEQ ID NO: 695 - RNA, 19 nt, Artificial
  Chemically synthesized
uuaaggcucaagguguuuu

SEQ ID NO: 696 - RNA, 19 nt, Artificial
  Chemically synthesized
aggaauacaaagaaacuug

SEQ ID NO: 697 - RNA, 19 nt, Artificial
  Chemically synthesized
ugauaaagcuuaccaaaug

SEQ ID NO: 698 - RNA, 19 nt, Artificial
  Chemically synthesized
ugaaacauucccagaacag

SEQ ID NO: 699 - RNA, 19 nt, Artificial
  Chemically synthesized
uaauccgggugguccuucu

SEQ ID NO: 700 - RNA, 19 nt, Artificial
  Chemically synthesized
ucgauguuggagaugacgu

SEQ ID NO: 701 - RNA, 19 nt, Artificial
  Chemically synthesized
acaaguuuccaguuuguuu

SEQ ID NO: 702 - RNA, 19 nt, Artificial
  Chemically synthesized
uuuaaggcucaagguguuu

SEQ ID NO: 703 - RNA, 19 nt, Artificial
  Chemically synthesized
cuuaaguuacagaaguauc

SEQ ID NO: 704 - RNA, 19 nt, Artificial
  Chemically synthesized
uucccagcagcaccguuuu

SEQ ID NO: 705 - RNA, 19 nt, Artificial
  Chemically synthesized
ucaacuaagaguaguuuag

SEQ ID NO: 706 - RNA, 19 nt, Artificial
  Chemically synthesized
uuauuggcugcugaaacau

SEQ ID NO: 707 - RNA, 19 nt, Artificial
  Chemically synthesized
aacagauuucaucuccuuu

SEQ ID NO: 708 - RNA, 19 nt, Artificial
  Chemically synthesized
ucugguugguccucucuuu

SEQ ID NO: 709 - RNA, 19 nt, Artificial
  Chemically synthesized
uccucgcucuccuucuuca

SEQ ID NO: 710 - RNA, 19 nt, Artificial
  Chemically synthesized
aguccaaacaggcagagag

SEQ ID NO: 711 - RNA, 19 nt, Artificial
  Chemically synthesized
uccuccugcaaagaaaagu

SEQ ID NO: 712 - RNA, 19 nt, Artificial
  Chemically synthesized
ugcaaucucucauuuauac

SEQ ID NO: 713 - RNA, 19 nt, Artificial
  Chemically synthesized
uggaaugucuugaagguua

SEQ ID NO: 714 - RNA, 19 nt, Artificial
  Chemically synthesized
cugguugguccucucuuuc

SEQ ID NO: 715 - RNA, 19 nt, Artificial
  Chemically synthesized
auuuaaaugccagguuucu

SEQ ID NO: 716 - RNA, 19 nt, Artificial
  Chemically synthesized
uuuuaaggcucaagguguu

SEQ ID NO: 717 - RNA, 19 nt, Artificial
  Chemically synthesized
auacagaaauugaaggaug

SEQ ID NO: 718 - RNA, 19 nt, Artificial
  Chemically synthesized
aagaucugcuuuuauacag

SEQ ID NO: 719 - RNA, 19 nt, Artificial
  Chemically synthesized
aaaacacugcaaaugacuc

SEQ ID NO: 720 - RNA, 19 nt, Artificial
  Chemically synthesized
ucuuucuuaagacugcagu

SEQ ID NO: 721 - RNA, 19 nt, Artificial
  Chemically synthesized
uuuaaggcagcuccuccuu

SEQ ID NO: 722 - RNA, 19 nt, Artificial
  Chemically synthesized
ucgagugagcuguguguag

SEQ ID NO: 723 - RNA, 19 nt, Artificial
  Chemically synthesized
caaaacacgaacacaaacc

SEQ ID NO: 724 - RNA, 19 nt, Artificial
  Chemically synthesized
ugccuuuuaccucuuucuu

SEQ ID NO: 725 - RNA, 19 nt, Artificial
  Chemically synthesized
ucgcucuccuucuucagau

SEQ ID NO: 726 - RNA, 19 nt, Artificial
  Chemically synthesized
uucuccuccugcaaagaaa

SEQ ID NO: 727 - RNA, 19 nt, Artificial
  Chemically synthesized
aagggaauucugguugguc

SEQ ID NO: 728 - RNA, 19 nt, Artificial
  Chemically synthesized
acaaaguccaaacaggcag

SEQ ID NO: 729 - RNA, 19 nt, Artificial
  Chemically synthesized
cugcaaagaaaaguuuccg

SEQ ID NO: 730 - RNA, 19 nt, Artificial
  Chemically synthesized
uaauugcaaaauaaggccu

SEQ ID NO: 731 - RNA, 19 nt, Artificial
  Chemically synthesized
auguuggagaugacgucgc

SEQ ID NO: 732 - RNA, 19 nt, Artificial
  Chemically synthesized
agauuaaggucugucagug

SEQ ID NO: 733 - RNA, 19 nt, Artificial
  Chemically synthesized
uauuggcugcugaaacauu

SEQ ID NO: 734 - RNA, 19 nt, Artificial
  Chemically synthesized
agcuagggcacacuguuca

SEQ ID NO: 735 - RNA, 19 nt, Artificial
  Chemically synthesized
agagagauuuagcacacug

SEQ ID NO: 736 - RNA, 19 nt, Artificial
  Chemically synthesized
ugaggaauuaagcaaaguu

SEQ ID NO: 737 - RNA, 19 nt, Artificial
  Chemically synthesized
ucauacacaguacauacua

SEQ ID NO: 738 - RNA, 19 nt, Artificial
  Chemically synthesized
ugugcucgggcacuuauug

SEQ ID NO: 739 - RNA, 19 nt, Artificial
  Chemically synthesized
ucuugaagguuaacugcug

SEQ ID NO: 740 - RNA, 19 nt, Artificial
  Chemically synthesized
uuaaggcagcuccuccuua

SEQ ID NO: 741 - RNA, 19 nt, Artificial
  Chemically synthesized
uuggauaggucauguuugu

SEQ ID NO: 742 - RNA, 19 nt, Artificial
  Chemically synthesized
ugaaacaaacaaaacacga

SEQ ID NO: 743 - RNA, 19 nt, Artificial
  Chemically synthesized
acgauucuccaucauccuc

SEQ ID NO: 744 - RNA, 19 nt, Artificial
  Chemically synthesized
auacaaaucuagggugagg

SEQ ID NO: 745 - RNA, 19 nt, Artificial
  Chemically synthesized
ccuuaaaucgcaaagccug

SEQ ID NO: 746 - RNA, 19 nt, Artificial
  Chemically synthesized
aaggaugccauauuaugag

SEQ ID NO: 747 - RNA, 19 nt, Artificial
  Chemically synthesized
uuccucacagaggacuuuu

SEQ ID NO: 748 - RNA, 19 nt, Artificial
  Chemically synthesized
agugaaacaaacaaaacac

SEQ ID NO: 749 - RNA, 19 nt, Artificial
  Chemically synthesized
acugcugguguucugagag

SEQ ID NO: 750 - RNA, 19 nt, Artificial
  Chemically synthesized
agugcaaauguuucccagc

SEQ ID NO: 751 - RNA, 19 nt, Artificial
  Chemically synthesized
ucucguugauuucgcugcu

SEQ ID NO: 752 - RNA, 19 nt, Artificial
  Chemically synthesized
uccucaaacucucuagcca

SEQ ID NO: 753 - RNA, 19 nt, Artificial
  Chemically synthesized
uacacuacauuugcaaucu

SEQ ID NO: 754 - RNA, 19 nt, Artificial
  Chemically synthesized
aucuccuuugcuugccuuu

SEQ ID NO: 755 - RNA, 19 nt, Artificial
  Chemically synthesized
uucuuaagacugcagugaa

SEQ ID NO: 756 - RNA, 19 nt, Artificial
  Chemically synthesized
aaacucguugacaucgaag

SEQ ID NO: 757 - RNA, 19 nt, Artificial
  Chemically synthesized
ucgcaaagccugaggaauu

SEQ ID NO: 758 - RNA, 19 nt, Artificial
  Chemically synthesized
ugaggaaagcuccaacaac

SEQ ID NO: 759 - RNA, 19 nt, Artificial
  Chemically synthesized
aacacugcaaaugacucag

SEQ ID NO: 760 - RNA, 19 nt, Artificial
  Chemically synthesized
aagguaaguuucacggaga

SEQ ID NO: 761 - RNA, 19 nt, Artificial
  Chemically synthesized
uccuucuucagaucgggcu

SEQ ID NO: 762 - RNA, 19 nt, Artificial
  Chemically synthesized
ugccauauuaugagugcuu

SEQ ID NO: 763 - RNA, 19 nt, Artificial
  Chemically synthesized
acaaaaauacucugguugc

SEQ ID NO: 764 - RNA, 19 nt, Artificial
  Chemically synthesized
uaacugcugguguucugag

SEQ ID NO: 765 - RNA, 19 nt, Artificial
  Chemically synthesized
auauuccucacagaggacu

SEQ ID NO: 766 - RNA, 19 nt, Artificial
  Chemically synthesized
gcucaagguguuuuucucu

SEQ ID NO: 767 - RNA, 19 nt, Artificial
  Chemically synthesized
cuuugaggaaagcuccaac

SEQ ID NO: 768 - RNA, 19 nt, Artificial
  Chemically synthesized
ucucuucuccuccugcaaa

SEQ ID NO: 769 - RNA, 19 nt, Artificial
  Chemically synthesized
cuagggcacacuguucaac

SEQ ID NO: 770 - RNA, 19 nt, Artificial
  Chemically synthesized
aauuacaaaguccaaacag

SEQ ID NO: 771 - RNA, 19 nt, Artificial
  Chemically synthesized
auuuaacaacagaugacca

SEQ ID NO: 772 - RNA, 19 nt, Artificial
  Chemically synthesized
guugguccucucuuucuuc

SEQ ID NO: 773 - RNA, 19 nt, Artificial
  Chemically synthesized
uccauuuagccaagguugg

SEQ ID NO: 774 - RNA, 19 nt, Artificial
  Chemically synthesized
aaagcuuuuaccuaaagac

SEQ ID NO: 775 - RNA, 19 nt, Artificial
  Chemically synthesized
ucgucggucaucuucauga

SEQ ID NO: 776 - RNA, 19 nt, Artificial
  Chemically synthesized
ucaucuccuuugcuugccu

SEQ ID NO: 777 - RNA, 19 nt, Artificial
  Chemically synthesized
uucugagaggcacagguga

SEQ ID NO: 778 - RNA, 19 nt, Artificial
  Chemically synthesized
cuugccuuuuaccucuuuc

SEQ ID NO: 779 - RNA, 19 nt, Artificial
  Chemically synthesized
uauuccucacagaggacuu

SEQ ID NO: 780 - RNA, 19 nt, Artificial
  Chemically synthesized
uucucgcucucguucagaa

SEQ ID NO: 781 - RNA, 19 nt, Artificial
  Chemically synthesized
acuaagaguaguuuagcug

SEQ ID NO: 782 - RNA, 19 nt, Artificial
  Chemically synthesized
uuauacaaaucuaggguga

SEQ ID NO: 783 - RNA, 19 nt, Artificial
  Chemically synthesized
uuaccucuuucuuaagacu

SEQ ID NO: 784 - RNA, 19 nt, Artificial
  Chemically synthesized
guccaggagauucauacgc

SEQ ID NO: 785 - RNA, 19 nt, Artificial
  Chemically synthesized
aaagcuuaccaaaugcuuc

SEQ ID NO: 786 - RNA, 19 nt, Artificial
  Chemically synthesized
ugaucacauaacacaauuc

SEQ ID NO: 787 - RNA, 19 nt, Artificial
  Chemically synthesized
gaauuaagcaaaguuaacc

SEQ ID NO: 788 - RNA, 19 nt, Artificial
  Chemically synthesized
uguagugugggagguugaa

SEQ ID NO: 789 - RNA, 19 nt, Artificial
  Chemically synthesized
aacuuguccuccucgcucu

SEQ ID NO: 790 - RNA, 19 nt, Artificial
  Chemically synthesized
uccaagagaagauguagag

SEQ ID NO: 791 - RNA, 19 nt, Artificial
  Chemically synthesized
uaggugaagguggaguaga

SEQ ID NO: 792 - RNA, 19 nt, Artificial
  Chemically synthesized
augacacaugcuugcauug

SEQ ID NO: 793 - RNA, 19 nt, Artificial
  Chemically synthesized
cuuggauaggucauguuug

SEQ ID NO: 794 - RNA, 19 nt, Artificial
  Chemically synthesized
uuucacggagagaacaaaa

SEQ ID NO: 795 - RNA, 19 nt, Artificial
  Chemically synthesized
uguucugagaggcacaggu

SEQ ID NO: 796 - RNA, 19 nt, Artificial
  Chemically synthesized
acugauuggccacaagugg

SEQ ID NO: 797 - RNA, 19 nt, Artificial
  Chemically synthesized
cuguacaaaaauacucugg

SEQ ID NO: 798 - RNA, 19 nt, Artificial
  Chemically synthesized
uucccagaacagauuucau

SEQ ID NO: 799 - RNA, 19 nt, Artificial
  Chemically synthesized
uaaguuucacggagagaac

SEQ ID NO: 800 - RNA, 19 nt, Artificial
  Chemically synthesized
auagagaauauuccucaca

SEQ ID NO: 801 - RNA, 19 nt, Artificial
  Chemically synthesized
aaaacugaucacauaacac

SEQ ID NO: 802 - RNA, 19 nt, Artificial
  Chemically synthesized
ucuuaagacugcagugaac

SEQ ID NO: 803 - RNA, 19 nt, Artificial
  Chemically synthesized
guuuaaaaaguccaguuuc

SEQ ID NO: 804 - RNA, 19 nt, Artificial
  Chemically synthesized
acccuuugaggaaagcucc

SEQ ID NO: 805 - RNA, 19 nt, Artificial
  Chemically synthesized
uaggagcuggaguucuggu

SEQ ID NO: 806 - RNA, 19 nt, Artificial
  Chemically synthesized
ugacucagugauacacuac

SEQ ID NO: 807 - RNA, 19 nt, Artificial
  Chemically synthesized
aucgaaggucucgauguug

SEQ ID NO: 808 - RNA, 19 nt, Artificial
  Chemically synthesized
ugaagaggguuuaaaaagu

SEQ ID NO: 809 - RNA, 19 nt, Artificial
  Chemically synthesized
uacugacuucuaaaacugu

SEQ ID NO: 810 - RNA, 19 nt, Artificial
  Chemically synthesized
aaacaaaacacgaacacaa

SEQ ID NO: 811 - RNA, 19 nt, Artificial
  Chemically synthesized
aaugccagguuucuuaagu

SEQ ID NO: 812 - RNA, 19 nt, Artificial
  Chemically synthesized
guugacaucgaaggucucg

SEQ ID NO: 813 - RNA, 19 nt, Artificial
  Chemically synthesized
aaaagaaacaaguuuccag

SEQ ID NO: 814 - RNA, 19 nt, Artificial
  Chemically synthesized
uaaagcuuaccaaaugcuu

SEQ ID NO: 815 - RNA, 19 nt, Artificial
  Chemically synthesized
uacgaguugccuuuagcuu

SEQ ID NO: 816 - RNA, 19 nt, Artificial
  Chemically synthesized
uguggcagaaaacacugca

SEQ ID NO: 817 - RNA, 19 nt, Artificial
  Chemically synthesized
guuuuaaggcucaaggugu

SEQ ID NO: 818 - RNA, 19 nt, Artificial
  Chemically synthesized
aaugucuuuaaggaagaag

SEQ ID NO: 819 - RNA, 19 nt, Artificial
  Chemically synthesized
uugaaggaugccauauuau

SEQ ID NO: 820 - RNA, 19 nt, Artificial
  Chemically synthesized
uugcucugaagaggguuua

SEQ ID NO: 821 - RNA, 19 nt, Artificial
  Chemically synthesized
aaacauucccagaacagau

SEQ ID NO: 822 - RNA, 19 nt, Artificial
  Chemically synthesized
cuguagugugggagguuga

SEQ ID NO: 823 - RNA, 19 nt, Artificial
  Chemically synthesized
uguaggugaagguggagua

SEQ ID NO: 824 - RNA, 19 nt, Artificial
  Chemically synthesized
aaaagcaauccucaaacuc

SEQ ID NO: 825 - RNA, 19 nt, Artificial
  Chemically synthesized
ugauuucgcugcuccauuu

SEQ ID NO: 826 - RNA, 19 nt, Artificial
  Chemically synthesized
guguguagacggguuguuc

SEQ ID NO: 827 - RNA, 19 nt, Artificial
  Chemically synthesized
ucuccuucuucagaucggg

SEQ ID NO: 828 - RNA, 19 nt, Artificial
  Chemically synthesized
acuaaaagagugcaaaugu

SEQ ID NO: 829 - RNA, 19 nt, Artificial
  Chemically synthesized
cuugaagguuaacugcugg

SEQ ID NO: 830 - RNA, 19 nt, Artificial
  Chemically synthesized
ugucuuggaaauuugggua

SEQ ID NO: 831 - RNA, 19 nt, Artificial
  Chemically synthesized
ucgguguagucguacugug

SEQ ID NO: 832 - RNA, 19 nt, Artificial
  Chemically synthesized
uccacgcuugcucugaaga

SEQ ID NO: 833 - RNA, 19 nt, Artificial
  Chemically synthesized
uagcaaguggaaugucuug

SEQ ID NO: 834 - RNA, 19 nt, Artificial
  Chemically synthesized
cuuaagacugcagugaaca

SEQ ID NO: 835 - RNA, 19 nt, Artificial
  Chemically synthesized
augucuuuaaggaagaaga

SEQ ID NO: 836 - RNA, 19 nt, Artificial
  Chemically synthesized
gaggaaagcuccaacaacc

SEQ ID NO: 837 - RNA, 19 nt, Artificial
  Chemically synthesized
aaguuuccagucaguuucg

SEQ ID NO: 838 - RNA, 19 nt, Artificial
  Chemically synthesized
auuuagcacacugaucaca

SEQ ID NO: 839 - RNA, 19 nt, Artificial
  Chemically synthesized
auuuuagcaaguggaaugu

SEQ ID NO: 840 - RNA, 19 nt, Artificial
  Chemically synthesized
auacccuuugaggaaagcu

SEQ ID NO: 841 - RNA, 19 nt, Artificial
  Chemically synthesized
acgaacacaaaccaaagcu

SEQ ID NO: 842 - RNA, 19 nt, Artificial
  Chemically synthesized
augaaucauacacaguaca

SEQ ID NO: 843 - RNA, 19 nt, Artificial
  Chemically synthesized
caacagaugaccauacccu

SEQ ID NO: 844 - RNA, 19 nt, Artificial
  Chemically synthesized
uguagagaaauauggauga

SEQ ID NO: 845 - RNA, 19 nt, Artificial
  Chemically synthesized
aaugcuucucuagacuauu

SEQ ID NO: 846 - RNA, 19 nt, Artificial
  Chemically synthesized
uccaaacaggcagagagau

SEQ ID NO: 847 - RNA, 19 nt, Artificial
  Chemically synthesized
agauuuagcacacugauca

SEQ ID NO: 848 - RNA, 19 nt, Artificial
  Chemically synthesized
ucgcugcuccauuuagcca

SEQ ID NO: 849 - RNA, 19 nt, Artificial
  Chemically synthesized
ucauguuugugucuuggaa

SEQ ID NO: 850 - RNA, 19 nt, Artificial
  Chemically synthesized
aucauacacaguacauacu

SEQ ID NO: 851 - RNA, 19 nt, Artificial
  Chemically synthesized
ugguugguccucucuuucu

SEQ ID NO: 852 - RNA, 19 nt, Artificial
  Chemically synthesized
uaggaucaucucggccauc

SEQ ID NO: 853 - RNA, 19 nt, Artificial
  Chemically synthesized
cuacugacuucuaaaacug

SEQ ID NO: 854 - RNA, 19 nt, Artificial
  Chemically synthesized
uauacaaaucuagggugag

SEQ ID NO: 855 - RNA, 19 nt, Artificial
  Chemically synthesized
ugcaaaauaaggccuuuau

SEQ ID NO: 856 - RNA, 19 nt, Artificial
  Chemically synthesized
agcugcuccgucuugaugu

SEQ ID NO: 857 - RNA, 19 nt, Artificial
  Chemically synthesized
auuuggguacgaguugccu

SEQ ID NO: 858 - RNA, 19 nt, Artificial
  Chemically synthesized
uguaguaggagcuggaguu

SEQ ID NO: 859 - RNA, 19 nt, Artificial
  Chemically synthesized
aacaagcaaaggcaggagg

SEQ ID NO: 860 - RNA, 19 nt, Artificial
  Chemically synthesized
aaagccugaggaauuaagc

SEQ ID NO: 861 - RNA, 19 nt, Artificial
  Chemically synthesized
cacagcaguaauuaagauu

SEQ ID NO: 862 - RNA, 19 nt, Artificial
  Chemically synthesized
agaagucuccagagcuugc

SEQ ID NO: 863 - RNA, 19 nt, Artificial
  Chemically synthesized
agagaaauauggaugacac

SEQ ID NO: 864 - RNA, 19 nt, Artificial
  Chemically synthesized
ucuuuaaggaagaagaaga

SEQ ID NO: 865 - RNA, 19 nt, Artificial
  Chemically synthesized
cuucucuucuccuccugca

SEQ ID NO: 866 - RNA, 19 nt, Artificial
  Chemically synthesized
ucuagccacagcaguaauu

SEQ ID NO: 867 - RNA, 19 nt, Artificial
  Chemically synthesized
cugaagaggguuuaaaaag

SEQ ID NO: 868 - RNA, 19 nt, Artificial
  Chemically synthesized
agcagcaccguuuuaaggc

SEQ ID NO: 869 - RNA, 19 nt, Artificial
  Chemically synthesized
ugacgugcggcuuguucuu

SEQ ID NO: 870 - RNA, 19 nt, Artificial
  Chemically synthesized
aaauguuucccagcagcac

SEQ ID NO: 871 - RNA, 19 nt, Artificial
  Chemically synthesized
uagacggguuguucccagu

SEQ ID NO: 872 - RNA, 19 nt, Artificial
  Chemically synthesized
uauaaggcagcccaaaggu

SEQ ID NO: 873 - RNA, 19 nt, Artificial
  Chemically synthesized
ucugaagaggguuuaaaaa

SEQ ID NO: 874 - RNA, 19 nt, Artificial
  Chemically synthesized
aaacucucuagccacagca

SEQ ID NO: 875 - RNA, 19 nt, Artificial
  Chemically synthesized
uugaggaaagcuccaacaa

SEQ ID NO: 876 - RNA, 19 nt, Artificial
  Chemically synthesized
ugaggaauacaaagaaacu

SEQ ID NO: 877 - RNA, 19 nt, Artificial
  Chemically synthesized
cuuucuuaagacugcagug

SEQ ID NO: 878 - RNA, 19 nt, Artificial
  Chemically synthesized
augauuuaaaugccagguu

SEQ ID NO: 879 - RNA, 19 nt, Artificial
  Chemically synthesized
cauuuauacaaaucuaggg

SEQ ID NO: 880 - RNA, 19 nt, Artificial
  Chemically synthesized
uaguaggagcuggaguucu

SEQ ID NO: 881 - RNA, 19 nt, Artificial
  Chemically synthesized
uuaggaucaucucggccau

SEQ ID NO: 882 - RNA, 19 nt, Artificial
  Chemically synthesized
guucuucaccgacuuccuc

SEQ ID NO: 883 - RNA, 19 nt, Artificial
  Chemically synthesized
acagaugaccauacccuuu

SEQ ID NO: 884 - RNA, 19 nt, Artificial
  Chemically synthesized
agaguaguuuagcuguugg

SEQ ID NO: 885 - RNA, 19 nt, Artificial
  Chemically synthesized
auucuccaucauccuccac

SEQ ID NO: 886 - RNA, 19 nt, Artificial
  Chemically synthesized
guuuacucccauaauugca

SEQ ID NO: 887 - RNA, 19 nt, Artificial
  Chemically synthesized
acugacuucuaaaacuguu

SEQ ID NO: 888 - RNA, 19 nt, Artificial
  Chemically synthesized
acacgaacacaaaccaaag

SEQ ID NO: 889 - RNA, 19 nt, Artificial
  Chemically synthesized
cuccauuuagccaagguug

SEQ ID NO: 890 - RNA, 19 nt, Artificial
  Chemically synthesized
accaugaaggcguucaugg

SEQ ID NO: 891 - RNA, 19 nt, Artificial
  Chemically synthesized
aaaauacucugguugcaag

SEQ ID NO: 892 - RNA, 19 nt, Artificial
  Chemically synthesized
ucguugacaucgaaggucu

SEQ ID NO: 893 - RNA, 19 nt, Artificial
  Chemically synthesized
aauuuggguacgaguugcc

SEQ ID NO: 894 - RNA, 19 nt, Artificial
  Chemically synthesized
agaaauugaaggaugccau

SEQ ID NO: 895 - RNA, 19 nt, Artificial
  Chemically synthesized
agcuguuggaaaaauaaga

SEQ ID NO: 896 - RNA, 19 nt, Artificial
  Chemically synthesized
uccaguuuguuuucaacaa

SEQ ID NO: 897 - RNA, 19 nt, Artificial
  Chemically synthesized
agugauacacuacauuugc

SEQ ID NO: 898 - RNA, 19 nt, Artificial
  Chemically synthesized
ggcucaagguguuuuucuc

SEQ ID NO: 899 - RNA, 19 nt, Artificial
  Chemically synthesized
cuacauuugcaaucucuca

SEQ ID NO: 900 - RNA, 19 nt, Artificial
  Chemically synthesized
aucauccuccacgcuugcu

SEQ ID NO: 901 - RNA, 19 nt, Artificial
  Chemically synthesized
ccauaauugcaaaauaagg

SEQ ID NO: 902 - RNA, 19 nt, Artificial
  Chemically synthesized
cagguacuggucaaacucg

SEQ ID NO: 903 - RNA, 19 nt, Artificial
  Chemically synthesized
acaaagaaaaaagggaugg

SEQ ID NO: 904 - RNA, 19 nt, Artificial
  Chemically synthesized
caguuucucguugauuucg

SEQ ID NO: 905 - RNA, 19 nt, Artificial
  Chemically synthesized
uuaagacugcagugaacaa

SEQ ID NO: 906 - RNA, 19 nt, Artificial
  Chemically synthesized
cucuccuucuucagaucgg

SEQ ID NO: 907 - RNA, 19 nt, Artificial
  Chemically synthesized
gucaaacucguugacaucg

SEQ ID NO: 908 - RNA, 19 nt, Artificial
  Chemically synthesized
ugaacaagcaaaggcagga

SEQ ID NO: 909 - RNA, 19 nt, Artificial
  Chemically synthesized
aaugaaucauacacaguac

SEQ ID NO: 910 - RNA, 19 nt, Artificial
  Chemically synthesized
cugaucacacgauucucca

SEQ ID NO: 911 - RNA, 19 nt, Artificial
  Chemically synthesized
gugaggaauacaaagaaac

SEQ ID NO: 912 - RNA, 19 nt, Artificial
  Chemically synthesized
aucacacgauucuccauca

SEQ ID NO: 913 - RNA, 19 nt, Artificial
  Chemically synthesized
aagauuaaggucugucagu

SEQ ID NO: 914 - RNA, 19 nt, Artificial
  Chemically synthesized
gaucaucucggccaucuuc

SEQ ID NO: 915 - RNA, 19 nt, Artificial
  Chemically synthesized
cuuaaaucgcaaagccuga

SEQ ID NO: 916 - RNA, 19 nt, Artificial
  Chemically synthesized
aaggcucaagguguuuuuc

SEQ ID NO: 917 - RNA, 19 nt, Artificial
  Chemically synthesized
agaauauuccucacagagg

SEQ ID NO: 918 - RNA, 19 nt, Artificial
  Chemically synthesized
uaggucauguuugugucuu

SEQ ID NO: 919 - RNA, 19 nt, Artificial
  Chemically synthesized
aucuagggugaggaauaca

SEQ ID NO: 920 - RNA, 19 nt, Artificial
  Chemically synthesized
aggaaaaagagcaaaagug

SEQ ID NO: 921 - RNA, 19 nt, Artificial
  Chemically synthesized
uggacaaaaaggcauuuau

SEQ ID NO: 922 - RNA, 19 nt, Artificial
  Chemically synthesized
ugauuggccacaagugggu

SEQ ID NO: 923 - RNA, 19 nt, Artificial
  Chemically synthesized
aaaaaagggauggacaaaa

SEQ ID NO: 924 - RNA, 19 nt, Artificial
  Chemically synthesized
cuccuuaaaucgcaaagcc

SEQ ID NO: 925 - RNA, 19 nt, Artificial
  Chemically synthesized
accaaaugcuucucuagac

SEQ ID NO: 926 - RNA, 19 nt, Artificial
  Chemically synthesized
cacacgauucuccaucauc

SEQ ID NO: 927 - RNA, 19 nt, Artificial
  Chemically synthesized
aaagaaacaaguuuccagu

SEQ ID NO: 928 - RNA, 19 nt, Artificial
  Chemically synthesized
aaugacucagugauacacu

SEQ ID NO: 929 - RNA, 19 nt, Artificial
  Chemically synthesized
uucuugcuggagccguuga

SEQ ID NO: 930 - RNA, 19 nt, Artificial
  Chemically synthesized
aggaaaugcacuaaaagag

SEQ ID NO: 931 - RNA, 19 nt, Artificial
  Chemically synthesized
cucuucuccuccugcaaag

SEQ ID NO: 932 - RNA, 19 nt, Artificial
  Chemically synthesized
uccagucaguuucgagcuc

SEQ ID NO: 933 - RNA, 19 nt, Artificial
  Chemically synthesized
agaaauauggaugacacau

SEQ ID NO: 934 - RNA, 19 nt, Artificial
  Chemically synthesized
accucuuucuuaagacugc

SEQ ID NO: 935 - RNA, 19 nt, Artificial
  Chemically synthesized
guuuccagucaguuucgag

SEQ ID NO: 936 - RNA, 19 nt, Artificial
  Chemically synthesized
ugcauuguuuuugugucaa

SEQ ID NO: 937 - RNA, 19 nt, Artificial
  Chemically synthesized
cccagaacagauuucaucu

SEQ ID NO: 938 - RNA, 19 nt, Artificial
  Chemically synthesized
uggguaaugcgcuuggaua

SEQ ID NO: 939 - RNA, 19 nt, Artificial
  Chemically synthesized
uguagacggguuguuccca

SEQ ID NO: 940 - RNA, 19 nt, Artificial
  Chemically synthesized
cuucgguuauuuuuaggau

SEQ ID NO: 941 - RNA, 19 nt, Artificial
  Chemically synthesized
aaaaccucuccuuacaaaa

SEQ ID NO: 942 - RNA, 19 nt, Artificial
  Chemically synthesized
agaacagauuucaucuccu

SEQ ID NO: 943 - RNA, 19 nt, Artificial
  Chemically synthesized
cauuuagccaagguuggcc

SEQ ID NO: 944 - RNA, 19 nt, Artificial
  Chemically synthesized
ccuuugcuugccuuuuacc

SEQ ID NO: 945 - RNA, 19 nt, Artificial
  Chemically synthesized
aaugcgcuuggauagguca

SEQ ID NO: 946 - RNA, 19 nt, Artificial
  Chemically synthesized
gcauuuauacaaaucuagg

SEQ ID NO: 947 - RNA, 19 nt, Artificial
  Chemically synthesized
uggauaggucauguuugug

SEQ ID NO: 948 - RNA, 19 nt, Artificial
  Chemically synthesized
aaagaaaaaagggauggac

SEQ ID NO: 949 - RNA, 19 nt, Artificial
  Chemically synthesized
aacacgaacacaaaccaaa

SEQ ID NO: 950 - RNA, 19 nt, Artificial
  Chemically synthesized
aaauacucugguugcaaga

SEQ ID NO: 951 - RNA, 19 nt, Artificial
  Chemically synthesized
uguguguagacggguuguu

SEQ ID NO: 952 - RNA, 19 nt, Artificial
  Chemically synthesized
gcucuccuucuucagaucg

SEQ ID NO: 953 - RNA, 19 nt, Artificial
  Chemically synthesized
agguaaguuucacggagag

SEQ ID NO: 954 - RNA, 19 nt, Artificial
  Chemically synthesized
uugugcaagugcggguacu

SEQ ID NO: 955 - RNA, 19 nt, Artificial
  Chemically synthesized
ugaaucauacacaguacau

SEQ ID NO: 956 - RNA, 19 nt, Artificial
  Chemically synthesized
ucccucacuccaagagaag

SEQ ID NO: 957 - RNA, 19 nt, Artificial
  Chemically synthesized
aagaggguuuaaaaagucc

SEQ ID NO: 958 - RNA, 19 nt, Artificial
  Chemically synthesized
aagcuuaccaaaugcuucu

SEQ ID NO: 959 - RNA, 19 nt, Artificial
  Chemically synthesized
aaaagggauggacaaaaag

SEQ ID NO: 960 - RNA, 19 nt, Artificial
  Chemically synthesized
acaaaacacgaacacaaac

SEQ ID NO: 961 - RNA, 19 nt, Artificial
  Chemically synthesized
uaguuuagcuguuggaaaa

SEQ ID NO: 962 - RNA, 19 nt, Artificial
  Chemically synthesized
caagguguuuuucucuucu

SEQ ID NO: 963 - RNA, 19 nt, Artificial
  Chemically synthesized
aaacaggcagagagauuua

SEQ ID NO: 964 - RNA, 19 nt, Artificial
  Chemically synthesized
caaccuauuuuaaagaagg

SEQ ID NO: 965 - RNA, 19 nt, Artificial
  Chemically synthesized
gcaaagaaaaguuuccggg

SEQ ID NO: 966 - RNA, 19 nt, Artificial
  Chemically synthesized
ccugcaaagaaaaguuucc

SEQ ID NO: 967 - RNA, 19 nt, Artificial
  Chemically synthesized
cuauuguuuacucccauaa

SEQ ID NO: 968 - RNA, 19 nt, Artificial
  Chemically synthesized
uaaaaccucuccuuacaaa

SEQ ID NO: 969 - RNA, 19 nt, Artificial
  Chemically synthesized
aagagaaagcaaaucugua

SEQ ID NO: 970 - RNA, 19 nt, Artificial
  Chemically synthesized
cucuagacuauuguuuacu

SEQ ID NO: 971 - RNA, 19 nt, Artificial
  Chemically synthesized
uacaaaguccaaacaggca

SEQ ID NO: 972 - RNA, 19 nt, Artificial
  Chemically synthesized
aaggucucgauguuggaga

SEQ ID NO: 973 - RNA, 19 nt, Artificial
  Chemically synthesized
aauugcaaaauaaggccuu

SEQ ID NO: 974 - RNA, 19 nt, Artificial
  Chemically synthesized
gaaagcuccaacaaccuau

SEQ ID NO: 975 - RNA, 19 nt, Artificial
  Chemically synthesized
aacaaagaaaaaagggaug

SEQ ID NO: 976 - RNA, 19 nt, Artificial
  Chemically synthesized
aacugaucacauaacacaa

SEQ ID NO: 977 - RNA, 19 nt, Artificial
  Chemically synthesized
ucguagccuuugagcaccu

SEQ ID NO: 978 - RNA, 19 nt, Artificial
  Chemically synthesized
ccucaaacucucuagccac

SEQ ID NO: 979 - RNA, 19 nt, Artificial
  Chemically synthesized
agguacuggucaaacucgu

SEQ ID NO: 980 - RNA, 19 nt, Artificial
  Chemically synthesized
uggaugacacaugcuugca

SEQ ID NO: 981 - RNA, 19 nt, Artificial
  Chemically synthesized
agcuccaacaaccuauuuu

SEQ ID NO: 982 - RNA, 19 nt, Artificial
  Chemically synthesized
aaaugcacuaaaagagugc

SEQ ID NO: 983 - RNA, 19 nt, Artificial
  Chemically synthesized
ucuccuccugcaaagaaaa

SEQ ID NO: 984 - RNA, 19 nt, Artificial
  Chemically synthesized
uguuugugucuuggaaauu

SEQ ID NO: 985 - RNA, 19 nt, Artificial
  Chemically synthesized
ucgcucucguucagaaguc

SEQ ID NO: 986 - RNA, 19 nt, Artificial
  Chemically synthesized
gucuugaagguuaacugcu

SEQ ID NO: 987 - RNA, 19 nt, Artificial
  Chemically synthesized
ucacuccaagagaagaugu

SEQ ID NO: 988 - RNA, 19 nt, Artificial
  Chemically synthesized
agucguagccuuugagcac

SEQ ID NO: 989 - RNA, 19 nt, Artificial
  Chemically synthesized
uaaggcagcuccuccuuaa

SEQ ID NO: 990 - RNA, 19 nt, Artificial
  Chemically synthesized
acacugaucacacgauucu

SEQ ID NO: 991 - RNA, 19 nt, Artificial
  Chemically synthesized
uggucaaacucguugacau

SEQ ID NO: 992 - RNA, 19 nt, Artificial
  Chemically synthesized
cucgucggucaucuucaug

SEQ ID NO: 993 - RNA, 19 nt, Artificial
  Chemically synthesized
cuaagaguaguuuagcugu

SEQ ID NO: 994 - RNA, 19 nt, Artificial
  Chemically synthesized
gcagguacuggucaaacuc

SEQ ID NO: 995 - RNA, 19 nt, Artificial
  Chemically synthesized
ugcaagaaaagcuagggca

SEQ ID NO: 996 - RNA, 19 nt, Artificial
  Chemically synthesized
aagaaaagcuagggcacac

SEQ ID NO: 997 - RNA, 19 nt, Artificial
  Chemically synthesized
acucucuagccacagcagu

SEQ ID NO: 998 - RNA, 19 nt, Artificial
  Chemically synthesized
augccagguuucuuaaguu

SEQ ID NO: 999 - RNA, 19 nt, Artificial
  Chemically synthesized
aaaaauacucugguugcaa

SEQ ID NO: 1000 - RNA, 19 nt, Artificial
  Chemically synthesized
acuauuguuuacucccaua

SEQ ID NO: 1001 - RNA, 21 nt, Artificial
  Chemically synthesized
ccgagaugauccuaaaaauaa

SEQ ID NO: 1002 - RNA, 21 nt, Artificial
  Chemically synthesized
cugacagaccuuaaucuuaau

SEQ ID NO: 1003 - RNA, 21 nt, Artificial
  Chemically synthesized
ccuucaaccucccacacuaca

SEQ ID NO: 1004 - RNA, 21 nt, Artificial
  Chemically synthesized
ggaggagcugccuuaaaaaaa

SEQ ID NO: 1005 - RNA, 21 nt, Artificial
  Chemically synthesized
gaugauccuaaaaauaaccga

SEQ ID NO: 1006 - RNA, 21 nt, Artificial
  Chemically synthesized
gcuuguucacugcagucuuaa

SEQ ID NO: 1007 - RNA, 21 nt, Artificial
  Chemically synthesized
gccgagaugauccuaaaaaua

SEQ ID NO: 1008 - RNA, 21 nt, Artificial
  Chemically synthesized
ggccgagaugauccuaaaaau

SEQ ID NO: 1009 - RNA, 21 nt, Artificial
  Chemically synthesized
gguuguuggagcuuuccucaa

SEQ ID NO: 1010 - RNA, 21 nt, Artificial
  Chemically synthesized
gaauguuucagcagccaauaa

SEQ ID NO: 1011 - RNA, 21 nt, Artificial
  Chemically synthesized
cacugacagaccuuaaucuua

SEQ ID NO: 1012 - RNA, 21 nt, Artificial
  Chemically synthesized
gaaaaacaccuugagccuuaa

SEQ ID NO: 1013 - RNA, 21 nt, Artificial
  Chemically synthesized
gaaggaccacccggauuacaa

SEQ ID NO: 1014 - RNA, 21 nt, Artificial
  Chemically synthesized
cgagaaacuggacuuuuuaaa

SEQ ID NO: 1015 - RNA, 21 nt, Artificial
  Chemically synthesized
gguauggucaucuguuguuaa

SEQ ID NO: 1016 - RNA, 21 nt, Artificial
  Chemically synthesized
ggagcucgaaacugacuggaa

SEQ ID NO: 1017 - RNA, 21 nt, Artificial
  Chemically synthesized
caagaacaagccgcacgucaa

SEQ ID NO: 1018 - RNA, 21 nt, Artificial
  Chemically synthesized
cccaaauuuccaagacacaaa

SEQ ID NO: 1019 - RNA, 21 nt, Artificial
  Chemically synthesized
cgaaacugacuggaaacuuca

SEQ ID NO: 1020 - RNA, 21 nt, Artificial
  Chemically synthesized
ggagcagcgaaaucaacgaga

SEQ ID NO: 1021 - RNA, 21 nt, Artificial
  Chemically synthesized
agaugaaaucuguucugggaa

SEQ ID NO: 1022 - RNA, 21 nt, Artificial
  Chemically synthesized
ggagcugccuuaaaaaaaaau

SEQ ID NO: 1023 - RNA, 21 nt, Artificial
  Chemically synthesized
gaaagagaggaccaaccagaa

SEQ ID NO: 1024 - RNA, 21 nt, Artificial
  Chemically synthesized
ugggaauguuucagcagccaa

SEQ ID NO: 1025 - RNA, 21 nt, Artificial
  Chemically synthesized
cagucuuaagaaagagguaaa

SEQ ID NO: 1026 - RNA, 21 nt, Artificial
  Chemically synthesized
ggaugauggagaaucguguga

SEQ ID NO: 1027 - RNA, 21 nt, Artificial
  Chemically synthesized
cgagaugauccuaaaaauaac

SEQ ID NO: 1028 - RNA, 21 nt, Artificial
  Chemically synthesized
guauggucaucuguuguuaaa

SEQ ID NO: 1029 - RNA, 21 nt, Artificial
  Chemically synthesized
caguuuuagaagucaguagaa

SEQ ID NO: 1030 - RNA, 21 nt, Artificial
  Chemically synthesized
guauguacuguguaugauuca

SEQ ID NO: 1031 - RNA, 21 nt, Artificial
  Chemically synthesized
gcuaaaucucucugccuguuu

SEQ ID NO: 1032 - RNA, 21 nt, Artificial
  Chemically synthesized
agacauuuaagcuaaaggcaa

SEQ ID NO: 1033 - RNA, 21 nt, Artificial
  Chemically synthesized
cgaaaucaacgagaaacugga

SEQ ID NO: 1034 - RNA, 21 nt, Artificial
  Chemically synthesized
gauccuaaaaauaaccgaaga

SEQ ID NO: 1035 - RNA, 21 nt, Artificial
  Chemically synthesized
cuuugcaggaggagaagagaa

SEQ ID NO: 1036 - RNA, 21 nt, Artificial
  Chemically synthesized
aggaggagcugccuuaaaaaa

SEQ ID NO: 1037 - RNA, 21 nt, Artificial
  Chemically synthesized
ccuuaaucuuaauuacugcug

SEQ ID NO: 1038 - RNA, 21 nt, Artificial
  Chemically synthesized
gcuaaacuacucuuaguugaa

SEQ ID NO: 1039 - RNA, 21 nt, Artificial
  Chemically synthesized
gggaauguuucagcagccaau

SEQ ID NO: 1040 - RNA, 21 nt, Artificial
  Chemically synthesized
caaguuucuuuguauuccuca

SEQ ID NO: 1041 - RNA, 21 nt, Artificial
  Chemically synthesized
acaccagcaguuaaccuucaa

SEQ ID NO: 1042 - RNA, 21 nt, Artificial
  Chemically synthesized
acugacagaccuuaaucuuaa

SEQ ID NO: 1043 - RNA, 21 nt, Artificial
  Chemically synthesized
gcaaauguaguguaucacuga

SEQ ID NO: 1044 - RNA, 21 nt, Artificial
  Chemically synthesized
caucgagaccuucgaugucaa

SEQ ID NO: 1045 - RNA, 21 nt, Artificial
  Chemically synthesized
aaaaacaccuugagccuuaaa

SEQ ID NO: 1046 - RNA, 21 nt, Artificial
  Chemically synthesized
agcagcgaaaucaacgagaaa

SEQ ID NO: 1047 - RNA, 21 nt, Artificial
  Chemically synthesized
ucuggagacuucugaacgaga

SEQ ID NO: 1048 - RNA, 21 nt, Artificial
  Chemically synthesized
acgagaaacuggacuuuuuaa

SEQ ID NO: 1049 - RNA, 21 nt, Artificial
  Chemically synthesized
caagaaggaccacccggauua

SEQ ID NO: 1050 - RNA, 21 nt, Artificial
  Chemically synthesized
agauggccgagaugauccuaa

SEQ ID NO: 1051 - RNA, 21 nt, Artificial
  Chemically synthesized
caacggcuccagcaagaacaa

SEQ ID NO: 1052 - RNA, 21 nt, Artificial
  Chemically synthesized
aggcaagcaaaggagaugaaa

SEQ ID NO: 1053 - RNA, 21 nt, Artificial
  Chemically synthesized
agaaaaacaccuugagccuua

SEQ ID NO: 1054 - RNA, 21 nt, Artificial
  Chemically synthesized
ggcuuugcgauuuaaggagga

SEQ ID NO: 1055 - RNA, 21 nt, Artificial
  Chemically synthesized
cggaaacuuuucuuugcagga

SEQ ID NO: 1056 - RNA, 21 nt, Artificial
  Chemically synthesized
cgacgucaucuccaacaucga

SEQ ID NO: 1057 - RNA, 21 nt, Artificial
  Chemically synthesized
cugccuguuuggacuuuguaa

SEQ ID NO: 1058 - RNA, 21 nt, Artificial
  Chemically synthesized
gcguggaggaugauggagaau

SEQ ID NO: 1059 - RNA, 21 nt, Artificial
  Chemically synthesized
gggaaacauuugcacucuuuu

SEQ ID NO: 1060 - RNA, 21 nt, Artificial
  Chemically synthesized
ccuuuuguucucuccgugaaa

SEQ ID NO: 1061 - RNA, 21 nt, Artificial
  Chemically synthesized
cggugcugcugggaaacauuu

SEQ ID NO: 1062 - RNA, 21 nt, Artificial
  Chemically synthesized
ccagaguauuuuuguacagau

SEQ ID NO: 1063 - RNA, 21 nt, Artificial
  Chemically synthesized
ccuaaaaauaaccgaagaaag

SEQ ID NO: 1064 - RNA, 21 nt, Artificial
  Chemically synthesized
acacaaacaugaccuauccaa

SEQ ID NO: 1065 - RNA, 21 nt, Artificial
  Chemically synthesized
uggcuaaauggagcagcgaaa

SEQ ID NO: 1066 - RNA, 21 nt, Artificial
  Chemically synthesized
guaaaaggcaagcaaaggaga

SEQ ID NO: 1067 - RNA, 21 nt, Artificial
  Chemically synthesized
ggagcuuuccucaaaggguau

SEQ ID NO: 1068 - RNA, 21 nt, Artificial
  Chemically synthesized
gaacagugugcccuagcuuuu

SEQ ID NO: 1069 - RNA, 21 nt, Artificial
  Chemically synthesized
cagugugcccuagcuuuucuu

SEQ ID NO: 1070 - RNA, 21 nt, Artificial
  Chemically synthesized
gaguaaacaauagucuagaga

SEQ ID NO: 1071 - RNA, 21 nt, Artificial
  Chemically synthesized
ggcaagcaaaggagaugaaau

SEQ ID NO: 1072 - RNA, 21 nt, Artificial
  Chemically synthesized
ggaaacauuugcacucuuuua

SEQ ID NO: 1073 - RNA, 21 nt, Artificial
  Chemically synthesized
aaggcaagcaaaggagaugaa

SEQ ID NO: 1074 - RNA, 21 nt, Artificial
  Chemically synthesized
uaagaaagagguaaaaggcaa

SEQ ID NO: 1075 - RNA, 21 nt, Artificial
  Chemically synthesized
ggaggaugauggagaaucgug

SEQ ID NO: 1076 - RNA, 21 nt, Artificial
  Chemically synthesized
ugauccuaaaaauaaccgaag

SEQ ID NO: 1077 - RNA, 21 nt, Artificial
  Chemically synthesized
aacucguacccaaauuuccaa

SEQ ID NO: 1078 - RNA, 21 nt, Artificial
  Chemically synthesized
gauggccgagaugauccuaaa

SEQ ID NO: 1079 - RNA, 21 nt, Artificial
  Chemically synthesized
gcaaaggagaugaaaucuguu

SEQ ID NO: 1080 - RNA, 21 nt, Artificial
  Chemically synthesized
cuaaaggcaacucguacccaa

SEQ ID NO: 1081 - RNA, 21 nt, Artificial
  Chemically synthesized
gagcucgaaacugacuggaaa

SEQ ID NO: 1082 - RNA, 21 nt, Artificial
  Chemically synthesized
agaccuuugggcugccuuaua

SEQ ID NO: 1083 - RNA, 21 nt, Artificial
  Chemically synthesized
aaaaguccucugugaggaaua

SEQ ID NO: 1084 - RNA, 21 nt, Artificial
  Chemically synthesized
agagcaagcguggaggaugau

SEQ ID NO: 1085 - RNA, 21 nt, Artificial
  Chemically synthesized
cuuaagaaaccuggcauuuaa

SEQ ID NO: 1086 - RNA, 21 nt, Artificial
  Chemically synthesized
ucgugugaucagugugcuaaa

SEQ ID NO: 1087 - RNA, 21 nt, Artificial
  Chemically synthesized
uguucacugcagucuuaagaa

SEQ ID NO: 1088 - RNA, 21 nt, Artificial
  Chemically synthesized
gcaguuaaccuucaagacauu

SEQ ID NO: 1089 - RNA, 21 nt, Artificial
  Chemically synthesized
gugcuaaaucucucugccugu

SEQ ID NO: 1090 - RNA, 21 nt, Artificial
  Chemically synthesized
gggaguaaacaauagucuaga

SEQ ID NO: 1091 - RNA, 21 nt, Artificial
  Chemically synthesized
guuguuggagcuuuccucaaa

SEQ ID NO: 1092 - RNA, 21 nt, Artificial
  Chemically synthesized
gaggagcugccuuaaaaaaaa

SEQ ID NO: 1093 - RNA, 21 nt, Artificial
  Chemically synthesized
cguacccaaauuuccaagaca

SEQ ID NO: 1094 - RNA, 21 nt, Artificial
  Chemically synthesized
uaaaggcaacucguacccaaa

SEQ ID NO: 1095 - RNA, 21 nt, Artificial
  Chemically synthesized
agaugauccuaaaaauaaccg

SEQ ID NO: 1096 - RNA, 21 nt, Artificial
  Chemically synthesized
caaauuuccaagacacaaaca

SEQ ID NO: 1097 - RNA, 21 nt, Artificial
  Chemically synthesized
agguaaaaggcaagcaaagga

SEQ ID NO: 1098 - RNA, 21 nt, Artificial
  Chemically synthesized
cuuuguauuccucacccuaga

SEQ ID NO: 1099 - RNA, 21 nt, Artificial
  Chemically synthesized
gcauuacccacuuguggccaa

SEQ ID NO: 1100 - RNA, 21 nt, Artificial
  Chemically synthesized
aaggaggagcugccuuaaaaa

SEQ ID NO: 1101 - RNA, 21 nt, Artificial
  Chemically synthesized
guucguguuuuguuuguuuca

SEQ ID NO: 1102 - RNA, 21 nt, Artificial
  Chemically synthesized
aagagguaaaaggcaagcaaa

SEQ ID NO: 1103 - RNA, 21 nt, Artificial
  Chemically synthesized
agagguaaaaggcaagcaaag

SEQ ID NO: 1104 - RNA, 21 nt, Artificial
  Chemically synthesized
gagcagcgaaaucaacgagaa

SEQ ID NO: 1105 - RNA, 21 nt, Artificial
  Chemically synthesized
cgaugucaacgaguuugacca

SEQ ID NO: 1106 - RNA, 21 nt, Artificial
  Chemically synthesized
caagcucuggagacuucugaa

SEQ ID NO: 1107 - RNA, 21 nt, Artificial
  Chemically synthesized
aagaagagaaaaacaccuuga

SEQ ID NO: 1108 - RNA, 21 nt, Artificial
  Chemically synthesized
gagaugauccuaaaaauaacc

SEQ ID NO: 1109 - RNA, 21 nt, Artificial
  Chemically synthesized
gucuagagaagcauuugguaa

SEQ ID NO: 1110 - RNA, 21 nt, Artificial
  Chemically synthesized
uccucaggcuuugcgauuuaa

SEQ ID NO: 1111 - RNA, 21 nt, Artificial
  Chemically synthesized
ugcaauuaugggaguaaacaa

SEQ ID NO: 1112 - RNA, 21 nt, Artificial
  Chemically synthesized
gaugaaaucuguucugggaau

SEQ ID NO: 1113 - RNA, 21 nt, Artificial
  Chemically synthesized
caagcaugugucauccauauu

SEQ ID NO: 1114 - RNA, 21 nt, Artificial
  Chemically synthesized
aagcguggaggaugauggaga

SEQ ID NO: 1115 - RNA, 21 nt, Artificial
  Chemically synthesized
gguuuguguucguguuuuguu

SEQ ID NO: 1116 - RNA, 21 nt, Artificial
  Chemically synthesized
gcauuugguaagcuuuaucau

SEQ ID NO: 1117 - RNA, 21 nt, Artificial
  Chemically synthesized
guucacugcagucuuaagaaa

SEQ ID NO: 1118 - RNA, 21 nt, Artificial
  Chemically synthesized
ccuuauuuugcaauuauggga

SEQ ID NO: 1119 - RNA, 21 nt, Artificial
  Chemically synthesized
gaaagcggagcucgaaacuga

SEQ ID NO: 1120 - RNA, 21 nt, Artificial
  Chemically synthesized
agaagcauuugguaagcuuua

SEQ ID NO: 1121 - RNA, 21 nt, Artificial
  Chemically synthesized
ccucacccuagauuuguauaa

SEQ ID NO: 1122 - RNA, 21 nt, Artificial
  Chemically synthesized
ggaauguuucagcagccaaua

SEQ ID NO: 1123 - RNA, 21 nt, Artificial
  Chemically synthesized
agaaagagaggaccaaccaga

SEQ ID NO: 1124 - RNA, 21 nt, Artificial
  Chemically synthesized
ccucaggcuuugcgauuuaag

SEQ ID NO: 1125 - RNA, 21 nt, Artificial
  Chemically synthesized
agaagagaaaaacaccuugag

SEQ ID NO: 1126 - RNA, 21 nt, Artificial
  Chemically synthesized
gguaaaagcuuugguuugugu

SEQ ID NO: 1127 - RNA, 21 nt, Artificial
  Chemically synthesized
aguugaacagugugcccuagc

SEQ ID NO: 1128 - RNA, 21 nt, Artificial
  Chemically synthesized
cugggaaacauuugcacucuu

SEQ ID NO: 1129 - RNA, 21 nt, Artificial
  Chemically synthesized
agacauuccacuugcuaaaau

SEQ ID NO: 1130 - RNA, 21 nt, Artificial
  Chemically synthesized
uaaggaggagcugccuuaaaa

SEQ ID NO: 1131 - RNA, 21 nt, Artificial
  Chemically synthesized
aggagcugccuuaaaaaaaaa

SEQ ID NO: 1132 - RNA, 21 nt, Artificial
  Chemically synthesized
cauccauauuucucuacaucu

SEQ ID NO: 1133 - RNA, 21 nt, Artificial
  Chemically synthesized
cugugaggaauauucucuauu

SEQ ID NO: 1134 - RNA, 21 nt, Artificial
  Chemically synthesized
gaaaacaaacuggaaacuugu

SEQ ID NO: 1135 - RNA, 21 nt, Artificial
  Chemically synthesized
caacucguacccaaauuucca

SEQ ID NO: 1136 - RNA, 21 nt, Artificial
  Chemically synthesized
uaaauggagcagcgaaaucaa

SEQ ID NO: 1137 - RNA, 21 nt, Artificial
  Chemically synthesized
ccuagauuuguauaaaugccu

SEQ ID NO: 1138 - RNA, 21 nt, Artificial
  Chemically synthesized
gcaagcucuggagacuucuga

SEQ ID NO: 1139 - RNA, 21 nt, Artificial
  Chemically synthesized
uuaguugaacagugugcccua

SEQ ID NO: 1140 - RNA, 21 nt, Artificial
  Chemically synthesized
gauggagaaucgugugaucag

SEQ ID NO: 1141 - RNA, 21 nt, Artificial
  Chemically synthesized
cuucgaugucaacgaguuuga

SEQ ID NO: 1142 - RNA, 21 nt, Artificial
  Chemically synthesized
agucuagagaagcauuuggua

SEQ ID NO: 1143 - RNA, 21 nt, Artificial
  Chemically synthesized
ggaacaacccgucuacacaca

SEQ ID NO: 1144 - RNA, 21 nt, Artificial
  Chemically synthesized
cgaucugaagaaggagagcga

SEQ ID NO: 1145 - RNA, 21 nt, Artificial
  Chemically synthesized
acaucaagacggagcagcuga

SEQ ID NO: 1146 - RNA, 21 nt, Artificial
  Chemically synthesized
aaaaaaguccucugugaggaa

SEQ ID NO: 1147 - RNA, 21 nt, Artificial
  Chemically synthesized
cucugugaggaauauucucua

SEQ ID NO: 1148 - RNA, 21 nt, Artificial
  Chemically synthesized
ggagaaucgugugaucagugu

SEQ ID NO: 1149 - RNA, 21 nt, Artificial
  Chemically synthesized
caagacauuccacuugcuaaa

SEQ ID NO: 1150 - RNA, 21 nt, Artificial
  Chemically synthesized
gaccuuaaucuuaauuacugc

SEQ ID NO: 1151 - RNA, 21 nt, Artificial
  Chemically synthesized
gauugcaaauguaguguauca

SEQ ID NO: 1152 - RNA, 21 nt, Artificial
  Chemically synthesized
caauagucuagagaagcauuu

SEQ ID NO: 1153 - RNA, 21 nt, Artificial
  Chemically synthesized
agcaguuaaccuucaagacau

SEQ ID NO: 1154 - RNA, 21 nt, Artificial
  Chemically synthesized
ggccaaccuuggcuaaaugga

SEQ ID NO: 1155 - RNA, 21 nt, Artificial
  Chemically synthesized
uggccgagaugauccuaaaaa

SEQ ID NO: 1156 - RNA, 21 nt, Artificial
  Chemically synthesized
ccaagacacaaacaugaccua

SEQ ID NO: 1157 - RNA, 21 nt, Artificial
  Chemically synthesized
uuggcuaaauggagcagcgaa

SEQ ID NO: 1158 - RNA, 21 nt, Artificial
  Chemically synthesized
cucauaauauggcauccuuca

SEQ ID NO: 1159 - RNA, 21 nt, Artificial
  Chemically synthesized
gcaugugucauccauauuucu

SEQ ID NO: 1160 - RNA, 21 nt, Artificial
  Chemically synthesized
accgaagaaagagaggaccaa

SEQ ID NO: 1161 - RNA, 21 nt, Artificial
  Chemically synthesized
ucauaauauggcauccuucaa

SEQ ID NO: 1162 - RNA, 21 nt, Artificial
  Chemically synthesized
cuucaaccucccacacuacag

SEQ ID NO: 1163 - RNA, 21 nt, Artificial
  Chemically synthesized
cagcccacugacagaccuuaa

SEQ ID NO: 1164 - RNA, 21 nt, Artificial
  Chemically synthesized
cuuuucuuugcaggaggagaa

SEQ ID NO: 1165 - RNA, 21 nt, Artificial
  Chemically synthesized
gccuguuuggacuuuguaauu

SEQ ID NO: 1166 - RNA, 21 nt, Artificial
  Chemically synthesized
gcaauuaugggaguaaacaau

SEQ ID NO: 1167 - RNA, 21 nt, Artificial
  Chemically synthesized
gcagucuuaagaaagagguaa

SEQ ID NO: 1168 - RNA, 21 nt, Artificial
  Chemically synthesized
ugaacagugugcccuagcuuu

SEQ ID NO: 1169 - RNA, 21 nt, Artificial
  Chemically synthesized
gagacuucugaacgagagcga

SEQ ID NO: 1170 - RNA, 21 nt, Artificial
  Chemically synthesized
ccagaacuccagcuccuacua

SEQ ID NO: 1171 - RNA, 21 nt, Artificial
  Chemically synthesized
ucaagacauuccacuugcuaa

SEQ ID NO: 1172 - RNA, 21 nt, Artificial
  Chemically synthesized
caacgagaaacuggacuuuuu

SEQ ID NO: 1173 - RNA, 21 nt, Artificial
  Chemically synthesized
aaaucucucugccuguuugga

SEQ ID NO: 1174 - RNA, 21 nt, Artificial
  Chemically synthesized
ggagaugaaaucuguucuggg

SEQ ID NO: 1175 - RNA, 21 nt, Artificial
  Chemically synthesized
gacacaaacaugaccuaucca

SEQ ID NO: 1176 - RNA, 21 nt, Artificial
  Chemically synthesized
uuaagaaagagguaaaaggca

SEQ ID NO: 1177 - RNA, 21 nt, Artificial
  Chemically synthesized
guggcuagagaguuugaggau

SEQ ID NO: 1178 - RNA, 21 nt, Artificial
  Chemically synthesized
aucuguucugggaauguuuca

SEQ ID NO: 1179 - RNA, 21 nt, Artificial
  Chemically synthesized
gugcccuagcuuuucuugcaa

SEQ ID NO: 1180 - RNA, 21 nt, Artificial
  Chemically synthesized
aaaucuguucugggaauguuu

SEQ ID NO: 1181 - RNA, 21 nt, Artificial
  Chemically synthesized
auggccgagaugauccuaaaa

SEQ ID NO: 1182 - RNA, 21 nt, Artificial
  Chemically synthesized
cagcgaaaucaacgagaaacu

SEQ ID NO: 1183 - RNA, 21 nt, Artificial
  Chemically synthesized
acaugaccuauccaagcgcau

SEQ ID NO: 1184 - RNA, 21 nt, Artificial
  Chemically synthesized
aaagagaggaccaaccagaau

SEQ ID NO: 1185 - RNA, 21 nt, Artificial
  Chemically synthesized
agagaaaaacaccuugagccu

SEQ ID NO: 1186 - RNA, 21 nt, Artificial
  Chemically synthesized
gagaguuugaggauugcuuuu

SEQ ID NO: 1187 - RNA, 21 nt, Artificial
  Chemically synthesized
gcauccuucaauuucuguaua

SEQ ID NO: 1188 - RNA, 21 nt, Artificial
  Chemically synthesized
agagauugcaaauguagugua

SEQ ID NO: 1189 - RNA, 21 nt, Artificial
  Chemically synthesized
agaaggaccacccggauuaca

SEQ ID NO: 1190 - RNA, 21 nt, Artificial
  Chemically synthesized
uacccaaauuuccaagacaca

SEQ ID NO: 1191 - RNA, 21 nt, Artificial
  Chemically synthesized
guacagauuugcuuucucuua

SEQ ID NO: 1192 - RNA, 21 nt, Artificial
  Chemically synthesized
aggcaacucguacccaaauuu

SEQ ID NO: 1193 - RNA, 21 nt, Artificial
  Chemically synthesized
acuuaagaaaccuggcauuua

SEQ ID NO: 1194 - RNA, 21 nt, Artificial
  Chemically synthesized
agcguggaggaugauggagaa

SEQ ID NO: 1195 - RNA, 21 nt, Artificial
  Chemically synthesized
cuguguaugauucauuaccau

SEQ ID NO: 1196 - RNA, 21 nt, Artificial
  Chemically synthesized
guaaaagcuuugguuuguguu

SEQ ID NO: 1197 - RNA, 21 nt, Artificial
  Chemically synthesized
gcuuuucuugcaaccagagua

SEQ ID NO: 1198 - RNA, 21 nt, Artificial
  Chemically synthesized
ccauauuucucuacaucuucu

SEQ ID NO: 1199 - RNA, 21 nt, Artificial
  Chemically synthesized
ccuuuuuguccaucccuuuuu

SEQ ID NO: 1200 - RNA, 21 nt, Artificial
  Chemically synthesized
gaggaugauggagaaucgugu

SEQ ID NO: 1201 - RNA, 21 nt, Artificial
  Chemically synthesized
uaaaacggugcugcugggaaa

SEQ ID NO: 1202 - RNA, 21 nt, Artificial
  Chemically synthesized
acuuuuuaaacccucuucaga

SEQ ID NO: 1203 - RNA, 21 nt, Artificial
  Chemically synthesized
caacgaguuugaccaguaccu

SEQ ID NO: 1204 - RNA, 21 nt, Artificial
  Chemically synthesized
ccucuacuccaccuucaccua

SEQ ID NO: 1205 - RNA, 21 nt, Artificial
  Chemically synthesized
ucucagaacaccagcaguuaa

SEQ ID NO: 1206 - RNA, 21 nt, Artificial
  Chemically synthesized
acaagaaggaccacccggauu

SEQ ID NO: 1207 - RNA, 21 nt, Artificial
  Chemically synthesized
aaaggcaacucguacccaaau

SEQ ID NO: 1208 - RNA, 21 nt, Artificial
  Chemically synthesized
agaccuucgaugucaacgagu

SEQ ID NO: 1209 - RNA, 21 nt, Artificial
  Chemically synthesized
uggcauccuucaauuucugua

SEQ ID NO: 1210 - RNA, 21 nt, Artificial
  Chemically synthesized
aggguauggucaucuguuguu

SEQ ID NO: 1211 - RNA, 21 nt, Artificial
  Chemically synthesized
ugggaaacauuugcacucuuu

SEQ ID NO: 1212 - RNA, 21 nt, Artificial
  Chemically synthesized
acaaaaacaaugcaagcaugu

SEQ ID NO: 1213 - RNA, 21 nt, Artificial
  Chemically synthesized
ccuguuuggacuuuguaauua

SEQ ID NO: 1214 - RNA, 21 nt, Artificial
  Chemically synthesized
aagagaggaccaaccagaauu

SEQ ID NO: 1215 - RNA, 21 nt, Artificial
  Chemically synthesized
accuuuuguucucuccgugaa

SEQ ID NO: 1216 - RNA, 21 nt, Artificial
  Chemically synthesized
cauaauauggcauccuucaau

SEQ ID NO: 1217 - RNA, 21 nt, Artificial
  Chemically synthesized
acgucaucuccaacaucgaga

SEQ ID NO: 1218 - RNA, 21 nt, Artificial
  Chemically synthesized
aaaacaccuugagccuuaaaa

SEQ ID NO: 1219 - RNA, 21 nt, Artificial
  Chemically synthesized
gacuucugaacgagagcgaga

SEQ ID NO: 1220 - RNA, 21 nt, Artificial
  Chemically synthesized
cuccgugaaacuuaccuuucc

SEQ ID NO: 1221 - RNA, 21 nt, Artificial
  Chemically synthesized
gacauuccacuugcuaaaauu

SEQ ID NO: 1222 - RNA, 21 nt, Artificial
  Chemically synthesized
gguuaacuuugcuuaauuccu

SEQ ID NO: 1223 - RNA, 21 nt, Artificial
  Chemically synthesized
guauaaaugccuuuuugucca

SEQ ID NO: 1224 - RNA, 21 nt, Artificial
  Chemically synthesized
uuaaaacggugcugcugggaa

SEQ ID NO: 1225 - RNA, 21 nt, Artificial
  Chemically synthesized
aagacauuccacuugcuaaaa

SEQ ID NO: 1226 - RNA, 21 nt, Artificial
  Chemically synthesized
aaccgaagaaagagaggacca

SEQ ID NO: 1227 - RNA, 21 nt, Artificial
  Chemically synthesized
gcgaaaucaacgagaaacugg

SEQ ID NO: 1228 - RNA, 21 nt, Artificial
  Chemically synthesized
uccucacccuagauuuguaua

SEQ ID NO: 1229 - RNA, 21 nt, Artificial
  Chemically synthesized
gaagaaagagaggaccaacca

SEQ ID NO: 1230 - RNA, 21 nt, Artificial
  Chemically synthesized
uguacagauuugcuuucucuu

SEQ ID NO: 1231 - RNA, 21 nt, Artificial
  Chemically synthesized
gguaaaaggcaagcaaaggag

SEQ ID NO: 1232 - RNA, 21 nt, Artificial
  Chemically synthesized
uuaaggaggagcugccuuaaa

SEQ ID NO: 1233 - RNA, 21 nt, Artificial
  Chemically synthesized
cuucuucuucuucuuccuuaa

SEQ ID NO: 1234 - RNA, 21 nt, Artificial
  Chemically synthesized
ccacugacagaccuuaaucuu

SEQ ID NO: 1235 - RNA, 21 nt, Artificial
  Chemically synthesized
ccaacagcuaaacuacucuua

SEQ ID NO: 1236 - RNA, 21 nt, Artificial
  Chemically synthesized
ucugccuguuuggacuuugua

SEQ ID NO: 1237 - RNA, 21 nt, Artificial
  Chemically synthesized
ugcuguggcuagagaguuuga

SEQ ID NO: 1238 - RNA, 21 nt, Artificial
  Chemically synthesized
agcuaaacuacucuuaguuga

SEQ ID NO: 1239 - RNA, 21 nt, Artificial
  Chemically synthesized
gcaacucguacccaaauuucc

SEQ ID NO: 1240 - RNA, 21 nt, Artificial
  Chemically synthesized
aaccuuuuguucucuccguga

SEQ ID NO: 1241 - RNA, 21 nt, Artificial
  Chemically synthesized
cucuuauuuuuccaacagcua

SEQ ID NO: 1242 - RNA, 21 nt, Artificial
  Chemically synthesized
cccacugacagaccuuaaucu

SEQ ID NO: 1243 - RNA, 21 nt, Artificial
  Chemically synthesized
cucguacccaaauuuccaaga

SEQ ID NO: 1244 - RNA, 21 nt, Artificial
  Chemically synthesized
ggaccacccggauuacaagua

SEQ ID NO: 1245 - RNA, 21 nt, Artificial
  Chemically synthesized
cuuaaaacggugcugcuggga

SEQ ID NO: 1246 - RNA, 21 nt, Artificial
  Chemically synthesized
agcuuugguuuguguucgugu

SEQ ID NO: 1247 - RNA, 21 nt, Artificial
  Chemically synthesized
ggugcugcugggaaacauuug

SEQ ID NO: 1248 - RNA, 21 nt, Artificial
  Chemically synthesized
guuucacuuguuucccuccca

SEQ ID NO: 1249 - RNA, 21 nt, Artificial
  Chemically synthesized
aacgagaaacuggacuuuuua

SEQ ID NO: 1250 - RNA, 21 nt, Artificial
  Chemically synthesized
gaaaccuggcauuuaaaucau

SEQ ID NO: 1251 - RNA, 21 nt, Artificial
  Chemically synthesized
aaucgugugaucagugugcua

SEQ ID NO: 1252 - RNA, 21 nt, Artificial
  Chemically synthesized
aaacuuuucuuugcaggagga

SEQ ID NO: 1253 - RNA, 21 nt, Artificial
  Chemically synthesized
aaugcaagcaugugucaucca

SEQ ID NO: 1254 - RNA, 21 nt, Artificial
  Chemically synthesized
cuaaauggagcagcgaaauca

SEQ ID NO: 1255 - RNA, 21 nt, Artificial
  Chemically synthesized
gagaugaaaucuguucuggga

SEQ ID NO: 1256 - RNA, 21 nt, Artificial
  Chemically synthesized
ugcaguguuuucugccacaga

SEQ ID NO: 1257 - RNA, 21 nt, Artificial
  Chemically synthesized
cuuugguuuguguucguguuu

SEQ ID NO: 1258 - RNA, 21 nt, Artificial
  Chemically synthesized
aaauguaguguaucacugagu

SEQ ID NO: 1259 - RNA, 21 nt, Artificial
  Chemically synthesized
acagugugcccuagcuuuucu

SEQ ID NO: 1260 - RNA, 21 nt, Artificial
  Chemically synthesized
gccuuuuuguccaucccuuuu

SEQ ID NO: 1261 - RNA, 21 nt, Artificial
  Chemically synthesized
agaacuccagcuccuacuaca

SEQ ID NO: 1262 - RNA, 21 nt, Artificial
  Chemically synthesized
aaauggagcagcgaaaucaac

SEQ ID NO: 1263 - RNA, 21 nt, Artificial
  Chemically synthesized
cacucauaauauggcauccuu

SEQ ID NO: 1264 - RNA, 21 nt, Artificial
  Chemically synthesized
cagaauuguguuaugugauca

SEQ ID NO: 1265 - RNA, 21 nt, Artificial
  Chemically synthesized
ggcuaaauggagcagcgaaau

SEQ ID NO: 1266 - RNA, 21 nt, Artificial
  Chemically synthesized
cuuggcuaaauggagcagcga

SEQ ID NO: 1267 - RNA, 21 nt, Artificial
  Chemically synthesized
ucuacuccaccuucaccuaca

SEQ ID NO: 1268 - RNA, 21 nt, Artificial
  Chemically synthesized
ugcaagcaugugucauccaua

SEQ ID NO: 1269 - RNA, 21 nt, Artificial
  Chemically synthesized
gagaaaaacaccuugagccuu

SEQ ID NO: 1270 - RNA, 21 nt, Artificial
  Chemically synthesized
ugcagucuuaagaaagaggua

SEQ ID NO: 1271 - RNA, 21 nt, Artificial
  Chemically synthesized
caugaagaugaccgacgagca

SEQ ID NO: 1272 - RNA, 21 nt, Artificial
  Chemically synthesized
ccaggccaaccuuggcuaaau

SEQ ID NO: 1273 - RNA, 21 nt, Artificial
  Chemically synthesized
ugucaacgaguuugaccagua

SEQ ID NO: 1274 - RNA, 21 nt, Artificial
  Chemically synthesized
gcaagcaugugucauccauau

SEQ ID NO: 1275 - RNA, 21 nt, Artificial
  Chemically synthesized
cugagucauuugcaguguuuu

SEQ ID NO: 1276 - RNA, 21 nt, Artificial
  Chemically synthesized
uaaaaggcaagcaaaggagau

SEQ ID NO: 1277 - RNA, 21 nt, Artificial
  Chemically synthesized
guaacuuaagaaaccuggcau

SEQ ID NO: 1278 - RNA, 21 nt, Artificial
  Chemically synthesized
ucaggcuuugcgauuuaagga

SEQ ID NO: 1279 - RNA, 21 nt, Artificial
  Chemically synthesized
aaagcacucauaauauggcau

SEQ ID NO: 1280 - RNA, 21 nt, Artificial
  Chemically synthesized
agcucgaaacugacuggaaac

SEQ ID NO: 1281 - RNA, 21 nt, Artificial
  Chemically synthesized
ggguuaacuuugcuuaauucc

SEQ ID NO: 1282 - RNA, 21 nt, Artificial
  Chemically synthesized
cagcaguuaaccuucaagaca

SEQ ID NO: 1283 - RNA, 21 nt, Artificial
  Chemically synthesized
ccaaauuuccaagacacaaac

SEQ ID NO: 1284 - RNA, 21 nt, Artificial
  Chemically synthesized
caggcuuugcgauuuaaggag

SEQ ID NO: 1285 - RNA, 21 nt, Artificial
  Chemically synthesized
ccucaaaggguauggucaucu

SEQ ID NO: 1286 - RNA, 21 nt, Artificial
  Chemically synthesized
cucuccgugaaacuuaccuuu

SEQ ID NO: 1287 - RNA, 21 nt, Artificial
  Chemically synthesized
auggcauccuucaauuucugu

SEQ ID NO: 1288 - RNA, 21 nt, Artificial
  Chemically synthesized
acaguuuuagaagucaguaga

SEQ ID NO: 1289 - RNA, 21 nt, Artificial
  Chemically synthesized
gugucauccauauuucucuac

SEQ ID NO: 1290 - RNA, 21 nt, Artificial
  Chemically synthesized
ggacuuuuuaaacccucuuca

SEQ ID NO: 1291 - RNA, 21 nt, Artificial
  Chemically synthesized
guguuuucugccacagaccuu

SEQ ID NO: 1292 - RNA, 21 nt, Artificial
  Chemically synthesized
acaauagucuagagaagcauu

SEQ ID NO: 1293 - RNA, 21 nt, Artificial
  Chemically synthesized
cacugagucauuugcaguguu

SEQ ID NO: 1294 - RNA, 21 nt, Artificial
  Chemically synthesized
gaugauggagaaucgugugau

SEQ ID NO: 1295 - RNA, 21 nt, Artificial
  Chemically synthesized
gagccuuaaaacggugcugcu

SEQ ID NO: 1296 - RNA, 21 nt, Artificial
  Chemically synthesized
uguggcuagagaguuugagga

SEQ ID NO: 1297 - RNA, 21 nt, Artificial
  Chemically synthesized
gaaacauuugcacucuuuuag

SEQ ID NO: 1298 - RNA, 21 nt, Artificial
  Chemically synthesized
ugccuuuuuguccaucccuuu

SEQ ID NO: 1299 - RNA, 21 nt, Artificial
  Chemically synthesized
aaugagagauugcaaauguag

SEQ ID NO: 1300 - RNA, 21 nt, Artificial
  Chemically synthesized
acggugcugcugggaaacauu

SEQ ID NO: 1301 - RNA, 21 nt, Artificial
  Chemically synthesized
cguggaggaugauggagaauc

SEQ ID NO: 1302 - RNA, 21 nt, Artificial
  Chemically synthesized
aagacauuuaagcuaaaggca

SEQ ID NO: 1303 - RNA, 21 nt, Artificial
  Chemically synthesized
aaagagguaaaaggcaagcaa

SEQ ID NO: 1304 - RNA, 21 nt, Artificial
  Chemically synthesized
ucucucugccuguuuggacuu

SEQ ID NO: 1305 - RNA, 21 nt, Artificial
  Chemically synthesized
ggccuuauuuugcaauuaugg

SEQ ID NO: 1306 - RNA, 21 nt, Artificial
  Chemically synthesized
ggcuagagaguuugaggauug

SEQ ID NO: 1307 - RNA, 21 nt, Artificial
  Chemically synthesized
uuaagcuaaaggcaacucgua

SEQ ID NO: 1308 - RNA, 21 nt, Artificial
  Chemically synthesized
gaaacugacuggaaacuucag

SEQ ID NO: 1309 - RNA, 21 nt, Artificial
  Chemically synthesized
agaauuguguuaugugaucag

SEQ ID NO: 1310 - RNA, 21 nt, Artificial
  Chemically synthesized
gcucgaaacugacuggaaacu

SEQ ID NO: 1311 - RNA, 21 nt, Artificial
  Chemically synthesized
guugaacagugugcccuagcu

SEQ ID NO: 1312 - RNA, 21 nt, Artificial
  Chemically synthesized
ccucucagaacaccagcaguu

SEQ ID NO: 1313 - RNA, 21 nt, Artificial
  Chemically synthesized
caauaagugcccgagcacacu

SEQ ID NO: 1314 - RNA, 21 nt, Artificial
  Chemically synthesized
gaacaacccgucuacacacag

SEQ ID NO: 1315 - RNA, 21 nt, Artificial
  Chemically synthesized
uggaggaugauggagaaucgu

SEQ ID NO: 1316 - RNA, 21 nt, Artificial
  Chemically synthesized
aaagcuuugguuuguguucgu

SEQ ID NO: 1317 - RNA, 21 nt, Artificial
  Chemically synthesized
ccaagcgcauuacccacuugu

SEQ ID NO: 1318 - RNA, 21 nt, Artificial
  Chemically synthesized
acccaaauuuccaagacacaa

SEQ ID NO: 1319 - RNA, 21 nt, Artificial
  Chemically synthesized
gucuacacacagcucacucga

SEQ ID NO: 1320 - RNA, 21 nt, Artificial
  Chemically synthesized
ccacccggauuacaaguacca

SEQ ID NO: 1321 - RNA, 21 nt, Artificial
  Chemically synthesized
gaagagaaaaacaccuugagc

SEQ ID NO: 1322 - RNA, 21 nt, Artificial
  Chemically synthesized
acacaaaaacaaugcaagcau

SEQ ID NO: 1323 - RNA, 21 nt, Artificial
  Chemically synthesized
cgagaccuucgaugucaacga

SEQ ID NO: 1324 - RNA, 21 nt, Artificial
  Chemically synthesized
auguaguguaucacugaguca

SEQ ID NO: 1325 - RNA, 21 nt, Artificial
  Chemically synthesized
uuugcaguguuuucugccaca

SEQ ID NO: 1326 - RNA, 21 nt, Artificial
  Chemically synthesized
ggcaacucguacccaaauuuc

SEQ ID NO: 1327 - RNA, 21 nt, Artificial
  Chemically synthesized
uuuaaacccucuucagagcaa

SEQ ID NO: 1328 - RNA, 21 nt, Artificial
  Chemically synthesized
gcucuggagacuucugaacga

SEQ ID NO: 1329 - RNA, 21 nt, Artificial
  Chemically synthesized
gaagcauuugguaagcuuuau

SEQ ID NO: 1330 - RNA, 21 nt, Artificial
  Chemically synthesized
auuuccaagacacaaacauga

SEQ ID NO: 1331 - RNA, 21 nt, Artificial
  Chemically synthesized
ggaguaaacaauagucuagag

SEQ ID NO: 1332 - RNA, 21 nt, Artificial
  Chemically synthesized
agagaagcauuugguaagcuu

SEQ ID NO: 1333 - RNA, 21 nt, Artificial
  Chemically synthesized
agugcauuuccuccugccuuu

SEQ ID NO: 1334 - RNA, 21 nt, Artificial
  Chemically synthesized
aauuacugcuguggcuagaga

SEQ ID NO: 1335 - RNA, 21 nt, Artificial
  Chemically synthesized
uccgugaaacuuaccuuuccc

SEQ ID NO: 1336 - RNA, 21 nt, Artificial
  Chemically synthesized
cucucugccuguuuggacuuu

SEQ ID NO: 1337 - RNA, 21 nt, Artificial
  Chemically synthesized
aggugcucaaaggcuacgacu

SEQ ID NO: 1338 - RNA, 21 nt, Artificial
  Chemically synthesized
auuccucacccuagauuugua

SEQ ID NO: 1339 - RNA, 21 nt, Artificial
  Chemically synthesized
agcccacugacagaccuuaau

SEQ ID NO: 1340 - RNA, 21 nt, Artificial
  Chemically synthesized
agguuguuggagcuuuccuca

SEQ ID NO: 1341 - RNA, 21 nt, Artificial
  Chemically synthesized
uaaccuucaagacauuccacu

SEQ ID NO: 1342 - RNA, 21 nt, Artificial
  Chemically synthesized
acuucugaacgagagcgagaa

SEQ ID NO: 1343 - RNA, 21 nt, Artificial
  Chemically synthesized
gaaagagguaaaaggcaagca

SEQ ID NO: 1344 - RNA, 21 nt, Artificial
  Chemically synthesized
augggaguaaacaauagucua

SEQ ID NO: 1345 - RNA, 21 nt, Artificial
  Chemically synthesized
cuuguucacugcagucuuaag

SEQ ID NO: 1346 - RNA, 21 nt, Artificial
  Chemically synthesized
cgugugaucagugugcuaaau

SEQ ID NO: 1347 - RNA, 21 nt, Artificial
  Chemically synthesized
ucuuaauuacugcuguggcua

SEQ ID NO: 1348 - RNA, 21 nt, Artificial
  Chemically synthesized
gauuuaaggaggagcugccuu

SEQ ID NO: 1349 - RNA, 21 nt, Artificial
  Chemically synthesized
acacagcucacucgaccuuga

SEQ ID NO: 1350 - RNA, 21 nt, Artificial
  Chemically synthesized
caguguuuucugccacagacc

SEQ ID NO: 1351 - RNA, 21 nt, Artificial
  Chemically synthesized
aggccaaccuuggcuaaaugg

SEQ ID NO: 1352 - RNA, 21 nt, Artificial
  Chemically synthesized
cgauuuaaggaggagcugccu

SEQ ID NO: 1353 - RNA, 21 nt, Artificial
  Chemically synthesized
agcccgaucugaagaaggaga

SEQ ID NO: 1354 - RNA, 21 nt, Artificial
  Chemically synthesized
aaacaaugcaagcauguguca

SEQ ID NO: 1355 - RNA, 21 nt, Artificial
  Chemically synthesized
cccggaaacuuuucuuugcag

SEQ ID NO: 1356 - RNA, 21 nt, Artificial
  Chemically synthesized
ugccuuugcuuguucacugca

SEQ ID NO: 1357 - RNA, 21 nt, Artificial
  Chemically synthesized
uucuuuguauuccucacccua

SEQ ID NO: 1358 - RNA, 21 nt, Artificial
  Chemically synthesized
cuacuccaccuucaccuacau

SEQ ID NO: 1359 - RNA, 21 nt, Artificial
  Chemically synthesized
guuuguguucguguuuuguuu

SEQ ID NO: 1360 - RNA, 21 nt, Artificial
  Chemically synthesized
gaccuuugggcugccuuauau

SEQ ID NO: 1361 - RNA, 21 nt, Artificial
  Chemically synthesized
gacauuuaagcuaaaggcaac

SEQ ID NO: 1362 - RNA, 21 nt, Artificial
  Chemically synthesized
aaaucaacgagaaacuggacu

SEQ ID NO: 1363 - RNA, 21 nt, Artificial
  Chemically synthesized
acuccaccuucaccuacauga

SEQ ID NO: 1364 - RNA, 21 nt, Artificial
  Chemically synthesized
cguguuuuguuuguuucacuu

SEQ ID NO: 1365 - RNA, 21 nt, Artificial
  Chemically synthesized
uuguucucuccgugaaacuua

SEQ ID NO: 1366 - RNA, 21 nt, Artificial
  Chemically synthesized
auuuaaggaggagcugccuua

SEQ ID NO: 1367 - RNA, 21 nt, Artificial
  Chemically synthesized
ccuugagccuuaaaacggugc

SEQ ID NO: 1368 - RNA, 21 nt, Artificial
  Chemically synthesized
ucuucuucuuccuuaaagaca

SEQ ID NO: 1369 - RNA, 21 nt, Artificial
  Chemically synthesized
uggagaaucgugugaucagug

SEQ ID NO: 1370 - RNA, 21 nt, Artificial
  Chemically synthesized
gugugcuaaaucucucugccu

SEQ ID NO: 1371 - RNA, 21 nt, Artificial
  Chemically synthesized
ucuagagaagcauuugguaag

SEQ ID NO: 1372 - RNA, 21 nt, Artificial
  Chemically synthesized
ugggaacaacccgucuacaca

SEQ ID NO: 1373 - RNA, 21 nt, Artificial
  Chemically synthesized
gaagauggccgagaugauccu

SEQ ID NO: 1374 - RNA, 21 nt, Artificial
  Chemically synthesized
uguugaaaacaaacuggaaac

SEQ ID NO: 1375 - RNA, 21 nt, Artificial
  Chemically synthesized
guaguguaucacugagucauu

SEQ ID NO: 1376 - RNA, 21 nt, Artificial
  Chemically synthesized
agcaaaggagaugaaaucugu

SEQ ID NO: 1377 - RNA, 21 nt, Artificial
  Chemically synthesized
gcagcgaaaucaacgagaaac

SEQ ID NO: 1378 - RNA, 21 nt, Artificial
  Chemically synthesized
cucucagaacaccagcaguua

SEQ ID NO: 1379 - RNA, 21 nt, Artificial
  Chemically synthesized
uuuguauuccucacccuagau

SEQ ID NO: 1380 - RNA, 21 nt, Artificial
  Chemically synthesized
gagauugcaaauguaguguau

SEQ ID NO: 1381 - RNA, 21 nt, Artificial
  Chemically synthesized
cacccuagauuuguauaaaug

SEQ ID NO: 1382 - RNA, 21 nt, Artificial
  Chemically synthesized
guaucacugagucauuugcag

SEQ ID NO: 1383 - RNA, 21 nt, Artificial
  Chemically synthesized
uagagaguuugaggauugcuu

SEQ ID NO: 1384 - RNA, 21 nt, Artificial
  Chemically synthesized
acucguacccaaauuuccaag

SEQ ID NO: 1385 - RNA, 21 nt, Artificial
  Chemically synthesized
guacuguguaugauucauuac

SEQ ID NO: 1386 - RNA, 21 nt, Artificial
  Chemically synthesized
aacaauagucuagagaagcau

SEQ ID NO: 1387 - RNA, 21 nt, Artificial
  Chemically synthesized
agaaaccuggcauuuaaauca

SEQ ID NO: 1388 - RNA, 21 nt, Artificial
  Chemically synthesized
gcaagcaaaggagaugaaauc

SEQ ID NO: 1389 - RNA, 21 nt, Artificial
  Chemically synthesized
augcaagcaugugucauccau

SEQ ID NO: 1390 - RNA, 21 nt, Artificial
  Chemically synthesized
ucuugcaaccagaguauuuuu

SEQ ID NO: 1391 - RNA, 21 nt, Artificial
  Chemically synthesized
gcaaccagaguauuuuuguac

SEQ ID NO: 1392 - RNA, 21 nt, Artificial
  Chemically synthesized
uucucuacaucuucucuugga

SEQ ID NO: 1393 - RNA, 21 nt, Artificial
  Chemically synthesized
ucugaagaaggagagcgagga

SEQ ID NO: 1394 - RNA, 21 nt, Artificial
  Chemically synthesized
caagcaaaggagaugaaaucu

SEQ ID NO: 1395 - RNA, 21 nt, Artificial
  Chemically synthesized
cuacaucuucucuuggaguga

SEQ ID NO: 1396 - RNA, 21 nt, Artificial
  Chemically synthesized
aaagaaaaaaguccucuguga

SEQ ID NO: 1397 - RNA, 21 nt, Artificial
  Chemically synthesized
acuuuucuuugcaggaggaga

SEQ ID NO: 1398 - RNA, 21 nt, Artificial
  Chemically synthesized
cucagaacaccagcaguuaac

SEQ ID NO: 1399 - RNA, 21 nt, Artificial
  Chemically synthesized
ugucauccauauuucucuaca

SEQ ID NO: 1400 - RNA, 21 nt, Artificial
  Chemically synthesized
gacuuuuuaaacccucuucag

SEQ ID NO: 1401 - RNA, 21 nt, Artificial
  Chemically synthesized
uuucuuugcaggaggagaaga

SEQ ID NO: 1402 - RNA, 21 nt, Artificial
  Chemically synthesized
cugggaauguuucagcagcca

SEQ ID NO: 1403 - RNA, 21 nt, Artificial
  Chemically synthesized
accagaacuccagcuccuacu

SEQ ID NO: 1404 - RNA, 21 nt, Artificial
  Chemically synthesized
cuucaagacauuccacuugcu

SEQ ID NO: 1405 - RNA, 21 nt, Artificial
  Chemically synthesized
gcaaguuucuuuguauuccuc

SEQ ID NO: 1406 - RNA, 21 nt, Artificial
  Chemically synthesized
gacacaaaaacaaugcaagca

SEQ ID NO: 1407 - RNA, 21 nt, Artificial
  Chemically synthesized
gugugaucagugugcuaaauc

SEQ ID NO: 1408 - RNA, 21 nt, Artificial
  Chemically synthesized
aagaaagagguaaaaggcaag

SEQ ID NO: 1409 - RNA, 21 nt, Artificial
  Chemically synthesized
gaaacuuuucuuugcaggagg

SEQ ID NO: 1410 - RNA, 21 nt, Artificial
  Chemically synthesized
cuaaaucucucugccuguuug

SEQ ID NO: 1411 - RNA, 21 nt, Artificial
  Chemically synthesized
ccgaagaaagagaggaccaac

SEQ ID NO: 1412 - RNA, 21 nt, Artificial
  Chemically synthesized
auggagcagcgaaaucaacga

SEQ ID NO: 1413 - RNA, 21 nt, Artificial
  Chemically synthesized
aauggagcagcgaaaucaacg

SEQ ID NO: 1414 - RNA, 21 nt, Artificial
  Chemically synthesized
accagcaguuaaccuucaaga

SEQ ID NO: 1415 - RNA, 21 nt, Artificial
  Chemically synthesized
aaacaauagucuagagaagca

SEQ ID NO: 1416 - RNA, 21 nt, Artificial
  Chemically synthesized
gagaagcauuugguaagcuuu

SEQ ID NO: 1417 - RNA, 21 nt, Artificial
  Chemically synthesized
aauguuucagcagccaauaag

SEQ ID NO: 1418 - RNA, 21 nt, Artificial
  Chemically synthesized
caccagcaguuaaccuucaag

SEQ ID NO: 1419 - RNA, 21 nt, Artificial
  Chemically synthesized
acuacaccgaccaccagaacu

SEQ ID NO: 1420 - RNA, 21 nt, Artificial
  Chemically synthesized
cauuuccuccugccuuugcuu

SEQ ID NO: 1421 - RNA, 21 nt, Artificial
  Chemically synthesized
ugaucagugugcuaaaucucu

SEQ ID NO: 1422 - RNA, 21 nt, Artificial
  Chemically synthesized
ccaugaacgccuucauggugu

SEQ ID NO: 1423 - RNA, 21 nt, Artificial
  Chemically synthesized
uugaacagugugcccuagcuu

SEQ ID NO: 1424 - RNA, 21 nt, Artificial
  Chemically synthesized
ccuauccaagcgcauuaccca

SEQ ID NO: 1425 - RNA, 21 nt, Artificial
  Chemically synthesized
guguuuuguuuguuucacuug

SEQ ID NO: 1426 - RNA, 21 nt, Artificial
  Chemically synthesized
guuuguuucacuuguuucccu

SEQ ID NO: 1427 - RNA, 21 nt, Artificial
  Chemically synthesized
ccuuugcuuguucacugcagu

SEQ ID NO: 1428 - RNA, 21 nt, Artificial
  Chemically synthesized
caguuaaccuucaagacauuc

SEQ ID NO: 1429 - RNA, 21 nt, Artificial
  Chemically synthesized
uggagcuuuccucaaagggua

SEQ ID NO: 1430 - RNA, 21 nt, Artificial
  Chemically synthesized
guacccaaauuuccaagacac

SEQ ID NO: 1431 - RNA, 21 nt, Artificial
  Chemically synthesized
aaguccucugugaggaauauu

SEQ ID NO: 1432 - RNA, 21 nt, Artificial
  Chemically synthesized
cuuaauuacugcuguggcuag

SEQ ID NO: 1433 - RNA, 21 nt, Artificial
  Chemically synthesized
guguucguguuuuguuuguuu

SEQ ID NO: 1434 - RNA, 21 nt, Artificial
  Chemically synthesized
cagcgacgucaucuccaacau

SEQ ID NO: 1435 - RNA, 21 nt, Artificial
  Chemically synthesized
gagucauuugcaguguuuucu

SEQ ID NO: 1436 - RNA, 21 nt, Artificial
  Chemically synthesized
caaaggagaugaaaucuguuc

SEQ ID NO: 1437 - RNA, 21 nt, Artificial
  Chemically synthesized
cauuugcaguguuuucugcca

SEQ ID NO: 1438 - RNA, 21 nt, Artificial
  Chemically synthesized
acugggaacaacccgucuaca

SEQ ID NO: 1439 - RNA, 21 nt, Artificial
  Chemically synthesized
gcuuugguuuguguucguguu

SEQ ID NO: 1440 - RNA, 21 nt, Artificial
  Chemically synthesized
ucaacggcuccagcaagaaca

SEQ ID NO: 1441 - RNA, 21 nt, Artificial
  Chemically synthesized
uguaguguaucacugagucau

SEQ ID NO: 1442 - RNA, 21 nt, Artificial
  Chemically synthesized
ccaacaucgagaccuucgaug

SEQ ID NO: 1443 - RNA, 21 nt, Artificial
  Chemically synthesized
uugacacaaaaacaaugcaag

SEQ ID NO: 1444 - RNA, 21 nt, Artificial
  Chemically synthesized
cuccaacaucgagaccuucga

SEQ ID NO: 1445 - RNA, 21 nt, Artificial
  Chemically synthesized
cucacaguacgacuacaccga

SEQ ID NO: 1446 - RNA, 21 nt, Artificial
  Chemically synthesized
acaguacgacuacaccgacca

SEQ ID NO: 1447 - RNA, 21 nt, Artificial
  Chemically synthesized
aauuccucaggcuuugcgauu

SEQ ID NO: 1448 - RNA, 21 nt, Artificial
  Chemically synthesized
uaaaucucucugccuguuugg

SEQ ID NO: 1449 - RNA, 21 nt, Artificial
  Chemically synthesized
cuggacuuuuuaaacccucuu

SEQ ID NO: 1450 - RNA, 21 nt, Artificial
  Chemically synthesized
aagaaagagaggaccaaccag

SEQ ID NO: 1451 - RNA, 21 nt, Artificial
  Chemically synthesized
aaacggugcugcugggaaaca

SEQ ID NO: 1452 - RNA, 21 nt, Artificial
  Chemically synthesized
gaccuucgaugucaacgaguu

SEQ ID NO: 1453 - RNA, 21 nt, Artificial
  Chemically synthesized
caucccuuuuuucuuuguugu

SEQ ID NO: 1454 - RNA, 21 nt, Artificial
  Chemically synthesized
aagagaaaaacaccuugagcc

SEQ ID NO: 1455 - RNA, 21 nt, Artificial
  Chemically synthesized
augagagauugcaaauguagu

SEQ ID NO: 1456 - RNA, 21 nt, Artificial
  Chemically synthesized
ugauggagaaucgugugauca

SEQ ID NO: 1457 - RNA, 21 nt, Artificial
  Chemically synthesized
acagaccuuugggcugccuua

SEQ ID NO: 1458 - RNA, 21 nt, Artificial
  Chemically synthesized
uuugcaauuaugggaguaaac

SEQ ID NO: 1459 - RNA, 21 nt, Artificial
  Chemically synthesized
uguaucacugagucauuugca

SEQ ID NO: 1460 - RNA, 21 nt, Artificial
  Chemically synthesized
cgaagaaagagaggaccaacc

SEQ ID NO: 1461 - RNA, 21 nt, Artificial
  Chemically synthesized
acuggacuuuuuaaacccucu

SEQ ID NO: 1462 - RNA, 21 nt, Artificial
  Chemically synthesized
ugcuuguucacugcagucuua

SEQ ID NO: 1463 - RNA, 21 nt, Artificial
  Chemically synthesized
ucuuugcaggaggagaagaga

SEQ ID NO: 1464 - RNA, 21 nt, Artificial
  Chemically synthesized
gcuaaaggcaacucguaccca

SEQ ID NO: 1465 - RNA, 21 nt, Artificial
  Chemically synthesized
uguaacuuaagaaaccuggca

SEQ ID NO: 1466 - RNA, 21 nt, Artificial
  Chemically synthesized
guccaucccuuuuuucuuugu

SEQ ID NO: 1467 - RNA, 21 nt, Artificial
  Chemically synthesized
uuugcaggaggagaagagaag

SEQ ID NO: 1468 - RNA, 21 nt, Artificial
  Chemically synthesized
agcaaguuucuuuguauuccu

SEQ ID NO: 1469 - RNA, 21 nt, Artificial
  Chemically synthesized
cuuaaagcacucauaauaugg

SEQ ID NO: 1470 - RNA, 21 nt, Artificial
  Chemically synthesized
acugcuguggcuagagaguuu

SEQ ID NO: 1471 - RNA, 21 nt, Artificial
  Chemically synthesized
uuguauuccucacccuagauu

SEQ ID NO: 1472 - RNA, 21 nt, Artificial
  Chemically synthesized
ugcucaaaggcuacgacugga

SEQ ID NO: 1473 - RNA, 21 nt, Artificial
  Chemically synthesized
aagcaugugucauccauauuu

SEQ ID NO: 1474 - RNA, 21 nt, Artificial
  Chemically synthesized
cauauuucucuacaucuucuc

SEQ ID NO: 1475 - RNA, 21 nt, Artificial
  Chemically synthesized
ugcaaccagaguauuuuugua

SEQ ID NO: 1476 - RNA, 21 nt, Artificial
  Chemically synthesized
ccagcaguuaaccuucaagac

SEQ ID NO: 1477 - RNA, 21 nt, Artificial
  Chemically synthesized
cuggagacuucugaacgagag

SEQ ID NO: 1478 - RNA, 21 nt, Artificial
  Chemically synthesized
aagaacaagccgcacgucaag

SEQ ID NO: 1479 - RNA, 21 nt, Artificial
  Chemically synthesized
auuacugcuguggcuagagag

SEQ ID NO: 1480 - RNA, 21 nt, Artificial
  Chemically synthesized
gucauccauauuucucuacau

SEQ ID NO: 1481 - RNA, 21 nt, Artificial
  Chemically synthesized
caaaaacaaugcaagcaugug

SEQ ID NO: 1482 - RNA, 21 nt, Artificial
  Chemically synthesized
cucacccuagauuuguauaaa

SEQ ID NO: 1483 - RNA, 21 nt, Artificial
  Chemically synthesized
uagucuagagaagcauuuggu

SEQ ID NO: 1484 - RNA, 21 nt, Artificial
  Chemically synthesized
ggcauccuucaauuucuguau

SEQ ID NO: 1485 - RNA, 21 nt, Artificial
  Chemically synthesized
ucagcccacugacagaccuua

SEQ ID NO: 1486 - RNA, 21 nt, Artificial
  Chemically synthesized
caaacuggaaacuuguuucuu

SEQ ID NO: 1487 - RNA, 21 nt, Artificial
  Chemically synthesized
aaaggcaagcaaaggagauga

SEQ ID NO: 1488 - RNA, 21 nt, Artificial
  Chemically synthesized
ugucaccugugccucucagaa

SEQ ID NO: 1489 - RNA, 21 nt, Artificial
  Chemically synthesized
uaacuuugcuuaauuccucag

SEQ ID NO: 1490 - RNA, 21 nt, Artificial
  Chemically synthesized
gagaaucgugugaucagugug

SEQ ID NO: 1491 - RNA, 21 nt, Artificial
  Chemically synthesized
cacaaacaugaccuauccaag

SEQ ID NO: 1492 - RNA, 21 nt, Artificial
  Chemically synthesized
uaaagcacucauaauauggca

SEQ ID NO: 1493 - RNA, 21 nt, Artificial
  Chemically synthesized
ucacugcagucuuaagaaaga

SEQ ID NO: 1494 - RNA, 21 nt, Artificial
  Chemically synthesized
gaaaaaaguccucugugagga

SEQ ID NO: 1495 - RNA, 21 nt, Artificial
  Chemically synthesized
gcuagagaguuugaggauugc

SEQ ID NO: 1496 - RNA, 21 nt, Artificial
  Chemically synthesized
aucgugugaucagugugcuaa

SEQ ID NO: 1497 - RNA, 21 nt, Artificial
  Chemically synthesized
aagcggagcucgaaacugacu

SEQ ID NO: 1498 - RNA, 21 nt, Artificial
  Chemically synthesized
ugaaaucuguucugggaaugu

SEQ ID NO: 1499 - RNA, 21 nt, Artificial
  Chemically synthesized
uguccaucccuuuuuucuuug

SEQ ID NO: 1500 - RNA, 21 nt, Artificial
  Chemically synthesized
aacaccagcaguuaaccuuca

SEQ ID NO: 1501 - RNA, 21 nt, Artificial
  Chemically synthesized
uuauuuuuaggaucaucucgg

SEQ ID NO: 1502 - RNA, 21 nt, Artificial
  Chemically synthesized
auuaagauuaaggucugucag

SEQ ID NO: 1503 - RNA, 21 nt, Artificial
  Chemically synthesized
uguagugugggagguugaagg

SEQ ID NO: 1504 - RNA, 21 nt, Artificial
  Chemically synthesized
uuuuuuuaaggcagcuccucc

SEQ ID NO: 1505 - RNA, 21 nt, Artificial
  Chemically synthesized
ucgguuauuuuuaggaucauc

SEQ ID NO: 1506 - RNA, 21 nt, Artificial
  Chemically synthesized
uuaagacugcagugaacaagc

SEQ ID NO: 1507 - RNA, 21 nt, Artificial
  Chemically synthesized
uauuuuuaggaucaucucggc

SEQ ID NO: 1508 - RNA, 21 nt, Artificial
  Chemically synthesized
auuuuuaggaucaucucggcc

SEQ ID NO: 1509 - RNA, 21 nt, Artificial
  Chemically synthesized
uugaggaaagcuccaacaacc

SEQ ID NO: 1510 - RNA, 21 nt, Artificial
  Chemically synthesized
uuauuggcugcugaaacauuc

SEQ ID NO: 1511 - RNA, 21 nt, Artificial
  Chemically synthesized
uaagauuaaggucugucagug

SEQ ID NO: 1512 - RNA, 21 nt, Artificial
  Chemically synthesized
uuaaggcucaagguguuuuuc

SEQ ID NO: 1513 - RNA, 21 nt, Artificial
  Chemically synthesized
uuguaauccgggugguccuuc

SEQ ID NO: 1514 - RNA, 21 nt, Artificial
  Chemically synthesized
uuuaaaaaguccaguuucucg

SEQ ID NO: 1515 - RNA, 21 nt, Artificial
  Chemically synthesized
uuaacaacagaugaccauacc

SEQ ID NO: 1516 - RNA, 21 nt, Artificial
  Chemically synthesized
uuccagucaguuucgagcucc

SEQ ID NO: 1517 - RNA, 21 nt, Artificial
  Chemically synthesized
uugacgugcggcuuguucuug

SEQ ID NO: 1518 - RNA, 21 nt, Artificial
  Chemically synthesized
uuugugucuuggaaauuuggg

SEQ ID NO: 1519 - RNA, 21 nt, Artificial
  Chemically synthesized
ugaaguuuccagucaguuucg

SEQ ID NO: 1520 - RNA, 21 nt, Artificial
  Chemically synthesized
ucucguugauuucgcugcucc

SEQ ID NO: 1521 - RNA, 21 nt, Artificial
  Chemically synthesized
uucccagaacagauuucaucu

SEQ ID NO: 1522 - RNA, 21 nt, Artificial
  Chemically synthesized
auuuuuuuuuaaggcagcucc

SEQ ID NO: 1523 - RNA, 21 nt, Artificial
  Chemically synthesized
uucugguugguccucucuuuc

SEQ ID NO: 1524 - RNA, 21 nt, Artificial
  Chemically synthesized
uuggcugcugaaacauuccca

SEQ ID NO: 1525 - RNA, 21 nt, Artificial
  Chemically synthesized
uuuaccucuuucuuaagacug

SEQ ID NO: 1526 - RNA, 21 nt, Artificial
  Chemically synthesized
ucacacgauucuccaucaucc

SEQ ID NO: 1527 - RNA, 21 nt, Artificial
  Chemically synthesized
guuauuuuuaggaucaucucg

SEQ ID NO: 1528 - RNA, 21 nt, Artificial
  Chemically synthesized
uuuaacaacagaugaccauac

SEQ ID NO: 1529 - RNA, 21 nt, Artificial
  Chemically synthesized
uucuacugacuucuaaaacug

SEQ ID NO: 1530 - RNA, 21 nt, Artificial
  Chemically synthesized
ugaaucauacacaguacauac

SEQ ID NO: 1531 - RNA, 21 nt, Artificial
  Chemically synthesized
aaacaggcagagagauuuagc

SEQ ID NO: 1532 - RNA, 21 nt, Artificial
  Chemically synthesized
uugccuuuagcuuaaaugucu

SEQ ID NO: 1533 - RNA, 21 nt, Artificial
  Chemically synthesized
uccaguuucucguugauuucg

SEQ ID NO: 1534 - RNA, 21 nt, Artificial
  Chemically synthesized
ucuucgguuauuuuuaggauc

SEQ ID NO: 1535 - RNA, 21 nt, Artificial
  Chemically synthesized
uucucuucuccuccugcaaag

SEQ ID NO: 1536 - RNA, 21 nt, Artificial
  Chemically synthesized
uuuuuuaaggcagcuccuccu

SEQ ID NO: 1537 - RNA, 21 nt, Artificial
  Chemically synthesized
cagcaguaauuaagauuaagg

SEQ ID NO: 1538 - RNA, 21 nt, Artificial
  Chemically synthesized
uucaacuaagaguaguuuagc

SEQ ID NO: 1539 - RNA, 21 nt, Artificial
  Chemically synthesized
auuggcugcugaaacauuccc

SEQ ID NO: 1540 - RNA, 21 nt, Artificial
  Chemically synthesized
ugaggaauacaaagaaacuug

SEQ ID NO: 1541 - RNA, 21 nt, Artificial
  Chemically synthesized
uugaagguuaacugcuggugu

SEQ ID NO: 1542 - RNA, 21 nt, Artificial
  Chemically synthesized
uuaagauuaaggucugucagu

SEQ ID NO: 1543 - RNA, 21 nt, Artificial
  Chemically synthesized
ucagugauacacuacauuugc

SEQ ID NO: 1544 - RNA, 21 nt, Artificial
  Chemically synthesized
uugacaucgaaggucucgaug

SEQ ID NO: 1545 - RNA, 21 nt, Artificial
  Chemically synthesized
uuuaaggcucaagguguuuuu

SEQ ID NO: 1546 - RNA, 21 nt, Artificial
  Chemically synthesized
uuucucguugauuucgcugcu

SEQ ID NO: 1547 - RNA, 21 nt, Artificial
  Chemically synthesized
ucucguucagaagucuccaga

SEQ ID NO: 1548 - RNA, 21 nt, Artificial
  Chemically synthesized
uuaaaaaguccaguuucucgu

SEQ ID NO: 1549 - RNA, 21 nt, Artificial
  Chemically synthesized
uaauccgggugguccuucuug

SEQ ID NO: 1550 - RNA, 21 nt, Artificial
  Chemically synthesized
uuaggaucaucucggccaucu

SEQ ID NO: 1551 - RNA, 21 nt, Artificial
  Chemically synthesized
uuguucuugcuggagccguug

SEQ ID NO: 1552 - RNA, 21 nt, Artificial
  Chemically synthesized
uuucaucuccuuugcuugccu

SEQ ID NO: 1553 - RNA, 21 nt, Artificial
  Chemically synthesized
uaaggcucaagguguuuuucu

SEQ ID NO: 1554 - RNA, 21 nt, Artificial
  Chemically synthesized
uccuccuuaaaucgcaaagcc

SEQ ID NO: 1555 - RNA, 21 nt, Artificial
  Chemically synthesized
uccugcaaagaaaaguuuccg

SEQ ID NO: 1556 - RNA, 21 nt, Artificial
  Chemically synthesized
ucgauguuggagaugacgucg

SEQ ID NO: 1557 - RNA, 21 nt, Artificial
  Chemically synthesized
uuacaaaguccaaacaggcag

SEQ ID NO: 1558 - RNA, 21 nt, Artificial
  Chemically synthesized
auucuccaucauccuccacgc

SEQ ID NO: 1559 - RNA, 21 nt, Artificial
  Chemically synthesized
aaaagagugcaaauguuuccc

SEQ ID NO: 1560 - RNA, 21 nt, Artificial
  Chemically synthesized
uuucacggagagaacaaaagg

SEQ ID NO: 1561 - RNA, 21 nt, Artificial
  Chemically synthesized
aaauguuucccagcagcaccg

SEQ ID NO: 1562 - RNA, 21 nt, Artificial
  Chemically synthesized
aucuguacaaaaauacucugg

SEQ ID NO: 1563 - RNA, 21 nt, Artificial
  Chemically synthesized
cuuucuucgguuauuuuuagg

SEQ ID NO: 1564 - RNA, 21 nt, Artificial
  Chemically synthesized
uuggauaggucauguuugugu

SEQ ID NO: 1565 - RNA, 21 nt, Artificial
  Chemically synthesized
uuucgcugcuccauuuagcca

SEQ ID NO: 1566 - RNA, 21 nt, Artificial
  Chemically synthesized
ucuccuuugcuugccuuuuac

SEQ ID NO: 1567 - RNA, 21 nt, Artificial
  Chemically synthesized
auacccuuugaggaaagcucc

SEQ ID NO: 1568 - RNA, 21 nt, Artificial
  Chemically synthesized
aaaagcuagggcacacuguuc

SEQ ID NO: 1569 - RNA, 21 nt, Artificial
  Chemically synthesized
aagaaaagcuagggcacacug

SEQ ID NO: 1570 - RNA, 21 nt, Artificial
  Chemically synthesized
ucucuagacuauuguuuacuc

SEQ ID NO: 1571 - RNA, 21 nt, Artificial
  Chemically synthesized
auuucaucuccuuugcuugcc

SEQ ID NO: 1572 - RNA, 21 nt, Artificial
  Chemically synthesized
uaaaagagugcaaauguuucc

SEQ ID NO: 1573 - RNA, 21 nt, Artificial
  Chemically synthesized
uucaucuccuuugcuugccuu

SEQ ID NO: 1574 - RNA, 21 nt, Artificial
  Chemically synthesized
uugccuuuuaccucuuucuua

SEQ ID NO: 1575 - RNA, 21 nt, Artificial
  Chemically synthesized
cacgauucuccaucauccucc

SEQ ID NO: 1576 - RNA, 21 nt, Artificial
  Chemically synthesized
cuucgguuauuuuuaggauca

SEQ ID NO: 1577 - RNA, 21 nt, Artificial
  Chemically synthesized
uuggaaauuuggguacgaguu

SEQ ID NO: 1578 - RNA, 21 nt, Artificial
  Chemically synthesized
uuuaggaucaucucggccauc

SEQ ID NO: 1579 - RNA, 21 nt, Artificial
  Chemically synthesized
aacagauuucaucuccuuugc

SEQ ID NO: 1580 - RNA, 21 nt, Artificial
  Chemically synthesized
uuggguacgaguugccuuuag

SEQ ID NO: 1581 - RNA, 21 nt, Artificial
  Chemically synthesized
uuuccagucaguuucgagcuc

SEQ ID NO: 1582 - RNA, 21 nt, Artificial
  Chemically synthesized
uauaaggcagcccaaaggucu

SEQ ID NO: 1583 - RNA, 21 nt, Artificial
  Chemically synthesized
uauuccucacagaggacuuuu

SEQ ID NO: 1584 - RNA, 21 nt, Artificial
  Chemically synthesized
aucauccuccacgcuugcucu

SEQ ID NO: 1585 - RNA, 21 nt, Artificial
  Chemically synthesized
uuaaaugccagguuucuuaag

SEQ ID NO: 1586 - RNA, 21 nt, Artificial
  Chemically synthesized
uuuagcacacugaucacacga

SEQ ID NO: 1587 - RNA, 21 nt, Artificial
  Chemically synthesized
uucuuaagacugcagugaaca

SEQ ID NO: 1588 - RNA, 21 nt, Artificial
  Chemically synthesized
aaugucuugaagguuaacugc

SEQ ID NO: 1589 - RNA, 21 nt, Artificial
  Chemically synthesized
acaggcagagagauuuagcac

SEQ ID NO: 1590 - RNA, 21 nt, Artificial
  Chemically synthesized
ucuagacuauuguuuacuccc

SEQ ID NO: 1591 - RNA, 21 nt, Artificial
  Chemically synthesized
uuugaggaaagcuccaacaac

SEQ ID NO: 1592 - RNA, 21 nt, Artificial
  Chemically synthesized
uuuuuuuuaaggcagcuccuc

SEQ ID NO: 1593 - RNA, 21 nt, Artificial
  Chemically synthesized
ugucuuggaaauuuggguacg

SEQ ID NO: 1594 - RNA, 21 nt, Artificial
  Chemically synthesized
uuuggguacgaguugccuuua

SEQ ID NO: 1595 - RNA, 21 nt, Artificial
  Chemically synthesized
cgguuauuuuuaggaucaucu

SEQ ID NO: 1596 - RNA, 21 nt, Artificial
  Chemically synthesized
uguuugugucuuggaaauuug

SEQ ID NO: 1597 - RNA, 21 nt, Artificial
  Chemically synthesized
uccuuugcuugccuuuuaccu

SEQ ID NO: 1598 - RNA, 21 nt, Artificial
  Chemically synthesized
ucuagggugaggaauacaaag

SEQ ID NO: 1599 - RNA, 21 nt, Artificial
  Chemically synthesized
uuggccacaaguggguaaugc

SEQ ID NO: 1600 - RNA, 21 nt, Artificial
  Chemically synthesized
uuuuuaaggcagcuccuccuu

SEQ ID NO: 1601 - RNA, 21 nt, Artificial
  Chemically synthesized
ugaaacaaacaaaacacgaac

SEQ ID NO: 1602 - RNA, 21 nt, Artificial
  Chemically synthesized
uuugcuugccuuuuaccucuu

SEQ ID NO: 1603 - RNA, 21 nt, Artificial
  Chemically synthesized
cuuugcuugccuuuuaccucu

SEQ ID NO: 1604 - RNA, 21 nt, Artificial
  Chemically synthesized
uucucguugauuucgcugcuc

SEQ ID NO: 1605 - RNA, 21 nt, Artificial
  Chemically synthesized
uggucaaacucguugacaucg

SEQ ID NO: 1606 - RNA, 21 nt, Artificial
  Chemically synthesized
uucagaagucuccagagcuug

SEQ ID NO: 1607 - RNA, 21 nt, Artificial
  Chemically synthesized
ucaagguguuuuucucuucuu

SEQ ID NO: 1608 - RNA, 21 nt, Artificial
  Chemically synthesized
gguuauuuuuaggaucaucuc

SEQ ID NO: 1609 - RNA, 21 nt, Artificial
  Chemically synthesized
uuaccaaaugcuucucuagac

SEQ ID NO: 1610 - RNA, 21 nt, Artificial
  Chemically synthesized
uuaaaucgcaaagccugagga

SEQ ID NO: 1611 - RNA, 21 nt, Artificial
  Chemically synthesized
uuguuuacucccauaauugca

SEQ ID NO: 1612 - RNA, 21 nt, Artificial
  Chemically synthesized
auucccagaacagauuucauc

SEQ ID NO: 1613 - RNA, 21 nt, Artificial
  Chemically synthesized
aauauggaugacacaugcuug

SEQ ID NO: 1614 - RNA, 21 nt, Artificial
  Chemically synthesized
ucuccaucauccuccacgcuu

SEQ ID NO: 1615 - RNA, 21 nt, Artificial
  Chemically synthesized
aacaaaacacgaacacaaacc

SEQ ID NO: 1616 - RNA, 21 nt, Artificial
  Chemically synthesized
augauaaagcuuaccaaaugc

SEQ ID NO: 1617 - RNA, 21 nt, Artificial
  Chemically synthesized
uuucuuaagacugcagugaac

SEQ ID NO: 1618 - RNA, 21 nt, Artificial
  Chemically synthesized
ucccauaauugcaaaauaagg

SEQ ID NO: 1619 - RNA, 21 nt, Artificial
  Chemically synthesized
ucaguuucgagcuccgcuuuc

SEQ ID NO: 1620 - RNA, 21 nt, Artificial
  Chemically synthesized
uaaagcuuaccaaaugcuucu

SEQ ID NO: 1621 - RNA, 21 nt, Artificial
  Chemically synthesized
uuauacaaaucuagggugagg

SEQ ID NO: 1622 - RNA, 21 nt, Artificial
  Chemically synthesized
uauuggcugcugaaacauucc

SEQ ID NO: 1623 - RNA, 21 nt, Artificial
  Chemically synthesized
ucugguugguccucucuuucu

SEQ ID NO: 1624 - RNA, 21 nt, Artificial
  Chemically synthesized
cuuaaaucgcaaagccugagg

SEQ ID NO: 1625 - RNA, 21 nt, Artificial
  Chemically synthesized
cucaagguguuuuucucuucu

SEQ ID NO: 1626 - RNA, 21 nt, Artificial
  Chemically synthesized
acacaaaccaaagcuuuuacc

SEQ ID NO: 1627 - RNA, 21 nt, Artificial
  Chemically synthesized
gcuagggcacacuguucaacu

SEQ ID NO: 1628 - RNA, 21 nt, Artificial
  Chemically synthesized
aagagugcaaauguuucccag

SEQ ID NO: 1629 - RNA, 21 nt, Artificial
  Chemically synthesized
auuuuagcaaguggaaugucu

SEQ ID NO: 1630 - RNA, 21 nt, Artificial
  Chemically synthesized
uuuuaaggcagcuccuccuua

SEQ ID NO: 1631 - RNA, 21 nt, Artificial
  Chemically synthesized
uuuuuuuuuaaggcagcuccu

SEQ ID NO: 1632 - RNA, 21 nt, Artificial
  Chemically synthesized
agauguagagaaauauggaug

SEQ ID NO: 1633 - RNA, 21 nt, Artificial
  Chemically synthesized
aauagagaauauuccucacag

SEQ ID NO: 1634 - RNA, 21 nt, Artificial
  Chemically synthesized
acaaguuuccaguuuguuuuc

SEQ ID NO: 1635 - RNA, 21 nt, Artificial
  Chemically synthesized
uggaaauuuggguacgaguug

SEQ ID NO: 1636 - RNA, 21 nt, Artificial
  Chemically synthesized
uugauuucgcugcuccauuua

SEQ ID NO: 1637 - RNA, 21 nt, Artificial
  Chemically synthesized
aggcauuuauacaaaucuagg

SEQ ID NO: 1638 - RNA, 21 nt, Artificial
  Chemically synthesized
ucagaagucuccagagcuugc

SEQ ID NO: 1639 - RNA, 21 nt, Artificial
  Chemically synthesized
uagggcacacuguucaacuaa

SEQ ID NO: 1640 - RNA, 21 nt, Artificial
  Chemically synthesized
cugaucacacgauucuccauc

SEQ ID NO: 1641 - RNA, 21 nt, Artificial
  Chemically synthesized
ucaaacucguugacaucgaag

SEQ ID NO: 1642 - RNA, 21 nt, Artificial
  Chemically synthesized
uaccaaaugcuucucuagacu

SEQ ID NO: 1643 - RNA, 21 nt, Artificial
  Chemically synthesized
uguguguagacggguuguucc

SEQ ID NO: 1644 - RNA, 21 nt, Artificial
  Chemically synthesized
ucgcucuccuucuucagaucg

SEQ ID NO: 1645 - RNA, 21 nt, Artificial
  Chemically synthesized
ucagcugcuccgucuugaugu

SEQ ID NO: 1646 - RNA, 21 nt, Artificial
  Chemically synthesized
uuccucacagaggacuuuuuu

SEQ ID NO: 1647 - RNA, 21 nt, Artificial
  Chemically synthesized
uagagaauauuccucacagag

SEQ ID NO: 1648 - RNA, 21 nt, Artificial
  Chemically synthesized
acacugaucacacgauucucc

SEQ ID NO: 1649 - RNA, 21 nt, Artificial
  Chemically synthesized
uuuagcaaguggaaugucuug

SEQ ID NO: 1650 - RNA, 21 nt, Artificial
  Chemically synthesized
gcaguaauuaagauuaagguc

SEQ ID NO: 1651 - RNA, 21 nt, Artificial
  Chemically synthesized
ugauacacuacauuugcaauc

SEQ ID NO: 1652 - RNA, 21 nt, Artificial
  Chemically synthesized
aaaugcuucucuagacuauug

SEQ ID NO: 1653 - RNA, 21 nt, Artificial
  Chemically synthesized
augucuugaagguuaacugcu

SEQ ID NO: 1654 - RNA, 21 nt, Artificial
  Chemically synthesized
uccauuuagccaagguuggcc

SEQ ID NO: 1655 - RNA, 21 nt, Artificial
  Chemically synthesized
uuuuuaggaucaucucggcca

SEQ ID NO: 1656 - RNA, 21 nt, Artificial
  Chemically synthesized
uaggucauguuugugucuugg

SEQ ID NO: 1657 - RNA, 21 nt, Artificial
  Chemically synthesized
uucgcugcuccauuuagccaa

SEQ ID NO: 1658 - RNA, 21 nt, Artificial
  Chemically synthesized
ugaaggaugccauauuaugag

SEQ ID NO: 1659 - RNA, 21 nt, Artificial
  Chemically synthesized
agaaauauggaugacacaugc

SEQ ID NO: 1660 - RNA, 21 nt, Artificial
  Chemically synthesized
uugguccucucuuucuucggu

SEQ ID NO: 1661 - RNA, 21 nt, Artificial
  Chemically synthesized
uugaaggaugccauauuauga

SEQ ID NO: 1662 - RNA, 21 nt, Artificial
  Chemically synthesized
cuguagugugggagguugaag

SEQ ID NO: 1663 - RNA, 21 nt, Artificial
  Chemically synthesized
uuaaggucugucagugggcug

SEQ ID NO: 1664 - RNA, 21 nt, Artificial
  Chemically synthesized
uucuccuccugcaaagaaaag

SEQ ID NO: 1665 - RNA, 21 nt, Artificial
  Chemically synthesized
aauuacaaaguccaaacaggc

SEQ ID NO: 1666 - RNA, 21 nt, Artificial
  Chemically synthesized
auuguuuacucccauaauugc

SEQ ID NO: 1667 - RNA, 21 nt, Artificial
  Chemically synthesized
uuaccucuuucuuaagacugc

SEQ ID NO: 1668 - RNA, 21 nt, Artificial
  Chemically synthesized
aaagcuagggcacacuguuca

SEQ ID NO: 1669 - RNA, 21 nt, Artificial
  Chemically synthesized
ucgcucucguucagaagucuc

SEQ ID NO: 1670 - RNA, 21 nt, Artificial
  Chemically synthesized
uaguaggagcuggaguucugg

SEQ ID NO: 1671 - RNA, 21 nt, Artificial
  Chemically synthesized
uuagcaaguggaaugucuuga

SEQ ID NO: 1672 - RNA, 21 nt, Artificial
  Chemically synthesized
aaaaaguccaguuucucguug

SEQ ID NO: 1673 - RNA, 21 nt, Artificial
  Chemically synthesized
uccaaacaggcagagagauuu

SEQ ID NO: 1674 - RNA, 21 nt, Artificial
  Chemically synthesized
cccagaacagauuucaucucc

SEQ ID NO: 1675 - RNA, 21 nt, Artificial
  Chemically synthesized
uggauaggucauguuuguguc

SEQ ID NO: 1676 - RNA, 21 nt, Artificial
  Chemically synthesized
ugccuuuuaccucuuucuuaa

SEQ ID NO: 1677 - RNA, 21 nt, Artificial
  Chemically synthesized
auccucaaacucucuagccac

SEQ ID NO: 1678 - RNA, 21 nt, Artificial
  Chemically synthesized
ugaaacauucccagaacagau

SEQ ID NO: 1679 - RNA, 21 nt, Artificial
  Chemically synthesized
uugcaagaaaagcuagggcac

SEQ ID NO: 1680 - RNA, 21 nt, Artificial
  Chemically synthesized
aaacauucccagaacagauuu

SEQ ID NO: 1681 - RNA, 21 nt, Artificial
  Chemically synthesized
uuuuaggaucaucucggccau

SEQ ID NO: 1682 - RNA, 21 nt, Artificial
  Chemically synthesized
aguuucucguugauuucgcug

SEQ ID NO: 1683 - RNA, 21 nt, Artificial
  Chemically synthesized
augcgcuuggauaggucaugu

SEQ ID NO: 1684 - RNA, 21 nt, Artificial
  Chemically synthesized
auucugguugguccucucuuu

SEQ ID NO: 1685 - RNA, 21 nt, Artificial
  Chemically synthesized
aggcucaagguguuuuucucu

SEQ ID NO: 1686 - RNA, 21 nt, Artificial
  Chemically synthesized
aaaagcaauccucaaacucuc

SEQ ID NO: 1687 - RNA, 21 nt, Artificial
  Chemically synthesized
uauacagaaauugaaggaugc

SEQ ID NO: 1688 - RNA, 21 nt, Artificial
  Chemically synthesized
uacacuacauuugcaaucucu

SEQ ID NO: 1689 - RNA, 21 nt, Artificial
  Chemically synthesized
uguaauccgggugguccuucu

SEQ ID NO: 1690 - RNA, 21 nt, Artificial
  Chemically synthesized
ugugucuuggaaauuugggua

SEQ ID NO: 1691 - RNA, 21 nt, Artificial
  Chemically synthesized
uaagagaaagcaaaucuguac

SEQ ID NO: 1692 - RNA, 21 nt, Artificial
  Chemically synthesized
aaauuuggguacgaguugccu

SEQ ID NO: 1693 - RNA, 21 nt, Artificial
  Chemically synthesized
uaaaugccagguuucuuaagu

SEQ ID NO: 1694 - RNA, 21 nt, Artificial
  Chemically synthesized
uucuccaucauccuccacgcu

SEQ ID NO: 1695 - RNA, 21 nt, Artificial
  Chemically synthesized
augguaaugaaucauacacag

SEQ ID NO: 1696 - RNA, 21 nt, Artificial
  Chemically synthesized
aacacaaaccaaagcuuuuac

SEQ ID NO: 1697 - RNA, 21 nt, Artificial
  Chemically synthesized
uacucugguugcaagaaaagc

SEQ ID NO: 1698 - RNA, 21 nt, Artificial
  Chemically synthesized
agaagauguagagaaauaugg

SEQ ID NO: 1699 - RNA, 21 nt, Artificial
  Chemically synthesized
aaaaagggauggacaaaaagg

SEQ ID NO: 1700 - RNA, 21 nt, Artificial
  Chemically synthesized
acacgauucuccaucauccuc

SEQ ID NO: 1701 - RNA, 21 nt, Artificial
  Chemically synthesized
uuucccagcagcaccguuuua

SEQ ID NO: 1702 - RNA, 21 nt, Artificial
  Chemically synthesized
ucugaagaggguuuaaaaagu

SEQ ID NO: 1703 - RNA, 21 nt, Artificial
  Chemically synthesized
agguacuggucaaacucguug

SEQ ID NO: 1704 - RNA, 21 nt, Artificial
  Chemically synthesized
uaggugaagguggaguagagg

SEQ ID NO: 1705 - RNA, 21 nt, Artificial
  Chemically synthesized
uuaacugcugguguucugaga

SEQ ID NO: 1706 - RNA, 21 nt, Artificial
  Chemically synthesized
aauccgggugguccuucuugu

SEQ ID NO: 1707 - RNA, 21 nt, Artificial
  Chemically synthesized
auuuggguacgaguugccuuu

SEQ ID NO: 1708 - RNA, 21 nt, Artificial
  Chemically synthesized
acucguugacaucgaaggucu

SEQ ID NO: 1709 - RNA, 21 nt, Artificial
  Chemically synthesized
uacagaaauugaaggaugcca

SEQ ID NO: 1710 - RNA, 21 nt, Artificial
  Chemically synthesized
aacaacagaugaccauacccu

SEQ ID NO: 1711 - RNA, 21 nt, Artificial
  Chemically synthesized
aaagagugcaaauguuuccca

SEQ ID NO: 1712 - RNA, 21 nt, Artificial
  Chemically synthesized
acaugcuugcauuguuuuugu

SEQ ID NO: 1713 - RNA, 21 nt, Artificial
  Chemically synthesized
uaauuacaaaguccaaacagg

SEQ ID NO: 1714 - RNA, 21 nt, Artificial
  Chemically synthesized
aauucugguugguccucucuu

SEQ ID NO: 1715 - RNA, 21 nt, Artificial
  Chemically synthesized
uucacggagagaacaaaaggu

SEQ ID NO: 1716 - RNA, 21 nt, Artificial
  Chemically synthesized
auugaaggaugccauauuaug

SEQ ID NO: 1717 - RNA, 21 nt, Artificial
  Chemically synthesized
ucucgauguuggagaugacgu

SEQ ID NO: 1718 - RNA, 21 nt, Artificial
  Chemically synthesized
uuuuaaggcucaagguguuuu

SEQ ID NO: 1719 - RNA, 21 nt, Artificial
  Chemically synthesized
ucucgcucucguucagaaguc

SEQ ID NO: 1720 - RNA, 21 nt, Artificial
  Chemically synthesized
ggaaagguaaguuucacggag

SEQ ID NO: 1721 - RNA, 21 nt, Artificial
  Chemically synthesized
aauuuuagcaaguggaauguc

SEQ ID NO: 1722 - RNA, 21 nt, Artificial
  Chemically synthesized
aggaauuaagcaaaguuaacc

SEQ ID NO: 1723 - RNA, 21 nt, Artificial
  Chemically synthesized
uggacaaaaaggcauuuauac

SEQ ID NO: 1724 - RNA, 21 nt, Artificial
  Chemically synthesized
uucccagcagcaccguuuuaa

SEQ ID NO: 1725 - RNA, 21 nt, Artificial
  Chemically synthesized
uuuuagcaaguggaaugucuu

SEQ ID NO: 1726 - RNA, 21 nt, Artificial
  Chemically synthesized
ugguccucucuuucuucgguu

SEQ ID NO: 1727 - RNA, 21 nt, Artificial
  Chemically synthesized
ccaguuucucguugauuucgc

SEQ ID NO: 1728 - RNA, 21 nt, Artificial
  Chemically synthesized
uauacaaaucuagggugagga

SEQ ID NO: 1729 - RNA, 21 nt, Artificial
  Chemically synthesized
ugguugguccucucuuucuuc

SEQ ID NO: 1730 - RNA, 21 nt, Artificial
  Chemically synthesized
aagagaaagcaaaucuguaca

SEQ ID NO: 1731 - RNA, 21 nt, Artificial
  Chemically synthesized
cuccuuugcuugccuuuuacc

SEQ ID NO: 1732 - RNA, 21 nt, Artificial
  Chemically synthesized
uuuaaggcagcuccuccuuaa

SEQ ID NO: 1733 - RNA, 21 nt, Artificial
  Chemically synthesized
uuaaggaagaagaagaagaag

SEQ ID NO: 1734 - RNA, 21 nt, Artificial
  Chemically synthesized
aagauuaaggucugucagugg

SEQ ID NO: 1735 - RNA, 21 nt, Artificial
  Chemically synthesized
uaagaguaguuuagcuguugg

SEQ ID NO: 1736 - RNA, 21 nt, Artificial
  Chemically synthesized
uacaaaguccaaacaggcaga

SEQ ID NO: 1737 - RNA, 21 nt, Artificial
  Chemically synthesized
ucaaacucucuagccacagca

SEQ ID NO: 1738 - RNA, 21 nt, Artificial
  Chemically synthesized
ucaacuaagaguaguuuagcu

SEQ ID NO: 1739 - RNA, 21 nt, Artificial
  Chemically synthesized
ggaaauuuggguacgaguugc

SEQ ID NO: 1740 - RNA, 21 nt, Artificial
  Chemically synthesized
ucacggagagaacaaaagguu

SEQ ID NO: 1741 - RNA, 21 nt, Artificial
  Chemically synthesized
uagcuguuggaaaaauaagag

SEQ ID NO: 1742 - RNA, 21 nt, Artificial
  Chemically synthesized
agauuaaggucugucaguggg

SEQ ID NO: 1743 - RNA, 21 nt, Artificial
  Chemically synthesized
ucuuggaaauuuggguacgag

SEQ ID NO: 1744 - RNA, 21 nt, Artificial
  Chemically synthesized
uacuuguaauccggguggucc

SEQ ID NO: 1745 - RNA, 21 nt, Artificial
  Chemically synthesized
ucccagcagcaccguuuuaag

SEQ ID NO: 1746 - RNA, 21 nt, Artificial
  Chemically synthesized
acacgaacacaaaccaaagcu

SEQ ID NO: 1747 - RNA, 21 nt, Artificial
  Chemically synthesized
caaauguuucccagcagcacc

SEQ ID NO: 1748 - RNA, 21 nt, Artificial
  Chemically synthesized
ugggagggaaacaagugaaac

SEQ ID NO: 1749 - RNA, 21 nt, Artificial
  Chemically synthesized
uaaaaaguccaguuucucguu

SEQ ID NO: 1750 - RNA, 21 nt, Artificial
  Chemically synthesized
augauuuaaaugccagguuuc

SEQ ID NO: 1751 - RNA, 21 nt, Artificial
  Chemically synthesized
uagcacacugaucacacgauu

SEQ ID NO: 1752 - RNA, 21 nt, Artificial
  Chemically synthesized
uccuccugcaaagaaaaguuu

SEQ ID NO: 1753 - RNA, 21 nt, Artificial
  Chemically synthesized
uggaugacacaugcuugcauu

SEQ ID NO: 1754 - RNA, 21 nt, Artificial
  Chemically synthesized
ugauuucgcugcuccauuuag

SEQ ID NO: 1755 - RNA, 21 nt, Artificial
  Chemically synthesized
ucccagaacagauuucaucuc

SEQ ID NO: 1756 - RNA, 21 nt, Artificial
  Chemically synthesized
ucuguggcagaaaacacugca

SEQ ID NO: 1757 - RNA, 21 nt, Artificial
  Chemically synthesized
aaacacgaacacaaaccaaag

SEQ ID NO: 1758 - RNA, 21 nt, Artificial
  Chemically synthesized
acucagugauacacuacauuu

SEQ ID NO: 1759 - RNA, 21 nt, Artificial
  Chemically synthesized
agaaaagcuagggcacacugu

SEQ ID NO: 1760 - RNA, 21 nt, Artificial
  Chemically synthesized
aaaagggauggacaaaaaggc

SEQ ID NO: 1761 - RNA, 21 nt, Artificial
  Chemically synthesized
uguaguaggagcuggaguucu

SEQ ID NO: 1762 - RNA, 21 nt, Artificial
  Chemically synthesized
guugauuucgcugcuccauuu

SEQ ID NO: 1763 - RNA, 21 nt, Artificial
  Chemically synthesized
aaggaugccauauuaugagug

SEQ ID NO: 1764 - RNA, 21 nt, Artificial
  Chemically synthesized
ugaucacauaacacaauucug

SEQ ID NO: 1765 - RNA, 21 nt, Artificial
  Chemically synthesized
auuucgcugcuccauuuagcc

SEQ ID NO: 1766 - RNA, 21 nt, Artificial
  Chemically synthesized
ucgcugcuccauuuagccaag

SEQ ID NO: 1767 - RNA, 21 nt, Artificial
  Chemically synthesized
uguaggugaagguggaguaga

SEQ ID NO: 1768 - RNA, 21 nt, Artificial
  Chemically synthesized
uauggaugacacaugcuugca

SEQ ID NO: 1769 - RNA, 21 nt, Artificial
  Chemically synthesized
aaggcucaagguguuuuucuc

SEQ ID NO: 1770 - RNA, 21 nt, Artificial
  Chemically synthesized
uaccucuuucuuaagacugca

SEQ ID NO: 1771 - RNA, 21 nt, Artificial
  Chemically synthesized
ugcucgucggucaucuucaug

SEQ ID NO: 1772 - RNA, 21 nt, Artificial
  Chemically synthesized
auuuagccaagguuggccugg

SEQ ID NO: 1773 - RNA, 21 nt, Artificial
  Chemically synthesized
uacuggucaaacucguugaca

SEQ ID NO: 1774 - RNA, 21 nt, Artificial
  Chemically synthesized
auauggaugacacaugcuugc

SEQ ID NO: 1775 - RNA, 21 nt, Artificial
  Chemically synthesized
aaaacacugcaaaugacucag

SEQ ID NO: 1776 - RNA, 21 nt, Artificial
  Chemically synthesized
aucuccuuugcuugccuuuua

SEQ ID NO: 1777 - RNA, 21 nt, Artificial
  Chemically synthesized
augccagguuucuuaaguuac

SEQ ID NO: 1778 - RNA, 21 nt, Artificial
  Chemically synthesized
uccuuaaaucgcaaagccuga

SEQ ID NO: 1779 - RNA, 21 nt, Artificial
  Chemically synthesized
augccauauuaugagugcuuu

SEQ ID NO: 1780 - RNA, 21 nt, Artificial
  Chemically synthesized
guuuccagucaguuucgagcu

SEQ ID NO: 1781 - RNA, 21 nt, Artificial
  Chemically synthesized
ggaauuaagcaaaguuaaccc

SEQ ID NO: 1782 - RNA, 21 nt, Artificial
  Chemically synthesized
ugucuugaagguuaacugcug

SEQ ID NO: 1783 - RNA, 21 nt, Artificial
  Chemically synthesized
guuugugucuuggaaauuugg

SEQ ID NO: 1784 - RNA, 21 nt, Artificial
  Chemically synthesized
cuccuuaaaucgcaaagccug

SEQ ID NO: 1785 - RNA, 21 nt, Artificial
  Chemically synthesized
agaugaccauacccuuugagg

SEQ ID NO: 1786 - RNA, 21 nt, Artificial
  Chemically synthesized
aaagguaaguuucacggagag

SEQ ID NO: 1787 - RNA, 21 nt, Artificial
  Chemically synthesized
acagaaauugaaggaugccau

SEQ ID NO: 1788 - RNA, 21 nt, Artificial
  Chemically synthesized
ucuacugacuucuaaaacugu

SEQ ID NO: 1789 - RNA, 21 nt, Artificial
  Chemically synthesized
guagagaaauauggaugacac

SEQ ID NO: 1790 - RNA, 21 nt, Artificial
  Chemically synthesized
ugaagaggguuuaaaaagucc

SEQ ID NO: 1791 - RNA, 21 nt, Artificial
  Chemically synthesized
aaggucuguggcagaaaacac

SEQ ID NO: 1792 - RNA, 21 nt, Artificial
  Chemically synthesized
aaugcuucucuagacuauugu

SEQ ID NO: 1793 - RNA, 21 nt, Artificial
  Chemically synthesized
aacacugcaaaugacucagug

SEQ ID NO: 1794 - RNA, 21 nt, Artificial
  Chemically synthesized
aucacacgauucuccaucauc

SEQ ID NO: 1795 - RNA, 21 nt, Artificial
  Chemically synthesized
agcagcaccguuuuaaggcuc

SEQ ID NO: 1796 - RNA, 21 nt, Artificial
  Chemically synthesized
uccucaaacucucuagccaca

SEQ ID NO: 1797 - RNA, 21 nt, Artificial
  Chemically synthesized
cuaaaagagugcaaauguuuc

SEQ ID NO: 1798 - RNA, 21 nt, Artificial
  Chemically synthesized
aaagggauggacaaaaaggca

SEQ ID NO: 1799 - RNA, 21 nt, Artificial
  Chemically synthesized
cuacauuugcaaucucucauu

SEQ ID NO: 1800 - RNA, 21 nt, Artificial
  Chemically synthesized
aauguuucccagcagcaccgu

SEQ ID NO: 1801 - RNA, 21 nt, Artificial
  Chemically synthesized
gauucuccaucauccuccacg

SEQ ID NO: 1802 - RNA, 21 nt, Artificial
  Chemically synthesized
ugccuuuagcuuaaaugucuu

SEQ ID NO: 1803 - RNA, 21 nt, Artificial
  Chemically synthesized
uugcuugccuuuuaccucuuu

SEQ ID NO: 1804 - RNA, 21 nt, Artificial
  Chemically synthesized
aaguccaaacaggcagagaga

SEQ ID NO: 1805 - RNA, 21 nt, Artificial
  Chemically synthesized
ccauaauugcaaaauaaggcc

SEQ ID NO: 1806 - RNA, 21 nt, Artificial
  Chemically synthesized
caauccucaaacucucuagcc

SEQ ID NO: 1807 - RNA, 21 nt, Artificial
  Chemically synthesized
uacgaguugccuuuagcuuaa

SEQ ID NO: 1808 - RNA, 21 nt, Artificial
  Chemically synthesized
cugaaguuuccagucaguuuc

SEQ ID NO: 1809 - RNA, 21 nt, Artificial
  Chemically synthesized
cugaucacauaacacaauucu

SEQ ID NO: 1810 - RNA, 21 nt, Artificial
  Chemically synthesized
aguuuccagucaguuucgagc

SEQ ID NO: 1811 - RNA, 21 nt, Artificial
  Chemically synthesized
agcuagggcacacuguucaac

SEQ ID NO: 1812 - RNA, 21 nt, Artificial
  Chemically synthesized
aacugcugguguucugagagg

SEQ ID NO: 1813 - RNA, 21 nt, Artificial
  Chemically synthesized
agugugcucgggcacuuauug

SEQ ID NO: 1814 - RNA, 21 nt, Artificial
  Chemically synthesized
cuguguguagacggguuguuc

SEQ ID NO: 1815 - RNA, 21 nt, Artificial
  Chemically synthesized
acgauucuccaucauccucca

SEQ ID NO: 1816 - RNA, 21 nt, Artificial
  Chemically synthesized
acgaacacaaaccaaagcuuu

SEQ ID NO: 1817 - RNA, 21 nt, Artificial
  Chemically synthesized
acaaguggguaaugcgcuugg

SEQ ID NO: 1818 - RNA, 21 nt, Artificial
  Chemically synthesized
uugugucuuggaaauuugggu

SEQ ID NO: 1819 - RNA, 21 nt, Artificial
  Chemically synthesized
ucgagugagcuguguguagac

SEQ ID NO: 1820 - RNA, 21 nt, Artificial
  Chemically synthesized
ugguacuuguaauccgggugg

SEQ ID NO: 1821 - RNA, 21 nt, Artificial
  Chemically synthesized
gcucaagguguuuuucucuuc

SEQ ID NO: 1822 - RNA, 21 nt, Artificial
  Chemically synthesized
augcuugcauuguuuuugugu

SEQ ID NO: 1823 - RNA, 21 nt, Artificial
  Chemically synthesized
ucguugacaucgaaggucucg

SEQ ID NO: 1824 - RNA, 21 nt, Artificial
  Chemically synthesized
ugacucagugauacacuacau

SEQ ID NO: 1825 - RNA, 21 nt, Artificial
  Chemically synthesized
uguggcagaaaacacugcaaa

SEQ ID NO: 1826 - RNA, 21 nt, Artificial
  Chemically synthesized
gaaauuuggguacgaguugcc

SEQ ID NO: 1827 - RNA, 21 nt, Artificial
  Chemically synthesized
uugcucugaagaggguuuaaa

SEQ ID NO: 1828 - RNA, 21 nt, Artificial
  Chemically synthesized
ucguucagaagucuccagagc

SEQ ID NO: 1829 - RNA, 21 nt, Artificial
  Chemically synthesized
auaaagcuuaccaaaugcuuc

SEQ ID NO: 1830 - RNA, 21 nt, Artificial
  Chemically synthesized
ucauguuugugucuuggaaau

SEQ ID NO: 1831 - RNA, 21 nt, Artificial
  Chemically synthesized
cucuagacuauuguuuacucc

SEQ ID NO: 1832 - RNA, 21 nt, Artificial
  Chemically synthesized
aagcuuaccaaaugcuucucu

SEQ ID NO: 1833 - RNA, 21 nt, Artificial
  Chemically synthesized
aaaggcaggaggaaaugcacu

SEQ ID NO: 1834 - RNA, 21 nt, Artificial
  Chemically synthesized
ucucuagccacagcaguaauu

SEQ ID NO: 1835 - RNA, 21 nt, Artificial
  Chemically synthesized
gggaaagguaaguuucacgga

SEQ ID NO: 1836 - RNA, 21 nt, Artificial
  Chemically synthesized
aaaguccaaacaggcagagag

SEQ ID NO: 1837 - RNA, 21 nt, Artificial
  Chemically synthesized
agucguagccuuugagcaccu

SEQ ID NO: 1838 - RNA, 21 nt, Artificial
  Chemically synthesized
uacaaaucuagggugaggaau

SEQ ID NO: 1839 - RNA, 21 nt, Artificial
  Chemically synthesized
auuaaggucugucagugggcu

SEQ ID NO: 1840 - RNA, 21 nt, Artificial
  Chemically synthesized
ugaggaaagcuccaacaaccu

SEQ ID NO: 1841 - RNA, 21 nt, Artificial
  Chemically synthesized
aguggaaugucuugaagguua

SEQ ID NO: 1842 - RNA, 21 nt, Artificial
  Chemically synthesized
uucucgcucucguucagaagu

SEQ ID NO: 1843 - RNA, 21 nt, Artificial
  Chemically synthesized
ugcuugccuuuuaccucuuuc

SEQ ID NO: 1844 - RNA, 21 nt, Artificial
  Chemically synthesized
uagacuauuguuuacucccau

SEQ ID NO: 1845 - RNA, 21 nt, Artificial
  Chemically synthesized
cuuaagacugcagugaacaag

SEQ ID NO: 1846 - RNA, 21 nt, Artificial
  Chemically synthesized
auuuagcacacugaucacacg

SEQ ID NO: 1847 - RNA, 21 nt, Artificial
  Chemically synthesized
uagccacagcaguaauuaaga

SEQ ID NO: 1848 - RNA, 21 nt, Artificial
  Chemically synthesized
aaggcagcuccuccuuaaauc

SEQ ID NO: 1849 - RNA, 21 nt, Artificial
  Chemically synthesized
ucaaggucgagugagcugugu

SEQ ID NO: 1850 - RNA, 21 nt, Artificial
  Chemically synthesized
ggucuguggcagaaaacacug

SEQ ID NO: 1851 - RNA, 21 nt, Artificial
  Chemically synthesized
ccauuuagccaagguuggccu

SEQ ID NO: 1852 - RNA, 21 nt, Artificial
  Chemically synthesized
aggcagcuccuccuuaaaucg

SEQ ID NO: 1853 - RNA, 21 nt, Artificial
  Chemically synthesized
ucuccuucuucagaucgggcu

SEQ ID NO: 1854 - RNA, 21 nt, Artificial
  Chemically synthesized
ugacacaugcuugcauuguuu

SEQ ID NO: 1855 - RNA, 21 nt, Artificial
  Chemically synthesized
cugcaaagaaaaguuuccggg

SEQ ID NO: 1856 - RNA, 21 nt, Artificial
  Chemically synthesized
ugcagugaacaagcaaaggca

SEQ ID NO: 1857 - RNA, 21 nt, Artificial
  Chemically synthesized
uagggugaggaauacaaagaa

SEQ ID NO: 1858 - RNA, 21 nt, Artificial
  Chemically synthesized
auguaggugaagguggaguag

SEQ ID NO: 1859 - RNA, 21 nt, Artificial
  Chemically synthesized
aaacaaaacacgaacacaaac

SEQ ID NO: 1860 - RNA, 21 nt, Artificial
  Chemically synthesized
auauaaggcagcccaaagguc

SEQ ID NO: 1861 - RNA, 21 nt, Artificial
  Chemically synthesized
guugccuuuagcuuaaauguc

SEQ ID NO: 1862 - RNA, 21 nt, Artificial
  Chemically synthesized
aguccaguuucucguugauuu

SEQ ID NO: 1863 - RNA, 21 nt, Artificial
  Chemically synthesized
ucauguaggugaagguggagu

SEQ ID NO: 1864 - RNA, 21 nt, Artificial
  Chemically synthesized
aagugaaacaaacaaaacacg

SEQ ID NO: 1865 - RNA, 21 nt, Artificial
  Chemically synthesized
uaaguuucacggagagaacaa

SEQ ID NO: 1866 - RNA, 21 nt, Artificial
  Chemically synthesized
uaaggcagcuccuccuuaaau

SEQ ID NO: 1867 - RNA, 21 nt, Artificial
  Chemically synthesized
gcaccguuuuaaggcucaagg

SEQ ID NO: 1868 - RNA, 21 nt, Artificial
  Chemically synthesized
ugucuuuaaggaagaagaaga

SEQ ID NO: 1869 - RNA, 21 nt, Artificial
  Chemically synthesized
cacugaucacacgauucucca

SEQ ID NO: 1870 - RNA, 21 nt, Artificial
  Chemically synthesized
aggcagagagauuuagcacac

SEQ ID NO: 1871 - RNA, 21 nt, Artificial
  Chemically synthesized
cuuaccaaaugcuucucuaga

SEQ ID NO: 1872 - RNA, 21 nt, Artificial
  Chemically synthesized
uguguagacggguuguuccca

SEQ ID NO: 1873 - RNA, 21 nt, Artificial
  Chemically synthesized
aggaucaucucggccaucuuc

SEQ ID NO: 1874 - RNA, 21 nt, Artificial
  Chemically synthesized
guuuccaguuuguuuucaaca

SEQ ID NO: 1875 - RNA, 21 nt, Artificial
  Chemically synthesized
aaugacucagugauacacuac

SEQ ID NO: 1876 - RNA, 21 nt, Artificial
  Chemically synthesized
acagauuucaucuccuuugcu

SEQ ID NO: 1877 - RNA, 21 nt, Artificial
  Chemically synthesized
guuucucguugauuucgcugc

SEQ ID NO: 1878 - RNA, 21 nt, Artificial
  Chemically synthesized
uaacugcugguguucugagag

SEQ ID NO: 1879 - RNA, 21 nt, Artificial
  Chemically synthesized
aucuagggugaggaauacaaa

SEQ ID NO: 1880 - RNA, 21 nt, Artificial
  Chemically synthesized
auacacuacauuugcaaucuc

SEQ ID NO: 1881 - RNA, 21 nt, Artificial
  Chemically synthesized
cauuuauacaaaucuagggug

SEQ ID NO: 1882 - RNA, 21 nt, Artificial
  Chemically synthesized
cugcaaaugacucagugauac

SEQ ID NO: 1883 - RNA, 21 nt, Artificial
  Chemically synthesized
aagcaauccucaaacucucua

SEQ ID NO: 1884 - RNA, 21 nt, Artificial
  Chemically synthesized
cuuggaaauuuggguacgagu

SEQ ID NO: 1885 - RNA, 21 nt, Artificial
  Chemically synthesized
guaaugaaucauacacaguac

SEQ ID NO: 1886 - RNA, 21 nt, Artificial
  Chemically synthesized
augcuucucuagacuauuguu

SEQ ID NO: 1887 - RNA, 21 nt, Artificial
  Chemically synthesized
ugauuuaaaugccagguuucu

SEQ ID NO: 1888 - RNA, 21 nt, Artificial
  Chemically synthesized
gauuucaucuccuuugcuugc

SEQ ID NO: 1889 - RNA, 21 nt, Artificial
  Chemically synthesized
auggaugacacaugcuugcau

SEQ ID NO: 1890 - RNA, 21 nt, Artificial
  Chemically synthesized
aaaaauacucugguugcaaga

SEQ ID NO: 1891 - RNA, 21 nt, Artificial
  Chemically synthesized
guacaaaaauacucugguugc

SEQ ID NO: 1892 - RNA, 21 nt, Artificial
  Chemically synthesized
uccaagagaagauguagagaa

SEQ ID NO: 1893 - RNA, 21 nt, Artificial
  Chemically synthesized
uccucgcucuccuucuucaga

SEQ ID NO: 1894 - RNA, 21 nt, Artificial
  Chemically synthesized
agauuucaucuccuuugcuug

SEQ ID NO: 1895 - RNA, 21 nt, Artificial
  Chemically synthesized
ucacuccaagagaagauguag

SEQ ID NO: 1896 - RNA, 21 nt, Artificial
  Chemically synthesized
ucacagaggacuuuuuucuuu

SEQ ID NO: 1897 - RNA, 21 nt, Artificial
  Chemically synthesized
ucuccuccugcaaagaaaagu

SEQ ID NO: 1898 - RNA, 21 nt, Artificial
  Chemically synthesized
guuaacugcugguguucugag

SEQ ID NO: 1899 - RNA, 21 nt, Artificial
  Chemically synthesized
uguagagaaauauggaugaca

SEQ ID NO: 1900 - RNA, 21 nt, Artificial
  Chemically synthesized
cugaagaggguuuaaaaaguc

SEQ ID NO: 1901 - RNA, 21 nt, Artificial
  Chemically synthesized
ucuucuccuccugcaaagaaa

SEQ ID NO: 1902 - RNA, 21 nt, Artificial
  Chemically synthesized
uggcugcugaaacauucccag

SEQ ID NO: 1903 - RNA, 21 nt, Artificial
  Chemically synthesized
aguaggagcuggaguucuggu

SEQ ID NO: 1904 - RNA, 21 nt, Artificial
  Chemically synthesized
agcaaguggaaugucuugaag

SEQ ID NO: 1905 - RNA, 21 nt, Artificial
  Chemically synthesized
gaggaauacaaagaaacuugc

SEQ ID NO: 1906 - RNA, 21 nt, Artificial
  Chemically synthesized
ugcuugcauuguuuuuguguc

SEQ ID NO: 1907 - RNA, 21 nt, Artificial
  Chemically synthesized
gauuuagcacacugaucacac

SEQ ID NO: 1908 - RNA, 21 nt, Artificial
  Chemically synthesized
cuugccuuuuaccucuuucuu

SEQ ID NO: 1909 - RNA, 21 nt, Artificial
  Chemically synthesized
ccuccugcaaagaaaaguuuc

SEQ ID NO: 1910 - RNA, 21 nt, Artificial
  Chemically synthesized
caaacaggcagagagauuuag

SEQ ID NO: 1911 - RNA, 21 nt, Artificial
  Chemically synthesized
guugguccucucuuucuucgg

SEQ ID NO: 1912 - RNA, 21 nt, Artificial
  Chemically synthesized
ucguugauuucgcugcuccau

SEQ ID NO: 1913 - RNA, 21 nt, Artificial
  Chemically synthesized
cguugauuucgcugcuccauu

SEQ ID NO: 1914 - RNA, 21 nt, Artificial
  Chemically synthesized
ucuugaagguuaacugcuggu

SEQ ID NO: 1915 - RNA, 21 nt, Artificial
  Chemically synthesized
ugcuucucuagacuauuguuu

SEQ ID NO: 1916 - RNA, 21 nt, Artificial
  Chemically synthesized
aaagcuuaccaaaugcuucuc

SEQ ID NO: 1917 - RNA, 21 nt, Artificial
  Chemically synthesized
cuuauuggcugcugaaacauu

SEQ ID NO: 1918 - RNA, 21 nt, Artificial
  Chemically synthesized
cuugaagguuaacugcuggug

SEQ ID NO: 1919 - RNA, 21 nt, Artificial
  Chemically synthesized
aguucugguggucgguguagu

SEQ ID NO: 1920 - RNA, 21 nt, Artificial
  Chemically synthesized
aagcaaaggcaggaggaaaug

SEQ ID NO: 1921 - RNA, 21 nt, Artificial
  Chemically synthesized
agagauuuagcacacugauca

SEQ ID NO: 1922 - RNA, 21 nt, Artificial
  Chemically synthesized
acaccaugaaggcguucaugg

SEQ ID NO: 1923 - RNA, 21 nt, Artificial
  Chemically synthesized
aagcuagggcacacuguucaa

SEQ ID NO: 1924 - RNA, 21 nt, Artificial
  Chemically synthesized
uggguaaugcgcuuggauagg

SEQ ID NO: 1925 - RNA, 21 nt, Artificial
  Chemically synthesized
caagugaaacaaacaaaacac

SEQ ID NO: 1926 - RNA, 21 nt, Artificial
  Chemically synthesized
agggaaacaagugaaacaaac

SEQ ID NO: 1927 - RNA, 21 nt, Artificial
  Chemically synthesized
acugcagugaacaagcaaagg

SEQ ID NO: 1928 - RNA, 21 nt, Artificial
  Chemically synthesized
gaaugucuugaagguuaacug

SEQ ID NO: 1929 - RNA, 21 nt, Artificial
  Chemically synthesized
uacccuuugaggaaagcucca

SEQ ID NO: 1930 - RNA, 21 nt, Artificial
  Chemically synthesized
gugucuuggaaauuuggguac

SEQ ID NO: 1931 - RNA, 21 nt, Artificial
  Chemically synthesized
aauauuccucacagaggacuu

SEQ ID NO: 1932 - RNA, 21 nt, Artificial
  Chemically synthesized
cuagccacagcaguaauuaag

SEQ ID NO: 1933 - RNA, 21 nt, Artificial
  Chemically synthesized
aaacaaacaaaacacgaacac

SEQ ID NO: 1934 - RNA, 21 nt, Artificial
  Chemically synthesized
auguuggagaugacgucgcug

SEQ ID NO: 1935 - RNA, 21 nt, Artificial
  Chemically synthesized
agaaaacacugcaaaugacuc

SEQ ID NO: 1936 - RNA, 21 nt, Artificial
  Chemically synthesized
gaacagauuucaucuccuuug

SEQ ID NO: 1937 - RNA, 21 nt, Artificial
  Chemically synthesized
uggcagaaaacacugcaaaug

SEQ ID NO: 1938 - RNA, 21 nt, Artificial
  Chemically synthesized
uguagacggguuguucccagu

SEQ ID NO: 1939 - RNA, 21 nt, Artificial
  Chemically synthesized
aacacgaacacaaaccaaagc

SEQ ID NO: 1940 - RNA, 21 nt, Artificial
  Chemically synthesized
uguucuugcuggagccguuga

SEQ ID NO: 1941 - RNA, 21 nt, Artificial
  Chemically synthesized
augacucagugauacacuaca

SEQ ID NO: 1942 - RNA, 21 nt, Artificial
  Chemically synthesized
caucgaaggucucgauguugg

SEQ ID NO: 1943 - RNA, 21 nt, Artificial
  Chemically synthesized
cuugcauuguuuuugugucaa

SEQ ID NO: 1944 - RNA, 21 nt, Artificial
  Chemically synthesized
ucgaaggucucgauguuggag

SEQ ID NO: 1945 - RNA, 21 nt, Artificial
  Chemically synthesized
ucgguguagucguacugugag

SEQ ID NO: 1946 - RNA, 21 nt, Artificial
  Chemically synthesized
uggucgguguagucguacugu

SEQ ID NO: 1947 - RNA, 21 nt, Artificial
  Chemically synthesized
aaucgcaaagccugaggaauu

SEQ ID NO: 1948 - RNA, 21 nt, Artificial
  Chemically synthesized
ccaaacaggcagagagauuua

SEQ ID NO: 1949 - RNA, 21 nt, Artificial
  Chemically synthesized
aagaggguuuaaaaaguccag

SEQ ID NO: 1950 - RNA, 21 nt, Artificial
  Chemically synthesized
cugguugguccucucuuucuu

SEQ ID NO: 1951 - RNA, 21 nt, Artificial
  Chemically synthesized
uguuucccagcagcaccguuu

SEQ ID NO: 1952 - RNA, 21 nt, Artificial
  Chemically synthesized
aacucguugacaucgaagguc

SEQ ID NO: 1953 - RNA, 21 nt, Artificial
  Chemically synthesized
acaacaaagaaaaaagggaug

SEQ ID NO: 1954 - RNA, 21 nt, Artificial
  Chemically synthesized
ggcucaagguguuuuucucuu

SEQ ID NO: 1955 - RNA, 21 nt, Artificial
  Chemically synthesized
acuacauuugcaaucucucau

SEQ ID NO: 1956 - RNA, 21 nt, Artificial
  Chemically synthesized
ugaucacacgauucuccauca

SEQ ID NO: 1957 - RNA, 21 nt, Artificial
  Chemically synthesized
uaaggcagcccaaaggucugu

SEQ ID NO: 1958 - RNA, 21 nt, Artificial
  Chemically synthesized
guuuacucccauaauugcaaa

SEQ ID NO: 1959 - RNA, 21 nt, Artificial
  Chemically synthesized
ugcaaaugacucagugauaca

SEQ ID NO: 1960 - RNA, 21 nt, Artificial
  Chemically synthesized
gguugguccucucuuucuucg

SEQ ID NO: 1961 - RNA, 21 nt, Artificial
  Chemically synthesized
agaggguuuaaaaaguccagu

SEQ ID NO: 1962 - RNA, 21 nt, Artificial
  Chemically synthesized
uaagacugcagugaacaagca

SEQ ID NO: 1963 - RNA, 21 nt, Artificial
  Chemically synthesized
ucucuucuccuccugcaaaga

SEQ ID NO: 1964 - RNA, 21 nt, Artificial
  Chemically synthesized
uggguacgaguugccuuuagc

SEQ ID NO: 1965 - RNA, 21 nt, Artificial
  Chemically synthesized
ugccagguuucuuaaguuaca

SEQ ID NO: 1966 - RNA, 21 nt, Artificial
  Chemically synthesized
acaaagaaaaaagggauggac

SEQ ID NO: 1967 - RNA, 21 nt, Artificial
  Chemically synthesized
cuucucuucuccuccugcaaa

SEQ ID NO: 1968 - RNA, 21 nt, Artificial
  Chemically synthesized
aggaauacaaagaaacuugcu

SEQ ID NO: 1969 - RNA, 21 nt, Artificial
  Chemically synthesized
ccauauuaugagugcuuuaag

SEQ ID NO: 1970 - RNA, 21 nt, Artificial
  Chemically synthesized
aaacucucuagccacagcagu

SEQ ID NO: 1971 - RNA, 21 nt, Artificial
  Chemically synthesized
aaucuagggugaggaauacaa

SEQ ID NO: 1972 - RNA, 21 nt, Artificial
  Chemically synthesized
uccagucguagccuuugagca

SEQ ID NO: 1973 - RNA, 21 nt, Artificial
  Chemically synthesized
aaauauggaugacacaugcuu

SEQ ID NO: 1974 - RNA, 21 nt, Artificial
  Chemically synthesized
gagaagauguagagaaauaug

SEQ ID NO: 1975 - RNA, 21 nt, Artificial
  Chemically synthesized
uacaaaaauacucugguugca

SEQ ID NO: 1976 - RNA, 21 nt, Artificial
  Chemically synthesized
gucuugaagguuaacugcugg

SEQ ID NO: 1977 - RNA, 21 nt, Artificial
  Chemically synthesized
cucucguucagaagucuccag

SEQ ID NO: 1978 - RNA, 21 nt, Artificial
  Chemically synthesized
cuugacgugcggcuuguucuu

SEQ ID NO: 1979 - RNA, 21 nt, Artificial
  Chemically synthesized
cucucuagccacagcaguaau

SEQ ID NO: 1980 - RNA, 21 nt, Artificial
  Chemically synthesized
auguagagaaauauggaugac

SEQ ID NO: 1981 - RNA, 21 nt, Artificial
  Chemically synthesized
cacaugcuugcauuguuuuug

SEQ ID NO: 1982 - RNA, 21 nt, Artificial
  Chemically synthesized
uuuauacaaaucuagggugag

SEQ ID NO: 1983 - RNA, 21 nt, Artificial
  Chemically synthesized
accaaaugcuucucuagacua

SEQ ID NO: 1984 - RNA, 21 nt, Artificial
  Chemically synthesized
auacagaaauugaaggaugcc

SEQ ID NO: 1985 - RNA, 21 nt, Artificial
  Chemically synthesized
uaaggucugucagugggcuga

SEQ ID NO: 1986 - RNA, 21 nt, Artificial
  Chemically synthesized
aagaaacaaguuuccaguuug

SEQ ID NO: 1987 - RNA, 21 nt, Artificial
  Chemically synthesized
ucaucuccuuugcuugccuuu

SEQ ID NO: 1988 - RNA, 21 nt, Artificial
  Chemically synthesized
uucugagaggcacaggugaca

SEQ ID NO: 1989 - RNA, 21 nt, Artificial
  Chemically synthesized
cugaggaauuaagcaaaguua

SEQ ID NO: 1990 - RNA, 21 nt, Artificial
  Chemically synthesized
cacacugaucacacgauucuc

SEQ ID NO: 1991 - RNA, 21 nt, Artificial
  Chemically synthesized
cuuggauaggucauguuugug

SEQ ID NO: 1992 - RNA, 21 nt, Artificial
  Chemically synthesized
ugccauauuaugagugcuuua

SEQ ID NO: 1993 - RNA, 21 nt, Artificial
  Chemically synthesized
ucuuucuuaagacugcaguga

SEQ ID NO: 1994 - RNA, 21 nt, Artificial
  Chemically synthesized
uccucacagaggacuuuuuuc

SEQ ID NO: 1995 - RNA, 21 nt, Artificial
  Chemically synthesized
gcaauccucaaacucucuagc

SEQ ID NO: 1996 - RNA, 21 nt, Artificial
  Chemically synthesized
uuagcacacugaucacacgau

SEQ ID NO: 1997 - RNA, 21 nt, Artificial
  Chemically synthesized
agucaguuucgagcuccgcuu

SEQ ID NO: 1998 - RNA, 21 nt, Artificial
  Chemically synthesized
acauucccagaacagauuuca

SEQ ID NO: 1999 - RNA, 21 nt, Artificial
  Chemically synthesized
caaagaaaaaagggauggaca

SEQ ID NO: 2000 - RNA, 21 nt, Artificial
  Chemically synthesized
ugaagguuaacugcugguguu

SEQ ID NO: 2001 - RNA, 23 nt, Artificial
  Chemically synthesized
cgauuuaaggaggagcugccuua

SEQ ID NO: 2002 - RNA, 23 nt, Artificial
  Chemically synthesized
aagaaggagagcgaggaggacaa

SEQ ID NO: 2003 - RNA, 23 nt, Artificial
  Chemically synthesized
acaucuucucuuggagugaggga

SEQ ID NO: 2004 - RNA, 23 nt, Artificial
  Chemically synthesized
aagaugaccgacgagcaggagaa

SEQ ID NO: 2005 - RNA, 23 nt, Artificial
  Chemically synthesized
acagaccuuaaucuuaauuacug

SEQ ID NO: 2006 - RNA, 23 nt, Artificial
  Chemically synthesized
cuucuuuaaaauagguuguugga

SEQ ID NO: 2007 - RNA, 23 nt, Artificial
  Chemically synthesized
ccuagauuuguauaaaugccuuu

SEQ ID NO: 2008 - RNA, 23 nt, Artificial
  Chemically synthesized
gaguauuuuuguacagauuugcu

SEQ ID NO: 2009 - RNA, 23 nt, Artificial
  Chemically synthesized
uucagagcaagcguggaggauga

SEQ ID NO: 2010 - RNA, 23 nt, Artificial
  Chemically synthesized
cuuccuuaaagacauuuaagcua

SEQ ID NO: 2011 - RNA, 23 nt, Artificial
  Chemically synthesized
gaucagcccacugacagaccuua

SEQ ID NO: 2012 - RNA, 23 nt, Artificial
  Chemically synthesized
ccuucaauuucuguauaaaagca

SEQ ID NO: 2013 - RNA, 23 nt, Artificial
  Chemically synthesized
gucauuugcaguguuuucugcca

SEQ ID NO: 2014 - RNA, 23 nt, Artificial
  Chemically synthesized
cuguaacuuaagaaaccuggcau

SEQ ID NO: 2015 - RNA, 23 nt, Artificial
  Chemically synthesized
cauauuucucuacaucuucucuu

SEQ ID NO: 2016 - RNA, 23 nt, Artificial
  Chemically synthesized
agugugcccuagcuuuucuugca

SEQ ID NO: 2017 - RNA, 23 nt, Artificial
  Chemically synthesized
uucucuuggagugagggaggcua

SEQ ID NO: 2018 - RNA, 23 nt, Artificial
  Chemically synthesized
cccaaaccuuuuguucucuccgu

SEQ ID NO: 2019 - RNA, 23 nt, Artificial
  Chemically synthesized
ucuguaacuuaagaaaccuggca

SEQ ID NO: 2020 - RNA, 23 nt, Artificial
  Chemically synthesized
ccugccuuugcuuguucacugca

SEQ ID NO: 2021 - RNA, 23 nt, Artificial
  Chemically synthesized
gcuuuccucaaaggguaugguca

SEQ ID NO: 2022 - RNA, 23 nt, Artificial
  Chemically synthesized
cgcauuacccacuuguggccaau

SEQ ID NO: 2023 - RNA, 23 nt, Artificial
  Chemically synthesized
ccuuaaagacauuuaagcuaaag

SEQ ID NO: 2024 - RNA, 23 nt, Artificial
  Chemically synthesized
cagugugcccuagcuuuucuugc

SEQ ID NO: 2025 - RNA, 23 nt, Artificial
  Chemically synthesized
cugccuuugcuuguucacugcag

SEQ ID NO: 2026 - RNA, 23 nt, Artificial
  Chemically synthesized
gcuuuucuugcaaccagaguauu

SEQ ID NO: 2027 - RNA, 23 nt, Artificial
  Chemically synthesized
gcauuuccuccugccuuugcuug

SEQ ID NO: 2028 - RNA, 23 nt, Artificial
  Chemically synthesized
gaccacccggauuacaaguacca

SEQ ID NO: 2029 - RNA, 23 nt, Artificial
  Chemically synthesized
gugcauuuccuccugccuuugcu

SEQ ID NO: 2030 - RNA, 23 nt, Artificial
  Chemically synthesized
aacuggacuuuuuaaacccucuu

SEQ ID NO: 2031 - RNA, 23 nt, Artificial
  Chemically synthesized
gcgauuuaaggaggagcugccuu

SEQ ID NO: 2032 - RNA, 23 nt, Artificial
  Chemically synthesized
uuaaaauagguuguuggagcuuu

SEQ ID NO: 2033 - RNA, 23 nt, Artificial
  Chemically synthesized
cauuugcacucuuuuagugcauu

SEQ ID NO: 2034 - RNA, 23 nt, Artificial
  Chemically synthesized
cuuuaaaauagguuguuggagcu

SEQ ID NO: 2035 - RNA, 23 nt, Artificial
  Chemically synthesized
guguuuucugccacagaccuuug

SEQ ID NO: 2036 - RNA, 23 nt, Artificial
  Chemically synthesized
ccuucuuuaaaauagguuguugg

SEQ ID NO: 2037 - RNA, 23 nt, Artificial
  Chemically synthesized
ucuuaaagcacucauaauauggc

SEQ ID NO: 2038 - RNA, 23 nt, Artificial
  Chemically synthesized
cauuuccuccugccuuugcuugu

SEQ ID NO: 2039 - RNA, 23 nt, Artificial
  Chemically synthesized
aaacuggacuuuuuaaacccucu

SEQ ID NO: 2040 - RNA, 23 nt, Artificial
  Chemically synthesized
gccuuugcuuguucacugcaguc

SEQ ID NO: 2041 - RNA, 23 nt, Artificial
  Chemically synthesized
cuuauuuugcaauuaugggagua

SEQ ID NO: 2042 - RNA, 23 nt, Artificial
  Chemically synthesized
auuugcacucuuuuagugcauuu

SEQ ID NO: 2043 - RNA, 23 nt, Artificial
  Chemically synthesized
cuuuucuugcaaccagaguauuu

SEQ ID NO: 2044 - RNA, 23 nt, Artificial
  Chemically synthesized
uuguuucacuuguuucccuccca

SEQ ID NO: 2045 - RNA, 23 nt, Artificial
  Chemically synthesized
gucaucuccaacaucgagaccuu

SEQ ID NO: 2046 - RNA, 23 nt, Artificial
  Chemically synthesized
aucuuaauuacugcuguggcuag

SEQ ID NO: 2047 - RNA, 23 nt, Artificial
  Chemically synthesized
gagaaucgugugaucagugugcu

SEQ ID NO: 2048 - RNA, 23 nt, Artificial
  Chemically synthesized
agugcauuuccuccugccuuugc

SEQ ID NO: 2049 - RNA, 23 nt, Artificial
  Chemically synthesized
cgucaucuccaacaucgagaccu

SEQ ID NO: 2050 - RNA, 23 nt, Artificial
  Chemically synthesized
aguguuuucugccacagaccuuu

SEQ ID NO: 2051 - RNA, 23 nt, Artificial
  Chemically synthesized
uauuuuuccaacagcuaaacuac

SEQ ID NO: 2052 - RNA, 23 nt, Artificial
  Chemically synthesized
uguuucacuuguuucccucccag

SEQ ID NO: 2053 - RNA, 23 nt, Artificial
  Chemically synthesized
aaauagguuguuggagcuuuccu

SEQ ID NO: 2054 - RNA, 23 nt, Artificial
  Chemically synthesized
ucuuuaaaauagguuguuggagc

SEQ ID NO: 2055 - RNA, 23 nt, Artificial
  Chemically synthesized
guaucacugagucauuugcagug

SEQ ID NO: 2056 - RNA, 23 nt, Artificial
  Chemically synthesized
caucccuuuuuucuuuguuguuu

SEQ ID NO: 2057 - RNA, 23 nt, Artificial
  Chemically synthesized
ugccuuugcuuguucacugcagu

SEQ ID NO: 2058 - RNA, 23 nt, Artificial
  Chemically synthesized
uuuagugcauuuccuccugccuu

SEQ ID NO: 2059 - RNA, 23 nt, Artificial
  Chemically synthesized
uucagcagccaauaagugcccga

SEQ ID NO: 2060 - RNA, 23 nt, Artificial
  Chemically synthesized
gcaguaauuaaagaaaaaagucc

SEQ ID NO: 2061 - RNA, 23 nt, Artificial
  Chemically synthesized
acaacccgucuacacacagcuca

SEQ ID NO: 2062 - RNA, 23 nt, Artificial
  Chemically synthesized
cuuuagguaaaagcuuugguuug

SEQ ID NO: 2063 - RNA, 23 nt, Artificial
  Chemically synthesized
uaaaauagguuguuggagcuuuc

SEQ ID NO: 2064 - RNA, 23 nt, Artificial
  Chemically synthesized
ugcgauuuaaggaggagcugccu

SEQ ID NO: 2065 - RNA, 23 nt, Artificial
  Chemically synthesized
ccuauccaagcgcauuacccacu

SEQ ID NO: 2066 - RNA, 23 nt, Artificial
  Chemically synthesized
uuagugcauuuccuccugccuuu

SEQ ID NO: 2067 - RNA, 23 nt, Artificial
  Chemically synthesized
caucuucucuuggagugagggag

SEQ ID NO: 2068 - RNA, 23 nt, Artificial
  Chemically synthesized
guuuuguuuguuucacuuguuuc

SEQ ID NO: 2069 - RNA, 23 nt, Artificial
  Chemically synthesized
ccuuugcuuguucacugcagucu

SEQ ID NO: 2070 - RNA, 23 nt, Artificial
  Chemically synthesized
acucuuuuagugcauuuccuccu

SEQ ID NO: 2071 - RNA, 23 nt, Artificial
  Chemically synthesized
uguucugggaauguuucagcagc

SEQ ID NO: 2072 - RNA, 23 nt, Artificial
  Chemically synthesized
ugcauuuccuccugccuuugcuu

SEQ ID NO: 2073 - RNA, 23 nt, Artificial
  Chemically synthesized
acaaacuggaaacuuguuucuuu

SEQ ID NO: 2074 - RNA, 23 nt, Artificial
  Chemically synthesized
aauuaugggaguaaacaauaguc

SEQ ID NO: 2075 - RNA, 23 nt, Artificial
  Chemically synthesized
guuuguuucacuuguuucccucc

SEQ ID NO: 2076 - RNA, 23 nt, Artificial
  Chemically synthesized
gccuuaaaaaaaaauaaaggccu

SEQ ID NO: 2077 - RNA, 23 nt, Artificial
  Chemically synthesized
aaaaacaaugcaagcauguguca

SEQ ID NO: 2078 - RNA, 23 nt, Artificial
  Chemically synthesized
ucuacaucuucucuuggagugag

SEQ ID NO: 2079 - RNA, 23 nt, Artificial
  Chemically synthesized
cuuaaagacauuuaagcuaaagg

SEQ ID NO: 2080 - RNA, 23 nt, Artificial
  Chemically synthesized
acuggacuuuuuaaacccucuuc

SEQ ID NO: 2081 - RNA, 23 nt, Artificial
  Chemically synthesized
acuucuguaacuuaagaaaccug

SEQ ID NO: 2082 - RNA, 23 nt, Artificial
  Chemically synthesized
gcauuacccacuuguggccaauc

SEQ ID NO: 2083 - RNA, 23 nt, Artificial
  Chemically synthesized
cuucuguaacuuaagaaaccugg

SEQ ID NO: 2084 - RNA, 23 nt, Artificial
  Chemically synthesized
uugcgauuuaaggaggagcugcc

SEQ ID NO: 2085 - RNA, 23 nt, Artificial
  Chemically synthesized
accuauccaagcgcauuacccac

SEQ ID NO: 2086 - RNA, 23 nt, Artificial
  Chemically synthesized
cuucaauuucuguauaaaagcag

SEQ ID NO: 2087 - RNA, 23 nt, Artificial
  Chemically synthesized
acuuugcuuaauuccucaggcuu

SEQ ID NO: 2088 - RNA, 23 nt, Artificial
  Chemically synthesized
uaaacuacucuuaguugaacagu

SEQ ID NO: 2089 - RNA, 23 nt, Artificial
  Chemically synthesized
cucuuaguugaacagugugcccu

SEQ ID NO: 2090 - RNA, 23 nt, Artificial
  Chemically synthesized
guaaaagcuuugguuuguguucg

SEQ ID NO: 2091 - RNA, 23 nt, Artificial
  Chemically synthesized
agaguauuuuuguacagauuugc

SEQ ID NO: 2092 - RNA, 23 nt, Artificial
  Chemically synthesized
ucauuugcaguguuuucugccac

SEQ ID NO: 2093 - RNA, 23 nt, Artificial
  Chemically synthesized
ucuuccuuaaagacauuuaagcu

SEQ ID NO: 2094 - RNA, 23 nt, Artificial
  Chemically synthesized
caauuucuguauaaaagcagauc

SEQ ID NO: 2095 - RNA, 23 nt, Artificial
  Chemically synthesized
uuuaaaauagguuguuggagcuu

SEQ ID NO: 2096 - RNA, 23 nt, Artificial
  Chemically synthesized
cccuuuuuucuuuguuguuuuug

SEQ ID NO: 2097 - RNA, 23 nt, Artificial
  Chemically synthesized
ucuuuagguaaaagcuuugguuu

SEQ ID NO: 2098 - RNA, 23 nt, Artificial
  Chemically synthesized
cuacaucuucucuuggagugagg

SEQ ID NO: 2099 - RNA, 23 nt, Artificial
  Chemically synthesized
uuguuuguuucacuuguuucccu

SEQ ID NO: 2100 - RNA, 23 nt, Artificial
  Chemically synthesized
guuuucugccacagaccuuuggg

SEQ ID NO: 2101 - RNA, 23 nt, Artificial
  Chemically synthesized
caucuccaacaucgagaccuucg

SEQ ID NO: 2102 - RNA, 23 nt, Artificial
  Chemically synthesized
cucuuuuagugcauuuccuccug

SEQ ID NO: 2103 - RNA, 23 nt, Artificial
  Chemically synthesized
uuaaagacauuuaagcuaaaggc

SEQ ID NO: 2104 - RNA, 23 nt, Artificial
  Chemically synthesized
ccaaaccuuuuguucucuccgug

SEQ ID NO: 2105 - RNA, 23 nt, Artificial
  Chemically synthesized
aucuuaaagcacucauaauaugg

SEQ ID NO: 2106 - RNA, 23 nt, Artificial
  Chemically synthesized
cacucuuuuagugcauuuccucc

SEQ ID NO: 2107 - RNA, 23 nt, Artificial
  Chemically synthesized
aguaaacaauagucuagagaagc

SEQ ID NO: 2108 - RNA, 23 nt, Artificial
  Chemically synthesized
uguuuuuguugaaaacaaacugg

SEQ ID NO: 2109 - RNA, 23 nt, Artificial
  Chemically synthesized
aaacuacucuuaguugaacagug

SEQ ID NO: 2110 - RNA, 23 nt, Artificial
  Chemically synthesized
cuuuuagugcauuuccuccugcc

SEQ ID NO: 2111 - RNA, 23 nt, Artificial
  Chemically synthesized
auauuucucuacaucuucucuug

SEQ ID NO: 2112 - RNA, 23 nt, Artificial
  Chemically synthesized
aucacccgcucacaguacgacua

SEQ ID NO: 2113 - RNA, 23 nt, Artificial
  Chemically synthesized
uguaucacugagucauuugcagu

SEQ ID NO: 2114 - RNA, 23 nt, Artificial
  Chemically synthesized
uucuguaacuuaagaaaccuggc

SEQ ID NO: 2115 - RNA, 23 nt, Artificial
  Chemically synthesized
uuuguuucacuuguuucccuccc

SEQ ID NO: 2116 - RNA, 23 nt, Artificial
  Chemically synthesized
gcugccuuaaaaaaaaauaaagg

SEQ ID NO: 2117 - RNA, 23 nt, Artificial
  Chemically synthesized
uaaggcagcuccuccuuaaaucg

SEQ ID NO: 2118 - RNA, 23 nt, Artificial
  Chemically synthesized
uuguccuccucgcucuccuucuu

SEQ ID NO: 2119 - RNA, 23 nt, Artificial
  Chemically synthesized
ucccucacuccaagagaagaugu

SEQ ID NO: 2120 - RNA, 23 nt, Artificial
  Chemically synthesized
uucuccugcucgucggucaucuu

SEQ ID NO: 2121 - RNA, 23 nt, Artificial
  Chemically synthesized
caguaauuaagauuaaggucugu

SEQ ID NO: 2122 - RNA, 23 nt, Artificial
  Chemically synthesized
uccaacaaccuauuuuaaagaag

SEQ ID NO: 2123 - RNA, 23 nt, Artificial
  Chemically synthesized
aaaggcauuuauacaaaucuagg

SEQ ID NO: 2124 - RNA, 23 nt, Artificial
  Chemically synthesized
agcaaaucuguacaaaaauacuc

SEQ ID NO: 2125 - RNA, 23 nt, Artificial
  Chemically synthesized
ucauccuccacgcuugcucugaa

SEQ ID NO: 2126 - RNA, 23 nt, Artificial
  Chemically synthesized
uagcuuaaaugucuuuaaggaag

SEQ ID NO: 2127 - RNA, 23 nt, Artificial
  Chemically synthesized
uaaggucugucagugggcugauc

SEQ ID NO: 2128 - RNA, 23 nt, Artificial
  Chemically synthesized
ugcuuuuauacagaaauugaagg

SEQ ID NO: 2129 - RNA, 23 nt, Artificial
  Chemically synthesized
uggcagaaaacacugcaaaugac

SEQ ID NO: 2130 - RNA, 23 nt, Artificial
  Chemically synthesized
augccagguuucuuaaguuacag

SEQ ID NO: 2131 - RNA, 23 nt, Artificial
  Chemically synthesized
aagagaagauguagagaaauaug

SEQ ID NO: 2132 - RNA, 23 nt, Artificial
  Chemically synthesized
ugcaagaaaagcuagggcacacu

SEQ ID NO: 2133 - RNA, 23 nt, Artificial
  Chemically synthesized
uagccucccucacuccaagagaa

SEQ ID NO: 2134 - RNA, 23 nt, Artificial
  Chemically synthesized
acggagagaacaaaagguuuggg

SEQ ID NO: 2135 - RNA, 23 nt, Artificial
  Chemically synthesized
ugccagguuucuuaaguuacaga

SEQ ID NO: 2136 - RNA, 23 nt, Artificial
  Chemically synthesized
ugcagugaacaagcaaaggcagg

SEQ ID NO: 2137 - RNA, 23 nt, Artificial
  Chemically synthesized
ugaccauacccuuugaggaaagc

SEQ ID NO: 2138 - RNA, 23 nt, Artificial
  Chemically synthesized
auuggccacaaguggguaaugcg

SEQ ID NO: 2139 - RNA, 23 nt, Artificial
  Chemically synthesized
cuuuagcuuaaaugucuuuaagg

SEQ ID NO: 2140 - RNA, 23 nt, Artificial
  Chemically synthesized
gcaagaaaagcuagggcacacug

SEQ ID NO: 2141 - RNA, 23 nt, Artificial
  Chemically synthesized
cugcagugaacaagcaaaggcag

SEQ ID NO: 2142 - RNA, 23 nt, Artificial
  Chemically synthesized
aauacucugguugcaagaaaagc

SEQ ID NO: 2143 - RNA, 23 nt, Artificial
  Chemically synthesized
caagcaaaggcaggaggaaaugc

SEQ ID NO: 2144 - RNA, 23 nt, Artificial
  Chemically synthesized
ugguacuuguaauccgggugguc

SEQ ID NO: 2145 - RNA, 23 nt, Artificial
  Chemically synthesized
agcaaaggcaggaggaaaugcac

SEQ ID NO: 2146 - RNA, 23 nt, Artificial
  Chemically synthesized
aagaggguuuaaaaaguccaguu

SEQ ID NO: 2147 - RNA, 23 nt, Artificial
  Chemically synthesized
aaggcagcuccuccuuaaaucgc

SEQ ID NO: 2148 - RNA, 23 nt, Artificial
  Chemically synthesized
aaagcuccaacaaccuauuuuaa

SEQ ID NO: 2149 - RNA, 23 nt, Artificial
  Chemically synthesized
aaugcacuaaaagagugcaaaug

SEQ ID NO: 2150 - RNA, 23 nt, Artificial
  Chemically synthesized
agcuccaacaaccuauuuuaaag

SEQ ID NO: 2151 - RNA, 23 nt, Artificial
  Chemically synthesized
caaaggucuguggcagaaaacac

SEQ ID NO: 2152 - RNA, 23 nt, Artificial
  Chemically synthesized
ccaacaaccuauuuuaaagaagg

SEQ ID NO: 2153 - RNA, 23 nt, Artificial
  Chemically synthesized
gccauauuaugagugcuuuaaga

SEQ ID NO: 2154 - RNA, 23 nt, Artificial
  Chemically synthesized
acaagcaaaggcaggaggaaaug

SEQ ID NO: 2155 - RNA, 23 nt, Artificial
  Chemically synthesized
agaggguuuaaaaaguccaguuu

SEQ ID NO: 2156 - RNA, 23 nt, Artificial
  Chemically synthesized
gacugcagugaacaagcaaaggc

SEQ ID NO: 2157 - RNA, 23 nt, Artificial
  Chemically synthesized
uacucccauaauugcaaaauaag

SEQ ID NO: 2158 - RNA, 23 nt, Artificial
  Chemically synthesized
aaaugcacuaaaagagugcaaau

SEQ ID NO: 2159 - RNA, 23 nt, Artificial
  Chemically synthesized
aaauacucugguugcaagaaaag

SEQ ID NO: 2160 - RNA, 23 nt, Artificial
  Chemically synthesized
ugggagggaaacaagugaaacaa

SEQ ID NO: 2161 - RNA, 23 nt, Artificial
  Chemically synthesized
aaggucucgauguuggagaugac

SEQ ID NO: 2162 - RNA, 23 nt, Artificial
  Chemically synthesized
cuagccacagcaguaauuaagau

SEQ ID NO: 2163 - RNA, 23 nt, Artificial
  Chemically synthesized
agcacacugaucacacgauucuc

SEQ ID NO: 2164 - RNA, 23 nt, Artificial
  Chemically synthesized
gcaaaggcaggaggaaaugcacu

SEQ ID NO: 2165 - RNA, 23 nt, Artificial
  Chemically synthesized
aggucucgauguuggagaugacg

SEQ ID NO: 2166 - RNA, 23 nt, Artificial
  Chemically synthesized
aaaggucuguggcagaaaacacu

SEQ ID NO: 2167 - RNA, 23 nt, Artificial
  Chemically synthesized
guaguuuagcuguuggaaaaaua

SEQ ID NO: 2168 - RNA, 23 nt, Artificial
  Chemically synthesized
cugggagggaaacaagugaaaca

SEQ ID NO: 2169 - RNA, 23 nt, Artificial
  Chemically synthesized
aggaaagcuccaacaaccuauuu

SEQ ID NO: 2170 - RNA, 23 nt, Artificial
  Chemically synthesized
gcuccaacaaccuauuuuaaaga

SEQ ID NO: 2171 - RNA, 23 nt, Artificial
  Chemically synthesized
cacugcaaaugacucagugauac

SEQ ID NO: 2172 - RNA, 23 nt, Artificial
  Chemically synthesized
aaacaacaaagaaaaaagggaug

SEQ ID NO: 2173 - RNA, 23 nt, Artificial
  Chemically synthesized
acugcagugaacaagcaaaggca

SEQ ID NO: 2174 - RNA, 23 nt, Artificial
  Chemically synthesized
aaggcaggaggaaaugcacuaaa

SEQ ID NO: 2175 - RNA, 23 nt, Artificial
  Chemically synthesized
ucgggcacuuauuggcugcugaa

SEQ ID NO: 2176 - RNA, 23 nt, Artificial
  Chemically synthesized
ggacuuuuuucuuuaauuacugc

SEQ ID NO: 2177 - RNA, 23 nt, Artificial
  Chemically synthesized
ugagcuguguguagacggguugu

SEQ ID NO: 2178 - RNA, 23 nt, Artificial
  Chemically synthesized
caaaccaaagcuuuuaccuaaag

SEQ ID NO: 2179 - RNA, 23 nt, Artificial
  Chemically synthesized
gaaagcuccaacaaccuauuuua

SEQ ID NO: 2180 - RNA, 23 nt, Artificial
  Chemically synthesized
aggcagcuccuccuuaaaucgca

SEQ ID NO: 2181 - RNA, 23 nt, Artificial
  Chemically synthesized
aguggguaaugcgcuuggauagg

SEQ ID NO: 2182 - RNA, 23 nt, Artificial
  Chemically synthesized
aaaggcaggaggaaaugcacuaa

SEQ ID NO: 2183 - RNA, 23 nt, Artificial
  Chemically synthesized
cucccucacuccaagagaagaug

SEQ ID NO: 2184 - RNA, 23 nt, Artificial
  Chemically synthesized
gaaacaagugaaacaaacaaaac

SEQ ID NO: 2185 - RNA, 23 nt, Artificial
  Chemically synthesized
agacugcagugaacaagcaaagg

SEQ ID NO: 2186 - RNA, 23 nt, Artificial
  Chemically synthesized
aggaggaaaugcacuaaaagagu

SEQ ID NO: 2187 - RNA, 23 nt, Artificial
  Chemically synthesized
gcugcugaaacauucccagaaca

SEQ ID NO: 2188 - RNA, 23 nt, Artificial
  Chemically synthesized
aagcaaaggcaggaggaaaugca

SEQ ID NO: 2189 - RNA, 23 nt, Artificial
  Chemically synthesized
aaagaaacaaguuuccaguuugu

SEQ ID NO: 2190 - RNA, 23 nt, Artificial
  Chemically synthesized
gacuauuguuuacucccauaauu

SEQ ID NO: 2191 - RNA, 23 nt, Artificial
  Chemically synthesized
ggagggaaacaagugaaacaaac

SEQ ID NO: 2192 - RNA, 23 nt, Artificial
  Chemically synthesized
aggccuuuauuuuuuuuuaaggc

SEQ ID NO: 2193 - RNA, 23 nt, Artificial
  Chemically synthesized
ugacacaugcuugcauuguuuuu

SEQ ID NO: 2194 - RNA, 23 nt, Artificial
  Chemically synthesized
cucacuccaagagaagauguaga

SEQ ID NO: 2195 - RNA, 23 nt, Artificial
  Chemically synthesized
ccuuuagcuuaaaugucuuuaag

SEQ ID NO: 2196 - RNA, 23 nt, Artificial
  Chemically synthesized
gaagaggguuuaaaaaguccagu

SEQ ID NO: 2197 - RNA, 23 nt, Artificial
  Chemically synthesized
cagguuucuuaaguuacagaagu

SEQ ID NO: 2198 - RNA, 23 nt, Artificial
  Chemically synthesized
gauuggccacaaguggguaaugc

SEQ ID NO: 2199 - RNA, 23 nt, Artificial
  Chemically synthesized
ccagguuucuuaaguuacagaag

SEQ ID NO: 2200 - RNA, 23 nt, Artificial
  Chemically synthesized
ggcagcuccuccuuaaaucgcaa

SEQ ID NO: 2201 - RNA, 23 nt, Artificial
  Chemically synthesized
guggguaaugcgcuuggauaggu

SEQ ID NO: 2202 - RNA, 23 nt, Artificial
  Chemically synthesized
cugcuuuuauacagaaauugaag

SEQ ID NO: 2203 - RNA, 23 nt, Artificial
  Chemically synthesized
aagccugaggaauuaagcaaagu

SEQ ID NO: 2204 - RNA, 23 nt, Artificial
  Chemically synthesized
acuguucaacuaagaguaguuua

SEQ ID NO: 2205 - RNA, 23 nt, Artificial
  Chemically synthesized
agggcacacuguucaacuaagag

SEQ ID NO: 2206 - RNA, 23 nt, Artificial
  Chemically synthesized
cgaacacaaaccaaagcuuuuac

SEQ ID NO: 2207 - RNA, 23 nt, Artificial
  Chemically synthesized
gcaaaucuguacaaaaauacucu

SEQ ID NO: 2208 - RNA, 23 nt, Artificial
  Chemically synthesized
guggcagaaaacacugcaaauga

SEQ ID NO: 2209 - RNA, 23 nt, Artificial
  Chemically synthesized
agcuuaaaugucuuuaaggaaga

SEQ ID NO: 2210 - RNA, 23 nt, Artificial
  Chemically synthesized
gaucugcuuuuauacagaaauug

SEQ ID NO: 2211 - RNA, 23 nt, Artificial
  Chemically synthesized
aagcuccaacaaccuauuuuaaa

SEQ ID NO: 2212 - RNA, 23 nt, Artificial
  Chemically synthesized
caaaaacaacaaagaaaaaaggg

SEQ ID NO: 2213 - RNA, 23 nt, Artificial
  Chemically synthesized
aaaccaaagcuuuuaccuaaaga

SEQ ID NO: 2214 - RNA, 23 nt, Artificial
  Chemically synthesized
ccucacuccaagagaagauguag

SEQ ID NO: 2215 - RNA, 23 nt, Artificial
  Chemically synthesized
agggaaacaagugaaacaaacaa

SEQ ID NO: 2216 - RNA, 23 nt, Artificial
  Chemically synthesized
cccaaaggucuguggcagaaaac

SEQ ID NO: 2217 - RNA, 23 nt, Artificial
  Chemically synthesized
cgaaggucucgauguuggagaug

SEQ ID NO: 2218 - RNA, 23 nt, Artificial
  Chemically synthesized
caggaggaaaugcacuaaaagag

SEQ ID NO: 2219 - RNA, 23 nt, Artificial
  Chemically synthesized
gccuuuagcuuaaaugucuuuaa

SEQ ID NO: 2220 - RNA, 23 nt, Artificial
  Chemically synthesized
cacggagagaacaaaagguuugg

SEQ ID NO: 2221 - RNA, 23 nt, Artificial
  Chemically synthesized
ccauauuaugagugcuuuaagau

SEQ ID NO: 2222 - RNA, 23 nt, Artificial
  Chemically synthesized
ggaggaaaugcacuaaaagagug

SEQ ID NO: 2223 - RNA, 23 nt, Artificial
  Chemically synthesized
gcuucucuagacuauuguuuacu

SEQ ID NO: 2224 - RNA, 23 nt, Artificial
  Chemically synthesized
ccaguuuguuuucaacaaaaaca

SEQ ID NO: 2225 - RNA, 23 nt, Artificial
  Chemically synthesized
cacuguucaacuaagaguaguuu

SEQ ID NO: 2226 - RNA, 23 nt, Artificial
  Chemically synthesized
ggcaggaggaaaugcacuaaaag

SEQ ID NO: 2227 - RNA, 23 nt, Artificial
  Chemically synthesized
caagagaagauguagagaaauau

SEQ ID NO: 2228 - RNA, 23 nt, Artificial
  Chemically synthesized
uagucguacugugagcgggugau

SEQ ID NO: 2229 - RNA, 23 nt, Artificial
  Chemically synthesized
acugcaaaugacucagugauaca

SEQ ID NO: 2230 - RNA, 23 nt, Artificial
  Chemically synthesized
gccagguuucuuaaguuacagaa

SEQ ID NO: 2231 - RNA, 23 nt, Artificial
  Chemically synthesized
gggagggaaacaagugaaacaaa

SEQ ID NO: 2232 - RNA, 23 nt, Artificial
  Chemically synthesized
ccuuuauuuuuuuuuaaggcagc

SEQ ID NO: 2233 - RNA, 23 nt, Artificial
  Chemically synthesized
gacagaccuuaaucuuaauuacu

SEQ ID NO: 2234 - RNA, 23 nt, Artificial
  Chemically synthesized
ugacagaccuuaaucuuaauuac

SEQ ID NO: 2235 - RNA, 23 nt, Artificial
  Chemically synthesized
cugacagaccuuaaucuuaauua

SEQ ID NO: 2236 - RNA, 23 nt, Artificial
  Chemically synthesized
acugacagaccuuaaucuuaauu

SEQ ID NO: 2237 - RNA, 23 nt, Artificial
  Chemically synthesized
cacugacagaccuuaaucuuaau

SEQ ID NO: 2238 - RNA, 23 nt, Artificial
  Chemically synthesized
ccgagaugauccuaaaaauaacc

SEQ ID NO: 2239 - RNA, 23 nt, Artificial
  Chemically synthesized
gccgagaugauccuaaaaauaac

SEQ ID NO: 2240 - RNA, 23 nt, Artificial
  Chemically synthesized
ggccgagaugauccuaaaaauaa

SEQ ID NO: 2241 - RNA, 23 nt, Artificial
  Chemically synthesized
uggccgagaugauccuaaaaaua

SEQ ID NO: 2242 - RNA, 23 nt, Artificial
  Chemically synthesized
auggccgagaugauccuaaaaau

SEQ ID NO: 2243 - RNA, 23 nt, Artificial
  Chemically synthesized
cguggaggaugauggagaaucgu

SEQ ID NO: 2244 - RNA, 23 nt, Artificial
  Chemically synthesized
gcguggaggaugauggagaaucg

SEQ ID NO: 2245 - RNA, 23 nt, Artificial
  Chemically synthesized
agcguggaggaugauggagaauc

SEQ ID NO: 2246 - RNA, 23 nt, Artificial
  Chemically synthesized
aagcguggaggaugauggagaau

SEQ ID NO: 2247 - RNA, 23 nt, Artificial
  Chemically synthesized
caagcguggaggaugauggagaa

SEQ ID NO: 2248 - RNA, 23 nt, Artificial
  Chemically synthesized
ggagcugccuuaaaaaaaaauaa

SEQ ID NO: 2249 - RNA, 23 nt, Artificial
  Chemically synthesized
aggagcugccuuaaaaaaaaaua

SEQ ID NO: 2250 - RNA, 23 nt, Artificial
  Chemically synthesized
gaggagcugccuuaaaaaaaaau

SEQ ID NO: 2251 - RNA, 23 nt, Artificial
  Chemically synthesized
ggaggagcugccuuaaaaaaaaa

SEQ ID NO: 2252 - RNA, 23 nt, Artificial
  Chemically synthesized
aggaggagcugccuuaaaaaaaa

SEQ ID NO: 2253 - RNA, 23 nt, Artificial
  Chemically synthesized
ggaggaagucggugaagaacggg

SEQ ID NO: 2254 - RNA, 23 nt, Artificial
  Chemically synthesized
cggaggaagucggugaagaacgg

SEQ ID NO: 2255 - RNA, 23 nt, Artificial
  Chemically synthesized
gcggaggaagucggugaagaacg

SEQ ID NO: 2256 - RNA, 23 nt, Artificial
  Chemically synthesized
ggcggaggaagucggugaagaac

SEQ ID NO: 2257 - RNA, 23 nt, Artificial
  Chemically synthesized
cggcggaggaagucggugaagaa

SEQ ID NO: 2258 - RNA, 23 nt, Artificial
  Chemically synthesized
cgagaugauccuaaaaauaaccg

SEQ ID NO: 2259 - RNA, 23 nt, Artificial
  Chemically synthesized
ccuucaaccucccacacuacagc

SEQ ID NO: 2260 - RNA, 23 nt, Artificial
  Chemically synthesized
cccuucaaccucccacacuacag

SEQ ID NO: 2261 - RNA, 23 nt, Artificial
  Chemically synthesized
ccccuucaaccucccacacuaca

SEQ ID NO: 2262 - RNA, 23 nt, Artificial
  Chemically synthesized
gccccuucaaccucccacacuac

SEQ ID NO: 2263 - RNA, 23 nt, Artificial
  Chemically synthesized
agccccuucaaccucccacacua

SEQ ID NO: 2264 - RNA, 23 nt, Artificial
  Chemically synthesized
aaggaggagcugccuuaaaaaaa

SEQ ID NO: 2265 - RNA, 23 nt, Artificial
  Chemically synthesized
uaaggaggagcugccuuaaaaaa

SEQ ID NO: 2266 - RNA, 23 nt, Artificial
  Chemically synthesized
uuaaggaggagcugccuuaaaaa

SEQ ID NO: 2267 - RNA, 23 nt, Artificial
  Chemically synthesized
gcucgaaacugacuggaaacuuc

SEQ ID NO: 2268 - RNA, 23 nt, Artificial
  Chemically synthesized
agcucgaaacugacuggaaacuu

SEQ ID NO: 2269 - RNA, 23 nt, Artificial
  Chemically synthesized
gagcucgaaacugacuggaaacu

SEQ ID NO: 2270 - RNA, 23 nt, Artificial
  Chemically synthesized
ggagcucgaaacugacuggaaac

SEQ ID NO: 2271 - RNA, 23 nt, Artificial
  Chemically synthesized
cggagcucgaaacugacuggaaa

SEQ ID NO: 2272 - RNA, 23 nt, Artificial
  Chemically synthesized
gagguaaaaggcaagcaaaggag

SEQ ID NO: 2273 - RNA, 23 nt, Artificial
  Chemically synthesized
agagguaaaaggcaagcaaagga

SEQ ID NO: 2274 - RNA, 23 nt, Artificial
  Chemically synthesized
aagagguaaaaggcaagcaaagg

SEQ ID NO: 2275 - RNA, 23 nt, Artificial
  Chemically synthesized
aaagagguaaaaggcaagcaaag

SEQ ID NO: 2276 - RNA, 23 nt, Artificial
  Chemically synthesized
gaaagagguaaaaggcaagcaaa

SEQ ID NO: 2277 - RNA, 23 nt, Artificial
  Chemically synthesized
cagcgaaaucaacgagaaacugg

SEQ ID NO: 2278 - RNA, 23 nt, Artificial
  Chemically synthesized
gcagcgaaaucaacgagaaacug

SEQ ID NO: 2279 - RNA, 23 nt, Artificial
  Chemically synthesized
agcagcgaaaucaacgagaaacu

SEQ ID NO: 2280 - RNA, 23 nt, Artificial
  Chemically synthesized
gagcagcgaaaucaacgagaaac

SEQ ID NO: 2281 - RNA, 23 nt, Artificial
  Chemically synthesized
ggagcagcgaaaucaacgagaaa

SEQ ID NO: 2282 - RNA, 23 nt, Artificial
  Chemically synthesized
gauccuaaaaauaaccgaagaaa

SEQ ID NO: 2283 - RNA, 23 nt, Artificial
  Chemically synthesized
ugauccuaaaaauaaccgaagaa

SEQ ID NO: 2284 - RNA, 23 nt, Artificial
  Chemically synthesized
augauccuaaaaauaaccgaaga

SEQ ID NO: 2285 - RNA, 23 nt, Artificial
  Chemically synthesized
gaugauccuaaaaauaaccgaag

SEQ ID NO: 2286 - RNA, 23 nt, Artificial
  Chemically synthesized
agaugauccuaaaaauaaccgaa

SEQ ID NO: 2287 - RNA, 23 nt, Artificial
  Chemically synthesized
ccacugacagaccuuaaucuuaa

SEQ ID NO: 2288 - RNA, 23 nt, Artificial
  Chemically synthesized
cgaagauggccgagaugauccua

SEQ ID NO: 2289 - RNA, 23 nt, Artificial
  Chemically synthesized
gcgaagauggccgagaugauccu

SEQ ID NO: 2290 - RNA, 23 nt, Artificial
  Chemically synthesized
ggcgaagauggccgagaugaucc

SEQ ID NO: 2291 - RNA, 23 nt, Artificial
  Chemically synthesized
gggcgaagauggccgagaugauc

SEQ ID NO: 2292 - RNA, 23 nt, Artificial
  Chemically synthesized
agggcgaagauggccgagaugau

SEQ ID NO: 2293 - RNA, 23 nt, Artificial
  Chemically synthesized
ccuuaaucuuaauuacugcugug

SEQ ID NO: 2294 - RNA, 23 nt, Artificial
  Chemically synthesized
accuuaaucuuaauuacugcugu

SEQ ID NO: 2295 - RNA, 23 nt, Artificial
  Chemically synthesized
gaccuuaaucuuaauuacugcug

SEQ ID NO: 2296 - RNA, 23 nt, Artificial
  Chemically synthesized
agaccuuaaucuuaauuacugcu

SEQ ID NO: 2297 - RNA, 23 nt, Artificial
  Chemically synthesized
cagaccuuaaucuuaauuacugc

SEQ ID NO: 2298 - RNA, 23 nt, Artificial
  Chemically synthesized
uggagcagcgaaaucaacgagaa

SEQ ID NO: 2299 - RNA, 23 nt, Artificial
  Chemically synthesized
ccuaaaaauaaccgaagaaagag

SEQ ID NO: 2300 - RNA, 23 nt, Artificial
  Chemically synthesized
uccuaaaaauaaccgaagaaaga

SEQ ID NO: 2301 - RNA, 23 nt, Artificial
  Chemically synthesized
auccuaaaaauaaccgaagaaag

SEQ ID NO: 2302 - RNA, 23 nt, Artificial
  Chemically synthesized
gauggccgagaugauccuaaaaa

SEQ ID NO: 2303 - RNA, 23 nt, Artificial
  Chemically synthesized
agauggccgagaugauccuaaaa

SEQ ID NO: 2304 - RNA, 23 nt, Artificial
  Chemically synthesized
cgaagaaagagaggaccaaccag

SEQ ID NO: 2305 - RNA, 23 nt, Artificial
  Chemically synthesized
ccgaagaaagagaggaccaacca

SEQ ID NO: 2306 - RNA, 23 nt, Artificial
  Chemically synthesized
accgaagaaagagaggaccaacc

SEQ ID NO: 2307 - RNA, 23 nt, Artificial
  Chemically synthesized
aaccgaagaaagagaggaccaac

SEQ ID NO: 2308 - RNA, 23 nt, Artificial
  Chemically synthesized
uaaccgaagaaagagaggaccaa

SEQ ID NO: 2309 - RNA, 23 nt, Artificial
  Chemically synthesized
aguugaacagugugcccuagcuu

SEQ ID NO: 2310 - RNA, 23 nt, Artificial
  Chemically synthesized
uaguugaacagugugcccuagcu

SEQ ID NO: 2311 - RNA, 23 nt, Artificial
  Chemically synthesized
uuaguugaacagugugcccuagc

SEQ ID NO: 2312 - RNA, 23 nt, Artificial
  Chemically synthesized
cuuaguugaacagugugcccuag

SEQ ID NO: 2313 - RNA, 23 nt, Artificial
  Chemically synthesized
ucuuaguugaacagugugcccua

SEQ ID NO: 2314 - RNA, 23 nt, Artificial
  Chemically synthesized
gccuguuuggacuuuguaauuau

SEQ ID NO: 2315 - RNA, 23 nt, Artificial
  Chemically synthesized
ugccuguuuggacuuuguaauua

SEQ ID NO: 2316 - RNA, 23 nt, Artificial
  Chemically synthesized
cugccuguuuggacuuuguaauu

SEQ ID NO: 2317 - RNA, 23 nt, Artificial
  Chemically synthesized
ucugccuguuuggacuuuguaau

SEQ ID NO: 2318 - RNA, 23 nt, Artificial
  Chemically synthesized
cucugccuguuuggacuuuguaa

SEQ ID NO: 2319 - RNA, 23 nt, Artificial
  Chemically synthesized
aaacggugcugcugggaaacauu

SEQ ID NO: 2320 - RNA, 23 nt, Artificial
  Chemically synthesized
aaaacggugcugcugggaaacau

SEQ ID NO: 2321 - RNA, 23 nt, Artificial
  Chemically synthesized
uaaaacggugcugcugggaaaca

SEQ ID NO: 2322 - RNA, 23 nt, Artificial
  Chemically synthesized
uuaaaacggugcugcugggaaac

SEQ ID NO: 2323 - RNA, 23 nt, Artificial
  Chemically synthesized
cuuaaaacggugcugcugggaaa

SEQ ID NO: 2324 - RNA, 23 nt, Artificial
  Chemically synthesized
agaacaagccgcacgucaagcgg

SEQ ID NO: 2325 - RNA, 23 nt, Artificial
  Chemically synthesized
aagaacaagccgcacgucaagcg

SEQ ID NO: 2326 - RNA, 23 nt, Artificial
  Chemically synthesized
caagaacaagccgcacgucaagc

SEQ ID NO: 2327 - RNA, 23 nt, Artificial
  Chemically synthesized
gcaagaacaagccgcacgucaag

SEQ ID NO: 2328 - RNA, 23 nt, Artificial
  Chemically synthesized
agcaagaacaagccgcacgucaa

SEQ ID NO: 2329 - RNA, 23 nt, Artificial
  Chemically synthesized
gagaugauccuaaaaauaaccga

SEQ ID NO: 2330 - RNA, 23 nt, Artificial
  Chemically synthesized
uuuaaggaggagcugccuuaaaa

SEQ ID NO: 2331 - RNA, 23 nt, Artificial
  Chemically synthesized
uaagaaaccuggcauuuaaauca

SEQ ID NO: 2332 - RNA, 23 nt, Artificial
  Chemically synthesized
uuaagaaaccuggcauuuaaauc

SEQ ID NO: 2333 - RNA, 23 nt, Artificial
  Chemically synthesized
cuuaagaaaccuggcauuuaaau

SEQ ID NO: 2334 - RNA, 23 nt, Artificial
  Chemically synthesized
acuuaagaaaccuggcauuuaaa

SEQ ID NO: 2335 - RNA, 23 nt, Artificial
  Chemically synthesized
aacuuaagaaaccuggcauuuaa

SEQ ID NO: 2336 - RNA, 23 nt, Artificial
  Chemically synthesized
aauggagcagcgaaaucaacgag

SEQ ID NO: 2337 - RNA, 23 nt, Artificial
  Chemically synthesized
aaauggagcagcgaaaucaacga

SEQ ID NO: 2338 - RNA, 23 nt, Artificial
  Chemically synthesized
uaaauggagcagcgaaaucaacg

SEQ ID NO: 2339 - RNA, 23 nt, Artificial
  Chemically synthesized
cuaaauggagcagcgaaaucaac

SEQ ID NO: 2340 - RNA, 23 nt, Artificial
  Chemically synthesized
gcuaaauggagcagcgaaaucaa

SEQ ID NO: 2341 - RNA, 23 nt, Artificial
  Chemically synthesized
gcaagcaaaggagaugaaaucug

SEQ ID NO: 2342 - RNA, 23 nt, Artificial
  Chemically synthesized
ggcaagcaaaggagaugaaaucu

SEQ ID NO: 2343 - RNA, 23 nt, Artificial
  Chemically synthesized
aggcaagcaaaggagaugaaauc

SEQ ID NO: 2344 - RNA, 23 nt, Artificial
  Chemically synthesized
aaggcaagcaaaggagaugaaau

SEQ ID NO: 2345 - RNA, 23 nt, Artificial
  Chemically synthesized
aaaggcaagcaaaggagaugaaa

SEQ ID NO: 2346 - RNA, 23 nt, Artificial
  Chemically synthesized
gaagagaaaaacaccuugagccu

SEQ ID NO: 2347 - RNA, 23 nt, Artificial
  Chemically synthesized
agaagagaaaaacaccuugagcc

SEQ ID NO: 2348 - RNA, 23 nt, Artificial
  Chemically synthesized
aagaagagaaaaacaccuugagc

SEQ ID NO: 2349 - RNA, 23 nt, Artificial
  Chemically synthesized
aaagaagagaaaaacaccuugag

SEQ ID NO: 2350 - RNA, 23 nt, Artificial
  Chemically synthesized
uaaagaagagaaaaacaccuuga

SEQ ID NO: 2351 - RNA, 23 nt, Artificial
  Chemically synthesized
caauuaugggaguaaacaauagu

SEQ ID NO: 2352 - RNA, 23 nt, Artificial
  Chemically synthesized
gcaauuaugggaguaaacaauag

SEQ ID NO: 2353 - RNA, 23 nt, Artificial
  Chemically synthesized
ugcaauuaugggaguaaacaaua

SEQ ID NO: 2354 - RNA, 23 nt, Artificial
  Chemically synthesized
uugcaauuaugggaguaaacaau

SEQ ID NO: 2355 - RNA, 23 nt, Artificial
  Chemically synthesized
uuugcaauuaugggaguaaacaa

SEQ ID NO: 2356 - RNA, 23 nt, Artificial
  Chemically synthesized
cgugaaacuuaccuuucccuuuu

SEQ ID NO: 2357 - RNA, 23 nt, Artificial
  Chemically synthesized
ccgugaaacuuaccuuucccuuu

SEQ ID NO: 2358 - RNA, 23 nt, Artificial
  Chemically synthesized
uccgugaaacuuaccuuucccuu

SEQ ID NO: 2359 - RNA, 23 nt, Artificial
  Chemically synthesized
cuccgugaaacuuaccuuucccu

SEQ ID NO: 2360 - RNA, 23 nt, Artificial
  Chemically synthesized
ucuccgugaaacuuaccuuuccc

SEQ ID NO: 2361 - RNA, 23 nt, Artificial
  Chemically synthesized
agaaagagguaaaaggcaagcaa

SEQ ID NO: 2362 - RNA, 23 nt, Artificial
  Chemically synthesized
gaauguuucagcagccaauaagu

SEQ ID NO: 2363 - RNA, 23 nt, Artificial
  Chemically synthesized
ggaauguuucagcagccaauaag

SEQ ID NO: 2364 - RNA, 23 nt, Artificial
  Chemically synthesized
gggaauguuucagcagccaauaa

SEQ ID NO: 2365 - RNA, 23 nt, Artificial
  Chemically synthesized
ugggaauguuucagcagccaaua

SEQ ID NO: 2366 - RNA, 23 nt, Artificial
  Chemically synthesized
cugggaauguuucagcagccaau

SEQ ID NO: 2367 - RNA, 23 nt, Artificial
  Chemically synthesized
uguugaaaacaaacuggaaacuu

SEQ ID NO: 2368 - RNA, 23 nt, Artificial
  Chemically synthesized
uuguugaaaacaaacuggaaacu

SEQ ID NO: 2369 - RNA, 23 nt, Artificial
  Chemically synthesized
uuuguugaaaacaaacuggaaac

SEQ ID NO: 2370 - RNA, 23 nt, Artificial
  Chemically synthesized
uuuuguugaaaacaaacuggaaa

SEQ ID NO: 2371 - RNA, 23 nt, Artificial
  Chemically synthesized
uuuuuguugaaaacaaacuggaa

SEQ ID NO: 2372 - RNA, 23 nt, Artificial
  Chemically synthesized
gugugaucagugugcuaaaucuc

SEQ ID NO: 2373 - RNA, 23 nt, Artificial
  Chemically synthesized
cgugugaucagugugcuaaaucu

SEQ ID NO: 2374 - RNA, 23 nt, Artificial
  Chemically synthesized
ucgugugaucagugugcuaaauc

SEQ ID NO: 2375 - RNA, 23 nt, Artificial
  Chemically synthesized
aucgugugaucagugugcuaaau

SEQ ID NO: 2376 - RNA, 23 nt, Artificial
  Chemically synthesized
aaucgugugaucagugugcuaaa

SEQ ID NO: 2377 - RNA, 23 nt, Artificial
  Chemically synthesized
cgagaaacuggacuuuuuaaacc

SEQ ID NO: 2378 - RNA, 23 nt, Artificial
  Chemically synthesized
acgagaaacuggacuuuuuaaac

SEQ ID NO: 2379 - RNA, 23 nt, Artificial
  Chemically synthesized
aacgagaaacuggacuuuuuaaa

SEQ ID NO: 2380 - RNA, 23 nt, Artificial
  Chemically synthesized
caacgagaaacuggacuuuuuaa

SEQ ID NO: 2381 - RNA, 23 nt, Artificial
  Chemically synthesized
ucaacgagaaacuggacuuuuua

SEQ ID NO: 2382 - RNA, 23 nt, Artificial
  Chemically synthesized
cucguacccaaauuuccaagaca

SEQ ID NO: 2383 - RNA, 23 nt, Artificial
  Chemically synthesized
acucguacccaaauuuccaagac

SEQ ID NO: 2384 - RNA, 23 nt, Artificial
  Chemically synthesized
aacucguacccaaauuuccaaga

SEQ ID NO: 2385 - RNA, 23 nt, Artificial
  Chemically synthesized
caacucguacccaaauuuccaag

SEQ ID NO: 2386 - RNA, 23 nt, Artificial
  Chemically synthesized
gcaacucguacccaaauuuccaa

SEQ ID NO: 2387 - RNA, 23 nt, Artificial
  Chemically synthesized
caaauuuccaagacacaaacaug

SEQ ID NO: 2388 - RNA, 23 nt, Artificial
  Chemically synthesized
ccaaauuuccaagacacaaacau

SEQ ID NO: 2389 - RNA, 23 nt, Artificial
  Chemically synthesized
cccaaauuuccaagacacaaaca

SEQ ID NO: 2390 - RNA, 23 nt, Artificial
  Chemically synthesized
acccaaauuuccaagacacaaac

SEQ ID NO: 2391 - RNA, 23 nt, Artificial
  Chemically synthesized
uacccaaauuuccaagacacaaa

SEQ ID NO: 2392 - RNA, 23 nt, Artificial
  Chemically synthesized
cccacugacagaccuuaaucuua

SEQ ID NO: 2393 - RNA, 23 nt, Artificial
  Chemically synthesized
cagcgaacgcacaucaagacgga

SEQ ID NO: 2394 - RNA, 23 nt, Artificial
  Chemically synthesized
ccagcgaacgcacaucaagacgg

SEQ ID NO: 2395 - RNA, 23 nt, Artificial
  Chemically synthesized
cccagcgaacgcacaucaagacg

SEQ ID NO: 2396 - RNA, 23 nt, Artificial
  Chemically synthesized
ucccagcgaacgcacaucaagac

SEQ ID NO: 2397 - RNA, 23 nt, Artificial
  Chemically synthesized
gucccagcgaacgcacaucaaga

SEQ ID NO: 2398 - RNA, 23 nt, Artificial
  Chemically synthesized
aagaaagagguaaaaggcaagca

SEQ ID NO: 2399 - RNA, 23 nt, Artificial
  Chemically synthesized
uaagaaagagguaaaaggcaagc

SEQ ID NO: 2400 - RNA, 23 nt, Artificial
  Chemically synthesized
uuaagaaagagguaaaaggcaag

SEQ ID NO: 2401 - RNA, 23 nt, Artificial
  Chemically synthesized
cuuaagaaagagguaaaaggcaa

SEQ ID NO: 2402 - RNA, 23 nt, Artificial
  Chemically synthesized
ucugggaauguuucagcagccaa

SEQ ID NO: 2403 - RNA, 23 nt, Artificial
  Chemically synthesized
agacauuccacuugcuaaaauua

SEQ ID NO: 2404 - RNA, 23 nt, Artificial
  Chemically synthesized
aagacauuccacuugcuaaaauu

SEQ ID NO: 2405 - RNA, 23 nt, Artificial
  Chemically synthesized
caagacauuccacuugcuaaaau

SEQ ID NO: 2406 - RNA, 23 nt, Artificial
  Chemically synthesized
ucaagacauuccacuugcuaaaa

SEQ ID NO: 2407 - RNA, 23 nt, Artificial
  Chemically synthesized
uucaagacauuccacuugcuaaa

SEQ ID NO: 2408 - RNA, 23 nt, Artificial
  Chemically synthesized
caaccagaguauuuuuguacaga

SEQ ID NO: 2409 - RNA, 23 nt, Artificial
  Chemically synthesized
gcaaccagaguauuuuuguacag

SEQ ID NO: 2410 - RNA, 23 nt, Artificial
  Chemically synthesized
ugcaaccagaguauuuuuguaca

SEQ ID NO: 2411 - RNA, 23 nt, Artificial
  Chemically synthesized
uugcaaccagaguauuuuuguac

SEQ ID NO: 2412 - RNA, 23 nt, Artificial
  Chemically synthesized
cuugcaaccagaguauuuuugua

SEQ ID NO: 2413 - RNA, 23 nt, Artificial
  Chemically synthesized
aaaaggcaagcaaaggagaugaa

SEQ ID NO: 2414 - RNA, 23 nt, Artificial
  Chemically synthesized
agcucuggagacuucugaacgag

SEQ ID NO: 2415 - RNA, 23 nt, Artificial
  Chemically synthesized
aagcucuggagacuucugaacga

SEQ ID NO: 2416 - RNA, 23 nt, Artificial
  Chemically synthesized
caagcucuggagacuucugaacg

SEQ ID NO: 2417 - RNA, 23 nt, Artificial
  Chemically synthesized
gcaagcucuggagacuucugaac

SEQ ID NO: 2418 - RNA, 23 nt, Artificial
  Chemically synthesized
ggcaagcucuggagacuucugaa

SEQ ID NO: 2419 - RNA, 23 nt, Artificial
  Chemically synthesized
cucuccgugaaacuuaccuuucc

SEQ ID NO: 2420 - RNA, 23 nt, Artificial
  Chemically synthesized
ggcuaaauggagcagcgaaauca

SEQ ID NO: 2421 - RNA, 23 nt, Artificial
  Chemically synthesized
uggcuaaauggagcagcgaaauc

SEQ ID NO: 2422 - RNA, 23 nt, Artificial
  Chemically synthesized
uuggcuaaauggagcagcgaaau

SEQ ID NO: 2423 - RNA, 23 nt, Artificial
  Chemically synthesized
cuuggcuaaauggagcagcgaaa

SEQ ID NO: 2424 - RNA, 23 nt, Artificial
  Chemically synthesized
aagauggccgagaugauccuaaa

SEQ ID NO: 2425 - RNA, 23 nt, Artificial
  Chemically synthesized
aagagaggaccaaccagaauucc

SEQ ID NO: 2426 - RNA, 23 nt, Artificial
  Chemically synthesized
aaagagaggaccaaccagaauuc

SEQ ID NO: 2427 - RNA, 23 nt, Artificial
  Chemically synthesized
gaaagagaggaccaaccagaauu

SEQ ID NO: 2428 - RNA, 23 nt, Artificial
  Chemically synthesized
agaaagagaggaccaaccagaau

SEQ ID NO: 2429 - RNA, 23 nt, Artificial
  Chemically synthesized
aagaaagagaggaccaaccagaa

SEQ ID NO: 2430 - RNA, 23 nt, Artificial
  Chemically synthesized
auggagcagcgaaaucaacgaga

SEQ ID NO: 2431 - RNA, 23 nt, Artificial
  Chemically synthesized
caagcaaaggagaugaaaucugu

SEQ ID NO: 2432 - RNA, 23 nt, Artificial
  Chemically synthesized
aagaaaccuggcauuuaaaucau

SEQ ID NO: 2433 - RNA, 23 nt, Artificial
  Chemically synthesized
ggaugauggagaaucgugugauc

SEQ ID NO: 2434 - RNA, 23 nt, Artificial
  Chemically synthesized
aggaugauggagaaucgugugau

SEQ ID NO: 2435 - RNA, 23 nt, Artificial
  Chemically synthesized
gaggaugauggagaaucguguga

SEQ ID NO: 2436 - RNA, 23 nt, Artificial
  Chemically synthesized
ggaggaugauggagaaucgugug

SEQ ID NO: 2437 - RNA, 23 nt, Artificial
  Chemically synthesized
uggaggaugauggagaaucgugu

SEQ ID NO: 2438 - RNA, 23 nt, Artificial
  Chemically synthesized
guacccaaauuuccaagacacaa

SEQ ID NO: 2439 - RNA, 23 nt, Artificial
  Chemically synthesized
gagcugccuuaaaaaaaaauaaa

SEQ ID NO: 2440 - RNA, 23 nt, Artificial
  Chemically synthesized
gggaguaaacaauagucuagaga

SEQ ID NO: 2441 - RNA, 23 nt, Artificial
  Chemically synthesized
ugggaguaaacaauagucuagag

SEQ ID NO: 2442 - RNA, 23 nt, Artificial
  Chemically synthesized
augggaguaaacaauagucuaga

SEQ ID NO: 2443 - RNA, 23 nt, Artificial
  Chemically synthesized
uaugggaguaaacaauagucuag

SEQ ID NO: 2444 - RNA, 23 nt, Artificial
  Chemically synthesized
uuaugggaguaaacaauagucua

SEQ ID NO: 2445 - RNA, 23 nt, Artificial
  Chemically synthesized
gagcuuuccucaaaggguauggu

SEQ ID NO: 2446 - RNA, 23 nt, Artificial
  Chemically synthesized
ggagcuuuccucaaaggguaugg

SEQ ID NO: 2447 - RNA, 23 nt, Artificial
  Chemically synthesized
uggagcuuuccucaaaggguaug

SEQ ID NO: 2448 - RNA, 23 nt, Artificial
  Chemically synthesized
uuggagcuuuccucaaaggguau

SEQ ID NO: 2449 - RNA, 23 nt, Artificial
  Chemically synthesized
caaaaacaaugcaagcauguguc

SEQ ID NO: 2450 - RNA, 23 nt, Artificial
  Chemically synthesized
acaaaaacaaugcaagcaugugu

SEQ ID NO: 2451 - RNA, 23 nt, Artificial
  Chemically synthesized
cacaaaaacaaugcaagcaugug

SEQ ID NO: 2452 - RNA, 23 nt, Artificial
  Chemically synthesized
acacaaaaacaaugcaagcaugu

SEQ ID NO: 2453 - RNA, 23 nt, Artificial
  Chemically synthesized
gacacaaaaacaaugcaagcaug

SEQ ID NO: 2454 - RNA, 23 nt, Artificial
  Chemically synthesized
ccaccuucaccuacaugaacccc

SEQ ID NO: 2455 - RNA, 23 nt, Artificial
  Chemically synthesized
uccaccuucaccuacaugaaccc

SEQ ID NO: 2456 - RNA, 23 nt, Artificial
  Chemically synthesized
cuccaccuucaccuacaugaacc

SEQ ID NO: 2457 - RNA, 23 nt, Artificial
  Chemically synthesized
acuccaccuucaccuacaugaac

SEQ ID NO: 2458 - RNA, 23 nt, Artificial
  Chemically synthesized
uacuccaccuucaccuacaugaa

SEQ ID NO: 2459 - RNA, 23 nt, Artificial
  Chemically synthesized
ccuucaugaagaugaccgacgag

SEQ ID NO: 2460 - RNA, 23 nt, Artificial
  Chemically synthesized
cccuucaugaagaugaccgacga

SEQ ID NO: 2461 - RNA, 23 nt, Artificial
  Chemically synthesized
ccccuucaugaagaugaccgacg

SEQ ID NO: 2462 - RNA, 23 nt, Artificial
  Chemically synthesized
accccuucaugaagaugaccgac

SEQ ID NO: 2463 - RNA, 23 nt, Artificial
  Chemically synthesized
gaccccuucaugaagaugaccga

SEQ ID NO: 2464 - RNA, 23 nt, Artificial
  Chemically synthesized
cagucuuaagaaagagguaaaag

SEQ ID NO: 2465 - RNA, 23 nt, Artificial
  Chemically synthesized
gcagucuuaagaaagagguaaaa

SEQ ID NO: 2466 - RNA, 23 nt, Artificial
  Chemically synthesized
ugcagucuuaagaaagagguaaa

SEQ ID NO: 2467 - RNA, 23 nt, Artificial
  Chemically synthesized
cugcagucuuaagaaagagguaa

SEQ ID NO: 2468 - RNA, 23 nt, Artificial
  Chemically synthesized
acugcagucuuaagaaagaggua

SEQ ID NO: 2469 - RNA, 23 nt, Artificial
  Chemically synthesized
gcuaaaucucucugccuguuugg

SEQ ID NO: 2470 - RNA, 23 nt, Artificial
  Chemically synthesized
gugcuaaaucucucugccuguuu

SEQ ID NO: 2471 - RNA, 23 nt, Artificial
  Chemically synthesized
ugugcuaaaucucucugccuguu

SEQ ID NO: 2472 - RNA, 23 nt, Artificial
  Chemically synthesized
gugugcuaaaucucucugccugu

SEQ ID NO: 2473 - RNA, 23 nt, Artificial
  Chemically synthesized
cgcucacaguacgacuacaccga

SEQ ID NO: 2474 - RNA, 23 nt, Artificial
  Chemically synthesized
ccgcucacaguacgacuacaccg

SEQ ID NO: 2475 - RNA, 23 nt, Artificial
  Chemically synthesized
cccgcucacaguacgacuacacc

SEQ ID NO: 2476 - RNA, 23 nt, Artificial
  Chemically synthesized
acccgcucacaguacgacuacac

SEQ ID NO: 2477 - RNA, 23 nt, Artificial
  Chemically synthesized
cacccgcucacaguacgacuaca

SEQ ID NO: 2478 - RNA, 23 nt, Artificial
  Chemically synthesized
cacccuagauuuguauaaaugcc

SEQ ID NO: 2479 - RNA, 23 nt, Artificial
  Chemically synthesized
ucacccuagauuuguauaaaugc

SEQ ID NO: 2480 - RNA, 23 nt, Artificial
  Chemically synthesized
cucacccuagauuuguauaaaug

SEQ ID NO: 2481 - RNA, 23 nt, Artificial
  Chemically synthesized
ccucacccuagauuuguauaaau

SEQ ID NO: 2482 - RNA, 23 nt, Artificial
  Chemically synthesized
uccucacccuagauuuguauaaa

SEQ ID NO: 2483 - RNA, 23 nt, Artificial
  Chemically synthesized
ggugcugcugggaaacauuugca

SEQ ID NO: 2484 - RNA, 23 nt, Artificial
  Chemically synthesized
cggugcugcugggaaacauuugc

SEQ ID NO: 2485 - RNA, 23 nt, Artificial
  Chemically synthesized
acggugcugcugggaaacauuug

SEQ ID NO: 2486 - RNA, 23 nt, Artificial
  Chemically synthesized
aacggugcugcugggaaacauuu

SEQ ID NO: 2487 - RNA, 23 nt, Artificial
  Chemically synthesized
ugacacaaaaacaaugcaagcau

SEQ ID NO: 2488 - RNA, 23 nt, Artificial
  Chemically synthesized
uugacacaaaaacaaugcaagca

SEQ ID NO: 2489 - RNA, 23 nt, Artificial
  Chemically synthesized
uuugacacaaaaacaaugcaagc

SEQ ID NO: 2490 - RNA, 23 nt, Artificial
  Chemically synthesized
uuuugacacaaaaacaaugcaag

SEQ ID NO: 2491 - RNA, 23 nt, Artificial
  Chemically synthesized
guuuugacacaaaaacaaugcaa

SEQ ID NO: 2492 - RNA, 23 nt, Artificial
  Chemically synthesized
cguacccaaauuuccaagacaca

SEQ ID NO: 2493 - RNA, 23 nt, Artificial
  Chemically synthesized
guuuuagaagucaguagaauaaa

SEQ ID NO: 2494 - RNA, 23 nt, Artificial
  Chemically synthesized
aguuuuagaagucaguagaauaa

SEQ ID NO: 2495 - RNA, 23 nt, Artificial
  Chemically synthesized
caguuuuagaagucaguagaaua

SEQ ID NO: 2496 - RNA, 23 nt, Artificial
  Chemically synthesized
acaguuuuagaagucaguagaau

SEQ ID NO: 2497 - RNA, 23 nt, Artificial
  Chemically synthesized
aacaguuuuagaagucaguagaa

SEQ ID NO: 2498 - RNA, 23 nt, Artificial
  Chemically synthesized
caaaggagaugaaaucuguucug

SEQ ID NO: 2499 - RNA, 23 nt, Artificial
  Chemically synthesized
gcaaaggagaugaaaucuguucu

SEQ ID NO: 2500 - RNA, 23 nt, Artificial
  Chemically synthesized
agcaaaggagaugaaaucuguuc

SEQ ID NO: 2501 - RNA, 23 nt, Artificial
  Chemically synthesized
aagcaaaggagaugaaaucuguu

SEQ ID NO: 2502 - RNA, 23 nt, Artificial
  Chemically synthesized
caguuaaccuucaagacauucca

SEQ ID NO: 2503 - RNA, 23 nt, Artificial
  Chemically synthesized
gcaguuaaccuucaagacauucc

SEQ ID NO: 2504 - RNA, 23 nt, Artificial
  Chemically synthesized
agcaguuaaccuucaagacauuc

SEQ ID NO: 2505 - RNA, 23 nt, Artificial
  Chemically synthesized
cagcaguuaaccuucaagacauu

SEQ ID NO: 2506 - RNA, 23 nt, Artificial
  Chemically synthesized
ccagcaguuaaccuucaagacau

SEQ ID NO: 2507 - RNA, 23 nt, Artificial
  Chemically synthesized
aaaggcaacucguacccaaauuu

SEQ ID NO: 2508 - RNA, 23 nt, Artificial
  Chemically synthesized
uaaaggcaacucguacccaaauu

SEQ ID NO: 2509 - RNA, 23 nt, Artificial
  Chemically synthesized
cuaaaggcaacucguacccaaau

SEQ ID NO: 2510 - RNA, 23 nt, Artificial
  Chemically synthesized
gcuaaaggcaacucguacccaaa

SEQ ID NO: 2511 - RNA, 23 nt, Artificial
  Chemically synthesized
agcuaaaggcaacucguacccaa

SEQ ID NO: 2512 - RNA, 23 nt, Artificial
  Chemically synthesized
gaacgcacaucaagacggagcag

SEQ ID NO: 2513 - RNA, 23 nt, Artificial
  Chemically synthesized
cgaacgcacaucaagacggagca

SEQ ID NO: 2514 - RNA, 23 nt, Artificial
  Chemically synthesized
gcgaacgcacaucaagacggagc

SEQ ID NO: 2515 - RNA, 23 nt, Artificial
  Chemically synthesized
agcgaacgcacaucaagacggag

SEQ ID NO: 2516 - RNA, 23 nt, Artificial
  Chemically synthesized
ccuuugggcugccuuauauugug

SEQ ID NO: 2517 - RNA, 23 nt, Artificial
  Chemically synthesized
accuuugggcugccuuauauugu

SEQ ID NO: 2518 - RNA, 23 nt, Artificial
  Chemically synthesized
gaccuuugggcugccuuauauug

SEQ ID NO: 2519 - RNA, 23 nt, Artificial
  Chemically synthesized
agaccuuugggcugccuuauauu

SEQ ID NO: 2520 - RNA, 23 nt, Artificial
  Chemically synthesized
cagaccuuugggcugccuuauau

SEQ ID NO: 2521 - RNA, 23 nt, Artificial
  Chemically synthesized
gagaaacuggacuuuuuaaaccc

SEQ ID NO: 2522 - RNA, 23 nt, Artificial
  Chemically synthesized
augagagauugcaaauguagugu

SEQ ID NO: 2523 - RNA, 23 nt, Artificial
  Chemically synthesized
aaugagagauugcaaauguagug

SEQ ID NO: 2524 - RNA, 23 nt, Artificial
  Chemically synthesized
aaaugagagauugcaaauguagu

SEQ ID NO: 2525 - RNA, 23 nt, Artificial
  Chemically synthesized
uaaaugagagauugcaaauguag

SEQ ID NO: 2526 - RNA, 23 nt, Artificial
  Chemically synthesized
auaaaugagagauugcaaaugua

SEQ ID NO: 2527 - RNA, 23 nt, Artificial
  Chemically synthesized
gcaagcguggaggaugauggaga

SEQ ID NO: 2528 - RNA, 23 nt, Artificial
  Chemically synthesized
agcaagcguggaggaugauggag

SEQ ID NO: 2529 - RNA, 23 nt, Artificial
  Chemically synthesized
gagcaagcguggaggaugaugga

SEQ ID NO: 2530 - RNA, 23 nt, Artificial
  Chemically synthesized
uguuggagcuuuccucaaagggu

SEQ ID NO: 2531 - RNA, 23 nt, Artificial
  Chemically synthesized
uuguuggagcuuuccucaaaggg

SEQ ID NO: 2532 - RNA, 23 nt, Artificial
  Chemically synthesized
guuguuggagcuuuccucaaagg

SEQ ID NO: 2533 - RNA, 23 nt, Artificial
  Chemically synthesized
gguuguuggagcuuuccucaaag

SEQ ID NO: 2534 - RNA, 23 nt, Artificial
  Chemically synthesized
agguuguuggagcuuuccucaaa

SEQ ID NO: 2535 - RNA, 23 nt, Artificial
  Chemically synthesized
ggguuaacuuugcuuaauuccuc

SEQ ID NO: 2536 - RNA, 23 nt, Artificial
  Chemically synthesized
gggguuaacuuugcuuaauuccu

SEQ ID NO: 2537 - RNA, 23 nt, Artificial
  Chemically synthesized
ggggguuaacuuugcuuaauucc

SEQ ID NO: 2538 - RNA, 23 nt, Artificial
  Chemically synthesized
uggggguuaacuuugcuuaauuc

SEQ ID NO: 2539 - RNA, 23 nt, Artificial
  Chemically synthesized
uuggggguuaacuuugcuuaauu

SEQ ID NO: 2540 - RNA, 23 nt, Artificial
  Chemically synthesized
acagaccuuugggcugccuuaua

SEQ ID NO: 2541 - RNA, 23 nt, Artificial
  Chemically synthesized
cacagaccuuugggcugccuuau

SEQ ID NO: 2542 - RNA, 23 nt, Artificial
  Chemically synthesized
ccacagaccuuugggcugccuua

SEQ ID NO: 2543 - RNA, 23 nt, Artificial
  Chemically synthesized
gaugaaaucuguucugggaaugu

SEQ ID NO: 2544 - RNA, 23 nt, Artificial
  Chemically synthesized
agaugaaaucuguucugggaaug

SEQ ID NO: 2545 - RNA, 23 nt, Artificial
  Chemically synthesized
gagaugaaaucuguucugggaau

SEQ ID NO: 2546 - RNA, 23 nt, Artificial
  Chemically synthesized
ggagaugaaaucuguucugggaa

SEQ ID NO: 2547 - RNA, 23 nt, Artificial
  Chemically synthesized
aggagaugaaaucuguucuggga

SEQ ID NO: 2548 - RNA, 23 nt, Artificial
  Chemically synthesized
guugaaaacaaacuggaaacuug

SEQ ID NO: 2549 - RNA, 23 nt, Artificial
  Chemically synthesized
ccucaaaggguauggucaucugu

SEQ ID NO: 2550 - RNA, 23 nt, Artificial
  Chemically synthesized
uccucaaaggguauggucaucug

SEQ ID NO: 2551 - RNA, 23 nt, Artificial
  Chemically synthesized
uuccucaaaggguauggucaucu

SEQ ID NO: 2552 - RNA, 23 nt, Artificial
  Chemically synthesized
uuuccucaaaggguauggucauc

SEQ ID NO: 2553 - RNA, 23 nt, Artificial
  Chemically synthesized
cuuuccucaaaggguauggucau

SEQ ID NO: 2554 - RNA, 23 nt, Artificial
  Chemically synthesized
ccucaggcuuugcgauuuaagga

SEQ ID NO: 2555 - RNA, 23 nt, Artificial
  Chemically synthesized
uccucaggcuuugcgauuuaagg

SEQ ID NO: 2556 - RNA, 23 nt, Artificial
  Chemically synthesized
uuccucaggcuuugcgauuuaag

SEQ ID NO: 2557 - RNA, 23 nt, Artificial
  Chemically synthesized
auuccucaggcuuugcgauuuaa

SEQ ID NO: 2558 - RNA, 23 nt, Artificial
  Chemically synthesized
aauuccucaggcuuugcgauuua

SEQ ID NO: 2559 - RNA, 23 nt, Artificial
  Chemically synthesized
acggcuccagcaagaacaagccg

SEQ ID NO: 2560 - RNA, 23 nt, Artificial
  Chemically synthesized
aacggcuccagcaagaacaagcc

SEQ ID NO: 2561 - RNA, 23 nt, Artificial
  Chemically synthesized
caacggcuccagcaagaacaagc

SEQ ID NO: 2562 - RNA, 23 nt, Artificial
  Chemically synthesized
ucaacggcuccagcaagaacaag

SEQ ID NO: 2563 - RNA, 23 nt, Artificial
  Chemically synthesized
gucaacggcuccagcaagaacaa

SEQ ID NO: 2564 - RNA, 23 nt, Artificial
  Chemically synthesized
acauuuaagcuaaaggcaacucg

SEQ ID NO: 2565 - RNA, 23 nt, Artificial
  Chemically synthesized
gacauuuaagcuaaaggcaacuc

SEQ ID NO: 2566 - RNA, 23 nt, Artificial
  Chemically synthesized
agacauuuaagcuaaaggcaacu

SEQ ID NO: 2567 - RNA, 23 nt, Artificial
  Chemically synthesized
aagacauuuaagcuaaaggcaac

SEQ ID NO: 2568 - RNA, 23 nt, Artificial
  Chemically synthesized
aaagacauuuaagcuaaaggcaa

SEQ ID NO: 2569 - RNA, 23 nt, Artificial
  Chemically synthesized
caguguuuucugccacagaccuu

SEQ ID NO: 2570 - RNA, 23 nt, Artificial
  Chemically synthesized
gcaguguuuucugccacagaccu

SEQ ID NO: 2571 - RNA, 23 nt, Artificial
  Chemically synthesized
ugcaguguuuucugccacagacc

SEQ ID NO: 2572 - RNA, 23 nt, Artificial
  Chemically synthesized
uugcaguguuuucugccacagac

SEQ ID NO: 2573 - RNA, 23 nt, Artificial
  Chemically synthesized
uuugcaguguuuucugccacaga

SEQ ID NO: 2574 - RNA, 23 nt, Artificial
  Chemically synthesized
gauugcaaauguaguguaucacu

SEQ ID NO: 2575 - RNA, 23 nt, Artificial
  Chemically synthesized
agauugcaaauguaguguaucac

SEQ ID NO: 2576 - RNA, 23 nt, Artificial
  Chemically synthesized
gagauugcaaauguaguguauca

SEQ ID NO: 2577 - RNA, 23 nt, Artificial
  Chemically synthesized
agagauugcaaauguaguguauc

SEQ ID NO: 2578 - RNA, 23 nt, Artificial
  Chemically synthesized
gagagauugcaaauguaguguau

SEQ ID NO: 2579 - RNA, 23 nt, Artificial
  Chemically synthesized
cuucaagacauuccacuugcuaa

SEQ ID NO: 2580 - RNA, 23 nt, Artificial
  Chemically synthesized
cauccauauuucucuacaucuuc

SEQ ID NO: 2581 - RNA, 23 nt, Artificial
  Chemically synthesized
ucauccauauuucucuacaucuu

SEQ ID NO: 2582 - RNA, 23 nt, Artificial
  Chemically synthesized
gucauccauauuucucuacaucu

SEQ ID NO: 2583 - RNA, 23 nt, Artificial
  Chemically synthesized
ugucauccauauuucucuacauc

SEQ ID NO: 2584 - RNA, 23 nt, Artificial
  Chemically synthesized
gugucauccauauuucucuacau

SEQ ID NO: 2585 - RNA, 23 nt, Artificial
  Chemically synthesized
caagcaugugucauccauauuuc

SEQ ID NO: 2586 - RNA, 23 nt, Artificial
  Chemically synthesized
gcaagcaugugucauccauauuu

SEQ ID NO: 2587 - RNA, 23 nt, Artificial
  Chemically synthesized
ugcaagcaugugucauccauauu

SEQ ID NO: 2588 - RNA, 23 nt, Artificial
  Chemically synthesized
augcaagcaugugucauccauau

SEQ ID NO: 2589 - RNA, 23 nt, Artificial
  Chemically synthesized
aaugcaagcaugugucauccaua

SEQ ID NO: 2590 - RNA, 23 nt, Artificial
  Chemically synthesized
gcccacugacagaccuuaaucuu

SEQ ID NO: 2591 - RNA, 23 nt, Artificial
  Chemically synthesized
agcccacugacagaccuuaaucu

SEQ ID NO: 2592 - RNA, 23 nt, Artificial
  Chemically synthesized
cagcccacugacagaccuuaauc

SEQ ID NO: 2593 - RNA, 23 nt, Artificial
  Chemically synthesized
ucagcccacugacagaccuuaau

SEQ ID NO: 2594 - RNA, 23 nt, Artificial
  Chemically synthesized
cuuguucacugcagucuuaagaa

SEQ ID NO: 2595 - RNA, 23 nt, Artificial
  Chemically synthesized
gcuuguucacugcagucuuaaga

SEQ ID NO: 2596 - RNA, 23 nt, Artificial
  Chemically synthesized
ugcuuguucacugcagucuuaag

SEQ ID NO: 2597 - RNA, 23 nt, Artificial
  Chemically synthesized
uugcuuguucacugcagucuuaa

SEQ ID NO: 2598 - RNA, 23 nt, Artificial
  Chemically synthesized
uuugcuuguucacugcagucuua

SEQ ID NO: 2599 - RNA, 23 nt, Artificial
  Chemically synthesized
acagaauuguguuaugugaucag

SEQ ID NO: 2600 - RNA, 23 nt, Artificial
  Chemically synthesized
aacagaauuguguuaugugauca

SEQ ID NO: 2601 - RNA, 23 nt, Artificial
  Chemically synthesized
aaacagaauuguguuaugugauc

SEQ ID NO: 2602 - RNA, 23 nt, Artificial
  Chemically synthesized
aaaacagaauuguguuaugugau

SEQ ID NO: 2603 - RNA, 23 nt, Artificial
  Chemically synthesized
aaaaacagaauuguguuauguga

SEQ ID NO: 2604 - RNA, 23 nt, Artificial
  Chemically synthesized
ccuggcauuuaaaucauauuuug

SEQ ID NO: 2605 - RNA, 23 nt, Artificial
  Chemically synthesized
accuggcauuuaaaucauauuuu

SEQ ID NO: 2606 - RNA, 23 nt, Artificial
  Chemically synthesized
aaccuggcauuuaaaucauauuu

SEQ ID NO: 2607 - RNA, 23 nt, Artificial
  Chemically synthesized
aaaccuggcauuuaaaucauauu

SEQ ID NO: 2608 - RNA, 23 nt, Artificial
  Chemically synthesized
gaaaccuggcauuuaaaucauau

SEQ ID NO: 2609 - RNA, 23 nt, Artificial
  Chemically synthesized
ggccuuauuuugcaauuauggga

SEQ ID NO: 2610 - RNA, 23 nt, Artificial
  Chemically synthesized
aggccuuauuuugcaauuauggg

SEQ ID NO: 2611 - RNA, 23 nt, Artificial
  Chemically synthesized
aaggccuuauuuugcaauuaugg

SEQ ID NO: 2612 - RNA, 23 nt, Artificial
  Chemically synthesized
aaaggccuuauuuugcaauuaug

SEQ ID NO: 2613 - RNA, 23 nt, Artificial
  Chemically synthesized
uaaaggccuuauuuugcaauuau

SEQ ID NO: 2614 - RNA, 23 nt, Artificial
  Chemically synthesized
caaugcaagcaugugucauccau

SEQ ID NO: 2615 - RNA, 23 nt, Artificial
  Chemically synthesized
cugugaggaauauucucuauuuu

SEQ ID NO: 2616 - RNA, 23 nt, Artificial
  Chemically synthesized
ucugugaggaauauucucuauuu

SEQ ID NO: 2617 - RNA, 23 nt, Artificial
  Chemically synthesized
cucugugaggaauauucucuauu

SEQ ID NO: 2618 - RNA, 23 nt, Artificial
  Chemically synthesized
ccucugugaggaauauucucuau

SEQ ID NO: 2619 - RNA, 23 nt, Artificial
  Chemically synthesized
uccucugugaggaauauucucua

SEQ ID NO: 2620 - RNA, 23 nt, Artificial
  Chemically synthesized
aaaucaacgagaaacuggacuuu

SEQ ID NO: 2621 - RNA, 23 nt, Artificial
  Chemically synthesized
gaaaucaacgagaaacuggacuu

SEQ ID NO: 2622 - RNA, 23 nt, Artificial
  Chemically synthesized
cgaaaucaacgagaaacuggacu

SEQ ID NO: 2623 - RNA, 23 nt, Artificial
  Chemically synthesized
gcgaaaucaacgagaaacuggac

SEQ ID NO: 2624 - RNA, 23 nt, Artificial
  Chemically synthesized
agcgaaaucaacgagaaacugga

SEQ ID NO: 2625 - RNA, 23 nt, Artificial
  Chemically synthesized
ugaagaugaccgacgagcaggag

SEQ ID NO: 2626 - RNA, 23 nt, Artificial
  Chemically synthesized
augaagaugaccgacgagcagga

SEQ ID NO: 2627 - RNA, 23 nt, Artificial
  Chemically synthesized
caugaagaugaccgacgagcagg

SEQ ID NO: 2628 - RNA, 23 nt, Artificial
  Chemically synthesized
ucaugaagaugaccgacgagcag

SEQ ID NO: 2629 - RNA, 23 nt, Artificial
  Chemically synthesized
uucaugaagaugaccgacgagca

SEQ ID NO: 2630 - RNA, 23 nt, Artificial
  Chemically synthesized
guggaggaugauggagaaucgug

SEQ ID NO: 2631 - RNA, 23 nt, Artificial
  Chemically synthesized
uuuugcaauuaugggaguaaaca

SEQ ID NO: 2632 - RNA, 23 nt, Artificial
  Chemically synthesized
auuuugcaauuaugggaguaaac

SEQ ID NO: 2633 - RNA, 23 nt, Artificial
  Chemically synthesized
uauuuugcaauuaugggaguaaa

SEQ ID NO: 2634 - RNA, 23 nt, Artificial
  Chemically synthesized
cgcguaugaaucuccuggacccc

SEQ ID NO: 2635 - RNA, 23 nt, Artificial
  Chemically synthesized
ccgcguaugaaucuccuggaccc

SEQ ID NO: 2636 - RNA, 23 nt, Artificial
  Chemically synthesized
cccgcguaugaaucuccuggacc

SEQ ID NO: 2637 - RNA, 23 nt, Artificial
  Chemically synthesized
gcccgcguaugaaucuccuggac

SEQ ID NO: 2638 - RNA, 23 nt, Artificial
  Chemically synthesized
ggcccgcguaugaaucuccugga

SEQ ID NO: 2639 - RNA, 23 nt, Artificial
  Chemically synthesized
ucacugcagucuuaagaaagagg

SEQ ID NO: 2640 - RNA, 23 nt, Artificial
  Chemically synthesized
uucacugcagucuuaagaaagag

SEQ ID NO: 2641 - RNA, 23 nt, Artificial
  Chemically synthesized
guucacugcagucuuaagaaaga

SEQ ID NO: 2642 - RNA, 23 nt, Artificial
  Chemically synthesized
uguucacugcagucuuaagaaag

SEQ ID NO: 2643 - RNA, 23 nt, Artificial
  Chemically synthesized
uuguucacugcagucuuaagaaa

SEQ ID NO: 2644 - RNA, 23 nt, Artificial
  Chemically synthesized
gcccuagcuuuucuugcaaccag

SEQ ID NO: 2645 - RNA, 23 nt, Artificial
  Chemically synthesized
ugcccuagcuuuucuugcaacca

SEQ ID NO: 2646 - RNA, 23 nt, Artificial
  Chemically synthesized
gugcccuagcuuuucuugcaacc

SEQ ID NO: 2647 - RNA, 23 nt, Artificial
  Chemically synthesized
ugugcccuagcuuuucuugcaac

SEQ ID NO: 2648 - RNA, 23 nt, Artificial
  Chemically synthesized
gugugcccuagcuuuucuugcaa

SEQ ID NO: 2649 - RNA, 23 nt, Artificial
  Chemically synthesized
gcggagcucgaaacugacuggaa

SEQ ID NO: 2650 - RNA, 23 nt, Artificial
  Chemically synthesized
cauaauauggcauccuucaauuu

SEQ ID NO: 2651 - RNA, 23 nt, Artificial
  Chemically synthesized
ucauaauauggcauccuucaauu

SEQ ID NO: 2652 - RNA, 23 nt, Artificial
  Chemically synthesized
cucauaauauggcauccuucaau

SEQ ID NO: 2653 - RNA, 23 nt, Artificial
  Chemically synthesized
acucauaauauggcauccuucaa

SEQ ID NO: 2654 - RNA, 23 nt, Artificial
  Chemically synthesized
cacucauaauauggcauccuuca

SEQ ID NO: 2655 - RNA, 23 nt, Artificial
  Chemically synthesized
cuagagaagcauuugguaagcuu

SEQ ID NO: 2656 - RNA, 23 nt, Artificial
  Chemically synthesized
ucuagagaagcauuugguaagcu

SEQ ID NO: 2657 - RNA, 23 nt, Artificial
  Chemically synthesized
gucuagagaagcauuugguaagc

SEQ ID NO: 2658 - RNA, 23 nt, Artificial
  Chemically synthesized
agucuagagaagcauuugguaag

SEQ ID NO: 2659 - RNA, 23 nt, Artificial
  Chemically synthesized
uagucuagagaagcauuugguaa

SEQ ID NO: 2660 - RNA, 23 nt, Artificial
  Chemically synthesized
ggaacaacccgucuacacacagc

SEQ ID NO: 2661 - RNA, 23 nt, Artificial
  Chemically synthesized
gggaacaacccgucuacacacag

SEQ ID NO: 2662 - RNA, 23 nt, Artificial
  Chemically synthesized
ugggaacaacccgucuacacaca

SEQ ID NO: 2663 - RNA, 23 nt, Artificial
  Chemically synthesized
cugggaacaacccgucuacacac

SEQ ID NO: 2664 - RNA, 23 nt, Artificial
  Chemically synthesized
acugggaacaacccgucuacaca

SEQ ID NO: 2665 - RNA, 23 nt, Artificial
  Chemically synthesized
agaaaccuggcauuuaaaucaua

SEQ ID NO: 2666 - RNA, 23 nt, Artificial
  Chemically synthesized
ccggaaacuuuucuuugcaggag

SEQ ID NO: 2667 - RNA, 23 nt, Artificial
  Chemically synthesized
cccggaaacuuuucuuugcagga

SEQ ID NO: 2668 - RNA, 23 nt, Artificial
  Chemically synthesized
ccccggaaacuuuucuuugcagg

SEQ ID NO: 2669 - RNA, 23 nt, Artificial
  Chemically synthesized
accccggaaacuuuucuuugcag

SEQ ID NO: 2670 - RNA, 23 nt, Artificial
  Chemically synthesized
aaccccggaaacuuuucuuugca

SEQ ID NO: 2671 - RNA, 23 nt, Artificial
  Chemically synthesized
ucucuccgugaaacuuaccuuuc

SEQ ID NO: 2672 - RNA, 23 nt, Artificial
  Chemically synthesized
uucucuccgugaaacuuaccuuu

SEQ ID NO: 2673 - RNA, 23 nt, Artificial
  Chemically synthesized
gaacagugugcccuagcuuuucu

SEQ ID NO: 2674 - RNA, 23 nt, Artificial
  Chemically synthesized
ugaacagugugcccuagcuuuuc

SEQ ID NO: 2675 - RNA, 23 nt, Artificial
  Chemically synthesized
uugaacagugugcccuagcuuuu

SEQ ID NO: 2676 - RNA, 23 nt, Artificial
  Chemically synthesized
guugaacagugugcccuagcuuu

SEQ ID NO: 2677 - RNA, 23 nt, Artificial
  Chemically synthesized
ucuucuucuucuuccuuaaagac

SEQ ID NO: 2678 - RNA, 23 nt, Artificial
  Chemically synthesized
uucuucuucuucuuccuuaaaga

SEQ ID NO: 2679 - RNA, 23 nt, Artificial
  Chemically synthesized
cuucuucuucuucuuccuuaaag

SEQ ID NO: 2680 - RNA, 23 nt, Artificial
  Chemically synthesized
ucuucuucuucuucuuccuuaaa

SEQ ID NO: 2681 - RNA, 23 nt, Artificial
  Chemically synthesized
uucuucuucuucuucuuccuuaa

SEQ ID NO: 2682 - RNA, 23 nt, Artificial
  Chemically synthesized
gggaaacauuugcacucuuuuag

SEQ ID NO: 2683 - RNA, 23 nt, Artificial
  Chemically synthesized
ugggaaacauuugcacucuuuua

SEQ ID NO: 2684 - RNA, 23 nt, Artificial
  Chemically synthesized
cugggaaacauuugcacucuuuu

SEQ ID NO: 2685 - RNA, 23 nt, Artificial
  Chemically synthesized
gcugggaaacauuugcacucuuu

SEQ ID NO: 2686 - RNA, 23 nt, Artificial
  Chemically synthesized
ugcugggaaacauuugcacucuu

SEQ ID NO: 2687 - RNA, 23 nt, Artificial
  Chemically synthesized
aaggcaacucguacccaaauuuc

SEQ ID NO: 2688 - RNA, 23 nt, Artificial
  Chemically synthesized
cuuuguauuccucacccuagauu

SEQ ID NO: 2689 - RNA, 23 nt, Artificial
  Chemically synthesized
ucuuuguauuccucacccuagau

SEQ ID NO: 2690 - RNA, 23 nt, Artificial
  Chemically synthesized
uucuuuguauuccucacccuaga

SEQ ID NO: 2691 - RNA, 23 nt, Artificial
  Chemically synthesized
uuucuuuguauuccucacccuag

SEQ ID NO: 2692 - RNA, 23 nt, Artificial
  Chemically synthesized
guuucuuuguauuccucacccua

SEQ ID NO: 2693 - RNA, 23 nt, Artificial
  Chemically synthesized
cuuuuguucucuccgugaaacuu

SEQ ID NO: 2694 - RNA, 23 nt, Artificial
  Chemically synthesized
ccuuuuguucucuccgugaaacu

SEQ ID NO: 2695 - RNA, 23 nt, Artificial
  Chemically synthesized
accuuuuguucucuccgugaaac

SEQ ID NO: 2696 - RNA, 23 nt, Artificial
  Chemically synthesized
aaccuuuuguucucuccgugaaa

SEQ ID NO: 2697 - RNA, 23 nt, Artificial
  Chemically synthesized
aaaccuuuuguucucuccgugaa

SEQ ID NO: 2698 - RNA, 23 nt, Artificial
  Chemically synthesized
uggagacuucugaacgagagcga

SEQ ID NO: 2699 - RNA, 23 nt, Artificial
  Chemically synthesized
cuggagacuucugaacgagagcg

SEQ ID NO: 2700 - RNA, 23 nt, Artificial
  Chemically synthesized
ucuggagacuucugaacgagagc

SEQ ID NO: 2701 - RNA, 23 nt, Artificial
  Chemically synthesized
cucuggagacuucugaacgagag

SEQ ID NO: 2702 - RNA, 23 nt, Artificial
  Chemically synthesized
gcucuggagacuucugaacgaga

SEQ ID NO: 2703 - RNA, 23 nt, Artificial
  Chemically synthesized
ccauauuucucuacaucuucucu

SEQ ID NO: 2704 - RNA, 23 nt, Artificial
  Chemically synthesized
uccauauuucucuacaucuucuc

SEQ ID NO: 2705 - RNA, 23 nt, Artificial
  Chemically synthesized
auccauauuucucuacaucuucu

SEQ ID NO: 2706 - RNA, 23 nt, Artificial
  Chemically synthesized
ggagaaucgugugaucagugugc

SEQ ID NO: 2707 - RNA, 23 nt, Artificial
  Chemically synthesized
uggagaaucgugugaucagugug

SEQ ID NO: 2708 - RNA, 23 nt, Artificial
  Chemically synthesized
auggagaaucgugugaucagugu

SEQ ID NO: 2709 - RNA, 23 nt, Artificial
  Chemically synthesized
gauggagaaucgugugaucagug

SEQ ID NO: 2710 - RNA, 23 nt, Artificial
  Chemically synthesized
ugauggagaaucgugugaucagu

SEQ ID NO: 2711 - RNA, 23 nt, Artificial
  Chemically synthesized
uguggauguccaagcagcaggcg

SEQ ID NO: 2712 - RNA, 23 nt, Artificial
  Chemically synthesized
guguggauguccaagcagcaggc

SEQ ID NO: 2713 - RNA, 23 nt, Artificial
  Chemically synthesized
cguguggauguccaagcagcagg

SEQ ID NO: 2714 - RNA, 23 nt, Artificial
  Chemically synthesized
acguguggauguccaagcagcag

SEQ ID NO: 2715 - RNA, 23 nt, Artificial
  Chemically synthesized
cacguguggauguccaagcagca

SEQ ID NO: 2716 - RNA, 23 nt, Artificial
  Chemically synthesized
ggcaacucguacccaaauuucca

SEQ ID NO: 2717 - RNA, 23 nt, Artificial
  Chemically synthesized
cauuccacuugcuaaaauuauuu

SEQ ID NO: 2718 - RNA, 23 nt, Artificial
  Chemically synthesized
acauuccacuugcuaaaauuauu

SEQ ID NO: 2719 - RNA, 23 nt, Artificial
  Chemically synthesized
gacauuccacuugcuaaaauuau

SEQ ID NO: 2720 - RNA, 23 nt, Artificial
  Chemically synthesized
auagucuagagaagcauuuggua

SEQ ID NO: 2721 - RNA, 23 nt, Artificial
  Chemically synthesized
ccuguuuggacuuuguaauuauu

SEQ ID NO: 2722 - RNA, 23 nt, Artificial
  Chemically synthesized
ggagacucgccaguuucaacccc

SEQ ID NO: 2723 - RNA, 23 nt, Artificial
  Chemically synthesized
cggagacucgccaguuucaaccc

SEQ ID NO: 2724 - RNA, 23 nt, Artificial
  Chemically synthesized
gcggagacucgccaguuucaacc

SEQ ID NO: 2725 - RNA, 23 nt, Artificial
  Chemically synthesized
cgcggagacucgccaguuucaac

SEQ ID NO: 2726 - RNA, 23 nt, Artificial
  Chemically synthesized
gcgcggagacucgccaguuucaa

SEQ ID NO: 2727 - RNA, 23 nt, Artificial
  Chemically synthesized
ggucaucuguuguuaaauuaugu

SEQ ID NO: 2728 - RNA, 23 nt, Artificial
  Chemically synthesized
uggucaucuguuguuaaauuaug

SEQ ID NO: 2729 - RNA, 23 nt, Artificial
  Chemically synthesized
auggucaucuguuguuaaauuau

SEQ ID NO: 2730 - RNA, 23 nt, Artificial
  Chemically synthesized
uauggucaucuguuguuaaauua

SEQ ID NO: 2731 - RNA, 23 nt, Artificial
  Chemically synthesized
guauggucaucuguuguuaaauu

SEQ ID NO: 2732 - RNA, 23 nt, Artificial
  Chemically synthesized
cuuugcuuguucacugcagucuu

SEQ ID NO: 2733 - RNA, 23 nt, Artificial
  Chemically synthesized
ucgagaccuucgaugucaacgag

SEQ ID NO: 2734 - RNA, 23 nt, Artificial
  Chemically synthesized
aucgagaccuucgaugucaacga

SEQ ID NO: 2735 - RNA, 23 nt, Artificial
  Chemically synthesized
caucgagaccuucgaugucaacg

SEQ ID NO: 2736 - RNA, 23 nt, Artificial
  Chemically synthesized
acaucgagaccuucgaugucaac

SEQ ID NO: 2737 - RNA, 23 nt, Artificial
  Chemically synthesized
aacaucgagaccuucgaugucaa

SEQ ID NO: 2738 - RNA, 23 nt, Artificial
  Chemically synthesized
cuguggcuagagaguuugaggau

SEQ ID NO: 2739 - RNA, 23 nt, Artificial
  Chemically synthesized
gcuguggcuagagaguuugagga

SEQ ID NO: 2740 - RNA, 23 nt, Artificial
  Chemically synthesized
ugcuguggcuagagaguuugagg

SEQ ID NO: 2741 - RNA, 23 nt, Artificial
  Chemically synthesized
cugcuguggcuagagaguuugag

SEQ ID NO: 2742 - RNA, 23 nt, Artificial
  Chemically synthesized
acugcuguggcuagagaguuuga

SEQ ID NO: 2743 - RNA, 23 nt, Artificial
  Chemically synthesized
gaaucgugugaucagugugcuaa

SEQ ID NO: 2744 - RNA, 23 nt, Artificial
  Chemically synthesized
agaaucgugugaucagugugcua

SEQ ID NO: 2745 - RNA, 23 nt, Artificial
  Chemically synthesized
aucagcccacugacagaccuuaa

SEQ ID NO: 2746 - RNA, 23 nt, Artificial
  Chemically synthesized
uucugggaauguuucagcagcca

SEQ ID NO: 2747 - RNA, 23 nt, Artificial
  Chemically synthesized
ggaccaaccagaauucccuuugg

SEQ ID NO: 2748 - RNA, 23 nt, Artificial
  Chemically synthesized
aggaccaaccagaauucccuuug

SEQ ID NO: 2749 - RNA, 23 nt, Artificial
  Chemically synthesized
gaggaccaaccagaauucccuuu

SEQ ID NO: 2750 - RNA, 23 nt, Artificial
  Chemically synthesized
agaggaccaaccagaauucccuu

SEQ ID NO: 2751 - RNA, 23 nt, Artificial
  Chemically synthesized
gagaggaccaaccagaauucccu

SEQ ID NO: 2752 - RNA, 23 nt, Artificial
  Chemically synthesized
acuacaccgaccaccagaacucc

SEQ ID NO: 2753 - RNA, 23 nt, Artificial
  Chemically synthesized
gacuacaccgaccaccagaacuc

SEQ ID NO: 2754 - RNA, 23 nt, Artificial
  Chemically synthesized
cgacuacaccgaccaccagaacu

SEQ ID NO: 2755 - RNA, 23 nt, Artificial
  Chemically synthesized
acgacuacaccgaccaccagaac

SEQ ID NO: 2756 - RNA, 23 nt, Artificial
  Chemically synthesized
uacgacuacaccgaccaccagaa

SEQ ID NO: 2757 - RNA, 23 nt, Artificial
  Chemically synthesized
accagcaguuaaccuucaagaca

SEQ ID NO: 2758 - RNA, 23 nt, Artificial
  Chemically synthesized
aguuaaccuucaagacauuccac

SEQ ID NO: 2759 - RNA, 23 nt, Artificial
  Chemically synthesized
ccuuuuuguccaucccuuuuuuc

SEQ ID NO: 2760 - RNA, 23 nt, Artificial
  Chemically synthesized
gccuuuuuguccaucccuuuuuu

SEQ ID NO: 2761 - RNA, 23 nt, Artificial
  Chemically synthesized
ugccuuuuuguccaucccuuuuu

SEQ ID NO: 2762 - RNA, 23 nt, Artificial
  Chemically synthesized
augccuuuuuguccaucccuuuu

SEQ ID NO: 2763 - RNA, 23 nt, Artificial
  Chemically synthesized
aaugccuuuuuguccaucccuuu

SEQ ID NO: 2764 - RNA, 23 nt, Artificial
  Chemically synthesized
gguauggucaucuguuguuaaau

SEQ ID NO: 2765 - RNA, 23 nt, Artificial
  Chemically synthesized
ggguauggucaucuguuguuaaa

SEQ ID NO: 2766 - RNA, 23 nt, Artificial
  Chemically synthesized
aggguauggucaucuguuguuaa

SEQ ID NO: 2767 - RNA, 23 nt, Artificial
  Chemically synthesized
acagcucacucgaccuugaggag

SEQ ID NO: 2768 - RNA, 23 nt, Artificial
  Chemically synthesized
cacagcucacucgaccuugagga

SEQ ID NO: 2769 - RNA, 23 nt, Artificial
  Chemically synthesized
acacagcucacucgaccuugagg

SEQ ID NO: 2770 - RNA, 23 nt, Artificial
  Chemically synthesized
cacacagcucacucgaccuugag

SEQ ID NO: 2771 - RNA, 23 nt, Artificial
  Chemically synthesized
acacacagcucacucgaccuuga

SEQ ID NO: 2772 - RNA, 23 nt, Artificial
  Chemically synthesized
gaaacauuugcacucuuuuagug

SEQ ID NO: 2773 - RNA, 23 nt, Artificial
  Chemically synthesized
ggaaacauuugcacucuuuuagu

SEQ ID NO: 2774 - RNA, 23 nt, Artificial
  Chemically synthesized
agcuuuucuugcaaccagaguau

SEQ ID NO: 2775 - RNA, 23 nt, Artificial
  Chemically synthesized
uagcuuuucuugcaaccagagua

SEQ ID NO: 2776 - RNA, 23 nt, Artificial
  Chemically synthesized
cuagcuuuucuugcaaccagagu

SEQ ID NO: 2777 - RNA, 23 nt, Artificial
  Chemically synthesized
ccuagcuuuucuugcaaccagag

SEQ ID NO: 2778 - RNA, 23 nt, Artificial
  Chemically synthesized
cccuagcuuuucuugcaaccaga

SEQ ID NO: 2779 - RNA, 23 nt, Artificial
  Chemically synthesized
auaaccgaagaaagagaggacca

SEQ ID NO: 2780 - RNA, 23 nt, Artificial
  Chemically synthesized
aaggguauggucaucuguuguua

SEQ ID NO: 2781 - RNA, 23 nt, Artificial
  Chemically synthesized
uuguauuccucacccuagauuug

SEQ ID NO: 2782 - RNA, 23 nt, Artificial
  Chemically synthesized
uuuguauuccucacccuagauuu

SEQ ID NO: 2783 - RNA, 23 nt, Artificial
  Chemically synthesized
agaaaaacaccuugagccuuaaa

SEQ ID NO: 2784 - RNA, 23 nt, Artificial
  Chemically synthesized
gagaaaaacaccuugagccuuaa

SEQ ID NO: 2785 - RNA, 23 nt, Artificial
  Chemically synthesized
agagaaaaacaccuugagccuua

SEQ ID NO: 2786 - RNA, 23 nt, Artificial
  Chemically synthesized
aagagaaaaacaccuugagccuu

SEQ ID NO: 2787 - RNA, 23 nt, Artificial
  Chemically synthesized
guauguacuguguaugauucauu

SEQ ID NO: 2788 - RNA, 23 nt, Artificial
  Chemically synthesized
aguauguacuguguaugauucau

SEQ ID NO: 2789 - RNA, 23 nt, Artificial
  Chemically synthesized
uaguauguacuguguaugauuca

SEQ ID NO: 2790 - RNA, 23 nt, Artificial
  Chemically synthesized
uuaguauguacuguguaugauuc

SEQ ID NO: 2791 - RNA, 23 nt, Artificial
  Chemically synthesized
uuuaguauguacuguguaugauu

SEQ ID NO: 2792 - RNA, 23 nt, Artificial
  Chemically synthesized
gaccuauccaagcgcauuaccca

SEQ ID NO: 2793 - RNA, 23 nt, Artificial
  Chemically synthesized
ugaccuauccaagcgcauuaccc

SEQ ID NO: 2794 - RNA, 23 nt, Artificial
  Chemically synthesized
augaccuauccaagcgcauuacc

SEQ ID NO: 2795 - RNA, 23 nt, Artificial
  Chemically synthesized
caugaccuauccaagcgcauuac

SEQ ID NO: 2796 - RNA, 23 nt, Artificial
  Chemically synthesized
acaugaccuauccaagcgcauua

SEQ ID NO: 2797 - RNA, 23 nt, Artificial
  Chemically synthesized
caaaccuuuuguucucuccguga

SEQ ID NO: 2798 - RNA, 23 nt, Artificial
  Chemically synthesized
gaaacuuuucuuugcaggaggag

SEQ ID NO: 2799 - RNA, 23 nt, Artificial
  Chemically synthesized
ggaaacuuuucuuugcaggagga

SEQ ID NO: 2800 - RNA, 23 nt, Artificial
  Chemically synthesized
cggaaacuuuucuuugcaggagg

SEQ ID NO: 2801 - RNA, 23 nt, Artificial
  Chemically synthesized
guuucagcagccaauaagugccc

SEQ ID NO: 2802 - RNA, 23 nt, Artificial
  Chemically synthesized
uguuucagcagccaauaagugcc

SEQ ID NO: 2803 - RNA, 23 nt, Artificial
  Chemically synthesized
auguuucagcagccaauaagugc

SEQ ID NO: 2804 - RNA, 23 nt, Artificial
  Chemically synthesized
aauguuucagcagccaauaagug

SEQ ID NO: 2805 - RNA, 23 nt, Artificial
  Chemically synthesized
uaaaaggcaagcaaaggagauga

SEQ ID NO: 2806 - RNA, 23 nt, Artificial
  Chemically synthesized
guaaaaggcaagcaaaggagaug

SEQ ID NO: 2807 - RNA, 23 nt, Artificial
  Chemically synthesized
gguaaaaggcaagcaaaggagau

SEQ ID NO: 2808 - RNA, 23 nt, Artificial
  Chemically synthesized
agguaaaaggcaagcaaaggaga

SEQ ID NO: 2809 - RNA, 23 nt, Artificial
  Chemically synthesized
uuccucacccuagauuuguauaa

SEQ ID NO: 2810 - RNA, 23 nt, Artificial
  Chemically synthesized
auuccucacccuagauuuguaua

SEQ ID NO: 2811 - RNA, 23 nt, Artificial
  Chemically synthesized
uauuccucacccuagauuuguau

SEQ ID NO: 2812 - RNA, 23 nt, Artificial
  Chemically synthesized
guauuccucacccuagauuugua

SEQ ID NO: 2813 - RNA, 23 nt, Artificial
  Chemically synthesized
ccaacaucgagaccuucgauguc

SEQ ID NO: 2814 - RNA, 23 nt, Artificial
  Chemically synthesized
uccaacaucgagaccuucgaugu

SEQ ID NO: 2815 - RNA, 23 nt, Artificial
  Chemically synthesized
cuccaacaucgagaccuucgaug

SEQ ID NO: 2816 - RNA, 23 nt, Artificial
  Chemically synthesized
ucuccaacaucgagaccuucgau

SEQ ID NO: 2817 - RNA, 23 nt, Artificial
  Chemically synthesized
aucuccaacaucgagaccuucga

SEQ ID NO: 2818 - RNA, 23 nt, Artificial
  Chemically synthesized
ggcuagagaguuugaggauugcu

SEQ ID NO: 2819 - RNA, 23 nt, Artificial
  Chemically synthesized
uggcuagagaguuugaggauugc

SEQ ID NO: 2820 - RNA, 23 nt, Artificial
  Chemically synthesized
guggcuagagaguuugaggauug

SEQ ID NO: 2821 - RNA, 23 nt, Artificial
  Chemically synthesized
uguggcuagagaguuugaggauu

SEQ ID NO: 2822 - RNA, 23 nt, Artificial
  Chemically synthesized
aaaugccuuuuuguccaucccuu

SEQ ID NO: 2823 - RNA, 23 nt, Artificial
  Chemically synthesized
cagaguauuuuuguacagauuug

SEQ ID NO: 2824 - RNA, 23 nt, Artificial
  Chemically synthesized
ccagaguauuuuuguacagauuu

SEQ ID NO: 2825 - RNA, 23 nt, Artificial
  Chemically synthesized
accagaguauuuuuguacagauu

SEQ ID NO: 2826 - RNA, 23 nt, Artificial
  Chemically synthesized
aaccagaguauuuuuguacagau

SEQ ID NO: 2827 - RNA, 23 nt, Artificial
  Chemically synthesized
agagaggaccaaccagaauuccc

SEQ ID NO: 2828 - RNA, 23 nt, Artificial
  Chemically synthesized
gucuuaagaaagagguaaaaggc

SEQ ID NO: 2829 - RNA, 23 nt, Artificial
  Chemically synthesized
agucuuaagaaagagguaaaagg

SEQ ID NO: 2830 - RNA, 23 nt, Artificial
  Chemically synthesized
caacgaguuugaccaguaccugc

SEQ ID NO: 2831 - RNA, 23 nt, Artificial
  Chemically synthesized
ucaacgaguuugaccaguaccug

SEQ ID NO: 2832 - RNA, 23 nt, Artificial
  Chemically synthesized
gucaacgaguuugaccaguaccu

SEQ ID NO: 2833 - RNA, 23 nt, Artificial
  Chemically synthesized
ugucaacgaguuugaccaguacc

SEQ ID NO: 2834 - RNA, 23 nt, Artificial
  Chemically synthesized
augucaacgaguuugaccaguac

SEQ ID NO: 2835 - RNA, 23 nt, Artificial
  Chemically synthesized
caggccaaccuuggcuaaaugga

SEQ ID NO: 2836 - RNA, 23 nt, Artificial
  Chemically synthesized
ccaggccaaccuuggcuaaaugg

SEQ ID NO: 2837 - RNA, 23 nt, Artificial
  Chemically synthesized
gccaggccaaccuuggcuaaaug

SEQ ID NO: 2838 - RNA, 23 nt, Artificial
  Chemically synthesized
ggccaggccaaccuuggcuaaau

SEQ ID NO: 2839 - RNA, 23 nt, Artificial
  Chemically synthesized
uggccaggccaaccuuggcuaaa

SEQ ID NO: 2840 - RNA, 23 nt, Artificial
  Chemically synthesized
ccacguguggauguccaagcagc

SEQ ID NO: 2841 - RNA, 23 nt, Artificial
  Chemically synthesized
gccacguguggauguccaagcag

SEQ ID NO: 2842 - RNA, 23 nt, Artificial
  Chemically synthesized
ggccacguguggauguccaagca

SEQ ID NO: 2843 - RNA, 23 nt, Artificial
  Chemically synthesized
ucagaacaccagcaguuaaccuu

SEQ ID NO: 2844 - RNA, 23 nt, Artificial
  Chemically synthesized
cucagaacaccagcaguuaaccu

SEQ ID NO: 2845 - RNA, 23 nt, Artificial
  Chemically synthesized
ucucagaacaccagcaguuaacc

SEQ ID NO: 2846 - RNA, 23 nt, Artificial
  Chemically synthesized
cucucagaacaccagcaguuaac

SEQ ID NO: 2847 - RNA, 23 nt, Artificial
  Chemically synthesized
ccucucagaacaccagcaguuaa

SEQ ID NO: 2848 - RNA, 23 nt, Artificial
  Chemically synthesized
cagaauuguguuaugugaucagu

SEQ ID NO: 2849 - RNA, 23 nt, Artificial
  Chemically synthesized
ccuucaagacauuccacuugcua

SEQ ID NO: 2850 - RNA, 23 nt, Artificial
  Chemically synthesized
accuucaagacauuccacuugcu

SEQ ID NO: 2851 - RNA, 23 nt, Artificial
  Chemically synthesized
aaccuucaagacauuccacuugc

SEQ ID NO: 2852 - RNA, 23 nt, Artificial
  Chemically synthesized
uaaccuucaagacauuccacuug

SEQ ID NO: 2853 - RNA, 23 nt, Artificial
  Chemically synthesized
uuaaccuucaagacauuccacuu

SEQ ID NO: 2854 - RNA, 23 nt, Artificial
  Chemically synthesized
auaaaggccuuauuuugcaauua

SEQ ID NO: 2855 - RNA, 23 nt, Artificial
  Chemically synthesized
aauaaaggccuuauuuugcaauu

SEQ ID NO: 2856 - RNA, 23 nt, Artificial
  Chemically synthesized
aaauaaaggccuuauuuugcaau

SEQ ID NO: 2857 - RNA, 23 nt, Artificial
  Chemically synthesized
aaaauaaaggccuuauuuugcaa

SEQ ID NO: 2858 - RNA, 23 nt, Artificial
  Chemically synthesized
uaacaguuuuagaagucaguaga

SEQ ID NO: 2859 - RNA, 23 nt, Artificial
  Chemically synthesized
gauucauuaccauuuugagggga

SEQ ID NO: 2860 - RNA, 23 nt, Artificial
  Chemically synthesized
ugauucauuaccauuuugagggg

SEQ ID NO: 2861 - RNA, 23 nt, Artificial
  Chemically synthesized
augauucauuaccauuuugaggg

SEQ ID NO: 2862 - RNA, 23 nt, Artificial
  Chemically synthesized
uaugauucauuaccauuuugagg

SEQ ID NO: 2863 - RNA, 23 nt, Artificial
  Chemically synthesized
guaugauucauuaccauuuugag

SEQ ID NO: 2864 - RNA, 23 nt, Artificial
  Chemically synthesized
caccagcaguuaaccuucaagac

SEQ ID NO: 2865 - RNA, 23 nt, Artificial
  Chemically synthesized
acaccagcaguuaaccuucaaga

SEQ ID NO: 2866 - RNA, 23 nt, Artificial
  Chemically synthesized
aacaccagcaguuaaccuucaag

SEQ ID NO: 2867 - RNA, 23 nt, Artificial
  Chemically synthesized
gaacaccagcaguuaaccuucaa

SEQ ID NO: 2868 - RNA, 23 nt, Artificial
  Chemically synthesized
ugugucauccauauuucucuaca

SEQ ID NO: 2869 - RNA, 23 nt, Artificial
  Chemically synthesized
augugucauccauauuucucuac

SEQ ID NO: 2870 - RNA, 23 nt, Artificial
  Chemically synthesized
caugugucauccauauuucucua

SEQ ID NO: 2871 - RNA, 23 nt, Artificial
  Chemically synthesized
ggagacuucugaacgagagcgag

SEQ ID NO: 2872 - RNA, 23 nt, Artificial
  Chemically synthesized
aggaccacccggauuacaaguac

SEQ ID NO: 2873 - RNA, 23 nt, Artificial
  Chemically synthesized
aaggaccacccggauuacaagua

SEQ ID NO: 2874 - RNA, 23 nt, Artificial
  Chemically synthesized
gaaggaccacccggauuacaagu

SEQ ID NO: 2875 - RNA, 23 nt, Artificial
  Chemically synthesized
agaaggaccacccggauuacaag

SEQ ID NO: 2876 - RNA, 23 nt, Artificial
  Chemically synthesized
aagaaggaccacccggauuacaa

SEQ ID NO: 2877 - RNA, 23 nt, Artificial
  Chemically synthesized
gagaguuugaggauugcuuuuua

SEQ ID NO: 2878 - RNA, 23 nt, Artificial
  Chemically synthesized
agagaguuugaggauugcuuuuu

SEQ ID NO: 2879 - RNA, 23 nt, Artificial
  Chemically synthesized
uagagaguuugaggauugcuuuu

SEQ ID NO: 2880 - RNA, 23 nt, Artificial
  Chemically synthesized
cuagagaguuugaggauugcuuu

SEQ ID NO: 2881 - RNA, 23 nt, Artificial
  Chemically synthesized
gcuagagaguuugaggauugcuu

SEQ ID NO: 2882 - RNA, 23 nt, Artificial
  Chemically synthesized
aacagugugcccuagcuuuucuu

SEQ ID NO: 2883 - RNA, 23 nt, Artificial
  Chemically synthesized
aaaaacaccuugagccuuaaaac

SEQ ID NO: 2884 - RNA, 23 nt, Artificial
  Chemically synthesized
gaaaaacaccuugagccuuaaaa

SEQ ID NO: 2885 - RNA, 23 nt, Artificial
  Chemically synthesized
uguguaugauucauuaccauuuu

SEQ ID NO: 2886 - RNA, 23 nt, Artificial
  Chemically synthesized
cuguguaugauucauuaccauuu

SEQ ID NO: 2887 - RNA, 23 nt, Artificial
  Chemically synthesized
acuguguaugauucauuaccauu

SEQ ID NO: 2888 - RNA, 23 nt, Artificial
  Chemically synthesized
uacuguguaugauucauuaccau

SEQ ID NO: 2889 - RNA, 23 nt, Artificial
  Chemically synthesized
guacuguguaugauucauuacca

SEQ ID NO: 2890 - RNA, 23 nt, Artificial
  Chemically synthesized
gcauccuucaauuucuguauaaa

SEQ ID NO: 2891 - RNA, 23 nt, Artificial
  Chemically synthesized
ggcauccuucaauuucuguauaa

SEQ ID NO: 2892 - RNA, 23 nt, Artificial
  Chemically synthesized
uggcauccuucaauuucuguaua

SEQ ID NO: 2893 - RNA, 23 nt, Artificial
  Chemically synthesized
auggcauccuucaauuucuguau

SEQ ID NO: 2894 - RNA, 23 nt, Artificial
  Chemically synthesized
uauggcauccuucaauuucugua

SEQ ID NO: 2895 - RNA, 23 nt, Artificial
  Chemically synthesized
acagugugcccuagcuuuucuug

SEQ ID NO: 2896 - RNA, 23 nt, Artificial
  Chemically synthesized
cuucuucuucuuccuuaaagaca

SEQ ID NO: 2897 - RNA, 23 nt, Artificial
  Chemically synthesized
cuuugcgauuuaaggaggagcug

SEQ ID NO: 2898 - RNA, 23 nt, Artificial
  Chemically synthesized
gcuuugcgauuuaaggaggagcu

SEQ ID NO: 2899 - RNA, 23 nt, Artificial
  Chemically synthesized
ggcuuugcgauuuaaggaggagc

SEQ ID NO: 2900 - RNA, 23 nt, Artificial
  Chemically synthesized
aggcuuugcgauuuaaggaggag

SEQ ID NO: 2901 - RNA, 23 nt, Artificial
  Chemically synthesized
caggcuuugcgauuuaaggagga

SEQ ID NO: 2902 - RNA, 23 nt, Artificial
  Chemically synthesized
cuuauuuuuccaacagcuaaacu

SEQ ID NO: 2903 - RNA, 23 nt, Artificial
  Chemically synthesized
ucuuauuuuuccaacagcuaaac

SEQ ID NO: 2904 - RNA, 23 nt, Artificial
  Chemically synthesized
cucuuauuuuuccaacagcuaaa

SEQ ID NO: 2905 - RNA, 23 nt, Artificial
  Chemically synthesized
gcucuuauuuuuccaacagcuaa

SEQ ID NO: 2906 - RNA, 23 nt, Artificial
  Chemically synthesized
ugcucuuauuuuuccaacagcua

SEQ ID NO: 2907 - RNA, 23 nt, Artificial
  Chemically synthesized
guaaggagagguuuuaauuaaaa

SEQ ID NO: 2908 - RNA, 23 nt, Artificial
  Chemically synthesized
uguaaggagagguuuuaauuaaa

SEQ ID NO: 2909 - RNA, 23 nt, Artificial
  Chemically synthesized
uuguaaggagagguuuuaauuaa

SEQ ID NO: 2910 - RNA, 23 nt, Artificial
  Chemically synthesized
uuuguaaggagagguuuuaauua

SEQ ID NO: 2911 - RNA, 23 nt, Artificial
  Chemically synthesized
uuuuguaaggagagguuuuaauu

SEQ ID NO: 2912 - RNA, 23 nt, Artificial
  Chemically synthesized
gaguaaacaauagucuagagaag

SEQ ID NO: 2913 - RNA, 23 nt, Artificial
  Chemically synthesized
ggaguaaacaauagucuagagaa

SEQ ID NO: 2914 - RNA, 23 nt, Artificial
  Chemically synthesized
cauuuaagcuaaaggcaacucgu

SEQ ID NO: 2915 - RNA, 23 nt, Artificial
  Chemically synthesized
ugagagauugcaaauguagugua

SEQ ID NO: 2916 - RNA, 23 nt, Artificial
  Chemically synthesized
cuucugaacgagagcgagaagcg

SEQ ID NO: 2917 - RNA, 23 nt, Artificial
  Chemically synthesized
acuucugaacgagagcgagaagc

SEQ ID NO: 2918 - RNA, 23 nt, Artificial
  Chemically synthesized
gacuucugaacgagagcgagaag

SEQ ID NO: 2919 - RNA, 23 nt, Artificial
  Chemically synthesized
agacuucugaacgagagcgagaa

SEQ ID NO: 2920 - RNA, 23 nt, Artificial
  Chemically synthesized
gagacuucugaacgagagcgaga

SEQ ID NO: 2921 - RNA, 23 nt, Artificial
  Chemically synthesized
aaauguaguguaucacugaguca

SEQ ID NO: 2922 - RNA, 23 nt, Artificial
  Chemically synthesized
caaauguaguguaucacugaguc

SEQ ID NO: 2923 - RNA, 23 nt, Artificial
  Chemically synthesized
gcaaauguaguguaucacugagu

SEQ ID NO: 2924 - RNA, 23 nt, Artificial
  Chemically synthesized
ugcaaauguaguguaucacugag

SEQ ID NO: 2925 - RNA, 23 nt, Artificial
  Chemically synthesized
uugcaaauguaguguaucacuga

SEQ ID NO: 2926 - RNA, 23 nt, Artificial
  Chemically synthesized
aaauaaccgaagaaagagaggac

SEQ ID NO: 2927 - RNA, 23 nt, Artificial
  Chemically synthesized
aaaauaaccgaagaaagagagga

SEQ ID NO: 2928 - RNA, 23 nt, Artificial
  Chemically synthesized
aaaaauaaccgaagaaagagagg

SEQ ID NO: 2929 - RNA, 23 nt, Artificial
  Chemically synthesized
uaaaaauaaccgaagaaagagag

SEQ ID NO: 2930 - RNA, 23 nt, Artificial
  Chemically synthesized
cuaaaaauaaccgaagaaagaga

SEQ ID NO: 2931 - RNA, 23 nt, Artificial
  Chemically synthesized
augcucuuauuuuuccaacagcu

SEQ ID NO: 2932 - RNA, 23 nt, Artificial
  Chemically synthesized
aaugcucuuauuuuuccaacagc

SEQ ID NO: 2933 - RNA, 23 nt, Artificial
  Chemically synthesized
aaaugcucuuauuuuuccaacag

SEQ ID NO: 2934 - RNA, 23 nt, Artificial
  Chemically synthesized
uaaaugcucuuauuuuuccaaca

SEQ ID NO: 2935 - RNA, 23 nt, Artificial
  Chemically synthesized
gccuuauuuugcaauuaugggag

SEQ ID NO: 2936 - RNA, 23 nt, Artificial
  Chemically synthesized
ucguacccaaauuuccaagacac

SEQ ID NO: 2937 - RNA, 23 nt, Artificial
  Chemically synthesized
aggcaacucguacccaaauuucc

SEQ ID NO: 2938 - RNA, 23 nt, Artificial
  Chemically synthesized
agaaaaaaguccucugugaggaa

SEQ ID NO: 2939 - RNA, 23 nt, Artificial
  Chemically synthesized
aagaaaaaaguccucugugagga

SEQ ID NO: 2940 - RNA, 23 nt, Artificial
  Chemically synthesized
aaagaaaaaaguccucugugagg

SEQ ID NO: 2941 - RNA, 23 nt, Artificial
  Chemically synthesized
uaaagaaaaaaguccucugugag

SEQ ID NO: 2942 - RNA, 23 nt, Artificial
  Chemically synthesized
uuaaagaaaaaaguccucuguga

SEQ ID NO: 2943 - RNA, 23 nt, Artificial
  Chemically synthesized
aaaggguauggucaucuguuguu

SEQ ID NO: 2944 - RNA, 23 nt, Artificial
  Chemically synthesized
caaaggguauggucaucuguugu

SEQ ID NO: 2945 - RNA, 23 nt, Artificial
  Chemically synthesized
gaugucaacgaguuugaccagua

SEQ ID NO: 2946 - RNA, 23 nt, Artificial
  Chemically synthesized
aaacugacuggaaacuucagugg

SEQ ID NO: 2947 - RNA, 23 nt, Artificial
  Chemically synthesized
gaaacugacuggaaacuucagug

SEQ ID NO: 2948 - RNA, 23 nt, Artificial
  Chemically synthesized
cgaaacugacuggaaacuucagu

SEQ ID NO: 2949 - RNA, 23 nt, Artificial
  Chemically synthesized
ucgaaacugacuggaaacuucag

SEQ ID NO: 2950 - RNA, 23 nt, Artificial
  Chemically synthesized
cucgaaacugacuggaaacuuca

SEQ ID NO: 2951 - RNA, 23 nt, Artificial
  Chemically synthesized
ccuugagccuuaaaacggugcug

SEQ ID NO: 2952 - RNA, 23 nt, Artificial
  Chemically synthesized
accuugagccuuaaaacggugcu

SEQ ID NO: 2953 - RNA, 23 nt, Artificial
  Chemically synthesized
caccuugagccuuaaaacggugc

SEQ ID NO: 2954 - RNA, 23 nt, Artificial
  Chemically synthesized
acaccuugagccuuaaaacggug

SEQ ID NO: 2955 - RNA, 23 nt, Artificial
  Chemically synthesized
aacaccuugagccuuaaaacggu

SEQ ID NO: 2956 - RNA, 23 nt, Artificial
  Chemically synthesized
uaaagacauuuaagcuaaaggca

SEQ ID NO: 2957 - RNA, 23 nt, Artificial
  Chemically synthesized
cucaaaggcuacgacuggacgcu

SEQ ID NO: 2958 - RNA, 23 nt, Artificial
  Chemically synthesized
gcucaaaggcuacgacuggacgc

SEQ ID NO: 2959 - RNA, 23 nt, Artificial
  Chemically synthesized
ugcucaaaggcuacgacuggacg

SEQ ID NO: 2960 - RNA, 23 nt, Artificial
  Chemically synthesized
gugcucaaaggcuacgacuggac

SEQ ID NO: 2961 - RNA, 23 nt, Artificial
  Chemically synthesized
ggugcucaaaggcuacgacugga

SEQ ID NO: 2962 - RNA, 23 nt, Artificial
  Chemically synthesized
auuuuguaaggagagguuuuaau

SEQ ID NO: 2963 - RNA, 23 nt, Artificial
  Chemically synthesized
ugaaaucuguucugggaauguuu

SEQ ID NO: 2964 - RNA, 23 nt, Artificial
  Chemically synthesized
augaaaucuguucugggaauguu

SEQ ID NO: 2965 - RNA, 23 nt, Artificial
  Chemically synthesized
cuucaaccucccacacuacagcc

SEQ ID NO: 2966 - RNA, 23 nt, Artificial
  Chemically synthesized
cuacuccaccuucaccuacauga

SEQ ID NO: 2967 - RNA, 23 nt, Artificial
  Chemically synthesized
ucuacuccaccuucaccuacaug

SEQ ID NO: 2968 - RNA, 23 nt, Artificial
  Chemically synthesized
cucuacuccaccuucaccuacau

SEQ ID NO: 2969 - RNA, 23 nt, Artificial
  Chemically synthesized
guguaugauucauuaccauuuug

SEQ ID NO: 2970 - RNA, 23 nt, Artificial
  Chemically synthesized
ucaggcuuugcgauuuaaggagg

SEQ ID NO: 2971 - RNA, 23 nt, Artificial
  Chemically synthesized
aacaugaccuauccaagcgcauu

SEQ ID NO: 2972 - RNA, 23 nt, Artificial
  Chemically synthesized
aaacaugaccuauccaagcgcau

SEQ ID NO: 2973 - RNA, 23 nt, Artificial
  Chemically synthesized
caaacaugaccuauccaagcgca

SEQ ID NO: 2974 - RNA, 23 nt, Artificial
  Chemically synthesized
uauuuuguaaggagagguuuuaa

SEQ ID NO: 2975 - RNA, 23 nt, Artificial
  Chemically synthesized
acaauagucuagagaagcauuug

SEQ ID NO: 2976 - RNA, 23 nt, Artificial
  Chemically synthesized
aacaauagucuagagaagcauuu

SEQ ID NO: 2977 - RNA, 23 nt, Artificial
  Chemically synthesized
aaacaauagucuagagaagcauu

SEQ ID NO: 2978 - RNA, 23 nt, Artificial
  Chemically synthesized
uaaacaauagucuagagaagcau

SEQ ID NO: 2979 - RNA, 23 nt, Artificial
  Chemically synthesized
guaaacaauagucuagagaagca

SEQ ID NO: 2980 - RNA, 23 nt, Artificial
  Chemically synthesized
aucaacgagaaacuggacuuuuu

SEQ ID NO: 2981 - RNA, 23 nt, Artificial
  Chemically synthesized
ccuucgaugucaacgaguuugac

SEQ ID NO: 2982 - RNA, 23 nt, Artificial
  Chemically synthesized
accuucgaugucaacgaguuuga

SEQ ID NO: 2983 - RNA, 23 nt, Artificial
  Chemically synthesized
gaccuucgaugucaacgaguuug

SEQ ID NO: 2984 - RNA, 23 nt, Artificial
  Chemically synthesized
agaccuucgaugucaacgaguuu

SEQ ID NO: 2985 - RNA, 23 nt, Artificial
  Chemically synthesized
gagaccuucgaugucaacgaguu

SEQ ID NO: 2986 - RNA, 23 nt, Artificial
  Chemically synthesized
uugcaggaggagaagagaagggg

SEQ ID NO: 2987 - RNA, 23 nt, Artificial
  Chemically synthesized
uuugcaggaggagaagagaaggg

SEQ ID NO: 2988 - RNA, 23 nt, Artificial
  Chemically synthesized
cuuugcaggaggagaagagaagg

SEQ ID NO: 2989 - RNA, 23 nt, Artificial
  Chemically synthesized
ucuuugcaggaggagaagagaag

SEQ ID NO: 2990 - RNA, 23 nt, Artificial
  Chemically synthesized
uucuuugcaggaggagaagagaa

SEQ ID NO: 2991 - RNA, 23 nt, Artificial
  Chemically synthesized
aggccaaccuuggcuaaauggag

SEQ ID NO: 2992 - RNA, 23 nt, Artificial
  Chemically synthesized
aagcggagcucgaaacugacugg

SEQ ID NO: 2993 - RNA, 23 nt, Artificial
  Chemically synthesized
aaagcggagcucgaaacugacug

SEQ ID NO: 2994 - RNA, 23 nt, Artificial
  Chemically synthesized
gaaagcggagcucgaaacugacu

SEQ ID NO: 2995 - RNA, 23 nt, Artificial
  Chemically synthesized
cgaaagcggagcucgaaacugac

SEQ ID NO: 2996 - RNA, 23 nt, Artificial
  Chemically synthesized
ccgaaagcggagcucgaaacuga

SEQ ID NO: 2997 - RNA, 23 nt, Artificial
  Chemically synthesized
caauagucuagagaagcauuugg

SEQ ID NO: 2998 - RNA, 23 nt, Artificial
  Chemically synthesized
aaaacaccuugagccuuaaaacg

SEQ ID NO: 2999 - RNA, 23 nt, Artificial
  Chemically synthesized
caaguuucuuuguauuccucacc

SEQ ID NO: 3000 - RNA, 23 nt, Artificial
  Chemically synthesized
gcaaguuucuuuguauuccucac

SEQ ID NO: 3001 - RNA, 23 nt, Artificial
  Chemically synthesized
agcaaguuucuuuguauuccuca

SEQ ID NO: 3002 - RNA, 23 nt, Artificial
  Chemically synthesized
aagcaaguuucuuuguauuccuc

SEQ ID NO: 3003 - RNA, 23 nt, Artificial
  Chemically synthesized
aaagcaaguuucuuuguauuccu

SEQ ID NO: 3004 - RNA, 23 nt, Artificial
  Chemically synthesized
cauuugguaagcuuuaucauaua

SEQ ID NO: 3005 - RNA, 23 nt, Artificial
  Chemically synthesized
gcauuugguaagcuuuaucauau

SEQ ID NO: 3006 - RNA, 23 nt, Artificial
  Chemically synthesized
agcauuugguaagcuuuaucaua

SEQ ID NO: 3007 - RNA, 23 nt, Artificial
  Chemically synthesized
aagcauuugguaagcuuuaucau

SEQ ID NO: 3008 - RNA, 23 nt, Artificial
  Chemically synthesized
gaagcauuugguaagcuuuauca

SEQ ID NO: 3009 - RNA, 23 nt, Artificial
  Chemically synthesized
agaacaccagcaguuaaccuuca

SEQ ID NO: 3010 - RNA, 23 nt, Artificial
  Chemically synthesized
cuguucugggaauguuucagcag

SEQ ID NO: 3011 - RNA, 23 nt, Artificial
  Chemically synthesized
ucuguucugggaauguuucagca

SEQ ID NO: 3012 - RNA, 23 nt, Artificial
  Chemically synthesized
aucuguucugggaauguuucagc

SEQ ID NO: 3013 - RNA, 23 nt, Artificial
  Chemically synthesized
aaucuguucugggaauguuucag

SEQ ID NO: 3014 - RNA, 23 nt, Artificial
  Chemically synthesized
aaaucuguucugggaauguuuca

SEQ ID NO: 3015 - RNA, 23 nt, Artificial
  Chemically synthesized
caagaaggaccacccggauuaca

SEQ ID NO: 3016 - RNA, 23 nt, Artificial
  Chemically synthesized
acaagaaggaccacccggauuac

SEQ ID NO: 3017 - RNA, 23 nt, Artificial
  Chemically synthesized
cacaagaaggaccacccggauua

SEQ ID NO: 3018 - RNA, 23 nt, Artificial
  Chemically synthesized
acagauuugcuuucucuuacaaa

SEQ ID NO: 3019 - RNA, 23 nt, Artificial
  Chemically synthesized
uacagauuugcuuucucuuacaa

SEQ ID NO: 3020 - RNA, 23 nt, Artificial
  Chemically synthesized
guacagauuugcuuucucuuaca

SEQ ID NO: 3021 - RNA, 23 nt, Artificial
  Chemically synthesized
uguacagauuugcuuucucuuac

SEQ ID NO: 3022 - RNA, 23 nt, Artificial
  Chemically synthesized
uuguacagauuugcuuucucuua

SEQ ID NO: 3023 - RNA, 23 nt, Artificial
  Chemically synthesized
acgucaucuccaacaucgagacc

SEQ ID NO: 3024 - RNA, 23 nt, Artificial
  Chemically synthesized
gacgucaucuccaacaucgagac

SEQ ID NO: 3025 - RNA, 23 nt, Artificial
  Chemically synthesized
cgacgucaucuccaacaucgaga

SEQ ID NO: 3026 - RNA, 23 nt, Artificial
  Chemically synthesized
gcgacgucaucuccaacaucgag

SEQ ID NO: 3027 - RNA, 23 nt, Artificial
  Chemically synthesized
agcgacgucaucuccaacaucga

SEQ ID NO: 3028 - RNA, 23 nt, Artificial
  Chemically synthesized
aaacaaacuggaaacuuguuucu

SEQ ID NO: 3029 - RNA, 23 nt, Artificial
  Chemically synthesized
aaaacaaacuggaaacuuguuuc

SEQ ID NO: 3030 - RNA, 23 nt, Artificial
  Chemically synthesized
gaaaacaaacuggaaacuuguuu

SEQ ID NO: 3031 - RNA, 23 nt, Artificial
  Chemically synthesized
ugaaaacaaacuggaaacuuguu

SEQ ID NO: 3032 - RNA, 23 nt, Artificial
  Chemically synthesized
uugaaaacaaacuggaaacuugu

SEQ ID NO: 3033 - RNA, 23 nt, Artificial
  Chemically synthesized
aaacaccuugagccuuaaaacgg

SEQ ID NO: 3034 - RNA, 23 nt, Artificial
  Chemically synthesized
gauacuucuguaacuuaagaaac

SEQ ID NO: 3035 - RNA, 23 nt, Artificial
  Chemically synthesized
agauacuucuguaacuuaagaaa

SEQ ID NO: 3036 - RNA, 23 nt, Artificial
  Chemically synthesized
aagauacuucuguaacuuaagaa

SEQ ID NO: 3037 - RNA, 23 nt, Artificial
  Chemically synthesized
aaaagauacuucuguaacuuaag

SEQ ID NO: 3038 - RNA, 23 nt, Artificial
  Chemically synthesized
ccuuaaaacggugcugcugggaa

SEQ ID NO: 3039 - RNA, 23 nt, Artificial
  Chemically synthesized
cuaaacuacucuuaguugaacag

SEQ ID NO: 3040 - RNA, 23 nt, Artificial
  Chemically synthesized
gcuaaacuacucuuaguugaaca

SEQ ID NO: 3041 - RNA, 23 nt, Artificial
  Chemically synthesized
agcuaaacuacucuuaguugaac

SEQ ID NO: 3042 - RNA, 23 nt, Artificial
  Chemically synthesized
cagcuaaacuacucuuaguugaa

SEQ ID NO: 3043 - RNA, 23 nt, Artificial
  Chemically synthesized
acagcuaaacuacucuuaguuga

SEQ ID NO: 3044 - RNA, 23 nt, Artificial
  Chemically synthesized
aaaggagaugaaaucuguucugg

SEQ ID NO: 3045 - RNA, 23 nt, Artificial
  Chemically synthesized
gaagaaagagaggaccaaccaga

SEQ ID NO: 3046 - RNA, 23 nt, Artificial
  Chemically synthesized
ugaagaaggagagcgaggaggac

SEQ ID NO: 3047 - RNA, 23 nt, Artificial
  Chemically synthesized
cugaagaaggagagcgaggagga

SEQ ID NO: 3048 - RNA, 23 nt, Artificial
  Chemically synthesized
ucugaagaaggagagcgaggagg

SEQ ID NO: 3049 - RNA, 23 nt, Artificial
  Chemically synthesized
aucugaagaaggagagcgaggag

SEQ ID NO: 3050 - RNA, 23 nt, Artificial
  Chemically synthesized
gaucugaagaaggagagcgagga

SEQ ID NO: 3051 - RNA, 23 nt, Artificial
  Chemically synthesized
cucucugccuguuuggacuuugu

SEQ ID NO: 3052 - RNA, 23 nt, Artificial
  Chemically synthesized
ucucucugccuguuuggacuuug

SEQ ID NO: 3053 - RNA, 23 nt, Artificial
  Chemically synthesized
aucucucugccuguuuggacuuu

SEQ ID NO: 3054 - RNA, 23 nt, Artificial
  Chemically synthesized
aaucucucugccuguuuggacuu

SEQ ID NO: 3055 - RNA, 23 nt, Artificial
  Chemically synthesized
aaaucucucugccuguuuggacu

SEQ ID NO: 3056 - RNA, 23 nt, Artificial
  Chemically synthesized
acuuuucuuugcaggaggagaag

SEQ ID NO: 3057 - RNA, 23 nt, Artificial
  Chemically synthesized
aacuuuucuuugcaggaggagaa

SEQ ID NO: 3058 - RNA, 23 nt, Artificial
  Chemically synthesized
aaacuuuucuuugcaggaggaga

SEQ ID NO: 3059 - RNA, 23 nt, Artificial
  Chemically synthesized
guauaaaugagagauugcaaaug

SEQ ID NO: 3060 - RNA, 23 nt, Artificial
  Chemically synthesized
uguauaaaugagagauugcaaau

SEQ ID NO: 3061 - RNA, 23 nt, Artificial
  Chemically synthesized
uuguauaaaugagagauugcaaa

SEQ ID NO: 3062 - RNA, 23 nt, Artificial
  Chemically synthesized
uuuguauaaaugagagauugcaa

SEQ ID NO: 3063 - RNA, 23 nt, Artificial
  Chemically synthesized
uuuuguauaaaugagagauugca

SEQ ID NO: 3064 - RNA, 23 nt, Artificial
  Chemically synthesized
guuaaccuucaagacauuccacu

SEQ ID NO: 3065 - RNA, 23 nt, Artificial
  Chemically synthesized
cuaaaucucucugccuguuugga

SEQ ID NO: 3066 - RNA, 23 nt, Artificial
  Chemically synthesized
cauccuucaauuucuguauaaaa

SEQ ID NO: 3067 - RNA, 23 nt, Artificial
  Chemically synthesized
cuguauaaaagcagaucuuuuua

SEQ ID NO: 3068 - RNA, 23 nt, Artificial
  Chemically synthesized
ucuguauaaaagcagaucuuuuu

SEQ ID NO: 3069 - RNA, 23 nt, Artificial
  Chemically synthesized
uucuguauaaaagcagaucuuuu

SEQ ID NO: 3070 - RNA, 23 nt, Artificial
  Chemically synthesized
uuucuguauaaaagcagaucuuu

SEQ ID NO: 3071 - RNA, 23 nt, Artificial
  Chemically synthesized
auuucuguauaaaagcagaucuu

SEQ ID NO: 3072 - RNA, 23 nt, Artificial
  Chemically synthesized
gagucauuugcaguguuuucugc

SEQ ID NO: 3073 - RNA, 23 nt, Artificial
  Chemically synthesized
ugagucauuugcaguguuuucug

SEQ ID NO: 3074 - RNA, 23 nt, Artificial
  Chemically synthesized
cugagucauuugcaguguuuucu

SEQ ID NO: 3075 - RNA, 23 nt, Artificial
  Chemically synthesized
acugagucauuugcaguguuuuc

SEQ ID NO: 3076 - RNA, 23 nt, Artificial
  Chemically synthesized
cacugagucauuugcaguguuuu

SEQ ID NO: 3077 - RNA, 23 nt, Artificial
  Chemically synthesized
cacugcagucuuaagaaagaggu

SEQ ID NO: 3078 - RNA, 23 nt, Artificial
  Chemically synthesized
auuuaaggaggagcugccuuaaa

SEQ ID NO: 3079 - RNA, 23 nt, Artificial
  Chemically synthesized
cuacacacagcucacucgaccuu

SEQ ID NO: 3080 - RNA, 23 nt, Artificial
  Chemically synthesized
ucuacacacagcucacucgaccu

SEQ ID NO: 3081 - RNA, 23 nt, Artificial
  Chemically synthesized
gucuacacacagcucacucgacc

SEQ ID NO: 3082 - RNA, 23 nt, Artificial
  Chemically synthesized
cgucuacacacagcucacucgac

SEQ ID NO: 3083 - RNA, 23 nt, Artificial
  Chemically synthesized
ccgucuacacacagcucacucga

SEQ ID NO: 3084 - RNA, 23 nt, Artificial
  Chemically synthesized
gguuuguguucguguuuuguuug

SEQ ID NO: 3085 - RNA, 23 nt, Artificial
  Chemically synthesized
ugguuuguguucguguuuuguuu

SEQ ID NO: 3086 - RNA, 23 nt, Artificial
  Chemically synthesized
uugguuuguguucguguuuuguu

SEQ ID NO: 3087 - RNA, 23 nt, Artificial
  Chemically synthesized
uuugguuuguguucguguuuugu

SEQ ID NO: 3088 - RNA, 23 nt, Artificial
  Chemically synthesized
cuuugguuuguguucguguuuug

SEQ ID NO: 3089 - RNA, 23 nt, Artificial
  Chemically synthesized
ucuuaagaaagagguaaaaggca

SEQ ID NO: 3090 - RNA, 23 nt, Artificial
  Chemically synthesized
cgaucugaagaaggagagcgagg

SEQ ID NO: 3091 - RNA, 23 nt, Artificial
  Chemically synthesized
ccgaucugaagaaggagagcgag

SEQ ID NO: 3092 - RNA, 23 nt, Artificial
  Chemically synthesized
cccgaucugaagaaggagagcga

SEQ ID NO: 3093 - RNA, 23 nt, Artificial
  Chemically synthesized
uuucuuugcaggaggagaagaga

SEQ ID NO: 3094 - RNA, 23 nt, Artificial
  Chemically synthesized
uuuucuuugcaggaggagaagag

SEQ ID NO: 3095 - RNA, 23 nt, Artificial
  Chemically synthesized
cuuuucuuugcaggaggagaaga

SEQ ID NO: 3096 - RNA, 23 nt, Artificial
  Chemically synthesized
gaccaaccagaauucccuuugga

SEQ ID NO: 3097 - RNA, 23 nt, Artificial
  Chemically synthesized
ucucugccuguuuggacuuugua

SEQ ID NO: 3098 - RNA, 23 nt, Artificial
  Chemically synthesized
cagcgacgucaucuccaacaucg

SEQ ID NO: 3099 - RNA, 23 nt, Artificial
  Chemically synthesized
gcagcgacgucaucuccaacauc

SEQ ID NO: 3100 - RNA, 23 nt, Artificial
  Chemically synthesized
agcagcgacgucaucuccaacau

SEQ ID NO: 3101 - RNA, 23 nt, Artificial
  Chemically synthesized
cagugugcuaaaucucucugccu

SEQ ID NO: 3102 - RNA, 23 nt, Artificial
  Chemically synthesized
ucagugugcuaaaucucucugcc

SEQ ID NO: 3103 - RNA, 23 nt, Artificial
  Chemically synthesized
aucagugugcuaaaucucucugc

SEQ ID NO: 3104 - RNA, 23 nt, Artificial
  Chemically synthesized
gaucagugugcuaaaucucucug

SEQ ID NO: 3105 - RNA, 23 nt, Artificial
  Chemically synthesized
ugaucagugugcuaaaucucucu

SEQ ID NO: 3106 - RNA, 23 nt, Artificial
  Chemically synthesized
aacuuugcuuaauuccucaggcu

SEQ ID NO: 3107 - RNA, 23 nt, Artificial
  Chemically synthesized
uaacuuugcuuaauuccucaggc

SEQ ID NO: 3108 - RNA, 23 nt, Artificial
  Chemically synthesized
uuaacuuugcuuaauuccucagg

SEQ ID NO: 3109 - RNA, 23 nt, Artificial
  Chemically synthesized
guuaacuuugcuuaauuccucag

SEQ ID NO: 3110 - RNA, 23 nt, Artificial
  Chemically synthesized
gguuaacuuugcuuaauuccuca

SEQ ID NO: 3111 - RNA, 23 nt, Artificial
  Chemically synthesized
uuuuaguauguacuguguaugau

SEQ ID NO: 3112 - RNA, 23 nt, Artificial
  Chemically synthesized
uuuuuaguauguacuguguauga

SEQ ID NO: 3113 - RNA, 23 nt, Artificial
  Chemically synthesized
caauaagugcccgagcacacugc

SEQ ID NO: 3114 - RNA, 23 nt, Artificial
  Chemically synthesized
ccaauaagugcccgagcacacug

SEQ ID NO: 3115 - RNA, 23 nt, Artificial
  Chemically synthesized
gccaauaagugcccgagcacacu

SEQ ID NO: 3116 - RNA, 23 nt, Artificial
  Chemically synthesized
agccaauaagugcccgagcacac

SEQ ID NO: 3117 - RNA, 23 nt, Artificial
  Chemically synthesized
cagccaauaagugcccgagcaca

SEQ ID NO: 3118 - RNA, 23 nt, Artificial
  Chemically synthesized
gauuuaaggaggagcugccuuaa

SEQ ID NO: 3119 - RNA, 23 nt, Artificial
  Chemically synthesized
acaaacaugaccuauccaagcgc

SEQ ID NO: 3120 - RNA, 23 nt, Artificial
  Chemically synthesized
cacaaacaugaccuauccaagcg

SEQ ID NO: 3121 - RNA, 23 nt, Artificial
  Chemically synthesized
acacaaacaugaccuauccaagc

SEQ ID NO: 3122 - RNA, 23 nt, Artificial
  Chemically synthesized
gacacaaacaugaccuauccaag

SEQ ID NO: 3123 - RNA, 23 nt, Artificial
  Chemically synthesized
agacacaaacaugaccuauccaa

SEQ ID NO: 3124 - RNA, 23 nt, Artificial
  Chemically synthesized
ucguguuuuguuuguuucacuug

SEQ ID NO: 3125 - RNA, 23 nt, Artificial
  Chemically synthesized
uucguguuuuguuuguuucacuu

SEQ ID NO: 3126 - RNA, 23 nt, Artificial
  Chemically synthesized
guucguguuuuguuuguuucacu

SEQ ID NO: 3127 - RNA, 23 nt, Artificial
  Chemically synthesized
uguucguguuuuguuuguuucac

SEQ ID NO: 3128 - RNA, 23 nt, Artificial
  Chemically synthesized
guguucguguuuuguuuguuuca

SEQ ID NO: 3129 - RNA, 23 nt, Artificial
  Chemically synthesized
ucaaaggguauggucaucuguug

SEQ ID NO: 3130 - RNA, 23 nt, Artificial
  Chemically synthesized
cucaaaggguauggucaucuguu

SEQ ID NO: 3131 - RNA, 23 nt, Artificial
  Chemically synthesized
uguguucguguuuuguuuguuuc

SEQ ID NO: 3132 - RNA, 23 nt, Artificial
  Chemically synthesized
uuguguucguguuuuguuuguuu

SEQ ID NO: 3133 - RNA, 23 nt, Artificial
  Chemically synthesized
gcacucauaauauggcauccuuc

SEQ ID NO: 3134 - RNA, 23 nt, Artificial
  Chemically synthesized
agcacucauaauauggcauccuu

SEQ ID NO: 3135 - RNA, 23 nt, Artificial
  Chemically synthesized
uguguuaugugaucaguuuuggg

SEQ ID NO: 3136 - RNA, 23 nt, Artificial
  Chemically synthesized
uuguguuaugugaucaguuuugg

SEQ ID NO: 3137 - RNA, 23 nt, Artificial
  Chemically synthesized
auuguguuaugugaucaguuuug

SEQ ID NO: 3138 - RNA, 23 nt, Artificial
  Chemically synthesized
aauuguguuaugugaucaguuuu

SEQ ID NO: 3139 - RNA, 23 nt, Artificial
  Chemically synthesized
gaauuguguuaugugaucaguuu

SEQ ID NO: 3140 - RNA, 23 nt, Artificial
  Chemically synthesized
aaaaguccucugugaggaauauu

SEQ ID NO: 3141 - RNA, 23 nt, Artificial
  Chemically synthesized
aaaaaguccucugugaggaauau

SEQ ID NO: 3142 - RNA, 23 nt, Artificial
  Chemically synthesized
aaaaaaguccucugugaggaaua

SEQ ID NO: 3143 - RNA, 23 nt, Artificial
  Chemically synthesized
gaaaaaaguccucugugaggaau

SEQ ID NO: 3144 - RNA, 23 nt, Artificial
  Chemically synthesized
guguuuuguuuguuucacuuguu

SEQ ID NO: 3145 - RNA, 23 nt, Artificial
  Chemically synthesized
cguguuuuguuuguuucacuugu

SEQ ID NO: 3146 - RNA, 23 nt, Artificial
  Chemically synthesized
gccucucagaacaccagcaguua

SEQ ID NO: 3147 - RNA, 23 nt, Artificial
  Chemically synthesized
ugccucucagaacaccagcaguu

SEQ ID NO: 3148 - RNA, 23 nt, Artificial
  Chemically synthesized
gugccucucagaacaccagcagu

SEQ ID NO: 3149 - RNA, 23 nt, Artificial
  Chemically synthesized
cugcugggaaacauuugcacucu

SEQ ID NO: 3150 - RNA, 23 nt, Artificial
  Chemically synthesized
gcugcugggaaacauuugcacuc

SEQ ID NO: 3151 - RNA, 23 nt, Artificial
  Chemically synthesized
ugcugcugggaaacauuugcacu

SEQ ID NO: 3152 - RNA, 23 nt, Artificial
  Chemically synthesized
cuucgaugucaacgaguuugacc

SEQ ID NO: 3153 - RNA, 23 nt, Artificial
  Chemically synthesized
uaauuccucaggcuuugcgauuu

SEQ ID NO: 3154 - RNA, 23 nt, Artificial
  Chemically synthesized
uuaauuccucaggcuuugcgauu

SEQ ID NO: 3155 - RNA, 23 nt, Artificial
  Chemically synthesized
cuuaauuccucaggcuuugcgau

SEQ ID NO: 3156 - RNA, 23 nt, Artificial
  Chemically synthesized
gcuuaauuccucaggcuuugcga

SEQ ID NO: 3157 - RNA, 23 nt, Artificial
  Chemically synthesized
uagguuguuggagcuuuccucaa

SEQ ID NO: 3158 - RNA, 23 nt, Artificial
  Chemically synthesized
auagguuguuggagcuuuccuca

SEQ ID NO: 3159 - RNA, 23 nt, Artificial
  Chemically synthesized
ucacugagucauuugcaguguuu

SEQ ID NO: 3160 - RNA, 23 nt, Artificial
  Chemically synthesized
aucacugagucauuugcaguguu

SEQ ID NO: 3161 - RNA, 23 nt, Artificial
  Chemically synthesized
uaaaucucucugccuguuuggac

SEQ ID NO: 3162 - RNA, 23 nt, Artificial
  Chemically synthesized
guucucuccgugaaacuuaccuu

SEQ ID NO: 3163 - RNA, 23 nt, Artificial
  Chemically synthesized
agcccgaucugaagaaggagagc

SEQ ID NO: 3164 - RNA, 23 nt, Artificial
  Chemically synthesized
gagcccgaucugaagaaggagag

SEQ ID NO: 3165 - RNA, 23 nt, Artificial
  Chemically synthesized
cgagcccgaucugaagaaggaga

SEQ ID NO: 3166 - RNA, 23 nt, Artificial
  Chemically synthesized
gcgagcccgaucugaagaaggag

SEQ ID NO: 3167 - RNA, 23 nt, Artificial
  Chemically synthesized
ggcgagcccgaucugaagaagga

SEQ ID NO: 3168 - RNA, 23 nt, Artificial
  Chemically synthesized
gguaaaagcuuugguuuguguuc

SEQ ID NO: 3169 - RNA, 23 nt, Artificial
  Chemically synthesized
agguaaaagcuuugguuuguguu

SEQ ID NO: 3170 - RNA, 23 nt, Artificial
  Chemically synthesized
uagguaaaagcuuugguuugugu

SEQ ID NO: 3171 - RNA, 23 nt, Artificial
  Chemically synthesized
uuagguaaaagcuuugguuugug

SEQ ID NO: 3172 - RNA, 23 nt, Artificial
  Chemically synthesized
uuuagguaaaagcuuugguuugu

SEQ ID NO: 3173 - RNA, 23 nt, Artificial
  Chemically synthesized
aagcacucauaauauggcauccu

SEQ ID NO: 3174 - RNA, 23 nt, Artificial
  Chemically synthesized
aaagcacucauaauauggcaucc

SEQ ID NO: 3175 - RNA, 23 nt, Artificial
  Chemically synthesized
uaaagcacucauaauauggcauc

SEQ ID NO: 3176 - RNA, 23 nt, Artificial
  Chemically synthesized
uuaaagcacucauaauauggcau

SEQ ID NO: 3177 - RNA, 23 nt, Artificial
  Chemically synthesized
cuuaaagcacucauaauauggca

SEQ ID NO: 3178 - RNA, 23 nt, Artificial
  Chemically synthesized
ucuugcaaccagaguauuuuugu

SEQ ID NO: 3179 - RNA, 23 nt, Artificial
  Chemically synthesized
aguccucugugaggaauauucuc

SEQ ID NO: 3180 - RNA, 23 nt, Artificial
  Chemically synthesized
aaguccucugugaggaauauucu

SEQ ID NO: 3181 - RNA, 23 nt, Artificial
  Chemically synthesized
aaaguccucugugaggaauauuc

SEQ ID NO: 3182 - RNA, 23 nt, Artificial
  Chemically synthesized
cuguuuggacuuuguaauuauuu

SEQ ID NO: 3183 - RNA, 23 nt, Artificial
  Chemically synthesized
ccaaccuuggcuaaauggagcag

SEQ ID NO: 3184 - RNA, 23 nt, Artificial
  Chemically synthesized
gccaaccuuggcuaaauggagca

SEQ ID NO: 3185 - RNA, 23 nt, Artificial
  Chemically synthesized
ggccaaccuuggcuaaauggagc

SEQ ID NO: 3186 - RNA, 23 nt, Artificial
  Chemically synthesized
gucuuuagguaaaagcuuugguu

SEQ ID NO: 3187 - RNA, 23 nt, Artificial
  Chemically synthesized
ugucuuuagguaaaagcuuuggu

SEQ ID NO: 3188 - RNA, 23 nt, Artificial
  Chemically synthesized
uugucuuuagguaaaagcuuugg

SEQ ID NO: 3189 - RNA, 23 nt, Artificial
  Chemically synthesized
uuugucuuuagguaaaagcuuug

SEQ ID NO: 3190 - RNA, 23 nt, Artificial
  Chemically synthesized
uuuugucuuuagguaaaagcuuu

SEQ ID NO: 3191 - RNA, 23 nt, Artificial
  Chemically synthesized
cuucaugaagaugaccgacgagc

SEQ ID NO: 3192 - RNA, 23 nt, Artificial
  Chemically synthesized
ucaccugugccucucagaacacc

SEQ ID NO: 3193 - RNA, 23 nt, Artificial
  Chemically synthesized
gucaccugugccucucagaacac

SEQ ID NO: 3194 - RNA, 23 nt, Artificial
  Chemically synthesized
ugucaccugugccucucagaaca

SEQ ID NO: 3195 - RNA, 23 nt, Artificial
  Chemically synthesized
cugucaccugugccucucagaac

SEQ ID NO: 3196 - RNA, 23 nt, Artificial
  Chemically synthesized
ucugucaccugugccucucagaa

SEQ ID NO: 3197 - RNA, 23 nt, Artificial
  Chemically synthesized
uucugaacgagagcgagaagcgg

SEQ ID NO: 3198 - RNA, 23 nt, Artificial
  Chemically synthesized
aacagcuaaacuacucuuaguug

SEQ ID NO: 3199 - RNA, 23 nt, Artificial
  Chemically synthesized
caacagcuaaacuacucuuaguu

SEQ ID NO: 3200 - RNA, 23 nt, Artificial
  Chemically synthesized
ccaacagcuaaacuacucuuagu

SEQ ID NO: 3201 - RNA, 23 nt, Artificial
  Chemically synthesized
guguaucacugagucauuugcag

SEQ ID NO: 3202 - RNA, 23 nt, Artificial
  Chemically synthesized
aguguaucacugagucauuugca

SEQ ID NO: 3203 - RNA, 23 nt, Artificial
  Chemically synthesized
uaguguaucacugagucauuugc

SEQ ID NO: 3204 - RNA, 23 nt, Artificial
  Chemically synthesized
guaguguaucacugagucauuug

SEQ ID NO: 3205 - RNA, 23 nt, Artificial
  Chemically synthesized
uguaguguaucacugagucauuu

SEQ ID NO: 3206 - RNA, 23 nt, Artificial
  Chemically synthesized
gcguaugaaucuccuggaccccu

SEQ ID NO: 3207 - RNA, 23 nt, Artificial
  Chemically synthesized
agaagcauuugguaagcuuuauc

SEQ ID NO: 3208 - RNA, 23 nt, Artificial
  Chemically synthesized
gagaagcauuugguaagcuuuau

SEQ ID NO: 3209 - RNA, 23 nt, Artificial
  Chemically synthesized
agagaagcauuugguaagcuuua

SEQ ID NO: 3210 - RNA, 23 nt, Artificial
  Chemically synthesized
uagagaagcauuugguaagcuuu

SEQ ID NO: 3211 - RNA, 23 nt, Artificial
  Chemically synthesized
agaauuguguuaugugaucaguu

SEQ ID NO: 3212 - RNA, 23 nt, Artificial
  Chemically synthesized
uucaaccucccacacuacagccc

SEQ ID NO: 3213 - RNA, 23 nt, Artificial
  Chemically synthesized
agagcgaggaggacaaguucccc

SEQ ID NO: 3214 - RNA, 23 nt, Artificial
  Chemically synthesized
gagagcgaggaggacaaguuccc

SEQ ID NO: 3215 - RNA, 23 nt, Artificial
  Chemically synthesized
ggagagcgaggaggacaaguucc

SEQ ID NO: 3216 - RNA, 23 nt, Artificial
  Chemically synthesized
aggagagcgaggaggacaaguuc

SEQ ID NO: 3217 - RNA, 23 nt, Artificial
  Chemically synthesized
aaggagagcgaggaggacaaguu

SEQ ID NO: 3218 - RNA, 23 nt, Artificial
  Chemically synthesized
cucuacaucuucucuuggaguga

SEQ ID NO: 3219 - RNA, 23 nt, Artificial
  Chemically synthesized
ucucuacaucuucucuuggagug

SEQ ID NO: 3220 - RNA, 23 nt, Artificial
  Chemically synthesized
uucucuacaucuucucuuggagu

SEQ ID NO: 3221 - RNA, 23 nt, Artificial
  Chemically synthesized
uuucucuacaucuucucuuggag

SEQ ID NO: 3222 - RNA, 23 nt, Artificial
  Chemically synthesized
auuucucuacaucuucucuugga

SEQ ID NO: 3223 - RNA, 23 nt, Artificial
  Chemically synthesized
ccucuacuccaccuucaccuaca

SEQ ID NO: 3224 - RNA, 23 nt, Artificial
  Chemically synthesized
gccucuacuccaccuucaccuac

SEQ ID NO: 3225 - RNA, 23 nt, Artificial
  Chemically synthesized
ggccucuacuccaccuucaccua

SEQ ID NO: 3226 - RNA, 23 nt, Artificial
  Chemically synthesized
acaaugcaagcaugugucaucca

SEQ ID NO: 3227 - RNA, 23 nt, Artificial
  Chemically synthesized
aacaaugcaagcaugugucaucc

SEQ ID NO: 3228 - RNA, 23 nt, Artificial
  Chemically synthesized
aaacaaugcaagcaugugucauc

SEQ ID NO: 3229 - RNA, 23 nt, Artificial
  Chemically synthesized
aaaacaaugcaagcaugugucau

SEQ ID NO: 3230 - RNA, 23 nt, Artificial
  Chemically synthesized
uuuuguucucuccgugaaacuua

SEQ ID NO: 3231 - RNA, 23 nt, Artificial
  Chemically synthesized
accugugccucucagaacaccag

SEQ ID NO: 3232 - RNA, 23 nt, Artificial
  Chemically synthesized
caccugugccucucagaacacca

SEQ ID NO: 3233 - RNA, 23 nt, Artificial
  Chemically synthesized
ccacuuguggccaaucaguggcc

SEQ ID NO: 3234 - RNA, 23 nt, Artificial
  Chemically synthesized
cccacuuguggccaaucaguggc

SEQ ID NO: 3235 - RNA, 23 nt, Artificial
  Chemically synthesized
acccacuuguggccaaucagugg

SEQ ID NO: 3236 - RNA, 23 nt, Artificial
  Chemically synthesized
uacccacuuguggccaaucagug

SEQ ID NO: 3237 - RNA, 23 nt, Artificial
  Chemically synthesized
uuacccacuuguggccaaucagu

SEQ ID NO: 3238 - RNA, 23 nt, Artificial
  Chemically synthesized
agaguuugaggauugcuuuuuaa

SEQ ID NO: 3239 - RNA, 23 nt, Artificial
  Chemically synthesized
uguucucuccgugaaacuuaccu

SEQ ID NO: 3240 - RNA, 23 nt, Artificial
  Chemically synthesized
uuguucucuccgugaaacuuacc

SEQ ID NO: 3241 - RNA, 23 nt, Artificial
  Chemically synthesized
uuuguucucuccgugaaacuuac

SEQ ID NO: 3242 - RNA, 23 nt, Artificial
  Chemically synthesized
auugcaaauguaguguaucacug

SEQ ID NO: 3243 - RNA, 23 nt, Artificial
  Chemically synthesized
ugugaggaauauucucuauuuua

SEQ ID NO: 3244 - RNA, 23 nt, Artificial
  Chemically synthesized
guguuaugugaucaguuuugggg

SEQ ID NO: 3245 - RNA, 23 nt, Artificial
  Chemically synthesized
gaaacuggacuuuuuaaacccuc

SEQ ID NO: 3246 - RNA, 23 nt, Artificial
  Chemically synthesized
agaaacuggacuuuuuaaacccu

SEQ ID NO: 3247 - RNA, 23 nt, Artificial
  Chemically synthesized
accagaacuccagcuccuacuac

SEQ ID NO: 3248 - RNA, 23 nt, Artificial
  Chemically synthesized
caccagaacuccagcuccuacua

SEQ ID NO: 3249 - RNA, 23 nt, Artificial
  Chemically synthesized
ccaccagaacuccagcuccuacu

SEQ ID NO: 3250 - RNA, 23 nt, Artificial
  Chemically synthesized
accaccagaacuccagcuccuac

SEQ ID NO: 3251 - RNA, 23 nt, Artificial
  Chemically synthesized
gaccaccagaacuccagcuccua

SEQ ID NO: 3252 - RNA, 23 nt, Artificial
  Chemically synthesized
auguaguguaucacugagucauu

SEQ ID NO: 3253 - RNA, 23 nt, Artificial
  Chemically synthesized
aauguaguguaucacugagucau

SEQ ID NO: 3254 - RNA, 23 nt, Artificial
  Chemically synthesized
aagcaugugucauccauauuucu

SEQ ID NO: 3255 - RNA, 23 nt, Artificial
  Chemically synthesized
caacaucgagaccuucgauguca

SEQ ID NO: 3256 - RNA, 23 nt, Artificial
  Chemically synthesized
acuuuuuaaacccucuucagagc

SEQ ID NO: 3257 - RNA, 23 nt, Artificial
  Chemically synthesized
gacuuuuuaaacccucuucagag

SEQ ID NO: 3258 - RNA, 23 nt, Artificial
  Chemically synthesized
ggacuuuuuaaacccucuucaga

SEQ ID NO: 3259 - RNA, 23 nt, Artificial
  Chemically synthesized
uggacuuuuuaaacccucuucag

SEQ ID NO: 3260 - RNA, 23 nt, Artificial
  Chemically synthesized
cuggacuuuuuaaacccucuuca

SEQ ID NO: 3261 - RNA, 23 nt, Artificial
  Chemically synthesized
uuaacaguuuuagaagucaguag

SEQ ID NO: 3262 - RNA, 23 nt, Artificial
  Chemically synthesized
auuaacaguuuuagaagucagua

SEQ ID NO: 3263 - RNA, 23 nt, Artificial
  Chemically synthesized
uuuguguucguguuuuguuuguu

SEQ ID NO: 3264 - RNA, 23 nt, Artificial
  Chemically synthesized
guuuguguucguguuuuguuugu

SEQ ID NO: 3265 - RNA, 23 nt, Artificial
  Chemically synthesized
aaucaacgagaaacuggacuuuu

SEQ ID NO: 3266 - RNA, 23 nt, Artificial
  Chemically synthesized
uaacuuaagaaaccuggcauuua

SEQ ID NO: 3267 - RNA, 23 nt, Artificial
  Chemically synthesized
guaacuuaagaaaccuggcauuu

SEQ ID NO: 3268 - RNA, 23 nt, Artificial
  Chemically synthesized
uguaacuuaagaaaccuggcauu

SEQ ID NO: 3269 - RNA, 23 nt, Artificial
  Chemically synthesized
cgagaccuucgaugucaacgagu

SEQ ID NO: 3270 - RNA, 23 nt, Artificial
  Chemically synthesized
cuggaaacuuguuucuuuuuuug

SEQ ID NO: 3271 - RNA, 23 nt, Artificial
  Chemically synthesized
acuggaaacuuguuucuuuuuuu

SEQ ID NO: 3272 - RNA, 23 nt, Artificial
  Chemically synthesized
aacuggaaacuuguuucuuuuuu

SEQ ID NO: 3273 - RNA, 23 nt, Artificial
  Chemically synthesized
aaacuggaaacuuguuucuuuuu

SEQ ID NO: 3274 - RNA, 23 nt, Artificial
  Chemically synthesized
caaacuggaaacuuguuucuuuu

SEQ ID NO: 3275 - RNA, 23 nt, Artificial
  Chemically synthesized
aagcuaaaggcaacucguaccca

SEQ ID NO: 3276 - RNA, 23 nt, Artificial
  Chemically synthesized
uaagcuaaaggcaacucguaccc

SEQ ID NO: 3277 - RNA, 23 nt, Artificial
  Chemically synthesized
uuaagcuaaaggcaacucguacc

SEQ ID NO: 3278 - RNA, 23 nt, Artificial
  Chemically synthesized
uuuaagcuaaaggcaacucguac

SEQ ID NO: 3279 - RNA, 23 nt, Artificial
  Chemically synthesized
auuuaagcuaaaggcaacucgua

SEQ ID NO: 3280 - RNA, 23 nt, Artificial
  Chemically synthesized
auuugcaguguuuucugccacag

SEQ ID NO: 3281 - RNA, 23 nt, Artificial
  Chemically synthesized
cauuugcaguguuuucugccaca

SEQ ID NO: 3282 - RNA, 23 nt, Artificial
  Chemically synthesized
cuucuuccuuaaagacauuuaag

SEQ ID NO: 3283 - RNA, 23 nt, Artificial
  Chemically synthesized
ucuucuuccuuaaagacauuuaa

SEQ ID NO: 3284 - RNA, 23 nt, Artificial
  Chemically synthesized
uucuucuuccuuaaagacauuua

SEQ ID NO: 3285 - RNA, 23 nt, Artificial
  Chemically synthesized
cuucuucuuccuuaaagacauuu

SEQ ID NO: 3286 - RNA, 23 nt, Artificial
  Chemically synthesized
ucuucuucuuccuuaaagacauu

SEQ ID NO: 3287 - RNA, 23 nt, Artificial
  Chemically synthesized
auaauauggcauccuucaauuuc

SEQ ID NO: 3288 - RNA, 23 nt, Artificial
  Chemically synthesized
uaaacccucuucagagcaagcgu

SEQ ID NO: 3289 - RNA, 23 nt, Artificial
  Chemically synthesized
uuaaacccucuucagagcaagcg

SEQ ID NO: 3290 - RNA, 23 nt, Artificial
  Chemically synthesized
uuuaaacccucuucagagcaagc

SEQ ID NO: 3291 - RNA, 23 nt, Artificial
  Chemically synthesized
uuuuaaacccucuucagagcaag

SEQ ID NO: 3292 - RNA, 23 nt, Artificial
  Chemically synthesized
uuuuuaaacccucuucagagcaa

SEQ ID NO: 3293 - RNA, 23 nt, Artificial
  Chemically synthesized
gaaaucuguucugggaauguuuc

SEQ ID NO: 3294 - RNA, 23 nt, Artificial
  Chemically synthesized
ucaaccucccacacuacagcccc

SEQ ID NO: 3295 - RNA, 23 nt, Artificial
  Chemically synthesized
acucuuaguugaacagugugccc

SEQ ID NO: 3296 - RNA, 23 nt, Artificial
  Chemically synthesized
uacucuuaguugaacagugugcc

SEQ ID NO: 3297 - RNA, 23 nt, Artificial
  Chemically synthesized
cuacucuuaguugaacagugugc

SEQ ID NO: 3298 - RNA, 23 nt, Artificial
  Chemically synthesized
acuacucuuaguugaacagugug

SEQ ID NO: 3299 - RNA, 23 nt, Artificial
  Chemically synthesized
aacuacucuuaguugaacagugu

SEQ ID NO: 3300 - RNA, 23 nt, Artificial
  Chemically synthesized
gaguuugaggauugcuuuuuaaa

SEQ ID NO: 3301 - RNA, 23 nt, Artificial
  Chemically synthesized
gaacaacccgucuacacacagcu

SEQ ID NO: 3302 - RNA, 23 nt, Artificial
  Chemically synthesized
gcccgaucugaagaaggagagcg

SEQ ID NO: 3303 - RNA, 23 nt, Artificial
  Chemically synthesized
uuuguacagauuugcuuucucuu

SEQ ID NO: 3304 - RNA, 23 nt, Artificial
  Chemically synthesized
uuuuguacagauuugcuuucucu

SEQ ID NO: 3305 - RNA, 23 nt, Artificial
  Chemically synthesized
acauuugcacucuuuuagugcau

SEQ ID NO: 3306 - RNA, 23 nt, Artificial
  Chemically synthesized
aacauuugcacucuuuuagugca

SEQ ID NO: 3307 - RNA, 23 nt, Artificial
  Chemically synthesized
aaacauuugcacucuuuuagugc

SEQ ID NO: 3308 - RNA, 23 nt, Artificial
  Chemically synthesized
cacaguacgacuacaccgaccac

SEQ ID NO: 3309 - RNA, 23 nt, Artificial
  Chemically synthesized
ucacaguacgacuacaccgacca

SEQ ID NO: 3310 - RNA, 23 nt, Artificial
  Chemically synthesized
cucacaguacgacuacaccgacc

SEQ ID NO: 3311 - RNA, 23 nt, Artificial
  Chemically synthesized
gcucacaguacgacuacaccgac

SEQ ID NO: 3312 - RNA, 23 nt, Artificial
  Chemically synthesized
ucuucagagcaagcguggaggau

SEQ ID NO: 3313 - RNA, 23 nt, Artificial
  Chemically synthesized
cucuucagagcaagcguggagga

SEQ ID NO: 3314 - RNA, 23 nt, Artificial
  Chemically synthesized
ccucuucagagcaagcguggagg

SEQ ID NO: 3315 - RNA, 23 nt, Artificial
  Chemically synthesized
cccucuucagagcaagcguggag

SEQ ID NO: 3316 - RNA, 23 nt, Artificial
  Chemically synthesized
acccucuucagagcaagcgugga

SEQ ID NO: 3317 - RNA, 23 nt, Artificial
  Chemically synthesized
uucuucuucuuccuuaaagacau

SEQ ID NO: 3318 - RNA, 23 nt, Artificial
  Chemically synthesized
aauagguuguuggagcuuuccuc

SEQ ID NO: 3319 - RNA, 23 nt, Artificial
  Chemically synthesized
ugugaucagugugcuaaaucucu

SEQ ID NO: 3320 - RNA, 23 nt, Artificial
  Chemically synthesized
agcuuuccucaaaggguaugguc

SEQ ID NO: 3321 - RNA, 23 nt, Artificial
  Chemically synthesized
agcuuugguuuguguucguguuu

SEQ ID NO: 3322 - RNA, 23 nt, Artificial
  Chemically synthesized
aagcuuugguuuguguucguguu

SEQ ID NO: 3323 - RNA, 23 nt, Artificial
  Chemically synthesized
aaagcuuugguuuguguucgugu

SEQ ID NO: 3324 - RNA, 23 nt, Artificial
  Chemically synthesized
aaaagcuuugguuuguguucgug

SEQ ID NO: 3325 - RNA, 23 nt, Artificial
  Chemically synthesized
uaaaagcuuugguuuguguucgu

SEQ ID NO: 3326 - RNA, 23 nt, Artificial
  Chemically synthesized
uguacuguguaugauucauuacc

SEQ ID NO: 3327 - RNA, 23 nt, Artificial
  Chemically synthesized
auguacuguguaugauucauuac

SEQ ID NO: 3328 - RNA, 23 nt, Artificial
  Chemically synthesized
uauguacuguguaugauucauua

SEQ ID NO: 3329 - RNA, 23 nt, Artificial
  Chemically synthesized
aauagucuagagaagcauuuggu

SEQ ID NO: 3330 - RNA, 23 nt, Artificial
  Chemically synthesized
gugaucagugugcuaaaucucuc

SEQ ID NO: 3331 - RNA, 23 nt, Artificial
  Chemically synthesized
accuuggcuaaauggagcagcga

SEQ ID NO: 3332 - RNA, 23 nt, Artificial
  Chemically synthesized
uuccaagacacaaacaugaccua

SEQ ID NO: 3333 - RNA, 23 nt, Artificial
  Chemically synthesized
uuuccaagacacaaacaugaccu

SEQ ID NO: 3334 - RNA, 23 nt, Artificial
  Chemically synthesized
auuuccaagacacaaacaugacc

SEQ ID NO: 3335 - RNA, 23 nt, Artificial
  Chemically synthesized
aauuuccaagacacaaacaugac

SEQ ID NO: 3336 - RNA, 23 nt, Artificial
  Chemically synthesized
aaauuuccaagacacaaacauga

SEQ ID NO: 3337 - RNA, 23 nt, Artificial
  Chemically synthesized
gaagauggccgagaugauccuaa

SEQ ID NO: 3338 - RNA, 23 nt, Artificial
  Chemically synthesized
aaaaauaaaggccuuauuuugca

SEQ ID NO: 3339 - RNA, 23 nt, Artificial
  Chemically synthesized
acaucaagacggagcagcugagc

SEQ ID NO: 3340 - RNA, 23 nt, Artificial
  Chemically synthesized
cacaucaagacggagcagcugag

SEQ ID NO: 3341 - RNA, 23 nt, Artificial
  Chemically synthesized
gcacaucaagacggagcagcuga

SEQ ID NO: 3342 - RNA, 23 nt, Artificial
  Chemically synthesized
cgcacaucaagacggagcagcug

SEQ ID NO: 3343 - RNA, 23 nt, Artificial
  Chemically synthesized
acgcacaucaagacggagcagcu

SEQ ID NO: 3344 - RNA, 23 nt, Artificial
  Chemically synthesized
aacuccagcuccuacuacagcca

SEQ ID NO: 3345 - RNA, 23 nt, Artificial
  Chemically synthesized
gaacuccagcuccuacuacagcc

SEQ ID NO: 3346 - RNA, 23 nt, Artificial
  Chemically synthesized
agaacuccagcuccuacuacagc

SEQ ID NO: 3347 - RNA, 23 nt, Artificial
  Chemically synthesized
cagaacuccagcuccuacuacag

SEQ ID NO: 3348 - RNA, 23 nt, Artificial
  Chemically synthesized
ccagaacuccagcuccuacuaca

SEQ ID NO: 3349 - RNA, 23 nt, Artificial
  Chemically synthesized
ccuccugccuuugcuuguucacu

SEQ ID NO: 3350 - RNA, 23 nt, Artificial
  Chemically synthesized
uccuccugccuuugcuuguucac

SEQ ID NO: 3351 - RNA, 23 nt, Artificial
  Chemically synthesized
uuccuccugccuuugcuuguuca

SEQ ID NO: 3352 - RNA, 23 nt, Artificial
  Chemically synthesized
uuuccuccugccuuugcuuguuc

SEQ ID NO: 3353 - RNA, 23 nt, Artificial
  Chemically synthesized
auuuccuccugccuuugcuuguu

SEQ ID NO: 3354 - RNA, 23 nt, Artificial
  Chemically synthesized
ugcuuaauuccucaggcuuugcg

SEQ ID NO: 3355 - RNA, 23 nt, Artificial
  Chemically synthesized
uugcuuaauuccucaggcuuugc

SEQ ID NO: 3356 - RNA, 23 nt, Artificial
  Chemically synthesized
uuugcuuaauuccucaggcuuug

SEQ ID NO: 3357 - RNA, 23 nt, Artificial
  Chemically synthesized
cuuugcuuaauuccucaggcuuu

SEQ ID NO: 3358 - RNA, 23 nt, Artificial
  Chemically synthesized
uguccaucccuuuuuucuuuguu

SEQ ID NO: 3359 - RNA, 23 nt, Artificial
  Chemically synthesized
uuguccaucccuuuuuucuuugu

SEQ ID NO: 3360 - RNA, 23 nt, Artificial
  Chemically synthesized
uuuguccaucccuuuuuucuuug

SEQ ID NO: 3361 - RNA, 23 nt, Artificial
  Chemically synthesized
uuuuguccaucccuuuuuucuuu

SEQ ID NO: 3362 - RNA, 23 nt, Artificial
  Chemically synthesized
uuuuuguccaucccuuuuuucuu

SEQ ID NO: 3363 - RNA, 23 nt, Artificial
  Chemically synthesized
aaucuuaauuacugcuguggcua

SEQ ID NO: 3364 - RNA, 23 nt, Artificial
  Chemically synthesized
uaaucuuaauuacugcuguggcu

SEQ ID NO: 3365 - RNA, 23 nt, Artificial
  Chemically synthesized
uuaaucuuaauuacugcuguggc

SEQ ID NO: 3366 - RNA, 23 nt, Artificial
  Chemically synthesized
cuuaaucuuaauuacugcugugg

SEQ ID NO: 3367 - RNA, 23 nt, Artificial
  Chemically synthesized
gggcaagcucuggagacuucuga

SEQ ID NO: 3368 - RNA, 23 nt, Artificial
  Chemically synthesized
ugggcaagcucuggagacuucug

SEQ ID NO: 3369 - RNA, 23 nt, Artificial
  Chemically synthesized
cugggcaagcucuggagacuucu

SEQ ID NO: 3370 - RNA, 23 nt, Artificial
  Chemically synthesized
gcaugugucauccauauuucucu

SEQ ID NO: 3371 - RNA, 23 nt, Artificial
  Chemically synthesized
ugcaggaggagaagagaaggggu

SEQ ID NO: 3372 - RNA, 23 nt, Artificial
  Chemically synthesized
aauuacugcuguggcuagagagu

SEQ ID NO: 3373 - RNA, 23 nt, Artificial
  Chemically synthesized
uaauuacugcuguggcuagagag

SEQ ID NO: 3374 - RNA, 23 nt, Artificial
  Chemically synthesized
uuaauuacugcuguggcuagaga

SEQ ID NO: 3375 - RNA, 23 nt, Artificial
  Chemically synthesized
cuuaauuacugcuguggcuagag

SEQ ID NO: 3376 - RNA, 23 nt, Artificial
  Chemically synthesized
cuuuuuaaacccucuucagagca

SEQ ID NO: 3377 - RNA, 23 nt, Artificial
  Chemically synthesized
gccuuaaaacggugcugcuggga

SEQ ID NO: 3378 - RNA, 23 nt, Artificial
  Chemically synthesized
agccuuaaaacggugcugcuggg

SEQ ID NO: 3379 - RNA, 23 nt, Artificial
  Chemically synthesized
gagccuuaaaacggugcugcugg

SEQ ID NO: 3380 - RNA, 23 nt, Artificial
  Chemically synthesized
ugagccuuaaaacggugcugcug

SEQ ID NO: 3381 - RNA, 23 nt, Artificial
  Chemically synthesized
uugagccuuaaaacggugcugcu

SEQ ID NO: 3382 - RNA, 23 nt, Artificial
  Chemically synthesized
cagcaagaacaagccgcacguca

SEQ ID NO: 3383 - RNA, 23 nt, Artificial
  Chemically synthesized
gugcugcugggaaacauuugcac

SEQ ID NO: 3384 - RNA, 23 nt, Artificial
  Chemically synthesized
cacugggaacaacccgucuacac

SEQ ID NO: 3385 - RNA, 23 nt, Artificial
  Chemically synthesized
gcacugggaacaacccgucuaca

SEQ ID NO: 3386 - RNA, 23 nt, Artificial
  Chemically synthesized
agcacugggaacaacccgucuac

SEQ ID NO: 3387 - RNA, 23 nt, Artificial
  Chemically synthesized
cagcacugggaacaacccgucua

SEQ ID NO: 3388 - RNA, 23 nt, Artificial
  Chemically synthesized
uacugcuguggcuagagaguuug

SEQ ID NO: 3389 - RNA, 23 nt, Artificial
  Chemically synthesized
uuacugcuguggcuagagaguuu

SEQ ID NO: 3390 - RNA, 23 nt, Artificial
  Chemically synthesized
aguuucuuuguauuccucacccu

SEQ ID NO: 3391 - RNA, 23 nt, Artificial
  Chemically synthesized
aaguuucuuuguauuccucaccc

SEQ ID NO: 3392 - RNA, 23 nt, Artificial
  Chemically synthesized
aaggagaugaaaucuguucuggg

SEQ ID NO: 3393 - RNA, 23 nt, Artificial
  Chemically synthesized
cccuagauuuguauaaaugccuu

SEQ ID NO: 3394 - RNA, 23 nt, Artificial
  Chemically synthesized
acccuagauuuguauaaaugccu

SEQ ID NO: 3395 - RNA, 23 nt, Artificial
  Chemically synthesized
auuacugcuguggcuagagaguu

SEQ ID NO: 3396 - RNA, 23 nt, Artificial
  Chemically synthesized
cagauuugcuuucucuuacaaaa

SEQ ID NO: 3397 - RNA, 23 nt, Artificial
  Chemically synthesized
gaggaagucggugaagaacgggc

SEQ ID NO: 3398 - RNA, 23 nt, Artificial
  Chemically synthesized
gccgaaagcggagcucgaaacug

SEQ ID NO: 3399 - RNA, 23 nt, Artificial
  Chemically synthesized
agccgaaagcggagcucgaaacu

SEQ ID NO: 3400 - RNA, 23 nt, Artificial
  Chemically synthesized
uccaacagcuaaacuacucuuag

SEQ ID NO: 3401 - RNA, 23 nt, Artificial
  Chemically synthesized
uuccaacagcuaaacuacucuua

SEQ ID NO: 3402 - RNA, 23 nt, Artificial
  Chemically synthesized
uuuccaacagcuaaacuacucuu

SEQ ID NO: 3403 - RNA, 23 nt, Artificial
  Chemically synthesized
uuuuccaacagcuaaacuacucu

SEQ ID NO: 3404 - RNA, 23 nt, Artificial
  Chemically synthesized
agcaugugucauccauauuucuc

SEQ ID NO: 3405 - RNA, 23 nt, Artificial
  Chemically synthesized
uauuaacaguuuuagaagucagu

SEQ ID NO: 3406 - RNA, 23 nt, Artificial
  Chemically synthesized
gcuuugguuuguguucguguuuu

SEQ ID NO: 3407 - RNA, 23 nt, Artificial
  Chemically synthesized
caaccuuggcuaaauggagcagc

SEQ ID NO: 3408 - RNA, 23 nt, Artificial
  Chemically synthesized
ccaugaacgccuucauggugugg

SEQ ID NO: 3409 - RNA, 23 nt, Artificial
  Chemically synthesized
cccaugaacgccuucauggugug

SEQ ID NO: 3410 - RNA, 23 nt, Artificial
  Chemically synthesized
gcccaugaacgccuucauggugu

SEQ ID NO: 3411 - RNA, 23 nt, Artificial
  Chemically synthesized
ggcccaugaacgccuucauggug

SEQ ID NO: 3412 - RNA, 23 nt, Artificial
  Chemically synthesized
cggcccaugaacgccuucauggu

SEQ ID NO: 3413 - RNA, 23 nt, Artificial
  Chemically synthesized
uucuugcaaccagaguauuuuug

SEQ ID NO: 3414 - RNA, 23 nt, Artificial
  Chemically synthesized
uuucuugcaaccagaguauuuuu

SEQ ID NO: 3415 - RNA, 23 nt, Artificial
  Chemically synthesized
uuuucuugcaaccagaguauuuu

SEQ ID NO: 3416 - RNA, 23 nt, Artificial
  Chemically synthesized
auauggcauccuucaauuucugu

SEQ ID NO: 3417 - RNA, 23 nt, Artificial
  Chemically synthesized
aauauggcauccuucaauuucug

SEQ ID NO: 3418 - RNA, 23 nt, Artificial
  Chemically synthesized
uaauauggcauccuucaauuucu

SEQ ID NO: 3419 - RNA, 23 nt, Artificial
  Chemically synthesized
guuuuuguugaaaacaaacugga

SEQ ID NO: 3420 - RNA, 23 nt, Artificial
  Chemically synthesized
uccaagcgcauuacccacuugug

SEQ ID NO: 3421 - RNA, 23 nt, Artificial
  Chemically synthesized
auccaagcgcauuacccacuugu

SEQ ID NO: 3422 - RNA, 23 nt, Artificial
  Chemically synthesized
uauccaagcgcauuacccacuug

SEQ ID NO: 3423 - RNA, 23 nt, Artificial
  Chemically synthesized
cuauccaagcgcauuacccacuu

SEQ ID NO: 3424 - RNA, 23 nt, Artificial
  Chemically synthesized
agagcaagcguggaggaugaugg

SEQ ID NO: 3425 - RNA, 23 nt, Artificial
  Chemically synthesized
cagagcaagcguggaggaugaug

SEQ ID NO: 3426 - RNA, 23 nt, Artificial
  Chemically synthesized
ucagagcaagcguggaggaugau

SEQ ID NO: 3427 - RNA, 23 nt, Artificial
  Chemically synthesized
ccuuauuuugcaauuaugggagu

SEQ ID NO: 3428 - RNA, 23 nt, Artificial
  Chemically synthesized
cgaguuugaccaguaccugccgc

SEQ ID NO: 3429 - RNA, 23 nt, Artificial
  Chemically synthesized
acgaguuugaccaguaccugccg

SEQ ID NO: 3430 - RNA, 23 nt, Artificial
  Chemically synthesized
aacgaguuugaccaguaccugcc

SEQ ID NO: 3431 - RNA, 23 nt, Artificial
  Chemically synthesized
ccaucccuuuuuucuuuguuguu

SEQ ID NO: 3432 - RNA, 23 nt, Artificial
  Chemically synthesized
uccaucccuuuuuucuuuguugu

SEQ ID NO: 3433 - RNA, 23 nt, Artificial
  Chemically synthesized
guccaucccuuuuuucuuuguug

SEQ ID NO: 3434 - RNA, 23 nt, Artificial
  Chemically synthesized
augauggagaaucgugugaucag

SEQ ID NO: 3435 - RNA, 23 nt, Artificial
  Chemically synthesized
gaugauggagaaucgugugauca

SEQ ID NO: 3436 - RNA, 23 nt, Artificial
  Chemically synthesized
cgaugucaacgaguuugaccagu

SEQ ID NO: 3437 - RNA, 23 nt, Artificial
  Chemically synthesized
ucgaugucaacgaguuugaccag

SEQ ID NO: 3438 - RNA, 23 nt, Artificial
  Chemically synthesized
uucgaugucaacgaguuugacca

SEQ ID NO: 3439 - RNA, 23 nt, Artificial
  Chemically synthesized
uccugccuuugcuuguucacugc

SEQ ID NO: 3440 - RNA, 23 nt, Artificial
  Chemically synthesized
cuccugccuuugcuuguucacug

SEQ ID NO: 3441 - RNA, 23 nt, Artificial
  Chemically synthesized
guccucugugaggaauauucucu

SEQ ID NO: 3442 - RNA, 23 nt, Artificial
  Chemically synthesized
aagacacaaacaugaccuaucca

SEQ ID NO: 3443 - RNA, 23 nt, Artificial
  Chemically synthesized
caagacacaaacaugaccuaucc

SEQ ID NO: 3444 - RNA, 23 nt, Artificial
  Chemically synthesized
ccaagacacaaacaugaccuauc

SEQ ID NO: 3445 - RNA, 23 nt, Artificial
  Chemically synthesized
uccaagacacaaacaugaccuau

SEQ ID NO: 3446 - RNA, 23 nt, Artificial
  Chemically synthesized
uguauuccucacccuagauuugu

SEQ ID NO: 3447 - RNA, 23 nt, Artificial
  Chemically synthesized
cacuuuugcucuuuuuccucccc

SEQ ID NO: 3448 - RNA, 23 nt, Artificial
  Chemically synthesized
ccacuuuugcucuuuuuccuccc

SEQ ID NO: 3449 - RNA, 23 nt, Artificial
  Chemically synthesized
cccacuuuugcucuuuuuccucc

SEQ ID NO: 3450 - RNA, 23 nt, Artificial
  Chemically synthesized
ccccacuuuugcucuuuuuccuc

SEQ ID NO: 3451 - RNA, 23 nt, Artificial
  Chemically synthesized
cccccacuuuugcucuuuuuccu

SEQ ID NO: 3452 - RNA, 23 nt, Artificial
  Chemically synthesized
auaaaugccuuuuuguccauccc

SEQ ID NO: 3453 - RNA, 23 nt, Artificial
  Chemically synthesized
uauaaaugccuuuuuguccaucc

SEQ ID NO: 3454 - RNA, 23 nt, Artificial
  Chemically synthesized
guauaaaugccuuuuuguccauc

SEQ ID NO: 3455 - RNA, 23 nt, Artificial
  Chemically synthesized
uguauaaaugccuuuuuguccau

SEQ ID NO: 3456 - RNA, 23 nt, Artificial
  Chemically synthesized
uuguauaaaugccuuuuugucca

SEQ ID NO: 3457 - RNA, 23 nt, Artificial
  Chemically synthesized
auuacccacuuguggccaaucag

SEQ ID NO: 3458 - RNA, 23 nt, Artificial
  Chemically synthesized
cauuacccacuuguggccaauca

SEQ ID NO: 3459 - RNA, 23 nt, Artificial
  Chemically synthesized
cuuuuuguccaucccuuuuuucu

SEQ ID NO: 3460 - RNA, 23 nt, Artificial
  Chemically synthesized
aguaauuaagauuaaggucuguc

SEQ ID NO: 3461 - RNA, 23 nt, Artificial
  Chemically synthesized
guaauuaagauuaaggucuguca

SEQ ID NO: 3462 - RNA, 23 nt, Artificial
  Chemically synthesized
uaauuaagauuaaggucugucag

SEQ ID NO: 3463 - RNA, 23 nt, Artificial
  Chemically synthesized
aauuaagauuaaggucugucagu

SEQ ID NO: 3464 - RNA, 23 nt, Artificial
  Chemically synthesized
auuaagauuaaggucugucagug

SEQ ID NO: 3465 - RNA, 23 nt, Artificial
  Chemically synthesized
gguuauuuuuaggaucaucucgg

SEQ ID NO: 3466 - RNA, 23 nt, Artificial
  Chemically synthesized
guuauuuuuaggaucaucucggc

SEQ ID NO: 3467 - RNA, 23 nt, Artificial
  Chemically synthesized
uuauuuuuaggaucaucucggcc

SEQ ID NO: 3468 - RNA, 23 nt, Artificial
  Chemically synthesized
uauuuuuaggaucaucucggcca

SEQ ID NO: 3469 - RNA, 23 nt, Artificial
  Chemically synthesized
auuuuuaggaucaucucggccau

SEQ ID NO: 3470 - RNA, 23 nt, Artificial
  Chemically synthesized
acgauucuccaucauccuccacg

SEQ ID NO: 3471 - RNA, 23 nt, Artificial
  Chemically synthesized
cgauucuccaucauccuccacgc

SEQ ID NO: 3472 - RNA, 23 nt, Artificial
  Chemically synthesized
gauucuccaucauccuccacgcu

SEQ ID NO: 3473 - RNA, 23 nt, Artificial
  Chemically synthesized
auucuccaucauccuccacgcuu

SEQ ID NO: 3474 - RNA, 23 nt, Artificial
  Chemically synthesized
uucuccaucauccuccacgcuug

SEQ ID NO: 3475 - RNA, 23 nt, Artificial
  Chemically synthesized
uuauuuuuuuuuaaggcagcucc

SEQ ID NO: 3476 - RNA, 23 nt, Artificial
  Chemically synthesized
uauuuuuuuuuaaggcagcuccu

SEQ ID NO: 3477 - RNA, 23 nt, Artificial
  Chemically synthesized
auuuuuuuuuaaggcagcuccuc

SEQ ID NO: 3478 - RNA, 23 nt, Artificial
  Chemically synthesized
uuuuuuuuuaaggcagcuccucc

SEQ ID NO: 3479 - RNA, 23 nt, Artificial
  Chemically synthesized
uuuuuuuuaaggcagcuccuccu

SEQ ID NO: 3480 - RNA, 23 nt, Artificial
  Chemically synthesized
cccguucuucaccgacuuccucc

SEQ ID NO: 3481 - RNA, 23 nt, Artificial
  Chemically synthesized
ccguucuucaccgacuuccuccg

SEQ ID NO: 3482 - RNA, 23 nt, Artificial
  Chemically synthesized
cguucuucaccgacuuccuccgc

SEQ ID NO: 3483 - RNA, 23 nt, Artificial
  Chemically synthesized
guucuucaccgacuuccuccgcc

SEQ ID NO: 3484 - RNA, 23 nt, Artificial
  Chemically synthesized
uucuucaccgacuuccuccgccg

SEQ ID NO: 3485 - RNA, 23 nt, Artificial
  Chemically synthesized
cgguuauuuuuaggaucaucucg

SEQ ID NO: 3486 - RNA, 23 nt, Artificial
  Chemically synthesized
gcuguagugugggagguugaagg

SEQ ID NO: 3487 - RNA, 23 nt, Artificial
  Chemically synthesized
cuguagugugggagguugaaggg

SEQ ID NO: 3488 - RNA, 23 nt, Artificial
  Chemically synthesized
uguagugugggagguugaagggg

SEQ ID NO: 3489 - RNA, 23 nt, Artificial
  Chemically synthesized
guagugugggagguugaaggggc

SEQ ID NO: 3490 - RNA, 23 nt, Artificial
  Chemically synthesized
uagugugggagguugaaggggcu

SEQ ID NO: 3491 - RNA, 23 nt, Artificial
  Chemically synthesized
uuuuuuuaaggcagcuccuccuu

SEQ ID NO: 3492 - RNA, 23 nt, Artificial
  Chemically synthesized
uuuuuuaaggcagcuccuccuua

SEQ ID NO: 3493 - RNA, 23 nt, Artificial
  Chemically synthesized
uuuuuaaggcagcuccuccuuaa

SEQ ID NO: 3494 - RNA, 23 nt, Artificial
  Chemically synthesized
gaaguuuccagucaguuucgagc

SEQ ID NO: 3495 - RNA, 23 nt, Artificial
  Chemically synthesized
aaguuuccagucaguuucgagcu

SEQ ID NO: 3496 - RNA, 23 nt, Artificial
  Chemically synthesized
aguuuccagucaguuucgagcuc

SEQ ID NO: 3497 - RNA, 23 nt, Artificial
  Chemically synthesized
guuuccagucaguuucgagcucc

SEQ ID NO: 3498 - RNA, 23 nt, Artificial
  Chemically synthesized
uuuccagucaguuucgagcuccg

SEQ ID NO: 3499 - RNA, 23 nt, Artificial
  Chemically synthesized
cuccuuugcuugccuuuuaccuc

SEQ ID NO: 3500 - RNA, 23 nt, Artificial
  Chemically synthesized
uccuuugcuugccuuuuaccucu

SEQ ID NO: 3501 - RNA, 23 nt, Artificial
  Chemically synthesized
ccuuugcuugccuuuuaccucuu

SEQ ID NO: 3502 - RNA, 23 nt, Artificial
  Chemically synthesized
cuuugcuugccuuuuaccucuuu

SEQ ID NO: 3503 - RNA, 23 nt, Artificial
  Chemically synthesized
uuugcuugccuuuuaccucuuuc

SEQ ID NO: 3504 - RNA, 23 nt, Artificial
  Chemically synthesized
ccaguuucucguugauuucgcug

SEQ ID NO: 3505 - RNA, 23 nt, Artificial
  Chemically synthesized
caguuucucguugauuucgcugc

SEQ ID NO: 3506 - RNA, 23 nt, Artificial
  Chemically synthesized
aguuucucguugauuucgcugcu

SEQ ID NO: 3507 - RNA, 23 nt, Artificial
  Chemically synthesized
guuucucguugauuucgcugcuc

SEQ ID NO: 3508 - RNA, 23 nt, Artificial
  Chemically synthesized
uuucucguugauuucgcugcucc

SEQ ID NO: 3509 - RNA, 23 nt, Artificial
  Chemically synthesized
uuucuucgguuauuuuuaggauc

SEQ ID NO: 3510 - RNA, 23 nt, Artificial
  Chemically synthesized
uucuucgguuauuuuuaggauca

SEQ ID NO: 3511 - RNA, 23 nt, Artificial
  Chemically synthesized
ucuucgguuauuuuuaggaucau

SEQ ID NO: 3512 - RNA, 23 nt, Artificial
  Chemically synthesized
cuucgguuauuuuuaggaucauc

SEQ ID NO: 3513 - RNA, 23 nt, Artificial
  Chemically synthesized
uucgguuauuuuuaggaucaucu

SEQ ID NO: 3514 - RNA, 23 nt, Artificial
  Chemically synthesized
uuaagauuaaggucugucagugg

SEQ ID NO: 3515 - RNA, 23 nt, Artificial
  Chemically synthesized
uaggaucaucucggccaucuucg

SEQ ID NO: 3516 - RNA, 23 nt, Artificial
  Chemically synthesized
aggaucaucucggccaucuucgc

SEQ ID NO: 3517 - RNA, 23 nt, Artificial
  Chemically synthesized
ggaucaucucggccaucuucgcc

SEQ ID NO: 3518 - RNA, 23 nt, Artificial
  Chemically synthesized
gaucaucucggccaucuucgccc

SEQ ID NO: 3519 - RNA, 23 nt, Artificial
  Chemically synthesized
aucaucucggccaucuucgcccu

SEQ ID NO: 3520 - RNA, 23 nt, Artificial
  Chemically synthesized
cacagcaguaauuaagauuaagg

SEQ ID NO: 3521 - RNA, 23 nt, Artificial
  Chemically synthesized
acagcaguaauuaagauuaaggu

SEQ ID NO: 3522 - RNA, 23 nt, Artificial
  Chemically synthesized
cagcaguaauuaagauuaagguc

SEQ ID NO: 3523 - RNA, 23 nt, Artificial
  Chemically synthesized
agcaguaauuaagauuaaggucu

SEQ ID NO: 3524 - RNA, 23 nt, Artificial
  Chemically synthesized
gcaguaauuaagauuaaggucug

SEQ ID NO: 3525 - RNA, 23 nt, Artificial
  Chemically synthesized
uucucguugauuucgcugcucca

SEQ ID NO: 3526 - RNA, 23 nt, Artificial
  Chemically synthesized
cucuuucuucgguuauuuuuagg

SEQ ID NO: 3527 - RNA, 23 nt, Artificial
  Chemically synthesized
ucuuucuucgguuauuuuuagga

SEQ ID NO: 3528 - RNA, 23 nt, Artificial
  Chemically synthesized
cuuucuucgguuauuuuuaggau

SEQ ID NO: 3529 - RNA, 23 nt, Artificial
  Chemically synthesized
uuuuuaggaucaucucggccauc

SEQ ID NO: 3530 - RNA, 23 nt, Artificial
  Chemically synthesized
uuuuaggaucaucucggccaucu

SEQ ID NO: 3531 - RNA, 23 nt, Artificial
  Chemically synthesized
cugguugguccucucuuucuucg

SEQ ID NO: 3532 - RNA, 23 nt, Artificial
  Chemically synthesized
ugguugguccucucuuucuucgg

SEQ ID NO: 3533 - RNA, 23 nt, Artificial
  Chemically synthesized
gguugguccucucuuucuucggu

SEQ ID NO: 3534 - RNA, 23 nt, Artificial
  Chemically synthesized
guugguccucucuuucuucgguu

SEQ ID NO: 3535 - RNA, 23 nt, Artificial
  Chemically synthesized
uugguccucucuuucuucgguua

SEQ ID NO: 3536 - RNA, 23 nt, Artificial
  Chemically synthesized
aagcuagggcacacuguucaacu

SEQ ID NO: 3537 - RNA, 23 nt, Artificial
  Chemically synthesized
agcuagggcacacuguucaacua

SEQ ID NO: 3538 - RNA, 23 nt, Artificial
  Chemically synthesized
gcuagggcacacuguucaacuaa

SEQ ID NO: 3539 - RNA, 23 nt, Artificial
  Chemically synthesized
cuagggcacacuguucaacuaag

SEQ ID NO: 3540 - RNA, 23 nt, Artificial
  Chemically synthesized
uagggcacacuguucaacuaaga

SEQ ID NO: 3541 - RNA, 23 nt, Artificial
  Chemically synthesized
auaauuacaaaguccaaacaggc

SEQ ID NO: 3542 - RNA, 23 nt, Artificial
  Chemically synthesized
uaauuacaaaguccaaacaggca

SEQ ID NO: 3543 - RNA, 23 nt, Artificial
  Chemically synthesized
aauuacaaaguccaaacaggcag

SEQ ID NO: 3544 - RNA, 23 nt, Artificial
  Chemically synthesized
auuacaaaguccaaacaggcaga

SEQ ID NO: 3545 - RNA, 23 nt, Artificial
  Chemically synthesized
uuacaaaguccaaacaggcagag

SEQ ID NO: 3546 - RNA, 23 nt, Artificial
  Chemically synthesized
aauguuucccagcagcaccguuu

SEQ ID NO: 3547 - RNA, 23 nt, Artificial
  Chemically synthesized
auguuucccagcagcaccguuuu

SEQ ID NO: 3548 - RNA, 23 nt, Artificial
  Chemically synthesized
uguuucccagcagcaccguuuua

SEQ ID NO: 3549 - RNA, 23 nt, Artificial
  Chemically synthesized
guuucccagcagcaccguuuuaa

SEQ ID NO: 3550 - RNA, 23 nt, Artificial
  Chemically synthesized
uuucccagcagcaccguuuuaag

SEQ ID NO: 3551 - RNA, 23 nt, Artificial
  Chemically synthesized
ccgcuugacgugcggcuuguucu

SEQ ID NO: 3552 - RNA, 23 nt, Artificial
  Chemically synthesized
cgcuugacgugcggcuuguucuu

SEQ ID NO: 3553 - RNA, 23 nt, Artificial
  Chemically synthesized
gcuugacgugcggcuuguucuug

SEQ ID NO: 3554 - RNA, 23 nt, Artificial
  Chemically synthesized
cuugacgugcggcuuguucuugc

SEQ ID NO: 3555 - RNA, 23 nt, Artificial
  Chemically synthesized
uugacgugcggcuuguucuugcu

SEQ ID NO: 3556 - RNA, 23 nt, Artificial
  Chemically synthesized
ucgguuauuuuuaggaucaucuc

SEQ ID NO: 3557 - RNA, 23 nt, Artificial
  Chemically synthesized
uuuuaaggcagcuccuccuuaaa

SEQ ID NO: 3558 - RNA, 23 nt, Artificial
  Chemically synthesized
ugauuuaaaugccagguuucuua

SEQ ID NO: 3559 - RNA, 23 nt, Artificial
  Chemically synthesized
gauuuaaaugccagguuucuuaa

SEQ ID NO: 3560 - RNA, 23 nt, Artificial
  Chemically synthesized
auuuaaaugccagguuucuuaag

SEQ ID NO: 3561 - RNA, 23 nt, Artificial
  Chemically synthesized
uuuaaaugccagguuucuuaagu

SEQ ID NO: 3562 - RNA, 23 nt, Artificial
  Chemically synthesized
uuaaaugccagguuucuuaaguu

SEQ ID NO: 3563 - RNA, 23 nt, Artificial
  Chemically synthesized
cucguugauuucgcugcuccauu

SEQ ID NO: 3564 - RNA, 23 nt, Artificial
  Chemically synthesized
ucguugauuucgcugcuccauuu

SEQ ID NO: 3565 - RNA, 23 nt, Artificial
  Chemically synthesized
cguugauuucgcugcuccauuua

SEQ ID NO: 3566 - RNA, 23 nt, Artificial
  Chemically synthesized
guugauuucgcugcuccauuuag

SEQ ID NO: 3567 - RNA, 23 nt, Artificial
  Chemically synthesized
uugauuucgcugcuccauuuagc

SEQ ID NO: 3568 - RNA, 23 nt, Artificial
  Chemically synthesized
cagauuucaucuccuuugcuugc

SEQ ID NO: 3569 - RNA, 23 nt, Artificial
  Chemically synthesized
agauuucaucuccuuugcuugcc

SEQ ID NO: 3570 - RNA, 23 nt, Artificial
  Chemically synthesized
gauuucaucuccuuugcuugccu

SEQ ID NO: 3571 - RNA, 23 nt, Artificial
  Chemically synthesized
auuucaucuccuuugcuugccuu

SEQ ID NO: 3572 - RNA, 23 nt, Artificial
  Chemically synthesized
uuucaucuccuuugcuugccuuu

SEQ ID NO: 3573 - RNA, 23 nt, Artificial
  Chemically synthesized
aggcucaagguguuuuucucuuc

SEQ ID NO: 3574 - RNA, 23 nt, Artificial
  Chemically synthesized
ggcucaagguguuuuucucuucu

SEQ ID NO: 3575 - RNA, 23 nt, Artificial
  Chemically synthesized
gcucaagguguuuuucucuucuu

SEQ ID NO: 3576 - RNA, 23 nt, Artificial
  Chemically synthesized
cucaagguguuuuucucuucuuu

SEQ ID NO: 3577 - RNA, 23 nt, Artificial
  Chemically synthesized
ucaagguguuuuucucuucuuua

SEQ ID NO: 3578 - RNA, 23 nt, Artificial
  Chemically synthesized
acuauuguuuacucccauaauug

SEQ ID NO: 3579 - RNA, 23 nt, Artificial
  Chemically synthesized
cuauuguuuacucccauaauugc

SEQ ID NO: 3580 - RNA, 23 nt, Artificial
  Chemically synthesized
uauuguuuacucccauaauugca

SEQ ID NO: 3581 - RNA, 23 nt, Artificial
  Chemically synthesized
auuguuuacucccauaauugcaa

SEQ ID NO: 3582 - RNA, 23 nt, Artificial
  Chemically synthesized
uuguuuacucccauaauugcaaa

SEQ ID NO: 3583 - RNA, 23 nt, Artificial
  Chemically synthesized
aaaagggaaagguaaguuucacg

SEQ ID NO: 3584 - RNA, 23 nt, Artificial
  Chemically synthesized
aaagggaaagguaaguuucacgg

SEQ ID NO: 3585 - RNA, 23 nt, Artificial
  Chemically synthesized
aagggaaagguaaguuucacgga

SEQ ID NO: 3586 - RNA, 23 nt, Artificial
  Chemically synthesized
agggaaagguaaguuucacggag

SEQ ID NO: 3587 - RNA, 23 nt, Artificial
  Chemically synthesized
gggaaagguaaguuucacggaga

SEQ ID NO: 3588 - RNA, 23 nt, Artificial
  Chemically synthesized
uugcuugccuuuuaccucuuucu

SEQ ID NO: 3589 - RNA, 23 nt, Artificial
  Chemically synthesized
acuuauuggcugcugaaacauuc

SEQ ID NO: 3590 - RNA, 23 nt, Artificial
  Chemically synthesized
cuuauuggcugcugaaacauucc

SEQ ID NO: 3591 - RNA, 23 nt, Artificial
  Chemically synthesized
uuauuggcugcugaaacauuccc

SEQ ID NO: 3592 - RNA, 23 nt, Artificial
  Chemically synthesized
uauuggcugcugaaacauuccca

SEQ ID NO: 3593 - RNA, 23 nt, Artificial
  Chemically synthesized
auuggcugcugaaacauucccag

SEQ ID NO: 3594 - RNA, 23 nt, Artificial
  Chemically synthesized
aaguuuccaguuuguuuucaaca

SEQ ID NO: 3595 - RNA, 23 nt, Artificial
  Chemically synthesized
aguuuccaguuuguuuucaacaa

SEQ ID NO: 3596 - RNA, 23 nt, Artificial
  Chemically synthesized
guuuccaguuuguuuucaacaaa

SEQ ID NO: 3597 - RNA, 23 nt, Artificial
  Chemically synthesized
uuuccaguuuguuuucaacaaaa

SEQ ID NO: 3598 - RNA, 23 nt, Artificial
  Chemically synthesized
uuccaguuuguuuucaacaaaaa

SEQ ID NO: 3599 - RNA, 23 nt, Artificial
  Chemically synthesized
gagauuuagcacacugaucacac

SEQ ID NO: 3600 - RNA, 23 nt, Artificial
  Chemically synthesized
agauuuagcacacugaucacacg

SEQ ID NO: 3601 - RNA, 23 nt, Artificial
  Chemically synthesized
gauuuagcacacugaucacacga

SEQ ID NO: 3602 - RNA, 23 nt, Artificial
  Chemically synthesized
auuuagcacacugaucacacgau

SEQ ID NO: 3603 - RNA, 23 nt, Artificial
  Chemically synthesized
uuuagcacacugaucacacgauu

SEQ ID NO: 3604 - RNA, 23 nt, Artificial
  Chemically synthesized
gguuuaaaaaguccaguuucucg

SEQ ID NO: 3605 - RNA, 23 nt, Artificial
  Chemically synthesized
guuuaaaaaguccaguuucucgu

SEQ ID NO: 3606 - RNA, 23 nt, Artificial
  Chemically synthesized
uuuaaaaaguccaguuucucguu

SEQ ID NO: 3607 - RNA, 23 nt, Artificial
  Chemically synthesized
uuaaaaaguccaguuucucguug

SEQ ID NO: 3608 - RNA, 23 nt, Artificial
  Chemically synthesized
uaaaaaguccaguuucucguuga

SEQ ID NO: 3609 - RNA, 23 nt, Artificial
  Chemically synthesized
ugucuuggaaauuuggguacgag

SEQ ID NO: 3610 - RNA, 23 nt, Artificial
  Chemically synthesized
gucuuggaaauuuggguacgagu

SEQ ID NO: 3611 - RNA, 23 nt, Artificial
  Chemically synthesized
ucuuggaaauuuggguacgaguu

SEQ ID NO: 3612 - RNA, 23 nt, Artificial
  Chemically synthesized
cuuggaaauuuggguacgaguug

SEQ ID NO: 3613 - RNA, 23 nt, Artificial
  Chemically synthesized
uuggaaauuuggguacgaguugc

SEQ ID NO: 3614 - RNA, 23 nt, Artificial
  Chemically synthesized
cauguuugugucuuggaaauuug

SEQ ID NO: 3615 - RNA, 23 nt, Artificial
  Chemically synthesized
auguuugugucuuggaaauuugg

SEQ ID NO: 3616 - RNA, 23 nt, Artificial
  Chemically synthesized
uguuugugucuuggaaauuuggg

SEQ ID NO: 3617 - RNA, 23 nt, Artificial
  Chemically synthesized
guuugugucuuggaaauuugggu

SEQ ID NO: 3618 - RNA, 23 nt, Artificial
  Chemically synthesized
uuugugucuuggaaauuugggua

SEQ ID NO: 3619 - RNA, 23 nt, Artificial
  Chemically synthesized
uaagauuaaggucugucaguggg

SEQ ID NO: 3620 - RNA, 23 nt, Artificial
  Chemically synthesized
uccgucuugaugugcguucgcug

SEQ ID NO: 3621 - RNA, 23 nt, Artificial
  Chemically synthesized
ccgucuugaugugcguucgcugg

SEQ ID NO: 3622 - RNA, 23 nt, Artificial
  Chemically synthesized
cgucuugaugugcguucgcuggg

SEQ ID NO: 3623 - RNA, 23 nt, Artificial
  Chemically synthesized
gucuugaugugcguucgcuggga

SEQ ID NO: 3624 - RNA, 23 nt, Artificial
  Chemically synthesized
ucuugaugugcguucgcugggac

SEQ ID NO: 3625 - RNA, 23 nt, Artificial
  Chemically synthesized
ugcuugccuuuuaccucuuucuu

SEQ ID NO: 3626 - RNA, 23 nt, Artificial
  Chemically synthesized
gcuugccuuuuaccucuuucuua

SEQ ID NO: 3627 - RNA, 23 nt, Artificial
  Chemically synthesized
cuugccuuuuaccucuuucuuaa

SEQ ID NO: 3628 - RNA, 23 nt, Artificial
  Chemically synthesized
uugccuuuuaccucuuucuuaag

SEQ ID NO: 3629 - RNA, 23 nt, Artificial
  Chemically synthesized
uuggcugcugaaacauucccaga

SEQ ID NO: 3630 - RNA, 23 nt, Artificial
  Chemically synthesized
uaauuuuagcaaguggaaugucu

SEQ ID NO: 3631 - RNA, 23 nt, Artificial
  Chemically synthesized
aauuuuagcaaguggaaugucuu

SEQ ID NO: 3632 - RNA, 23 nt, Artificial
  Chemically synthesized
auuuuagcaaguggaaugucuug

SEQ ID NO: 3633 - RNA, 23 nt, Artificial
  Chemically synthesized
uuuuagcaaguggaaugucuuga

SEQ ID NO: 3634 - RNA, 23 nt, Artificial
  Chemically synthesized
uuuagcaaguggaaugucuugaa

SEQ ID NO: 3635 - RNA, 23 nt, Artificial
  Chemically synthesized
ucuguacaaaaauacucugguug

SEQ ID NO: 3636 - RNA, 23 nt, Artificial
  Chemically synthesized
cuguacaaaaauacucugguugc

SEQ ID NO: 3637 - RNA, 23 nt, Artificial
  Chemically synthesized
uguacaaaaauacucugguugca

SEQ ID NO: 3638 - RNA, 23 nt, Artificial
  Chemically synthesized
guacaaaaauacucugguugcaa

SEQ ID NO: 3639 - RNA, 23 nt, Artificial
  Chemically synthesized
uacaaaaauacucugguugcaag

SEQ ID NO: 3640 - RNA, 23 nt, Artificial
  Chemically synthesized
uucaucuccuuugcuugccuuuu

SEQ ID NO: 3641 - RNA, 23 nt, Artificial
  Chemically synthesized
cucguucagaagucuccagagcu

SEQ ID NO: 3642 - RNA, 23 nt, Artificial
  Chemically synthesized
ucguucagaagucuccagagcuu

SEQ ID NO: 3643 - RNA, 23 nt, Artificial
  Chemically synthesized
cguucagaagucuccagagcuug

SEQ ID NO: 3644 - RNA, 23 nt, Artificial
  Chemically synthesized
guucagaagucuccagagcuugc

SEQ ID NO: 3645 - RNA, 23 nt, Artificial
  Chemically synthesized
uucagaagucuccagagcuugcc

SEQ ID NO: 3646 - RNA, 23 nt, Artificial
  Chemically synthesized
ggaaagguaaguuucacggagag

SEQ ID NO: 3647 - RNA, 23 nt, Artificial
  Chemically synthesized
ugauuucgcugcuccauuuagcc

SEQ ID NO: 3648 - RNA, 23 nt, Artificial
  Chemically synthesized
gauuucgcugcuccauuuagcca

SEQ ID NO: 3649 - RNA, 23 nt, Artificial
  Chemically synthesized
auuucgcugcuccauuuagccaa

SEQ ID NO: 3650 - RNA, 23 nt, Artificial
  Chemically synthesized
uuucgcugcuccauuuagccaag

SEQ ID NO: 3651 - RNA, 23 nt, Artificial
  Chemically synthesized
uuuaggaucaucucggccaucuu

SEQ ID NO: 3652 - RNA, 23 nt, Artificial
  Chemically synthesized
ggaauucugguugguccucucuu

SEQ ID NO: 3653 - RNA, 23 nt, Artificial
  Chemically synthesized
gaauucugguugguccucucuuu

SEQ ID NO: 3654 - RNA, 23 nt, Artificial
  Chemically synthesized
aauucugguugguccucucuuuc

SEQ ID NO: 3655 - RNA, 23 nt, Artificial
  Chemically synthesized
auucugguugguccucucuuucu

SEQ ID NO: 3656 - RNA, 23 nt, Artificial
  Chemically synthesized
uucugguugguccucucuuucuu

SEQ ID NO: 3657 - RNA, 23 nt, Artificial
  Chemically synthesized
ucucguugauuucgcugcuccau

SEQ ID NO: 3658 - RNA, 23 nt, Artificial
  Chemically synthesized
acagauuucaucuccuuugcuug

SEQ ID NO: 3659 - RNA, 23 nt, Artificial
  Chemically synthesized
augauuuaaaugccagguuucuu

SEQ ID NO: 3660 - RNA, 23 nt, Artificial
  Chemically synthesized
gaucacacgauucuccaucaucc

SEQ ID NO: 3661 - RNA, 23 nt, Artificial
  Chemically synthesized
aucacacgauucuccaucauccu

SEQ ID NO: 3662 - RNA, 23 nt, Artificial
  Chemically synthesized
ucacacgauucuccaucauccuc

SEQ ID NO: 3663 - RNA, 23 nt, Artificial
  Chemically synthesized
cacacgauucuccaucauccucc

SEQ ID NO: 3664 - RNA, 23 nt, Artificial
  Chemically synthesized
acacgauucuccaucauccucca

SEQ ID NO: 3665 - RNA, 23 nt, Artificial
  Chemically synthesized
uugugucuuggaaauuuggguac

SEQ ID NO: 3666 - RNA, 23 nt, Artificial
  Chemically synthesized
uuuauuuuuuuuuaaggcagcuc

SEQ ID NO: 3667 - RNA, 23 nt, Artificial
  Chemically synthesized
ucucuagacuauuguuuacuccc

SEQ ID NO: 3668 - RNA, 23 nt, Artificial
  Chemically synthesized
cucuagacuauuguuuacuccca

SEQ ID NO: 3669 - RNA, 23 nt, Artificial
  Chemically synthesized
ucuagacuauuguuuacucccau

SEQ ID NO: 3670 - RNA, 23 nt, Artificial
  Chemically synthesized
cuagacuauuguuuacucccaua

SEQ ID NO: 3671 - RNA, 23 nt, Artificial
  Chemically synthesized
uagacuauuguuuacucccauaa

SEQ ID NO: 3672 - RNA, 23 nt, Artificial
  Chemically synthesized
accauacccuuugaggaaagcuc

SEQ ID NO: 3673 - RNA, 23 nt, Artificial
  Chemically synthesized
ccauacccuuugaggaaagcucc

SEQ ID NO: 3674 - RNA, 23 nt, Artificial
  Chemically synthesized
cauacccuuugaggaaagcucca

SEQ ID NO: 3675 - RNA, 23 nt, Artificial
  Chemically synthesized
auacccuuugaggaaagcuccaa

SEQ ID NO: 3676 - RNA, 23 nt, Artificial
  Chemically synthesized
gacacaugcuugcauuguuuuug

SEQ ID NO: 3677 - RNA, 23 nt, Artificial
  Chemically synthesized
acacaugcuugcauuguuuuugu

SEQ ID NO: 3678 - RNA, 23 nt, Artificial
  Chemically synthesized
cacaugcuugcauuguuuuugug

SEQ ID NO: 3679 - RNA, 23 nt, Artificial
  Chemically synthesized
acaugcuugcauuguuuuugugu

SEQ ID NO: 3680 - RNA, 23 nt, Artificial
  Chemically synthesized
caugcuugcauuguuuuuguguc

SEQ ID NO: 3681 - RNA, 23 nt, Artificial
  Chemically synthesized
gggguucauguaggugaaggugg

SEQ ID NO: 3682 - RNA, 23 nt, Artificial
  Chemically synthesized
ggguucauguaggugaaggugga

SEQ ID NO: 3683 - RNA, 23 nt, Artificial
  Chemically synthesized
gguucauguaggugaagguggag

SEQ ID NO: 3684 - RNA, 23 nt, Artificial
  Chemically synthesized
guucauguaggugaagguggagu

SEQ ID NO: 3685 - RNA, 23 nt, Artificial
  Chemically synthesized
uucauguaggugaagguggagua

SEQ ID NO: 3686 - RNA, 23 nt, Artificial
  Chemically synthesized
cucgucggucaucuucaugaagg

SEQ ID NO: 3687 - RNA, 23 nt, Artificial
  Chemically synthesized
ucgucggucaucuucaugaaggg

SEQ ID NO: 3688 - RNA, 23 nt, Artificial
  Chemically synthesized
cgucggucaucuucaugaagggg

SEQ ID NO: 3689 - RNA, 23 nt, Artificial
  Chemically synthesized
gucggucaucuucaugaaggggu

SEQ ID NO: 3690 - RNA, 23 nt, Artificial
  Chemically synthesized
ucggucaucuucaugaagggguc

SEQ ID NO: 3691 - RNA, 23 nt, Artificial
  Chemically synthesized
cuuuuaccucuuucuuaagacug

SEQ ID NO: 3692 - RNA, 23 nt, Artificial
  Chemically synthesized
uuuuaccucuuucuuaagacugc

SEQ ID NO: 3693 - RNA, 23 nt, Artificial
  Chemically synthesized
uuuaccucuuucuuaagacugca

SEQ ID NO: 3694 - RNA, 23 nt, Artificial
  Chemically synthesized
uuaccucuuucuuaagacugcag

SEQ ID NO: 3695 - RNA, 23 nt, Artificial
  Chemically synthesized
uaccucuuucuuaagacugcagu

SEQ ID NO: 3696 - RNA, 23 nt, Artificial
  Chemically synthesized
ccaaacaggcagagagauuuagc

SEQ ID NO: 3697 - RNA, 23 nt, Artificial
  Chemically synthesized
aaacaggcagagagauuuagcac

SEQ ID NO: 3698 - RNA, 23 nt, Artificial
  Chemically synthesized
aacaggcagagagauuuagcaca

SEQ ID NO: 3699 - RNA, 23 nt, Artificial
  Chemically synthesized
acaggcagagagauuuagcacac

SEQ ID NO: 3700 - RNA, 23 nt, Artificial
  Chemically synthesized
ucgguguagucguacugugagcg

SEQ ID NO: 3701 - RNA, 23 nt, Artificial
  Chemically synthesized
cgguguagucguacugugagcgg

SEQ ID NO: 3702 - RNA, 23 nt, Artificial
  Chemically synthesized
gguguagucguacugugagcggg

SEQ ID NO: 3703 - RNA, 23 nt, Artificial
  Chemically synthesized
guguagucguacugugagcgggu

SEQ ID NO: 3704 - RNA, 23 nt, Artificial
  Chemically synthesized
uguagucguacugugagcgggug

SEQ ID NO: 3705 - RNA, 23 nt, Artificial
  Chemically synthesized
ggcauuuauacaaaucuagggug

SEQ ID NO: 3706 - RNA, 23 nt, Artificial
  Chemically synthesized
gcauuuauacaaaucuaggguga

SEQ ID NO: 3707 - RNA, 23 nt, Artificial
  Chemically synthesized
cauuuauacaaaucuagggugag

SEQ ID NO: 3708 - RNA, 23 nt, Artificial
  Chemically synthesized
auuuauacaaaucuagggugagg

SEQ ID NO: 3709 - RNA, 23 nt, Artificial
  Chemically synthesized
uuuauacaaaucuagggugagga

SEQ ID NO: 3710 - RNA, 23 nt, Artificial
  Chemically synthesized
ugcaaauguuucccagcagcacc

SEQ ID NO: 3711 - RNA, 23 nt, Artificial
  Chemically synthesized
gcaaauguuucccagcagcaccg

SEQ ID NO: 3712 - RNA, 23 nt, Artificial
  Chemically synthesized
caaauguuucccagcagcaccgu

SEQ ID NO: 3713 - RNA, 23 nt, Artificial
  Chemically synthesized
aaauguuucccagcagcaccguu

SEQ ID NO: 3714 - RNA, 23 nt, Artificial
  Chemically synthesized
augcuugcauuguuuuuguguca

SEQ ID NO: 3715 - RNA, 23 nt, Artificial
  Chemically synthesized
ugcuugcauuguuuuugugucaa

SEQ ID NO: 3716 - RNA, 23 nt, Artificial
  Chemically synthesized
gcuugcauuguuuuugugucaaa

SEQ ID NO: 3717 - RNA, 23 nt, Artificial
  Chemically synthesized
cuugcauuguuuuugugucaaaa

SEQ ID NO: 3718 - RNA, 23 nt, Artificial
  Chemically synthesized
uugcauuguuuuugugucaaaac

SEQ ID NO: 3719 - RNA, 23 nt, Artificial
  Chemically synthesized
ugugucuuggaaauuuggguacg

SEQ ID NO: 3720 - RNA, 23 nt, Artificial
  Chemically synthesized
uuuauucuacugacuucuaaaac

SEQ ID NO: 3721 - RNA, 23 nt, Artificial
  Chemically synthesized
uuauucuacugacuucuaaaacu

SEQ ID NO: 3722 - RNA, 23 nt, Artificial
  Chemically synthesized
uauucuacugacuucuaaaacug

SEQ ID NO: 3723 - RNA, 23 nt, Artificial
  Chemically synthesized
auucuacugacuucuaaaacugu

SEQ ID NO: 3724 - RNA, 23 nt, Artificial
  Chemically synthesized
uucuacugacuucuaaaacuguu

SEQ ID NO: 3725 - RNA, 23 nt, Artificial
  Chemically synthesized
cagaacagauuucaucuccuuug

SEQ ID NO: 3726 - RNA, 23 nt, Artificial
  Chemically synthesized
agaacagauuucaucuccuuugc

SEQ ID NO: 3727 - RNA, 23 nt, Artificial
  Chemically synthesized
gaacagauuucaucuccuuugcu

SEQ ID NO: 3728 - RNA, 23 nt, Artificial
  Chemically synthesized
aacagauuucaucuccuuugcuu

SEQ ID NO: 3729 - RNA, 23 nt, Artificial
  Chemically synthesized
uggaaugucuugaagguuaacug

SEQ ID NO: 3730 - RNA, 23 nt, Artificial
  Chemically synthesized
ggaaugucuugaagguuaacugc

SEQ ID NO: 3731 - RNA, 23 nt, Artificial
  Chemically synthesized
gaaugucuugaagguuaacugcu

SEQ ID NO: 3732 - RNA, 23 nt, Artificial
  Chemically synthesized
aaugucuugaagguuaacugcug

SEQ ID NO: 3733 - RNA, 23 nt, Artificial
  Chemically synthesized
augucuugaagguuaacugcugg

SEQ ID NO: 3734 - RNA, 23 nt, Artificial
  Chemically synthesized
aaauuuggguacgaguugccuuu

SEQ ID NO: 3735 - RNA, 23 nt, Artificial
  Chemically synthesized
aauuuggguacgaguugccuuua

SEQ ID NO: 3736 - RNA, 23 nt, Artificial
  Chemically synthesized
auuuggguacgaguugccuuuag

SEQ ID NO: 3737 - RNA, 23 nt, Artificial
  Chemically synthesized
uuuggguacgaguugccuuuagc

SEQ ID NO: 3738 - RNA, 23 nt, Artificial
  Chemically synthesized
uuggguacgaguugccuuuagcu

SEQ ID NO: 3739 - RNA, 23 nt, Artificial
  Chemically synthesized
cugcuccgucuugaugugcguuc

SEQ ID NO: 3740 - RNA, 23 nt, Artificial
  Chemically synthesized
ugcuccgucuugaugugcguucg

SEQ ID NO: 3741 - RNA, 23 nt, Artificial
  Chemically synthesized
gcuccgucuugaugugcguucgc

SEQ ID NO: 3742 - RNA, 23 nt, Artificial
  Chemically synthesized
cuccgucuugaugugcguucgcu

SEQ ID NO: 3743 - RNA, 23 nt, Artificial
  Chemically synthesized
cacaauauaaggcagcccaaagg

SEQ ID NO: 3744 - RNA, 23 nt, Artificial
  Chemically synthesized
acaauauaaggcagcccaaaggu

SEQ ID NO: 3745 - RNA, 23 nt, Artificial
  Chemically synthesized
caauauaaggcagcccaaagguc

SEQ ID NO: 3746 - RNA, 23 nt, Artificial
  Chemically synthesized
aauauaaggcagcccaaaggucu

SEQ ID NO: 3747 - RNA, 23 nt, Artificial
  Chemically synthesized
auauaaggcagcccaaaggucug

SEQ ID NO: 3748 - RNA, 23 nt, Artificial
  Chemically synthesized
ggguuuaaaaaguccaguuucuc

SEQ ID NO: 3749 - RNA, 23 nt, Artificial
  Chemically synthesized
acacuacauuugcaaucucucau

SEQ ID NO: 3750 - RNA, 23 nt, Artificial
  Chemically synthesized
cacuacauuugcaaucucucauu

SEQ ID NO: 3751 - RNA, 23 nt, Artificial
  Chemically synthesized
acuacauuugcaaucucucauuu

SEQ ID NO: 3752 - RNA, 23 nt, Artificial
  Chemically synthesized
cuacauuugcaaucucucauuua

SEQ ID NO: 3753 - RNA, 23 nt, Artificial
  Chemically synthesized
uacauuugcaaucucucauuuau

SEQ ID NO: 3754 - RNA, 23 nt, Artificial
  Chemically synthesized
ucuccaucauccuccacgcuugc

SEQ ID NO: 3755 - RNA, 23 nt, Artificial
  Chemically synthesized
cuccaucauccuccacgcuugcu

SEQ ID NO: 3756 - RNA, 23 nt, Artificial
  Chemically synthesized
uccaucauccuccacgcuugcuc

SEQ ID NO: 3757 - RNA, 23 nt, Artificial
  Chemically synthesized
acccuuugaggaaagcuccaaca

SEQ ID NO: 3758 - RNA, 23 nt, Artificial
  Chemically synthesized
cccuuugaggaaagcuccaacaa

SEQ ID NO: 3759 - RNA, 23 nt, Artificial
  Chemically synthesized
ccuuugaggaaagcuccaacaac

SEQ ID NO: 3760 - RNA, 23 nt, Artificial
  Chemically synthesized
cuuugaggaaagcuccaacaacc

SEQ ID NO: 3761 - RNA, 23 nt, Artificial
  Chemically synthesized
uuugaggaaagcuccaacaaccu

SEQ ID NO: 3762 - RNA, 23 nt, Artificial
  Chemically synthesized
gaggaauuaagcaaaguuaaccc

SEQ ID NO: 3763 - RNA, 23 nt, Artificial
  Chemically synthesized
aggaauuaagcaaaguuaacccc

SEQ ID NO: 3764 - RNA, 23 nt, Artificial
  Chemically synthesized
ggaauuaagcaaaguuaaccccc

SEQ ID NO: 3765 - RNA, 23 nt, Artificial
  Chemically synthesized
gaauuaagcaaaguuaaccccca

SEQ ID NO: 3766 - RNA, 23 nt, Artificial
  Chemically synthesized
aauuaagcaaaguuaacccccaa

SEQ ID NO: 3767 - RNA, 23 nt, Artificial
  Chemically synthesized
uauaaggcagcccaaaggucugu

SEQ ID NO: 3768 - RNA, 23 nt, Artificial
  Chemically synthesized
auaaggcagcccaaaggucugug

SEQ ID NO: 3769 - RNA, 23 nt, Artificial
  Chemically synthesized
uaaggcagcccaaaggucugugg

SEQ ID NO: 3770 - RNA, 23 nt, Artificial
  Chemically synthesized
acauucccagaacagauuucauc

SEQ ID NO: 3771 - RNA, 23 nt, Artificial
  Chemically synthesized
cauucccagaacagauuucaucu

SEQ ID NO: 3772 - RNA, 23 nt, Artificial
  Chemically synthesized
auucccagaacagauuucaucuc

SEQ ID NO: 3773 - RNA, 23 nt, Artificial
  Chemically synthesized
uucccagaacagauuucaucucc

SEQ ID NO: 3774 - RNA, 23 nt, Artificial
  Chemically synthesized
ucccagaacagauuucaucuccu

SEQ ID NO: 3775 - RNA, 23 nt, Artificial
  Chemically synthesized
caaguuuccaguuuguuuucaac

SEQ ID NO: 3776 - RNA, 23 nt, Artificial
  Chemically synthesized
acagaugaccauacccuuugagg

SEQ ID NO: 3777 - RNA, 23 nt, Artificial
  Chemically synthesized
cagaugaccauacccuuugagga

SEQ ID NO: 3778 - RNA, 23 nt, Artificial
  Chemically synthesized
agaugaccauacccuuugaggaa

SEQ ID NO: 3779 - RNA, 23 nt, Artificial
  Chemically synthesized
gaugaccauacccuuugaggaaa

SEQ ID NO: 3780 - RNA, 23 nt, Artificial
  Chemically synthesized
augaccauacccuuugaggaaag

SEQ ID NO: 3781 - RNA, 23 nt, Artificial
  Chemically synthesized
uccuuaaaucgcaaagccugagg

SEQ ID NO: 3782 - RNA, 23 nt, Artificial
  Chemically synthesized
ccuuaaaucgcaaagccugagga

SEQ ID NO: 3783 - RNA, 23 nt, Artificial
  Chemically synthesized
cuuaaaucgcaaagccugaggaa

SEQ ID NO: 3784 - RNA, 23 nt, Artificial
  Chemically synthesized
uuaaaucgcaaagccugaggaau

SEQ ID NO: 3785 - RNA, 23 nt, Artificial
  Chemically synthesized
uaaaucgcaaagccugaggaauu

SEQ ID NO: 3786 - RNA, 23 nt, Artificial
  Chemically synthesized
cggcuuguucuugcuggagccgu

SEQ ID NO: 3787 - RNA, 23 nt, Artificial
  Chemically synthesized
ggcuuguucuugcuggagccguu

SEQ ID NO: 3788 - RNA, 23 nt, Artificial
  Chemically synthesized
gcuuguucuugcuggagccguug

SEQ ID NO: 3789 - RNA, 23 nt, Artificial
  Chemically synthesized
cuuguucuugcuggagccguuga

SEQ ID NO: 3790 - RNA, 23 nt, Artificial
  Chemically synthesized
uuguucuugcuggagccguugac

SEQ ID NO: 3791 - RNA, 23 nt, Artificial
  Chemically synthesized
cgaguugccuuuagcuuaaaugu

SEQ ID NO: 3792 - RNA, 23 nt, Artificial
  Chemically synthesized
gaguugccuuuagcuuaaauguc

SEQ ID NO: 3793 - RNA, 23 nt, Artificial
  Chemically synthesized
aguugccuuuagcuuaaaugucu

SEQ ID NO: 3794 - RNA, 23 nt, Artificial
  Chemically synthesized
guugccuuuagcuuaaaugucuu

SEQ ID NO: 3795 - RNA, 23 nt, Artificial
  Chemically synthesized
uugccuuuagcuuaaaugucuuu

SEQ ID NO: 3796 - RNA, 23 nt, Artificial
  Chemically synthesized
aaggucuguggcagaaaacacug

SEQ ID NO: 3797 - RNA, 23 nt, Artificial
  Chemically synthesized
aggucuguggcagaaaacacugc

SEQ ID NO: 3798 - RNA, 23 nt, Artificial
  Chemically synthesized
ggucuguggcagaaaacacugca

SEQ ID NO: 3799 - RNA, 23 nt, Artificial
  Chemically synthesized
gucuguggcagaaaacacugcaa

SEQ ID NO: 3800 - RNA, 23 nt, Artificial
  Chemically synthesized
ucuguggcagaaaacacugcaaa

SEQ ID NO: 3801 - RNA, 23 nt, Artificial
  Chemically synthesized
agugauacacuacauuugcaauc

SEQ ID NO: 3802 - RNA, 23 nt, Artificial
  Chemically synthesized
gugauacacuacauuugcaaucu

SEQ ID NO: 3803 - RNA, 23 nt, Artificial
  Chemically synthesized
ugauacacuacauuugcaaucuc

SEQ ID NO: 3804 - RNA, 23 nt, Artificial
  Chemically synthesized
gauacacuacauuugcaaucucu

SEQ ID NO: 3805 - RNA, 23 nt, Artificial
  Chemically synthesized
auacacuacauuugcaaucucuc

SEQ ID NO: 3806 - RNA, 23 nt, Artificial
  Chemically synthesized
uuagcaaguggaaugucuugaag

SEQ ID NO: 3807 - RNA, 23 nt, Artificial
  Chemically synthesized
gaagauguagagaaauauggaug

SEQ ID NO: 3808 - RNA, 23 nt, Artificial
  Chemically synthesized
aagauguagagaaauauggauga

SEQ ID NO: 3809 - RNA, 23 nt, Artificial
  Chemically synthesized
agauguagagaaauauggaugac

SEQ ID NO: 3810 - RNA, 23 nt, Artificial
  Chemically synthesized
gauguagagaaauauggaugaca

SEQ ID NO: 3811 - RNA, 23 nt, Artificial
  Chemically synthesized
auguagagaaauauggaugacac

SEQ ID NO: 3812 - RNA, 23 nt, Artificial
  Chemically synthesized
gaaauauggaugacacaugcuug

SEQ ID NO: 3813 - RNA, 23 nt, Artificial
  Chemically synthesized
aaauauggaugacacaugcuugc

SEQ ID NO: 3814 - RNA, 23 nt, Artificial
  Chemically synthesized
aauauggaugacacaugcuugca

SEQ ID NO: 3815 - RNA, 23 nt, Artificial
  Chemically synthesized
auauggaugacacaugcuugcau

SEQ ID NO: 3816 - RNA, 23 nt, Artificial
  Chemically synthesized
uauggaugacacaugcuugcauu

SEQ ID NO: 3817 - RNA, 23 nt, Artificial
  Chemically synthesized
aagauuaaggucugucagugggc

SEQ ID NO: 3818 - RNA, 23 nt, Artificial
  Chemically synthesized
agauuaaggucugucagugggcu

SEQ ID NO: 3819 - RNA, 23 nt, Artificial
  Chemically synthesized
gauuaaggucugucagugggcug

SEQ ID NO: 3820 - RNA, 23 nt, Artificial
  Chemically synthesized
auuaaggucugucagugggcuga

SEQ ID NO: 3821 - RNA, 23 nt, Artificial
  Chemically synthesized
uucuuaagacugcagugaacaag

SEQ ID NO: 3822 - RNA, 23 nt, Artificial
  Chemically synthesized
ucuuaagacugcagugaacaagc

SEQ ID NO: 3823 - RNA, 23 nt, Artificial
  Chemically synthesized
cuuaagacugcagugaacaagca

SEQ ID NO: 3824 - RNA, 23 nt, Artificial
  Chemically synthesized
uuaagacugcagugaacaagcaa

SEQ ID NO: 3825 - RNA, 23 nt, Artificial
  Chemically synthesized
uaagacugcagugaacaagcaaa

SEQ ID NO: 3826 - RNA, 23 nt, Artificial
  Chemically synthesized
cugaucacauaacacaauucugu

SEQ ID NO: 3827 - RNA, 23 nt, Artificial
  Chemically synthesized
ugaucacauaacacaauucuguu

SEQ ID NO: 3828 - RNA, 23 nt, Artificial
  Chemically synthesized
gaucacauaacacaauucuguuu

SEQ ID NO: 3829 - RNA, 23 nt, Artificial
  Chemically synthesized
aucacauaacacaauucuguuuu

SEQ ID NO: 3830 - RNA, 23 nt, Artificial
  Chemically synthesized
ucacauaacacaauucuguuuuu

SEQ ID NO: 3831 - RNA, 23 nt, Artificial
  Chemically synthesized
caaaauaugauuuaaaugccagg

SEQ ID NO: 3832 - RNA, 23 nt, Artificial
  Chemically synthesized
aaaauaugauuuaaaugccaggu

SEQ ID NO: 3833 - RNA, 23 nt, Artificial
  Chemically synthesized
aaauaugauuuaaaugccagguu

SEQ ID NO: 3834 - RNA, 23 nt, Artificial
  Chemically synthesized
aauaugauuuaaaugccagguuu

SEQ ID NO: 3835 - RNA, 23 nt, Artificial
  Chemically synthesized
auaugauuuaaaugccagguuuc

SEQ ID NO: 3836 - RNA, 23 nt, Artificial
  Chemically synthesized
ucccauaauugcaaaauaaggcc

SEQ ID NO: 3837 - RNA, 23 nt, Artificial
  Chemically synthesized
cccauaauugcaaaauaaggccu

SEQ ID NO: 3838 - RNA, 23 nt, Artificial
  Chemically synthesized
ccauaauugcaaaauaaggccuu

SEQ ID NO: 3839 - RNA, 23 nt, Artificial
  Chemically synthesized
cauaauugcaaaauaaggccuuu

SEQ ID NO: 3840 - RNA, 23 nt, Artificial
  Chemically synthesized
auaauugcaaaauaaggccuuua

SEQ ID NO: 3841 - RNA, 23 nt, Artificial
  Chemically synthesized
auggaugacacaugcuugcauug

SEQ ID NO: 3842 - RNA, 23 nt, Artificial
  Chemically synthesized
aaaauagagaauauuccucacag

SEQ ID NO: 3843 - RNA, 23 nt, Artificial
  Chemically synthesized
aaauagagaauauuccucacaga

SEQ ID NO: 3844 - RNA, 23 nt, Artificial
  Chemically synthesized
aauagagaauauuccucacagag

SEQ ID NO: 3845 - RNA, 23 nt, Artificial
  Chemically synthesized
auagagaauauuccucacagagg

SEQ ID NO: 3846 - RNA, 23 nt, Artificial
  Chemically synthesized
uagagaauauuccucacagagga

SEQ ID NO: 3847 - RNA, 23 nt, Artificial
  Chemically synthesized
aaaguccaguuucucguugauuu

SEQ ID NO: 3848 - RNA, 23 nt, Artificial
  Chemically synthesized
aaguccaguuucucguugauuuc

SEQ ID NO: 3849 - RNA, 23 nt, Artificial
  Chemically synthesized
aguccaguuucucguugauuucg

SEQ ID NO: 3850 - RNA, 23 nt, Artificial
  Chemically synthesized
guccaguuucucguugauuucgc

SEQ ID NO: 3851 - RNA, 23 nt, Artificial
  Chemically synthesized
uccaguuucucguugauuucgcu

SEQ ID NO: 3852 - RNA, 23 nt, Artificial
  Chemically synthesized
cuccugcucgucggucaucuuca

SEQ ID NO: 3853 - RNA, 23 nt, Artificial
  Chemically synthesized
uccugcucgucggucaucuucau

SEQ ID NO: 3854 - RNA, 23 nt, Artificial
  Chemically synthesized
ccugcucgucggucaucuucaug

SEQ ID NO: 3855 - RNA, 23 nt, Artificial
  Chemically synthesized
cugcucgucggucaucuucauga

SEQ ID NO: 3856 - RNA, 23 nt, Artificial
  Chemically synthesized
ugcucgucggucaucuucaugaa

SEQ ID NO: 3857 - RNA, 23 nt, Artificial
  Chemically synthesized
cacgauucuccaucauccuccac

SEQ ID NO: 3858 - RNA, 23 nt, Artificial
  Chemically synthesized
uguuuacucccauaauugcaaaa

SEQ ID NO: 3859 - RNA, 23 nt, Artificial
  Chemically synthesized
guuuacucccauaauugcaaaau

SEQ ID NO: 3860 - RNA, 23 nt, Artificial
  Chemically synthesized
uuuacucccauaauugcaaaaua

SEQ ID NO: 3861 - RNA, 23 nt, Artificial
  Chemically synthesized
gggguccaggagauucauacgcg

SEQ ID NO: 3862 - RNA, 23 nt, Artificial
  Chemically synthesized
ggguccaggagauucauacgcgg

SEQ ID NO: 3863 - RNA, 23 nt, Artificial
  Chemically synthesized
gguccaggagauucauacgcggg

SEQ ID NO: 3864 - RNA, 23 nt, Artificial
  Chemically synthesized
guccaggagauucauacgcgggc

SEQ ID NO: 3865 - RNA, 23 nt, Artificial
  Chemically synthesized
uccaggagauucauacgcgggcc

SEQ ID NO: 3866 - RNA, 23 nt, Artificial
  Chemically synthesized
ccucuuucuuaagacugcaguga

SEQ ID NO: 3867 - RNA, 23 nt, Artificial
  Chemically synthesized
cucuuucuuaagacugcagugaa

SEQ ID NO: 3868 - RNA, 23 nt, Artificial
  Chemically synthesized
ucuuucuuaagacugcagugaac

SEQ ID NO: 3869 - RNA, 23 nt, Artificial
  Chemically synthesized
cuuucuuaagacugcagugaaca

SEQ ID NO: 3870 - RNA, 23 nt, Artificial
  Chemically synthesized
uuucuuaagacugcagugaacaa

SEQ ID NO: 3871 - RNA, 23 nt, Artificial
  Chemically synthesized
cugguugcaagaaaagcuagggc

SEQ ID NO: 3872 - RNA, 23 nt, Artificial
  Chemically synthesized
ugguugcaagaaaagcuagggca

SEQ ID NO: 3873 - RNA, 23 nt, Artificial
  Chemically synthesized
gguugcaagaaaagcuagggcac

SEQ ID NO: 3874 - RNA, 23 nt, Artificial
  Chemically synthesized
guugcaagaaaagcuagggcaca

SEQ ID NO: 3875 - RNA, 23 nt, Artificial
  Chemically synthesized
uugcaagaaaagcuagggcacac

SEQ ID NO: 3876 - RNA, 23 nt, Artificial
  Chemically synthesized
uuccagucaguuucgagcuccgc

SEQ ID NO: 3877 - RNA, 23 nt, Artificial
  Chemically synthesized
aaauugaaggaugccauauuaug

SEQ ID NO: 3878 - RNA, 23 nt, Artificial
  Chemically synthesized
aauugaaggaugccauauuauga

SEQ ID NO: 3879 - RNA, 23 nt, Artificial
  Chemically synthesized
auugaaggaugccauauuaugag

SEQ ID NO: 3880 - RNA, 23 nt, Artificial
  Chemically synthesized
uugaaggaugccauauuaugagu

SEQ ID NO: 3881 - RNA, 23 nt, Artificial
  Chemically synthesized
ugaaggaugccauauuaugagug

SEQ ID NO: 3882 - RNA, 23 nt, Artificial
  Chemically synthesized
aagcuuaccaaaugcuucucuag

SEQ ID NO: 3883 - RNA, 23 nt, Artificial
  Chemically synthesized
agcuuaccaaaugcuucucuaga

SEQ ID NO: 3884 - RNA, 23 nt, Artificial
  Chemically synthesized
gcuuaccaaaugcuucucuagac

SEQ ID NO: 3885 - RNA, 23 nt, Artificial
  Chemically synthesized
cuuaccaaaugcuucucuagacu

SEQ ID NO: 3886 - RNA, 23 nt, Artificial
  Chemically synthesized
uuaccaaaugcuucucuagacua

SEQ ID NO: 3887 - RNA, 23 nt, Artificial
  Chemically synthesized
gcuguguguagacggguuguucc

SEQ ID NO: 3888 - RNA, 23 nt, Artificial
  Chemically synthesized
cuguguguagacggguuguuccc

SEQ ID NO: 3889 - RNA, 23 nt, Artificial
  Chemically synthesized
uguguguagacggguuguuccca

SEQ ID NO: 3890 - RNA, 23 nt, Artificial
  Chemically synthesized
guguguagacggguuguucccag

SEQ ID NO: 3891 - RNA, 23 nt, Artificial
  Chemically synthesized
uguguagacggguuguucccagu

SEQ ID NO: 3892 - RNA, 23 nt, Artificial
  Chemically synthesized
uaugauuuaaaugccagguuucu

SEQ ID NO: 3893 - RNA, 23 nt, Artificial
  Chemically synthesized
cuccugcaaagaaaaguuuccgg

SEQ ID NO: 3894 - RNA, 23 nt, Artificial
  Chemically synthesized
uccugcaaagaaaaguuuccggg

SEQ ID NO: 3895 - RNA, 23 nt, Artificial
  Chemically synthesized
ccugcaaagaaaaguuuccgggg

SEQ ID NO: 3896 - RNA, 23 nt, Artificial
  Chemically synthesized
cugcaaagaaaaguuuccggggu

SEQ ID NO: 3897 - RNA, 23 nt, Artificial
  Chemically synthesized
ugcaaagaaaaguuuccgggguu

SEQ ID NO: 3898 - RNA, 23 nt, Artificial
  Chemically synthesized
gaaagguaaguuucacggagaga

SEQ ID NO: 3899 - RNA, 23 nt, Artificial
  Chemically synthesized
aaagguaaguuucacggagagaa

SEQ ID NO: 3900 - RNA, 23 nt, Artificial
  Chemically synthesized
agaaaagcuagggcacacuguuc

SEQ ID NO: 3901 - RNA, 23 nt, Artificial
  Chemically synthesized
gaaaagcuagggcacacuguuca

SEQ ID NO: 3902 - RNA, 23 nt, Artificial
  Chemically synthesized
aaaagcuagggcacacuguucaa

SEQ ID NO: 3903 - RNA, 23 nt, Artificial
  Chemically synthesized
aaagcuagggcacacuguucaac

SEQ ID NO: 3904 - RNA, 23 nt, Artificial
  Chemically synthesized
gucuuuaaggaagaagaagaaga

SEQ ID NO: 3905 - RNA, 23 nt, Artificial
  Chemically synthesized
ucuuuaaggaagaagaagaagaa

SEQ ID NO: 3906 - RNA, 23 nt, Artificial
  Chemically synthesized
cuuuaaggaagaagaagaagaag

SEQ ID NO: 3907 - RNA, 23 nt, Artificial
  Chemically synthesized
uuuaaggaagaagaagaagaaga

SEQ ID NO: 3908 - RNA, 23 nt, Artificial
  Chemically synthesized
uuaaggaagaagaagaagaagaa

SEQ ID NO: 3909 - RNA, 23 nt, Artificial
  Chemically synthesized
cuaaaagagugcaaauguuuccc

SEQ ID NO: 3910 - RNA, 23 nt, Artificial
  Chemically synthesized
uaaaagagugcaaauguuuccca

SEQ ID NO: 3911 - RNA, 23 nt, Artificial
  Chemically synthesized
aaaagagugcaaauguuucccag

SEQ ID NO: 3912 - RNA, 23 nt, Artificial
  Chemically synthesized
aaagagugcaaauguuucccagc

SEQ ID NO: 3913 - RNA, 23 nt, Artificial
  Chemically synthesized
aagagugcaaauguuucccagca

SEQ ID NO: 3914 - RNA, 23 nt, Artificial
  Chemically synthesized
gaaauuuggguacgaguugccuu

SEQ ID NO: 3915 - RNA, 23 nt, Artificial
  Chemically synthesized
aaucuagggugaggaauacaaag

SEQ ID NO: 3916 - RNA, 23 nt, Artificial
  Chemically synthesized
aucuagggugaggaauacaaaga

SEQ ID NO: 3917 - RNA, 23 nt, Artificial
  Chemically synthesized
ucuagggugaggaauacaaagaa

SEQ ID NO: 3918 - RNA, 23 nt, Artificial
  Chemically synthesized
cuagggugaggaauacaaagaaa

SEQ ID NO: 3919 - RNA, 23 nt, Artificial
  Chemically synthesized
uagggugaggaauacaaagaaac

SEQ ID NO: 3920 - RNA, 23 nt, Artificial
  Chemically synthesized
aaguuucacggagagaacaaaag

SEQ ID NO: 3921 - RNA, 23 nt, Artificial
  Chemically synthesized
aguuucacggagagaacaaaagg

SEQ ID NO: 3922 - RNA, 23 nt, Artificial
  Chemically synthesized
guuucacggagagaacaaaaggu

SEQ ID NO: 3923 - RNA, 23 nt, Artificial
  Chemically synthesized
uuucacggagagaacaaaagguu

SEQ ID NO: 3924 - RNA, 23 nt, Artificial
  Chemically synthesized
uucacggagagaacaaaagguuu

SEQ ID NO: 3925 - RNA, 23 nt, Artificial
  Chemically synthesized
ucgcucucguucagaagucucca

SEQ ID NO: 3926 - RNA, 23 nt, Artificial
  Chemically synthesized
cgcucucguucagaagucuccag

SEQ ID NO: 3927 - RNA, 23 nt, Artificial
  Chemically synthesized
gcucucguucagaagucuccaga

SEQ ID NO: 3928 - RNA, 23 nt, Artificial
  Chemically synthesized
cucucguucagaagucuccagag

SEQ ID NO: 3929 - RNA, 23 nt, Artificial
  Chemically synthesized
ucucguucagaagucuccagagc

SEQ ID NO: 3930 - RNA, 23 nt, Artificial
  Chemically synthesized
agagaagauguagagaaauaugg

SEQ ID NO: 3931 - RNA, 23 nt, Artificial
  Chemically synthesized
gagaagauguagagaaauaugga

SEQ ID NO: 3932 - RNA, 23 nt, Artificial
  Chemically synthesized
agaagauguagagaaauauggau

SEQ ID NO: 3933 - RNA, 23 nt, Artificial
  Chemically synthesized
gcacacugaucacacgauucucc

SEQ ID NO: 3934 - RNA, 23 nt, Artificial
  Chemically synthesized
cacacugaucacacgauucucca

SEQ ID NO: 3935 - RNA, 23 nt, Artificial
  Chemically synthesized
acacugaucacacgauucuccau

SEQ ID NO: 3936 - RNA, 23 nt, Artificial
  Chemically synthesized
cacugaucacacgauucuccauc

SEQ ID NO: 3937 - RNA, 23 nt, Artificial
  Chemically synthesized
acugaucacacgauucuccauca

SEQ ID NO: 3938 - RNA, 23 nt, Artificial
  Chemically synthesized
cgccugcugcuuggacauccaca

SEQ ID NO: 3939 - RNA, 23 nt, Artificial
  Chemically synthesized
gccugcugcuuggacauccacac

SEQ ID NO: 3940 - RNA, 23 nt, Artificial
  Chemically synthesized
ccugcugcuuggacauccacacg

SEQ ID NO: 3941 - RNA, 23 nt, Artificial
  Chemically synthesized
cugcugcuuggacauccacacgu

SEQ ID NO: 3942 - RNA, 23 nt, Artificial
  Chemically synthesized
ugcugcuuggacauccacacgug

SEQ ID NO: 3943 - RNA, 23 nt, Artificial
  Chemically synthesized
uggaaauuuggguacgaguugcc

SEQ ID NO: 3944 - RNA, 23 nt, Artificial
  Chemically synthesized
aaauaauuuuagcaaguggaaug

SEQ ID NO: 3945 - RNA, 23 nt, Artificial
  Chemically synthesized
aauaauuuuagcaaguggaaugu

SEQ ID NO: 3946 - RNA, 23 nt, Artificial
  Chemically synthesized
auaauuuuagcaaguggaauguc

SEQ ID NO: 3947 - RNA, 23 nt, Artificial
  Chemically synthesized
uaccaaaugcuucucuagacuau

SEQ ID NO: 3948 - RNA, 23 nt, Artificial
  Chemically synthesized
aauaauuacaaaguccaaacagg

SEQ ID NO: 3949 - RNA, 23 nt, Artificial
  Chemically synthesized
gggguugaaacuggcgagucucc

SEQ ID NO: 3950 - RNA, 23 nt, Artificial
  Chemically synthesized
ggguugaaacuggcgagucuccg

SEQ ID NO: 3951 - RNA, 23 nt, Artificial
  Chemically synthesized
gguugaaacuggcgagucuccgc

SEQ ID NO: 3952 - RNA, 23 nt, Artificial
  Chemically synthesized
guugaaacuggcgagucuccgcg

SEQ ID NO: 3953 - RNA, 23 nt, Artificial
  Chemically synthesized
uugaaacuggcgagucuccgcgc

SEQ ID NO: 3954 - RNA, 23 nt, Artificial
  Chemically synthesized
acauaauuuaacaacagaugacc

SEQ ID NO: 3955 - RNA, 23 nt, Artificial
  Chemically synthesized
cauaauuuaacaacagaugacca

SEQ ID NO: 3956 - RNA, 23 nt, Artificial
  Chemically synthesized
auaauuuaacaacagaugaccau

SEQ ID NO: 3957 - RNA, 23 nt, Artificial
  Chemically synthesized
uaauuuaacaacagaugaccaua

SEQ ID NO: 3958 - RNA, 23 nt, Artificial
  Chemically synthesized
aauuuaacaacagaugaccauac

SEQ ID NO: 3959 - RNA, 23 nt, Artificial
  Chemically synthesized
aagacugcagugaacaagcaaag

SEQ ID NO: 3960 - RNA, 23 nt, Artificial
  Chemically synthesized
cucguugacaucgaaggucucga

SEQ ID NO: 3961 - RNA, 23 nt, Artificial
  Chemically synthesized
ucguugacaucgaaggucucgau

SEQ ID NO: 3962 - RNA, 23 nt, Artificial
  Chemically synthesized
cguugacaucgaaggucucgaug

SEQ ID NO: 3963 - RNA, 23 nt, Artificial
  Chemically synthesized
guugacaucgaaggucucgaugu

SEQ ID NO: 3964 - RNA, 23 nt, Artificial
  Chemically synthesized
uugacaucgaaggucucgauguu

SEQ ID NO: 3965 - RNA, 23 nt, Artificial
  Chemically synthesized
auccucaaacucucuagccacag

SEQ ID NO: 3966 - RNA, 23 nt, Artificial
  Chemically synthesized
uccucaaacucucuagccacagc

SEQ ID NO: 3967 - RNA, 23 nt, Artificial
  Chemically synthesized
ccucaaacucucuagccacagca

SEQ ID NO: 3968 - RNA, 23 nt, Artificial
  Chemically synthesized
cucaaacucucuagccacagcag

SEQ ID NO: 3969 - RNA, 23 nt, Artificial
  Chemically synthesized
ucaaacucucuagccacagcagu

SEQ ID NO: 3970 - RNA, 23 nt, Artificial
  Chemically synthesized
uuagcacacugaucacacgauuc

SEQ ID NO: 3971 - RNA, 23 nt, Artificial
  Chemically synthesized
uagcacacugaucacacgauucu

SEQ ID NO: 3972 - RNA, 23 nt, Artificial
  Chemically synthesized
uuaaggucugucagugggcugau

SEQ ID NO: 3973 - RNA, 23 nt, Artificial
  Chemically synthesized
uggcugcugaaacauucccagaa

SEQ ID NO: 3974 - RNA, 23 nt, Artificial
  Chemically synthesized
ccaaagggaauucugguuggucc

SEQ ID NO: 3975 - RNA, 23 nt, Artificial
  Chemically synthesized
caaagggaauucugguugguccu

SEQ ID NO: 3976 - RNA, 23 nt, Artificial
  Chemically synthesized
aaagggaauucugguugguccuc

SEQ ID NO: 3977 - RNA, 23 nt, Artificial
  Chemically synthesized
aagggaauucugguugguccucu

SEQ ID NO: 3978 - RNA, 23 nt, Artificial
  Chemically synthesized
agggaauucugguugguccucuc

SEQ ID NO: 3979 - RNA, 23 nt, Artificial
  Chemically synthesized
ggaguucugguggucgguguagu

SEQ ID NO: 3980 - RNA, 23 nt, Artificial
  Chemically synthesized
gaguucugguggucgguguaguc

SEQ ID NO: 3981 - RNA, 23 nt, Artificial
  Chemically synthesized
aguucugguggucgguguagucg

SEQ ID NO: 3982 - RNA, 23 nt, Artificial
  Chemically synthesized
guucugguggucgguguagucgu

SEQ ID NO: 3983 - RNA, 23 nt, Artificial
  Chemically synthesized
uucugguggucgguguagucgua

SEQ ID NO: 3984 - RNA, 23 nt, Artificial
  Chemically synthesized
ugucuugaagguuaacugcuggu

SEQ ID NO: 3985 - RNA, 23 nt, Artificial
  Chemically synthesized
guggaaugucuugaagguuaacu

SEQ ID NO: 3986 - RNA, 23 nt, Artificial
  Chemically synthesized
gaaaaaagggauggacaaaaagg

SEQ ID NO: 3987 - RNA, 23 nt, Artificial
  Chemically synthesized
aaaaaagggauggacaaaaaggc

SEQ ID NO: 3988 - RNA, 23 nt, Artificial
  Chemically synthesized
aaaaagggauggacaaaaaggca

SEQ ID NO: 3989 - RNA, 23 nt, Artificial
  Chemically synthesized
aaaagggauggacaaaaaggcau

SEQ ID NO: 3990 - RNA, 23 nt, Artificial
  Chemically synthesized
aaagggauggacaaaaaggcauu

SEQ ID NO: 3991 - RNA, 23 nt, Artificial
  Chemically synthesized
auuuaacaacagaugaccauacc

SEQ ID NO: 3992 - RNA, 23 nt, Artificial
  Chemically synthesized
uuuaacaacagaugaccauaccc

SEQ ID NO: 3993 - RNA, 23 nt, Artificial
  Chemically synthesized
uuaacaacagaugaccauacccu

SEQ ID NO: 3994 - RNA, 23 nt, Artificial
  Chemically synthesized
cuccucaaggucgagugagcugu

SEQ ID NO: 3995 - RNA, 23 nt, Artificial
  Chemically synthesized
uccucaaggucgagugagcugug

SEQ ID NO: 3996 - RNA, 23 nt, Artificial
  Chemically synthesized
ccucaaggucgagugagcugugu

SEQ ID NO: 3997 - RNA, 23 nt, Artificial
  Chemically synthesized
cucaaggucgagugagcugugug

SEQ ID NO: 3998 - RNA, 23 nt, Artificial
  Chemically synthesized
ucaaggucgagugagcugugugu

SEQ ID NO: 3999 - RNA, 23 nt, Artificial
  Chemically synthesized
cacuaaaagagugcaaauguuuc

SEQ ID NO: 4000 - RNA, 23 nt, Artificial
  Chemically synthesized
acuaaaagagugcaaauguuucc

SEQ ID NO: 4001 - RNA, 23 nt, Artificial
  Chemically synthesized
auacucugguugcaagaaaagcu

SEQ ID NO: 4002 - RNA, 23 nt, Artificial
  Chemically synthesized
uacucugguugcaagaaaagcua

SEQ ID NO: 4003 - RNA, 23 nt, Artificial
  Chemically synthesized
acucugguugcaagaaaagcuag

SEQ ID NO: 4004 - RNA, 23 nt, Artificial
  Chemically synthesized
cucugguugcaagaaaagcuagg

SEQ ID NO: 4005 - RNA, 23 nt, Artificial
  Chemically synthesized
ucugguugcaagaaaagcuaggg

SEQ ID NO: 4006 - RNA, 23 nt, Artificial
  Chemically synthesized
ugguccucucuuucuucgguuau

SEQ ID NO: 4007 - RNA, 23 nt, Artificial
  Chemically synthesized
uaacaacagaugaccauacccuu

SEQ ID NO: 4008 - RNA, 23 nt, Artificial
  Chemically synthesized
caaaucuagggugaggaauacaa

SEQ ID NO: 4009 - RNA, 23 nt, Artificial
  Chemically synthesized
aaaucuagggugaggaauacaaa

SEQ ID NO: 4010 - RNA, 23 nt, Artificial
  Chemically synthesized
uuuaaggcucaagguguuuuucu

SEQ ID NO: 4011 - RNA, 23 nt, Artificial
  Chemically synthesized
uuaaggcucaagguguuuuucuc

SEQ ID NO: 4012 - RNA, 23 nt, Artificial
  Chemically synthesized
uaaggcucaagguguuuuucucu

SEQ ID NO: 4013 - RNA, 23 nt, Artificial
  Chemically synthesized
aaggcucaagguguuuuucucuu

SEQ ID NO: 4014 - RNA, 23 nt, Artificial
  Chemically synthesized
aaugaaucauacacaguacauac

SEQ ID NO: 4015 - RNA, 23 nt, Artificial
  Chemically synthesized
augaaucauacacaguacauacu

SEQ ID NO: 4016 - RNA, 23 nt, Artificial
  Chemically synthesized
ugaaucauacacaguacauacua

SEQ ID NO: 4017 - RNA, 23 nt, Artificial
  Chemically synthesized
gaaucauacacaguacauacuaa

SEQ ID NO: 4018 - RNA, 23 nt, Artificial
  Chemically synthesized
aaucauacacaguacauacuaaa

SEQ ID NO: 4019 - RNA, 23 nt, Artificial
  Chemically synthesized
uggguaaugcgcuuggauagguc

SEQ ID NO: 4020 - RNA, 23 nt, Artificial
  Chemically synthesized
ggguaaugcgcuuggauagguca

SEQ ID NO: 4021 - RNA, 23 nt, Artificial
  Chemically synthesized
gguaaugcgcuuggauaggucau

SEQ ID NO: 4022 - RNA, 23 nt, Artificial
  Chemically synthesized
guaaugcgcuuggauaggucaug

SEQ ID NO: 4023 - RNA, 23 nt, Artificial
  Chemically synthesized
uaaugcgcuuggauaggucaugu

SEQ ID NO: 4024 - RNA, 23 nt, Artificial
  Chemically synthesized
ucacggagagaacaaaagguuug

SEQ ID NO: 4025 - RNA, 23 nt, Artificial
  Chemically synthesized
cuccuccugcaaagaaaaguuuc

SEQ ID NO: 4026 - RNA, 23 nt, Artificial
  Chemically synthesized
uccuccugcaaagaaaaguuucc

SEQ ID NO: 4027 - RNA, 23 nt, Artificial
  Chemically synthesized
ccuccugcaaagaaaaguuuccg

SEQ ID NO: 4028 - RNA, 23 nt, Artificial
  Chemically synthesized
gggcacuuauuggcugcugaaac

SEQ ID NO: 4029 - RNA, 23 nt, Artificial
  Chemically synthesized
ggcacuuauuggcugcugaaaca

SEQ ID NO: 4030 - RNA, 23 nt, Artificial
  Chemically synthesized
gcacuuauuggcugcugaaacau

SEQ ID NO: 4031 - RNA, 23 nt, Artificial
  Chemically synthesized
cacuuauuggcugcugaaacauu

SEQ ID NO: 4032 - RNA, 23 nt, Artificial
  Chemically synthesized
ucaucuccuuugcuugccuuuua

SEQ ID NO: 4033 - RNA, 23 nt, Artificial
  Chemically synthesized
caucuccuuugcuugccuuuuac

SEQ ID NO: 4034 - RNA, 23 nt, Artificial
  Chemically synthesized
aucuccuuugcuugccuuuuacc

SEQ ID NO: 4035 - RNA, 23 nt, Artificial
  Chemically synthesized
ucuccuuugcuugccuuuuaccu

SEQ ID NO: 4036 - RNA, 23 nt, Artificial
  Chemically synthesized
uuauacaaaucuagggugaggaa

SEQ ID NO: 4037 - RNA, 23 nt, Artificial
  Chemically synthesized
uauacaaaucuagggugaggaau

SEQ ID NO: 4038 - RNA, 23 nt, Artificial
  Chemically synthesized
auacaaaucuagggugaggaaua

SEQ ID NO: 4039 - RNA, 23 nt, Artificial
  Chemically synthesized
uacaaaucuagggugaggaauac

SEQ ID NO: 4040 - RNA, 23 nt, Artificial
  Chemically synthesized
gacaucgaaggucucgauguugg

SEQ ID NO: 4041 - RNA, 23 nt, Artificial
  Chemically synthesized
acaucgaaggucucgauguugga

SEQ ID NO: 4042 - RNA, 23 nt, Artificial
  Chemically synthesized
caucgaaggucucgauguuggag

SEQ ID NO: 4043 - RNA, 23 nt, Artificial
  Chemically synthesized
aucgaaggucucgauguuggaga

SEQ ID NO: 4044 - RNA, 23 nt, Artificial
  Chemically synthesized
ucgaaggucucgauguuggagau

SEQ ID NO: 4045 - RNA, 23 nt, Artificial
  Chemically synthesized
agcaauccucaaacucucuagcc

SEQ ID NO: 4046 - RNA, 23 nt, Artificial
  Chemically synthesized
gcaauccucaaacucucuagcca

SEQ ID NO: 4047 - RNA, 23 nt, Artificial
  Chemically synthesized
caauccucaaacucucuagccac

SEQ ID NO: 4048 - RNA, 23 nt, Artificial
  Chemically synthesized
aauccucaaacucucuagccaca

SEQ ID NO: 4049 - RNA, 23 nt, Artificial
  Chemically synthesized
aagggauggacaaaaaggcauuu

SEQ ID NO: 4050 - RNA, 23 nt, Artificial
  Chemically synthesized
caaaucuguacaaaaauacucug

SEQ ID NO: 4051 - RNA, 23 nt, Artificial
  Chemically synthesized
aaaucuguacaaaaauacucugg

SEQ ID NO: 4052 - RNA, 23 nt, Artificial
  Chemically synthesized
aaucuguacaaaaauacucuggu

SEQ ID NO: 4053 - RNA, 23 nt, Artificial
  Chemically synthesized
aucuguacaaaaauacucugguu

SEQ ID NO: 4054 - RNA, 23 nt, Artificial
  Chemically synthesized
gggaauucugguugguccucucu

SEQ ID NO: 4055 - RNA, 23 nt, Artificial
  Chemically synthesized
gccuuuuaccucuuucuuaagac

SEQ ID NO: 4056 - RNA, 23 nt, Artificial
  Chemically synthesized
ccuuuuaccucuuucuuaagacu

SEQ ID NO: 4057 - RNA, 23 nt, Artificial
  Chemically synthesized
gcagguacuggucaaacucguug

SEQ ID NO: 4058 - RNA, 23 nt, Artificial
  Chemically synthesized
cagguacuggucaaacucguuga

SEQ ID NO: 4059 - RNA, 23 nt, Artificial
  Chemically synthesized
agguacuggucaaacucguugac

SEQ ID NO: 4060 - RNA, 23 nt, Artificial
  Chemically synthesized
gguacuggucaaacucguugaca

SEQ ID NO: 4061 - RNA, 23 nt, Artificial
  Chemically synthesized
guacuggucaaacucguugacau

SEQ ID NO: 4062 - RNA, 23 nt, Artificial
  Chemically synthesized
uccauuuagccaagguuggccug

SEQ ID NO: 4063 - RNA, 23 nt, Artificial
  Chemically synthesized
ccauuuagccaagguuggccugg

SEQ ID NO: 4064 - RNA, 23 nt, Artificial
  Chemically synthesized
cauuuagccaagguuggccuggc

SEQ ID NO: 4065 - RNA, 23 nt, Artificial
  Chemically synthesized
auuuagccaagguuggccuggcc

SEQ ID NO: 4066 - RNA, 23 nt, Artificial
  Chemically synthesized
uuuagccaagguuggccuggcca

SEQ ID NO: 4067 - RNA, 23 nt, Artificial
  Chemically synthesized
gcugcuuggacauccacacgugg

SEQ ID NO: 4068 - RNA, 23 nt, Artificial
  Chemically synthesized
cugcuuggacauccacacguggc

SEQ ID NO: 4069 - RNA, 23 nt, Artificial
  Chemically synthesized
ugcuuggacauccacacguggcc

SEQ ID NO: 4070 - RNA, 23 nt, Artificial
  Chemically synthesized
aagguuaacugcugguguucuga

SEQ ID NO: 4071 - RNA, 23 nt, Artificial
  Chemically synthesized
agguuaacugcugguguucugag

SEQ ID NO: 4072 - RNA, 23 nt, Artificial
  Chemically synthesized
gguuaacugcugguguucugaga

SEQ ID NO: 4073 - RNA, 23 nt, Artificial
  Chemically synthesized
guuaacugcugguguucugagag

SEQ ID NO: 4074 - RNA, 23 nt, Artificial
  Chemically synthesized
uuaacugcugguguucugagagg

SEQ ID NO: 4075 - RNA, 23 nt, Artificial
  Chemically synthesized
acugaucacauaacacaauucug

SEQ ID NO: 4076 - RNA, 23 nt, Artificial
  Chemically synthesized
uagcaaguggaaugucuugaagg

SEQ ID NO: 4077 - RNA, 23 nt, Artificial
  Chemically synthesized
agcaaguggaaugucuugaaggu

SEQ ID NO: 4078 - RNA, 23 nt, Artificial
  Chemically synthesized
gcaaguggaaugucuugaagguu

SEQ ID NO: 4079 - RNA, 23 nt, Artificial
  Chemically synthesized
caaguggaaugucuugaagguua

SEQ ID NO: 4080 - RNA, 23 nt, Artificial
  Chemically synthesized
aaguggaaugucuugaagguuaa

SEQ ID NO: 4081 - RNA, 23 nt, Artificial
  Chemically synthesized
uaauugcaaaauaaggccuuuau

SEQ ID NO: 4082 - RNA, 23 nt, Artificial
  Chemically synthesized
aauugcaaaauaaggccuuuauu

SEQ ID NO: 4083 - RNA, 23 nt, Artificial
  Chemically synthesized
auugcaaaauaaggccuuuauuu

SEQ ID NO: 4084 - RNA, 23 nt, Artificial
  Chemically synthesized
uugcaaaauaaggccuuuauuuu

SEQ ID NO: 4085 - RNA, 23 nt, Artificial
  Chemically synthesized
ucuacugacuucuaaaacuguua

SEQ ID NO: 4086 - RNA, 23 nt, Artificial
  Chemically synthesized
uccccucaaaaugguaaugaauc

SEQ ID NO: 4087 - RNA, 23 nt, Artificial
  Chemically synthesized
ccccucaaaaugguaaugaauca

SEQ ID NO: 4088 - RNA, 23 nt, Artificial
  Chemically synthesized
cccucaaaaugguaaugaaucau

SEQ ID NO: 4089 - RNA, 23 nt, Artificial
  Chemically synthesized
ccucaaaaugguaaugaaucaua

SEQ ID NO: 4090 - RNA, 23 nt, Artificial
  Chemically synthesized
cucaaaaugguaaugaaucauac

SEQ ID NO: 4091 - RNA, 23 nt, Artificial
  Chemically synthesized
gucuugaagguuaacugcuggug

SEQ ID NO: 4092 - RNA, 23 nt, Artificial
  Chemically synthesized
ucuugaagguuaacugcuggugu

SEQ ID NO: 4093 - RNA, 23 nt, Artificial
  Chemically synthesized
cuugaagguuaacugcugguguu

SEQ ID NO: 4094 - RNA, 23 nt, Artificial
  Chemically synthesized
uugaagguuaacugcugguguuc

SEQ ID NO: 4095 - RNA, 23 nt, Artificial
  Chemically synthesized
uguagagaaauauggaugacaca

SEQ ID NO: 4096 - RNA, 23 nt, Artificial
  Chemically synthesized
guagagaaauauggaugacacau

SEQ ID NO: 4097 - RNA, 23 nt, Artificial
  Chemically synthesized
uagagaaauauggaugacacaug

SEQ ID NO: 4098 - RNA, 23 nt, Artificial
  Chemically synthesized
cucgcucucguucagaagucucc

SEQ ID NO: 4099 - RNA, 23 nt, Artificial
  Chemically synthesized
guacuuguaauccgggugguccu

SEQ ID NO: 4100 - RNA, 23 nt, Artificial
  Chemically synthesized
uacuuguaauccgggugguccuu

SEQ ID NO: 4101 - RNA, 23 nt, Artificial
  Chemically synthesized
acuuguaauccgggugguccuuc

SEQ ID NO: 4102 - RNA, 23 nt, Artificial
  Chemically synthesized
cuuguaauccgggugguccuucu

SEQ ID NO: 4103 - RNA, 23 nt, Artificial
  Chemically synthesized
uuguaauccgggugguccuucuu

SEQ ID NO: 4104 - RNA, 23 nt, Artificial
  Chemically synthesized
uaaaaagcaauccucaaacucuc

SEQ ID NO: 4105 - RNA, 23 nt, Artificial
  Chemically synthesized
aaaaagcaauccucaaacucucu

SEQ ID NO: 4106 - RNA, 23 nt, Artificial
  Chemically synthesized
aaaagcaauccucaaacucucua

SEQ ID NO: 4107 - RNA, 23 nt, Artificial
  Chemically synthesized
aaagcaauccucaaacucucuag

SEQ ID NO: 4108 - RNA, 23 nt, Artificial
  Chemically synthesized
aagcaauccucaaacucucuagc

SEQ ID NO: 4109 - RNA, 23 nt, Artificial
  Chemically synthesized
aagaaaagcuagggcacacuguu

SEQ ID NO: 4110 - RNA, 23 nt, Artificial
  Chemically synthesized
guuuuaaggcucaagguguuuuu

SEQ ID NO: 4111 - RNA, 23 nt, Artificial
  Chemically synthesized
uuuuaaggcucaagguguuuuuc

SEQ ID NO: 4112 - RNA, 23 nt, Artificial
  Chemically synthesized
aaaaugguaaugaaucauacaca

SEQ ID NO: 4113 - RNA, 23 nt, Artificial
  Chemically synthesized
aaaugguaaugaaucauacacag

SEQ ID NO: 4114 - RNA, 23 nt, Artificial
  Chemically synthesized
aaugguaaugaaucauacacagu

SEQ ID NO: 4115 - RNA, 23 nt, Artificial
  Chemically synthesized
augguaaugaaucauacacagua

SEQ ID NO: 4116 - RNA, 23 nt, Artificial
  Chemically synthesized
ugguaaugaaucauacacaguac

SEQ ID NO: 4117 - RNA, 23 nt, Artificial
  Chemically synthesized
uuuauacagaaauugaaggaugc

SEQ ID NO: 4118 - RNA, 23 nt, Artificial
  Chemically synthesized
uuauacagaaauugaaggaugcc

SEQ ID NO: 4119 - RNA, 23 nt, Artificial
  Chemically synthesized
uauacagaaauugaaggaugcca

SEQ ID NO: 4120 - RNA, 23 nt, Artificial
  Chemically synthesized
auacagaaauugaaggaugccau

SEQ ID NO: 4121 - RNA, 23 nt, Artificial
  Chemically synthesized
uacagaaauugaaggaugccaua

SEQ ID NO: 4122 - RNA, 23 nt, Artificial
  Chemically synthesized
caagaaaagcuagggcacacugu

SEQ ID NO: 4123 - RNA, 23 nt, Artificial
  Chemically synthesized
ugucuuuaaggaagaagaagaag

SEQ ID NO: 4124 - RNA, 23 nt, Artificial
  Chemically synthesized
cagcuccuccuuaaaucgcaaag

SEQ ID NO: 4125 - RNA, 23 nt, Artificial
  Chemically synthesized
agcuccuccuuaaaucgcaaagc

SEQ ID NO: 4126 - RNA, 23 nt, Artificial
  Chemically synthesized
gcuccuccuuaaaucgcaaagcc

SEQ ID NO: 4127 - RNA, 23 nt, Artificial
  Chemically synthesized
cuccuccuuaaaucgcaaagccu

SEQ ID NO: 4128 - RNA, 23 nt, Artificial
  Chemically synthesized
uccuccuuaaaucgcaaagccug

SEQ ID NO: 4129 - RNA, 23 nt, Artificial
  Chemically synthesized
aguuuagcuguuggaaaaauaag

SEQ ID NO: 4130 - RNA, 23 nt, Artificial
  Chemically synthesized
guuuagcuguuggaaaaauaaga

SEQ ID NO: 4131 - RNA, 23 nt, Artificial
  Chemically synthesized
uuuagcuguuggaaaaauaagag

SEQ ID NO: 4132 - RNA, 23 nt, Artificial
  Chemically synthesized
uuagcuguuggaaaaauaagagc

SEQ ID NO: 4133 - RNA, 23 nt, Artificial
  Chemically synthesized
uagcuguuggaaaaauaagagca

SEQ ID NO: 4134 - RNA, 23 nt, Artificial
  Chemically synthesized
uuuuaauuaaaaccucuccuuac

SEQ ID NO: 4135 - RNA, 23 nt, Artificial
  Chemically synthesized
uuuaauuaaaaccucuccuuaca

SEQ ID NO: 4136 - RNA, 23 nt, Artificial
  Chemically synthesized
uuaauuaaaaccucuccuuacaa

SEQ ID NO: 4137 - RNA, 23 nt, Artificial
  Chemically synthesized
uaauuaaaaccucuccuuacaaa

SEQ ID NO: 4138 - RNA, 23 nt, Artificial
  Chemically synthesized
aauuaaaaccucuccuuacaaaa

SEQ ID NO: 4139 - RNA, 23 nt, Artificial
  Chemically synthesized
cuucucuagacuauuguuuacuc

SEQ ID NO: 4140 - RNA, 23 nt, Artificial
  Chemically synthesized
uucucuagacuauuguuuacucc

SEQ ID NO: 4141 - RNA, 23 nt, Artificial
  Chemically synthesized
acgaguugccuuuagcuuaaaug

SEQ ID NO: 4142 - RNA, 23 nt, Artificial
  Chemically synthesized
uacacuacauuugcaaucucuca

SEQ ID NO: 4143 - RNA, 23 nt, Artificial
  Chemically synthesized
cgcuucucgcucucguucagaag

SEQ ID NO: 4144 - RNA, 23 nt, Artificial
  Chemically synthesized
gcuucucgcucucguucagaagu

SEQ ID NO: 4145 - RNA, 23 nt, Artificial
  Chemically synthesized
cuucucgcucucguucagaaguc

SEQ ID NO: 4146 - RNA, 23 nt, Artificial
  Chemically synthesized
uucucgcucucguucagaagucu

SEQ ID NO: 4147 - RNA, 23 nt, Artificial
  Chemically synthesized
ucucgcucucguucagaagucuc

SEQ ID NO: 4148 - RNA, 23 nt, Artificial
  Chemically synthesized
ugacucagugauacacuacauuu

SEQ ID NO: 4149 - RNA, 23 nt, Artificial
  Chemically synthesized
gacucagugauacacuacauuug

SEQ ID NO: 4150 - RNA, 23 nt, Artificial
  Chemically synthesized
acucagugauacacuacauuugc

SEQ ID NO: 4151 - RNA, 23 nt, Artificial
  Chemically synthesized
cucagugauacacuacauuugca

SEQ ID NO: 4152 - RNA, 23 nt, Artificial
  Chemically synthesized
ucagugauacacuacauuugcaa

SEQ ID NO: 4153 - RNA, 23 nt, Artificial
  Chemically synthesized
guccucucuuucuucgguuauuu

SEQ ID NO: 4154 - RNA, 23 nt, Artificial
  Chemically synthesized
uccucucuuucuucgguuauuuu

SEQ ID NO: 4155 - RNA, 23 nt, Artificial
  Chemically synthesized
ccucucuuucuucgguuauuuuu

SEQ ID NO: 4156 - RNA, 23 nt, Artificial
  Chemically synthesized
cucucuuucuucgguuauuuuua

SEQ ID NO: 4157 - RNA, 23 nt, Artificial
  Chemically synthesized
ucucuuucuucgguuauuuuuag

SEQ ID NO: 4158 - RNA, 23 nt, Artificial
  Chemically synthesized
agcuguuggaaaaauaagagcau

SEQ ID NO: 4159 - RNA, 23 nt, Artificial
  Chemically synthesized
gcuguuggaaaaauaagagcauu

SEQ ID NO: 4160 - RNA, 23 nt, Artificial
  Chemically synthesized
cuguuggaaaaauaagagcauuu

SEQ ID NO: 4161 - RNA, 23 nt, Artificial
  Chemically synthesized
uguuggaaaaauaagagcauuua

SEQ ID NO: 4162 - RNA, 23 nt, Artificial
  Chemically synthesized
cucccauaauugcaaaauaaggc

SEQ ID NO: 4163 - RNA, 23 nt, Artificial
  Chemically synthesized
gugucuuggaaauuuggguacga

SEQ ID NO: 4164 - RNA, 23 nt, Artificial
  Chemically synthesized
ggaaauuuggguacgaguugccu

SEQ ID NO: 4165 - RNA, 23 nt, Artificial
  Chemically synthesized
uuccucacagaggacuuuuuucu

SEQ ID NO: 4166 - RNA, 23 nt, Artificial
  Chemically synthesized
uccucacagaggacuuuuuucuu

SEQ ID NO: 4167 - RNA, 23 nt, Artificial
  Chemically synthesized
ccucacagaggacuuuuuucuuu

SEQ ID NO: 4168 - RNA, 23 nt, Artificial
  Chemically synthesized
cucacagaggacuuuuuucuuua

SEQ ID NO: 4169 - RNA, 23 nt, Artificial
  Chemically synthesized
ucacagaggacuuuuuucuuuaa

SEQ ID NO: 4170 - RNA, 23 nt, Artificial
  Chemically synthesized
aacaacagaugaccauacccuuu

SEQ ID NO: 4171 - RNA, 23 nt, Artificial
  Chemically synthesized
acaacagaugaccauacccuuug

SEQ ID NO: 4172 - RNA, 23 nt, Artificial
  Chemically synthesized
uacuggucaaacucguugacauc

SEQ ID NO: 4173 - RNA, 23 nt, Artificial
  Chemically synthesized
ccacugaaguuuccagucaguuu

SEQ ID NO: 4174 - RNA, 23 nt, Artificial
  Chemically synthesized
cacugaaguuuccagucaguuuc

SEQ ID NO: 4175 - RNA, 23 nt, Artificial
  Chemically synthesized
acugaaguuuccagucaguuucg

SEQ ID NO: 4176 - RNA, 23 nt, Artificial
  Chemically synthesized
cugaaguuuccagucaguuucga

SEQ ID NO: 4177 - RNA, 23 nt, Artificial
  Chemically synthesized
ugaaguuuccagucaguuucgag

SEQ ID NO: 4178 - RNA, 23 nt, Artificial
  Chemically synthesized
cagcaccguuuuaaggcucaagg

SEQ ID NO: 4179 - RNA, 23 nt, Artificial
  Chemically synthesized
agcaccguuuuaaggcucaaggu

SEQ ID NO: 4180 - RNA, 23 nt, Artificial
  Chemically synthesized
gcaccguuuuaaggcucaaggug

SEQ ID NO: 4181 - RNA, 23 nt, Artificial
  Chemically synthesized
caccguuuuaaggcucaaggugu

SEQ ID NO: 4182 - RNA, 23 nt, Artificial
  Chemically synthesized
accguuuuaaggcucaagguguu

SEQ ID NO: 4183 - RNA, 23 nt, Artificial
  Chemically synthesized
ugccuuuagcuuaaaugucuuua

SEQ ID NO: 4184 - RNA, 23 nt, Artificial
  Chemically synthesized
agcguccagucguagccuuugag

SEQ ID NO: 4185 - RNA, 23 nt, Artificial
  Chemically synthesized
gcguccagucguagccuuugagc

SEQ ID NO: 4186 - RNA, 23 nt, Artificial
  Chemically synthesized
cguccagucguagccuuugagca

SEQ ID NO: 4187 - RNA, 23 nt, Artificial
  Chemically synthesized
guccagucguagccuuugagcac

SEQ ID NO: 4188 - RNA, 23 nt, Artificial
  Chemically synthesized
uccagucguagccuuugagcacc

SEQ ID NO: 4189 - RNA, 23 nt, Artificial
  Chemically synthesized
auuaaaaccucuccuuacaaaau

SEQ ID NO: 4190 - RNA, 23 nt, Artificial
  Chemically synthesized
aaacauucccagaacagauuuca

SEQ ID NO: 4191 - RNA, 23 nt, Artificial
  Chemically synthesized
aacauucccagaacagauuucau

SEQ ID NO: 4192 - RNA, 23 nt, Artificial
  Chemically synthesized
ggcuguagugugggagguugaag

SEQ ID NO: 4193 - RNA, 23 nt, Artificial
  Chemically synthesized
ucauguaggugaagguggaguag

SEQ ID NO: 4194 - RNA, 23 nt, Artificial
  Chemically synthesized
cauguaggugaagguggaguaga

SEQ ID NO: 4195 - RNA, 23 nt, Artificial
  Chemically synthesized
auguaggugaagguggaguagag

SEQ ID NO: 4196 - RNA, 23 nt, Artificial
  Chemically synthesized
caaaaugguaaugaaucauacac

SEQ ID NO: 4197 - RNA, 23 nt, Artificial
  Chemically synthesized
ccuccuuaaaucgcaaagccuga

SEQ ID NO: 4198 - RNA, 23 nt, Artificial
  Chemically synthesized
aaugcgcuuggauaggucauguu

SEQ ID NO: 4199 - RNA, 23 nt, Artificial
  Chemically synthesized
augcgcuuggauaggucauguuu

SEQ ID NO: 4200 - RNA, 23 nt, Artificial
  Chemically synthesized
ugcgcuuggauaggucauguuug

SEQ ID NO: 4201 - RNA, 23 nt, Artificial
  Chemically synthesized
uuaaaaccucuccuuacaaaaua

SEQ ID NO: 4202 - RNA, 23 nt, Artificial
  Chemically synthesized
caaaugcuucucuagacuauugu

SEQ ID NO: 4203 - RNA, 23 nt, Artificial
  Chemically synthesized
aaaugcuucucuagacuauuguu

SEQ ID NO: 4204 - RNA, 23 nt, Artificial
  Chemically synthesized
aaugcuucucuagacuauuguuu

SEQ ID NO: 4205 - RNA, 23 nt, Artificial
  Chemically synthesized
augcuucucuagacuauuguuua

SEQ ID NO: 4206 - RNA, 23 nt, Artificial
  Chemically synthesized
ugcuucucuagacuauuguuuac

SEQ ID NO: 4207 - RNA, 23 nt, Artificial
  Chemically synthesized
aaaaaguccaguuucucguugau

SEQ ID NO: 4208 - RNA, 23 nt, Artificial
  Chemically synthesized
gucaaacucguugacaucgaagg

SEQ ID NO: 4209 - RNA, 23 nt, Artificial
  Chemically synthesized
ucaaacucguugacaucgaaggu

SEQ ID NO: 4210 - RNA, 23 nt, Artificial
  Chemically synthesized
caaacucguugacaucgaagguc

SEQ ID NO: 4211 - RNA, 23 nt, Artificial
  Chemically synthesized
aaacucguugacaucgaaggucu

SEQ ID NO: 4212 - RNA, 23 nt, Artificial
  Chemically synthesized
aacucguugacaucgaaggucuc

SEQ ID NO: 4213 - RNA, 23 nt, Artificial
  Chemically synthesized
ccccuucucuucuccuccugcaa

SEQ ID NO: 4214 - RNA, 23 nt, Artificial
  Chemically synthesized
cccuucucuucuccuccugcaaa

SEQ ID NO: 4215 - RNA, 23 nt, Artificial
  Chemically synthesized
ccuucucuucuccuccugcaaag

SEQ ID NO: 4216 - RNA, 23 nt, Artificial
  Chemically synthesized
cuucucuucuccuccugcaaaga

SEQ ID NO: 4217 - RNA, 23 nt, Artificial
  Chemically synthesized
uucucuucuccuccugcaaagaa

SEQ ID NO: 4218 - RNA, 23 nt, Artificial
  Chemically synthesized
cuccauuuagccaagguuggccu

SEQ ID NO: 4219 - RNA, 23 nt, Artificial
  Chemically synthesized
ccagucaguuucgagcuccgcuu

SEQ ID NO: 4220 - RNA, 23 nt, Artificial
  Chemically synthesized
cagucaguuucgagcuccgcuuu

SEQ ID NO: 4221 - RNA, 23 nt, Artificial
  Chemically synthesized
agucaguuucgagcuccgcuuuc

SEQ ID NO: 4222 - RNA, 23 nt, Artificial
  Chemically synthesized
gucaguuucgagcuccgcuuucg

SEQ ID NO: 4223 - RNA, 23 nt, Artificial
  Chemically synthesized
ucaguuucgagcuccgcuuucgg

SEQ ID NO: 4224 - RNA, 23 nt, Artificial
  Chemically synthesized
ccaaaugcuucucuagacuauug

SEQ ID NO: 4225 - RNA, 23 nt, Artificial
  Chemically synthesized
cguuuuaaggcucaagguguuuu

SEQ ID NO: 4226 - RNA, 23 nt, Artificial
  Chemically synthesized
ggugaggaauacaaagaaacuug

SEQ ID NO: 4227 - RNA, 23 nt, Artificial
  Chemically synthesized
gugaggaauacaaagaaacuugc

SEQ ID NO: 4228 - RNA, 23 nt, Artificial
  Chemically synthesized
ugaggaauacaaagaaacuugcu

SEQ ID NO: 4229 - RNA, 23 nt, Artificial
  Chemically synthesized
gaggaauacaaagaaacuugcuu

SEQ ID NO: 4230 - RNA, 23 nt, Artificial
  Chemically synthesized
aggaauacaaagaaacuugcuuu

SEQ ID NO: 4231 - RNA, 23 nt, Artificial
  Chemically synthesized
uauaugauaaagcuuaccaaaug

SEQ ID NO: 4232 - RNA, 23 nt, Artificial
  Chemically synthesized
auaugauaaagcuuaccaaaugc

SEQ ID NO: 4233 - RNA, 23 nt, Artificial
  Chemically synthesized
uaugauaaagcuuaccaaaugcu

SEQ ID NO: 4234 - RNA, 23 nt, Artificial
  Chemically synthesized
augauaaagcuuaccaaaugcuu

SEQ ID NO: 4235 - RNA, 23 nt, Artificial
  Chemically synthesized
ugauaaagcuuaccaaaugcuuc

SEQ ID NO: 4236 - RNA, 23 nt, Artificial
  Chemically synthesized
ugaagguuaacugcugguguucu

SEQ ID NO: 4237 - RNA, 23 nt, Artificial
  Chemically synthesized
cugcugaaacauucccagaacag

SEQ ID NO: 4238 - RNA, 23 nt, Artificial
  Chemically synthesized
ugcugaaacauucccagaacaga

SEQ ID NO: 4239 - RNA, 23 nt, Artificial
  Chemically synthesized
gcugaaacauucccagaacagau

SEQ ID NO: 4240 - RNA, 23 nt, Artificial
  Chemically synthesized
cugaaacauucccagaacagauu

SEQ ID NO: 4241 - RNA, 23 nt, Artificial
  Chemically synthesized
ugaaacauucccagaacagauuu

SEQ ID NO: 4242 - RNA, 23 nt, Artificial
  Chemically synthesized
uguaauccgggugguccuucuug

SEQ ID NO: 4243 - RNA, 23 nt, Artificial
  Chemically synthesized
guaauccgggugguccuucuugu

SEQ ID NO: 4244 - RNA, 23 nt, Artificial
  Chemically synthesized
uaauccgggugguccuucuugug

SEQ ID NO: 4245 - RNA, 23 nt, Artificial
  Chemically synthesized
uuuguaagagaaagcaaaucugu

SEQ ID NO: 4246 - RNA, 23 nt, Artificial
  Chemically synthesized
uuguaagagaaagcaaaucugua

SEQ ID NO: 4247 - RNA, 23 nt, Artificial
  Chemically synthesized
uguaagagaaagcaaaucuguac

SEQ ID NO: 4248 - RNA, 23 nt, Artificial
  Chemically synthesized
guaagagaaagcaaaucuguaca

SEQ ID NO: 4249 - RNA, 23 nt, Artificial
  Chemically synthesized
uaagagaaagcaaaucuguacaa

SEQ ID NO: 4250 - RNA, 23 nt, Artificial
  Chemically synthesized
ggucucgauguuggagaugacgu

SEQ ID NO: 4251 - RNA, 23 nt, Artificial
  Chemically synthesized
gucucgauguuggagaugacguc

SEQ ID NO: 4252 - RNA, 23 nt, Artificial
  Chemically synthesized
ucucgauguuggagaugacgucg

SEQ ID NO: 4253 - RNA, 23 nt, Artificial
  Chemically synthesized
cucgauguuggagaugacgucgc

SEQ ID NO: 4254 - RNA, 23 nt, Artificial
  Chemically synthesized
ucgauguuggagaugacgucgcu

SEQ ID NO: 4255 - RNA, 23 nt, Artificial
  Chemically synthesized
agaaacaaguuuccaguuuguuu

SEQ ID NO: 4256 - RNA, 23 nt, Artificial
  Chemically synthesized
gaaacaaguuuccaguuuguuuu

SEQ ID NO: 4257 - RNA, 23 nt, Artificial
  Chemically synthesized
aaacaaguuuccaguuuguuuuc

SEQ ID NO: 4258 - RNA, 23 nt, Artificial
  Chemically synthesized
aacaaguuuccaguuuguuuuca

SEQ ID NO: 4259 - RNA, 23 nt, Artificial
  Chemically synthesized
acaaguuuccaguuuguuuucaa

SEQ ID NO: 4260 - RNA, 23 nt, Artificial
  Chemically synthesized
ccguuuuaaggcucaagguguuu

SEQ ID NO: 4261 - RNA, 23 nt, Artificial
  Chemically synthesized
guuucuuaaguuacagaaguauc

SEQ ID NO: 4262 - RNA, 23 nt, Artificial
  Chemically synthesized
uuucuuaaguuacagaaguaucu

SEQ ID NO: 4263 - RNA, 23 nt, Artificial
  Chemically synthesized
uucuuaaguuacagaaguaucuu

SEQ ID NO: 4264 - RNA, 23 nt, Artificial
  Chemically synthesized
cuuaaguuacagaaguaucuuuu

SEQ ID NO: 4265 - RNA, 23 nt, Artificial
  Chemically synthesized
uucccagcagcaccguuuuaagg

SEQ ID NO: 4266 - RNA, 23 nt, Artificial
  Chemically synthesized
cuguucaacuaagaguaguuuag

SEQ ID NO: 4267 - RNA, 23 nt, Artificial
  Chemically synthesized
uguucaacuaagaguaguuuagc

SEQ ID NO: 4268 - RNA, 23 nt, Artificial
  Chemically synthesized
guucaacuaagaguaguuuagcu

SEQ ID NO: 4269 - RNA, 23 nt, Artificial
  Chemically synthesized
uucaacuaagaguaguuuagcug

SEQ ID NO: 4270 - RNA, 23 nt, Artificial
  Chemically synthesized
ucaacuaagaguaguuuagcugu

SEQ ID NO: 4271 - RNA, 23 nt, Artificial
  Chemically synthesized
ccagaacagauuucaucuccuuu

SEQ ID NO: 4272 - RNA, 23 nt, Artificial
  Chemically synthesized
ucugguugguccucucuuucuuc

SEQ ID NO: 4273 - RNA, 23 nt, Artificial
  Chemically synthesized
guccuccucgcucuccuucuuca

SEQ ID NO: 4274 - RNA, 23 nt, Artificial
  Chemically synthesized
uccuccucgcucuccuucuucag

SEQ ID NO: 4275 - RNA, 23 nt, Artificial
  Chemically synthesized
ccuccucgcucuccuucuucaga

SEQ ID NO: 4276 - RNA, 23 nt, Artificial
  Chemically synthesized
cuccucgcucuccuucuucagau

SEQ ID NO: 4277 - RNA, 23 nt, Artificial
  Chemically synthesized
uccucgcucuccuucuucagauc

SEQ ID NO: 4278 - RNA, 23 nt, Artificial
  Chemically synthesized
acaaaguccaaacaggcagagag

SEQ ID NO: 4279 - RNA, 23 nt, Artificial
  Chemically synthesized
caaaguccaaacaggcagagaga

SEQ ID NO: 4280 - RNA, 23 nt, Artificial
  Chemically synthesized
aaaguccaaacaggcagagagau

SEQ ID NO: 4281 - RNA, 23 nt, Artificial
  Chemically synthesized
aaguccaaacaggcagagagauu

SEQ ID NO: 4282 - RNA, 23 nt, Artificial
  Chemically synthesized
aguccaaacaggcagagagauuu

SEQ ID NO: 4283 - RNA, 23 nt, Artificial
  Chemically synthesized
cuucuccuccugcaaagaaaagu

SEQ ID NO: 4284 - RNA, 23 nt, Artificial
  Chemically synthesized
uucuccuccugcaaagaaaaguu

SEQ ID NO: 4285 - RNA, 23 nt, Artificial
  Chemically synthesized
ucuccuccugcaaagaaaaguuu

SEQ ID NO: 4286 - RNA, 23 nt, Artificial
  Chemically synthesized
cauuugcaaucucucauuuauac

SEQ ID NO: 4287 - RNA, 23 nt, Artificial
  Chemically synthesized
auuugcaaucucucauuuauaca

SEQ ID NO: 4288 - RNA, 23 nt, Artificial
  Chemically synthesized
uuugcaaucucucauuuauacaa

SEQ ID NO: 4289 - RNA, 23 nt, Artificial
  Chemically synthesized
uugcaaucucucauuuauacaaa

SEQ ID NO: 4290 - RNA, 23 nt, Artificial
  Chemically synthesized
ugcaaucucucauuuauacaaaa

SEQ ID NO: 4291 - RNA, 23 nt, Artificial
  Chemically synthesized
aguggaaugucuugaagguuaac

SEQ ID NO: 4292 - RNA, 23 nt, Artificial
  Chemically synthesized
uccaaacaggcagagagauuuag

SEQ ID NO: 4293 - RNA, 23 nt, Artificial
  Chemically synthesized
uuuuauacagaaauugaaggaug

SEQ ID NO: 4294 - RNA, 23 nt, Artificial
  Chemically synthesized
uaaaaagaucugcuuuuauacag

SEQ ID NO: 4295 - RNA, 23 nt, Artificial
  Chemically synthesized
aaaaagaucugcuuuuauacaga

SEQ ID NO: 4296 - RNA, 23 nt, Artificial
  Chemically synthesized
aaaagaucugcuuuuauacagaa

SEQ ID NO: 4297 - RNA, 23 nt, Artificial
  Chemically synthesized
aaagaucugcuuuuauacagaaa

SEQ ID NO: 4298 - RNA, 23 nt, Artificial
  Chemically synthesized
aagaucugcuuuuauacagaaau

SEQ ID NO: 4299 - RNA, 23 nt, Artificial
  Chemically synthesized
gcagaaaacacugcaaaugacuc

SEQ ID NO: 4300 - RNA, 23 nt, Artificial
  Chemically synthesized
cagaaaacacugcaaaugacuca

SEQ ID NO: 4301 - RNA, 23 nt, Artificial
  Chemically synthesized
agaaaacacugcaaaugacucag

SEQ ID NO: 4302 - RNA, 23 nt, Artificial
  Chemically synthesized
gaaaacacugcaaaugacucagu

SEQ ID NO: 4303 - RNA, 23 nt, Artificial
  Chemically synthesized
aaaacacugcaaaugacucagug

SEQ ID NO: 4304 - RNA, 23 nt, Artificial
  Chemically synthesized
accucuuucuuaagacugcagug

SEQ ID NO: 4305 - RNA, 23 nt, Artificial
  Chemically synthesized
uuuaaggcagcuccuccuuaaau

SEQ ID NO: 4306 - RNA, 23 nt, Artificial
  Chemically synthesized
aaggucgagugagcuguguguag

SEQ ID NO: 4307 - RNA, 23 nt, Artificial
  Chemically synthesized
aggucgagugagcuguguguaga

SEQ ID NO: 4308 - RNA, 23 nt, Artificial
  Chemically synthesized
ggucgagugagcuguguguagac

SEQ ID NO: 4309 - RNA, 23 nt, Artificial
  Chemically synthesized
gucgagugagcuguguguagacg

SEQ ID NO: 4310 - RNA, 23 nt, Artificial
  Chemically synthesized
ucgagugagcuguguguagacgg

SEQ ID NO: 4311 - RNA, 23 nt, Artificial
  Chemically synthesized
caaacaaaacacgaacacaaacc

SEQ ID NO: 4312 - RNA, 23 nt, Artificial
  Chemically synthesized
aaacaaaacacgaacacaaacca

SEQ ID NO: 4313 - RNA, 23 nt, Artificial
  Chemically synthesized
aacaaaacacgaacacaaaccaa

SEQ ID NO: 4314 - RNA, 23 nt, Artificial
  Chemically synthesized
acaaaacacgaacacaaaccaaa

SEQ ID NO: 4315 - RNA, 23 nt, Artificial
  Chemically synthesized
caaaacacgaacacaaaccaaag

SEQ ID NO: 4316 - RNA, 23 nt, Artificial
  Chemically synthesized
ugccuuuuaccucuuucuuaaga

SEQ ID NO: 4317 - RNA, 23 nt, Artificial
  Chemically synthesized
ccucgcucuccuucuucagaucg

SEQ ID NO: 4318 - RNA, 23 nt, Artificial
  Chemically synthesized
cucgcucuccuucuucagaucgg

SEQ ID NO: 4319 - RNA, 23 nt, Artificial
  Chemically synthesized
ucgcucuccuucuucagaucggg

SEQ ID NO: 4320 - RNA, 23 nt, Artificial
  Chemically synthesized
ucucuucuccuccugcaaagaaa

SEQ ID NO: 4321 - RNA, 23 nt, Artificial
  Chemically synthesized
cucuucuccuccugcaaagaaaa

SEQ ID NO: 4322 - RNA, 23 nt, Artificial
  Chemically synthesized
ucuucuccuccugcaaagaaaag

SEQ ID NO: 4323 - RNA, 23 nt, Artificial
  Chemically synthesized
uccaaagggaauucugguugguc

SEQ ID NO: 4324 - RNA, 23 nt, Artificial
  Chemically synthesized
uacaaaguccaaacaggcagaga

SEQ ID NO: 4325 - RNA, 23 nt, Artificial
  Chemically synthesized
cgauguuggagaugacgucgcug

SEQ ID NO: 4326 - RNA, 23 nt, Artificial
  Chemically synthesized
gauguuggagaugacgucgcugc

SEQ ID NO: 4327 - RNA, 23 nt, Artificial
  Chemically synthesized
auguuggagaugacgucgcugcu

SEQ ID NO: 4328 - RNA, 23 nt, Artificial
  Chemically synthesized
aggcagagagauuuagcacacug

SEQ ID NO: 4329 - RNA, 23 nt, Artificial
  Chemically synthesized
ggcagagagauuuagcacacuga

SEQ ID NO: 4330 - RNA, 23 nt, Artificial
  Chemically synthesized
gcagagagauuuagcacacugau

SEQ ID NO: 4331 - RNA, 23 nt, Artificial
  Chemically synthesized
cagagagauuuagcacacugauc

SEQ ID NO: 4332 - RNA, 23 nt, Artificial
  Chemically synthesized
agagagauuuagcacacugauca

SEQ ID NO: 4333 - RNA, 23 nt, Artificial
  Chemically synthesized
agccugaggaauuaagcaaaguu

SEQ ID NO: 4334 - RNA, 23 nt, Artificial
  Chemically synthesized
gccugaggaauuaagcaaaguua

SEQ ID NO: 4335 - RNA, 23 nt, Artificial
  Chemically synthesized
ccugaggaauuaagcaaaguuaa

SEQ ID NO: 4336 - RNA, 23 nt, Artificial
  Chemically synthesized
cugaggaauuaagcaaaguuaac

SEQ ID NO: 4337 - RNA, 23 nt, Artificial
  Chemically synthesized
ugaggaauuaagcaaaguuaacc

SEQ ID NO: 4338 - RNA, 23 nt, Artificial
  Chemically synthesized
aucauacacaguacauacuaaaa

SEQ ID NO: 4339 - RNA, 23 nt, Artificial
  Chemically synthesized
ucauacacaguacauacuaaaaa

SEQ ID NO: 4340 - RNA, 23 nt, Artificial
  Chemically synthesized
gcagugugcucgggcacuuauug

SEQ ID NO: 4341 - RNA, 23 nt, Artificial
  Chemically synthesized
cagugugcucgggcacuuauugg

SEQ ID NO: 4342 - RNA, 23 nt, Artificial
  Chemically synthesized
agugugcucgggcacuuauuggc

SEQ ID NO: 4343 - RNA, 23 nt, Artificial
  Chemically synthesized
gugugcucgggcacuuauuggcu

SEQ ID NO: 4344 - RNA, 23 nt, Artificial
  Chemically synthesized
ugugcucgggcacuuauuggcug

SEQ ID NO: 4345 - RNA, 23 nt, Artificial
  Chemically synthesized
uuaaggcagcuccuccuuaaauc

SEQ ID NO: 4346 - RNA, 23 nt, Artificial
  Chemically synthesized
gcgcuuggauaggucauguuugu

SEQ ID NO: 4347 - RNA, 23 nt, Artificial
  Chemically synthesized
cgcuuggauaggucauguuugug

SEQ ID NO: 4348 - RNA, 23 nt, Artificial
  Chemically synthesized
gcuuggauaggucauguuugugu

SEQ ID NO: 4349 - RNA, 23 nt, Artificial
  Chemically synthesized
cuuggauaggucauguuuguguc

SEQ ID NO: 4350 - RNA, 23 nt, Artificial
  Chemically synthesized
uuggauaggucauguuugugucu

SEQ ID NO: 4351 - RNA, 23 nt, Artificial
  Chemically synthesized
caagugaaacaaacaaaacacga

SEQ ID NO: 4352 - RNA, 23 nt, Artificial
  Chemically synthesized
aagugaaacaaacaaaacacgaa

SEQ ID NO: 4353 - RNA, 23 nt, Artificial
  Chemically synthesized
agugaaacaaacaaaacacgaac

SEQ ID NO: 4354 - RNA, 23 nt, Artificial
  Chemically synthesized
gugaaacaaacaaaacacgaaca

SEQ ID NO: 4355 - RNA, 23 nt, Artificial
  Chemically synthesized
ugaaacaaacaaaacacgaacac

SEQ ID NO: 4356 - RNA, 23 nt, Artificial
  Chemically synthesized
caacagaugaccauacccuuuga

SEQ ID NO: 4357 - RNA, 23 nt, Artificial
  Chemically synthesized
aacagaugaccauacccuuugag

SEQ ID NO: 4358 - RNA, 23 nt, Artificial
  Chemically synthesized
gaaacaaacaaaacacgaacaca

SEQ ID NO: 4359 - RNA, 23 nt, Artificial
  Chemically synthesized
aaacaaacaaaacacgaacacaa

SEQ ID NO: 4360 - RNA, 23 nt, Artificial
  Chemically synthesized
gaaggaugccauauuaugagugc

SEQ ID NO: 4361 - RNA, 23 nt, Artificial
  Chemically synthesized
aaggaugccauauuaugagugcu

SEQ ID NO: 4362 - RNA, 23 nt, Artificial
  Chemically synthesized
cccaaaacugaucacauaacaca

SEQ ID NO: 4363 - RNA, 23 nt, Artificial
  Chemically synthesized
ccaaaacugaucacauaacacaa

SEQ ID NO: 4364 - RNA, 23 nt, Artificial
  Chemically synthesized
caaaacugaucacauaacacaau

SEQ ID NO: 4365 - RNA, 23 nt, Artificial
  Chemically synthesized
aaaacugaucacauaacacaauu

SEQ ID NO: 4366 - RNA, 23 nt, Artificial
  Chemically synthesized
aaacugaucacauaacacaauuc

SEQ ID NO: 4367 - RNA, 23 nt, Artificial
  Chemically synthesized
aauauuccucacagaggacuuuu

SEQ ID NO: 4368 - RNA, 23 nt, Artificial
  Chemically synthesized
auauuccucacagaggacuuuuu

SEQ ID NO: 4369 - RNA, 23 nt, Artificial
  Chemically synthesized
uauuccucacagaggacuuuuuu

SEQ ID NO: 4370 - RNA, 23 nt, Artificial
  Chemically synthesized
auuccucacagaggacuuuuuuc

SEQ ID NO: 4371 - RNA, 23 nt, Artificial
  Chemically synthesized
aacaagugaaacaaacaaaacac

SEQ ID NO: 4372 - RNA, 23 nt, Artificial
  Chemically synthesized
acaagugaaacaaacaaaacacg

SEQ ID NO: 4373 - RNA, 23 nt, Artificial
  Chemically synthesized
uaacugcugguguucugagaggc

SEQ ID NO: 4374 - RNA, 23 nt, Artificial
  Chemically synthesized
aacugcugguguucugagaggca

SEQ ID NO: 4375 - RNA, 23 nt, Artificial
  Chemically synthesized
acugcugguguucugagaggcac

SEQ ID NO: 4376 - RNA, 23 nt, Artificial
  Chemically synthesized
agagugcaaauguuucccagcag

SEQ ID NO: 4377 - RNA, 23 nt, Artificial
  Chemically synthesized
gagugcaaauguuucccagcagc

SEQ ID NO: 4378 - RNA, 23 nt, Artificial
  Chemically synthesized
agugcaaauguuucccagcagca

SEQ ID NO: 4379 - RNA, 23 nt, Artificial
  Chemically synthesized
ggucaaacucguugacaucgaag

SEQ ID NO: 4380 - RNA, 23 nt, Artificial
  Chemically synthesized
aaaucgcaaagccugaggaauua

SEQ ID NO: 4381 - RNA, 23 nt, Artificial
  Chemically synthesized
aaucgcaaagccugaggaauuaa

SEQ ID NO: 4382 - RNA, 23 nt, Artificial
  Chemically synthesized
aucgcaaagccugaggaauuaag

SEQ ID NO: 4383 - RNA, 23 nt, Artificial
  Chemically synthesized
ucgcaaagccugaggaauuaagc

SEQ ID NO: 4384 - RNA, 23 nt, Artificial
  Chemically synthesized
uugaggaaagcuccaacaaccua

SEQ ID NO: 4385 - RNA, 23 nt, Artificial
  Chemically synthesized
ugaggaaagcuccaacaaccuau

SEQ ID NO: 4386 - RNA, 23 nt, Artificial
  Chemically synthesized
aaacacugcaaaugacucaguga

SEQ ID NO: 4387 - RNA, 23 nt, Artificial
  Chemically synthesized
aacacugcaaaugacucagugau

SEQ ID NO: 4388 - RNA, 23 nt, Artificial
  Chemically synthesized
guccaaacaggcagagagauuua

SEQ ID NO: 4389 - RNA, 23 nt, Artificial
  Chemically synthesized
aagguaaguuucacggagagaac

SEQ ID NO: 4390 - RNA, 23 nt, Artificial
  Chemically synthesized
gcucuccuucuucagaucgggcu

SEQ ID NO: 4391 - RNA, 23 nt, Artificial
  Chemically synthesized
cucuccuucuucagaucgggcuc

SEQ ID NO: 4392 - RNA, 23 nt, Artificial
  Chemically synthesized
ucuccuucuucagaucgggcucg

SEQ ID NO: 4393 - RNA, 23 nt, Artificial
  Chemically synthesized
cuccuucuucagaucgggcucgc

SEQ ID NO: 4394 - RNA, 23 nt, Artificial
  Chemically synthesized
uccuucuucagaucgggcucgcc

SEQ ID NO: 4395 - RNA, 23 nt, Artificial
  Chemically synthesized
gaacacaaaccaaagcuuuuacc

SEQ ID NO: 4396 - RNA, 23 nt, Artificial
  Chemically synthesized
aacacaaaccaaagcuuuuaccu

SEQ ID NO: 4397 - RNA, 23 nt, Artificial
  Chemically synthesized
acacaaaccaaagcuuuuaccua

SEQ ID NO: 4398 - RNA, 23 nt, Artificial
  Chemically synthesized
cacaaaccaaagcuuuuaccuaa

SEQ ID NO: 4399 - RNA, 23 nt, Artificial
  Chemically synthesized
acaaaccaaagcuuuuaccuaaa

SEQ ID NO: 4400 - RNA, 23 nt, Artificial
  Chemically synthesized
aggaugccauauuaugagugcuu

SEQ ID NO: 4401 - RNA, 23 nt, Artificial
  Chemically synthesized
ggaugccauauuaugagugcuuu

SEQ ID NO: 4402 - RNA, 23 nt, Artificial
  Chemically synthesized
gaugccauauuaugagugcuuua

SEQ ID NO: 4403 - RNA, 23 nt, Artificial
  Chemically synthesized
augccauauuaugagugcuuuaa

SEQ ID NO: 4404 - RNA, 23 nt, Artificial
  Chemically synthesized
ugccauauuaugagugcuuuaag

SEQ ID NO: 4405 - RNA, 23 nt, Artificial
  Chemically synthesized
acaaaaauacucugguugcaaga

SEQ ID NO: 4406 - RNA, 23 nt, Artificial
  Chemically synthesized
gagaauauuccucacagaggacu

SEQ ID NO: 4407 - RNA, 23 nt, Artificial
  Chemically synthesized
agaauauuccucacagaggacuu

SEQ ID NO: 4408 - RNA, 23 nt, Artificial
  Chemically synthesized
gaauauuccucacagaggacuuu

SEQ ID NO: 4409 - RNA, 23 nt, Artificial
  Chemically synthesized
aaauaauuacaaaguccaaacag

SEQ ID NO: 4410 - RNA, 23 nt, Artificial
  Chemically synthesized
cugcuccauuuagccaagguugg

SEQ ID NO: 4411 - RNA, 23 nt, Artificial
  Chemically synthesized
ugcuccauuuagccaagguuggc

SEQ ID NO: 4412 - RNA, 23 nt, Artificial
  Chemically synthesized
gcuccauuuagccaagguuggcc

SEQ ID NO: 4413 - RNA, 23 nt, Artificial
  Chemically synthesized
aaccaaagcuuuuaccuaaagac

SEQ ID NO: 4414 - RNA, 23 nt, Artificial
  Chemically synthesized
accaaagcuuuuaccuaaagaca

SEQ ID NO: 4415 - RNA, 23 nt, Artificial
  Chemically synthesized
ccaaagcuuuuaccuaaagacaa

SEQ ID NO: 4416 - RNA, 23 nt, Artificial
  Chemically synthesized
caaagcuuuuaccuaaagacaaa

SEQ ID NO: 4417 - RNA, 23 nt, Artificial
  Chemically synthesized
aaagcuuuuaccuaaagacaaaa

SEQ ID NO: 4418 - RNA, 23 nt, Artificial
  Chemically synthesized
gcucgucggucaucuucaugaag

SEQ ID NO: 4419 - RNA, 23 nt, Artificial
  Chemically synthesized
gguguucugagaggcacagguga

SEQ ID NO: 4420 - RNA, 23 nt, Artificial
  Chemically synthesized
guguucugagaggcacaggugac

SEQ ID NO: 4421 - RNA, 23 nt, Artificial
  Chemically synthesized
uguucugagaggcacaggugaca

SEQ ID NO: 4422 - RNA, 23 nt, Artificial
  Chemically synthesized
guucugagaggcacaggugacag

SEQ ID NO: 4423 - RNA, 23 nt, Artificial
  Chemically synthesized
uucugagaggcacaggugacaga

SEQ ID NO: 4424 - RNA, 23 nt, Artificial
  Chemically synthesized
ccgcuucucgcucucguucagaa

SEQ ID NO: 4425 - RNA, 23 nt, Artificial
  Chemically synthesized
caacuaagaguaguuuagcuguu

SEQ ID NO: 4426 - RNA, 23 nt, Artificial
  Chemically synthesized
aacuaagaguaguuuagcuguug

SEQ ID NO: 4427 - RNA, 23 nt, Artificial
  Chemically synthesized
acuaagaguaguuuagcuguugg

SEQ ID NO: 4428 - RNA, 23 nt, Artificial
  Chemically synthesized
cugcaaaugacucagugauacac

SEQ ID NO: 4429 - RNA, 23 nt, Artificial
  Chemically synthesized
ugcaaaugacucagugauacacu

SEQ ID NO: 4430 - RNA, 23 nt, Artificial
  Chemically synthesized
gcaaaugacucagugauacacua

SEQ ID NO: 4431 - RNA, 23 nt, Artificial
  Chemically synthesized
caaaugacucagugauacacuac

SEQ ID NO: 4432 - RNA, 23 nt, Artificial
  Chemically synthesized
aaaugacucagugauacacuaca

SEQ ID NO: 4433 - RNA, 23 nt, Artificial
  Chemically synthesized
agggguccaggagauucauacgc

SEQ ID NO: 4434 - RNA, 23 nt, Artificial
  Chemically synthesized
gauaaagcuuaccaaaugcuucu

SEQ ID NO: 4435 - RNA, 23 nt, Artificial
  Chemically synthesized
auaaagcuuaccaaaugcuucuc

SEQ ID NO: 4436 - RNA, 23 nt, Artificial
  Chemically synthesized
uaaagcuuaccaaaugcuucucu

SEQ ID NO: 4437 - RNA, 23 nt, Artificial
  Chemically synthesized
aaagcuuaccaaaugcuucucua

SEQ ID NO: 4438 - RNA, 23 nt, Artificial
  Chemically synthesized
aacugaucacauaacacaauucu

SEQ ID NO: 4439 - RNA, 23 nt, Artificial
  Chemically synthesized
gggcuguagugugggagguugaa

SEQ ID NO: 4440 - RNA, 23 nt, Artificial
  Chemically synthesized
ggggaacuuguccuccucgcucu

SEQ ID NO: 4441 - RNA, 23 nt, Artificial
  Chemically synthesized
gggaacuuguccuccucgcucuc

SEQ ID NO: 4442 - RNA, 23 nt, Artificial
  Chemically synthesized
ggaacuuguccuccucgcucucc

SEQ ID NO: 4443 - RNA, 23 nt, Artificial
  Chemically synthesized
gaacuuguccuccucgcucuccu

SEQ ID NO: 4444 - RNA, 23 nt, Artificial
  Chemically synthesized
aacuuguccuccucgcucuccuu

SEQ ID NO: 4445 - RNA, 23 nt, Artificial
  Chemically synthesized
ucacuccaagagaagauguagag

SEQ ID NO: 4446 - RNA, 23 nt, Artificial
  Chemically synthesized
cacuccaagagaagauguagaga

SEQ ID NO: 4447 - RNA, 23 nt, Artificial
  Chemically synthesized
acuccaagagaagauguagagaa

SEQ ID NO: 4448 - RNA, 23 nt, Artificial
  Chemically synthesized
cuccaagagaagauguagagaaa

SEQ ID NO: 4449 - RNA, 23 nt, Artificial
  Chemically synthesized
uccaagagaagauguagagaaau

SEQ ID NO: 4450 - RNA, 23 nt, Artificial
  Chemically synthesized
uguaggugaagguggaguagagg

SEQ ID NO: 4451 - RNA, 23 nt, Artificial
  Chemically synthesized
guaggugaagguggaguagaggc

SEQ ID NO: 4452 - RNA, 23 nt, Artificial
  Chemically synthesized
uaggugaagguggaguagaggcc

SEQ ID NO: 4453 - RNA, 23 nt, Artificial
  Chemically synthesized
uggaugacacaugcuugcauugu

SEQ ID NO: 4454 - RNA, 23 nt, Artificial
  Chemically synthesized
ggaugacacaugcuugcauuguu

SEQ ID NO: 4455 - RNA, 23 nt, Artificial
  Chemically synthesized
gaugacacaugcuugcauuguuu

SEQ ID NO: 4456 - RNA, 23 nt, Artificial
  Chemically synthesized
augacacaugcuugcauuguuuu

SEQ ID NO: 4457 - RNA, 23 nt, Artificial
  Chemically synthesized
uaaguuucacggagagaacaaaa

SEQ ID NO: 4458 - RNA, 23 nt, Artificial
  Chemically synthesized
cugguguucugagaggcacaggu

SEQ ID NO: 4459 - RNA, 23 nt, Artificial
  Chemically synthesized
ugguguucugagaggcacaggug

SEQ ID NO: 4460 - RNA, 23 nt, Artificial
  Chemically synthesized
ggccacugauuggccacaagugg

SEQ ID NO: 4461 - RNA, 23 nt, Artificial
  Chemically synthesized
gccacugauuggccacaaguggg

SEQ ID NO: 4462 - RNA, 23 nt, Artificial
  Chemically synthesized
ccacugauuggccacaagugggu

SEQ ID NO: 4463 - RNA, 23 nt, Artificial
  Chemically synthesized
cacugauuggccacaagugggua

SEQ ID NO: 4464 - RNA, 23 nt, Artificial
  Chemically synthesized
acugauuggccacaaguggguaa

SEQ ID NO: 4465 - RNA, 23 nt, Artificial
  Chemically synthesized
uuaaaaagcaauccucaaacucu

SEQ ID NO: 4466 - RNA, 23 nt, Artificial
  Chemically synthesized
agguaaguuucacggagagaaca

SEQ ID NO: 4467 - RNA, 23 nt, Artificial
  Chemically synthesized
gguaaguuucacggagagaacaa

SEQ ID NO: 4468 - RNA, 23 nt, Artificial
  Chemically synthesized
guaaguuucacggagagaacaaa

SEQ ID NO: 4469 - RNA, 23 nt, Artificial
  Chemically synthesized
cagugauacacuacauuugcaau

SEQ ID NO: 4470 - RNA, 23 nt, Artificial
  Chemically synthesized
uaaaauagagaauauuccucaca

SEQ ID NO: 4471 - RNA, 23 nt, Artificial
  Chemically synthesized
ccccaaaacugaucacauaacac

SEQ ID NO: 4472 - RNA, 23 nt, Artificial
  Chemically synthesized
gaggguuuaaaaaguccaguuuc

SEQ ID NO: 4473 - RNA, 23 nt, Artificial
  Chemically synthesized
aggguuuaaaaaguccaguuucu

SEQ ID NO: 4474 - RNA, 23 nt, Artificial
  Chemically synthesized
guaguaggagcuggaguucuggu

SEQ ID NO: 4475 - RNA, 23 nt, Artificial
  Chemically synthesized
uaguaggagcuggaguucuggug

SEQ ID NO: 4476 - RNA, 23 nt, Artificial
  Chemically synthesized
aguaggagcuggaguucuggugg

SEQ ID NO: 4477 - RNA, 23 nt, Artificial
  Chemically synthesized
guaggagcuggaguucugguggu

SEQ ID NO: 4478 - RNA, 23 nt, Artificial
  Chemically synthesized
uaggagcuggaguucuggugguc

SEQ ID NO: 4479 - RNA, 23 nt, Artificial
  Chemically synthesized
aaugacucagugauacacuacau

SEQ ID NO: 4480 - RNA, 23 nt, Artificial
  Chemically synthesized
augacucagugauacacuacauu

SEQ ID NO: 4481 - RNA, 23 nt, Artificial
  Chemically synthesized
agaaauauggaugacacaugcuu

SEQ ID NO: 4482 - RNA, 23 nt, Artificial
  Chemically synthesized
ugacaucgaaggucucgauguug

SEQ ID NO: 4483 - RNA, 23 nt, Artificial
  Chemically synthesized
gcucugaagaggguuuaaaaagu

SEQ ID NO: 4484 - RNA, 23 nt, Artificial
  Chemically synthesized
cucugaagaggguuuaaaaaguc

SEQ ID NO: 4485 - RNA, 23 nt, Artificial
  Chemically synthesized
ucugaagaggguuuaaaaagucc

SEQ ID NO: 4486 - RNA, 23 nt, Artificial
  Chemically synthesized
cugaagaggguuuaaaaagucca

SEQ ID NO: 4487 - RNA, 23 nt, Artificial
  Chemically synthesized
ugaagaggguuuaaaaaguccag

SEQ ID NO: 4488 - RNA, 23 nt, Artificial
  Chemically synthesized
cuacugacuucuaaaacuguuaa

SEQ ID NO: 4489 - RNA, 23 nt, Artificial
  Chemically synthesized
uacugacuucuaaaacuguuaau

SEQ ID NO: 4490 - RNA, 23 nt, Artificial
  Chemically synthesized
aacaaacaaaacacgaacacaaa

SEQ ID NO: 4491 - RNA, 23 nt, Artificial
  Chemically synthesized
acaaacaaaacacgaacacaaac

SEQ ID NO: 4492 - RNA, 23 nt, Artificial
  Chemically synthesized
aaaaguccaguuucucguugauu

SEQ ID NO: 4493 - RNA, 23 nt, Artificial
  Chemically synthesized
uaaaugccagguuucuuaaguua

SEQ ID NO: 4494 - RNA, 23 nt, Artificial
  Chemically synthesized
aaaugccagguuucuuaaguuac

SEQ ID NO: 4495 - RNA, 23 nt, Artificial
  Chemically synthesized
aaugccagguuucuuaaguuaca

SEQ ID NO: 4496 - RNA, 23 nt, Artificial
  Chemically synthesized
acucguugacaucgaaggucucg

SEQ ID NO: 4497 - RNA, 23 nt, Artificial
  Chemically synthesized
caaaaaaagaaacaaguuuccag

SEQ ID NO: 4498 - RNA, 23 nt, Artificial
  Chemically synthesized
aaaaaaagaaacaaguuuccagu

SEQ ID NO: 4499 - RNA, 23 nt, Artificial
  Chemically synthesized
aaaaaagaaacaaguuuccaguu

SEQ ID NO: 4500 - RNA, 23 nt, Artificial
  Chemically synthesized
aaaaagaaacaaguuuccaguuu

SEQ ID NO: 4501 - RNA, 23 nt, Artificial
  Chemically synthesized
aaaagaaacaaguuuccaguuug

SEQ ID NO: 4502 - RNA, 23 nt, Artificial
  Chemically synthesized
uggguacgaguugccuuuagcuu

SEQ ID NO: 4503 - RNA, 23 nt, Artificial
  Chemically synthesized
ggguacgaguugccuuuagcuua

SEQ ID NO: 4504 - RNA, 23 nt, Artificial
  Chemically synthesized
gguacgaguugccuuuagcuuaa

SEQ ID NO: 4505 - RNA, 23 nt, Artificial
  Chemically synthesized
guacgaguugccuuuagcuuaaa

SEQ ID NO: 4506 - RNA, 23 nt, Artificial
  Chemically synthesized
uacgaguugccuuuagcuuaaau

SEQ ID NO: 4507 - RNA, 23 nt, Artificial
  Chemically synthesized
cuguggcagaaaacacugcaaau

SEQ ID NO: 4508 - RNA, 23 nt, Artificial
  Chemically synthesized
uguggcagaaaacacugcaaaug

SEQ ID NO: 4509 - RNA, 23 nt, Artificial
  Chemically synthesized
cuuaaaugucuuuaaggaagaag

SEQ ID NO: 4510 - RNA, 23 nt, Artificial
  Chemically synthesized
uuaaaugucuuuaaggaagaaga

SEQ ID NO: 4511 - RNA, 23 nt, Artificial
  Chemically synthesized
uaaaugucuuuaaggaagaagaa

SEQ ID NO: 4512 - RNA, 23 nt, Artificial
  Chemically synthesized
aaaugucuuuaaggaagaagaag

SEQ ID NO: 4513 - RNA, 23 nt, Artificial
  Chemically synthesized
aaugucuuuaaggaagaagaaga

SEQ ID NO: 4514 - RNA, 23 nt, Artificial
  Chemically synthesized
gaaauugaaggaugccauauuau

SEQ ID NO: 4515 - RNA, 23 nt, Artificial
  Chemically synthesized
acgcuugcucugaagaggguuua

SEQ ID NO: 4516 - RNA, 23 nt, Artificial
  Chemically synthesized
cgcuugcucugaagaggguuuaa

SEQ ID NO: 4517 - RNA, 23 nt, Artificial
  Chemically synthesized
gcuugcucugaagaggguuuaaa

SEQ ID NO: 4518 - RNA, 23 nt, Artificial
  Chemically synthesized
cuugcucugaagaggguuuaaaa

SEQ ID NO: 4519 - RNA, 23 nt, Artificial
  Chemically synthesized
uugcucugaagaggguuuaaaaa

SEQ ID NO: 4520 - RNA, 23 nt, Artificial
  Chemically synthesized
gaaacauucccagaacagauuuc

SEQ ID NO: 4521 - RNA, 23 nt, Artificial
  Chemically synthesized
ggggcuguagugugggagguuga

SEQ ID NO: 4522 - RNA, 23 nt, Artificial
  Chemically synthesized
gggcacacuguucaacuaagagu

SEQ ID NO: 4523 - RNA, 23 nt, Artificial
  Chemically synthesized
ggcacacuguucaacuaagagua

SEQ ID NO: 4524 - RNA, 23 nt, Artificial
  Chemically synthesized
gcacacuguucaacuaagaguag

SEQ ID NO: 4525 - RNA, 23 nt, Artificial
  Chemically synthesized
cacacuguucaacuaagaguagu

SEQ ID NO: 4526 - RNA, 23 nt, Artificial
  Chemically synthesized
acacuguucaacuaagaguaguu

SEQ ID NO: 4527 - RNA, 23 nt, Artificial
  Chemically synthesized
uuuaaaaagcaauccucaaacuc

SEQ ID NO: 4528 - RNA, 23 nt, Artificial
  Chemically synthesized
agcuguguguagacggguuguuc

SEQ ID NO: 4529 - RNA, 23 nt, Artificial
  Chemically synthesized
cgcucuccuucuucagaucgggc

SEQ ID NO: 4530 - RNA, 23 nt, Artificial
  Chemically synthesized
aagagaaagcaaaucuguacaaa

SEQ ID NO: 4531 - RNA, 23 nt, Artificial
  Chemically synthesized
agagaaagcaaaucuguacaaaa

SEQ ID NO: 4532 - RNA, 23 nt, Artificial
  Chemically synthesized
augcacuaaaagagugcaaaugu

SEQ ID NO: 4533 - RNA, 23 nt, Artificial
  Chemically synthesized
ugcacuaaaagagugcaaauguu

SEQ ID NO: 4534 - RNA, 23 nt, Artificial
  Chemically synthesized
gcacuaaaagagugcaaauguuu

SEQ ID NO: 4535 - RNA, 23 nt, Artificial
  Chemically synthesized
guggucgguguagucguacugug

SEQ ID NO: 4536 - RNA, 23 nt, Artificial
  Chemically synthesized
uggucgguguagucguacuguga

SEQ ID NO: 4537 - RNA, 23 nt, Artificial
  Chemically synthesized
ggucgguguagucguacugugag

SEQ ID NO: 4538 - RNA, 23 nt, Artificial
  Chemically synthesized
gucgguguagucguacugugagc

SEQ ID NO: 4539 - RNA, 23 nt, Artificial
  Chemically synthesized
auccuccacgcuugcucugaaga

SEQ ID NO: 4540 - RNA, 23 nt, Artificial
  Chemically synthesized
uccuccacgcuugcucugaagag

SEQ ID NO: 4541 - RNA, 23 nt, Artificial
  Chemically synthesized
ccuccacgcuugcucugaagagg

SEQ ID NO: 4542 - RNA, 23 nt, Artificial
  Chemically synthesized
cuccacgcuugcucugaagaggg

SEQ ID NO: 4543 - RNA, 23 nt, Artificial
  Chemically synthesized
uccacgcuugcucugaagagggu

SEQ ID NO: 4544 - RNA, 23 nt, Artificial
  Chemically synthesized
augucuuuaaggaagaagaagaa

SEQ ID NO: 4545 - RNA, 23 nt, Artificial
  Chemically synthesized
gaggaaagcuccaacaaccuauu

SEQ ID NO: 4546 - RNA, 23 nt, Artificial
  Chemically synthesized
agagauuuagcacacugaucaca

SEQ ID NO: 4547 - RNA, 23 nt, Artificial
  Chemically synthesized
gaccauacccuuugaggaaagcu

SEQ ID NO: 4548 - RNA, 23 nt, Artificial
  Chemically synthesized
aaacacgaacacaaaccaaagcu

SEQ ID NO: 4549 - RNA, 23 nt, Artificial
  Chemically synthesized
aacacgaacacaaaccaaagcuu

SEQ ID NO: 4550 - RNA, 23 nt, Artificial
  Chemically synthesized
acacgaacacaaaccaaagcuuu

SEQ ID NO: 4551 - RNA, 23 nt, Artificial
  Chemically synthesized
cacgaacacaaaccaaagcuuuu

SEQ ID NO: 4552 - RNA, 23 nt, Artificial
  Chemically synthesized
acgaacacaaaccaaagcuuuua

SEQ ID NO: 4553 - RNA, 23 nt, Artificial
  Chemically synthesized
gguaaugaaucauacacaguaca

SEQ ID NO: 4554 - RNA, 23 nt, Artificial
  Chemically synthesized
guaaugaaucauacacaguacau

SEQ ID NO: 4555 - RNA, 23 nt, Artificial
  Chemically synthesized
uaaugaaucauacacaguacaua

SEQ ID NO: 4556 - RNA, 23 nt, Artificial
  Chemically synthesized
accaaaugcuucucuagacuauu

SEQ ID NO: 4557 - RNA, 23 nt, Artificial
  Chemically synthesized
gagagauuuagcacacugaucac

SEQ ID NO: 4558 - RNA, 23 nt, Artificial
  Chemically synthesized
ucgcugcuccauuuagccaaggu

SEQ ID NO: 4559 - RNA, 23 nt, Artificial
  Chemically synthesized
uaggucauguuugugucuuggaa

SEQ ID NO: 4560 - RNA, 23 nt, Artificial
  Chemically synthesized
aggucauguuugugucuuggaaa

SEQ ID NO: 4561 - RNA, 23 nt, Artificial
  Chemically synthesized
ggucauguuugugucuuggaaau

SEQ ID NO: 4562 - RNA, 23 nt, Artificial
  Chemically synthesized
gucauguuugugucuuggaaauu

SEQ ID NO: 4563 - RNA, 23 nt, Artificial
  Chemically synthesized
ucauguuugugucuuggaaauuu

SEQ ID NO: 4564 - RNA, 23 nt, Artificial
  Chemically synthesized
uuaggaucaucucggccaucuuc

SEQ ID NO: 4565 - RNA, 23 nt, Artificial
  Chemically synthesized
ugcaaaauaaggccuuuauuuuu

SEQ ID NO: 4566 - RNA, 23 nt, Artificial
  Chemically synthesized
gcucagcugcuccgucuugaugu

SEQ ID NO: 4567 - RNA, 23 nt, Artificial
  Chemically synthesized
cucagcugcuccgucuugaugug

SEQ ID NO: 4568 - RNA, 23 nt, Artificial
  Chemically synthesized
ucagcugcuccgucuugaugugc

SEQ ID NO: 4569 - RNA, 23 nt, Artificial
  Chemically synthesized
cagcugcuccgucuugaugugcg

SEQ ID NO: 4570 - RNA, 23 nt, Artificial
  Chemically synthesized
agcugcuccgucuugaugugcgu

SEQ ID NO: 4571 - RNA, 23 nt, Artificial
  Chemically synthesized
uggcuguaguaggagcuggaguu

SEQ ID NO: 4572 - RNA, 23 nt, Artificial
  Chemically synthesized
ggcuguaguaggagcuggaguuc

SEQ ID NO: 4573 - RNA, 23 nt, Artificial
  Chemically synthesized
gcuguaguaggagcuggaguucu

SEQ ID NO: 4574 - RNA, 23 nt, Artificial
  Chemically synthesized
cuguaguaggagcuggaguucug

SEQ ID NO: 4575 - RNA, 23 nt, Artificial
  Chemically synthesized
uguaguaggagcuggaguucugg

SEQ ID NO: 4576 - RNA, 23 nt, Artificial
  Chemically synthesized
agugaacaagcaaaggcaggagg

SEQ ID NO: 4577 - RNA, 23 nt, Artificial
  Chemically synthesized
gugaacaagcaaaggcaggagga

SEQ ID NO: 4578 - RNA, 23 nt, Artificial
  Chemically synthesized
ugaacaagcaaaggcaggaggaa

SEQ ID NO: 4579 - RNA, 23 nt, Artificial
  Chemically synthesized
gaacaagcaaaggcaggaggaaa

SEQ ID NO: 4580 - RNA, 23 nt, Artificial
  Chemically synthesized
aacaagcaaaggcaggaggaaau

SEQ ID NO: 4581 - RNA, 23 nt, Artificial
  Chemically synthesized
cgcaaagccugaggaauuaagca

SEQ ID NO: 4582 - RNA, 23 nt, Artificial
  Chemically synthesized
gcaaagccugaggaauuaagcaa

SEQ ID NO: 4583 - RNA, 23 nt, Artificial
  Chemically synthesized
caaagccugaggaauuaagcaaa

SEQ ID NO: 4584 - RNA, 23 nt, Artificial
  Chemically synthesized
aaagccugaggaauuaagcaaag

SEQ ID NO: 4585 - RNA, 23 nt, Artificial
  Chemically synthesized
aacaaagaaaaaagggauggaca

SEQ ID NO: 4586 - RNA, 23 nt, Artificial
  Chemically synthesized
acaaagaaaaaagggauggacaa

SEQ ID NO: 4587 - RNA, 23 nt, Artificial
  Chemically synthesized
caaagaaaaaagggauggacaaa

SEQ ID NO: 4588 - RNA, 23 nt, Artificial
  Chemically synthesized
aaagaaaaaagggauggacaaaa

SEQ ID NO: 4589 - RNA, 23 nt, Artificial
  Chemically synthesized
aagaaaaaagggauggacaaaaa

SEQ ID NO: 4590 - RNA, 23 nt, Artificial
  Chemically synthesized
uagccacagcaguaauuaagauu

SEQ ID NO: 4591 - RNA, 23 nt, Artificial
  Chemically synthesized
agccacagcaguaauuaagauua

SEQ ID NO: 4592 - RNA, 23 nt, Artificial
  Chemically synthesized
gccacagcaguaauuaagauuaa

SEQ ID NO: 4593 - RNA, 23 nt, Artificial
  Chemically synthesized
ccacagcaguaauuaagauuaag

SEQ ID NO: 4594 - RNA, 23 nt, Artificial
  Chemically synthesized
ucagaagucuccagagcuugccc

SEQ ID NO: 4595 - RNA, 23 nt, Artificial
  Chemically synthesized
cagaagucuccagagcuugccca

SEQ ID NO: 4596 - RNA, 23 nt, Artificial
  Chemically synthesized
agaagucuccagagcuugcccag

SEQ ID NO: 4597 - RNA, 23 nt, Artificial
  Chemically synthesized
agagaaauauggaugacacaugc

SEQ ID NO: 4598 - RNA, 23 nt, Artificial
  Chemically synthesized
accccuucucuucuccuccugca

SEQ ID NO: 4599 - RNA, 23 nt, Artificial
  Chemically synthesized
acucucuagccacagcaguaauu

SEQ ID NO: 4600 - RNA, 23 nt, Artificial
  Chemically synthesized
cucucuagccacagcaguaauua

SEQ ID NO: 4601 - RNA, 23 nt, Artificial
  Chemically synthesized
ucucuagccacagcaguaauuaa

SEQ ID NO: 4602 - RNA, 23 nt, Artificial
  Chemically synthesized
cucuagccacagcaguaauuaag

SEQ ID NO: 4603 - RNA, 23 nt, Artificial
  Chemically synthesized
ugcucugaagaggguuuaaaaag

SEQ ID NO: 4604 - RNA, 23 nt, Artificial
  Chemically synthesized
ucccagcagcaccguuuuaaggc

SEQ ID NO: 4605 - RNA, 23 nt, Artificial
  Chemically synthesized
cccagcagcaccguuuuaaggcu

SEQ ID NO: 4606 - RNA, 23 nt, Artificial
  Chemically synthesized
ccagcagcaccguuuuaaggcuc

SEQ ID NO: 4607 - RNA, 23 nt, Artificial
  Chemically synthesized
cagcagcaccguuuuaaggcuca

SEQ ID NO: 4608 - RNA, 23 nt, Artificial
  Chemically synthesized
agcagcaccguuuuaaggcucaa

SEQ ID NO: 4609 - RNA, 23 nt, Artificial
  Chemically synthesized
ugacgugcggcuuguucuugcug

SEQ ID NO: 4610 - RNA, 23 nt, Artificial
  Chemically synthesized
gugcaaauguuucccagcagcac

SEQ ID NO: 4611 - RNA, 23 nt, Artificial
  Chemically synthesized
guguagacggguuguucccagug

SEQ ID NO: 4612 - RNA, 23 nt, Artificial
  Chemically synthesized
uguagacggguuguucccagugc

SEQ ID NO: 4613 - RNA, 23 nt, Artificial
  Chemically synthesized
guagacggguuguucccagugcu

SEQ ID NO: 4614 - RNA, 23 nt, Artificial
  Chemically synthesized
uagacggguuguucccagugcug

SEQ ID NO: 4615 - RNA, 23 nt, Artificial
  Chemically synthesized
caaacucucuagccacagcagua

SEQ ID NO: 4616 - RNA, 23 nt, Artificial
  Chemically synthesized
aaacucucuagccacagcaguaa

SEQ ID NO: 4617 - RNA, 23 nt, Artificial
  Chemically synthesized
agggugaggaauacaaagaaacu

SEQ ID NO: 4618 - RNA, 23 nt, Artificial
  Chemically synthesized
gggugaggaauacaaagaaacuu

SEQ ID NO: 4619 - RNA, 23 nt, Artificial
  Chemically synthesized
cccagaacagauuucaucuccuu

SEQ ID NO: 4620 - RNA, 23 nt, Artificial
  Chemically synthesized
aaggcauuuauacaaaucuaggg

SEQ ID NO: 4621 - RNA, 23 nt, Artificial
  Chemically synthesized
aggcauuuauacaaaucuagggu

SEQ ID NO: 4622 - RNA, 23 nt, Artificial
  Chemically synthesized
aacucucuagccacagcaguaau

SEQ ID NO: 4623 - RNA, 23 nt, Artificial
  Chemically synthesized
uuuuguaagagaaagcaaaucug

SEQ ID NO: 4624 - RNA, 23 nt, Artificial
  Chemically synthesized
gcccguucuucaccgacuuccuc

SEQ ID NO: 4625 - RNA, 23 nt, Artificial
  Chemically synthesized
caguuucgagcuccgcuuucggc

SEQ ID NO: 4626 - RNA, 23 nt, Artificial
  Chemically synthesized
aguuucgagcuccgcuuucggcu

SEQ ID NO: 4627 - RNA, 23 nt, Artificial
  Chemically synthesized
cuaagaguaguuuagcuguugga

SEQ ID NO: 4628 - RNA, 23 nt, Artificial
  Chemically synthesized
uaagaguaguuuagcuguuggaa

SEQ ID NO: 4629 - RNA, 23 nt, Artificial
  Chemically synthesized
aagaguaguuuagcuguuggaaa

SEQ ID NO: 4630 - RNA, 23 nt, Artificial
  Chemically synthesized
agaguaguuuagcuguuggaaaa

SEQ ID NO: 4631 - RNA, 23 nt, Artificial
  Chemically synthesized
gagaaauauggaugacacaugcu

SEQ ID NO: 4632 - RNA, 23 nt, Artificial
  Chemically synthesized
acugacuucuaaaacuguuaaua

SEQ ID NO: 4633 - RNA, 23 nt, Artificial
  Chemically synthesized
aaaacacgaacacaaaccaaagc

SEQ ID NO: 4634 - RNA, 23 nt, Artificial
  Chemically synthesized
gcugcuccauuuagccaagguug

SEQ ID NO: 4635 - RNA, 23 nt, Artificial
  Chemically synthesized
ccacaccaugaaggcguucaugg

SEQ ID NO: 4636 - RNA, 23 nt, Artificial
  Chemically synthesized
cacaccaugaaggcguucauggg

SEQ ID NO: 4637 - RNA, 23 nt, Artificial
  Chemically synthesized
acaccaugaaggcguucaugggc

SEQ ID NO: 4638 - RNA, 23 nt, Artificial
  Chemically synthesized
caccaugaaggcguucaugggcc

SEQ ID NO: 4639 - RNA, 23 nt, Artificial
  Chemically synthesized
accaugaaggcguucaugggccg

SEQ ID NO: 4640 - RNA, 23 nt, Artificial
  Chemically synthesized
caaaaauacucugguugcaagaa

SEQ ID NO: 4641 - RNA, 23 nt, Artificial
  Chemically synthesized
aaaaauacucugguugcaagaaa

SEQ ID NO: 4642 - RNA, 23 nt, Artificial
  Chemically synthesized
aaaauacucugguugcaagaaaa

SEQ ID NO: 4643 - RNA, 23 nt, Artificial
  Chemically synthesized
acagaaauugaaggaugccauau

SEQ ID NO: 4644 - RNA, 23 nt, Artificial
  Chemically synthesized
cagaaauugaaggaugccauauu

SEQ ID NO: 4645 - RNA, 23 nt, Artificial
  Chemically synthesized
agaaauugaaggaugccauauua

SEQ ID NO: 4646 - RNA, 23 nt, Artificial
  Chemically synthesized
uccaguuuguuuucaacaaaaac

SEQ ID NO: 4647 - RNA, 23 nt, Artificial
  Chemically synthesized
cacaaguggguaaugcgcuugga

SEQ ID NO: 4648 - RNA, 23 nt, Artificial
  Chemically synthesized
acaaguggguaaugcgcuuggau

SEQ ID NO: 4649 - RNA, 23 nt, Artificial
  Chemically synthesized
caaguggguaaugcgcuuggaua

SEQ ID NO: 4650 - RNA, 23 nt, Artificial
  Chemically synthesized
aaguggguaaugcgcuuggauag

SEQ ID NO: 4651 - RNA, 23 nt, Artificial
  Chemically synthesized
ccaucauccuccacgcuugcucu

SEQ ID NO: 4652 - RNA, 23 nt, Artificial
  Chemically synthesized
caucauccuccacgcuugcucug

SEQ ID NO: 4653 - RNA, 23 nt, Artificial
  Chemically synthesized
aucauccuccacgcuugcucuga

SEQ ID NO: 4654 - RNA, 23 nt, Artificial
  Chemically synthesized
acucccauaauugcaaaauaagg

SEQ ID NO: 4655 - RNA, 23 nt, Artificial
  Chemically synthesized
gcggcagguacuggucaaacucg

SEQ ID NO: 4656 - RNA, 23 nt, Artificial
  Chemically synthesized
cggcagguacuggucaaacucgu

SEQ ID NO: 4657 - RNA, 23 nt, Artificial
  Chemically synthesized
ggcagguacuggucaaacucguu

SEQ ID NO: 4658 - RNA, 23 nt, Artificial
  Chemically synthesized
aacaacaaagaaaaaagggaugg

SEQ ID NO: 4659 - RNA, 23 nt, Artificial
  Chemically synthesized
acaacaaagaaaaaagggaugga

SEQ ID NO: 4660 - RNA, 23 nt, Artificial
  Chemically synthesized
caacaaagaaaaaagggauggac

SEQ ID NO: 4661 - RNA, 23 nt, Artificial
  Chemically synthesized
cugaucacacgauucuccaucau

SEQ ID NO: 4662 - RNA, 23 nt, Artificial
  Chemically synthesized
ugaucacacgauucuccaucauc

SEQ ID NO: 4663 - RNA, 23 nt, Artificial
  Chemically synthesized
acuggucaaacucguugacaucg

SEQ ID NO: 4664 - RNA, 23 nt, Artificial
  Chemically synthesized
cuggucaaacucguugacaucga

SEQ ID NO: 4665 - RNA, 23 nt, Artificial
  Chemically synthesized
uggucaaacucguugacaucgaa

SEQ ID NO: 4666 - RNA, 23 nt, Artificial
  Chemically synthesized
gcagugaacaagcaaaggcagga

SEQ ID NO: 4667 - RNA, 23 nt, Artificial
  Chemically synthesized
cagugaacaagcaaaggcaggag

SEQ ID NO: 4668 - RNA, 23 nt, Artificial
  Chemically synthesized
agagaauauuccucacagaggac

SEQ ID NO: 4669 - RNA, 23 nt, Artificial
  Chemically synthesized
uggauaggucauguuugugucuu

SEQ ID NO: 4670 - RNA, 23 nt, Artificial
  Chemically synthesized
ggauaggucauguuugugucuug

SEQ ID NO: 4671 - RNA, 23 nt, Artificial
  Chemically synthesized
gauaggucauguuugugucuugg

SEQ ID NO: 4672 - RNA, 23 nt, Artificial
  Chemically synthesized
auaggucauguuugugucuugga

SEQ ID NO: 4673 - RNA, 23 nt, Artificial
  Chemically synthesized
acaaaucuagggugaggaauaca

SEQ ID NO: 4674 - RNA, 23 nt, Artificial
  Chemically synthesized
ggggaggaaaaagagcaaaagug

SEQ ID NO: 4675 - RNA, 23 nt, Artificial
  Chemically synthesized
gggaggaaaaagagcaaaagugg

SEQ ID NO: 4676 - RNA, 23 nt, Artificial
  Chemically synthesized
ggaggaaaaagagcaaaaguggg

SEQ ID NO: 4677 - RNA, 23 nt, Artificial
  Chemically synthesized
gaggaaaaagagcaaaagugggg

SEQ ID NO: 4678 - RNA, 23 nt, Artificial
  Chemically synthesized
aggaaaaagagcaaaaguggggg

SEQ ID NO: 4679 - RNA, 23 nt, Artificial
  Chemically synthesized
gggauggacaaaaaggcauuuau

SEQ ID NO: 4680 - RNA, 23 nt, Artificial
  Chemically synthesized
ggauggacaaaaaggcauuuaua

SEQ ID NO: 4681 - RNA, 23 nt, Artificial
  Chemically synthesized
gauggacaaaaaggcauuuauac

SEQ ID NO: 4682 - RNA, 23 nt, Artificial
  Chemically synthesized
auggacaaaaaggcauuuauaca

SEQ ID NO: 4683 - RNA, 23 nt, Artificial
  Chemically synthesized
uggacaaaaaggcauuuauacaa

SEQ ID NO: 4684 - RNA, 23 nt, Artificial
  Chemically synthesized
cugauuggccacaaguggguaau

SEQ ID NO: 4685 - RNA, 23 nt, Artificial
  Chemically synthesized
ugauuggccacaaguggguaaug

SEQ ID NO: 4686 - RNA, 23 nt, Artificial
  Chemically synthesized
agaaaaaagggauggacaaaaag

SEQ ID NO: 4687 - RNA, 19 nt, Artificial
  Chemically synthesized
gccaauuacuauaaaucca

SEQ ID NO: 4688 - RNA, 19 nt, Artificial
  Chemically synthesized
cggcagaggacaauaacaa

SEQ ID NO: 4689 - RNA, 19 nt, Artificial
  Chemically synthesized
agaggacaauaacaacaac

SEQ ID NO: 4690 - RNA, 19 nt, Artificial
  Chemically synthesized
ggacaauaacaacaacgug

SEQ ID NO: 4691 - RNA, 19 nt, Artificial
  Chemically synthesized
ggagaaaaacguacugaaa

SEQ ID NO: 4692 - RNA, 19 nt, Artificial
  Chemically synthesized
ggaaaaaaauucagcugaa

SEQ ID NO: 4693 - RNA, 19 nt, Artificial
  Chemically synthesized
gcaaaaucaugaacggcaa

SEQ ID NO: 4694 - RNA, 19 nt, Artificial
  Chemically synthesized
ccaggaacaaaauucaaaa

SEQ ID NO: 4695 - RNA, 19 nt, Artificial
  Chemically synthesized
cgggcaucgagauugguaa

SEQ ID NO: 4696 - RNA, 19 nt, Artificial
  Chemically synthesized
ggcugagaguccgguuuaa

SEQ ID NO: 4697 - RNA, 19 nt, Artificial
  Chemically synthesized
cagaggacaauaacaacaa

SEQ ID NO: 4698 - RNA, 19 nt, Artificial
  Chemically synthesized
aaauguaccuggagaaaaa

SEQ ID NO: 4699 - RNA, 19 nt, Artificial
  Chemically synthesized
cgaugaugccgaugauauu

SEQ ID NO: 4700 - RNA, 19 nt, Artificial
  Chemically synthesized
ggccaacauuaaaacagaa

SEQ ID NO: 4701 - RNA, 19 nt, Artificial
  Chemically synthesized
guacgaacaucuucagaaa

SEQ ID NO: 4702 - RNA, 19 nt, Artificial
  Chemically synthesized
gcuagaaaauggucuuaau

SEQ ID NO: 4703 - RNA, 19 nt, Artificial
  Chemically synthesized
cgaacucagagaaauguaa

SEQ ID NO: 4704 - RNA, 19 nt, Artificial
  Chemically synthesized
aggacaauaacaacaacgu

SEQ ID NO: 4705 - RNA, 19 nt, Artificial
  Chemically synthesized
gggcaucgagauugguaaa

SEQ ID NO: 4706 - RNA, 19 nt, Artificial
  Chemically synthesized
cggcaaucugucugcugaa

SEQ ID NO: 4707 - RNA, 19 nt, Artificial
  Chemically synthesized
caggaaagcugcagcuaga

SEQ ID NO: 4708 - RNA, 19 nt, Artificial
  Chemically synthesized
gugccauguuccaggaaaa

SEQ ID NO: 4709 - RNA, 19 nt, Artificial
  Chemically synthesized
cauaguguggugaagaaaa

SEQ ID NO: 4710 - RNA, 19 nt, Artificial
  Chemically synthesized
ccaugauggacaagcgaau

SEQ ID NO: 4711 - RNA, 19 nt, Artificial
  Chemically synthesized
ggcagaggacaauaacaac

SEQ ID NO: 4712 - RNA, 19 nt, Artificial
  Chemically synthesized
ccaacuugaagaagcccaa

SEQ ID NO: 4713 - RNA, 19 nt, Artificial
  Chemically synthesized
gcggcgguggaguuaaaaa

SEQ ID NO: 4714 - RNA, 19 nt, Artificial
  Chemically synthesized
cguacaggcuuuuuauaua

SEQ ID NO: 4715 - RNA, 19 nt, Artificial
  Chemically synthesized
gcaacagcagcagauugaa

SEQ ID NO: 4716 - RNA, 19 nt, Artificial
  Chemically synthesized
agcugggugugaugaacaa

SEQ ID NO: 4717 - RNA, 19 nt, Artificial
  Chemically synthesized
cacggagggaagaagugaa

SEQ ID NO: 4718 - RNA, 19 nt, Artificial
  Chemically synthesized
cagcguuuacauuuucuaa

SEQ ID NO: 4719 - RNA, 19 nt, Artificial
  Chemically synthesized
cugucugcugaaauagaaa

SEQ ID NO: 4720 - RNA, 19 nt, Artificial
  Chemically synthesized
gagaaaaacguacugaaaa

SEQ ID NO: 4721 - RNA, 19 nt, Artificial
  Chemically synthesized
caggaaguacagacugcaa

SEQ ID NO: 4722 - RNA, 19 nt, Artificial
  Chemically synthesized
cacacagcgccuuaaauaa

SEQ ID NO: 4723 - RNA, 19 nt, Artificial
  Chemically synthesized
ccauguuccaggaaaagaa

SEQ ID NO: 4724 - RNA, 19 nt, Artificial
  Chemically synthesized
caagucgacuacagcaaaa

SEQ ID NO: 4725 - RNA, 19 nt, Artificial
  Chemically synthesized
caaugagaggacaagucga

SEQ ID NO: 4726 - RNA, 19 nt, Artificial
  Chemically synthesized
ggacaagcgaaucagugaa

SEQ ID NO: 4727 - RNA, 19 nt, Artificial
  Chemically synthesized
cugucgagauguuguagaa

SEQ ID NO: 4728 - RNA, 19 nt, Artificial
  Chemically synthesized
gguugccagugaagacaga

SEQ ID NO: 4729 - RNA, 19 nt, Artificial
  Chemically synthesized
cgugaaugcugcugauagu

SEQ ID NO: 4730 - RNA, 19 nt, Artificial
  Chemically synthesized
gcagaggacaauaacaaca

SEQ ID NO: 4731 - RNA, 19 nt, Artificial
  Chemically synthesized
uguaauaaauguaccugga

SEQ ID NO: 4732 - RNA, 19 nt, Artificial
  Chemically synthesized
uggagaaaaacguacugaa

SEQ ID NO: 4733 - RNA, 19 nt, Artificial
  Chemically synthesized
ccaggaaaagaagcaggaa

SEQ ID NO: 4734 - RNA, 19 nt, Artificial
  Chemically synthesized
aguacagacugcaauuuua

SEQ ID NO: 4735 - RNA, 19 nt, Artificial
  Chemically synthesized
gaaggaacucuuaaauaag

SEQ ID NO: 4736 - RNA, 19 nt, Artificial
  Chemically synthesized
uguggugaagaaaagugaa

SEQ ID NO: 4737 - RNA, 19 nt, Artificial
  Chemically synthesized
ggcgguggaguuaaaaaga

SEQ ID NO: 4738 - RNA, 19 nt, Artificial
  Chemically synthesized
gguucagugccauguucca

SEQ ID NO: 4739 - RNA, 19 nt, Artificial
  Chemically synthesized
ccggcagaggacaauaaca

SEQ ID NO: 4740 - RNA, 19 nt, Artificial
  Chemically synthesized
gauguugguugccaaggaa

SEQ ID NO: 4741 - RNA, 19 nt, Artificial
  Chemically synthesized
gaaagcugcagcuagaaaa

SEQ ID NO: 4742 - RNA, 19 nt, Artificial
  Chemically synthesized
ccacaaugugaauccuaca

SEQ ID NO: 4743 - RNA, 19 nt, Artificial
  Chemically synthesized
caaccauaagcgacauuga

SEQ ID NO: 4744 - RNA, 19 nt, Artificial
  Chemically synthesized
ccaacuuaaccaggaacaa

SEQ ID NO: 4745 - RNA, 19 nt, Artificial
  Chemically synthesized
caaggaacagcguuuacau

SEQ ID NO: 4746 - RNA, 19 nt, Artificial
  Chemically synthesized
ccaggagccacuuaagaga

SEQ ID NO: 4747 - RNA, 19 nt, Artificial
  Chemically synthesized
cagcaauuggaagauuuaa

SEQ ID NO: 4748 - RNA, 19 nt, Artificial
  Chemically synthesized
cgucucuaugggaaaaaaa

SEQ ID NO: 4749 - RNA, 19 nt, Artificial
  Chemically synthesized
gaguugaagcccaggagaa

SEQ ID NO: 4750 - RNA, 19 nt, Artificial
  Chemically synthesized
ccuaaaggcugauugugca

SEQ ID NO: 4751 - RNA, 19 nt, Artificial
  Chemically synthesized
gacugaauuuugccaauua

SEQ ID NO: 4752 - RNA, 19 nt, Artificial
  Chemically synthesized
agauauggcagcuaggcaa

SEQ ID NO: 4753 - RNA, 19 nt, Artificial
  Chemically synthesized
cauuuuugccucaaccaua

SEQ ID NO: 4754 - RNA, 19 nt, Artificial
  Chemically synthesized
guacagacugcaauuuuaa

SEQ ID NO: 4755 - RNA, 19 nt, Artificial
  Chemically synthesized
caggcuuuuuauauaccaa

SEQ ID NO: 4756 - RNA, 19 nt, Artificial
  Chemically synthesized
ggacaauggaaacaccaau

SEQ ID NO: 4757 - RNA, 19 nt, Artificial
  Chemically synthesized
gggaagaagugaaauuuuu

SEQ ID NO: 4758 - RNA, 19 nt, Artificial
  Chemically synthesized
ugaucagcuuagucagcaa

SEQ ID NO: 4759 - RNA, 19 nt, Artificial
  Chemically synthesized
gagaacaagcugaagaaaa

SEQ ID NO: 4760 - RNA, 19 nt, Artificial
  Chemically synthesized
gcugggugugaugaacaaa

SEQ ID NO: 4761 - RNA, 19 nt, Artificial
  Chemically synthesized
uggccaacauuaaaacaga

SEQ ID NO: 4762 - RNA, 19 nt, Artificial
  Chemically synthesized
ggaaagcugcagcuagaaa

SEQ ID NO: 4763 - RNA, 19 nt, Artificial
  Chemically synthesized
ggacaagucgacuacagca

SEQ ID NO: 4764 - RNA, 19 nt, Artificial
  Chemically synthesized
acaagucgacuacagcaaa

SEQ ID NO: 4765 - RNA, 19 nt, Artificial
  Chemically synthesized
ccucagccaccuucagaaa

SEQ ID NO: 4766 - RNA, 19 nt, Artificial
  Chemically synthesized
cagcagaaggaacucuuaa

SEQ ID NO: 4767 - RNA, 19 nt, Artificial
  Chemically synthesized
gggacauacccaaguccua

SEQ ID NO: 4768 - RNA, 19 nt, Artificial
  Chemically synthesized
acaccaaugccaauggaaa

SEQ ID NO: 4769 - RNA, 19 nt, Artificial
  Chemically synthesized
ggaucaucuaugaggugga

SEQ ID NO: 4770 - RNA, 19 nt, Artificial
  Chemically synthesized
cagcguucaccucugcaaa

SEQ ID NO: 4771 - RNA, 19 nt, Artificial
  Chemically synthesized
acggagggaagaagugaaa

SEQ ID NO: 4772 - RNA, 19 nt, Artificial
  Chemically synthesized
acgucucuaugggaaaaaa

SEQ ID NO: 4773 - RNA, 19 nt, Artificial
  Chemically synthesized
ccuauaacaccggaaacaa

SEQ ID NO: 4774 - RNA, 19 nt, Artificial
  Chemically synthesized
ggaaaagaagcaggaagua

SEQ ID NO: 4775 - RNA, 19 nt, Artificial
  Chemically synthesized
gagggcuaugugcccaaaa

SEQ ID NO: 4776 - RNA, 19 nt, Artificial
  Chemically synthesized
guacguacaggcuuuuuau

SEQ ID NO: 4777 - RNA, 19 nt, Artificial
  Chemically synthesized
cgguggaguuaaaaagacu

SEQ ID NO: 4778 - RNA, 19 nt, Artificial
  Chemically synthesized
ucuccaguuugcccauuaa

SEQ ID NO: 4779 - RNA, 19 nt, Artificial
  Chemically synthesized
agcagaaggaacucuuaaa

SEQ ID NO: 4780 - RNA, 19 nt, Artificial
  Chemically synthesized
uguagaauuuugcaaggaa

SEQ ID NO: 4781 - RNA, 19 nt, Artificial
  Chemically synthesized
gacaauaacaacaacgugg

SEQ ID NO: 4782 - RNA, 19 nt, Artificial
  Chemically synthesized
ggagaacaagcugaagaaa

SEQ ID NO: 4783 - RNA, 19 nt, Artificial
  Chemically synthesized
agggcuaugugcccaaaaa

SEQ ID NO: 4784 - RNA, 19 nt, Artificial
  Chemically synthesized
gcagcagauugaaaaucag

SEQ ID NO: 4785 - RNA, 19 nt, Artificial
  Chemically synthesized
agcagauguugguugccaa

SEQ ID NO: 4786 - RNA, 19 nt, Artificial
  Chemically synthesized
aacuuaaccaggaacaaaa

SEQ ID NO: 4787 - RNA, 19 nt, Artificial
  Chemically synthesized
guaccuggagaaaaacgua

SEQ ID NO: 4788 - RNA, 19 nt, Artificial
  Chemically synthesized
ugcucauggaagauccaaa

SEQ ID NO: 4789 - RNA, 19 nt, Artificial
  Chemically synthesized
aggagaacaagcugaagaa

SEQ ID NO: 4790 - RNA, 19 nt, Artificial
  Chemically synthesized
aagugaacgcccuuguaga

SEQ ID NO: 4791 - RNA, 19 nt, Artificial
  Chemically synthesized
gggaaaugaacgucccaua

SEQ ID NO: 4792 - RNA, 19 nt, Artificial
  Chemically synthesized
ggugugaauuguacguaca

SEQ ID NO: 4793 - RNA, 19 nt, Artificial
  Chemically synthesized
agguggccaugauggacaa

SEQ ID NO: 4794 - RNA, 19 nt, Artificial
  Chemically synthesized
gguugguugccagugaaga

SEQ ID NO: 4795 - RNA, 19 nt, Artificial
  Chemically synthesized
gaucaucuaugagguggaa

SEQ ID NO: 4796 - RNA, 19 nt, Artificial
  Chemically synthesized
cgacauugaaacugcugca

SEQ ID NO: 4797 - RNA, 19 nt, Artificial
  Chemically synthesized
gccuuuccuggcugauaaa

SEQ ID NO: 4798 - RNA, 19 nt, Artificial
  Chemically synthesized
aggagccucuguauggaaa

SEQ ID NO: 4799 - RNA, 19 nt, Artificial
  Chemically synthesized
ugaacgucucuaugggaaa

SEQ ID NO: 4800 - RNA, 19 nt, Artificial
  Chemically synthesized
auguaugagucguguguaa

SEQ ID NO: 4801 - RNA, 19 nt, Artificial
  Chemically synthesized
cccuaagaccaagugacaa

SEQ ID NO: 4802 - RNA, 19 nt, Artificial
  Chemically synthesized
gaggacaauaacaacaacg

SEQ ID NO: 4803 - RNA, 19 nt, Artificial
  Chemically synthesized
guguggugaagaaaaguga

SEQ ID NO: 4804 - RNA, 19 nt, Artificial
  Chemically synthesized
caauuuuaaggguugauca

SEQ ID NO: 4805 - RNA, 19 nt, Artificial
  Chemically synthesized
aaccauaagcgacauugaa

SEQ ID NO: 4806 - RNA, 19 nt, Artificial
  Chemically synthesized
cgugaacgucucuauggga

SEQ ID NO: 4807 - RNA, 19 nt, Artificial
  Chemically synthesized
ccuggaaaggaggaaggaa

SEQ ID NO: 4808 - RNA, 19 nt, Artificial
  Chemically synthesized
gcuuagucagcaauuggaa

SEQ ID NO: 4809 - RNA, 19 nt, Artificial
  Chemically synthesized
cgauguggacaauggaaac

SEQ ID NO: 4810 - RNA, 19 nt, Artificial
  Chemically synthesized
gcugcugacgcuguguaaa

SEQ ID NO: 4811 - RNA, 19 nt, Artificial
  Chemically synthesized
cucaaaugcugcucaugga

SEQ ID NO: 4812 - RNA, 19 nt, Artificial
  Chemically synthesized
gcucauggaagauccaaau

SEQ ID NO: 4813 - RNA, 19 nt, Artificial
  Chemically synthesized
cugaauuuugccaauuacu

SEQ ID NO: 4814 - RNA, 19 nt, Artificial
  Chemically synthesized
cgaucucacagccugucau

SEQ ID NO: 4815 - RNA, 19 nt, Artificial
  Chemically synthesized
ccuggcugauaaaggguca

SEQ ID NO: 4816 - RNA, 19 nt, Artificial
  Chemically synthesized
gcugaaauagaaagguuca

SEQ ID NO: 4817 - RNA, 19 nt, Artificial
  Chemically synthesized
ucugucugcugaaauagaa

SEQ ID NO: 4818 - RNA, 19 nt, Artificial
  Chemically synthesized
ucagcaauuggaagauuua

SEQ ID NO: 4819 - RNA, 19 nt, Artificial
  Chemically synthesized
gugugaggagauggaggaa

SEQ ID NO: 4820 - RNA, 19 nt, Artificial
  Chemically synthesized
gccugaacuuccuuuugga

SEQ ID NO: 4821 - RNA, 19 nt, Artificial
  Chemically synthesized
cccagacagugaauucaag

SEQ ID NO: 4822 - RNA, 19 nt, Artificial
  Chemically synthesized
ggaagauccaaauccgcua

SEQ ID NO: 4823 - RNA, 19 nt, Artificial
  Chemically synthesized
guaugguaagcccguuuua

SEQ ID NO: 4824 - RNA, 19 nt, Artificial
  Chemically synthesized
auuuuugccucaaccauaa

SEQ ID NO: 4825 - RNA, 19 nt, Artificial
  Chemically synthesized
cccaggagaacaagcugaa

SEQ ID NO: 4826 - RNA, 19 nt, Artificial
  Chemically synthesized
aaaugcugcucauggaaga

SEQ ID NO: 4827 - RNA, 19 nt, Artificial
  Chemically synthesized
accauaagcgacauugaaa

SEQ ID NO: 4828 - RNA, 19 nt, Artificial
  Chemically synthesized
gguugaucagcuuagucag

SEQ ID NO: 4829 - RNA, 19 nt, Artificial
  Chemically synthesized
cggagggaagaagugaaau

SEQ ID NO: 4830 - RNA, 19 nt, Artificial
  Chemically synthesized
ccuucagaaaguacugaga

SEQ ID NO: 4831 - RNA, 19 nt, Artificial
  Chemically synthesized
ugugcuguuuuccaggaaa

SEQ ID NO: 4832 - RNA, 19 nt, Artificial
  Chemically synthesized
cagugcucccaguuucuau

SEQ ID NO: 4833 - RNA, 19 nt, Artificial
  Chemically synthesized
cagcagucuauuucugaaa

SEQ ID NO: 4834 - RNA, 19 nt, Artificial
  Chemically synthesized
ugcagaggaucaucuauga

SEQ ID NO: 4835 - RNA, 19 nt, Artificial
  Chemically synthesized
gggugugaugaacaaaggu

SEQ ID NO: 4836 - RNA, 19 nt, Artificial
  Chemically synthesized
agcggaccaacuugaagaa

SEQ ID NO: 4837 - RNA, 19 nt, Artificial
  Chemically synthesized
gaaagagccugagcaggau

SEQ ID NO: 4838 - RNA, 19 nt, Artificial
  Chemically synthesized
agcagucuauuucugaaaa

SEQ ID NO: 4839 - RNA, 19 nt, Artificial
  Chemically synthesized
gguugggaauccacguguu

SEQ ID NO: 4840 - RNA, 19 nt, Artificial
  Chemically synthesized
gauggacaagcgaaucagu

SEQ ID NO: 4841 - RNA, 19 nt, Artificial
  Chemically synthesized
agauguugguugccaagga

SEQ ID NO: 4842 - RNA, 19 nt, Artificial
  Chemically synthesized
aaaagaagcaggaaguaca

SEQ ID NO: 4843 - RNA, 19 nt, Artificial
  Chemically synthesized
agcggcgguggaguuaaaa

SEQ ID NO: 4844 - RNA, 19 nt, Artificial
  Chemically synthesized
gcacaauaaacccgucuca

SEQ ID NO: 4845 - RNA, 19 nt, Artificial
  Chemically synthesized
ggcucuauuuuucauguau

SEQ ID NO: 4846 - RNA, 19 nt, Artificial
  Chemically synthesized
agauucguaaccaacuuaa

SEQ ID NO: 4847 - RNA, 19 nt, Artificial
  Chemically synthesized
acuacagcaaaaucaugaa

SEQ ID NO: 4848 - RNA, 19 nt, Artificial
  Chemically synthesized
ggaagauuuaaagaaagga

SEQ ID NO: 4849 - RNA, 19 nt, Artificial
  Chemically synthesized
gacgcuguguaaaugugca

SEQ ID NO: 4850 - RNA, 19 nt, Artificial
  Chemically synthesized
ccauuaacugggagaggua

SEQ ID NO: 4851 - RNA, 19 nt, Artificial
  Chemically synthesized
caaaacuucagcagcagaa

SEQ ID NO: 4852 - RNA, 19 nt, Artificial
  Chemically synthesized
ggcuguauccacggaucaa

SEQ ID NO: 4853 - RNA, 19 nt, Artificial
  Chemically synthesized
ccauuuuugccucaaccau

SEQ ID NO: 4854 - RNA, 19 nt, Artificial
  Chemically synthesized
accaggaacaaaauucaaa

SEQ ID NO: 4855 - RNA, 19 nt, Artificial
  Chemically synthesized
aaaagugaacgcccuugua

SEQ ID NO: 4856 - RNA, 19 nt, Artificial
  Chemically synthesized
cagacaagugugaggagau

SEQ ID NO: 4857 - RNA, 19 nt, Artificial
  Chemically synthesized
gauuuuggugucaacguga

SEQ ID NO: 4858 - RNA, 19 nt, Artificial
  Chemically synthesized
gaguggugccgccauuuuu

SEQ ID NO: 4859 - RNA, 19 nt, Artificial
  Chemically synthesized
ccgucagcagcagucuauu

SEQ ID NO: 4860 - RNA, 19 nt, Artificial
  Chemically synthesized
ugccaauuacuauaaaucc

SEQ ID NO: 4861 - RNA, 19 nt, Artificial
  Chemically synthesized
gccgauguggacaauggaa

SEQ ID NO: 4862 - RNA, 19 nt, Artificial
  Chemically synthesized
cagcacacagcgccuuaaa

SEQ ID NO: 4863 - RNA, 19 nt, Artificial
  Chemically synthesized
ccgauguggacaauggaaa

SEQ ID NO: 4864 - RNA, 19 nt, Artificial
  Chemically synthesized
aacucuuaaauaagcgcaa

SEQ ID NO: 4865 - RNA, 19 nt, Artificial
  Chemically synthesized
guguguaugccucccagua

SEQ ID NO: 4866 - RNA, 19 nt, Artificial
  Chemically synthesized
acuuaaccaggaacaaaau

SEQ ID NO: 4867 - RNA, 19 nt, Artificial
  Chemically synthesized
aaaagcugggugugaugaa

SEQ ID NO: 4868 - RNA, 19 nt, Artificial
  Chemically synthesized
cucucaguauugccucaaa

SEQ ID NO: 4869 - RNA, 19 nt, Artificial
  Chemically synthesized
gcagucuauuucugaaaau

SEQ ID NO: 4870 - RNA, 19 nt, Artificial
  Chemically synthesized
guguguacagacucacuga

SEQ ID NO: 4871 - RNA, 19 nt, Artificial
  Chemically synthesized
aaccaggaacaaaauucaa

SEQ ID NO: 4872 - RNA, 19 nt, Artificial
  Chemically synthesized
acuacagauucguaaccaa

SEQ ID NO: 4873 - RNA, 19 nt, Artificial
  Chemically synthesized
cacugaggugugaauugua

SEQ ID NO: 4874 - RNA, 19 nt, Artificial
  Chemically synthesized
uggaaacuggccaacauua

SEQ ID NO: 4875 - RNA, 19 nt, Artificial
  Chemically synthesized
acauaguguggugaagaaa

SEQ ID NO: 4876 - RNA, 19 nt, Artificial
  Chemically synthesized
uaaaaagacuguaccaaga

SEQ ID NO: 4877 - RNA, 19 nt, Artificial
  Chemically synthesized
cggcgguggaguuaaaaag

SEQ ID NO: 4878 - RNA, 19 nt, Artificial
  Chemically synthesized
gagguacuuucgccuccaa

SEQ ID NO: 4879 - RNA, 19 nt, Artificial
  Chemically synthesized
aggagauggaggaaggcua

SEQ ID NO: 4880 - RNA, 19 nt, Artificial
  Chemically synthesized
gaaaaugaaaagcuucaga

SEQ ID NO: 4881 - RNA, 19 nt, Artificial
  Chemically synthesized
agugaauucaaguuccaua

SEQ ID NO: 4882 - RNA, 19 nt, Artificial
  Chemically synthesized
ccagucuuacaauggcaaa

SEQ ID NO: 4883 - RNA, 19 nt, Artificial
  Chemically synthesized
cagugaagacagaagcucu

SEQ ID NO: 4884 - RNA, 19 nt, Artificial
  Chemically synthesized
gaggaaggcuacauccagu

SEQ ID NO: 4885 - RNA, 19 nt, Artificial
  Chemically synthesized
cauugaaacugcugcagac

SEQ ID NO: 4886 - RNA, 19 nt, Artificial
  Chemically synthesized
cacacuucccacacaugau

SEQ ID NO: 4887 - RNA, 19 nt, Artificial
  Chemically synthesized
aaauguguguacagacuca

SEQ ID NO: 4888 - RNA, 19 nt, Artificial
  Chemically synthesized
cacuguagcccaucaccuu

SEQ ID NO: 4889 - RNA, 19 nt, Artificial
  Chemically synthesized
cagacccaagagcaacgaa

SEQ ID NO: 4890 - RNA, 19 nt, Artificial
  Chemically synthesized
gggaaaaaaauucagcuga

SEQ ID NO: 4891 - RNA, 19 nt, Artificial
  Chemically synthesized
gaagaaaagugaacgcccu

SEQ ID NO: 4892 - RNA, 19 nt, Artificial
  Chemically synthesized
cgaacacucgccugaacuu

SEQ ID NO: 4893 - RNA, 19 nt, Artificial
  Chemically synthesized
cccugcaagcucaaauuca

SEQ ID NO: 4894 - RNA, 19 nt, Artificial
  Chemically synthesized
caccaaaggagccucugua

SEQ ID NO: 4895 - RNA, 19 nt, Artificial
  Chemically synthesized
caaaaucaugaacggcaau

SEQ ID NO: 4896 - RNA, 19 nt, Artificial
  Chemically synthesized
ccuuaggcucuauuuuuca

SEQ ID NO: 4897 - RNA, 19 nt, Artificial
  Chemically synthesized
caucagaugccaaugauaa

SEQ ID NO: 4898 - RNA, 19 nt, Artificial
  Chemically synthesized
aggacgaaagcgagacuga

SEQ ID NO: 4899 - RNA, 19 nt, Artificial
  Chemically synthesized
aagccacaccaccuaagaa

SEQ ID NO: 4900 - RNA, 19 nt, Artificial
  Chemically synthesized
cugucaugcugcucagugu

SEQ ID NO: 4901 - RNA, 19 nt, Artificial
  Chemically synthesized
gacaagucgacuacagcaa

SEQ ID NO: 4902 - RNA, 19 nt, Artificial
  Chemically synthesized
uggacaagcgaaucaguga

SEQ ID NO: 4903 - RNA, 19 nt, Artificial
  Chemically synthesized
ggguugaucagcuuaguca

SEQ ID NO: 4904 - RNA, 19 nt, Artificial
  Chemically synthesized
cuguacauaguguggugaa

SEQ ID NO: 4905 - RNA, 19 nt, Artificial
  Chemically synthesized
gaaucagugaacugcguga

SEQ ID NO: 4906 - RNA, 19 nt, Artificial
  Chemically synthesized
guuaaagcaguguauggua

SEQ ID NO: 4907 - RNA, 19 nt, Artificial
  Chemically synthesized
agugcucccaguuucuaua

SEQ ID NO: 4908 - RNA, 19 nt, Artificial
  Chemically synthesized
ucgugcaaugagaggacaa

SEQ ID NO: 4909 - RNA, 19 nt, Artificial
  Chemically synthesized
cagugaauucaaguuccau

SEQ ID NO: 4910 - RNA, 19 nt, Artificial
  Chemically synthesized
agcaacgaacucagagaaa

SEQ ID NO: 4911 - RNA, 19 nt, Artificial
  Chemically synthesized
cgcuaaugauggaaacugg

SEQ ID NO: 4912 - RNA, 19 nt, Artificial
  Chemically synthesized
gcuguauccacggaucaaa

SEQ ID NO: 4913 - RNA, 19 nt, Artificial
  Chemically synthesized
gccucaaccauaagcgaca

SEQ ID NO: 4914 - RNA, 19 nt, Artificial
  Chemically synthesized
agugccauguuccaggaaa

SEQ ID NO: 4915 - RNA, 19 nt, Artificial
  Chemically synthesized
gaaaagcuucagaaauuga

SEQ ID NO: 4916 - RNA, 19 nt, Artificial
  Chemically synthesized
caagcugaagaaaauucgu

SEQ ID NO: 4917 - RNA, 19 nt, Artificial
  Chemically synthesized
aggaaagcugcagcuagaa

SEQ ID NO: 4918 - RNA, 19 nt, Artificial
  Chemically synthesized
caccgaaucggacacucau

SEQ ID NO: 4919 - RNA, 19 nt, Artificial
  Chemically synthesized
ugaacaaagguguggcgua

SEQ ID NO: 4920 - RNA, 19 nt, Artificial
  Chemically synthesized
aacagcagcagauugaaaa

SEQ ID NO: 4921 - RNA, 19 nt, Artificial
  Chemically synthesized
gucucuaugggaaaaaaau

SEQ ID NO: 4922 - RNA, 19 nt, Artificial
  Chemically synthesized
ugggaauccacguguugaa

SEQ ID NO: 4923 - RNA, 19 nt, Artificial
  Chemically synthesized
acagcagcagauugaaaau

SEQ ID NO: 4924 - RNA, 19 nt, Artificial
  Chemically synthesized
ccauacccuuugaucauau

SEQ ID NO: 4925 - RNA, 19 nt, Artificial
  Chemically synthesized
gagaguucgaucuggugca

SEQ ID NO: 4926 - RNA, 19 nt, Artificial
  Chemically synthesized
guuuuaccuucggguucaa

SEQ ID NO: 4927 - RNA, 19 nt, Artificial
  Chemically synthesized
agcuaugggacauacccaa

SEQ ID NO: 4928 - RNA, 19 nt, Artificial
  Chemically synthesized
gccuuaaauaagucaguua

SEQ ID NO: 4929 - RNA, 19 nt, Artificial
  Chemically synthesized
gcuaccaggagccacuuaa

SEQ ID NO: 4930 - RNA, 19 nt, Artificial
  Chemically synthesized
auugaaagaacgaguugaa

SEQ ID NO: 4931 - RNA, 19 nt, Artificial
  Chemically synthesized
cagcguccacaaugugaau

SEQ ID NO: 4932 - RNA, 19 nt, Artificial
  Chemically synthesized
ucaaaugcugcucauggaa

SEQ ID NO: 4933 - RNA, 19 nt, Artificial
  Chemically synthesized
gugaacgucucuaugggaa

SEQ ID NO: 4934 - RNA, 19 nt, Artificial
  Chemically synthesized
aauaaauguaccuggagaa

SEQ ID NO: 4935 - RNA, 19 nt, Artificial
  Chemically synthesized
ccaaggaacagcguuuaca

SEQ ID NO: 4936 - RNA, 19 nt, Artificial
  Chemically synthesized
acaagugugaggagaugga

SEQ ID NO: 4937 - RNA, 19 nt, Artificial
  Chemically synthesized
cuccauguaccuccagcaa

SEQ ID NO: 4938 - RNA, 19 nt, Artificial
  Chemically synthesized
aagacuguaccaagaacua

SEQ ID NO: 4939 - RNA, 19 nt, Artificial
  Chemically synthesized
gcagacaagugugaggaga

SEQ ID NO: 4940 - RNA, 19 nt, Artificial
  Chemically synthesized
aggacugaauuuugccaau

SEQ ID NO: 4941 - RNA, 19 nt, Artificial
  Chemically synthesized
gcugcagcuagaaaauggu

SEQ ID NO: 4942 - RNA, 19 nt, Artificial
  Chemically synthesized
uggacaauggaaacaccaa

SEQ ID NO: 4943 - RNA, 19 nt, Artificial
  Chemically synthesized
guugcugcccaguguguau

SEQ ID NO: 4944 - RNA, 19 nt, Artificial
  Chemically synthesized
aggaaaagcugggugugau

SEQ ID NO: 4945 - RNA, 19 nt, Artificial
  Chemically synthesized
gauguuguagaauuuugca

SEQ ID NO: 4946 - RNA, 19 nt, Artificial
  Chemically synthesized
aacugagaacagugaacaa

SEQ ID NO: 4947 - RNA, 19 nt, Artificial
  Chemically synthesized
gagccacuuaagagauuau

SEQ ID NO: 4948 - RNA, 19 nt, Artificial
  Chemically synthesized
guaaaaauguguguacaga

SEQ ID NO: 4949 - RNA, 19 nt, Artificial
  Chemically synthesized
aaacuggccaacauuaaaa

SEQ ID NO: 4950 - RNA, 19 nt, Artificial
  Chemically synthesized
aguuaaaaagacuguacca

SEQ ID NO: 4951 - RNA, 19 nt, Artificial
  Chemically synthesized
ucuugagcaacaaugaaca

SEQ ID NO: 4952 - RNA, 19 nt, Artificial
  Chemically synthesized
gucaguuaaagcaguguau

SEQ ID NO: 4953 - RNA, 19 nt, Artificial
  Chemically synthesized
ccuuggagcacugacugua

SEQ ID NO: 4954 - RNA, 19 nt, Artificial
  Chemically synthesized
uguugguugccaaggaaca

SEQ ID NO: 4955 - RNA, 19 nt, Artificial
  Chemically synthesized
agguggaagaucccagcaa

SEQ ID NO: 4956 - RNA, 19 nt, Artificial
  Chemically synthesized
cgagauugguaaagugcca

SEQ ID NO: 4957 - RNA, 19 nt, Artificial
  Chemically synthesized
gccauuaagaagucccaua

SEQ ID NO: 4958 - RNA, 19 nt, Artificial
  Chemically synthesized
aauggagucaggugcugga

SEQ ID NO: 4959 - RNA, 19 nt, Artificial
  Chemically synthesized
uuuugacuagaccauucaa

SEQ ID NO: 4960 - RNA, 19 nt, Artificial
  Chemically synthesized
cagacucacugaugcagca

SEQ ID NO: 4961 - RNA, 19 nt, Artificial
  Chemically synthesized
ugaaauuuuuccuucgaca

SEQ ID NO: 4962 - RNA, 19 nt, Artificial
  Chemically synthesized
ggaaaagcugggugugaug

SEQ ID NO: 4963 - RNA, 19 nt, Artificial
  Chemically synthesized
uagcagacagcguccacaa

SEQ ID NO: 4964 - RNA, 19 nt, Artificial
  Chemically synthesized
auggguuccagucuuacaa

SEQ ID NO: 4965 - RNA, 19 nt, Artificial
  Chemically synthesized
acaugauccuucuucccuu

SEQ ID NO: 4966 - RNA, 19 nt, Artificial
  Chemically synthesized
ucaucuaugagguggaaga

SEQ ID NO: 4967 - RNA, 19 nt, Artificial
  Chemically synthesized
ggugcagaggaucaucuau

SEQ ID NO: 4968 - RNA, 19 nt, Artificial
  Chemically synthesized
ugauaaagggucaaggcca

SEQ ID NO: 4969 - RNA, 19 nt, Artificial
  Chemically synthesized
cuguuuucuugagcaacaa

SEQ ID NO: 4970 - RNA, 19 nt, Artificial
  Chemically synthesized
auuuuggugucaacgugaa

SEQ ID NO: 4971 - RNA, 19 nt, Artificial
  Chemically synthesized
ccaagagcaacgaacucag

SEQ ID NO: 4972 - RNA, 19 nt, Artificial
  Chemically synthesized
ggagcacugacuguacaua

SEQ ID NO: 4973 - RNA, 19 nt, Artificial
  Chemically synthesized
cuggcugauaaagggucaa

SEQ ID NO: 4974 - RNA, 19 nt, Artificial
  Chemically synthesized
cuaccaggagccacuuaag

SEQ ID NO: 4975 - RNA, 19 nt, Artificial
  Chemically synthesized
ccauucaaagcuacccgaa

SEQ ID NO: 4976 - RNA, 19 nt, Artificial
  Chemically synthesized
caacagauucagcagagga

SEQ ID NO: 4977 - RNA, 19 nt, Artificial
  Chemically synthesized
gacuguaccaagaacuaca

SEQ ID NO: 4978 - RNA, 19 nt, Artificial
  Chemically synthesized
agaggaucaucuaugaggu

SEQ ID NO: 4979 - RNA, 19 nt, Artificial
  Chemically synthesized
ugaagaaaauucgugcaau

SEQ ID NO: 4980 - RNA, 19 nt, Artificial
  Chemically synthesized
aucagaugccaaugauaau

SEQ ID NO: 4981 - RNA, 19 nt, Artificial
  Chemically synthesized
acaagcggaccaacuugaa

SEQ ID NO: 4982 - RNA, 19 nt, Artificial
  Chemically synthesized
caggaaaagcuggguguga

SEQ ID NO: 4983 - RNA, 19 nt, Artificial
  Chemically synthesized
uccagaagcugcuguacca

SEQ ID NO: 4984 - RNA, 19 nt, Artificial
  Chemically synthesized
cagcugccauuuagcugaa

SEQ ID NO: 4985 - RNA, 19 nt, Artificial
  Chemically synthesized
gcagcuagaaaauggucuu

SEQ ID NO: 4986 - RNA, 19 nt, Artificial
  Chemically synthesized
gcuccucacaacagauuca

SEQ ID NO: 4987 - RNA, 19 nt, Artificial
  Chemically synthesized
ugagcaacaaugaacagau

SEQ ID NO: 4988 - RNA, 19 nt, Artificial
  Chemically synthesized
gugugaugaacaaaggugu

SEQ ID NO: 4989 - RNA, 19 nt, Artificial
  Chemically synthesized
uaauaaauguaccuggaga

SEQ ID NO: 4990 - RNA, 19 nt, Artificial
  Chemically synthesized
ccaagugacaacugggaga

SEQ ID NO: 4991 - RNA, 19 nt, Artificial
  Chemically synthesized
gccacaccaccuaagaauu

SEQ ID NO: 4992 - RNA, 19 nt, Artificial
  Chemically synthesized
ccuuugaucauaugaugua

SEQ ID NO: 4993 - RNA, 19 nt, Artificial
  Chemically synthesized
cccaacugagaacagugaa

SEQ ID NO: 4994 - RNA, 19 nt, Artificial
  Chemically synthesized
caggcuccucacaacagau

SEQ ID NO: 4995 - RNA, 19 nt, Artificial
  Chemically synthesized
ugaagaagcccaacucgga

SEQ ID NO: 4996 - RNA, 19 nt, Artificial
  Chemically synthesized
agaaaauggucuuaauggu

SEQ ID NO: 4997 - RNA, 19 nt, Artificial
  Chemically synthesized
ugccaauggaaaccuggaa

SEQ ID NO: 4998 - RNA, 19 nt, Artificial
  Chemically synthesized
ucaucagaugccaaugaua

SEQ ID NO: 4999 - RNA, 19 nt, Artificial
  Chemically synthesized
uaaccaggaacaaaauuca

SEQ ID NO: 5000 - RNA, 19 nt, Artificial
  Chemically synthesized
cuguaccagcgcuucaaca

SEQ ID NO: 5001 - RNA, 19 nt, Artificial
  Chemically synthesized
gcgccuuaaauaagucagu

SEQ ID NO: 5002 - RNA, 19 nt, Artificial
  Chemically synthesized
ugcuggauuuuggugucaa

SEQ ID NO: 5003 - RNA, 19 nt, Artificial
  Chemically synthesized
agggaagaagugaaauuuu

SEQ ID NO: 5004 - RNA, 19 nt, Artificial
  Chemically synthesized
cuuaauggugcucacuuua

SEQ ID NO: 5005 - RNA, 19 nt, Artificial
  Chemically synthesized
uaacuguuuucuugagcaa

SEQ ID NO: 5006 - RNA, 19 nt, Artificial
  Chemically synthesized
cagauucguaaccaacuua

SEQ ID NO: 5007 - RNA, 19 nt, Artificial
  Chemically synthesized
cacugacaguggccauuag

SEQ ID NO: 5008 - RNA, 19 nt, Artificial
  Chemically synthesized
cugcaauuuuaaggguuga

SEQ ID NO: 5009 - RNA, 19 nt, Artificial
  Chemically synthesized
cuucagaaaguacugagaa

SEQ ID NO: 5010 - RNA, 19 nt, Artificial
  Chemically synthesized
ccuguuccaguucaccuaa

SEQ ID NO: 5011 - RNA, 19 nt, Artificial
  Chemically synthesized
aggaaguacagacugcaau

SEQ ID NO: 5012 - RNA, 19 nt, Artificial
  Chemically synthesized
gcaacaaugaacagauuuu

SEQ ID NO: 5013 - RNA, 19 nt, Artificial
  Chemically synthesized
cgcgaugaugccgaugaua

SEQ ID NO: 5014 - RNA, 19 nt, Artificial
  Chemically synthesized
acagugaauucaaguucca

SEQ ID NO: 5015 - RNA, 19 nt, Artificial
  Chemically synthesized
caucgagauugguaaagug

SEQ ID NO: 5016 - RNA, 19 nt, Artificial
  Chemically synthesized
gaaggcagcugccauuuag

SEQ ID NO: 5017 - RNA, 19 nt, Artificial
  Chemically synthesized
cagugccauguuccaggaa

SEQ ID NO: 5018 - RNA, 19 nt, Artificial
  Chemically synthesized
gacagaagcucuuacugac

SEQ ID NO: 5019 - RNA, 19 nt, Artificial
  Chemically synthesized
aaaaagacuguaccaagaa

SEQ ID NO: 5020 - RNA, 19 nt, Artificial
  Chemically synthesized
gcugcucauggaagaucca

SEQ ID NO: 5021 - RNA, 19 nt, Artificial
  Chemically synthesized
uguacgaacaucuucagaa

SEQ ID NO: 5022 - RNA, 19 nt, Artificial
  Chemically synthesized
gacgaaagcgagacugagu

SEQ ID NO: 5023 - RNA, 19 nt, Artificial
  Chemically synthesized
gccauuuuugccucaacca

SEQ ID NO: 5024 - RNA, 19 nt, Artificial
  Chemically synthesized
agcagcagauugaaaauca

SEQ ID NO: 5025 - RNA, 19 nt, Artificial
  Chemically synthesized
cuguuccaguucaccuaaa

SEQ ID NO: 5026 - RNA, 19 nt, Artificial
  Chemically synthesized
agagugaugcagaccugga

SEQ ID NO: 5027 - RNA, 19 nt, Artificial
  Chemically synthesized
cauguaugagucgugugua

SEQ ID NO: 5028 - RNA, 19 nt, Artificial
  Chemically synthesized
uugcaaggaaccuggagaa

SEQ ID NO: 5029 - RNA, 19 nt, Artificial
  Chemically synthesized
guaaccaacuuaaccagga

SEQ ID NO: 5030 - RNA, 19 nt, Artificial
  Chemically synthesized
cguuuuaccuucggguuca

SEQ ID NO: 5031 - RNA, 19 nt, Artificial
  Chemically synthesized
gugaauucaaguuccauau

SEQ ID NO: 5032 - RNA, 19 nt, Artificial
  Chemically synthesized
guagaauuuugcaaggaac

SEQ ID NO: 5033 - RNA, 19 nt, Artificial
  Chemically synthesized
ccauaagcgacauugaaac

SEQ ID NO: 5034 - RNA, 19 nt, Artificial
  Chemically synthesized
acggcaaucugucugcuga

SEQ ID NO: 5035 - RNA, 19 nt, Artificial
  Chemically synthesized
uggaguuaaaaagacugua

SEQ ID NO: 5036 - RNA, 19 nt, Artificial
  Chemically synthesized
ccugcaagcucaaauucag

SEQ ID NO: 5037 - RNA, 19 nt, Artificial
  Chemically synthesized
gcgaaucagugaacugcgu

SEQ ID NO: 5038 - RNA, 19 nt, Artificial
  Chemically synthesized
cccacuuucaaaacaccca

SEQ ID NO: 5039 - RNA, 19 nt, Artificial
  Chemically synthesized
gaacaagcugaagaaaauu

SEQ ID NO: 5040 - RNA, 19 nt, Artificial
  Chemically synthesized
aaagcugcagcuagaaaau

SEQ ID NO: 5041 - RNA, 19 nt, Artificial
  Chemically synthesized
ucagaaauugaaagaacga

SEQ ID NO: 5042 - RNA, 19 nt, Artificial
  Chemically synthesized
gauucguaaccaacuuaac

SEQ ID NO: 5043 - RNA, 19 nt, Artificial
  Chemically synthesized
gcugaagaaaauucgugca

SEQ ID NO: 5044 - RNA, 19 nt, Artificial
  Chemically synthesized
gcuguguaaaugugcacaa

SEQ ID NO: 5045 - RNA, 19 nt, Artificial
  Chemically synthesized
aauggguuccagucuuaca

SEQ ID NO: 5046 - RNA, 19 nt, Artificial
  Chemically synthesized
ggauuuuggugucaacgug

SEQ ID NO: 5047 - RNA, 19 nt, Artificial
  Chemically synthesized
uguacguacaggcuuuuua

SEQ ID NO: 5048 - RNA, 19 nt, Artificial
  Chemically synthesized
ggaagaagugaaauuuuuc

SEQ ID NO: 5049 - RNA, 19 nt, Artificial
  Chemically synthesized
uggucuuaauggugcucac

SEQ ID NO: 5050 - RNA, 19 nt, Artificial
  Chemically synthesized
cagccaccuucagaaagua

SEQ ID NO: 5051 - RNA, 19 nt, Artificial
  Chemically synthesized
uggugcagaggaucaucua

SEQ ID NO: 5052 - RNA, 19 nt, Artificial
  Chemically synthesized
gaacucuuaaauaagcgca

SEQ ID NO: 5053 - RNA, 19 nt, Artificial
  Chemically synthesized
cacagcgccuuaaauaagu

SEQ ID NO: 5054 - RNA, 19 nt, Artificial
  Chemically synthesized
gcuggauuuuggugucaac

SEQ ID NO: 5055 - RNA, 19 nt, Artificial
  Chemically synthesized
gcguuuacauuuucuaaag

SEQ ID NO: 5056 - RNA, 19 nt, Artificial
  Chemically synthesized
gucucucaguauugccuca

SEQ ID NO: 5057 - RNA, 19 nt, Artificial
  Chemically synthesized
acgaacucagagaaaugua

SEQ ID NO: 5058 - RNA, 19 nt, Artificial
  Chemically synthesized
cuauaacaccggaaacaac

SEQ ID NO: 5059 - RNA, 19 nt, Artificial
  Chemically synthesized
cugcaagcucaaauucagu

SEQ ID NO: 5060 - RNA, 19 nt, Artificial
  Chemically synthesized
gauaaagggucaaggccac

SEQ ID NO: 5061 - RNA, 19 nt, Artificial
  Chemically synthesized
caguguaugguaagcccgu

SEQ ID NO: 5062 - RNA, 19 nt, Artificial
  Chemically synthesized
uucagaaaguacugagaaa

SEQ ID NO: 5063 - RNA, 19 nt, Artificial
  Chemically synthesized
guauuuuuugacuagacca

SEQ ID NO: 5064 - RNA, 19 nt, Artificial
  Chemically synthesized
agaaggcagcugccauuua

SEQ ID NO: 5065 - RNA, 19 nt, Artificial
  Chemically synthesized
gucccauacccuuugauca

SEQ ID NO: 5066 - RNA, 19 nt, Artificial
  Chemically synthesized
ccucacaacagauucagca

SEQ ID NO: 5067 - RNA, 19 nt, Artificial
  Chemically synthesized
gaagcaggaaguacagacu

SEQ ID NO: 5068 - RNA, 19 nt, Artificial
  Chemically synthesized
gagauggaggaaggcuaca

SEQ ID NO: 5069 - RNA, 19 nt, Artificial
  Chemically synthesized
acagcguuuacauuuucua

SEQ ID NO: 5070 - RNA, 19 nt, Artificial
  Chemically synthesized
cauuuagcugaagugugga

SEQ ID NO: 5071 - RNA, 19 nt, Artificial
  Chemically synthesized
acauggagguggccaugau

SEQ ID NO: 5072 - RNA, 19 nt, Artificial
  Chemically synthesized
agucguguguaauuuaugu

SEQ ID NO: 5073 - RNA, 19 nt, Artificial
  Chemically synthesized
ugaugccgaugauauuaac

SEQ ID NO: 5074 - RNA, 19 nt, Artificial
  Chemically synthesized
agagcuccaagauauggca

SEQ ID NO: 5075 - RNA, 19 nt, Artificial
  Chemically synthesized
cgagauguuguagaauuuu

SEQ ID NO: 5076 - RNA, 19 nt, Artificial
  Chemically synthesized
caagccacaccaccuaaga

SEQ ID NO: 5077 - RNA, 19 nt, Artificial
  Chemically synthesized
agccggcagaggacaauaa

SEQ ID NO: 5078 - RNA, 19 nt, Artificial
  Chemically synthesized
cgucagcagcagucuauuu

SEQ ID NO: 5079 - RNA, 19 nt, Artificial
  Chemically synthesized
agugaagacagaagcucuu

SEQ ID NO: 5080 - RNA, 19 nt, Artificial
  Chemically synthesized
cugaaaaagcgcagcucca

SEQ ID NO: 5081 - RNA, 19 nt, Artificial
  Chemically synthesized
aggugugaauuguacguac

SEQ ID NO: 5082 - RNA, 19 nt, Artificial
  Chemically synthesized
aagaacuacagauucguaa

SEQ ID NO: 5083 - RNA, 19 nt, Artificial
  Chemically synthesized
guuccuauaacaccggaaa

SEQ ID NO: 5084 - RNA, 19 nt, Artificial
  Chemically synthesized
acugcgcugccucuuguaa

SEQ ID NO: 5085 - RNA, 19 nt, Artificial
  Chemically synthesized
uggguuccagucuuacaau

SEQ ID NO: 5086 - RNA, 19 nt, Artificial
  Chemically synthesized
caugcugcucagugugguu

SEQ ID NO: 5087 - RNA, 19 nt, Artificial
  Chemically synthesized
ccagacagugaauucaagu

SEQ ID NO: 5088 - RNA, 19 nt, Artificial
  Chemically synthesized
cgugugaauggcacgucau

SEQ ID NO: 5089 - RNA, 19 nt, Artificial
  Chemically synthesized
caggagccacuuaagagau

SEQ ID NO: 5090 - RNA, 19 nt, Artificial
  Chemically synthesized
aauucuagcucuuccguga

SEQ ID NO: 5091 - RNA, 19 nt, Artificial
  Chemically synthesized
gacuacagcaaaaucauga

SEQ ID NO: 5092 - RNA, 19 nt, Artificial
  Chemically synthesized
cguaugcucugugggacua

SEQ ID NO: 5093 - RNA, 19 nt, Artificial
  Chemically synthesized
auggaaacaccaaugccaa

SEQ ID NO: 5094 - RNA, 19 nt, Artificial
  Chemically synthesized
uggugcucacuuuagcaga

SEQ ID NO: 5095 - RNA, 19 nt, Artificial
  Chemically synthesized
acagcguccacaaugugaa

SEQ ID NO: 5096 - RNA, 19 nt, Artificial
  Chemically synthesized
aagagauuauugugcuguu

SEQ ID NO: 5097 - RNA, 19 nt, Artificial
  Chemically synthesized
augagucguguguaauuua

SEQ ID NO: 5098 - RNA, 19 nt, Artificial
  Chemically synthesized
ccauauacuccauguaccu

SEQ ID NO: 5099 - RNA, 19 nt, Artificial
  Chemically synthesized
aaggaaaacugaauggguu

SEQ ID NO: 5100 - RNA, 19 nt, Artificial
  Chemically synthesized
ucagcagaggauuuccgua

SEQ ID NO: 5101 - RNA, 19 nt, Artificial
  Chemically synthesized
guacugagaaagagccuga

SEQ ID NO: 5102 - RNA, 19 nt, Artificial
  Chemically synthesized
ugccgaugauauuaacugu

SEQ ID NO: 5103 - RNA, 19 nt, Artificial
  Chemically synthesized
aacagaaguuccuauaaca

SEQ ID NO: 5104 - RNA, 19 nt, Artificial
  Chemically synthesized
ccuccaagcuaugggacau

SEQ ID NO: 5105 - RNA, 19 nt, Artificial
  Chemically synthesized
gauugaaaaucagcagcag

SEQ ID NO: 5106 - RNA, 19 nt, Artificial
  Chemically synthesized
gcaggaaguacagacugca

SEQ ID NO: 5107 - RNA, 19 nt, Artificial
  Chemically synthesized
ccauuuagcugaagugugg

SEQ ID NO: 5108 - RNA, 19 nt, Artificial
  Chemically synthesized
cgugcaaugagaggacaag

SEQ ID NO: 5109 - RNA, 19 nt, Artificial
  Chemically synthesized
guuaaaaagacuguaccaa

SEQ ID NO: 5110 - RNA, 19 nt, Artificial
  Chemically synthesized
guaauaaauguaccuggag

SEQ ID NO: 5111 - RNA, 19 nt, Artificial
  Chemically synthesized
agugugaggagauggagga

SEQ ID NO: 5112 - RNA, 19 nt, Artificial
  Chemically synthesized
ccugucgagauguuguaga

SEQ ID NO: 5113 - RNA, 19 nt, Artificial
  Chemically synthesized
uuuucuugagcaacaauga

SEQ ID NO: 5114 - RNA, 19 nt, Artificial
  Chemically synthesized
aggaaaagaagcaggaagu

SEQ ID NO: 5115 - RNA, 19 nt, Artificial
  Chemically synthesized
aauuguacguacaggcuuu

SEQ ID NO: 5116 - RNA, 19 nt, Artificial
  Chemically synthesized
aggauuuccguaccgccaa

SEQ ID NO: 5117 - RNA, 19 nt, Artificial
  Chemically synthesized
cugcugacgcuguguaaau

SEQ ID NO: 5118 - RNA, 19 nt, Artificial
  Chemically synthesized
cugaagaaaauucgugcaa

SEQ ID NO: 5119 - RNA, 19 nt, Artificial
  Chemically synthesized
ccucuguauggaaacaugu

SEQ ID NO: 5120 - RNA, 19 nt, Artificial
  Chemically synthesized
ugcugcugauagugaugga

SEQ ID NO: 5121 - RNA, 19 nt, Artificial
  Chemically synthesized
cuguguaaaugugcacaau

SEQ ID NO: 5122 - RNA, 19 nt, Artificial
  Chemically synthesized
caaggacgaaagcgagacu

SEQ ID NO: 5123 - RNA, 19 nt, Artificial
  Chemically synthesized
acauccagaagcugcugua

SEQ ID NO: 5124 - RNA, 19 nt, Artificial
  Chemically synthesized
ucuuaauggugcucacuuu

SEQ ID NO: 5125 - RNA, 19 nt, Artificial
  Chemically synthesized
cuaggcaacagcagcagau

SEQ ID NO: 5126 - RNA, 19 nt, Artificial
  Chemically synthesized
guugccagugaagacagaa

SEQ ID NO: 5127 - RNA, 19 nt, Artificial
  Chemically synthesized
aagcggaccaacuugaaga

SEQ ID NO: 5128 - RNA, 19 nt, Artificial
  Chemically synthesized
cuuaggcucuauuuuucau

SEQ ID NO: 5129 - RNA, 19 nt, Artificial
  Chemically synthesized
aucugucugcugaaauaga

SEQ ID NO: 5130 - RNA, 19 nt, Artificial
  Chemically synthesized
ucuucccuucaucaccaaa

SEQ ID NO: 5131 - RNA, 19 nt, Artificial
  Chemically synthesized
ggacugaauuuugccaauu

SEQ ID NO: 5132 - RNA, 19 nt, Artificial
  Chemically synthesized
agcuagaaaauggucuuaa

SEQ ID NO: 5133 - RNA, 19 nt, Artificial
  Chemically synthesized
acccgaacuauguuggaaa

SEQ ID NO: 5134 - RNA, 19 nt, Artificial
  Chemically synthesized
cuuucucacacuucccaca

SEQ ID NO: 5135 - RNA, 19 nt, Artificial
  Chemically synthesized
agcagcagucuauuucuga

SEQ ID NO: 5136 - RNA, 19 nt, Artificial
  Chemically synthesized
uguugcugcccagugugua

SEQ ID NO: 5137 - RNA, 19 nt, Artificial
  Chemically synthesized
aaggguugaucagcuuagu

SEQ ID NO: 5138 - RNA, 19 nt, Artificial
  Chemically synthesized
cagugaacugcgugaacgu

SEQ ID NO: 5139 - RNA, 19 nt, Artificial
  Chemically synthesized
cuuucuccaguuugcccau

SEQ ID NO: 5140 - RNA, 19 nt, Artificial
  Chemically synthesized
uguuuucuugagcaacaau

SEQ ID NO: 5141 - RNA, 19 nt, Artificial
  Chemically synthesized
cggaaacaaccugucgaga

SEQ ID NO: 5142 - RNA, 19 nt, Artificial
  Chemically synthesized
cuucuucccuucaucacca

SEQ ID NO: 5143 - RNA, 19 nt, Artificial
  Chemically synthesized
acauugaaacugcugcaga

SEQ ID NO: 5144 - RNA, 19 nt, Artificial
  Chemically synthesized
caguucaccuaaaggcuga

SEQ ID NO: 5145 - RNA, 19 nt, Artificial
  Chemically synthesized
agaaauugaaagaacgagu

SEQ ID NO: 5146 - RNA, 19 nt, Artificial
  Chemically synthesized
gcuucagaaauugaaagaa

SEQ ID NO: 5147 - RNA, 19 nt, Artificial
  Chemically synthesized
cagacagcguccacaaugu

SEQ ID NO: 5148 - RNA, 19 nt, Artificial
  Chemically synthesized
ucggguucaaccucuccau

SEQ ID NO: 5149 - RNA, 19 nt, Artificial
  Chemically synthesized
aacagauucagcagaggau

SEQ ID NO: 5150 - RNA, 19 nt, Artificial
  Chemically synthesized
uaaauguaccuggagaaaa

SEQ ID NO: 5151 - RNA, 19 nt, Artificial
  Chemically synthesized
cgccuuaaauaagucaguu

SEQ ID NO: 5152 - RNA, 19 nt, Artificial
  Chemically synthesized
auagaaagguucagugcca

SEQ ID NO: 5153 - RNA, 19 nt, Artificial
  Chemically synthesized
gccgccauuuuugccucaa

SEQ ID NO: 5154 - RNA, 19 nt, Artificial
  Chemically synthesized
uacguacaggcuuuuuaua

SEQ ID NO: 5155 - RNA, 19 nt, Artificial
  Chemically synthesized
agucaguuaaagcagugua

SEQ ID NO: 5156 - RNA, 19 nt, Artificial
  Chemically synthesized
acuagaccauucaaagcua

SEQ ID NO: 5157 - RNA, 19 nt, Artificial
  Chemically synthesized
guaaagugccaccucccau

SEQ ID NO: 5158 - RNA, 19 nt, Artificial
  Chemically synthesized
aggccuuuccuggcugaua

SEQ ID NO: 5159 - RNA, 19 nt, Artificial
  Chemically synthesized
cagcuagaaaauggucuua

SEQ ID NO: 5160 - RNA, 19 nt, Artificial
  Chemically synthesized
agagcaacgaacucagaga

SEQ ID NO: 5161 - RNA, 19 nt, Artificial
  Chemically synthesized
cucuuaaauaagcgcaaca

SEQ ID NO: 5162 - RNA, 19 nt, Artificial
  Chemically synthesized
gcuaugugcccaaaaaccu

SEQ ID NO: 5163 - RNA, 19 nt, Artificial
  Chemically synthesized
acuccauguaccuccagca

SEQ ID NO: 5164 - RNA, 19 nt, Artificial
  Chemically synthesized
ugauccuucuucccuucau

SEQ ID NO: 5165 - RNA, 19 nt, Artificial
  Chemically synthesized
ucgugaaguuccugcugga

SEQ ID NO: 5166 - RNA, 19 nt, Artificial
  Chemically synthesized
acagauucguaaccaacuu

SEQ ID NO: 5167 - RNA, 19 nt, Artificial
  Chemically synthesized
guacuuucgccuccaagga

SEQ ID NO: 5168 - RNA, 19 nt, Artificial
  Chemically synthesized
caggaaaagaagcaggaag

SEQ ID NO: 5169 - RNA, 19 nt, Artificial
  Chemically synthesized
ccgccauuuuugccucaac

SEQ ID NO: 5170 - RNA, 19 nt, Artificial
  Chemically synthesized
gugaagacagaagcucuua

SEQ ID NO: 5171 - RNA, 19 nt, Artificial
  Chemically synthesized
aacaccaaugccaauggaa

SEQ ID NO: 5172 - RNA, 19 nt, Artificial
  Chemically synthesized
cagcgccuuaaauaaguca

SEQ ID NO: 5173 - RNA, 19 nt, Artificial
  Chemically synthesized
uguugaacuuacccucuca

SEQ ID NO: 5174 - RNA, 19 nt, Artificial
  Chemically synthesized
auugaaaaucagcagcaga

SEQ ID NO: 5175 - RNA, 19 nt, Artificial
  Chemically synthesized
caggagaacaagcugaaga

SEQ ID NO: 5176 - RNA, 19 nt, Artificial
  Chemically synthesized
uccuguuccaguucaccua

SEQ ID NO: 5177 - RNA, 19 nt, Artificial
  Chemically synthesized
guacagacucacugaugca

SEQ ID NO: 5178 - RNA, 19 nt, Artificial
  Chemically synthesized
aggcucuauuuuucaugua

SEQ ID NO: 5179 - RNA, 19 nt, Artificial
  Chemically synthesized
gccaccaucacaucgugaa

SEQ ID NO: 5180 - RNA, 19 nt, Artificial
  Chemically synthesized
agcaagccacaccaccuaa

SEQ ID NO: 5181 - RNA, 19 nt, Artificial
  Chemically synthesized
ccaauggaaaccuggaaga

SEQ ID NO: 5182 - RNA, 19 nt, Artificial
  Chemically synthesized
guuccauauacuccaugua

SEQ ID NO: 5183 - RNA, 19 nt, Artificial
  Chemically synthesized
ucaaguuccauauacucca

SEQ ID NO: 5184 - RNA, 19 nt, Artificial
  Chemically synthesized
accaaaggagccucuguau

SEQ ID NO: 5185 - RNA, 19 nt, Artificial
  Chemically synthesized
uggaaacaccaaugccaau

SEQ ID NO: 5186 - RNA, 19 nt, Artificial
  Chemically synthesized
ucagcugaaccgugugaau

SEQ ID NO: 5187 - RNA, 19 nt, Artificial
  Chemically synthesized
uggauuuauaguaauuggc

SEQ ID NO: 5188 - RNA, 19 nt, Artificial
  Chemically synthesized
uuguuauuguccucugccg

SEQ ID NO: 5189 - RNA, 19 nt, Artificial
  Chemically synthesized
guuguuguuauuguccucu

SEQ ID NO: 5190 - RNA, 19 nt, Artificial
  Chemically synthesized
cacguuguuguuauugucc

SEQ ID NO: 5191 - RNA, 19 nt, Artificial
  Chemically synthesized
uuucaguacguuuuucucc

SEQ ID NO: 5192 - RNA, 19 nt, Artificial
  Chemically synthesized
uucagcugaauuuuuuucc

SEQ ID NO: 5193 - RNA, 19 nt, Artificial
  Chemically synthesized
uugccguucaugauuuugc

SEQ ID NO: 5194 - RNA, 19 nt, Artificial
  Chemically synthesized
uuuugaauuuuguuccugg

SEQ ID NO: 5195 - RNA, 19 nt, Artificial
  Chemically synthesized
uuaccaaucucgaugcccg

SEQ ID NO: 5196 - RNA, 19 nt, Artificial
  Chemically synthesized
uuaaaccggacucucagcc

SEQ ID NO: 5197 - RNA, 19 nt, Artificial
  Chemically synthesized
uuguuguuauuguccucug

SEQ ID NO: 5198 - RNA, 19 nt, Artificial
  Chemically synthesized
uuuuucuccagguacauuu

SEQ ID NO: 5199 - RNA, 19 nt, Artificial
  Chemically synthesized
aauaucaucggcaucaucg

SEQ ID NO: 5200 - RNA, 19 nt, Artificial
  Chemically synthesized
uucuguuuuaauguuggcc

SEQ ID NO: 5201 - RNA, 19 nt, Artificial
  Chemically synthesized
uuucugaagauguucguac

SEQ ID NO: 5202 - RNA, 19 nt, Artificial
  Chemically synthesized
auuaagaccauuuucuagc

SEQ ID NO: 5203 - RNA, 19 nt, Artificial
  Chemically synthesized
uuacauuucucugaguucg

SEQ ID NO: 5204 - RNA, 19 nt, Artificial
  Chemically synthesized
acguuguuguuauuguccu

SEQ ID NO: 5205 - RNA, 19 nt, Artificial
  Chemically synthesized
uuuaccaaucucgaugccc

SEQ ID NO: 5206 - RNA, 19 nt, Artificial
  Chemically synthesized
uucagcagacagauugccg

SEQ ID NO: 5207 - RNA, 19 nt, Artificial
  Chemically synthesized
ucuagcugcagcuuuccug

SEQ ID NO: 5208 - RNA, 19 nt, Artificial
  Chemically synthesized
uuuuccuggaacauggcac

SEQ ID NO: 5209 - RNA, 19 nt, Artificial
  Chemically synthesized
uuuucuucaccacacuaug

SEQ ID NO: 5210 - RNA, 19 nt, Artificial
  Chemically synthesized
auucgcuuguccaucaugg

SEQ ID NO: 5211 - RNA, 19 nt, Artificial
  Chemically synthesized
guuguuauuguccucugcc

SEQ ID NO: 5212 - RNA, 19 nt, Artificial
  Chemically synthesized
uugggcuucuucaaguugg

SEQ ID NO: 5213 - RNA, 19 nt, Artificial
  Chemically synthesized
uuuuuaacuccaccgccgc

SEQ ID NO: 5214 - RNA, 19 nt, Artificial
  Chemically synthesized
uauauaaaaagccuguacg

SEQ ID NO: 5215 - RNA, 19 nt, Artificial
  Chemically synthesized
uucaaucugcugcuguugc

SEQ ID NO: 5216 - RNA, 19 nt, Artificial
  Chemically synthesized
uuguucaucacacccagcu

SEQ ID NO: 5217 - RNA, 19 nt, Artificial
  Chemically synthesized
uucacuucuucccuccgug

SEQ ID NO: 5218 - RNA, 19 nt, Artificial
  Chemically synthesized
uuagaaaauguaaacgcug

SEQ ID NO: 5219 - RNA, 19 nt, Artificial
  Chemically synthesized
uuucuauuucagcagacag

SEQ ID NO: 5220 - RNA, 19 nt, Artificial
  Chemically synthesized
uuuucaguacguuuuucuc

SEQ ID NO: 5221 - RNA, 19 nt, Artificial
  Chemically synthesized
uugcagucuguacuuccug

SEQ ID NO: 5222 - RNA, 19 nt, Artificial
  Chemically synthesized
uuauuuaaggcgcugugug

SEQ ID NO: 5223 - RNA, 19 nt, Artificial
  Chemically synthesized
uucuuuuccuggaacaugg

SEQ ID NO: 5224 - RNA, 19 nt, Artificial
  Chemically synthesized
uuuugcuguagucgacuug

SEQ ID NO: 5225 - RNA, 19 nt, Artificial
  Chemically synthesized
ucgacuuguccucucauug

SEQ ID NO: 5226 - RNA, 19 nt, Artificial
  Chemically synthesized
uucacugauucgcuugucc

SEQ ID NO: 5227 - RNA, 19 nt, Artificial
  Chemically synthesized
uucuacaacaucucgacag

SEQ ID NO: 5228 - RNA, 19 nt, Artificial
  Chemically synthesized
ucugucuucacuggcaacc

SEQ ID NO: 5229 - RNA, 19 nt, Artificial
  Chemically synthesized
acuaucagcagcauucacg

SEQ ID NO: 5230 - RNA, 19 nt, Artificial
  Chemically synthesized
uguuguuauuguccucugc

SEQ ID NO: 5231 - RNA, 19 nt, Artificial
  Chemically synthesized
uccagguacauuuauuaca

SEQ ID NO: 5232 - RNA, 19 nt, Artificial
  Chemically synthesized
uucaguacguuuuucucca

SEQ ID NO: 5233 - RNA, 19 nt, Artificial
  Chemically synthesized
uuccugcuucuuuuccugg

SEQ ID NO: 5234 - RNA, 19 nt, Artificial
  Chemically synthesized
uaaaauugcagucuguacu

SEQ ID NO: 5235 - RNA, 19 nt, Artificial
  Chemically synthesized
cuuauuuaagaguuccuuc

SEQ ID NO: 5236 - RNA, 19 nt, Artificial
  Chemically synthesized
uucacuuuucuucaccaca

SEQ ID NO: 5237 - RNA, 19 nt, Artificial
  Chemically synthesized
ucuuuuuaacuccaccgcc

SEQ ID NO: 5238 - RNA, 19 nt, Artificial
  Chemically synthesized
uggaacauggcacugaacc

SEQ ID NO: 5239 - RNA, 19 nt, Artificial
  Chemically synthesized
uguuauuguccucugccgg

SEQ ID NO: 5240 - RNA, 19 nt, Artificial
  Chemically synthesized
uuccuuggcaaccaacauc

SEQ ID NO: 5241 - RNA, 19 nt, Artificial
  Chemically synthesized
uuuucuagcugcagcuuuc

SEQ ID NO: 5242 - RNA, 19 nt, Artificial
  Chemically synthesized
uguaggauucacauugugg

SEQ ID NO: 5243 - RNA, 19 nt, Artificial
  Chemically synthesized
ucaaugucgcuuaugguug

SEQ ID NO: 5244 - RNA, 19 nt, Artificial
  Chemically synthesized
uuguuccugguuaaguugg

SEQ ID NO: 5245 - RNA, 19 nt, Artificial
  Chemically synthesized
auguaaacgcuguuccuug

SEQ ID NO: 5246 - RNA, 19 nt, Artificial
  Chemically synthesized
ucucuuaaguggcuccugg

SEQ ID NO: 5247 - RNA, 19 nt, Artificial
  Chemically synthesized
uuaaaucuuccaauugcug

SEQ ID NO: 5248 - RNA, 19 nt, Artificial
  Chemically synthesized
uuuuuuucccauagagacg

SEQ ID NO: 5249 - RNA, 19 nt, Artificial
  Chemically synthesized
uucuccugggcuucaacuc

SEQ ID NO: 5250 - RNA, 19 nt, Artificial
  Chemically synthesized
ugcacaaucagccuuuagg

SEQ ID NO: 5251 - RNA, 19 nt, Artificial
  Chemically synthesized
uaauuggcaaaauucaguc

SEQ ID NO: 5252 - RNA, 19 nt, Artificial
  Chemically synthesized
uugccuagcugccauaucu

SEQ ID NO: 5253 - RNA, 19 nt, Artificial
  Chemically synthesized
uaugguugaggcaaaaaug

SEQ ID NO: 5254 - RNA, 19 nt, Artificial
  Chemically synthesized
uuaaaauugcagucuguac

SEQ ID NO: 5255 - RNA, 19 nt, Artificial
  Chemically synthesized
uugguauauaaaaagccug

SEQ ID NO: 5256 - RNA, 19 nt, Artificial
  Chemically synthesized
auugguguuuccauugucc

SEQ ID NO: 5257 - RNA, 19 nt, Artificial
  Chemically synthesized
aaaaauuucacuucuuccc

SEQ ID NO: 5258 - RNA, 19 nt, Artificial
  Chemically synthesized
uugcugacuaagcugauca

SEQ ID NO: 5259 - RNA, 19 nt, Artificial
  Chemically synthesized
uuuucuucagcuuguucuc

SEQ ID NO: 5260 - RNA, 19 nt, Artificial
  Chemically synthesized
uuuguucaucacacccagc

SEQ ID NO: 5261 - RNA, 19 nt, Artificial
  Chemically synthesized
ucuguuuuaauguuggcca

SEQ ID NO: 5262 - RNA, 19 nt, Artificial
  Chemically synthesized
uuucuagcugcagcuuucc

SEQ ID NO: 5263 - RNA, 19 nt, Artificial
  Chemically synthesized
ugcuguagucgacuugucc

SEQ ID NO: 5264 - RNA, 19 nt, Artificial
  Chemically synthesized
uuugcuguagucgacuugu

SEQ ID NO: 5265 - RNA, 19 nt, Artificial
  Chemically synthesized
uuucugaagguggcugagg

SEQ ID NO: 5266 - RNA, 19 nt, Artificial
  Chemically synthesized
uuaagaguuccuucugcug

SEQ ID NO: 5267 - RNA, 19 nt, Artificial
  Chemically synthesized
uaggacuuggguauguccc

SEQ ID NO: 5268 - RNA, 19 nt, Artificial
  Chemically synthesized
uuuccauuggcauuggugu

SEQ ID NO: 5269 - RNA, 19 nt, Artificial
  Chemically synthesized
uccaccucauagaugaucc

SEQ ID NO: 5270 - RNA, 19 nt, Artificial
  Chemically synthesized
uuugcagaggugaacgcug

SEQ ID NO: 5271 - RNA, 19 nt, Artificial
  Chemically synthesized
uuucacuucuucccuccgu

SEQ ID NO: 5272 - RNA, 19 nt, Artificial
  Chemically synthesized
uuuuuucccauagagacgu

SEQ ID NO: 5273 - RNA, 19 nt, Artificial
  Chemically synthesized
uuguuuccgguguuauagg

SEQ ID NO: 5274 - RNA, 19 nt, Artificial
  Chemically synthesized
uacuuccugcuucuuuucc

SEQ ID NO: 5275 - RNA, 19 nt, Artificial
  Chemically synthesized
uuuugggcacauagcccuc

SEQ ID NO: 5276 - RNA, 19 nt, Artificial
  Chemically synthesized
auaaaaagccuguacguac

SEQ ID NO: 5277 - RNA, 19 nt, Artificial
  Chemically synthesized
agucuuuuuaacuccaccg

SEQ ID NO: 5278 - RNA, 19 nt, Artificial
  Chemically synthesized
uuaaugggcaaacuggaga

SEQ ID NO: 5279 - RNA, 19 nt, Artificial
  Chemically synthesized
uuuaagaguuccuucugcu

SEQ ID NO: 5280 - RNA, 19 nt, Artificial
  Chemically synthesized
uuccuugcaaaauucuaca

SEQ ID NO: 5281 - RNA, 19 nt, Artificial
  Chemically synthesized
ccacguuguuguuauuguc

SEQ ID NO: 5282 - RNA, 19 nt, Artificial
  Chemically synthesized
uuucuucagcuuguucucc

SEQ ID NO: 5283 - RNA, 19 nt, Artificial
  Chemically synthesized
uuuuugggcacauagcccu

SEQ ID NO: 5284 - RNA, 19 nt, Artificial
  Chemically synthesized
cugauuuucaaucugcugc

SEQ ID NO: 5285 - RNA, 19 nt, Artificial
  Chemically synthesized
uuggcaaccaacaucugcu

SEQ ID NO: 5286 - RNA, 19 nt, Artificial
  Chemically synthesized
uuuuguuccugguuaaguu

SEQ ID NO: 5287 - RNA, 19 nt, Artificial
  Chemically synthesized
uacguuuuucuccagguac

SEQ ID NO: 5288 - RNA, 19 nt, Artificial
  Chemically synthesized
uuuggaucuuccaugagca

SEQ ID NO: 5289 - RNA, 19 nt, Artificial
  Chemically synthesized
uucuucagcuuguucuccu

SEQ ID NO: 5290 - RNA, 19 nt, Artificial
  Chemically synthesized
ucuacaagggcguucacuu

SEQ ID NO: 5291 - RNA, 19 nt, Artificial
  Chemically synthesized
uaugggacguucauuuccc

SEQ ID NO: 5292 - RNA, 19 nt, Artificial
  Chemically synthesized
uguacguacaauucacacc

SEQ ID NO: 5293 - RNA, 19 nt, Artificial
  Chemically synthesized
uuguccaucauggccaccu

SEQ ID NO: 5294 - RNA, 19 nt, Artificial
  Chemically synthesized
ucuucacuggcaaccaacc

SEQ ID NO: 5295 - RNA, 19 nt, Artificial
  Chemically synthesized
uuccaccucauagaugauc

SEQ ID NO: 5296 - RNA, 19 nt, Artificial
  Chemically synthesized
ugcagcaguuucaaugucg

SEQ ID NO: 5297 - RNA, 19 nt, Artificial
  Chemically synthesized
uuuaucagccaggaaaggc

SEQ ID NO: 5298 - RNA, 19 nt, Artificial
  Chemically synthesized
uuuccauacagaggcuccu

SEQ ID NO: 5299 - RNA, 19 nt, Artificial
  Chemically synthesized
uuucccauagagacguuca

SEQ ID NO: 5300 - RNA, 19 nt, Artificial
  Chemically synthesized
uuacacacgacucauacau

SEQ ID NO: 5301 - RNA, 19 nt, Artificial
  Chemically synthesized
uugucacuuggucuuaggg

SEQ ID NO: 5302 - RNA, 19 nt, Artificial
  Chemically synthesized
cguuguuguuauuguccuc

SEQ ID NO: 5303 - RNA, 19 nt, Artificial
  Chemically synthesized
ucacuuuucuucaccacac

SEQ ID NO: 5304 - RNA, 19 nt, Artificial
  Chemically synthesized
ugaucaacccuuaaaauug

SEQ ID NO: 5305 - RNA, 19 nt, Artificial
  Chemically synthesized
uucaaugucgcuuaugguu

SEQ ID NO: 5306 - RNA, 19 nt, Artificial
  Chemically synthesized
ucccauagagacguucacg

SEQ ID NO: 5307 - RNA, 19 nt, Artificial
  Chemically synthesized
uuccuuccuccuuuccagg

SEQ ID NO: 5308 - RNA, 19 nt, Artificial
  Chemically synthesized
uuccaauugcugacuaagc

SEQ ID NO: 5309 - RNA, 19 nt, Artificial
  Chemically synthesized
guuuccauuguccacaucg

SEQ ID NO: 5310 - RNA, 19 nt, Artificial
  Chemically synthesized
uuuacacagcgucagcagc

SEQ ID NO: 5311 - RNA, 19 nt, Artificial
  Chemically synthesized
uccaugagcagcauuugag

SEQ ID NO: 5312 - RNA, 19 nt, Artificial
  Chemically synthesized
auuuggaucuuccaugagc

SEQ ID NO: 5313 - RNA, 19 nt, Artificial
  Chemically synthesized
aguaauuggcaaaauucag

SEQ ID NO: 5314 - RNA, 19 nt, Artificial
  Chemically synthesized
augacaggcugugagaucg

SEQ ID NO: 5315 - RNA, 19 nt, Artificial
  Chemically synthesized
ugacccuuuaucagccagg

SEQ ID NO: 5316 - RNA, 19 nt, Artificial
  Chemically synthesized
ugaaccuuucuauuucagc

SEQ ID NO: 5317 - RNA, 19 nt, Artificial
  Chemically synthesized
uucuauuucagcagacaga

SEQ ID NO: 5318 - RNA, 19 nt, Artificial
  Chemically synthesized
uaaaucuuccaauugcuga

SEQ ID NO: 5319 - RNA, 19 nt, Artificial
  Chemically synthesized
uuccuccaucuccucacac

SEQ ID NO: 5320 - RNA, 19 nt, Artificial
  Chemically synthesized
uccaaaaggaaguucaggc

SEQ ID NO: 5321 - RNA, 19 nt, Artificial
  Chemically synthesized
cuugaauucacugucuggg

SEQ ID NO: 5322 - RNA, 19 nt, Artificial
  Chemically synthesized
uagcggauuuggaucuucc

SEQ ID NO: 5323 - RNA, 19 nt, Artificial
  Chemically synthesized
uaaaacgggcuuaccauac

SEQ ID NO: 5324 - RNA, 19 nt, Artificial
  Chemically synthesized
uuaugguugaggcaaaaau

SEQ ID NO: 5325 - RNA, 19 nt, Artificial
  Chemically synthesized
uucagcuuguucuccuggg

SEQ ID NO: 5326 - RNA, 19 nt, Artificial
  Chemically synthesized
ucuuccaugagcagcauuu

SEQ ID NO: 5327 - RNA, 19 nt, Artificial
  Chemically synthesized
uuucaaugucgcuuauggu

SEQ ID NO: 5328 - RNA, 19 nt, Artificial
  Chemically synthesized
cugacuaagcugaucaacc

SEQ ID NO: 5329 - RNA, 19 nt, Artificial
  Chemically synthesized
auuucacuucuucccuccg

SEQ ID NO: 5330 - RNA, 19 nt, Artificial
  Chemically synthesized
ucucaguacuuucugaagg

SEQ ID NO: 5331 - RNA, 19 nt, Artificial
  Chemically synthesized
uuuccuggaaaacagcaca

SEQ ID NO: 5332 - RNA, 19 nt, Artificial
  Chemically synthesized
auagaaacugggagcacug

SEQ ID NO: 5333 - RNA, 19 nt, Artificial
  Chemically synthesized
uuucagaaauagacugcug

SEQ ID NO: 5334 - RNA, 19 nt, Artificial
  Chemically synthesized
ucauagaugauccucugca

SEQ ID NO: 5335 - RNA, 19 nt, Artificial
  Chemically synthesized
accuuuguucaucacaccc

SEQ ID NO: 5336 - RNA, 19 nt, Artificial
  Chemically synthesized
uucuucaaguugguccgcu

SEQ ID NO: 5337 - RNA, 19 nt, Artificial
  Chemically synthesized
auccugcucaggcucuuuc

SEQ ID NO: 5338 - RNA, 19 nt, Artificial
  Chemically synthesized
uuuucagaaauagacugcu

SEQ ID NO: 5339 - RNA, 19 nt, Artificial
  Chemically synthesized
aacacguggauucccaacc

SEQ ID NO: 5340 - RNA, 19 nt, Artificial
  Chemically synthesized
acugauucgcuuguccauc

SEQ ID NO: 5341 - RNA, 19 nt, Artificial
  Chemically synthesized
uccuuggcaaccaacaucu

SEQ ID NO: 5342 - RNA, 19 nt, Artificial
  Chemically synthesized
uguacuuccugcuucuuuu

SEQ ID NO: 5343 - RNA, 19 nt, Artificial
  Chemically synthesized
uuuuaacuccaccgccgcu

SEQ ID NO: 5344 - RNA, 19 nt, Artificial
  Chemically synthesized
ugagacggguuuauugugc

SEQ ID NO: 5345 - RNA, 19 nt, Artificial
  Chemically synthesized
auacaugaaaaauagagcc

SEQ ID NO: 5346 - RNA, 19 nt, Artificial
  Chemically synthesized
uuaaguugguuacgaaucu

SEQ ID NO: 5347 - RNA, 19 nt, Artificial
  Chemically synthesized
uucaugauuuugcuguagu

SEQ ID NO: 5348 - RNA, 19 nt, Artificial
  Chemically synthesized
uccuuucuuuaaaucuucc

SEQ ID NO: 5349 - RNA, 19 nt, Artificial
  Chemically synthesized
ugcacauuuacacagcguc

SEQ ID NO: 5350 - RNA, 19 nt, Artificial
  Chemically synthesized
uaccucucccaguuaaugg

SEQ ID NO: 5351 - RNA, 19 nt, Artificial
  Chemically synthesized
uucugcugcugaaguuuug

SEQ ID NO: 5352 - RNA, 19 nt, Artificial
  Chemically synthesized
uugauccguggauacagcc

SEQ ID NO: 5353 - RNA, 19 nt, Artificial
  Chemically synthesized
augguugaggcaaaaaugg

SEQ ID NO: 5354 - RNA, 19 nt, Artificial
  Chemically synthesized
uuugaauuuuguuccuggu

SEQ ID NO: 5355 - RNA, 19 nt, Artificial
  Chemically synthesized
uacaagggcguucacuuuu

SEQ ID NO: 5356 - RNA, 19 nt, Artificial
  Chemically synthesized
aucuccucacacuugucug

SEQ ID NO: 5357 - RNA, 19 nt, Artificial
  Chemically synthesized
ucacguugacaccaaaauc

SEQ ID NO: 5358 - RNA, 19 nt, Artificial
  Chemically synthesized
aaaaauggcggcaccacuc

SEQ ID NO: 5359 - RNA, 19 nt, Artificial
  Chemically synthesized
aauagacugcugcugacgg

SEQ ID NO: 5360 - RNA, 19 nt, Artificial
  Chemically synthesized
ggauuuauaguaauuggca

SEQ ID NO: 5361 - RNA, 19 nt, Artificial
  Chemically synthesized
uuccauuguccacaucggc

SEQ ID NO: 5362 - RNA, 19 nt, Artificial
  Chemically synthesized
uuuaaggcgcugugugcug

SEQ ID NO: 5363 - RNA, 19 nt, Artificial
  Chemically synthesized
uuuccauuguccacaucgg

SEQ ID NO: 5364 - RNA, 19 nt, Artificial
  Chemically synthesized
uugcgcuuauuuaagaguu

SEQ ID NO: 5365 - RNA, 19 nt, Artificial
  Chemically synthesized
uacugggaggcauacacac

SEQ ID NO: 5366 - RNA, 19 nt, Artificial
  Chemically synthesized
auuuuguuccugguuaagu

SEQ ID NO: 5367 - RNA, 19 nt, Artificial
  Chemically synthesized
uucaucacacccagcuuuu

SEQ ID NO: 5368 - RNA, 19 nt, Artificial
  Chemically synthesized
uuugaggcaauacugagag

SEQ ID NO: 5369 - RNA, 19 nt, Artificial
  Chemically synthesized
auuuucagaaauagacugc

SEQ ID NO: 5370 - RNA, 19 nt, Artificial
  Chemically synthesized
ucagugagucuguacacac

SEQ ID NO: 5371 - RNA, 19 nt, Artificial
  Chemically synthesized
uugaauuuuguuccugguu

SEQ ID NO: 5372 - RNA, 19 nt, Artificial
  Chemically synthesized
uugguuacgaaucuguagu

SEQ ID NO: 5373 - RNA, 19 nt, Artificial
  Chemically synthesized
uacaauucacaccucagug

SEQ ID NO: 5374 - RNA, 19 nt, Artificial
  Chemically synthesized
uaauguuggccaguuucca

SEQ ID NO: 5375 - RNA, 19 nt, Artificial
  Chemically synthesized
uuucuucaccacacuaugu

SEQ ID NO: 5376 - RNA, 19 nt, Artificial
  Chemically synthesized
ucuugguacagucuuuuua

SEQ ID NO: 5377 - RNA, 19 nt, Artificial
  Chemically synthesized
cuuuuuaacuccaccgccg

SEQ ID NO: 5378 - RNA, 19 nt, Artificial
  Chemically synthesized
uuggaggcgaaaguaccuc

SEQ ID NO: 5379 - RNA, 19 nt, Artificial
  Chemically synthesized
uagccuuccuccaucuccu

SEQ ID NO: 5380 - RNA, 19 nt, Artificial
  Chemically synthesized
ucugaagcuuuucauuuuc

SEQ ID NO: 5381 - RNA, 19 nt, Artificial
  Chemically synthesized
uauggaacuugaauucacu

SEQ ID NO: 5382 - RNA, 19 nt, Artificial
  Chemically synthesized
uuugccauuguaagacugg

SEQ ID NO: 5383 - RNA, 19 nt, Artificial
  Chemically synthesized
agagcuucugucuucacug

SEQ ID NO: 5384 - RNA, 19 nt, Artificial
  Chemically synthesized
acuggauguagccuuccuc

SEQ ID NO: 5385 - RNA, 19 nt, Artificial
  Chemically synthesized
gucugcagcaguuucaaug

SEQ ID NO: 5386 - RNA, 19 nt, Artificial
  Chemically synthesized
aucaugugugggaagugug

SEQ ID NO: 5387 - RNA, 19 nt, Artificial
  Chemically synthesized
ugagucuguacacacauuu

SEQ ID NO: 5388 - RNA, 19 nt, Artificial
  Chemically synthesized
aaggugaugggcuacagug

SEQ ID NO: 5389 - RNA, 19 nt, Artificial
  Chemically synthesized
uucguugcucuugggucug

SEQ ID NO: 5390 - RNA, 19 nt, Artificial
  Chemically synthesized
ucagcugaauuuuuuuccc

SEQ ID NO: 5391 - RNA, 19 nt, Artificial
  Chemically synthesized
agggcguucacuuuucuuc

SEQ ID NO: 5392 - RNA, 19 nt, Artificial
  Chemically synthesized
aaguucaggcgaguguucg

SEQ ID NO: 5393 - RNA, 19 nt, Artificial
  Chemically synthesized
ugaauuugagcuugcaggg

SEQ ID NO: 5394 - RNA, 19 nt, Artificial
  Chemically synthesized
uacagaggcuccuuuggug

SEQ ID NO: 5395 - RNA, 19 nt, Artificial
  Chemically synthesized
auugccguucaugauuuug

SEQ ID NO: 5396 - RNA, 19 nt, Artificial
  Chemically synthesized
ugaaaaauagagccuaagg

SEQ ID NO: 5397 - RNA, 19 nt, Artificial
  Chemically synthesized
uuaucauuggcaucugaug

SEQ ID NO: 5398 - RNA, 19 nt, Artificial
  Chemically synthesized
ucagucucgcuuucguccu

SEQ ID NO: 5399 - RNA, 19 nt, Artificial
  Chemically synthesized
uucuuaggugguguggcuu

SEQ ID NO: 5400 - RNA, 19 nt, Artificial
  Chemically synthesized
acacugagcagcaugacag

SEQ ID NO: 5401 - RNA, 19 nt, Artificial
  Chemically synthesized
uugcuguagucgacuuguc

SEQ ID NO: 5402 - RNA, 19 nt, Artificial
  Chemically synthesized
ucacugauucgcuugucca

SEQ ID NO: 5403 - RNA, 19 nt, Artificial
  Chemically synthesized
ugacuaagcugaucaaccc

SEQ ID NO: 5404 - RNA, 19 nt, Artificial
  Chemically synthesized
uucaccacacuauguacag

SEQ ID NO: 5405 - RNA, 19 nt, Artificial
  Chemically synthesized
ucacgcaguucacugauuc

SEQ ID NO: 5406 - RNA, 19 nt, Artificial
  Chemically synthesized
uaccauacacugcuuuaac

SEQ ID NO: 5407 - RNA, 19 nt, Artificial
  Chemically synthesized
uauagaaacugggagcacu

SEQ ID NO: 5408 - RNA, 19 nt, Artificial
  Chemically synthesized
uuguccucucauugcacga

SEQ ID NO: 5409 - RNA, 19 nt, Artificial
  Chemically synthesized
auggaacuugaauucacug

SEQ ID NO: 5410 - RNA, 19 nt, Artificial
  Chemically synthesized
uuucucugaguucguugcu

SEQ ID NO: 5411 - RNA, 19 nt, Artificial
  Chemically synthesized
ccaguuuccaucauuagcg

SEQ ID NO: 5412 - RNA, 19 nt, Artificial
  Chemically synthesized
uuugauccguggauacagc

SEQ ID NO: 5413 - RNA, 19 nt, Artificial
  Chemically synthesized
ugucgcuuaugguugaggc

SEQ ID NO: 5414 - RNA, 19 nt, Artificial
  Chemically synthesized
uuuccuggaacauggcacu

SEQ ID NO: 5415 - RNA, 19 nt, Artificial
  Chemically synthesized
ucaauuucugaagcuuuuc

SEQ ID NO: 5416 - RNA, 19 nt, Artificial
  Chemically synthesized
acgaauuuucuucagcuug

SEQ ID NO: 5417 - RNA, 19 nt, Artificial
  Chemically synthesized
uucuagcugcagcuuuccu

SEQ ID NO: 5418 - RNA, 19 nt, Artificial
  Chemically synthesized
augaguguccgauucggug

SEQ ID NO: 5419 - RNA, 19 nt, Artificial
  Chemically synthesized
uacgccacaccuuuguuca

SEQ ID NO: 5420 - RNA, 19 nt, Artificial
  Chemically synthesized
uuuucaaucugcugcuguu

SEQ ID NO: 5421 - RNA, 19 nt, Artificial
  Chemically synthesized
auuuuuuucccauagagac

SEQ ID NO: 5422 - RNA, 19 nt, Artificial
  Chemically synthesized
uucaacacguggauuccca

SEQ ID NO: 5423 - RNA, 19 nt, Artificial
  Chemically synthesized
auuuucaaucugcugcugu

SEQ ID NO: 5424 - RNA, 19 nt, Artificial
  Chemically synthesized
auaugaucaaaggguaugg

SEQ ID NO: 5425 - RNA, 19 nt, Artificial
  Chemically synthesized
ugcaccagaucgaacucuc

SEQ ID NO: 5426 - RNA, 19 nt, Artificial
  Chemically synthesized
uugaacccgaagguaaaac

SEQ ID NO: 5427 - RNA, 19 nt, Artificial
  Chemically synthesized
uuggguaugucccauagcu

SEQ ID NO: 5428 - RNA, 19 nt, Artificial
  Chemically synthesized
uaacugacuuauuuaaggc

SEQ ID NO: 5429 - RNA, 19 nt, Artificial
  Chemically synthesized
uuaaguggcuccugguagc

SEQ ID NO: 5430 - RNA, 19 nt, Artificial
  Chemically synthesized
uucaacucguucuuucaau

SEQ ID NO: 5431 - RNA, 19 nt, Artificial
  Chemically synthesized
auucacauuguggacgcug

SEQ ID NO: 5432 - RNA, 19 nt, Artificial
  Chemically synthesized
uuccaugagcagcauuuga

SEQ ID NO: 5433 - RNA, 19 nt, Artificial
  Chemically synthesized
uucccauagagacguucac

SEQ ID NO: 5434 - RNA, 19 nt, Artificial
  Chemically synthesized
uucuccagguacauuuauu

SEQ ID NO: 5435 - RNA, 19 nt, Artificial
  Chemically synthesized
uguaaacgcuguuccuugg

SEQ ID NO: 5436 - RNA, 19 nt, Artificial
  Chemically synthesized
uccaucuccucacacuugu

SEQ ID NO: 5437 - RNA, 19 nt, Artificial
  Chemically synthesized
uugcuggagguacauggag

SEQ ID NO: 5438 - RNA, 19 nt, Artificial
  Chemically synthesized
uaguucuugguacagucuu

SEQ ID NO: 5439 - RNA, 19 nt, Artificial
  Chemically synthesized
ucuccucacacuugucugc

SEQ ID NO: 5440 - RNA, 19 nt, Artificial
  Chemically synthesized
auuggcaaaauucaguccu

SEQ ID NO: 5441 - RNA, 19 nt, Artificial
  Chemically synthesized
accauuuucuagcugcagc

SEQ ID NO: 5442 - RNA, 19 nt, Artificial
  Chemically synthesized
uugguguuuccauugucca

SEQ ID NO: 5443 - RNA, 19 nt, Artificial
  Chemically synthesized
auacacacugggcagcaac

SEQ ID NO: 5444 - RNA, 19 nt, Artificial
  Chemically synthesized
aucacacccagcuuuuccu

SEQ ID NO: 5445 - RNA, 19 nt, Artificial
  Chemically synthesized
ugcaaaauucuacaacauc

SEQ ID NO: 5446 - RNA, 19 nt, Artificial
  Chemically synthesized
uuguucacuguucucaguu

SEQ ID NO: 5447 - RNA, 19 nt, Artificial
  Chemically synthesized
auaaucucuuaaguggcuc

SEQ ID NO: 5448 - RNA, 19 nt, Artificial
  Chemically synthesized
ucuguacacacauuuuuac

SEQ ID NO: 5449 - RNA, 19 nt, Artificial
  Chemically synthesized
uuuuaauguuggccaguuu

SEQ ID NO: 5450 - RNA, 19 nt, Artificial
  Chemically synthesized
ugguacagucuuuuuaacu

SEQ ID NO: 5451 - RNA, 19 nt, Artificial
  Chemically synthesized
uguucauuguugcucaaga

SEQ ID NO: 5452 - RNA, 19 nt, Artificial
  Chemically synthesized
auacacugcuuuaacugac

SEQ ID NO: 5453 - RNA, 19 nt, Artificial
  Chemically synthesized
uacagucagugcuccaagg

SEQ ID NO: 5454 - RNA, 19 nt, Artificial
  Chemically synthesized
uguuccuuggcaaccaaca

SEQ ID NO: 5455 - RNA, 19 nt, Artificial
  Chemically synthesized
uugcugggaucuuccaccu

SEQ ID NO: 5456 - RNA, 19 nt, Artificial
  Chemically synthesized
uggcacuuuaccaaucucg

SEQ ID NO: 5457 - RNA, 19 nt, Artificial
  Chemically synthesized
uaugggacuucuuaauggc

SEQ ID NO: 5458 - RNA, 19 nt, Artificial
  Chemically synthesized
uccagcaccugacuccauu

SEQ ID NO: 5459 - RNA, 19 nt, Artificial
  Chemically synthesized
uugaauggucuagucaaaa

SEQ ID NO: 5460 - RNA, 19 nt, Artificial
  Chemically synthesized
ugcugcaucagugagucug

SEQ ID NO: 5461 - RNA, 19 nt, Artificial
  Chemically synthesized
ugucgaaggaaaaauuuca

SEQ ID NO: 5462 - RNA, 19 nt, Artificial
  Chemically synthesized
caucacacccagcuuuucc

SEQ ID NO: 5463 - RNA, 19 nt, Artificial
  Chemically synthesized
uuguggacgcugucugcua

SEQ ID NO: 5464 - RNA, 19 nt, Artificial
  Chemically synthesized
uuguaagacuggaacccau

SEQ ID NO: 5465 - RNA, 19 nt, Artificial
  Chemically synthesized
aagggaagaaggaucaugu

SEQ ID NO: 5466 - RNA, 19 nt, Artificial
  Chemically synthesized
ucuuccaccucauagauga

SEQ ID NO: 5467 - RNA, 19 nt, Artificial
  Chemically synthesized
auagaugauccucugcacc

SEQ ID NO: 5468 - RNA, 19 nt, Artificial
  Chemically synthesized
uggccuugacccuuuauca

SEQ ID NO: 5469 - RNA, 19 nt, Artificial
  Chemically synthesized
uuguugcucaagaaaacag

SEQ ID NO: 5470 - RNA, 19 nt, Artificial
  Chemically synthesized
uucacguugacaccaaaau

SEQ ID NO: 5471 - RNA, 19 nt, Artificial
  Chemically synthesized
cugaguucguugcucuugg

SEQ ID NO: 5472 - RNA, 19 nt, Artificial
  Chemically synthesized
uauguacagucagugcucc

SEQ ID NO: 5473 - RNA, 19 nt, Artificial
  Chemically synthesized
uugacccuuuaucagccag

SEQ ID NO: 5474 - RNA, 19 nt, Artificial
  Chemically synthesized
cuuaaguggcuccugguag

SEQ ID NO: 5475 - RNA, 19 nt, Artificial
  Chemically synthesized
uucggguagcuuugaaugg

SEQ ID NO: 5476 - RNA, 19 nt, Artificial
  Chemically synthesized
uccucugcugaaucuguug

SEQ ID NO: 5477 - RNA, 19 nt, Artificial
  Chemically synthesized
uguaguucuugguacaguc

SEQ ID NO: 5478 - RNA, 19 nt, Artificial
  Chemically synthesized
accucauagaugauccucu

SEQ ID NO: 5479 - RNA, 19 nt, Artificial
  Chemically synthesized
auugcacgaauuuucuuca

SEQ ID NO: 5480 - RNA, 19 nt, Artificial
  Chemically synthesized
auuaucauuggcaucugau

SEQ ID NO: 5481 - RNA, 19 nt, Artificial
  Chemically synthesized
uucaaguugguccgcuugu

SEQ ID NO: 5482 - RNA, 19 nt, Artificial
  Chemically synthesized
ucacacccagcuuuuccug

SEQ ID NO: 5483 - RNA, 19 nt, Artificial
  Chemically synthesized
ugguacagcagcuucugga

SEQ ID NO: 5484 - RNA, 19 nt, Artificial
  Chemically synthesized
uucagcuaaauggcagcug

SEQ ID NO: 5485 - RNA, 19 nt, Artificial
  Chemically synthesized
aagaccauuuucuagcugc

SEQ ID NO: 5486 - RNA, 19 nt, Artificial
  Chemically synthesized
ugaaucuguugugaggagc

SEQ ID NO: 5487 - RNA, 19 nt, Artificial
  Chemically synthesized
aucuguucauuguugcuca

SEQ ID NO: 5488 - RNA, 19 nt, Artificial
  Chemically synthesized
acaccuuuguucaucacac

SEQ ID NO: 5489 - RNA, 19 nt, Artificial
  Chemically synthesized
ucuccagguacauuuauua

SEQ ID NO: 5490 - RNA, 19 nt, Artificial
  Chemically synthesized
ucucccaguugucacuugg

SEQ ID NO: 5491 - RNA, 19 nt, Artificial
  Chemically synthesized
aauucuuaggugguguggc

SEQ ID NO: 5492 - RNA, 19 nt, Artificial
  Chemically synthesized
uacaucauaugaucaaagg

SEQ ID NO: 5493 - RNA, 19 nt, Artificial
  Chemically synthesized
uucacuguucucaguuggg

SEQ ID NO: 5494 - RNA, 19 nt, Artificial
  Chemically synthesized
aucuguugugaggagccug

SEQ ID NO: 5495 - RNA, 19 nt, Artificial
  Chemically synthesized
uccgaguugggcuucuuca

SEQ ID NO: 5496 - RNA, 19 nt, Artificial
  Chemically synthesized
accauuaagaccauuuucu

SEQ ID NO: 5497 - RNA, 19 nt, Artificial
  Chemically synthesized
uuccagguuuccauuggca

SEQ ID NO: 5498 - RNA, 19 nt, Artificial
  Chemically synthesized
uaucauuggcaucugauga

SEQ ID NO: 5499 - RNA, 19 nt, Artificial
  Chemically synthesized
ugaauuuuguuccugguua

SEQ ID NO: 5500 - RNA, 19 nt, Artificial
  Chemically synthesized
uguugaagcgcugguacag

SEQ ID NO: 5501 - RNA, 19 nt, Artificial
  Chemically synthesized
acugacuuauuuaaggcgc

SEQ ID NO: 5502 - RNA, 19 nt, Artificial
  Chemically synthesized
uugacaccaaaauccagca

SEQ ID NO: 5503 - RNA, 19 nt, Artificial
  Chemically synthesized
aaaauuucacuucuucccu

SEQ ID NO: 5504 - RNA, 19 nt, Artificial
  Chemically synthesized
uaaagugagcaccauuaag

SEQ ID NO: 5505 - RNA, 19 nt, Artificial
  Chemically synthesized
uugcucaagaaaacaguua

SEQ ID NO: 5506 - RNA, 19 nt, Artificial
  Chemically synthesized
uaaguugguuacgaaucug

SEQ ID NO: 5507 - RNA, 19 nt, Artificial
  Chemically synthesized
cuaauggccacugucagug

SEQ ID NO: 5508 - RNA, 19 nt, Artificial
  Chemically synthesized
ucaacccuuaaaauugcag

SEQ ID NO: 5509 - RNA, 19 nt, Artificial
  Chemically synthesized
uucucaguacuuucugaag

SEQ ID NO: 5510 - RNA, 19 nt, Artificial
  Chemically synthesized
uuaggugaacuggaacagg

SEQ ID NO: 5511 - RNA, 19 nt, Artificial
  Chemically synthesized
auugcagucuguacuuccu

SEQ ID NO: 5512 - RNA, 19 nt, Artificial
  Chemically synthesized
aaaaucuguucauuguugc

SEQ ID NO: 5513 - RNA, 19 nt, Artificial
  Chemically synthesized
uaucaucggcaucaucgcg

SEQ ID NO: 5514 - RNA, 19 nt, Artificial
  Chemically synthesized
uggaacuugaauucacugu

SEQ ID NO: 5515 - RNA, 19 nt, Artificial
  Chemically synthesized
cacuuuaccaaucucgaug

SEQ ID NO: 5516 - RNA, 19 nt, Artificial
  Chemically synthesized
cuaaauggcagcugccuuc

SEQ ID NO: 5517 - RNA, 19 nt, Artificial
  Chemically synthesized
uuccuggaacauggcacug

SEQ ID NO: 5518 - RNA, 19 nt, Artificial
  Chemically synthesized
gucaguaagagcuucuguc

SEQ ID NO: 5519 - RNA, 19 nt, Artificial
  Chemically synthesized
uucuugguacagucuuuuu

SEQ ID NO: 5520 - RNA, 19 nt, Artificial
  Chemically synthesized
uggaucuuccaugagcagc

SEQ ID NO: 5521 - RNA, 19 nt, Artificial
  Chemically synthesized
uucugaagauguucguaca

SEQ ID NO: 5522 - RNA, 19 nt, Artificial
  Chemically synthesized
acucagucucgcuuucguc

SEQ ID NO: 5523 - RNA, 19 nt, Artificial
  Chemically synthesized
ugguugaggcaaaaauggc

SEQ ID NO: 5524 - RNA, 19 nt, Artificial
  Chemically synthesized
ugauuuucaaucugcugcu

SEQ ID NO: 5525 - RNA, 19 nt, Artificial
  Chemically synthesized
uuuaggugaacuggaacag

SEQ ID NO: 5526 - RNA, 19 nt, Artificial
  Chemically synthesized
uccaggucugcaucacucu

SEQ ID NO: 5527 - RNA, 19 nt, Artificial
  Chemically synthesized
uacacacgacucauacaug

SEQ ID NO: 5528 - RNA, 19 nt, Artificial
  Chemically synthesized
uucuccagguuccuugcaa

SEQ ID NO: 5529 - RNA, 19 nt, Artificial
  Chemically synthesized
uccugguuaaguugguuac

SEQ ID NO: 5530 - RNA, 19 nt, Artificial
  Chemically synthesized
ugaacccgaagguaaaacg

SEQ ID NO: 5531 - RNA, 19 nt, Artificial
  Chemically synthesized
auauggaacuugaauucac

SEQ ID NO: 5532 - RNA, 19 nt, Artificial
  Chemically synthesized
guuccuugcaaaauucuac

SEQ ID NO: 5533 - RNA, 19 nt, Artificial
  Chemically synthesized
guuucaaugucgcuuaugg

SEQ ID NO: 5534 - RNA, 19 nt, Artificial
  Chemically synthesized
ucagcagacagauugccgu

SEQ ID NO: 5535 - RNA, 19 nt, Artificial
  Chemically synthesized
uacagucuuuuuaacucca

SEQ ID NO: 5536 - RNA, 19 nt, Artificial
  Chemically synthesized
cugaauuugagcuugcagg

SEQ ID NO: 5537 - RNA, 19 nt, Artificial
  Chemically synthesized
acgcaguucacugauucgc

SEQ ID NO: 5538 - RNA, 19 nt, Artificial
  Chemically synthesized
uggguguuuugaaaguggg

SEQ ID NO: 5539 - RNA, 19 nt, Artificial
  Chemically synthesized
aauuuucuucagcuuguuc

SEQ ID NO: 5540 - RNA, 19 nt, Artificial
  Chemically synthesized
auuuucuagcugcagcuuu

SEQ ID NO: 5541 - RNA, 19 nt, Artificial
  Chemically synthesized
ucguucuuucaauuucuga

SEQ ID NO: 5542 - RNA, 19 nt, Artificial
  Chemically synthesized
guuaaguugguuacgaauc

SEQ ID NO: 5543 - RNA, 19 nt, Artificial
  Chemically synthesized
ugcacgaauuuucuucagc

SEQ ID NO: 5544 - RNA, 19 nt, Artificial
  Chemically synthesized
uugugcacauuuacacagc

SEQ ID NO: 5545 - RNA, 19 nt, Artificial
  Chemically synthesized
uguaagacuggaacccauu

SEQ ID NO: 5546 - RNA, 19 nt, Artificial
  Chemically synthesized
cacguugacaccaaaaucc

SEQ ID NO: 5547 - RNA, 19 nt, Artificial
  Chemically synthesized
uaaaaagccuguacguaca

SEQ ID NO: 5548 - RNA, 19 nt, Artificial
  Chemically synthesized
gaaaaauuucacuucuucc

SEQ ID NO: 5549 - RNA, 19 nt, Artificial
  Chemically synthesized
gugagcaccauuaagacca

SEQ ID NO: 5550 - RNA, 19 nt, Artificial
  Chemically synthesized
uacuuucugaagguggcug

SEQ ID NO: 5551 - RNA, 19 nt, Artificial
  Chemically synthesized
uagaugauccucugcacca

SEQ ID NO: 5552 - RNA, 19 nt, Artificial
  Chemically synthesized
ugcgcuuauuuaagaguuc

SEQ ID NO: 5553 - RNA, 19 nt, Artificial
  Chemically synthesized
acuuauuuaaggcgcugug

SEQ ID NO: 5554 - RNA, 19 nt, Artificial
  Chemically synthesized
guugacaccaaaauccagc

SEQ ID NO: 5555 - RNA, 19 nt, Artificial
  Chemically synthesized
cuuuagaaaauguaaacgc

SEQ ID NO: 5556 - RNA, 19 nt, Artificial
  Chemically synthesized
ugaggcaauacugagagac

SEQ ID NO: 5557 - RNA, 19 nt, Artificial
  Chemically synthesized
uacauuucucugaguucgu

SEQ ID NO: 5558 - RNA, 19 nt, Artificial
  Chemically synthesized
guuguuuccgguguuauag

SEQ ID NO: 5559 - RNA, 19 nt, Artificial
  Chemically synthesized
acugaauuugagcuugcag

SEQ ID NO: 5560 - RNA, 19 nt, Artificial
  Chemically synthesized
guggccuugacccuuuauc

SEQ ID NO: 5561 - RNA, 19 nt, Artificial
  Chemically synthesized
acgggcuuaccauacacug

SEQ ID NO: 5562 - RNA, 19 nt, Artificial
  Chemically synthesized
uuucucaguacuuucugaa

SEQ ID NO: 5563 - RNA, 19 nt, Artificial
  Chemically synthesized
uggucuagucaaaaaauac

SEQ ID NO: 5564 - RNA, 19 nt, Artificial
  Chemically synthesized
uaaauggcagcugccuucu

SEQ ID NO: 5565 - RNA, 19 nt, Artificial
  Chemically synthesized
ugaucaaaggguaugggac

SEQ ID NO: 5566 - RNA, 19 nt, Artificial
  Chemically synthesized
ugcugaaucuguugugagg

SEQ ID NO: 5567 - RNA, 19 nt, Artificial
  Chemically synthesized
agucuguacuuccugcuuc

SEQ ID NO: 5568 - RNA, 19 nt, Artificial
  Chemically synthesized
uguagccuuccuccaucuc

SEQ ID NO: 5569 - RNA, 19 nt, Artificial
  Chemically synthesized
uagaaaauguaaacgcugu

SEQ ID NO: 5570 - RNA, 19 nt, Artificial
  Chemically synthesized
uccacacuucagcuaaaug

SEQ ID NO: 5571 - RNA, 19 nt, Artificial
  Chemically synthesized
aucauggccaccuccaugu

SEQ ID NO: 5572 - RNA, 19 nt, Artificial
  Chemically synthesized
acauaaauuacacacgacu

SEQ ID NO: 5573 - RNA, 19 nt, Artificial
  Chemically synthesized
guuaauaucaucggcauca

SEQ ID NO: 5574 - RNA, 19 nt, Artificial
  Chemically synthesized
ugccauaucuuggagcucu

SEQ ID NO: 5575 - RNA, 19 nt, Artificial
  Chemically synthesized
aaaauucuacaacaucucg

SEQ ID NO: 5576 - RNA, 19 nt, Artificial
  Chemically synthesized
ucuuaggugguguggcuug

SEQ ID NO: 5577 - RNA, 19 nt, Artificial
  Chemically synthesized
uuauuguccucugccggcu

SEQ ID NO: 5578 - RNA, 19 nt, Artificial
  Chemically synthesized
aaauagacugcugcugacg

SEQ ID NO: 5579 - RNA, 19 nt, Artificial
  Chemically synthesized
aagagcuucugucuucacu

SEQ ID NO: 5580 - RNA, 19 nt, Artificial
  Chemically synthesized
uggagcugcgcuuuuucag

SEQ ID NO: 5581 - RNA, 19 nt, Artificial
  Chemically synthesized
guacguacaauucacaccu

SEQ ID NO: 5582 - RNA, 19 nt, Artificial
  Chemically synthesized
uuacgaaucuguaguucuu

SEQ ID NO: 5583 - RNA, 19 nt, Artificial
  Chemically synthesized
uuuccgguguuauaggaac

SEQ ID NO: 5584 - RNA, 19 nt, Artificial
  Chemically synthesized
uuacaagaggcagcgcagu

SEQ ID NO: 5585 - RNA, 19 nt, Artificial
  Chemically synthesized
auuguaagacuggaaccca

SEQ ID NO: 5586 - RNA, 19 nt, Artificial
  Chemically synthesized
aaccacacugagcagcaug

SEQ ID NO: 5587 - RNA, 19 nt, Artificial
  Chemically synthesized
acuugaauucacugucugg

SEQ ID NO: 5588 - RNA, 19 nt, Artificial
  Chemically synthesized
augacgugccauucacacg

SEQ ID NO: 5589 - RNA, 19 nt, Artificial
  Chemically synthesized
aucucuuaaguggcuccug

SEQ ID NO: 5590 - RNA, 19 nt, Artificial
  Chemically synthesized
ucacggaagagcuagaauu

SEQ ID NO: 5591 - RNA, 19 nt, Artificial
  Chemically synthesized
ucaugauuuugcuguaguc

SEQ ID NO: 5592 - RNA, 19 nt, Artificial
  Chemically synthesized
uagucccacagagcauacg

SEQ ID NO: 5593 - RNA, 19 nt, Artificial
  Chemically synthesized
uuggcauugguguuuccau

SEQ ID NO: 5594 - RNA, 19 nt, Artificial
  Chemically synthesized
ucugcuaaagugagcacca

SEQ ID NO: 5595 - RNA, 19 nt, Artificial
  Chemically synthesized
uucacauuguggacgcugu

SEQ ID NO: 5596 - RNA, 19 nt, Artificial
  Chemically synthesized
aacagcacaauaaucucuu

SEQ ID NO: 5597 - RNA, 19 nt, Artificial
  Chemically synthesized
uaaauuacacacgacucau

SEQ ID NO: 5598 - RNA, 19 nt, Artificial
  Chemically synthesized
agguacauggaguauaugg

SEQ ID NO: 5599 - RNA, 19 nt, Artificial
  Chemically synthesized
aacccauucaguuuuccuu

SEQ ID NO: 5600 - RNA, 19 nt, Artificial
  Chemically synthesized
uacggaaauccucugcuga

SEQ ID NO: 5601 - RNA, 19 nt, Artificial
  Chemically synthesized
ucaggcucuuucucaguac

SEQ ID NO: 5602 - RNA, 19 nt, Artificial
  Chemically synthesized
acaguuaauaucaucggca

SEQ ID NO: 5603 - RNA, 19 nt, Artificial
  Chemically synthesized
uguuauaggaacuucuguu

SEQ ID NO: 5604 - RNA, 19 nt, Artificial
  Chemically synthesized
augucccauagcuuggagg

SEQ ID NO: 5605 - RNA, 19 nt, Artificial
  Chemically synthesized
cugcugcugauuuucaauc

SEQ ID NO: 5606 - RNA, 19 nt, Artificial
  Chemically synthesized
ugcagucuguacuuccugc

SEQ ID NO: 5607 - RNA, 19 nt, Artificial
  Chemically synthesized
ccacacuucagcuaaaugg

SEQ ID NO: 5608 - RNA, 19 nt, Artificial
  Chemically synthesized
cuuguccucucauugcacg

SEQ ID NO: 5609 - RNA, 19 nt, Artificial
  Chemically synthesized
uugguacagucuuuuuaac

SEQ ID NO: 5610 - RNA, 19 nt, Artificial
  Chemically synthesized
cuccagguacauuuauuac

SEQ ID NO: 5611 - RNA, 19 nt, Artificial
  Chemically synthesized
uccuccaucuccucacacu

SEQ ID NO: 5612 - RNA, 19 nt, Artificial
  Chemically synthesized
ucuacaacaucucgacagg

SEQ ID NO: 5613 - RNA, 19 nt, Artificial
  Chemically synthesized
ucauuguugcucaagaaaa

SEQ ID NO: 5614 - RNA, 19 nt, Artificial
  Chemically synthesized
acuuccugcuucuuuuccu

SEQ ID NO: 5615 - RNA, 19 nt, Artificial
  Chemically synthesized
aaagccuguacguacaauu

SEQ ID NO: 5616 - RNA, 19 nt, Artificial
  Chemically synthesized
uuggcgguacggaaauccu

SEQ ID NO: 5617 - RNA, 19 nt, Artificial
  Chemically synthesized
auuuacacagcgucagcag

SEQ ID NO: 5618 - RNA, 19 nt, Artificial
  Chemically synthesized
uugcacgaauuuucuucag

SEQ ID NO: 5619 - RNA, 19 nt, Artificial
  Chemically synthesized
acauguuuccauacagagg

SEQ ID NO: 5620 - RNA, 19 nt, Artificial
  Chemically synthesized
uccaucacuaucagcagca

SEQ ID NO: 5621 - RNA, 19 nt, Artificial
  Chemically synthesized
auugugcacauuuacacag

SEQ ID NO: 5622 - RNA, 19 nt, Artificial
  Chemically synthesized
agucucgcuuucguccuug

SEQ ID NO: 5623 - RNA, 19 nt, Artificial
  Chemically synthesized
uacagcagcuucuggaugu

SEQ ID NO: 5624 - RNA, 19 nt, Artificial
  Chemically synthesized
aaagugagcaccauuaaga

SEQ ID NO: 5625 - RNA, 19 nt, Artificial
  Chemically synthesized
aucugcugcuguugccuag

SEQ ID NO: 5626 - RNA, 19 nt, Artificial
  Chemically synthesized
uucugucuucacuggcaac

SEQ ID NO: 5627 - RNA, 19 nt, Artificial
  Chemically synthesized
ucuucaaguugguccgcuu

SEQ ID NO: 5628 - RNA, 19 nt, Artificial
  Chemically synthesized
augaaaaauagagccuaag

SEQ ID NO: 5629 - RNA, 19 nt, Artificial
  Chemically synthesized
ucuauuucagcagacagau

SEQ ID NO: 5630 - RNA, 19 nt, Artificial
  Chemically synthesized
uuuggugaugaagggaaga

SEQ ID NO: 5631 - RNA, 19 nt, Artificial
  Chemically synthesized
aauuggcaaaauucagucc

SEQ ID NO: 5632 - RNA, 19 nt, Artificial
  Chemically synthesized
uuaagaccauuuucuagcu

SEQ ID NO: 5633 - RNA, 19 nt, Artificial
  Chemically synthesized
uuuccaacauaguucgggu

SEQ ID NO: 5634 - RNA, 19 nt, Artificial
  Chemically synthesized
ugugggaagugugagaaag

SEQ ID NO: 5635 - RNA, 19 nt, Artificial
  Chemically synthesized
ucagaaauagacugcugcu

SEQ ID NO: 5636 - RNA, 19 nt, Artificial
  Chemically synthesized
uacacacugggcagcaaca

SEQ ID NO: 5637 - RNA, 19 nt, Artificial
  Chemically synthesized
acuaagcugaucaacccuu

SEQ ID NO: 5638 - RNA, 19 nt, Artificial
  Chemically synthesized
acguucacgcaguucacug

SEQ ID NO: 5639 - RNA, 19 nt, Artificial
  Chemically synthesized
augggcaaacuggagaaag

SEQ ID NO: 5640 - RNA, 19 nt, Artificial
  Chemically synthesized
auuguugcucaagaaaaca

SEQ ID NO: 5641 - RNA, 19 nt, Artificial
  Chemically synthesized
ucucgacagguuguuuccg

SEQ ID NO: 5642 - RNA, 19 nt, Artificial
  Chemically synthesized
uggugaugaagggaagaag

SEQ ID NO: 5643 - RNA, 19 nt, Artificial
  Chemically synthesized
ucugcagcaguuucaaugu

SEQ ID NO: 5644 - RNA, 19 nt, Artificial
  Chemically synthesized
ucagccuuuaggugaacug

SEQ ID NO: 5645 - RNA, 19 nt, Artificial
  Chemically synthesized
acucguucuuucaauuucu

SEQ ID NO: 5646 - RNA, 19 nt, Artificial
  Chemically synthesized
uucuuucaauuucugaagc

SEQ ID NO: 5647 - RNA, 19 nt, Artificial
  Chemically synthesized
acauuguggacgcugucug

SEQ ID NO: 5648 - RNA, 19 nt, Artificial
  Chemically synthesized
auggagagguugaacccga

SEQ ID NO: 5649 - RNA, 19 nt, Artificial
  Chemically synthesized
auccucugcugaaucuguu

SEQ ID NO: 5650 - RNA, 19 nt, Artificial
  Chemically synthesized
uuuucuccagguacauuua

SEQ ID NO: 5651 - RNA, 19 nt, Artificial
  Chemically synthesized
aacugacuuauuuaaggcg

SEQ ID NO: 5652 - RNA, 19 nt, Artificial
  Chemically synthesized
uggcacugaaccuuucuau

SEQ ID NO: 5653 - RNA, 19 nt, Artificial
  Chemically synthesized
uugaggcaaaaauggcggc

SEQ ID NO: 5654 - RNA, 19 nt, Artificial
  Chemically synthesized
uauaaaaagccuguacgua

SEQ ID NO: 5655 - RNA, 19 nt, Artificial
  Chemically synthesized
uacacugcuuuaacugacu

SEQ ID NO: 5656 - RNA, 19 nt, Artificial
  Chemically synthesized
uagcuuugaauggucuagu

SEQ ID NO: 5657 - RNA, 19 nt, Artificial
  Chemically synthesized
augggagguggcacuuuac

SEQ ID NO: 5658 - RNA, 19 nt, Artificial
  Chemically synthesized
uaucagccaggaaaggccu

SEQ ID NO: 5659 - RNA, 19 nt, Artificial
  Chemically synthesized
uaagaccauuuucuagcug

SEQ ID NO: 5660 - RNA, 19 nt, Artificial
  Chemically synthesized
ucucugaguucguugcucu

SEQ ID NO: 5661 - RNA, 19 nt, Artificial
  Chemically synthesized
uguugcgcuuauuuaagag

SEQ ID NO: 5662 - RNA, 19 nt, Artificial
  Chemically synthesized
agguuuuugggcacauagc

SEQ ID NO: 5663 - RNA, 19 nt, Artificial
  Chemically synthesized
ugcuggagguacauggagu

SEQ ID NO: 5664 - RNA, 19 nt, Artificial
  Chemically synthesized
augaagggaagaaggauca

SEQ ID NO: 5665 - RNA, 19 nt, Artificial
  Chemically synthesized
uccagcaggaacuucacga

SEQ ID NO: 5666 - RNA, 19 nt, Artificial
  Chemically synthesized
aaguugguuacgaaucugu

SEQ ID NO: 5667 - RNA, 19 nt, Artificial
  Chemically synthesized
uccuuggaggcgaaaguac

SEQ ID NO: 5668 - RNA, 19 nt, Artificial
  Chemically synthesized
cuuccugcuucuuuuccug

SEQ ID NO: 5669 - RNA, 19 nt, Artificial
  Chemically synthesized
guugaggcaaaaauggcgg

SEQ ID NO: 5670 - RNA, 19 nt, Artificial
  Chemically synthesized
uaagagcuucugucuucac

SEQ ID NO: 5671 - RNA, 19 nt, Artificial
  Chemically synthesized
uuccauuggcauugguguu

SEQ ID NO: 5672 - RNA, 19 nt, Artificial
  Chemically synthesized
ugacuuauuuaaggcgcug

SEQ ID NO: 5673 - RNA, 19 nt, Artificial
  Chemically synthesized
ugagaggguaaguucaaca

SEQ ID NO: 5674 - RNA, 19 nt, Artificial
  Chemically synthesized
ucugcugcugauuuucaau

SEQ ID NO: 5675 - RNA, 19 nt, Artificial
  Chemically synthesized
ucuucagcuuguucuccug

SEQ ID NO: 5676 - RNA, 19 nt, Artificial
  Chemically synthesized
uaggugaacuggaacagga

SEQ ID NO: 5677 - RNA, 19 nt, Artificial
  Chemically synthesized
ugcaucagugagucuguac

SEQ ID NO: 5678 - RNA, 19 nt, Artificial
  Chemically synthesized
uacaugaaaaauagagccu

SEQ ID NO: 5679 - RNA, 19 nt, Artificial
  Chemically synthesized
uucacgaugugaugguggc

SEQ ID NO: 5680 - RNA, 19 nt, Artificial
  Chemically synthesized
uuaggugguguggcuugcu

SEQ ID NO: 5681 - RNA, 19 nt, Artificial
  Chemically synthesized
ucuuccagguuuccauugg

SEQ ID NO: 5682 - RNA, 19 nt, Artificial
  Chemically synthesized
uacauggaguauauggaac

SEQ ID NO: 5683 - RNA, 19 nt, Artificial
  Chemically synthesized
uggaguauauggaacuuga

SEQ ID NO: 5684 - RNA, 19 nt, Artificial
  Chemically synthesized
auacagaggcuccuuuggu

SEQ ID NO: 5685 - RNA, 19 nt, Artificial
  Chemically synthesized
auuggcauugguguuucca

SEQ ID NO: 5686 - RNA, 19 nt, Artificial
  Chemically synthesized
auucacacgguucagcuga

SEQ ID NO: 5687 - RNA, 21 nt, Artificial
  Chemically synthesized
ggcagaggacaauaacaacaa

SEQ ID NO: 5688 - RNA, 21 nt, Artificial
  Chemically synthesized
cgaugaugccgaugauauuaa

SEQ ID NO: 5689 - RNA, 21 nt, Artificial
  Chemically synthesized
gcagaaggaacucuuaaauaa

SEQ ID NO: 5690 - RNA, 21 nt, Artificial
  Chemically synthesized
ggaaaagcugggugugaugaa

SEQ ID NO: 5691 - RNA, 21 nt, Artificial
  Chemically synthesized
cgugaacgucucuaugggaaa

SEQ ID NO: 5692 - RNA, 21 nt, Artificial
  Chemically synthesized
caaccauaagcgacauugaaa

SEQ ID NO: 5693 - RNA, 21 nt, Artificial
  Chemically synthesized
gccggcagaggacaauaacaa

SEQ ID NO: 5694 - RNA, 21 nt, Artificial
  Chemically synthesized
ccaacuuaaccaggaacaaaa

SEQ ID NO: 5695 - RNA, 21 nt, Artificial
  Chemically synthesized
cagaggacaauaacaacaacg

SEQ ID NO: 5696 - RNA, 21 nt, Artificial
  Chemically synthesized
gcaacagcagcagauugaaaa

SEQ ID NO: 5697 - RNA, 21 nt, Artificial
  Chemically synthesized
guaauaaauguaccuggagaa

SEQ ID NO: 5698 - RNA, 21 nt, Artificial
  Chemically synthesized
cggcagaggacaauaacaaca

SEQ ID NO: 5699 - RNA, 21 nt, Artificial
  Chemically synthesized
ggccgauguggacaauggaaa

SEQ ID NO: 5700 - RNA, 21 nt, Artificial
  Chemically synthesized
agaggacaauaacaacaacgu

SEQ ID NO: 5701 - RNA, 21 nt, Artificial
  Chemically synthesized
ggaacucuuaaauaagcgcaa

SEQ ID NO: 5702 - RNA, 21 nt, Artificial
  Chemically synthesized
ggacaagucgacuacagcaaa

SEQ ID NO: 5703 - RNA, 21 nt, Artificial
  Chemically synthesized
cagcggcgguggaguuaaaaa

SEQ ID NO: 5704 - RNA, 21 nt, Artificial
  Chemically synthesized
gcagcagaaggaacucuuaaa

SEQ ID NO: 5705 - RNA, 21 nt, Artificial
  Chemically synthesized
ggauuuuggugucaacgugaa

SEQ ID NO: 5706 - RNA, 21 nt, Artificial
  Chemically synthesized
caggaaagcugcagcuagaaa

SEQ ID NO: 5707 - RNA, 21 nt, Artificial
  Chemically synthesized
gcagaggacaauaacaacaac

SEQ ID NO: 5708 - RNA, 21 nt, Artificial
  Chemically synthesized
ccuucuucccuucaucaccaa

SEQ ID NO: 5709 - RNA, 21 nt, Artificial
  Chemically synthesized
ccuggagaaaaacguacugaa

SEQ ID NO: 5710 - RNA, 21 nt, Artificial
  Chemically synthesized
guaugagucguguguaauuua

SEQ ID NO: 5711 - RNA, 21 nt, Artificial
  Chemically synthesized
gaaacaccaaugccaauggaa

SEQ ID NO: 5712 - RNA, 21 nt, Artificial
  Chemically synthesized
aggccuuuccuggcugauaaa

SEQ ID NO: 5713 - RNA, 21 nt, Artificial
  Chemically synthesized
ccaagaacuacagauucguaa

SEQ ID NO: 5714 - RNA, 21 nt, Artificial
  Chemically synthesized
ccaggaaagcugcagcuagaa

SEQ ID NO: 5715 - RNA, 21 nt, Artificial
  Chemically synthesized
ggaaacuggccaacauuaaaa

SEQ ID NO: 5716 - RNA, 21 nt, Artificial
  Chemically synthesized
uggagaaaaacguacugaaaa

SEQ ID NO: 5717 - RNA, 21 nt, Artificial
  Chemically synthesized
ggagaaggcagcugccauuua

SEQ ID NO: 5718 - RNA, 21 nt, Artificial
  Chemically synthesized
ccucaaaugcugcucauggaa

SEQ ID NO: 5719 - RNA, 21 nt, Artificial
  Chemically synthesized
cgucaucagaugccaaugaua

SEQ ID NO: 5720 - RNA, 21 nt, Artificial
  Chemically synthesized
ggacaauaacaacaacguggc

SEQ ID NO: 5721 - RNA, 21 nt, Artificial
  Chemically synthesized
ccuucagaaaguacugagaaa

SEQ ID NO: 5722 - RNA, 21 nt, Artificial
  Chemically synthesized
gcgugaacgucucuaugggaa

SEQ ID NO: 5723 - RNA, 21 nt, Artificial
  Chemically synthesized
gacuguacauaguguggugaa

SEQ ID NO: 5724 - RNA, 21 nt, Artificial
  Chemically synthesized
ccauuuuugccucaaccauaa

SEQ ID NO: 5725 - RNA, 21 nt, Artificial
  Chemically synthesized
gcagcagauguugguugccaa

SEQ ID NO: 5726 - RNA, 21 nt, Artificial
  Chemically synthesized
ggaaaagaagcaggaaguaca

SEQ ID NO: 5727 - RNA, 21 nt, Artificial
  Chemically synthesized
cgaacucagagaaauguaaua

SEQ ID NO: 5728 - RNA, 21 nt, Artificial
  Chemically synthesized
aggagaacaagcugaagaaaa

SEQ ID NO: 5729 - RNA, 21 nt, Artificial
  Chemically synthesized
caaucugucugcugaaauaga

SEQ ID NO: 5730 - RNA, 21 nt, Artificial
  Chemically synthesized
agcagaaggaacucuuaaaua

SEQ ID NO: 5731 - RNA, 21 nt, Artificial
  Chemically synthesized
gauggaaacuggccaacauua

SEQ ID NO: 5732 - RNA, 21 nt, Artificial
  Chemically synthesized
caacgaacucagagaaaugua

SEQ ID NO: 5733 - RNA, 21 nt, Artificial
  Chemically synthesized
aggaaagcugcagcuagaaaa

SEQ ID NO: 5734 - RNA, 21 nt, Artificial
  Chemically synthesized
ggagaaaaacguacugaaaau

SEQ ID NO: 5735 - RNA, 21 nt, Artificial
  Chemically synthesized
gcgccuuaaauaagucaguua

SEQ ID NO: 5736 - RNA, 21 nt, Artificial
  Chemically synthesized
ggagggcuaugugcccaaaaa

SEQ ID NO: 5737 - RNA, 21 nt, Artificial
  Chemically synthesized
aggacaauaacaacaacgugg

SEQ ID NO: 5738 - RNA, 21 nt, Artificial
  Chemically synthesized
cggcaaucugucugcugaaau

SEQ ID NO: 5739 - RNA, 21 nt, Artificial
  Chemically synthesized
aguugaagcccaggagaacaa

SEQ ID NO: 5740 - RNA, 21 nt, Artificial
  Chemically synthesized
caagauauggcagcuaggcaa

SEQ ID NO: 5741 - RNA, 21 nt, Artificial
  Chemically synthesized
gcugcucauggaagauccaaa

SEQ ID NO: 5742 - RNA, 21 nt, Artificial
  Chemically synthesized
ccaugauggacaagcgaauca

SEQ ID NO: 5743 - RNA, 21 nt, Artificial
  Chemically synthesized
gaacaagcggaccaacuugaa

SEQ ID NO: 5744 - RNA, 21 nt, Artificial
  Chemically synthesized
aggacugaauuuugccaauua

SEQ ID NO: 5745 - RNA, 21 nt, Artificial
  Chemically synthesized
agaggauuuccguaccgccaa

SEQ ID NO: 5746 - RNA, 21 nt, Artificial
  Chemically synthesized
uggaaacuggccaacauuaaa

SEQ ID NO: 5747 - RNA, 21 nt, Artificial
  Chemically synthesized
gaacuacagauucguaaccaa

SEQ ID NO: 5748 - RNA, 21 nt, Artificial
  Chemically synthesized
caaaggagccucuguauggaa

SEQ ID NO: 5749 - RNA, 21 nt, Artificial
  Chemically synthesized
ccgggcaucgagauugguaaa

SEQ ID NO: 5750 - RNA, 21 nt, Artificial
  Chemically synthesized
gacaagucgacuacagcaaaa

SEQ ID NO: 5751 - RNA, 21 nt, Artificial
  Chemically synthesized
ccaggagaacaagcugaagaa

SEQ ID NO: 5752 - RNA, 21 nt, Artificial
  Chemically synthesized
ccggcagaggacaauaacaac

SEQ ID NO: 5753 - RNA, 21 nt, Artificial
  Chemically synthesized
ccgcgaugaugccgaugauau

SEQ ID NO: 5754 - RNA, 21 nt, Artificial
  Chemically synthesized
ccaacugagaacagugaacaa

SEQ ID NO: 5755 - RNA, 21 nt, Artificial
  Chemically synthesized
gcguccacaaugugaauccua

SEQ ID NO: 5756 - RNA, 21 nt, Artificial
  Chemically synthesized
caaggacgaaagcgagacuga

SEQ ID NO: 5757 - RNA, 21 nt, Artificial
  Chemically synthesized
gauggacaagcgaaucaguga

SEQ ID NO: 5758 - RNA, 21 nt, Artificial
  Chemically synthesized
cgacauugaaacugcugcaga

SEQ ID NO: 5759 - RNA, 21 nt, Artificial
  Chemically synthesized
cagugccauguuccaggaaaa

SEQ ID NO: 5760 - RNA, 21 nt, Artificial
  Chemically synthesized
ggcucuauuuuucauguauga

SEQ ID NO: 5761 - RNA, 21 nt, Artificial
  Chemically synthesized
cauugaaacugcugcagacaa

SEQ ID NO: 5762 - RNA, 21 nt, Artificial
  Chemically synthesized
ccugcuggauuuuggugucaa

SEQ ID NO: 5763 - RNA, 21 nt, Artificial
  Chemically synthesized
gauugaaaaucagcagcagau

SEQ ID NO: 5764 - RNA, 21 nt, Artificial
  Chemically synthesized
guacauaguguggugaagaaa

SEQ ID NO: 5765 - RNA, 21 nt, Artificial
  Chemically synthesized
gacugaauuuugccaauuacu

SEQ ID NO: 5766 - RNA, 21 nt, Artificial
  Chemically synthesized
cuggccaacauuaaaacagaa

SEQ ID NO: 5767 - RNA, 21 nt, Artificial
  Chemically synthesized
gcagcagucuauuucugaaaa

SEQ ID NO: 5768 - RNA, 21 nt, Artificial
  Chemically synthesized
cgcugcugacgcuguguaaau

SEQ ID NO: 5769 - RNA, 21 nt, Artificial
  Chemically synthesized
gccauuuuugccucaaccaua

SEQ ID NO: 5770 - RNA, 21 nt, Artificial
  Chemically synthesized
ccacggagggaagaagugaaa

SEQ ID NO: 5771 - RNA, 21 nt, Artificial
  Chemically synthesized
gcagcuagaaaauggucuuaa

SEQ ID NO: 5772 - RNA, 21 nt, Artificial
  Chemically synthesized
cuucuucccuucaucaccaaa

SEQ ID NO: 5773 - RNA, 21 nt, Artificial
  Chemically synthesized
caagcuaugggacauacccaa

SEQ ID NO: 5774 - RNA, 21 nt, Artificial
  Chemically synthesized
acgaguugaagcccaggagaa

SEQ ID NO: 5775 - RNA, 21 nt, Artificial
  Chemically synthesized
gauuuuggugucaacgugaau

SEQ ID NO: 5776 - RNA, 21 nt, Artificial
  Chemically synthesized
guuguagaauuuugcaaggaa

SEQ ID NO: 5777 - RNA, 21 nt, Artificial
  Chemically synthesized
caguuaaagcaguguauggua

SEQ ID NO: 5778 - RNA, 21 nt, Artificial
  Chemically synthesized
acagauucguaaccaacuuaa

SEQ ID NO: 5779 - RNA, 21 nt, Artificial
  Chemically synthesized
aucugucugcugaaauagaaa

SEQ ID NO: 5780 - RNA, 21 nt, Artificial
  Chemically synthesized
ccaggagccacuuaagagauu

SEQ ID NO: 5781 - RNA, 21 nt, Artificial
  Chemically synthesized
cgaacaagcggaccaacuuga

SEQ ID NO: 5782 - RNA, 21 nt, Artificial
  Chemically synthesized
gagucguguguaauuuaugua

SEQ ID NO: 5783 - RNA, 21 nt, Artificial
  Chemically synthesized
cgugaaugcugcugauaguga

SEQ ID NO: 5784 - RNA, 21 nt, Artificial
  Chemically synthesized
cagcuuagucagcaauuggaa

SEQ ID NO: 5785 - RNA, 21 nt, Artificial
  Chemically synthesized
gaauuuugcaaggaaccugga

SEQ ID NO: 5786 - RNA, 21 nt, Artificial
  Chemically synthesized
ccguuuuaccuucggguucaa

SEQ ID NO: 5787 - RNA, 21 nt, Artificial
  Chemically synthesized
cagugaagacagaagcucuua

SEQ ID NO: 5788 - RNA, 21 nt, Artificial
  Chemically synthesized
ccgccauuuuugccucaacca

SEQ ID NO: 5789 - RNA, 21 nt, Artificial
  Chemically synthesized
gaggacaauaacaacaacgug

SEQ ID NO: 5790 - RNA, 21 nt, Artificial
  Chemically synthesized
guuccagucuuacaauggcaa

SEQ ID NO: 5791 - RNA, 21 nt, Artificial
  Chemically synthesized
ggagggaagaagugaaauuuu

SEQ ID NO: 5792 - RNA, 21 nt, Artificial
  Chemically synthesized
caguguguaugccucccagua

SEQ ID NO: 5793 - RNA, 21 nt, Artificial
  Chemically synthesized
cuuggagcacugacuguacau

SEQ ID NO: 5794 - RNA, 21 nt, Artificial
  Chemically synthesized
caaggaacagcguuuacauuu

SEQ ID NO: 5795 - RNA, 21 nt, Artificial
  Chemically synthesized
gaaguacagacugcaauuuua

SEQ ID NO: 5796 - RNA, 21 nt, Artificial
  Chemically synthesized
cagcaaaaucaugaacggcaa

SEQ ID NO: 5797 - RNA, 21 nt, Artificial
  Chemically synthesized
uggccaacauuaaaacagaau

SEQ ID NO: 5798 - RNA, 21 nt, Artificial
  Chemically synthesized
ucauguaugagucguguguaa

SEQ ID NO: 5799 - RNA, 21 nt, Artificial
  Chemically synthesized
uguacauaguguggugaagaa

SEQ ID NO: 5800 - RNA, 21 nt, Artificial
  Chemically synthesized
gagggaagaagugaaauuuuu

SEQ ID NO: 5801 - RNA, 21 nt, Artificial
  Chemically synthesized
gggagagccucagcauauacu

SEQ ID NO: 5802 - RNA, 21 nt, Artificial
  Chemically synthesized
aaagcugggugugaugaacaa

SEQ ID NO: 5803 - RNA, 21 nt, Artificial
  Chemically synthesized
ggcgguggaguuaaaaagacu

SEQ ID NO: 5804 - RNA, 21 nt, Artificial
  Chemically synthesized
uggccaugauggacaagcgaa

SEQ ID NO: 5805 - RNA, 21 nt, Artificial
  Chemically synthesized
gaacgucccauacccuuugau

SEQ ID NO: 5806 - RNA, 21 nt, Artificial
  Chemically synthesized
ggagaacaagcugaagaaaau

SEQ ID NO: 5807 - RNA, 21 nt, Artificial
  Chemically synthesized
gaacagcguuuacauuuucua

SEQ ID NO: 5808 - RNA, 21 nt, Artificial
  Chemically synthesized
cgccuuaaauaagucaguuaa

SEQ ID NO: 5809 - RNA, 21 nt, Artificial
  Chemically synthesized
ugagguggaagaucccagcaa

SEQ ID NO: 5810 - RNA, 21 nt, Artificial
  Chemically synthesized
aggacaagucgacuacagcaa

SEQ ID NO: 5811 - RNA, 21 nt, Artificial
  Chemically synthesized
gcagucuauuucugaaaauga

SEQ ID NO: 5812 - RNA, 21 nt, Artificial
  Chemically synthesized
gcguuuacauuuucuaaagca

SEQ ID NO: 5813 - RNA, 21 nt, Artificial
  Chemically synthesized
cguaaccaacuuaaccaggaa

SEQ ID NO: 5814 - RNA, 21 nt, Artificial
  Chemically synthesized
cagcagucuauuucugaaaau

SEQ ID NO: 5815 - RNA, 21 nt, Artificial
  Chemically synthesized
guugggaauccacguguugaa

SEQ ID NO: 5816 - RNA, 21 nt, Artificial
  Chemically synthesized
gggacauacccaaguccuaca

SEQ ID NO: 5817 - RNA, 21 nt, Artificial
  Chemically synthesized
gcugauaaagggucaaggcca

SEQ ID NO: 5818 - RNA, 21 nt, Artificial
  Chemically synthesized
cuacccgaacuauguuggaaa

SEQ ID NO: 5819 - RNA, 21 nt, Artificial
  Chemically synthesized
ggaguuaaaaagacuguacca

SEQ ID NO: 5820 - RNA, 21 nt, Artificial
  Chemically synthesized
guaugcucugugggacuacga

SEQ ID NO: 5821 - RNA, 21 nt, Artificial
  Chemically synthesized
ugggaaaaaaauucagcugaa

SEQ ID NO: 5822 - RNA, 21 nt, Artificial
  Chemically synthesized
agucagcaauuggaagauuua

SEQ ID NO: 5823 - RNA, 21 nt, Artificial
  Chemically synthesized
gcagcacacagcgccuuaaau

SEQ ID NO: 5824 - RNA, 21 nt, Artificial
  Chemically synthesized
uguaauaaauguaccuggaga

SEQ ID NO: 5825 - RNA, 21 nt, Artificial
  Chemically synthesized
gguggaguuaaaaagacugua

SEQ ID NO: 5826 - RNA, 21 nt, Artificial
  Chemically synthesized
gcggcgguggaguuaaaaaga

SEQ ID NO: 5827 - RNA, 21 nt, Artificial
  Chemically synthesized
aguuaaagcaguguaugguaa

SEQ ID NO: 5828 - RNA, 21 nt, Artificial
  Chemically synthesized
caacuuaaccaggaacaaaau

SEQ ID NO: 5829 - RNA, 21 nt, Artificial
  Chemically synthesized
cuuaaauaagcgcaacaugga

SEQ ID NO: 5830 - RNA, 21 nt, Artificial
  Chemically synthesized
agcagcagaaggaacucuuaa

SEQ ID NO: 5831 - RNA, 21 nt, Artificial
  Chemically synthesized
uggccgauguggacaauggaa

SEQ ID NO: 5832 - RNA, 21 nt, Artificial
  Chemically synthesized
gaacgucucuaugggaaaaaa

SEQ ID NO: 5833 - RNA, 21 nt, Artificial
  Chemically synthesized
gaggaucaucuaugaggugga

SEQ ID NO: 5834 - RNA, 21 nt, Artificial
  Chemically synthesized
gcuguguaaaugugcacaaua

SEQ ID NO: 5835 - RNA, 21 nt, Artificial
  Chemically synthesized
ggaaguacagacugcaauuuu

SEQ ID NO: 5836 - RNA, 21 nt, Artificial
  Chemically synthesized
cagcagcagucuauuucugaa

SEQ ID NO: 5837 - RNA, 21 nt, Artificial
  Chemically synthesized
agauugaaaaucagcagcaga

SEQ ID NO: 5838 - RNA, 21 nt, Artificial
  Chemically synthesized
caauggaaacaccaaugccaa

SEQ ID NO: 5839 - RNA, 21 nt, Artificial
  Chemically synthesized
ccggaaacaaccugucgagau

SEQ ID NO: 5840 - RNA, 21 nt, Artificial
  Chemically synthesized
uacauaguguggugaagaaaa

SEQ ID NO: 5841 - RNA, 21 nt, Artificial
  Chemically synthesized
gagagguacuuucgccuccaa

SEQ ID NO: 5842 - RNA, 21 nt, Artificial
  Chemically synthesized
aauucuagcucuuccgugaaa

SEQ ID NO: 5843 - RNA, 21 nt, Artificial
  Chemically synthesized
agagcaacgaacucagagaaa

SEQ ID NO: 5844 - RNA, 21 nt, Artificial
  Chemically synthesized
ugaacgucucuaugggaaaaa

SEQ ID NO: 5845 - RNA, 21 nt, Artificial
  Chemically synthesized
ggaagauccaaauccgcuaau

SEQ ID NO: 5846 - RNA, 21 nt, Artificial
  Chemically synthesized
ggaaggagaguucgaucuggu

SEQ ID NO: 5847 - RNA, 21 nt, Artificial
  Chemically synthesized
ggcaacagcagcagauugaaa

SEQ ID NO: 5848 - RNA, 21 nt, Artificial
  Chemically synthesized
cagauguugguugccaaggaa

SEQ ID NO: 5849 - RNA, 21 nt, Artificial
  Chemically synthesized
agcagcagucuauuucugaaa

SEQ ID NO: 5850 - RNA, 21 nt, Artificial
  Chemically synthesized
uggauuuuggugucaacguga

SEQ ID NO: 5851 - RNA, 21 nt, Artificial
  Chemically synthesized
agucuuacaauggcaaauuga

SEQ ID NO: 5852 - RNA, 21 nt, Artificial
  Chemically synthesized
cgacuacagcaaaaucaugaa

SEQ ID NO: 5853 - RNA, 21 nt, Artificial
  Chemically synthesized
aguguggugaagaaaagugaa

SEQ ID NO: 5854 - RNA, 21 nt, Artificial
  Chemically synthesized
cuggagaaaaacguacugaaa

SEQ ID NO: 5855 - RNA, 21 nt, Artificial
  Chemically synthesized
gaauucuagcucuuccgugaa

SEQ ID NO: 5856 - RNA, 21 nt, Artificial
  Chemically synthesized
cuguguaaaugugcacaauaa

SEQ ID NO: 5857 - RNA, 21 nt, Artificial
  Chemically synthesized
agcaaaaucaugaacggcaau

SEQ ID NO: 5858 - RNA, 21 nt, Artificial
  Chemically synthesized
cagcuaccaggagccacuuaa

SEQ ID NO: 5859 - RNA, 21 nt, Artificial
  Chemically synthesized
ggugcagaggaucaucuauga

SEQ ID NO: 5860 - RNA, 21 nt, Artificial
  Chemically synthesized
gcaggaaguacagacugcaau

SEQ ID NO: 5861 - RNA, 21 nt, Artificial
  Chemically synthesized
aaaagugaacgcccuuguaga

SEQ ID NO: 5862 - RNA, 21 nt, Artificial
  Chemically synthesized
gaguuaaaaagacuguaccaa

SEQ ID NO: 5863 - RNA, 21 nt, Artificial
  Chemically synthesized
ggcagcugccauuuagcugaa

SEQ ID NO: 5864 - RNA, 21 nt, Artificial
  Chemically synthesized
gcccauuaacugggagaggua

SEQ ID NO: 5865 - RNA, 21 nt, Artificial
  Chemically synthesized
gcgaaucagugaacugcguga

SEQ ID NO: 5866 - RNA, 21 nt, Artificial
  Chemically synthesized
ugauaaagggucaaggccaca

SEQ ID NO: 5867 - RNA, 21 nt, Artificial
  Chemically synthesized
gcauauacucuucuccuccga

SEQ ID NO: 5868 - RNA, 21 nt, Artificial
  Chemically synthesized
gaucauaugauguacgaacau

SEQ ID NO: 5869 - RNA, 21 nt, Artificial
  Chemically synthesized
agauguugguugccaaggaac

SEQ ID NO: 5870 - RNA, 21 nt, Artificial
  Chemically synthesized
ccaaggacugaauuuugccaa

SEQ ID NO: 5871 - RNA, 21 nt, Artificial
  Chemically synthesized
ggaucaucuaugagguggaag

SEQ ID NO: 5872 - RNA, 21 nt, Artificial
  Chemically synthesized
guguaugguaagcccguuuua

SEQ ID NO: 5873 - RNA, 21 nt, Artificial
  Chemically synthesized
gagaguggugccgccauuuuu

SEQ ID NO: 5874 - RNA, 21 nt, Artificial
  Chemically synthesized
agacaagugugaggagaugga

SEQ ID NO: 5875 - RNA, 21 nt, Artificial
  Chemically synthesized
ccaaauaaauacccacuuuca

SEQ ID NO: 5876 - RNA, 21 nt, Artificial
  Chemically synthesized
guacguacaggcuuuuuauau

SEQ ID NO: 5877 - RNA, 21 nt, Artificial
  Chemically synthesized
aacggcaaucugucugcugaa

SEQ ID NO: 5878 - RNA, 21 nt, Artificial
  Chemically synthesized
gucucuggaaggagaguucga

SEQ ID NO: 5879 - RNA, 21 nt, Artificial
  Chemically synthesized
ggagauggaggaaggcuacau

SEQ ID NO: 5880 - RNA, 21 nt, Artificial
  Chemically synthesized
gggcuguauccacggaucaaa

SEQ ID NO: 5881 - RNA, 21 nt, Artificial
  Chemically synthesized
guugaucagcuuagucagcaa

SEQ ID NO: 5882 - RNA, 21 nt, Artificial
  Chemically synthesized
caagugugaggagauggagga

SEQ ID NO: 5883 - RNA, 21 nt, Artificial
  Chemically synthesized
ugaagaaaagugaacgcccuu

SEQ ID NO: 5884 - RNA, 21 nt, Artificial
  Chemically synthesized
aauggaaacaccaaugccaau

SEQ ID NO: 5885 - RNA, 21 nt, Artificial
  Chemically synthesized
ugcagacaagugugaggagau

SEQ ID NO: 5886 - RNA, 21 nt, Artificial
  Chemically synthesized
gaaguuccuauaacaccggaa

SEQ ID NO: 5887 - RNA, 21 nt, Artificial
  Chemically synthesized
cagcuagaaaauggucuuaau

SEQ ID NO: 5888 - RNA, 21 nt, Artificial
  Chemically synthesized
gaggacaagucgacuacagca

SEQ ID NO: 5889 - RNA, 21 nt, Artificial
  Chemically synthesized
gguugggaauccacguguuga

SEQ ID NO: 5890 - RNA, 21 nt, Artificial
  Chemically synthesized
cacggagggaagaagugaaau

SEQ ID NO: 5891 - RNA, 21 nt, Artificial
  Chemically synthesized
gaggugugaauuguacguaca

SEQ ID NO: 5892 - RNA, 21 nt, Artificial
  Chemically synthesized
aacucuuaaauaagcgcaaca

SEQ ID NO: 5893 - RNA, 21 nt, Artificial
  Chemically synthesized
gaucaucuaugagguggaaga

SEQ ID NO: 5894 - RNA, 21 nt, Artificial
  Chemically synthesized
uguacguacaggcuuuuuaua

SEQ ID NO: 5895 - RNA, 21 nt, Artificial
  Chemically synthesized
gauguugguugccaaggaaca

SEQ ID NO: 5896 - RNA, 21 nt, Artificial
  Chemically synthesized
ugagcaacaaugaacagauuu

SEQ ID NO: 5897 - RNA, 21 nt, Artificial
  Chemically synthesized
aacgaacucagagaaauguaa

SEQ ID NO: 5898 - RNA, 21 nt, Artificial
  Chemically synthesized
agauuauugugcuguuuucca

SEQ ID NO: 5899 - RNA, 21 nt, Artificial
  Chemically synthesized
caggaaaagaagcaggaagua

SEQ ID NO: 5900 - RNA, 21 nt, Artificial
  Chemically synthesized
cagacagcguccacaauguga

SEQ ID NO: 5901 - RNA, 21 nt, Artificial
  Chemically synthesized
ggaccaacuugaagaagccca

SEQ ID NO: 5902 - RNA, 21 nt, Artificial
  Chemically synthesized
gaugaacaaagguguggcgua

SEQ ID NO: 5903 - RNA, 21 nt, Artificial
  Chemically synthesized
gccucaaccauaagcgacauu

SEQ ID NO: 5904 - RNA, 21 nt, Artificial
  Chemically synthesized
cagaaggaacucuuaaauaag

SEQ ID NO: 5905 - RNA, 21 nt, Artificial
  Chemically synthesized
caggaaguacagacugcaauu

SEQ ID NO: 5906 - RNA, 21 nt, Artificial
  Chemically synthesized
cacagcgccuuaaauaaguca

SEQ ID NO: 5907 - RNA, 21 nt, Artificial
  Chemically synthesized
gucuuaauggugcucacuuua

SEQ ID NO: 5908 - RNA, 21 nt, Artificial
  Chemically synthesized
gacagugaauucaaguuccau

SEQ ID NO: 5909 - RNA, 21 nt, Artificial
  Chemically synthesized
gggugugaugaacaaaggugu

SEQ ID NO: 5910 - RNA, 21 nt, Artificial
  Chemically synthesized
gauguacgaacaucuucagaa

SEQ ID NO: 5911 - RNA, 21 nt, Artificial
  Chemically synthesized
cuuucuccaguuugcccauua

SEQ ID NO: 5912 - RNA, 21 nt, Artificial
  Chemically synthesized
cagugaauucaaguuccauau

SEQ ID NO: 5913 - RNA, 21 nt, Artificial
  Chemically synthesized
aaaagcugggugugaugaaca

SEQ ID NO: 5914 - RNA, 21 nt, Artificial
  Chemically synthesized
gucagcaauuggaagauuuaa

SEQ ID NO: 5915 - RNA, 21 nt, Artificial
  Chemically synthesized
cauucaaagcuacccgaacua

SEQ ID NO: 5916 - RNA, 21 nt, Artificial
  Chemically synthesized
ccaggaaaagaagcaggaagu

SEQ ID NO: 5917 - RNA, 21 nt, Artificial
  Chemically synthesized
cauguaugagucguguguaau

SEQ ID NO: 5918 - RNA, 21 nt, Artificial
  Chemically synthesized
aaaagaagcaggaaguacaga

SEQ ID NO: 5919 - RNA, 21 nt, Artificial
  Chemically synthesized
ccaaggaacagcguuuacauu

SEQ ID NO: 5920 - RNA, 21 nt, Artificial
  Chemically synthesized
ugguugccagugaagacagaa

SEQ ID NO: 5921 - RNA, 21 nt, Artificial
  Chemically synthesized
uccuguuccaguucaccuaaa

SEQ ID NO: 5922 - RNA, 21 nt, Artificial
  Chemically synthesized
aggagauggaggaaggcuaca

SEQ ID NO: 5923 - RNA, 21 nt, Artificial
  Chemically synthesized
gauucguaaccaacuuaacca

SEQ ID NO: 5924 - RNA, 21 nt, Artificial
  Chemically synthesized
gacaauaacaacaacguggcc

SEQ ID NO: 5925 - RNA, 21 nt, Artificial
  Chemically synthesized
gaccaagugacaacugggaga

SEQ ID NO: 5926 - RNA, 21 nt, Artificial
  Chemically synthesized
aagcugggugugaugaacaaa

SEQ ID NO: 5927 - RNA, 21 nt, Artificial
  Chemically synthesized
gguuccagucuuacaauggca

SEQ ID NO: 5928 - RNA, 21 nt, Artificial
  Chemically synthesized
aggcaacagcagcagauugaa

SEQ ID NO: 5929 - RNA, 21 nt, Artificial
  Chemically synthesized
agcugaaccgugugaauggca

SEQ ID NO: 5930 - RNA, 21 nt, Artificial
  Chemically synthesized
aggugugaauuguacguacag

SEQ ID NO: 5931 - RNA, 21 nt, Artificial
  Chemically synthesized
cauuaggccuuuccuggcuga

SEQ ID NO: 5932 - RNA, 21 nt, Artificial
  Chemically synthesized
agaccauucaaagcuacccga

SEQ ID NO: 5933 - RNA, 21 nt, Artificial
  Chemically synthesized
ccaagagcaacgaacucagag

SEQ ID NO: 5934 - RNA, 21 nt, Artificial
  Chemically synthesized
cugggugugaugaacaaaggu

SEQ ID NO: 5935 - RNA, 21 nt, Artificial
  Chemically synthesized
cgguggaguuaaaaagacugu

SEQ ID NO: 5936 - RNA, 21 nt, Artificial
  Chemically synthesized
aaaugaacgucccauacccuu

SEQ ID NO: 5937 - RNA, 21 nt, Artificial
  Chemically synthesized
ugaggagauggaggaaggcua

SEQ ID NO: 5938 - RNA, 21 nt, Artificial
  Chemically synthesized
cgucccauacccuuugaucau

SEQ ID NO: 5939 - RNA, 21 nt, Artificial
  Chemically synthesized
cccuuaggcucuauuuuucau

SEQ ID NO: 5940 - RNA, 21 nt, Artificial
  Chemically synthesized
acagcaaaaucaugaacggca

SEQ ID NO: 5941 - RNA, 21 nt, Artificial
  Chemically synthesized
gaauggguuccagucuuacaa

SEQ ID NO: 5942 - RNA, 21 nt, Artificial
  Chemically synthesized
guuaaagcaguguaugguaag

SEQ ID NO: 5943 - RNA, 21 nt, Artificial
  Chemically synthesized
aggagaguucgaucuggugca

SEQ ID NO: 5944 - RNA, 21 nt, Artificial
  Chemically synthesized
ugcaaugagaggacaagucga

SEQ ID NO: 5945 - RNA, 21 nt, Artificial
  Chemically synthesized
gauggaggaaggcuacaucca

SEQ ID NO: 5946 - RNA, 21 nt, Artificial
  Chemically synthesized
cagugcucccaguuucuauau

SEQ ID NO: 5947 - RNA, 21 nt, Artificial
  Chemically synthesized
cccucucagagcuccaagaua

SEQ ID NO: 5948 - RNA, 21 nt, Artificial
  Chemically synthesized
cauaguguggugaagaaaagu

SEQ ID NO: 5949 - RNA, 21 nt, Artificial
  Chemically synthesized
uacagauucguaaccaacuua

SEQ ID NO: 5950 - RNA, 21 nt, Artificial
  Chemically synthesized
gagaguucgaucuggugcaga

SEQ ID NO: 5951 - RNA, 21 nt, Artificial
  Chemically synthesized
aacgucucuaugggaaaaaaa

SEQ ID NO: 5952 - RNA, 21 nt, Artificial
  Chemically synthesized
guguacagacucacugaugca

SEQ ID NO: 5953 - RNA, 21 nt, Artificial
  Chemically synthesized
gcaagccacaccaccuaagaa

SEQ ID NO: 5954 - RNA, 21 nt, Artificial
  Chemically synthesized
agcccaggagaacaagcugaa

SEQ ID NO: 5955 - RNA, 21 nt, Artificial
  Chemically synthesized
auucgugcaaugagaggacaa

SEQ ID NO: 5956 - RNA, 21 nt, Artificial
  Chemically synthesized
gacuguaccaagaacuacaga

SEQ ID NO: 5957 - RNA, 21 nt, Artificial
  Chemically synthesized
auguaauaaauguaccuggag

SEQ ID NO: 5958 - RNA, 21 nt, Artificial
  Chemically synthesized
cauauacucuucuccuccgau

SEQ ID NO: 5959 - RNA, 21 nt, Artificial
  Chemically synthesized
caagagcaacgaacucagaga

SEQ ID NO: 5960 - RNA, 21 nt, Artificial
  Chemically synthesized
gaauggcacgucaucaccaca

SEQ ID NO: 5961 - RNA, 21 nt, Artificial
  Chemically synthesized
gaagaaaauucgugcaaugag

SEQ ID NO: 5962 - RNA, 21 nt, Artificial
  Chemically synthesized
ggaaagcugcagcuagaaaau

SEQ ID NO: 5963 - RNA, 21 nt, Artificial
  Chemically synthesized
cccaagagcaacgaacucaga

SEQ ID NO: 5964 - RNA, 21 nt, Artificial
  Chemically synthesized
caacauggagguggccaugau

SEQ ID NO: 5965 - RNA, 21 nt, Artificial
  Chemically synthesized
cggcgguggaguuaaaaagac

SEQ ID NO: 5966 - RNA, 21 nt, Artificial
  Chemically synthesized
gaccauucaaagcuacccgaa

SEQ ID NO: 5967 - RNA, 21 nt, Artificial
  Chemically synthesized
ccugaaaaagcgcagcuccau

SEQ ID NO: 5968 - RNA, 21 nt, Artificial
  Chemically synthesized
aaaggagccucuguauggaaa

SEQ ID NO: 5969 - RNA, 21 nt, Artificial
  Chemically synthesized
caguguaugguaagcccguuu

SEQ ID NO: 5970 - RNA, 21 nt, Artificial
  Chemically synthesized
aaucugucugcugaaauagaa

SEQ ID NO: 5971 - RNA, 21 nt, Artificial
  Chemically synthesized
cauccagaagcugcuguacca

SEQ ID NO: 5972 - RNA, 21 nt, Artificial
  Chemically synthesized
aggagccacuuaagagauuau

SEQ ID NO: 5973 - RNA, 21 nt, Artificial
  Chemically synthesized
caacagcagcagauugaaaau

SEQ ID NO: 5974 - RNA, 21 nt, Artificial
  Chemically synthesized
gcagcagauugaaaaucagca

SEQ ID NO: 5975 - RNA, 21 nt, Artificial
  Chemically synthesized
cacacagcgccuuaaauaagu

SEQ ID NO: 5976 - RNA, 21 nt, Artificial
  Chemically synthesized
guuaaaaagacuguaccaaga

SEQ ID NO: 5977 - RNA, 21 nt, Artificial
  Chemically synthesized
caggaaaagcugggugugaug

SEQ ID NO: 5978 - RNA, 21 nt, Artificial
  Chemically synthesized
aaggguugaucagcuuaguca

SEQ ID NO: 5979 - RNA, 21 nt, Artificial
  Chemically synthesized
cacaacagauucagcagagga

SEQ ID NO: 5980 - RNA, 21 nt, Artificial
  Chemically synthesized
cagcacacagcgccuuaaaua

SEQ ID NO: 5981 - RNA, 21 nt, Artificial
  Chemically synthesized
caaggacugaauuuugccaau

SEQ ID NO: 5982 - RNA, 21 nt, Artificial
  Chemically synthesized
caggagccacuuaagagauua

SEQ ID NO: 5983 - RNA, 21 nt, Artificial
  Chemically synthesized
gcucaaauucaguucccugaa

SEQ ID NO: 5984 - RNA, 21 nt, Artificial
  Chemically synthesized
acagugaauucaaguuccaua

SEQ ID NO: 5985 - RNA, 21 nt, Artificial
  Chemically synthesized
agaaaagugaacgcccuugua

SEQ ID NO: 5986 - RNA, 21 nt, Artificial
  Chemically synthesized
uguggacaauggaaacaccaa

SEQ ID NO: 5987 - RNA, 21 nt, Artificial
  Chemically synthesized
ccaagauauggcagcuaggca

SEQ ID NO: 5988 - RNA, 21 nt, Artificial
  Chemically synthesized
ggagccucuguauggaaacau

SEQ ID NO: 5989 - RNA, 21 nt, Artificial
  Chemically synthesized
gaaagaacgaguugaagccca

SEQ ID NO: 5990 - RNA, 21 nt, Artificial
  Chemically synthesized
acgucucuaugggaaaaaaau

SEQ ID NO: 5991 - RNA, 21 nt, Artificial
  Chemically synthesized
gagcaacaaugaacagauuuu

SEQ ID NO: 5992 - RNA, 21 nt, Artificial
  Chemically synthesized
gcccuuaggcucuauuuuuca

SEQ ID NO: 5993 - RNA, 21 nt, Artificial
  Chemically synthesized
caggagaacaagcugaagaaa

SEQ ID NO: 5994 - RNA, 21 nt, Artificial
  Chemically synthesized
ugaagaaaauucgugcaauga

SEQ ID NO: 5995 - RNA, 21 nt, Artificial
  Chemically synthesized
caaugccaauggaaaccugga

SEQ ID NO: 5996 - RNA, 21 nt, Artificial
  Chemically synthesized
aaaucaugaacggcaaucugu

SEQ ID NO: 5997 - RNA, 21 nt, Artificial
  Chemically synthesized
cauggaagauccaaauccgcu

SEQ ID NO: 5998 - RNA, 21 nt, Artificial
  Chemically synthesized
gucagacccaagagcaacgaa

SEQ ID NO: 5999 - RNA, 21 nt, Artificial
  Chemically synthesized
acccuuugaucauaugaugua

SEQ ID NO: 6000 - RNA, 21 nt, Artificial
  Chemically synthesized
gcagauguugguugccaagga

SEQ ID NO: 6001 - RNA, 21 nt, Artificial
  Chemically synthesized
caaauccgcuaaugauggaaa

SEQ ID NO: 6002 - RNA, 21 nt, Artificial
  Chemically synthesized
ugauccuucuucccuucauca

SEQ ID NO: 6003 - RNA, 21 nt, Artificial
  Chemically synthesized
cagucucucaguauugccuca

SEQ ID NO: 6004 - RNA, 21 nt, Artificial
  Chemically synthesized
aaaagacuguaccaagaacua

SEQ ID NO: 6005 - RNA, 21 nt, Artificial
  Chemically synthesized
ucagcuuagucagcaauugga

SEQ ID NO: 6006 - RNA, 21 nt, Artificial
  Chemically synthesized
agugaaauuuuuccuucgaca

SEQ ID NO: 6007 - RNA, 21 nt, Artificial
  Chemically synthesized
gagauguuguagaauuuugca

SEQ ID NO: 6008 - RNA, 21 nt, Artificial
  Chemically synthesized
agcacacagcgccuuaaauaa

SEQ ID NO: 6009 - RNA, 21 nt, Artificial
  Chemically synthesized
agccacaccaccuaagaauua

SEQ ID NO: 6010 - RNA, 21 nt, Artificial
  Chemically synthesized
gaaggagaguucgaucuggug

SEQ ID NO: 6011 - RNA, 21 nt, Artificial
  Chemically synthesized
ggcaaucugucugcugaaaua

SEQ ID NO: 6012 - RNA, 21 nt, Artificial
  Chemically synthesized
uaguguggugaagaaaaguga

SEQ ID NO: 6013 - RNA, 21 nt, Artificial
  Chemically synthesized
aagugugaggagauggaggaa

SEQ ID NO: 6014 - RNA, 21 nt, Artificial
  Chemically synthesized
aaacaccaaugccaauggaaa

SEQ ID NO: 6015 - RNA, 21 nt, Artificial
  Chemically synthesized
cacucauccuuucucacacuu

SEQ ID NO: 6016 - RNA, 21 nt, Artificial
  Chemically synthesized
accugucgagauguuguagaa

SEQ ID NO: 6017 - RNA, 21 nt, Artificial
  Chemically synthesized
cguucaccucugcaaacagcu

SEQ ID NO: 6018 - RNA, 21 nt, Artificial
  Chemically synthesized
ccuuggagcacugacuguaca

SEQ ID NO: 6019 - RNA, 21 nt, Artificial
  Chemically synthesized
cgcgaugaugccgaugauauu

SEQ ID NO: 6020 - RNA, 21 nt, Artificial
  Chemically synthesized
cgaucuggugcagaggaucau

SEQ ID NO: 6021 - RNA, 21 nt, Artificial
  Chemically synthesized
uauugugcuguuuuccaggaa

SEQ ID NO: 6022 - RNA, 21 nt, Artificial
  Chemically synthesized
gaaauugaaagaacgaguuga

SEQ ID NO: 6023 - RNA, 21 nt, Artificial
  Chemically synthesized
gcgaugaugccgaugauauua

SEQ ID NO: 6024 - RNA, 21 nt, Artificial
  Chemically synthesized
acaagucgacuacagcaaaau

SEQ ID NO: 6025 - RNA, 21 nt, Artificial
  Chemically synthesized
ccucacaacagauucagcaga

SEQ ID NO: 6026 - RNA, 21 nt, Artificial
  Chemically synthesized
uguacgaacaucuucagaaau

SEQ ID NO: 6027 - RNA, 21 nt, Artificial
  Chemically synthesized
ucagcagcagucuauuucuga

SEQ ID NO: 6028 - RNA, 21 nt, Artificial
  Chemically synthesized
uuuuaaggguugaucagcuua

SEQ ID NO: 6029 - RNA, 21 nt, Artificial
  Chemically synthesized
ccaggaacaaaauucaaaacu

SEQ ID NO: 6030 - RNA, 21 nt, Artificial
  Chemically synthesized
gguugaucagcuuagucagca

SEQ ID NO: 6031 - RNA, 21 nt, Artificial
  Chemically synthesized
aagaaaauucgugcaaugaga

SEQ ID NO: 6032 - RNA, 21 nt, Artificial
  Chemically synthesized
guuugcccauuaacugggaga

SEQ ID NO: 6033 - RNA, 21 nt, Artificial
  Chemically synthesized
ucaaaugcugcucauggaaga

SEQ ID NO: 6034 - RNA, 21 nt, Artificial
  Chemically synthesized
ccaaauccgcuaaugauggaa

SEQ ID NO: 6035 - RNA, 21 nt, Artificial
  Chemically synthesized
caagcggaccaacuugaagaa

SEQ ID NO: 6036 - RNA, 21 nt, Artificial
  Chemically synthesized
gaagacagaagcucuuacuga

SEQ ID NO: 6037 - RNA, 21 nt, Artificial
  Chemically synthesized
uaggcaacagcagcagauuga

SEQ ID NO: 6038 - RNA, 21 nt, Artificial
  Chemically synthesized
acaacagauucagcagaggau

SEQ ID NO: 6039 - RNA, 21 nt, Artificial
  Chemically synthesized
auggaaacuggccaacauuaa

SEQ ID NO: 6040 - RNA, 21 nt, Artificial
  Chemically synthesized
ugagaaagagccugagcagga

SEQ ID NO: 6041 - RNA, 21 nt, Artificial
  Chemically synthesized
ggagcacugacuguacauagu

SEQ ID NO: 6042 - RNA, 21 nt, Artificial
  Chemically synthesized
ucaucagaugccaaugauaau

SEQ ID NO: 6043 - RNA, 21 nt, Artificial
  Chemically synthesized
agacagcguccacaaugugaa

SEQ ID NO: 6044 - RNA, 21 nt, Artificial
  Chemically synthesized
cauccagugcucccaguuucu

SEQ ID NO: 6045 - RNA, 21 nt, Artificial
  Chemically synthesized
acaauaacaacaacguggcca

SEQ ID NO: 6046 - RNA, 21 nt, Artificial
  Chemically synthesized
aguacagacugcaauuuuaag

SEQ ID NO: 6047 - RNA, 21 nt, Artificial
  Chemically synthesized
gccgaugauauuaacuguuuu

SEQ ID NO: 6048 - RNA, 21 nt, Artificial
  Chemically synthesized
acagcagcagauugaaaauca

SEQ ID NO: 6049 - RNA, 21 nt, Artificial
  Chemically synthesized
agaaaauucgugcaaugagag

SEQ ID NO: 6050 - RNA, 21 nt, Artificial
  Chemically synthesized
ggacugaauuuugccaauuac

SEQ ID NO: 6051 - RNA, 21 nt, Artificial
  Chemically synthesized
cagacugcaauuuuaaggguu

SEQ ID NO: 6052 - RNA, 21 nt, Artificial
  Chemically synthesized
caugauccuucuucccuucau

SEQ ID NO: 6053 - RNA, 21 nt, Artificial
  Chemically synthesized
gaccaacuugaagaagcccaa

SEQ ID NO: 6054 - RNA, 21 nt, Artificial
  Chemically synthesized
ggaauccacguguugaacuua

SEQ ID NO: 6055 - RNA, 21 nt, Artificial
  Chemically synthesized
ggacacucauccuuucucaca

SEQ ID NO: 6056 - RNA, 21 nt, Artificial
  Chemically synthesized
ccgucaucagaugccaaugau

SEQ ID NO: 6057 - RNA, 21 nt, Artificial
  Chemically synthesized
ccaaugauaaugaguuaccuu

SEQ ID NO: 6058 - RNA, 21 nt, Artificial
  Chemically synthesized
cagugaacugcgugaacgucu

SEQ ID NO: 6059 - RNA, 21 nt, Artificial
  Chemically synthesized
cuguuuuccaggaaagcugca

SEQ ID NO: 6060 - RNA, 21 nt, Artificial
  Chemically synthesized
ucguaaccaacuuaaccagga

SEQ ID NO: 6061 - RNA, 21 nt, Artificial
  Chemically synthesized
augggacauacccaaguccua

SEQ ID NO: 6062 - RNA, 21 nt, Artificial
  Chemically synthesized
aauggguuccagucuuacaau

SEQ ID NO: 6063 - RNA, 21 nt, Artificial
  Chemically synthesized
aguucgaucuggugcagagga

SEQ ID NO: 6064 - RNA, 21 nt, Artificial
  Chemically synthesized
cgggcaucgagauugguaaag

SEQ ID NO: 6065 - RNA, 21 nt, Artificial
  Chemically synthesized
cugucgagauguuguagaauu

SEQ ID NO: 6066 - RNA, 21 nt, Artificial
  Chemically synthesized
guaacagcguucaccucugca

SEQ ID NO: 6067 - RNA, 21 nt, Artificial
  Chemically synthesized
ggccaacauuaaaacagaauu

SEQ ID NO: 6068 - RNA, 21 nt, Artificial
  Chemically synthesized
cguguugaacuuacccucuca

SEQ ID NO: 6069 - RNA, 21 nt, Artificial
  Chemically synthesized
cgucucuaugggaaaaaaauu

SEQ ID NO: 6070 - RNA, 21 nt, Artificial
  Chemically synthesized
ugaucagcuuagucagcaauu

SEQ ID NO: 6071 - RNA, 21 nt, Artificial
  Chemically synthesized
gccucaaaugcugcucaugga

SEQ ID NO: 6072 - RNA, 21 nt, Artificial
  Chemically synthesized
ccauguuccaggaaaagaagc

SEQ ID NO: 6073 - RNA, 21 nt, Artificial
  Chemically synthesized
cugggagagccucagcauaua

SEQ ID NO: 6074 - RNA, 21 nt, Artificial
  Chemically synthesized
ccaacuugaagaagcccaacu

SEQ ID NO: 6075 - RNA, 21 nt, Artificial
  Chemically synthesized
gcuuagucagcaauuggaaga

SEQ ID NO: 6076 - RNA, 21 nt, Artificial
  Chemically synthesized
acugaauggguuccagucuua

SEQ ID NO: 6077 - RNA, 21 nt, Artificial
  Chemically synthesized
gucccauacccuuugaucaua

SEQ ID NO: 6078 - RNA, 21 nt, Artificial
  Chemically synthesized
ccaggcuccucacaacagauu

SEQ ID NO: 6079 - RNA, 21 nt, Artificial
  Chemically synthesized
cuguacauaguguggugaaga

SEQ ID NO: 6080 - RNA, 21 nt, Artificial
  Chemically synthesized
ucuugagcaacaaugaacaga

SEQ ID NO: 6081 - RNA, 21 nt, Artificial
  Chemically synthesized
cuuucucacacuucccacaca

SEQ ID NO: 6082 - RNA, 21 nt, Artificial
  Chemically synthesized
gaaaggaaaacugaauggguu

SEQ ID NO: 6083 - RNA, 21 nt, Artificial
  Chemically synthesized
caccuuggagcacugacugua

SEQ ID NO: 6084 - RNA, 21 nt, Artificial
  Chemically synthesized
gcuguuuggugccugaaggau

SEQ ID NO: 6085 - RNA, 21 nt, Artificial
  Chemically synthesized
ccaagcuaugggacauaccca

SEQ ID NO: 6086 - RNA, 21 nt, Artificial
  Chemically synthesized
cuucagaaauugaaagaacga

SEQ ID NO: 6087 - RNA, 21 nt, Artificial
  Chemically synthesized
gaaaguacugagaaagagccu

SEQ ID NO: 6088 - RNA, 21 nt, Artificial
  Chemically synthesized
ugccauguuccaggaaaagaa

SEQ ID NO: 6089 - RNA, 21 nt, Artificial
  Chemically synthesized
cugcugaaauagaaagguuca

SEQ ID NO: 6090 - RNA, 21 nt, Artificial
  Chemically synthesized
gagaacaagcugaagaaaauu

SEQ ID NO: 6091 - RNA, 21 nt, Artificial
  Chemically synthesized
caucgugaaguuccugcugga

SEQ ID NO: 6092 - RNA, 21 nt, Artificial
  Chemically synthesized
agcugaagaaaauucgugcaa

SEQ ID NO: 6093 - RNA, 21 nt, Artificial
  Chemically synthesized
gacugcaauuuuaaggguuga

SEQ ID NO: 6094 - RNA, 21 nt, Artificial
  Chemically synthesized
caagccacaccaccuaagaau

SEQ ID NO: 6095 - RNA, 21 nt, Artificial
  Chemically synthesized
ugaaaaucagcagcagauguu

SEQ ID NO: 6096 - RNA, 21 nt, Artificial
  Chemically synthesized
caauggaaaccuggaagagcu

SEQ ID NO: 6097 - RNA, 21 nt, Artificial
  Chemically synthesized
gaaaauggucuuaauggugcu

SEQ ID NO: 6098 - RNA, 21 nt, Artificial
  Chemically synthesized
ggaacagcguuuacauuuucu

SEQ ID NO: 6099 - RNA, 21 nt, Artificial
  Chemically synthesized
ggcuguauccacggaucaaac

SEQ ID NO: 6100 - RNA, 21 nt, Artificial
  Chemically synthesized
gagggcuaugugcccaaaaac

SEQ ID NO: 6101 - RNA, 21 nt, Artificial
  Chemically synthesized
ccauuuagcugaaguguggag

SEQ ID NO: 6102 - RNA, 21 nt, Artificial
  Chemically synthesized
gugaauuguacguacaggcuu

SEQ ID NO: 6103 - RNA, 21 nt, Artificial
  Chemically synthesized
accaacuuaaccaggaacaaa

SEQ ID NO: 6104 - RNA, 21 nt, Artificial
  Chemically synthesized
ugauggaaacuggccaacauu

SEQ ID NO: 6105 - RNA, 21 nt, Artificial
  Chemically synthesized
ugcuguaccagcgcuucaaca

SEQ ID NO: 6106 - RNA, 21 nt, Artificial
  Chemically synthesized
cagcaauuggaagauuuaaag

SEQ ID NO: 6107 - RNA, 21 nt, Artificial
  Chemically synthesized
cucuucuccuccgaucucaca

SEQ ID NO: 6108 - RNA, 21 nt, Artificial
  Chemically synthesized
aggacgaaagcgagacugagu

SEQ ID NO: 6109 - RNA, 21 nt, Artificial
  Chemically synthesized
aaaacuucagcagcagaagga

SEQ ID NO: 6110 - RNA, 21 nt, Artificial
  Chemically synthesized
cuugaagaagcccaacucgga

SEQ ID NO: 6111 - RNA, 21 nt, Artificial
  Chemically synthesized
gcugcagcuagaaaauggucu

SEQ ID NO: 6112 - RNA, 21 nt, Artificial
  Chemically synthesized
gcugaagaaaauucgugcaau

SEQ ID NO: 6113 - RNA, 21 nt, Artificial
  Chemically synthesized
gcagauugaaaaucagcagca

SEQ ID NO: 6114 - RNA, 21 nt, Artificial
  Chemically synthesized
ggccaugauggacaagcgaau

SEQ ID NO: 6115 - RNA, 21 nt, Artificial
  Chemically synthesized
gcuaccaggagccacuuaaga

SEQ ID NO: 6116 - RNA, 21 nt, Artificial
  Chemically synthesized
guguggugaagaaaagugaac

SEQ ID NO: 6117 - RNA, 21 nt, Artificial
  Chemically synthesized
cccuuucuccaguuugcccau

SEQ ID NO: 6118 - RNA, 21 nt, Artificial
  Chemically synthesized
guguugcugcccaguguguau

SEQ ID NO: 6119 - RNA, 21 nt, Artificial
  Chemically synthesized
gguugccaaggaacagcguuu

SEQ ID NO: 6120 - RNA, 21 nt, Artificial
  Chemically synthesized
ucccauacccuuugaucauau

SEQ ID NO: 6121 - RNA, 21 nt, Artificial
  Chemically synthesized
aggaaaagcugggugugauga

SEQ ID NO: 6122 - RNA, 21 nt, Artificial
  Chemically synthesized
uguugaacuuacccucucaga

SEQ ID NO: 6123 - RNA, 21 nt, Artificial
  Chemically synthesized
uugccauuaagaagucccaua

SEQ ID NO: 6124 - RNA, 21 nt, Artificial
  Chemically synthesized
ccugucgagauguuguagaau

SEQ ID NO: 6125 - RNA, 21 nt, Artificial
  Chemically synthesized
aguuaaaaagacuguaccaag

SEQ ID NO: 6126 - RNA, 21 nt, Artificial
  Chemically synthesized
guggacaauggaaacaccaau

SEQ ID NO: 6127 - RNA, 21 nt, Artificial
  Chemically synthesized
ugccaauggaaaccuggaaga

SEQ ID NO: 6128 - RNA, 21 nt, Artificial
  Chemically synthesized
acggcaaucugucugcugaaa

SEQ ID NO: 6129 - RNA, 21 nt, Artificial
  Chemically synthesized
acgaacucagagaaauguaau

SEQ ID NO: 6130 - RNA, 21 nt, Artificial
  Chemically synthesized
agcaggaaguacagacugcaa

SEQ ID NO: 6131 - RNA, 21 nt, Artificial
  Chemically synthesized
cuaccaggagccacuuaagag

SEQ ID NO: 6132 - RNA, 21 nt, Artificial
  Chemically synthesized
ugccauuaagaagucccauaa

SEQ ID NO: 6133 - RNA, 21 nt, Artificial
  Chemically synthesized
guuuucuugagcaacaaugaa

SEQ ID NO: 6134 - RNA, 21 nt, Artificial
  Chemically synthesized
gaacggcaaucugucugcuga

SEQ ID NO: 6135 - RNA, 21 nt, Artificial
  Chemically synthesized
gugccauguuccaggaaaaga

SEQ ID NO: 6136 - RNA, 21 nt, Artificial
  Chemically synthesized
cauuaaaauacaggcccuuag

SEQ ID NO: 6137 - RNA, 21 nt, Artificial
  Chemically synthesized
gaauuguacguacaggcuuuu

SEQ ID NO: 6138 - RNA, 21 nt, Artificial
  Chemically synthesized
cauccuuucucacacuuccca

SEQ ID NO: 6139 - RNA, 21 nt, Artificial
  Chemically synthesized
cgaaucagugaacugcgugaa

SEQ ID NO: 6140 - RNA, 21 nt, Artificial
  Chemically synthesized
uagucagcaauuggaagauuu

SEQ ID NO: 6141 - RNA, 21 nt, Artificial
  Chemically synthesized
gcaauuuuaaggguugaucag

SEQ ID NO: 6142 - RNA, 21 nt, Artificial
  Chemically synthesized
aacugcugcagacaaguguga

SEQ ID NO: 6143 - RNA, 21 nt, Artificial
  Chemically synthesized
ccagugcucccaguuucuaua

SEQ ID NO: 6144 - RNA, 21 nt, Artificial
  Chemically synthesized
cagcagcagauugaaaaucag

SEQ ID NO: 6145 - RNA, 21 nt, Artificial
  Chemically synthesized
ccauacccuuugaucauauga

SEQ ID NO: 6146 - RNA, 21 nt, Artificial
  Chemically synthesized
gggcuaugugcccaaaaaccu

SEQ ID NO: 6147 - RNA, 21 nt, Artificial
  Chemically synthesized
ccauuaacugggagagguacu

SEQ ID NO: 6148 - RNA, 21 nt, Artificial
  Chemically synthesized
ugcugcucauggaagauccaa

SEQ ID NO: 6149 - RNA, 21 nt, Artificial
  Chemically synthesized
gaaaagugaacgcccuuguag

SEQ ID NO: 6150 - RNA, 21 nt, Artificial
  Chemically synthesized
gaaauuuuuccuucgacacga

SEQ ID NO: 6151 - RNA, 21 nt, Artificial
  Chemically synthesized
caacauccagaagcugcugua

SEQ ID NO: 6152 - RNA, 21 nt, Artificial
  Chemically synthesized
aggaacucuuaaauaagcgca

SEQ ID NO: 6153 - RNA, 21 nt, Artificial
  Chemically synthesized
uccaggaaagcugcagcuaga

SEQ ID NO: 6154 - RNA, 21 nt, Artificial
  Chemically synthesized
accgugugaauggcacgucau

SEQ ID NO: 6155 - RNA, 21 nt, Artificial
  Chemically synthesized
aguguugcugcccagugugua

SEQ ID NO: 6156 - RNA, 21 nt, Artificial
  Chemically synthesized
acgcugcugacgcuguguaaa

SEQ ID NO: 6157 - RNA, 21 nt, Artificial
  Chemically synthesized
ugucgagauguuguagaauuu

SEQ ID NO: 6158 - RNA, 21 nt, Artificial
  Chemically synthesized
acuguuuucuugagcaacaau

SEQ ID NO: 6159 - RNA, 21 nt, Artificial
  Chemically synthesized
agucgacuacagcaaaaucau

SEQ ID NO: 6160 - RNA, 21 nt, Artificial
  Chemically synthesized
gugaauggcacgucaucacca

SEQ ID NO: 6161 - RNA, 21 nt, Artificial
  Chemically synthesized
gcaggaaaagcugggugugau

SEQ ID NO: 6162 - RNA, 21 nt, Artificial
  Chemically synthesized
cccagacagugaauucaaguu

SEQ ID NO: 6163 - RNA, 21 nt, Artificial
  Chemically synthesized
aagguucagugccauguucca

SEQ ID NO: 6164 - RNA, 21 nt, Artificial
  Chemically synthesized
agcugggugugaugaacaaag

SEQ ID NO: 6165 - RNA, 21 nt, Artificial
  Chemically synthesized
cgccauuuuugccucaaccau

SEQ ID NO: 6166 - RNA, 21 nt, Artificial
  Chemically synthesized
cgucagcagcagucuauuucu

SEQ ID NO: 6167 - RNA, 21 nt, Artificial
  Chemically synthesized
agacagugaauucaaguucca

SEQ ID NO: 6168 - RNA, 21 nt, Artificial
  Chemically synthesized
agccggcagaggacaauaaca

SEQ ID NO: 6169 - RNA, 21 nt, Artificial
  Chemically synthesized
gaacugcgugaacgucucuau

SEQ ID NO: 6170 - RNA, 21 nt, Artificial
  Chemically synthesized
gaaggaacucuuaaauaagcg

SEQ ID NO: 6171 - RNA, 21 nt, Artificial
  Chemically synthesized
ggaaacaaccugucgagaugu

SEQ ID NO: 6172 - RNA, 21 nt, Artificial
  Chemically synthesized
ugcugcucagugugguucuca

SEQ ID NO: 6173 - RNA, 21 nt, Artificial
  Chemically synthesized
aauggugcucacuuuagcaga

SEQ ID NO: 6174 - RNA, 21 nt, Artificial
  Chemically synthesized
uguuguagaauuuugcaagga

SEQ ID NO: 6175 - RNA, 21 nt, Artificial
  Chemically synthesized
uaacagcguucaccucugcaa

SEQ ID NO: 6176 - RNA, 21 nt, Artificial
  Chemically synthesized
acucacugaugcagcacugua

SEQ ID NO: 6177 - RNA, 21 nt, Artificial
  Chemically synthesized
cuuugaucauaugauguacga

SEQ ID NO: 6178 - RNA, 21 nt, Artificial
  Chemically synthesized
gcuggauuuuggugucaacgu

SEQ ID NO: 6179 - RNA, 21 nt, Artificial
  Chemically synthesized
ccugcaagcucaaauucaguu

SEQ ID NO: 6180 - RNA, 21 nt, Artificial
  Chemically synthesized
gugaaugcugcugauagugau

SEQ ID NO: 6181 - RNA, 21 nt, Artificial
  Chemically synthesized
aaaucagcagcagauguuggu

SEQ ID NO: 6182 - RNA, 21 nt, Artificial
  Chemically synthesized
cuuccuguuccaguucaccua

SEQ ID NO: 6183 - RNA, 21 nt, Artificial
  Chemically synthesized
ggugcucacuuuagcagacag

SEQ ID NO: 6184 - RNA, 21 nt, Artificial
  Chemically synthesized
gcuagaaaauggucuuaaugg

SEQ ID NO: 6185 - RNA, 21 nt, Artificial
  Chemically synthesized
auguaugagucguguguaauu

SEQ ID NO: 6186 - RNA, 21 nt, Artificial
  Chemically synthesized
ucaccaaaggagccucuguau

SEQ ID NO: 6187 - RNA, 21 nt, Artificial
  Chemically synthesized
uuguuguuauuguccucugcc

SEQ ID NO: 6188 - RNA, 21 nt, Artificial
  Chemically synthesized
uuaauaucaucggcaucaucg

SEQ ID NO: 6189 - RNA, 21 nt, Artificial
  Chemically synthesized
uuauuuaagaguuccuucugc

SEQ ID NO: 6190 - RNA, 21 nt, Artificial
  Chemically synthesized
uucaucacacccagcuuuucc

SEQ ID NO: 6191 - RNA, 21 nt, Artificial
  Chemically synthesized
uuucccauagagacguucacg

SEQ ID NO: 6192 - RNA, 21 nt, Artificial
  Chemically synthesized
uuucaaugucgcuuaugguug

SEQ ID NO: 6193 - RNA, 21 nt, Artificial
  Chemically synthesized
uuguuauuguccucugccggc

SEQ ID NO: 6194 - RNA, 21 nt, Artificial
  Chemically synthesized
uuuuguuccugguuaaguugg

SEQ ID NO: 6195 - RNA, 21 nt, Artificial
  Chemically synthesized
cguuguuguuauuguccucug

SEQ ID NO: 6196 - RNA, 21 nt, Artificial
  Chemically synthesized
uuuucaaucugcugcuguugc

SEQ ID NO: 6197 - RNA, 21 nt, Artificial
  Chemically synthesized
uucuccagguacauuuauuac

SEQ ID NO: 6198 - RNA, 21 nt, Artificial
  Chemically synthesized
uguuguuauuguccucugccg

SEQ ID NO: 6199 - RNA, 21 nt, Artificial
  Chemically synthesized
uuuccauuguccacaucggcc

SEQ ID NO: 6200 - RNA, 21 nt, Artificial
  Chemically synthesized
acguuguuguuauuguccucu

SEQ ID NO: 6201 - RNA, 21 nt, Artificial
  Chemically synthesized
uugcgcuuauuuaagaguucc

SEQ ID NO: 6202 - RNA, 21 nt, Artificial
  Chemically synthesized
uuugcuguagucgacuugucc

SEQ ID NO: 6203 - RNA, 21 nt, Artificial
  Chemically synthesized
uuuuuaacuccaccgccgcug

SEQ ID NO: 6204 - RNA, 21 nt, Artificial
  Chemically synthesized
uuuaagaguuccuucugcugc

SEQ ID NO: 6205 - RNA, 21 nt, Artificial
  Chemically synthesized
uucacguugacaccaaaaucc

SEQ ID NO: 6206 - RNA, 21 nt, Artificial
  Chemically synthesized
uuucuagcugcagcuuuccug

SEQ ID NO: 6207 - RNA, 21 nt, Artificial
  Chemically synthesized
guuguuguuauuguccucugc

SEQ ID NO: 6208 - RNA, 21 nt, Artificial
  Chemically synthesized
uuggugaugaagggaagaagg

SEQ ID NO: 6209 - RNA, 21 nt, Artificial
  Chemically synthesized
uucaguacguuuuucuccagg

SEQ ID NO: 6210 - RNA, 21 nt, Artificial
  Chemically synthesized
uaaauuacacacgacucauac

SEQ ID NO: 6211 - RNA, 21 nt, Artificial
  Chemically synthesized
uuccauuggcauugguguuuc

SEQ ID NO: 6212 - RNA, 21 nt, Artificial
  Chemically synthesized
uuuaucagccaggaaaggccu

SEQ ID NO: 6213 - RNA, 21 nt, Artificial
  Chemically synthesized
uuacgaaucuguaguucuugg

SEQ ID NO: 6214 - RNA, 21 nt, Artificial
  Chemically synthesized
uucuagcugcagcuuuccugg

SEQ ID NO: 6215 - RNA, 21 nt, Artificial
  Chemically synthesized
uuuuaauguuggccaguuucc

SEQ ID NO: 6216 - RNA, 21 nt, Artificial
  Chemically synthesized
uuuucaguacguuuuucucca

SEQ ID NO: 6217 - RNA, 21 nt, Artificial
  Chemically synthesized
uaaauggcagcugccuucucc

SEQ ID NO: 6218 - RNA, 21 nt, Artificial
  Chemically synthesized
uuccaugagcagcauuugagg

SEQ ID NO: 6219 - RNA, 21 nt, Artificial
  Chemically synthesized
uaucauuggcaucugaugacg

SEQ ID NO: 6220 - RNA, 21 nt, Artificial
  Chemically synthesized
gccacguuguuguuauugucc

SEQ ID NO: 6221 - RNA, 21 nt, Artificial
  Chemically synthesized
uuucucaguacuuucugaagg

SEQ ID NO: 6222 - RNA, 21 nt, Artificial
  Chemically synthesized
uucccauagagacguucacgc

SEQ ID NO: 6223 - RNA, 21 nt, Artificial
  Chemically synthesized
uucaccacacuauguacaguc

SEQ ID NO: 6224 - RNA, 21 nt, Artificial
  Chemically synthesized
uuaugguugaggcaaaaaugg

SEQ ID NO: 6225 - RNA, 21 nt, Artificial
  Chemically synthesized
uuggcaaccaacaucugcugc

SEQ ID NO: 6226 - RNA, 21 nt, Artificial
  Chemically synthesized
uguacuuccugcuucuuuucc

SEQ ID NO: 6227 - RNA, 21 nt, Artificial
  Chemically synthesized
uauuacauuucucugaguucg

SEQ ID NO: 6228 - RNA, 21 nt, Artificial
  Chemically synthesized
uuuucuucagcuuguucuccu

SEQ ID NO: 6229 - RNA, 21 nt, Artificial
  Chemically synthesized
ucuauuucagcagacagauug

SEQ ID NO: 6230 - RNA, 21 nt, Artificial
  Chemically synthesized
uauuuaagaguuccuucugcu

SEQ ID NO: 6231 - RNA, 21 nt, Artificial
  Chemically synthesized
uaauguuggccaguuuccauc

SEQ ID NO: 6232 - RNA, 21 nt, Artificial
  Chemically synthesized
uacauuucucugaguucguug

SEQ ID NO: 6233 - RNA, 21 nt, Artificial
  Chemically synthesized
uuuucuagcugcagcuuuccu

SEQ ID NO: 6234 - RNA, 21 nt, Artificial
  Chemically synthesized
auuuucaguacguuuuucucc

SEQ ID NO: 6235 - RNA, 21 nt, Artificial
  Chemically synthesized
uaacugacuuauuuaaggcgc

SEQ ID NO: 6236 - RNA, 21 nt, Artificial
  Chemically synthesized
uuuuugggcacauagcccucc

SEQ ID NO: 6237 - RNA, 21 nt, Artificial
  Chemically synthesized
ccacguuguuguuauuguccu

SEQ ID NO: 6238 - RNA, 21 nt, Artificial
  Chemically synthesized
auuucagcagacagauugccg

SEQ ID NO: 6239 - RNA, 21 nt, Artificial
  Chemically synthesized
uuguucuccugggcuucaacu

SEQ ID NO: 6240 - RNA, 21 nt, Artificial
  Chemically synthesized
uugccuagcugccauaucuug

SEQ ID NO: 6241 - RNA, 21 nt, Artificial
  Chemically synthesized
uuuggaucuuccaugagcagc

SEQ ID NO: 6242 - RNA, 21 nt, Artificial
  Chemically synthesized
ugauucgcuuguccaucaugg

SEQ ID NO: 6243 - RNA, 21 nt, Artificial
  Chemically synthesized
uucaaguugguccgcuuguuc

SEQ ID NO: 6244 - RNA, 21 nt, Artificial
  Chemically synthesized
uaauuggcaaaauucaguccu

SEQ ID NO: 6245 - RNA, 21 nt, Artificial
  Chemically synthesized
uuggcgguacggaaauccucu

SEQ ID NO: 6246 - RNA, 21 nt, Artificial
  Chemically synthesized
uuuaauguuggccaguuucca

SEQ ID NO: 6247 - RNA, 21 nt, Artificial
  Chemically synthesized
uugguuacgaaucuguaguuc

SEQ ID NO: 6248 - RNA, 21 nt, Artificial
  Chemically synthesized
uuccauacagaggcuccuuug

SEQ ID NO: 6249 - RNA, 21 nt, Artificial
  Chemically synthesized
uuuaccaaucucgaugcccgg

SEQ ID NO: 6250 - RNA, 21 nt, Artificial
  Chemically synthesized
uuuugcuguagucgacuuguc

SEQ ID NO: 6251 - RNA, 21 nt, Artificial
  Chemically synthesized
uucuucagcuuguucuccugg

SEQ ID NO: 6252 - RNA, 21 nt, Artificial
  Chemically synthesized
guuguuauuguccucugccgg

SEQ ID NO: 6253 - RNA, 21 nt, Artificial
  Chemically synthesized
auaucaucggcaucaucgcgg

SEQ ID NO: 6254 - RNA, 21 nt, Artificial
  Chemically synthesized
uuguucacuguucucaguugg

SEQ ID NO: 6255 - RNA, 21 nt, Artificial
  Chemically synthesized
uaggauucacauuguggacgc

SEQ ID NO: 6256 - RNA, 21 nt, Artificial
  Chemically synthesized
ucagucucgcuuucguccuug

SEQ ID NO: 6257 - RNA, 21 nt, Artificial
  Chemically synthesized
ucacugauucgcuuguccauc

SEQ ID NO: 6258 - RNA, 21 nt, Artificial
  Chemically synthesized
ucugcagcaguuucaaugucg

SEQ ID NO: 6259 - RNA, 21 nt, Artificial
  Chemically synthesized
uuuuccuggaacauggcacug

SEQ ID NO: 6260 - RNA, 21 nt, Artificial
  Chemically synthesized
ucauacaugaaaaauagagcc

SEQ ID NO: 6261 - RNA, 21 nt, Artificial
  Chemically synthesized
uugucugcagcaguuucaaug

SEQ ID NO: 6262 - RNA, 21 nt, Artificial
  Chemically synthesized
uugacaccaaaauccagcagg

SEQ ID NO: 6263 - RNA, 21 nt, Artificial
  Chemically synthesized
aucugcugcugauuuucaauc

SEQ ID NO: 6264 - RNA, 21 nt, Artificial
  Chemically synthesized
uuucuucaccacacuauguac

SEQ ID NO: 6265 - RNA, 21 nt, Artificial
  Chemically synthesized
aguaauuggcaaaauucaguc

SEQ ID NO: 6266 - RNA, 21 nt, Artificial
  Chemically synthesized
uucuguuuuaauguuggccag

SEQ ID NO: 6267 - RNA, 21 nt, Artificial
  Chemically synthesized
uuuucagaaauagacugcugc

SEQ ID NO: 6268 - RNA, 21 nt, Artificial
  Chemically synthesized
auuuacacagcgucagcagcg

SEQ ID NO: 6269 - RNA, 21 nt, Artificial
  Chemically synthesized
uaugguugaggcaaaaauggc

SEQ ID NO: 6270 - RNA, 21 nt, Artificial
  Chemically synthesized
uuucacuucuucccuccgugg

SEQ ID NO: 6271 - RNA, 21 nt, Artificial
  Chemically synthesized
uuaagaccauuuucuagcugc

SEQ ID NO: 6272 - RNA, 21 nt, Artificial
  Chemically synthesized
uuuggugaugaagggaagaag

SEQ ID NO: 6273 - RNA, 21 nt, Artificial
  Chemically synthesized
uuggguaugucccauagcuug

SEQ ID NO: 6274 - RNA, 21 nt, Artificial
  Chemically synthesized
uucuccugggcuucaacucgu

SEQ ID NO: 6275 - RNA, 21 nt, Artificial
  Chemically synthesized
auucacguugacaccaaaauc

SEQ ID NO: 6276 - RNA, 21 nt, Artificial
  Chemically synthesized
uuccuugcaaaauucuacaac

SEQ ID NO: 6277 - RNA, 21 nt, Artificial
  Chemically synthesized
uaccauacacugcuuuaacug

SEQ ID NO: 6278 - RNA, 21 nt, Artificial
  Chemically synthesized
uuaaguugguuacgaaucugu

SEQ ID NO: 6279 - RNA, 21 nt, Artificial
  Chemically synthesized
uuucuauuucagcagacagau

SEQ ID NO: 6280 - RNA, 21 nt, Artificial
  Chemically synthesized
aaucucuuaaguggcuccugg

SEQ ID NO: 6281 - RNA, 21 nt, Artificial
  Chemically synthesized
ucaaguugguccgcuuguucg

SEQ ID NO: 6282 - RNA, 21 nt, Artificial
  Chemically synthesized
uacauaaauuacacacgacuc

SEQ ID NO: 6283 - RNA, 21 nt, Artificial
  Chemically synthesized
ucacuaucagcagcauucacg

SEQ ID NO: 6284 - RNA, 21 nt, Artificial
  Chemically synthesized
uuccaauugcugacuaagcug

SEQ ID NO: 6285 - RNA, 21 nt, Artificial
  Chemically synthesized
uccagguuccuugcaaaauuc

SEQ ID NO: 6286 - RNA, 21 nt, Artificial
  Chemically synthesized
uugaacccgaagguaaaacgg

SEQ ID NO: 6287 - RNA, 21 nt, Artificial
  Chemically synthesized
uaagagcuucugucuucacug

SEQ ID NO: 6288 - RNA, 21 nt, Artificial
  Chemically synthesized
ugguugaggcaaaaauggcgg

SEQ ID NO: 6289 - RNA, 21 nt, Artificial
  Chemically synthesized
cacguuguuguuauuguccuc

SEQ ID NO: 6290 - RNA, 21 nt, Artificial
  Chemically synthesized
uugccauuguaagacuggaac

SEQ ID NO: 6291 - RNA, 21 nt, Artificial
  Chemically synthesized
aaaauuucacuucuucccucc

SEQ ID NO: 6292 - RNA, 21 nt, Artificial
  Chemically synthesized
uacugggaggcauacacacug

SEQ ID NO: 6293 - RNA, 21 nt, Artificial
  Chemically synthesized
auguacagucagugcuccaag

SEQ ID NO: 6294 - RNA, 21 nt, Artificial
  Chemically synthesized
aaauguaaacgcuguuccuug

SEQ ID NO: 6295 - RNA, 21 nt, Artificial
  Chemically synthesized
uaaaauugcagucuguacuuc

SEQ ID NO: 6296 - RNA, 21 nt, Artificial
  Chemically synthesized
uugccguucaugauuuugcug

SEQ ID NO: 6297 - RNA, 21 nt, Artificial
  Chemically synthesized
auucuguuuuaauguuggcca

SEQ ID NO: 6298 - RNA, 21 nt, Artificial
  Chemically synthesized
uuacacacgacucauacauga

SEQ ID NO: 6299 - RNA, 21 nt, Artificial
  Chemically synthesized
uucuucaccacacuauguaca

SEQ ID NO: 6300 - RNA, 21 nt, Artificial
  Chemically synthesized
aaaaauuucacuucuucccuc

SEQ ID NO: 6301 - RNA, 21 nt, Artificial
  Chemically synthesized
aguauaugcugaggcucuccc

SEQ ID NO: 6302 - RNA, 21 nt, Artificial
  Chemically synthesized
uuguucaucacacccagcuuu

SEQ ID NO: 6303 - RNA, 21 nt, Artificial
  Chemically synthesized
agucuuuuuaacuccaccgcc

SEQ ID NO: 6304 - RNA, 21 nt, Artificial
  Chemically synthesized
uucgcuuguccaucauggcca

SEQ ID NO: 6305 - RNA, 21 nt, Artificial
  Chemically synthesized
aucaaaggguaugggacguuc

SEQ ID NO: 6306 - RNA, 21 nt, Artificial
  Chemically synthesized
auuuucuucagcuuguucucc

SEQ ID NO: 6307 - RNA, 21 nt, Artificial
  Chemically synthesized
uagaaaauguaaacgcuguuc

SEQ ID NO: 6308 - RNA, 21 nt, Artificial
  Chemically synthesized
uuaacugacuuauuuaaggcg

SEQ ID NO: 6309 - RNA, 21 nt, Artificial
  Chemically synthesized
uugcugggaucuuccaccuca

SEQ ID NO: 6310 - RNA, 21 nt, Artificial
  Chemically synthesized
uugcuguagucgacuuguccu

SEQ ID NO: 6311 - RNA, 21 nt, Artificial
  Chemically synthesized
ucauuuucagaaauagacugc

SEQ ID NO: 6312 - RNA, 21 nt, Artificial
  Chemically synthesized
ugcuuuagaaaauguaaacgc

SEQ ID NO: 6313 - RNA, 21 nt, Artificial
  Chemically synthesized
uuccugguuaaguugguuacg

SEQ ID NO: 6314 - RNA, 21 nt, Artificial
  Chemically synthesized
auuuucagaaauagacugcug

SEQ ID NO: 6315 - RNA, 21 nt, Artificial
  Chemically synthesized
uucaacacguggauucccaac

SEQ ID NO: 6316 - RNA, 21 nt, Artificial
  Chemically synthesized
uguaggacuuggguauguccc

SEQ ID NO: 6317 - RNA, 21 nt, Artificial
  Chemically synthesized
uggccuugacccuuuaucagc

SEQ ID NO: 6318 - RNA, 21 nt, Artificial
  Chemically synthesized
uuuccaacauaguucggguag

SEQ ID NO: 6319 - RNA, 21 nt, Artificial
  Chemically synthesized
ugguacagucuuuuuaacucc

SEQ ID NO: 6320 - RNA, 21 nt, Artificial
  Chemically synthesized
ucguagucccacagagcauac

SEQ ID NO: 6321 - RNA, 21 nt, Artificial
  Chemically synthesized
uucagcugaauuuuuuuccca

SEQ ID NO: 6322 - RNA, 21 nt, Artificial
  Chemically synthesized
uaaaucuuccaauugcugacu

SEQ ID NO: 6323 - RNA, 21 nt, Artificial
  Chemically synthesized
auuuaaggcgcugugugcugc

SEQ ID NO: 6324 - RNA, 21 nt, Artificial
  Chemically synthesized
ucuccagguacauuuauuaca

SEQ ID NO: 6325 - RNA, 21 nt, Artificial
  Chemically synthesized
uacagucuuuuuaacuccacc

SEQ ID NO: 6326 - RNA, 21 nt, Artificial
  Chemically synthesized
ucuuuuuaacuccaccgccgc

SEQ ID NO: 6327 - RNA, 21 nt, Artificial
  Chemically synthesized
uuaccauacacugcuuuaacu

SEQ ID NO: 6328 - RNA, 21 nt, Artificial
  Chemically synthesized
auuuuguuccugguuaaguug

SEQ ID NO: 6329 - RNA, 21 nt, Artificial
  Chemically synthesized
uccauguugcgcuuauuuaag

SEQ ID NO: 6330 - RNA, 21 nt, Artificial
  Chemically synthesized
uuaagaguuccuucugcugcu

SEQ ID NO: 6331 - RNA, 21 nt, Artificial
  Chemically synthesized
uuccauuguccacaucggcca

SEQ ID NO: 6332 - RNA, 21 nt, Artificial
  Chemically synthesized
uuuuuucccauagagacguuc

SEQ ID NO: 6333 - RNA, 21 nt, Artificial
  Chemically synthesized
uccaccucauagaugauccuc

SEQ ID NO: 6334 - RNA, 21 nt, Artificial
  Chemically synthesized
uauugugcacauuuacacagc

SEQ ID NO: 6335 - RNA, 21 nt, Artificial
  Chemically synthesized
aaaauugcagucuguacuucc

SEQ ID NO: 6336 - RNA, 21 nt, Artificial
  Chemically synthesized
uucagaaauagacugcugcug

SEQ ID NO: 6337 - RNA, 21 nt, Artificial
  Chemically synthesized
ucugcugcugauuuucaaucu

SEQ ID NO: 6338 - RNA, 21 nt, Artificial
  Chemically synthesized
uuggcauugguguuuccauug

SEQ ID NO: 6339 - RNA, 21 nt, Artificial
  Chemically synthesized
aucucgacagguuguuuccgg

SEQ ID NO: 6340 - RNA, 21 nt, Artificial
  Chemically synthesized
uuuucuucaccacacuaugua

SEQ ID NO: 6341 - RNA, 21 nt, Artificial
  Chemically synthesized
uuggaggcgaaaguaccucuc

SEQ ID NO: 6342 - RNA, 21 nt, Artificial
  Chemically synthesized
uuucacggaagagcuagaauu

SEQ ID NO: 6343 - RNA, 21 nt, Artificial
  Chemically synthesized
uuucucugaguucguugcucu

SEQ ID NO: 6344 - RNA, 21 nt, Artificial
  Chemically synthesized
uuuuucccauagagacguuca

SEQ ID NO: 6345 - RNA, 21 nt, Artificial
  Chemically synthesized
auuagcggauuuggaucuucc

SEQ ID NO: 6346 - RNA, 21 nt, Artificial
  Chemically synthesized
accagaucgaacucuccuucc

SEQ ID NO: 6347 - RNA, 21 nt, Artificial
  Chemically synthesized
uuucaaucugcugcuguugcc

SEQ ID NO: 6348 - RNA, 21 nt, Artificial
  Chemically synthesized
uuccuuggcaaccaacaucug

SEQ ID NO: 6349 - RNA, 21 nt, Artificial
  Chemically synthesized
uuucagaaauagacugcugcu

SEQ ID NO: 6350 - RNA, 21 nt, Artificial
  Chemically synthesized
ucacguugacaccaaaaucca

SEQ ID NO: 6351 - RNA, 21 nt, Artificial
  Chemically synthesized
ucaauuugccauuguaagacu

SEQ ID NO: 6352 - RNA, 21 nt, Artificial
  Chemically synthesized
uucaugauuuugcuguagucg

SEQ ID NO: 6353 - RNA, 21 nt, Artificial
  Chemically synthesized
uucacuuuucuucaccacacu

SEQ ID NO: 6354 - RNA, 21 nt, Artificial
  Chemically synthesized
uuucaguacguuuuucuccag

SEQ ID NO: 6355 - RNA, 21 nt, Artificial
  Chemically synthesized
uucacggaagagcuagaauuc

SEQ ID NO: 6356 - RNA, 21 nt, Artificial
  Chemically synthesized
uuauugugcacauuuacacag

SEQ ID NO: 6357 - RNA, 21 nt, Artificial
  Chemically synthesized
auugccguucaugauuuugcu

SEQ ID NO: 6358 - RNA, 21 nt, Artificial
  Chemically synthesized
uuaaguggcuccugguagcug

SEQ ID NO: 6359 - RNA, 21 nt, Artificial
  Chemically synthesized
ucauagaugauccucugcacc

SEQ ID NO: 6360 - RNA, 21 nt, Artificial
  Chemically synthesized
auugcagucuguacuuccugc

SEQ ID NO: 6361 - RNA, 21 nt, Artificial
  Chemically synthesized
ucuacaagggcguucacuuuu

SEQ ID NO: 6362 - RNA, 21 nt, Artificial
  Chemically synthesized
uugguacagucuuuuuaacuc

SEQ ID NO: 6363 - RNA, 21 nt, Artificial
  Chemically synthesized
uucagcuaaauggcagcugcc

SEQ ID NO: 6364 - RNA, 21 nt, Artificial
  Chemically synthesized
uaccucucccaguuaaugggc

SEQ ID NO: 6365 - RNA, 21 nt, Artificial
  Chemically synthesized
ucacgcaguucacugauucgc

SEQ ID NO: 6366 - RNA, 21 nt, Artificial
  Chemically synthesized
uguggccuugacccuuuauca

SEQ ID NO: 6367 - RNA, 21 nt, Artificial
  Chemically synthesized
ucggaggagaagaguauaugc

SEQ ID NO: 6368 - RNA, 21 nt, Artificial
  Chemically synthesized
auguucguacaucauaugauc

SEQ ID NO: 6369 - RNA, 21 nt, Artificial
  Chemically synthesized
guuccuuggcaaccaacaucu

SEQ ID NO: 6370 - RNA, 21 nt, Artificial
  Chemically synthesized
uuggcaaaauucaguccuugg

SEQ ID NO: 6371 - RNA, 21 nt, Artificial
  Chemically synthesized
cuuccaccucauagaugaucc

SEQ ID NO: 6372 - RNA, 21 nt, Artificial
  Chemically synthesized
uaaaacgggcuuaccauacac

SEQ ID NO: 6373 - RNA, 21 nt, Artificial
  Chemically synthesized
aaaaauggcggcaccacucuc

SEQ ID NO: 6374 - RNA, 21 nt, Artificial
  Chemically synthesized
uccaucuccucacacuugucu

SEQ ID NO: 6375 - RNA, 21 nt, Artificial
  Chemically synthesized
ugaaaguggguauuuauuugg

SEQ ID NO: 6376 - RNA, 21 nt, Artificial
  Chemically synthesized
auauaaaaagccuguacguac

SEQ ID NO: 6377 - RNA, 21 nt, Artificial
  Chemically synthesized
uucagcagacagauugccguu

SEQ ID NO: 6378 - RNA, 21 nt, Artificial
  Chemically synthesized
ucgaacucuccuuccagagac

SEQ ID NO: 6379 - RNA, 21 nt, Artificial
  Chemically synthesized
auguagccuuccuccaucucc

SEQ ID NO: 6380 - RNA, 21 nt, Artificial
  Chemically synthesized
uuugauccguggauacagccc

SEQ ID NO: 6381 - RNA, 21 nt, Artificial
  Chemically synthesized
uugcugacuaagcugaucaac

SEQ ID NO: 6382 - RNA, 21 nt, Artificial
  Chemically synthesized
uccuccaucuccucacacuug

SEQ ID NO: 6383 - RNA, 21 nt, Artificial
  Chemically synthesized
aagggcguucacuuuucuuca

SEQ ID NO: 6384 - RNA, 21 nt, Artificial
  Chemically synthesized
auuggcauugguguuuccauu

SEQ ID NO: 6385 - RNA, 21 nt, Artificial
  Chemically synthesized
aucuccucacacuugucugca

SEQ ID NO: 6386 - RNA, 21 nt, Artificial
  Chemically synthesized
uuccgguguuauaggaacuuc

SEQ ID NO: 6387 - RNA, 21 nt, Artificial
  Chemically synthesized
auuaagaccauuuucuagcug

SEQ ID NO: 6388 - RNA, 21 nt, Artificial
  Chemically synthesized
ugcuguagucgacuuguccuc

SEQ ID NO: 6389 - RNA, 21 nt, Artificial
  Chemically synthesized
ucaacacguggauucccaacc

SEQ ID NO: 6390 - RNA, 21 nt, Artificial
  Chemically synthesized
auuucacuucuucccuccgug

SEQ ID NO: 6391 - RNA, 21 nt, Artificial
  Chemically synthesized
uguacguacaauucacaccuc

SEQ ID NO: 6392 - RNA, 21 nt, Artificial
  Chemically synthesized
uguugcgcuuauuuaagaguu

SEQ ID NO: 6393 - RNA, 21 nt, Artificial
  Chemically synthesized
ucuuccaccucauagaugauc

SEQ ID NO: 6394 - RNA, 21 nt, Artificial
  Chemically synthesized
uauaaaaagccuguacguaca

SEQ ID NO: 6395 - RNA, 21 nt, Artificial
  Chemically synthesized
uguuccuuggcaaccaacauc

SEQ ID NO: 6396 - RNA, 21 nt, Artificial
  Chemically synthesized
aaaucuguucauuguugcuca

SEQ ID NO: 6397 - RNA, 21 nt, Artificial
  Chemically synthesized
uuacauuucucugaguucguu

SEQ ID NO: 6398 - RNA, 21 nt, Artificial
  Chemically synthesized
uggaaaacagcacaauaaucu

SEQ ID NO: 6399 - RNA, 21 nt, Artificial
  Chemically synthesized
uacuuccugcuucuuuuccug

SEQ ID NO: 6400 - RNA, 21 nt, Artificial
  Chemically synthesized
ucacauuguggacgcugucug

SEQ ID NO: 6401 - RNA, 21 nt, Artificial
  Chemically synthesized
ugggcuucuucaaguuggucc

SEQ ID NO: 6402 - RNA, 21 nt, Artificial
  Chemically synthesized
uacgccacaccuuuguucauc

SEQ ID NO: 6403 - RNA, 21 nt, Artificial
  Chemically synthesized
aaugucgcuuaugguugaggc

SEQ ID NO: 6404 - RNA, 21 nt, Artificial
  Chemically synthesized
cuuauuuaagaguuccuucug

SEQ ID NO: 6405 - RNA, 21 nt, Artificial
  Chemically synthesized
aauugcagucuguacuuccug

SEQ ID NO: 6406 - RNA, 21 nt, Artificial
  Chemically synthesized
ugacuuauuuaaggcgcugug

SEQ ID NO: 6407 - RNA, 21 nt, Artificial
  Chemically synthesized
uaaagugagcaccauuaagac

SEQ ID NO: 6408 - RNA, 21 nt, Artificial
  Chemically synthesized
auggaacuugaauucacuguc

SEQ ID NO: 6409 - RNA, 21 nt, Artificial
  Chemically synthesized
acaccuuuguucaucacaccc

SEQ ID NO: 6410 - RNA, 21 nt, Artificial
  Chemically synthesized
uucugaagauguucguacauc

SEQ ID NO: 6411 - RNA, 21 nt, Artificial
  Chemically synthesized
uaaugggcaaacuggagaaag

SEQ ID NO: 6412 - RNA, 21 nt, Artificial
  Chemically synthesized
auauggaacuugaauucacug

SEQ ID NO: 6413 - RNA, 21 nt, Artificial
  Chemically synthesized
uguucaucacacccagcuuuu

SEQ ID NO: 6414 - RNA, 21 nt, Artificial
  Chemically synthesized
uuaaaucuuccaauugcugac

SEQ ID NO: 6415 - RNA, 21 nt, Artificial
  Chemically synthesized
uaguucggguagcuuugaaug

SEQ ID NO: 6416 - RNA, 21 nt, Artificial
  Chemically synthesized
acuuccugcuucuuuuccugg

SEQ ID NO: 6417 - RNA, 21 nt, Artificial
  Chemically synthesized
auuacacacgacucauacaug

SEQ ID NO: 6418 - RNA, 21 nt, Artificial
  Chemically synthesized
ucuguacuuccugcuucuuuu

SEQ ID NO: 6419 - RNA, 21 nt, Artificial
  Chemically synthesized
aauguaaacgcuguuccuugg

SEQ ID NO: 6420 - RNA, 21 nt, Artificial
  Chemically synthesized
uucugucuucacuggcaacca

SEQ ID NO: 6421 - RNA, 21 nt, Artificial
  Chemically synthesized
uuuaggugaacuggaacagga

SEQ ID NO: 6422 - RNA, 21 nt, Artificial
  Chemically synthesized
uguagccuuccuccaucuccu

SEQ ID NO: 6423 - RNA, 21 nt, Artificial
  Chemically synthesized
ugguuaaguugguuacgaauc

SEQ ID NO: 6424 - RNA, 21 nt, Artificial
  Chemically synthesized
ggccacguuguuguuauuguc

SEQ ID NO: 6425 - RNA, 21 nt, Artificial
  Chemically synthesized
ucucccaguugucacuugguc

SEQ ID NO: 6426 - RNA, 21 nt, Artificial
  Chemically synthesized
uuuguucaucacacccagcuu

SEQ ID NO: 6427 - RNA, 21 nt, Artificial
  Chemically synthesized
ugccauuguaagacuggaacc

SEQ ID NO: 6428 - RNA, 21 nt, Artificial
  Chemically synthesized
uucaaucugcugcuguugccu

SEQ ID NO: 6429 - RNA, 21 nt, Artificial
  Chemically synthesized
ugccauucacacgguucagcu

SEQ ID NO: 6430 - RNA, 21 nt, Artificial
  Chemically synthesized
cuguacguacaauucacaccu

SEQ ID NO: 6431 - RNA, 21 nt, Artificial
  Chemically synthesized
ucagccaggaaaggccuaaug

SEQ ID NO: 6432 - RNA, 21 nt, Artificial
  Chemically synthesized
ucggguagcuuugaauggucu

SEQ ID NO: 6433 - RNA, 21 nt, Artificial
  Chemically synthesized
cucugaguucguugcucuugg

SEQ ID NO: 6434 - RNA, 21 nt, Artificial
  Chemically synthesized
accuuuguucaucacacccag

SEQ ID NO: 6435 - RNA, 21 nt, Artificial
  Chemically synthesized
acagucuuuuuaacuccaccg

SEQ ID NO: 6436 - RNA, 21 nt, Artificial
  Chemically synthesized
aaggguaugggacguucauuu

SEQ ID NO: 6437 - RNA, 21 nt, Artificial
  Chemically synthesized
uagccuuccuccaucuccuca

SEQ ID NO: 6438 - RNA, 21 nt, Artificial
  Chemically synthesized
augaucaaaggguaugggacg

SEQ ID NO: 6439 - RNA, 21 nt, Artificial
  Chemically synthesized
augaaaaauagagccuaaggg

SEQ ID NO: 6440 - RNA, 21 nt, Artificial
  Chemically synthesized
ugccguucaugauuuugcugu

SEQ ID NO: 6441 - RNA, 21 nt, Artificial
  Chemically synthesized
uuguaagacuggaacccauuc

SEQ ID NO: 6442 - RNA, 21 nt, Artificial
  Chemically synthesized
cuuaccauacacugcuuuaac

SEQ ID NO: 6443 - RNA, 21 nt, Artificial
  Chemically synthesized
ugcaccagaucgaacucuccu

SEQ ID NO: 6444 - RNA, 21 nt, Artificial
  Chemically synthesized
ucgacuuguccucucauugca

SEQ ID NO: 6445 - RNA, 21 nt, Artificial
  Chemically synthesized
uggauguagccuuccuccauc

SEQ ID NO: 6446 - RNA, 21 nt, Artificial
  Chemically synthesized
auauagaaacugggagcacug

SEQ ID NO: 6447 - RNA, 21 nt, Artificial
  Chemically synthesized
uaucuuggagcucugagaggg

SEQ ID NO: 6448 - RNA, 21 nt, Artificial
  Chemically synthesized
acuuuucuucaccacacuaug

SEQ ID NO: 6449 - RNA, 21 nt, Artificial
  Chemically synthesized
uaaguugguuacgaaucugua

SEQ ID NO: 6450 - RNA, 21 nt, Artificial
  Chemically synthesized
ucugcaccagaucgaacucuc

SEQ ID NO: 6451 - RNA, 21 nt, Artificial
  Chemically synthesized
uuuuuuucccauagagacguu

SEQ ID NO: 6452 - RNA, 21 nt, Artificial
  Chemically synthesized
ugcaucagugagucuguacac

SEQ ID NO: 6453 - RNA, 21 nt, Artificial
  Chemically synthesized
uucuuaggugguguggcuugc

SEQ ID NO: 6454 - RNA, 21 nt, Artificial
  Chemically synthesized
uucagcuuguucuccugggcu

SEQ ID NO: 6455 - RNA, 21 nt, Artificial
  Chemically synthesized
uuguccucucauugcacgaau

SEQ ID NO: 6456 - RNA, 21 nt, Artificial
  Chemically synthesized
ucuguaguucuugguacaguc

SEQ ID NO: 6457 - RNA, 21 nt, Artificial
  Chemically synthesized
cuccagguacauuuauuacau

SEQ ID NO: 6458 - RNA, 21 nt, Artificial
  Chemically synthesized
aucggaggagaagaguauaug

SEQ ID NO: 6459 - RNA, 21 nt, Artificial
  Chemically synthesized
ucucugaguucguugcucuug

SEQ ID NO: 6460 - RNA, 21 nt, Artificial
  Chemically synthesized
uguggugaugacgugccauuc

SEQ ID NO: 6461 - RNA, 21 nt, Artificial
  Chemically synthesized
cucauugcacgaauuuucuuc

SEQ ID NO: 6462 - RNA, 21 nt, Artificial
  Chemically synthesized
auuuucuagcugcagcuuucc

SEQ ID NO: 6463 - RNA, 21 nt, Artificial
  Chemically synthesized
ucugaguucguugcucuuggg

SEQ ID NO: 6464 - RNA, 21 nt, Artificial
  Chemically synthesized
aucauggccaccuccauguug

SEQ ID NO: 6465 - RNA, 21 nt, Artificial
  Chemically synthesized
gucuuuuuaacuccaccgccg

SEQ ID NO: 6466 - RNA, 21 nt, Artificial
  Chemically synthesized
uucggguagcuuugaaugguc

SEQ ID NO: 6467 - RNA, 21 nt, Artificial
  Chemically synthesized
auggagcugcgcuuuuucagg

SEQ ID NO: 6468 - RNA, 21 nt, Artificial
  Chemically synthesized
uuuccauacagaggcuccuuu

SEQ ID NO: 6469 - RNA, 21 nt, Artificial
  Chemically synthesized
aaacgggcuuaccauacacug

SEQ ID NO: 6470 - RNA, 21 nt, Artificial
  Chemically synthesized
uucuauuucagcagacagauu

SEQ ID NO: 6471 - RNA, 21 nt, Artificial
  Chemically synthesized
ugguacagcagcuucuggaug

SEQ ID NO: 6472 - RNA, 21 nt, Artificial
  Chemically synthesized
auaaucucuuaaguggcuccu

SEQ ID NO: 6473 - RNA, 21 nt, Artificial
  Chemically synthesized
auuuucaaucugcugcuguug

SEQ ID NO: 6474 - RNA, 21 nt, Artificial
  Chemically synthesized
ugcugauuuucaaucugcugc

SEQ ID NO: 6475 - RNA, 21 nt, Artificial
  Chemically synthesized
acuuauuuaaggcgcugugug

SEQ ID NO: 6476 - RNA, 21 nt, Artificial
  Chemically synthesized
ucuugguacagucuuuuuaac

SEQ ID NO: 6477 - RNA, 21 nt, Artificial
  Chemically synthesized
caucacacccagcuuuuccug

SEQ ID NO: 6478 - RNA, 21 nt, Artificial
  Chemically synthesized
ugacuaagcugaucaacccuu

SEQ ID NO: 6479 - RNA, 21 nt, Artificial
  Chemically synthesized
uccucugcugaaucuguugug

SEQ ID NO: 6480 - RNA, 21 nt, Artificial
  Chemically synthesized
uauuuaaggcgcugugugcug

SEQ ID NO: 6481 - RNA, 21 nt, Artificial
  Chemically synthesized
auuggcaaaauucaguccuug

SEQ ID NO: 6482 - RNA, 21 nt, Artificial
  Chemically synthesized
uaaucucuuaaguggcuccug

SEQ ID NO: 6483 - RNA, 21 nt, Artificial
  Chemically synthesized
uucagggaacugaauuugagc

SEQ ID NO: 6484 - RNA, 21 nt, Artificial
  Chemically synthesized
uauggaacuugaauucacugu

SEQ ID NO: 6485 - RNA, 21 nt, Artificial
  Chemically synthesized
uacaagggcguucacuuuucu

SEQ ID NO: 6486 - RNA, 21 nt, Artificial
  Chemically synthesized
uugguguuuccauuguccaca

SEQ ID NO: 6487 - RNA, 21 nt, Artificial
  Chemically synthesized
ugccuagcugccauaucuugg

SEQ ID NO: 6488 - RNA, 21 nt, Artificial
  Chemically synthesized
auguuuccauacagaggcucc

SEQ ID NO: 6489 - RNA, 21 nt, Artificial
  Chemically synthesized
ugggcuucaacucguucuuuc

SEQ ID NO: 6490 - RNA, 21 nt, Artificial
  Chemically synthesized
auuuuuuucccauagagacgu

SEQ ID NO: 6491 - RNA, 21 nt, Artificial
  Chemically synthesized
aaaaucuguucauuguugcuc

SEQ ID NO: 6492 - RNA, 21 nt, Artificial
  Chemically synthesized
ugaaaaauagagccuaagggc

SEQ ID NO: 6493 - RNA, 21 nt, Artificial
  Chemically synthesized
uuucuucagcuuguucuccug

SEQ ID NO: 6494 - RNA, 21 nt, Artificial
  Chemically synthesized
ucauugcacgaauuuucuuca

SEQ ID NO: 6495 - RNA, 21 nt, Artificial
  Chemically synthesized
uccagguuuccauuggcauug

SEQ ID NO: 6496 - RNA, 21 nt, Artificial
  Chemically synthesized
acagauugccguucaugauuu

SEQ ID NO: 6497 - RNA, 21 nt, Artificial
  Chemically synthesized
agcggauuuggaucuuccaug

SEQ ID NO: 6498 - RNA, 21 nt, Artificial
  Chemically synthesized
uucguugcucuugggucugac

SEQ ID NO: 6499 - RNA, 21 nt, Artificial
  Chemically synthesized
uacaucauaugaucaaagggu

SEQ ID NO: 6500 - RNA, 21 nt, Artificial
  Chemically synthesized
uccuuggcaaccaacaucugc

SEQ ID NO: 6501 - RNA, 21 nt, Artificial
  Chemically synthesized
uuuccaucauuagcggauuug

SEQ ID NO: 6502 - RNA, 21 nt, Artificial
  Chemically synthesized
ugaugaagggaagaaggauca

SEQ ID NO: 6503 - RNA, 21 nt, Artificial
  Chemically synthesized
ugaggcaauacugagagacug

SEQ ID NO: 6504 - RNA, 21 nt, Artificial
  Chemically synthesized
uaguucuugguacagucuuuu

SEQ ID NO: 6505 - RNA, 21 nt, Artificial
  Chemically synthesized
uccaauugcugacuaagcuga

SEQ ID NO: 6506 - RNA, 21 nt, Artificial
  Chemically synthesized
ugucgaaggaaaaauuucacu

SEQ ID NO: 6507 - RNA, 21 nt, Artificial
  Chemically synthesized
ugcaaaauucuacaacaucuc

SEQ ID NO: 6508 - RNA, 21 nt, Artificial
  Chemically synthesized
uuauuuaaggcgcugugugcu

SEQ ID NO: 6509 - RNA, 21 nt, Artificial
  Chemically synthesized
uaauucuuaggugguguggcu

SEQ ID NO: 6510 - RNA, 21 nt, Artificial
  Chemically synthesized
caccagaucgaacucuccuuc

SEQ ID NO: 6511 - RNA, 21 nt, Artificial
  Chemically synthesized
uauuucagcagacagauugcc

SEQ ID NO: 6512 - RNA, 21 nt, Artificial
  Chemically synthesized
ucacuuuucuucaccacacua

SEQ ID NO: 6513 - RNA, 21 nt, Artificial
  Chemically synthesized
uuccuccaucuccucacacuu

SEQ ID NO: 6514 - RNA, 21 nt, Artificial
  Chemically synthesized
uuuccauuggcauugguguuu

SEQ ID NO: 6515 - RNA, 21 nt, Artificial
  Chemically synthesized
aagugugagaaaggaugagug

SEQ ID NO: 6516 - RNA, 21 nt, Artificial
  Chemically synthesized
uucuacaacaucucgacaggu

SEQ ID NO: 6517 - RNA, 21 nt, Artificial
  Chemically synthesized
agcuguuugcagaggugaacg

SEQ ID NO: 6518 - RNA, 21 nt, Artificial
  Chemically synthesized
uguacagucagugcuccaagg

SEQ ID NO: 6519 - RNA, 21 nt, Artificial
  Chemically synthesized
aauaucaucggcaucaucgcg

SEQ ID NO: 6520 - RNA, 21 nt, Artificial
  Chemically synthesized
augauccucugcaccagaucg

SEQ ID NO: 6521 - RNA, 21 nt, Artificial
  Chemically synthesized
uuccuggaaaacagcacaaua

SEQ ID NO: 6522 - RNA, 21 nt, Artificial
  Chemically synthesized
ucaacucguucuuucaauuuc

SEQ ID NO: 6523 - RNA, 21 nt, Artificial
  Chemically synthesized
uaauaucaucggcaucaucgc

SEQ ID NO: 6524 - RNA, 21 nt, Artificial
  Chemically synthesized
auuuugcuguagucgacuugu

SEQ ID NO: 6525 - RNA, 21 nt, Artificial
  Chemically synthesized
ucugcugaaucuguugugagg

SEQ ID NO: 6526 - RNA, 21 nt, Artificial
  Chemically synthesized
auuucugaagauguucguaca

SEQ ID NO: 6527 - RNA, 21 nt, Artificial
  Chemically synthesized
ucagaaauagacugcugcuga

SEQ ID NO: 6528 - RNA, 21 nt, Artificial
  Chemically synthesized
uaagcugaucaacccuuaaaa

SEQ ID NO: 6529 - RNA, 21 nt, Artificial
  Chemically synthesized
aguuuugaauuuuguuccugg

SEQ ID NO: 6530 - RNA, 21 nt, Artificial
  Chemically synthesized
ugcugacuaagcugaucaacc

SEQ ID NO: 6531 - RNA, 21 nt, Artificial
  Chemically synthesized
ucucauugcacgaauuuucuu

SEQ ID NO: 6532 - RNA, 21 nt, Artificial
  Chemically synthesized
ucucccaguuaaugggcaaac

SEQ ID NO: 6533 - RNA, 21 nt, Artificial
  Chemically synthesized
ucuuccaugagcagcauuuga

SEQ ID NO: 6534 - RNA, 21 nt, Artificial
  Chemically synthesized
uuccaucauuagcggauuugg

SEQ ID NO: 6535 - RNA, 21 nt, Artificial
  Chemically synthesized
uucuucaaguugguccgcuug

SEQ ID NO: 6536 - RNA, 21 nt, Artificial
  Chemically synthesized
ucaguaagagcuucugucuuc

SEQ ID NO: 6537 - RNA, 21 nt, Artificial
  Chemically synthesized
ucaaucugcugcuguugccua

SEQ ID NO: 6538 - RNA, 21 nt, Artificial
  Chemically synthesized
auccucugcugaaucuguugu

SEQ ID NO: 6539 - RNA, 21 nt, Artificial
  Chemically synthesized
uuaauguuggccaguuuccau

SEQ ID NO: 6540 - RNA, 21 nt, Artificial
  Chemically synthesized
uccugcucaggcucuuucuca

SEQ ID NO: 6541 - RNA, 21 nt, Artificial
  Chemically synthesized
acuauguacagucagugcucc

SEQ ID NO: 6542 - RNA, 21 nt, Artificial
  Chemically synthesized
auuaucauuggcaucugauga

SEQ ID NO: 6543 - RNA, 21 nt, Artificial
  Chemically synthesized
uucacauuguggacgcugucu

SEQ ID NO: 6544 - RNA, 21 nt, Artificial
  Chemically synthesized
agaaacugggagcacuggaug

SEQ ID NO: 6545 - RNA, 21 nt, Artificial
  Chemically synthesized
uggccacguuguuguuauugu

SEQ ID NO: 6546 - RNA, 21 nt, Artificial
  Chemically synthesized
cuuaaaauugcagucuguacu

SEQ ID NO: 6547 - RNA, 21 nt, Artificial
  Chemically synthesized
aaaacaguuaauaucaucggc

SEQ ID NO: 6548 - RNA, 21 nt, Artificial
  Chemically synthesized
ugauuuucaaucugcugcugu

SEQ ID NO: 6549 - RNA, 21 nt, Artificial
  Chemically synthesized
cucucauugcacgaauuuucu

SEQ ID NO: 6550 - RNA, 21 nt, Artificial
  Chemically synthesized
guaauuggcaaaauucagucc

SEQ ID NO: 6551 - RNA, 21 nt, Artificial
  Chemically synthesized
aacccuuaaaauugcagucug

SEQ ID NO: 6552 - RNA, 21 nt, Artificial
  Chemically synthesized
augaagggaagaaggaucaug

SEQ ID NO: 6553 - RNA, 21 nt, Artificial
  Chemically synthesized
uugggcuucuucaaguugguc

SEQ ID NO: 6554 - RNA, 21 nt, Artificial
  Chemically synthesized
uaaguucaacacguggauucc

SEQ ID NO: 6555 - RNA, 21 nt, Artificial
  Chemically synthesized
ugugagaaaggaugagugucc

SEQ ID NO: 6556 - RNA, 21 nt, Artificial
  Chemically synthesized
aucauuggcaucugaugacgg

SEQ ID NO: 6557 - RNA, 21 nt, Artificial
  Chemically synthesized
aagguaacucauuaucauugg

SEQ ID NO: 6558 - RNA, 21 nt, Artificial
  Chemically synthesized
agacguucacgcaguucacug

SEQ ID NO: 6559 - RNA, 21 nt, Artificial
  Chemically synthesized
ugcagcuuuccuggaaaacag

SEQ ID NO: 6560 - RNA, 21 nt, Artificial
  Chemically synthesized
uccugguuaaguugguuacga

SEQ ID NO: 6561 - RNA, 21 nt, Artificial
  Chemically synthesized
uaggacuuggguaugucccau

SEQ ID NO: 6562 - RNA, 21 nt, Artificial
  Chemically synthesized
auuguaagacuggaacccauu

SEQ ID NO: 6563 - RNA, 21 nt, Artificial
  Chemically synthesized
uccucugcaccagaucgaacu

SEQ ID NO: 6564 - RNA, 21 nt, Artificial
  Chemically synthesized
cuuuaccaaucucgaugcccg

SEQ ID NO: 6565 - RNA, 21 nt, Artificial
  Chemically synthesized
aauucuacaacaucucgacag

SEQ ID NO: 6566 - RNA, 21 nt, Artificial
  Chemically synthesized
ugcagaggugaacgcuguuac

SEQ ID NO: 6567 - RNA, 21 nt, Artificial
  Chemically synthesized
aauucuguuuuaauguuggcc

SEQ ID NO: 6568 - RNA, 21 nt, Artificial
  Chemically synthesized
ugagaggguaaguucaacacg

SEQ ID NO: 6569 - RNA, 21 nt, Artificial
  Chemically synthesized
aauuuuuuucccauagagacg

SEQ ID NO: 6570 - RNA, 21 nt, Artificial
  Chemically synthesized
aauugcugacuaagcugauca

SEQ ID NO: 6571 - RNA, 21 nt, Artificial
  Chemically synthesized
uccaugagcagcauuugaggc

SEQ ID NO: 6572 - RNA, 21 nt, Artificial
  Chemically synthesized
gcuucuuuuccuggaacaugg

SEQ ID NO: 6573 - RNA, 21 nt, Artificial
  Chemically synthesized
uauaugcugaggcucucccag

SEQ ID NO: 6574 - RNA, 21 nt, Artificial
  Chemically synthesized
aguugggcuucuucaaguugg

SEQ ID NO: 6575 - RNA, 21 nt, Artificial
  Chemically synthesized
ucuuccaauugcugacuaagc

SEQ ID NO: 6576 - RNA, 21 nt, Artificial
  Chemically synthesized
uaagacuggaacccauucagu

SEQ ID NO: 6577 - RNA, 21 nt, Artificial
  Chemically synthesized
uaugaucaaaggguaugggac

SEQ ID NO: 6578 - RNA, 21 nt, Artificial
  Chemically synthesized
aaucuguugugaggagccugg

SEQ ID NO: 6579 - RNA, 21 nt, Artificial
  Chemically synthesized
ucuucaccacacuauguacag

SEQ ID NO: 6580 - RNA, 21 nt, Artificial
  Chemically synthesized
ucuguucauuguugcucaaga

SEQ ID NO: 6581 - RNA, 21 nt, Artificial
  Chemically synthesized
ugugugggaagugugagaaag

SEQ ID NO: 6582 - RNA, 21 nt, Artificial
  Chemically synthesized
aacccauucaguuuuccuuuc

SEQ ID NO: 6583 - RNA, 21 nt, Artificial
  Chemically synthesized
uacagucagugcuccaaggug

SEQ ID NO: 6584 - RNA, 21 nt, Artificial
  Chemically synthesized
auccuucaggcaccaaacagc

SEQ ID NO: 6585 - RNA, 21 nt, Artificial
  Chemically synthesized
uggguaugucccauagcuugg

SEQ ID NO: 6586 - RNA, 21 nt, Artificial
  Chemically synthesized
ucguucuuucaauuucugaag

SEQ ID NO: 6587 - RNA, 21 nt, Artificial
  Chemically synthesized
aggcucuuucucaguacuuuc

SEQ ID NO: 6588 - RNA, 21 nt, Artificial
  Chemically synthesized
uucuuuuccuggaacauggca

SEQ ID NO: 6589 - RNA, 21 nt, Artificial
  Chemically synthesized
ugaaccuuucuauuucagcag

SEQ ID NO: 6590 - RNA, 21 nt, Artificial
  Chemically synthesized
aauuuucuucagcuuguucuc

SEQ ID NO: 6591 - RNA, 21 nt, Artificial
  Chemically synthesized
uccagcaggaacuucacgaug

SEQ ID NO: 6592 - RNA, 21 nt, Artificial
  Chemically synthesized
uugcacgaauuuucuucagcu

SEQ ID NO: 6593 - RNA, 21 nt, Artificial
  Chemically synthesized
ucaacccuuaaaauugcaguc

SEQ ID NO: 6594 - RNA, 21 nt, Artificial
  Chemically synthesized
auucuuaggugguguggcuug

SEQ ID NO: 6595 - RNA, 21 nt, Artificial
  Chemically synthesized
aacaucugcugcugauuuuca

SEQ ID NO: 6596 - RNA, 21 nt, Artificial
  Chemically synthesized
agcucuuccagguuuccauug

SEQ ID NO: 6597 - RNA, 21 nt, Artificial
  Chemically synthesized
agcaccauuaagaccauuuuc

SEQ ID NO: 6598 - RNA, 21 nt, Artificial
  Chemically synthesized
agaaaauguaaacgcuguucc

SEQ ID NO: 6599 - RNA, 21 nt, Artificial
  Chemically synthesized
guuugauccguggauacagcc

SEQ ID NO: 6600 - RNA, 21 nt, Artificial
  Chemically synthesized
guuuuugggcacauagcccuc

SEQ ID NO: 6601 - RNA, 21 nt, Artificial
  Chemically synthesized
cuccacacuucagcuaaaugg

SEQ ID NO: 6602 - RNA, 21 nt, Artificial
  Chemically synthesized
aagccuguacguacaauucac

SEQ ID NO: 6603 - RNA, 21 nt, Artificial
  Chemically synthesized
uuuguuccugguuaaguuggu

SEQ ID NO: 6604 - RNA, 21 nt, Artificial
  Chemically synthesized
aauguuggccaguuuccauca

SEQ ID NO: 6605 - RNA, 21 nt, Artificial
  Chemically synthesized
uguugaagcgcugguacagca

SEQ ID NO: 6606 - RNA, 21 nt, Artificial
  Chemically synthesized
cuuuaaaucuuccaauugcug

SEQ ID NO: 6607 - RNA, 21 nt, Artificial
  Chemically synthesized
ugugagaucggaggagaagag

SEQ ID NO: 6608 - RNA, 21 nt, Artificial
  Chemically synthesized
acucagucucgcuuucguccu

SEQ ID NO: 6609 - RNA, 21 nt, Artificial
  Chemically synthesized
uccuucugcugcugaaguuuu

SEQ ID NO: 6610 - RNA, 21 nt, Artificial
  Chemically synthesized
uccgaguugggcuucuucaag

SEQ ID NO: 6611 - RNA, 21 nt, Artificial
  Chemically synthesized
agaccauuuucuagcugcagc

SEQ ID NO: 6612 - RNA, 21 nt, Artificial
  Chemically synthesized
auugcacgaauuuucuucagc

SEQ ID NO: 6613 - RNA, 21 nt, Artificial
  Chemically synthesized
ugcugcugauuuucaaucugc

SEQ ID NO: 6614 - RNA, 21 nt, Artificial
  Chemically synthesized
auucgcuuguccaucauggcc

SEQ ID NO: 6615 - RNA, 21 nt, Artificial
  Chemically synthesized
ucuuaaguggcuccugguagc

SEQ ID NO: 6616 - RNA, 21 nt, Artificial
  Chemically synthesized
guucacuuuucuucaccacac

SEQ ID NO: 6617 - RNA, 21 nt, Artificial
  Chemically synthesized
augggcaaacuggagaaaggg

SEQ ID NO: 6618 - RNA, 21 nt, Artificial
  Chemically synthesized
auacacacugggcagcaacac

SEQ ID NO: 6619 - RNA, 21 nt, Artificial
  Chemically synthesized
aaacgcuguuccuuggcaacc

SEQ ID NO: 6620 - RNA, 21 nt, Artificial
  Chemically synthesized
auaugaucaaaggguauggga

SEQ ID NO: 6621 - RNA, 21 nt, Artificial
  Chemically synthesized
ucaucacacccagcuuuuccu

SEQ ID NO: 6622 - RNA, 21 nt, Artificial
  Chemically synthesized
ucugagaggguaaguucaaca

SEQ ID NO: 6623 - RNA, 21 nt, Artificial
  Chemically synthesized
uaugggacuucuuaauggcaa

SEQ ID NO: 6624 - RNA, 21 nt, Artificial
  Chemically synthesized
auucuacaacaucucgacagg

SEQ ID NO: 6625 - RNA, 21 nt, Artificial
  Chemically synthesized
cuugguacagucuuuuuaacu

SEQ ID NO: 6626 - RNA, 21 nt, Artificial
  Chemically synthesized
auugguguuuccauuguccac

SEQ ID NO: 6627 - RNA, 21 nt, Artificial
  Chemically synthesized
ucuuccagguuuccauuggca

SEQ ID NO: 6628 - RNA, 21 nt, Artificial
  Chemically synthesized
uuucagcagacagauugccgu

SEQ ID NO: 6629 - RNA, 21 nt, Artificial
  Chemically synthesized
auuacauuucucugaguucgu

SEQ ID NO: 6630 - RNA, 21 nt, Artificial
  Chemically synthesized
uugcagucuguacuuccugcu

SEQ ID NO: 6631 - RNA, 21 nt, Artificial
  Chemically synthesized
cucuuaaguggcuccugguag

SEQ ID NO: 6632 - RNA, 21 nt, Artificial
  Chemically synthesized
uuaugggacuucuuaauggca

SEQ ID NO: 6633 - RNA, 21 nt, Artificial
  Chemically synthesized
uucauuguugcucaagaaaac

SEQ ID NO: 6634 - RNA, 21 nt, Artificial
  Chemically synthesized
ucagcagacagauugccguuc

SEQ ID NO: 6635 - RNA, 21 nt, Artificial
  Chemically synthesized
ucuuuuccuggaacauggcac

SEQ ID NO: 6636 - RNA, 21 nt, Artificial
  Chemically synthesized
cuaagggccuguauuuuaaug

SEQ ID NO: 6637 - RNA, 21 nt, Artificial
  Chemically synthesized
aaaagccuguacguacaauuc

SEQ ID NO: 6638 - RNA, 21 nt, Artificial
  Chemically synthesized
ugggaagugugagaaaggaug

SEQ ID NO: 6639 - RNA, 21 nt, Artificial
  Chemically synthesized
uucacgcaguucacugauucg

SEQ ID NO: 6640 - RNA, 21 nt, Artificial
  Chemically synthesized
aaaucuuccaauugcugacua

SEQ ID NO: 6641 - RNA, 21 nt, Artificial
  Chemically synthesized
cugaucaacccuuaaaauugc

SEQ ID NO: 6642 - RNA, 21 nt, Artificial
  Chemically synthesized
ucacacuugucugcagcaguu

SEQ ID NO: 6643 - RNA, 21 nt, Artificial
  Chemically synthesized
uauagaaacugggagcacugg

SEQ ID NO: 6644 - RNA, 21 nt, Artificial
  Chemically synthesized
cugauuuucaaucugcugcug

SEQ ID NO: 6645 - RNA, 21 nt, Artificial
  Chemically synthesized
ucauaugaucaaaggguaugg

SEQ ID NO: 6646 - RNA, 21 nt, Artificial
  Chemically synthesized
agguuuuugggcacauagccc

SEQ ID NO: 6647 - RNA, 21 nt, Artificial
  Chemically synthesized
aguaccucucccaguuaaugg

SEQ ID NO: 6648 - RNA, 21 nt, Artificial
  Chemically synthesized
uuggaucuuccaugagcagca

SEQ ID NO: 6649 - RNA, 21 nt, Artificial
  Chemically synthesized
cuacaagggcguucacuuuuc

SEQ ID NO: 6650 - RNA, 21 nt, Artificial
  Chemically synthesized
ucgugucgaaggaaaaauuuc

SEQ ID NO: 6651 - RNA, 21 nt, Artificial
  Chemically synthesized
uacagcagcuucuggauguug

SEQ ID NO: 6652 - RNA, 21 nt, Artificial
  Chemically synthesized
ugcgcuuauuuaagaguuccu

SEQ ID NO: 6653 - RNA, 21 nt, Artificial
  Chemically synthesized
ucuagcugcagcuuuccugga

SEQ ID NO: 6654 - RNA, 21 nt, Artificial
  Chemically synthesized
augacgugccauucacacggu

SEQ ID NO: 6655 - RNA, 21 nt, Artificial
  Chemically synthesized
uacacacugggcagcaacacu

SEQ ID NO: 6656 - RNA, 21 nt, Artificial
  Chemically synthesized
uuuacacagcgucagcagcgu

SEQ ID NO: 6657 - RNA, 21 nt, Artificial
  Chemically synthesized
aaauucuacaacaucucgaca

SEQ ID NO: 6658 - RNA, 21 nt, Artificial
  Chemically synthesized
auuguugcucaagaaaacagu

SEQ ID NO: 6659 - RNA, 21 nt, Artificial
  Chemically synthesized
augauuuugcuguagucgacu

SEQ ID NO: 6660 - RNA, 21 nt, Artificial
  Chemically synthesized
uggugaugacgugccauucac

SEQ ID NO: 6661 - RNA, 21 nt, Artificial
  Chemically synthesized
aucacacccagcuuuuccugc

SEQ ID NO: 6662 - RNA, 21 nt, Artificial
  Chemically synthesized
aacuugaauucacugucuggg

SEQ ID NO: 6663 - RNA, 21 nt, Artificial
  Chemically synthesized
uggaacauggcacugaaccuu

SEQ ID NO: 6664 - RNA, 21 nt, Artificial
  Chemically synthesized
cuuuguucaucacacccagcu

SEQ ID NO: 6665 - RNA, 21 nt, Artificial
  Chemically synthesized
augguugaggcaaaaauggcg

SEQ ID NO: 6666 - RNA, 21 nt, Artificial
  Chemically synthesized
agaaauagacugcugcugacg

SEQ ID NO: 6667 - RNA, 21 nt, Artificial
  Chemically synthesized
uggaacuugaauucacugucu

SEQ ID NO: 6668 - RNA, 21 nt, Artificial
  Chemically synthesized
uguuauuguccucugccggcu

SEQ ID NO: 6669 - RNA, 21 nt, Artificial
  Chemically synthesized
auagagacguucacgcaguuc

SEQ ID NO: 6670 - RNA, 21 nt, Artificial
  Chemically synthesized
cgcuuauuuaagaguuccuuc

SEQ ID NO: 6671 - RNA, 21 nt, Artificial
  Chemically synthesized
acaucucgacagguuguuucc

SEQ ID NO: 6672 - RNA, 21 nt, Artificial
  Chemically synthesized
ugagaaccacacugagcagca

SEQ ID NO: 6673 - RNA, 21 nt, Artificial
  Chemically synthesized
ucugcuaaagugagcaccauu

SEQ ID NO: 6674 - RNA, 21 nt, Artificial
  Chemically synthesized
uccuugcaaaauucuacaaca

SEQ ID NO: 6675 - RNA, 21 nt, Artificial
  Chemically synthesized
uugcagaggugaacgcuguua

SEQ ID NO: 6676 - RNA, 21 nt, Artificial
  Chemically synthesized
uacagugcugcaucagugagu

SEQ ID NO: 6677 - RNA, 21 nt, Artificial
  Chemically synthesized
ucguacaucauaugaucaaag

SEQ ID NO: 6678 - RNA, 21 nt, Artificial
  Chemically synthesized
acguugacaccaaaauccagc

SEQ ID NO: 6679 - RNA, 21 nt, Artificial
  Chemically synthesized
aacugaauuugagcuugcagg

SEQ ID NO: 6680 - RNA, 21 nt, Artificial
  Chemically synthesized
aucacuaucagcagcauucac

SEQ ID NO: 6681 - RNA, 21 nt, Artificial
  Chemically synthesized
accaacaucugcugcugauuu

SEQ ID NO: 6682 - RNA, 21 nt, Artificial
  Chemically synthesized
uaggugaacuggaacaggaag

SEQ ID NO: 6683 - RNA, 21 nt, Artificial
  Chemically synthesized
cugucugcuaaagugagcacc

SEQ ID NO: 6684 - RNA, 21 nt, Artificial
  Chemically synthesized
ccauuaagaccauuuucuagc

SEQ ID NO: 6685 - RNA, 21 nt, Artificial
  Chemically synthesized
aauuacacacgacucauacau

SEQ ID NO: 6686 - RNA, 21 nt, Artificial
  Chemically synthesized
auacagaggcuccuuugguga

SEQ ID NO: 6687 - RNA, 23 nt, Artificial
  Chemically synthesized
cguuuacauuuucuaaagcaaca

SEQ ID NO: 6688 - RNA, 23 nt, Artificial
  Chemically synthesized
caggaacaaaauucaaaacuuca

SEQ ID NO: 6689 - RNA, 23 nt, Artificial
  Chemically synthesized
gaauuuugcaaggaaccuggaga

SEQ ID NO: 6690 - RNA, 23 nt, Artificial
  Chemically synthesized
ccuuaaauaagucaguuaaagca

SEQ ID NO: 6691 - RNA, 23 nt, Artificial
  Chemically synthesized
cagagaaauguaauaaauguacc

SEQ ID NO: 6692 - RNA, 23 nt, Artificial
  Chemically synthesized
ggguuccagucuuacaauggcaa

SEQ ID NO: 6693 - RNA, 23 nt, Artificial
  Chemically synthesized
agagauuauugugcuguuuucca

SEQ ID NO: 6694 - RNA, 23 nt, Artificial
  Chemically synthesized
caaugaacagauuuuaacagaag

SEQ ID NO: 6695 - RNA, 23 nt, Artificial
  Chemically synthesized
gauuauugugcuguuuuccagga

SEQ ID NO: 6696 - RNA, 23 nt, Artificial
  Chemically synthesized
caguuugcccauuaacugggaga

SEQ ID NO: 6697 - RNA, 23 nt, Artificial
  Chemically synthesized
gagaaauguaauaaauguaccug

SEQ ID NO: 6698 - RNA, 23 nt, Artificial
  Chemically synthesized
cguguugaacuuacccucucaga

SEQ ID NO: 6699 - RNA, 23 nt, Artificial
  Chemically synthesized
gauccuucuucccuucaucacca

SEQ ID NO: 6700 - RNA, 23 nt, Artificial
  Chemically synthesized
cauuaggccuuuccuggcugaua

SEQ ID NO: 6701 - RNA, 23 nt, Artificial
  Chemically synthesized
gaucagcuuagucagcaauugga

SEQ ID NO: 6702 - RNA, 23 nt, Artificial
  Chemically synthesized
agacucacugaugcagcacugua

SEQ ID NO: 6703 - RNA, 23 nt, Artificial
  Chemically synthesized
agaaauguaauaaauguaccugg

SEQ ID NO: 6704 - RNA, 23 nt, Artificial
  Chemically synthesized
gaacuuccuuuuggagcaccgca

SEQ ID NO: 6705 - RNA, 23 nt, Artificial
  Chemically synthesized
aaaaauucagcugaaccguguga

SEQ ID NO: 6706 - RNA, 23 nt, Artificial
  Chemically synthesized
ggaaaugaacgucccauacccuu

SEQ ID NO: 6707 - RNA, 23 nt, Artificial
  Chemically synthesized
cuccaaggacugaauuuugccaa

SEQ ID NO: 6708 - RNA, 23 nt, Artificial
  Chemically synthesized
gggaauccacguguugaacuuac

SEQ ID NO: 6709 - RNA, 23 nt, Artificial
  Chemically synthesized
accaaaggagccucuguauggaa

SEQ ID NO: 6710 - RNA, 23 nt, Artificial
  Chemically synthesized
caugauccuucuucccuucauca

SEQ ID NO: 6711 - RNA, 23 nt, Artificial
  Chemically synthesized
cuaagaccaagugacaacuggga

SEQ ID NO: 6712 - RNA, 23 nt, Artificial
  Chemically synthesized
gcuacauccagugcucccaguuu

SEQ ID NO: 6713 - RNA, 23 nt, Artificial
  Chemically synthesized
agaguucgaucuggugcagagga

SEQ ID NO: 6714 - RNA, 23 nt, Artificial
  Chemically synthesized
ugaaauagaaagguucagugcca

SEQ ID NO: 6715 - RNA, 23 nt, Artificial
  Chemically synthesized
gaaacugcugcagacaaguguga

SEQ ID NO: 6716 - RNA, 23 nt, Artificial
  Chemically synthesized
guucgaucuggugcagaggauca

SEQ ID NO: 6717 - RNA, 23 nt, Artificial
  Chemically synthesized
uguaacagcguucaccucugcaa

SEQ ID NO: 6718 - RNA, 23 nt, Artificial
  Chemically synthesized
gccucagcauauacucuucuccu

SEQ ID NO: 6719 - RNA, 23 nt, Artificial
  Chemically synthesized
uacucuucuccuccgaucucaca

SEQ ID NO: 6720 - RNA, 23 nt, Artificial
  Chemically synthesized
ccuccaaggacugaauuuugcca

SEQ ID NO: 6721 - RNA, 23 nt, Artificial
  Chemically synthesized
gaacaaaauucaaaacuucagca

SEQ ID NO: 6722 - RNA, 23 nt, Artificial
  Chemically synthesized
cagaaauugaaagaacgaguuga

SEQ ID NO: 6723 - RNA, 23 nt, Artificial
  Chemically synthesized
uccaaauccgcuaaugauggaaa

SEQ ID NO: 6724 - RNA, 23 nt, Artificial
  Chemically synthesized
aaagaacgaguugaagcccagga

SEQ ID NO: 6725 - RNA, 23 nt, Artificial
  Chemically synthesized
gugugaauggcacgucaucacca

SEQ ID NO: 6726 - RNA, 23 nt, Artificial
  Chemically synthesized
caagcucaaauucaguucccuga

SEQ ID NO: 6727 - RNA, 23 nt, Artificial
  Chemically synthesized
cccuuucuccaguuugcccauua

SEQ ID NO: 6728 - RNA, 23 nt, Artificial
  Chemically synthesized
uggaaacaccaaugccaauggaa

SEQ ID NO: 6729 - RNA, 23 nt, Artificial
  Chemically synthesized
gauauuaacuguuuucuugagca

SEQ ID NO: 6730 - RNA, 23 nt, Artificial
  Chemically synthesized
gaaaauggucuuaauggugcuca

SEQ ID NO: 6731 - RNA, 23 nt, Artificial
  Chemically synthesized
aagaauuaccagccggcagcaca

SEQ ID NO: 6732 - RNA, 23 nt, Artificial
  Chemically synthesized
gcuaggcaacagcagcagauuga

SEQ ID NO: 6733 - RNA, 23 nt, Artificial
  Chemically synthesized
aacuuacccucucagagcuccaa

SEQ ID NO: 6734 - RNA, 23 nt, Artificial
  Chemically synthesized
ccauuaggccuuuccuggcugau

SEQ ID NO: 6735 - RNA, 23 nt, Artificial
  Chemically synthesized
cauaugauguacgaacaucuuca

SEQ ID NO: 6736 - RNA, 23 nt, Artificial
  Chemically synthesized
agcagacagcguccacaauguga

SEQ ID NO: 6737 - RNA, 23 nt, Artificial
  Chemically synthesized
acaagcucccuggaaaggaggaa

SEQ ID NO: 6738 - RNA, 23 nt, Artificial
  Chemically synthesized
aauaagucaguuaaagcagugua

SEQ ID NO: 6739 - RNA, 23 nt, Artificial
  Chemically synthesized
ccucuugccauuaagaaguccca

SEQ ID NO: 6740 - RNA, 23 nt, Artificial
  Chemically synthesized
ccaacauuaaaacagaauucuag

SEQ ID NO: 6741 - RNA, 23 nt, Artificial
  Chemically synthesized
ccuuucucacacuucccacacau

SEQ ID NO: 6742 - RNA, 23 nt, Artificial
  Chemically synthesized
guacuuucgccuccaaggacuga

SEQ ID NO: 6743 - RNA, 23 nt, Artificial
  Chemically synthesized
agugaacugcgugaacgucucua

SEQ ID NO: 6744 - RNA, 23 nt, Artificial
  Chemically synthesized
agcuacccgaacuauguuggaaa

SEQ ID NO: 6745 - RNA, 23 nt, Artificial
  Chemically synthesized
ccuucuucccuucaucaccaaag

SEQ ID NO: 6746 - RNA, 23 nt, Artificial
  Chemically synthesized
ugcuguuuuccaggaaagcugca

SEQ ID NO: 6747 - RNA, 23 nt, Artificial
  Chemically synthesized
gaaaaucagcagcagauguuggu

SEQ ID NO: 6748 - RNA, 23 nt, Artificial
  Chemically synthesized
uccuucuucccuucaucaccaaa

SEQ ID NO: 6749 - RNA, 23 nt, Artificial
  Chemically synthesized
agcauauacucuucuccuccgau

SEQ ID NO: 6750 - RNA, 23 nt, Artificial
  Chemically synthesized
caacugggagagccucagcauau

SEQ ID NO: 6751 - RNA, 23 nt, Artificial
  Chemically synthesized
cagucuuacaauggcaaauugac

SEQ ID NO: 6752 - RNA, 23 nt, Artificial
  Chemically synthesized
cuuugaucauaugauguacgaac

SEQ ID NO: 6753 - RNA, 23 nt, Artificial
  Chemically synthesized
ggugucaacgugaaugcugcuga

SEQ ID NO: 6754 - RNA, 23 nt, Artificial
  Chemically synthesized
caucuaugagguggaagauccca

SEQ ID NO: 6755 - RNA, 23 nt, Artificial
  Chemically synthesized
caucgugaaguuccugcuggauu

SEQ ID NO: 6756 - RNA, 23 nt, Artificial
  Chemically synthesized
gccaacauuaaaacagaauucua

SEQ ID NO: 6757 - RNA, 23 nt, Artificial
  Chemically synthesized
gauugguaaagugccaccuccca

SEQ ID NO: 6758 - RNA, 23 nt, Artificial
  Chemically synthesized
aagugacaacugggagagccuca

SEQ ID NO: 6759 - RNA, 23 nt, Artificial
  Chemically synthesized
gaaacaaccugucgagauguugu

SEQ ID NO: 6760 - RNA, 23 nt, Artificial
  Chemically synthesized
gaauggcacgucaucaccacagu

SEQ ID NO: 6761 - RNA, 23 nt, Artificial
  Chemically synthesized
ggagagccucagcauauacucuu

SEQ ID NO: 6762 - RNA, 23 nt, Artificial
  Chemically synthesized
cagaaguuccuauaacaccggaa

SEQ ID NO: 6763 - RNA, 23 nt, Artificial
  Chemically synthesized
gcauauacucuucuccuccgauc

SEQ ID NO: 6764 - RNA, 23 nt, Artificial
  Chemically synthesized
cuggaaggagaguucgaucuggu

SEQ ID NO: 6765 - RNA, 23 nt, Artificial
  Chemically synthesized
cgaugauauuaacuguuuucuug

SEQ ID NO: 6766 - RNA, 23 nt, Artificial
  Chemically synthesized
cgucucuggaaggagaguucgau

SEQ ID NO: 6767 - RNA, 23 nt, Artificial
  Chemically synthesized
gaaauagaaagguucagugccau

SEQ ID NO: 6768 - RNA, 23 nt, Artificial
  Chemically synthesized
aauuuuaaggguugaucagcuua

SEQ ID NO: 6769 - RNA, 23 nt, Artificial
  Chemically synthesized
aaaucaugaacggcaaucugucu

SEQ ID NO: 6770 - RNA, 23 nt, Artificial
  Chemically synthesized
caacaaugaacagauuuuaacag

SEQ ID NO: 6771 - RNA, 23 nt, Artificial
  Chemically synthesized
accaaugccaauggaaaccugga

SEQ ID NO: 6772 - RNA, 23 nt, Artificial
  Chemically synthesized
gaauucaaguuccauauacucca

SEQ ID NO: 6773 - RNA, 23 nt, Artificial
  Chemically synthesized
gaacuuacccucucagagcucca

SEQ ID NO: 6774 - RNA, 23 nt, Artificial
  Chemically synthesized
aaacaaccugucgagauguugua

SEQ ID NO: 6775 - RNA, 23 nt, Artificial
  Chemically synthesized
ugaugcagcacuguagcccauca

SEQ ID NO: 6776 - RNA, 23 nt, Artificial
  Chemically synthesized
guuccgcuuccuguuccaguuca

SEQ ID NO: 6777 - RNA, 23 nt, Artificial
  Chemically synthesized
guuccaguucaccuaaaggcuga

SEQ ID NO: 6778 - RNA, 23 nt, Artificial
  Chemically synthesized
guuucuucacgggucacugucca

SEQ ID NO: 6779 - RNA, 23 nt, Artificial
  Chemically synthesized
caaaauucaaaacuucagcagca

SEQ ID NO: 6780 - RNA, 23 nt, Artificial
  Chemically synthesized
cuccaagauauggcagcuaggca

SEQ ID NO: 6781 - RNA, 23 nt, Artificial
  Chemically synthesized
gugugaauuguacguacaggcuu

SEQ ID NO: 6782 - RNA, 23 nt, Artificial
  Chemically synthesized
acagaaguuccuauaacaccgga

SEQ ID NO: 6783 - RNA, 23 nt, Artificial
  Chemically synthesized
cuaugagguggaagaucccagca

SEQ ID NO: 6784 - RNA, 23 nt, Artificial
  Chemically synthesized
guaaaugugcacaauaaacccgu

SEQ ID NO: 6785 - RNA, 23 nt, Artificial
  Chemically synthesized
cagauuuuaacagaaguuccuau

SEQ ID NO: 6786 - RNA, 23 nt, Artificial
  Chemically synthesized
cgaucuggugcagaggaucaucu

SEQ ID NO: 6787 - RNA, 23 nt, Artificial
  Chemically synthesized
aaugaacgucccauacccuuuga

SEQ ID NO: 6788 - RNA, 23 nt, Artificial
  Chemically synthesized
guugguugccaaggaacagcguu

SEQ ID NO: 6789 - RNA, 23 nt, Artificial
  Chemically synthesized
gauauggcagcuaggcaacagca

SEQ ID NO: 6790 - RNA, 23 nt, Artificial
  Chemically synthesized
ugaaaaagcgcagcuccaucaca

SEQ ID NO: 6791 - RNA, 23 nt, Artificial
  Chemically synthesized
gaaaugaacgucccauacccuuu

SEQ ID NO: 6792 - RNA, 23 nt, Artificial
  Chemically synthesized
ggaacaaaauucaaaacuucagc

SEQ ID NO: 6793 - RNA, 23 nt, Artificial
  Chemically synthesized
gccucuuguaacagcguucaccu

SEQ ID NO: 6794 - RNA, 23 nt, Artificial
  Chemically synthesized
ugaagcccaggagaacaagcuga

SEQ ID NO: 6795 - RNA, 23 nt, Artificial
  Chemically synthesized
gacucacugaugcagcacuguag

SEQ ID NO: 6796 - RNA, 23 nt, Artificial
  Chemically synthesized
acauccagugcucccaguuucua

SEQ ID NO: 6797 - RNA, 23 nt, Artificial
  Chemically synthesized
agaacagugaacaagguggccgu

SEQ ID NO: 6798 - RNA, 23 nt, Artificial
  Chemically synthesized
gugaacugcgugaacgucucuau

SEQ ID NO: 6799 - RNA, 23 nt, Artificial
  Chemically synthesized
gaacacucgccugaacuuccuuu

SEQ ID NO: 6800 - RNA, 23 nt, Artificial
  Chemically synthesized
aaaauucagcugaaccgugugaa

SEQ ID NO: 6801 - RNA, 23 nt, Artificial
  Chemically synthesized
cuacagcaaaaucaugaacggca

SEQ ID NO: 6802 - RNA, 23 nt, Artificial
  Chemically synthesized
cagcagauugaaaaucagcagca

SEQ ID NO: 6803 - RNA, 23 nt, Artificial
  Chemically synthesized
acaacugggagagccucagcaua

SEQ ID NO: 6804 - RNA, 23 nt, Artificial
  Chemically synthesized
ggacauacccaaguccuacaccu

SEQ ID NO: 6805 - RNA, 23 nt, Artificial
  Chemically synthesized
aaaaagcgcagcuccaucacaga

SEQ ID NO: 6806 - RNA, 23 nt, Artificial
  Chemically synthesized
cuaagaauuaccagccggcagca

SEQ ID NO: 6807 - RNA, 23 nt, Artificial
  Chemically synthesized
cagcuaggcaacagcagcagauu

SEQ ID NO: 6808 - RNA, 23 nt, Artificial
  Chemically synthesized
cuccaagcuaugggacauaccca

SEQ ID NO: 6809 - RNA, 23 nt, Artificial
  Chemically synthesized
ccaccaucacaucgugaaguucc

SEQ ID NO: 6810 - RNA, 23 nt, Artificial
  Chemically synthesized
ucaaauucaguucccugaaugga

SEQ ID NO: 6811 - RNA, 23 nt, Artificial
  Chemically synthesized
gaguucgaucuggugcagaggau

SEQ ID NO: 6812 - RNA, 23 nt, Artificial
  Chemically synthesized
agcucaaauucaguucccugaau

SEQ ID NO: 6813 - RNA, 23 nt, Artificial
  Chemically synthesized
uagaauuuugcaaggaaccugga

SEQ ID NO: 6814 - RNA, 23 nt, Artificial
  Chemically synthesized
caacauuaaaacagaauucuagc

SEQ ID NO: 6815 - RNA, 23 nt, Artificial
  Chemically synthesized
auuuuaaggguugaucagcuuag

SEQ ID NO: 6816 - RNA, 23 nt, Artificial
  Chemically synthesized
ucagaugccaaugauaaugaguu

SEQ ID NO: 6817 - RNA, 23 nt, Artificial
  Chemically synthesized
guauggaaacauguccaguguug

SEQ ID NO: 6818 - RNA, 23 nt, Artificial
  Chemically synthesized
gaauccuacaguuuccaggugag

SEQ ID NO: 6819 - RNA, 23 nt, Artificial
  Chemically synthesized
aggaacaaaauucaaaacuucag

SEQ ID NO: 6820 - RNA, 23 nt, Artificial
  Chemically synthesized
acagauuuuaacagaaguuccua

SEQ ID NO: 6821 - RNA, 23 nt, Artificial
  Chemically synthesized
ugguugccaaggaacagcguuua

SEQ ID NO: 6822 - RNA, 23 nt, Artificial
  Chemically synthesized
caauuggaagauuuaaagaaagg

SEQ ID NO: 6823 - RNA, 23 nt, Artificial
  Chemically synthesized
aaauuuuuccuucgacacgagga

SEQ ID NO: 6824 - RNA, 23 nt, Artificial
  Chemically synthesized
cccacacaugauccuucuucccu

SEQ ID NO: 6825 - RNA, 23 nt, Artificial
  Chemically synthesized
caaauucaguucccugaauggag

SEQ ID NO: 6826 - RNA, 23 nt, Artificial
  Chemically synthesized
ccgaugauauuaacuguuuucuu

SEQ ID NO: 6827 - RNA, 23 nt, Artificial
  Chemically synthesized
gugaauggcacgucaucaccaca

SEQ ID NO: 6828 - RNA, 23 nt, Artificial
  Chemically synthesized
auccuucuucccuucaucaccaa

SEQ ID NO: 6829 - RNA, 23 nt, Artificial
  Chemically synthesized
uuuggugccugaaggauggcaga

SEQ ID NO: 6830 - RNA, 23 nt, Artificial
  Chemically synthesized
gaaaaagcgcagcuccaucacag

SEQ ID NO: 6831 - RNA, 23 nt, Artificial
  Chemically synthesized
agcucuuccgugaaaccagugca

SEQ ID NO: 6832 - RNA, 23 nt, Artificial
  Chemically synthesized
ucaaguuccauauacuccaugua

SEQ ID NO: 6833 - RNA, 23 nt, Artificial
  Chemically synthesized
cagugaacugcgugaacgucucu

SEQ ID NO: 6834 - RNA, 23 nt, Artificial
  Chemically synthesized
acugaugcagcacuguagcccau

SEQ ID NO: 6835 - RNA, 23 nt, Artificial
  Chemically synthesized
agauggaggaaggcuacauccag

SEQ ID NO: 6836 - RNA, 23 nt, Artificial
  Chemically synthesized
aagaagugaaauuuuuccuucga

SEQ ID NO: 6837 - RNA, 23 nt, Artificial
  Chemically synthesized
ggcuaugugcccaaaaaccugcu

SEQ ID NO: 6838 - RNA, 23 nt, Artificial
  Chemically synthesized
accgaaucggacacucauccuuu

SEQ ID NO: 6839 - RNA, 23 nt, Artificial
  Chemically synthesized
cagcauauacucuucuccuccga

SEQ ID NO: 6840 - RNA, 23 nt, Artificial
  Chemically synthesized
aaaugaacgucccauacccuuug

SEQ ID NO: 6841 - RNA, 23 nt, Artificial
  Chemically synthesized
cuuuuggagcaccgcauggucuu

SEQ ID NO: 6842 - RNA, 23 nt, Artificial
  Chemically synthesized
aaauucagcugaaccgugugaau

SEQ ID NO: 6843 - RNA, 23 nt, Artificial
  Chemically synthesized
aggugaggcccuuucuccaguuu

SEQ ID NO: 6844 - RNA, 23 nt, Artificial
  Chemically synthesized
gaaucggacacucauccuuucuc

SEQ ID NO: 6845 - RNA, 23 nt, Artificial
  Chemically synthesized
ugaaguuccugcuggauuuuggu

SEQ ID NO: 6846 - RNA, 23 nt, Artificial
  Chemically synthesized
guauugccucaaaugcugcucau

SEQ ID NO: 6847 - RNA, 23 nt, Artificial
  Chemically synthesized
uggugccgccauuuuugccucaa

SEQ ID NO: 6848 - RNA, 23 nt, Artificial
  Chemically synthesized
cuuagucagcaauuggaagauuu

SEQ ID NO: 6849 - RNA, 23 nt, Artificial
  Chemically synthesized
cgcuuccuguuccaguucaccua

SEQ ID NO: 6850 - RNA, 23 nt, Artificial
  Chemically synthesized
acugagaaagagccugagcagga

SEQ ID NO: 6851 - RNA, 23 nt, Artificial
  Chemically synthesized
gaaaggaggaaggaaggcagcuu

SEQ ID NO: 6852 - RNA, 23 nt, Artificial
  Chemically synthesized
cuuaaauaagucaguuaaagcag

SEQ ID NO: 6853 - RNA, 23 nt, Artificial
  Chemically synthesized
caaguuccauauacuccauguac

SEQ ID NO: 6854 - RNA, 23 nt, Artificial
  Chemically synthesized
ccuucaucaccaaaggagccucu

SEQ ID NO: 6855 - RNA, 23 nt, Artificial
  Chemically synthesized
aauaacaacaacguggccacggu

SEQ ID NO: 6856 - RNA, 23 nt, Artificial
  Chemically synthesized
cgugaaguuccugcuggauuuug

SEQ ID NO: 6857 - RNA, 23 nt, Artificial
  Chemically synthesized
caaagguguggcguaugcucugu

SEQ ID NO: 6858 - RNA, 23 nt, Artificial
  Chemically synthesized
accuucggguucaaccucuccau

SEQ ID NO: 6859 - RNA, 23 nt, Artificial
  Chemically synthesized
caccuaagaauuaccagccggca

SEQ ID NO: 6860 - RNA, 23 nt, Artificial
  Chemically synthesized
ccaaauccgcuaaugauggaaac

SEQ ID NO: 6861 - RNA, 23 nt, Artificial
  Chemically synthesized
ucagcagcagauguugguugcca

SEQ ID NO: 6862 - RNA, 23 nt, Artificial
  Chemically synthesized
agaacgaguugaagcccaggaga

SEQ ID NO: 6863 - RNA, 23 nt, Artificial
  Chemically synthesized
aaagaaaggaaaacugaaugggu

SEQ ID NO: 6864 - RNA, 23 nt, Artificial
  Chemically synthesized
gaaaaaaauucagcugaaccgug

SEQ ID NO: 6865 - RNA, 23 nt, Artificial
  Chemically synthesized
ucagcugaaccgugugaauggca

SEQ ID NO: 6866 - RNA, 23 nt, Artificial
  Chemically synthesized
auaugauguacgaacaucuucag

SEQ ID NO: 6867 - RNA, 23 nt, Artificial
  Chemically synthesized
auagaaagguucagugccauguu

SEQ ID NO: 6868 - RNA, 23 nt, Artificial
  Chemically synthesized
gaaagaacgaguugaagcccagg

SEQ ID NO: 6869 - RNA, 23 nt, Artificial
  Chemically synthesized
cugacaguggccauuaggccuuu

SEQ ID NO: 6870 - RNA, 23 nt, Artificial
  Chemically synthesized
uacuuucgccuccaaggacugaa

SEQ ID NO: 6871 - RNA, 23 nt, Artificial
  Chemically synthesized
auugaaaaucagcagcagauguu

SEQ ID NO: 6872 - RNA, 23 nt, Artificial
  Chemically synthesized
uccaguuugcccauuaacuggga

SEQ ID NO: 6873 - RNA, 23 nt, Artificial
  Chemically synthesized
ggccuuauauccagguucccagu

SEQ ID NO: 6874 - RNA, 23 nt, Artificial
  Chemically synthesized
uaaaggcugauugugcaggccca

SEQ ID NO: 6875 - RNA, 23 nt, Artificial
  Chemically synthesized
gccaauggaaaccuggaagagcu

SEQ ID NO: 6876 - RNA, 23 nt, Artificial
  Chemically synthesized
acugcugcagacaagugugagga

SEQ ID NO: 6877 - RNA, 23 nt, Artificial
  Chemically synthesized
gcugccucuuguaacagcguuca

SEQ ID NO: 6878 - RNA, 23 nt, Artificial
  Chemically synthesized
cauuaacugggagagguacuuuc

SEQ ID NO: 6879 - RNA, 23 nt, Artificial
  Chemically synthesized
ugaauggcacgucaucaccacag

SEQ ID NO: 6880 - RNA, 23 nt, Artificial
  Chemically synthesized
ccaaaaguauuuuuugacuagac

SEQ ID NO: 6881 - RNA, 23 nt, Artificial
  Chemically synthesized
aguauugccucaaaugcugcuca

SEQ ID NO: 6882 - RNA, 23 nt, Artificial
  Chemically synthesized
ccacguguugaacuuacccucuc

SEQ ID NO: 6883 - RNA, 23 nt, Artificial
  Chemically synthesized
aauacaggcccuuaggcucuauu

SEQ ID NO: 6884 - RNA, 23 nt, Artificial
  Chemically synthesized
cagaacagugacgagcuguccuu

SEQ ID NO: 6885 - RNA, 23 nt, Artificial
  Chemically synthesized
cuguauggaaacauguccagugu

SEQ ID NO: 6886 - RNA, 23 nt, Artificial
  Chemically synthesized
gcugcugauagugauggauggac

SEQ ID NO: 6887 - RNA, 23 nt, Artificial
  Chemically synthesized
aaaggaggaaggaaggcagcuug

SEQ ID NO: 6888 - RNA, 23 nt, Artificial
  Chemically synthesized
gccgaugauauuaacuguuuucu

SEQ ID NO: 6889 - RNA, 23 nt, Artificial
  Chemically synthesized
acguguugaacuuacccucucag

SEQ ID NO: 6890 - RNA, 23 nt, Artificial
  Chemically synthesized
aaaaaaauucagcugaaccgugu

SEQ ID NO: 6891 - RNA, 23 nt, Artificial
  Chemically synthesized
aauucaaguuccauauacuccau

SEQ ID NO: 6892 - RNA, 23 nt, Artificial
  Chemically synthesized
gccaaugauaaugaguuaccuuc

SEQ ID NO: 6893 - RNA, 23 nt, Artificial
  Chemically synthesized
aaauucaaaacuucagcagcaga

SEQ ID NO: 6894 - RNA, 23 nt, Artificial
  Chemically synthesized
caauggcaaauugacgggaccag

SEQ ID NO: 6895 - RNA, 23 nt, Artificial
  Chemically synthesized
cucuaugggaaaaaaauucagcu

SEQ ID NO: 6896 - RNA, 23 nt, Artificial
  Chemically synthesized
cacuuuagcagacagcguccaca

SEQ ID NO: 6897 - RNA, 23 nt, Artificial
  Chemically synthesized
cacuuaagagauuauugugcugu

SEQ ID NO: 6898 - RNA, 23 nt, Artificial
  Chemically synthesized
caccaucacaucgugaaguuccu

SEQ ID NO: 6899 - RNA, 23 nt, Artificial
  Chemically synthesized
ggcgcuucacugaggugugaauu

SEQ ID NO: 6900 - RNA, 23 nt, Artificial
  Chemically synthesized
gcuaugggacauacccaaguccu

SEQ ID NO: 6901 - RNA, 23 nt, Artificial
  Chemically synthesized
guugaagcccaggagaacaagcu

SEQ ID NO: 6902 - RNA, 23 nt, Artificial
  Chemically synthesized
caaugauaaugaguuaccuuccc

SEQ ID NO: 6903 - RNA, 23 nt, Artificial
  Chemically synthesized
gguugccaaggaacagcguuuac

SEQ ID NO: 6904 - RNA, 23 nt, Artificial
  Chemically synthesized
auugguaaagugccaccucccau

SEQ ID NO: 6905 - RNA, 23 nt, Artificial
  Chemically synthesized
cucacuuuagcagacagcgucca

SEQ ID NO: 6906 - RNA, 23 nt, Artificial
  Chemically synthesized
aaaacuucagcagcagaaggaac

SEQ ID NO: 6907 - RNA, 23 nt, Artificial
  Chemically synthesized
aauagaaagguucagugccaugu

SEQ ID NO: 6908 - RNA, 23 nt, Artificial
  Chemically synthesized
aagcucaaauucaguucccugaa

SEQ ID NO: 6909 - RNA, 23 nt, Artificial
  Chemically synthesized
cacuucccacacaugauccuucu

SEQ ID NO: 6910 - RNA, 23 nt, Artificial
  Chemically synthesized
agaauuuugcaaggaaccuggag

SEQ ID NO: 6911 - RNA, 23 nt, Artificial
  Chemically synthesized
uccaguucaccuaaaggcugauu

SEQ ID NO: 6912 - RNA, 23 nt, Artificial
  Chemically synthesized
aaauagaaagguucagugccaug

SEQ ID NO: 6913 - RNA, 23 nt, Artificial
  Chemically synthesized
acaguggccauuaggccuuuccu

SEQ ID NO: 6914 - RNA, 23 nt, Artificial
  Chemically synthesized
aaacugaauggguuccagucuua

SEQ ID NO: 6915 - RNA, 23 nt, Artificial
  Chemically synthesized
cucauggaagauccaaauccgcu

SEQ ID NO: 6916 - RNA, 23 nt, Artificial
  Chemically synthesized
auuauugugcuguuuuccaggaa

SEQ ID NO: 6917 - RNA, 23 nt, Artificial
  Chemically synthesized
ugaaccgugugaauggcacguca

SEQ ID NO: 6918 - RNA, 23 nt, Artificial
  Chemically synthesized
uaugauguacgaacaucuucaga

SEQ ID NO: 6919 - RNA, 23 nt, Artificial
  Chemically synthesized
aaaugugcacaauaaacccgucu

SEQ ID NO: 6920 - RNA, 23 nt, Artificial
  Chemically synthesized
caguucaccuaaaggcugauugu

SEQ ID NO: 6921 - RNA, 23 nt, Artificial
  Chemically synthesized
aaaauacaggcccuuaggcucua

SEQ ID NO: 6922 - RNA, 23 nt, Artificial
  Chemically synthesized
cacguguugaacuuacccucuca

SEQ ID NO: 6923 - RNA, 23 nt, Artificial
  Chemically synthesized
gaucauaugauguacgaacaucu

SEQ ID NO: 6924 - RNA, 23 nt, Artificial
  Chemically synthesized
aucauaugauguacgaacaucuu

SEQ ID NO: 6925 - RNA, 23 nt, Artificial
  Chemically synthesized
aaaacugaauggguuccagucuu

SEQ ID NO: 6926 - RNA, 23 nt, Artificial
  Chemically synthesized
aaagcuucagaaauugaaagaac

SEQ ID NO: 6927 - RNA, 23 nt, Artificial
  Chemically synthesized
ugaacgucccauacccuuugauc

SEQ ID NO: 6928 - RNA, 23 nt, Artificial
  Chemically synthesized
ugugaauggcacgucaucaccac

SEQ ID NO: 6929 - RNA, 23 nt, Artificial
  Chemically synthesized
uguugcuuuagaaaauguaaacg

SEQ ID NO: 6930 - RNA, 23 nt, Artificial
  Chemically synthesized
ugaaguuuugaauuuuguuccug

SEQ ID NO: 6931 - RNA, 23 nt, Artificial
  Chemically synthesized
ucuccagguuccuugcaaaauuc

SEQ ID NO: 6932 - RNA, 23 nt, Artificial
  Chemically synthesized
ugcuuuaacugacuuauuuaagg

SEQ ID NO: 6933 - RNA, 23 nt, Artificial
  Chemically synthesized
gguacauuuauuacauuucucug

SEQ ID NO: 6934 - RNA, 23 nt, Artificial
  Chemically synthesized
uugccauuguaagacuggaaccc

SEQ ID NO: 6935 - RNA, 23 nt, Artificial
  Chemically synthesized
uggaaaacagcacaauaaucucu

SEQ ID NO: 6936 - RNA, 23 nt, Artificial
  Chemically synthesized
cuucuguuaaaaucuguucauug

SEQ ID NO: 6937 - RNA, 23 nt, Artificial
  Chemically synthesized
uccuggaaaacagcacaauaauc

SEQ ID NO: 6938 - RNA, 23 nt, Artificial
  Chemically synthesized
ucucccaguuaaugggcaaacug

SEQ ID NO: 6939 - RNA, 23 nt, Artificial
  Chemically synthesized
cagguacauuuauuacauuucuc

SEQ ID NO: 6940 - RNA, 23 nt, Artificial
  Chemically synthesized
ucugagaggguaaguucaacacg

SEQ ID NO: 6941 - RNA, 23 nt, Artificial
  Chemically synthesized
uggugaugaagggaagaaggauc

SEQ ID NO: 6942 - RNA, 23 nt, Artificial
  Chemically synthesized
uaucagccaggaaaggccuaaug

SEQ ID NO: 6943 - RNA, 23 nt, Artificial
  Chemically synthesized
uccaauugcugacuaagcugauc

SEQ ID NO: 6944 - RNA, 23 nt, Artificial
  Chemically synthesized
uacagugcugcaucagugagucu

SEQ ID NO: 6945 - RNA, 23 nt, Artificial
  Chemically synthesized
ccagguacauuuauuacauuucu

SEQ ID NO: 6946 - RNA, 23 nt, Artificial
  Chemically synthesized
ugcggugcuccaaaaggaaguuc

SEQ ID NO: 6947 - RNA, 23 nt, Artificial
  Chemically synthesized
ucacacgguucagcugaauuuuu

SEQ ID NO: 6948 - RNA, 23 nt, Artificial
  Chemically synthesized
aaggguaugggacguucauuucc

SEQ ID NO: 6949 - RNA, 23 nt, Artificial
  Chemically synthesized
uuggcaaaauucaguccuuggag

SEQ ID NO: 6950 - RNA, 23 nt, Artificial
  Chemically synthesized
guaaguucaacacguggauuccc

SEQ ID NO: 6951 - RNA, 23 nt, Artificial
  Chemically synthesized
uuccauacagaggcuccuuuggu

SEQ ID NO: 6952 - RNA, 23 nt, Artificial
  Chemically synthesized
ugaugaagggaagaaggaucaug

SEQ ID NO: 6953 - RNA, 23 nt, Artificial
  Chemically synthesized
ucccaguugucacuuggucuuag

SEQ ID NO: 6954 - RNA, 23 nt, Artificial
  Chemically synthesized
aaacugggagcacuggauguagc

SEQ ID NO: 6955 - RNA, 23 nt, Artificial
  Chemically synthesized
uccucugcaccagaucgaacucu

SEQ ID NO: 6956 - RNA, 23 nt, Artificial
  Chemically synthesized
uggcacugaaccuuucuauuuca

SEQ ID NO: 6957 - RNA, 23 nt, Artificial
  Chemically synthesized
ucacacuugucugcagcaguuuc

SEQ ID NO: 6958 - RNA, 23 nt, Artificial
  Chemically synthesized
ugauccucugcaccagaucgaac

SEQ ID NO: 6959 - RNA, 23 nt, Artificial
  Chemically synthesized
uugcagaggugaacgcuguuaca

SEQ ID NO: 6960 - RNA, 23 nt, Artificial
  Chemically synthesized
aggagaagaguauaugcugaggc

SEQ ID NO: 6961 - RNA, 23 nt, Artificial
  Chemically synthesized
ugugagaucggaggagaagagua

SEQ ID NO: 6962 - RNA, 23 nt, Artificial
  Chemically synthesized
uggcaaaauucaguccuuggagg

SEQ ID NO: 6963 - RNA, 23 nt, Artificial
  Chemically synthesized
ugcugaaguuuugaauuuuguuc

SEQ ID NO: 6964 - RNA, 23 nt, Artificial
  Chemically synthesized
ucaacucguucuuucaauuucug

SEQ ID NO: 6965 - RNA, 23 nt, Artificial
  Chemically synthesized
uuuccaucauuagcggauuugga

SEQ ID NO: 6966 - RNA, 23 nt, Artificial
  Chemically synthesized
uccugggcuucaacucguucuuu

SEQ ID NO: 6967 - RNA, 23 nt, Artificial
  Chemically synthesized
uggugaugacgugccauucacac

SEQ ID NO: 6968 - RNA, 23 nt, Artificial
  Chemically synthesized
ucagggaacugaauuugagcuug

SEQ ID NO: 6969 - RNA, 23 nt, Artificial
  Chemically synthesized
uaaugggcaaacuggagaaaggg

SEQ ID NO: 6970 - RNA, 23 nt, Artificial
  Chemically synthesized
uuccauuggcauugguguuucca

SEQ ID NO: 6971 - RNA, 23 nt, Artificial
  Chemically synthesized
ugcucaagaaaacaguuaauauc

SEQ ID NO: 6972 - RNA, 23 nt, Artificial
  Chemically synthesized
ugagcaccauuaagaccauuuuc

SEQ ID NO: 6973 - RNA, 23 nt, Artificial
  Chemically synthesized
ugugcugccggcugguaauucuu

SEQ ID NO: 6974 - RNA, 23 nt, Artificial
  Chemically synthesized
ucaaucugcugcuguugccuagc

SEQ ID NO: 6975 - RNA, 23 nt, Artificial
  Chemically synthesized
uuggagcucugagaggguaaguu

SEQ ID NO: 6976 - RNA, 23 nt, Artificial
  Chemically synthesized
aucagccaggaaaggccuaaugg

SEQ ID NO: 6977 - RNA, 23 nt, Artificial
  Chemically synthesized
ugaagauguucguacaucauaug

SEQ ID NO: 6978 - RNA, 23 nt, Artificial
  Chemically synthesized
ucacauuguggacgcugucugcu

SEQ ID NO: 6979 - RNA, 23 nt, Artificial
  Chemically synthesized
uuccuccuuuccagggagcuugu

SEQ ID NO: 6980 - RNA, 23 nt, Artificial
  Chemically synthesized
uacacugcuuuaacugacuuauu

SEQ ID NO: 6981 - RNA, 23 nt, Artificial
  Chemically synthesized
ugggacuucuuaauggcaagagg

SEQ ID NO: 6982 - RNA, 23 nt, Artificial
  Chemically synthesized
cuagaauucuguuuuaauguugg

SEQ ID NO: 6983 - RNA, 23 nt, Artificial
  Chemically synthesized
augugugggaagugugagaaagg

SEQ ID NO: 6984 - RNA, 23 nt, Artificial
  Chemically synthesized
ucaguccuuggaggcgaaaguac

SEQ ID NO: 6985 - RNA, 23 nt, Artificial
  Chemically synthesized
uagagacguucacgcaguucacu

SEQ ID NO: 6986 - RNA, 23 nt, Artificial
  Chemically synthesized
uuuccaacauaguucggguagcu

SEQ ID NO: 6987 - RNA, 23 nt, Artificial
  Chemically synthesized
cuuuggugaugaagggaagaagg

SEQ ID NO: 6988 - RNA, 23 nt, Artificial
  Chemically synthesized
ugcagcuuuccuggaaaacagca

SEQ ID NO: 6989 - RNA, 23 nt, Artificial
  Chemically synthesized
accaacaucugcugcugauuuuc

SEQ ID NO: 6990 - RNA, 23 nt, Artificial
  Chemically synthesized
uuuggugaugaagggaagaagga

SEQ ID NO: 6991 - RNA, 23 nt, Artificial
  Chemically synthesized
aucggaggagaagaguauaugcu

SEQ ID NO: 6992 - RNA, 23 nt, Artificial
  Chemically synthesized
auaugcugaggcucucccaguug

SEQ ID NO: 6993 - RNA, 23 nt, Artificial
  Chemically synthesized
gucaauuugccauuguaagacug

SEQ ID NO: 6994 - RNA, 23 nt, Artificial
  Chemically synthesized
guucguacaucauaugaucaaag

SEQ ID NO: 6995 - RNA, 23 nt, Artificial
  Chemically synthesized
ucagcagcauucacguugacacc

SEQ ID NO: 6996 - RNA, 23 nt, Artificial
  Chemically synthesized
ugggaucuuccaccucauagaug

SEQ ID NO: 6997 - RNA, 23 nt, Artificial
  Chemically synthesized
aauccagcaggaacuucacgaug

SEQ ID NO: 6998 - RNA, 23 nt, Artificial
  Chemically synthesized
uagaauucuguuuuaauguuggc

SEQ ID NO: 6999 - RNA, 23 nt, Artificial
  Chemically synthesized
ugggagguggcacuuuaccaauc

SEQ ID NO: 7000 - RNA, 23 nt, Artificial
  Chemically synthesized
ugaggcucucccaguugucacuu

SEQ ID NO: 7001 - RNA, 23 nt, Artificial
  Chemically synthesized
acaacaucucgacagguuguuuc

SEQ ID NO: 7002 - RNA, 23 nt, Artificial
  Chemically synthesized
acuguggugaugacgugccauuc

SEQ ID NO: 7003 - RNA, 23 nt, Artificial
  Chemically synthesized
aagaguauaugcugaggcucucc

SEQ ID NO: 7004 - RNA, 23 nt, Artificial
  Chemically synthesized
uuccgguguuauaggaacuucug

SEQ ID NO: 7005 - RNA, 23 nt, Artificial
  Chemically synthesized
gaucggaggagaagaguauaugc

SEQ ID NO: 7006 - RNA, 23 nt, Artificial
  Chemically synthesized
accagaucgaacucuccuuccag

SEQ ID NO: 7007 - RNA, 23 nt, Artificial
  Chemically synthesized
caagaaaacaguuaauaucaucg

SEQ ID NO: 7008 - RNA, 23 nt, Artificial
  Chemically synthesized
aucgaacucuccuuccagagacg

SEQ ID NO: 7009 - RNA, 23 nt, Artificial
  Chemically synthesized
auggcacugaaccuuucuauuuc

SEQ ID NO: 7010 - RNA, 23 nt, Artificial
  Chemically synthesized
uaagcugaucaacccuuaaaauu

SEQ ID NO: 7011 - RNA, 23 nt, Artificial
  Chemically synthesized
agacagauugccguucaugauuu

SEQ ID NO: 7012 - RNA, 23 nt, Artificial
  Chemically synthesized
cuguuaaaaucuguucauuguug

SEQ ID NO: 7013 - RNA, 23 nt, Artificial
  Chemically synthesized
uccagguuuccauuggcauuggu

SEQ ID NO: 7014 - RNA, 23 nt, Artificial
  Chemically synthesized
uggaguauauggaacuugaauuc

SEQ ID NO: 7015 - RNA, 23 nt, Artificial
  Chemically synthesized
uggagcucugagaggguaaguuc

SEQ ID NO: 7016 - RNA, 23 nt, Artificial
  Chemically synthesized
uacaacaucucgacagguuguuu

SEQ ID NO: 7017 - RNA, 23 nt, Artificial
  Chemically synthesized
ugaugggcuacagugcugcauca

SEQ ID NO: 7018 - RNA, 23 nt, Artificial
  Chemically synthesized
ugaacuggaacaggaagcggaac

SEQ ID NO: 7019 - RNA, 23 nt, Artificial
  Chemically synthesized
ucagccuuuaggugaacuggaac

SEQ ID NO: 7020 - RNA, 23 nt, Artificial
  Chemically synthesized
uggacagugacccgugaagaaac

SEQ ID NO: 7021 - RNA, 23 nt, Artificial
  Chemically synthesized
ugcugcugaaguuuugaauuuug

SEQ ID NO: 7022 - RNA, 23 nt, Artificial
  Chemically synthesized
ugccuagcugccauaucuuggag

SEQ ID NO: 7023 - RNA, 23 nt, Artificial
  Chemically synthesized
aagccuguacguacaauucacac

SEQ ID NO: 7024 - RNA, 23 nt, Artificial
  Chemically synthesized
uccgguguuauaggaacuucugu

SEQ ID NO: 7025 - RNA, 23 nt, Artificial
  Chemically synthesized
ugcugggaucuuccaccucauag

SEQ ID NO: 7026 - RNA, 23 nt, Artificial
  Chemically synthesized
acggguuuauugugcacauuuac

SEQ ID NO: 7027 - RNA, 23 nt, Artificial
  Chemically synthesized
auaggaacuucuguuaaaaucug

SEQ ID NO: 7028 - RNA, 23 nt, Artificial
  Chemically synthesized
agaugauccucugcaccagaucg

SEQ ID NO: 7029 - RNA, 23 nt, Artificial
  Chemically synthesized
ucaaaggguaugggacguucauu

SEQ ID NO: 7030 - RNA, 23 nt, Artificial
  Chemically synthesized
aacgcuguuccuuggcaaccaac

SEQ ID NO: 7031 - RNA, 23 nt, Artificial
  Chemically synthesized
ugcuguugccuagcugccauauc

SEQ ID NO: 7032 - RNA, 23 nt, Artificial
  Chemically synthesized
ugugauggagcugcgcuuuuuca

SEQ ID NO: 7033 - RNA, 23 nt, Artificial
  Chemically synthesized
aaaggguaugggacguucauuuc

SEQ ID NO: 7034 - RNA, 23 nt, Artificial
  Chemically synthesized
gcugaaguuuugaauuuuguucc

SEQ ID NO: 7035 - RNA, 23 nt, Artificial
  Chemically synthesized
aggugaacgcuguuacaagaggc

SEQ ID NO: 7036 - RNA, 23 nt, Artificial
  Chemically synthesized
ucagcuuguucuccugggcuuca

SEQ ID NO: 7037 - RNA, 23 nt, Artificial
  Chemically synthesized
cuacagugcugcaucagugaguc

SEQ ID NO: 7038 - RNA, 23 nt, Artificial
  Chemically synthesized
uagaaacugggagcacuggaugu

SEQ ID NO: 7039 - RNA, 23 nt, Artificial
  Chemically synthesized
acggccaccuuguucacuguucu

SEQ ID NO: 7040 - RNA, 23 nt, Artificial
  Chemically synthesized
auagagacguucacgcaguucac

SEQ ID NO: 7041 - RNA, 23 nt, Artificial
  Chemically synthesized
aaaggaaguucaggcgaguguuc

SEQ ID NO: 7042 - RNA, 23 nt, Artificial
  Chemically synthesized
uucacacgguucagcugaauuuu

SEQ ID NO: 7043 - RNA, 23 nt, Artificial
  Chemically synthesized
ugccguucaugauuuugcuguag

SEQ ID NO: 7044 - RNA, 23 nt, Artificial
  Chemically synthesized
ugcugcugauuuucaaucugcug

SEQ ID NO: 7045 - RNA, 23 nt, Artificial
  Chemically synthesized
uaugcugaggcucucccaguugu

SEQ ID NO: 7046 - RNA, 23 nt, Artificial
  Chemically synthesized
agguguaggacuuggguaugucc

SEQ ID NO: 7047 - RNA, 23 nt, Artificial
  Chemically synthesized
ucugugauggagcugcgcuuuuu

SEQ ID NO: 7048 - RNA, 23 nt, Artificial
  Chemically synthesized
ugcugccggcugguaauucuuag

SEQ ID NO: 7049 - RNA, 23 nt, Artificial
  Chemically synthesized
aaucugcugcuguugccuagcug

SEQ ID NO: 7050 - RNA, 23 nt, Artificial
  Chemically synthesized
uggguaugucccauagcuuggag

SEQ ID NO: 7051 - RNA, 23 nt, Artificial
  Chemically synthesized
ggaacuucacgaugugauggugg

SEQ ID NO: 7052 - RNA, 23 nt, Artificial
  Chemically synthesized
uccauucagggaacugaauuuga

SEQ ID NO: 7053 - RNA, 23 nt, Artificial
  Chemically synthesized
auccucugcaccagaucgaacuc

SEQ ID NO: 7054 - RNA, 23 nt, Artificial
  Chemically synthesized
auucagggaacugaauuugagcu

SEQ ID NO: 7055 - RNA, 23 nt, Artificial
  Chemically synthesized
uccagguuccuugcaaaauucua

SEQ ID NO: 7056 - RNA, 23 nt, Artificial
  Chemically synthesized
gcuagaauucuguuuuaauguug

SEQ ID NO: 7057 - RNA, 23 nt, Artificial
  Chemically synthesized
cuaagcugaucaacccuuaaaau

SEQ ID NO: 7058 - RNA, 23 nt, Artificial
  Chemically synthesized
aacucauuaucauuggcaucuga

SEQ ID NO: 7059 - RNA, 23 nt, Artificial
  Chemically synthesized
caacacuggacauguuuccauac

SEQ ID NO: 7060 - RNA, 23 nt, Artificial
  Chemically synthesized
cucaccuggaaacuguaggauuc

SEQ ID NO: 7061 - RNA, 23 nt, Artificial
  Chemically synthesized
cugaaguuuugaauuuuguuccu

SEQ ID NO: 7062 - RNA, 23 nt, Artificial
  Chemically synthesized
uaggaacuucuguuaaaaucugu

SEQ ID NO: 7063 - RNA, 23 nt, Artificial
  Chemically synthesized
uaaacgcuguuccuuggcaacca

SEQ ID NO: 7064 - RNA, 23 nt, Artificial
  Chemically synthesized
ccuuucuuuaaaucuuccaauug

SEQ ID NO: 7065 - RNA, 23 nt, Artificial
  Chemically synthesized
uccucgugucgaaggaaaaauuu

SEQ ID NO: 7066 - RNA, 23 nt, Artificial
  Chemically synthesized
agggaagaaggaucauguguggg

SEQ ID NO: 7067 - RNA, 23 nt, Artificial
  Chemically synthesized
cuccauucagggaacugaauuug

SEQ ID NO: 7068 - RNA, 23 nt, Artificial
  Chemically synthesized
aagaaaacaguuaauaucaucgg

SEQ ID NO: 7069 - RNA, 23 nt, Artificial
  Chemically synthesized
uguggugaugacgugccauucac

SEQ ID NO: 7070 - RNA, 23 nt, Artificial
  Chemically synthesized
uuggugaugaagggaagaaggau

SEQ ID NO: 7071 - RNA, 23 nt, Artificial
  Chemically synthesized
ucugccauccuucaggcaccaaa

SEQ ID NO: 7072 - RNA, 23 nt, Artificial
  Chemically synthesized
cugugauggagcugcgcuuuuuc

SEQ ID NO: 7073 - RNA, 23 nt, Artificial
  Chemically synthesized
ugcacugguuucacggaagagcu

SEQ ID NO: 7074 - RNA, 23 nt, Artificial
  Chemically synthesized
uacauggaguauauggaacuuga

SEQ ID NO: 7075 - RNA, 23 nt, Artificial
  Chemically synthesized
agagacguucacgcaguucacug

SEQ ID NO: 7076 - RNA, 23 nt, Artificial
  Chemically synthesized
augggcuacagugcugcaucagu

SEQ ID NO: 7077 - RNA, 23 nt, Artificial
  Chemically synthesized
cuggauguagccuuccuccaucu

SEQ ID NO: 7078 - RNA, 23 nt, Artificial
  Chemically synthesized
ucgaaggaaaaauuucacuucuu

SEQ ID NO: 7079 - RNA, 23 nt, Artificial
  Chemically synthesized
agcagguuuuugggcacauagcc

SEQ ID NO: 7080 - RNA, 23 nt, Artificial
  Chemically synthesized
aaaggaugaguguccgauucggu

SEQ ID NO: 7081 - RNA, 23 nt, Artificial
  Chemically synthesized
ucggaggagaagaguauaugcug

SEQ ID NO: 7082 - RNA, 23 nt, Artificial
  Chemically synthesized
caaaggguaugggacguucauuu

SEQ ID NO: 7083 - RNA, 23 nt, Artificial
  Chemically synthesized
aagaccaugcggugcuccaaaag

SEQ ID NO: 7084 - RNA, 23 nt, Artificial
  Chemically synthesized
auucacacgguucagcugaauuu

SEQ ID NO: 7085 - RNA, 23 nt, Artificial
  Chemically synthesized
aaacuggagaaagggccucaccu

SEQ ID NO: 7086 - RNA, 23 nt, Artificial
  Chemically synthesized
gagaaaggaugaguguccgauuc

SEQ ID NO: 7087 - RNA, 23 nt, Artificial
  Chemically synthesized
accaaaauccagcaggaacuuca

SEQ ID NO: 7088 - RNA, 23 nt, Artificial
  Chemically synthesized
augagcagcauuugaggcaauac

SEQ ID NO: 7089 - RNA, 23 nt, Artificial
  Chemically synthesized
uugaggcaaaaauggcggcacca

SEQ ID NO: 7090 - RNA, 23 nt, Artificial
  Chemically synthesized
aaaucuuccaauugcugacuaag

SEQ ID NO: 7091 - RNA, 23 nt, Artificial
  Chemically synthesized
uaggugaacuggaacaggaagcg

SEQ ID NO: 7092 - RNA, 23 nt, Artificial
  Chemically synthesized
uccugcucaggcucuuucucagu

SEQ ID NO: 7093 - RNA, 23 nt, Artificial
  Chemically synthesized
aagcugccuuccuuccuccuuuc

SEQ ID NO: 7094 - RNA, 23 nt, Artificial
  Chemically synthesized
cugcuuuaacugacuuauuuaag

SEQ ID NO: 7095 - RNA, 23 nt, Artificial
  Chemically synthesized
guacauggaguauauggaacuug

SEQ ID NO: 7096 - RNA, 23 nt, Artificial
  Chemically synthesized
agaggcuccuuuggugaugaagg

SEQ ID NO: 7097 - RNA, 23 nt, Artificial
  Chemically synthesized
accguggccacguuguuguuauu

SEQ ID NO: 7098 - RNA, 23 nt, Artificial
  Chemically synthesized
caaaauccagcaggaacuucacg

SEQ ID NO: 7099 - RNA, 23 nt, Artificial
  Chemically synthesized
acagagcauacgccacaccuuug

SEQ ID NO: 7100 - RNA, 23 nt, Artificial
  Chemically synthesized
auggagagguugaacccgaaggu

SEQ ID NO: 7101 - RNA, 23 nt, Artificial
  Chemically synthesized
ugccggcugguaauucuuaggug

SEQ ID NO: 7102 - RNA, 23 nt, Artificial
  Chemically synthesized
guuuccaucauuagcggauuugg

SEQ ID NO: 7103 - RNA, 23 nt, Artificial
  Chemically synthesized
uggcaaccaacaucugcugcuga

SEQ ID NO: 7104 - RNA, 23 nt, Artificial
  Chemically synthesized
ucuccugggcuucaacucguucu

SEQ ID NO: 7105 - RNA, 23 nt, Artificial
  Chemically synthesized
acccauucaguuuuccuuucuuu

SEQ ID NO: 7106 - RNA, 23 nt, Artificial
  Chemically synthesized
cacgguucagcugaauuuuuuuc

SEQ ID NO: 7107 - RNA, 23 nt, Artificial
  Chemically synthesized
ugccauucacacgguucagcuga

SEQ ID NO: 7108 - RNA, 23 nt, Artificial
  Chemically synthesized
cugaagauguucguacaucauau

SEQ ID NO: 7109 - RNA, 23 nt, Artificial
  Chemically synthesized
aacauggcacugaaccuuucuau

SEQ ID NO: 7110 - RNA, 23 nt, Artificial
  Chemically synthesized
ccugggcuucaacucguucuuuc

SEQ ID NO: 7111 - RNA, 23 nt, Artificial
  Chemically synthesized
aaaggccuaauggccacugucag

SEQ ID NO: 7112 - RNA, 23 nt, Artificial
  Chemically synthesized
uucaguccuuggaggcgaaagua

SEQ ID NO: 7113 - RNA, 23 nt, Artificial
  Chemically synthesized
aacaucugcugcugauuuucaau

SEQ ID NO: 7114 - RNA, 23 nt, Artificial
  Chemically synthesized
ucccaguuaaugggcaaacugga

SEQ ID NO: 7115 - RNA, 23 nt, Artificial
  Chemically synthesized
acugggaaccuggauauaaggcc

SEQ ID NO: 7116 - RNA, 23 nt, Artificial
  Chemically synthesized
ugggccugcacaaucagccuuua

SEQ ID NO: 7117 - RNA, 23 nt, Artificial
  Chemically synthesized
agcucuuccagguuuccauuggc

SEQ ID NO: 7118 - RNA, 23 nt, Artificial
  Chemically synthesized
uccucacacuugucugcagcagu

SEQ ID NO: 7119 - RNA, 23 nt, Artificial
  Chemically synthesized
ugaacgcuguuacaagaggcagc

SEQ ID NO: 7120 - RNA, 23 nt, Artificial
  Chemically synthesized
gaaaguaccucucccaguuaaug

SEQ ID NO: 7121 - RNA, 23 nt, Artificial
  Chemically synthesized
cuguggugaugacgugccauuca

SEQ ID NO: 7122 - RNA, 23 nt, Artificial
  Chemically synthesized
gucuagucaaaaaauacuuuugg

SEQ ID NO: 7123 - RNA, 23 nt, Artificial
  Chemically synthesized
ugagcagcauuugaggcaauacu

SEQ ID NO: 7124 - RNA, 23 nt, Artificial
  Chemically synthesized
gagaggguaaguucaacacgugg

SEQ ID NO: 7125 - RNA, 23 nt, Artificial
  Chemically synthesized
aauagagccuaagggccuguauu

SEQ ID NO: 7126 - RNA, 23 nt, Artificial
  Chemically synthesized
aaggacagcucgucacuguucug

SEQ ID NO: 7127 - RNA, 23 nt, Artificial
  Chemically synthesized
acacuggacauguuuccauacag

SEQ ID NO: 7128 - RNA, 23 nt, Artificial
  Chemically synthesized
guccauccaucacuaucagcagc

SEQ ID NO: 7129 - RNA, 23 nt, Artificial
  Chemically synthesized
caagcugccuuccuuccuccuuu

SEQ ID NO: 7130 - RNA, 23 nt, Artificial
  Chemically synthesized
agaaaacaguuaauaucaucggc

SEQ ID NO: 7131 - RNA, 23 nt, Artificial
  Chemically synthesized
cugagaggguaaguucaacacgu

SEQ ID NO: 7132 - RNA, 23 nt, Artificial
  Chemically synthesized
acacgguucagcugaauuuuuuu

SEQ ID NO: 7133 - RNA, 23 nt, Artificial
  Chemically synthesized
auggaguauauggaacuugaauu

SEQ ID NO: 7134 - RNA, 23 nt, Artificial
  Chemically synthesized
gaagguaacucauuaucauuggc

SEQ ID NO: 7135 - RNA, 23 nt, Artificial
  Chemically synthesized
ucugcugcugaaguuuugaauuu

SEQ ID NO: 7136 - RNA, 23 nt, Artificial
  Chemically synthesized
cuggucccgucaauuugccauug

SEQ ID NO: 7137 - RNA, 23 nt, Artificial
  Chemically synthesized
agcugaauuuuuuucccauagag

SEQ ID NO: 7138 - RNA, 23 nt, Artificial
  Chemically synthesized
uguggacgcugucugcuaaagug

SEQ ID NO: 7139 - RNA, 23 nt, Artificial
  Chemically synthesized
acagcacaauaaucucuuaagug

SEQ ID NO: 7140 - RNA, 23 nt, Artificial
  Chemically synthesized
aggaacuucacgaugugauggug

SEQ ID NO: 7141 - RNA, 23 nt, Artificial
  Chemically synthesized
aauucacaccucagugaagcgcc

SEQ ID NO: 7142 - RNA, 23 nt, Artificial
  Chemically synthesized
aggacuuggguaugucccauagc

SEQ ID NO: 7143 - RNA, 23 nt, Artificial
  Chemically synthesized
agcuuguucuccugggcuucaac

SEQ ID NO: 7144 - RNA, 23 nt, Artificial
  Chemically synthesized
gggaagguaacucauuaucauug

SEQ ID NO: 7145 - RNA, 23 nt, Artificial
  Chemically synthesized
guaaacgcuguuccuuggcaacc

SEQ ID NO: 7146 - RNA, 23 nt, Artificial
  Chemically synthesized
augggagguggcacuuuaccaau

SEQ ID NO: 7147 - RNA, 23 nt, Artificial
  Chemically synthesized
uggacgcugucugcuaaagugag

SEQ ID NO: 7148 - RNA, 23 nt, Artificial
  Chemically synthesized
guuccuucugcugcugaaguuuu

SEQ ID NO: 7149 - RNA, 23 nt, Artificial
  Chemically synthesized
acauggcacugaaccuuucuauu

SEQ ID NO: 7150 - RNA, 23 nt, Artificial
  Chemically synthesized
uucagggaacugaauuugagcuu

SEQ ID NO: 7151 - RNA, 23 nt, Artificial
  Chemically synthesized
agaaggaucaugugugggaagug

SEQ ID NO: 7152 - RNA, 23 nt, Artificial
  Chemically synthesized
cuccagguuccuugcaaaauucu

SEQ ID NO: 7153 - RNA, 23 nt, Artificial
  Chemically synthesized
aaucagccuuuaggugaacugga

SEQ ID NO: 7154 - RNA, 23 nt, Artificial
  Chemically synthesized
cauggcacugaaccuuucuauuu

SEQ ID NO: 7155 - RNA, 23 nt, Artificial
  Chemically synthesized
aggaaaggccuaauggccacugu

SEQ ID NO: 7156 - RNA, 23 nt, Artificial
  Chemically synthesized
uaagacuggaacccauucaguuu

SEQ ID NO: 7157 - RNA, 23 nt, Artificial
  Chemically synthesized
agcggauuuggaucuuccaugag

SEQ ID NO: 7158 - RNA, 23 nt, Artificial
  Chemically synthesized
uuccuggaaaacagcacaauaau

SEQ ID NO: 7159 - RNA, 23 nt, Artificial
  Chemically synthesized
ugacgugccauucacacgguuca

SEQ ID NO: 7160 - RNA, 23 nt, Artificial
  Chemically synthesized
ucugaagauguucguacaucaua

SEQ ID NO: 7161 - RNA, 23 nt, Artificial
  Chemically synthesized
agacggguuuauugugcacauuu

SEQ ID NO: 7162 - RNA, 23 nt, Artificial
  Chemically synthesized
acaaucagccuuuaggugaacug

SEQ ID NO: 7163 - RNA, 23 nt, Artificial
  Chemically synthesized
uagagccuaagggccuguauuuu

SEQ ID NO: 7164 - RNA, 23 nt, Artificial
  Chemically synthesized
ugagaggguaaguucaacacgug

SEQ ID NO: 7165 - RNA, 23 nt, Artificial
  Chemically synthesized
agauguucguacaucauaugauc

SEQ ID NO: 7166 - RNA, 23 nt, Artificial
  Chemically synthesized
aagauguucguacaucauaugau

SEQ ID NO: 7167 - RNA, 23 nt, Artificial
  Chemically synthesized
aagacuggaacccauucaguuuu

SEQ ID NO: 7168 - RNA, 23 nt, Artificial
  Chemically synthesized
guucuuucaauuucugaagcuuu

SEQ ID NO: 7169 - RNA, 23 nt, Artificial
  Chemically synthesized
gaucaaaggguaugggacguuca

SEQ ID NO: 7170 - RNA, 23 nt, Artificial
  Chemically synthesized
guggugaugacgugccauucaca

SEQ ID NO: 7171 - RNA, 23 nt, Artificial
  Chemically synthesized
gccaauuacuauaaauccaaaua

SEQ ID NO: 7172 - RNA, 23 nt, Artificial
  Chemically synthesized
ugccaauuacuauaaauccaaau

SEQ ID NO: 7173 - RNA, 23 nt, Artificial
  Chemically synthesized
uugccaauuacuauaaauccaaa

SEQ ID NO: 7174 - RNA, 23 nt, Artificial
  Chemically synthesized
uuugccaauuacuauaaauccaa

SEQ ID NO: 7175 - RNA, 23 nt, Artificial
  Chemically synthesized
uuuugccaauuacuauaaaucca

SEQ ID NO: 7176 - RNA, 23 nt, Artificial
  Chemically synthesized
cggcagaggacaauaacaacaac

SEQ ID NO: 7177 - RNA, 23 nt, Artificial
  Chemically synthesized
ccggcagaggacaauaacaacaa

SEQ ID NO: 7178 - RNA, 23 nt, Artificial
  Chemically synthesized
gccggcagaggacaauaacaaca

SEQ ID NO: 7179 - RNA, 23 nt, Artificial
  Chemically synthesized
agccggcagaggacaauaacaac

SEQ ID NO: 7180 - RNA, 23 nt, Artificial
  Chemically synthesized
gagccggcagaggacaauaacaa

SEQ ID NO: 7181 - RNA, 23 nt, Artificial
  Chemically synthesized
agaggacaauaacaacaacgugg

SEQ ID NO: 7182 - RNA, 23 nt, Artificial
  Chemically synthesized
cagaggacaauaacaacaacgug

SEQ ID NO: 7183 - RNA, 23 nt, Artificial
  Chemically synthesized
gcagaggacaauaacaacaacgu

SEQ ID NO: 7184 - RNA, 23 nt, Artificial
  Chemically synthesized
ggcagaggacaauaacaacaacg

SEQ ID NO: 7185 - RNA, 23 nt, Artificial
  Chemically synthesized
ggacaauaacaacaacguggcca

SEQ ID NO: 7186 - RNA, 23 nt, Artificial
  Chemically synthesized
aggacaauaacaacaacguggcc

SEQ ID NO: 7187 - RNA, 23 nt, Artificial
  Chemically synthesized
gaggacaauaacaacaacguggc

SEQ ID NO: 7188 - RNA, 23 nt, Artificial
  Chemically synthesized
ggagaaaaacguacugaaaaugg

SEQ ID NO: 7189 - RNA, 23 nt, Artificial
  Chemically synthesized
uggagaaaaacguacugaaaaug

SEQ ID NO: 7190 - RNA, 23 nt, Artificial
  Chemically synthesized
cuggagaaaaacguacugaaaau

SEQ ID NO: 7191 - RNA, 23 nt, Artificial
  Chemically synthesized
ccuggagaaaaacguacugaaaa

SEQ ID NO: 7192 - RNA, 23 nt, Artificial
  Chemically synthesized
accuggagaaaaacguacugaaa

SEQ ID NO: 7193 - RNA, 23 nt, Artificial
  Chemically synthesized
ggaaaaaaauucagcugaaccgu

SEQ ID NO: 7194 - RNA, 23 nt, Artificial
  Chemically synthesized
gggaaaaaaauucagcugaaccg

SEQ ID NO: 7195 - RNA, 23 nt, Artificial
  Chemically synthesized
ugggaaaaaaauucagcugaacc

SEQ ID NO: 7196 - RNA, 23 nt, Artificial
  Chemically synthesized
augggaaaaaaauucagcugaac

SEQ ID NO: 7197 - RNA, 23 nt, Artificial
  Chemically synthesized
uaugggaaaaaaauucagcugaa

SEQ ID NO: 7198 - RNA, 23 nt, Artificial
  Chemically synthesized
gcaaaaucaugaacggcaaucug

SEQ ID NO: 7199 - RNA, 23 nt, Artificial
  Chemically synthesized
agcaaaaucaugaacggcaaucu

SEQ ID NO: 7200 - RNA, 23 nt, Artificial
  Chemically synthesized
cagcaaaaucaugaacggcaauc

SEQ ID NO: 7201 - RNA, 23 nt, Artificial
  Chemically synthesized
acagcaaaaucaugaacggcaau

SEQ ID NO: 7202 - RNA, 23 nt, Artificial
  Chemically synthesized
uacagcaaaaucaugaacggcaa

SEQ ID NO: 7203 - RNA, 23 nt, Artificial
  Chemically synthesized
ccaggaacaaaauucaaaacuuc

SEQ ID NO: 7204 - RNA, 23 nt, Artificial
  Chemically synthesized
accaggaacaaaauucaaaacuu

SEQ ID NO: 7205 - RNA, 23 nt, Artificial
  Chemically synthesized
aaccaggaacaaaauucaaaacu

SEQ ID NO: 7206 - RNA, 23 nt, Artificial
  Chemically synthesized
uaaccaggaacaaaauucaaaac

SEQ ID NO: 7207 - RNA, 23 nt, Artificial
  Chemically synthesized
uuaaccaggaacaaaauucaaaa

SEQ ID NO: 7208 - RNA, 23 nt, Artificial
  Chemically synthesized
cgggcaucgagauugguaaagug

SEQ ID NO: 7209 - RNA, 23 nt, Artificial
  Chemically synthesized
ccgggcaucgagauugguaaagu

SEQ ID NO: 7210 - RNA, 23 nt, Artificial
  Chemically synthesized
gccgggcaucgagauugguaaag

SEQ ID NO: 7211 - RNA, 23 nt, Artificial
  Chemically synthesized
agccgggcaucgagauugguaaa

SEQ ID NO: 7212 - RNA, 23 nt, Artificial
  Chemically synthesized
aagccgggcaucgagauugguaa

SEQ ID NO: 7213 - RNA, 23 nt, Artificial
  Chemically synthesized
ggcugagaguccgguuuaacccc

SEQ ID NO: 7214 - RNA, 23 nt, Artificial
  Chemically synthesized
gggcugagaguccgguuuaaccc

SEQ ID NO: 7215 - RNA, 23 nt, Artificial
  Chemically synthesized
cgggcugagaguccgguuuaacc

SEQ ID NO: 7216 - RNA, 23 nt, Artificial
  Chemically synthesized
acgggcugagaguccgguuuaac

SEQ ID NO: 7217 - RNA, 23 nt, Artificial
  Chemically synthesized
cacgggcugagaguccgguuuaa

SEQ ID NO: 7218 - RNA, 23 nt, Artificial
  Chemically synthesized
aaauguaccuggagaaaaacgua

SEQ ID NO: 7219 - RNA, 23 nt, Artificial
  Chemically synthesized
uaaauguaccuggagaaaaacgu

SEQ ID NO: 7220 - RNA, 23 nt, Artificial
  Chemically synthesized
auaaauguaccuggagaaaaacg

SEQ ID NO: 7221 - RNA, 23 nt, Artificial
  Chemically synthesized
aauaaauguaccuggagaaaaac

SEQ ID NO: 7222 - RNA, 23 nt, Artificial
  Chemically synthesized
uaauaaauguaccuggagaaaaa

SEQ ID NO: 7223 - RNA, 23 nt, Artificial
  Chemically synthesized
gaaacuggccaacauuaaaacag

SEQ ID NO: 7224 - RNA, 23 nt, Artificial
  Chemically synthesized
ggaaacuggccaacauuaaaaca

SEQ ID NO: 7225 - RNA, 23 nt, Artificial
  Chemically synthesized
uggaaacuggccaacauuaaaac

SEQ ID NO: 7226 - RNA, 23 nt, Artificial
  Chemically synthesized
auggaaacuggccaacauuaaaa

SEQ ID NO: 7227 - RNA, 23 nt, Artificial
  Chemically synthesized
gauggaaacuggccaacauuaaa

SEQ ID NO: 7228 - RNA, 23 nt, Artificial
  Chemically synthesized
cgaugaugccgaugauauuaacu

SEQ ID NO: 7229 - RNA, 23 nt, Artificial
  Chemically synthesized
gcgaugaugccgaugauauuaac

SEQ ID NO: 7230 - RNA, 23 nt, Artificial
  Chemically synthesized
cgcgaugaugccgaugauauuaa

SEQ ID NO: 7231 - RNA, 23 nt, Artificial
  Chemically synthesized
ccgcgaugaugccgaugauauua

SEQ ID NO: 7232 - RNA, 23 nt, Artificial
  Chemically synthesized
cccgcgaugaugccgaugauauu

SEQ ID NO: 7233 - RNA, 23 nt, Artificial
  Chemically synthesized
ggccaacauuaaaacagaauucu

SEQ ID NO: 7234 - RNA, 23 nt, Artificial
  Chemically synthesized
uggccaacauuaaaacagaauuc

SEQ ID NO: 7235 - RNA, 23 nt, Artificial
  Chemically synthesized
cuggccaacauuaaaacagaauu

SEQ ID NO: 7236 - RNA, 23 nt, Artificial
  Chemically synthesized
acuggccaacauuaaaacagaau

SEQ ID NO: 7237 - RNA, 23 nt, Artificial
  Chemically synthesized
aacuggccaacauuaaaacagaa

SEQ ID NO: 7238 - RNA, 23 nt, Artificial
  Chemically synthesized
guacgaacaucuucagaaauggg

SEQ ID NO: 7239 - RNA, 23 nt, Artificial
  Chemically synthesized
uguacgaacaucuucagaaaugg

SEQ ID NO: 7240 - RNA, 23 nt, Artificial
  Chemically synthesized
auguacgaacaucuucagaaaug

SEQ ID NO: 7241 - RNA, 23 nt, Artificial
  Chemically synthesized
gauguacgaacaucuucagaaau

SEQ ID NO: 7242 - RNA, 23 nt, Artificial
  Chemically synthesized
ugauguacgaacaucuucagaaa

SEQ ID NO: 7243 - RNA, 23 nt, Artificial
  Chemically synthesized
gcuagaaaauggucuuaauggug

SEQ ID NO: 7244 - RNA, 23 nt, Artificial
  Chemically synthesized
agcuagaaaauggucuuaauggu

SEQ ID NO: 7245 - RNA, 23 nt, Artificial
  Chemically synthesized
cagcuagaaaauggucuuaaugg

SEQ ID NO: 7246 - RNA, 23 nt, Artificial
  Chemically synthesized
gcagcuagaaaauggucuuaaug

SEQ ID NO: 7247 - RNA, 23 nt, Artificial
  Chemically synthesized
ugcagcuagaaaauggucuuaau

SEQ ID NO: 7248 - RNA, 23 nt, Artificial
  Chemically synthesized
cgaacucagagaaauguaauaaa

SEQ ID NO: 7249 - RNA, 23 nt, Artificial
  Chemically synthesized
acgaacucagagaaauguaauaa

SEQ ID NO: 7250 - RNA, 23 nt, Artificial
  Chemically synthesized
aacgaacucagagaaauguaaua

SEQ ID NO: 7251 - RNA, 23 nt, Artificial
  Chemically synthesized
caacgaacucagagaaauguaau

SEQ ID NO: 7252 - RNA, 23 nt, Artificial
  Chemically synthesized
gcaacgaacucagagaaauguaa

SEQ ID NO: 7253 - RNA, 23 nt, Artificial
  Chemically synthesized
gggagagccucagcauauacucu

SEQ ID NO: 7254 - RNA, 23 nt, Artificial
  Chemically synthesized
ugggagagccucagcauauacuc

SEQ ID NO: 7255 - RNA, 23 nt, Artificial
  Chemically synthesized
cugggagagccucagcauauacu

SEQ ID NO: 7256 - RNA, 23 nt, Artificial
  Chemically synthesized
acugggagagccucagcauauac

SEQ ID NO: 7257 - RNA, 23 nt, Artificial
  Chemically synthesized
aacugggagagccucagcauaua

SEQ ID NO: 7258 - RNA, 23 nt, Artificial
  Chemically synthesized
gcagcagucuauuucugaaaaug

SEQ ID NO: 7259 - RNA, 23 nt, Artificial
  Chemically synthesized
agcagcagucuauuucugaaaau

SEQ ID NO: 7260 - RNA, 23 nt, Artificial
  Chemically synthesized
cagcagcagucuauuucugaaaa

SEQ ID NO: 7261 - RNA, 23 nt, Artificial
  Chemically synthesized
ucagcagcagucuauuucugaaa

SEQ ID NO: 7262 - RNA, 23 nt, Artificial
  Chemically synthesized
gucagcagcagucuauuucugaa

SEQ ID NO: 7263 - RNA, 23 nt, Artificial
  Chemically synthesized
caaucugucugcugaaauagaaa

SEQ ID NO: 7264 - RNA, 23 nt, Artificial
  Chemically synthesized
gcaaucugucugcugaaauagaa

SEQ ID NO: 7265 - RNA, 23 nt, Artificial
  Chemically synthesized
ggcaaucugucugcugaaauaga

SEQ ID NO: 7266 - RNA, 23 nt, Artificial
  Chemically synthesized
cggcaaucugucugcugaaauag

SEQ ID NO: 7267 - RNA, 23 nt, Artificial
  Chemically synthesized
acggcaaucugucugcugaaaua

SEQ ID NO: 7268 - RNA, 23 nt, Artificial
  Chemically synthesized
ugauggaaacuggccaacauuaa

SEQ ID NO: 7269 - RNA, 23 nt, Artificial
  Chemically synthesized
gggcaucgagauugguaaagugc

SEQ ID NO: 7270 - RNA, 23 nt, Artificial
  Chemically synthesized
aacggcaaucugucugcugaaau

SEQ ID NO: 7271 - RNA, 23 nt, Artificial
  Chemically synthesized
gaacggcaaucugucugcugaaa

SEQ ID NO: 7272 - RNA, 23 nt, Artificial
  Chemically synthesized
ugaacggcaaucugucugcugaa

SEQ ID NO: 7273 - RNA, 23 nt, Artificial
  Chemically synthesized
caggaaagcugcagcuagaaaau

SEQ ID NO: 7274 - RNA, 23 nt, Artificial
  Chemically synthesized
ccaggaaagcugcagcuagaaaa

SEQ ID NO: 7275 - RNA, 23 nt, Artificial
  Chemically synthesized
uccaggaaagcugcagcuagaaa

SEQ ID NO: 7276 - RNA, 23 nt, Artificial
  Chemically synthesized
uuccaggaaagcugcagcuagaa

SEQ ID NO: 7277 - RNA, 23 nt, Artificial
  Chemically synthesized
uuuccaggaaagcugcagcuaga

SEQ ID NO: 7278 - RNA, 23 nt, Artificial
  Chemically synthesized
gugccauguuccaggaaaagaag

SEQ ID NO: 7279 - RNA, 23 nt, Artificial
  Chemically synthesized
agugccauguuccaggaaaagaa

SEQ ID NO: 7280 - RNA, 23 nt, Artificial
  Chemically synthesized
cagugccauguuccaggaaaaga

SEQ ID NO: 7281 - RNA, 23 nt, Artificial
  Chemically synthesized
ucagugccauguuccaggaaaag

SEQ ID NO: 7282 - RNA, 23 nt, Artificial
  Chemically synthesized
uucagugccauguuccaggaaaa

SEQ ID NO: 7283 - RNA, 23 nt, Artificial
  Chemically synthesized
gaaaauucgugcaaugagaggac

SEQ ID NO: 7284 - RNA, 23 nt, Artificial
  Chemically synthesized
agaaaauucgugcaaugagagga

SEQ ID NO: 7285 - RNA, 23 nt, Artificial
  Chemically synthesized
aagaaaauucgugcaaugagagg

SEQ ID NO: 7286 - RNA, 23 nt, Artificial
  Chemically synthesized
gaagaaaauucgugcaaugagag

SEQ ID NO: 7287 - RNA, 23 nt, Artificial
  Chemically synthesized
ugaagaaaauucgugcaaugaga

SEQ ID NO: 7288 - RNA, 23 nt, Artificial
  Chemically synthesized
cauaguguggugaagaaaaguga

SEQ ID NO: 7289 - RNA, 23 nt, Artificial
  Chemically synthesized
acauaguguggugaagaaaagug

SEQ ID NO: 7290 - RNA, 23 nt, Artificial
  Chemically synthesized
uacauaguguggugaagaaaagu

SEQ ID NO: 7291 - RNA, 23 nt, Artificial
  Chemically synthesized
guacauaguguggugaagaaaag

SEQ ID NO: 7292 - RNA, 23 nt, Artificial
  Chemically synthesized
uguacauaguguggugaagaaaa

SEQ ID NO: 7293 - RNA, 23 nt, Artificial
  Chemically synthesized
ccaugauggacaagcgaaucagu

SEQ ID NO: 7294 - RNA, 23 nt, Artificial
  Chemically synthesized
gccaugauggacaagcgaaucag

SEQ ID NO: 7295 - RNA, 23 nt, Artificial
  Chemically synthesized
ggccaugauggacaagcgaauca

SEQ ID NO: 7296 - RNA, 23 nt, Artificial
  Chemically synthesized
uggccaugauggacaagcgaauc

SEQ ID NO: 7297 - RNA, 23 nt, Artificial
  Chemically synthesized
guggccaugauggacaagcgaau

SEQ ID NO: 7298 - RNA, 23 nt, Artificial
  Chemically synthesized
ccaacuugaagaagcccaacucg

SEQ ID NO: 7299 - RNA, 23 nt, Artificial
  Chemically synthesized
accaacuugaagaagcccaacuc

SEQ ID NO: 7300 - RNA, 23 nt, Artificial
  Chemically synthesized
gaccaacuugaagaagcccaacu

SEQ ID NO: 7301 - RNA, 23 nt, Artificial
  Chemically synthesized
ggaccaacuugaagaagcccaac

SEQ ID NO: 7302 - RNA, 23 nt, Artificial
  Chemically synthesized
cggaccaacuugaagaagcccaa

SEQ ID NO: 7303 - RNA, 23 nt, Artificial
  Chemically synthesized
gcggcgguggaguuaaaaagacu

SEQ ID NO: 7304 - RNA, 23 nt, Artificial
  Chemically synthesized
agcggcgguggaguuaaaaagac

SEQ ID NO: 7305 - RNA, 23 nt, Artificial
  Chemically synthesized
cagcggcgguggaguuaaaaaga

SEQ ID NO: 7306 - RNA, 23 nt, Artificial
  Chemically synthesized
ccagcggcgguggaguuaaaaag

SEQ ID NO: 7307 - RNA, 23 nt, Artificial
  Chemically synthesized
accagcggcgguggaguuaaaaa

SEQ ID NO: 7308 - RNA, 23 nt, Artificial
  Chemically synthesized
cguacaggcuuuuuauauaccaa

SEQ ID NO: 7309 - RNA, 23 nt, Artificial
  Chemically synthesized
acguacaggcuuuuuauauacca

SEQ ID NO: 7310 - RNA, 23 nt, Artificial
  Chemically synthesized
uacguacaggcuuuuuauauacc

SEQ ID NO: 7311 - RNA, 23 nt, Artificial
  Chemically synthesized
guacguacaggcuuuuuauauac

SEQ ID NO: 7312 - RNA, 23 nt, Artificial
  Chemically synthesized
uguacguacaggcuuuuuauaua

SEQ ID NO: 7313 - RNA, 23 nt, Artificial
  Chemically synthesized
gcaacagcagcagauugaaaauc

SEQ ID NO: 7314 - RNA, 23 nt, Artificial
  Chemically synthesized
ggcaacagcagcagauugaaaau

SEQ ID NO: 7315 - RNA, 23 nt, Artificial
  Chemically synthesized
aggcaacagcagcagauugaaaa

SEQ ID NO: 7316 - RNA, 23 nt, Artificial
  Chemically synthesized
uaggcaacagcagcagauugaaa

SEQ ID NO: 7317 - RNA, 23 nt, Artificial
  Chemically synthesized
cuaggcaacagcagcagauugaa

SEQ ID NO: 7318 - RNA, 23 nt, Artificial
  Chemically synthesized
agcugggugugaugaacaaaggu

SEQ ID NO: 7319 - RNA, 23 nt, Artificial
  Chemically synthesized
aagcugggugugaugaacaaagg

SEQ ID NO: 7320 - RNA, 23 nt, Artificial
  Chemically synthesized
aaagcugggugugaugaacaaag

SEQ ID NO: 7321 - RNA, 23 nt, Artificial
  Chemically synthesized
aaaagcugggugugaugaacaaa

SEQ ID NO: 7322 - RNA, 23 nt, Artificial
  Chemically synthesized
gaaaagcugggugugaugaacaa

SEQ ID NO: 7323 - RNA, 23 nt, Artificial
  Chemically synthesized
cacggagggaagaagugaaauuu

SEQ ID NO: 7324 - RNA, 23 nt, Artificial
  Chemically synthesized
ccacggagggaagaagugaaauu

SEQ ID NO: 7325 - RNA, 23 nt, Artificial
  Chemically synthesized
uccacggagggaagaagugaaau

SEQ ID NO: 7326 - RNA, 23 nt, Artificial
  Chemically synthesized
guccacggagggaagaagugaaa

SEQ ID NO: 7327 - RNA, 23 nt, Artificial
  Chemically synthesized
gguccacggagggaagaagugaa

SEQ ID NO: 7328 - RNA, 23 nt, Artificial
  Chemically synthesized
cagcguuuacauuuucuaaagca

SEQ ID NO: 7329 - RNA, 23 nt, Artificial
  Chemically synthesized
acagcguuuacauuuucuaaagc

SEQ ID NO: 7330 - RNA, 23 nt, Artificial
  Chemically synthesized
aacagcguuuacauuuucuaaag

SEQ ID NO: 7331 - RNA, 23 nt, Artificial
  Chemically synthesized
gaacagcguuuacauuuucuaaa

SEQ ID NO: 7332 - RNA, 23 nt, Artificial
  Chemically synthesized
ggaacagcguuuacauuuucuaa

SEQ ID NO: 7333 - RNA, 23 nt, Artificial
  Chemically synthesized
gcagcagaaggaacucuuaaaua

SEQ ID NO: 7334 - RNA, 23 nt, Artificial
  Chemically synthesized
agcagcagaaggaacucuuaaau

SEQ ID NO: 7335 - RNA, 23 nt, Artificial
  Chemically synthesized
cagcagcagaaggaacucuuaaa

SEQ ID NO: 7336 - RNA, 23 nt, Artificial
  Chemically synthesized
ucagcagcagaaggaacucuuaa

SEQ ID NO: 7337 - RNA, 23 nt, Artificial
  Chemically synthesized
uucagcagcagaaggaacucuua

SEQ ID NO: 7338 - RNA, 23 nt, Artificial
  Chemically synthesized
cugucugcugaaauagaaagguu

SEQ ID NO: 7339 - RNA, 23 nt, Artificial
  Chemically synthesized
ucugucugcugaaauagaaaggu

SEQ ID NO: 7340 - RNA, 23 nt, Artificial
  Chemically synthesized
aucugucugcugaaauagaaagg

SEQ ID NO: 7341 - RNA, 23 nt, Artificial
  Chemically synthesized
aaucugucugcugaaauagaaag

SEQ ID NO: 7342 - RNA, 23 nt, Artificial
  Chemically synthesized
agaacaagcugaagaaaauucgu

SEQ ID NO: 7343 - RNA, 23 nt, Artificial
  Chemically synthesized
gagaacaagcugaagaaaauucg

SEQ ID NO: 7344 - RNA, 23 nt, Artificial
  Chemically synthesized
ggagaacaagcugaagaaaauuc

SEQ ID NO: 7345 - RNA, 23 nt, Artificial
  Chemically synthesized
aggagaacaagcugaagaaaauu

SEQ ID NO: 7346 - RNA, 23 nt, Artificial
  Chemically synthesized
caggagaacaagcugaagaaaau

SEQ ID NO: 7347 - RNA, 23 nt, Artificial
  Chemically synthesized
gagaaaaacguacugaaaauggg

SEQ ID NO: 7348 - RNA, 23 nt, Artificial
  Chemically synthesized
caggaaguacagacugcaauuuu

SEQ ID NO: 7349 - RNA, 23 nt, Artificial
  Chemically synthesized
gcaggaaguacagacugcaauuu

SEQ ID NO: 7350 - RNA, 23 nt, Artificial
  Chemically synthesized
agcaggaaguacagacugcaauu

SEQ ID NO: 7351 - RNA, 23 nt, Artificial
  Chemically synthesized
aagcaggaaguacagacugcaau

SEQ ID NO: 7352 - RNA, 23 nt, Artificial
  Chemically synthesized
gaagcaggaaguacagacugcaa

SEQ ID NO: 7353 - RNA, 23 nt, Artificial
  Chemically synthesized
cacacagcgccuuaaauaaguca

SEQ ID NO: 7354 - RNA, 23 nt, Artificial
  Chemically synthesized
gcacacagcgccuuaaauaaguc

SEQ ID NO: 7355 - RNA, 23 nt, Artificial
  Chemically synthesized
agcacacagcgccuuaaauaagu

SEQ ID NO: 7356 - RNA, 23 nt, Artificial
  Chemically synthesized
cagcacacagcgccuuaaauaag

SEQ ID NO: 7357 - RNA, 23 nt, Artificial
  Chemically synthesized
gcagcacacagcgccuuaaauaa

SEQ ID NO: 7358 - RNA, 23 nt, Artificial
  Chemically synthesized
ccauguuccaggaaaagaagcag

SEQ ID NO: 7359 - RNA, 23 nt, Artificial
  Chemically synthesized
gccauguuccaggaaaagaagca

SEQ ID NO: 7360 - RNA, 23 nt, Artificial
  Chemically synthesized
ugccauguuccaggaaaagaagc

SEQ ID NO: 7361 - RNA, 23 nt, Artificial
  Chemically synthesized
caagucgacuacagcaaaaucau

SEQ ID NO: 7362 - RNA, 23 nt, Artificial
  Chemically synthesized
acaagucgacuacagcaaaauca

SEQ ID NO: 7363 - RNA, 23 nt, Artificial
  Chemically synthesized
gacaagucgacuacagcaaaauc

SEQ ID NO: 7364 - RNA, 23 nt, Artificial
  Chemically synthesized
ggacaagucgacuacagcaaaau

SEQ ID NO: 7365 - RNA, 23 nt, Artificial
  Chemically synthesized
aggacaagucgacuacagcaaaa

SEQ ID NO: 7366 - RNA, 23 nt, Artificial
  Chemically synthesized
caaugagaggacaagucgacuac

SEQ ID NO: 7367 - RNA, 23 nt, Artificial
  Chemically synthesized
gcaaugagaggacaagucgacua

SEQ ID NO: 7368 - RNA, 23 nt, Artificial
  Chemically synthesized
ugcaaugagaggacaagucgacu

SEQ ID NO: 7369 - RNA, 23 nt, Artificial
  Chemically synthesized
gugcaaugagaggacaagucgac

SEQ ID NO: 7370 - RNA, 23 nt, Artificial
  Chemically synthesized
cgugcaaugagaggacaagucga

SEQ ID NO: 7371 - RNA, 23 nt, Artificial
  Chemically synthesized
ggacaagcgaaucagugaacugc

SEQ ID NO: 7372 - RNA, 23 nt, Artificial
  Chemically synthesized
uggacaagcgaaucagugaacug

SEQ ID NO: 7373 - RNA, 23 nt, Artificial
  Chemically synthesized
auggacaagcgaaucagugaacu

SEQ ID NO: 7374 - RNA, 23 nt, Artificial
  Chemically synthesized
gauggacaagcgaaucagugaac

SEQ ID NO: 7375 - RNA, 23 nt, Artificial
  Chemically synthesized
ugauggacaagcgaaucagugaa

SEQ ID NO: 7376 - RNA, 23 nt, Artificial
  Chemically synthesized
cugucgagauguuguagaauuuu

SEQ ID NO: 7377 - RNA, 23 nt, Artificial
  Chemically synthesized
ccugucgagauguuguagaauuu

SEQ ID NO: 7378 - RNA, 23 nt, Artificial
  Chemically synthesized
accugucgagauguuguagaauu

SEQ ID NO: 7379 - RNA, 23 nt, Artificial
  Chemically synthesized
aaccugucgagauguuguagaau

SEQ ID NO: 7380 - RNA, 23 nt, Artificial
  Chemically synthesized
caaccugucgagauguuguagaa

SEQ ID NO: 7381 - RNA, 23 nt, Artificial
  Chemically synthesized
gguugccagugaagacagaagcu

SEQ ID NO: 7382 - RNA, 23 nt, Artificial
  Chemically synthesized
ugguugccagugaagacagaagc

SEQ ID NO: 7383 - RNA, 23 nt, Artificial
  Chemically synthesized
uugguugccagugaagacagaag

SEQ ID NO: 7384 - RNA, 23 nt, Artificial
  Chemically synthesized
guugguugccagugaagacagaa

SEQ ID NO: 7385 - RNA, 23 nt, Artificial
  Chemically synthesized
gguugguugccagugaagacaga

SEQ ID NO: 7386 - RNA, 23 nt, Artificial
  Chemically synthesized
cgugaaugcugcugauagugaug

SEQ ID NO: 7387 - RNA, 23 nt, Artificial
  Chemically synthesized
acgugaaugcugcugauagugau

SEQ ID NO: 7388 - RNA, 23 nt, Artificial
  Chemically synthesized
aacgugaaugcugcugauaguga

SEQ ID NO: 7389 - RNA, 23 nt, Artificial
  Chemically synthesized
caacgugaaugcugcugauagug

SEQ ID NO: 7390 - RNA, 23 nt, Artificial
  Chemically synthesized
ucaacgugaaugcugcugauagu

SEQ ID NO: 7391 - RNA, 23 nt, Artificial
  Chemically synthesized
uguaauaaauguaccuggagaaa

SEQ ID NO: 7392 - RNA, 23 nt, Artificial
  Chemically synthesized
auguaauaaauguaccuggagaa

SEQ ID NO: 7393 - RNA, 23 nt, Artificial
  Chemically synthesized
aauguaauaaauguaccuggaga

SEQ ID NO: 7394 - RNA, 23 nt, Artificial
  Chemically synthesized
aaauguaauaaauguaccuggag

SEQ ID NO: 7395 - RNA, 23 nt, Artificial
  Chemically synthesized
gaaauguaauaaauguaccugga

SEQ ID NO: 7396 - RNA, 23 nt, Artificial
  Chemically synthesized
uaccuggagaaaaacguacugaa

SEQ ID NO: 7397 - RNA, 23 nt, Artificial
  Chemically synthesized
ccaggaaaagaagcaggaaguac

SEQ ID NO: 7398 - RNA, 23 nt, Artificial
  Chemically synthesized
uccaggaaaagaagcaggaagua

SEQ ID NO: 7399 - RNA, 23 nt, Artificial
  Chemically synthesized
uuccaggaaaagaagcaggaagu

SEQ ID NO: 7400 - RNA, 23 nt, Artificial
  Chemically synthesized
guuccaggaaaagaagcaggaag

SEQ ID NO: 7401 - RNA, 23 nt, Artificial
  Chemically synthesized
uguuccaggaaaagaagcaggaa

SEQ ID NO: 7402 - RNA, 23 nt, Artificial
  Chemically synthesized
aguacagacugcaauuuuaaggg

SEQ ID NO: 7403 - RNA, 23 nt, Artificial
  Chemically synthesized
aaguacagacugcaauuuuaagg

SEQ ID NO: 7404 - RNA, 23 nt, Artificial
  Chemically synthesized
gaaguacagacugcaauuuuaag

SEQ ID NO: 7405 - RNA, 23 nt, Artificial
  Chemically synthesized
ggaaguacagacugcaauuuuaa

SEQ ID NO: 7406 - RNA, 23 nt, Artificial
  Chemically synthesized
aggaaguacagacugcaauuuua

SEQ ID NO: 7407 - RNA, 23 nt, Artificial
  Chemically synthesized
gaaggaacucuuaaauaagcgca

SEQ ID NO: 7408 - RNA, 23 nt, Artificial
  Chemically synthesized
agaaggaacucuuaaauaagcgc

SEQ ID NO: 7409 - RNA, 23 nt, Artificial
  Chemically synthesized
cagaaggaacucuuaaauaagcg

SEQ ID NO: 7410 - RNA, 23 nt, Artificial
  Chemically synthesized
gcagaaggaacucuuaaauaagc

SEQ ID NO: 7411 - RNA, 23 nt, Artificial
  Chemically synthesized
agcagaaggaacucuuaaauaag

SEQ ID NO: 7412 - RNA, 23 nt, Artificial
  Chemically synthesized
uguggugaagaaaagugaacgcc

SEQ ID NO: 7413 - RNA, 23 nt, Artificial
  Chemically synthesized
guguggugaagaaaagugaacgc

SEQ ID NO: 7414 - RNA, 23 nt, Artificial
  Chemically synthesized
aguguggugaagaaaagugaacg

SEQ ID NO: 7415 - RNA, 23 nt, Artificial
  Chemically synthesized
uaguguggugaagaaaagugaac

SEQ ID NO: 7416 - RNA, 23 nt, Artificial
  Chemically synthesized
auaguguggugaagaaaagugaa

SEQ ID NO: 7417 - RNA, 23 nt, Artificial
  Chemically synthesized
ggcgguggaguuaaaaagacugu

SEQ ID NO: 7418 - RNA, 23 nt, Artificial
  Chemically synthesized
cggcgguggaguuaaaaagacug

SEQ ID NO: 7419 - RNA, 23 nt, Artificial
  Chemically synthesized
gguucagugccauguuccaggaa

SEQ ID NO: 7420 - RNA, 23 nt, Artificial
  Chemically synthesized
agguucagugccauguuccagga

SEQ ID NO: 7421 - RNA, 23 nt, Artificial
  Chemically synthesized
aagguucagugccauguuccagg

SEQ ID NO: 7422 - RNA, 23 nt, Artificial
  Chemically synthesized
aaagguucagugccauguuccag

SEQ ID NO: 7423 - RNA, 23 nt, Artificial
  Chemically synthesized
gaaagguucagugccauguucca

SEQ ID NO: 7424 - RNA, 23 nt, Artificial
  Chemically synthesized
cgagccggcagaggacaauaaca

SEQ ID NO: 7425 - RNA, 23 nt, Artificial
  Chemically synthesized
gauguugguugccaaggaacagc

SEQ ID NO: 7426 - RNA, 23 nt, Artificial
  Chemically synthesized
agauguugguugccaaggaacag

SEQ ID NO: 7427 - RNA, 23 nt, Artificial
  Chemically synthesized
cagauguugguugccaaggaaca

SEQ ID NO: 7428 - RNA, 23 nt, Artificial
  Chemically synthesized
gcagauguugguugccaaggaac

SEQ ID NO: 7429 - RNA, 23 nt, Artificial
  Chemically synthesized
agcagauguugguugccaaggaa

SEQ ID NO: 7430 - RNA, 23 nt, Artificial
  Chemically synthesized
gaaagcugcagcuagaaaauggu

SEQ ID NO: 7431 - RNA, 23 nt, Artificial
  Chemically synthesized
ggaaagcugcagcuagaaaaugg

SEQ ID NO: 7432 - RNA, 23 nt, Artificial
  Chemically synthesized
aggaaagcugcagcuagaaaaug

SEQ ID NO: 7433 - RNA, 23 nt, Artificial
  Chemically synthesized
ccacaaugugaauccuacaguuu

SEQ ID NO: 7434 - RNA, 23 nt, Artificial
  Chemically synthesized
uccacaaugugaauccuacaguu

SEQ ID NO: 7435 - RNA, 23 nt, Artificial
  Chemically synthesized
guccacaaugugaauccuacagu

SEQ ID NO: 7436 - RNA, 23 nt, Artificial
  Chemically synthesized
cguccacaaugugaauccuacag

SEQ ID NO: 7437 - RNA, 23 nt, Artificial
  Chemically synthesized
gcguccacaaugugaauccuaca

SEQ ID NO: 7438 - RNA, 23 nt, Artificial
  Chemically synthesized
caaccauaagcgacauugaaacu

SEQ ID NO: 7439 - RNA, 23 nt, Artificial
  Chemically synthesized
ucaaccauaagcgacauugaaac

SEQ ID NO: 7440 - RNA, 23 nt, Artificial
  Chemically synthesized
cucaaccauaagcgacauugaaa

SEQ ID NO: 7441 - RNA, 23 nt, Artificial
  Chemically synthesized
ccucaaccauaagcgacauugaa

SEQ ID NO: 7442 - RNA, 23 nt, Artificial
  Chemically synthesized
gccucaaccauaagcgacauuga

SEQ ID NO: 7443 - RNA, 23 nt, Artificial
  Chemically synthesized
caacagcagcagauugaaaauca

SEQ ID NO: 7444 - RNA, 23 nt, Artificial
  Chemically synthesized
ccaacuuaaccaggaacaaaauu

SEQ ID NO: 7445 - RNA, 23 nt, Artificial
  Chemically synthesized
accaacuuaaccaggaacaaaau

SEQ ID NO: 7446 - RNA, 23 nt, Artificial
  Chemically synthesized
aaccaacuuaaccaggaacaaaa

SEQ ID NO: 7447 - RNA, 23 nt, Artificial
  Chemically synthesized
uaaccaacuuaaccaggaacaaa

SEQ ID NO: 7448 - RNA, 23 nt, Artificial
  Chemically synthesized
guaaccaacuuaaccaggaacaa

SEQ ID NO: 7449 - RNA, 23 nt, Artificial
  Chemically synthesized
caaggaacagcguuuacauuuuc

SEQ ID NO: 7450 - RNA, 23 nt, Artificial
  Chemically synthesized
ccaaggaacagcguuuacauuuu

SEQ ID NO: 7451 - RNA, 23 nt, Artificial
  Chemically synthesized
gccaaggaacagcguuuacauuu

SEQ ID NO: 7452 - RNA, 23 nt, Artificial
  Chemically synthesized
ugccaaggaacagcguuuacauu

SEQ ID NO: 7453 - RNA, 23 nt, Artificial
  Chemically synthesized
uugccaaggaacagcguuuacau

SEQ ID NO: 7454 - RNA, 23 nt, Artificial
  Chemically synthesized
ccaggagccacuuaagagauuau

SEQ ID NO: 7455 - RNA, 23 nt, Artificial
  Chemically synthesized
accaggagccacuuaagagauua

SEQ ID NO: 7456 - RNA, 23 nt, Artificial
  Chemically synthesized
uaccaggagccacuuaagagauu

SEQ ID NO: 7457 - RNA, 23 nt, Artificial
  Chemically synthesized
cuaccaggagccacuuaagagau

SEQ ID NO: 7458 - RNA, 23 nt, Artificial
  Chemically synthesized
gcuaccaggagccacuuaagaga

SEQ ID NO: 7459 - RNA, 23 nt, Artificial
  Chemically synthesized
cagcaauuggaagauuuaaagaa

SEQ ID NO: 7460 - RNA, 23 nt, Artificial
  Chemically synthesized
ucagcaauuggaagauuuaaaga

SEQ ID NO: 7461 - RNA, 23 nt, Artificial
  Chemically synthesized
gucagcaauuggaagauuuaaag

SEQ ID NO: 7462 - RNA, 23 nt, Artificial
  Chemically synthesized
agucagcaauuggaagauuuaaa

SEQ ID NO: 7463 - RNA, 23 nt, Artificial
  Chemically synthesized
uagucagcaauuggaagauuuaa

SEQ ID NO: 7464 - RNA, 23 nt, Artificial
  Chemically synthesized
cgucucuaugggaaaaaaauuca

SEQ ID NO: 7465 - RNA, 23 nt, Artificial
  Chemically synthesized
acgucucuaugggaaaaaaauuc

SEQ ID NO: 7466 - RNA, 23 nt, Artificial
  Chemically synthesized
aacgucucuaugggaaaaaaauu

SEQ ID NO: 7467 - RNA, 23 nt, Artificial
  Chemically synthesized
gaacgucucuaugggaaaaaaau

SEQ ID NO: 7468 - RNA, 23 nt, Artificial
  Chemically synthesized
ugaacgucucuaugggaaaaaaa

SEQ ID NO: 7469 - RNA, 23 nt, Artificial
  Chemically synthesized
gaguugaagcccaggagaacaag

SEQ ID NO: 7470 - RNA, 23 nt, Artificial
  Chemically synthesized
cgaguugaagcccaggagaacaa

SEQ ID NO: 7471 - RNA, 23 nt, Artificial
  Chemically synthesized
acgaguugaagcccaggagaaca

SEQ ID NO: 7472 - RNA, 23 nt, Artificial
  Chemically synthesized
aacgaguugaagcccaggagaac

SEQ ID NO: 7473 - RNA, 23 nt, Artificial
  Chemically synthesized
gaacgaguugaagcccaggagaa

SEQ ID NO: 7474 - RNA, 23 nt, Artificial
  Chemically synthesized
ccuaaaggcugauugugcaggcc

SEQ ID NO: 7475 - RNA, 23 nt, Artificial
  Chemically synthesized
accuaaaggcugauugugcaggc

SEQ ID NO: 7476 - RNA, 23 nt, Artificial
  Chemically synthesized
caccuaaaggcugauugugcagg

SEQ ID NO: 7477 - RNA, 23 nt, Artificial
  Chemically synthesized
ucaccuaaaggcugauugugcag

SEQ ID NO: 7478 - RNA, 23 nt, Artificial
  Chemically synthesized
uucaccuaaaggcugauugugca

SEQ ID NO: 7479 - RNA, 23 nt, Artificial
  Chemically synthesized
gacugaauuuugccaauuacuau

SEQ ID NO: 7480 - RNA, 23 nt, Artificial
  Chemically synthesized
ggacugaauuuugccaauuacua

SEQ ID NO: 7481 - RNA, 23 nt, Artificial
  Chemically synthesized
aggacugaauuuugccaauuacu

SEQ ID NO: 7482 - RNA, 23 nt, Artificial
  Chemically synthesized
aaggacugaauuuugccaauuac

SEQ ID NO: 7483 - RNA, 23 nt, Artificial
  Chemically synthesized
caaggacugaauuuugccaauua

SEQ ID NO: 7484 - RNA, 23 nt, Artificial
  Chemically synthesized
agauauggcagcuaggcaacagc

SEQ ID NO: 7485 - RNA, 23 nt, Artificial
  Chemically synthesized
aagauauggcagcuaggcaacag

SEQ ID NO: 7486 - RNA, 23 nt, Artificial
  Chemically synthesized
caagauauggcagcuaggcaaca

SEQ ID NO: 7487 - RNA, 23 nt, Artificial
  Chemically synthesized
ccaagauauggcagcuaggcaac

SEQ ID NO: 7488 - RNA, 23 nt, Artificial
  Chemically synthesized
uccaagauauggcagcuaggcaa

SEQ ID NO: 7489 - RNA, 23 nt, Artificial
  Chemically synthesized
cauuuuugccucaaccauaagcg

SEQ ID NO: 7490 - RNA, 23 nt, Artificial
  Chemically synthesized
ccauuuuugccucaaccauaagc

SEQ ID NO: 7491 - RNA, 23 nt, Artificial
  Chemically synthesized
gccauuuuugccucaaccauaag

SEQ ID NO: 7492 - RNA, 23 nt, Artificial
  Chemically synthesized
cgccauuuuugccucaaccauaa

SEQ ID NO: 7493 - RNA, 23 nt, Artificial
  Chemically synthesized
ccgccauuuuugccucaaccaua

SEQ ID NO: 7494 - RNA, 23 nt, Artificial
  Chemically synthesized
guacagacugcaauuuuaagggu

SEQ ID NO: 7495 - RNA, 23 nt, Artificial
  Chemically synthesized
caggcuuuuuauauaccaaaagu

SEQ ID NO: 7496 - RNA, 23 nt, Artificial
  Chemically synthesized
acaggcuuuuuauauaccaaaag

SEQ ID NO: 7497 - RNA, 23 nt, Artificial
  Chemically synthesized
uacaggcuuuuuauauaccaaaa

SEQ ID NO: 7498 - RNA, 23 nt, Artificial
  Chemically synthesized
guacaggcuuuuuauauaccaaa

SEQ ID NO: 7499 - RNA, 23 nt, Artificial
  Chemically synthesized
ggacaauggaaacaccaaugcca

SEQ ID NO: 7500 - RNA, 23 nt, Artificial
  Chemically synthesized
uggacaauggaaacaccaaugcc

SEQ ID NO: 7501 - RNA, 23 nt, Artificial
  Chemically synthesized
guggacaauggaaacaccaaugc

SEQ ID NO: 7502 - RNA, 23 nt, Artificial
  Chemically synthesized
uguggacaauggaaacaccaaug

SEQ ID NO: 7503 - RNA, 23 nt, Artificial
  Chemically synthesized
auguggacaauggaaacaccaau

SEQ ID NO: 7504 - RNA, 23 nt, Artificial
  Chemically synthesized
gggaagaagugaaauuuuuccuu

SEQ ID NO: 7505 - RNA, 23 nt, Artificial
  Chemically synthesized
agggaagaagugaaauuuuuccu

SEQ ID NO: 7506 - RNA, 23 nt, Artificial
  Chemically synthesized
gagggaagaagugaaauuuuucc

SEQ ID NO: 7507 - RNA, 23 nt, Artificial
  Chemically synthesized
ggagggaagaagugaaauuuuuc

SEQ ID NO: 7508 - RNA, 23 nt, Artificial
  Chemically synthesized
cggagggaagaagugaaauuuuu

SEQ ID NO: 7509 - RNA, 23 nt, Artificial
  Chemically synthesized
ugaucagcuuagucagcaauugg

SEQ ID NO: 7510 - RNA, 23 nt, Artificial
  Chemically synthesized
uugaucagcuuagucagcaauug

SEQ ID NO: 7511 - RNA, 23 nt, Artificial
  Chemically synthesized
guugaucagcuuagucagcaauu

SEQ ID NO: 7512 - RNA, 23 nt, Artificial
  Chemically synthesized
gguugaucagcuuagucagcaau

SEQ ID NO: 7513 - RNA, 23 nt, Artificial
  Chemically synthesized
ggguugaucagcuuagucagcaa

SEQ ID NO: 7514 - RNA, 23 nt, Artificial
  Chemically synthesized
ccauuaagaagucccauaacccc

SEQ ID NO: 7515 - RNA, 23 nt, Artificial
  Chemically synthesized
gccauuaagaagucccauaaccc

SEQ ID NO: 7516 - RNA, 23 nt, Artificial
  Chemically synthesized
ugccauuaagaagucccauaacc

SEQ ID NO: 7517 - RNA, 23 nt, Artificial
  Chemically synthesized
uugccauuaagaagucccauaac

SEQ ID NO: 7518 - RNA, 23 nt, Artificial
  Chemically synthesized
cuugccauuaagaagucccauaa

SEQ ID NO: 7519 - RNA, 23 nt, Artificial
  Chemically synthesized
ccaggagaacaagcugaagaaaa

SEQ ID NO: 7520 - RNA, 23 nt, Artificial
  Chemically synthesized
ggccuuuccuggcugauaaaggg

SEQ ID NO: 7521 - RNA, 23 nt, Artificial
  Chemically synthesized
aggccuuuccuggcugauaaagg

SEQ ID NO: 7522 - RNA, 23 nt, Artificial
  Chemically synthesized
uaggccuuuccuggcugauaaag

SEQ ID NO: 7523 - RNA, 23 nt, Artificial
  Chemically synthesized
uuaggccuuuccuggcugauaaa

SEQ ID NO: 7524 - RNA, 23 nt, Artificial
  Chemically synthesized
auuaggccuuuccuggcugauaa

SEQ ID NO: 7525 - RNA, 23 nt, Artificial
  Chemically synthesized
gcugggugugaugaacaaaggug

SEQ ID NO: 7526 - RNA, 23 nt, Artificial
  Chemically synthesized
aaacuggccaacauuaaaacaga

SEQ ID NO: 7527 - RNA, 23 nt, Artificial
  Chemically synthesized
caacuuaaccaggaacaaaauuc

SEQ ID NO: 7528 - RNA, 23 nt, Artificial
  Chemically synthesized
gaggacaagucgacuacagcaaa

SEQ ID NO: 7529 - RNA, 23 nt, Artificial
  Chemically synthesized
agaggacaagucgacuacagcaa

SEQ ID NO: 7530 - RNA, 23 nt, Artificial
  Chemically synthesized
gagaggacaagucgacuacagca

SEQ ID NO: 7531 - RNA, 23 nt, Artificial
  Chemically synthesized
ccucagccaccuucagaaaguac

SEQ ID NO: 7532 - RNA, 23 nt, Artificial
  Chemically synthesized
gccucagccaccuucagaaagua

SEQ ID NO: 7533 - RNA, 23 nt, Artificial
  Chemically synthesized
agccucagccaccuucagaaagu

SEQ ID NO: 7534 - RNA, 23 nt, Artificial
  Chemically synthesized
cagccucagccaccuucagaaag

SEQ ID NO: 7535 - RNA, 23 nt, Artificial
  Chemically synthesized
acagccucagccaccuucagaaa

SEQ ID NO: 7536 - RNA, 23 nt, Artificial
  Chemically synthesized
caaugugaauccuacaguuucca

SEQ ID NO: 7537 - RNA, 23 nt, Artificial
  Chemically synthesized
acaaugugaauccuacaguuucc

SEQ ID NO: 7538 - RNA, 23 nt, Artificial
  Chemically synthesized
cacaaugugaauccuacaguuuc

SEQ ID NO: 7539 - RNA, 23 nt, Artificial
  Chemically synthesized
cagcagaaggaacucuuaaauaa

SEQ ID NO: 7540 - RNA, 23 nt, Artificial
  Chemically synthesized
gggacauacccaaguccuacacc

SEQ ID NO: 7541 - RNA, 23 nt, Artificial
  Chemically synthesized
ugggacauacccaaguccuacac

SEQ ID NO: 7542 - RNA, 23 nt, Artificial
  Chemically synthesized
augggacauacccaaguccuaca

SEQ ID NO: 7543 - RNA, 23 nt, Artificial
  Chemically synthesized
uaugggacauacccaaguccuac

SEQ ID NO: 7544 - RNA, 23 nt, Artificial
  Chemically synthesized
cuaugggacauacccaaguccua

SEQ ID NO: 7545 - RNA, 23 nt, Artificial
  Chemically synthesized
acaccaaugccaauggaaaccug

SEQ ID NO: 7546 - RNA, 23 nt, Artificial
  Chemically synthesized
aacaccaaugccaauggaaaccu

SEQ ID NO: 7547 - RNA, 23 nt, Artificial
  Chemically synthesized
aaacaccaaugccaauggaaacc

SEQ ID NO: 7548 - RNA, 23 nt, Artificial
  Chemically synthesized
gaaacaccaaugccaauggaaac

SEQ ID NO: 7549 - RNA, 23 nt, Artificial
  Chemically synthesized
ggaaacaccaaugccaauggaaa

SEQ ID NO: 7550 - RNA, 23 nt, Artificial
  Chemically synthesized
ggaucaucuaugagguggaagau

SEQ ID NO: 7551 - RNA, 23 nt, Artificial
  Chemically synthesized
aggaucaucuaugagguggaaga

SEQ ID NO: 7552 - RNA, 23 nt, Artificial
  Chemically synthesized
gaggaucaucuaugagguggaag

SEQ ID NO: 7553 - RNA, 23 nt, Artificial
  Chemically synthesized
agaggaucaucuaugagguggaa

SEQ ID NO: 7554 - RNA, 23 nt, Artificial
  Chemically synthesized
cagaggaucaucuaugaggugga

SEQ ID NO: 7555 - RNA, 23 nt, Artificial
  Chemically synthesized
cagcguucaccucugcaaacagc

SEQ ID NO: 7556 - RNA, 23 nt, Artificial
  Chemically synthesized
acagcguucaccucugcaaacag

SEQ ID NO: 7557 - RNA, 23 nt, Artificial
  Chemically synthesized
aacagcguucaccucugcaaaca

SEQ ID NO: 7558 - RNA, 23 nt, Artificial
  Chemically synthesized
uaacagcguucaccucugcaaac

SEQ ID NO: 7559 - RNA, 23 nt, Artificial
  Chemically synthesized
guaacagcguucaccucugcaaa

SEQ ID NO: 7560 - RNA, 23 nt, Artificial
  Chemically synthesized
guguaaaugugcacaauaaaccc

SEQ ID NO: 7561 - RNA, 23 nt, Artificial
  Chemically synthesized
uguguaaaugugcacaauaaacc

SEQ ID NO: 7562 - RNA, 23 nt, Artificial
  Chemically synthesized
cuguguaaaugugcacaauaaac

SEQ ID NO: 7563 - RNA, 23 nt, Artificial
  Chemically synthesized
gcuguguaaaugugcacaauaaa

SEQ ID NO: 7564 - RNA, 23 nt, Artificial
  Chemically synthesized
cgcuguguaaaugugcacaauaa

SEQ ID NO: 7565 - RNA, 23 nt, Artificial
  Chemically synthesized
augauggaaacuggccaacauua

SEQ ID NO: 7566 - RNA, 23 nt, Artificial
  Chemically synthesized
aaugauggaaacuggccaacauu

SEQ ID NO: 7567 - RNA, 23 nt, Artificial
  Chemically synthesized
uaaugauggaaacuggccaacau

SEQ ID NO: 7568 - RNA, 23 nt, Artificial
  Chemically synthesized
acggagggaagaagugaaauuuu

SEQ ID NO: 7569 - RNA, 23 nt, Artificial
  Chemically synthesized
gugaacgucucuaugggaaaaaa

SEQ ID NO: 7570 - RNA, 23 nt, Artificial
  Chemically synthesized
ccuauaacaccggaaacaaccug

SEQ ID NO: 7571 - RNA, 23 nt, Artificial
  Chemically synthesized
uccuauaacaccggaaacaaccu

SEQ ID NO: 7572 - RNA, 23 nt, Artificial
  Chemically synthesized
uuccuauaacaccggaaacaacc

SEQ ID NO: 7573 - RNA, 23 nt, Artificial
  Chemically synthesized
guuccuauaacaccggaaacaac

SEQ ID NO: 7574 - RNA, 23 nt, Artificial
  Chemically synthesized
aguuccuauaacaccggaaacaa

SEQ ID NO: 7575 - RNA, 23 nt, Artificial
  Chemically synthesized
cgugaacgucucuaugggaaaaa

SEQ ID NO: 7576 - RNA, 23 nt, Artificial
  Chemically synthesized
gcgugaacgucucuaugggaaaa

SEQ ID NO: 7577 - RNA, 23 nt, Artificial
  Chemically synthesized
ggaaaagaagcaggaaguacaga

SEQ ID NO: 7578 - RNA, 23 nt, Artificial
  Chemically synthesized
aggaaaagaagcaggaaguacag

SEQ ID NO: 7579 - RNA, 23 nt, Artificial
  Chemically synthesized
caggaaaagaagcaggaaguaca

SEQ ID NO: 7580 - RNA, 23 nt, Artificial
  Chemically synthesized
gagggcuaugugcccaaaaaccu

SEQ ID NO: 7581 - RNA, 23 nt, Artificial
  Chemically synthesized
ggagggcuaugugcccaaaaacc

SEQ ID NO: 7582 - RNA, 23 nt, Artificial
  Chemically synthesized
gggagggcuaugugcccaaaaac

SEQ ID NO: 7583 - RNA, 23 nt, Artificial
  Chemically synthesized
cgggagggcuaugugcccaaaaa

SEQ ID NO: 7584 - RNA, 23 nt, Artificial
  Chemically synthesized
ccgggagggcuaugugcccaaaa

SEQ ID NO: 7585 - RNA, 23 nt, Artificial
  Chemically synthesized
uuguacguacaggcuuuuuauau

SEQ ID NO: 7586 - RNA, 23 nt, Artificial
  Chemically synthesized
auuguacguacaggcuuuuuaua

SEQ ID NO: 7587 - RNA, 23 nt, Artificial
  Chemically synthesized
aauuguacguacaggcuuuuuau

SEQ ID NO: 7588 - RNA, 23 nt, Artificial
  Chemically synthesized
cgguggaguuaaaaagacuguac

SEQ ID NO: 7589 - RNA, 23 nt, Artificial
  Chemically synthesized
gcgguggaguuaaaaagacugua

SEQ ID NO: 7590 - RNA, 23 nt, Artificial
  Chemically synthesized
ucuccaguuugcccauuaacugg

SEQ ID NO: 7591 - RNA, 23 nt, Artificial
  Chemically synthesized
uucuccaguuugcccauuaacug

SEQ ID NO: 7592 - RNA, 23 nt, Artificial
  Chemically synthesized
uuucuccaguuugcccauuaacu

SEQ ID NO: 7593 - RNA, 23 nt, Artificial
  Chemically synthesized
cuuucuccaguuugcccauuaac

SEQ ID NO: 7594 - RNA, 23 nt, Artificial
  Chemically synthesized
ccuuucuccaguuugcccauuaa

SEQ ID NO: 7595 - RNA, 23 nt, Artificial
  Chemically synthesized
uguagaauuuugcaaggaaccug

SEQ ID NO: 7596 - RNA, 23 nt, Artificial
  Chemically synthesized
uuguagaauuuugcaaggaaccu

SEQ ID NO: 7597 - RNA, 23 nt, Artificial
  Chemically synthesized
guuguagaauuuugcaaggaacc

SEQ ID NO: 7598 - RNA, 23 nt, Artificial
  Chemically synthesized
uguuguagaauuuugcaaggaac

SEQ ID NO: 7599 - RNA, 23 nt, Artificial
  Chemically synthesized
auguuguagaauuuugcaaggaa

SEQ ID NO: 7600 - RNA, 23 nt, Artificial
  Chemically synthesized
gacaauaacaacaacguggccac

SEQ ID NO: 7601 - RNA, 23 nt, Artificial
  Chemically synthesized
cccaggagaacaagcugaagaaa

SEQ ID NO: 7602 - RNA, 23 nt, Artificial
  Chemically synthesized
agggcuaugugcccaaaaaccug

SEQ ID NO: 7603 - RNA, 23 nt, Artificial
  Chemically synthesized
gcagcagauugaaaaucagcagc

SEQ ID NO: 7604 - RNA, 23 nt, Artificial
  Chemically synthesized
agcagcagauugaaaaucagcag

SEQ ID NO: 7605 - RNA, 23 nt, Artificial
  Chemically synthesized
cagcagcagauugaaaaucagca

SEQ ID NO: 7606 - RNA, 23 nt, Artificial
  Chemically synthesized
acagcagcagauugaaaaucagc

SEQ ID NO: 7607 - RNA, 23 nt, Artificial
  Chemically synthesized
aacagcagcagauugaaaaucag

SEQ ID NO: 7608 - RNA, 23 nt, Artificial
  Chemically synthesized
cagcagauguugguugccaagga

SEQ ID NO: 7609 - RNA, 23 nt, Artificial
  Chemically synthesized
gcagcagauguugguugccaagg

SEQ ID NO: 7610 - RNA, 23 nt, Artificial
  Chemically synthesized
agcagcagauguugguugccaag

SEQ ID NO: 7611 - RNA, 23 nt, Artificial
  Chemically synthesized
cagcagcagauguugguugccaa

SEQ ID NO: 7612 - RNA, 23 nt, Artificial
  Chemically synthesized
aacuuaaccaggaacaaaauuca

SEQ ID NO: 7613 - RNA, 23 nt, Artificial
  Chemically synthesized
guaccuggagaaaaacguacuga

SEQ ID NO: 7614 - RNA, 23 nt, Artificial
  Chemically synthesized
uguaccuggagaaaaacguacug

SEQ ID NO: 7615 - RNA, 23 nt, Artificial
  Chemically synthesized
auguaccuggagaaaaacguacu

SEQ ID NO: 7616 - RNA, 23 nt, Artificial
  Chemically synthesized
aauguaccuggagaaaaacguac

SEQ ID NO: 7617 - RNA, 23 nt, Artificial
  Chemically synthesized
ugcucauggaagauccaaauccg

SEQ ID NO: 7618 - RNA, 23 nt, Artificial
  Chemically synthesized
cugcucauggaagauccaaaucc

SEQ ID NO: 7619 - RNA, 23 nt, Artificial
  Chemically synthesized
gcugcucauggaagauccaaauc

SEQ ID NO: 7620 - RNA, 23 nt, Artificial
  Chemically synthesized
ugcugcucauggaagauccaaau

SEQ ID NO: 7621 - RNA, 23 nt, Artificial
  Chemically synthesized
augcugcucauggaagauccaaa

SEQ ID NO: 7622 - RNA, 23 nt, Artificial
  Chemically synthesized
gcccaggagaacaagcugaagaa

SEQ ID NO: 7623 - RNA, 23 nt, Artificial
  Chemically synthesized
aagugaacgcccuuguagagcag

SEQ ID NO: 7624 - RNA, 23 nt, Artificial
  Chemically synthesized
aaagugaacgcccuuguagagca

SEQ ID NO: 7625 - RNA, 23 nt, Artificial
  Chemically synthesized
aaaagugaacgcccuuguagagc

SEQ ID NO: 7626 - RNA, 23 nt, Artificial
  Chemically synthesized
gaaaagugaacgcccuuguagag

SEQ ID NO: 7627 - RNA, 23 nt, Artificial
  Chemically synthesized
agaaaagugaacgcccuuguaga

SEQ ID NO: 7628 - RNA, 23 nt, Artificial
  Chemically synthesized
gggaaaugaacgucccauacccu

SEQ ID NO: 7629 - RNA, 23 nt, Artificial
  Chemically synthesized
ggggaaaugaacgucccauaccc

SEQ ID NO: 7630 - RNA, 23 nt, Artificial
  Chemically synthesized
aggggaaaugaacgucccauacc

SEQ ID NO: 7631 - RNA, 23 nt, Artificial
  Chemically synthesized
gaggggaaaugaacgucccauac

SEQ ID NO: 7632 - RNA, 23 nt, Artificial
  Chemically synthesized
ggaggggaaaugaacgucccaua

SEQ ID NO: 7633 - RNA, 23 nt, Artificial
  Chemically synthesized
ggugugaauuguacguacaggcu

SEQ ID NO: 7634 - RNA, 23 nt, Artificial
  Chemically synthesized
aggugugaauuguacguacaggc

SEQ ID NO: 7635 - RNA, 23 nt, Artificial
  Chemically synthesized
gaggugugaauuguacguacagg

SEQ ID NO: 7636 - RNA, 23 nt, Artificial
  Chemically synthesized
ugaggugugaauuguacguacag

SEQ ID NO: 7637 - RNA, 23 nt, Artificial
  Chemically synthesized
cugaggugugaauuguacguaca

SEQ ID NO: 7638 - RNA, 23 nt, Artificial
  Chemically synthesized
agguggccaugauggacaagcga

SEQ ID NO: 7639 - RNA, 23 nt, Artificial
  Chemically synthesized
gagguggccaugauggacaagcg

SEQ ID NO: 7640 - RNA, 23 nt, Artificial
  Chemically synthesized
ggagguggccaugauggacaagc

SEQ ID NO: 7641 - RNA, 23 nt, Artificial
  Chemically synthesized
uggagguggccaugauggacaag

SEQ ID NO: 7642 - RNA, 23 nt, Artificial
  Chemically synthesized
auggagguggccaugauggacaa

SEQ ID NO: 7643 - RNA, 23 nt, Artificial
  Chemically synthesized
gaaugcugcugauagugauggau

SEQ ID NO: 7644 - RNA, 23 nt, Artificial
  Chemically synthesized
ugaaugcugcugauagugaugga

SEQ ID NO: 7645 - RNA, 23 nt, Artificial
  Chemically synthesized
gugaaugcugcugauagugaugg

SEQ ID NO: 7646 - RNA, 23 nt, Artificial
  Chemically synthesized
gucaacgugaaugcugcugauag

SEQ ID NO: 7647 - RNA, 23 nt, Artificial
  Chemically synthesized
ugucaacgugaaugcugcugaua

SEQ ID NO: 7648 - RNA, 23 nt, Artificial
  Chemically synthesized
gugucaacgugaaugcugcugau

SEQ ID NO: 7649 - RNA, 23 nt, Artificial
  Chemically synthesized
cgguugguugccagugaagacag

SEQ ID NO: 7650 - RNA, 23 nt, Artificial
  Chemically synthesized
ccgguugguugccagugaagaca

SEQ ID NO: 7651 - RNA, 23 nt, Artificial
  Chemically synthesized
cccgguugguugccagugaagac

SEQ ID NO: 7652 - RNA, 23 nt, Artificial
  Chemically synthesized
ccccgguugguugccagugaaga

SEQ ID NO: 7653 - RNA, 23 nt, Artificial
  Chemically synthesized
gaucaucuaugagguggaagauc

SEQ ID NO: 7654 - RNA, 23 nt, Artificial
  Chemically synthesized
cgacauugaaacugcugcagaca

SEQ ID NO: 7655 - RNA, 23 nt, Artificial
  Chemically synthesized
gcgacauugaaacugcugcagac

SEQ ID NO: 7656 - RNA, 23 nt, Artificial
  Chemically synthesized
agcgacauugaaacugcugcaga

SEQ ID NO: 7657 - RNA, 23 nt, Artificial
  Chemically synthesized
aagcgacauugaaacugcugcag

SEQ ID NO: 7658 - RNA, 23 nt, Artificial
  Chemically synthesized
uaagcgacauugaaacugcugca

SEQ ID NO: 7659 - RNA, 23 nt, Artificial
  Chemically synthesized
gccuuuccuggcugauaaagggu

SEQ ID NO: 7660 - RNA, 23 nt, Artificial
  Chemically synthesized
aggagccucuguauggaaacaug

SEQ ID NO: 7661 - RNA, 23 nt, Artificial
  Chemically synthesized
aaggagccucuguauggaaacau

SEQ ID NO: 7662 - RNA, 23 nt, Artificial
  Chemically synthesized
aaaggagccucuguauggaaaca

SEQ ID NO: 7663 - RNA, 23 nt, Artificial
  Chemically synthesized
caaaggagccucuguauggaaac

SEQ ID NO: 7664 - RNA, 23 nt, Artificial
  Chemically synthesized
ccaaaggagccucuguauggaaa

SEQ ID NO: 7665 - RNA, 23 nt, Artificial
  Chemically synthesized
ugcgugaacgucucuaugggaaa

SEQ ID NO: 7666 - RNA, 23 nt, Artificial
  Chemically synthesized
auguaugagucguguguaauuua

SEQ ID NO: 7667 - RNA, 23 nt, Artificial
  Chemically synthesized
cauguaugagucguguguaauuu

SEQ ID NO: 7668 - RNA, 23 nt, Artificial
  Chemically synthesized
ucauguaugagucguguguaauu

SEQ ID NO: 7669 - RNA, 23 nt, Artificial
  Chemically synthesized
uucauguaugagucguguguaau

SEQ ID NO: 7670 - RNA, 23 nt, Artificial
  Chemically synthesized
uuucauguaugagucguguguaa

SEQ ID NO: 7671 - RNA, 23 nt, Artificial
  Chemically synthesized
cccuaagaccaagugacaacugg

SEQ ID NO: 7672 - RNA, 23 nt, Artificial
  Chemically synthesized
ccccuaagaccaagugacaacug

SEQ ID NO: 7673 - RNA, 23 nt, Artificial
  Chemically synthesized
accccuaagaccaagugacaacu

SEQ ID NO: 7674 - RNA, 23 nt, Artificial
  Chemically synthesized
gaccccuaagaccaagugacaac

SEQ ID NO: 7675 - RNA, 23 nt, Artificial
  Chemically synthesized
ggaccccuaagaccaagugacaa

SEQ ID NO: 7676 - RNA, 23 nt, Artificial
  Chemically synthesized
caauuuuaaggguugaucagcuu

SEQ ID NO: 7677 - RNA, 23 nt, Artificial
  Chemically synthesized
gcaauuuuaaggguugaucagcu

SEQ ID NO: 7678 - RNA, 23 nt, Artificial
  Chemically synthesized
ugcaauuuuaaggguugaucagc

SEQ ID NO: 7679 - RNA, 23 nt, Artificial
  Chemically synthesized
cugcaauuuuaaggguugaucag

SEQ ID NO: 7680 - RNA, 23 nt, Artificial
  Chemically synthesized
acugcaauuuuaaggguugauca

SEQ ID NO: 7681 - RNA, 23 nt, Artificial
  Chemically synthesized
aaccauaagcgacauugaaacug

SEQ ID NO: 7682 - RNA, 23 nt, Artificial
  Chemically synthesized
gagcaacaaugaacagauuuuaa

SEQ ID NO: 7683 - RNA, 23 nt, Artificial
  Chemically synthesized
ugagcaacaaugaacagauuuua

SEQ ID NO: 7684 - RNA, 23 nt, Artificial
  Chemically synthesized
uugagcaacaaugaacagauuuu

SEQ ID NO: 7685 - RNA, 23 nt, Artificial
  Chemically synthesized
cuugagcaacaaugaacagauuu

SEQ ID NO: 7686 - RNA, 23 nt, Artificial
  Chemically synthesized
ucuugagcaacaaugaacagauu

SEQ ID NO: 7687 - RNA, 23 nt, Artificial
  Chemically synthesized
cugcgugaacgucucuaugggaa

SEQ ID NO: 7688 - RNA, 23 nt, Artificial
  Chemically synthesized
acugcgugaacgucucuauggga

SEQ ID NO: 7689 - RNA, 23 nt, Artificial
  Chemically synthesized
ccuggaaaggaggaaggaaggca

SEQ ID NO: 7690 - RNA, 23 nt, Artificial
  Chemically synthesized
cccuggaaaggaggaaggaaggc

SEQ ID NO: 7691 - RNA, 23 nt, Artificial
  Chemically synthesized
ucccuggaaaggaggaaggaagg

SEQ ID NO: 7692 - RNA, 23 nt, Artificial
  Chemically synthesized
cucccuggaaaggaggaaggaag

SEQ ID NO: 7693 - RNA, 23 nt, Artificial
  Chemically synthesized
gcucccuggaaaggaggaaggaa

SEQ ID NO: 7694 - RNA, 23 nt, Artificial
  Chemically synthesized
gcuuagucagcaauuggaagauu

SEQ ID NO: 7695 - RNA, 23 nt, Artificial
  Chemically synthesized
agcuuagucagcaauuggaagau

SEQ ID NO: 7696 - RNA, 23 nt, Artificial
  Chemically synthesized
cagcuuagucagcaauuggaaga

SEQ ID NO: 7697 - RNA, 23 nt, Artificial
  Chemically synthesized
ucagcuuagucagcaauuggaag

SEQ ID NO: 7698 - RNA, 23 nt, Artificial
  Chemically synthesized
aucagcuuagucagcaauuggaa

SEQ ID NO: 7699 - RNA, 23 nt, Artificial
  Chemically synthesized
cgauguggacaauggaaacacca

SEQ ID NO: 7700 - RNA, 23 nt, Artificial
  Chemically synthesized
ccgauguggacaauggaaacacc

SEQ ID NO: 7701 - RNA, 23 nt, Artificial
  Chemically synthesized
gccgauguggacaauggaaacac

SEQ ID NO: 7702 - RNA, 23 nt, Artificial
  Chemically synthesized
ggccgauguggacaauggaaaca

SEQ ID NO: 7703 - RNA, 23 nt, Artificial
  Chemically synthesized
uggccgauguggacaauggaaac

SEQ ID NO: 7704 - RNA, 23 nt, Artificial
  Chemically synthesized
gcugcugacgcuguguaaaugug

SEQ ID NO: 7705 - RNA, 23 nt, Artificial
  Chemically synthesized
cgcugcugacgcuguguaaaugu

SEQ ID NO: 7706 - RNA, 23 nt, Artificial
  Chemically synthesized
acgcugcugacgcuguguaaaug

SEQ ID NO: 7707 - RNA, 23 nt, Artificial
  Chemically synthesized
gacgcugcugacgcuguguaaau

SEQ ID NO: 7708 - RNA, 23 nt, Artificial
  Chemically synthesized
agacgcugcugacgcuguguaaa

SEQ ID NO: 7709 - RNA, 23 nt, Artificial
  Chemically synthesized
cucaaaugcugcucauggaagau

SEQ ID NO: 7710 - RNA, 23 nt, Artificial
  Chemically synthesized
ccucaaaugcugcucauggaaga

SEQ ID NO: 7711 - RNA, 23 nt, Artificial
  Chemically synthesized
gccucaaaugcugcucauggaag

SEQ ID NO: 7712 - RNA, 23 nt, Artificial
  Chemically synthesized
ugccucaaaugcugcucauggaa

SEQ ID NO: 7713 - RNA, 23 nt, Artificial
  Chemically synthesized
uugccucaaaugcugcucaugga

SEQ ID NO: 7714 - RNA, 23 nt, Artificial
  Chemically synthesized
caagagcaacgaacucagagaaa

SEQ ID NO: 7715 - RNA, 23 nt, Artificial
  Chemically synthesized
ccaagagcaacgaacucagagaa

SEQ ID NO: 7716 - RNA, 23 nt, Artificial
  Chemically synthesized
cccaagagcaacgaacucagaga

SEQ ID NO: 7717 - RNA, 23 nt, Artificial
  Chemically synthesized
acccaagagcaacgaacucagag

SEQ ID NO: 7718 - RNA, 23 nt, Artificial
  Chemically synthesized
gacccaagagcaacgaacucaga

SEQ ID NO: 7719 - RNA, 23 nt, Artificial
  Chemically synthesized
gcucauggaagauccaaauccgc

SEQ ID NO: 7720 - RNA, 23 nt, Artificial
  Chemically synthesized
cugaauuuugccaauuacuauaa

SEQ ID NO: 7721 - RNA, 23 nt, Artificial
  Chemically synthesized
acugaauuuugccaauuacuaua

SEQ ID NO: 7722 - RNA, 23 nt, Artificial
  Chemically synthesized
cgaucucacagccugucaugcug

SEQ ID NO: 7723 - RNA, 23 nt, Artificial
  Chemically synthesized
ccgaucucacagccugucaugcu

SEQ ID NO: 7724 - RNA, 23 nt, Artificial
  Chemically synthesized
uccgaucucacagccugucaugc

SEQ ID NO: 7725 - RNA, 23 nt, Artificial
  Chemically synthesized
cuccgaucucacagccugucaug

SEQ ID NO: 7726 - RNA, 23 nt, Artificial
  Chemically synthesized
ccuccgaucucacagccugucau

SEQ ID NO: 7727 - RNA, 23 nt, Artificial
  Chemically synthesized
ccuggcugauaaagggucaaggc

SEQ ID NO: 7728 - RNA, 23 nt, Artificial
  Chemically synthesized
uccuggcugauaaagggucaagg

SEQ ID NO: 7729 - RNA, 23 nt, Artificial
  Chemically synthesized
uuccuggcugauaaagggucaag

SEQ ID NO: 7730 - RNA, 23 nt, Artificial
  Chemically synthesized
uuuccuggcugauaaagggucaa

SEQ ID NO: 7731 - RNA, 23 nt, Artificial
  Chemically synthesized
cuuuccuggcugauaaaggguca

SEQ ID NO: 7732 - RNA, 23 nt, Artificial
  Chemically synthesized
gcugaaauagaaagguucagugc

SEQ ID NO: 7733 - RNA, 23 nt, Artificial
  Chemically synthesized
ugcugaaauagaaagguucagug

SEQ ID NO: 7734 - RNA, 23 nt, Artificial
  Chemically synthesized
cugcugaaauagaaagguucagu

SEQ ID NO: 7735 - RNA, 23 nt, Artificial
  Chemically synthesized
ucugcugaaauagaaagguucag

SEQ ID NO: 7736 - RNA, 23 nt, Artificial
  Chemically synthesized
gucugcugaaauagaaagguuca

SEQ ID NO: 7737 - RNA, 23 nt, Artificial
  Chemically synthesized
ugccaaugauaaugaguuaccuu

SEQ ID NO: 7738 - RNA, 23 nt, Artificial
  Chemically synthesized
augccaaugauaaugaguuaccu

SEQ ID NO: 7739 - RNA, 23 nt, Artificial
  Chemically synthesized
gaugccaaugauaaugaguuacc

SEQ ID NO: 7740 - RNA, 23 nt, Artificial
  Chemically synthesized
agaugccaaugauaaugaguuac

SEQ ID NO: 7741 - RNA, 23 nt, Artificial
  Chemically synthesized
cagaugccaaugauaaugaguua

SEQ ID NO: 7742 - RNA, 23 nt, Artificial
  Chemically synthesized
uuagucagcaauuggaagauuua

SEQ ID NO: 7743 - RNA, 23 nt, Artificial
  Chemically synthesized
gugugaggagauggaggaaggcu

SEQ ID NO: 7744 - RNA, 23 nt, Artificial
  Chemically synthesized
agugugaggagauggaggaaggc

SEQ ID NO: 7745 - RNA, 23 nt, Artificial
  Chemically synthesized
aagugugaggagauggaggaagg

SEQ ID NO: 7746 - RNA, 23 nt, Artificial
  Chemically synthesized
caagugugaggagauggaggaag

SEQ ID NO: 7747 - RNA, 23 nt, Artificial
  Chemically synthesized
acaagugugaggagauggaggaa

SEQ ID NO: 7748 - RNA, 23 nt, Artificial
  Chemically synthesized
gauccaaauccgcuaaugaugga

SEQ ID NO: 7749 - RNA, 23 nt, Artificial
  Chemically synthesized
agauccaaauccgcuaaugaugg

SEQ ID NO: 7750 - RNA, 23 nt, Artificial
  Chemically synthesized
aagauccaaauccgcuaaugaug

SEQ ID NO: 7751 - RNA, 23 nt, Artificial
  Chemically synthesized
gaagauccaaauccgcuaaugau

SEQ ID NO: 7752 - RNA, 23 nt, Artificial
  Chemically synthesized
ggaagauccaaauccgcuaauga

SEQ ID NO: 7753 - RNA, 23 nt, Artificial
  Chemically synthesized
cguaaccaacuuaaccaggaaca

SEQ ID NO: 7754 - RNA, 23 nt, Artificial
  Chemically synthesized
ucguaaccaacuuaaccaggaac

SEQ ID NO: 7755 - RNA, 23 nt, Artificial
  Chemically synthesized
uucguaaccaacuuaaccaggaa

SEQ ID NO: 7756 - RNA, 23 nt, Artificial
  Chemically synthesized
gccugaacuuccuuuuggagcac

SEQ ID NO: 7757 - RNA, 23 nt, Artificial
  Chemically synthesized
cgccugaacuuccuuuuggagca

SEQ ID NO: 7758 - RNA, 23 nt, Artificial
  Chemically synthesized
ucgccugaacuuccuuuuggagc

SEQ ID NO: 7759 - RNA, 23 nt, Artificial
  Chemically synthesized
cucgccugaacuuccuuuuggag

SEQ ID NO: 7760 - RNA, 23 nt, Artificial
  Chemically synthesized
acucgccugaacuuccuuuugga

SEQ ID NO: 7761 - RNA, 23 nt, Artificial
  Chemically synthesized
cccagacagugaauucaaguucc

SEQ ID NO: 7762 - RNA, 23 nt, Artificial
  Chemically synthesized
ccccagacagugaauucaaguuc

SEQ ID NO: 7763 - RNA, 23 nt, Artificial
  Chemically synthesized
accccagacagugaauucaaguu

SEQ ID NO: 7764 - RNA, 23 nt, Artificial
  Chemically synthesized
gaccccagacagugaauucaagu

SEQ ID NO: 7765 - RNA, 23 nt, Artificial
  Chemically synthesized
ggaccccagacagugaauucaag

SEQ ID NO: 7766 - RNA, 23 nt, Artificial
  Chemically synthesized
agcaacgaacucagagaaaugua

SEQ ID NO: 7767 - RNA, 23 nt, Artificial
  Chemically synthesized
gagcaacgaacucagagaaaugu

SEQ ID NO: 7768 - RNA, 23 nt, Artificial
  Chemically synthesized
agagcaacgaacucagagaaaug

SEQ ID NO: 7769 - RNA, 23 nt, Artificial
  Chemically synthesized
aagagcaacgaacucagagaaau

SEQ ID NO: 7770 - RNA, 23 nt, Artificial
  Chemically synthesized
aggaacagcguuuacauuuucua

SEQ ID NO: 7771 - RNA, 23 nt, Artificial
  Chemically synthesized
aaggaacagcguuuacauuuucu

SEQ ID NO: 7772 - RNA, 23 nt, Artificial
  Chemically synthesized
uggaagauccaaauccgcuaaug

SEQ ID NO: 7773 - RNA, 23 nt, Artificial
  Chemically synthesized
auggaagauccaaauccgcuaau

SEQ ID NO: 7774 - RNA, 23 nt, Artificial
  Chemically synthesized
cauggaagauccaaauccgcuaa

SEQ ID NO: 7775 - RNA, 23 nt, Artificial
  Chemically synthesized
ucauggaagauccaaauccgcua

SEQ ID NO: 7776 - RNA, 23 nt, Artificial
  Chemically synthesized
guaugguaagcccguuuuaccuu

SEQ ID NO: 7777 - RNA, 23 nt, Artificial
  Chemically synthesized
uguaugguaagcccguuuuaccu

SEQ ID NO: 7778 - RNA, 23 nt, Artificial
  Chemically synthesized
guguaugguaagcccguuuuacc

SEQ ID NO: 7779 - RNA, 23 nt, Artificial
  Chemically synthesized
aguguaugguaagcccguuuuac

SEQ ID NO: 7780 - RNA, 23 nt, Artificial
  Chemically synthesized
caguguaugguaagcccguuuua

SEQ ID NO: 7781 - RNA, 23 nt, Artificial
  Chemically synthesized
auuuuugccucaaccauaagcga

SEQ ID NO: 7782 - RNA, 23 nt, Artificial
  Chemically synthesized
agcccaggagaacaagcugaaga

SEQ ID NO: 7783 - RNA, 23 nt, Artificial
  Chemically synthesized
aagcccaggagaacaagcugaag

SEQ ID NO: 7784 - RNA, 23 nt, Artificial
  Chemically synthesized
gaagcccaggagaacaagcugaa

SEQ ID NO: 7785 - RNA, 23 nt, Artificial
  Chemically synthesized
aaaugcugcucauggaagaucca

SEQ ID NO: 7786 - RNA, 23 nt, Artificial
  Chemically synthesized
caaaugcugcucauggaagaucc

SEQ ID NO: 7787 - RNA, 23 nt, Artificial
  Chemically synthesized
ucaaaugcugcucauggaagauc

SEQ ID NO: 7788 - RNA, 23 nt, Artificial
  Chemically synthesized
accauaagcgacauugaaacugc

SEQ ID NO: 7789 - RNA, 23 nt, Artificial
  Chemically synthesized
aggguugaucagcuuagucagca

SEQ ID NO: 7790 - RNA, 23 nt, Artificial
  Chemically synthesized
aaggguugaucagcuuagucagc

SEQ ID NO: 7791 - RNA, 23 nt, Artificial
  Chemically synthesized
uaaggguugaucagcuuagucag

SEQ ID NO: 7792 - RNA, 23 nt, Artificial
  Chemically synthesized
ccuucagaaaguacugagaaaga

SEQ ID NO: 7793 - RNA, 23 nt, Artificial
  Chemically synthesized
accuucagaaaguacugagaaag

SEQ ID NO: 7794 - RNA, 23 nt, Artificial
  Chemically synthesized
caccuucagaaaguacugagaaa

SEQ ID NO: 7795 - RNA, 23 nt, Artificial
  Chemically synthesized
ccaccuucagaaaguacugagaa

SEQ ID NO: 7796 - RNA, 23 nt, Artificial
  Chemically synthesized
gccaccuucagaaaguacugaga

SEQ ID NO: 7797 - RNA, 23 nt, Artificial
  Chemically synthesized
ugugcuguuuuccaggaaagcug

SEQ ID NO: 7798 - RNA, 23 nt, Artificial
  Chemically synthesized
uugugcuguuuuccaggaaagcu

SEQ ID NO: 7799 - RNA, 23 nt, Artificial
  Chemically synthesized
auugugcuguuuuccaggaaagc

SEQ ID NO: 7800 - RNA, 23 nt, Artificial
  Chemically synthesized
uauugugcuguuuuccaggaaag

SEQ ID NO: 7801 - RNA, 23 nt, Artificial
  Chemically synthesized
uuauugugcuguuuuccaggaaa

SEQ ID NO: 7802 - RNA, 23 nt, Artificial
  Chemically synthesized
cagugcucccaguuucuauaugg

SEQ ID NO: 7803 - RNA, 23 nt, Artificial
  Chemically synthesized
ccagugcucccaguuucuauaug

SEQ ID NO: 7804 - RNA, 23 nt, Artificial
  Chemically synthesized
uccagugcucccaguuucuauau

SEQ ID NO: 7805 - RNA, 23 nt, Artificial
  Chemically synthesized
auccagugcucccaguuucuaua

SEQ ID NO: 7806 - RNA, 23 nt, Artificial
  Chemically synthesized
cauccagugcucccaguuucuau

SEQ ID NO: 7807 - RNA, 23 nt, Artificial
  Chemically synthesized
cagcagucuauuucugaaaauga

SEQ ID NO: 7808 - RNA, 23 nt, Artificial
  Chemically synthesized
ggagccacuuaagagauuauugu

SEQ ID NO: 7809 - RNA, 23 nt, Artificial
  Chemically synthesized
aggagccacuuaagagauuauug

SEQ ID NO: 7810 - RNA, 23 nt, Artificial
  Chemically synthesized
caggagccacuuaagagauuauu

SEQ ID NO: 7811 - RNA, 23 nt, Artificial
  Chemically synthesized
ugcagaggaucaucuaugaggug

SEQ ID NO: 7812 - RNA, 23 nt, Artificial
  Chemically synthesized
gugcagaggaucaucuaugaggu

SEQ ID NO: 7813 - RNA, 23 nt, Artificial
  Chemically synthesized
ggugcagaggaucaucuaugagg

SEQ ID NO: 7814 - RNA, 23 nt, Artificial
  Chemically synthesized
uggugcagaggaucaucuaugag

SEQ ID NO: 7815 - RNA, 23 nt, Artificial
  Chemically synthesized
cuggugcagaggaucaucuauga

SEQ ID NO: 7816 - RNA, 23 nt, Artificial
  Chemically synthesized
gggugugaugaacaaaggugugg

SEQ ID NO: 7817 - RNA, 23 nt, Artificial
  Chemically synthesized
ugggugugaugaacaaaggugug

SEQ ID NO: 7818 - RNA, 23 nt, Artificial
  Chemically synthesized
cugggugugaugaacaaaggugu

SEQ ID NO: 7819 - RNA, 23 nt, Artificial
  Chemically synthesized
agcggaccaacuugaagaagccc

SEQ ID NO: 7820 - RNA, 23 nt, Artificial
  Chemically synthesized
aagcggaccaacuugaagaagcc

SEQ ID NO: 7821 - RNA, 23 nt, Artificial
  Chemically synthesized
caagcggaccaacuugaagaagc

SEQ ID NO: 7822 - RNA, 23 nt, Artificial
  Chemically synthesized
acaagcggaccaacuugaagaag

SEQ ID NO: 7823 - RNA, 23 nt, Artificial
  Chemically synthesized
aacaagcggaccaacuugaagaa

SEQ ID NO: 7824 - RNA, 23 nt, Artificial
  Chemically synthesized
gaaagagccugagcaggauggcc

SEQ ID NO: 7825 - RNA, 23 nt, Artificial
  Chemically synthesized
agaaagagccugagcaggauggc

SEQ ID NO: 7826 - RNA, 23 nt, Artificial
  Chemically synthesized
gagaaagagccugagcaggaugg

SEQ ID NO: 7827 - RNA, 23 nt, Artificial
  Chemically synthesized
ugagaaagagccugagcaggaug

SEQ ID NO: 7828 - RNA, 23 nt, Artificial
  Chemically synthesized
cugagaaagagccugagcaggau

SEQ ID NO: 7829 - RNA, 23 nt, Artificial
  Chemically synthesized
agcagucuauuucugaaaaugaa

SEQ ID NO: 7830 - RNA, 23 nt, Artificial
  Chemically synthesized
gguugggaauccacguguugaac

SEQ ID NO: 7831 - RNA, 23 nt, Artificial
  Chemically synthesized
ggguugggaauccacguguugaa

SEQ ID NO: 7832 - RNA, 23 nt, Artificial
  Chemically synthesized
gggguugggaauccacguguuga

SEQ ID NO: 7833 - RNA, 23 nt, Artificial
  Chemically synthesized
ugggguugggaauccacguguug

SEQ ID NO: 7834 - RNA, 23 nt, Artificial
  Chemically synthesized
augggguugggaauccacguguu

SEQ ID NO: 7835 - RNA, 23 nt, Artificial
  Chemically synthesized
augauggacaagcgaaucaguga

SEQ ID NO: 7836 - RNA, 23 nt, Artificial
  Chemically synthesized
caugauggacaagcgaaucagug

SEQ ID NO: 7837 - RNA, 23 nt, Artificial
  Chemically synthesized
aaaagaagcaggaaguacagacu

SEQ ID NO: 7838 - RNA, 23 nt, Artificial
  Chemically synthesized
gaaaagaagcaggaaguacagac

SEQ ID NO: 7839 - RNA, 23 nt, Artificial
  Chemically synthesized
gaccagcggcgguggaguuaaaa

SEQ ID NO: 7840 - RNA, 23 nt, Artificial
  Chemically synthesized
cuguacauaguguggugaagaaa

SEQ ID NO: 7841 - RNA, 23 nt, Artificial
  Chemically synthesized
acuguacauaguguggugaagaa

SEQ ID NO: 7842 - RNA, 23 nt, Artificial
  Chemically synthesized
gcacaauaaacccgucucacccc

SEQ ID NO: 7843 - RNA, 23 nt, Artificial
  Chemically synthesized
ugcacaauaaacccgucucaccc

SEQ ID NO: 7844 - RNA, 23 nt, Artificial
  Chemically synthesized
gugcacaauaaacccgucucacc

SEQ ID NO: 7845 - RNA, 23 nt, Artificial
  Chemically synthesized
ugugcacaauaaacccgucucac

SEQ ID NO: 7846 - RNA, 23 nt, Artificial
  Chemically synthesized
augugcacaauaaacccgucuca

SEQ ID NO: 7847 - RNA, 23 nt, Artificial
  Chemically synthesized
ggcucuauuuuucauguaugagu

SEQ ID NO: 7848 - RNA, 23 nt, Artificial
  Chemically synthesized
aggcucuauuuuucauguaugag

SEQ ID NO: 7849 - RNA, 23 nt, Artificial
  Chemically synthesized
uaggcucuauuuuucauguauga

SEQ ID NO: 7850 - RNA, 23 nt, Artificial
  Chemically synthesized
uuaggcucuauuuuucauguaug

SEQ ID NO: 7851 - RNA, 23 nt, Artificial
  Chemically synthesized
cuuaggcucuauuuuucauguau

SEQ ID NO: 7852 - RNA, 23 nt, Artificial
  Chemically synthesized
agauucguaaccaacuuaaccag

SEQ ID NO: 7853 - RNA, 23 nt, Artificial
  Chemically synthesized
cagauucguaaccaacuuaacca

SEQ ID NO: 7854 - RNA, 23 nt, Artificial
  Chemically synthesized
acagauucguaaccaacuuaacc

SEQ ID NO: 7855 - RNA, 23 nt, Artificial
  Chemically synthesized
uacagauucguaaccaacuuaac

SEQ ID NO: 7856 - RNA, 23 nt, Artificial
  Chemically synthesized
cuacagauucguaaccaacuuaa

SEQ ID NO: 7857 - RNA, 23 nt, Artificial
  Chemically synthesized
gaacaaagguguggcguaugcuc

SEQ ID NO: 7858 - RNA, 23 nt, Artificial
  Chemically synthesized
ugaacaaagguguggcguaugcu

SEQ ID NO: 7859 - RNA, 23 nt, Artificial
  Chemically synthesized
augaacaaagguguggcguaugc

SEQ ID NO: 7860 - RNA, 23 nt, Artificial
  Chemically synthesized
gaugaacaaagguguggcguaug

SEQ ID NO: 7861 - RNA, 23 nt, Artificial
  Chemically synthesized
ugaugaacaaagguguggcguau

SEQ ID NO: 7862 - RNA, 23 nt, Artificial
  Chemically synthesized
acuacagcaaaaucaugaacggc

SEQ ID NO: 7863 - RNA, 23 nt, Artificial
  Chemically synthesized
gacuacagcaaaaucaugaacgg

SEQ ID NO: 7864 - RNA, 23 nt, Artificial
  Chemically synthesized
cgacuacagcaaaaucaugaacg

SEQ ID NO: 7865 - RNA, 23 nt, Artificial
  Chemically synthesized
ucgacuacagcaaaaucaugaac

SEQ ID NO: 7866 - RNA, 23 nt, Artificial
  Chemically synthesized
gucgacuacagcaaaaucaugaa

SEQ ID NO: 7867 - RNA, 23 nt, Artificial
  Chemically synthesized
ggaagauuuaaagaaaggaaaac

SEQ ID NO: 7868 - RNA, 23 nt, Artificial
  Chemically synthesized
uggaagauuuaaagaaaggaaaa

SEQ ID NO: 7869 - RNA, 23 nt, Artificial
  Chemically synthesized
uuggaagauuuaaagaaaggaaa

SEQ ID NO: 7870 - RNA, 23 nt, Artificial
  Chemically synthesized
auuggaagauuuaaagaaaggaa

SEQ ID NO: 7871 - RNA, 23 nt, Artificial
  Chemically synthesized
aauuggaagauuuaaagaaagga

SEQ ID NO: 7872 - RNA, 23 nt, Artificial
  Chemically synthesized
gacgcuguguaaaugugcacaau

SEQ ID NO: 7873 - RNA, 23 nt, Artificial
  Chemically synthesized
ugacgcuguguaaaugugcacaa

SEQ ID NO: 7874 - RNA, 23 nt, Artificial
  Chemically synthesized
cugacgcuguguaaaugugcaca

SEQ ID NO: 7875 - RNA, 23 nt, Artificial
  Chemically synthesized
gcugacgcuguguaaaugugcac

SEQ ID NO: 7876 - RNA, 23 nt, Artificial
  Chemically synthesized
ugcugacgcuguguaaaugugca

SEQ ID NO: 7877 - RNA, 23 nt, Artificial
  Chemically synthesized
ccauuaacugggagagguacuuu

SEQ ID NO: 7878 - RNA, 23 nt, Artificial
  Chemically synthesized
cccauuaacugggagagguacuu

SEQ ID NO: 7879 - RNA, 23 nt, Artificial
  Chemically synthesized
gcccauuaacugggagagguacu

SEQ ID NO: 7880 - RNA, 23 nt, Artificial
  Chemically synthesized
ugcccauuaacugggagagguac

SEQ ID NO: 7881 - RNA, 23 nt, Artificial
  Chemically synthesized
uugcccauuaacugggagaggua

SEQ ID NO: 7882 - RNA, 23 nt, Artificial
  Chemically synthesized
caaaacuucagcagcagaaggaa

SEQ ID NO: 7883 - RNA, 23 nt, Artificial
  Chemically synthesized
ucaaaacuucagcagcagaagga

SEQ ID NO: 7884 - RNA, 23 nt, Artificial
  Chemically synthesized
uucaaaacuucagcagcagaagg

SEQ ID NO: 7885 - RNA, 23 nt, Artificial
  Chemically synthesized
auucaaaacuucagcagcagaag

SEQ ID NO: 7886 - RNA, 23 nt, Artificial
  Chemically synthesized
aauucaaaacuucagcagcagaa

SEQ ID NO: 7887 - RNA, 23 nt, Artificial
  Chemically synthesized
ggcuguauccacggaucaaaccc

SEQ ID NO: 7888 - RNA, 23 nt, Artificial
  Chemically synthesized
gggcuguauccacggaucaaacc

SEQ ID NO: 7889 - RNA, 23 nt, Artificial
  Chemically synthesized
ggggcuguauccacggaucaaac

SEQ ID NO: 7890 - RNA, 23 nt, Artificial
  Chemically synthesized
uggggcuguauccacggaucaaa

SEQ ID NO: 7891 - RNA, 23 nt, Artificial
  Chemically synthesized
cuggggcuguauccacggaucaa

SEQ ID NO: 7892 - RNA, 23 nt, Artificial
  Chemically synthesized
gccgccauuuuugccucaaccau

SEQ ID NO: 7893 - RNA, 23 nt, Artificial
  Chemically synthesized
cuuaaccaggaacaaaauucaaa

SEQ ID NO: 7894 - RNA, 23 nt, Artificial
  Chemically synthesized
caagaacuacagauucguaacca

SEQ ID NO: 7895 - RNA, 23 nt, Artificial
  Chemically synthesized
ccaagaacuacagauucguaacc

SEQ ID NO: 7896 - RNA, 23 nt, Artificial
  Chemically synthesized
accaagaacuacagauucguaac

SEQ ID NO: 7897 - RNA, 23 nt, Artificial
  Chemically synthesized
uaccaagaacuacagauucguaa

SEQ ID NO: 7898 - RNA, 23 nt, Artificial
  Chemically synthesized
guaccaagaacuacagauucgua

SEQ ID NO: 7899 - RNA, 23 nt, Artificial
  Chemically synthesized
aagaaaagugaacgcccuuguag

SEQ ID NO: 7900 - RNA, 23 nt, Artificial
  Chemically synthesized
gaagaaaagugaacgcccuugua

SEQ ID NO: 7901 - RNA, 23 nt, Artificial
  Chemically synthesized
cagacaagugugaggagauggag

SEQ ID NO: 7902 - RNA, 23 nt, Artificial
  Chemically synthesized
gcagacaagugugaggagaugga

SEQ ID NO: 7903 - RNA, 23 nt, Artificial
  Chemically synthesized
ugcagacaagugugaggagaugg

SEQ ID NO: 7904 - RNA, 23 nt, Artificial
  Chemically synthesized
cugcagacaagugugaggagaug

SEQ ID NO: 7905 - RNA, 23 nt, Artificial
  Chemically synthesized
gcugcagacaagugugaggagau

SEQ ID NO: 7906 - RNA, 23 nt, Artificial
  Chemically synthesized
gauuuuggugucaacgugaaugc

SEQ ID NO: 7907 - RNA, 23 nt, Artificial
  Chemically synthesized
ggauuuuggugucaacgugaaug

SEQ ID NO: 7908 - RNA, 23 nt, Artificial
  Chemically synthesized
uggauuuuggugucaacgugaau

SEQ ID NO: 7909 - RNA, 23 nt, Artificial
  Chemically synthesized
cuggauuuuggugucaacgugaa

SEQ ID NO: 7910 - RNA, 23 nt, Artificial
  Chemically synthesized
gcuggauuuuggugucaacguga

SEQ ID NO: 7911 - RNA, 23 nt, Artificial
  Chemically synthesized
gaguggugccgccauuuuugccu

SEQ ID NO: 7912 - RNA, 23 nt, Artificial
  Chemically synthesized
agaguggugccgccauuuuugcc

SEQ ID NO: 7913 - RNA, 23 nt, Artificial
  Chemically synthesized
gagaguggugccgccauuuuugc

SEQ ID NO: 7914 - RNA, 23 nt, Artificial
  Chemically synthesized
ggagaguggugccgccauuuuug

SEQ ID NO: 7915 - RNA, 23 nt, Artificial
  Chemically synthesized
uggagaguggugccgccauuuuu

SEQ ID NO: 7916 - RNA, 23 nt, Artificial
  Chemically synthesized
ccgucagcagcagucuauuucug

SEQ ID NO: 7917 - RNA, 23 nt, Artificial
  Chemically synthesized
gccgucagcagcagucuauuucu

SEQ ID NO: 7918 - RNA, 23 nt, Artificial
  Chemically synthesized
cgccgucagcagcagucuauuuc

SEQ ID NO: 7919 - RNA, 23 nt, Artificial
  Chemically synthesized
gcgccgucagcagcagucuauuu

SEQ ID NO: 7920 - RNA, 23 nt, Artificial
  Chemically synthesized
agcgccgucagcagcagucuauu

SEQ ID NO: 7921 - RNA, 23 nt, Artificial
  Chemically synthesized
auuuugccaauuacuauaaaucc

SEQ ID NO: 7922 - RNA, 23 nt, Artificial
  Chemically synthesized
uuggccgauguggacaauggaaa

SEQ ID NO: 7923 - RNA, 23 nt, Artificial
  Chemically synthesized
cuuggccgauguggacaauggaa

SEQ ID NO: 7924 - RNA, 23 nt, Artificial
  Chemically synthesized
ggcagcacacagcgccuuaaaua

SEQ ID NO: 7925 - RNA, 23 nt, Artificial
  Chemically synthesized
cggcagcacacagcgccuuaaau

SEQ ID NO: 7926 - RNA, 23 nt, Artificial
  Chemically synthesized
ccggcagcacacagcgccuuaaa

SEQ ID NO: 7927 - RNA, 23 nt, Artificial
  Chemically synthesized
aacucuuaaauaagcgcaacaug

SEQ ID NO: 7928 - RNA, 23 nt, Artificial
  Chemically synthesized
gaacucuuaaauaagcgcaacau

SEQ ID NO: 7929 - RNA, 23 nt, Artificial
  Chemically synthesized
ggaacucuuaaauaagcgcaaca

SEQ ID NO: 7930 - RNA, 23 nt, Artificial
  Chemically synthesized
aggaacucuuaaauaagcgcaac

SEQ ID NO: 7931 - RNA, 23 nt, Artificial
  Chemically synthesized
aaggaacucuuaaauaagcgcaa

SEQ ID NO: 7932 - RNA, 23 nt, Artificial
  Chemically synthesized
guguguaugccucccaguaccca

SEQ ID NO: 7933 - RNA, 23 nt, Artificial
  Chemically synthesized
aguguguaugccucccaguaccc

SEQ ID NO: 7934 - RNA, 23 nt, Artificial
  Chemically synthesized
caguguguaugccucccaguacc

SEQ ID NO: 7935 - RNA, 23 nt, Artificial
  Chemically synthesized
ccaguguguaugccucccaguac

SEQ ID NO: 7936 - RNA, 23 nt, Artificial
  Chemically synthesized
cccaguguguaugccucccagua

SEQ ID NO: 7937 - RNA, 23 nt, Artificial
  Chemically synthesized
acuuaaccaggaacaaaauucaa

SEQ ID NO: 7938 - RNA, 23 nt, Artificial
  Chemically synthesized
ggaaaagcugggugugaugaaca

SEQ ID NO: 7939 - RNA, 23 nt, Artificial
  Chemically synthesized
aggaaaagcugggugugaugaac

SEQ ID NO: 7940 - RNA, 23 nt, Artificial
  Chemically synthesized
caggaaaagcugggugugaugaa

SEQ ID NO: 7941 - RNA, 23 nt, Artificial
  Chemically synthesized
cucucaguauugccucaaaugcu

SEQ ID NO: 7942 - RNA, 23 nt, Artificial
  Chemically synthesized
ucucucaguauugccucaaaugc

SEQ ID NO: 7943 - RNA, 23 nt, Artificial
  Chemically synthesized
gucucucaguauugccucaaaug

SEQ ID NO: 7944 - RNA, 23 nt, Artificial
  Chemically synthesized
agucucucaguauugccucaaau

SEQ ID NO: 7945 - RNA, 23 nt, Artificial
  Chemically synthesized
cagucucucaguauugccucaaa

SEQ ID NO: 7946 - RNA, 23 nt, Artificial
  Chemically synthesized
gcagucuauuucugaaaaugaaa

SEQ ID NO: 7947 - RNA, 23 nt, Artificial
  Chemically synthesized
guguguacagacucacugaugca

SEQ ID NO: 7948 - RNA, 23 nt, Artificial
  Chemically synthesized
uguguguacagacucacugaugc

SEQ ID NO: 7949 - RNA, 23 nt, Artificial
  Chemically synthesized
auguguguacagacucacugaug

SEQ ID NO: 7950 - RNA, 23 nt, Artificial
  Chemically synthesized
aauguguguacagacucacugau

SEQ ID NO: 7951 - RNA, 23 nt, Artificial
  Chemically synthesized
aaauguguguacagacucacuga

SEQ ID NO: 7952 - RNA, 23 nt, Artificial
  Chemically synthesized
acuacagauucguaaccaacuua

SEQ ID NO: 7953 - RNA, 23 nt, Artificial
  Chemically synthesized
aacuacagauucguaaccaacuu

SEQ ID NO: 7954 - RNA, 23 nt, Artificial
  Chemically synthesized
gaacuacagauucguaaccaacu

SEQ ID NO: 7955 - RNA, 23 nt, Artificial
  Chemically synthesized
agaacuacagauucguaaccaac

SEQ ID NO: 7956 - RNA, 23 nt, Artificial
  Chemically synthesized
aagaacuacagauucguaaccaa

SEQ ID NO: 7957 - RNA, 23 nt, Artificial
  Chemically synthesized
cacugaggugugaauuguacgua

SEQ ID NO: 7958 - RNA, 23 nt, Artificial
  Chemically synthesized
ucacugaggugugaauuguacgu

SEQ ID NO: 7959 - RNA, 23 nt, Artificial
  Chemically synthesized
uucacugaggugugaauuguacg

SEQ ID NO: 7960 - RNA, 23 nt, Artificial
  Chemically synthesized
cuucacugaggugugaauuguac

SEQ ID NO: 7961 - RNA, 23 nt, Artificial
  Chemically synthesized
gcuucacugaggugugaauugua

SEQ ID NO: 7962 - RNA, 23 nt, Artificial
  Chemically synthesized
uaaaaagacuguaccaagaacua

SEQ ID NO: 7963 - RNA, 23 nt, Artificial
  Chemically synthesized
uuaaaaagacuguaccaagaacu

SEQ ID NO: 7964 - RNA, 23 nt, Artificial
  Chemically synthesized
guuaaaaagacuguaccaagaac

SEQ ID NO: 7965 - RNA, 23 nt, Artificial
  Chemically synthesized
aguuaaaaagacuguaccaagaa

SEQ ID NO: 7966 - RNA, 23 nt, Artificial
  Chemically synthesized
gaguuaaaaagacuguaccaaga

SEQ ID NO: 7967 - RNA, 23 nt, Artificial
  Chemically synthesized
gagguacuuucgccuccaaggac

SEQ ID NO: 7968 - RNA, 23 nt, Artificial
  Chemically synthesized
agagguacuuucgccuccaagga

SEQ ID NO: 7969 - RNA, 23 nt, Artificial
  Chemically synthesized
gagagguacuuucgccuccaagg

SEQ ID NO: 7970 - RNA, 23 nt, Artificial
  Chemically synthesized
ggagagguacuuucgccuccaag

SEQ ID NO: 7971 - RNA, 23 nt, Artificial
  Chemically synthesized
gggagagguacuuucgccuccaa

SEQ ID NO: 7972 - RNA, 23 nt, Artificial
  Chemically synthesized
aggagauggaggaaggcuacauc

SEQ ID NO: 7973 - RNA, 23 nt, Artificial
  Chemically synthesized
gaggagauggaggaaggcuacau

SEQ ID NO: 7974 - RNA, 23 nt, Artificial
  Chemically synthesized
ugaggagauggaggaaggcuaca

SEQ ID NO: 7975 - RNA, 23 nt, Artificial
  Chemically synthesized
gugaggagauggaggaaggcuac

SEQ ID NO: 7976 - RNA, 23 nt, Artificial
  Chemically synthesized
ugugaggagauggaggaaggcua

SEQ ID NO: 7977 - RNA, 23 nt, Artificial
  Chemically synthesized
gaaaaugaaaagcuucagaaauu

SEQ ID NO: 7978 - RNA, 23 nt, Artificial
  Chemically synthesized
ugaaaaugaaaagcuucagaaau

SEQ ID NO: 7979 - RNA, 23 nt, Artificial
  Chemically synthesized
cugaaaaugaaaagcuucagaaa

SEQ ID NO: 7980 - RNA, 23 nt, Artificial
  Chemically synthesized
ucugaaaaugaaaagcuucagaa

SEQ ID NO: 7981 - RNA, 23 nt, Artificial
  Chemically synthesized
uucugaaaaugaaaagcuucaga

SEQ ID NO: 7982 - RNA, 23 nt, Artificial
  Chemically synthesized
agugaauucaaguuccauauacu

SEQ ID NO: 7983 - RNA, 23 nt, Artificial
  Chemically synthesized
cagugaauucaaguuccauauac

SEQ ID NO: 7984 - RNA, 23 nt, Artificial
  Chemically synthesized
acagugaauucaaguuccauaua

SEQ ID NO: 7985 - RNA, 23 nt, Artificial
  Chemically synthesized
gacagugaauucaaguuccauau

SEQ ID NO: 7986 - RNA, 23 nt, Artificial
  Chemically synthesized
agacagugaauucaaguuccaua

SEQ ID NO: 7987 - RNA, 23 nt, Artificial
  Chemically synthesized
ccagucuuacaauggcaaauuga

SEQ ID NO: 7988 - RNA, 23 nt, Artificial
  Chemically synthesized
uccagucuuacaauggcaaauug

SEQ ID NO: 7989 - RNA, 23 nt, Artificial
  Chemically synthesized
uuccagucuuacaauggcaaauu

SEQ ID NO: 7990 - RNA, 23 nt, Artificial
  Chemically synthesized
guuccagucuuacaauggcaaau

SEQ ID NO: 7991 - RNA, 23 nt, Artificial
  Chemically synthesized
gguuccagucuuacaauggcaaa

SEQ ID NO: 7992 - RNA, 23 nt, Artificial
  Chemically synthesized
cagugaagacagaagcucuuacu

SEQ ID NO: 7993 - RNA, 23 nt, Artificial
  Chemically synthesized
ccagugaagacagaagcucuuac

SEQ ID NO: 7994 - RNA, 23 nt, Artificial
  Chemically synthesized
gccagugaagacagaagcucuua

SEQ ID NO: 7995 - RNA, 23 nt, Artificial
  Chemically synthesized
ugccagugaagacagaagcucuu

SEQ ID NO: 7996 - RNA, 23 nt, Artificial
  Chemically synthesized
uugccagugaagacagaagcucu

SEQ ID NO: 7997 - RNA, 23 nt, Artificial
  Chemically synthesized
gaggaaggcuacauccagugcuc

SEQ ID NO: 7998 - RNA, 23 nt, Artificial
  Chemically synthesized
ggaggaaggcuacauccagugcu

SEQ ID NO: 7999 - RNA, 23 nt, Artificial
  Chemically synthesized
uggaggaaggcuacauccagugc

SEQ ID NO: 8000 - RNA, 23 nt, Artificial
  Chemically synthesized
auggaggaaggcuacauccagug

SEQ ID NO: 8001 - RNA, 23 nt, Artificial
  Chemically synthesized
gauggaggaaggcuacauccagu

SEQ ID NO: 8002 - RNA, 23 nt, Artificial
  Chemically synthesized
cauugaaacugcugcagacaagu

SEQ ID NO: 8003 - RNA, 23 nt, Artificial
  Chemically synthesized
acauugaaacugcugcagacaag

SEQ ID NO: 8004 - RNA, 23 nt, Artificial
  Chemically synthesized
gacauugaaacugcugcagacaa

SEQ ID NO: 8005 - RNA, 23 nt, Artificial
  Chemically synthesized
cacacuucccacacaugauccuu

SEQ ID NO: 8006 - RNA, 23 nt, Artificial
  Chemically synthesized
ucacacuucccacacaugauccu

SEQ ID NO: 8007 - RNA, 23 nt, Artificial
  Chemically synthesized
cucacacuucccacacaugaucc

SEQ ID NO: 8008 - RNA, 23 nt, Artificial
  Chemically synthesized
ucucacacuucccacacaugauc

SEQ ID NO: 8009 - RNA, 23 nt, Artificial
  Chemically synthesized
uucucacacuucccacacaugau

SEQ ID NO: 8010 - RNA, 23 nt, Artificial
  Chemically synthesized
aaaauguguguacagacucacug

SEQ ID NO: 8011 - RNA, 23 nt, Artificial
  Chemically synthesized
aaaaauguguguacagacucacu

SEQ ID NO: 8012 - RNA, 23 nt, Artificial
  Chemically synthesized
uaaaaauguguguacagacucac

SEQ ID NO: 8013 - RNA, 23 nt, Artificial
  Chemically synthesized
guaaaaauguguguacagacuca

SEQ ID NO: 8014 - RNA, 23 nt, Artificial
  Chemically synthesized
cacuguagcccaucaccuuggag

SEQ ID NO: 8015 - RNA, 23 nt, Artificial
  Chemically synthesized
gcacuguagcccaucaccuugga

SEQ ID NO: 8016 - RNA, 23 nt, Artificial
  Chemically synthesized
agcacuguagcccaucaccuugg

SEQ ID NO: 8017 - RNA, 23 nt, Artificial
  Chemically synthesized
cagcacuguagcccaucaccuug

SEQ ID NO: 8018 - RNA, 23 nt, Artificial
  Chemically synthesized
gcagcacuguagcccaucaccuu

SEQ ID NO: 8019 - RNA, 23 nt, Artificial
  Chemically synthesized
ucgacaagcucccuggaaaggag

SEQ ID NO: 8020 - RNA, 23 nt, Artificial
  Chemically synthesized
gucgacaagcucccuggaaagga

SEQ ID NO: 8021 - RNA, 23 nt, Artificial
  Chemically synthesized
ggucgacaagcucccuggaaagg

SEQ ID NO: 8022 - RNA, 23 nt, Artificial
  Chemically synthesized
gggucgacaagcucccuggaaag

SEQ ID NO: 8023 - RNA, 23 nt, Artificial
  Chemically synthesized
ugggucgacaagcucccuggaaa

SEQ ID NO: 8024 - RNA, 23 nt, Artificial
  Chemically synthesized
cagacccaagagcaacgaacuca

SEQ ID NO: 8025 - RNA, 23 nt, Artificial
  Chemically synthesized
ucagacccaagagcaacgaacuc

SEQ ID NO: 8026 - RNA, 23 nt, Artificial
  Chemically synthesized
gucagacccaagagcaacgaacu

SEQ ID NO: 8027 - RNA, 23 nt, Artificial
  Chemically synthesized
cgucagacccaagagcaacgaac

SEQ ID NO: 8028 - RNA, 23 nt, Artificial
  Chemically synthesized
ccgucagacccaagagcaacgaa

SEQ ID NO: 8029 - RNA, 23 nt, Artificial
  Chemically synthesized
cuaugggaaaaaaauucagcuga

SEQ ID NO: 8030 - RNA, 23 nt, Artificial
  Chemically synthesized
ugaagaaaagugaacgcccuugu

SEQ ID NO: 8031 - RNA, 23 nt, Artificial
  Chemically synthesized
gugaagaaaagugaacgcccuug

SEQ ID NO: 8032 - RNA, 23 nt, Artificial
  Chemically synthesized
ggugaagaaaagugaacgcccuu

SEQ ID NO: 8033 - RNA, 23 nt, Artificial
  Chemically synthesized
uggugaagaaaagugaacgcccu

SEQ ID NO: 8034 - RNA, 23 nt, Artificial
  Chemically synthesized
cgaacacucgccugaacuuccuu

SEQ ID NO: 8035 - RNA, 23 nt, Artificial
  Chemically synthesized
gcgaacacucgccugaacuuccu

SEQ ID NO: 8036 - RNA, 23 nt, Artificial
  Chemically synthesized
agcgaacacucgccugaacuucc

SEQ ID NO: 8037 - RNA, 23 nt, Artificial
  Chemically synthesized
cagcgaacacucgccugaacuuc

SEQ ID NO: 8038 - RNA, 23 nt, Artificial
  Chemically synthesized
acagcgaacacucgccugaacuu

SEQ ID NO: 8039 - RNA, 23 nt, Artificial
  Chemically synthesized
cccugcaagcucaaauucaguuc

SEQ ID NO: 8040 - RNA, 23 nt, Artificial
  Chemically synthesized
ccccugcaagcucaaauucaguu

SEQ ID NO: 8041 - RNA, 23 nt, Artificial
  Chemically synthesized
accccugcaagcucaaauucagu

SEQ ID NO: 8042 - RNA, 23 nt, Artificial
  Chemically synthesized
caccccugcaagcucaaauucag

SEQ ID NO: 8043 - RNA, 23 nt, Artificial
  Chemically synthesized
ucaccccugcaagcucaaauuca

SEQ ID NO: 8044 - RNA, 23 nt, Artificial
  Chemically synthesized
caccaaaggagccucuguaugga

SEQ ID NO: 8045 - RNA, 23 nt, Artificial
  Chemically synthesized
ucaccaaaggagccucuguaugg

SEQ ID NO: 8046 - RNA, 23 nt, Artificial
  Chemically synthesized
aucaccaaaggagccucuguaug

SEQ ID NO: 8047 - RNA, 23 nt, Artificial
  Chemically synthesized
caucaccaaaggagccucuguau

SEQ ID NO: 8048 - RNA, 23 nt, Artificial
  Chemically synthesized
ucaucaccaaaggagccucugua

SEQ ID NO: 8049 - RNA, 23 nt, Artificial
  Chemically synthesized
caaaaucaugaacggcaaucugu

SEQ ID NO: 8050 - RNA, 23 nt, Artificial
  Chemically synthesized
ccuuaggcucuauuuuucaugua

SEQ ID NO: 8051 - RNA, 23 nt, Artificial
  Chemically synthesized
cccuuaggcucuauuuuucaugu

SEQ ID NO: 8052 - RNA, 23 nt, Artificial
  Chemically synthesized
gcccuuaggcucuauuuuucaug

SEQ ID NO: 8053 - RNA, 23 nt, Artificial
  Chemically synthesized
ggcccuuaggcucuauuuuucau

SEQ ID NO: 8054 - RNA, 23 nt, Artificial
  Chemically synthesized
aggcccuuaggcucuauuuuuca

SEQ ID NO: 8055 - RNA, 23 nt, Artificial
  Chemically synthesized
caucagaugccaaugauaaugag

SEQ ID NO: 8056 - RNA, 23 nt, Artificial
  Chemically synthesized
ucaucagaugccaaugauaauga

SEQ ID NO: 8057 - RNA, 23 nt, Artificial
  Chemically synthesized
gucaucagaugccaaugauaaug

SEQ ID NO: 8058 - RNA, 23 nt, Artificial
  Chemically synthesized
cgucaucagaugccaaugauaau

SEQ ID NO: 8059 - RNA, 23 nt, Artificial
  Chemically synthesized
ccgucaucagaugccaaugauaa

SEQ ID NO: 8060 - RNA, 23 nt, Artificial
  Chemically synthesized
aggacgaaagcgagacugagugg

SEQ ID NO: 8061 - RNA, 23 nt, Artificial
  Chemically synthesized
aaggacgaaagcgagacugagug

SEQ ID NO: 8062 - RNA, 23 nt, Artificial
  Chemically synthesized
caaggacgaaagcgagacugagu

SEQ ID NO: 8063 - RNA, 23 nt, Artificial
  Chemically synthesized
gcaaggacgaaagcgagacugag

SEQ ID NO: 8064 - RNA, 23 nt, Artificial
  Chemically synthesized
cgcaaggacgaaagcgagacuga

SEQ ID NO: 8065 - RNA, 23 nt, Artificial
  Chemically synthesized
aagccacaccaccuaagaauuac

SEQ ID NO: 8066 - RNA, 23 nt, Artificial
  Chemically synthesized
caagccacaccaccuaagaauua

SEQ ID NO: 8067 - RNA, 23 nt, Artificial
  Chemically synthesized
gcaagccacaccaccuaagaauu

SEQ ID NO: 8068 - RNA, 23 nt, Artificial
  Chemically synthesized
agcaagccacaccaccuaagaau

SEQ ID NO: 8069 - RNA, 23 nt, Artificial
  Chemically synthesized
cagcaagccacaccaccuaagaa

SEQ ID NO: 8070 - RNA, 23 nt, Artificial
  Chemically synthesized
cugucaugcugcucagugugguu

SEQ ID NO: 8071 - RNA, 23 nt, Artificial
  Chemically synthesized
ccugucaugcugcucaguguggu

SEQ ID NO: 8072 - RNA, 23 nt, Artificial
  Chemically synthesized
gccugucaugcugcucagugugg

SEQ ID NO: 8073 - RNA, 23 nt, Artificial
  Chemically synthesized
agccugucaugcugcucagugug

SEQ ID NO: 8074 - RNA, 23 nt, Artificial
  Chemically synthesized
cagccugucaugcugcucagugu

SEQ ID NO: 8075 - RNA, 23 nt, Artificial
  Chemically synthesized
uuaaggguugaucagcuuaguca

SEQ ID NO: 8076 - RNA, 23 nt, Artificial
  Chemically synthesized
gacuguacauaguguggugaaga

SEQ ID NO: 8077 - RNA, 23 nt, Artificial
  Chemically synthesized
ugacuguacauaguguggugaag

SEQ ID NO: 8078 - RNA, 23 nt, Artificial
  Chemically synthesized
cugacuguacauaguguggugaa

SEQ ID NO: 8079 - RNA, 23 nt, Artificial
  Chemically synthesized
gaaucagugaacugcgugaacgu

SEQ ID NO: 8080 - RNA, 23 nt, Artificial
  Chemically synthesized
cgaaucagugaacugcgugaacg

SEQ ID NO: 8081 - RNA, 23 nt, Artificial
  Chemically synthesized
gcgaaucagugaacugcgugaac

SEQ ID NO: 8082 - RNA, 23 nt, Artificial
  Chemically synthesized
agcgaaucagugaacugcgugaa

SEQ ID NO: 8083 - RNA, 23 nt, Artificial
  Chemically synthesized
aagcgaaucagugaacugcguga

SEQ ID NO: 8084 - RNA, 23 nt, Artificial
  Chemically synthesized
gaacucagagaaauguaauaaau

SEQ ID NO: 8085 - RNA, 23 nt, Artificial
  Chemically synthesized
guuaaagcaguguaugguaagcc

SEQ ID NO: 8086 - RNA, 23 nt, Artificial
  Chemically synthesized
aguuaaagcaguguaugguaagc

SEQ ID NO: 8087 - RNA, 23 nt, Artificial
  Chemically synthesized
caguuaaagcaguguaugguaag

SEQ ID NO: 8088 - RNA, 23 nt, Artificial
  Chemically synthesized
ucaguuaaagcaguguaugguaa

SEQ ID NO: 8089 - RNA, 23 nt, Artificial
  Chemically synthesized
gucaguuaaagcaguguauggua

SEQ ID NO: 8090 - RNA, 23 nt, Artificial
  Chemically synthesized
agugcucccaguuucuauauggg

SEQ ID NO: 8091 - RNA, 23 nt, Artificial
  Chemically synthesized
ucgugcaaugagaggacaagucg

SEQ ID NO: 8092 - RNA, 23 nt, Artificial
  Chemically synthesized
uucgugcaaugagaggacaaguc

SEQ ID NO: 8093 - RNA, 23 nt, Artificial
  Chemically synthesized
auucgugcaaugagaggacaagu

SEQ ID NO: 8094 - RNA, 23 nt, Artificial
  Chemically synthesized
aauucgugcaaugagaggacaag

SEQ ID NO: 8095 - RNA, 23 nt, Artificial
  Chemically synthesized
aaauucgugcaaugagaggacaa

SEQ ID NO: 8096 - RNA, 23 nt, Artificial
  Chemically synthesized
cagacagugaauucaaguuccau

SEQ ID NO: 8097 - RNA, 23 nt, Artificial
  Chemically synthesized
cuguuuggugccugaaggauggc

SEQ ID NO: 8098 - RNA, 23 nt, Artificial
  Chemically synthesized
gcuguuuggugccugaaggaugg

SEQ ID NO: 8099 - RNA, 23 nt, Artificial
  Chemically synthesized
ggcuguuuggugccugaaggaug

SEQ ID NO: 8100 - RNA, 23 nt, Artificial
  Chemically synthesized
gggcuguuuggugccugaaggau

SEQ ID NO: 8101 - RNA, 23 nt, Artificial
  Chemically synthesized
ggggcuguuuggugccugaagga

SEQ ID NO: 8102 - RNA, 23 nt, Artificial
  Chemically synthesized
cgcuaaugauggaaacuggccaa

SEQ ID NO: 8103 - RNA, 23 nt, Artificial
  Chemically synthesized
ccgcuaaugauggaaacuggcca

SEQ ID NO: 8104 - RNA, 23 nt, Artificial
  Chemically synthesized
uccgcuaaugauggaaacuggcc

SEQ ID NO: 8105 - RNA, 23 nt, Artificial
  Chemically synthesized
auccgcuaaugauggaaacuggc

SEQ ID NO: 8106 - RNA, 23 nt, Artificial
  Chemically synthesized
aauccgcuaaugauggaaacugg

SEQ ID NO: 8107 - RNA, 23 nt, Artificial
  Chemically synthesized
gcuguauccacggaucaaacccc

SEQ ID NO: 8108 - RNA, 23 nt, Artificial
  Chemically synthesized
ugccucaaccauaagcgacauug

SEQ ID NO: 8109 - RNA, 23 nt, Artificial
  Chemically synthesized
uugccucaaccauaagcgacauu

SEQ ID NO: 8110 - RNA, 23 nt, Artificial
  Chemically synthesized
uuugccucaaccauaagcgacau

SEQ ID NO: 8111 - RNA, 23 nt, Artificial
  Chemically synthesized
uuuugccucaaccauaagcgaca

SEQ ID NO: 8112 - RNA, 23 nt, Artificial
  Chemically synthesized
guucagugccauguuccaggaaa

SEQ ID NO: 8113 - RNA, 23 nt, Artificial
  Chemically synthesized
gaaaagcuucagaaauugaaaga

SEQ ID NO: 8114 - RNA, 23 nt, Artificial
  Chemically synthesized
ugaaaagcuucagaaauugaaag

SEQ ID NO: 8115 - RNA, 23 nt, Artificial
  Chemically synthesized
augaaaagcuucagaaauugaaa

SEQ ID NO: 8116 - RNA, 23 nt, Artificial
  Chemically synthesized
aaugaaaagcuucagaaauugaa

SEQ ID NO: 8117 - RNA, 23 nt, Artificial
  Chemically synthesized
aaaugaaaagcuucagaaauuga

SEQ ID NO: 8118 - RNA, 23 nt, Artificial
  Chemically synthesized
caagcugaagaaaauucgugcaa

SEQ ID NO: 8119 - RNA, 23 nt, Artificial
  Chemically synthesized
acaagcugaagaaaauucgugca

SEQ ID NO: 8120 - RNA, 23 nt, Artificial
  Chemically synthesized
aacaagcugaagaaaauucgugc

SEQ ID NO: 8121 - RNA, 23 nt, Artificial
  Chemically synthesized
gaacaagcugaagaaaauucgug

SEQ ID NO: 8122 - RNA, 23 nt, Artificial
  Chemically synthesized
ccacaccaccuaagaauuaccag

SEQ ID NO: 8123 - RNA, 23 nt, Artificial
  Chemically synthesized
gccacaccaccuaagaauuacca

SEQ ID NO: 8124 - RNA, 23 nt, Artificial
  Chemically synthesized
agccacaccaccuaagaauuacc

SEQ ID NO: 8125 - RNA, 23 nt, Artificial
  Chemically synthesized
caccgaaucggacacucauccuu

SEQ ID NO: 8126 - RNA, 23 nt, Artificial
  Chemically synthesized
ucaccgaaucggacacucauccu

SEQ ID NO: 8127 - RNA, 23 nt, Artificial
  Chemically synthesized
gucaccgaaucggacacucaucc

SEQ ID NO: 8128 - RNA, 23 nt, Artificial
  Chemically synthesized
cgucaccgaaucggacacucauc

SEQ ID NO: 8129 - RNA, 23 nt, Artificial
  Chemically synthesized
ccgucaccgaaucggacacucau

SEQ ID NO: 8130 - RNA, 23 nt, Artificial
  Chemically synthesized
gugaugaacaaagguguggcgua

SEQ ID NO: 8131 - RNA, 23 nt, Artificial
  Chemically synthesized
gucucuaugggaaaaaaauucag

SEQ ID NO: 8132 - RNA, 23 nt, Artificial
  Chemically synthesized
ugggaauccacguguugaacuua

SEQ ID NO: 8133 - RNA, 23 nt, Artificial
  Chemically synthesized
uugggaauccacguguugaacuu

SEQ ID NO: 8134 - RNA, 23 nt, Artificial
  Chemically synthesized
guugggaauccacguguugaacu

SEQ ID NO: 8135 - RNA, 23 nt, Artificial
  Chemically synthesized
ccauacccuuugaucauaugaug

SEQ ID NO: 8136 - RNA, 23 nt, Artificial
  Chemically synthesized
cccauacccuuugaucauaugau

SEQ ID NO: 8137 - RNA, 23 nt, Artificial
  Chemically synthesized
ucccauacccuuugaucauauga

SEQ ID NO: 8138 - RNA, 23 nt, Artificial
  Chemically synthesized
gucccauacccuuugaucauaug

SEQ ID NO: 8139 - RNA, 23 nt, Artificial
  Chemically synthesized
cgucccauacccuuugaucauau

SEQ ID NO: 8140 - RNA, 23 nt, Artificial
  Chemically synthesized
gagaguucgaucuggugcagagg

SEQ ID NO: 8141 - RNA, 23 nt, Artificial
  Chemically synthesized
ggagaguucgaucuggugcagag

SEQ ID NO: 8142 - RNA, 23 nt, Artificial
  Chemically synthesized
aggagaguucgaucuggugcaga

SEQ ID NO: 8143 - RNA, 23 nt, Artificial
  Chemically synthesized
aaggagaguucgaucuggugcag

SEQ ID NO: 8144 - RNA, 23 nt, Artificial
  Chemically synthesized
gaaggagaguucgaucuggugca

SEQ ID NO: 8145 - RNA, 23 nt, Artificial
  Chemically synthesized
guuuuaccuucggguucaaccuc

SEQ ID NO: 8146 - RNA, 23 nt, Artificial
  Chemically synthesized
cguuuuaccuucggguucaaccu

SEQ ID NO: 8147 - RNA, 23 nt, Artificial
  Chemically synthesized
ccguuuuaccuucggguucaacc

SEQ ID NO: 8148 - RNA, 23 nt, Artificial
  Chemically synthesized
cccguuuuaccuucggguucaac

SEQ ID NO: 8149 - RNA, 23 nt, Artificial
  Chemically synthesized
gcccguuuuaccuucggguucaa

SEQ ID NO: 8150 - RNA, 23 nt, Artificial
  Chemically synthesized
guaugagucguguguaauuuaug

SEQ ID NO: 8151 - RNA, 23 nt, Artificial
  Chemically synthesized
uguaugagucguguguaauuuau

SEQ ID NO: 8152 - RNA, 23 nt, Artificial
  Chemically synthesized
agcuaugggacauacccaagucc

SEQ ID NO: 8153 - RNA, 23 nt, Artificial
  Chemically synthesized
aagcuaugggacauacccaaguc

SEQ ID NO: 8154 - RNA, 23 nt, Artificial
  Chemically synthesized
caagcuaugggacauacccaagu

SEQ ID NO: 8155 - RNA, 23 nt, Artificial
  Chemically synthesized
ccaagcuaugggacauacccaag

SEQ ID NO: 8156 - RNA, 23 nt, Artificial
  Chemically synthesized
uccaagcuaugggacauacccaa

SEQ ID NO: 8157 - RNA, 23 nt, Artificial
  Chemically synthesized
gccuuaaauaagucaguuaaagc

SEQ ID NO: 8158 - RNA, 23 nt, Artificial
  Chemically synthesized
cgccuuaaauaagucaguuaaag

SEQ ID NO: 8159 - RNA, 23 nt, Artificial
  Chemically synthesized
gcgccuuaaauaagucaguuaaa

SEQ ID NO: 8160 - RNA, 23 nt, Artificial
  Chemically synthesized
agcgccuuaaauaagucaguuaa

SEQ ID NO: 8161 - RNA, 23 nt, Artificial
  Chemically synthesized
cagcgccuuaaauaagucaguua

SEQ ID NO: 8162 - RNA, 23 nt, Artificial
  Chemically synthesized
agcuaccaggagccacuuaagag

SEQ ID NO: 8163 - RNA, 23 nt, Artificial
  Chemically synthesized
cagcuaccaggagccacuuaaga

SEQ ID NO: 8164 - RNA, 23 nt, Artificial
  Chemically synthesized
ccagcuaccaggagccacuuaag

SEQ ID NO: 8165 - RNA, 23 nt, Artificial
  Chemically synthesized
gccagcuaccaggagccacuuaa

SEQ ID NO: 8166 - RNA, 23 nt, Artificial
  Chemically synthesized
auugaaagaacgaguugaagccc

SEQ ID NO: 8167 - RNA, 23 nt, Artificial
  Chemically synthesized
aauugaaagaacgaguugaagcc

SEQ ID NO: 8168 - RNA, 23 nt, Artificial
  Chemically synthesized
aaauugaaagaacgaguugaagc

SEQ ID NO: 8169 - RNA, 23 nt, Artificial
  Chemically synthesized
gaaauugaaagaacgaguugaag

SEQ ID NO: 8170 - RNA, 23 nt, Artificial
  Chemically synthesized
agaaauugaaagaacgaguugaa

SEQ ID NO: 8171 - RNA, 23 nt, Artificial
  Chemically synthesized
ccccgcgaugaugccgaugauau

SEQ ID NO: 8172 - RNA, 23 nt, Artificial
  Chemically synthesized
cagcguccacaaugugaauccua

SEQ ID NO: 8173 - RNA, 23 nt, Artificial
  Chemically synthesized
acagcguccacaaugugaauccu

SEQ ID NO: 8174 - RNA, 23 nt, Artificial
  Chemically synthesized
gacagcguccacaaugugaaucc

SEQ ID NO: 8175 - RNA, 23 nt, Artificial
  Chemically synthesized
agacagcguccacaaugugaauc

SEQ ID NO: 8176 - RNA, 23 nt, Artificial
  Chemically synthesized
cagacagcguccacaaugugaau

SEQ ID NO: 8177 - RNA, 23 nt, Artificial
  Chemically synthesized
guaauaaauguaccuggagaaaa

SEQ ID NO: 8178 - RNA, 23 nt, Artificial
  Chemically synthesized
guugccaaggaacagcguuuaca

SEQ ID NO: 8179 - RNA, 23 nt, Artificial
  Chemically synthesized
gacaagugugaggagauggagga

SEQ ID NO: 8180 - RNA, 23 nt, Artificial
  Chemically synthesized
agacaagugugaggagauggagg

SEQ ID NO: 8181 - RNA, 23 nt, Artificial
  Chemically synthesized
cuccauguaccuccagcaagcca

SEQ ID NO: 8182 - RNA, 23 nt, Artificial
  Chemically synthesized
acuccauguaccuccagcaagcc

SEQ ID NO: 8183 - RNA, 23 nt, Artificial
  Chemically synthesized
uacuccauguaccuccagcaagc

SEQ ID NO: 8184 - RNA, 23 nt, Artificial
  Chemically synthesized
auacuccauguaccuccagcaag

SEQ ID NO: 8185 - RNA, 23 nt, Artificial
  Chemically synthesized
uauacuccauguaccuccagcaa

SEQ ID NO: 8186 - RNA, 23 nt, Artificial
  Chemically synthesized
aagacuguaccaagaacuacaga

SEQ ID NO: 8187 - RNA, 23 nt, Artificial
  Chemically synthesized
aaagacuguaccaagaacuacag

SEQ ID NO: 8188 - RNA, 23 nt, Artificial
  Chemically synthesized
aaaagacuguaccaagaacuaca

SEQ ID NO: 8189 - RNA, 23 nt, Artificial
  Chemically synthesized
aaaaagacuguaccaagaacuac

SEQ ID NO: 8190 - RNA, 23 nt, Artificial
  Chemically synthesized
ugcugcagacaagugugaggaga

SEQ ID NO: 8191 - RNA, 23 nt, Artificial
  Chemically synthesized
ccaaggacugaauuuugccaauu

SEQ ID NO: 8192 - RNA, 23 nt, Artificial
  Chemically synthesized
uccaaggacugaauuuugccaau

SEQ ID NO: 8193 - RNA, 23 nt, Artificial
  Chemically synthesized
gcugcagcuagaaaauggucuua

SEQ ID NO: 8194 - RNA, 23 nt, Artificial
  Chemically synthesized
agcugcagcuagaaaauggucuu

SEQ ID NO: 8195 - RNA, 23 nt, Artificial
  Chemically synthesized
aagcugcagcuagaaaauggucu

SEQ ID NO: 8196 - RNA, 23 nt, Artificial
  Chemically synthesized
aaagcugcagcuagaaaaugguc

SEQ ID NO: 8197 - RNA, 23 nt, Artificial
  Chemically synthesized
gauguggacaauggaaacaccaa

SEQ ID NO: 8198 - RNA, 23 nt, Artificial
  Chemically synthesized
ccaaauaaauacccacuuucaaa

SEQ ID NO: 8199 - RNA, 23 nt, Artificial
  Chemically synthesized
uccaaauaaauacccacuuucaa

SEQ ID NO: 8200 - RNA, 23 nt, Artificial
  Chemically synthesized
auccaaauaaauacccacuuuca

SEQ ID NO: 8201 - RNA, 23 nt, Artificial
  Chemically synthesized
aauccaaauaaauacccacuuuc

SEQ ID NO: 8202 - RNA, 23 nt, Artificial
  Chemically synthesized
aaauccaaauaaauacccacuuu

SEQ ID NO: 8203 - RNA, 23 nt, Artificial
  Chemically synthesized
guugcugcccaguguguaugccu

SEQ ID NO: 8204 - RNA, 23 nt, Artificial
  Chemically synthesized
uguugcugcccaguguguaugcc

SEQ ID NO: 8205 - RNA, 23 nt, Artificial
  Chemically synthesized
guguugcugcccaguguguaugc

SEQ ID NO: 8206 - RNA, 23 nt, Artificial
  Chemically synthesized
aguguugcugcccaguguguaug

SEQ ID NO: 8207 - RNA, 23 nt, Artificial
  Chemically synthesized
caguguugcugcccaguguguau

SEQ ID NO: 8208 - RNA, 23 nt, Artificial
  Chemically synthesized
gcaggaaaagcugggugugauga

SEQ ID NO: 8209 - RNA, 23 nt, Artificial
  Chemically synthesized
ugcaggaaaagcugggugugaug

SEQ ID NO: 8210 - RNA, 23 nt, Artificial
  Chemically synthesized
gugcaggaaaagcugggugugau

SEQ ID NO: 8211 - RNA, 23 nt, Artificial
  Chemically synthesized
gauguuguagaauuuugcaagga

SEQ ID NO: 8212 - RNA, 23 nt, Artificial
  Chemically synthesized
agauguuguagaauuuugcaagg

SEQ ID NO: 8213 - RNA, 23 nt, Artificial
  Chemically synthesized
gagauguuguagaauuuugcaag

SEQ ID NO: 8214 - RNA, 23 nt, Artificial
  Chemically synthesized
cgagauguuguagaauuuugcaa

SEQ ID NO: 8215 - RNA, 23 nt, Artificial
  Chemically synthesized
ucgagauguuguagaauuuugca

SEQ ID NO: 8216 - RNA, 23 nt, Artificial
  Chemically synthesized
aacugagaacagugaacaaggug

SEQ ID NO: 8217 - RNA, 23 nt, Artificial
  Chemically synthesized
caacugagaacagugaacaaggu

SEQ ID NO: 8218 - RNA, 23 nt, Artificial
  Chemically synthesized
ccaacugagaacagugaacaagg

SEQ ID NO: 8219 - RNA, 23 nt, Artificial
  Chemically synthesized
cccaacugagaacagugaacaag

SEQ ID NO: 8220 - RNA, 23 nt, Artificial
  Chemically synthesized
ccccaacugagaacagugaacaa

SEQ ID NO: 8221 - RNA, 23 nt, Artificial
  Chemically synthesized
gagccacuuaagagauuauugug

SEQ ID NO: 8222 - RNA, 23 nt, Artificial
  Chemically synthesized
uguaaaaauguguguacagacuc

SEQ ID NO: 8223 - RNA, 23 nt, Artificial
  Chemically synthesized
auguaaaaauguguguacagacu

SEQ ID NO: 8224 - RNA, 23 nt, Artificial
  Chemically synthesized
uauguaaaaauguguguacagac

SEQ ID NO: 8225 - RNA, 23 nt, Artificial
  Chemically synthesized
uuauguaaaaauguguguacaga

SEQ ID NO: 8226 - RNA, 23 nt, Artificial
  Chemically synthesized
ggaguuaaaaagacuguaccaag

SEQ ID NO: 8227 - RNA, 23 nt, Artificial
  Chemically synthesized
uggaguuaaaaagacuguaccaa

SEQ ID NO: 8228 - RNA, 23 nt, Artificial
  Chemically synthesized
guggaguuaaaaagacuguacca

SEQ ID NO: 8229 - RNA, 23 nt, Artificial
  Chemically synthesized
uucuugagcaacaaugaacagau

SEQ ID NO: 8230 - RNA, 23 nt, Artificial
  Chemically synthesized
uuucuugagcaacaaugaacaga

SEQ ID NO: 8231 - RNA, 23 nt, Artificial
  Chemically synthesized
uuuucuugagcaacaaugaacag

SEQ ID NO: 8232 - RNA, 23 nt, Artificial
  Chemically synthesized
guuuucuugagcaacaaugaaca

SEQ ID NO: 8233 - RNA, 23 nt, Artificial
  Chemically synthesized
agucaguuaaagcaguguauggu

SEQ ID NO: 8234 - RNA, 23 nt, Artificial
  Chemically synthesized
aagucaguuaaagcaguguaugg

SEQ ID NO: 8235 - RNA, 23 nt, Artificial
  Chemically synthesized
uaagucaguuaaagcaguguaug

SEQ ID NO: 8236 - RNA, 23 nt, Artificial
  Chemically synthesized
auaagucaguuaaagcaguguau

SEQ ID NO: 8237 - RNA, 23 nt, Artificial
  Chemically synthesized
ccuuggagcacugacuguacaua

SEQ ID NO: 8238 - RNA, 23 nt, Artificial
  Chemically synthesized
accuuggagcacugacuguacau

SEQ ID NO: 8239 - RNA, 23 nt, Artificial
  Chemically synthesized
caccuuggagcacugacuguaca

SEQ ID NO: 8240 - RNA, 23 nt, Artificial
  Chemically synthesized
ucaccuuggagcacugacuguac

SEQ ID NO: 8241 - RNA, 23 nt, Artificial
  Chemically synthesized
aucaccuuggagcacugacugua

SEQ ID NO: 8242 - RNA, 23 nt, Artificial
  Chemically synthesized
uguugguugccaaggaacagcgu

SEQ ID NO: 8243 - RNA, 23 nt, Artificial
  Chemically synthesized
auguugguugccaaggaacagcg

SEQ ID NO: 8244 - RNA, 23 nt, Artificial
  Chemically synthesized
agguggaagaucccagcaagccc

SEQ ID NO: 8245 - RNA, 23 nt, Artificial
  Chemically synthesized
gagguggaagaucccagcaagcc

SEQ ID NO: 8246 - RNA, 23 nt, Artificial
  Chemically synthesized
ugagguggaagaucccagcaagc

SEQ ID NO: 8247 - RNA, 23 nt, Artificial
  Chemically synthesized
augagguggaagaucccagcaag

SEQ ID NO: 8248 - RNA, 23 nt, Artificial
  Chemically synthesized
uaugagguggaagaucccagcaa

SEQ ID NO: 8249 - RNA, 23 nt, Artificial
  Chemically synthesized
cgagauugguaaagugccaccuc

SEQ ID NO: 8250 - RNA, 23 nt, Artificial
  Chemically synthesized
ucgagauugguaaagugccaccu

SEQ ID NO: 8251 - RNA, 23 nt, Artificial
  Chemically synthesized
aucgagauugguaaagugccacc

SEQ ID NO: 8252 - RNA, 23 nt, Artificial
  Chemically synthesized
caucgagauugguaaagugccac

SEQ ID NO: 8253 - RNA, 23 nt, Artificial
  Chemically synthesized
gcaucgagauugguaaagugcca

SEQ ID NO: 8254 - RNA, 23 nt, Artificial
  Chemically synthesized
ucuugccauuaagaagucccaua

SEQ ID NO: 8255 - RNA, 23 nt, Artificial
  Chemically synthesized
ggacacucauccuuucucacacu

SEQ ID NO: 8256 - RNA, 23 nt, Artificial
  Chemically synthesized
cggacacucauccuuucucacac

SEQ ID NO: 8257 - RNA, 23 nt, Artificial
  Chemically synthesized
ucggacacucauccuuucucaca

SEQ ID NO: 8258 - RNA, 23 nt, Artificial
  Chemically synthesized
aucggacacucauccuuucucac

SEQ ID NO: 8259 - RNA, 23 nt, Artificial
  Chemically synthesized
aaucggacacucauccuuucuca

SEQ ID NO: 8260 - RNA, 23 nt, Artificial
  Chemically synthesized
aauggagucaggugcuggaggcc

SEQ ID NO: 8261 - RNA, 23 nt, Artificial
  Chemically synthesized
gaauggagucaggugcuggaggc

SEQ ID NO: 8262 - RNA, 23 nt, Artificial
  Chemically synthesized
ugaauggagucaggugcuggagg

SEQ ID NO: 8263 - RNA, 23 nt, Artificial
  Chemically synthesized
cugaauggagucaggugcuggag

SEQ ID NO: 8264 - RNA, 23 nt, Artificial
  Chemically synthesized
ccugaauggagucaggugcugga

SEQ ID NO: 8265 - RNA, 23 nt, Artificial
  Chemically synthesized
uuuugacuagaccauucaaagcu

SEQ ID NO: 8266 - RNA, 23 nt, Artificial
  Chemically synthesized
uuuuugacuagaccauucaaagc

SEQ ID NO: 8267 - RNA, 23 nt, Artificial
  Chemically synthesized
uuuuuugacuagaccauucaaag

SEQ ID NO: 8268 - RNA, 23 nt, Artificial
  Chemically synthesized
auuuuuugacuagaccauucaaa

SEQ ID NO: 8269 - RNA, 23 nt, Artificial
  Chemically synthesized
uauuuuuugacuagaccauucaa

SEQ ID NO: 8270 - RNA, 23 nt, Artificial
  Chemically synthesized
cagacucacugaugcagcacugu

SEQ ID NO: 8271 - RNA, 23 nt, Artificial
  Chemically synthesized
acagacucacugaugcagcacug

SEQ ID NO: 8272 - RNA, 23 nt, Artificial
  Chemically synthesized
uacagacucacugaugcagcacu

SEQ ID NO: 8273 - RNA, 23 nt, Artificial
  Chemically synthesized
guacagacucacugaugcagcac

SEQ ID NO: 8274 - RNA, 23 nt, Artificial
  Chemically synthesized
uguacagacucacugaugcagca

SEQ ID NO: 8275 - RNA, 23 nt, Artificial
  Chemically synthesized
ugaaauuuuuccuucgacacgag

SEQ ID NO: 8276 - RNA, 23 nt, Artificial
  Chemically synthesized
gugaaauuuuuccuucgacacga

SEQ ID NO: 8277 - RNA, 23 nt, Artificial
  Chemically synthesized
agugaaauuuuuccuucgacacg

SEQ ID NO: 8278 - RNA, 23 nt, Artificial
  Chemically synthesized
aagugaaauuuuuccuucgacac

SEQ ID NO: 8279 - RNA, 23 nt, Artificial
  Chemically synthesized
gaagugaaauuuuuccuucgaca

SEQ ID NO: 8280 - RNA, 23 nt, Artificial
  Chemically synthesized
uagcagacagcguccacaaugug

SEQ ID NO: 8281 - RNA, 23 nt, Artificial
  Chemically synthesized
uuagcagacagcguccacaaugu

SEQ ID NO: 8282 - RNA, 23 nt, Artificial
  Chemically synthesized
uuuagcagacagcguccacaaug

SEQ ID NO: 8283 - RNA, 23 nt, Artificial
  Chemically synthesized
cuuuagcagacagcguccacaau

SEQ ID NO: 8284 - RNA, 23 nt, Artificial
  Chemically synthesized
acuuuagcagacagcguccacaa

SEQ ID NO: 8285 - RNA, 23 nt, Artificial
  Chemically synthesized
auggguuccagucuuacaauggc

SEQ ID NO: 8286 - RNA, 23 nt, Artificial
  Chemically synthesized
aauggguuccagucuuacaaugg

SEQ ID NO: 8287 - RNA, 23 nt, Artificial
  Chemically synthesized
gaauggguuccagucuuacaaug

SEQ ID NO: 8288 - RNA, 23 nt, Artificial
  Chemically synthesized
ugaauggguuccagucuuacaau

SEQ ID NO: 8289 - RNA, 23 nt, Artificial
  Chemically synthesized
cugaauggguuccagucuuacaa

SEQ ID NO: 8290 - RNA, 23 nt, Artificial
  Chemically synthesized
acaugauccuucuucccuucauc

SEQ ID NO: 8291 - RNA, 23 nt, Artificial
  Chemically synthesized
cacaugauccuucuucccuucau

SEQ ID NO: 8292 - RNA, 23 nt, Artificial
  Chemically synthesized
acacaugauccuucuucccuuca

SEQ ID NO: 8293 - RNA, 23 nt, Artificial
  Chemically synthesized
cacacaugauccuucuucccuuc

SEQ ID NO: 8294 - RNA, 23 nt, Artificial
  Chemically synthesized
ccacacaugauccuucuucccuu

SEQ ID NO: 8295 - RNA, 23 nt, Artificial
  Chemically synthesized
ucaucuaugagguggaagauccc

SEQ ID NO: 8296 - RNA, 23 nt, Artificial
  Chemically synthesized
aucaucuaugagguggaagaucc

SEQ ID NO: 8297 - RNA, 23 nt, Artificial
  Chemically synthesized
ucuggugcagaggaucaucuaug

SEQ ID NO: 8298 - RNA, 23 nt, Artificial
  Chemically synthesized
aucuggugcagaggaucaucuau

SEQ ID NO: 8299 - RNA, 23 nt, Artificial
  Chemically synthesized
ugauaaagggucaaggccacagu

SEQ ID NO: 8300 - RNA, 23 nt, Artificial
  Chemically synthesized
cugauaaagggucaaggccacag

SEQ ID NO: 8301 - RNA, 23 nt, Artificial
  Chemically synthesized
gcugauaaagggucaaggccaca

SEQ ID NO: 8302 - RNA, 23 nt, Artificial
  Chemically synthesized
ggcugauaaagggucaaggccac

SEQ ID NO: 8303 - RNA, 23 nt, Artificial
  Chemically synthesized
uggcugauaaagggucaaggcca

SEQ ID NO: 8304 - RNA, 23 nt, Artificial
  Chemically synthesized
cuguuuucuugagcaacaaugaa

SEQ ID NO: 8305 - RNA, 23 nt, Artificial
  Chemically synthesized
acuguuuucuugagcaacaauga

SEQ ID NO: 8306 - RNA, 23 nt, Artificial
  Chemically synthesized
aacuguuuucuugagcaacaaug

SEQ ID NO: 8307 - RNA, 23 nt, Artificial
  Chemically synthesized
uaacuguuuucuugagcaacaau

SEQ ID NO: 8308 - RNA, 23 nt, Artificial
  Chemically synthesized
uuaacuguuuucuugagcaacaa

SEQ ID NO: 8309 - RNA, 23 nt, Artificial
  Chemically synthesized
auuuuggugucaacgugaaugcu

SEQ ID NO: 8310 - RNA, 23 nt, Artificial
  Chemically synthesized
ggaaacaaccugucgagauguug

SEQ ID NO: 8311 - RNA, 23 nt, Artificial
  Chemically synthesized
cggaaacaaccugucgagauguu

SEQ ID NO: 8312 - RNA, 23 nt, Artificial
  Chemically synthesized
ccggaaacaaccugucgagaugu

SEQ ID NO: 8313 - RNA, 23 nt, Artificial
  Chemically synthesized
accggaaacaaccugucgagaug

SEQ ID NO: 8314 - RNA, 23 nt, Artificial
  Chemically synthesized
caccggaaacaaccugucgagau

SEQ ID NO: 8315 - RNA, 23 nt, Artificial
  Chemically synthesized
agacccaagagcaacgaacucag

SEQ ID NO: 8316 - RNA, 23 nt, Artificial
  Chemically synthesized
ggagcacugacuguacauagugu

SEQ ID NO: 8317 - RNA, 23 nt, Artificial
  Chemically synthesized
uuggagcacugacuguacauagu

SEQ ID NO: 8318 - RNA, 23 nt, Artificial
  Chemically synthesized
cuuggagcacugacuguacauag

SEQ ID NO: 8319 - RNA, 23 nt, Artificial
  Chemically synthesized
cuggcugauaaagggucaaggcc

SEQ ID NO: 8320 - RNA, 23 nt, Artificial
  Chemically synthesized
cagaaaguacugagaaagagccu

SEQ ID NO: 8321 - RNA, 23 nt, Artificial
  Chemically synthesized
ucagaaaguacugagaaagagcc

SEQ ID NO: 8322 - RNA, 23 nt, Artificial
  Chemically synthesized
uucagaaaguacugagaaagagc

SEQ ID NO: 8323 - RNA, 23 nt, Artificial
  Chemically synthesized
cuucagaaaguacugagaaagag

SEQ ID NO: 8324 - RNA, 23 nt, Artificial
  Chemically synthesized
ccauucaaagcuacccgaacuau

SEQ ID NO: 8325 - RNA, 23 nt, Artificial
  Chemically synthesized
accauucaaagcuacccgaacua

SEQ ID NO: 8326 - RNA, 23 nt, Artificial
  Chemically synthesized
gaccauucaaagcuacccgaacu

SEQ ID NO: 8327 - RNA, 23 nt, Artificial
  Chemically synthesized
agaccauucaaagcuacccgaac

SEQ ID NO: 8328 - RNA, 23 nt, Artificial
  Chemically synthesized
uagaccauucaaagcuacccgaa

SEQ ID NO: 8329 - RNA, 23 nt, Artificial
  Chemically synthesized
caacagauucagcagaggauuuc

SEQ ID NO: 8330 - RNA, 23 nt, Artificial
  Chemically synthesized
acaacagauucagcagaggauuu

SEQ ID NO: 8331 - RNA, 23 nt, Artificial
  Chemically synthesized
cacaacagauucagcagaggauu

SEQ ID NO: 8332 - RNA, 23 nt, Artificial
  Chemically synthesized
ucacaacagauucagcagaggau

SEQ ID NO: 8333 - RNA, 23 nt, Artificial
  Chemically synthesized
cucacaacagauucagcagagga

SEQ ID NO: 8334 - RNA, 23 nt, Artificial
  Chemically synthesized
gacuguaccaagaacuacagauu

SEQ ID NO: 8335 - RNA, 23 nt, Artificial
  Chemically synthesized
agacuguaccaagaacuacagau

SEQ ID NO: 8336 - RNA, 23 nt, Artificial
  Chemically synthesized
gcagaggaucaucuaugaggugg

SEQ ID NO: 8337 - RNA, 23 nt, Artificial
  Chemically synthesized
cugaagaaaauucgugcaaugag

SEQ ID NO: 8338 - RNA, 23 nt, Artificial
  Chemically synthesized
gcugaagaaaauucgugcaauga

SEQ ID NO: 8339 - RNA, 23 nt, Artificial
  Chemically synthesized
agcugaagaaaauucgugcaaug

SEQ ID NO: 8340 - RNA, 23 nt, Artificial
  Chemically synthesized
aagcugaagaaaauucgugcaau

SEQ ID NO: 8341 - RNA, 23 nt, Artificial
  Chemically synthesized
aucagaugccaaugauaaugagu

SEQ ID NO: 8342 - RNA, 23 nt, Artificial
  Chemically synthesized
gaacaagcggaccaacuugaaga

SEQ ID NO: 8343 - RNA, 23 nt, Artificial
  Chemically synthesized
cgaacaagcggaccaacuugaag

SEQ ID NO: 8344 - RNA, 23 nt, Artificial
  Chemically synthesized
acgaacaagcggaccaacuugaa

SEQ ID NO: 8345 - RNA, 23 nt, Artificial
  Chemically synthesized
ggugcaggaaaagcuggguguga

SEQ ID NO: 8346 - RNA, 23 nt, Artificial
  Chemically synthesized
uccagaagcugcuguaccagcgc

SEQ ID NO: 8347 - RNA, 23 nt, Artificial
  Chemically synthesized
auccagaagcugcuguaccagcg

SEQ ID NO: 8348 - RNA, 23 nt, Artificial
  Chemically synthesized
cauccagaagcugcuguaccagc

SEQ ID NO: 8349 - RNA, 23 nt, Artificial
  Chemically synthesized
acauccagaagcugcuguaccag

SEQ ID NO: 8350 - RNA, 23 nt, Artificial
  Chemically synthesized
aacauccagaagcugcuguacca

SEQ ID NO: 8351 - RNA, 23 nt, Artificial
  Chemically synthesized
cagcugccauuuagcugaagugu

SEQ ID NO: 8352 - RNA, 23 nt, Artificial
  Chemically synthesized
gcagcugccauuuagcugaagug

SEQ ID NO: 8353 - RNA, 23 nt, Artificial
  Chemically synthesized
ggcagcugccauuuagcugaagu

SEQ ID NO: 8354 - RNA, 23 nt, Artificial
  Chemically synthesized
aggcagcugccauuuagcugaag

SEQ ID NO: 8355 - RNA, 23 nt, Artificial
  Chemically synthesized
aaggcagcugccauuuagcugaa

SEQ ID NO: 8356 - RNA, 23 nt, Artificial
  Chemically synthesized
cugcagcuagaaaauggucuuaa

SEQ ID NO: 8357 - RNA, 23 nt, Artificial
  Chemically synthesized
gcuccucacaacagauucagcag

SEQ ID NO: 8358 - RNA, 23 nt, Artificial
  Chemically synthesized
ggcuccucacaacagauucagca

SEQ ID NO: 8359 - RNA, 23 nt, Artificial
  Chemically synthesized
aggcuccucacaacagauucagc

SEQ ID NO: 8360 - RNA, 23 nt, Artificial
  Chemically synthesized
caggcuccucacaacagauucag

SEQ ID NO: 8361 - RNA, 23 nt, Artificial
  Chemically synthesized
ccaggcuccucacaacagauuca

SEQ ID NO: 8362 - RNA, 23 nt, Artificial
  Chemically synthesized
gugugaugaacaaagguguggcg

SEQ ID NO: 8363 - RNA, 23 nt, Artificial
  Chemically synthesized
ggugugaugaacaaagguguggc

SEQ ID NO: 8364 - RNA, 23 nt, Artificial
  Chemically synthesized
ccaagugacaacugggagagccu

SEQ ID NO: 8365 - RNA, 23 nt, Artificial
  Chemically synthesized
accaagugacaacugggagagcc

SEQ ID NO: 8366 - RNA, 23 nt, Artificial
  Chemically synthesized
gaccaagugacaacugggagagc

SEQ ID NO: 8367 - RNA, 23 nt, Artificial
  Chemically synthesized
agaccaagugacaacugggagag

SEQ ID NO: 8368 - RNA, 23 nt, Artificial
  Chemically synthesized
aagaccaagugacaacugggaga

SEQ ID NO: 8369 - RNA, 23 nt, Artificial
  Chemically synthesized
ccuuugaucauaugauguacgaa

SEQ ID NO: 8370 - RNA, 23 nt, Artificial
  Chemically synthesized
cccuuugaucauaugauguacga

SEQ ID NO: 8371 - RNA, 23 nt, Artificial
  Chemically synthesized
acccuuugaucauaugauguacg

SEQ ID NO: 8372 - RNA, 23 nt, Artificial
  Chemically synthesized
uacccuuugaucauaugauguac

SEQ ID NO: 8373 - RNA, 23 nt, Artificial
  Chemically synthesized
auacccuuugaucauaugaugua

SEQ ID NO: 8374 - RNA, 23 nt, Artificial
  Chemically synthesized
uccccaacugagaacagugaaca

SEQ ID NO: 8375 - RNA, 23 nt, Artificial
  Chemically synthesized
cuccccaacugagaacagugaac

SEQ ID NO: 8376 - RNA, 23 nt, Artificial
  Chemically synthesized
acuccccaacugagaacagugaa

SEQ ID NO: 8377 - RNA, 23 nt, Artificial
  Chemically synthesized
gccaggcuccucacaacagauuc

SEQ ID NO: 8378 - RNA, 23 nt, Artificial
  Chemically synthesized
agccaggcuccucacaacagauu

SEQ ID NO: 8379 - RNA, 23 nt, Artificial
  Chemically synthesized
cagccaggcuccucacaacagau

SEQ ID NO: 8380 - RNA, 23 nt, Artificial
  Chemically synthesized
ugaagaagcccaacucggagcgg

SEQ ID NO: 8381 - RNA, 23 nt, Artificial
  Chemically synthesized
uugaagaagcccaacucggagcg

SEQ ID NO: 8382 - RNA, 23 nt, Artificial
  Chemically synthesized
cuugaagaagcccaacucggagc

SEQ ID NO: 8383 - RNA, 23 nt, Artificial
  Chemically synthesized
acuugaagaagcccaacucggag

SEQ ID NO: 8384 - RNA, 23 nt, Artificial
  Chemically synthesized
aacuugaagaagcccaacucgga

SEQ ID NO: 8385 - RNA, 23 nt, Artificial
  Chemically synthesized
agaaaauggucuuaauggugcuc

SEQ ID NO: 8386 - RNA, 23 nt, Artificial
  Chemically synthesized
uagaaaauggucuuaauggugcu

SEQ ID NO: 8387 - RNA, 23 nt, Artificial
  Chemically synthesized
cuagaaaauggucuuaauggugc

SEQ ID NO: 8388 - RNA, 23 nt, Artificial
  Chemically synthesized
ugccaauggaaaccuggaagagc

SEQ ID NO: 8389 - RNA, 23 nt, Artificial
  Chemically synthesized
augccaauggaaaccuggaagag

SEQ ID NO: 8390 - RNA, 23 nt, Artificial
  Chemically synthesized
aaugccaauggaaaccuggaaga

SEQ ID NO: 8391 - RNA, 23 nt, Artificial
  Chemically synthesized
caaugccaauggaaaccuggaag

SEQ ID NO: 8392 - RNA, 23 nt, Artificial
  Chemically synthesized
ccaaugccaauggaaaccuggaa

SEQ ID NO: 8393 - RNA, 23 nt, Artificial
  Chemically synthesized
cccgucaucagaugccaaugaua

SEQ ID NO: 8394 - RNA, 23 nt, Artificial
  Chemically synthesized
cacgaacaagcggaccaacuuga

SEQ ID NO: 8395 - RNA, 23 nt, Artificial
  Chemically synthesized
ccacgaacaagcggaccaacuug

SEQ ID NO: 8396 - RNA, 23 nt, Artificial
  Chemically synthesized
uccacgaacaagcggaccaacuu

SEQ ID NO: 8397 - RNA, 23 nt, Artificial
  Chemically synthesized
cuguaccagcgcuucaacacccu

SEQ ID NO: 8398 - RNA, 23 nt, Artificial
  Chemically synthesized
gcuguaccagcgcuucaacaccc

SEQ ID NO: 8399 - RNA, 23 nt, Artificial
  Chemically synthesized
ugcuguaccagcgcuucaacacc

SEQ ID NO: 8400 - RNA, 23 nt, Artificial
  Chemically synthesized
cugcuguaccagcgcuucaacac

SEQ ID NO: 8401 - RNA, 23 nt, Artificial
  Chemically synthesized
gcugcuguaccagcgcuucaaca

SEQ ID NO: 8402 - RNA, 23 nt, Artificial
  Chemically synthesized
acagcgccuuaaauaagucaguu

SEQ ID NO: 8403 - RNA, 23 nt, Artificial
  Chemically synthesized
cacagcgccuuaaauaagucagu

SEQ ID NO: 8404 - RNA, 23 nt, Artificial
  Chemically synthesized
ugcuggauuuuggugucaacgug

SEQ ID NO: 8405 - RNA, 23 nt, Artificial
  Chemically synthesized
cugcuggauuuuggugucaacgu

SEQ ID NO: 8406 - RNA, 23 nt, Artificial
  Chemically synthesized
ccugcuggauuuuggugucaacg

SEQ ID NO: 8407 - RNA, 23 nt, Artificial
  Chemically synthesized
uccugcuggauuuuggugucaac

SEQ ID NO: 8408 - RNA, 23 nt, Artificial
  Chemically synthesized
uuccugcuggauuuuggugucaa

SEQ ID NO: 8409 - RNA, 23 nt, Artificial
  Chemically synthesized
cuuaauggugcucacuuuagcag

SEQ ID NO: 8410 - RNA, 23 nt, Artificial
  Chemically synthesized
ucuuaauggugcucacuuuagca

SEQ ID NO: 8411 - RNA, 23 nt, Artificial
  Chemically synthesized
gucuuaauggugcucacuuuagc

SEQ ID NO: 8412 - RNA, 23 nt, Artificial
  Chemically synthesized
ggucuuaauggugcucacuuuag

SEQ ID NO: 8413 - RNA, 23 nt, Artificial
  Chemically synthesized
acgucccauacccuuugaucaua

SEQ ID NO: 8414 - RNA, 23 nt, Artificial
  Chemically synthesized
auuaacuguuuucuugagcaaca

SEQ ID NO: 8415 - RNA, 23 nt, Artificial
  Chemically synthesized
uauuaacuguuuucuugagcaac

SEQ ID NO: 8416 - RNA, 23 nt, Artificial
  Chemically synthesized
auauuaacuguuuucuugagcaa

SEQ ID NO: 8417 - RNA, 23 nt, Artificial
  Chemically synthesized
gucgagauguuguagaauuuugc

SEQ ID NO: 8418 - RNA, 23 nt, Artificial
  Chemically synthesized
ugucgagauguuguagaauuuug

SEQ ID NO: 8419 - RNA, 23 nt, Artificial
  Chemically synthesized
gaugaugccgaugauauuaacug

SEQ ID NO: 8420 - RNA, 23 nt, Artificial
  Chemically synthesized
cacugacaguggccauuaggccu

SEQ ID NO: 8421 - RNA, 23 nt, Artificial
  Chemically synthesized
ccacugacaguggccauuaggcc

SEQ ID NO: 8422 - RNA, 23 nt, Artificial
  Chemically synthesized
cccacugacaguggccauuaggc

SEQ ID NO: 8423 - RNA, 23 nt, Artificial
  Chemically synthesized
ucccacugacaguggccauuagg

SEQ ID NO: 8424 - RNA, 23 nt, Artificial
  Chemically synthesized
cucccacugacaguggccauuag

SEQ ID NO: 8425 - RNA, 23 nt, Artificial
  Chemically synthesized
gacugcaauuuuaaggguugauc

SEQ ID NO: 8426 - RNA, 23 nt, Artificial
  Chemically synthesized
agacugcaauuuuaaggguugau

SEQ ID NO: 8427 - RNA, 23 nt, Artificial
  Chemically synthesized
cagacugcaauuuuaaggguuga

SEQ ID NO: 8428 - RNA, 23 nt, Artificial
  Chemically synthesized
gcaauuggaagauuuaaagaaag

SEQ ID NO: 8429 - RNA, 23 nt, Artificial
  Chemically synthesized
agcaauuggaagauuuaaagaaa

SEQ ID NO: 8430 - RNA, 23 nt, Artificial
  Chemically synthesized
ccuguuccaguucaccuaaaggc

SEQ ID NO: 8431 - RNA, 23 nt, Artificial
  Chemically synthesized
uccuguuccaguucaccuaaagg

SEQ ID NO: 8432 - RNA, 23 nt, Artificial
  Chemically synthesized
uuccuguuccaguucaccuaaag

SEQ ID NO: 8433 - RNA, 23 nt, Artificial
  Chemically synthesized
cuuccuguuccaguucaccuaaa

SEQ ID NO: 8434 - RNA, 23 nt, Artificial
  Chemically synthesized
gcuuccuguuccaguucaccuaa

SEQ ID NO: 8435 - RNA, 23 nt, Artificial
  Chemically synthesized
gcaacaaugaacagauuuuaaca

SEQ ID NO: 8436 - RNA, 23 nt, Artificial
  Chemically synthesized
agcaacaaugaacagauuuuaac

SEQ ID NO: 8437 - RNA, 23 nt, Artificial
  Chemically synthesized
uccccgcgaugaugccgaugaua

SEQ ID NO: 8438 - RNA, 23 nt, Artificial
  Chemically synthesized
ccagacagugaauucaaguucca

SEQ ID NO: 8439 - RNA, 23 nt, Artificial
  Chemically synthesized
agacagaagcucuuacugacuug

SEQ ID NO: 8440 - RNA, 23 nt, Artificial
  Chemically synthesized
aagacagaagcucuuacugacuu

SEQ ID NO: 8441 - RNA, 23 nt, Artificial
  Chemically synthesized
gaagacagaagcucuuacugacu

SEQ ID NO: 8442 - RNA, 23 nt, Artificial
  Chemically synthesized
ugaagacagaagcucuuacugac

SEQ ID NO: 8443 - RNA, 23 nt, Artificial
  Chemically synthesized
gugaagacagaagcucuuacuga

SEQ ID NO: 8444 - RNA, 23 nt, Artificial
  Chemically synthesized
ggcaucgagauugguaaagugcc

SEQ ID NO: 8445 - RNA, 23 nt, Artificial
  Chemically synthesized
gaaggcagcugccauuuagcuga

SEQ ID NO: 8446 - RNA, 23 nt, Artificial
  Chemically synthesized
agaaggcagcugccauuuagcug

SEQ ID NO: 8447 - RNA, 23 nt, Artificial
  Chemically synthesized
gagaaggcagcugccauuuagcu

SEQ ID NO: 8448 - RNA, 23 nt, Artificial
  Chemically synthesized
ggagaaggcagcugccauuuagc

SEQ ID NO: 8449 - RNA, 23 nt, Artificial
  Chemically synthesized
uggagaaggcagcugccauuuag

SEQ ID NO: 8450 - RNA, 23 nt, Artificial
  Chemically synthesized
gacagaagcucuuacugacuugg

SEQ ID NO: 8451 - RNA, 23 nt, Artificial
  Chemically synthesized
aaugcugcucauggaagauccaa

SEQ ID NO: 8452 - RNA, 23 nt, Artificial
  Chemically synthesized
augauguacgaacaucuucagaa

SEQ ID NO: 8453 - RNA, 23 nt, Artificial
  Chemically synthesized
gacgaaagcgagacugaguggug

SEQ ID NO: 8454 - RNA, 23 nt, Artificial
  Chemically synthesized
ggacgaaagcgagacugaguggu

SEQ ID NO: 8455 - RNA, 23 nt, Artificial
  Chemically synthesized
ugccgccauuuuugccucaacca

SEQ ID NO: 8456 - RNA, 23 nt, Artificial
  Chemically synthesized
cuguuccaguucaccuaaaggcu

SEQ ID NO: 8457 - RNA, 23 nt, Artificial
  Chemically synthesized
agagugaugcagaccuggaggcc

SEQ ID NO: 8458 - RNA, 23 nt, Artificial
  Chemically synthesized
cagagugaugcagaccuggaggc

SEQ ID NO: 8459 - RNA, 23 nt, Artificial
  Chemically synthesized
ccagagugaugcagaccuggagg

SEQ ID NO: 8460 - RNA, 23 nt, Artificial
  Chemically synthesized
accagagugaugcagaccuggag

SEQ ID NO: 8461 - RNA, 23 nt, Artificial
  Chemically synthesized
uaccagagugaugcagaccugga

SEQ ID NO: 8462 - RNA, 23 nt, Artificial
  Chemically synthesized
uuuucauguaugagucgugugua

SEQ ID NO: 8463 - RNA, 23 nt, Artificial
  Chemically synthesized
uugcaaggaaccuggagaaggca

SEQ ID NO: 8464 - RNA, 23 nt, Artificial
  Chemically synthesized
uuugcaaggaaccuggagaaggc

SEQ ID NO: 8465 - RNA, 23 nt, Artificial
  Chemically synthesized
uuuugcaaggaaccuggagaagg

SEQ ID NO: 8466 - RNA, 23 nt, Artificial
  Chemically synthesized
auuuugcaaggaaccuggagaag

SEQ ID NO: 8467 - RNA, 23 nt, Artificial
  Chemically synthesized
aauuuugcaaggaaccuggagaa

SEQ ID NO: 8468 - RNA, 23 nt, Artificial
  Chemically synthesized
auucguaaccaacuuaaccagga

SEQ ID NO: 8469 - RNA, 23 nt, Artificial
  Chemically synthesized
agcccguuuuaccuucggguuca

SEQ ID NO: 8470 - RNA, 23 nt, Artificial
  Chemically synthesized
gugaauucaaguuccauauacuc

SEQ ID NO: 8471 - RNA, 23 nt, Artificial
  Chemically synthesized
uaaauaagcgcaacauggaggug

SEQ ID NO: 8472 - RNA, 23 nt, Artificial
  Chemically synthesized
uuaaauaagcgcaacauggaggu

SEQ ID NO: 8473 - RNA, 23 nt, Artificial
  Chemically synthesized
cuuaaauaagcgcaacauggagg

SEQ ID NO: 8474 - RNA, 23 nt, Artificial
  Chemically synthesized
ucuuaaauaagcgcaacauggag

SEQ ID NO: 8475 - RNA, 23 nt, Artificial
  Chemically synthesized
cucuuaaauaagcgcaacaugga

SEQ ID NO: 8476 - RNA, 23 nt, Artificial
  Chemically synthesized
guagaauuuugcaaggaaccugg

SEQ ID NO: 8477 - RNA, 23 nt, Artificial
  Chemically synthesized
ccauaagcgacauugaaacugcu

SEQ ID NO: 8478 - RNA, 23 nt, Artificial
  Chemically synthesized
ccacuuaagagauuauugugcug

SEQ ID NO: 8479 - RNA, 23 nt, Artificial
  Chemically synthesized
gccacuuaagagauuauugugcu

SEQ ID NO: 8480 - RNA, 23 nt, Artificial
  Chemically synthesized
agccacuuaagagauuauugugc

SEQ ID NO: 8481 - RNA, 23 nt, Artificial
  Chemically synthesized
augaacggcaaucugucugcuga

SEQ ID NO: 8482 - RNA, 23 nt, Artificial
  Chemically synthesized
gguggaguuaaaaagacuguacc

SEQ ID NO: 8483 - RNA, 23 nt, Artificial
  Chemically synthesized
ccugcaagcucaaauucaguucc

SEQ ID NO: 8484 - RNA, 23 nt, Artificial
  Chemically synthesized
caagcgaaucagugaacugcgug

SEQ ID NO: 8485 - RNA, 23 nt, Artificial
  Chemically synthesized
acaagcgaaucagugaacugcgu

SEQ ID NO: 8486 - RNA, 23 nt, Artificial
  Chemically synthesized
cccacuuucaaaacacccacccc

SEQ ID NO: 8487 - RNA, 23 nt, Artificial
  Chemically synthesized
acccacuuucaaaacacccaccc

SEQ ID NO: 8488 - RNA, 23 nt, Artificial
  Chemically synthesized
uacccacuuucaaaacacccacc

SEQ ID NO: 8489 - RNA, 23 nt, Artificial
  Chemically synthesized
auacccacuuucaaaacacccac

SEQ ID NO: 8490 - RNA, 23 nt, Artificial
  Chemically synthesized
aauacccacuuucaaaacaccca

SEQ ID NO: 8491 - RNA, 23 nt, Artificial
  Chemically synthesized
ucagaaauugaaagaacgaguug

SEQ ID NO: 8492 - RNA, 23 nt, Artificial
  Chemically synthesized
uucagaaauugaaagaacgaguu

SEQ ID NO: 8493 - RNA, 23 nt, Artificial
  Chemically synthesized
cuucagaaauugaaagaacgagu

SEQ ID NO: 8494 - RNA, 23 nt, Artificial
  Chemically synthesized
gcuucagaaauugaaagaacgag

SEQ ID NO: 8495 - RNA, 23 nt, Artificial
  Chemically synthesized
agcuucagaaauugaaagaacga

SEQ ID NO: 8496 - RNA, 23 nt, Artificial
  Chemically synthesized
gauucguaaccaacuuaaccagg

SEQ ID NO: 8497 - RNA, 23 nt, Artificial
  Chemically synthesized
acgcuguguaaaugugcacaaua

SEQ ID NO: 8498 - RNA, 23 nt, Artificial
  Chemically synthesized
acugaauggguuccagucuuaca

SEQ ID NO: 8499 - RNA, 23 nt, Artificial
  Chemically synthesized
ugagucguguguaauuuauguaa

SEQ ID NO: 8500 - RNA, 23 nt, Artificial
  Chemically synthesized
augagucguguguaauuuaugua

SEQ ID NO: 8501 - RNA, 23 nt, Artificial
  Chemically synthesized
uaugagucguguguaauuuaugu

SEQ ID NO: 8502 - RNA, 23 nt, Artificial
  Chemically synthesized
gaauuguacguacaggcuuuuua

SEQ ID NO: 8503 - RNA, 23 nt, Artificial
  Chemically synthesized
ggaagaagugaaauuuuuccuuc

SEQ ID NO: 8504 - RNA, 23 nt, Artificial
  Chemically synthesized
auggucuuaauggugcucacuuu

SEQ ID NO: 8505 - RNA, 23 nt, Artificial
  Chemically synthesized
aauggucuuaauggugcucacuu

SEQ ID NO: 8506 - RNA, 23 nt, Artificial
  Chemically synthesized
aaauggucuuaauggugcucacu

SEQ ID NO: 8507 - RNA, 23 nt, Artificial
  Chemically synthesized
aaaauggucuuaauggugcucac

SEQ ID NO: 8508 - RNA, 23 nt, Artificial
  Chemically synthesized
cagccaccuucagaaaguacuga

SEQ ID NO: 8509 - RNA, 23 nt, Artificial
  Chemically synthesized
ucagccaccuucagaaaguacug

SEQ ID NO: 8510 - RNA, 23 nt, Artificial
  Chemically synthesized
cucagccaccuucagaaaguacu

SEQ ID NO: 8511 - RNA, 23 nt, Artificial
  Chemically synthesized
gaucuggugcagaggaucaucua

SEQ ID NO: 8512 - RNA, 23 nt, Artificial
  Chemically synthesized
acacagcgccuuaaauaagucag

SEQ ID NO: 8513 - RNA, 23 nt, Artificial
  Chemically synthesized
gcguuuacauuuucuaaagcaac

SEQ ID NO: 8514 - RNA, 23 nt, Artificial
  Chemically synthesized
agcguuuacauuuucuaaagcaa

SEQ ID NO: 8515 - RNA, 23 nt, Artificial
  Chemically synthesized
ccagucucucaguauugccucaa

SEQ ID NO: 8516 - RNA, 23 nt, Artificial
  Chemically synthesized
cccagucucucaguauugccuca

SEQ ID NO: 8517 - RNA, 23 nt, Artificial
  Chemically synthesized
cuauaacaccggaaacaaccugu

SEQ ID NO: 8518 - RNA, 23 nt, Artificial
  Chemically synthesized
cugcaagcucaaauucaguuccc

SEQ ID NO: 8519 - RNA, 23 nt, Artificial
  Chemically synthesized
gauaaagggucaaggccacaguc

SEQ ID NO: 8520 - RNA, 23 nt, Artificial
  Chemically synthesized
gcaguguaugguaagcccguuuu

SEQ ID NO: 8521 - RNA, 23 nt, Artificial
  Chemically synthesized
agcaguguaugguaagcccguuu

SEQ ID NO: 8522 - RNA, 23 nt, Artificial
  Chemically synthesized
aagcaguguaugguaagcccguu

SEQ ID NO: 8523 - RNA, 23 nt, Artificial
  Chemically synthesized
aaagcaguguaugguaagcccgu

SEQ ID NO: 8524 - RNA, 23 nt, Artificial
  Chemically synthesized
guauuuuuugacuagaccauuca

SEQ ID NO: 8525 - RNA, 23 nt, Artificial
  Chemically synthesized
aguauuuuuugacuagaccauuc

SEQ ID NO: 8526 - RNA, 23 nt, Artificial
  Chemically synthesized
aaguauuuuuugacuagaccauu

SEQ ID NO: 8527 - RNA, 23 nt, Artificial
  Chemically synthesized
aaaguauuuuuugacuagaccau

SEQ ID NO: 8528 - RNA, 23 nt, Artificial
  Chemically synthesized
aaaaguauuuuuugacuagacca

SEQ ID NO: 8529 - RNA, 23 nt, Artificial
  Chemically synthesized
cuggagaaggcagcugccauuua

SEQ ID NO: 8530 - RNA, 23 nt, Artificial
  Chemically synthesized
aacgucccauacccuuugaucau

SEQ ID NO: 8531 - RNA, 23 nt, Artificial
  Chemically synthesized
gaacgucccauacccuuugauca

SEQ ID NO: 8532 - RNA, 23 nt, Artificial
  Chemically synthesized
ccucacaacagauucagcagagg

SEQ ID NO: 8533 - RNA, 23 nt, Artificial
  Chemically synthesized
uccucacaacagauucagcagag

SEQ ID NO: 8534 - RNA, 23 nt, Artificial
  Chemically synthesized
cuccucacaacagauucagcaga

SEQ ID NO: 8535 - RNA, 23 nt, Artificial
  Chemically synthesized
ugagaacagugaacaagguggcc

SEQ ID NO: 8536 - RNA, 23 nt, Artificial
  Chemically synthesized
cugagaacagugaacaagguggc

SEQ ID NO: 8537 - RNA, 23 nt, Artificial
  Chemically synthesized
acugagaacagugaacaaggugg

SEQ ID NO: 8538 - RNA, 23 nt, Artificial
  Chemically synthesized
agaagcaggaaguacagacugca

SEQ ID NO: 8539 - RNA, 23 nt, Artificial
  Chemically synthesized
aagaagcaggaaguacagacugc

SEQ ID NO: 8540 - RNA, 23 nt, Artificial
  Chemically synthesized
aaagaagcaggaaguacagacug

SEQ ID NO: 8541 - RNA, 23 nt, Artificial
  Chemically synthesized
gagauggaggaaggcuacaucca

SEQ ID NO: 8542 - RNA, 23 nt, Artificial
  Chemically synthesized
ggagauggaggaaggcuacaucc

SEQ ID NO: 8543 - RNA, 23 nt, Artificial
  Chemically synthesized
cauuuagcugaaguguggagggg

SEQ ID NO: 8544 - RNA, 23 nt, Artificial
  Chemically synthesized
ccauuuagcugaaguguggaggg

SEQ ID NO: 8545 - RNA, 23 nt, Artificial
  Chemically synthesized
gccauuuagcugaaguguggagg

SEQ ID NO: 8546 - RNA, 23 nt, Artificial
  Chemically synthesized
ugccauuuagcugaaguguggag

SEQ ID NO: 8547 - RNA, 23 nt, Artificial
  Chemically synthesized
cugccauuuagcugaagugugga

SEQ ID NO: 8548 - RNA, 23 nt, Artificial
  Chemically synthesized
acauggagguggccaugauggac

SEQ ID NO: 8549 - RNA, 23 nt, Artificial
  Chemically synthesized
aacauggagguggccaugaugga

SEQ ID NO: 8550 - RNA, 23 nt, Artificial
  Chemically synthesized
caacauggagguggccaugaugg

SEQ ID NO: 8551 - RNA, 23 nt, Artificial
  Chemically synthesized
gcaacauggagguggccaugaug

SEQ ID NO: 8552 - RNA, 23 nt, Artificial
  Chemically synthesized
cgcaacauggagguggccaugau

SEQ ID NO: 8553 - RNA, 23 nt, Artificial
  Chemically synthesized
agucguguguaauuuauguaaaa

SEQ ID NO: 8554 - RNA, 23 nt, Artificial
  Chemically synthesized
gagucguguguaauuuauguaaa

SEQ ID NO: 8555 - RNA, 23 nt, Artificial
  Chemically synthesized
ugaugccgaugauauuaacuguu

SEQ ID NO: 8556 - RNA, 23 nt, Artificial
  Chemically synthesized
augaugccgaugauauuaacugu

SEQ ID NO: 8557 - RNA, 23 nt, Artificial
  Chemically synthesized
agagcuccaagauauggcagcua

SEQ ID NO: 8558 - RNA, 23 nt, Artificial
  Chemically synthesized
cagagcuccaagauauggcagcu

SEQ ID NO: 8559 - RNA, 23 nt, Artificial
  Chemically synthesized
ucagagcuccaagauauggcagc

SEQ ID NO: 8560 - RNA, 23 nt, Artificial
  Chemically synthesized
cucagagcuccaagauauggcag

SEQ ID NO: 8561 - RNA, 23 nt, Artificial
  Chemically synthesized
ucucagagcuccaagauauggca

SEQ ID NO: 8562 - RNA, 23 nt, Artificial
  Chemically synthesized
ccagcaagccacaccaccuaaga

SEQ ID NO: 8563 - RNA, 23 nt, Artificial
  Chemically synthesized
ccgagccggcagaggacaauaac

SEQ ID NO: 8564 - RNA, 23 nt, Artificial
  Chemically synthesized
gccgagccggcagaggacaauaa

SEQ ID NO: 8565 - RNA, 23 nt, Artificial
  Chemically synthesized
cgucagcagcagucuauuucuga

SEQ ID NO: 8566 - RNA, 23 nt, Artificial
  Chemically synthesized
agugaagacagaagcucuuacug

SEQ ID NO: 8567 - RNA, 23 nt, Artificial
  Chemically synthesized
cugaaaaagcgcagcuccaucac

SEQ ID NO: 8568 - RNA, 23 nt, Artificial
  Chemically synthesized
ccugaaaaagcgcagcuccauca

SEQ ID NO: 8569 - RNA, 23 nt, Artificial
  Chemically synthesized
cccugaaaaagcgcagcuccauc

SEQ ID NO: 8570 - RNA, 23 nt, Artificial
  Chemically synthesized
ccccugaaaaagcgcagcuccau

SEQ ID NO: 8571 - RNA, 23 nt, Artificial
  Chemically synthesized
gccccugaaaaagcgcagcucca

SEQ ID NO: 8572 - RNA, 23 nt, Artificial
  Chemically synthesized
acugaggugugaauuguacguac

SEQ ID NO: 8573 - RNA, 23 nt, Artificial
  Chemically synthesized
aaguuccuauaacaccggaaaca

SEQ ID NO: 8574 - RNA, 23 nt, Artificial
  Chemically synthesized
gaaguuccuauaacaccggaaac

SEQ ID NO: 8575 - RNA, 23 nt, Artificial
  Chemically synthesized
agaaguuccuauaacaccggaaa

SEQ ID NO: 8576 - RNA, 23 nt, Artificial
  Chemically synthesized
acugcgcugccucuuguaacagc

SEQ ID NO: 8577 - RNA, 23 nt, Artificial
  Chemically synthesized
cacugcgcugccucuuguaacag

SEQ ID NO: 8578 - RNA, 23 nt, Artificial
  Chemically synthesized
gcacugcgcugccucuuguaaca

SEQ ID NO: 8579 - RNA, 23 nt, Artificial
  Chemically synthesized
ugcacugcgcugccucuuguaac

SEQ ID NO: 8580 - RNA, 23 nt, Artificial
  Chemically synthesized
cugcacugcgcugccucuuguaa

SEQ ID NO: 8581 - RNA, 23 nt, Artificial
  Chemically synthesized
uggguuccagucuuacaauggca

SEQ ID NO: 8582 - RNA, 23 nt, Artificial
  Chemically synthesized
caugcugcucagugugguucuca

SEQ ID NO: 8583 - RNA, 23 nt, Artificial
  Chemically synthesized
ucaugcugcucagugugguucuc

SEQ ID NO: 8584 - RNA, 23 nt, Artificial
  Chemically synthesized
gucaugcugcucagugugguucu

SEQ ID NO: 8585 - RNA, 23 nt, Artificial
  Chemically synthesized
ugucaugcugcucagugugguuc

SEQ ID NO: 8586 - RNA, 23 nt, Artificial
  Chemically synthesized
cgugugaauggcacgucaucacc

SEQ ID NO: 8587 - RNA, 23 nt, Artificial
  Chemically synthesized
ccgugugaauggcacgucaucac

SEQ ID NO: 8588 - RNA, 23 nt, Artificial
  Chemically synthesized
accgugugaauggcacgucauca

SEQ ID NO: 8589 - RNA, 23 nt, Artificial
  Chemically synthesized
aaccgugugaauggcacgucauc

SEQ ID NO: 8590 - RNA, 23 nt, Artificial
  Chemically synthesized
gaaccgugugaauggcacgucau

SEQ ID NO: 8591 - RNA, 23 nt, Artificial
  Chemically synthesized
aauucuagcucuuccgugaaacc

SEQ ID NO: 8592 - RNA, 23 nt, Artificial
  Chemically synthesized
gaauucuagcucuuccgugaaac

SEQ ID NO: 8593 - RNA, 23 nt, Artificial
  Chemically synthesized
agaauucuagcucuuccgugaaa

SEQ ID NO: 8594 - RNA, 23 nt, Artificial
  Chemically synthesized
cagaauucuagcucuuccgugaa

SEQ ID NO: 8595 - RNA, 23 nt, Artificial
  Chemically synthesized
acagaauucuagcucuuccguga

SEQ ID NO: 8596 - RNA, 23 nt, Artificial
  Chemically synthesized
agucgacuacagcaaaaucauga

SEQ ID NO: 8597 - RNA, 23 nt, Artificial
  Chemically synthesized
cguaugcucugugggacuacgag

SEQ ID NO: 8598 - RNA, 23 nt, Artificial
  Chemically synthesized
gcguaugcucugugggacuacga

SEQ ID NO: 8599 - RNA, 23 nt, Artificial
  Chemically synthesized
ggcguaugcucugugggacuacg

SEQ ID NO: 8600 - RNA, 23 nt, Artificial
  Chemically synthesized
uggcguaugcucugugggacuac

SEQ ID NO: 8601 - RNA, 23 nt, Artificial
  Chemically synthesized
guggcguaugcucugugggacua

SEQ ID NO: 8602 - RNA, 23 nt, Artificial
  Chemically synthesized
auggaaacaccaaugccaaugga

SEQ ID NO: 8603 - RNA, 23 nt, Artificial
  Chemically synthesized
aauggaaacaccaaugccaaugg

SEQ ID NO: 8604 - RNA, 23 nt, Artificial
  Chemically synthesized
caauggaaacaccaaugccaaug

SEQ ID NO: 8605 - RNA, 23 nt, Artificial
  Chemically synthesized
acaauggaaacaccaaugccaau

SEQ ID NO: 8606 - RNA, 23 nt, Artificial
  Chemically synthesized
gacaauggaaacaccaaugccaa

SEQ ID NO: 8607 - RNA, 23 nt, Artificial
  Chemically synthesized
uggugcucacuuuagcagacagc

SEQ ID NO: 8608 - RNA, 23 nt, Artificial
  Chemically synthesized
auggugcucacuuuagcagacag

SEQ ID NO: 8609 - RNA, 23 nt, Artificial
  Chemically synthesized
aauggugcucacuuuagcagaca

SEQ ID NO: 8610 - RNA, 23 nt, Artificial
  Chemically synthesized
uaauggugcucacuuuagcagac

SEQ ID NO: 8611 - RNA, 23 nt, Artificial
  Chemically synthesized
uuaauggugcucacuuuagcaga

SEQ ID NO: 8612 - RNA, 23 nt, Artificial
  Chemically synthesized
gcagacagcguccacaaugugaa

SEQ ID NO: 8613 - RNA, 23 nt, Artificial
  Chemically synthesized
aagagauuauugugcuguuuucc

SEQ ID NO: 8614 - RNA, 23 nt, Artificial
  Chemically synthesized
uaagagauuauugugcuguuuuc

SEQ ID NO: 8615 - RNA, 23 nt, Artificial
  Chemically synthesized
uuaagagauuauugugcuguuuu

SEQ ID NO: 8616 - RNA, 23 nt, Artificial
  Chemically synthesized
cuuaagagauuauugugcuguuu

SEQ ID NO: 8617 - RNA, 23 nt, Artificial
  Chemically synthesized
acuuaagagauuauugugcuguu

SEQ ID NO: 8618 - RNA, 23 nt, Artificial
  Chemically synthesized
ccauauacuccauguaccuccag

SEQ ID NO: 8619 - RNA, 23 nt, Artificial
  Chemically synthesized
uccauauacuccauguaccucca

SEQ ID NO: 8620 - RNA, 23 nt, Artificial
  Chemically synthesized
uuccauauacuccauguaccucc

SEQ ID NO: 8621 - RNA, 23 nt, Artificial
  Chemically synthesized
guuccauauacuccauguaccuc

SEQ ID NO: 8622 - RNA, 23 nt, Artificial
  Chemically synthesized
aguuccauauacuccauguaccu

SEQ ID NO: 8623 - RNA, 23 nt, Artificial
  Chemically synthesized
aaggaaaacugaauggguuccag

SEQ ID NO: 8624 - RNA, 23 nt, Artificial
  Chemically synthesized
aaaggaaaacugaauggguucca

SEQ ID NO: 8625 - RNA, 23 nt, Artificial
  Chemically synthesized
gaaaggaaaacugaauggguucc

SEQ ID NO: 8626 - RNA, 23 nt, Artificial
  Chemically synthesized
agaaaggaaaacugaauggguuc

SEQ ID NO: 8627 - RNA, 23 nt, Artificial
  Chemically synthesized
aagaaaggaaaacugaauggguu

SEQ ID NO: 8628 - RNA, 23 nt, Artificial
  Chemically synthesized
ucagcagaggauuuccguaccgc

SEQ ID NO: 8629 - RNA, 23 nt, Artificial
  Chemically synthesized
uucagcagaggauuuccguaccg

SEQ ID NO: 8630 - RNA, 23 nt, Artificial
  Chemically synthesized
auucagcagaggauuuccguacc

SEQ ID NO: 8631 - RNA, 23 nt, Artificial
  Chemically synthesized
gauucagcagaggauuuccguac

SEQ ID NO: 8632 - RNA, 23 nt, Artificial
  Chemically synthesized
agauucagcagaggauuuccgua

SEQ ID NO: 8633 - RNA, 23 nt, Artificial
  Chemically synthesized
guacugagaaagagccugagcag

SEQ ID NO: 8634 - RNA, 23 nt, Artificial
  Chemically synthesized
aguacugagaaagagccugagca

SEQ ID NO: 8635 - RNA, 23 nt, Artificial
  Chemically synthesized
aaguacugagaaagagccugagc

SEQ ID NO: 8636 - RNA, 23 nt, Artificial
  Chemically synthesized
aaaguacugagaaagagccugag

SEQ ID NO: 8637 - RNA, 23 nt, Artificial
  Chemically synthesized
gaaaguacugagaaagagccuga

SEQ ID NO: 8638 - RNA, 23 nt, Artificial
  Chemically synthesized
ugccgaugauauuaacuguuuuc

SEQ ID NO: 8639 - RNA, 23 nt, Artificial
  Chemically synthesized
augccgaugauauuaacuguuuu

SEQ ID NO: 8640 - RNA, 23 nt, Artificial
  Chemically synthesized
gaugccgaugauauuaacuguuu

SEQ ID NO: 8641 - RNA, 23 nt, Artificial
  Chemically synthesized
uuaaagcaguguaugguaagccc

SEQ ID NO: 8642 - RNA, 23 nt, Artificial
  Chemically synthesized
aacagaaguuccuauaacaccgg

SEQ ID NO: 8643 - RNA, 23 nt, Artificial
  Chemically synthesized
uaacagaaguuccuauaacaccg

SEQ ID NO: 8644 - RNA, 23 nt, Artificial
  Chemically synthesized
uuaacagaaguuccuauaacacc

SEQ ID NO: 8645 - RNA, 23 nt, Artificial
  Chemically synthesized
uuuaacagaaguuccuauaacac

SEQ ID NO: 8646 - RNA, 23 nt, Artificial
  Chemically synthesized
uuuuaacagaaguuccuauaaca

SEQ ID NO: 8647 - RNA, 23 nt, Artificial
  Chemically synthesized
ccuccaagcuaugggacauaccc

SEQ ID NO: 8648 - RNA, 23 nt, Artificial
  Chemically synthesized
gccuccaagcuaugggacauacc

SEQ ID NO: 8649 - RNA, 23 nt, Artificial
  Chemically synthesized
ugccuccaagcuaugggacauac

SEQ ID NO: 8650 - RNA, 23 nt, Artificial
  Chemically synthesized
cugccuccaagcuaugggacaua

SEQ ID NO: 8651 - RNA, 23 nt, Artificial
  Chemically synthesized
gcugccuccaagcuaugggacau

SEQ ID NO: 8652 - RNA, 23 nt, Artificial
  Chemically synthesized
gauugaaaaucagcagcagaugu

SEQ ID NO: 8653 - RNA, 23 nt, Artificial
  Chemically synthesized
agauugaaaaucagcagcagaug

SEQ ID NO: 8654 - RNA, 23 nt, Artificial
  Chemically synthesized
cagauugaaaaucagcagcagau

SEQ ID NO: 8655 - RNA, 23 nt, Artificial
  Chemically synthesized
gcagauugaaaaucagcagcaga

SEQ ID NO: 8656 - RNA, 23 nt, Artificial
  Chemically synthesized
agcagauugaaaaucagcagcag

SEQ ID NO: 8657 - RNA, 23 nt, Artificial
  Chemically synthesized
gcugccauuuagcugaagugugg

SEQ ID NO: 8658 - RNA, 23 nt, Artificial
  Chemically synthesized
acaaccugucgagauguuguaga

SEQ ID NO: 8659 - RNA, 23 nt, Artificial
  Chemically synthesized
uguuuucuugagcaacaaugaac

SEQ ID NO: 8660 - RNA, 23 nt, Artificial
  Chemically synthesized
ugaauuguacguacaggcuuuuu

SEQ ID NO: 8661 - RNA, 23 nt, Artificial
  Chemically synthesized
gugaauuguacguacaggcuuuu

SEQ ID NO: 8662 - RNA, 23 nt, Artificial
  Chemically synthesized
ugugaauuguacguacaggcuuu

SEQ ID NO: 8663 - RNA, 23 nt, Artificial
  Chemically synthesized
aggauuuccguaccgccaagucc

SEQ ID NO: 8664 - RNA, 23 nt, Artificial
  Chemically synthesized
gaggauuuccguaccgccaaguc

SEQ ID NO: 8665 - RNA, 23 nt, Artificial
  Chemically synthesized
agaggauuuccguaccgccaagu

SEQ ID NO: 8666 - RNA, 23 nt, Artificial
  Chemically synthesized
cagaggauuuccguaccgccaag

SEQ ID NO: 8667 - RNA, 23 nt, Artificial
  Chemically synthesized
gcagaggauuuccguaccgccaa

SEQ ID NO: 8668 - RNA, 23 nt, Artificial
  Chemically synthesized
cugcugacgcuguguaaaugugc

SEQ ID NO: 8669 - RNA, 23 nt, Artificial
  Chemically synthesized
ccucuguauggaaacauguccag

SEQ ID NO: 8670 - RNA, 23 nt, Artificial
  Chemically synthesized
gccucuguauggaaacaugucca

SEQ ID NO: 8671 - RNA, 23 nt, Artificial
  Chemically synthesized
agccucuguauggaaacaugucc

SEQ ID NO: 8672 - RNA, 23 nt, Artificial
  Chemically synthesized
gagccucuguauggaaacauguc

SEQ ID NO: 8673 - RNA, 23 nt, Artificial
  Chemically synthesized
ggagccucuguauggaaacaugu

SEQ ID NO: 8674 - RNA, 23 nt, Artificial
  Chemically synthesized
ugcugcugauagugauggaugga

SEQ ID NO: 8675 - RNA, 23 nt, Artificial
  Chemically synthesized
augcugcugauagugauggaugg

SEQ ID NO: 8676 - RNA, 23 nt, Artificial
  Chemically synthesized
aaugcugcugauagugauggaug

SEQ ID NO: 8677 - RNA, 23 nt, Artificial
  Chemically synthesized
gcgcaaggacgaaagcgagacug

SEQ ID NO: 8678 - RNA, 23 nt, Artificial
  Chemically synthesized
ggcgcaaggacgaaagcgagacu

SEQ ID NO: 8679 - RNA, 23 nt, Artificial
  Chemically synthesized
caacauccagaagcugcuguacc

SEQ ID NO: 8680 - RNA, 23 nt, Artificial
  Chemically synthesized
ccaacauccagaagcugcuguac

SEQ ID NO: 8681 - RNA, 23 nt, Artificial
  Chemically synthesized
cccaacauccagaagcugcugua

SEQ ID NO: 8682 - RNA, 23 nt, Artificial
  Chemically synthesized
uauuuggauuuauaguaauuggc

SEQ ID NO: 8683 - RNA, 23 nt, Artificial
  Chemically synthesized
auuuggauuuauaguaauuggca

SEQ ID NO: 8684 - RNA, 23 nt, Artificial
  Chemically synthesized
uuuggauuuauaguaauuggcaa

SEQ ID NO: 8685 - RNA, 23 nt, Artificial
  Chemically synthesized
uuggauuuauaguaauuggcaaa

SEQ ID NO: 8686 - RNA, 23 nt, Artificial
  Chemically synthesized
uggauuuauaguaauuggcaaaa

SEQ ID NO: 8687 - RNA, 23 nt, Artificial
  Chemically synthesized
guuguuguuauuguccucugccg

SEQ ID NO: 8688 - RNA, 23 nt, Artificial
  Chemically synthesized
uuguuguuauuguccucugccgg

SEQ ID NO: 8689 - RNA, 23 nt, Artificial
  Chemically synthesized
uguuguuauuguccucugccggc

SEQ ID NO: 8690 - RNA, 23 nt, Artificial
  Chemically synthesized
guuguuauuguccucugccggcu

SEQ ID NO: 8691 - RNA, 23 nt, Artificial
  Chemically synthesized
uuguuauuguccucugccggcuc

SEQ ID NO: 8692 - RNA, 23 nt, Artificial
  Chemically synthesized
ccacguuguuguuauuguccucu

SEQ ID NO: 8693 - RNA, 23 nt, Artificial
  Chemically synthesized
cacguuguuguuauuguccucug

SEQ ID NO: 8694 - RNA, 23 nt, Artificial
  Chemically synthesized
acguuguuguuauuguccucugc

SEQ ID NO: 8695 - RNA, 23 nt, Artificial
  Chemically synthesized
cguuguuguuauuguccucugcc

SEQ ID NO: 8696 - RNA, 23 nt, Artificial
  Chemically synthesized
uggccacguuguuguuauugucc

SEQ ID NO: 8697 - RNA, 23 nt, Artificial
  Chemically synthesized
ggccacguuguuguuauuguccu

SEQ ID NO: 8698 - RNA, 23 nt, Artificial
  Chemically synthesized
gccacguuguuguuauuguccuc

SEQ ID NO: 8699 - RNA, 23 nt, Artificial
  Chemically synthesized
ccauuuucaguacguuuuucucc

SEQ ID NO: 8700 - RNA, 23 nt, Artificial
  Chemically synthesized
cauuuucaguacguuuuucucca

SEQ ID NO: 8701 - RNA, 23 nt, Artificial
  Chemically synthesized
auuuucaguacguuuuucuccag

SEQ ID NO: 8702 - RNA, 23 nt, Artificial
  Chemically synthesized
uuuucaguacguuuuucuccagg

SEQ ID NO: 8703 - RNA, 23 nt, Artificial
  Chemically synthesized
uuucaguacguuuuucuccaggu

SEQ ID NO: 8704 - RNA, 23 nt, Artificial
  Chemically synthesized
acgguucagcugaauuuuuuucc

SEQ ID NO: 8705 - RNA, 23 nt, Artificial
  Chemically synthesized
cgguucagcugaauuuuuuuccc

SEQ ID NO: 8706 - RNA, 23 nt, Artificial
  Chemically synthesized
gguucagcugaauuuuuuuccca

SEQ ID NO: 8707 - RNA, 23 nt, Artificial
  Chemically synthesized
guucagcugaauuuuuuucccau

SEQ ID NO: 8708 - RNA, 23 nt, Artificial
  Chemically synthesized
uucagcugaauuuuuuucccaua

SEQ ID NO: 8709 - RNA, 23 nt, Artificial
  Chemically synthesized
cagauugccguucaugauuuugc

SEQ ID NO: 8710 - RNA, 23 nt, Artificial
  Chemically synthesized
agauugccguucaugauuuugcu

SEQ ID NO: 8711 - RNA, 23 nt, Artificial
  Chemically synthesized
gauugccguucaugauuuugcug

SEQ ID NO: 8712 - RNA, 23 nt, Artificial
  Chemically synthesized
auugccguucaugauuuugcugu

SEQ ID NO: 8713 - RNA, 23 nt, Artificial
  Chemically synthesized
uugccguucaugauuuugcugua

SEQ ID NO: 8714 - RNA, 23 nt, Artificial
  Chemically synthesized
gaaguuuugaauuuuguuccugg

SEQ ID NO: 8715 - RNA, 23 nt, Artificial
  Chemically synthesized
aaguuuugaauuuuguuccuggu

SEQ ID NO: 8716 - RNA, 23 nt, Artificial
  Chemically synthesized
aguuuugaauuuuguuccugguu

SEQ ID NO: 8717 - RNA, 23 nt, Artificial
  Chemically synthesized
guuuugaauuuuguuccugguua

SEQ ID NO: 8718 - RNA, 23 nt, Artificial
  Chemically synthesized
uuuugaauuuuguuccugguuaa

SEQ ID NO: 8719 - RNA, 23 nt, Artificial
  Chemically synthesized
cacuuuaccaaucucgaugcccg

SEQ ID NO: 8720 - RNA, 23 nt, Artificial
  Chemically synthesized
acuuuaccaaucucgaugcccgg

SEQ ID NO: 8721 - RNA, 23 nt, Artificial
  Chemically synthesized
cuuuaccaaucucgaugcccggc

SEQ ID NO: 8722 - RNA, 23 nt, Artificial
  Chemically synthesized
uuuaccaaucucgaugcccggcu

SEQ ID NO: 8723 - RNA, 23 nt, Artificial
  Chemically synthesized
uuaccaaucucgaugcccggcuu

SEQ ID NO: 8724 - RNA, 23 nt, Artificial
  Chemically synthesized
gggguuaaaccggacucucagcc

SEQ ID NO: 8725 - RNA, 23 nt, Artificial
  Chemically synthesized
ggguuaaaccggacucucagccc

SEQ ID NO: 8726 - RNA, 23 nt, Artificial
  Chemically synthesized
gguuaaaccggacucucagcccg

SEQ ID NO: 8727 - RNA, 23 nt, Artificial
  Chemically synthesized
guuaaaccggacucucagcccgu

SEQ ID NO: 8728 - RNA, 23 nt, Artificial
  Chemically synthesized
uuaaaccggacucucagcccgug

SEQ ID NO: 8729 - RNA, 23 nt, Artificial
  Chemically synthesized
uacguuuuucuccagguacauuu

SEQ ID NO: 8730 - RNA, 23 nt, Artificial
  Chemically synthesized
acguuuuucuccagguacauuua

SEQ ID NO: 8731 - RNA, 23 nt, Artificial
  Chemically synthesized
cguuuuucuccagguacauuuau

SEQ ID NO: 8732 - RNA, 23 nt, Artificial
  Chemically synthesized
guuuuucuccagguacauuuauu

SEQ ID NO: 8733 - RNA, 23 nt, Artificial
  Chemically synthesized
uuuuucuccagguacauuuauua

SEQ ID NO: 8734 - RNA, 23 nt, Artificial
  Chemically synthesized
cuguuuuaauguuggccaguuuc

SEQ ID NO: 8735 - RNA, 23 nt, Artificial
  Chemically synthesized
uguuuuaauguuggccaguuucc

SEQ ID NO: 8736 - RNA, 23 nt, Artificial
  Chemically synthesized
guuuuaauguuggccaguuucca

SEQ ID NO: 8737 - RNA, 23 nt, Artificial
  Chemically synthesized
uuuuaauguuggccaguuuccau

SEQ ID NO: 8738 - RNA, 23 nt, Artificial
  Chemically synthesized
uuuaauguuggccaguuuccauc

SEQ ID NO: 8739 - RNA, 23 nt, Artificial
  Chemically synthesized
aguuaauaucaucggcaucaucg

SEQ ID NO: 8740 - RNA, 23 nt, Artificial
  Chemically synthesized
guuaauaucaucggcaucaucgc

SEQ ID NO: 8741 - RNA, 23 nt, Artificial
  Chemically synthesized
uuaauaucaucggcaucaucgcg

SEQ ID NO: 8742 - RNA, 23 nt, Artificial
  Chemically synthesized
uaauaucaucggcaucaucgcgg

SEQ ID NO: 8743 - RNA, 23 nt, Artificial
  Chemically synthesized
aauaucaucggcaucaucgcggg

SEQ ID NO: 8744 - RNA, 23 nt, Artificial
  Chemically synthesized
agaauucuguuuuaauguuggcc

SEQ ID NO: 8745 - RNA, 23 nt, Artificial
  Chemically synthesized
gaauucuguuuuaauguuggcca

SEQ ID NO: 8746 - RNA, 23 nt, Artificial
  Chemically synthesized
aauucuguuuuaauguuggccag

SEQ ID NO: 8747 - RNA, 23 nt, Artificial
  Chemically synthesized
auucuguuuuaauguuggccagu

SEQ ID NO: 8748 - RNA, 23 nt, Artificial
  Chemically synthesized
uucuguuuuaauguuggccaguu

SEQ ID NO: 8749 - RNA, 23 nt, Artificial
  Chemically synthesized
cccauuucugaagauguucguac

SEQ ID NO: 8750 - RNA, 23 nt, Artificial
  Chemically synthesized
ccauuucugaagauguucguaca

SEQ ID NO: 8751 - RNA, 23 nt, Artificial
  Chemically synthesized
cauuucugaagauguucguacau

SEQ ID NO: 8752 - RNA, 23 nt, Artificial
  Chemically synthesized
auuucugaagauguucguacauc

SEQ ID NO: 8753 - RNA, 23 nt, Artificial
  Chemically synthesized
uuucugaagauguucguacauca

SEQ ID NO: 8754 - RNA, 23 nt, Artificial
  Chemically synthesized
caccauuaagaccauuuucuagc

SEQ ID NO: 8755 - RNA, 23 nt, Artificial
  Chemically synthesized
accauuaagaccauuuucuagcu

SEQ ID NO: 8756 - RNA, 23 nt, Artificial
  Chemically synthesized
ccauuaagaccauuuucuagcug

SEQ ID NO: 8757 - RNA, 23 nt, Artificial
  Chemically synthesized
cauuaagaccauuuucuagcugc

SEQ ID NO: 8758 - RNA, 23 nt, Artificial
  Chemically synthesized
auuaagaccauuuucuagcugca

SEQ ID NO: 8759 - RNA, 23 nt, Artificial
  Chemically synthesized
uuuauuacauuucucugaguucg

SEQ ID NO: 8760 - RNA, 23 nt, Artificial
  Chemically synthesized
uuauuacauuucucugaguucgu

SEQ ID NO: 8761 - RNA, 23 nt, Artificial
  Chemically synthesized
uauuacauuucucugaguucguu

SEQ ID NO: 8762 - RNA, 23 nt, Artificial
  Chemically synthesized
auuacauuucucugaguucguug

SEQ ID NO: 8763 - RNA, 23 nt, Artificial
  Chemically synthesized
uuacauuucucugaguucguugc

SEQ ID NO: 8764 - RNA, 23 nt, Artificial
  Chemically synthesized
agaguauaugcugaggcucuccc

SEQ ID NO: 8765 - RNA, 23 nt, Artificial
  Chemically synthesized
gaguauaugcugaggcucuccca

SEQ ID NO: 8766 - RNA, 23 nt, Artificial
  Chemically synthesized
aguauaugcugaggcucucccag

SEQ ID NO: 8767 - RNA, 23 nt, Artificial
  Chemically synthesized
guauaugcugaggcucucccagu

SEQ ID NO: 8768 - RNA, 23 nt, Artificial
  Chemically synthesized
uauaugcugaggcucucccaguu

SEQ ID NO: 8769 - RNA, 23 nt, Artificial
  Chemically synthesized
cauuuucagaaauagacugcugc

SEQ ID NO: 8770 - RNA, 23 nt, Artificial
  Chemically synthesized
auuuucagaaauagacugcugcu

SEQ ID NO: 8771 - RNA, 23 nt, Artificial
  Chemically synthesized
uuuucagaaauagacugcugcug

SEQ ID NO: 8772 - RNA, 23 nt, Artificial
  Chemically synthesized
uuucagaaauagacugcugcuga

SEQ ID NO: 8773 - RNA, 23 nt, Artificial
  Chemically synthesized
uucagaaauagacugcugcugac

SEQ ID NO: 8774 - RNA, 23 nt, Artificial
  Chemically synthesized
uuucuauuucagcagacagauug

SEQ ID NO: 8775 - RNA, 23 nt, Artificial
  Chemically synthesized
uucuauuucagcagacagauugc

SEQ ID NO: 8776 - RNA, 23 nt, Artificial
  Chemically synthesized
ucuauuucagcagacagauugcc

SEQ ID NO: 8777 - RNA, 23 nt, Artificial
  Chemically synthesized
cuauuucagcagacagauugccg

SEQ ID NO: 8778 - RNA, 23 nt, Artificial
  Chemically synthesized
uauuucagcagacagauugccgu

SEQ ID NO: 8779 - RNA, 23 nt, Artificial
  Chemically synthesized
uuaauguuggccaguuuccauca

SEQ ID NO: 8780 - RNA, 23 nt, Artificial
  Chemically synthesized
gcacuuuaccaaucucgaugccc

SEQ ID NO: 8781 - RNA, 23 nt, Artificial
  Chemically synthesized
auuucagcagacagauugccguu

SEQ ID NO: 8782 - RNA, 23 nt, Artificial
  Chemically synthesized
uuucagcagacagauugccguuc

SEQ ID NO: 8783 - RNA, 23 nt, Artificial
  Chemically synthesized
uucagcagacagauugccguuca

SEQ ID NO: 8784 - RNA, 23 nt, Artificial
  Chemically synthesized
auuuucuagcugcagcuuuccug

SEQ ID NO: 8785 - RNA, 23 nt, Artificial
  Chemically synthesized
uuuucuagcugcagcuuuccugg

SEQ ID NO: 8786 - RNA, 23 nt, Artificial
  Chemically synthesized
uuucuagcugcagcuuuccugga

SEQ ID NO: 8787 - RNA, 23 nt, Artificial
  Chemically synthesized
uucuagcugcagcuuuccuggaa

SEQ ID NO: 8788 - RNA, 23 nt, Artificial
  Chemically synthesized
ucuagcugcagcuuuccuggaaa

SEQ ID NO: 8789 - RNA, 23 nt, Artificial
  Chemically synthesized
cuucuuuuccuggaacauggcac

SEQ ID NO: 8790 - RNA, 23 nt, Artificial
  Chemically synthesized
uucuuuuccuggaacauggcacu

SEQ ID NO: 8791 - RNA, 23 nt, Artificial
  Chemically synthesized
ucuuuuccuggaacauggcacug

SEQ ID NO: 8792 - RNA, 23 nt, Artificial
  Chemically synthesized
cuuuuccuggaacauggcacuga

SEQ ID NO: 8793 - RNA, 23 nt, Artificial
  Chemically synthesized
uuuuccuggaacauggcacugaa

SEQ ID NO: 8794 - RNA, 23 nt, Artificial
  Chemically synthesized
guccucucauugcacgaauuuuc

SEQ ID NO: 8795 - RNA, 23 nt, Artificial
  Chemically synthesized
uccucucauugcacgaauuuucu

SEQ ID NO: 8796 - RNA, 23 nt, Artificial
  Chemically synthesized
ccucucauugcacgaauuuucuu

SEQ ID NO: 8797 - RNA, 23 nt, Artificial
  Chemically synthesized
cucucauugcacgaauuuucuuc

SEQ ID NO: 8798 - RNA, 23 nt, Artificial
  Chemically synthesized
ucucauugcacgaauuuucuuca

SEQ ID NO: 8799 - RNA, 23 nt, Artificial
  Chemically synthesized
ucacuuuucuucaccacacuaug

SEQ ID NO: 8800 - RNA, 23 nt, Artificial
  Chemically synthesized
cacuuuucuucaccacacuaugu

SEQ ID NO: 8801 - RNA, 23 nt, Artificial
  Chemically synthesized
acuuuucuucaccacacuaugua

SEQ ID NO: 8802 - RNA, 23 nt, Artificial
  Chemically synthesized
cuuuucuucaccacacuauguac

SEQ ID NO: 8803 - RNA, 23 nt, Artificial
  Chemically synthesized
uuuucuucaccacacuauguaca

SEQ ID NO: 8804 - RNA, 23 nt, Artificial
  Chemically synthesized
acugauucgcuuguccaucaugg

SEQ ID NO: 8805 - RNA, 23 nt, Artificial
  Chemically synthesized
cugauucgcuuguccaucauggc

SEQ ID NO: 8806 - RNA, 23 nt, Artificial
  Chemically synthesized
ugauucgcuuguccaucauggcc

SEQ ID NO: 8807 - RNA, 23 nt, Artificial
  Chemically synthesized
gauucgcuuguccaucauggcca

SEQ ID NO: 8808 - RNA, 23 nt, Artificial
  Chemically synthesized
auucgcuuguccaucauggccac

SEQ ID NO: 8809 - RNA, 23 nt, Artificial
  Chemically synthesized
cgaguugggcuucuucaaguugg

SEQ ID NO: 8810 - RNA, 23 nt, Artificial
  Chemically synthesized
gaguugggcuucuucaaguuggu

SEQ ID NO: 8811 - RNA, 23 nt, Artificial
  Chemically synthesized
aguugggcuucuucaaguugguc

SEQ ID NO: 8812 - RNA, 23 nt, Artificial
  Chemically synthesized
guugggcuucuucaaguuggucc

SEQ ID NO: 8813 - RNA, 23 nt, Artificial
  Chemically synthesized
uugggcuucuucaaguugguccg

SEQ ID NO: 8814 - RNA, 23 nt, Artificial
  Chemically synthesized
agucuuuuuaacuccaccgccgc

SEQ ID NO: 8815 - RNA, 23 nt, Artificial
  Chemically synthesized
gucuuuuuaacuccaccgccgcu

SEQ ID NO: 8816 - RNA, 23 nt, Artificial
  Chemically synthesized
ucuuuuuaacuccaccgccgcug

SEQ ID NO: 8817 - RNA, 23 nt, Artificial
  Chemically synthesized
cuuuuuaacuccaccgccgcugg

SEQ ID NO: 8818 - RNA, 23 nt, Artificial
  Chemically synthesized
uuuuuaacuccaccgccgcuggu

SEQ ID NO: 8819 - RNA, 23 nt, Artificial
  Chemically synthesized
uugguauauaaaaagccuguacg

SEQ ID NO: 8820 - RNA, 23 nt, Artificial
  Chemically synthesized
ugguauauaaaaagccuguacgu

SEQ ID NO: 8821 - RNA, 23 nt, Artificial
  Chemically synthesized
gguauauaaaaagccuguacgua

SEQ ID NO: 8822 - RNA, 23 nt, Artificial
  Chemically synthesized
guauauaaaaagccuguacguac

SEQ ID NO: 8823 - RNA, 23 nt, Artificial
  Chemically synthesized
uauauaaaaagccuguacguaca

SEQ ID NO: 8824 - RNA, 23 nt, Artificial
  Chemically synthesized
gauuuucaaucugcugcuguugc

SEQ ID NO: 8825 - RNA, 23 nt, Artificial
  Chemically synthesized
auuuucaaucugcugcuguugcc

SEQ ID NO: 8826 - RNA, 23 nt, Artificial
  Chemically synthesized
uuuucaaucugcugcuguugccu

SEQ ID NO: 8827 - RNA, 23 nt, Artificial
  Chemically synthesized
uuucaaucugcugcuguugccua

SEQ ID NO: 8828 - RNA, 23 nt, Artificial
  Chemically synthesized
uucaaucugcugcuguugccuag

SEQ ID NO: 8829 - RNA, 23 nt, Artificial
  Chemically synthesized
accuuuguucaucacacccagcu

SEQ ID NO: 8830 - RNA, 23 nt, Artificial
  Chemically synthesized
ccuuuguucaucacacccagcuu

SEQ ID NO: 8831 - RNA, 23 nt, Artificial
  Chemically synthesized
cuuuguucaucacacccagcuuu

SEQ ID NO: 8832 - RNA, 23 nt, Artificial
  Chemically synthesized
uuuguucaucacacccagcuuuu

SEQ ID NO: 8833 - RNA, 23 nt, Artificial
  Chemically synthesized
uuguucaucacacccagcuuuuc

SEQ ID NO: 8834 - RNA, 23 nt, Artificial
  Chemically synthesized
aaauuucacuucuucccuccgug

SEQ ID NO: 8835 - RNA, 23 nt, Artificial
  Chemically synthesized
aauuucacuucuucccuccgugg

SEQ ID NO: 8836 - RNA, 23 nt, Artificial
  Chemically synthesized
auuucacuucuucccuccgugga

SEQ ID NO: 8837 - RNA, 23 nt, Artificial
  Chemically synthesized
uuucacuucuucccuccguggac

SEQ ID NO: 8838 - RNA, 23 nt, Artificial
  Chemically synthesized
uucacuucuucccuccguggacc

SEQ ID NO: 8839 - RNA, 23 nt, Artificial
  Chemically synthesized
ugcuuuagaaaauguaaacgcug

SEQ ID NO: 8840 - RNA, 23 nt, Artificial
  Chemically synthesized
gcuuuagaaaauguaaacgcugu

SEQ ID NO: 8841 - RNA, 23 nt, Artificial
  Chemically synthesized
cuuuagaaaauguaaacgcuguu

SEQ ID NO: 8842 - RNA, 23 nt, Artificial
  Chemically synthesized
uuuagaaaauguaaacgcuguuc

SEQ ID NO: 8843 - RNA, 23 nt, Artificial
  Chemically synthesized
uuagaaaauguaaacgcuguucc

SEQ ID NO: 8844 - RNA, 23 nt, Artificial
  Chemically synthesized
uauuuaagaguuccuucugcugc

SEQ ID NO: 8845 - RNA, 23 nt, Artificial
  Chemically synthesized
auuuaagaguuccuucugcugcu

SEQ ID NO: 8846 - RNA, 23 nt, Artificial
  Chemically synthesized
uuuaagaguuccuucugcugcug

SEQ ID NO: 8847 - RNA, 23 nt, Artificial
  Chemically synthesized
uuaagaguuccuucugcugcuga

SEQ ID NO: 8848 - RNA, 23 nt, Artificial
  Chemically synthesized
uaagaguuccuucugcugcugaa

SEQ ID NO: 8849 - RNA, 23 nt, Artificial
  Chemically synthesized
aaccuuucuauuucagcagacag

SEQ ID NO: 8850 - RNA, 23 nt, Artificial
  Chemically synthesized
accuuucuauuucagcagacaga

SEQ ID NO: 8851 - RNA, 23 nt, Artificial
  Chemically synthesized
ccuuucuauuucagcagacagau

SEQ ID NO: 8852 - RNA, 23 nt, Artificial
  Chemically synthesized
cuuucuauuucagcagacagauu

SEQ ID NO: 8853 - RNA, 23 nt, Artificial
  Chemically synthesized
acgaauuuucuucagcuuguucu

SEQ ID NO: 8854 - RNA, 23 nt, Artificial
  Chemically synthesized
cgaauuuucuucagcuuguucuc

SEQ ID NO: 8855 - RNA, 23 nt, Artificial
  Chemically synthesized
gaauuuucuucagcuuguucucc

SEQ ID NO: 8856 - RNA, 23 nt, Artificial
  Chemically synthesized
aauuuucuucagcuuguucuccu

SEQ ID NO: 8857 - RNA, 23 nt, Artificial
  Chemically synthesized
auuuucuucagcuuguucuccug

SEQ ID NO: 8858 - RNA, 23 nt, Artificial
  Chemically synthesized
cccauuuucaguacguuuuucuc

SEQ ID NO: 8859 - RNA, 23 nt, Artificial
  Chemically synthesized
aaaauugcagucuguacuuccug

SEQ ID NO: 8860 - RNA, 23 nt, Artificial
  Chemically synthesized
aaauugcagucuguacuuccugc

SEQ ID NO: 8861 - RNA, 23 nt, Artificial
  Chemically synthesized
aauugcagucuguacuuccugcu

SEQ ID NO: 8862 - RNA, 23 nt, Artificial
  Chemically synthesized
auugcagucuguacuuccugcuu

SEQ ID NO: 8863 - RNA, 23 nt, Artificial
  Chemically synthesized
uugcagucuguacuuccugcuuc

SEQ ID NO: 8864 - RNA, 23 nt, Artificial
  Chemically synthesized
ugacuuauuuaaggcgcugugug

SEQ ID NO: 8865 - RNA, 23 nt, Artificial
  Chemically synthesized
gacuuauuuaaggcgcugugugc

SEQ ID NO: 8866 - RNA, 23 nt, Artificial
  Chemically synthesized
acuuauuuaaggcgcugugugcu

SEQ ID NO: 8867 - RNA, 23 nt, Artificial
  Chemically synthesized
cuuauuuaaggcgcugugugcug

SEQ ID NO: 8868 - RNA, 23 nt, Artificial
  Chemically synthesized
uuauuuaaggcgcugugugcugc

SEQ ID NO: 8869 - RNA, 23 nt, Artificial
  Chemically synthesized
cugcuucuuuuccuggaacaugg

SEQ ID NO: 8870 - RNA, 23 nt, Artificial
  Chemically synthesized
ugcuucuuuuccuggaacauggc

SEQ ID NO: 8871 - RNA, 23 nt, Artificial
  Chemically synthesized
gcuucuuuuccuggaacauggca

SEQ ID NO: 8872 - RNA, 23 nt, Artificial
  Chemically synthesized
augauuuugcuguagucgacuug

SEQ ID NO: 8873 - RNA, 23 nt, Artificial
  Chemically synthesized
ugauuuugcuguagucgacuugu

SEQ ID NO: 8874 - RNA, 23 nt, Artificial
  Chemically synthesized
gauuuugcuguagucgacuuguc

SEQ ID NO: 8875 - RNA, 23 nt, Artificial
  Chemically synthesized
auuuugcuguagucgacuugucc

SEQ ID NO: 8876 - RNA, 23 nt, Artificial
  Chemically synthesized
uuuugcuguagucgacuuguccu

SEQ ID NO: 8877 - RNA, 23 nt, Artificial
  Chemically synthesized
guagucgacuuguccucucauug

SEQ ID NO: 8878 - RNA, 23 nt, Artificial
  Chemically synthesized
uagucgacuuguccucucauugc

SEQ ID NO: 8879 - RNA, 23 nt, Artificial
  Chemically synthesized
agucgacuuguccucucauugca

SEQ ID NO: 8880 - RNA, 23 nt, Artificial
  Chemically synthesized
gucgacuuguccucucauugcac

SEQ ID NO: 8881 - RNA, 23 nt, Artificial
  Chemically synthesized
ucgacuuguccucucauugcacg

SEQ ID NO: 8882 - RNA, 23 nt, Artificial
  Chemically synthesized
gcaguucacugauucgcuugucc

SEQ ID NO: 8883 - RNA, 23 nt, Artificial
  Chemically synthesized
caguucacugauucgcuugucca

SEQ ID NO: 8884 - RNA, 23 nt, Artificial
  Chemically synthesized
aguucacugauucgcuuguccau

SEQ ID NO: 8885 - RNA, 23 nt, Artificial
  Chemically synthesized
guucacugauucgcuuguccauc

SEQ ID NO: 8886 - RNA, 23 nt, Artificial
  Chemically synthesized
uucacugauucgcuuguccauca

SEQ ID NO: 8887 - RNA, 23 nt, Artificial
  Chemically synthesized
aaaauucuacaacaucucgacag

SEQ ID NO: 8888 - RNA, 23 nt, Artificial
  Chemically synthesized
aaauucuacaacaucucgacagg

SEQ ID NO: 8889 - RNA, 23 nt, Artificial
  Chemically synthesized
aauucuacaacaucucgacaggu

SEQ ID NO: 8890 - RNA, 23 nt, Artificial
  Chemically synthesized
auucuacaacaucucgacagguu

SEQ ID NO: 8891 - RNA, 23 nt, Artificial
  Chemically synthesized
uucuacaacaucucgacagguug

SEQ ID NO: 8892 - RNA, 23 nt, Artificial
  Chemically synthesized
agcuucugucuucacuggcaacc

SEQ ID NO: 8893 - RNA, 23 nt, Artificial
  Chemically synthesized
gcuucugucuucacuggcaacca

SEQ ID NO: 8894 - RNA, 23 nt, Artificial
  Chemically synthesized
cuucugucuucacuggcaaccaa

SEQ ID NO: 8895 - RNA, 23 nt, Artificial
  Chemically synthesized
uucugucuucacuggcaaccaac

SEQ ID NO: 8896 - RNA, 23 nt, Artificial
  Chemically synthesized
ucugucuucacuggcaaccaacc

SEQ ID NO: 8897 - RNA, 23 nt, Artificial
  Chemically synthesized
caucacuaucagcagcauucacg

SEQ ID NO: 8898 - RNA, 23 nt, Artificial
  Chemically synthesized
aucacuaucagcagcauucacgu

SEQ ID NO: 8899 - RNA, 23 nt, Artificial
  Chemically synthesized
ucacuaucagcagcauucacguu

SEQ ID NO: 8900 - RNA, 23 nt, Artificial
  Chemically synthesized
cacuaucagcagcauucacguug

SEQ ID NO: 8901 - RNA, 23 nt, Artificial
  Chemically synthesized
acuaucagcagcauucacguuga

SEQ ID NO: 8902 - RNA, 23 nt, Artificial
  Chemically synthesized
uuucuccagguacauuuauuaca

SEQ ID NO: 8903 - RNA, 23 nt, Artificial
  Chemically synthesized
uucuccagguacauuuauuacau

SEQ ID NO: 8904 - RNA, 23 nt, Artificial
  Chemically synthesized
ucuccagguacauuuauuacauu

SEQ ID NO: 8905 - RNA, 23 nt, Artificial
  Chemically synthesized
cuccagguacauuuauuacauuu

SEQ ID NO: 8906 - RNA, 23 nt, Artificial
  Chemically synthesized
uccagguacauuuauuacauuuc

SEQ ID NO: 8907 - RNA, 23 nt, Artificial
  Chemically synthesized
uucaguacguuuuucuccaggua

SEQ ID NO: 8908 - RNA, 23 nt, Artificial
  Chemically synthesized
guacuuccugcuucuuuuccugg

SEQ ID NO: 8909 - RNA, 23 nt, Artificial
  Chemically synthesized
uacuuccugcuucuuuuccugga

SEQ ID NO: 8910 - RNA, 23 nt, Artificial
  Chemically synthesized
acuuccugcuucuuuuccuggaa

SEQ ID NO: 8911 - RNA, 23 nt, Artificial
  Chemically synthesized
cuuccugcuucuuuuccuggaac

SEQ ID NO: 8912 - RNA, 23 nt, Artificial
  Chemically synthesized
uuccugcuucuuuuccuggaaca

SEQ ID NO: 8913 - RNA, 23 nt, Artificial
  Chemically synthesized
cccuuaaaauugcagucuguacu

SEQ ID NO: 8914 - RNA, 23 nt, Artificial
  Chemically synthesized
ccuuaaaauugcagucuguacuu

SEQ ID NO: 8915 - RNA, 23 nt, Artificial
  Chemically synthesized
cuuaaaauugcagucuguacuuc

SEQ ID NO: 8916 - RNA, 23 nt, Artificial
  Chemically synthesized
uuaaaauugcagucuguacuucc

SEQ ID NO: 8917 - RNA, 23 nt, Artificial
  Chemically synthesized
uaaaauugcagucuguacuuccu

SEQ ID NO: 8918 - RNA, 23 nt, Artificial
  Chemically synthesized
ugcgcuuauuuaagaguuccuuc

SEQ ID NO: 8919 - RNA, 23 nt, Artificial
  Chemically synthesized
gcgcuuauuuaagaguuccuucu

SEQ ID NO: 8920 - RNA, 23 nt, Artificial
  Chemically synthesized
cgcuuauuuaagaguuccuucug

SEQ ID NO: 8921 - RNA, 23 nt, Artificial
  Chemically synthesized
gcuuauuuaagaguuccuucugc

SEQ ID NO: 8922 - RNA, 23 nt, Artificial
  Chemically synthesized
cuuauuuaagaguuccuucugcu

SEQ ID NO: 8923 - RNA, 23 nt, Artificial
  Chemically synthesized
ggcguucacuuuucuucaccaca

SEQ ID NO: 8924 - RNA, 23 nt, Artificial
  Chemically synthesized
gcguucacuuuucuucaccacac

SEQ ID NO: 8925 - RNA, 23 nt, Artificial
  Chemically synthesized
cguucacuuuucuucaccacacu

SEQ ID NO: 8926 - RNA, 23 nt, Artificial
  Chemically synthesized
guucacuuuucuucaccacacua

SEQ ID NO: 8927 - RNA, 23 nt, Artificial
  Chemically synthesized
uucacuuuucuucaccacacuau

SEQ ID NO: 8928 - RNA, 23 nt, Artificial
  Chemically synthesized
acagucuuuuuaacuccaccgcc

SEQ ID NO: 8929 - RNA, 23 nt, Artificial
  Chemically synthesized
cagucuuuuuaacuccaccgccg

SEQ ID NO: 8930 - RNA, 23 nt, Artificial
  Chemically synthesized
uuccuggaacauggcacugaacc

SEQ ID NO: 8931 - RNA, 23 nt, Artificial
  Chemically synthesized
uccuggaacauggcacugaaccu

SEQ ID NO: 8932 - RNA, 23 nt, Artificial
  Chemically synthesized
ccuggaacauggcacugaaccuu

SEQ ID NO: 8933 - RNA, 23 nt, Artificial
  Chemically synthesized
cuggaacauggcacugaaccuuu

SEQ ID NO: 8934 - RNA, 23 nt, Artificial
  Chemically synthesized
uggaacauggcacugaaccuuuc

SEQ ID NO: 8935 - RNA, 23 nt, Artificial
  Chemically synthesized
uguuauuguccucugccggcucg

SEQ ID NO: 8936 - RNA, 23 nt, Artificial
  Chemically synthesized
gcuguuccuuggcaaccaacauc

SEQ ID NO: 8937 - RNA, 23 nt, Artificial
  Chemically synthesized
cuguuccuuggcaaccaacaucu

SEQ ID NO: 8938 - RNA, 23 nt, Artificial
  Chemically synthesized
uguuccuuggcaaccaacaucug

SEQ ID NO: 8939 - RNA, 23 nt, Artificial
  Chemically synthesized
guuccuuggcaaccaacaucugc

SEQ ID NO: 8940 - RNA, 23 nt, Artificial
  Chemically synthesized
uuccuuggcaaccaacaucugcu

SEQ ID NO: 8941 - RNA, 23 nt, Artificial
  Chemically synthesized
accauuuucuagcugcagcuuuc

SEQ ID NO: 8942 - RNA, 23 nt, Artificial
  Chemically synthesized
ccauuuucuagcugcagcuuucc

SEQ ID NO: 8943 - RNA, 23 nt, Artificial
  Chemically synthesized
cauuuucuagcugcagcuuuccu

SEQ ID NO: 8944 - RNA, 23 nt, Artificial
  Chemically synthesized
aaacuguaggauucacauugugg

SEQ ID NO: 8945 - RNA, 23 nt, Artificial
  Chemically synthesized
aacuguaggauucacauugugga

SEQ ID NO: 8946 - RNA, 23 nt, Artificial
  Chemically synthesized
acuguaggauucacauuguggac

SEQ ID NO: 8947 - RNA, 23 nt, Artificial
  Chemically synthesized
cuguaggauucacauuguggacg

SEQ ID NO: 8948 - RNA, 23 nt, Artificial
  Chemically synthesized
uguaggauucacauuguggacgc

SEQ ID NO: 8949 - RNA, 23 nt, Artificial
  Chemically synthesized
aguuucaaugucgcuuaugguug

SEQ ID NO: 8950 - RNA, 23 nt, Artificial
  Chemically synthesized
guuucaaugucgcuuaugguuga

SEQ ID NO: 8951 - RNA, 23 nt, Artificial
  Chemically synthesized
uuucaaugucgcuuaugguugag

SEQ ID NO: 8952 - RNA, 23 nt, Artificial
  Chemically synthesized
uucaaugucgcuuaugguugagg

SEQ ID NO: 8953 - RNA, 23 nt, Artificial
  Chemically synthesized
ucaaugucgcuuaugguugaggc

SEQ ID NO: 8954 - RNA, 23 nt, Artificial
  Chemically synthesized
ugauuuucaaucugcugcuguug

SEQ ID NO: 8955 - RNA, 23 nt, Artificial
  Chemically synthesized
aauuuuguuccugguuaaguugg

SEQ ID NO: 8956 - RNA, 23 nt, Artificial
  Chemically synthesized
auuuuguuccugguuaaguuggu

SEQ ID NO: 8957 - RNA, 23 nt, Artificial
  Chemically synthesized
uuuuguuccugguuaaguugguu

SEQ ID NO: 8958 - RNA, 23 nt, Artificial
  Chemically synthesized
uuuguuccugguuaaguugguua

SEQ ID NO: 8959 - RNA, 23 nt, Artificial
  Chemically synthesized
uuguuccugguuaaguugguuac

SEQ ID NO: 8960 - RNA, 23 nt, Artificial
  Chemically synthesized
gaaaauguaaacgcuguuccuug

SEQ ID NO: 8961 - RNA, 23 nt, Artificial
  Chemically synthesized
aaaauguaaacgcuguuccuugg

SEQ ID NO: 8962 - RNA, 23 nt, Artificial
  Chemically synthesized
aaauguaaacgcuguuccuuggc

SEQ ID NO: 8963 - RNA, 23 nt, Artificial
  Chemically synthesized
aauguaaacgcuguuccuuggca

SEQ ID NO: 8964 - RNA, 23 nt, Artificial
  Chemically synthesized
auguaaacgcuguuccuuggcaa

SEQ ID NO: 8965 - RNA, 23 nt, Artificial
  Chemically synthesized
auaaucucuuaaguggcuccugg

SEQ ID NO: 8966 - RNA, 23 nt, Artificial
  Chemically synthesized
uaaucucuuaaguggcuccuggu

SEQ ID NO: 8967 - RNA, 23 nt, Artificial
  Chemically synthesized
aaucucuuaaguggcuccuggua

SEQ ID NO: 8968 - RNA, 23 nt, Artificial
  Chemically synthesized
aucucuuaaguggcuccugguag

SEQ ID NO: 8969 - RNA, 23 nt, Artificial
  Chemically synthesized
ucucuuaaguggcuccugguagc

SEQ ID NO: 8970 - RNA, 23 nt, Artificial
  Chemically synthesized
uucuuuaaaucuuccaauugcug

SEQ ID NO: 8971 - RNA, 23 nt, Artificial
  Chemically synthesized
ucuuuaaaucuuccaauugcuga

SEQ ID NO: 8972 - RNA, 23 nt, Artificial
  Chemically synthesized
cuuuaaaucuuccaauugcugac

SEQ ID NO: 8973 - RNA, 23 nt, Artificial
  Chemically synthesized
uuuaaaucuuccaauugcugacu

SEQ ID NO: 8974 - RNA, 23 nt, Artificial
  Chemically synthesized
uuaaaucuuccaauugcugacua

SEQ ID NO: 8975 - RNA, 23 nt, Artificial
  Chemically synthesized
ugaauuuuuuucccauagagacg

SEQ ID NO: 8976 - RNA, 23 nt, Artificial
  Chemically synthesized
gaauuuuuuucccauagagacgu

SEQ ID NO: 8977 - RNA, 23 nt, Artificial
  Chemically synthesized
aauuuuuuucccauagagacguu

SEQ ID NO: 8978 - RNA, 23 nt, Artificial
  Chemically synthesized
auuuuuuucccauagagacguuc

SEQ ID NO: 8979 - RNA, 23 nt, Artificial
  Chemically synthesized
uuuuuuucccauagagacguuca

SEQ ID NO: 8980 - RNA, 23 nt, Artificial
  Chemically synthesized
cuuguucuccugggcuucaacuc

SEQ ID NO: 8981 - RNA, 23 nt, Artificial
  Chemically synthesized
uuguucuccugggcuucaacucg

SEQ ID NO: 8982 - RNA, 23 nt, Artificial
  Chemically synthesized
uguucuccugggcuucaacucgu

SEQ ID NO: 8983 - RNA, 23 nt, Artificial
  Chemically synthesized
guucuccugggcuucaacucguu

SEQ ID NO: 8984 - RNA, 23 nt, Artificial
  Chemically synthesized
uucuccugggcuucaacucguuc

SEQ ID NO: 8985 - RNA, 23 nt, Artificial
  Chemically synthesized
ggccugcacaaucagccuuuagg

SEQ ID NO: 8986 - RNA, 23 nt, Artificial
  Chemically synthesized
gccugcacaaucagccuuuaggu

SEQ ID NO: 8987 - RNA, 23 nt, Artificial
  Chemically synthesized
ccugcacaaucagccuuuaggug

SEQ ID NO: 8988 - RNA, 23 nt, Artificial
  Chemically synthesized
cugcacaaucagccuuuagguga

SEQ ID NO: 8989 - RNA, 23 nt, Artificial
  Chemically synthesized
ugcacaaucagccuuuaggugaa

SEQ ID NO: 8990 - RNA, 23 nt, Artificial
  Chemically synthesized
auaguaauuggcaaaauucaguc

SEQ ID NO: 8991 - RNA, 23 nt, Artificial
  Chemically synthesized
uaguaauuggcaaaauucagucc

SEQ ID NO: 8992 - RNA, 23 nt, Artificial
  Chemically synthesized
aguaauuggcaaaauucaguccu

SEQ ID NO: 8993 - RNA, 23 nt, Artificial
  Chemically synthesized
guaauuggcaaaauucaguccuu

SEQ ID NO: 8994 - RNA, 23 nt, Artificial
  Chemically synthesized
uaauuggcaaaauucaguccuug

SEQ ID NO: 8995 - RNA, 23 nt, Artificial
  Chemically synthesized
gcuguugccuagcugccauaucu

SEQ ID NO: 8996 - RNA, 23 nt, Artificial
  Chemically synthesized
cuguugccuagcugccauaucuu

SEQ ID NO: 8997 - RNA, 23 nt, Artificial
  Chemically synthesized
uguugccuagcugccauaucuug

SEQ ID NO: 8998 - RNA, 23 nt, Artificial
  Chemically synthesized
guugccuagcugccauaucuugg

SEQ ID NO: 8999 - RNA, 23 nt, Artificial
  Chemically synthesized
uugccuagcugccauaucuugga

SEQ ID NO: 9000 - RNA, 23 nt, Artificial
  Chemically synthesized
cgcuuaugguugaggcaaaaaug

SEQ ID NO: 9001 - RNA, 23 nt, Artificial
  Chemically synthesized
gcuuaugguugaggcaaaaaugg

SEQ ID NO: 9002 - RNA, 23 nt, Artificial
  Chemically synthesized
cuuaugguugaggcaaaaauggc

SEQ ID NO: 9003 - RNA, 23 nt, Artificial
  Chemically synthesized
uuaugguugaggcaaaaauggcg

SEQ ID NO: 9004 - RNA, 23 nt, Artificial
  Chemically synthesized
uaugguugaggcaaaaauggcgg

SEQ ID NO: 9005 - RNA, 23 nt, Artificial
  Chemically synthesized
acccuuaaaauugcagucuguac

SEQ ID NO: 9006 - RNA, 23 nt, Artificial
  Chemically synthesized
acuuuugguauauaaaaagccug

SEQ ID NO: 9007 - RNA, 23 nt, Artificial
  Chemically synthesized
cuuuugguauauaaaaagccugu

SEQ ID NO: 9008 - RNA, 23 nt, Artificial
  Chemically synthesized
uuuugguauauaaaaagccugua

SEQ ID NO: 9009 - RNA, 23 nt, Artificial
  Chemically synthesized
uuugguauauaaaaagccuguac

SEQ ID NO: 9010 - RNA, 23 nt, Artificial
  Chemically synthesized
uggcauugguguuuccauugucc

SEQ ID NO: 9011 - RNA, 23 nt, Artificial
  Chemically synthesized
ggcauugguguuuccauugucca

SEQ ID NO: 9012 - RNA, 23 nt, Artificial
  Chemically synthesized
gcauugguguuuccauuguccac

SEQ ID NO: 9013 - RNA, 23 nt, Artificial
  Chemically synthesized
cauugguguuuccauuguccaca

SEQ ID NO: 9014 - RNA, 23 nt, Artificial
  Chemically synthesized
auugguguuuccauuguccacau

SEQ ID NO: 9015 - RNA, 23 nt, Artificial
  Chemically synthesized
aaggaaaaauuucacuucuuccc

SEQ ID NO: 9016 - RNA, 23 nt, Artificial
  Chemically synthesized
aggaaaaauuucacuucuucccu

SEQ ID NO: 9017 - RNA, 23 nt, Artificial
  Chemically synthesized
ggaaaaauuucacuucuucccuc

SEQ ID NO: 9018 - RNA, 23 nt, Artificial
  Chemically synthesized
gaaaaauuucacuucuucccucc

SEQ ID NO: 9019 - RNA, 23 nt, Artificial
  Chemically synthesized
aaaaauuucacuucuucccuccg

SEQ ID NO: 9020 - RNA, 23 nt, Artificial
  Chemically synthesized
ccaauugcugacuaagcugauca

SEQ ID NO: 9021 - RNA, 23 nt, Artificial
  Chemically synthesized
caauugcugacuaagcugaucaa

SEQ ID NO: 9022 - RNA, 23 nt, Artificial
  Chemically synthesized
aauugcugacuaagcugaucaac

SEQ ID NO: 9023 - RNA, 23 nt, Artificial
  Chemically synthesized
auugcugacuaagcugaucaacc

SEQ ID NO: 9024 - RNA, 23 nt, Artificial
  Chemically synthesized
uugcugacuaagcugaucaaccc

SEQ ID NO: 9025 - RNA, 23 nt, Artificial
  Chemically synthesized
gggguuaugggacuucuuaaugg

SEQ ID NO: 9026 - RNA, 23 nt, Artificial
  Chemically synthesized
ggguuaugggacuucuuaauggc

SEQ ID NO: 9027 - RNA, 23 nt, Artificial
  Chemically synthesized
gguuaugggacuucuuaauggca

SEQ ID NO: 9028 - RNA, 23 nt, Artificial
  Chemically synthesized
guuaugggacuucuuaauggcaa

SEQ ID NO: 9029 - RNA, 23 nt, Artificial
  Chemically synthesized
uuaugggacuucuuaauggcaag

SEQ ID NO: 9030 - RNA, 23 nt, Artificial
  Chemically synthesized
uuuucuucagcuuguucuccugg

SEQ ID NO: 9031 - RNA, 23 nt, Artificial
  Chemically synthesized
cccuuuaucagccaggaaaggcc

SEQ ID NO: 9032 - RNA, 23 nt, Artificial
  Chemically synthesized
ccuuuaucagccaggaaaggccu

SEQ ID NO: 9033 - RNA, 23 nt, Artificial
  Chemically synthesized
cuuuaucagccaggaaaggccua

SEQ ID NO: 9034 - RNA, 23 nt, Artificial
  Chemically synthesized
uuuaucagccaggaaaggccuaa

SEQ ID NO: 9035 - RNA, 23 nt, Artificial
  Chemically synthesized
uuaucagccaggaaaggccuaau

SEQ ID NO: 9036 - RNA, 23 nt, Artificial
  Chemically synthesized
caccuuuguucaucacacccagc

SEQ ID NO: 9037 - RNA, 23 nt, Artificial
  Chemically synthesized
ucuguuuuaauguuggccaguuu

SEQ ID NO: 9038 - RNA, 23 nt, Artificial
  Chemically synthesized
gaauuuuguuccugguuaaguug

SEQ ID NO: 9039 - RNA, 23 nt, Artificial
  Chemically synthesized
uuugcuguagucgacuuguccuc

SEQ ID NO: 9040 - RNA, 23 nt, Artificial
  Chemically synthesized
uugcuguagucgacuuguccucu

SEQ ID NO: 9041 - RNA, 23 nt, Artificial
  Chemically synthesized
ugcuguagucgacuuguccucuc

SEQ ID NO: 9042 - RNA, 23 nt, Artificial
  Chemically synthesized
guacuuucugaagguggcugagg

SEQ ID NO: 9043 - RNA, 23 nt, Artificial
  Chemically synthesized
uacuuucugaagguggcugaggc

SEQ ID NO: 9044 - RNA, 23 nt, Artificial
  Chemically synthesized
acuuucugaagguggcugaggcu

SEQ ID NO: 9045 - RNA, 23 nt, Artificial
  Chemically synthesized
cuuucugaagguggcugaggcug

SEQ ID NO: 9046 - RNA, 23 nt, Artificial
  Chemically synthesized
uuucugaagguggcugaggcugu

SEQ ID NO: 9047 - RNA, 23 nt, Artificial
  Chemically synthesized
uggaaacuguaggauucacauug

SEQ ID NO: 9048 - RNA, 23 nt, Artificial
  Chemically synthesized
ggaaacuguaggauucacauugu

SEQ ID NO: 9049 - RNA, 23 nt, Artificial
  Chemically synthesized
gaaacuguaggauucacauugug

SEQ ID NO: 9050 - RNA, 23 nt, Artificial
  Chemically synthesized
uuauuuaagaguuccuucugcug

SEQ ID NO: 9051 - RNA, 23 nt, Artificial
  Chemically synthesized
gguguaggacuuggguauguccc

SEQ ID NO: 9052 - RNA, 23 nt, Artificial
  Chemically synthesized
guguaggacuuggguauguccca

SEQ ID NO: 9053 - RNA, 23 nt, Artificial
  Chemically synthesized
uguaggacuuggguaugucccau

SEQ ID NO: 9054 - RNA, 23 nt, Artificial
  Chemically synthesized
guaggacuuggguaugucccaua

SEQ ID NO: 9055 - RNA, 23 nt, Artificial
  Chemically synthesized
uaggacuuggguaugucccauag

SEQ ID NO: 9056 - RNA, 23 nt, Artificial
  Chemically synthesized
cagguuuccauuggcauuggugu

SEQ ID NO: 9057 - RNA, 23 nt, Artificial
  Chemically synthesized
agguuuccauuggcauugguguu

SEQ ID NO: 9058 - RNA, 23 nt, Artificial
  Chemically synthesized
gguuuccauuggcauugguguuu

SEQ ID NO: 9059 - RNA, 23 nt, Artificial
  Chemically synthesized
guuuccauuggcauugguguuuc

SEQ ID NO: 9060 - RNA, 23 nt, Artificial
  Chemically synthesized
uuuccauuggcauugguguuucc

SEQ ID NO: 9061 - RNA, 23 nt, Artificial
  Chemically synthesized
aucuuccaccucauagaugaucc

SEQ ID NO: 9062 - RNA, 23 nt, Artificial
  Chemically synthesized
ucuuccaccucauagaugauccu

SEQ ID NO: 9063 - RNA, 23 nt, Artificial
  Chemically synthesized
cuuccaccucauagaugauccuc

SEQ ID NO: 9064 - RNA, 23 nt, Artificial
  Chemically synthesized
uuccaccucauagaugauccucu

SEQ ID NO: 9065 - RNA, 23 nt, Artificial
  Chemically synthesized
uccaccucauagaugauccucug

SEQ ID NO: 9066 - RNA, 23 nt, Artificial
  Chemically synthesized
gcuguuugcagaggugaacgcug

SEQ ID NO: 9067 - RNA, 23 nt, Artificial
  Chemically synthesized
cuguuugcagaggugaacgcugu

SEQ ID NO: 9068 - RNA, 23 nt, Artificial
  Chemically synthesized
uguuugcagaggugaacgcuguu

SEQ ID NO: 9069 - RNA, 23 nt, Artificial
  Chemically synthesized
guuugcagaggugaacgcuguua

SEQ ID NO: 9070 - RNA, 23 nt, Artificial
  Chemically synthesized
uuugcagaggugaacgcuguuac

SEQ ID NO: 9071 - RNA, 23 nt, Artificial
  Chemically synthesized
ggguuuauugugcacauuuacac

SEQ ID NO: 9072 - RNA, 23 nt, Artificial
  Chemically synthesized
gguuuauugugcacauuuacaca

SEQ ID NO: 9073 - RNA, 23 nt, Artificial
  Chemically synthesized
guuuauugugcacauuuacacag

SEQ ID NO: 9074 - RNA, 23 nt, Artificial
  Chemically synthesized
uuuauugugcacauuuacacagc

SEQ ID NO: 9075 - RNA, 23 nt, Artificial
  Chemically synthesized
uuauugugcacauuuacacagcg

SEQ ID NO: 9076 - RNA, 23 nt, Artificial
  Chemically synthesized
uaauguuggccaguuuccaucau

SEQ ID NO: 9077 - RNA, 23 nt, Artificial
  Chemically synthesized
aauguuggccaguuuccaucauu

SEQ ID NO: 9078 - RNA, 23 nt, Artificial
  Chemically synthesized
auguuggccaguuuccaucauua

SEQ ID NO: 9079 - RNA, 23 nt, Artificial
  Chemically synthesized
aaaauuucacuucuucccuccgu

SEQ ID NO: 9080 - RNA, 23 nt, Artificial
  Chemically synthesized
uuuuuucccauagagacguucac

SEQ ID NO: 9081 - RNA, 23 nt, Artificial
  Chemically synthesized
cagguuguuuccgguguuauagg

SEQ ID NO: 9082 - RNA, 23 nt, Artificial
  Chemically synthesized
agguuguuuccgguguuauagga

SEQ ID NO: 9083 - RNA, 23 nt, Artificial
  Chemically synthesized
gguuguuuccgguguuauaggaa

SEQ ID NO: 9084 - RNA, 23 nt, Artificial
  Chemically synthesized
guuguuuccgguguuauaggaac

SEQ ID NO: 9085 - RNA, 23 nt, Artificial
  Chemically synthesized
uuguuuccgguguuauaggaacu

SEQ ID NO: 9086 - RNA, 23 nt, Artificial
  Chemically synthesized
uuuuucccauagagacguucacg

SEQ ID NO: 9087 - RNA, 23 nt, Artificial
  Chemically synthesized
uuuucccauagagacguucacgc

SEQ ID NO: 9088 - RNA, 23 nt, Artificial
  Chemically synthesized
ucuguacuuccugcuucuuuucc

SEQ ID NO: 9089 - RNA, 23 nt, Artificial
  Chemically synthesized
cuguacuuccugcuucuuuuccu

SEQ ID NO: 9090 - RNA, 23 nt, Artificial
  Chemically synthesized
uguacuuccugcuucuuuuccug

SEQ ID NO: 9091 - RNA, 23 nt, Artificial
  Chemically synthesized
agguuuuugggcacauagcccuc

SEQ ID NO: 9092 - RNA, 23 nt, Artificial
  Chemically synthesized
gguuuuugggcacauagcccucc

SEQ ID NO: 9093 - RNA, 23 nt, Artificial
  Chemically synthesized
guuuuugggcacauagcccuccc

SEQ ID NO: 9094 - RNA, 23 nt, Artificial
  Chemically synthesized
uuuuugggcacauagcccucccg

SEQ ID NO: 9095 - RNA, 23 nt, Artificial
  Chemically synthesized
uuuugggcacauagcccucccgg

SEQ ID NO: 9096 - RNA, 23 nt, Artificial
  Chemically synthesized
auauaaaaagccuguacguacaa

SEQ ID NO: 9097 - RNA, 23 nt, Artificial
  Chemically synthesized
uauaaaaagccuguacguacaau

SEQ ID NO: 9098 - RNA, 23 nt, Artificial
  Chemically synthesized
auaaaaagccuguacguacaauu

SEQ ID NO: 9099 - RNA, 23 nt, Artificial
  Chemically synthesized
guacagucuuuuuaacuccaccg

SEQ ID NO: 9100 - RNA, 23 nt, Artificial
  Chemically synthesized
uacagucuuuuuaacuccaccgc

SEQ ID NO: 9101 - RNA, 23 nt, Artificial
  Chemically synthesized
ccaguuaaugggcaaacuggaga

SEQ ID NO: 9102 - RNA, 23 nt, Artificial
  Chemically synthesized
caguuaaugggcaaacuggagaa

SEQ ID NO: 9103 - RNA, 23 nt, Artificial
  Chemically synthesized
aguuaaugggcaaacuggagaaa

SEQ ID NO: 9104 - RNA, 23 nt, Artificial
  Chemically synthesized
guuaaugggcaaacuggagaaag

SEQ ID NO: 9105 - RNA, 23 nt, Artificial
  Chemically synthesized
uuaaugggcaaacuggagaaagg

SEQ ID NO: 9106 - RNA, 23 nt, Artificial
  Chemically synthesized
cagguuccuugcaaaauucuaca

SEQ ID NO: 9107 - RNA, 23 nt, Artificial
  Chemically synthesized
agguuccuugcaaaauucuacaa

SEQ ID NO: 9108 - RNA, 23 nt, Artificial
  Chemically synthesized
gguuccuugcaaaauucuacaac

SEQ ID NO: 9109 - RNA, 23 nt, Artificial
  Chemically synthesized
guuccuugcaaaauucuacaaca

SEQ ID NO: 9110 - RNA, 23 nt, Artificial
  Chemically synthesized
uuccuugcaaaauucuacaacau

SEQ ID NO: 9111 - RNA, 23 nt, Artificial
  Chemically synthesized
guggccacguuguuguuauuguc

SEQ ID NO: 9112 - RNA, 23 nt, Artificial
  Chemically synthesized
uuucuucagcuuguucuccuggg

SEQ ID NO: 9113 - RNA, 23 nt, Artificial
  Chemically synthesized
cagguuuuugggcacauagcccu

SEQ ID NO: 9114 - RNA, 23 nt, Artificial
  Chemically synthesized
gcugcugauuuucaaucugcugc

SEQ ID NO: 9115 - RNA, 23 nt, Artificial
  Chemically synthesized
cugcugauuuucaaucugcugcu

SEQ ID NO: 9116 - RNA, 23 nt, Artificial
  Chemically synthesized
ugcugauuuucaaucugcugcug

SEQ ID NO: 9117 - RNA, 23 nt, Artificial
  Chemically synthesized
gcugauuuucaaucugcugcugu

SEQ ID NO: 9118 - RNA, 23 nt, Artificial
  Chemically synthesized
cugauuuucaaucugcugcuguu

SEQ ID NO: 9119 - RNA, 23 nt, Artificial
  Chemically synthesized
uccuuggcaaccaacaucugcug

SEQ ID NO: 9120 - RNA, 23 nt, Artificial
  Chemically synthesized
ccuuggcaaccaacaucugcugc

SEQ ID NO: 9121 - RNA, 23 nt, Artificial
  Chemically synthesized
cuuggcaaccaacaucugcugcu

SEQ ID NO: 9122 - RNA, 23 nt, Artificial
  Chemically synthesized
uuggcaaccaacaucugcugcug

SEQ ID NO: 9123 - RNA, 23 nt, Artificial
  Chemically synthesized
ugaauuuuguuccugguuaaguu

SEQ ID NO: 9124 - RNA, 23 nt, Artificial
  Chemically synthesized
ucaguacguuuuucuccagguac

SEQ ID NO: 9125 - RNA, 23 nt, Artificial
  Chemically synthesized
caguacguuuuucuccagguaca

SEQ ID NO: 9126 - RNA, 23 nt, Artificial
  Chemically synthesized
aguacguuuuucuccagguacau

SEQ ID NO: 9127 - RNA, 23 nt, Artificial
  Chemically synthesized
guacguuuuucuccagguacauu

SEQ ID NO: 9128 - RNA, 23 nt, Artificial
  Chemically synthesized
cggauuuggaucuuccaugagca

SEQ ID NO: 9129 - RNA, 23 nt, Artificial
  Chemically synthesized
ggauuuggaucuuccaugagcag

SEQ ID NO: 9130 - RNA, 23 nt, Artificial
  Chemically synthesized
gauuuggaucuuccaugagcagc

SEQ ID NO: 9131 - RNA, 23 nt, Artificial
  Chemically synthesized
auuuggaucuuccaugagcagca

SEQ ID NO: 9132 - RNA, 23 nt, Artificial
  Chemically synthesized
uuuggaucuuccaugagcagcau

SEQ ID NO: 9133 - RNA, 23 nt, Artificial
  Chemically synthesized
uucuucagcuuguucuccugggc

SEQ ID NO: 9134 - RNA, 23 nt, Artificial
  Chemically synthesized
cugcucuacaagggcguucacuu

SEQ ID NO: 9135 - RNA, 23 nt, Artificial
  Chemically synthesized
ugcucuacaagggcguucacuuu

SEQ ID NO: 9136 - RNA, 23 nt, Artificial
  Chemically synthesized
gcucuacaagggcguucacuuuu

SEQ ID NO: 9137 - RNA, 23 nt, Artificial
  Chemically synthesized
cucuacaagggcguucacuuuuc

SEQ ID NO: 9138 - RNA, 23 nt, Artificial
  Chemically synthesized
ucuacaagggcguucacuuuucu

SEQ ID NO: 9139 - RNA, 23 nt, Artificial
  Chemically synthesized
aggguaugggacguucauuuccc

SEQ ID NO: 9140 - RNA, 23 nt, Artificial
  Chemically synthesized
ggguaugggacguucauuucccc

SEQ ID NO: 9141 - RNA, 23 nt, Artificial
  Chemically synthesized
gguaugggacguucauuuccccu

SEQ ID NO: 9142 - RNA, 23 nt, Artificial
  Chemically synthesized
guaugggacguucauuuccccuc

SEQ ID NO: 9143 - RNA, 23 nt, Artificial
  Chemically synthesized
uaugggacguucauuuccccucc

SEQ ID NO: 9144 - RNA, 23 nt, Artificial
  Chemically synthesized
agccuguacguacaauucacacc

SEQ ID NO: 9145 - RNA, 23 nt, Artificial
  Chemically synthesized
gccuguacguacaauucacaccu

SEQ ID NO: 9146 - RNA, 23 nt, Artificial
  Chemically synthesized
ccuguacguacaauucacaccuc

SEQ ID NO: 9147 - RNA, 23 nt, Artificial
  Chemically synthesized
cuguacguacaauucacaccuca

SEQ ID NO: 9148 - RNA, 23 nt, Artificial
  Chemically synthesized
uguacguacaauucacaccucag

SEQ ID NO: 9149 - RNA, 23 nt, Artificial
  Chemically synthesized
ucgcuuguccaucauggccaccu

SEQ ID NO: 9150 - RNA, 23 nt, Artificial
  Chemically synthesized
cgcuuguccaucauggccaccuc

SEQ ID NO: 9151 - RNA, 23 nt, Artificial
  Chemically synthesized
gcuuguccaucauggccaccucc

SEQ ID NO: 9152 - RNA, 23 nt, Artificial
  Chemically synthesized
cuuguccaucauggccaccucca

SEQ ID NO: 9153 - RNA, 23 nt, Artificial
  Chemically synthesized
uuguccaucauggccaccuccau

SEQ ID NO: 9154 - RNA, 23 nt, Artificial
  Chemically synthesized
auccaucacuaucagcagcauuc

SEQ ID NO: 9155 - RNA, 23 nt, Artificial
  Chemically synthesized
uccaucacuaucagcagcauuca

SEQ ID NO: 9156 - RNA, 23 nt, Artificial
  Chemically synthesized
ccaucacuaucagcagcauucac

SEQ ID NO: 9157 - RNA, 23 nt, Artificial
  Chemically synthesized
cuaucagcagcauucacguugac

SEQ ID NO: 9158 - RNA, 23 nt, Artificial
  Chemically synthesized
uaucagcagcauucacguugaca

SEQ ID NO: 9159 - RNA, 23 nt, Artificial
  Chemically synthesized
aucagcagcauucacguugacac

SEQ ID NO: 9160 - RNA, 23 nt, Artificial
  Chemically synthesized
cugucuucacuggcaaccaaccg

SEQ ID NO: 9161 - RNA, 23 nt, Artificial
  Chemically synthesized
ugucuucacuggcaaccaaccgg

SEQ ID NO: 9162 - RNA, 23 nt, Artificial
  Chemically synthesized
gucuucacuggcaaccaaccggg

SEQ ID NO: 9163 - RNA, 23 nt, Artificial
  Chemically synthesized
ucuucacuggcaaccaaccgggg

SEQ ID NO: 9164 - RNA, 23 nt, Artificial
  Chemically synthesized
gaucuuccaccucauagaugauc

SEQ ID NO: 9165 - RNA, 23 nt, Artificial
  Chemically synthesized
ugucugcagcaguuucaaugucg

SEQ ID NO: 9166 - RNA, 23 nt, Artificial
  Chemically synthesized
gucugcagcaguuucaaugucgc

SEQ ID NO: 9167 - RNA, 23 nt, Artificial
  Chemically synthesized
ucugcagcaguuucaaugucgcu

SEQ ID NO: 9168 - RNA, 23 nt, Artificial
  Chemically synthesized
cugcagcaguuucaaugucgcuu

SEQ ID NO: 9169 - RNA, 23 nt, Artificial
  Chemically synthesized
ugcagcaguuucaaugucgcuua

SEQ ID NO: 9170 - RNA, 23 nt, Artificial
  Chemically synthesized
acccuuuaucagccaggaaaggc

SEQ ID NO: 9171 - RNA, 23 nt, Artificial
  Chemically synthesized
cauguuuccauacagaggcuccu

SEQ ID NO: 9172 - RNA, 23 nt, Artificial
  Chemically synthesized
auguuuccauacagaggcuccuu

SEQ ID NO: 9173 - RNA, 23 nt, Artificial
  Chemically synthesized
uguuuccauacagaggcuccuuu

SEQ ID NO: 9174 - RNA, 23 nt, Artificial
  Chemically synthesized
guuuccauacagaggcuccuuug

SEQ ID NO: 9175 - RNA, 23 nt, Artificial
  Chemically synthesized
uuuccauacagaggcuccuuugg

SEQ ID NO: 9176 - RNA, 23 nt, Artificial
  Chemically synthesized
uuucccauagagacguucacgca

SEQ ID NO: 9177 - RNA, 23 nt, Artificial
  Chemically synthesized
uaaauuacacacgacucauacau

SEQ ID NO: 9178 - RNA, 23 nt, Artificial
  Chemically synthesized
aaauuacacacgacucauacaug

SEQ ID NO: 9179 - RNA, 23 nt, Artificial
  Chemically synthesized
aauuacacacgacucauacauga

SEQ ID NO: 9180 - RNA, 23 nt, Artificial
  Chemically synthesized
auuacacacgacucauacaugaa

SEQ ID NO: 9181 - RNA, 23 nt, Artificial
  Chemically synthesized
uuacacacgacucauacaugaaa

SEQ ID NO: 9182 - RNA, 23 nt, Artificial
  Chemically synthesized
ccaguugucacuuggucuuaggg

SEQ ID NO: 9183 - RNA, 23 nt, Artificial
  Chemically synthesized
caguugucacuuggucuuagggg

SEQ ID NO: 9184 - RNA, 23 nt, Artificial
  Chemically synthesized
aguugucacuuggucuuaggggu

SEQ ID NO: 9185 - RNA, 23 nt, Artificial
  Chemically synthesized
guugucacuuggucuuagggguc

SEQ ID NO: 9186 - RNA, 23 nt, Artificial
  Chemically synthesized
uugucacuuggucuuaggggucc

SEQ ID NO: 9187 - RNA, 23 nt, Artificial
  Chemically synthesized
aagcugaucaacccuuaaaauug

SEQ ID NO: 9188 - RNA, 23 nt, Artificial
  Chemically synthesized
agcugaucaacccuuaaaauugc

SEQ ID NO: 9189 - RNA, 23 nt, Artificial
  Chemically synthesized
gcugaucaacccuuaaaauugca

SEQ ID NO: 9190 - RNA, 23 nt, Artificial
  Chemically synthesized
cugaucaacccuuaaaauugcag

SEQ ID NO: 9191 - RNA, 23 nt, Artificial
  Chemically synthesized
ugaucaacccuuaaaauugcagu

SEQ ID NO: 9192 - RNA, 23 nt, Artificial
  Chemically synthesized
caguuucaaugucgcuuaugguu

SEQ ID NO: 9193 - RNA, 23 nt, Artificial
  Chemically synthesized
uuaaaaucuguucauuguugcuc

SEQ ID NO: 9194 - RNA, 23 nt, Artificial
  Chemically synthesized
uaaaaucuguucauuguugcuca

SEQ ID NO: 9195 - RNA, 23 nt, Artificial
  Chemically synthesized
aaaaucuguucauuguugcucaa

SEQ ID NO: 9196 - RNA, 23 nt, Artificial
  Chemically synthesized
aaaucuguucauuguugcucaag

SEQ ID NO: 9197 - RNA, 23 nt, Artificial
  Chemically synthesized
aaucuguucauuguugcucaaga

SEQ ID NO: 9198 - RNA, 23 nt, Artificial
  Chemically synthesized
uucccauagagacguucacgcag

SEQ ID NO: 9199 - RNA, 23 nt, Artificial
  Chemically synthesized
ucccauagagacguucacgcagu

SEQ ID NO: 9200 - RNA, 23 nt, Artificial
  Chemically synthesized
ugccuuccuuccuccuuuccagg

SEQ ID NO: 9201 - RNA, 23 nt, Artificial
  Chemically synthesized
gccuuccuuccuccuuuccaggg

SEQ ID NO: 9202 - RNA, 23 nt, Artificial
  Chemically synthesized
ccuuccuuccuccuuuccaggga

SEQ ID NO: 9203 - RNA, 23 nt, Artificial
  Chemically synthesized
cuuccuuccuccuuuccagggag

SEQ ID NO: 9204 - RNA, 23 nt, Artificial
  Chemically synthesized
uuccuuccuccuuuccagggagc

SEQ ID NO: 9205 - RNA, 23 nt, Artificial
  Chemically synthesized
aaucuuccaauugcugacuaagc

SEQ ID NO: 9206 - RNA, 23 nt, Artificial
  Chemically synthesized
aucuuccaauugcugacuaagcu

SEQ ID NO: 9207 - RNA, 23 nt, Artificial
  Chemically synthesized
ucuuccaauugcugacuaagcug

SEQ ID NO: 9208 - RNA, 23 nt, Artificial
  Chemically synthesized
cuuccaauugcugacuaagcuga

SEQ ID NO: 9209 - RNA, 23 nt, Artificial
  Chemically synthesized
uuccaauugcugacuaagcugau

SEQ ID NO: 9210 - RNA, 23 nt, Artificial
  Chemically synthesized
ugguguuuccauuguccacaucg

SEQ ID NO: 9211 - RNA, 23 nt, Artificial
  Chemically synthesized
gguguuuccauuguccacaucgg

SEQ ID NO: 9212 - RNA, 23 nt, Artificial
  Chemically synthesized
guguuuccauuguccacaucggc

SEQ ID NO: 9213 - RNA, 23 nt, Artificial
  Chemically synthesized
uguuuccauuguccacaucggcc

SEQ ID NO: 9214 - RNA, 23 nt, Artificial
  Chemically synthesized
guuuccauuguccacaucggcca

SEQ ID NO: 9215 - RNA, 23 nt, Artificial
  Chemically synthesized
cacauuuacacagcgucagcagc

SEQ ID NO: 9216 - RNA, 23 nt, Artificial
  Chemically synthesized
acauuuacacagcgucagcagcg

SEQ ID NO: 9217 - RNA, 23 nt, Artificial
  Chemically synthesized
cauuuacacagcgucagcagcgu

SEQ ID NO: 9218 - RNA, 23 nt, Artificial
  Chemically synthesized
auuuacacagcgucagcagcguc

SEQ ID NO: 9219 - RNA, 23 nt, Artificial
  Chemically synthesized
uuuacacagcgucagcagcgucu

SEQ ID NO: 9220 - RNA, 23 nt, Artificial
  Chemically synthesized
aucuuccaugagcagcauuugag

SEQ ID NO: 9221 - RNA, 23 nt, Artificial
  Chemically synthesized
ucuuccaugagcagcauuugagg

SEQ ID NO: 9222 - RNA, 23 nt, Artificial
  Chemically synthesized
cuuccaugagcagcauuugaggc

SEQ ID NO: 9223 - RNA, 23 nt, Artificial
  Chemically synthesized
uuccaugagcagcauuugaggca

SEQ ID NO: 9224 - RNA, 23 nt, Artificial
  Chemically synthesized
uccaugagcagcauuugaggcaa

SEQ ID NO: 9225 - RNA, 23 nt, Artificial
  Chemically synthesized
uuucucugaguucguugcucuug

SEQ ID NO: 9226 - RNA, 23 nt, Artificial
  Chemically synthesized
uucucugaguucguugcucuugg

SEQ ID NO: 9227 - RNA, 23 nt, Artificial
  Chemically synthesized
ucucugaguucguugcucuuggg

SEQ ID NO: 9228 - RNA, 23 nt, Artificial
  Chemically synthesized
cucugaguucguugcucuugggu

SEQ ID NO: 9229 - RNA, 23 nt, Artificial
  Chemically synthesized
ucugaguucguugcucuuggguc

SEQ ID NO: 9230 - RNA, 23 nt, Artificial
  Chemically synthesized
gcggauuuggaucuuccaugagc

SEQ ID NO: 9231 - RNA, 23 nt, Artificial
  Chemically synthesized
uuauaguaauuggcaaaauucag

SEQ ID NO: 9232 - RNA, 23 nt, Artificial
  Chemically synthesized
uauaguaauuggcaaaauucagu

SEQ ID NO: 9233 - RNA, 23 nt, Artificial
  Chemically synthesized
cagcaugacaggcugugagaucg

SEQ ID NO: 9234 - RNA, 23 nt, Artificial
  Chemically synthesized
agcaugacaggcugugagaucgg

SEQ ID NO: 9235 - RNA, 23 nt, Artificial
  Chemically synthesized
gcaugacaggcugugagaucgga

SEQ ID NO: 9236 - RNA, 23 nt, Artificial
  Chemically synthesized
caugacaggcugugagaucggag

SEQ ID NO: 9237 - RNA, 23 nt, Artificial
  Chemically synthesized
augacaggcugugagaucggagg

SEQ ID NO: 9238 - RNA, 23 nt, Artificial
  Chemically synthesized
gccuugacccuuuaucagccagg

SEQ ID NO: 9239 - RNA, 23 nt, Artificial
  Chemically synthesized
ccuugacccuuuaucagccagga

SEQ ID NO: 9240 - RNA, 23 nt, Artificial
  Chemically synthesized
cuugacccuuuaucagccaggaa

SEQ ID NO: 9241 - RNA, 23 nt, Artificial
  Chemically synthesized
uugacccuuuaucagccaggaaa

SEQ ID NO: 9242 - RNA, 23 nt, Artificial
  Chemically synthesized
ugacccuuuaucagccaggaaag

SEQ ID NO: 9243 - RNA, 23 nt, Artificial
  Chemically synthesized
gcacugaaccuuucuauuucagc

SEQ ID NO: 9244 - RNA, 23 nt, Artificial
  Chemically synthesized
cacugaaccuuucuauuucagca

SEQ ID NO: 9245 - RNA, 23 nt, Artificial
  Chemically synthesized
acugaaccuuucuauuucagcag

SEQ ID NO: 9246 - RNA, 23 nt, Artificial
  Chemically synthesized
cugaaccuuucuauuucagcaga

SEQ ID NO: 9247 - RNA, 23 nt, Artificial
  Chemically synthesized
ugaaccuuucuauuucagcagac

SEQ ID NO: 9248 - RNA, 23 nt, Artificial
  Chemically synthesized
aagguaacucauuaucauuggca

SEQ ID NO: 9249 - RNA, 23 nt, Artificial
  Chemically synthesized
agguaacucauuaucauuggcau

SEQ ID NO: 9250 - RNA, 23 nt, Artificial
  Chemically synthesized
gguaacucauuaucauuggcauc

SEQ ID NO: 9251 - RNA, 23 nt, Artificial
  Chemically synthesized
guaacucauuaucauuggcaucu

SEQ ID NO: 9252 - RNA, 23 nt, Artificial
  Chemically synthesized
uaacucauuaucauuggcaucug

SEQ ID NO: 9253 - RNA, 23 nt, Artificial
  Chemically synthesized
uaaaucuuccaauugcugacuaa

SEQ ID NO: 9254 - RNA, 23 nt, Artificial
  Chemically synthesized
agccuuccuccaucuccucacac

SEQ ID NO: 9255 - RNA, 23 nt, Artificial
  Chemically synthesized
gccuuccuccaucuccucacacu

SEQ ID NO: 9256 - RNA, 23 nt, Artificial
  Chemically synthesized
ccuuccuccaucuccucacacuu

SEQ ID NO: 9257 - RNA, 23 nt, Artificial
  Chemically synthesized
cuuccuccaucuccucacacuug

SEQ ID NO: 9258 - RNA, 23 nt, Artificial
  Chemically synthesized
uuccuccaucuccucacacuugu

SEQ ID NO: 9259 - RNA, 23 nt, Artificial
  Chemically synthesized
uccaucauuagcggauuuggauc

SEQ ID NO: 9260 - RNA, 23 nt, Artificial
  Chemically synthesized
ccaucauuagcggauuuggaucu

SEQ ID NO: 9261 - RNA, 23 nt, Artificial
  Chemically synthesized
caucauuagcggauuuggaucuu

SEQ ID NO: 9262 - RNA, 23 nt, Artificial
  Chemically synthesized
aucauuagcggauuuggaucuuc

SEQ ID NO: 9263 - RNA, 23 nt, Artificial
  Chemically synthesized
ucauuagcggauuuggaucuucc

SEQ ID NO: 9264 - RNA, 23 nt, Artificial
  Chemically synthesized
uguuccugguuaaguugguuacg

SEQ ID NO: 9265 - RNA, 23 nt, Artificial
  Chemically synthesized
guuccugguuaaguugguuacga

SEQ ID NO: 9266 - RNA, 23 nt, Artificial
  Chemically synthesized
uuccugguuaaguugguuacgaa

SEQ ID NO: 9267 - RNA, 23 nt, Artificial
  Chemically synthesized
gugcuccaaaaggaaguucaggc

SEQ ID NO: 9268 - RNA, 23 nt, Artificial
  Chemically synthesized
ugcuccaaaaggaaguucaggcg

SEQ ID NO: 9269 - RNA, 23 nt, Artificial
  Chemically synthesized
gcuccaaaaggaaguucaggcga

SEQ ID NO: 9270 - RNA, 23 nt, Artificial
  Chemically synthesized
cuccaaaaggaaguucaggcgag

SEQ ID NO: 9271 - RNA, 23 nt, Artificial
  Chemically synthesized
uccaaaaggaaguucaggcgagu

SEQ ID NO: 9272 - RNA, 23 nt, Artificial
  Chemically synthesized
ggaacuugaauucacugucuggg

SEQ ID NO: 9273 - RNA, 23 nt, Artificial
  Chemically synthesized
gaacuugaauucacugucugggg

SEQ ID NO: 9274 - RNA, 23 nt, Artificial
  Chemically synthesized
aacuugaauucacugucuggggu

SEQ ID NO: 9275 - RNA, 23 nt, Artificial
  Chemically synthesized
acuugaauucacugucugggguc

SEQ ID NO: 9276 - RNA, 23 nt, Artificial
  Chemically synthesized
cuugaauucacugucuggggucc

SEQ ID NO: 9277 - RNA, 23 nt, Artificial
  Chemically synthesized
uacauuucucugaguucguugcu

SEQ ID NO: 9278 - RNA, 23 nt, Artificial
  Chemically synthesized
acauuucucugaguucguugcuc

SEQ ID NO: 9279 - RNA, 23 nt, Artificial
  Chemically synthesized
cauuucucugaguucguugcucu

SEQ ID NO: 9280 - RNA, 23 nt, Artificial
  Chemically synthesized
auuucucugaguucguugcucuu

SEQ ID NO: 9281 - RNA, 23 nt, Artificial
  Chemically synthesized
uagaaaauguaaacgcuguuccu

SEQ ID NO: 9282 - RNA, 23 nt, Artificial
  Chemically synthesized
agaaaauguaaacgcuguuccuu

SEQ ID NO: 9283 - RNA, 23 nt, Artificial
  Chemically synthesized
cauuagcggauuuggaucuucca

SEQ ID NO: 9284 - RNA, 23 nt, Artificial
  Chemically synthesized
auuagcggauuuggaucuuccau

SEQ ID NO: 9285 - RNA, 23 nt, Artificial
  Chemically synthesized
uuagcggauuuggaucuuccaug

SEQ ID NO: 9286 - RNA, 23 nt, Artificial
  Chemically synthesized
uagcggauuuggaucuuccauga

SEQ ID NO: 9287 - RNA, 23 nt, Artificial
  Chemically synthesized
aagguaaaacgggcuuaccauac

SEQ ID NO: 9288 - RNA, 23 nt, Artificial
  Chemically synthesized
agguaaaacgggcuuaccauaca

SEQ ID NO: 9289 - RNA, 23 nt, Artificial
  Chemically synthesized
gguaaaacgggcuuaccauacac

SEQ ID NO: 9290 - RNA, 23 nt, Artificial
  Chemically synthesized
guaaaacgggcuuaccauacacu

SEQ ID NO: 9291 - RNA, 23 nt, Artificial
  Chemically synthesized
uaaaacgggcuuaccauacacug

SEQ ID NO: 9292 - RNA, 23 nt, Artificial
  Chemically synthesized
ucgcuuaugguugaggcaaaaau

SEQ ID NO: 9293 - RNA, 23 nt, Artificial
  Chemically synthesized
ucuucagcuuguucuccugggcu

SEQ ID NO: 9294 - RNA, 23 nt, Artificial
  Chemically synthesized
cuucagcuuguucuccugggcuu

SEQ ID NO: 9295 - RNA, 23 nt, Artificial
  Chemically synthesized
uucagcuuguucuccugggcuuc

SEQ ID NO: 9296 - RNA, 23 nt, Artificial
  Chemically synthesized
uggaucuuccaugagcagcauuu

SEQ ID NO: 9297 - RNA, 23 nt, Artificial
  Chemically synthesized
ggaucuuccaugagcagcauuug

SEQ ID NO: 9298 - RNA, 23 nt, Artificial
  Chemically synthesized
gaucuuccaugagcagcauuuga

SEQ ID NO: 9299 - RNA, 23 nt, Artificial
  Chemically synthesized
gcaguuucaaugucgcuuauggu

SEQ ID NO: 9300 - RNA, 23 nt, Artificial
  Chemically synthesized
ugcugacuaagcugaucaacccu

SEQ ID NO: 9301 - RNA, 23 nt, Artificial
  Chemically synthesized
gcugacuaagcugaucaacccuu

SEQ ID NO: 9302 - RNA, 23 nt, Artificial
  Chemically synthesized
cugacuaagcugaucaacccuua

SEQ ID NO: 9303 - RNA, 23 nt, Artificial
  Chemically synthesized
ucuuucucaguacuuucugaagg

SEQ ID NO: 9304 - RNA, 23 nt, Artificial
  Chemically synthesized
cuuucucaguacuuucugaaggu

SEQ ID NO: 9305 - RNA, 23 nt, Artificial
  Chemically synthesized
uuucucaguacuuucugaaggug

SEQ ID NO: 9306 - RNA, 23 nt, Artificial
  Chemically synthesized
uucucaguacuuucugaaggugg

SEQ ID NO: 9307 - RNA, 23 nt, Artificial
  Chemically synthesized
ucucaguacuuucugaagguggc

SEQ ID NO: 9308 - RNA, 23 nt, Artificial
  Chemically synthesized
cagcuuuccuggaaaacagcaca

SEQ ID NO: 9309 - RNA, 23 nt, Artificial
  Chemically synthesized
agcuuuccuggaaaacagcacaa

SEQ ID NO: 9310 - RNA, 23 nt, Artificial
  Chemically synthesized
gcuuuccuggaaaacagcacaau

SEQ ID NO: 9311 - RNA, 23 nt, Artificial
  Chemically synthesized
cuuuccuggaaaacagcacaaua

SEQ ID NO: 9312 - RNA, 23 nt, Artificial
  Chemically synthesized
uuuccuggaaaacagcacaauaa

SEQ ID NO: 9313 - RNA, 23 nt, Artificial
  Chemically synthesized
ccauauagaaacugggagcacug

SEQ ID NO: 9314 - RNA, 23 nt, Artificial
  Chemically synthesized
cauauagaaacugggagcacugg

SEQ ID NO: 9315 - RNA, 23 nt, Artificial
  Chemically synthesized
auauagaaacugggagcacugga

SEQ ID NO: 9316 - RNA, 23 nt, Artificial
  Chemically synthesized
uauagaaacugggagcacuggau

SEQ ID NO: 9317 - RNA, 23 nt, Artificial
  Chemically synthesized
auagaaacugggagcacuggaug

SEQ ID NO: 9318 - RNA, 23 nt, Artificial
  Chemically synthesized
ucauuuucagaaauagacugcug

SEQ ID NO: 9319 - RNA, 23 nt, Artificial
  Chemically synthesized
acaauaaucucuuaaguggcucc

SEQ ID NO: 9320 - RNA, 23 nt, Artificial
  Chemically synthesized
caauaaucucuuaaguggcuccu

SEQ ID NO: 9321 - RNA, 23 nt, Artificial
  Chemically synthesized
aauaaucucuuaaguggcuccug

SEQ ID NO: 9322 - RNA, 23 nt, Artificial
  Chemically synthesized
caccucauagaugauccucugca

SEQ ID NO: 9323 - RNA, 23 nt, Artificial
  Chemically synthesized
accucauagaugauccucugcac

SEQ ID NO: 9324 - RNA, 23 nt, Artificial
  Chemically synthesized
ccucauagaugauccucugcacc

SEQ ID NO: 9325 - RNA, 23 nt, Artificial
  Chemically synthesized
cucauagaugauccucugcacca

SEQ ID NO: 9326 - RNA, 23 nt, Artificial
  Chemically synthesized
ucauagaugauccucugcaccag

SEQ ID NO: 9327 - RNA, 23 nt, Artificial
  Chemically synthesized
ccacaccuuuguucaucacaccc

SEQ ID NO: 9328 - RNA, 23 nt, Artificial
  Chemically synthesized
cacaccuuuguucaucacaccca

SEQ ID NO: 9329 - RNA, 23 nt, Artificial
  Chemically synthesized
acaccuuuguucaucacacccag

SEQ ID NO: 9330 - RNA, 23 nt, Artificial
  Chemically synthesized
gggcuucuucaaguugguccgcu

SEQ ID NO: 9331 - RNA, 23 nt, Artificial
  Chemically synthesized
ggcuucuucaaguugguccgcuu

SEQ ID NO: 9332 - RNA, 23 nt, Artificial
  Chemically synthesized
gcuucuucaaguugguccgcuug

SEQ ID NO: 9333 - RNA, 23 nt, Artificial
  Chemically synthesized
cuucuucaaguugguccgcuugu

SEQ ID NO: 9334 - RNA, 23 nt, Artificial
  Chemically synthesized
uucuucaaguugguccgcuuguu

SEQ ID NO: 9335 - RNA, 23 nt, Artificial
  Chemically synthesized
ggccauccugcucaggcucuuuc

SEQ ID NO: 9336 - RNA, 23 nt, Artificial
  Chemically synthesized
gccauccugcucaggcucuuucu

SEQ ID NO: 9337 - RNA, 23 nt, Artificial
  Chemically synthesized
ccauccugcucaggcucuuucuc

SEQ ID NO: 9338 - RNA, 23 nt, Artificial
  Chemically synthesized
cauccugcucaggcucuuucuca

SEQ ID NO: 9339 - RNA, 23 nt, Artificial
  Chemically synthesized
auccugcucaggcucuuucucag

SEQ ID NO: 9340 - RNA, 23 nt, Artificial
  Chemically synthesized
uucauuuucagaaauagacugcu

SEQ ID NO: 9341 - RNA, 23 nt, Artificial
  Chemically synthesized
guucaacacguggauucccaacc

SEQ ID NO: 9342 - RNA, 23 nt, Artificial
  Chemically synthesized
uucaacacguggauucccaaccc

SEQ ID NO: 9343 - RNA, 23 nt, Artificial
  Chemically synthesized
ucaacacguggauucccaacccc

SEQ ID NO: 9344 - RNA, 23 nt, Artificial
  Chemically synthesized
caacacguggauucccaacccca

SEQ ID NO: 9345 - RNA, 23 nt, Artificial
  Chemically synthesized
aacacguggauucccaaccccau

SEQ ID NO: 9346 - RNA, 23 nt, Artificial
  Chemically synthesized
ucacugauucgcuuguccaucau

SEQ ID NO: 9347 - RNA, 23 nt, Artificial
  Chemically synthesized
cacugauucgcuuguccaucaug

SEQ ID NO: 9348 - RNA, 23 nt, Artificial
  Chemically synthesized
agucuguacuuccugcuucuuuu

SEQ ID NO: 9349 - RNA, 23 nt, Artificial
  Chemically synthesized
gucuguacuuccugcuucuuuuc

SEQ ID NO: 9350 - RNA, 23 nt, Artificial
  Chemically synthesized
uuuuaacuccaccgccgcugguc

SEQ ID NO: 9351 - RNA, 23 nt, Artificial
  Chemically synthesized
uuucuucaccacacuauguacag

SEQ ID NO: 9352 - RNA, 23 nt, Artificial
  Chemically synthesized
uucuucaccacacuauguacagu

SEQ ID NO: 9353 - RNA, 23 nt, Artificial
  Chemically synthesized
ggggugagacggguuuauugugc

SEQ ID NO: 9354 - RNA, 23 nt, Artificial
  Chemically synthesized
gggugagacggguuuauugugca

SEQ ID NO: 9355 - RNA, 23 nt, Artificial
  Chemically synthesized
ggugagacggguuuauugugcac

SEQ ID NO: 9356 - RNA, 23 nt, Artificial
  Chemically synthesized
gugagacggguuuauugugcaca

SEQ ID NO: 9357 - RNA, 23 nt, Artificial
  Chemically synthesized
ugagacggguuuauugugcacau

SEQ ID NO: 9358 - RNA, 23 nt, Artificial
  Chemically synthesized
acucauacaugaaaaauagagcc

SEQ ID NO: 9359 - RNA, 23 nt, Artificial
  Chemically synthesized
cucauacaugaaaaauagagccu

SEQ ID NO: 9360 - RNA, 23 nt, Artificial
  Chemically synthesized
ucauacaugaaaaauagagccua

SEQ ID NO: 9361 - RNA, 23 nt, Artificial
  Chemically synthesized
cauacaugaaaaauagagccuaa

SEQ ID NO: 9362 - RNA, 23 nt, Artificial
  Chemically synthesized
auacaugaaaaauagagccuaag

SEQ ID NO: 9363 - RNA, 23 nt, Artificial
  Chemically synthesized
cugguuaaguugguuacgaaucu

SEQ ID NO: 9364 - RNA, 23 nt, Artificial
  Chemically synthesized
ugguuaaguugguuacgaaucug

SEQ ID NO: 9365 - RNA, 23 nt, Artificial
  Chemically synthesized
gguuaaguugguuacgaaucugu

SEQ ID NO: 9366 - RNA, 23 nt, Artificial
  Chemically synthesized
guuaaguugguuacgaaucugua

SEQ ID NO: 9367 - RNA, 23 nt, Artificial
  Chemically synthesized
uuaaguugguuacgaaucuguag

SEQ ID NO: 9368 - RNA, 23 nt, Artificial
  Chemically synthesized
gagcauacgccacaccuuuguuc

SEQ ID NO: 9369 - RNA, 23 nt, Artificial
  Chemically synthesized
agcauacgccacaccuuuguuca

SEQ ID NO: 9370 - RNA, 23 nt, Artificial
  Chemically synthesized
gcauacgccacaccuuuguucau

SEQ ID NO: 9371 - RNA, 23 nt, Artificial
  Chemically synthesized
cauacgccacaccuuuguucauc

SEQ ID NO: 9372 - RNA, 23 nt, Artificial
  Chemically synthesized
auacgccacaccuuuguucauca

SEQ ID NO: 9373 - RNA, 23 nt, Artificial
  Chemically synthesized
gccguucaugauuuugcuguagu

SEQ ID NO: 9374 - RNA, 23 nt, Artificial
  Chemically synthesized
ccguucaugauuuugcuguaguc

SEQ ID NO: 9375 - RNA, 23 nt, Artificial
  Chemically synthesized
cguucaugauuuugcuguagucg

SEQ ID NO: 9376 - RNA, 23 nt, Artificial
  Chemically synthesized
guucaugauuuugcuguagucga

SEQ ID NO: 9377 - RNA, 23 nt, Artificial
  Chemically synthesized
uucaugauuuugcuguagucgac

SEQ ID NO: 9378 - RNA, 23 nt, Artificial
  Chemically synthesized
guuuuccuuucuuuaaaucuucc

SEQ ID NO: 9379 - RNA, 23 nt, Artificial
  Chemically synthesized
uuuuccuuucuuuaaaucuucca

SEQ ID NO: 9380 - RNA, 23 nt, Artificial
  Chemically synthesized
uuuccuuucuuuaaaucuuccaa

SEQ ID NO: 9381 - RNA, 23 nt, Artificial
  Chemically synthesized
uuccuuucuuuaaaucuuccaau

SEQ ID NO: 9382 - RNA, 23 nt, Artificial
  Chemically synthesized
uccuuucuuuaaaucuuccaauu

SEQ ID NO: 9383 - RNA, 23 nt, Artificial
  Chemically synthesized
auugugcacauuuacacagcguc

SEQ ID NO: 9384 - RNA, 23 nt, Artificial
  Chemically synthesized
uugugcacauuuacacagcguca

SEQ ID NO: 9385 - RNA, 23 nt, Artificial
  Chemically synthesized
ugugcacauuuacacagcgucag

SEQ ID NO: 9386 - RNA, 23 nt, Artificial
  Chemically synthesized
gugcacauuuacacagcgucagc

SEQ ID NO: 9387 - RNA, 23 nt, Artificial
  Chemically synthesized
ugcacauuuacacagcgucagca

SEQ ID NO: 9388 - RNA, 23 nt, Artificial
  Chemically synthesized
aaaguaccucucccaguuaaugg

SEQ ID NO: 9389 - RNA, 23 nt, Artificial
  Chemically synthesized
aaguaccucucccaguuaauggg

SEQ ID NO: 9390 - RNA, 23 nt, Artificial
  Chemically synthesized
aguaccucucccaguuaaugggc

SEQ ID NO: 9391 - RNA, 23 nt, Artificial
  Chemically synthesized
guaccucucccaguuaaugggca

SEQ ID NO: 9392 - RNA, 23 nt, Artificial
  Chemically synthesized
uaccucucccaguuaaugggcaa

SEQ ID NO: 9393 - RNA, 23 nt, Artificial
  Chemically synthesized
uuccuucugcugcugaaguuuug

SEQ ID NO: 9394 - RNA, 23 nt, Artificial
  Chemically synthesized
uccuucugcugcugaaguuuuga

SEQ ID NO: 9395 - RNA, 23 nt, Artificial
  Chemically synthesized
ccuucugcugcugaaguuuugaa

SEQ ID NO: 9396 - RNA, 23 nt, Artificial
  Chemically synthesized
cuucugcugcugaaguuuugaau

SEQ ID NO: 9397 - RNA, 23 nt, Artificial
  Chemically synthesized
uucugcugcugaaguuuugaauu

SEQ ID NO: 9398 - RNA, 23 nt, Artificial
  Chemically synthesized
ggguuugauccguggauacagcc

SEQ ID NO: 9399 - RNA, 23 nt, Artificial
  Chemically synthesized
gguuugauccguggauacagccc

SEQ ID NO: 9400 - RNA, 23 nt, Artificial
  Chemically synthesized
guuugauccguggauacagcccc

SEQ ID NO: 9401 - RNA, 23 nt, Artificial
  Chemically synthesized
uuugauccguggauacagcccca

SEQ ID NO: 9402 - RNA, 23 nt, Artificial
  Chemically synthesized
uugauccguggauacagccccag

SEQ ID NO: 9403 - RNA, 23 nt, Artificial
  Chemically synthesized
augguugaggcaaaaauggcggc

SEQ ID NO: 9404 - RNA, 23 nt, Artificial
  Chemically synthesized
uuugaauuuuguuccugguuaag

SEQ ID NO: 9405 - RNA, 23 nt, Artificial
  Chemically synthesized
ugguuacgaaucuguaguucuug

SEQ ID NO: 9406 - RNA, 23 nt, Artificial
  Chemically synthesized
gguuacgaaucuguaguucuugg

SEQ ID NO: 9407 - RNA, 23 nt, Artificial
  Chemically synthesized
guuacgaaucuguaguucuuggu

SEQ ID NO: 9408 - RNA, 23 nt, Artificial
  Chemically synthesized
uuacgaaucuguaguucuuggua

SEQ ID NO: 9409 - RNA, 23 nt, Artificial
  Chemically synthesized
uacgaaucuguaguucuugguac

SEQ ID NO: 9410 - RNA, 23 nt, Artificial
  Chemically synthesized
cuacaagggcguucacuuuucuu

SEQ ID NO: 9411 - RNA, 23 nt, Artificial
  Chemically synthesized
uacaagggcguucacuuuucuuc

SEQ ID NO: 9412 - RNA, 23 nt, Artificial
  Chemically synthesized
cuccaucuccucacacuugucug

SEQ ID NO: 9413 - RNA, 23 nt, Artificial
  Chemically synthesized
uccaucuccucacacuugucugc

SEQ ID NO: 9414 - RNA, 23 nt, Artificial
  Chemically synthesized
ccaucuccucacacuugucugca

SEQ ID NO: 9415 - RNA, 23 nt, Artificial
  Chemically synthesized
caucuccucacacuugucugcag

SEQ ID NO: 9416 - RNA, 23 nt, Artificial
  Chemically synthesized
aucuccucacacuugucugcagc

SEQ ID NO: 9417 - RNA, 23 nt, Artificial
  Chemically synthesized
gcauucacguugacaccaaaauc

SEQ ID NO: 9418 - RNA, 23 nt, Artificial
  Chemically synthesized
cauucacguugacaccaaaaucc

SEQ ID NO: 9419 - RNA, 23 nt, Artificial
  Chemically synthesized
auucacguugacaccaaaaucca

SEQ ID NO: 9420 - RNA, 23 nt, Artificial
  Chemically synthesized
uucacguugacaccaaaauccag

SEQ ID NO: 9421 - RNA, 23 nt, Artificial
  Chemically synthesized
ucacguugacaccaaaauccagc

SEQ ID NO: 9422 - RNA, 23 nt, Artificial
  Chemically synthesized
aggcaaaaauggcggcaccacuc

SEQ ID NO: 9423 - RNA, 23 nt, Artificial
  Chemically synthesized
ggcaaaaauggcggcaccacucu

SEQ ID NO: 9424 - RNA, 23 nt, Artificial
  Chemically synthesized
gcaaaaauggcggcaccacucuc

SEQ ID NO: 9425 - RNA, 23 nt, Artificial
  Chemically synthesized
caaaaauggcggcaccacucucc

SEQ ID NO: 9426 - RNA, 23 nt, Artificial
  Chemically synthesized
aaaaauggcggcaccacucucca

SEQ ID NO: 9427 - RNA, 23 nt, Artificial
  Chemically synthesized
cagaaauagacugcugcugacgg

SEQ ID NO: 9428 - RNA, 23 nt, Artificial
  Chemically synthesized
agaaauagacugcugcugacggc

SEQ ID NO: 9429 - RNA, 23 nt, Artificial
  Chemically synthesized
gaaauagacugcugcugacggcg

SEQ ID NO: 9430 - RNA, 23 nt, Artificial
  Chemically synthesized
aaauagacugcugcugacggcgc

SEQ ID NO: 9431 - RNA, 23 nt, Artificial
  Chemically synthesized
aauagacugcugcugacggcgcu

SEQ ID NO: 9432 - RNA, 23 nt, Artificial
  Chemically synthesized
ggauuuauaguaauuggcaaaau

SEQ ID NO: 9433 - RNA, 23 nt, Artificial
  Chemically synthesized
uuuccauuguccacaucggccaa

SEQ ID NO: 9434 - RNA, 23 nt, Artificial
  Chemically synthesized
uuccauuguccacaucggccaag

SEQ ID NO: 9435 - RNA, 23 nt, Artificial
  Chemically synthesized
uauuuaaggcgcugugugcugcc

SEQ ID NO: 9436 - RNA, 23 nt, Artificial
  Chemically synthesized
auuuaaggcgcugugugcugccg

SEQ ID NO: 9437 - RNA, 23 nt, Artificial
  Chemically synthesized
uuuaaggcgcugugugcugccgg

SEQ ID NO: 9438 - RNA, 23 nt, Artificial
  Chemically synthesized
cauguugcgcuuauuuaagaguu

SEQ ID NO: 9439 - RNA, 23 nt, Artificial
  Chemically synthesized
auguugcgcuuauuuaagaguuc

SEQ ID NO: 9440 - RNA, 23 nt, Artificial
  Chemically synthesized
uguugcgcuuauuuaagaguucc

SEQ ID NO: 9441 - RNA, 23 nt, Artificial
  Chemically synthesized
guugcgcuuauuuaagaguuccu

SEQ ID NO: 9442 - RNA, 23 nt, Artificial
  Chemically synthesized
uugcgcuuauuuaagaguuccuu

SEQ ID NO: 9443 - RNA, 23 nt, Artificial
  Chemically synthesized
uggguacugggaggcauacacac

SEQ ID NO: 9444 - RNA, 23 nt, Artificial
  Chemically synthesized
ggguacugggaggcauacacacu

SEQ ID NO: 9445 - RNA, 23 nt, Artificial
  Chemically synthesized
gguacugggaggcauacacacug

SEQ ID NO: 9446 - RNA, 23 nt, Artificial
  Chemically synthesized
guacugggaggcauacacacugg

SEQ ID NO: 9447 - RNA, 23 nt, Artificial
  Chemically synthesized
uacugggaggcauacacacuggg

SEQ ID NO: 9448 - RNA, 23 nt, Artificial
  Chemically synthesized
uugaauuuuguuccugguuaagu

SEQ ID NO: 9449 - RNA, 23 nt, Artificial
  Chemically synthesized
uguucaucacacccagcuuuucc

SEQ ID NO: 9450 - RNA, 23 nt, Artificial
  Chemically synthesized
guucaucacacccagcuuuuccu

SEQ ID NO: 9451 - RNA, 23 nt, Artificial
  Chemically synthesized
uucaucacacccagcuuuuccug

SEQ ID NO: 9452 - RNA, 23 nt, Artificial
  Chemically synthesized
agcauuugaggcaauacugagag

SEQ ID NO: 9453 - RNA, 23 nt, Artificial
  Chemically synthesized
gcauuugaggcaauacugagaga

SEQ ID NO: 9454 - RNA, 23 nt, Artificial
  Chemically synthesized
cauuugaggcaauacugagagac

SEQ ID NO: 9455 - RNA, 23 nt, Artificial
  Chemically synthesized
auuugaggcaauacugagagacu

SEQ ID NO: 9456 - RNA, 23 nt, Artificial
  Chemically synthesized
uuugaggcaauacugagagacug

SEQ ID NO: 9457 - RNA, 23 nt, Artificial
  Chemically synthesized
uuucauuuucagaaauagacugc

SEQ ID NO: 9458 - RNA, 23 nt, Artificial
  Chemically synthesized
ugcaucagugagucuguacacac

SEQ ID NO: 9459 - RNA, 23 nt, Artificial
  Chemically synthesized
gcaucagugagucuguacacaca

SEQ ID NO: 9460 - RNA, 23 nt, Artificial
  Chemically synthesized
caucagugagucuguacacacau

SEQ ID NO: 9461 - RNA, 23 nt, Artificial
  Chemically synthesized
aucagugagucuguacacacauu

SEQ ID NO: 9462 - RNA, 23 nt, Artificial
  Chemically synthesized
ucagugagucuguacacacauuu

SEQ ID NO: 9463 - RNA, 23 nt, Artificial
  Chemically synthesized
uaaguugguuacgaaucuguagu

SEQ ID NO: 9464 - RNA, 23 nt, Artificial
  Chemically synthesized
aaguugguuacgaaucuguaguu

SEQ ID NO: 9465 - RNA, 23 nt, Artificial
  Chemically synthesized
aguugguuacgaaucuguaguuc

SEQ ID NO: 9466 - RNA, 23 nt, Artificial
  Chemically synthesized
guugguuacgaaucuguaguucu

SEQ ID NO: 9467 - RNA, 23 nt, Artificial
  Chemically synthesized
uugguuacgaaucuguaguucuu

SEQ ID NO: 9468 - RNA, 23 nt, Artificial
  Chemically synthesized
uacguacaauucacaccucagug

SEQ ID NO: 9469 - RNA, 23 nt, Artificial
  Chemically synthesized
acguacaauucacaccucaguga

SEQ ID NO: 9470 - RNA, 23 nt, Artificial
  Chemically synthesized
cguacaauucacaccucagugaa

SEQ ID NO: 9471 - RNA, 23 nt, Artificial
  Chemically synthesized
guacaauucacaccucagugaag

SEQ ID NO: 9472 - RNA, 23 nt, Artificial
  Chemically synthesized
uacaauucacaccucagugaagc

SEQ ID NO: 9473 - RNA, 23 nt, Artificial
  Chemically synthesized
uaguucuugguacagucuuuuua

SEQ ID NO: 9474 - RNA, 23 nt, Artificial
  Chemically synthesized
aguucuugguacagucuuuuuaa

SEQ ID NO: 9475 - RNA, 23 nt, Artificial
  Chemically synthesized
guucuugguacagucuuuuuaac

SEQ ID NO: 9476 - RNA, 23 nt, Artificial
  Chemically synthesized
uucuugguacagucuuuuuaacu

SEQ ID NO: 9477 - RNA, 23 nt, Artificial
  Chemically synthesized
ucuugguacagucuuuuuaacuc

SEQ ID NO: 9478 - RNA, 23 nt, Artificial
  Chemically synthesized
guccuuggaggcgaaaguaccuc

SEQ ID NO: 9479 - RNA, 23 nt, Artificial
  Chemically synthesized
uccuuggaggcgaaaguaccucu

SEQ ID NO: 9480 - RNA, 23 nt, Artificial
  Chemically synthesized
ccuuggaggcgaaaguaccucuc

SEQ ID NO: 9481 - RNA, 23 nt, Artificial
  Chemically synthesized
cuuggaggcgaaaguaccucucc

SEQ ID NO: 9482 - RNA, 23 nt, Artificial
  Chemically synthesized
uuggaggcgaaaguaccucuccc

SEQ ID NO: 9483 - RNA, 23 nt, Artificial
  Chemically synthesized
gauguagccuuccuccaucuccu

SEQ ID NO: 9484 - RNA, 23 nt, Artificial
  Chemically synthesized
auguagccuuccuccaucuccuc

SEQ ID NO: 9485 - RNA, 23 nt, Artificial
  Chemically synthesized
uguagccuuccuccaucuccuca

SEQ ID NO: 9486 - RNA, 23 nt, Artificial
  Chemically synthesized
guagccuuccuccaucuccucac

SEQ ID NO: 9487 - RNA, 23 nt, Artificial
  Chemically synthesized
uagccuuccuccaucuccucaca

SEQ ID NO: 9488 - RNA, 23 nt, Artificial
  Chemically synthesized
aauuucugaagcuuuucauuuuc

SEQ ID NO: 9489 - RNA, 23 nt, Artificial
  Chemically synthesized
auuucugaagcuuuucauuuuca

SEQ ID NO: 9490 - RNA, 23 nt, Artificial
  Chemically synthesized
uuucugaagcuuuucauuuucag

SEQ ID NO: 9491 - RNA, 23 nt, Artificial
  Chemically synthesized
uucugaagcuuuucauuuucaga

SEQ ID NO: 9492 - RNA, 23 nt, Artificial
  Chemically synthesized
ucugaagcuuuucauuuucagaa

SEQ ID NO: 9493 - RNA, 23 nt, Artificial
  Chemically synthesized
aguauauggaacuugaauucacu

SEQ ID NO: 9494 - RNA, 23 nt, Artificial
  Chemically synthesized
guauauggaacuugaauucacug

SEQ ID NO: 9495 - RNA, 23 nt, Artificial
  Chemically synthesized
uauauggaacuugaauucacugu

SEQ ID NO: 9496 - RNA, 23 nt, Artificial
  Chemically synthesized
auauggaacuugaauucacuguc

SEQ ID NO: 9497 - RNA, 23 nt, Artificial
  Chemically synthesized
uauggaacuugaauucacugucu

SEQ ID NO: 9498 - RNA, 23 nt, Artificial
  Chemically synthesized
ucaauuugccauuguaagacugg

SEQ ID NO: 9499 - RNA, 23 nt, Artificial
  Chemically synthesized
caauuugccauuguaagacugga

SEQ ID NO: 9500 - RNA, 23 nt, Artificial
  Chemically synthesized
aauuugccauuguaagacuggaa

SEQ ID NO: 9501 - RNA, 23 nt, Artificial
  Chemically synthesized
auuugccauuguaagacuggaac

SEQ ID NO: 9502 - RNA, 23 nt, Artificial
  Chemically synthesized
uuugccauuguaagacuggaacc

SEQ ID NO: 9503 - RNA, 23 nt, Artificial
  Chemically synthesized
aguaagagcuucugucuucacug

SEQ ID NO: 9504 - RNA, 23 nt, Artificial
  Chemically synthesized
guaagagcuucugucuucacugg

SEQ ID NO: 9505 - RNA, 23 nt, Artificial
  Chemically synthesized
uaagagcuucugucuucacuggc

SEQ ID NO: 9506 - RNA, 23 nt, Artificial
  Chemically synthesized
aagagcuucugucuucacuggca

SEQ ID NO: 9507 - RNA, 23 nt, Artificial
  Chemically synthesized
agagcuucugucuucacuggcaa

SEQ ID NO: 9508 - RNA, 23 nt, Artificial
  Chemically synthesized
gagcacuggauguagccuuccuc

SEQ ID NO: 9509 - RNA, 23 nt, Artificial
  Chemically synthesized
agcacuggauguagccuuccucc

SEQ ID NO: 9510 - RNA, 23 nt, Artificial
  Chemically synthesized
gcacuggauguagccuuccucca

SEQ ID NO: 9511 - RNA, 23 nt, Artificial
  Chemically synthesized
cacuggauguagccuuccuccau

SEQ ID NO: 9512 - RNA, 23 nt, Artificial
  Chemically synthesized
acuggauguagccuuccuccauc

SEQ ID NO: 9513 - RNA, 23 nt, Artificial
  Chemically synthesized
acuugucugcagcaguuucaaug

SEQ ID NO: 9514 - RNA, 23 nt, Artificial
  Chemically synthesized
cuugucugcagcaguuucaaugu

SEQ ID NO: 9515 - RNA, 23 nt, Artificial
  Chemically synthesized
uugucugcagcaguuucaauguc

SEQ ID NO: 9516 - RNA, 23 nt, Artificial
  Chemically synthesized
aaggaucaugugugggaagugug

SEQ ID NO: 9517 - RNA, 23 nt, Artificial
  Chemically synthesized
aggaucaugugugggaaguguga

SEQ ID NO: 9518 - RNA, 23 nt, Artificial
  Chemically synthesized
ggaucaugugugggaagugugag

SEQ ID NO: 9519 - RNA, 23 nt, Artificial
  Chemically synthesized
gaucaugugugggaagugugaga

SEQ ID NO: 9520 - RNA, 23 nt, Artificial
  Chemically synthesized
aucaugugugggaagugugagaa

SEQ ID NO: 9521 - RNA, 23 nt, Artificial
  Chemically synthesized
cagugagucuguacacacauuuu

SEQ ID NO: 9522 - RNA, 23 nt, Artificial
  Chemically synthesized
agugagucuguacacacauuuuu

SEQ ID NO: 9523 - RNA, 23 nt, Artificial
  Chemically synthesized
gugagucuguacacacauuuuua

SEQ ID NO: 9524 - RNA, 23 nt, Artificial
  Chemically synthesized
ugagucuguacacacauuuuuac

SEQ ID NO: 9525 - RNA, 23 nt, Artificial
  Chemically synthesized
cuccaaggugaugggcuacagug

SEQ ID NO: 9526 - RNA, 23 nt, Artificial
  Chemically synthesized
uccaaggugaugggcuacagugc

SEQ ID NO: 9527 - RNA, 23 nt, Artificial
  Chemically synthesized
ccaaggugaugggcuacagugcu

SEQ ID NO: 9528 - RNA, 23 nt, Artificial
  Chemically synthesized
caaggugaugggcuacagugcug

SEQ ID NO: 9529 - RNA, 23 nt, Artificial
  Chemically synthesized
aaggugaugggcuacagugcugc

SEQ ID NO: 9530 - RNA, 23 nt, Artificial
  Chemically synthesized
cuccuuuccagggagcuugucga

SEQ ID NO: 9531 - RNA, 23 nt, Artificial
  Chemically synthesized
uccuuuccagggagcuugucgac

SEQ ID NO: 9532 - RNA, 23 nt, Artificial
  Chemically synthesized
ccuuuccagggagcuugucgacc

SEQ ID NO: 9533 - RNA, 23 nt, Artificial
  Chemically synthesized
cuuuccagggagcuugucgaccc

SEQ ID NO: 9534 - RNA, 23 nt, Artificial
  Chemically synthesized
uuuccagggagcuugucgaccca

SEQ ID NO: 9535 - RNA, 23 nt, Artificial
  Chemically synthesized
ugaguucguugcucuugggucug

SEQ ID NO: 9536 - RNA, 23 nt, Artificial
  Chemically synthesized
gaguucguugcucuugggucuga

SEQ ID NO: 9537 - RNA, 23 nt, Artificial
  Chemically synthesized
aguucguugcucuugggucugac

SEQ ID NO: 9538 - RNA, 23 nt, Artificial
  Chemically synthesized
guucguugcucuugggucugacg

SEQ ID NO: 9539 - RNA, 23 nt, Artificial
  Chemically synthesized
uucguugcucuugggucugacgg

SEQ ID NO: 9540 - RNA, 23 nt, Artificial
  Chemically synthesized
ucagcugaauuuuuuucccauag

SEQ ID NO: 9541 - RNA, 23 nt, Artificial
  Chemically synthesized
acaagggcguucacuuuucuuca

SEQ ID NO: 9542 - RNA, 23 nt, Artificial
  Chemically synthesized
caagggcguucacuuuucuucac

SEQ ID NO: 9543 - RNA, 23 nt, Artificial
  Chemically synthesized
aagggcguucacuuuucuucacc

SEQ ID NO: 9544 - RNA, 23 nt, Artificial
  Chemically synthesized
agggcguucacuuuucuucacca

SEQ ID NO: 9545 - RNA, 23 nt, Artificial
  Chemically synthesized
aaggaaguucaggcgaguguucg

SEQ ID NO: 9546 - RNA, 23 nt, Artificial
  Chemically synthesized
aggaaguucaggcgaguguucgc

SEQ ID NO: 9547 - RNA, 23 nt, Artificial
  Chemically synthesized
ggaaguucaggcgaguguucgcu

SEQ ID NO: 9548 - RNA, 23 nt, Artificial
  Chemically synthesized
gaaguucaggcgaguguucgcug

SEQ ID NO: 9549 - RNA, 23 nt, Artificial
  Chemically synthesized
aaguucaggcgaguguucgcugu

SEQ ID NO: 9550 - RNA, 23 nt, Artificial
  Chemically synthesized
gaacugaauuugagcuugcaggg

SEQ ID NO: 9551 - RNA, 23 nt, Artificial
  Chemically synthesized
aacugaauuugagcuugcagggg

SEQ ID NO: 9552 - RNA, 23 nt, Artificial
  Chemically synthesized
acugaauuugagcuugcaggggu

SEQ ID NO: 9553 - RNA, 23 nt, Artificial
  Chemically synthesized
cugaauuugagcuugcaggggug

SEQ ID NO: 9554 - RNA, 23 nt, Artificial
  Chemically synthesized
ugaauuugagcuugcagggguga

SEQ ID NO: 9555 - RNA, 23 nt, Artificial
  Chemically synthesized
uccauacagaggcuccuuuggug

SEQ ID NO: 9556 - RNA, 23 nt, Artificial
  Chemically synthesized
ccauacagaggcuccuuugguga

SEQ ID NO: 9557 - RNA, 23 nt, Artificial
  Chemically synthesized
cauacagaggcuccuuuggugau

SEQ ID NO: 9558 - RNA, 23 nt, Artificial
  Chemically synthesized
auacagaggcuccuuuggugaug

SEQ ID NO: 9559 - RNA, 23 nt, Artificial
  Chemically synthesized
uacagaggcuccuuuggugauga

SEQ ID NO: 9560 - RNA, 23 nt, Artificial
  Chemically synthesized
acagauugccguucaugauuuug

SEQ ID NO: 9561 - RNA, 23 nt, Artificial
  Chemically synthesized
uacaugaaaaauagagccuaagg

SEQ ID NO: 9562 - RNA, 23 nt, Artificial
  Chemically synthesized
acaugaaaaauagagccuaaggg

SEQ ID NO: 9563 - RNA, 23 nt, Artificial
  Chemically synthesized
caugaaaaauagagccuaagggc

SEQ ID NO: 9564 - RNA, 23 nt, Artificial
  Chemically synthesized
augaaaaauagagccuaagggcc

SEQ ID NO: 9565 - RNA, 23 nt, Artificial
  Chemically synthesized
ugaaaaauagagccuaagggccu

SEQ ID NO: 9566 - RNA, 23 nt, Artificial
  Chemically synthesized
cucauuaucauuggcaucugaug

SEQ ID NO: 9567 - RNA, 23 nt, Artificial
  Chemically synthesized
ucauuaucauuggcaucugauga

SEQ ID NO: 9568 - RNA, 23 nt, Artificial
  Chemically synthesized
cauuaucauuggcaucugaugac

SEQ ID NO: 9569 - RNA, 23 nt, Artificial
  Chemically synthesized
auuaucauuggcaucugaugacg

SEQ ID NO: 9570 - RNA, 23 nt, Artificial
  Chemically synthesized
uuaucauuggcaucugaugacgg

SEQ ID NO: 9571 - RNA, 23 nt, Artificial
  Chemically synthesized
ccacucagucucgcuuucguccu

SEQ ID NO: 9572 - RNA, 23 nt, Artificial
  Chemically synthesized
cacucagucucgcuuucguccuu

SEQ ID NO: 9573 - RNA, 23 nt, Artificial
  Chemically synthesized
acucagucucgcuuucguccuug

SEQ ID NO: 9574 - RNA, 23 nt, Artificial
  Chemically synthesized
cucagucucgcuuucguccuugc

SEQ ID NO: 9575 - RNA, 23 nt, Artificial
  Chemically synthesized
ucagucucgcuuucguccuugcg

SEQ ID NO: 9576 - RNA, 23 nt, Artificial
  Chemically synthesized
guaauucuuaggugguguggcuu

SEQ ID NO: 9577 - RNA, 23 nt, Artificial
  Chemically synthesized
uaauucuuaggugguguggcuug

SEQ ID NO: 9578 - RNA, 23 nt, Artificial
  Chemically synthesized
aauucuuaggugguguggcuugc

SEQ ID NO: 9579 - RNA, 23 nt, Artificial
  Chemically synthesized
auucuuaggugguguggcuugcu

SEQ ID NO: 9580 - RNA, 23 nt, Artificial
  Chemically synthesized
uucuuaggugguguggcuugcug

SEQ ID NO: 9581 - RNA, 23 nt, Artificial
  Chemically synthesized
aaccacacugagcagcaugacag

SEQ ID NO: 9582 - RNA, 23 nt, Artificial
  Chemically synthesized
accacacugagcagcaugacagg

SEQ ID NO: 9583 - RNA, 23 nt, Artificial
  Chemically synthesized
ccacacugagcagcaugacaggc

SEQ ID NO: 9584 - RNA, 23 nt, Artificial
  Chemically synthesized
cacacugagcagcaugacaggcu

SEQ ID NO: 9585 - RNA, 23 nt, Artificial
  Chemically synthesized
acacugagcagcaugacaggcug

SEQ ID NO: 9586 - RNA, 23 nt, Artificial
  Chemically synthesized
ugacuaagcugaucaacccuuaa

SEQ ID NO: 9587 - RNA, 23 nt, Artificial
  Chemically synthesized
ucuucaccacacuauguacaguc

SEQ ID NO: 9588 - RNA, 23 nt, Artificial
  Chemically synthesized
cuucaccacacuauguacaguca

SEQ ID NO: 9589 - RNA, 23 nt, Artificial
  Chemically synthesized
uucaccacacuauguacagucag

SEQ ID NO: 9590 - RNA, 23 nt, Artificial
  Chemically synthesized
acguucacgcaguucacugauuc

SEQ ID NO: 9591 - RNA, 23 nt, Artificial
  Chemically synthesized
cguucacgcaguucacugauucg

SEQ ID NO: 9592 - RNA, 23 nt, Artificial
  Chemically synthesized
guucacgcaguucacugauucgc

SEQ ID NO: 9593 - RNA, 23 nt, Artificial
  Chemically synthesized
uucacgcaguucacugauucgcu

SEQ ID NO: 9594 - RNA, 23 nt, Artificial
  Chemically synthesized
ucacgcaguucacugauucgcuu

SEQ ID NO: 9595 - RNA, 23 nt, Artificial
  Chemically synthesized
auuuauuacauuucucugaguuc

SEQ ID NO: 9596 - RNA, 23 nt, Artificial
  Chemically synthesized
ggcuuaccauacacugcuuuaac

SEQ ID NO: 9597 - RNA, 23 nt, Artificial
  Chemically synthesized
gcuuaccauacacugcuuuaacu

SEQ ID NO: 9598 - RNA, 23 nt, Artificial
  Chemically synthesized
cuuaccauacacugcuuuaacug

SEQ ID NO: 9599 - RNA, 23 nt, Artificial
  Chemically synthesized
uuaccauacacugcuuuaacuga

SEQ ID NO: 9600 - RNA, 23 nt, Artificial
  Chemically synthesized
uaccauacacugcuuuaacugac

SEQ ID NO: 9601 - RNA, 23 nt, Artificial
  Chemically synthesized
cccauauagaaacugggagcacu

SEQ ID NO: 9602 - RNA, 23 nt, Artificial
  Chemically synthesized
cgacuuguccucucauugcacga

SEQ ID NO: 9603 - RNA, 23 nt, Artificial
  Chemically synthesized
gacuuguccucucauugcacgaa

SEQ ID NO: 9604 - RNA, 23 nt, Artificial
  Chemically synthesized
acuuguccucucauugcacgaau

SEQ ID NO: 9605 - RNA, 23 nt, Artificial
  Chemically synthesized
cuuguccucucauugcacgaauu

SEQ ID NO: 9606 - RNA, 23 nt, Artificial
  Chemically synthesized
uuguccucucauugcacgaauuu

SEQ ID NO: 9607 - RNA, 23 nt, Artificial
  Chemically synthesized
auggaacuugaauucacugucug

SEQ ID NO: 9608 - RNA, 23 nt, Artificial
  Chemically synthesized
gccauccuucaggcaccaaacag

SEQ ID NO: 9609 - RNA, 23 nt, Artificial
  Chemically synthesized
ccauccuucaggcaccaaacagc

SEQ ID NO: 9610 - RNA, 23 nt, Artificial
  Chemically synthesized
cauccuucaggcaccaaacagcc

SEQ ID NO: 9611 - RNA, 23 nt, Artificial
  Chemically synthesized
auccuucaggcaccaaacagccc

SEQ ID NO: 9612 - RNA, 23 nt, Artificial
  Chemically synthesized
uccuucaggcaccaaacagcccc

SEQ ID NO: 9613 - RNA, 23 nt, Artificial
  Chemically synthesized
uuggccaguuuccaucauuagcg

SEQ ID NO: 9614 - RNA, 23 nt, Artificial
  Chemically synthesized
uggccaguuuccaucauuagcgg

SEQ ID NO: 9615 - RNA, 23 nt, Artificial
  Chemically synthesized
ggccaguuuccaucauuagcgga

SEQ ID NO: 9616 - RNA, 23 nt, Artificial
  Chemically synthesized
gccaguuuccaucauuagcggau

SEQ ID NO: 9617 - RNA, 23 nt, Artificial
  Chemically synthesized
ccaguuuccaucauuagcggauu

SEQ ID NO: 9618 - RNA, 23 nt, Artificial
  Chemically synthesized
gggguuugauccguggauacagc

SEQ ID NO: 9619 - RNA, 23 nt, Artificial
  Chemically synthesized
caaugucgcuuaugguugaggca

SEQ ID NO: 9620 - RNA, 23 nt, Artificial
  Chemically synthesized
aaugucgcuuaugguugaggcaa

SEQ ID NO: 9621 - RNA, 23 nt, Artificial
  Chemically synthesized
augucgcuuaugguugaggcaaa

SEQ ID NO: 9622 - RNA, 23 nt, Artificial
  Chemically synthesized
ugucgcuuaugguugaggcaaaa

SEQ ID NO: 9623 - RNA, 23 nt, Artificial
  Chemically synthesized
uuuccuggaacauggcacugaac

SEQ ID NO: 9624 - RNA, 23 nt, Artificial
  Chemically synthesized
ucuuucaauuucugaagcuuuuc

SEQ ID NO: 9625 - RNA, 23 nt, Artificial
  Chemically synthesized
cuuucaauuucugaagcuuuuca

SEQ ID NO: 9626 - RNA, 23 nt, Artificial
  Chemically synthesized
uuucaauuucugaagcuuuucau

SEQ ID NO: 9627 - RNA, 23 nt, Artificial
  Chemically synthesized
uucaauuucugaagcuuuucauu

SEQ ID NO: 9628 - RNA, 23 nt, Artificial
  Chemically synthesized
ucaauuucugaagcuuuucauuu

SEQ ID NO: 9629 - RNA, 23 nt, Artificial
  Chemically synthesized
uugcacgaauuuucuucagcuug

SEQ ID NO: 9630 - RNA, 23 nt, Artificial
  Chemically synthesized
ugcacgaauuuucuucagcuugu

SEQ ID NO: 9631 - RNA, 23 nt, Artificial
  Chemically synthesized
gcacgaauuuucuucagcuuguu

SEQ ID NO: 9632 - RNA, 23 nt, Artificial
  Chemically synthesized
cacgaauuuucuucagcuuguuc

SEQ ID NO: 9633 - RNA, 23 nt, Artificial
  Chemically synthesized
cugguaauucuuagguggugugg

SEQ ID NO: 9634 - RNA, 23 nt, Artificial
  Chemically synthesized
ugguaauucuuaggugguguggc

SEQ ID NO: 9635 - RNA, 23 nt, Artificial
  Chemically synthesized
gguaauucuuaggugguguggcu

SEQ ID NO: 9636 - RNA, 23 nt, Artificial
  Chemically synthesized
aaggaugaguguccgauucggug

SEQ ID NO: 9637 - RNA, 23 nt, Artificial
  Chemically synthesized
aggaugaguguccgauucgguga

SEQ ID NO: 9638 - RNA, 23 nt, Artificial
  Chemically synthesized
ggaugaguguccgauucggugac

SEQ ID NO: 9639 - RNA, 23 nt, Artificial
  Chemically synthesized
gaugaguguccgauucggugacg

SEQ ID NO: 9640 - RNA, 23 nt, Artificial
  Chemically synthesized
augaguguccgauucggugacgg

SEQ ID NO: 9641 - RNA, 23 nt, Artificial
  Chemically synthesized
uacgccacaccuuuguucaucac

SEQ ID NO: 9642 - RNA, 23 nt, Artificial
  Chemically synthesized
cugaauuuuuuucccauagagac

SEQ ID NO: 9643 - RNA, 23 nt, Artificial
  Chemically synthesized
uaaguucaacacguggauuccca

SEQ ID NO: 9644 - RNA, 23 nt, Artificial
  Chemically synthesized
aaguucaacacguggauucccaa

SEQ ID NO: 9645 - RNA, 23 nt, Artificial
  Chemically synthesized
aguucaacacguggauucccaac

SEQ ID NO: 9646 - RNA, 23 nt, Artificial
  Chemically synthesized
caucauaugaucaaaggguaugg

SEQ ID NO: 9647 - RNA, 23 nt, Artificial
  Chemically synthesized
aucauaugaucaaaggguauggg

SEQ ID NO: 9648 - RNA, 23 nt, Artificial
  Chemically synthesized
ucauaugaucaaaggguauggga

SEQ ID NO: 9649 - RNA, 23 nt, Artificial
  Chemically synthesized
cauaugaucaaaggguaugggac

SEQ ID NO: 9650 - RNA, 23 nt, Artificial
  Chemically synthesized
auaugaucaaaggguaugggacg

SEQ ID NO: 9651 - RNA, 23 nt, Artificial
  Chemically synthesized
ccucugcaccagaucgaacucuc

SEQ ID NO: 9652 - RNA, 23 nt, Artificial
  Chemically synthesized
cucugcaccagaucgaacucucc

SEQ ID NO: 9653 - RNA, 23 nt, Artificial
  Chemically synthesized
ucugcaccagaucgaacucuccu

SEQ ID NO: 9654 - RNA, 23 nt, Artificial
  Chemically synthesized
cugcaccagaucgaacucuccuu

SEQ ID NO: 9655 - RNA, 23 nt, Artificial
  Chemically synthesized
ugcaccagaucgaacucuccuuc

SEQ ID NO: 9656 - RNA, 23 nt, Artificial
  Chemically synthesized
gagguugaacccgaagguaaaac

SEQ ID NO: 9657 - RNA, 23 nt, Artificial
  Chemically synthesized
agguugaacccgaagguaaaacg

SEQ ID NO: 9658 - RNA, 23 nt, Artificial
  Chemically synthesized
gguugaacccgaagguaaaacgg

SEQ ID NO: 9659 - RNA, 23 nt, Artificial
  Chemically synthesized
guugaacccgaagguaaaacggg

SEQ ID NO: 9660 - RNA, 23 nt, Artificial
  Chemically synthesized
uugaacccgaagguaaaacgggc

SEQ ID NO: 9661 - RNA, 23 nt, Artificial
  Chemically synthesized
cauaaauuacacacgacucauac

SEQ ID NO: 9662 - RNA, 23 nt, Artificial
  Chemically synthesized
auaaauuacacacgacucauaca

SEQ ID NO: 9663 - RNA, 23 nt, Artificial
  Chemically synthesized
ggacuuggguaugucccauagcu

SEQ ID NO: 9664 - RNA, 23 nt, Artificial
  Chemically synthesized
gacuuggguaugucccauagcuu

SEQ ID NO: 9665 - RNA, 23 nt, Artificial
  Chemically synthesized
acuuggguaugucccauagcuug

SEQ ID NO: 9666 - RNA, 23 nt, Artificial
  Chemically synthesized
cuuggguaugucccauagcuugg

SEQ ID NO: 9667 - RNA, 23 nt, Artificial
  Chemically synthesized
uuggguaugucccauagcuugga

SEQ ID NO: 9668 - RNA, 23 nt, Artificial
  Chemically synthesized
gcuuuaacugacuuauuuaaggc

SEQ ID NO: 9669 - RNA, 23 nt, Artificial
  Chemically synthesized
cuuuaacugacuuauuuaaggcg

SEQ ID NO: 9670 - RNA, 23 nt, Artificial
  Chemically synthesized
uuuaacugacuuauuuaaggcgc

SEQ ID NO: 9671 - RNA, 23 nt, Artificial
  Chemically synthesized
uuaacugacuuauuuaaggcgcu

SEQ ID NO: 9672 - RNA, 23 nt, Artificial
  Chemically synthesized
uaacugacuuauuuaaggcgcug

SEQ ID NO: 9673 - RNA, 23 nt, Artificial
  Chemically synthesized
cucuuaaguggcuccugguagcu

SEQ ID NO: 9674 - RNA, 23 nt, Artificial
  Chemically synthesized
ucuuaaguggcuccugguagcug

SEQ ID NO: 9675 - RNA, 23 nt, Artificial
  Chemically synthesized
cuuaaguggcuccugguagcugg

SEQ ID NO: 9676 - RNA, 23 nt, Artificial
  Chemically synthesized
uuaaguggcuccugguagcuggc

SEQ ID NO: 9677 - RNA, 23 nt, Artificial
  Chemically synthesized
gggcuucaacucguucuuucaau

SEQ ID NO: 9678 - RNA, 23 nt, Artificial
  Chemically synthesized
ggcuucaacucguucuuucaauu

SEQ ID NO: 9679 - RNA, 23 nt, Artificial
  Chemically synthesized
gcuucaacucguucuuucaauuu

SEQ ID NO: 9680 - RNA, 23 nt, Artificial
  Chemically synthesized
cuucaacucguucuuucaauuuc

SEQ ID NO: 9681 - RNA, 23 nt, Artificial
  Chemically synthesized
uucaacucguucuuucaauuucu

SEQ ID NO: 9682 - RNA, 23 nt, Artificial
  Chemically synthesized
auaucaucggcaucaucgcgggg

SEQ ID NO: 9683 - RNA, 23 nt, Artificial
  Chemically synthesized
uaggauucacauuguggacgcug

SEQ ID NO: 9684 - RNA, 23 nt, Artificial
  Chemically synthesized
aggauucacauuguggacgcugu

SEQ ID NO: 9685 - RNA, 23 nt, Artificial
  Chemically synthesized
ggauucacauuguggacgcuguc

SEQ ID NO: 9686 - RNA, 23 nt, Artificial
  Chemically synthesized
gauucacauuguggacgcugucu

SEQ ID NO: 9687 - RNA, 23 nt, Artificial
  Chemically synthesized
auucacauuguggacgcugucug

SEQ ID NO: 9688 - RNA, 23 nt, Artificial
  Chemically synthesized
uuuucuccagguacauuuauuac

SEQ ID NO: 9689 - RNA, 23 nt, Artificial
  Chemically synthesized
uguaaacgcuguuccuuggcaac

SEQ ID NO: 9690 - RNA, 23 nt, Artificial
  Chemically synthesized
uccuccaucuccucacacuuguc

SEQ ID NO: 9691 - RNA, 23 nt, Artificial
  Chemically synthesized
ccuccaucuccucacacuugucu

SEQ ID NO: 9692 - RNA, 23 nt, Artificial
  Chemically synthesized
uggcuugcuggagguacauggag

SEQ ID NO: 9693 - RNA, 23 nt, Artificial
  Chemically synthesized
ggcuugcuggagguacauggagu

SEQ ID NO: 9694 - RNA, 23 nt, Artificial
  Chemically synthesized
gcuugcuggagguacauggagua

SEQ ID NO: 9695 - RNA, 23 nt, Artificial
  Chemically synthesized
cuugcuggagguacauggaguau

SEQ ID NO: 9696 - RNA, 23 nt, Artificial
  Chemically synthesized
uugcuggagguacauggaguaua

SEQ ID NO: 9697 - RNA, 23 nt, Artificial
  Chemically synthesized
ucuguaguucuugguacagucuu

SEQ ID NO: 9698 - RNA, 23 nt, Artificial
  Chemically synthesized
cuguaguucuugguacagucuuu

SEQ ID NO: 9699 - RNA, 23 nt, Artificial
  Chemically synthesized
uguaguucuugguacagucuuuu

SEQ ID NO: 9700 - RNA, 23 nt, Artificial
  Chemically synthesized
guaguucuugguacagucuuuuu

SEQ ID NO: 9701 - RNA, 23 nt, Artificial
  Chemically synthesized
ucuccucacacuugucugcagca

SEQ ID NO: 9702 - RNA, 23 nt, Artificial
  Chemically synthesized
aauuggcaaaauucaguccuugg

SEQ ID NO: 9703 - RNA, 23 nt, Artificial
  Chemically synthesized
auuggcaaaauucaguccuugga

SEQ ID NO: 9704 - RNA, 23 nt, Artificial
  Chemically synthesized
uaagaccauuuucuagcugcagc

SEQ ID NO: 9705 - RNA, 23 nt, Artificial
  Chemically synthesized
aagaccauuuucuagcugcagcu

SEQ ID NO: 9706 - RNA, 23 nt, Artificial
  Chemically synthesized
agaccauuuucuagcugcagcuu

SEQ ID NO: 9707 - RNA, 23 nt, Artificial
  Chemically synthesized
gaccauuuucuagcugcagcuuu

SEQ ID NO: 9708 - RNA, 23 nt, Artificial
  Chemically synthesized
uugguguuuccauuguccacauc

SEQ ID NO: 9709 - RNA, 23 nt, Artificial
  Chemically synthesized
uuugaaaguggguauuuauuugg

SEQ ID NO: 9710 - RNA, 23 nt, Artificial
  Chemically synthesized
uugaaaguggguauuuauuugga

SEQ ID NO: 9711 - RNA, 23 nt, Artificial
  Chemically synthesized
ugaaaguggguauuuauuuggau

SEQ ID NO: 9712 - RNA, 23 nt, Artificial
  Chemically synthesized
gaaaguggguauuuauuuggauu

SEQ ID NO: 9713 - RNA, 23 nt, Artificial
  Chemically synthesized
aaaguggguauuuauuuggauuu

SEQ ID NO: 9714 - RNA, 23 nt, Artificial
  Chemically synthesized
aggcauacacacugggcagcaac

SEQ ID NO: 9715 - RNA, 23 nt, Artificial
  Chemically synthesized
ggcauacacacugggcagcaaca

SEQ ID NO: 9716 - RNA, 23 nt, Artificial
  Chemically synthesized
gcauacacacugggcagcaacac

SEQ ID NO: 9717 - RNA, 23 nt, Artificial
  Chemically synthesized
cauacacacugggcagcaacacu

SEQ ID NO: 9718 - RNA, 23 nt, Artificial
  Chemically synthesized
auacacacugggcagcaacacug

SEQ ID NO: 9719 - RNA, 23 nt, Artificial
  Chemically synthesized
ucaucacacccagcuuuuccugc

SEQ ID NO: 9720 - RNA, 23 nt, Artificial
  Chemically synthesized
caucacacccagcuuuuccugca

SEQ ID NO: 9721 - RNA, 23 nt, Artificial
  Chemically synthesized
aucacacccagcuuuuccugcac

SEQ ID NO: 9722 - RNA, 23 nt, Artificial
  Chemically synthesized
uccuugcaaaauucuacaacauc

SEQ ID NO: 9723 - RNA, 23 nt, Artificial
  Chemically synthesized
ccuugcaaaauucuacaacaucu

SEQ ID NO: 9724 - RNA, 23 nt, Artificial
  Chemically synthesized
cuugcaaaauucuacaacaucuc

SEQ ID NO: 9725 - RNA, 23 nt, Artificial
  Chemically synthesized
uugcaaaauucuacaacaucucg

SEQ ID NO: 9726 - RNA, 23 nt, Artificial
  Chemically synthesized
ugcaaaauucuacaacaucucga

SEQ ID NO: 9727 - RNA, 23 nt, Artificial
  Chemically synthesized
caccuuguucacuguucucaguu

SEQ ID NO: 9728 - RNA, 23 nt, Artificial
  Chemically synthesized
accuuguucacuguucucaguug

SEQ ID NO: 9729 - RNA, 23 nt, Artificial
  Chemically synthesized
ccuuguucacuguucucaguugg

SEQ ID NO: 9730 - RNA, 23 nt, Artificial
  Chemically synthesized
cuuguucacuguucucaguuggg

SEQ ID NO: 9731 - RNA, 23 nt, Artificial
  Chemically synthesized
uuguucacuguucucaguugggg

SEQ ID NO: 9732 - RNA, 23 nt, Artificial
  Chemically synthesized
cacaauaaucucuuaaguggcuc

SEQ ID NO: 9733 - RNA, 23 nt, Artificial
  Chemically synthesized
gagucuguacacacauuuuuaca

SEQ ID NO: 9734 - RNA, 23 nt, Artificial
  Chemically synthesized
agucuguacacacauuuuuacau

SEQ ID NO: 9735 - RNA, 23 nt, Artificial
  Chemically synthesized
gucuguacacacauuuuuacaua

SEQ ID NO: 9736 - RNA, 23 nt, Artificial
  Chemically synthesized
ucuguacacacauuuuuacauaa

SEQ ID NO: 9737 - RNA, 23 nt, Artificial
  Chemically synthesized
cuugguacagucuuuuuaacucc

SEQ ID NO: 9738 - RNA, 23 nt, Artificial
  Chemically synthesized
uugguacagucuuuuuaacucca

SEQ ID NO: 9739 - RNA, 23 nt, Artificial
  Chemically synthesized
ugguacagucuuuuuaacuccac

SEQ ID NO: 9740 - RNA, 23 nt, Artificial
  Chemically synthesized
aucuguucauuguugcucaagaa

SEQ ID NO: 9741 - RNA, 23 nt, Artificial
  Chemically synthesized
ucuguucauuguugcucaagaaa

SEQ ID NO: 9742 - RNA, 23 nt, Artificial
  Chemically synthesized
cuguucauuguugcucaagaaaa

SEQ ID NO: 9743 - RNA, 23 nt, Artificial
  Chemically synthesized
uguucauuguugcucaagaaaac

SEQ ID NO: 9744 - RNA, 23 nt, Artificial
  Chemically synthesized
accauacacugcuuuaacugacu

SEQ ID NO: 9745 - RNA, 23 nt, Artificial
  Chemically synthesized
ccauacacugcuuuaacugacuu

SEQ ID NO: 9746 - RNA, 23 nt, Artificial
  Chemically synthesized
cauacacugcuuuaacugacuua

SEQ ID NO: 9747 - RNA, 23 nt, Artificial
  Chemically synthesized
auacacugcuuuaacugacuuau

SEQ ID NO: 9748 - RNA, 23 nt, Artificial
  Chemically synthesized
uauguacagucagugcuccaagg

SEQ ID NO: 9749 - RNA, 23 nt, Artificial
  Chemically synthesized
auguacagucagugcuccaaggu

SEQ ID NO: 9750 - RNA, 23 nt, Artificial
  Chemically synthesized
uguacagucagugcuccaaggug

SEQ ID NO: 9751 - RNA, 23 nt, Artificial
  Chemically synthesized
guacagucagugcuccaagguga

SEQ ID NO: 9752 - RNA, 23 nt, Artificial
  Chemically synthesized
uacagucagugcuccaaggugau

SEQ ID NO: 9753 - RNA, 23 nt, Artificial
  Chemically synthesized
acgcuguuccuuggcaaccaaca

SEQ ID NO: 9754 - RNA, 23 nt, Artificial
  Chemically synthesized
cgcuguuccuuggcaaccaacau

SEQ ID NO: 9755 - RNA, 23 nt, Artificial
  Chemically synthesized
gggcuugcugggaucuuccaccu

SEQ ID NO: 9756 - RNA, 23 nt, Artificial
  Chemically synthesized
ggcuugcugggaucuuccaccuc

SEQ ID NO: 9757 - RNA, 23 nt, Artificial
  Chemically synthesized
gcuugcugggaucuuccaccuca

SEQ ID NO: 9758 - RNA, 23 nt, Artificial
  Chemically synthesized
cuugcugggaucuuccaccucau

SEQ ID NO: 9759 - RNA, 23 nt, Artificial
  Chemically synthesized
uugcugggaucuuccaccucaua

SEQ ID NO: 9760 - RNA, 23 nt, Artificial
  Chemically synthesized
gagguggcacuuuaccaaucucg

SEQ ID NO: 9761 - RNA, 23 nt, Artificial
  Chemically synthesized
agguggcacuuuaccaaucucga

SEQ ID NO: 9762 - RNA, 23 nt, Artificial
  Chemically synthesized
gguggcacuuuaccaaucucgau

SEQ ID NO: 9763 - RNA, 23 nt, Artificial
  Chemically synthesized
guggcacuuuaccaaucucgaug

SEQ ID NO: 9764 - RNA, 23 nt, Artificial
  Chemically synthesized
uggcacuuuaccaaucucgaugc

SEQ ID NO: 9765 - RNA, 23 nt, Artificial
  Chemically synthesized
uaugggacuucuuaauggcaaga

SEQ ID NO: 9766 - RNA, 23 nt, Artificial
  Chemically synthesized
agugugagaaaggaugagugucc

SEQ ID NO: 9767 - RNA, 23 nt, Artificial
  Chemically synthesized
gugugagaaaggaugaguguccg

SEQ ID NO: 9768 - RNA, 23 nt, Artificial
  Chemically synthesized
ugugagaaaggaugaguguccga

SEQ ID NO: 9769 - RNA, 23 nt, Artificial
  Chemically synthesized
gugagaaaggaugaguguccgau

SEQ ID NO: 9770 - RNA, 23 nt, Artificial
  Chemically synthesized
ugagaaaggaugaguguccgauu

SEQ ID NO: 9771 - RNA, 23 nt, Artificial
  Chemically synthesized
ggccuccagcaccugacuccauu

SEQ ID NO: 9772 - RNA, 23 nt, Artificial
  Chemically synthesized
gccuccagcaccugacuccauuc

SEQ ID NO: 9773 - RNA, 23 nt, Artificial
  Chemically synthesized
ccuccagcaccugacuccauuca

SEQ ID NO: 9774 - RNA, 23 nt, Artificial
  Chemically synthesized
cuccagcaccugacuccauucag

SEQ ID NO: 9775 - RNA, 23 nt, Artificial
  Chemically synthesized
uccagcaccugacuccauucagg

SEQ ID NO: 9776 - RNA, 23 nt, Artificial
  Chemically synthesized
agcuuugaauggucuagucaaaa

SEQ ID NO: 9777 - RNA, 23 nt, Artificial
  Chemically synthesized
gcuuugaauggucuagucaaaaa

SEQ ID NO: 9778 - RNA, 23 nt, Artificial
  Chemically synthesized
cuuugaauggucuagucaaaaaa

SEQ ID NO: 9779 - RNA, 23 nt, Artificial
  Chemically synthesized
uuugaauggucuagucaaaaaau

SEQ ID NO: 9780 - RNA, 23 nt, Artificial
  Chemically synthesized
uugaauggucuagucaaaaaaua

SEQ ID NO: 9781 - RNA, 23 nt, Artificial
  Chemically synthesized
acagugcugcaucagugagucug

SEQ ID NO: 9782 - RNA, 23 nt, Artificial
  Chemically synthesized
cagugcugcaucagugagucugu

SEQ ID NO: 9783 - RNA, 23 nt, Artificial
  Chemically synthesized
agugcugcaucagugagucugua

SEQ ID NO: 9784 - RNA, 23 nt, Artificial
  Chemically synthesized
gugcugcaucagugagucuguac

SEQ ID NO: 9785 - RNA, 23 nt, Artificial
  Chemically synthesized
ugcugcaucagugagucuguaca

SEQ ID NO: 9786 - RNA, 23 nt, Artificial
  Chemically synthesized
cucgugucgaaggaaaaauuuca

SEQ ID NO: 9787 - RNA, 23 nt, Artificial
  Chemically synthesized
ucgugucgaaggaaaaauuucac

SEQ ID NO: 9788 - RNA, 23 nt, Artificial
  Chemically synthesized
cgugucgaaggaaaaauuucacu

SEQ ID NO: 9789 - RNA, 23 nt, Artificial
  Chemically synthesized
gugucgaaggaaaaauuucacuu

SEQ ID NO: 9790 - RNA, 23 nt, Artificial
  Chemically synthesized
ugucgaaggaaaaauuucacuuc

SEQ ID NO: 9791 - RNA, 23 nt, Artificial
  Chemically synthesized
cacauuguggacgcugucugcua

SEQ ID NO: 9792 - RNA, 23 nt, Artificial
  Chemically synthesized
acauuguggacgcugucugcuaa

SEQ ID NO: 9793 - RNA, 23 nt, Artificial
  Chemically synthesized
cauuguggacgcugucugcuaaa

SEQ ID NO: 9794 - RNA, 23 nt, Artificial
  Chemically synthesized
auuguggacgcugucugcuaaag

SEQ ID NO: 9795 - RNA, 23 nt, Artificial
  Chemically synthesized
uuguggacgcugucugcuaaagu

SEQ ID NO: 9796 - RNA, 23 nt, Artificial
  Chemically synthesized
gccauuguaagacuggaacccau

SEQ ID NO: 9797 - RNA, 23 nt, Artificial
  Chemically synthesized
ccauuguaagacuggaacccauu

SEQ ID NO: 9798 - RNA, 23 nt, Artificial
  Chemically synthesized
cauuguaagacuggaacccauuc

SEQ ID NO: 9799 - RNA, 23 nt, Artificial
  Chemically synthesized
auuguaagacuggaacccauuca

SEQ ID NO: 9800 - RNA, 23 nt, Artificial
  Chemically synthesized
uuguaagacuggaacccauucag

SEQ ID NO: 9801 - RNA, 23 nt, Artificial
  Chemically synthesized
gaugaagggaagaaggaucaugu

SEQ ID NO: 9802 - RNA, 23 nt, Artificial
  Chemically synthesized
augaagggaagaaggaucaugug

SEQ ID NO: 9803 - RNA, 23 nt, Artificial
  Chemically synthesized
ugaagggaagaaggaucaugugu

SEQ ID NO: 9804 - RNA, 23 nt, Artificial
  Chemically synthesized
gaagggaagaaggaucaugugug

SEQ ID NO: 9805 - RNA, 23 nt, Artificial
  Chemically synthesized
aagggaagaaggaucaugugugg

SEQ ID NO: 9806 - RNA, 23 nt, Artificial
  Chemically synthesized
gggaucuuccaccucauagauga

SEQ ID NO: 9807 - RNA, 23 nt, Artificial
  Chemically synthesized
ggaucuuccaccucauagaugau

SEQ ID NO: 9808 - RNA, 23 nt, Artificial
  Chemically synthesized
cauagaugauccucugcaccaga

SEQ ID NO: 9809 - RNA, 23 nt, Artificial
  Chemically synthesized
auagaugauccucugcaccagau

SEQ ID NO: 9810 - RNA, 23 nt, Artificial
  Chemically synthesized
acuguggccuugacccuuuauca

SEQ ID NO: 9811 - RNA, 23 nt, Artificial
  Chemically synthesized
cuguggccuugacccuuuaucag

SEQ ID NO: 9812 - RNA, 23 nt, Artificial
  Chemically synthesized
uguggccuugacccuuuaucagc

SEQ ID NO: 9813 - RNA, 23 nt, Artificial
  Chemically synthesized
guggccuugacccuuuaucagcc

SEQ ID NO: 9814 - RNA, 23 nt, Artificial
  Chemically synthesized
uggccuugacccuuuaucagcca

SEQ ID NO: 9815 - RNA, 23 nt, Artificial
  Chemically synthesized
uucauuguugcucaagaaaacag

SEQ ID NO: 9816 - RNA, 23 nt, Artificial
  Chemically synthesized
ucauuguugcucaagaaaacagu

SEQ ID NO: 9817 - RNA, 23 nt, Artificial
  Chemically synthesized
cauuguugcucaagaaaacaguu

SEQ ID NO: 9818 - RNA, 23 nt, Artificial
  Chemically synthesized
auuguugcucaagaaaacaguua

SEQ ID NO: 9819 - RNA, 23 nt, Artificial
  Chemically synthesized
uuguugcucaagaaaacaguuaa

SEQ ID NO: 9820 - RNA, 23 nt, Artificial
  Chemically synthesized
agcauucacguugacaccaaaau

SEQ ID NO: 9821 - RNA, 23 nt, Artificial
  Chemically synthesized
caacaucucgacagguuguuucc

SEQ ID NO: 9822 - RNA, 23 nt, Artificial
  Chemically synthesized
aacaucucgacagguuguuuccg

SEQ ID NO: 9823 - RNA, 23 nt, Artificial
  Chemically synthesized
acaucucgacagguuguuuccgg

SEQ ID NO: 9824 - RNA, 23 nt, Artificial
  Chemically synthesized
caucucgacagguuguuuccggu

SEQ ID NO: 9825 - RNA, 23 nt, Artificial
  Chemically synthesized
aucucgacagguuguuuccggug

SEQ ID NO: 9826 - RNA, 23 nt, Artificial
  Chemically synthesized
cugaguucguugcucuugggucu

SEQ ID NO: 9827 - RNA, 23 nt, Artificial
  Chemically synthesized
acacuauguacagucagugcucc

SEQ ID NO: 9828 - RNA, 23 nt, Artificial
  Chemically synthesized
acuauguacagucagugcuccaa

SEQ ID NO: 9829 - RNA, 23 nt, Artificial
  Chemically synthesized
cuauguacagucagugcuccaag

SEQ ID NO: 9830 - RNA, 23 nt, Artificial
  Chemically synthesized
ggccuugacccuuuaucagccag

SEQ ID NO: 9831 - RNA, 23 nt, Artificial
  Chemically synthesized
aggcucuuucucaguacuuucug

SEQ ID NO: 9832 - RNA, 23 nt, Artificial
  Chemically synthesized
ggcucuuucucaguacuuucuga

SEQ ID NO: 9833 - RNA, 23 nt, Artificial
  Chemically synthesized
gcucuuucucaguacuuucugaa

SEQ ID NO: 9834 - RNA, 23 nt, Artificial
  Chemically synthesized
cucuuucucaguacuuucugaag

SEQ ID NO: 9835 - RNA, 23 nt, Artificial
  Chemically synthesized
auaguucggguagcuuugaaugg

SEQ ID NO: 9836 - RNA, 23 nt, Artificial
  Chemically synthesized
uaguucggguagcuuugaauggu

SEQ ID NO: 9837 - RNA, 23 nt, Artificial
  Chemically synthesized
aguucggguagcuuugaaugguc

SEQ ID NO: 9838 - RNA, 23 nt, Artificial
  Chemically synthesized
guucggguagcuuugaauggucu

SEQ ID NO: 9839 - RNA, 23 nt, Artificial
  Chemically synthesized
uucggguagcuuugaauggucua

SEQ ID NO: 9840 - RNA, 23 nt, Artificial
  Chemically synthesized
gaaauccucugcugaaucuguug

SEQ ID NO: 9841 - RNA, 23 nt, Artificial
  Chemically synthesized
aaauccucugcugaaucuguugu

SEQ ID NO: 9842 - RNA, 23 nt, Artificial
  Chemically synthesized
aauccucugcugaaucuguugug

SEQ ID NO: 9843 - RNA, 23 nt, Artificial
  Chemically synthesized
auccucugcugaaucuguuguga

SEQ ID NO: 9844 - RNA, 23 nt, Artificial
  Chemically synthesized
uccucugcugaaucuguugugag

SEQ ID NO: 9845 - RNA, 23 nt, Artificial
  Chemically synthesized
aaucuguaguucuugguacaguc

SEQ ID NO: 9846 - RNA, 23 nt, Artificial
  Chemically synthesized
aucuguaguucuugguacagucu

SEQ ID NO: 9847 - RNA, 23 nt, Artificial
  Chemically synthesized
ccaccucauagaugauccucugc

SEQ ID NO: 9848 - RNA, 23 nt, Artificial
  Chemically synthesized
cucauugcacgaauuuucuucag

SEQ ID NO: 9849 - RNA, 23 nt, Artificial
  Chemically synthesized
ucauugcacgaauuuucuucagc

SEQ ID NO: 9850 - RNA, 23 nt, Artificial
  Chemically synthesized
cauugcacgaauuuucuucagcu

SEQ ID NO: 9851 - RNA, 23 nt, Artificial
  Chemically synthesized
auugcacgaauuuucuucagcuu

SEQ ID NO: 9852 - RNA, 23 nt, Artificial
  Chemically synthesized
acucauuaucauuggcaucugau

SEQ ID NO: 9853 - RNA, 23 nt, Artificial
  Chemically synthesized
ucuucaaguugguccgcuuguuc

SEQ ID NO: 9854 - RNA, 23 nt, Artificial
  Chemically synthesized
cuucaaguugguccgcuuguucg

SEQ ID NO: 9855 - RNA, 23 nt, Artificial
  Chemically synthesized
uucaaguugguccgcuuguucgu

SEQ ID NO: 9856 - RNA, 23 nt, Artificial
  Chemically synthesized
ucacacccagcuuuuccugcacc

SEQ ID NO: 9857 - RNA, 23 nt, Artificial
  Chemically synthesized
gcgcugguacagcagcuucugga

SEQ ID NO: 9858 - RNA, 23 nt, Artificial
  Chemically synthesized
cgcugguacagcagcuucuggau

SEQ ID NO: 9859 - RNA, 23 nt, Artificial
  Chemically synthesized
gcugguacagcagcuucuggaug

SEQ ID NO: 9860 - RNA, 23 nt, Artificial
  Chemically synthesized
cugguacagcagcuucuggaugu

SEQ ID NO: 9861 - RNA, 23 nt, Artificial
  Chemically synthesized
ugguacagcagcuucuggauguu

SEQ ID NO: 9862 - RNA, 23 nt, Artificial
  Chemically synthesized
acacuucagcuaaauggcagcug

SEQ ID NO: 9863 - RNA, 23 nt, Artificial
  Chemically synthesized
cacuucagcuaaauggcagcugc

SEQ ID NO: 9864 - RNA, 23 nt, Artificial
  Chemically synthesized
acuucagcuaaauggcagcugcc

SEQ ID NO: 9865 - RNA, 23 nt, Artificial
  Chemically synthesized
cuucagcuaaauggcagcugccu

SEQ ID NO: 9866 - RNA, 23 nt, Artificial
  Chemically synthesized
uucagcuaaauggcagcugccuu

SEQ ID NO: 9867 - RNA, 23 nt, Artificial
  Chemically synthesized
uuaagaccauuuucuagcugcag

SEQ ID NO: 9868 - RNA, 23 nt, Artificial
  Chemically synthesized
cugcugaaucuguugugaggagc

SEQ ID NO: 9869 - RNA, 23 nt, Artificial
  Chemically synthesized
ugcugaaucuguugugaggagcc

SEQ ID NO: 9870 - RNA, 23 nt, Artificial
  Chemically synthesized
gcugaaucuguugugaggagccu

SEQ ID NO: 9871 - RNA, 23 nt, Artificial
  Chemically synthesized
cugaaucuguugugaggagccug

SEQ ID NO: 9872 - RNA, 23 nt, Artificial
  Chemically synthesized
ugaaucuguugugaggagccugg

SEQ ID NO: 9873 - RNA, 23 nt, Artificial
  Chemically synthesized
cgccacaccuuuguucaucacac

SEQ ID NO: 9874 - RNA, 23 nt, Artificial
  Chemically synthesized
gccacaccuuuguucaucacacc

SEQ ID NO: 9875 - RNA, 23 nt, Artificial
  Chemically synthesized
aggcucucccaguugucacuugg

SEQ ID NO: 9876 - RNA, 23 nt, Artificial
  Chemically synthesized
ggcucucccaguugucacuuggu

SEQ ID NO: 9877 - RNA, 23 nt, Artificial
  Chemically synthesized
gcucucccaguugucacuugguc

SEQ ID NO: 9878 - RNA, 23 nt, Artificial
  Chemically synthesized
cucucccaguugucacuuggucu

SEQ ID NO: 9879 - RNA, 23 nt, Artificial
  Chemically synthesized
ucucccaguugucacuuggucuu

SEQ ID NO: 9880 - RNA, 23 nt, Artificial
  Chemically synthesized
uucguacaucauaugaucaaagg

SEQ ID NO: 9881 - RNA, 23 nt, Artificial
  Chemically synthesized
ucguacaucauaugaucaaaggg

SEQ ID NO: 9882 - RNA, 23 nt, Artificial
  Chemically synthesized
cguacaucauaugaucaaagggu

SEQ ID NO: 9883 - RNA, 23 nt, Artificial
  Chemically synthesized
guacaucauaugaucaaagggua

SEQ ID NO: 9884 - RNA, 23 nt, Artificial
  Chemically synthesized
uacaucauaugaucaaaggguau

SEQ ID NO: 9885 - RNA, 23 nt, Artificial
  Chemically synthesized
uguucacuguucucaguugggga

SEQ ID NO: 9886 - RNA, 23 nt, Artificial
  Chemically synthesized
guucacuguucucaguuggggag

SEQ ID NO: 9887 - RNA, 23 nt, Artificial
  Chemically synthesized
uucacuguucucaguuggggagu

SEQ ID NO: 9888 - RNA, 23 nt, Artificial
  Chemically synthesized
gaaucuguugugaggagccuggc

SEQ ID NO: 9889 - RNA, 23 nt, Artificial
  Chemically synthesized
aaucuguugugaggagccuggcu

SEQ ID NO: 9890 - RNA, 23 nt, Artificial
  Chemically synthesized
aucuguugugaggagccuggcug

SEQ ID NO: 9891 - RNA, 23 nt, Artificial
  Chemically synthesized
ccgcuccgaguugggcuucuuca

SEQ ID NO: 9892 - RNA, 23 nt, Artificial
  Chemically synthesized
cgcuccgaguugggcuucuucaa

SEQ ID NO: 9893 - RNA, 23 nt, Artificial
  Chemically synthesized
gcuccgaguugggcuucuucaag

SEQ ID NO: 9894 - RNA, 23 nt, Artificial
  Chemically synthesized
cuccgaguugggcuucuucaagu

SEQ ID NO: 9895 - RNA, 23 nt, Artificial
  Chemically synthesized
uccgaguugggcuucuucaaguu

SEQ ID NO: 9896 - RNA, 23 nt, Artificial
  Chemically synthesized
gagcaccauuaagaccauuuucu

SEQ ID NO: 9897 - RNA, 23 nt, Artificial
  Chemically synthesized
agcaccauuaagaccauuuucua

SEQ ID NO: 9898 - RNA, 23 nt, Artificial
  Chemically synthesized
gcaccauuaagaccauuuucuag

SEQ ID NO: 9899 - RNA, 23 nt, Artificial
  Chemically synthesized
gcucuuccagguuuccauuggca

SEQ ID NO: 9900 - RNA, 23 nt, Artificial
  Chemically synthesized
cucuuccagguuuccauuggcau

SEQ ID NO: 9901 - RNA, 23 nt, Artificial
  Chemically synthesized
ucuuccagguuuccauuggcauu

SEQ ID NO: 9902 - RNA, 23 nt, Artificial
  Chemically synthesized
cuuccagguuuccauuggcauug

SEQ ID NO: 9903 - RNA, 23 nt, Artificial
  Chemically synthesized
uuccagguuuccauuggcauugg

SEQ ID NO: 9904 - RNA, 23 nt, Artificial
  Chemically synthesized
uaucauuggcaucugaugacggg

SEQ ID NO: 9905 - RNA, 23 nt, Artificial
  Chemically synthesized
ucaaguugguccgcuuguucgug

SEQ ID NO: 9906 - RNA, 23 nt, Artificial
  Chemically synthesized
caaguugguccgcuuguucgugg

SEQ ID NO: 9907 - RNA, 23 nt, Artificial
  Chemically synthesized
aaguugguccgcuuguucgugga

SEQ ID NO: 9908 - RNA, 23 nt, Artificial
  Chemically synthesized
aggguguugaagcgcugguacag

SEQ ID NO: 9909 - RNA, 23 nt, Artificial
  Chemically synthesized
ggguguugaagcgcugguacagc

SEQ ID NO: 9910 - RNA, 23 nt, Artificial
  Chemically synthesized
gguguugaagcgcugguacagca

SEQ ID NO: 9911 - RNA, 23 nt, Artificial
  Chemically synthesized
guguugaagcgcugguacagcag

SEQ ID NO: 9912 - RNA, 23 nt, Artificial
  Chemically synthesized
uguugaagcgcugguacagcagc

SEQ ID NO: 9913 - RNA, 23 nt, Artificial
  Chemically synthesized
aacugacuuauuuaaggcgcugu

SEQ ID NO: 9914 - RNA, 23 nt, Artificial
  Chemically synthesized
acugacuuauuuaaggcgcugug

SEQ ID NO: 9915 - RNA, 23 nt, Artificial
  Chemically synthesized
cacguugacaccaaaauccagca

SEQ ID NO: 9916 - RNA, 23 nt, Artificial
  Chemically synthesized
acguugacaccaaaauccagcag

SEQ ID NO: 9917 - RNA, 23 nt, Artificial
  Chemically synthesized
cguugacaccaaaauccagcagg

SEQ ID NO: 9918 - RNA, 23 nt, Artificial
  Chemically synthesized
guugacaccaaaauccagcagga

SEQ ID NO: 9919 - RNA, 23 nt, Artificial
  Chemically synthesized
uugacaccaaaauccagcaggaa

SEQ ID NO: 9920 - RNA, 23 nt, Artificial
  Chemically synthesized
cugcuaaagugagcaccauuaag

SEQ ID NO: 9921 - RNA, 23 nt, Artificial
  Chemically synthesized
ugcuaaagugagcaccauuaaga

SEQ ID NO: 9922 - RNA, 23 nt, Artificial
  Chemically synthesized
gcuaaagugagcaccauuaagac

SEQ ID NO: 9923 - RNA, 23 nt, Artificial
  Chemically synthesized
cuaaagugagcaccauuaagacc

SEQ ID NO: 9924 - RNA, 23 nt, Artificial
  Chemically synthesized
uaugaucaaaggguaugggacgu

SEQ ID NO: 9925 - RNA, 23 nt, Artificial
  Chemically synthesized
uguugcucaagaaaacaguuaau

SEQ ID NO: 9926 - RNA, 23 nt, Artificial
  Chemically synthesized
guugcucaagaaaacaguuaaua

SEQ ID NO: 9927 - RNA, 23 nt, Artificial
  Chemically synthesized
uugcucaagaaaacaguuaauau

SEQ ID NO: 9928 - RNA, 23 nt, Artificial
  Chemically synthesized
gcaaaauucuacaacaucucgac

SEQ ID NO: 9929 - RNA, 23 nt, Artificial
  Chemically synthesized
caaaauucuacaacaucucgaca

SEQ ID NO: 9930 - RNA, 23 nt, Artificial
  Chemically synthesized
caguuaauaucaucggcaucauc

SEQ ID NO: 9931 - RNA, 23 nt, Artificial
  Chemically synthesized
aggccuaauggccacugucagug

SEQ ID NO: 9932 - RNA, 23 nt, Artificial
  Chemically synthesized
ggccuaauggccacugucagugg

SEQ ID NO: 9933 - RNA, 23 nt, Artificial
  Chemically synthesized
gccuaauggccacugucaguggg

SEQ ID NO: 9934 - RNA, 23 nt, Artificial
  Chemically synthesized
ccuaauggccacugucaguggga

SEQ ID NO: 9935 - RNA, 23 nt, Artificial
  Chemically synthesized
cuaauggccacugucagugggag

SEQ ID NO: 9936 - RNA, 23 nt, Artificial
  Chemically synthesized
gaucaacccuuaaaauugcaguc

SEQ ID NO: 9937 - RNA, 23 nt, Artificial
  Chemically synthesized
aucaacccuuaaaauugcagucu

SEQ ID NO: 9938 - RNA, 23 nt, Artificial
  Chemically synthesized
ucaacccuuaaaauugcagucug

SEQ ID NO: 9939 - RNA, 23 nt, Artificial
  Chemically synthesized
cuuucuuuaaaucuuccaauugc

SEQ ID NO: 9940 - RNA, 23 nt, Artificial
  Chemically synthesized
uuucuuuaaaucuuccaauugcu

SEQ ID NO: 9941 - RNA, 23 nt, Artificial
  Chemically synthesized
gccuuuaggugaacuggaacagg

SEQ ID NO: 9942 - RNA, 23 nt, Artificial
  Chemically synthesized
ccuuuaggugaacuggaacagga

SEQ ID NO: 9943 - RNA, 23 nt, Artificial
  Chemically synthesized
cuuuaggugaacuggaacaggaa

SEQ ID NO: 9944 - RNA, 23 nt, Artificial
  Chemically synthesized
uuuaggugaacuggaacaggaag

SEQ ID NO: 9945 - RNA, 23 nt, Artificial
  Chemically synthesized
uuaggugaacuggaacaggaagc

SEQ ID NO: 9946 - RNA, 23 nt, Artificial
  Chemically synthesized
uguuaaaaucuguucauuguugc

SEQ ID NO: 9947 - RNA, 23 nt, Artificial
  Chemically synthesized
guuaaaaucuguucauuguugcu

SEQ ID NO: 9948 - RNA, 23 nt, Artificial
  Chemically synthesized
uaucaucggcaucaucgcgggga

SEQ ID NO: 9949 - RNA, 23 nt, Artificial
  Chemically synthesized
uggaacuugaauucacugucugg

SEQ ID NO: 9950 - RNA, 23 nt, Artificial
  Chemically synthesized
caagucaguaagagcuucugucu

SEQ ID NO: 9951 - RNA, 23 nt, Artificial
  Chemically synthesized
aagucaguaagagcuucugucuu

SEQ ID NO: 9952 - RNA, 23 nt, Artificial
  Chemically synthesized
agucaguaagagcuucugucuuc

SEQ ID NO: 9953 - RNA, 23 nt, Artificial
  Chemically synthesized
gucaguaagagcuucugucuuca

SEQ ID NO: 9954 - RNA, 23 nt, Artificial
  Chemically synthesized
ucaguaagagcuucugucuucac

SEQ ID NO: 9955 - RNA, 23 nt, Artificial
  Chemically synthesized
ggcacuuuaccaaucucgaugcc

SEQ ID NO: 9956 - RNA, 23 nt, Artificial
  Chemically synthesized
ucagcuaaauggcagcugccuuc

SEQ ID NO: 9957 - RNA, 23 nt, Artificial
  Chemically synthesized
cagcuaaauggcagcugccuucu

SEQ ID NO: 9958 - RNA, 23 nt, Artificial
  Chemically synthesized
agcuaaauggcagcugccuucuc

SEQ ID NO: 9959 - RNA, 23 nt, Artificial
  Chemically synthesized
gcuaaauggcagcugccuucucc

SEQ ID NO: 9960 - RNA, 23 nt, Artificial
  Chemically synthesized
cuaaauggcagcugccuucucca

SEQ ID NO: 9961 - RNA, 23 nt, Artificial
  Chemically synthesized
ccaagucaguaagagcuucuguc

SEQ ID NO: 9962 - RNA, 23 nt, Artificial
  Chemically synthesized
uuggaucuuccaugagcagcauu

SEQ ID NO: 9963 - RNA, 23 nt, Artificial
  Chemically synthesized
uucugaagauguucguacaucau

SEQ ID NO: 9964 - RNA, 23 nt, Artificial
  Chemically synthesized
caccacucagucucgcuuucguc

SEQ ID NO: 9965 - RNA, 23 nt, Artificial
  Chemically synthesized
accacucagucucgcuuucgucc

SEQ ID NO: 9966 - RNA, 23 nt, Artificial
  Chemically synthesized
ugguugaggcaaaaauggcggca

SEQ ID NO: 9967 - RNA, 23 nt, Artificial
  Chemically synthesized
agccuuuaggugaacuggaacag

SEQ ID NO: 9968 - RNA, 23 nt, Artificial
  Chemically synthesized
ggccuccaggucugcaucacucu

SEQ ID NO: 9969 - RNA, 23 nt, Artificial
  Chemically synthesized
gccuccaggucugcaucacucug

SEQ ID NO: 9970 - RNA, 23 nt, Artificial
  Chemically synthesized
ccuccaggucugcaucacucugg

SEQ ID NO: 9971 - RNA, 23 nt, Artificial
  Chemically synthesized
cuccaggucugcaucacucuggu

SEQ ID NO: 9972 - RNA, 23 nt, Artificial
  Chemically synthesized
uccaggucugcaucacucuggua

SEQ ID NO: 9973 - RNA, 23 nt, Artificial
  Chemically synthesized
uacacacgacucauacaugaaaa

SEQ ID NO: 9974 - RNA, 23 nt, Artificial
  Chemically synthesized
ugccuucuccagguuccuugcaa

SEQ ID NO: 9975 - RNA, 23 nt, Artificial
  Chemically synthesized
gccuucuccagguuccuugcaaa

SEQ ID NO: 9976 - RNA, 23 nt, Artificial
  Chemically synthesized
ccuucuccagguuccuugcaaaa

SEQ ID NO: 9977 - RNA, 23 nt, Artificial
  Chemically synthesized
cuucuccagguuccuugcaaaau

SEQ ID NO: 9978 - RNA, 23 nt, Artificial
  Chemically synthesized
uucuccagguuccuugcaaaauu

SEQ ID NO: 9979 - RNA, 23 nt, Artificial
  Chemically synthesized
uccugguuaaguugguuacgaau

SEQ ID NO: 9980 - RNA, 23 nt, Artificial
  Chemically synthesized
ugaacccgaagguaaaacgggcu

SEQ ID NO: 9981 - RNA, 23 nt, Artificial
  Chemically synthesized
gaguauauggaacuugaauucac

SEQ ID NO: 9982 - RNA, 23 nt, Artificial
  Chemically synthesized
caccuccauguugcgcuuauuua

SEQ ID NO: 9983 - RNA, 23 nt, Artificial
  Chemically synthesized
accuccauguugcgcuuauuuaa

SEQ ID NO: 9984 - RNA, 23 nt, Artificial
  Chemically synthesized
ccuccauguugcgcuuauuuaag

SEQ ID NO: 9985 - RNA, 23 nt, Artificial
  Chemically synthesized
cuccauguugcgcuuauuuaaga

SEQ ID NO: 9986 - RNA, 23 nt, Artificial
  Chemically synthesized
uccauguugcgcuuauuuaagag

SEQ ID NO: 9987 - RNA, 23 nt, Artificial
  Chemically synthesized
ccagguuccuugcaaaauucuac

SEQ ID NO: 9988 - RNA, 23 nt, Artificial
  Chemically synthesized
agcaguuucaaugucgcuuaugg

SEQ ID NO: 9989 - RNA, 23 nt, Artificial
  Chemically synthesized
cagcacaauaaucucuuaagugg

SEQ ID NO: 9990 - RNA, 23 nt, Artificial
  Chemically synthesized
agcacaauaaucucuuaaguggc

SEQ ID NO: 9991 - RNA, 23 nt, Artificial
  Chemically synthesized
gcacaauaaucucuuaaguggcu

SEQ ID NO: 9992 - RNA, 23 nt, Artificial
  Chemically synthesized
ucagcagacagauugccguucau

SEQ ID NO: 9993 - RNA, 23 nt, Artificial
  Chemically synthesized
gguacagucuuuuuaacuccacc

SEQ ID NO: 9994 - RNA, 23 nt, Artificial
  Chemically synthesized
ggaacugaauuugagcuugcagg

SEQ ID NO: 9995 - RNA, 23 nt, Artificial
  Chemically synthesized
cacgcaguucacugauucgcuug

SEQ ID NO: 9996 - RNA, 23 nt, Artificial
  Chemically synthesized
acgcaguucacugauucgcuugu

SEQ ID NO: 9997 - RNA, 23 nt, Artificial
  Chemically synthesized
gggguggguguuuugaaaguggg

SEQ ID NO: 9998 - RNA, 23 nt, Artificial
  Chemically synthesized
ggguggguguuuugaaagugggu

SEQ ID NO: 9999 - RNA, 23 nt, Artificial
  Chemically synthesized
gguggguguuuugaaagugggua

SEQ ID NO: 10000 - RNA, 23 nt, Artificial
  Chemically synthesized
guggguguuuugaaaguggguau

SEQ ID NO: 10001 - RNA, 23 nt, Artificial
  Chemically synthesized
uggguguuuugaaaguggguauu

SEQ ID NO: 10002 - RNA, 23 nt, Artificial
  Chemically synthesized
caacucguucuuucaauuucuga

SEQ ID NO: 10003 - RNA, 23 nt, Artificial
  Chemically synthesized
aacucguucuuucaauuucugaa

SEQ ID NO: 10004 - RNA, 23 nt, Artificial
  Chemically synthesized
acucguucuuucaauuucugaag

SEQ ID NO: 10005 - RNA, 23 nt, Artificial
  Chemically synthesized
cucguucuuucaauuucugaagc

SEQ ID NO: 10006 - RNA, 23 nt, Artificial
  Chemically synthesized
ucguucuuucaauuucugaagcu

SEQ ID NO: 10007 - RNA, 23 nt, Artificial
  Chemically synthesized
ccugguuaaguugguuacgaauc

SEQ ID NO: 10008 - RNA, 23 nt, Artificial
  Chemically synthesized
uauugugcacauuuacacagcgu

SEQ ID NO: 10009 - RNA, 23 nt, Artificial
  Chemically synthesized
uguaagacuggaacccauucagu

SEQ ID NO: 10010 - RNA, 23 nt, Artificial
  Chemically synthesized
uuacauaaauuacacacgacuca

SEQ ID NO: 10011 - RNA, 23 nt, Artificial
  Chemically synthesized
uacauaaauuacacacgacucau

SEQ ID NO: 10012 - RNA, 23 nt, Artificial
  Chemically synthesized
acauaaauuacacacgacucaua

SEQ ID NO: 10013 - RNA, 23 nt, Artificial
  Chemically synthesized
uaaaaagccuguacguacaauuc

SEQ ID NO: 10014 - RNA, 23 nt, Artificial
  Chemically synthesized
gaaggaaaaauuucacuucuucc

SEQ ID NO: 10015 - RNA, 23 nt, Artificial
  Chemically synthesized
aaagugagcaccauuaagaccau

SEQ ID NO: 10016 - RNA, 23 nt, Artificial
  Chemically synthesized
aagugagcaccauuaagaccauu

SEQ ID NO: 10017 - RNA, 23 nt, Artificial
  Chemically synthesized
agugagcaccauuaagaccauuu

SEQ ID NO: 10018 - RNA, 23 nt, Artificial
  Chemically synthesized
gugagcaccauuaagaccauuuu

SEQ ID NO: 10019 - RNA, 23 nt, Artificial
  Chemically synthesized
ucaguacuuucugaagguggcug

SEQ ID NO: 10020 - RNA, 23 nt, Artificial
  Chemically synthesized
caguacuuucugaagguggcuga

SEQ ID NO: 10021 - RNA, 23 nt, Artificial
  Chemically synthesized
aguacuuucugaagguggcugag

SEQ ID NO: 10022 - RNA, 23 nt, Artificial
  Chemically synthesized
uagaugauccucugcaccagauc

SEQ ID NO: 10023 - RNA, 23 nt, Artificial
  Chemically synthesized
cugacuuauuuaaggcgcugugu

SEQ ID NO: 10024 - RNA, 23 nt, Artificial
  Chemically synthesized
guugcuuuagaaaauguaaacgc

SEQ ID NO: 10025 - RNA, 23 nt, Artificial
  Chemically synthesized
uugcuuuagaaaauguaaacgcu

SEQ ID NO: 10026 - RNA, 23 nt, Artificial
  Chemically synthesized
uugaggcaauacugagagacugg

SEQ ID NO: 10027 - RNA, 23 nt, Artificial
  Chemically synthesized
ugaggcaauacugagagacuggg

SEQ ID NO: 10028 - RNA, 23 nt, Artificial
  Chemically synthesized
acagguuguuuccgguguuauag

SEQ ID NO: 10029 - RNA, 23 nt, Artificial
  Chemically synthesized
gggaacugaauuugagcuugcag

SEQ ID NO: 10030 - RNA, 23 nt, Artificial
  Chemically synthesized
gacuguggccuugacccuuuauc

SEQ ID NO: 10031 - RNA, 23 nt, Artificial
  Chemically synthesized
aaaacgggcuuaccauacacugc

SEQ ID NO: 10032 - RNA, 23 nt, Artificial
  Chemically synthesized
aaacgggcuuaccauacacugcu

SEQ ID NO: 10033 - RNA, 23 nt, Artificial
  Chemically synthesized
aacgggcuuaccauacacugcuu

SEQ ID NO: 10034 - RNA, 23 nt, Artificial
  Chemically synthesized
acgggcuuaccauacacugcuuu

SEQ ID NO: 10035 - RNA, 23 nt, Artificial
  Chemically synthesized
ugaauggucuagucaaaaaauac

SEQ ID NO: 10036 - RNA, 23 nt, Artificial
  Chemically synthesized
gaauggucuagucaaaaaauacu

SEQ ID NO: 10037 - RNA, 23 nt, Artificial
  Chemically synthesized
aauggucuagucaaaaaauacuu

SEQ ID NO: 10038 - RNA, 23 nt, Artificial
  Chemically synthesized
auggucuagucaaaaaauacuuu

SEQ ID NO: 10039 - RNA, 23 nt, Artificial
  Chemically synthesized
uggucuagucaaaaaauacuuuu

SEQ ID NO: 10040 - RNA, 23 nt, Artificial
  Chemically synthesized
uaaauggcagcugccuucuccag

SEQ ID NO: 10041 - RNA, 23 nt, Artificial
  Chemically synthesized
augaucaaaggguaugggacguu

SEQ ID NO: 10042 - RNA, 23 nt, Artificial
  Chemically synthesized
ugaucaaaggguaugggacguuc

SEQ ID NO: 10043 - RNA, 23 nt, Artificial
  Chemically synthesized
ccucugcugaaucuguugugagg

SEQ ID NO: 10044 - RNA, 23 nt, Artificial
  Chemically synthesized
cucugcugaaucuguugugagga

SEQ ID NO: 10045 - RNA, 23 nt, Artificial
  Chemically synthesized
ucugcugaaucuguugugaggag

SEQ ID NO: 10046 - RNA, 23 nt, Artificial
  Chemically synthesized
ggccaccuuguucacuguucuca

SEQ ID NO: 10047 - RNA, 23 nt, Artificial
  Chemically synthesized
gccaccuuguucacuguucucag

SEQ ID NO: 10048 - RNA, 23 nt, Artificial
  Chemically synthesized
ccaccuuguucacuguucucagu

SEQ ID NO: 10049 - RNA, 23 nt, Artificial
  Chemically synthesized
ugcagucuguacuuccugcuucu

SEQ ID NO: 10050 - RNA, 23 nt, Artificial
  Chemically synthesized
gcagucuguacuuccugcuucuu

SEQ ID NO: 10051 - RNA, 23 nt, Artificial
  Chemically synthesized
cagucuguacuuccugcuucuuu

SEQ ID NO: 10052 - RNA, 23 nt, Artificial
  Chemically synthesized
uggauguagccuuccuccaucuc

SEQ ID NO: 10053 - RNA, 23 nt, Artificial
  Chemically synthesized
ggauguagccuuccuccaucucc

SEQ ID NO: 10054 - RNA, 23 nt, Artificial
  Chemically synthesized
ccccuccacacuucagcuaaaug

SEQ ID NO: 10055 - RNA, 23 nt, Artificial
  Chemically synthesized
cccuccacacuucagcuaaaugg

SEQ ID NO: 10056 - RNA, 23 nt, Artificial
  Chemically synthesized
ccuccacacuucagcuaaauggc

SEQ ID NO: 10057 - RNA, 23 nt, Artificial
  Chemically synthesized
cuccacacuucagcuaaauggca

SEQ ID NO: 10058 - RNA, 23 nt, Artificial
  Chemically synthesized
uccacacuucagcuaaauggcag

SEQ ID NO: 10059 - RNA, 23 nt, Artificial
  Chemically synthesized
guccaucauggccaccuccaugu

SEQ ID NO: 10060 - RNA, 23 nt, Artificial
  Chemically synthesized
uccaucauggccaccuccauguu

SEQ ID NO: 10061 - RNA, 23 nt, Artificial
  Chemically synthesized
ccaucauggccaccuccauguug

SEQ ID NO: 10062 - RNA, 23 nt, Artificial
  Chemically synthesized
caucauggccaccuccauguugc

SEQ ID NO: 10063 - RNA, 23 nt, Artificial
  Chemically synthesized
aucauggccaccuccauguugcg

SEQ ID NO: 10064 - RNA, 23 nt, Artificial
  Chemically synthesized
uuuuacauaaauuacacacgacu

SEQ ID NO: 10065 - RNA, 23 nt, Artificial
  Chemically synthesized
uuuacauaaauuacacacgacuc

SEQ ID NO: 10066 - RNA, 23 nt, Artificial
  Chemically synthesized
aacaguuaauaucaucggcauca

SEQ ID NO: 10067 - RNA, 23 nt, Artificial
  Chemically synthesized
acaguuaauaucaucggcaucau

SEQ ID NO: 10068 - RNA, 23 nt, Artificial
  Chemically synthesized
uagcugccauaucuuggagcucu

SEQ ID NO: 10069 - RNA, 23 nt, Artificial
  Chemically synthesized
agcugccauaucuuggagcucug

SEQ ID NO: 10070 - RNA, 23 nt, Artificial
  Chemically synthesized
gcugccauaucuuggagcucuga

SEQ ID NO: 10071 - RNA, 23 nt, Artificial
  Chemically synthesized
cugccauaucuuggagcucugag

SEQ ID NO: 10072 - RNA, 23 nt, Artificial
  Chemically synthesized
ugccauaucuuggagcucugaga

SEQ ID NO: 10073 - RNA, 23 nt, Artificial
  Chemically synthesized
ucuuaggugguguggcuugcugg

SEQ ID NO: 10074 - RNA, 23 nt, Artificial
  Chemically synthesized
guuauuguccucugccggcucgg

SEQ ID NO: 10075 - RNA, 23 nt, Artificial
  Chemically synthesized
uuauuguccucugccggcucggc

SEQ ID NO: 10076 - RNA, 23 nt, Artificial
  Chemically synthesized
ucagaaauagacugcugcugacg

SEQ ID NO: 10077 - RNA, 23 nt, Artificial
  Chemically synthesized
caguaagagcuucugucuucacu

SEQ ID NO: 10078 - RNA, 23 nt, Artificial
  Chemically synthesized
gugauggagcugcgcuuuuucag

SEQ ID NO: 10079 - RNA, 23 nt, Artificial
  Chemically synthesized
ugauggagcugcgcuuuuucagg

SEQ ID NO: 10080 - RNA, 23 nt, Artificial
  Chemically synthesized
gauggagcugcgcuuuuucaggg

SEQ ID NO: 10081 - RNA, 23 nt, Artificial
  Chemically synthesized
auggagcugcgcuuuuucagggg

SEQ ID NO: 10082 - RNA, 23 nt, Artificial
  Chemically synthesized
uggagcugcgcuuuuucaggggc

SEQ ID NO: 10083 - RNA, 23 nt, Artificial
  Chemically synthesized
guacguacaauucacaccucagu

SEQ ID NO: 10084 - RNA, 23 nt, Artificial
  Chemically synthesized
uguuuccgguguuauaggaacuu

SEQ ID NO: 10085 - RNA, 23 nt, Artificial
  Chemically synthesized
guuuccgguguuauaggaacuuc

SEQ ID NO: 10086 - RNA, 23 nt, Artificial
  Chemically synthesized
uuuccgguguuauaggaacuucu

SEQ ID NO: 10087 - RNA, 23 nt, Artificial
  Chemically synthesized
gcuguuacaagaggcagcgcagu

SEQ ID NO: 10088 - RNA, 23 nt, Artificial
  Chemically synthesized
cuguuacaagaggcagcgcagug

SEQ ID NO: 10089 - RNA, 23 nt, Artificial
  Chemically synthesized
uguuacaagaggcagcgcagugc

SEQ ID NO: 10090 - RNA, 23 nt, Artificial
  Chemically synthesized
guuacaagaggcagcgcagugca

SEQ ID NO: 10091 - RNA, 23 nt, Artificial
  Chemically synthesized
uuacaagaggcagcgcagugcag

SEQ ID NO: 10092 - RNA, 23 nt, Artificial
  Chemically synthesized
ugccauuguaagacuggaaccca

SEQ ID NO: 10093 - RNA, 23 nt, Artificial
  Chemically synthesized
ugagaaccacacugagcagcaug

SEQ ID NO: 10094 - RNA, 23 nt, Artificial
  Chemically synthesized
gagaaccacacugagcagcauga

SEQ ID NO: 10095 - RNA, 23 nt, Artificial
  Chemically synthesized
agaaccacacugagcagcaugac

SEQ ID NO: 10096 - RNA, 23 nt, Artificial
  Chemically synthesized
gaaccacacugagcagcaugaca

SEQ ID NO: 10097 - RNA, 23 nt, Artificial
  Chemically synthesized
ggugaugacgugccauucacacg

SEQ ID NO: 10098 - RNA, 23 nt, Artificial
  Chemically synthesized
gugaugacgugccauucacacgg

SEQ ID NO: 10099 - RNA, 23 nt, Artificial
  Chemically synthesized
ugaugacgugccauucacacggu

SEQ ID NO: 10100 - RNA, 23 nt, Artificial
  Chemically synthesized
gaugacgugccauucacacgguu

SEQ ID NO: 10101 - RNA, 23 nt, Artificial
  Chemically synthesized
augacgugccauucacacgguuc

SEQ ID NO: 10102 - RNA, 23 nt, Artificial
  Chemically synthesized
gguuucacggaagagcuagaauu

SEQ ID NO: 10103 - RNA, 23 nt, Artificial
  Chemically synthesized
guuucacggaagagcuagaauuc

SEQ ID NO: 10104 - RNA, 23 nt, Artificial
  Chemically synthesized
uuucacggaagagcuagaauucu

SEQ ID NO: 10105 - RNA, 23 nt, Artificial
  Chemically synthesized
uucacggaagagcuagaauucug

SEQ ID NO: 10106 - RNA, 23 nt, Artificial
  Chemically synthesized
ucacggaagagcuagaauucugu

SEQ ID NO: 10107 - RNA, 23 nt, Artificial
  Chemically synthesized
ucaugauuuugcuguagucgacu

SEQ ID NO: 10108 - RNA, 23 nt, Artificial
  Chemically synthesized
cucguagucccacagagcauacg

SEQ ID NO: 10109 - RNA, 23 nt, Artificial
  Chemically synthesized
ucguagucccacagagcauacgc

SEQ ID NO: 10110 - RNA, 23 nt, Artificial
  Chemically synthesized
cguagucccacagagcauacgcc

SEQ ID NO: 10111 - RNA, 23 nt, Artificial
  Chemically synthesized
guagucccacagagcauacgcca

SEQ ID NO: 10112 - RNA, 23 nt, Artificial
  Chemically synthesized
uagucccacagagcauacgccac

SEQ ID NO: 10113 - RNA, 23 nt, Artificial
  Chemically synthesized
uccauuggcauugguguuuccau

SEQ ID NO: 10114 - RNA, 23 nt, Artificial
  Chemically synthesized
ccauuggcauugguguuuccauu

SEQ ID NO: 10115 - RNA, 23 nt, Artificial
  Chemically synthesized
cauuggcauugguguuuccauug

SEQ ID NO: 10116 - RNA, 23 nt, Artificial
  Chemically synthesized
auuggcauugguguuuccauugu

SEQ ID NO: 10117 - RNA, 23 nt, Artificial
  Chemically synthesized
uuggcauugguguuuccauuguc

SEQ ID NO: 10118 - RNA, 23 nt, Artificial
  Chemically synthesized
gcugucugcuaaagugagcacca

SEQ ID NO: 10119 - RNA, 23 nt, Artificial
  Chemically synthesized
cugucugcuaaagugagcaccau

SEQ ID NO: 10120 - RNA, 23 nt, Artificial
  Chemically synthesized
ugucugcuaaagugagcaccauu

SEQ ID NO: 10121 - RNA, 23 nt, Artificial
  Chemically synthesized
gucugcuaaagugagcaccauua

SEQ ID NO: 10122 - RNA, 23 nt, Artificial
  Chemically synthesized
ucugcuaaagugagcaccauuaa

SEQ ID NO: 10123 - RNA, 23 nt, Artificial
  Chemically synthesized
uucacauuguggacgcugucugc

SEQ ID NO: 10124 - RNA, 23 nt, Artificial
  Chemically synthesized
ggaaaacagcacaauaaucucuu

SEQ ID NO: 10125 - RNA, 23 nt, Artificial
  Chemically synthesized
gaaaacagcacaauaaucucuua

SEQ ID NO: 10126 - RNA, 23 nt, Artificial
  Chemically synthesized
aaaacagcacaauaaucucuuaa

SEQ ID NO: 10127 - RNA, 23 nt, Artificial
  Chemically synthesized
aaacagcacaauaaucucuuaag

SEQ ID NO: 10128 - RNA, 23 nt, Artificial
  Chemically synthesized
aacagcacaauaaucucuuaagu

SEQ ID NO: 10129 - RNA, 23 nt, Artificial
  Chemically synthesized
cuggagguacauggaguauaugg

SEQ ID NO: 10130 - RNA, 23 nt, Artificial
  Chemically synthesized
uggagguacauggaguauaugga

SEQ ID NO: 10131 - RNA, 23 nt, Artificial
  Chemically synthesized
ggagguacauggaguauauggaa

SEQ ID NO: 10132 - RNA, 23 nt, Artificial
  Chemically synthesized
gagguacauggaguauauggaac

SEQ ID NO: 10133 - RNA, 23 nt, Artificial
  Chemically synthesized
agguacauggaguauauggaacu

SEQ ID NO: 10134 - RNA, 23 nt, Artificial
  Chemically synthesized
cuggaacccauucaguuuuccuu

SEQ ID NO: 10135 - RNA, 23 nt, Artificial
  Chemically synthesized
uggaacccauucaguuuuccuuu

SEQ ID NO: 10136 - RNA, 23 nt, Artificial
  Chemically synthesized
ggaacccauucaguuuuccuuuc

SEQ ID NO: 10137 - RNA, 23 nt, Artificial
  Chemically synthesized
gaacccauucaguuuuccuuucu

SEQ ID NO: 10138 - RNA, 23 nt, Artificial
  Chemically synthesized
aacccauucaguuuuccuuucuu

SEQ ID NO: 10139 - RNA, 23 nt, Artificial
  Chemically synthesized
gcgguacggaaauccucugcuga

SEQ ID NO: 10140 - RNA, 23 nt, Artificial
  Chemically synthesized
cgguacggaaauccucugcugaa

SEQ ID NO: 10141 - RNA, 23 nt, Artificial
  Chemically synthesized
gguacggaaauccucugcugaau

SEQ ID NO: 10142 - RNA, 23 nt, Artificial
  Chemically synthesized
guacggaaauccucugcugaauc

SEQ ID NO: 10143 - RNA, 23 nt, Artificial
  Chemically synthesized
uacggaaauccucugcugaaucu

SEQ ID NO: 10144 - RNA, 23 nt, Artificial
  Chemically synthesized
cugcucaggcucuuucucaguac

SEQ ID NO: 10145 - RNA, 23 nt, Artificial
  Chemically synthesized
ugcucaggcucuuucucaguacu

SEQ ID NO: 10146 - RNA, 23 nt, Artificial
  Chemically synthesized
gcucaggcucuuucucaguacuu

SEQ ID NO: 10147 - RNA, 23 nt, Artificial
  Chemically synthesized
cucaggcucuuucucaguacuuu

SEQ ID NO: 10148 - RNA, 23 nt, Artificial
  Chemically synthesized
ucaggcucuuucucaguacuuuc

SEQ ID NO: 10149 - RNA, 23 nt, Artificial
  Chemically synthesized
gaaaacaguuaauaucaucggca

SEQ ID NO: 10150 - RNA, 23 nt, Artificial
  Chemically synthesized
aaaacaguuaauaucaucggcau

SEQ ID NO: 10151 - RNA, 23 nt, Artificial
  Chemically synthesized
aaacaguuaauaucaucggcauc

SEQ ID NO: 10152 - RNA, 23 nt, Artificial
  Chemically synthesized
gggcuuaccauacacugcuuuaa

SEQ ID NO: 10153 - RNA, 23 nt, Artificial
  Chemically synthesized
ccgguguuauaggaacuucuguu

SEQ ID NO: 10154 - RNA, 23 nt, Artificial
  Chemically synthesized
cgguguuauaggaacuucuguua

SEQ ID NO: 10155 - RNA, 23 nt, Artificial
  Chemically synthesized
gguguuauaggaacuucuguuaa

SEQ ID NO: 10156 - RNA, 23 nt, Artificial
  Chemically synthesized
guguuauaggaacuucuguuaaa

SEQ ID NO: 10157 - RNA, 23 nt, Artificial
  Chemically synthesized
uguuauaggaacuucuguuaaaa

SEQ ID NO: 10158 - RNA, 23 nt, Artificial
  Chemically synthesized
ggguaugucccauagcuuggagg

SEQ ID NO: 10159 - RNA, 23 nt, Artificial
  Chemically synthesized
gguaugucccauagcuuggaggc

SEQ ID NO: 10160 - RNA, 23 nt, Artificial
  Chemically synthesized
guaugucccauagcuuggaggca

SEQ ID NO: 10161 - RNA, 23 nt, Artificial
  Chemically synthesized
uaugucccauagcuuggaggcag

SEQ ID NO: 10162 - RNA, 23 nt, Artificial
  Chemically synthesized
augucccauagcuuggaggcagc

SEQ ID NO: 10163 - RNA, 23 nt, Artificial
  Chemically synthesized
acaucugcugcugauuuucaauc

SEQ ID NO: 10164 - RNA, 23 nt, Artificial
  Chemically synthesized
caucugcugcugauuuucaaucu

SEQ ID NO: 10165 - RNA, 23 nt, Artificial
  Chemically synthesized
aucugcugcugauuuucaaucug

SEQ ID NO: 10166 - RNA, 23 nt, Artificial
  Chemically synthesized
ucugcugcugauuuucaaucugc

SEQ ID NO: 10167 - RNA, 23 nt, Artificial
  Chemically synthesized
cugcugcugauuuucaaucugcu

SEQ ID NO: 10168 - RNA, 23 nt, Artificial
  Chemically synthesized
ccacacuucagcuaaauggcagc

SEQ ID NO: 10169 - RNA, 23 nt, Artificial
  Chemically synthesized
ucuacaacaucucgacagguugu

SEQ ID NO: 10170 - RNA, 23 nt, Artificial
  Chemically synthesized
guucauuguugcucaagaaaaca

SEQ ID NO: 10171 - RNA, 23 nt, Artificial
  Chemically synthesized
aaaaagccuguacguacaauuca

SEQ ID NO: 10172 - RNA, 23 nt, Artificial
  Chemically synthesized
aaaagccuguacguacaauucac

SEQ ID NO: 10173 - RNA, 23 nt, Artificial
  Chemically synthesized
aaagccuguacguacaauucaca

SEQ ID NO: 10174 - RNA, 23 nt, Artificial
  Chemically synthesized
ggacuuggcgguacggaaauccu

SEQ ID NO: 10175 - RNA, 23 nt, Artificial
  Chemically synthesized
gacuuggcgguacggaaauccuc

SEQ ID NO: 10176 - RNA, 23 nt, Artificial
  Chemically synthesized
acuuggcgguacggaaauccucu

SEQ ID NO: 10177 - RNA, 23 nt, Artificial
  Chemically synthesized
cuuggcgguacggaaauccucug

SEQ ID NO: 10178 - RNA, 23 nt, Artificial
  Chemically synthesized
uuggcgguacggaaauccucugc

SEQ ID NO: 10179 - RNA, 23 nt, Artificial
  Chemically synthesized
gcacauuuacacagcgucagcag

SEQ ID NO: 10180 - RNA, 23 nt, Artificial
  Chemically synthesized
cuggacauguuuccauacagagg

SEQ ID NO: 10181 - RNA, 23 nt, Artificial
  Chemically synthesized
uggacauguuuccauacagaggc

SEQ ID NO: 10182 - RNA, 23 nt, Artificial
  Chemically synthesized
ggacauguuuccauacagaggcu

SEQ ID NO: 10183 - RNA, 23 nt, Artificial
  Chemically synthesized
gacauguuuccauacagaggcuc

SEQ ID NO: 10184 - RNA, 23 nt, Artificial
  Chemically synthesized
acauguuuccauacagaggcucc

SEQ ID NO: 10185 - RNA, 23 nt, Artificial
  Chemically synthesized
uccauccaucacuaucagcagca

SEQ ID NO: 10186 - RNA, 23 nt, Artificial
  Chemically synthesized
ccauccaucacuaucagcagcau

SEQ ID NO: 10187 - RNA, 23 nt, Artificial
  Chemically synthesized
cauccaucacuaucagcagcauu

SEQ ID NO: 10188 - RNA, 23 nt, Artificial
  Chemically synthesized
cagucucgcuuucguccuugcgc

SEQ ID NO: 10189 - RNA, 23 nt, Artificial
  Chemically synthesized
agucucgcuuucguccuugcgcc

SEQ ID NO: 10190 - RNA, 23 nt, Artificial
  Chemically synthesized
gguacagcagcuucuggauguug

SEQ ID NO: 10191 - RNA, 23 nt, Artificial
  Chemically synthesized
guacagcagcuucuggauguugg

SEQ ID NO: 10192 - RNA, 23 nt, Artificial
  Chemically synthesized
uacagcagcuucuggauguuggg

SEQ ID NO: 10193 - RNA, 19 nt, Artificial
  Chemically synthesized
cuauaacaugaucauccga

SEQ ID NO: 10194 - RNA, 19 nt, Artificial
  Chemically synthesized
ccauguuccgugccuucaa

SEQ ID NO: 10195 - RNA, 19 nt, Artificial
  Chemically synthesized
gguggcaggccauauacaa

SEQ ID NO: 10196 - RNA, 19 nt, Artificial
  Chemically synthesized
ggaacauggauuuugacaa

SEQ ID NO: 10197 - RNA, 19 nt, Artificial
  Chemically synthesized
gaccauuugcaguagugaa

SEQ ID NO: 10198 - RNA, 19 nt, Artificial
  Chemically synthesized
gcgccacagaacucaugaa

SEQ ID NO: 10199 - RNA, 19 nt, Artificial
  Chemically synthesized
ccuucaaaucucuugacaa

SEQ ID NO: 10200 - RNA, 19 nt, Artificial
  Chemically synthesized
cuucaaaucucuugacaaa

SEQ ID NO: 10201 - RNA, 19 nt, Artificial
  Chemically synthesized
ugacaaagauggcacugga

SEQ ID NO: 10202 - RNA, 19 nt, Artificial
  Chemically synthesized
acuuguggaacaacaucaa

SEQ ID NO: 10203 - RNA, 19 nt, Artificial
  Chemically synthesized
cccucacugccuugcuaua

SEQ ID NO: 10204 - RNA, 19 nt, Artificial
  Chemically synthesized
gaugguuuuggcauugaca

SEQ ID NO: 10205 - RNA, 19 nt, Artificial
  Chemically synthesized
cugacuauguauuccugaa

SEQ ID NO: 10206 - RNA, 19 nt, Artificial
  Chemically synthesized
ugguuaacucguucuugaa

SEQ ID NO: 10207 - RNA, 19 nt, Artificial
  Chemically synthesized
aggcccaggaggaaauaaa

SEQ ID NO: 10208 - RNA, 19 nt, Artificial
  Chemically synthesized
ucuauaacaugaucauccg

SEQ ID NO: 10209 - RNA, 19 nt, Artificial
  Chemically synthesized
ccugaaugagcaucucuau

SEQ ID NO: 10210 - RNA, 19 nt, Artificial
  Chemically synthesized
gauggauagcgacaccaca

SEQ ID NO: 10211 - RNA, 19 nt, Artificial
  Chemically synthesized
gcugcagcugacuauguau

SEQ ID NO: 10212 - RNA, 19 nt, Artificial
  Chemically synthesized
caauaagguugugacacga

SEQ ID NO: 10213 - RNA, 19 nt, Artificial
  Chemically synthesized
ccauauacaaacaguucga

SEQ ID NO: 10214 - RNA, 19 nt, Artificial
  Chemically synthesized
cuggcucuaggacacucua

SEQ ID NO: 10215 - RNA, 19 nt, Artificial
  Chemically synthesized
ggaccauuugcaguaguga

SEQ ID NO: 10216 - RNA, 19 nt, Artificial
  Chemically synthesized
acaugaucauccgacgcua

SEQ ID NO: 10217 - RNA, 19 nt, Artificial
  Chemically synthesized
gguuccaccugaaugagca

SEQ ID NO: 10218 - RNA, 19 nt, Artificial
  Chemically synthesized
guggcaggccauauacaaa

SEQ ID NO: 10219 - RNA, 19 nt, Artificial
  Chemically synthesized
cccugaucugaagacugau

SEQ ID NO: 10220 - RNA, 19 nt, Artificial
  Chemically synthesized
cucaguucugggaggauga

SEQ ID NO: 10221 - RNA, 19 nt, Artificial
  Chemically synthesized
gccacagaacucaugaaca

SEQ ID NO: 10222 - RNA, 19 nt, Artificial
  Chemically synthesized
gacugaugguuuuggcauu

SEQ ID NO: 10223 - RNA, 19 nt, Artificial
  Chemically synthesized
ggcccaggaggaaauaaac

SEQ ID NO: 10224 - RNA, 19 nt, Artificial
  Chemically synthesized
aguacuuguggaacaacau

SEQ ID NO: 10225 - RNA, 19 nt, Artificial
  Chemically synthesized
caagcugggcuuugaggaa

SEQ ID NO: 10226 - RNA, 19 nt, Artificial
  Chemically synthesized
cgaucagggaccauuugca

SEQ ID NO: 10227 - RNA, 19 nt, Artificial
  Chemically synthesized
ccugggaaaugugcuugga

SEQ ID NO: 10228 - RNA, 19 nt, Artificial
  Chemically synthesized
ugggcuuugaggaauucaa

SEQ ID NO: 10229 - RNA, 19 nt, Artificial
  Chemically synthesized
cuuguggaacaacaucaaa

SEQ ID NO: 10230 - RNA, 19 nt, Artificial
  Chemically synthesized
cacgacacccugaucugaa

SEQ ID NO: 10231 - RNA, 19 nt, Artificial
  Chemically synthesized
aaagguggcaggccauaua

SEQ ID NO: 10232 - RNA, 19 nt, Artificial
  Chemically synthesized
agguggcaggccauauaca

SEQ ID NO: 10233 - RNA, 19 nt, Artificial
  Chemically synthesized
ggaacaacaucaaaaggug

SEQ ID NO: 10234 - RNA, 19 nt, Artificial
  Chemically synthesized
gcuauaggagucaccugga

SEQ ID NO: 10235 - RNA, 19 nt, Artificial
  Chemically synthesized
aaguacuuguggaacaaca

SEQ ID NO: 10236 - RNA, 19 nt, Artificial
  Chemically synthesized
cccagcuucucaacaucca

SEQ ID NO: 10237 - RNA, 19 nt, Artificial
  Chemically synthesized
cgcacacauuacuccaaca

SEQ ID NO: 10238 - RNA, 19 nt, Artificial
  Chemically synthesized
ccgacgcuacucagaugaa

SEQ ID NO: 10239 - RNA, 19 nt, Artificial
  Chemically synthesized
agcuuuuguucucucagua

SEQ ID NO: 10240 - RNA, 19 nt, Artificial
  Chemically synthesized
acuccaacauugaggccaa

SEQ ID NO: 10241 - RNA, 19 nt, Artificial
  Chemically synthesized
cuggacaaauccaggugaa

SEQ ID NO: 10242 - RNA, 19 nt, Artificial
  Chemically synthesized
auaagguugugacacgaca

SEQ ID NO: 10243 - RNA, 19 nt, Artificial
  Chemically synthesized
ccacgcacacauuacucca

SEQ ID NO: 10244 - RNA, 19 nt, Artificial
  Chemically synthesized
caggguuccaccugaauga

SEQ ID NO: 10245 - RNA, 19 nt, Artificial
  Chemically synthesized
caaaagguggcaggccaua

SEQ ID NO: 10246 - RNA, 19 nt, Artificial
  Chemically synthesized
caucucuauaacaugauca

SEQ ID NO: 10247 - RNA, 19 nt, Artificial
  Chemically synthesized
gcugacuauguauuccuga

SEQ ID NO: 10248 - RNA, 19 nt, Artificial
  Chemically synthesized
accugaaugagcaucucua

SEQ ID NO: 10249 - RNA, 19 nt, Artificial
  Chemically synthesized
cacgcacacauuacuccaa

SEQ ID NO: 10250 - RNA, 19 nt, Artificial
  Chemically synthesized
ugguuuuggcauugacaca

SEQ ID NO: 10251 - RNA, 19 nt, Artificial
  Chemically synthesized
cucuauaacaugaucaucc

SEQ ID NO: 10252 - RNA, 19 nt, Artificial
  Chemically synthesized
gggaacauggauuuugaca

SEQ ID NO: 10253 - RNA, 19 nt, Artificial
  Chemically synthesized
ggcuuugaggaauucaagu

SEQ ID NO: 10254 - RNA, 19 nt, Artificial
  Chemically synthesized
aacucaugaacauucucaa

SEQ ID NO: 10255 - RNA, 19 nt, Artificial
  Chemically synthesized
gggcuuugaggaauucaag

SEQ ID NO: 10256 - RNA, 19 nt, Artificial
  Chemically synthesized
gaauucaaguacuugugga

SEQ ID NO: 10257 - RNA, 19 nt, Artificial
  Chemically synthesized
ucucuauaacaugaucauc

SEQ ID NO: 10258 - RNA, 19 nt, Artificial
  Chemically synthesized
ucucaauaagguugugaca

SEQ ID NO: 10259 - RNA, 19 nt, Artificial
  Chemically synthesized
caggccauauacaaacagu

SEQ ID NO: 10260 - RNA, 19 nt, Artificial
  Chemically synthesized
uuguuacccagcuucucaa

SEQ ID NO: 10261 - RNA, 19 nt, Artificial
  Chemically synthesized
aauucaaguacuuguggaa

SEQ ID NO: 10262 - RNA, 19 nt, Artificial
  Chemically synthesized
cacacauuacuccaacauu

SEQ ID NO: 10263 - RNA, 19 nt, Artificial
  Chemically synthesized
ccaacauugaggccaacga

SEQ ID NO: 10264 - RNA, 19 nt, Artificial
  Chemically synthesized
agcugggcuuugaggaauu

SEQ ID NO: 10265 - RNA, 19 nt, Artificial
  Chemically synthesized
ugaaagugggaacauggau

SEQ ID NO: 10266 - RNA, 19 nt, Artificial
  Chemically synthesized
aaauccaggugaacaucca

SEQ ID NO: 10267 - RNA, 19 nt, Artificial
  Chemically synthesized
aggccauauacaaacaguu

SEQ ID NO: 10268 - RNA, 19 nt, Artificial
  Chemically synthesized
augaaagugggaacaugga

SEQ ID NO: 10269 - RNA, 19 nt, Artificial
  Chemically synthesized
caacauugaggccaacgag

SEQ ID NO: 10270 - RNA, 19 nt, Artificial
  Chemically synthesized
ccgugccuucaaaucucuu

SEQ ID NO: 10271 - RNA, 19 nt, Artificial
  Chemically synthesized
ccagcuucucaacauccag

SEQ ID NO: 10272 - RNA, 19 nt, Artificial
  Chemically synthesized
agcaucucuauaacaugau

SEQ ID NO: 10273 - RNA, 19 nt, Artificial
  Chemically synthesized
cauggauuuugacaacuuc

SEQ ID NO: 10274 - RNA, 19 nt, Artificial
  Chemically synthesized
aguggcugcagcugacuau

SEQ ID NO: 10275 - RNA, 19 nt, Artificial
  Chemically synthesized
agcaggguuccaccugaau

SEQ ID NO: 10276 - RNA, 19 nt, Artificial
  Chemically synthesized
cuuguuacccagcuucuca

SEQ ID NO: 10277 - RNA, 19 nt, Artificial
  Chemically synthesized
acaagcuuuuguucucuca

SEQ ID NO: 10278 - RNA, 19 nt, Artificial
  Chemically synthesized
uuguggaacaacaucaaaa

SEQ ID NO: 10279 - RNA, 19 nt, Artificial
  Chemically synthesized
gcccaggaggaaauaaaca

SEQ ID NO: 10280 - RNA, 19 nt, Artificial
  Chemically synthesized
cauugaggccaacgagagu

SEQ ID NO: 10281 - RNA, 19 nt, Artificial
  Chemically synthesized
cucuaggacacucuaacaa

SEQ ID NO: 10282 - RNA, 19 nt, Artificial
  Chemically synthesized
ucaaguacuuguggaacaa

SEQ ID NO: 10283 - RNA, 19 nt, Artificial
  Chemically synthesized
gacgcuacucagaugaaag

SEQ ID NO: 10284 - RNA, 19 nt, Artificial
  Chemically synthesized
guuccaccugaaugagcau

SEQ ID NO: 10285 - RNA, 19 nt, Artificial
  Chemically synthesized
agcuggcuggagaugacau

SEQ ID NO: 10286 - RNA, 19 nt, Artificial
  Chemically synthesized
aacauugaggccaacgaga

SEQ ID NO: 10287 - RNA, 19 nt, Artificial
  Chemically synthesized
gccuucaaaucucuugaca

SEQ ID NO: 10288 - RNA, 19 nt, Artificial
  Chemically synthesized
aggugaacauccaggagug

SEQ ID NO: 10289 - RNA, 19 nt, Artificial
  Chemically synthesized
gcuuugaggaauucaagua

SEQ ID NO: 10290 - RNA, 19 nt, Artificial
  Chemically synthesized
caaacaguucgacacugac

SEQ ID NO: 10291 - RNA, 19 nt, Artificial
  Chemically synthesized
caaaucucuugacaaagau

SEQ ID NO: 10292 - RNA, 19 nt, Artificial
  Chemically synthesized
ugaugguuuuggcauugac

SEQ ID NO: 10293 - RNA, 19 nt, Artificial
  Chemically synthesized
auaacaugaucauccgacg

SEQ ID NO: 10294 - RNA, 19 nt, Artificial
  Chemically synthesized
agcgccacagaacucauga

SEQ ID NO: 10295 - RNA, 19 nt, Artificial
  Chemically synthesized
ucaacauccagggcccaau

SEQ ID NO: 10296 - RNA, 19 nt, Artificial
  Chemically synthesized
gguuuuggcauugacacau

SEQ ID NO: 10297 - RNA, 19 nt, Artificial
  Chemically synthesized
uguaccugugccaagccua

SEQ ID NO: 10298 - RNA, 19 nt, Artificial
  Chemically synthesized
ugaucugaagacugauggu

SEQ ID NO: 10299 - RNA, 19 nt, Artificial
  Chemically synthesized
acaaagauggcacuggaca

SEQ ID NO: 10300 - RNA, 19 nt, Artificial
  Chemically synthesized
cccaggaggaaauaaacau

SEQ ID NO: 10301 - RNA, 19 nt, Artificial
  Chemically synthesized
gugccuuugucuauauucu

SEQ ID NO: 10302 - RNA, 19 nt, Artificial
  Chemically synthesized
caggcccaggaggaaauaa

SEQ ID NO: 10303 - RNA, 19 nt, Artificial
  Chemically synthesized
ucagcgccacagaacucau

SEQ ID NO: 10304 - RNA, 19 nt, Artificial
  Chemically synthesized
cacagaacucaugaacauu

SEQ ID NO: 10305 - RNA, 19 nt, Artificial
  Chemically synthesized
gaucagggaccauuugcag

SEQ ID NO: 10306 - RNA, 19 nt, Artificial
  Chemically synthesized
gaugaaagugggaacaugg

SEQ ID NO: 10307 - RNA, 19 nt, Artificial
  Chemically synthesized
acgacacccugaucugaag

SEQ ID NO: 10308 - RNA, 19 nt, Artificial
  Chemically synthesized
acucaugaacauucucaau

SEQ ID NO: 10309 - RNA, 19 nt, Artificial
  Chemically synthesized
auggauuuugacaacuuca

SEQ ID NO: 10310 - RNA, 19 nt, Artificial
  Chemically synthesized
uggcucuaggacacucuaa

SEQ ID NO: 10311 - RNA, 19 nt, Artificial
  Chemically synthesized
aagacugaugguuuuggca

SEQ ID NO: 10312 - RNA, 19 nt, Artificial
  Chemically synthesized
ggcauugacacaugucgca

SEQ ID NO: 10313 - RNA, 19 nt, Artificial
  Chemically synthesized
cugucugcagucacaucuu

SEQ ID NO: 10314 - RNA, 19 nt, Artificial
  Chemically synthesized
ccaagccuagcacuuguga

SEQ ID NO: 10315 - RNA, 19 nt, Artificial
  Chemically synthesized
auagcgacaccacaggcaa

SEQ ID NO: 10316 - RNA, 19 nt, Artificial
  Chemically synthesized
uugugacacgacacccuga

SEQ ID NO: 10317 - RNA, 19 nt, Artificial
  Chemically synthesized
acauggauuuugacaacuu

SEQ ID NO: 10318 - RNA, 19 nt, Artificial
  Chemically synthesized
caagccuagcacuugugau

SEQ ID NO: 10319 - RNA, 19 nt, Artificial
  Chemically synthesized
cugggcuuugaggaauuca

SEQ ID NO: 10320 - RNA, 19 nt, Artificial
  Chemically synthesized
uugcaguagugaacuccca

SEQ ID NO: 10321 - RNA, 19 nt, Artificial
  Chemically synthesized
augguggccgugauggaua

SEQ ID NO: 10322 - RNA, 19 nt, Artificial
  Chemically synthesized
cagaugaaagugggaacau

SEQ ID NO: 10323 - RNA, 19 nt, Artificial
  Chemically synthesized
uggcuggagaugacaugga

SEQ ID NO: 10324 - RNA, 19 nt, Artificial
  Chemically synthesized
cauccgacgcuacucagau

SEQ ID NO: 10325 - RNA, 19 nt, Artificial
  Chemically synthesized
ucaaaagguggcaggccau

SEQ ID NO: 10326 - RNA, 19 nt, Artificial
  Chemically synthesized
gacaaagauggcacuggac

SEQ ID NO: 10327 - RNA, 19 nt, Artificial
  Chemically synthesized
uguuccugguuaacucguu

SEQ ID NO: 10328 - RNA, 19 nt, Artificial
  Chemically synthesized
cugggaaaugugcuuggag

SEQ ID NO: 10329 - RNA, 19 nt, Artificial
  Chemically synthesized
cgacacccugaucugaaga

SEQ ID NO: 10330 - RNA, 19 nt, Artificial
  Chemically synthesized
cucuaacaagcucugucca

SEQ ID NO: 10331 - RNA, 19 nt, Artificial
  Chemically synthesized
ucuugacaaagauggcacu

SEQ ID NO: 10332 - RNA, 19 nt, Artificial
  Chemically synthesized
caagcuuuuguucucucag

SEQ ID NO: 10333 - RNA, 19 nt, Artificial
  Chemically synthesized
ccauuugcaguagugaacu

SEQ ID NO: 10334 - RNA, 19 nt, Artificial
  Chemically synthesized
ggcucuaggacacucuaac

SEQ ID NO: 10335 - RNA, 19 nt, Artificial
  Chemically synthesized
aguacuuguuacccagcuu

SEQ ID NO: 10336 - RNA, 19 nt, Artificial
  Chemically synthesized
ugggaacauggauuuugac

SEQ ID NO: 10337 - RNA, 19 nt, Artificial
  Chemically synthesized
cugaugguuuuggcauuga

SEQ ID NO: 10338 - RNA, 19 nt, Artificial
  Chemically synthesized
uggauuuugacaacuucau

SEQ ID NO: 10339 - RNA, 19 nt, Artificial
  Chemically synthesized
auauacaaacaguucgaca

SEQ ID NO: 10340 - RNA, 19 nt, Artificial
  Chemically synthesized
cuauaggagucaccuggag

SEQ ID NO: 10341 - RNA, 19 nt, Artificial
  Chemically synthesized
ugucuauauucugcuccca

SEQ ID NO: 10342 - RNA, 19 nt, Artificial
  Chemically synthesized
cacuugugaugccuccaug

SEQ ID NO: 10343 - RNA, 19 nt, Artificial
  Chemically synthesized
aagcuuuuguucucucagu

SEQ ID NO: 10344 - RNA, 19 nt, Artificial
  Chemically synthesized
gaggaauucaaguacuugu

SEQ ID NO: 10345 - RNA, 19 nt, Artificial
  Chemically synthesized
caugaucauccgacgcuac

SEQ ID NO: 10346 - RNA, 19 nt, Artificial
  Chemically synthesized
aaaagguggcaggccauau

SEQ ID NO: 10347 - RNA, 19 nt, Artificial
  Chemically synthesized
uguggaacaacaucaaaag

SEQ ID NO: 10348 - RNA, 19 nt, Artificial
  Chemically synthesized
cagggaccauuugcaguag

SEQ ID NO: 10349 - RNA, 19 nt, Artificial
  Chemically synthesized
cagaacucaugaacauucu

SEQ ID NO: 10350 - RNA, 19 nt, Artificial
  Chemically synthesized
cuuuuguucucucaguacu

SEQ ID NO: 10351 - RNA, 19 nt, Artificial
  Chemically synthesized
ugggaaaugugcuuggagg

SEQ ID NO: 10352 - RNA, 19 nt, Artificial
  Chemically synthesized
acaaacaguucgacacuga

SEQ ID NO: 10353 - RNA, 19 nt, Artificial
  Chemically synthesized
ucaaaucucuugacaaaga

SEQ ID NO: 10354 - RNA, 19 nt, Artificial
  Chemically synthesized
cucagaugaaagugggaac

SEQ ID NO: 10355 - RNA, 19 nt, Artificial
  Chemically synthesized
ggagaugacauggagguca

SEQ ID NO: 10356 - RNA, 19 nt, Artificial
  Chemically synthesized
gagaugacauggaggucag

SEQ ID NO: 10357 - RNA, 19 nt, Artificial
  Chemically synthesized
uugaggaauucaaguacuu

SEQ ID NO: 10358 - RNA, 19 nt, Artificial
  Chemically synthesized
agacugaugguuuuggcau

SEQ ID NO: 10359 - RNA, 19 nt, Artificial
  Chemically synthesized
gugccuucaaaucucuuga

SEQ ID NO: 10360 - RNA, 19 nt, Artificial
  Chemically synthesized
aagauggcacuggacaaau

SEQ ID NO: 10361 - RNA, 19 nt, Artificial
  Chemically synthesized
acaacaucaaaagguggca

SEQ ID NO: 10362 - RNA, 19 nt, Artificial
  Chemically synthesized
ucacugccuugcuauagga

SEQ ID NO: 10363 - RNA, 19 nt, Artificial
  Chemically synthesized
aaugagcaucucuauaaca

SEQ ID NO: 10364 - RNA, 19 nt, Artificial
  Chemically synthesized
agggaccauuugcaguagu

SEQ ID NO: 10365 - RNA, 19 nt, Artificial
  Chemically synthesized
ggacacucuaacaagcucu

SEQ ID NO: 10366 - RNA, 19 nt, Artificial
  Chemically synthesized
caggugaacauccaggagu

SEQ ID NO: 10367 - RNA, 19 nt, Artificial
  Chemically synthesized
ugaacauccaggaguggcu

SEQ ID NO: 10368 - RNA, 19 nt, Artificial
  Chemically synthesized
acaguucgacacugaccga

SEQ ID NO: 10369 - RNA, 19 nt, Artificial
  Chemically synthesized
gaagacugaugguuuuggc

SEQ ID NO: 10370 - RNA, 19 nt, Artificial
  Chemically synthesized
agcugacuauguauuccug

SEQ ID NO: 10371 - RNA, 19 nt, Artificial
  Chemically synthesized
aaaugugcuuggaggccug

SEQ ID NO: 10372 - RNA, 19 nt, Artificial
  Chemically synthesized
gcacuggacaaauccaggu

SEQ ID NO: 10373 - RNA, 19 nt, Artificial
  Chemically synthesized
ucagaugaaagugggaaca

SEQ ID NO: 10374 - RNA, 19 nt, Artificial
  Chemically synthesized
uugaggccaacgagaguga

SEQ ID NO: 10375 - RNA, 19 nt, Artificial
  Chemically synthesized
uacuuguggaacaacauca

SEQ ID NO: 10376 - RNA, 19 nt, Artificial
  Chemically synthesized
ccuuugucuauauucugcu

SEQ ID NO: 10377 - RNA, 19 nt, Artificial
  Chemically synthesized
auguuccgugccuucaaau

SEQ ID NO: 10378 - RNA, 19 nt, Artificial
  Chemically synthesized
aucugaagacugaugguuu

SEQ ID NO: 10379 - RNA, 19 nt, Artificial
  Chemically synthesized
ggaggaaauaaacaugccc

SEQ ID NO: 10380 - RNA, 19 nt, Artificial
  Chemically synthesized
gcuuuuguucucucaguac

SEQ ID NO: 10381 - RNA, 19 nt, Artificial
  Chemically synthesized
gaacaacaucaaaaggugg

SEQ ID NO: 10382 - RNA, 19 nt, Artificial
  Chemically synthesized
uacucagaugaaaguggga

SEQ ID NO: 10383 - RNA, 19 nt, Artificial
  Chemically synthesized
ucauccgacgcuacucaga

SEQ ID NO: 10384 - RNA, 19 nt, Artificial
  Chemically synthesized
uauguauuccugaacugga

SEQ ID NO: 10385 - RNA, 19 nt, Artificial
  Chemically synthesized
cucaguacuuguuacccag

SEQ ID NO: 10386 - RNA, 19 nt, Artificial
  Chemically synthesized
ugcugacccacaagcuuuu

SEQ ID NO: 10387 - RNA, 19 nt, Artificial
  Chemically synthesized
gcaggccauauacaaacag

SEQ ID NO: 10388 - RNA, 19 nt, Artificial
  Chemically synthesized
cuggagaugacauggaggu

SEQ ID NO: 10389 - RNA, 19 nt, Artificial
  Chemically synthesized
uguucucucaguacuuguu

SEQ ID NO: 10390 - RNA, 19 nt, Artificial
  Chemically synthesized
caguucugggaggaugacu

SEQ ID NO: 10391 - RNA, 19 nt, Artificial
  Chemically synthesized
cagcugacuauguauuccu

SEQ ID NO: 10392 - RNA, 19 nt, Artificial
  Chemically synthesized
ccacaagcuuuuguucucu

SEQ ID NO: 10393 - RNA, 19 nt, Artificial
  Chemically synthesized
ugccaagccuagcacuugu

SEQ ID NO: 10394 - RNA, 19 nt, Artificial
  Chemically synthesized
cugcagcugacuauguauu

SEQ ID NO: 10395 - RNA, 19 nt, Artificial
  Chemically synthesized
uuuuguucucucaguacuu

SEQ ID NO: 10396 - RNA, 19 nt, Artificial
  Chemically synthesized
uccaggugaacauccagga

SEQ ID NO: 10397 - RNA, 19 nt, Artificial
  Chemically synthesized
ccugguuaacucguucuug

SEQ ID NO: 10398 - RNA, 19 nt, Artificial
  Chemically synthesized
guuuuggcauugacacaug

SEQ ID NO: 10399 - RNA, 19 nt, Artificial
  Chemically synthesized
aucaaaagguggcaggcca

SEQ ID NO: 10400 - RNA, 19 nt, Artificial
  Chemically synthesized
ugaccgaucagggaccauu

SEQ ID NO: 10401 - RNA, 19 nt, Artificial
  Chemically synthesized
uucaaguacuuguggaaca

SEQ ID NO: 10402 - RNA, 19 nt, Artificial
  Chemically synthesized
cauucucaauaagguugug

SEQ ID NO: 10403 - RNA, 19 nt, Artificial
  Chemically synthesized
acuggacaaauccagguga

SEQ ID NO: 10404 - RNA, 19 nt, Artificial
  Chemically synthesized
caaguacuuguggaacaac

SEQ ID NO: 10405 - RNA, 19 nt, Artificial
  Chemically synthesized
ucugcagucacaucuuugu

SEQ ID NO: 10406 - RNA, 19 nt, Artificial
  Chemically synthesized
gauuuugacaacuucauca

SEQ ID NO: 10407 - RNA, 19 nt, Artificial
  Chemically synthesized
guuccgugccuucaaaucu

SEQ ID NO: 10408 - RNA, 19 nt, Artificial
  Chemically synthesized
aagugggaacauggauuuu

SEQ ID NO: 10409 - RNA, 19 nt, Artificial
  Chemically synthesized
ucucaguacuuguuaccca

SEQ ID NO: 10410 - RNA, 19 nt, Artificial
  Chemically synthesized
ccugaucugaagacugaug

SEQ ID NO: 10411 - RNA, 19 nt, Artificial
  Chemically synthesized
cgugccuucaaaucucuug

SEQ ID NO: 10412 - RNA, 19 nt, Artificial
  Chemically synthesized
auggcacuggacaaaucca

SEQ ID NO: 10413 - RNA, 19 nt, Artificial
  Chemically synthesized
cccacaagcuuuuguucuc

SEQ ID NO: 10414 - RNA, 19 nt, Artificial
  Chemically synthesized
uccgugccuucaaaucucu

SEQ ID NO: 10415 - RNA, 19 nt, Artificial
  Chemically synthesized
guuccugguuaacucguuc

SEQ ID NO: 10416 - RNA, 19 nt, Artificial
  Chemically synthesized
aauuugcccugccuggagu

SEQ ID NO: 10417 - RNA, 19 nt, Artificial
  Chemically synthesized
guacuuguggaacaacauc

SEQ ID NO: 10418 - RNA, 19 nt, Artificial
  Chemically synthesized
aggaggaaauaaacaugcc

SEQ ID NO: 10419 - RNA, 19 nt, Artificial
  Chemically synthesized
ugagcaucucuauaacaug

SEQ ID NO: 10420 - RNA, 19 nt, Artificial
  Chemically synthesized
aaugugcuuggaggccuga

SEQ ID NO: 10421 - RNA, 19 nt, Artificial
  Chemically synthesized
acacccugaucugaagacu

SEQ ID NO: 10422 - RNA, 19 nt, Artificial
  Chemically synthesized
cuuugaggaauucaaguac

SEQ ID NO: 10423 - RNA, 19 nt, Artificial
  Chemically synthesized
uccugguuaacucguucuu

SEQ ID NO: 10424 - RNA, 19 nt, Artificial
  Chemically synthesized
gaaaugugcuuggaggccu

SEQ ID NO: 10425 - RNA, 19 nt, Artificial
  Chemically synthesized
cuaggacacucuaacaagc

SEQ ID NO: 10426 - RNA, 19 nt, Artificial
  Chemically synthesized
auguauuccugaacuggag

SEQ ID NO: 10427 - RNA, 19 nt, Artificial
  Chemically synthesized
cuacucagaugaaaguggg

SEQ ID NO: 10428 - RNA, 19 nt, Artificial
  Chemically synthesized
acauccagggcccaauuug

SEQ ID NO: 10429 - RNA, 19 nt, Artificial
  Chemically synthesized
ggaauucaaguacuugugg

SEQ ID NO: 10430 - RNA, 19 nt, Artificial
  Chemically synthesized
gccuuugucuauauucugc

SEQ ID NO: 10431 - RNA, 19 nt, Artificial
  Chemically synthesized
ugugacacgacacccugau

SEQ ID NO: 10432 - RNA, 19 nt, Artificial
  Chemically synthesized
caguagugaacucccaggu

SEQ ID NO: 10433 - RNA, 19 nt, Artificial
  Chemically synthesized
acaacuucaucagcugcuu

SEQ ID NO: 10434 - RNA, 19 nt, Artificial
  Chemically synthesized
caguuccggagacucuuug

SEQ ID NO: 10435 - RNA, 19 nt, Artificial
  Chemically synthesized
ucaauaagguugugacacg

SEQ ID NO: 10436 - RNA, 19 nt, Artificial
  Chemically synthesized
cucucaguucugggaggau

SEQ ID NO: 10437 - RNA, 19 nt, Artificial
  Chemically synthesized
ugauggauagcgacaccac

SEQ ID NO: 10438 - RNA, 19 nt, Artificial
  Chemically synthesized
caguacuuguuacccagcu

SEQ ID NO: 10439 - RNA, 19 nt, Artificial
  Chemically synthesized
aguagugaacucccaggug

SEQ ID NO: 10440 - RNA, 19 nt, Artificial
  Chemically synthesized
acgcacacauuacuccaac

SEQ ID NO: 10441 - RNA, 19 nt, Artificial
  Chemically synthesized
cauguuccugguuaacucg

SEQ ID NO: 10442 - RNA, 19 nt, Artificial
  Chemically synthesized
agaugacauggaggucagc

SEQ ID NO: 10443 - RNA, 19 nt, Artificial
  Chemically synthesized
caggaggaaauaaacaugc

SEQ ID NO: 10444 - RNA, 19 nt, Artificial
  Chemically synthesized
ggauuuugacaacuucauc

SEQ ID NO: 10445 - RNA, 19 nt, Artificial
  Chemically synthesized
aagguggcaggccauauac

SEQ ID NO: 10446 - RNA, 19 nt, Artificial
  Chemically synthesized
acauucucaauaagguugu

SEQ ID NO: 10447 - RNA, 19 nt, Artificial
  Chemically synthesized
ugaggaauucaaguacuug

SEQ ID NO: 10448 - RNA, 19 nt, Artificial
  Chemically synthesized
ccaccugaaugagcaucuc

SEQ ID NO: 10449 - RNA, 19 nt, Artificial
  Chemically synthesized
augugcuuggaggccugau

SEQ ID NO: 10450 - RNA, 19 nt, Artificial
  Chemically synthesized
ugccuuugucuauauucug

SEQ ID NO: 10451 - RNA, 19 nt, Artificial
  Chemically synthesized
uggcugcagcugacuaugu

SEQ ID NO: 10452 - RNA, 19 nt, Artificial
  Chemically synthesized
accauuugcaguagugaac

SEQ ID NO: 10453 - RNA, 19 nt, Artificial
  Chemically synthesized
acgcuacucagaugaaagu

SEQ ID NO: 10454 - RNA, 19 nt, Artificial
  Chemically synthesized
acucagaugaaagugggaa

SEQ ID NO: 10455 - RNA, 19 nt, Artificial
  Chemically synthesized
gacacucuaacaagcucug

SEQ ID NO: 10456 - RNA, 19 nt, Artificial
  Chemically synthesized
gcagucacaucuuuguggg

SEQ ID NO: 10457 - RNA, 19 nt, Artificial
  Chemically synthesized
caacaucaaaagguggcag

SEQ ID NO: 10458 - RNA, 19 nt, Artificial
  Chemically synthesized
ucuaggacacucuaacaag

SEQ ID NO: 10459 - RNA, 19 nt, Artificial
  Chemically synthesized
gccauauacaaacaguucg

SEQ ID NO: 10460 - RNA, 19 nt, Artificial
  Chemically synthesized
aucagggaccauuugcagu

SEQ ID NO: 10461 - RNA, 19 nt, Artificial
  Chemically synthesized
cuuugucuauauucugcuc

SEQ ID NO: 10462 - RNA, 19 nt, Artificial
  Chemically synthesized
ugcaguagugaacucccag

SEQ ID NO: 10463 - RNA, 19 nt, Artificial
  Chemically synthesized
uggaacaacaucaaaaggu

SEQ ID NO: 10464 - RNA, 19 nt, Artificial
  Chemically synthesized
aggacacucuaacaagcuc

SEQ ID NO: 10465 - RNA, 19 nt, Artificial
  Chemically synthesized
ugacccacaagcuuuuguu

SEQ ID NO: 10466 - RNA, 19 nt, Artificial
  Chemically synthesized
aacaugaucauccgacgcu

SEQ ID NO: 10467 - RNA, 19 nt, Artificial
  Chemically synthesized
aggaauucaaguacuugug

SEQ ID NO: 10468 - RNA, 19 nt, Artificial
  Chemically synthesized
agcacuugugaugccucca

SEQ ID NO: 10469 - RNA, 19 nt, Artificial
  Chemically synthesized
gcagcugacuauguauucc

SEQ ID NO: 10470 - RNA, 19 nt, Artificial
  Chemically synthesized
aguucgacacugaccgauc

SEQ ID NO: 10471 - RNA, 19 nt, Artificial
  Chemically synthesized
gucugcagucacaucuuug

SEQ ID NO: 10472 - RNA, 19 nt, Artificial
  Chemically synthesized
uuguucucucaguacuugu

SEQ ID NO: 10473 - RNA, 19 nt, Artificial
  Chemically synthesized
ugacuauguauuccugaac

SEQ ID NO: 10474 - RNA, 19 nt, Artificial
  Chemically synthesized
caguucgacacugaccgau

SEQ ID NO: 10475 - RNA, 19 nt, Artificial
  Chemically synthesized
aauccaggugaacauccag

SEQ ID NO: 10476 - RNA, 19 nt, Artificial
  Chemically synthesized
augaucauccgacgcuacu

SEQ ID NO: 10477 - RNA, 19 nt, Artificial
  Chemically synthesized
acuauguauuccugaacug

SEQ ID NO: 10478 - RNA, 19 nt, Artificial
  Chemically synthesized
cuccaacauugaggccaac

SEQ ID NO: 10479 - RNA, 19 nt, Artificial
  Chemically synthesized
guuacccagcuucucaaca

SEQ ID NO: 10480 - RNA, 19 nt, Artificial
  Chemically synthesized
gugauggauagcgacacca

SEQ ID NO: 10481 - RNA, 19 nt, Artificial
  Chemically synthesized
acauugaggccaacgagag

SEQ ID NO: 10482 - RNA, 19 nt, Artificial
  Chemically synthesized
gacccacaagcuuuuguuc

SEQ ID NO: 10483 - RNA, 19 nt, Artificial
  Chemically synthesized
augguuuuggcauugacac

SEQ ID NO: 10484 - RNA, 19 nt, Artificial
  Chemically synthesized
uuuuggcauugacacaugu

SEQ ID NO: 10485 - RNA, 19 nt, Artificial
  Chemically synthesized
cuaacaagcucuguccacg

SEQ ID NO: 10486 - RNA, 19 nt, Artificial
  Chemically synthesized
uauaacaugaucauccgac

SEQ ID NO: 10487 - RNA, 19 nt, Artificial
  Chemically synthesized
cauauacaaacaguucgac

SEQ ID NO: 10488 - RNA, 19 nt, Artificial
  Chemically synthesized
acauuacuccaacauugag

SEQ ID NO: 10489 - RNA, 19 nt, Artificial
  Chemically synthesized
aagcugggcuuugaggaau

SEQ ID NO: 10490 - RNA, 19 nt, Artificial
  Chemically synthesized
ccuagcacuugugaugccu

SEQ ID NO: 10491 - RNA, 19 nt, Artificial
  Chemically synthesized
uaacaugaucauccgacgc

SEQ ID NO: 10492 - RNA, 19 nt, Artificial
  Chemically synthesized
gcuacucagaugaaagugg

SEQ ID NO: 10493 - RNA, 19 nt, Artificial
  Chemically synthesized
ugugccaagccuagcacuu

SEQ ID NO: 10494 - RNA, 19 nt, Artificial
  Chemically synthesized
caccugaaugagcaucucu

SEQ ID NO: 10495 - RNA, 19 nt, Artificial
  Chemically synthesized
cagcuucucaacauccagg

SEQ ID NO: 10496 - RNA, 19 nt, Artificial
  Chemically synthesized
ugccuugcuauaggaguca

SEQ ID NO: 10497 - RNA, 19 nt, Artificial
  Chemically synthesized
cgccacagaacucaugaac

SEQ ID NO: 10498 - RNA, 19 nt, Artificial
  Chemically synthesized
auugacacaugucgcagca

SEQ ID NO: 10499 - RNA, 19 nt, Artificial
  Chemically synthesized
uucucucaguacuuguuac

SEQ ID NO: 10500 - RNA, 19 nt, Artificial
  Chemically synthesized
auccuaggcggagucauca

SEQ ID NO: 10501 - RNA, 19 nt, Artificial
  Chemically synthesized
aacucccaggugccuuuga

SEQ ID NO: 10502 - RNA, 19 nt, Artificial
  Chemically synthesized
accgaucagggaccauuug

SEQ ID NO: 10503 - RNA, 19 nt, Artificial
  Chemically synthesized
ccugucugcagucacaucu

SEQ ID NO: 10504 - RNA, 19 nt, Artificial
  Chemically synthesized
cuugcuauaggagucaccu

SEQ ID NO: 10505 - RNA, 19 nt, Artificial
  Chemically synthesized
uggcauugacacaugucgc

SEQ ID NO: 10506 - RNA, 19 nt, Artificial
  Chemically synthesized
uggacaaauccaggugaac

SEQ ID NO: 10507 - RNA, 19 nt, Artificial
  Chemically synthesized
uggcacuggacaaauccag

SEQ ID NO: 10508 - RNA, 19 nt, Artificial
  Chemically synthesized
ugaucauccgacgcuacuc

SEQ ID NO: 10509 - RNA, 19 nt, Artificial
  Chemically synthesized
aacauccagggcccaauuu

SEQ ID NO: 10510 - RNA, 19 nt, Artificial
  Chemically synthesized
uucaucagcugcuugguca

SEQ ID NO: 10511 - RNA, 19 nt, Artificial
  Chemically synthesized
guggaacaacaucaaaagg

SEQ ID NO: 10512 - RNA, 19 nt, Artificial
  Chemically synthesized
uggcaggccauauacaaac

SEQ ID NO: 10513 - RNA, 19 nt, Artificial
  Chemically synthesized
auccugucugcagucacau

SEQ ID NO: 10514 - RNA, 19 nt, Artificial
  Chemically synthesized
cacccugaucugaagacug

SEQ ID NO: 10515 - RNA, 19 nt, Artificial
  Chemically synthesized
uaagguugugacacgacac

SEQ ID NO: 10516 - RNA, 19 nt, Artificial
  Chemically synthesized
auuugcccugccuggaguu

SEQ ID NO: 10517 - RNA, 19 nt, Artificial
  Chemically synthesized
ucaguucugggaggaugac

SEQ ID NO: 10518 - RNA, 19 nt, Artificial
  Chemically synthesized
agccauguuccugguuaac

SEQ ID NO: 10519 - RNA, 19 nt, Artificial
  Chemically synthesized
uauacaaacaguucgacac

SEQ ID NO: 10520 - RNA, 19 nt, Artificial
  Chemically synthesized
aguuccggagacucuuugc

SEQ ID NO: 10521 - RNA, 19 nt, Artificial
  Chemically synthesized
acugccuugcuauaggagu

SEQ ID NO: 10522 - RNA, 19 nt, Artificial
  Chemically synthesized
ugcagcugacuauguauuc

SEQ ID NO: 10523 - RNA, 19 nt, Artificial
  Chemically synthesized
uacccagcuucucaacauc

SEQ ID NO: 10524 - RNA, 19 nt, Artificial
  Chemically synthesized
acacccuucacgguugcua

SEQ ID NO: 10525 - RNA, 19 nt, Artificial
  Chemically synthesized
uucucaauaagguugugac

SEQ ID NO: 10526 - RNA, 19 nt, Artificial
  Chemically synthesized
uuccgugccuucaaaucuc

SEQ ID NO: 10527 - RNA, 19 nt, Artificial
  Chemically synthesized
gucuauauucugcucccag

SEQ ID NO: 10528 - RNA, 19 nt, Artificial
  Chemically synthesized
uccugucugcagucacauc

SEQ ID NO: 10529 - RNA, 19 nt, Artificial
  Chemically synthesized
uguuccgugccuucaaauc

SEQ ID NO: 10530 - RNA, 19 nt, Artificial
  Chemically synthesized
cucacugccuugcuauagg

SEQ ID NO: 10531 - RNA, 19 nt, Artificial
  Chemically synthesized
ccuugcuauaggagucacc

SEQ ID NO: 10532 - RNA, 19 nt, Artificial
  Chemically synthesized
gcauugacacaugucgcag

SEQ ID NO: 10533 - RNA, 19 nt, Artificial
  Chemically synthesized
cuagcacuugugaugccuc

SEQ ID NO: 10534 - RNA, 19 nt, Artificial
  Chemically synthesized
cacuggacaaauccaggug

SEQ ID NO: 10535 - RNA, 19 nt, Artificial
  Chemically synthesized
acacaugucgcagcauggu

SEQ ID NO: 10536 - RNA, 19 nt, Artificial
  Chemically synthesized
cacugccuugcuauaggag

SEQ ID NO: 10537 - RNA, 19 nt, Artificial
  Chemically synthesized
agugggaacauggauuuug

SEQ ID NO: 10538 - RNA, 19 nt, Artificial
  Chemically synthesized
ugcuauaggagucaccugg

SEQ ID NO: 10539 - RNA, 19 nt, Artificial
  Chemically synthesized
cugccuugcuauaggaguc

SEQ ID NO: 10540 - RNA, 19 nt, Artificial
  Chemically synthesized
uugacacaugucgcagcau

SEQ ID NO: 10541 - RNA, 19 nt, Artificial
  Chemically synthesized
aauaagguugugacacgac

SEQ ID NO: 10542 - RNA, 19 nt, Artificial
  Chemically synthesized
auggauagcgacaccacag

SEQ ID NO: 10543 - RNA, 19 nt, Artificial
  Chemically synthesized
ugacacaugucgcagcaug

SEQ ID NO: 10544 - RNA, 19 nt, Artificial
  Chemically synthesized
agugccuuugucuauauuc

SEQ ID NO: 10545 - RNA, 19 nt, Artificial
  Chemically synthesized
acaucaaaagguggcaggc

SEQ ID NO: 10546 - RNA, 19 nt, Artificial
  Chemically synthesized
ucaucagcugcuuggucag

SEQ ID NO: 10547 - RNA, 19 nt, Artificial
  Chemically synthesized
cauugacacaugucgcagc

SEQ ID NO: 10548 - RNA, 19 nt, Artificial
  Chemically synthesized
uuugaggaauucaaguacu

SEQ ID NO: 10549 - RNA, 19 nt, Artificial
  Chemically synthesized
gacacccugaucugaagac

SEQ ID NO: 10550 - RNA, 19 nt, Artificial
  Chemically synthesized
acacucuaacaagcucugu

SEQ ID NO: 10551 - RNA, 19 nt, Artificial
  Chemically synthesized
cauuugcaguagugaacuc

SEQ ID NO: 10552 - RNA, 19 nt, Artificial
  Chemically synthesized
aguucugggaggaugacuc

SEQ ID NO: 10553 - RNA, 19 nt, Artificial
  Chemically synthesized
cugaucugaagacugaugg

SEQ ID NO: 10554 - RNA, 19 nt, Artificial
  Chemically synthesized
caacuucaucagcugcuug

SEQ ID NO: 10555 - RNA, 19 nt, Artificial
  Chemically synthesized
gauggcacuggacaaaucc

SEQ ID NO: 10556 - RNA, 19 nt, Artificial
  Chemically synthesized
uccgacgcuacucagauga

SEQ ID NO: 10557 - RNA, 19 nt, Artificial
  Chemically synthesized
aaaucucuugacaaagaug

SEQ ID NO: 10558 - RNA, 19 nt, Artificial
  Chemically synthesized
cuauauucugcucccagcc

SEQ ID NO: 10559 - RNA, 19 nt, Artificial
  Chemically synthesized
uacuuguuacccagcuucu

SEQ ID NO: 10560 - RNA, 19 nt, Artificial
  Chemically synthesized
acugaugguuuuggcauug

SEQ ID NO: 10561 - RNA, 19 nt, Artificial
  Chemically synthesized
aacauggauuuugacaacu

SEQ ID NO: 10562 - RNA, 19 nt, Artificial
  Chemically synthesized
aggguuccaccugaaugag

SEQ ID NO: 10563 - RNA, 19 nt, Artificial
  Chemically synthesized
gccauguuccugguuaacu

SEQ ID NO: 10564 - RNA, 19 nt, Artificial
  Chemically synthesized
gccuugcuauaggagucac

SEQ ID NO: 10565 - RNA, 19 nt, Artificial
  Chemically synthesized
ucucuugacaaagauggca

SEQ ID NO: 10566 - RNA, 19 nt, Artificial
  Chemically synthesized
ucuauauucugcucccagc

SEQ ID NO: 10567 - RNA, 19 nt, Artificial
  Chemically synthesized
auacaaacaguucgacacu

SEQ ID NO: 10568 - RNA, 19 nt, Artificial
  Chemically synthesized
acuugugaugccuccaugc

SEQ ID NO: 10569 - RNA, 19 nt, Artificial
  Chemically synthesized
uucugggaggaugacucca

SEQ ID NO: 10570 - RNA, 19 nt, Artificial
  Chemically synthesized
guacuuguuacccagcuuc

SEQ ID NO: 10571 - RNA, 19 nt, Artificial
  Chemically synthesized
cugaagacugaugguuuug

SEQ ID NO: 10572 - RNA, 19 nt, Artificial
  Chemically synthesized
agaacucaugaacauucuc

SEQ ID NO: 10573 - RNA, 19 nt, Artificial
  Chemically synthesized
cacucuaacaagcucuguc

SEQ ID NO: 10574 - RNA, 19 nt, Artificial
  Chemically synthesized
auguuccugguuaacucgu

SEQ ID NO: 10575 - RNA, 19 nt, Artificial
  Chemically synthesized
auccgacgcuacucagaug

SEQ ID NO: 10576 - RNA, 19 nt, Artificial
  Chemically synthesized
ucucucaguucugggagga

SEQ ID NO: 10577 - RNA, 19 nt, Artificial
  Chemically synthesized
acaaauccaggugaacauc

SEQ ID NO: 10578 - RNA, 19 nt, Artificial
  Chemically synthesized
gacaacuucaucagcugcu

SEQ ID NO: 10579 - RNA, 19 nt, Artificial
  Chemically synthesized
uguuacccagcuucucaac

SEQ ID NO: 10580 - RNA, 19 nt, Artificial
  Chemically synthesized
acccacaagcuuuuguucu

SEQ ID NO: 10581 - RNA, 19 nt, Artificial
  Chemically synthesized
cucaauaagguugugacac

SEQ ID NO: 10582 - RNA, 19 nt, Artificial
  Chemically synthesized
cugacccacaagcuuuugu

SEQ ID NO: 10583 - RNA, 19 nt, Artificial
  Chemically synthesized
cauuacuccaacauugagg

SEQ ID NO: 10584 - RNA, 19 nt, Artificial
  Chemically synthesized
auauucugcucccagccug

SEQ ID NO: 10585 - RNA, 19 nt, Artificial
  Chemically synthesized
uauaggagucaccuggagc

SEQ ID NO: 10586 - RNA, 19 nt, Artificial
  Chemically synthesized
uugucuauauucugcuccc

SEQ ID NO: 10587 - RNA, 19 nt, Artificial
  Chemically synthesized
ugaagacugaugguuuugg

SEQ ID NO: 10588 - RNA, 19 nt, Artificial
  Chemically synthesized
ucuaacaagcucuguccac

SEQ ID NO: 10589 - RNA, 19 nt, Artificial
  Chemically synthesized
auucucaauaagguuguga

SEQ ID NO: 10590 - RNA, 19 nt, Artificial
  Chemically synthesized
cuauguauuccugaacugg

SEQ ID NO: 10591 - RNA, 19 nt, Artificial
  Chemically synthesized
cugcagucacaucuuugug

SEQ ID NO: 10592 - RNA, 19 nt, Artificial
  Chemically synthesized
ccucacugccuugcuauag

SEQ ID NO: 10593 - RNA, 19 nt, Artificial
  Chemically synthesized
caaauccaggugaacaucc

SEQ ID NO: 10594 - RNA, 19 nt, Artificial
  Chemically synthesized
acuucaucagcugcuuggu

SEQ ID NO: 10595 - RNA, 19 nt, Artificial
  Chemically synthesized
acuuguuacccagcuucuc

SEQ ID NO: 10596 - RNA, 19 nt, Artificial
  Chemically synthesized
ugacacgacacccugaucu

SEQ ID NO: 10597 - RNA, 19 nt, Artificial
  Chemically synthesized
cacaagcuuuuguucucuc

SEQ ID NO: 10598 - RNA, 19 nt, Artificial
  Chemically synthesized
cgcuacucagaugaaagug

SEQ ID NO: 10599 - RNA, 19 nt, Artificial
  Chemically synthesized
aaacaguucgacacugacc

SEQ ID NO: 10600 - RNA, 19 nt, Artificial
  Chemically synthesized
aacaguucgacacugaccg

SEQ ID NO: 10601 - RNA, 19 nt, Artificial
  Chemically synthesized
aacaucaaaagguggcagg

SEQ ID NO: 10602 - RNA, 19 nt, Artificial
  Chemically synthesized
ucucaguucugggaggaug

SEQ ID NO: 10603 - RNA, 19 nt, Artificial
  Chemically synthesized
uguauuccugaacuggagc

SEQ ID NO: 10604 - RNA, 19 nt, Artificial
  Chemically synthesized
uaggacacucuaacaagcu

SEQ ID NO: 10605 - RNA, 19 nt, Artificial
  Chemically synthesized
uauauucugcucccagccu

SEQ ID NO: 10606 - RNA, 19 nt, Artificial
  Chemically synthesized
cucuugacaaagauggcac

SEQ ID NO: 10607 - RNA, 19 nt, Artificial
  Chemically synthesized
uaacaagcucuguccacgg

SEQ ID NO: 10608 - RNA, 19 nt, Artificial
  Chemically synthesized
cuucaucagcugcuugguc

SEQ ID NO: 10609 - RNA, 19 nt, Artificial
  Chemically synthesized
cuugacaaagauggcacug

SEQ ID NO: 10610 - RNA, 19 nt, Artificial
  Chemically synthesized
uuuugacaacuucaucagc

SEQ ID NO: 10611 - RNA, 19 nt, Artificial
  Chemically synthesized
gcugacccacaagcuuuug

SEQ ID NO: 10612 - RNA, 19 nt, Artificial
  Chemically synthesized
ucaguacuuguuacccagc

SEQ ID NO: 10613 - RNA, 19 nt, Artificial
  Chemically synthesized
uggagaugacauggagguc

SEQ ID NO: 10614 - RNA, 19 nt, Artificial
  Chemically synthesized
aucauccgacgcuacucag

SEQ ID NO: 10615 - RNA, 19 nt, Artificial
  Chemically synthesized
uccaccugaaugagcaucu

SEQ ID NO: 10616 - RNA, 19 nt, Artificial
  Chemically synthesized
aucucuugacaaagauggc

SEQ ID NO: 10617 - RNA, 19 nt, Artificial
  Chemically synthesized
uuccugguuaacucguucu

SEQ ID NO: 10618 - RNA, 19 nt, Artificial
  Chemically synthesized
uugcuauaggagucaccug

SEQ ID NO: 10619 - RNA, 19 nt, Artificial
  Chemically synthesized
ugccuucaaaucucuugac

SEQ ID NO: 10620 - RNA, 19 nt, Artificial
  Chemically synthesized
uagcacuugugaugccucc

SEQ ID NO: 10621 - RNA, 19 nt, Artificial
  Chemically synthesized
uuugacaacuucaucagcu

SEQ ID NO: 10622 - RNA, 19 nt, Artificial
  Chemically synthesized
auucaaguacuuguggaac

SEQ ID NO: 10623 - RNA, 19 nt, Artificial
  Chemically synthesized
uugacaacuucaucagcug

SEQ ID NO: 10624 - RNA, 19 nt, Artificial
  Chemically synthesized
auuuugacaacuucaucag

SEQ ID NO: 10625 - RNA, 19 nt, Artificial
  Chemically synthesized
aacauucucaauaagguug

SEQ ID NO: 10626 - RNA, 19 nt, Artificial
  Chemically synthesized
agcuucucaacauccaggg

SEQ ID NO: 10627 - RNA, 19 nt, Artificial
  Chemically synthesized
ugcagucacaucuuugugg

SEQ ID NO: 10628 - RNA, 19 nt, Artificial
  Chemically synthesized
uucaaaucucuugacaaag

SEQ ID NO: 10629 - RNA, 19 nt, Artificial
  Chemically synthesized
acucuaacaagcucugucc

SEQ ID NO: 10630 - RNA, 19 nt, Artificial
  Chemically synthesized
acccagcuucucaacaucc

SEQ ID NO: 10631 - RNA, 19 nt, Artificial
  Chemically synthesized
aagguugugacacgacacc

SEQ ID NO: 10632 - RNA, 19 nt, Artificial
  Chemically synthesized
uuggcauugacacaugucg

SEQ ID NO: 10633 - RNA, 19 nt, Artificial
  Chemically synthesized
uacuccaacauugaggcca

SEQ ID NO: 10634 - RNA, 19 nt, Artificial
  Chemically synthesized
uucgacacugaccgaucag

SEQ ID NO: 10635 - RNA, 19 nt, Artificial
  Chemically synthesized
uugacaaagauggcacugg

SEQ ID NO: 10636 - RNA, 19 nt, Artificial
  Chemically synthesized
uacaaacaguucgacacug

SEQ ID NO: 10637 - RNA, 19 nt, Artificial
  Chemically synthesized
aacaacaucaaaagguggc

SEQ ID NO: 10638 - RNA, 19 nt, Artificial
  Chemically synthesized
auugaggccaacgagagug

SEQ ID NO: 10639 - RNA, 19 nt, Artificial
  Chemically synthesized
uuugcaguagugaacuccc

SEQ ID NO: 10640 - RNA, 19 nt, Artificial
  Chemically synthesized
aacuucaucagcugcuugg

SEQ ID NO: 10641 - RNA, 19 nt, Artificial
  Chemically synthesized
augaacauucucaauaagg

SEQ ID NO: 10642 - RNA, 19 nt, Artificial
  Chemically synthesized
guauuccugaacuggagcc

SEQ ID NO: 10643 - RNA, 19 nt, Artificial
  Chemically synthesized
aaucucuugacaaagaugg

SEQ ID NO: 10644 - RNA, 19 nt, Artificial
  Chemically synthesized
auccaggugaacauccagg

SEQ ID NO: 10645 - RNA, 19 nt, Artificial
  Chemically synthesized
ugacaacuucaucagcugc

SEQ ID NO: 10646 - RNA, 19 nt, Artificial
  Chemically synthesized
cucucaguacuuguuaccc

SEQ ID NO: 10647 - RNA, 19 nt, Artificial
  Chemically synthesized
uuuggcauugacacauguc

SEQ ID NO: 10648 - RNA, 19 nt, Artificial
  Chemically synthesized
agccuagcacuugugaugc

SEQ ID NO: 10649 - RNA, 19 nt, Artificial
  Chemically synthesized
auuacuccaacauugaggc

SEQ ID NO: 10650 - RNA, 19 nt, Artificial
  Chemically synthesized
ucucucaguacuuguuacc

SEQ ID NO: 10651 - RNA, 19 nt, Artificial
  Chemically synthesized
uccaacauugaggccaacg

SEQ ID NO: 10652 - RNA, 19 nt, Artificial
  Chemically synthesized
auuugcaguagugaacucc

SEQ ID NO: 10653 - RNA, 19 nt, Artificial
  Chemically synthesized
uuugucuauauucugcucc

SEQ ID NO: 10654 - RNA, 19 nt, Artificial
  Chemically synthesized
uauuccugaacuggagccc

SEQ ID NO: 10655 - RNA, 19 nt, Artificial
  Chemically synthesized
uuccaccugaaugagcauc

SEQ ID NO: 10656 - RNA, 19 nt, Artificial
  Chemically synthesized
uuacuccaacauugaggcc

SEQ ID NO: 10657 - RNA, 19 nt, Artificial
  Chemically synthesized
ucggaugaucauguuauag

SEQ ID NO: 10658 - RNA, 19 nt, Artificial
  Chemically synthesized
uugaaggcacggaacaugg

SEQ ID NO: 10659 - RNA, 19 nt, Artificial
  Chemically synthesized
uuguauauggccugccacc

SEQ ID NO: 10660 - RNA, 19 nt, Artificial
  Chemically synthesized
uugucaaaauccauguucc

SEQ ID NO: 10661 - RNA, 19 nt, Artificial
  Chemically synthesized
uucacuacugcaaaugguc

SEQ ID NO: 10662 - RNA, 19 nt, Artificial
  Chemically synthesized
uucaugaguucuguggcgc

SEQ ID NO: 10663 - RNA, 19 nt, Artificial
  Chemically synthesized
uugucaagagauuugaagg

SEQ ID NO: 10664 - RNA, 19 nt, Artificial
  Chemically synthesized
uuugucaagagauuugaag

SEQ ID NO: 10665 - RNA, 19 nt, Artificial
  Chemically synthesized
uccagugccaucuuuguca

SEQ ID NO: 10666 - RNA, 19 nt, Artificial
  Chemically synthesized
uugauguuguuccacaagu

SEQ ID NO: 10667 - RNA, 19 nt, Artificial
  Chemically synthesized
uauagcaaggcagugaggg

SEQ ID NO: 10668 - RNA, 19 nt, Artificial
  Chemically synthesized
ugucaaugccaaaaccauc

SEQ ID NO: 10669 - RNA, 19 nt, Artificial
  Chemically synthesized
uucaggaauacauagucag

SEQ ID NO: 10670 - RNA, 19 nt, Artificial
  Chemically synthesized
uucaagaacgaguuaacca

SEQ ID NO: 10671 - RNA, 19 nt, Artificial
  Chemically synthesized
uuuauuuccuccugggccu

SEQ ID NO: 10672 - RNA, 19 nt, Artificial
  Chemically synthesized
cggaugaucauguuauaga

SEQ ID NO: 10673 - RNA, 19 nt, Artificial
  Chemically synthesized
auagagaugcucauucagg

SEQ ID NO: 10674 - RNA, 19 nt, Artificial
  Chemically synthesized
uguggugucgcuauccauc

SEQ ID NO: 10675 - RNA, 19 nt, Artificial
  Chemically synthesized
auacauagucagcugcagc

SEQ ID NO: 10676 - RNA, 19 nt, Artificial
  Chemically synthesized
ucgugucacaaccuuauug

SEQ ID NO: 10677 - RNA, 19 nt, Artificial
  Chemically synthesized
ucgaacuguuuguauaugg

SEQ ID NO: 10678 - RNA, 19 nt, Artificial
  Chemically synthesized
uagaguguccuagagccag

SEQ ID NO: 10679 - RNA, 19 nt, Artificial
  Chemically synthesized
ucacuacugcaaauggucc

SEQ ID NO: 10680 - RNA, 19 nt, Artificial
  Chemically synthesized
uagcgucggaugaucaugu

SEQ ID NO: 10681 - RNA, 19 nt, Artificial
  Chemically synthesized
ugcucauucagguggaacc

SEQ ID NO: 10682 - RNA, 19 nt, Artificial
  Chemically synthesized
uuuguauauggccugccac

SEQ ID NO: 10683 - RNA, 19 nt, Artificial
  Chemically synthesized
aucagucuucagaucaggg

SEQ ID NO: 10684 - RNA, 19 nt, Artificial
  Chemically synthesized
ucauccucccagaacugag

SEQ ID NO: 10685 - RNA, 19 nt, Artificial
  Chemically synthesized
uguucaugaguucuguggc

SEQ ID NO: 10686 - RNA, 19 nt, Artificial
  Chemically synthesized
aaugccaaaaccaucaguc

SEQ ID NO: 10687 - RNA, 19 nt, Artificial
  Chemically synthesized
guuuauuuccuccugggcc

SEQ ID NO: 10688 - RNA, 19 nt, Artificial
  Chemically synthesized
auguuguuccacaaguacu

SEQ ID NO: 10689 - RNA, 19 nt, Artificial
  Chemically synthesized
uuccucaaagcccagcuug

SEQ ID NO: 10690 - RNA, 19 nt, Artificial
  Chemically synthesized
ugcaaauggucccugaucg

SEQ ID NO: 10691 - RNA, 19 nt, Artificial
  Chemically synthesized
uccaagcacauuucccagg

SEQ ID NO: 10692 - RNA, 19 nt, Artificial
  Chemically synthesized
uugaauuccucaaagccca

SEQ ID NO: 10693 - RNA, 19 nt, Artificial
  Chemically synthesized
uuugauguuguuccacaag

SEQ ID NO: 10694 - RNA, 19 nt, Artificial
  Chemically synthesized
uucagaucagggugucgug

SEQ ID NO: 10695 - RNA, 19 nt, Artificial
  Chemically synthesized
uauauggccugccaccuuu

SEQ ID NO: 10696 - RNA, 19 nt, Artificial
  Chemically synthesized
uguauauggccugccaccu

SEQ ID NO: 10697 - RNA, 19 nt, Artificial
  Chemically synthesized
caccuuuugauguuguucc

SEQ ID NO: 10698 - RNA, 19 nt, Artificial
  Chemically synthesized
uccaggugacuccuauagc

SEQ ID NO: 10699 - RNA, 19 nt, Artificial
  Chemically synthesized
uguuguuccacaaguacuu

SEQ ID NO: 10700 - RNA, 19 nt, Artificial
  Chemically synthesized
uggauguugagaagcuggg

SEQ ID NO: 10701 - RNA, 19 nt, Artificial
  Chemically synthesized
uguuggaguaaugugugcg

SEQ ID NO: 10702 - RNA, 19 nt, Artificial
  Chemically synthesized
uucaucugaguagcgucgg

SEQ ID NO: 10703 - RNA, 19 nt, Artificial
  Chemically synthesized
uacugagagaacaaaagcu

SEQ ID NO: 10704 - RNA, 19 nt, Artificial
  Chemically synthesized
uuggccucaauguuggagu

SEQ ID NO: 10705 - RNA, 19 nt, Artificial
  Chemically synthesized
uucaccuggauuuguccag

SEQ ID NO: 10706 - RNA, 19 nt, Artificial
  Chemically synthesized
ugucgugucacaaccuuau

SEQ ID NO: 10707 - RNA, 19 nt, Artificial
  Chemically synthesized
uggaguaaugugugcgugg

SEQ ID NO: 10708 - RNA, 19 nt, Artificial
  Chemically synthesized
ucauucagguggaacccug

SEQ ID NO: 10709 - RNA, 19 nt, Artificial
  Chemically synthesized
uauggccugccaccuuuug

SEQ ID NO: 10710 - RNA, 19 nt, Artificial
  Chemically synthesized
ugaucauguuauagagaug

SEQ ID NO: 10711 - RNA, 19 nt, Artificial
  Chemically synthesized
ucaggaauacauagucagc

SEQ ID NO: 10712 - RNA, 19 nt, Artificial
  Chemically synthesized
uagagaugcucauucaggu

SEQ ID NO: 10713 - RNA, 19 nt, Artificial
  Chemically synthesized
uuggaguaaugugugcgug

SEQ ID NO: 10714 - RNA, 19 nt, Artificial
  Chemically synthesized
ugugucaaugccaaaacca

SEQ ID NO: 10715 - RNA, 19 nt, Artificial
  Chemically synthesized
ggaugaucauguuauagag

SEQ ID NO: 10716 - RNA, 19 nt, Artificial
  Chemically synthesized
ugucaaaauccauguuccc

SEQ ID NO: 10717 - RNA, 19 nt, Artificial
  Chemically synthesized
acuugaauuccucaaagcc

SEQ ID NO: 10718 - RNA, 19 nt, Artificial
  Chemically synthesized
uugagaauguucaugaguu

SEQ ID NO: 10719 - RNA, 19 nt, Artificial
  Chemically synthesized
cuugaauuccucaaagccc

SEQ ID NO: 10720 - RNA, 19 nt, Artificial
  Chemically synthesized
uccacaaguacuugaauuc

SEQ ID NO: 10721 - RNA, 19 nt, Artificial
  Chemically synthesized
gaugaucauguuauagaga

SEQ ID NO: 10722 - RNA, 19 nt, Artificial
  Chemically synthesized
ugucacaaccuuauugaga

SEQ ID NO: 10723 - RNA, 19 nt, Artificial
  Chemically synthesized
acuguuuguauauggccug

SEQ ID NO: 10724 - RNA, 19 nt, Artificial
  Chemically synthesized
uugagaagcuggguaacaa

SEQ ID NO: 10725 - RNA, 19 nt, Artificial
  Chemically synthesized
uuccacaaguacuugaauu

SEQ ID NO: 10726 - RNA, 19 nt, Artificial
  Chemically synthesized
aauguuggaguaaugugug

SEQ ID NO: 10727 - RNA, 19 nt, Artificial
  Chemically synthesized
ucguuggccucaauguugg

SEQ ID NO: 10728 - RNA, 19 nt, Artificial
  Chemically synthesized
aauuccucaaagcccagcu

SEQ ID NO: 10729 - RNA, 19 nt, Artificial
  Chemically synthesized
auccauguucccacuuuca

SEQ ID NO: 10730 - RNA, 19 nt, Artificial
  Chemically synthesized
uggauguucaccuggauuu

SEQ ID NO: 10731 - RNA, 19 nt, Artificial
  Chemically synthesized
aacuguuuguauauggccu

SEQ ID NO: 10732 - RNA, 19 nt, Artificial
  Chemically synthesized
uccauguucccacuuucau

SEQ ID NO: 10733 - RNA, 19 nt, Artificial
  Chemically synthesized
cucguuggccucaauguug

SEQ ID NO: 10734 - RNA, 19 nt, Artificial
  Chemically synthesized
aagagauuugaaggcacgg

SEQ ID NO: 10735 - RNA, 19 nt, Artificial
  Chemically synthesized
cuggauguugagaagcugg

SEQ ID NO: 10736 - RNA, 19 nt, Artificial
  Chemically synthesized
aucauguuauagagaugcu

SEQ ID NO: 10737 - RNA, 19 nt, Artificial
  Chemically synthesized
gaaguugucaaaauccaug

SEQ ID NO: 10738 - RNA, 19 nt, Artificial
  Chemically synthesized
auagucagcugcagccacu

SEQ ID NO: 10739 - RNA, 19 nt, Artificial
  Chemically synthesized
auucagguggaacccugcu

SEQ ID NO: 10740 - RNA, 19 nt, Artificial
  Chemically synthesized
ugagaagcuggguaacaag

SEQ ID NO: 10741 - RNA, 19 nt, Artificial
  Chemically synthesized
ugagagaacaaaagcuugu

SEQ ID NO: 10742 - RNA, 19 nt, Artificial
  Chemically synthesized
uuuugauguuguuccacaa

SEQ ID NO: 10743 - RNA, 19 nt, Artificial
  Chemically synthesized
uguuuauuuccuccugggc

SEQ ID NO: 10744 - RNA, 19 nt, Artificial
  Chemically synthesized
acucucguuggccucaaug

SEQ ID NO: 10745 - RNA, 19 nt, Artificial
  Chemically synthesized
uuguuagaguguccuagag

SEQ ID NO: 10746 - RNA, 19 nt, Artificial
  Chemically synthesized
uuguuccacaaguacuuga

SEQ ID NO: 10747 - RNA, 19 nt, Artificial
  Chemically synthesized
cuuucaucugaguagcguc

SEQ ID NO: 10748 - RNA, 19 nt, Artificial
  Chemically synthesized
augcucauucagguggaac

SEQ ID NO: 10749 - RNA, 19 nt, Artificial
  Chemically synthesized
augucaucuccagccagcu

SEQ ID NO: 10750 - RNA, 19 nt, Artificial
  Chemically synthesized
ucucguuggccucaauguu

SEQ ID NO: 10751 - RNA, 19 nt, Artificial
  Chemically synthesized
ugucaagagauuugaaggc

SEQ ID NO: 10752 - RNA, 19 nt, Artificial
  Chemically synthesized
cacuccuggauguucaccu

SEQ ID NO: 10753 - RNA, 19 nt, Artificial
  Chemically synthesized
uacuugaauuccucaaagc

SEQ ID NO: 10754 - RNA, 19 nt, Artificial
  Chemically synthesized
gucagugucgaacuguuug

SEQ ID NO: 10755 - RNA, 19 nt, Artificial
  Chemically synthesized
aucuuugucaagagauuug

SEQ ID NO: 10756 - RNA, 19 nt, Artificial
  Chemically synthesized
gucaaugccaaaaccauca

SEQ ID NO: 10757 - RNA, 19 nt, Artificial
  Chemically synthesized
cgucggaugaucauguuau

SEQ ID NO: 10758 - RNA, 19 nt, Artificial
  Chemically synthesized
ucaugaguucuguggcgcu

SEQ ID NO: 10759 - RNA, 19 nt, Artificial
  Chemically synthesized
auugggcccuggauguuga

SEQ ID NO: 10760 - RNA, 19 nt, Artificial
  Chemically synthesized
augugucaaugccaaaacc

SEQ ID NO: 10761 - RNA, 19 nt, Artificial
  Chemically synthesized
uaggcuuggcacagguaca

SEQ ID NO: 10762 - RNA, 19 nt, Artificial
  Chemically synthesized
accaucagucuucagauca

SEQ ID NO: 10763 - RNA, 19 nt, Artificial
  Chemically synthesized
uguccagugccaucuuugu

SEQ ID NO: 10764 - RNA, 19 nt, Artificial
  Chemically synthesized
auguuuauuuccuccuggg

SEQ ID NO: 10765 - RNA, 19 nt, Artificial
  Chemically synthesized
agaauauagacaaaggcac

SEQ ID NO: 10766 - RNA, 19 nt, Artificial
  Chemically synthesized
uuauuuccuccugggccug

SEQ ID NO: 10767 - RNA, 19 nt, Artificial
  Chemically synthesized
augaguucuguggcgcuga

SEQ ID NO: 10768 - RNA, 19 nt, Artificial
  Chemically synthesized
aauguucaugaguucugug

SEQ ID NO: 10769 - RNA, 19 nt, Artificial
  Chemically synthesized
cugcaaauggucccugauc

SEQ ID NO: 10770 - RNA, 19 nt, Artificial
  Chemically synthesized
ccauguucccacuuucauc

SEQ ID NO: 10771 - RNA, 19 nt, Artificial
  Chemically synthesized
cuucagaucagggugucgu

SEQ ID NO: 10772 - RNA, 19 nt, Artificial
  Chemically synthesized
auugagaauguucaugagu

SEQ ID NO: 10773 - RNA, 19 nt, Artificial
  Chemically synthesized
ugaaguugucaaaauccau

SEQ ID NO: 10774 - RNA, 19 nt, Artificial
  Chemically synthesized
uuagaguguccuagagcca

SEQ ID NO: 10775 - RNA, 19 nt, Artificial
  Chemically synthesized
ugccaaaaccaucagucuu

SEQ ID NO: 10776 - RNA, 19 nt, Artificial
  Chemically synthesized
ugcgacaugugucaaugcc

SEQ ID NO: 10777 - RNA, 19 nt, Artificial
  Chemically synthesized
aagaugugacugcagacag

SEQ ID NO: 10778 - RNA, 19 nt, Artificial
  Chemically synthesized
ucacaagugcuaggcuugg

SEQ ID NO: 10779 - RNA, 19 nt, Artificial
  Chemically synthesized
uugccuguggugucgcuau

SEQ ID NO: 10780 - RNA, 19 nt, Artificial
  Chemically synthesized
ucagggugucgugucacaa

SEQ ID NO: 10781 - RNA, 19 nt, Artificial
  Chemically synthesized
aaguugucaaaauccaugu

SEQ ID NO: 10782 - RNA, 19 nt, Artificial
  Chemically synthesized
aucacaagugcuaggcuug

SEQ ID NO: 10783 - RNA, 19 nt, Artificial
  Chemically synthesized
ugaauuccucaaagcccag

SEQ ID NO: 10784 - RNA, 19 nt, Artificial
  Chemically synthesized
ugggaguucacuacugcaa

SEQ ID NO: 10785 - RNA, 19 nt, Artificial
  Chemically synthesized
uauccaucacggccaccau

SEQ ID NO: 10786 - RNA, 19 nt, Artificial
  Chemically synthesized
auguucccacuuucaucug

SEQ ID NO: 10787 - RNA, 19 nt, Artificial
  Chemically synthesized
uccaugucaucuccagcca

SEQ ID NO: 10788 - RNA, 19 nt, Artificial
  Chemically synthesized
aucugaguagcgucggaug

SEQ ID NO: 10789 - RNA, 19 nt, Artificial
  Chemically synthesized
auggccugccaccuuuuga

SEQ ID NO: 10790 - RNA, 19 nt, Artificial
  Chemically synthesized
guccagugccaucuuuguc

SEQ ID NO: 10791 - RNA, 19 nt, Artificial
  Chemically synthesized
aacgaguuaaccaggaaca

SEQ ID NO: 10792 - RNA, 19 nt, Artificial
  Chemically synthesized
cuccaagcacauuucccag

SEQ ID NO: 10793 - RNA, 19 nt, Artificial
  Chemically synthesized
ucuucagaucagggugucg

SEQ ID NO: 10794 - RNA, 19 nt, Artificial
  Chemically synthesized
uggacagagcuuguuagag

SEQ ID NO: 10795 - RNA, 19 nt, Artificial
  Chemically synthesized
agugccaucuuugucaaga

SEQ ID NO: 10796 - RNA, 19 nt, Artificial
  Chemically synthesized
cugagagaacaaaagcuug

SEQ ID NO: 10797 - RNA, 19 nt, Artificial
  Chemically synthesized
aguucacuacugcaaaugg

SEQ ID NO: 10798 - RNA, 19 nt, Artificial
  Chemically synthesized
guuagaguguccuagagcc

SEQ ID NO: 10799 - RNA, 19 nt, Artificial
  Chemically synthesized
aagcuggguaacaaguacu

SEQ ID NO: 10800 - RNA, 19 nt, Artificial
  Chemically synthesized
gucaaaauccauguuccca

SEQ ID NO: 10801 - RNA, 19 nt, Artificial
  Chemically synthesized
ucaaugccaaaaccaucag

SEQ ID NO: 10802 - RNA, 19 nt, Artificial
  Chemically synthesized
augaaguugucaaaaucca

SEQ ID NO: 10803 - RNA, 19 nt, Artificial
  Chemically synthesized
ugucgaacuguuuguauau

SEQ ID NO: 10804 - RNA, 19 nt, Artificial
  Chemically synthesized
cuccaggugacuccuauag

SEQ ID NO: 10805 - RNA, 19 nt, Artificial
  Chemically synthesized
ugggagcagaauauagaca

SEQ ID NO: 10806 - RNA, 19 nt, Artificial
  Chemically synthesized
cauggaggcaucacaagug

SEQ ID NO: 10807 - RNA, 19 nt, Artificial
  Chemically synthesized
acugagagaacaaaagcuu

SEQ ID NO: 10808 - RNA, 19 nt, Artificial
  Chemically synthesized
acaaguacuugaauuccuc

SEQ ID NO: 10809 - RNA, 19 nt, Artificial
  Chemically synthesized
guagcgucggaugaucaug

SEQ ID NO: 10810 - RNA, 19 nt, Artificial
  Chemically synthesized
auauggccugccaccuuuu

SEQ ID NO: 10811 - RNA, 19 nt, Artificial
  Chemically synthesized
cuuuugauguuguuccaca

SEQ ID NO: 10812 - RNA, 19 nt, Artificial
  Chemically synthesized
cuacugcaaauggucccug

SEQ ID NO: 10813 - RNA, 19 nt, Artificial
  Chemically synthesized
agaauguucaugaguucug

SEQ ID NO: 10814 - RNA, 19 nt, Artificial
  Chemically synthesized
aguacugagagaacaaaag

SEQ ID NO: 10815 - RNA, 19 nt, Artificial
  Chemically synthesized
ccuccaagcacauuuccca

SEQ ID NO: 10816 - RNA, 19 nt, Artificial
  Chemically synthesized
ucagugucgaacuguuugu

SEQ ID NO: 10817 - RNA, 19 nt, Artificial
  Chemically synthesized
ucuuugucaagagauuuga

SEQ ID NO: 10818 - RNA, 19 nt, Artificial
  Chemically synthesized
guucccacuuucaucugag

SEQ ID NO: 10819 - RNA, 19 nt, Artificial
  Chemically synthesized
ugaccuccaugucaucucc

SEQ ID NO: 10820 - RNA, 19 nt, Artificial
  Chemically synthesized
cugaccuccaugucaucuc

SEQ ID NO: 10821 - RNA, 19 nt, Artificial
  Chemically synthesized
aaguacuugaauuccucaa

SEQ ID NO: 10822 - RNA, 19 nt, Artificial
  Chemically synthesized
augccaaaaccaucagucu

SEQ ID NO: 10823 - RNA, 19 nt, Artificial
  Chemically synthesized
ucaagagauuugaaggcac

SEQ ID NO: 10824 - RNA, 19 nt, Artificial
  Chemically synthesized
auuuguccagugccaucuu

SEQ ID NO: 10825 - RNA, 19 nt, Artificial
  Chemically synthesized
ugccaccuuuugauguugu

SEQ ID NO: 10826 - RNA, 19 nt, Artificial
  Chemically synthesized
uccuauagcaaggcaguga

SEQ ID NO: 10827 - RNA, 19 nt, Artificial
  Chemically synthesized
uguuauagagaugcucauu

SEQ ID NO: 10828 - RNA, 19 nt, Artificial
  Chemically synthesized
acuacugcaaauggucccu

SEQ ID NO: 10829 - RNA, 19 nt, Artificial
  Chemically synthesized
agagcuuguuagagugucc

SEQ ID NO: 10830 - RNA, 19 nt, Artificial
  Chemically synthesized
acuccuggauguucaccug

SEQ ID NO: 10831 - RNA, 19 nt, Artificial
  Chemically synthesized
agccacuccuggauguuca

SEQ ID NO: 10832 - RNA, 19 nt, Artificial
  Chemically synthesized
ucggucagugucgaacugu

SEQ ID NO: 10833 - RNA, 19 nt, Artificial
  Chemically synthesized
gccaaaaccaucagucuuc

SEQ ID NO: 10834 - RNA, 19 nt, Artificial
  Chemically synthesized
caggaauacauagucagcu

SEQ ID NO: 10835 - RNA, 19 nt, Artificial
  Chemically synthesized
caggccuccaagcacauuu

SEQ ID NO: 10836 - RNA, 19 nt, Artificial
  Chemically synthesized
accuggauuuguccagugc

SEQ ID NO: 10837 - RNA, 19 nt, Artificial
  Chemically synthesized
uguucccacuuucaucuga

SEQ ID NO: 10838 - RNA, 19 nt, Artificial
  Chemically synthesized
ucacucucguuggccucaa

SEQ ID NO: 10839 - RNA, 19 nt, Artificial
  Chemically synthesized
ugauguuguuccacaagua

SEQ ID NO: 10840 - RNA, 19 nt, Artificial
  Chemically synthesized
agcagaauauagacaaagg

SEQ ID NO: 10841 - RNA, 19 nt, Artificial
  Chemically synthesized
auuugaaggcacggaacau

SEQ ID NO: 10842 - RNA, 19 nt, Artificial
  Chemically synthesized
aaaccaucagucuucagau

SEQ ID NO: 10843 - RNA, 19 nt, Artificial
  Chemically synthesized
gggcauguuuauuuccucc

SEQ ID NO: 10844 - RNA, 19 nt, Artificial
  Chemically synthesized
guacugagagaacaaaagc

SEQ ID NO: 10845 - RNA, 19 nt, Artificial
  Chemically synthesized
ccaccuuuugauguuguuc

SEQ ID NO: 10846 - RNA, 19 nt, Artificial
  Chemically synthesized
ucccacuuucaucugagua

SEQ ID NO: 10847 - RNA, 19 nt, Artificial
  Chemically synthesized
ucugaguagcgucggauga

SEQ ID NO: 10848 - RNA, 19 nt, Artificial
  Chemically synthesized
uccaguucaggaauacaua

SEQ ID NO: 10849 - RNA, 19 nt, Artificial
  Chemically synthesized
cuggguaacaaguacugag

SEQ ID NO: 10850 - RNA, 19 nt, Artificial
  Chemically synthesized
aaaagcuugugggucagca

SEQ ID NO: 10851 - RNA, 19 nt, Artificial
  Chemically synthesized
cuguuuguauauggccugc

SEQ ID NO: 10852 - RNA, 19 nt, Artificial
  Chemically synthesized
accuccaugucaucuccag

SEQ ID NO: 10853 - RNA, 19 nt, Artificial
  Chemically synthesized
aacaaguacugagagaaca

SEQ ID NO: 10854 - RNA, 19 nt, Artificial
  Chemically synthesized
agucauccucccagaacug

SEQ ID NO: 10855 - RNA, 19 nt, Artificial
  Chemically synthesized
aggaauacauagucagcug

SEQ ID NO: 10856 - RNA, 19 nt, Artificial
  Chemically synthesized
agagaacaaaagcuugugg

SEQ ID NO: 10857 - RNA, 19 nt, Artificial
  Chemically synthesized
acaagugcuaggcuuggca

SEQ ID NO: 10858 - RNA, 19 nt, Artificial
  Chemically synthesized
aauacauagucagcugcag

SEQ ID NO: 10859 - RNA, 19 nt, Artificial
  Chemically synthesized
aaguacugagagaacaaaa

SEQ ID NO: 10860 - RNA, 19 nt, Artificial
  Chemically synthesized
uccuggauguucaccugga

SEQ ID NO: 10861 - RNA, 19 nt, Artificial
  Chemically synthesized
caagaacgaguuaaccagg

SEQ ID NO: 10862 - RNA, 19 nt, Artificial
  Chemically synthesized
caugugucaaugccaaaac

SEQ ID NO: 10863 - RNA, 19 nt, Artificial
  Chemically synthesized
uggccugccaccuuuugau

SEQ ID NO: 10864 - RNA, 19 nt, Artificial
  Chemically synthesized
aauggucccugaucgguca

SEQ ID NO: 10865 - RNA, 19 nt, Artificial
  Chemically synthesized
uguuccacaaguacuugaa

SEQ ID NO: 10866 - RNA, 19 nt, Artificial
  Chemically synthesized
cacaaccuuauugagaaug

SEQ ID NO: 10867 - RNA, 19 nt, Artificial
  Chemically synthesized
ucaccuggauuuguccagu

SEQ ID NO: 10868 - RNA, 19 nt, Artificial
  Chemically synthesized
guuguuccacaaguacuug

SEQ ID NO: 10869 - RNA, 19 nt, Artificial
  Chemically synthesized
acaaagaugugacugcaga

SEQ ID NO: 10870 - RNA, 19 nt, Artificial
  Chemically synthesized
ugaugaaguugucaaaauc

SEQ ID NO: 10871 - RNA, 19 nt, Artificial
  Chemically synthesized
agauuugaaggcacggaac

SEQ ID NO: 10872 - RNA, 19 nt, Artificial
  Chemically synthesized
aaaauccauguucccacuu

SEQ ID NO: 10873 - RNA, 19 nt, Artificial
  Chemically synthesized
uggguaacaaguacugaga

SEQ ID NO: 10874 - RNA, 19 nt, Artificial
  Chemically synthesized
caucagucuucagaucagg

SEQ ID NO: 10875 - RNA, 19 nt, Artificial
  Chemically synthesized
caagagauuugaaggcacg

SEQ ID NO: 10876 - RNA, 19 nt, Artificial
  Chemically synthesized
uggauuuguccagugccau

SEQ ID NO: 10877 - RNA, 19 nt, Artificial
  Chemically synthesized
gagaacaaaagcuuguggg

SEQ ID NO: 10878 - RNA, 19 nt, Artificial
  Chemically synthesized
agagauuugaaggcacgga

SEQ ID NO: 10879 - RNA, 19 nt, Artificial
  Chemically synthesized
gaacgaguuaaccaggaac

SEQ ID NO: 10880 - RNA, 19 nt, Artificial
  Chemically synthesized
acuccaggcagggcaaauu

SEQ ID NO: 10881 - RNA, 19 nt, Artificial
  Chemically synthesized
gauguuguuccacaaguac

SEQ ID NO: 10882 - RNA, 19 nt, Artificial
  Chemically synthesized
ggcauguuuauuuccuccu

SEQ ID NO: 10883 - RNA, 19 nt, Artificial
  Chemically synthesized
cauguuauagagaugcuca

SEQ ID NO: 10884 - RNA, 19 nt, Artificial
  Chemically synthesized
ucaggccuccaagcacauu

SEQ ID NO: 10885 - RNA, 19 nt, Artificial
  Chemically synthesized
agucuucagaucagggugu

SEQ ID NO: 10886 - RNA, 19 nt, Artificial
  Chemically synthesized
guacuugaauuccucaaag

SEQ ID NO: 10887 - RNA, 19 nt, Artificial
  Chemically synthesized
aagaacgaguuaaccagga

SEQ ID NO: 10888 - RNA, 19 nt, Artificial
  Chemically synthesized
aggccuccaagcacauuuc

SEQ ID NO: 10889 - RNA, 19 nt, Artificial
  Chemically synthesized
gcuuguuagaguguccuag

SEQ ID NO: 10890 - RNA, 19 nt, Artificial
  Chemically synthesized
cuccaguucaggaauacau

SEQ ID NO: 10891 - RNA, 19 nt, Artificial
  Chemically synthesized
cccacuuucaucugaguag

SEQ ID NO: 10892 - RNA, 19 nt, Artificial
  Chemically synthesized
caaauugggcccuggaugu

SEQ ID NO: 10893 - RNA, 19 nt, Artificial
  Chemically synthesized
ccacaaguacuugaauucc

SEQ ID NO: 10894 - RNA, 19 nt, Artificial
  Chemically synthesized
gcagaauauagacaaaggc

SEQ ID NO: 10895 - RNA, 19 nt, Artificial
  Chemically synthesized
aucagggugucgugucaca

SEQ ID NO: 10896 - RNA, 19 nt, Artificial
  Chemically synthesized
accugggaguucacuacug

SEQ ID NO: 10897 - RNA, 19 nt, Artificial
  Chemically synthesized
aagcagcugaugaaguugu

SEQ ID NO: 10898 - RNA, 19 nt, Artificial
  Chemically synthesized
caaagagucuccggaacug

SEQ ID NO: 10899 - RNA, 19 nt, Artificial
  Chemically synthesized
cgugucacaaccuuauuga

SEQ ID NO: 10900 - RNA, 19 nt, Artificial
  Chemically synthesized
auccucccagaacugagag

SEQ ID NO: 10901 - RNA, 19 nt, Artificial
  Chemically synthesized
guggugucgcuauccauca

SEQ ID NO: 10902 - RNA, 19 nt, Artificial
  Chemically synthesized
agcuggguaacaaguacug

SEQ ID NO: 10903 - RNA, 19 nt, Artificial
  Chemically synthesized
caccugggaguucacuacu

SEQ ID NO: 10904 - RNA, 19 nt, Artificial
  Chemically synthesized
guuggaguaaugugugcgu

SEQ ID NO: 10905 - RNA, 19 nt, Artificial
  Chemically synthesized
cgaguuaaccaggaacaug

SEQ ID NO: 10906 - RNA, 19 nt, Artificial
  Chemically synthesized
gcugaccuccaugucaucu

SEQ ID NO: 10907 - RNA, 19 nt, Artificial
  Chemically synthesized
gcauguuuauuuccuccug

SEQ ID NO: 10908 - RNA, 19 nt, Artificial
  Chemically synthesized
gaugaaguugucaaaaucc

SEQ ID NO: 10909 - RNA, 19 nt, Artificial
  Chemically synthesized
guauauggccugccaccuu

SEQ ID NO: 10910 - RNA, 19 nt, Artificial
  Chemically synthesized
acaaccuuauugagaaugu

SEQ ID NO: 10911 - RNA, 19 nt, Artificial
  Chemically synthesized
caaguacuugaauuccuca

SEQ ID NO: 10912 - RNA, 19 nt, Artificial
  Chemically synthesized
gagaugcucauucaggugg

SEQ ID NO: 10913 - RNA, 19 nt, Artificial
  Chemically synthesized
aucaggccuccaagcacau

SEQ ID NO: 10914 - RNA, 19 nt, Artificial
  Chemically synthesized
cagaauauagacaaaggca

SEQ ID NO: 10915 - RNA, 19 nt, Artificial
  Chemically synthesized
acauagucagcugcagcca

SEQ ID NO: 10916 - RNA, 19 nt, Artificial
  Chemically synthesized
guucacuacugcaaauggu

SEQ ID NO: 10917 - RNA, 19 nt, Artificial
  Chemically synthesized
acuuucaucugaguagcgu

SEQ ID NO: 10918 - RNA, 19 nt, Artificial
  Chemically synthesized
uucccacuuucaucugagu

SEQ ID NO: 10919 - RNA, 19 nt, Artificial
  Chemically synthesized
cagagcuuguuagaguguc

SEQ ID NO: 10920 - RNA, 19 nt, Artificial
  Chemically synthesized
cccacaaagaugugacugc

SEQ ID NO: 10921 - RNA, 19 nt, Artificial
  Chemically synthesized
cugccaccuuuugauguug

SEQ ID NO: 10922 - RNA, 19 nt, Artificial
  Chemically synthesized
cuuguuagaguguccuaga

SEQ ID NO: 10923 - RNA, 19 nt, Artificial
  Chemically synthesized
cgaacuguuuguauauggc

SEQ ID NO: 10924 - RNA, 19 nt, Artificial
  Chemically synthesized
acugcaaauggucccugau

SEQ ID NO: 10925 - RNA, 19 nt, Artificial
  Chemically synthesized
gagcagaauauagacaaag

SEQ ID NO: 10926 - RNA, 19 nt, Artificial
  Chemically synthesized
cugggaguucacuacugca

SEQ ID NO: 10927 - RNA, 19 nt, Artificial
  Chemically synthesized
accuuuugauguuguucca

SEQ ID NO: 10928 - RNA, 19 nt, Artificial
  Chemically synthesized
gagcuuguuagaguguccu

SEQ ID NO: 10929 - RNA, 19 nt, Artificial
  Chemically synthesized
aacaaaagcuuguggguca

SEQ ID NO: 10930 - RNA, 19 nt, Artificial
  Chemically synthesized
agcgucggaugaucauguu

SEQ ID NO: 10931 - RNA, 19 nt, Artificial
  Chemically synthesized
cacaaguacuugaauuccu

SEQ ID NO: 10932 - RNA, 19 nt, Artificial
  Chemically synthesized
uggaggcaucacaagugcu

SEQ ID NO: 10933 - RNA, 19 nt, Artificial
  Chemically synthesized
ggaauacauagucagcugc

SEQ ID NO: 10934 - RNA, 19 nt, Artificial
  Chemically synthesized
gaucggucagugucgaacu

SEQ ID NO: 10935 - RNA, 19 nt, Artificial
  Chemically synthesized
caaagaugugacugcagac

SEQ ID NO: 10936 - RNA, 19 nt, Artificial
  Chemically synthesized
acaaguacugagagaacaa

SEQ ID NO: 10937 - RNA, 19 nt, Artificial
  Chemically synthesized
guucaggaauacauaguca

SEQ ID NO: 10938 - RNA, 19 nt, Artificial
  Chemically synthesized
aucggucagugucgaacug

SEQ ID NO: 10939 - RNA, 19 nt, Artificial
  Chemically synthesized
cuggauguucaccuggauu

SEQ ID NO: 10940 - RNA, 19 nt, Artificial
  Chemically synthesized
aguagcgucggaugaucau

SEQ ID NO: 10941 - RNA, 19 nt, Artificial
  Chemically synthesized
caguucaggaauacauagu

SEQ ID NO: 10942 - RNA, 19 nt, Artificial
  Chemically synthesized
guuggccucaauguuggag

SEQ ID NO: 10943 - RNA, 19 nt, Artificial
  Chemically synthesized
uguugagaagcuggguaac

SEQ ID NO: 10944 - RNA, 19 nt, Artificial
  Chemically synthesized
uggugucgcuauccaucac

SEQ ID NO: 10945 - RNA, 19 nt, Artificial
  Chemically synthesized
cucucguuggccucaaugu

SEQ ID NO: 10946 - RNA, 19 nt, Artificial
  Chemically synthesized
gaacaaaagcuuguggguc

SEQ ID NO: 10947 - RNA, 19 nt, Artificial
  Chemically synthesized
gugucaaugccaaaaccau

SEQ ID NO: 10948 - RNA, 19 nt, Artificial
  Chemically synthesized
acaugugucaaugccaaaa

SEQ ID NO: 10949 - RNA, 19 nt, Artificial
  Chemically synthesized
cguggacagagcuuguuag

SEQ ID NO: 10950 - RNA, 19 nt, Artificial
  Chemically synthesized
gucggaugaucauguuaua

SEQ ID NO: 10951 - RNA, 19 nt, Artificial
  Chemically synthesized
gucgaacuguuuguauaug

SEQ ID NO: 10952 - RNA, 19 nt, Artificial
  Chemically synthesized
cucaauguuggaguaaugu

SEQ ID NO: 10953 - RNA, 19 nt, Artificial
  Chemically synthesized
auuccucaaagcccagcuu

SEQ ID NO: 10954 - RNA, 19 nt, Artificial
  Chemically synthesized
aggcaucacaagugcuagg

SEQ ID NO: 10955 - RNA, 19 nt, Artificial
  Chemically synthesized
gcgucggaugaucauguua

SEQ ID NO: 10956 - RNA, 19 nt, Artificial
  Chemically synthesized
ccacuuucaucugaguagc

SEQ ID NO: 10957 - RNA, 19 nt, Artificial
  Chemically synthesized
aagugcuaggcuuggcaca

SEQ ID NO: 10958 - RNA, 19 nt, Artificial
  Chemically synthesized
agagaugcucauucaggug

SEQ ID NO: 10959 - RNA, 19 nt, Artificial
  Chemically synthesized
ccuggauguugagaagcug

SEQ ID NO: 10960 - RNA, 19 nt, Artificial
  Chemically synthesized
ugacuccuauagcaaggca

SEQ ID NO: 10961 - RNA, 19 nt, Artificial
  Chemically synthesized
guucaugaguucuguggcg

SEQ ID NO: 10962 - RNA, 19 nt, Artificial
  Chemically synthesized
ugcugcgacaugugucaau

SEQ ID NO: 10963 - RNA, 19 nt, Artificial
  Chemically synthesized
guaacaaguacugagagaa

SEQ ID NO: 10964 - RNA, 19 nt, Artificial
  Chemically synthesized
ugaugacuccgccuaggau

SEQ ID NO: 10965 - RNA, 19 nt, Artificial
  Chemically synthesized
ucaaaggcaccugggaguu

SEQ ID NO: 10966 - RNA, 19 nt, Artificial
  Chemically synthesized
caaauggucccugaucggu

SEQ ID NO: 10967 - RNA, 19 nt, Artificial
  Chemically synthesized
agaugugacugcagacagg

SEQ ID NO: 10968 - RNA, 19 nt, Artificial
  Chemically synthesized
aggugacuccuauagcaag

SEQ ID NO: 10969 - RNA, 19 nt, Artificial
  Chemically synthesized
gcgacaugugucaaugcca

SEQ ID NO: 10970 - RNA, 19 nt, Artificial
  Chemically synthesized
guucaccuggauuugucca

SEQ ID NO: 10971 - RNA, 19 nt, Artificial
  Chemically synthesized
cuggauuuguccagugcca

SEQ ID NO: 10972 - RNA, 19 nt, Artificial
  Chemically synthesized
gaguagcgucggaugauca

SEQ ID NO: 10973 - RNA, 19 nt, Artificial
  Chemically synthesized
aaauugggcccuggauguu

SEQ ID NO: 10974 - RNA, 19 nt, Artificial
  Chemically synthesized
ugaccaagcagcugaugaa

SEQ ID NO: 10975 - RNA, 19 nt, Artificial
  Chemically synthesized
ccuuuugauguuguuccac

SEQ ID NO: 10976 - RNA, 19 nt, Artificial
  Chemically synthesized
guuuguauauggccugcca

SEQ ID NO: 10977 - RNA, 19 nt, Artificial
  Chemically synthesized
augugacugcagacaggau

SEQ ID NO: 10978 - RNA, 19 nt, Artificial
  Chemically synthesized
cagucuucagaucagggug

SEQ ID NO: 10979 - RNA, 19 nt, Artificial
  Chemically synthesized
gugucgugucacaaccuua

SEQ ID NO: 10980 - RNA, 19 nt, Artificial
  Chemically synthesized
aacuccaggcagggcaaau

SEQ ID NO: 10981 - RNA, 19 nt, Artificial
  Chemically synthesized
gucauccucccagaacuga

SEQ ID NO: 10982 - RNA, 19 nt, Artificial
  Chemically synthesized
guuaaccaggaacauggcu

SEQ ID NO: 10983 - RNA, 19 nt, Artificial
  Chemically synthesized
gugucgaacuguuuguaua

SEQ ID NO: 10984 - RNA, 19 nt, Artificial
  Chemically synthesized
gcaaagagucuccggaacu

SEQ ID NO: 10985 - RNA, 19 nt, Artificial
  Chemically synthesized
acuccuauagcaaggcagu

SEQ ID NO: 10986 - RNA, 19 nt, Artificial
  Chemically synthesized
gaauacauagucagcugca

SEQ ID NO: 10987 - RNA, 19 nt, Artificial
  Chemically synthesized
gauguugagaagcugggua

SEQ ID NO: 10988 - RNA, 19 nt, Artificial
  Chemically synthesized
uagcaaccgugaagggugu

SEQ ID NO: 10989 - RNA, 19 nt, Artificial
  Chemically synthesized
gucacaaccuuauugagaa

SEQ ID NO: 10990 - RNA, 19 nt, Artificial
  Chemically synthesized
gagauuugaaggcacggaa

SEQ ID NO: 10991 - RNA, 19 nt, Artificial
  Chemically synthesized
cugggagcagaauauagac

SEQ ID NO: 10992 - RNA, 19 nt, Artificial
  Chemically synthesized
gaugugacugcagacagga

SEQ ID NO: 10993 - RNA, 19 nt, Artificial
  Chemically synthesized
gauuugaaggcacggaaca

SEQ ID NO: 10994 - RNA, 19 nt, Artificial
  Chemically synthesized
ccuauagcaaggcagugag

SEQ ID NO: 10995 - RNA, 19 nt, Artificial
  Chemically synthesized
ggugacuccuauagcaagg

SEQ ID NO: 10996 - RNA, 19 nt, Artificial
  Chemically synthesized
cugcgacaugugucaaugc

SEQ ID NO: 10997 - RNA, 19 nt, Artificial
  Chemically synthesized
gaggcaucacaagugcuag

SEQ ID NO: 10998 - RNA, 19 nt, Artificial
  Chemically synthesized
caccuggauuuguccagug

SEQ ID NO: 10999 - RNA, 19 nt, Artificial
  Chemically synthesized
accaugcugcgacaugugu

SEQ ID NO: 11000 - RNA, 19 nt, Artificial
  Chemically synthesized
cuccuauagcaaggcagug

SEQ ID NO: 11001 - RNA, 19 nt, Artificial
  Chemically synthesized
caaaauccauguucccacu

SEQ ID NO: 11002 - RNA, 19 nt, Artificial
  Chemically synthesized
ccaggugacuccuauagca

SEQ ID NO: 11003 - RNA, 19 nt, Artificial
  Chemically synthesized
gacuccuauagcaaggcag

SEQ ID NO: 11004 - RNA, 19 nt, Artificial
  Chemically synthesized
augcugcgacaugugucaa

SEQ ID NO: 11005 - RNA, 19 nt, Artificial
  Chemically synthesized
gucgugucacaaccuuauu

SEQ ID NO: 11006 - RNA, 19 nt, Artificial
  Chemically synthesized
cuguggugucgcuauccau

SEQ ID NO: 11007 - RNA, 19 nt, Artificial
  Chemically synthesized
caugcugcgacauguguca

SEQ ID NO: 11008 - RNA, 19 nt, Artificial
  Chemically synthesized
gaauauagacaaaggcacu

SEQ ID NO: 11009 - RNA, 19 nt, Artificial
  Chemically synthesized
gccugccaccuuuugaugu

SEQ ID NO: 11010 - RNA, 19 nt, Artificial
  Chemically synthesized
cugaccaagcagcugauga

SEQ ID NO: 11011 - RNA, 19 nt, Artificial
  Chemically synthesized
gcugcgacaugugucaaug

SEQ ID NO: 11012 - RNA, 19 nt, Artificial
  Chemically synthesized
aguacuugaauuccucaaa

SEQ ID NO: 11013 - RNA, 19 nt, Artificial
  Chemically synthesized
gucuucagaucaggguguc

SEQ ID NO: 11014 - RNA, 19 nt, Artificial
  Chemically synthesized
acagagcuuguuagagugu

SEQ ID NO: 11015 - RNA, 19 nt, Artificial
  Chemically synthesized
gaguucacuacugcaaaug

SEQ ID NO: 11016 - RNA, 19 nt, Artificial
  Chemically synthesized
gagucauccucccagaacu

SEQ ID NO: 11017 - RNA, 19 nt, Artificial
  Chemically synthesized
ccaucagucuucagaucag

SEQ ID NO: 11018 - RNA, 19 nt, Artificial
  Chemically synthesized
caagcagcugaugaaguug

SEQ ID NO: 11019 - RNA, 19 nt, Artificial
  Chemically synthesized
ggauuuguccagugccauc

SEQ ID NO: 11020 - RNA, 19 nt, Artificial
  Chemically synthesized
ucaucugaguagcgucgga

SEQ ID NO: 11021 - RNA, 19 nt, Artificial
  Chemically synthesized
caucuuugucaagagauuu

SEQ ID NO: 11022 - RNA, 19 nt, Artificial
  Chemically synthesized
ggcugggagcagaauauag

SEQ ID NO: 11023 - RNA, 19 nt, Artificial
  Chemically synthesized
agaagcuggguaacaagua

SEQ ID NO: 11024 - RNA, 19 nt, Artificial
  Chemically synthesized
caaugccaaaaccaucagu

SEQ ID NO: 11025 - RNA, 19 nt, Artificial
  Chemically synthesized
aguugucaaaauccauguu

SEQ ID NO: 11026 - RNA, 19 nt, Artificial
  Chemically synthesized
cucauucagguggaacccu

SEQ ID NO: 11027 - RNA, 19 nt, Artificial
  Chemically synthesized
aguuaaccaggaacauggc

SEQ ID NO: 11028 - RNA, 19 nt, Artificial
  Chemically synthesized
gugacuccuauagcaaggc

SEQ ID NO: 11029 - RNA, 19 nt, Artificial
  Chemically synthesized
ugccaucuuugucaagaga

SEQ ID NO: 11030 - RNA, 19 nt, Artificial
  Chemically synthesized
gcugggagcagaauauaga

SEQ ID NO: 11031 - RNA, 19 nt, Artificial
  Chemically synthesized
agugucgaacuguuuguau

SEQ ID NO: 11032 - RNA, 19 nt, Artificial
  Chemically synthesized
gcauggaggcaucacaagu

SEQ ID NO: 11033 - RNA, 19 nt, Artificial
  Chemically synthesized
uggagucauccucccagaa

SEQ ID NO: 11034 - RNA, 19 nt, Artificial
  Chemically synthesized
gaagcuggguaacaaguac

SEQ ID NO: 11035 - RNA, 19 nt, Artificial
  Chemically synthesized
caaaaccaucagucuucag

SEQ ID NO: 11036 - RNA, 19 nt, Artificial
  Chemically synthesized
gagaauguucaugaguucu

SEQ ID NO: 11037 - RNA, 19 nt, Artificial
  Chemically synthesized
gacagagcuuguuagagug

SEQ ID NO: 11038 - RNA, 19 nt, Artificial
  Chemically synthesized
acgaguuaaccaggaacau

SEQ ID NO: 11039 - RNA, 19 nt, Artificial
  Chemically synthesized
caucugaguagcgucggau

SEQ ID NO: 11040 - RNA, 19 nt, Artificial
  Chemically synthesized
uccucccagaacugagaga

SEQ ID NO: 11041 - RNA, 19 nt, Artificial
  Chemically synthesized
gauguucaccuggauuugu

SEQ ID NO: 11042 - RNA, 19 nt, Artificial
  Chemically synthesized
agcagcugaugaaguuguc

SEQ ID NO: 11043 - RNA, 19 nt, Artificial
  Chemically synthesized
guugagaagcuggguaaca

SEQ ID NO: 11044 - RNA, 19 nt, Artificial
  Chemically synthesized
agaacaaaagcuugugggu

SEQ ID NO: 11045 - RNA, 19 nt, Artificial
  Chemically synthesized
gugucacaaccuuauugag

SEQ ID NO: 11046 - RNA, 19 nt, Artificial
  Chemically synthesized
acaaaagcuugugggucag

SEQ ID NO: 11047 - RNA, 19 nt, Artificial
  Chemically synthesized
ccucaauguuggaguaaug

SEQ ID NO: 11048 - RNA, 19 nt, Artificial
  Chemically synthesized
caggcugggagcagaauau

SEQ ID NO: 11049 - RNA, 19 nt, Artificial
  Chemically synthesized
gcuccaggugacuccuaua

SEQ ID NO: 11050 - RNA, 19 nt, Artificial
  Chemically synthesized
gggagcagaauauagacaa

SEQ ID NO: 11051 - RNA, 19 nt, Artificial
  Chemically synthesized
ccaaaaccaucagucuuca

SEQ ID NO: 11052 - RNA, 19 nt, Artificial
  Chemically synthesized
guggacagagcuuguuaga

SEQ ID NO: 11053 - RNA, 19 nt, Artificial
  Chemically synthesized
ucacaaccuuauugagaau

SEQ ID NO: 11054 - RNA, 19 nt, Artificial
  Chemically synthesized
ccaguucaggaauacauag

SEQ ID NO: 11055 - RNA, 19 nt, Artificial
  Chemically synthesized
cacaaagaugugacugcag

SEQ ID NO: 11056 - RNA, 19 nt, Artificial
  Chemically synthesized
cuauagcaaggcagugagg

SEQ ID NO: 11057 - RNA, 19 nt, Artificial
  Chemically synthesized
ggauguucaccuggauuug

SEQ ID NO: 11058 - RNA, 19 nt, Artificial
  Chemically synthesized
accaagcagcugaugaagu

SEQ ID NO: 11059 - RNA, 19 nt, Artificial
  Chemically synthesized
gagaagcuggguaacaagu

SEQ ID NO: 11060 - RNA, 19 nt, Artificial
  Chemically synthesized
agaucagggugucguguca

SEQ ID NO: 11061 - RNA, 19 nt, Artificial
  Chemically synthesized
gagagaacaaaagcuugug

SEQ ID NO: 11062 - RNA, 19 nt, Artificial
  Chemically synthesized
cacuuucaucugaguagcg

SEQ ID NO: 11063 - RNA, 19 nt, Artificial
  Chemically synthesized
ggucagugucgaacuguuu

SEQ ID NO: 11064 - RNA, 19 nt, Artificial
  Chemically synthesized
cggucagugucgaacuguu

SEQ ID NO: 11065 - RNA, 19 nt, Artificial
  Chemically synthesized
ccugccaccuuuugauguu

SEQ ID NO: 11066 - RNA, 19 nt, Artificial
  Chemically synthesized
cauccucccagaacugaga

SEQ ID NO: 11067 - RNA, 19 nt, Artificial
  Chemically synthesized
gcuccaguucaggaauaca

SEQ ID NO: 11068 - RNA, 19 nt, Artificial
  Chemically synthesized
agcuuguuagaguguccua

SEQ ID NO: 11069 - RNA, 19 nt, Artificial
  Chemically synthesized
aggcugggagcagaauaua

SEQ ID NO: 11070 - RNA, 19 nt, Artificial
  Chemically synthesized
gugccaucuuugucaagag

SEQ ID NO: 11071 - RNA, 19 nt, Artificial
  Chemically synthesized
ccguggacagagcuuguua

SEQ ID NO: 11072 - RNA, 19 nt, Artificial
  Chemically synthesized
gaccaagcagcugaugaag

SEQ ID NO: 11073 - RNA, 19 nt, Artificial
  Chemically synthesized
cagugccaucuuugucaag

SEQ ID NO: 11074 - RNA, 19 nt, Artificial
  Chemically synthesized
gcugaugaaguugucaaaa

SEQ ID NO: 11075 - RNA, 19 nt, Artificial
  Chemically synthesized
caaaagcuugugggucagc

SEQ ID NO: 11076 - RNA, 19 nt, Artificial
  Chemically synthesized
gcuggguaacaaguacuga

SEQ ID NO: 11077 - RNA, 19 nt, Artificial
  Chemically synthesized
gaccuccaugucaucucca

SEQ ID NO: 11078 - RNA, 19 nt, Artificial
  Chemically synthesized
cugaguagcgucggaugau

SEQ ID NO: 11079 - RNA, 19 nt, Artificial
  Chemically synthesized
agaugcucauucaggugga

SEQ ID NO: 11080 - RNA, 19 nt, Artificial
  Chemically synthesized
gccaucuuugucaagagau

SEQ ID NO: 11081 - RNA, 19 nt, Artificial
  Chemically synthesized
agaacgaguuaaccaggaa

SEQ ID NO: 11082 - RNA, 19 nt, Artificial
  Chemically synthesized
caggugacuccuauagcaa

SEQ ID NO: 11083 - RNA, 19 nt, Artificial
  Chemically synthesized
gucaagagauuugaaggca

SEQ ID NO: 11084 - RNA, 19 nt, Artificial
  Chemically synthesized
ggaggcaucacaagugcua

SEQ ID NO: 11085 - RNA, 19 nt, Artificial
  Chemically synthesized
agcugaugaaguugucaaa

SEQ ID NO: 11086 - RNA, 19 nt, Artificial
  Chemically synthesized
guuccacaaguacuugaau

SEQ ID NO: 11087 - RNA, 19 nt, Artificial
  Chemically synthesized
cagcugaugaaguugucaa

SEQ ID NO: 11088 - RNA, 19 nt, Artificial
  Chemically synthesized
cugaugaaguugucaaaau

SEQ ID NO: 11089 - RNA, 19 nt, Artificial
  Chemically synthesized
caaccuuauugagaauguu

SEQ ID NO: 11090 - RNA, 19 nt, Artificial
  Chemically synthesized
cccuggauguugagaagcu

SEQ ID NO: 11091 - RNA, 19 nt, Artificial
  Chemically synthesized
ccacaaagaugugacugca

SEQ ID NO: 11092 - RNA, 19 nt, Artificial
  Chemically synthesized
cuuugucaagagauuugaa

SEQ ID NO: 11093 - RNA, 19 nt, Artificial
  Chemically synthesized
ggacagagcuuguuagagu

SEQ ID NO: 11094 - RNA, 19 nt, Artificial
  Chemically synthesized
ggauguugagaagcugggu

SEQ ID NO: 11095 - RNA, 19 nt, Artificial
  Chemically synthesized
ggugucgugucacaaccuu

SEQ ID NO: 11096 - RNA, 19 nt, Artificial
  Chemically synthesized
cgacaugugucaaugccaa

SEQ ID NO: 11097 - RNA, 19 nt, Artificial
  Chemically synthesized
uggccucaauguuggagua

SEQ ID NO: 11098 - RNA, 19 nt, Artificial
  Chemically synthesized
cugaucggucagugucgaa

SEQ ID NO: 11099 - RNA, 19 nt, Artificial
  Chemically synthesized
ccagugccaucuuugucaa

SEQ ID NO: 11100 - RNA, 19 nt, Artificial
  Chemically synthesized
cagugucgaacuguuugua

SEQ ID NO: 11101 - RNA, 19 nt, Artificial
  Chemically synthesized
gccaccuuuugauguuguu

SEQ ID NO: 11102 - RNA, 19 nt, Artificial
  Chemically synthesized
cacucucguuggccucaau

SEQ ID NO: 11103 - RNA, 19 nt, Artificial
  Chemically synthesized
gggaguucacuacugcaaa

SEQ ID NO: 11104 - RNA, 19 nt, Artificial
  Chemically synthesized
ccaagcagcugaugaaguu

SEQ ID NO: 11105 - RNA, 19 nt, Artificial
  Chemically synthesized
ccuuauugagaauguucau

SEQ ID NO: 11106 - RNA, 19 nt, Artificial
  Chemically synthesized
ggcuccaguucaggaauac

SEQ ID NO: 11107 - RNA, 19 nt, Artificial
  Chemically synthesized
ccaucuuugucaagagauu

SEQ ID NO: 11108 - RNA, 19 nt, Artificial
  Chemically synthesized
ccuggauguucaccuggau

SEQ ID NO: 11109 - RNA, 19 nt, Artificial
  Chemically synthesized
gcagcugaugaaguuguca

SEQ ID NO: 11110 - RNA, 19 nt, Artificial
  Chemically synthesized
ggguaacaaguacugagag

SEQ ID NO: 11111 - RNA, 19 nt, Artificial
  Chemically synthesized
gacaugugucaaugccaaa

SEQ ID NO: 11112 - RNA, 19 nt, Artificial
  Chemically synthesized
gcaucacaagugcuaggcu

SEQ ID NO: 11113 - RNA, 19 nt, Artificial
  Chemically synthesized
gccucaauguuggaguaau

SEQ ID NO: 11114 - RNA, 19 nt, Artificial
  Chemically synthesized
gguaacaaguacugagaga

SEQ ID NO: 11115 - RNA, 19 nt, Artificial
  Chemically synthesized
cguuggccucaauguugga

SEQ ID NO: 11116 - RNA, 19 nt, Artificial
  Chemically synthesized
ggaguucacuacugcaaau

SEQ ID NO: 11117 - RNA, 19 nt, Artificial
  Chemically synthesized
ggagcagaauauagacaaa

SEQ ID NO: 11118 - RNA, 19 nt, Artificial
  Chemically synthesized
gggcuccaguucaggaaua

SEQ ID NO: 11119 - RNA, 19 nt, Artificial
  Chemically synthesized
gaugcucauucagguggaa

SEQ ID NO: 11120 - RNA, 19 nt, Artificial
  Chemically synthesized
ggccucaauguuggaguaa

SEQ ID NO: 11121 - RNA, 21 nt, Artificial
  Chemically synthesized
cucuauaacaugaucauccga

SEQ ID NO: 11122 - RNA, 21 nt, Artificial
  Chemically synthesized
ccauguuccgugccuucaaau

SEQ ID NO: 11123 - RNA, 21 nt, Artificial
  Chemically synthesized
ccugguuaacucguucuugaa

SEQ ID NO: 11124 - RNA, 21 nt, Artificial
  Chemically synthesized
ccugaaugagcaucucuauaa

SEQ ID NO: 11125 - RNA, 21 nt, Artificial
  Chemically synthesized
gcaucucuauaacaugaucau

SEQ ID NO: 11126 - RNA, 21 nt, Artificial
  Chemically synthesized
ccaacauugaggccaacgaga

SEQ ID NO: 11127 - RNA, 21 nt, Artificial
  Chemically synthesized
ggaauucaaguacuuguggaa

SEQ ID NO: 11128 - RNA, 21 nt, Artificial
  Chemically synthesized
gggaccauuugcaguagugaa

SEQ ID NO: 11129 - RNA, 21 nt, Artificial
  Chemically synthesized
agaugaaagugggaacaugga

SEQ ID NO: 11130 - RNA, 21 nt, Artificial
  Chemically synthesized
ccaggcccaggaggaaauaaa

SEQ ID NO: 11131 - RNA, 21 nt, Artificial
  Chemically synthesized
gacaaagauggcacuggacaa

SEQ ID NO: 11132 - RNA, 21 nt, Artificial
  Chemically synthesized
cacacauuacuccaacauuga

SEQ ID NO: 11133 - RNA, 21 nt, Artificial
  Chemically synthesized
gacacgacacccugaucugaa

SEQ ID NO: 11134 - RNA, 21 nt, Artificial
  Chemically synthesized
agguggcaggccauauacaaa

SEQ ID NO: 11135 - RNA, 21 nt, Artificial
  Chemically synthesized
ugagcaucucuauaacaugau

SEQ ID NO: 11136 - RNA, 21 nt, Artificial
  Chemically synthesized
acuuguggaacaacaucaaaa

SEQ ID NO: 11137 - RNA, 21 nt, Artificial
  Chemically synthesized
ggcccaggaggaaauaaacau

SEQ ID NO: 11138 - RNA, 21 nt, Artificial
  Chemically synthesized
ccaccugaaugagcaucucua

SEQ ID NO: 11139 - RNA, 21 nt, Artificial
  Chemically synthesized
ucuauaacaugaucauccgac

SEQ ID NO: 11140 - RNA, 21 nt, Artificial
  Chemically synthesized
caauaagguugugacacgaca

SEQ ID NO: 11141 - RNA, 21 nt, Artificial
  Chemically synthesized
cagcugacuauguauuccuga

SEQ ID NO: 11142 - RNA, 21 nt, Artificial
  Chemically synthesized
cgcagccauguuccugguuaa

SEQ ID NO: 11143 - RNA, 21 nt, Artificial
  Chemically synthesized
ccauauacaaacaguucgaca

SEQ ID NO: 11144 - RNA, 21 nt, Artificial
  Chemically synthesized
gugggaacauggauuuugaca

SEQ ID NO: 11145 - RNA, 21 nt, Artificial
  Chemically synthesized
gaugaaagugggaacauggau

SEQ ID NO: 11146 - RNA, 21 nt, Artificial
  Chemically synthesized
aaagguggcaggccauauaca

SEQ ID NO: 11147 - RNA, 21 nt, Artificial
  Chemically synthesized
caaguacuuguggaacaacau

SEQ ID NO: 11148 - RNA, 21 nt, Artificial
  Chemically synthesized
gcuacucagaugaaaguggga

SEQ ID NO: 11149 - RNA, 21 nt, Artificial
  Chemically synthesized
caaagauggcacuggacaaau

SEQ ID NO: 11150 - RNA, 21 nt, Artificial
  Chemically synthesized
ccuggcucuaggacacucuaa

SEQ ID NO: 11151 - RNA, 21 nt, Artificial
  Chemically synthesized
cgauccugucugcagucacau

SEQ ID NO: 11152 - RNA, 21 nt, Artificial
  Chemically synthesized
gaugguuuuggcauugacaca

SEQ ID NO: 11153 - RNA, 21 nt, Artificial
  Chemically synthesized
acauggauuuugacaacuuca

SEQ ID NO: 11154 - RNA, 21 nt, Artificial
  Chemically synthesized
gccauguuccgugccuucaaa

SEQ ID NO: 11155 - RNA, 21 nt, Artificial
  Chemically synthesized
gacugaugguuuuggcauuga

SEQ ID NO: 11156 - RNA, 21 nt, Artificial
  Chemically synthesized
cuauaacaugaucauccgacg

SEQ ID NO: 11157 - RNA, 21 nt, Artificial
  Chemically synthesized
agcugacuauguauuccugaa

SEQ ID NO: 11158 - RNA, 21 nt, Artificial
  Chemically synthesized
gggcuuugaggaauucaagua

SEQ ID NO: 11159 - RNA, 21 nt, Artificial
  Chemically synthesized
ggcucuaggacacucuaacaa

SEQ ID NO: 11160 - RNA, 21 nt, Artificial
  Chemically synthesized
cacuggacaaauccaggugaa

SEQ ID NO: 11161 - RNA, 21 nt, Artificial
  Chemically synthesized
gaaugagcaucucuauaacau

SEQ ID NO: 11162 - RNA, 21 nt, Artificial
  Chemically synthesized
caagcuuuuguucucucagua

SEQ ID NO: 11163 - RNA, 21 nt, Artificial
  Chemically synthesized
gcugggcuuugaggaauucaa

SEQ ID NO: 11164 - RNA, 21 nt, Artificial
  Chemically synthesized
guacuuguggaacaacaucaa

SEQ ID NO: 11165 - RNA, 21 nt, Artificial
  Chemically synthesized
cccacgcacacauuacuccaa

SEQ ID NO: 11166 - RNA, 21 nt, Artificial
  Chemically synthesized
ugacaaagauggcacuggaca

SEQ ID NO: 11167 - RNA, 21 nt, Artificial
  Chemically synthesized
ggccauauacaaacaguucga

SEQ ID NO: 11168 - RNA, 21 nt, Artificial
  Chemically synthesized
caaaagguggcaggccauaua

SEQ ID NO: 11169 - RNA, 21 nt, Artificial
  Chemically synthesized
acuuguuacccagcuucucaa

SEQ ID NO: 11170 - RNA, 21 nt, Artificial
  Chemically synthesized
aagguggcaggccauauacaa

SEQ ID NO: 11171 - RNA, 21 nt, Artificial
  Chemically synthesized
ugaaugagcaucucuauaaca

SEQ ID NO: 11172 - RNA, 21 nt, Artificial
  Chemically synthesized
cauggauuuugacaacuucau

SEQ ID NO: 11173 - RNA, 21 nt, Artificial
  Chemically synthesized
gccuucaaaucucuugacaaa

SEQ ID NO: 11174 - RNA, 21 nt, Artificial
  Chemically synthesized
ugggaacauggauuuugacaa

SEQ ID NO: 11175 - RNA, 21 nt, Artificial
  Chemically synthesized
cacgcacacauuacuccaaca

SEQ ID NO: 11176 - RNA, 21 nt, Artificial
  Chemically synthesized
ccacaagcuuuuguucucuca

SEQ ID NO: 11177 - RNA, 21 nt, Artificial
  Chemically synthesized
gaucagggaccauuugcagua

SEQ ID NO: 11178 - RNA, 21 nt, Artificial
  Chemically synthesized
caucaaaagguggcaggccau

SEQ ID NO: 11179 - RNA, 21 nt, Artificial
  Chemically synthesized
agcaucucuauaacaugauca

SEQ ID NO: 11180 - RNA, 21 nt, Artificial
  Chemically synthesized
aguacuuguggaacaacauca

SEQ ID NO: 11181 - RNA, 21 nt, Artificial
  Chemically synthesized
gaacauggauuuugacaacuu

SEQ ID NO: 11182 - RNA, 21 nt, Artificial
  Chemically synthesized
gaaaugugcuuggaggccuga

SEQ ID NO: 11183 - RNA, 21 nt, Artificial
  Chemically synthesized
accugaaugagcaucucuaua

SEQ ID NO: 11184 - RNA, 21 nt, Artificial
  Chemically synthesized
guggcugcagcugacuaugua

SEQ ID NO: 11185 - RNA, 21 nt, Artificial
  Chemically synthesized
ugaagacugaugguuuuggca

SEQ ID NO: 11186 - RNA, 21 nt, Artificial
  Chemically synthesized
acaugaucauccgacgcuacu

SEQ ID NO: 11187 - RNA, 21 nt, Artificial
  Chemically synthesized
gcaggccauauacaaacaguu

SEQ ID NO: 11188 - RNA, 21 nt, Artificial
  Chemically synthesized
cccagugccuuugucuauauu

SEQ ID NO: 11189 - RNA, 21 nt, Artificial
  Chemically synthesized
caauuugcccugccuggaguu

SEQ ID NO: 11190 - RNA, 21 nt, Artificial
  Chemically synthesized
cugaugguuuuggcauugaca

SEQ ID NO: 11191 - RNA, 21 nt, Artificial
  Chemically synthesized
agcugggcuuugaggaauuca

SEQ ID NO: 11192 - RNA, 21 nt, Artificial
  Chemically synthesized
cagcgccacagaacucaugaa

SEQ ID NO: 11193 - RNA, 21 nt, Artificial
  Chemically synthesized
gcuuuuguucucucaguacuu

SEQ ID NO: 11194 - RNA, 21 nt, Artificial
  Chemically synthesized
aggcccaggaggaaauaaaca

SEQ ID NO: 11195 - RNA, 21 nt, Artificial
  Chemically synthesized
cuuugaggaauucaaguacuu

SEQ ID NO: 11196 - RNA, 21 nt, Artificial
  Chemically synthesized
gaagacugaugguuuuggcau

SEQ ID NO: 11197 - RNA, 21 nt, Artificial
  Chemically synthesized
ggaacauggauuuugacaacu

SEQ ID NO: 11198 - RNA, 21 nt, Artificial
  Chemically synthesized
cauugaggccaacgagaguga

SEQ ID NO: 11199 - RNA, 21 nt, Artificial
  Chemically synthesized
ccauguuccugguuaacucgu

SEQ ID NO: 11200 - RNA, 21 nt, Artificial
  Chemically synthesized
cgaucagggaccauuugcagu

SEQ ID NO: 11201 - RNA, 21 nt, Artificial
  Chemically synthesized
ggaccauuugcaguagugaac

SEQ ID NO: 11202 - RNA, 21 nt, Artificial
  Chemically synthesized
ggguuccaccugaaugagcau

SEQ ID NO: 11203 - RNA, 21 nt, Artificial
  Chemically synthesized
ucucuauaacaugaucauccg

SEQ ID NO: 11204 - RNA, 21 nt, Artificial
  Chemically synthesized
cucucaguucugggaggauga

SEQ ID NO: 11205 - RNA, 21 nt, Artificial
  Chemically synthesized
cacgacacccugaucugaaga

SEQ ID NO: 11206 - RNA, 21 nt, Artificial
  Chemically synthesized
gccacagaacucaugaacauu

SEQ ID NO: 11207 - RNA, 21 nt, Artificial
  Chemically synthesized
gguggcaggccauauacaaac

SEQ ID NO: 11208 - RNA, 21 nt, Artificial
  Chemically synthesized
gaucauccgacgcuacucaga

SEQ ID NO: 11209 - RNA, 21 nt, Artificial
  Chemically synthesized
caagcugggcuuugaggaauu

SEQ ID NO: 11210 - RNA, 21 nt, Artificial
  Chemically synthesized
aaaugugcuuggaggccugau

SEQ ID NO: 11211 - RNA, 21 nt, Artificial
  Chemically synthesized
aggaauucaaguacuugugga

SEQ ID NO: 11212 - RNA, 21 nt, Artificial
  Chemically synthesized
agaacucaugaacauucucaa

SEQ ID NO: 11213 - RNA, 21 nt, Artificial
  Chemically synthesized
uggcugcagcugacuauguau

SEQ ID NO: 11214 - RNA, 21 nt, Artificial
  Chemically synthesized
agauggcacuggacaaaucca

SEQ ID NO: 11215 - RNA, 21 nt, Artificial
  Chemically synthesized
caucucuauaacaugaucauc

SEQ ID NO: 11216 - RNA, 21 nt, Artificial
  Chemically synthesized
ugggcuuugaggaauucaagu

SEQ ID NO: 11217 - RNA, 21 nt, Artificial
  Chemically synthesized
gcgccacagaacucaugaaca

SEQ ID NO: 11218 - RNA, 21 nt, Artificial
  Chemically synthesized
uccugguuaacucguucuuga

SEQ ID NO: 11219 - RNA, 21 nt, Artificial
  Chemically synthesized
aucucuauaacaugaucaucc

SEQ ID NO: 11220 - RNA, 21 nt, Artificial
  Chemically synthesized
acaaagauggcacuggacaaa

SEQ ID NO: 11221 - RNA, 21 nt, Artificial
  Chemically synthesized
aagugggaacauggauuuuga

SEQ ID NO: 11222 - RNA, 21 nt, Artificial
  Chemically synthesized
cacccugaucugaagacugau

SEQ ID NO: 11223 - RNA, 21 nt, Artificial
  Chemically synthesized
uucucaacauccagggcccaa

SEQ ID NO: 11224 - RNA, 21 nt, Artificial
  Chemically synthesized
cucagaugaaagugggaacau

SEQ ID NO: 11225 - RNA, 21 nt, Artificial
  Chemically synthesized
cgacgcuacucagaugaaagu

SEQ ID NO: 11226 - RNA, 21 nt, Artificial
  Chemically synthesized
ugccuucaaaucucuugacaa

SEQ ID NO: 11227 - RNA, 21 nt, Artificial
  Chemically synthesized
agugggaacauggauuuugac

SEQ ID NO: 11228 - RNA, 21 nt, Artificial
  Chemically synthesized
cauugacacaugucgcagcau

SEQ ID NO: 11229 - RNA, 21 nt, Artificial
  Chemically synthesized
caacauugaggccaacgagag

SEQ ID NO: 11230 - RNA, 21 nt, Artificial
  Chemically synthesized
uacuuguggaacaacaucaaa

SEQ ID NO: 11231 - RNA, 21 nt, Artificial
  Chemically synthesized
aauucaaguacuuguggaaca

SEQ ID NO: 11232 - RNA, 21 nt, Artificial
  Chemically synthesized
ccugcugacccacaagcuuuu

SEQ ID NO: 11233 - RNA, 21 nt, Artificial
  Chemically synthesized
gaacauucucaauaagguugu

SEQ ID NO: 11234 - RNA, 21 nt, Artificial
  Chemically synthesized
gcucuaggacacucuaacaag

SEQ ID NO: 11235 - RNA, 21 nt, Artificial
  Chemically synthesized
ccucacugccuugcuauagga

SEQ ID NO: 11236 - RNA, 21 nt, Artificial
  Chemically synthesized
gguuuuggcauugacacaugu

SEQ ID NO: 11237 - RNA, 21 nt, Artificial
  Chemically synthesized
agcaggguuccaccugaauga

SEQ ID NO: 11238 - RNA, 21 nt, Artificial
  Chemically synthesized
gccaagccuagcacuugugau

SEQ ID NO: 11239 - RNA, 21 nt, Artificial
  Chemically synthesized
ugccaagccuagcacuuguga

SEQ ID NO: 11240 - RNA, 21 nt, Artificial
  Chemically synthesized
caccugaaugagcaucucuau

SEQ ID NO: 11241 - RNA, 21 nt, Artificial
  Chemically synthesized
ucagggaccauuugcaguagu

SEQ ID NO: 11242 - RNA, 21 nt, Artificial
  Chemically synthesized
cugucugcagucacaucuuug

SEQ ID NO: 11243 - RNA, 21 nt, Artificial
  Chemically synthesized
ucaacauccagggcccaauuu

SEQ ID NO: 11244 - RNA, 21 nt, Artificial
  Chemically synthesized
cauccgacgcuacucagauga

SEQ ID NO: 11245 - RNA, 21 nt, Artificial
  Chemically synthesized
cagggaccauuugcaguagug

SEQ ID NO: 11246 - RNA, 21 nt, Artificial
  Chemically synthesized
gcaagcugggcuuugaggaau

SEQ ID NO: 11247 - RNA, 21 nt, Artificial
  Chemically synthesized
cuucaaaucucuugacaaaga

SEQ ID NO: 11248 - RNA, 21 nt, Artificial
  Chemically synthesized
uuuuguucucucaguacuugu

SEQ ID NO: 11249 - RNA, 21 nt, Artificial
  Chemically synthesized
ccugaucugaagacugauggu

SEQ ID NO: 11250 - RNA, 21 nt, Artificial
  Chemically synthesized
guuccgugccuucaaaucucu

SEQ ID NO: 11251 - RNA, 21 nt, Artificial
  Chemically synthesized
ucaaguacuuguggaacaaca

SEQ ID NO: 11252 - RNA, 21 nt, Artificial
  Chemically synthesized
gaucugaagacugaugguuuu

SEQ ID NO: 11253 - RNA, 21 nt, Artificial
  Chemically synthesized
agugaacucccaggugccuuu

SEQ ID NO: 11254 - RNA, 21 nt, Artificial
  Chemically synthesized
ugaacucccaggugccuuuga

SEQ ID NO: 11255 - RNA, 21 nt, Artificial
  Chemically synthesized
cgccacagaacucaugaacau

SEQ ID NO: 11256 - RNA, 21 nt, Artificial
  Chemically synthesized
ggaacaacaucaaaagguggc

SEQ ID NO: 11257 - RNA, 21 nt, Artificial
  Chemically synthesized
ugaucugaagacugaugguuu

SEQ ID NO: 11258 - RNA, 21 nt, Artificial
  Chemically synthesized
agggaccauuugcaguaguga

SEQ ID NO: 11259 - RNA, 21 nt, Artificial
  Chemically synthesized
guugugacacgacacccugau

SEQ ID NO: 11260 - RNA, 21 nt, Artificial
  Chemically synthesized
cagccauguuccugguuaacu

SEQ ID NO: 11261 - RNA, 21 nt, Artificial
  Chemically synthesized
gaaagugggaacauggauuuu

SEQ ID NO: 11262 - RNA, 21 nt, Artificial
  Chemically synthesized
uacccagcuucucaacaucca

SEQ ID NO: 11263 - RNA, 21 nt, Artificial
  Chemically synthesized
cuagcacuugugaugccucca

SEQ ID NO: 11264 - RNA, 21 nt, Artificial
  Chemically synthesized
aucaaaagguggcaggccaua

SEQ ID NO: 11265 - RNA, 21 nt, Artificial
  Chemically synthesized
uggacaaauccaggugaacau

SEQ ID NO: 11266 - RNA, 21 nt, Artificial
  Chemically synthesized
cuacucagaugaaagugggaa

SEQ ID NO: 11267 - RNA, 21 nt, Artificial
  Chemically synthesized
caacauccagggcccaauuug

SEQ ID NO: 11268 - RNA, 21 nt, Artificial
  Chemically synthesized
ggcugcagcugacuauguauu

SEQ ID NO: 11269 - RNA, 21 nt, Artificial
  Chemically synthesized
ucaugaacauucucaauaagg

SEQ ID NO: 11270 - RNA, 21 nt, Artificial
  Chemically synthesized
auccgacgcuacucagaugaa

SEQ ID NO: 11271 - RNA, 21 nt, Artificial
  Chemically synthesized
cagaugaaagugggaacaugg

SEQ ID NO: 11272 - RNA, 21 nt, Artificial
  Chemically synthesized
acaaauccaggugaacaucca

SEQ ID NO: 11273 - RNA, 21 nt, Artificial
  Chemically synthesized
uuccgugccuucaaaucucuu

SEQ ID NO: 11274 - RNA, 21 nt, Artificial
  Chemically synthesized
cauguuccugguuaacucguu

SEQ ID NO: 11275 - RNA, 21 nt, Artificial
  Chemically synthesized
gugauggauagcgacaccaca

SEQ ID NO: 11276 - RNA, 21 nt, Artificial
  Chemically synthesized
gagcaucucuauaacaugauc

SEQ ID NO: 11277 - RNA, 21 nt, Artificial
  Chemically synthesized
cucaauaagguugugacacga

SEQ ID NO: 11278 - RNA, 21 nt, Artificial
  Chemically synthesized
cucucucaguucugggaggau

SEQ ID NO: 11279 - RNA, 21 nt, Artificial
  Chemically synthesized
gaacaacaucaaaagguggca

SEQ ID NO: 11280 - RNA, 21 nt, Artificial
  Chemically synthesized
gaacucaugaacauucucaau

SEQ ID NO: 11281 - RNA, 21 nt, Artificial
  Chemically synthesized
ucagcgccacagaacucauga

SEQ ID NO: 11282 - RNA, 21 nt, Artificial
  Chemically synthesized
uguggaacaacaucaaaaggu

SEQ ID NO: 11283 - RNA, 21 nt, Artificial
  Chemically synthesized
cgcacacauuacuccaacauu

SEQ ID NO: 11284 - RNA, 21 nt, Artificial
  Chemically synthesized
ugaugguuuuggcauugacac

SEQ ID NO: 11285 - RNA, 21 nt, Artificial
  Chemically synthesized
cagaacucaugaacauucuca

SEQ ID NO: 11286 - RNA, 21 nt, Artificial
  Chemically synthesized
cuugacaaagauggcacugga

SEQ ID NO: 11287 - RNA, 21 nt, Artificial
  Chemically synthesized
caugaacauucucaauaaggu

SEQ ID NO: 11288 - RNA, 21 nt, Artificial
  Chemically synthesized
cucaguucugggaggaugacu

SEQ ID NO: 11289 - RNA, 21 nt, Artificial
  Chemically synthesized
ucaauaagguugugacacgac

SEQ ID NO: 11290 - RNA, 21 nt, Artificial
  Chemically synthesized
aguggcugcagcugacuaugu

SEQ ID NO: 11291 - RNA, 21 nt, Artificial
  Chemically synthesized
guggcaggccauauacaaaca

SEQ ID NO: 11292 - RNA, 21 nt, Artificial
  Chemically synthesized
ugcagcugacuauguauuccu

SEQ ID NO: 11293 - RNA, 21 nt, Artificial
  Chemically synthesized
aacaugaucauccgacgcuac

SEQ ID NO: 11294 - RNA, 21 nt, Artificial
  Chemically synthesized
ucaaaagguggcaggccauau

SEQ ID NO: 11295 - RNA, 21 nt, Artificial
  Chemically synthesized
acacgacacccugaucugaag

SEQ ID NO: 11296 - RNA, 21 nt, Artificial
  Chemically synthesized
ccgacgcuacucagaugaaag

SEQ ID NO: 11297 - RNA, 21 nt, Artificial
  Chemically synthesized
gcacuggacaaauccagguga

SEQ ID NO: 11298 - RNA, 21 nt, Artificial
  Chemically synthesized
accgaucagggaccauuugca

SEQ ID NO: 11299 - RNA, 21 nt, Artificial
  Chemically synthesized
acauucucaauaagguuguga

SEQ ID NO: 11300 - RNA, 21 nt, Artificial
  Chemically synthesized
ccagugccuuugucuauauuc

SEQ ID NO: 11301 - RNA, 21 nt, Artificial
  Chemically synthesized
ugccuuugucuauauucugcu

SEQ ID NO: 11302 - RNA, 21 nt, Artificial
  Chemically synthesized
aaacaguucgacacugaccga

SEQ ID NO: 11303 - RNA, 21 nt, Artificial
  Chemically synthesized
auacaaacaguucgacacuga

SEQ ID NO: 11304 - RNA, 21 nt, Artificial
  Chemically synthesized
uugcuauaggagucaccugga

SEQ ID NO: 11305 - RNA, 21 nt, Artificial
  Chemically synthesized
ccuucaaaucucuugacaaag

SEQ ID NO: 11306 - RNA, 21 nt, Artificial
  Chemically synthesized
ucucaacauccagggcccaau

SEQ ID NO: 11307 - RNA, 21 nt, Artificial
  Chemically synthesized
acaucaaaagguggcaggcca

SEQ ID NO: 11308 - RNA, 21 nt, Artificial
  Chemically synthesized
ugaaagugggaacauggauuu

SEQ ID NO: 11309 - RNA, 21 nt, Artificial
  Chemically synthesized
auucaaguacuuguggaacaa

SEQ ID NO: 11310 - RNA, 21 nt, Artificial
  Chemically synthesized
gcuuugaggaauucaaguacu

SEQ ID NO: 11311 - RNA, 21 nt, Artificial
  Chemically synthesized
cacucuaacaagcucugucca

SEQ ID NO: 11312 - RNA, 21 nt, Artificial
  Chemically synthesized
acuauguauuccugaacugga

SEQ ID NO: 11313 - RNA, 21 nt, Artificial
  Chemically synthesized
acacccugaucugaagacuga

SEQ ID NO: 11314 - RNA, 21 nt, Artificial
  Chemically synthesized
uaacaugaucauccgacgcua

SEQ ID NO: 11315 - RNA, 21 nt, Artificial
  Chemically synthesized
gcugcagcugacuauguauuc

SEQ ID NO: 11316 - RNA, 21 nt, Artificial
  Chemically synthesized
uguuccugguuaacucguucu

SEQ ID NO: 11317 - RNA, 21 nt, Artificial
  Chemically synthesized
ggcaggccauauacaaacagu

SEQ ID NO: 11318 - RNA, 21 nt, Artificial
  Chemically synthesized
aagacugaugguuuuggcauu

SEQ ID NO: 11319 - RNA, 21 nt, Artificial
  Chemically synthesized
uagugaacucccaggugccuu

SEQ ID NO: 11320 - RNA, 21 nt, Artificial
  Chemically synthesized
cccacaagcuuuuguucucuc

SEQ ID NO: 11321 - RNA, 21 nt, Artificial
  Chemically synthesized
aguacuuguuacccagcuucu

SEQ ID NO: 11322 - RNA, 21 nt, Artificial
  Chemically synthesized
gcugacuauguauuccugaac

SEQ ID NO: 11323 - RNA, 21 nt, Artificial
  Chemically synthesized
ccacgcacacauuacuccaac

SEQ ID NO: 11324 - RNA, 21 nt, Artificial
  Chemically synthesized
acgcacacauuacuccaacau

SEQ ID NO: 11325 - RNA, 21 nt, Artificial
  Chemically synthesized
ucgcagccauguuccugguua

SEQ ID NO: 11326 - RNA, 21 nt, Artificial
  Chemically synthesized
augaaagugggaacauggauu

SEQ ID NO: 11327 - RNA, 21 nt, Artificial
  Chemically synthesized
ccaggaggaaauaaacaugcc

SEQ ID NO: 11328 - RNA, 21 nt, Artificial
  Chemically synthesized
aguucgacacugaccgaucag

SEQ ID NO: 11329 - RNA, 21 nt, Artificial
  Chemically synthesized
ugaucauccgacgcuacucag

SEQ ID NO: 11330 - RNA, 21 nt, Artificial
  Chemically synthesized
aggguuccaccugaaugagca

SEQ ID NO: 11331 - RNA, 21 nt, Artificial
  Chemically synthesized
cauucucaauaagguugugac

SEQ ID NO: 11332 - RNA, 21 nt, Artificial
  Chemically synthesized
ccgugccuucaaaucucuuga

SEQ ID NO: 11333 - RNA, 21 nt, Artificial
  Chemically synthesized
acugaugguuuuggcauugac

SEQ ID NO: 11334 - RNA, 21 nt, Artificial
  Chemically synthesized
auaacaugaucauccgacgcu

SEQ ID NO: 11335 - RNA, 21 nt, Artificial
  Chemically synthesized
agcuuuuguucucucaguacu

SEQ ID NO: 11336 - RNA, 21 nt, Artificial
  Chemically synthesized
aauccaggugaacauccagga

SEQ ID NO: 11337 - RNA, 21 nt, Artificial
  Chemically synthesized
aacaguucgacacugaccgau

SEQ ID NO: 11338 - RNA, 21 nt, Artificial
  Chemically synthesized
guuccugguuaacucguucuu

SEQ ID NO: 11339 - RNA, 21 nt, Artificial
  Chemically synthesized
acaagcuuuuguucucucagu

SEQ ID NO: 11340 - RNA, 21 nt, Artificial
  Chemically synthesized
ugauggauagcgacaccacag

SEQ ID NO: 11341 - RNA, 21 nt, Artificial
  Chemically synthesized
gaccauuugcaguagugaacu

SEQ ID NO: 11342 - RNA, 21 nt, Artificial
  Chemically synthesized
gauccugucugcagucacauc

SEQ ID NO: 11343 - RNA, 21 nt, Artificial
  Chemically synthesized
cuccaacauugaggccaacga

SEQ ID NO: 11344 - RNA, 21 nt, Artificial
  Chemically synthesized
caguucgacacugaccgauca

SEQ ID NO: 11345 - RNA, 21 nt, Artificial
  Chemically synthesized
uguuacccagcuucucaacau

SEQ ID NO: 11346 - RNA, 21 nt, Artificial
  Chemically synthesized
cagugccuuugucuauauucu

SEQ ID NO: 11347 - RNA, 21 nt, Artificial
  Chemically synthesized
aaaagguggcaggccauauac

SEQ ID NO: 11348 - RNA, 21 nt, Artificial
  Chemically synthesized
gugccuucaaaucucuugaca

SEQ ID NO: 11349 - RNA, 21 nt, Artificial
  Chemically synthesized
ugacuauguauuccugaacug

SEQ ID NO: 11350 - RNA, 21 nt, Artificial
  Chemically synthesized
aagcuuuuguucucucaguac

SEQ ID NO: 11351 - RNA, 21 nt, Artificial
  Chemically synthesized
gauggcacuggacaaauccag

SEQ ID NO: 11352 - RNA, 21 nt, Artificial
  Chemically synthesized
uuguucucucaguacuuguua

SEQ ID NO: 11353 - RNA, 21 nt, Artificial
  Chemically synthesized
cugguuaacucguucuugaag

SEQ ID NO: 11354 - RNA, 21 nt, Artificial
  Chemically synthesized
agugccuuugucuauauucug

SEQ ID NO: 11355 - RNA, 21 nt, Artificial
  Chemically synthesized
gggaacauggauuuugacaac

SEQ ID NO: 11356 - RNA, 21 nt, Artificial
  Chemically synthesized
gcagccauguuccugguuaac

SEQ ID NO: 11357 - RNA, 21 nt, Artificial
  Chemically synthesized
ggacacucuaacaagcucugu

SEQ ID NO: 11358 - RNA, 21 nt, Artificial
  Chemically synthesized
uggcacuggacaaauccaggu

SEQ ID NO: 11359 - RNA, 21 nt, Artificial
  Chemically synthesized
uccugucugcagucacaucuu

SEQ ID NO: 11360 - RNA, 21 nt, Artificial
  Chemically synthesized
aggccauauacaaacaguucg

SEQ ID NO: 11361 - RNA, 21 nt, Artificial
  Chemically synthesized
uaacaagcucuguccacgggu

SEQ ID NO: 11362 - RNA, 21 nt, Artificial
  Chemically synthesized
uugacaaagauggcacuggac

SEQ ID NO: 11363 - RNA, 21 nt, Artificial
  Chemically synthesized
augagcaucucuauaacauga

SEQ ID NO: 11364 - RNA, 21 nt, Artificial
  Chemically synthesized
uuggcauugacacaugucgca

SEQ ID NO: 11365 - RNA, 21 nt, Artificial
  Chemically synthesized
cucaacauccagggcccaauu

SEQ ID NO: 11366 - RNA, 21 nt, Artificial
  Chemically synthesized
uccgacgcuacucagaugaaa

SEQ ID NO: 11367 - RNA, 21 nt, Artificial
  Chemically synthesized
ccugucugcagucacaucuuu

SEQ ID NO: 11368 - RNA, 21 nt, Artificial
  Chemically synthesized
gcagcugacuauguauuccug

SEQ ID NO: 11369 - RNA, 21 nt, Artificial
  Chemically synthesized
gcacacauuacuccaacauug

SEQ ID NO: 11370 - RNA, 21 nt, Artificial
  Chemically synthesized
auuugcaguagugaacuccca

SEQ ID NO: 11371 - RNA, 21 nt, Artificial
  Chemically synthesized
ggcuuugaggaauucaaguac

SEQ ID NO: 11372 - RNA, 21 nt, Artificial
  Chemically synthesized
acacauuacuccaacauugag

SEQ ID NO: 11373 - RNA, 21 nt, Artificial
  Chemically synthesized
gaggaauucaaguacuugugg

SEQ ID NO: 11374 - RNA, 21 nt, Artificial
  Chemically synthesized
cuauguauuccugaacuggag

SEQ ID NO: 11375 - RNA, 21 nt, Artificial
  Chemically synthesized
cugacuauguauuccugaacu

SEQ ID NO: 11376 - RNA, 21 nt, Artificial
  Chemically synthesized
uuugcaguagugaacucccag

SEQ ID NO: 11377 - RNA, 21 nt, Artificial
  Chemically synthesized
cacagaacucaugaacauucu

SEQ ID NO: 11378 - RNA, 21 nt, Artificial
  Chemically synthesized
ugcugacccacaagcuuuugu

SEQ ID NO: 11379 - RNA, 21 nt, Artificial
  Chemically synthesized
aacauugaggccaacgagagu

SEQ ID NO: 11380 - RNA, 21 nt, Artificial
  Chemically synthesized
caaauccaggugaacauccag

SEQ ID NO: 11381 - RNA, 21 nt, Artificial
  Chemically synthesized
cauauacaaacaguucgacac

SEQ ID NO: 11382 - RNA, 21 nt, Artificial
  Chemically synthesized
caggaggaaauaaacaugccc

SEQ ID NO: 11383 - RNA, 21 nt, Artificial
  Chemically synthesized
augugcuuggaggccugauca

SEQ ID NO: 11384 - RNA, 21 nt, Artificial
  Chemically synthesized
guuccaccugaaugagcaucu

SEQ ID NO: 11385 - RNA, 21 nt, Artificial
  Chemically synthesized
uggcucuaggacacucuaaca

SEQ ID NO: 11386 - RNA, 21 nt, Artificial
  Chemically synthesized
acuucaucagcugcuugguca

SEQ ID NO: 11387 - RNA, 21 nt, Artificial
  Chemically synthesized
cucucaguacuuguuacccag

SEQ ID NO: 11388 - RNA, 21 nt, Artificial
  Chemically synthesized
cugggcuuugaggaauucaag

SEQ ID NO: 11389 - RNA, 21 nt, Artificial
  Chemically synthesized
caggcccaggaggaaauaaac

SEQ ID NO: 11390 - RNA, 21 nt, Artificial
  Chemically synthesized
cauguuccgugccuucaaauc

SEQ ID NO: 11391 - RNA, 21 nt, Artificial
  Chemically synthesized
cuggacaaauccaggugaaca

SEQ ID NO: 11392 - RNA, 21 nt, Artificial
  Chemically synthesized
ugaacauucucaauaagguug

SEQ ID NO: 11393 - RNA, 21 nt, Artificial
  Chemically synthesized
ugguuuuggcauugacacaug

SEQ ID NO: 11394 - RNA, 21 nt, Artificial
  Chemically synthesized
uggagaugacauggaggucag

SEQ ID NO: 11395 - RNA, 21 nt, Artificial
  Chemically synthesized
uggcaggccauauacaaacag

SEQ ID NO: 11396 - RNA, 21 nt, Artificial
  Chemically synthesized
cucacugccuugcuauaggag

SEQ ID NO: 11397 - RNA, 21 nt, Artificial
  Chemically synthesized
uggauuuugacaacuucauca

SEQ ID NO: 11398 - RNA, 21 nt, Artificial
  Chemically synthesized
uguucucucaguacuuguuac

SEQ ID NO: 11399 - RNA, 21 nt, Artificial
  Chemically synthesized
augguuuuggcauugacacau

SEQ ID NO: 11400 - RNA, 21 nt, Artificial
  Chemically synthesized
cugaaugagcaucucuauaac

SEQ ID NO: 11401 - RNA, 21 nt, Artificial
  Chemically synthesized
ugcuauaggagucaccuggag

SEQ ID NO: 11402 - RNA, 21 nt, Artificial
  Chemically synthesized
ugucugcagucacaucuuugu

SEQ ID NO: 11403 - RNA, 21 nt, Artificial
  Chemically synthesized
acaacaucaaaagguggcagg

SEQ ID NO: 11404 - RNA, 21 nt, Artificial
  Chemically synthesized
ccuugcuauaggagucaccug

SEQ ID NO: 11405 - RNA, 21 nt, Artificial
  Chemically synthesized
acgacacccugaucugaagac

SEQ ID NO: 11406 - RNA, 21 nt, Artificial
  Chemically synthesized
cuggcucuaggacacucuaac

SEQ ID NO: 11407 - RNA, 21 nt, Artificial
  Chemically synthesized
aaagauggcacuggacaaauc

SEQ ID NO: 11408 - RNA, 21 nt, Artificial
  Chemically synthesized
cuggagaugacauggagguca

SEQ ID NO: 11409 - RNA, 21 nt, Artificial
  Chemically synthesized
uuacuccaacauugaggccaa

SEQ ID NO: 11410 - RNA, 21 nt, Artificial
  Chemically synthesized
uacaaacaguucgacacugac

SEQ ID NO: 11411 - RNA, 21 nt, Artificial
  Chemically synthesized
ggauuuugacaacuucaucag

SEQ ID NO: 11412 - RNA, 21 nt, Artificial
  Chemically synthesized
ugaccgaucagggaccauuug

SEQ ID NO: 11413 - RNA, 21 nt, Artificial
  Chemically synthesized
ucuaggacacucuaacaagcu

SEQ ID NO: 11414 - RNA, 21 nt, Artificial
  Chemically synthesized
cuaggacacucuaacaagcuc

SEQ ID NO: 11415 - RNA, 21 nt, Artificial
  Chemically synthesized
cuauauucugcucccagccug

SEQ ID NO: 11416 - RNA, 21 nt, Artificial
  Chemically synthesized
ugacccacaagcuuuuguucu

SEQ ID NO: 11417 - RNA, 21 nt, Artificial
  Chemically synthesized
aaugagcaucucuauaacaug

SEQ ID NO: 11418 - RNA, 21 nt, Artificial
  Chemically synthesized
ucaguacuuguuacccagcuu

SEQ ID NO: 11419 - RNA, 21 nt, Artificial
  Chemically synthesized
uggaacaacaucaaaaggugg

SEQ ID NO: 11420 - RNA, 21 nt, Artificial
  Chemically synthesized
caguacuuguuacccagcuuc

SEQ ID NO: 11421 - RNA, 21 nt, Artificial
  Chemically synthesized
ccacagaacucaugaacauuc

SEQ ID NO: 11422 - RNA, 21 nt, Artificial
  Chemically synthesized
ugacacgacacccugaucuga

SEQ ID NO: 11423 - RNA, 21 nt, Artificial
  Chemically synthesized
cugaccgaucagggaccauuu

SEQ ID NO: 11424 - RNA, 21 nt, Artificial
  Chemically synthesized
uuguuacccagcuucucaaca

SEQ ID NO: 11425 - RNA, 21 nt, Artificial
  Chemically synthesized
gccauauacaaacaguucgac

SEQ ID NO: 11426 - RNA, 21 nt, Artificial
  Chemically synthesized
cuuguggaacaacaucaaaag

SEQ ID NO: 11427 - RNA, 21 nt, Artificial
  Chemically synthesized
aaguacuuguggaacaacauc

SEQ ID NO: 11428 - RNA, 21 nt, Artificial
  Chemically synthesized
augaucauccgacgcuacuca

SEQ ID NO: 11429 - RNA, 21 nt, Artificial
  Chemically synthesized
gcauugacacaugucgcagca

SEQ ID NO: 11430 - RNA, 21 nt, Artificial
  Chemically synthesized
auucucaauaagguugugaca

SEQ ID NO: 11431 - RNA, 21 nt, Artificial
  Chemically synthesized
acuggacaaauccaggugaac

SEQ ID NO: 11432 - RNA, 21 nt, Artificial
  Chemically synthesized
uaggacacucuaacaagcucu

SEQ ID NO: 11433 - RNA, 21 nt, Artificial
  Chemically synthesized
cgcuacucagaugaaaguggg

SEQ ID NO: 11434 - RNA, 21 nt, Artificial
  Chemically synthesized
uacuuguuacccagcuucuca

SEQ ID NO: 11435 - RNA, 21 nt, Artificial
  Chemically synthesized
uccaggugaacauccaggagu

SEQ ID NO: 11436 - RNA, 21 nt, Artificial
  Chemically synthesized
gacaaauccaggugaacaucc

SEQ ID NO: 11437 - RNA, 21 nt, Artificial
  Chemically synthesized
aggacacucuaacaagcucug

SEQ ID NO: 11438 - RNA, 21 nt, Artificial
  Chemically synthesized
ucucaauaagguugugacacg

SEQ ID NO: 11439 - RNA, 21 nt, Artificial
  Chemically synthesized
gcugacccacaagcuuuuguu

SEQ ID NO: 11440 - RNA, 21 nt, Artificial
  Chemically synthesized
caggccauauacaaacaguuc

SEQ ID NO: 11441 - RNA, 21 nt, Artificial
  Chemically synthesized
cacaagcuuuuguucucucag

SEQ ID NO: 11442 - RNA, 21 nt, Artificial
  Chemically synthesized
caaaucucuugacaaagaugg

SEQ ID NO: 11443 - RNA, 21 nt, Artificial
  Chemically synthesized
aucugaagacugaugguuuug

SEQ ID NO: 11444 - RNA, 21 nt, Artificial
  Chemically synthesized
acugccuugcuauaggaguca

SEQ ID NO: 11445 - RNA, 21 nt, Artificial
  Chemically synthesized
cucaguacuuguuacccagcu

SEQ ID NO: 11446 - RNA, 21 nt, Artificial
  Chemically synthesized
cgugccuucaaaucucuugac

SEQ ID NO: 11447 - RNA, 21 nt, Artificial
  Chemically synthesized
cccugaucugaagacugaugg

SEQ ID NO: 11448 - RNA, 21 nt, Artificial
  Chemically synthesized
cugaucugaagacugaugguu

SEQ ID NO: 11449 - RNA, 21 nt, Artificial
  Chemically synthesized
ucaaaucucuugacaaagaug

SEQ ID NO: 11450 - RNA, 21 nt, Artificial
  Chemically synthesized
ugaggaauucaaguacuugug

SEQ ID NO: 11451 - RNA, 21 nt, Artificial
  Chemically synthesized
ucagaugaaagugggaacaug

SEQ ID NO: 11452 - RNA, 21 nt, Artificial
  Chemically synthesized
gacccacaagcuuuuguucuc

SEQ ID NO: 11453 - RNA, 21 nt, Artificial
  Chemically synthesized
ucacugccuugcuauaggagu

SEQ ID NO: 11454 - RNA, 21 nt, Artificial
  Chemically synthesized
ucuauauucugcucccagccu

SEQ ID NO: 11455 - RNA, 21 nt, Artificial
  Chemically synthesized
ggacaaauccaggugaacauc

SEQ ID NO: 11456 - RNA, 21 nt, Artificial
  Chemically synthesized
ugugccaagccuagcacuugu

SEQ ID NO: 11457 - RNA, 21 nt, Artificial
  Chemically synthesized
gugccuuugucuauauucugc

SEQ ID NO: 11458 - RNA, 21 nt, Artificial
  Chemically synthesized
caugaucauccgacgcuacuc

SEQ ID NO: 11459 - RNA, 21 nt, Artificial
  Chemically synthesized
uccaccugaaugagcaucucu

SEQ ID NO: 11460 - RNA, 21 nt, Artificial
  Chemically synthesized
acagaacucaugaacauucuc

SEQ ID NO: 11461 - RNA, 21 nt, Artificial
  Chemically synthesized
cucaugaacauucucaauaag

SEQ ID NO: 11462 - RNA, 21 nt, Artificial
  Chemically synthesized
uugaggaauucaaguacuugu

SEQ ID NO: 11463 - RNA, 21 nt, Artificial
  Chemically synthesized
acucuaacaagcucuguccac

SEQ ID NO: 11464 - RNA, 21 nt, Artificial
  Chemically synthesized
ccuuugucuauauucugcucc

SEQ ID NO: 11465 - RNA, 21 nt, Artificial
  Chemically synthesized
cuugcuauaggagucaccugg

SEQ ID NO: 11466 - RNA, 21 nt, Artificial
  Chemically synthesized
cuucaucagcugcuuggucag

SEQ ID NO: 11467 - RNA, 21 nt, Artificial
  Chemically synthesized
uugucuauauucugcucccag

SEQ ID NO: 11468 - RNA, 21 nt, Artificial
  Chemically synthesized
gguuccaccugaaugagcauc

SEQ ID NO: 11469 - RNA, 21 nt, Artificial
  Chemically synthesized
cuuguuacccagcuucucaac

SEQ ID NO: 11470 - RNA, 21 nt, Artificial
  Chemically synthesized
guuuuggcauugacacauguc

SEQ ID NO: 11471 - RNA, 21 nt, Artificial
  Chemically synthesized
ccaagccuagcacuugugaug

SEQ ID NO: 11472 - RNA, 21 nt, Artificial
  Chemically synthesized
acaacuucaucagcugcuugg

SEQ ID NO: 11473 - RNA, 21 nt, Artificial
  Chemically synthesized
uauguauuccugaacuggagc

SEQ ID NO: 11474 - RNA, 21 nt, Artificial
  Chemically synthesized
cccaggaggaaauaaacaugc

SEQ ID NO: 11475 - RNA, 21 nt, Artificial
  Chemically synthesized
ucucucaguacuuguuaccca

SEQ ID NO: 11476 - RNA, 21 nt, Artificial
  Chemically synthesized
gaauucaaguacuuguggaac

SEQ ID NO: 11477 - RNA, 21 nt, Artificial
  Chemically synthesized
guggaacaacaucaaaaggug

SEQ ID NO: 11478 - RNA, 21 nt, Artificial
  Chemically synthesized
uguuccgugccuucaaaucuc

SEQ ID NO: 11479 - RNA, 21 nt, Artificial
  Chemically synthesized
aagguugugacacgacacccu

SEQ ID NO: 11480 - RNA, 21 nt, Artificial
  Chemically synthesized
gcccaggaggaaauaaacaug

SEQ ID NO: 11481 - RNA, 21 nt, Artificial
  Chemically synthesized
uuuguucucucaguacuuguu

SEQ ID NO: 11482 - RNA, 21 nt, Artificial
  Chemically synthesized
cacauuacuccaacauugagg

SEQ ID NO: 11483 - RNA, 21 nt, Artificial
  Chemically synthesized
gccauguuccugguuaacucg

SEQ ID NO: 11484 - RNA, 21 nt, Artificial
  Chemically synthesized
acgcuacucagaugaaagugg

SEQ ID NO: 11485 - RNA, 21 nt, Artificial
  Chemically synthesized
acccagcuucucaacauccag

SEQ ID NO: 11486 - RNA, 21 nt, Artificial
  Chemically synthesized
aaagugggaacauggauuuug

SEQ ID NO: 11487 - RNA, 21 nt, Artificial
  Chemically synthesized
auuacuccaacauugaggcca

SEQ ID NO: 11488 - RNA, 21 nt, Artificial
  Chemically synthesized
caaacaguucgacacugaccg

SEQ ID NO: 11489 - RNA, 21 nt, Artificial
  Chemically synthesized
uugacacaugucgcagcaugg

SEQ ID NO: 11490 - RNA, 21 nt, Artificial
  Chemically synthesized
uauaacaugaucauccgacgc

SEQ ID NO: 11491 - RNA, 21 nt, Artificial
  Chemically synthesized
uucaaguacuuguggaacaac

SEQ ID NO: 11492 - RNA, 21 nt, Artificial
  Chemically synthesized
gacacccugaucugaagacug

SEQ ID NO: 11493 - RNA, 21 nt, Artificial
  Chemically synthesized
ucuugacaaagauggcacugg

SEQ ID NO: 11494 - RNA, 21 nt, Artificial
  Chemically synthesized
cuuugucuauauucugcuccc

SEQ ID NO: 11495 - RNA, 21 nt, Artificial
  Chemically synthesized
ugcaguagugaacucccaggu

SEQ ID NO: 11496 - RNA, 21 nt, Artificial
  Chemically synthesized
ucucuugacaaagauggcacu

SEQ ID NO: 11497 - RNA, 21 nt, Artificial
  Chemically synthesized
gccuuugucuauauucugcuc

SEQ ID NO: 11498 - RNA, 21 nt, Artificial
  Chemically synthesized
aauaagguugugacacgacac

SEQ ID NO: 11499 - RNA, 21 nt, Artificial
  Chemically synthesized
ugacacaugucgcagcauggu

SEQ ID NO: 11500 - RNA, 21 nt, Artificial
  Chemically synthesized
acugaccgaucagggaccauu

SEQ ID NO: 11501 - RNA, 21 nt, Artificial
  Chemically synthesized
agccauguuccugguuaacuc

SEQ ID NO: 11502 - RNA, 21 nt, Artificial
  Chemically synthesized
gacaacuucaucagcugcuug

SEQ ID NO: 11503 - RNA, 21 nt, Artificial
  Chemically synthesized
ucugaagacugaugguuuugg

SEQ ID NO: 11504 - RNA, 21 nt, Artificial
  Chemically synthesized
acuccaacauugaggccaacg

SEQ ID NO: 11505 - RNA, 21 nt, Artificial
  Chemically synthesized
agacugaugguuuuggcauug

SEQ ID NO: 11506 - RNA, 21 nt, Artificial
  Chemically synthesized
gacuauguauuccugaacugg

SEQ ID NO: 11507 - RNA, 21 nt, Artificial
  Chemically synthesized
gucuauauucugcucccagcc

SEQ ID NO: 11508 - RNA, 21 nt, Artificial
  Chemically synthesized
uauauucugcucccagccugc

SEQ ID NO: 11509 - RNA, 21 nt, Artificial
  Chemically synthesized
caacaucaaaagguggcaggc

SEQ ID NO: 11510 - RNA, 21 nt, Artificial
  Chemically synthesized
cuuuuguucucucaguacuug

SEQ ID NO: 11511 - RNA, 21 nt, Artificial
  Chemically synthesized
gauuuugacaacuucaucagc

SEQ ID NO: 11512 - RNA, 21 nt, Artificial
  Chemically synthesized
auguuccgugccuucaaaucu

SEQ ID NO: 11513 - RNA, 21 nt, Artificial
  Chemically synthesized
ucuaacaagcucuguccacgg

SEQ ID NO: 11514 - RNA, 21 nt, Artificial
  Chemically synthesized
aacauggauuuugacaacuuc

SEQ ID NO: 11515 - RNA, 21 nt, Artificial
  Chemically synthesized
uacucagaugaaagugggaac

SEQ ID NO: 11516 - RNA, 21 nt, Artificial
  Chemically synthesized
guacuuguuacccagcuucuc

SEQ ID NO: 11517 - RNA, 21 nt, Artificial
  Chemically synthesized
cugaagacugaugguuuuggc

SEQ ID NO: 11518 - RNA, 21 nt, Artificial
  Chemically synthesized
auugaggccaacgagagugag

SEQ ID NO: 11519 - RNA, 21 nt, Artificial
  Chemically synthesized
uccgugccuucaaaucucuug

SEQ ID NO: 11520 - RNA, 21 nt, Artificial
  Chemically synthesized
ugugacacgacacccugaucu

SEQ ID NO: 11521 - RNA, 21 nt, Artificial
  Chemically synthesized
aucauccgacgcuacucagau

SEQ ID NO: 11522 - RNA, 21 nt, Artificial
  Chemically synthesized
agccuagcacuugugaugccu

SEQ ID NO: 11523 - RNA, 21 nt, Artificial
  Chemically synthesized
acaaacaguucgacacugacc

SEQ ID NO: 11524 - RNA, 21 nt, Artificial
  Chemically synthesized
guuacccagcuucucaacauc

SEQ ID NO: 11525 - RNA, 21 nt, Artificial
  Chemically synthesized
cugccuugcuauaggagucac

SEQ ID NO: 11526 - RNA, 21 nt, Artificial
  Chemically synthesized
acucagaugaaagugggaaca

SEQ ID NO: 11527 - RNA, 21 nt, Artificial
  Chemically synthesized
aaauccaggugaacauccagg

SEQ ID NO: 11528 - RNA, 21 nt, Artificial
  Chemically synthesized
gacacucuaacaagcucuguc

SEQ ID NO: 11529 - RNA, 21 nt, Artificial
  Chemically synthesized
gccuugcuauaggagucaccu

SEQ ID NO: 11530 - RNA, 21 nt, Artificial
  Chemically synthesized
aaucucuugacaaagauggca

SEQ ID NO: 11531 - RNA, 21 nt, Artificial
  Chemically synthesized
uugcaguagugaacucccagg

SEQ ID NO: 11532 - RNA, 21 nt, Artificial
  Chemically synthesized
ccauuugcaguagugaacucc

SEQ ID NO: 11533 - RNA, 21 nt, Artificial
  Chemically synthesized
uuugucuauauucugcuccca

SEQ ID NO: 11534 - RNA, 21 nt, Artificial
  Chemically synthesized
agcacuugugaugccuccaug

SEQ ID NO: 11535 - RNA, 21 nt, Artificial
  Chemically synthesized
cgacacccugaucugaagacu

SEQ ID NO: 11536 - RNA, 21 nt, Artificial
  Chemically synthesized
ucucaguacuuguuacccagc

SEQ ID NO: 11537 - RNA, 21 nt, Artificial
  Chemically synthesized
aaaucucuugacaaagauggc

SEQ ID NO: 11538 - RNA, 21 nt, Artificial
  Chemically synthesized
uucugggaggaugacuccagu

SEQ ID NO: 11539 - RNA, 21 nt, Artificial
  Chemically synthesized
cugcugacccacaagcuuuug

SEQ ID NO: 11540 - RNA, 21 nt, Artificial
  Chemically synthesized
uugugacacgacacccugauc

SEQ ID NO: 11541 - RNA, 21 nt, Artificial
  Chemically synthesized
uccaacauugaggccaacgag

SEQ ID NO: 11542 - RNA, 21 nt, Artificial
  Chemically synthesized
uggcauugacacaugucgcag

SEQ ID NO: 11543 - RNA, 21 nt, Artificial
  Chemically synthesized
ugucuauauucugcucccagc

SEQ ID NO: 11544 - RNA, 21 nt, Artificial
  Chemically synthesized
cugcagucacaucuuuguggg

SEQ ID NO: 11545 - RNA, 21 nt, Artificial
  Chemically synthesized
ugccuugcuauaggagucacc

SEQ ID NO: 11546 - RNA, 21 nt, Artificial
  Chemically synthesized
cauuugcaguagugaacuccc

SEQ ID NO: 11547 - RNA, 21 nt, Artificial
  Chemically synthesized
auccugucugcagucacaucu

SEQ ID NO: 11548 - RNA, 21 nt, Artificial
  Chemically synthesized
acaguucgacacugaccgauc

SEQ ID NO: 11549 - RNA, 21 nt, Artificial
  Chemically synthesized
ucugcagucacaucuuugugg

SEQ ID NO: 11550 - RNA, 21 nt, Artificial
  Chemically synthesized
uucucaauaagguugugacac

SEQ ID NO: 11551 - RNA, 21 nt, Artificial
  Chemically synthesized
cucuaggacacucuaacaagc

SEQ ID NO: 11552 - RNA, 21 nt, Artificial
  Chemically synthesized
ucauccgacgcuacucagaug

SEQ ID NO: 11553 - RNA, 21 nt, Artificial
  Chemically synthesized
ugacaacuucaucagcugcuu

SEQ ID NO: 11554 - RNA, 21 nt, Artificial
  Chemically synthesized
gacgcuacucagaugaaagug

SEQ ID NO: 11555 - RNA, 21 nt, Artificial
  Chemically synthesized
uugacaacuucaucagcugcu

SEQ ID NO: 11556 - RNA, 21 nt, Artificial
  Chemically synthesized
agcgccacagaacucaugaac

SEQ ID NO: 11557 - RNA, 21 nt, Artificial
  Chemically synthesized
aagauggcacuggacaaaucc

SEQ ID NO: 11558 - RNA, 21 nt, Artificial
  Chemically synthesized
uuacccagcuucucaacaucc

SEQ ID NO: 11559 - RNA, 21 nt, Artificial
  Chemically synthesized
aaugugcuuggaggccugauc

SEQ ID NO: 11560 - RNA, 21 nt, Artificial
  Chemically synthesized
cucuaacaagcucuguccacg

SEQ ID NO: 11561 - RNA, 21 nt, Artificial
  Chemically synthesized
auuuugacaacuucaucagcu

SEQ ID NO: 11562 - RNA, 21 nt, Artificial
  Chemically synthesized
auggcacuggacaaauccagg

SEQ ID NO: 11563 - RNA, 21 nt, Artificial
  Chemically synthesized
acccacaagcuuuuguucucu

SEQ ID NO: 11564 - RNA, 21 nt, Artificial
  Chemically synthesized
auauacaaacaguucgacacu

SEQ ID NO: 11565 - RNA, 21 nt, Artificial
  Chemically synthesized
caacuucaucagcugcuuggu

SEQ ID NO: 11566 - RNA, 21 nt, Artificial
  Chemically synthesized
auguauuccugaacuggagcc

SEQ ID NO: 11567 - RNA, 21 nt, Artificial
  Chemically synthesized
cugacccacaagcuuuuguuc

SEQ ID NO: 11568 - RNA, 21 nt, Artificial
  Chemically synthesized
acccugaucugaagacugaug

SEQ ID NO: 11569 - RNA, 21 nt, Artificial
  Chemically synthesized
uuguggaacaacaucaaaagg

SEQ ID NO: 11570 - RNA, 21 nt, Artificial
  Chemically synthesized
aacauccagggcccaauuugc

SEQ ID NO: 11571 - RNA, 21 nt, Artificial
  Chemically synthesized
aucucuugacaaagauggcac

SEQ ID NO: 11572 - RNA, 21 nt, Artificial
  Chemically synthesized
aagccuagcacuugugaugcc

SEQ ID NO: 11573 - RNA, 21 nt, Artificial
  Chemically synthesized
uacuccaacauugaggccaac

SEQ ID NO: 11574 - RNA, 21 nt, Artificial
  Chemically synthesized
guucucucaguacuuguuacc

SEQ ID NO: 11575 - RNA, 21 nt, Artificial
  Chemically synthesized
gucugcagucacaucuuugug

SEQ ID NO: 11576 - RNA, 21 nt, Artificial
  Chemically synthesized
accauuugcaguagugaacuc

SEQ ID NO: 11577 - RNA, 21 nt, Artificial
  Chemically synthesized
acauugaggccaacgagagug

SEQ ID NO: 11578 - RNA, 21 nt, Artificial
  Chemically synthesized
auguuccugguuaacucguuc

SEQ ID NO: 11579 - RNA, 21 nt, Artificial
  Chemically synthesized
cacugccuugcuauaggaguc

SEQ ID NO: 11580 - RNA, 21 nt, Artificial
  Chemically synthesized
auaagguugugacacgacacc

SEQ ID NO: 11581 - RNA, 21 nt, Artificial
  Chemically synthesized
uuuugacaacuucaucagcug

SEQ ID NO: 11582 - RNA, 21 nt, Artificial
  Chemically synthesized
aucagggaccauuugcaguag

SEQ ID NO: 11583 - RNA, 21 nt, Artificial
  Chemically synthesized
uauacaaacaguucgacacug

SEQ ID NO: 11584 - RNA, 21 nt, Artificial
  Chemically synthesized
cauuacuccaacauugaggcc

SEQ ID NO: 11585 - RNA, 21 nt, Artificial
  Chemically synthesized
aacaacaucaaaagguggcag

SEQ ID NO: 11586 - RNA, 21 nt, Artificial
  Chemically synthesized
aagcugggcuuugaggaauuc

SEQ ID NO: 11587 - RNA, 21 nt, Artificial
  Chemically synthesized
cugcagcugacuauguauucc

SEQ ID NO: 11588 - RNA, 21 nt, Artificial
  Chemically synthesized
auugacacaugucgcagcaug

SEQ ID NO: 11589 - RNA, 21 nt, Artificial
  Chemically synthesized
acauuacuccaacauugaggc

SEQ ID NO: 11590 - RNA, 21 nt, Artificial
  Chemically synthesized
uuugaggaauucaaguacuug

SEQ ID NO: 11591 - RNA, 21 nt, Artificial
  Chemically synthesized
acacucuaacaagcucugucc

SEQ ID NO: 11592 - RNA, 21 nt, Artificial
  Chemically synthesized
cucuugacaaagauggcacug

SEQ ID NO: 11593 - RNA, 21 nt, Artificial
  Chemically synthesized
uaagguugugacacgacaccc

SEQ ID NO: 11594 - RNA, 21 nt, Artificial
  Chemically synthesized
aacauucucaauaagguugug

SEQ ID NO: 11595 - RNA, 21 nt, Artificial
  Chemically synthesized
caagccuagcacuugugaugc

SEQ ID NO: 11596 - RNA, 21 nt, Artificial
  Chemically synthesized
aauuugcccugccuggaguuc

SEQ ID NO: 11597 - RNA, 21 nt, Artificial
  Chemically synthesized
uuuuggcauugacacaugucg

SEQ ID NO: 11598 - RNA, 21 nt, Artificial
  Chemically synthesized
auccaggugaacauccaggag

SEQ ID NO: 11599 - RNA, 21 nt, Artificial
  Chemically synthesized
auggauuuugacaacuucauc

SEQ ID NO: 11600 - RNA, 21 nt, Artificial
  Chemically synthesized
uuuggcauugacacaugucgc

SEQ ID NO: 11601 - RNA, 21 nt, Artificial
  Chemically synthesized
ucucucaguucugggaggaug

SEQ ID NO: 11602 - RNA, 21 nt, Artificial
  Chemically synthesized
uuccugguuaacucguucuug

SEQ ID NO: 11603 - RNA, 21 nt, Artificial
  Chemically synthesized
uauaggagucaccuggagccu

SEQ ID NO: 11604 - RNA, 21 nt, Artificial
  Chemically synthesized
aacuucaucagcugcuugguc

SEQ ID NO: 11605 - RNA, 21 nt, Artificial
  Chemically synthesized
uuugacaacuucaucagcugc

SEQ ID NO: 11606 - RNA, 21 nt, Artificial
  Chemically synthesized
aacaucaaaagguggcaggcc

SEQ ID NO: 11607 - RNA, 21 nt, Artificial
  Chemically synthesized
uguauuccugaacuggagccc

SEQ ID NO: 11608 - RNA, 21 nt, Artificial
  Chemically synthesized
uucucucaguacuuguuaccc

SEQ ID NO: 11609 - RNA, 21 nt, Artificial
  Chemically synthesized
uucaucagcugcuuggucagg

SEQ ID NO: 11610 - RNA, 21 nt, Artificial
  Chemically synthesized
uuccaccugaaugagcaucuc

SEQ ID NO: 11611 - RNA, 21 nt, Artificial
  Chemically synthesized
ucggaugaucauguuauagag

SEQ ID NO: 11612 - RNA, 21 nt, Artificial
  Chemically synthesized
auuugaaggcacggaacaugg

SEQ ID NO: 11613 - RNA, 21 nt, Artificial
  Chemically synthesized
uucaagaacgaguuaaccagg

SEQ ID NO: 11614 - RNA, 21 nt, Artificial
  Chemically synthesized
uuauagagaugcucauucagg

SEQ ID NO: 11615 - RNA, 21 nt, Artificial
  Chemically synthesized
augaucauguuauagagaugc

SEQ ID NO: 11616 - RNA, 21 nt, Artificial
  Chemically synthesized
ucucguuggccucaauguugg

SEQ ID NO: 11617 - RNA, 21 nt, Artificial
  Chemically synthesized
uuccacaaguacuugaauucc

SEQ ID NO: 11618 - RNA, 21 nt, Artificial
  Chemically synthesized
uucacuacugcaaaugguccc

SEQ ID NO: 11619 - RNA, 21 nt, Artificial
  Chemically synthesized
uccauguucccacuuucaucu

SEQ ID NO: 11620 - RNA, 21 nt, Artificial
  Chemically synthesized
uuuauuuccuccugggccugg

SEQ ID NO: 11621 - RNA, 21 nt, Artificial
  Chemically synthesized
uuguccagugccaucuuuguc

SEQ ID NO: 11622 - RNA, 21 nt, Artificial
  Chemically synthesized
ucaauguuggaguaaugugug

SEQ ID NO: 11623 - RNA, 21 nt, Artificial
  Chemically synthesized
uucagaucagggugucguguc

SEQ ID NO: 11624 - RNA, 21 nt, Artificial
  Chemically synthesized
uuuguauauggccugccaccu

SEQ ID NO: 11625 - RNA, 21 nt, Artificial
  Chemically synthesized
aucauguuauagagaugcuca

SEQ ID NO: 11626 - RNA, 21 nt, Artificial
  Chemically synthesized
uuuugauguuguuccacaagu

SEQ ID NO: 11627 - RNA, 21 nt, Artificial
  Chemically synthesized
auguuuauuuccuccugggcc

SEQ ID NO: 11628 - RNA, 21 nt, Artificial
  Chemically synthesized
uagagaugcucauucaggugg

SEQ ID NO: 11629 - RNA, 21 nt, Artificial
  Chemically synthesized
gucggaugaucauguuauaga

SEQ ID NO: 11630 - RNA, 21 nt, Artificial
  Chemically synthesized
ugucgugucacaaccuuauug

SEQ ID NO: 11631 - RNA, 21 nt, Artificial
  Chemically synthesized
ucaggaauacauagucagcug

SEQ ID NO: 11632 - RNA, 21 nt, Artificial
  Chemically synthesized
uuaaccaggaacauggcugcg

SEQ ID NO: 11633 - RNA, 21 nt, Artificial
  Chemically synthesized
ugucgaacuguuuguauaugg

SEQ ID NO: 11634 - RNA, 21 nt, Artificial
  Chemically synthesized
ugucaaaauccauguucccac

SEQ ID NO: 11635 - RNA, 21 nt, Artificial
  Chemically synthesized
auccauguucccacuuucauc

SEQ ID NO: 11636 - RNA, 21 nt, Artificial
  Chemically synthesized
uguauauggccugccaccuuu

SEQ ID NO: 11637 - RNA, 21 nt, Artificial
  Chemically synthesized
auguuguuccacaaguacuug

SEQ ID NO: 11638 - RNA, 21 nt, Artificial
  Chemically synthesized
ucccacuuucaucugaguagc

SEQ ID NO: 11639 - RNA, 21 nt, Artificial
  Chemically synthesized
auuuguccagugccaucuuug

SEQ ID NO: 11640 - RNA, 21 nt, Artificial
  Chemically synthesized
uuagaguguccuagagccagg

SEQ ID NO: 11641 - RNA, 21 nt, Artificial
  Chemically synthesized
augugacugcagacaggaucg

SEQ ID NO: 11642 - RNA, 21 nt, Artificial
  Chemically synthesized
ugugucaaugccaaaaccauc

SEQ ID NO: 11643 - RNA, 21 nt, Artificial
  Chemically synthesized
ugaaguugucaaaauccaugu

SEQ ID NO: 11644 - RNA, 21 nt, Artificial
  Chemically synthesized
uuugaaggcacggaacauggc

SEQ ID NO: 11645 - RNA, 21 nt, Artificial
  Chemically synthesized
ucaaugccaaaaccaucaguc

SEQ ID NO: 11646 - RNA, 21 nt, Artificial
  Chemically synthesized
cgucggaugaucauguuauag

SEQ ID NO: 11647 - RNA, 21 nt, Artificial
  Chemically synthesized
uucaggaauacauagucagcu

SEQ ID NO: 11648 - RNA, 21 nt, Artificial
  Chemically synthesized
uacuugaauuccucaaagccc

SEQ ID NO: 11649 - RNA, 21 nt, Artificial
  Chemically synthesized
uuguuagaguguccuagagcc

SEQ ID NO: 11650 - RNA, 21 nt, Artificial
  Chemically synthesized
uucaccuggauuuguccagug

SEQ ID NO: 11651 - RNA, 21 nt, Artificial
  Chemically synthesized
auguuauagagaugcucauuc

SEQ ID NO: 11652 - RNA, 21 nt, Artificial
  Chemically synthesized
uacugagagaacaaaagcuug

SEQ ID NO: 11653 - RNA, 21 nt, Artificial
  Chemically synthesized
uugaauuccucaaagcccagc

SEQ ID NO: 11654 - RNA, 21 nt, Artificial
  Chemically synthesized
uugauguuguuccacaaguac

SEQ ID NO: 11655 - RNA, 21 nt, Artificial
  Chemically synthesized
uuggaguaaugugugcguggg

SEQ ID NO: 11656 - RNA, 21 nt, Artificial
  Chemically synthesized
uguccagugccaucuuuguca

SEQ ID NO: 11657 - RNA, 21 nt, Artificial
  Chemically synthesized
ucgaacuguuuguauauggcc

SEQ ID NO: 11658 - RNA, 21 nt, Artificial
  Chemically synthesized
uauauggccugccaccuuuug

SEQ ID NO: 11659 - RNA, 21 nt, Artificial
  Chemically synthesized
uugagaagcuggguaacaagu

SEQ ID NO: 11660 - RNA, 21 nt, Artificial
  Chemically synthesized
uuguauauggccugccaccuu

SEQ ID NO: 11661 - RNA, 21 nt, Artificial
  Chemically synthesized
uguuauagagaugcucauuca

SEQ ID NO: 11662 - RNA, 21 nt, Artificial
  Chemically synthesized
augaaguugucaaaauccaug

SEQ ID NO: 11663 - RNA, 21 nt, Artificial
  Chemically synthesized
uuugucaagagauuugaaggc

SEQ ID NO: 11664 - RNA, 21 nt, Artificial
  Chemically synthesized
uugucaaaauccauguuccca

SEQ ID NO: 11665 - RNA, 21 nt, Artificial
  Chemically synthesized
uguuggaguaaugugugcgug

SEQ ID NO: 11666 - RNA, 21 nt, Artificial
  Chemically synthesized
ugagagaacaaaagcuugugg

SEQ ID NO: 11667 - RNA, 21 nt, Artificial
  Chemically synthesized
uacugcaaauggucccugauc

SEQ ID NO: 11668 - RNA, 21 nt, Artificial
  Chemically synthesized
auggccugccaccuuuugaug

SEQ ID NO: 11669 - RNA, 21 nt, Artificial
  Chemically synthesized
ugaucauguuauagagaugcu

SEQ ID NO: 11670 - RNA, 21 nt, Artificial
  Chemically synthesized
ugauguuguuccacaaguacu

SEQ ID NO: 11671 - RNA, 21 nt, Artificial
  Chemically synthesized
aaguugucaaaauccauguuc

SEQ ID NO: 11672 - RNA, 21 nt, Artificial
  Chemically synthesized
ucaggccuccaagcacauuuc

SEQ ID NO: 11673 - RNA, 21 nt, Artificial
  Chemically synthesized
uauagagaugcucauucaggu

SEQ ID NO: 11674 - RNA, 21 nt, Artificial
  Chemically synthesized
uacauagucagcugcagccac

SEQ ID NO: 11675 - RNA, 21 nt, Artificial
  Chemically synthesized
ugccaaaaccaucagucuuca

SEQ ID NO: 11676 - RNA, 21 nt, Artificial
  Chemically synthesized
aguagcgucggaugaucaugu

SEQ ID NO: 11677 - RNA, 21 nt, Artificial
  Chemically synthesized
aacuguuuguauauggccugc

SEQ ID NO: 11678 - RNA, 21 nt, Artificial
  Chemically synthesized
aauauagacaaaggcacuggg

SEQ ID NO: 11679 - RNA, 21 nt, Artificial
  Chemically synthesized
aacuccaggcagggcaaauug

SEQ ID NO: 11680 - RNA, 21 nt, Artificial
  Chemically synthesized
ugucaaugccaaaaccaucag

SEQ ID NO: 11681 - RNA, 21 nt, Artificial
  Chemically synthesized
ugaauuccucaaagcccagcu

SEQ ID NO: 11682 - RNA, 21 nt, Artificial
  Chemically synthesized
uucaugaguucuguggcgcug

SEQ ID NO: 11683 - RNA, 21 nt, Artificial
  Chemically synthesized
aaguacugagagaacaaaagc

SEQ ID NO: 11684 - RNA, 21 nt, Artificial
  Chemically synthesized
uguuuauuuccuccugggccu

SEQ ID NO: 11685 - RNA, 21 nt, Artificial
  Chemically synthesized
aaguacuugaauuccucaaag

SEQ ID NO: 11686 - RNA, 21 nt, Artificial
  Chemically synthesized
augccaaaaccaucagucuuc

SEQ ID NO: 11687 - RNA, 21 nt, Artificial
  Chemically synthesized
aguugucaaaauccauguucc

SEQ ID NO: 11688 - RNA, 21 nt, Artificial
  Chemically synthesized
ucacucucguuggccucaaug

SEQ ID NO: 11689 - RNA, 21 nt, Artificial
  Chemically synthesized
acgaguuaaccaggaacaugg

SEQ ID NO: 11690 - RNA, 21 nt, Artificial
  Chemically synthesized
acugcaaauggucccugaucg

SEQ ID NO: 11691 - RNA, 21 nt, Artificial
  Chemically synthesized
guucacuacugcaaauggucc

SEQ ID NO: 11692 - RNA, 21 nt, Artificial
  Chemically synthesized
augcucauucagguggaaccc

SEQ ID NO: 11693 - RNA, 21 nt, Artificial
  Chemically synthesized
cggaugaucauguuauagaga

SEQ ID NO: 11694 - RNA, 21 nt, Artificial
  Chemically synthesized
ucauccucccagaacugagag

SEQ ID NO: 11695 - RNA, 21 nt, Artificial
  Chemically synthesized
ucuucagaucagggugucgug

SEQ ID NO: 11696 - RNA, 21 nt, Artificial
  Chemically synthesized
aauguucaugaguucuguggc

SEQ ID NO: 11697 - RNA, 21 nt, Artificial
  Chemically synthesized
guuuguauauggccugccacc

SEQ ID NO: 11698 - RNA, 21 nt, Artificial
  Chemically synthesized
ucugaguagcgucggaugauc

SEQ ID NO: 11699 - RNA, 21 nt, Artificial
  Chemically synthesized
aauuccucaaagcccagcuug

SEQ ID NO: 11700 - RNA, 21 nt, Artificial
  Chemically synthesized
aucaggccuccaagcacauuu

SEQ ID NO: 11701 - RNA, 21 nt, Artificial
  Chemically synthesized
uccacaaguacuugaauuccu

SEQ ID NO: 11702 - RNA, 21 nt, Artificial
  Chemically synthesized
uugagaauguucaugaguucu

SEQ ID NO: 11703 - RNA, 21 nt, Artificial
  Chemically synthesized
auacauagucagcugcagcca

SEQ ID NO: 11704 - RNA, 21 nt, Artificial
  Chemically synthesized
uggauuuguccagugccaucu

SEQ ID NO: 11705 - RNA, 21 nt, Artificial
  Chemically synthesized
gaugaucauguuauagagaug

SEQ ID NO: 11706 - RNA, 21 nt, Artificial
  Chemically synthesized
acuugaauuccucaaagccca

SEQ ID NO: 11707 - RNA, 21 nt, Artificial
  Chemically synthesized
uguucaugaguucuguggcgc

SEQ ID NO: 11708 - RNA, 21 nt, Artificial
  Chemically synthesized
ucaagaacgaguuaaccagga

SEQ ID NO: 11709 - RNA, 21 nt, Artificial
  Chemically synthesized
ggaugaucauguuauagagau

SEQ ID NO: 11710 - RNA, 21 nt, Artificial
  Chemically synthesized
uuuguccagugccaucuuugu

SEQ ID NO: 11711 - RNA, 21 nt, Artificial
  Chemically synthesized
ucaaaauccauguucccacuu

SEQ ID NO: 11712 - RNA, 21 nt, Artificial
  Chemically synthesized
aucagucuucagaucagggug

SEQ ID NO: 11713 - RNA, 21 nt, Artificial
  Chemically synthesized
uugggcccuggauguugagaa

SEQ ID NO: 11714 - RNA, 21 nt, Artificial
  Chemically synthesized
auguucccacuuucaucugag

SEQ ID NO: 11715 - RNA, 21 nt, Artificial
  Chemically synthesized
acuuucaucugaguagcgucg

SEQ ID NO: 11716 - RNA, 21 nt, Artificial
  Chemically synthesized
uugucaagagauuugaaggca

SEQ ID NO: 11717 - RNA, 21 nt, Artificial
  Chemically synthesized
gucaaaauccauguucccacu

SEQ ID NO: 11718 - RNA, 21 nt, Artificial
  Chemically synthesized
augcugcgacaugugucaaug

SEQ ID NO: 11719 - RNA, 21 nt, Artificial
  Chemically synthesized
cucucguuggccucaauguug

SEQ ID NO: 11720 - RNA, 21 nt, Artificial
  Chemically synthesized
uuugauguuguuccacaagua

SEQ ID NO: 11721 - RNA, 21 nt, Artificial
  Chemically synthesized
uguuccacaaguacuugaauu

SEQ ID NO: 11722 - RNA, 21 nt, Artificial
  Chemically synthesized
aaaagcuugugggucagcagg

SEQ ID NO: 11723 - RNA, 21 nt, Artificial
  Chemically synthesized
acaaccuuauugagaauguuc

SEQ ID NO: 11724 - RNA, 21 nt, Artificial
  Chemically synthesized
cuuguuagaguguccuagagc

SEQ ID NO: 11725 - RNA, 21 nt, Artificial
  Chemically synthesized
uccuauagcaaggcagugagg

SEQ ID NO: 11726 - RNA, 21 nt, Artificial
  Chemically synthesized
acaugugucaaugccaaaacc

SEQ ID NO: 11727 - RNA, 21 nt, Artificial
  Chemically synthesized
ucauucagguggaacccugcu

SEQ ID NO: 11728 - RNA, 21 nt, Artificial
  Chemically synthesized
aucacaagugcuaggcuuggc

SEQ ID NO: 11729 - RNA, 21 nt, Artificial
  Chemically synthesized
ucacaagugcuaggcuuggca

SEQ ID NO: 11730 - RNA, 21 nt, Artificial
  Chemically synthesized
auagagaugcucauucaggug

SEQ ID NO: 11731 - RNA, 21 nt, Artificial
  Chemically synthesized
acuacugcaaauggucccuga

SEQ ID NO: 11732 - RNA, 21 nt, Artificial
  Chemically synthesized
caaagaugugacugcagacag

SEQ ID NO: 11733 - RNA, 21 nt, Artificial
  Chemically synthesized
aaauugggcccuggauguuga

SEQ ID NO: 11734 - RNA, 21 nt, Artificial
  Chemically synthesized
ucaucugaguagcgucggaug

SEQ ID NO: 11735 - RNA, 21 nt, Artificial
  Chemically synthesized
cacuacugcaaauggucccug

SEQ ID NO: 11736 - RNA, 21 nt, Artificial
  Chemically synthesized
auuccucaaagcccagcuugc

SEQ ID NO: 11737 - RNA, 21 nt, Artificial
  Chemically synthesized
ucuuugucaagagauuugaag

SEQ ID NO: 11738 - RNA, 21 nt, Artificial
  Chemically synthesized
acaaguacugagagaacaaaa

SEQ ID NO: 11739 - RNA, 21 nt, Artificial
  Chemically synthesized
accaucagucuucagaucagg

SEQ ID NO: 11740 - RNA, 21 nt, Artificial
  Chemically synthesized
agagauuugaaggcacggaac

SEQ ID NO: 11741 - RNA, 21 nt, Artificial
  Chemically synthesized
uguuguuccacaaguacuuga

SEQ ID NO: 11742 - RNA, 21 nt, Artificial
  Chemically synthesized
aaaaccaucagucuucagauc

SEQ ID NO: 11743 - RNA, 21 nt, Artificial
  Chemically synthesized
aaaggcaccugggaguucacu

SEQ ID NO: 11744 - RNA, 21 nt, Artificial
  Chemically synthesized
ucaaaggcaccugggaguuca

SEQ ID NO: 11745 - RNA, 21 nt, Artificial
  Chemically synthesized
auguucaugaguucuguggcg

SEQ ID NO: 11746 - RNA, 21 nt, Artificial
  Chemically synthesized
gccaccuuuugauguuguucc

SEQ ID NO: 11747 - RNA, 21 nt, Artificial
  Chemically synthesized
aaaccaucagucuucagauca

SEQ ID NO: 11748 - RNA, 21 nt, Artificial
  Chemically synthesized
ucacuacugcaaauggucccu

SEQ ID NO: 11749 - RNA, 21 nt, Artificial
  Chemically synthesized
aucagggugucgugucacaac

SEQ ID NO: 11750 - RNA, 21 nt, Artificial
  Chemically synthesized
aguuaaccaggaacauggcug

SEQ ID NO: 11751 - RNA, 21 nt, Artificial
  Chemically synthesized
aaaauccauguucccacuuuc

SEQ ID NO: 11752 - RNA, 21 nt, Artificial
  Chemically synthesized
uggauguugagaagcugggua

SEQ ID NO: 11753 - RNA, 21 nt, Artificial
  Chemically synthesized
uggaggcaucacaagugcuag

SEQ ID NO: 11754 - RNA, 21 nt, Artificial
  Chemically synthesized
uauggccugccaccuuuugau

SEQ ID NO: 11755 - RNA, 21 nt, Artificial
  Chemically synthesized
auguucaccuggauuugucca

SEQ ID NO: 11756 - RNA, 21 nt, Artificial
  Chemically synthesized
uucccacuuucaucugaguag

SEQ ID NO: 11757 - RNA, 21 nt, Artificial
  Chemically synthesized
caaauugggcccuggauguug

SEQ ID NO: 11758 - RNA, 21 nt, Artificial
  Chemically synthesized
aauacauagucagcugcagcc

SEQ ID NO: 11759 - RNA, 21 nt, Artificial
  Chemically synthesized
ccuuauugagaauguucauga

SEQ ID NO: 11760 - RNA, 21 nt, Artificial
  Chemically synthesized
uucaucugaguagcgucggau

SEQ ID NO: 11761 - RNA, 21 nt, Artificial
  Chemically synthesized
ccauguucccacuuucaucug

SEQ ID NO: 11762 - RNA, 21 nt, Artificial
  Chemically synthesized
uggauguucaccuggauuugu

SEQ ID NO: 11763 - RNA, 21 nt, Artificial
  Chemically synthesized
aagagauuugaaggcacggaa

SEQ ID NO: 11764 - RNA, 21 nt, Artificial
  Chemically synthesized
aacgaguuaaccaggaacaug

SEQ ID NO: 11765 - RNA, 21 nt, Artificial
  Chemically synthesized
uguggugucgcuauccaucac

SEQ ID NO: 11766 - RNA, 21 nt, Artificial
  Chemically synthesized
gaucauguuauagagaugcuc

SEQ ID NO: 11767 - RNA, 21 nt, Artificial
  Chemically synthesized
ucgugucacaaccuuauugag

SEQ ID NO: 11768 - RNA, 21 nt, Artificial
  Chemically synthesized
auccucccagaacugagagag

SEQ ID NO: 11769 - RNA, 21 nt, Artificial
  Chemically synthesized
ugccaccuuuugauguuguuc

SEQ ID NO: 11770 - RNA, 21 nt, Artificial
  Chemically synthesized
auugagaauguucaugaguuc

SEQ ID NO: 11771 - RNA, 21 nt, Artificial
  Chemically synthesized
ucaugaguucuguggcgcuga

SEQ ID NO: 11772 - RNA, 21 nt, Artificial
  Chemically synthesized
accuuuugauguuguuccaca

SEQ ID NO: 11773 - RNA, 21 nt, Artificial
  Chemically synthesized
aauguuggaguaaugugugcg

SEQ ID NO: 11774 - RNA, 21 nt, Artificial
  Chemically synthesized
gugucaaugccaaaaccauca

SEQ ID NO: 11775 - RNA, 21 nt, Artificial
  Chemically synthesized
ugagaauguucaugaguucug

SEQ ID NO: 11776 - RNA, 21 nt, Artificial
  Chemically synthesized
uccagugccaucuuugucaag

SEQ ID NO: 11777 - RNA, 21 nt, Artificial
  Chemically synthesized
accuuauugagaauguucaug

SEQ ID NO: 11778 - RNA, 21 nt, Artificial
  Chemically synthesized
agucauccucccagaacugag

SEQ ID NO: 11779 - RNA, 21 nt, Artificial
  Chemically synthesized
gucgugucacaaccuuauuga

SEQ ID NO: 11780 - RNA, 21 nt, Artificial
  Chemically synthesized
acauagucagcugcagccacu

SEQ ID NO: 11781 - RNA, 21 nt, Artificial
  Chemically synthesized
uguuuguauauggccugccac

SEQ ID NO: 11782 - RNA, 21 nt, Artificial
  Chemically synthesized
aggaauacauagucagcugca

SEQ ID NO: 11783 - RNA, 21 nt, Artificial
  Chemically synthesized
guagcgucggaugaucauguu

SEQ ID NO: 11784 - RNA, 21 nt, Artificial
  Chemically synthesized
auauggccugccaccuuuuga

SEQ ID NO: 11785 - RNA, 21 nt, Artificial
  Chemically synthesized
cuucagaucagggugucgugu

SEQ ID NO: 11786 - RNA, 21 nt, Artificial
  Chemically synthesized
cuuucaucugaguagcgucgg

SEQ ID NO: 11787 - RNA, 21 nt, Artificial
  Chemically synthesized
ucaccuggauuuguccagugc

SEQ ID NO: 11788 - RNA, 21 nt, Artificial
  Chemically synthesized
ugcaaauggucccugaucggu

SEQ ID NO: 11789 - RNA, 21 nt, Artificial
  Chemically synthesized
ucacaaccuuauugagaaugu

SEQ ID NO: 11790 - RNA, 21 nt, Artificial
  Chemically synthesized
gaauauagacaaaggcacugg

SEQ ID NO: 11791 - RNA, 21 nt, Artificial
  Chemically synthesized
agcagaauauagacaaaggca

SEQ ID NO: 11792 - RNA, 21 nt, Artificial
  Chemically synthesized
ucggucagugucgaacuguuu

SEQ ID NO: 11793 - RNA, 21 nt, Artificial
  Chemically synthesized
ucagugucgaacuguuuguau

SEQ ID NO: 11794 - RNA, 21 nt, Artificial
  Chemically synthesized
uccaggugacuccuauagcaa

SEQ ID NO: 11795 - RNA, 21 nt, Artificial
  Chemically synthesized
cuuugucaagagauuugaagg

SEQ ID NO: 11796 - RNA, 21 nt, Artificial
  Chemically synthesized
auugggcccuggauguugaga

SEQ ID NO: 11797 - RNA, 21 nt, Artificial
  Chemically synthesized
uggccugccaccuuuugaugu

SEQ ID NO: 11798 - RNA, 21 nt, Artificial
  Chemically synthesized
aaauccauguucccacuuuca

SEQ ID NO: 11799 - RNA, 21 nt, Artificial
  Chemically synthesized
uuguuccacaaguacuugaau

SEQ ID NO: 11800 - RNA, 21 nt, Artificial
  Chemically synthesized
aguacuugaauuccucaaagc

SEQ ID NO: 11801 - RNA, 21 nt, Artificial
  Chemically synthesized
uggacagagcuuguuagagug

SEQ ID NO: 11802 - RNA, 21 nt, Artificial
  Chemically synthesized
uccaguucaggaauacauagu

SEQ ID NO: 11803 - RNA, 21 nt, Artificial
  Chemically synthesized
ucagucuucagaucagggugu

SEQ ID NO: 11804 - RNA, 21 nt, Artificial
  Chemically synthesized
uagcgucggaugaucauguua

SEQ ID NO: 11805 - RNA, 21 nt, Artificial
  Chemically synthesized
gaauacauagucagcugcagc

SEQ ID NO: 11806 - RNA, 21 nt, Artificial
  Chemically synthesized
agaacgaguuaaccaggaaca

SEQ ID NO: 11807 - RNA, 21 nt, Artificial
  Chemically synthesized
acuguuuguauauggccugcc

SEQ ID NO: 11808 - RNA, 21 nt, Artificial
  Chemically synthesized
aaugccaaaaccaucagucuu

SEQ ID NO: 11809 - RNA, 21 nt, Artificial
  Chemically synthesized
aaggcaccugggaguucacua

SEQ ID NO: 11810 - RNA, 21 nt, Artificial
  Chemically synthesized
gagagaacaaaagcuuguggg

SEQ ID NO: 11811 - RNA, 21 nt, Artificial
  Chemically synthesized
agaagcuggguaacaaguacu

SEQ ID NO: 11812 - RNA, 21 nt, Artificial
  Chemically synthesized
guucaggaauacauagucagc

SEQ ID NO: 11813 - RNA, 21 nt, Artificial
  Chemically synthesized
guuggaguaaugugugcgugg

SEQ ID NO: 11814 - RNA, 21 nt, Artificial
  Chemically synthesized
auguuggaguaaugugugcgu

SEQ ID NO: 11815 - RNA, 21 nt, Artificial
  Chemically synthesized
uaaccaggaacauggcugcga

SEQ ID NO: 11816 - RNA, 21 nt, Artificial
  Chemically synthesized
aauccauguucccacuuucau

SEQ ID NO: 11817 - RNA, 21 nt, Artificial
  Chemically synthesized
ggcauguuuauuuccuccugg

SEQ ID NO: 11818 - RNA, 21 nt, Artificial
  Chemically synthesized
cugaucggucagugucgaacu

SEQ ID NO: 11819 - RNA, 21 nt, Artificial
  Chemically synthesized
cugaguagcgucggaugauca

SEQ ID NO: 11820 - RNA, 21 nt, Artificial
  Chemically synthesized
ugcucauucagguggaacccu

SEQ ID NO: 11821 - RNA, 21 nt, Artificial
  Chemically synthesized
gucacaaccuuauugagaaug

SEQ ID NO: 11822 - RNA, 21 nt, Artificial
  Chemically synthesized
ucaagagauuugaaggcacgg

SEQ ID NO: 11823 - RNA, 21 nt, Artificial
  Chemically synthesized
gucaaugccaaaaccaucagu

SEQ ID NO: 11824 - RNA, 21 nt, Artificial
  Chemically synthesized
agcgucggaugaucauguuau

SEQ ID NO: 11825 - RNA, 21 nt, Artificial
  Chemically synthesized
aguacugagagaacaaaagcu

SEQ ID NO: 11826 - RNA, 21 nt, Artificial
  Chemically synthesized
uccuggauguucaccuggauu

SEQ ID NO: 11827 - RNA, 21 nt, Artificial
  Chemically synthesized
aucggucagugucgaacuguu

SEQ ID NO: 11828 - RNA, 21 nt, Artificial
  Chemically synthesized
aagaacgaguuaaccaggaac

SEQ ID NO: 11829 - RNA, 21 nt, Artificial
  Chemically synthesized
acugagagaacaaaagcuugu

SEQ ID NO: 11830 - RNA, 21 nt, Artificial
  Chemically synthesized
cuguggugucgcuauccauca

SEQ ID NO: 11831 - RNA, 21 nt, Artificial
  Chemically synthesized
aguucacuacugcaaaugguc

SEQ ID NO: 11832 - RNA, 21 nt, Artificial
  Chemically synthesized
gaugugacugcagacaggauc

SEQ ID NO: 11833 - RNA, 21 nt, Artificial
  Chemically synthesized
ucguuggccucaauguuggag

SEQ ID NO: 11834 - RNA, 21 nt, Artificial
  Chemically synthesized
ugaucggucagugucgaacug

SEQ ID NO: 11835 - RNA, 21 nt, Artificial
  Chemically synthesized
auguugagaagcuggguaaca

SEQ ID NO: 11836 - RNA, 21 nt, Artificial
  Chemically synthesized
agaauauagacaaaggcacug

SEQ ID NO: 11837 - RNA, 21 nt, Artificial
  Chemically synthesized
guauauggccugccaccuuuu

SEQ ID NO: 11838 - RNA, 21 nt, Artificial
  Chemically synthesized
ugucaagagauuugaaggcac

SEQ ID NO: 11839 - RNA, 21 nt, Artificial
  Chemically synthesized
caguucaggaauacauaguca

SEQ ID NO: 11840 - RNA, 21 nt, Artificial
  Chemically synthesized
guacugagagaacaaaagcuu

SEQ ID NO: 11841 - RNA, 21 nt, Artificial
  Chemically synthesized
cuggauuuguccagugccauc

SEQ ID NO: 11842 - RNA, 21 nt, Artificial
  Chemically synthesized
uaacaaguacugagagaacaa

SEQ ID NO: 11843 - RNA, 21 nt, Artificial
  Chemically synthesized
cuucaagaacgaguuaaccag

SEQ ID NO: 11844 - RNA, 21 nt, Artificial
  Chemically synthesized
cagaauauagacaaaggcacu

SEQ ID NO: 11845 - RNA, 21 nt, Artificial
  Chemically synthesized
guugucaaaauccauguuccc

SEQ ID NO: 11846 - RNA, 21 nt, Artificial
  Chemically synthesized
guuaaccaggaacauggcugc

SEQ ID NO: 11847 - RNA, 21 nt, Artificial
  Chemically synthesized
acagagcuuguuagagugucc

SEQ ID NO: 11848 - RNA, 21 nt, Artificial
  Chemically synthesized
accuggauuuguccagugcca

SEQ ID NO: 11849 - RNA, 21 nt, Artificial
  Chemically synthesized
aagaugugacugcagacagga

SEQ ID NO: 11850 - RNA, 21 nt, Artificial
  Chemically synthesized
cgaacuguuuguauauggccu

SEQ ID NO: 11851 - RNA, 21 nt, Artificial
  Chemically synthesized
acccguggacagagcuuguua

SEQ ID NO: 11852 - RNA, 21 nt, Artificial
  Chemically synthesized
guccagugccaucuuugucaa

SEQ ID NO: 11853 - RNA, 21 nt, Artificial
  Chemically synthesized
ucauguuauagagaugcucau

SEQ ID NO: 11854 - RNA, 21 nt, Artificial
  Chemically synthesized
ugcgacaugugucaaugccaa

SEQ ID NO: 11855 - RNA, 21 nt, Artificial
  Chemically synthesized
aauugggcccuggauguugag

SEQ ID NO: 11856 - RNA, 21 nt, Artificial
  Chemically synthesized
uuucaucugaguagcgucgga

SEQ ID NO: 11857 - RNA, 21 nt, Artificial
  Chemically synthesized
aaagaugugacugcagacagg

SEQ ID NO: 11858 - RNA, 21 nt, Artificial
  Chemically synthesized
caggaauacauagucagcugc

SEQ ID NO: 11859 - RNA, 21 nt, Artificial
  Chemically synthesized
caauguuggaguaaugugugc

SEQ ID NO: 11860 - RNA, 21 nt, Artificial
  Chemically synthesized
ugggaguucacuacugcaaau

SEQ ID NO: 11861 - RNA, 21 nt, Artificial
  Chemically synthesized
guacuugaauuccucaaagcc

SEQ ID NO: 11862 - RNA, 21 nt, Artificial
  Chemically synthesized
cucaauguuggaguaaugugu

SEQ ID NO: 11863 - RNA, 21 nt, Artificial
  Chemically synthesized
ccacaaguacuugaauuccuc

SEQ ID NO: 11864 - RNA, 21 nt, Artificial
  Chemically synthesized
cuccaguucaggaauacauag

SEQ ID NO: 11865 - RNA, 21 nt, Artificial
  Chemically synthesized
aguucaggaauacauagucag

SEQ ID NO: 11866 - RNA, 21 nt, Artificial
  Chemically synthesized
cugggaguucacuacugcaaa

SEQ ID NO: 11867 - RNA, 21 nt, Artificial
  Chemically synthesized
agaauguucaugaguucugug

SEQ ID NO: 11868 - RNA, 21 nt, Artificial
  Chemically synthesized
acaaaagcuugugggucagca

SEQ ID NO: 11869 - RNA, 21 nt, Artificial
  Chemically synthesized
acucucguuggccucaauguu

SEQ ID NO: 11870 - RNA, 21 nt, Artificial
  Chemically synthesized
cuggauguucaccuggauuug

SEQ ID NO: 11871 - RNA, 21 nt, Artificial
  Chemically synthesized
gugucgaacuguuuguauaug

SEQ ID NO: 11872 - RNA, 21 nt, Artificial
  Chemically synthesized
gggcauguuuauuuccuccug

SEQ ID NO: 11873 - RNA, 21 nt, Artificial
  Chemically synthesized
ugaucaggccuccaagcacau

SEQ ID NO: 11874 - RNA, 21 nt, Artificial
  Chemically synthesized
agaugcucauucagguggaac

SEQ ID NO: 11875 - RNA, 21 nt, Artificial
  Chemically synthesized
uguuagaguguccuagagcca

SEQ ID NO: 11876 - RNA, 21 nt, Artificial
  Chemically synthesized
ugaccaagcagcugaugaagu

SEQ ID NO: 11877 - RNA, 21 nt, Artificial
  Chemically synthesized
cuggguaacaaguacugagag

SEQ ID NO: 11878 - RNA, 21 nt, Artificial
  Chemically synthesized
cuugaauuccucaaagcccag

SEQ ID NO: 11879 - RNA, 21 nt, Artificial
  Chemically synthesized
guuuauuuccuccugggccug

SEQ ID NO: 11880 - RNA, 21 nt, Artificial
  Chemically synthesized
gauuugaaggcacggaacaug

SEQ ID NO: 11881 - RNA, 21 nt, Artificial
  Chemically synthesized
uguucaccuggauuuguccag

SEQ ID NO: 11882 - RNA, 21 nt, Artificial
  Chemically synthesized
caaccuuauugagaauguuca

SEQ ID NO: 11883 - RNA, 21 nt, Artificial
  Chemically synthesized
caugugucaaugccaaaacca

SEQ ID NO: 11884 - RNA, 21 nt, Artificial
  Chemically synthesized
cugaccuccaugucaucucca

SEQ ID NO: 11885 - RNA, 21 nt, Artificial
  Chemically synthesized
cuguuuguauauggccugcca

SEQ ID NO: 11886 - RNA, 21 nt, Artificial
  Chemically synthesized
cuccuauagcaaggcagugag

SEQ ID NO: 11887 - RNA, 21 nt, Artificial
  Chemically synthesized
ugaugaaguugucaaaaucca

SEQ ID NO: 11888 - RNA, 21 nt, Artificial
  Chemically synthesized
guaacaaguacugagagaaca

SEQ ID NO: 11889 - RNA, 21 nt, Artificial
  Chemically synthesized
augugucaaugccaaaaccau

SEQ ID NO: 11890 - RNA, 21 nt, Artificial
  Chemically synthesized
guuauagagaugcucauucag

SEQ ID NO: 11891 - RNA, 21 nt, Artificial
  Chemically synthesized
cuccaggugacuccuauagca

SEQ ID NO: 11892 - RNA, 21 nt, Artificial
  Chemically synthesized
acaaagaugugacugcagaca

SEQ ID NO: 11893 - RNA, 21 nt, Artificial
  Chemically synthesized
ccugccaccuuuugauguugu

SEQ ID NO: 11894 - RNA, 21 nt, Artificial
  Chemically synthesized
caggugacuccuauagcaagg

SEQ ID NO: 11895 - RNA, 21 nt, Artificial
  Chemically synthesized
gucuucagaucagggugucgu

SEQ ID NO: 11896 - RNA, 21 nt, Artificial
  Chemically synthesized
guuagaguguccuagagccag

SEQ ID NO: 11897 - RNA, 21 nt, Artificial
  Chemically synthesized
gauuuguccagugccaucuuu

SEQ ID NO: 11898 - RNA, 21 nt, Artificial
  Chemically synthesized
ugaccuccaugucaucuccag

SEQ ID NO: 11899 - RNA, 21 nt, Artificial
  Chemically synthesized
uuggccucaauguuggaguaa

SEQ ID NO: 11900 - RNA, 21 nt, Artificial
  Chemically synthesized
gucagugucgaacuguuugua

SEQ ID NO: 11901 - RNA, 21 nt, Artificial
  Chemically synthesized
cugaugaaguugucaaaaucc

SEQ ID NO: 11902 - RNA, 21 nt, Artificial
  Chemically synthesized
caaauggucccugaucgguca

SEQ ID NO: 11903 - RNA, 21 nt, Artificial
  Chemically synthesized
agcuuguuagaguguccuaga

SEQ ID NO: 11904 - RNA, 21 nt, Artificial
  Chemically synthesized
gagcuuguuagaguguccuag

SEQ ID NO: 11905 - RNA, 21 nt, Artificial
  Chemically synthesized
caggcugggagcagaauauag

SEQ ID NO: 11906 - RNA, 21 nt, Artificial
  Chemically synthesized
agaacaaaagcuuguggguca

SEQ ID NO: 11907 - RNA, 21 nt, Artificial
  Chemically synthesized
cauguuauagagaugcucauu

SEQ ID NO: 11908 - RNA, 21 nt, Artificial
  Chemically synthesized
aagcuggguaacaaguacuga

SEQ ID NO: 11909 - RNA, 21 nt, Artificial
  Chemically synthesized
ccaccuuuugauguuguucca

SEQ ID NO: 11910 - RNA, 21 nt, Artificial
  Chemically synthesized
gaagcuggguaacaaguacug

SEQ ID NO: 11911 - RNA, 21 nt, Artificial
  Chemically synthesized
gaauguucaugaguucugugg

SEQ ID NO: 11912 - RNA, 21 nt, Artificial
  Chemically synthesized
ucagaucagggugucguguca

SEQ ID NO: 11913 - RNA, 21 nt, Artificial
  Chemically synthesized
aaauggucccugaucggucag

SEQ ID NO: 11914 - RNA, 21 nt, Artificial
  Chemically synthesized
uguugagaagcuggguaacaa

SEQ ID NO: 11915 - RNA, 21 nt, Artificial
  Chemically synthesized
gucgaacuguuuguauauggc

SEQ ID NO: 11916 - RNA, 21 nt, Artificial
  Chemically synthesized
cuuuugauguuguuccacaag

SEQ ID NO: 11917 - RNA, 21 nt, Artificial
  Chemically synthesized
gauguuguuccacaaguacuu

SEQ ID NO: 11918 - RNA, 21 nt, Artificial
  Chemically synthesized
ugaguagcgucggaugaucau

SEQ ID NO: 11919 - RNA, 21 nt, Artificial
  Chemically synthesized
ugcugcgacaugugucaaugc

SEQ ID NO: 11920 - RNA, 21 nt, Artificial
  Chemically synthesized
ugucacaaccuuauugagaau

SEQ ID NO: 11921 - RNA, 21 nt, Artificial
  Chemically synthesized
guucaccuggauuuguccagu

SEQ ID NO: 11922 - RNA, 21 nt, Artificial
  Chemically synthesized
agagcuuguuagaguguccua

SEQ ID NO: 11923 - RNA, 21 nt, Artificial
  Chemically synthesized
cccacuuucaucugaguagcg

SEQ ID NO: 11924 - RNA, 21 nt, Artificial
  Chemically synthesized
ugagaagcuggguaacaagua

SEQ ID NO: 11925 - RNA, 21 nt, Artificial
  Chemically synthesized
acuccuggauguucaccugga

SEQ ID NO: 11926 - RNA, 21 nt, Artificial
  Chemically synthesized
ggauguucaccuggauuuguc

SEQ ID NO: 11927 - RNA, 21 nt, Artificial
  Chemically synthesized
cagagcuuguuagaguguccu

SEQ ID NO: 11928 - RNA, 21 nt, Artificial
  Chemically synthesized
cgugucacaaccuuauugaga

SEQ ID NO: 11929 - RNA, 21 nt, Artificial
  Chemically synthesized
aacaaaagcuugugggucagc

SEQ ID NO: 11930 - RNA, 21 nt, Artificial
  Chemically synthesized
gaacuguuuguauauggccug

SEQ ID NO: 11931 - RNA, 21 nt, Artificial
  Chemically synthesized
cugagagaacaaaagcuugug

SEQ ID NO: 11932 - RNA, 21 nt, Artificial
  Chemically synthesized
ccaucuuugucaagagauuug

SEQ ID NO: 11933 - RNA, 21 nt, Artificial
  Chemically synthesized
caaaaccaucagucuucagau

SEQ ID NO: 11934 - RNA, 21 nt, Artificial
  Chemically synthesized
ugacuccuauagcaaggcagu

SEQ ID NO: 11935 - RNA, 21 nt, Artificial
  Chemically synthesized
agcuggguaacaaguacugag

SEQ ID NO: 11936 - RNA, 21 nt, Artificial
  Chemically synthesized
gucaagagauuugaaggcacg

SEQ ID NO: 11937 - RNA, 21 nt, Artificial
  Chemically synthesized
ccaucagucuucagaucaggg

SEQ ID NO: 11938 - RNA, 21 nt, Artificial
  Chemically synthesized
aaccaucagucuucagaucag

SEQ ID NO: 11939 - RNA, 21 nt, Artificial
  Chemically synthesized
caucuuugucaagagauuuga

SEQ ID NO: 11940 - RNA, 21 nt, Artificial
  Chemically synthesized
cacaaguacuugaauuccuca

SEQ ID NO: 11941 - RNA, 21 nt, Artificial
  Chemically synthesized
cauguucccacuuucaucuga

SEQ ID NO: 11942 - RNA, 21 nt, Artificial
  Chemically synthesized
gagaacaaaagcuuguggguc

SEQ ID NO: 11943 - RNA, 21 nt, Artificial
  Chemically synthesized
acuccuauagcaaggcaguga

SEQ ID NO: 11944 - RNA, 21 nt, Artificial
  Chemically synthesized
aggcugggagcagaauauaga

SEQ ID NO: 11945 - RNA, 21 nt, Artificial
  Chemically synthesized
gauguucaccuggauuugucc

SEQ ID NO: 11946 - RNA, 21 nt, Artificial
  Chemically synthesized
acaagugcuaggcuuggcaca

SEQ ID NO: 11947 - RNA, 21 nt, Artificial
  Chemically synthesized
gcagaauauagacaaaggcac

SEQ ID NO: 11948 - RNA, 21 nt, Artificial
  Chemically synthesized
gaguagcgucggaugaucaug

SEQ ID NO: 11949 - RNA, 21 nt, Artificial
  Chemically synthesized
agagaugcucauucaggugga

SEQ ID NO: 11950 - RNA, 21 nt, Artificial
  Chemically synthesized
gagaauguucaugaguucugu

SEQ ID NO: 11951 - RNA, 21 nt, Artificial
  Chemically synthesized
cuuauugagaauguucaugag

SEQ ID NO: 11952 - RNA, 21 nt, Artificial
  Chemically synthesized
acaaguacuugaauuccucaa

SEQ ID NO: 11953 - RNA, 21 nt, Artificial
  Chemically synthesized
guggacagagcuuguuagagu

SEQ ID NO: 11954 - RNA, 21 nt, Artificial
  Chemically synthesized
ggagcagaauauagacaaagg

SEQ ID NO: 11955 - RNA, 21 nt, Artificial
  Chemically synthesized
ccaggugacuccuauagcaag

SEQ ID NO: 11956 - RNA, 21 nt, Artificial
  Chemically synthesized
cugaccaagcagcugaugaag

SEQ ID NO: 11957 - RNA, 21 nt, Artificial
  Chemically synthesized
cugggagcagaauauagacaa

SEQ ID NO: 11958 - RNA, 21 nt, Artificial
  Chemically synthesized
gaugcucauucagguggaacc

SEQ ID NO: 11959 - RNA, 21 nt, Artificial
  Chemically synthesized
guugagaagcuggguaacaag

SEQ ID NO: 11960 - RNA, 21 nt, Artificial
  Chemically synthesized
gacaugugucaaugccaaaac

SEQ ID NO: 11961 - RNA, 21 nt, Artificial
  Chemically synthesized
caucacaagugcuaggcuugg

SEQ ID NO: 11962 - RNA, 21 nt, Artificial
  Chemically synthesized
ccaagcagcugaugaaguugu

SEQ ID NO: 11963 - RNA, 21 nt, Artificial
  Chemically synthesized
gcuccaguucaggaauacaua

SEQ ID NO: 11964 - RNA, 21 nt, Artificial
  Chemically synthesized
gcauguuuauuuccuccuggg

SEQ ID NO: 11965 - RNA, 21 nt, Artificial
  Chemically synthesized
uggguaacaaguacugagaga

SEQ ID NO: 11966 - RNA, 21 nt, Artificial
  Chemically synthesized
guuccacaaguacuugaauuc

SEQ ID NO: 11967 - RNA, 21 nt, Artificial
  Chemically synthesized
caccuuuugauguuguuccac

SEQ ID NO: 11968 - RNA, 21 nt, Artificial
  Chemically synthesized
gagauuugaaggcacggaaca

SEQ ID NO: 11969 - RNA, 21 nt, Artificial
  Chemically synthesized
agggugucgugucacaaccuu

SEQ ID NO: 11970 - RNA, 21 nt, Artificial
  Chemically synthesized
cauguuuauuuccuccugggc

SEQ ID NO: 11971 - RNA, 21 nt, Artificial
  Chemically synthesized
aacaaguacugagagaacaaa

SEQ ID NO: 11972 - RNA, 21 nt, Artificial
  Chemically synthesized
ccucaauguuggaguaaugug

SEQ ID NO: 11973 - RNA, 21 nt, Artificial
  Chemically synthesized
cgaguuaaccaggaacauggc

SEQ ID NO: 11974 - RNA, 21 nt, Artificial
  Chemically synthesized
ccacuuucaucugaguagcgu

SEQ ID NO: 11975 - RNA, 21 nt, Artificial
  Chemically synthesized
cuggauguugagaagcugggu

SEQ ID NO: 11976 - RNA, 21 nt, Artificial
  Chemically synthesized
caaaauccauguucccacuuu

SEQ ID NO: 11977 - RNA, 21 nt, Artificial
  Chemically synthesized
uggccucaauguuggaguaau

SEQ ID NO: 11978 - RNA, 21 nt, Artificial
  Chemically synthesized
cggucagugucgaacuguuug

SEQ ID NO: 11979 - RNA, 21 nt, Artificial
  Chemically synthesized
ccaugcugcgacaugugucaa

SEQ ID NO: 11980 - RNA, 21 nt, Artificial
  Chemically synthesized
gcgucggaugaucauguuaua

SEQ ID NO: 11981 - RNA, 21 nt, Artificial
  Chemically synthesized
guuguuccacaaguacuugaa

SEQ ID NO: 11982 - RNA, 21 nt, Artificial
  Chemically synthesized
cagucuucagaucaggguguc

SEQ ID NO: 11983 - RNA, 21 nt, Artificial
  Chemically synthesized
ccagugccaucuuugucaaga

SEQ ID NO: 11984 - RNA, 21 nt, Artificial
  Chemically synthesized
gggagcagaauauagacaaag

SEQ ID NO: 11985 - RNA, 21 nt, Artificial
  Chemically synthesized
accugggaguucacuacugca

SEQ ID NO: 11986 - RNA, 21 nt, Artificial
  Chemically synthesized
agugccaucuuugucaagaga

SEQ ID NO: 11987 - RNA, 21 nt, Artificial
  Chemically synthesized
gagcagaauauagacaaaggc

SEQ ID NO: 11988 - RNA, 21 nt, Artificial
  Chemically synthesized
gugucgugucacaaccuuauu

SEQ ID NO: 11989 - RNA, 21 nt, Artificial
  Chemically synthesized
accaugcugcgacauguguca

SEQ ID NO: 11990 - RNA, 21 nt, Artificial
  Chemically synthesized
aauggucccugaucggucagu

SEQ ID NO: 11991 - RNA, 21 nt, Artificial
  Chemically synthesized
gaguuaaccaggaacauggcu

SEQ ID NO: 11992 - RNA, 21 nt, Artificial
  Chemically synthesized
caagcagcugaugaaguuguc

SEQ ID NO: 11993 - RNA, 21 nt, Artificial
  Chemically synthesized
ccaaaaccaucagucuucaga

SEQ ID NO: 11994 - RNA, 21 nt, Artificial
  Chemically synthesized
cguuggccucaauguuggagu

SEQ ID NO: 11995 - RNA, 21 nt, Artificial
  Chemically synthesized
caaugccaaaaccaucagucu

SEQ ID NO: 11996 - RNA, 21 nt, Artificial
  Chemically synthesized
ccaguucaggaauacauaguc

SEQ ID NO: 11997 - RNA, 21 nt, Artificial
  Chemically synthesized
ggcugggagcagaauauagac

SEQ ID NO: 11998 - RNA, 21 nt, Artificial
  Chemically synthesized
gcaggcugggagcagaauaua

SEQ ID NO: 11999 - RNA, 21 nt, Artificial
  Chemically synthesized
gccugccaccuuuugauguug

SEQ ID NO: 12000 - RNA, 21 nt, Artificial
  Chemically synthesized
caaguacugagagaacaaaag

SEQ ID NO: 12001 - RNA, 21 nt, Artificial
  Chemically synthesized
gcugaugaaguugucaaaauc

SEQ ID NO: 12002 - RNA, 21 nt, Artificial
  Chemically synthesized
agauuugaaggcacggaacau

SEQ ID NO: 12003 - RNA, 21 nt, Artificial
  Chemically synthesized
ccguggacagagcuuguuaga

SEQ ID NO: 12004 - RNA, 21 nt, Artificial
  Chemically synthesized
gaaguugucaaaauccauguu

SEQ ID NO: 12005 - RNA, 21 nt, Artificial
  Chemically synthesized
guucccacuuucaucugagua

SEQ ID NO: 12006 - RNA, 21 nt, Artificial
  Chemically synthesized
gagaagcuggguaacaaguac

SEQ ID NO: 12007 - RNA, 21 nt, Artificial
  Chemically synthesized
gccaaaaccaucagucuucag

SEQ ID NO: 12008 - RNA, 21 nt, Artificial
  Chemically synthesized
cucacucucguuggccucaau

SEQ ID NO: 12009 - RNA, 21 nt, Artificial
  Chemically synthesized
caagagauuugaaggcacgga

SEQ ID NO: 12010 - RNA, 21 nt, Artificial
  Chemically synthesized
agaucagggugucgugucaca

SEQ ID NO: 12011 - RNA, 21 nt, Artificial
  Chemically synthesized
aucugaguagcgucggaugau

SEQ ID NO: 12012 - RNA, 21 nt, Artificial
  Chemically synthesized
aggcaucacaagugcuaggcu

SEQ ID NO: 12013 - RNA, 21 nt, Artificial
  Chemically synthesized
ggucagugucgaacuguuugu

SEQ ID NO: 12014 - RNA, 21 nt, Artificial
  Chemically synthesized
gauguugagaagcuggguaac

SEQ ID NO: 12015 - RNA, 21 nt, Artificial
  Chemically synthesized
gugacuccuauagcaaggcag

SEQ ID NO: 12016 - RNA, 21 nt, Artificial
  Chemically synthesized
uguucccacuuucaucugagu

SEQ ID NO: 12017 - RNA, 21 nt, Artificial
  Chemically synthesized
ccuggauguucaccuggauuu

SEQ ID NO: 12018 - RNA, 21 nt, Artificial
  Chemically synthesized
gacagagcuuguuagaguguc

SEQ ID NO: 12019 - RNA, 21 nt, Artificial
  Chemically synthesized
aggugacuccuauagcaaggc

SEQ ID NO: 12020 - RNA, 21 nt, Artificial
  Chemically synthesized
ugccaucuuugucaagagauu

SEQ ID NO: 12021 - RNA, 21 nt, Artificial
  Chemically synthesized
ccugggaguucacuacugcaa

SEQ ID NO: 12022 - RNA, 21 nt, Artificial
  Chemically synthesized
ggaguucacuacugcaaaugg

SEQ ID NO: 12023 - RNA, 21 nt, Artificial
  Chemically synthesized
ugggagcagaauauagacaaa

SEQ ID NO: 12024 - RNA, 21 nt, Artificial
  Chemically synthesized
cauggaggcaucacaagugcu

SEQ ID NO: 12025 - RNA, 21 nt, Artificial
  Chemically synthesized
agucuucagaucagggugucg

SEQ ID NO: 12026 - RNA, 21 nt, Artificial
  Chemically synthesized
gcuggguaacaaguacugaga

SEQ ID NO: 12027 - RNA, 21 nt, Artificial
  Chemically synthesized
gccaucuuugucaagagauuu

SEQ ID NO: 12028 - RNA, 21 nt, Artificial
  Chemically synthesized
acuggagucauccucccagaa

SEQ ID NO: 12029 - RNA, 21 nt, Artificial
  Chemically synthesized
caaaagcuugugggucagcag

SEQ ID NO: 12030 - RNA, 21 nt, Artificial
  Chemically synthesized
gaucagggugucgugucacaa

SEQ ID NO: 12031 - RNA, 21 nt, Artificial
  Chemically synthesized
cucguuggccucaauguugga

SEQ ID NO: 12032 - RNA, 21 nt, Artificial
  Chemically synthesized
cugcgacaugugucaaugcca

SEQ ID NO: 12033 - RNA, 21 nt, Artificial
  Chemically synthesized
gcugggagcagaauauagaca

SEQ ID NO: 12034 - RNA, 21 nt, Artificial
  Chemically synthesized
cccacaaagaugugacugcag

SEQ ID NO: 12035 - RNA, 21 nt, Artificial
  Chemically synthesized
ggugacuccuauagcaaggca

SEQ ID NO: 12036 - RNA, 21 nt, Artificial
  Chemically synthesized
gggaguucacuacugcaaaug

SEQ ID NO: 12037 - RNA, 21 nt, Artificial
  Chemically synthesized
agaugugacugcagacaggau

SEQ ID NO: 12038 - RNA, 21 nt, Artificial
  Chemically synthesized
gaucggucagugucgaacugu

SEQ ID NO: 12039 - RNA, 21 nt, Artificial
  Chemically synthesized
ccacaaagaugugacugcaga

SEQ ID NO: 12040 - RNA, 21 nt, Artificial
  Chemically synthesized
gugucacaaccuuauugagaa

SEQ ID NO: 12041 - RNA, 21 nt, Artificial
  Chemically synthesized
gcuuguuagaguguccuagag

SEQ ID NO: 12042 - RNA, 21 nt, Artificial
  Chemically synthesized
caucugaguagcgucggauga

SEQ ID NO: 12043 - RNA, 21 nt, Artificial
  Chemically synthesized
aagcagcugaugaaguuguca

SEQ ID NO: 12044 - RNA, 21 nt, Artificial
  Chemically synthesized
cacuuucaucugaguagcguc

SEQ ID NO: 12045 - RNA, 21 nt, Artificial
  Chemically synthesized
agcagcugaugaaguugucaa

SEQ ID NO: 12046 - RNA, 21 nt, Artificial
  Chemically synthesized
guucaugaguucuguggcgcu

SEQ ID NO: 12047 - RNA, 21 nt, Artificial
  Chemically synthesized
ggauuuguccagugccaucuu

SEQ ID NO: 12048 - RNA, 21 nt, Artificial
  Chemically synthesized
ggauguugagaagcuggguaa

SEQ ID NO: 12049 - RNA, 21 nt, Artificial
  Chemically synthesized
gaucaggccuccaagcacauu

SEQ ID NO: 12050 - RNA, 21 nt, Artificial
  Chemically synthesized
cguggacagagcuuguuagag

SEQ ID NO: 12051 - RNA, 21 nt, Artificial
  Chemically synthesized
agcugaugaaguugucaaaau

SEQ ID NO: 12052 - RNA, 21 nt, Artificial
  Chemically synthesized
ccuggauuuguccagugccau

SEQ ID NO: 12053 - RNA, 21 nt, Artificial
  Chemically synthesized
agagaacaaaagcuugugggu

SEQ ID NO: 12054 - RNA, 21 nt, Artificial
  Chemically synthesized
agugucgaacuguuuguauau

SEQ ID NO: 12055 - RNA, 21 nt, Artificial
  Chemically synthesized
accaagcagcugaugaaguug

SEQ ID NO: 12056 - RNA, 21 nt, Artificial
  Chemically synthesized
ggcuccaguucaggaauacau

SEQ ID NO: 12057 - RNA, 21 nt, Artificial
  Chemically synthesized
gaacaaaagcuugugggucag

SEQ ID NO: 12058 - RNA, 21 nt, Artificial
  Chemically synthesized
caucagucuucagaucagggu

SEQ ID NO: 12059 - RNA, 21 nt, Artificial
  Chemically synthesized
ccuuuugauguuguuccacaa

SEQ ID NO: 12060 - RNA, 21 nt, Artificial
  Chemically synthesized
gcaaauugggcccuggauguu

SEQ ID NO: 12061 - RNA, 21 nt, Artificial
  Chemically synthesized
gugccaucuuugucaagagau

SEQ ID NO: 12062 - RNA, 21 nt, Artificial
  Chemically synthesized
ggcaucacaagugcuaggcuu

SEQ ID NO: 12063 - RNA, 21 nt, Artificial
  Chemically synthesized
guuggccucaauguuggagua

SEQ ID NO: 12064 - RNA, 21 nt, Artificial
  Chemically synthesized
gguaacaaguacugagagaac

SEQ ID NO: 12065 - RNA, 21 nt, Artificial
  Chemically synthesized
cacaaagaugugacugcagac

SEQ ID NO: 12066 - RNA, 21 nt, Artificial
  Chemically synthesized
gaguucacuacugcaaauggu

SEQ ID NO: 12067 - RNA, 21 nt, Artificial
  Chemically synthesized
cacucucguuggccucaaugu

SEQ ID NO: 12068 - RNA, 21 nt, Artificial
  Chemically synthesized
gaacgaguuaaccaggaacau

SEQ ID NO: 12069 - RNA, 21 nt, Artificial
  Chemically synthesized
gacuccuauagcaaggcagug

SEQ ID NO: 12070 - RNA, 21 nt, Artificial
  Chemically synthesized
ggugucgugucacaaccuuau

SEQ ID NO: 12071 - RNA, 21 nt, Artificial
  Chemically synthesized
cagcugaugaaguugucaaaa

SEQ ID NO: 12072 - RNA, 21 nt, Artificial
  Chemically synthesized
cuacugcaaauggucccugau

SEQ ID NO: 12073 - RNA, 21 nt, Artificial
  Chemically synthesized
cagugucgaacuguuuguaua

SEQ ID NO: 12074 - RNA, 21 nt, Artificial
  Chemically synthesized
ggccucaauguuggaguaaug

SEQ ID NO: 12075 - RNA, 21 nt, Artificial
  Chemically synthesized
cugccaccuuuugauguuguu

SEQ ID NO: 12076 - RNA, 21 nt, Artificial
  Chemically synthesized
gaauuccucaaagcccagcuu

SEQ ID NO: 12077 - RNA, 21 nt, Artificial
  Chemically synthesized
ggaauacauagucagcugcag

SEQ ID NO: 12078 - RNA, 21 nt, Artificial
  Chemically synthesized
caugcugcgacaugugucaau

SEQ ID NO: 12079 - RNA, 21 nt, Artificial
  Chemically synthesized
gccucaauguuggaguaaugu

SEQ ID NO: 12080 - RNA, 21 nt, Artificial
  Chemically synthesized
caaguacuugaauuccucaaa

SEQ ID NO: 12081 - RNA, 21 nt, Artificial
  Chemically synthesized
ggacagagcuuguuagagugu

SEQ ID NO: 12082 - RNA, 21 nt, Artificial
  Chemically synthesized
cagugccaucuuugucaagag

SEQ ID NO: 12083 - RNA, 21 nt, Artificial
  Chemically synthesized
gggugucgugucacaaccuua

SEQ ID NO: 12084 - RNA, 21 nt, Artificial
  Chemically synthesized
cacaaccuuauugagaauguu

SEQ ID NO: 12085 - RNA, 21 nt, Artificial
  Chemically synthesized
gcaucacaagugcuaggcuug

SEQ ID NO: 12086 - RNA, 21 nt, Artificial
  Chemically synthesized
gaacuccaggcagggcaaauu

SEQ ID NO: 12087 - RNA, 21 nt, Artificial
  Chemically synthesized
cgacaugugucaaugccaaaa

SEQ ID NO: 12088 - RNA, 21 nt, Artificial
  Chemically synthesized
cuccuggauguucaccuggau

SEQ ID NO: 12089 - RNA, 21 nt, Artificial
  Chemically synthesized
gaugaaguugucaaaauccau

SEQ ID NO: 12090 - RNA, 21 nt, Artificial
  Chemically synthesized
gcgacaugugucaaugccaaa

SEQ ID NO: 12091 - RNA, 21 nt, Artificial
  Chemically synthesized
cauccucccagaacugagaga

SEQ ID NO: 12092 - RNA, 21 nt, Artificial
  Chemically synthesized
caagaacgaguuaaccaggaa

SEQ ID NO: 12093 - RNA, 21 nt, Artificial
  Chemically synthesized
aggcuccaggugacuccuaua

SEQ ID NO: 12094 - RNA, 21 nt, Artificial
  Chemically synthesized
gaccaagcagcugaugaaguu

SEQ ID NO: 12095 - RNA, 21 nt, Artificial
  Chemically synthesized
gcagcugaugaaguugucaaa

SEQ ID NO: 12096 - RNA, 21 nt, Artificial
  Chemically synthesized
ggccugccaccuuuugauguu

SEQ ID NO: 12097 - RNA, 21 nt, Artificial
  Chemically synthesized
gggcuccaguucaggaauaca

SEQ ID NO: 12098 - RNA, 21 nt, Artificial
  Chemically synthesized
ggguaacaaguacugagagaa

SEQ ID NO: 12099 - RNA, 21 nt, Artificial
  Chemically synthesized
ccugaccaagcagcugaugaa

SEQ ID NO: 12100 - RNA, 21 nt, Artificial
  Chemically synthesized
gagaugcucauucagguggaa

SEQ ID NO: 12101 - RNA, 23 nt, Artificial
  Chemically synthesized
cuauaacaugaucauccgacgcu

SEQ ID NO: 12102 - RNA, 23 nt, Artificial
  Chemically synthesized
ucuauaacaugaucauccgacgc

SEQ ID NO: 12103 - RNA, 23 nt, Artificial
  Chemically synthesized
cucuauaacaugaucauccgacg

SEQ ID NO: 12104 - RNA, 23 nt, Artificial
  Chemically synthesized
ucucuauaacaugaucauccgac

SEQ ID NO: 12105 - RNA, 23 nt, Artificial
  Chemically synthesized
aucucuauaacaugaucauccga

SEQ ID NO: 12106 - RNA, 23 nt, Artificial
  Chemically synthesized
cagccauguuccugguuaacucg

SEQ ID NO: 12107 - RNA, 23 nt, Artificial
  Chemically synthesized
gcagccauguuccugguuaacuc

SEQ ID NO: 12108 - RNA, 23 nt, Artificial
  Chemically synthesized
cgcagccauguuccugguuaacu

SEQ ID NO: 12109 - RNA, 23 nt, Artificial
  Chemically synthesized
ucgcagccauguuccugguuaac

SEQ ID NO: 12110 - RNA, 23 nt, Artificial
  Chemically synthesized
gucgcagccauguuccugguuaa

SEQ ID NO: 12111 - RNA, 23 nt, Artificial
  Chemically synthesized
cgacgcuacucagaugaaagugg

SEQ ID NO: 12112 - RNA, 23 nt, Artificial
  Chemically synthesized
ccgacgcuacucagaugaaagug

SEQ ID NO: 12113 - RNA, 23 nt, Artificial
  Chemically synthesized
uccgacgcuacucagaugaaagu

SEQ ID NO: 12114 - RNA, 23 nt, Artificial
  Chemically synthesized
auccgacgcuacucagaugaaag

SEQ ID NO: 12115 - RNA, 23 nt, Artificial
  Chemically synthesized
cauccgacgcuacucagaugaaa

SEQ ID NO: 12116 - RNA, 23 nt, Artificial
  Chemically synthesized
caaagauggcacuggacaaaucc

SEQ ID NO: 12117 - RNA, 23 nt, Artificial
  Chemically synthesized
acaaagauggcacuggacaaauc

SEQ ID NO: 12118 - RNA, 23 nt, Artificial
  Chemically synthesized
gacaaagauggcacuggacaaau

SEQ ID NO: 12119 - RNA, 23 nt, Artificial
  Chemically synthesized
ugacaaagauggcacuggacaaa

SEQ ID NO: 12120 - RNA, 23 nt, Artificial
  Chemically synthesized
uugacaaagauggcacuggacaa

SEQ ID NO: 12121 - RNA, 23 nt, Artificial
  Chemically synthesized
ccauguuccgugccuucaaaucu

SEQ ID NO: 12122 - RNA, 23 nt, Artificial
  Chemically synthesized
gccauguuccgugccuucaaauc

SEQ ID NO: 12123 - RNA, 23 nt, Artificial
  Chemically synthesized
cgccauguuccgugccuucaaau

SEQ ID NO: 12124 - RNA, 23 nt, Artificial
  Chemically synthesized
acgccauguuccgugccuucaaa

SEQ ID NO: 12125 - RNA, 23 nt, Artificial
  Chemically synthesized
gacgccauguuccgugccuucaa

SEQ ID NO: 12126 - RNA, 23 nt, Artificial
  Chemically synthesized
gguggcaggccauauacaaacag

SEQ ID NO: 12127 - RNA, 23 nt, Artificial
  Chemically synthesized
agguggcaggccauauacaaaca

SEQ ID NO: 12128 - RNA, 23 nt, Artificial
  Chemically synthesized
aagguggcaggccauauacaaac

SEQ ID NO: 12129 - RNA, 23 nt, Artificial
  Chemically synthesized
aaagguggcaggccauauacaaa

SEQ ID NO: 12130 - RNA, 23 nt, Artificial
  Chemically synthesized
aaaagguggcaggccauauacaa

SEQ ID NO: 12131 - RNA, 23 nt, Artificial
  Chemically synthesized
cauguuccgugccuucaaaucuc

SEQ ID NO: 12132 - RNA, 23 nt, Artificial
  Chemically synthesized
gugggaacauggauuuugacaac

SEQ ID NO: 12133 - RNA, 23 nt, Artificial
  Chemically synthesized
agugggaacauggauuuugacaa

SEQ ID NO: 12134 - RNA, 23 nt, Artificial
  Chemically synthesized
aagugggaacauggauuuugaca

SEQ ID NO: 12135 - RNA, 23 nt, Artificial
  Chemically synthesized
aaagugggaacauggauuuugac

SEQ ID NO: 12136 - RNA, 23 nt, Artificial
  Chemically synthesized
gaaagugggaacauggauuuuga

SEQ ID NO: 12137 - RNA, 23 nt, Artificial
  Chemically synthesized
ggaacauggauuuugacaacuuc

SEQ ID NO: 12138 - RNA, 23 nt, Artificial
  Chemically synthesized
gggaacauggauuuugacaacuu

SEQ ID NO: 12139 - RNA, 23 nt, Artificial
  Chemically synthesized
ugggaacauggauuuugacaacu

SEQ ID NO: 12140 - RNA, 23 nt, Artificial
  Chemically synthesized
gaccauuugcaguagugaacucc

SEQ ID NO: 12141 - RNA, 23 nt, Artificial
  Chemically synthesized
ggaccauuugcaguagugaacuc

SEQ ID NO: 12142 - RNA, 23 nt, Artificial
  Chemically synthesized
gggaccauuugcaguagugaacu

SEQ ID NO: 12143 - RNA, 23 nt, Artificial
  Chemically synthesized
agggaccauuugcaguagugaac

SEQ ID NO: 12144 - RNA, 23 nt, Artificial
  Chemically synthesized
cagggaccauuugcaguagugaa

SEQ ID NO: 12145 - RNA, 23 nt, Artificial
  Chemically synthesized
gcgccacagaacucaugaacauu

SEQ ID NO: 12146 - RNA, 23 nt, Artificial
  Chemically synthesized
agcgccacagaacucaugaacau

SEQ ID NO: 12147 - RNA, 23 nt, Artificial
  Chemically synthesized
cagcgccacagaacucaugaaca

SEQ ID NO: 12148 - RNA, 23 nt, Artificial
  Chemically synthesized
ucagcgccacagaacucaugaac

SEQ ID NO: 12149 - RNA, 23 nt, Artificial
  Chemically synthesized
gucagcgccacagaacucaugaa

SEQ ID NO: 12150 - RNA, 23 nt, Artificial
  Chemically synthesized
ccuucaaaucucuugacaaagau

SEQ ID NO: 12151 - RNA, 23 nt, Artificial
  Chemically synthesized
gccuucaaaucucuugacaaaga

SEQ ID NO: 12152 - RNA, 23 nt, Artificial
  Chemically synthesized
ugccuucaaaucucuugacaaag

SEQ ID NO: 12153 - RNA, 23 nt, Artificial
  Chemically synthesized
gugccuucaaaucucuugacaaa

SEQ ID NO: 12154 - RNA, 23 nt, Artificial
  Chemically synthesized
cgugccuucaaaucucuugacaa

SEQ ID NO: 12155 - RNA, 23 nt, Artificial
  Chemically synthesized
cuucaaaucucuugacaaagaug

SEQ ID NO: 12156 - RNA, 23 nt, Artificial
  Chemically synthesized
cuugacaaagauggcacuggaca

SEQ ID NO: 12157 - RNA, 23 nt, Artificial
  Chemically synthesized
ucuugacaaagauggcacuggac

SEQ ID NO: 12158 - RNA, 23 nt, Artificial
  Chemically synthesized
cucuugacaaagauggcacugga

SEQ ID NO: 12159 - RNA, 23 nt, Artificial
  Chemically synthesized
acuuguggaacaacaucaaaagg

SEQ ID NO: 12160 - RNA, 23 nt, Artificial
  Chemically synthesized
uacuuguggaacaacaucaaaag

SEQ ID NO: 12161 - RNA, 23 nt, Artificial
  Chemically synthesized
guacuuguggaacaacaucaaaa

SEQ ID NO: 12162 - RNA, 23 nt, Artificial
  Chemically synthesized
aguacuuguggaacaacaucaaa

SEQ ID NO: 12163 - RNA, 23 nt, Artificial
  Chemically synthesized
aaguacuuguggaacaacaucaa

SEQ ID NO: 12164 - RNA, 23 nt, Artificial
  Chemically synthesized
cccucacugccuugcuauaggag

SEQ ID NO: 12165 - RNA, 23 nt, Artificial
  Chemically synthesized
ccccucacugccuugcuauagga

SEQ ID NO: 12166 - RNA, 23 nt, Artificial
  Chemically synthesized
cccccucacugccuugcuauagg

SEQ ID NO: 12167 - RNA, 23 nt, Artificial
  Chemically synthesized
gcccccucacugccuugcuauag

SEQ ID NO: 12168 - RNA, 23 nt, Artificial
  Chemically synthesized
cgcccccucacugccuugcuaua

SEQ ID NO: 12169 - RNA, 23 nt, Artificial
  Chemically synthesized
gaugguuuuggcauugacacaug

SEQ ID NO: 12170 - RNA, 23 nt, Artificial
  Chemically synthesized
ugaugguuuuggcauugacacau

SEQ ID NO: 12171 - RNA, 23 nt, Artificial
  Chemically synthesized
cugaugguuuuggcauugacaca

SEQ ID NO: 12172 - RNA, 23 nt, Artificial
  Chemically synthesized
acugaugguuuuggcauugacac

SEQ ID NO: 12173 - RNA, 23 nt, Artificial
  Chemically synthesized
gacugaugguuuuggcauugaca

SEQ ID NO: 12174 - RNA, 23 nt, Artificial
  Chemically synthesized
cugacuauguauuccugaacugg

SEQ ID NO: 12175 - RNA, 23 nt, Artificial
  Chemically synthesized
gcugacuauguauuccugaacug

SEQ ID NO: 12176 - RNA, 23 nt, Artificial
  Chemically synthesized
agcugacuauguauuccugaacu

SEQ ID NO: 12177 - RNA, 23 nt, Artificial
  Chemically synthesized
cagcugacuauguauuccugaac

SEQ ID NO: 12178 - RNA, 23 nt, Artificial
  Chemically synthesized
gcagcugacuauguauuccugaa

SEQ ID NO: 12179 - RNA, 23 nt, Artificial
  Chemically synthesized
ccacagaacucaugaacauucuc

SEQ ID NO: 12180 - RNA, 23 nt, Artificial
  Chemically synthesized
gccacagaacucaugaacauucu

SEQ ID NO: 12181 - RNA, 23 nt, Artificial
  Chemically synthesized
cgccacagaacucaugaacauuc

SEQ ID NO: 12182 - RNA, 23 nt, Artificial
  Chemically synthesized
ugguuaacucguucuugaagggc

SEQ ID NO: 12183 - RNA, 23 nt, Artificial
  Chemically synthesized
cugguuaacucguucuugaaggg

SEQ ID NO: 12184 - RNA, 23 nt, Artificial
  Chemically synthesized
ccugguuaacucguucuugaagg

SEQ ID NO: 12185 - RNA, 23 nt, Artificial
  Chemically synthesized
uccugguuaacucguucuugaag

SEQ ID NO: 12186 - RNA, 23 nt, Artificial
  Chemically synthesized
uuccugguuaacucguucuugaa

SEQ ID NO: 12187 - RNA, 23 nt, Artificial
  Chemically synthesized
aggcccaggaggaaauaaacaug

SEQ ID NO: 12188 - RNA, 23 nt, Artificial
  Chemically synthesized
caggcccaggaggaaauaaacau

SEQ ID NO: 12189 - RNA, 23 nt, Artificial
  Chemically synthesized
ccaggcccaggaggaaauaaaca

SEQ ID NO: 12190 - RNA, 23 nt, Artificial
  Chemically synthesized
gccaggcccaggaggaaauaaac

SEQ ID NO: 12191 - RNA, 23 nt, Artificial
  Chemically synthesized
ugccaggcccaggaggaaauaaa

SEQ ID NO: 12192 - RNA, 23 nt, Artificial
  Chemically synthesized
caucucuauaacaugaucauccg

SEQ ID NO: 12193 - RNA, 23 nt, Artificial
  Chemically synthesized
gauccugucugcagucacaucuu

SEQ ID NO: 12194 - RNA, 23 nt, Artificial
  Chemically synthesized
cgauccugucugcagucacaucu

SEQ ID NO: 12195 - RNA, 23 nt, Artificial
  Chemically synthesized
ccgauccugucugcagucacauc

SEQ ID NO: 12196 - RNA, 23 nt, Artificial
  Chemically synthesized
gccgauccugucugcagucacau

SEQ ID NO: 12197 - RNA, 23 nt, Artificial
  Chemically synthesized
ggccgauccugucugcagucaca

SEQ ID NO: 12198 - RNA, 23 nt, Artificial
  Chemically synthesized
ccugaaugagcaucucuauaaca

SEQ ID NO: 12199 - RNA, 23 nt, Artificial
  Chemically synthesized
accugaaugagcaucucuauaac

SEQ ID NO: 12200 - RNA, 23 nt, Artificial
  Chemically synthesized
caccugaaugagcaucucuauaa

SEQ ID NO: 12201 - RNA, 23 nt, Artificial
  Chemically synthesized
ccaccugaaugagcaucucuaua

SEQ ID NO: 12202 - RNA, 23 nt, Artificial
  Chemically synthesized
uccaccugaaugagcaucucuau

SEQ ID NO: 12203 - RNA, 23 nt, Artificial
  Chemically synthesized
gauggauagcgacaccacaggca

SEQ ID NO: 12204 - RNA, 23 nt, Artificial
  Chemically synthesized
ugauggauagcgacaccacaggc

SEQ ID NO: 12205 - RNA, 23 nt, Artificial
  Chemically synthesized
gugauggauagcgacaccacagg

SEQ ID NO: 12206 - RNA, 23 nt, Artificial
  Chemically synthesized
cgugauggauagcgacaccacag

SEQ ID NO: 12207 - RNA, 23 nt, Artificial
  Chemically synthesized
ccgugauggauagcgacaccaca

SEQ ID NO: 12208 - RNA, 23 nt, Artificial
  Chemically synthesized
gcugcagcugacuauguauuccu

SEQ ID NO: 12209 - RNA, 23 nt, Artificial
  Chemically synthesized
ggcugcagcugacuauguauucc

SEQ ID NO: 12210 - RNA, 23 nt, Artificial
  Chemically synthesized
uggcugcagcugacuauguauuc

SEQ ID NO: 12211 - RNA, 23 nt, Artificial
  Chemically synthesized
guggcugcagcugacuauguauu

SEQ ID NO: 12212 - RNA, 23 nt, Artificial
  Chemically synthesized
aguggcugcagcugacuauguau

SEQ ID NO: 12213 - RNA, 23 nt, Artificial
  Chemically synthesized
caauaagguugugacacgacacc

SEQ ID NO: 12214 - RNA, 23 nt, Artificial
  Chemically synthesized
ucaauaagguugugacacgacac

SEQ ID NO: 12215 - RNA, 23 nt, Artificial
  Chemically synthesized
cucaauaagguugugacacgaca

SEQ ID NO: 12216 - RNA, 23 nt, Artificial
  Chemically synthesized
ucucaauaagguugugacacgac

SEQ ID NO: 12217 - RNA, 23 nt, Artificial
  Chemically synthesized
uucucaauaagguugugacacga

SEQ ID NO: 12218 - RNA, 23 nt, Artificial
  Chemically synthesized
guuccugguuaacucguucuuga

SEQ ID NO: 12219 - RNA, 23 nt, Artificial
  Chemically synthesized
ccauauacaaacaguucgacacu

SEQ ID NO: 12220 - RNA, 23 nt, Artificial
  Chemically synthesized
gccauauacaaacaguucgacac

SEQ ID NO: 12221 - RNA, 23 nt, Artificial
  Chemically synthesized
ggccauauacaaacaguucgaca

SEQ ID NO: 12222 - RNA, 23 nt, Artificial
  Chemically synthesized
aggccauauacaaacaguucgac

SEQ ID NO: 12223 - RNA, 23 nt, Artificial
  Chemically synthesized
caggccauauacaaacaguucga

SEQ ID NO: 12224 - RNA, 23 nt, Artificial
  Chemically synthesized
cuggcucuaggacacucuaacaa

SEQ ID NO: 12225 - RNA, 23 nt, Artificial
  Chemically synthesized
ccuggcucuaggacacucuaaca

SEQ ID NO: 12226 - RNA, 23 nt, Artificial
  Chemically synthesized
cccuggcucuaggacacucuaac

SEQ ID NO: 12227 - RNA, 23 nt, Artificial
  Chemically synthesized
ccccuggcucuaggacacucuaa

SEQ ID NO: 12228 - RNA, 23 nt, Artificial
  Chemically synthesized
cccccuggcucuaggacacucua

SEQ ID NO: 12229 - RNA, 23 nt, Artificial
  Chemically synthesized
ucagggaccauuugcaguaguga

SEQ ID NO: 12230 - RNA, 23 nt, Artificial
  Chemically synthesized
acaugaucauccgacgcuacuca

SEQ ID NO: 12231 - RNA, 23 nt, Artificial
  Chemically synthesized
aacaugaucauccgacgcuacuc

SEQ ID NO: 12232 - RNA, 23 nt, Artificial
  Chemically synthesized
uaacaugaucauccgacgcuacu

SEQ ID NO: 12233 - RNA, 23 nt, Artificial
  Chemically synthesized
auaacaugaucauccgacgcuac

SEQ ID NO: 12234 - RNA, 23 nt, Artificial
  Chemically synthesized
uauaacaugaucauccgacgcua

SEQ ID NO: 12235 - RNA, 23 nt, Artificial
  Chemically synthesized
gaguggcugcagcugacuaugua

SEQ ID NO: 12236 - RNA, 23 nt, Artificial
  Chemically synthesized
gguuccaccugaaugagcaucuc

SEQ ID NO: 12237 - RNA, 23 nt, Artificial
  Chemically synthesized
ggguuccaccugaaugagcaucu

SEQ ID NO: 12238 - RNA, 23 nt, Artificial
  Chemically synthesized
aggguuccaccugaaugagcauc

SEQ ID NO: 12239 - RNA, 23 nt, Artificial
  Chemically synthesized
caggguuccaccugaaugagcau

SEQ ID NO: 12240 - RNA, 23 nt, Artificial
  Chemically synthesized
gcaggguuccaccugaaugagca

SEQ ID NO: 12241 - RNA, 23 nt, Artificial
  Chemically synthesized
guggcaggccauauacaaacagu

SEQ ID NO: 12242 - RNA, 23 nt, Artificial
  Chemically synthesized
cccugaucugaagacugaugguu

SEQ ID NO: 12243 - RNA, 23 nt, Artificial
  Chemically synthesized
acccugaucugaagacugauggu

SEQ ID NO: 12244 - RNA, 23 nt, Artificial
  Chemically synthesized
cacccugaucugaagacugaugg

SEQ ID NO: 12245 - RNA, 23 nt, Artificial
  Chemically synthesized
acacccugaucugaagacugaug

SEQ ID NO: 12246 - RNA, 23 nt, Artificial
  Chemically synthesized
gacacccugaucugaagacugau

SEQ ID NO: 12247 - RNA, 23 nt, Artificial
  Chemically synthesized
cccagugccuuugucuauauucu

SEQ ID NO: 12248 - RNA, 23 nt, Artificial
  Chemically synthesized
ccccagugccuuugucuauauuc

SEQ ID NO: 12249 - RNA, 23 nt, Artificial
  Chemically synthesized
gccccagugccuuugucuauauu

SEQ ID NO: 12250 - RNA, 23 nt, Artificial
  Chemically synthesized
ugccccagugccuuugucuauau

SEQ ID NO: 12251 - RNA, 23 nt, Artificial
  Chemically synthesized
gugccccagugccuuugucuaua

SEQ ID NO: 12252 - RNA, 23 nt, Artificial
  Chemically synthesized
gagcaucucuauaacaugaucau

SEQ ID NO: 12253 - RNA, 23 nt, Artificial
  Chemically synthesized
ugagcaucucuauaacaugauca

SEQ ID NO: 12254 - RNA, 23 nt, Artificial
  Chemically synthesized
augagcaucucuauaacaugauc

SEQ ID NO: 12255 - RNA, 23 nt, Artificial
  Chemically synthesized
aaugagcaucucuauaacaugau

SEQ ID NO: 12256 - RNA, 23 nt, Artificial
  Chemically synthesized
gaaugagcaucucuauaacauga

SEQ ID NO: 12257 - RNA, 23 nt, Artificial
  Chemically synthesized
cucaguucugggaggaugacucc

SEQ ID NO: 12258 - RNA, 23 nt, Artificial
  Chemically synthesized
ucucaguucugggaggaugacuc

SEQ ID NO: 12259 - RNA, 23 nt, Artificial
  Chemically synthesized
cucucaguucugggaggaugacu

SEQ ID NO: 12260 - RNA, 23 nt, Artificial
  Chemically synthesized
ucucucaguucugggaggaugac

SEQ ID NO: 12261 - RNA, 23 nt, Artificial
  Chemically synthesized
cucucucaguucugggaggauga

SEQ ID NO: 12262 - RNA, 23 nt, Artificial
  Chemically synthesized
agacugaugguuuuggcauugac

SEQ ID NO: 12263 - RNA, 23 nt, Artificial
  Chemically synthesized
aagacugaugguuuuggcauuga

SEQ ID NO: 12264 - RNA, 23 nt, Artificial
  Chemically synthesized
gaagacugaugguuuuggcauug

SEQ ID NO: 12265 - RNA, 23 nt, Artificial
  Chemically synthesized
ugaagacugaugguuuuggcauu

SEQ ID NO: 12266 - RNA, 23 nt, Artificial
  Chemically synthesized
gcucuaggacacucuaacaagcu

SEQ ID NO: 12267 - RNA, 23 nt, Artificial
  Chemically synthesized
ggcucuaggacacucuaacaagc

SEQ ID NO: 12268 - RNA, 23 nt, Artificial
  Chemically synthesized
uggcucuaggacacucuaacaag

SEQ ID NO: 12269 - RNA, 23 nt, Artificial
  Chemically synthesized
ggcccaggaggaaauaaacaugc

SEQ ID NO: 12270 - RNA, 23 nt, Artificial
  Chemically synthesized
gcaucucuauaacaugaucaucc

SEQ ID NO: 12271 - RNA, 23 nt, Artificial
  Chemically synthesized
agcaucucuauaacaugaucauc

SEQ ID NO: 12272 - RNA, 23 nt, Artificial
  Chemically synthesized
caaguacuuguggaacaacauca

SEQ ID NO: 12273 - RNA, 23 nt, Artificial
  Chemically synthesized
ucaaguacuuguggaacaacauc

SEQ ID NO: 12274 - RNA, 23 nt, Artificial
  Chemically synthesized
uucaaguacuuguggaacaacau

SEQ ID NO: 12275 - RNA, 23 nt, Artificial
  Chemically synthesized
cacauuacuccaacauugaggcc

SEQ ID NO: 12276 - RNA, 23 nt, Artificial
  Chemically synthesized
acacauuacuccaacauugaggc

SEQ ID NO: 12277 - RNA, 23 nt, Artificial
  Chemically synthesized
cacacauuacuccaacauugagg

SEQ ID NO: 12278 - RNA, 23 nt, Artificial
  Chemically synthesized
gcacacauuacuccaacauugag

SEQ ID NO: 12279 - RNA, 23 nt, Artificial
  Chemically synthesized
cgcacacauuacuccaacauuga

SEQ ID NO: 12280 - RNA, 23 nt, Artificial
  Chemically synthesized
caagcugggcuuugaggaauuca

SEQ ID NO: 12281 - RNA, 23 nt, Artificial
  Chemically synthesized
gcaagcugggcuuugaggaauuc

SEQ ID NO: 12282 - RNA, 23 nt, Artificial
  Chemically synthesized
ggcaagcugggcuuugaggaauu

SEQ ID NO: 12283 - RNA, 23 nt, Artificial
  Chemically synthesized
aggcaagcugggcuuugaggaau

SEQ ID NO: 12284 - RNA, 23 nt, Artificial
  Chemically synthesized
caggcaagcugggcuuugaggaa

SEQ ID NO: 12285 - RNA, 23 nt, Artificial
  Chemically synthesized
cgaucagggaccauuugcaguag

SEQ ID NO: 12286 - RNA, 23 nt, Artificial
  Chemically synthesized
ccgaucagggaccauuugcagua

SEQ ID NO: 12287 - RNA, 23 nt, Artificial
  Chemically synthesized
accgaucagggaccauuugcagu

SEQ ID NO: 12288 - RNA, 23 nt, Artificial
  Chemically synthesized
gaccgaucagggaccauuugcag

SEQ ID NO: 12289 - RNA, 23 nt, Artificial
  Chemically synthesized
ugaccgaucagggaccauuugca

SEQ ID NO: 12290 - RNA, 23 nt, Artificial
  Chemically synthesized
ccugggaaaugugcuuggaggcc

SEQ ID NO: 12291 - RNA, 23 nt, Artificial
  Chemically synthesized
gccugggaaaugugcuuggaggc

SEQ ID NO: 12292 - RNA, 23 nt, Artificial
  Chemically synthesized
ggccugggaaaugugcuuggagg

SEQ ID NO: 12293 - RNA, 23 nt, Artificial
  Chemically synthesized
gggccugggaaaugugcuuggag

SEQ ID NO: 12294 - RNA, 23 nt, Artificial
  Chemically synthesized
ggggccugggaaaugugcuugga

SEQ ID NO: 12295 - RNA, 23 nt, Artificial
  Chemically synthesized
ugggcuuugaggaauucaaguac

SEQ ID NO: 12296 - RNA, 23 nt, Artificial
  Chemically synthesized
cugggcuuugaggaauucaagua

SEQ ID NO: 12297 - RNA, 23 nt, Artificial
  Chemically synthesized
gcugggcuuugaggaauucaagu

SEQ ID NO: 12298 - RNA, 23 nt, Artificial
  Chemically synthesized
agcugggcuuugaggaauucaag

SEQ ID NO: 12299 - RNA, 23 nt, Artificial
  Chemically synthesized
aagcugggcuuugaggaauucaa

SEQ ID NO: 12300 - RNA, 23 nt, Artificial
  Chemically synthesized
cugaccgaucagggaccauuugc

SEQ ID NO: 12301 - RNA, 23 nt, Artificial
  Chemically synthesized
acugaccgaucagggaccauuug

SEQ ID NO: 12302 - RNA, 23 nt, Artificial
  Chemically synthesized
cacugaccgaucagggaccauuu

SEQ ID NO: 12303 - RNA, 23 nt, Artificial
  Chemically synthesized
cuuguggaacaacaucaaaaggu

SEQ ID NO: 12304 - RNA, 23 nt, Artificial
  Chemically synthesized
cacgacacccugaucugaagacu

SEQ ID NO: 12305 - RNA, 23 nt, Artificial
  Chemically synthesized
acacgacacccugaucugaagac

SEQ ID NO: 12306 - RNA, 23 nt, Artificial
  Chemically synthesized
gacacgacacccugaucugaaga

SEQ ID NO: 12307 - RNA, 23 nt, Artificial
  Chemically synthesized
ugacacgacacccugaucugaag

SEQ ID NO: 12308 - RNA, 23 nt, Artificial
  Chemically synthesized
gugacacgacacccugaucugaa

SEQ ID NO: 12309 - RNA, 23 nt, Artificial
  Chemically synthesized
caaaagguggcaggccauauaca

SEQ ID NO: 12310 - RNA, 23 nt, Artificial
  Chemically synthesized
ucaaaagguggcaggccauauac

SEQ ID NO: 12311 - RNA, 23 nt, Artificial
  Chemically synthesized
aucaaaagguggcaggccauaua

SEQ ID NO: 12312 - RNA, 23 nt, Artificial
  Chemically synthesized
ggaacaacaucaaaagguggcag

SEQ ID NO: 12313 - RNA, 23 nt, Artificial
  Chemically synthesized
uggaacaacaucaaaagguggca

SEQ ID NO: 12314 - RNA, 23 nt, Artificial
  Chemically synthesized
guggaacaacaucaaaagguggc

SEQ ID NO: 12315 - RNA, 23 nt, Artificial
  Chemically synthesized
uguggaacaacaucaaaaggugg

SEQ ID NO: 12316 - RNA, 23 nt, Artificial
  Chemically synthesized
uuguggaacaacaucaaaaggug

SEQ ID NO: 12317 - RNA, 23 nt, Artificial
  Chemically synthesized
gcuauaggagucaccuggagccu

SEQ ID NO: 12318 - RNA, 23 nt, Artificial
  Chemically synthesized
ugcuauaggagucaccuggagcc

SEQ ID NO: 12319 - RNA, 23 nt, Artificial
  Chemically synthesized
uugcuauaggagucaccuggagc

SEQ ID NO: 12320 - RNA, 23 nt, Artificial
  Chemically synthesized
cuugcuauaggagucaccuggag

SEQ ID NO: 12321 - RNA, 23 nt, Artificial
  Chemically synthesized
ccuugcuauaggagucaccugga

SEQ ID NO: 12322 - RNA, 23 nt, Artificial
  Chemically synthesized
auucaaguacuuguggaacaaca

SEQ ID NO: 12323 - RNA, 23 nt, Artificial
  Chemically synthesized
caacauccagggcccaauuugcc

SEQ ID NO: 12324 - RNA, 23 nt, Artificial
  Chemically synthesized
ucaacauccagggcccaauuugc

SEQ ID NO: 12325 - RNA, 23 nt, Artificial
  Chemically synthesized
cucaacauccagggcccaauuug

SEQ ID NO: 12326 - RNA, 23 nt, Artificial
  Chemically synthesized
ucucaacauccagggcccaauuu

SEQ ID NO: 12327 - RNA, 23 nt, Artificial
  Chemically synthesized
uucucaacauccagggcccaauu

SEQ ID NO: 12328 - RNA, 23 nt, Artificial
  Chemically synthesized
guucgacacugaccgaucaggga

SEQ ID NO: 12329 - RNA, 23 nt, Artificial
  Chemically synthesized
aguucgacacugaccgaucaggg

SEQ ID NO: 12330 - RNA, 23 nt, Artificial
  Chemically synthesized
caguucgacacugaccgaucagg

SEQ ID NO: 12331 - RNA, 23 nt, Artificial
  Chemically synthesized
acaguucgacacugaccgaucag

SEQ ID NO: 12332 - RNA, 23 nt, Artificial
  Chemically synthesized
aacaguucgacacugaccgauca

SEQ ID NO: 12333 - RNA, 23 nt, Artificial
  Chemically synthesized
ccagugccuuugucuauauucug

SEQ ID NO: 12334 - RNA, 23 nt, Artificial
  Chemically synthesized
cccagcuucucaacauccagggc

SEQ ID NO: 12335 - RNA, 23 nt, Artificial
  Chemically synthesized
acccagcuucucaacauccaggg

SEQ ID NO: 12336 - RNA, 23 nt, Artificial
  Chemically synthesized
uacccagcuucucaacauccagg

SEQ ID NO: 12337 - RNA, 23 nt, Artificial
  Chemically synthesized
uuacccagcuucucaacauccag

SEQ ID NO: 12338 - RNA, 23 nt, Artificial
  Chemically synthesized
guuacccagcuucucaacaucca

SEQ ID NO: 12339 - RNA, 23 nt, Artificial
  Chemically synthesized
acgcacacauuacuccaacauug

SEQ ID NO: 12340 - RNA, 23 nt, Artificial
  Chemically synthesized
cacgcacacauuacuccaacauu

SEQ ID NO: 12341 - RNA, 23 nt, Artificial
  Chemically synthesized
ccacgcacacauuacuccaacau

SEQ ID NO: 12342 - RNA, 23 nt, Artificial
  Chemically synthesized
cccacgcacacauuacuccaaca

SEQ ID NO: 12343 - RNA, 23 nt, Artificial
  Chemically synthesized
ucauccgacgcuacucagaugaa

SEQ ID NO: 12344 - RNA, 23 nt, Artificial
  Chemically synthesized
ugaaugagcaucucuauaacaug

SEQ ID NO: 12345 - RNA, 23 nt, Artificial
  Chemically synthesized
cugaaugagcaucucuauaacau

SEQ ID NO: 12346 - RNA, 23 nt, Artificial
  Chemically synthesized
agcuuuuguucucucaguacuug

SEQ ID NO: 12347 - RNA, 23 nt, Artificial
  Chemically synthesized
aagcuuuuguucucucaguacuu

SEQ ID NO: 12348 - RNA, 23 nt, Artificial
  Chemically synthesized
caagcuuuuguucucucaguacu

SEQ ID NO: 12349 - RNA, 23 nt, Artificial
  Chemically synthesized
acaagcuuuuguucucucaguac

SEQ ID NO: 12350 - RNA, 23 nt, Artificial
  Chemically synthesized
cacaagcuuuuguucucucagua

SEQ ID NO: 12351 - RNA, 23 nt, Artificial
  Chemically synthesized
acuccaacauugaggccaacgag

SEQ ID NO: 12352 - RNA, 23 nt, Artificial
  Chemically synthesized
uacuccaacauugaggccaacga

SEQ ID NO: 12353 - RNA, 23 nt, Artificial
  Chemically synthesized
uuacuccaacauugaggccaacg

SEQ ID NO: 12354 - RNA, 23 nt, Artificial
  Chemically synthesized
auuacuccaacauugaggccaac

SEQ ID NO: 12355 - RNA, 23 nt, Artificial
  Chemically synthesized
cauuacuccaacauugaggccaa

SEQ ID NO: 12356 - RNA, 23 nt, Artificial
  Chemically synthesized
cuggacaaauccaggugaacauc

SEQ ID NO: 12357 - RNA, 23 nt, Artificial
  Chemically synthesized
acuggacaaauccaggugaacau

SEQ ID NO: 12358 - RNA, 23 nt, Artificial
  Chemically synthesized
cacuggacaaauccaggugaaca

SEQ ID NO: 12359 - RNA, 23 nt, Artificial
  Chemically synthesized
gcacuggacaaauccaggugaac

SEQ ID NO: 12360 - RNA, 23 nt, Artificial
  Chemically synthesized
ggcacuggacaaauccaggugaa

SEQ ID NO: 12361 - RNA, 23 nt, Artificial
  Chemically synthesized
auaagguugugacacgacacccu

SEQ ID NO: 12362 - RNA, 23 nt, Artificial
  Chemically synthesized
aauaagguugugacacgacaccc

SEQ ID NO: 12363 - RNA, 23 nt, Artificial
  Chemically synthesized
ccccacgcacacauuacuccaac

SEQ ID NO: 12364 - RNA, 23 nt, Artificial
  Chemically synthesized
cccccacgcacacauuacuccaa

SEQ ID NO: 12365 - RNA, 23 nt, Artificial
  Chemically synthesized
gcccccacgcacacauuacucca

SEQ ID NO: 12366 - RNA, 23 nt, Artificial
  Chemically synthesized
agcaggguuccaccugaaugagc

SEQ ID NO: 12367 - RNA, 23 nt, Artificial
  Chemically synthesized
cagcaggguuccaccugaaugag

SEQ ID NO: 12368 - RNA, 23 nt, Artificial
  Chemically synthesized
gcagcaggguuccaccugaauga

SEQ ID NO: 12369 - RNA, 23 nt, Artificial
  Chemically synthesized
caucaaaagguggcaggccauau

SEQ ID NO: 12370 - RNA, 23 nt, Artificial
  Chemically synthesized
acaucaaaagguggcaggccaua

SEQ ID NO: 12371 - RNA, 23 nt, Artificial
  Chemically synthesized
ugcagcugacuauguauuccuga

SEQ ID NO: 12372 - RNA, 23 nt, Artificial
  Chemically synthesized
gaacauucucaauaagguuguga

SEQ ID NO: 12373 - RNA, 23 nt, Artificial
  Chemically synthesized
ugaacauucucaauaagguugug

SEQ ID NO: 12374 - RNA, 23 nt, Artificial
  Chemically synthesized
augaacauucucaauaagguugu

SEQ ID NO: 12375 - RNA, 23 nt, Artificial
  Chemically synthesized
caugaacauucucaauaagguug

SEQ ID NO: 12376 - RNA, 23 nt, Artificial
  Chemically synthesized
ucaugaacauucucaauaagguu

SEQ ID NO: 12377 - RNA, 23 nt, Artificial
  Chemically synthesized
gacaaauccaggugaacauccag

SEQ ID NO: 12378 - RNA, 23 nt, Artificial
  Chemically synthesized
ggacaaauccaggugaacaucca

SEQ ID NO: 12379 - RNA, 23 nt, Artificial
  Chemically synthesized
uggacaaauccaggugaacaucc

SEQ ID NO: 12380 - RNA, 23 nt, Artificial
  Chemically synthesized
uuccaccugaaugagcaucucua

SEQ ID NO: 12381 - RNA, 23 nt, Artificial
  Chemically synthesized
ugaaagugggaacauggauuuug

SEQ ID NO: 12382 - RNA, 23 nt, Artificial
  Chemically synthesized
augaaagugggaacauggauuuu

SEQ ID NO: 12383 - RNA, 23 nt, Artificial
  Chemically synthesized
gaugaaagugggaacauggauuu

SEQ ID NO: 12384 - RNA, 23 nt, Artificial
  Chemically synthesized
agaugaaagugggaacauggauu

SEQ ID NO: 12385 - RNA, 23 nt, Artificial
  Chemically synthesized
ugguuuuggcauugacacauguc

SEQ ID NO: 12386 - RNA, 23 nt, Artificial
  Chemically synthesized
augguuuuggcauugacacaugu

SEQ ID NO: 12387 - RNA, 23 nt, Artificial
  Chemically synthesized
ggcuuugaggaauucaaguacuu

SEQ ID NO: 12388 - RNA, 23 nt, Artificial
  Chemically synthesized
gggcuuugaggaauucaaguacu

SEQ ID NO: 12389 - RNA, 23 nt, Artificial
  Chemically synthesized
aacucaugaacauucucaauaag

SEQ ID NO: 12390 - RNA, 23 nt, Artificial
  Chemically synthesized
gaacucaugaacauucucaauaa

SEQ ID NO: 12391 - RNA, 23 nt, Artificial
  Chemically synthesized
agaacucaugaacauucucaaua

SEQ ID NO: 12392 - RNA, 23 nt, Artificial
  Chemically synthesized
cagaacucaugaacauucucaau

SEQ ID NO: 12393 - RNA, 23 nt, Artificial
  Chemically synthesized
acagaacucaugaacauucucaa

SEQ ID NO: 12394 - RNA, 23 nt, Artificial
  Chemically synthesized
agucgcagccauguuccugguua

SEQ ID NO: 12395 - RNA, 23 nt, Artificial
  Chemically synthesized
gaauucaaguacuuguggaacaa

SEQ ID NO: 12396 - RNA, 23 nt, Artificial
  Chemically synthesized
ggaauucaaguacuuguggaaca

SEQ ID NO: 12397 - RNA, 23 nt, Artificial
  Chemically synthesized
aggaauucaaguacuuguggaac

SEQ ID NO: 12398 - RNA, 23 nt, Artificial
  Chemically synthesized
gaggaauucaaguacuuguggaa

SEQ ID NO: 12399 - RNA, 23 nt, Artificial
  Chemically synthesized
ugaggaauucaaguacuugugga

SEQ ID NO: 12400 - RNA, 23 nt, Artificial
  Chemically synthesized
auucucaauaagguugugacacg

SEQ ID NO: 12401 - RNA, 23 nt, Artificial
  Chemically synthesized
cauucucaauaagguugugacac

SEQ ID NO: 12402 - RNA, 23 nt, Artificial
  Chemically synthesized
acauucucaauaagguugugaca

SEQ ID NO: 12403 - RNA, 23 nt, Artificial
  Chemically synthesized
gcaggccauauacaaacaguucg

SEQ ID NO: 12404 - RNA, 23 nt, Artificial
  Chemically synthesized
ggcaggccauauacaaacaguuc

SEQ ID NO: 12405 - RNA, 23 nt, Artificial
  Chemically synthesized
uggcaggccauauacaaacaguu

SEQ ID NO: 12406 - RNA, 23 nt, Artificial
  Chemically synthesized
aaagauggcacuggacaaaucca

SEQ ID NO: 12407 - RNA, 23 nt, Artificial
  Chemically synthesized
uuguuacccagcuucucaacauc

SEQ ID NO: 12408 - RNA, 23 nt, Artificial
  Chemically synthesized
cuuguuacccagcuucucaacau

SEQ ID NO: 12409 - RNA, 23 nt, Artificial
  Chemically synthesized
acuuguuacccagcuucucaaca

SEQ ID NO: 12410 - RNA, 23 nt, Artificial
  Chemically synthesized
uacuuguuacccagcuucucaac

SEQ ID NO: 12411 - RNA, 23 nt, Artificial
  Chemically synthesized
guacuuguuacccagcuucucaa

SEQ ID NO: 12412 - RNA, 23 nt, Artificial
  Chemically synthesized
aauucaaguacuuguggaacaac

SEQ ID NO: 12413 - RNA, 23 nt, Artificial
  Chemically synthesized
cagugccuuugucuauauucugc

SEQ ID NO: 12414 - RNA, 23 nt, Artificial
  Chemically synthesized
cgacacccugaucugaagacuga

SEQ ID NO: 12415 - RNA, 23 nt, Artificial
  Chemically synthesized
ucugaagacugaugguuuuggca

SEQ ID NO: 12416 - RNA, 23 nt, Artificial
  Chemically synthesized
aucugaagacugaugguuuuggc

SEQ ID NO: 12417 - RNA, 23 nt, Artificial
  Chemically synthesized
gaucugaagacugaugguuuugg

SEQ ID NO: 12418 - RNA, 23 nt, Artificial
  Chemically synthesized
ugaucugaagacugaugguuuug

SEQ ID NO: 12419 - RNA, 23 nt, Artificial
  Chemically synthesized
cugaucugaagacugaugguuuu

SEQ ID NO: 12420 - RNA, 23 nt, Artificial
  Chemically synthesized
gcaguuccggagacucuuugccc

SEQ ID NO: 12421 - RNA, 23 nt, Artificial
  Chemically synthesized
ggcaguuccggagacucuuugcc

SEQ ID NO: 12422 - RNA, 23 nt, Artificial
  Chemically synthesized
cggcaguuccggagacucuuugc

SEQ ID NO: 12423 - RNA, 23 nt, Artificial
  Chemically synthesized
ccggcaguuccggagacucuuug

SEQ ID NO: 12424 - RNA, 23 nt, Artificial
  Chemically synthesized
uccggcaguuccggagacucuuu

SEQ ID NO: 12425 - RNA, 23 nt, Artificial
  Chemically synthesized
ccaacauugaggccaacgagagu

SEQ ID NO: 12426 - RNA, 23 nt, Artificial
  Chemically synthesized
uccaacauugaggccaacgagag

SEQ ID NO: 12427 - RNA, 23 nt, Artificial
  Chemically synthesized
cuccaacauugaggccaacgaga

SEQ ID NO: 12428 - RNA, 23 nt, Artificial
  Chemically synthesized
cagaugaaagugggaacauggau

SEQ ID NO: 12429 - RNA, 23 nt, Artificial
  Chemically synthesized
aaauccaggugaacauccaggag

SEQ ID NO: 12430 - RNA, 23 nt, Artificial
  Chemically synthesized
caaauccaggugaacauccagga

SEQ ID NO: 12431 - RNA, 23 nt, Artificial
  Chemically synthesized
acaaauccaggugaacauccagg

SEQ ID NO: 12432 - RNA, 23 nt, Artificial
  Chemically synthesized
cucaugaacauucucaauaaggu

SEQ ID NO: 12433 - RNA, 23 nt, Artificial
  Chemically synthesized
ucagaugaaagugggaacaugga

SEQ ID NO: 12434 - RNA, 23 nt, Artificial
  Chemically synthesized
caacauugaggccaacgagagug

SEQ ID NO: 12435 - RNA, 23 nt, Artificial
  Chemically synthesized
gaucauccgacgcuacucagaug

SEQ ID NO: 12436 - RNA, 23 nt, Artificial
  Chemically synthesized
ugaucauccgacgcuacucagau

SEQ ID NO: 12437 - RNA, 23 nt, Artificial
  Chemically synthesized
augaucauccgacgcuacucaga

SEQ ID NO: 12438 - RNA, 23 nt, Artificial
  Chemically synthesized
caugaucauccgacgcuacucag

SEQ ID NO: 12439 - RNA, 23 nt, Artificial
  Chemically synthesized
ccgugccuucaaaucucuugaca

SEQ ID NO: 12440 - RNA, 23 nt, Artificial
  Chemically synthesized
uccgugccuucaaaucucuugac

SEQ ID NO: 12441 - RNA, 23 nt, Artificial
  Chemically synthesized
uuccgugccuucaaaucucuuga

SEQ ID NO: 12442 - RNA, 23 nt, Artificial
  Chemically synthesized
guuccgugccuucaaaucucuug

SEQ ID NO: 12443 - RNA, 23 nt, Artificial
  Chemically synthesized
uguuccgugccuucaaaucucuu

SEQ ID NO: 12444 - RNA, 23 nt, Artificial
  Chemically synthesized
ccagcuucucaacauccagggcc

SEQ ID NO: 12445 - RNA, 23 nt, Artificial
  Chemically synthesized
gaacauggauuuugacaacuuca

SEQ ID NO: 12446 - RNA, 23 nt, Artificial
  Chemically synthesized
cauggauuuugacaacuucauca

SEQ ID NO: 12447 - RNA, 23 nt, Artificial
  Chemically synthesized
acauggauuuugacaacuucauc

SEQ ID NO: 12448 - RNA, 23 nt, Artificial
  Chemically synthesized
aacauggauuuugacaacuucau

SEQ ID NO: 12449 - RNA, 23 nt, Artificial
  Chemically synthesized
ggaguggcugcagcugacuaugu

SEQ ID NO: 12450 - RNA, 23 nt, Artificial
  Chemically synthesized
aggaguggcugcagcugacuaug

SEQ ID NO: 12451 - RNA, 23 nt, Artificial
  Chemically synthesized
caggaguggcugcagcugacuau

SEQ ID NO: 12452 - RNA, 23 nt, Artificial
  Chemically synthesized
ggcagcaggguuccaccugaaug

SEQ ID NO: 12453 - RNA, 23 nt, Artificial
  Chemically synthesized
aggcagcaggguuccaccugaau

SEQ ID NO: 12454 - RNA, 23 nt, Artificial
  Chemically synthesized
aguacuuguuacccagcuucuca

SEQ ID NO: 12455 - RNA, 23 nt, Artificial
  Chemically synthesized
ccacaagcuuuuguucucucagu

SEQ ID NO: 12456 - RNA, 23 nt, Artificial
  Chemically synthesized
cccacaagcuuuuguucucucag

SEQ ID NO: 12457 - RNA, 23 nt, Artificial
  Chemically synthesized
acccacaagcuuuuguucucuca

SEQ ID NO: 12458 - RNA, 23 nt, Artificial
  Chemically synthesized
ccaggaggaaauaaacaugcccc

SEQ ID NO: 12459 - RNA, 23 nt, Artificial
  Chemically synthesized
cccaggaggaaauaaacaugccc

SEQ ID NO: 12460 - RNA, 23 nt, Artificial
  Chemically synthesized
gcccaggaggaaauaaacaugcc

SEQ ID NO: 12461 - RNA, 23 nt, Artificial
  Chemically synthesized
cucagaugaaagugggaacaugg

SEQ ID NO: 12462 - RNA, 23 nt, Artificial
  Chemically synthesized
acucagaugaaagugggaacaug

SEQ ID NO: 12463 - RNA, 23 nt, Artificial
  Chemically synthesized
cauugaggccaacgagagugagg

SEQ ID NO: 12464 - RNA, 23 nt, Artificial
  Chemically synthesized
acauugaggccaacgagagugag

SEQ ID NO: 12465 - RNA, 23 nt, Artificial
  Chemically synthesized
aacauugaggccaacgagaguga

SEQ ID NO: 12466 - RNA, 23 nt, Artificial
  Chemically synthesized
cucuaggacacucuaacaagcuc

SEQ ID NO: 12467 - RNA, 23 nt, Artificial
  Chemically synthesized
gacgcuacucagaugaaaguggg

SEQ ID NO: 12468 - RNA, 23 nt, Artificial
  Chemically synthesized
guuccaccugaaugagcaucucu

SEQ ID NO: 12469 - RNA, 23 nt, Artificial
  Chemically synthesized
agcuggcuggagaugacauggag

SEQ ID NO: 12470 - RNA, 23 nt, Artificial
  Chemically synthesized
cagcuggcuggagaugacaugga

SEQ ID NO: 12471 - RNA, 23 nt, Artificial
  Chemically synthesized
ccagcuggcuggagaugacaugg

SEQ ID NO: 12472 - RNA, 23 nt, Artificial
  Chemically synthesized
cccagcuggcuggagaugacaug

SEQ ID NO: 12473 - RNA, 23 nt, Artificial
  Chemically synthesized
gcccagcuggcuggagaugacau

SEQ ID NO: 12474 - RNA, 23 nt, Artificial
  Chemically synthesized
aggugaacauccaggaguggcug

SEQ ID NO: 12475 - RNA, 23 nt, Artificial
  Chemically synthesized
caggugaacauccaggaguggcu

SEQ ID NO: 12476 - RNA, 23 nt, Artificial
  Chemically synthesized
ccaggugaacauccaggaguggc

SEQ ID NO: 12477 - RNA, 23 nt, Artificial
  Chemically synthesized
uccaggugaacauccaggagugg

SEQ ID NO: 12478 - RNA, 23 nt, Artificial
  Chemically synthesized
auccaggugaacauccaggagug

SEQ ID NO: 12479 - RNA, 23 nt, Artificial
  Chemically synthesized
acucaugaacauucucaauaagg

SEQ ID NO: 12480 - RNA, 23 nt, Artificial
  Chemically synthesized
gcuuugaggaauucaaguacuug

SEQ ID NO: 12481 - RNA, 23 nt, Artificial
  Chemically synthesized
caaacaguucgacacugaccgau

SEQ ID NO: 12482 - RNA, 23 nt, Artificial
  Chemically synthesized
acaaacaguucgacacugaccga

SEQ ID NO: 12483 - RNA, 23 nt, Artificial
  Chemically synthesized
uacaaacaguucgacacugaccg

SEQ ID NO: 12484 - RNA, 23 nt, Artificial
  Chemically synthesized
auacaaacaguucgacacugacc

SEQ ID NO: 12485 - RNA, 23 nt, Artificial
  Chemically synthesized
uauacaaacaguucgacacugac

SEQ ID NO: 12486 - RNA, 23 nt, Artificial
  Chemically synthesized
caaaucucuugacaaagauggca

SEQ ID NO: 12487 - RNA, 23 nt, Artificial
  Chemically synthesized
ucaaaucucuugacaaagauggc

SEQ ID NO: 12488 - RNA, 23 nt, Artificial
  Chemically synthesized
uucaaaucucuugacaaagaugg

SEQ ID NO: 12489 - RNA, 23 nt, Artificial
  Chemically synthesized
ggucagcgccacagaacucauga

SEQ ID NO: 12490 - RNA, 23 nt, Artificial
  Chemically synthesized
cuucucaacauccagggcccaau

SEQ ID NO: 12491 - RNA, 23 nt, Artificial
  Chemically synthesized
gguuuuggcauugacacaugucg

SEQ ID NO: 12492 - RNA, 23 nt, Artificial
  Chemically synthesized
uguaccugugccaagccuagcac

SEQ ID NO: 12493 - RNA, 23 nt, Artificial
  Chemically synthesized
cuguaccugugccaagccuagca

SEQ ID NO: 12494 - RNA, 23 nt, Artificial
  Chemically synthesized
ccuguaccugugccaagccuagc

SEQ ID NO: 12495 - RNA, 23 nt, Artificial
  Chemically synthesized
cccuguaccugugccaagccuag

SEQ ID NO: 12496 - RNA, 23 nt, Artificial
  Chemically synthesized
ccccuguaccugugccaagccua

SEQ ID NO: 12497 - RNA, 23 nt, Artificial
  Chemically synthesized
ccugaucugaagacugaugguuu

SEQ ID NO: 12498 - RNA, 23 nt, Artificial
  Chemically synthesized
gugccuuugucuauauucugcuc

SEQ ID NO: 12499 - RNA, 23 nt, Artificial
  Chemically synthesized
agugccuuugucuauauucugcu

SEQ ID NO: 12500 - RNA, 23 nt, Artificial
  Chemically synthesized
cugccaggcccaggaggaaauaa

SEQ ID NO: 12501 - RNA, 23 nt, Artificial
  Chemically synthesized
aggucagcgccacagaacucaug

SEQ ID NO: 12502 - RNA, 23 nt, Artificial
  Chemically synthesized
gaggucagcgccacagaacucau

SEQ ID NO: 12503 - RNA, 23 nt, Artificial
  Chemically synthesized
cacagaacucaugaacauucuca

SEQ ID NO: 12504 - RNA, 23 nt, Artificial
  Chemically synthesized
gaucagggaccauuugcaguagu

SEQ ID NO: 12505 - RNA, 23 nt, Artificial
  Chemically synthesized
acgacacccugaucugaagacug

SEQ ID NO: 12506 - RNA, 23 nt, Artificial
  Chemically synthesized
auggauuuugacaacuucaucag

SEQ ID NO: 12507 - RNA, 23 nt, Artificial
  Chemically synthesized
cugaagacugaugguuuuggcau

SEQ ID NO: 12508 - RNA, 23 nt, Artificial
  Chemically synthesized
ggcauugacacaugucgcagcau

SEQ ID NO: 12509 - RNA, 23 nt, Artificial
  Chemically synthesized
uggcauugacacaugucgcagca

SEQ ID NO: 12510 - RNA, 23 nt, Artificial
  Chemically synthesized
uuggcauugacacaugucgcagc

SEQ ID NO: 12511 - RNA, 23 nt, Artificial
  Chemically synthesized
uuuggcauugacacaugucgcag

SEQ ID NO: 12512 - RNA, 23 nt, Artificial
  Chemically synthesized
uuuuggcauugacacaugucgca

SEQ ID NO: 12513 - RNA, 23 nt, Artificial
  Chemically synthesized
gacuauguauuccugaacuggag

SEQ ID NO: 12514 - RNA, 23 nt, Artificial
  Chemically synthesized
ugacuauguauuccugaacugga

SEQ ID NO: 12515 - RNA, 23 nt, Artificial
  Chemically synthesized
cugucugcagucacaucuuugug

SEQ ID NO: 12516 - RNA, 23 nt, Artificial
  Chemically synthesized
ccugucugcagucacaucuuugu

SEQ ID NO: 12517 - RNA, 23 nt, Artificial
  Chemically synthesized
uccugucugcagucacaucuuug

SEQ ID NO: 12518 - RNA, 23 nt, Artificial
  Chemically synthesized
auccugucugcagucacaucuuu

SEQ ID NO: 12519 - RNA, 23 nt, Artificial
  Chemically synthesized
aucagggaccauuugcaguagug

SEQ ID NO: 12520 - RNA, 23 nt, Artificial
  Chemically synthesized
ccaagccuagcacuugugaugcc

SEQ ID NO: 12521 - RNA, 23 nt, Artificial
  Chemically synthesized
gccaagccuagcacuugugaugc

SEQ ID NO: 12522 - RNA, 23 nt, Artificial
  Chemically synthesized
ugccaagccuagcacuugugaug

SEQ ID NO: 12523 - RNA, 23 nt, Artificial
  Chemically synthesized
gugccaagccuagcacuugugau

SEQ ID NO: 12524 - RNA, 23 nt, Artificial
  Chemically synthesized
ugugccaagccuagcacuuguga

SEQ ID NO: 12525 - RNA, 23 nt, Artificial
  Chemically synthesized
auagcgacaccacaggcaagcug

SEQ ID NO: 12526 - RNA, 23 nt, Artificial
  Chemically synthesized
gauagcgacaccacaggcaagcu

SEQ ID NO: 12527 - RNA, 23 nt, Artificial
  Chemically synthesized
ggauagcgacaccacaggcaagc

SEQ ID NO: 12528 - RNA, 23 nt, Artificial
  Chemically synthesized
uggauagcgacaccacaggcaag

SEQ ID NO: 12529 - RNA, 23 nt, Artificial
  Chemically synthesized
auggauagcgacaccacaggcaa

SEQ ID NO: 12530 - RNA, 23 nt, Artificial
  Chemically synthesized
uugugacacgacacccugaucug

SEQ ID NO: 12531 - RNA, 23 nt, Artificial
  Chemically synthesized
guugugacacgacacccugaucu

SEQ ID NO: 12532 - RNA, 23 nt, Artificial
  Chemically synthesized
gguugugacacgacacccugauc

SEQ ID NO: 12533 - RNA, 23 nt, Artificial
  Chemically synthesized
agguugugacacgacacccugau

SEQ ID NO: 12534 - RNA, 23 nt, Artificial
  Chemically synthesized
aagguugugacacgacacccuga

SEQ ID NO: 12535 - RNA, 23 nt, Artificial
  Chemically synthesized
guucucucaguacuuguuaccca

SEQ ID NO: 12536 - RNA, 23 nt, Artificial
  Chemically synthesized
uguucucucaguacuuguuaccc

SEQ ID NO: 12537 - RNA, 23 nt, Artificial
  Chemically synthesized
uuguucucucaguacuuguuacc

SEQ ID NO: 12538 - RNA, 23 nt, Artificial
  Chemically synthesized
uuuguucucucaguacuuguuac

SEQ ID NO: 12539 - RNA, 23 nt, Artificial
  Chemically synthesized
uuuuguucucucaguacuuguua

SEQ ID NO: 12540 - RNA, 23 nt, Artificial
  Chemically synthesized
ugugacacgacacccugaucuga

SEQ ID NO: 12541 - RNA, 23 nt, Artificial
  Chemically synthesized
caagccuagcacuugugaugccu

SEQ ID NO: 12542 - RNA, 23 nt, Artificial
  Chemically synthesized
ugaacucccaggugccuuugagg

SEQ ID NO: 12543 - RNA, 23 nt, Artificial
  Chemically synthesized
gugaacucccaggugccuuugag

SEQ ID NO: 12544 - RNA, 23 nt, Artificial
  Chemically synthesized
agugaacucccaggugccuuuga

SEQ ID NO: 12545 - RNA, 23 nt, Artificial
  Chemically synthesized
uagugaacucccaggugccuuug

SEQ ID NO: 12546 - RNA, 23 nt, Artificial
  Chemically synthesized
guagugaacucccaggugccuuu

SEQ ID NO: 12547 - RNA, 23 nt, Artificial
  Chemically synthesized
agauggcacuggacaaauccagg

SEQ ID NO: 12548 - RNA, 23 nt, Artificial
  Chemically synthesized
aagauggcacuggacaaauccag

SEQ ID NO: 12549 - RNA, 23 nt, Artificial
  Chemically synthesized
uugcaguagugaacucccaggug

SEQ ID NO: 12550 - RNA, 23 nt, Artificial
  Chemically synthesized
uuugcaguagugaacucccaggu

SEQ ID NO: 12551 - RNA, 23 nt, Artificial
  Chemically synthesized
auuugcaguagugaacucccagg

SEQ ID NO: 12552 - RNA, 23 nt, Artificial
  Chemically synthesized
cauuugcaguagugaacucccag

SEQ ID NO: 12553 - RNA, 23 nt, Artificial
  Chemically synthesized
ccauuugcaguagugaacuccca

SEQ ID NO: 12554 - RNA, 23 nt, Artificial
  Chemically synthesized
augguggccgugauggauagcga

SEQ ID NO: 12555 - RNA, 23 nt, Artificial
  Chemically synthesized
caugguggccgugauggauagcg

SEQ ID NO: 12556 - RNA, 23 nt, Artificial
  Chemically synthesized
gcaugguggccgugauggauagc

SEQ ID NO: 12557 - RNA, 23 nt, Artificial
  Chemically synthesized
agcaugguggccgugauggauag

SEQ ID NO: 12558 - RNA, 23 nt, Artificial
  Chemically synthesized
cagcaugguggccgugauggaua

SEQ ID NO: 12559 - RNA, 23 nt, Artificial
  Chemically synthesized
ccauguuccugguuaacucguuc

SEQ ID NO: 12560 - RNA, 23 nt, Artificial
  Chemically synthesized
gccauguuccugguuaacucguu

SEQ ID NO: 12561 - RNA, 23 nt, Artificial
  Chemically synthesized
agccauguuccugguuaacucgu

SEQ ID NO: 12562 - RNA, 23 nt, Artificial
  Chemically synthesized
uacucagaugaaagugggaacau

SEQ ID NO: 12563 - RNA, 23 nt, Artificial
  Chemically synthesized
uggcuggagaugacauggagguc

SEQ ID NO: 12564 - RNA, 23 nt, Artificial
  Chemically synthesized
cuggcuggagaugacauggaggu

SEQ ID NO: 12565 - RNA, 23 nt, Artificial
  Chemically synthesized
gcuggcuggagaugacauggagg

SEQ ID NO: 12566 - RNA, 23 nt, Artificial
  Chemically synthesized
aucauccgacgcuacucagauga

SEQ ID NO: 12567 - RNA, 23 nt, Artificial
  Chemically synthesized
aacaucaaaagguggcaggccau

SEQ ID NO: 12568 - RNA, 23 nt, Artificial
  Chemically synthesized
uguuccugguuaacucguucuug

SEQ ID NO: 12569 - RNA, 23 nt, Artificial
  Chemically synthesized
auguuccugguuaacucguucuu

SEQ ID NO: 12570 - RNA, 23 nt, Artificial
  Chemically synthesized
cauguuccugguuaacucguucu

SEQ ID NO: 12571 - RNA, 23 nt, Artificial
  Chemically synthesized
cugggaaaugugcuuggaggccu

SEQ ID NO: 12572 - RNA, 23 nt, Artificial
  Chemically synthesized
cucuaacaagcucuguccacggg

SEQ ID NO: 12573 - RNA, 23 nt, Artificial
  Chemically synthesized
acucuaacaagcucuguccacgg

SEQ ID NO: 12574 - RNA, 23 nt, Artificial
  Chemically synthesized
cacucuaacaagcucuguccacg

SEQ ID NO: 12575 - RNA, 23 nt, Artificial
  Chemically synthesized
acacucuaacaagcucuguccac

SEQ ID NO: 12576 - RNA, 23 nt, Artificial
  Chemically synthesized
gacacucuaacaagcucugucca

SEQ ID NO: 12577 - RNA, 23 nt, Artificial
  Chemically synthesized
ucucuugacaaagauggcacugg

SEQ ID NO: 12578 - RNA, 23 nt, Artificial
  Chemically synthesized
aucucuugacaaagauggcacug

SEQ ID NO: 12579 - RNA, 23 nt, Artificial
  Chemically synthesized
aaucucuugacaaagauggcacu

SEQ ID NO: 12580 - RNA, 23 nt, Artificial
  Chemically synthesized
accauuugcaguagugaacuccc

SEQ ID NO: 12581 - RNA, 23 nt, Artificial
  Chemically synthesized
caguacuuguuacccagcuucuc

SEQ ID NO: 12582 - RNA, 23 nt, Artificial
  Chemically synthesized
ucaguacuuguuacccagcuucu

SEQ ID NO: 12583 - RNA, 23 nt, Artificial
  Chemically synthesized
cucaguacuuguuacccagcuuc

SEQ ID NO: 12584 - RNA, 23 nt, Artificial
  Chemically synthesized
ucucaguacuuguuacccagcuu

SEQ ID NO: 12585 - RNA, 23 nt, Artificial
  Chemically synthesized
uggauuuugacaacuucaucagc

SEQ ID NO: 12586 - RNA, 23 nt, Artificial
  Chemically synthesized
auauacaaacaguucgacacuga

SEQ ID NO: 12587 - RNA, 23 nt, Artificial
  Chemically synthesized
cauauacaaacaguucgacacug

SEQ ID NO: 12588 - RNA, 23 nt, Artificial
  Chemically synthesized
cuauaggagucaccuggagccuc

SEQ ID NO: 12589 - RNA, 23 nt, Artificial
  Chemically synthesized
ugucuauauucugcucccagccu

SEQ ID NO: 12590 - RNA, 23 nt, Artificial
  Chemically synthesized
uugucuauauucugcucccagcc

SEQ ID NO: 12591 - RNA, 23 nt, Artificial
  Chemically synthesized
uuugucuauauucugcucccagc

SEQ ID NO: 12592 - RNA, 23 nt, Artificial
  Chemically synthesized
cuuugucuauauucugcucccag

SEQ ID NO: 12593 - RNA, 23 nt, Artificial
  Chemically synthesized
ccuuugucuauauucugcuccca

SEQ ID NO: 12594 - RNA, 23 nt, Artificial
  Chemically synthesized
cacuugugaugccuccaugcccc

SEQ ID NO: 12595 - RNA, 23 nt, Artificial
  Chemically synthesized
gcacuugugaugccuccaugccc

SEQ ID NO: 12596 - RNA, 23 nt, Artificial
  Chemically synthesized
agcacuugugaugccuccaugcc

SEQ ID NO: 12597 - RNA, 23 nt, Artificial
  Chemically synthesized
uagcacuugugaugccuccaugc

SEQ ID NO: 12598 - RNA, 23 nt, Artificial
  Chemically synthesized
cuagcacuugugaugccuccaug

SEQ ID NO: 12599 - RNA, 23 nt, Artificial
  Chemically synthesized
uugaggaauucaaguacuugugg

SEQ ID NO: 12600 - RNA, 23 nt, Artificial
  Chemically synthesized
uuugaggaauucaaguacuugug

SEQ ID NO: 12601 - RNA, 23 nt, Artificial
  Chemically synthesized
cuuugaggaauucaaguacuugu

SEQ ID NO: 12602 - RNA, 23 nt, Artificial
  Chemically synthesized
cuuuuguucucucaguacuuguu

SEQ ID NO: 12603 - RNA, 23 nt, Artificial
  Chemically synthesized
gcuuuuguucucucaguacuugu

SEQ ID NO: 12604 - RNA, 23 nt, Artificial
  Chemically synthesized
ugggaaaugugcuuggaggccug

SEQ ID NO: 12605 - RNA, 23 nt, Artificial
  Chemically synthesized
cuacucagaugaaagugggaaca

SEQ ID NO: 12606 - RNA, 23 nt, Artificial
  Chemically synthesized
gcuacucagaugaaagugggaac

SEQ ID NO: 12607 - RNA, 23 nt, Artificial
  Chemically synthesized
ggagaugacauggaggucagcgc

SEQ ID NO: 12608 - RNA, 23 nt, Artificial
  Chemically synthesized
uggagaugacauggaggucagcg

SEQ ID NO: 12609 - RNA, 23 nt, Artificial
  Chemically synthesized
cuggagaugacauggaggucagc

SEQ ID NO: 12610 - RNA, 23 nt, Artificial
  Chemically synthesized
gcuggagaugacauggaggucag

SEQ ID NO: 12611 - RNA, 23 nt, Artificial
  Chemically synthesized
ggcuggagaugacauggagguca

SEQ ID NO: 12612 - RNA, 23 nt, Artificial
  Chemically synthesized
gagaugacauggaggucagcgcc

SEQ ID NO: 12613 - RNA, 23 nt, Artificial
  Chemically synthesized
cugcugacccacaagcuuuuguu

SEQ ID NO: 12614 - RNA, 23 nt, Artificial
  Chemically synthesized
ccugcugacccacaagcuuuugu

SEQ ID NO: 12615 - RNA, 23 nt, Artificial
  Chemically synthesized
gccugcugacccacaagcuuuug

SEQ ID NO: 12616 - RNA, 23 nt, Artificial
  Chemically synthesized
ggccugcugacccacaagcuuuu

SEQ ID NO: 12617 - RNA, 23 nt, Artificial
  Chemically synthesized
gggccugcugacccacaagcuuu

SEQ ID NO: 12618 - RNA, 23 nt, Artificial
  Chemically synthesized
acaacaucaaaagguggcaggcc

SEQ ID NO: 12619 - RNA, 23 nt, Artificial
  Chemically synthesized
aacaacaucaaaagguggcaggc

SEQ ID NO: 12620 - RNA, 23 nt, Artificial
  Chemically synthesized
gaacaacaucaaaagguggcagg

SEQ ID NO: 12621 - RNA, 23 nt, Artificial
  Chemically synthesized
ucacugccuugcuauaggaguca

SEQ ID NO: 12622 - RNA, 23 nt, Artificial
  Chemically synthesized
cucacugccuugcuauaggaguc

SEQ ID NO: 12623 - RNA, 23 nt, Artificial
  Chemically synthesized
ccucacugccuugcuauaggagu

SEQ ID NO: 12624 - RNA, 23 nt, Artificial
  Chemically synthesized
ggacacucuaacaagcucugucc

SEQ ID NO: 12625 - RNA, 23 nt, Artificial
  Chemically synthesized
aggacacucuaacaagcucuguc

SEQ ID NO: 12626 - RNA, 23 nt, Artificial
  Chemically synthesized
uaggacacucuaacaagcucugu

SEQ ID NO: 12627 - RNA, 23 nt, Artificial
  Chemically synthesized
cuaggacacucuaacaagcucug

SEQ ID NO: 12628 - RNA, 23 nt, Artificial
  Chemically synthesized
ucuaggacacucuaacaagcucu

SEQ ID NO: 12629 - RNA, 23 nt, Artificial
  Chemically synthesized
aauccaggugaacauccaggagu

SEQ ID NO: 12630 - RNA, 23 nt, Artificial
  Chemically synthesized
ugaacauccaggaguggcugcag

SEQ ID NO: 12631 - RNA, 23 nt, Artificial
  Chemically synthesized
gugaacauccaggaguggcugca

SEQ ID NO: 12632 - RNA, 23 nt, Artificial
  Chemically synthesized
ggugaacauccaggaguggcugc

SEQ ID NO: 12633 - RNA, 23 nt, Artificial
  Chemically synthesized
aaacaguucgacacugaccgauc

SEQ ID NO: 12634 - RNA, 23 nt, Artificial
  Chemically synthesized
cugcagcugacuauguauuccug

SEQ ID NO: 12635 - RNA, 23 nt, Artificial
  Chemically synthesized
aaaugugcuuggaggccugauca

SEQ ID NO: 12636 - RNA, 23 nt, Artificial
  Chemically synthesized
gaaaugugcuuggaggccugauc

SEQ ID NO: 12637 - RNA, 23 nt, Artificial
  Chemically synthesized
ggaaaugugcuuggaggccugau

SEQ ID NO: 12638 - RNA, 23 nt, Artificial
  Chemically synthesized
gggaaaugugcuuggaggccuga

SEQ ID NO: 12639 - RNA, 23 nt, Artificial
  Chemically synthesized
ccuagcacuugugaugccuccau

SEQ ID NO: 12640 - RNA, 23 nt, Artificial
  Chemically synthesized
uggcacuggacaaauccagguga

SEQ ID NO: 12641 - RNA, 23 nt, Artificial
  Chemically synthesized
auggcacuggacaaauccaggug

SEQ ID NO: 12642 - RNA, 23 nt, Artificial
  Chemically synthesized
gauggcacuggacaaauccaggu

SEQ ID NO: 12643 - RNA, 23 nt, Artificial
  Chemically synthesized
uugaggccaacgagagugaggag

SEQ ID NO: 12644 - RNA, 23 nt, Artificial
  Chemically synthesized
auugaggccaacgagagugagga

SEQ ID NO: 12645 - RNA, 23 nt, Artificial
  Chemically synthesized
gguuaacucguucuugaagggcg

SEQ ID NO: 12646 - RNA, 23 nt, Artificial
  Chemically synthesized
ugucugcagucacaucuuugugg

SEQ ID NO: 12647 - RNA, 23 nt, Artificial
  Chemically synthesized
gccuuugucuauauucugcuccc

SEQ ID NO: 12648 - RNA, 23 nt, Artificial
  Chemically synthesized
ugccuuugucuauauucugcucc

SEQ ID NO: 12649 - RNA, 23 nt, Artificial
  Chemically synthesized
auguuccgugccuucaaaucucu

SEQ ID NO: 12650 - RNA, 23 nt, Artificial
  Chemically synthesized
ggaggaaauaaacaugccccagu

SEQ ID NO: 12651 - RNA, 23 nt, Artificial
  Chemically synthesized
aggaggaaauaaacaugccccag

SEQ ID NO: 12652 - RNA, 23 nt, Artificial
  Chemically synthesized
caggaggaaauaaacaugcccca

SEQ ID NO: 12653 - RNA, 23 nt, Artificial
  Chemically synthesized
cgcuacucagaugaaagugggaa

SEQ ID NO: 12654 - RNA, 23 nt, Artificial
  Chemically synthesized
acgcuacucagaugaaaguggga

SEQ ID NO: 12655 - RNA, 23 nt, Artificial
  Chemically synthesized
uauguauuccugaacuggagccc

SEQ ID NO: 12656 - RNA, 23 nt, Artificial
  Chemically synthesized
cuauguauuccugaacuggagcc

SEQ ID NO: 12657 - RNA, 23 nt, Artificial
  Chemically synthesized
acuauguauuccugaacuggagc

SEQ ID NO: 12658 - RNA, 23 nt, Artificial
  Chemically synthesized
cucucaguacuuguuacccagcu

SEQ ID NO: 12659 - RNA, 23 nt, Artificial
  Chemically synthesized
ucucucaguacuuguuacccagc

SEQ ID NO: 12660 - RNA, 23 nt, Artificial
  Chemically synthesized
uucucucaguacuuguuacccag

SEQ ID NO: 12661 - RNA, 23 nt, Artificial
  Chemically synthesized
ugcugacccacaagcuuuuguuc

SEQ ID NO: 12662 - RNA, 23 nt, Artificial
  Chemically synthesized
caguucugggaggaugacuccag

SEQ ID NO: 12663 - RNA, 23 nt, Artificial
  Chemically synthesized
gacccacaagcuuuuguucucuc

SEQ ID NO: 12664 - RNA, 23 nt, Artificial
  Chemically synthesized
ugacccacaagcuuuuguucucu

SEQ ID NO: 12665 - RNA, 23 nt, Artificial
  Chemically synthesized
cugugccaagccuagcacuugug

SEQ ID NO: 12666 - RNA, 23 nt, Artificial
  Chemically synthesized
ccugugccaagccuagcacuugu

SEQ ID NO: 12667 - RNA, 23 nt, Artificial
  Chemically synthesized
guuuuggcauugacacaugucgc

SEQ ID NO: 12668 - RNA, 23 nt, Artificial
  Chemically synthesized
caacaucaaaagguggcaggcca

SEQ ID NO: 12669 - RNA, 23 nt, Artificial
  Chemically synthesized
acacugaccgaucagggaccauu

SEQ ID NO: 12670 - RNA, 23 nt, Artificial
  Chemically synthesized
aacauucucaauaagguugugac

SEQ ID NO: 12671 - RNA, 23 nt, Artificial
  Chemically synthesized
ucugcagucacaucuuugugggg

SEQ ID NO: 12672 - RNA, 23 nt, Artificial
  Chemically synthesized
gucugcagucacaucuuuguggg

SEQ ID NO: 12673 - RNA, 23 nt, Artificial
  Chemically synthesized
gauuuugacaacuucaucagcug

SEQ ID NO: 12674 - RNA, 23 nt, Artificial
  Chemically synthesized
ggauuuugacaacuucaucagcu

SEQ ID NO: 12675 - RNA, 23 nt, Artificial
  Chemically synthesized
cugacccacaagcuuuuguucuc

SEQ ID NO: 12676 - RNA, 23 nt, Artificial
  Chemically synthesized
uguuacccagcuucucaacaucc

SEQ ID NO: 12677 - RNA, 23 nt, Artificial
  Chemically synthesized
aauuugcccugccuggaguuccc

SEQ ID NO: 12678 - RNA, 23 nt, Artificial
  Chemically synthesized
caauuugcccugccuggaguucc

SEQ ID NO: 12679 - RNA, 23 nt, Artificial
  Chemically synthesized
ccaauuugcccugccuggaguuc

SEQ ID NO: 12680 - RNA, 23 nt, Artificial
  Chemically synthesized
cccaauuugcccugccuggaguu

SEQ ID NO: 12681 - RNA, 23 nt, Artificial
  Chemically synthesized
gcccaauuugcccugccuggagu

SEQ ID NO: 12682 - RNA, 23 nt, Artificial
  Chemically synthesized
aaugugcuuggaggccugaucag

SEQ ID NO: 12683 - RNA, 23 nt, Artificial
  Chemically synthesized
auguauuccugaacuggagcccc

SEQ ID NO: 12684 - RNA, 23 nt, Artificial
  Chemically synthesized
acauccagggcccaauuugcccu

SEQ ID NO: 12685 - RNA, 23 nt, Artificial
  Chemically synthesized
aacauccagggcccaauuugccc

SEQ ID NO: 12686 - RNA, 23 nt, Artificial
  Chemically synthesized
caguagugaacucccaggugccu

SEQ ID NO: 12687 - RNA, 23 nt, Artificial
  Chemically synthesized
gcaguagugaacucccaggugcc

SEQ ID NO: 12688 - RNA, 23 nt, Artificial
  Chemically synthesized
ugcaguagugaacucccaggugc

SEQ ID NO: 12689 - RNA, 23 nt, Artificial
  Chemically synthesized
acaacuucaucagcugcuugguc

SEQ ID NO: 12690 - RNA, 23 nt, Artificial
  Chemically synthesized
gacaacuucaucagcugcuuggu

SEQ ID NO: 12691 - RNA, 23 nt, Artificial
  Chemically synthesized
ugacaacuucaucagcugcuugg

SEQ ID NO: 12692 - RNA, 23 nt, Artificial
  Chemically synthesized
uugacaacuucaucagcugcuug

SEQ ID NO: 12693 - RNA, 23 nt, Artificial
  Chemically synthesized
uuugacaacuucaucagcugcuu

SEQ ID NO: 12694 - RNA, 23 nt, Artificial
  Chemically synthesized
caguuccggagacucuuugccca

SEQ ID NO: 12695 - RNA, 23 nt, Artificial
  Chemically synthesized
ccucucucaguucugggaggaug

SEQ ID NO: 12696 - RNA, 23 nt, Artificial
  Chemically synthesized
cccucucucaguucugggaggau

SEQ ID NO: 12697 - RNA, 23 nt, Artificial
  Chemically synthesized
gccgugauggauagcgacaccac

SEQ ID NO: 12698 - RNA, 23 nt, Artificial
  Chemically synthesized
aguagugaacucccaggugccuu

SEQ ID NO: 12699 - RNA, 23 nt, Artificial
  Chemically synthesized
agaugacauggaggucagcgcca

SEQ ID NO: 12700 - RNA, 23 nt, Artificial
  Chemically synthesized
augugcuuggaggccugaucagc

SEQ ID NO: 12701 - RNA, 23 nt, Artificial
  Chemically synthesized
gcagucacaucuuuguggggccu

SEQ ID NO: 12702 - RNA, 23 nt, Artificial
  Chemically synthesized
ugcagucacaucuuuguggggcc

SEQ ID NO: 12703 - RNA, 23 nt, Artificial
  Chemically synthesized
cugcagucacaucuuuguggggc

SEQ ID NO: 12704 - RNA, 23 nt, Artificial
  Chemically synthesized
gcugacccacaagcuuuuguucu

SEQ ID NO: 12705 - RNA, 23 nt, Artificial
  Chemically synthesized
gccuagcacuugugaugccucca

SEQ ID NO: 12706 - RNA, 23 nt, Artificial
  Chemically synthesized
aagccuagcacuugugaugccuc

SEQ ID NO: 12707 - RNA, 23 nt, Artificial
  Chemically synthesized
ggccgugauggauagcgacacca

SEQ ID NO: 12708 - RNA, 23 nt, Artificial
  Chemically synthesized
cuaacaagcucuguccacggguc

SEQ ID NO: 12709 - RNA, 23 nt, Artificial
  Chemically synthesized
ucuaacaagcucuguccacgggu

SEQ ID NO: 12710 - RNA, 23 nt, Artificial
  Chemically synthesized
acauuacuccaacauugaggcca

SEQ ID NO: 12711 - RNA, 23 nt, Artificial
  Chemically synthesized
agccuagcacuugugaugccucc

SEQ ID NO: 12712 - RNA, 23 nt, Artificial
  Chemically synthesized
accugugccaagccuagcacuug

SEQ ID NO: 12713 - RNA, 23 nt, Artificial
  Chemically synthesized
uaccugugccaagccuagcacuu

SEQ ID NO: 12714 - RNA, 23 nt, Artificial
  Chemically synthesized
cagcuucucaacauccagggccc

SEQ ID NO: 12715 - RNA, 23 nt, Artificial
  Chemically synthesized
ugccuugcuauaggagucaccug

SEQ ID NO: 12716 - RNA, 23 nt, Artificial
  Chemically synthesized
cugccuugcuauaggagucaccu

SEQ ID NO: 12717 - RNA, 23 nt, Artificial
  Chemically synthesized
acugccuugcuauaggagucacc

SEQ ID NO: 12718 - RNA, 23 nt, Artificial
  Chemically synthesized
cacugccuugcuauaggagucac

SEQ ID NO: 12719 - RNA, 23 nt, Artificial
  Chemically synthesized
auugacacaugucgcagcauggu

SEQ ID NO: 12720 - RNA, 23 nt, Artificial
  Chemically synthesized
cauugacacaugucgcagcaugg

SEQ ID NO: 12721 - RNA, 23 nt, Artificial
  Chemically synthesized
gcauugacacaugucgcagcaug

SEQ ID NO: 12722 - RNA, 23 nt, Artificial
  Chemically synthesized
auccuaggcggagucaucagcgc

SEQ ID NO: 12723 - RNA, 23 nt, Artificial
  Chemically synthesized
cauccuaggcggagucaucagcg

SEQ ID NO: 12724 - RNA, 23 nt, Artificial
  Chemically synthesized
gcauccuaggcggagucaucagc

SEQ ID NO: 12725 - RNA, 23 nt, Artificial
  Chemically synthesized
cgcauccuaggcggagucaucag

SEQ ID NO: 12726 - RNA, 23 nt, Artificial
  Chemically synthesized
gcgcauccuaggcggagucauca

SEQ ID NO: 12727 - RNA, 23 nt, Artificial
  Chemically synthesized
aacucccaggugccuuugaggca

SEQ ID NO: 12728 - RNA, 23 nt, Artificial
  Chemically synthesized
gaacucccaggugccuuugaggc

SEQ ID NO: 12729 - RNA, 23 nt, Artificial
  Chemically synthesized
gccuugcuauaggagucaccugg

SEQ ID NO: 12730 - RNA, 23 nt, Artificial
  Chemically synthesized
uucaucagcugcuuggucaggcu

SEQ ID NO: 12731 - RNA, 23 nt, Artificial
  Chemically synthesized
cuucaucagcugcuuggucaggc

SEQ ID NO: 12732 - RNA, 23 nt, Artificial
  Chemically synthesized
acuucaucagcugcuuggucagg

SEQ ID NO: 12733 - RNA, 23 nt, Artificial
  Chemically synthesized
aacuucaucagcugcuuggucag

SEQ ID NO: 12734 - RNA, 23 nt, Artificial
  Chemically synthesized
caacuucaucagcugcuugguca

SEQ ID NO: 12735 - RNA, 23 nt, Artificial
  Chemically synthesized
uaagguugugacacgacacccug

SEQ ID NO: 12736 - RNA, 23 nt, Artificial
  Chemically synthesized
auuugcccugccuggaguucccc

SEQ ID NO: 12737 - RNA, 23 nt, Artificial
  Chemically synthesized
aguuccggagacucuuugcccag

SEQ ID NO: 12738 - RNA, 23 nt, Artificial
  Chemically synthesized
acacccuucacgguugcuaccca

SEQ ID NO: 12739 - RNA, 23 nt, Artificial
  Chemically synthesized
cacacccuucacgguugcuaccc

SEQ ID NO: 12740 - RNA, 23 nt, Artificial
  Chemically synthesized
gcacacccuucacgguugcuacc

SEQ ID NO: 12741 - RNA, 23 nt, Artificial
  Chemically synthesized
ggcacacccuucacgguugcuac

SEQ ID NO: 12742 - RNA, 23 nt, Artificial
  Chemically synthesized
uggcacacccuucacgguugcua

SEQ ID NO: 12743 - RNA, 23 nt, Artificial
  Chemically synthesized
gucuauauucugcucccagccug

SEQ ID NO: 12744 - RNA, 23 nt, Artificial
  Chemically synthesized
acacaugucgcagcaugguggcc

SEQ ID NO: 12745 - RNA, 23 nt, Artificial
  Chemically synthesized
gacacaugucgcagcaugguggc

SEQ ID NO: 12746 - RNA, 23 nt, Artificial
  Chemically synthesized
ugacacaugucgcagcauggugg

SEQ ID NO: 12747 - RNA, 23 nt, Artificial
  Chemically synthesized
uugacacaugucgcagcauggug

SEQ ID NO: 12748 - RNA, 23 nt, Artificial
  Chemically synthesized
ucaucagcugcuuggucaggcug

SEQ ID NO: 12749 - RNA, 23 nt, Artificial
  Chemically synthesized
aguucugggaggaugacuccagu

SEQ ID NO: 12750 - RNA, 23 nt, Artificial
  Chemically synthesized
aaaucucuugacaaagauggcac

SEQ ID NO: 12751 - RNA, 23 nt, Artificial
  Chemically synthesized
cuauauucugcucccagccugcc

SEQ ID NO: 12752 - RNA, 23 nt, Artificial
  Chemically synthesized
ucuauauucugcucccagccugc

SEQ ID NO: 12753 - RNA, 23 nt, Artificial
  Chemically synthesized
acuugugaugccuccaugccccg

SEQ ID NO: 12754 - RNA, 23 nt, Artificial
  Chemically synthesized
uucugggaggaugacuccagucc

SEQ ID NO: 12755 - RNA, 23 nt, Artificial
  Chemically synthesized
guucugggaggaugacuccaguc

SEQ ID NO: 12756 - RNA, 23 nt, Artificial
  Chemically synthesized
gcccucucucaguucugggagga

SEQ ID NO: 12757 - RNA, 23 nt, Artificial
  Chemically synthesized
uuuugacaacuucaucagcugcu

SEQ ID NO: 12758 - RNA, 23 nt, Artificial
  Chemically synthesized
auauucugcucccagccugccag

SEQ ID NO: 12759 - RNA, 23 nt, Artificial
  Chemically synthesized
uauauucugcucccagccugcca

SEQ ID NO: 12760 - RNA, 23 nt, Artificial
  Chemically synthesized
uauaggagucaccuggagccucg

SEQ ID NO: 12761 - RNA, 23 nt, Artificial
  Chemically synthesized
uguauuccugaacuggagcccca

SEQ ID NO: 12762 - RNA, 23 nt, Artificial
  Chemically synthesized
uaacaagcucuguccacgggucu

SEQ ID NO: 12763 - RNA, 23 nt, Artificial
  Chemically synthesized
auuuugacaacuucaucagcugc

SEQ ID NO: 12764 - RNA, 23 nt, Artificial
  Chemically synthesized
agcuucucaacauccagggccca

SEQ ID NO: 12765 - RNA, 23 nt, Artificial
  Chemically synthesized
agcgucggaugaucauguuauag

SEQ ID NO: 12766 - RNA, 23 nt, Artificial
  Chemically synthesized
gcgucggaugaucauguuauaga

SEQ ID NO: 12767 - RNA, 23 nt, Artificial
  Chemically synthesized
cgucggaugaucauguuauagag

SEQ ID NO: 12768 - RNA, 23 nt, Artificial
  Chemically synthesized
gucggaugaucauguuauagaga

SEQ ID NO: 12769 - RNA, 23 nt, Artificial
  Chemically synthesized
ucggaugaucauguuauagagau

SEQ ID NO: 12770 - RNA, 23 nt, Artificial
  Chemically synthesized
cgaguuaaccaggaacauggcug

SEQ ID NO: 12771 - RNA, 23 nt, Artificial
  Chemically synthesized
gaguuaaccaggaacauggcugc

SEQ ID NO: 12772 - RNA, 23 nt, Artificial
  Chemically synthesized
aguuaaccaggaacauggcugcg

SEQ ID NO: 12773 - RNA, 23 nt, Artificial
  Chemically synthesized
guuaaccaggaacauggcugcga

SEQ ID NO: 12774 - RNA, 23 nt, Artificial
  Chemically synthesized
uuaaccaggaacauggcugcgac

SEQ ID NO: 12775 - RNA, 23 nt, Artificial
  Chemically synthesized
ccacuuucaucugaguagcgucg

SEQ ID NO: 12776 - RNA, 23 nt, Artificial
  Chemically synthesized
cacuuucaucugaguagcgucgg

SEQ ID NO: 12777 - RNA, 23 nt, Artificial
  Chemically synthesized
acuuucaucugaguagcgucgga

SEQ ID NO: 12778 - RNA, 23 nt, Artificial
  Chemically synthesized
cuuucaucugaguagcgucggau

SEQ ID NO: 12779 - RNA, 23 nt, Artificial
  Chemically synthesized
uuucaucugaguagcgucggaug

SEQ ID NO: 12780 - RNA, 23 nt, Artificial
  Chemically synthesized
ggauuuguccagugccaucuuug

SEQ ID NO: 12781 - RNA, 23 nt, Artificial
  Chemically synthesized
gauuuguccagugccaucuuugu

SEQ ID NO: 12782 - RNA, 23 nt, Artificial
  Chemically synthesized
auuuguccagugccaucuuuguc

SEQ ID NO: 12783 - RNA, 23 nt, Artificial
  Chemically synthesized
uuuguccagugccaucuuuguca

SEQ ID NO: 12784 - RNA, 23 nt, Artificial
  Chemically synthesized
uuguccagugccaucuuugucaa

SEQ ID NO: 12785 - RNA, 23 nt, Artificial
  Chemically synthesized
agauuugaaggcacggaacaugg

SEQ ID NO: 12786 - RNA, 23 nt, Artificial
  Chemically synthesized
gauuugaaggcacggaacauggc

SEQ ID NO: 12787 - RNA, 23 nt, Artificial
  Chemically synthesized
auuugaaggcacggaacauggcg

SEQ ID NO: 12788 - RNA, 23 nt, Artificial
  Chemically synthesized
uuugaaggcacggaacauggcgu

SEQ ID NO: 12789 - RNA, 23 nt, Artificial
  Chemically synthesized
uugaaggcacggaacauggcguc

SEQ ID NO: 12790 - RNA, 23 nt, Artificial
  Chemically synthesized
cuguuuguauauggccugccacc

SEQ ID NO: 12791 - RNA, 23 nt, Artificial
  Chemically synthesized
uguuuguauauggccugccaccu

SEQ ID NO: 12792 - RNA, 23 nt, Artificial
  Chemically synthesized
guuuguauauggccugccaccuu

SEQ ID NO: 12793 - RNA, 23 nt, Artificial
  Chemically synthesized
uuuguauauggccugccaccuuu

SEQ ID NO: 12794 - RNA, 23 nt, Artificial
  Chemically synthesized
uuguauauggccugccaccuuuu

SEQ ID NO: 12795 - RNA, 23 nt, Artificial
  Chemically synthesized
gagauuugaaggcacggaacaug

SEQ ID NO: 12796 - RNA, 23 nt, Artificial
  Chemically synthesized
guugucaaaauccauguucccac

SEQ ID NO: 12797 - RNA, 23 nt, Artificial
  Chemically synthesized
uugucaaaauccauguucccacu

SEQ ID NO: 12798 - RNA, 23 nt, Artificial
  Chemically synthesized
ugucaaaauccauguucccacuu

SEQ ID NO: 12799 - RNA, 23 nt, Artificial
  Chemically synthesized
gucaaaauccauguucccacuuu

SEQ ID NO: 12800 - RNA, 23 nt, Artificial
  Chemically synthesized
ucaaaauccauguucccacuuuc

SEQ ID NO: 12801 - RNA, 23 nt, Artificial
  Chemically synthesized
gaaguugucaaaauccauguucc

SEQ ID NO: 12802 - RNA, 23 nt, Artificial
  Chemically synthesized
aaguugucaaaauccauguuccc

SEQ ID NO: 12803 - RNA, 23 nt, Artificial
  Chemically synthesized
aguugucaaaauccauguuccca

SEQ ID NO: 12804 - RNA, 23 nt, Artificial
  Chemically synthesized
ggaguucacuacugcaaaugguc

SEQ ID NO: 12805 - RNA, 23 nt, Artificial
  Chemically synthesized
gaguucacuacugcaaauggucc

SEQ ID NO: 12806 - RNA, 23 nt, Artificial
  Chemically synthesized
aguucacuacugcaaaugguccc

SEQ ID NO: 12807 - RNA, 23 nt, Artificial
  Chemically synthesized
guucacuacugcaaauggucccu

SEQ ID NO: 12808 - RNA, 23 nt, Artificial
  Chemically synthesized
uucacuacugcaaauggucccug

SEQ ID NO: 12809 - RNA, 23 nt, Artificial
  Chemically synthesized
aauguucaugaguucuguggcgc

SEQ ID NO: 12810 - RNA, 23 nt, Artificial
  Chemically synthesized
auguucaugaguucuguggcgcu

SEQ ID NO: 12811 - RNA, 23 nt, Artificial
  Chemically synthesized
uguucaugaguucuguggcgcug

SEQ ID NO: 12812 - RNA, 23 nt, Artificial
  Chemically synthesized
guucaugaguucuguggcgcuga

SEQ ID NO: 12813 - RNA, 23 nt, Artificial
  Chemically synthesized
uucaugaguucuguggcgcugac

SEQ ID NO: 12814 - RNA, 23 nt, Artificial
  Chemically synthesized
aucuuugucaagagauuugaagg

SEQ ID NO: 12815 - RNA, 23 nt, Artificial
  Chemically synthesized
ucuuugucaagagauuugaaggc

SEQ ID NO: 12816 - RNA, 23 nt, Artificial
  Chemically synthesized
cuuugucaagagauuugaaggca

SEQ ID NO: 12817 - RNA, 23 nt, Artificial
  Chemically synthesized
uuugucaagagauuugaaggcac

SEQ ID NO: 12818 - RNA, 23 nt, Artificial
  Chemically synthesized
uugucaagagauuugaaggcacg

SEQ ID NO: 12819 - RNA, 23 nt, Artificial
  Chemically synthesized
caucuuugucaagagauuugaag

SEQ ID NO: 12820 - RNA, 23 nt, Artificial
  Chemically synthesized
uguccagugccaucuuugucaag

SEQ ID NO: 12821 - RNA, 23 nt, Artificial
  Chemically synthesized
guccagugccaucuuugucaaga

SEQ ID NO: 12822 - RNA, 23 nt, Artificial
  Chemically synthesized
uccagugccaucuuugucaagag

SEQ ID NO: 12823 - RNA, 23 nt, Artificial
  Chemically synthesized
ccuuuugauguuguuccacaagu

SEQ ID NO: 12824 - RNA, 23 nt, Artificial
  Chemically synthesized
cuuuugauguuguuccacaagua

SEQ ID NO: 12825 - RNA, 23 nt, Artificial
  Chemically synthesized
uuuugauguuguuccacaaguac

SEQ ID NO: 12826 - RNA, 23 nt, Artificial
  Chemically synthesized
uuugauguuguuccacaaguacu

SEQ ID NO: 12827 - RNA, 23 nt, Artificial
  Chemically synthesized
uugauguuguuccacaaguacuu

SEQ ID NO: 12828 - RNA, 23 nt, Artificial
  Chemically synthesized
cuccuauagcaaggcagugaggg

SEQ ID NO: 12829 - RNA, 23 nt, Artificial
  Chemically synthesized
uccuauagcaaggcagugagggg

SEQ ID NO: 12830 - RNA, 23 nt, Artificial
  Chemically synthesized
ccuauagcaaggcagugaggggg

SEQ ID NO: 12831 - RNA, 23 nt, Artificial
  Chemically synthesized
cuauagcaaggcagugagggggc

SEQ ID NO: 12832 - RNA, 23 nt, Artificial
  Chemically synthesized
uauagcaaggcagugagggggcg

SEQ ID NO: 12833 - RNA, 23 nt, Artificial
  Chemically synthesized
caugugucaaugccaaaaccauc

SEQ ID NO: 12834 - RNA, 23 nt, Artificial
  Chemically synthesized
augugucaaugccaaaaccauca

SEQ ID NO: 12835 - RNA, 23 nt, Artificial
  Chemically synthesized
ugugucaaugccaaaaccaucag

SEQ ID NO: 12836 - RNA, 23 nt, Artificial
  Chemically synthesized
gugucaaugccaaaaccaucagu

SEQ ID NO: 12837 - RNA, 23 nt, Artificial
  Chemically synthesized
ugucaaugccaaaaccaucaguc

SEQ ID NO: 12838 - RNA, 23 nt, Artificial
  Chemically synthesized
ccaguucaggaauacauagucag

SEQ ID NO: 12839 - RNA, 23 nt, Artificial
  Chemically synthesized
caguucaggaauacauagucagc

SEQ ID NO: 12840 - RNA, 23 nt, Artificial
  Chemically synthesized
aguucaggaauacauagucagcu

SEQ ID NO: 12841 - RNA, 23 nt, Artificial
  Chemically synthesized
guucaggaauacauagucagcug

SEQ ID NO: 12842 - RNA, 23 nt, Artificial
  Chemically synthesized
uucaggaauacauagucagcugc

SEQ ID NO: 12843 - RNA, 23 nt, Artificial
  Chemically synthesized
gagaauguucaugaguucugugg

SEQ ID NO: 12844 - RNA, 23 nt, Artificial
  Chemically synthesized
agaauguucaugaguucuguggc

SEQ ID NO: 12845 - RNA, 23 nt, Artificial
  Chemically synthesized
gaauguucaugaguucuguggcg

SEQ ID NO: 12846 - RNA, 23 nt, Artificial
  Chemically synthesized
gcccuucaagaacgaguuaacca

SEQ ID NO: 12847 - RNA, 23 nt, Artificial
  Chemically synthesized
cccuucaagaacgaguuaaccag

SEQ ID NO: 12848 - RNA, 23 nt, Artificial
  Chemically synthesized
ccuucaagaacgaguuaaccagg

SEQ ID NO: 12849 - RNA, 23 nt, Artificial
  Chemically synthesized
cuucaagaacgaguuaaccagga

SEQ ID NO: 12850 - RNA, 23 nt, Artificial
  Chemically synthesized
uucaagaacgaguuaaccaggaa

SEQ ID NO: 12851 - RNA, 23 nt, Artificial
  Chemically synthesized
cauguuuauuuccuccugggccu

SEQ ID NO: 12852 - RNA, 23 nt, Artificial
  Chemically synthesized
auguuuauuuccuccugggccug

SEQ ID NO: 12853 - RNA, 23 nt, Artificial
  Chemically synthesized
uguuuauuuccuccugggccugg

SEQ ID NO: 12854 - RNA, 23 nt, Artificial
  Chemically synthesized
guuuauuuccuccugggccuggc

SEQ ID NO: 12855 - RNA, 23 nt, Artificial
  Chemically synthesized
uuuauuuccuccugggccuggca

SEQ ID NO: 12856 - RNA, 23 nt, Artificial
  Chemically synthesized
cggaugaucauguuauagagaug

SEQ ID NO: 12857 - RNA, 23 nt, Artificial
  Chemically synthesized
aagaugugacugcagacaggauc

SEQ ID NO: 12858 - RNA, 23 nt, Artificial
  Chemically synthesized
agaugugacugcagacaggaucg

SEQ ID NO: 12859 - RNA, 23 nt, Artificial
  Chemically synthesized
gaugugacugcagacaggaucgg

SEQ ID NO: 12860 - RNA, 23 nt, Artificial
  Chemically synthesized
augugacugcagacaggaucggc

SEQ ID NO: 12861 - RNA, 23 nt, Artificial
  Chemically synthesized
ugugacugcagacaggaucggcc

SEQ ID NO: 12862 - RNA, 23 nt, Artificial
  Chemically synthesized
uguuauagagaugcucauucagg

SEQ ID NO: 12863 - RNA, 23 nt, Artificial
  Chemically synthesized
guuauagagaugcucauucaggu

SEQ ID NO: 12864 - RNA, 23 nt, Artificial
  Chemically synthesized
uuauagagaugcucauucaggug

SEQ ID NO: 12865 - RNA, 23 nt, Artificial
  Chemically synthesized
uauagagaugcucauucaggugg

SEQ ID NO: 12866 - RNA, 23 nt, Artificial
  Chemically synthesized
auagagaugcucauucaggugga

SEQ ID NO: 12867 - RNA, 23 nt, Artificial
  Chemically synthesized
ugccuguggugucgcuauccauc

SEQ ID NO: 12868 - RNA, 23 nt, Artificial
  Chemically synthesized
gccuguggugucgcuauccauca

SEQ ID NO: 12869 - RNA, 23 nt, Artificial
  Chemically synthesized
ccuguggugucgcuauccaucac

SEQ ID NO: 12870 - RNA, 23 nt, Artificial
  Chemically synthesized
cuguggugucgcuauccaucacg

SEQ ID NO: 12871 - RNA, 23 nt, Artificial
  Chemically synthesized
uguggugucgcuauccaucacgg

SEQ ID NO: 12872 - RNA, 23 nt, Artificial
  Chemically synthesized
aggaauacauagucagcugcagc

SEQ ID NO: 12873 - RNA, 23 nt, Artificial
  Chemically synthesized
ggaauacauagucagcugcagcc

SEQ ID NO: 12874 - RNA, 23 nt, Artificial
  Chemically synthesized
gaauacauagucagcugcagcca

SEQ ID NO: 12875 - RNA, 23 nt, Artificial
  Chemically synthesized
aauacauagucagcugcagccac

SEQ ID NO: 12876 - RNA, 23 nt, Artificial
  Chemically synthesized
auacauagucagcugcagccacu

SEQ ID NO: 12877 - RNA, 23 nt, Artificial
  Chemically synthesized
ggugucgugucacaaccuuauug

SEQ ID NO: 12878 - RNA, 23 nt, Artificial
  Chemically synthesized
gugucgugucacaaccuuauuga

SEQ ID NO: 12879 - RNA, 23 nt, Artificial
  Chemically synthesized
ugucgugucacaaccuuauugag

SEQ ID NO: 12880 - RNA, 23 nt, Artificial
  Chemically synthesized
gucgugucacaaccuuauugaga

SEQ ID NO: 12881 - RNA, 23 nt, Artificial
  Chemically synthesized
ucgugucacaaccuuauugagaa

SEQ ID NO: 12882 - RNA, 23 nt, Artificial
  Chemically synthesized
ucaagaacgaguuaaccaggaac

SEQ ID NO: 12883 - RNA, 23 nt, Artificial
  Chemically synthesized
agugucgaacuguuuguauaugg

SEQ ID NO: 12884 - RNA, 23 nt, Artificial
  Chemically synthesized
gugucgaacuguuuguauauggc

SEQ ID NO: 12885 - RNA, 23 nt, Artificial
  Chemically synthesized
ugucgaacuguuuguauauggcc

SEQ ID NO: 12886 - RNA, 23 nt, Artificial
  Chemically synthesized
gucgaacuguuuguauauggccu

SEQ ID NO: 12887 - RNA, 23 nt, Artificial
  Chemically synthesized
ucgaacuguuuguauauggccug

SEQ ID NO: 12888 - RNA, 23 nt, Artificial
  Chemically synthesized
uuguuagaguguccuagagccag

SEQ ID NO: 12889 - RNA, 23 nt, Artificial
  Chemically synthesized
uguuagaguguccuagagccagg

SEQ ID NO: 12890 - RNA, 23 nt, Artificial
  Chemically synthesized
guuagaguguccuagagccaggg

SEQ ID NO: 12891 - RNA, 23 nt, Artificial
  Chemically synthesized
uuagaguguccuagagccagggg

SEQ ID NO: 12892 - RNA, 23 nt, Artificial
  Chemically synthesized
uagaguguccuagagccaggggg

SEQ ID NO: 12893 - RNA, 23 nt, Artificial
  Chemically synthesized
ucacuacugcaaauggucccuga

SEQ ID NO: 12894 - RNA, 23 nt, Artificial
  Chemically synthesized
ugaguagcgucggaugaucaugu

SEQ ID NO: 12895 - RNA, 23 nt, Artificial
  Chemically synthesized
gaguagcgucggaugaucauguu

SEQ ID NO: 12896 - RNA, 23 nt, Artificial
  Chemically synthesized
aguagcgucggaugaucauguua

SEQ ID NO: 12897 - RNA, 23 nt, Artificial
  Chemically synthesized
guagcgucggaugaucauguuau

SEQ ID NO: 12898 - RNA, 23 nt, Artificial
  Chemically synthesized
uagcgucggaugaucauguuaua

SEQ ID NO: 12899 - RNA, 23 nt, Artificial
  Chemically synthesized
uacauagucagcugcagccacuc

SEQ ID NO: 12900 - RNA, 23 nt, Artificial
  Chemically synthesized
gagaugcucauucagguggaacc

SEQ ID NO: 12901 - RNA, 23 nt, Artificial
  Chemically synthesized
agaugcucauucagguggaaccc

SEQ ID NO: 12902 - RNA, 23 nt, Artificial
  Chemically synthesized
gaugcucauucagguggaacccu

SEQ ID NO: 12903 - RNA, 23 nt, Artificial
  Chemically synthesized
augcucauucagguggaacccug

SEQ ID NO: 12904 - RNA, 23 nt, Artificial
  Chemically synthesized
ugcucauucagguggaacccugc

SEQ ID NO: 12905 - RNA, 23 nt, Artificial
  Chemically synthesized
acuguuuguauauggccugccac

SEQ ID NO: 12906 - RNA, 23 nt, Artificial
  Chemically synthesized
aaccaucagucuucagaucaggg

SEQ ID NO: 12907 - RNA, 23 nt, Artificial
  Chemically synthesized
accaucagucuucagaucagggu

SEQ ID NO: 12908 - RNA, 23 nt, Artificial
  Chemically synthesized
ccaucagucuucagaucagggug

SEQ ID NO: 12909 - RNA, 23 nt, Artificial
  Chemically synthesized
caucagucuucagaucagggugu

SEQ ID NO: 12910 - RNA, 23 nt, Artificial
  Chemically synthesized
aucagucuucagaucaggguguc

SEQ ID NO: 12911 - RNA, 23 nt, Artificial
  Chemically synthesized
agaauauagacaaaggcacuggg

SEQ ID NO: 12912 - RNA, 23 nt, Artificial
  Chemically synthesized
gaauauagacaaaggcacugggg

SEQ ID NO: 12913 - RNA, 23 nt, Artificial
  Chemically synthesized
aauauagacaaaggcacuggggc

SEQ ID NO: 12914 - RNA, 23 nt, Artificial
  Chemically synthesized
auauagacaaaggcacuggggca

SEQ ID NO: 12915 - RNA, 23 nt, Artificial
  Chemically synthesized
uauagacaaaggcacuggggcac

SEQ ID NO: 12916 - RNA, 23 nt, Artificial
  Chemically synthesized
augaucauguuauagagaugcuc

SEQ ID NO: 12917 - RNA, 23 nt, Artificial
  Chemically synthesized
ugaucauguuauagagaugcuca

SEQ ID NO: 12918 - RNA, 23 nt, Artificial
  Chemically synthesized
gaucauguuauagagaugcucau

SEQ ID NO: 12919 - RNA, 23 nt, Artificial
  Chemically synthesized
aucauguuauagagaugcucauu

SEQ ID NO: 12920 - RNA, 23 nt, Artificial
  Chemically synthesized
ucauguuauagagaugcucauuc

SEQ ID NO: 12921 - RNA, 23 nt, Artificial
  Chemically synthesized
ggagucauccucccagaacugag

SEQ ID NO: 12922 - RNA, 23 nt, Artificial
  Chemically synthesized
gagucauccucccagaacugaga

SEQ ID NO: 12923 - RNA, 23 nt, Artificial
  Chemically synthesized
agucauccucccagaacugagag

SEQ ID NO: 12924 - RNA, 23 nt, Artificial
  Chemically synthesized
gucauccucccagaacugagaga

SEQ ID NO: 12925 - RNA, 23 nt, Artificial
  Chemically synthesized
ucauccucccagaacugagagag

SEQ ID NO: 12926 - RNA, 23 nt, Artificial
  Chemically synthesized
gucaaugccaaaaccaucagucu

SEQ ID NO: 12927 - RNA, 23 nt, Artificial
  Chemically synthesized
ucaaugccaaaaccaucagucuu

SEQ ID NO: 12928 - RNA, 23 nt, Artificial
  Chemically synthesized
caaugccaaaaccaucagucuuc

SEQ ID NO: 12929 - RNA, 23 nt, Artificial
  Chemically synthesized
aaugccaaaaccaucagucuuca

SEQ ID NO: 12930 - RNA, 23 nt, Artificial
  Chemically synthesized
agcuuguuagaguguccuagagc

SEQ ID NO: 12931 - RNA, 23 nt, Artificial
  Chemically synthesized
gcuuguuagaguguccuagagcc

SEQ ID NO: 12932 - RNA, 23 nt, Artificial
  Chemically synthesized
cuuguuagaguguccuagagcca

SEQ ID NO: 12933 - RNA, 23 nt, Artificial
  Chemically synthesized
gcauguuuauuuccuccugggcc

SEQ ID NO: 12934 - RNA, 23 nt, Artificial
  Chemically synthesized
ggaugaucauguuauagagaugc

SEQ ID NO: 12935 - RNA, 23 nt, Artificial
  Chemically synthesized
gaugaucauguuauagagaugcu

SEQ ID NO: 12936 - RNA, 23 nt, Artificial
  Chemically synthesized
ugauguuguuccacaaguacuug

SEQ ID NO: 12937 - RNA, 23 nt, Artificial
  Chemically synthesized
gauguuguuccacaaguacuuga

SEQ ID NO: 12938 - RNA, 23 nt, Artificial
  Chemically synthesized
auguuguuccacaaguacuugaa

SEQ ID NO: 12939 - RNA, 23 nt, Artificial
  Chemically synthesized
ggccucaauguuggaguaaugug

SEQ ID NO: 12940 - RNA, 23 nt, Artificial
  Chemically synthesized
gccucaauguuggaguaaugugu

SEQ ID NO: 12941 - RNA, 23 nt, Artificial
  Chemically synthesized
ccucaauguuggaguaaugugug

SEQ ID NO: 12942 - RNA, 23 nt, Artificial
  Chemically synthesized
cucaauguuggaguaaugugugc

SEQ ID NO: 12943 - RNA, 23 nt, Artificial
  Chemically synthesized
ucaauguuggaguaaugugugcg

SEQ ID NO: 12944 - RNA, 23 nt, Artificial
  Chemically synthesized
ugaauuccucaaagcccagcuug

SEQ ID NO: 12945 - RNA, 23 nt, Artificial
  Chemically synthesized
gaauuccucaaagcccagcuugc

SEQ ID NO: 12946 - RNA, 23 nt, Artificial
  Chemically synthesized
aauuccucaaagcccagcuugcc

SEQ ID NO: 12947 - RNA, 23 nt, Artificial
  Chemically synthesized
auuccucaaagcccagcuugccu

SEQ ID NO: 12948 - RNA, 23 nt, Artificial
  Chemically synthesized
uuccucaaagcccagcuugccug

SEQ ID NO: 12949 - RNA, 23 nt, Artificial
  Chemically synthesized
cuacugcaaauggucccugaucg

SEQ ID NO: 12950 - RNA, 23 nt, Artificial
  Chemically synthesized
uacugcaaauggucccugaucgg

SEQ ID NO: 12951 - RNA, 23 nt, Artificial
  Chemically synthesized
acugcaaauggucccugaucggu

SEQ ID NO: 12952 - RNA, 23 nt, Artificial
  Chemically synthesized
cugcaaauggucccugaucgguc

SEQ ID NO: 12953 - RNA, 23 nt, Artificial
  Chemically synthesized
ugcaaauggucccugaucgguca

SEQ ID NO: 12954 - RNA, 23 nt, Artificial
  Chemically synthesized
ggccuccaagcacauuucccagg

SEQ ID NO: 12955 - RNA, 23 nt, Artificial
  Chemically synthesized
gccuccaagcacauuucccaggc

SEQ ID NO: 12956 - RNA, 23 nt, Artificial
  Chemically synthesized
ccuccaagcacauuucccaggcc

SEQ ID NO: 12957 - RNA, 23 nt, Artificial
  Chemically synthesized
cuccaagcacauuucccaggccc

SEQ ID NO: 12958 - RNA, 23 nt, Artificial
  Chemically synthesized
uccaagcacauuucccaggcccc

SEQ ID NO: 12959 - RNA, 23 nt, Artificial
  Chemically synthesized
guacuugaauuccucaaagccca

SEQ ID NO: 12960 - RNA, 23 nt, Artificial
  Chemically synthesized
uacuugaauuccucaaagcccag

SEQ ID NO: 12961 - RNA, 23 nt, Artificial
  Chemically synthesized
acuugaauuccucaaagcccagc

SEQ ID NO: 12962 - RNA, 23 nt, Artificial
  Chemically synthesized
cuugaauuccucaaagcccagcu

SEQ ID NO: 12963 - RNA, 23 nt, Artificial
  Chemically synthesized
uugaauuccucaaagcccagcuu

SEQ ID NO: 12964 - RNA, 23 nt, Artificial
  Chemically synthesized
gcaaauggucccugaucggucag

SEQ ID NO: 12965 - RNA, 23 nt, Artificial
  Chemically synthesized
caaauggucccugaucggucagu

SEQ ID NO: 12966 - RNA, 23 nt, Artificial
  Chemically synthesized
aaauggucccugaucggucagug

SEQ ID NO: 12967 - RNA, 23 nt, Artificial
  Chemically synthesized
accuuuugauguuguuccacaag

SEQ ID NO: 12968 - RNA, 23 nt, Artificial
  Chemically synthesized
agucuucagaucagggugucgug

SEQ ID NO: 12969 - RNA, 23 nt, Artificial
  Chemically synthesized
gucuucagaucagggugucgugu

SEQ ID NO: 12970 - RNA, 23 nt, Artificial
  Chemically synthesized
ucuucagaucagggugucguguc

SEQ ID NO: 12971 - RNA, 23 nt, Artificial
  Chemically synthesized
cuucagaucagggugucguguca

SEQ ID NO: 12972 - RNA, 23 nt, Artificial
  Chemically synthesized
uucagaucagggugucgugucac

SEQ ID NO: 12973 - RNA, 23 nt, Artificial
  Chemically synthesized
uguauauggccugccaccuuuug

SEQ ID NO: 12974 - RNA, 23 nt, Artificial
  Chemically synthesized
guauauggccugccaccuuuuga

SEQ ID NO: 12975 - RNA, 23 nt, Artificial
  Chemically synthesized
uauauggccugccaccuuuugau

SEQ ID NO: 12976 - RNA, 23 nt, Artificial
  Chemically synthesized
cugccaccuuuugauguuguucc

SEQ ID NO: 12977 - RNA, 23 nt, Artificial
  Chemically synthesized
ugccaccuuuugauguuguucca

SEQ ID NO: 12978 - RNA, 23 nt, Artificial
  Chemically synthesized
gccaccuuuugauguuguuccac

SEQ ID NO: 12979 - RNA, 23 nt, Artificial
  Chemically synthesized
ccaccuuuugauguuguuccaca

SEQ ID NO: 12980 - RNA, 23 nt, Artificial
  Chemically synthesized
caccuuuugauguuguuccacaa

SEQ ID NO: 12981 - RNA, 23 nt, Artificial
  Chemically synthesized
aggcuccaggugacuccuauagc

SEQ ID NO: 12982 - RNA, 23 nt, Artificial
  Chemically synthesized
ggcuccaggugacuccuauagca

SEQ ID NO: 12983 - RNA, 23 nt, Artificial
  Chemically synthesized
gcuccaggugacuccuauagcaa

SEQ ID NO: 12984 - RNA, 23 nt, Artificial
  Chemically synthesized
cuccaggugacuccuauagcaag

SEQ ID NO: 12985 - RNA, 23 nt, Artificial
  Chemically synthesized
uccaggugacuccuauagcaagg

SEQ ID NO: 12986 - RNA, 23 nt, Artificial
  Chemically synthesized
uguuguuccacaaguacuugaau

SEQ ID NO: 12987 - RNA, 23 nt, Artificial
  Chemically synthesized
ggcaaauugggcccuggauguug

SEQ ID NO: 12988 - RNA, 23 nt, Artificial
  Chemically synthesized
gcaaauugggcccuggauguuga

SEQ ID NO: 12989 - RNA, 23 nt, Artificial
  Chemically synthesized
caaauugggcccuggauguugag

SEQ ID NO: 12990 - RNA, 23 nt, Artificial
  Chemically synthesized
aaauugggcccuggauguugaga

SEQ ID NO: 12991 - RNA, 23 nt, Artificial
  Chemically synthesized
aauugggcccuggauguugagaa

SEQ ID NO: 12992 - RNA, 23 nt, Artificial
  Chemically synthesized
ucccugaucggucagugucgaac

SEQ ID NO: 12993 - RNA, 23 nt, Artificial
  Chemically synthesized
cccugaucggucagugucgaacu

SEQ ID NO: 12994 - RNA, 23 nt, Artificial
  Chemically synthesized
ccugaucggucagugucgaacug

SEQ ID NO: 12995 - RNA, 23 nt, Artificial
  Chemically synthesized
cugaucggucagugucgaacugu

SEQ ID NO: 12996 - RNA, 23 nt, Artificial
  Chemically synthesized
ugaucggucagugucgaacuguu

SEQ ID NO: 12997 - RNA, 23 nt, Artificial
  Chemically synthesized
cagaauauagacaaaggcacugg

SEQ ID NO: 12998 - RNA, 23 nt, Artificial
  Chemically synthesized
gcccuggauguugagaagcuggg

SEQ ID NO: 12999 - RNA, 23 nt, Artificial
  Chemically synthesized
cccuggauguugagaagcugggu

SEQ ID NO: 13000 - RNA, 23 nt, Artificial
  Chemically synthesized
ccuggauguugagaagcugggua

SEQ ID NO: 13001 - RNA, 23 nt, Artificial
  Chemically synthesized
cuggauguugagaagcuggguaa

SEQ ID NO: 13002 - RNA, 23 nt, Artificial
  Chemically synthesized
uggauguugagaagcuggguaac

SEQ ID NO: 13003 - RNA, 23 nt, Artificial
  Chemically synthesized
caauguuggaguaaugugugcgu

SEQ ID NO: 13004 - RNA, 23 nt, Artificial
  Chemically synthesized
aauguuggaguaaugugugcgug

SEQ ID NO: 13005 - RNA, 23 nt, Artificial
  Chemically synthesized
auguuggaguaaugugugcgugg

SEQ ID NO: 13006 - RNA, 23 nt, Artificial
  Chemically synthesized
uguuggaguaaugugugcguggg

SEQ ID NO: 13007 - RNA, 23 nt, Artificial
  Chemically synthesized
uucaucugaguagcgucggauga

SEQ ID NO: 13008 - RNA, 23 nt, Artificial
  Chemically synthesized
cauguuauagagaugcucauuca

SEQ ID NO: 13009 - RNA, 23 nt, Artificial
  Chemically synthesized
auguuauagagaugcucauucag

SEQ ID NO: 13010 - RNA, 23 nt, Artificial
  Chemically synthesized
caaguacugagagaacaaaagcu

SEQ ID NO: 13011 - RNA, 23 nt, Artificial
  Chemically synthesized
aaguacugagagaacaaaagcuu

SEQ ID NO: 13012 - RNA, 23 nt, Artificial
  Chemically synthesized
aguacugagagaacaaaagcuug

SEQ ID NO: 13013 - RNA, 23 nt, Artificial
  Chemically synthesized
guacugagagaacaaaagcuugu

SEQ ID NO: 13014 - RNA, 23 nt, Artificial
  Chemically synthesized
uacugagagaacaaaagcuugug

SEQ ID NO: 13015 - RNA, 23 nt, Artificial
  Chemically synthesized
cucguuggccucaauguuggagu

SEQ ID NO: 13016 - RNA, 23 nt, Artificial
  Chemically synthesized
ucguuggccucaauguuggagua

SEQ ID NO: 13017 - RNA, 23 nt, Artificial
  Chemically synthesized
cguuggccucaauguuggaguaa

SEQ ID NO: 13018 - RNA, 23 nt, Artificial
  Chemically synthesized
guuggccucaauguuggaguaau

SEQ ID NO: 13019 - RNA, 23 nt, Artificial
  Chemically synthesized
uuggccucaauguuggaguaaug

SEQ ID NO: 13020 - RNA, 23 nt, Artificial
  Chemically synthesized
gauguucaccuggauuuguccag

SEQ ID NO: 13021 - RNA, 23 nt, Artificial
  Chemically synthesized
auguucaccuggauuuguccagu

SEQ ID NO: 13022 - RNA, 23 nt, Artificial
  Chemically synthesized
uguucaccuggauuuguccagug

SEQ ID NO: 13023 - RNA, 23 nt, Artificial
  Chemically synthesized
guucaccuggauuuguccagugc

SEQ ID NO: 13024 - RNA, 23 nt, Artificial
  Chemically synthesized
uucaccuggauuuguccagugcc

SEQ ID NO: 13025 - RNA, 23 nt, Artificial
  Chemically synthesized
agggugucgugucacaaccuuau

SEQ ID NO: 13026 - RNA, 23 nt, Artificial
  Chemically synthesized
gggugucgugucacaaccuuauu

SEQ ID NO: 13027 - RNA, 23 nt, Artificial
  Chemically synthesized
guuggaguaaugugugcgugggg

SEQ ID NO: 13028 - RNA, 23 nt, Artificial
  Chemically synthesized
uuggaguaaugugugcguggggg

SEQ ID NO: 13029 - RNA, 23 nt, Artificial
  Chemically synthesized
uggaguaaugugugcgugggggc

SEQ ID NO: 13030 - RNA, 23 nt, Artificial
  Chemically synthesized
gcucauucagguggaacccugcu

SEQ ID NO: 13031 - RNA, 23 nt, Artificial
  Chemically synthesized
cucauucagguggaacccugcug

SEQ ID NO: 13032 - RNA, 23 nt, Artificial
  Chemically synthesized
ucauucagguggaacccugcugc

SEQ ID NO: 13033 - RNA, 23 nt, Artificial
  Chemically synthesized
auauggccugccaccuuuugaug

SEQ ID NO: 13034 - RNA, 23 nt, Artificial
  Chemically synthesized
uauggccugccaccuuuugaugu

SEQ ID NO: 13035 - RNA, 23 nt, Artificial
  Chemically synthesized
ucaggaauacauagucagcugca

SEQ ID NO: 13036 - RNA, 23 nt, Artificial
  Chemically synthesized
ucacaaccuuauugagaauguuc

SEQ ID NO: 13037 - RNA, 23 nt, Artificial
  Chemically synthesized
cacaaccuuauugagaauguuca

SEQ ID NO: 13038 - RNA, 23 nt, Artificial
  Chemically synthesized
acaaccuuauugagaauguucau

SEQ ID NO: 13039 - RNA, 23 nt, Artificial
  Chemically synthesized
caaccuuauugagaauguucaug

SEQ ID NO: 13040 - RNA, 23 nt, Artificial
  Chemically synthesized
aaccuuauugagaauguucauga

SEQ ID NO: 13041 - RNA, 23 nt, Artificial
  Chemically synthesized
cuggauguucaccuggauuuguc

SEQ ID NO: 13042 - RNA, 23 nt, Artificial
  Chemically synthesized
uggauguucaccuggauuugucc

SEQ ID NO: 13043 - RNA, 23 nt, Artificial
  Chemically synthesized
ggauguucaccuggauuugucca

SEQ ID NO: 13044 - RNA, 23 nt, Artificial
  Chemically synthesized
uagagaugcucauucagguggaa

SEQ ID NO: 13045 - RNA, 23 nt, Artificial
  Chemically synthesized
caaaauccauguucccacuuuca

SEQ ID NO: 13046 - RNA, 23 nt, Artificial
  Chemically synthesized
aaaauccauguucccacuuucau

SEQ ID NO: 13047 - RNA, 23 nt, Artificial
  Chemically synthesized
aaauccauguucccacuuucauc

SEQ ID NO: 13048 - RNA, 23 nt, Artificial
  Chemically synthesized
aauccauguucccacuuucaucu

SEQ ID NO: 13049 - RNA, 23 nt, Artificial
  Chemically synthesized
gacaugugucaaugccaaaacca

SEQ ID NO: 13050 - RNA, 23 nt, Artificial
  Chemically synthesized
acaugugucaaugccaaaaccau

SEQ ID NO: 13051 - RNA, 23 nt, Artificial
  Chemically synthesized
aaguacuugaauuccucaaagcc

SEQ ID NO: 13052 - RNA, 23 nt, Artificial
  Chemically synthesized
aguacuugaauuccucaaagccc

SEQ ID NO: 13053 - RNA, 23 nt, Artificial
  Chemically synthesized
cuuauugagaauguucaugaguu

SEQ ID NO: 13054 - RNA, 23 nt, Artificial
  Chemically synthesized
uuauugagaauguucaugaguuc

SEQ ID NO: 13055 - RNA, 23 nt, Artificial
  Chemically synthesized
uauugagaauguucaugaguucu

SEQ ID NO: 13056 - RNA, 23 nt, Artificial
  Chemically synthesized
auugagaauguucaugaguucug

SEQ ID NO: 13057 - RNA, 23 nt, Artificial
  Chemically synthesized
uugagaauguucaugaguucugu

SEQ ID NO: 13058 - RNA, 23 nt, Artificial
  Chemically synthesized
uaaccaggaacauggcugcgacu

SEQ ID NO: 13059 - RNA, 23 nt, Artificial
  Chemically synthesized
uuguuccacaaguacuugaauuc

SEQ ID NO: 13060 - RNA, 23 nt, Artificial
  Chemically synthesized
uguuccacaaguacuugaauucc

SEQ ID NO: 13061 - RNA, 23 nt, Artificial
  Chemically synthesized
guuccacaaguacuugaauuccu

SEQ ID NO: 13062 - RNA, 23 nt, Artificial
  Chemically synthesized
uuccacaaguacuugaauuccuc

SEQ ID NO: 13063 - RNA, 23 nt, Artificial
  Chemically synthesized
uccacaaguacuugaauuccuca

SEQ ID NO: 13064 - RNA, 23 nt, Artificial
  Chemically synthesized
cgugucacaaccuuauugagaau

SEQ ID NO: 13065 - RNA, 23 nt, Artificial
  Chemically synthesized
gugucacaaccuuauugagaaug

SEQ ID NO: 13066 - RNA, 23 nt, Artificial
  Chemically synthesized
ugucacaaccuuauugagaaugu

SEQ ID NO: 13067 - RNA, 23 nt, Artificial
  Chemically synthesized
cgaacuguuuguauauggccugc

SEQ ID NO: 13068 - RNA, 23 nt, Artificial
  Chemically synthesized
gaacuguuuguauauggccugcc

SEQ ID NO: 13069 - RNA, 23 nt, Artificial
  Chemically synthesized
aacuguuuguauauggccugcca

SEQ ID NO: 13070 - RNA, 23 nt, Artificial
  Chemically synthesized
uggauuuguccagugccaucuuu

SEQ ID NO: 13071 - RNA, 23 nt, Artificial
  Chemically synthesized
gauguugagaagcuggguaacaa

SEQ ID NO: 13072 - RNA, 23 nt, Artificial
  Chemically synthesized
auguugagaagcuggguaacaag

SEQ ID NO: 13073 - RNA, 23 nt, Artificial
  Chemically synthesized
uguugagaagcuggguaacaagu

SEQ ID NO: 13074 - RNA, 23 nt, Artificial
  Chemically synthesized
guugagaagcuggguaacaagua

SEQ ID NO: 13075 - RNA, 23 nt, Artificial
  Chemically synthesized
uugagaagcuggguaacaaguac

SEQ ID NO: 13076 - RNA, 23 nt, Artificial
  Chemically synthesized
guuguuccacaaguacuugaauu

SEQ ID NO: 13077 - RNA, 23 nt, Artificial
  Chemically synthesized
gcagaauauagacaaaggcacug

SEQ ID NO: 13078 - RNA, 23 nt, Artificial
  Chemically synthesized
ucagucuucagaucagggugucg

SEQ ID NO: 13079 - RNA, 23 nt, Artificial
  Chemically synthesized
ugccaaaaccaucagucuucaga

SEQ ID NO: 13080 - RNA, 23 nt, Artificial
  Chemically synthesized
gccaaaaccaucagucuucagau

SEQ ID NO: 13081 - RNA, 23 nt, Artificial
  Chemically synthesized
ccaaaaccaucagucuucagauc

SEQ ID NO: 13082 - RNA, 23 nt, Artificial
  Chemically synthesized
caaaaccaucagucuucagauca

SEQ ID NO: 13083 - RNA, 23 nt, Artificial
  Chemically synthesized
aaaaccaucagucuucagaucag

SEQ ID NO: 13084 - RNA, 23 nt, Artificial
  Chemically synthesized
gggcaaagagucuccggaacugc

SEQ ID NO: 13085 - RNA, 23 nt, Artificial
  Chemically synthesized
ggcaaagagucuccggaacugcc

SEQ ID NO: 13086 - RNA, 23 nt, Artificial
  Chemically synthesized
gcaaagagucuccggaacugccg

SEQ ID NO: 13087 - RNA, 23 nt, Artificial
  Chemically synthesized
caaagagucuccggaacugccgg

SEQ ID NO: 13088 - RNA, 23 nt, Artificial
  Chemically synthesized
aaagagucuccggaacugccgga

SEQ ID NO: 13089 - RNA, 23 nt, Artificial
  Chemically synthesized
acucucguuggccucaauguugg

SEQ ID NO: 13090 - RNA, 23 nt, Artificial
  Chemically synthesized
cucucguuggccucaauguugga

SEQ ID NO: 13091 - RNA, 23 nt, Artificial
  Chemically synthesized
ucucguuggccucaauguuggag

SEQ ID NO: 13092 - RNA, 23 nt, Artificial
  Chemically synthesized
auccauguucccacuuucaucug

SEQ ID NO: 13093 - RNA, 23 nt, Artificial
  Chemically synthesized
cuccuggauguucaccuggauuu

SEQ ID NO: 13094 - RNA, 23 nt, Artificial
  Chemically synthesized
uccuggauguucaccuggauuug

SEQ ID NO: 13095 - RNA, 23 nt, Artificial
  Chemically synthesized
ccuggauguucaccuggauuugu

SEQ ID NO: 13096 - RNA, 23 nt, Artificial
  Chemically synthesized
accuuauugagaauguucaugag

SEQ ID NO: 13097 - RNA, 23 nt, Artificial
  Chemically synthesized
uccauguucccacuuucaucuga

SEQ ID NO: 13098 - RNA, 23 nt, Artificial
  Chemically synthesized
cacucucguuggccucaauguug

SEQ ID NO: 13099 - RNA, 23 nt, Artificial
  Chemically synthesized
caucugaguagcgucggaugauc

SEQ ID NO: 13100 - RNA, 23 nt, Artificial
  Chemically synthesized
aucugaguagcgucggaugauca

SEQ ID NO: 13101 - RNA, 23 nt, Artificial
  Chemically synthesized
ucugaguagcgucggaugaucau

SEQ ID NO: 13102 - RNA, 23 nt, Artificial
  Chemically synthesized
cugaguagcgucggaugaucaug

SEQ ID NO: 13103 - RNA, 23 nt, Artificial
  Chemically synthesized
ugucaagagauuugaaggcacgg

SEQ ID NO: 13104 - RNA, 23 nt, Artificial
  Chemically synthesized
gucaagagauuugaaggcacgga

SEQ ID NO: 13105 - RNA, 23 nt, Artificial
  Chemically synthesized
ucaagagauuugaaggcacggaa

SEQ ID NO: 13106 - RNA, 23 nt, Artificial
  Chemically synthesized
caagagauuugaaggcacggaac

SEQ ID NO: 13107 - RNA, 23 nt, Artificial
  Chemically synthesized
aagagauuugaaggcacggaaca

SEQ ID NO: 13108 - RNA, 23 nt, Artificial
  Chemically synthesized
ggcccuggauguugagaagcugg

SEQ ID NO: 13109 - RNA, 23 nt, Artificial
  Chemically synthesized
ugaaguugucaaaauccauguuc

SEQ ID NO: 13110 - RNA, 23 nt, Artificial
  Chemically synthesized
ugaugaaguugucaaaauccaug

SEQ ID NO: 13111 - RNA, 23 nt, Artificial
  Chemically synthesized
gaugaaguugucaaaauccaugu

SEQ ID NO: 13112 - RNA, 23 nt, Artificial
  Chemically synthesized
augaaguugucaaaauccauguu

SEQ ID NO: 13113 - RNA, 23 nt, Artificial
  Chemically synthesized
acauagucagcugcagccacucc

SEQ ID NO: 13114 - RNA, 23 nt, Artificial
  Chemically synthesized
cauagucagcugcagccacuccu

SEQ ID NO: 13115 - RNA, 23 nt, Artificial
  Chemically synthesized
auagucagcugcagccacuccug

SEQ ID NO: 13116 - RNA, 23 nt, Artificial
  Chemically synthesized
cauucagguggaacccugcugcc

SEQ ID NO: 13117 - RNA, 23 nt, Artificial
  Chemically synthesized
auucagguggaacccugcugccu

SEQ ID NO: 13118 - RNA, 23 nt, Artificial
  Chemically synthesized
ugagaagcuggguaacaaguacu

SEQ ID NO: 13119 - RNA, 23 nt, Artificial
  Chemically synthesized
acugagagaacaaaagcuugugg

SEQ ID NO: 13120 - RNA, 23 nt, Artificial
  Chemically synthesized
cugagagaacaaaagcuuguggg

SEQ ID NO: 13121 - RNA, 23 nt, Artificial
  Chemically synthesized
ugagagaacaaaagcuugugggu

SEQ ID NO: 13122 - RNA, 23 nt, Artificial
  Chemically synthesized
ggggcauguuuauuuccuccugg

SEQ ID NO: 13123 - RNA, 23 nt, Artificial
  Chemically synthesized
gggcauguuuauuuccuccuggg

SEQ ID NO: 13124 - RNA, 23 nt, Artificial
  Chemically synthesized
ggcauguuuauuuccuccugggc

SEQ ID NO: 13125 - RNA, 23 nt, Artificial
  Chemically synthesized
ccauguucccacuuucaucugag

SEQ ID NO: 13126 - RNA, 23 nt, Artificial
  Chemically synthesized
cauguucccacuuucaucugagu

SEQ ID NO: 13127 - RNA, 23 nt, Artificial
  Chemically synthesized
ccucacucucguuggccucaaug

SEQ ID NO: 13128 - RNA, 23 nt, Artificial
  Chemically synthesized
cucacucucguuggccucaaugu

SEQ ID NO: 13129 - RNA, 23 nt, Artificial
  Chemically synthesized
ucacucucguuggccucaauguu

SEQ ID NO: 13130 - RNA, 23 nt, Artificial
  Chemically synthesized
gagcuuguuagaguguccuagag

SEQ ID NO: 13131 - RNA, 23 nt, Artificial
  Chemically synthesized
cccacuuucaucugaguagcguc

SEQ ID NO: 13132 - RNA, 23 nt, Artificial
  Chemically synthesized
agagaugcucauucagguggaac

SEQ ID NO: 13133 - RNA, 23 nt, Artificial
  Chemically synthesized
cuccaugucaucuccagccagcu

SEQ ID NO: 13134 - RNA, 23 nt, Artificial
  Chemically synthesized
uccaugucaucuccagccagcug

SEQ ID NO: 13135 - RNA, 23 nt, Artificial
  Chemically synthesized
ccaugucaucuccagccagcugg

SEQ ID NO: 13136 - RNA, 23 nt, Artificial
  Chemically synthesized
caugucaucuccagccagcuggg

SEQ ID NO: 13137 - RNA, 23 nt, Artificial
  Chemically synthesized
augucaucuccagccagcugggc

SEQ ID NO: 13138 - RNA, 23 nt, Artificial
  Chemically synthesized
cagccacuccuggauguucaccu

SEQ ID NO: 13139 - RNA, 23 nt, Artificial
  Chemically synthesized
agccacuccuggauguucaccug

SEQ ID NO: 13140 - RNA, 23 nt, Artificial
  Chemically synthesized
gccacuccuggauguucaccugg

SEQ ID NO: 13141 - RNA, 23 nt, Artificial
  Chemically synthesized
ccacuccuggauguucaccugga

SEQ ID NO: 13142 - RNA, 23 nt, Artificial
  Chemically synthesized
cacuccuggauguucaccuggau

SEQ ID NO: 13143 - RNA, 23 nt, Artificial
  Chemically synthesized
ccuuauugagaauguucaugagu

SEQ ID NO: 13144 - RNA, 23 nt, Artificial
  Chemically synthesized
caaguacuugaauuccucaaagc

SEQ ID NO: 13145 - RNA, 23 nt, Artificial
  Chemically synthesized
aucggucagugucgaacuguuug

SEQ ID NO: 13146 - RNA, 23 nt, Artificial
  Chemically synthesized
ucggucagugucgaacuguuugu

SEQ ID NO: 13147 - RNA, 23 nt, Artificial
  Chemically synthesized
cggucagugucgaacuguuugua

SEQ ID NO: 13148 - RNA, 23 nt, Artificial
  Chemically synthesized
ggucagugucgaacuguuuguau

SEQ ID NO: 13149 - RNA, 23 nt, Artificial
  Chemically synthesized
gucagugucgaacuguuuguaua

SEQ ID NO: 13150 - RNA, 23 nt, Artificial
  Chemically synthesized
ugccaucuuugucaagagauuug

SEQ ID NO: 13151 - RNA, 23 nt, Artificial
  Chemically synthesized
gccaucuuugucaagagauuuga

SEQ ID NO: 13152 - RNA, 23 nt, Artificial
  Chemically synthesized
ccaucuuugucaagagauuugaa

SEQ ID NO: 13153 - RNA, 23 nt, Artificial
  Chemically synthesized
ucaugaguucuguggcgcugacc

SEQ ID NO: 13154 - RNA, 23 nt, Artificial
  Chemically synthesized
auugggcccuggauguugagaag

SEQ ID NO: 13155 - RNA, 23 nt, Artificial
  Chemically synthesized
cgacaugugucaaugccaaaacc

SEQ ID NO: 13156 - RNA, 23 nt, Artificial
  Chemically synthesized
gugcuaggcuuggcacagguaca

SEQ ID NO: 13157 - RNA, 23 nt, Artificial
  Chemically synthesized
ugcuaggcuuggcacagguacag

SEQ ID NO: 13158 - RNA, 23 nt, Artificial
  Chemically synthesized
gcuaggcuuggcacagguacagg

SEQ ID NO: 13159 - RNA, 23 nt, Artificial
  Chemically synthesized
cuaggcuuggcacagguacaggg

SEQ ID NO: 13160 - RNA, 23 nt, Artificial
  Chemically synthesized
uaggcuuggcacagguacagggg

SEQ ID NO: 13161 - RNA, 23 nt, Artificial
  Chemically synthesized
aaaccaucagucuucagaucagg

SEQ ID NO: 13162 - RNA, 23 nt, Artificial
  Chemically synthesized
gagcagaauauagacaaaggcac

SEQ ID NO: 13163 - RNA, 23 nt, Artificial
  Chemically synthesized
agcagaauauagacaaaggcacu

SEQ ID NO: 13164 - RNA, 23 nt, Artificial
  Chemically synthesized
uuauuuccuccugggccuggcag

SEQ ID NO: 13165 - RNA, 23 nt, Artificial
  Chemically synthesized
caugaguucuguggcgcugaccu

SEQ ID NO: 13166 - RNA, 23 nt, Artificial
  Chemically synthesized
augaguucuguggcgcugaccuc

SEQ ID NO: 13167 - RNA, 23 nt, Artificial
  Chemically synthesized
ugagaauguucaugaguucugug

SEQ ID NO: 13168 - RNA, 23 nt, Artificial
  Chemically synthesized
acuacugcaaauggucccugauc

SEQ ID NO: 13169 - RNA, 23 nt, Artificial
  Chemically synthesized
cagucuucagaucagggugucgu

SEQ ID NO: 13170 - RNA, 23 nt, Artificial
  Chemically synthesized
cugaugaaguugucaaaauccau

SEQ ID NO: 13171 - RNA, 23 nt, Artificial
  Chemically synthesized
augccaaaaccaucagucuucag

SEQ ID NO: 13172 - RNA, 23 nt, Artificial
  Chemically synthesized
augcugcgacaugugucaaugcc

SEQ ID NO: 13173 - RNA, 23 nt, Artificial
  Chemically synthesized
ugcugcgacaugugucaaugcca

SEQ ID NO: 13174 - RNA, 23 nt, Artificial
  Chemically synthesized
gcugcgacaugugucaaugccaa

SEQ ID NO: 13175 - RNA, 23 nt, Artificial
  Chemically synthesized
cugcgacaugugucaaugccaaa

SEQ ID NO: 13176 - RNA, 23 nt, Artificial
  Chemically synthesized
ugcgacaugugucaaugccaaaa

SEQ ID NO: 13177 - RNA, 23 nt, Artificial
  Chemically synthesized
cuccaguucaggaauacauaguc

SEQ ID NO: 13178 - RNA, 23 nt, Artificial
  Chemically synthesized
uccaguucaggaauacauaguca

SEQ ID NO: 13179 - RNA, 23 nt, Artificial
  Chemically synthesized
cacaaagaugugacugcagacag

SEQ ID NO: 13180 - RNA, 23 nt, Artificial
  Chemically synthesized
acaaagaugugacugcagacagg

SEQ ID NO: 13181 - RNA, 23 nt, Artificial
  Chemically synthesized
caaagaugugacugcagacagga

SEQ ID NO: 13182 - RNA, 23 nt, Artificial
  Chemically synthesized
aaagaugugacugcagacaggau

SEQ ID NO: 13183 - RNA, 23 nt, Artificial
  Chemically synthesized
cacuacugcaaauggucccugau

SEQ ID NO: 13184 - RNA, 23 nt, Artificial
  Chemically synthesized
ggcaucacaagugcuaggcuugg

SEQ ID NO: 13185 - RNA, 23 nt, Artificial
  Chemically synthesized
gcaucacaagugcuaggcuuggc

SEQ ID NO: 13186 - RNA, 23 nt, Artificial
  Chemically synthesized
caucacaagugcuaggcuuggca

SEQ ID NO: 13187 - RNA, 23 nt, Artificial
  Chemically synthesized
aucacaagugcuaggcuuggcac

SEQ ID NO: 13188 - RNA, 23 nt, Artificial
  Chemically synthesized
ucacaagugcuaggcuuggcaca

SEQ ID NO: 13189 - RNA, 23 nt, Artificial
  Chemically synthesized
cagcuugccuguggugucgcuau

SEQ ID NO: 13190 - RNA, 23 nt, Artificial
  Chemically synthesized
agcuugccuguggugucgcuauc

SEQ ID NO: 13191 - RNA, 23 nt, Artificial
  Chemically synthesized
gcuugccuguggugucgcuaucc

SEQ ID NO: 13192 - RNA, 23 nt, Artificial
  Chemically synthesized
cuugccuguggugucgcuaucca

SEQ ID NO: 13193 - RNA, 23 nt, Artificial
  Chemically synthesized
uugccuguggugucgcuauccau

SEQ ID NO: 13194 - RNA, 23 nt, Artificial
  Chemically synthesized
cagaucagggugucgugucacaa

SEQ ID NO: 13195 - RNA, 23 nt, Artificial
  Chemically synthesized
agaucagggugucgugucacaac

SEQ ID NO: 13196 - RNA, 23 nt, Artificial
  Chemically synthesized
gaucagggugucgugucacaacc

SEQ ID NO: 13197 - RNA, 23 nt, Artificial
  Chemically synthesized
aucagggugucgugucacaaccu

SEQ ID NO: 13198 - RNA, 23 nt, Artificial
  Chemically synthesized
ucagggugucgugucacaaccuu

SEQ ID NO: 13199 - RNA, 23 nt, Artificial
  Chemically synthesized
uggguaacaaguacugagagaac

SEQ ID NO: 13200 - RNA, 23 nt, Artificial
  Chemically synthesized
ggguaacaaguacugagagaaca

SEQ ID NO: 13201 - RNA, 23 nt, Artificial
  Chemically synthesized
gguaacaaguacugagagaacaa

SEQ ID NO: 13202 - RNA, 23 nt, Artificial
  Chemically synthesized
guaacaaguacugagagaacaaa

SEQ ID NO: 13203 - RNA, 23 nt, Artificial
  Chemically synthesized
uaacaaguacugagagaacaaaa

SEQ ID NO: 13204 - RNA, 23 nt, Artificial
  Chemically synthesized
ucagaucagggugucgugucaca

SEQ ID NO: 13205 - RNA, 23 nt, Artificial
  Chemically synthesized
aggcaucacaagugcuaggcuug

SEQ ID NO: 13206 - RNA, 23 nt, Artificial
  Chemically synthesized
ccucaaaggcaccugggaguuca

SEQ ID NO: 13207 - RNA, 23 nt, Artificial
  Chemically synthesized
cucaaaggcaccugggaguucac

SEQ ID NO: 13208 - RNA, 23 nt, Artificial
  Chemically synthesized
ucaaaggcaccugggaguucacu

SEQ ID NO: 13209 - RNA, 23 nt, Artificial
  Chemically synthesized
caaaggcaccugggaguucacua

SEQ ID NO: 13210 - RNA, 23 nt, Artificial
  Chemically synthesized
aaaggcaccugggaguucacuac

SEQ ID NO: 13211 - RNA, 23 nt, Artificial
  Chemically synthesized
ccuggauuuguccagugccaucu

SEQ ID NO: 13212 - RNA, 23 nt, Artificial
  Chemically synthesized
cuggauuuguccagugccaucuu

SEQ ID NO: 13213 - RNA, 23 nt, Artificial
  Chemically synthesized
caccugggaguucacuacugcaa

SEQ ID NO: 13214 - RNA, 23 nt, Artificial
  Chemically synthesized
accugggaguucacuacugcaaa

SEQ ID NO: 13215 - RNA, 23 nt, Artificial
  Chemically synthesized
ccugggaguucacuacugcaaau

SEQ ID NO: 13216 - RNA, 23 nt, Artificial
  Chemically synthesized
cugggaguucacuacugcaaaug

SEQ ID NO: 13217 - RNA, 23 nt, Artificial
  Chemically synthesized
ugggaguucacuacugcaaaugg

SEQ ID NO: 13218 - RNA, 23 nt, Artificial
  Chemically synthesized
ucgcuauccaucacggccaccau

SEQ ID NO: 13219 - RNA, 23 nt, Artificial
  Chemically synthesized
cgcuauccaucacggccaccaug

SEQ ID NO: 13220 - RNA, 23 nt, Artificial
  Chemically synthesized
gcuauccaucacggccaccaugc

SEQ ID NO: 13221 - RNA, 23 nt, Artificial
  Chemically synthesized
cuauccaucacggccaccaugcu

SEQ ID NO: 13222 - RNA, 23 nt, Artificial
  Chemically synthesized
uauccaucacggccaccaugcug

SEQ ID NO: 13223 - RNA, 23 nt, Artificial
  Chemically synthesized
gaacgaguuaaccaggaacaugg

SEQ ID NO: 13224 - RNA, 23 nt, Artificial
  Chemically synthesized
aacgaguuaaccaggaacauggc

SEQ ID NO: 13225 - RNA, 23 nt, Artificial
  Chemically synthesized
acgaguuaaccaggaacauggcu

SEQ ID NO: 13226 - RNA, 23 nt, Artificial
  Chemically synthesized
auguucccacuuucaucugagua

SEQ ID NO: 13227 - RNA, 23 nt, Artificial
  Chemically synthesized
gaccuccaugucaucuccagcca

SEQ ID NO: 13228 - RNA, 23 nt, Artificial
  Chemically synthesized
accuccaugucaucuccagccag

SEQ ID NO: 13229 - RNA, 23 nt, Artificial
  Chemically synthesized
ccuccaugucaucuccagccagc

SEQ ID NO: 13230 - RNA, 23 nt, Artificial
  Chemically synthesized
ucaucugaguagcgucggaugau

SEQ ID NO: 13231 - RNA, 23 nt, Artificial
  Chemically synthesized
auggccugccaccuuuugauguu

SEQ ID NO: 13232 - RNA, 23 nt, Artificial
  Chemically synthesized
caagaacgaguuaaccaggaaca

SEQ ID NO: 13233 - RNA, 23 nt, Artificial
  Chemically synthesized
aagaacgaguuaaccaggaacau

SEQ ID NO: 13234 - RNA, 23 nt, Artificial
  Chemically synthesized
agaacgaguuaaccaggaacaug

SEQ ID NO: 13235 - RNA, 23 nt, Artificial
  Chemically synthesized
aggccuccaagcacauuucccag

SEQ ID NO: 13236 - RNA, 23 nt, Artificial
  Chemically synthesized
cccguggacagagcuuguuagag

SEQ ID NO: 13237 - RNA, 23 nt, Artificial
  Chemically synthesized
ccguggacagagcuuguuagagu

SEQ ID NO: 13238 - RNA, 23 nt, Artificial
  Chemically synthesized
cguggacagagcuuguuagagug

SEQ ID NO: 13239 - RNA, 23 nt, Artificial
  Chemically synthesized
guggacagagcuuguuagagugu

SEQ ID NO: 13240 - RNA, 23 nt, Artificial
  Chemically synthesized
uggacagagcuuguuagaguguc

SEQ ID NO: 13241 - RNA, 23 nt, Artificial
  Chemically synthesized
ccagugccaucuuugucaagaga

SEQ ID NO: 13242 - RNA, 23 nt, Artificial
  Chemically synthesized
cagugccaucuuugucaagagau

SEQ ID NO: 13243 - RNA, 23 nt, Artificial
  Chemically synthesized
agugccaucuuugucaagagauu

SEQ ID NO: 13244 - RNA, 23 nt, Artificial
  Chemically synthesized
gggaguucacuacugcaaauggu

SEQ ID NO: 13245 - RNA, 23 nt, Artificial
  Chemically synthesized
gagaagcuggguaacaaguacug

SEQ ID NO: 13246 - RNA, 23 nt, Artificial
  Chemically synthesized
agaagcuggguaacaaguacuga

SEQ ID NO: 13247 - RNA, 23 nt, Artificial
  Chemically synthesized
gaagcuggguaacaaguacugag

SEQ ID NO: 13248 - RNA, 23 nt, Artificial
  Chemically synthesized
aagcuggguaacaaguacugaga

SEQ ID NO: 13249 - RNA, 23 nt, Artificial
  Chemically synthesized
gcugaugaaguugucaaaaucca

SEQ ID NO: 13250 - RNA, 23 nt, Artificial
  Chemically synthesized
ucagugucgaacuguuuguauau

SEQ ID NO: 13251 - RNA, 23 nt, Artificial
  Chemically synthesized
cagugucgaacuguuuguauaug

SEQ ID NO: 13252 - RNA, 23 nt, Artificial
  Chemically synthesized
gaggcuccaggugacuccuauag

SEQ ID NO: 13253 - RNA, 23 nt, Artificial
  Chemically synthesized
aggcugggagcagaauauagaca

SEQ ID NO: 13254 - RNA, 23 nt, Artificial
  Chemically synthesized
ggcugggagcagaauauagacaa

SEQ ID NO: 13255 - RNA, 23 nt, Artificial
  Chemically synthesized
gcugggagcagaauauagacaaa

SEQ ID NO: 13256 - RNA, 23 nt, Artificial
  Chemically synthesized
cugggagcagaauauagacaaag

SEQ ID NO: 13257 - RNA, 23 nt, Artificial
  Chemically synthesized
ugggagcagaauauagacaaagg

SEQ ID NO: 13258 - RNA, 23 nt, Artificial
  Chemically synthesized
ggggcauggaggcaucacaagug

SEQ ID NO: 13259 - RNA, 23 nt, Artificial
  Chemically synthesized
gggcauggaggcaucacaagugc

SEQ ID NO: 13260 - RNA, 23 nt, Artificial
  Chemically synthesized
ggcauggaggcaucacaagugcu

SEQ ID NO: 13261 - RNA, 23 nt, Artificial
  Chemically synthesized
gcauggaggcaucacaagugcua

SEQ ID NO: 13262 - RNA, 23 nt, Artificial
  Chemically synthesized
cauggaggcaucacaagugcuag

SEQ ID NO: 13263 - RNA, 23 nt, Artificial
  Chemically synthesized
ccacaaguacuugaauuccucaa

SEQ ID NO: 13264 - RNA, 23 nt, Artificial
  Chemically synthesized
cacaaguacuugaauuccucaaa

SEQ ID NO: 13265 - RNA, 23 nt, Artificial
  Chemically synthesized
acaaguacuugaauuccucaaag

SEQ ID NO: 13266 - RNA, 23 nt, Artificial
  Chemically synthesized
aacaaguacugagagaacaaaag

SEQ ID NO: 13267 - RNA, 23 nt, Artificial
  Chemically synthesized
acaaguacugagagaacaaaagc

SEQ ID NO: 13268 - RNA, 23 nt, Artificial
  Chemically synthesized
caggccuccaagcacauuuccca

SEQ ID NO: 13269 - RNA, 23 nt, Artificial
  Chemically synthesized
uguucccacuuucaucugaguag

SEQ ID NO: 13270 - RNA, 23 nt, Artificial
  Chemically synthesized
guucccacuuucaucugaguagc

SEQ ID NO: 13271 - RNA, 23 nt, Artificial
  Chemically synthesized
gcgcugaccuccaugucaucucc

SEQ ID NO: 13272 - RNA, 23 nt, Artificial
  Chemically synthesized
cgcugaccuccaugucaucucca

SEQ ID NO: 13273 - RNA, 23 nt, Artificial
  Chemically synthesized
gcugaccuccaugucaucuccag

SEQ ID NO: 13274 - RNA, 23 nt, Artificial
  Chemically synthesized
cugaccuccaugucaucuccagc

SEQ ID NO: 13275 - RNA, 23 nt, Artificial
  Chemically synthesized
ugaccuccaugucaucuccagcc

SEQ ID NO: 13276 - RNA, 23 nt, Artificial
  Chemically synthesized
ggcgcugaccuccaugucaucuc

SEQ ID NO: 13277 - RNA, 23 nt, Artificial
  Chemically synthesized
aacaaaagcuugugggucagcag

SEQ ID NO: 13278 - RNA, 23 nt, Artificial
  Chemically synthesized
acaaaagcuugugggucagcagg

SEQ ID NO: 13279 - RNA, 23 nt, Artificial
  Chemically synthesized
caaaagcuugugggucagcaggc

SEQ ID NO: 13280 - RNA, 23 nt, Artificial
  Chemically synthesized
aaaagcuugugggucagcaggcc

SEQ ID NO: 13281 - RNA, 23 nt, Artificial
  Chemically synthesized
aaagcuugugggucagcaggccc

SEQ ID NO: 13282 - RNA, 23 nt, Artificial
  Chemically synthesized
ggccugccaccuuuugauguugu

SEQ ID NO: 13283 - RNA, 23 nt, Artificial
  Chemically synthesized
gccugccaccuuuugauguuguu

SEQ ID NO: 13284 - RNA, 23 nt, Artificial
  Chemically synthesized
ccugccaccuuuugauguuguuc

SEQ ID NO: 13285 - RNA, 23 nt, Artificial
  Chemically synthesized
ugacuccuauagcaaggcaguga

SEQ ID NO: 13286 - RNA, 23 nt, Artificial
  Chemically synthesized
gacuccuauagcaaggcagugag

SEQ ID NO: 13287 - RNA, 23 nt, Artificial
  Chemically synthesized
acuccuauagcaaggcagugagg

SEQ ID NO: 13288 - RNA, 23 nt, Artificial
  Chemically synthesized
ggacagagcuuguuagagugucc

SEQ ID NO: 13289 - RNA, 23 nt, Artificial
  Chemically synthesized
gacagagcuuguuagaguguccu

SEQ ID NO: 13290 - RNA, 23 nt, Artificial
  Chemically synthesized
acagagcuuguuagaguguccua

SEQ ID NO: 13291 - RNA, 23 nt, Artificial
  Chemically synthesized
cagagcuuguuagaguguccuag

SEQ ID NO: 13292 - RNA, 23 nt, Artificial
  Chemically synthesized
agagcuuguuagaguguccuaga

SEQ ID NO: 13293 - RNA, 23 nt, Artificial
  Chemically synthesized
acuccuggauguucaccuggauu

SEQ ID NO: 13294 - RNA, 23 nt, Artificial
  Chemically synthesized
cugcagccacuccuggauguuca

SEQ ID NO: 13295 - RNA, 23 nt, Artificial
  Chemically synthesized
ugcagccacuccuggauguucac

SEQ ID NO: 13296 - RNA, 23 nt, Artificial
  Chemically synthesized
gcagccacuccuggauguucacc

SEQ ID NO: 13297 - RNA, 23 nt, Artificial
  Chemically synthesized
gaucggucagugucgaacuguuu

SEQ ID NO: 13298 - RNA, 23 nt, Artificial
  Chemically synthesized
caggaauacauagucagcugcag

SEQ ID NO: 13299 - RNA, 23 nt, Artificial
  Chemically synthesized
ugaucaggccuccaagcacauuu

SEQ ID NO: 13300 - RNA, 23 nt, Artificial
  Chemically synthesized
gaucaggccuccaagcacauuuc

SEQ ID NO: 13301 - RNA, 23 nt, Artificial
  Chemically synthesized
aucaggccuccaagcacauuucc

SEQ ID NO: 13302 - RNA, 23 nt, Artificial
  Chemically synthesized
ucaggccuccaagcacauuuccc

SEQ ID NO: 13303 - RNA, 23 nt, Artificial
  Chemically synthesized
auggaggcaucacaagugcuagg

SEQ ID NO: 13304 - RNA, 23 nt, Artificial
  Chemically synthesized
ucaccuggauuuguccagugcca

SEQ ID NO: 13305 - RNA, 23 nt, Artificial
  Chemically synthesized
caccuggauuuguccagugccau

SEQ ID NO: 13306 - RNA, 23 nt, Artificial
  Chemically synthesized
accuggauuuguccagugccauc

SEQ ID NO: 13307 - RNA, 23 nt, Artificial
  Chemically synthesized
cuccucacucucguuggccucaa

SEQ ID NO: 13308 - RNA, 23 nt, Artificial
  Chemically synthesized
uccucacucucguuggccucaau

SEQ ID NO: 13309 - RNA, 23 nt, Artificial
  Chemically synthesized
cgcccuucaagaacgaguuaacc

SEQ ID NO: 13310 - RNA, 23 nt, Artificial
  Chemically synthesized
ccacaaagaugugacugcagaca

SEQ ID NO: 13311 - RNA, 23 nt, Artificial
  Chemically synthesized
gggagcagaauauagacaaaggc

SEQ ID NO: 13312 - RNA, 23 nt, Artificial
  Chemically synthesized
ggagcagaauauagacaaaggca

SEQ ID NO: 13313 - RNA, 23 nt, Artificial
  Chemically synthesized
agagauuugaaggcacggaacau

SEQ ID NO: 13314 - RNA, 23 nt, Artificial
  Chemically synthesized
acuggggcauguuuauuuccucc

SEQ ID NO: 13315 - RNA, 23 nt, Artificial
  Chemically synthesized
cuggggcauguuuauuuccuccu

SEQ ID NO: 13316 - RNA, 23 nt, Artificial
  Chemically synthesized
uggggcauguuuauuuccuccug

SEQ ID NO: 13317 - RNA, 23 nt, Artificial
  Chemically synthesized
uucccacuuucaucugaguagcg

SEQ ID NO: 13318 - RNA, 23 nt, Artificial
  Chemically synthesized
ucccacuuucaucugaguagcgu

SEQ ID NO: 13319 - RNA, 23 nt, Artificial
  Chemically synthesized
gggcuccaguucaggaauacaua

SEQ ID NO: 13320 - RNA, 23 nt, Artificial
  Chemically synthesized
ggcuccaguucaggaauacauag

SEQ ID NO: 13321 - RNA, 23 nt, Artificial
  Chemically synthesized
gcuccaguucaggaauacauagu

SEQ ID NO: 13322 - RNA, 23 nt, Artificial
  Chemically synthesized
agcuggguaacaaguacugagag

SEQ ID NO: 13323 - RNA, 23 nt, Artificial
  Chemically synthesized
gcuggguaacaaguacugagaga

SEQ ID NO: 13324 - RNA, 23 nt, Artificial
  Chemically synthesized
cuggguaacaaguacugagagaa

SEQ ID NO: 13325 - RNA, 23 nt, Artificial
  Chemically synthesized
gaacaaaagcuugugggucagca

SEQ ID NO: 13326 - RNA, 23 nt, Artificial
  Chemically synthesized
cuggagucauccucccagaacug

SEQ ID NO: 13327 - RNA, 23 nt, Artificial
  Chemically synthesized
gagagaacaaaagcuuguggguc

SEQ ID NO: 13328 - RNA, 23 nt, Artificial
  Chemically synthesized
agagaacaaaagcuuguggguca

SEQ ID NO: 13329 - RNA, 23 nt, Artificial
  Chemically synthesized
cacaagugcuaggcuuggcacag

SEQ ID NO: 13330 - RNA, 23 nt, Artificial
  Chemically synthesized
acaagugcuaggcuuggcacagg

SEQ ID NO: 13331 - RNA, 23 nt, Artificial
  Chemically synthesized
gcgacaugugucaaugccaaaac

SEQ ID NO: 13332 - RNA, 23 nt, Artificial
  Chemically synthesized
uggccugccaccuuuugauguug

SEQ ID NO: 13333 - RNA, 23 nt, Artificial
  Chemically synthesized
aauggucccugaucggucagugu

SEQ ID NO: 13334 - RNA, 23 nt, Artificial
  Chemically synthesized
gucacaaccuuauugagaauguu

SEQ ID NO: 13335 - RNA, 23 nt, Artificial
  Chemically synthesized
ccccacaaagaugugacugcaga

SEQ ID NO: 13336 - RNA, 23 nt, Artificial
  Chemically synthesized
cccacaaagaugugacugcagac

SEQ ID NO: 13337 - RNA, 23 nt, Artificial
  Chemically synthesized
cagcugaugaaguugucaaaauc

SEQ ID NO: 13338 - RNA, 23 nt, Artificial
  Chemically synthesized
agcugaugaaguugucaaaaucc

SEQ ID NO: 13339 - RNA, 23 nt, Artificial
  Chemically synthesized
gagaacaaaagcuugugggucag

SEQ ID NO: 13340 - RNA, 23 nt, Artificial
  Chemically synthesized
ggauguugagaagcuggguaaca

SEQ ID NO: 13341 - RNA, 23 nt, Artificial
  Chemically synthesized
gggaacuccaggcagggcaaauu

SEQ ID NO: 13342 - RNA, 23 nt, Artificial
  Chemically synthesized
ggaacuccaggcagggcaaauug

SEQ ID NO: 13343 - RNA, 23 nt, Artificial
  Chemically synthesized
gaacuccaggcagggcaaauugg

SEQ ID NO: 13344 - RNA, 23 nt, Artificial
  Chemically synthesized
aacuccaggcagggcaaauuggg

SEQ ID NO: 13345 - RNA, 23 nt, Artificial
  Chemically synthesized
acuccaggcagggcaaauugggc

SEQ ID NO: 13346 - RNA, 23 nt, Artificial
  Chemically synthesized
cugaucaggccuccaagcacauu

SEQ ID NO: 13347 - RNA, 23 nt, Artificial
  Chemically synthesized
ggggcuccaguucaggaauacau

SEQ ID NO: 13348 - RNA, 23 nt, Artificial
  Chemically synthesized
agggcaaauugggcccuggaugu

SEQ ID NO: 13349 - RNA, 23 nt, Artificial
  Chemically synthesized
gggcaaauugggcccuggauguu

SEQ ID NO: 13350 - RNA, 23 nt, Artificial
  Chemically synthesized
aggcaccugggaguucacuacug

SEQ ID NO: 13351 - RNA, 23 nt, Artificial
  Chemically synthesized
ggcaccugggaguucacuacugc

SEQ ID NO: 13352 - RNA, 23 nt, Artificial
  Chemically synthesized
gcaccugggaguucacuacugca

SEQ ID NO: 13353 - RNA, 23 nt, Artificial
  Chemically synthesized
gaccaagcagcugaugaaguugu

SEQ ID NO: 13354 - RNA, 23 nt, Artificial
  Chemically synthesized
accaagcagcugaugaaguuguc

SEQ ID NO: 13355 - RNA, 23 nt, Artificial
  Chemically synthesized
ccaagcagcugaugaaguuguca

SEQ ID NO: 13356 - RNA, 23 nt, Artificial
  Chemically synthesized
caagcagcugaugaaguugucaa

SEQ ID NO: 13357 - RNA, 23 nt, Artificial
  Chemically synthesized
aagcagcugaugaaguugucaaa

SEQ ID NO: 13358 - RNA, 23 nt, Artificial
  Chemically synthesized
ugggcaaagagucuccggaacug

SEQ ID NO: 13359 - RNA, 23 nt, Artificial
  Chemically synthesized
cauccucccagaacugagagagg

SEQ ID NO: 13360 - RNA, 23 nt, Artificial
  Chemically synthesized
auccucccagaacugagagaggg

SEQ ID NO: 13361 - RNA, 23 nt, Artificial
  Chemically synthesized
guggugucgcuauccaucacggc

SEQ ID NO: 13362 - RNA, 23 nt, Artificial
  Chemically synthesized
aaggcaccugggaguucacuacu

SEQ ID NO: 13363 - RNA, 23 nt, Artificial
  Chemically synthesized
uggcgcugaccuccaugucaucu

SEQ ID NO: 13364 - RNA, 23 nt, Artificial
  Chemically synthesized
gcugaucaggccuccaagcacau

SEQ ID NO: 13365 - RNA, 23 nt, Artificial
  Chemically synthesized
aggccccacaaagaugugacugc

SEQ ID NO: 13366 - RNA, 23 nt, Artificial
  Chemically synthesized
ggccccacaaagaugugacugca

SEQ ID NO: 13367 - RNA, 23 nt, Artificial
  Chemically synthesized
gccccacaaagaugugacugcag

SEQ ID NO: 13368 - RNA, 23 nt, Artificial
  Chemically synthesized
agaacaaaagcuugugggucagc

SEQ ID NO: 13369 - RNA, 23 nt, Artificial
  Chemically synthesized
uggaggcaucacaagugcuaggc

SEQ ID NO: 13370 - RNA, 23 nt, Artificial
  Chemically synthesized
gaggcaucacaagugcuaggcuu

SEQ ID NO: 13371 - RNA, 23 nt, Artificial
  Chemically synthesized
uggugucgcuauccaucacggcc

SEQ ID NO: 13372 - RNA, 23 nt, Artificial
  Chemically synthesized
gacccguggacagagcuuguuag

SEQ ID NO: 13373 - RNA, 23 nt, Artificial
  Chemically synthesized
acccguggacagagcuuguuaga

SEQ ID NO: 13374 - RNA, 23 nt, Artificial
  Chemically synthesized
uggccucaauguuggaguaaugu

SEQ ID NO: 13375 - RNA, 23 nt, Artificial
  Chemically synthesized
ggaggcaucacaagugcuaggcu

SEQ ID NO: 13376 - RNA, 23 nt, Artificial
  Chemically synthesized
caagugcuaggcuuggcacaggu

SEQ ID NO: 13377 - RNA, 23 nt, Artificial
  Chemically synthesized
aagugcuaggcuuggcacaggua

SEQ ID NO: 13378 - RNA, 23 nt, Artificial
  Chemically synthesized
gggcccuggauguugagaagcug

SEQ ID NO: 13379 - RNA, 23 nt, Artificial
  Chemically synthesized
caggugacuccuauagcaaggca

SEQ ID NO: 13380 - RNA, 23 nt, Artificial
  Chemically synthesized
aggugacuccuauagcaaggcag

SEQ ID NO: 13381 - RNA, 23 nt, Artificial
  Chemically synthesized
ggugacuccuauagcaaggcagu

SEQ ID NO: 13382 - RNA, 23 nt, Artificial
  Chemically synthesized
gugacuccuauagcaaggcagug

SEQ ID NO: 13383 - RNA, 23 nt, Artificial
  Chemically synthesized
accaugcugcgacaugugucaau

SEQ ID NO: 13384 - RNA, 23 nt, Artificial
  Chemically synthesized
ccaugcugcgacaugugucaaug

SEQ ID NO: 13385 - RNA, 23 nt, Artificial
  Chemically synthesized
caugcugcgacaugugucaaugc

SEQ ID NO: 13386 - RNA, 23 nt, Artificial
  Chemically synthesized
gcgcugaugacuccgccuaggau

SEQ ID NO: 13387 - RNA, 23 nt, Artificial
  Chemically synthesized
cgcugaugacuccgccuaggaug

SEQ ID NO: 13388 - RNA, 23 nt, Artificial
  Chemically synthesized
gcugaugacuccgccuaggaugc

SEQ ID NO: 13389 - RNA, 23 nt, Artificial
  Chemically synthesized
cugaugacuccgccuaggaugcg

SEQ ID NO: 13390 - RNA, 23 nt, Artificial
  Chemically synthesized
ugaugacuccgccuaggaugcgc

SEQ ID NO: 13391 - RNA, 23 nt, Artificial
  Chemically synthesized
ugccucaaaggcaccugggaguu

SEQ ID NO: 13392 - RNA, 23 nt, Artificial
  Chemically synthesized
gccucaaaggcaccugggaguuc

SEQ ID NO: 13393 - RNA, 23 nt, Artificial
  Chemically synthesized
ccaggugacuccuauagcaaggc

SEQ ID NO: 13394 - RNA, 23 nt, Artificial
  Chemically synthesized
agccugaccaagcagcugaugaa

SEQ ID NO: 13395 - RNA, 23 nt, Artificial
  Chemically synthesized
gccugaccaagcagcugaugaag

SEQ ID NO: 13396 - RNA, 23 nt, Artificial
  Chemically synthesized
ccugaccaagcagcugaugaagu

SEQ ID NO: 13397 - RNA, 23 nt, Artificial
  Chemically synthesized
cugaccaagcagcugaugaaguu

SEQ ID NO: 13398 - RNA, 23 nt, Artificial
  Chemically synthesized
ugaccaagcagcugaugaaguug

SEQ ID NO: 13399 - RNA, 23 nt, Artificial
  Chemically synthesized
cagggugucgugucacaaccuua

SEQ ID NO: 13400 - RNA, 23 nt, Artificial
  Chemically synthesized
ggggaacuccaggcagggcaaau

SEQ ID NO: 13401 - RNA, 23 nt, Artificial
  Chemically synthesized
cugggcaaagagucuccggaacu

SEQ ID NO: 13402 - RNA, 23 nt, Artificial
  Chemically synthesized
uggguagcaaccgugaagggugu

SEQ ID NO: 13403 - RNA, 23 nt, Artificial
  Chemically synthesized
ggguagcaaccgugaagggugug

SEQ ID NO: 13404 - RNA, 23 nt, Artificial
  Chemically synthesized
gguagcaaccgugaagggugugc

SEQ ID NO: 13405 - RNA, 23 nt, Artificial
  Chemically synthesized
guagcaaccgugaagggugugcc

SEQ ID NO: 13406 - RNA, 23 nt, Artificial
  Chemically synthesized
uagcaaccgugaagggugugcca

SEQ ID NO: 13407 - RNA, 23 nt, Artificial
  Chemically synthesized
caggcugggagcagaauauagac

SEQ ID NO: 13408 - RNA, 23 nt, Artificial
  Chemically synthesized
ggccaccaugcugcgacaugugu

SEQ ID NO: 13409 - RNA, 23 nt, Artificial
  Chemically synthesized
gccaccaugcugcgacauguguc

SEQ ID NO: 13410 - RNA, 23 nt, Artificial
  Chemically synthesized
ccaccaugcugcgacauguguca

SEQ ID NO: 13411 - RNA, 23 nt, Artificial
  Chemically synthesized
caccaugcugcgacaugugucaa

SEQ ID NO: 13412 - RNA, 23 nt, Artificial
  Chemically synthesized
cagccugaccaagcagcugauga

SEQ ID NO: 13413 - RNA, 23 nt, Artificial
  Chemically synthesized
acuggagucauccucccagaacu

SEQ ID NO: 13414 - RNA, 23 nt, Artificial
  Chemically synthesized
gugccaucuuugucaagagauuu

SEQ ID NO: 13415 - RNA, 23 nt, Artificial
  Chemically synthesized
ggcaggcugggagcagaauauag

SEQ ID NO: 13416 - RNA, 23 nt, Artificial
  Chemically synthesized
gcaggcugggagcagaauauaga

SEQ ID NO: 13417 - RNA, 23 nt, Artificial
  Chemically synthesized
cggggcauggaggcaucacaagu

SEQ ID NO: 13418 - RNA, 23 nt, Artificial
  Chemically synthesized
ggacuggagucauccucccagaa

SEQ ID NO: 13419 - RNA, 23 nt, Artificial
  Chemically synthesized
gacuggagucauccucccagaac

SEQ ID NO: 13420 - RNA, 23 nt, Artificial
  Chemically synthesized
uccucccagaacugagagagggc

SEQ ID NO: 13421 - RNA, 23 nt, Artificial
  Chemically synthesized
agcagcugaugaaguugucaaaa

SEQ ID NO: 13422 - RNA, 23 nt, Artificial
  Chemically synthesized
cuggcaggcugggagcagaauau

SEQ ID NO: 13423 - RNA, 23 nt, Artificial
  Chemically synthesized
uggcaggcugggagcagaauaua

SEQ ID NO: 13424 - RNA, 23 nt, Artificial
  Chemically synthesized
cgaggcuccaggugacuccuaua

SEQ ID NO: 13425 - RNA, 23 nt, Artificial
  Chemically synthesized
uggggcuccaguucaggaauaca

SEQ ID NO: 13426 - RNA, 23 nt, Artificial
  Chemically synthesized
agacccguggacagagcuuguua

SEQ ID NO: 13427 - RNA, 23 nt, Artificial
  Chemically synthesized
gcagcugaugaaguugucaaaau

SEQ ID NO: 13428 - RNA, 23 nt, Artificial
  Chemically synthesized
ugggcccuggauguugagaagcu

SEQ ID NO: 13429 - RNA, 19 nt, Artificial
  Chemically synthesized
gguucucuguccuaccuga

SEQ ID NO: 13430 - RNA, 19 nt, Artificial
  Chemically synthesized
ggaggaccugauugccaaa

SEQ ID NO: 13431 - RNA, 19 nt, Artificial
  Chemically synthesized
cuguguuugaccgugacaa

SEQ ID NO: 13432 - RNA, 19 nt, Artificial
  Chemically synthesized
uguuugaccgugacaacaa

SEQ ID NO: 13433 - RNA, 19 nt, Artificial
  Chemically synthesized
cuugcuggauccaccacaa

SEQ ID NO: 13434 - RNA, 19 nt, Artificial
  Chemically synthesized
guuugaccgugacaacaac

SEQ ID NO: 13435 - RNA, 19 nt, Artificial
  Chemically synthesized
acugaagcugggaggcaaa

SEQ ID NO: 13436 - RNA, 19 nt, Artificial
  Chemically synthesized
cagaggacuacacgcucaa

SEQ ID NO: 13437 - RNA, 19 nt, Artificial
  Chemically synthesized
gugucaaaguggagaggca

SEQ ID NO: 13438 - RNA, 19 nt, Artificial
  Chemically synthesized
ccucguuugacauccacua

SEQ ID NO: 13439 - RNA, 19 nt, Artificial
  Chemically synthesized
cagacuccaaguauuacaa

SEQ ID NO: 13440 - RNA, 19 nt, Artificial
  Chemically synthesized
gcuucaugggcauggacau

SEQ ID NO: 13441 - RNA, 19 nt, Artificial
  Chemically synthesized
ucuguuucgugcauuggaa

SEQ ID NO: 13442 - RNA, 19 nt, Artificial
  Chemically synthesized
ucaccuucaucgcagccaa

SEQ ID NO: 13443 - RNA, 19 nt, Artificial
  Chemically synthesized
agaagcugguggaccagaa

SEQ ID NO: 13444 - RNA, 19 nt, Artificial
  Chemically synthesized
gcuacuacacuguguuuga

SEQ ID NO: 13445 - RNA, 19 nt, Artificial
  Chemically synthesized
cagccaaguucgauggcau

SEQ ID NO: 13446 - RNA, 19 nt, Artificial
  Chemically synthesized
aguccagcaccuacgugaa

SEQ ID NO: 13447 - RNA, 19 nt, Artificial
  Chemically synthesized
agaacaucuucuccuucua

SEQ ID NO: 13448 - RNA, 19 nt, Artificial
  Chemically synthesized
uggaggaccugauugccaa

SEQ ID NO: 13449 - RNA, 19 nt, Artificial
  Chemically synthesized
ccagcaccuacgugaagaa

SEQ ID NO: 13450 - RNA, 19 nt, Artificial
  Chemically synthesized
gcuucacagucgucuucga

SEQ ID NO: 13451 - RNA, 19 nt, Artificial
  Chemically synthesized
ccagcacagaaacagagga

SEQ ID NO: 13452 - RNA, 19 nt, Artificial
  Chemically synthesized
gcugauccagagcacagau

SEQ ID NO: 13453 - RNA, 19 nt, Artificial
  Chemically synthesized
accugaaugucacccgcaa

SEQ ID NO: 13454 - RNA, 19 nt, Artificial
  Chemically synthesized
uguguuugaccgugacaac

SEQ ID NO: 13455 - RNA, 19 nt, Artificial
  Chemically synthesized
cucuguggaggaccugauu

SEQ ID NO: 13456 - RNA, 19 nt, Artificial
  Chemically synthesized
ccgucucaaaguacuccca

SEQ ID NO: 13457 - RNA, 19 nt, Artificial
  Chemically synthesized
ggcaaaggcuacaagcugu

SEQ ID NO: 13458 - RNA, 19 nt, Artificial
  Chemically synthesized
ccgucuucgacaaccugau

SEQ ID NO: 13459 - RNA, 19 nt, Artificial
  Chemically synthesized
guucucuguccuaccugaa

SEQ ID NO: 13460 - RNA, 19 nt, Artificial
  Chemically synthesized
ccuucaucgcagccaaguu

SEQ ID NO: 13461 - RNA, 19 nt, Artificial
  Chemically synthesized
acugcaaacugcuggacau

SEQ ID NO: 13462 - RNA, 19 nt, Artificial
  Chemically synthesized
guguuugaccgugacaaca

SEQ ID NO: 13463 - RNA, 19 nt, Artificial
  Chemically synthesized
ugagcuggaaggagugaga

SEQ ID NO: 13464 - RNA, 19 nt, Artificial
  Chemically synthesized
aacagaggagagucccaga

SEQ ID NO: 13465 - RNA, 19 nt, Artificial
  Chemically synthesized
acaaguacaacagcgacaa

SEQ ID NO: 13466 - RNA, 19 nt, Artificial
  Chemically synthesized
ugaggaugagcuggaagga

SEQ ID NO: 13467 - RNA, 19 nt, Artificial
  Chemically synthesized
ucaucgcagccaaguucga

SEQ ID NO: 13468 - RNA, 19 nt, Artificial
  Chemically synthesized
gaaacagaggagaguccca

SEQ ID NO: 13469 - RNA, 19 nt, Artificial
  Chemically synthesized
gggacaaaacccaccuugu

SEQ ID NO: 13470 - RNA, 19 nt, Artificial
  Chemically synthesized
aggugcucaagaacuacau

SEQ ID NO: 13471 - RNA, 19 nt, Artificial
  Chemically synthesized
aggaugagcuggaaggagu

SEQ ID NO: 13472 - RNA, 19 nt, Artificial
  Chemically synthesized
ggacaaaacccaccuuguu

SEQ ID NO: 13473 - RNA, 19 nt, Artificial
  Chemically synthesized
gucugucucuccaucuguu

SEQ ID NO: 13474 - RNA, 19 nt, Artificial
  Chemically synthesized
agaacuacauggacgccca

SEQ ID NO: 13475 - RNA, 19 nt, Artificial
  Chemically synthesized
cacaaguacaacagcgaca

SEQ ID NO: 13476 - RNA, 19 nt, Artificial
  Chemically synthesized
agccaggcaucaccuucau

SEQ ID NO: 13477 - RNA, 19 nt, Artificial
  Chemically synthesized
cuguccuaccugaauguca

SEQ ID NO: 13478 - RNA, 19 nt, Artificial
  Chemically synthesized
agcugacauggaaauacag

SEQ ID NO: 13479 - RNA, 19 nt, Artificial
  Chemically synthesized
aaguggagaggcaggucuu

SEQ ID NO: 13480 - RNA, 19 nt, Artificial
  Chemically synthesized
ugauucagggcgaguacau

SEQ ID NO: 13481 - RNA, 19 nt, Artificial
  Chemically synthesized
ccgcuacuacacuguguuu

SEQ ID NO: 13482 - RNA, 19 nt, Artificial
  Chemically synthesized
gaggugcucaagaacuaca

SEQ ID NO: 13483 - RNA, 19 nt, Artificial
  Chemically synthesized
ucgacaaccugaugcagca

SEQ ID NO: 13484 - RNA, 19 nt, Artificial
  Chemically synthesized
uuugaccgugacaacaaca

SEQ ID NO: 13485 - RNA, 19 nt, Artificial
  Chemically synthesized
caaguacaacagcgacaag

SEQ ID NO: 13486 - RNA, 19 nt, Artificial
  Chemically synthesized
aggacuacacgcucaaggu

SEQ ID NO: 13487 - RNA, 19 nt, Artificial
  Chemically synthesized
ugggaggcaaaggcuacaa

SEQ ID NO: 13488 - RNA, 19 nt, Artificial
  Chemically synthesized
ucuucaucggccgcuacua

SEQ ID NO: 13489 - RNA, 19 nt, Artificial
  Chemically synthesized
agugcuucacagucgucuu

SEQ ID NO: 13490 - RNA, 19 nt, Artificial
  Chemically synthesized
cacugcaaacugcuggaca

SEQ ID NO: 13491 - RNA, 19 nt, Artificial
  Chemically synthesized
agcacagaaacagaggaga

SEQ ID NO: 13492 - RNA, 19 nt, Artificial
  Chemically synthesized
cugauucagggcgaguaca

SEQ ID NO: 13493 - RNA, 19 nt, Artificial
  Chemically synthesized
aguggagaggcaggucuuu

SEQ ID NO: 13494 - RNA, 19 nt, Artificial
  Chemically synthesized
acagacuccaaguauuaca

SEQ ID NO: 13495 - RNA, 19 nt, Artificial
  Chemically synthesized
cgaggugcucaagaacuac

SEQ ID NO: 13496 - RNA, 19 nt, Artificial
  Chemically synthesized
gcacagaaacagaggagag

SEQ ID NO: 13497 - RNA, 19 nt, Artificial
  Chemically synthesized
gguggaccagaacaucuuc

SEQ ID NO: 13498 - RNA, 19 nt, Artificial
  Chemically synthesized
gccgcuacuacacuguguu

SEQ ID NO: 13499 - RNA, 19 nt, Artificial
  Chemically synthesized
cucguuugacauccacuau

SEQ ID NO: 13500 - RNA, 19 nt, Artificial
  Chemically synthesized
cacagaaacagaggagagu

SEQ ID NO: 13501 - RNA, 19 nt, Artificial
  Chemically synthesized
ugcacaaguucacguccau

SEQ ID NO: 13502 - RNA, 19 nt, Artificial
  Chemically synthesized
cgacuugcuguuuuguucu

SEQ ID NO: 13503 - RNA, 19 nt, Artificial
  Chemically synthesized
cauuguggacacaggcacu

SEQ ID NO: 13504 - RNA, 19 nt, Artificial
  Chemically synthesized
caaguucgauggcauccug

SEQ ID NO: 13505 - RNA, 19 nt, Artificial
  Chemically synthesized
ccgacuugcuguuuuguuc

SEQ ID NO: 13506 - RNA, 19 nt, Artificial
  Chemically synthesized
auucagggcgaguacauga

SEQ ID NO: 13507 - RNA, 19 nt, Artificial
  Chemically synthesized
gcucaagaacuacauggac

SEQ ID NO: 13508 - RNA, 19 nt, Artificial
  Chemically synthesized
gauucagggcgaguacaug

SEQ ID NO: 13509 - RNA, 19 nt, Artificial
  Chemically synthesized
gaugagcuggaaggaguga

SEQ ID NO: 13510 - RNA, 19 nt, Artificial
  Chemically synthesized
agaaaugcugccugccugu

SEQ ID NO: 13511 - RNA, 19 nt, Artificial
  Chemically synthesized
agaucuguuucgugcauug

SEQ ID NO: 13512 - RNA, 19 nt, Artificial
  Chemically synthesized
cuguuucgugcauuggaag

SEQ ID NO: 13513 - RNA, 19 nt, Artificial
  Chemically synthesized
cacagaucuguuucgugca

SEQ ID NO: 13514 - RNA, 19 nt, Artificial
  Chemically synthesized
accagaacaucuucuccuu

SEQ ID NO: 13515 - RNA, 19 nt, Artificial
  Chemically synthesized
cgugaagaaugguaccucg

SEQ ID NO: 13516 - RNA, 19 nt, Artificial
  Chemically synthesized
agcugguggaccagaacau

SEQ ID NO: 13517 - RNA, 19 nt, Artificial
  Chemically synthesized
acagaucuguuucgugcau

SEQ ID NO: 13518 - RNA, 19 nt, Artificial
  Chemically synthesized
gaaauacaguuguuggccu

SEQ ID NO: 13519 - RNA, 19 nt, Artificial
  Chemically synthesized
ccuacgugaagaaugguac

SEQ ID NO: 13520 - RNA, 19 nt, Artificial
  Chemically synthesized
uguuucgugcauuggaaga

SEQ ID NO: 13521 - RNA, 19 nt, Artificial
  Chemically synthesized
ggugcucaagaacuacaug

SEQ ID NO: 13522 - RNA, 19 nt, Artificial
  Chemically synthesized
cccgacuugcuguuuuguu

SEQ ID NO: 13523 - RNA, 19 nt, Artificial
  Chemically synthesized
ccucccuggguucagaaau

SEQ ID NO: 13524 - RNA, 19 nt, Artificial
  Chemically synthesized
uccagagcacagaucuguu

SEQ ID NO: 13525 - RNA, 19 nt, Artificial
  Chemically synthesized
acuguguuugaccgugaca

SEQ ID NO: 13526 - RNA, 19 nt, Artificial
  Chemically synthesized
acaacaacagggugggcuu

SEQ ID NO: 13527 - RNA, 19 nt, Artificial
  Chemically synthesized
cccagcugacauggaaaua

SEQ ID NO: 13528 - RNA, 19 nt, Artificial
  Chemically synthesized
caaccugaugcagcagaag

SEQ ID NO: 13529 - RNA, 19 nt, Artificial
  Chemically synthesized
acuacauggacgcccagua

SEQ ID NO: 13530 - RNA, 19 nt, Artificial
  Chemically synthesized
cagcaccuacgugaagaau

SEQ ID NO: 13531 - RNA, 19 nt, Artificial
  Chemically synthesized
caaacugcuggacaucgcu

SEQ ID NO: 13532 - RNA, 19 nt, Artificial
  Chemically synthesized
gaucacacugaagcuggga

SEQ ID NO: 13533 - RNA, 19 nt, Artificial
  Chemically synthesized
acaaggguucucuguccua

SEQ ID NO: 13534 - RNA, 19 nt, Artificial
  Chemically synthesized
ugccugucugucucuccau

SEQ ID NO: 13535 - RNA, 19 nt, Artificial
  Chemically synthesized
caaguauuacaaggguucu

SEQ ID NO: 13536 - RNA, 19 nt, Artificial
  Chemically synthesized
caaaacccaccuuguugga

SEQ ID NO: 13537 - RNA, 19 nt, Artificial
  Chemically synthesized
cucuguccuaccugaaugu

SEQ ID NO: 13538 - RNA, 19 nt, Artificial
  Chemically synthesized
uggacaucgcuugcuggau

SEQ ID NO: 13539 - RNA, 19 nt, Artificial
  Chemically synthesized
ccauccacugcaaacugcu

SEQ ID NO: 13540 - RNA, 19 nt, Artificial
  Chemically synthesized
accuacgugaagaauggua

SEQ ID NO: 13541 - RNA, 19 nt, Artificial
  Chemically synthesized
acacuguguuugaccguga

SEQ ID NO: 13542 - RNA, 19 nt, Artificial
  Chemically synthesized
ugcucaagaacuacaugga

SEQ ID NO: 13543 - RNA, 19 nt, Artificial
  Chemically synthesized
ugaccgugacaacaacagg

SEQ ID NO: 13544 - RNA, 19 nt, Artificial
  Chemically synthesized
guauuacaaggguucucug

SEQ ID NO: 13545 - RNA, 19 nt, Artificial
  Chemically synthesized
uguuuuguucugugguuuu

SEQ ID NO: 13546 - RNA, 19 nt, Artificial
  Chemically synthesized
aucuucuccuucuaccuga

SEQ ID NO: 13547 - RNA, 19 nt, Artificial
  Chemically synthesized
acacaggcacuucccucau

SEQ ID NO: 13548 - RNA, 19 nt, Artificial
  Chemically synthesized
cacuguguuugaccgugac

SEQ ID NO: 13549 - RNA, 19 nt, Artificial
  Chemically synthesized
cugacauggaaauacaguu

SEQ ID NO: 13550 - RNA, 19 nt, Artificial
  Chemically synthesized
guggcacagacuccaagua

SEQ ID NO: 13551 - RNA, 19 nt, Artificial
  Chemically synthesized
acaucuucuccuucuaccu

SEQ ID NO: 13552 - RNA, 19 nt, Artificial
  Chemically synthesized
gcccgacuugcuguuuugu

SEQ ID NO: 13553 - RNA, 19 nt, Artificial
  Chemically synthesized
cuccaaguauuacaagggu

SEQ ID NO: 13554 - RNA, 19 nt, Artificial
  Chemically synthesized
agcugauccagagcacaga

SEQ ID NO: 13555 - RNA, 19 nt, Artificial
  Chemically synthesized
uucaucggccgcuacuaca

SEQ ID NO: 13556 - RNA, 19 nt, Artificial
  Chemically synthesized
ugguggaccagaacaucuu

SEQ ID NO: 13557 - RNA, 19 nt, Artificial
  Chemically synthesized
uucucuguccuaccugaau

SEQ ID NO: 13558 - RNA, 19 nt, Artificial
  Chemically synthesized
ccuccauccacugcaaacu

SEQ ID NO: 13559 - RNA, 19 nt, Artificial
  Chemically synthesized
uguccuaccugaaugucac

SEQ ID NO: 13560 - RNA, 19 nt, Artificial
  Chemically synthesized
cuguuuuguucugugguuu

SEQ ID NO: 13561 - RNA, 19 nt, Artificial
  Chemically synthesized
gaaugguaccucguuugac

SEQ ID NO: 13562 - RNA, 19 nt, Artificial
  Chemically synthesized
cccuggguucagaaaugcu

SEQ ID NO: 13563 - RNA, 19 nt, Artificial
  Chemically synthesized
ccagagcacagaucuguuu

SEQ ID NO: 13564 - RNA, 19 nt, Artificial
  Chemically synthesized
gaggcaaaggcuacaagcu

SEQ ID NO: 13565 - RNA, 19 nt, Artificial
  Chemically synthesized
acaacagcgacaaguccag

SEQ ID NO: 13566 - RNA, 19 nt, Artificial
  Chemically synthesized
gugaagaaugguaccucgu

SEQ ID NO: 13567 - RNA, 19 nt, Artificial
  Chemically synthesized
cagaucuguuucgugcauu

SEQ ID NO: 13568 - RNA, 19 nt, Artificial
  Chemically synthesized
ccugucugucucuccaucu

SEQ ID NO: 13569 - RNA, 19 nt, Artificial
  Chemically synthesized
caaggguucucuguccuac

SEQ ID NO: 13570 - RNA, 19 nt, Artificial
  Chemically synthesized
cauguauuggccuggaggu

SEQ ID NO: 13571 - RNA, 19 nt, Artificial
  Chemically synthesized
ucugcagcugaccucuguu

SEQ ID NO: 13572 - RNA, 19 nt, Artificial
  Chemically synthesized
caucgcagccaaguucgau

SEQ ID NO: 13573 - RNA, 19 nt, Artificial
  Chemically synthesized
cuacgugaagaaugguacc

SEQ ID NO: 13574 - RNA, 19 nt, Artificial
  Chemically synthesized
agcugaccucuguuguccu

SEQ ID NO: 13575 - RNA, 19 nt, Artificial
  Chemically synthesized
accacaaguacaacagcga

SEQ ID NO: 13576 - RNA, 19 nt, Artificial
  Chemically synthesized
cugcacaaguucacgucca

SEQ ID NO: 13577 - RNA, 19 nt, Artificial
  Chemically synthesized
ccacaaguacaacagcgac

SEQ ID NO: 13578 - RNA, 19 nt, Artificial
  Chemically synthesized
accucguuugacauccacu

SEQ ID NO: 13579 - RNA, 19 nt, Artificial
  Chemically synthesized
cugucugucucuccaucug

SEQ ID NO: 13580 - RNA, 19 nt, Artificial
  Chemically synthesized
gcugacauggaaauacagu

SEQ ID NO: 13581 - RNA, 19 nt, Artificial
  Chemically synthesized
ugucaaaguggagaggcag

SEQ ID NO: 13582 - RNA, 19 nt, Artificial
  Chemically synthesized
cagcacagaaacagaggag

SEQ ID NO: 13583 - RNA, 19 nt, Artificial
  Chemically synthesized
gauccaccacaaguacaac

SEQ ID NO: 13584 - RNA, 19 nt, Artificial
  Chemically synthesized
aaguccagcaccuacguga

SEQ ID NO: 13585 - RNA, 19 nt, Artificial
  Chemically synthesized
cacagacuccaaguauuac

SEQ ID NO: 13586 - RNA, 19 nt, Artificial
  Chemically synthesized
cuugcuguuuuguucugug

SEQ ID NO: 13587 - RNA, 19 nt, Artificial
  Chemically synthesized
uucagggcgaguacaugau

SEQ ID NO: 13588 - RNA, 19 nt, Artificial
  Chemically synthesized
gacauggaaauacaguugu

SEQ ID NO: 13589 - RNA, 19 nt, Artificial
  Chemically synthesized
ugaugcagcagaagcuggu

SEQ ID NO: 13590 - RNA, 19 nt, Artificial
  Chemically synthesized
aggcaucaccuucaucgca

SEQ ID NO: 13591 - RNA, 19 nt, Artificial
  Chemically synthesized
acaucgcuugcuggaucca

SEQ ID NO: 13592 - RNA, 19 nt, Artificial
  Chemically synthesized
ugcuguuuuguucuguggu

SEQ ID NO: 13593 - RNA, 19 nt, Artificial
  Chemically synthesized
cagugcuucacagucgucu

SEQ ID NO: 13594 - RNA, 19 nt, Artificial
  Chemically synthesized
agacuccaaguauuacaag

SEQ ID NO: 13595 - RNA, 19 nt, Artificial
  Chemically synthesized
ugucugucucuccaucugu

SEQ ID NO: 13596 - RNA, 19 nt, Artificial
  Chemically synthesized
ugcuggauccaccacaagu

SEQ ID NO: 13597 - RNA, 19 nt, Artificial
  Chemically synthesized
uggauccaccacaaguaca

SEQ ID NO: 13598 - RNA, 19 nt, Artificial
  Chemically synthesized
uccacugcaaacugcugga

SEQ ID NO: 13599 - RNA, 19 nt, Artificial
  Chemically synthesized
cuacacuguguuugaccgu

SEQ ID NO: 13600 - RNA, 19 nt, Artificial
  Chemically synthesized
ucuucgacaaccugaugca

SEQ ID NO: 13601 - RNA, 19 nt, Artificial
  Chemically synthesized
cauccacugcaaacugcug

SEQ ID NO: 13602 - RNA, 19 nt, Artificial
  Chemically synthesized
aggcaaaggcuacaagcug

SEQ ID NO: 13603 - RNA, 19 nt, Artificial
  Chemically synthesized
gauccagagcacagaucug

SEQ ID NO: 13604 - RNA, 19 nt, Artificial
  Chemically synthesized
aagcugguggaccagaaca

SEQ ID NO: 13605 - RNA, 19 nt, Artificial
  Chemically synthesized
uacaacagcgacaagucca

SEQ ID NO: 13606 - RNA, 19 nt, Artificial
  Chemically synthesized
ucugucucuccaucuguuu

SEQ ID NO: 13607 - RNA, 19 nt, Artificial
  Chemically synthesized
accugaugcagcagaagcu

SEQ ID NO: 13608 - RNA, 19 nt, Artificial
  Chemically synthesized
cauggaaauacaguuguug

SEQ ID NO: 13609 - RNA, 19 nt, Artificial
  Chemically synthesized
cuacuacacuguguuugac

SEQ ID NO: 13610 - RNA, 19 nt, Artificial
  Chemically synthesized
ccuggguucagaaaugcug

SEQ ID NO: 13611 - RNA, 19 nt, Artificial
  Chemically synthesized
acaaguccagcaccuacgu

SEQ ID NO: 13612 - RNA, 19 nt, Artificial
  Chemically synthesized
gcaaaggcuacaagcuguc

SEQ ID NO: 13613 - RNA, 19 nt, Artificial
  Chemically synthesized
aucccgcugcacaaguuca

SEQ ID NO: 13614 - RNA, 19 nt, Artificial
  Chemically synthesized
cgucuucgacaaccugaug

SEQ ID NO: 13615 - RNA, 19 nt, Artificial
  Chemically synthesized
gaccagaacaucuucuccu

SEQ ID NO: 13616 - RNA, 19 nt, Artificial
  Chemically synthesized
ugcagcugaccucuguugu

SEQ ID NO: 13617 - RNA, 19 nt, Artificial
  Chemically synthesized
gacaaccugaugcagcaga

SEQ ID NO: 13618 - RNA, 19 nt, Artificial
  Chemically synthesized
gucucaaaguacucccagg

SEQ ID NO: 13619 - RNA, 19 nt, Artificial
  Chemically synthesized
acaaguucacguccauccg

SEQ ID NO: 13620 - RNA, 19 nt, Artificial
  Chemically synthesized
cagaacaucuucuccuucu

SEQ ID NO: 13621 - RNA, 19 nt, Artificial
  Chemically synthesized
cuggauccaccacaaguac

SEQ ID NO: 13622 - RNA, 19 nt, Artificial
  Chemically synthesized
aaaguggagaggcaggucu

SEQ ID NO: 13623 - RNA, 19 nt, Artificial
  Chemically synthesized
agaggacuacacgcucaag

SEQ ID NO: 13624 - RNA, 19 nt, Artificial
  Chemically synthesized
uauuacaaggguucucugu

SEQ ID NO: 13625 - RNA, 19 nt, Artificial
  Chemically synthesized
uaccugaaugucacccgca

SEQ ID NO: 13626 - RNA, 19 nt, Artificial
  Chemically synthesized
ccaccacaaguacaacagc

SEQ ID NO: 13627 - RNA, 19 nt, Artificial
  Chemically synthesized
aaguacaacagcgacaagu

SEQ ID NO: 13628 - RNA, 19 nt, Artificial
  Chemically synthesized
cucccuggguucagaaaug

SEQ ID NO: 13629 - RNA, 19 nt, Artificial
  Chemically synthesized
aaaugcugccugccugucu

SEQ ID NO: 13630 - RNA, 19 nt, Artificial
  Chemically synthesized
cgucucaaaguacucccag

SEQ ID NO: 13631 - RNA, 19 nt, Artificial
  Chemically synthesized
ucaaaguggagaggcaggu

SEQ ID NO: 13632 - RNA, 19 nt, Artificial
  Chemically synthesized
gacuacacgcucaaggugu

SEQ ID NO: 13633 - RNA, 19 nt, Artificial
  Chemically synthesized
ucacagucgucuucgacac

SEQ ID NO: 13634 - RNA, 19 nt, Artificial
  Chemically synthesized
ugauccagagcacagaucu

SEQ ID NO: 13635 - RNA, 19 nt, Artificial
  Chemically synthesized
augguaccucguuugacau

SEQ ID NO: 13636 - RNA, 19 nt, Artificial
  Chemically synthesized
uccagcaccuacgugaaga

SEQ ID NO: 13637 - RNA, 19 nt, Artificial
  Chemically synthesized
ccaaguucgauggcauccu

SEQ ID NO: 13638 - RNA, 19 nt, Artificial
  Chemically synthesized
aguauuacaaggguucucu

SEQ ID NO: 13639 - RNA, 19 nt, Artificial
  Chemically synthesized
ucagggcgaguacaugauc

SEQ ID NO: 13640 - RNA, 19 nt, Artificial
  Chemically synthesized
ccagaacaucuucuccuuc

SEQ ID NO: 13641 - RNA, 19 nt, Artificial
  Chemically synthesized
agcccgacuugcuguuuug

SEQ ID NO: 13642 - RNA, 19 nt, Artificial
  Chemically synthesized
uucacagucgucuucgaca

SEQ ID NO: 13643 - RNA, 19 nt, Artificial
  Chemically synthesized
acuugcuguuuuguucugu

SEQ ID NO: 13644 - RNA, 19 nt, Artificial
  Chemically synthesized
gacuugcuguuuuguucug

SEQ ID NO: 13645 - RNA, 19 nt, Artificial
  Chemically synthesized
cugucucuccaucuguuug

SEQ ID NO: 13646 - RNA, 19 nt, Artificial
  Chemically synthesized
ugaggccauuguggacaca

SEQ ID NO: 13647 - RNA, 19 nt, Artificial
  Chemically synthesized
aaacugcuggacaucgcuu

SEQ ID NO: 13648 - RNA, 19 nt, Artificial
  Chemically synthesized
guagagcugauccagagca

SEQ ID NO: 13649 - RNA, 19 nt, Artificial
  Chemically synthesized
ucuccgucaacaacgugcu

SEQ ID NO: 13650 - RNA, 19 nt, Artificial
  Chemically synthesized
auucccgaggugcucaaga

SEQ ID NO: 13651 - RNA, 19 nt, Artificial
  Chemically synthesized
ucguuugacauccacuaug

SEQ ID NO: 13652 - RNA, 19 nt, Artificial
  Chemically synthesized
gagcacagaucuguuucgu

SEQ ID NO: 13653 - RNA, 19 nt, Artificial
  Chemically synthesized
cucaagaacuacauggacg

SEQ ID NO: 13654 - RNA, 19 nt, Artificial
  Chemically synthesized
ccaaguauuacaaggguuc

SEQ ID NO: 13655 - RNA, 19 nt, Artificial
  Chemically synthesized
cuccauccacugcaaacug

SEQ ID NO: 13656 - RNA, 19 nt, Artificial
  Chemically synthesized
ucuucuccuucuaccugag

SEQ ID NO: 13657 - RNA, 19 nt, Artificial
  Chemically synthesized
uucuccuucuaccugagca

SEQ ID NO: 13658 - RNA, 19 nt, Artificial
  Chemically synthesized
caccuacgugaagaauggu

SEQ ID NO: 13659 - RNA, 19 nt, Artificial
  Chemically synthesized
aggguucucuguccuaccu

SEQ ID NO: 13660 - RNA, 19 nt, Artificial
  Chemically synthesized
ggaccagaacaucuucucc

SEQ ID NO: 13661 - RNA, 19 nt, Artificial
  Chemically synthesized
uggaaauacaguuguuggc

SEQ ID NO: 13662 - RNA, 19 nt, Artificial
  Chemically synthesized
cuggguucagaaaugcugc

SEQ ID NO: 13663 - RNA, 19 nt, Artificial
  Chemically synthesized
gcacagaucuguuucgugc

SEQ ID NO: 13664 - RNA, 19 nt, Artificial
  Chemically synthesized
ccagcugacauggaaauac

SEQ ID NO: 13665 - RNA, 19 nt, Artificial
  Chemically synthesized
agccaaguucgauggcauc

SEQ ID NO: 13666 - RNA, 19 nt, Artificial
  Chemically synthesized
gacuccaaguauuacaagg

SEQ ID NO: 13667 - RNA, 19 nt, Artificial
  Chemically synthesized
uccaaguauuacaaggguu

SEQ ID NO: 13668 - RNA, 19 nt, Artificial
  Chemically synthesized
ucaagaacuacauggacgc

SEQ ID NO: 13669 - RNA, 19 nt, Artificial
  Chemically synthesized
aagcccgacuugcuguuuu

SEQ ID NO: 13670 - RNA, 19 nt, Artificial
  Chemically synthesized
accuucaucgcagccaagu

SEQ ID NO: 13671 - RNA, 19 nt, Artificial
  Chemically synthesized
agcaccuacgugaagaaug

SEQ ID NO: 13672 - RNA, 19 nt, Artificial
  Chemically synthesized
aacagcgacaaguccagca

SEQ ID NO: 13673 - RNA, 19 nt, Artificial
  Chemically synthesized
gacaaaacccaccuuguug

SEQ ID NO: 13674 - RNA, 19 nt, Artificial
  Chemically synthesized
uagagcugauccagagcac

SEQ ID NO: 13675 - RNA, 19 nt, Artificial
  Chemically synthesized
gucucuccaucuguuuggu

SEQ ID NO: 13676 - RNA, 19 nt, Artificial
  Chemically synthesized
aaacagaggagagucccag

SEQ ID NO: 13677 - RNA, 19 nt, Artificial
  Chemically synthesized
cugguggaccagaacaucu

SEQ ID NO: 13678 - RNA, 19 nt, Artificial
  Chemically synthesized
acuacacuguguuugaccg

SEQ ID NO: 13679 - RNA, 19 nt, Artificial
  Chemically synthesized
cuucgacaaccugaugcag

SEQ ID NO: 13680 - RNA, 19 nt, Artificial
  Chemically synthesized
aaauacaguuguuggccuc

SEQ ID NO: 13681 - RNA, 19 nt, Artificial
  Chemically synthesized
auggaaauacaguuguugg

SEQ ID NO: 13682 - RNA, 19 nt, Artificial
  Chemically synthesized
aguacaacagcgacaaguc

SEQ ID NO: 13683 - RNA, 19 nt, Artificial
  Chemically synthesized
gcacaaguucacguccauc

SEQ ID NO: 13684 - RNA, 19 nt, Artificial
  Chemically synthesized
aaguucgauggcauccugg

SEQ ID NO: 13685 - RNA, 19 nt, Artificial
  Chemically synthesized
caucuucuccuucuaccug

SEQ ID NO: 13686 - RNA, 19 nt, Artificial
  Chemically synthesized
cugcaaacugcuggacauc

SEQ ID NO: 13687 - RNA, 19 nt, Artificial
  Chemically synthesized
acagaaacagaggagaguc

SEQ ID NO: 13688 - RNA, 19 nt, Artificial
  Chemically synthesized
guuuuguucugugguuuuc

SEQ ID NO: 13689 - RNA, 19 nt, Artificial
  Chemically synthesized
uugaccgugacaacaacag

SEQ ID NO: 13690 - RNA, 19 nt, Artificial
  Chemically synthesized
cgcuacuacacuguguuug

SEQ ID NO: 13691 - RNA, 19 nt, Artificial
  Chemically synthesized
acuacacgcucaagguguc

SEQ ID NO: 13692 - RNA, 19 nt, Artificial
  Chemically synthesized
caucuccgucaacaacgug

SEQ ID NO: 13693 - RNA, 19 nt, Artificial
  Chemically synthesized
guuugacauccacuauggc

SEQ ID NO: 13694 - RNA, 19 nt, Artificial
  Chemically synthesized
ggaaauacaguuguuggcc

SEQ ID NO: 13695 - RNA, 19 nt, Artificial
  Chemically synthesized
ucagaaaugcugccugccu

SEQ ID NO: 13696 - RNA, 19 nt, Artificial
  Chemically synthesized
gguucagaaaugcugccug

SEQ ID NO: 13697 - RNA, 19 nt, Artificial
  Chemically synthesized
ucuccuucuaccugagcag

SEQ ID NO: 13698 - RNA, 19 nt, Artificial
  Chemically synthesized
cacaaguucacguccaucc

SEQ ID NO: 13699 - RNA, 19 nt, Artificial
  Chemically synthesized
gaucuguuucgugcauugg

SEQ ID NO: 13700 - RNA, 19 nt, Artificial
  Chemically synthesized
cucuccaucuguuuggugg

SEQ ID NO: 13701 - RNA, 19 nt, Artificial
  Chemically synthesized
aggaccugauugccaaagg

SEQ ID NO: 13702 - RNA, 19 nt, Artificial
  Chemically synthesized
guacaacagcgacaagucc

SEQ ID NO: 13703 - RNA, 19 nt, Artificial
  Chemically synthesized
agcacagaucuguuucgug

SEQ ID NO: 13704 - RNA, 19 nt, Artificial
  Chemically synthesized
aacugcuggacaucgcuug

SEQ ID NO: 13705 - RNA, 19 nt, Artificial
  Chemically synthesized
caagcccgacuugcuguuu

SEQ ID NO: 13706 - RNA, 19 nt, Artificial
  Chemically synthesized
cagaaacagaggagagucc

SEQ ID NO: 13707 - RNA, 19 nt, Artificial
  Chemically synthesized
auccaccacaaguacaaca

SEQ ID NO: 13708 - RNA, 19 nt, Artificial
  Chemically synthesized
caaaggcuacaagcugucc

SEQ ID NO: 13709 - RNA, 19 nt, Artificial
  Chemically synthesized
cuucaugggcauggacauc

SEQ ID NO: 13710 - RNA, 19 nt, Artificial
  Chemically synthesized
aaggguucucuguccuacc

SEQ ID NO: 13711 - RNA, 19 nt, Artificial
  Chemically synthesized
guggaccagaacaucuucu

SEQ ID NO: 13712 - RNA, 19 nt, Artificial
  Chemically synthesized
caccacaaguacaacagcg

SEQ ID NO: 13713 - RNA, 19 nt, Artificial
  Chemically synthesized
guuucgugcauuggaagac

SEQ ID NO: 13714 - RNA, 19 nt, Artificial
  Chemically synthesized
ugugaggccauuguggaca

SEQ ID NO: 13715 - RNA, 19 nt, Artificial
  Chemically synthesized
ucuguggaggaccugauug

SEQ ID NO: 13716 - RNA, 19 nt, Artificial
  Chemically synthesized
uacauggacgcccaguacu

SEQ ID NO: 13717 - RNA, 19 nt, Artificial
  Chemically synthesized
accgugacaacaacagggu

SEQ ID NO: 13718 - RNA, 19 nt, Artificial
  Chemically synthesized
ucuccaucuguuugguggg

SEQ ID NO: 13719 - RNA, 19 nt, Artificial
  Chemically synthesized
caagaacuacauggacgcc

SEQ ID NO: 13720 - RNA, 19 nt, Artificial
  Chemically synthesized
aaacccaccuuguuggagc

SEQ ID NO: 13721 - RNA, 19 nt, Artificial
  Chemically synthesized
augagcuggaaggagugag

SEQ ID NO: 13722 - RNA, 19 nt, Artificial
  Chemically synthesized
cagagcacagaucuguuuc

SEQ ID NO: 13723 - RNA, 19 nt, Artificial
  Chemically synthesized
uugcuggauccaccacaag

SEQ ID NO: 13724 - RNA, 19 nt, Artificial
  Chemically synthesized
gugcucaagaacuacaugg

SEQ ID NO: 13725 - RNA, 19 nt, Artificial
  Chemically synthesized
cuucacagucgucuucgac

SEQ ID NO: 13726 - RNA, 19 nt, Artificial
  Chemically synthesized
aacaucuucuccuucuacc

SEQ ID NO: 13727 - RNA, 19 nt, Artificial
  Chemically synthesized
agagcacagaucuguuucg

SEQ ID NO: 13728 - RNA, 19 nt, Artificial
  Chemically synthesized
ggguucagaaaugcugccu

SEQ ID NO: 13729 - RNA, 19 nt, Artificial
  Chemically synthesized
aaguauuacaaggguucuc

SEQ ID NO: 13730 - RNA, 19 nt, Artificial
  Chemically synthesized
guucagaaaugcugccugc

SEQ ID NO: 13731 - RNA, 19 nt, Artificial
  Chemically synthesized
auuguggacacaggcacuu

SEQ ID NO: 13732 - RNA, 19 nt, Artificial
  Chemically synthesized
aucacacugaagcugggag

SEQ ID NO: 13733 - RNA, 19 nt, Artificial
  Chemically synthesized
uugcuguuuuguucugugg

SEQ ID NO: 13734 - RNA, 19 nt, Artificial
  Chemically synthesized
uacaaggguucucuguccu

SEQ ID NO: 13735 - RNA, 19 nt, Artificial
  Chemically synthesized
ugacauccacuauggcucg

SEQ ID NO: 13736 - RNA, 19 nt, Artificial
  Chemically synthesized
aagaaugguaccucguuug

SEQ ID NO: 13737 - RNA, 19 nt, Artificial
  Chemically synthesized
uuugacauccacuauggcu

SEQ ID NO: 13738 - RNA, 19 nt, Artificial
  Chemically synthesized
uuacaaggguucucugucc

SEQ ID NO: 13739 - RNA, 19 nt, Artificial
  Chemically synthesized
acaaaacccaccuuguugg

SEQ ID NO: 13740 - RNA, 19 nt, Artificial
  Chemically synthesized
uaccucguuugacauccac

SEQ ID NO: 13741 - RNA, 19 nt, Artificial
  Chemically synthesized
acccuaccuguucaguguc

SEQ ID NO: 13742 - RNA, 19 nt, Artificial
  Chemically synthesized
auguauuggccuggaggug

SEQ ID NO: 13743 - RNA, 19 nt, Artificial
  Chemically synthesized
aucgcagccaaguucgaug

SEQ ID NO: 13744 - RNA, 19 nt, Artificial
  Chemically synthesized
uggaccagaacaucuucuc

SEQ ID NO: 13745 - RNA, 19 nt, Artificial
  Chemically synthesized
aacuacauggacgcccagu

SEQ ID NO: 13746 - RNA, 19 nt, Artificial
  Chemically synthesized
gguaccucguuugacaucc

SEQ ID NO: 13747 - RNA, 19 nt, Artificial
  Chemically synthesized
gaggaccugauugccaaag

SEQ ID NO: 13748 - RNA, 19 nt, Artificial
  Chemically synthesized
uccaccacaaguacaacag

SEQ ID NO: 13749 - RNA, 19 nt, Artificial
  Chemically synthesized
acgugaagaaugguaccuc

SEQ ID NO: 13750 - RNA, 19 nt, Artificial
  Chemically synthesized
uuguggacacaggcacuuc

SEQ ID NO: 13751 - RNA, 19 nt, Artificial
  Chemically synthesized
auacaguuguuggccuccg

SEQ ID NO: 13752 - RNA, 19 nt, Artificial
  Chemically synthesized
uacuacacuguguuugacc

SEQ ID NO: 13753 - RNA, 19 nt, Artificial
  Chemically synthesized
cugauccagagcacagauc

SEQ ID NO: 13754 - RNA, 19 nt, Artificial
  Chemically synthesized
aucaccuucaucgcagcca

SEQ ID NO: 13755 - RNA, 19 nt, Artificial
  Chemically synthesized
auccagagcacagaucugu

SEQ ID NO: 13756 - RNA, 19 nt, Artificial
  Chemically synthesized
gucuucgacaaccugaugc

SEQ ID NO: 13757 - RNA, 19 nt, Artificial
  Chemically synthesized
uacgugaagaaugguaccu

SEQ ID NO: 13758 - RNA, 19 nt, Artificial
  Chemically synthesized
ugguaccucguuugacauc

SEQ ID NO: 13759 - RNA, 19 nt, Artificial
  Chemically synthesized
acuccaaguauuacaaggg

SEQ ID NO: 13760 - RNA, 19 nt, Artificial
  Chemically synthesized
uggguucagaaaugcugcc

SEQ ID NO: 13761 - RNA, 19 nt, Artificial
  Chemically synthesized
ugcuucacagucgucuucg

SEQ ID NO: 13762 - RNA, 19 nt, Artificial
  Chemically synthesized
uucaucgcagccaaguucg

SEQ ID NO: 13763 - RNA, 19 nt, Artificial
  Chemically synthesized
agaaacagaggagaguccc

SEQ ID NO: 13764 - RNA, 19 nt, Artificial
  Chemically synthesized
ucucuccaucuguuuggug

SEQ ID NO: 13765 - RNA, 19 nt, Artificial
  Chemically synthesized
guccuaccugaaugucacc

SEQ ID NO: 13766 - RNA, 19 nt, Artificial
  Chemically synthesized
uccauccacugcaaacugc

SEQ ID NO: 13767 - RNA, 19 nt, Artificial
  Chemically synthesized
aauacaguuguuggccucc

SEQ ID NO: 13768 - RNA, 19 nt, Artificial
  Chemically synthesized
aaccugaugcagcagaagc

SEQ ID NO: 13769 - RNA, 19 nt, Artificial
  Chemically synthesized
auuacaaggguucucuguc

SEQ ID NO: 13770 - RNA, 19 nt, Artificial
  Chemically synthesized
ugucucuccaucuguuugg

SEQ ID NO: 13771 - RNA, 19 nt, Artificial
  Chemically synthesized
ucccuggguucagaaaugc

SEQ ID NO: 13772 - RNA, 19 nt, Artificial
  Chemically synthesized
uuucgugcauuggaagacc

SEQ ID NO: 13773 - RNA, 19 nt, Artificial
  Chemically synthesized
uacacuguguuugaccgug

SEQ ID NO: 13774 - RNA, 19 nt, Artificial
  Chemically synthesized
ucucaaaguacucccaggc

SEQ ID NO: 13775 - RNA, 19 nt, Artificial
  Chemically synthesized
ugcaaacugcuggacaucg

SEQ ID NO: 13776 - RNA, 19 nt, Artificial
  Chemically synthesized
uugacauccacuauggcuc

SEQ ID NO: 13777 - RNA, 19 nt, Artificial
  Chemically synthesized
ucuguccuaccugaauguc

SEQ ID NO: 13778 - RNA, 19 nt, Artificial
  Chemically synthesized
aucuccgucaacaacgugc

SEQ ID NO: 13779 - RNA, 19 nt, Artificial
  Chemically synthesized
aaaggcuacaagcuguccc

SEQ ID NO: 13780 - RNA, 19 nt, Artificial
  Chemically synthesized
aaaacccaccuuguuggag

SEQ ID NO: 13781 - RNA, 19 nt, Artificial
  Chemically synthesized
cuucuccuucuaccugagc

SEQ ID NO: 13782 - RNA, 19 nt, Artificial
  Chemically synthesized
uucgugcauuggaagaccc

SEQ ID NO: 13783 - RNA, 19 nt, Artificial
  Chemically synthesized
uuuuguucugugguuuucc

SEQ ID NO: 13784 - RNA, 19 nt, Artificial
  Chemically synthesized
uuuguucugugguuuuccc

SEQ ID NO: 13785 - RNA, 19 nt, Artificial
  Chemically synthesized
uucgacaaccugaugcagc

SEQ ID NO: 13786 - RNA, 19 nt, Artificial
  Chemically synthesized
auccacugcaaacugcugg

SEQ ID NO: 13787 - RNA, 19 nt, Artificial
  Chemically synthesized
uucagaaaugcugccugcc

SEQ ID NO: 13788 - RNA, 19 nt, Artificial
  Chemically synthesized
aagaacuacauggacgccc

SEQ ID NO: 13789 - RNA, 19 nt, Artificial
  Chemically synthesized
uucaugggcauggacaucc

SEQ ID NO: 13790 - RNA, 19 nt, Artificial
  Chemically synthesized
uccuaccugaaugucaccc

SEQ ID NO: 13791 - RNA, 19 nt, Artificial
  Chemically synthesized
ucagguaggacagagaacc

SEQ ID NO: 13792 - RNA, 19 nt, Artificial
  Chemically synthesized
uuuggcaaucagguccucc

SEQ ID NO: 13793 - RNA, 19 nt, Artificial
  Chemically synthesized
uugucacggucaaacacag

SEQ ID NO: 13794 - RNA, 19 nt, Artificial
  Chemically synthesized
uuguugucacggucaaaca

SEQ ID NO: 13795 - RNA, 19 nt, Artificial
  Chemically synthesized
uugugguggauccagcaag

SEQ ID NO: 13796 - RNA, 19 nt, Artificial
  Chemically synthesized
guuguugucacggucaaac

SEQ ID NO: 13797 - RNA, 19 nt, Artificial
  Chemically synthesized
uuugccucccagcuucagu

SEQ ID NO: 13798 - RNA, 19 nt, Artificial
  Chemically synthesized
uugagcguguaguccucug

SEQ ID NO: 13799 - RNA, 19 nt, Artificial
  Chemically synthesized
ugccucuccacuuugacac

SEQ ID NO: 13800 - RNA, 19 nt, Artificial
  Chemically synthesized
uaguggaugucaaacgagg

SEQ ID NO: 13801 - RNA, 19 nt, Artificial
  Chemically synthesized
uuguaauacuuggagucug

SEQ ID NO: 13802 - RNA, 19 nt, Artificial
  Chemically synthesized
auguccaugcccaugaagc

SEQ ID NO: 13803 - RNA, 19 nt, Artificial
  Chemically synthesized
uuccaaugcacgaaacaga

SEQ ID NO: 13804 - RNA, 19 nt, Artificial
  Chemically synthesized
uuggcugcgaugaagguga

SEQ ID NO: 13805 - RNA, 19 nt, Artificial
  Chemically synthesized
uucugguccaccagcuucu

SEQ ID NO: 13806 - RNA, 19 nt, Artificial
  Chemically synthesized
ucaaacacaguguaguagc

SEQ ID NO: 13807 - RNA, 19 nt, Artificial
  Chemically synthesized
augccaucgaacuuggcug

SEQ ID NO: 13808 - RNA, 19 nt, Artificial
  Chemically synthesized
uucacguaggugcuggacu

SEQ ID NO: 13809 - RNA, 19 nt, Artificial
  Chemically synthesized
uagaaggagaagauguucu

SEQ ID NO: 13810 - RNA, 19 nt, Artificial
  Chemically synthesized
uuggcaaucagguccucca

SEQ ID NO: 13811 - RNA, 19 nt, Artificial
  Chemically synthesized
uucuucacguaggugcugg

SEQ ID NO: 13812 - RNA, 19 nt, Artificial
  Chemically synthesized
ucgaagacgacugugaagc

SEQ ID NO: 13813 - RNA, 19 nt, Artificial
  Chemically synthesized
uccucuguuucugugcugg

SEQ ID NO: 13814 - RNA, 19 nt, Artificial
  Chemically synthesized
aucugugcucuggaucagc

SEQ ID NO: 13815 - RNA, 19 nt, Artificial
  Chemically synthesized
uugcgggugacauucaggu

SEQ ID NO: 13816 - RNA, 19 nt, Artificial
  Chemically synthesized
guugucacggucaaacaca

SEQ ID NO: 13817 - RNA, 19 nt, Artificial
  Chemically synthesized
aaucagguccuccacagag

SEQ ID NO: 13818 - RNA, 19 nt, Artificial
  Chemically synthesized
ugggaguacuuugagacgg

SEQ ID NO: 13819 - RNA, 19 nt, Artificial
  Chemically synthesized
acagcuuguagccuuugcc

SEQ ID NO: 13820 - RNA, 19 nt, Artificial
  Chemically synthesized
aucagguugucgaagacgg

SEQ ID NO: 13821 - RNA, 19 nt, Artificial
  Chemically synthesized
uucagguaggacagagaac

SEQ ID NO: 13822 - RNA, 19 nt, Artificial
  Chemically synthesized
aacuuggcugcgaugaagg

SEQ ID NO: 13823 - RNA, 19 nt, Artificial
  Chemically synthesized
auguccagcaguuugcagu

SEQ ID NO: 13824 - RNA, 19 nt, Artificial
  Chemically synthesized
uguugucacggucaaacac

SEQ ID NO: 13825 - RNA, 19 nt, Artificial
  Chemically synthesized
ucucacuccuuccagcuca

SEQ ID NO: 13826 - RNA, 19 nt, Artificial
  Chemically synthesized
ucugggacucuccucuguu

SEQ ID NO: 13827 - RNA, 19 nt, Artificial
  Chemically synthesized
uugucgcuguuguacuugu

SEQ ID NO: 13828 - RNA, 19 nt, Artificial
  Chemically synthesized
uccuuccagcucauccuca

SEQ ID NO: 13829 - RNA, 19 nt, Artificial
  Chemically synthesized
ucgaacuuggcugcgauga

SEQ ID NO: 13830 - RNA, 19 nt, Artificial
  Chemically synthesized
ugggacucuccucuguuuc

SEQ ID NO: 13831 - RNA, 19 nt, Artificial
  Chemically synthesized
acaagguggguuuuguccc

SEQ ID NO: 13832 - RNA, 19 nt, Artificial
  Chemically synthesized
auguaguucuugagcaccu

SEQ ID NO: 13833 - RNA, 19 nt, Artificial
  Chemically synthesized
acuccuuccagcucauccu

SEQ ID NO: 13834 - RNA, 19 nt, Artificial
  Chemically synthesized
aacaagguggguuuugucc

SEQ ID NO: 13835 - RNA, 19 nt, Artificial
  Chemically synthesized
aacagauggagagacagac

SEQ ID NO: 13836 - RNA, 19 nt, Artificial
  Chemically synthesized
ugggcguccauguaguucu

SEQ ID NO: 13837 - RNA, 19 nt, Artificial
  Chemically synthesized
ugucgcuguuguacuugug

SEQ ID NO: 13838 - RNA, 19 nt, Artificial
  Chemically synthesized
augaaggugaugccuggcu

SEQ ID NO: 13839 - RNA, 19 nt, Artificial
  Chemically synthesized
ugacauucagguaggacag

SEQ ID NO: 13840 - RNA, 19 nt, Artificial
  Chemically synthesized
cuguauuuccaugucagcu

SEQ ID NO: 13841 - RNA, 19 nt, Artificial
  Chemically synthesized
aagaccugccucuccacuu

SEQ ID NO: 13842 - RNA, 19 nt, Artificial
  Chemically synthesized
auguacucgcccugaauca

SEQ ID NO: 13843 - RNA, 19 nt, Artificial
  Chemically synthesized
aaacacaguguaguagcgg

SEQ ID NO: 13844 - RNA, 19 nt, Artificial
  Chemically synthesized
uguaguucuugagcaccuc

SEQ ID NO: 13845 - RNA, 19 nt, Artificial
  Chemically synthesized
ugcugcaucagguugucga

SEQ ID NO: 13846 - RNA, 19 nt, Artificial
  Chemically synthesized
uguuguugucacggucaaa

SEQ ID NO: 13847 - RNA, 19 nt, Artificial
  Chemically synthesized
cuugucgcuguuguacuug

SEQ ID NO: 13848 - RNA, 19 nt, Artificial
  Chemically synthesized
accuugagcguguaguccu

SEQ ID NO: 13849 - RNA, 19 nt, Artificial
  Chemically synthesized
uuguagccuuugccuccca

SEQ ID NO: 13850 - RNA, 19 nt, Artificial
  Chemically synthesized
uaguagcggccgaugaaga

SEQ ID NO: 13851 - RNA, 19 nt, Artificial
  Chemically synthesized
aagacgacugugaagcacu

SEQ ID NO: 13852 - RNA, 19 nt, Artificial
  Chemically synthesized
uguccagcaguuugcagug

SEQ ID NO: 13853 - RNA, 19 nt, Artificial
  Chemically synthesized
ucuccucuguuucugugcu

SEQ ID NO: 13854 - RNA, 19 nt, Artificial
  Chemically synthesized
uguacucgcccugaaucag

SEQ ID NO: 13855 - RNA, 19 nt, Artificial
  Chemically synthesized
aaagaccugccucuccacu

SEQ ID NO: 13856 - RNA, 19 nt, Artificial
  Chemically synthesized
uguaauacuuggagucugu

SEQ ID NO: 13857 - RNA, 19 nt, Artificial
  Chemically synthesized
guaguucuugagcaccucg

SEQ ID NO: 13858 - RNA, 19 nt, Artificial
  Chemically synthesized
cucuccucuguuucugugc

SEQ ID NO: 13859 - RNA, 19 nt, Artificial
  Chemically synthesized
gaagauguucugguccacc

SEQ ID NO: 13860 - RNA, 19 nt, Artificial
  Chemically synthesized
aacacaguguaguagcggc

SEQ ID NO: 13861 - RNA, 19 nt, Artificial
  Chemically synthesized
auaguggaugucaaacgag

SEQ ID NO: 13862 - RNA, 19 nt, Artificial
  Chemically synthesized
acucuccucuguuucugug

SEQ ID NO: 13863 - RNA, 19 nt, Artificial
  Chemically synthesized
auggacgugaacuugugca

SEQ ID NO: 13864 - RNA, 19 nt, Artificial
  Chemically synthesized
agaacaaaacagcaagucg

SEQ ID NO: 13865 - RNA, 19 nt, Artificial
  Chemically synthesized
agugccuguguccacaaug

SEQ ID NO: 13866 - RNA, 19 nt, Artificial
  Chemically synthesized
caggaugccaucgaacuug

SEQ ID NO: 13867 - RNA, 19 nt, Artificial
  Chemically synthesized
gaacaaaacagcaagucgg

SEQ ID NO: 13868 - RNA, 19 nt, Artificial
  Chemically synthesized
ucauguacucgcccugaau

SEQ ID NO: 13869 - RNA, 19 nt, Artificial
  Chemically synthesized
guccauguaguucuugagc

SEQ ID NO: 13870 - RNA, 19 nt, Artificial
  Chemically synthesized
cauguacucgcccugaauc

SEQ ID NO: 13871 - RNA, 19 nt, Artificial
  Chemically synthesized
ucacuccuuccagcucauc

SEQ ID NO: 13872 - RNA, 19 nt, Artificial
  Chemically synthesized
acaggcaggcagcauuucu

SEQ ID NO: 13873 - RNA, 19 nt, Artificial
  Chemically synthesized
caaugcacgaaacagaucu

SEQ ID NO: 13874 - RNA, 19 nt, Artificial
  Chemically synthesized
cuuccaaugcacgaaacag

SEQ ID NO: 13875 - RNA, 19 nt, Artificial
  Chemically synthesized
ugcacgaaacagaucugug

SEQ ID NO: 13876 - RNA, 19 nt, Artificial
  Chemically synthesized
aaggagaagauguucuggu

SEQ ID NO: 13877 - RNA, 19 nt, Artificial
  Chemically synthesized
cgagguaccauucuucacg

SEQ ID NO: 13878 - RNA, 19 nt, Artificial
  Chemically synthesized
auguucugguccaccagcu

SEQ ID NO: 13879 - RNA, 19 nt, Artificial
  Chemically synthesized
augcacgaaacagaucugu

SEQ ID NO: 13880 - RNA, 19 nt, Artificial
  Chemically synthesized
aggccaacaacuguauuuc

SEQ ID NO: 13881 - RNA, 19 nt, Artificial
  Chemically synthesized
guaccauucuucacguagg

SEQ ID NO: 13882 - RNA, 19 nt, Artificial
  Chemically synthesized
ucuuccaaugcacgaaaca

SEQ ID NO: 13883 - RNA, 19 nt, Artificial
  Chemically synthesized
cauguaguucuugagcacc

SEQ ID NO: 13884 - RNA, 19 nt, Artificial
  Chemically synthesized
aacaaaacagcaagucggg

SEQ ID NO: 13885 - RNA, 19 nt, Artificial
  Chemically synthesized
auuucugaacccagggagg

SEQ ID NO: 13886 - RNA, 19 nt, Artificial
  Chemically synthesized
aacagaucugugcucugga

SEQ ID NO: 13887 - RNA, 19 nt, Artificial
  Chemically synthesized
ugucacggucaaacacagu

SEQ ID NO: 13888 - RNA, 19 nt, Artificial
  Chemically synthesized
aagcccacccuguuguugu

SEQ ID NO: 13889 - RNA, 19 nt, Artificial
  Chemically synthesized
uauuuccaugucagcuggg

SEQ ID NO: 13890 - RNA, 19 nt, Artificial
  Chemically synthesized
cuucugcugcaucagguug

SEQ ID NO: 13891 - RNA, 19 nt, Artificial
  Chemically synthesized
uacugggcguccauguagu

SEQ ID NO: 13892 - RNA, 19 nt, Artificial
  Chemically synthesized
auucuucacguaggugcug

SEQ ID NO: 13893 - RNA, 19 nt, Artificial
  Chemically synthesized
agcgauguccagcaguuug

SEQ ID NO: 13894 - RNA, 19 nt, Artificial
  Chemically synthesized
ucccagcuucagugugauc

SEQ ID NO: 13895 - RNA, 19 nt, Artificial
  Chemically synthesized
uaggacagagaacccuugu

SEQ ID NO: 13896 - RNA, 19 nt, Artificial
  Chemically synthesized
auggagagacagacaggca

SEQ ID NO: 13897 - RNA, 19 nt, Artificial
  Chemically synthesized
agaacccuuguaauacuug

SEQ ID NO: 13898 - RNA, 19 nt, Artificial
  Chemically synthesized
uccaacaagguggguuuug

SEQ ID NO: 13899 - RNA, 19 nt, Artificial
  Chemically synthesized
acauucagguaggacagag

SEQ ID NO: 13900 - RNA, 19 nt, Artificial
  Chemically synthesized
auccagcaagcgaugucca

SEQ ID NO: 13901 - RNA, 19 nt, Artificial
  Chemically synthesized
agcaguuugcaguggaugg

SEQ ID NO: 13902 - RNA, 19 nt, Artificial
  Chemically synthesized
uaccauucuucacguaggu

SEQ ID NO: 13903 - RNA, 19 nt, Artificial
  Chemically synthesized
ucacggucaaacacagugu

SEQ ID NO: 13904 - RNA, 19 nt, Artificial
  Chemically synthesized
uccauguaguucuugagca

SEQ ID NO: 13905 - RNA, 19 nt, Artificial
  Chemically synthesized
ccuguuguugucacgguca

SEQ ID NO: 13906 - RNA, 19 nt, Artificial
  Chemically synthesized
cagagaacccuuguaauac

SEQ ID NO: 13907 - RNA, 19 nt, Artificial
  Chemically synthesized
aaaaccacagaacaaaaca

SEQ ID NO: 13908 - RNA, 19 nt, Artificial
  Chemically synthesized
ucagguagaaggagaagau

SEQ ID NO: 13909 - RNA, 19 nt, Artificial
  Chemically synthesized
augagggaagugccugugu

SEQ ID NO: 13910 - RNA, 19 nt, Artificial
  Chemically synthesized
gucacggucaaacacagug

SEQ ID NO: 13911 - RNA, 19 nt, Artificial
  Chemically synthesized
aacuguauuuccaugucag

SEQ ID NO: 13912 - RNA, 19 nt, Artificial
  Chemically synthesized
uacuuggagucugugccac

SEQ ID NO: 13913 - RNA, 19 nt, Artificial
  Chemically synthesized
agguagaaggagaagaugu

SEQ ID NO: 13914 - RNA, 19 nt, Artificial
  Chemically synthesized
acaaaacagcaagucgggc

SEQ ID NO: 13915 - RNA, 19 nt, Artificial
  Chemically synthesized
acccuuguaauacuuggag

SEQ ID NO: 13916 - RNA, 19 nt, Artificial
  Chemically synthesized
ucugugcucuggaucagcu

SEQ ID NO: 13917 - RNA, 19 nt, Artificial
  Chemically synthesized
uguaguagcggccgaugaa

SEQ ID NO: 13918 - RNA, 19 nt, Artificial
  Chemically synthesized
aagauguucugguccacca

SEQ ID NO: 13919 - RNA, 19 nt, Artificial
  Chemically synthesized
auucagguaggacagagaa

SEQ ID NO: 13920 - RNA, 19 nt, Artificial
  Chemically synthesized
aguuugcaguggauggagg

SEQ ID NO: 13921 - RNA, 19 nt, Artificial
  Chemically synthesized
gugacauucagguaggaca

SEQ ID NO: 13922 - RNA, 19 nt, Artificial
  Chemically synthesized
aaaccacagaacaaaacag

SEQ ID NO: 13923 - RNA, 19 nt, Artificial
  Chemically synthesized
gucaaacgagguaccauuc

SEQ ID NO: 13924 - RNA, 19 nt, Artificial
  Chemically synthesized
agcauuucugaacccaggg

SEQ ID NO: 13925 - RNA, 19 nt, Artificial
  Chemically synthesized
aaacagaucugugcucugg

SEQ ID NO: 13926 - RNA, 19 nt, Artificial
  Chemically synthesized
agcuuguagccuuugccuc

SEQ ID NO: 13927 - RNA, 19 nt, Artificial
  Chemically synthesized
cuggacuugucgcuguugu

SEQ ID NO: 13928 - RNA, 19 nt, Artificial
  Chemically synthesized
acgagguaccauucuucac

SEQ ID NO: 13929 - RNA, 19 nt, Artificial
  Chemically synthesized
aaugcacgaaacagaucug

SEQ ID NO: 13930 - RNA, 19 nt, Artificial
  Chemically synthesized
agauggagagacagacagg

SEQ ID NO: 13931 - RNA, 19 nt, Artificial
  Chemically synthesized
guaggacagagaacccuug

SEQ ID NO: 13932 - RNA, 19 nt, Artificial
  Chemically synthesized
accuccaggccaauacaug

SEQ ID NO: 13933 - RNA, 19 nt, Artificial
  Chemically synthesized
aacagaggucagcugcaga

SEQ ID NO: 13934 - RNA, 19 nt, Artificial
  Chemically synthesized
aucgaacuuggcugcgaug

SEQ ID NO: 13935 - RNA, 19 nt, Artificial
  Chemically synthesized
gguaccauucuucacguag

SEQ ID NO: 13936 - RNA, 19 nt, Artificial
  Chemically synthesized
aggacaacagaggucagcu

SEQ ID NO: 13937 - RNA, 19 nt, Artificial
  Chemically synthesized
ucgcuguuguacuuguggu

SEQ ID NO: 13938 - RNA, 19 nt, Artificial
  Chemically synthesized
uggacgugaacuugugcag

SEQ ID NO: 13939 - RNA, 19 nt, Artificial
  Chemically synthesized
gucgcuguuguacuugugg

SEQ ID NO: 13940 - RNA, 19 nt, Artificial
  Chemically synthesized
aguggaugucaaacgaggu

SEQ ID NO: 13941 - RNA, 19 nt, Artificial
  Chemically synthesized
cagauggagagacagacag

SEQ ID NO: 13942 - RNA, 19 nt, Artificial
  Chemically synthesized
acuguauuuccaugucagc

SEQ ID NO: 13943 - RNA, 19 nt, Artificial
  Chemically synthesized
cugccucuccacuuugaca

SEQ ID NO: 13944 - RNA, 19 nt, Artificial
  Chemically synthesized
cuccucuguuucugugcug

SEQ ID NO: 13945 - RNA, 19 nt, Artificial
  Chemically synthesized
guuguacuugugguggauc

SEQ ID NO: 13946 - RNA, 19 nt, Artificial
  Chemically synthesized
ucacguaggugcuggacuu

SEQ ID NO: 13947 - RNA, 19 nt, Artificial
  Chemically synthesized
guaauacuuggagucugug

SEQ ID NO: 13948 - RNA, 19 nt, Artificial
  Chemically synthesized
cacagaacaaaacagcaag

SEQ ID NO: 13949 - RNA, 19 nt, Artificial
  Chemically synthesized
aucauguacucgcccugaa

SEQ ID NO: 13950 - RNA, 19 nt, Artificial
  Chemically synthesized
acaacuguauuuccauguc

SEQ ID NO: 13951 - RNA, 19 nt, Artificial
  Chemically synthesized
accagcuucugcugcauca

SEQ ID NO: 13952 - RNA, 19 nt, Artificial
  Chemically synthesized
ugcgaugaaggugaugccu

SEQ ID NO: 13953 - RNA, 19 nt, Artificial
  Chemically synthesized
uggauccagcaagcgaugu

SEQ ID NO: 13954 - RNA, 19 nt, Artificial
  Chemically synthesized
accacagaacaaaacagca

SEQ ID NO: 13955 - RNA, 19 nt, Artificial
  Chemically synthesized
agacgacugugaagcacug

SEQ ID NO: 13956 - RNA, 19 nt, Artificial
  Chemically synthesized
cuuguaauacuuggagucu

SEQ ID NO: 13957 - RNA, 19 nt, Artificial
  Chemically synthesized
acagauggagagacagaca

SEQ ID NO: 13958 - RNA, 19 nt, Artificial
  Chemically synthesized
acuugugguggauccagca

SEQ ID NO: 13959 - RNA, 19 nt, Artificial
  Chemically synthesized
uguacuugugguggaucca

SEQ ID NO: 13960 - RNA, 19 nt, Artificial
  Chemically synthesized
uccagcaguuugcagugga

SEQ ID NO: 13961 - RNA, 19 nt, Artificial
  Chemically synthesized
acggucaaacacaguguag

SEQ ID NO: 13962 - RNA, 19 nt, Artificial
  Chemically synthesized
ugcaucagguugucgaaga

SEQ ID NO: 13963 - RNA, 19 nt, Artificial
  Chemically synthesized
cagcaguuugcaguggaug

SEQ ID NO: 13964 - RNA, 19 nt, Artificial
  Chemically synthesized
cagcuuguagccuuugccu

SEQ ID NO: 13965 - RNA, 19 nt, Artificial
  Chemically synthesized
cagaucugugcucuggauc

SEQ ID NO: 13966 - RNA, 19 nt, Artificial
  Chemically synthesized
uguucugguccaccagcuu

SEQ ID NO: 13967 - RNA, 19 nt, Artificial
  Chemically synthesized
uggacuugucgcuguugua

SEQ ID NO: 13968 - RNA, 19 nt, Artificial
  Chemically synthesized
aaacagauggagagacaga

SEQ ID NO: 13969 - RNA, 19 nt, Artificial
  Chemically synthesized
agcuucugcugcaucaggu

SEQ ID NO: 13970 - RNA, 19 nt, Artificial
  Chemically synthesized
caacaacuguauuuccaug

SEQ ID NO: 13971 - RNA, 19 nt, Artificial
  Chemically synthesized
gucaaacacaguguaguag

SEQ ID NO: 13972 - RNA, 19 nt, Artificial
  Chemically synthesized
cagcauuucugaacccagg

SEQ ID NO: 13973 - RNA, 19 nt, Artificial
  Chemically synthesized
acguaggugcuggacuugu

SEQ ID NO: 13974 - RNA, 19 nt, Artificial
  Chemically synthesized
gacagcuuguagccuuugc

SEQ ID NO: 13975 - RNA, 19 nt, Artificial
  Chemically synthesized
ugaacuugugcagcgggau

SEQ ID NO: 13976 - RNA, 19 nt, Artificial
  Chemically synthesized
caucagguugucgaagacg

SEQ ID NO: 13977 - RNA, 19 nt, Artificial
  Chemically synthesized
aggagaagauguucugguc

SEQ ID NO: 13978 - RNA, 19 nt, Artificial
  Chemically synthesized
acaacagaggucagcugca

SEQ ID NO: 13979 - RNA, 19 nt, Artificial
  Chemically synthesized
ucugcugcaucagguuguc

SEQ ID NO: 13980 - RNA, 19 nt, Artificial
  Chemically synthesized
ccugggaguacuuugagac

SEQ ID NO: 13981 - RNA, 19 nt, Artificial
  Chemically synthesized
cggauggacgugaacuugu

SEQ ID NO: 13982 - RNA, 19 nt, Artificial
  Chemically synthesized
agaaggagaagauguucug

SEQ ID NO: 13983 - RNA, 19 nt, Artificial
  Chemically synthesized
guacuugugguggauccag

SEQ ID NO: 13984 - RNA, 19 nt, Artificial
  Chemically synthesized
agaccugccucuccacuuu

SEQ ID NO: 13985 - RNA, 19 nt, Artificial
  Chemically synthesized
cuugagcguguaguccucu

SEQ ID NO: 13986 - RNA, 19 nt, Artificial
  Chemically synthesized
acagagaacccuuguaaua

SEQ ID NO: 13987 - RNA, 19 nt, Artificial
  Chemically synthesized
ugcgggugacauucaggua

SEQ ID NO: 13988 - RNA, 19 nt, Artificial
  Chemically synthesized
gcuguuguacuuguggugg

SEQ ID NO: 13989 - RNA, 19 nt, Artificial
  Chemically synthesized
acuugucgcuguuguacuu

SEQ ID NO: 13990 - RNA, 19 nt, Artificial
  Chemically synthesized
cauuucugaacccagggag

SEQ ID NO: 13991 - RNA, 19 nt, Artificial
  Chemically synthesized
agacaggcaggcagcauuu

SEQ ID NO: 13992 - RNA, 19 nt, Artificial
  Chemically synthesized
cugggaguacuuugagacg

SEQ ID NO: 13993 - RNA, 19 nt, Artificial
  Chemically synthesized
accugccucuccacuuuga

SEQ ID NO: 13994 - RNA, 19 nt, Artificial
  Chemically synthesized
acaccuugagcguguaguc

SEQ ID NO: 13995 - RNA, 19 nt, Artificial
  Chemically synthesized
gugucgaagacgacuguga

SEQ ID NO: 13996 - RNA, 19 nt, Artificial
  Chemically synthesized
agaucugugcucuggauca

SEQ ID NO: 13997 - RNA, 19 nt, Artificial
  Chemically synthesized
augucaaacgagguaccau

SEQ ID NO: 13998 - RNA, 19 nt, Artificial
  Chemically synthesized
ucuucacguaggugcugga

SEQ ID NO: 13999 - RNA, 19 nt, Artificial
  Chemically synthesized
aggaugccaucgaacuugg

SEQ ID NO: 14000 - RNA, 19 nt, Artificial
  Chemically synthesized
agagaacccuuguaauacu

SEQ ID NO: 14001 - RNA, 19 nt, Artificial
  Chemically synthesized
gaucauguacucgcccuga

SEQ ID NO: 14002 - RNA, 19 nt, Artificial
  Chemically synthesized
gaaggagaagauguucugg

SEQ ID NO: 14003 - RNA, 19 nt, Artificial
  Chemically synthesized
caaaacagcaagucgggcu

SEQ ID NO: 14004 - RNA, 19 nt, Artificial
  Chemically synthesized
ugucgaagacgacugugaa

SEQ ID NO: 14005 - RNA, 19 nt, Artificial
  Chemically synthesized
acagaacaaaacagcaagu

SEQ ID NO: 14006 - RNA, 19 nt, Artificial
  Chemically synthesized
cagaacaaaacagcaaguc

SEQ ID NO: 14007 - RNA, 19 nt, Artificial
  Chemically synthesized
caaacagauggagagacag

SEQ ID NO: 14008 - RNA, 19 nt, Artificial
  Chemically synthesized
uguguccacaauggccuca

SEQ ID NO: 14009 - RNA, 19 nt, Artificial
  Chemically synthesized
aagcgauguccagcaguuu

SEQ ID NO: 14010 - RNA, 19 nt, Artificial
  Chemically synthesized
ugcucuggaucagcucuac

SEQ ID NO: 14011 - RNA, 19 nt, Artificial
  Chemically synthesized
agcacguuguugacggaga

SEQ ID NO: 14012 - RNA, 19 nt, Artificial
  Chemically synthesized
ucuugagcaccucgggaau

SEQ ID NO: 14013 - RNA, 19 nt, Artificial
  Chemically synthesized
cauaguggaugucaaacga

SEQ ID NO: 14014 - RNA, 19 nt, Artificial
  Chemically synthesized
acgaaacagaucugugcuc

SEQ ID NO: 14015 - RNA, 19 nt, Artificial
  Chemically synthesized
cguccauguaguucuugag

SEQ ID NO: 14016 - RNA, 19 nt, Artificial
  Chemically synthesized
gaacccuuguaauacuugg

SEQ ID NO: 14017 - RNA, 19 nt, Artificial
  Chemically synthesized
caguuugcaguggauggag

SEQ ID NO: 14018 - RNA, 19 nt, Artificial
  Chemically synthesized
cucagguagaaggagaaga

SEQ ID NO: 14019 - RNA, 19 nt, Artificial
  Chemically synthesized
ugcucagguagaaggagaa

SEQ ID NO: 14020 - RNA, 19 nt, Artificial
  Chemically synthesized
accauucuucacguaggug

SEQ ID NO: 14021 - RNA, 19 nt, Artificial
  Chemically synthesized
agguaggacagagaacccu

SEQ ID NO: 14022 - RNA, 19 nt, Artificial
  Chemically synthesized
ggagaagauguucuggucc

SEQ ID NO: 14023 - RNA, 19 nt, Artificial
  Chemically synthesized
gccaacaacuguauuucca

SEQ ID NO: 14024 - RNA, 19 nt, Artificial
  Chemically synthesized
gcagcauuucugaacccag

SEQ ID NO: 14025 - RNA, 19 nt, Artificial
  Chemically synthesized
gcacgaaacagaucugugc

SEQ ID NO: 14026 - RNA, 19 nt, Artificial
  Chemically synthesized
guauuuccaugucagcugg

SEQ ID NO: 14027 - RNA, 19 nt, Artificial
  Chemically synthesized
gaugccaucgaacuuggcu

SEQ ID NO: 14028 - RNA, 19 nt, Artificial
  Chemically synthesized
ccuuguaauacuuggaguc

SEQ ID NO: 14029 - RNA, 19 nt, Artificial
  Chemically synthesized
aacccuuguaauacuugga

SEQ ID NO: 14030 - RNA, 19 nt, Artificial
  Chemically synthesized
gcguccauguaguucuuga

SEQ ID NO: 14031 - RNA, 19 nt, Artificial
  Chemically synthesized
aaaacagcaagucgggcuu

SEQ ID NO: 14032 - RNA, 19 nt, Artificial
  Chemically synthesized
acuuggcugcgaugaaggu

SEQ ID NO: 14033 - RNA, 19 nt, Artificial
  Chemically synthesized
cauucuucacguaggugcu

SEQ ID NO: 14034 - RNA, 19 nt, Artificial
  Chemically synthesized
ugcuggacuugucgcuguu

SEQ ID NO: 14035 - RNA, 19 nt, Artificial
  Chemically synthesized
caacaagguggguuuuguc

SEQ ID NO: 14036 - RNA, 19 nt, Artificial
  Chemically synthesized
gugcucuggaucagcucua

SEQ ID NO: 14037 - RNA, 19 nt, Artificial
  Chemically synthesized
accaaacagauggagagac

SEQ ID NO: 14038 - RNA, 19 nt, Artificial
  Chemically synthesized
cugggacucuccucuguuu

SEQ ID NO: 14039 - RNA, 19 nt, Artificial
  Chemically synthesized
agauguucugguccaccag

SEQ ID NO: 14040 - RNA, 19 nt, Artificial
  Chemically synthesized
cggucaaacacaguguagu

SEQ ID NO: 14041 - RNA, 19 nt, Artificial
  Chemically synthesized
cugcaucagguugucgaag

SEQ ID NO: 14042 - RNA, 19 nt, Artificial
  Chemically synthesized
gaggccaacaacuguauuu

SEQ ID NO: 14043 - RNA, 19 nt, Artificial
  Chemically synthesized
ccaacaacuguauuuccau

SEQ ID NO: 14044 - RNA, 19 nt, Artificial
  Chemically synthesized
gacuugucgcuguuguacu

SEQ ID NO: 14045 - RNA, 19 nt, Artificial
  Chemically synthesized
gauggacgugaacuugugc

SEQ ID NO: 14046 - RNA, 19 nt, Artificial
  Chemically synthesized
ccaggaugccaucgaacuu

SEQ ID NO: 14047 - RNA, 19 nt, Artificial
  Chemically synthesized
cagguagaaggagaagaug

SEQ ID NO: 14048 - RNA, 19 nt, Artificial
  Chemically synthesized
gauguccagcaguuugcag

SEQ ID NO: 14049 - RNA, 19 nt, Artificial
  Chemically synthesized
gacucuccucuguuucugu

SEQ ID NO: 14050 - RNA, 19 nt, Artificial
  Chemically synthesized
gaaaaccacagaacaaaac

SEQ ID NO: 14051 - RNA, 19 nt, Artificial
  Chemically synthesized
cuguuguugucacggucaa

SEQ ID NO: 14052 - RNA, 19 nt, Artificial
  Chemically synthesized
caaacacaguguaguagcg

SEQ ID NO: 14053 - RNA, 19 nt, Artificial
  Chemically synthesized
gacaccuugagcguguagu

SEQ ID NO: 14054 - RNA, 19 nt, Artificial
  Chemically synthesized
cacguuguugacggagaug

SEQ ID NO: 14055 - RNA, 19 nt, Artificial
  Chemically synthesized
gccauaguggaugucaaac

SEQ ID NO: 14056 - RNA, 19 nt, Artificial
  Chemically synthesized
ggccaacaacuguauuucc

SEQ ID NO: 14057 - RNA, 19 nt, Artificial
  Chemically synthesized
aggcaggcagcauuucuga

SEQ ID NO: 14058 - RNA, 19 nt, Artificial
  Chemically synthesized
caggcagcauuucugaacc

SEQ ID NO: 14059 - RNA, 19 nt, Artificial
  Chemically synthesized
cugcucagguagaaggaga

SEQ ID NO: 14060 - RNA, 19 nt, Artificial
  Chemically synthesized
ggauggacgugaacuugug

SEQ ID NO: 14061 - RNA, 19 nt, Artificial
  Chemically synthesized
ccaaugcacgaaacagauc

SEQ ID NO: 14062 - RNA, 19 nt, Artificial
  Chemically synthesized
ccaccaaacagauggagag

SEQ ID NO: 14063 - RNA, 19 nt, Artificial
  Chemically synthesized
ccuuuggcaaucagguccu

SEQ ID NO: 14064 - RNA, 19 nt, Artificial
  Chemically synthesized
ggacuugucgcuguuguac

SEQ ID NO: 14065 - RNA, 19 nt, Artificial
  Chemically synthesized
cacgaaacagaucugugcu

SEQ ID NO: 14066 - RNA, 19 nt, Artificial
  Chemically synthesized
caagcgauguccagcaguu

SEQ ID NO: 14067 - RNA, 19 nt, Artificial
  Chemically synthesized
aaacagcaagucgggcuug

SEQ ID NO: 14068 - RNA, 19 nt, Artificial
  Chemically synthesized
ggacucuccucuguuucug

SEQ ID NO: 14069 - RNA, 19 nt, Artificial
  Chemically synthesized
uguuguacuugugguggau

SEQ ID NO: 14070 - RNA, 19 nt, Artificial
  Chemically synthesized
ggacagcuuguagccuuug

SEQ ID NO: 14071 - RNA, 19 nt, Artificial
  Chemically synthesized
gauguccaugcccaugaag

SEQ ID NO: 14072 - RNA, 19 nt, Artificial
  Chemically synthesized
gguaggacagagaacccuu

SEQ ID NO: 14073 - RNA, 19 nt, Artificial
  Chemically synthesized
agaagauguucugguccac

SEQ ID NO: 14074 - RNA, 19 nt, Artificial
  Chemically synthesized
cgcuguuguacuuguggug

SEQ ID NO: 14075 - RNA, 19 nt, Artificial
  Chemically synthesized
gucuuccaaugcacgaaac

SEQ ID NO: 14076 - RNA, 19 nt, Artificial
  Chemically synthesized
uguccacaauggccucaca

SEQ ID NO: 14077 - RNA, 19 nt, Artificial
  Chemically synthesized
caaucagguccuccacaga

SEQ ID NO: 14078 - RNA, 19 nt, Artificial
  Chemically synthesized
aguacugggcguccaugua

SEQ ID NO: 14079 - RNA, 19 nt, Artificial
  Chemically synthesized
acccuguuguugucacggu

SEQ ID NO: 14080 - RNA, 19 nt, Artificial
  Chemically synthesized
cccaccaaacagauggaga

SEQ ID NO: 14081 - RNA, 19 nt, Artificial
  Chemically synthesized
ggcguccauguaguucuug

SEQ ID NO: 14082 - RNA, 19 nt, Artificial
  Chemically synthesized
gcuccaacaagguggguuu

SEQ ID NO: 14083 - RNA, 19 nt, Artificial
  Chemically synthesized
cucacuccuuccagcucau

SEQ ID NO: 14084 - RNA, 19 nt, Artificial
  Chemically synthesized
gaaacagaucugugcucug

SEQ ID NO: 14085 - RNA, 19 nt, Artificial
  Chemically synthesized
cuugugguggauccagcaa

SEQ ID NO: 14086 - RNA, 19 nt, Artificial
  Chemically synthesized
ccauguaguucuugagcac

SEQ ID NO: 14087 - RNA, 19 nt, Artificial
  Chemically synthesized
gucgaagacgacugugaag

SEQ ID NO: 14088 - RNA, 19 nt, Artificial
  Chemically synthesized
gguagaaggagaagauguu

SEQ ID NO: 14089 - RNA, 19 nt, Artificial
  Chemically synthesized
cgaaacagaucugugcucu

SEQ ID NO: 14090 - RNA, 19 nt, Artificial
  Chemically synthesized
aggcagcauuucugaaccc

SEQ ID NO: 14091 - RNA, 19 nt, Artificial
  Chemically synthesized
gagaacccuuguaauacuu

SEQ ID NO: 14092 - RNA, 19 nt, Artificial
  Chemically synthesized
gcaggcagcauuucugaac

SEQ ID NO: 14093 - RNA, 19 nt, Artificial
  Chemically synthesized
aagugccuguguccacaau

SEQ ID NO: 14094 - RNA, 19 nt, Artificial
  Chemically synthesized
cucccagcuucagugugau

SEQ ID NO: 14095 - RNA, 19 nt, Artificial
  Chemically synthesized
ccacagaacaaaacagcaa

SEQ ID NO: 14096 - RNA, 19 nt, Artificial
  Chemically synthesized
aggacagagaacccuugua

SEQ ID NO: 14097 - RNA, 19 nt, Artificial
  Chemically synthesized
cgagccauaguggauguca

SEQ ID NO: 14098 - RNA, 19 nt, Artificial
  Chemically synthesized
caaacgagguaccauucuu

SEQ ID NO: 14099 - RNA, 19 nt, Artificial
  Chemically synthesized
agccauaguggaugucaaa

SEQ ID NO: 14100 - RNA, 19 nt, Artificial
  Chemically synthesized
ggacagagaacccuuguaa

SEQ ID NO: 14101 - RNA, 19 nt, Artificial
  Chemically synthesized
ccaacaagguggguuuugu

SEQ ID NO: 14102 - RNA, 19 nt, Artificial
  Chemically synthesized
guggaugucaaacgaggua

SEQ ID NO: 14103 - RNA, 19 nt, Artificial
  Chemically synthesized
gacacugaacagguagggu

SEQ ID NO: 14104 - RNA, 19 nt, Artificial
  Chemically synthesized
caccuccaggccaauacau

SEQ ID NO: 14105 - RNA, 19 nt, Artificial
  Chemically synthesized
caucgaacuuggcugcgau

SEQ ID NO: 14106 - RNA, 19 nt, Artificial
  Chemically synthesized
gagaagauguucuggucca

SEQ ID NO: 14107 - RNA, 19 nt, Artificial
  Chemically synthesized
acugggcguccauguaguu

SEQ ID NO: 14108 - RNA, 19 nt, Artificial
  Chemically synthesized
ggaugucaaacgagguacc

SEQ ID NO: 14109 - RNA, 19 nt, Artificial
  Chemically synthesized
cuuuggcaaucagguccuc

SEQ ID NO: 14110 - RNA, 19 nt, Artificial
  Chemically synthesized
cuguuguacuuguggugga

SEQ ID NO: 14111 - RNA, 19 nt, Artificial
  Chemically synthesized
gagguaccauucuucacgu

SEQ ID NO: 14112 - RNA, 19 nt, Artificial
  Chemically synthesized
gaagugccuguguccacaa

SEQ ID NO: 14113 - RNA, 19 nt, Artificial
  Chemically synthesized
cggaggccaacaacuguau

SEQ ID NO: 14114 - RNA, 19 nt, Artificial
  Chemically synthesized
ggucaaacacaguguagua

SEQ ID NO: 14115 - RNA, 19 nt, Artificial
  Chemically synthesized
gaucugugcucuggaucag

SEQ ID NO: 14116 - RNA, 19 nt, Artificial
  Chemically synthesized
uggcugcgaugaaggugau

SEQ ID NO: 14117 - RNA, 19 nt, Artificial
  Chemically synthesized
acagaucugugcucuggau

SEQ ID NO: 14118 - RNA, 19 nt, Artificial
  Chemically synthesized
gcaucagguugucgaagac

SEQ ID NO: 14119 - RNA, 19 nt, Artificial
  Chemically synthesized
agguaccauucuucacgua

SEQ ID NO: 14120 - RNA, 19 nt, Artificial
  Chemically synthesized
gaugucaaacgagguacca

SEQ ID NO: 14121 - RNA, 19 nt, Artificial
  Chemically synthesized
cccuuguaauacuuggagu

SEQ ID NO: 14122 - RNA, 19 nt, Artificial
  Chemically synthesized
ggcagcauuucugaaccca

SEQ ID NO: 14123 - RNA, 19 nt, Artificial
  Chemically synthesized
cgaagacgacugugaagca

SEQ ID NO: 14124 - RNA, 19 nt, Artificial
  Chemically synthesized
cgaacuuggcugcgaugaa

SEQ ID NO: 14125 - RNA, 19 nt, Artificial
  Chemically synthesized
gggacucuccucuguuucu

SEQ ID NO: 14126 - RNA, 19 nt, Artificial
  Chemically synthesized
caccaaacagauggagaga

SEQ ID NO: 14127 - RNA, 19 nt, Artificial
  Chemically synthesized
ggugacauucagguaggac

SEQ ID NO: 14128 - RNA, 19 nt, Artificial
  Chemically synthesized
gcaguuugcaguggaugga

SEQ ID NO: 14129 - RNA, 19 nt, Artificial
  Chemically synthesized
ggaggccaacaacuguauu

SEQ ID NO: 14130 - RNA, 19 nt, Artificial
  Chemically synthesized
gcuucugcugcaucagguu

SEQ ID NO: 14131 - RNA, 19 nt, Artificial
  Chemically synthesized
gacagagaacccuuguaau

SEQ ID NO: 14132 - RNA, 19 nt, Artificial
  Chemically synthesized
ccaaacagauggagagaca

SEQ ID NO: 14133 - RNA, 19 nt, Artificial
  Chemically synthesized
gcauuucugaacccaggga

SEQ ID NO: 14134 - RNA, 19 nt, Artificial
  Chemically synthesized
ggucuuccaaugcacgaaa

SEQ ID NO: 14135 - RNA, 19 nt, Artificial
  Chemically synthesized
cacggucaaacacagugua

SEQ ID NO: 14136 - RNA, 19 nt, Artificial
  Chemically synthesized
gccugggaguacuuugaga

SEQ ID NO: 14137 - RNA, 19 nt, Artificial
  Chemically synthesized
cgauguccagcaguuugca

SEQ ID NO: 14138 - RNA, 19 nt, Artificial
  Chemically synthesized
gagccauaguggaugucaa

SEQ ID NO: 14139 - RNA, 19 nt, Artificial
  Chemically synthesized
gacauucagguaggacaga

SEQ ID NO: 14140 - RNA, 19 nt, Artificial
  Chemically synthesized
gcacguuguugacggagau

SEQ ID NO: 14141 - RNA, 19 nt, Artificial
  Chemically synthesized
gggacagcuuguagccuuu

SEQ ID NO: 14142 - RNA, 19 nt, Artificial
  Chemically synthesized
cuccaacaagguggguuuu

SEQ ID NO: 14143 - RNA, 19 nt, Artificial
  Chemically synthesized
gcucagguagaaggagaag

SEQ ID NO: 14144 - RNA, 19 nt, Artificial
  Chemically synthesized
gggucuuccaaugcacgaa

SEQ ID NO: 14145 - RNA, 19 nt, Artificial
  Chemically synthesized
ggaaaaccacagaacaaaa

SEQ ID NO: 14146 - RNA, 19 nt, Artificial
  Chemically synthesized
gggaaaaccacagaacaaa

SEQ ID NO: 14147 - RNA, 19 nt, Artificial
  Chemically synthesized
gcugcaucagguugucgaa

SEQ ID NO: 14148 - RNA, 19 nt, Artificial
  Chemically synthesized
ccagcaguuugcaguggau

SEQ ID NO: 14149 - RNA, 19 nt, Artificial
  Chemically synthesized
ggcaggcagcauuucugaa

SEQ ID NO: 14150 - RNA, 19 nt, Artificial
  Chemically synthesized
gggcguccauguaguucuu

SEQ ID NO: 14151 - RNA, 19 nt, Artificial
  Chemically synthesized
ggauguccaugcccaugaa

SEQ ID NO: 14152 - RNA, 19 nt, Artificial
  Chemically synthesized
gggugacauucagguagga

SEQ ID NO: 14153 - RNA, 21 nt, artificial
  Chemically synthesized
uguuugaccgugacaacaaca

SEQ ID NO: 14154 - RNA, 21 nt, artificial
  Chemically synthesized
gcuggauccaccacaaguaca

SEQ ID NO: 14155 - RNA, 21 nt, artificial
  Chemically synthesized
uguguuugaccgugacaacaa

SEQ ID NO: 14156 - RNA, 21 nt, artificial
  Chemically synthesized
gcugauucagggcgaguacau

SEQ ID NO: 14157 - RNA, 21 nt, artificial
  Chemically synthesized
cgaggugcucaagaacuacau

SEQ ID NO: 14158 - RNA, 21 nt, artificial
  Chemically synthesized
acacugaagcugggaggcaaa

SEQ ID NO: 14159 - RNA, 21 nt, artificial
  Chemically synthesized
gguucucuguccuaccugaau

SEQ ID NO: 14160 - RNA, 21 nt, artificial
  Chemically synthesized
uguggaggaccugauugccaa

SEQ ID NO: 14161 - RNA, 21 nt, artificial
  Chemically synthesized
gcacagacuccaaguauuaca

SEQ ID NO: 14162 - RNA, 21 nt, artificial
  Chemically synthesized
ggauccaccacaaguacaaca

SEQ ID NO: 14163 - RNA, 21 nt, artificial
  Chemically synthesized
cacuguguuugaccgugacaa

SEQ ID NO: 14164 - RNA, 21 nt, artificial
  Chemically synthesized
guggaggaccugauugccaaa

SEQ ID NO: 14165 - RNA, 21 nt, artificial
  Chemically synthesized
ggguucucuguccuaccugaa

SEQ ID NO: 14166 - RNA, 21 nt, artificial
  Chemically synthesized
agaucuguuucgugcauugga

SEQ ID NO: 14167 - RNA, 21 nt, artificial
  Chemically synthesized
ucuucaucggccgcuacuaca

SEQ ID NO: 14168 - RNA, 21 nt, artificial
  Chemically synthesized
gauucagggcgaguacaugau

SEQ ID NO: 14169 - RNA, 21 nt, artificial
  Chemically synthesized
cacagacuccaaguauuacaa

SEQ ID NO: 14170 - RNA, 21 nt, artificial
  Chemically synthesized
cgacaaccugaugcagcagaa

SEQ ID NO: 14171 - RNA, 21 nt, artificial
  Chemically synthesized
gaucuguuucgugcauuggaa

SEQ ID NO: 14172 - RNA, 21 nt, artificial
  Chemically synthesized
cuguguuugaccgugacaaca

SEQ ID NO: 14173 - RNA, 21 nt, artificial
  Chemically synthesized
gcaccuacgugaagaauggua

SEQ ID NO: 14174 - RNA, 21 nt, artificial
  Chemically synthesized
ccgcuacuacacuguguuuga

SEQ ID NO: 14175 - RNA, 21 nt, artificial
  Chemically synthesized
gaaacagaggagagucccaga

SEQ ID NO: 14176 - RNA, 21 nt, artificial
  Chemically synthesized
cgugaagaaugguaccucguu

SEQ ID NO: 14177 - RNA, 21 nt, artificial
  Chemically synthesized
acaucuucuccuucuaccuga

SEQ ID NO: 14178 - RNA, 21 nt, artificial
  Chemically synthesized
gcuucacagucgucuucgaca

SEQ ID NO: 14179 - RNA, 21 nt, artificial
  Chemically synthesized
caaaguggagaggcaggucuu

SEQ ID NO: 14180 - RNA, 21 nt, artificial
  Chemically synthesized
gcuguuuuguucugugguuuu

SEQ ID NO: 14181 - RNA, 21 nt, artificial
  Chemically synthesized
aguacaacagcgacaagucca

SEQ ID NO: 14182 - RNA, 21 nt, artificial
  Chemically synthesized
cuucaucgcagccaaguucga

SEQ ID NO: 14183 - RNA, 21 nt, artificial
  Chemically synthesized
ccaccacaaguacaacagcga

SEQ ID NO: 14184 - RNA, 21 nt, artificial
  Chemically synthesized
cucuguccuaccugaauguca

SEQ ID NO: 14185 - RNA, 21 nt, artificial
  Chemically synthesized
cuggauccaccacaaguacaa

SEQ ID NO: 14186 - RNA, 21 nt, artificial
  Chemically synthesized
ugauucagggcgaguacauga

SEQ ID NO: 14187 - RNA, 21 nt, artificial
  Chemically synthesized
ccagcacagaaacagaggaga

SEQ ID NO: 14188 - RNA, 21 nt, artificial
  Chemically synthesized
ugaggaugagcuggaaggagu

SEQ ID NO: 14189 - RNA, 21 nt, artificial
  Chemically synthesized
gguggcacagacuccaaguau

SEQ ID NO: 14190 - RNA, 21 nt, artificial
  Chemically synthesized
gaaugguaccucguuugacau

SEQ ID NO: 14191 - RNA, 21 nt, artificial
  Chemically synthesized
ccgaggugcucaagaacuaca

SEQ ID NO: 14192 - RNA, 21 nt, artificial
  Chemically synthesized
ccagcugacauggaaauacag

SEQ ID NO: 14193 - RNA, 21 nt, artificial
  Chemically synthesized
ggugcucaagaacuacaugga

SEQ ID NO: 14194 - RNA, 21 nt, artificial
  Chemically synthesized
cuacauggacgcccaguacua

SEQ ID NO: 14195 - RNA, 21 nt, artificial
  Chemically synthesized
gaagcugguggaccagaacau

SEQ ID NO: 14196 - RNA, 21 nt, artificial
  Chemically synthesized
acgugaagaaugguaccucgu

SEQ ID NO: 14197 - RNA, 21 nt, artificial
  Chemically synthesized
cagaaacagaggagaguccca

SEQ ID NO: 14198 - RNA, 21 nt, artificial
  Chemically synthesized
gcugcacaaguucacguccau

SEQ ID NO: 14199 - RNA, 21 nt, artificial
  Chemically synthesized
cuucgacaaccugaugcagca

SEQ ID NO: 14200 - RNA, 21 nt, artificial
  Chemically synthesized
ccagaacaucuucuccuucua

SEQ ID NO: 14201 - RNA, 21 nt, artificial
  Chemically synthesized
gaagaaugguaccucguuuga

SEQ ID NO: 14202 - RNA, 21 nt, artificial
  Chemically synthesized
gaggcaaaggcuacaagcugu

SEQ ID NO: 14203 - RNA, 21 nt, artificial
  Chemically synthesized
guuugaccgugacaacaacag

SEQ ID NO: 14204 - RNA, 21 nt, artificial
  Chemically synthesized
caaguccagcaccuacgugaa

SEQ ID NO: 14205 - RNA, 21 nt, artificial
  Chemically synthesized
guccagcaccuacgugaagaa

SEQ ID NO: 14206 - RNA, 21 nt, artificial
  Chemically synthesized
acaacagcgacaaguccagca

SEQ ID NO: 14207 - RNA, 21 nt, artificial
  Chemically synthesized
cauucccgaggugcucaagaa

SEQ ID NO: 14208 - RNA, 21 nt, artificial
  Chemically synthesized
ucuguuucgugcauuggaaga

SEQ ID NO: 14209 - RNA, 21 nt, artificial
  Chemically synthesized
ccacaaguacaacagcgacaa

SEQ ID NO: 14210 - RNA, 21 nt, artificial
  Chemically synthesized
ccucguuugacauccacuaug

SEQ ID NO: 14211 - RNA, 21 nt, artificial
  Chemically synthesized
guaccucguuugacauccacu

SEQ ID NO: 14212 - RNA, 21 nt, artificial
  Chemically synthesized
ggccgcuacuacacuguguuu

SEQ ID NO: 14213 - RNA, 21 nt, artificial
  Chemically synthesized
uggcacagacuccaaguauua

SEQ ID NO: 14214 - RNA, 21 nt, artificial
  Chemically synthesized
agaaugguaccucguuugaca

SEQ ID NO: 14215 - RNA, 21 nt, artificial
  Chemically synthesized
gcaaacugcuggacaucgcuu

SEQ ID NO: 14216 - RNA, 21 nt, artificial
  Chemically synthesized
agaagcugguggaccagaaca

SEQ ID NO: 14217 - RNA, 21 nt, artificial
  Chemically synthesized
aggguucucuguccuaccuga

SEQ ID NO: 14218 - RNA, 21 nt, artificial
  Chemically synthesized
cugucugucucuccaucuguu

SEQ ID NO: 14219 - RNA, 21 nt, artificial
  Chemically synthesized
aggaugagcuggaaggaguga

SEQ ID NO: 14220 - RNA, 21 nt, artificial
  Chemically synthesized
ccugucugucucuccaucugu

SEQ ID NO: 14221 - RNA, 21 nt, artificial
  Chemically synthesized
cuaccugaaugucacccgcaa

SEQ ID NO: 14222 - RNA, 21 nt, artificial
  Chemically synthesized
gaacuacauggacgcccagua

SEQ ID NO: 14223 - RNA, 21 nt, artificial
  Chemically synthesized
agcugacauggaaauacaguu

SEQ ID NO: 14224 - RNA, 21 nt, artificial
  Chemically synthesized
cguuugacauccacuauggcu

SEQ ID NO: 14225 - RNA, 21 nt, artificial
  Chemically synthesized
acaaguccagcaccuacguga

SEQ ID NO: 14226 - RNA, 21 nt, artificial
  Chemically synthesized
cccagcugacauggaaauaca

SEQ ID NO: 14227 - RNA, 21 nt, artificial
  Chemically synthesized
guguuugaccgugacaacaac

SEQ ID NO: 14228 - RNA, 21 nt, artificial
  Chemically synthesized
ggcacagacuccaaguauuac

SEQ ID NO: 14229 - RNA, 21 nt, artificial
  Chemically synthesized
ucgacaaccugaugcagcaga

SEQ ID NO: 14230 - RNA, 21 nt, artificial
  Chemically synthesized
uuacaaggguucucuguccua

SEQ ID NO: 14231 - RNA, 21 nt, artificial
  Chemically synthesized
gaugagcuggaaggagugaga

SEQ ID NO: 14232 - RNA, 21 nt, artificial
  Chemically synthesized
acuacauggacgcccaguacu

SEQ ID NO: 14233 - RNA, 21 nt, artificial
  Chemically synthesized
cgucuucgacaaccugaugca

SEQ ID NO: 14234 - RNA, 21 nt, artificial
  Chemically synthesized
cauccacugcaaacugcugga

SEQ ID NO: 14235 - RNA, 21 nt, artificial
  Chemically synthesized
cagcugacauggaaauacagu

SEQ ID NO: 14236 - RNA, 21 nt, artificial
  Chemically synthesized
ugucugucucuccaucuguuu

SEQ ID NO: 14237 - RNA, 21 nt, artificial
  Chemically synthesized
acacuguguuugaccgugaca

SEQ ID NO: 14238 - RNA, 21 nt, artificial
  Chemically synthesized
agcacagaucuguuucgugca

SEQ ID NO: 14239 - RNA, 21 nt, artificial
  Chemically synthesized
aucuguuucgugcauuggaag

SEQ ID NO: 14240 - RNA, 21 nt, artificial
  Chemically synthesized
cgacuugcuguuuuguucugu

SEQ ID NO: 14241 - RNA, 21 nt, artificial
  Chemically synthesized
gacaaaacccaccuuguugga

SEQ ID NO: 14242 - RNA, 21 nt, artificial
  Chemically synthesized
gcugguggaccagaacaucuu

SEQ ID NO: 14243 - RNA, 21 nt, artificial
  Chemically synthesized
gcuacuacacuguguuugacc

SEQ ID NO: 14244 - RNA, 21 nt, artificial
  Chemically synthesized
gaacaucuucuccuucuaccu

SEQ ID NO: 14245 - RNA, 21 nt, artificial
  Chemically synthesized
acuguguuugaccgugacaac

SEQ ID NO: 14246 - RNA, 21 nt, artificial
  Chemically synthesized
cuugcuguuuuguucuguggu

SEQ ID NO: 14247 - RNA, 21 nt, artificial
  Chemically synthesized
ccauuguggacacaggcacuu

SEQ ID NO: 14248 - RNA, 21 nt, artificial
  Chemically synthesized
cccgacuugcuguuuuguucu

SEQ ID NO: 14249 - RNA, 21 nt, artificial
  Chemically synthesized
gauccagagcacagaucuguu

SEQ ID NO: 14250 - RNA, 21 nt, artificial
  Chemically synthesized
cuacacuguguuugaccguga

SEQ ID NO: 14251 - RNA, 21 nt, artificial
  Chemically synthesized
gagcugauccagagcacagau

SEQ ID NO: 14252 - RNA, 21 nt, artificial
  Chemically synthesized
ugacauggaaauacaguuguu

SEQ ID NO: 14253 - RNA, 21 nt, artificial
  Chemically synthesized
guggcacagacuccaaguauu

SEQ ID NO: 14254 - RNA, 21 nt, artificial
  Chemically synthesized
accacaaguacaacagcgaca

SEQ ID NO: 14255 - RNA, 21 nt, artificial
  Chemically synthesized
ccagcaccuacgugaagaaug

SEQ ID NO: 14256 - RNA, 21 nt, artificial
  Chemically synthesized
cuugcuggauccaccacaagu

SEQ ID NO: 14257 - RNA, 21 nt, artificial
  Chemically synthesized
ugaccgugacaacaacagggu

SEQ ID NO: 14258 - RNA, 21 nt, artificial
  Chemically synthesized
aguauuacaaggguucucugu

SEQ ID NO: 14259 - RNA, 21 nt, artificial
  Chemically synthesized
cacaaguacaacagcgacaag

SEQ ID NO: 14260 - RNA, 21 nt, artificial
  Chemically synthesized
ggaccagaacaucuucuccuu

SEQ ID NO: 14261 - RNA, 21 nt, artificial
  Chemically synthesized
ccacugcaaacugcuggacau

SEQ ID NO: 14262 - RNA, 21 nt, artificial
  Chemically synthesized
guacaacagcgacaaguccag

SEQ ID NO: 14263 - RNA, 21 nt, artificial
  Chemically synthesized
ggaaauacaguuguuggccuc

SEQ ID NO: 14264 - RNA, 21 nt, artificial
  Chemically synthesized
ccagugcuucacagucgucuu

SEQ ID NO: 14265 - RNA, 21 nt, artificial
  Chemically synthesized
ccgacuugcuguuuuguucug

SEQ ID NO: 14266 - RNA, 21 nt, artificial
  Chemically synthesized
gcucaagaacuacauggacgc

SEQ ID NO: 14267 - RNA, 21 nt, artificial
  Chemically synthesized
ucagaaaugcugccugccugu

SEQ ID NO: 14268 - RNA, 21 nt, artificial
  Chemically synthesized
agcacagaaacagaggagagu

SEQ ID NO: 14269 - RNA, 21 nt, artificial
  Chemically synthesized
aguccagcaccuacgugaaga

SEQ ID NO: 14270 - RNA, 21 nt, artificial
  Chemically synthesized
agcugguggaccagaacaucu

SEQ ID NO: 14271 - RNA, 21 nt, artificial
  Chemically synthesized
cucccuggguucagaaaugcu

SEQ ID NO: 14272 - RNA, 21 nt, artificial
  Chemically synthesized
gugcuucacagucgucuucga

SEQ ID NO: 14273 - RNA, 21 nt, artificial
  Chemically synthesized
caagaacuacauggacgccca

SEQ ID NO: 14274 - RNA, 21 nt, artificial
  Chemically synthesized
aggcaaaggcuacaagcuguc

SEQ ID NO: 14275 - RNA, 21 nt, artificial
  Chemically synthesized
cacagaucuguuucgugcauu

SEQ ID NO: 14276 - RNA, 21 nt, artificial
  Chemically synthesized
gcacagaucuguuucgugcau

SEQ ID NO: 14277 - RNA, 21 nt, artificial
  Chemically synthesized
cagcacagaaacagaggagag

SEQ ID NO: 14278 - RNA, 21 nt, artificial
  Chemically synthesized
acagacuccaaguauuacaag

SEQ ID NO: 14279 - RNA, 21 nt, artificial
  Chemically synthesized
aaaugcugccugccugucugu

SEQ ID NO: 14280 - RNA, 21 nt, artificial
  Chemically synthesized
cuccauccacugcaaacugcu

SEQ ID NO: 14281 - RNA, 21 nt, artificial
  Chemically synthesized
caucaccuucaucgcagccaa

SEQ ID NO: 14282 - RNA, 21 nt, artificial
  Chemically synthesized
ucccgaggugcucaagaacua

SEQ ID NO: 14283 - RNA, 21 nt, artificial
  Chemically synthesized
aggacuacacgcucaaggugu

SEQ ID NO: 14284 - RNA, 21 nt, artificial
  Chemically synthesized
gggacaaaacccaccuuguug

SEQ ID NO: 14285 - RNA, 21 nt, artificial
  Chemically synthesized
caaccugaugcagcagaagcu

SEQ ID NO: 14286 - RNA, 21 nt, artificial
  Chemically synthesized
ugccugucugucucuccaucu

SEQ ID NO: 14287 - RNA, 21 nt, artificial
  Chemically synthesized
caaacugcuggacaucgcuug

SEQ ID NO: 14288 - RNA, 21 nt, artificial
  Chemically synthesized
accagaacaucuucuccuucu

SEQ ID NO: 14289 - RNA, 21 nt, artificial
  Chemically synthesized
accucguuugacauccacuau

SEQ ID NO: 14290 - RNA, 21 nt, artificial
  Chemically synthesized
agagcugauccagagcacaga

SEQ ID NO: 14291 - RNA, 21 nt, artificial
  Chemically synthesized
aaggguucucuguccuaccug

SEQ ID NO: 14292 - RNA, 21 nt, artificial
  Chemically synthesized
ggacaaaacccaccuuguugg

SEQ ID NO: 14293 - RNA, 21 nt, artificial
  Chemically synthesized
cauggaaauacaguuguuggc

SEQ ID NO: 14294 - RNA, 21 nt, artificial
  Chemically synthesized
ugacaacaacagggugggcuu

SEQ ID NO: 14295 - RNA, 21 nt, artificial
  Chemically synthesized
ugguggaccagaacaucuucu

SEQ ID NO: 14296 - RNA, 21 nt, artificial
  Chemically synthesized
gguaccucguuugacauccac

SEQ ID NO: 14297 - RNA, 21 nt, artificial
  Chemically synthesized
cugacauggaaauacaguugu

SEQ ID NO: 14298 - RNA, 21 nt, artificial
  Chemically synthesized
aaaguggagaggcaggucuuu

SEQ ID NO: 14299 - RNA, 21 nt, artificial
  Chemically synthesized
ugucaaaguggagaggcaggu

SEQ ID NO: 14300 - RNA, 21 nt, artificial
  Chemically synthesized
ucuucuccuucuaccugagca

SEQ ID NO: 14301 - RNA, 21 nt, artificial
  Chemically synthesized
agaacuacauggacgcccagu

SEQ ID NO: 14302 - RNA, 21 nt, artificial
  Chemically synthesized
ccaagcccgacuugcuguuuu

SEQ ID NO: 14303 - RNA, 21 nt, artificial
  Chemically synthesized
acuccaaguauuacaaggguu

SEQ ID NO: 14304 - RNA, 21 nt, artificial
  Chemically synthesized
caaguauuacaaggguucucu

SEQ ID NO: 14305 - RNA, 21 nt, artificial
  Chemically synthesized
gcugauccagagcacagaucu

SEQ ID NO: 14306 - RNA, 21 nt, artificial
  Chemically synthesized
gugaagaaugguaccucguuu

SEQ ID NO: 14307 - RNA, 21 nt, artificial
  Chemically synthesized
aagaacuacauggacgcccag

SEQ ID NO: 14308 - RNA, 21 nt, artificial
  Chemically synthesized
agcaccuacgugaagaauggu

SEQ ID NO: 14309 - RNA, 21 nt, artificial
  Chemically synthesized
ugguaccucguuugacaucca

SEQ ID NO: 14310 - RNA, 21 nt, artificial
  Chemically synthesized
ccuacgugaagaaugguaccu

SEQ ID NO: 14311 - RNA, 21 nt, artificial
  Chemically synthesized
agaacaucuucuccuucuacc

SEQ ID NO: 14312 - RNA, 21 nt, artificial
  Chemically synthesized
uucucuguccuaccugaaugu

SEQ ID NO: 14313 - RNA, 21 nt, artificial
  Chemically synthesized
ucaaaguggagaggcaggucu

SEQ ID NO: 14314 - RNA, 21 nt, artificial
  Chemically synthesized
agaggacuacacgcucaaggu

SEQ ID NO: 14315 - RNA, 21 nt, artificial
  Chemically synthesized
aaguauuacaaggguucucug

SEQ ID NO: 14316 - RNA, 21 nt, artificial
  Chemically synthesized
ugcuguuuuguucugugguuu

SEQ ID NO: 14317 - RNA, 21 nt, artificial
  Chemically synthesized
agcccgacuugcuguuuuguu

SEQ ID NO: 14318 - RNA, 21 nt, artificial
  Chemically synthesized
gaggugcucaagaacuacaug

SEQ ID NO: 14319 - RNA, 21 nt, artificial
  Chemically synthesized
aggugcucaagaacuacaugg

SEQ ID NO: 14320 - RNA, 21 nt, artificial
  Chemically synthesized
acaaguacaacagcgacaagu

SEQ ID NO: 14321 - RNA, 21 nt, artificial
  Chemically synthesized
guagagcugauccagagcaca

SEQ ID NO: 14322 - RNA, 21 nt, artificial
  Chemically synthesized
acagaucuguuucgugcauug

SEQ ID NO: 14323 - RNA, 21 nt, artificial
  Chemically synthesized
ucaccuucaucgcagccaagu

SEQ ID NO: 14324 - RNA, 21 nt, artificial
  Chemically synthesized
agagcacagaucuguuucgug

SEQ ID NO: 14325 - RNA, 21 nt, artificial
  Chemically synthesized
gacuugcuguuuuguucugug

SEQ ID NO: 14326 - RNA, 21 nt, artificial
  Chemically synthesized
gguggaccagaacaucuucuc

SEQ ID NO: 14327 - RNA, 21 nt, artificial
  Chemically synthesized
uccacugcaaacugcuggaca

SEQ ID NO: 14328 - RNA, 21 nt, artificial
  Chemically synthesized
uacuacacuguguuugaccgu

SEQ ID NO: 14329 - RNA, 21 nt, artificial
  Chemically synthesized
ugcaaacugcuggacaucgcu

SEQ ID NO: 14330 - RNA, 21 nt, artificial
  Chemically synthesized
ugaagaaugguaccucguuug

SEQ ID NO: 14331 - RNA, 21 nt, artificial
  Chemically synthesized
gacuccaaguauuacaagggu

SEQ ID NO: 14332 - RNA, 21 nt, artificial
  Chemically synthesized
caccuucaucgcagccaaguu

SEQ ID NO: 14333 - RNA, 21 nt, artificial
  Chemically synthesized
cagugcuucacagucgucuuc

SEQ ID NO: 14334 - RNA, 21 nt, artificial
  Chemically synthesized
agaaaugcugccugccugucu

SEQ ID NO: 14335 - RNA, 21 nt, artificial
  Chemically synthesized
gacaaccugaugcagcagaag

SEQ ID NO: 14336 - RNA, 21 nt, artificial
  Chemically synthesized
acauggaaauacaguuguugg

SEQ ID NO: 14337 - RNA, 21 nt, artificial
  Chemically synthesized
caaggguucucuguccuaccu

SEQ ID NO: 14338 - RNA, 21 nt, artificial
  Chemically synthesized
gcccgacuugcuguuuuguuc

SEQ ID NO: 14339 - RNA, 21 nt, artificial
  Chemically synthesized
gucugucucuccaucuguuug

SEQ ID NO: 14340 - RNA, 21 nt, artificial
  Chemically synthesized
aaguggagaggcaggucuuug

SEQ ID NO: 14341 - RNA, 21 nt, artificial
  Chemically synthesized
cuccaaguauuacaaggguuc

SEQ ID NO: 14342 - RNA, 21 nt, artificial
  Chemically synthesized
cgcuacuacacuguguuugac

SEQ ID NO: 14343 - RNA, 21 nt, artificial
  Chemically synthesized
cagaacaucuucuccuucuac

SEQ ID NO: 14344 - RNA, 21 nt, artificial
  Chemically synthesized
caucuucuccuucuaccugag

SEQ ID NO: 14345 - RNA, 21 nt, artificial
  Chemically synthesized
cacugcaaacugcuggacauc

SEQ ID NO: 14346 - RNA, 21 nt, artificial
  Chemically synthesized
uugcuggauccaccacaagua

SEQ ID NO: 14347 - RNA, 21 nt, artificial
  Chemically synthesized
ucugcagcugaccucuguugu

SEQ ID NO: 14348 - RNA, 21 nt, artificial
  Chemically synthesized
gaccagaacaucuucuccuuc

SEQ ID NO: 14349 - RNA, 21 nt, artificial
  Chemically synthesized
aaguccagcaccuacgugaag

SEQ ID NO: 14350 - RNA, 21 nt, artificial
  Chemically synthesized
cauuguggacacaggcacuuc

SEQ ID NO: 14351 - RNA, 21 nt, artificial
  Chemically synthesized
gccgcuacuacacuguguuug

SEQ ID NO: 14352 - RNA, 21 nt, artificial
  Chemically synthesized
uggaaauacaguuguuggccu

SEQ ID NO: 14353 - RNA, 21 nt, artificial
  Chemically synthesized
gauccaccacaaguacaacag

SEQ ID NO: 14354 - RNA, 21 nt, artificial
  Chemically synthesized
auccagagcacagaucuguuu

SEQ ID NO: 14355 - RNA, 21 nt, artificial
  Chemically synthesized
gcacagaaacagaggagaguc

SEQ ID NO: 14356 - RNA, 21 nt, artificial
  Chemically synthesized
cugauucagggcgaguacaug

SEQ ID NO: 14357 - RNA, 21 nt, artificial
  Chemically synthesized
caagcccgacuugcuguuuug

SEQ ID NO: 14358 - RNA, 21 nt, artificial
  Chemically synthesized
uagagcugauccagagcacag

SEQ ID NO: 14359 - RNA, 21 nt, artificial
  Chemically synthesized
cagacuccaaguauuacaagg

SEQ ID NO: 14360 - RNA, 21 nt, artificial
  Chemically synthesized
aaacagaggagagucccagag

SEQ ID NO: 14361 - RNA, 21 nt, artificial
  Chemically synthesized
gacauggaaauacaguuguug

SEQ ID NO: 14362 - RNA, 21 nt, artificial
  Chemically synthesized
gaaauacaguuguuggccucc

SEQ ID NO: 14363 - RNA, 21 nt, artificial
  Chemically synthesized
uaccucguuugacauccacua

SEQ ID NO: 14364 - RNA, 21 nt, artificial
  Chemically synthesized
uggaccagaacaucuucuccu

SEQ ID NO: 14365 - RNA, 21 nt, artificial
  Chemically synthesized
guucagaaaugcugccugccu

SEQ ID NO: 14366 - RNA, 21 nt, artificial
  Chemically synthesized
ugauccagagcacagaucugu

SEQ ID NO: 14367 - RNA, 21 nt, artificial
  Chemically synthesized
cagagcacagaucuguuucgu

SEQ ID NO: 14368 - RNA, 21 nt, artificial
  Chemically synthesized
caucuccgucaacaacgugcu

SEQ ID NO: 14369 - RNA, 21 nt, artificial
  Chemically synthesized
aaugguaccucguuugacauc

SEQ ID NO: 14370 - RNA, 21 nt, artificial
  Chemically synthesized
ugugaggccauuguggacaca

SEQ ID NO: 14371 - RNA, 21 nt, artificial
  Chemically synthesized
uugaccgugacaacaacaggg

SEQ ID NO: 14372 - RNA, 21 nt, artificial
  Chemically synthesized
agugcuucacagucgucuucg

SEQ ID NO: 14373 - RNA, 21 nt, artificial
  Chemically synthesized
aauacaguuguuggccuccgg

SEQ ID NO: 14374 - RNA, 21 nt, artificial
  Chemically synthesized
ccagagcacagaucuguuucg

SEQ ID NO: 14375 - RNA, 21 nt, artificial
  Chemically synthesized
cacagaaacagaggagagucc

SEQ ID NO: 14376 - RNA, 21 nt, artificial
  Chemically synthesized
acuugcuguuuuguucugugg

SEQ ID NO: 14377 - RNA, 21 nt, artificial
  Chemically synthesized
uugcuguuuuguucugugguu

SEQ ID NO: 14378 - RNA, 21 nt, artificial
  Chemically synthesized
caaguacaacagcgacaaguc

SEQ ID NO: 14379 - RNA, 21 nt, artificial
  Chemically synthesized
ugucucuccaucuguuuggug

SEQ ID NO: 14380 - RNA, 21 nt, artificial
  Chemically synthesized
cagcaccuacgugaagaaugg

SEQ ID NO: 14381 - RNA, 21 nt, artificial
  Chemically synthesized
uacacuguguuugaccgugac

SEQ ID NO: 14382 - RNA, 21 nt, artificial
  Chemically synthesized
cuguuucgugcauuggaagac

SEQ ID NO: 14383 - RNA, 21 nt, artificial
  Chemically synthesized
gugcucaagaacuacauggac

SEQ ID NO: 14384 - RNA, 21 nt, artificial
  Chemically synthesized
cagaucuguuucgugcauugg

SEQ ID NO: 14385 - RNA, 21 nt, artificial
  Chemically synthesized
guucucuguccuaccugaaug

SEQ ID NO: 14386 - RNA, 21 nt, artificial
  Chemically synthesized
ccaaguauuacaaggguucuc

SEQ ID NO: 14387 - RNA, 21 nt, artificial
  Chemically synthesized
ugcuggauccaccacaaguac

SEQ ID NO: 14388 - RNA, 21 nt, artificial
  Chemically synthesized
agcugauccagagcacagauc

SEQ ID NO: 14389 - RNA, 21 nt, artificial
  Chemically synthesized
caccuacgugaagaaugguac

SEQ ID NO: 14390 - RNA, 21 nt, artificial
  Chemically synthesized
acaaggguucucuguccuacc

SEQ ID NO: 14391 - RNA, 21 nt, artificial
  Chemically synthesized
cugauccagagcacagaucug

SEQ ID NO: 14392 - RNA, 21 nt, artificial
  Chemically synthesized
caaaacccaccuuguuggagc

SEQ ID NO: 14393 - RNA, 21 nt, artificial
  Chemically synthesized
aucaccuucaucgcagccaag

SEQ ID NO: 14394 - RNA, 21 nt, artificial
  Chemically synthesized
aacugcuggacaucgcuugcu

SEQ ID NO: 14395 - RNA, 21 nt, artificial
  Chemically synthesized
acugcaaacugcuggacaucg

SEQ ID NO: 14396 - RNA, 21 nt, artificial
  Chemically synthesized
uccagcaccuacgugaagaau

SEQ ID NO: 14397 - RNA, 21 nt, artificial
  Chemically synthesized
uucaucggccgcuacuacacu

SEQ ID NO: 14398 - RNA, 21 nt, artificial
  Chemically synthesized
cuguuuuguucugugguuuuc

SEQ ID NO: 14399 - RNA, 21 nt, artificial
  Chemically synthesized
ucaucgcagccaaguucgaug

SEQ ID NO: 14400 - RNA, 21 nt, artificial
  Chemically synthesized
auucagggcgaguacaugauc

SEQ ID NO: 14401 - RNA, 21 nt, artificial
  Chemically synthesized
guauuacaaggguucucuguc

SEQ ID NO: 14402 - RNA, 21 nt, artificial
  Chemically synthesized
caccacaaguacaacagcgac

SEQ ID NO: 14403 - RNA, 21 nt, artificial
  Chemically synthesized
ugcucaagaacuacauggacg

SEQ ID NO: 14404 - RNA, 21 nt, artificial
  Chemically synthesized
uaccugaaugucacccgcaag

SEQ ID NO: 14405 - RNA, 21 nt, artificial
  Chemically synthesized
cuacuacacuguguuugaccg

SEQ ID NO: 14406 - RNA, 21 nt, artificial
  Chemically synthesized
aagcccgacuugcuguuuugu

SEQ ID NO: 14407 - RNA, 21 nt, artificial
  Chemically synthesized
cuguccuaccugaaugucacc

SEQ ID NO: 14408 - RNA, 21 nt, artificial
  Chemically synthesized
cuucacagucgucuucgacac

SEQ ID NO: 14409 - RNA, 21 nt, artificial
  Chemically synthesized
agccaaguucgauggcauccu

SEQ ID NO: 14410 - RNA, 21 nt, artificial
  Chemically synthesized
agaaacagaggagagucccag

SEQ ID NO: 14411 - RNA, 21 nt, artificial
  Chemically synthesized
cuggguucagaaaugcugccu

SEQ ID NO: 14412 - RNA, 21 nt, artificial
  Chemically synthesized
uccagagcacagaucuguuuc

SEQ ID NO: 14413 - RNA, 21 nt, artificial
  Chemically synthesized
gucucuccaucuguuuggugg

SEQ ID NO: 14414 - RNA, 21 nt, artificial
  Chemically synthesized
guuucgugcauuggaagaccc

SEQ ID NO: 14415 - RNA, 21 nt, artificial
  Chemically synthesized
ucguuugacauccacuauggc

SEQ ID NO: 14416 - RNA, 21 nt, artificial
  Chemically synthesized
auuacaaggguucucuguccu

SEQ ID NO: 14417 - RNA, 21 nt, artificial
  Chemically synthesized
cuucuccuucuaccugagcag

SEQ ID NO: 14418 - RNA, 21 nt, artificial
  Chemically synthesized
guuugacauccacuauggcuc

SEQ ID NO: 14419 - RNA, 21 nt, artificial
  Chemically synthesized
accuacgugaagaaugguacc

SEQ ID NO: 14420 - RNA, 21 nt, artificial
  Chemically synthesized
ucuucgacaaccugaugcagc

SEQ ID NO: 14421 - RNA, 21 nt, artificial
  Chemically synthesized
aagaaugguaccucguuugac

SEQ ID NO: 14422 - RNA, 21 nt, artificial
  Chemically synthesized
uggaggaccugauugccaaag

SEQ ID NO: 14423 - RNA, 21 nt, artificial
  Chemically synthesized
acaaaacccaccuuguuggag

SEQ ID NO: 14424 - RNA, 21 nt, artificial
  Chemically synthesized
ugcuucacagucgucuucgac

SEQ ID NO: 14425 - RNA, 21 nt, artificial
  Chemically synthesized
acaaccugaugcagcagaagc

SEQ ID NO: 14426 - RNA, 21 nt, artificial
  Chemically synthesized
cugcacaaguucacguccauc

SEQ ID NO: 14427 - RNA, 21 nt, artificial
  Chemically synthesized
aaacccaccuuguuggagccu

SEQ ID NO: 14428 - RNA, 21 nt, artificial
  Chemically synthesized
uucacagucgucuucgacacg

SEQ ID NO: 14429 - RNA, 21 nt, artificial
  Chemically synthesized
ugcacaaguucacguccaucc

SEQ ID NO: 14430 - RNA, 21 nt, artificial
  Chemically synthesized
uucccgaggugcucaagaacu

SEQ ID NO: 14431 - RNA, 21 nt, artificial
  Chemically synthesized
cugucucuccaucuguuuggu

SEQ ID NO: 14432 - RNA, 21 nt, artificial
  Chemically synthesized
gagcacagaucuguuucgugc

SEQ ID NO: 14433 - RNA, 21 nt, artificial
  Chemically synthesized
uuugaccgugacaacaacagg

SEQ ID NO: 14434 - RNA, 21 nt, artificial
  Chemically synthesized
gcugacauggaaauacaguug

SEQ ID NO: 14435 - RNA, 21 nt, artificial
  Chemically synthesized
augagcuggaaggagugagag

SEQ ID NO: 14436 - RNA, 21 nt, artificial
  Chemically synthesized
cucguuugacauccacuaugg

SEQ ID NO: 14437 - RNA, 21 nt, artificial
  Chemically synthesized
cuacgugaagaaugguaccuc

SEQ ID NO: 14438 - RNA, 21 nt, artificial
  Chemically synthesized
ucccuggguucagaaaugcug

SEQ ID NO: 14439 - RNA, 21 nt, artificial
  Chemically synthesized
uucaucgcagccaaguucgau

SEQ ID NO: 14440 - RNA, 21 nt, artificial
  Chemically synthesized
ucucuccaucuguuugguggg

SEQ ID NO: 14441 - RNA, 21 nt, artificial
  Chemically synthesized
cugguggaccagaacaucuuc

SEQ ID NO: 14442 - RNA, 21 nt, artificial
  Chemically synthesized
ucuguccuaccugaaugucac

SEQ ID NO: 14443 - RNA, 21 nt, artificial
  Chemically synthesized
aacaucuucuccuucuaccug

SEQ ID NO: 14444 - RNA, 21 nt, artificial
  Chemically synthesized
auucccgaggugcucaagaac

SEQ ID NO: 14445 - RNA, 21 nt, artificial
  Chemically synthesized
uguuuuguucugugguuuucc

SEQ ID NO: 14446 - RNA, 21 nt, artificial
  Chemically synthesized
agacuccaaguauuacaaggg

SEQ ID NO: 14447 - RNA, 21 nt, artificial
  Chemically synthesized
uccauccacugcaaacugcug

SEQ ID NO: 14448 - RNA, 21 nt, artificial
  Chemically synthesized
aaauacaguuguuggccuccg

SEQ ID NO: 14449 - RNA, 21 nt, artificial
  Chemically synthesized
acagaaacagaggagaguccc

SEQ ID NO: 14450 - RNA, 21 nt, artificial
  Chemically synthesized
uucagggcgaguacaugaucc

SEQ ID NO: 14451 - RNA, 21 nt, artificial
  Chemically synthesized
uccaaguauuacaaggguucu

SEQ ID NO: 14452 - RNA, 21 nt, artificial
  Chemically synthesized
ucaagaacuacauggacgccc

SEQ ID NO: 14453 - RNA, 21 nt, artificial
  Chemically synthesized
uacaaggguucucuguccuac

SEQ ID NO: 14454 - RNA, 21 nt, artificial
  Chemically synthesized
ucugucucuccaucuguuugg

SEQ ID NO: 14455 - RNA, 21 nt, artificial
  Chemically synthesized
aaguacaacagcgacaagucc

SEQ ID NO: 14456 - RNA, 21 nt, artificial
  Chemically synthesized
uugacauccacuauggcucgg

SEQ ID NO: 14457 - RNA, 21 nt, artificial
  Chemically synthesized
uggauccaccacaaguacaac

SEQ ID NO: 14458 - RNA, 21 nt, artificial
  Chemically synthesized
ucucuguccuaccugaauguc

SEQ ID NO: 14459 - RNA, 21 nt, artificial
  Chemically synthesized
uacauggacgcccaguacuac

SEQ ID NO: 14460 - RNA, 21 nt, artificial
  Chemically synthesized
aacuacauggacgcccaguac

SEQ ID NO: 14461 - RNA, 21 nt, artificial
  Chemically synthesized
uucagaaaugcugccugccug

SEQ ID NO: 14462 - RNA, 21 nt, artificial
  Chemically synthesized
gucuucgacaaccugaugcag

SEQ ID NO: 14463 - RNA, 21 nt, artificial
  Chemically synthesized
aaacugcuggacaucgcuugc

SEQ ID NO: 14464 - RNA, 21 nt, artificial
  Chemically synthesized
uauuacaaggguucucugucc

SEQ ID NO: 14465 - RNA, 21 nt, artificial
  Chemically synthesized
aagcugguggaccagaacauc

SEQ ID NO: 14466 - RNA, 21 nt, artificial
  Chemically synthesized
aucuucuccuucuaccugagc

SEQ ID NO: 14467 - RNA, 21 nt, artificial
  Chemically synthesized
acuacacuguguuugaccgug

SEQ ID NO: 14468 - RNA, 21 nt, artificial
  Chemically synthesized
uccaccacaaguacaacagcg

SEQ ID NO: 14469 - RNA, 21 nt, artificial
  Chemically synthesized
accuucaucgcagccaaguuc

SEQ ID NO: 14470 - RNA, 21 nt, artificial
  Chemically synthesized
cucaagaacuacauggacgcc

SEQ ID NO: 14471 - RNA, 21 nt, artificial
  Chemically synthesized
uggguucagaaaugcugccug

SEQ ID NO: 14472 - RNA, 21 nt, artificial
  Chemically synthesized
uucgacaaccugaugcagcag

SEQ ID NO: 14473 - RNA, 21 nt, artificial
  Chemically synthesized
auggaaauacaguuguuggcc

SEQ ID NO: 14474 - RNA, 21 nt, artificial
  Chemically synthesized
guuuuguucugugguuuuccc

SEQ ID NO: 14475 - RNA, 21 nt, artificial
  Chemically synthesized
auuguggacacaggcacuucc

SEQ ID NO: 14476 - RNA, 21 nt, artificial
  Chemically synthesized
uacaacagcgacaaguccagc

SEQ ID NO: 14477 - RNA, 21 nt, artificial
  Chemically synthesized
uacgugaagaaugguaccucg

SEQ ID NO: 14478 - RNA, 21 nt, artificial
  Chemically synthesized
aaccugaugcagcagaagcug

SEQ ID NO: 14479 - RNA, 21 nt, artificial
  Chemically synthesized
aucuccgucaacaacgugcug

SEQ ID NO: 14480 - RNA, 21 nt, artificial
  Chemically synthesized
guggaccagaacaucuucucc

SEQ ID NO: 14481 - RNA, 21 nt, artificial
  Chemically synthesized
auccaccacaaguacaacagc

SEQ ID NO: 14482 - RNA, 21 nt, artificial
  Chemically synthesized
aaaacccaccuuguuggagcc

SEQ ID NO: 14483 - RNA, 21 nt, artificial
  Chemically synthesized
uuugacauccacuauggcucg

SEQ ID NO: 14484 - RNA, 21 nt, artificial
  Chemically synthesized
uguccuaccugaaugucaccc

SEQ ID NO: 14485 - RNA, 21 nt, artificial
  Chemically synthesized
uguuucgugcauuggaagacc

SEQ ID NO: 14486 - RNA, 21 nt, artificial
  Chemically synthesized
augguaccucguuugacaucc

SEQ ID NO: 14487 - RNA, 21 nt, artificial
  Chemically synthesized
auccacugcaaacugcuggac

SEQ ID NO: 14488 - RNA, 21 nt, artificial
  Chemically synthesized
uucuccuucuaccugagcagg

SEQ ID NO: 14489 - RNA, 21 nt, artificial
  Chemically synthesized
uguuguugucacggucaaaca

SEQ ID NO: 14490 - RNA, 21 nt, artificial
  Chemically synthesized
uguacuugugguggauccagc

SEQ ID NO: 14491 - RNA, 21 nt, artificial
  Chemically synthesized
uuguugucacggucaaacaca

SEQ ID NO: 14492 - RNA, 21 nt, artificial
  Chemically synthesized
auguacucgcccugaaucagc

SEQ ID NO: 14493 - RNA, 21 nt, artificial
  Chemically synthesized
auguaguucuugagcaccucg

SEQ ID NO: 14494 - RNA, 21 nt, artificial
  Chemically synthesized
uuugccucccagcuucagugu

SEQ ID NO: 14495 - RNA, 21 nt, artificial
  Chemically synthesized
auucagguaggacagagaacc

SEQ ID NO: 14496 - RNA, 21 nt, artificial
  Chemically synthesized
uuggcaaucagguccuccaca

SEQ ID NO: 14497 - RNA, 21 nt, artificial
  Chemically synthesized
uguaauacuuggagucugugc

SEQ ID NO: 14498 - RNA, 21 nt, artificial
  Chemically synthesized
uguuguacuugugguggaucc

SEQ ID NO: 14499 - RNA, 21 nt, artificial
  Chemically synthesized
uugucacggucaaacacagug

SEQ ID NO: 14500 - RNA, 21 nt, artificial
  Chemically synthesized
uuuggcaaucagguccuccac

SEQ ID NO: 14501 - RNA, 21 nt, artificial
  Chemically synthesized
uucagguaggacagagaaccc

SEQ ID NO: 14502 - RNA, 21 nt, artificial
  Chemically synthesized
uccaaugcacgaaacagaucu

SEQ ID NO: 14503 - RNA, 21 nt, artificial
  Chemically synthesized
uguaguagcggccgaugaaga

SEQ ID NO: 14504 - RNA, 21 nt, artificial
  Chemically synthesized
aucauguacucgcccugaauc

SEQ ID NO: 14505 - RNA, 21 nt, artificial
  Chemically synthesized
uuguaauacuuggagucugug

SEQ ID NO: 14506 - RNA, 21 nt, artificial
  Chemically synthesized
uucugcugcaucagguugucg

SEQ ID NO: 14507 - RNA, 21 nt, artificial
  Chemically synthesized
uuccaaugcacgaaacagauc

SEQ ID NO: 14508 - RNA, 21 nt, artificial
  Chemically synthesized
uguugucacggucaaacacag

SEQ ID NO: 14509 - RNA, 21 nt, artificial
  Chemically synthesized
uaccauucuucacguaggugc

SEQ ID NO: 14510 - RNA, 21 nt, artificial
  Chemically synthesized
ucaaacacaguguaguagcgg

SEQ ID NO: 14511 - RNA, 21 nt, artificial
  Chemically synthesized
ucugggacucuccucuguuuc

SEQ ID NO: 14512 - RNA, 21 nt, artificial
  Chemically synthesized
aacgagguaccauucuucacg

SEQ ID NO: 14513 - RNA, 21 nt, artificial
  Chemically synthesized
ucagguagaaggagaagaugu

SEQ ID NO: 14514 - RNA, 21 nt, artificial
  Chemically synthesized
ugucgaagacgacugugaagc

SEQ ID NO: 14515 - RNA, 21 nt, artificial
  Chemically synthesized
aagaccugccucuccacuuug

SEQ ID NO: 14516 - RNA, 21 nt, artificial
  Chemically synthesized
aaaaccacagaacaaaacagc

SEQ ID NO: 14517 - RNA, 21 nt, artificial
  Chemically synthesized
uggacuugucgcuguuguacu

SEQ ID NO: 14518 - RNA, 21 nt, artificial
  Chemically synthesized
ucgaacuuggcugcgaugaag

SEQ ID NO: 14519 - RNA, 21 nt, artificial
  Chemically synthesized
ucgcuguuguacuuguggugg

SEQ ID NO: 14520 - RNA, 21 nt, artificial
  Chemically synthesized
ugacauucagguaggacagag

SEQ ID NO: 14521 - RNA, 21 nt, artificial
  Chemically synthesized
uuguacuugugguggauccag

SEQ ID NO: 14522 - RNA, 21 nt, artificial
  Chemically synthesized
ucauguacucgcccugaauca

SEQ ID NO: 14523 - RNA, 21 nt, artificial
  Chemically synthesized
ucuccucuguuucugugcugg

SEQ ID NO: 14524 - RNA, 21 nt, artificial
  Chemically synthesized
acuccuuccagcucauccuca

SEQ ID NO: 14525 - RNA, 21 nt, artificial
  Chemically synthesized
auacuuggagucugugccacc

SEQ ID NO: 14526 - RNA, 21 nt, artificial
  Chemically synthesized
augucaaacgagguaccauuc

SEQ ID NO: 14527 - RNA, 21 nt, artificial
  Chemically synthesized
uguaguucuugagcaccucgg

SEQ ID NO: 14528 - RNA, 21 nt, artificial
  Chemically synthesized
cuguauuuccaugucagcugg

SEQ ID NO: 14529 - RNA, 21 nt, artificial
  Chemically synthesized
uccauguaguucuugagcacc

SEQ ID NO: 14530 - RNA, 21 nt, artificial
  Chemically synthesized
uaguacugggcguccauguag

SEQ ID NO: 14531 - RNA, 21 nt, artificial
  Chemically synthesized
auguucugguccaccagcuuc

SEQ ID NO: 14532 - RNA, 21 nt, artificial
  Chemically synthesized
acgagguaccauucuucacgu

SEQ ID NO: 14533 - RNA, 21 nt, artificial
  Chemically synthesized
ugggacucuccucuguuucug

SEQ ID NO: 14534 - RNA, 21 nt, artificial
  Chemically synthesized
auggacgugaacuugugcagc

SEQ ID NO: 14535 - RNA, 21 nt, artificial
  Chemically synthesized
ugcugcaucagguugucgaag

SEQ ID NO: 14536 - RNA, 21 nt, artificial
  Chemically synthesized
uagaaggagaagauguucugg

SEQ ID NO: 14537 - RNA, 21 nt, artificial
  Chemically synthesized
ucaaacgagguaccauucuuc

SEQ ID NO: 14538 - RNA, 21 nt, artificial
  Chemically synthesized
acagcuuguagccuuugccuc

SEQ ID NO: 14539 - RNA, 21 nt, artificial
  Chemically synthesized
cuguuguugucacggucaaac

SEQ ID NO: 14540 - RNA, 21 nt, artificial
  Chemically synthesized
uucacguaggugcuggacuug

SEQ ID NO: 14541 - RNA, 21 nt, artificial
  Chemically synthesized
uucuucacguaggugcuggac

SEQ ID NO: 14542 - RNA, 21 nt, artificial
  Chemically synthesized
ugcuggacuugucgcuguugu

SEQ ID NO: 14543 - RNA, 21 nt, artificial
  Chemically synthesized
uucuugagcaccucgggaaug

SEQ ID NO: 14544 - RNA, 21 nt, artificial
  Chemically synthesized
ucuuccaaugcacgaaacaga

SEQ ID NO: 14545 - RNA, 21 nt, artificial
  Chemically synthesized
uugucgcuguuguacuugugg

SEQ ID NO: 14546 - RNA, 21 nt, artificial
  Chemically synthesized
cauaguggaugucaaacgagg

SEQ ID NO: 14547 - RNA, 21 nt, artificial
  Chemically synthesized
aguggaugucaaacgagguac

SEQ ID NO: 14548 - RNA, 21 nt, artificial
  Chemically synthesized
aaacacaguguaguagcggcc

SEQ ID NO: 14549 - RNA, 21 nt, artificial
  Chemically synthesized
uaauacuuggagucugugcca

SEQ ID NO: 14550 - RNA, 21 nt, artificial
  Chemically synthesized
ugucaaacgagguaccauucu

SEQ ID NO: 14551 - RNA, 21 nt, artificial
  Chemically synthesized
aagcgauguccagcaguuugc

SEQ ID NO: 14552 - RNA, 21 nt, artificial
  Chemically synthesized
uguucugguccaccagcuucu

SEQ ID NO: 14553 - RNA, 21 nt, artificial
  Chemically synthesized
ucagguaggacagagaacccu

SEQ ID NO: 14554 - RNA, 21 nt, artificial
  Chemically synthesized
aacagauggagagacagacag

SEQ ID NO: 14555 - RNA, 21 nt, artificial
  Chemically synthesized
ucacuccuuccagcucauccu

SEQ ID NO: 14556 - RNA, 21 nt, artificial
  Chemically synthesized
acagauggagagacagacagg

SEQ ID NO: 14557 - RNA, 21 nt, artificial
  Chemically synthesized
uugcgggugacauucagguag

SEQ ID NO: 14558 - RNA, 21 nt, artificial
  Chemically synthesized
uacugggcguccauguaguuc

SEQ ID NO: 14559 - RNA, 21 nt, artificial
  Chemically synthesized
aacuguauuuccaugucagcu

SEQ ID NO: 14560 - RNA, 21 nt, artificial
  Chemically synthesized
agccauaguggaugucaaacg

SEQ ID NO: 14561 - RNA, 21 nt, artificial
  Chemically synthesized
ucacguaggugcuggacuugu

SEQ ID NO: 14562 - RNA, 21 nt, artificial
  Chemically synthesized
uguauuuccaugucagcuggg

SEQ ID NO: 14563 - RNA, 21 nt, artificial
  Chemically synthesized
guuguugucacggucaaacac

SEQ ID NO: 14564 - RNA, 21 nt, artificial
  Chemically synthesized
guaauacuuggagucugugcc

SEQ ID NO: 14565 - RNA, 21 nt, artificial
  Chemically synthesized
ucugcugcaucagguugucga

SEQ ID NO: 14566 - RNA, 21 nt, artificial
  Chemically synthesized
uaggacagagaacccuuguaa

SEQ ID NO: 14567 - RNA, 21 nt, artificial
  Chemically synthesized
ucucacuccuuccagcucauc

SEQ ID NO: 14568 - RNA, 21 nt, artificial
  Chemically synthesized
aguacugggcguccauguagu

SEQ ID NO: 14569 - RNA, 21 nt, artificial
  Chemically synthesized
ugcaucagguugucgaagacg

SEQ ID NO: 14570 - RNA, 21 nt, artificial
  Chemically synthesized
uccagcaguuugcaguggaug

SEQ ID NO: 14571 - RNA, 21 nt, artificial
  Chemically synthesized
acuguauuuccaugucagcug

SEQ ID NO: 14572 - RNA, 21 nt, artificial
  Chemically synthesized
aaacagauggagagacagaca

SEQ ID NO: 14573 - RNA, 21 nt, artificial
  Chemically synthesized
ugucacggucaaacacagugu

SEQ ID NO: 14574 - RNA, 21 nt, artificial
  Chemically synthesized
ugcacgaaacagaucugugcu

SEQ ID NO: 14575 - RNA, 21 nt, artificial
  Chemically synthesized
cuuccaaugcacgaaacagau

SEQ ID NO: 14576 - RNA, 21 nt, artificial
  Chemically synthesized
acagaacaaaacagcaagucg

SEQ ID NO: 14577 - RNA, 21 nt, artificial
  Chemically synthesized
uccaacaagguggguuuuguc

SEQ ID NO: 14578 - RNA, 21 nt, artificial
  Chemically synthesized
aagauguucugguccaccagc

SEQ ID NO: 14579 - RNA, 21 nt, artificial
  Chemically synthesized
ggucaaacacaguguaguagc

SEQ ID NO: 14580 - RNA, 21 nt, artificial
  Chemically synthesized
agguagaaggagaagauguuc

SEQ ID NO: 14581 - RNA, 21 nt, artificial
  Chemically synthesized
guugucacggucaaacacagu

SEQ ID NO: 14582 - RNA, 21 nt, artificial
  Chemically synthesized
accacagaacaaaacagcaag

SEQ ID NO: 14583 - RNA, 21 nt, artificial
  Chemically synthesized
aagugccuguguccacaaugg

SEQ ID NO: 14584 - RNA, 21 nt, artificial
  Chemically synthesized
agaacaaaacagcaagucggg

SEQ ID NO: 14585 - RNA, 21 nt, artificial
  Chemically synthesized
aacagaucugugcucuggauc

SEQ ID NO: 14586 - RNA, 21 nt, artificial
  Chemically synthesized
ucacggucaaacacaguguag

SEQ ID NO: 14587 - RNA, 21 nt, artificial
  Chemically synthesized
aucugugcucuggaucagcuc

SEQ ID NO: 14588 - RNA, 21 nt, artificial
  Chemically synthesized
aacaacuguauuuccauguca

SEQ ID NO: 14589 - RNA, 21 nt, artificial
  Chemically synthesized
aauacuuggagucugugccac

SEQ ID NO: 14590 - RNA, 21 nt, artificial
  Chemically synthesized
ugucgcuguuguacuuguggu

SEQ ID NO: 14591 - RNA, 21 nt, artificial
  Chemically synthesized
cauucuucacguaggugcugg

SEQ ID NO: 14592 - RNA, 21 nt, artificial
  Chemically synthesized
acuugugguggauccagcaag

SEQ ID NO: 14593 - RNA, 21 nt, artificial
  Chemically synthesized
acccuguuguugucacgguca

SEQ ID NO: 14594 - RNA, 21 nt, artificial
  Chemically synthesized
acagagaacccuuguaauacu

SEQ ID NO: 14595 - RNA, 21 nt, artificial
  Chemically synthesized
cuugucgcuguuguacuugug

SEQ ID NO: 14596 - RNA, 21 nt, artificial
  Chemically synthesized
aaggagaagauguucuggucc

SEQ ID NO: 14597 - RNA, 21 nt, artificial
  Chemically synthesized
auguccagcaguuugcagugg

SEQ ID NO: 14598 - RNA, 21 nt, artificial
  Chemically synthesized
cuggacuugucgcuguuguac

SEQ ID NO: 14599 - RNA, 21 nt, artificial
  Chemically synthesized
gaggccaacaacuguauuucc

SEQ ID NO: 14600 - RNA, 21 nt, artificial
  Chemically synthesized
aagacgacugugaagcacugg

SEQ ID NO: 14601 - RNA, 21 nt, artificial
  Chemically synthesized
cagaacaaaacagcaagucgg

SEQ ID NO: 14602 - RNA, 21 nt, artificial
  Chemically synthesized
gcguccauguaguucuugagc

SEQ ID NO: 14603 - RNA, 21 nt, artificial
  Chemically synthesized
acaggcaggcagcauuucuga

SEQ ID NO: 14604 - RNA, 21 nt, artificial
  Chemically synthesized
acucuccucuguuucugugcu

SEQ ID NO: 14605 - RNA, 21 nt, artificial
  Chemically synthesized
ucuucacguaggugcuggacu

SEQ ID NO: 14606 - RNA, 21 nt, artificial
  Chemically synthesized
agauguucugguccaccagcu

SEQ ID NO: 14607 - RNA, 21 nt, artificial
  Chemically synthesized
agcauuucugaacccagggag

SEQ ID NO: 14608 - RNA, 21 nt, artificial
  Chemically synthesized
ucgaagacgacugugaagcac

SEQ ID NO: 14609 - RNA, 21 nt, artificial
  Chemically synthesized
ugggcguccauguaguucuug

SEQ ID NO: 14610 - RNA, 21 nt, artificial
  Chemically synthesized
gacagcuuguagccuuugccu

SEQ ID NO: 14611 - RNA, 21 nt, artificial
  Chemically synthesized
aaugcacgaaacagaucugug

SEQ ID NO: 14612 - RNA, 21 nt, artificial
  Chemically synthesized
augcacgaaacagaucugugc

SEQ ID NO: 14613 - RNA, 21 nt, artificial
  Chemically synthesized
cucuccucuguuucugugcug

SEQ ID NO: 14614 - RNA, 21 nt, artificial
  Chemically synthesized
cuuguaauacuuggagucugu

SEQ ID NO: 14615 - RNA, 21 nt, artificial
  Chemically synthesized
acagacaggcaggcagcauuu

SEQ ID NO: 14616 - RNA, 21 nt, artificial
  Chemically synthesized
agcaguuugcaguggauggag

SEQ ID NO: 14617 - RNA, 21 nt, artificial
  Chemically synthesized
uuggcugcgaugaaggugaug

SEQ ID NO: 14618 - RNA, 21 nt, artificial
  Chemically synthesized
uaguucuugagcaccucggga

SEQ ID NO: 14619 - RNA, 21 nt, artificial
  Chemically synthesized
acaccuugagcguguaguccu

SEQ ID NO: 14620 - RNA, 21 nt, artificial
  Chemically synthesized
caacaagguggguuuuguccc

SEQ ID NO: 14621 - RNA, 21 nt, artificial
  Chemically synthesized
agcuucugcugcaucagguug

SEQ ID NO: 14622 - RNA, 21 nt, artificial
  Chemically synthesized
agauggagagacagacaggca

SEQ ID NO: 14623 - RNA, 21 nt, artificial
  Chemically synthesized
caagcgauguccagcaguuug

SEQ ID NO: 14624 - RNA, 21 nt, artificial
  Chemically synthesized
agaaggagaagauguucuggu

SEQ ID NO: 14625 - RNA, 21 nt, artificial
  Chemically synthesized
auaguggaugucaaacgaggu

SEQ ID NO: 14626 - RNA, 21 nt, artificial
  Chemically synthesized
ucugugcucuggaucagcucu

SEQ ID NO: 14627 - RNA, 21 nt, artificial
  Chemically synthesized
cagguaggacagagaacccuu

SEQ ID NO: 14628 - RNA, 21 nt, artificial
  Chemically synthesized
ccaacaagguggguuuugucc

SEQ ID NO: 14629 - RNA, 21 nt, artificial
  Chemically synthesized
gccaacaacuguauuuccaug

SEQ ID NO: 14630 - RNA, 21 nt, artificial
  Chemically synthesized
aagcccacccuguuguuguca

SEQ ID NO: 14631 - RNA, 21 nt, artificial
  Chemically synthesized
agaagauguucugguccacca

SEQ ID NO: 14632 - RNA, 21 nt, artificial
  Chemically synthesized
guggaugucaaacgagguacc

SEQ ID NO: 14633 - RNA, 21 nt, artificial
  Chemically synthesized
acaacuguauuuccaugucag

SEQ ID NO: 14634 - RNA, 21 nt, artificial
  Chemically synthesized
aaagaccugccucuccacuuu

SEQ ID NO: 14635 - RNA, 21 nt, artificial
  Chemically synthesized
accugccucuccacuuugaca

SEQ ID NO: 14636 - RNA, 21 nt, artificial
  Chemically synthesized
ugcucagguagaaggagaaga

SEQ ID NO: 14637 - RNA, 21 nt, artificial
  Chemically synthesized
acugggcguccauguaguucu

SEQ ID NO: 14638 - RNA, 21 nt, artificial
  Chemically synthesized
aaaacagcaagucgggcuugg

SEQ ID NO: 14639 - RNA, 21 nt, artificial
  Chemically synthesized
aacccuuguaauacuuggagu

SEQ ID NO: 14640 - RNA, 21 nt, artificial
  Chemically synthesized
agagaacccuuguaauacuug

SEQ ID NO: 14641 - RNA, 21 nt, artificial
  Chemically synthesized
agaucugugcucuggaucagc

SEQ ID NO: 14642 - RNA, 21 nt, artificial
  Chemically synthesized
aaacgagguaccauucuucac

SEQ ID NO: 14643 - RNA, 21 nt, artificial
  Chemically synthesized
cugggcguccauguaguucuu

SEQ ID NO: 14644 - RNA, 21 nt, artificial
  Chemically synthesized
accauucuucacguaggugcu

SEQ ID NO: 14645 - RNA, 21 nt, artificial
  Chemically synthesized
uggaugucaaacgagguacca

SEQ ID NO: 14646 - RNA, 21 nt, artificial
  Chemically synthesized
agguaccauucuucacguagg

SEQ ID NO: 14647 - RNA, 21 nt, artificial
  Chemically synthesized
gguagaaggagaagauguucu

SEQ ID NO: 14648 - RNA, 21 nt, artificial
  Chemically synthesized
acauucagguaggacagagaa

SEQ ID NO: 14649 - RNA, 21 nt, artificial
  Chemically synthesized
agaccugccucuccacuuuga

SEQ ID NO: 14650 - RNA, 21 nt, artificial
  Chemically synthesized
accuugagcguguaguccucu

SEQ ID NO: 14651 - RNA, 21 nt, artificial
  Chemically synthesized
cagagaacccuuguaauacuu

SEQ ID NO: 14652 - RNA, 21 nt, artificial
  Chemically synthesized
aaaccacagaacaaaacagca

SEQ ID NO: 14653 - RNA, 21 nt, artificial
  Chemically synthesized
aacaaaacagcaagucgggcu

SEQ ID NO: 14654 - RNA, 21 nt, artificial
  Chemically synthesized
cauguaguucuugagcaccuc

SEQ ID NO: 14655 - RNA, 21 nt, artificial
  Chemically synthesized
ccauguaguucuugagcaccu

SEQ ID NO: 14656 - RNA, 21 nt, artificial
  Chemically synthesized
acuugucgcuguuguacuugu

SEQ ID NO: 14657 - RNA, 21 nt, artificial
  Chemically synthesized
ugugcucuggaucagcucuac

SEQ ID NO: 14658 - RNA, 21 nt, artificial
  Chemically synthesized
caaugcacgaaacagaucugu

SEQ ID NO: 14659 - RNA, 21 nt, artificial
  Chemically synthesized
acuuggcugcgaugaagguga

SEQ ID NO: 14660 - RNA, 21 nt, artificial
  Chemically synthesized
cacgaaacagaucugugcucu

SEQ ID NO: 14661 - RNA, 21 nt, artificial
  Chemically synthesized
cacagaacaaaacagcaaguc

SEQ ID NO: 14662 - RNA, 21 nt, artificial
  Chemically synthesized
gagaagauguucugguccacc

SEQ ID NO: 14663 - RNA, 21 nt, artificial
  Chemically synthesized
uguccagcaguuugcagugga

SEQ ID NO: 14664 - RNA, 21 nt, artificial
  Chemically synthesized
acggucaaacacaguguagua

SEQ ID NO: 14665 - RNA, 21 nt, artificial
  Chemically synthesized
agcgauguccagcaguuugca

SEQ ID NO: 14666 - RNA, 21 nt, artificial
  Chemically synthesized
caaacgagguaccauucuuca

SEQ ID NO: 14667 - RNA, 21 nt, artificial
  Chemically synthesized
acccuuguaauacuuggaguc

SEQ ID NO: 14668 - RNA, 21 nt, artificial
  Chemically synthesized
aacuuggcugcgaugaaggug

SEQ ID NO: 14669 - RNA, 21 nt, artificial
  Chemically synthesized
gaagacgacugugaagcacug

SEQ ID NO: 14670 - RNA, 21 nt, artificial
  Chemically synthesized
agacaggcaggcagcauuucu

SEQ ID NO: 14671 - RNA, 21 nt, artificial
  Chemically synthesized
cuucugcugcaucagguuguc

SEQ ID NO: 14672 - RNA, 21 nt, artificial
  Chemically synthesized
ccaacaacuguauuuccaugu

SEQ ID NO: 14673 - RNA, 21 nt, artificial
  Chemically synthesized
agguaggacagagaacccuug

SEQ ID NO: 14674 - RNA, 21 nt, artificial
  Chemically synthesized
gaacaaaacagcaagucgggc

SEQ ID NO: 14675 - RNA, 21 nt, artificial
  Chemically synthesized
caaacagauggagagacagac

SEQ ID NO: 14676 - RNA, 21 nt, artificial
  Chemically synthesized
caaagaccugccucuccacuu

SEQ ID NO: 14677 - RNA, 21 nt, artificial
  Chemically synthesized
gaacccuuguaauacuuggag

SEQ ID NO: 14678 - RNA, 21 nt, artificial
  Chemically synthesized
gucaaacacaguguaguagcg

SEQ ID NO: 14679 - RNA, 21 nt, artificial
  Chemically synthesized
guagaaggagaagauguucug

SEQ ID NO: 14680 - RNA, 21 nt, artificial
  Chemically synthesized
cucagguagaaggagaagaug

SEQ ID NO: 14681 - RNA, 21 nt, artificial
  Chemically synthesized
gauguccagcaguuugcagug

SEQ ID NO: 14682 - RNA, 21 nt, artificial
  Chemically synthesized
uacuugugguggauccagcaa

SEQ ID NO: 14683 - RNA, 21 nt, artificial
  Chemically synthesized
acaacagaggucagcugcaga

SEQ ID NO: 14684 - RNA, 21 nt, artificial
  Chemically synthesized
gaaggagaagauguucugguc

SEQ ID NO: 14685 - RNA, 21 nt, artificial
  Chemically synthesized
cuucacguaggugcuggacuu

SEQ ID NO: 14686 - RNA, 21 nt, artificial
  Chemically synthesized
gaagugccuguguccacaaug

SEQ ID NO: 14687 - RNA, 21 nt, artificial
  Chemically synthesized
caaacacaguguaguagcggc

SEQ ID NO: 14688 - RNA, 21 nt, artificial
  Chemically synthesized
aggccaacaacuguauuucca

SEQ ID NO: 14689 - RNA, 21 nt, artificial
  Chemically synthesized
cuguuguacuugugguggauc

SEQ ID NO: 14690 - RNA, 21 nt, artificial
  Chemically synthesized
aaacagaucugugcucuggau

SEQ ID NO: 14691 - RNA, 21 nt, artificial
  Chemically synthesized
gacucuccucuguuucugugc

SEQ ID NO: 14692 - RNA, 21 nt, artificial
  Chemically synthesized
cauguacucgcccugaaucag

SEQ ID NO: 14693 - RNA, 21 nt, artificial
  Chemically synthesized
caaaacagcaagucgggcuug

SEQ ID NO: 14694 - RNA, 21 nt, artificial
  Chemically synthesized
cugugcucuggaucagcucua

SEQ ID NO: 14695 - RNA, 21 nt, artificial
  Chemically synthesized
ccuuguaauacuuggagucug

SEQ ID NO: 14696 - RNA, 21 nt, artificial
  Chemically synthesized
cucugggacucuccucuguuu

SEQ ID NO: 14697 - RNA, 21 nt, artificial
  Chemically synthesized
caacaacuguauuuccauguc

SEQ ID NO: 14698 - RNA, 21 nt, artificial
  Chemically synthesized
ggaggccaacaacuguauuuc

SEQ ID NO: 14699 - RNA, 21 nt, artificial
  Chemically synthesized
uaguggaugucaaacgaggua

SEQ ID NO: 14700 - RNA, 21 nt, artificial
  Chemically synthesized
aggagaagauguucuggucca

SEQ ID NO: 14701 - RNA, 21 nt, artificial
  Chemically synthesized
aggcaggcagcauuucugaac

SEQ ID NO: 14702 - RNA, 21 nt, artificial
  Chemically synthesized
acagaucugugcucuggauca

SEQ ID NO: 14703 - RNA, 21 nt, artificial
  Chemically synthesized
acgaaacagaucugugcucug

SEQ ID NO: 14704 - RNA, 21 nt, artificial
  Chemically synthesized
agcacguuguugacggagaug

SEQ ID NO: 14705 - RNA, 21 nt, artificial
  Chemically synthesized
gaugucaaacgagguaccauu

SEQ ID NO: 14706 - RNA, 21 nt, artificial
  Chemically synthesized
uguguccacaauggccucaca

SEQ ID NO: 14707 - RNA, 21 nt, artificial
  Chemically synthesized
cccuguuguugucacggucaa

SEQ ID NO: 14708 - RNA, 21 nt, artificial
  Chemically synthesized
cgaagacgacugugaagcacu

SEQ ID NO: 14709 - RNA, 21 nt, artificial
  Chemically synthesized
ccggaggccaacaacuguauu

SEQ ID NO: 14710 - RNA, 21 nt, artificial
  Chemically synthesized
cgaaacagaucugugcucugg

SEQ ID NO: 14711 - RNA, 21 nt, artificial
  Chemically synthesized
ggacucuccucuguuucugug

SEQ ID NO: 14712 - RNA, 21 nt, artificial
  Chemically synthesized
ccacagaacaaaacagcaagu

SEQ ID NO: 14713 - RNA, 21 nt, artificial
  Chemically synthesized
aaccacagaacaaaacagcaa

SEQ ID NO: 14714 - RNA, 21 nt, artificial
  Chemically synthesized
gacuugucgcuguuguacuug

SEQ ID NO: 14715 - RNA, 21 nt, artificial
  Chemically synthesized
caccaaacagauggagagaca

SEQ ID NO: 14716 - RNA, 21 nt, artificial
  Chemically synthesized
ccauucuucacguaggugcug

SEQ ID NO: 14717 - RNA, 21 nt, artificial
  Chemically synthesized
gucacggucaaacacagugua

SEQ ID NO: 14718 - RNA, 21 nt, artificial
  Chemically synthesized
gucuuccaaugcacgaaacag

SEQ ID NO: 14719 - RNA, 21 nt, artificial
  Chemically synthesized
guccauguaguucuugagcac

SEQ ID NO: 14720 - RNA, 21 nt, artificial
  Chemically synthesized
ccaaugcacgaaacagaucug

SEQ ID NO: 14721 - RNA, 21 nt, artificial
  Chemically synthesized
cauucagguaggacagagaac

SEQ ID NO: 14722 - RNA, 21 nt, artificial
  Chemically synthesized
gagaacccuuguaauacuugg

SEQ ID NO: 14723 - RNA, 21 nt, artificial
  Chemically synthesized
guacuugugguggauccagca

SEQ ID NO: 14724 - RNA, 21 nt, artificial
  Chemically synthesized
gaucugugcucuggaucagcu

SEQ ID NO: 14725 - RNA, 21 nt, artificial
  Chemically synthesized
guaccauucuucacguaggug

SEQ ID NO: 14726 - RNA, 21 nt, artificial
  Chemically synthesized
gguaggacagagaacccuugu

SEQ ID NO: 14727 - RNA, 21 nt, artificial
  Chemically synthesized
cagaucugugcucuggaucag

SEQ ID NO: 14728 - RNA, 21 nt, artificial
  Chemically synthesized
gcuccaacaagguggguuuug

SEQ ID NO: 14729 - RNA, 21 nt, artificial
  Chemically synthesized
cuuggcugcgaugaaggugau

SEQ ID NO: 14730 - RNA, 21 nt, artificial
  Chemically synthesized
agcaagcgauguccagcaguu

SEQ ID NO: 14731 - RNA, 21 nt, artificial
  Chemically synthesized
cgauguccagcaguuugcagu

SEQ ID NO: 14732 - RNA, 21 nt, artificial
  Chemically synthesized
auucuucacguaggugcugga

SEQ ID NO: 14733 - RNA, 21 nt, artificial
  Chemically synthesized
aguguaguagcggccgaugaa

SEQ ID NO: 14734 - RNA, 21 nt, artificial
  Chemically synthesized
gaaaaccacagaacaaaacag

SEQ ID NO: 14735 - RNA, 21 nt, artificial
  Chemically synthesized
caucgaacuuggcugcgauga

SEQ ID NO: 14736 - RNA, 21 nt, artificial
  Chemically synthesized
gaucauguacucgcccugaau

SEQ ID NO: 14737 - RNA, 21 nt, artificial
  Chemically synthesized
gacagagaacccuuguaauac

SEQ ID NO: 14738 - RNA, 21 nt, artificial
  Chemically synthesized
gucgcuguuguacuuguggug

SEQ ID NO: 14739 - RNA, 21 nt, artificial
  Chemically synthesized
cguccauguaguucuugagca

SEQ ID NO: 14740 - RNA, 21 nt, artificial
  Chemically synthesized
cuugcgggugacauucaggua

SEQ ID NO: 14741 - RNA, 21 nt, artificial
  Chemically synthesized
cggucaaacacaguguaguag

SEQ ID NO: 14742 - RNA, 21 nt, artificial
  Chemically synthesized
acaaaacagcaagucgggcuu

SEQ ID NO: 14743 - RNA, 21 nt, artificial
  Chemically synthesized
ggugacauucagguaggacag

SEQ ID NO: 14744 - RNA, 21 nt, artificial
  Chemically synthesized
gugucgaagacgacugugaag

SEQ ID NO: 14745 - RNA, 21 nt, artificial
  Chemically synthesized
aggaugccaucgaacuuggcu

SEQ ID NO: 14746 - RNA, 21 nt, artificial
  Chemically synthesized
cugggacucuccucuguuucu

SEQ ID NO: 14747 - RNA, 21 nt, artificial
  Chemically synthesized
aggcagcauuucugaacccag

SEQ ID NO: 14748 - RNA, 21 nt, artificial
  Chemically synthesized
gaaacagaucugugcucugga

SEQ ID NO: 14749 - RNA, 21 nt, artificial
  Chemically synthesized
ccaccaaacagauggagagac

SEQ ID NO: 14750 - RNA, 21 nt, artificial
  Chemically synthesized
gggucuuccaaugcacgaaac

SEQ ID NO: 14751 - RNA, 21 nt, artificial
  Chemically synthesized
gccauaguggaugucaaacga

SEQ ID NO: 14752 - RNA, 21 nt, artificial
  Chemically synthesized
aggacagagaacccuuguaau

SEQ ID NO: 14753 - RNA, 21 nt, artificial
  Chemically synthesized
cugcucagguagaaggagaag

SEQ ID NO: 14754 - RNA, 21 nt, artificial
  Chemically synthesized
gagccauaguggaugucaaac

SEQ ID NO: 14755 - RNA, 21 nt, artificial
  Chemically synthesized
gguaccauucuucacguaggu

SEQ ID NO: 14756 - RNA, 21 nt, artificial
  Chemically synthesized
gcugcaucagguugucgaaga

SEQ ID NO: 14757 - RNA, 21 nt, artificial
  Chemically synthesized
gucaaacgagguaccauucuu

SEQ ID NO: 14758 - RNA, 21 nt, artificial
  Chemically synthesized
cuuuggcaaucagguccucca

SEQ ID NO: 14759 - RNA, 21 nt, artificial
  Chemically synthesized
cuccaacaagguggguuuugu

SEQ ID NO: 14760 - RNA, 21 nt, artificial
  Chemically synthesized
gucgaagacgacugugaagca

SEQ ID NO: 14761 - RNA, 21 nt, artificial
  Chemically synthesized
gcuucugcugcaucagguugu

SEQ ID NO: 14762 - RNA, 21 nt, artificial
  Chemically synthesized
gauggacgugaacuugugcag

SEQ ID NO: 14763 - RNA, 21 nt, artificial
  Chemically synthesized
aggcuccaacaagguggguuu

SEQ ID NO: 14764 - RNA, 21 nt, artificial
  Chemically synthesized
cgugucgaagacgacugugaa

SEQ ID NO: 14765 - RNA, 21 nt, artificial
  Chemically synthesized
ggauggacgugaacuugugca

SEQ ID NO: 14766 - RNA, 21 nt, artificial
  Chemically synthesized
aguucuugagcaccucgggaa

SEQ ID NO: 14767 - RNA, 21 nt, artificial
  Chemically synthesized
accaaacagauggagagacag

SEQ ID NO: 14768 - RNA, 21 nt, artificial
  Chemically synthesized
gcacgaaacagaucugugcuc

SEQ ID NO: 14769 - RNA, 21 nt, artificial
  Chemically synthesized
ccuguuguugucacggucaaa

SEQ ID NO: 14770 - RNA, 21 nt, artificial
  Chemically synthesized
caacuguauuuccaugucagc

SEQ ID NO: 14771 - RNA, 21 nt, artificial
  Chemically synthesized
cucucacuccuuccagcucau

SEQ ID NO: 14772 - RNA, 21 nt, artificial
  Chemically synthesized
ccauaguggaugucaaacgag

SEQ ID NO: 14773 - RNA, 21 nt, artificial
  Chemically synthesized
gagguaccauucuucacguag

SEQ ID NO: 14774 - RNA, 21 nt, artificial
  Chemically synthesized
cagcauuucugaacccaggga

SEQ ID NO: 14775 - RNA, 21 nt, artificial
  Chemically synthesized
aucgaacuuggcugcgaugaa

SEQ ID NO: 14776 - RNA, 21 nt, artificial
  Chemically synthesized
cccaccaaacagauggagaga

SEQ ID NO: 14777 - RNA, 21 nt, artificial
  Chemically synthesized
gaagauguucugguccaccag

SEQ ID NO: 14778 - RNA, 21 nt, artificial
  Chemically synthesized
gugacauucagguaggacaga

SEQ ID NO: 14779 - RNA, 21 nt, artificial
  Chemically synthesized
cagguagaaggagaagauguu

SEQ ID NO: 14780 - RNA, 21 nt, artificial
  Chemically synthesized
guucuugagcaccucgggaau

SEQ ID NO: 14781 - RNA, 21 nt, artificial
  Chemically synthesized
ggaaaaccacagaacaaaaca

SEQ ID NO: 14782 - RNA, 21 nt, artificial
  Chemically synthesized
cccuuguaauacuuggagucu

SEQ ID NO: 14783 - RNA, 21 nt, artificial
  Chemically synthesized
cagcaguuugcaguggaugga

SEQ ID NO: 14784 - RNA, 21 nt, artificial
  Chemically synthesized
cggaggccaacaacuguauuu

SEQ ID NO: 14785 - RNA, 21 nt, artificial
  Chemically synthesized
gggacucuccucuguuucugu

SEQ ID NO: 14786 - RNA, 21 nt, artificial
  Chemically synthesized
ggaucauguacucgcccugaa

SEQ ID NO: 14787 - RNA, 21 nt, artificial
  Chemically synthesized
agaacccuuguaauacuugga

SEQ ID NO: 14788 - RNA, 21 nt, artificial
  Chemically synthesized
gggcguccauguaguucuuga

SEQ ID NO: 14789 - RNA, 21 nt, artificial
  Chemically synthesized
guaggacagagaacccuugua

SEQ ID NO: 14790 - RNA, 21 nt, artificial
  Chemically synthesized
ccaaacagauggagagacaga

SEQ ID NO: 14791 - RNA, 21 nt, artificial
  Chemically synthesized
ggacuugucgcuguuguacuu

SEQ ID NO: 14792 - RNA, 21 nt, artificial
  Chemically synthesized
ccgagccauaguggaugucaa

SEQ ID NO: 14793 - RNA, 21 nt, artificial
  Chemically synthesized
guuguacuugugguggaucca

SEQ ID NO: 14794 - RNA, 21 nt, artificial
  Chemically synthesized
gacauucagguaggacagaga

SEQ ID NO: 14795 - RNA, 21 nt, artificial
  Chemically synthesized
guaguacugggcguccaugua

SEQ ID NO: 14796 - RNA, 21 nt, artificial
  Chemically synthesized
guacugggcguccauguaguu

SEQ ID NO: 14797 - RNA, 21 nt, artificial
  Chemically synthesized
caggcaggcagcauuucugaa

SEQ ID NO: 14798 - RNA, 21 nt, artificial
  Chemically synthesized
cugcaucagguugucgaagac

SEQ ID NO: 14799 - RNA, 21 nt, artificial
  Chemically synthesized
gcaagcgauguccagcaguuu

SEQ ID NO: 14800 - RNA, 21 nt, artificial
  Chemically synthesized
ggacagagaacccuuguaaua

SEQ ID NO: 14801 - RNA, 21 nt, artificial
  Chemically synthesized
gauguucugguccaccagcuu

SEQ ID NO: 14802 - RNA, 21 nt, artificial
  Chemically synthesized
gcucagguagaaggagaagau

SEQ ID NO: 14803 - RNA, 21 nt, artificial
  Chemically synthesized
cacggucaaacacaguguagu

SEQ ID NO: 14804 - RNA, 21 nt, artificial
  Chemically synthesized
cgcuguuguacuuguggugga

SEQ ID NO: 14805 - RNA, 21 nt, artificial
  Chemically synthesized
gaacuuggcugcgaugaaggu

SEQ ID NO: 14806 - RNA, 21 nt, artificial
  Chemically synthesized
ggcguccauguaguucuugag

SEQ ID NO: 14807 - RNA, 21 nt, artificial
  Chemically synthesized
caggcagcauuucugaaccca

SEQ ID NO: 14808 - RNA, 21 nt, artificial
  Chemically synthesized
cugcugcaucagguugucgaa

SEQ ID NO: 14809 - RNA, 21 nt, artificial
  Chemically synthesized
ggccaacaacuguauuuccau

SEQ ID NO: 14810 - RNA, 21 nt, artificial
  Chemically synthesized
gggaaaaccacagaacaaaac

SEQ ID NO: 14811 - RNA, 21 nt, artificial
  Chemically synthesized
ggaagugccuguguccacaau

SEQ ID NO: 14812 - RNA, 21 nt, artificial
  Chemically synthesized
gcuggacuugucgcuguugua

SEQ ID NO: 14813 - RNA, 21 nt, artificial
  Chemically synthesized
cgagguaccauucuucacgua

SEQ ID NO: 14814 - RNA, 21 nt, artificial
  Chemically synthesized
cagcuucugcugcaucagguu

SEQ ID NO: 14815 - RNA, 21 nt, artificial
  Chemically synthesized
cagcacguuguugacggagau

SEQ ID NO: 14816 - RNA, 21 nt, artificial
  Chemically synthesized
ggagaagauguucugguccac

SEQ ID NO: 14817 - RNA, 21 nt, artificial
  Chemically synthesized
gcuguuguacuugugguggau

SEQ ID NO: 14818 - RNA, 21 nt, artificial
  Chemically synthesized
ggcuccaacaagguggguuuu

SEQ ID NO: 14819 - RNA, 21 nt, artificial
  Chemically synthesized
cgagccauaguggaugucaaa

SEQ ID NO: 14820 - RNA, 21 nt, artificial
  Chemically synthesized
gggugacauucagguaggaca

SEQ ID NO: 14821 - RNA, 21 nt, artificial
  Chemically synthesized
ggucuuccaaugcacgaaaca

SEQ ID NO: 14822 - RNA, 21 nt, artificial
  Chemically synthesized
ggaugucaaacgagguaccau

SEQ ID NO: 14823 - RNA, 21 nt, artificial
  Chemically synthesized
guccagcaguuugcaguggau

SEQ ID NO: 14824 - RNA, 21 nt, artificial
  Chemically synthesized
ccugcucagguagaaggagaa

SEQ ID NO: 14825 - RNA, 23 nt, artificial
  Chemically synthesized
gguucucuguccuaccugaaugu

SEQ ID NO: 14826 - RNA, 23 nt, artificial
  Chemically synthesized
ggguucucuguccuaccugaaug

SEQ ID NO: 14827 - RNA, 23 nt, artificial
  Chemically synthesized
aggguucucuguccuaccugaau

SEQ ID NO: 14828 - RNA, 23 nt, artificial
  Chemically synthesized
aaggguucucuguccuaccugaa

SEQ ID NO: 14829 - RNA, 23 nt, artificial
  Chemically synthesized
caaggguucucuguccuaccuga

SEQ ID NO: 14830 - RNA, 23 nt, artificial
  Chemically synthesized
ggaggaccugauugccaaaggcc

SEQ ID NO: 14831 - RNA, 23 nt, artificial
  Chemically synthesized
uggaggaccugauugccaaaggc

SEQ ID NO: 14832 - RNA, 23 nt, artificial
  Chemically synthesized
guggaggaccugauugccaaagg

SEQ ID NO: 14833 - RNA, 23 nt, artificial
  Chemically synthesized
uguggaggaccugauugccaaag

SEQ ID NO: 14834 - RNA, 23 nt, artificial
  Chemically synthesized
cuguggaggaccugauugccaaa

SEQ ID NO: 14835 - RNA, 23 nt, artificial
  Chemically synthesized
cuguguuugaccgugacaacaac

SEQ ID NO: 14836 - RNA, 23 nt, artificial
  Chemically synthesized
acuguguuugaccgugacaacaa

SEQ ID NO: 14837 - RNA, 23 nt, artificial
  Chemically synthesized
cacuguguuugaccgugacaaca

SEQ ID NO: 14838 - RNA, 23 nt, artificial
  Chemically synthesized
acacuguguuugaccgugacaac

SEQ ID NO: 14839 - RNA, 23 nt, artificial
  Chemically synthesized
uacacuguguuugaccgugacaa

SEQ ID NO: 14840 - RNA, 23 nt, artificial
  Chemically synthesized
uguuugaccgugacaacaacagg

SEQ ID NO: 14841 - RNA, 23 nt, artificial
  Chemically synthesized
guguuugaccgugacaacaacag

SEQ ID NO: 14842 - RNA, 23 nt, artificial
  Chemically synthesized
uguguuugaccgugacaacaaca

SEQ ID NO: 14843 - RNA, 23 nt, artificial
  Chemically synthesized
cuugcuggauccaccacaaguac

SEQ ID NO: 14844 - RNA, 23 nt, artificial
  Chemically synthesized
gcuugcuggauccaccacaagua

SEQ ID NO: 14845 - RNA, 23 nt, artificial
  Chemically synthesized
cgcuugcuggauccaccacaagu

SEQ ID NO: 14846 - RNA, 23 nt, artificial
  Chemically synthesized
ucgcuugcuggauccaccacaag

SEQ ID NO: 14847 - RNA, 23 nt, artificial
  Chemically synthesized
aucgcuugcuggauccaccacaa

SEQ ID NO: 14848 - RNA, 23 nt, artificial
  Chemically synthesized
cagcugacauggaaauacaguug

SEQ ID NO: 14849 - RNA, 23 nt, artificial
  Chemically synthesized
ccagcugacauggaaauacaguu

SEQ ID NO: 14850 - RNA, 23 nt, artificial
  Chemically synthesized
cccagcugacauggaaauacagu

SEQ ID NO: 14851 - RNA, 23 nt, artificial
  Chemically synthesized
ccccagcugacauggaaauacag

SEQ ID NO: 14852 - RNA, 23 nt, artificial
  Chemically synthesized
gccccagcugacauggaaauaca

SEQ ID NO: 14853 - RNA, 23 nt, artificial
  Chemically synthesized
guuugaccgugacaacaacaggg

SEQ ID NO: 14854 - RNA, 23 nt, artificial
  Chemically synthesized
ggcacagacuccaaguauuacaa

SEQ ID NO: 14855 - RNA, 23 nt, artificial
  Chemically synthesized
uggcacagacuccaaguauuaca

SEQ ID NO: 14856 - RNA, 23 nt, artificial
  Chemically synthesized
guggcacagacuccaaguauuac

SEQ ID NO: 14857 - RNA, 23 nt, artificial
  Chemically synthesized
gguggcacagacuccaaguauua

SEQ ID NO: 14858 - RNA, 23 nt, artificial
  Chemically synthesized
ggguggcacagacuccaaguauu

SEQ ID NO: 14859 - RNA, 23 nt, artificial
  Chemically synthesized
gcacagacuccaaguauuacaag

SEQ ID NO: 14860 - RNA, 23 nt, artificial
  Chemically synthesized
acugaagcugggaggcaaaggcu

SEQ ID NO: 14861 - RNA, 23 nt, artificial
  Chemically synthesized
cacugaagcugggaggcaaaggc

SEQ ID NO: 14862 - RNA, 23 nt, artificial
  Chemically synthesized
acacugaagcugggaggcaaagg

SEQ ID NO: 14863 - RNA, 23 nt, artificial
  Chemically synthesized
cacacugaagcugggaggcaaag

SEQ ID NO: 14864 - RNA, 23 nt, artificial
  Chemically synthesized
ucacacugaagcugggaggcaaa

SEQ ID NO: 14865 - RNA, 23 nt, artificial
  Chemically synthesized
cagaggacuacacgcucaaggug

SEQ ID NO: 14866 - RNA, 23 nt, artificial
  Chemically synthesized
ccagaggacuacacgcucaaggu

SEQ ID NO: 14867 - RNA, 23 nt, artificial
  Chemically synthesized
cccagaggacuacacgcucaagg

SEQ ID NO: 14868 - RNA, 23 nt, artificial
  Chemically synthesized
ccccagaggacuacacgcucaag

SEQ ID NO: 14869 - RNA, 23 nt, artificial
  Chemically synthesized
uccccagaggacuacacgcucaa

SEQ ID NO: 14870 - RNA, 23 nt, artificial
  Chemically synthesized
gugucaaaguggagaggcagguc

SEQ ID NO: 14871 - RNA, 23 nt, artificial
  Chemically synthesized
ggugucaaaguggagaggcaggu

SEQ ID NO: 14872 - RNA, 23 nt, artificial
  Chemically synthesized
cggugucaaaguggagaggcagg

SEQ ID NO: 14873 - RNA, 23 nt, artificial
  Chemically synthesized
gcggugucaaaguggagaggcag

SEQ ID NO: 14874 - RNA, 23 nt, artificial
  Chemically synthesized
ggcggugucaaaguggagaggca

SEQ ID NO: 14875 - RNA, 23 nt, artificial
  Chemically synthesized
ccucguuugacauccacuauggc

SEQ ID NO: 14876 - RNA, 23 nt, artificial
  Chemically synthesized
accucguuugacauccacuaugg

SEQ ID NO: 14877 - RNA, 23 nt, artificial
  Chemically synthesized
uaccucguuugacauccacuaug

SEQ ID NO: 14878 - RNA, 23 nt, artificial
  Chemically synthesized
guaccucguuugacauccacuau

SEQ ID NO: 14879 - RNA, 23 nt, artificial
  Chemically synthesized
gguaccucguuugacauccacua

SEQ ID NO: 14880 - RNA, 23 nt, artificial
  Chemically synthesized
cagacuccaaguauuacaagggu

SEQ ID NO: 14881 - RNA, 23 nt, artificial
  Chemically synthesized
acagacuccaaguauuacaaggg

SEQ ID NO: 14882 - RNA, 23 nt, artificial
  Chemically synthesized
cacagacuccaaguauuacaagg

SEQ ID NO: 14883 - RNA, 23 nt, artificial
  Chemically synthesized
gcuucaugggcauggacaucccg

SEQ ID NO: 14884 - RNA, 23 nt, artificial
  Chemically synthesized
ggcuucaugggcauggacauccc

SEQ ID NO: 14885 - RNA, 23 nt, artificial
  Chemically synthesized
cggcuucaugggcauggacaucc

SEQ ID NO: 14886 - RNA, 23 nt, artificial
  Chemically synthesized
gcggcuucaugggcauggacauc

SEQ ID NO: 14887 - RNA, 23 nt, artificial
  Chemically synthesized
agcggcuucaugggcauggacau

SEQ ID NO: 14888 - RNA, 23 nt, artificial
  Chemically synthesized
ucuguuucgugcauuggaagacc

SEQ ID NO: 14889 - RNA, 23 nt, artificial
  Chemically synthesized
aucuguuucgugcauuggaagac

SEQ ID NO: 14890 - RNA, 23 nt, artificial
  Chemically synthesized
gaucuguuucgugcauuggaaga

SEQ ID NO: 14891 - RNA, 23 nt, artificial
  Chemically synthesized
agaucuguuucgugcauuggaag

SEQ ID NO: 14892 - RNA, 23 nt, artificial
  Chemically synthesized
cagaucuguuucgugcauuggaa

SEQ ID NO: 14893 - RNA, 23 nt, artificial
  Chemically synthesized
ucaccuucaucgcagccaaguuc

SEQ ID NO: 14894 - RNA, 23 nt, artificial
  Chemically synthesized
aucaccuucaucgcagccaaguu

SEQ ID NO: 14895 - RNA, 23 nt, artificial
  Chemically synthesized
caucaccuucaucgcagccaagu

SEQ ID NO: 14896 - RNA, 23 nt, artificial
  Chemically synthesized
gcaucaccuucaucgcagccaag

SEQ ID NO: 14897 - RNA, 23 nt, artificial
  Chemically synthesized
ggcaucaccuucaucgcagccaa

SEQ ID NO: 14898 - RNA, 23 nt, artificial
  Chemically synthesized
gcuggauccaccacaaguacaac

SEQ ID NO: 14899 - RNA, 23 nt, artificial
  Chemically synthesized
ugcuggauccaccacaaguacaa

SEQ ID NO: 14900 - RNA, 23 nt, artificial
  Chemically synthesized
uugcuggauccaccacaaguaca

SEQ ID NO: 14901 - RNA, 23 nt, artificial
  Chemically synthesized
agaagcugguggaccagaacauc

SEQ ID NO: 14902 - RNA, 23 nt, artificial
  Chemically synthesized
cagaagcugguggaccagaacau

SEQ ID NO: 14903 - RNA, 23 nt, artificial
  Chemically synthesized
gcagaagcugguggaccagaaca

SEQ ID NO: 14904 - RNA, 23 nt, artificial
  Chemically synthesized
agcagaagcugguggaccagaac

SEQ ID NO: 14905 - RNA, 23 nt, artificial
  Chemically synthesized
cagcagaagcugguggaccagaa

SEQ ID NO: 14906 - RNA, 23 nt, artificial
  Chemically synthesized
gcuacuacacuguguuugaccgu

SEQ ID NO: 14907 - RNA, 23 nt, artificial
  Chemically synthesized
cgcuacuacacuguguuugaccg

SEQ ID NO: 14908 - RNA, 23 nt, artificial
  Chemically synthesized
ccgcuacuacacuguguuugacc

SEQ ID NO: 14909 - RNA, 23 nt, artificial
  Chemically synthesized
gccgcuacuacacuguguuugac

SEQ ID NO: 14910 - RNA, 23 nt, artificial
  Chemically synthesized
ggccgcuacuacacuguguuuga

SEQ ID NO: 14911 - RNA, 23 nt, artificial
  Chemically synthesized
cagccaaguucgauggcauccug

SEQ ID NO: 14912 - RNA, 23 nt, artificial
  Chemically synthesized
gcagccaaguucgauggcauccu

SEQ ID NO: 14913 - RNA, 23 nt, artificial
  Chemically synthesized
cgcagccaaguucgauggcaucc

SEQ ID NO: 14914 - RNA, 23 nt, artificial
  Chemically synthesized
ucgcagccaaguucgauggcauc

SEQ ID NO: 14915 - RNA, 23 nt, artificial
  Chemically synthesized
aucgcagccaaguucgauggcau

SEQ ID NO: 14916 - RNA, 23 nt, artificial
  Chemically synthesized
aguccagcaccuacgugaagaau

SEQ ID NO: 14917 - RNA, 23 nt, artificial
  Chemically synthesized
aaguccagcaccuacgugaagaa

SEQ ID NO: 14918 - RNA, 23 nt, artificial
  Chemically synthesized
caaguccagcaccuacgugaaga

SEQ ID NO: 14919 - RNA, 23 nt, artificial
  Chemically synthesized
acaaguccagcaccuacgugaag

SEQ ID NO: 14920 - RNA, 23 nt, artificial
  Chemically synthesized
gacaaguccagcaccuacgugaa

SEQ ID NO: 14921 - RNA, 23 nt, artificial
  Chemically synthesized
agaacaucuucuccuucuaccug

SEQ ID NO: 14922 - RNA, 23 nt, artificial
  Chemically synthesized
cagaacaucuucuccuucuaccu

SEQ ID NO: 14923 - RNA, 23 nt, artificial
  Chemically synthesized
ccagaacaucuucuccuucuacc

SEQ ID NO: 14924 - RNA, 23 nt, artificial
  Chemically synthesized
accagaacaucuucuccuucuac

SEQ ID NO: 14925 - RNA, 23 nt, artificial
  Chemically synthesized
gaccagaacaucuucuccuucua

SEQ ID NO: 14926 - RNA, 23 nt, artificial
  Chemically synthesized
ggauccaccacaaguacaacagc

SEQ ID NO: 14927 - RNA, 23 nt, artificial
  Chemically synthesized
uggauccaccacaaguacaacag

SEQ ID NO: 14928 - RNA, 23 nt, artificial
  Chemically synthesized
cuggauccaccacaaguacaaca

SEQ ID NO: 14929 - RNA, 23 nt, artificial
  Chemically synthesized
ucuguggaggaccugauugccaa

SEQ ID NO: 14930 - RNA, 23 nt, artificial
  Chemically synthesized
ccagcaccuacgugaagaauggu

SEQ ID NO: 14931 - RNA, 23 nt, artificial
  Chemically synthesized
uccagcaccuacgugaagaaugg

SEQ ID NO: 14932 - RNA, 23 nt, artificial
  Chemically synthesized
guccagcaccuacgugaagaaug

SEQ ID NO: 14933 - RNA, 23 nt, artificial
  Chemically synthesized
aaugguaccucguuugacaucca

SEQ ID NO: 14934 - RNA, 23 nt, artificial
  Chemically synthesized
gaaugguaccucguuugacaucc

SEQ ID NO: 14935 - RNA, 23 nt, artificial
  Chemically synthesized
agaaugguaccucguuugacauc

SEQ ID NO: 14936 - RNA, 23 nt, artificial
  Chemically synthesized
aagaaugguaccucguuugacau

SEQ ID NO: 14937 - RNA, 23 nt, artificial
  Chemically synthesized
gaagaaugguaccucguuugaca

SEQ ID NO: 14938 - RNA, 23 nt, artificial
  Chemically synthesized
gcuucacagucgucuucgacacg

SEQ ID NO: 14939 - RNA, 23 nt, artificial
  Chemically synthesized
ugcuucacagucgucuucgacac

SEQ ID NO: 14940 - RNA, 23 nt, artificial
  Chemically synthesized
gugcuucacagucgucuucgaca

SEQ ID NO: 14941 - RNA, 23 nt, artificial
  Chemically synthesized
agugcuucacagucgucuucgac

SEQ ID NO: 14942 - RNA, 23 nt, artificial
  Chemically synthesized
cagugcuucacagucgucuucga

SEQ ID NO: 14943 - RNA, 23 nt, artificial
  Chemically synthesized
ccagcacagaaacagaggagagu

SEQ ID NO: 14944 - RNA, 23 nt, artificial
  Chemically synthesized
gccagcacagaaacagaggagag

SEQ ID NO: 14945 - RNA, 23 nt, artificial
  Chemically synthesized
cgccagcacagaaacagaggaga

SEQ ID NO: 14946 - RNA, 23 nt, artificial
  Chemically synthesized
gcgccagcacagaaacagaggag

SEQ ID NO: 14947 - RNA, 23 nt, artificial
  Chemically synthesized
cgcgccagcacagaaacagagga

SEQ ID NO: 14948 - RNA, 23 nt, artificial
  Chemically synthesized
gcugauccagagcacagaucugu

SEQ ID NO: 14949 - RNA, 23 nt, artificial
  Chemically synthesized
agcugauccagagcacagaucug

SEQ ID NO: 14950 - RNA, 23 nt, artificial
  Chemically synthesized
gagcugauccagagcacagaucu

SEQ ID NO: 14951 - RNA, 23 nt, artificial
  Chemically synthesized
agagcugauccagagcacagauc

SEQ ID NO: 14952 - RNA, 23 nt, artificial
  Chemically synthesized
uagagcugauccagagcacagau

SEQ ID NO: 14953 - RNA, 23 nt, artificial
  Chemically synthesized
accugaaugucacccgcaaggcc

SEQ ID NO: 14954 - RNA, 23 nt, artificial
  Chemically synthesized
uaccugaaugucacccgcaaggc

SEQ ID NO: 14955 - RNA, 23 nt, artificial
  Chemically synthesized
cuaccugaaugucacccgcaagg

SEQ ID NO: 14956 - RNA, 23 nt, artificial
  Chemically synthesized
ccuaccugaaugucacccgcaag

SEQ ID NO: 14957 - RNA, 23 nt, artificial
  Chemically synthesized
uccuaccugaaugucacccgcaa

SEQ ID NO: 14958 - RNA, 23 nt, artificial
  Chemically synthesized
ccgaggugcucaagaacuacaug

SEQ ID NO: 14959 - RNA, 23 nt, artificial
  Chemically synthesized
cccgaggugcucaagaacuacau

SEQ ID NO: 14960 - RNA, 23 nt, artificial
  Chemically synthesized
ucccgaggugcucaagaacuaca

SEQ ID NO: 14961 - RNA, 23 nt, artificial
  Chemically synthesized
uucccgaggugcucaagaacuac

SEQ ID NO: 14962 - RNA, 23 nt, artificial
  Chemically synthesized
auucccgaggugcucaagaacua

SEQ ID NO: 14963 - RNA, 23 nt, artificial
  Chemically synthesized
acauggacgcccaguacuacggg

SEQ ID NO: 14964 - RNA, 23 nt, artificial
  Chemically synthesized
uacauggacgcccaguacuacgg

SEQ ID NO: 14965 - RNA, 23 nt, artificial
  Chemically synthesized
cuacauggacgcccaguacuacg

SEQ ID NO: 14966 - RNA, 23 nt, artificial
  Chemically synthesized
acuacauggacgcccaguacuac

SEQ ID NO: 14967 - RNA, 23 nt, artificial
  Chemically synthesized
aacuacauggacgcccaguacua

SEQ ID NO: 14968 - RNA, 23 nt, artificial
  Chemically synthesized
acaaccugaugcagcagaagcug

SEQ ID NO: 14969 - RNA, 23 nt, artificial
  Chemically synthesized
gacaaccugaugcagcagaagcu

SEQ ID NO: 14970 - RNA, 23 nt, artificial
  Chemically synthesized
cgacaaccugaugcagcagaagc

SEQ ID NO: 14971 - RNA, 23 nt, artificial
  Chemically synthesized
ucgacaaccugaugcagcagaag

SEQ ID NO: 14972 - RNA, 23 nt, artificial
  Chemically synthesized
uucgacaaccugaugcagcagaa

SEQ ID NO: 14973 - RNA, 23 nt, artificial
  Chemically synthesized
cucuguggaggaccugauugcca

SEQ ID NO: 14974 - RNA, 23 nt, artificial
  Chemically synthesized
gcucuguggaggaccugauugcc

SEQ ID NO: 14975 - RNA, 23 nt, artificial
  Chemically synthesized
ggcucuguggaggaccugauugc

SEQ ID NO: 14976 - RNA, 23 nt, artificial
  Chemically synthesized
gggcucuguggaggaccugauug

SEQ ID NO: 14977 - RNA, 23 nt, artificial
  Chemically synthesized
ggggcucuguggaggaccugauu

SEQ ID NO: 14978 - RNA, 23 nt, artificial
  Chemically synthesized
ccgucucaaaguacucccaggcg

SEQ ID NO: 14979 - RNA, 23 nt, artificial
  Chemically synthesized
cccgucucaaaguacucccaggc

SEQ ID NO: 14980 - RNA, 23 nt, artificial
  Chemically synthesized
ccccgucucaaaguacucccagg

SEQ ID NO: 14981 - RNA, 23 nt, artificial
  Chemically synthesized
gccccgucucaaaguacucccag

SEQ ID NO: 14982 - RNA, 23 nt, artificial
  Chemically synthesized
ggccccgucucaaaguacuccca

SEQ ID NO: 14983 - RNA, 23 nt, artificial
  Chemically synthesized
ggcaaaggcuacaagcugucccc

SEQ ID NO: 14984 - RNA, 23 nt, artificial
  Chemically synthesized
aggcaaaggcuacaagcuguccc

SEQ ID NO: 14985 - RNA, 23 nt, artificial
  Chemically synthesized
gaggcaaaggcuacaagcugucc

SEQ ID NO: 14986 - RNA, 23 nt, artificial
  Chemically synthesized
ggaggcaaaggcuacaagcuguc

SEQ ID NO: 14987 - RNA, 23 nt, artificial
  Chemically synthesized
gggaggcaaaggcuacaagcugu

SEQ ID NO: 14988 - RNA, 23 nt, artificial
  Chemically synthesized
ccgucuucgacaaccugaugcag

SEQ ID NO: 14989 - RNA, 23 nt, artificial
  Chemically synthesized
cccgucuucgacaaccugaugca

SEQ ID NO: 14990 - RNA, 23 nt, artificial
  Chemically synthesized
gcccgucuucgacaaccugaugc

SEQ ID NO: 14991 - RNA, 23 nt, artificial
  Chemically synthesized
ugcccgucuucgacaaccugaug

SEQ ID NO: 14992 - RNA, 23 nt, artificial
  Chemically synthesized
cugcccgucuucgacaaccugau

SEQ ID NO: 14993 - RNA, 23 nt, artificial
  Chemically synthesized
guucucuguccuaccugaauguc

SEQ ID NO: 14994 - RNA, 23 nt, artificial
  Chemically synthesized
ccuucaucgcagccaaguucgau

SEQ ID NO: 14995 - RNA, 23 nt, artificial
  Chemically synthesized
accuucaucgcagccaaguucga

SEQ ID NO: 14996 - RNA, 23 nt, artificial
  Chemically synthesized
caccuucaucgcagccaaguucg

SEQ ID NO: 14997 - RNA, 23 nt, artificial
  Chemically synthesized
acugcaaacugcuggacaucgcu

SEQ ID NO: 14998 - RNA, 23 nt, artificial
  Chemically synthesized
cacugcaaacugcuggacaucgc

SEQ ID NO: 14999 - RNA, 23 nt, artificial
  Chemically synthesized
ccacugcaaacugcuggacaucg

SEQ ID NO: 15000 - RNA, 23 nt, artificial
  Chemically synthesized
uccacugcaaacugcuggacauc

SEQ ID NO: 15001 - RNA, 23 nt, artificial
  Chemically synthesized
auccacugcaaacugcuggacau

SEQ ID NO: 15002 - RNA, 23 nt, artificial
  Chemically synthesized
ugagcuggaaggagugagagggg

SEQ ID NO: 15003 - RNA, 23 nt, artificial
  Chemically synthesized
augagcuggaaggagugagaggg

SEQ ID NO: 15004 - RNA, 23 nt, artificial
  Chemically synthesized
gaugagcuggaaggagugagagg

SEQ ID NO: 15005 - RNA, 23 nt, artificial
  Chemically synthesized
ggaugagcuggaaggagugagag

SEQ ID NO: 15006 - RNA, 23 nt, artificial
  Chemically synthesized
aggaugagcuggaaggagugaga

SEQ ID NO: 15007 - RNA, 23 nt, artificial
  Chemically synthesized
aacagaggagagucccagagcag

SEQ ID NO: 15008 - RNA, 23 nt, artificial
  Chemically synthesized
aaacagaggagagucccagagca

SEQ ID NO: 15009 - RNA, 23 nt, artificial
  Chemically synthesized
gaaacagaggagagucccagagc

SEQ ID NO: 15010 - RNA, 23 nt, artificial
  Chemically synthesized
agaaacagaggagagucccagag

SEQ ID NO: 15011 - RNA, 23 nt, artificial
  Chemically synthesized
cagaaacagaggagagucccaga

SEQ ID NO: 15012 - RNA, 23 nt, artificial
  Chemically synthesized
acaaguacaacagcgacaagucc

SEQ ID NO: 15013 - RNA, 23 nt, artificial
  Chemically synthesized
cacaaguacaacagcgacaaguc

SEQ ID NO: 15014 - RNA, 23 nt, artificial
  Chemically synthesized
ccacaaguacaacagcgacaagu

SEQ ID NO: 15015 - RNA, 23 nt, artificial
  Chemically synthesized
accacaaguacaacagcgacaag

SEQ ID NO: 15016 - RNA, 23 nt, artificial
  Chemically synthesized
caccacaaguacaacagcgacaa

SEQ ID NO: 15017 - RNA, 23 nt, artificial
  Chemically synthesized
ugaggaugagcuggaaggaguga

SEQ ID NO: 15018 - RNA, 23 nt, artificial
  Chemically synthesized
cugaggaugagcuggaaggagug

SEQ ID NO: 15019 - RNA, 23 nt, artificial
  Chemically synthesized
ccugaggaugagcuggaaggagu

SEQ ID NO: 15020 - RNA, 23 nt, artificial
  Chemically synthesized
gccugaggaugagcuggaaggag

SEQ ID NO: 15021 - RNA, 23 nt, artificial
  Chemically synthesized
ggccugaggaugagcuggaagga

SEQ ID NO: 15022 - RNA, 23 nt, artificial
  Chemically synthesized
ucaucgcagccaaguucgauggc

SEQ ID NO: 15023 - RNA, 23 nt, artificial
  Chemically synthesized
uucaucgcagccaaguucgaugg

SEQ ID NO: 15024 - RNA, 23 nt, artificial
  Chemically synthesized
cuucaucgcagccaaguucgaug

SEQ ID NO: 15025 - RNA, 23 nt, artificial
  Chemically synthesized
acagaaacagaggagagucccag

SEQ ID NO: 15026 - RNA, 23 nt, artificial
  Chemically synthesized
cacagaaacagaggagaguccca

SEQ ID NO: 15027 - RNA, 23 nt, artificial
  Chemically synthesized
gggacaaaacccaccuuguugga

SEQ ID NO: 15028 - RNA, 23 nt, artificial
  Chemically synthesized
ggggacaaaacccaccuuguugg

SEQ ID NO: 15029 - RNA, 23 nt, artificial
  Chemically synthesized
gaggggacaaaacccaccuuguu

SEQ ID NO: 15030 - RNA, 23 nt, artificial
  Chemically synthesized
agaggggacaaaacccaccuugu

SEQ ID NO: 15031 - RNA, 23 nt, artificial
  Chemically synthesized
aggugcucaagaacuacauggac

SEQ ID NO: 15032 - RNA, 23 nt, artificial
  Chemically synthesized
gaggugcucaagaacuacaugga

SEQ ID NO: 15033 - RNA, 23 nt, artificial
  Chemically synthesized
cgaggugcucaagaacuacaugg

SEQ ID NO: 15034 - RNA, 23 nt, artificial
  Chemically synthesized
acauggaaauacaguuguuggcc

SEQ ID NO: 15035 - RNA, 23 nt, artificial
  Chemically synthesized
gacauggaaauacaguuguuggc

SEQ ID NO: 15036 - RNA, 23 nt, artificial
  Chemically synthesized
ugacauggaaauacaguuguugg

SEQ ID NO: 15037 - RNA, 23 nt, artificial
  Chemically synthesized
cugacauggaaauacaguuguug

SEQ ID NO: 15038 - RNA, 23 nt, artificial
  Chemically synthesized
gcugacauggaaauacaguuguu

SEQ ID NO: 15039 - RNA, 23 nt, artificial
  Chemically synthesized
gaggaugagcuggaaggagugag

SEQ ID NO: 15040 - RNA, 23 nt, artificial
  Chemically synthesized
ggacaaaacccaccuuguuggag

SEQ ID NO: 15041 - RNA, 23 nt, artificial
  Chemically synthesized
gucugucucuccaucuguuuggu

SEQ ID NO: 15042 - RNA, 23 nt, artificial
  Chemically synthesized
ugucugucucuccaucuguuugg

SEQ ID NO: 15043 - RNA, 23 nt, artificial
  Chemically synthesized
cugucugucucuccaucuguuug

SEQ ID NO: 15044 - RNA, 23 nt, artificial
  Chemically synthesized
ccugucugucucuccaucuguuu

SEQ ID NO: 15045 - RNA, 23 nt, artificial
  Chemically synthesized
gccugucugucucuccaucuguu

SEQ ID NO: 15046 - RNA, 23 nt, artificial
  Chemically synthesized
ugguaccucguuugacauccacu

SEQ ID NO: 15047 - RNA, 23 nt, artificial
  Chemically synthesized
augguaccucguuugacauccac

SEQ ID NO: 15048 - RNA, 23 nt, artificial
  Chemically synthesized
agaacuacauggacgcccaguac

SEQ ID NO: 15049 - RNA, 23 nt, artificial
  Chemically synthesized
aagaacuacauggacgcccagua

SEQ ID NO: 15050 - RNA, 23 nt, artificial
  Chemically synthesized
caagaacuacauggacgcccagu

SEQ ID NO: 15051 - RNA, 23 nt, artificial
  Chemically synthesized
ucaagaacuacauggacgcccag

SEQ ID NO: 15052 - RNA, 23 nt, artificial
  Chemically synthesized
cucaagaacuacauggacgccca

SEQ ID NO: 15053 - RNA, 23 nt, artificial
  Chemically synthesized
ccaccacaaguacaacagcgaca

SEQ ID NO: 15054 - RNA, 23 nt, artificial
  Chemically synthesized
agccaggcaucaccuucaucgca

SEQ ID NO: 15055 - RNA, 23 nt, artificial
  Chemically synthesized
cagccaggcaucaccuucaucgc

SEQ ID NO: 15056 - RNA, 23 nt, artificial
  Chemically synthesized
gcagccaggcaucaccuucaucg

SEQ ID NO: 15057 - RNA, 23 nt, artificial
  Chemically synthesized
agcagccaggcaucaccuucauc

SEQ ID NO: 15058 - RNA, 23 nt, artificial
  Chemically synthesized
aagcagccaggcaucaccuucau

SEQ ID NO: 15059 - RNA, 23 nt, artificial
  Chemically synthesized
gcuguuuuguucugugguuuucc

SEQ ID NO: 15060 - RNA, 23 nt, artificial
  Chemically synthesized
ugcuguuuuguucugugguuuuc

SEQ ID NO: 15061 - RNA, 23 nt, artificial
  Chemically synthesized
uugcuguuuuguucugugguuuu

SEQ ID NO: 15062 - RNA, 23 nt, artificial
  Chemically synthesized
cuugcuguuuuguucugugguuu

SEQ ID NO: 15063 - RNA, 23 nt, artificial
  Chemically synthesized
acuugcuguuuuguucugugguu

SEQ ID NO: 15064 - RNA, 23 nt, artificial
  Chemically synthesized
cuguccuaccugaaugucacccg

SEQ ID NO: 15065 - RNA, 23 nt, artificial
  Chemically synthesized
ucuguccuaccugaaugucaccc

SEQ ID NO: 15066 - RNA, 23 nt, artificial
  Chemically synthesized
cucuguccuaccugaaugucacc

SEQ ID NO: 15067 - RNA, 23 nt, artificial
  Chemically synthesized
ucucuguccuaccugaaugucac

SEQ ID NO: 15068 - RNA, 23 nt, artificial
  Chemically synthesized
uucucuguccuaccugaauguca

SEQ ID NO: 15069 - RNA, 23 nt, artificial
  Chemically synthesized
agcugacauggaaauacaguugu

SEQ ID NO: 15070 - RNA, 23 nt, artificial
  Chemically synthesized
aaguggagaggcaggucuuuggg

SEQ ID NO: 15071 - RNA, 23 nt, artificial
  Chemically synthesized
aaaguggagaggcaggucuuugg

SEQ ID NO: 15072 - RNA, 23 nt, artificial
  Chemically synthesized
caaaguggagaggcaggucuuug

SEQ ID NO: 15073 - RNA, 23 nt, artificial
  Chemically synthesized
ucaaaguggagaggcaggucuuu

SEQ ID NO: 15074 - RNA, 23 nt, artificial
  Chemically synthesized
gucaaaguggagaggcaggucuu

SEQ ID NO: 15075 - RNA, 23 nt, artificial
  Chemically synthesized
ugauucagggcgaguacaugauc

SEQ ID NO: 15076 - RNA, 23 nt, artificial
  Chemically synthesized
cugauucagggcgaguacaugau

SEQ ID NO: 15077 - RNA, 23 nt, artificial
  Chemically synthesized
gcugauucagggcgaguacauga

SEQ ID NO: 15078 - RNA, 23 nt, artificial
  Chemically synthesized
cgcugauucagggcgaguacaug

SEQ ID NO: 15079 - RNA, 23 nt, artificial
  Chemically synthesized
ccgcugauucagggcgaguacau

SEQ ID NO: 15080 - RNA, 23 nt, artificial
  Chemically synthesized
cggccgcuacuacacuguguuug

SEQ ID NO: 15081 - RNA, 23 nt, artificial
  Chemically synthesized
ucggccgcuacuacacuguguuu

SEQ ID NO: 15082 - RNA, 23 nt, artificial
  Chemically synthesized
cuucgacaaccugaugcagcaga

SEQ ID NO: 15083 - RNA, 23 nt, artificial
  Chemically synthesized
ucuucgacaaccugaugcagcag

SEQ ID NO: 15084 - RNA, 23 nt, artificial
  Chemically synthesized
gucuucgacaaccugaugcagca

SEQ ID NO: 15085 - RNA, 23 nt, artificial
  Chemically synthesized
uuugaccgugacaacaacagggu

SEQ ID NO: 15086 - RNA, 23 nt, artificial
  Chemically synthesized
caaguacaacagcgacaagucca

SEQ ID NO: 15087 - RNA, 23 nt, artificial
  Chemically synthesized
ugaagaaugguaccucguuugac

SEQ ID NO: 15088 - RNA, 23 nt, artificial
  Chemically synthesized
gugaagaaugguaccucguuuga

SEQ ID NO: 15089 - RNA, 23 nt, artificial
  Chemically synthesized
cgugaagaaugguaccucguuug

SEQ ID NO: 15090 - RNA, 23 nt, artificial
  Chemically synthesized
acgugaagaaugguaccucguuu

SEQ ID NO: 15091 - RNA, 23 nt, artificial
  Chemically synthesized
aggacuacacgcucaaggugucg

SEQ ID NO: 15092 - RNA, 23 nt, artificial
  Chemically synthesized
gaggacuacacgcucaagguguc

SEQ ID NO: 15093 - RNA, 23 nt, artificial
  Chemically synthesized
agaggacuacacgcucaaggugu

SEQ ID NO: 15094 - RNA, 23 nt, artificial
  Chemically synthesized
ugggaggcaaaggcuacaagcug

SEQ ID NO: 15095 - RNA, 23 nt, artificial
  Chemically synthesized
cugggaggcaaaggcuacaagcu

SEQ ID NO: 15096 - RNA, 23 nt, artificial
  Chemically synthesized
gcugggaggcaaaggcuacaagc

SEQ ID NO: 15097 - RNA, 23 nt, artificial
  Chemically synthesized
agcugggaggcaaaggcuacaag

SEQ ID NO: 15098 - RNA, 23 nt, artificial
  Chemically synthesized
aagcugggaggcaaaggcuacaa

SEQ ID NO: 15099 - RNA, 23 nt, artificial
  Chemically synthesized
ucuucaucggccgcuacuacacu

SEQ ID NO: 15100 - RNA, 23 nt, artificial
  Chemically synthesized
gucuucaucggccgcuacuacac

SEQ ID NO: 15101 - RNA, 23 nt, artificial
  Chemically synthesized
cgucuucaucggccgcuacuaca

SEQ ID NO: 15102 - RNA, 23 nt, artificial
  Chemically synthesized
acgucuucaucggccgcuacuac

SEQ ID NO: 15103 - RNA, 23 nt, artificial
  Chemically synthesized
gacgucuucaucggccgcuacua

SEQ ID NO: 15104 - RNA, 23 nt, artificial
  Chemically synthesized
gcaucuccgucaacaacgugcug

SEQ ID NO: 15105 - RNA, 23 nt, artificial
  Chemically synthesized
cgcaucuccgucaacaacgugcu

SEQ ID NO: 15106 - RNA, 23 nt, artificial
  Chemically synthesized
ccgcaucuccgucaacaacgugc

SEQ ID NO: 15107 - RNA, 23 nt, artificial
  Chemically synthesized
cccgcaucuccgucaacaacgug

SEQ ID NO: 15108 - RNA, 23 nt, artificial
  Chemically synthesized
ccccgcaucuccgucaacaacgu

SEQ ID NO: 15109 - RNA, 23 nt, artificial
  Chemically synthesized
ccagugcuucacagucgucuucg

SEQ ID NO: 15110 - RNA, 23 nt, artificial
  Chemically synthesized
cccagugcuucacagucgucuuc

SEQ ID NO: 15111 - RNA, 23 nt, artificial
  Chemically synthesized
ccccagugcuucacagucgucuu

SEQ ID NO: 15112 - RNA, 23 nt, artificial
  Chemically synthesized
cauccacugcaaacugcuggaca

SEQ ID NO: 15113 - RNA, 23 nt, artificial
  Chemically synthesized
agcacagaaacagaggagagucc

SEQ ID NO: 15114 - RNA, 23 nt, artificial
  Chemically synthesized
cagcacagaaacagaggagaguc

SEQ ID NO: 15115 - RNA, 23 nt, artificial
  Chemically synthesized
gccgcugauucagggcgaguaca

SEQ ID NO: 15116 - RNA, 23 nt, artificial
  Chemically synthesized
aguggagaggcaggucuuugggg

SEQ ID NO: 15117 - RNA, 23 nt, artificial
  Chemically synthesized
gcacagaaacagaggagaguccc

SEQ ID NO: 15118 - RNA, 23 nt, artificial
  Chemically synthesized
gguggaccagaacaucuucuccu

SEQ ID NO: 15119 - RNA, 23 nt, artificial
  Chemically synthesized
ugguggaccagaacaucuucucc

SEQ ID NO: 15120 - RNA, 23 nt, artificial
  Chemically synthesized
cugguggaccagaacaucuucuc

SEQ ID NO: 15121 - RNA, 23 nt, artificial
  Chemically synthesized
gcugguggaccagaacaucuucu

SEQ ID NO: 15122 - RNA, 23 nt, artificial
  Chemically synthesized
agcugguggaccagaacaucuuc

SEQ ID NO: 15123 - RNA, 23 nt, artificial
  Chemically synthesized
aucggccgcuacuacacuguguu

SEQ ID NO: 15124 - RNA, 23 nt, artificial
  Chemically synthesized
cucguuugacauccacuauggcu

SEQ ID NO: 15125 - RNA, 23 nt, artificial
  Chemically synthesized
ugcacaaguucacguccauccgc

SEQ ID NO: 15126 - RNA, 23 nt, artificial
  Chemically synthesized
cugcacaaguucacguccauccg

SEQ ID NO: 15127 - RNA, 23 nt, artificial
  Chemically synthesized
gcugcacaaguucacguccaucc

SEQ ID NO: 15128 - RNA, 23 nt, artificial
  Chemically synthesized
cgcugcacaaguucacguccauc

SEQ ID NO: 15129 - RNA, 23 nt, artificial
  Chemically synthesized
ccgcugcacaaguucacguccau

SEQ ID NO: 15130 - RNA, 23 nt, artificial
  Chemically synthesized
cgacuugcuguuuuguucugugg

SEQ ID NO: 15131 - RNA, 23 nt, artificial
  Chemically synthesized
ccgacuugcuguuuuguucugug

SEQ ID NO: 15132 - RNA, 23 nt, artificial
  Chemically synthesized
cccgacuugcuguuuuguucugu

SEQ ID NO: 15133 - RNA, 23 nt, artificial
  Chemically synthesized
gcccgacuugcuguuuuguucug

SEQ ID NO: 15134 - RNA, 23 nt, artificial
  Chemically synthesized
agcccgacuugcuguuuuguucu

SEQ ID NO: 15135 - RNA, 23 nt, artificial
  Chemically synthesized
cauuguggacacaggcacuuccc

SEQ ID NO: 15136 - RNA, 23 nt, artificial
  Chemically synthesized
ccauuguggacacaggcacuucc

SEQ ID NO: 15137 - RNA, 23 nt, artificial
  Chemically synthesized
gccauuguggacacaggcacuuc

SEQ ID NO: 15138 - RNA, 23 nt, artificial
  Chemically synthesized
ggccauuguggacacaggcacuu

SEQ ID NO: 15139 - RNA, 23 nt, artificial
  Chemically synthesized
aggccauuguggacacaggcacu

SEQ ID NO: 15140 - RNA, 23 nt, artificial
  Chemically synthesized
acagaucuguuucgugcauugga

SEQ ID NO: 15141 - RNA, 23 nt, artificial
  Chemically synthesized
caaguucgauggcauccugggca

SEQ ID NO: 15142 - RNA, 23 nt, artificial
  Chemically synthesized
ccaaguucgauggcauccugggc

SEQ ID NO: 15143 - RNA, 23 nt, artificial
  Chemically synthesized
gccaaguucgauggcauccuggg

SEQ ID NO: 15144 - RNA, 23 nt, artificial
  Chemically synthesized
agccaaguucgauggcauccugg

SEQ ID NO: 15145 - RNA, 23 nt, artificial
  Chemically synthesized
aagcccgacuugcuguuuuguuc

SEQ ID NO: 15146 - RNA, 23 nt, artificial
  Chemically synthesized
auucagggcgaguacaugauccc

SEQ ID NO: 15147 - RNA, 23 nt, artificial
  Chemically synthesized
gauucagggcgaguacaugaucc

SEQ ID NO: 15148 - RNA, 23 nt, artificial
  Chemically synthesized
gcucaagaacuacauggacgccc

SEQ ID NO: 15149 - RNA, 23 nt, artificial
  Chemically synthesized
ugcucaagaacuacauggacgcc

SEQ ID NO: 15150 - RNA, 23 nt, artificial
  Chemically synthesized
gugcucaagaacuacauggacgc

SEQ ID NO: 15151 - RNA, 23 nt, artificial
  Chemically synthesized
ggugcucaagaacuacauggacg

SEQ ID NO: 15152 - RNA, 23 nt, artificial
  Chemically synthesized
cauucccgaggugcucaagaacu

SEQ ID NO: 15153 - RNA, 23 nt, artificial
  Chemically synthesized
ccauucccgaggugcucaagaac

SEQ ID NO: 15154 - RNA, 23 nt, artificial
  Chemically synthesized
cccauucccgaggugcucaagaa

SEQ ID NO: 15155 - RNA, 23 nt, artificial
  Chemically synthesized
agaaaugcugccugccugucugu

SEQ ID NO: 15156 - RNA, 23 nt, artificial
  Chemically synthesized
cagaaaugcugccugccugucug

SEQ ID NO: 15157 - RNA, 23 nt, artificial
  Chemically synthesized
ucagaaaugcugccugccugucu

SEQ ID NO: 15158 - RNA, 23 nt, artificial
  Chemically synthesized
uucagaaaugcugccugccuguc

SEQ ID NO: 15159 - RNA, 23 nt, artificial
  Chemically synthesized
guucagaaaugcugccugccugu

SEQ ID NO: 15160 - RNA, 23 nt, artificial
  Chemically synthesized
cacagaucuguuucgugcauugg

SEQ ID NO: 15161 - RNA, 23 nt, artificial
  Chemically synthesized
gcacagaucuguuucgugcauug

SEQ ID NO: 15162 - RNA, 23 nt, artificial
  Chemically synthesized
cuguuucgugcauuggaagaccc

SEQ ID NO: 15163 - RNA, 23 nt, artificial
  Chemically synthesized
agcacagaucuguuucgugcauu

SEQ ID NO: 15164 - RNA, 23 nt, artificial
  Chemically synthesized
gagcacagaucuguuucgugcau

SEQ ID NO: 15165 - RNA, 23 nt, artificial
  Chemically synthesized
agagcacagaucuguuucgugca

SEQ ID NO: 15166 - RNA, 23 nt, artificial
  Chemically synthesized
ggaccagaacaucuucuccuucu

SEQ ID NO: 15167 - RNA, 23 nt, artificial
  Chemically synthesized
uggaccagaacaucuucuccuuc

SEQ ID NO: 15168 - RNA, 23 nt, artificial
  Chemically synthesized
guggaccagaacaucuucuccuu

SEQ ID NO: 15169 - RNA, 23 nt, artificial
  Chemically synthesized
uacgugaagaaugguaccucguu

SEQ ID NO: 15170 - RNA, 23 nt, artificial
  Chemically synthesized
cuacgugaagaaugguaccucgu

SEQ ID NO: 15171 - RNA, 23 nt, artificial
  Chemically synthesized
ccuacgugaagaaugguaccucg

SEQ ID NO: 15172 - RNA, 23 nt, artificial
  Chemically synthesized
aagcugguggaccagaacaucuu

SEQ ID NO: 15173 - RNA, 23 nt, artificial
  Chemically synthesized
gaagcugguggaccagaacaucu

SEQ ID NO: 15174 - RNA, 23 nt, artificial
  Chemically synthesized
gaaauacaguuguuggccuccgg

SEQ ID NO: 15175 - RNA, 23 nt, artificial
  Chemically synthesized
ggaaauacaguuguuggccuccg

SEQ ID NO: 15176 - RNA, 23 nt, artificial
  Chemically synthesized
uggaaauacaguuguuggccucc

SEQ ID NO: 15177 - RNA, 23 nt, artificial
  Chemically synthesized
auggaaauacaguuguuggccuc

SEQ ID NO: 15178 - RNA, 23 nt, artificial
  Chemically synthesized
cauggaaauacaguuguuggccu

SEQ ID NO: 15179 - RNA, 23 nt, artificial
  Chemically synthesized
accuacgugaagaaugguaccuc

SEQ ID NO: 15180 - RNA, 23 nt, artificial
  Chemically synthesized
caccuacgugaagaaugguaccu

SEQ ID NO: 15181 - RNA, 23 nt, artificial
  Chemically synthesized
gcaccuacgugaagaaugguacc

SEQ ID NO: 15182 - RNA, 23 nt, artificial
  Chemically synthesized
agcaccuacgugaagaaugguac

SEQ ID NO: 15183 - RNA, 23 nt, artificial
  Chemically synthesized
uguuucgugcauuggaagacccc

SEQ ID NO: 15184 - RNA, 23 nt, artificial
  Chemically synthesized
caagcccgacuugcuguuuuguu

SEQ ID NO: 15185 - RNA, 23 nt, artificial
  Chemically synthesized
ccucccuggguucagaaaugcug

SEQ ID NO: 15186 - RNA, 23 nt, artificial
  Chemically synthesized
cccucccuggguucagaaaugcu

SEQ ID NO: 15187 - RNA, 23 nt, artificial
  Chemically synthesized
ccccucccuggguucagaaaugc

SEQ ID NO: 15188 - RNA, 23 nt, artificial
  Chemically synthesized
uccccucccuggguucagaaaug

SEQ ID NO: 15189 - RNA, 23 nt, artificial
  Chemically synthesized
uuccccucccuggguucagaaau

SEQ ID NO: 15190 - RNA, 23 nt, artificial
  Chemically synthesized
uccagagcacagaucuguuucgu

SEQ ID NO: 15191 - RNA, 23 nt, artificial
  Chemically synthesized
auccagagcacagaucuguuucg

SEQ ID NO: 15192 - RNA, 23 nt, artificial
  Chemically synthesized
gauccagagcacagaucuguuuc

SEQ ID NO: 15193 - RNA, 23 nt, artificial
  Chemically synthesized
ugauccagagcacagaucuguuu

SEQ ID NO: 15194 - RNA, 23 nt, artificial
  Chemically synthesized
cugauccagagcacagaucuguu

SEQ ID NO: 15195 - RNA, 23 nt, artificial
  Chemically synthesized
cagcaccuacgugaagaauggua

SEQ ID NO: 15196 - RNA, 23 nt, artificial
  Chemically synthesized
cuacacuguguuugaccgugaca

SEQ ID NO: 15197 - RNA, 23 nt, artificial
  Chemically synthesized
acaacaacagggugggcuucgcc

SEQ ID NO: 15198 - RNA, 23 nt, artificial
  Chemically synthesized
gacaacaacagggugggcuucgc

SEQ ID NO: 15199 - RNA, 23 nt, artificial
  Chemically synthesized
ugacaacaacagggugggcuucg

SEQ ID NO: 15200 - RNA, 23 nt, artificial
  Chemically synthesized
gugacaacaacagggugggcuuc

SEQ ID NO: 15201 - RNA, 23 nt, artificial
  Chemically synthesized
cgugacaacaacagggugggcuu

SEQ ID NO: 15202 - RNA, 23 nt, artificial
  Chemically synthesized
agccccagcugacauggaaauac

SEQ ID NO: 15203 - RNA, 23 nt, artificial
  Chemically synthesized
gagccccagcugacauggaaaua

SEQ ID NO: 15204 - RNA, 23 nt, artificial
  Chemically synthesized
caaccugaugcagcagaagcugg

SEQ ID NO: 15205 - RNA, 23 nt, artificial
  Chemically synthesized
gaacuacauggacgcccaguacu

SEQ ID NO: 15206 - RNA, 23 nt, artificial
  Chemically synthesized
caaacugcuggacaucgcuugcu

SEQ ID NO: 15207 - RNA, 23 nt, artificial
  Chemically synthesized
gcaaacugcuggacaucgcuugc

SEQ ID NO: 15208 - RNA, 23 nt, artificial
  Chemically synthesized
ugcaaacugcuggacaucgcuug

SEQ ID NO: 15209 - RNA, 23 nt, artificial
  Chemically synthesized
cugcaaacugcuggacaucgcuu

SEQ ID NO: 15210 - RNA, 23 nt, artificial
  Chemically synthesized
gaucacacugaagcugggaggca

SEQ ID NO: 15211 - RNA, 23 nt, artificial
  Chemically synthesized
cgaucacacugaagcugggaggc

SEQ ID NO: 15212 - RNA, 23 nt, artificial
  Chemically synthesized
gcgaucacacugaagcugggagg

SEQ ID NO: 15213 - RNA, 23 nt, artificial
  Chemically synthesized
cgcgaucacacugaagcugggag

SEQ ID NO: 15214 - RNA, 23 nt, artificial
  Chemically synthesized
ccgcgaucacacugaagcuggga

SEQ ID NO: 15215 - RNA, 23 nt, artificial
  Chemically synthesized
acaaggguucucuguccuaccug

SEQ ID NO: 15216 - RNA, 23 nt, artificial
  Chemically synthesized
uacaaggguucucuguccuaccu

SEQ ID NO: 15217 - RNA, 23 nt, artificial
  Chemically synthesized
uuacaaggguucucuguccuacc

SEQ ID NO: 15218 - RNA, 23 nt, artificial
  Chemically synthesized
auuacaaggguucucuguccuac

SEQ ID NO: 15219 - RNA, 23 nt, artificial
  Chemically synthesized
uauuacaaggguucucuguccua

SEQ ID NO: 15220 - RNA, 23 nt, artificial
  Chemically synthesized
ugccugucugucucuccaucugu

SEQ ID NO: 15221 - RNA, 23 nt, artificial
  Chemically synthesized
cugccugucugucucuccaucug

SEQ ID NO: 15222 - RNA, 23 nt, artificial
  Chemically synthesized
ccugccugucugucucuccaucu

SEQ ID NO: 15223 - RNA, 23 nt, artificial
  Chemically synthesized
gccugccugucugucucuccauc

SEQ ID NO: 15224 - RNA, 23 nt, artificial
  Chemically synthesized
ugccugccugucugucucuccau

SEQ ID NO: 15225 - RNA, 23 nt, artificial
  Chemically synthesized
caaguauuacaaggguucucugu

SEQ ID NO: 15226 - RNA, 23 nt, artificial
  Chemically synthesized
ccaaguauuacaaggguucucug

SEQ ID NO: 15227 - RNA, 23 nt, artificial
  Chemically synthesized
uccaaguauuacaaggguucucu

SEQ ID NO: 15228 - RNA, 23 nt, artificial
  Chemically synthesized
cuccaaguauuacaaggguucuc

SEQ ID NO: 15229 - RNA, 23 nt, artificial
  Chemically synthesized
acuccaaguauuacaaggguucu

SEQ ID NO: 15230 - RNA, 23 nt, artificial
  Chemically synthesized
caaaacccaccuuguuggagccu

SEQ ID NO: 15231 - RNA, 23 nt, artificial
  Chemically synthesized
acaaaacccaccuuguuggagcc

SEQ ID NO: 15232 - RNA, 23 nt, artificial
  Chemically synthesized
gacaaaacccaccuuguuggagc

SEQ ID NO: 15233 - RNA, 23 nt, artificial
  Chemically synthesized
uggacaucgcuugcuggauccac

SEQ ID NO: 15234 - RNA, 23 nt, artificial
  Chemically synthesized
cuggacaucgcuugcuggaucca

SEQ ID NO: 15235 - RNA, 23 nt, artificial
  Chemically synthesized
gcuggacaucgcuugcuggaucc

SEQ ID NO: 15236 - RNA, 23 nt, artificial
  Chemically synthesized
ugcuggacaucgcuugcuggauc

SEQ ID NO: 15237 - RNA, 23 nt, artificial
  Chemically synthesized
cugcuggacaucgcuugcuggau

SEQ ID NO: 15238 - RNA, 23 nt, artificial
  Chemically synthesized
ccauccacugcaaacugcuggac

SEQ ID NO: 15239 - RNA, 23 nt, artificial
  Chemically synthesized
uccauccacugcaaacugcugga

SEQ ID NO: 15240 - RNA, 23 nt, artificial
  Chemically synthesized
cuccauccacugcaaacugcugg

SEQ ID NO: 15241 - RNA, 23 nt, artificial
  Chemically synthesized
ccuccauccacugcaaacugcug

SEQ ID NO: 15242 - RNA, 23 nt, artificial
  Chemically synthesized
cccuccauccacugcaaacugcu

SEQ ID NO: 15243 - RNA, 23 nt, artificial
  Chemically synthesized
acuacacuguguuugaccgugac

SEQ ID NO: 15244 - RNA, 23 nt, artificial
  Chemically synthesized
uacuacacuguguuugaccguga

SEQ ID NO: 15245 - RNA, 23 nt, artificial
  Chemically synthesized
cacccuaccuguucagugucccg

SEQ ID NO: 15246 - RNA, 23 nt, artificial
  Chemically synthesized
ccacccuaccuguucaguguccc

SEQ ID NO: 15247 - RNA, 23 nt, artificial
  Chemically synthesized
gccacccuaccuguucagugucc

SEQ ID NO: 15248 - RNA, 23 nt, artificial
  Chemically synthesized
ugccacccuaccuguucaguguc

SEQ ID NO: 15249 - RNA, 23 nt, artificial
  Chemically synthesized
cugccacccuaccuguucagugu

SEQ ID NO: 15250 - RNA, 23 nt, artificial
  Chemically synthesized
ugaccgugacaacaacagggugg

SEQ ID NO: 15251 - RNA, 23 nt, artificial
  Chemically synthesized
uugaccgugacaacaacagggug

SEQ ID NO: 15252 - RNA, 23 nt, artificial
  Chemically synthesized
guauuacaaggguucucuguccu

SEQ ID NO: 15253 - RNA, 23 nt, artificial
  Chemically synthesized
aguauuacaaggguucucugucc

SEQ ID NO: 15254 - RNA, 23 nt, artificial
  Chemically synthesized
aaguauuacaaggguucucuguc

SEQ ID NO: 15255 - RNA, 23 nt, artificial
  Chemically synthesized
uguuuuguucugugguuuucccc

SEQ ID NO: 15256 - RNA, 23 nt, artificial
  Chemically synthesized
cuguuuuguucugugguuuuccc

SEQ ID NO: 15257 - RNA, 23 nt, artificial
  Chemically synthesized
aucuucuccuucuaccugagcag

SEQ ID NO: 15258 - RNA, 23 nt, artificial
  Chemically synthesized
caucuucuccuucuaccugagca

SEQ ID NO: 15259 - RNA, 23 nt, artificial
  Chemically synthesized
acaucuucuccuucuaccugagc

SEQ ID NO: 15260 - RNA, 23 nt, artificial
  Chemically synthesized
aacaucuucuccuucuaccugag

SEQ ID NO: 15261 - RNA, 23 nt, artificial
  Chemically synthesized
gaacaucuucuccuucuaccuga

SEQ ID NO: 15262 - RNA, 23 nt, artificial
  Chemically synthesized
acacaggcacuucccucauggug

SEQ ID NO: 15263 - RNA, 23 nt, artificial
  Chemically synthesized
gacacaggcacuucccucauggu

SEQ ID NO: 15264 - RNA, 23 nt, artificial
  Chemically synthesized
ggacacaggcacuucccucaugg

SEQ ID NO: 15265 - RNA, 23 nt, artificial
  Chemically synthesized
uggacacaggcacuucccucaug

SEQ ID NO: 15266 - RNA, 23 nt, artificial
  Chemically synthesized
guggacacaggcacuucccucau

SEQ ID NO: 15267 - RNA, 23 nt, artificial
  Chemically synthesized
uggguggcacagacuccaaguau

SEQ ID NO: 15268 - RNA, 23 nt, artificial
  Chemically synthesized
cuggguggcacagacuccaagua

SEQ ID NO: 15269 - RNA, 23 nt, artificial
  Chemically synthesized
ccaagcccgacuugcuguuuugu

SEQ ID NO: 15270 - RNA, 23 nt, artificial
  Chemically synthesized
gacuccaaguauuacaaggguuc

SEQ ID NO: 15271 - RNA, 23 nt, artificial
  Chemically synthesized
agacuccaaguauuacaaggguu

SEQ ID NO: 15272 - RNA, 23 nt, artificial
  Chemically synthesized
guagagcugauccagagcacaga

SEQ ID NO: 15273 - RNA, 23 nt, artificial
  Chemically synthesized
uucaucggccgcuacuacacugu

SEQ ID NO: 15274 - RNA, 23 nt, artificial
  Chemically synthesized
cuucaucggccgcuacuacacug

SEQ ID NO: 15275 - RNA, 23 nt, artificial
  Chemically synthesized
ccccuccauccacugcaaacugc

SEQ ID NO: 15276 - RNA, 23 nt, artificial
  Chemically synthesized
uccccuccauccacugcaaacug

SEQ ID NO: 15277 - RNA, 23 nt, artificial
  Chemically synthesized
guccccuccauccacugcaaacu

SEQ ID NO: 15278 - RNA, 23 nt, artificial
  Chemically synthesized
uguccuaccugaaugucacccgc

SEQ ID NO: 15279 - RNA, 23 nt, artificial
  Chemically synthesized
cccuggguucagaaaugcugccu

SEQ ID NO: 15280 - RNA, 23 nt, artificial
  Chemically synthesized
ucccuggguucagaaaugcugcc

SEQ ID NO: 15281 - RNA, 23 nt, artificial
  Chemically synthesized
cucccuggguucagaaaugcugc

SEQ ID NO: 15282 - RNA, 23 nt, artificial
  Chemically synthesized
ccagagcacagaucuguuucgug

SEQ ID NO: 15283 - RNA, 23 nt, artificial
  Chemically synthesized
acaacagcgacaaguccagcacc

SEQ ID NO: 15284 - RNA, 23 nt, artificial
  Chemically synthesized
uacaacagcgacaaguccagcac

SEQ ID NO: 15285 - RNA, 23 nt, artificial
  Chemically synthesized
guacaacagcgacaaguccagca

SEQ ID NO: 15286 - RNA, 23 nt, artificial
  Chemically synthesized
aguacaacagcgacaaguccagc

SEQ ID NO: 15287 - RNA, 23 nt, artificial
  Chemically synthesized
aaguacaacagcgacaaguccag

SEQ ID NO: 15288 - RNA, 23 nt, artificial
  Chemically synthesized
cauguauuggccuggaggugggg

SEQ ID NO: 15289 - RNA, 23 nt, artificial
  Chemically synthesized
gcauguauuggccuggagguggg

SEQ ID NO: 15290 - RNA, 23 nt, artificial
  Chemically synthesized
ggcauguauuggccuggaggugg

SEQ ID NO: 15291 - RNA, 23 nt, artificial
  Chemically synthesized
gggcauguauuggccuggaggug

SEQ ID NO: 15292 - RNA, 23 nt, artificial
  Chemically synthesized
ggggcauguauuggccuggaggu

SEQ ID NO: 15293 - RNA, 23 nt, artificial
  Chemically synthesized
ucugcagcugaccucuguugucc

SEQ ID NO: 15294 - RNA, 23 nt, artificial
  Chemically synthesized
cucugcagcugaccucuguuguc

SEQ ID NO: 15295 - RNA, 23 nt, artificial
  Chemically synthesized
ccucugcagcugaccucuguugu

SEQ ID NO: 15296 - RNA, 23 nt, artificial
  Chemically synthesized
uccucugcagcugaccucuguug

SEQ ID NO: 15297 - RNA, 23 nt, artificial
  Chemically synthesized
uuccucugcagcugaccucuguu

SEQ ID NO: 15298 - RNA, 23 nt, artificial
  Chemically synthesized
caucgcagccaaguucgauggca

SEQ ID NO: 15299 - RNA, 23 nt, artificial
  Chemically synthesized
agcugaccucuguuguccucccc

SEQ ID NO: 15300 - RNA, 23 nt, artificial
  Chemically synthesized
cagcugaccucuguuguccuccc

SEQ ID NO: 15301 - RNA, 23 nt, artificial
  Chemically synthesized
gcagcugaccucuguuguccucc

SEQ ID NO: 15302 - RNA, 23 nt, artificial
  Chemically synthesized
ugcagcugaccucuguuguccuc

SEQ ID NO: 15303 - RNA, 23 nt, artificial
  Chemically synthesized
cugcagcugaccucuguuguccu

SEQ ID NO: 15304 - RNA, 23 nt, artificial
  Chemically synthesized
uccaccacaaguacaacagcgac

SEQ ID NO: 15305 - RNA, 23 nt, artificial
  Chemically synthesized
auccaccacaaguacaacagcga

SEQ ID NO: 15306 - RNA, 23 nt, artificial
  Chemically synthesized
cccgcugcacaaguucacgucca

SEQ ID NO: 15307 - RNA, 23 nt, artificial
  Chemically synthesized
gguagagcugauccagagcacag

SEQ ID NO: 15308 - RNA, 23 nt, artificial
  Chemically synthesized
ggguagagcugauccagagcaca

SEQ ID NO: 15309 - RNA, 23 nt, artificial
  Chemically synthesized
ugucaaaguggagaggcaggucu

SEQ ID NO: 15310 - RNA, 23 nt, artificial
  Chemically synthesized
gauccaccacaaguacaacagcg

SEQ ID NO: 15311 - RNA, 23 nt, artificial
  Chemically synthesized
cgacaaguccagcaccuacguga

SEQ ID NO: 15312 - RNA, 23 nt, artificial
  Chemically synthesized
gacuugcuguuuuguucuguggu

SEQ ID NO: 15313 - RNA, 23 nt, artificial
  Chemically synthesized
uucagggcgaguacaugaucccc

SEQ ID NO: 15314 - RNA, 23 nt, artificial
  Chemically synthesized
ugaugcagcagaagcugguggac

SEQ ID NO: 15315 - RNA, 23 nt, artificial
  Chemically synthesized
cugaugcagcagaagcuggugga

SEQ ID NO: 15316 - RNA, 23 nt, artificial
  Chemically synthesized
ccugaugcagcagaagcuggugg

SEQ ID NO: 15317 - RNA, 23 nt, artificial
  Chemically synthesized
accugaugcagcagaagcuggug

SEQ ID NO: 15318 - RNA, 23 nt, artificial
  Chemically synthesized
aaccugaugcagcagaagcuggu

SEQ ID NO: 15319 - RNA, 23 nt, artificial
  Chemically synthesized
aggcaucaccuucaucgcagcca

SEQ ID NO: 15320 - RNA, 23 nt, artificial
  Chemically synthesized
caggcaucaccuucaucgcagcc

SEQ ID NO: 15321 - RNA, 23 nt, artificial
  Chemically synthesized
ccaggcaucaccuucaucgcagc

SEQ ID NO: 15322 - RNA, 23 nt, artificial
  Chemically synthesized
gccaggcaucaccuucaucgcag

SEQ ID NO: 15323 - RNA, 23 nt, artificial
  Chemically synthesized
acaucgcuugcuggauccaccac

SEQ ID NO: 15324 - RNA, 23 nt, artificial
  Chemically synthesized
gacaucgcuugcuggauccacca

SEQ ID NO: 15325 - RNA, 23 nt, artificial
  Chemically synthesized
ggacaucgcuugcuggauccacc

SEQ ID NO: 15326 - RNA, 23 nt, artificial
  Chemically synthesized
cccccagugcuucacagucgucu

SEQ ID NO: 15327 - RNA, 23 nt, artificial
  Chemically synthesized
cguuugacauccacuauggcucg

SEQ ID NO: 15328 - RNA, 23 nt, artificial
  Chemically synthesized
ucguuugacauccacuauggcuc

SEQ ID NO: 15329 - RNA, 23 nt, artificial
  Chemically synthesized
cuacuacacuguguuugaccgug

SEQ ID NO: 15330 - RNA, 23 nt, artificial
  Chemically synthesized
cgucuucgacaaccugaugcagc

SEQ ID NO: 15331 - RNA, 23 nt, artificial
  Chemically synthesized
ucugucucuccaucuguuuggug

SEQ ID NO: 15332 - RNA, 23 nt, artificial
  Chemically synthesized
ccuggguucagaaaugcugccug

SEQ ID NO: 15333 - RNA, 23 nt, artificial
  Chemically synthesized
gcgacaaguccagcaccuacgug

SEQ ID NO: 15334 - RNA, 23 nt, artificial
  Chemically synthesized
agcgacaaguccagcaccuacgu

SEQ ID NO: 15335 - RNA, 23 nt, artificial
  Chemically synthesized
gcaaaggcuacaagcugucccca

SEQ ID NO: 15336 - RNA, 23 nt, artificial
  Chemically synthesized
aucccgcugcacaaguucacguc

SEQ ID NO: 15337 - RNA, 23 nt, artificial
  Chemically synthesized
gaucccgcugcacaaguucacgu

SEQ ID NO: 15338 - RNA, 23 nt, artificial
  Chemically synthesized
ggaucccgcugcacaaguucacg

SEQ ID NO: 15339 - RNA, 23 nt, artificial
  Chemically synthesized
aggaucccgcugcacaaguucac

SEQ ID NO: 15340 - RNA, 23 nt, artificial
  Chemically synthesized
caggaucccgcugcacaaguuca

SEQ ID NO: 15341 - RNA, 23 nt, artificial
  Chemically synthesized
gucucaaaguacucccaggcggu

SEQ ID NO: 15342 - RNA, 23 nt, artificial
  Chemically synthesized
cgucucaaaguacucccaggcgg

SEQ ID NO: 15343 - RNA, 23 nt, artificial
  Chemically synthesized
acaaguucacguccauccgccgg

SEQ ID NO: 15344 - RNA, 23 nt, artificial
  Chemically synthesized
cacaaguucacguccauccgccg

SEQ ID NO: 15345 - RNA, 23 nt, artificial
  Chemically synthesized
gcacaaguucacguccauccgcc

SEQ ID NO: 15346 - RNA, 23 nt, artificial
  Chemically synthesized
guccuaccugaaugucacccgca

SEQ ID NO: 15347 - RNA, 23 nt, artificial
  Chemically synthesized
aaaugcugccugccugucugucu

SEQ ID NO: 15348 - RNA, 23 nt, artificial
  Chemically synthesized
gaaaugcugccugccugucuguc

SEQ ID NO: 15349 - RNA, 23 nt, artificial
  Chemically synthesized
gacuacacgcucaaggugucgca

SEQ ID NO: 15350 - RNA, 23 nt, artificial
  Chemically synthesized
ggacuacacgcucaaggugucgc

SEQ ID NO: 15351 - RNA, 23 nt, artificial
  Chemically synthesized
ucacagucgucuucgacacgggc

SEQ ID NO: 15352 - RNA, 23 nt, artificial
  Chemically synthesized
uucacagucgucuucgacacggg

SEQ ID NO: 15353 - RNA, 23 nt, artificial
  Chemically synthesized
cuucacagucgucuucgacacgg

SEQ ID NO: 15354 - RNA, 23 nt, artificial
  Chemically synthesized
ucagggcgaguacaugauccccu

SEQ ID NO: 15355 - RNA, 23 nt, artificial
  Chemically synthesized
cccaagcccgacuugcuguuuug

SEQ ID NO: 15356 - RNA, 23 nt, artificial
  Chemically synthesized
cugucucuccaucuguuuggugg

SEQ ID NO: 15357 - RNA, 23 nt, artificial
  Chemically synthesized
ugaggccauuguggacacaggca

SEQ ID NO: 15358 - RNA, 23 nt, artificial
  Chemically synthesized
gugaggccauuguggacacaggc

SEQ ID NO: 15359 - RNA, 23 nt, artificial
  Chemically synthesized
ugugaggccauuguggacacagg

SEQ ID NO: 15360 - RNA, 23 nt, artificial
  Chemically synthesized
cugugaggccauuguggacacag

SEQ ID NO: 15361 - RNA, 23 nt, artificial
  Chemically synthesized
gcugugaggccauuguggacaca

SEQ ID NO: 15362 - RNA, 23 nt, artificial
  Chemically synthesized
aaacugcuggacaucgcuugcug

SEQ ID NO: 15363 - RNA, 23 nt, artificial
  Chemically synthesized
gggguagagcugauccagagcac

SEQ ID NO: 15364 - RNA, 23 nt, artificial
  Chemically synthesized
ggggguagagcugauccagagca

SEQ ID NO: 15365 - RNA, 23 nt, artificial
  Chemically synthesized
ucuccgucaacaacgugcugccc

SEQ ID NO: 15366 - RNA, 23 nt, artificial
  Chemically synthesized
aucuccgucaacaacgugcugcc

SEQ ID NO: 15367 - RNA, 23 nt, artificial
  Chemically synthesized
caucuccgucaacaacgugcugc

SEQ ID NO: 15368 - RNA, 23 nt, artificial
  Chemically synthesized
gcccauucccgaggugcucaaga

SEQ ID NO: 15369 - RNA, 23 nt, artificial
  Chemically synthesized
cagagcacagaucuguuucgugc

SEQ ID NO: 15370 - RNA, 23 nt, artificial
  Chemically synthesized
ucuucuccuucuaccugagcagg

SEQ ID NO: 15371 - RNA, 23 nt, artificial
  Chemically synthesized
uucuccuucuaccugagcaggga

SEQ ID NO: 15372 - RNA, 23 nt, artificial
  Chemically synthesized
cuucuccuucuaccugagcaggg

SEQ ID NO: 15373 - RNA, 23 nt, artificial
  Chemically synthesized
cuggguucagaaaugcugccugc

SEQ ID NO: 15374 - RNA, 23 nt, artificial
  Chemically synthesized
gcccaagcccgacuugcuguuuu

SEQ ID NO: 15375 - RNA, 23 nt, artificial
  Chemically synthesized
aacagcgacaaguccagcaccua

SEQ ID NO: 15376 - RNA, 23 nt, artificial
  Chemically synthesized
caacagcgacaaguccagcaccu

SEQ ID NO: 15377 - RNA, 23 nt, artificial
  Chemically synthesized
gucucuccaucuguuuggugggg

SEQ ID NO: 15378 - RNA, 23 nt, artificial
  Chemically synthesized
ugucucuccaucuguuugguggg

SEQ ID NO: 15379 - RNA, 23 nt, artificial
  Chemically synthesized
aaauacaguuguuggccuccggc

SEQ ID NO: 15380 - RNA, 23 nt, artificial
  Chemically synthesized
aaguucgauggcauccugggcau

SEQ ID NO: 15381 - RNA, 23 nt, artificial
  Chemically synthesized
guuuuguucugugguuuuccccu

SEQ ID NO: 15382 - RNA, 23 nt, artificial
  Chemically synthesized
acuacacgcucaaggugucgcag

SEQ ID NO: 15383 - RNA, 23 nt, artificial
  Chemically synthesized
guuugacauccacuauggcucgg

SEQ ID NO: 15384 - RNA, 23 nt, artificial
  Chemically synthesized
gguucagaaaugcugccugccug

SEQ ID NO: 15385 - RNA, 23 nt, artificial
  Chemically synthesized
ggguucagaaaugcugccugccu

SEQ ID NO: 15386 - RNA, 23 nt, artificial
  Chemically synthesized
uggguucagaaaugcugccugcc

SEQ ID NO: 15387 - RNA, 23 nt, artificial
  Chemically synthesized
ucuccuucuaccugagcagggac

SEQ ID NO: 15388 - RNA, 23 nt, artificial
  Chemically synthesized
cucuccaucuguuuggugggggu

SEQ ID NO: 15389 - RNA, 23 nt, artificial
  Chemically synthesized
ucucuccaucuguuugguggggg

SEQ ID NO: 15390 - RNA, 23 nt, artificial
  Chemically synthesized
aggaccugauugccaaaggcccc

SEQ ID NO: 15391 - RNA, 23 nt, artificial
  Chemically synthesized
gaggaccugauugccaaaggccc

SEQ ID NO: 15392 - RNA, 23 nt, artificial
  Chemically synthesized
aacugcuggacaucgcuugcugg

SEQ ID NO: 15393 - RNA, 23 nt, artificial
  Chemically synthesized
ggcccaagcccgacuugcuguuu

SEQ ID NO: 15394 - RNA, 23 nt, artificial
  Chemically synthesized
caaaggcuacaagcuguccccag

SEQ ID NO: 15395 - RNA, 23 nt, artificial
  Chemically synthesized
cuucaugggcauggacaucccgc

SEQ ID NO: 15396 - RNA, 23 nt, artificial
  Chemically synthesized
guuucgugcauuggaagacccca

SEQ ID NO: 15397 - RNA, 23 nt, artificial
  Chemically synthesized
ggcugugaggccauuguggacac

SEQ ID NO: 15398 - RNA, 23 nt, artificial
  Chemically synthesized
gggcugugaggccauuguggaca

SEQ ID NO: 15399 - RNA, 23 nt, artificial
  Chemically synthesized
accgugacaacaacagggugggc

SEQ ID NO: 15400 - RNA, 23 nt, artificial
  Chemically synthesized
gaccgugacaacaacaggguggg

SEQ ID NO: 15401 - RNA, 23 nt, artificial
  Chemically synthesized
ucuccaucuguuuggugggggua

SEQ ID NO: 15402 - RNA, 23 nt, artificial
  Chemically synthesized
aaacccaccuuguuggagccugc

SEQ ID NO: 15403 - RNA, 23 nt, artificial
  Chemically synthesized
aaaacccaccuuguuggagccug

SEQ ID NO: 15404 - RNA, 23 nt, artificial
  Chemically synthesized
auuguggacacaggcacuucccu

SEQ ID NO: 15405 - RNA, 23 nt, artificial
  Chemically synthesized
aucacacugaagcugggaggcaa

SEQ ID NO: 15406 - RNA, 23 nt, artificial
  Chemically synthesized
ugacauccacuauggcucgggca

SEQ ID NO: 15407 - RNA, 23 nt, artificial
  Chemically synthesized
uugacauccacuauggcucgggc

SEQ ID NO: 15408 - RNA, 23 nt, artificial
  Chemically synthesized
uuugacauccacuauggcucggg

SEQ ID NO: 15409 - RNA, 23 nt, artificial
  Chemically synthesized
acccuaccuguucagugucccgg

SEQ ID NO: 15410 - RNA, 23 nt, artificial
  Chemically synthesized
auguauuggccuggagguggggu

SEQ ID NO: 15411 - RNA, 23 nt, artificial
  Chemically synthesized
uuguggacacaggcacuucccuc

SEQ ID NO: 15412 - RNA, 23 nt, artificial
  Chemically synthesized
auacaguuguuggccuccggccu

SEQ ID NO: 15413 - RNA, 23 nt, artificial
  Chemically synthesized
aauacaguuguuggccuccggcc

SEQ ID NO: 15414 - RNA, 23 nt, artificial
  Chemically synthesized
uuucgugcauuggaagaccccac

SEQ ID NO: 15415 - RNA, 23 nt, artificial
  Chemically synthesized
ucucaaaguacucccaggcggug

SEQ ID NO: 15416 - RNA, 23 nt, artificial
  Chemically synthesized
aaaggcuacaagcuguccccaga

SEQ ID NO: 15417 - RNA, 23 nt, artificial
  Chemically synthesized
uucgugcauuggaagaccccacc

SEQ ID NO: 15418 - RNA, 23 nt, artificial
  Chemically synthesized
uuuuguucugugguuuuccccuc

SEQ ID NO: 15419 - RNA, 23 nt, artificial
  Chemically synthesized
uuuguucugugguuuuccccucc

SEQ ID NO: 15420 - RNA, 23 nt, artificial
  Chemically synthesized
uucaugggcauggacaucccgcc

SEQ ID NO: 15421 - RNA, 23 nt, artificial
  Chemically synthesized
acauucagguaggacagagaacc

SEQ ID NO: 15422 - RNA, 23 nt, artificial
  Chemically synthesized
cauucagguaggacagagaaccc

SEQ ID NO: 15423 - RNA, 23 nt, artificial
  Chemically synthesized
auucagguaggacagagaacccu

SEQ ID NO: 15424 - RNA, 23 nt, artificial
  Chemically synthesized
uucagguaggacagagaacccuu

SEQ ID NO: 15425 - RNA, 23 nt, artificial
  Chemically synthesized
ucagguaggacagagaacccuug

SEQ ID NO: 15426 - RNA, 23 nt, artificial
  Chemically synthesized
ggccuuuggcaaucagguccucc

SEQ ID NO: 15427 - RNA, 23 nt, artificial
  Chemically synthesized
gccuuuggcaaucagguccucca

SEQ ID NO: 15428 - RNA, 23 nt, artificial
  Chemically synthesized
ccuuuggcaaucagguccuccac

SEQ ID NO: 15429 - RNA, 23 nt, artificial
  Chemically synthesized
cuuuggcaaucagguccuccaca

SEQ ID NO: 15430 - RNA, 23 nt, artificial
  Chemically synthesized
uuuggcaaucagguccuccacag

SEQ ID NO: 15431 - RNA, 23 nt, artificial
  Chemically synthesized
guuguugucacggucaaacacag

SEQ ID NO: 15432 - RNA, 23 nt, artificial
  Chemically synthesized
uuguugucacggucaaacacagu

SEQ ID NO: 15433 - RNA, 23 nt, artificial
  Chemically synthesized
uguugucacggucaaacacagug

SEQ ID NO: 15434 - RNA, 23 nt, artificial
  Chemically synthesized
guugucacggucaaacacagugu

SEQ ID NO: 15435 - RNA, 23 nt, artificial
  Chemically synthesized
uugucacggucaaacacagugua

SEQ ID NO: 15436 - RNA, 23 nt, artificial
  Chemically synthesized
ccuguuguugucacggucaaaca

SEQ ID NO: 15437 - RNA, 23 nt, artificial
  Chemically synthesized
cuguuguugucacggucaaacac

SEQ ID NO: 15438 - RNA, 23 nt, artificial
  Chemically synthesized
uguuguugucacggucaaacaca

SEQ ID NO: 15439 - RNA, 23 nt, artificial
  Chemically synthesized
guacuugugguggauccagcaag

SEQ ID NO: 15440 - RNA, 23 nt, artificial
  Chemically synthesized
uacuugugguggauccagcaagc

SEQ ID NO: 15441 - RNA, 23 nt, artificial
  Chemically synthesized
acuugugguggauccagcaagcg

SEQ ID NO: 15442 - RNA, 23 nt, artificial
  Chemically synthesized
cuugugguggauccagcaagcga

SEQ ID NO: 15443 - RNA, 23 nt, artificial
  Chemically synthesized
uugugguggauccagcaagcgau

SEQ ID NO: 15444 - RNA, 23 nt, artificial
  Chemically synthesized
caacuguauuuccaugucagcug

SEQ ID NO: 15445 - RNA, 23 nt, artificial
  Chemically synthesized
aacuguauuuccaugucagcugg

SEQ ID NO: 15446 - RNA, 23 nt, artificial
  Chemically synthesized
acuguauuuccaugucagcuggg

SEQ ID NO: 15447 - RNA, 23 nt, artificial
  Chemically synthesized
cuguauuuccaugucagcugggg

SEQ ID NO: 15448 - RNA, 23 nt, artificial
  Chemically synthesized
uguauuuccaugucagcuggggc

SEQ ID NO: 15449 - RNA, 23 nt, artificial
  Chemically synthesized
cccuguuguugucacggucaaac

SEQ ID NO: 15450 - RNA, 23 nt, artificial
  Chemically synthesized
uuguaauacuuggagucugugcc

SEQ ID NO: 15451 - RNA, 23 nt, artificial
  Chemically synthesized
uguaauacuuggagucugugcca

SEQ ID NO: 15452 - RNA, 23 nt, artificial
  Chemically synthesized
guaauacuuggagucugugccac

SEQ ID NO: 15453 - RNA, 23 nt, artificial
  Chemically synthesized
uaauacuuggagucugugccacc

SEQ ID NO: 15454 - RNA, 23 nt, artificial
  Chemically synthesized
aauacuuggagucugugccaccc

SEQ ID NO: 15455 - RNA, 23 nt, artificial
  Chemically synthesized
cuuguaauacuuggagucugugc

SEQ ID NO: 15456 - RNA, 23 nt, artificial
  Chemically synthesized
agccuuugccucccagcuucagu

SEQ ID NO: 15457 - RNA, 23 nt, artificial
  Chemically synthesized
gccuuugccucccagcuucagug

SEQ ID NO: 15458 - RNA, 23 nt, artificial
  Chemically synthesized
ccuuugccucccagcuucagugu

SEQ ID NO: 15459 - RNA, 23 nt, artificial
  Chemically synthesized
cuuugccucccagcuucagugug

SEQ ID NO: 15460 - RNA, 23 nt, artificial
  Chemically synthesized
uuugccucccagcuucaguguga

SEQ ID NO: 15461 - RNA, 23 nt, artificial
  Chemically synthesized
caccuugagcguguaguccucug

SEQ ID NO: 15462 - RNA, 23 nt, artificial
  Chemically synthesized
accuugagcguguaguccucugg

SEQ ID NO: 15463 - RNA, 23 nt, artificial
  Chemically synthesized
ccuugagcguguaguccucuggg

SEQ ID NO: 15464 - RNA, 23 nt, artificial
  Chemically synthesized
cuugagcguguaguccucugggg

SEQ ID NO: 15465 - RNA, 23 nt, artificial
  Chemically synthesized
uugagcguguaguccucugggga

SEQ ID NO: 15466 - RNA, 23 nt, artificial
  Chemically synthesized
gaccugccucuccacuuugacac

SEQ ID NO: 15467 - RNA, 23 nt, artificial
  Chemically synthesized
accugccucuccacuuugacacc

SEQ ID NO: 15468 - RNA, 23 nt, artificial
  Chemically synthesized
ccugccucuccacuuugacaccg

SEQ ID NO: 15469 - RNA, 23 nt, artificial
  Chemically synthesized
cugccucuccacuuugacaccgc

SEQ ID NO: 15470 - RNA, 23 nt, artificial
  Chemically synthesized
ugccucuccacuuugacaccgcc

SEQ ID NO: 15471 - RNA, 23 nt, artificial
  Chemically synthesized
gccauaguggaugucaaacgagg

SEQ ID NO: 15472 - RNA, 23 nt, artificial
  Chemically synthesized
ccauaguggaugucaaacgaggu

SEQ ID NO: 15473 - RNA, 23 nt, artificial
  Chemically synthesized
cauaguggaugucaaacgaggua

SEQ ID NO: 15474 - RNA, 23 nt, artificial
  Chemically synthesized
auaguggaugucaaacgagguac

SEQ ID NO: 15475 - RNA, 23 nt, artificial
  Chemically synthesized
uaguggaugucaaacgagguacc

SEQ ID NO: 15476 - RNA, 23 nt, artificial
  Chemically synthesized
acccuuguaauacuuggagucug

SEQ ID NO: 15477 - RNA, 23 nt, artificial
  Chemically synthesized
cccuuguaauacuuggagucugu

SEQ ID NO: 15478 - RNA, 23 nt, artificial
  Chemically synthesized
ccuuguaauacuuggagucugug

SEQ ID NO: 15479 - RNA, 23 nt, artificial
  Chemically synthesized
cgggauguccaugcccaugaagc

SEQ ID NO: 15480 - RNA, 23 nt, artificial
  Chemically synthesized
gggauguccaugcccaugaagcc

SEQ ID NO: 15481 - RNA, 23 nt, artificial
  Chemically synthesized
ggauguccaugcccaugaagccg

SEQ ID NO: 15482 - RNA, 23 nt, artificial
  Chemically synthesized
gauguccaugcccaugaagccgc

SEQ ID NO: 15483 - RNA, 23 nt, artificial
  Chemically synthesized
auguccaugcccaugaagccgcu

SEQ ID NO: 15484 - RNA, 23 nt, artificial
  Chemically synthesized
ggucuuccaaugcacgaaacaga

SEQ ID NO: 15485 - RNA, 23 nt, artificial
  Chemically synthesized
gucuuccaaugcacgaaacagau

SEQ ID NO: 15486 - RNA, 23 nt, artificial
  Chemically synthesized
ucuuccaaugcacgaaacagauc

SEQ ID NO: 15487 - RNA, 23 nt, artificial
  Chemically synthesized
cuuccaaugcacgaaacagaucu

SEQ ID NO: 15488 - RNA, 23 nt, artificial
  Chemically synthesized
uuccaaugcacgaaacagaucug

SEQ ID NO: 15489 - RNA, 23 nt, artificial
  Chemically synthesized
gaacuuggcugcgaugaagguga

SEQ ID NO: 15490 - RNA, 23 nt, artificial
  Chemically synthesized
aacuuggcugcgaugaaggugau

SEQ ID NO: 15491 - RNA, 23 nt, artificial
  Chemically synthesized
acuuggcugcgaugaaggugaug

SEQ ID NO: 15492 - RNA, 23 nt, artificial
  Chemically synthesized
cuuggcugcgaugaaggugaugc

SEQ ID NO: 15493 - RNA, 23 nt, artificial
  Chemically synthesized
uuggcugcgaugaaggugaugcc

SEQ ID NO: 15494 - RNA, 23 nt, artificial
  Chemically synthesized
guuguacuugugguggauccagc

SEQ ID NO: 15495 - RNA, 23 nt, artificial
  Chemically synthesized
uuguacuugugguggauccagca

SEQ ID NO: 15496 - RNA, 23 nt, artificial
  Chemically synthesized
uguacuugugguggauccagcaa

SEQ ID NO: 15497 - RNA, 23 nt, artificial
  Chemically synthesized
gauguucugguccaccagcuucu

SEQ ID NO: 15498 - RNA, 23 nt, artificial
  Chemically synthesized
auguucugguccaccagcuucug

SEQ ID NO: 15499 - RNA, 23 nt, artificial
  Chemically synthesized
uguucugguccaccagcuucugc

SEQ ID NO: 15500 - RNA, 23 nt, artificial
  Chemically synthesized
guucugguccaccagcuucugcu

SEQ ID NO: 15501 - RNA, 23 nt, artificial
  Chemically synthesized
uucugguccaccagcuucugcug

SEQ ID NO: 15502 - RNA, 23 nt, artificial
  Chemically synthesized
acggucaaacacaguguaguagc

SEQ ID NO: 15503 - RNA, 23 nt, artificial
  Chemically synthesized
cggucaaacacaguguaguagcg

SEQ ID NO: 15504 - RNA, 23 nt, artificial
  Chemically synthesized
ggucaaacacaguguaguagcgg

SEQ ID NO: 15505 - RNA, 23 nt, artificial
  Chemically synthesized
gucaaacacaguguaguagcggc

SEQ ID NO: 15506 - RNA, 23 nt, artificial
  Chemically synthesized
ucaaacacaguguaguagcggcc

SEQ ID NO: 15507 - RNA, 23 nt, artificial
  Chemically synthesized
caggaugccaucgaacuuggcug

SEQ ID NO: 15508 - RNA, 23 nt, artificial
  Chemically synthesized
aggaugccaucgaacuuggcugc

SEQ ID NO: 15509 - RNA, 23 nt, artificial
  Chemically synthesized
ggaugccaucgaacuuggcugcg

SEQ ID NO: 15510 - RNA, 23 nt, artificial
  Chemically synthesized
gaugccaucgaacuuggcugcga

SEQ ID NO: 15511 - RNA, 23 nt, artificial
  Chemically synthesized
augccaucgaacuuggcugcgau

SEQ ID NO: 15512 - RNA, 23 nt, artificial
  Chemically synthesized
auucuucacguaggugcuggacu

SEQ ID NO: 15513 - RNA, 23 nt, artificial
  Chemically synthesized
uucuucacguaggugcuggacuu

SEQ ID NO: 15514 - RNA, 23 nt, artificial
  Chemically synthesized
ucuucacguaggugcuggacuug

SEQ ID NO: 15515 - RNA, 23 nt, artificial
  Chemically synthesized
cuucacguaggugcuggacuugu

SEQ ID NO: 15516 - RNA, 23 nt, artificial
  Chemically synthesized
uucacguaggugcuggacuuguc

SEQ ID NO: 15517 - RNA, 23 nt, artificial
  Chemically synthesized
cagguagaaggagaagauguucu

SEQ ID NO: 15518 - RNA, 23 nt, artificial
  Chemically synthesized
agguagaaggagaagauguucug

SEQ ID NO: 15519 - RNA, 23 nt, artificial
  Chemically synthesized
gguagaaggagaagauguucugg

SEQ ID NO: 15520 - RNA, 23 nt, artificial
  Chemically synthesized
guagaaggagaagauguucuggu

SEQ ID NO: 15521 - RNA, 23 nt, artificial
  Chemically synthesized
uagaaggagaagauguucugguc

SEQ ID NO: 15522 - RNA, 23 nt, artificial
  Chemically synthesized
gcuguuguacuugugguggaucc

SEQ ID NO: 15523 - RNA, 23 nt, artificial
  Chemically synthesized
cuguuguacuugugguggaucca

SEQ ID NO: 15524 - RNA, 23 nt, artificial
  Chemically synthesized
uguuguacuugugguggauccag

SEQ ID NO: 15525 - RNA, 23 nt, artificial
  Chemically synthesized
uuggcaaucagguccuccacaga

SEQ ID NO: 15526 - RNA, 23 nt, artificial
  Chemically synthesized
accauucuucacguaggugcugg

SEQ ID NO: 15527 - RNA, 23 nt, artificial
  Chemically synthesized
ccauucuucacguaggugcugga

SEQ ID NO: 15528 - RNA, 23 nt, artificial
  Chemically synthesized
cauucuucacguaggugcuggac

SEQ ID NO: 15529 - RNA, 23 nt, artificial
  Chemically synthesized
uggaugucaaacgagguaccauu

SEQ ID NO: 15530 - RNA, 23 nt, artificial
  Chemically synthesized
ggaugucaaacgagguaccauuc

SEQ ID NO: 15531 - RNA, 23 nt, artificial
  Chemically synthesized
gaugucaaacgagguaccauucu

SEQ ID NO: 15532 - RNA, 23 nt, artificial
  Chemically synthesized
augucaaacgagguaccauucuu

SEQ ID NO: 15533 - RNA, 23 nt, artificial
  Chemically synthesized
ugucaaacgagguaccauucuuc

SEQ ID NO: 15534 - RNA, 23 nt, artificial
  Chemically synthesized
cgugucgaagacgacugugaagc

SEQ ID NO: 15535 - RNA, 23 nt, artificial
  Chemically synthesized
gugucgaagacgacugugaagca

SEQ ID NO: 15536 - RNA, 23 nt, artificial
  Chemically synthesized
ugucgaagacgacugugaagcac

SEQ ID NO: 15537 - RNA, 23 nt, artificial
  Chemically synthesized
gucgaagacgacugugaagcacu

SEQ ID NO: 15538 - RNA, 23 nt, artificial
  Chemically synthesized
ucgaagacgacugugaagcacug

SEQ ID NO: 15539 - RNA, 23 nt, artificial
  Chemically synthesized
acucuccucuguuucugugcugg

SEQ ID NO: 15540 - RNA, 23 nt, artificial
  Chemically synthesized
cucuccucuguuucugugcuggc

SEQ ID NO: 15541 - RNA, 23 nt, artificial
  Chemically synthesized
ucuccucuguuucugugcuggcg

SEQ ID NO: 15542 - RNA, 23 nt, artificial
  Chemically synthesized
cuccucuguuucugugcuggcgc

SEQ ID NO: 15543 - RNA, 23 nt, artificial
  Chemically synthesized
uccucuguuucugugcuggcgcg

SEQ ID NO: 15544 - RNA, 23 nt, artificial
  Chemically synthesized
acagaucugugcucuggaucagc

SEQ ID NO: 15545 - RNA, 23 nt, artificial
  Chemically synthesized
cagaucugugcucuggaucagcu

SEQ ID NO: 15546 - RNA, 23 nt, artificial
  Chemically synthesized
agaucugugcucuggaucagcuc

SEQ ID NO: 15547 - RNA, 23 nt, artificial
  Chemically synthesized
gaucugugcucuggaucagcucu

SEQ ID NO: 15548 - RNA, 23 nt, artificial
  Chemically synthesized
aucugugcucuggaucagcucua

SEQ ID NO: 15549 - RNA, 23 nt, artificial
  Chemically synthesized
ggccuugcgggugacauucaggu

SEQ ID NO: 15550 - RNA, 23 nt, artificial
  Chemically synthesized
gccuugcgggugacauucaggua

SEQ ID NO: 15551 - RNA, 23 nt, artificial
  Chemically synthesized
ccuugcgggugacauucagguag

SEQ ID NO: 15552 - RNA, 23 nt, artificial
  Chemically synthesized
cuugcgggugacauucagguagg

SEQ ID NO: 15553 - RNA, 23 nt, artificial
  Chemically synthesized
uugcgggugacauucagguagga

SEQ ID NO: 15554 - RNA, 23 nt, artificial
  Chemically synthesized
cauguaguucuugagcaccucgg

SEQ ID NO: 15555 - RNA, 23 nt, artificial
  Chemically synthesized
auguaguucuugagcaccucggg

SEQ ID NO: 15556 - RNA, 23 nt, artificial
  Chemically synthesized
uguaguucuugagcaccucggga

SEQ ID NO: 15557 - RNA, 23 nt, artificial
  Chemically synthesized
guaguucuugagcaccucgggaa

SEQ ID NO: 15558 - RNA, 23 nt, artificial
  Chemically synthesized
uaguucuugagcaccucgggaau

SEQ ID NO: 15559 - RNA, 23 nt, artificial
  Chemically synthesized
cccguaguacugggcguccaugu

SEQ ID NO: 15560 - RNA, 23 nt, artificial
  Chemically synthesized
ccguaguacugggcguccaugua

SEQ ID NO: 15561 - RNA, 23 nt, artificial
  Chemically synthesized
cguaguacugggcguccauguag

SEQ ID NO: 15562 - RNA, 23 nt, artificial
  Chemically synthesized
guaguacugggcguccauguagu

SEQ ID NO: 15563 - RNA, 23 nt, artificial
  Chemically synthesized
uaguacugggcguccauguaguu

SEQ ID NO: 15564 - RNA, 23 nt, artificial
  Chemically synthesized
cagcuucugcugcaucagguugu

SEQ ID NO: 15565 - RNA, 23 nt, artificial
  Chemically synthesized
agcuucugcugcaucagguuguc

SEQ ID NO: 15566 - RNA, 23 nt, artificial
  Chemically synthesized
gcuucugcugcaucagguugucg

SEQ ID NO: 15567 - RNA, 23 nt, artificial
  Chemically synthesized
cuucugcugcaucagguugucga

SEQ ID NO: 15568 - RNA, 23 nt, artificial
  Chemically synthesized
uucugcugcaucagguugucgaa

SEQ ID NO: 15569 - RNA, 23 nt, artificial
  Chemically synthesized
uggcaaucagguccuccacagag

SEQ ID NO: 15570 - RNA, 23 nt, artificial
  Chemically synthesized
ggcaaucagguccuccacagagc

SEQ ID NO: 15571 - RNA, 23 nt, artificial
  Chemically synthesized
gcaaucagguccuccacagagcc

SEQ ID NO: 15572 - RNA, 23 nt, artificial
  Chemically synthesized
caaucagguccuccacagagccc

SEQ ID NO: 15573 - RNA, 23 nt, artificial
  Chemically synthesized
aaucagguccuccacagagcccc

SEQ ID NO: 15574 - RNA, 23 nt, artificial
  Chemically synthesized
cgccugggaguacuuugagacgg

SEQ ID NO: 15575 - RNA, 23 nt, artificial
  Chemically synthesized
gccugggaguacuuugagacggg

SEQ ID NO: 15576 - RNA, 23 nt, artificial
  Chemically synthesized
ccugggaguacuuugagacgggg

SEQ ID NO: 15577 - RNA, 23 nt, artificial
  Chemically synthesized
cugggaguacuuugagacggggc

SEQ ID NO: 15578 - RNA, 23 nt, artificial
  Chemically synthesized
ugggaguacuuugagacggggcc

SEQ ID NO: 15579 - RNA, 23 nt, artificial
  Chemically synthesized
ggggacagcuuguagccuuugcc

SEQ ID NO: 15580 - RNA, 23 nt, artificial
  Chemically synthesized
gggacagcuuguagccuuugccu

SEQ ID NO: 15581 - RNA, 23 nt, artificial
  Chemically synthesized
ggacagcuuguagccuuugccuc

SEQ ID NO: 15582 - RNA, 23 nt, artificial
  Chemically synthesized
gacagcuuguagccuuugccucc

SEQ ID NO: 15583 - RNA, 23 nt, artificial
  Chemically synthesized
acagcuuguagccuuugccuccc

SEQ ID NO: 15584 - RNA, 23 nt, artificial
  Chemically synthesized
cugcaucagguugucgaagacgg

SEQ ID NO: 15585 - RNA, 23 nt, artificial
  Chemically synthesized
ugcaucagguugucgaagacggg

SEQ ID NO: 15586 - RNA, 23 nt, artificial
  Chemically synthesized
gcaucagguugucgaagacgggc

SEQ ID NO: 15587 - RNA, 23 nt, artificial
  Chemically synthesized
caucagguugucgaagacgggca

SEQ ID NO: 15588 - RNA, 23 nt, artificial
  Chemically synthesized
aucagguugucgaagacgggcag

SEQ ID NO: 15589 - RNA, 23 nt, artificial
  Chemically synthesized
gacauucagguaggacagagaac

SEQ ID NO: 15590 - RNA, 23 nt, artificial
  Chemically synthesized
aucgaacuuggcugcgaugaagg

SEQ ID NO: 15591 - RNA, 23 nt, artificial
  Chemically synthesized
ucgaacuuggcugcgaugaaggu

SEQ ID NO: 15592 - RNA, 23 nt, artificial
  Chemically synthesized
cgaacuuggcugcgaugaaggug

SEQ ID NO: 15593 - RNA, 23 nt, artificial
  Chemically synthesized
agcgauguccagcaguuugcagu

SEQ ID NO: 15594 - RNA, 23 nt, artificial
  Chemically synthesized
gcgauguccagcaguuugcagug

SEQ ID NO: 15595 - RNA, 23 nt, artificial
  Chemically synthesized
cgauguccagcaguuugcagugg

SEQ ID NO: 15596 - RNA, 23 nt, artificial
  Chemically synthesized
gauguccagcaguuugcagugga

SEQ ID NO: 15597 - RNA, 23 nt, artificial
  Chemically synthesized
auguccagcaguuugcaguggau

SEQ ID NO: 15598 - RNA, 23 nt, artificial
  Chemically synthesized
ccccucucacuccuuccagcuca

SEQ ID NO: 15599 - RNA, 23 nt, artificial
  Chemically synthesized
cccucucacuccuuccagcucau

SEQ ID NO: 15600 - RNA, 23 nt, artificial
  Chemically synthesized
ccucucacuccuuccagcucauc

SEQ ID NO: 15601 - RNA, 23 nt, artificial
  Chemically synthesized
cucucacuccuuccagcucaucc

SEQ ID NO: 15602 - RNA, 23 nt, artificial
  Chemically synthesized
ucucacuccuuccagcucauccu

SEQ ID NO: 15603 - RNA, 23 nt, artificial
  Chemically synthesized
cugcucugggacucuccucuguu

SEQ ID NO: 15604 - RNA, 23 nt, artificial
  Chemically synthesized
ugcucugggacucuccucuguuu

SEQ ID NO: 15605 - RNA, 23 nt, artificial
  Chemically synthesized
gcucugggacucuccucuguuuc

SEQ ID NO: 15606 - RNA, 23 nt, artificial
  Chemically synthesized
cucugggacucuccucuguuucu

SEQ ID NO: 15607 - RNA, 23 nt, artificial
  Chemically synthesized
ucugggacucuccucuguuucug

SEQ ID NO: 15608 - RNA, 23 nt, artificial
  Chemically synthesized
ggacuugucgcuguuguacuugu

SEQ ID NO: 15609 - RNA, 23 nt, artificial
  Chemically synthesized
gacuugucgcuguuguacuugug

SEQ ID NO: 15610 - RNA, 23 nt, artificial
  Chemically synthesized
acuugucgcuguuguacuugugg

SEQ ID NO: 15611 - RNA, 23 nt, artificial
  Chemically synthesized
cuugucgcuguuguacuuguggu

SEQ ID NO: 15612 - RNA, 23 nt, artificial
  Chemically synthesized
uugucgcuguuguacuuguggug

SEQ ID NO: 15613 - RNA, 23 nt, artificial
  Chemically synthesized
ucacuccuuccagcucauccuca

SEQ ID NO: 15614 - RNA, 23 nt, artificial
  Chemically synthesized
cacuccuuccagcucauccucag

SEQ ID NO: 15615 - RNA, 23 nt, artificial
  Chemically synthesized
acuccuuccagcucauccucagg

SEQ ID NO: 15616 - RNA, 23 nt, artificial
  Chemically synthesized
cuccuuccagcucauccucaggc

SEQ ID NO: 15617 - RNA, 23 nt, artificial
  Chemically synthesized
uccuuccagcucauccucaggcc

SEQ ID NO: 15618 - RNA, 23 nt, artificial
  Chemically synthesized
gccaucgaacuuggcugcgauga

SEQ ID NO: 15619 - RNA, 23 nt, artificial
  Chemically synthesized
ccaucgaacuuggcugcgaugaa

SEQ ID NO: 15620 - RNA, 23 nt, artificial
  Chemically synthesized
caucgaacuuggcugcgaugaag

SEQ ID NO: 15621 - RNA, 23 nt, artificial
  Chemically synthesized
cugggacucuccucuguuucugu

SEQ ID NO: 15622 - RNA, 23 nt, artificial
  Chemically synthesized
ugggacucuccucuguuucugug

SEQ ID NO: 15623 - RNA, 23 nt, artificial
  Chemically synthesized
uccaacaagguggguuuuguccc

SEQ ID NO: 15624 - RNA, 23 nt, artificial
  Chemically synthesized
ccaacaagguggguuuugucccc

SEQ ID NO: 15625 - RNA, 23 nt, artificial
  Chemically synthesized
aacaagguggguuuuguccccuc

SEQ ID NO: 15626 - RNA, 23 nt, artificial
  Chemically synthesized
acaagguggguuuuguccccucu

SEQ ID NO: 15627 - RNA, 23 nt, artificial
  Chemically synthesized
guccauguaguucuugagcaccu

SEQ ID NO: 15628 - RNA, 23 nt, artificial
  Chemically synthesized
uccauguaguucuugagcaccuc

SEQ ID NO: 15629 - RNA, 23 nt, artificial
  Chemically synthesized
ccauguaguucuugagcaccucg

SEQ ID NO: 15630 - RNA, 23 nt, artificial
  Chemically synthesized
ggccaacaacuguauuuccaugu

SEQ ID NO: 15631 - RNA, 23 nt, artificial
  Chemically synthesized
gccaacaacuguauuuccauguc

SEQ ID NO: 15632 - RNA, 23 nt, artificial
  Chemically synthesized
ccaacaacuguauuuccauguca

SEQ ID NO: 15633 - RNA, 23 nt, artificial
  Chemically synthesized
caacaacuguauuuccaugucag

SEQ ID NO: 15634 - RNA, 23 nt, artificial
  Chemically synthesized
aacaacuguauuuccaugucagc

SEQ ID NO: 15635 - RNA, 23 nt, artificial
  Chemically synthesized
cucacuccuuccagcucauccuc

SEQ ID NO: 15636 - RNA, 23 nt, artificial
  Chemically synthesized
cuccaacaagguggguuuugucc

SEQ ID NO: 15637 - RNA, 23 nt, artificial
  Chemically synthesized
accaaacagauggagagacagac

SEQ ID NO: 15638 - RNA, 23 nt, artificial
  Chemically synthesized
ccaaacagauggagagacagaca

SEQ ID NO: 15639 - RNA, 23 nt, artificial
  Chemically synthesized
caaacagauggagagacagacag

SEQ ID NO: 15640 - RNA, 23 nt, artificial
  Chemically synthesized
aaacagauggagagacagacagg

SEQ ID NO: 15641 - RNA, 23 nt, artificial
  Chemically synthesized
aacagauggagagacagacaggc

SEQ ID NO: 15642 - RNA, 23 nt, artificial
  Chemically synthesized
aguggaugucaaacgagguacca

SEQ ID NO: 15643 - RNA, 23 nt, artificial
  Chemically synthesized
guggaugucaaacgagguaccau

SEQ ID NO: 15644 - RNA, 23 nt, artificial
  Chemically synthesized
guacugggcguccauguaguucu

SEQ ID NO: 15645 - RNA, 23 nt, artificial
  Chemically synthesized
uacugggcguccauguaguucuu

SEQ ID NO: 15646 - RNA, 23 nt, artificial
  Chemically synthesized
acugggcguccauguaguucuug

SEQ ID NO: 15647 - RNA, 23 nt, artificial
  Chemically synthesized
cugggcguccauguaguucuuga

SEQ ID NO: 15648 - RNA, 23 nt, artificial
  Chemically synthesized
ugggcguccauguaguucuugag

SEQ ID NO: 15649 - RNA, 23 nt, artificial
  Chemically synthesized
ugucgcuguuguacuuguggugg

SEQ ID NO: 15650 - RNA, 23 nt, artificial
  Chemically synthesized
ugcgaugaaggugaugccuggcu

SEQ ID NO: 15651 - RNA, 23 nt, artificial
  Chemically synthesized
gcgaugaaggugaugccuggcug

SEQ ID NO: 15652 - RNA, 23 nt, artificial
  Chemically synthesized
cgaugaaggugaugccuggcugc

SEQ ID NO: 15653 - RNA, 23 nt, artificial
  Chemically synthesized
gaugaaggugaugccuggcugcu

SEQ ID NO: 15654 - RNA, 23 nt, artificial
  Chemically synthesized
augaaggugaugccuggcugcuu

SEQ ID NO: 15655 - RNA, 23 nt, artificial
  Chemically synthesized
ggaaaaccacagaacaaaacagc

SEQ ID NO: 15656 - RNA, 23 nt, artificial
  Chemically synthesized
gaaaaccacagaacaaaacagca

SEQ ID NO: 15657 - RNA, 23 nt, artificial
  Chemically synthesized
aaaaccacagaacaaaacagcaa

SEQ ID NO: 15658 - RNA, 23 nt, artificial
  Chemically synthesized
aaaccacagaacaaaacagcaag

SEQ ID NO: 15659 - RNA, 23 nt, artificial
  Chemically synthesized
aaccacagaacaaaacagcaagu

SEQ ID NO: 15660 - RNA, 23 nt, artificial
  Chemically synthesized
cgggugacauucagguaggacag

SEQ ID NO: 15661 - RNA, 23 nt, artificial
  Chemically synthesized
gggugacauucagguaggacaga

SEQ ID NO: 15662 - RNA, 23 nt, artificial
  Chemically synthesized
ggugacauucagguaggacagag

SEQ ID NO: 15663 - RNA, 23 nt, artificial
  Chemically synthesized
gugacauucagguaggacagaga

SEQ ID NO: 15664 - RNA, 23 nt, artificial
  Chemically synthesized
ugacauucagguaggacagagaa

SEQ ID NO: 15665 - RNA, 23 nt, artificial
  Chemically synthesized
acaacuguauuuccaugucagcu

SEQ ID NO: 15666 - RNA, 23 nt, artificial
  Chemically synthesized
cccaaagaccugccucuccacuu

SEQ ID NO: 15667 - RNA, 23 nt, artificial
  Chemically synthesized
ccaaagaccugccucuccacuuu

SEQ ID NO: 15668 - RNA, 23 nt, artificial
  Chemically synthesized
caaagaccugccucuccacuuug

SEQ ID NO: 15669 - RNA, 23 nt, artificial
  Chemically synthesized
aaagaccugccucuccacuuuga

SEQ ID NO: 15670 - RNA, 23 nt, artificial
  Chemically synthesized
aagaccugccucuccacuuugac

SEQ ID NO: 15671 - RNA, 23 nt, artificial
  Chemically synthesized
gaucauguacucgcccugaauca

SEQ ID NO: 15672 - RNA, 23 nt, artificial
  Chemically synthesized
aucauguacucgcccugaaucag

SEQ ID NO: 15673 - RNA, 23 nt, artificial
  Chemically synthesized
ucauguacucgcccugaaucagc

SEQ ID NO: 15674 - RNA, 23 nt, artificial
  Chemically synthesized
cauguacucgcccugaaucagcg

SEQ ID NO: 15675 - RNA, 23 nt, artificial
  Chemically synthesized
auguacucgcccugaaucagcgg

SEQ ID NO: 15676 - RNA, 23 nt, artificial
  Chemically synthesized
caaacacaguguaguagcggccg

SEQ ID NO: 15677 - RNA, 23 nt, artificial
  Chemically synthesized
aaacacaguguaguagcggccga

SEQ ID NO: 15678 - RNA, 23 nt, artificial
  Chemically synthesized
ucugcugcaucagguugucgaag

SEQ ID NO: 15679 - RNA, 23 nt, artificial
  Chemically synthesized
cugcugcaucagguugucgaaga

SEQ ID NO: 15680 - RNA, 23 nt, artificial
  Chemically synthesized
ugcugcaucagguugucgaagac

SEQ ID NO: 15681 - RNA, 23 nt, artificial
  Chemically synthesized
acccuguuguugucacggucaaa

SEQ ID NO: 15682 - RNA, 23 nt, artificial
  Chemically synthesized
uggacuugucgcuguuguacuug

SEQ ID NO: 15683 - RNA, 23 nt, artificial
  Chemically synthesized
gucaaacgagguaccauucuuca

SEQ ID NO: 15684 - RNA, 23 nt, artificial
  Chemically synthesized
ucaaacgagguaccauucuucac

SEQ ID NO: 15685 - RNA, 23 nt, artificial
  Chemically synthesized
caaacgagguaccauucuucacg

SEQ ID NO: 15686 - RNA, 23 nt, artificial
  Chemically synthesized
aaacgagguaccauucuucacgu

SEQ ID NO: 15687 - RNA, 23 nt, artificial
  Chemically synthesized
cgacaccuugagcguguaguccu

SEQ ID NO: 15688 - RNA, 23 nt, artificial
  Chemically synthesized
gacaccuugagcguguaguccuc

SEQ ID NO: 15689 - RNA, 23 nt, artificial
  Chemically synthesized
acaccuugagcguguaguccucu

SEQ ID NO: 15690 - RNA, 23 nt, artificial
  Chemically synthesized
cagcuuguagccuuugccuccca

SEQ ID NO: 15691 - RNA, 23 nt, artificial
  Chemically synthesized
agcuuguagccuuugccucccag

SEQ ID NO: 15692 - RNA, 23 nt, artificial
  Chemically synthesized
gcuuguagccuuugccucccagc

SEQ ID NO: 15693 - RNA, 23 nt, artificial
  Chemically synthesized
cuuguagccuuugccucccagcu

SEQ ID NO: 15694 - RNA, 23 nt, artificial
  Chemically synthesized
uuguagccuuugccucccagcuu

SEQ ID NO: 15695 - RNA, 23 nt, artificial
  Chemically synthesized
aguguaguagcggccgaugaaga

SEQ ID NO: 15696 - RNA, 23 nt, artificial
  Chemically synthesized
guguaguagcggccgaugaagac

SEQ ID NO: 15697 - RNA, 23 nt, artificial
  Chemically synthesized
uguaguagcggccgaugaagacg

SEQ ID NO: 15698 - RNA, 23 nt, artificial
  Chemically synthesized
guaguagcggccgaugaagacgu

SEQ ID NO: 15699 - RNA, 23 nt, artificial
  Chemically synthesized
uaguagcggccgaugaagacguc

SEQ ID NO: 15700 - RNA, 23 nt, artificial
  Chemically synthesized
cagcacguuguugacggagaugc

SEQ ID NO: 15701 - RNA, 23 nt, artificial
  Chemically synthesized
agcacguuguugacggagaugcg

SEQ ID NO: 15702 - RNA, 23 nt, artificial
  Chemically synthesized
gcacguuguugacggagaugcgg

SEQ ID NO: 15703 - RNA, 23 nt, artificial
  Chemically synthesized
cacguuguugacggagaugcggg

SEQ ID NO: 15704 - RNA, 23 nt, artificial
  Chemically synthesized
acguuguugacggagaugcgggg

SEQ ID NO: 15705 - RNA, 23 nt, artificial
  Chemically synthesized
cgaagacgacugugaagcacugg

SEQ ID NO: 15706 - RNA, 23 nt, artificial
  Chemically synthesized
gaagacgacugugaagcacuggg

SEQ ID NO: 15707 - RNA, 23 nt, artificial
  Chemically synthesized
aagacgacugugaagcacugggg

SEQ ID NO: 15708 - RNA, 23 nt, artificial
  Chemically synthesized
uguccagcaguuugcaguggaug

SEQ ID NO: 15709 - RNA, 23 nt, artificial
  Chemically synthesized
ggacucuccucuguuucugugcu

SEQ ID NO: 15710 - RNA, 23 nt, artificial
  Chemically synthesized
gacucuccucuguuucugugcug

SEQ ID NO: 15711 - RNA, 23 nt, artificial
  Chemically synthesized
uguacucgcccugaaucagcggc

SEQ ID NO: 15712 - RNA, 23 nt, artificial
  Chemically synthesized
ccccaaagaccugccucuccacu

SEQ ID NO: 15713 - RNA, 23 nt, artificial
  Chemically synthesized
gggacucuccucuguuucugugc

SEQ ID NO: 15714 - RNA, 23 nt, artificial
  Chemically synthesized
aggagaagauguucugguccacc

SEQ ID NO: 15715 - RNA, 23 nt, artificial
  Chemically synthesized
ggagaagauguucugguccacca

SEQ ID NO: 15716 - RNA, 23 nt, artificial
  Chemically synthesized
gagaagauguucugguccaccag

SEQ ID NO: 15717 - RNA, 23 nt, artificial
  Chemically synthesized
agaagauguucugguccaccagc

SEQ ID NO: 15718 - RNA, 23 nt, artificial
  Chemically synthesized
gaagauguucugguccaccagcu

SEQ ID NO: 15719 - RNA, 23 nt, artificial
  Chemically synthesized
aacacaguguaguagcggccgau

SEQ ID NO: 15720 - RNA, 23 nt, artificial
  Chemically synthesized
agccauaguggaugucaaacgag

SEQ ID NO: 15721 - RNA, 23 nt, artificial
  Chemically synthesized
gcggauggacgugaacuugugca

SEQ ID NO: 15722 - RNA, 23 nt, artificial
  Chemically synthesized
cggauggacgugaacuugugcag

SEQ ID NO: 15723 - RNA, 23 nt, artificial
  Chemically synthesized
ggauggacgugaacuugugcagc

SEQ ID NO: 15724 - RNA, 23 nt, artificial
  Chemically synthesized
gauggacgugaacuugugcagcg

SEQ ID NO: 15725 - RNA, 23 nt, artificial
  Chemically synthesized
auggacgugaacuugugcagcgg

SEQ ID NO: 15726 - RNA, 23 nt, artificial
  Chemically synthesized
ccacagaacaaaacagcaagucg

SEQ ID NO: 15727 - RNA, 23 nt, artificial
  Chemically synthesized
cacagaacaaaacagcaagucgg

SEQ ID NO: 15728 - RNA, 23 nt, artificial
  Chemically synthesized
acagaacaaaacagcaagucggg

SEQ ID NO: 15729 - RNA, 23 nt, artificial
  Chemically synthesized
cagaacaaaacagcaagucgggc

SEQ ID NO: 15730 - RNA, 23 nt, artificial
  Chemically synthesized
agaacaaaacagcaagucgggcu

SEQ ID NO: 15731 - RNA, 23 nt, artificial
  Chemically synthesized
gggaagugccuguguccacaaug

SEQ ID NO: 15732 - RNA, 23 nt, artificial
  Chemically synthesized
ggaagugccuguguccacaaugg

SEQ ID NO: 15733 - RNA, 23 nt, artificial
  Chemically synthesized
gaagugccuguguccacaauggc

SEQ ID NO: 15734 - RNA, 23 nt, artificial
  Chemically synthesized
aagugccuguguccacaauggcc

SEQ ID NO: 15735 - RNA, 23 nt, artificial
  Chemically synthesized
agugccuguguccacaauggccu

SEQ ID NO: 15736 - RNA, 23 nt, artificial
  Chemically synthesized
uccaaugcacgaaacagaucugu

SEQ ID NO: 15737 - RNA, 23 nt, artificial
  Chemically synthesized
ugcccaggaugccaucgaacuug

SEQ ID NO: 15738 - RNA, 23 nt, artificial
  Chemically synthesized
gcccaggaugccaucgaacuugg

SEQ ID NO: 15739 - RNA, 23 nt, artificial
  Chemically synthesized
cccaggaugccaucgaacuuggc

SEQ ID NO: 15740 - RNA, 23 nt, artificial
  Chemically synthesized
ccaggaugccaucgaacuuggcu

SEQ ID NO: 15741 - RNA, 23 nt, artificial
  Chemically synthesized
gaacaaaacagcaagucgggcuu

SEQ ID NO: 15742 - RNA, 23 nt, artificial
  Chemically synthesized
gggaucauguacucgcccugaau

SEQ ID NO: 15743 - RNA, 23 nt, artificial
  Chemically synthesized
ggaucauguacucgcccugaauc

SEQ ID NO: 15744 - RNA, 23 nt, artificial
  Chemically synthesized
gggcguccauguaguucuugagc

SEQ ID NO: 15745 - RNA, 23 nt, artificial
  Chemically synthesized
ggcguccauguaguucuugagca

SEQ ID NO: 15746 - RNA, 23 nt, artificial
  Chemically synthesized
gcguccauguaguucuugagcac

SEQ ID NO: 15747 - RNA, 23 nt, artificial
  Chemically synthesized
cguccauguaguucuugagcacc

SEQ ID NO: 15748 - RNA, 23 nt, artificial
  Chemically synthesized
aguucuugagcaccucgggaaug

SEQ ID NO: 15749 - RNA, 23 nt, artificial
  Chemically synthesized
guucuugagcaccucgggaaugg

SEQ ID NO: 15750 - RNA, 23 nt, artificial
  Chemically synthesized
uucuugagcaccucgggaauggg

SEQ ID NO: 15751 - RNA, 23 nt, artificial
  Chemically synthesized
acagacaggcaggcagcauuucu

SEQ ID NO: 15752 - RNA, 23 nt, artificial
  Chemically synthesized
cagacaggcaggcagcauuucug

SEQ ID NO: 15753 - RNA, 23 nt, artificial
  Chemically synthesized
agacaggcaggcagcauuucuga

SEQ ID NO: 15754 - RNA, 23 nt, artificial
  Chemically synthesized
gacaggcaggcagcauuucugaa

SEQ ID NO: 15755 - RNA, 23 nt, artificial
  Chemically synthesized
acaggcaggcagcauuucugaac

SEQ ID NO: 15756 - RNA, 23 nt, artificial
  Chemically synthesized
ccaaugcacgaaacagaucugug

SEQ ID NO: 15757 - RNA, 23 nt, artificial
  Chemically synthesized
caaugcacgaaacagaucugugc

SEQ ID NO: 15758 - RNA, 23 nt, artificial
  Chemically synthesized
gggucuuccaaugcacgaaacag

SEQ ID NO: 15759 - RNA, 23 nt, artificial
  Chemically synthesized
aaugcacgaaacagaucugugcu

SEQ ID NO: 15760 - RNA, 23 nt, artificial
  Chemically synthesized
augcacgaaacagaucugugcuc

SEQ ID NO: 15761 - RNA, 23 nt, artificial
  Chemically synthesized
ugcacgaaacagaucugugcucu

SEQ ID NO: 15762 - RNA, 23 nt, artificial
  Chemically synthesized
agaaggagaagauguucuggucc

SEQ ID NO: 15763 - RNA, 23 nt, artificial
  Chemically synthesized
gaaggagaagauguucuggucca

SEQ ID NO: 15764 - RNA, 23 nt, artificial
  Chemically synthesized
aaggagaagauguucugguccac

SEQ ID NO: 15765 - RNA, 23 nt, artificial
  Chemically synthesized
aacgagguaccauucuucacgua

SEQ ID NO: 15766 - RNA, 23 nt, artificial
  Chemically synthesized
acgagguaccauucuucacguag

SEQ ID NO: 15767 - RNA, 23 nt, artificial
  Chemically synthesized
cgagguaccauucuucacguagg

SEQ ID NO: 15768 - RNA, 23 nt, artificial
  Chemically synthesized
aagauguucugguccaccagcuu

SEQ ID NO: 15769 - RNA, 23 nt, artificial
  Chemically synthesized
agauguucugguccaccagcuuc

SEQ ID NO: 15770 - RNA, 23 nt, artificial
  Chemically synthesized
ccggaggccaacaacuguauuuc

SEQ ID NO: 15771 - RNA, 23 nt, artificial
  Chemically synthesized
cggaggccaacaacuguauuucc

SEQ ID NO: 15772 - RNA, 23 nt, artificial
  Chemically synthesized
ggaggccaacaacuguauuucca

SEQ ID NO: 15773 - RNA, 23 nt, artificial
  Chemically synthesized
gaggccaacaacuguauuuccau

SEQ ID NO: 15774 - RNA, 23 nt, artificial
  Chemically synthesized
aggccaacaacuguauuuccaug

SEQ ID NO: 15775 - RNA, 23 nt, artificial
  Chemically synthesized
gagguaccauucuucacguaggu

SEQ ID NO: 15776 - RNA, 23 nt, artificial
  Chemically synthesized
agguaccauucuucacguaggug

SEQ ID NO: 15777 - RNA, 23 nt, artificial
  Chemically synthesized
gguaccauucuucacguaggugc

SEQ ID NO: 15778 - RNA, 23 nt, artificial
  Chemically synthesized
guaccauucuucacguaggugcu

SEQ ID NO: 15779 - RNA, 23 nt, artificial
  Chemically synthesized
ggggucuuccaaugcacgaaaca

SEQ ID NO: 15780 - RNA, 23 nt, artificial
  Chemically synthesized
aacaaaacagcaagucgggcuug

SEQ ID NO: 15781 - RNA, 23 nt, artificial
  Chemically synthesized
cagcauuucugaacccagggagg

SEQ ID NO: 15782 - RNA, 23 nt, artificial
  Chemically synthesized
agcauuucugaacccagggaggg

SEQ ID NO: 15783 - RNA, 23 nt, artificial
  Chemically synthesized
gcauuucugaacccagggagggg

SEQ ID NO: 15784 - RNA, 23 nt, artificial
  Chemically synthesized
cauuucugaacccagggagggga

SEQ ID NO: 15785 - RNA, 23 nt, artificial
  Chemically synthesized
auuucugaacccagggaggggaa

SEQ ID NO: 15786 - RNA, 23 nt, artificial
  Chemically synthesized
acgaaacagaucugugcucugga

SEQ ID NO: 15787 - RNA, 23 nt, artificial
  Chemically synthesized
cgaaacagaucugugcucuggau

SEQ ID NO: 15788 - RNA, 23 nt, artificial
  Chemically synthesized
gaaacagaucugugcucuggauc

SEQ ID NO: 15789 - RNA, 23 nt, artificial
  Chemically synthesized
aaacagaucugugcucuggauca

SEQ ID NO: 15790 - RNA, 23 nt, artificial
  Chemically synthesized
aacagaucugugcucuggaucag

SEQ ID NO: 15791 - RNA, 23 nt, artificial
  Chemically synthesized
uaccauucuucacguaggugcug

SEQ ID NO: 15792 - RNA, 23 nt, artificial
  Chemically synthesized
ugucacggucaaacacaguguag

SEQ ID NO: 15793 - RNA, 23 nt, artificial
  Chemically synthesized
ggcgaagcccacccuguuguugu

SEQ ID NO: 15794 - RNA, 23 nt, artificial
  Chemically synthesized
gcgaagcccacccuguuguuguc

SEQ ID NO: 15795 - RNA, 23 nt, artificial
  Chemically synthesized
cgaagcccacccuguuguuguca

SEQ ID NO: 15796 - RNA, 23 nt, artificial
  Chemically synthesized
gaagcccacccuguuguugucac

SEQ ID NO: 15797 - RNA, 23 nt, artificial
  Chemically synthesized
aagcccacccuguuguugucacg

SEQ ID NO: 15798 - RNA, 23 nt, artificial
  Chemically synthesized
guauuuccaugucagcuggggcu

SEQ ID NO: 15799 - RNA, 23 nt, artificial
  Chemically synthesized
uauuuccaugucagcuggggcuc

SEQ ID NO: 15800 - RNA, 23 nt, artificial
  Chemically synthesized
ccagcuucugcugcaucagguug

SEQ ID NO: 15801 - RNA, 23 nt, artificial
  Chemically synthesized
aguacugggcguccauguaguuc

SEQ ID NO: 15802 - RNA, 23 nt, artificial
  Chemically synthesized
agcaagcgauguccagcaguuug

SEQ ID NO: 15803 - RNA, 23 nt, artificial
  Chemically synthesized
gcaagcgauguccagcaguuugc

SEQ ID NO: 15804 - RNA, 23 nt, artificial
  Chemically synthesized
caagcgauguccagcaguuugca

SEQ ID NO: 15805 - RNA, 23 nt, artificial
  Chemically synthesized
aagcgauguccagcaguuugcag

SEQ ID NO: 15806 - RNA, 23 nt, artificial
  Chemically synthesized
ugccucccagcuucagugugauc

SEQ ID NO: 15807 - RNA, 23 nt, artificial
  Chemically synthesized
gccucccagcuucagugugaucg

SEQ ID NO: 15808 - RNA, 23 nt, artificial
  Chemically synthesized
ccucccagcuucagugugaucgc

SEQ ID NO: 15809 - RNA, 23 nt, artificial
  Chemically synthesized
cucccagcuucagugugaucgcg

SEQ ID NO: 15810 - RNA, 23 nt, artificial
  Chemically synthesized
ucccagcuucagugugaucgcgg

SEQ ID NO: 15811 - RNA, 23 nt, artificial
  Chemically synthesized
cagguaggacagagaacccuugu

SEQ ID NO: 15812 - RNA, 23 nt, artificial
  Chemically synthesized
agguaggacagagaacccuugua

SEQ ID NO: 15813 - RNA, 23 nt, artificial
  Chemically synthesized
gguaggacagagaacccuuguaa

SEQ ID NO: 15814 - RNA, 23 nt, artificial
  Chemically synthesized
guaggacagagaacccuuguaau

SEQ ID NO: 15815 - RNA, 23 nt, artificial
  Chemically synthesized
uaggacagagaacccuuguaaua

SEQ ID NO: 15816 - RNA, 23 nt, artificial
  Chemically synthesized
acagauggagagacagacaggca

SEQ ID NO: 15817 - RNA, 23 nt, artificial
  Chemically synthesized
cagauggagagacagacaggcag

SEQ ID NO: 15818 - RNA, 23 nt, artificial
  Chemically synthesized
agauggagagacagacaggcagg

SEQ ID NO: 15819 - RNA, 23 nt, artificial
  Chemically synthesized
gauggagagacagacaggcaggc

SEQ ID NO: 15820 - RNA, 23 nt, artificial
  Chemically synthesized
auggagagacagacaggcaggca

SEQ ID NO: 15821 - RNA, 23 nt, artificial
  Chemically synthesized
acagagaacccuuguaauacuug

SEQ ID NO: 15822 - RNA, 23 nt, artificial
  Chemically synthesized
cagagaacccuuguaauacuugg

SEQ ID NO: 15823 - RNA, 23 nt, artificial
  Chemically synthesized
agagaacccuuguaauacuugga

SEQ ID NO: 15824 - RNA, 23 nt, artificial
  Chemically synthesized
gagaacccuuguaauacuuggag

SEQ ID NO: 15825 - RNA, 23 nt, artificial
  Chemically synthesized
agaacccuuguaauacuuggagu

SEQ ID NO: 15826 - RNA, 23 nt, artificial
  Chemically synthesized
aggcuccaacaagguggguuuug

SEQ ID NO: 15827 - RNA, 23 nt, artificial
  Chemically synthesized
ggcuccaacaagguggguuuugu

SEQ ID NO: 15828 - RNA, 23 nt, artificial
  Chemically synthesized
gcuccaacaagguggguuuuguc

SEQ ID NO: 15829 - RNA, 23 nt, artificial
  Chemically synthesized
guggauccagcaagcgaugucca

SEQ ID NO: 15830 - RNA, 23 nt, artificial
  Chemically synthesized
uggauccagcaagcgauguccag

SEQ ID NO: 15831 - RNA, 23 nt, artificial
  Chemically synthesized
ggauccagcaagcgauguccagc

SEQ ID NO: 15832 - RNA, 23 nt, artificial
  Chemically synthesized
gauccagcaagcgauguccagca

SEQ ID NO: 15833 - RNA, 23 nt, artificial
  Chemically synthesized
auccagcaagcgauguccagcag

SEQ ID NO: 15834 - RNA, 23 nt, artificial
  Chemically synthesized
guccagcaguuugcaguggaugg

SEQ ID NO: 15835 - RNA, 23 nt, artificial
  Chemically synthesized
uccagcaguuugcaguggaugga

SEQ ID NO: 15836 - RNA, 23 nt, artificial
  Chemically synthesized
ccagcaguuugcaguggauggag

SEQ ID NO: 15837 - RNA, 23 nt, artificial
  Chemically synthesized
cagcaguuugcaguggauggagg

SEQ ID NO: 15838 - RNA, 23 nt, artificial
  Chemically synthesized
agcaguuugcaguggauggaggg

SEQ ID NO: 15839 - RNA, 23 nt, artificial
  Chemically synthesized
gucacggucaaacacaguguagu

SEQ ID NO: 15840 - RNA, 23 nt, artificial
  Chemically synthesized
ucacggucaaacacaguguagua

SEQ ID NO: 15841 - RNA, 23 nt, artificial
  Chemically synthesized
cgggacacugaacagguagggug

SEQ ID NO: 15842 - RNA, 23 nt, artificial
  Chemically synthesized
gggacacugaacagguagggugg

SEQ ID NO: 15843 - RNA, 23 nt, artificial
  Chemically synthesized
ggacacugaacagguaggguggc

SEQ ID NO: 15844 - RNA, 23 nt, artificial
  Chemically synthesized
gacacugaacagguaggguggca

SEQ ID NO: 15845 - RNA, 23 nt, artificial
  Chemically synthesized
acacugaacagguaggguggcag

SEQ ID NO: 15846 - RNA, 23 nt, artificial
  Chemically synthesized
ccacccuguuguugucacgguca

SEQ ID NO: 15847 - RNA, 23 nt, artificial
  Chemically synthesized
cacccuguuguugucacggucaa

SEQ ID NO: 15848 - RNA, 23 nt, artificial
  Chemically synthesized
aggacagagaacccuuguaauac

SEQ ID NO: 15849 - RNA, 23 nt, artificial
  Chemically synthesized
ggacagagaacccuuguaauacu

SEQ ID NO: 15850 - RNA, 23 nt, artificial
  Chemically synthesized
gacagagaacccuuguaauacuu

SEQ ID NO: 15851 - RNA, 23 nt, artificial
  Chemically synthesized
ggggaaaaccacagaacaaaaca

SEQ ID NO: 15852 - RNA, 23 nt, artificial
  Chemically synthesized
gggaaaaccacagaacaaaacag

SEQ ID NO: 15853 - RNA, 23 nt, artificial
  Chemically synthesized
cugcucagguagaaggagaagau

SEQ ID NO: 15854 - RNA, 23 nt, artificial
  Chemically synthesized
ugcucagguagaaggagaagaug

SEQ ID NO: 15855 - RNA, 23 nt, artificial
  Chemically synthesized
gcucagguagaaggagaagaugu

SEQ ID NO: 15856 - RNA, 23 nt, artificial
  Chemically synthesized
cucagguagaaggagaagauguu

SEQ ID NO: 15857 - RNA, 23 nt, artificial
  Chemically synthesized
ucagguagaaggagaagauguuc

SEQ ID NO: 15858 - RNA, 23 nt, artificial
  Chemically synthesized
caccaugagggaagugccugugu

SEQ ID NO: 15859 - RNA, 23 nt, artificial
  Chemically synthesized
accaugagggaagugccuguguc

SEQ ID NO: 15860 - RNA, 23 nt, artificial
  Chemically synthesized
ccaugagggaagugccugugucc

SEQ ID NO: 15861 - RNA, 23 nt, artificial
  Chemically synthesized
caugagggaagugccugugucca

SEQ ID NO: 15862 - RNA, 23 nt, artificial
  Chemically synthesized
augagggaagugccuguguccac

SEQ ID NO: 15863 - RNA, 23 nt, artificial
  Chemically synthesized
auacuuggagucugugccaccca

SEQ ID NO: 15864 - RNA, 23 nt, artificial
  Chemically synthesized
uacuuggagucugugccacccag

SEQ ID NO: 15865 - RNA, 23 nt, artificial
  Chemically synthesized
acaaaacagcaagucgggcuugg

SEQ ID NO: 15866 - RNA, 23 nt, artificial
  Chemically synthesized
gaacccuuguaauacuuggaguc

SEQ ID NO: 15867 - RNA, 23 nt, artificial
  Chemically synthesized
aacccuuguaauacuuggagucu

SEQ ID NO: 15868 - RNA, 23 nt, artificial
  Chemically synthesized
ucugugcucuggaucagcucuac

SEQ ID NO: 15869 - RNA, 23 nt, artificial
  Chemically synthesized
acaguguaguagcggccgaugaa

SEQ ID NO: 15870 - RNA, 23 nt, artificial
  Chemically synthesized
caguguaguagcggccgaugaag

SEQ ID NO: 15871 - RNA, 23 nt, artificial
  Chemically synthesized
gcaguuugcaguggauggagggg

SEQ ID NO: 15872 - RNA, 23 nt, artificial
  Chemically synthesized
caguuugcaguggauggagggga

SEQ ID NO: 15873 - RNA, 23 nt, artificial
  Chemically synthesized
aguuugcaguggauggaggggac

SEQ ID NO: 15874 - RNA, 23 nt, artificial
  Chemically synthesized
gcgggugacauucagguaggaca

SEQ ID NO: 15875 - RNA, 23 nt, artificial
  Chemically synthesized
aggcagcauuucugaacccaggg

SEQ ID NO: 15876 - RNA, 23 nt, artificial
  Chemically synthesized
ggcagcauuucugaacccaggga

SEQ ID NO: 15877 - RNA, 23 nt, artificial
  Chemically synthesized
gcagcauuucugaacccagggag

SEQ ID NO: 15878 - RNA, 23 nt, artificial
  Chemically synthesized
cacgaaacagaucugugcucugg

SEQ ID NO: 15879 - RNA, 23 nt, artificial
  Chemically synthesized
ggugcuggacuugucgcuguugu

SEQ ID NO: 15880 - RNA, 23 nt, artificial
  Chemically synthesized
gugcuggacuugucgcuguugua

SEQ ID NO: 15881 - RNA, 23 nt, artificial
  Chemically synthesized
ugcuggacuugucgcuguuguac

SEQ ID NO: 15882 - RNA, 23 nt, artificial
  Chemically synthesized
gcuggacuugucgcuguuguacu

SEQ ID NO: 15883 - RNA, 23 nt, artificial
  Chemically synthesized
cuggacuugucgcuguuguacuu

SEQ ID NO: 15884 - RNA, 23 nt, artificial
  Chemically synthesized
ccccaccuccaggccaauacaug

SEQ ID NO: 15885 - RNA, 23 nt, artificial
  Chemically synthesized
cccaccuccaggccaauacaugc

SEQ ID NO: 15886 - RNA, 23 nt, artificial
  Chemically synthesized
ccaccuccaggccaauacaugcc

SEQ ID NO: 15887 - RNA, 23 nt, artificial
  Chemically synthesized
caccuccaggccaauacaugccc

SEQ ID NO: 15888 - RNA, 23 nt, artificial
  Chemically synthesized
accuccaggccaauacaugcccc

SEQ ID NO: 15889 - RNA, 23 nt, artificial
  Chemically synthesized
ggacaacagaggucagcugcaga

SEQ ID NO: 15890 - RNA, 23 nt, artificial
  Chemically synthesized
gacaacagaggucagcugcagag

SEQ ID NO: 15891 - RNA, 23 nt, artificial
  Chemically synthesized
acaacagaggucagcugcagagg

SEQ ID NO: 15892 - RNA, 23 nt, artificial
  Chemically synthesized
caacagaggucagcugcagagga

SEQ ID NO: 15893 - RNA, 23 nt, artificial
  Chemically synthesized
aacagaggucagcugcagaggaa

SEQ ID NO: 15894 - RNA, 23 nt, artificial
  Chemically synthesized
ugccaucgaacuuggcugcgaug

SEQ ID NO: 15895 - RNA, 23 nt, artificial
  Chemically synthesized
ggggaggacaacagaggucagcu

SEQ ID NO: 15896 - RNA, 23 nt, artificial
  Chemically synthesized
gggaggacaacagaggucagcug

SEQ ID NO: 15897 - RNA, 23 nt, artificial
  Chemically synthesized
ggaggacaacagaggucagcugc

SEQ ID NO: 15898 - RNA, 23 nt, artificial
  Chemically synthesized
gaggacaacagaggucagcugca

SEQ ID NO: 15899 - RNA, 23 nt, artificial
  Chemically synthesized
aggacaacagaggucagcugcag

SEQ ID NO: 15900 - RNA, 23 nt, artificial
  Chemically synthesized
gucgcuguuguacuuguggugga

SEQ ID NO: 15901 - RNA, 23 nt, artificial
  Chemically synthesized
ucgcuguuguacuugugguggau

SEQ ID NO: 15902 - RNA, 23 nt, artificial
  Chemically synthesized
uggacgugaacuugugcagcggg

SEQ ID NO: 15903 - RNA, 23 nt, artificial
  Chemically synthesized
cugugcucuggaucagcucuacc

SEQ ID NO: 15904 - RNA, 23 nt, artificial
  Chemically synthesized
ugugcucuggaucagcucuaccc

SEQ ID NO: 15905 - RNA, 23 nt, artificial
  Chemically synthesized
agaccugccucuccacuuugaca

SEQ ID NO: 15906 - RNA, 23 nt, artificial
  Chemically synthesized
cgcuguuguacuugugguggauc

SEQ ID NO: 15907 - RNA, 23 nt, artificial
  Chemically synthesized
ucacguaggugcuggacuugucg

SEQ ID NO: 15908 - RNA, 23 nt, artificial
  Chemically synthesized
accacagaacaaaacagcaaguc

SEQ ID NO: 15909 - RNA, 23 nt, artificial
  Chemically synthesized
ggggaucauguacucgcccugaa

SEQ ID NO: 15910 - RNA, 23 nt, artificial
  Chemically synthesized
guccaccagcuucugcugcauca

SEQ ID NO: 15911 - RNA, 23 nt, artificial
  Chemically synthesized
uccaccagcuucugcugcaucag

SEQ ID NO: 15912 - RNA, 23 nt, artificial
  Chemically synthesized
ccaccagcuucugcugcaucagg

SEQ ID NO: 15913 - RNA, 23 nt, artificial
  Chemically synthesized
caccagcuucugcugcaucaggu

SEQ ID NO: 15914 - RNA, 23 nt, artificial
  Chemically synthesized
accagcuucugcugcaucagguu

SEQ ID NO: 15915 - RNA, 23 nt, artificial
  Chemically synthesized
uggcugcgaugaaggugaugccu

SEQ ID NO: 15916 - RNA, 23 nt, artificial
  Chemically synthesized
ggcugcgaugaaggugaugccug

SEQ ID NO: 15917 - RNA, 23 nt, artificial
  Chemically synthesized
gcugcgaugaaggugaugccugg

SEQ ID NO: 15918 - RNA, 23 nt, artificial
  Chemically synthesized
cugcgaugaaggugaugccuggc

SEQ ID NO: 15919 - RNA, 23 nt, artificial
  Chemically synthesized
gugguggauccagcaagcgaugu

SEQ ID NO: 15920 - RNA, 23 nt, artificial
  Chemically synthesized
ugguggauccagcaagcgauguc

SEQ ID NO: 15921 - RNA, 23 nt, artificial
  Chemically synthesized
gguggauccagcaagcgaugucc

SEQ ID NO: 15922 - RNA, 23 nt, artificial
  Chemically synthesized
agacgacugugaagcacuggggg

SEQ ID NO: 15923 - RNA, 23 nt, artificial
  Chemically synthesized
cgagccauaguggaugucaaacg

SEQ ID NO: 15924 - RNA, 23 nt, artificial
  Chemically synthesized
gagccauaguggaugucaaacga

SEQ ID NO: 15925 - RNA, 23 nt, artificial
  Chemically synthesized
cacggucaaacacaguguaguag

SEQ ID NO: 15926 - RNA, 23 nt, artificial
  Chemically synthesized
gcugcaucagguugucgaagacg

SEQ ID NO: 15927 - RNA, 23 nt, artificial
  Chemically synthesized
caccaaacagauggagagacaga

SEQ ID NO: 15928 - RNA, 23 nt, artificial
  Chemically synthesized
caggcagcauuucugaacccagg

SEQ ID NO: 15929 - RNA, 23 nt, artificial
  Chemically synthesized
cacguaggugcuggacuugucgc

SEQ ID NO: 15930 - RNA, 23 nt, artificial
  Chemically synthesized
acguaggugcuggacuugucgcu

SEQ ID NO: 15931 - RNA, 23 nt, artificial
  Chemically synthesized
uggggacagcuuguagccuuugc

SEQ ID NO: 15932 - RNA, 23 nt, artificial
  Chemically synthesized
gacgugaacuugugcagcgggau

SEQ ID NO: 15933 - RNA, 23 nt, artificial
  Chemically synthesized
acgugaacuugugcagcgggauc

SEQ ID NO: 15934 - RNA, 23 nt, artificial
  Chemically synthesized
cgugaacuugugcagcgggaucc

SEQ ID NO: 15935 - RNA, 23 nt, artificial
  Chemically synthesized
gugaacuugugcagcgggauccu

SEQ ID NO: 15936 - RNA, 23 nt, artificial
  Chemically synthesized
ugaacuugugcagcgggauccug

SEQ ID NO: 15937 - RNA, 23 nt, artificial
  Chemically synthesized
accgccugggaguacuuugagac

SEQ ID NO: 15938 - RNA, 23 nt, artificial
  Chemically synthesized
ccgccugggaguacuuugagacg

SEQ ID NO: 15939 - RNA, 23 nt, artificial
  Chemically synthesized
ccggcggauggacgugaacuugu

SEQ ID NO: 15940 - RNA, 23 nt, artificial
  Chemically synthesized
cggcggauggacgugaacuugug

SEQ ID NO: 15941 - RNA, 23 nt, artificial
  Chemically synthesized
ggcggauggacgugaacuugugc

SEQ ID NO: 15942 - RNA, 23 nt, artificial
  Chemically synthesized
ugcgggugacauucagguaggac

SEQ ID NO: 15943 - RNA, 23 nt, artificial
  Chemically synthesized
agacagacaggcaggcagcauuu

SEQ ID NO: 15944 - RNA, 23 nt, artificial
  Chemically synthesized
gacagacaggcaggcagcauuuc

SEQ ID NO: 15945 - RNA, 23 nt, artificial
  Chemically synthesized
ugcgacaccuugagcguguaguc

SEQ ID NO: 15946 - RNA, 23 nt, artificial
  Chemically synthesized
gcgacaccuugagcguguagucc

SEQ ID NO: 15947 - RNA, 23 nt, artificial
  Chemically synthesized
gcccgugucgaagacgacuguga

SEQ ID NO: 15948 - RNA, 23 nt, artificial
  Chemically synthesized
cccgugucgaagacgacugugaa

SEQ ID NO: 15949 - RNA, 23 nt, artificial
  Chemically synthesized
ccgugucgaagacgacugugaag

SEQ ID NO: 15950 - RNA, 23 nt, artificial
  Chemically synthesized
aggggaucauguacucgcccuga

SEQ ID NO: 15951 - RNA, 23 nt, artificial
  Chemically synthesized
caaaacagcaagucgggcuuggg

SEQ ID NO: 15952 - RNA, 23 nt, artificial
  Chemically synthesized
ccaccaaacagauggagagacag

SEQ ID NO: 15953 - RNA, 23 nt, artificial
  Chemically synthesized
ugccuguguccacaauggccuca

SEQ ID NO: 15954 - RNA, 23 nt, artificial
  Chemically synthesized
gccuguguccacaauggccucac

SEQ ID NO: 15955 - RNA, 23 nt, artificial
  Chemically synthesized
ccuguguccacaauggccucaca

SEQ ID NO: 15956 - RNA, 23 nt, artificial
  Chemically synthesized
cuguguccacaauggccucacag

SEQ ID NO: 15957 - RNA, 23 nt, artificial
  Chemically synthesized
uguguccacaauggccucacagc

SEQ ID NO: 15958 - RNA, 23 nt, artificial
  Chemically synthesized
cagcaagcgauguccagcaguuu

SEQ ID NO: 15959 - RNA, 23 nt, artificial
  Chemically synthesized
gugcucuggaucagcucuacccc

SEQ ID NO: 15960 - RNA, 23 nt, artificial
  Chemically synthesized
ugcucuggaucagcucuaccccc

SEQ ID NO: 15961 - RNA, 23 nt, artificial
  Chemically synthesized
gggcagcacguuguugacggaga

SEQ ID NO: 15962 - RNA, 23 nt, artificial
  Chemically synthesized
ggcagcacguuguugacggagau

SEQ ID NO: 15963 - RNA, 23 nt, artificial
  Chemically synthesized
gcagcacguuguugacggagaug

SEQ ID NO: 15964 - RNA, 23 nt, artificial
  Chemically synthesized
ucuugagcaccucgggaaugggc

SEQ ID NO: 15965 - RNA, 23 nt, artificial
  Chemically synthesized
gcacgaaacagaucugugcucug

SEQ ID NO: 15966 - RNA, 23 nt, artificial
  Chemically synthesized
ccugcucagguagaaggagaaga

SEQ ID NO: 15967 - RNA, 23 nt, artificial
  Chemically synthesized
ucccugcucagguagaaggagaa

SEQ ID NO: 15968 - RNA, 23 nt, artificial
  Chemically synthesized
cccugcucagguagaaggagaag

SEQ ID NO: 15969 - RNA, 23 nt, artificial
  Chemically synthesized
gcaggcagcauuucugaacccag

SEQ ID NO: 15970 - RNA, 23 nt, artificial
  Chemically synthesized
aaaacagcaagucgggcuugggc

SEQ ID NO: 15971 - RNA, 23 nt, artificial
  Chemically synthesized
uaggugcuggacuugucgcuguu

SEQ ID NO: 15972 - RNA, 23 nt, artificial
  Chemically synthesized
aggugcuggacuugucgcuguug

SEQ ID NO: 15973 - RNA, 23 nt, artificial
  Chemically synthesized
ccccaccaaacagauggagagac

SEQ ID NO: 15974 - RNA, 23 nt, artificial
  Chemically synthesized
cccaccaaacagauggagagaca

SEQ ID NO: 15975 - RNA, 23 nt, artificial
  Chemically synthesized
gccggaggccaacaacuguauuu

SEQ ID NO: 15976 - RNA, 23 nt, artificial
  Chemically synthesized
augcccaggaugccaucgaacuu

SEQ ID NO: 15977 - RNA, 23 nt, artificial
  Chemically synthesized
aggggaaaaccacagaacaaaac

SEQ ID NO: 15978 - RNA, 23 nt, artificial
  Chemically synthesized
cugcgacaccuugagcguguagu

SEQ ID NO: 15979 - RNA, 23 nt, artificial
  Chemically synthesized
ccgagccauaguggaugucaaac

SEQ ID NO: 15980 - RNA, 23 nt, artificial
  Chemically synthesized
caggcaggcagcauuucugaacc

SEQ ID NO: 15981 - RNA, 23 nt, artificial
  Chemically synthesized
aggcaggcagcauuucugaaccc

SEQ ID NO: 15982 - RNA, 23 nt, artificial
  Chemically synthesized
ggcaggcagcauuucugaaccca

SEQ ID NO: 15983 - RNA, 23 nt, artificial
  Chemically synthesized
gucccugcucagguagaaggaga

SEQ ID NO: 15984 - RNA, 23 nt, artificial
  Chemically synthesized
acccccaccaaacagauggagag

SEQ ID NO: 15985 - RNA, 23 nt, artificial
  Chemically synthesized
cccccaccaaacagauggagaga

SEQ ID NO: 15986 - RNA, 23 nt, artificial
  Chemically synthesized
ggggccuuuggcaaucagguccu

SEQ ID NO: 15987 - RNA, 23 nt, artificial
  Chemically synthesized
gggccuuuggcaaucagguccuc

SEQ ID NO: 15988 - RNA, 23 nt, artificial
  Chemically synthesized
ccagcaagcgauguccagcaguu

SEQ ID NO: 15989 - RNA, 23 nt, artificial
  Chemically synthesized
aaacagcaagucgggcuugggcc

SEQ ID NO: 15990 - RNA, 23 nt, artificial
  Chemically synthesized
cuggggacagcuuguagccuuug

SEQ ID NO: 15991 - RNA, 23 nt, artificial
  Chemically synthesized
gcgggauguccaugcccaugaag

SEQ ID NO: 15992 - RNA, 23 nt, artificial
  Chemically synthesized
uggggucuuccaaugcacgaaac

SEQ ID NO: 15993 - RNA, 23 nt, artificial
  Chemically synthesized
guguccacaauggccucacagcc

SEQ ID NO: 15994 - RNA, 23 nt, artificial
  Chemically synthesized
uguccacaauggccucacagccc

SEQ ID NO: 15995 - RNA, 23 nt, artificial
  Chemically synthesized
gcccacccuguuguugucacggu

SEQ ID NO: 15996 - RNA, 23 nt, artificial
  Chemically synthesized
cccacccuguuguugucacgguc

SEQ ID NO: 15997 - RNA, 23 nt, artificial
  Chemically synthesized
uacccccaccaaacagauggaga

SEQ ID NO: 15998 - RNA, 23 nt, artificial
  Chemically synthesized
gcaggcuccaacaagguggguuu

SEQ ID NO: 15999 - RNA, 23 nt, artificial
  Chemically synthesized
caggcuccaacaagguggguuuu

SEQ ID NO: 16000 - RNA, 23 nt, artificial
  Chemically synthesized
agggaagugccuguguccacaau

SEQ ID NO: 16001 - RNA, 23 nt, artificial
  Chemically synthesized
uugccucccagcuucagugugau

SEQ ID NO: 16002 - RNA, 23 nt, artificial
  Chemically synthesized
ugcccgagccauaguggauguca

SEQ ID NO: 16003 - RNA, 23 nt, artificial
  Chemically synthesized
gcccgagccauaguggaugucaa

SEQ ID NO: 16004 - RNA, 23 nt, artificial
  Chemically synthesized
cccgagccauaguggaugucaaa

SEQ ID NO: 16005 - RNA, 23 nt, artificial
  Chemically synthesized
ccgggacacugaacagguagggu

SEQ ID NO: 16006 - RNA, 23 nt, artificial
  Chemically synthesized
accccaccuccaggccaauacau

SEQ ID NO: 16007 - RNA, 23 nt, artificial
  Chemically synthesized
gagggaagugccuguguccacaa

SEQ ID NO: 16008 - RNA, 23 nt, artificial
  Chemically synthesized
aggccggaggccaacaacuguau

SEQ ID NO: 16009 - RNA, 23 nt, artificial
  Chemically synthesized
ggccggaggccaacaacuguauu

SEQ ID NO: 16010 - RNA, 23 nt, artificial
  Chemically synthesized
guggggucuuccaaugcacgaaa

SEQ ID NO: 16011 - RNA, 23 nt, artificial
  Chemically synthesized
caccgccugggaguacuuugaga

SEQ ID NO: 16012 - RNA, 23 nt, artificial
  Chemically synthesized
ucuggggacagcuuguagccuuu

SEQ ID NO: 16013 - RNA, 23 nt, artificial
  Chemically synthesized
gguggggucuuccaaugcacgaa

SEQ ID NO: 16014 - RNA, 23 nt, artificial
  Chemically synthesized
gaggggaaaaccacagaacaaaa

SEQ ID NO: 16015 - RNA, 23 nt, artificial
  Chemically synthesized
ggaggggaaaaccacagaacaaa

SEQ ID NO: 16016 - RNA, 23 nt, Artificial
  Chemically synthesized
ggcgggauguccaugcccaugaa

SEQ ID NO: 16017 - RNA, 19 nt, artificial
  Chemically synthesized
cauggaaauaucaccaaaa

SEQ ID NO: 16018 - RNA, 19 nt, artificial
  Chemically synthesized
caauaaugucccauguaaa

SEQ ID NO: 16019 - RNA, 19 nt, artificial
  Chemically synthesized
ccuuguguuuggaauuaua

SEQ ID NO: 16020 - RNA, 19 nt, artificial
  Chemically synthesized
acauggaaauaucaccaaa

SEQ ID NO: 16021 - RNA, 19 nt, artificial
  Chemically synthesized
ccugcaucaugauggccaa

SEQ ID NO: 16022 - RNA, 19 nt, artificial
  Chemically synthesized
gcaggagaguauuacuaga

SEQ ID NO: 16023 - RNA, 19 nt, artificial
  Chemically synthesized
caaaacuaccuacuucuuu

SEQ ID NO: 16024 - RNA, 19 nt, artificial
  Chemically synthesized
ccagcaacaccaagugcaa

SEQ ID NO: 16025 - RNA, 19 nt, artificial
  Chemically synthesized
gcauuuuacuggcucaaaa

SEQ ID NO: 16026 - RNA, 19 nt, artificial
  Chemically synthesized
ccugguuuggagauacuaa

SEQ ID NO: 16027 - RNA, 19 nt, artificial
  Chemically synthesized
ggucuagagugaaaaacaa

SEQ ID NO: 16028 - RNA, 19 nt, artificial
  Chemically synthesized
gcuagauuaucguccaaaa

SEQ ID NO: 16029 - RNA, 19 nt, artificial
  Chemically synthesized
ccuuggugcucaucuuaau

SEQ ID NO: 16030 - RNA, 19 nt, artificial
  Chemically synthesized
caagaaugacaauguccaa

SEQ ID NO: 16031 - RNA, 19 nt, artificial
  Chemically synthesized
acuuaauaguccaccaaaa

SEQ ID NO: 16032 - RNA, 19 nt, artificial
  Chemically synthesized
caaaaguguuaaugcccaa

SEQ ID NO: 16033 - RNA, 19 nt, artificial
  Chemically synthesized
cucaaaacuaccuacuucu

SEQ ID NO: 16034 - RNA, 19 nt, artificial
  Chemically synthesized
ccauguuugcaaucaaaga

SEQ ID NO: 16035 - RNA, 19 nt, artificial
  Chemically synthesized
ccucaaagaccuuugcaca

SEQ ID NO: 16036 - RNA, 19 nt, artificial
  Chemically synthesized
ccuggaaccaccuaaagaa

SEQ ID NO: 16037 - RNA, 19 nt, artificial
  Chemically synthesized
ucaaaacuaccuacuucuu

SEQ ID NO: 16038 - RNA, 19 nt, artificial
  Chemically synthesized
caaugaagccaaaauagau

SEQ ID NO: 16039 - RNA, 19 nt, artificial
  Chemically synthesized
uggugucaaugaagccaaa

SEQ ID NO: 16040 - RNA, 19 nt, artificial
  Chemically synthesized
cauuacuagugacucagaa

SEQ ID NO: 16041 - RNA, 19 nt, artificial
  Chemically synthesized
ccaaaauagaugagaucaa

SEQ ID NO: 16042 - RNA, 19 nt, artificial
  Chemically synthesized
caguguauguuaguacaaa

SEQ ID NO: 16043 - RNA, 19 nt, artificial
  Chemically synthesized
acccauguuugcaaucaaa

SEQ ID NO: 16044 - RNA, 19 nt, artificial
  Chemically synthesized
ccuccaaggauguuuaaaa

SEQ ID NO: 16045 - RNA, 19 nt, artificial
  Chemically synthesized
cuuggucuagagugaaaaa

SEQ ID NO: 16046 - RNA, 19 nt, artificial
  Chemically synthesized
caccaagugcaaagaggaa

SEQ ID NO: 16047 - RNA, 19 nt, artificial
  Chemically synthesized
cagagaaaauucagacuau

SEQ ID NO: 16048 - RNA, 19 nt, artificial
  Chemically synthesized
agcagaacagaaaguucaa

SEQ ID NO: 16049 - RNA, 19 nt, artificial
  Chemically synthesized
gcuuggucuagagugaaaa

SEQ ID NO: 16050 - RNA, 19 nt, artificial
  Chemically synthesized
ggcagcuuauacauagcaa

SEQ ID NO: 16051 - RNA, 19 nt, artificial
  Chemically synthesized
gagugagggaagcgguuua

SEQ ID NO: 16052 - RNA, 19 nt, artificial
  Chemically synthesized
cuacuauccuacguuuaaa

SEQ ID NO: 16053 - RNA, 19 nt, artificial
  Chemically synthesized
gaguguaugcagaggauga

SEQ ID NO: 16054 - RNA, 19 nt, artificial
  Chemically synthesized
cgcugaagagccaacauau

SEQ ID NO: 16055 - RNA, 19 nt, artificial
  Chemically synthesized
ggaaggccugcaucaugau

SEQ ID NO: 16056 - RNA, 19 nt, artificial
  Chemically synthesized
caguucugaguauaugcaa

SEQ ID NO: 16057 - RNA, 19 nt, artificial
  Chemically synthesized
guaugcagaggaugaaaga

SEQ ID NO: 16058 - RNA, 19 nt, artificial
  Chemically synthesized
gcuucguaauuggcaucaa

SEQ ID NO: 16059 - RNA, 19 nt, artificial
  Chemically synthesized
agcuuggucuagagugaaa

SEQ ID NO: 16060 - RNA, 19 nt, artificial
  Chemically synthesized
guguaugcagaggaugaaa

SEQ ID NO: 16061 - RNA, 19 nt, artificial
  Chemically synthesized
caaucuuuguacucuugca

SEQ ID NO: 16062 - RNA, 19 nt, artificial
  Chemically synthesized
aggcuuuguucgaaagaau

SEQ ID NO: 16063 - RNA, 19 nt, artificial
  Chemically synthesized
cuaacugcucucagagaaa

SEQ ID NO: 16064 - RNA, 19 nt, artificial
  Chemically synthesized
aggccacuuugccucuaaa

SEQ ID NO: 16065 - RNA, 19 nt, artificial
  Chemically synthesized
aggaguguaugcagaggau

SEQ ID NO: 16066 - RNA, 19 nt, artificial
  Chemically synthesized
gcaucaacuucauggaaag

SEQ ID NO: 16067 - RNA, 19 nt, artificial
  Chemically synthesized
cuaucauccucaaggacau

SEQ ID NO: 16068 - RNA, 19 nt, artificial
  Chemically synthesized
aacccauguuugcaaucaa

SEQ ID NO: 16069 - RNA, 19 nt, artificial
  Chemically synthesized
gcagcuuauacauagcaau

SEQ ID NO: 16070 - RNA, 19 nt, artificial
  Chemically synthesized
gccucuaaauuaccucuga

SEQ ID NO: 16071 - RNA, 19 nt, artificial
  Chemically synthesized
gcaugcuaaguacccaaau

SEQ ID NO: 16072 - RNA, 19 nt, artificial
  Chemically synthesized
aagacacagcagaacagaa

SEQ ID NO: 16073 - RNA, 19 nt, artificial
  Chemically synthesized
guaaaaucaucaucuggau

SEQ ID NO: 16074 - RNA, 19 nt, artificial
  Chemically synthesized
ccaaaaguguuaaugccca

SEQ ID NO: 16075 - RNA, 19 nt, artificial
  Chemically synthesized
cauuuauuagcgcugaaga

SEQ ID NO: 16076 - RNA, 19 nt, artificial
  Chemically synthesized
cuaugaccuuuugcugaaa

SEQ ID NO: 16077 - RNA, 19 nt, artificial
  Chemically synthesized
cuagagugaaaaacaacaa

SEQ ID NO: 16078 - RNA, 19 nt, artificial
  Chemically synthesized
cacucaccagcaacaccaa

SEQ ID NO: 16079 - RNA, 19 nt, artificial
  Chemically synthesized
ccaccuaaagaacuuccau

SEQ ID NO: 16080 - RNA, 19 nt, artificial
  Chemically synthesized
aaucuaguugggaaaacaa

SEQ ID NO: 16081 - RNA, 19 nt, artificial
  Chemically synthesized
cagcaacaccaagugcaaa

SEQ ID NO: 16082 - RNA, 19 nt, artificial
  Chemically synthesized
aggccaaguugcugaauca

SEQ ID NO: 16083 - RNA, 19 nt, artificial
  Chemically synthesized
cugaguauaugcaauuagu

SEQ ID NO: 16084 - RNA, 19 nt, artificial
  Chemically synthesized
cuacaguugagacucagaa

SEQ ID NO: 16085 - RNA, 19 nt, artificial
  Chemically synthesized
aucuaguugggaaaacaaa

SEQ ID NO: 16086 - RNA, 19 nt, artificial
  Chemically synthesized
ggugucaaugaagccaaaa

SEQ ID NO: 16087 - RNA, 19 nt, artificial
  Chemically synthesized
ugagggaagcgguuuacga

SEQ ID NO: 16088 - RNA, 19 nt, artificial
  Chemically synthesized
cuuugugacaugucaugaa

SEQ ID NO: 16089 - RNA, 19 nt, artificial
  Chemically synthesized
gccugguuuggagauacua

SEQ ID NO: 16090 - RNA, 19 nt, artificial
  Chemically synthesized
ccucuaaauuaccucugau

SEQ ID NO: 16091 - RNA, 19 nt, artificial
  Chemically synthesized
ucuuucucaggcaucaaaa

SEQ ID NO: 16092 - RNA, 19 nt, artificial
  Chemically synthesized
aaguucaacugcuucguaa

SEQ ID NO: 16093 - RNA, 19 nt, artificial
  Chemically synthesized
gaaucaauagaagaagcua

SEQ ID NO: 16094 - RNA, 19 nt, artificial
  Chemically synthesized
ucggaggauugcucaacaa

SEQ ID NO: 16095 - RNA, 19 nt, artificial
  Chemically synthesized
agggauuggaauugaggaa

SEQ ID NO: 16096 - RNA, 19 nt, artificial
  Chemically synthesized
aguuauaaacugaagcaga

SEQ ID NO: 16097 - RNA, 19 nt, artificial
  Chemically synthesized
ggaaaacaaacuucaucaa

SEQ ID NO: 16098 - RNA, 19 nt, artificial
  Chemically synthesized
cauggaaucaucaaggaau

SEQ ID NO: 16099 - RNA, 19 nt, artificial
  Chemically synthesized
ccauguaaaaccugcuaca

SEQ ID NO: 16100 - RNA, 19 nt, artificial
  Chemically synthesized
ucaucaucuggauuuagga

SEQ ID NO: 16101 - RNA, 19 nt, artificial
  Chemically synthesized
aaaugcaguggcaugcuaa

SEQ ID NO: 16102 - RNA, 19 nt, artificial
  Chemically synthesized
caauguccaagacacagca

SEQ ID NO: 16103 - RNA, 19 nt, artificial
  Chemically synthesized
acauggaaucaucaaggaa

SEQ ID NO: 16104 - RNA, 19 nt, artificial
  Chemically synthesized
aguucugaguauaugcaau

SEQ ID NO: 16105 - RNA, 19 nt, artificial
  Chemically synthesized
aguguaugcagaggaugaa

SEQ ID NO: 16106 - RNA, 19 nt, artificial
  Chemically synthesized
ccuaaagaacuuccauuua

SEQ ID NO: 16107 - RNA, 19 nt, artificial
  Chemically synthesized
ggcucaaaacuaccuacuu

SEQ ID NO: 16108 - RNA, 19 nt, artificial
  Chemically synthesized
agaccuuugcacaguuuau

SEQ ID NO: 16109 - RNA, 19 nt, artificial
  Chemically synthesized
gggaaaacaaacuucauca

SEQ ID NO: 16110 - RNA, 19 nt, artificial
  Chemically synthesized
gccaaguugcugaaucaau

SEQ ID NO: 16111 - RNA, 19 nt, artificial
  Chemically synthesized
acuacuauccuacguuuaa

SEQ ID NO: 16112 - RNA, 19 nt, artificial
  Chemically synthesized
gccuuggugcucaucuuaa

SEQ ID NO: 16113 - RNA, 19 nt, artificial
  Chemically synthesized
agaggaugaaagauuaaga

SEQ ID NO: 16114 - RNA, 19 nt, artificial
  Chemically synthesized
cuugcagagaaaauucaga

SEQ ID NO: 16115 - RNA, 19 nt, artificial
  Chemically synthesized
aguucaacugcuucguaau

SEQ ID NO: 16116 - RNA, 19 nt, artificial
  Chemically synthesized
cccaaguuucuaagauuua

SEQ ID NO: 16117 - RNA, 19 nt, artificial
  Chemically synthesized
gaagcguaugacacauuga

SEQ ID NO: 16118 - RNA, 19 nt, artificial
  Chemically synthesized
gagaaaauucagacuauca

SEQ ID NO: 16119 - RNA, 19 nt, artificial
  Chemically synthesized
aggcaagacugcccuuaga

SEQ ID NO: 16120 - RNA, 19 nt, artificial
  Chemically synthesized
augagaucaagaaugacaa

SEQ ID NO: 16121 - RNA, 19 nt, artificial
  Chemically synthesized
agagaaaguagcuuuguga

SEQ ID NO: 16122 - RNA, 19 nt, artificial
  Chemically synthesized
caucaagaguaaaugcagu

SEQ ID NO: 16123 - RNA, 19 nt, artificial
  Chemically synthesized
auaccuggaaccaccuaaa

SEQ ID NO: 16124 - RNA, 19 nt, artificial
  Chemically synthesized
ucuccuuacuacuauccua

SEQ ID NO: 16125 - RNA, 19 nt, artificial
  Chemically synthesized
cugccuccaaggauguuua

SEQ ID NO: 16126 - RNA, 19 nt, artificial
  Chemically synthesized
gcuacaaauggcagcuuau

SEQ ID NO: 16127 - RNA, 19 nt, artificial
  Chemically synthesized
gugacucagaaaauucaaa

SEQ ID NO: 16128 - RNA, 19 nt, artificial
  Chemically synthesized
agaucucaaaaaagccaau

SEQ ID NO: 16129 - RNA, 19 nt, artificial
  Chemically synthesized
gaguaaauauaucaccacu

SEQ ID NO: 16130 - RNA, 19 nt, artificial
  Chemically synthesized
ccucaaggacauuacuagu

SEQ ID NO: 16131 - RNA, 19 nt, artificial
  Chemically synthesized
acuaccuacuucuuucuca

SEQ ID NO: 16132 - RNA, 19 nt, artificial
  Chemically synthesized
cuugguuuuuuacugggua

SEQ ID NO: 16133 - RNA, 19 nt, artificial
  Chemically synthesized
ggcaagacugcccuuagaa

SEQ ID NO: 16134 - RNA, 19 nt, artificial
  Chemically synthesized
gauaccuggaaccaccuaa

SEQ ID NO: 16135 - RNA, 19 nt, artificial
  Chemically synthesized
aaauaggaguguaugcaga

SEQ ID NO: 16136 - RNA, 19 nt, artificial
  Chemically synthesized
uguccaagacacagcagaa

SEQ ID NO: 16137 - RNA, 19 nt, artificial
  Chemically synthesized
uacuuaauaguccaccaaa

SEQ ID NO: 16138 - RNA, 19 nt, artificial
  Chemically synthesized
agugacucagaaaauucaa

SEQ ID NO: 16139 - RNA, 19 nt, artificial
  Chemically synthesized
gagcaggagaguauuacua

SEQ ID NO: 16140 - RNA, 19 nt, artificial
  Chemically synthesized
gagucaugacacuaaguca

SEQ ID NO: 16141 - RNA, 19 nt, artificial
  Chemically synthesized
aagaaagaagcguaugaca

SEQ ID NO: 16142 - RNA, 19 nt, artificial
  Chemically synthesized
cuggagucaugacacuaag

SEQ ID NO: 16143 - RNA, 19 nt, artificial
  Chemically synthesized
caaagaccuuugcacaguu

SEQ ID NO: 16144 - RNA, 19 nt, artificial
  Chemically synthesized
uggaaagaaagaagcguau

SEQ ID NO: 16145 - RNA, 19 nt, artificial
  Chemically synthesized
aaggcuuuguucgaaagaa

SEQ ID NO: 16146 - RNA, 19 nt, artificial
  Chemically synthesized
uguaaaaccugcuacaaau

SEQ ID NO: 16147 - RNA, 19 nt, artificial
  Chemically synthesized
gugacacacagguguucaa

SEQ ID NO: 16148 - RNA, 19 nt, artificial
  Chemically synthesized
aagggauuggaauugagga

SEQ ID NO: 16149 - RNA, 19 nt, artificial
  Chemically synthesized
acuggcucaaaacuaccua

SEQ ID NO: 16150 - RNA, 19 nt, artificial
  Chemically synthesized
aaaucuaguugggaaaaca

SEQ ID NO: 16151 - RNA, 19 nt, artificial
  Chemically synthesized
caagacacagcagaacaga

SEQ ID NO: 16152 - RNA, 19 nt, artificial
  Chemically synthesized
uauguauuugagugcagaa

SEQ ID NO: 16153 - RNA, 19 nt, artificial
  Chemically synthesized
cuguaaauguaaacuguga

SEQ ID NO: 16154 - RNA, 19 nt, artificial
  Chemically synthesized
ugaucucgcgcaagaguga

SEQ ID NO: 16155 - RNA, 19 nt, artificial
  Chemically synthesized
uuguacucuugcagagaaa

SEQ ID NO: 16156 - RNA, 19 nt, artificial
  Chemically synthesized
auuacuagugacucagaaa

SEQ ID NO: 16157 - RNA, 19 nt, artificial
  Chemically synthesized
acuucggaggauugcucaa

SEQ ID NO: 16158 - RNA, 19 nt, artificial
  Chemically synthesized
aguuaaaggcuuuguucga

SEQ ID NO: 16159 - RNA, 19 nt, artificial
  Chemically synthesized
guuaaaggcuuuguucgaa

SEQ ID NO: 16160 - RNA, 19 nt, artificial
  Chemically synthesized
cuucagaaaugaaauccaa

SEQ ID NO: 16161 - RNA, 19 nt, artificial
  Chemically synthesized
caaauggcagcuuauacau

SEQ ID NO: 16162 - RNA, 19 nt, artificial
  Chemically synthesized
uggcaucaacuucauggaa

SEQ ID NO: 16163 - RNA, 19 nt, artificial
  Chemically synthesized
caggccacuuugccucuaa

SEQ ID NO: 16164 - RNA, 19 nt, artificial
  Chemically synthesized
caacaaccaugcugggcau

SEQ ID NO: 16165 - RNA, 19 nt, artificial
  Chemically synthesized
uuaaaggcuuuguucgaaa

SEQ ID NO: 16166 - RNA, 19 nt, artificial
  Chemically synthesized
cauagcaaugguaaaauca

SEQ ID NO: 16167 - RNA, 19 nt, artificial
  Chemically synthesized
uucagacuaucauccucaa

SEQ ID NO: 16168 - RNA, 19 nt, artificial
  Chemically synthesized
ggccaaguugcugaaucaa

SEQ ID NO: 16169 - RNA, 19 nt, artificial
  Chemically synthesized
aagccaaaauagaugagau

SEQ ID NO: 16170 - RNA, 19 nt, artificial
  Chemically synthesized
cucuaaauuaccucugaua

SEQ ID NO: 16171 - RNA, 19 nt, artificial
  Chemically synthesized
ugucaaugaagccaaaaua

SEQ ID NO: 16172 - RNA, 19 nt, artificial
  Chemically synthesized
gugucaaugaagccaaaau

SEQ ID NO: 16173 - RNA, 19 nt, artificial
  Chemically synthesized
gcaagagugacacacaggu

SEQ ID NO: 16174 - RNA, 19 nt, artificial
  Chemically synthesized
ggagaguauuacuagagcu

SEQ ID NO: 16175 - RNA, 19 nt, artificial
  Chemically synthesized
ucaugauucugccuccaag

SEQ ID NO: 16176 - RNA, 19 nt, artificial
  Chemically synthesized
cuggcaucuaacauaugau

SEQ ID NO: 16177 - RNA, 19 nt, artificial
  Chemically synthesized
gaggaugaaagauuaagau

SEQ ID NO: 16178 - RNA, 19 nt, artificial
  Chemically synthesized
gccuccaaggauguuuaaa

SEQ ID NO: 16179 - RNA, 19 nt, artificial
  Chemically synthesized
cuucuuucucaggcaucaa

SEQ ID NO: 16180 - RNA, 19 nt, artificial
  Chemically synthesized
ugagaucaagaaugacaau

SEQ ID NO: 16181 - RNA, 19 nt, artificial
  Chemically synthesized
guagcuuugugacauguca

SEQ ID NO: 16182 - RNA, 19 nt, artificial
  Chemically synthesized
gcucuaccucaaagaccuu

SEQ ID NO: 16183 - RNA, 19 nt, artificial
  Chemically synthesized
cauuuugagcaggagagua

SEQ ID NO: 16184 - RNA, 19 nt, artificial
  Chemically synthesized
cacuauugcuggagucaug

SEQ ID NO: 16185 - RNA, 19 nt, artificial
  Chemically synthesized
ugagcaggagaguauuacu

SEQ ID NO: 16186 - RNA, 19 nt, artificial
  Chemically synthesized
ggcaugcuaaguacccaaa

SEQ ID NO: 16187 - RNA, 19 nt, artificial
  Chemically synthesized
caaauucaguucugaguau

SEQ ID NO: 16188 - RNA, 19 nt, artificial
  Chemically synthesized
gauggccaauucugccaua

SEQ ID NO: 16189 - RNA, 19 nt, artificial
  Chemically synthesized
ggauuuaggaauugcucuu

SEQ ID NO: 16190 - RNA, 19 nt, artificial
  Chemically synthesized
caucaucuggauuuaggaa

SEQ ID NO: 16191 - RNA, 19 nt, artificial
  Chemically synthesized
ugacaauguccaagacaca

SEQ ID NO: 16192 - RNA, 19 nt, artificial
  Chemically synthesized
ucuagagugaaaaacaaca

SEQ ID NO: 16193 - RNA, 19 nt, artificial
  Chemically synthesized
ccacuauugcuggagucau

SEQ ID NO: 16194 - RNA, 19 nt, artificial
  Chemically synthesized
gguuuuuuacuggguacau

SEQ ID NO: 16195 - RNA, 19 nt, artificial
  Chemically synthesized
aguguuaaugcccaaguga

SEQ ID NO: 16196 - RNA, 19 nt, artificial
  Chemically synthesized
caaggacauuacuagugac

SEQ ID NO: 16197 - RNA, 19 nt, artificial
  Chemically synthesized
ugccuccaaggauguuuaa

SEQ ID NO: 16198 - RNA, 19 nt, artificial
  Chemically synthesized
ucgugagcucgucucugau

SEQ ID NO: 16199 - RNA, 19 nt, artificial
  Chemically synthesized
caacuccaagggauuggaa

SEQ ID NO: 16200 - RNA, 19 nt, artificial
  Chemically synthesized
acgucuguugcuagauuau

SEQ ID NO: 16201 - RNA, 19 nt, artificial
  Chemically synthesized
cuucguaauuggcaucaac

SEQ ID NO: 16202 - RNA, 19 nt, artificial
  Chemically synthesized
gguaaaaucaucaucugga

SEQ ID NO: 16203 - RNA, 19 nt, artificial
  Chemically synthesized
uguaaacugugaagauagu

SEQ ID NO: 16204 - RNA, 19 nt, artificial
  Chemically synthesized
uguacucuugcagagaaaa

SEQ ID NO: 16205 - RNA, 19 nt, artificial
  Chemically synthesized
ucuuaauagcuggcuguaa

SEQ ID NO: 16206 - RNA, 19 nt, artificial
  Chemically synthesized
acauuacuagugacucaga

SEQ ID NO: 16207 - RNA, 19 nt, artificial
  Chemically synthesized
ccaagacacagcagaacag

SEQ ID NO: 16208 - RNA, 19 nt, artificial
  Chemically synthesized
agacuaucauccucaagga

SEQ ID NO: 16209 - RNA, 19 nt, artificial
  Chemically synthesized
cuccaaggauguuuaaaau

SEQ ID NO: 16210 - RNA, 19 nt, artificial
  Chemically synthesized
aucauuuauuagcgcugaa

SEQ ID NO: 16211 - RNA, 19 nt, artificial
  Chemically synthesized
gcagagaaaauucagacua

SEQ ID NO: 16212 - RNA, 19 nt, artificial
  Chemically synthesized
cacaguuuauuggugucau

SEQ ID NO: 16213 - RNA, 19 nt, artificial
  Chemically synthesized
gauuaucguccaaaagugu

SEQ ID NO: 16214 - RNA, 19 nt, artificial
  Chemically synthesized
aauaaggcucuaccucaaa

SEQ ID NO: 16215 - RNA, 19 nt, artificial
  Chemically synthesized
aaugcacacucaccagcaa

SEQ ID NO: 16216 - RNA, 19 nt, artificial
  Chemically synthesized
gcucuuucacuucggagga

SEQ ID NO: 16217 - RNA, 19 nt, artificial
  Chemically synthesized
uggcaugcuaaguacccaa

SEQ ID NO: 16218 - RNA, 19 nt, artificial
  Chemically synthesized
gaagcucuuucacuucgga

SEQ ID NO: 16219 - RNA, 19 nt, artificial
  Chemically synthesized
cccaaacauggaaauauca

SEQ ID NO: 16220 - RNA, 19 nt, artificial
  Chemically synthesized
ggaauugaggaagacuguu

SEQ ID NO: 16221 - RNA, 19 nt, artificial
  Chemically synthesized
ugugaacauggaaucauca

SEQ ID NO: 16222 - RNA, 19 nt, artificial
  Chemically synthesized
ggaagacuguuacuacagu

SEQ ID NO: 16223 - RNA, 19 nt, artificial
  Chemically synthesized
agccaaucuuuguacucuu

SEQ ID NO: 16224 - RNA, 19 nt, artificial
  Chemically synthesized
auauguauuugagugcaga

SEQ ID NO: 16225 - RNA, 19 nt, artificial
  Chemically synthesized
cucugauaauucuagagau

SEQ ID NO: 16226 - RNA, 19 nt, artificial
  Chemically synthesized
caugaacccauguuugcaa

SEQ ID NO: 16227 - RNA, 19 nt, artificial
  Chemically synthesized
guacaaaugucuauccaca

SEQ ID NO: 16228 - RNA, 19 nt, artificial
  Chemically synthesized
gcauuuugagcaggagagu

SEQ ID NO: 16229 - RNA, 19 nt, artificial
  Chemically synthesized
uggaauugaggaagacugu

SEQ ID NO: 16230 - RNA, 19 nt, artificial
  Chemically synthesized
aagucaaguuaaaggcuuu

SEQ ID NO: 16231 - RNA, 19 nt, artificial
  Chemically synthesized
ugcucaucuuaauggccua

SEQ ID NO: 16232 - RNA, 19 nt, artificial
  Chemically synthesized
aauacuuaauaguccacca

SEQ ID NO: 16233 - RNA, 19 nt, artificial
  Chemically synthesized
gaagaagcuaugaccuuuu

SEQ ID NO: 16234 - RNA, 19 nt, artificial
  Chemically synthesized
gaguauaugcaauuagugu

SEQ ID NO: 16235 - RNA, 19 nt, artificial
  Chemically synthesized
guggcaugcuaaguaccca

SEQ ID NO: 16236 - RNA, 19 nt, artificial
  Chemically synthesized
cuuauacauagcaauggua

SEQ ID NO: 16237 - RNA, 19 nt, artificial
  Chemically synthesized
acuaacugcucucagagaa

SEQ ID NO: 16238 - RNA, 19 nt, artificial
  Chemically synthesized
gacacagcagaacagaaag

SEQ ID NO: 16239 - RNA, 19 nt, artificial
  Chemically synthesized
aagcuuggucuagagugaa

SEQ ID NO: 16240 - RNA, 19 nt, artificial
  Chemically synthesized
augaccuuuugcugaaaua

SEQ ID NO: 16241 - RNA, 19 nt, artificial
  Chemically synthesized
ccaagggauuggaauugag

SEQ ID NO: 16242 - RNA, 19 nt, artificial
  Chemically synthesized
gaguauuacuagagcuuug

SEQ ID NO: 16243 - RNA, 19 nt, artificial
  Chemically synthesized
agauucuccuuacuacuau

SEQ ID NO: 16244 - RNA, 19 nt, artificial
  Chemically synthesized
ugagacucagaacuuggaa

SEQ ID NO: 16245 - RNA, 19 nt, artificial
  Chemically synthesized
gccacuuugccucuaaauu

SEQ ID NO: 16246 - RNA, 19 nt, artificial
  Chemically synthesized
cccaagugacugacaucaa

SEQ ID NO: 16247 - RNA, 19 nt, artificial
  Chemically synthesized
gguucuuacgucuguugcu

SEQ ID NO: 16248 - RNA, 19 nt, artificial
  Chemically synthesized
cuuuguuuauaacucugag

SEQ ID NO: 16249 - RNA, 19 nt, artificial
  Chemically synthesized
agucaugacacuaagucaa

SEQ ID NO: 16250 - RNA, 19 nt, artificial
  Chemically synthesized
cuggguacauuuuaucauu

SEQ ID NO: 16251 - RNA, 19 nt, artificial
  Chemically synthesized
gcaacaccaagugcaaaga

SEQ ID NO: 16252 - RNA, 19 nt, artificial
  Chemically synthesized
uggucuagagugaaaaaca

SEQ ID NO: 16253 - RNA, 19 nt, artificial
  Chemically synthesized
acaucaacuccaagggauu

SEQ ID NO: 16254 - RNA, 19 nt, artificial
  Chemically synthesized
agaaaguagcuuugugaca

SEQ ID NO: 16255 - RNA, 19 nt, artificial
  Chemically synthesized
ccaaggauguuuaaaaucu

SEQ ID NO: 16256 - RNA, 19 nt, artificial
  Chemically synthesized
ggcuuuguucgaaagaaug

SEQ ID NO: 16257 - RNA, 19 nt, artificial
  Chemically synthesized
ugacacuaagucaaguuaa

SEQ ID NO: 16258 - RNA, 19 nt, artificial
  Chemically synthesized
gauuaugcucuggcaucua

SEQ ID NO: 16259 - RNA, 19 nt, artificial
  Chemically synthesized
cucaaaaaagccaaucuuu

SEQ ID NO: 16260 - RNA, 19 nt, artificial
  Chemically synthesized
caguuuauuggugucauau

SEQ ID NO: 16261 - RNA, 19 nt, artificial
  Chemically synthesized
ggcucuaccucaaagaccu

SEQ ID NO: 16262 - RNA, 19 nt, artificial
  Chemically synthesized
cucaugauucugccuccaa

SEQ ID NO: 16263 - RNA, 19 nt, artificial
  Chemically synthesized
cauguuugcaaucaaagau

SEQ ID NO: 16264 - RNA, 19 nt, artificial
  Chemically synthesized
aagaucucaaaaaagccaa

SEQ ID NO: 16265 - RNA, 19 nt, artificial
  Chemically synthesized
accuggaaccaccuaaaga

SEQ ID NO: 16266 - RNA, 19 nt, artificial
  Chemically synthesized
auguaaaaccugcuacaaa

SEQ ID NO: 16267 - RNA, 19 nt, artificial
  Chemically synthesized
ucucaggcaucaaaagcau

SEQ ID NO: 16268 - RNA, 19 nt, artificial
  Chemically synthesized
agaaugacaauguccaaga

SEQ ID NO: 16269 - RNA, 19 nt, artificial
  Chemically synthesized
gcaucuaacauaugauucu

SEQ ID NO: 16270 - RNA, 19 nt, artificial
  Chemically synthesized
aggauugcucaacaaccau

SEQ ID NO: 16271 - RNA, 19 nt, artificial
  Chemically synthesized
acaccaagugcaaagagga

SEQ ID NO: 16272 - RNA, 19 nt, artificial
  Chemically synthesized
uaugcauuuuacuggcuca

SEQ ID NO: 16273 - RNA, 19 nt, artificial
  Chemically synthesized
accuuuugcugaaauauca

SEQ ID NO: 16274 - RNA, 19 nt, artificial
  Chemically synthesized
ccaaauaggaguguaugca

SEQ ID NO: 16275 - RNA, 19 nt, artificial
  Chemically synthesized
gaaucaucaaggaaugcac

SEQ ID NO: 16276 - RNA, 19 nt, artificial
  Chemically synthesized
ucaaugaagccaaaauaga

SEQ ID NO: 16277 - RNA, 19 nt, artificial
  Chemically synthesized
uuaauagcuggcuguaaau

SEQ ID NO: 16278 - RNA, 19 nt, artificial
  Chemically synthesized
cccgaaaauguucaauaau

SEQ ID NO: 16279 - RNA, 19 nt, artificial
  Chemically synthesized
cauguaaaaccugcuacaa

SEQ ID NO: 16280 - RNA, 19 nt, artificial
  Chemically synthesized
cagcagaacagaaaguuca

SEQ ID NO: 16281 - RNA, 19 nt, artificial
  Chemically synthesized
gcaucaaaagcauuuugag

SEQ ID NO: 16282 - RNA, 19 nt, artificial
  Chemically synthesized
caguugagacucagaacuu

SEQ ID NO: 16283 - RNA, 19 nt, artificial
  Chemically synthesized
acuagugacucagaaaauu

SEQ ID NO: 16284 - RNA, 19 nt, artificial
  Chemically synthesized
agggaagcgguuuacgagu

SEQ ID NO: 16285 - RNA, 19 nt, artificial
  Chemically synthesized
cugguuuggagauacuaac

SEQ ID NO: 16286 - RNA, 19 nt, artificial
  Chemically synthesized
cucugagaagaucauauuu

SEQ ID NO: 16287 - RNA, 19 nt, artificial
  Chemically synthesized
uuacuagugacucagaaaa

SEQ ID NO: 16288 - RNA, 19 nt, artificial
  Chemically synthesized
cuagccugguuuggagaua

SEQ ID NO: 16289 - RNA, 19 nt, artificial
  Chemically synthesized
uggagauacuaacugcucu

SEQ ID NO: 16290 - RNA, 19 nt, artificial
  Chemically synthesized
gcaaugguaaaaucaucau

SEQ ID NO: 16291 - RNA, 19 nt, artificial
  Chemically synthesized
cagagaaaguagcuuugug

SEQ ID NO: 16292 - RNA, 19 nt, artificial
  Chemically synthesized
guuuuuuacuggguacauu

SEQ ID NO: 16293 - RNA, 19 nt, artificial
  Chemically synthesized
aagaguaaaugcaguggca

SEQ ID NO: 16294 - RNA, 19 nt, artificial
  Chemically synthesized
caaauaggaguguaugcag

SEQ ID NO: 16295 - RNA, 19 nt, artificial
  Chemically synthesized
gguguucaaagacgcuucu

SEQ ID NO: 16296 - RNA, 19 nt, artificial
  Chemically synthesized
ccuacuucuuucucaggca

SEQ ID NO: 16297 - RNA, 19 nt, artificial
  Chemically synthesized
aaucaucaaggaaugcaca

SEQ ID NO: 16298 - RNA, 19 nt, artificial
  Chemically synthesized
acugaagcagauaccugga

SEQ ID NO: 16299 - RNA, 19 nt, artificial
  Chemically synthesized
cugaaauaucaguuacuga

SEQ ID NO: 16300 - RNA, 19 nt, artificial
  Chemically synthesized
uacgucuguugcuagauua

SEQ ID NO: 16301 - RNA, 19 nt, artificial
  Chemically synthesized
gugaacauggaaucaucaa

SEQ ID NO: 16302 - RNA, 19 nt, artificial
  Chemically synthesized
auggaaagaaagaagcgua

SEQ ID NO: 16303 - RNA, 19 nt, artificial
  Chemically synthesized
auuaugcucuggcaucuaa

SEQ ID NO: 16304 - RNA, 19 nt, artificial
  Chemically synthesized
caccuaaagaacuuccauu

SEQ ID NO: 16305 - RNA, 19 nt, artificial
  Chemically synthesized
uugggaaaacaaacuucau

SEQ ID NO: 16306 - RNA, 19 nt, artificial
  Chemically synthesized
agacuguuacuacaguuga

SEQ ID NO: 16307 - RNA, 19 nt, artificial
  Chemically synthesized
uucuuucucaggcaucaaa

SEQ ID NO: 16308 - RNA, 19 nt, artificial
  Chemically synthesized
ggccacuuugccucuaaau

SEQ ID NO: 16309 - RNA, 19 nt, artificial
  Chemically synthesized
aagaccuuugcacaguuua

SEQ ID NO: 16310 - RNA, 19 nt, artificial
  Chemically synthesized
aagcguaugacacauugau

SEQ ID NO: 16311 - RNA, 19 nt, artificial
  Chemically synthesized
caucaacuucauggaaaga

SEQ ID NO: 16312 - RNA, 19 nt, artificial
  Chemically synthesized
gauucugccuccaaggaug

SEQ ID NO: 16313 - RNA, 19 nt, artificial
  Chemically synthesized
agcuuugccaccucuccau

SEQ ID NO: 16314 - RNA, 19 nt, artificial
  Chemically synthesized
cuggcucaaaacuaccuac

SEQ ID NO: 16315 - RNA, 19 nt, artificial
  Chemically synthesized
cacuuugccucuaaauuac

SEQ ID NO: 16316 - RNA, 19 nt, artificial
  Chemically synthesized
agcgcugaagagccaacau

SEQ ID NO: 16317 - RNA, 19 nt, artificial
  Chemically synthesized
cuaccuacuucuuucucag

SEQ ID NO: 16318 - RNA, 19 nt, artificial
  Chemically synthesized
cuuucucaggcaucaaaag

SEQ ID NO: 16319 - RNA, 19 nt, artificial
  Chemically synthesized
gcuugguuuuuuacugggu

SEQ ID NO: 16320 - RNA, 19 nt, artificial
  Chemically synthesized
uacuagugacucagaaaau

SEQ ID NO: 16321 - RNA, 19 nt, artificial
  Chemically synthesized
gcuuugccaccucuccauu

SEQ ID NO: 16322 - RNA, 19 nt, artificial
  Chemically synthesized
uaggaauugcucuugucau

SEQ ID NO: 16323 - RNA, 19 nt, artificial
  Chemically synthesized
aagcauuuugagcaggaga

SEQ ID NO: 16324 - RNA, 19 nt, artificial
  Chemically synthesized
gcagaauuuaaauaaggcu

SEQ ID NO: 16325 - RNA, 19 nt, artificial
  Chemically synthesized
aaaacuaccuacuucuuuc

SEQ ID NO: 16326 - RNA, 19 nt, artificial
  Chemically synthesized
gaagccaaaauagaugaga

SEQ ID NO: 16327 - RNA, 19 nt, artificial
  Chemically synthesized
guacucuugcagagaaaau

SEQ ID NO: 16328 - RNA, 19 nt, artificial
  Chemically synthesized
aacauggaaucaucaagga

SEQ ID NO: 16329 - RNA, 19 nt, artificial
  Chemically synthesized
uagugacucagaaaauuca

SEQ ID NO: 16330 - RNA, 19 nt, artificial
  Chemically synthesized
ucaagaaugacaaugucca

SEQ ID NO: 16331 - RNA, 19 nt, artificial
  Chemically synthesized
auauaucaccacuauugcu

SEQ ID NO: 16332 - RNA, 19 nt, artificial
  Chemically synthesized
aauguucaauaauguccca

SEQ ID NO: 16333 - RNA, 19 nt, artificial
  Chemically synthesized
cugaagcagauaccuggaa

SEQ ID NO: 16334 - RNA, 19 nt, artificial
  Chemically synthesized
augucuauccacaggcuaa

SEQ ID NO: 16335 - RNA, 19 nt, artificial
  Chemically synthesized
guugggaaaacaaacuuca

SEQ ID NO: 16336 - RNA, 19 nt, artificial
  Chemically synthesized
uaucguccaaaaguguuaa

SEQ ID NO: 16337 - RNA, 19 nt, artificial
  Chemically synthesized
cucaaagaccuuugcacag

SEQ ID NO: 16338 - RNA, 19 nt, artificial
  Chemically synthesized
gacugcccuuagaaauucu

SEQ ID NO: 16339 - RNA, 19 nt, artificial
  Chemically synthesized
auagcuggcuguaaauacu

SEQ ID NO: 16340 - RNA, 19 nt, artificial
  Chemically synthesized
guugcuagauuaucgucca

SEQ ID NO: 16341 - RNA, 19 nt, artificial
  Chemically synthesized
gcaauuaguguuugaaaag

SEQ ID NO: 16342 - RNA, 19 nt, artificial
  Chemically synthesized
gagaguauuacuagagcuu

SEQ ID NO: 16343 - RNA, 19 nt, artificial
  Chemically synthesized
gaaugcacacucaccagca

SEQ ID NO: 16344 - RNA, 19 nt, artificial
  Chemically synthesized
uucggaggauugcucaaca

SEQ ID NO: 16345 - RNA, 19 nt, artificial
  Chemically synthesized
cccauguuugcaaucaaag

SEQ ID NO: 16346 - RNA, 19 nt, artificial
  Chemically synthesized
gcuuauacauagcaauggu

SEQ ID NO: 16347 - RNA, 19 nt, artificial
  Chemically synthesized
agauuaucguccaaaagug

SEQ ID NO: 16348 - RNA, 19 nt, artificial
  Chemically synthesized
guacccaaauaggagugua

SEQ ID NO: 16349 - RNA, 19 nt, artificial
  Chemically synthesized
ugaggaagacuguuacuac

SEQ ID NO: 16350 - RNA, 19 nt, artificial
  Chemically synthesized
guauguuaguacaaauguc

SEQ ID NO: 16351 - RNA, 19 nt, artificial
  Chemically synthesized
aacucugagaagaucauau

SEQ ID NO: 16352 - RNA, 19 nt, artificial
  Chemically synthesized
acuucauggaaagaaagaa

SEQ ID NO: 16353 - RNA, 19 nt, artificial
  Chemically synthesized
gacuguuacuacaguugag

SEQ ID NO: 16354 - RNA, 19 nt, artificial
  Chemically synthesized
caagggauuggaauugagg

SEQ ID NO: 16355 - RNA, 19 nt, artificial
  Chemically synthesized
gaaaguagcuuugugacau

SEQ ID NO: 16356 - RNA, 19 nt, artificial
  Chemically synthesized
ugcuggagucaugacacua

SEQ ID NO: 16357 - RNA, 19 nt, artificial
  Chemically synthesized
ugcucuggcaucuaacaua

SEQ ID NO: 16358 - RNA, 19 nt, artificial
  Chemically synthesized
uaaaugcaguggcaugcua

SEQ ID NO: 16359 - RNA, 19 nt, artificial
  Chemically synthesized
guaaauacugcuugguuuu

SEQ ID NO: 16360 - RNA, 19 nt, artificial
  Chemically synthesized
uggagucaugacacuaagu

SEQ ID NO: 16361 - RNA, 19 nt, artificial
  Chemically synthesized
gaagcuaugaccuuuugcu

SEQ ID NO: 16362 - RNA, 19 nt, artificial
  Chemically synthesized
auacuuaauaguccaccaa

SEQ ID NO: 16363 - RNA, 19 nt, artificial
  Chemically synthesized
gcaucaugauggccaauuc

SEQ ID NO: 16364 - RNA, 19 nt, artificial
  Chemically synthesized
guuuaaaaucuaguuggga

SEQ ID NO: 16365 - RNA, 19 nt, artificial
  Chemically synthesized
ucuaguugggaaaacaaac

SEQ ID NO: 16366 - RNA, 19 nt, artificial
  Chemically synthesized
aaaguucaacugcuucgua

SEQ ID NO: 16367 - RNA, 19 nt, artificial
  Chemically synthesized
guauauguauuugagugca

SEQ ID NO: 16368 - RNA, 19 nt, artificial
  Chemically synthesized
gccaaaauagaugagauca

SEQ ID NO: 16369 - RNA, 19 nt, artificial
  Chemically synthesized
cagaaaauucaaacuucag

SEQ ID NO: 16370 - RNA, 19 nt, artificial
  Chemically synthesized
gcuuugugacaugucauga

SEQ ID NO: 16371 - RNA, 19 nt, artificial
  Chemically synthesized
gauucuccuuacuacuauc

SEQ ID NO: 16372 - RNA, 19 nt, artificial
  Chemically synthesized
cacucuaugaaucaauaga

SEQ ID NO: 16373 - RNA, 19 nt, artificial
  Chemically synthesized
ugaccuuuugcugaaauau

SEQ ID NO: 16374 - RNA, 19 nt, artificial
  Chemically synthesized
caaaaaagccaaucuuugu

SEQ ID NO: 16375 - RNA, 19 nt, artificial
  Chemically synthesized
cucugguucuuacgucugu

SEQ ID NO: 16376 - RNA, 19 nt, artificial
  Chemically synthesized
gacugacaucaacuccaag

SEQ ID NO: 16377 - RNA, 19 nt, artificial
  Chemically synthesized
uugagacucagaacuugga

SEQ ID NO: 16378 - RNA, 19 nt, artificial
  Chemically synthesized
ugcuacaaauggcagcuua

SEQ ID NO: 16379 - RNA, 19 nt, artificial
  Chemically synthesized
ccuccuaccucugguucuu

SEQ ID NO: 16380 - RNA, 19 nt, artificial
  Chemically synthesized
cuuaauaguccaccaaaag

SEQ ID NO: 16381 - RNA, 19 nt, artificial
  Chemically synthesized
agccugguuuggagauacu

SEQ ID NO: 16382 - RNA, 19 nt, artificial
  Chemically synthesized
ucaaguuaaaggcuuuguu

SEQ ID NO: 16383 - RNA, 19 nt, artificial
  Chemically synthesized
uggcaucuaacauaugauu

SEQ ID NO: 16384 - RNA, 19 nt, artificial
  Chemically synthesized
aaauccaaagcuuggucua

SEQ ID NO: 16385 - RNA, 19 nt, artificial
  Chemically synthesized
cuguaaauacugcuugguu

SEQ ID NO: 16386 - RNA, 19 nt, artificial
  Chemically synthesized
gauuggaauugaggaagac

SEQ ID NO: 16387 - RNA, 19 nt, artificial
  Chemically synthesized
aagagccaacauauuugua

SEQ ID NO: 16388 - RNA, 19 nt, artificial
  Chemically synthesized
ggcaucaaaagcauuuuga

SEQ ID NO: 16389 - RNA, 19 nt, artificial
  Chemically synthesized
uguuugcaaucaaagauga

SEQ ID NO: 16390 - RNA, 19 nt, artificial
  Chemically synthesized
acuauugcuggagucauga

SEQ ID NO: 16391 - RNA, 19 nt, artificial
  Chemically synthesized
agauaccuggaaccaccua

SEQ ID NO: 16392 - RNA, 19 nt, artificial
  Chemically synthesized
acacacagguguucaaaga

SEQ ID NO: 16393 - RNA, 19 nt, artificial
  Chemically synthesized
aaaagcauuuugagcagga

SEQ ID NO: 16394 - RNA, 19 nt, artificial
  Chemically synthesized
acugcuucguaauuggcau

SEQ ID NO: 16395 - RNA, 19 nt, artificial
  Chemically synthesized
uuaucguccaaaaguguua

SEQ ID NO: 16396 - RNA, 19 nt, artificial
  Chemically synthesized
acuuggaaggccugcauca

SEQ ID NO: 16397 - RNA, 19 nt, artificial
  Chemically synthesized
ugcauuuuacuggcucaaa

SEQ ID NO: 16398 - RNA, 19 nt, artificial
  Chemically synthesized
aaugcaguggcaugcuaag

SEQ ID NO: 16399 - RNA, 19 nt, artificial
  Chemically synthesized
acuacaguugagacucaga

SEQ ID NO: 16400 - RNA, 19 nt, artificial
  Chemically synthesized
uuuguacucuugcagagaa

SEQ ID NO: 16401 - RNA, 19 nt, artificial
  Chemically synthesized
aaaggcuuuguucgaaaga

SEQ ID NO: 16402 - RNA, 19 nt, artificial
  Chemically synthesized
ugacacacagguguucaaa

SEQ ID NO: 16403 - RNA, 19 nt, artificial
  Chemically synthesized
uccaagacacagcagaaca

SEQ ID NO: 16404 - RNA, 19 nt, artificial
  Chemically synthesized
aaagaagcguaugacacau

SEQ ID NO: 16405 - RNA, 19 nt, artificial
  Chemically synthesized
uguauuugagugcagaauu

SEQ ID NO: 16406 - RNA, 19 nt, artificial
  Chemically synthesized
acaaauucaguucugagua

SEQ ID NO: 16407 - RNA, 19 nt, artificial
  Chemically synthesized
ucaucuuaauggccuaaug

SEQ ID NO: 16408 - RNA, 19 nt, artificial
  Chemically synthesized
uguuuauaacucugagaag

SEQ ID NO: 16409 - RNA, 19 nt, artificial
  Chemically synthesized
gcgguuuacgagugacuug

SEQ ID NO: 16410 - RNA, 19 nt, artificial
  Chemically synthesized
uauugcuggagucaugaca

SEQ ID NO: 16411 - RNA, 19 nt, artificial
  Chemically synthesized
aucuuaauggccuaaugca

SEQ ID NO: 16412 - RNA, 19 nt, artificial
  Chemically synthesized
caggcaucaaaagcauuuu

SEQ ID NO: 16413 - RNA, 19 nt, artificial
  Chemically synthesized
agcgguuuacgagugacuu

SEQ ID NO: 16414 - RNA, 19 nt, artificial
  Chemically synthesized
caucaugauggccaauucu

SEQ ID NO: 16415 - RNA, 19 nt, artificial
  Chemically synthesized
acagguguucaaagacgcu

SEQ ID NO: 16416 - RNA, 19 nt, artificial
  Chemically synthesized
cauggaaagaaagaagcgu

SEQ ID NO: 16417 - RNA, 19 nt, artificial
  Chemically synthesized
cacuucggaggauugcuca

SEQ ID NO: 16418 - RNA, 19 nt, artificial
  Chemically synthesized
accucaaagaccuuugcac

SEQ ID NO: 16419 - RNA, 19 nt, artificial
  Chemically synthesized
guuugcaaucaaagaugau

SEQ ID NO: 16420 - RNA, 19 nt, artificial
  Chemically synthesized
gaccuuugcacaguuuauu

SEQ ID NO: 16421 - RNA, 19 nt, artificial
  Chemically synthesized
gagaaaguagcuuugugac

SEQ ID NO: 16422 - RNA, 19 nt, artificial
  Chemically synthesized
auaacucugagaagaucau

SEQ ID NO: 16423 - RNA, 19 nt, artificial
  Chemically synthesized
aauucuagccugguuugga

SEQ ID NO: 16424 - RNA, 19 nt, artificial
  Chemically synthesized
caugauucugccuccaagg

SEQ ID NO: 16425 - RNA, 19 nt, artificial
  Chemically synthesized
agaaauucuagccugguuu

SEQ ID NO: 16426 - RNA, 19 nt, artificial
  Chemically synthesized
acuucuuucucaggcauca

SEQ ID NO: 16427 - RNA, 19 nt, artificial
  Chemically synthesized
cucaggcaucaaaagcauu

SEQ ID NO: 16428 - RNA, 19 nt, artificial
  Chemically synthesized
ucaauagaagaagcuauga

SEQ ID NO: 16429 - RNA, 19 nt, artificial
  Chemically synthesized
cuaguugggaaaacaaacu

SEQ ID NO: 16430 - RNA, 19 nt, artificial
  Chemically synthesized
uaagauucuccuuacuacu

SEQ ID NO: 16431 - RNA, 19 nt, artificial
  Chemically synthesized
uaacucugagaagaucaua

SEQ ID NO: 16432 - RNA, 19 nt, artificial
  Chemically synthesized
uuggcaucaacuucaugga

SEQ ID NO: 16433 - RNA, 19 nt, artificial
  Chemically synthesized
ggcuguaaauacugcuugg

SEQ ID NO: 16434 - RNA, 19 nt, artificial
  Chemically synthesized
gaagacuguuacuacaguu

SEQ ID NO: 16435 - RNA, 19 nt, artificial
  Chemically synthesized
acucugagaagaucauauu

SEQ ID NO: 16436 - RNA, 19 nt, artificial
  Chemically synthesized
agaucaagaaugacaaugu

SEQ ID NO: 16437 - RNA, 19 nt, artificial
  Chemically synthesized
acaacaaauucaguucuga

SEQ ID NO: 16438 - RNA, 19 nt, artificial
  Chemically synthesized
uaauuggcaucaacuucau

SEQ ID NO: 16439 - RNA, 19 nt, artificial
  Chemically synthesized
aaaugaaauccaaagcuug

SEQ ID NO: 16440 - RNA, 19 nt, artificial
  Chemically synthesized
aagacugcccuuagaaauu

SEQ ID NO: 16441 - RNA, 19 nt, artificial
  Chemically synthesized
aguugagacucagaacuug

SEQ ID NO: 16442 - RNA, 19 nt, artificial
  Chemically synthesized
cccuuguguuuggaauuau

SEQ ID NO: 16443 - RNA, 19 nt, artificial
  Chemically synthesized
ccuuacuacuauccuacgu

SEQ ID NO: 16444 - RNA, 19 nt, artificial
  Chemically synthesized
aaagaucucaaaaaagcca

SEQ ID NO: 16445 - RNA, 19 nt, artificial
  Chemically synthesized
uuacuacaguugagacuca

SEQ ID NO: 16446 - RNA, 19 nt, artificial
  Chemically synthesized
gucuagagugaaaaacaac

SEQ ID NO: 16447 - RNA, 19 nt, artificial
  Chemically synthesized
aaacuaccuacuucuuucu

SEQ ID NO: 16448 - RNA, 19 nt, artificial
  Chemically synthesized
ucuggauuuaggaauugcu

SEQ ID NO: 16449 - RNA, 19 nt, artificial
  Chemically synthesized
ugaacauggaaucaucaag

SEQ ID NO: 16450 - RNA, 19 nt, artificial
  Chemically synthesized
gcuuuucgugagcucgucu

SEQ ID NO: 16451 - RNA, 19 nt, artificial
  Chemically synthesized
acagaaaguucaacugcuu

SEQ ID NO: 16452 - RNA, 19 nt, artificial
  Chemically synthesized
gauucuuaauagcuggcug

SEQ ID NO: 16453 - RNA, 19 nt, artificial
  Chemically synthesized
ugguuuggagauacuaacu

SEQ ID NO: 16454 - RNA, 19 nt, artificial
  Chemically synthesized
accaccuaaagaacuucca

SEQ ID NO: 16455 - RNA, 19 nt, artificial
  Chemically synthesized
ucuuacgucuguugcuaga

SEQ ID NO: 16456 - RNA, 19 nt, artificial
  Chemically synthesized
uuaagauuaugcucuggca

SEQ ID NO: 16457 - RNA, 19 nt, artificial
  Chemically synthesized
gaaugacaauguccaagac

SEQ ID NO: 16458 - RNA, 19 nt, artificial
  Chemically synthesized
ucucaaaaaagccaaucuu

SEQ ID NO: 16459 - RNA, 19 nt, artificial
  Chemically synthesized
aaguguuaaugcccaagug

SEQ ID NO: 16460 - RNA, 19 nt, artificial
  Chemically synthesized
agcaggagaguauuacuag

SEQ ID NO: 16461 - RNA, 19 nt, artificial
  Chemically synthesized
cuaacauaugauucuguag

SEQ ID NO: 16462 - RNA, 19 nt, artificial
  Chemically synthesized
ucaguguauguuaguacaa

SEQ ID NO: 16463 - RNA, 19 nt, artificial
  Chemically synthesized
uaccucaaagaccuuugca

SEQ ID NO: 16464 - RNA, 19 nt, artificial
  Chemically synthesized
cucuaugaaucaauagaag

SEQ ID NO: 16465 - RNA, 19 nt, artificial
  Chemically synthesized
uacuaacugcucucagaga

SEQ ID NO: 16466 - RNA, 19 nt, artificial
  Chemically synthesized
uacuggguacauuuuauca

SEQ ID NO: 16467 - RNA, 19 nt, artificial
  Chemically synthesized
uuaggaauugcucuuguca

SEQ ID NO: 16468 - RNA, 19 nt, artificial
  Chemically synthesized
aucaguguauguuaguaca

SEQ ID NO: 16469 - RNA, 19 nt, artificial
  Chemically synthesized
aauaguccaccaaaaggca

SEQ ID NO: 16470 - RNA, 19 nt, artificial
  Chemically synthesized
uguaaucaguguauguuag

SEQ ID NO: 16471 - RNA, 19 nt, artificial
  Chemically synthesized
augcauuuuacuggcucaa

SEQ ID NO: 16472 - RNA, 19 nt, artificial
  Chemically synthesized
uacuacuauccuacguuua

SEQ ID NO: 16473 - RNA, 19 nt, artificial
  Chemically synthesized
gugacugacaucaacucca

SEQ ID NO: 16474 - RNA, 19 nt, artificial
  Chemically synthesized
cguccaaaaguguuaaugc

SEQ ID NO: 16475 - RNA, 19 nt, artificial
  Chemically synthesized
guucgaaagaaugguguca

SEQ ID NO: 16476 - RNA, 19 nt, artificial
  Chemically synthesized
cuuggaaggccugcaucau

SEQ ID NO: 16477 - RNA, 19 nt, artificial
  Chemically synthesized
gaaaguucaacugcuucgu

SEQ ID NO: 16478 - RNA, 19 nt, artificial
  Chemically synthesized
augugaacauggaaucauc

SEQ ID NO: 16479 - RNA, 19 nt, artificial
  Chemically synthesized
aucuuuguacucuugcaga

SEQ ID NO: 16480 - RNA, 19 nt, artificial
  Chemically synthesized
uguuaaugcccaagugacu

SEQ ID NO: 16481 - RNA, 19 nt, artificial
  Chemically synthesized
cuggaaccaccuaaagaac

SEQ ID NO: 16482 - RNA, 19 nt, artificial
  Chemically synthesized
augaacccauguuugcaau

SEQ ID NO: 16483 - RNA, 19 nt, artificial
  Chemically synthesized
uuuuacuggcucaaaacua

SEQ ID NO: 16484 - RNA, 19 nt, artificial
  Chemically synthesized
gacaucaacuccaagggau

SEQ ID NO: 16485 - RNA, 19 nt, artificial
  Chemically synthesized
uuugagcaggagaguauua

SEQ ID NO: 16486 - RNA, 19 nt, artificial
  Chemically synthesized
ucccauguaaaaccugcua

SEQ ID NO: 16487 - RNA, 19 nt, artificial
  Chemically synthesized
acaaacuucaucaagagua

SEQ ID NO: 16488 - RNA, 19 nt, artificial
  Chemically synthesized
cggaggauugcucaacaac

SEQ ID NO: 16489 - RNA, 19 nt, artificial
  Chemically synthesized
aucaguuacugaacaggca

SEQ ID NO: 16490 - RNA, 19 nt, artificial
  Chemically synthesized
aauugaggaagacuguuac

SEQ ID NO: 16491 - RNA, 19 nt, artificial
  Chemically synthesized
ccaccaaaaggcaagacug

SEQ ID NO: 16492 - RNA, 19 nt, artificial
  Chemically synthesized
uugcuagauuaucguccaa

SEQ ID NO: 16493 - RNA, 19 nt, artificial
  Chemically synthesized
cucagaacuuggaaggccu

SEQ ID NO: 16494 - RNA, 19 nt, artificial
  Chemically synthesized
gcucaucuuaauggccuaa

SEQ ID NO: 16495 - RNA, 19 nt, artificial
  Chemically synthesized
agaguauuacuagagcuuu

SEQ ID NO: 16496 - RNA, 19 nt, artificial
  Chemically synthesized
cugcaucaugauggccaau

SEQ ID NO: 16497 - RNA, 19 nt, artificial
  Chemically synthesized
aagaauggugucaaugaag

SEQ ID NO: 16498 - RNA, 19 nt, artificial
  Chemically synthesized
cuuuguucgaaagaauggu

SEQ ID NO: 16499 - RNA, 19 nt, artificial
  Chemically synthesized
ucugguucuuacgucuguu

SEQ ID NO: 16500 - RNA, 19 nt, artificial
  Chemically synthesized
agagaaaauucagacuauc

SEQ ID NO: 16501 - RNA, 19 nt, artificial
  Chemically synthesized
gaaauaucaguuacugaac

SEQ ID NO: 16502 - RNA, 19 nt, artificial
  Chemically synthesized
cuacuucuuucucaggcau

SEQ ID NO: 16503 - RNA, 19 nt, artificial
  Chemically synthesized
caaguuaaaggcuuuguuc

SEQ ID NO: 16504 - RNA, 19 nt, artificial
  Chemically synthesized
guuuacgagugacuuggcu

SEQ ID NO: 16505 - RNA, 19 nt, artificial
  Chemically synthesized
gaaaacaaacuucaucaag

SEQ ID NO: 16506 - RNA, 19 nt, artificial
  Chemically synthesized
uagaaauucuagccugguu

SEQ ID NO: 16507 - RNA, 19 nt, artificial
  Chemically synthesized
ggaguguaugcagaggaug

SEQ ID NO: 16508 - RNA, 19 nt, artificial
  Chemically synthesized
cacagguguucaaagacgc

SEQ ID NO: 16509 - RNA, 19 nt, artificial
  Chemically synthesized
gauucuguaguaugaaugu

SEQ ID NO: 16510 - RNA, 19 nt, artificial
  Chemically synthesized
gucccauguaaaaccugcu

SEQ ID NO: 16511 - RNA, 19 nt, artificial
  Chemically synthesized
ggaggauugcucaacaacc

SEQ ID NO: 16512 - RNA, 19 nt, artificial
  Chemically synthesized
cuuugccaccucuccauuu

SEQ ID NO: 16513 - RNA, 19 nt, artificial
  Chemically synthesized
augcccaagugacugacau

SEQ ID NO: 16514 - RNA, 19 nt, artificial
  Chemically synthesized
guaaucaguguauguuagu

SEQ ID NO: 16515 - RNA, 19 nt, artificial
  Chemically synthesized
auuuugagcaggagaguau

SEQ ID NO: 16516 - RNA, 19 nt, artificial
  Chemically synthesized
uaucauuuauuagcgcuga

SEQ ID NO: 16517 - RNA, 19 nt, artificial
  Chemically synthesized
uuuuggugauauuuccaug

SEQ ID NO: 16518 - RNA, 19 nt, artificial
  Chemically synthesized
uuuacaugggacauuauug

SEQ ID NO: 16519 - RNA, 19 nt, artificial
  Chemically synthesized
uauaauuccaaacacaagg

SEQ ID NO: 16520 - RNA, 19 nt, artificial
  Chemically synthesized
uuuggugauauuuccaugu

SEQ ID NO: 16521 - RNA, 19 nt, artificial
  Chemically synthesized
uuggccaucaugaugcagg

SEQ ID NO: 16522 - RNA, 19 nt, artificial
  Chemically synthesized
ucuaguaauacucuccugc

SEQ ID NO: 16523 - RNA, 19 nt, artificial
  Chemically synthesized
aaagaaguagguaguuuug

SEQ ID NO: 16524 - RNA, 19 nt, artificial
  Chemically synthesized
uugcacuugguguugcugg

SEQ ID NO: 16525 - RNA, 19 nt, artificial
  Chemically synthesized
uuuugagccaguaaaaugc

SEQ ID NO: 16526 - RNA, 19 nt, artificial
  Chemically synthesized
uuaguaucuccaaaccagg

SEQ ID NO: 16527 - RNA, 19 nt, artificial
  Chemically synthesized
uuguuuuucacucuagacc

SEQ ID NO: 16528 - RNA, 19 nt, artificial
  Chemically synthesized
uuuuggacgauaaucuagc

SEQ ID NO: 16529 - RNA, 19 nt, artificial
  Chemically synthesized
auuaagaugagcaccaagg

SEQ ID NO: 16530 - RNA, 19 nt, artificial
  Chemically synthesized
uuggacauugucauucuug

SEQ ID NO: 16531 - RNA, 19 nt, artificial
  Chemically synthesized
uuuugguggacuauuaagu

SEQ ID NO: 16532 - RNA, 19 nt, artificial
  Chemically synthesized
uugggcauuaacacuuuug

SEQ ID NO: 16533 - RNA, 19 nt, artificial
  Chemically synthesized
agaaguagguaguuuugag

SEQ ID NO: 16534 - RNA, 19 nt, artificial
  Chemically synthesized
ucuuugauugcaaacaugg

SEQ ID NO: 16535 - RNA, 19 nt, artificial
  Chemically synthesized
ugugcaaaggucuuugagg

SEQ ID NO: 16536 - RNA, 19 nt, artificial
  Chemically synthesized
uucuuuaggugguuccagg

SEQ ID NO: 16537 - RNA, 19 nt, artificial
  Chemically synthesized
aagaaguagguaguuuuga

SEQ ID NO: 16538 - RNA, 19 nt, artificial
  Chemically synthesized
aucuauuuuggcuucauug

SEQ ID NO: 16539 - RNA, 19 nt, artificial
  Chemically synthesized
uuuggcuucauugacacca

SEQ ID NO: 16540 - RNA, 19 nt, artificial
  Chemically synthesized
uucugagucacuaguaaug

SEQ ID NO: 16541 - RNA, 19 nt, artificial
  Chemically synthesized
uugaucucaucuauuuugg

SEQ ID NO: 16542 - RNA, 19 nt, artificial
  Chemically synthesized
uuuguacuaacauacacug

SEQ ID NO: 16543 - RNA, 19 nt, artificial
  Chemically synthesized
uuugauugcaaacaugggu

SEQ ID NO: 16544 - RNA, 19 nt, artificial
  Chemically synthesized
uuuuaaacauccuuggagg

SEQ ID NO: 16545 - RNA, 19 nt, artificial
  Chemically synthesized
uuuuucacucuagaccaag

SEQ ID NO: 16546 - RNA, 19 nt, artificial
  Chemically synthesized
uuccucuuugcacuuggug

SEQ ID NO: 16547 - RNA, 19 nt, artificial
  Chemically synthesized
auagucugaauuuucucug

SEQ ID NO: 16548 - RNA, 19 nt, artificial
  Chemically synthesized
uugaacuuucuguucugcu

SEQ ID NO: 16549 - RNA, 19 nt, artificial
  Chemically synthesized
uuuucacucuagaccaagc

SEQ ID NO: 16550 - RNA, 19 nt, artificial
  Chemically synthesized
uugcuauguauaagcugcc

SEQ ID NO: 16551 - RNA, 19 nt, artificial
  Chemically synthesized
uaaaccgcuucccucacuc

SEQ ID NO: 16552 - RNA, 19 nt, artificial
  Chemically synthesized
uuuaaacguaggauaguag

SEQ ID NO: 16553 - RNA, 19 nt, artificial
  Chemically synthesized
ucauccucugcauacacuc

SEQ ID NO: 16554 - RNA, 19 nt, artificial
  Chemically synthesized
auauguuggcucuucagcg

SEQ ID NO: 16555 - RNA, 19 nt, artificial
  Chemically synthesized
aucaugaugcaggccuucc

SEQ ID NO: 16556 - RNA, 19 nt, artificial
  Chemically synthesized
uugcauauacucagaacug

SEQ ID NO: 16557 - RNA, 19 nt, artificial
  Chemically synthesized
ucuuucauccucugcauac

SEQ ID NO: 16558 - RNA, 19 nt, artificial
  Chemically synthesized
uugaugccaauuacgaagc

SEQ ID NO: 16559 - RNA, 19 nt, artificial
  Chemically synthesized
uuucacucuagaccaagcu

SEQ ID NO: 16560 - RNA, 19 nt, artificial
  Chemically synthesized
uuucauccucugcauacac

SEQ ID NO: 16561 - RNA, 19 nt, artificial
  Chemically synthesized
ugcaagaguacaaagauug

SEQ ID NO: 16562 - RNA, 19 nt, artificial
  Chemically synthesized
auucuuucgaacaaagccu

SEQ ID NO: 16563 - RNA, 19 nt, artificial
  Chemically synthesized
uuucucugagagcaguuag

SEQ ID NO: 16564 - RNA, 19 nt, artificial
  Chemically synthesized
uuuagaggcaaaguggccu

SEQ ID NO: 16565 - RNA, 19 nt, artificial
  Chemically synthesized
auccucugcauacacuccu

SEQ ID NO: 16566 - RNA, 19 nt, artificial
  Chemically synthesized
cuuuccaugaaguugaugc

SEQ ID NO: 16567 - RNA, 19 nt, artificial
  Chemically synthesized
auguccuugaggaugauag

SEQ ID NO: 16568 - RNA, 19 nt, artificial
  Chemically synthesized
uugauugcaaacauggguu

SEQ ID NO: 16569 - RNA, 19 nt, artificial
  Chemically synthesized
auugcuauguauaagcugc

SEQ ID NO: 16570 - RNA, 19 nt, artificial
  Chemically synthesized
ucagagguaauuuagaggc

SEQ ID NO: 16571 - RNA, 19 nt, artificial
  Chemically synthesized
auuuggguacuuagcaugc

SEQ ID NO: 16572 - RNA, 19 nt, artificial
  Chemically synthesized
uucuguucugcugugucuu

SEQ ID NO: 16573 - RNA, 19 nt, artificial
  Chemically synthesized
auccagaugaugauuuuac

SEQ ID NO: 16574 - RNA, 19 nt, artificial
  Chemically synthesized
ugggcauuaacacuuuugg

SEQ ID NO: 16575 - RNA, 19 nt, artificial
  Chemically synthesized
ucuucagcgcuaauaaaug

SEQ ID NO: 16576 - RNA, 19 nt, artificial
  Chemically synthesized
uuucagcaaaaggucauag

SEQ ID NO: 16577 - RNA, 19 nt, artificial
  Chemically synthesized
uuguuguuuuucacucuag

SEQ ID NO: 16578 - RNA, 19 nt, artificial
  Chemically synthesized
uugguguugcuggugagug

SEQ ID NO: 16579 - RNA, 19 nt, artificial
  Chemically synthesized
auggaaguucuuuaggugg

SEQ ID NO: 16580 - RNA, 19 nt, artificial
  Chemically synthesized
uuguuuucccaacuagauu

SEQ ID NO: 16581 - RNA, 19 nt, artificial
  Chemically synthesized
uuugcacuugguguugcug

SEQ ID NO: 16582 - RNA, 19 nt, artificial
  Chemically synthesized
ugauucagcaacuuggccu

SEQ ID NO: 16583 - RNA, 19 nt, artificial
  Chemically synthesized
acuaauugcauauacucag

SEQ ID NO: 16584 - RNA, 19 nt, artificial
  Chemically synthesized
uucugagucucaacuguag

SEQ ID NO: 16585 - RNA, 19 nt, artificial
  Chemically synthesized
uuuguuuucccaacuagau

SEQ ID NO: 16586 - RNA, 19 nt, artificial
  Chemically synthesized
uuuuggcuucauugacacc

SEQ ID NO: 16587 - RNA, 19 nt, artificial
  Chemically synthesized
ucguaaaccgcuucccuca

SEQ ID NO: 16588 - RNA, 19 nt, artificial
  Chemically synthesized
uucaugacaugucacaaag

SEQ ID NO: 16589 - RNA, 19 nt, artificial
  Chemically synthesized
uaguaucuccaaaccaggc

SEQ ID NO: 16590 - RNA, 19 nt, artificial
  Chemically synthesized
aucagagguaauuuagagg

SEQ ID NO: 16591 - RNA, 19 nt, artificial
  Chemically synthesized
uuuugaugccugagaaaga

SEQ ID NO: 16592 - RNA, 19 nt, artificial
  Chemically synthesized
uuacgaagcaguugaacuu

SEQ ID NO: 16593 - RNA, 19 nt, artificial
  Chemically synthesized
uagcuucuucuauugauuc

SEQ ID NO: 16594 - RNA, 19 nt, artificial
  Chemically synthesized
uuguugagcaauccuccga

SEQ ID NO: 16595 - RNA, 19 nt, artificial
  Chemically synthesized
uuccucaauuccaaucccu

SEQ ID NO: 16596 - RNA, 19 nt, artificial
  Chemically synthesized
ucugcuucaguuuauaacu

SEQ ID NO: 16597 - RNA, 19 nt, artificial
  Chemically synthesized
uugaugaaguuuguuuucc

SEQ ID NO: 16598 - RNA, 19 nt, artificial
  Chemically synthesized
auuccuugaugauuccaug

SEQ ID NO: 16599 - RNA, 19 nt, artificial
  Chemically synthesized
uguagcagguuuuacaugg

SEQ ID NO: 16600 - RNA, 19 nt, artificial
  Chemically synthesized
uccuaaauccagaugauga

SEQ ID NO: 16601 - RNA, 19 nt, artificial
  Chemically synthesized
uuagcaugccacugcauuu

SEQ ID NO: 16602 - RNA, 19 nt, artificial
  Chemically synthesized
ugcugugucuuggacauug

SEQ ID NO: 16603 - RNA, 19 nt, artificial
  Chemically synthesized
uuccuugaugauuccaugu

SEQ ID NO: 16604 - RNA, 19 nt, artificial
  Chemically synthesized
auugcauauacucagaacu

SEQ ID NO: 16605 - RNA, 19 nt, artificial
  Chemically synthesized
uucauccucugcauacacu

SEQ ID NO: 16606 - RNA, 19 nt, artificial
  Chemically synthesized
uaaauggaaguucuuuagg

SEQ ID NO: 16607 - RNA, 19 nt, artificial
  Chemically synthesized
aaguagguaguuuugagcc

SEQ ID NO: 16608 - RNA, 19 nt, artificial
  Chemically synthesized
auaaacugugcaaaggucu

SEQ ID NO: 16609 - RNA, 19 nt, artificial
  Chemically synthesized
ugaugaaguuuguuuuccc

SEQ ID NO: 16610 - RNA, 19 nt, artificial
  Chemically synthesized
auugauucagcaacuuggc

SEQ ID NO: 16611 - RNA, 19 nt, artificial
  Chemically synthesized
uuaaacguaggauaguagu

SEQ ID NO: 16612 - RNA, 19 nt, artificial
  Chemically synthesized
uuaagaugagcaccaaggc

SEQ ID NO: 16613 - RNA, 19 nt, artificial
  Chemically synthesized
ucuuaaucuuucauccucu

SEQ ID NO: 16614 - RNA, 19 nt, artificial
  Chemically synthesized
ucugaauuuucucugcaag

SEQ ID NO: 16615 - RNA, 19 nt, artificial
  Chemically synthesized
auuacgaagcaguugaacu

SEQ ID NO: 16616 - RNA, 19 nt, artificial
  Chemically synthesized
uaaaucuuagaaacuuggg

SEQ ID NO: 16617 - RNA, 19 nt, artificial
  Chemically synthesized
ucaaugugucauacgcuuc

SEQ ID NO: 16618 - RNA, 19 nt, artificial
  Chemically synthesized
ugauagucugaauuuucuc

SEQ ID NO: 16619 - RNA, 19 nt, artificial
  Chemically synthesized
ucuaagggcagucuugccu

SEQ ID NO: 16620 - RNA, 19 nt, artificial
  Chemically synthesized
uugucauucuugaucucau

SEQ ID NO: 16621 - RNA, 19 nt, artificial
  Chemically synthesized
ucacaaagcuacuuucucu

SEQ ID NO: 16622 - RNA, 19 nt, artificial
  Chemically synthesized
acugcauuuacucuugaug

SEQ ID NO: 16623 - RNA, 19 nt, artificial
  Chemically synthesized
uuuaggugguuccagguau

SEQ ID NO: 16624 - RNA, 19 nt, artificial
  Chemically synthesized
uaggauaguaguaaggaga

SEQ ID NO: 16625 - RNA, 19 nt, artificial
  Chemically synthesized
uaaacauccuuggaggcag

SEQ ID NO: 16626 - RNA, 19 nt, artificial
  Chemically synthesized
auaagcugccauuuguagc

SEQ ID NO: 16627 - RNA, 19 nt, artificial
  Chemically synthesized
uuugaauuuucugagucac

SEQ ID NO: 16628 - RNA, 19 nt, artificial
  Chemically synthesized
auuggcuuuuuugagaucu

SEQ ID NO: 16629 - RNA, 19 nt, artificial
  Chemically synthesized
aguggugauauauuuacuc

SEQ ID NO: 16630 - RNA, 19 nt, artificial
  Chemically synthesized
acuaguaauguccuugagg

SEQ ID NO: 16631 - RNA, 19 nt, artificial
  Chemically synthesized
ugagaaagaaguagguagu

SEQ ID NO: 16632 - RNA, 19 nt, artificial
  Chemically synthesized
uacccaguaaaaaaccaag

SEQ ID NO: 16633 - RNA, 19 nt, artificial
  Chemically synthesized
uucuaagggcagucuugcc

SEQ ID NO: 16634 - RNA, 19 nt, artificial
  Chemically synthesized
uuaggugguuccagguauc

SEQ ID NO: 16635 - RNA, 19 nt, artificial
  Chemically synthesized
ucugcauacacuccuauuu

SEQ ID NO: 16636 - RNA, 19 nt, artificial
  Chemically synthesized
uucugcugugucuuggaca

SEQ ID NO: 16637 - RNA, 19 nt, artificial
  Chemically synthesized
uuugguggacuauuaagua

SEQ ID NO: 16638 - RNA, 19 nt, artificial
  Chemically synthesized
uugaauuuucugagucacu

SEQ ID NO: 16639 - RNA, 19 nt, artificial
  Chemically synthesized
uaguaauacucuccugcuc

SEQ ID NO: 16640 - RNA, 19 nt, artificial
  Chemically synthesized
ugacuuagugucaugacuc

SEQ ID NO: 16641 - RNA, 19 nt, artificial
  Chemically synthesized
ugucauacgcuucuuucuu

SEQ ID NO: 16642 - RNA, 19 nt, artificial
  Chemically synthesized
cuuagugucaugacuccag

SEQ ID NO: 16643 - RNA, 19 nt, artificial
  Chemically synthesized
aacugugcaaaggucuuug

SEQ ID NO: 16644 - RNA, 19 nt, artificial
  Chemically synthesized
auacgcuucuuucuuucca

SEQ ID NO: 16645 - RNA, 19 nt, artificial
  Chemically synthesized
uucuuucgaacaaagccuu

SEQ ID NO: 16646 - RNA, 19 nt, artificial
  Chemically synthesized
auuuguagcagguuuuaca

SEQ ID NO: 16647 - RNA, 19 nt, artificial
  Chemically synthesized
uugaacaccugugugucac

SEQ ID NO: 16648 - RNA, 19 nt, artificial
  Chemically synthesized
uccucaauuccaaucccuu

SEQ ID NO: 16649 - RNA, 19 nt, artificial
  Chemically synthesized
uagguaguuuugagccagu

SEQ ID NO: 16650 - RNA, 19 nt, artificial
  Chemically synthesized
uguuuucccaacuagauuu

SEQ ID NO: 16651 - RNA, 19 nt, artificial
  Chemically synthesized
ucuguucugcugugucuug

SEQ ID NO: 16652 - RNA, 19 nt, artificial
  Chemically synthesized
uucugcacucaaauacaua

SEQ ID NO: 16653 - RNA, 19 nt, artificial
  Chemically synthesized
ucacaguuuacauuuacag

SEQ ID NO: 16654 - RNA, 19 nt, artificial
  Chemically synthesized
ucacucuugcgcgagauca

SEQ ID NO: 16655 - RNA, 19 nt, artificial
  Chemically synthesized
uuucucugcaagaguacaa

SEQ ID NO: 16656 - RNA, 19 nt, artificial
  Chemically synthesized
uuucugagucacuaguaau

SEQ ID NO: 16657 - RNA, 19 nt, artificial
  Chemically synthesized
uugagcaauccuccgaagu

SEQ ID NO: 16658 - RNA, 19 nt, artificial
  Chemically synthesized
ucgaacaaagccuuuaacu

SEQ ID NO: 16659 - RNA, 19 nt, artificial
  Chemically synthesized
uucgaacaaagccuuuaac

SEQ ID NO: 16660 - RNA, 19 nt, artificial
  Chemically synthesized
uuggauuucauuucugaag

SEQ ID NO: 16661 - RNA, 19 nt, artificial
  Chemically synthesized
auguauaagcugccauuug

SEQ ID NO: 16662 - RNA, 19 nt, artificial
  Chemically synthesized
uuccaugaaguugaugcca

SEQ ID NO: 16663 - RNA, 19 nt, artificial
  Chemically synthesized
uuagaggcaaaguggccug

SEQ ID NO: 16664 - RNA, 19 nt, artificial
  Chemically synthesized
augcccagcaugguuguug

SEQ ID NO: 16665 - RNA, 19 nt, artificial
  Chemically synthesized
uuucgaacaaagccuuuaa

SEQ ID NO: 16666 - RNA, 19 nt, artificial
  Chemically synthesized
ugauuuuaccauugcuaug

SEQ ID NO: 16667 - RNA, 19 nt, artificial
  Chemically synthesized
uugaggaugauagucugaa

SEQ ID NO: 16668 - RNA, 19 nt, artificial
  Chemically synthesized
uugauucagcaacuuggcc

SEQ ID NO: 16669 - RNA, 19 nt, artificial
  Chemically synthesized
aucucaucuauuuuggcuu

SEQ ID NO: 16670 - RNA, 19 nt, artificial
  Chemically synthesized
uaucagagguaauuuagag

SEQ ID NO: 16671 - RNA, 19 nt, artificial
  Chemically synthesized
uauuuuggcuucauugaca

SEQ ID NO: 16672 - RNA, 19 nt, artificial
  Chemically synthesized
auuuuggcuucauugacac

SEQ ID NO: 16673 - RNA, 19 nt, artificial
  Chemically synthesized
accugugugucacucuugc

SEQ ID NO: 16674 - RNA, 19 nt, artificial
  Chemically synthesized
agcucuaguaauacucucc

SEQ ID NO: 16675 - RNA, 19 nt, artificial
  Chemically synthesized
cuuggaggcagaaucauga

SEQ ID NO: 16676 - RNA, 19 nt, artificial
  Chemically synthesized
aucauauguuagaugccag

SEQ ID NO: 16677 - RNA, 19 nt, artificial
  Chemically synthesized
aucuuaaucuuucauccuc

SEQ ID NO: 16678 - RNA, 19 nt, artificial
  Chemically synthesized
uuuaaacauccuuggaggc

SEQ ID NO: 16679 - RNA, 19 nt, artificial
  Chemically synthesized
uugaugccugagaaagaag

SEQ ID NO: 16680 - RNA, 19 nt, artificial
  Chemically synthesized
auugucauucuugaucuca

SEQ ID NO: 16681 - RNA, 19 nt, artificial
  Chemically synthesized
ugacaugucacaaagcuac

SEQ ID NO: 16682 - RNA, 19 nt, artificial
  Chemically synthesized
aaggucuuugagguagagc

SEQ ID NO: 16683 - RNA, 19 nt, artificial
  Chemically synthesized
uacucuccugcucaaaaug

SEQ ID NO: 16684 - RNA, 19 nt, artificial
  Chemically synthesized
caugacuccagcaauagug

SEQ ID NO: 16685 - RNA, 19 nt, artificial
  Chemically synthesized
aguaauacucuccugcuca

SEQ ID NO: 16686 - RNA, 19 nt, artificial
  Chemically synthesized
uuuggguacuuagcaugcc

SEQ ID NO: 16687 - RNA, 19 nt, artificial
  Chemically synthesized
auacucagaacugaauuug

SEQ ID NO: 16688 - RNA, 19 nt, artificial
  Chemically synthesized
uauggcagaauuggccauc

SEQ ID NO: 16689 - RNA, 19 nt, artificial
  Chemically synthesized
aagagcaauuccuaaaucc

SEQ ID NO: 16690 - RNA, 19 nt, artificial
  Chemically synthesized
uuccuaaauccagaugaug

SEQ ID NO: 16691 - RNA, 19 nt, artificial
  Chemically synthesized
ugugucuuggacauuguca

SEQ ID NO: 16692 - RNA, 19 nt, artificial
  Chemically synthesized
uguuguuuuucacucuaga

SEQ ID NO: 16693 - RNA, 19 nt, artificial
  Chemically synthesized
augacuccagcaauagugg

SEQ ID NO: 16694 - RNA, 19 nt, artificial
  Chemically synthesized
auguacccaguaaaaaacc

SEQ ID NO: 16695 - RNA, 19 nt, artificial
  Chemically synthesized
ucacuugggcauuaacacu

SEQ ID NO: 16696 - RNA, 19 nt, artificial
  Chemically synthesized
gucacuaguaauguccuug

SEQ ID NO: 16697 - RNA, 19 nt, artificial
  Chemically synthesized
uuaaacauccuuggaggca

SEQ ID NO: 16698 - RNA, 19 nt, artificial
  Chemically synthesized
aucagagacgagcucacga

SEQ ID NO: 16699 - RNA, 19 nt, artificial
  Chemically synthesized
uuccaaucccuuggaguug

SEQ ID NO: 16700 - RNA, 19 nt, artificial
  Chemically synthesized
auaaucuagcaacagacgu

SEQ ID NO: 16701 - RNA, 19 nt, artificial
  Chemically synthesized
guugaugccaauuacgaag

SEQ ID NO: 16702 - RNA, 19 nt, artificial
  Chemically synthesized
uccagaugaugauuuuacc

SEQ ID NO: 16703 - RNA, 19 nt, artificial
  Chemically synthesized
acuaucuucacaguuuaca

SEQ ID NO: 16704 - RNA, 19 nt, artificial
  Chemically synthesized
uuuucucugcaagaguaca

SEQ ID NO: 16705 - RNA, 19 nt, artificial
  Chemically synthesized
uuacagccagcuauuaaga

SEQ ID NO: 16706 - RNA, 19 nt, artificial
  Chemically synthesized
ucugagucacuaguaaugu

SEQ ID NO: 16707 - RNA, 19 nt, artificial
  Chemically synthesized
cuguucugcugugucuugg

SEQ ID NO: 16708 - RNA, 19 nt, artificial
  Chemically synthesized
uccuugaggaugauagucu

SEQ ID NO: 16709 - RNA, 19 nt, artificial
  Chemically synthesized
auuuuaaacauccuuggag

SEQ ID NO: 16710 - RNA, 19 nt, artificial
  Chemically synthesized
uucagcgcuaauaaaugau

SEQ ID NO: 16711 - RNA, 19 nt, artificial
  Chemically synthesized
uagucugaauuuucucugc

SEQ ID NO: 16712 - RNA, 19 nt, artificial
  Chemically synthesized
augacaccaauaaacugug

SEQ ID NO: 16713 - RNA, 19 nt, artificial
  Chemically synthesized
acacuuuuggacgauaauc

SEQ ID NO: 16714 - RNA, 19 nt, artificial
  Chemically synthesized
uuugagguagagccuuauu

SEQ ID NO: 16715 - RNA, 19 nt, artificial
  Chemically synthesized
uugcuggugagugugcauu

SEQ ID NO: 16716 - RNA, 19 nt, artificial
  Chemically synthesized
uccuccgaagugaaagagc

SEQ ID NO: 16717 - RNA, 19 nt, artificial
  Chemically synthesized
uuggguacuuagcaugcca

SEQ ID NO: 16718 - RNA, 19 nt, artificial
  Chemically synthesized
uccgaagugaaagagcuuc

SEQ ID NO: 16719 - RNA, 19 nt, artificial
  Chemically synthesized
ugauauuuccauguuuggg

SEQ ID NO: 16720 - RNA, 19 nt, artificial
  Chemically synthesized
aacagucuuccucaauucc

SEQ ID NO: 16721 - RNA, 19 nt, artificial
  Chemically synthesized
ugaugauuccauguucaca

SEQ ID NO: 16722 - RNA, 19 nt, artificial
  Chemically synthesized
acuguaguaacagucuucc

SEQ ID NO: 16723 - RNA, 19 nt, artificial
  Chemically synthesized
aagaguacaaagauuggcu

SEQ ID NO: 16724 - RNA, 19 nt, artificial
  Chemically synthesized
ucugcacucaaauacauau

SEQ ID NO: 16725 - RNA, 19 nt, artificial
  Chemically synthesized
aucucuagaauuaucagag

SEQ ID NO: 16726 - RNA, 19 nt, artificial
  Chemically synthesized
uugcaaacauggguucaug

SEQ ID NO: 16727 - RNA, 19 nt, artificial
  Chemically synthesized
uguggauagacauuuguac

SEQ ID NO: 16728 - RNA, 19 nt, artificial
  Chemically synthesized
acucuccugcucaaaaugc

SEQ ID NO: 16729 - RNA, 19 nt, artificial
  Chemically synthesized
acagucuuccucaauucca

SEQ ID NO: 16730 - RNA, 19 nt, artificial
  Chemically synthesized
aaagccuuuaacuugacuu

SEQ ID NO: 16731 - RNA, 19 nt, artificial
  Chemically synthesized
uaggccauuaagaugagca

SEQ ID NO: 16732 - RNA, 19 nt, artificial
  Chemically synthesized
ugguggacuauuaaguauu

SEQ ID NO: 16733 - RNA, 19 nt, artificial
  Chemically synthesized
aaaaggucauagcuucuuc

SEQ ID NO: 16734 - RNA, 19 nt, artificial
  Chemically synthesized
acacuaauugcauauacuc

SEQ ID NO: 16735 - RNA, 19 nt, artificial
  Chemically synthesized
uggguacuuagcaugccac

SEQ ID NO: 16736 - RNA, 19 nt, artificial
  Chemically synthesized
uaccauugcuauguauaag

SEQ ID NO: 16737 - RNA, 19 nt, artificial
  Chemically synthesized
uucucugagagcaguuagu

SEQ ID NO: 16738 - RNA, 19 nt, artificial
  Chemically synthesized
cuuucuguucugcuguguc

SEQ ID NO: 16739 - RNA, 19 nt, artificial
  Chemically synthesized
uucacucuagaccaagcuu

SEQ ID NO: 16740 - RNA, 19 nt, artificial
  Chemically synthesized
uauuucagcaaaaggucau

SEQ ID NO: 16741 - RNA, 19 nt, artificial
  Chemically synthesized
cucaauuccaaucccuugg

SEQ ID NO: 16742 - RNA, 19 nt, artificial
  Chemically synthesized
caaagcucuaguaauacuc

SEQ ID NO: 16743 - RNA, 19 nt, artificial
  Chemically synthesized
auaguaguaaggagaaucu

SEQ ID NO: 16744 - RNA, 19 nt, artificial
  Chemically synthesized
uuccaaguucugagucuca

SEQ ID NO: 16745 - RNA, 19 nt, artificial
  Chemically synthesized
aauuuagaggcaaaguggc

SEQ ID NO: 16746 - RNA, 19 nt, artificial
  Chemically synthesized
uugaugucagucacuuggg

SEQ ID NO: 16747 - RNA, 19 nt, artificial
  Chemically synthesized
agcaacagacguaagaacc

SEQ ID NO: 16748 - RNA, 19 nt, artificial
  Chemically synthesized
cucagaguuauaaacaaag

SEQ ID NO: 16749 - RNA, 19 nt, artificial
  Chemically synthesized
uugacuuagugucaugacu

SEQ ID NO: 16750 - RNA, 19 nt, artificial
  Chemically synthesized
aaugauaaaauguacccag

SEQ ID NO: 16751 - RNA, 19 nt, artificial
  Chemically synthesized
ucuuugcacuugguguugc

SEQ ID NO: 16752 - RNA, 19 nt, artificial
  Chemically synthesized
uguuuuucacucuagacca

SEQ ID NO: 16753 - RNA, 19 nt, artificial
  Chemically synthesized
aaucccuuggaguugaugu

SEQ ID NO: 16754 - RNA, 19 nt, artificial
  Chemically synthesized
ugucacaaagcuacuuucu

SEQ ID NO: 16755 - RNA, 19 nt, artificial
  Chemically synthesized
agauuuuaaacauccuugg

SEQ ID NO: 16756 - RNA, 19 nt, artificial
  Chemically synthesized
cauucuuucgaacaaagcc

SEQ ID NO: 16757 - RNA, 19 nt, artificial
  Chemically synthesized
uuaacuugacuuaguguca

SEQ ID NO: 16758 - RNA, 19 nt, artificial
  Chemically synthesized
uagaugccagagcauaauc

SEQ ID NO: 16759 - RNA, 19 nt, artificial
  Chemically synthesized
aaagauuggcuuuuuugag

SEQ ID NO: 16760 - RNA, 19 nt, artificial
  Chemically synthesized
auaugacaccaauaaacug

SEQ ID NO: 16761 - RNA, 19 nt, artificial
  Chemically synthesized
aggucuuugagguagagcc

SEQ ID NO: 16762 - RNA, 19 nt, artificial
  Chemically synthesized
uuggaggcagaaucaugag

SEQ ID NO: 16763 - RNA, 19 nt, artificial
  Chemically synthesized
aucuuugauugcaaacaug

SEQ ID NO: 16764 - RNA, 19 nt, artificial
  Chemically synthesized
uuggcuuuuuugagaucuu

SEQ ID NO: 16765 - RNA, 19 nt, artificial
  Chemically synthesized
ucuuuaggugguuccaggu

SEQ ID NO: 16766 - RNA, 19 nt, artificial
  Chemically synthesized
uuuguagcagguuuuacau

SEQ ID NO: 16767 - RNA, 19 nt, artificial
  Chemically synthesized
augcuuuugaugccugaga

SEQ ID NO: 16768 - RNA, 19 nt, artificial
  Chemically synthesized
ucuuggacauugucauucu

SEQ ID NO: 16769 - RNA, 19 nt, artificial
  Chemically synthesized
agaaucauauguuagaugc

SEQ ID NO: 16770 - RNA, 19 nt, artificial
  Chemically synthesized
augguuguugagcaauccu

SEQ ID NO: 16771 - RNA, 19 nt, artificial
  Chemically synthesized
uccucuuugcacuuggugu

SEQ ID NO: 16772 - RNA, 19 nt, artificial
  Chemically synthesized
ugagccaguaaaaugcaua

SEQ ID NO: 16773 - RNA, 19 nt, artificial
  Chemically synthesized
ugauauuucagcaaaaggu

SEQ ID NO: 16774 - RNA, 19 nt, artificial
  Chemically synthesized
ugcauacacuccuauuugg

SEQ ID NO: 16775 - RNA, 19 nt, artificial
  Chemically synthesized
gugcauuccuugaugauuc

SEQ ID NO: 16776 - RNA, 19 nt, artificial
  Chemically synthesized
ucuauuuuggcuucauuga

SEQ ID NO: 16777 - RNA, 19 nt, artificial
  Chemically synthesized
auuuacagccagcuauuaa

SEQ ID NO: 16778 - RNA, 19 nt, artificial
  Chemically synthesized
auuauugaacauuuucggg

SEQ ID NO: 16779 - RNA, 19 nt, artificial
  Chemically synthesized
uuguagcagguuuuacaug

SEQ ID NO: 16780 - RNA, 19 nt, artificial
  Chemically synthesized
ugaacuuucuguucugcug

SEQ ID NO: 16781 - RNA, 19 nt, artificial
  Chemically synthesized
cucaaaaugcuuuugaugc

SEQ ID NO: 16782 - RNA, 19 nt, artificial
  Chemically synthesized
aaguucugagucucaacug

SEQ ID NO: 16783 - RNA, 19 nt, artificial
  Chemically synthesized
aauuuucugagucacuagu

SEQ ID NO: 16784 - RNA, 19 nt, artificial
  Chemically synthesized
acucguaaaccgcuucccu

SEQ ID NO: 16785 - RNA, 19 nt, artificial
  Chemically synthesized
guuaguaucuccaaaccag

SEQ ID NO: 16786 - RNA, 19 nt, artificial
  Chemically synthesized
aaauaugaucuucucagag

SEQ ID NO: 16787 - RNA, 19 nt, artificial
  Chemically synthesized
uuuucugagucacuaguaa

SEQ ID NO: 16788 - RNA, 19 nt, artificial
  Chemically synthesized
uaucuccaaaccaggcuag

SEQ ID NO: 16789 - RNA, 19 nt, artificial
  Chemically synthesized
agagcaguuaguaucucca

SEQ ID NO: 16790 - RNA, 19 nt, artificial
  Chemically synthesized
augaugauuuuaccauugc

SEQ ID NO: 16791 - RNA, 19 nt, artificial
  Chemically synthesized
cacaaagcuacuuucucug

SEQ ID NO: 16792 - RNA, 19 nt, artificial
  Chemically synthesized
aauguacccaguaaaaaac

SEQ ID NO: 16793 - RNA, 19 nt, artificial
  Chemically synthesized
ugccacugcauuuacucuu

SEQ ID NO: 16794 - RNA, 19 nt, artificial
  Chemically synthesized
cugcauacacuccuauuug

SEQ ID NO: 16795 - RNA, 19 nt, artificial
  Chemically synthesized
agaagcgucuuugaacacc

SEQ ID NO: 16796 - RNA, 19 nt, artificial
  Chemically synthesized
ugccugagaaagaaguagg

SEQ ID NO: 16797 - RNA, 19 nt, artificial
  Chemically synthesized
ugugcauuccuugaugauu

SEQ ID NO: 16798 - RNA, 19 nt, artificial
  Chemically synthesized
uccagguaucugcuucagu

SEQ ID NO: 16799 - RNA, 19 nt, artificial
  Chemically synthesized
ucaguaacugauauuucag

SEQ ID NO: 16800 - RNA, 19 nt, artificial
  Chemically synthesized
uaaucuagcaacagacgua

SEQ ID NO: 16801 - RNA, 19 nt, artificial
  Chemically synthesized
uugaugauuccauguucac

SEQ ID NO: 16802 - RNA, 19 nt, artificial
  Chemically synthesized
uacgcuucuuucuuuccau

SEQ ID NO: 16803 - RNA, 19 nt, artificial
  Chemically synthesized
uuagaugccagagcauaau

SEQ ID NO: 16804 - RNA, 19 nt, artificial
  Chemically synthesized
aauggaaguucuuuaggug

SEQ ID NO: 16805 - RNA, 19 nt, artificial
  Chemically synthesized
augaaguuuguuuucccaa

SEQ ID NO: 16806 - RNA, 19 nt, artificial
  Chemically synthesized
ucaacuguaguaacagucu

SEQ ID NO: 16807 - RNA, 19 nt, artificial
  Chemically synthesized
uuugaugccugagaaagaa

SEQ ID NO: 16808 - RNA, 19 nt, artificial
  Chemically synthesized
auuuagaggcaaaguggcc

SEQ ID NO: 16809 - RNA, 19 nt, artificial
  Chemically synthesized
uaaacugugcaaaggucuu

SEQ ID NO: 16810 - RNA, 19 nt, artificial
  Chemically synthesized
aucaaugugucauacgcuu

SEQ ID NO: 16811 - RNA, 19 nt, artificial
  Chemically synthesized
ucuuuccaugaaguugaug

SEQ ID NO: 16812 - RNA, 19 nt, artificial
  Chemically synthesized
cauccuuggaggcagaauc

SEQ ID NO: 16813 - RNA, 19 nt, artificial
  Chemically synthesized
auggagagguggcaaagcu

SEQ ID NO: 16814 - RNA, 19 nt, artificial
  Chemically synthesized
guagguaguuuugagccag

SEQ ID NO: 16815 - RNA, 19 nt, artificial
  Chemically synthesized
guaauuuagaggcaaagug

SEQ ID NO: 16816 - RNA, 19 nt, artificial
  Chemically synthesized
auguuggcucuucagcgcu

SEQ ID NO: 16817 - RNA, 19 nt, artificial
  Chemically synthesized
cugagaaagaaguagguag

SEQ ID NO: 16818 - RNA, 19 nt, artificial
  Chemically synthesized
cuuuugaugccugagaaag

SEQ ID NO: 16819 - RNA, 19 nt, artificial
  Chemically synthesized
acccaguaaaaaaccaagc

SEQ ID NO: 16820 - RNA, 19 nt, artificial
  Chemically synthesized
auuuucugagucacuagua

SEQ ID NO: 16821 - RNA, 19 nt, artificial
  Chemically synthesized
aauggagagguggcaaagc

SEQ ID NO: 16822 - RNA, 19 nt, artificial
  Chemically synthesized
augacaagagcaauuccua

SEQ ID NO: 16823 - RNA, 19 nt, artificial
  Chemically synthesized
ucuccugcucaaaaugcuu

SEQ ID NO: 16824 - RNA, 19 nt, artificial
  Chemically synthesized
agccuuauuuaaauucugc

SEQ ID NO: 16825 - RNA, 19 nt, artificial
  Chemically synthesized
gaaagaaguagguaguuuu

SEQ ID NO: 16826 - RNA, 19 nt, artificial
  Chemically synthesized
ucucaucuauuuuggcuuc

SEQ ID NO: 16827 - RNA, 19 nt, artificial
  Chemically synthesized
auuuucucugcaagaguac

SEQ ID NO: 16828 - RNA, 19 nt, artificial
  Chemically synthesized
uccuugaugauuccauguu

SEQ ID NO: 16829 - RNA, 19 nt, artificial
  Chemically synthesized
ugaauuuucugagucacua

SEQ ID NO: 16830 - RNA, 19 nt, artificial
  Chemically synthesized
uggacauugucauucuuga

SEQ ID NO: 16831 - RNA, 19 nt, artificial
  Chemically synthesized
agcaauaguggugauauau

SEQ ID NO: 16832 - RNA, 19 nt, artificial
  Chemically synthesized
ugggacauuauugaacauu

SEQ ID NO: 16833 - RNA, 19 nt, artificial
  Chemically synthesized
uuccagguaucugcuucag

SEQ ID NO: 16834 - RNA, 19 nt, artificial
  Chemically synthesized
uuagccuguggauagacau

SEQ ID NO: 16835 - RNA, 19 nt, artificial
  Chemically synthesized
ugaaguuuguuuucccaac

SEQ ID NO: 16836 - RNA, 19 nt, artificial
  Chemically synthesized
uuaacacuuuuggacgaua

SEQ ID NO: 16837 - RNA, 19 nt, artificial
  Chemically synthesized
cugugcaaaggucuuugag

SEQ ID NO: 16838 - RNA, 19 nt, artificial
  Chemically synthesized
agaauuucuaagggcaguc

SEQ ID NO: 16839 - RNA, 19 nt, artificial
  Chemically synthesized
aguauuuacagccagcuau

SEQ ID NO: 16840 - RNA, 19 nt, artificial
  Chemically synthesized
uggacgauaaucuagcaac

SEQ ID NO: 16841 - RNA, 19 nt, artificial
  Chemically synthesized
cuuuucaaacacuaauugc

SEQ ID NO: 16842 - RNA, 19 nt, artificial
  Chemically synthesized
aagcucuaguaauacucuc

SEQ ID NO: 16843 - RNA, 19 nt, artificial
  Chemically synthesized
ugcuggugagugugcauuc

SEQ ID NO: 16844 - RNA, 19 nt, artificial
  Chemically synthesized
uguugagcaauccuccgaa

SEQ ID NO: 16845 - RNA, 19 nt, artificial
  Chemically synthesized
cuuugauugcaaacauggg

SEQ ID NO: 16846 - RNA, 19 nt, artificial
  Chemically synthesized
accauugcuauguauaagc

SEQ ID NO: 16847 - RNA, 19 nt, artificial
  Chemically synthesized
cacuuuuggacgauaaucu

SEQ ID NO: 16848 - RNA, 19 nt, artificial
  Chemically synthesized
uacacuccuauuuggguac

SEQ ID NO: 16849 - RNA, 19 nt, artificial
  Chemically synthesized
guaguaacagucuuccuca

SEQ ID NO: 16850 - RNA, 19 nt, artificial
  Chemically synthesized
gacauuuguacuaacauac

SEQ ID NO: 16851 - RNA, 19 nt, artificial
  Chemically synthesized
auaugaucuucucagaguu

SEQ ID NO: 16852 - RNA, 19 nt, artificial
  Chemically synthesized
uucuuucuuuccaugaagu

SEQ ID NO: 16853 - RNA, 19 nt, artificial
  Chemically synthesized
cucaacuguaguaacaguc

SEQ ID NO: 16854 - RNA, 19 nt, artificial
  Chemically synthesized
ccucaauuccaaucccuug

SEQ ID NO: 16855 - RNA, 19 nt, artificial
  Chemically synthesized
augucacaaagcuacuuuc

SEQ ID NO: 16856 - RNA, 19 nt, artificial
  Chemically synthesized
uagugucaugacuccagca

SEQ ID NO: 16857 - RNA, 19 nt, artificial
  Chemically synthesized
uauguuagaugccagagca

SEQ ID NO: 16858 - RNA, 19 nt, artificial
  Chemically synthesized
uagcaugccacugcauuua

SEQ ID NO: 16859 - RNA, 19 nt, artificial
  Chemically synthesized
aaaaccaagcaguauuuac

SEQ ID NO: 16860 - RNA, 19 nt, artificial
  Chemically synthesized
acuuagugucaugacucca

SEQ ID NO: 16861 - RNA, 19 nt, artificial
  Chemically synthesized
agcaaaaggucauagcuuc

SEQ ID NO: 16862 - RNA, 19 nt, artificial
  Chemically synthesized
uugguggacuauuaaguau

SEQ ID NO: 16863 - RNA, 19 nt, artificial
  Chemically synthesized
gaauuggccaucaugaugc

SEQ ID NO: 16864 - RNA, 19 nt, artificial
  Chemically synthesized
ucccaacuagauuuuaaac

SEQ ID NO: 16865 - RNA, 19 nt, artificial
  Chemically synthesized
guuuguuuucccaacuaga

SEQ ID NO: 16866 - RNA, 19 nt, artificial
  Chemically synthesized
uacgaagcaguugaacuuu

SEQ ID NO: 16867 - RNA, 19 nt, artificial
  Chemically synthesized
ugcacucaaauacauauac

SEQ ID NO: 16868 - RNA, 19 nt, artificial
  Chemically synthesized
ugaucucaucuauuuuggc

SEQ ID NO: 16869 - RNA, 19 nt, artificial
  Chemically synthesized
cugaaguuugaauuuucug

SEQ ID NO: 16870 - RNA, 19 nt, artificial
  Chemically synthesized
ucaugacaugucacaaagc

SEQ ID NO: 16871 - RNA, 19 nt, artificial
  Chemically synthesized
gauaguaguaaggagaauc

SEQ ID NO: 16872 - RNA, 19 nt, artificial
  Chemically synthesized
ucuauugauucauagagug

SEQ ID NO: 16873 - RNA, 19 nt, artificial
  Chemically synthesized
auauuucagcaaaagguca

SEQ ID NO: 16874 - RNA, 19 nt, artificial
  Chemically synthesized
acaaagauuggcuuuuuug

SEQ ID NO: 16875 - RNA, 19 nt, artificial
  Chemically synthesized
acagacguaagaaccagag

SEQ ID NO: 16876 - RNA, 19 nt, artificial
  Chemically synthesized
cuuggaguugaugucaguc

SEQ ID NO: 16877 - RNA, 19 nt, artificial
  Chemically synthesized
uccaaguucugagucucaa

SEQ ID NO: 16878 - RNA, 19 nt, artificial
  Chemically synthesized
uaagcugccauuuguagca

SEQ ID NO: 16879 - RNA, 19 nt, artificial
  Chemically synthesized
aagaaccagagguaggagg

SEQ ID NO: 16880 - RNA, 19 nt, artificial
  Chemically synthesized
cuuuugguggacuauuaag

SEQ ID NO: 16881 - RNA, 19 nt, artificial
  Chemically synthesized
aguaucuccaaaccaggcu

SEQ ID NO: 16882 - RNA, 19 nt, artificial
  Chemically synthesized
aacaaagccuuuaacuuga

SEQ ID NO: 16883 - RNA, 19 nt, artificial
  Chemically synthesized
aaucauauguuagaugcca

SEQ ID NO: 16884 - RNA, 19 nt, artificial
  Chemically synthesized
uagaccaagcuuuggauuu

SEQ ID NO: 16885 - RNA, 19 nt, artificial
  Chemically synthesized
aaccaagcaguauuuacag

SEQ ID NO: 16886 - RNA, 19 nt, artificial
  Chemically synthesized
gucuuccucaauuccaauc

SEQ ID NO: 16887 - RNA, 19 nt, artificial
  Chemically synthesized
uacaaauauguuggcucuu

SEQ ID NO: 16888 - RNA, 19 nt, artificial
  Chemically synthesized
ucaaaaugcuuuugaugcc

SEQ ID NO: 16889 - RNA, 19 nt, artificial
  Chemically synthesized
ucaucuuugauugcaaaca

SEQ ID NO: 16890 - RNA, 19 nt, artificial
  Chemically synthesized
ucaugacuccagcaauagu

SEQ ID NO: 16891 - RNA, 19 nt, artificial
  Chemically synthesized
uaggugguuccagguaucu

SEQ ID NO: 16892 - RNA, 19 nt, artificial
  Chemically synthesized
ucuuugaacaccugugugu

SEQ ID NO: 16893 - RNA, 19 nt, artificial
  Chemically synthesized
uccugcucaaaaugcuuuu

SEQ ID NO: 16894 - RNA, 19 nt, artificial
  Chemically synthesized
augccaauuacgaagcagu

SEQ ID NO: 16895 - RNA, 19 nt, artificial
  Chemically synthesized
uaacacuuuuggacgauaa

SEQ ID NO: 16896 - RNA, 19 nt, artificial
  Chemically synthesized
ugaugcaggccuuccaagu

SEQ ID NO: 16897 - RNA, 19 nt, artificial
  Chemically synthesized
uuugagccaguaaaaugca

SEQ ID NO: 16898 - RNA, 19 nt, artificial
  Chemically synthesized
cuuagcaugccacugcauu

SEQ ID NO: 16899 - RNA, 19 nt, artificial
  Chemically synthesized
ucugagucucaacuguagu

SEQ ID NO: 16900 - RNA, 19 nt, artificial
  Chemically synthesized
uucucugcaagaguacaaa

SEQ ID NO: 16901 - RNA, 19 nt, artificial
  Chemically synthesized
ucuuucgaacaaagccuuu

SEQ ID NO: 16902 - RNA, 19 nt, artificial
  Chemically synthesized
uuugaacaccuguguguca

SEQ ID NO: 16903 - RNA, 19 nt, artificial
  Chemically synthesized
uguucugcugugucuugga

SEQ ID NO: 16904 - RNA, 19 nt, artificial
  Chemically synthesized
augugucauacgcuucuuu

SEQ ID NO: 16905 - RNA, 19 nt, artificial
  Chemically synthesized
aauucugcacucaaauaca

SEQ ID NO: 16906 - RNA, 19 nt, artificial
  Chemically synthesized
uacucagaacugaauuugu

SEQ ID NO: 16907 - RNA, 19 nt, artificial
  Chemically synthesized
cauuaggccauuaagauga

SEQ ID NO: 16908 - RNA, 19 nt, artificial
  Chemically synthesized
cuucucagaguuauaaaca

SEQ ID NO: 16909 - RNA, 19 nt, artificial
  Chemically synthesized
caagucacucguaaaccgc

SEQ ID NO: 16910 - RNA, 19 nt, artificial
  Chemically synthesized
ugucaugacuccagcaaua

SEQ ID NO: 16911 - RNA, 19 nt, artificial
  Chemically synthesized
ugcauuaggccauuaagau

SEQ ID NO: 16912 - RNA, 19 nt, artificial
  Chemically synthesized
aaaaugcuuuugaugccug

SEQ ID NO: 16913 - RNA, 19 nt, artificial
  Chemically synthesized
aagucacucguaaaccgcu

SEQ ID NO: 16914 - RNA, 19 nt, artificial
  Chemically synthesized
agaauuggccaucaugaug

SEQ ID NO: 16915 - RNA, 19 nt, artificial
  Chemically synthesized
agcgucuuugaacaccugu

SEQ ID NO: 16916 - RNA, 19 nt, artificial
  Chemically synthesized
acgcuucuuucuuuccaug

SEQ ID NO: 16917 - RNA, 19 nt, artificial
  Chemically synthesized
ugagcaauccuccgaagug

SEQ ID NO: 16918 - RNA, 19 nt, artificial
  Chemically synthesized
gugcaaaggucuuugaggu

SEQ ID NO: 16919 - RNA, 19 nt, artificial
  Chemically synthesized
aucaucuuugauugcaaac

SEQ ID NO: 16920 - RNA, 19 nt, artificial
  Chemically synthesized
aauaaacugugcaaagguc

SEQ ID NO: 16921 - RNA, 19 nt, artificial
  Chemically synthesized
gucacaaagcuacuuucuc

SEQ ID NO: 16922 - RNA, 19 nt, artificial
  Chemically synthesized
augaucuucucagaguuau

SEQ ID NO: 16923 - RNA, 19 nt, artificial
  Chemically synthesized
uccaaaccaggcuagaauu

SEQ ID NO: 16924 - RNA, 19 nt, artificial
  Chemically synthesized
ccuuggaggcagaaucaug

SEQ ID NO: 16925 - RNA, 19 nt, artificial
  Chemically synthesized
aaaccaggcuagaauuucu

SEQ ID NO: 16926 - RNA, 19 nt, artificial
  Chemically synthesized
ugaugccugagaaagaagu

SEQ ID NO: 16927 - RNA, 19 nt, artificial
  Chemically synthesized
aaugcuuuugaugccugag

SEQ ID NO: 16928 - RNA, 19 nt, artificial
  Chemically synthesized
ucauagcuucuucuauuga

SEQ ID NO: 16929 - RNA, 19 nt, artificial
  Chemically synthesized
aguuuguuuucccaacuag

SEQ ID NO: 16930 - RNA, 19 nt, artificial
  Chemically synthesized
aguaguaaggagaaucuua

SEQ ID NO: 16931 - RNA, 19 nt, artificial
  Chemically synthesized
uaugaucuucucagaguua

SEQ ID NO: 16932 - RNA, 19 nt, artificial
  Chemically synthesized
uccaugaaguugaugccaa

SEQ ID NO: 16933 - RNA, 19 nt, artificial
  Chemically synthesized
ccaagcaguauuuacagcc

SEQ ID NO: 16934 - RNA, 19 nt, artificial
  Chemically synthesized
aacuguaguaacagucuuc

SEQ ID NO: 16935 - RNA, 19 nt, artificial
  Chemically synthesized
aauaugaucuucucagagu

SEQ ID NO: 16936 - RNA, 19 nt, artificial
  Chemically synthesized
acauugucauucuugaucu

SEQ ID NO: 16937 - RNA, 19 nt, artificial
  Chemically synthesized
ucagaacugaauuuguugu

SEQ ID NO: 16938 - RNA, 19 nt, artificial
  Chemically synthesized
augaaguugaugccaauua

SEQ ID NO: 16939 - RNA, 19 nt, artificial
  Chemically synthesized
caagcuuuggauuucauuu

SEQ ID NO: 16940 - RNA, 19 nt, artificial
  Chemically synthesized
aauuucuaagggcagucuu

SEQ ID NO: 16941 - RNA, 19 nt, artificial
  Chemically synthesized
caaguucugagucucaacu

SEQ ID NO: 16942 - RNA, 19 nt, artificial
  Chemically synthesized
auaauuccaaacacaaggg

SEQ ID NO: 16943 - RNA, 19 nt, artificial
  Chemically synthesized
acguaggauaguaguaagg

SEQ ID NO: 16944 - RNA, 19 nt, artificial
  Chemically synthesized
uggcuuuuuugagaucuuu

SEQ ID NO: 16945 - RNA, 19 nt, artificial
  Chemically synthesized
ugagucucaacuguaguaa

SEQ ID NO: 16946 - RNA, 19 nt, artificial
  Chemically synthesized
guuguuuuucacucuagac

SEQ ID NO: 16947 - RNA, 19 nt, artificial
  Chemically synthesized
agaaagaaguagguaguuu

SEQ ID NO: 16948 - RNA, 19 nt, artificial
  Chemically synthesized
agcaauuccuaaauccaga

SEQ ID NO: 16949 - RNA, 19 nt, artificial
  Chemically synthesized
cuugaugauuccauguuca

SEQ ID NO: 16950 - RNA, 19 nt, artificial
  Chemically synthesized
agacgagcucacgaaaagc

SEQ ID NO: 16951 - RNA, 19 nt, artificial
  Chemically synthesized
aagcaguugaacuuucugu

SEQ ID NO: 16952 - RNA, 19 nt, artificial
  Chemically synthesized
cagccagcuauuaagaauc

SEQ ID NO: 16953 - RNA, 19 nt, artificial
  Chemically synthesized
aguuaguaucuccaaacca

SEQ ID NO: 16954 - RNA, 19 nt, artificial
  Chemically synthesized
uggaaguucuuuagguggu

SEQ ID NO: 16955 - RNA, 19 nt, artificial
  Chemically synthesized
ucuagcaacagacguaaga

SEQ ID NO: 16956 - RNA, 19 nt, artificial
  Chemically synthesized
ugccagagcauaaucuuaa

SEQ ID NO: 16957 - RNA, 19 nt, artificial
  Chemically synthesized
gucuuggacauugucauuc

SEQ ID NO: 16958 - RNA, 19 nt, artificial
  Chemically synthesized
aagauuggcuuuuuugaga

SEQ ID NO: 16959 - RNA, 19 nt, artificial
  Chemically synthesized
cacuugggcauuaacacuu

SEQ ID NO: 16960 - RNA, 19 nt, artificial
  Chemically synthesized
cuaguaauacucuccugcu

SEQ ID NO: 16961 - RNA, 19 nt, artificial
  Chemically synthesized
cuacagaaucauauguuag

SEQ ID NO: 16962 - RNA, 19 nt, artificial
  Chemically synthesized
uuguacuaacauacacuga

SEQ ID NO: 16963 - RNA, 19 nt, artificial
  Chemically synthesized
ugcaaaggucuuugaggua

SEQ ID NO: 16964 - RNA, 19 nt, artificial
  Chemically synthesized
cuucuauugauucauagag

SEQ ID NO: 16965 - RNA, 19 nt, artificial
  Chemically synthesized
ucucugagagcaguuagua

SEQ ID NO: 16966 - RNA, 19 nt, artificial
  Chemically synthesized
ugauaaaauguacccagua

SEQ ID NO: 16967 - RNA, 19 nt, artificial
  Chemically synthesized
ugacaagagcaauuccuaa

SEQ ID NO: 16968 - RNA, 19 nt, artificial
  Chemically synthesized
uguacuaacauacacugau

SEQ ID NO: 16969 - RNA, 19 nt, artificial
  Chemically synthesized
ugccuuuugguggacuauu

SEQ ID NO: 16970 - RNA, 19 nt, artificial
  Chemically synthesized
cuaacauacacugauuaca

SEQ ID NO: 16971 - RNA, 19 nt, artificial
  Chemically synthesized
uugagccaguaaaaugcau

SEQ ID NO: 16972 - RNA, 19 nt, artificial
  Chemically synthesized
uaaacguaggauaguagua

SEQ ID NO: 16973 - RNA, 19 nt, artificial
  Chemically synthesized
uggaguugaugucagucac

SEQ ID NO: 16974 - RNA, 19 nt, artificial
  Chemically synthesized
gcauuaacacuuuuggacg

SEQ ID NO: 16975 - RNA, 19 nt, artificial
  Chemically synthesized
ugacaccauucuuucgaac

SEQ ID NO: 16976 - RNA, 19 nt, artificial
  Chemically synthesized
augaugcaggccuuccaag

SEQ ID NO: 16977 - RNA, 19 nt, artificial
  Chemically synthesized
acgaagcaguugaacuuuc

SEQ ID NO: 16978 - RNA, 19 nt, artificial
  Chemically synthesized
gaugauuccauguucacau

SEQ ID NO: 16979 - RNA, 19 nt, artificial
  Chemically synthesized
ucugcaagaguacaaagau

SEQ ID NO: 16980 - RNA, 19 nt, artificial
  Chemically synthesized
agucacuugggcauuaaca

SEQ ID NO: 16981 - RNA, 19 nt, artificial
  Chemically synthesized
guucuuuaggugguuccag

SEQ ID NO: 16982 - RNA, 19 nt, artificial
  Chemically synthesized
auugcaaacauggguucau

SEQ ID NO: 16983 - RNA, 19 nt, artificial
  Chemically synthesized
uaguuuugagccaguaaaa

SEQ ID NO: 16984 - RNA, 19 nt, artificial
  Chemically synthesized
aucccuuggaguugauguc

SEQ ID NO: 16985 - RNA, 19 nt, artificial
  Chemically synthesized
uaauacucuccugcucaaa

SEQ ID NO: 16986 - RNA, 19 nt, artificial
  Chemically synthesized
uagcagguuuuacauggga

SEQ ID NO: 16987 - RNA, 19 nt, artificial
  Chemically synthesized
uacucuugaugaaguuugu

SEQ ID NO: 16988 - RNA, 19 nt, artificial
  Chemically synthesized
guuguugagcaauccuccg

SEQ ID NO: 16989 - RNA, 19 nt, artificial
  Chemically synthesized
ugccuguucaguaacugau

SEQ ID NO: 16990 - RNA, 19 nt, artificial
  Chemically synthesized
guaacagucuuccucaauu

SEQ ID NO: 16991 - RNA, 19 nt, artificial
  Chemically synthesized
cagucuugccuuuuggugg

SEQ ID NO: 16992 - RNA, 19 nt, artificial
  Chemically synthesized
uuggacgauaaucuagcaa

SEQ ID NO: 16993 - RNA, 19 nt, artificial
  Chemically synthesized
aggccuuccaaguucugag

SEQ ID NO: 16994 - RNA, 19 nt, artificial
  Chemically synthesized
uuaggccauuaagaugagc

SEQ ID NO: 16995 - RNA, 19 nt, artificial
  Chemically synthesized
aaagcucuaguaauacucu

SEQ ID NO: 16996 - RNA, 19 nt, artificial
  Chemically synthesized
auuggccaucaugaugcag

SEQ ID NO: 16997 - RNA, 19 nt, artificial
  Chemically synthesized
cuucauugacaccauucuu

SEQ ID NO: 16998 - RNA, 19 nt, artificial
  Chemically synthesized
accauucuuucgaacaaag

SEQ ID NO: 16999 - RNA, 19 nt, artificial
  Chemically synthesized
aacagacguaagaaccaga

SEQ ID NO: 17000 - RNA, 19 nt, artificial
  Chemically synthesized
gauagucugaauuuucucu

SEQ ID NO: 17001 - RNA, 19 nt, artificial
  Chemically synthesized
guucaguaacugauauuuc

SEQ ID NO: 17002 - RNA, 19 nt, artificial
  Chemically synthesized
augccugagaaagaaguag

SEQ ID NO: 17003 - RNA, 19 nt, artificial
  Chemically synthesized
gaacaaagccuuuaacuug

SEQ ID NO: 17004 - RNA, 19 nt, artificial
  Chemically synthesized
agccaagucacucguaaac

SEQ ID NO: 17005 - RNA, 19 nt, artificial
  Chemically synthesized
cuugaugaaguuuguuuuc

SEQ ID NO: 17006 - RNA, 19 nt, artificial
  Chemically synthesized
aaccaggcuagaauuucua

SEQ ID NO: 17007 - RNA, 19 nt, artificial
  Chemically synthesized
cauccucugcauacacucc

SEQ ID NO: 17008 - RNA, 19 nt, artificial
  Chemically synthesized
gcgucuuugaacaccugug

SEQ ID NO: 17009 - RNA, 19 nt, artificial
  Chemically synthesized
acauucauacuacagaauc

SEQ ID NO: 17010 - RNA, 19 nt, artificial
  Chemically synthesized
agcagguuuuacaugggac

SEQ ID NO: 17011 - RNA, 19 nt, artificial
  Chemically synthesized
gguuguugagcaauccucc

SEQ ID NO: 17012 - RNA, 19 nt, artificial
  Chemically synthesized
aaauggagagguggcaaag

SEQ ID NO: 17013 - RNA, 19 nt, artificial
  Chemically synthesized
augucagucacuugggcau

SEQ ID NO: 17014 - RNA, 19 nt, artificial
  Chemically synthesized
acuaacauacacugauuac

SEQ ID NO: 17015 - RNA, 19 nt, artificial
  Chemically synthesized
auacucuccugcucaaaau

SEQ ID NO: 17016 - RNA, 19 nt, artificial
  Chemically synthesized
ucagcgcuaauaaaugaua

SEQ ID NO: 17017 - RNA, 21 nt, artificial
  Chemically synthesized
ggcucaaaacuaccuacuucu

SEQ ID NO: 17018 - RNA, 21 nt, artificial
  Chemically synthesized
gcucaaaacuaccuacuucuu

SEQ ID NO: 17019 - RNA, 21 nt, artificial
  Chemically synthesized
ccaagacacagcagaacagaa

SEQ ID NO: 17020 - RNA, 21 nt, artificial
  Chemically synthesized
ccauguaaaaccugcuacaaa

SEQ ID NO: 17021 - RNA, 21 nt, artificial
  Chemically synthesized
cucaaaacuaccuacuucuuu

SEQ ID NO: 17022 - RNA, 21 nt, artificial
  Chemically synthesized
ccaaaauagaugagaucaaga

SEQ ID NO: 17023 - RNA, 21 nt, artificial
  Chemically synthesized
caaaacuaccuacuucuuucu

SEQ ID NO: 17024 - RNA, 21 nt, artificial
  Chemically synthesized
ggaggauugcucaacaaccau

SEQ ID NO: 17025 - RNA, 21 nt, artificial
  Chemically synthesized
gaaaguucaacugcuucguaa

SEQ ID NO: 17026 - RNA, 21 nt, artificial
  Chemically synthesized
caaagaccuuugcacaguuua

SEQ ID NO: 17027 - RNA, 21 nt, artificial
  Chemically synthesized
aguuaaaggcuuuguucgaaa

SEQ ID NO: 17028 - RNA, 21 nt, artificial
  Chemically synthesized
gaacauggaaucaucaaggaa

SEQ ID NO: 17029 - RNA, 21 nt, artificial
  Chemically synthesized
gaacccauguuugcaaucaaa

SEQ ID NO: 17030 - RNA, 21 nt, artificial
  Chemically synthesized
ggacauuacuagugacucaga

SEQ ID NO: 17031 - RNA, 21 nt, artificial
  Chemically synthesized
gaguguaugcagaggaugaaa

SEQ ID NO: 17032 - RNA, 21 nt, artificial
  Chemically synthesized
cuuuguacucuugcagagaaa

SEQ ID NO: 17033 - RNA, 21 nt, artificial
  Chemically synthesized
cagagaaaauucagacuauca

SEQ ID NO: 17034 - RNA, 21 nt, artificial
  Chemically synthesized
guaaaugcaguggcaugcuaa

SEQ ID NO: 17035 - RNA, 21 nt, artificial
  Chemically synthesized
gccucuaaauuaccucugaua

SEQ ID NO: 17036 - RNA, 21 nt, artificial
  Chemically synthesized
gcaucaacuucauggaaagaa

SEQ ID NO: 17037 - RNA, 21 nt, artificial
  Chemically synthesized
caagacacagcagaacagaaa

SEQ ID NO: 17038 - RNA, 21 nt, artificial
  Chemically synthesized
gcaggccacuuugccucuaaa

SEQ ID NO: 17039 - RNA, 21 nt, artificial
  Chemically synthesized
acauuacuagugacucagaaa

SEQ ID NO: 17040 - RNA, 21 nt, artificial
  Chemically synthesized
gaaagaaagaagcguaugaca

SEQ ID NO: 17041 - RNA, 21 nt, artificial
  Chemically synthesized
cuaugaccuuuugcugaaaua

SEQ ID NO: 17042 - RNA, 21 nt, artificial
  Chemically synthesized
caaugaagccaaaauagauga

SEQ ID NO: 17043 - RNA, 21 nt, artificial
  Chemically synthesized
cgaaagaauggugucaaugaa

SEQ ID NO: 17044 - RNA, 21 nt, artificial
  Chemically synthesized
gcacaguuuauuggugucaua

SEQ ID NO: 17045 - RNA, 21 nt, artificial
  Chemically synthesized
gagugacacacagguguucaa

SEQ ID NO: 17046 - RNA, 21 nt, artificial
  Chemically synthesized
aaagcuuggucuagagugaaa

SEQ ID NO: 17047 - RNA, 21 nt, artificial
  Chemically synthesized
cuucggaggauugcucaacaa

SEQ ID NO: 17048 - RNA, 21 nt, artificial
  Chemically synthesized
caaagcuuggucuagagugaa

SEQ ID NO: 17049 - RNA, 21 nt, artificial
  Chemically synthesized
gguuuuuuacuggguacauuu

SEQ ID NO: 17050 - RNA, 21 nt, artificial
  Chemically synthesized
ggaguguaugcagaggaugaa

SEQ ID NO: 17051 - RNA, 21 nt, artificial
  Chemically synthesized
caagggauuggaauugaggaa

SEQ ID NO: 17052 - RNA, 21 nt, artificial
  Chemically synthesized
agauuaugcucuggcaucuaa

SEQ ID NO: 17053 - RNA, 21 nt, artificial
  Chemically synthesized
caagaaugacaauguccaaga

SEQ ID NO: 17054 - RNA, 21 nt, artificial
  Chemically synthesized
cccuuguguuuggaauuauaa

SEQ ID NO: 17055 - RNA, 21 nt, artificial
  Chemically synthesized
gcuggagucaugacacuaagu

SEQ ID NO: 17056 - RNA, 21 nt, artificial
  Chemically synthesized
acagcagaacagaaaguucaa

SEQ ID NO: 17057 - RNA, 21 nt, artificial
  Chemically synthesized
cuucuuucucaggcaucaaaa

SEQ ID NO: 17058 - RNA, 21 nt, artificial
  Chemically synthesized
agccaaaauagaugagaucaa

SEQ ID NO: 17059 - RNA, 21 nt, artificial
  Chemically synthesized
caauguccaagacacagcaga

SEQ ID NO: 17060 - RNA, 21 nt, artificial
  Chemically synthesized
agaugagaucaagaaugacaa

SEQ ID NO: 17061 - RNA, 21 nt, artificial
  Chemically synthesized
gaaagaauggugucaaugaag

SEQ ID NO: 17062 - RNA, 21 nt, artificial
  Chemically synthesized
gcauuuugagcaggagaguau

SEQ ID NO: 17063 - RNA, 21 nt, artificial
  Chemically synthesized
guucaauaaugucccauguaa

SEQ ID NO: 17064 - RNA, 21 nt, artificial
  Chemically synthesized
guggcaugcuaaguacccaaa

SEQ ID NO: 17065 - RNA, 21 nt, artificial
  Chemically synthesized
aguugagacucagaacuugga

SEQ ID NO: 17066 - RNA, 21 nt, artificial
  Chemically synthesized
uaaauaaggcucuaccucaaa

SEQ ID NO: 17067 - RNA, 21 nt, artificial
  Chemically synthesized
ccacuauugcuggagucauga

SEQ ID NO: 17068 - RNA, 21 nt, artificial
  Chemically synthesized
cauuacuagugacucagaaaa

SEQ ID NO: 17069 - RNA, 21 nt, artificial
  Chemically synthesized
ggugcucaucuuaauggccua

SEQ ID NO: 17070 - RNA, 21 nt, artificial
  Chemically synthesized
caaucuuuguacucuugcaga

SEQ ID NO: 17071 - RNA, 21 nt, artificial
  Chemically synthesized
ucuuaauagcuggcuguaaau

SEQ ID NO: 17072 - RNA, 21 nt, artificial
  Chemically synthesized
gaaagaagcguaugacacauu

SEQ ID NO: 17073 - RNA, 21 nt, artificial
  Chemically synthesized
guguaugcagaggaugaaaga

SEQ ID NO: 17074 - RNA, 21 nt, artificial
  Chemically synthesized
uguucaauaaugucccaugua

SEQ ID NO: 17075 - RNA, 21 nt, artificial
  Chemically synthesized
uacuaacugcucucagagaaa

SEQ ID NO: 17076 - RNA, 21 nt, artificial
  Chemically synthesized
aggccaaguugcugaaucaau

SEQ ID NO: 17077 - RNA, 21 nt, artificial
  Chemically synthesized
aggcaagacugcccuuagaaa

SEQ ID NO: 17078 - RNA, 21 nt, artificial
  Chemically synthesized
cauggaaagaaagaagcguau

SEQ ID NO: 17079 - RNA, 21 nt, artificial
  Chemically synthesized
gcuuauacauagcaaugguaa

SEQ ID NO: 17080 - RNA, 21 nt, artificial
  Chemically synthesized
gauuaucguccaaaaguguua

SEQ ID NO: 17081 - RNA, 21 nt, artificial
  Chemically synthesized
gcugaaauaucaguuacugaa

SEQ ID NO: 17082 - RNA, 21 nt, artificial
  Chemically synthesized
aaaugucuauccacaggcuaa

SEQ ID NO: 17083 - RNA, 21 nt, artificial
  Chemically synthesized
ccaaauaggaguguaugcaga

SEQ ID NO: 17084 - RNA, 21 nt, artificial
  Chemically synthesized
caaacauggaaauaucaccaa

SEQ ID NO: 17085 - RNA, 21 nt, artificial
  Chemically synthesized
aucucaugauucugccuccaa

SEQ ID NO: 17086 - RNA, 21 nt, artificial
  Chemically synthesized
uccaaaaguguuaaugcccaa

SEQ ID NO: 17087 - RNA, 21 nt, artificial
  Chemically synthesized
cugccuccaaggauguuuaaa

SEQ ID NO: 17088 - RNA, 21 nt, artificial
  Chemically synthesized
agcuuggucuagagugaaaaa

SEQ ID NO: 17089 - RNA, 21 nt, artificial
  Chemically synthesized
aggaguguaugcagaggauga

SEQ ID NO: 17090 - RNA, 21 nt, artificial
  Chemically synthesized
gagcaggagaguauuacuaga

SEQ ID NO: 17091 - RNA, 21 nt, artificial
  Chemically synthesized
gacauuacuagugacucagaa

SEQ ID NO: 17092 - RNA, 21 nt, artificial
  Chemically synthesized
caggccaaguugcugaaucaa

SEQ ID NO: 17093 - RNA, 21 nt, artificial
  Chemically synthesized
caugacacuaagucaaguuaa

SEQ ID NO: 17094 - RNA, 21 nt, artificial
  Chemically synthesized
ccucuaaauuaccucugauaa

SEQ ID NO: 17095 - RNA, 21 nt, artificial
  Chemically synthesized
caaguuaaaggcuuuguucga

SEQ ID NO: 17096 - RNA, 21 nt, artificial
  Chemically synthesized
ugcugaaauaucaguuacuga

SEQ ID NO: 17097 - RNA, 21 nt, artificial
  Chemically synthesized
agccugguuuggagauacuaa

SEQ ID NO: 17098 - RNA, 21 nt, artificial
  Chemically synthesized
ggucuagagugaaaaacaaca

SEQ ID NO: 17099 - RNA, 21 nt, artificial
  Chemically synthesized
ugucaaugaagccaaaauaga

SEQ ID NO: 17100 - RNA, 21 nt, artificial
  Chemically synthesized
cauuuuugccuuggugcucau

SEQ ID NO: 17101 - RNA, 21 nt, artificial
  Chemically synthesized
aaggcaagacugcccuuagaa

SEQ ID NO: 17102 - RNA, 21 nt, artificial
  Chemically synthesized
gauacuaacugcucucagaga

SEQ ID NO: 17103 - RNA, 21 nt, artificial
  Chemically synthesized
acuucuuucucaggcaucaaa

SEQ ID NO: 17104 - RNA, 21 nt, artificial
  Chemically synthesized
gcaucuaacauaugauucugu

SEQ ID NO: 17105 - RNA, 21 nt, artificial
  Chemically synthesized
cauguaaaaccugcuacaaau

SEQ ID NO: 17106 - RNA, 21 nt, artificial
  Chemically synthesized
gcguaugacacauugauuaaa

SEQ ID NO: 17107 - RNA, 21 nt, artificial
  Chemically synthesized
augugaacauggaaucaucaa

SEQ ID NO: 17108 - RNA, 21 nt, artificial
  Chemically synthesized
aacugaagcagauaccuggaa

SEQ ID NO: 17109 - RNA, 21 nt, artificial
  Chemically synthesized
caaaugucuauccacaggcua

SEQ ID NO: 17110 - RNA, 21 nt, artificial
  Chemically synthesized
ggaaaacaaacuucaucaaga

SEQ ID NO: 17111 - RNA, 21 nt, artificial
  Chemically synthesized
ccuggaaccaccuaaagaacu

SEQ ID NO: 17112 - RNA, 21 nt, artificial
  Chemically synthesized
uuggcaucaacuucauggaaa

SEQ ID NO: 17113 - RNA, 21 nt, artificial
  Chemically synthesized
cuuacuacuauccuacguuua

SEQ ID NO: 17114 - RNA, 21 nt, artificial
  Chemically synthesized
agagaaaguagcuuugugaca

SEQ ID NO: 17115 - RNA, 21 nt, artificial
  Chemically synthesized
augcagaggaugaaagauuaa

SEQ ID NO: 17116 - RNA, 21 nt, artificial
  Chemically synthesized
acaaauggcagcuuauacaua

SEQ ID NO: 17117 - RNA, 21 nt, artificial
  Chemically synthesized
ucaucuuaauggccuaaugca

SEQ ID NO: 17118 - RNA, 21 nt, artificial
  Chemically synthesized
caaauaggaguguaugcagag

SEQ ID NO: 17119 - RNA, 21 nt, artificial
  Chemically synthesized
ucaaaacuaccuacuucuuuc

SEQ ID NO: 17120 - RNA, 21 nt, artificial
  Chemically synthesized
uggaauugaggaagacuguua

SEQ ID NO: 17121 - RNA, 21 nt, artificial
  Chemically synthesized
agcuuugugacaugucaugaa

SEQ ID NO: 17122 - RNA, 21 nt, artificial
  Chemically synthesized
cuagugacucagaaaauucaa

SEQ ID NO: 17123 - RNA, 21 nt, artificial
  Chemically synthesized
caacaccaagugcaaagagga

SEQ ID NO: 17124 - RNA, 21 nt, artificial
  Chemically synthesized
ugaagagccaacauauuugua

SEQ ID NO: 17125 - RNA, 21 nt, artificial
  Chemically synthesized
gguucuuacgucuguugcuag

SEQ ID NO: 17126 - RNA, 21 nt, artificial
  Chemically synthesized
ggaagcgguuuacgagugacu

SEQ ID NO: 17127 - RNA, 21 nt, artificial
  Chemically synthesized
cagauaccuggaaccaccuaa

SEQ ID NO: 17128 - RNA, 21 nt, artificial
  Chemically synthesized
guucgaaagaauggugucaau

SEQ ID NO: 17129 - RNA, 21 nt, artificial
  Chemically synthesized
gaacuuggaaggccugcauca

SEQ ID NO: 17130 - RNA, 21 nt, artificial
  Chemically synthesized
cgcugaagagccaacauauuu

SEQ ID NO: 17131 - RNA, 21 nt, artificial
  Chemically synthesized
aagcuuggucuagagugaaaa

SEQ ID NO: 17132 - RNA, 21 nt, artificial
  Chemically synthesized
gaagcuaugaccuuuugcuga

SEQ ID NO: 17133 - RNA, 21 nt, artificial
  Chemically synthesized
aaacuaccuacuucuuucuca

SEQ ID NO: 17134 - RNA, 21 nt, artificial
  Chemically synthesized
cucaaagaccuuugcacaguu

SEQ ID NO: 17135 - RNA, 21 nt, artificial
  Chemically synthesized
ucugccuccaaggauguuuaa

SEQ ID NO: 17136 - RNA, 21 nt, artificial
  Chemically synthesized
gucuagagugaaaaacaacaa

SEQ ID NO: 17137 - RNA, 21 nt, artificial
  Chemically synthesized
ccagcaacaccaagugcaaag

SEQ ID NO: 17138 - RNA, 21 nt, artificial
  Chemically synthesized
cuuacgucuguugcuagauua

SEQ ID NO: 17139 - RNA, 21 nt, artificial
  Chemically synthesized
ggcucuaccucaaagaccuuu

SEQ ID NO: 17140 - RNA, 21 nt, artificial
  Chemically synthesized
agaacuuccauuuauggagga

SEQ ID NO: 17141 - RNA, 21 nt, artificial
  Chemically synthesized
gcucuggcaucuaacauauga

SEQ ID NO: 17142 - RNA, 21 nt, artificial
  Chemically synthesized
agggauuggaauugaggaaga

SEQ ID NO: 17143 - RNA, 21 nt, artificial
  Chemically synthesized
caccagcaacaccaagugcaa

SEQ ID NO: 17144 - RNA, 21 nt, artificial
  Chemically synthesized
caguucugaguauaugcaauu

SEQ ID NO: 17145 - RNA, 21 nt, artificial
  Chemically synthesized
ccucaaggacauuacuaguga

SEQ ID NO: 17146 - RNA, 21 nt, artificial
  Chemically synthesized
ucgaaagaauggugucaauga

SEQ ID NO: 17147 - RNA, 21 nt, artificial
  Chemically synthesized
cuaucauccucaaggacauua

SEQ ID NO: 17148 - RNA, 21 nt, artificial
  Chemically synthesized
gcuaugaccuuuugcugaaau

SEQ ID NO: 17149 - RNA, 21 nt, artificial
  Chemically synthesized
ucacuucggaggauugcucaa

SEQ ID NO: 17150 - RNA, 21 nt, artificial
  Chemically synthesized
uguuaaugcccaagugacuga

SEQ ID NO: 17151 - RNA, 21 nt, artificial
  Chemically synthesized
guugcuagauuaucguccaaa

SEQ ID NO: 17152 - RNA, 21 nt, artificial
  Chemically synthesized
ggagucaugacacuaagucaa

SEQ ID NO: 17153 - RNA, 21 nt, artificial
  Chemically synthesized
cacaguuuauuggugucauau

SEQ ID NO: 17154 - RNA, 21 nt, artificial
  Chemically synthesized
agauuaucguccaaaaguguu

SEQ ID NO: 17155 - RNA, 21 nt, artificial
  Chemically synthesized
ccaagggauuggaauugagga

SEQ ID NO: 17156 - RNA, 21 nt, artificial
  Chemically synthesized
guaugcauuuuacuggcucaa

SEQ ID NO: 17157 - RNA, 21 nt, artificial
  Chemically synthesized
ugggaaaacaaacuucaucaa

SEQ ID NO: 17158 - RNA, 21 nt, artificial
  Chemically synthesized
aauucagacuaucauccucaa

SEQ ID NO: 17159 - RNA, 21 nt, artificial
  Chemically synthesized
ccaaggauguuuaaaaucuag

SEQ ID NO: 17160 - RNA, 21 nt, artificial
  Chemically synthesized
ccugcuacaaauggcagcuua

SEQ ID NO: 17161 - RNA, 21 nt, artificial
  Chemically synthesized
ccaaguugcugaaucaaugga

SEQ ID NO: 17162 - RNA, 21 nt, artificial
  Chemically synthesized
gaaccaccuaaagaacuucca

SEQ ID NO: 17163 - RNA, 21 nt, artificial
  Chemically synthesized
gggaagcucuuucacuucgga

SEQ ID NO: 17164 - RNA, 21 nt, artificial
  Chemically synthesized
gaugagaucaagaaugacaau

SEQ ID NO: 17165 - RNA, 21 nt, artificial
  Chemically synthesized
uggaaagaaagaagcguauga

SEQ ID NO: 17166 - RNA, 21 nt, artificial
  Chemically synthesized
gagucaugacacuaagucaag

SEQ ID NO: 17167 - RNA, 21 nt, artificial
  Chemically synthesized
gaauggugucaaugaagccaa

SEQ ID NO: 17168 - RNA, 21 nt, artificial
  Chemically synthesized
cacacucaccagcaacaccaa

SEQ ID NO: 17169 - RNA, 21 nt, artificial
  Chemically synthesized
gauucuuaauagcuggcugua

SEQ ID NO: 17170 - RNA, 21 nt, artificial
  Chemically synthesized
ggauuggaauugaggaagacu

SEQ ID NO: 17171 - RNA, 21 nt, artificial
  Chemically synthesized
caggccacuuugccucuaaau

SEQ ID NO: 17172 - RNA, 21 nt, artificial
  Chemically synthesized
gaaucaucaaggaaugcacac

SEQ ID NO: 17173 - RNA, 21 nt, artificial
  Chemically synthesized
gauuaugcucuggcaucuaac

SEQ ID NO: 17174 - RNA, 21 nt, artificial
  Chemically synthesized
gcaugcuaaguacccaaauag

SEQ ID NO: 17175 - RNA, 21 nt, artificial
  Chemically synthesized
ggaaugcacacucaccagcaa

SEQ ID NO: 17176 - RNA, 21 nt, artificial
  Chemically synthesized
cucuggcaucuaacauaugau

SEQ ID NO: 17177 - RNA, 21 nt, artificial
  Chemically synthesized
guauauguauuugagugcaga

SEQ ID NO: 17178 - RNA, 21 nt, artificial
  Chemically synthesized
uagccugguuuggagauacua

SEQ ID NO: 17179 - RNA, 21 nt, artificial
  Chemically synthesized
uggucuagagugaaaaacaac

SEQ ID NO: 17180 - RNA, 21 nt, artificial
  Chemically synthesized
ugaucucgcgcaagagugaca

SEQ ID NO: 17181 - RNA, 21 nt, artificial
  Chemically synthesized
gcgcugaagagccaacauauu

SEQ ID NO: 17182 - RNA, 21 nt, artificial
  Chemically synthesized
aguaaaugcaguggcaugcua

SEQ ID NO: 17183 - RNA, 21 nt, artificial
  Chemically synthesized
caggcaucaaaagcauuuuga

SEQ ID NO: 17184 - RNA, 21 nt, artificial
  Chemically synthesized
cgucuguugcuagauuaucgu

SEQ ID NO: 17185 - RNA, 21 nt, artificial
  Chemically synthesized
aagcguaugacacauugauua

SEQ ID NO: 17186 - RNA, 21 nt, artificial
  Chemically synthesized
aaaguucaacugcuucguaau

SEQ ID NO: 17187 - RNA, 21 nt, artificial
  Chemically synthesized
caucaaggaaugcacacucac

SEQ ID NO: 17188 - RNA, 21 nt, artificial
  Chemically synthesized
gcagaggaugaaagauuaaga

SEQ ID NO: 17189 - RNA, 21 nt, artificial
  Chemically synthesized
aaaggcuuuguucgaaagaau

SEQ ID NO: 17190 - RNA, 21 nt, artificial
  Chemically synthesized
aaaguguuaaugcccaaguga

SEQ ID NO: 17191 - RNA, 21 nt, artificial
  Chemically synthesized
agcgcugaagagccaacauau

SEQ ID NO: 17192 - RNA, 21 nt, artificial
  Chemically synthesized
ucaugauucugccuccaagga

SEQ ID NO: 17193 - RNA, 21 nt, artificial
  Chemically synthesized
aagaagcguaugacacauuga

SEQ ID NO: 17194 - RNA, 21 nt, artificial
  Chemically synthesized
guaugcagaggaugaaagauu

SEQ ID NO: 17195 - RNA, 21 nt, artificial
  Chemically synthesized
ggaaucaucaaggaaugcaca

SEQ ID NO: 17196 - RNA, 21 nt, artificial
  Chemically synthesized
caccuaaagaacuuccauuua

SEQ ID NO: 17197 - RNA, 21 nt, artificial
  Chemically synthesized
aaucaucaucuggauuuagga

SEQ ID NO: 17198 - RNA, 21 nt, artificial
  Chemically synthesized
ugaacauggaaucaucaagga

SEQ ID NO: 17199 - RNA, 21 nt, artificial
  Chemically synthesized
gccugguuuggagauacuaac

SEQ ID NO: 17200 - RNA, 21 nt, artificial
  Chemically synthesized
acccauguuugcaaucaaaga

SEQ ID NO: 17201 - RNA, 21 nt, artificial
  Chemically synthesized
ucaaaagcauuuugagcagga

SEQ ID NO: 17202 - RNA, 21 nt, artificial
  Chemically synthesized
ucauggaaagaaagaagcgua

SEQ ID NO: 17203 - RNA, 21 nt, artificial
  Chemically synthesized
cccuccuaccucugguucuua

SEQ ID NO: 17204 - RNA, 21 nt, artificial
  Chemically synthesized
ugauggccaauucugccauaa

SEQ ID NO: 17205 - RNA, 21 nt, artificial
  Chemically synthesized
ucaacuucauggaaagaaaga

SEQ ID NO: 17206 - RNA, 21 nt, artificial
  Chemically synthesized
aguugggaaaacaaacuucau

SEQ ID NO: 17207 - RNA, 21 nt, artificial
  Chemically synthesized
cuuaauagcuggcuguaaaua

SEQ ID NO: 17208 - RNA, 21 nt, artificial
  Chemically synthesized
aauggugucaaugaagccaaa

SEQ ID NO: 17209 - RNA, 21 nt, artificial
  Chemically synthesized
uaauaguccaccaaaaggcaa

SEQ ID NO: 17210 - RNA, 21 nt, artificial
  Chemically synthesized
auaccuggaaccaccuaaaga

SEQ ID NO: 17211 - RNA, 21 nt, artificial
  Chemically synthesized
gucaugaacccauguuugcaa

SEQ ID NO: 17212 - RNA, 21 nt, artificial
  Chemically synthesized
gcuagauuaucguccaaaagu

SEQ ID NO: 17213 - RNA, 21 nt, artificial
  Chemically synthesized
cuggcucaaaacuaccuacuu

SEQ ID NO: 17214 - RNA, 21 nt, artificial
  Chemically synthesized
cuaagucaaguuaaaggcuuu

SEQ ID NO: 17215 - RNA, 21 nt, artificial
  Chemically synthesized
caacaaauucaguucugagua

SEQ ID NO: 17216 - RNA, 21 nt, artificial
  Chemically synthesized
ucagagaaaguagcuuuguga

SEQ ID NO: 17217 - RNA, 21 nt, artificial
  Chemically synthesized
gguuuggagauacuaacugcu

SEQ ID NO: 17218 - RNA, 21 nt, artificial
  Chemically synthesized
cuuggaaggccugcaucauga

SEQ ID NO: 17219 - RNA, 21 nt, artificial
  Chemically synthesized
gaagacuguuacuacaguuga

SEQ ID NO: 17220 - RNA, 21 nt, artificial
  Chemically synthesized
uuggaaggccugcaucaugau

SEQ ID NO: 17221 - RNA, 21 nt, artificial
  Chemically synthesized
uaccuggaaccaccuaaagaa

SEQ ID NO: 17222 - RNA, 21 nt, artificial
  Chemically synthesized
aggagaguauuacuagagcuu

SEQ ID NO: 17223 - RNA, 21 nt, artificial
  Chemically synthesized
agcguaugacacauugauuaa

SEQ ID NO: 17224 - RNA, 21 nt, artificial
  Chemically synthesized
agcuuauacauagcaauggua

SEQ ID NO: 17225 - RNA, 21 nt, artificial
  Chemically synthesized
aacccauguuugcaaucaaag

SEQ ID NO: 17226 - RNA, 21 nt, artificial
  Chemically synthesized
agacuaucauccucaaggaca

SEQ ID NO: 17227 - RNA, 21 nt, artificial
  Chemically synthesized
ggccacuuugccucuaaauua

SEQ ID NO: 17228 - RNA, 21 nt, artificial
  Chemically synthesized
uugccuuggugcucaucuuaa

SEQ ID NO: 17229 - RNA, 21 nt, artificial
  Chemically synthesized
ccugguuuggagauacuaacu

SEQ ID NO: 17230 - RNA, 21 nt, artificial
  Chemically synthesized
ggauuuaggaauugcucuugu

SEQ ID NO: 17231 - RNA, 21 nt, artificial
  Chemically synthesized
cggaggauugcucaacaacca

SEQ ID NO: 17232 - RNA, 21 nt, artificial
  Chemically synthesized
guugagacucagaacuuggaa

SEQ ID NO: 17233 - RNA, 21 nt, artificial
  Chemically synthesized
aauaggaguguaugcagagga

SEQ ID NO: 17234 - RNA, 21 nt, artificial
  Chemically synthesized
ccacucuaugaaucaauagaa

SEQ ID NO: 17235 - RNA, 21 nt, artificial
  Chemically synthesized
ggcaagacugcccuuagaaau

SEQ ID NO: 17236 - RNA, 21 nt, artificial
  Chemically synthesized
cguaauuggcaucaacuucau

SEQ ID NO: 17237 - RNA, 21 nt, artificial
  Chemically synthesized
ggcaucaacuucauggaaaga

SEQ ID NO: 17238 - RNA, 21 nt, artificial
  Chemically synthesized
aaaagcauuuugagcaggaga

SEQ ID NO: 17239 - RNA, 21 nt, artificial
  Chemically synthesized
uggcagcuuauacauagcaau

SEQ ID NO: 17240 - RNA, 21 nt, artificial
  Chemically synthesized
gcaucaaaagcauuuugagca

SEQ ID NO: 17241 - RNA, 21 nt, artificial
  Chemically synthesized
uagcgcugaagagccaacaua

SEQ ID NO: 17242 - RNA, 21 nt, artificial
  Chemically synthesized
gguaaaaucaucaucuggauu

SEQ ID NO: 17243 - RNA, 21 nt, artificial
  Chemically synthesized
acuagugacucagaaaauuca

SEQ ID NO: 17244 - RNA, 21 nt, artificial
  Chemically synthesized
agagccaacauauuuguagau

SEQ ID NO: 17245 - RNA, 21 nt, artificial
  Chemically synthesized
cuugguuuuuuacuggguaca

SEQ ID NO: 17246 - RNA, 21 nt, artificial
  Chemically synthesized
gggaaaacaaacuucaucaag

SEQ ID NO: 17247 - RNA, 21 nt, artificial
  Chemically synthesized
guccaaaaguguuaaugccca

SEQ ID NO: 17248 - RNA, 21 nt, artificial
  Chemically synthesized
acuucaucaagaguaaaugca

SEQ ID NO: 17249 - RNA, 21 nt, artificial
  Chemically synthesized
ugcagagaaaauucagacuau

SEQ ID NO: 17250 - RNA, 21 nt, artificial
  Chemically synthesized
gaauugaggaagacuguuacu

SEQ ID NO: 17251 - RNA, 21 nt, artificial
  Chemically synthesized
cccaaguuucuaagauuuaag

SEQ ID NO: 17252 - RNA, 21 nt, artificial
  Chemically synthesized
uucuuaauagcuggcuguaaa

SEQ ID NO: 17253 - RNA, 21 nt, artificial
  Chemically synthesized
gcaucaugauggccaauucug

SEQ ID NO: 17254 - RNA, 21 nt, artificial
  Chemically synthesized
gcuucguaauuggcaucaacu

SEQ ID NO: 17255 - RNA, 21 nt, artificial
  Chemically synthesized
uugcuggagucaugacacuaa

SEQ ID NO: 17256 - RNA, 21 nt, artificial
  Chemically synthesized
gaucaagaaugacaaugucca

SEQ ID NO: 17257 - RNA, 21 nt, artificial
  Chemically synthesized
uuaggaauugcucuugucaua

SEQ ID NO: 17258 - RNA, 21 nt, artificial
  Chemically synthesized
agaaaguucaacugcuucgua

SEQ ID NO: 17259 - RNA, 21 nt, artificial
  Chemically synthesized
aggcucuaccucaaagaccuu

SEQ ID NO: 17260 - RNA, 21 nt, artificial
  Chemically synthesized
aauagaagaagcuaugaccuu

SEQ ID NO: 17261 - RNA, 21 nt, artificial
  Chemically synthesized
uuacgucuguugcuagauuau

SEQ ID NO: 17262 - RNA, 21 nt, artificial
  Chemically synthesized
cugaguauaugcaauuagugu

SEQ ID NO: 17263 - RNA, 21 nt, artificial
  Chemically synthesized
uaugcagaggaugaaagauua

SEQ ID NO: 17264 - RNA, 21 nt, artificial
  Chemically synthesized
gacuaucauccucaaggacau

SEQ ID NO: 17265 - RNA, 21 nt, artificial
  Chemically synthesized
aagaaagaagcguaugacaca

SEQ ID NO: 17266 - RNA, 21 nt, artificial
  Chemically synthesized
aagcuaugaccuuuugcugaa

SEQ ID NO: 17267 - RNA, 21 nt, artificial
  Chemically synthesized
cacuauugcuggagucaugac

SEQ ID NO: 17268 - RNA, 21 nt, artificial
  Chemically synthesized
gucaaugaagccaaaauagau

SEQ ID NO: 17269 - RNA, 21 nt, artificial
  Chemically synthesized
ggugucaaugaagccaaaaua

SEQ ID NO: 17270 - RNA, 21 nt, artificial
  Chemically synthesized
ugacaucaacuccaagggauu

SEQ ID NO: 17271 - RNA, 21 nt, artificial
  Chemically synthesized
agacugcccuuagaaauucua

SEQ ID NO: 17272 - RNA, 21 nt, artificial
  Chemically synthesized
cuacaaauggcagcuuauaca

SEQ ID NO: 17273 - RNA, 21 nt, artificial
  Chemically synthesized
gaaugcacacucaccagcaac

SEQ ID NO: 17274 - RNA, 21 nt, artificial
  Chemically synthesized
ugccuccaaggauguuuaaaa

SEQ ID NO: 17275 - RNA, 21 nt, artificial
  Chemically synthesized
caacuucauggaaagaaagaa

SEQ ID NO: 17276 - RNA, 21 nt, artificial
  Chemically synthesized
cucagaaaauucaaacuucag

SEQ ID NO: 17277 - RNA, 21 nt, artificial
  Chemically synthesized
auuuugagcaggagaguauua

SEQ ID NO: 17278 - RNA, 21 nt, artificial
  Chemically synthesized
caugauucugccuccaaggau

SEQ ID NO: 17279 - RNA, 21 nt, artificial
  Chemically synthesized
ucuuuguacucuugcagagaa

SEQ ID NO: 17280 - RNA, 21 nt, artificial
  Chemically synthesized
ccuaaagaacuuccauuuaug

SEQ ID NO: 17281 - RNA, 21 nt, artificial
  Chemically synthesized
agaagcguaugacacauugau

SEQ ID NO: 17282 - RNA, 21 nt, artificial
  Chemically synthesized
gcaagacugcccuuagaaauu

SEQ ID NO: 17283 - RNA, 21 nt, artificial
  Chemically synthesized
uacucuugcagagaaaauuca

SEQ ID NO: 17284 - RNA, 21 nt, artificial
  Chemically synthesized
gaaauucuagccugguuugga

SEQ ID NO: 17285 - RNA, 21 nt, artificial
  Chemically synthesized
ccaccuaaagaacuuccauuu

SEQ ID NO: 17286 - RNA, 21 nt, artificial
  Chemically synthesized
agaaugacaauguccaagaca

SEQ ID NO: 17287 - RNA, 21 nt, artificial
  Chemically synthesized
gguuuacgagugacuuggcug

SEQ ID NO: 17288 - RNA, 21 nt, artificial
  Chemically synthesized
cgguuuacgagugacuuggcu

SEQ ID NO: 17289 - RNA, 21 nt, artificial
  Chemically synthesized
uguugcuagauuaucguccaa

SEQ ID NO: 17290 - RNA, 21 nt, artificial
  Chemically synthesized
uguucgaaagaauggugucaa

SEQ ID NO: 17291 - RNA, 21 nt, artificial
  Chemically synthesized
aaugcacacucaccagcaaca

SEQ ID NO: 17292 - RNA, 21 nt, artificial
  Chemically synthesized
accagcaacaccaagugcaaa

SEQ ID NO: 17293 - RNA, 21 nt, artificial
  Chemically synthesized
ccacuuugccucuaaauuacc

SEQ ID NO: 17294 - RNA, 21 nt, artificial
  Chemically synthesized
gcaggccaaguugcugaauca

SEQ ID NO: 17295 - RNA, 21 nt, artificial
  Chemically synthesized
gccaaucuuuguacucuugca

SEQ ID NO: 17296 - RNA, 21 nt, artificial
  Chemically synthesized
gcucuuucacuucggaggauu

SEQ ID NO: 17297 - RNA, 21 nt, artificial
  Chemically synthesized
ccgaaaauguucaauaauguc

SEQ ID NO: 17298 - RNA, 21 nt, artificial
  Chemically synthesized
uuuguacucuugcagagaaaa

SEQ ID NO: 17299 - RNA, 21 nt, artificial
  Chemically synthesized
augcauuuuacuggcucaaaa

SEQ ID NO: 17300 - RNA, 21 nt, artificial
  Chemically synthesized
gaagcguaugacacauugauu

SEQ ID NO: 17301 - RNA, 21 nt, artificial
  Chemically synthesized
ugagcaggagaguauuacuag

SEQ ID NO: 17302 - RNA, 21 nt, artificial
  Chemically synthesized
aaguuaaaggcuuuguucgaa

SEQ ID NO: 17303 - RNA, 21 nt, artificial
  Chemically synthesized
ucuaccucaaagaccuuugca

SEQ ID NO: 17304 - RNA, 21 nt, artificial
  Chemically synthesized
cagaggaugaaagauuaagau

SEQ ID NO: 17305 - RNA, 21 nt, artificial
  Chemically synthesized
ccuccaaggauguuuaaaauc

SEQ ID NO: 17306 - RNA, 21 nt, artificial
  Chemically synthesized
gcuguaaauacugcuugguuu

SEQ ID NO: 17307 - RNA, 21 nt, artificial
  Chemically synthesized
aaugcaguggcaugcuaagua

SEQ ID NO: 17308 - RNA, 21 nt, artificial
  Chemically synthesized
aauucuagccugguuuggaga

SEQ ID NO: 17309 - RNA, 21 nt, artificial
  Chemically synthesized
cuuugccaccucuccauuuuu

SEQ ID NO: 17310 - RNA, 21 nt, artificial
  Chemically synthesized
caucaacuucauggaaagaaa

SEQ ID NO: 17311 - RNA, 21 nt, artificial
  Chemically synthesized
cuuggucuagagugaaaaaca

SEQ ID NO: 17312 - RNA, 21 nt, artificial
  Chemically synthesized
ucaucaucuggauuuaggaau

SEQ ID NO: 17313 - RNA, 21 nt, artificial
  Chemically synthesized
uggugucaaugaagccaaaau

SEQ ID NO: 17314 - RNA, 21 nt, artificial
  Chemically synthesized
gaaauaucaguuacugaacag

SEQ ID NO: 17315 - RNA, 21 nt, artificial
  Chemically synthesized
ggauguuuaaaaucuaguugg

SEQ ID NO: 17316 - RNA, 21 nt, artificial
  Chemically synthesized
aauugaggaagacuguuacua

SEQ ID NO: 17317 - RNA, 21 nt, artificial
  Chemically synthesized
aauaaggcucuaccucaaaga

SEQ ID NO: 17318 - RNA, 21 nt, artificial
  Chemically synthesized
gagauacuaacugcucucaga

SEQ ID NO: 17319 - RNA, 21 nt, artificial
  Chemically synthesized
gaaucaauagaagaagcuaug

SEQ ID NO: 17320 - RNA, 21 nt, artificial
  Chemically synthesized
auggcagcuuauacauagcaa

SEQ ID NO: 17321 - RNA, 21 nt, artificial
  Chemically synthesized
cuagccugguuuggagauacu

SEQ ID NO: 17322 - RNA, 21 nt, artificial
  Chemically synthesized
ggagaguauuacuagagcuuu

SEQ ID NO: 17323 - RNA, 21 nt, artificial
  Chemically synthesized
gagugcagaauuuaaauaagg

SEQ ID NO: 17324 - RNA, 21 nt, artificial
  Chemically synthesized
gcagaauuuaaauaaggcucu

SEQ ID NO: 17325 - RNA, 21 nt, artificial
  Chemically synthesized
cuaccucaaagaccuuugcac

SEQ ID NO: 17326 - RNA, 21 nt, artificial
  Chemically synthesized
cauuuuacuggcucaaaacua

SEQ ID NO: 17327 - RNA, 21 nt, artificial
  Chemically synthesized
ucugaucucgcgcaagaguga

SEQ ID NO: 17328 - RNA, 21 nt, artificial
  Chemically synthesized
caaggaaugcacacucaccag

SEQ ID NO: 17329 - RNA, 21 nt, artificial
  Chemically synthesized
gaggauugcucaacaaccaug

SEQ ID NO: 17330 - RNA, 21 nt, artificial
  Chemically synthesized
ugaaauccaaagcuuggucua

SEQ ID NO: 17331 - RNA, 21 nt, artificial
  Chemically synthesized
caguugagacucagaacuugg

SEQ ID NO: 17332 - RNA, 21 nt, artificial
  Chemically synthesized
uugcuagauuaucguccaaaa

SEQ ID NO: 17333 - RNA, 21 nt, artificial
  Chemically synthesized
caggagaguauuacuagagcu

SEQ ID NO: 17334 - RNA, 21 nt, artificial
  Chemically synthesized
aguguaugcagaggaugaaag

SEQ ID NO: 17335 - RNA, 21 nt, artificial
  Chemically synthesized
caagaguaaaugcaguggcau

SEQ ID NO: 17336 - RNA, 21 nt, artificial
  Chemically synthesized
ugaacccauguuugcaaucaa

SEQ ID NO: 17337 - RNA, 21 nt, artificial
  Chemically synthesized
agacuguuacuacaguugaga

SEQ ID NO: 17338 - RNA, 21 nt, artificial
  Chemically synthesized
cacagcagaacagaaaguuca

SEQ ID NO: 17339 - RNA, 21 nt, artificial
  Chemically synthesized
agcuuugccaccucuccauuu

SEQ ID NO: 17340 - RNA, 21 nt, artificial
  Chemically synthesized
caaauggcagcuuauacauag

SEQ ID NO: 17341 - RNA, 21 nt, artificial
  Chemically synthesized
agcuaugaccuuuugcugaaa

SEQ ID NO: 17342 - RNA, 21 nt, artificial
  Chemically synthesized
cccacucuaugaaucaauaga

SEQ ID NO: 17343 - RNA, 21 nt, artificial
  Chemically synthesized
uuauuagcgcugaagagccaa

SEQ ID NO: 17344 - RNA, 21 nt, artificial
  Chemically synthesized
aguauuacuagagcuuugcca

SEQ ID NO: 17345 - RNA, 21 nt, artificial
  Chemically synthesized
gcuugguuuuuuacuggguac

SEQ ID NO: 17346 - RNA, 21 nt, artificial
  Chemically synthesized
cuggauuuaggaauugcucuu

SEQ ID NO: 17347 - RNA, 21 nt, artificial
  Chemically synthesized
cugacaucaacuccaagggau

SEQ ID NO: 17348 - RNA, 21 nt, artificial
  Chemically synthesized
cccauguuugcaaucaaagau

SEQ ID NO: 17349 - RNA, 21 nt, artificial
  Chemically synthesized
agagcuuugccaccucuccau

SEQ ID NO: 17350 - RNA, 21 nt, artificial
  Chemically synthesized
agugacacacagguguucaaa

SEQ ID NO: 17351 - RNA, 21 nt, artificial
  Chemically synthesized
caucuggauuuaggaauugcu

SEQ ID NO: 17352 - RNA, 21 nt, artificial
  Chemically synthesized
ccaaaaguguuaaugcccaag

SEQ ID NO: 17353 - RNA, 21 nt, artificial
  Chemically synthesized
ccauuuuugccuuggugcuca

SEQ ID NO: 17354 - RNA, 21 nt, artificial
  Chemically synthesized
ccucaaagaccuuugcacagu

SEQ ID NO: 17355 - RNA, 21 nt, artificial
  Chemically synthesized
cauguuugcaaucaaagauga

SEQ ID NO: 17356 - RNA, 21 nt, artificial
  Chemically synthesized
uuaaaggcuuuguucgaaaga

SEQ ID NO: 17357 - RNA, 21 nt, artificial
  Chemically synthesized
gauucugccuccaaggauguu

SEQ ID NO: 17358 - RNA, 21 nt, artificial
  Chemically synthesized
cccaagugacugacaucaacu

SEQ ID NO: 17359 - RNA, 21 nt, artificial
  Chemically synthesized
gcaagagugacacacaggugu

SEQ ID NO: 17360 - RNA, 21 nt, artificial
  Chemically synthesized
ucguaauuggcaucaacuuca

SEQ ID NO: 17361 - RNA, 21 nt, artificial
  Chemically synthesized
cagagaaaguagcuuugugac

SEQ ID NO: 17362 - RNA, 21 nt, artificial
  Chemically synthesized
caguguauguuaguacaaaug

SEQ ID NO: 17363 - RNA, 21 nt, artificial
  Chemically synthesized
cuaacugcucucagagaaagu

SEQ ID NO: 17364 - RNA, 21 nt, artificial
  Chemically synthesized
cuuccauuuauggaggauuuu

SEQ ID NO: 17365 - RNA, 21 nt, artificial
  Chemically synthesized
uguuacuacaguugagacuca

SEQ ID NO: 17366 - RNA, 21 nt, artificial
  Chemically synthesized
gccugcaucaugauggccaau

SEQ ID NO: 17367 - RNA, 21 nt, artificial
  Chemically synthesized
gaagagccaacauauuuguag

SEQ ID NO: 17368 - RNA, 21 nt, artificial
  Chemically synthesized
cuuuguucgaaagaauggugu

SEQ ID NO: 17369 - RNA, 21 nt, artificial
  Chemically synthesized
aagugacugacaucaacucca

SEQ ID NO: 17370 - RNA, 21 nt, artificial
  Chemically synthesized
ggaagcucuuucacuucggag

SEQ ID NO: 17371 - RNA, 21 nt, artificial
  Chemically synthesized
gugcucaucuuaauggccuaa

SEQ ID NO: 17372 - RNA, 21 nt, artificial
  Chemically synthesized
caaaaguguuaaugcccaagu

SEQ ID NO: 17373 - RNA, 21 nt, artificial
  Chemically synthesized
ugcccaagugacugacaucaa

SEQ ID NO: 17374 - RNA, 21 nt, artificial
  Chemically synthesized
uggcaucaacuucauggaaag

SEQ ID NO: 17375 - RNA, 21 nt, artificial
  Chemically synthesized
uucucaggcaucaaaagcauu

SEQ ID NO: 17376 - RNA, 21 nt, artificial
  Chemically synthesized
uacuacaguugagacucagaa

SEQ ID NO: 17377 - RNA, 21 nt, artificial
  Chemically synthesized
auugcuggagucaugacacua

SEQ ID NO: 17378 - RNA, 21 nt, artificial
  Chemically synthesized
agaaaugaaauccaaagcuug

SEQ ID NO: 17379 - RNA, 21 nt, artificial
  Chemically synthesized
ugcuugguuuuuuacugggua

SEQ ID NO: 17380 - RNA, 21 nt, artificial
  Chemically synthesized
aguacccaaauaggaguguau

SEQ ID NO: 17381 - RNA, 21 nt, artificial
  Chemically synthesized
aguagcuuugugacaugucau

SEQ ID NO: 17382 - RNA, 21 nt, artificial
  Chemically synthesized
gaagaagcuaugaccuuuugc

SEQ ID NO: 17383 - RNA, 21 nt, artificial
  Chemically synthesized
auacuaacugcucucagagaa

SEQ ID NO: 17384 - RNA, 21 nt, artificial
  Chemically synthesized
cguccaaaaguguuaaugccc

SEQ ID NO: 17385 - RNA, 21 nt, artificial
  Chemically synthesized
uacaaauggcagcuuauacau

SEQ ID NO: 17386 - RNA, 21 nt, artificial
  Chemically synthesized
cguaugacacauugauuaaag

SEQ ID NO: 17387 - RNA, 21 nt, artificial
  Chemically synthesized
caguggcaugcuaaguaccca

SEQ ID NO: 17388 - RNA, 21 nt, artificial
  Chemically synthesized
uaaaggcuuuguucgaaagaa

SEQ ID NO: 17389 - RNA, 21 nt, artificial
  Chemically synthesized
uucaguucugaguauaugcaa

SEQ ID NO: 17390 - RNA, 21 nt, artificial
  Chemically synthesized
ggcaugcuaaguacccaaaua

SEQ ID NO: 17391 - RNA, 21 nt, artificial
  Chemically synthesized
cuggaaccaccuaaagaacuu

SEQ ID NO: 17392 - RNA, 21 nt, artificial
  Chemically synthesized
ggaagacuguuacuacaguug

SEQ ID NO: 17393 - RNA, 21 nt, artificial
  Chemically synthesized
ugaccuuuugcugaaauauca

SEQ ID NO: 17394 - RNA, 21 nt, artificial
  Chemically synthesized
uugaggaagacuguuacuaca

SEQ ID NO: 17395 - RNA, 21 nt, artificial
  Chemically synthesized
gccuccaaggauguuuaaaau

SEQ ID NO: 17396 - RNA, 21 nt, artificial
  Chemically synthesized
ucaacuccaagggauuggaau

SEQ ID NO: 17397 - RNA, 21 nt, artificial
  Chemically synthesized
ccuccuaccucugguucuuac

SEQ ID NO: 17398 - RNA, 21 nt, artificial
  Chemically synthesized
ccuuagaaauucuagccuggu

SEQ ID NO: 17399 - RNA, 21 nt, artificial
  Chemically synthesized
aacauggaaucaucaaggaau

SEQ ID NO: 17400 - RNA, 21 nt, artificial
  Chemically synthesized
uaugcauuuuacuggcucaaa

SEQ ID NO: 17401 - RNA, 21 nt, artificial
  Chemically synthesized
aagacugcccuuagaaauucu

SEQ ID NO: 17402 - RNA, 21 nt, artificial
  Chemically synthesized
ucuggauuuaggaauugcucu

SEQ ID NO: 17403 - RNA, 21 nt, artificial
  Chemically synthesized
ucauccucaaggacauuacua

SEQ ID NO: 17404 - RNA, 21 nt, artificial
  Chemically synthesized
uuggucuagagugaaaaacaa

SEQ ID NO: 17405 - RNA, 21 nt, artificial
  Chemically synthesized
guuaaaggcuuuguucgaaag

SEQ ID NO: 17406 - RNA, 21 nt, artificial
  Chemically synthesized
aaauucagacuaucauccuca

SEQ ID NO: 17407 - RNA, 21 nt, artificial
  Chemically synthesized
agcagauaccuggaaccaccu

SEQ ID NO: 17408 - RNA, 21 nt, artificial
  Chemically synthesized
ggcuuuguucgaaagaauggu

SEQ ID NO: 17409 - RNA, 21 nt, artificial
  Chemically synthesized
uuguacucuugcagagaaaau

SEQ ID NO: 17410 - RNA, 21 nt, artificial
  Chemically synthesized
cacagguguucaaagacgcuu

SEQ ID NO: 17411 - RNA, 21 nt, artificial
  Chemically synthesized
uguccaagacacagcagaaca

SEQ ID NO: 17412 - RNA, 21 nt, artificial
  Chemically synthesized
agacacagcagaacagaaagu

SEQ ID NO: 17413 - RNA, 21 nt, artificial
  Chemically synthesized
gagaguauuacuagagcuuug

SEQ ID NO: 17414 - RNA, 21 nt, artificial
  Chemically synthesized
gaggaagacuguuacuacagu

SEQ ID NO: 17415 - RNA, 21 nt, artificial
  Chemically synthesized
uauaucaccacuauugcugga

SEQ ID NO: 17416 - RNA, 21 nt, artificial
  Chemically synthesized
ucaccagcaacaccaagugca

SEQ ID NO: 17417 - RNA, 21 nt, artificial
  Chemically synthesized
ggaauugaggaagacuguuac

SEQ ID NO: 17418 - RNA, 21 nt, artificial
  Chemically synthesized
ugaggaagacuguuacuacag

SEQ ID NO: 17419 - RNA, 21 nt, artificial
  Chemically synthesized
guucuuacgucuguugcuaga

SEQ ID NO: 17420 - RNA, 21 nt, artificial
  Chemically synthesized
gggauuggaauugaggaagac

SEQ ID NO: 17421 - RNA, 21 nt, artificial
  Chemically synthesized
accucaaagaccuuugcacag

SEQ ID NO: 17422 - RNA, 21 nt, artificial
  Chemically synthesized
acuauugcuggagucaugaca

SEQ ID NO: 17423 - RNA, 21 nt, artificial
  Chemically synthesized
gugcagaauuuaaauaaggcu

SEQ ID NO: 17424 - RNA, 21 nt, artificial
  Chemically synthesized
cccgaaaauguucaauaaugu

SEQ ID NO: 17425 - RNA, 21 nt, artificial
  Chemically synthesized
cuuugcacaguuuauuggugu

SEQ ID NO: 17426 - RNA, 21 nt, artificial
  Chemically synthesized
ugugacaugucaugaacccau

SEQ ID NO: 17427 - RNA, 21 nt, artificial
  Chemically synthesized
cagcaacaccaagugcaaaga

SEQ ID NO: 17428 - RNA, 21 nt, artificial
  Chemically synthesized
aaggcuuuguucgaaagaaug

SEQ ID NO: 17429 - RNA, 21 nt, artificial
  Chemically synthesized
gaaaacaaacuucaucaagag

SEQ ID NO: 17430 - RNA, 21 nt, artificial
  Chemically synthesized
ccuuacuacuauccuacguuu

SEQ ID NO: 17431 - RNA, 21 nt, artificial
  Chemically synthesized
cacuuugccucuaaauuaccu

SEQ ID NO: 17432 - RNA, 21 nt, artificial
  Chemically synthesized
ccuuggugcucaucuuaaugg

SEQ ID NO: 17433 - RNA, 21 nt, artificial
  Chemically synthesized
cuuucucaggcaucaaaagca

SEQ ID NO: 17434 - RNA, 21 nt, artificial
  Chemically synthesized
ucaugauggccaauucugcca

SEQ ID NO: 17435 - RNA, 21 nt, artificial
  Chemically synthesized
auucuuaauagcuggcuguaa

SEQ ID NO: 17436 - RNA, 21 nt, artificial
  Chemically synthesized
aagauuaugcucuggcaucua

SEQ ID NO: 17437 - RNA, 21 nt, artificial
  Chemically synthesized
aguauauguauuugagugcag

SEQ ID NO: 17438 - RNA, 21 nt, artificial
  Chemically synthesized
auaggaguguaugcagaggau

SEQ ID NO: 17439 - RNA, 21 nt, artificial
  Chemically synthesized
uuucgugagcucgucucugau

SEQ ID NO: 17440 - RNA, 21 nt, artificial
  Chemically synthesized
uagaagaagcuaugaccuuuu

SEQ ID NO: 17441 - RNA, 21 nt, artificial
  Chemically synthesized
cacucaccagcaacaccaagu

SEQ ID NO: 17442 - RNA, 21 nt, artificial
  Chemically synthesized
ccugcaucaugauggccaauu

SEQ ID NO: 17443 - RNA, 21 nt, artificial
  Chemically synthesized
caaguugcugaaucaauggag

SEQ ID NO: 17444 - RNA, 21 nt, artificial
  Chemically synthesized
uuacuacaguugagacucaga

SEQ ID NO: 17445 - RNA, 21 nt, artificial
  Chemically synthesized
aacaccaagugcaaagaggaa

SEQ ID NO: 17446 - RNA, 21 nt, artificial
  Chemically synthesized
cuucguaauuggcaucaacuu

SEQ ID NO: 17447 - RNA, 21 nt, artificial
  Chemically synthesized
aaagaccuuugcacaguuuau

SEQ ID NO: 17448 - RNA, 21 nt, artificial
  Chemically synthesized
gccacuuugccucuaaauuac

SEQ ID NO: 17449 - RNA, 21 nt, artificial
  Chemically synthesized
cugaagagccaacauauuugu

SEQ ID NO: 17450 - RNA, 21 nt, artificial
  Chemically synthesized
uaugcucuggcaucuaacaua

SEQ ID NO: 17451 - RNA, 21 nt, artificial
  Chemically synthesized
ucaacugcuucguaauuggca

SEQ ID NO: 17452 - RNA, 21 nt, artificial
  Chemically synthesized
acacagguguucaaagacgcu

SEQ ID NO: 17453 - RNA, 21 nt, artificial
  Chemically synthesized
ugccucuaaauuaccucugau

SEQ ID NO: 17454 - RNA, 21 nt, artificial
  Chemically synthesized
ucaaggacauuacuagugacu

SEQ ID NO: 17455 - RNA, 21 nt, artificial
  Chemically synthesized
agcucuuucacuucggaggau

SEQ ID NO: 17456 - RNA, 21 nt, artificial
  Chemically synthesized
gaacagaaaguucaacugcuu

SEQ ID NO: 17457 - RNA, 21 nt, artificial
  Chemically synthesized
gaccuuuugcugaaauaucag

SEQ ID NO: 17458 - RNA, 21 nt, artificial
  Chemically synthesized
auuuaggaauugcucuuguca

SEQ ID NO: 17459 - RNA, 21 nt, artificial
  Chemically synthesized
gugucaaugaagccaaaauag

SEQ ID NO: 17460 - RNA, 21 nt, artificial
  Chemically synthesized
gcuaaguacccaaauaggagu

SEQ ID NO: 17461 - RNA, 21 nt, artificial
  Chemically synthesized
ugguaaaaucaucaucuggau

SEQ ID NO: 17462 - RNA, 21 nt, artificial
  Chemically synthesized
ucaguucugaguauaugcaau

SEQ ID NO: 17463 - RNA, 21 nt, artificial
  Chemically synthesized
uagauuaucguccaaaagugu

SEQ ID NO: 17464 - RNA, 21 nt, artificial
  Chemically synthesized
gauucuccuuacuacuauccu

SEQ ID NO: 17465 - RNA, 21 nt, artificial
  Chemically synthesized
guucugaguauaugcaauuag

SEQ ID NO: 17466 - RNA, 21 nt, artificial
  Chemically synthesized
cuuugugacaugucaugaacc

SEQ ID NO: 17467 - RNA, 21 nt, artificial
  Chemically synthesized
ggagauacuaacugcucucag

SEQ ID NO: 17468 - RNA, 21 nt, artificial
  Chemically synthesized
caauagaagaagcuaugaccu

SEQ ID NO: 17469 - RNA, 21 nt, artificial
  Chemically synthesized
ugauucugccuccaaggaugu

SEQ ID NO: 17470 - RNA, 21 nt, artificial
  Chemically synthesized
gauuggaauugaggaagacug

SEQ ID NO: 17471 - RNA, 21 nt, artificial
  Chemically synthesized
gaacuuccauuuauggaggau

SEQ ID NO: 17472 - RNA, 21 nt, artificial
  Chemically synthesized
uguaugcauuuuacuggcuca

SEQ ID NO: 17473 - RNA, 21 nt, artificial
  Chemically synthesized
gccaauucugccauaagcccu

SEQ ID NO: 17474 - RNA, 21 nt, artificial
  Chemically synthesized
cucuugcagagaaaauucaga

SEQ ID NO: 17475 - RNA, 21 nt, artificial
  Chemically synthesized
gauaccuggaaccaccuaaag

SEQ ID NO: 17476 - RNA, 21 nt, artificial
  Chemically synthesized
gaaaguagcuuugugacaugu

SEQ ID NO: 17477 - RNA, 21 nt, artificial
  Chemically synthesized
uccaagacacagcagaacaga

SEQ ID NO: 17478 - RNA, 21 nt, artificial
  Chemically synthesized
augguaaaaucaucaucugga

SEQ ID NO: 17479 - RNA, 21 nt, artificial
  Chemically synthesized
aggaaugcacacucaccagca

SEQ ID NO: 17480 - RNA, 21 nt, artificial
  Chemically synthesized
agcaggagaguauuacuagag

SEQ ID NO: 17481 - RNA, 21 nt, artificial
  Chemically synthesized
guuaguacaaaugucuaucca

SEQ ID NO: 17482 - RNA, 21 nt, artificial
  Chemically synthesized
gaagccaaaauagaugagauc

SEQ ID NO: 17483 - RNA, 21 nt, artificial
  Chemically synthesized
agauucuuaauagcuggcugu

SEQ ID NO: 17484 - RNA, 21 nt, artificial
  Chemically synthesized
gugacacacagguguucaaag

SEQ ID NO: 17485 - RNA, 21 nt, artificial
  Chemically synthesized
uugggaaaacaaacuucauca

SEQ ID NO: 17486 - RNA, 21 nt, artificial
  Chemically synthesized
gacacagcagaacagaaaguu

SEQ ID NO: 17487 - RNA, 21 nt, artificial
  Chemically synthesized
cuuagaaauucuagccugguu

SEQ ID NO: 17488 - RNA, 21 nt, artificial
  Chemically synthesized
acuucggaggauugcucaaca

SEQ ID NO: 17489 - RNA, 21 nt, artificial
  Chemically synthesized
uuuaggaauugcucuugucau

SEQ ID NO: 17490 - RNA, 21 nt, artificial
  Chemically synthesized
gcuuugccaccucuccauuuu

SEQ ID NO: 17491 - RNA, 21 nt, artificial
  Chemically synthesized
ugcuggagucaugacacuaag

SEQ ID NO: 17492 - RNA, 21 nt, artificial
  Chemically synthesized
gauuaagauuaugcucuggca

SEQ ID NO: 17493 - RNA, 21 nt, artificial
  Chemically synthesized
gacacauugauuaaagaucuc

SEQ ID NO: 17494 - RNA, 21 nt, artificial
  Chemically synthesized
cugguucuuacgucuguugcu

SEQ ID NO: 17495 - RNA, 21 nt, artificial
  Chemically synthesized
aggacauuacuagugacucag

SEQ ID NO: 17496 - RNA, 21 nt, artificial
  Chemically synthesized
augcuaaguacccaaauagga

SEQ ID NO: 17497 - RNA, 21 nt, artificial
  Chemically synthesized
uggcaucuaacauaugauucu

SEQ ID NO: 17498 - RNA, 21 nt, artificial
  Chemically synthesized
ucaugaacccauguuugcaau

SEQ ID NO: 17499 - RNA, 21 nt, artificial
  Chemically synthesized
auaucaguuacugaacaggca

SEQ ID NO: 17500 - RNA, 21 nt, artificial
  Chemically synthesized
ccaaaaggcaagacugcccuu

SEQ ID NO: 17501 - RNA, 21 nt, artificial
  Chemically synthesized
gcaacaccaagugcaaagagg

SEQ ID NO: 17502 - RNA, 21 nt, artificial
  Chemically synthesized
cagaaaugaaauccaaagcuu

SEQ ID NO: 17503 - RNA, 21 nt, artificial
  Chemically synthesized
gauuuaggaauugcucuuguc

SEQ ID NO: 17504 - RNA, 21 nt, artificial
  Chemically synthesized
agaucaagaaugacaaugucc

SEQ ID NO: 17505 - RNA, 21 nt, artificial
  Chemically synthesized
aaauaaggcucuaccucaaag

SEQ ID NO: 17506 - RNA, 21 nt, artificial
  Chemically synthesized
caagagugacacacagguguu

SEQ ID NO: 17507 - RNA, 21 nt, artificial
  Chemically synthesized
gagccaacauauuuguagauu

SEQ ID NO: 17508 - RNA, 21 nt, artificial
  Chemically synthesized
aagacacagcagaacagaaag

SEQ ID NO: 17509 - RNA, 21 nt, artificial
  Chemically synthesized
uuaaauaaggcucuaccucaa

SEQ ID NO: 17510 - RNA, 21 nt, artificial
  Chemically synthesized
aaacugaagcagauaccugga

SEQ ID NO: 17511 - RNA, 21 nt, artificial
  Chemically synthesized
aaugacaauguccaagacaca

SEQ ID NO: 17512 - RNA, 21 nt, artificial
  Chemically synthesized
ccuuuugcugaaauaucaguu

SEQ ID NO: 17513 - RNA, 21 nt, artificial
  Chemically synthesized
aagccaaaauagaugagauca

SEQ ID NO: 17514 - RNA, 21 nt, artificial
  Chemically synthesized
uggagucaugacacuaaguca

SEQ ID NO: 17515 - RNA, 21 nt, artificial
  Chemically synthesized
auggugucaaugaagccaaaa

SEQ ID NO: 17516 - RNA, 21 nt, artificial
  Chemically synthesized
uaccucaaagaccuuugcaca

SEQ ID NO: 17517 - RNA, 21 nt, artificial
  Chemically synthesized
agaaguagguaguuuugagcc

SEQ ID NO: 17518 - RNA, 21 nt, artificial
  Chemically synthesized
aagaaguagguaguuuugagc

SEQ ID NO: 17519 - RNA, 21 nt, artificial
  Chemically synthesized
uucuguucugcugugucuugg

SEQ ID NO: 17520 - RNA, 21 nt, artificial
  Chemically synthesized
uuuguagcagguuuuacaugg

SEQ ID NO: 17521 - RNA, 21 nt, artificial
  Chemically synthesized
aaagaaguagguaguuuugag

SEQ ID NO: 17522 - RNA, 21 nt, artificial
  Chemically synthesized
ucuugaucucaucuauuuugg

SEQ ID NO: 17523 - RNA, 21 nt, artificial
  Chemically synthesized
agaaagaaguagguaguuuug

SEQ ID NO: 17524 - RNA, 21 nt, artificial
  Chemically synthesized
augguuguugagcaauccucc

SEQ ID NO: 17525 - RNA, 21 nt, artificial
  Chemically synthesized
uuacgaagcaguugaacuuuc

SEQ ID NO: 17526 - RNA, 21 nt, artificial
  Chemically synthesized
uaaacugugcaaaggucuuug

SEQ ID NO: 17527 - RNA, 21 nt, artificial
  Chemically synthesized
uuucgaacaaagccuuuaacu

SEQ ID NO: 17528 - RNA, 21 nt, artificial
  Chemically synthesized
uuccuugaugauuccauguuc

SEQ ID NO: 17529 - RNA, 21 nt, artificial
  Chemically synthesized
uuugauugcaaacauggguuc

SEQ ID NO: 17530 - RNA, 21 nt, artificial
  Chemically synthesized
ucugagucacuaguaaugucc

SEQ ID NO: 17531 - RNA, 21 nt, artificial
  Chemically synthesized
uuucauccucugcauacacuc

SEQ ID NO: 17532 - RNA, 21 nt, artificial
  Chemically synthesized
uuucucugcaagaguacaaag

SEQ ID NO: 17533 - RNA, 21 nt, artificial
  Chemically synthesized
ugauagucugaauuuucucug

SEQ ID NO: 17534 - RNA, 21 nt, artificial
  Chemically synthesized
uuagcaugccacugcauuuac

SEQ ID NO: 17535 - RNA, 21 nt, artificial
  Chemically synthesized
uaucagagguaauuuagaggc

SEQ ID NO: 17536 - RNA, 21 nt, artificial
  Chemically synthesized
uucuuuccaugaaguugaugc

SEQ ID NO: 17537 - RNA, 21 nt, artificial
  Chemically synthesized
uuucuguucugcugugucuug

SEQ ID NO: 17538 - RNA, 21 nt, artificial
  Chemically synthesized
uuuagaggcaaaguggccugc

SEQ ID NO: 17539 - RNA, 21 nt, artificial
  Chemically synthesized
uuucugagucacuaguaaugu

SEQ ID NO: 17540 - RNA, 21 nt, artificial
  Chemically synthesized
ugucauacgcuucuuucuuuc

SEQ ID NO: 17541 - RNA, 21 nt, artificial
  Chemically synthesized
uauuucagcaaaaggucauag

SEQ ID NO: 17542 - RNA, 21 nt, artificial
  Chemically synthesized
ucaucuauuuuggcuucauug

SEQ ID NO: 17543 - RNA, 21 nt, artificial
  Chemically synthesized
uucauugacaccauucuuucg

SEQ ID NO: 17544 - RNA, 21 nt, artificial
  Chemically synthesized
uaugacaccaauaaacugugc

SEQ ID NO: 17545 - RNA, 21 nt, artificial
  Chemically synthesized
uugaacaccugugugucacuc

SEQ ID NO: 17546 - RNA, 21 nt, artificial
  Chemically synthesized
uuucacucuagaccaagcuuu

SEQ ID NO: 17547 - RNA, 21 nt, artificial
  Chemically synthesized
uuguugagcaauccuccgaag

SEQ ID NO: 17548 - RNA, 21 nt, artificial
  Chemically synthesized
uucacucuagaccaagcuuug

SEQ ID NO: 17549 - RNA, 21 nt, artificial
  Chemically synthesized
aaauguacccaguaaaaaacc

SEQ ID NO: 17550 - RNA, 21 nt, artificial
  Chemically synthesized
uucauccucugcauacacucc

SEQ ID NO: 17551 - RNA, 21 nt, artificial
  Chemically synthesized
uuccucaauuccaaucccuug

SEQ ID NO: 17552 - RNA, 21 nt, artificial
  Chemically synthesized
uuagaugccagagcauaaucu

SEQ ID NO: 17553 - RNA, 21 nt, artificial
  Chemically synthesized
ucuuggacauugucauucuug

SEQ ID NO: 17554 - RNA, 21 nt, artificial
  Chemically synthesized
uuauaauuccaaacacaaggg

SEQ ID NO: 17555 - RNA, 21 nt, artificial
  Chemically synthesized
acuuagugucaugacuccagc

SEQ ID NO: 17556 - RNA, 21 nt, artificial
  Chemically synthesized
uugaacuuucuguucugcugu

SEQ ID NO: 17557 - RNA, 21 nt, artificial
  Chemically synthesized
uuuugaugccugagaaagaag

SEQ ID NO: 17558 - RNA, 21 nt, artificial
  Chemically synthesized
uugaucucaucuauuuuggcu

SEQ ID NO: 17559 - RNA, 21 nt, artificial
  Chemically synthesized
ucugcugugucuuggacauug

SEQ ID NO: 17560 - RNA, 21 nt, artificial
  Chemically synthesized
uugucauucuugaucucaucu

SEQ ID NO: 17561 - RNA, 21 nt, artificial
  Chemically synthesized
cuucauugacaccauucuuuc

SEQ ID NO: 17562 - RNA, 21 nt, artificial
  Chemically synthesized
auacucuccugcucaaaaugc

SEQ ID NO: 17563 - RNA, 21 nt, artificial
  Chemically synthesized
uuacaugggacauuauugaac

SEQ ID NO: 17564 - RNA, 21 nt, artificial
  Chemically synthesized
uuuggguacuuagcaugccac

SEQ ID NO: 17565 - RNA, 21 nt, artificial
  Chemically synthesized
uccaaguucugagucucaacu

SEQ ID NO: 17566 - RNA, 21 nt, artificial
  Chemically synthesized
uuugagguagagccuuauuua

SEQ ID NO: 17567 - RNA, 21 nt, artificial
  Chemically synthesized
ucaugacuccagcaauagugg

SEQ ID NO: 17568 - RNA, 21 nt, artificial
  Chemically synthesized
uuuucugagucacuaguaaug

SEQ ID NO: 17569 - RNA, 21 nt, artificial
  Chemically synthesized
uaggccauuaagaugagcacc

SEQ ID NO: 17570 - RNA, 21 nt, artificial
  Chemically synthesized
ucugcaagaguacaaagauug

SEQ ID NO: 17571 - RNA, 21 nt, artificial
  Chemically synthesized
auuuacagccagcuauuaaga

SEQ ID NO: 17572 - RNA, 21 nt, artificial
  Chemically synthesized
aaugugucauacgcuucuuuc

SEQ ID NO: 17573 - RNA, 21 nt, artificial
  Chemically synthesized
ucuuucauccucugcauacac

SEQ ID NO: 17574 - RNA, 21 nt, artificial
  Chemically synthesized
uacaugggacauuauugaaca

SEQ ID NO: 17575 - RNA, 21 nt, artificial
  Chemically synthesized
uuucucugagagcaguuagua

SEQ ID NO: 17576 - RNA, 21 nt, artificial
  Chemically synthesized
auugauucagcaacuuggccu

SEQ ID NO: 17577 - RNA, 21 nt, artificial
  Chemically synthesized
uuucuaagggcagucuugccu

SEQ ID NO: 17578 - RNA, 21 nt, artificial
  Chemically synthesized
auacgcuucuuucuuuccaug

SEQ ID NO: 17579 - RNA, 21 nt, artificial
  Chemically synthesized
uuaccauugcuauguauaagc

SEQ ID NO: 17580 - RNA, 21 nt, artificial
  Chemically synthesized
uaacacuuuuggacgauaauc

SEQ ID NO: 17581 - RNA, 21 nt, artificial
  Chemically synthesized
uucaguaacugauauuucagc

SEQ ID NO: 17582 - RNA, 21 nt, artificial
  Chemically synthesized
uuagccuguggauagacauuu

SEQ ID NO: 17583 - RNA, 21 nt, artificial
  Chemically synthesized
ucugcauacacuccuauuugg

SEQ ID NO: 17584 - RNA, 21 nt, artificial
  Chemically synthesized
uuggugauauuuccauguuug

SEQ ID NO: 17585 - RNA, 21 nt, artificial
  Chemically synthesized
uuggaggcagaaucaugagau

SEQ ID NO: 17586 - RNA, 21 nt, artificial
  Chemically synthesized
uugggcauuaacacuuuugga

SEQ ID NO: 17587 - RNA, 21 nt, artificial
  Chemically synthesized
uuuaaacauccuuggaggcag

SEQ ID NO: 17588 - RNA, 21 nt, artificial
  Chemically synthesized
uuuuucacucuagaccaagcu

SEQ ID NO: 17589 - RNA, 21 nt, artificial
  Chemically synthesized
ucauccucugcauacacuccu

SEQ ID NO: 17590 - RNA, 21 nt, artificial
  Chemically synthesized
ucuaguaauacucuccugcuc

SEQ ID NO: 17591 - RNA, 21 nt, artificial
  Chemically synthesized
uucugagucacuaguaauguc

SEQ ID NO: 17592 - RNA, 21 nt, artificial
  Chemically synthesized
uugauucagcaacuuggccug

SEQ ID NO: 17593 - RNA, 21 nt, artificial
  Chemically synthesized
uuaacuugacuuagugucaug

SEQ ID NO: 17594 - RNA, 21 nt, artificial
  Chemically synthesized
uuaucagagguaauuuagagg

SEQ ID NO: 17595 - RNA, 21 nt, artificial
  Chemically synthesized
ucgaacaaagccuuuaacuug

SEQ ID NO: 17596 - RNA, 21 nt, artificial
  Chemically synthesized
ucaguaacugauauuucagca

SEQ ID NO: 17597 - RNA, 21 nt, artificial
  Chemically synthesized
uuaguaucuccaaaccaggcu

SEQ ID NO: 17598 - RNA, 21 nt, artificial
  Chemically synthesized
uguuguuuuucacucuagacc

SEQ ID NO: 17599 - RNA, 21 nt, artificial
  Chemically synthesized
ucuauuuuggcuucauugaca

SEQ ID NO: 17600 - RNA, 21 nt, artificial
  Chemically synthesized
augagcaccaaggcaaaaaug

SEQ ID NO: 17601 - RNA, 21 nt, artificial
  Chemically synthesized
uucuaagggcagucuugccuu

SEQ ID NO: 17602 - RNA, 21 nt, artificial
  Chemically synthesized
ucucugagagcaguuaguauc

SEQ ID NO: 17603 - RNA, 21 nt, artificial
  Chemically synthesized
uuugaugccugagaaagaagu

SEQ ID NO: 17604 - RNA, 21 nt, artificial
  Chemically synthesized
acagaaucauauguuagaugc

SEQ ID NO: 17605 - RNA, 21 nt, artificial
  Chemically synthesized
auuuguagcagguuuuacaug

SEQ ID NO: 17606 - RNA, 21 nt, artificial
  Chemically synthesized
uuuaaucaaugugucauacgc

SEQ ID NO: 17607 - RNA, 21 nt, artificial
  Chemically synthesized
uugaugauuccauguucacau

SEQ ID NO: 17608 - RNA, 21 nt, artificial
  Chemically synthesized
uuccagguaucugcuucaguu

SEQ ID NO: 17609 - RNA, 21 nt, artificial
  Chemically synthesized
uagccuguggauagacauuug

SEQ ID NO: 17610 - RNA, 21 nt, artificial
  Chemically synthesized
ucuugaugaaguuuguuuucc

SEQ ID NO: 17611 - RNA, 21 nt, artificial
  Chemically synthesized
aguucuuuaggugguuccagg

SEQ ID NO: 17612 - RNA, 21 nt, artificial
  Chemically synthesized
uuuccaugaaguugaugccaa

SEQ ID NO: 17613 - RNA, 21 nt, artificial
  Chemically synthesized
uaaacguaggauaguaguaag

SEQ ID NO: 17614 - RNA, 21 nt, artificial
  Chemically synthesized
ugucacaaagcuacuuucucu

SEQ ID NO: 17615 - RNA, 21 nt, artificial
  Chemically synthesized
uuaaucuuucauccucugcau

SEQ ID NO: 17616 - RNA, 21 nt, artificial
  Chemically synthesized
uauguauaagcugccauuugu

SEQ ID NO: 17617 - RNA, 21 nt, artificial
  Chemically synthesized
ugcauuaggccauuaagauga

SEQ ID NO: 17618 - RNA, 21 nt, artificial
  Chemically synthesized
cucugcauacacuccuauuug

SEQ ID NO: 17619 - RNA, 21 nt, artificial
  Chemically synthesized
gaaagaaguagguaguuuuga

SEQ ID NO: 17620 - RNA, 21 nt, artificial
  Chemically synthesized
uaacagucuuccucaauucca

SEQ ID NO: 17621 - RNA, 21 nt, artificial
  Chemically synthesized
uucaugacaugucacaaagcu

SEQ ID NO: 17622 - RNA, 21 nt, artificial
  Chemically synthesized
uugaauuuucugagucacuag

SEQ ID NO: 17623 - RNA, 21 nt, artificial
  Chemically synthesized
uccucuuugcacuugguguug

SEQ ID NO: 17624 - RNA, 21 nt, artificial
  Chemically synthesized
uacaaauauguuggcucuuca

SEQ ID NO: 17625 - RNA, 21 nt, artificial
  Chemically synthesized
cuagcaacagacguaagaacc

SEQ ID NO: 17626 - RNA, 21 nt, artificial
  Chemically synthesized
agucacucguaaaccgcuucc

SEQ ID NO: 17627 - RNA, 21 nt, artificial
  Chemically synthesized
uuaggugguuccagguaucug

SEQ ID NO: 17628 - RNA, 21 nt, artificial
  Chemically synthesized
auugacaccauucuuucgaac

SEQ ID NO: 17629 - RNA, 21 nt, artificial
  Chemically synthesized
ugaugcaggccuuccaaguuc

SEQ ID NO: 17630 - RNA, 21 nt, artificial
  Chemically synthesized
aaauauguuggcucuucagcg

SEQ ID NO: 17631 - RNA, 21 nt, artificial
  Chemically synthesized
uuuucacucuagaccaagcuu

SEQ ID NO: 17632 - RNA, 21 nt, artificial
  Chemically synthesized
ucagcaaaaggucauagcuuc

SEQ ID NO: 17633 - RNA, 21 nt, artificial
  Chemically synthesized
ugagaaagaaguagguaguuu

SEQ ID NO: 17634 - RNA, 21 nt, artificial
  Chemically synthesized
aacugugcaaaggucuuugag

SEQ ID NO: 17635 - RNA, 21 nt, artificial
  Chemically synthesized
uuaaacauccuuggaggcaga

SEQ ID NO: 17636 - RNA, 21 nt, artificial
  Chemically synthesized
uuguuguuuuucacucuagac

SEQ ID NO: 17637 - RNA, 21 nt, artificial
  Chemically synthesized
cuuugcacuugguguugcugg

SEQ ID NO: 17638 - RNA, 21 nt, artificial
  Chemically synthesized
uaaucuagcaacagacguaag

SEQ ID NO: 17639 - RNA, 21 nt, artificial
  Chemically synthesized
aaaggucuuugagguagagcc

SEQ ID NO: 17640 - RNA, 21 nt, artificial
  Chemically synthesized
uccuccauaaauggaaguucu

SEQ ID NO: 17641 - RNA, 21 nt, artificial
  Chemically synthesized
ucauauguuagaugccagagc

SEQ ID NO: 17642 - RNA, 21 nt, artificial
  Chemically synthesized
ucuuccucaauuccaaucccu

SEQ ID NO: 17643 - RNA, 21 nt, artificial
  Chemically synthesized
uugcacuugguguugcuggug

SEQ ID NO: 17644 - RNA, 21 nt, artificial
  Chemically synthesized
aauugcauauacucagaacug

SEQ ID NO: 17645 - RNA, 21 nt, artificial
  Chemically synthesized
ucacuaguaauguccuugagg

SEQ ID NO: 17646 - RNA, 21 nt, artificial
  Chemically synthesized
ucauugacaccauucuuucga

SEQ ID NO: 17647 - RNA, 21 nt, artificial
  Chemically synthesized
uaauguccuugaggaugauag

SEQ ID NO: 17648 - RNA, 21 nt, artificial
  Chemically synthesized
auuucagcaaaaggucauagc

SEQ ID NO: 17649 - RNA, 21 nt, artificial
  Chemically synthesized
uugagcaauccuccgaaguga

SEQ ID NO: 17650 - RNA, 21 nt, artificial
  Chemically synthesized
ucagucacuugggcauuaaca

SEQ ID NO: 17651 - RNA, 21 nt, artificial
  Chemically synthesized
uuuggacgauaaucuagcaac

SEQ ID NO: 17652 - RNA, 21 nt, artificial
  Chemically synthesized
uugacuuagugucaugacucc

SEQ ID NO: 17653 - RNA, 21 nt, artificial
  Chemically synthesized
auaugacaccaauaaacugug

SEQ ID NO: 17654 - RNA, 21 nt, artificial
  Chemically synthesized
aacacuuuuggacgauaaucu

SEQ ID NO: 17655 - RNA, 21 nt, artificial
  Chemically synthesized
uccucaauuccaaucccuugg

SEQ ID NO: 17656 - RNA, 21 nt, artificial
  Chemically synthesized
uugagccaguaaaaugcauac

SEQ ID NO: 17657 - RNA, 21 nt, artificial
  Chemically synthesized
uugaugaaguuuguuuuccca

SEQ ID NO: 17658 - RNA, 21 nt, artificial
  Chemically synthesized
uugaggaugauagucugaauu

SEQ ID NO: 17659 - RNA, 21 nt, artificial
  Chemically synthesized
cuagauuuuaaacauccuugg

SEQ ID NO: 17660 - RNA, 21 nt, artificial
  Chemically synthesized
uaagcugccauuuguagcagg

SEQ ID NO: 17661 - RNA, 21 nt, artificial
  Chemically synthesized
uccauugauucagcaacuugg

SEQ ID NO: 17662 - RNA, 21 nt, artificial
  Chemically synthesized
uggaaguucuuuaggugguuc

SEQ ID NO: 17663 - RNA, 21 nt, artificial
  Chemically synthesized
uccgaagugaaagagcuuccc

SEQ ID NO: 17664 - RNA, 21 nt, artificial
  Chemically synthesized
auugucauucuugaucucauc

SEQ ID NO: 17665 - RNA, 21 nt, artificial
  Chemically synthesized
ucauacgcuucuuucuuucca

SEQ ID NO: 17666 - RNA, 21 nt, artificial
  Chemically synthesized
cuugacuuagugucaugacuc

SEQ ID NO: 17667 - RNA, 21 nt, artificial
  Chemically synthesized
uuggcuucauugacaccauuc

SEQ ID NO: 17668 - RNA, 21 nt, artificial
  Chemically synthesized
uugguguugcuggugagugug

SEQ ID NO: 17669 - RNA, 21 nt, artificial
  Chemically synthesized
uacagccagcuauuaagaauc

SEQ ID NO: 17670 - RNA, 21 nt, artificial
  Chemically synthesized
agucuuccucaauuccaaucc

SEQ ID NO: 17671 - RNA, 21 nt, artificial
  Chemically synthesized
auuuagaggcaaaguggccug

SEQ ID NO: 17672 - RNA, 21 nt, artificial
  Chemically synthesized
gugugcauuccuugaugauuc

SEQ ID NO: 17673 - RNA, 21 nt, artificial
  Chemically synthesized
guuagaugccagagcauaauc

SEQ ID NO: 17674 - RNA, 21 nt, artificial
  Chemically synthesized
cuauuuggguacuuagcaugc

SEQ ID NO: 17675 - RNA, 21 nt, artificial
  Chemically synthesized
uugcuggugagugugcauucc

SEQ ID NO: 17676 - RNA, 21 nt, artificial
  Chemically synthesized
aucauauguuagaugccagag

SEQ ID NO: 17677 - RNA, 21 nt, artificial
  Chemically synthesized
ucugcacucaaauacauauac

SEQ ID NO: 17678 - RNA, 21 nt, artificial
  Chemically synthesized
uaguaucuccaaaccaggcua

SEQ ID NO: 17679 - RNA, 21 nt, artificial
  Chemically synthesized
guuguuuuucacucuagacca

SEQ ID NO: 17680 - RNA, 21 nt, artificial
  Chemically synthesized
ugucacucuugcgcgagauca

SEQ ID NO: 17681 - RNA, 21 nt, artificial
  Chemically synthesized
aauauguuggcucuucagcgc

SEQ ID NO: 17682 - RNA, 21 nt, artificial
  Chemically synthesized
uagcaugccacugcauuuacu

SEQ ID NO: 17683 - RNA, 21 nt, artificial
  Chemically synthesized
ucaaaaugcuuuugaugccug

SEQ ID NO: 17684 - RNA, 21 nt, artificial
  Chemically synthesized
acgauaaucuagcaacagacg

SEQ ID NO: 17685 - RNA, 21 nt, artificial
  Chemically synthesized
uaaucaaugugucauacgcuu

SEQ ID NO: 17686 - RNA, 21 nt, artificial
  Chemically synthesized
auuacgaagcaguugaacuuu

SEQ ID NO: 17687 - RNA, 21 nt, artificial
  Chemically synthesized
gugagugugcauuccuugaug

SEQ ID NO: 17688 - RNA, 21 nt, artificial
  Chemically synthesized
ucuuaaucuuucauccucugc

SEQ ID NO: 17689 - RNA, 21 nt, artificial
  Chemically synthesized
auucuuucgaacaaagccuuu

SEQ ID NO: 17690 - RNA, 21 nt, artificial
  Chemically synthesized
ucacuugggcauuaacacuuu

SEQ ID NO: 17691 - RNA, 21 nt, artificial
  Chemically synthesized
auauguuggcucuucagcgcu

SEQ ID NO: 17692 - RNA, 21 nt, artificial
  Chemically synthesized
uccuuggaggcagaaucauga

SEQ ID NO: 17693 - RNA, 21 nt, artificial
  Chemically synthesized
ucaaugugucauacgcuucuu

SEQ ID NO: 17694 - RNA, 21 nt, artificial
  Chemically synthesized
aaucuuucauccucugcauac

SEQ ID NO: 17695 - RNA, 21 nt, artificial
  Chemically synthesized
ugugcauuccuugaugauucc

SEQ ID NO: 17696 - RNA, 21 nt, artificial
  Chemically synthesized
uaaauggaaguucuuuaggug

SEQ ID NO: 17697 - RNA, 21 nt, artificial
  Chemically synthesized
uccuaaauccagaugaugauu

SEQ ID NO: 17698 - RNA, 21 nt, artificial
  Chemically synthesized
uccuugaugauuccauguuca

SEQ ID NO: 17699 - RNA, 21 nt, artificial
  Chemically synthesized
guuaguaucuccaaaccaggc

SEQ ID NO: 17700 - RNA, 21 nt, artificial
  Chemically synthesized
ucuuugauugcaaacaugggu

SEQ ID NO: 17701 - RNA, 21 nt, artificial
  Chemically synthesized
uccugcucaaaaugcuuuuga

SEQ ID NO: 17702 - RNA, 21 nt, artificial
  Chemically synthesized
uacgcuucuuucuuuccauga

SEQ ID NO: 17703 - RNA, 21 nt, artificial
  Chemically synthesized
uaagaaccagagguaggaggg

SEQ ID NO: 17704 - RNA, 21 nt, artificial
  Chemically synthesized
uuauggcagaauuggccauca

SEQ ID NO: 17705 - RNA, 21 nt, artificial
  Chemically synthesized
ucuuucuuuccaugaaguuga

SEQ ID NO: 17706 - RNA, 21 nt, artificial
  Chemically synthesized
augaaguuuguuuucccaacu

SEQ ID NO: 17707 - RNA, 21 nt, artificial
  Chemically synthesized
uauuuacagccagcuauuaag

SEQ ID NO: 17708 - RNA, 21 nt, artificial
  Chemically synthesized
uuuggcuucauugacaccauu

SEQ ID NO: 17709 - RNA, 21 nt, artificial
  Chemically synthesized
uugccuuuugguggacuauua

SEQ ID NO: 17710 - RNA, 21 nt, artificial
  Chemically synthesized
ucuuuaggugguuccagguau

SEQ ID NO: 17711 - RNA, 21 nt, artificial
  Chemically synthesized
uugcaaacauggguucaugac

SEQ ID NO: 17712 - RNA, 21 nt, artificial
  Chemically synthesized
acuuuuggacgauaaucuagc

SEQ ID NO: 17713 - RNA, 21 nt, artificial
  Chemically synthesized
aaguagguaguuuugagccag

SEQ ID NO: 17714 - RNA, 21 nt, artificial
  Chemically synthesized
aaagccuuuaacuugacuuag

SEQ ID NO: 17715 - RNA, 21 nt, artificial
  Chemically synthesized
uacucagaacugaauuuguug

SEQ ID NO: 17716 - RNA, 21 nt, artificial
  Chemically synthesized
ucacaaagcuacuuucucuga

SEQ ID NO: 17717 - RNA, 21 nt, artificial
  Chemically synthesized
agcaguuaguaucuccaaacc

SEQ ID NO: 17718 - RNA, 21 nt, artificial
  Chemically synthesized
ucaugaugcaggccuuccaag

SEQ ID NO: 17719 - RNA, 21 nt, artificial
  Chemically synthesized
ucaacuguaguaacagucuuc

SEQ ID NO: 17720 - RNA, 21 nt, artificial
  Chemically synthesized
aucaugaugcaggccuuccaa

SEQ ID NO: 17721 - RNA, 21 nt, artificial
  Chemically synthesized
uucuuuaggugguuccaggua

SEQ ID NO: 17722 - RNA, 21 nt, artificial
  Chemically synthesized
aagcucuaguaauacucuccu

SEQ ID NO: 17723 - RNA, 21 nt, artificial
  Chemically synthesized
uuaaucaaugugucauacgcu

SEQ ID NO: 17724 - RNA, 21 nt, artificial
  Chemically synthesized
uaccauugcuauguauaagcu

SEQ ID NO: 17725 - RNA, 21 nt, artificial
  Chemically synthesized
cuuugauugcaaacauggguu

SEQ ID NO: 17726 - RNA, 21 nt, artificial
  Chemically synthesized
uguccuugaggaugauagucu

SEQ ID NO: 17727 - RNA, 21 nt, artificial
  Chemically synthesized
uaauuuagaggcaaaguggcc

SEQ ID NO: 17728 - RNA, 21 nt, artificial
  Chemically synthesized
uuaagaugagcaccaaggcaa

SEQ ID NO: 17729 - RNA, 21 nt, artificial
  Chemically synthesized
aguuaguaucuccaaaccagg

SEQ ID NO: 17730 - RNA, 21 nt, artificial
  Chemically synthesized
acaagagcaauuccuaaaucc

SEQ ID NO: 17731 - RNA, 21 nt, artificial
  Chemically synthesized
ugguuguugagcaauccuccg

SEQ ID NO: 17732 - RNA, 21 nt, artificial
  Chemically synthesized
uuccaaguucugagucucaac

SEQ ID NO: 17733 - RNA, 21 nt, artificial
  Chemically synthesized
uccucugcauacacuccuauu

SEQ ID NO: 17734 - RNA, 21 nt, artificial
  Chemically synthesized
uucuauugauucauagagugg

SEQ ID NO: 17735 - RNA, 21 nt, artificial
  Chemically synthesized
auuucuaagggcagucuugcc

SEQ ID NO: 17736 - RNA, 21 nt, artificial
  Chemically synthesized
augaaguugaugccaauuacg

SEQ ID NO: 17737 - RNA, 21 nt, artificial
  Chemically synthesized
ucuuuccaugaaguugaugcc

SEQ ID NO: 17738 - RNA, 21 nt, artificial
  Chemically synthesized
ucuccugcucaaaaugcuuuu

SEQ ID NO: 17739 - RNA, 21 nt, artificial
  Chemically synthesized
auugcuauguauaagcugcca

SEQ ID NO: 17740 - RNA, 21 nt, artificial
  Chemically synthesized
ugcucaaaaugcuuuugaugc

SEQ ID NO: 17741 - RNA, 21 nt, artificial
  Chemically synthesized
uauguuggcucuucagcgcua

SEQ ID NO: 17742 - RNA, 21 nt, artificial
  Chemically synthesized
aauccagaugaugauuuuacc

SEQ ID NO: 17743 - RNA, 21 nt, artificial
  Chemically synthesized
ugaauuuucugagucacuagu

SEQ ID NO: 17744 - RNA, 21 nt, artificial
  Chemically synthesized
aucuacaaauauguuggcucu

SEQ ID NO: 17745 - RNA, 21 nt, artificial
  Chemically synthesized
uguacccaguaaaaaaccaag

SEQ ID NO: 17746 - RNA, 21 nt, artificial
  Chemically synthesized
cuugaugaaguuuguuuuccc

SEQ ID NO: 17747 - RNA, 21 nt, artificial
  Chemically synthesized
ugggcauuaacacuuuuggac

SEQ ID NO: 17748 - RNA, 21 nt, artificial
  Chemically synthesized
ugcauuuacucuugaugaagu

SEQ ID NO: 17749 - RNA, 21 nt, artificial
  Chemically synthesized
auagucugaauuuucucugca

SEQ ID NO: 17750 - RNA, 21 nt, artificial
  Chemically synthesized
aguaacagucuuccucaauuc

SEQ ID NO: 17751 - RNA, 21 nt, artificial
  Chemically synthesized
cuuaaaucuuagaaacuuggg

SEQ ID NO: 17752 - RNA, 21 nt, artificial
  Chemically synthesized
uuuacagccagcuauuaagaa

SEQ ID NO: 17753 - RNA, 21 nt, artificial
  Chemically synthesized
cagaauuggccaucaugaugc

SEQ ID NO: 17754 - RNA, 21 nt, artificial
  Chemically synthesized
aguugaugccaauuacgaagc

SEQ ID NO: 17755 - RNA, 21 nt, artificial
  Chemically synthesized
uuagugucaugacuccagcaa

SEQ ID NO: 17756 - RNA, 21 nt, artificial
  Chemically synthesized
uggacauugucauucuugauc

SEQ ID NO: 17757 - RNA, 21 nt, artificial
  Chemically synthesized
uaugacaagagcaauuccuaa

SEQ ID NO: 17758 - RNA, 21 nt, artificial
  Chemically synthesized
uacgaagcaguugaacuuucu

SEQ ID NO: 17759 - RNA, 21 nt, artificial
  Chemically synthesized
aaggucuuugagguagagccu

SEQ ID NO: 17760 - RNA, 21 nt, artificial
  Chemically synthesized
aaggucauagcuucuucuauu

SEQ ID NO: 17761 - RNA, 21 nt, artificial
  Chemically synthesized
auaaucuagcaacagacguaa

SEQ ID NO: 17762 - RNA, 21 nt, artificial
  Chemically synthesized
acacuaauugcauauacucag

SEQ ID NO: 17763 - RNA, 21 nt, artificial
  Chemically synthesized
uaaucuuucauccucugcaua

SEQ ID NO: 17764 - RNA, 21 nt, artificial
  Chemically synthesized
auguccuugaggaugauaguc

SEQ ID NO: 17765 - RNA, 21 nt, artificial
  Chemically synthesized
ugugucauacgcuucuuucuu

SEQ ID NO: 17766 - RNA, 21 nt, artificial
  Chemically synthesized
uucagcaaaaggucauagcuu

SEQ ID NO: 17767 - RNA, 21 nt, artificial
  Chemically synthesized
gucaugacuccagcaauagug

SEQ ID NO: 17768 - RNA, 21 nt, artificial
  Chemically synthesized
aucuauuuuggcuucauugac

SEQ ID NO: 17769 - RNA, 21 nt, artificial
  Chemically synthesized
uauuuuggcuucauugacacc

SEQ ID NO: 17770 - RNA, 21 nt, artificial
  Chemically synthesized
aaucccuuggaguugauguca

SEQ ID NO: 17771 - RNA, 21 nt, artificial
  Chemically synthesized
uagaauuucuaagggcagucu

SEQ ID NO: 17772 - RNA, 21 nt, artificial
  Chemically synthesized
uguauaagcugccauuuguag

SEQ ID NO: 17773 - RNA, 21 nt, artificial
  Chemically synthesized
guugcuggugagugugcauuc

SEQ ID NO: 17774 - RNA, 21 nt, artificial
  Chemically synthesized
uuuuaaacauccuuggaggca

SEQ ID NO: 17775 - RNA, 21 nt, artificial
  Chemically synthesized
uucuuucuuuccaugaaguug

SEQ ID NO: 17776 - RNA, 21 nt, artificial
  Chemically synthesized
cugaaguuugaauuuucugag

SEQ ID NO: 17777 - RNA, 21 nt, artificial
  Chemically synthesized
uaauacucuccugcucaaaau

SEQ ID NO: 17778 - RNA, 21 nt, artificial
  Chemically synthesized
auccuuggaggcagaaucaug

SEQ ID NO: 17779 - RNA, 21 nt, artificial
  Chemically synthesized
uucucugcaagaguacaaaga

SEQ ID NO: 17780 - RNA, 21 nt, artificial
  Chemically synthesized
cauaaauggaaguucuuuagg

SEQ ID NO: 17781 - RNA, 21 nt, artificial
  Chemically synthesized
aucaaugugucauacgcuucu

SEQ ID NO: 17782 - RNA, 21 nt, artificial
  Chemically synthesized
aauuucuaagggcagucuugc

SEQ ID NO: 17783 - RNA, 21 nt, artificial
  Chemically synthesized
ugaauuuucucugcaagagua

SEQ ID NO: 17784 - RNA, 21 nt, artificial
  Chemically synthesized
uccaaaccaggcuagaauuuc

SEQ ID NO: 17785 - RNA, 21 nt, artificial
  Chemically synthesized
aaauggaaguucuuuaggugg

SEQ ID NO: 17786 - RNA, 21 nt, artificial
  Chemically synthesized
ugucuuggacauugucauucu

SEQ ID NO: 17787 - RNA, 21 nt, artificial
  Chemically synthesized
cagccaagucacucguaaacc

SEQ ID NO: 17788 - RNA, 21 nt, artificial
  Chemically synthesized
agccaagucacucguaaaccg

SEQ ID NO: 17789 - RNA, 21 nt, artificial
  Chemically synthesized
uuggacgauaaucuagcaaca

SEQ ID NO: 17790 - RNA, 21 nt, artificial
  Chemically synthesized
uugacaccauucuuucgaaca

SEQ ID NO: 17791 - RNA, 21 nt, artificial
  Chemically synthesized
uguugcuggugagugugcauu

SEQ ID NO: 17792 - RNA, 21 nt, artificial
  Chemically synthesized
uuugcacuugguguugcuggu

SEQ ID NO: 17793 - RNA, 21 nt, artificial
  Chemically synthesized
gguaauuuagaggcaaagugg

SEQ ID NO: 17794 - RNA, 21 nt, artificial
  Chemically synthesized
ugauucagcaacuuggccugc

SEQ ID NO: 17795 - RNA, 21 nt, artificial
  Chemically synthesized
ugcaagaguacaaagauuggc

SEQ ID NO: 17796 - RNA, 21 nt, artificial
  Chemically synthesized
aauccuccgaagugaaagagc

SEQ ID NO: 17797 - RNA, 21 nt, artificial
  Chemically synthesized
gacauuauugaacauuuucgg

SEQ ID NO: 17798 - RNA, 21 nt, artificial
  Chemically synthesized
uuuucucugcaagaguacaaa

SEQ ID NO: 17799 - RNA, 21 nt, artificial
  Chemically synthesized
uuuugagccaguaaaaugcau

SEQ ID NO: 17800 - RNA, 21 nt, artificial
  Chemically synthesized
aaucaaugugucauacgcuuc

SEQ ID NO: 17801 - RNA, 21 nt, artificial
  Chemically synthesized
cuaguaauacucuccugcuca

SEQ ID NO: 17802 - RNA, 21 nt, artificial
  Chemically synthesized
uucgaacaaagccuuuaacuu

SEQ ID NO: 17803 - RNA, 21 nt, artificial
  Chemically synthesized
ugcaaaggucuuugagguaga

SEQ ID NO: 17804 - RNA, 21 nt, artificial
  Chemically synthesized
aucuuaaucuuucauccucug

SEQ ID NO: 17805 - RNA, 21 nt, artificial
  Chemically synthesized
gauuuuaaacauccuuggagg

SEQ ID NO: 17806 - RNA, 21 nt, artificial
  Chemically synthesized
aaaccaagcaguauuuacagc

SEQ ID NO: 17807 - RNA, 21 nt, artificial
  Chemically synthesized
uacuuagcaugccacugcauu

SEQ ID NO: 17808 - RNA, 21 nt, artificial
  Chemically synthesized
ucuccaaaccaggcuagaauu

SEQ ID NO: 17809 - RNA, 21 nt, artificial
  Chemically synthesized
aaaaauggagagguggcaaag

SEQ ID NO: 17810 - RNA, 21 nt, artificial
  Chemically synthesized
uuucuuuccaugaaguugaug

SEQ ID NO: 17811 - RNA, 21 nt, artificial
  Chemically synthesized
uguuuuucacucuagaccaag

SEQ ID NO: 17812 - RNA, 21 nt, artificial
  Chemically synthesized
auuccuaaauccagaugauga

SEQ ID NO: 17813 - RNA, 21 nt, artificial
  Chemically synthesized
auuuuggcuucauugacacca

SEQ ID NO: 17814 - RNA, 21 nt, artificial
  Chemically synthesized
cuguucaguaacugauauuuc

SEQ ID NO: 17815 - RNA, 21 nt, artificial
  Chemically synthesized
ccaacuagauuuuaaacaucc

SEQ ID NO: 17816 - RNA, 21 nt, artificial
  Chemically synthesized
uaguaacagucuuccucaauu

SEQ ID NO: 17817 - RNA, 21 nt, artificial
  Chemically synthesized
ucuuugagguagagccuuauu

SEQ ID NO: 17818 - RNA, 21 nt, artificial
  Chemically synthesized
ucugagagcaguuaguaucuc

SEQ ID NO: 17819 - RNA, 21 nt, artificial
  Chemically synthesized
cauagcuucuucuauugauuc

SEQ ID NO: 17820 - RNA, 21 nt, artificial
  Chemically synthesized
uugcuauguauaagcugccau

SEQ ID NO: 17821 - RNA, 21 nt, artificial
  Chemically synthesized
aguaucuccaaaccaggcuag

SEQ ID NO: 17822 - RNA, 21 nt, artificial
  Chemically synthesized
aaagcucuaguaauacucucc

SEQ ID NO: 17823 - RNA, 21 nt, artificial
  Chemically synthesized
ccuuauuuaaauucugcacuc

SEQ ID NO: 17824 - RNA, 21 nt, artificial
  Chemically synthesized
agagccuuauuuaaauucugc

SEQ ID NO: 17825 - RNA, 21 nt, artificial
  Chemically synthesized
gugcaaaggucuuugagguag

SEQ ID NO: 17826 - RNA, 21 nt, artificial
  Chemically synthesized
uaguuuugagccaguaaaaug

SEQ ID NO: 17827 - RNA, 21 nt, artificial
  Chemically synthesized
ucacucuugcgcgagaucaga

SEQ ID NO: 17828 - RNA, 21 nt, artificial
  Chemically synthesized
cuggugagugugcauuccuug

SEQ ID NO: 17829 - RNA, 21 nt, artificial
  Chemically synthesized
caugguuguugagcaauccuc

SEQ ID NO: 17830 - RNA, 21 nt, artificial
  Chemically synthesized
uagaccaagcuuuggauuuca

SEQ ID NO: 17831 - RNA, 21 nt, artificial
  Chemically synthesized
ccaaguucugagucucaacug

SEQ ID NO: 17832 - RNA, 21 nt, artificial
  Chemically synthesized
uuuuggacgauaaucuagcaa

SEQ ID NO: 17833 - RNA, 21 nt, artificial
  Chemically synthesized
agcucuaguaauacucuccug

SEQ ID NO: 17834 - RNA, 21 nt, artificial
  Chemically synthesized
cuuucauccucugcauacacu

SEQ ID NO: 17835 - RNA, 21 nt, artificial
  Chemically synthesized
augccacugcauuuacucuug

SEQ ID NO: 17836 - RNA, 21 nt, artificial
  Chemically synthesized
uugauugcaaacauggguuca

SEQ ID NO: 17837 - RNA, 21 nt, artificial
  Chemically synthesized
ucucaacuguaguaacagucu

SEQ ID NO: 17838 - RNA, 21 nt, artificial
  Chemically synthesized
ugaacuuucuguucugcugug

SEQ ID NO: 17839 - RNA, 21 nt, artificial
  Chemically synthesized
aaauggagagguggcaaagcu

SEQ ID NO: 17840 - RNA, 21 nt, artificial
  Chemically synthesized
cuauguauaagcugccauuug

SEQ ID NO: 17841 - RNA, 21 nt, artificial
  Chemically synthesized
uuucagcaaaaggucauagcu

SEQ ID NO: 17842 - RNA, 21 nt, artificial
  Chemically synthesized
ucuauugauucauagaguggg

SEQ ID NO: 17843 - RNA, 21 nt, artificial
  Chemically synthesized
uuggcucuucagcgcuaauaa

SEQ ID NO: 17844 - RNA, 21 nt, artificial
  Chemically synthesized
uggcaaagcucuaguaauacu

SEQ ID NO: 17845 - RNA, 21 nt, artificial
  Chemically synthesized
guacccaguaaaaaaccaagc

SEQ ID NO: 17846 - RNA, 21 nt, artificial
  Chemically synthesized
aagagcaauuccuaaauccag

SEQ ID NO: 17847 - RNA, 21 nt, artificial
  Chemically synthesized
aucccuuggaguugaugucag

SEQ ID NO: 17848 - RNA, 21 nt, artificial
  Chemically synthesized
aucuuugauugcaaacauggg

SEQ ID NO: 17849 - RNA, 21 nt, artificial
  Chemically synthesized
auggagagguggcaaagcucu

SEQ ID NO: 17850 - RNA, 21 nt, artificial
  Chemically synthesized
uuugaacaccugugugucacu

SEQ ID NO: 17851 - RNA, 21 nt, artificial
  Chemically synthesized
agcaauuccuaaauccagaug

SEQ ID NO: 17852 - RNA, 21 nt, artificial
  Chemically synthesized
cuugggcauuaacacuuuugg

SEQ ID NO: 17853 - RNA, 21 nt, artificial
  Chemically synthesized
ugagcaccaaggcaaaaaugg

SEQ ID NO: 17854 - RNA, 21 nt, artificial
  Chemically synthesized
acugugcaaaggucuuugagg

SEQ ID NO: 17855 - RNA, 21 nt, artificial
  Chemically synthesized
ucaucuuugauugcaaacaug

SEQ ID NO: 17856 - RNA, 21 nt, artificial
  Chemically synthesized
ucuuucgaacaaagccuuuaa

SEQ ID NO: 17857 - RNA, 21 nt, artificial
  Chemically synthesized
aacauccuuggaggcagaauc

SEQ ID NO: 17858 - RNA, 21 nt, artificial
  Chemically synthesized
aguugaugucagucacuuggg

SEQ ID NO: 17859 - RNA, 21 nt, artificial
  Chemically synthesized
acaccugugugucacucuugc

SEQ ID NO: 17860 - RNA, 21 nt, artificial
  Chemically synthesized
ugaaguugaugccaauuacga

SEQ ID NO: 17861 - RNA, 21 nt, artificial
  Chemically synthesized
gucacaaagcuacuuucucug

SEQ ID NO: 17862 - RNA, 21 nt, artificial
  Chemically synthesized
cauuuguacuaacauacacug

SEQ ID NO: 17863 - RNA, 21 nt, artificial
  Chemically synthesized
acuuucucugagagcaguuag

SEQ ID NO: 17864 - RNA, 21 nt, artificial
  Chemically synthesized
aaaauccuccauaaauggaag

SEQ ID NO: 17865 - RNA, 21 nt, artificial
  Chemically synthesized
ugagucucaacuguaguaaca

SEQ ID NO: 17866 - RNA, 21 nt, artificial
  Chemically synthesized
auuggccaucaugaugcaggc

SEQ ID NO: 17867 - RNA, 21 nt, artificial
  Chemically synthesized
cuacaaauauguuggcucuuc

SEQ ID NO: 17868 - RNA, 21 nt, artificial
  Chemically synthesized
acaccauucuuucgaacaaag

SEQ ID NO: 17869 - RNA, 21 nt, artificial
  Chemically synthesized
uggaguugaugucagucacuu

SEQ ID NO: 17870 - RNA, 21 nt, artificial
  Chemically synthesized
cuccgaagugaaagagcuucc

SEQ ID NO: 17871 - RNA, 21 nt, artificial
  Chemically synthesized
uuaggccauuaagaugagcac

SEQ ID NO: 17872 - RNA, 21 nt, artificial
  Chemically synthesized
acuugggcauuaacacuuuug

SEQ ID NO: 17873 - RNA, 21 nt, artificial
  Chemically synthesized
uugaugucagucacuugggca

SEQ ID NO: 17874 - RNA, 21 nt, artificial
  Chemically synthesized
cuuuccaugaaguugaugcca

SEQ ID NO: 17875 - RNA, 21 nt, artificial
  Chemically synthesized
aaugcuuuugaugccugagaa

SEQ ID NO: 17876 - RNA, 21 nt, artificial
  Chemically synthesized
uucugagucucaacuguagua

SEQ ID NO: 17877 - RNA, 21 nt, artificial
  Chemically synthesized
uagugucaugacuccagcaau

SEQ ID NO: 17878 - RNA, 21 nt, artificial
  Chemically synthesized
caagcuuuggauuucauuucu

SEQ ID NO: 17879 - RNA, 21 nt, artificial
  Chemically synthesized
uacccaguaaaaaaccaagca

SEQ ID NO: 17880 - RNA, 21 nt, artificial
  Chemically synthesized
auacacuccuauuuggguacu

SEQ ID NO: 17881 - RNA, 21 nt, artificial
  Chemically synthesized
augacaugucacaaagcuacu

SEQ ID NO: 17882 - RNA, 21 nt, artificial
  Chemically synthesized
gcaaaaggucauagcuucuuc

SEQ ID NO: 17883 - RNA, 21 nt, artificial
  Chemically synthesized
uucucugagagcaguuaguau

SEQ ID NO: 17884 - RNA, 21 nt, artificial
  Chemically synthesized
gggcauuaacacuuuuggacg

SEQ ID NO: 17885 - RNA, 21 nt, artificial
  Chemically synthesized
auguauaagcugccauuugua

SEQ ID NO: 17886 - RNA, 21 nt, artificial
  Chemically synthesized
cuuuaaucaaugugucauacg

SEQ ID NO: 17887 - RNA, 21 nt, artificial
  Chemically synthesized
uggguacuuagcaugccacug

SEQ ID NO: 17888 - RNA, 21 nt, artificial
  Chemically synthesized
uucuuucgaacaaagccuuua

SEQ ID NO: 17889 - RNA, 21 nt, artificial
  Chemically synthesized
uugcauauacucagaacugaa

SEQ ID NO: 17890 - RNA, 21 nt, artificial
  Chemically synthesized
uauuuggguacuuagcaugcc

SEQ ID NO: 17891 - RNA, 21 nt, artificial
  Chemically synthesized
aaguucuuuaggugguuccag

SEQ ID NO: 17892 - RNA, 21 nt, artificial
  Chemically synthesized
caacuguaguaacagucuucc

SEQ ID NO: 17893 - RNA, 21 nt, artificial
  Chemically synthesized
ugauauuucagcaaaagguca

SEQ ID NO: 17894 - RNA, 21 nt, artificial
  Chemically synthesized
uguaguaacagucuuccucaa

SEQ ID NO: 17895 - RNA, 21 nt, artificial
  Chemically synthesized
auuuuaaacauccuuggaggc

SEQ ID NO: 17896 - RNA, 21 nt, artificial
  Chemically synthesized
auuccaaucccuuggaguuga

SEQ ID NO: 17897 - RNA, 21 nt, artificial
  Chemically synthesized
guaagaaccagagguaggagg

SEQ ID NO: 17898 - RNA, 21 nt, artificial
  Chemically synthesized
accaggcuagaauuucuaagg

SEQ ID NO: 17899 - RNA, 21 nt, artificial
  Chemically synthesized
auuccuugaugauuccauguu

SEQ ID NO: 17900 - RNA, 21 nt, artificial
  Chemically synthesized
uuugagccaguaaaaugcaua

SEQ ID NO: 17901 - RNA, 21 nt, artificial
  Chemically synthesized
agaauuucuaagggcagucuu

SEQ ID NO: 17902 - RNA, 21 nt, artificial
  Chemically synthesized
agagcaauuccuaaauccaga

SEQ ID NO: 17903 - RNA, 21 nt, artificial
  Chemically synthesized
uaguaauguccuugaggauga

SEQ ID NO: 17904 - RNA, 21 nt, artificial
  Chemically synthesized
uuguuuuucacucuagaccaa

SEQ ID NO: 17905 - RNA, 21 nt, artificial
  Chemically synthesized
cuuucgaacaaagccuuuaac

SEQ ID NO: 17906 - RNA, 21 nt, artificial
  Chemically synthesized
ugaggaugauagucugaauuu

SEQ ID NO: 17907 - RNA, 21 nt, artificial
  Chemically synthesized
aggugguuccagguaucugcu

SEQ ID NO: 17908 - RNA, 21 nt, artificial
  Chemically synthesized
accauucuuucgaacaaagcc

SEQ ID NO: 17909 - RNA, 21 nt, artificial
  Chemically synthesized
auuuucucugcaagaguacaa

SEQ ID NO: 17910 - RNA, 21 nt, artificial
  Chemically synthesized
aagcgucuuugaacaccugug

SEQ ID NO: 17911 - RNA, 21 nt, artificial
  Chemically synthesized
uguucugcugugucuuggaca

SEQ ID NO: 17912 - RNA, 21 nt, artificial
  Chemically synthesized
acuuucuguucugcugugucu

SEQ ID NO: 17913 - RNA, 21 nt, artificial
  Chemically synthesized
caaagcucuaguaauacucuc

SEQ ID NO: 17914 - RNA, 21 nt, artificial
  Chemically synthesized
acuguaguaacagucuuccuc

SEQ ID NO: 17915 - RNA, 21 nt, artificial
  Chemically synthesized
uccagcaauaguggugauaua

SEQ ID NO: 17916 - RNA, 21 nt, artificial
  Chemically synthesized
ugcacuugguguugcugguga

SEQ ID NO: 17917 - RNA, 21 nt, artificial
  Chemically synthesized
guaacagucuuccucaauucc

SEQ ID NO: 17918 - RNA, 21 nt, artificial
  Chemically synthesized
cuguaguaacagucuuccuca

SEQ ID NO: 17919 - RNA, 21 nt, artificial
  Chemically synthesized
ucuagcaacagacguaagaac

SEQ ID NO: 17920 - RNA, 21 nt, artificial
  Chemically synthesized
gucuuccucaauuccaauccc

SEQ ID NO: 17921 - RNA, 21 nt, artificial
  Chemically synthesized
cugugcaaaggucuuugaggu

SEQ ID NO: 17922 - RNA, 21 nt, artificial
  Chemically synthesized
ugucaugacuccagcaauagu

SEQ ID NO: 17923 - RNA, 21 nt, artificial
  Chemically synthesized
agccuuauuuaaauucugcac

SEQ ID NO: 17924 - RNA, 21 nt, artificial
  Chemically synthesized
acauuauugaacauuuucggg

SEQ ID NO: 17925 - RNA, 21 nt, artificial
  Chemically synthesized
acaccaauaaacugugcaaag

SEQ ID NO: 17926 - RNA, 21 nt, artificial
  Chemically synthesized
auggguucaugacaugucaca

SEQ ID NO: 17927 - RNA, 21 nt, artificial
  Chemically synthesized
ucuuugcacuugguguugcug

SEQ ID NO: 17928 - RNA, 21 nt, artificial
  Chemically synthesized
cauucuuucgaacaaagccuu

SEQ ID NO: 17929 - RNA, 21 nt, artificial
  Chemically synthesized
cucuugaugaaguuuguuuuc

SEQ ID NO: 17930 - RNA, 21 nt, artificial
  Chemically synthesized
aaacguaggauaguaguaagg

SEQ ID NO: 17931 - RNA, 21 nt, artificial
  Chemically synthesized
agguaauuuagaggcaaagug

SEQ ID NO: 17932 - RNA, 21 nt, artificial
  Chemically synthesized
ccauuaagaugagcaccaagg

SEQ ID NO: 17933 - RNA, 21 nt, artificial
  Chemically synthesized
ugcuuuugaugccugagaaag

SEQ ID NO: 17934 - RNA, 21 nt, artificial
  Chemically synthesized
uggcagaauuggccaucauga

SEQ ID NO: 17935 - RNA, 21 nt, artificial
  Chemically synthesized
uuacagccagcuauuaagaau

SEQ ID NO: 17936 - RNA, 21 nt, artificial
  Chemically synthesized
uagaugccagagcauaaucuu

SEQ ID NO: 17937 - RNA, 21 nt, artificial
  Chemically synthesized
cugcacucaaauacauauacu

SEQ ID NO: 17938 - RNA, 21 nt, artificial
  Chemically synthesized
auccucugcauacacuccuau

SEQ ID NO: 17939 - RNA, 21 nt, artificial
  Chemically synthesized
aucagagacgagcucacgaaa

SEQ ID NO: 17940 - RNA, 21 nt, artificial
  Chemically synthesized
aaaaggucauagcuucuucua

SEQ ID NO: 17941 - RNA, 21 nt, artificial
  Chemically synthesized
acuugguguugcuggugagug

SEQ ID NO: 17942 - RNA, 21 nt, artificial
  Chemically synthesized
aauuggccaucaugaugcagg

SEQ ID NO: 17943 - RNA, 21 nt, artificial
  Chemically synthesized
cuccauugauucagcaacuug

SEQ ID NO: 17944 - RNA, 21 nt, artificial
  Chemically synthesized
ucugagucucaacuguaguaa

SEQ ID NO: 17945 - RNA, 21 nt, artificial
  Chemically synthesized
uuccucuuugcacuugguguu

SEQ ID NO: 17946 - RNA, 21 nt, artificial
  Chemically synthesized
aaguugaugccaauuacgaag

SEQ ID NO: 17947 - RNA, 21 nt, artificial
  Chemically synthesized
auaaacugugcaaaggucuuu

SEQ ID NO: 17948 - RNA, 21 nt, artificial
  Chemically synthesized
guaauuuagaggcaaaguggc

SEQ ID NO: 17949 - RNA, 21 nt, artificial
  Chemically synthesized
acaaauauguuggcucuucag

SEQ ID NO: 17950 - RNA, 21 nt, artificial
  Chemically synthesized
uauguuagaugccagagcaua

SEQ ID NO: 17951 - RNA, 21 nt, artificial
  Chemically synthesized
ugccaauuacgaagcaguuga

SEQ ID NO: 17952 - RNA, 21 nt, artificial
  Chemically synthesized
agcgucuuugaacaccugugu

SEQ ID NO: 17953 - RNA, 21 nt, artificial
  Chemically synthesized
aucagagguaauuuagaggca

SEQ ID NO: 17954 - RNA, 21 nt, artificial
  Chemically synthesized
agucacuaguaauguccuuga

SEQ ID NO: 17955 - RNA, 21 nt, artificial
  Chemically synthesized
auccuccgaagugaaagagcu

SEQ ID NO: 17956 - RNA, 21 nt, artificial
  Chemically synthesized
aagcaguugaacuuucuguuc

SEQ ID NO: 17957 - RNA, 21 nt, artificial
  Chemically synthesized
cugauauuucagcaaaagguc

SEQ ID NO: 17958 - RNA, 21 nt, artificial
  Chemically synthesized
ugacaagagcaauuccuaaau

SEQ ID NO: 17959 - RNA, 21 nt, artificial
  Chemically synthesized
cuauuuuggcuucauugacac

SEQ ID NO: 17960 - RNA, 21 nt, artificial
  Chemically synthesized
acuccuauuuggguacuuagc

SEQ ID NO: 17961 - RNA, 21 nt, artificial
  Chemically synthesized
auccagaugaugauuuuacca

SEQ ID NO: 17962 - RNA, 21 nt, artificial
  Chemically synthesized
auugcauauacucagaacuga

SEQ ID NO: 17963 - RNA, 21 nt, artificial
  Chemically synthesized
acacuuuuggacgauaaucua

SEQ ID NO: 17964 - RNA, 21 nt, artificial
  Chemically synthesized
aggauaguaguaaggagaauc

SEQ ID NO: 17965 - RNA, 21 nt, artificial
  Chemically synthesized
cuaauugcauauacucagaac

SEQ ID NO: 17966 - RNA, 21 nt, artificial
  Chemically synthesized
gguucaugacaugucacaaag

SEQ ID NO: 17967 - RNA, 21 nt, artificial
  Chemically synthesized
cugagagcaguuaguaucucc

SEQ ID NO: 17968 - RNA, 21 nt, artificial
  Chemically synthesized
aggucauagcuucuucuauug

SEQ ID NO: 17969 - RNA, 21 nt, artificial
  Chemically synthesized
acauccuuggaggcagaauca

SEQ ID NO: 17970 - RNA, 21 nt, artificial
  Chemically synthesized
cagucuuccucaauuccaauc

SEQ ID NO: 17971 - RNA, 21 nt, artificial
  Chemically synthesized
auccuccauaaauggaaguuc

SEQ ID NO: 17972 - RNA, 21 nt, artificial
  Chemically synthesized
ugagccaguaaaaugcauaca

SEQ ID NO: 17973 - RNA, 21 nt, artificial
  Chemically synthesized
agggcuuauggcagaauuggc

SEQ ID NO: 17974 - RNA, 21 nt, artificial
  Chemically synthesized
ucugaauuuucucugcaagag

SEQ ID NO: 17975 - RNA, 21 nt, artificial
  Chemically synthesized
cuuuaggugguuccagguauc

SEQ ID NO: 17976 - RNA, 21 nt, artificial
  Chemically synthesized
acaugucacaaagcuacuuuc

SEQ ID NO: 17977 - RNA, 21 nt, artificial
  Chemically synthesized
ucuguucugcugugucuugga

SEQ ID NO: 17978 - RNA, 21 nt, artificial
  Chemically synthesized
uccagaugaugauuuuaccau

SEQ ID NO: 17979 - RNA, 21 nt, artificial
  Chemically synthesized
ugcuggugagugugcauuccu

SEQ ID NO: 17980 - RNA, 21 nt, artificial
  Chemically synthesized
cucuaguaauacucuccugcu

SEQ ID NO: 17981 - RNA, 21 nt, artificial
  Chemically synthesized
uggauagacauuuguacuaac

SEQ ID NO: 17982 - RNA, 21 nt, artificial
  Chemically synthesized
gaucucaucuauuuuggcuuc

SEQ ID NO: 17983 - RNA, 21 nt, artificial
  Chemically synthesized
acagccagcuauuaagaaucu

SEQ ID NO: 17984 - RNA, 21 nt, artificial
  Chemically synthesized
cuuugaacaccugugugucac

SEQ ID NO: 17985 - RNA, 21 nt, artificial
  Chemically synthesized
ugaugaaguuuguuuucccaa

SEQ ID NO: 17986 - RNA, 21 nt, artificial
  Chemically synthesized
aacuuucuguucugcuguguc

SEQ ID NO: 17987 - RNA, 21 nt, artificial
  Chemically synthesized
aaccaggcuagaauuucuaag

SEQ ID NO: 17988 - RNA, 21 nt, artificial
  Chemically synthesized
uguugagcaauccuccgaagu

SEQ ID NO: 17989 - RNA, 21 nt, artificial
  Chemically synthesized
augacaagagcaauuccuaaa

SEQ ID NO: 17990 - RNA, 21 nt, artificial
  Chemically synthesized
aaaauggagagguggcaaagc

SEQ ID NO: 17991 - RNA, 21 nt, artificial
  Chemically synthesized
cuuagugucaugacuccagca

SEQ ID NO: 17992 - RNA, 21 nt, artificial
  Chemically synthesized
ugccagagcauaaucuuaauc

SEQ ID NO: 17993 - RNA, 21 nt, artificial
  Chemically synthesized
gagaucuuuaaucaauguguc

SEQ ID NO: 17994 - RNA, 21 nt, artificial
  Chemically synthesized
agcaacagacguaagaaccag

SEQ ID NO: 17995 - RNA, 21 nt, artificial
  Chemically synthesized
cugagucacuaguaauguccu

SEQ ID NO: 17996 - RNA, 21 nt, artificial
  Chemically synthesized
uccuauuuggguacuuagcau

SEQ ID NO: 17997 - RNA, 21 nt, artificial
  Chemically synthesized
agaaucauauguuagaugcca

SEQ ID NO: 17998 - RNA, 21 nt, artificial
  Chemically synthesized
auugcaaacauggguucauga

SEQ ID NO: 17999 - RNA, 21 nt, artificial
  Chemically synthesized
ugccuguucaguaacugauau

SEQ ID NO: 18000 - RNA, 21 nt, artificial
  Chemically synthesized
aagggcagucuugccuuuugg

SEQ ID NO: 18001 - RNA, 21 nt, artificial
  Chemically synthesized
ccucuuugcacuugguguugc

SEQ ID NO: 18002 - RNA, 21 nt, artificial
  Chemically synthesized
aagcuuuggauuucauuucug

SEQ ID NO: 18003 - RNA, 21 nt, artificial
  Chemically synthesized
gacaagagcaauuccuaaauc

SEQ ID NO: 18004 - RNA, 21 nt, artificial
  Chemically synthesized
ggacauugucauucuugaucu

SEQ ID NO: 18005 - RNA, 21 nt, artificial
  Chemically synthesized
cuuugagguagagccuuauuu

SEQ ID NO: 18006 - RNA, 21 nt, artificial
  Chemically synthesized
aacaccugugugucacucuug

SEQ ID NO: 18007 - RNA, 21 nt, artificial
  Chemically synthesized
aaucuacaaauauguuggcuc

SEQ ID NO: 18008 - RNA, 21 nt, artificial
  Chemically synthesized
cuuucuguucugcugugucuu

SEQ ID NO: 18009 - RNA, 21 nt, artificial
  Chemically synthesized
uugagguagagccuuauuuaa

SEQ ID NO: 18010 - RNA, 21 nt, artificial
  Chemically synthesized
uccagguaucugcuucaguuu

SEQ ID NO: 18011 - RNA, 21 nt, artificial
  Chemically synthesized
ugugucuuggacauugucauu

SEQ ID NO: 18012 - RNA, 21 nt, artificial
  Chemically synthesized
aacugauauuucagcaaaagg

SEQ ID NO: 18013 - RNA, 21 nt, artificial
  Chemically synthesized
ugaucucaucuauuuuggcuu

SEQ ID NO: 18014 - RNA, 21 nt, artificial
  Chemically synthesized
ugacuuagugucaugacucca

SEQ ID NO: 18015 - RNA, 21 nt, artificial
  Chemically synthesized
uuuuggcuucauugacaccau

SEQ ID NO: 18016 - RNA, 21 nt, artificial
  Chemically synthesized
ugugcaaaggucuuugaggua

SEQ ID NO: 18017 - RNA, 23 nt, artificial
  Chemically synthesized
ccaaaaaauacuuaauaguccac

SEQ ID NO: 18018 - RNA, 23 nt, artificial
  Chemically synthesized
ggaugaaagauuaagauuaugcu

SEQ ID NO: 18019 - RNA, 23 nt, artificial
  Chemically synthesized
gacacauugauuaaagaucucaa

SEQ ID NO: 18020 - RNA, 23 nt, artificial
  Chemically synthesized
gaagauaguuauaaacugaagca

SEQ ID NO: 18021 - RNA, 23 nt, artificial
  Chemically synthesized
cugugaagauaguuauaaacuga

SEQ ID NO: 18022 - RNA, 23 nt, artificial
  Chemically synthesized
gaaaauucagacuaucauccuca

SEQ ID NO: 18023 - RNA, 23 nt, artificial
  Chemically synthesized
gcuuuucgugagcucgucucuga

SEQ ID NO: 18024 - RNA, 23 nt, artificial
  Chemically synthesized
gagugaaaaacaacaaauucagu

SEQ ID NO: 18025 - RNA, 23 nt, artificial
  Chemically synthesized
gguuuacgagugacuuggcugga

SEQ ID NO: 18026 - RNA, 23 nt, artificial
  Chemically synthesized
uguuaaugcccaagugacugaca

SEQ ID NO: 18027 - RNA, 23 nt, artificial
  Chemically synthesized
caccaaaaaauacuuaauagucc

SEQ ID NO: 18028 - RNA, 23 nt, artificial
  Chemically synthesized
gaacuuccauuuauggaggauuu

SEQ ID NO: 18029 - RNA, 23 nt, artificial
  Chemically synthesized
guucaacugcuucguaauuggca

SEQ ID NO: 18030 - RNA, 23 nt, artificial
  Chemically synthesized
caucaaggaaugcacacucacca

SEQ ID NO: 18031 - RNA, 23 nt, artificial
  Chemically synthesized
acuagagcuuugccaccucucca

SEQ ID NO: 18032 - RNA, 23 nt, artificial
  Chemically synthesized
cuuccauuuauggaggauuuuuu

SEQ ID NO: 18033 - RNA, 23 nt, artificial
  Chemically synthesized
guaugacacauugauuaaagauc

SEQ ID NO: 18034 - RNA, 23 nt, artificial
  Chemically synthesized
caaaaaauacuuaauaguccacc

SEQ ID NO: 18035 - RNA, 23 nt, artificial
  Chemically synthesized
agaacuuccauuuauggaggauu

SEQ ID NO: 18036 - RNA, 23 nt, artificial
  Chemically synthesized
cuuuguucgaaagaaugguguca

SEQ ID NO: 18037 - RNA, 23 nt, artificial
  Chemically synthesized
cuaacauaugauucuguaguaug

SEQ ID NO: 18038 - RNA, 23 nt, artificial
  Chemically synthesized
gugaagauaguuauaaacugaag

SEQ ID NO: 18039 - RNA, 23 nt, artificial
  Chemically synthesized
cuuggugcucaucuuaauggccu

SEQ ID NO: 18040 - RNA, 23 nt, artificial
  Chemically synthesized
gugacaugucaugaacccauguu

SEQ ID NO: 18041 - RNA, 23 nt, artificial
  Chemically synthesized
aagaauggugucaaugaagccaa

SEQ ID NO: 18042 - RNA, 23 nt, artificial
  Chemically synthesized
aaauaucaguuacugaacaggca

SEQ ID NO: 18043 - RNA, 23 nt, artificial
  Chemically synthesized
cccuuagaaauucuagccugguu

SEQ ID NO: 18044 - RNA, 23 nt, artificial
  Chemically synthesized
caucuaacauaugauucuguagu

SEQ ID NO: 18045 - RNA, 23 nt, artificial
  Chemically synthesized
aauuuaaauaaggcucuaccuca

SEQ ID NO: 18046 - RNA, 23 nt, artificial
  Chemically synthesized
agauuuaagauucuccuuacuac

SEQ ID NO: 18047 - RNA, 23 nt, artificial
  Chemically synthesized
aaauucaguucugaguauaugca

SEQ ID NO: 18048 - RNA, 23 nt, artificial
  Chemically synthesized
gaaauaucaguuacugaacaggc

SEQ ID NO: 18049 - RNA, 23 nt, artificial
  Chemically synthesized
cuaagauuuaagauucuccuuac

SEQ ID NO: 18050 - RNA, 23 nt, artificial
  Chemically synthesized
gcagaacagaaaguucaacugcu

SEQ ID NO: 18051 - RNA, 23 nt, artificial
  Chemically synthesized
uguaaucaguguauguuaguaca

SEQ ID NO: 18052 - RNA, 23 nt, artificial
  Chemically synthesized
uuugugacaugucaugaacccau

SEQ ID NO: 18053 - RNA, 23 nt, artificial
  Chemically synthesized
caagagugacacacagguguuca

SEQ ID NO: 18054 - RNA, 23 nt, artificial
  Chemically synthesized
ugacaugucaugaacccauguuu

SEQ ID NO: 18055 - RNA, 23 nt, artificial
  Chemically synthesized
acacuaagucaaguuaaaggcuu

SEQ ID NO: 18056 - RNA, 23 nt, artificial
  Chemically synthesized
cagaacagaaaguucaacugcuu

SEQ ID NO: 18057 - RNA, 23 nt, artificial
  Chemically synthesized
gaagcagauaccuggaaccaccu

SEQ ID NO: 18058 - RNA, 23 nt, artificial
  Chemically synthesized
ugacacauugauuaaagaucuca

SEQ ID NO: 18059 - RNA, 23 nt, artificial
  Chemically synthesized
uuuguucgaaagaauggugucaa

SEQ ID NO: 18060 - RNA, 23 nt, artificial
  Chemically synthesized
guuaaugcccaagugacugacau

SEQ ID NO: 18061 - RNA, 23 nt, artificial
  Chemically synthesized
gauuaagauuaugcucuggcauc

SEQ ID NO: 18062 - RNA, 23 nt, artificial
  Chemically synthesized
aaagaacuuccauuuauggagga

SEQ ID NO: 18063 - RNA, 23 nt, artificial
  Chemically synthesized
caaggauguuuaaaaucuaguug

SEQ ID NO: 18064 - RNA, 23 nt, artificial
  Chemically synthesized
cuccauuuuugccuuggugcuca

SEQ ID NO: 18065 - RNA, 23 nt, artificial
  Chemically synthesized
aaacuucaucaagaguaaaugca

SEQ ID NO: 18066 - RNA, 23 nt, artificial
  Chemically synthesized
cugcucucagagaaaguagcuuu

SEQ ID NO: 18067 - RNA, 23 nt, artificial
  Chemically synthesized
aagauucuuaauagcuggcugua

SEQ ID NO: 18068 - RNA, 23 nt, artificial
  Chemically synthesized
acucagaacuuggaaggccugca

SEQ ID NO: 18069 - RNA, 23 nt, artificial
  Chemically synthesized
auuuauuagcgcugaagagccaa

SEQ ID NO: 18070 - RNA, 23 nt, artificial
  Chemically synthesized
aaugucccauguaaaaccugcua

SEQ ID NO: 18071 - RNA, 23 nt, artificial
  Chemically synthesized
caugucaugaacccauguuugca

SEQ ID NO: 18072 - RNA, 23 nt, artificial
  Chemically synthesized
guaaucaguguauguuaguacaa

SEQ ID NO: 18073 - RNA, 23 nt, artificial
  Chemically synthesized
aagauuaagauuaugcucuggca

SEQ ID NO: 18074 - RNA, 23 nt, artificial
  Chemically synthesized
uaauaguccaccaaaaggcaaga

SEQ ID NO: 18075 - RNA, 23 nt, artificial
  Chemically synthesized
ccaaaaggcaagacugcccuuag

SEQ ID NO: 18076 - RNA, 23 nt, artificial
  Chemically synthesized
guaaauguaaacugugaagauag

SEQ ID NO: 18077 - RNA, 23 nt, artificial
  Chemically synthesized
uaaugucccauguaaaaccugcu

SEQ ID NO: 18078 - RNA, 23 nt, artificial
  Chemically synthesized
aauccaaagcuuggucuagagug

SEQ ID NO: 18079 - RNA, 23 nt, artificial
  Chemically synthesized
accuuugcacaguuuauuggugu

SEQ ID NO: 18080 - RNA, 23 nt, artificial
  Chemically synthesized
gaaaagauucuuaauagcuggcu

SEQ ID NO: 18081 - RNA, 23 nt, artificial
  Chemically synthesized
ugguuuggagauacuaacugcuc

SEQ ID NO: 18082 - RNA, 23 nt, artificial
  Chemically synthesized
uaucauccucaaggacauuacua

SEQ ID NO: 18083 - RNA, 23 nt, artificial
  Chemically synthesized
aaagauucuuaauagcuggcugu

SEQ ID NO: 18084 - RNA, 23 nt, artificial
  Chemically synthesized
agagugaaaaacaacaaauucag

SEQ ID NO: 18085 - RNA, 23 nt, artificial
  Chemically synthesized
acuuccauuuauggaggauuuuu

SEQ ID NO: 18086 - RNA, 23 nt, artificial
  Chemically synthesized
aacaaccaugcugggcaucugga

SEQ ID NO: 18087 - RNA, 23 nt, artificial
  Chemically synthesized
aguaaauauaucaccacuauugc

SEQ ID NO: 18088 - RNA, 23 nt, artificial
  Chemically synthesized
agauuaagauuaugcucuggcau

SEQ ID NO: 18089 - RNA, 23 nt, artificial
  Chemically synthesized
acucaccagcaacaccaagugca

SEQ ID NO: 18090 - RNA, 23 nt, artificial
  Chemically synthesized
cucuuucacuucggaggauugcu

SEQ ID NO: 18091 - RNA, 23 nt, artificial
  Chemically synthesized
ugacuugaguaaauauaucacca

SEQ ID NO: 18092 - RNA, 23 nt, artificial
  Chemically synthesized
guggacuauuaaguauuuuuugg

SEQ ID NO: 18093 - RNA, 23 nt, artificial
  Chemically synthesized
agcauaaucuuaaucuuucaucc

SEQ ID NO: 18094 - RNA, 23 nt, artificial
  Chemically synthesized
uugagaucuuuaaucaauguguc

SEQ ID NO: 18095 - RNA, 23 nt, artificial
  Chemically synthesized
ugcuucaguuuauaacuaucuuc

SEQ ID NO: 18096 - RNA, 23 nt, artificial
  Chemically synthesized
ucaguuuauaacuaucuucacag

SEQ ID NO: 18097 - RNA, 23 nt, artificial
  Chemically synthesized
ugaggaugauagucugaauuuuc

SEQ ID NO: 18098 - RNA, 23 nt, artificial
  Chemically synthesized
ucagagacgagcucacgaaaagc

SEQ ID NO: 18099 - RNA, 23 nt, artificial
  Chemically synthesized
acugaauuuguuguuuuucacuc

SEQ ID NO: 18100 - RNA, 23 nt, artificial
  Chemically synthesized
uccagccaagucacucguaaacc

SEQ ID NO: 18101 - RNA, 23 nt, artificial
  Chemically synthesized
ugucagucacuugggcauuaaca

SEQ ID NO: 18102 - RNA, 23 nt, artificial
  Chemically synthesized
ggacuauuaaguauuuuuuggug

SEQ ID NO: 18103 - RNA, 23 nt, artificial
  Chemically synthesized
aaauccuccauaaauggaaguuc

SEQ ID NO: 18104 - RNA, 23 nt, artificial
  Chemically synthesized
ugccaauuacgaagcaguugaac

SEQ ID NO: 18105 - RNA, 23 nt, artificial
  Chemically synthesized
uggugagugugcauuccuugaug

SEQ ID NO: 18106 - RNA, 23 nt, artificial
  Chemically synthesized
uggagagguggcaaagcucuagu

SEQ ID NO: 18107 - RNA, 23 nt, artificial
  Chemically synthesized
aaaaaauccuccauaaauggaag

SEQ ID NO: 18108 - RNA, 23 nt, artificial
  Chemically synthesized
gaucuuuaaucaaugugucauac

SEQ ID NO: 18109 - RNA, 23 nt, artificial
  Chemically synthesized
gguggacuauuaaguauuuuuug

SEQ ID NO: 18110 - RNA, 23 nt, artificial
  Chemically synthesized
aauccuccauaaauggaaguucu

SEQ ID NO: 18111 - RNA, 23 nt, artificial
  Chemically synthesized
ugacaccauucuuucgaacaaag

SEQ ID NO: 18112 - RNA, 23 nt, artificial
  Chemically synthesized
cauacuacagaaucauauguuag

SEQ ID NO: 18113 - RNA, 23 nt, artificial
  Chemically synthesized
cuucaguuuauaacuaucuucac

SEQ ID NO: 18114 - RNA, 23 nt, artificial
  Chemically synthesized
aggccauuaagaugagcaccaag

SEQ ID NO: 18115 - RNA, 23 nt, artificial
  Chemically synthesized
aacauggguucaugacaugucac

SEQ ID NO: 18116 - RNA, 23 nt, artificial
  Chemically synthesized
uuggcuucauugacaccauucuu

SEQ ID NO: 18117 - RNA, 23 nt, artificial
  Chemically synthesized
ugccuguucaguaacugauauuu

SEQ ID NO: 18118 - RNA, 23 nt, artificial
  Chemically synthesized
aaccaggcuagaauuucuaaggg

SEQ ID NO: 18119 - RNA, 23 nt, artificial
  Chemically synthesized
acuacagaaucauauguuagaug

SEQ ID NO: 18120 - RNA, 23 nt, artificial
  Chemically synthesized
ugagguagagccuuauuuaaauu

SEQ ID NO: 18121 - RNA, 23 nt, artificial
  Chemically synthesized
guaguaaggagaaucuuaaaucu

SEQ ID NO: 18122 - RNA, 23 nt, artificial
  Chemically synthesized
ugcauauacucagaacugaauuu

SEQ ID NO: 18123 - RNA, 23 nt, artificial
  Chemically synthesized
gccuguucaguaacugauauuuc

SEQ ID NO: 18124 - RNA, 23 nt, artificial
  Chemically synthesized
guaaggagaaucuuaaaucuuag

SEQ ID NO: 18125 - RNA, 23 nt, artificial
  Chemically synthesized
agcaguugaacuuucuguucugc

SEQ ID NO: 18126 - RNA, 23 nt, artificial
  Chemically synthesized
uguacuaacauacacugauuaca

SEQ ID NO: 18127 - RNA, 23 nt, artificial
  Chemically synthesized
auggguucaugacaugucacaaa

SEQ ID NO: 18128 - RNA, 23 nt, artificial
  Chemically synthesized
ugaacaccugugugucacucuug

SEQ ID NO: 18129 - RNA, 23 nt, artificial
  Chemically synthesized
aaacauggguucaugacauguca

SEQ ID NO: 18130 - RNA, 23 nt, artificial
  Chemically synthesized
aagccuuuaacuugacuuagugu

SEQ ID NO: 18131 - RNA, 23 nt, artificial
  Chemically synthesized
aagcaguugaacuuucuguucug

SEQ ID NO: 18132 - RNA, 23 nt, artificial
  Chemically synthesized
aggugguuccagguaucugcuuc

SEQ ID NO: 18133 - RNA, 23 nt, artificial
  Chemically synthesized
ugagaucuuuaaucaauguguca

SEQ ID NO: 18134 - RNA, 23 nt, artificial
  Chemically synthesized
uugacaccauucuuucgaacaaa

SEQ ID NO: 18135 - RNA, 23 nt, artificial
  Chemically synthesized
augucagucacuugggcauuaac

SEQ ID NO: 18136 - RNA, 23 nt, artificial
  Chemically synthesized
gaugccagagcauaaucuuaauc

SEQ ID NO: 18137 - RNA, 23 nt, artificial
  Chemically synthesized
uccuccauaaauggaaguucuuu

SEQ ID NO: 18138 - RNA, 23 nt, artificial
  Chemically synthesized
caacuagauuuuaaacauccuug

SEQ ID NO: 18139 - RNA, 23 nt, artificial
  Chemically synthesized
ugagcaccaaggcaaaaauggag

SEQ ID NO: 18140 - RNA, 23 nt, artificial
  Chemically synthesized
ugcauuuacucuugaugaaguuu

SEQ ID NO: 18141 - RNA, 23 nt, artificial
  Chemically synthesized
aaagcuacuuucucugagagcag

SEQ ID NO: 18142 - RNA, 23 nt, artificial
  Chemically synthesized
uacagccagcuauuaagaaucuu

SEQ ID NO: 18143 - RNA, 23 nt, artificial
  Chemically synthesized
ugcaggccuuccaaguucugagu

SEQ ID NO: 18144 - RNA, 23 nt, artificial
  Chemically synthesized
uuggcucuucagcgcuaauaaau

SEQ ID NO: 18145 - RNA, 23 nt, artificial
  Chemically synthesized
uagcagguuuuacaugggacauu

SEQ ID NO: 18146 - RNA, 23 nt, artificial
  Chemically synthesized
ugcaaacauggguucaugacaug

SEQ ID NO: 18147 - RNA, 23 nt, artificial
  Chemically synthesized
uuguacuaacauacacugauuac

SEQ ID NO: 18148 - RNA, 23 nt, artificial
  Chemically synthesized
ugccagagcauaaucuuaaucuu

SEQ ID NO: 18149 - RNA, 23 nt, artificial
  Chemically synthesized
ucuugccuuuugguggacuauua

SEQ ID NO: 18150 - RNA, 23 nt, artificial
  Chemically synthesized
cuaagggcagucuugccuuuugg

SEQ ID NO: 18151 - RNA, 23 nt, artificial
  Chemically synthesized
cuaucuucacaguuuacauuuac

SEQ ID NO: 18152 - RNA, 23 nt, artificial
  Chemically synthesized
agcagguuuuacaugggacauua

SEQ ID NO: 18153 - RNA, 23 nt, artificial
  Chemically synthesized
cacucuagaccaagcuuuggauu

SEQ ID NO: 18154 - RNA, 23 nt, artificial
  Chemically synthesized
acaccaauaaacugugcaaaggu

SEQ ID NO: 18155 - RNA, 23 nt, artificial
  Chemically synthesized
agccagcuauuaagaaucuuuuc

SEQ ID NO: 18156 - RNA, 23 nt, artificial
  Chemically synthesized
gagcaguuaguaucuccaaacca

SEQ ID NO: 18157 - RNA, 23 nt, artificial
  Chemically synthesized
uaguaauguccuugaggaugaua

SEQ ID NO: 18158 - RNA, 23 nt, artificial
  Chemically synthesized
acagccagcuauuaagaaucuuu

SEQ ID NO: 18159 - RNA, 23 nt, artificial
  Chemically synthesized
cugaauuuguuguuuuucacucu

SEQ ID NO: 18160 - RNA, 23 nt, artificial
  Chemically synthesized
aaaaauccuccauaaauggaagu

SEQ ID NO: 18161 - RNA, 23 nt, artificial
  Chemically synthesized
uccagaugcccagcaugguuguu

SEQ ID NO: 18162 - RNA, 23 nt, artificial
  Chemically synthesized
gcaauaguggugauauauuuacu

SEQ ID NO: 18163 - RNA, 23 nt, artificial
  Chemically synthesized
augccagagcauaaucuuaaucu

SEQ ID NO: 18164 - RNA, 23 nt, artificial
  Chemically synthesized
ugcacuugguguugcuggugagu

SEQ ID NO: 18165 - RNA, 23 nt, artificial
  Chemically synthesized
agcaauccuccgaagugaaagag

SEQ ID NO: 18166 - RNA, 23 nt, artificial
  Chemically synthesized
uggugauauauuuacucaaguca

SEQ ID NO: 18167 - RNA, 23 nt, artificial
  Chemically synthesized
cauggaaauaucaccaaaaaaua

SEQ ID NO: 18168 - RNA, 23 nt, artificial
  Chemically synthesized
acauggaaauaucaccaaaaaau

SEQ ID NO: 18169 - RNA, 23 nt, artificial
  Chemically synthesized
aacauggaaauaucaccaaaaaa

SEQ ID NO: 18170 - RNA, 23 nt, artificial
  Chemically synthesized
caaacauggaaauaucaccaaaa

SEQ ID NO: 18171 - RNA, 23 nt, artificial
  Chemically synthesized
caauaaugucccauguaaaaccu

SEQ ID NO: 18172 - RNA, 23 nt, artificial
  Chemically synthesized
ucaauaaugucccauguaaaacc

SEQ ID NO: 18173 - RNA, 23 nt, artificial
  Chemically synthesized
uucaauaaugucccauguaaaac

SEQ ID NO: 18174 - RNA, 23 nt, artificial
  Chemically synthesized
guucaauaaugucccauguaaaa

SEQ ID NO: 18175 - RNA, 23 nt, artificial
  Chemically synthesized
uguucaauaaugucccauguaaa

SEQ ID NO: 18176 - RNA, 23 nt, artificial
  Chemically synthesized
ccuuguguuuggaauuauaaaau

SEQ ID NO: 18177 - RNA, 23 nt, artificial
  Chemically synthesized
cccuuguguuuggaauuauaaaa

SEQ ID NO: 18178 - RNA, 23 nt, artificial
  Chemically synthesized
ccccuuguguuuggaauuauaaa

SEQ ID NO: 18179 - RNA, 23 nt, artificial
  Chemically synthesized
gccccuuguguuuggaauuauaa

SEQ ID NO: 18180 - RNA, 23 nt, artificial
  Chemically synthesized
ugccccuuguguuuggaauuaua

SEQ ID NO: 18181 - RNA, 23 nt, artificial
  Chemically synthesized
caaacuucaucaagaguaaaugc

SEQ ID NO: 18182 - RNA, 23 nt, artificial
  Chemically synthesized
acaaacuucaucaagaguaaaug

SEQ ID NO: 18183 - RNA, 23 nt, artificial
  Chemically synthesized
aacaaacuucaucaagaguaaau

SEQ ID NO: 18184 - RNA, 23 nt, artificial
  Chemically synthesized
aaacaaacuucaucaagaguaaa

SEQ ID NO: 18185 - RNA, 23 nt, artificial
  Chemically synthesized
aaaacaaacuucaucaagaguaa

SEQ ID NO: 18186 - RNA, 23 nt, artificial
  Chemically synthesized
ccaaacauggaaauaucaccaaa

SEQ ID NO: 18187 - RNA, 23 nt, artificial
  Chemically synthesized
ccugcaucaugauggccaauucu

SEQ ID NO: 18188 - RNA, 23 nt, artificial
  Chemically synthesized
gccugcaucaugauggccaauuc

SEQ ID NO: 18189 - RNA, 23 nt, artificial
  Chemically synthesized
ggccugcaucaugauggccaauu

SEQ ID NO: 18190 - RNA, 23 nt, artificial
  Chemically synthesized
aggccugcaucaugauggccaau

SEQ ID NO: 18191 - RNA, 23 nt, artificial
  Chemically synthesized
aaggccugcaucaugauggccaa

SEQ ID NO: 18192 - RNA, 23 nt, artificial
  Chemically synthesized
gcaggagaguauuacuagagcuu

SEQ ID NO: 18193 - RNA, 23 nt, artificial
  Chemically synthesized
agcaggagaguauuacuagagcu

SEQ ID NO: 18194 - RNA, 23 nt, artificial
  Chemically synthesized
gagcaggagaguauuacuagagc

SEQ ID NO: 18195 - RNA, 23 nt, artificial
  Chemically synthesized
ugagcaggagaguauuacuagag

SEQ ID NO: 18196 - RNA, 23 nt, artificial
  Chemically synthesized
uugagcaggagaguauuacuaga

SEQ ID NO: 18197 - RNA, 23 nt, artificial
  Chemically synthesized
caaaacuaccuacuucuuucuca

SEQ ID NO: 18198 - RNA, 23 nt, artificial
  Chemically synthesized
ucaaaacuaccuacuucuuucuc

SEQ ID NO: 18199 - RNA, 23 nt, artificial
  Chemically synthesized
cucaaaacuaccuacuucuuucu

SEQ ID NO: 18200 - RNA, 23 nt, artificial
  Chemically synthesized
gcucaaaacuaccuacuucuuuc

SEQ ID NO: 18201 - RNA, 23 nt, artificial
  Chemically synthesized
ggcucaaaacuaccuacuucuuu

SEQ ID NO: 18202 - RNA, 23 nt, artificial
  Chemically synthesized
ccagcaacaccaagugcaaagag

SEQ ID NO: 18203 - RNA, 23 nt, artificial
  Chemically synthesized
accagcaacaccaagugcaaaga

SEQ ID NO: 18204 - RNA, 23 nt, artificial
  Chemically synthesized
caccagcaacaccaagugcaaag

SEQ ID NO: 18205 - RNA, 23 nt, artificial
  Chemically synthesized
ucaccagcaacaccaagugcaaa

SEQ ID NO: 18206 - RNA, 23 nt, artificial
  Chemically synthesized
cucaccagcaacaccaagugcaa

SEQ ID NO: 18207 - RNA, 23 nt, artificial
  Chemically synthesized
gcauuuuacuggcucaaaacuac

SEQ ID NO: 18208 - RNA, 23 nt, artificial
  Chemically synthesized
ugcauuuuacuggcucaaaacua

SEQ ID NO: 18209 - RNA, 23 nt, artificial
  Chemically synthesized
augcauuuuacuggcucaaaacu

SEQ ID NO: 18210 - RNA, 23 nt, artificial
  Chemically synthesized
uaugcauuuuacuggcucaaaac

SEQ ID NO: 18211 - RNA, 23 nt, artificial
  Chemically synthesized
guaugcauuuuacuggcucaaaa

SEQ ID NO: 18212 - RNA, 23 nt, artificial
  Chemically synthesized
ccugguuuggagauacuaacugc

SEQ ID NO: 18213 - RNA, 23 nt, artificial
  Chemically synthesized
gccugguuuggagauacuaacug

SEQ ID NO: 18214 - RNA, 23 nt, artificial
  Chemically synthesized
agccugguuuggagauacuaacu

SEQ ID NO: 18215 - RNA, 23 nt, artificial
  Chemically synthesized
uagccugguuuggagauacuaac

SEQ ID NO: 18216 - RNA, 23 nt, artificial
  Chemically synthesized
cuagccugguuuggagauacuaa

SEQ ID NO: 18217 - RNA, 23 nt, artificial
  Chemically synthesized
ggucuagagugaaaaacaacaaa

SEQ ID NO: 18218 - RNA, 23 nt, artificial
  Chemically synthesized
uggucuagagugaaaaacaacaa

SEQ ID NO: 18219 - RNA, 23 nt, artificial
  Chemically synthesized
uuggucuagagugaaaaacaaca

SEQ ID NO: 18220 - RNA, 23 nt, artificial
  Chemically synthesized
cuuggucuagagugaaaaacaac

SEQ ID NO: 18221 - RNA, 23 nt, artificial
  Chemically synthesized
gcuuggucuagagugaaaaacaa

SEQ ID NO: 18222 - RNA, 23 nt, artificial
  Chemically synthesized
gcuagauuaucguccaaaagugu

SEQ ID NO: 18223 - RNA, 23 nt, artificial
  Chemically synthesized
ugcuagauuaucguccaaaagug

SEQ ID NO: 18224 - RNA, 23 nt, artificial
  Chemically synthesized
uugcuagauuaucguccaaaagu

SEQ ID NO: 18225 - RNA, 23 nt, artificial
  Chemically synthesized
guugcuagauuaucguccaaaag

SEQ ID NO: 18226 - RNA, 23 nt, artificial
  Chemically synthesized
uguugcuagauuaucguccaaaa

SEQ ID NO: 18227 - RNA, 23 nt, artificial
  Chemically synthesized
ccuuggugcucaucuuaauggcc

SEQ ID NO: 18228 - RNA, 23 nt, artificial
  Chemically synthesized
gccuuggugcucaucuuaauggc

SEQ ID NO: 18229 - RNA, 23 nt, artificial
  Chemically synthesized
ugccuuggugcucaucuuaaugg

SEQ ID NO: 18230 - RNA, 23 nt, artificial
  Chemically synthesized
uugccuuggugcucaucuuaaug

SEQ ID NO: 18231 - RNA, 23 nt, artificial
  Chemically synthesized
uuugccuuggugcucaucuuaau

SEQ ID NO: 18232 - RNA, 23 nt, artificial
  Chemically synthesized
caagaaugacaauguccaagaca

SEQ ID NO: 18233 - RNA, 23 nt, artificial
  Chemically synthesized
ucaagaaugacaauguccaagac

SEQ ID NO: 18234 - RNA, 23 nt, artificial
  Chemically synthesized
aucaagaaugacaauguccaaga

SEQ ID NO: 18235 - RNA, 23 nt, artificial
  Chemically synthesized
gaucaagaaugacaauguccaag

SEQ ID NO: 18236 - RNA, 23 nt, artificial
  Chemically synthesized
agaucaagaaugacaauguccaa

SEQ ID NO: 18237 - RNA, 23 nt, artificial
  Chemically synthesized
acuuaauaguccaccaaaaggca

SEQ ID NO: 18238 - RNA, 23 nt, artificial
  Chemically synthesized
uacuuaauaguccaccaaaaggc

SEQ ID NO: 18239 - RNA, 23 nt, artificial
  Chemically synthesized
auacuuaauaguccaccaaaagg

SEQ ID NO: 18240 - RNA, 23 nt, artificial
  Chemically synthesized
aauacuuaauaguccaccaaaag

SEQ ID NO: 18241 - RNA, 23 nt, artificial
  Chemically synthesized
aaauacuuaauaguccaccaaaa

SEQ ID NO: 18242 - RNA, 23 nt, artificial
  Chemically synthesized
uggcucaaaacuaccuacuucuu

SEQ ID NO: 18243 - RNA, 23 nt, artificial
  Chemically synthesized
cuggcucaaaacuaccuacuucu

SEQ ID NO: 18244 - RNA, 23 nt, artificial
  Chemically synthesized
acuggcucaaaacuaccuacuuc

SEQ ID NO: 18245 - RNA, 23 nt, artificial
  Chemically synthesized
caaaaguguuaaugcccaaguga

SEQ ID NO: 18246 - RNA, 23 nt, artificial
  Chemically synthesized
ccaaaaguguuaaugcccaagug

SEQ ID NO: 18247 - RNA, 23 nt, artificial
  Chemically synthesized
uccaaaaguguuaaugcccaagu

SEQ ID NO: 18248 - RNA, 23 nt, artificial
  Chemically synthesized
guccaaaaguguuaaugcccaag

SEQ ID NO: 18249 - RNA, 23 nt, artificial
  Chemically synthesized
cguccaaaaguguuaaugcccaa

SEQ ID NO: 18250 - RNA, 23 nt, artificial
  Chemically synthesized
cuuaauagcuggcuguaaauacu

SEQ ID NO: 18251 - RNA, 23 nt, artificial
  Chemically synthesized
ucuuaauagcuggcuguaaauac

SEQ ID NO: 18252 - RNA, 23 nt, artificial
  Chemically synthesized
uucuuaauagcuggcuguaaaua

SEQ ID NO: 18253 - RNA, 23 nt, artificial
  Chemically synthesized
auucuuaauagcuggcuguaaau

SEQ ID NO: 18254 - RNA, 23 nt, artificial
  Chemically synthesized
gauucuuaauagcuggcuguaaa

SEQ ID NO: 18255 - RNA, 23 nt, artificial
  Chemically synthesized
ccauguuugcaaucaaagaugau

SEQ ID NO: 18256 - RNA, 23 nt, artificial
  Chemically synthesized
cccauguuugcaaucaaagauga

SEQ ID NO: 18257 - RNA, 23 nt, artificial
  Chemically synthesized
acccauguuugcaaucaaagaug

SEQ ID NO: 18258 - RNA, 23 nt, artificial
  Chemically synthesized
aacccauguuugcaaucaaagau

SEQ ID NO: 18259 - RNA, 23 nt, artificial
  Chemically synthesized
gaacccauguuugcaaucaaaga

SEQ ID NO: 18260 - RNA, 23 nt, artificial
  Chemically synthesized
gaggaagacuguuacuacaguug

SEQ ID NO: 18261 - RNA, 23 nt, artificial
  Chemically synthesized
ugaggaagacuguuacuacaguu

SEQ ID NO: 18262 - RNA, 23 nt, artificial
  Chemically synthesized
uugaggaagacuguuacuacagu

SEQ ID NO: 18263 - RNA, 23 nt, artificial
  Chemically synthesized
auugaggaagacuguuacuacag

SEQ ID NO: 18264 - RNA, 23 nt, artificial
  Chemically synthesized
aauugaggaagacuguuacuaca

SEQ ID NO: 18265 - RNA, 23 nt, artificial
  Chemically synthesized
ccucaaagaccuuugcacaguuu

SEQ ID NO: 18266 - RNA, 23 nt, artificial
  Chemically synthesized
accucaaagaccuuugcacaguu

SEQ ID NO: 18267 - RNA, 23 nt, artificial
  Chemically synthesized
uaccucaaagaccuuugcacagu

SEQ ID NO: 18268 - RNA, 23 nt, artificial
  Chemically synthesized
cuaccucaaagaccuuugcacag

SEQ ID NO: 18269 - RNA, 23 nt, artificial
  Chemically synthesized
ucuaccucaaagaccuuugcaca

SEQ ID NO: 18270 - RNA, 23 nt, artificial
  Chemically synthesized
ccuggaaccaccuaaagaacuuc

SEQ ID NO: 18271 - RNA, 23 nt, artificial
  Chemically synthesized
accuggaaccaccuaaagaacuu

SEQ ID NO: 18272 - RNA, 23 nt, artificial
  Chemically synthesized
uaccuggaaccaccuaaagaacu

SEQ ID NO: 18273 - RNA, 23 nt, artificial
  Chemically synthesized
auaccuggaaccaccuaaagaac

SEQ ID NO: 18274 - RNA, 23 nt, artificial
  Chemically synthesized
gauaccuggaaccaccuaaagaa

SEQ ID NO: 18275 - RNA, 23 nt, artificial
  Chemically synthesized
caaugaagccaaaauagaugaga

SEQ ID NO: 18276 - RNA, 23 nt, artificial
  Chemically synthesized
ucaaugaagccaaaauagaugag

SEQ ID NO: 18277 - RNA, 23 nt, artificial
  Chemically synthesized
gucaaugaagccaaaauagauga

SEQ ID NO: 18278 - RNA, 23 nt, artificial
  Chemically synthesized
ugucaaugaagccaaaauagaug

SEQ ID NO: 18279 - RNA, 23 nt, artificial
  Chemically synthesized
gugucaaugaagccaaaauagau

SEQ ID NO: 18280 - RNA, 23 nt, artificial
  Chemically synthesized
uggugucaaugaagccaaaauag

SEQ ID NO: 18281 - RNA, 23 nt, artificial
  Chemically synthesized
auggugucaaugaagccaaaaua

SEQ ID NO: 18282 - RNA, 23 nt, artificial
  Chemically synthesized
aauggugucaaugaagccaaaau

SEQ ID NO: 18283 - RNA, 23 nt, artificial
  Chemically synthesized
gaauggugucaaugaagccaaaa

SEQ ID NO: 18284 - RNA, 23 nt, artificial
  Chemically synthesized
agaauggugucaaugaagccaaa

SEQ ID NO: 18285 - RNA, 23 nt, artificial
  Chemically synthesized
cauuacuagugacucagaaaauu

SEQ ID NO: 18286 - RNA, 23 nt, artificial
  Chemically synthesized
acauuacuagugacucagaaaau

SEQ ID NO: 18287 - RNA, 23 nt, artificial
  Chemically synthesized
gacauuacuagugacucagaaaa

SEQ ID NO: 18288 - RNA, 23 nt, artificial
  Chemically synthesized
ggacauuacuagugacucagaaa

SEQ ID NO: 18289 - RNA, 23 nt, artificial
  Chemically synthesized
aggacauuacuagugacucagaa

SEQ ID NO: 18290 - RNA, 23 nt, artificial
  Chemically synthesized
ccaaaauagaugagaucaagaau

SEQ ID NO: 18291 - RNA, 23 nt, artificial
  Chemically synthesized
gccaaaauagaugagaucaagaa

SEQ ID NO: 18292 - RNA, 23 nt, artificial
  Chemically synthesized
agccaaaauagaugagaucaaga

SEQ ID NO: 18293 - RNA, 23 nt, artificial
  Chemically synthesized
aagccaaaauagaugagaucaag

SEQ ID NO: 18294 - RNA, 23 nt, artificial
  Chemically synthesized
gaagccaaaauagaugagaucaa

SEQ ID NO: 18295 - RNA, 23 nt, artificial
  Chemically synthesized
cccacucuaugaaucaauagaag

SEQ ID NO: 18296 - RNA, 23 nt, artificial
  Chemically synthesized
ccccacucuaugaaucaauagaa

SEQ ID NO: 18297 - RNA, 23 nt, artificial
  Chemically synthesized
accccacucuaugaaucaauaga

SEQ ID NO: 18298 - RNA, 23 nt, artificial
  Chemically synthesized
aaccccacucuaugaaucaauag

SEQ ID NO: 18299 - RNA, 23 nt, artificial
  Chemically synthesized
uaaccccacucuaugaaucaaua

SEQ ID NO: 18300 - RNA, 23 nt, artificial
  Chemically synthesized
aaggacauuacuagugacucaga

SEQ ID NO: 18301 - RNA, 23 nt, artificial
  Chemically synthesized
caaggacauuacuagugacucag

SEQ ID NO: 18302 - RNA, 23 nt, artificial
  Chemically synthesized
ucaaggacauuacuagugacuca

SEQ ID NO: 18303 - RNA, 23 nt, artificial
  Chemically synthesized
gcuggagucaugacacuaaguca

SEQ ID NO: 18304 - RNA, 23 nt, artificial
  Chemically synthesized
ugcuggagucaugacacuaaguc

SEQ ID NO: 18305 - RNA, 23 nt, artificial
  Chemically synthesized
uugcuggagucaugacacuaagu

SEQ ID NO: 18306 - RNA, 23 nt, artificial
  Chemically synthesized
auugcuggagucaugacacuaag

SEQ ID NO: 18307 - RNA, 23 nt, artificial
  Chemically synthesized
uauugcuggagucaugacacuaa

SEQ ID NO: 18308 - RNA, 23 nt, artificial
  Chemically synthesized
aaagaauggugucaaugaagcca

SEQ ID NO: 18309 - RNA, 23 nt, artificial
  Chemically synthesized
gaaagaauggugucaaugaagcc

SEQ ID NO: 18310 - RNA, 23 nt, artificial
  Chemically synthesized
cgaaagaauggugucaaugaagc

SEQ ID NO: 18311 - RNA, 23 nt, artificial
  Chemically synthesized
ucgaaagaauggugucaaugaag

SEQ ID NO: 18312 - RNA, 23 nt, artificial
  Chemically synthesized
uucgaaagaauggugucaaugaa

SEQ ID NO: 18313 - RNA, 23 nt, artificial
  Chemically synthesized
gacacuaagucaaguuaaaggcu

SEQ ID NO: 18314 - RNA, 23 nt, artificial
  Chemically synthesized
ugacacuaagucaaguuaaaggc

SEQ ID NO: 18315 - RNA, 23 nt, artificial
  Chemically synthesized
augacacuaagucaaguuaaagg

SEQ ID NO: 18316 - RNA, 23 nt, artificial
  Chemically synthesized
caugacacuaagucaaguuaaag

SEQ ID NO: 18317 - RNA, 23 nt, artificial
  Chemically synthesized
ucaugacacuaagucaaguuaaa

SEQ ID NO: 18318 - RNA, 23 nt, artificial
  Chemically synthesized
caguguauguuaguacaaauguc

SEQ ID NO: 18319 - RNA, 23 nt, artificial
  Chemically synthesized
ucaguguauguuaguacaaaugu

SEQ ID NO: 18320 - RNA, 23 nt, artificial
  Chemically synthesized
aucaguguauguuaguacaaaug

SEQ ID NO: 18321 - RNA, 23 nt, artificial
  Chemically synthesized
aaucaguguauguuaguacaaau

SEQ ID NO: 18322 - RNA, 23 nt, artificial
  Chemically synthesized
uaaucaguguauguuaguacaaa

SEQ ID NO: 18323 - RNA, 23 nt, artificial
  Chemically synthesized
ugcagaggaugaaagauuaagau

SEQ ID NO: 18324 - RNA, 23 nt, artificial
  Chemically synthesized
augcagaggaugaaagauuaaga

SEQ ID NO: 18325 - RNA, 23 nt, artificial
  Chemically synthesized
uaugcagaggaugaaagauuaag

SEQ ID NO: 18326 - RNA, 23 nt, artificial
  Chemically synthesized
guaugcagaggaugaaagauuaa

SEQ ID NO: 18327 - RNA, 23 nt, artificial
  Chemically synthesized
uguaugcagaggaugaaagauua

SEQ ID NO: 18328 - RNA, 23 nt, artificial
  Chemically synthesized
ugaacccauguuugcaaucaaag

SEQ ID NO: 18329 - RNA, 23 nt, artificial
  Chemically synthesized
augaacccauguuugcaaucaaa

SEQ ID NO: 18330 - RNA, 23 nt, artificial
  Chemically synthesized
ggauuggaauugaggaagacugu

SEQ ID NO: 18331 - RNA, 23 nt, artificial
  Chemically synthesized
gggauuggaauugaggaagacug

SEQ ID NO: 18332 - RNA, 23 nt, artificial
  Chemically synthesized
agggauuggaauugaggaagacu

SEQ ID NO: 18333 - RNA, 23 nt, artificial
  Chemically synthesized
aagggauuggaauugaggaagac

SEQ ID NO: 18334 - RNA, 23 nt, artificial
  Chemically synthesized
caagggauuggaauugaggaaga

SEQ ID NO: 18335 - RNA, 23 nt, artificial
  Chemically synthesized
ccuccaaggauguuuaaaaucua

SEQ ID NO: 18336 - RNA, 23 nt, artificial
  Chemically synthesized
gccuccaaggauguuuaaaaucu

SEQ ID NO: 18337 - RNA, 23 nt, artificial
  Chemically synthesized
ugccuccaaggauguuuaaaauc

SEQ ID NO: 18338 - RNA, 23 nt, artificial
  Chemically synthesized
cugccuccaaggauguuuaaaau

SEQ ID NO: 18339 - RNA, 23 nt, artificial
  Chemically synthesized
ucugccuccaaggauguuuaaaa

SEQ ID NO: 18340 - RNA, 23 nt, artificial
  Chemically synthesized
agcuuggucuagagugaaaaaca

SEQ ID NO: 18341 - RNA, 23 nt, artificial
  Chemically synthesized
aagcuuggucuagagugaaaaac

SEQ ID NO: 18342 - RNA, 23 nt, artificial
  Chemically synthesized
aaagcuuggucuagagugaaaaa

SEQ ID NO: 18343 - RNA, 23 nt, artificial
  Chemically synthesized
caccaagugcaaagaggaaggau

SEQ ID NO: 18344 - RNA, 23 nt, artificial
  Chemically synthesized
acaccaagugcaaagaggaagga

SEQ ID NO: 18345 - RNA, 23 nt, artificial
  Chemically synthesized
aacaccaagugcaaagaggaagg

SEQ ID NO: 18346 - RNA, 23 nt, artificial
  Chemically synthesized
caacaccaagugcaaagaggaag

SEQ ID NO: 18347 - RNA, 23 nt, artificial
  Chemically synthesized
gcaacaccaagugcaaagaggaa

SEQ ID NO: 18348 - RNA, 23 nt, artificial
  Chemically synthesized
gcaagacugcccuuagaaauucu

SEQ ID NO: 18349 - RNA, 23 nt, artificial
  Chemically synthesized
ggcaagacugcccuuagaaauuc

SEQ ID NO: 18350 - RNA, 23 nt, artificial
  Chemically synthesized
aggcaagacugcccuuagaaauu

SEQ ID NO: 18351 - RNA, 23 nt, artificial
  Chemically synthesized
aaggcaagacugcccuuagaaau

SEQ ID NO: 18352 - RNA, 23 nt, artificial
  Chemically synthesized
aaaggcaagacugcccuuagaaa

SEQ ID NO: 18353 - RNA, 23 nt, artificial
  Chemically synthesized
cagagaaaauucagacuaucauc

SEQ ID NO: 18354 - RNA, 23 nt, artificial
  Chemically synthesized
gcagagaaaauucagacuaucau

SEQ ID NO: 18355 - RNA, 23 nt, artificial
  Chemically synthesized
ugcagagaaaauucagacuauca

SEQ ID NO: 18356 - RNA, 23 nt, artificial
  Chemically synthesized
uugcagagaaaauucagacuauc

SEQ ID NO: 18357 - RNA, 23 nt, artificial
  Chemically synthesized
cuugcagagaaaauucagacuau

SEQ ID NO: 18358 - RNA, 23 nt, artificial
  Chemically synthesized
cguaugacacauugauuaaagau

SEQ ID NO: 18359 - RNA, 23 nt, artificial
  Chemically synthesized
gcguaugacacauugauuaaaga

SEQ ID NO: 18360 - RNA, 23 nt, artificial
  Chemically synthesized
agcguaugacacauugauuaaag

SEQ ID NO: 18361 - RNA, 23 nt, artificial
  Chemically synthesized
aagcguaugacacauugauuaaa

SEQ ID NO: 18362 - RNA, 23 nt, artificial
  Chemically synthesized
gaagcguaugacacauugauuaa

SEQ ID NO: 18363 - RNA, 23 nt, artificial
  Chemically synthesized
gagccaacauauuuguagauuuu

SEQ ID NO: 18364 - RNA, 23 nt, artificial
  Chemically synthesized
agagccaacauauuuguagauuu

SEQ ID NO: 18365 - RNA, 23 nt, artificial
  Chemically synthesized
aagagccaacauauuuguagauu

SEQ ID NO: 18366 - RNA, 23 nt, artificial
  Chemically synthesized
gaagagccaacauauuuguagau

SEQ ID NO: 18367 - RNA, 23 nt, artificial
  Chemically synthesized
ugaagagccaacauauuuguaga

SEQ ID NO: 18368 - RNA, 23 nt, artificial
  Chemically synthesized
caugcuaaguacccaaauaggag

SEQ ID NO: 18369 - RNA, 23 nt, artificial
  Chemically synthesized
gcaugcuaaguacccaaauagga

SEQ ID NO: 18370 - RNA, 23 nt, artificial
  Chemically synthesized
ggcaugcuaaguacccaaauagg

SEQ ID NO: 18371 - RNA, 23 nt, artificial
  Chemically synthesized
uggcaugcuaaguacccaaauag

SEQ ID NO: 18372 - RNA, 23 nt, artificial
  Chemically synthesized
guggcaugcuaaguacccaaaua

SEQ ID NO: 18373 - RNA, 23 nt, artificial
  Chemically synthesized
agcagaacagaaaguucaacugc

SEQ ID NO: 18374 - RNA, 23 nt, artificial
  Chemically synthesized
cagcagaacagaaaguucaacug

SEQ ID NO: 18375 - RNA, 23 nt, artificial
  Chemically synthesized
acagcagaacagaaaguucaacu

SEQ ID NO: 18376 - RNA, 23 nt, artificial
  Chemically synthesized
cacagcagaacagaaaguucaac

SEQ ID NO: 18377 - RNA, 23 nt, artificial
  Chemically synthesized
acacagcagaacagaaaguucaa

SEQ ID NO: 18378 - RNA, 23 nt, artificial
  Chemically synthesized
caaagcuuggucuagagugaaaa

SEQ ID NO: 18379 - RNA, 23 nt, artificial
  Chemically synthesized
ggcagcuuauacauagcaauggu

SEQ ID NO: 18380 - RNA, 23 nt, artificial
  Chemically synthesized
uggcagcuuauacauagcaaugg

SEQ ID NO: 18381 - RNA, 23 nt, artificial
  Chemically synthesized
auggcagcuuauacauagcaaug

SEQ ID NO: 18382 - RNA, 23 nt, artificial
  Chemically synthesized
aauggcagcuuauacauagcaau

SEQ ID NO: 18383 - RNA, 23 nt, artificial
  Chemically synthesized
aaauggcagcuuauacauagcaa

SEQ ID NO: 18384 - RNA, 23 nt, artificial
  Chemically synthesized
gcagaggaugaaagauuaagauu

SEQ ID NO: 18385 - RNA, 23 nt, artificial
  Chemically synthesized
gagugagggaagcgguuuacgag

SEQ ID NO: 18386 - RNA, 23 nt, artificial
  Chemically synthesized
ggagugagggaagcgguuuacga

SEQ ID NO: 18387 - RNA, 23 nt, artificial
  Chemically synthesized
gggagugagggaagcgguuuacg

SEQ ID NO: 18388 - RNA, 23 nt, artificial
  Chemically synthesized
ggggagugagggaagcgguuuac

SEQ ID NO: 18389 - RNA, 23 nt, artificial
  Chemically synthesized
uggggagugagggaagcgguuua

SEQ ID NO: 18390 - RNA, 23 nt, artificial
  Chemically synthesized
cuacuauccuacguuuaaauauc

SEQ ID NO: 18391 - RNA, 23 nt, artificial
  Chemically synthesized
acuacuauccuacguuuaaauau

SEQ ID NO: 18392 - RNA, 23 nt, artificial
  Chemically synthesized
uacuacuauccuacguuuaaaua

SEQ ID NO: 18393 - RNA, 23 nt, artificial
  Chemically synthesized
uuacuacuauccuacguuuaaau

SEQ ID NO: 18394 - RNA, 23 nt, artificial
  Chemically synthesized
cuuacuacuauccuacguuuaaa

SEQ ID NO: 18395 - RNA, 23 nt, artificial
  Chemically synthesized
aggaauugcucuugucauacccc

SEQ ID NO: 18396 - RNA, 23 nt, artificial
  Chemically synthesized
uaggaauugcucuugucauaccc

SEQ ID NO: 18397 - RNA, 23 nt, artificial
  Chemically synthesized
uuaggaauugcucuugucauacc

SEQ ID NO: 18398 - RNA, 23 nt, artificial
  Chemically synthesized
uuuaggaauugcucuugucauac

SEQ ID NO: 18399 - RNA, 23 nt, artificial
  Chemically synthesized
auuuaggaauugcucuugucaua

SEQ ID NO: 18400 - RNA, 23 nt, artificial
  Chemically synthesized
ccacuuugccucuaaauuaccuc

SEQ ID NO: 18401 - RNA, 23 nt, artificial
  Chemically synthesized
gccacuuugccucuaaauuaccu

SEQ ID NO: 18402 - RNA, 23 nt, artificial
  Chemically synthesized
ggccacuuugccucuaaauuacc

SEQ ID NO: 18403 - RNA, 23 nt, artificial
  Chemically synthesized
aggccacuuugccucuaaauuac

SEQ ID NO: 18404 - RNA, 23 nt, artificial
  Chemically synthesized
caggccacuuugccucuaaauua

SEQ ID NO: 18405 - RNA, 23 nt, artificial
  Chemically synthesized
gaguguaugcagaggaugaaaga

SEQ ID NO: 18406 - RNA, 23 nt, artificial
  Chemically synthesized
ggaguguaugcagaggaugaaag

SEQ ID NO: 18407 - RNA, 23 nt, artificial
  Chemically synthesized
aggaguguaugcagaggaugaaa

SEQ ID NO: 18408 - RNA, 23 nt, artificial
  Chemically synthesized
uaggaguguaugcagaggaugaa

SEQ ID NO: 18409 - RNA, 23 nt, artificial
  Chemically synthesized
auaggaguguaugcagaggauga

SEQ ID NO: 18410 - RNA, 23 nt, artificial
  Chemically synthesized
ggcaucaacuucauggaaagaaa

SEQ ID NO: 18411 - RNA, 23 nt, artificial
  Chemically synthesized
uggcaucaacuucauggaaagaa

SEQ ID NO: 18412 - RNA, 23 nt, artificial
  Chemically synthesized
uuggcaucaacuucauggaaaga

SEQ ID NO: 18413 - RNA, 23 nt, artificial
  Chemically synthesized
auuggcaucaacuucauggaaag

SEQ ID NO: 18414 - RNA, 23 nt, artificial
  Chemically synthesized
aauuggcaucaacuucauggaaa

SEQ ID NO: 18415 - RNA, 23 nt, artificial
  Chemically synthesized
cgcugaagagccaacauauuugu

SEQ ID NO: 18416 - RNA, 23 nt, artificial
  Chemically synthesized
gcgcugaagagccaacauauuug

SEQ ID NO: 18417 - RNA, 23 nt, artificial
  Chemically synthesized
agcgcugaagagccaacauauuu

SEQ ID NO: 18418 - RNA, 23 nt, artificial
  Chemically synthesized
uagcgcugaagagccaacauauu

SEQ ID NO: 18419 - RNA, 23 nt, artificial
  Chemically synthesized
uuagcgcugaagagccaacauau

SEQ ID NO: 18420 - RNA, 23 nt, artificial
  Chemically synthesized
acaguuuauuggugucauauuau

SEQ ID NO: 18421 - RNA, 23 nt, artificial
  Chemically synthesized
cacaguuuauuggugucauauua

SEQ ID NO: 18422 - RNA, 23 nt, artificial
  Chemically synthesized
gcacaguuuauuggugucauauu

SEQ ID NO: 18423 - RNA, 23 nt, artificial
  Chemically synthesized
ugcacaguuuauuggugucauau

SEQ ID NO: 18424 - RNA, 23 nt, artificial
  Chemically synthesized
uugcacaguuuauuggugucaua

SEQ ID NO: 18425 - RNA, 23 nt, artificial
  Chemically synthesized
ggaaggccugcaucaugauggcc

SEQ ID NO: 18426 - RNA, 23 nt, artificial
  Chemically synthesized
uggaaggccugcaucaugauggc

SEQ ID NO: 18427 - RNA, 23 nt, artificial
  Chemically synthesized
uuggaaggccugcaucaugaugg

SEQ ID NO: 18428 - RNA, 23 nt, artificial
  Chemically synthesized
cuuggaaggccugcaucaugaug

SEQ ID NO: 18429 - RNA, 23 nt, artificial
  Chemically synthesized
acuuggaaggccugcaucaugau

SEQ ID NO: 18430 - RNA, 23 nt, artificial
  Chemically synthesized
caguucugaguauaugcaauuag

SEQ ID NO: 18431 - RNA, 23 nt, artificial
  Chemically synthesized
ucaguucugaguauaugcaauua

SEQ ID NO: 18432 - RNA, 23 nt, artificial
  Chemically synthesized
uucaguucugaguauaugcaauu

SEQ ID NO: 18433 - RNA, 23 nt, artificial
  Chemically synthesized
auucaguucugaguauaugcaau

SEQ ID NO: 18434 - RNA, 23 nt, artificial
  Chemically synthesized
aauucaguucugaguauaugcaa

SEQ ID NO: 18435 - RNA, 23 nt, artificial
  Chemically synthesized
guguaugcagaggaugaaagauu

SEQ ID NO: 18436 - RNA, 23 nt, artificial
  Chemically synthesized
aguguaugcagaggaugaaagau

SEQ ID NO: 18437 - RNA, 23 nt, artificial
  Chemically synthesized
gcuucguaauuggcaucaacuuc

SEQ ID NO: 18438 - RNA, 23 nt, artificial
  Chemically synthesized
ugcuucguaauuggcaucaacuu

SEQ ID NO: 18439 - RNA, 23 nt, artificial
  Chemically synthesized
cugcuucguaauuggcaucaacu

SEQ ID NO: 18440 - RNA, 23 nt, artificial
  Chemically synthesized
acugcuucguaauuggcaucaac

SEQ ID NO: 18441 - RNA, 23 nt, artificial
  Chemically synthesized
aacugcuucguaauuggcaucaa

SEQ ID NO: 18442 - RNA, 23 nt, artificial
  Chemically synthesized
gcuaugaccuuuugcugaaauau

SEQ ID NO: 18443 - RNA, 23 nt, artificial
  Chemically synthesized
agcuaugaccuuuugcugaaaua

SEQ ID NO: 18444 - RNA, 23 nt, artificial
  Chemically synthesized
aagcuaugaccuuuugcugaaau

SEQ ID NO: 18445 - RNA, 23 nt, artificial
  Chemically synthesized
gaagcuaugaccuuuugcugaaa

SEQ ID NO: 18446 - RNA, 23 nt, artificial
  Chemically synthesized
agaagcuaugaccuuuugcugaa

SEQ ID NO: 18447 - RNA, 23 nt, artificial
  Chemically synthesized
ccaaagcuuggucuagagugaaa

SEQ ID NO: 18448 - RNA, 23 nt, artificial
  Chemically synthesized
caaucuuuguacucuugcagaga

SEQ ID NO: 18449 - RNA, 23 nt, artificial
  Chemically synthesized
ccaaucuuuguacucuugcagag

SEQ ID NO: 18450 - RNA, 23 nt, artificial
  Chemically synthesized
gccaaucuuuguacucuugcaga

SEQ ID NO: 18451 - RNA, 23 nt, artificial
  Chemically synthesized
agccaaucuuuguacucuugcag

SEQ ID NO: 18452 - RNA, 23 nt, artificial
  Chemically synthesized
aagccaaucuuuguacucuugca

SEQ ID NO: 18453 - RNA, 23 nt, artificial
  Chemically synthesized
aggcuuuguucgaaagaauggug

SEQ ID NO: 18454 - RNA, 23 nt, artificial
  Chemically synthesized
aaggcuuuguucgaaagaauggu

SEQ ID NO: 18455 - RNA, 23 nt, artificial
  Chemically synthesized
aaaggcuuuguucgaaagaaugg

SEQ ID NO: 18456 - RNA, 23 nt, artificial
  Chemically synthesized
uaaaggcuuuguucgaaagaaug

SEQ ID NO: 18457 - RNA, 23 nt, artificial
  Chemically synthesized
uuaaaggcuuuguucgaaagaau

SEQ ID NO: 18458 - RNA, 23 nt, artificial
  Chemically synthesized
cuaacugcucucagagaaaguag

SEQ ID NO: 18459 - RNA, 23 nt, artificial
  Chemically synthesized
acuaacugcucucagagaaagua

SEQ ID NO: 18460 - RNA, 23 nt, artificial
  Chemically synthesized
uacuaacugcucucagagaaagu

SEQ ID NO: 18461 - RNA, 23 nt, artificial
  Chemically synthesized
auacuaacugcucucagagaaag

SEQ ID NO: 18462 - RNA, 23 nt, artificial
  Chemically synthesized
gauacuaacugcucucagagaaa

SEQ ID NO: 18463 - RNA, 23 nt, artificial
  Chemically synthesized
ggaagcgguuuacgagugacuug

SEQ ID NO: 18464 - RNA, 23 nt, artificial
  Chemically synthesized
gggaagcgguuuacgagugacuu

SEQ ID NO: 18465 - RNA, 23 nt, artificial
  Chemically synthesized
agggaagcgguuuacgagugacu

SEQ ID NO: 18466 - RNA, 23 nt, artificial
  Chemically synthesized
gagggaagcgguuuacgagugac

SEQ ID NO: 18467 - RNA, 23 nt, artificial
  Chemically synthesized
ugagggaagcgguuuacgaguga

SEQ ID NO: 18468 - RNA, 23 nt, artificial
  Chemically synthesized
gcaggccacuuugccucuaaauu

SEQ ID NO: 18469 - RNA, 23 nt, artificial
  Chemically synthesized
ggcaggccacuuugccucuaaau

SEQ ID NO: 18470 - RNA, 23 nt, artificial
  Chemically synthesized
aggcaggccacuuugccucuaaa

SEQ ID NO: 18471 - RNA, 23 nt, artificial
  Chemically synthesized
guucgaaagaauggugucaauga

SEQ ID NO: 18472 - RNA, 23 nt, artificial
  Chemically synthesized
aauaggaguguaugcagaggaug

SEQ ID NO: 18473 - RNA, 23 nt, artificial
  Chemically synthesized
aaauaggaguguaugcagaggau

SEQ ID NO: 18474 - RNA, 23 nt, artificial
  Chemically synthesized
gcaucaacuucauggaaagaaag

SEQ ID NO: 18475 - RNA, 23 nt, artificial
  Chemically synthesized
agacacagcagaacagaaaguuc

SEQ ID NO: 18476 - RNA, 23 nt, artificial
  Chemically synthesized
aagacacagcagaacagaaaguu

SEQ ID NO: 18477 - RNA, 23 nt, artificial
  Chemically synthesized
caagacacagcagaacagaaagu

SEQ ID NO: 18478 - RNA, 23 nt, artificial
  Chemically synthesized
ccaagacacagcagaacagaaag

SEQ ID NO: 18479 - RNA, 23 nt, artificial
  Chemically synthesized
uccaagacacagcagaacagaaa

SEQ ID NO: 18480 - RNA, 23 nt, artificial
  Chemically synthesized
cuaucauccucaaggacauuacu

SEQ ID NO: 18481 - RNA, 23 nt, artificial
  Chemically synthesized
acuaucauccucaaggacauuac

SEQ ID NO: 18482 - RNA, 23 nt, artificial
  Chemically synthesized
gacuaucauccucaaggacauua

SEQ ID NO: 18483 - RNA, 23 nt, artificial
  Chemically synthesized
agacuaucauccucaaggacauu

SEQ ID NO: 18484 - RNA, 23 nt, artificial
  Chemically synthesized
cagacuaucauccucaaggacau

SEQ ID NO: 18485 - RNA, 23 nt, artificial
  Chemically synthesized
caugaacccauguuugcaaucaa

SEQ ID NO: 18486 - RNA, 23 nt, artificial
  Chemically synthesized
gcagcuuauacauagcaauggua

SEQ ID NO: 18487 - RNA, 23 nt, artificial
  Chemically synthesized
gccucuaaauuaccucugauaau

SEQ ID NO: 18488 - RNA, 23 nt, artificial
  Chemically synthesized
ugccucuaaauuaccucugauaa

SEQ ID NO: 18489 - RNA, 23 nt, artificial
  Chemically synthesized
uugccucuaaauuaccucugaua

SEQ ID NO: 18490 - RNA, 23 nt, artificial
  Chemically synthesized
uuugccucuaaauuaccucugau

SEQ ID NO: 18491 - RNA, 23 nt, artificial
  Chemically synthesized
cuuugccucuaaauuaccucuga

SEQ ID NO: 18492 - RNA, 23 nt, artificial
  Chemically synthesized
aguggcaugcuaaguacccaaau

SEQ ID NO: 18493 - RNA, 23 nt, artificial
  Chemically synthesized
auguucaauaaugucccauguaa

SEQ ID NO: 18494 - RNA, 23 nt, artificial
  Chemically synthesized
guccaagacacagcagaacagaa

SEQ ID NO: 18495 - RNA, 23 nt, artificial
  Chemically synthesized
uguucgaaagaauggugucaaug

SEQ ID NO: 18496 - RNA, 23 nt, artificial
  Chemically synthesized
uuguucgaaagaauggugucaau

SEQ ID NO: 18497 - RNA, 23 nt, artificial
  Chemically synthesized
guaaaaucaucaucuggauuuag

SEQ ID NO: 18498 - RNA, 23 nt, artificial
  Chemically synthesized
gguaaaaucaucaucuggauuua

SEQ ID NO: 18499 - RNA, 23 nt, artificial
  Chemically synthesized
ugguaaaaucaucaucuggauuu

SEQ ID NO: 18500 - RNA, 23 nt, artificial
  Chemically synthesized
augguaaaaucaucaucuggauu

SEQ ID NO: 18501 - RNA, 23 nt, artificial
  Chemically synthesized
aaugguaaaaucaucaucuggau

SEQ ID NO: 18502 - RNA, 23 nt, artificial
  Chemically synthesized
ucguccaaaaguguuaaugccca

SEQ ID NO: 18503 - RNA, 23 nt, artificial
  Chemically synthesized
cauuuauuagcgcugaagagcca

SEQ ID NO: 18504 - RNA, 23 nt, artificial
  Chemically synthesized
ucauuuauuagcgcugaagagcc

SEQ ID NO: 18505 - RNA, 23 nt, artificial
  Chemically synthesized
aucauuuauuagcgcugaagagc

SEQ ID NO: 18506 - RNA, 23 nt, artificial
  Chemically synthesized
uaucauuuauuagcgcugaagag

SEQ ID NO: 18507 - RNA, 23 nt, artificial
  Chemically synthesized
uuaucauuuauuagcgcugaaga

SEQ ID NO: 18508 - RNA, 23 nt, artificial
  Chemically synthesized
cuaugaccuuuugcugaaauauc

SEQ ID NO: 18509 - RNA, 23 nt, artificial
  Chemically synthesized
cuagagugaaaaacaacaaauuc

SEQ ID NO: 18510 - RNA, 23 nt, artificial
  Chemically synthesized
ucuagagugaaaaacaacaaauu

SEQ ID NO: 18511 - RNA, 23 nt, artificial
  Chemically synthesized
gucuagagugaaaaacaacaaau

SEQ ID NO: 18512 - RNA, 23 nt, artificial
  Chemically synthesized
cacucaccagcaacaccaagugc

SEQ ID NO: 18513 - RNA, 23 nt, artificial
  Chemically synthesized
acacucaccagcaacaccaagug

SEQ ID NO: 18514 - RNA, 23 nt, artificial
  Chemically synthesized
cacacucaccagcaacaccaagu

SEQ ID NO: 18515 - RNA, 23 nt, artificial
  Chemically synthesized
gcacacucaccagcaacaccaag

SEQ ID NO: 18516 - RNA, 23 nt, artificial
  Chemically synthesized
ugcacacucaccagcaacaccaa

SEQ ID NO: 18517 - RNA, 23 nt, artificial
  Chemically synthesized
ccaccuaaagaacuuccauuuau

SEQ ID NO: 18518 - RNA, 23 nt, artificial
  Chemically synthesized
accaccuaaagaacuuccauuua

SEQ ID NO: 18519 - RNA, 23 nt, artificial
  Chemically synthesized
aaccaccuaaagaacuuccauuu

SEQ ID NO: 18520 - RNA, 23 nt, artificial
  Chemically synthesized
gaaccaccuaaagaacuuccauu

SEQ ID NO: 18521 - RNA, 23 nt, artificial
  Chemically synthesized
ggaaccaccuaaagaacuuccau

SEQ ID NO: 18522 - RNA, 23 nt, artificial
  Chemically synthesized
aaucuaguugggaaaacaaacuu

SEQ ID NO: 18523 - RNA, 23 nt, artificial
  Chemically synthesized
aaaucuaguugggaaaacaaacu

SEQ ID NO: 18524 - RNA, 23 nt, artificial
  Chemically synthesized
aaaaucuaguugggaaaacaaac

SEQ ID NO: 18525 - RNA, 23 nt, artificial
  Chemically synthesized
uaaaaucuaguugggaaaacaaa

SEQ ID NO: 18526 - RNA, 23 nt, artificial
  Chemically synthesized
uuaaaaucuaguugggaaaacaa

SEQ ID NO: 18527 - RNA, 23 nt, artificial
  Chemically synthesized
cagcaacaccaagugcaaagagg

SEQ ID NO: 18528 - RNA, 23 nt, artificial
  Chemically synthesized
gaaagaaagaagcguaugacaca

SEQ ID NO: 18529 - RNA, 23 nt, artificial
  Chemically synthesized
ggaaagaaagaagcguaugacac

SEQ ID NO: 18530 - RNA, 23 nt, artificial
  Chemically synthesized
uggaaagaaagaagcguaugaca

SEQ ID NO: 18531 - RNA, 23 nt, artificial
  Chemically synthesized
auggaaagaaagaagcguaugac

SEQ ID NO: 18532 - RNA, 23 nt, artificial
  Chemically synthesized
cauggaaagaaagaagcguauga

SEQ ID NO: 18533 - RNA, 23 nt, artificial
  Chemically synthesized
ccaaguugcugaaucaauggagc

SEQ ID NO: 18534 - RNA, 23 nt, artificial
  Chemically synthesized
gccaaguugcugaaucaauggag

SEQ ID NO: 18535 - RNA, 23 nt, artificial
  Chemically synthesized
ggccaaguugcugaaucaaugga

SEQ ID NO: 18536 - RNA, 23 nt, artificial
  Chemically synthesized
aggccaaguugcugaaucaaugg

SEQ ID NO: 18537 - RNA, 23 nt, artificial
  Chemically synthesized
caggccaaguugcugaaucaaug

SEQ ID NO: 18538 - RNA, 23 nt, artificial
  Chemically synthesized
gcaggccaaguugcugaaucaau

SEQ ID NO: 18539 - RNA, 23 nt, artificial
  Chemically synthesized
cgcaggccaaguugcugaaucaa

SEQ ID NO: 18540 - RNA, 23 nt, artificial
  Chemically synthesized
gcgcaggccaaguugcugaauca

SEQ ID NO: 18541 - RNA, 23 nt, artificial
  Chemically synthesized
cugaguauaugcaauuaguguuu

SEQ ID NO: 18542 - RNA, 23 nt, artificial
  Chemically synthesized
ucugaguauaugcaauuaguguu

SEQ ID NO: 18543 - RNA, 23 nt, artificial
  Chemically synthesized
uucugaguauaugcaauuagugu

SEQ ID NO: 18544 - RNA, 23 nt, artificial
  Chemically synthesized
guucugaguauaugcaauuagug

SEQ ID NO: 18545 - RNA, 23 nt, artificial
  Chemically synthesized
aguucugaguauaugcaauuagu

SEQ ID NO: 18546 - RNA, 23 nt, artificial
  Chemically synthesized
cuacaguugagacucagaacuug

SEQ ID NO: 18547 - RNA, 23 nt, artificial
  Chemically synthesized
acuacaguugagacucagaacuu

SEQ ID NO: 18548 - RNA, 23 nt, artificial
  Chemically synthesized
uacuacaguugagacucagaacu

SEQ ID NO: 18549 - RNA, 23 nt, artificial
  Chemically synthesized
uuacuacaguugagacucagaac

SEQ ID NO: 18550 - RNA, 23 nt, artificial
  Chemically synthesized
guuacuacaguugagacucagaa

SEQ ID NO: 18551 - RNA, 23 nt, artificial
  Chemically synthesized
ggugucaaugaagccaaaauaga

SEQ ID NO: 18552 - RNA, 23 nt, artificial
  Chemically synthesized
guuauaaacugaagcagauaccu

SEQ ID NO: 18553 - RNA, 23 nt, artificial
  Chemically synthesized
aguuauaaacugaagcagauacc

SEQ ID NO: 18554 - RNA, 23 nt, artificial
  Chemically synthesized
uaguuauaaacugaagcagauac

SEQ ID NO: 18555 - RNA, 23 nt, artificial
  Chemically synthesized
auaguuauaaacugaagcagaua

SEQ ID NO: 18556 - RNA, 23 nt, artificial
  Chemically synthesized
gauaguuauaaacugaagcagau

SEQ ID NO: 18557 - RNA, 23 nt, artificial
  Chemically synthesized
gcucuggcaucuaacauaugauu

SEQ ID NO: 18558 - RNA, 23 nt, artificial
  Chemically synthesized
ugcucuggcaucuaacauaugau

SEQ ID NO: 18559 - RNA, 23 nt, artificial
  Chemically synthesized
augcucuggcaucuaacauauga

SEQ ID NO: 18560 - RNA, 23 nt, artificial
  Chemically synthesized
uaugcucuggcaucuaacauaug

SEQ ID NO: 18561 - RNA, 23 nt, artificial
  Chemically synthesized
uuaugcucuggcaucuaacauau

SEQ ID NO: 18562 - RNA, 23 nt, artificial
  Chemically synthesized
gugagggaagcgguuuacgagug

SEQ ID NO: 18563 - RNA, 23 nt, artificial
  Chemically synthesized
agugagggaagcgguuuacgagu

SEQ ID NO: 18564 - RNA, 23 nt, artificial
  Chemically synthesized
cuuugugacaugucaugaaccca

SEQ ID NO: 18565 - RNA, 23 nt, artificial
  Chemically synthesized
gcuuugugacaugucaugaaccc

SEQ ID NO: 18566 - RNA, 23 nt, artificial
  Chemically synthesized
agcuuugugacaugucaugaacc

SEQ ID NO: 18567 - RNA, 23 nt, artificial
  Chemically synthesized
uagcuuugugacaugucaugaac

SEQ ID NO: 18568 - RNA, 23 nt, artificial
  Chemically synthesized
guagcuuugugacaugucaugaa

SEQ ID NO: 18569 - RNA, 23 nt, artificial
  Chemically synthesized
ucuagccugguuuggagauacua

SEQ ID NO: 18570 - RNA, 23 nt, artificial
  Chemically synthesized
ccucuaaauuaccucugauaauu

SEQ ID NO: 18571 - RNA, 23 nt, artificial
  Chemically synthesized
ucuuucucaggcaucaaaagcau

SEQ ID NO: 18572 - RNA, 23 nt, artificial
  Chemically synthesized
uucuuucucaggcaucaaaagca

SEQ ID NO: 18573 - RNA, 23 nt, artificial
  Chemically synthesized
cuucuuucucaggcaucaaaagc

SEQ ID NO: 18574 - RNA, 23 nt, artificial
  Chemically synthesized
acuucuuucucaggcaucaaaag

SEQ ID NO: 18575 - RNA, 23 nt, artificial
  Chemically synthesized
uacuucuuucucaggcaucaaaa

SEQ ID NO: 18576 - RNA, 23 nt, artificial
  Chemically synthesized
aaguucaacugcuucguaauugg

SEQ ID NO: 18577 - RNA, 23 nt, artificial
  Chemically synthesized
aaaguucaacugcuucguaauug

SEQ ID NO: 18578 - RNA, 23 nt, artificial
  Chemically synthesized
gaaaguucaacugcuucguaauu

SEQ ID NO: 18579 - RNA, 23 nt, artificial
  Chemically synthesized
agaaaguucaacugcuucguaau

SEQ ID NO: 18580 - RNA, 23 nt, artificial
  Chemically synthesized
cagaaaguucaacugcuucguaa

SEQ ID NO: 18581 - RNA, 23 nt, artificial
  Chemically synthesized
gaaucaauagaagaagcuaugac

SEQ ID NO: 18582 - RNA, 23 nt, artificial
  Chemically synthesized
ugaaucaauagaagaagcuauga

SEQ ID NO: 18583 - RNA, 23 nt, artificial
  Chemically synthesized
augaaucaauagaagaagcuaug

SEQ ID NO: 18584 - RNA, 23 nt, artificial
  Chemically synthesized
uaugaaucaauagaagaagcuau

SEQ ID NO: 18585 - RNA, 23 nt, artificial
  Chemically synthesized
cuaugaaucaauagaagaagcua

SEQ ID NO: 18586 - RNA, 23 nt, artificial
  Chemically synthesized
ucggaggauugcucaacaaccau

SEQ ID NO: 18587 - RNA, 23 nt, artificial
  Chemically synthesized
uucggaggauugcucaacaacca

SEQ ID NO: 18588 - RNA, 23 nt, artificial
  Chemically synthesized
cuucggaggauugcucaacaacc

SEQ ID NO: 18589 - RNA, 23 nt, artificial
  Chemically synthesized
acuucggaggauugcucaacaac

SEQ ID NO: 18590 - RNA, 23 nt, artificial
  Chemically synthesized
cacuucggaggauugcucaacaa

SEQ ID NO: 18591 - RNA, 23 nt, artificial
  Chemically synthesized
ccaagggauuggaauugaggaag

SEQ ID NO: 18592 - RNA, 23 nt, artificial
  Chemically synthesized
uccaagggauuggaauugaggaa

SEQ ID NO: 18593 - RNA, 23 nt, artificial
  Chemically synthesized
agauaguuauaaacugaagcaga

SEQ ID NO: 18594 - RNA, 23 nt, artificial
  Chemically synthesized
agauacuaacugcucucagagaa

SEQ ID NO: 18595 - RNA, 23 nt, artificial
  Chemically synthesized
gagauacuaacugcucucagaga

SEQ ID NO: 18596 - RNA, 23 nt, artificial
  Chemically synthesized
ggagauacuaacugcucucagag

SEQ ID NO: 18597 - RNA, 23 nt, artificial
  Chemically synthesized
uggagauacuaacugcucucaga

SEQ ID NO: 18598 - RNA, 23 nt, artificial
  Chemically synthesized
ggaaaacaaacuucaucaagagu

SEQ ID NO: 18599 - RNA, 23 nt, artificial
  Chemically synthesized
gggaaaacaaacuucaucaagag

SEQ ID NO: 18600 - RNA, 23 nt, artificial
  Chemically synthesized
ugggaaaacaaacuucaucaaga

SEQ ID NO: 18601 - RNA, 23 nt, artificial
  Chemically synthesized
uugggaaaacaaacuucaucaag

SEQ ID NO: 18602 - RNA, 23 nt, artificial
  Chemically synthesized
guugggaaaacaaacuucaucaa

SEQ ID NO: 18603 - RNA, 23 nt, artificial
  Chemically synthesized
cauggaaucaucaaggaaugcac

SEQ ID NO: 18604 - RNA, 23 nt, artificial
  Chemically synthesized
acauggaaucaucaaggaaugca

SEQ ID NO: 18605 - RNA, 23 nt, artificial
  Chemically synthesized
aacauggaaucaucaaggaaugc

SEQ ID NO: 18606 - RNA, 23 nt, artificial
  Chemically synthesized
gaacauggaaucaucaaggaaug

SEQ ID NO: 18607 - RNA, 23 nt, artificial
  Chemically synthesized
ugaacauggaaucaucaaggaau

SEQ ID NO: 18608 - RNA, 23 nt, artificial
  Chemically synthesized
ccauguaaaaccugcuacaaaug

SEQ ID NO: 18609 - RNA, 23 nt, artificial
  Chemically synthesized
cccauguaaaaccugcuacaaau

SEQ ID NO: 18610 - RNA, 23 nt, artificial
  Chemically synthesized
ucccauguaaaaccugcuacaaa

SEQ ID NO: 18611 - RNA, 23 nt, artificial
  Chemically synthesized
gucccauguaaaaccugcuacaa

SEQ ID NO: 18612 - RNA, 23 nt, artificial
  Chemically synthesized
ugucccauguaaaaccugcuaca

SEQ ID NO: 18613 - RNA, 23 nt, artificial
  Chemically synthesized
ucaucaucuggauuuaggaauug

SEQ ID NO: 18614 - RNA, 23 nt, artificial
  Chemically synthesized
aucaucaucuggauuuaggaauu

SEQ ID NO: 18615 - RNA, 23 nt, artificial
  Chemically synthesized
aaucaucaucuggauuuaggaau

SEQ ID NO: 18616 - RNA, 23 nt, artificial
  Chemically synthesized
aaaucaucaucuggauuuaggaa

SEQ ID NO: 18617 - RNA, 23 nt, artificial
  Chemically synthesized
aaaaucaucaucuggauuuagga

SEQ ID NO: 18618 - RNA, 23 nt, artificial
  Chemically synthesized
aaaugcaguggcaugcuaaguac

SEQ ID NO: 18619 - RNA, 23 nt, artificial
  Chemically synthesized
uaaaugcaguggcaugcuaagua

SEQ ID NO: 18620 - RNA, 23 nt, artificial
  Chemically synthesized
guaaaugcaguggcaugcuaagu

SEQ ID NO: 18621 - RNA, 23 nt, artificial
  Chemically synthesized
aguaaaugcaguggcaugcuaag

SEQ ID NO: 18622 - RNA, 23 nt, artificial
  Chemically synthesized
gaguaaaugcaguggcaugcuaa

SEQ ID NO: 18623 - RNA, 23 nt, artificial
  Chemically synthesized
auuagcgcugaagagccaacaua

SEQ ID NO: 18624 - RNA, 23 nt, artificial
  Chemically synthesized
caauguccaagacacagcagaac

SEQ ID NO: 18625 - RNA, 23 nt, artificial
  Chemically synthesized
acaauguccaagacacagcagaa

SEQ ID NO: 18626 - RNA, 23 nt, artificial
  Chemically synthesized
gacaauguccaagacacagcaga

SEQ ID NO: 18627 - RNA, 23 nt, artificial
  Chemically synthesized
ugacaauguccaagacacagcag

SEQ ID NO: 18628 - RNA, 23 nt, artificial
  Chemically synthesized
augacaauguccaagacacagca

SEQ ID NO: 18629 - RNA, 23 nt, artificial
  Chemically synthesized
gugaacauggaaucaucaaggaa

SEQ ID NO: 18630 - RNA, 23 nt, artificial
  Chemically synthesized
aaauaaggcucuaccucaaagac

SEQ ID NO: 18631 - RNA, 23 nt, artificial
  Chemically synthesized
uaaauaaggcucuaccucaaaga

SEQ ID NO: 18632 - RNA, 23 nt, artificial
  Chemically synthesized
uuaaauaaggcucuaccucaaag

SEQ ID NO: 18633 - RNA, 23 nt, artificial
  Chemically synthesized
uuuaaauaaggcucuaccucaaa

SEQ ID NO: 18634 - RNA, 23 nt, artificial
  Chemically synthesized
auuuaaauaaggcucuaccucaa

SEQ ID NO: 18635 - RNA, 23 nt, artificial
  Chemically synthesized
ccuaaagaacuuccauuuaugga

SEQ ID NO: 18636 - RNA, 23 nt, artificial
  Chemically synthesized
accuaaagaacuuccauuuaugg

SEQ ID NO: 18637 - RNA, 23 nt, artificial
  Chemically synthesized
caccuaaagaacuuccauuuaug

SEQ ID NO: 18638 - RNA, 23 nt, artificial
  Chemically synthesized
uacuggcucaaaacuaccuacuu

SEQ ID NO: 18639 - RNA, 23 nt, artificial
  Chemically synthesized
caagacugcccuuagaaauucua

SEQ ID NO: 18640 - RNA, 23 nt, artificial
  Chemically synthesized
agaccuuugcacaguuuauuggu

SEQ ID NO: 18641 - RNA, 23 nt, artificial
  Chemically synthesized
aagaccuuugcacaguuuauugg

SEQ ID NO: 18642 - RNA, 23 nt, artificial
  Chemically synthesized
aaagaccuuugcacaguuuauug

SEQ ID NO: 18643 - RNA, 23 nt, artificial
  Chemically synthesized
caaagaccuuugcacaguuuauu

SEQ ID NO: 18644 - RNA, 23 nt, artificial
  Chemically synthesized
ucaaagaccuuugcacaguuuau

SEQ ID NO: 18645 - RNA, 23 nt, artificial
  Chemically synthesized
aguugggaaaacaaacuucauca

SEQ ID NO: 18646 - RNA, 23 nt, artificial
  Chemically synthesized
ucaacuucauggaaagaaagaag

SEQ ID NO: 18647 - RNA, 23 nt, artificial
  Chemically synthesized
aucaacuucauggaaagaaagaa

SEQ ID NO: 18648 - RNA, 23 nt, artificial
  Chemically synthesized
caucaacuucauggaaagaaaga

SEQ ID NO: 18649 - RNA, 23 nt, artificial
  Chemically synthesized
ccuuacuacuauccuacguuuaa

SEQ ID NO: 18650 - RNA, 23 nt, artificial
  Chemically synthesized
gaaagaagcguaugacacauuga

SEQ ID NO: 18651 - RNA, 23 nt, artificial
  Chemically synthesized
agaaagaagcguaugacacauug

SEQ ID NO: 18652 - RNA, 23 nt, artificial
  Chemically synthesized
aagaaagaagcguaugacacauu

SEQ ID NO: 18653 - RNA, 23 nt, artificial
  Chemically synthesized
aaagaaagaagcguaugacacau

SEQ ID NO: 18654 - RNA, 23 nt, artificial
  Chemically synthesized
uuuugccuuggugcucaucuuaa

SEQ ID NO: 18655 - RNA, 23 nt, artificial
  Chemically synthesized
agaggaugaaagauuaagauuau

SEQ ID NO: 18656 - RNA, 23 nt, artificial
  Chemically synthesized
cagaggaugaaagauuaagauua

SEQ ID NO: 18657 - RNA, 23 nt, artificial
  Chemically synthesized
ucuugcagagaaaauucagacua

SEQ ID NO: 18658 - RNA, 23 nt, artificial
  Chemically synthesized
cucuugcagagaaaauucagacu

SEQ ID NO: 18659 - RNA, 23 nt, artificial
  Chemically synthesized
acucuugcagagaaaauucagac

SEQ ID NO: 18660 - RNA, 23 nt, artificial
  Chemically synthesized
uacucuugcagagaaaauucaga

SEQ ID NO: 18661 - RNA, 23 nt, artificial
  Chemically synthesized
aguucaacugcuucguaauuggc

SEQ ID NO: 18662 - RNA, 23 nt, artificial
  Chemically synthesized
cccaaguuucuaagauuuaagau

SEQ ID NO: 18663 - RNA, 23 nt, artificial
  Chemically synthesized
ccccaaguuucuaagauuuaaga

SEQ ID NO: 18664 - RNA, 23 nt, artificial
  Chemically synthesized
cccccaaguuucuaagauuuaag

SEQ ID NO: 18665 - RNA, 23 nt, artificial
  Chemically synthesized
acccccaaguuucuaagauuuaa

SEQ ID NO: 18666 - RNA, 23 nt, artificial
  Chemically synthesized
uacccccaaguuucuaagauuua

SEQ ID NO: 18667 - RNA, 23 nt, artificial
  Chemically synthesized
agaagcguaugacacauugauua

SEQ ID NO: 18668 - RNA, 23 nt, artificial
  Chemically synthesized
aagaagcguaugacacauugauu

SEQ ID NO: 18669 - RNA, 23 nt, artificial
  Chemically synthesized
aaagaagcguaugacacauugau

SEQ ID NO: 18670 - RNA, 23 nt, artificial
  Chemically synthesized
gagaaaauucagacuaucauccu

SEQ ID NO: 18671 - RNA, 23 nt, artificial
  Chemically synthesized
agagaaaauucagacuaucaucc

SEQ ID NO: 18672 - RNA, 23 nt, artificial
  Chemically synthesized
aaaaggcaagacugcccuuagaa

SEQ ID NO: 18673 - RNA, 23 nt, artificial
  Chemically synthesized
caaaaggcaagacugcccuuaga

SEQ ID NO: 18674 - RNA, 23 nt, artificial
  Chemically synthesized
augagaucaagaaugacaauguc

SEQ ID NO: 18675 - RNA, 23 nt, artificial
  Chemically synthesized
gaugagaucaagaaugacaaugu

SEQ ID NO: 18676 - RNA, 23 nt, artificial
  Chemically synthesized
agaugagaucaagaaugacaaug

SEQ ID NO: 18677 - RNA, 23 nt, artificial
  Chemically synthesized
uagaugagaucaagaaugacaau

SEQ ID NO: 18678 - RNA, 23 nt, artificial
  Chemically synthesized
auagaugagaucaagaaugacaa

SEQ ID NO: 18679 - RNA, 23 nt, artificial
  Chemically synthesized
agagaaaguagcuuugugacaug

SEQ ID NO: 18680 - RNA, 23 nt, artificial
  Chemically synthesized
cagagaaaguagcuuugugacau

SEQ ID NO: 18681 - RNA, 23 nt, artificial
  Chemically synthesized
ucagagaaaguagcuuugugaca

SEQ ID NO: 18682 - RNA, 23 nt, artificial
  Chemically synthesized
cucagagaaaguagcuuugugac

SEQ ID NO: 18683 - RNA, 23 nt, artificial
  Chemically synthesized
ucucagagaaaguagcuuuguga

SEQ ID NO: 18684 - RNA, 23 nt, artificial
  Chemically synthesized
caucaagaguaaaugcaguggca

SEQ ID NO: 18685 - RNA, 23 nt, artificial
  Chemically synthesized
ucaucaagaguaaaugcaguggc

SEQ ID NO: 18686 - RNA, 23 nt, artificial
  Chemically synthesized
uucaucaagaguaaaugcagugg

SEQ ID NO: 18687 - RNA, 23 nt, artificial
  Chemically synthesized
cuucaucaagaguaaaugcagug

SEQ ID NO: 18688 - RNA, 23 nt, artificial
  Chemically synthesized
acuucaucaagaguaaaugcagu

SEQ ID NO: 18689 - RNA, 23 nt, artificial
  Chemically synthesized
agauaccuggaaccaccuaaaga

SEQ ID NO: 18690 - RNA, 23 nt, artificial
  Chemically synthesized
cagauaccuggaaccaccuaaag

SEQ ID NO: 18691 - RNA, 23 nt, artificial
  Chemically synthesized
gcagauaccuggaaccaccuaaa

SEQ ID NO: 18692 - RNA, 23 nt, artificial
  Chemically synthesized
ucuccuuacuacuauccuacguu

SEQ ID NO: 18693 - RNA, 23 nt, artificial
  Chemically synthesized
uucuccuuacuacuauccuacgu

SEQ ID NO: 18694 - RNA, 23 nt, artificial
  Chemically synthesized
auucuccuuacuacuauccuacg

SEQ ID NO: 18695 - RNA, 23 nt, artificial
  Chemically synthesized
gauucuccuuacuacuauccuac

SEQ ID NO: 18696 - RNA, 23 nt, artificial
  Chemically synthesized
agauucuccuuacuacuauccua

SEQ ID NO: 18697 - RNA, 23 nt, artificial
  Chemically synthesized
uccaaagcuuggucuagagugaa

SEQ ID NO: 18698 - RNA, 23 nt, artificial
  Chemically synthesized
auccaaagcuuggucuagaguga

SEQ ID NO: 18699 - RNA, 23 nt, artificial
  Chemically synthesized
uucugccuccaaggauguuuaaa

SEQ ID NO: 18700 - RNA, 23 nt, artificial
  Chemically synthesized
auucugccuccaaggauguuuaa

SEQ ID NO: 18701 - RNA, 23 nt, artificial
  Chemically synthesized
gauucugccuccaaggauguuua

SEQ ID NO: 18702 - RNA, 23 nt, artificial
  Chemically synthesized
gcuacaaauggcagcuuauacau

SEQ ID NO: 18703 - RNA, 23 nt, artificial
  Chemically synthesized
ugcuacaaauggcagcuuauaca

SEQ ID NO: 18704 - RNA, 23 nt, artificial
  Chemically synthesized
cugcuacaaauggcagcuuauac

SEQ ID NO: 18705 - RNA, 23 nt, artificial
  Chemically synthesized
ccugcuacaaauggcagcuuaua

SEQ ID NO: 18706 - RNA, 23 nt, artificial
  Chemically synthesized
accugcuacaaauggcagcuuau

SEQ ID NO: 18707 - RNA, 23 nt, artificial
  Chemically synthesized
gugacucagaaaauucaaacuuc

SEQ ID NO: 18708 - RNA, 23 nt, artificial
  Chemically synthesized
agugacucagaaaauucaaacuu

SEQ ID NO: 18709 - RNA, 23 nt, artificial
  Chemically synthesized
uagugacucagaaaauucaaacu

SEQ ID NO: 18710 - RNA, 23 nt, artificial
  Chemically synthesized
cuagugacucagaaaauucaaac

SEQ ID NO: 18711 - RNA, 23 nt, artificial
  Chemically synthesized
acuagugacucagaaaauucaaa

SEQ ID NO: 18712 - RNA, 23 nt, artificial
  Chemically synthesized
agaucucaaaaaagccaaucuuu

SEQ ID NO: 18713 - RNA, 23 nt, artificial
  Chemically synthesized
aagaucucaaaaaagccaaucuu

SEQ ID NO: 18714 - RNA, 23 nt, artificial
  Chemically synthesized
aaagaucucaaaaaagccaaucu

SEQ ID NO: 18715 - RNA, 23 nt, artificial
  Chemically synthesized
uaaagaucucaaaaaagccaauc

SEQ ID NO: 18716 - RNA, 23 nt, artificial
  Chemically synthesized
uuaaagaucucaaaaaagccaau

SEQ ID NO: 18717 - RNA, 23 nt, artificial
  Chemically synthesized
gaguaaauauaucaccacuauug

SEQ ID NO: 18718 - RNA, 23 nt, artificial
  Chemically synthesized
ugaguaaauauaucaccacuauu

SEQ ID NO: 18719 - RNA, 23 nt, artificial
  Chemically synthesized
uugaguaaauauaucaccacuau

SEQ ID NO: 18720 - RNA, 23 nt, artificial
  Chemically synthesized
cuugaguaaauauaucaccacua

SEQ ID NO: 18721 - RNA, 23 nt, artificial
  Chemically synthesized
acuugaguaaauauaucaccacu

SEQ ID NO: 18722 - RNA, 23 nt, artificial
  Chemically synthesized
ccucaaggacauuacuagugacu

SEQ ID NO: 18723 - RNA, 23 nt, artificial
  Chemically synthesized
uccucaaggacauuacuagugac

SEQ ID NO: 18724 - RNA, 23 nt, artificial
  Chemically synthesized
auccucaaggacauuacuaguga

SEQ ID NO: 18725 - RNA, 23 nt, artificial
  Chemically synthesized
cauccucaaggacauuacuagug

SEQ ID NO: 18726 - RNA, 23 nt, artificial
  Chemically synthesized
ucauccucaaggacauuacuagu

SEQ ID NO: 18727 - RNA, 23 nt, artificial
  Chemically synthesized
acuaccuacuucuuucucaggca

SEQ ID NO: 18728 - RNA, 23 nt, artificial
  Chemically synthesized
aacuaccuacuucuuucucaggc

SEQ ID NO: 18729 - RNA, 23 nt, artificial
  Chemically synthesized
aaacuaccuacuucuuucucagg

SEQ ID NO: 18730 - RNA, 23 nt, artificial
  Chemically synthesized
aaaacuaccuacuucuuucucag

SEQ ID NO: 18731 - RNA, 23 nt, artificial
  Chemically synthesized
cuugguuuuuuacuggguacauu

SEQ ID NO: 18732 - RNA, 23 nt, artificial
  Chemically synthesized
gcuugguuuuuuacuggguacau

SEQ ID NO: 18733 - RNA, 23 nt, artificial
  Chemically synthesized
ugcuugguuuuuuacuggguaca

SEQ ID NO: 18734 - RNA, 23 nt, artificial
  Chemically synthesized
cugcuugguuuuuuacuggguac

SEQ ID NO: 18735 - RNA, 23 nt, artificial
  Chemically synthesized
acugcuugguuuuuuacugggua

SEQ ID NO: 18736 - RNA, 23 nt, artificial
  Chemically synthesized
gaggauugcucaacaaccaugcu

SEQ ID NO: 18737 - RNA, 23 nt, artificial
  Chemically synthesized
ggaggauugcucaacaaccaugc

SEQ ID NO: 18738 - RNA, 23 nt, artificial
  Chemically synthesized
cggaggauugcucaacaaccaug

SEQ ID NO: 18739 - RNA, 23 nt, artificial
  Chemically synthesized
agcagauaccuggaaccaccuaa

SEQ ID NO: 18740 - RNA, 23 nt, artificial
  Chemically synthesized
caaauaggaguguaugcagagga

SEQ ID NO: 18741 - RNA, 23 nt, artificial
  Chemically synthesized
ccaaauaggaguguaugcagagg

SEQ ID NO: 18742 - RNA, 23 nt, artificial
  Chemically synthesized
cccaaauaggaguguaugcagag

SEQ ID NO: 18743 - RNA, 23 nt, artificial
  Chemically synthesized
acccaaauaggaguguaugcaga

SEQ ID NO: 18744 - RNA, 23 nt, artificial
  Chemically synthesized
uguccaagacacagcagaacaga

SEQ ID NO: 18745 - RNA, 23 nt, artificial
  Chemically synthesized
auguccaagacacagcagaacag

SEQ ID NO: 18746 - RNA, 23 nt, artificial
  Chemically synthesized
aauguccaagacacagcagaaca

SEQ ID NO: 18747 - RNA, 23 nt, artificial
  Chemically synthesized
aaaauacuuaauaguccaccaaa

SEQ ID NO: 18748 - RNA, 23 nt, artificial
  Chemically synthesized
uggaaccaccuaaagaacuucca

SEQ ID NO: 18749 - RNA, 23 nt, artificial
  Chemically synthesized
cuggaaccaccuaaagaacuucc

SEQ ID NO: 18750 - RNA, 23 nt, artificial
  Chemically synthesized
uacuagugacucagaaaauucaa

SEQ ID NO: 18751 - RNA, 23 nt, artificial
  Chemically synthesized
gaauugaggaagacuguuacuac

SEQ ID NO: 18752 - RNA, 23 nt, artificial
  Chemically synthesized
ggaauugaggaagacuguuacua

SEQ ID NO: 18753 - RNA, 23 nt, artificial
  Chemically synthesized
uggaauugaggaagacuguuacu

SEQ ID NO: 18754 - RNA, 23 nt, artificial
  Chemically synthesized
uuggaauugaggaagacuguuac

SEQ ID NO: 18755 - RNA, 23 nt, artificial
  Chemically synthesized
auuggaauugaggaagacuguua

SEQ ID NO: 18756 - RNA, 23 nt, artificial
  Chemically synthesized
uuugagcaggagaguauuacuag

SEQ ID NO: 18757 - RNA, 23 nt, artificial
  Chemically synthesized
uuuugagcaggagaguauuacua

SEQ ID NO: 18758 - RNA, 23 nt, artificial
  Chemically synthesized
gagucaugacacuaagucaaguu

SEQ ID NO: 18759 - RNA, 23 nt, artificial
  Chemically synthesized
ggagucaugacacuaagucaagu

SEQ ID NO: 18760 - RNA, 23 nt, artificial
  Chemically synthesized
uggagucaugacacuaagucaag

SEQ ID NO: 18761 - RNA, 23 nt, artificial
  Chemically synthesized
cuggagucaugacacuaagucaa

SEQ ID NO: 18762 - RNA, 23 nt, artificial
  Chemically synthesized
gaauguaaucaguguauguuagu

SEQ ID NO: 18763 - RNA, 23 nt, artificial
  Chemically synthesized
ugaauguaaucaguguauguuag

SEQ ID NO: 18764 - RNA, 23 nt, artificial
  Chemically synthesized
augaauguaaucaguguauguua

SEQ ID NO: 18765 - RNA, 23 nt, artificial
  Chemically synthesized
uaugaauguaaucaguguauguu

SEQ ID NO: 18766 - RNA, 23 nt, artificial
  Chemically synthesized
guaugaauguaaucaguguaugu

SEQ ID NO: 18767 - RNA, 23 nt, artificial
  Chemically synthesized
cucaaagaccuuugcacaguuua

SEQ ID NO: 18768 - RNA, 23 nt, artificial
  Chemically synthesized
ucauggaaagaaagaagcguaug

SEQ ID NO: 18769 - RNA, 23 nt, artificial
  Chemically synthesized
uucauggaaagaaagaagcguau

SEQ ID NO: 18770 - RNA, 23 nt, artificial
  Chemically synthesized
guauuugagugcagaauuuaaau

SEQ ID NO: 18771 - RNA, 23 nt, artificial
  Chemically synthesized
uguauuugagugcagaauuuaaa

SEQ ID NO: 18772 - RNA, 23 nt, artificial
  Chemically synthesized
auguauuugagugcagaauuuaa

SEQ ID NO: 18773 - RNA, 23 nt, artificial
  Chemically synthesized
uauguauuugagugcagaauuua

SEQ ID NO: 18774 - RNA, 23 nt, artificial
  Chemically synthesized
auauguauuugagugcagaauuu

SEQ ID NO: 18775 - RNA, 23 nt, artificial
  Chemically synthesized
guuaaaggcuuuguucgaaagaa

SEQ ID NO: 18776 - RNA, 23 nt, artificial
  Chemically synthesized
uguaaaaccugcuacaaauggca

SEQ ID NO: 18777 - RNA, 23 nt, artificial
  Chemically synthesized
auguaaaaccugcuacaaauggc

SEQ ID NO: 18778 - RNA, 23 nt, artificial
  Chemically synthesized
cauguaaaaccugcuacaaaugg

SEQ ID NO: 18779 - RNA, 23 nt, artificial
  Chemically synthesized
gugacacacagguguucaaagac

SEQ ID NO: 18780 - RNA, 23 nt, artificial
  Chemically synthesized
agugacacacagguguucaaaga

SEQ ID NO: 18781 - RNA, 23 nt, artificial
  Chemically synthesized
gagugacacacagguguucaaag

SEQ ID NO: 18782 - RNA, 23 nt, artificial
  Chemically synthesized
agagugacacacagguguucaaa

SEQ ID NO: 18783 - RNA, 23 nt, artificial
  Chemically synthesized
aagagugacacacagguguucaa

SEQ ID NO: 18784 - RNA, 23 nt, artificial
  Chemically synthesized
cuccaagggauuggaauugagga

SEQ ID NO: 18785 - RNA, 23 nt, artificial
  Chemically synthesized
uuacuggcucaaaacuaccuacu

SEQ ID NO: 18786 - RNA, 23 nt, artificial
  Chemically synthesized
uuuacuggcucaaaacuaccuac

SEQ ID NO: 18787 - RNA, 23 nt, artificial
  Chemically synthesized
uuuuacuggcucaaaacuaccua

SEQ ID NO: 18788 - RNA, 23 nt, artificial
  Chemically synthesized
uuuaaaaucuaguugggaaaaca

SEQ ID NO: 18789 - RNA, 23 nt, artificial
  Chemically synthesized
uauauguauuugagugcagaauu

SEQ ID NO: 18790 - RNA, 23 nt, artificial
  Chemically synthesized
guauauguauuugagugcagaau

SEQ ID NO: 18791 - RNA, 23 nt, artificial
  Chemically synthesized
aguauauguauuugagugcagaa

SEQ ID NO: 18792 - RNA, 23 nt, artificial
  Chemically synthesized
cuguaaauguaaacugugaagau

SEQ ID NO: 18793 - RNA, 23 nt, artificial
  Chemically synthesized
ucuguaaauguaaacugugaaga

SEQ ID NO: 18794 - RNA, 23 nt, artificial
  Chemically synthesized
uucuguaaauguaaacugugaag

SEQ ID NO: 18795 - RNA, 23 nt, artificial
  Chemically synthesized
uuucuguaaauguaaacugugaa

SEQ ID NO: 18796 - RNA, 23 nt, artificial
  Chemically synthesized
auuucuguaaauguaaacuguga

SEQ ID NO: 18797 - RNA, 23 nt, artificial
  Chemically synthesized
ugaucucgcgcaagagugacaca

SEQ ID NO: 18798 - RNA, 23 nt, artificial
  Chemically synthesized
cugaucucgcgcaagagugacac

SEQ ID NO: 18799 - RNA, 23 nt, artificial
  Chemically synthesized
ucugaucucgcgcaagagugaca

SEQ ID NO: 18800 - RNA, 23 nt, artificial
  Chemically synthesized
cucugaucucgcgcaagagugac

SEQ ID NO: 18801 - RNA, 23 nt, artificial
  Chemically synthesized
ucucugaucucgcgcaagaguga

SEQ ID NO: 18802 - RNA, 23 nt, artificial
  Chemically synthesized
uuguacucuugcagagaaaauuc

SEQ ID NO: 18803 - RNA, 23 nt, artificial
  Chemically synthesized
uuuguacucuugcagagaaaauu

SEQ ID NO: 18804 - RNA, 23 nt, artificial
  Chemically synthesized
cuuuguacucuugcagagaaaau

SEQ ID NO: 18805 - RNA, 23 nt, artificial
  Chemically synthesized
ucuuuguacucuugcagagaaaa

SEQ ID NO: 18806 - RNA, 23 nt, artificial
  Chemically synthesized
aucuuuguacucuugcagagaaa

SEQ ID NO: 18807 - RNA, 23 nt, artificial
  Chemically synthesized
auuacuagugacucagaaaauuc

SEQ ID NO: 18808 - RNA, 23 nt, artificial
  Chemically synthesized
ucacuucggaggauugcucaaca

SEQ ID NO: 18809 - RNA, 23 nt, artificial
  Chemically synthesized
uucacuucggaggauugcucaac

SEQ ID NO: 18810 - RNA, 23 nt, artificial
  Chemically synthesized
uuucacuucggaggauugcucaa

SEQ ID NO: 18811 - RNA, 23 nt, artificial
  Chemically synthesized
aguuaaaggcuuuguucgaaaga

SEQ ID NO: 18812 - RNA, 23 nt, artificial
  Chemically synthesized
aaguuaaaggcuuuguucgaaag

SEQ ID NO: 18813 - RNA, 23 nt, artificial
  Chemically synthesized
caaguuaaaggcuuuguucgaaa

SEQ ID NO: 18814 - RNA, 23 nt, artificial
  Chemically synthesized
ucaaguuaaaggcuuuguucgaa

SEQ ID NO: 18815 - RNA, 23 nt, artificial
  Chemically synthesized
gucaaguuaaaggcuuuguucga

SEQ ID NO: 18816 - RNA, 23 nt, artificial
  Chemically synthesized
gaacuuggaaggccugcaucaug

SEQ ID NO: 18817 - RNA, 23 nt, artificial
  Chemically synthesized
agaacuuggaaggccugcaucau

SEQ ID NO: 18818 - RNA, 23 nt, artificial
  Chemically synthesized
cagaacuuggaaggccugcauca

SEQ ID NO: 18819 - RNA, 23 nt, artificial
  Chemically synthesized
ucagaacuuggaaggccugcauc

SEQ ID NO: 18820 - RNA, 23 nt, artificial
  Chemically synthesized
cucagaacuuggaaggccugcau

SEQ ID NO: 18821 - RNA, 23 nt, artificial
  Chemically synthesized
cuucagaaaugaaauccaaagcu

SEQ ID NO: 18822 - RNA, 23 nt, artificial
  Chemically synthesized
acuucagaaaugaaauccaaagc

SEQ ID NO: 18823 - RNA, 23 nt, artificial
  Chemically synthesized
aacuucagaaaugaaauccaaag

SEQ ID NO: 18824 - RNA, 23 nt, artificial
  Chemically synthesized
aaacuucagaaaugaaauccaaa

SEQ ID NO: 18825 - RNA, 23 nt, artificial
  Chemically synthesized
caaacuucagaaaugaaauccaa

SEQ ID NO: 18826 - RNA, 23 nt, artificial
  Chemically synthesized
caaauggcagcuuauacauagca

SEQ ID NO: 18827 - RNA, 23 nt, artificial
  Chemically synthesized
acaaauggcagcuuauacauagc

SEQ ID NO: 18828 - RNA, 23 nt, artificial
  Chemically synthesized
uacaaauggcagcuuauacauag

SEQ ID NO: 18829 - RNA, 23 nt, artificial
  Chemically synthesized
cuacaaauggcagcuuauacaua

SEQ ID NO: 18830 - RNA, 23 nt, artificial
  Chemically synthesized
caaaauagaugagaucaagaaug

SEQ ID NO: 18831 - RNA, 23 nt, artificial
  Chemically synthesized
uaauuggcaucaacuucauggaa

SEQ ID NO: 18832 - RNA, 23 nt, artificial
  Chemically synthesized
caggcaggccacuuugccucuaa

SEQ ID NO: 18833 - RNA, 23 nt, artificial
  Chemically synthesized
caacaaccaugcugggcaucugg

SEQ ID NO: 18834 - RNA, 23 nt, artificial
  Chemically synthesized
ucaacaaccaugcugggcaucug

SEQ ID NO: 18835 - RNA, 23 nt, artificial
  Chemically synthesized
cucaacaaccaugcugggcaucu

SEQ ID NO: 18836 - RNA, 23 nt, artificial
  Chemically synthesized
gcucaacaaccaugcugggcauc

SEQ ID NO: 18837 - RNA, 23 nt, artificial
  Chemically synthesized
ugcucaacaaccaugcugggcau

SEQ ID NO: 18838 - RNA, 23 nt, artificial
  Chemically synthesized
cauagcaaugguaaaaucaucau

SEQ ID NO: 18839 - RNA, 23 nt, artificial
  Chemically synthesized
acauagcaaugguaaaaucauca

SEQ ID NO: 18840 - RNA, 23 nt, artificial
  Chemically synthesized
uacauagcaaugguaaaaucauc

SEQ ID NO: 18841 - RNA, 23 nt, artificial
  Chemically synthesized
auacauagcaaugguaaaaucau

SEQ ID NO: 18842 - RNA, 23 nt, artificial
  Chemically synthesized
uauacauagcaaugguaaaauca

SEQ ID NO: 18843 - RNA, 23 nt, artificial
  Chemically synthesized
uucagacuaucauccucaaggac

SEQ ID NO: 18844 - RNA, 23 nt, artificial
  Chemically synthesized
auucagacuaucauccucaagga

SEQ ID NO: 18845 - RNA, 23 nt, artificial
  Chemically synthesized
aauucagacuaucauccucaagg

SEQ ID NO: 18846 - RNA, 23 nt, artificial
  Chemically synthesized
aaauucagacuaucauccucaag

SEQ ID NO: 18847 - RNA, 23 nt, artificial
  Chemically synthesized
aaaauucagacuaucauccucaa

SEQ ID NO: 18848 - RNA, 23 nt, artificial
  Chemically synthesized
ugaagccaaaauagaugagauca

SEQ ID NO: 18849 - RNA, 23 nt, artificial
  Chemically synthesized
augaagccaaaauagaugagauc

SEQ ID NO: 18850 - RNA, 23 nt, artificial
  Chemically synthesized
aaugaagccaaaauagaugagau

SEQ ID NO: 18851 - RNA, 23 nt, artificial
  Chemically synthesized
cucuaaauuaccucugauaauuc

SEQ ID NO: 18852 - RNA, 23 nt, artificial
  Chemically synthesized
gcaagagugacacacagguguuc

SEQ ID NO: 18853 - RNA, 23 nt, artificial
  Chemically synthesized
cgcaagagugacacacagguguu

SEQ ID NO: 18854 - RNA, 23 nt, artificial
  Chemically synthesized
gcgcaagagugacacacaggugu

SEQ ID NO: 18855 - RNA, 23 nt, artificial
  Chemically synthesized
cgcgcaagagugacacacaggug

SEQ ID NO: 18856 - RNA, 23 nt, artificial
  Chemically synthesized
ucgcgcaagagugacacacaggu

SEQ ID NO: 18857 - RNA, 23 nt, artificial
  Chemically synthesized
ggagaguauuacuagagcuuugc

SEQ ID NO: 18858 - RNA, 23 nt, artificial
  Chemically synthesized
aggagaguauuacuagagcuuug

SEQ ID NO: 18859 - RNA, 23 nt, artificial
  Chemically synthesized
caggagaguauuacuagagcuuu

SEQ ID NO: 18860 - RNA, 23 nt, artificial
  Chemically synthesized
ucaugauucugccuccaaggaug

SEQ ID NO: 18861 - RNA, 23 nt, artificial
  Chemically synthesized
cucaugauucugccuccaaggau

SEQ ID NO: 18862 - RNA, 23 nt, artificial
  Chemically synthesized
ucucaugauucugccuccaagga

SEQ ID NO: 18863 - RNA, 23 nt, artificial
  Chemically synthesized
aucucaugauucugccuccaagg

SEQ ID NO: 18864 - RNA, 23 nt, artificial
  Chemically synthesized
uaucucaugauucugccuccaag

SEQ ID NO: 18865 - RNA, 23 nt, artificial
  Chemically synthesized
cuggcaucuaacauaugauucug

SEQ ID NO: 18866 - RNA, 23 nt, artificial
  Chemically synthesized
ucuggcaucuaacauaugauucu

SEQ ID NO: 18867 - RNA, 23 nt, artificial
  Chemically synthesized
cucuggcaucuaacauaugauuc

SEQ ID NO: 18868 - RNA, 23 nt, artificial
  Chemically synthesized
gaggaugaaagauuaagauuaug

SEQ ID NO: 18869 - RNA, 23 nt, artificial
  Chemically synthesized
cuacuucuuucucaggcaucaaa

SEQ ID NO: 18870 - RNA, 23 nt, artificial
  Chemically synthesized
ccuacuucuuucucaggcaucaa

SEQ ID NO: 18871 - RNA, 23 nt, artificial
  Chemically synthesized
ugagaucaagaaugacaaugucc

SEQ ID NO: 18872 - RNA, 23 nt, artificial
  Chemically synthesized
guuuauaacucugagaagaucau

SEQ ID NO: 18873 - RNA, 23 nt, artificial
  Chemically synthesized
uguuuauaacucugagaagauca

SEQ ID NO: 18874 - RNA, 23 nt, artificial
  Chemically synthesized
uuguuuauaacucugagaagauc

SEQ ID NO: 18875 - RNA, 23 nt, artificial
  Chemically synthesized
uuuguuuauaacucugagaagau

SEQ ID NO: 18876 - RNA, 23 nt, artificial
  Chemically synthesized
cuuuguuuauaacucugagaaga

SEQ ID NO: 18877 - RNA, 23 nt, artificial
  Chemically synthesized
aguagcuuugugacaugucauga

SEQ ID NO: 18878 - RNA, 23 nt, artificial
  Chemically synthesized
aaguagcuuugugacaugucaug

SEQ ID NO: 18879 - RNA, 23 nt, artificial
  Chemically synthesized
aaaguagcuuugugacaugucau

SEQ ID NO: 18880 - RNA, 23 nt, artificial
  Chemically synthesized
gaaaguagcuuugugacauguca

SEQ ID NO: 18881 - RNA, 23 nt, artificial
  Chemically synthesized
gaaaugaaauccaaagcuugguc

SEQ ID NO: 18882 - RNA, 23 nt, artificial
  Chemically synthesized
agaaaugaaauccaaagcuuggu

SEQ ID NO: 18883 - RNA, 23 nt, artificial
  Chemically synthesized
cagaaaugaaauccaaagcuugg

SEQ ID NO: 18884 - RNA, 23 nt, artificial
  Chemically synthesized
ucagaaaugaaauccaaagcuug

SEQ ID NO: 18885 - RNA, 23 nt, artificial
  Chemically synthesized
uucagaaaugaaauccaaagcuu

SEQ ID NO: 18886 - RNA, 23 nt, artificial
  Chemically synthesized
gcucuaccucaaagaccuuugca

SEQ ID NO: 18887 - RNA, 23 nt, artificial
  Chemically synthesized
ggcucuaccucaaagaccuuugc

SEQ ID NO: 18888 - RNA, 23 nt, artificial
  Chemically synthesized
aggcucuaccucaaagaccuuug

SEQ ID NO: 18889 - RNA, 23 nt, artificial
  Chemically synthesized
aaggcucuaccucaaagaccuuu

SEQ ID NO: 18890 - RNA, 23 nt, artificial
  Chemically synthesized
uaaggcucuaccucaaagaccuu

SEQ ID NO: 18891 - RNA, 23 nt, artificial
  Chemically synthesized
cauuuugagcaggagaguauuac

SEQ ID NO: 18892 - RNA, 23 nt, artificial
  Chemically synthesized
gcauuuugagcaggagaguauua

SEQ ID NO: 18893 - RNA, 23 nt, artificial
  Chemically synthesized
agcauuuugagcaggagaguauu

SEQ ID NO: 18894 - RNA, 23 nt, artificial
  Chemically synthesized
aagcauuuugagcaggagaguau

SEQ ID NO: 18895 - RNA, 23 nt, artificial
  Chemically synthesized
aaagcauuuugagcaggagagua

SEQ ID NO: 18896 - RNA, 23 nt, artificial
  Chemically synthesized
cacuauugcuggagucaugacac

SEQ ID NO: 18897 - RNA, 23 nt, artificial
  Chemically synthesized
ccacuauugcuggagucaugaca

SEQ ID NO: 18898 - RNA, 23 nt, artificial
  Chemically synthesized
accacuauugcuggagucaugac

SEQ ID NO: 18899 - RNA, 23 nt, artificial
  Chemically synthesized
caccacuauugcuggagucauga

SEQ ID NO: 18900 - RNA, 23 nt, artificial
  Chemically synthesized
ucaccacuauugcuggagucaug

SEQ ID NO: 18901 - RNA, 23 nt, artificial
  Chemically synthesized
gcugaagagccaacauauuugua

SEQ ID NO: 18902 - RNA, 23 nt, artificial
  Chemically synthesized
auuuugagcaggagaguauuacu

SEQ ID NO: 18903 - RNA, 23 nt, artificial
  Chemically synthesized
ccaagugacugacaucaacucca

SEQ ID NO: 18904 - RNA, 23 nt, artificial
  Chemically synthesized
cccaagugacugacaucaacucc

SEQ ID NO: 18905 - RNA, 23 nt, artificial
  Chemically synthesized
gcccaagugacugacaucaacuc

SEQ ID NO: 18906 - RNA, 23 nt, artificial
  Chemically synthesized
ugcccaagugacugacaucaacu

SEQ ID NO: 18907 - RNA, 23 nt, artificial
  Chemically synthesized
augcccaagugacugacaucaac

SEQ ID NO: 18908 - RNA, 23 nt, artificial
  Chemically synthesized
caguggcaugcuaaguacccaaa

SEQ ID NO: 18909 - RNA, 23 nt, artificial
  Chemically synthesized
caaauucaguucugaguauaugc

SEQ ID NO: 18910 - RNA, 23 nt, artificial
  Chemically synthesized
acaaauucaguucugaguauaug

SEQ ID NO: 18911 - RNA, 23 nt, artificial
  Chemically synthesized
aacaaauucaguucugaguauau

SEQ ID NO: 18912 - RNA, 23 nt, artificial
  Chemically synthesized
caacaaauucaguucugaguaua

SEQ ID NO: 18913 - RNA, 23 nt, artificial
  Chemically synthesized
acaacaaauucaguucugaguau

SEQ ID NO: 18914 - RNA, 23 nt, artificial
  Chemically synthesized
gauggccaauucugccauaagcc

SEQ ID NO: 18915 - RNA, 23 nt, artificial
  Chemically synthesized
ugauggccaauucugccauaagc

SEQ ID NO: 18916 - RNA, 23 nt, artificial
  Chemically synthesized
augauggccaauucugccauaag

SEQ ID NO: 18917 - RNA, 23 nt, artificial
  Chemically synthesized
caugauggccaauucugccauaa

SEQ ID NO: 18918 - RNA, 23 nt, artificial
  Chemically synthesized
ucaugauggccaauucugccaua

SEQ ID NO: 18919 - RNA, 23 nt, artificial
  Chemically synthesized
ggauuuaggaauugcucuuguca

SEQ ID NO: 18920 - RNA, 23 nt, artificial
  Chemically synthesized
cuggauuuaggaauugcucuugu

SEQ ID NO: 18921 - RNA, 23 nt, artificial
  Chemically synthesized
ucuggauuuaggaauugcucuug

SEQ ID NO: 18922 - RNA, 23 nt, artificial
  Chemically synthesized
aucuggauuuaggaauugcucuu

SEQ ID NO: 18923 - RNA, 23 nt, artificial
  Chemically synthesized
caucaucuggauuuaggaauugc

SEQ ID NO: 18924 - RNA, 23 nt, artificial
  Chemically synthesized
gcuaaguacccaaauaggagugu

SEQ ID NO: 18925 - RNA, 23 nt, artificial
  Chemically synthesized
ugcuaaguacccaaauaggagug

SEQ ID NO: 18926 - RNA, 23 nt, artificial
  Chemically synthesized
augcuaaguacccaaauaggagu

SEQ ID NO: 18927 - RNA, 23 nt, artificial
  Chemically synthesized
aaugacaauguccaagacacagc

SEQ ID NO: 18928 - RNA, 23 nt, artificial
  Chemically synthesized
gaaugacaauguccaagacacag

SEQ ID NO: 18929 - RNA, 23 nt, artificial
  Chemically synthesized
agaaugacaauguccaagacaca

SEQ ID NO: 18930 - RNA, 23 nt, artificial
  Chemically synthesized
aucaccacuauugcuggagucau

SEQ ID NO: 18931 - RNA, 23 nt, artificial
  Chemically synthesized
gguuuuuuacuggguacauuuua

SEQ ID NO: 18932 - RNA, 23 nt, artificial
  Chemically synthesized
ugguuuuuuacuggguacauuuu

SEQ ID NO: 18933 - RNA, 23 nt, artificial
  Chemically synthesized
uugguuuuuuacuggguacauuu

SEQ ID NO: 18934 - RNA, 23 nt, artificial
  Chemically synthesized
aguguuaaugcccaagugacuga

SEQ ID NO: 18935 - RNA, 23 nt, artificial
  Chemically synthesized
aaguguuaaugcccaagugacug

SEQ ID NO: 18936 - RNA, 23 nt, artificial
  Chemically synthesized
aaaguguuaaugcccaagugacu

SEQ ID NO: 18937 - RNA, 23 nt, artificial
  Chemically synthesized
aaaaguguuaaugcccaagugac

SEQ ID NO: 18938 - RNA, 23 nt, artificial
  Chemically synthesized
cucaaggacauuacuagugacuc

SEQ ID NO: 18939 - RNA, 23 nt, artificial
  Chemically synthesized
ucgugagcucgucucugaucucg

SEQ ID NO: 18940 - RNA, 23 nt, artificial
  Chemically synthesized
uucgugagcucgucucugaucuc

SEQ ID NO: 18941 - RNA, 23 nt, artificial
  Chemically synthesized
uuucgugagcucgucucugaucu

SEQ ID NO: 18942 - RNA, 23 nt, artificial
  Chemically synthesized
uuuucgugagcucgucucugauc

SEQ ID NO: 18943 - RNA, 23 nt, artificial
  Chemically synthesized
cuuuucgugagcucgucucugau

SEQ ID NO: 18944 - RNA, 23 nt, artificial
  Chemically synthesized
caacuccaagggauuggaauuga

SEQ ID NO: 18945 - RNA, 23 nt, artificial
  Chemically synthesized
ucaacuccaagggauuggaauug

SEQ ID NO: 18946 - RNA, 23 nt, artificial
  Chemically synthesized
aucaacuccaagggauuggaauu

SEQ ID NO: 18947 - RNA, 23 nt, artificial
  Chemically synthesized
caucaacuccaagggauuggaau

SEQ ID NO: 18948 - RNA, 23 nt, artificial
  Chemically synthesized
acaucaacuccaagggauuggaa

SEQ ID NO: 18949 - RNA, 23 nt, artificial
  Chemically synthesized
acgucuguugcuagauuaucguc

SEQ ID NO: 18950 - RNA, 23 nt, artificial
  Chemically synthesized
uacgucuguugcuagauuaucgu

SEQ ID NO: 18951 - RNA, 23 nt, artificial
  Chemically synthesized
uuacgucuguugcuagauuaucg

SEQ ID NO: 18952 - RNA, 23 nt, artificial
  Chemically synthesized
cuuacgucuguugcuagauuauc

SEQ ID NO: 18953 - RNA, 23 nt, artificial
  Chemically synthesized
ucuuacgucuguugcuagauuau

SEQ ID NO: 18954 - RNA, 23 nt, artificial
  Chemically synthesized
cuucguaauuggcaucaacuuca

SEQ ID NO: 18955 - RNA, 23 nt, artificial
  Chemically synthesized
caaugguaaaaucaucaucugga

SEQ ID NO: 18956 - RNA, 23 nt, artificial
  Chemically synthesized
uguaaacugugaagauaguuaua

SEQ ID NO: 18957 - RNA, 23 nt, artificial
  Chemically synthesized
auguaaacugugaagauaguuau

SEQ ID NO: 18958 - RNA, 23 nt, artificial
  Chemically synthesized
aauguaaacugugaagauaguua

SEQ ID NO: 18959 - RNA, 23 nt, artificial
  Chemically synthesized
aaauguaaacugugaagauaguu

SEQ ID NO: 18960 - RNA, 23 nt, artificial
  Chemically synthesized
uaaauguaaacugugaagauagu

SEQ ID NO: 18961 - RNA, 23 nt, artificial
  Chemically synthesized
uguacucuugcagagaaaauuca

SEQ ID NO: 18962 - RNA, 23 nt, artificial
  Chemically synthesized
agauucuuaauagcuggcuguaa

SEQ ID NO: 18963 - RNA, 23 nt, artificial
  Chemically synthesized
ucagacuaucauccucaaggaca

SEQ ID NO: 18964 - RNA, 23 nt, artificial
  Chemically synthesized
cuccaaggauguuuaaaaucuag

SEQ ID NO: 18965 - RNA, 23 nt, artificial
  Chemically synthesized
uuuaucauuuauuagcgcugaag

SEQ ID NO: 18966 - RNA, 23 nt, artificial
  Chemically synthesized
uuuuaucauuuauuagcgcugaa

SEQ ID NO: 18967 - RNA, 23 nt, artificial
  Chemically synthesized
uuugcacaguuuauuggugucau

SEQ ID NO: 18968 - RNA, 23 nt, artificial
  Chemically synthesized
gauuaucguccaaaaguguuaau

SEQ ID NO: 18969 - RNA, 23 nt, artificial
  Chemically synthesized
agauuaucguccaaaaguguuaa

SEQ ID NO: 18970 - RNA, 23 nt, artificial
  Chemically synthesized
uagauuaucguccaaaaguguua

SEQ ID NO: 18971 - RNA, 23 nt, artificial
  Chemically synthesized
cuagauuaucguccaaaaguguu

SEQ ID NO: 18972 - RNA, 23 nt, artificial
  Chemically synthesized
aauaaggcucuaccucaaagacc

SEQ ID NO: 18973 - RNA, 23 nt, artificial
  Chemically synthesized
aaugcacacucaccagcaacacc

SEQ ID NO: 18974 - RNA, 23 nt, artificial
  Chemically synthesized
gaaugcacacucaccagcaacac

SEQ ID NO: 18975 - RNA, 23 nt, artificial
  Chemically synthesized
ggaaugcacacucaccagcaaca

SEQ ID NO: 18976 - RNA, 23 nt, artificial
  Chemically synthesized
aggaaugcacacucaccagcaac

SEQ ID NO: 18977 - RNA, 23 nt, artificial
  Chemically synthesized
aaggaaugcacacucaccagcaa

SEQ ID NO: 18978 - RNA, 23 nt, artificial
  Chemically synthesized
gcucuuucacuucggaggauugc

SEQ ID NO: 18979 - RNA, 23 nt, artificial
  Chemically synthesized
agcucuuucacuucggaggauug

SEQ ID NO: 18980 - RNA, 23 nt, artificial
  Chemically synthesized
aagcucuuucacuucggaggauu

SEQ ID NO: 18981 - RNA, 23 nt, artificial
  Chemically synthesized
gaagcucuuucacuucggaggau

SEQ ID NO: 18982 - RNA, 23 nt, artificial
  Chemically synthesized
ggaagcucuuucacuucggagga

SEQ ID NO: 18983 - RNA, 23 nt, artificial
  Chemically synthesized
gcaguggcaugcuaaguacccaa

SEQ ID NO: 18984 - RNA, 23 nt, artificial
  Chemically synthesized
gggaagcucuuucacuucggagg

SEQ ID NO: 18985 - RNA, 23 nt, artificial
  Chemically synthesized
ggggaagcucuuucacuucggag

SEQ ID NO: 18986 - RNA, 23 nt, artificial
  Chemically synthesized
uggggaagcucuuucacuucgga

SEQ ID NO: 18987 - RNA, 23 nt, artificial
  Chemically synthesized
cccaaacauggaaauaucaccaa

SEQ ID NO: 18988 - RNA, 23 nt, artificial
  Chemically synthesized
ccccaaacauggaaauaucacca

SEQ ID NO: 18989 - RNA, 23 nt, artificial
  Chemically synthesized
cccccaaacauggaaauaucacc

SEQ ID NO: 18990 - RNA, 23 nt, artificial
  Chemically synthesized
acccccaaacauggaaauaucac

SEQ ID NO: 18991 - RNA, 23 nt, artificial
  Chemically synthesized
cacccccaaacauggaaauauca

SEQ ID NO: 18992 - RNA, 23 nt, artificial
  Chemically synthesized
gauuggaauugaggaagacuguu

SEQ ID NO: 18993 - RNA, 23 nt, artificial
  Chemically synthesized
ugugaacauggaaucaucaagga

SEQ ID NO: 18994 - RNA, 23 nt, artificial
  Chemically synthesized
augugaacauggaaucaucaagg

SEQ ID NO: 18995 - RNA, 23 nt, artificial
  Chemically synthesized
aaugugaacauggaaucaucaag

SEQ ID NO: 18996 - RNA, 23 nt, artificial
  Chemically synthesized
aaaugugaacauggaaucaucaa

SEQ ID NO: 18997 - RNA, 23 nt, artificial
  Chemically synthesized
caaaugugaacauggaaucauca

SEQ ID NO: 18998 - RNA, 23 nt, artificial
  Chemically synthesized
ggaagacuguuacuacaguugag

SEQ ID NO: 18999 - RNA, 23 nt, artificial
  Chemically synthesized
aggaagacuguuacuacaguuga

SEQ ID NO: 19000 - RNA, 23 nt, artificial
  Chemically synthesized
aaagccaaucuuuguacucuugc

SEQ ID NO: 19001 - RNA, 23 nt, artificial
  Chemically synthesized
aaaagccaaucuuuguacucuug

SEQ ID NO: 19002 - RNA, 23 nt, artificial
  Chemically synthesized
aaaaagccaaucuuuguacucuu

SEQ ID NO: 19003 - RNA, 23 nt, artificial
  Chemically synthesized
aaguauauguauuugagugcaga

SEQ ID NO: 19004 - RNA, 23 nt, artificial
  Chemically synthesized
cucugauaauucuagagauuuua

SEQ ID NO: 19005 - RNA, 23 nt, artificial
  Chemically synthesized
ccucugauaauucuagagauuuu

SEQ ID NO: 19006 - RNA, 23 nt, artificial
  Chemically synthesized
accucugauaauucuagagauuu

SEQ ID NO: 19007 - RNA, 23 nt, artificial
  Chemically synthesized
uaccucugauaauucuagagauu

SEQ ID NO: 19008 - RNA, 23 nt, artificial
  Chemically synthesized
uuaccucugauaauucuagagau

SEQ ID NO: 19009 - RNA, 23 nt, artificial
  Chemically synthesized
ucaugaacccauguuugcaauca

SEQ ID NO: 19010 - RNA, 23 nt, artificial
  Chemically synthesized
gucaugaacccauguuugcaauc

SEQ ID NO: 19011 - RNA, 23 nt, artificial
  Chemically synthesized
ugucaugaacccauguuugcaau

SEQ ID NO: 19012 - RNA, 23 nt, artificial
  Chemically synthesized
augucaugaacccauguuugcaa

SEQ ID NO: 19013 - RNA, 23 nt, artificial
  Chemically synthesized
guacaaaugucuauccacaggcu

SEQ ID NO: 19014 - RNA, 23 nt, artificial
  Chemically synthesized
aguacaaaugucuauccacaggc

SEQ ID NO: 19015 - RNA, 23 nt, artificial
  Chemically synthesized
uaguacaaaugucuauccacagg

SEQ ID NO: 19016 - RNA, 23 nt, artificial
  Chemically synthesized
uuaguacaaaugucuauccacag

SEQ ID NO: 19017 - RNA, 23 nt, artificial
  Chemically synthesized
guuaguacaaaugucuauccaca

SEQ ID NO: 19018 - RNA, 23 nt, artificial
  Chemically synthesized
aaaagcauuuugagcaggagagu

SEQ ID NO: 19019 - RNA, 23 nt, artificial
  Chemically synthesized
aagucaaguuaaaggcuuuguuc

SEQ ID NO: 19020 - RNA, 23 nt, artificial
  Chemically synthesized
uaagucaaguuaaaggcuuuguu

SEQ ID NO: 19021 - RNA, 23 nt, artificial
  Chemically synthesized
cuaagucaaguuaaaggcuuugu

SEQ ID NO: 19022 - RNA, 23 nt, artificial
  Chemically synthesized
acuaagucaaguuaaaggcuuug

SEQ ID NO: 19023 - RNA, 23 nt, artificial
  Chemically synthesized
cacuaagucaaguuaaaggcuuu

SEQ ID NO: 19024 - RNA, 23 nt, artificial
  Chemically synthesized
ugcucaucuuaauggccuaaugc

SEQ ID NO: 19025 - RNA, 23 nt, artificial
  Chemically synthesized
gugcucaucuuaauggccuaaug

SEQ ID NO: 19026 - RNA, 23 nt, artificial
  Chemically synthesized
ggugcucaucuuaauggccuaau

SEQ ID NO: 19027 - RNA, 23 nt, artificial
  Chemically synthesized
uggugcucaucuuaauggccuaa

SEQ ID NO: 19028 - RNA, 23 nt, artificial
  Chemically synthesized
uuggugcucaucuuaauggccua

SEQ ID NO: 19029 - RNA, 23 nt, artificial
  Chemically synthesized
aaaaauacuuaauaguccaccaa

SEQ ID NO: 19030 - RNA, 23 nt, artificial
  Chemically synthesized
aaaaaauacuuaauaguccacca

SEQ ID NO: 19031 - RNA, 23 nt, artificial
  Chemically synthesized
gaagaagcuaugaccuuuugcug

SEQ ID NO: 19032 - RNA, 23 nt, artificial
  Chemically synthesized
agaagaagcuaugaccuuuugcu

SEQ ID NO: 19033 - RNA, 23 nt, artificial
  Chemically synthesized
uagaagaagcuaugaccuuuugc

SEQ ID NO: 19034 - RNA, 23 nt, artificial
  Chemically synthesized
auagaagaagcuaugaccuuuug

SEQ ID NO: 19035 - RNA, 23 nt, artificial
  Chemically synthesized
aauagaagaagcuaugaccuuuu

SEQ ID NO: 19036 - RNA, 23 nt, artificial
  Chemically synthesized
gaguauaugcaauuaguguuuga

SEQ ID NO: 19037 - RNA, 23 nt, artificial
  Chemically synthesized
ugaguauaugcaauuaguguuug

SEQ ID NO: 19038 - RNA, 23 nt, artificial
  Chemically synthesized
uguaaauacugcuugguuuuuua

SEQ ID NO: 19039 - RNA, 23 nt, artificial
  Chemically synthesized
cuguaaauacugcuugguuuuuu

SEQ ID NO: 19040 - RNA, 23 nt, artificial
  Chemically synthesized
gcuguaaauacugcuugguuuuu

SEQ ID NO: 19041 - RNA, 23 nt, artificial
  Chemically synthesized
ggcuguaaauacugcuugguuuu

SEQ ID NO: 19042 - RNA, 23 nt, artificial
  Chemically synthesized
uggcuguaaauacugcuugguuu

SEQ ID NO: 19043 - RNA, 23 nt, artificial
  Chemically synthesized
ugcaguggcaugcuaaguaccca

SEQ ID NO: 19044 - RNA, 23 nt, artificial
  Chemically synthesized
cuuauacauagcaaugguaaaau

SEQ ID NO: 19045 - RNA, 23 nt, artificial
  Chemically synthesized
gcuuauacauagcaaugguaaaa

SEQ ID NO: 19046 - RNA, 23 nt, artificial
  Chemically synthesized
agcuuauacauagcaaugguaaa

SEQ ID NO: 19047 - RNA, 23 nt, artificial
  Chemically synthesized
cagcuuauacauagcaaugguaa

SEQ ID NO: 19048 - RNA, 23 nt, artificial
  Chemically synthesized
gacacagcagaacagaaaguuca

SEQ ID NO: 19049 - RNA, 23 nt, artificial
  Chemically synthesized
augaccuuuugcugaaauaucag

SEQ ID NO: 19050 - RNA, 23 nt, artificial
  Chemically synthesized
uaugaccuuuugcugaaauauca

SEQ ID NO: 19051 - RNA, 23 nt, artificial
  Chemically synthesized
acuccaagggauuggaauugagg

SEQ ID NO: 19052 - RNA, 23 nt, artificial
  Chemically synthesized
aacuccaagggauuggaauugag

SEQ ID NO: 19053 - RNA, 23 nt, artificial
  Chemically synthesized
gaguauuacuagagcuuugccac

SEQ ID NO: 19054 - RNA, 23 nt, artificial
  Chemically synthesized
agaguauuacuagagcuuugcca

SEQ ID NO: 19055 - RNA, 23 nt, artificial
  Chemically synthesized
gagaguauuacuagagcuuugcc

SEQ ID NO: 19056 - RNA, 23 nt, artificial
  Chemically synthesized
aagauucuccuuacuacuauccu

SEQ ID NO: 19057 - RNA, 23 nt, artificial
  Chemically synthesized
uaagauucuccuuacuacuaucc

SEQ ID NO: 19058 - RNA, 23 nt, artificial
  Chemically synthesized
uuaagauucuccuuacuacuauc

SEQ ID NO: 19059 - RNA, 23 nt, artificial
  Chemically synthesized
uuuaagauucuccuuacuacuau

SEQ ID NO: 19060 - RNA, 23 nt, artificial
  Chemically synthesized
ugagacucagaacuuggaaggcc

SEQ ID NO: 19061 - RNA, 23 nt, artificial
  Chemically synthesized
uugagacucagaacuuggaaggc

SEQ ID NO: 19062 - RNA, 23 nt, artificial
  Chemically synthesized
guugagacucagaacuuggaagg

SEQ ID NO: 19063 - RNA, 23 nt, artificial
  Chemically synthesized
aguugagacucagaacuuggaag

SEQ ID NO: 19064 - RNA, 23 nt, artificial
  Chemically synthesized
caguugagacucagaacuuggaa

SEQ ID NO: 19065 - RNA, 23 nt, artificial
  Chemically synthesized
aaugcccaagugacugacaucaa

SEQ ID NO: 19066 - RNA, 23 nt, artificial
  Chemically synthesized
gguucuuacgucuguugcuagau

SEQ ID NO: 19067 - RNA, 23 nt, artificial
  Chemically synthesized
ugguucuuacgucuguugcuaga

SEQ ID NO: 19068 - RNA, 23 nt, artificial
  Chemically synthesized
cugguucuuacgucuguugcuag

SEQ ID NO: 19069 - RNA, 23 nt, artificial
  Chemically synthesized
ucugguucuuacgucuguugcua

SEQ ID NO: 19070 - RNA, 23 nt, artificial
  Chemically synthesized
cucugguucuuacgucuguugcu

SEQ ID NO: 19071 - RNA, 23 nt, artificial
  Chemically synthesized
acuuuguuuauaacucugagaag

SEQ ID NO: 19072 - RNA, 23 nt, artificial
  Chemically synthesized
aacuuuguuuauaacucugagaa

SEQ ID NO: 19073 - RNA, 23 nt, artificial
  Chemically synthesized
aaacuuuguuuauaacucugaga

SEQ ID NO: 19074 - RNA, 23 nt, artificial
  Chemically synthesized
uaaacuuuguuuauaacucugag

SEQ ID NO: 19075 - RNA, 23 nt, artificial
  Chemically synthesized
agucaugacacuaagucaaguua

SEQ ID NO: 19076 - RNA, 23 nt, artificial
  Chemically synthesized
cuggguacauuuuaucauuuauu

SEQ ID NO: 19077 - RNA, 23 nt, artificial
  Chemically synthesized
acuggguacauuuuaucauuuau

SEQ ID NO: 19078 - RNA, 23 nt, artificial
  Chemically synthesized
uacuggguacauuuuaucauuua

SEQ ID NO: 19079 - RNA, 23 nt, artificial
  Chemically synthesized
uuacuggguacauuuuaucauuu

SEQ ID NO: 19080 - RNA, 23 nt, artificial
  Chemically synthesized
uuuacuggguacauuuuaucauu

SEQ ID NO: 19081 - RNA, 23 nt, artificial
  Chemically synthesized
agcaacaccaagugcaaagagga

SEQ ID NO: 19082 - RNA, 23 nt, artificial
  Chemically synthesized
gacaucaacuccaagggauugga

SEQ ID NO: 19083 - RNA, 23 nt, artificial
  Chemically synthesized
ugacaucaacuccaagggauugg

SEQ ID NO: 19084 - RNA, 23 nt, artificial
  Chemically synthesized
cugacaucaacuccaagggauug

SEQ ID NO: 19085 - RNA, 23 nt, artificial
  Chemically synthesized
acugacaucaacuccaagggauu

SEQ ID NO: 19086 - RNA, 23 nt, artificial
  Chemically synthesized
agaaaguagcuuugugacauguc

SEQ ID NO: 19087 - RNA, 23 nt, artificial
  Chemically synthesized
gagaaaguagcuuugugacaugu

SEQ ID NO: 19088 - RNA, 23 nt, artificial
  Chemically synthesized
ccgaaaauguucaauaauguccc

SEQ ID NO: 19089 - RNA, 23 nt, artificial
  Chemically synthesized
cccgaaaauguucaauaaugucc

SEQ ID NO: 19090 - RNA, 23 nt, artificial
  Chemically synthesized
ccccgaaaauguucaauaauguc

SEQ ID NO: 19091 - RNA, 23 nt, artificial
  Chemically synthesized
cccccgaaaauguucaauaaugu

SEQ ID NO: 19092 - RNA, 23 nt, artificial
  Chemically synthesized
acccccgaaaauguucaauaaug

SEQ ID NO: 19093 - RNA, 23 nt, artificial
  Chemically synthesized
ccaaggauguuuaaaaucuaguu

SEQ ID NO: 19094 - RNA, 23 nt, artificial
  Chemically synthesized
uccaaggauguuuaaaaucuagu

SEQ ID NO: 19095 - RNA, 23 nt, artificial
  Chemically synthesized
aacuuggaaggccugcaucauga

SEQ ID NO: 19096 - RNA, 23 nt, artificial
  Chemically synthesized
ggcuuuguucgaaagaauggugu

SEQ ID NO: 19097 - RNA, 23 nt, artificial
  Chemically synthesized
ugacugacaucaacuccaaggga

SEQ ID NO: 19098 - RNA, 23 nt, artificial
  Chemically synthesized
gugacugacaucaacuccaaggg

SEQ ID NO: 19099 - RNA, 23 nt, artificial
  Chemically synthesized
agugacugacaucaacuccaagg

SEQ ID NO: 19100 - RNA, 23 nt, artificial
  Chemically synthesized
aagugacugacaucaacuccaag

SEQ ID NO: 19101 - RNA, 23 nt, artificial
  Chemically synthesized
caagugacugacaucaacuccaa

SEQ ID NO: 19102 - RNA, 23 nt, artificial
  Chemically synthesized
gucaugacacuaagucaaguuaa

SEQ ID NO: 19103 - RNA, 23 nt, artificial
  Chemically synthesized
gauuaugcucuggcaucuaacau

SEQ ID NO: 19104 - RNA, 23 nt, artificial
  Chemically synthesized
agauuaugcucuggcaucuaaca

SEQ ID NO: 19105 - RNA, 23 nt, artificial
  Chemically synthesized
aagauuaugcucuggcaucuaac

SEQ ID NO: 19106 - RNA, 23 nt, artificial
  Chemically synthesized
uaagauuaugcucuggcaucuaa

SEQ ID NO: 19107 - RNA, 23 nt, artificial
  Chemically synthesized
uuaagauuaugcucuggcaucua

SEQ ID NO: 19108 - RNA, 23 nt, artificial
  Chemically synthesized
cucaaaaaagccaaucuuuguac

SEQ ID NO: 19109 - RNA, 23 nt, artificial
  Chemically synthesized
ucucaaaaaagccaaucuuugua

SEQ ID NO: 19110 - RNA, 23 nt, artificial
  Chemically synthesized
aucucaaaaaagccaaucuuugu

SEQ ID NO: 19111 - RNA, 23 nt, artificial
  Chemically synthesized
gaucucaaaaaagccaaucuuug

SEQ ID NO: 19112 - RNA, 23 nt, artificial
  Chemically synthesized
caguuuauuggugucauauuaua

SEQ ID NO: 19113 - RNA, 23 nt, artificial
  Chemically synthesized
auaaggcucuaccucaaagaccu

SEQ ID NO: 19114 - RNA, 23 nt, artificial
  Chemically synthesized
auaucucaugauucugccuccaa

SEQ ID NO: 19115 - RNA, 23 nt, artificial
  Chemically synthesized
cauguuugcaaucaaagaugaua

SEQ ID NO: 19116 - RNA, 23 nt, artificial
  Chemically synthesized
auuaaagaucucaaaaaagccaa

SEQ ID NO: 19117 - RNA, 23 nt, artificial
  Chemically synthesized
ucucaggcaucaaaagcauuuug

SEQ ID NO: 19118 - RNA, 23 nt, artificial
  Chemically synthesized
uucucaggcaucaaaagcauuuu

SEQ ID NO: 19119 - RNA, 23 nt, artificial
  Chemically synthesized
uuucucaggcaucaaaagcauuu

SEQ ID NO: 19120 - RNA, 23 nt, artificial
  Chemically synthesized
cuuucucaggcaucaaaagcauu

SEQ ID NO: 19121 - RNA, 23 nt, artificial
  Chemically synthesized
aagaaugacaauguccaagacac

SEQ ID NO: 19122 - RNA, 23 nt, artificial
  Chemically synthesized
gcaucuaacauaugauucuguag

SEQ ID NO: 19123 - RNA, 23 nt, artificial
  Chemically synthesized
ggcaucuaacauaugauucugua

SEQ ID NO: 19124 - RNA, 23 nt, artificial
  Chemically synthesized
uggcaucuaacauaugauucugu

SEQ ID NO: 19125 - RNA, 23 nt, artificial
  Chemically synthesized
aggauugcucaacaaccaugcug

SEQ ID NO: 19126 - RNA, 23 nt, artificial
  Chemically synthesized
uguaugcauuuuacuggcucaaa

SEQ ID NO: 19127 - RNA, 23 nt, artificial
  Chemically synthesized
guguaugcauuuuacuggcucaa

SEQ ID NO: 19128 - RNA, 23 nt, artificial
  Chemically synthesized
uguguaugcauuuuacuggcuca

SEQ ID NO: 19129 - RNA, 23 nt, artificial
  Chemically synthesized
accuuuugcugaaauaucaguua

SEQ ID NO: 19130 - RNA, 23 nt, artificial
  Chemically synthesized
gaccuuuugcugaaauaucaguu

SEQ ID NO: 19131 - RNA, 23 nt, artificial
  Chemically synthesized
ugaccuuuugcugaaauaucagu

SEQ ID NO: 19132 - RNA, 23 nt, artificial
  Chemically synthesized
caauagaagaagcuaugaccuuu

SEQ ID NO: 19133 - RNA, 23 nt, artificial
  Chemically synthesized
uacccaaauaggaguguaugcag

SEQ ID NO: 19134 - RNA, 23 nt, artificial
  Chemically synthesized
guacccaaauaggaguguaugca

SEQ ID NO: 19135 - RNA, 23 nt, artificial
  Chemically synthesized
gaaucaucaaggaaugcacacuc

SEQ ID NO: 19136 - RNA, 23 nt, artificial
  Chemically synthesized
ggaaucaucaaggaaugcacacu

SEQ ID NO: 19137 - RNA, 23 nt, artificial
  Chemically synthesized
uggaaucaucaaggaaugcacac

SEQ ID NO: 19138 - RNA, 23 nt, artificial
  Chemically synthesized
auggaaucaucaaggaaugcaca

SEQ ID NO: 19139 - RNA, 23 nt, artificial
  Chemically synthesized
uuaauagcuggcuguaaauacug

SEQ ID NO: 19140 - RNA, 23 nt, artificial
  Chemically synthesized
cacccccgaaaauguucaauaau

SEQ ID NO: 19141 - RNA, 23 nt, artificial
  Chemically synthesized
gcaucaaaagcauuuugagcagg

SEQ ID NO: 19142 - RNA, 23 nt, artificial
  Chemically synthesized
ggcaucaaaagcauuuugagcag

SEQ ID NO: 19143 - RNA, 23 nt, artificial
  Chemically synthesized
aggcaucaaaagcauuuugagca

SEQ ID NO: 19144 - RNA, 23 nt, artificial
  Chemically synthesized
caggcaucaaaagcauuuugagc

SEQ ID NO: 19145 - RNA, 23 nt, artificial
  Chemically synthesized
ucaggcaucaaaagcauuuugag

SEQ ID NO: 19146 - RNA, 23 nt, artificial
  Chemically synthesized
aauguucaauaaugucccaugua

SEQ ID NO: 19147 - RNA, 23 nt, artificial
  Chemically synthesized
aaauguucaauaaugucccaugu

SEQ ID NO: 19148 - RNA, 23 nt, artificial
  Chemically synthesized
acaguugagacucagaacuugga

SEQ ID NO: 19149 - RNA, 23 nt, artificial
  Chemically synthesized
uacaguugagacucagaacuugg

SEQ ID NO: 19150 - RNA, 23 nt, artificial
  Chemically synthesized
uuacuagugacucagaaaauuca

SEQ ID NO: 19151 - RNA, 23 nt, artificial
  Chemically synthesized
cugguuuggagauacuaacugcu

SEQ ID NO: 19152 - RNA, 23 nt, artificial
  Chemically synthesized
cucugagaagaucauauuuaugu

SEQ ID NO: 19153 - RNA, 23 nt, artificial
  Chemically synthesized
acucugagaagaucauauuuaug

SEQ ID NO: 19154 - RNA, 23 nt, artificial
  Chemically synthesized
aacucugagaagaucauauuuau

SEQ ID NO: 19155 - RNA, 23 nt, artificial
  Chemically synthesized
uaacucugagaagaucauauuua

SEQ ID NO: 19156 - RNA, 23 nt, artificial
  Chemically synthesized
auaacucugagaagaucauauuu

SEQ ID NO: 19157 - RNA, 23 nt, artificial
  Chemically synthesized
uucuagccugguuuggagauacu

SEQ ID NO: 19158 - RNA, 23 nt, artificial
  Chemically synthesized
auucuagccugguuuggagauac

SEQ ID NO: 19159 - RNA, 23 nt, artificial
  Chemically synthesized
aauucuagccugguuuggagaua

SEQ ID NO: 19160 - RNA, 23 nt, artificial
  Chemically synthesized
uuggagauacuaacugcucucag

SEQ ID NO: 19161 - RNA, 23 nt, artificial
  Chemically synthesized
uuuggagauacuaacugcucuca

SEQ ID NO: 19162 - RNA, 23 nt, artificial
  Chemically synthesized
guuuggagauacuaacugcucuc

SEQ ID NO: 19163 - RNA, 23 nt, artificial
  Chemically synthesized
gguuuggagauacuaacugcucu

SEQ ID NO: 19164 - RNA, 23 nt, artificial
  Chemically synthesized
gcaaugguaaaaucaucaucugg

SEQ ID NO: 19165 - RNA, 23 nt, artificial
  Chemically synthesized
agcaaugguaaaaucaucaucug

SEQ ID NO: 19166 - RNA, 23 nt, artificial
  Chemically synthesized
uagcaaugguaaaaucaucaucu

SEQ ID NO: 19167 - RNA, 23 nt, artificial
  Chemically synthesized
auagcaaugguaaaaucaucauc

SEQ ID NO: 19168 - RNA, 23 nt, artificial
  Chemically synthesized
cucucagagaaaguagcuuugug

SEQ ID NO: 19169 - RNA, 23 nt, artificial
  Chemically synthesized
guuuuuuacuggguacauuuuau

SEQ ID NO: 19170 - RNA, 23 nt, artificial
  Chemically synthesized
aagaguaaaugcaguggcaugcu

SEQ ID NO: 19171 - RNA, 23 nt, artificial
  Chemically synthesized
caagaguaaaugcaguggcaugc

SEQ ID NO: 19172 - RNA, 23 nt, artificial
  Chemically synthesized
ucaagaguaaaugcaguggcaug

SEQ ID NO: 19173 - RNA, 23 nt, artificial
  Chemically synthesized
aucaagaguaaaugcaguggcau

SEQ ID NO: 19174 - RNA, 23 nt, artificial
  Chemically synthesized
gguguucaaagacgcuucugggg

SEQ ID NO: 19175 - RNA, 23 nt, artificial
  Chemically synthesized
agguguucaaagacgcuucuggg

SEQ ID NO: 19176 - RNA, 23 nt, artificial
  Chemically synthesized
cagguguucaaagacgcuucugg

SEQ ID NO: 19177 - RNA, 23 nt, artificial
  Chemically synthesized
acagguguucaaagacgcuucug

SEQ ID NO: 19178 - RNA, 23 nt, artificial
  Chemically synthesized
cacagguguucaaagacgcuucu

SEQ ID NO: 19179 - RNA, 23 nt, artificial
  Chemically synthesized
accuacuucuuucucaggcauca

SEQ ID NO: 19180 - RNA, 23 nt, artificial
  Chemically synthesized
uaccuacuucuuucucaggcauc

SEQ ID NO: 19181 - RNA, 23 nt, artificial
  Chemically synthesized
cuaccuacuucuuucucaggcau

SEQ ID NO: 19182 - RNA, 23 nt, artificial
  Chemically synthesized
aaucaucaaggaaugcacacuca

SEQ ID NO: 19183 - RNA, 23 nt, artificial
  Chemically synthesized
acugaagcagauaccuggaacca

SEQ ID NO: 19184 - RNA, 23 nt, artificial
  Chemically synthesized
aacugaagcagauaccuggaacc

SEQ ID NO: 19185 - RNA, 23 nt, artificial
  Chemically synthesized
aaacugaagcagauaccuggaac

SEQ ID NO: 19186 - RNA, 23 nt, artificial
  Chemically synthesized
uaaacugaagcagauaccuggaa

SEQ ID NO: 19187 - RNA, 23 nt, artificial
  Chemically synthesized
auaaacugaagcagauaccugga

SEQ ID NO: 19188 - RNA, 23 nt, artificial
  Chemically synthesized
cugaagagccaacauauuuguag

SEQ ID NO: 19189 - RNA, 23 nt, artificial
  Chemically synthesized
cugaaauaucaguuacugaacag

SEQ ID NO: 19190 - RNA, 23 nt, artificial
  Chemically synthesized
gcugaaauaucaguuacugaaca

SEQ ID NO: 19191 - RNA, 23 nt, artificial
  Chemically synthesized
ugcugaaauaucaguuacugaac

SEQ ID NO: 19192 - RNA, 23 nt, artificial
  Chemically synthesized
uugcugaaauaucaguuacugaa

SEQ ID NO: 19193 - RNA, 23 nt, artificial
  Chemically synthesized
uuugcugaaauaucaguuacuga

SEQ ID NO: 19194 - RNA, 23 nt, artificial
  Chemically synthesized
uucuuacgucuguugcuagauua

SEQ ID NO: 19195 - RNA, 23 nt, artificial
  Chemically synthesized
cuucauggaaagaaagaagcgua

SEQ ID NO: 19196 - RNA, 23 nt, artificial
  Chemically synthesized
auuaugcucuggcaucuaacaua

SEQ ID NO: 19197 - RNA, 23 nt, artificial
  Chemically synthesized
uaguugggaaaacaaacuucauc

SEQ ID NO: 19198 - RNA, 23 nt, artificial
  Chemically synthesized
cuaguugggaaaacaaacuucau

SEQ ID NO: 19199 - RNA, 23 nt, artificial
  Chemically synthesized
agacuguuacuacaguugagacu

SEQ ID NO: 19200 - RNA, 23 nt, artificial
  Chemically synthesized
aagacuguuacuacaguugagac

SEQ ID NO: 19201 - RNA, 23 nt, artificial
  Chemically synthesized
gaagacuguuacuacaguugaga

SEQ ID NO: 19202 - RNA, 23 nt, artificial
  Chemically synthesized
ugauucugccuccaaggauguuu

SEQ ID NO: 19203 - RNA, 23 nt, artificial
  Chemically synthesized
augauucugccuccaaggauguu

SEQ ID NO: 19204 - RNA, 23 nt, artificial
  Chemically synthesized
caugauucugccuccaaggaugu

SEQ ID NO: 19205 - RNA, 23 nt, artificial
  Chemically synthesized
agcuuugccaccucuccauuuuu

SEQ ID NO: 19206 - RNA, 23 nt, artificial
  Chemically synthesized
gagcuuugccaccucuccauuuu

SEQ ID NO: 19207 - RNA, 23 nt, artificial
  Chemically synthesized
agagcuuugccaccucuccauuu

SEQ ID NO: 19208 - RNA, 23 nt, artificial
  Chemically synthesized
uagagcuuugccaccucuccauu

SEQ ID NO: 19209 - RNA, 23 nt, artificial
  Chemically synthesized
cuagagcuuugccaccucuccau

SEQ ID NO: 19210 - RNA, 23 nt, artificial
  Chemically synthesized
cacuuugccucuaaauuaccucu

SEQ ID NO: 19211 - RNA, 23 nt, artificial
  Chemically synthesized
uauuagcgcugaagagccaacau

SEQ ID NO: 19212 - RNA, 23 nt, artificial
  Chemically synthesized
uacugcuugguuuuuuacugggu

SEQ ID NO: 19213 - RNA, 23 nt, artificial
  Chemically synthesized
gcuuugccaccucuccauuuuug

SEQ ID NO: 19214 - RNA, 23 nt, artificial
  Chemically synthesized
gauuuaggaauugcucuugucau

SEQ ID NO: 19215 - RNA, 23 nt, artificial
  Chemically synthesized
caaaagcauuuugagcaggagag

SEQ ID NO: 19216 - RNA, 23 nt, artificial
  Chemically synthesized
ucaaaagcauuuugagcaggaga

SEQ ID NO: 19217 - RNA, 23 nt, artificial
  Chemically synthesized
gcagaauuuaaauaaggcucuac

SEQ ID NO: 19218 - RNA, 23 nt, artificial
  Chemically synthesized
ugcagaauuuaaauaaggcucua

SEQ ID NO: 19219 - RNA, 23 nt, artificial
  Chemically synthesized
gugcagaauuuaaauaaggcucu

SEQ ID NO: 19220 - RNA, 23 nt, artificial
  Chemically synthesized
agugcagaauuuaaauaaggcuc

SEQ ID NO: 19221 - RNA, 23 nt, artificial
  Chemically synthesized
gagugcagaauuuaaauaaggcu

SEQ ID NO: 19222 - RNA, 23 nt, artificial
  Chemically synthesized
guacucuugcagagaaaauucag

SEQ ID NO: 19223 - RNA, 23 nt, artificial
  Chemically synthesized
ugaacaggcaggccacuuugccu

SEQ ID NO: 19224 - RNA, 23 nt, artificial
  Chemically synthesized
cugaacaggcaggccacuuugcc

SEQ ID NO: 19225 - RNA, 23 nt, artificial
  Chemically synthesized
acugaacaggcaggccacuuugc

SEQ ID NO: 19226 - RNA, 23 nt, artificial
  Chemically synthesized
uacugaacaggcaggccacuuug

SEQ ID NO: 19227 - RNA, 23 nt, artificial
  Chemically synthesized
uuacugaacaggcaggccacuuu

SEQ ID NO: 19228 - RNA, 23 nt, artificial
  Chemically synthesized
gagaucaagaaugacaaugucca

SEQ ID NO: 19229 - RNA, 23 nt, artificial
  Chemically synthesized
guaauuggcaucaacuucaugga

SEQ ID NO: 19230 - RNA, 23 nt, artificial
  Chemically synthesized
cguaauuggcaucaacuucaugg

SEQ ID NO: 19231 - RNA, 23 nt, artificial
  Chemically synthesized
ucguaauuggcaucaacuucaug

SEQ ID NO: 19232 - RNA, 23 nt, artificial
  Chemically synthesized
uucguaauuggcaucaacuucau

SEQ ID NO: 19233 - RNA, 23 nt, artificial
  Chemically synthesized
auauaucaccacuauugcuggag

SEQ ID NO: 19234 - RNA, 23 nt, artificial
  Chemically synthesized
aauauaucaccacuauugcugga

SEQ ID NO: 19235 - RNA, 23 nt, artificial
  Chemically synthesized
aaauauaucaccacuauugcugg

SEQ ID NO: 19236 - RNA, 23 nt, artificial
  Chemically synthesized
uaaauauaucaccacuauugcug

SEQ ID NO: 19237 - RNA, 23 nt, artificial
  Chemically synthesized
guaaauauaucaccacuauugcu

SEQ ID NO: 19238 - RNA, 23 nt, artificial
  Chemically synthesized
aaaauguucaauaaugucccaug

SEQ ID NO: 19239 - RNA, 23 nt, artificial
  Chemically synthesized
gaaaauguucaauaaugucccau

SEQ ID NO: 19240 - RNA, 23 nt, artificial
  Chemically synthesized
cgaaaauguucaauaauguccca

SEQ ID NO: 19241 - RNA, 23 nt, artificial
  Chemically synthesized
cugaagcagauaccuggaaccac

SEQ ID NO: 19242 - RNA, 23 nt, artificial
  Chemically synthesized
augucuauccacaggcuaacccc

SEQ ID NO: 19243 - RNA, 23 nt, artificial
  Chemically synthesized
aaugucuauccacaggcuaaccc

SEQ ID NO: 19244 - RNA, 23 nt, artificial
  Chemically synthesized
aaaugucuauccacaggcuaacc

SEQ ID NO: 19245 - RNA, 23 nt, artificial
  Chemically synthesized
caaaugucuauccacaggcuaac

SEQ ID NO: 19246 - RNA, 23 nt, artificial
  Chemically synthesized
acaaaugucuauccacaggcuaa

SEQ ID NO: 19247 - RNA, 23 nt, artificial
  Chemically synthesized
ucuaguugggaaaacaaacuuca

SEQ ID NO: 19248 - RNA, 23 nt, artificial
  Chemically synthesized
uaucguccaaaaguguuaaugcc

SEQ ID NO: 19249 - RNA, 23 nt, artificial
  Chemically synthesized
uuaucguccaaaaguguuaaugc

SEQ ID NO: 19250 - RNA, 23 nt, artificial
  Chemically synthesized
auuaucguccaaaaguguuaaug

SEQ ID NO: 19251 - RNA, 23 nt, artificial
  Chemically synthesized
gacugcccuuagaaauucuagcc

SEQ ID NO: 19252 - RNA, 23 nt, artificial
  Chemically synthesized
agacugcccuuagaaauucuagc

SEQ ID NO: 19253 - RNA, 23 nt, artificial
  Chemically synthesized
aagacugcccuuagaaauucuag

SEQ ID NO: 19254 - RNA, 23 nt, artificial
  Chemically synthesized
auagcuggcuguaaauacugcuu

SEQ ID NO: 19255 - RNA, 23 nt, artificial
  Chemically synthesized
aauagcuggcuguaaauacugcu

SEQ ID NO: 19256 - RNA, 23 nt, artificial
  Chemically synthesized
uaauagcuggcuguaaauacugc

SEQ ID NO: 19257 - RNA, 23 nt, artificial
  Chemically synthesized
cuguugcuagauuaucguccaaa

SEQ ID NO: 19258 - RNA, 23 nt, artificial
  Chemically synthesized
ucuguugcuagauuaucguccaa

SEQ ID NO: 19259 - RNA, 23 nt, artificial
  Chemically synthesized
gucuguugcuagauuaucgucca

SEQ ID NO: 19260 - RNA, 23 nt, artificial
  Chemically synthesized
gcaauuaguguuugaaaagauuc

SEQ ID NO: 19261 - RNA, 23 nt, artificial
  Chemically synthesized
ugcaauuaguguuugaaaagauu

SEQ ID NO: 19262 - RNA, 23 nt, artificial
  Chemically synthesized
augcaauuaguguuugaaaagau

SEQ ID NO: 19263 - RNA, 23 nt, artificial
  Chemically synthesized
uaugcaauuaguguuugaaaaga

SEQ ID NO: 19264 - RNA, 23 nt, artificial
  Chemically synthesized
auaugcaauuaguguuugaaaag

SEQ ID NO: 19265 - RNA, 23 nt, artificial
  Chemically synthesized
caaggaaugcacacucaccagca

SEQ ID NO: 19266 - RNA, 23 nt, artificial
  Chemically synthesized
aguacccaaauaggaguguaugc

SEQ ID NO: 19267 - RNA, 23 nt, artificial
  Chemically synthesized
aaguacccaaauaggaguguaug

SEQ ID NO: 19268 - RNA, 23 nt, artificial
  Chemically synthesized
uaaguacccaaauaggaguguau

SEQ ID NO: 19269 - RNA, 23 nt, artificial
  Chemically synthesized
cuaaguacccaaauaggagugua

SEQ ID NO: 19270 - RNA, 23 nt, artificial
  Chemically synthesized
guauguuaguacaaaugucuauc

SEQ ID NO: 19271 - RNA, 23 nt, artificial
  Chemically synthesized
uguauguuaguacaaaugucuau

SEQ ID NO: 19272 - RNA, 23 nt, artificial
  Chemically synthesized
guguauguuaguacaaaugucua

SEQ ID NO: 19273 - RNA, 23 nt, artificial
  Chemically synthesized
aguguauguuaguacaaaugucu

SEQ ID NO: 19274 - RNA, 23 nt, artificial
  Chemically synthesized
uauaacucugagaagaucauauu

SEQ ID NO: 19275 - RNA, 23 nt, artificial
  Chemically synthesized
uuauaacucugagaagaucauau

SEQ ID NO: 19276 - RNA, 23 nt, artificial
  Chemically synthesized
acuucauggaaagaaagaagcgu

SEQ ID NO: 19277 - RNA, 23 nt, artificial
  Chemically synthesized
aacuucauggaaagaaagaagcg

SEQ ID NO: 19278 - RNA, 23 nt, artificial
  Chemically synthesized
caacuucauggaaagaaagaagc

SEQ ID NO: 19279 - RNA, 23 nt, artificial
  Chemically synthesized
gacuguuacuacaguugagacuc

SEQ ID NO: 19280 - RNA, 23 nt, artificial
  Chemically synthesized
cuauugcuggagucaugacacua

SEQ ID NO: 19281 - RNA, 23 nt, artificial
  Chemically synthesized
agaguaaaugcaguggcaugcua

SEQ ID NO: 19282 - RNA, 23 nt, artificial
  Chemically synthesized
guaaauacugcuugguuuuuuac

SEQ ID NO: 19283 - RNA, 23 nt, artificial
  Chemically synthesized
aagaagcuaugaccuuuugcuga

SEQ ID NO: 19284 - RNA, 23 nt, artificial
  Chemically synthesized
gcaucaugauggccaauucugcc

SEQ ID NO: 19285 - RNA, 23 nt, artificial
  Chemically synthesized
ugcaucaugauggccaauucugc

SEQ ID NO: 19286 - RNA, 23 nt, artificial
  Chemically synthesized
cugcaucaugauggccaauucug

SEQ ID NO: 19287 - RNA, 23 nt, artificial
  Chemically synthesized
guuuaaaaucuaguugggaaaac

SEQ ID NO: 19288 - RNA, 23 nt, artificial
  Chemically synthesized
uguuuaaaaucuaguugggaaaa

SEQ ID NO: 19289 - RNA, 23 nt, artificial
  Chemically synthesized
auguuuaaaaucuaguugggaaa

SEQ ID NO: 19290 - RNA, 23 nt, artificial
  Chemically synthesized
gauguuuaaaaucuaguugggaa

SEQ ID NO: 19291 - RNA, 23 nt, artificial
  Chemically synthesized
ggauguuuaaaaucuaguuggga

SEQ ID NO: 19292 - RNA, 23 nt, artificial
  Chemically synthesized
acagaaaguucaacugcuucgua

SEQ ID NO: 19293 - RNA, 23 nt, artificial
  Chemically synthesized
aaaguauauguauuugagugcag

SEQ ID NO: 19294 - RNA, 23 nt, artificial
  Chemically synthesized
uaaaguauauguauuugagugca

SEQ ID NO: 19295 - RNA, 23 nt, artificial
  Chemically synthesized
cagaaaauucaaacuucagaaau

SEQ ID NO: 19296 - RNA, 23 nt, artificial
  Chemically synthesized
ucagaaaauucaaacuucagaaa

SEQ ID NO: 19297 - RNA, 23 nt, artificial
  Chemically synthesized
cucagaaaauucaaacuucagaa

SEQ ID NO: 19298 - RNA, 23 nt, artificial
  Chemically synthesized
acucagaaaauucaaacuucaga

SEQ ID NO: 19299 - RNA, 23 nt, artificial
  Chemically synthesized
gacucagaaaauucaaacuucag

SEQ ID NO: 19300 - RNA, 23 nt, artificial
  Chemically synthesized
aguaugaauguaaucaguguaug

SEQ ID NO: 19301 - RNA, 23 nt, artificial
  Chemically synthesized
uaguaugaauguaaucaguguau

SEQ ID NO: 19302 - RNA, 23 nt, artificial
  Chemically synthesized
guaguaugaauguaaucagugua

SEQ ID NO: 19303 - RNA, 23 nt, artificial
  Chemically synthesized
uguaguaugaauguaaucagugu

SEQ ID NO: 19304 - RNA, 23 nt, artificial
  Chemically synthesized
cacucuaugaaucaauagaagaa

SEQ ID NO: 19305 - RNA, 23 nt, artificial
  Chemically synthesized
ccacucuaugaaucaauagaaga

SEQ ID NO: 19306 - RNA, 23 nt, artificial
  Chemically synthesized
caaaaaagccaaucuuuguacuc

SEQ ID NO: 19307 - RNA, 23 nt, artificial
  Chemically synthesized
ucaaaaaagccaaucuuuguacu

SEQ ID NO: 19308 - RNA, 23 nt, artificial
  Chemically synthesized
ccucugguucuuacgucuguugc

SEQ ID NO: 19309 - RNA, 23 nt, artificial
  Chemically synthesized
accucugguucuuacgucuguug

SEQ ID NO: 19310 - RNA, 23 nt, artificial
  Chemically synthesized
uaccucugguucuuacgucuguu

SEQ ID NO: 19311 - RNA, 23 nt, artificial
  Chemically synthesized
cuaccucugguucuuacgucugu

SEQ ID NO: 19312 - RNA, 23 nt, artificial
  Chemically synthesized
gacugacaucaacuccaagggau

SEQ ID NO: 19313 - RNA, 23 nt, artificial
  Chemically synthesized
gaaaacaaacuucaucaagagua

SEQ ID NO: 19314 - RNA, 23 nt, artificial
  Chemically synthesized
aaccugcuacaaauggcagcuua

SEQ ID NO: 19315 - RNA, 23 nt, artificial
  Chemically synthesized
ccuccuaccucugguucuuacgu

SEQ ID NO: 19316 - RNA, 23 nt, artificial
  Chemically synthesized
cccuccuaccucugguucuuacg

SEQ ID NO: 19317 - RNA, 23 nt, artificial
  Chemically synthesized
acccuccuaccucugguucuuac

SEQ ID NO: 19318 - RNA, 23 nt, artificial
  Chemically synthesized
gacccuccuaccucugguucuua

SEQ ID NO: 19319 - RNA, 23 nt, artificial
  Chemically synthesized
ggacccuccuaccucugguucuu

SEQ ID NO: 19320 - RNA, 23 nt, artificial
  Chemically synthesized
cuuaauaguccaccaaaaggcaa

SEQ ID NO: 19321 - RNA, 23 nt, artificial
  Chemically synthesized
agucaaguuaaaggcuuuguucg

SEQ ID NO: 19322 - RNA, 23 nt, artificial
  Chemically synthesized
aaauccaaagcuuggucuagagu

SEQ ID NO: 19323 - RNA, 23 nt, artificial
  Chemically synthesized
gaaauccaaagcuuggucuagag

SEQ ID NO: 19324 - RNA, 23 nt, artificial
  Chemically synthesized
ugaaauccaaagcuuggucuaga

SEQ ID NO: 19325 - RNA, 23 nt, artificial
  Chemically synthesized
augaaauccaaagcuuggucuag

SEQ ID NO: 19326 - RNA, 23 nt, artificial
  Chemically synthesized
aaugaaauccaaagcuuggucua

SEQ ID NO: 19327 - RNA, 23 nt, artificial
  Chemically synthesized
cuggcuguaaauacugcuugguu

SEQ ID NO: 19328 - RNA, 23 nt, artificial
  Chemically synthesized
cucaggcaucaaaagcauuuuga

SEQ ID NO: 19329 - RNA, 23 nt, artificial
  Chemically synthesized
uguuugcaaucaaagaugauaaa

SEQ ID NO: 19330 - RNA, 23 nt, artificial
  Chemically synthesized
auguuugcaaucaaagaugauaa

SEQ ID NO: 19331 - RNA, 23 nt, artificial
  Chemically synthesized
acuauugcuggagucaugacacu

SEQ ID NO: 19332 - RNA, 23 nt, artificial
  Chemically synthesized
aagcagauaccuggaaccaccua

SEQ ID NO: 19333 - RNA, 23 nt, artificial
  Chemically synthesized
acacacagguguucaaagacgcu

SEQ ID NO: 19334 - RNA, 23 nt, artificial
  Chemically synthesized
gacacacagguguucaaagacgc

SEQ ID NO: 19335 - RNA, 23 nt, artificial
  Chemically synthesized
ugacacacagguguucaaagacg

SEQ ID NO: 19336 - RNA, 23 nt, artificial
  Chemically synthesized
aucaaaagcauuuugagcaggag

SEQ ID NO: 19337 - RNA, 23 nt, artificial
  Chemically synthesized
caucaaaagcauuuugagcagga

SEQ ID NO: 19338 - RNA, 23 nt, artificial
  Chemically synthesized
caacugcuucguaauuggcauca

SEQ ID NO: 19339 - RNA, 23 nt, artificial
  Chemically synthesized
ucaacugcuucguaauuggcauc

SEQ ID NO: 19340 - RNA, 23 nt, artificial
  Chemically synthesized
uucaacugcuucguaauuggcau

SEQ ID NO: 19341 - RNA, 23 nt, artificial
  Chemically synthesized
aaugcaguggcaugcuaaguacc

SEQ ID NO: 19342 - RNA, 23 nt, artificial
  Chemically synthesized
uguuacuacaguugagacucaga

SEQ ID NO: 19343 - RNA, 23 nt, artificial
  Chemically synthesized
aaucuuuguacucuugcagagaa

SEQ ID NO: 19344 - RNA, 23 nt, artificial
  Chemically synthesized
aacaacaaauucaguucugagua

SEQ ID NO: 19345 - RNA, 23 nt, artificial
  Chemically synthesized
guucuuacgucuguugcuagauu

SEQ ID NO: 19346 - RNA, 23 nt, artificial
  Chemically synthesized
ucaucuuaauggccuaaugcacc

SEQ ID NO: 19347 - RNA, 23 nt, artificial
  Chemically synthesized
cucaucuuaauggccuaaugcac

SEQ ID NO: 19348 - RNA, 23 nt, artificial
  Chemically synthesized
gcucaucuuaauggccuaaugca

SEQ ID NO: 19349 - RNA, 23 nt, artificial
  Chemically synthesized
gcgguuuacgagugacuuggcug

SEQ ID NO: 19350 - RNA, 23 nt, artificial
  Chemically synthesized
agcgguuuacgagugacuuggcu

SEQ ID NO: 19351 - RNA, 23 nt, artificial
  Chemically synthesized
aagcgguuuacgagugacuuggc

SEQ ID NO: 19352 - RNA, 23 nt, artificial
  Chemically synthesized
gaagcgguuuacgagugacuugg

SEQ ID NO: 19353 - RNA, 23 nt, artificial
  Chemically synthesized
aucuuaauggccuaaugcacccc

SEQ ID NO: 19354 - RNA, 23 nt, artificial
  Chemically synthesized
caucuuaauggccuaaugcaccc

SEQ ID NO: 19355 - RNA, 23 nt, artificial
  Chemically synthesized
aauagaugagaucaagaaugaca

SEQ ID NO: 19356 - RNA, 23 nt, artificial
  Chemically synthesized
caucaugauggccaauucugcca

SEQ ID NO: 19357 - RNA, 23 nt, artificial
  Chemically synthesized
acacagguguucaaagacgcuuc

SEQ ID NO: 19358 - RNA, 23 nt, artificial
  Chemically synthesized
cacacagguguucaaagacgcuu

SEQ ID NO: 19359 - RNA, 23 nt, artificial
  Chemically synthesized
cuuucacuucggaggauugcuca

SEQ ID NO: 19360 - RNA, 23 nt, artificial
  Chemically synthesized
cucuaccucaaagaccuuugcac

SEQ ID NO: 19361 - RNA, 23 nt, artificial
  Chemically synthesized
guuugcaaucaaagaugauaaaa

SEQ ID NO: 19362 - RNA, 23 nt, artificial
  Chemically synthesized
gaccuuugcacaguuuauuggug

SEQ ID NO: 19363 - RNA, 23 nt, artificial
  Chemically synthesized
uuuauaacucugagaagaucaua

SEQ ID NO: 19364 - RNA, 23 nt, artificial
  Chemically synthesized
aaauucuagccugguuuggagau

SEQ ID NO: 19365 - RNA, 23 nt, artificial
  Chemically synthesized
gaaauucuagccugguuuggaga

SEQ ID NO: 19366 - RNA, 23 nt, artificial
  Chemically synthesized
agaaauucuagccugguuuggag

SEQ ID NO: 19367 - RNA, 23 nt, artificial
  Chemically synthesized
uagaaauucuagccugguuugga

SEQ ID NO: 19368 - RNA, 23 nt, artificial
  Chemically synthesized
cuuagaaauucuagccugguuug

SEQ ID NO: 19369 - RNA, 23 nt, artificial
  Chemically synthesized
ccuuagaaauucuagccugguuu

SEQ ID NO: 19370 - RNA, 23 nt, artificial
  Chemically synthesized
ucaauagaagaagcuaugaccuu

SEQ ID NO: 19371 - RNA, 23 nt, artificial
  Chemically synthesized
aucaauagaagaagcuaugaccu

SEQ ID NO: 19372 - RNA, 23 nt, artificial
  Chemically synthesized
aaucaauagaagaagcuaugacc

SEQ ID NO: 19373 - RNA, 23 nt, artificial
  Chemically synthesized
auuuaagauucuccuuacuacua

SEQ ID NO: 19374 - RNA, 23 nt, artificial
  Chemically synthesized
gauuuaagauucuccuuacuacu

SEQ ID NO: 19375 - RNA, 23 nt, artificial
  Chemically synthesized
gcuggcuguaaauacugcuuggu

SEQ ID NO: 19376 - RNA, 23 nt, artificial
  Chemically synthesized
agcuggcuguaaauacugcuugg

SEQ ID NO: 19377 - RNA, 23 nt, artificial
  Chemically synthesized
aaacaacaaauucaguucugagu

SEQ ID NO: 19378 - RNA, 23 nt, artificial
  Chemically synthesized
aaaacaacaaauucaguucugag

SEQ ID NO: 19379 - RNA, 23 nt, artificial
  Chemically synthesized
aaaaacaacaaauucaguucuga

SEQ ID NO: 19380 - RNA, 23 nt, artificial
  Chemically synthesized
aaaugaaauccaaagcuuggucu

SEQ ID NO: 19381 - RNA, 23 nt, artificial
  Chemically synthesized
augcaguggcaugcuaaguaccc

SEQ ID NO: 19382 - RNA, 23 nt, artificial
  Chemically synthesized
uugccccuuguguuuggaauuau

SEQ ID NO: 19383 - RNA, 23 nt, artificial
  Chemically synthesized
uccuuacuacuauccuacguuua

SEQ ID NO: 19384 - RNA, 23 nt, artificial
  Chemically synthesized
cuccuuacuacuauccuacguuu

SEQ ID NO: 19385 - RNA, 23 nt, artificial
  Chemically synthesized
gauuaaagaucucaaaaaagcca

SEQ ID NO: 19386 - RNA, 23 nt, artificial
  Chemically synthesized
cuguuacuacaguugagacucag

SEQ ID NO: 19387 - RNA, 23 nt, artificial
  Chemically synthesized
acuguuacuacaguugagacuca

SEQ ID NO: 19388 - RNA, 23 nt, artificial
  Chemically synthesized
uauuuuuuggugauauuuccaug

SEQ ID NO: 19389 - RNA, 23 nt, artificial
  Chemically synthesized
auuuuuuggugauauuuccaugu

SEQ ID NO: 19390 - RNA, 23 nt, artificial
  Chemically synthesized
uuuuuuggugauauuuccauguu

SEQ ID NO: 19391 - RNA, 23 nt, artificial
  Chemically synthesized
uuuuggugauauuuccauguuug

SEQ ID NO: 19392 - RNA, 23 nt, artificial
  Chemically synthesized
agguuuuacaugggacauuauug

SEQ ID NO: 19393 - RNA, 23 nt, artificial
  Chemically synthesized
gguuuuacaugggacauuauuga

SEQ ID NO: 19394 - RNA, 23 nt, artificial
  Chemically synthesized
guuuuacaugggacauuauugaa

SEQ ID NO: 19395 - RNA, 23 nt, artificial
  Chemically synthesized
uuuuacaugggacauuauugaac

SEQ ID NO: 19396 - RNA, 23 nt, artificial
  Chemically synthesized
uuuacaugggacauuauugaaca

SEQ ID NO: 19397 - RNA, 23 nt, artificial
  Chemically synthesized
auuuuauaauuccaaacacaagg

SEQ ID NO: 19398 - RNA, 23 nt, artificial
  Chemically synthesized
uuuuauaauuccaaacacaaggg

SEQ ID NO: 19399 - RNA, 23 nt, artificial
  Chemically synthesized
uuuauaauuccaaacacaagggg

SEQ ID NO: 19400 - RNA, 23 nt, artificial
  Chemically synthesized
uuauaauuccaaacacaaggggc

SEQ ID NO: 19401 - RNA, 23 nt, artificial
  Chemically synthesized
uauaauuccaaacacaaggggca

SEQ ID NO: 19402 - RNA, 23 nt, artificial
  Chemically synthesized
gcauuuacucuugaugaaguuug

SEQ ID NO: 19403 - RNA, 23 nt, artificial
  Chemically synthesized
cauuuacucuugaugaaguuugu

SEQ ID NO: 19404 - RNA, 23 nt, artificial
  Chemically synthesized
auuuacucuugaugaaguuuguu

SEQ ID NO: 19405 - RNA, 23 nt, artificial
  Chemically synthesized
uuuacucuugaugaaguuuguuu

SEQ ID NO: 19406 - RNA, 23 nt, artificial
  Chemically synthesized
uuacucuugaugaaguuuguuuu

SEQ ID NO: 19407 - RNA, 23 nt, artificial
  Chemically synthesized
uuuggugauauuuccauguuugg

SEQ ID NO: 19408 - RNA, 23 nt, artificial
  Chemically synthesized
agaauuggccaucaugaugcagg

SEQ ID NO: 19409 - RNA, 23 nt, artificial
  Chemically synthesized
gaauuggccaucaugaugcaggc

SEQ ID NO: 19410 - RNA, 23 nt, artificial
  Chemically synthesized
aauuggccaucaugaugcaggcc

SEQ ID NO: 19411 - RNA, 23 nt, artificial
  Chemically synthesized
auuggccaucaugaugcaggccu

SEQ ID NO: 19412 - RNA, 23 nt, artificial
  Chemically synthesized
uuggccaucaugaugcaggccuu

SEQ ID NO: 19413 - RNA, 23 nt, artificial
  Chemically synthesized
aagcucuaguaauacucuccugc

SEQ ID NO: 19414 - RNA, 23 nt, artificial
  Chemically synthesized
agcucuaguaauacucuccugcu

SEQ ID NO: 19415 - RNA, 23 nt, artificial
  Chemically synthesized
gcucuaguaauacucuccugcuc

SEQ ID NO: 19416 - RNA, 23 nt, artificial
  Chemically synthesized
cucuaguaauacucuccugcuca

SEQ ID NO: 19417 - RNA, 23 nt, artificial
  Chemically synthesized
ucuaguaauacucuccugcucaa

SEQ ID NO: 19418 - RNA, 23 nt, artificial
  Chemically synthesized
ugagaaagaaguagguaguuuug

SEQ ID NO: 19419 - RNA, 23 nt, artificial
  Chemically synthesized
gagaaagaaguagguaguuuuga

SEQ ID NO: 19420 - RNA, 23 nt, artificial
  Chemically synthesized
agaaagaaguagguaguuuugag

SEQ ID NO: 19421 - RNA, 23 nt, artificial
  Chemically synthesized
gaaagaaguagguaguuuugagc

SEQ ID NO: 19422 - RNA, 23 nt, artificial
  Chemically synthesized
aaagaaguagguaguuuugagcc

SEQ ID NO: 19423 - RNA, 23 nt, artificial
  Chemically synthesized
cucuuugcacuugguguugcugg

SEQ ID NO: 19424 - RNA, 23 nt, artificial
  Chemically synthesized
ucuuugcacuugguguugcuggu

SEQ ID NO: 19425 - RNA, 23 nt, artificial
  Chemically synthesized
cuuugcacuugguguugcuggug

SEQ ID NO: 19426 - RNA, 23 nt, artificial
  Chemically synthesized
uuugcacuugguguugcugguga

SEQ ID NO: 19427 - RNA, 23 nt, artificial
  Chemically synthesized
uugcacuugguguugcuggugag

SEQ ID NO: 19428 - RNA, 23 nt, artificial
  Chemically synthesized
guaguuuugagccaguaaaaugc

SEQ ID NO: 19429 - RNA, 23 nt, artificial
  Chemically synthesized
uaguuuugagccaguaaaaugca

SEQ ID NO: 19430 - RNA, 23 nt, artificial
  Chemically synthesized
aguuuugagccaguaaaaugcau

SEQ ID NO: 19431 - RNA, 23 nt, artificial
  Chemically synthesized
guuuugagccaguaaaaugcaua

SEQ ID NO: 19432 - RNA, 23 nt, artificial
  Chemically synthesized
uuuugagccaguaaaaugcauac

SEQ ID NO: 19433 - RNA, 23 nt, artificial
  Chemically synthesized
gcaguuaguaucuccaaaccagg

SEQ ID NO: 19434 - RNA, 23 nt, artificial
  Chemically synthesized
caguuaguaucuccaaaccaggc

SEQ ID NO: 19435 - RNA, 23 nt, artificial
  Chemically synthesized
aguuaguaucuccaaaccaggcu

SEQ ID NO: 19436 - RNA, 23 nt, artificial
  Chemically synthesized
guuaguaucuccaaaccaggcua

SEQ ID NO: 19437 - RNA, 23 nt, artificial
  Chemically synthesized
uuaguaucuccaaaccaggcuag

SEQ ID NO: 19438 - RNA, 23 nt, artificial
  Chemically synthesized
uuuguuguuuuucacucuagacc

SEQ ID NO: 19439 - RNA, 23 nt, artificial
  Chemically synthesized
uuguuguuuuucacucuagacca

SEQ ID NO: 19440 - RNA, 23 nt, artificial
  Chemically synthesized
uguuguuuuucacucuagaccaa

SEQ ID NO: 19441 - RNA, 23 nt, artificial
  Chemically synthesized
guuguuuuucacucuagaccaag

SEQ ID NO: 19442 - RNA, 23 nt, artificial
  Chemically synthesized
uuguuuuucacucuagaccaagc

SEQ ID NO: 19443 - RNA, 23 nt, artificial
  Chemically synthesized
acacuuuuggacgauaaucuagc

SEQ ID NO: 19444 - RNA, 23 nt, artificial
  Chemically synthesized
cacuuuuggacgauaaucuagca

SEQ ID NO: 19445 - RNA, 23 nt, artificial
  Chemically synthesized
acuuuuggacgauaaucuagcaa

SEQ ID NO: 19446 - RNA, 23 nt, artificial
  Chemically synthesized
cuuuuggacgauaaucuagcaac

SEQ ID NO: 19447 - RNA, 23 nt, artificial
  Chemically synthesized
uuuuggacgauaaucuagcaaca

SEQ ID NO: 19448 - RNA, 23 nt, artificial
  Chemically synthesized
ggccauuaagaugagcaccaagg

SEQ ID NO: 19449 - RNA, 23 nt, artificial
  Chemically synthesized
gccauuaagaugagcaccaaggc

SEQ ID NO: 19450 - RNA, 23 nt, artificial
  Chemically synthesized
ccauuaagaugagcaccaaggca

SEQ ID NO: 19451 - RNA, 23 nt, artificial
  Chemically synthesized
cauuaagaugagcaccaaggcaa

SEQ ID NO: 19452 - RNA, 23 nt, artificial
  Chemically synthesized
auuaagaugagcaccaaggcaaa

SEQ ID NO: 19453 - RNA, 23 nt, artificial
  Chemically synthesized
ugucuuggacauugucauucuug

SEQ ID NO: 19454 - RNA, 23 nt, artificial
  Chemically synthesized
gucuuggacauugucauucuuga

SEQ ID NO: 19455 - RNA, 23 nt, artificial
  Chemically synthesized
ucuuggacauugucauucuugau

SEQ ID NO: 19456 - RNA, 23 nt, artificial
  Chemically synthesized
cuuggacauugucauucuugauc

SEQ ID NO: 19457 - RNA, 23 nt, artificial
  Chemically synthesized
uuggacauugucauucuugaucu

SEQ ID NO: 19458 - RNA, 23 nt, artificial
  Chemically synthesized
ugccuuuugguggacuauuaagu

SEQ ID NO: 19459 - RNA, 23 nt, artificial
  Chemically synthesized
gccuuuugguggacuauuaagua

SEQ ID NO: 19460 - RNA, 23 nt, artificial
  Chemically synthesized
ccuuuugguggacuauuaaguau

SEQ ID NO: 19461 - RNA, 23 nt, artificial
  Chemically synthesized
cuuuugguggacuauuaaguauu

SEQ ID NO: 19462 - RNA, 23 nt, artificial
  Chemically synthesized
uuuugguggacuauuaaguauuu

SEQ ID NO: 19463 - RNA, 23 nt, artificial
  Chemically synthesized
aagaaguagguaguuuugagcca

SEQ ID NO: 19464 - RNA, 23 nt, artificial
  Chemically synthesized
agaaguagguaguuuugagccag

SEQ ID NO: 19465 - RNA, 23 nt, artificial
  Chemically synthesized
gaaguagguaguuuugagccagu

SEQ ID NO: 19466 - RNA, 23 nt, artificial
  Chemically synthesized
ucacuugggcauuaacacuuuug

SEQ ID NO: 19467 - RNA, 23 nt, artificial
  Chemically synthesized
cacuugggcauuaacacuuuugg

SEQ ID NO: 19468 - RNA, 23 nt, artificial
  Chemically synthesized
acuugggcauuaacacuuuugga

SEQ ID NO: 19469 - RNA, 23 nt, artificial
  Chemically synthesized
cuugggcauuaacacuuuuggac

SEQ ID NO: 19470 - RNA, 23 nt, artificial
  Chemically synthesized
uugggcauuaacacuuuuggacg

SEQ ID NO: 19471 - RNA, 23 nt, artificial
  Chemically synthesized
aguauuuacagccagcuauuaag

SEQ ID NO: 19472 - RNA, 23 nt, artificial
  Chemically synthesized
guauuuacagccagcuauuaaga

SEQ ID NO: 19473 - RNA, 23 nt, artificial
  Chemically synthesized
uauuuacagccagcuauuaagaa

SEQ ID NO: 19474 - RNA, 23 nt, artificial
  Chemically synthesized
auuuacagccagcuauuaagaau

SEQ ID NO: 19475 - RNA, 23 nt, artificial
  Chemically synthesized
uuuacagccagcuauuaagaauc

SEQ ID NO: 19476 - RNA, 23 nt, artificial
  Chemically synthesized
aucaucuuugauugcaaacaugg

SEQ ID NO: 19477 - RNA, 23 nt, artificial
  Chemically synthesized
ucaucuuugauugcaaacauggg

SEQ ID NO: 19478 - RNA, 23 nt, artificial
  Chemically synthesized
caucuuugauugcaaacaugggu

SEQ ID NO: 19479 - RNA, 23 nt, artificial
  Chemically synthesized
aucuuugauugcaaacauggguu

SEQ ID NO: 19480 - RNA, 23 nt, artificial
  Chemically synthesized
ucuuugauugcaaacauggguuc

SEQ ID NO: 19481 - RNA, 23 nt, artificial
  Chemically synthesized
caacuguaguaacagucuuccuc

SEQ ID NO: 19482 - RNA, 23 nt, artificial
  Chemically synthesized
aacuguaguaacagucuuccuca

SEQ ID NO: 19483 - RNA, 23 nt, artificial
  Chemically synthesized
acuguaguaacagucuuccucaa

SEQ ID NO: 19484 - RNA, 23 nt, artificial
  Chemically synthesized
cuguaguaacagucuuccucaau

SEQ ID NO: 19485 - RNA, 23 nt, artificial
  Chemically synthesized
uguaguaacagucuuccucaauu

SEQ ID NO: 19486 - RNA, 23 nt, artificial
  Chemically synthesized
aaacugugcaaaggucuuugagg

SEQ ID NO: 19487 - RNA, 23 nt, artificial
  Chemically synthesized
aacugugcaaaggucuuugaggu

SEQ ID NO: 19488 - RNA, 23 nt, artificial
  Chemically synthesized
acugugcaaaggucuuugaggua

SEQ ID NO: 19489 - RNA, 23 nt, artificial
  Chemically synthesized
cugugcaaaggucuuugagguag

SEQ ID NO: 19490 - RNA, 23 nt, artificial
  Chemically synthesized
ugugcaaaggucuuugagguaga

SEQ ID NO: 19491 - RNA, 23 nt, artificial
  Chemically synthesized
gaaguucuuuaggugguuccagg

SEQ ID NO: 19492 - RNA, 23 nt, artificial
  Chemically synthesized
aaguucuuuaggugguuccaggu

SEQ ID NO: 19493 - RNA, 23 nt, artificial
  Chemically synthesized
aguucuuuaggugguuccaggua

SEQ ID NO: 19494 - RNA, 23 nt, artificial
  Chemically synthesized
guucuuuaggugguuccagguau

SEQ ID NO: 19495 - RNA, 23 nt, artificial
  Chemically synthesized
uucuuuaggugguuccagguauc

SEQ ID NO: 19496 - RNA, 23 nt, artificial
  Chemically synthesized
ucucaucuauuuuggcuucauug

SEQ ID NO: 19497 - RNA, 23 nt, artificial
  Chemically synthesized
cucaucuauuuuggcuucauuga

SEQ ID NO: 19498 - RNA, 23 nt, artificial
  Chemically synthesized
ucaucuauuuuggcuucauugac

SEQ ID NO: 19499 - RNA, 23 nt, artificial
  Chemically synthesized
caucuauuuuggcuucauugaca

SEQ ID NO: 19500 - RNA, 23 nt, artificial
  Chemically synthesized
aucuauuuuggcuucauugacac

SEQ ID NO: 19501 - RNA, 23 nt, artificial
  Chemically synthesized
cuauuuuggcuucauugacacca

SEQ ID NO: 19502 - RNA, 23 nt, artificial
  Chemically synthesized
uauuuuggcuucauugacaccau

SEQ ID NO: 19503 - RNA, 23 nt, artificial
  Chemically synthesized
auuuuggcuucauugacaccauu

SEQ ID NO: 19504 - RNA, 23 nt, artificial
  Chemically synthesized
uuuuggcuucauugacaccauuc

SEQ ID NO: 19505 - RNA, 23 nt, artificial
  Chemically synthesized
uuuggcuucauugacaccauucu

SEQ ID NO: 19506 - RNA, 23 nt, artificial
  Chemically synthesized
aauuuucugagucacuaguaaug

SEQ ID NO: 19507 - RNA, 23 nt, artificial
  Chemically synthesized
auuuucugagucacuaguaaugu

SEQ ID NO: 19508 - RNA, 23 nt, artificial
  Chemically synthesized
uuuucugagucacuaguaauguc

SEQ ID NO: 19509 - RNA, 23 nt, artificial
  Chemically synthesized
uuucugagucacuaguaaugucc

SEQ ID NO: 19510 - RNA, 23 nt, artificial
  Chemically synthesized
uucugagucacuaguaauguccu

SEQ ID NO: 19511 - RNA, 23 nt, artificial
  Chemically synthesized
auucuugaucucaucuauuuugg

SEQ ID NO: 19512 - RNA, 23 nt, artificial
  Chemically synthesized
uucuugaucucaucuauuuuggc

SEQ ID NO: 19513 - RNA, 23 nt, artificial
  Chemically synthesized
ucuugaucucaucuauuuuggcu

SEQ ID NO: 19514 - RNA, 23 nt, artificial
  Chemically synthesized
cuugaucucaucuauuuuggcuu

SEQ ID NO: 19515 - RNA, 23 nt, artificial
  Chemically synthesized
uugaucucaucuauuuuggcuuc

SEQ ID NO: 19516 - RNA, 23 nt, artificial
  Chemically synthesized
cuucuauugauucauagaguggg

SEQ ID NO: 19517 - RNA, 23 nt, artificial
  Chemically synthesized
uucuauugauucauagagugggg

SEQ ID NO: 19518 - RNA, 23 nt, artificial
  Chemically synthesized
ucuauugauucauagaguggggu

SEQ ID NO: 19519 - RNA, 23 nt, artificial
  Chemically synthesized
cuauugauucauagagugggguu

SEQ ID NO: 19520 - RNA, 23 nt, artificial
  Chemically synthesized
uauugauucauagagugggguua

SEQ ID NO: 19521 - RNA, 23 nt, artificial
  Chemically synthesized
ucugagucacuaguaauguccuu

SEQ ID NO: 19522 - RNA, 23 nt, artificial
  Chemically synthesized
cugagucacuaguaauguccuug

SEQ ID NO: 19523 - RNA, 23 nt, artificial
  Chemically synthesized
ugagucacuaguaauguccuuga

SEQ ID NO: 19524 - RNA, 23 nt, artificial
  Chemically synthesized
ugacuuagugucaugacuccagc

SEQ ID NO: 19525 - RNA, 23 nt, artificial
  Chemically synthesized
gacuuagugucaugacuccagca

SEQ ID NO: 19526 - RNA, 23 nt, artificial
  Chemically synthesized
acuuagugucaugacuccagcaa

SEQ ID NO: 19527 - RNA, 23 nt, artificial
  Chemically synthesized
cuuagugucaugacuccagcaau

SEQ ID NO: 19528 - RNA, 23 nt, artificial
  Chemically synthesized
uuagugucaugacuccagcaaua

SEQ ID NO: 19529 - RNA, 23 nt, artificial
  Chemically synthesized
uggcuucauugacaccauucuuu

SEQ ID NO: 19530 - RNA, 23 nt, artificial
  Chemically synthesized
ggcuucauugacaccauucuuuc

SEQ ID NO: 19531 - RNA, 23 nt, artificial
  Chemically synthesized
gcuucauugacaccauucuuucg

SEQ ID NO: 19532 - RNA, 23 nt, artificial
  Chemically synthesized
cuucauugacaccauucuuucga

SEQ ID NO: 19533 - RNA, 23 nt, artificial
  Chemically synthesized
uucauugacaccauucuuucgaa

SEQ ID NO: 19534 - RNA, 23 nt, artificial
  Chemically synthesized
agccuuuaacuugacuuaguguc

SEQ ID NO: 19535 - RNA, 23 nt, artificial
  Chemically synthesized
gccuuuaacuugacuuaguguca

SEQ ID NO: 19536 - RNA, 23 nt, artificial
  Chemically synthesized
ccuuuaacuugacuuagugucau

SEQ ID NO: 19537 - RNA, 23 nt, artificial
  Chemically synthesized
cuuuaacuugacuuagugucaug

SEQ ID NO: 19538 - RNA, 23 nt, artificial
  Chemically synthesized
uuuaacuugacuuagugucauga

SEQ ID NO: 19539 - RNA, 23 nt, artificial
  Chemically synthesized
gacauuuguacuaacauacacug

SEQ ID NO: 19540 - RNA, 23 nt, artificial
  Chemically synthesized
acauuuguacuaacauacacuga

SEQ ID NO: 19541 - RNA, 23 nt, artificial
  Chemically synthesized
cauuuguacuaacauacacugau

SEQ ID NO: 19542 - RNA, 23 nt, artificial
  Chemically synthesized
auuuguacuaacauacacugauu

SEQ ID NO: 19543 - RNA, 23 nt, artificial
  Chemically synthesized
uuuguacuaacauacacugauua

SEQ ID NO: 19544 - RNA, 23 nt, artificial
  Chemically synthesized
aucuuaaucuuucauccucugca

SEQ ID NO: 19545 - RNA, 23 nt, artificial
  Chemically synthesized
ucuuaaucuuucauccucugcau

SEQ ID NO: 19546 - RNA, 23 nt, artificial
  Chemically synthesized
cuuaaucuuucauccucugcaua

SEQ ID NO: 19547 - RNA, 23 nt, artificial
  Chemically synthesized
uuaaucuuucauccucugcauac

SEQ ID NO: 19548 - RNA, 23 nt, artificial
  Chemically synthesized
uaaucuuucauccucugcauaca

SEQ ID NO: 19549 - RNA, 23 nt, artificial
  Chemically synthesized
cuuugauugcaaacauggguuca

SEQ ID NO: 19550 - RNA, 23 nt, artificial
  Chemically synthesized
uuugauugcaaacauggguucau

SEQ ID NO: 19551 - RNA, 23 nt, artificial
  Chemically synthesized
acagucuuccucaauuccaaucc

SEQ ID NO: 19552 - RNA, 23 nt, artificial
  Chemically synthesized
cagucuuccucaauuccaauccc

SEQ ID NO: 19553 - RNA, 23 nt, artificial
  Chemically synthesized
agucuuccucaauuccaaucccu

SEQ ID NO: 19554 - RNA, 23 nt, artificial
  Chemically synthesized
gucuuccucaauuccaaucccuu

SEQ ID NO: 19555 - RNA, 23 nt, artificial
  Chemically synthesized
ucuuccucaauuccaaucccuug

SEQ ID NO: 19556 - RNA, 23 nt, artificial
  Chemically synthesized
uagauuuuaaacauccuuggagg

SEQ ID NO: 19557 - RNA, 23 nt, artificial
  Chemically synthesized
agauuuuaaacauccuuggaggc

SEQ ID NO: 19558 - RNA, 23 nt, artificial
  Chemically synthesized
gauuuuaaacauccuuggaggca

SEQ ID NO: 19559 - RNA, 23 nt, artificial
  Chemically synthesized
auuuuaaacauccuuggaggcag

SEQ ID NO: 19560 - RNA, 23 nt, artificial
  Chemically synthesized
uuuuaaacauccuuggaggcaga

SEQ ID NO: 19561 - RNA, 23 nt, artificial
  Chemically synthesized
uguuuuucacucuagaccaagcu

SEQ ID NO: 19562 - RNA, 23 nt, artificial
  Chemically synthesized
guuuuucacucuagaccaagcuu

SEQ ID NO: 19563 - RNA, 23 nt, artificial
  Chemically synthesized
uuuuucacucuagaccaagcuuu

SEQ ID NO: 19564 - RNA, 23 nt, artificial
  Chemically synthesized
auccuuccucuuugcacuuggug

SEQ ID NO: 19565 - RNA, 23 nt, artificial
  Chemically synthesized
uccuuccucuuugcacuuggugu

SEQ ID NO: 19566 - RNA, 23 nt, artificial
  Chemically synthesized
ccuuccucuuugcacuugguguu

SEQ ID NO: 19567 - RNA, 23 nt, artificial
  Chemically synthesized
cuuccucuuugcacuugguguug

SEQ ID NO: 19568 - RNA, 23 nt, artificial
  Chemically synthesized
uuccucuuugcacuugguguugc

SEQ ID NO: 19569 - RNA, 23 nt, artificial
  Chemically synthesized
agaauuucuaagggcagucuugc

SEQ ID NO: 19570 - RNA, 23 nt, artificial
  Chemically synthesized
gaauuucuaagggcagucuugcc

SEQ ID NO: 19571 - RNA, 23 nt, artificial
  Chemically synthesized
aauuucuaagggcagucuugccu

SEQ ID NO: 19572 - RNA, 23 nt, artificial
  Chemically synthesized
auuucuaagggcagucuugccuu

SEQ ID NO: 19573 - RNA, 23 nt, artificial
  Chemically synthesized
uuucuaagggcagucuugccuuu

SEQ ID NO: 19574 - RNA, 23 nt, artificial
  Chemically synthesized
gaugauagucugaauuuucucug

SEQ ID NO: 19575 - RNA, 23 nt, artificial
  Chemically synthesized
augauagucugaauuuucucugc

SEQ ID NO: 19576 - RNA, 23 nt, artificial
  Chemically synthesized
ugauagucugaauuuucucugca

SEQ ID NO: 19577 - RNA, 23 nt, artificial
  Chemically synthesized
gauagucugaauuuucucugcaa

SEQ ID NO: 19578 - RNA, 23 nt, artificial
  Chemically synthesized
auagucugaauuuucucugcaag

SEQ ID NO: 19579 - RNA, 23 nt, artificial
  Chemically synthesized
aucuuuaaucaaugugucauacg

SEQ ID NO: 19580 - RNA, 23 nt, artificial
  Chemically synthesized
ucuuuaaucaaugugucauacgc

SEQ ID NO: 19581 - RNA, 23 nt, artificial
  Chemically synthesized
cuuuaaucaaugugucauacgcu

SEQ ID NO: 19582 - RNA, 23 nt, artificial
  Chemically synthesized
uuuaaucaaugugucauacgcuu

SEQ ID NO: 19583 - RNA, 23 nt, artificial
  Chemically synthesized
uuaaucaaugugucauacgcuuc

SEQ ID NO: 19584 - RNA, 23 nt, artificial
  Chemically synthesized
aaaaucuacaaauauguuggcuc

SEQ ID NO: 19585 - RNA, 23 nt, artificial
  Chemically synthesized
aaaucuacaaauauguuggcucu

SEQ ID NO: 19586 - RNA, 23 nt, artificial
  Chemically synthesized
aaucuacaaauauguuggcucuu

SEQ ID NO: 19587 - RNA, 23 nt, artificial
  Chemically synthesized
aucuacaaauauguuggcucuuc

SEQ ID NO: 19588 - RNA, 23 nt, artificial
  Chemically synthesized
ucuacaaauauguuggcucuuca

SEQ ID NO: 19589 - RNA, 23 nt, artificial
  Chemically synthesized
cuccuauuuggguacuuagcaug

SEQ ID NO: 19590 - RNA, 23 nt, artificial
  Chemically synthesized
uccuauuuggguacuuagcaugc

SEQ ID NO: 19591 - RNA, 23 nt, artificial
  Chemically synthesized
ccuauuuggguacuuagcaugcc

SEQ ID NO: 19592 - RNA, 23 nt, artificial
  Chemically synthesized
cuauuuggguacuuagcaugcca

SEQ ID NO: 19593 - RNA, 23 nt, artificial
  Chemically synthesized
uauuuggguacuuagcaugccac

SEQ ID NO: 19594 - RNA, 23 nt, artificial
  Chemically synthesized
gcaguugaacuuucuguucugcu

SEQ ID NO: 19595 - RNA, 23 nt, artificial
  Chemically synthesized
caguugaacuuucuguucugcug

SEQ ID NO: 19596 - RNA, 23 nt, artificial
  Chemically synthesized
aguugaacuuucuguucugcugu

SEQ ID NO: 19597 - RNA, 23 nt, artificial
  Chemically synthesized
guugaacuuucuguucugcugug

SEQ ID NO: 19598 - RNA, 23 nt, artificial
  Chemically synthesized
uugaacuuucuguucugcugugu

SEQ ID NO: 19599 - RNA, 23 nt, artificial
  Chemically synthesized
uuuucacucuagaccaagcuuug

SEQ ID NO: 19600 - RNA, 23 nt, artificial
  Chemically synthesized
accauugcuauguauaagcugcc

SEQ ID NO: 19601 - RNA, 23 nt, artificial
  Chemically synthesized
ccauugcuauguauaagcugcca

SEQ ID NO: 19602 - RNA, 23 nt, artificial
  Chemically synthesized
cauugcuauguauaagcugccau

SEQ ID NO: 19603 - RNA, 23 nt, artificial
  Chemically synthesized
auugcuauguauaagcugccauu

SEQ ID NO: 19604 - RNA, 23 nt, artificial
  Chemically synthesized
uugcuauguauaagcugccauuu

SEQ ID NO: 19605 - RNA, 23 nt, artificial
  Chemically synthesized
aaucuuaaucuuucauccucugc

SEQ ID NO: 19606 - RNA, 23 nt, artificial
  Chemically synthesized
cucguaaaccgcuucccucacuc

SEQ ID NO: 19607 - RNA, 23 nt, artificial
  Chemically synthesized
ucguaaaccgcuucccucacucc

SEQ ID NO: 19608 - RNA, 23 nt, artificial
  Chemically synthesized
cguaaaccgcuucccucacuccc

SEQ ID NO: 19609 - RNA, 23 nt, artificial
  Chemically synthesized
guaaaccgcuucccucacucccc

SEQ ID NO: 19610 - RNA, 23 nt, artificial
  Chemically synthesized
uaaaccgcuucccucacucccca

SEQ ID NO: 19611 - RNA, 23 nt, artificial
  Chemically synthesized
gauauuuaaacguaggauaguag

SEQ ID NO: 19612 - RNA, 23 nt, artificial
  Chemically synthesized
auauuuaaacguaggauaguagu

SEQ ID NO: 19613 - RNA, 23 nt, artificial
  Chemically synthesized
uauuuaaacguaggauaguagua

SEQ ID NO: 19614 - RNA, 23 nt, artificial
  Chemically synthesized
auuuaaacguaggauaguaguaa

SEQ ID NO: 19615 - RNA, 23 nt, artificial
  Chemically synthesized
uuuaaacguaggauaguaguaag

SEQ ID NO: 19616 - RNA, 23 nt, artificial
  Chemically synthesized
gggguaugacaagagcaauuccu

SEQ ID NO: 19617 - RNA, 23 nt, artificial
  Chemically synthesized
ggguaugacaagagcaauuccua

SEQ ID NO: 19618 - RNA, 23 nt, artificial
  Chemically synthesized
gguaugacaagagcaauuccuaa

SEQ ID NO: 19619 - RNA, 23 nt, artificial
  Chemically synthesized
guaugacaagagcaauuccuaaa

SEQ ID NO: 19620 - RNA, 23 nt, artificial
  Chemically synthesized
uaugacaagagcaauuccuaaau

SEQ ID NO: 19621 - RNA, 23 nt, artificial
  Chemically synthesized
gagguaauuuagaggcaaagugg

SEQ ID NO: 19622 - RNA, 23 nt, artificial
  Chemically synthesized
agguaauuuagaggcaaaguggc

SEQ ID NO: 19623 - RNA, 23 nt, artificial
  Chemically synthesized
gguaauuuagaggcaaaguggcc

SEQ ID NO: 19624 - RNA, 23 nt, artificial
  Chemically synthesized
guaauuuagaggcaaaguggccu

SEQ ID NO: 19625 - RNA, 23 nt, artificial
  Chemically synthesized
uaauuuagaggcaaaguggccug

SEQ ID NO: 19626 - RNA, 23 nt, artificial
  Chemically synthesized
ucuuucauccucugcauacacuc

SEQ ID NO: 19627 - RNA, 23 nt, artificial
  Chemically synthesized
cuuucauccucugcauacacucc

SEQ ID NO: 19628 - RNA, 23 nt, artificial
  Chemically synthesized
uuucauccucugcauacacuccu

SEQ ID NO: 19629 - RNA, 23 nt, artificial
  Chemically synthesized
uucauccucugcauacacuccua

SEQ ID NO: 19630 - RNA, 23 nt, artificial
  Chemically synthesized
ucauccucugcauacacuccuau

SEQ ID NO: 19631 - RNA, 23 nt, artificial
  Chemically synthesized
uuucuuuccaugaaguugaugcc

SEQ ID NO: 19632 - RNA, 23 nt, artificial
  Chemically synthesized
uucuuuccaugaaguugaugcca

SEQ ID NO: 19633 - RNA, 23 nt, artificial
  Chemically synthesized
ucuuuccaugaaguugaugccaa

SEQ ID NO: 19634 - RNA, 23 nt, artificial
  Chemically synthesized
cuuuccaugaaguugaugccaau

SEQ ID NO: 19635 - RNA, 23 nt, artificial
  Chemically synthesized
uuuccaugaaguugaugccaauu

SEQ ID NO: 19636 - RNA, 23 nt, artificial
  Chemically synthesized
acaaauauguuggcucuucagcg

SEQ ID NO: 19637 - RNA, 23 nt, artificial
  Chemically synthesized
caaauauguuggcucuucagcgc

SEQ ID NO: 19638 - RNA, 23 nt, artificial
  Chemically synthesized
aaauauguuggcucuucagcgcu

SEQ ID NO: 19639 - RNA, 23 nt, artificial
  Chemically synthesized
aauauguuggcucuucagcgcua

SEQ ID NO: 19640 - RNA, 23 nt, artificial
  Chemically synthesized
auauguuggcucuucagcgcuaa

SEQ ID NO: 19641 - RNA, 23 nt, artificial
  Chemically synthesized
auaauaugacaccaauaaacugu

SEQ ID NO: 19642 - RNA, 23 nt, artificial
  Chemically synthesized
uaauaugacaccaauaaacugug

SEQ ID NO: 19643 - RNA, 23 nt, artificial
  Chemically synthesized
aauaugacaccaauaaacugugc

SEQ ID NO: 19644 - RNA, 23 nt, artificial
  Chemically synthesized
auaugacaccaauaaacugugca

SEQ ID NO: 19645 - RNA, 23 nt, artificial
  Chemically synthesized
uaugacaccaauaaacugugcaa

SEQ ID NO: 19646 - RNA, 23 nt, artificial
  Chemically synthesized
ggccaucaugaugcaggccuucc

SEQ ID NO: 19647 - RNA, 23 nt, artificial
  Chemically synthesized
gccaucaugaugcaggccuucca

SEQ ID NO: 19648 - RNA, 23 nt, artificial
  Chemically synthesized
ccaucaugaugcaggccuuccaa

SEQ ID NO: 19649 - RNA, 23 nt, artificial
  Chemically synthesized
caucaugaugcaggccuuccaag

SEQ ID NO: 19650 - RNA, 23 nt, artificial
  Chemically synthesized
aucaugaugcaggccuuccaagu

SEQ ID NO: 19651 - RNA, 23 nt, artificial
  Chemically synthesized
cuaauugcauauacucagaacug

SEQ ID NO: 19652 - RNA, 23 nt, artificial
  Chemically synthesized
uaauugcauauacucagaacuga

SEQ ID NO: 19653 - RNA, 23 nt, artificial
  Chemically synthesized
aauugcauauacucagaacugaa

SEQ ID NO: 19654 - RNA, 23 nt, artificial
  Chemically synthesized
auugcauauacucagaacugaau

SEQ ID NO: 19655 - RNA, 23 nt, artificial
  Chemically synthesized
uugcauauacucagaacugaauu

SEQ ID NO: 19656 - RNA, 23 nt, artificial
  Chemically synthesized
aaucuuucauccucugcauacac

SEQ ID NO: 19657 - RNA, 23 nt, artificial
  Chemically synthesized
aucuuucauccucugcauacacu

SEQ ID NO: 19658 - RNA, 23 nt, artificial
  Chemically synthesized
gaaguugaugccaauuacgaagc

SEQ ID NO: 19659 - RNA, 23 nt, artificial
  Chemically synthesized
aaguugaugccaauuacgaagca

SEQ ID NO: 19660 - RNA, 23 nt, artificial
  Chemically synthesized
aguugaugccaauuacgaagcag

SEQ ID NO: 19661 - RNA, 23 nt, artificial
  Chemically synthesized
guugaugccaauuacgaagcagu

SEQ ID NO: 19662 - RNA, 23 nt, artificial
  Chemically synthesized
uugaugccaauuacgaagcaguu

SEQ ID NO: 19663 - RNA, 23 nt, artificial
  Chemically synthesized
auauuucagcaaaaggucauagc

SEQ ID NO: 19664 - RNA, 23 nt, artificial
  Chemically synthesized
uauuucagcaaaaggucauagcu

SEQ ID NO: 19665 - RNA, 23 nt, artificial
  Chemically synthesized
auuucagcaaaaggucauagcuu

SEQ ID NO: 19666 - RNA, 23 nt, artificial
  Chemically synthesized
uuucagcaaaaggucauagcuuc

SEQ ID NO: 19667 - RNA, 23 nt, artificial
  Chemically synthesized
uucagcaaaaggucauagcuucu

SEQ ID NO: 19668 - RNA, 23 nt, artificial
  Chemically synthesized
uuucacucuagaccaagcuuugg

SEQ ID NO: 19669 - RNA, 23 nt, artificial
  Chemically synthesized
ucucugcaagaguacaaagauug

SEQ ID NO: 19670 - RNA, 23 nt, artificial
  Chemically synthesized
cucugcaagaguacaaagauugg

SEQ ID NO: 19671 - RNA, 23 nt, artificial
  Chemically synthesized
ucugcaagaguacaaagauuggc

SEQ ID NO: 19672 - RNA, 23 nt, artificial
  Chemically synthesized
cugcaagaguacaaagauuggcu

SEQ ID NO: 19673 - RNA, 23 nt, artificial
  Chemically synthesized
ugcaagaguacaaagauuggcuu

SEQ ID NO: 19674 - RNA, 23 nt, artificial
  Chemically synthesized
caccauucuuucgaacaaagccu

SEQ ID NO: 19675 - RNA, 23 nt, artificial
  Chemically synthesized
accauucuuucgaacaaagccuu

SEQ ID NO: 19676 - RNA, 23 nt, artificial
  Chemically synthesized
ccauucuuucgaacaaagccuuu

SEQ ID NO: 19677 - RNA, 23 nt, artificial
  Chemically synthesized
cauucuuucgaacaaagccuuua

SEQ ID NO: 19678 - RNA, 23 nt, artificial
  Chemically synthesized
auucuuucgaacaaagccuuuaa

SEQ ID NO: 19679 - RNA, 23 nt, artificial
  Chemically synthesized
cuacuuucucugagagcaguuag

SEQ ID NO: 19680 - RNA, 23 nt, artificial
  Chemically synthesized
uacuuucucugagagcaguuagu

SEQ ID NO: 19681 - RNA, 23 nt, artificial
  Chemically synthesized
acuuucucugagagcaguuagua

SEQ ID NO: 19682 - RNA, 23 nt, artificial
  Chemically synthesized
cuuucucugagagcaguuaguau

SEQ ID NO: 19683 - RNA, 23 nt, artificial
  Chemically synthesized
uuucucugagagcaguuaguauc

SEQ ID NO: 19684 - RNA, 23 nt, artificial
  Chemically synthesized
caagucacucguaaaccgcuucc

SEQ ID NO: 19685 - RNA, 23 nt, artificial
  Chemically synthesized
aagucacucguaaaccgcuuccc

SEQ ID NO: 19686 - RNA, 23 nt, artificial
  Chemically synthesized
agucacucguaaaccgcuucccu

SEQ ID NO: 19687 - RNA, 23 nt, artificial
  Chemically synthesized
gucacucguaaaccgcuucccuc

SEQ ID NO: 19688 - RNA, 23 nt, artificial
  Chemically synthesized
ucacucguaaaccgcuucccuca

SEQ ID NO: 19689 - RNA, 23 nt, artificial
  Chemically synthesized
aauuuagaggcaaaguggccugc

SEQ ID NO: 19690 - RNA, 23 nt, artificial
  Chemically synthesized
auuuagaggcaaaguggccugcc

SEQ ID NO: 19691 - RNA, 23 nt, artificial
  Chemically synthesized
uuuagaggcaaaguggccugccu

SEQ ID NO: 19692 - RNA, 23 nt, artificial
  Chemically synthesized
ucauugacaccauucuuucgaac

SEQ ID NO: 19693 - RNA, 23 nt, artificial
  Chemically synthesized
cauccucugcauacacuccuauu

SEQ ID NO: 19694 - RNA, 23 nt, artificial
  Chemically synthesized
auccucugcauacacuccuauuu

SEQ ID NO: 19695 - RNA, 23 nt, artificial
  Chemically synthesized
cuuucuuuccaugaaguugaugc

SEQ ID NO: 19696 - RNA, 23 nt, artificial
  Chemically synthesized
gaacuuucuguucugcugugucu

SEQ ID NO: 19697 - RNA, 23 nt, artificial
  Chemically synthesized
aacuuucuguucugcugugucuu

SEQ ID NO: 19698 - RNA, 23 nt, artificial
  Chemically synthesized
acuuucuguucugcugugucuug

SEQ ID NO: 19699 - RNA, 23 nt, artificial
  Chemically synthesized
cuuucuguucugcugugucuugg

SEQ ID NO: 19700 - RNA, 23 nt, artificial
  Chemically synthesized
uuucuguucugcugugucuugga

SEQ ID NO: 19701 - RNA, 23 nt, artificial
  Chemically synthesized
aguaauguccuugaggaugauag

SEQ ID NO: 19702 - RNA, 23 nt, artificial
  Chemically synthesized
guaauguccuugaggaugauagu

SEQ ID NO: 19703 - RNA, 23 nt, artificial
  Chemically synthesized
uaauguccuugaggaugauaguc

SEQ ID NO: 19704 - RNA, 23 nt, artificial
  Chemically synthesized
aauguccuugaggaugauagucu

SEQ ID NO: 19705 - RNA, 23 nt, artificial
  Chemically synthesized
auguccuugaggaugauagucug

SEQ ID NO: 19706 - RNA, 23 nt, artificial
  Chemically synthesized
uugauugcaaacauggguucaug

SEQ ID NO: 19707 - RNA, 23 nt, artificial
  Chemically synthesized
uaccauugcuauguauaagcugc

SEQ ID NO: 19708 - RNA, 23 nt, artificial
  Chemically synthesized
auuaucagagguaauuuagaggc

SEQ ID NO: 19709 - RNA, 23 nt, artificial
  Chemically synthesized
uuaucagagguaauuuagaggca

SEQ ID NO: 19710 - RNA, 23 nt, artificial
  Chemically synthesized
uaucagagguaauuuagaggcaa

SEQ ID NO: 19711 - RNA, 23 nt, artificial
  Chemically synthesized
aucagagguaauuuagaggcaaa

SEQ ID NO: 19712 - RNA, 23 nt, artificial
  Chemically synthesized
ucagagguaauuuagaggcaaag

SEQ ID NO: 19713 - RNA, 23 nt, artificial
  Chemically synthesized
auuuggguacuuagcaugccacu

SEQ ID NO: 19714 - RNA, 23 nt, artificial
  Chemically synthesized
uuacaugggacauuauugaacau

SEQ ID NO: 19715 - RNA, 23 nt, artificial
  Chemically synthesized
uucuguucugcugugucuuggac

SEQ ID NO: 19716 - RNA, 23 nt, artificial
  Chemically synthesized
cauugacaccauucuuucgaaca

SEQ ID NO: 19717 - RNA, 23 nt, artificial
  Chemically synthesized
auugacaccauucuuucgaacaa

SEQ ID NO: 19718 - RNA, 23 nt, artificial
  Chemically synthesized
cuaaauccagaugaugauuuuac

SEQ ID NO: 19719 - RNA, 23 nt, artificial
  Chemically synthesized
uaaauccagaugaugauuuuacc

SEQ ID NO: 19720 - RNA, 23 nt, artificial
  Chemically synthesized
aaauccagaugaugauuuuacca

SEQ ID NO: 19721 - RNA, 23 nt, artificial
  Chemically synthesized
aauccagaugaugauuuuaccau

SEQ ID NO: 19722 - RNA, 23 nt, artificial
  Chemically synthesized
auccagaugaugauuuuaccauu

SEQ ID NO: 19723 - RNA, 23 nt, artificial
  Chemically synthesized
ugggcauuaacacuuuuggacga

SEQ ID NO: 19724 - RNA, 23 nt, artificial
  Chemically synthesized
uggcucuucagcgcuaauaaaug

SEQ ID NO: 19725 - RNA, 23 nt, artificial
  Chemically synthesized
ggcucuucagcgcuaauaaauga

SEQ ID NO: 19726 - RNA, 23 nt, artificial
  Chemically synthesized
gcucuucagcgcuaauaaaugau

SEQ ID NO: 19727 - RNA, 23 nt, artificial
  Chemically synthesized
cucuucagcgcuaauaaaugaua

SEQ ID NO: 19728 - RNA, 23 nt, artificial
  Chemically synthesized
ucuucagcgcuaauaaaugauaa

SEQ ID NO: 19729 - RNA, 23 nt, artificial
  Chemically synthesized
gauauuucagcaaaaggucauag

SEQ ID NO: 19730 - RNA, 23 nt, artificial
  Chemically synthesized
gaauuuguuguuuuucacucuag

SEQ ID NO: 19731 - RNA, 23 nt, artificial
  Chemically synthesized
aauuuguuguuuuucacucuaga

SEQ ID NO: 19732 - RNA, 23 nt, artificial
  Chemically synthesized
auuuguuguuuuucacucuagac

SEQ ID NO: 19733 - RNA, 23 nt, artificial
  Chemically synthesized
gcacuugguguugcuggugagug

SEQ ID NO: 19734 - RNA, 23 nt, artificial
  Chemically synthesized
cacuugguguugcuggugagugu

SEQ ID NO: 19735 - RNA, 23 nt, artificial
  Chemically synthesized
acuugguguugcuggugagugug

SEQ ID NO: 19736 - RNA, 23 nt, artificial
  Chemically synthesized
cuugguguugcuggugagugugc

SEQ ID NO: 19737 - RNA, 23 nt, artificial
  Chemically synthesized
uugguguugcuggugagugugca

SEQ ID NO: 19738 - RNA, 23 nt, artificial
  Chemically synthesized
auaaauggaaguucuuuaggugg

SEQ ID NO: 19739 - RNA, 23 nt, artificial
  Chemically synthesized
uaaauggaaguucuuuagguggu

SEQ ID NO: 19740 - RNA, 23 nt, artificial
  Chemically synthesized
aaauggaaguucuuuaggugguu

SEQ ID NO: 19741 - RNA, 23 nt, artificial
  Chemically synthesized
aauggaaguucuuuaggugguuc

SEQ ID NO: 19742 - RNA, 23 nt, artificial
  Chemically synthesized
auggaaguucuuuaggugguucc

SEQ ID NO: 19743 - RNA, 23 nt, artificial
  Chemically synthesized
aaguuuguuuucccaacuagauu

SEQ ID NO: 19744 - RNA, 23 nt, artificial
  Chemically synthesized
aguuuguuuucccaacuagauuu

SEQ ID NO: 19745 - RNA, 23 nt, artificial
  Chemically synthesized
guuuguuuucccaacuagauuuu

SEQ ID NO: 19746 - RNA, 23 nt, artificial
  Chemically synthesized
uuuguuuucccaacuagauuuua

SEQ ID NO: 19747 - RNA, 23 nt, artificial
  Chemically synthesized
uuguuuucccaacuagauuuuaa

SEQ ID NO: 19748 - RNA, 23 nt, artificial
  Chemically synthesized
ccucuuugcacuugguguugcug

SEQ ID NO: 19749 - RNA, 23 nt, artificial
  Chemically synthesized
ugugucauacgcuucuuucuuuc

SEQ ID NO: 19750 - RNA, 23 nt, artificial
  Chemically synthesized
gugucauacgcuucuuucuuucc

SEQ ID NO: 19751 - RNA, 23 nt, artificial
  Chemically synthesized
ugucauacgcuucuuucuuucca

SEQ ID NO: 19752 - RNA, 23 nt, artificial
  Chemically synthesized
gucauacgcuucuuucuuuccau

SEQ ID NO: 19753 - RNA, 23 nt, artificial
  Chemically synthesized
ucauacgcuucuuucuuuccaug

SEQ ID NO: 19754 - RNA, 23 nt, artificial
  Chemically synthesized
gcuccauugauucagcaacuugg

SEQ ID NO: 19755 - RNA, 23 nt, artificial
  Chemically synthesized
cuccauugauucagcaacuuggc

SEQ ID NO: 19756 - RNA, 23 nt, artificial
  Chemically synthesized
uccauugauucagcaacuuggcc

SEQ ID NO: 19757 - RNA, 23 nt, artificial
  Chemically synthesized
ccauugauucagcaacuuggccu

SEQ ID NO: 19758 - RNA, 23 nt, artificial
  Chemically synthesized
cauugauucagcaacuuggccug

SEQ ID NO: 19759 - RNA, 23 nt, artificial
  Chemically synthesized
auugauucagcaacuuggccugc

SEQ ID NO: 19760 - RNA, 23 nt, artificial
  Chemically synthesized
uugauucagcaacuuggccugcg

SEQ ID NO: 19761 - RNA, 23 nt, artificial
  Chemically synthesized
ugauucagcaacuuggccugcgc

SEQ ID NO: 19762 - RNA, 23 nt, artificial
  Chemically synthesized
aaacacuaauugcauauacucag

SEQ ID NO: 19763 - RNA, 23 nt, artificial
  Chemically synthesized
aacacuaauugcauauacucaga

SEQ ID NO: 19764 - RNA, 23 nt, artificial
  Chemically synthesized
acacuaauugcauauacucagaa

SEQ ID NO: 19765 - RNA, 23 nt, artificial
  Chemically synthesized
cacuaauugcauauacucagaac

SEQ ID NO: 19766 - RNA, 23 nt, artificial
  Chemically synthesized
acuaauugcauauacucagaacu

SEQ ID NO: 19767 - RNA, 23 nt, artificial
  Chemically synthesized
caaguucugagucucaacuguag

SEQ ID NO: 19768 - RNA, 23 nt, artificial
  Chemically synthesized
aaguucugagucucaacuguagu

SEQ ID NO: 19769 - RNA, 23 nt, artificial
  Chemically synthesized
aguucugagucucaacuguagua

SEQ ID NO: 19770 - RNA, 23 nt, artificial
  Chemically synthesized
guucugagucucaacuguaguaa

SEQ ID NO: 19771 - RNA, 23 nt, artificial
  Chemically synthesized
uucugagucucaacuguaguaac

SEQ ID NO: 19772 - RNA, 23 nt, artificial
  Chemically synthesized
ucuauuuuggcuucauugacacc

SEQ ID NO: 19773 - RNA, 23 nt, artificial
  Chemically synthesized
agguaucugcuucaguuuauaac

SEQ ID NO: 19774 - RNA, 23 nt, artificial
  Chemically synthesized
gguaucugcuucaguuuauaacu

SEQ ID NO: 19775 - RNA, 23 nt, artificial
  Chemically synthesized
guaucugcuucaguuuauaacua

SEQ ID NO: 19776 - RNA, 23 nt, artificial
  Chemically synthesized
uaucugcuucaguuuauaacuau

SEQ ID NO: 19777 - RNA, 23 nt, artificial
  Chemically synthesized
aucugcuucaguuuauaacuauc

SEQ ID NO: 19778 - RNA, 23 nt, artificial
  Chemically synthesized
aaucauauguuagaugccagagc

SEQ ID NO: 19779 - RNA, 23 nt, artificial
  Chemically synthesized
aucauauguuagaugccagagca

SEQ ID NO: 19780 - RNA, 23 nt, artificial
  Chemically synthesized
ucauauguuagaugccagagcau

SEQ ID NO: 19781 - RNA, 23 nt, artificial
  Chemically synthesized
cauauguuagaugccagagcaua

SEQ ID NO: 19782 - RNA, 23 nt, artificial
  Chemically synthesized
auauguuagaugccagagcauaa

SEQ ID NO: 19783 - RNA, 23 nt, artificial
  Chemically synthesized
cacucguaaaccgcuucccucac

SEQ ID NO: 19784 - RNA, 23 nt, artificial
  Chemically synthesized
acucguaaaccgcuucccucacu

SEQ ID NO: 19785 - RNA, 23 nt, artificial
  Chemically synthesized
uggguucaugacaugucacaaag

SEQ ID NO: 19786 - RNA, 23 nt, artificial
  Chemically synthesized
ggguucaugacaugucacaaagc

SEQ ID NO: 19787 - RNA, 23 nt, artificial
  Chemically synthesized
gguucaugacaugucacaaagcu

SEQ ID NO: 19788 - RNA, 23 nt, artificial
  Chemically synthesized
guucaugacaugucacaaagcua

SEQ ID NO: 19789 - RNA, 23 nt, artificial
  Chemically synthesized
uucaugacaugucacaaagcuac

SEQ ID NO: 19790 - RNA, 23 nt, artificial
  Chemically synthesized
uaguaucuccaaaccaggcuaga

SEQ ID NO: 19791 - RNA, 23 nt, artificial
  Chemically synthesized
aauuaucagagguaauuuagagg

SEQ ID NO: 19792 - RNA, 23 nt, artificial
  Chemically synthesized
augcuuuugaugccugagaaaga

SEQ ID NO: 19793 - RNA, 23 nt, artificial
  Chemically synthesized
ugcuuuugaugccugagaaagaa

SEQ ID NO: 19794 - RNA, 23 nt, artificial
  Chemically synthesized
gcuuuugaugccugagaaagaag

SEQ ID NO: 19795 - RNA, 23 nt, artificial
  Chemically synthesized
cuuuugaugccugagaaagaagu

SEQ ID NO: 19796 - RNA, 23 nt, artificial
  Chemically synthesized
uuuugaugccugagaaagaagua

SEQ ID NO: 19797 - RNA, 23 nt, artificial
  Chemically synthesized
ccaauuacgaagcaguugaacuu

SEQ ID NO: 19798 - RNA, 23 nt, artificial
  Chemically synthesized
caauuacgaagcaguugaacuuu

SEQ ID NO: 19799 - RNA, 23 nt, artificial
  Chemically synthesized
aauuacgaagcaguugaacuuuc

SEQ ID NO: 19800 - RNA, 23 nt, artificial
  Chemically synthesized
auuacgaagcaguugaacuuucu

SEQ ID NO: 19801 - RNA, 23 nt, artificial
  Chemically synthesized
uuacgaagcaguugaacuuucug

SEQ ID NO: 19802 - RNA, 23 nt, artificial
  Chemically synthesized
gucauagcuucuucuauugauuc

SEQ ID NO: 19803 - RNA, 23 nt, artificial
  Chemically synthesized
ucauagcuucuucuauugauuca

SEQ ID NO: 19804 - RNA, 23 nt, artificial
  Chemically synthesized
cauagcuucuucuauugauucau

SEQ ID NO: 19805 - RNA, 23 nt, artificial
  Chemically synthesized
auagcuucuucuauugauucaua

SEQ ID NO: 19806 - RNA, 23 nt, artificial
  Chemically synthesized
uagcuucuucuauugauucauag

SEQ ID NO: 19807 - RNA, 23 nt, artificial
  Chemically synthesized
augguuguugagcaauccuccga

SEQ ID NO: 19808 - RNA, 23 nt, artificial
  Chemically synthesized
ugguuguugagcaauccuccgaa

SEQ ID NO: 19809 - RNA, 23 nt, artificial
  Chemically synthesized
gguuguugagcaauccuccgaag

SEQ ID NO: 19810 - RNA, 23 nt, artificial
  Chemically synthesized
guuguugagcaauccuccgaagu

SEQ ID NO: 19811 - RNA, 23 nt, artificial
  Chemically synthesized
uuguugagcaauccuccgaagug

SEQ ID NO: 19812 - RNA, 23 nt, artificial
  Chemically synthesized
cuuccucaauuccaaucccuugg

SEQ ID NO: 19813 - RNA, 23 nt, artificial
  Chemically synthesized
uuccucaauuccaaucccuugga

SEQ ID NO: 19814 - RNA, 23 nt, artificial
  Chemically synthesized
ucugcuucaguuuauaacuaucu

SEQ ID NO: 19815 - RNA, 23 nt, artificial
  Chemically synthesized
uucucugagagcaguuaguaucu

SEQ ID NO: 19816 - RNA, 23 nt, artificial
  Chemically synthesized
ucucugagagcaguuaguaucuc

SEQ ID NO: 19817 - RNA, 23 nt, artificial
  Chemically synthesized
cucugagagcaguuaguaucucc

SEQ ID NO: 19818 - RNA, 23 nt, artificial
  Chemically synthesized
ucugagagcaguuaguaucucca

SEQ ID NO: 19819 - RNA, 23 nt, artificial
  Chemically synthesized
acucuugaugaaguuuguuuucc

SEQ ID NO: 19820 - RNA, 23 nt, artificial
  Chemically synthesized
cucuugaugaaguuuguuuuccc

SEQ ID NO: 19821 - RNA, 23 nt, artificial
  Chemically synthesized
ucuugaugaaguuuguuuuccca

SEQ ID NO: 19822 - RNA, 23 nt, artificial
  Chemically synthesized
cuugaugaaguuuguuuucccaa

SEQ ID NO: 19823 - RNA, 23 nt, artificial
  Chemically synthesized
uugaugaaguuuguuuucccaac

SEQ ID NO: 19824 - RNA, 23 nt, artificial
  Chemically synthesized
gugcauuccuugaugauuccaug

SEQ ID NO: 19825 - RNA, 23 nt, artificial
  Chemically synthesized
ugcauuccuugaugauuccaugu

SEQ ID NO: 19826 - RNA, 23 nt, artificial
  Chemically synthesized
gcauuccuugaugauuccauguu

SEQ ID NO: 19827 - RNA, 23 nt, artificial
  Chemically synthesized
cauuccuugaugauuccauguuc

SEQ ID NO: 19828 - RNA, 23 nt, artificial
  Chemically synthesized
auuccuugaugauuccauguuca

SEQ ID NO: 19829 - RNA, 23 nt, artificial
  Chemically synthesized
cauuuguagcagguuuuacaugg

SEQ ID NO: 19830 - RNA, 23 nt, artificial
  Chemically synthesized
auuuguagcagguuuuacauggg

SEQ ID NO: 19831 - RNA, 23 nt, artificial
  Chemically synthesized
uuuguagcagguuuuacauggga

SEQ ID NO: 19832 - RNA, 23 nt, artificial
  Chemically synthesized
uuguagcagguuuuacaugggac

SEQ ID NO: 19833 - RNA, 23 nt, artificial
  Chemically synthesized
uguagcagguuuuacaugggaca

SEQ ID NO: 19834 - RNA, 23 nt, artificial
  Chemically synthesized
caauuccuaaauccagaugauga

SEQ ID NO: 19835 - RNA, 23 nt, artificial
  Chemically synthesized
aauuccuaaauccagaugaugau

SEQ ID NO: 19836 - RNA, 23 nt, artificial
  Chemically synthesized
auuccuaaauccagaugaugauu

SEQ ID NO: 19837 - RNA, 23 nt, artificial
  Chemically synthesized
uuccuaaauccagaugaugauuu

SEQ ID NO: 19838 - RNA, 23 nt, artificial
  Chemically synthesized
uccuaaauccagaugaugauuuu

SEQ ID NO: 19839 - RNA, 23 nt, artificial
  Chemically synthesized
guacuuagcaugccacugcauuu

SEQ ID NO: 19840 - RNA, 23 nt, artificial
  Chemically synthesized
uacuuagcaugccacugcauuua

SEQ ID NO: 19841 - RNA, 23 nt, artificial
  Chemically synthesized
acuuagcaugccacugcauuuac

SEQ ID NO: 19842 - RNA, 23 nt, artificial
  Chemically synthesized
cuuagcaugccacugcauuuacu

SEQ ID NO: 19843 - RNA, 23 nt, artificial
  Chemically synthesized
uuagcaugccacugcauuuacuc

SEQ ID NO: 19844 - RNA, 23 nt, artificial
  Chemically synthesized
uauguuggcucuucagcgcuaau

SEQ ID NO: 19845 - RNA, 23 nt, artificial
  Chemically synthesized
guucugcugugucuuggacauug

SEQ ID NO: 19846 - RNA, 23 nt, artificial
  Chemically synthesized
uucugcugugucuuggacauugu

SEQ ID NO: 19847 - RNA, 23 nt, artificial
  Chemically synthesized
ucugcugugucuuggacauuguc

SEQ ID NO: 19848 - RNA, 23 nt, artificial
  Chemically synthesized
cugcugugucuuggacauuguca

SEQ ID NO: 19849 - RNA, 23 nt, artificial
  Chemically synthesized
ugcugugucuuggacauugucau

SEQ ID NO: 19850 - RNA, 23 nt, artificial
  Chemically synthesized
uuccuugaugauuccauguucac

SEQ ID NO: 19851 - RNA, 23 nt, artificial
  Chemically synthesized
gucuuugagguagagccuuauuu

SEQ ID NO: 19852 - RNA, 23 nt, artificial
  Chemically synthesized
ucuuugagguagagccuuauuua

SEQ ID NO: 19853 - RNA, 23 nt, artificial
  Chemically synthesized
cuuugagguagagccuuauuuaa

SEQ ID NO: 19854 - RNA, 23 nt, artificial
  Chemically synthesized
uuugagguagagccuuauuuaaa

SEQ ID NO: 19855 - RNA, 23 nt, artificial
  Chemically synthesized
uugagguagagccuuauuuaaau

SEQ ID NO: 19856 - RNA, 23 nt, artificial
  Chemically synthesized
uccauaaauggaaguucuuuagg

SEQ ID NO: 19857 - RNA, 23 nt, artificial
  Chemically synthesized
ccauaaauggaaguucuuuaggu

SEQ ID NO: 19858 - RNA, 23 nt, artificial
  Chemically synthesized
cauaaauggaaguucuuuaggug

SEQ ID NO: 19859 - RNA, 23 nt, artificial
  Chemically synthesized
aaguagguaguuuugagccagua

SEQ ID NO: 19860 - RNA, 23 nt, artificial
  Chemically synthesized
uagaauuucuaagggcagucuug

SEQ ID NO: 19861 - RNA, 23 nt, artificial
  Chemically synthesized
accaauaaacugugcaaaggucu

SEQ ID NO: 19862 - RNA, 23 nt, artificial
  Chemically synthesized
ccaauaaacugugcaaaggucuu

SEQ ID NO: 19863 - RNA, 23 nt, artificial
  Chemically synthesized
caauaaacugugcaaaggucuuu

SEQ ID NO: 19864 - RNA, 23 nt, artificial
  Chemically synthesized
aauaaacugugcaaaggucuuug

SEQ ID NO: 19865 - RNA, 23 nt, artificial
  Chemically synthesized
auaaacugugcaaaggucuuuga

SEQ ID NO: 19866 - RNA, 23 nt, artificial
  Chemically synthesized
ugaugaaguuuguuuucccaacu

SEQ ID NO: 19867 - RNA, 23 nt, artificial
  Chemically synthesized
cuucuuucuuuccaugaaguuga

SEQ ID NO: 19868 - RNA, 23 nt, artificial
  Chemically synthesized
uucuuucuuuccaugaaguugau

SEQ ID NO: 19869 - RNA, 23 nt, artificial
  Chemically synthesized
ucuuucuuuccaugaaguugaug

SEQ ID NO: 19870 - RNA, 23 nt, artificial
  Chemically synthesized
uuaaacguaggauaguaguaagg

SEQ ID NO: 19871 - RNA, 23 nt, artificial
  Chemically synthesized
ucaaugugucauacgcuucuuuc

SEQ ID NO: 19872 - RNA, 23 nt, artificial
  Chemically synthesized
caaugugucauacgcuucuuucu

SEQ ID NO: 19873 - RNA, 23 nt, artificial
  Chemically synthesized
aaugugucauacgcuucuuucuu

SEQ ID NO: 19874 - RNA, 23 nt, artificial
  Chemically synthesized
augugucauacgcuucuuucuuu

SEQ ID NO: 19875 - RNA, 23 nt, artificial
  Chemically synthesized
uuaagaugagcaccaaggcaaaa

SEQ ID NO: 19876 - RNA, 23 nt, artificial
  Chemically synthesized
auaaucuuaaucuuucauccucu

SEQ ID NO: 19877 - RNA, 23 nt, artificial
  Chemically synthesized
uaaucuuaaucuuucauccucug

SEQ ID NO: 19878 - RNA, 23 nt, artificial
  Chemically synthesized
uagucugaauuuucucugcaaga

SEQ ID NO: 19879 - RNA, 23 nt, artificial
  Chemically synthesized
agucugaauuuucucugcaagag

SEQ ID NO: 19880 - RNA, 23 nt, artificial
  Chemically synthesized
gucugaauuuucucugcaagagu

SEQ ID NO: 19881 - RNA, 23 nt, artificial
  Chemically synthesized
ucugaauuuucucugcaagagua

SEQ ID NO: 19882 - RNA, 23 nt, artificial
  Chemically synthesized
gccaauuacgaagcaguugaacu

SEQ ID NO: 19883 - RNA, 23 nt, artificial
  Chemically synthesized
aucuuaaaucuuagaaacuuggg

SEQ ID NO: 19884 - RNA, 23 nt, artificial
  Chemically synthesized
ucuuaaaucuuagaaacuugggg

SEQ ID NO: 19885 - RNA, 23 nt, artificial
  Chemically synthesized
cuuaaaucuuagaaacuuggggg

SEQ ID NO: 19886 - RNA, 23 nt, artificial
  Chemically synthesized
uuaaaucuuagaaacuugggggu

SEQ ID NO: 19887 - RNA, 23 nt, artificial
  Chemically synthesized
uaaaucuuagaaacuugggggua

SEQ ID NO: 19888 - RNA, 23 nt, artificial
  Chemically synthesized
uaaucaaugugucauacgcuucu

SEQ ID NO: 19889 - RNA, 23 nt, artificial
  Chemically synthesized
aaucaaugugucauacgcuucuu

SEQ ID NO: 19890 - RNA, 23 nt, artificial
  Chemically synthesized
aucaaugugucauacgcuucuuu

SEQ ID NO: 19891 - RNA, 23 nt, artificial
  Chemically synthesized
aggaugauagucugaauuuucuc

SEQ ID NO: 19892 - RNA, 23 nt, artificial
  Chemically synthesized
ggaugauagucugaauuuucucu

SEQ ID NO: 19893 - RNA, 23 nt, artificial
  Chemically synthesized
uucuaagggcagucuugccuuuu

SEQ ID NO: 19894 - RNA, 23 nt, artificial
  Chemically synthesized
ucuaagggcagucuugccuuuug

SEQ ID NO: 19895 - RNA, 23 nt, artificial
  Chemically synthesized
gacauugucauucuugaucucau

SEQ ID NO: 19896 - RNA, 23 nt, artificial
  Chemically synthesized
acauugucauucuugaucucauc

SEQ ID NO: 19897 - RNA, 23 nt, artificial
  Chemically synthesized
cauugucauucuugaucucaucu

SEQ ID NO: 19898 - RNA, 23 nt, artificial
  Chemically synthesized
auugucauucuugaucucaucua

SEQ ID NO: 19899 - RNA, 23 nt, artificial
  Chemically synthesized
uugucauucuugaucucaucuau

SEQ ID NO: 19900 - RNA, 23 nt, artificial
  Chemically synthesized
caugucacaaagcuacuuucucu

SEQ ID NO: 19901 - RNA, 23 nt, artificial
  Chemically synthesized
augucacaaagcuacuuucucug

SEQ ID NO: 19902 - RNA, 23 nt, artificial
  Chemically synthesized
ugucacaaagcuacuuucucuga

SEQ ID NO: 19903 - RNA, 23 nt, artificial
  Chemically synthesized
gucacaaagcuacuuucucugag

SEQ ID NO: 19904 - RNA, 23 nt, artificial
  Chemically synthesized
ucacaaagcuacuuucucugaga

SEQ ID NO: 19905 - RNA, 23 nt, artificial
  Chemically synthesized
ugccacugcauuuacucuugaug

SEQ ID NO: 19906 - RNA, 23 nt, artificial
  Chemically synthesized
gccacugcauuuacucuugauga

SEQ ID NO: 19907 - RNA, 23 nt, artificial
  Chemically synthesized
ccacugcauuuacucuugaugaa

SEQ ID NO: 19908 - RNA, 23 nt, artificial
  Chemically synthesized
cacugcauuuacucuugaugaag

SEQ ID NO: 19909 - RNA, 23 nt, artificial
  Chemically synthesized
acugcauuuacucuugaugaagu

SEQ ID NO: 19910 - RNA, 23 nt, artificial
  Chemically synthesized
ucuuuaggugguuccagguaucu

SEQ ID NO: 19911 - RNA, 23 nt, artificial
  Chemically synthesized
cuuuaggugguuccagguaucug

SEQ ID NO: 19912 - RNA, 23 nt, artificial
  Chemically synthesized
uuuaggugguuccagguaucugc

SEQ ID NO: 19913 - RNA, 23 nt, artificial
  Chemically synthesized
aacguaggauaguaguaaggaga

SEQ ID NO: 19914 - RNA, 23 nt, artificial
  Chemically synthesized
acguaggauaguaguaaggagaa

SEQ ID NO: 19915 - RNA, 23 nt, artificial
  Chemically synthesized
cguaggauaguaguaaggagaau

SEQ ID NO: 19916 - RNA, 23 nt, artificial
  Chemically synthesized
guaggauaguaguaaggagaauc

SEQ ID NO: 19917 - RNA, 23 nt, artificial
  Chemically synthesized
uaggauaguaguaaggagaaucu

SEQ ID NO: 19918 - RNA, 23 nt, artificial
  Chemically synthesized
uucacucuagaccaagcuuugga

SEQ ID NO: 19919 - RNA, 23 nt, artificial
  Chemically synthesized
ucacucuagaccaagcuuuggau

SEQ ID NO: 19920 - RNA, 23 nt, artificial
  Chemically synthesized
uuuaaacauccuuggaggcagaa

SEQ ID NO: 19921 - RNA, 23 nt, artificial
  Chemically synthesized
uuaaacauccuuggaggcagaau

SEQ ID NO: 19922 - RNA, 23 nt, artificial
  Chemically synthesized
uaaacauccuuggaggcagaauc

SEQ ID NO: 19923 - RNA, 23 nt, artificial
  Chemically synthesized
auguauaagcugccauuuguagc

SEQ ID NO: 19924 - RNA, 23 nt, artificial
  Chemically synthesized
uguauaagcugccauuuguagca

SEQ ID NO: 19925 - RNA, 23 nt, artificial
  Chemically synthesized
guauaagcugccauuuguagcag

SEQ ID NO: 19926 - RNA, 23 nt, artificial
  Chemically synthesized
uauaagcugccauuuguagcagg

SEQ ID NO: 19927 - RNA, 23 nt, artificial
  Chemically synthesized
auaagcugccauuuguagcaggu

SEQ ID NO: 19928 - RNA, 23 nt, artificial
  Chemically synthesized
gaaguuugaauuuucugagucac

SEQ ID NO: 19929 - RNA, 23 nt, artificial
  Chemically synthesized
aaguuugaauuuucugagucacu

SEQ ID NO: 19930 - RNA, 23 nt, artificial
  Chemically synthesized
aguuugaauuuucugagucacua

SEQ ID NO: 19931 - RNA, 23 nt, artificial
  Chemically synthesized
guuugaauuuucugagucacuag

SEQ ID NO: 19932 - RNA, 23 nt, artificial
  Chemically synthesized
uuugaauuuucugagucacuagu

SEQ ID NO: 19933 - RNA, 23 nt, artificial
  Chemically synthesized
aaagauuggcuuuuuugagaucu

SEQ ID NO: 19934 - RNA, 23 nt, artificial
  Chemically synthesized
aagauuggcuuuuuugagaucuu

SEQ ID NO: 19935 - RNA, 23 nt, artificial
  Chemically synthesized
agauuggcuuuuuugagaucuuu

SEQ ID NO: 19936 - RNA, 23 nt, artificial
  Chemically synthesized
gauuggcuuuuuugagaucuuua

SEQ ID NO: 19937 - RNA, 23 nt, artificial
  Chemically synthesized
auuggcuuuuuugagaucuuuaa

SEQ ID NO: 19938 - RNA, 23 nt, artificial
  Chemically synthesized
caauaguggugauauauuuacuc

SEQ ID NO: 19939 - RNA, 23 nt, artificial
  Chemically synthesized
aauaguggugauauauuuacuca

SEQ ID NO: 19940 - RNA, 23 nt, artificial
  Chemically synthesized
auaguggugauauauuuacucaa

SEQ ID NO: 19941 - RNA, 23 nt, artificial
  Chemically synthesized
uaguggugauauauuuacucaag

SEQ ID NO: 19942 - RNA, 23 nt, artificial
  Chemically synthesized
aguggugauauauuuacucaagu

SEQ ID NO: 19943 - RNA, 23 nt, artificial
  Chemically synthesized
agucacuaguaauguccuugagg

SEQ ID NO: 19944 - RNA, 23 nt, artificial
  Chemically synthesized
gucacuaguaauguccuugagga

SEQ ID NO: 19945 - RNA, 23 nt, artificial
  Chemically synthesized
ucacuaguaauguccuugaggau

SEQ ID NO: 19946 - RNA, 23 nt, artificial
  Chemically synthesized
cacuaguaauguccuugaggaug

SEQ ID NO: 19947 - RNA, 23 nt, artificial
  Chemically synthesized
acuaguaauguccuugaggauga

SEQ ID NO: 19948 - RNA, 23 nt, artificial
  Chemically synthesized
ugccugagaaagaaguagguagu

SEQ ID NO: 19949 - RNA, 23 nt, artificial
  Chemically synthesized
gccugagaaagaaguagguaguu

SEQ ID NO: 19950 - RNA, 23 nt, artificial
  Chemically synthesized
ccugagaaagaaguagguaguuu

SEQ ID NO: 19951 - RNA, 23 nt, artificial
  Chemically synthesized
cugagaaagaaguagguaguuuu

SEQ ID NO: 19952 - RNA, 23 nt, artificial
  Chemically synthesized
aauguacccaguaaaaaaccaag

SEQ ID NO: 19953 - RNA, 23 nt, artificial
  Chemically synthesized
auguacccaguaaaaaaccaagc

SEQ ID NO: 19954 - RNA, 23 nt, artificial
  Chemically synthesized
uguacccaguaaaaaaccaagca

SEQ ID NO: 19955 - RNA, 23 nt, artificial
  Chemically synthesized
guacccaguaaaaaaccaagcag

SEQ ID NO: 19956 - RNA, 23 nt, artificial
  Chemically synthesized
uacccaguaaaaaaccaagcagu

SEQ ID NO: 19957 - RNA, 23 nt, artificial
  Chemically synthesized
agcaugguuguugagcaauccuc

SEQ ID NO: 19958 - RNA, 23 nt, artificial
  Chemically synthesized
gcaugguuguugagcaauccucc

SEQ ID NO: 19959 - RNA, 23 nt, artificial
  Chemically synthesized
caugguuguugagcaauccuccg

SEQ ID NO: 19960 - RNA, 23 nt, artificial
  Chemically synthesized
uuaggugguuccagguaucugcu

SEQ ID NO: 19961 - RNA, 23 nt, artificial
  Chemically synthesized
uccucugcauacacuccuauuug

SEQ ID NO: 19962 - RNA, 23 nt, artificial
  Chemically synthesized
ccucugcauacacuccuauuugg

SEQ ID NO: 19963 - RNA, 23 nt, artificial
  Chemically synthesized
cucugcauacacuccuauuuggg

SEQ ID NO: 19964 - RNA, 23 nt, artificial
  Chemically synthesized
ucugcauacacuccuauuugggu

SEQ ID NO: 19965 - RNA, 23 nt, artificial
  Chemically synthesized
ucuguucugcugugucuuggaca

SEQ ID NO: 19966 - RNA, 23 nt, artificial
  Chemically synthesized
cuguucugcugugucuuggacau

SEQ ID NO: 19967 - RNA, 23 nt, artificial
  Chemically synthesized
uguucugcugugucuuggacauu

SEQ ID NO: 19968 - RNA, 23 nt, artificial
  Chemically synthesized
uuugguggacuauuaaguauuuu

SEQ ID NO: 19969 - RNA, 23 nt, artificial
  Chemically synthesized
uggaaguucuuuaggugguucca

SEQ ID NO: 19970 - RNA, 23 nt, artificial
  Chemically synthesized
ggaaguucuuuaggugguuccag

SEQ ID NO: 19971 - RNA, 23 nt, artificial
  Chemically synthesized
uugaauuuucugagucacuagua

SEQ ID NO: 19972 - RNA, 23 nt, artificial
  Chemically synthesized
guaguaacagucuuccucaauuc

SEQ ID NO: 19973 - RNA, 23 nt, artificial
  Chemically synthesized
uaguaacagucuuccucaauucc

SEQ ID NO: 19974 - RNA, 23 nt, artificial
  Chemically synthesized
aguaacagucuuccucaauucca

SEQ ID NO: 19975 - RNA, 23 nt, artificial
  Chemically synthesized
guaacagucuuccucaauuccaa

SEQ ID NO: 19976 - RNA, 23 nt, artificial
  Chemically synthesized
uaacagucuuccucaauuccaau

SEQ ID NO: 19977 - RNA, 23 nt, artificial
  Chemically synthesized
cuaguaauacucuccugcucaaa

SEQ ID NO: 19978 - RNA, 23 nt, artificial
  Chemically synthesized
uaguaauacucuccugcucaaaa

SEQ ID NO: 19979 - RNA, 23 nt, artificial
  Chemically synthesized
aacuugacuuagugucaugacuc

SEQ ID NO: 19980 - RNA, 23 nt, artificial
  Chemically synthesized
acuugacuuagugucaugacucc

SEQ ID NO: 19981 - RNA, 23 nt, artificial
  Chemically synthesized
cuugacuuagugucaugacucca

SEQ ID NO: 19982 - RNA, 23 nt, artificial
  Chemically synthesized
uugacuuagugucaugacuccag

SEQ ID NO: 19983 - RNA, 23 nt, artificial
  Chemically synthesized
acuaacauacacugauuacauuc

SEQ ID NO: 19984 - RNA, 23 nt, artificial
  Chemically synthesized
cuaacauacacugauuacauuca

SEQ ID NO: 19985 - RNA, 23 nt, artificial
  Chemically synthesized
uaacauacacugauuacauucau

SEQ ID NO: 19986 - RNA, 23 nt, artificial
  Chemically synthesized
aacauacacugauuacauucaua

SEQ ID NO: 19987 - RNA, 23 nt, artificial
  Chemically synthesized
acauacacugauuacauucauac

SEQ ID NO: 19988 - RNA, 23 nt, artificial
  Chemically synthesized
uaaacugugcaaaggucuuugag

SEQ ID NO: 19989 - RNA, 23 nt, artificial
  Chemically synthesized
cauacgcuucuuucuuuccauga

SEQ ID NO: 19990 - RNA, 23 nt, artificial
  Chemically synthesized
auacgcuucuuucuuuccaugaa

SEQ ID NO: 19991 - RNA, 23 nt, artificial
  Chemically synthesized
auuuaaauucugcacucaaauac

SEQ ID NO: 19992 - RNA, 23 nt, artificial
  Chemically synthesized
uuuaaauucugcacucaaauaca

SEQ ID NO: 19993 - RNA, 23 nt, artificial
  Chemically synthesized
uuaaauucugcacucaaauacau

SEQ ID NO: 19994 - RNA, 23 nt, artificial
  Chemically synthesized
uaaauucugcacucaaauacaua

SEQ ID NO: 19995 - RNA, 23 nt, artificial
  Chemically synthesized
aaauucugcacucaaauacauau

SEQ ID NO: 19996 - RNA, 23 nt, artificial
  Chemically synthesized
uucuuucgaacaaagccuuuaac

SEQ ID NO: 19997 - RNA, 23 nt, artificial
  Chemically synthesized
ugccauuuguagcagguuuuaca

SEQ ID NO: 19998 - RNA, 23 nt, artificial
  Chemically synthesized
gccauuuguagcagguuuuacau

SEQ ID NO: 19999 - RNA, 23 nt, artificial
  Chemically synthesized
ccauuuguagcagguuuuacaug

SEQ ID NO: 20000 - RNA, 23 nt, artificial
  Chemically synthesized
gucuuugaacaccugugugucac

SEQ ID NO: 20001 - RNA, 23 nt, artificial
  Chemically synthesized
ucuuugaacaccugugugucacu

SEQ ID NO: 20002 - RNA, 23 nt, artificial
  Chemically synthesized
cuuugaacaccugugugucacuc

SEQ ID NO: 20003 - RNA, 23 nt, artificial
  Chemically synthesized
uuugaacaccugugugucacucu

SEQ ID NO: 20004 - RNA, 23 nt, artificial
  Chemically synthesized
uugaacaccugugugucacucuu

SEQ ID NO: 20005 - RNA, 23 nt, artificial
  Chemically synthesized
uccucaauuccaaucccuuggag

SEQ ID NO: 20006 - RNA, 23 nt, artificial
  Chemically synthesized
aguagguaguuuugagccaguaa

SEQ ID NO: 20007 - RNA, 23 nt, artificial
  Chemically synthesized
guagguaguuuugagccaguaaa

SEQ ID NO: 20008 - RNA, 23 nt, artificial
  Chemically synthesized
uagguaguuuugagccaguaaaa

SEQ ID NO: 20009 - RNA, 23 nt, artificial
  Chemically synthesized
uguuuucccaacuagauuuuaaa

SEQ ID NO: 20010 - RNA, 23 nt, artificial
  Chemically synthesized
aauucugcacucaaauacauaua

SEQ ID NO: 20011 - RNA, 23 nt, artificial
  Chemically synthesized
auucugcacucaaauacauauac

SEQ ID NO: 20012 - RNA, 23 nt, artificial
  Chemically synthesized
uucugcacucaaauacauauacu

SEQ ID NO: 20013 - RNA, 23 nt, artificial
  Chemically synthesized
aucuucacaguuuacauuuacag

SEQ ID NO: 20014 - RNA, 23 nt, artificial
  Chemically synthesized
ucuucacaguuuacauuuacaga

SEQ ID NO: 20015 - RNA, 23 nt, artificial
  Chemically synthesized
cuucacaguuuacauuuacagaa

SEQ ID NO: 20016 - RNA, 23 nt, artificial
  Chemically synthesized
uucacaguuuacauuuacagaaa

SEQ ID NO: 20017 - RNA, 23 nt, artificial
  Chemically synthesized
ucacaguuuacauuuacagaaau

SEQ ID NO: 20018 - RNA, 23 nt, artificial
  Chemically synthesized
ugugucacucuugcgcgagauca

SEQ ID NO: 20019 - RNA, 23 nt, artificial
  Chemically synthesized
gugucacucuugcgcgagaucag

SEQ ID NO: 20020 - RNA, 23 nt, artificial
  Chemically synthesized
ugucacucuugcgcgagaucaga

SEQ ID NO: 20021 - RNA, 23 nt, artificial
  Chemically synthesized
gucacucuugcgcgagaucagag

SEQ ID NO: 20022 - RNA, 23 nt, artificial
  Chemically synthesized
ucacucuugcgcgagaucagaga

SEQ ID NO: 20023 - RNA, 23 nt, artificial
  Chemically synthesized
gaauuuucucugcaagaguacaa

SEQ ID NO: 20024 - RNA, 23 nt, artificial
  Chemically synthesized
aauuuucucugcaagaguacaaa

SEQ ID NO: 20025 - RNA, 23 nt, artificial
  Chemically synthesized
auuuucucugcaagaguacaaag

SEQ ID NO: 20026 - RNA, 23 nt, artificial
  Chemically synthesized
uuuucucugcaagaguacaaaga

SEQ ID NO: 20027 - RNA, 23 nt, artificial
  Chemically synthesized
uuucucugcaagaguacaaagau

SEQ ID NO: 20028 - RNA, 23 nt, artificial
  Chemically synthesized
gaauuuucugagucacuaguaau

SEQ ID NO: 20029 - RNA, 23 nt, artificial
  Chemically synthesized
uguugagcaauccuccgaaguga

SEQ ID NO: 20030 - RNA, 23 nt, artificial
  Chemically synthesized
guugagcaauccuccgaagugaa

SEQ ID NO: 20031 - RNA, 23 nt, artificial
  Chemically synthesized
uugagcaauccuccgaagugaaa

SEQ ID NO: 20032 - RNA, 23 nt, artificial
  Chemically synthesized
ucuuucgaacaaagccuuuaacu

SEQ ID NO: 20033 - RNA, 23 nt, artificial
  Chemically synthesized
cuuucgaacaaagccuuuaacuu

SEQ ID NO: 20034 - RNA, 23 nt, artificial
  Chemically synthesized
uuucgaacaaagccuuuaacuug

SEQ ID NO: 20035 - RNA, 23 nt, artificial
  Chemically synthesized
uucgaacaaagccuuuaacuuga

SEQ ID NO: 20036 - RNA, 23 nt, artificial
  Chemically synthesized
ucgaacaaagccuuuaacuugac

SEQ ID NO: 20037 - RNA, 23 nt, artificial
  Chemically synthesized
caugaugcaggccuuccaaguuc

SEQ ID NO: 20038 - RNA, 23 nt, artificial
  Chemically synthesized
augaugcaggccuuccaaguucu

SEQ ID NO: 20039 - RNA, 23 nt, artificial
  Chemically synthesized
ugaugcaggccuuccaaguucug

SEQ ID NO: 20040 - RNA, 23 nt, artificial
  Chemically synthesized
gaugcaggccuuccaaguucuga

SEQ ID NO: 20041 - RNA, 23 nt, artificial
  Chemically synthesized
augcaggccuuccaaguucugag

SEQ ID NO: 20042 - RNA, 23 nt, artificial
  Chemically synthesized
agcuuuggauuucauuucugaag

SEQ ID NO: 20043 - RNA, 23 nt, artificial
  Chemically synthesized
gcuuuggauuucauuucugaagu

SEQ ID NO: 20044 - RNA, 23 nt, artificial
  Chemically synthesized
cuuuggauuucauuucugaaguu

SEQ ID NO: 20045 - RNA, 23 nt, artificial
  Chemically synthesized
uuuggauuucauuucugaaguuu

SEQ ID NO: 20046 - RNA, 23 nt, artificial
  Chemically synthesized
uuggauuucauuucugaaguuug

SEQ ID NO: 20047 - RNA, 23 nt, artificial
  Chemically synthesized
ugcuauguauaagcugccauuug

SEQ ID NO: 20048 - RNA, 23 nt, artificial
  Chemically synthesized
gcuauguauaagcugccauuugu

SEQ ID NO: 20049 - RNA, 23 nt, artificial
  Chemically synthesized
cuauguauaagcugccauuugua

SEQ ID NO: 20050 - RNA, 23 nt, artificial
  Chemically synthesized
uauguauaagcugccauuuguag

SEQ ID NO: 20051 - RNA, 23 nt, artificial
  Chemically synthesized
cauucuugaucucaucuauuuug

SEQ ID NO: 20052 - RNA, 23 nt, artificial
  Chemically synthesized
uuccaugaaguugaugccaauua

SEQ ID NO: 20053 - RNA, 23 nt, artificial
  Chemically synthesized
uuagaggcaaaguggccugccug

SEQ ID NO: 20054 - RNA, 23 nt, artificial
  Chemically synthesized
ccagaugcccagcaugguuguug

SEQ ID NO: 20055 - RNA, 23 nt, artificial
  Chemically synthesized
cagaugcccagcaugguuguuga

SEQ ID NO: 20056 - RNA, 23 nt, artificial
  Chemically synthesized
agaugcccagcaugguuguugag

SEQ ID NO: 20057 - RNA, 23 nt, artificial
  Chemically synthesized
gaugcccagcaugguuguugagc

SEQ ID NO: 20058 - RNA, 23 nt, artificial
  Chemically synthesized
augcccagcaugguuguugagca

SEQ ID NO: 20059 - RNA, 23 nt, artificial
  Chemically synthesized
augaugauuuuaccauugcuaug

SEQ ID NO: 20060 - RNA, 23 nt, artificial
  Chemically synthesized
ugaugauuuuaccauugcuaugu

SEQ ID NO: 20061 - RNA, 23 nt, artificial
  Chemically synthesized
gaugauuuuaccauugcuaugua

SEQ ID NO: 20062 - RNA, 23 nt, artificial
  Chemically synthesized
augauuuuaccauugcuauguau

SEQ ID NO: 20063 - RNA, 23 nt, artificial
  Chemically synthesized
ugauuuuaccauugcuauguaua

SEQ ID NO: 20064 - RNA, 23 nt, artificial
  Chemically synthesized
guccuugaggaugauagucugaa

SEQ ID NO: 20065 - RNA, 23 nt, artificial
  Chemically synthesized
uccuugaggaugauagucugaau

SEQ ID NO: 20066 - RNA, 23 nt, artificial
  Chemically synthesized
ccuugaggaugauagucugaauu

SEQ ID NO: 20067 - RNA, 23 nt, artificial
  Chemically synthesized
cuugaggaugauagucugaauuu

SEQ ID NO: 20068 - RNA, 23 nt, artificial
  Chemically synthesized
uugaggaugauagucugaauuuu

SEQ ID NO: 20069 - RNA, 23 nt, artificial
  Chemically synthesized
ugaucucaucuauuuuggcuuca

SEQ ID NO: 20070 - RNA, 23 nt, artificial
  Chemically synthesized
gaucucaucuauuuuggcuucau

SEQ ID NO: 20071 - RNA, 23 nt, artificial
  Chemically synthesized
aucucaucuauuuuggcuucauu

SEQ ID NO: 20072 - RNA, 23 nt, artificial
  Chemically synthesized
gaauuaucagagguaauuuagag

SEQ ID NO: 20073 - RNA, 23 nt, artificial
  Chemically synthesized
gaacaccugugugucacucuugc

SEQ ID NO: 20074 - RNA, 23 nt, artificial
  Chemically synthesized
aacaccugugugucacucuugcg

SEQ ID NO: 20075 - RNA, 23 nt, artificial
  Chemically synthesized
acaccugugugucacucuugcgc

SEQ ID NO: 20076 - RNA, 23 nt, artificial
  Chemically synthesized
caccugugugucacucuugcgcg

SEQ ID NO: 20077 - RNA, 23 nt, artificial
  Chemically synthesized
accugugugucacucuugcgcga

SEQ ID NO: 20078 - RNA, 23 nt, artificial
  Chemically synthesized
gcaaagcucuaguaauacucucc

SEQ ID NO: 20079 - RNA, 23 nt, artificial
  Chemically synthesized
caaagcucuaguaauacucuccu

SEQ ID NO: 20080 - RNA, 23 nt, artificial
  Chemically synthesized
aaagcucuaguaauacucuccug

SEQ ID NO: 20081 - RNA, 23 nt, artificial
  Chemically synthesized
cauccuuggaggcagaaucauga

SEQ ID NO: 20082 - RNA, 23 nt, artificial
  Chemically synthesized
auccuuggaggcagaaucaugag

SEQ ID NO: 20083 - RNA, 23 nt, artificial
  Chemically synthesized
uccuuggaggcagaaucaugaga

SEQ ID NO: 20084 - RNA, 23 nt, artificial
  Chemically synthesized
ccuuggaggcagaaucaugagau

SEQ ID NO: 20085 - RNA, 23 nt, artificial
  Chemically synthesized
cuuggaggcagaaucaugagaua

SEQ ID NO: 20086 - RNA, 23 nt, artificial
  Chemically synthesized
cagaaucauauguuagaugccag

SEQ ID NO: 20087 - RNA, 23 nt, artificial
  Chemically synthesized
agaaucauauguuagaugccaga

SEQ ID NO: 20088 - RNA, 23 nt, artificial
  Chemically synthesized
gaaucauauguuagaugccagag

SEQ ID NO: 20089 - RNA, 23 nt, artificial
  Chemically synthesized
cauaaucuuaaucuuucauccuc

SEQ ID NO: 20090 - RNA, 23 nt, artificial
  Chemically synthesized
uuugaugccugagaaagaaguag

SEQ ID NO: 20091 - RNA, 23 nt, artificial
  Chemically synthesized
uugaugccugagaaagaaguagg

SEQ ID NO: 20092 - RNA, 23 nt, artificial
  Chemically synthesized
ggacauugucauucuugaucuca

SEQ ID NO: 20093 - RNA, 23 nt, artificial
  Chemically synthesized
augaucuucucagaguuauaaac

SEQ ID NO: 20094 - RNA, 23 nt, artificial
  Chemically synthesized
ugaucuucucagaguuauaaaca

SEQ ID NO: 20095 - RNA, 23 nt, artificial
  Chemically synthesized
gaucuucucagaguuauaaacaa

SEQ ID NO: 20096 - RNA, 23 nt, artificial
  Chemically synthesized
aucuucucagaguuauaaacaaa

SEQ ID NO: 20097 - RNA, 23 nt, artificial
  Chemically synthesized
ucuucucagaguuauaaacaaag

SEQ ID NO: 20098 - RNA, 23 nt, artificial
  Chemically synthesized
ucaugacaugucacaaagcuacu

SEQ ID NO: 20099 - RNA, 23 nt, artificial
  Chemically synthesized
caugacaugucacaaagcuacuu

SEQ ID NO: 20100 - RNA, 23 nt, artificial
  Chemically synthesized
augacaugucacaaagcuacuuu

SEQ ID NO: 20101 - RNA, 23 nt, artificial
  Chemically synthesized
ugacaugucacaaagcuacuuuc

SEQ ID NO: 20102 - RNA, 23 nt, artificial
  Chemically synthesized
gaccaagcuuuggauuucauuuc

SEQ ID NO: 20103 - RNA, 23 nt, artificial
  Chemically synthesized
accaagcuuuggauuucauuucu

SEQ ID NO: 20104 - RNA, 23 nt, artificial
  Chemically synthesized
ccaagcuuuggauuucauuucug

SEQ ID NO: 20105 - RNA, 23 nt, artificial
  Chemically synthesized
caagcuuuggauuucauuucuga

SEQ ID NO: 20106 - RNA, 23 nt, artificial
  Chemically synthesized
aagcuuuggauuucauuucugaa

SEQ ID NO: 20107 - RNA, 23 nt, artificial
  Chemically synthesized
ugcaaaggucuuugagguagagc

SEQ ID NO: 20108 - RNA, 23 nt, artificial
  Chemically synthesized
gcaaaggucuuugagguagagcc

SEQ ID NO: 20109 - RNA, 23 nt, artificial
  Chemically synthesized
caaaggucuuugagguagagccu

SEQ ID NO: 20110 - RNA, 23 nt, artificial
  Chemically synthesized
aaaggucuuugagguagagccuu

SEQ ID NO: 20111 - RNA, 23 nt, artificial
  Chemically synthesized
aaggucuuugagguagagccuua

SEQ ID NO: 20112 - RNA, 23 nt, artificial
  Chemically synthesized
guaauacucuccugcucaaaaug

SEQ ID NO: 20113 - RNA, 23 nt, artificial
  Chemically synthesized
uaauacucuccugcucaaaaugc

SEQ ID NO: 20114 - RNA, 23 nt, artificial
  Chemically synthesized
aauacucuccugcucaaaaugcu

SEQ ID NO: 20115 - RNA, 23 nt, artificial
  Chemically synthesized
auacucuccugcucaaaaugcuu

SEQ ID NO: 20116 - RNA, 23 nt, artificial
  Chemically synthesized
uacucuccugcucaaaaugcuuu

SEQ ID NO: 20117 - RNA, 23 nt, artificial
  Chemically synthesized
gugucaugacuccagcaauagug

SEQ ID NO: 20118 - RNA, 23 nt, artificial
  Chemically synthesized
ugucaugacuccagcaauagugg

SEQ ID NO: 20119 - RNA, 23 nt, artificial
  Chemically synthesized
gucaugacuccagcaauaguggu

SEQ ID NO: 20120 - RNA, 23 nt, artificial
  Chemically synthesized
ucaugacuccagcaauaguggug

SEQ ID NO: 20121 - RNA, 23 nt, artificial
  Chemically synthesized
caugacuccagcaauagugguga

SEQ ID NO: 20122 - RNA, 23 nt, artificial
  Chemically synthesized
uacaaauauguuggcucuucagc

SEQ ID NO: 20123 - RNA, 23 nt, artificial
  Chemically synthesized
aguaauacucuccugcucaaaau

SEQ ID NO: 20124 - RNA, 23 nt, artificial
  Chemically synthesized
uggaguugaugucagucacuugg

SEQ ID NO: 20125 - RNA, 23 nt, artificial
  Chemically synthesized
ggaguugaugucagucacuuggg

SEQ ID NO: 20126 - RNA, 23 nt, artificial
  Chemically synthesized
gaguugaugucagucacuugggc

SEQ ID NO: 20127 - RNA, 23 nt, artificial
  Chemically synthesized
aguugaugucagucacuugggca

SEQ ID NO: 20128 - RNA, 23 nt, artificial
  Chemically synthesized
guugaugucagucacuugggcau

SEQ ID NO: 20129 - RNA, 23 nt, artificial
  Chemically synthesized
uuuggguacuuagcaugccacug

SEQ ID NO: 20130 - RNA, 23 nt, artificial
  Chemically synthesized
gcauauacucagaacugaauuug

SEQ ID NO: 20131 - RNA, 23 nt, artificial
  Chemically synthesized
cauauacucagaacugaauuugu

SEQ ID NO: 20132 - RNA, 23 nt, artificial
  Chemically synthesized
auauacucagaacugaauuuguu

SEQ ID NO: 20133 - RNA, 23 nt, artificial
  Chemically synthesized
uauacucagaacugaauuuguug

SEQ ID NO: 20134 - RNA, 23 nt, artificial
  Chemically synthesized
auacucagaacugaauuuguugu

SEQ ID NO: 20135 - RNA, 23 nt, artificial
  Chemically synthesized
ggcuuauggcagaauuggccauc

SEQ ID NO: 20136 - RNA, 23 nt, artificial
  Chemically synthesized
gcuuauggcagaauuggccauca

SEQ ID NO: 20137 - RNA, 23 nt, artificial
  Chemically synthesized
cuuauggcagaauuggccaucau

SEQ ID NO: 20138 - RNA, 23 nt, artificial
  Chemically synthesized
uuauggcagaauuggccaucaug

SEQ ID NO: 20139 - RNA, 23 nt, artificial
  Chemically synthesized
uauggcagaauuggccaucauga

SEQ ID NO: 20140 - RNA, 23 nt, artificial
  Chemically synthesized
ugacaagagcaauuccuaaaucc

SEQ ID NO: 20141 - RNA, 23 nt, artificial
  Chemically synthesized
acaagagcaauuccuaaauccag

SEQ ID NO: 20142 - RNA, 23 nt, artificial
  Chemically synthesized
caagagcaauuccuaaauccaga

SEQ ID NO: 20143 - RNA, 23 nt, artificial
  Chemically synthesized
aagagcaauuccuaaauccagau

SEQ ID NO: 20144 - RNA, 23 nt, artificial
  Chemically synthesized
gcaauuccuaaauccagaugaug

SEQ ID NO: 20145 - RNA, 23 nt, artificial
  Chemically synthesized
acacuccuauuuggguacuuagc

SEQ ID NO: 20146 - RNA, 23 nt, artificial
  Chemically synthesized
cacuccuauuuggguacuuagca

SEQ ID NO: 20147 - RNA, 23 nt, artificial
  Chemically synthesized
acuccuauuuggguacuuagcau

SEQ ID NO: 20148 - RNA, 23 nt, artificial
  Chemically synthesized
gcugugucuuggacauugucauu

SEQ ID NO: 20149 - RNA, 23 nt, artificial
  Chemically synthesized
cugugucuuggacauugucauuc

SEQ ID NO: 20150 - RNA, 23 nt, artificial
  Chemically synthesized
ugugucuuggacauugucauucu

SEQ ID NO: 20151 - RNA, 23 nt, artificial
  Chemically synthesized
augacuccagcaauaguggugau

SEQ ID NO: 20152 - RNA, 23 nt, artificial
  Chemically synthesized
uaaaauguacccaguaaaaaacc

SEQ ID NO: 20153 - RNA, 23 nt, artificial
  Chemically synthesized
aaaauguacccaguaaaaaacca

SEQ ID NO: 20154 - RNA, 23 nt, artificial
  Chemically synthesized
aaauguacccaguaaaaaaccaa

SEQ ID NO: 20155 - RNA, 23 nt, artificial
  Chemically synthesized
ucagucacuugggcauuaacacu

SEQ ID NO: 20156 - RNA, 23 nt, artificial
  Chemically synthesized
cagucacuugggcauuaacacuu

SEQ ID NO: 20157 - RNA, 23 nt, artificial
  Chemically synthesized
agucacuugggcauuaacacuuu

SEQ ID NO: 20158 - RNA, 23 nt, artificial
  Chemically synthesized
gucacuugggcauuaacacuuuu

SEQ ID NO: 20159 - RNA, 23 nt, artificial
  Chemically synthesized
gagucacuaguaauguccuugag

SEQ ID NO: 20160 - RNA, 23 nt, artificial
  Chemically synthesized
cgagaucagagacgagcucacga

SEQ ID NO: 20161 - RNA, 23 nt, artificial
  Chemically synthesized
gagaucagagacgagcucacgaa

SEQ ID NO: 20162 - RNA, 23 nt, artificial
  Chemically synthesized
agaucagagacgagcucacgaaa

SEQ ID NO: 20163 - RNA, 23 nt, artificial
  Chemically synthesized
gaucagagacgagcucacgaaaa

SEQ ID NO: 20164 - RNA, 23 nt, artificial
  Chemically synthesized
aucagagacgagcucacgaaaag

SEQ ID NO: 20165 - RNA, 23 nt, artificial
  Chemically synthesized
ucaauuccaaucccuuggaguug

SEQ ID NO: 20166 - RNA, 23 nt, artificial
  Chemically synthesized
caauuccaaucccuuggaguuga

SEQ ID NO: 20167 - RNA, 23 nt, artificial
  Chemically synthesized
aauuccaaucccuuggaguugau

SEQ ID NO: 20168 - RNA, 23 nt, artificial
  Chemically synthesized
auuccaaucccuuggaguugaug

SEQ ID NO: 20169 - RNA, 23 nt, artificial
  Chemically synthesized
uuccaaucccuuggaguugaugu

SEQ ID NO: 20170 - RNA, 23 nt, artificial
  Chemically synthesized
gacgauaaucuagcaacagacgu

SEQ ID NO: 20171 - RNA, 23 nt, artificial
  Chemically synthesized
acgauaaucuagcaacagacgua

SEQ ID NO: 20172 - RNA, 23 nt, artificial
  Chemically synthesized
cgauaaucuagcaacagacguaa

SEQ ID NO: 20173 - RNA, 23 nt, artificial
  Chemically synthesized
gauaaucuagcaacagacguaag

SEQ ID NO: 20174 - RNA, 23 nt, artificial
  Chemically synthesized
auaaucuagcaacagacguaaga

SEQ ID NO: 20175 - RNA, 23 nt, artificial
  Chemically synthesized
ugaaguugaugccaauuacgaag

SEQ ID NO: 20176 - RNA, 23 nt, artificial
  Chemically synthesized
uccagaugaugauuuuaccauug

SEQ ID NO: 20177 - RNA, 23 nt, artificial
  Chemically synthesized
uauaacuaucuucacaguuuaca

SEQ ID NO: 20178 - RNA, 23 nt, artificial
  Chemically synthesized
auaacuaucuucacaguuuacau

SEQ ID NO: 20179 - RNA, 23 nt, artificial
  Chemically synthesized
uaacuaucuucacaguuuacauu

SEQ ID NO: 20180 - RNA, 23 nt, artificial
  Chemically synthesized
aacuaucuucacaguuuacauuu

SEQ ID NO: 20181 - RNA, 23 nt, artificial
  Chemically synthesized
acuaucuucacaguuuacauuua

SEQ ID NO: 20182 - RNA, 23 nt, artificial
  Chemically synthesized
ugaauuuucucugcaagaguaca

SEQ ID NO: 20183 - RNA, 23 nt, artificial
  Chemically synthesized
uuacagccagcuauuaagaaucu

SEQ ID NO: 20184 - RNA, 23 nt, artificial
  Chemically synthesized
uguccuugaggaugauagucuga

SEQ ID NO: 20185 - RNA, 23 nt, artificial
  Chemically synthesized
cuagauuuuaaacauccuuggag

SEQ ID NO: 20186 - RNA, 23 nt, artificial
  Chemically synthesized
cuucagcgcuaauaaaugauaaa

SEQ ID NO: 20187 - RNA, 23 nt, artificial
  Chemically synthesized
uucagcgcuaauaaaugauaaaa

SEQ ID NO: 20188 - RNA, 23 nt, artificial
  Chemically synthesized
augacaccaauaaacugugcaaa

SEQ ID NO: 20189 - RNA, 23 nt, artificial
  Chemically synthesized
auuaacacuuuuggacgauaauc

SEQ ID NO: 20190 - RNA, 23 nt, artificial
  Chemically synthesized
uuaacacuuuuggacgauaaucu

SEQ ID NO: 20191 - RNA, 23 nt, artificial
  Chemically synthesized
uaacacuuuuggacgauaaucua

SEQ ID NO: 20192 - RNA, 23 nt, artificial
  Chemically synthesized
aacacuuuuggacgauaaucuag

SEQ ID NO: 20193 - RNA, 23 nt, artificial
  Chemically synthesized
ggucuuugagguagagccuuauu

SEQ ID NO: 20194 - RNA, 23 nt, artificial
  Chemically synthesized
gguguugcuggugagugugcauu

SEQ ID NO: 20195 - RNA, 23 nt, artificial
  Chemically synthesized
guguugcuggugagugugcauuc

SEQ ID NO: 20196 - RNA, 23 nt, artificial
  Chemically synthesized
uguugcuggugagugugcauucc

SEQ ID NO: 20197 - RNA, 23 nt, artificial
  Chemically synthesized
guugcuggugagugugcauuccu

SEQ ID NO: 20198 - RNA, 23 nt, artificial
  Chemically synthesized
uugcuggugagugugcauuccuu

SEQ ID NO: 20199 - RNA, 23 nt, artificial
  Chemically synthesized
gcaauccuccgaagugaaagagc

SEQ ID NO: 20200 - RNA, 23 nt, artificial
  Chemically synthesized
caauccuccgaagugaaagagcu

SEQ ID NO: 20201 - RNA, 23 nt, artificial
  Chemically synthesized
aauccuccgaagugaaagagcuu

SEQ ID NO: 20202 - RNA, 23 nt, artificial
  Chemically synthesized
auccuccgaagugaaagagcuuc

SEQ ID NO: 20203 - RNA, 23 nt, artificial
  Chemically synthesized
uccuccgaagugaaagagcuucc

SEQ ID NO: 20204 - RNA, 23 nt, artificial
  Chemically synthesized
uuggguacuuagcaugccacugc

SEQ ID NO: 20205 - RNA, 23 nt, artificial
  Chemically synthesized
ccuccgaagugaaagagcuuccc

SEQ ID NO: 20206 - RNA, 23 nt, artificial
  Chemically synthesized
cuccgaagugaaagagcuucccc

SEQ ID NO: 20207 - RNA, 23 nt, artificial
  Chemically synthesized
uccgaagugaaagagcuucccca

SEQ ID NO: 20208 - RNA, 23 nt, artificial
  Chemically synthesized
uuggugauauuuccauguuuggg

SEQ ID NO: 20209 - RNA, 23 nt, artificial
  Chemically synthesized
uggugauauuuccauguuugggg

SEQ ID NO: 20210 - RNA, 23 nt, artificial
  Chemically synthesized
ggugauauuuccauguuuggggg

SEQ ID NO: 20211 - RNA, 23 nt, artificial
  Chemically synthesized
gugauauuuccauguuugggggu

SEQ ID NO: 20212 - RNA, 23 nt, artificial
  Chemically synthesized
ugauauuuccauguuugggggug

SEQ ID NO: 20213 - RNA, 23 nt, artificial
  Chemically synthesized
aacagucuuccucaauuccaauc

SEQ ID NO: 20214 - RNA, 23 nt, artificial
  Chemically synthesized
uccuugaugauuccauguucaca

SEQ ID NO: 20215 - RNA, 23 nt, artificial
  Chemically synthesized
ccuugaugauuccauguucacau

SEQ ID NO: 20216 - RNA, 23 nt, artificial
  Chemically synthesized
cuugaugauuccauguucacauu

SEQ ID NO: 20217 - RNA, 23 nt, artificial
  Chemically synthesized
uugaugauuccauguucacauuu

SEQ ID NO: 20218 - RNA, 23 nt, artificial
  Chemically synthesized
ugaugauuccauguucacauuug

SEQ ID NO: 20219 - RNA, 23 nt, artificial
  Chemically synthesized
cucaacuguaguaacagucuucc

SEQ ID NO: 20220 - RNA, 23 nt, artificial
  Chemically synthesized
ucaacuguaguaacagucuuccu

SEQ ID NO: 20221 - RNA, 23 nt, artificial
  Chemically synthesized
gcaagaguacaaagauuggcuuu

SEQ ID NO: 20222 - RNA, 23 nt, artificial
  Chemically synthesized
caagaguacaaagauuggcuuuu

SEQ ID NO: 20223 - RNA, 23 nt, artificial
  Chemically synthesized
aagaguacaaagauuggcuuuuu

SEQ ID NO: 20224 - RNA, 23 nt, artificial
  Chemically synthesized
ucugcacucaaauacauauacuu

SEQ ID NO: 20225 - RNA, 23 nt, artificial
  Chemically synthesized
uaaaaucucuagaauuaucagag

SEQ ID NO: 20226 - RNA, 23 nt, artificial
  Chemically synthesized
aaaaucucuagaauuaucagagg

SEQ ID NO: 20227 - RNA, 23 nt, artificial
  Chemically synthesized
aaaucucuagaauuaucagaggu

SEQ ID NO: 20228 - RNA, 23 nt, artificial
  Chemically synthesized
aaucucuagaauuaucagaggua

SEQ ID NO: 20229 - RNA, 23 nt, artificial
  Chemically synthesized
aucucuagaauuaucagagguaa

SEQ ID NO: 20230 - RNA, 23 nt, artificial
  Chemically synthesized
ugauugcaaacauggguucauga

SEQ ID NO: 20231 - RNA, 23 nt, artificial
  Chemically synthesized
gauugcaaacauggguucaugac

SEQ ID NO: 20232 - RNA, 23 nt, artificial
  Chemically synthesized
auugcaaacauggguucaugaca

SEQ ID NO: 20233 - RNA, 23 nt, artificial
  Chemically synthesized
uugcaaacauggguucaugacau

SEQ ID NO: 20234 - RNA, 23 nt, artificial
  Chemically synthesized
agccuguggauagacauuuguac

SEQ ID NO: 20235 - RNA, 23 nt, artificial
  Chemically synthesized
gccuguggauagacauuuguacu

SEQ ID NO: 20236 - RNA, 23 nt, artificial
  Chemically synthesized
ccuguggauagacauuuguacua

SEQ ID NO: 20237 - RNA, 23 nt, artificial
  Chemically synthesized
cuguggauagacauuuguacuaa

SEQ ID NO: 20238 - RNA, 23 nt, artificial
  Chemically synthesized
uguggauagacauuuguacuaac

SEQ ID NO: 20239 - RNA, 23 nt, artificial
  Chemically synthesized
acucuccugcucaaaaugcuuuu

SEQ ID NO: 20240 - RNA, 23 nt, artificial
  Chemically synthesized
gaacaaagccuuuaacuugacuu

SEQ ID NO: 20241 - RNA, 23 nt, artificial
  Chemically synthesized
aacaaagccuuuaacuugacuua

SEQ ID NO: 20242 - RNA, 23 nt, artificial
  Chemically synthesized
acaaagccuuuaacuugacuuag

SEQ ID NO: 20243 - RNA, 23 nt, artificial
  Chemically synthesized
caaagccuuuaacuugacuuagu

SEQ ID NO: 20244 - RNA, 23 nt, artificial
  Chemically synthesized
aaagccuuuaacuugacuuagug

SEQ ID NO: 20245 - RNA, 23 nt, artificial
  Chemically synthesized
gcauuaggccauuaagaugagca

SEQ ID NO: 20246 - RNA, 23 nt, artificial
  Chemically synthesized
cauuaggccauuaagaugagcac

SEQ ID NO: 20247 - RNA, 23 nt, artificial
  Chemically synthesized
auuaggccauuaagaugagcacc

SEQ ID NO: 20248 - RNA, 23 nt, artificial
  Chemically synthesized
uuaggccauuaagaugagcacca

SEQ ID NO: 20249 - RNA, 23 nt, artificial
  Chemically synthesized
uaggccauuaagaugagcaccaa

SEQ ID NO: 20250 - RNA, 23 nt, artificial
  Chemically synthesized
uugguggacuauuaaguauuuuu

SEQ ID NO: 20251 - RNA, 23 nt, artificial
  Chemically synthesized
ugguggacuauuaaguauuuuuu

SEQ ID NO: 20252 - RNA, 23 nt, artificial
  Chemically synthesized
cagcaaaaggucauagcuucuuc

SEQ ID NO: 20253 - RNA, 23 nt, artificial
  Chemically synthesized
agcaaaaggucauagcuucuucu

SEQ ID NO: 20254 - RNA, 23 nt, artificial
  Chemically synthesized
gcaaaaggucauagcuucuucua

SEQ ID NO: 20255 - RNA, 23 nt, artificial
  Chemically synthesized
caaaaggucauagcuucuucuau

SEQ ID NO: 20256 - RNA, 23 nt, artificial
  Chemically synthesized
aaaaggucauagcuucuucuauu

SEQ ID NO: 20257 - RNA, 23 nt, artificial
  Chemically synthesized
ucaaacacuaauugcauauacuc

SEQ ID NO: 20258 - RNA, 23 nt, artificial
  Chemically synthesized
caaacacuaauugcauauacuca

SEQ ID NO: 20259 - RNA, 23 nt, artificial
  Chemically synthesized
uaaaaaaccaagcaguauuuaca

SEQ ID NO: 20260 - RNA, 23 nt, artificial
  Chemically synthesized
aaaaaaccaagcaguauuuacag

SEQ ID NO: 20261 - RNA, 23 nt, artificial
  Chemically synthesized
aaaaaccaagcaguauuuacagc

SEQ ID NO: 20262 - RNA, 23 nt, artificial
  Chemically synthesized
aaaaccaagcaguauuuacagcc

SEQ ID NO: 20263 - RNA, 23 nt, artificial
  Chemically synthesized
aaaccaagcaguauuuacagcca

SEQ ID NO: 20264 - RNA, 23 nt, artificial
  Chemically synthesized
uggguacuuagcaugccacugca

SEQ ID NO: 20265 - RNA, 23 nt, artificial
  Chemically synthesized
auuuuaccauugcuauguauaag

SEQ ID NO: 20266 - RNA, 23 nt, artificial
  Chemically synthesized
uuuuaccauugcuauguauaagc

SEQ ID NO: 20267 - RNA, 23 nt, artificial
  Chemically synthesized
uuuaccauugcuauguauaagcu

SEQ ID NO: 20268 - RNA, 23 nt, artificial
  Chemically synthesized
uuaccauugcuauguauaagcug

SEQ ID NO: 20269 - RNA, 23 nt, artificial
  Chemically synthesized
ugaacuuucuguucugcuguguc

SEQ ID NO: 20270 - RNA, 23 nt, artificial
  Chemically synthesized
cugauauuucagcaaaaggucau

SEQ ID NO: 20271 - RNA, 23 nt, artificial
  Chemically synthesized
ugauauuucagcaaaaggucaua

SEQ ID NO: 20272 - RNA, 23 nt, artificial
  Chemically synthesized
ccucaauuccaaucccuuggagu

SEQ ID NO: 20273 - RNA, 23 nt, artificial
  Chemically synthesized
cucaauuccaaucccuuggaguu

SEQ ID NO: 20274 - RNA, 23 nt, artificial
  Chemically synthesized
guggcaaagcucuaguaauacuc

SEQ ID NO: 20275 - RNA, 23 nt, artificial
  Chemically synthesized
uggcaaagcucuaguaauacucu

SEQ ID NO: 20276 - RNA, 23 nt, artificial
  Chemically synthesized
ggcaaagcucuaguaauacucuc

SEQ ID NO: 20277 - RNA, 23 nt, artificial
  Chemically synthesized
aggauaguaguaaggagaaucuu

SEQ ID NO: 20278 - RNA, 23 nt, artificial
  Chemically synthesized
ggauaguaguaaggagaaucuua

SEQ ID NO: 20279 - RNA, 23 nt, artificial
  Chemically synthesized
gauaguaguaaggagaaucuuaa

SEQ ID NO: 20280 - RNA, 23 nt, artificial
  Chemically synthesized
auaguaguaaggagaaucuuaaa

SEQ ID NO: 20281 - RNA, 23 nt, artificial
  Chemically synthesized
ggccuuccaaguucugagucuca

SEQ ID NO: 20282 - RNA, 23 nt, artificial
  Chemically synthesized
gccuuccaaguucugagucucaa

SEQ ID NO: 20283 - RNA, 23 nt, artificial
  Chemically synthesized
ccuuccaaguucugagucucaac

SEQ ID NO: 20284 - RNA, 23 nt, artificial
  Chemically synthesized
cuuccaaguucugagucucaacu

SEQ ID NO: 20285 - RNA, 23 nt, artificial
  Chemically synthesized
uuccaaguucugagucucaacug

SEQ ID NO: 20286 - RNA, 23 nt, artificial
  Chemically synthesized
uugaugucagucacuugggcauu

SEQ ID NO: 20287 - RNA, 23 nt, artificial
  Chemically synthesized
aucuagcaacagacguaagaacc

SEQ ID NO: 20288 - RNA, 23 nt, artificial
  Chemically synthesized
ucuagcaacagacguaagaacca

SEQ ID NO: 20289 - RNA, 23 nt, artificial
  Chemically synthesized
cuagcaacagacguaagaaccag

SEQ ID NO: 20290 - RNA, 23 nt, artificial
  Chemically synthesized
uagcaacagacguaagaaccaga

SEQ ID NO: 20291 - RNA, 23 nt, artificial
  Chemically synthesized
agcaacagacguaagaaccagag

SEQ ID NO: 20292 - RNA, 23 nt, artificial
  Chemically synthesized
cuucucagaguuauaaacaaagu

SEQ ID NO: 20293 - RNA, 23 nt, artificial
  Chemically synthesized
uucucagaguuauaaacaaaguu

SEQ ID NO: 20294 - RNA, 23 nt, artificial
  Chemically synthesized
ucucagaguuauaaacaaaguuu

SEQ ID NO: 20295 - RNA, 23 nt, artificial
  Chemically synthesized
cucagaguuauaaacaaaguuua

SEQ ID NO: 20296 - RNA, 23 nt, artificial
  Chemically synthesized
uaacuugacuuagugucaugacu

SEQ ID NO: 20297 - RNA, 23 nt, artificial
  Chemically synthesized
aauaaaugauaaaauguacccag

SEQ ID NO: 20298 - RNA, 23 nt, artificial
  Chemically synthesized
auaaaugauaaaauguacccagu

SEQ ID NO: 20299 - RNA, 23 nt, artificial
  Chemically synthesized
uaaaugauaaaauguacccagua

SEQ ID NO: 20300 - RNA, 23 nt, artificial
  Chemically synthesized
aaaugauaaaauguacccaguaa

SEQ ID NO: 20301 - RNA, 23 nt, artificial
  Chemically synthesized
aaugauaaaauguacccaguaaa

SEQ ID NO: 20302 - RNA, 23 nt, artificial
  Chemically synthesized
uccucuuugcacuugguguugcu

SEQ ID NO: 20303 - RNA, 23 nt, artificial
  Chemically synthesized
uccaaucccuuggaguugauguc

SEQ ID NO: 20304 - RNA, 23 nt, artificial
  Chemically synthesized
ccaaucccuuggaguugauguca

SEQ ID NO: 20305 - RNA, 23 nt, artificial
  Chemically synthesized
caaucccuuggaguugaugucag

SEQ ID NO: 20306 - RNA, 23 nt, artificial
  Chemically synthesized
aaucccuuggaguugaugucagu

SEQ ID NO: 20307 - RNA, 23 nt, artificial
  Chemically synthesized
gacaugucacaaagcuacuuucu

SEQ ID NO: 20308 - RNA, 23 nt, artificial
  Chemically synthesized
acaugucacaaagcuacuuucuc

SEQ ID NO: 20309 - RNA, 23 nt, artificial
  Chemically synthesized
gggacauuauugaacauuuucgg

SEQ ID NO: 20310 - RNA, 23 nt, artificial
  Chemically synthesized
ggacauuauugaacauuuucggg

SEQ ID NO: 20311 - RNA, 23 nt, artificial
  Chemically synthesized
gacauuauugaacauuuucgggg

SEQ ID NO: 20312 - RNA, 23 nt, artificial
  Chemically synthesized
acauuauugaacauuuucggggg

SEQ ID NO: 20313 - RNA, 23 nt, artificial
  Chemically synthesized
cauuauugaacauuuucgggggu

SEQ ID NO: 20314 - RNA, 23 nt, artificial
  Chemically synthesized
aacuagauuuuaaacauccuugg

SEQ ID NO: 20315 - RNA, 23 nt, artificial
  Chemically synthesized
acuagauuuuaaacauccuugga

SEQ ID NO: 20316 - RNA, 23 nt, artificial
  Chemically synthesized
ucaugaugcaggccuuccaaguu

SEQ ID NO: 20317 - RNA, 23 nt, artificial
  Chemically synthesized
acaccauucuuucgaacaaagcc

SEQ ID NO: 20318 - RNA, 23 nt, artificial
  Chemically synthesized
ucccuuggaguugaugucaguca

SEQ ID NO: 20319 - RNA, 23 nt, artificial
  Chemically synthesized
cccuuggaguugaugucagucac

SEQ ID NO: 20320 - RNA, 23 nt, artificial
  Chemically synthesized
ccuuggaguugaugucagucacu

SEQ ID NO: 20321 - RNA, 23 nt, artificial
  Chemically synthesized
cuuggaguugaugucagucacuu

SEQ ID NO: 20322 - RNA, 23 nt, artificial
  Chemically synthesized
uuggaguugaugucagucacuug

SEQ ID NO: 20323 - RNA, 23 nt, artificial
  Chemically synthesized
uuaacuugacuuagugucaugac

SEQ ID NO: 20324 - RNA, 23 nt, artificial
  Chemically synthesized
auguuagaugccagagcauaauc

SEQ ID NO: 20325 - RNA, 23 nt, artificial
  Chemically synthesized
uguuagaugccagagcauaaucu

SEQ ID NO: 20326 - RNA, 23 nt, artificial
  Chemically synthesized
guuagaugccagagcauaaucuu

SEQ ID NO: 20327 - RNA, 23 nt, artificial
  Chemically synthesized
uuagaugccagagcauaaucuua

SEQ ID NO: 20328 - RNA, 23 nt, artificial
  Chemically synthesized
uagaugccagagcauaaucuuaa

SEQ ID NO: 20329 - RNA, 23 nt, artificial
  Chemically synthesized
guacaaagauuggcuuuuuugag

SEQ ID NO: 20330 - RNA, 23 nt, artificial
  Chemically synthesized
uacaaagauuggcuuuuuugaga

SEQ ID NO: 20331 - RNA, 23 nt, artificial
  Chemically synthesized
acaaagauuggcuuuuuugagau

SEQ ID NO: 20332 - RNA, 23 nt, artificial
  Chemically synthesized
caaagauuggcuuuuuugagauc

SEQ ID NO: 20333 - RNA, 23 nt, artificial
  Chemically synthesized
uauaauaugacaccaauaaacug

SEQ ID NO: 20334 - RNA, 23 nt, artificial
  Chemically synthesized
aggucuuugagguagagccuuau

SEQ ID NO: 20335 - RNA, 23 nt, artificial
  Chemically synthesized
uuggaggcagaaucaugagauau

SEQ ID NO: 20336 - RNA, 23 nt, artificial
  Chemically synthesized
uaucaucuuugauugcaaacaug

SEQ ID NO: 20337 - RNA, 23 nt, artificial
  Chemically synthesized
uuggcuuuuuugagaucuuuaau

SEQ ID NO: 20338 - RNA, 23 nt, artificial
  Chemically synthesized
caaaaugcuuuugaugccugaga

SEQ ID NO: 20339 - RNA, 23 nt, artificial
  Chemically synthesized
aaaaugcuuuugaugccugagaa

SEQ ID NO: 20340 - RNA, 23 nt, artificial
  Chemically synthesized
aaaugcuuuugaugccugagaaa

SEQ ID NO: 20341 - RNA, 23 nt, artificial
  Chemically synthesized
aaugcuuuugaugccugagaaag

SEQ ID NO: 20342 - RNA, 23 nt, artificial
  Chemically synthesized
gugucuuggacauugucauucuu

SEQ ID NO: 20343 - RNA, 23 nt, artificial
  Chemically synthesized
cuacagaaucauauguuagaugc

SEQ ID NO: 20344 - RNA, 23 nt, artificial
  Chemically synthesized
uacagaaucauauguuagaugcc

SEQ ID NO: 20345 - RNA, 23 nt, artificial
  Chemically synthesized
acagaaucauauguuagaugcca

SEQ ID NO: 20346 - RNA, 23 nt, artificial
  Chemically synthesized
cagcaugguuguugagcaauccu

SEQ ID NO: 20347 - RNA, 23 nt, artificial
  Chemically synthesized
uuugagccaguaaaaugcauaca

SEQ ID NO: 20348 - RNA, 23 nt, artificial
  Chemically synthesized
uugagccaguaaaaugcauacac

SEQ ID NO: 20349 - RNA, 23 nt, artificial
  Chemically synthesized
ugagccaguaaaaugcauacaca

SEQ ID NO: 20350 - RNA, 23 nt, artificial
  Chemically synthesized
uaacugauauuucagcaaaaggu

SEQ ID NO: 20351 - RNA, 23 nt, artificial
  Chemically synthesized
aacugauauuucagcaaaagguc

SEQ ID NO: 20352 - RNA, 23 nt, artificial
  Chemically synthesized
acugauauuucagcaaaagguca

SEQ ID NO: 20353 - RNA, 23 nt, artificial
  Chemically synthesized
aaaggucauagcuucuucuauug

SEQ ID NO: 20354 - RNA, 23 nt, artificial
  Chemically synthesized
cugcauacacuccuauuugggua

SEQ ID NO: 20355 - RNA, 23 nt, artificial
  Chemically synthesized
ugcauacacuccuauuuggguac

SEQ ID NO: 20356 - RNA, 23 nt, artificial
  Chemically synthesized
gagugugcauuccuugaugauuc

SEQ ID NO: 20357 - RNA, 23 nt, artificial
  Chemically synthesized
agugugcauuccuugaugauucc

SEQ ID NO: 20358 - RNA, 23 nt, artificial
  Chemically synthesized
gugugcauuccuugaugauucca

SEQ ID NO: 20359 - RNA, 23 nt, artificial
  Chemically synthesized
ugugcauuccuugaugauuccau

SEQ ID NO: 20360 - RNA, 23 nt, artificial
  Chemically synthesized
caguauuuacagccagcuauuaa

SEQ ID NO: 20361 - RNA, 23 nt, artificial
  Chemically synthesized
auuauugaacauuuucgggggug

SEQ ID NO: 20362 - RNA, 23 nt, artificial
  Chemically synthesized
ccugcucaaaaugcuuuugaugc

SEQ ID NO: 20363 - RNA, 23 nt, artificial
  Chemically synthesized
cugcucaaaaugcuuuugaugcc

SEQ ID NO: 20364 - RNA, 23 nt, artificial
  Chemically synthesized
ugcucaaaaugcuuuugaugccu

SEQ ID NO: 20365 - RNA, 23 nt, artificial
  Chemically synthesized
gcucaaaaugcuuuugaugccug

SEQ ID NO: 20366 - RNA, 23 nt, artificial
  Chemically synthesized
cucaaaaugcuuuugaugccuga

SEQ ID NO: 20367 - RNA, 23 nt, artificial
  Chemically synthesized
uacaugggacauuauugaacauu

SEQ ID NO: 20368 - RNA, 23 nt, artificial
  Chemically synthesized
acaugggacauuauugaacauuu

SEQ ID NO: 20369 - RNA, 23 nt, artificial
  Chemically synthesized
uccaaguucugagucucaacugu

SEQ ID NO: 20370 - RNA, 23 nt, artificial
  Chemically synthesized
ccaaguucugagucucaacugua

SEQ ID NO: 20371 - RNA, 23 nt, artificial
  Chemically synthesized
ugaauuuucugagucacuaguaa

SEQ ID NO: 20372 - RNA, 23 nt, artificial
  Chemically synthesized
agcaguuaguaucuccaaaccag

SEQ ID NO: 20373 - RNA, 23 nt, artificial
  Chemically synthesized
acauaaauaugaucuucucagag

SEQ ID NO: 20374 - RNA, 23 nt, artificial
  Chemically synthesized
cauaaauaugaucuucucagagu

SEQ ID NO: 20375 - RNA, 23 nt, artificial
  Chemically synthesized
auaaauaugaucuucucagaguu

SEQ ID NO: 20376 - RNA, 23 nt, artificial
  Chemically synthesized
uaaauaugaucuucucagaguua

SEQ ID NO: 20377 - RNA, 23 nt, artificial
  Chemically synthesized
aaauaugaucuucucagaguuau

SEQ ID NO: 20378 - RNA, 23 nt, artificial
  Chemically synthesized
aguaucuccaaaccaggcuagaa

SEQ ID NO: 20379 - RNA, 23 nt, artificial
  Chemically synthesized
guaucuccaaaccaggcuagaau

SEQ ID NO: 20380 - RNA, 23 nt, artificial
  Chemically synthesized
uaucuccaaaccaggcuagaauu

SEQ ID NO: 20381 - RNA, 23 nt, artificial
  Chemically synthesized
cugagagcaguuaguaucuccaa

SEQ ID NO: 20382 - RNA, 23 nt, artificial
  Chemically synthesized
ugagagcaguuaguaucuccaaa

SEQ ID NO: 20383 - RNA, 23 nt, artificial
  Chemically synthesized
gagagcaguuaguaucuccaaac

SEQ ID NO: 20384 - RNA, 23 nt, artificial
  Chemically synthesized
agagcaguuaguaucuccaaacc

SEQ ID NO: 20385 - RNA, 23 nt, artificial
  Chemically synthesized
ccagaugaugauuuuaccauugc

SEQ ID NO: 20386 - RNA, 23 nt, artificial
  Chemically synthesized
cagaugaugauuuuaccauugcu

SEQ ID NO: 20387 - RNA, 23 nt, artificial
  Chemically synthesized
agaugaugauuuuaccauugcua

SEQ ID NO: 20388 - RNA, 23 nt, artificial
  Chemically synthesized
gaugaugauuuuaccauugcuau

SEQ ID NO: 20389 - RNA, 23 nt, artificial
  Chemically synthesized
cacaaagcuacuuucucugagag

SEQ ID NO: 20390 - RNA, 23 nt, artificial
  Chemically synthesized
auaaaauguacccaguaaaaaac

SEQ ID NO: 20391 - RNA, 23 nt, artificial
  Chemically synthesized
agcaugccacugcauuuacucuu

SEQ ID NO: 20392 - RNA, 23 nt, artificial
  Chemically synthesized
gcaugccacugcauuuacucuug

SEQ ID NO: 20393 - RNA, 23 nt, artificial
  Chemically synthesized
caugccacugcauuuacucuuga

SEQ ID NO: 20394 - RNA, 23 nt, artificial
  Chemically synthesized
augccacugcauuuacucuugau

SEQ ID NO: 20395 - RNA, 23 nt, artificial
  Chemically synthesized
ccccagaagcgucuuugaacacc

SEQ ID NO: 20396 - RNA, 23 nt, artificial
  Chemically synthesized
cccagaagcgucuuugaacaccu

SEQ ID NO: 20397 - RNA, 23 nt, artificial
  Chemically synthesized
ccagaagcgucuuugaacaccug

SEQ ID NO: 20398 - RNA, 23 nt, artificial
  Chemically synthesized
cagaagcgucuuugaacaccugu

SEQ ID NO: 20399 - RNA, 23 nt, artificial
  Chemically synthesized
agaagcgucuuugaacaccugug

SEQ ID NO: 20400 - RNA, 23 nt, artificial
  Chemically synthesized
ugaugccugagaaagaaguaggu

SEQ ID NO: 20401 - RNA, 23 nt, artificial
  Chemically synthesized
gaugccugagaaagaaguaggua

SEQ ID NO: 20402 - RNA, 23 nt, artificial
  Chemically synthesized
augccugagaaagaaguagguag

SEQ ID NO: 20403 - RNA, 23 nt, artificial
  Chemically synthesized
ugagugugcauuccuugaugauu

SEQ ID NO: 20404 - RNA, 23 nt, artificial
  Chemically synthesized
ugguuccagguaucugcuucagu

SEQ ID NO: 20405 - RNA, 23 nt, artificial
  Chemically synthesized
gguuccagguaucugcuucaguu

SEQ ID NO: 20406 - RNA, 23 nt, artificial
  Chemically synthesized
guuccagguaucugcuucaguuu

SEQ ID NO: 20407 - RNA, 23 nt, artificial
  Chemically synthesized
uuccagguaucugcuucaguuua

SEQ ID NO: 20408 - RNA, 23 nt, artificial
  Chemically synthesized
uccagguaucugcuucaguuuau

SEQ ID NO: 20409 - RNA, 23 nt, artificial
  Chemically synthesized
cuacaaauauguuggcucuucag

SEQ ID NO: 20410 - RNA, 23 nt, artificial
  Chemically synthesized
cuguucaguaacugauauuucag

SEQ ID NO: 20411 - RNA, 23 nt, artificial
  Chemically synthesized
uguucaguaacugauauuucagc

SEQ ID NO: 20412 - RNA, 23 nt, artificial
  Chemically synthesized
guucaguaacugauauuucagca

SEQ ID NO: 20413 - RNA, 23 nt, artificial
  Chemically synthesized
uucaguaacugauauuucagcaa

SEQ ID NO: 20414 - RNA, 23 nt, artificial
  Chemically synthesized
ucaguaacugauauuucagcaaa

SEQ ID NO: 20415 - RNA, 23 nt, artificial
  Chemically synthesized
uaaucuagcaacagacguaagaa

SEQ ID NO: 20416 - RNA, 23 nt, artificial
  Chemically synthesized
uacgcuucuuucuuuccaugaag

SEQ ID NO: 20417 - RNA, 23 nt, artificial
  Chemically synthesized
uauguuagaugccagagcauaau

SEQ ID NO: 20418 - RNA, 23 nt, artificial
  Chemically synthesized
gaugaaguuuguuuucccaacua

SEQ ID NO: 20419 - RNA, 23 nt, artificial
  Chemically synthesized
augaaguuuguuuucccaacuag

SEQ ID NO: 20420 - RNA, 23 nt, artificial
  Chemically synthesized
agucucaacuguaguaacagucu

SEQ ID NO: 20421 - RNA, 23 nt, artificial
  Chemically synthesized
gucucaacuguaguaacagucuu

SEQ ID NO: 20422 - RNA, 23 nt, artificial
  Chemically synthesized
ucucaacuguaguaacagucuuc

SEQ ID NO: 20423 - RNA, 23 nt, artificial
  Chemically synthesized
aaacauccuuggaggcagaauca

SEQ ID NO: 20424 - RNA, 23 nt, artificial
  Chemically synthesized
aacauccuuggaggcagaaucau

SEQ ID NO: 20425 - RNA, 23 nt, artificial
  Chemically synthesized
acauccuuggaggcagaaucaug

SEQ ID NO: 20426 - RNA, 23 nt, artificial
  Chemically synthesized
aaaaauggagagguggcaaagcu

SEQ ID NO: 20427 - RNA, 23 nt, artificial
  Chemically synthesized
aaaauggagagguggcaaagcuc

SEQ ID NO: 20428 - RNA, 23 nt, artificial
  Chemically synthesized
aaauggagagguggcaaagcucu

SEQ ID NO: 20429 - RNA, 23 nt, artificial
  Chemically synthesized
aauggagagguggcaaagcucua

SEQ ID NO: 20430 - RNA, 23 nt, artificial
  Chemically synthesized
auggagagguggcaaagcucuag

SEQ ID NO: 20431 - RNA, 23 nt, artificial
  Chemically synthesized
agagguaauuuagaggcaaagug

SEQ ID NO: 20432 - RNA, 23 nt, artificial
  Chemically synthesized
auguuggcucuucagcgcuaaua

SEQ ID NO: 20433 - RNA, 23 nt, artificial
  Chemically synthesized
acccaguaaaaaaccaagcagua

SEQ ID NO: 20434 - RNA, 23 nt, artificial
  Chemically synthesized
caaaaauggagagguggcaaagc

SEQ ID NO: 20435 - RNA, 23 nt, artificial
  Chemically synthesized
augacaagagcaauuccuaaauc

SEQ ID NO: 20436 - RNA, 23 nt, artificial
  Chemically synthesized
cucuccugcucaaaaugcuuuug

SEQ ID NO: 20437 - RNA, 23 nt, artificial
  Chemically synthesized
ucuccugcucaaaaugcuuuuga

SEQ ID NO: 20438 - RNA, 23 nt, artificial
  Chemically synthesized
guagagccuuauuuaaauucugc

SEQ ID NO: 20439 - RNA, 23 nt, artificial
  Chemically synthesized
uagagccuuauuuaaauucugca

SEQ ID NO: 20440 - RNA, 23 nt, artificial
  Chemically synthesized
agagccuuauuuaaauucugcac

SEQ ID NO: 20441 - RNA, 23 nt, artificial
  Chemically synthesized
gagccuuauuuaaauucugcacu

SEQ ID NO: 20442 - RNA, 23 nt, artificial
  Chemically synthesized
agccuuauuuaaauucugcacuc

SEQ ID NO: 20443 - RNA, 23 nt, artificial
  Chemically synthesized
cugaauuuucucugcaagaguac

SEQ ID NO: 20444 - RNA, 23 nt, artificial
  Chemically synthesized
aggcaaaguggccugccuguuca

SEQ ID NO: 20445 - RNA, 23 nt, artificial
  Chemically synthesized
ggcaaaguggccugccuguucag

SEQ ID NO: 20446 - RNA, 23 nt, artificial
  Chemically synthesized
gcaaaguggccugccuguucagu

SEQ ID NO: 20447 - RNA, 23 nt, artificial
  Chemically synthesized
caaaguggccugccuguucagua

SEQ ID NO: 20448 - RNA, 23 nt, artificial
  Chemically synthesized
aaaguggccugccuguucaguaa

SEQ ID NO: 20449 - RNA, 23 nt, artificial
  Chemically synthesized
uggacauugucauucuugaucuc

SEQ ID NO: 20450 - RNA, 23 nt, artificial
  Chemically synthesized
uccaugaaguugaugccaauuac

SEQ ID NO: 20451 - RNA, 23 nt, artificial
  Chemically synthesized
ccaugaaguugaugccaauuacg

SEQ ID NO: 20452 - RNA, 23 nt, artificial
  Chemically synthesized
caugaaguugaugccaauuacga

SEQ ID NO: 20453 - RNA, 23 nt, artificial
  Chemically synthesized
augaaguugaugccaauuacgaa

SEQ ID NO: 20454 - RNA, 23 nt, artificial
  Chemically synthesized
cuccagcaauaguggugauauau

SEQ ID NO: 20455 - RNA, 23 nt, artificial
  Chemically synthesized
uccagcaauaguggugauauauu

SEQ ID NO: 20456 - RNA, 23 nt, artificial
  Chemically synthesized
ccagcaauaguggugauauauuu

SEQ ID NO: 20457 - RNA, 23 nt, artificial
  Chemically synthesized
cagcaauaguggugauauauuua

SEQ ID NO: 20458 - RNA, 23 nt, artificial
  Chemically synthesized
agcaauaguggugauauauuuac

SEQ ID NO: 20459 - RNA, 23 nt, artificial
  Chemically synthesized
caugggacauuauugaacauuuu

SEQ ID NO: 20460 - RNA, 23 nt, artificial
  Chemically synthesized
augggacauuauugaacauuuuc

SEQ ID NO: 20461 - RNA, 23 nt, artificial
  Chemically synthesized
ugggacauuauugaacauuuucg

SEQ ID NO: 20462 - RNA, 23 nt, artificial
  Chemically synthesized
gugguuccagguaucugcuucag

SEQ ID NO: 20463 - RNA, 23 nt, artificial
  Chemically synthesized
gggguuagccuguggauagacau

SEQ ID NO: 20464 - RNA, 23 nt, artificial
  Chemically synthesized
ggguuagccuguggauagacauu

SEQ ID NO: 20465 - RNA, 23 nt, artificial
  Chemically synthesized
gguuagccuguggauagacauuu

SEQ ID NO: 20466 - RNA, 23 nt, artificial
  Chemically synthesized
guuagccuguggauagacauuug

SEQ ID NO: 20467 - RNA, 23 nt, artificial
  Chemically synthesized
uuagccuguggauagacauuugu

SEQ ID NO: 20468 - RNA, 23 nt, artificial
  Chemically synthesized
ugaaguuuguuuucccaacuaga

SEQ ID NO: 20469 - RNA, 23 nt, artificial
  Chemically synthesized
ggcauuaacacuuuuggacgaua

SEQ ID NO: 20470 - RNA, 23 nt, artificial
  Chemically synthesized
gcauuaacacuuuuggacgauaa

SEQ ID NO: 20471 - RNA, 23 nt, artificial
  Chemically synthesized
cauuaacacuuuuggacgauaau

SEQ ID NO: 20472 - RNA, 23 nt, artificial
  Chemically synthesized
ggcuagaauuucuaagggcaguc

SEQ ID NO: 20473 - RNA, 23 nt, artificial
  Chemically synthesized
gcuagaauuucuaagggcagucu

SEQ ID NO: 20474 - RNA, 23 nt, artificial
  Chemically synthesized
cuagaauuucuaagggcagucuu

SEQ ID NO: 20475 - RNA, 23 nt, artificial
  Chemically synthesized
aagcaguauuuacagccagcuau

SEQ ID NO: 20476 - RNA, 23 nt, artificial
  Chemically synthesized
agcaguauuuacagccagcuauu

SEQ ID NO: 20477 - RNA, 23 nt, artificial
  Chemically synthesized
gcaguauuuacagccagcuauua

SEQ ID NO: 20478 - RNA, 23 nt, artificial
  Chemically synthesized
uuuggacgauaaucuagcaacag

SEQ ID NO: 20479 - RNA, 23 nt, artificial
  Chemically synthesized
uuggacgauaaucuagcaacaga

SEQ ID NO: 20480 - RNA, 23 nt, artificial
  Chemically synthesized
uggacgauaaucuagcaacagac

SEQ ID NO: 20481 - RNA, 23 nt, artificial
  Chemically synthesized
gaaucuuuucaaacacuaauugc

SEQ ID NO: 20482 - RNA, 23 nt, artificial
  Chemically synthesized
aaucuuuucaaacacuaauugca

SEQ ID NO: 20483 - RNA, 23 nt, artificial
  Chemically synthesized
aucuuuucaaacacuaauugcau

SEQ ID NO: 20484 - RNA, 23 nt, artificial
  Chemically synthesized
ucuuuucaaacacuaauugcaua

SEQ ID NO: 20485 - RNA, 23 nt, artificial
  Chemically synthesized
cuuuucaaacacuaauugcauau

SEQ ID NO: 20486 - RNA, 23 nt, artificial
  Chemically synthesized
ugcuggugagugugcauuccuug

SEQ ID NO: 20487 - RNA, 23 nt, artificial
  Chemically synthesized
gcauacacuccuauuuggguacu

SEQ ID NO: 20488 - RNA, 23 nt, artificial
  Chemically synthesized
cauacacuccuauuuggguacuu

SEQ ID NO: 20489 - RNA, 23 nt, artificial
  Chemically synthesized
auacacuccuauuuggguacuua

SEQ ID NO: 20490 - RNA, 23 nt, artificial
  Chemically synthesized
uacacuccuauuuggguacuuag

SEQ ID NO: 20491 - RNA, 23 nt, artificial
  Chemically synthesized
gauagacauuuguacuaacauac

SEQ ID NO: 20492 - RNA, 23 nt, artificial
  Chemically synthesized
auagacauuuguacuaacauaca

SEQ ID NO: 20493 - RNA, 23 nt, artificial
  Chemically synthesized
uagacauuuguacuaacauacac

SEQ ID NO: 20494 - RNA, 23 nt, artificial
  Chemically synthesized
agacauuuguacuaacauacacu

SEQ ID NO: 20495 - RNA, 23 nt, artificial
  Chemically synthesized
aauaugaucuucucagaguuaua

SEQ ID NO: 20496 - RNA, 23 nt, artificial
  Chemically synthesized
auaugaucuucucagaguuauaa

SEQ ID NO: 20497 - RNA, 23 nt, artificial
  Chemically synthesized
acgcuucuuucuuuccaugaagu

SEQ ID NO: 20498 - RNA, 23 nt, artificial
  Chemically synthesized
cgcuucuuucuuuccaugaaguu

SEQ ID NO: 20499 - RNA, 23 nt, artificial
  Chemically synthesized
gcuucuuucuuuccaugaaguug

SEQ ID NO: 20500 - RNA, 23 nt, artificial
  Chemically synthesized
gagucucaacuguaguaacaguc

SEQ ID NO: 20501 - RNA, 23 nt, artificial
  Chemically synthesized
uagugucaugacuccagcaauag

SEQ ID NO: 20502 - RNA, 23 nt, artificial
  Chemically synthesized
uagcaugccacugcauuuacucu

SEQ ID NO: 20503 - RNA, 23 nt, artificial
  Chemically synthesized
guaaaaaaccaagcaguauuuac

SEQ ID NO: 20504 - RNA, 23 nt, artificial
  Chemically synthesized
ucagcaaaaggucauagcuucuu

SEQ ID NO: 20505 - RNA, 23 nt, artificial
  Chemically synthesized
ggcagaauuggccaucaugaugc

SEQ ID NO: 20506 - RNA, 23 nt, artificial
  Chemically synthesized
gcagaauuggccaucaugaugca

SEQ ID NO: 20507 - RNA, 23 nt, artificial
  Chemically synthesized
cagaauuggccaucaugaugcag

SEQ ID NO: 20508 - RNA, 23 nt, artificial
  Chemically synthesized
guuuucccaacuagauuuuaaac

SEQ ID NO: 20509 - RNA, 23 nt, artificial
  Chemically synthesized
uuuucccaacuagauuuuaaaca

SEQ ID NO: 20510 - RNA, 23 nt, artificial
  Chemically synthesized
uuucccaacuagauuuuaaacau

SEQ ID NO: 20511 - RNA, 23 nt, artificial
  Chemically synthesized
uucccaacuagauuuuaaacauc

SEQ ID NO: 20512 - RNA, 23 nt, artificial
  Chemically synthesized
ucccaacuagauuuuaaacaucc

SEQ ID NO: 20513 - RNA, 23 nt, artificial
  Chemically synthesized
uacgaagcaguugaacuuucugu

SEQ ID NO: 20514 - RNA, 23 nt, artificial
  Chemically synthesized
cugcacucaaauacauauacuuu

SEQ ID NO: 20515 - RNA, 23 nt, artificial
  Chemically synthesized
ugcacucaaauacauauacuuua

SEQ ID NO: 20516 - RNA, 23 nt, artificial
  Chemically synthesized
auuucugaaguuugaauuuucug

SEQ ID NO: 20517 - RNA, 23 nt, artificial
  Chemically synthesized
uuucugaaguuugaauuuucuga

SEQ ID NO: 20518 - RNA, 23 nt, artificial
  Chemically synthesized
uucugaaguuugaauuuucugag

SEQ ID NO: 20519 - RNA, 23 nt, artificial
  Chemically synthesized
ucugaaguuugaauuuucugagu

SEQ ID NO: 20520 - RNA, 23 nt, artificial
  Chemically synthesized
cugaaguuugaauuuucugaguc

SEQ ID NO: 20521 - RNA, 23 nt, artificial
  Chemically synthesized
cauacacugauuacauucauacu

SEQ ID NO: 20522 - RNA, 23 nt, artificial
  Chemically synthesized
auacacugauuacauucauacua

SEQ ID NO: 20523 - RNA, 23 nt, artificial
  Chemically synthesized
uacacugauuacauucauacuac

SEQ ID NO: 20524 - RNA, 23 nt, artificial
  Chemically synthesized
acacugauuacauucauacuaca

SEQ ID NO: 20525 - RNA, 23 nt, artificial
  Chemically synthesized
uucuucuauugauucauagagug

SEQ ID NO: 20526 - RNA, 23 nt, artificial
  Chemically synthesized
ucuucuauugauucauagagugg

SEQ ID NO: 20527 - RNA, 23 nt, artificial
  Chemically synthesized
gaguacaaagauuggcuuuuuug

SEQ ID NO: 20528 - RNA, 23 nt, artificial
  Chemically synthesized
aguacaaagauuggcuuuuuuga

SEQ ID NO: 20529 - RNA, 23 nt, artificial
  Chemically synthesized
gcaacagacguaagaaccagagg

SEQ ID NO: 20530 - RNA, 23 nt, artificial
  Chemically synthesized
caacagacguaagaaccagaggu

SEQ ID NO: 20531 - RNA, 23 nt, artificial
  Chemically synthesized
aacagacguaagaaccagaggua

SEQ ID NO: 20532 - RNA, 23 nt, artificial
  Chemically synthesized
acagacguaagaaccagagguag

SEQ ID NO: 20533 - RNA, 23 nt, artificial
  Chemically synthesized
aucccuuggaguugaugucaguc

SEQ ID NO: 20534 - RNA, 23 nt, artificial
  Chemically synthesized
uacucuugaugaaguuuguuuuc

SEQ ID NO: 20535 - RNA, 23 nt, artificial
  Chemically synthesized
uaagcugccauuuguagcagguu

SEQ ID NO: 20536 - RNA, 23 nt, artificial
  Chemically synthesized
acguaagaaccagagguaggagg

SEQ ID NO: 20537 - RNA, 23 nt, artificial
  Chemically synthesized
cguaagaaccagagguaggaggg

SEQ ID NO: 20538 - RNA, 23 nt, artificial
  Chemically synthesized
guaagaaccagagguaggagggu

SEQ ID NO: 20539 - RNA, 23 nt, artificial
  Chemically synthesized
uaagaaccagagguaggaggguc

SEQ ID NO: 20540 - RNA, 23 nt, artificial
  Chemically synthesized
aagaaccagagguaggagggucc

SEQ ID NO: 20541 - RNA, 23 nt, artificial
  Chemically synthesized
uugccuuuugguggacuauuaag

SEQ ID NO: 20542 - RNA, 23 nt, artificial
  Chemically synthesized
cgaacaaagccuuuaacuugacu

SEQ ID NO: 20543 - RNA, 23 nt, artificial
  Chemically synthesized
acucuagaccaagcuuuggauuu

SEQ ID NO: 20544 - RNA, 23 nt, artificial
  Chemically synthesized
cucuagaccaagcuuuggauuuc

SEQ ID NO: 20545 - RNA, 23 nt, artificial
  Chemically synthesized
ucuagaccaagcuuuggauuuca

SEQ ID NO: 20546 - RNA, 23 nt, artificial
  Chemically synthesized
cuagaccaagcuuuggauuucau

SEQ ID NO: 20547 - RNA, 23 nt, artificial
  Chemically synthesized
uagaccaagcuuuggauuucauu

SEQ ID NO: 20548 - RNA, 23 nt, artificial
  Chemically synthesized
aaccaagcaguauuuacagccag

SEQ ID NO: 20549 - RNA, 23 nt, artificial
  Chemically synthesized
ucaaaaugcuuuugaugccugag

SEQ ID NO: 20550 - RNA, 23 nt, artificial
  Chemically synthesized
uuuaucaucuuugauugcaaaca

SEQ ID NO: 20551 - RNA, 23 nt, artificial
  Chemically synthesized
uuaucaucuuugauugcaaacau

SEQ ID NO: 20552 - RNA, 23 nt, artificial
  Chemically synthesized
agugucaugacuccagcaauagu

SEQ ID NO: 20553 - RNA, 23 nt, artificial
  Chemically synthesized
uaggugguuccagguaucugcuu

SEQ ID NO: 20554 - RNA, 23 nt, artificial
  Chemically synthesized
agcgucuuugaacaccugugugu

SEQ ID NO: 20555 - RNA, 23 nt, artificial
  Chemically synthesized
gcgucuuugaacaccuguguguc

SEQ ID NO: 20556 - RNA, 23 nt, artificial
  Chemically synthesized
cgucuuugaacaccuguguguca

SEQ ID NO: 20557 - RNA, 23 nt, artificial
  Chemically synthesized
cuccugcucaaaaugcuuuugau

SEQ ID NO: 20558 - RNA, 23 nt, artificial
  Chemically synthesized
uccugcucaaaaugcuuuugaug

SEQ ID NO: 20559 - RNA, 23 nt, artificial
  Chemically synthesized
ugaugccaauuacgaagcaguug

SEQ ID NO: 20560 - RNA, 23 nt, artificial
  Chemically synthesized
gaugccaauuacgaagcaguuga

SEQ ID NO: 20561 - RNA, 23 nt, artificial
  Chemically synthesized
augccaauuacgaagcaguugaa

SEQ ID NO: 20562 - RNA, 23 nt, artificial
  Chemically synthesized
gguacuuagcaugccacugcauu

SEQ ID NO: 20563 - RNA, 23 nt, artificial
  Chemically synthesized
ucugagucucaacuguaguaaca

SEQ ID NO: 20564 - RNA, 23 nt, artificial
  Chemically synthesized
uucucugcaagaguacaaagauu

SEQ ID NO: 20565 - RNA, 23 nt, artificial
  Chemically synthesized
uacucagaacugaauuuguuguu

SEQ ID NO: 20566 - RNA, 23 nt, artificial
  Chemically synthesized
aaucuagcaacagacguaagaac

SEQ ID NO: 20567 - RNA, 23 nt, artificial
  Chemically synthesized
ggugcauuaggccauuaagauga

SEQ ID NO: 20568 - RNA, 23 nt, artificial
  Chemically synthesized
gugcauuaggccauuaagaugag

SEQ ID NO: 20569 - RNA, 23 nt, artificial
  Chemically synthesized
ugcauuaggccauuaagaugagc

SEQ ID NO: 20570 - RNA, 23 nt, artificial
  Chemically synthesized
cagccaagucacucguaaaccgc

SEQ ID NO: 20571 - RNA, 23 nt, artificial
  Chemically synthesized
agccaagucacucguaaaccgcu

SEQ ID NO: 20572 - RNA, 23 nt, artificial
  Chemically synthesized
gccaagucacucguaaaccgcuu

SEQ ID NO: 20573 - RNA, 23 nt, artificial
  Chemically synthesized
ccaagucacucguaaaccgcuuc

SEQ ID NO: 20574 - RNA, 23 nt, artificial
  Chemically synthesized
ggggugcauuaggccauuaagau

SEQ ID NO: 20575 - RNA, 23 nt, artificial
  Chemically synthesized
gggugcauuaggccauuaagaug

SEQ ID NO: 20576 - RNA, 23 nt, artificial
  Chemically synthesized
ugucauucuugaucucaucuauu

SEQ ID NO: 20577 - RNA, 23 nt, artificial
  Chemically synthesized
uggcagaauuggccaucaugaug

SEQ ID NO: 20578 - RNA, 23 nt, artificial
  Chemically synthesized
gaagcgucuuugaacaccugugu

SEQ ID NO: 20579 - RNA, 23 nt, artificial
  Chemically synthesized
aagcgucuuugaacaccugugug

SEQ ID NO: 20580 - RNA, 23 nt, artificial
  Chemically synthesized
ugagcaauccuccgaagugaaag

SEQ ID NO: 20581 - RNA, 23 nt, artificial
  Chemically synthesized
gugcaaaggucuuugagguagag

SEQ ID NO: 20582 - RNA, 23 nt, artificial
  Chemically synthesized
uuuuaucaucuuugauugcaaac

SEQ ID NO: 20583 - RNA, 23 nt, artificial
  Chemically synthesized
caccaauaaacugugcaaagguc

SEQ ID NO: 20584 - RNA, 23 nt, artificial
  Chemically synthesized
uaugaucuucucagaguuauaaa

SEQ ID NO: 20585 - RNA, 23 nt, artificial
  Chemically synthesized
aucuccaaaccaggcuagaauuu

SEQ ID NO: 20586 - RNA, 23 nt, artificial
  Chemically synthesized
ucuccaaaccaggcuagaauuuc

SEQ ID NO: 20587 - RNA, 23 nt, artificial
  Chemically synthesized
cuccaaaccaggcuagaauuucu

SEQ ID NO: 20588 - RNA, 23 nt, artificial
  Chemically synthesized
uccaaaccaggcuagaauuucua

SEQ ID NO: 20589 - RNA, 23 nt, artificial
  Chemically synthesized
caaaccaggcuagaauuucuaag

SEQ ID NO: 20590 - RNA, 23 nt, artificial
  Chemically synthesized
aaaccaggcuagaauuucuaagg

SEQ ID NO: 20591 - RNA, 23 nt, artificial
  Chemically synthesized
aaggucauagcuucuucuauuga

SEQ ID NO: 20592 - RNA, 23 nt, artificial
  Chemically synthesized
aggucauagcuucuucuauugau

SEQ ID NO: 20593 - RNA, 23 nt, artificial
  Chemically synthesized
ggucauagcuucuucuauugauu

SEQ ID NO: 20594 - RNA, 23 nt, artificial
  Chemically synthesized
uaguaguaaggagaaucuuaaau

SEQ ID NO: 20595 - RNA, 23 nt, artificial
  Chemically synthesized
aguaguaaggagaaucuuaaauc

SEQ ID NO: 20596 - RNA, 23 nt, artificial
  Chemically synthesized
accaagcaguauuuacagccagc

SEQ ID NO: 20597 - RNA, 23 nt, artificial
  Chemically synthesized
ccaagcaguauuuacagccagcu

SEQ ID NO: 20598 - RNA, 23 nt, artificial
  Chemically synthesized
acucagaacugaauuuguuguuu

SEQ ID NO: 20599 - RNA, 23 nt, artificial
  Chemically synthesized
cucagaacugaauuuguuguuuu

SEQ ID NO: 20600 - RNA, 23 nt, artificial
  Chemically synthesized
ucagaacugaauuuguuguuuuu

SEQ ID NO: 20601 - RNA, 23 nt, artificial
  Chemically synthesized
agaccaagcuuuggauuucauuu

SEQ ID NO: 20602 - RNA, 23 nt, artificial
  Chemically synthesized
ggguacuuagcaugccacugcau

SEQ ID NO: 20603 - RNA, 23 nt, artificial
  Chemically synthesized
auaauuccaaacacaaggggcaa

SEQ ID NO: 20604 - RNA, 23 nt, artificial
  Chemically synthesized
uaaacguaggauaguaguaagga

SEQ ID NO: 20605 - RNA, 23 nt, artificial
  Chemically synthesized
aaacguaggauaguaguaaggag

SEQ ID NO: 20606 - RNA, 23 nt, artificial
  Chemically synthesized
uggcuuuuuugagaucuuuaauc

SEQ ID NO: 20607 - RNA, 23 nt, artificial
  Chemically synthesized
cugagucucaacuguaguaacag

SEQ ID NO: 20608 - RNA, 23 nt, Artificial
  Chemically synthesized
ugagucucaacuguaguaacagu

SEQ ID NO: 20609 - RNA, 19 nt, artificial
  Chemically synthesized
gagggagaagcaugaaaaa

SEQ ID NO: 20610 - RNA, 19 nt, artificial
  Chemically synthesized
ggauuuaagggauggaaaa

SEQ ID NO: 20611 - RNA, 19 nt, artificial
  Chemically synthesized
cguuuuucggcuuauauaa

SEQ ID NO: 20612 - RNA, 19 nt, artificial
  Chemically synthesized
cagugagggucuucuuaca

SEQ ID NO: 20613 - RNA, 19 nt, artificial
  Chemically synthesized
ggauggaaaaggaagacua

SEQ ID NO: 20614 - RNA, 19 nt, artificial
  Chemically synthesized
uguuuaugagccagacaaa

SEQ ID NO: 20615 - RNA, 19 nt, artificial
  Chemically synthesized
agagggagaagcaugaaaa

SEQ ID NO: 20616 - RNA, 19 nt, artificial
  Chemically synthesized
aaugcuuccugacaaucaa

SEQ ID NO: 20617 - RNA, 19 nt, artificial
  Chemically synthesized
aggauuuaagggauggaaa

SEQ ID NO: 20618 - RNA, 19 nt, artificial
  Chemically synthesized
gagaccacaggguucaaaa

SEQ ID NO: 20619 - RNA, 19 nt, artificial
  Chemically synthesized
guucuucccuguccaaccu

SEQ ID NO: 20620 - RNA, 19 nt, artificial
  Chemically synthesized
gagaagaaguaaaaccguu

SEQ ID NO: 20621 - RNA, 19 nt, artificial
  Chemically synthesized
uccugacaaucaacucuaa

SEQ ID NO: 20622 - RNA, 19 nt, artificial
  Chemically synthesized
gaguauuuaggcagauuga

SEQ ID NO: 20623 - RNA, 19 nt, artificial
  Chemically synthesized
aggacugagaagaaguaaa

SEQ ID NO: 20624 - RNA, 19 nt, artificial
  Chemically synthesized
ggagaagcaugaaaaagca

SEQ ID NO: 20625 - RNA, 19 nt, artificial
  Chemically synthesized
ucuucccuguccaaccucu

SEQ ID NO: 20626 - RNA, 19 nt, artificial
  Chemically synthesized
ucaucuuuggagaagcaaa

SEQ ID NO: 20627 - RNA, 19 nt, artificial
  Chemically synthesized
ggccuugugaucaaugaaa

SEQ ID NO: 20628 - RNA, 19 nt, artificial
  Chemically synthesized
cauuugaggucaaguaaga

SEQ ID NO: 20629 - RNA, 19 nt, artificial
  Chemically synthesized
gauuuugaaugcuuccuga

SEQ ID NO: 20630 - RNA, 19 nt, artificial
  Chemically synthesized
gggucuucuuacaugcauu

SEQ ID NO: 20631 - RNA, 19 nt, artificial
  Chemically synthesized
gagccaucggugaaacuaa

SEQ ID NO: 20632 - RNA, 19 nt, artificial
  Chemically synthesized
gccugugucuccuugugau

SEQ ID NO: 20633 - RNA, 19 nt, artificial
  Chemically synthesized
acaggcaaguccaacucaa

SEQ ID NO: 20634 - RNA, 19 nt, artificial
  Chemically synthesized
caugccucuggaaugggaa

SEQ ID NO: 20635 - RNA, 19 nt, artificial
  Chemically synthesized
ggaaaauauggguugcauu

SEQ ID NO: 20636 - RNA, 19 nt, artificial
  Chemically synthesized
gguugcauuuggucaagau

SEQ ID NO: 20637 - RNA, 19 nt, artificial
  Chemically synthesized
gcuugcauaauaagcuaaa

SEQ ID NO: 20638 - RNA, 19 nt, artificial
  Chemically synthesized
ggguggccuugugaucaau

SEQ ID NO: 20639 - RNA, 19 nt, artificial
  Chemically synthesized
cauugauugucagcuacua

SEQ ID NO: 20640 - RNA, 19 nt, artificial
  Chemically synthesized
aguucuucccuguccaacc

SEQ ID NO: 20641 - RNA, 19 nt, artificial
  Chemically synthesized
agcccuucaauuacccaua

SEQ ID NO: 20642 - RNA, 19 nt, artificial
  Chemically synthesized
cccuucaauuacccauauc

SEQ ID NO: 20643 - RNA, 19 nt, artificial
  Chemically synthesized
cuuucuggagugaaguaua

SEQ ID NO: 20644 - RNA, 19 nt, artificial
  Chemically synthesized
ccuucaauuacccauaucc

SEQ ID NO: 20645 - RNA, 19 nt, artificial
  Chemically synthesized
cgagaauguuguauucagu

SEQ ID NO: 20646 - RNA, 19 nt, artificial
  Chemically synthesized
agaugugcauuuuugugaa

SEQ ID NO: 20647 - RNA, 19 nt, artificial
  Chemically synthesized
ccucuugagcagucagcaa

SEQ ID NO: 20648 - RNA, 19 nt, artificial
  Chemically synthesized
gaggaauaugacggaagaa

SEQ ID NO: 20649 - RNA, 19 nt, artificial
  Chemically synthesized
cacaguucuucccugucca

SEQ ID NO: 20650 - RNA, 19 nt, artificial
  Chemically synthesized
gcagcccuucaauuaccca

SEQ ID NO: 20651 - RNA, 19 nt, artificial
  Chemically synthesized
ugaaaaggacaccuuuuaa

SEQ ID NO: 20652 - RNA, 19 nt, artificial
  Chemically synthesized
cuuuuaacucaccucucaa

SEQ ID NO: 20653 - RNA, 19 nt, artificial
  Chemically synthesized
caucuuuggagaagcaaau

SEQ ID NO: 20654 - RNA, 19 nt, artificial
  Chemically synthesized
cuucaauuacccauauccc

SEQ ID NO: 20655 - RNA, 19 nt, artificial
  Chemically synthesized
auguguauuuccagugcaa

SEQ ID NO: 20656 - RNA, 19 nt, artificial
  Chemically synthesized
gccucuacaggacugagaa

SEQ ID NO: 20657 - RNA, 19 nt, artificial
  Chemically synthesized
agacguuuuucggcuuaua

SEQ ID NO: 20658 - RNA, 19 nt, artificial
  Chemically synthesized
caucggugaaacuaacaga

SEQ ID NO: 20659 - RNA, 19 nt, artificial
  Chemically synthesized
agaagaaguaaaaccguuu

SEQ ID NO: 20660 - RNA, 19 nt, artificial
  Chemically synthesized
uggccuugugaucaaugaa

SEQ ID NO: 20661 - RNA, 19 nt, artificial
  Chemically synthesized
gaggauuuaagggauggaa

SEQ ID NO: 20662 - RNA, 19 nt, artificial
  Chemically synthesized
ccuuuuaacucaccucuca

SEQ ID NO: 20663 - RNA, 19 nt, artificial
  Chemically synthesized
ccagguguucuacacucau

SEQ ID NO: 20664 - RNA, 19 nt, artificial
  Chemically synthesized
acguuuuucggcuuauaua

SEQ ID NO: 20665 - RNA, 19 nt, artificial
  Chemically synthesized
cugagaguauuuaggcaga

SEQ ID NO: 20666 - RNA, 19 nt, artificial
  Chemically synthesized
gcuccucaacucaccuaau

SEQ ID NO: 20667 - RNA, 19 nt, artificial
  Chemically synthesized
acagcaucaucuuuggaga

SEQ ID NO: 20668 - RNA, 19 nt, artificial
  Chemically synthesized
cuggagugaaguauaagaa

SEQ ID NO: 20669 - RNA, 19 nt, artificial
  Chemically synthesized
ugagaagaaguaaaaccgu

SEQ ID NO: 20670 - RNA, 19 nt, artificial
  Chemically synthesized
aaaaaaaggagcugaggaa

SEQ ID NO: 20671 - RNA, 19 nt, artificial
  Chemically synthesized
acaguucuucccuguccaa

SEQ ID NO: 20672 - RNA, 19 nt, artificial
  Chemically synthesized
cagcaucuucacuucuaaa

SEQ ID NO: 20673 - RNA, 19 nt, artificial
  Chemically synthesized
cagcaucaucuuuggagaa

SEQ ID NO: 20674 - RNA, 19 nt, artificial
  Chemically synthesized
caggacugagaagaaguaa

SEQ ID NO: 20675 - RNA, 19 nt, artificial
  Chemically synthesized
aagacuagaggcuugcaua

SEQ ID NO: 20676 - RNA, 19 nt, artificial
  Chemically synthesized
cagcccuucaauuacccau

SEQ ID NO: 20677 - RNA, 19 nt, artificial
  Chemically synthesized
acaaggucuacaugaggaa

SEQ ID NO: 20678 - RNA, 19 nt, artificial
  Chemically synthesized
cauuuaacaggcaagucca

SEQ ID NO: 20679 - RNA, 19 nt, artificial
  Chemically synthesized
ucaaguaagaagacaugaa

SEQ ID NO: 20680 - RNA, 19 nt, artificial
  Chemically synthesized
ccugcuuucuggagugaag

SEQ ID NO: 20681 - RNA, 19 nt, artificial
  Chemically synthesized
ggaagaacauagaacucug

SEQ ID NO: 20682 - RNA, 19 nt, artificial
  Chemically synthesized
aacagauaagcaagagaga

SEQ ID NO: 20683 - RNA, 19 nt, artificial
  Chemically synthesized
gauggaaaaggaagacuag

SEQ ID NO: 20684 - RNA, 19 nt, artificial
  Chemically synthesized
ugcauuugaggucaaguaa

SEQ ID NO: 20685 - RNA, 19 nt, artificial
  Chemically synthesized
aagagggagaagcaugaaa

SEQ ID NO: 20686 - RNA, 19 nt, artificial
  Chemically synthesized
cggcuuauauaagcucuaa

SEQ ID NO: 20687 - RNA, 19 nt, artificial
  Chemically synthesized
aggaaaguggcccauuuaa

SEQ ID NO: 20688 - RNA, 19 nt, artificial
  Chemically synthesized
gggucaaucuugcaacaac

SEQ ID NO: 20689 - RNA, 19 nt, artificial
  Chemically synthesized
aggcuugcauaauaagcua

SEQ ID NO: 20690 - RNA, 19 nt, artificial
  Chemically synthesized
aagggauggaaaaggaaga

SEQ ID NO: 20691 - RNA, 19 nt, artificial
  Chemically synthesized
uuaagggauggaaaaggaa

SEQ ID NO: 20692 - RNA, 19 nt, artificial
  Chemically synthesized
ggauguuucagcucuucca

SEQ ID NO: 20693 - RNA, 19 nt, artificial
  Chemically synthesized
gaaaaaaaggagcugagga

SEQ ID NO: 20694 - RNA, 19 nt, artificial
  Chemically synthesized
guggccuugugaucaauga

SEQ ID NO: 20695 - RNA, 19 nt, artificial
  Chemically synthesized
cccugaagaagagagggaa

SEQ ID NO: 20696 - RNA, 19 nt, artificial
  Chemically synthesized
ucuacaugaggaacucuaa

SEQ ID NO: 20697 - RNA, 19 nt, artificial
  Chemically synthesized
acaggacugagaagaagua

SEQ ID NO: 20698 - RNA, 19 nt, artificial
  Chemically synthesized
cagacaaauggaggaauau

SEQ ID NO: 20699 - RNA, 19 nt, artificial
  Chemically synthesized
agaggcugaaagaggccaa

SEQ ID NO: 20700 - RNA, 19 nt, artificial
  Chemically synthesized
aggaucuggugaugaugga

SEQ ID NO: 20701 - RNA, 19 nt, artificial
  Chemically synthesized
cuuagcuauggaaacucua

SEQ ID NO: 20702 - RNA, 19 nt, artificial
  Chemically synthesized
ucuggucaauuuugaggaa

SEQ ID NO: 20703 - RNA, 19 nt, artificial
  Chemically synthesized
cacucaucuuagugccuga

SEQ ID NO: 20704 - RNA, 19 nt, artificial
  Chemically synthesized
ccuugugaucaaugaaacu

SEQ ID NO: 20705 - RNA, 19 nt, artificial
  Chemically synthesized
ggaagacuagaggcuugca

SEQ ID NO: 20706 - RNA, 19 nt, artificial
  Chemically synthesized
cugagcucucucuggucaa

SEQ ID NO: 20707 - RNA, 19 nt, artificial
  Chemically synthesized
aaaaaaggagcugaggaaa

SEQ ID NO: 20708 - RNA, 19 nt, artificial
  Chemically synthesized
caugguugugaccugagga

SEQ ID NO: 20709 - RNA, 19 nt, artificial
  Chemically synthesized
ggguugcauuuggucaaga

SEQ ID NO: 20710 - RNA, 19 nt, artificial
  Chemically synthesized
ccugacaaucaacucuaau

SEQ ID NO: 20711 - RNA, 19 nt, artificial
  Chemically synthesized
aagaagagagggaaccaca

SEQ ID NO: 20712 - RNA, 19 nt, artificial
  Chemically synthesized
guagauauugugaaguaca

SEQ ID NO: 20713 - RNA, 19 nt, artificial
  Chemically synthesized
acuaaagagagaauguaga

SEQ ID NO: 20714 - RNA, 19 nt, artificial
  Chemically synthesized
augugaagagggagaagca

SEQ ID NO: 20715 - RNA, 19 nt, artificial
  Chemically synthesized
agaccacaggguucaaaau

SEQ ID NO: 20716 - RNA, 19 nt, artificial
  Chemically synthesized
caaucuuaccagugcugau

SEQ ID NO: 20717 - RNA, 19 nt, artificial
  Chemically synthesized
gacguuuuucggcuuauau

SEQ ID NO: 20718 - RNA, 19 nt, artificial
  Chemically synthesized
guuuaugagccagacaaau

SEQ ID NO: 20719 - RNA, 19 nt, artificial
  Chemically synthesized
gagccagacaaauggagga

SEQ ID NO: 20720 - RNA, 19 nt, artificial
  Chemically synthesized
cuaacagauaagcaagaga

SEQ ID NO: 20721 - RNA, 19 nt, artificial
  Chemically synthesized
gccaugugaagagggagaa

SEQ ID NO: 20722 - RNA, 19 nt, artificial
  Chemically synthesized
aggguggccuugugaucaa

SEQ ID NO: 20723 - RNA, 19 nt, artificial
  Chemically synthesized
caggcaaguccaacucaag

SEQ ID NO: 20724 - RNA, 19 nt, artificial
  Chemically synthesized
gaugugcauuuuugugaaa

SEQ ID NO: 20725 - RNA, 19 nt, artificial
  Chemically synthesized
caugcagcagcccuucaau

SEQ ID NO: 20726 - RNA, 19 nt, artificial
  Chemically synthesized
agcucuuccaccuacagaa

SEQ ID NO: 20727 - RNA, 19 nt, artificial
  Chemically synthesized
ccgagaauguuguauucag

SEQ ID NO: 20728 - RNA, 19 nt, artificial
  Chemically synthesized
cccaggaucuggugaugau

SEQ ID NO: 20729 - RNA, 19 nt, artificial
  Chemically synthesized
agcuaaagaggcugaaaga

SEQ ID NO: 20730 - RNA, 19 nt, artificial
  Chemically synthesized
ucuggagugaaguauaaga

SEQ ID NO: 20731 - RNA, 19 nt, artificial
  Chemically synthesized
agaagagagggaaccacag

SEQ ID NO: 20732 - RNA, 19 nt, artificial
  Chemically synthesized
ucauuucauuccuaacaca

SEQ ID NO: 20733 - RNA, 19 nt, artificial
  Chemically synthesized
auuuaacaggcaaguccaa

SEQ ID NO: 20734 - RNA, 19 nt, artificial
  Chemically synthesized
cuuagugccugagaguauu

SEQ ID NO: 20735 - RNA, 19 nt, artificial
  Chemically synthesized
ggugaaacuaacagauaag

SEQ ID NO: 20736 - RNA, 19 nt, artificial
  Chemically synthesized
gauugaaaaggacaccuuu

SEQ ID NO: 20737 - RNA, 19 nt, artificial
  Chemically synthesized
accugaggauuuaagggau

SEQ ID NO: 20738 - RNA, 19 nt, artificial
  Chemically synthesized
ccagaugcacacagcauca

SEQ ID NO: 20739 - RNA, 19 nt, artificial
  Chemically synthesized
gacggaagaacauagaacu

SEQ ID NO: 20740 - RNA, 19 nt, artificial
  Chemically synthesized
ugggaagacaccuauggaa

SEQ ID NO: 20741 - RNA, 19 nt, artificial
  Chemically synthesized
gcauuugaggucaaguaag

SEQ ID NO: 20742 - RNA, 19 nt, artificial
  Chemically synthesized
cugggcuguacuuuguaua

SEQ ID NO: 20743 - RNA, 19 nt, artificial
  Chemically synthesized
auugauugucagcuacuaa

SEQ ID NO: 20744 - RNA, 19 nt, artificial
  Chemically synthesized
caggguucaaaaugucugu

SEQ ID NO: 20745 - RNA, 19 nt, artificial
  Chemically synthesized
uggcccauuuaacaggcaa

SEQ ID NO: 20746 - RNA, 19 nt, artificial
  Chemically synthesized
ucuugagcagucagcaaca

SEQ ID NO: 20747 - RNA, 19 nt, artificial
  Chemically synthesized
cacaaggucuacaugagga

SEQ ID NO: 20748 - RNA, 19 nt, artificial
  Chemically synthesized
aaucauugauugucagcua

SEQ ID NO: 20749 - RNA, 19 nt, artificial
  Chemically synthesized
guguauuuccagugcaauu

SEQ ID NO: 20750 - RNA, 19 nt, artificial
  Chemically synthesized
uuugaaugcuuccugacaa

SEQ ID NO: 20751 - RNA, 19 nt, artificial
  Chemically synthesized
augacggaagaacauagaa

SEQ ID NO: 20752 - RNA, 19 nt, artificial
  Chemically synthesized
gcuuauauaagcucuaaga

SEQ ID NO: 20753 - RNA, 19 nt, artificial
  Chemically synthesized
cagcauguguauuuccagu

SEQ ID NO: 20754 - RNA, 19 nt, artificial
  Chemically synthesized
gagggucuucuuacaugca

SEQ ID NO: 20755 - RNA, 19 nt, artificial
  Chemically synthesized
aaaugucuguagcuccuca

SEQ ID NO: 20756 - RNA, 19 nt, artificial
  Chemically synthesized
gaaaauauggguugcauuu

SEQ ID NO: 20757 - RNA, 19 nt, artificial
  Chemically synthesized
auuugaggucaaguaagaa

SEQ ID NO: 20758 - RNA, 19 nt, artificial
  Chemically synthesized
aggcagauugaaaaggaca

SEQ ID NO: 20759 - RNA, 19 nt, artificial
  Chemically synthesized
gccugagaguauuuaggca

SEQ ID NO: 20760 - RNA, 19 nt, artificial
  Chemically synthesized
ugauguuuuucaugguucu

SEQ ID NO: 20761 - RNA, 19 nt, artificial
  Chemically synthesized
uugugaccugaggauuuaa

SEQ ID NO: 20762 - RNA, 19 nt, artificial
  Chemically synthesized
aggaaaauauggguugcau

SEQ ID NO: 20763 - RNA, 19 nt, artificial
  Chemically synthesized
gacugucuuucagauacau

SEQ ID NO: 20764 - RNA, 19 nt, artificial
  Chemically synthesized
accuaauguuuaugagcca

SEQ ID NO: 20765 - RNA, 19 nt, artificial
  Chemically synthesized
cauguguauuuccagugca

SEQ ID NO: 20766 - RNA, 19 nt, artificial
  Chemically synthesized
aggucaaguaagaagacau

SEQ ID NO: 20767 - RNA, 19 nt, artificial
  Chemically synthesized
caggcaccgagaauguugu

SEQ ID NO: 20768 - RNA, 19 nt, artificial
  Chemically synthesized
auggguugcauuuggucaa

SEQ ID NO: 20769 - RNA, 19 nt, artificial
  Chemically synthesized
aggcaccgagaauguugua

SEQ ID NO: 20770 - RNA, 19 nt, artificial
  Chemically synthesized
agaaggguggccuugugau

SEQ ID NO: 20771 - RNA, 19 nt, artificial
  Chemically synthesized
ggucaauuuugaggaaucu

SEQ ID NO: 20772 - RNA, 19 nt, artificial
  Chemically synthesized
ccuaacacagcauguguau

SEQ ID NO: 20773 - RNA, 19 nt, artificial
  Chemically synthesized
caaaaugucuguagcuccu

SEQ ID NO: 20774 - RNA, 19 nt, artificial
  Chemically synthesized
acaugaggaacucuaagua

SEQ ID NO: 20775 - RNA, 19 nt, artificial
  Chemically synthesized
ccugaaaaaaaggagcuga

SEQ ID NO: 20776 - RNA, 19 nt, artificial
  Chemically synthesized
uguagaugugcauuuuugu

SEQ ID NO: 20777 - RNA, 19 nt, artificial
  Chemically synthesized
gcagaacuccgagagucua

SEQ ID NO: 20778 - RNA, 19 nt, artificial
  Chemically synthesized
gacuaaagagagaauguag

SEQ ID NO: 20779 - RNA, 19 nt, artificial
  Chemically synthesized
agccaucggugaaacuaac

SEQ ID NO: 20780 - RNA, 19 nt, artificial
  Chemically synthesized
uaagcuaaagaggcugaaa

SEQ ID NO: 20781 - RNA, 19 nt, artificial
  Chemically synthesized
aaucaacucuaauagugcu

SEQ ID NO: 20782 - RNA, 19 nt, artificial
  Chemically synthesized
ccaugugaagagggagaag

SEQ ID NO: 20783 - RNA, 19 nt, artificial
  Chemically synthesized
aauggaggaauaugacgga

SEQ ID NO: 20784 - RNA, 19 nt, artificial
  Chemically synthesized
gccaucggugaaacuaaca

SEQ ID NO: 20785 - RNA, 19 nt, artificial
  Chemically synthesized
gaagacuagaggcuugcau

SEQ ID NO: 20786 - RNA, 19 nt, artificial
  Chemically synthesized
gccuugugaucaaugaaac

SEQ ID NO: 20787 - RNA, 19 nt, artificial
  Chemically synthesized
uguuuuucaugguucuggu

SEQ ID NO: 20788 - RNA, 19 nt, artificial
  Chemically synthesized
aguggaccuugagaccaca

SEQ ID NO: 20789 - RNA, 19 nt, artificial
  Chemically synthesized
agcuauggaaacucuauaa

SEQ ID NO: 20790 - RNA, 19 nt, artificial
  Chemically synthesized
ugugaagagggagaagcau

SEQ ID NO: 20791 - RNA, 19 nt, artificial
  Chemically synthesized
gaaaaagcagcuaccaggu

SEQ ID NO: 20792 - RNA, 19 nt, artificial
  Chemically synthesized
ucuacaggacugagaagaa

SEQ ID NO: 20793 - RNA, 19 nt, artificial
  Chemically synthesized
aaugucuguagcuccucaa

SEQ ID NO: 20794 - RNA, 19 nt, artificial
  Chemically synthesized
auguuuaugagccagacaa

SEQ ID NO: 20795 - RNA, 19 nt, artificial
  Chemically synthesized
uuguuacaggcaccgagaa

SEQ ID NO: 20796 - RNA, 19 nt, artificial
  Chemically synthesized
uugaaugcuuccugacaau

SEQ ID NO: 20797 - RNA, 19 nt, artificial
  Chemically synthesized
gaagaaguaaaaccguuug

SEQ ID NO: 20798 - RNA, 19 nt, artificial
  Chemically synthesized
caucuuagugccugagagu

SEQ ID NO: 20799 - RNA, 19 nt, artificial
  Chemically synthesized
ccugaagaagagagggaac

SEQ ID NO: 20800 - RNA, 19 nt, artificial
  Chemically synthesized
ugcauuuggucaagauuuu

SEQ ID NO: 20801 - RNA, 19 nt, artificial
  Chemically synthesized
agguguuucccuuagcuau

SEQ ID NO: 20802 - RNA, 19 nt, artificial
  Chemically synthesized
ggauucuuuccauuaugau

SEQ ID NO: 20803 - RNA, 19 nt, artificial
  Chemically synthesized
ugugaaguacauauuagga

SEQ ID NO: 20804 - RNA, 19 nt, artificial
  Chemically synthesized
ugaagaagagagggaacca

SEQ ID NO: 20805 - RNA, 19 nt, artificial
  Chemically synthesized
cuuugggauucuuuccauu

SEQ ID NO: 20806 - RNA, 19 nt, artificial
  Chemically synthesized
guugcauuuggucaagauu

SEQ ID NO: 20807 - RNA, 19 nt, artificial
  Chemically synthesized
agcucucucuggucaauuu

SEQ ID NO: 20808 - RNA, 19 nt, artificial
  Chemically synthesized
ugggcuguacuuuguauau

SEQ ID NO: 20809 - RNA, 19 nt, artificial
  Chemically synthesized
ucucucuggucaauuuuga

SEQ ID NO: 20810 - RNA, 19 nt, artificial
  Chemically synthesized
aagagagggaaccacagca

SEQ ID NO: 20811 - RNA, 19 nt, artificial
  Chemically synthesized
gucuccuugugauguuuuu

SEQ ID NO: 20812 - RNA, 19 nt, artificial
  Chemically synthesized
acugggcuguacuuuguau

SEQ ID NO: 20813 - RNA, 19 nt, artificial
  Chemically synthesized
uggaaugggaagacaccua

SEQ ID NO: 20814 - RNA, 19 nt, artificial
  Chemically synthesized
uggagugaaguauaagaag

SEQ ID NO: 20815 - RNA, 19 nt, artificial
  Chemically synthesized
aacugggcuguacuuugua

SEQ ID NO: 20816 - RNA, 19 nt, artificial
  Chemically synthesized
ugauucuuuguuacaggca

SEQ ID NO: 20817 - RNA, 19 nt, artificial
  Chemically synthesized
gaaacucuauaagagagau

SEQ ID NO: 20818 - RNA, 19 nt, artificial
  Chemically synthesized
guuucagcucuuccaccua

SEQ ID NO: 20819 - RNA, 19 nt, artificial
  Chemically synthesized
ggcuugcauaauaagcuaa

SEQ ID NO: 20820 - RNA, 19 nt, artificial
  Chemically synthesized
gguucaaaaugucuguagc

SEQ ID NO: 20821 - RNA, 19 nt, artificial
  Chemically synthesized
ccuuagcuauggaaacucu

SEQ ID NO: 20822 - RNA, 19 nt, artificial
  Chemically synthesized
ccucaacucaccuaauguu

SEQ ID NO: 20823 - RNA, 19 nt, artificial
  Chemically synthesized
gcauaauaagcuaaagagg

SEQ ID NO: 20824 - RNA, 19 nt, artificial
  Chemically synthesized
uccuugugauguuuuucau

SEQ ID NO: 20825 - RNA, 19 nt, artificial
  Chemically synthesized
gaggcugaaagaggccaau

SEQ ID NO: 20826 - RNA, 19 nt, artificial
  Chemically synthesized
agucuaccagccagaugca

SEQ ID NO: 20827 - RNA, 19 nt, artificial
  Chemically synthesized
caguguucaaucuuaccag

SEQ ID NO: 20828 - RNA, 19 nt, artificial
  Chemically synthesized
agagaagcacuuugggauu

SEQ ID NO: 20829 - RNA, 19 nt, artificial
  Chemically synthesized
augggaagacaccuaugga

SEQ ID NO: 20830 - RNA, 19 nt, artificial
  Chemically synthesized
cuguacuuuguauauucca

SEQ ID NO: 20831 - RNA, 19 nt, artificial
  Chemically synthesized
ugaaccaaguggaccuuga

SEQ ID NO: 20832 - RNA, 19 nt, artificial
  Chemically synthesized
cugagaagaaguaaaaccg

SEQ ID NO: 20833 - RNA, 19 nt, artificial
  Chemically synthesized
gggaagaugaugagcuacu

SEQ ID NO: 20834 - RNA, 19 nt, artificial
  Chemically synthesized
ugcuuucuggagugaagua

SEQ ID NO: 20835 - RNA, 19 nt, artificial
  Chemically synthesized
auggaaaaggaagacuaga

SEQ ID NO: 20836 - RNA, 19 nt, artificial
  Chemically synthesized
ucaacucuaauagugcuua

SEQ ID NO: 20837 - RNA, 19 nt, artificial
  Chemically synthesized
gcaugaaaaagcagcuacc

SEQ ID NO: 20838 - RNA, 19 nt, artificial
  Chemically synthesized
ucggcuuauauaagcucua

SEQ ID NO: 20839 - RNA, 19 nt, artificial
  Chemically synthesized
ggaaaaggaagacuagagg

SEQ ID NO: 20840 - RNA, 19 nt, artificial
  Chemically synthesized
cuaauguuuaugagccaga

SEQ ID NO: 20841 - RNA, 19 nt, artificial
  Chemically synthesized
gucuacaugaggaacucua

SEQ ID NO: 20842 - RNA, 19 nt, artificial
  Chemically synthesized
acuucuaaaugcauauccu

SEQ ID NO: 20843 - RNA, 19 nt, artificial
  Chemically synthesized
ggaaacucuauaagagaga

SEQ ID NO: 20844 - RNA, 19 nt, artificial
  Chemically synthesized
uguuacaggcaccgagaau

SEQ ID NO: 20845 - RNA, 19 nt, artificial
  Chemically synthesized
cuucuuacaugcauuugag

SEQ ID NO: 20846 - RNA, 19 nt, artificial
  Chemically synthesized
gaagcaugaaaaagcagcu

SEQ ID NO: 20847 - RNA, 19 nt, artificial
  Chemically synthesized
gagguguuucccuuagcua

SEQ ID NO: 20848 - RNA, 19 nt, artificial
  Chemically synthesized
aguguucaaucuuaccagu

SEQ ID NO: 20849 - RNA, 19 nt, artificial
  Chemically synthesized
ugaggauuuaagggaugga

SEQ ID NO: 20850 - RNA, 19 nt, artificial
  Chemically synthesized
uuuguuacaggcaccgaga

SEQ ID NO: 20851 - RNA, 19 nt, artificial
  Chemically synthesized
ggcagauugaaaaggacac

SEQ ID NO: 20852 - RNA, 19 nt, artificial
  Chemically synthesized
ucuucuuacaugcauuuga

SEQ ID NO: 20853 - RNA, 19 nt, artificial
  Chemically synthesized
cuuuguuacaggcaccgag

SEQ ID NO: 20854 - RNA, 19 nt, artificial
  Chemically synthesized
uacaugcauuugaggucaa

SEQ ID NO: 20855 - RNA, 19 nt, artificial
  Chemically synthesized
ccucuggaaugggaagaca

SEQ ID NO: 20856 - RNA, 19 nt, artificial
  Chemically synthesized
aaguccaacucaaggucca

SEQ ID NO: 20857 - RNA, 19 nt, artificial
  Chemically synthesized
agggucuucuuacaugcau

SEQ ID NO: 20858 - RNA, 19 nt, artificial
  Chemically synthesized
ucuuagugccugagaguau

SEQ ID NO: 20859 - RNA, 19 nt, artificial
  Chemically synthesized
ucaugguucugguugccuu

SEQ ID NO: 20860 - RNA, 19 nt, artificial
  Chemically synthesized
uaugacggaagaacauaga

SEQ ID NO: 20861 - RNA, 19 nt, artificial
  Chemically synthesized
gacuagaggcuugcauaau

SEQ ID NO: 20862 - RNA, 19 nt, artificial
  Chemically synthesized
aaaugcauauccugagcca

SEQ ID NO: 20863 - RNA, 19 nt, artificial
  Chemically synthesized
uuaggcagauugaaaagga

SEQ ID NO: 20864 - RNA, 19 nt, artificial
  Chemically synthesized
cuauaagagagauccagcu

SEQ ID NO: 20865 - RNA, 19 nt, artificial
  Chemically synthesized
accagguguucuacacuca

SEQ ID NO: 20866 - RNA, 19 nt, artificial
  Chemically synthesized
aguaagaagacaugaacca

SEQ ID NO: 20867 - RNA, 19 nt, artificial
  Chemically synthesized
uguguauuuccagugcaau

SEQ ID NO: 20868 - RNA, 19 nt, artificial
  Chemically synthesized
ccacaggguucaaaauguc

SEQ ID NO: 20869 - RNA, 19 nt, artificial
  Chemically synthesized
aagagaagcacuuugggau

SEQ ID NO: 20870 - RNA, 19 nt, artificial
  Chemically synthesized
cugaaaaaaaggagcugag

SEQ ID NO: 20871 - RNA, 19 nt, artificial
  Chemically synthesized
gucagcuacuaaugauguu

SEQ ID NO: 20872 - RNA, 19 nt, artificial
  Chemically synthesized
gaaugggaagacaccuaug

SEQ ID NO: 20873 - RNA, 19 nt, artificial
  Chemically synthesized
uaagcaagagagauguuuu

SEQ ID NO: 20874 - RNA, 19 nt, artificial
  Chemically synthesized
auggaggaauaugacggaa

SEQ ID NO: 20875 - RNA, 19 nt, artificial
  Chemically synthesized
caugaaaaagcagcuacca

SEQ ID NO: 20876 - RNA, 19 nt, artificial
  Chemically synthesized
ugguugccuugguaggauu

SEQ ID NO: 20877 - RNA, 19 nt, artificial
  Chemically synthesized
cuauggaauuguccugcuu

SEQ ID NO: 20878 - RNA, 19 nt, artificial
  Chemically synthesized
augcauuugaggucaagua

SEQ ID NO: 20879 - RNA, 19 nt, artificial
  Chemically synthesized
gaggaaucucagacguuuu

SEQ ID NO: 20880 - RNA, 19 nt, artificial
  Chemically synthesized
gacucauuucauuccuaac

SEQ ID NO: 20881 - RNA, 19 nt, artificial
  Chemically synthesized
uugaggucaaguaagaaga

SEQ ID NO: 20882 - RNA, 19 nt, artificial
  Chemically synthesized
uauccugagccaucgguga

SEQ ID NO: 20883 - RNA, 19 nt, artificial
  Chemically synthesized
ugagaguauuuaggcagau

SEQ ID NO: 20884 - RNA, 19 nt, artificial
  Chemically synthesized
cuugacaccucagccucua

SEQ ID NO: 20885 - RNA, 19 nt, artificial
  Chemically synthesized
cuuucagauacaugguugu

SEQ ID NO: 20886 - RNA, 19 nt, artificial
  Chemically synthesized
ugaaacuaacagauaagca

SEQ ID NO: 20887 - RNA, 19 nt, artificial
  Chemically synthesized
cacacagcaucaucuuugg

SEQ ID NO: 20888 - RNA, 19 nt, artificial
  Chemically synthesized
gauucuuuguuacaggcac

SEQ ID NO: 20889 - RNA, 19 nt, artificial
  Chemically synthesized
ggaucuggugaugauggag

SEQ ID NO: 20890 - RNA, 19 nt, artificial
  Chemically synthesized
caugcauuugaggucaagu

SEQ ID NO: 20891 - RNA, 19 nt, artificial
  Chemically synthesized
gacugagaagaaguaaaac

SEQ ID NO: 20892 - RNA, 19 nt, artificial
  Chemically synthesized
acagauaagcaagagagau

SEQ ID NO: 20893 - RNA, 19 nt, artificial
  Chemically synthesized
uaagagaagcacuuuggga

SEQ ID NO: 20894 - RNA, 19 nt, artificial
  Chemically synthesized
uucagugagggucuucuua

SEQ ID NO: 20895 - RNA, 19 nt, artificial
  Chemically synthesized
ggagugaaguauaagaagg

SEQ ID NO: 20896 - RNA, 19 nt, artificial
  Chemically synthesized
gcucucucuggucaauuuu

SEQ ID NO: 20897 - RNA, 19 nt, artificial
  Chemically synthesized
ucaucuuagugccugagag

SEQ ID NO: 20898 - RNA, 19 nt, artificial
  Chemically synthesized
guauaagaaggguggccuu

SEQ ID NO: 20899 - RNA, 19 nt, artificial
  Chemically synthesized
cacagcauguguauuucca

SEQ ID NO: 20900 - RNA, 19 nt, artificial
  Chemically synthesized
cacaggguucaaaaugucu

SEQ ID NO: 20901 - RNA, 19 nt, artificial
  Chemically synthesized
aagaaggguggccuuguga

SEQ ID NO: 20902 - RNA, 19 nt, artificial
  Chemically synthesized
uuucauuccuaacacagca

SEQ ID NO: 20903 - RNA, 19 nt, artificial
  Chemically synthesized
gcaguguucaaucuuacca

SEQ ID NO: 20904 - RNA, 19 nt, artificial
  Chemically synthesized
agcuccucaacucaccuaa

SEQ ID NO: 20905 - RNA, 19 nt, artificial
  Chemically synthesized
gaauguuguauucagugag

SEQ ID NO: 20906 - RNA, 19 nt, artificial
  Chemically synthesized
aauguuuaugagccagaca

SEQ ID NO: 20907 - RNA, 19 nt, artificial
  Chemically synthesized
cucuggucaauuuugagga

SEQ ID NO: 20908 - RNA, 19 nt, artificial
  Chemically synthesized
guucaaucuuaccagugcu

SEQ ID NO: 20909 - RNA, 19 nt, artificial
  Chemically synthesized
aguccaacucaagguccau

SEQ ID NO: 20910 - RNA, 19 nt, artificial
  Chemically synthesized
uaggcagauugaaaaggac

SEQ ID NO: 20911 - RNA, 19 nt, artificial
  Chemically synthesized
gaaccaaguggaccuugag

SEQ ID NO: 20912 - RNA, 19 nt, artificial
  Chemically synthesized
aaccaaguggaccuugaga

SEQ ID NO: 20913 - RNA, 19 nt, artificial
  Chemically synthesized
uugauugucagcuacuaau

SEQ ID NO: 20914 - RNA, 19 nt, artificial
  Chemically synthesized
ucuuaccagugcugaucau

SEQ ID NO: 20915 - RNA, 19 nt, artificial
  Chemically synthesized
uaugauucuuuguuacagg

SEQ ID NO: 20916 - RNA, 19 nt, artificial
  Chemically synthesized
gaccugaggauuuaaggga

SEQ ID NO: 20917 - RNA, 19 nt, artificial
  Chemically synthesized
agguccaugccucuggaau

SEQ ID NO: 20918 - RNA, 19 nt, artificial
  Chemically synthesized
ccuugugauguuuuucaug

SEQ ID NO: 20919 - RNA, 19 nt, artificial
  Chemically synthesized
uguucuacacucaucuuag

SEQ ID NO: 20920 - RNA, 19 nt, artificial
  Chemically synthesized
aauaugacggaagaacaua

SEQ ID NO: 20921 - RNA, 19 nt, artificial
  Chemically synthesized
aagacaugaaccaagugga

SEQ ID NO: 20922 - RNA, 19 nt, artificial
  Chemically synthesized
acaaauggaggaauaugac

SEQ ID NO: 20923 - RNA, 19 nt, artificial
  Chemically synthesized
uggagaagcaaauaggcca

SEQ ID NO: 20924 - RNA, 19 nt, artificial
  Chemically synthesized
auaagcuaaagaggcugaa

SEQ ID NO: 20925 - RNA, 19 nt, artificial
  Chemically synthesized
uguuguauucagugagggu

SEQ ID NO: 20926 - RNA, 19 nt, artificial
  Chemically synthesized
acagcauguguauuuccag

SEQ ID NO: 20927 - RNA, 19 nt, artificial
  Chemically synthesized
agugagggucuucuuacau

SEQ ID NO: 20928 - RNA, 19 nt, artificial
  Chemically synthesized
uacagaaggagcuggcaga

SEQ ID NO: 20929 - RNA, 19 nt, artificial
  Chemically synthesized
ucagauacaugguugugac

SEQ ID NO: 20930 - RNA, 19 nt, artificial
  Chemically synthesized
ucuucacuucuaaaugcau

SEQ ID NO: 20931 - RNA, 19 nt, artificial
  Chemically synthesized
gagagucuaccagccagau

SEQ ID NO: 20932 - RNA, 19 nt, artificial
  Chemically synthesized
guuucccuuagcuauggaa

SEQ ID NO: 20933 - RNA, 19 nt, artificial
  Chemically synthesized
agaaggccuggucaaagga

SEQ ID NO: 20934 - RNA, 19 nt, artificial
  Chemically synthesized
cugagccaucggugaaacu

SEQ ID NO: 20935 - RNA, 19 nt, artificial
  Chemically synthesized
agauaagcaagagagaugu

SEQ ID NO: 20936 - RNA, 19 nt, artificial
  Chemically synthesized
aggaaucucagacguuuuu

SEQ ID NO: 20937 - RNA, 19 nt, artificial
  Chemically synthesized
aauuuugaggaaucucaga

SEQ ID NO: 20938 - RNA, 19 nt, artificial
  Chemically synthesized
agagaauguagauauugug

SEQ ID NO: 20939 - RNA, 19 nt, artificial
  Chemically synthesized
gaaguaaaaccguuugcug

SEQ ID NO: 20940 - RNA, 19 nt, artificial
  Chemically synthesized
caugguucugguugccuug

SEQ ID NO: 20941 - RNA, 19 nt, artificial
  Chemically synthesized
gcuuucuggagugaaguau

SEQ ID NO: 20942 - RNA, 19 nt, artificial
  Chemically synthesized
cucuggaaugggaagacac

SEQ ID NO: 20943 - RNA, 19 nt, artificial
  Chemically synthesized
agguguucuacacucaucu

SEQ ID NO: 20944 - RNA, 19 nt, artificial
  Chemically synthesized
uagcuauggaaacucuaua

SEQ ID NO: 20945 - RNA, 19 nt, artificial
  Chemically synthesized
ccugaggauuuaagggaug

SEQ ID NO: 20946 - RNA, 19 nt, artificial
  Chemically synthesized
aaagcagcuaccagguguu

SEQ ID NO: 20947 - RNA, 19 nt, artificial
  Chemically synthesized
cagcuacuaaugauguuuu

SEQ ID NO: 20948 - RNA, 19 nt, artificial
  Chemically synthesized
cagcucuuccaccuacaga

SEQ ID NO: 20949 - RNA, 19 nt, artificial
  Chemically synthesized
uauaugucaacguaucuga

SEQ ID NO: 20950 - RNA, 19 nt, artificial
  Chemically synthesized
uccugagccaucggugaaa

SEQ ID NO: 20951 - RNA, 19 nt, artificial
  Chemically synthesized
gugcauuuuugugaaauga

SEQ ID NO: 20952 - RNA, 19 nt, artificial
  Chemically synthesized
gguguuucccuuagcuaug

SEQ ID NO: 20953 - RNA, 19 nt, artificial
  Chemically synthesized
agugccugagaguauuuag

SEQ ID NO: 20954 - RNA, 19 nt, artificial
  Chemically synthesized
aaugaaacugggcuguacu

SEQ ID NO: 20955 - RNA, 19 nt, artificial
  Chemically synthesized
ggucaaucuugcaacaacc

SEQ ID NO: 20956 - RNA, 19 nt, artificial
  Chemically synthesized
aucggugaaacuaacagau

SEQ ID NO: 20957 - RNA, 19 nt, artificial
  Chemically synthesized
uauuuccagugcaauugua

SEQ ID NO: 20958 - RNA, 19 nt, artificial
  Chemically synthesized
uuuaagggauggaaaagga

SEQ ID NO: 20959 - RNA, 19 nt, artificial
  Chemically synthesized
cuccuugugauguuuuuca

SEQ ID NO: 20960 - RNA, 19 nt, artificial
  Chemically synthesized
gauacaugguugugaccug

SEQ ID NO: 20961 - RNA, 19 nt, artificial
  Chemically synthesized
cuugcauaauaagcuaaag

SEQ ID NO: 20962 - RNA, 19 nt, artificial
  Chemically synthesized
auacaugguugugaccuga

SEQ ID NO: 20963 - RNA, 19 nt, artificial
  Chemically synthesized
cauuuggucaagauuuuga

SEQ ID NO: 20964 - RNA, 19 nt, artificial
  Chemically synthesized
auggaaacucuauaagaga

SEQ ID NO: 20965 - RNA, 19 nt, artificial
  Chemically synthesized
uuagcuauggaaacucuau

SEQ ID NO: 20966 - RNA, 19 nt, artificial
  Chemically synthesized
uaagggauggaaaaggaag

SEQ ID NO: 20967 - RNA, 19 nt, artificial
  Chemically synthesized
cugcuuucuggagugaagu

SEQ ID NO: 20968 - RNA, 19 nt, artificial
  Chemically synthesized
cuuuggagaagcaaauagg

SEQ ID NO: 20969 - RNA, 19 nt, artificial
  Chemically synthesized
cagacguuuuucggcuuau

SEQ ID NO: 20970 - RNA, 19 nt, artificial
  Chemically synthesized
ugaggaaucucagacguuu

SEQ ID NO: 20971 - RNA, 19 nt, artificial
  Chemically synthesized
gaagaagagagggaaccac

SEQ ID NO: 20972 - RNA, 19 nt, artificial
  Chemically synthesized
acacagcaucaucuuugga

SEQ ID NO: 20973 - RNA, 19 nt, artificial
  Chemically synthesized
ccuauggaauuguccugcu

SEQ ID NO: 20974 - RNA, 19 nt, artificial
  Chemically synthesized
aggacaccuuuuaacucac

SEQ ID NO: 20975 - RNA, 19 nt, artificial
  Chemically synthesized
uucagcucuuccaccuaca

SEQ ID NO: 20976 - RNA, 19 nt, artificial
  Chemically synthesized
ggucaagauuuugaaugcu

SEQ ID NO: 20977 - RNA, 19 nt, artificial
  Chemically synthesized
agugaaguauaagaagggu

SEQ ID NO: 20978 - RNA, 19 nt, artificial
  Chemically synthesized
ugccaugugaagagggaga

SEQ ID NO: 20979 - RNA, 19 nt, artificial
  Chemically synthesized
cuaagagaagcacuuuggg

SEQ ID NO: 20980 - RNA, 19 nt, artificial
  Chemically synthesized
gagugaaguauaagaaggg

SEQ ID NO: 20981 - RNA, 19 nt, artificial
  Chemically synthesized
aucuuuggagaagcaaaua

SEQ ID NO: 20982 - RNA, 19 nt, artificial
  Chemically synthesized
gaggucaaguaagaagaca

SEQ ID NO: 20983 - RNA, 19 nt, artificial
  Chemically synthesized
agacaugaaccaaguggac

SEQ ID NO: 20984 - RNA, 19 nt, artificial
  Chemically synthesized
gcuaaagaggcugaaagag

SEQ ID NO: 20985 - RNA, 19 nt, artificial
  Chemically synthesized
caauuuugaggaaucucag

SEQ ID NO: 20986 - RNA, 19 nt, artificial
  Chemically synthesized
gcaagagagauguuuuggg

SEQ ID NO: 20987 - RNA, 19 nt, artificial
  Chemically synthesized
aaaggaagacuagaggcuu

SEQ ID NO: 20988 - RNA, 19 nt, artificial
  Chemically synthesized
gguguucuacacucaucuu

SEQ ID NO: 20989 - RNA, 19 nt, artificial
  Chemically synthesized
acagaaggagcuggcagaa

SEQ ID NO: 20990 - RNA, 19 nt, artificial
  Chemically synthesized
acucuauaagagagaucca

SEQ ID NO: 20991 - RNA, 19 nt, artificial
  Chemically synthesized
uauggguugcauuugguca

SEQ ID NO: 20992 - RNA, 19 nt, artificial
  Chemically synthesized
uucuaaaugcauauccuga

SEQ ID NO: 20993 - RNA, 19 nt, artificial
  Chemically synthesized
uagaggcuugcauaauaag

SEQ ID NO: 20994 - RNA, 19 nt, artificial
  Chemically synthesized
aauuguccugcuuucugga

SEQ ID NO: 20995 - RNA, 19 nt, artificial
  Chemically synthesized
uuuugaaugcuuccugaca

SEQ ID NO: 20996 - RNA, 19 nt, artificial
  Chemically synthesized
ggcuuauauaagcucuaag

SEQ ID NO: 20997 - RNA, 19 nt, artificial
  Chemically synthesized
auugucagcuacuaaugau

SEQ ID NO: 20998 - RNA, 19 nt, artificial
  Chemically synthesized
acaugcauuugaggucaag

SEQ ID NO: 20999 - RNA, 19 nt, artificial
  Chemically synthesized
gugucuccuugugauguuu

SEQ ID NO: 21000 - RNA, 19 nt, artificial
  Chemically synthesized
ugugcauuuuugugaaaug

SEQ ID NO: 21001 - RNA, 19 nt, artificial
  Chemically synthesized
ugagaccacaggguucaaa

SEQ ID NO: 21002 - RNA, 19 nt, artificial
  Chemically synthesized
ugugaucaaugaaacuggg

SEQ ID NO: 21003 - RNA, 19 nt, artificial
  Chemically synthesized
ggcccauuuaacaggcaag

SEQ ID NO: 21004 - RNA, 19 nt, artificial
  Chemically synthesized
ucuaccagccagaugcaca

SEQ ID NO: 21005 - RNA, 19 nt, artificial
  Chemically synthesized
cagaucuacuggguggaca

SEQ ID NO: 21006 - RNA, 19 nt, artificial
  Chemically synthesized
uaagaagacaugaaccaag

SEQ ID NO: 21007 - RNA, 19 nt, artificial
  Chemically synthesized
gaugagcuacugcacuacu

SEQ ID NO: 21008 - RNA, 19 nt, artificial
  Chemically synthesized
aauauggguugcauuuggu

SEQ ID NO: 21009 - RNA, 19 nt, artificial
  Chemically synthesized
agaauguuguauucaguga

SEQ ID NO: 21010 - RNA, 19 nt, artificial
  Chemically synthesized
gguggccuugugaucaaug

SEQ ID NO: 21011 - RNA, 19 nt, artificial
  Chemically synthesized
uugagaccacaggguucaa

SEQ ID NO: 21012 - RNA, 19 nt, artificial
  Chemically synthesized
auauaagcucuaagagaag

SEQ ID NO: 21013 - RNA, 19 nt, artificial
  Chemically synthesized
gagaagcaugaaaaagcag

SEQ ID NO: 21014 - RNA, 19 nt, artificial
  Chemically synthesized
uugugauguuuuucauggu

SEQ ID NO: 21015 - RNA, 19 nt, artificial
  Chemically synthesized
gauguuucagcucuuccac

SEQ ID NO: 21016 - RNA, 19 nt, artificial
  Chemically synthesized
agcuaccagguguucuaca

SEQ ID NO: 21017 - RNA, 19 nt, artificial
  Chemically synthesized
guuuuucggcuuauauaag

SEQ ID NO: 21018 - RNA, 19 nt, artificial
  Chemically synthesized
ucaagauuuugaaugcuuc

SEQ ID NO: 21019 - RNA, 19 nt, artificial
  Chemically synthesized
guuuuucaugguucugguu

SEQ ID NO: 21020 - RNA, 19 nt, artificial
  Chemically synthesized
gggauggaaaaggaagacu

SEQ ID NO: 21021 - RNA, 19 nt, artificial
  Chemically synthesized
aggguucaaaaugucugua

SEQ ID NO: 21022 - RNA, 19 nt, artificial
  Chemically synthesized
gcuauggaaacucuauaag

SEQ ID NO: 21023 - RNA, 19 nt, artificial
  Chemically synthesized
gcauuuggucaagauuuug

SEQ ID NO: 21024 - RNA, 19 nt, artificial
  Chemically synthesized
agaucuacuggguggacag

SEQ ID NO: 21025 - RNA, 19 nt, artificial
  Chemically synthesized
caaucaacucuaauagugc

SEQ ID NO: 21026 - RNA, 19 nt, artificial
  Chemically synthesized
cugucuuucagauacaugg

SEQ ID NO: 21027 - RNA, 19 nt, artificial
  Chemically synthesized
guucaaaaugucuguagcu

SEQ ID NO: 21028 - RNA, 19 nt, artificial
  Chemically synthesized
uagugccugagaguauuua

SEQ ID NO: 21029 - RNA, 19 nt, artificial
  Chemically synthesized
uggaaaaggaagacuagag

SEQ ID NO: 21030 - RNA, 19 nt, artificial
  Chemically synthesized
auaugucaacguaucugag

SEQ ID NO: 21031 - RNA, 19 nt, artificial
  Chemically synthesized
auucagugagggucuucuu

SEQ ID NO: 21032 - RNA, 19 nt, artificial
  Chemically synthesized
auccugagccaucggugaa

SEQ ID NO: 21033 - RNA, 19 nt, artificial
  Chemically synthesized
cuacaugaggaacucuaag

SEQ ID NO: 21034 - RNA, 19 nt, artificial
  Chemically synthesized
gaagaacauagaacucugg

SEQ ID NO: 21035 - RNA, 19 nt, artificial
  Chemically synthesized
aaaagcagcuaccaggugu

SEQ ID NO: 21036 - RNA, 19 nt, artificial
  Chemically synthesized
ugugauguuuuucaugguu

SEQ ID NO: 21037 - RNA, 19 nt, artificial
  Chemically synthesized
acucauuucauuccuaaca

SEQ ID NO: 21038 - RNA, 19 nt, artificial
  Chemically synthesized
ugagcucucucuggucaau

SEQ ID NO: 21039 - RNA, 19 nt, artificial
  Chemically synthesized
accagugcugaucauuuau

SEQ ID NO: 21040 - RNA, 19 nt, artificial
  Chemically synthesized
aagcacuuugggauucuuu

SEQ ID NO: 21041 - RNA, 19 nt, artificial
  Chemically synthesized
auaugacggaagaacauag

SEQ ID NO: 21042 - RNA, 19 nt, artificial
  Chemically synthesized
agcucuaagagaagcacuu

SEQ ID NO: 21043 - RNA, 19 nt, artificial
  Chemically synthesized
uguagauauugugaaguac

SEQ ID NO: 21044 - RNA, 19 nt, artificial
  Chemically synthesized
gugaagagggagaagcaug

SEQ ID NO: 21045 - RNA, 19 nt, artificial
  Chemically synthesized
uacaggacugagaagaagu

SEQ ID NO: 21046 - RNA, 19 nt, artificial
  Chemically synthesized
uccuaacacagcaugugua

SEQ ID NO: 21047 - RNA, 19 nt, artificial
  Chemically synthesized
acuuugggauucuuuccau

SEQ ID NO: 21048 - RNA, 19 nt, artificial
  Chemically synthesized
ggcaccgagaauguuguau

SEQ ID NO: 21049 - RNA, 19 nt, artificial
  Chemically synthesized
cuggucaauuuugaggaau

SEQ ID NO: 21050 - RNA, 19 nt, artificial
  Chemically synthesized
ugacggaagaacauagaac

SEQ ID NO: 21051 - RNA, 19 nt, artificial
  Chemically synthesized
gaacauagaacucugggcu

SEQ ID NO: 21052 - RNA, 19 nt, artificial
  Chemically synthesized
ccugugucuccuugugaug

SEQ ID NO: 21053 - RNA, 19 nt, artificial
  Chemically synthesized
uaauguuuaugagccagac

SEQ ID NO: 21054 - RNA, 19 nt, artificial
  Chemically synthesized
cucaacucaccuaauguuu

SEQ ID NO: 21055 - RNA, 19 nt, artificial
  Chemically synthesized
aaugcauauccugagccau

SEQ ID NO: 21056 - RNA, 19 nt, artificial
  Chemically synthesized
uggucaauuuugaggaauc

SEQ ID NO: 21057 - RNA, 19 nt, artificial
  Chemically synthesized
cggaagaacauagaacucu

SEQ ID NO: 21058 - RNA, 19 nt, artificial
  Chemically synthesized
ugggauucuuuccauuaug

SEQ ID NO: 21059 - RNA, 19 nt, artificial
  Chemically synthesized
acaugguugugaccugagg

SEQ ID NO: 21060 - RNA, 19 nt, artificial
  Chemically synthesized
ccucuacaggacugagaag

SEQ ID NO: 21061 - RNA, 19 nt, artificial
  Chemically synthesized
caaggucuacaugaggaac

SEQ ID NO: 21062 - RNA, 19 nt, artificial
  Chemically synthesized
aacuaacagauaagcaaga

SEQ ID NO: 21063 - RNA, 19 nt, artificial
  Chemically synthesized
gacaccuuuuaacucaccu

SEQ ID NO: 21064 - RNA, 19 nt, artificial
  Chemically synthesized
ugacaaucaacucuaauag

SEQ ID NO: 21065 - RNA, 19 nt, artificial
  Chemically synthesized
ugguucugguugccuuggu

SEQ ID NO: 21066 - RNA, 19 nt, artificial
  Chemically synthesized
agaugaugagcuacugcac

SEQ ID NO: 21067 - RNA, 19 nt, artificial
  Chemically synthesized
agcaucuucacuucuaaau

SEQ ID NO: 21068 - RNA, 19 nt, artificial
  Chemically synthesized
cagaugcacacagcaucau

SEQ ID NO: 21069 - RNA, 19 nt, artificial
  Chemically synthesized
aagguccaugccucuggaa

SEQ ID NO: 21070 - RNA, 19 nt, artificial
  Chemically synthesized
ucuuccaccuacagaagga

SEQ ID NO: 21071 - RNA, 19 nt, artificial
  Chemically synthesized
ugucuuucagauacauggu

SEQ ID NO: 21072 - RNA, 19 nt, artificial
  Chemically synthesized
uccucaacucaccuaaugu

SEQ ID NO: 21073 - RNA, 19 nt, artificial
  Chemically synthesized
gaacuccgagagucuacca

SEQ ID NO: 21074 - RNA, 19 nt, artificial
  Chemically synthesized
ugagccacaaggucuacau

SEQ ID NO: 21075 - RNA, 19 nt, artificial
  Chemically synthesized
augaaacugggcuguacuu

SEQ ID NO: 21076 - RNA, 19 nt, artificial
  Chemically synthesized
ucagacguuuuucggcuua

SEQ ID NO: 21077 - RNA, 19 nt, artificial
  Chemically synthesized
aacaggcaaguccaacuca

SEQ ID NO: 21078 - RNA, 19 nt, artificial
  Chemically synthesized
aaggaagacuagaggcuug

SEQ ID NO: 21079 - RNA, 19 nt, artificial
  Chemically synthesized
gugaccugaggauuuaagg

SEQ ID NO: 21080 - RNA, 19 nt, artificial
  Chemically synthesized
cauuucauuccuaacacag

SEQ ID NO: 21081 - RNA, 19 nt, artificial
  Chemically synthesized
aaaaaggagcugaggaaag

SEQ ID NO: 21082 - RNA, 19 nt, artificial
  Chemically synthesized
agccacaaggucuacauga

SEQ ID NO: 21083 - RNA, 19 nt, artificial
  Chemically synthesized
cuucuaaaugcauauccug

SEQ ID NO: 21084 - RNA, 19 nt, artificial
  Chemically synthesized
cuuauauaagcucuaagag

SEQ ID NO: 21085 - RNA, 19 nt, artificial
  Chemically synthesized
guagcuccucaacucaccu

SEQ ID NO: 21086 - RNA, 19 nt, artificial
  Chemically synthesized
gggagaagcaugaaaaagc

SEQ ID NO: 21087 - RNA, 19 nt, artificial
  Chemically synthesized
aucaucuuuggagaagcaa

SEQ ID NO: 21088 - RNA, 19 nt, artificial
  Chemically synthesized
cauuccuaacacagcaugu

SEQ ID NO: 21089 - RNA, 19 nt, artificial
  Chemically synthesized
ccuaauguuuaugagccag

SEQ ID NO: 21090 - RNA, 19 nt, artificial
  Chemically synthesized
augacuaaagagagaaugu

SEQ ID NO: 21091 - RNA, 19 nt, artificial
  Chemically synthesized
gaugaugagcuacugcacu

SEQ ID NO: 21092 - RNA, 19 nt, artificial
  Chemically synthesized
gaugcacacagcaucaucu

SEQ ID NO: 21093 - RNA, 19 nt, artificial
  Chemically synthesized
agcagcccuucaauuaccc

SEQ ID NO: 21094 - RNA, 19 nt, artificial
  Chemically synthesized
caaauggaggaauaugacg

SEQ ID NO: 21095 - RNA, 19 nt, artificial
  Chemically synthesized
agcacuuugggauucuuuc

SEQ ID NO: 21096 - RNA, 19 nt, artificial
  Chemically synthesized
agugcugaucauuuauaug

SEQ ID NO: 21097 - RNA, 19 nt, artificial
  Chemically synthesized
agccucuacaggacugaga

SEQ ID NO: 21098 - RNA, 19 nt, artificial
  Chemically synthesized
caccuuuuaacucaccucu

SEQ ID NO: 21099 - RNA, 19 nt, artificial
  Chemically synthesized
ccaggaucuggugaugaug

SEQ ID NO: 21100 - RNA, 19 nt, artificial
  Chemically synthesized
aagcaugaaaaagcagcua

SEQ ID NO: 21101 - RNA, 19 nt, artificial
  Chemically synthesized
caagauuuugaaugcuucc

SEQ ID NO: 21102 - RNA, 19 nt, artificial
  Chemically synthesized
ugagggucuucuuacaugc

SEQ ID NO: 21103 - RNA, 19 nt, artificial
  Chemically synthesized
guguucuacacucaucuua

SEQ ID NO: 21104 - RNA, 19 nt, artificial
  Chemically synthesized
agagagauccagcuugccu

SEQ ID NO: 21105 - RNA, 19 nt, artificial
  Chemically synthesized
cagguguucuacacucauc

SEQ ID NO: 21106 - RNA, 19 nt, artificial
  Chemically synthesized
uggaggaauaugacggaag

SEQ ID NO: 21107 - RNA, 19 nt, artificial
  Chemically synthesized
uugaaaaggacaccuuuua

SEQ ID NO: 21108 - RNA, 19 nt, artificial
  Chemically synthesized
guauuuccagugcaauugu

SEQ ID NO: 21109 - RNA, 19 nt, artificial
  Chemically synthesized
uuuuucaugcuucucccuc

SEQ ID NO: 21110 - RNA, 19 nt, artificial
  Chemically synthesized
uuuuccaucccuuaaaucc

SEQ ID NO: 21111 - RNA, 19 nt, artificial
  Chemically synthesized
uuauauaagccgaaaaacg

SEQ ID NO: 21112 - RNA, 19 nt, artificial
  Chemically synthesized
uguaagaagacccucacug

SEQ ID NO: 21113 - RNA, 19 nt, artificial
  Chemically synthesized
uagucuuccuuuuccaucc

SEQ ID NO: 21114 - RNA, 19 nt, artificial
  Chemically synthesized
uuugucuggcucauaaaca

SEQ ID NO: 21115 - RNA, 19 nt, artificial
  Chemically synthesized
uuuucaugcuucucccucu

SEQ ID NO: 21116 - RNA, 19 nt, artificial
  Chemically synthesized
uugauugucaggaagcauu

SEQ ID NO: 21117 - RNA, 19 nt, artificial
  Chemically synthesized
uuuccaucccuuaaauccu

SEQ ID NO: 21118 - RNA, 19 nt, artificial
  Chemically synthesized
uuuugaacccuguggucuc

SEQ ID NO: 21119 - RNA, 19 nt, artificial
  Chemically synthesized
agguuggacagggaagaac

SEQ ID NO: 21120 - RNA, 19 nt, artificial
  Chemically synthesized
aacgguuuuacuucuucuc

SEQ ID NO: 21121 - RNA, 19 nt, artificial
  Chemically synthesized
uuagaguugauugucagga

SEQ ID NO: 21122 - RNA, 19 nt, artificial
  Chemically synthesized
ucaaucugccuaaauacuc

SEQ ID NO: 21123 - RNA, 19 nt, artificial
  Chemically synthesized
uuuacuucuucucaguccu

SEQ ID NO: 21124 - RNA, 19 nt, artificial
  Chemically synthesized
ugcuuuuucaugcuucucc

SEQ ID NO: 21125 - RNA, 19 nt, artificial
  Chemically synthesized
agagguuggacagggaaga

SEQ ID NO: 21126 - RNA, 19 nt, artificial
  Chemically synthesized
uuugcuucuccaaagauga

SEQ ID NO: 21127 - RNA, 19 nt, artificial
  Chemically synthesized
uuucauugaucacaaggcc

SEQ ID NO: 21128 - RNA, 19 nt, artificial
  Chemically synthesized
ucuuacuugaccucaaaug

SEQ ID NO: 21129 - RNA, 19 nt, artificial
  Chemically synthesized
ucaggaagcauucaaaauc

SEQ ID NO: 21130 - RNA, 19 nt, artificial
  Chemically synthesized
aaugcauguaagaagaccc

SEQ ID NO: 21131 - RNA, 19 nt, artificial
  Chemically synthesized
uuaguuucaccgauggcuc

SEQ ID NO: 21132 - RNA, 19 nt, artificial
  Chemically synthesized
aucacaaggagacacaggc

SEQ ID NO: 21133 - RNA, 19 nt, artificial
  Chemically synthesized
uugaguuggacuugccugu

SEQ ID NO: 21134 - RNA, 19 nt, artificial
  Chemically synthesized
uucccauuccagaggcaug

SEQ ID NO: 21135 - RNA, 19 nt, artificial
  Chemically synthesized
aaugcaacccauauuuucc

SEQ ID NO: 21136 - RNA, 19 nt, artificial
  Chemically synthesized
aucuugaccaaaugcaacc

SEQ ID NO: 21137 - RNA, 19 nt, artificial
  Chemically synthesized
uuuagcuuauuaugcaagc

SEQ ID NO: 21138 - RNA, 19 nt, artificial
  Chemically synthesized
auugaucacaaggccaccc

SEQ ID NO: 21139 - RNA, 19 nt, artificial
  Chemically synthesized
uaguagcugacaaucaaug

SEQ ID NO: 21140 - RNA, 19 nt, artificial
  Chemically synthesized
gguuggacagggaagaacu

SEQ ID NO: 21141 - RNA, 19 nt, artificial
  Chemically synthesized
uauggguaauugaagggcu

SEQ ID NO: 21142 - RNA, 19 nt, artificial
  Chemically synthesized
gauauggguaauugaaggg

SEQ ID NO: 21143 - RNA, 19 nt, artificial
  Chemically synthesized
uauacuucacuccagaaag

SEQ ID NO: 21144 - RNA, 19 nt, artificial
  Chemically synthesized
ggauauggguaauugaagg

SEQ ID NO: 21145 - RNA, 19 nt, artificial
  Chemically synthesized
acugaauacaacauucucg

SEQ ID NO: 21146 - RNA, 19 nt, artificial
  Chemically synthesized
uucacaaaaaugcacaucu

SEQ ID NO: 21147 - RNA, 19 nt, artificial
  Chemically synthesized
uugcugacugcucaagagg

SEQ ID NO: 21148 - RNA, 19 nt, artificial
  Chemically synthesized
uucuuccgucauauuccuc

SEQ ID NO: 21149 - RNA, 19 nt, artificial
  Chemically synthesized
uggacagggaagaacugug

SEQ ID NO: 21150 - RNA, 19 nt, artificial
  Chemically synthesized
uggguaauugaagggcugc

SEQ ID NO: 21151 - RNA, 19 nt, artificial
  Chemically synthesized
uuaaaagguguccuuuuca

SEQ ID NO: 21152 - RNA, 19 nt, artificial
  Chemically synthesized
uugagaggugaguuaaaag

SEQ ID NO: 21153 - RNA, 19 nt, artificial
  Chemically synthesized
auuugcuucuccaaagaug

SEQ ID NO: 21154 - RNA, 19 nt, artificial
  Chemically synthesized
gggauauggguaauugaag

SEQ ID NO: 21155 - RNA, 19 nt, artificial
  Chemically synthesized
uugcacuggaaauacacau

SEQ ID NO: 21156 - RNA, 19 nt, artificial
  Chemically synthesized
uucucaguccuguagaggc

SEQ ID NO: 21157 - RNA, 19 nt, artificial
  Chemically synthesized
uauaagccgaaaaacgucu

SEQ ID NO: 21158 - RNA, 19 nt, artificial
  Chemically synthesized
ucuguuaguuucaccgaug

SEQ ID NO: 21159 - RNA, 19 nt, artificial
  Chemically synthesized
aaacgguuuuacuucuucu

SEQ ID NO: 21160 - RNA, 19 nt, artificial
  Chemically synthesized
uucauugaucacaaggcca

SEQ ID NO: 21161 - RNA, 19 nt, artificial
  Chemically synthesized
uuccaucccuuaaauccuc

SEQ ID NO: 21162 - RNA, 19 nt, artificial
  Chemically synthesized
ugagaggugaguuaaaagg

SEQ ID NO: 21163 - RNA, 19 nt, artificial
  Chemically synthesized
augaguguagaacaccugg

SEQ ID NO: 21164 - RNA, 19 nt, artificial
  Chemically synthesized
uauauaagccgaaaaacgu

SEQ ID NO: 21165 - RNA, 19 nt, artificial
  Chemically synthesized
ucugccuaaauacucucag

SEQ ID NO: 21166 - RNA, 19 nt, artificial
  Chemically synthesized
auuaggugaguugaggagc

SEQ ID NO: 21167 - RNA, 19 nt, artificial
  Chemically synthesized
ucuccaaagaugaugcugu

SEQ ID NO: 21168 - RNA, 19 nt, artificial
  Chemically synthesized
uucuuauacuucacuccag

SEQ ID NO: 21169 - RNA, 19 nt, artificial
  Chemically synthesized
acgguuuuacuucuucuca

SEQ ID NO: 21170 - RNA, 19 nt, artificial
  Chemically synthesized
uuccucagcuccuuuuuuu

SEQ ID NO: 21171 - RNA, 19 nt, artificial
  Chemically synthesized
uuggacagggaagaacugu

SEQ ID NO: 21172 - RNA, 19 nt, artificial
  Chemically synthesized
uuuagaagugaagaugcug

SEQ ID NO: 21173 - RNA, 19 nt, artificial
  Chemically synthesized
uucuccaaagaugaugcug

SEQ ID NO: 21174 - RNA, 19 nt, artificial
  Chemically synthesized
uuacuucuucucaguccug

SEQ ID NO: 21175 - RNA, 19 nt, artificial
  Chemically synthesized
uaugcaagccucuagucuu

SEQ ID NO: 21176 - RNA, 19 nt, artificial
  Chemically synthesized
auggguaauugaagggcug

SEQ ID NO: 21177 - RNA, 19 nt, artificial
  Chemically synthesized
uuccucauguagaccuugu

SEQ ID NO: 21178 - RNA, 19 nt, artificial
  Chemically synthesized
uggacuugccuguuaaaug

SEQ ID NO: 21179 - RNA, 19 nt, artificial
  Chemically synthesized
uucaugucuucuuacuuga

SEQ ID NO: 21180 - RNA, 19 nt, artificial
  Chemically synthesized
cuucacuccagaaagcagg

SEQ ID NO: 21181 - RNA, 19 nt, artificial
  Chemically synthesized
cagaguucuauguucuucc

SEQ ID NO: 21182 - RNA, 19 nt, artificial
  Chemically synthesized
ucucucuugcuuaucuguu

SEQ ID NO: 21183 - RNA, 19 nt, artificial
  Chemically synthesized
cuagucuuccuuuuccauc

SEQ ID NO: 21184 - RNA, 19 nt, artificial
  Chemically synthesized
uuacuugaccucaaaugca

SEQ ID NO: 21185 - RNA, 19 nt, artificial
  Chemically synthesized
uuucaugcuucucccucuu

SEQ ID NO: 21186 - RNA, 19 nt, artificial
  Chemically synthesized
uuagagcuuauauaagccg

SEQ ID NO: 21187 - RNA, 19 nt, artificial
  Chemically synthesized
uuaaaugggccacuuuccu

SEQ ID NO: 21188 - RNA, 19 nt, artificial
  Chemically synthesized
guuguugcaagauugaccc

SEQ ID NO: 21189 - RNA, 19 nt, artificial
  Chemically synthesized
uagcuuauuaugcaagccu

SEQ ID NO: 21190 - RNA, 19 nt, artificial
  Chemically synthesized
ucuuccuuuuccaucccuu

SEQ ID NO: 21191 - RNA, 19 nt, artificial
  Chemically synthesized
uuccuuuuccaucccuuaa

SEQ ID NO: 21192 - RNA, 19 nt, artificial
  Chemically synthesized
uggaagagcugaaacaucc

SEQ ID NO: 21193 - RNA, 19 nt, artificial
  Chemically synthesized
uccucagcuccuuuuuuuc

SEQ ID NO: 21194 - RNA, 19 nt, artificial
  Chemically synthesized
ucauugaucacaaggccac

SEQ ID NO: 21195 - RNA, 19 nt, artificial
  Chemically synthesized
uucccucucuucuucaggg

SEQ ID NO: 21196 - RNA, 19 nt, artificial
  Chemically synthesized
uuagaguuccucauguaga

SEQ ID NO: 21197 - RNA, 19 nt, artificial
  Chemically synthesized
uacuucuucucaguccugu

SEQ ID NO: 21198 - RNA, 19 nt, artificial
  Chemically synthesized
auauuccuccauuugucug

SEQ ID NO: 21199 - RNA, 19 nt, artificial
  Chemically synthesized
uuggccucuuucagccucu

SEQ ID NO: 21200 - RNA, 19 nt, artificial
  Chemically synthesized
uccaucaucaccagauccu

SEQ ID NO: 21201 - RNA, 19 nt, artificial
  Chemically synthesized
uagaguuuccauagcuaag

SEQ ID NO: 21202 - RNA, 19 nt, artificial
  Chemically synthesized
uuccucaaaauugaccaga

SEQ ID NO: 21203 - RNA, 19 nt, artificial
  Chemically synthesized
ucaggcacuaagaugagug

SEQ ID NO: 21204 - RNA, 19 nt, artificial
  Chemically synthesized
aguuucauugaucacaagg

SEQ ID NO: 21205 - RNA, 19 nt, artificial
  Chemically synthesized
ugcaagccucuagucuucc

SEQ ID NO: 21206 - RNA, 19 nt, artificial
  Chemically synthesized
uugaccagagagagcucag

SEQ ID NO: 21207 - RNA, 19 nt, artificial
  Chemically synthesized
uuuccucagcuccuuuuuu

SEQ ID NO: 21208 - RNA, 19 nt, artificial
  Chemically synthesized
uccucaggucacaaccaug

SEQ ID NO: 21209 - RNA, 19 nt, artificial
  Chemically synthesized
ucuugaccaaaugcaaccc

SEQ ID NO: 21210 - RNA, 19 nt, artificial
  Chemically synthesized
auuagaguugauugucagg

SEQ ID NO: 21211 - RNA, 19 nt, artificial
  Chemically synthesized
ugugguucccucucuucuu

SEQ ID NO: 21212 - RNA, 19 nt, artificial
  Chemically synthesized
uguacuucacaauaucuac

SEQ ID NO: 21213 - RNA, 19 nt, artificial
  Chemically synthesized
ucuacauucucucuuuagu

SEQ ID NO: 21214 - RNA, 19 nt, artificial
  Chemically synthesized
ugcuucucccucuucacau

SEQ ID NO: 21215 - RNA, 19 nt, artificial
  Chemically synthesized
auuuugaacccuguggucu

SEQ ID NO: 21216 - RNA, 19 nt, artificial
  Chemically synthesized
aucagcacugguaagauug

SEQ ID NO: 21217 - RNA, 19 nt, artificial
  Chemically synthesized
auauaagccgaaaaacguc

SEQ ID NO: 21218 - RNA, 19 nt, artificial
  Chemically synthesized
auuugucuggcucauaaac

SEQ ID NO: 21219 - RNA, 19 nt, artificial
  Chemically synthesized
uccuccauuugucuggcuc

SEQ ID NO: 21220 - RNA, 19 nt, artificial
  Chemically synthesized
ucucuugcuuaucuguuag

SEQ ID NO: 21221 - RNA, 19 nt, artificial
  Chemically synthesized
uucucccucuucacauggc

SEQ ID NO: 21222 - RNA, 19 nt, artificial
  Chemically synthesized
uugaucacaaggccacccu

SEQ ID NO: 21223 - RNA, 19 nt, artificial
  Chemically synthesized
cuugaguuggacuugccug

SEQ ID NO: 21224 - RNA, 19 nt, artificial
  Chemically synthesized
uuucacaaaaaugcacauc

SEQ ID NO: 21225 - RNA, 19 nt, artificial
  Chemically synthesized
auugaagggcugcugcaug

SEQ ID NO: 21226 - RNA, 19 nt, artificial
  Chemically synthesized
uucuguagguggaagagcu

SEQ ID NO: 21227 - RNA, 19 nt, artificial
  Chemically synthesized
cugaauacaacauucucgg

SEQ ID NO: 21228 - RNA, 19 nt, artificial
  Chemically synthesized
aucaucaccagauccuggg

SEQ ID NO: 21229 - RNA, 19 nt, artificial
  Chemically synthesized
ucuuucagccucuuuagcu

SEQ ID NO: 21230 - RNA, 19 nt, artificial
  Chemically synthesized
ucuuauacuucacuccaga

SEQ ID NO: 21231 - RNA, 19 nt, artificial
  Chemically synthesized
cugugguucccucucuucu

SEQ ID NO: 21232 - RNA, 19 nt, artificial
  Chemically synthesized
uguguuaggaaugaaauga

SEQ ID NO: 21233 - RNA, 19 nt, artificial
  Chemically synthesized
uuggacuugccuguuaaau

SEQ ID NO: 21234 - RNA, 19 nt, artificial
  Chemically synthesized
aauacucucaggcacuaag

SEQ ID NO: 21235 - RNA, 19 nt, artificial
  Chemically synthesized
cuuaucuguuaguuucacc

SEQ ID NO: 21236 - RNA, 19 nt, artificial
  Chemically synthesized
aaagguguccuuuucaauc

SEQ ID NO: 21237 - RNA, 19 nt, artificial
  Chemically synthesized
aucccuuaaauccucaggu

SEQ ID NO: 21238 - RNA, 19 nt, artificial
  Chemically synthesized
ugaugcugugugcaucugg

SEQ ID NO: 21239 - RNA, 19 nt, artificial
  Chemically synthesized
aguucuauguucuuccguc

SEQ ID NO: 21240 - RNA, 19 nt, artificial
  Chemically synthesized
uuccauaggugucuuccca

SEQ ID NO: 21241 - RNA, 19 nt, artificial
  Chemically synthesized
cuuacuugaccucaaaugc

SEQ ID NO: 21242 - RNA, 19 nt, artificial
  Chemically synthesized
uauacaaaguacagcccag

SEQ ID NO: 21243 - RNA, 19 nt, artificial
  Chemically synthesized
uuaguagcugacaaucaau

SEQ ID NO: 21244 - RNA, 19 nt, artificial
  Chemically synthesized
acagacauuuugaacccug

SEQ ID NO: 21245 - RNA, 19 nt, artificial
  Chemically synthesized
uugccuguuaaaugggcca

SEQ ID NO: 21246 - RNA, 19 nt, artificial
  Chemically synthesized
uguugcugacugcucaaga

SEQ ID NO: 21247 - RNA, 19 nt, artificial
  Chemically synthesized
uccucauguagaccuugug

SEQ ID NO: 21248 - RNA, 19 nt, artificial
  Chemically synthesized
uagcugacaaucaaugauu

SEQ ID NO: 21249 - RNA, 19 nt, artificial
  Chemically synthesized
aauugcacuggaaauacac

SEQ ID NO: 21250 - RNA, 19 nt, artificial
  Chemically synthesized
uugucaggaagcauucaaa

SEQ ID NO: 21251 - RNA, 19 nt, artificial
  Chemically synthesized
uucuauguucuuccgucau

SEQ ID NO: 21252 - RNA, 19 nt, artificial
  Chemically synthesized
ucuuagagcuuauauaagc

SEQ ID NO: 21253 - RNA, 19 nt, artificial
  Chemically synthesized
acuggaaauacacaugcug

SEQ ID NO: 21254 - RNA, 19 nt, artificial
  Chemically synthesized
ugcauguaagaagacccuc

SEQ ID NO: 21255 - RNA, 19 nt, artificial
  Chemically synthesized
ugaggagcuacagacauuu

SEQ ID NO: 21256 - RNA, 19 nt, artificial
  Chemically synthesized
aaaugcaacccauauuuuc

SEQ ID NO: 21257 - RNA, 19 nt, artificial
  Chemically synthesized
uucuuacuugaccucaaau

SEQ ID NO: 21258 - RNA, 19 nt, artificial
  Chemically synthesized
uguccuuuucaaucugccu

SEQ ID NO: 21259 - RNA, 19 nt, artificial
  Chemically synthesized
ugccuaaauacucucaggc

SEQ ID NO: 21260 - RNA, 19 nt, artificial
  Chemically synthesized
agaaccaugaaaaacauca

SEQ ID NO: 21261 - RNA, 19 nt, artificial
  Chemically synthesized
uuaaauccucaggucacaa

SEQ ID NO: 21262 - RNA, 19 nt, artificial
  Chemically synthesized
augcaacccauauuuuccu

SEQ ID NO: 21263 - RNA, 19 nt, artificial
  Chemically synthesized
auguaucugaaagacaguc

SEQ ID NO: 21264 - RNA, 19 nt, artificial
  Chemically synthesized
uggcucauaaacauuaggu

SEQ ID NO: 21265 - RNA, 19 nt, artificial
  Chemically synthesized
ugcacuggaaauacacaug

SEQ ID NO: 21266 - RNA, 19 nt, artificial
  Chemically synthesized
augucuucuuacuugaccu

SEQ ID NO: 21267 - RNA, 19 nt, artificial
  Chemically synthesized
acaacauucucggugccug

SEQ ID NO: 21268 - RNA, 19 nt, artificial
  Chemically synthesized
uugaccaaaugcaacccau

SEQ ID NO: 21269 - RNA, 19 nt, artificial
  Chemically synthesized
uacaacauucucggugccu

SEQ ID NO: 21270 - RNA, 19 nt, artificial
  Chemically synthesized
aucacaaggccacccuucu

SEQ ID NO: 21271 - RNA, 19 nt, artificial
  Chemically synthesized
agauuccucaaaauugacc

SEQ ID NO: 21272 - RNA, 19 nt, artificial
  Chemically synthesized
auacacaugcuguguuagg

SEQ ID NO: 21273 - RNA, 19 nt, artificial
  Chemically synthesized
aggagcuacagacauuuug

SEQ ID NO: 21274 - RNA, 19 nt, artificial
  Chemically synthesized
uacuuagaguuccucaugu

SEQ ID NO: 21275 - RNA, 19 nt, artificial
  Chemically synthesized
ucagcuccuuuuuuucagg

SEQ ID NO: 21276 - RNA, 19 nt, artificial
  Chemically synthesized
acaaaaaugcacaucuaca

SEQ ID NO: 21277 - RNA, 19 nt, artificial
  Chemically synthesized
uagacucucggaguucugc

SEQ ID NO: 21278 - RNA, 19 nt, artificial
  Chemically synthesized
cuacauucucucuuuaguc

SEQ ID NO: 21279 - RNA, 19 nt, artificial
  Chemically synthesized
guuaguuucaccgauggcu

SEQ ID NO: 21280 - RNA, 19 nt, artificial
  Chemically synthesized
uuucagccucuuuagcuua

SEQ ID NO: 21281 - RNA, 19 nt, artificial
  Chemically synthesized
agcacuauuagaguugauu

SEQ ID NO: 21282 - RNA, 19 nt, artificial
  Chemically synthesized
cuucucccucuucacaugg

SEQ ID NO: 21283 - RNA, 19 nt, artificial
  Chemically synthesized
uccgucauauuccuccauu

SEQ ID NO: 21284 - RNA, 19 nt, artificial
  Chemically synthesized
uguuaguuucaccgauggc

SEQ ID NO: 21285 - RNA, 19 nt, artificial
  Chemically synthesized
augcaagccucuagucuuc

SEQ ID NO: 21286 - RNA, 19 nt, artificial
  Chemically synthesized
guuucauugaucacaaggc

SEQ ID NO: 21287 - RNA, 19 nt, artificial
  Chemically synthesized
accagaaccaugaaaaaca

SEQ ID NO: 21288 - RNA, 19 nt, artificial
  Chemically synthesized
uguggucucaagguccacu

SEQ ID NO: 21289 - RNA, 19 nt, artificial
  Chemically synthesized
uuauagaguuuccauagcu

SEQ ID NO: 21290 - RNA, 19 nt, artificial
  Chemically synthesized
augcuucucccucuucaca

SEQ ID NO: 21291 - RNA, 19 nt, artificial
  Chemically synthesized
accugguagcugcuuuuuc

SEQ ID NO: 21292 - RNA, 19 nt, artificial
  Chemically synthesized
uucuucucaguccuguaga

SEQ ID NO: 21293 - RNA, 19 nt, artificial
  Chemically synthesized
uugaggagcuacagacauu

SEQ ID NO: 21294 - RNA, 19 nt, artificial
  Chemically synthesized
uugucuggcucauaaacau

SEQ ID NO: 21295 - RNA, 19 nt, artificial
  Chemically synthesized
uucucggugccuguaacaa

SEQ ID NO: 21296 - RNA, 19 nt, artificial
  Chemically synthesized
auugucaggaagcauucaa

SEQ ID NO: 21297 - RNA, 19 nt, artificial
  Chemically synthesized
caaacgguuuuacuucuuc

SEQ ID NO: 21298 - RNA, 19 nt, artificial
  Chemically synthesized
acucucaggcacuaagaug

SEQ ID NO: 21299 - RNA, 19 nt, artificial
  Chemically synthesized
guucccucucuucuucagg

SEQ ID NO: 21300 - RNA, 19 nt, artificial
  Chemically synthesized
aaaaucuugaccaaaugca

SEQ ID NO: 21301 - RNA, 19 nt, artificial
  Chemically synthesized
auagcuaagggaaacaccu

SEQ ID NO: 21302 - RNA, 19 nt, artificial
  Chemically synthesized
aucauaauggaaagaaucc

SEQ ID NO: 21303 - RNA, 19 nt, artificial
  Chemically synthesized
uccuaauauguacuucaca

SEQ ID NO: 21304 - RNA, 19 nt, artificial
  Chemically synthesized
ugguucccucucuucuuca

SEQ ID NO: 21305 - RNA, 19 nt, artificial
  Chemically synthesized
aauggaaagaaucccaaag

SEQ ID NO: 21306 - RNA, 19 nt, artificial
  Chemically synthesized
aaucuugaccaaaugcaac

SEQ ID NO: 21307 - RNA, 19 nt, artificial
  Chemically synthesized
aaauugaccagagagagcu

SEQ ID NO: 21308 - RNA, 19 nt, artificial
  Chemically synthesized
auauacaaaguacagccca

SEQ ID NO: 21309 - RNA, 19 nt, artificial
  Chemically synthesized
ucaaaauugaccagagaga

SEQ ID NO: 21310 - RNA, 19 nt, artificial
  Chemically synthesized
ugcugugguucccucucuu

SEQ ID NO: 21311 - RNA, 19 nt, artificial
  Chemically synthesized
aaaaacaucacaaggagac

SEQ ID NO: 21312 - RNA, 19 nt, artificial
  Chemically synthesized
auacaaaguacagcccagu

SEQ ID NO: 21313 - RNA, 19 nt, artificial
  Chemically synthesized
uaggugucuucccauucca

SEQ ID NO: 21314 - RNA, 19 nt, artificial
  Chemically synthesized
cuucuuauacuucacucca

SEQ ID NO: 21315 - RNA, 19 nt, artificial
  Chemically synthesized
uacaaaguacagcccaguu

SEQ ID NO: 21316 - RNA, 19 nt, artificial
  Chemically synthesized
ugccuguaacaaagaauca

SEQ ID NO: 21317 - RNA, 19 nt, artificial
  Chemically synthesized
aucucucuuauagaguuuc

SEQ ID NO: 21318 - RNA, 19 nt, artificial
  Chemically synthesized
uagguggaagagcugaaac

SEQ ID NO: 21319 - RNA, 19 nt, artificial
  Chemically synthesized
uuagcuuauuaugcaagcc

SEQ ID NO: 21320 - RNA, 19 nt, artificial
  Chemically synthesized
gcuacagacauuuugaacc

SEQ ID NO: 21321 - RNA, 19 nt, artificial
  Chemically synthesized
agaguuuccauagcuaagg

SEQ ID NO: 21322 - RNA, 19 nt, artificial
  Chemically synthesized
aacauuaggugaguugagg

SEQ ID NO: 21323 - RNA, 19 nt, artificial
  Chemically synthesized
ccucuuuagcuuauuaugc

SEQ ID NO: 21324 - RNA, 19 nt, artificial
  Chemically synthesized
augaaaaacaucacaagga

SEQ ID NO: 21325 - RNA, 19 nt, artificial
  Chemically synthesized
auuggccucuuucagccuc

SEQ ID NO: 21326 - RNA, 19 nt, artificial
  Chemically synthesized
ugcaucuggcugguagacu

SEQ ID NO: 21327 - RNA, 19 nt, artificial
  Chemically synthesized
cugguaagauugaacacug

SEQ ID NO: 21328 - RNA, 19 nt, artificial
  Chemically synthesized
aaucccaaagugcuucucu

SEQ ID NO: 21329 - RNA, 19 nt, artificial
  Chemically synthesized
uccauaggugucuucccau

SEQ ID NO: 21330 - RNA, 19 nt, artificial
  Chemically synthesized
uggaauauacaaaguacag

SEQ ID NO: 21331 - RNA, 19 nt, artificial
  Chemically synthesized
ucaagguccacuugguuca

SEQ ID NO: 21332 - RNA, 19 nt, artificial
  Chemically synthesized
cgguuuuacuucuucucag

SEQ ID NO: 21333 - RNA, 19 nt, artificial
  Chemically synthesized
aguagcucaucaucuuccc

SEQ ID NO: 21334 - RNA, 19 nt, artificial
  Chemically synthesized
uacuucacuccagaaagca

SEQ ID NO: 21335 - RNA, 19 nt, artificial
  Chemically synthesized
ucuagucuuccuuuuccau

SEQ ID NO: 21336 - RNA, 19 nt, artificial
  Chemically synthesized
uaagcacuauuagaguuga

SEQ ID NO: 21337 - RNA, 19 nt, artificial
  Chemically synthesized
gguagcugcuuuuucaugc

SEQ ID NO: 21338 - RNA, 19 nt, artificial
  Chemically synthesized
uagagcuuauauaagccga

SEQ ID NO: 21339 - RNA, 19 nt, artificial
  Chemically synthesized
ccucuagucuuccuuuucc

SEQ ID NO: 21340 - RNA, 19 nt, artificial
  Chemically synthesized
ucuggcucauaaacauuag

SEQ ID NO: 21341 - RNA, 19 nt, artificial
  Chemically synthesized
uagaguuccucauguagac

SEQ ID NO: 21342 - RNA, 19 nt, artificial
  Chemically synthesized
aggauaugcauuuagaagu

SEQ ID NO: 21343 - RNA, 19 nt, artificial
  Chemically synthesized
ucucucuuauagaguuucc

SEQ ID NO: 21344 - RNA, 19 nt, artificial
  Chemically synthesized
auucucggugccuguaaca

SEQ ID NO: 21345 - RNA, 19 nt, artificial
  Chemically synthesized
cucaaaugcauguaagaag

SEQ ID NO: 21346 - RNA, 19 nt, artificial
  Chemically synthesized
agcugcuuuuucaugcuuc

SEQ ID NO: 21347 - RNA, 19 nt, artificial
  Chemically synthesized
uagcuaagggaaacaccuc

SEQ ID NO: 21348 - RNA, 19 nt, artificial
  Chemically synthesized
acugguaagauugaacacu

SEQ ID NO: 21349 - RNA, 19 nt, artificial
  Chemically synthesized
uccaucccuuaaauccuca

SEQ ID NO: 21350 - RNA, 19 nt, artificial
  Chemically synthesized
ucucggugccuguaacaaa

SEQ ID NO: 21351 - RNA, 19 nt, artificial
  Chemically synthesized
guguccuuuucaaucugcc

SEQ ID NO: 21352 - RNA, 19 nt, artificial
  Chemically synthesized
ucaaaugcauguaagaaga

SEQ ID NO: 21353 - RNA, 19 nt, artificial
  Chemically synthesized
cucggugccuguaacaaag

SEQ ID NO: 21354 - RNA, 19 nt, artificial
  Chemically synthesized
uugaccucaaaugcaugua

SEQ ID NO: 21355 - RNA, 19 nt, artificial
  Chemically synthesized
ugucuucccauuccagagg

SEQ ID NO: 21356 - RNA, 19 nt, artificial
  Chemically synthesized
uggaccuugaguuggacuu

SEQ ID NO: 21357 - RNA, 19 nt, artificial
  Chemically synthesized
augcauguaagaagacccu

SEQ ID NO: 21358 - RNA, 19 nt, artificial
  Chemically synthesized
auacucucaggcacuaaga

SEQ ID NO: 21359 - RNA, 19 nt, artificial
  Chemically synthesized
aaggcaaccagaaccauga

SEQ ID NO: 21360 - RNA, 19 nt, artificial
  Chemically synthesized
ucuauguucuuccgucaua

SEQ ID NO: 21361 - RNA, 19 nt, artificial
  Chemically synthesized
auuaugcaagccucuaguc

SEQ ID NO: 21362 - RNA, 19 nt, artificial
  Chemically synthesized
uggcucaggauaugcauuu

SEQ ID NO: 21363 - RNA, 19 nt, artificial
  Chemically synthesized
uccuuuucaaucugccuaa

SEQ ID NO: 21364 - RNA, 19 nt, artificial
  Chemically synthesized
agcuggaucucucuuauag

SEQ ID NO: 21365 - RNA, 19 nt, artificial
  Chemically synthesized
ugaguguagaacaccuggu

SEQ ID NO: 21366 - RNA, 19 nt, artificial
  Chemically synthesized
ugguucaugucuucuuacu

SEQ ID NO: 21367 - RNA, 19 nt, artificial
  Chemically synthesized
auugcacuggaaauacaca

SEQ ID NO: 21368 - RNA, 19 nt, artificial
  Chemically synthesized
gacauuuugaacccugugg

SEQ ID NO: 21369 - RNA, 19 nt, artificial
  Chemically synthesized
aucccaaagugcuucucuu

SEQ ID NO: 21370 - RNA, 19 nt, artificial
  Chemically synthesized
cucagcuccuuuuuuucag

SEQ ID NO: 21371 - RNA, 19 nt, artificial
  Chemically synthesized
aacaucauuaguagcugac

SEQ ID NO: 21372 - RNA, 19 nt, artificial
  Chemically synthesized
cauaggugucuucccauuc

SEQ ID NO: 21373 - RNA, 19 nt, artificial
  Chemically synthesized
aaaacaucucucuugcuua

SEQ ID NO: 21374 - RNA, 19 nt, artificial
  Chemically synthesized
uuccgucauauuccuccau

SEQ ID NO: 21375 - RNA, 19 nt, artificial
  Chemically synthesized
ugguagcugcuuuuucaug

SEQ ID NO: 21376 - RNA, 19 nt, artificial
  Chemically synthesized
aauccuaccaaggcaacca

SEQ ID NO: 21377 - RNA, 19 nt, artificial
  Chemically synthesized
aagcaggacaauuccauag

SEQ ID NO: 21378 - RNA, 19 nt, artificial
  Chemically synthesized
uacuugaccucaaaugcau

SEQ ID NO: 21379 - RNA, 19 nt, artificial
  Chemically synthesized
aaaacgucugagauuccuc

SEQ ID NO: 21380 - RNA, 19 nt, artificial
  Chemically synthesized
guuaggaaugaaaugaguc

SEQ ID NO: 21381 - RNA, 19 nt, artificial
  Chemically synthesized
ucuucuuacuugaccucaa

SEQ ID NO: 21382 - RNA, 19 nt, artificial
  Chemically synthesized
ucaccgauggcucaggaua

SEQ ID NO: 21383 - RNA, 19 nt, artificial
  Chemically synthesized
aucugccuaaauacucuca

SEQ ID NO: 21384 - RNA, 19 nt, artificial
  Chemically synthesized
uagaggcugaggugucaag

SEQ ID NO: 21385 - RNA, 19 nt, artificial
  Chemically synthesized
acaaccauguaucugaaag

SEQ ID NO: 21386 - RNA, 19 nt, artificial
  Chemically synthesized
ugcuuaucuguuaguuuca

SEQ ID NO: 21387 - RNA, 19 nt, artificial
  Chemically synthesized
ccaaagaugaugcugugug

SEQ ID NO: 21388 - RNA, 19 nt, artificial
  Chemically synthesized
gugccuguaacaaagaauc

SEQ ID NO: 21389 - RNA, 19 nt, artificial
  Chemically synthesized
cuccaucaucaccagaucc

SEQ ID NO: 21390 - RNA, 19 nt, artificial
  Chemically synthesized
acuugaccucaaaugcaug

SEQ ID NO: 21391 - RNA, 19 nt, artificial
  Chemically synthesized
guuuuacuucuucucaguc

SEQ ID NO: 21392 - RNA, 19 nt, artificial
  Chemically synthesized
aucucucuugcuuaucugu

SEQ ID NO: 21393 - RNA, 19 nt, artificial
  Chemically synthesized
ucccaaagugcuucucuua

SEQ ID NO: 21394 - RNA, 19 nt, artificial
  Chemically synthesized
uaagaagacccucacugaa

SEQ ID NO: 21395 - RNA, 19 nt, artificial
  Chemically synthesized
ccuucuuauacuucacucc

SEQ ID NO: 21396 - RNA, 19 nt, artificial
  Chemically synthesized
aaaauugaccagagagagc

SEQ ID NO: 21397 - RNA, 19 nt, artificial
  Chemically synthesized
cucucaggcacuaagauga

SEQ ID NO: 21398 - RNA, 19 nt, artificial
  Chemically synthesized
aaggccacccuucuuauac

SEQ ID NO: 21399 - RNA, 19 nt, artificial
  Chemically synthesized
uggaaauacacaugcugug

SEQ ID NO: 21400 - RNA, 19 nt, artificial
  Chemically synthesized
agacauuuugaacccugug

SEQ ID NO: 21401 - RNA, 19 nt, artificial
  Chemically synthesized
ucacaaggccacccuucuu

SEQ ID NO: 21402 - RNA, 19 nt, artificial
  Chemically synthesized
ugcuguguuaggaaugaaa

SEQ ID NO: 21403 - RNA, 19 nt, artificial
  Chemically synthesized
ugguaagauugaacacugc

SEQ ID NO: 21404 - RNA, 19 nt, artificial
  Chemically synthesized
uuaggugaguugaggagcu

SEQ ID NO: 21405 - RNA, 19 nt, artificial
  Chemically synthesized
cucacugaauacaacauuc

SEQ ID NO: 21406 - RNA, 19 nt, artificial
  Chemically synthesized
ugucuggcucauaaacauu

SEQ ID NO: 21407 - RNA, 19 nt, artificial
  Chemically synthesized
uccucaaaauugaccagag

SEQ ID NO: 21408 - RNA, 19 nt, artificial
  Chemically synthesized
agcacugguaagauugaac

SEQ ID NO: 21409 - RNA, 19 nt, artificial
  Chemically synthesized
auggaccuugaguuggacu

SEQ ID NO: 21410 - RNA, 19 nt, artificial
  Chemically synthesized
guccuuuucaaucugccua

SEQ ID NO: 21411 - RNA, 19 nt, artificial
  Chemically synthesized
cucaagguccacuugguuc

SEQ ID NO: 21412 - RNA, 19 nt, artificial
  Chemically synthesized
ucucaagguccacuugguu

SEQ ID NO: 21413 - RNA, 19 nt, artificial
  Chemically synthesized
auuaguagcugacaaucaa

SEQ ID NO: 21414 - RNA, 19 nt, artificial
  Chemically synthesized
augaucagcacugguaaga

SEQ ID NO: 21415 - RNA, 19 nt, artificial
  Chemically synthesized
ccuguaacaaagaaucaua

SEQ ID NO: 21416 - RNA, 19 nt, artificial
  Chemically synthesized
ucccuuaaauccucagguc

SEQ ID NO: 21417 - RNA, 19 nt, artificial
  Chemically synthesized
auuccagaggcauggaccu

SEQ ID NO: 21418 - RNA, 19 nt, artificial
  Chemically synthesized
caugaaaaacaucacaagg

SEQ ID NO: 21419 - RNA, 19 nt, artificial
  Chemically synthesized
cuaagaugaguguagaaca

SEQ ID NO: 21420 - RNA, 19 nt, artificial
  Chemically synthesized
uauguucuuccgucauauu

SEQ ID NO: 21421 - RNA, 19 nt, artificial
  Chemically synthesized
uccacuugguucaugucuu

SEQ ID NO: 21422 - RNA, 19 nt, artificial
  Chemically synthesized
gucauauuccuccauuugu

SEQ ID NO: 21423 - RNA, 19 nt, artificial
  Chemically synthesized
uggccuauuugcuucucca

SEQ ID NO: 21424 - RNA, 19 nt, artificial
  Chemically synthesized
uucagccucuuuagcuuau

SEQ ID NO: 21425 - RNA, 19 nt, artificial
  Chemically synthesized
acccucacugaauacaaca

SEQ ID NO: 21426 - RNA, 19 nt, artificial
  Chemically synthesized
cuggaaauacacaugcugu

SEQ ID NO: 21427 - RNA, 19 nt, artificial
  Chemically synthesized
auguaagaagacccucacu

SEQ ID NO: 21428 - RNA, 19 nt, artificial
  Chemically synthesized
ucugccagcuccuucugua

SEQ ID NO: 21429 - RNA, 19 nt, artificial
  Chemically synthesized
gucacaaccauguaucuga

SEQ ID NO: 21430 - RNA, 19 nt, artificial
  Chemically synthesized
augcauuuagaagugaaga

SEQ ID NO: 21431 - RNA, 19 nt, artificial
  Chemically synthesized
aucuggcugguagacucuc

SEQ ID NO: 21432 - RNA, 19 nt, artificial
  Chemically synthesized
uuccauagcuaagggaaac

SEQ ID NO: 21433 - RNA, 19 nt, artificial
  Chemically synthesized
uccuuugaccaggccuucu

SEQ ID NO: 21434 - RNA, 19 nt, artificial
  Chemically synthesized
aguuucaccgauggcucag

SEQ ID NO: 21435 - RNA, 19 nt, artificial
  Chemically synthesized
acaucucucuugcuuaucu

SEQ ID NO: 21436 - RNA, 19 nt, artificial
  Chemically synthesized
aaaaacgucugagauuccu

SEQ ID NO: 21437 - RNA, 19 nt, artificial
  Chemically synthesized
ucugagauuccucaaaauu

SEQ ID NO: 21438 - RNA, 19 nt, artificial
  Chemically synthesized
cacaauaucuacauucucu

SEQ ID NO: 21439 - RNA, 19 nt, artificial
  Chemically synthesized
cagcaaacgguuuuacuuc

SEQ ID NO: 21440 - RNA, 19 nt, artificial
  Chemically synthesized
caaggcaaccagaaccaug

SEQ ID NO: 21441 - RNA, 19 nt, artificial
  Chemically synthesized
auacuucacuccagaaagc

SEQ ID NO: 21442 - RNA, 19 nt, artificial
  Chemically synthesized
gugucuucccauuccagag

SEQ ID NO: 21443 - RNA, 19 nt, artificial
  Chemically synthesized
agaugaguguagaacaccu

SEQ ID NO: 21444 - RNA, 19 nt, artificial
  Chemically synthesized
uauagaguuuccauagcua

SEQ ID NO: 21445 - RNA, 19 nt, artificial
  Chemically synthesized
caucccuuaaauccucagg

SEQ ID NO: 21446 - RNA, 19 nt, artificial
  Chemically synthesized
aacaccugguagcugcuuu

SEQ ID NO: 21447 - RNA, 19 nt, artificial
  Chemically synthesized
aaaacaucauuaguagcug

SEQ ID NO: 21448 - RNA, 19 nt, artificial
  Chemically synthesized
ucuguagguggaagagcug

SEQ ID NO: 21449 - RNA, 19 nt, artificial
  Chemically synthesized
ucagauacguugacauaua

SEQ ID NO: 21450 - RNA, 19 nt, artificial
  Chemically synthesized
uuucaccgauggcucagga

SEQ ID NO: 21451 - RNA, 19 nt, artificial
  Chemically synthesized
ucauuucacaaaaaugcac

SEQ ID NO: 21452 - RNA, 19 nt, artificial
  Chemically synthesized
cauagcuaagggaaacacc

SEQ ID NO: 21453 - RNA, 19 nt, artificial
  Chemically synthesized
cuaaauacucucaggcacu

SEQ ID NO: 21454 - RNA, 19 nt, artificial
  Chemically synthesized
aguacagcccaguuucauu

SEQ ID NO: 21455 - RNA, 19 nt, artificial
  Chemically synthesized
gguuguugcaagauugacc

SEQ ID NO: 21456 - RNA, 19 nt, artificial
  Chemically synthesized
aucuguuaguuucaccgau

SEQ ID NO: 21457 - RNA, 19 nt, artificial
  Chemically synthesized
uacaauugcacuggaaaua

SEQ ID NO: 21458 - RNA, 19 nt, artificial
  Chemically synthesized
uccuuuuccaucccuuaaa

SEQ ID NO: 21459 - RNA, 19 nt, artificial
  Chemically synthesized
ugaaaaacaucacaaggag

SEQ ID NO: 21460 - RNA, 19 nt, artificial
  Chemically synthesized
caggucacaaccauguauc

SEQ ID NO: 21461 - RNA, 19 nt, artificial
  Chemically synthesized
cuuuagcuuauuaugcaag

SEQ ID NO: 21462 - RNA, 19 nt, artificial
  Chemically synthesized
ucaggucacaaccauguau

SEQ ID NO: 21463 - RNA, 19 nt, artificial
  Chemically synthesized
ucaaaaucuugaccaaaug

SEQ ID NO: 21464 - RNA, 19 nt, artificial
  Chemically synthesized
ucucuuauagaguuuccau

SEQ ID NO: 21465 - RNA, 19 nt, artificial
  Chemically synthesized
auagaguuuccauagcuaa

SEQ ID NO: 21466 - RNA, 19 nt, artificial
  Chemically synthesized
cuuccuuuuccaucccuua

SEQ ID NO: 21467 - RNA, 19 nt, artificial
  Chemically synthesized
acuucacuccagaaagcag

SEQ ID NO: 21468 - RNA, 19 nt, artificial
  Chemically synthesized
ccuauuugcuucuccaaag

SEQ ID NO: 21469 - RNA, 19 nt, artificial
  Chemically synthesized
auaagccgaaaaacgucug

SEQ ID NO: 21470 - RNA, 19 nt, artificial
  Chemically synthesized
aaacgucugagauuccuca

SEQ ID NO: 21471 - RNA, 19 nt, artificial
  Chemically synthesized
gugguucccucucuucuuc

SEQ ID NO: 21472 - RNA, 19 nt, artificial
  Chemically synthesized
uccaaagaugaugcugugu

SEQ ID NO: 21473 - RNA, 19 nt, artificial
  Chemically synthesized
agcaggacaauuccauagg

SEQ ID NO: 21474 - RNA, 19 nt, artificial
  Chemically synthesized
gugaguuaaaagguguccu

SEQ ID NO: 21475 - RNA, 19 nt, artificial
  Chemically synthesized
uguagguggaagagcugaa

SEQ ID NO: 21476 - RNA, 19 nt, artificial
  Chemically synthesized
agcauucaaaaucuugacc

SEQ ID NO: 21477 - RNA, 19 nt, artificial
  Chemically synthesized
acccuucuuauacuucacu

SEQ ID NO: 21478 - RNA, 19 nt, artificial
  Chemically synthesized
ucucccucuucacauggca

SEQ ID NO: 21479 - RNA, 19 nt, artificial
  Chemically synthesized
cccaaagugcuucucuuag

SEQ ID NO: 21480 - RNA, 19 nt, artificial
  Chemically synthesized
cccuucuuauacuucacuc

SEQ ID NO: 21481 - RNA, 19 nt, artificial
  Chemically synthesized
uauuugcuucuccaaagau

SEQ ID NO: 21482 - RNA, 19 nt, artificial
  Chemically synthesized
ugucuucuuacuugaccuc

SEQ ID NO: 21483 - RNA, 19 nt, artificial
  Chemically synthesized
guccacuugguucaugucu

SEQ ID NO: 21484 - RNA, 19 nt, artificial
  Chemically synthesized
cucuuucagccucuuuagc

SEQ ID NO: 21485 - RNA, 19 nt, artificial
  Chemically synthesized
cugagauuccucaaaauug

SEQ ID NO: 21486 - RNA, 19 nt, artificial
  Chemically synthesized
cccaaaacaucucucuugc

SEQ ID NO: 21487 - RNA, 19 nt, artificial
  Chemically synthesized
aagccucuagucuuccuuu

SEQ ID NO: 21488 - RNA, 19 nt, artificial
  Chemically synthesized
aagaugaguguagaacacc

SEQ ID NO: 21489 - RNA, 19 nt, artificial
  Chemically synthesized
uucugccagcuccuucugu

SEQ ID NO: 21490 - RNA, 19 nt, artificial
  Chemically synthesized
uggaucucucuuauagagu

SEQ ID NO: 21491 - RNA, 19 nt, artificial
  Chemically synthesized
ugaccaaaugcaacccaua

SEQ ID NO: 21492 - RNA, 19 nt, artificial
  Chemically synthesized
ucaggauaugcauuuagaa

SEQ ID NO: 21493 - RNA, 19 nt, artificial
  Chemically synthesized
cuuauuaugcaagccucua

SEQ ID NO: 21494 - RNA, 19 nt, artificial
  Chemically synthesized
uccagaaagcaggacaauu

SEQ ID NO: 21495 - RNA, 19 nt, artificial
  Chemically synthesized
ugucaggaagcauucaaaa

SEQ ID NO: 21496 - RNA, 19 nt, artificial
  Chemically synthesized
cuuagagcuuauauaagcc

SEQ ID NO: 21497 - RNA, 19 nt, artificial
  Chemically synthesized
aucauuaguagcugacaau

SEQ ID NO: 21498 - RNA, 19 nt, artificial
  Chemically synthesized
cuugaccucaaaugcaugu

SEQ ID NO: 21499 - RNA, 19 nt, artificial
  Chemically synthesized
aaacaucacaaggagacac

SEQ ID NO: 21500 - RNA, 19 nt, artificial
  Chemically synthesized
cauuucacaaaaaugcaca

SEQ ID NO: 21501 - RNA, 19 nt, artificial
  Chemically synthesized
uuugaacccuguggucuca

SEQ ID NO: 21502 - RNA, 19 nt, artificial
  Chemically synthesized
cccaguuucauugaucaca

SEQ ID NO: 21503 - RNA, 19 nt, artificial
  Chemically synthesized
cuugccuguuaaaugggcc

SEQ ID NO: 21504 - RNA, 19 nt, artificial
  Chemically synthesized
ugugcaucuggcugguaga

SEQ ID NO: 21505 - RNA, 19 nt, artificial
  Chemically synthesized
uguccacccaguagaucug

SEQ ID NO: 21506 - RNA, 19 nt, artificial
  Chemically synthesized
cuugguucaugucuucuua

SEQ ID NO: 21507 - RNA, 19 nt, artificial
  Chemically synthesized
aguagugcaguagcucauc

SEQ ID NO: 21508 - RNA, 19 nt, artificial
  Chemically synthesized
accaaaugcaacccauauu

SEQ ID NO: 21509 - RNA, 19 nt, artificial
  Chemically synthesized
ucacugaauacaacauucu

SEQ ID NO: 21510 - RNA, 19 nt, artificial
  Chemically synthesized
cauugaucacaaggccacc

SEQ ID NO: 21511 - RNA, 19 nt, artificial
  Chemically synthesized
uugaacccuguggucucaa

SEQ ID NO: 21512 - RNA, 19 nt, artificial
  Chemically synthesized
cuucucuuagagcuuauau

SEQ ID NO: 21513 - RNA, 19 nt, artificial
  Chemically synthesized
cugcuuuuucaugcuucuc

SEQ ID NO: 21514 - RNA, 19 nt, artificial
  Chemically synthesized
accaugaaaaacaucacaa

SEQ ID NO: 21515 - RNA, 19 nt, artificial
  Chemically synthesized
guggaagagcugaaacauc

SEQ ID NO: 21516 - RNA, 19 nt, artificial
  Chemically synthesized
uguagaacaccugguagcu

SEQ ID NO: 21517 - RNA, 19 nt, artificial
  Chemically synthesized
cuuauauaagccgaaaaac

SEQ ID NO: 21518 - RNA, 19 nt, artificial
  Chemically synthesized
gaagcauucaaaaucuuga

SEQ ID NO: 21519 - RNA, 19 nt, artificial
  Chemically synthesized
aaccagaaccaugaaaaac

SEQ ID NO: 21520 - RNA, 19 nt, artificial
  Chemically synthesized
agucuuccuuuuccauccc

SEQ ID NO: 21521 - RNA, 19 nt, artificial
  Chemically synthesized
uacagacauuuugaacccu

SEQ ID NO: 21522 - RNA, 19 nt, artificial
  Chemically synthesized
cuuauagaguuuccauagc

SEQ ID NO: 21523 - RNA, 19 nt, artificial
  Chemically synthesized
caaaaucuugaccaaaugc

SEQ ID NO: 21524 - RNA, 19 nt, artificial
  Chemically synthesized
cuguccacccaguagaucu

SEQ ID NO: 21525 - RNA, 19 nt, artificial
  Chemically synthesized
gcacuauuagaguugauug

SEQ ID NO: 21526 - RNA, 19 nt, artificial
  Chemically synthesized
ccauguaucugaaagacag

SEQ ID NO: 21527 - RNA, 19 nt, artificial
  Chemically synthesized
agcuacagacauuuugaac

SEQ ID NO: 21528 - RNA, 19 nt, artificial
  Chemically synthesized
uaaauacucucaggcacua

SEQ ID NO: 21529 - RNA, 19 nt, artificial
  Chemically synthesized
cucuagucuuccuuuucca

SEQ ID NO: 21530 - RNA, 19 nt, artificial
  Chemically synthesized
cucagauacguugacauau

SEQ ID NO: 21531 - RNA, 19 nt, artificial
  Chemically synthesized
aagaagacccucacugaau

SEQ ID NO: 21532 - RNA, 19 nt, artificial
  Chemically synthesized
uucaccgauggcucaggau

SEQ ID NO: 21533 - RNA, 19 nt, artificial
  Chemically synthesized
cuuagaguuccucauguag

SEQ ID NO: 21534 - RNA, 19 nt, artificial
  Chemically synthesized
ccagaguucuauguucuuc

SEQ ID NO: 21535 - RNA, 19 nt, artificial
  Chemically synthesized
acaccugguagcugcuuuu

SEQ ID NO: 21536 - RNA, 19 nt, artificial
  Chemically synthesized
aaccaugaaaaacaucaca

SEQ ID NO: 21537 - RNA, 19 nt, artificial
  Chemically synthesized
uguuaggaaugaaaugagu

SEQ ID NO: 21538 - RNA, 19 nt, artificial
  Chemically synthesized
auugaccagagagagcuca

SEQ ID NO: 21539 - RNA, 19 nt, artificial
  Chemically synthesized
auaaaugaucagcacuggu

SEQ ID NO: 21540 - RNA, 19 nt, artificial
  Chemically synthesized
aaagaaucccaaagugcuu

SEQ ID NO: 21541 - RNA, 19 nt, artificial
  Chemically synthesized
cuauguucuuccgucauau

SEQ ID NO: 21542 - RNA, 19 nt, artificial
  Chemically synthesized
aagugcuucucuuagagcu

SEQ ID NO: 21543 - RNA, 19 nt, artificial
  Chemically synthesized
guacuucacaauaucuaca

SEQ ID NO: 21544 - RNA, 19 nt, artificial
  Chemically synthesized
caugcuucucccucuucac

SEQ ID NO: 21545 - RNA, 19 nt, artificial
  Chemically synthesized
acuucuucucaguccugua

SEQ ID NO: 21546 - RNA, 19 nt, artificial
  Chemically synthesized
uacacaugcuguguuagga

SEQ ID NO: 21547 - RNA, 19 nt, artificial
  Chemically synthesized
auggaaagaaucccaaagu

SEQ ID NO: 21548 - RNA, 19 nt, artificial
  Chemically synthesized
auacaacauucucggugcc

SEQ ID NO: 21549 - RNA, 19 nt, artificial
  Chemically synthesized
auuccucaaaauugaccag

SEQ ID NO: 21550 - RNA, 19 nt, artificial
  Chemically synthesized
guucuauguucuuccguca

SEQ ID NO: 21551 - RNA, 19 nt, artificial
  Chemically synthesized
agcccagaguucuauguuc

SEQ ID NO: 21552 - RNA, 19 nt, artificial
  Chemically synthesized
caucacaaggagacacagg

SEQ ID NO: 21553 - RNA, 19 nt, artificial
  Chemically synthesized
gucuggcucauaaacauua

SEQ ID NO: 21554 - RNA, 19 nt, artificial
  Chemically synthesized
aaacauuaggugaguugag

SEQ ID NO: 21555 - RNA, 19 nt, artificial
  Chemically synthesized
auggcucaggauaugcauu

SEQ ID NO: 21556 - RNA, 19 nt, artificial
  Chemically synthesized
gauuccucaaaauugacca

SEQ ID NO: 21557 - RNA, 19 nt, artificial
  Chemically synthesized
agaguucuauguucuuccg

SEQ ID NO: 21558 - RNA, 19 nt, artificial
  Chemically synthesized
cauaauggaaagaauccca

SEQ ID NO: 21559 - RNA, 19 nt, artificial
  Chemically synthesized
ccucaggucacaaccaugu

SEQ ID NO: 21560 - RNA, 19 nt, artificial
  Chemically synthesized
cuucucaguccuguagagg

SEQ ID NO: 21561 - RNA, 19 nt, artificial
  Chemically synthesized
guuccucauguagaccuug

SEQ ID NO: 21562 - RNA, 19 nt, artificial
  Chemically synthesized
ucuugcuuaucuguuaguu

SEQ ID NO: 21563 - RNA, 19 nt, artificial
  Chemically synthesized
aggugaguuaaaagguguc

SEQ ID NO: 21564 - RNA, 19 nt, artificial
  Chemically synthesized
cuauuagaguugauuguca

SEQ ID NO: 21565 - RNA, 19 nt, artificial
  Chemically synthesized
accaaggcaaccagaacca

SEQ ID NO: 21566 - RNA, 19 nt, artificial
  Chemically synthesized
gugcaguagcucaucaucu

SEQ ID NO: 21567 - RNA, 19 nt, artificial
  Chemically synthesized
auuuagaagugaagaugcu

SEQ ID NO: 21568 - RNA, 19 nt, artificial
  Chemically synthesized
augaugcugugugcaucug

SEQ ID NO: 21569 - RNA, 19 nt, artificial
  Chemically synthesized
uuccagaggcauggaccuu

SEQ ID NO: 21570 - RNA, 19 nt, artificial
  Chemically synthesized
uccuucuguagguggaaga

SEQ ID NO: 21571 - RNA, 19 nt, artificial
  Chemically synthesized
accauguaucugaaagaca

SEQ ID NO: 21572 - RNA, 19 nt, artificial
  Chemically synthesized
acauuaggugaguugagga

SEQ ID NO: 21573 - RNA, 19 nt, artificial
  Chemically synthesized
ugguagacucucggaguuc

SEQ ID NO: 21574 - RNA, 19 nt, artificial
  Chemically synthesized
auguagaccuuguggcuca

SEQ ID NO: 21575 - RNA, 19 nt, artificial
  Chemically synthesized
aaguacagcccaguuucau

SEQ ID NO: 21576 - RNA, 19 nt, artificial
  Chemically synthesized
uaagccgaaaaacgucuga

SEQ ID NO: 21577 - RNA, 19 nt, artificial
  Chemically synthesized
ugaguuggacuugccuguu

SEQ ID NO: 21578 - RNA, 19 nt, artificial
  Chemically synthesized
caagccucuagucuuccuu

SEQ ID NO: 21579 - RNA, 19 nt, artificial
  Chemically synthesized
ccuuaaauccucaggucac

SEQ ID NO: 21580 - RNA, 19 nt, artificial
  Chemically synthesized
cuguguuaggaaugaaaug

SEQ ID NO: 21581 - RNA, 19 nt, artificial
  Chemically synthesized
cuuuccucagcuccuuuuu

SEQ ID NO: 21582 - RNA, 19 nt, artificial
  Chemically synthesized
ucauguagaccuuguggcu

SEQ ID NO: 21583 - RNA, 19 nt, artificial
  Chemically synthesized
caggauaugcauuuagaag

SEQ ID NO: 21584 - RNA, 19 nt, artificial
  Chemically synthesized
cucuuagagcuuauauaag

SEQ ID NO: 21585 - RNA, 19 nt, artificial
  Chemically synthesized
aggugaguugaggagcuac

SEQ ID NO: 21586 - RNA, 19 nt, artificial
  Chemically synthesized
gcuuuuucaugcuucuccc

SEQ ID NO: 21587 - RNA, 19 nt, artificial
  Chemically synthesized
uugcuucuccaaagaugau

SEQ ID NO: 21588 - RNA, 19 nt, artificial
  Chemically synthesized
acaugcuguguuaggaaug

SEQ ID NO: 21589 - RNA, 19 nt, artificial
  Chemically synthesized
cuggcucauaaacauuagg

SEQ ID NO: 21590 - RNA, 19 nt, artificial
  Chemically synthesized
acauucucucuuuagucau

SEQ ID NO: 21591 - RNA, 19 nt, artificial
  Chemically synthesized
agugcaguagcucaucauc

SEQ ID NO: 21592 - RNA, 19 nt, artificial
  Chemically synthesized
agaugaugcugugugcauc

SEQ ID NO: 21593 - RNA, 19 nt, artificial
  Chemically synthesized
ggguaauugaagggcugcu

SEQ ID NO: 21594 - RNA, 19 nt, artificial
  Chemically synthesized
cgucauauuccuccauuug

SEQ ID NO: 21595 - RNA, 19 nt, artificial
  Chemically synthesized
gaaagaaucccaaagugcu

SEQ ID NO: 21596 - RNA, 19 nt, artificial
  Chemically synthesized
cauauaaaugaucagcacu

SEQ ID NO: 21597 - RNA, 19 nt, artificial
  Chemically synthesized
ucucaguccuguagaggcu

SEQ ID NO: 21598 - RNA, 19 nt, artificial
  Chemically synthesized
agaggugaguuaaaaggug

SEQ ID NO: 21599 - RNA, 19 nt, artificial
  Chemically synthesized
caucaucaccagauccugg

SEQ ID NO: 21600 - RNA, 19 nt, artificial
  Chemically synthesized
uagcugcuuuuucaugcuu

SEQ ID NO: 21601 - RNA, 19 nt, artificial
  Chemically synthesized
ggaagcauucaaaaucuug

SEQ ID NO: 21602 - RNA, 19 nt, artificial
  Chemically synthesized
gcauguaagaagacccuca

SEQ ID NO: 21603 - RNA, 19 nt, artificial
  Chemically synthesized
uaagaugaguguagaacac

SEQ ID NO: 21604 - RNA, 19 nt, artificial
  Chemically synthesized
aggcaagcuggaucucucu

SEQ ID NO: 21605 - RNA, 19 nt, artificial
  Chemically synthesized
gaugaguguagaacaccug

SEQ ID NO: 21606 - RNA, 19 nt, artificial
  Chemically synthesized
cuuccgucauauuccucca

SEQ ID NO: 21607 - RNA, 19 nt, artificial
  Chemically synthesized
uaaaagguguccuuuucaa

SEQ ID NO: 21608 - RNA, 19 nt, artificial
  Chemically synthesized
acaauugcacuggaaauac

SEQ ID NO: 21609 - RNA, 21 nt, artificial
  Chemically synthesized
cagcccuucaauuacccauau

SEQ ID NO: 21610 - RNA, 21 nt, artificial
  Chemically synthesized
gaggauuuaagggauggaaaa

SEQ ID NO: 21611 - RNA, 21 nt, artificial
  Chemically synthesized
gcacaguucuucccuguccaa

SEQ ID NO: 21612 - RNA, 21 nt, artificial
  Chemically synthesized
gaguauuuaggcagauugaaa

SEQ ID NO: 21613 - RNA, 21 nt, artificial
  Chemically synthesized
ggcuguacuuuguauauucca

SEQ ID NO: 21614 - RNA, 21 nt, artificial
  Chemically synthesized
ccauuuaacaggcaaguccaa

SEQ ID NO: 21615 - RNA, 21 nt, artificial
  Chemically synthesized
ggcagcaucuucacuucuaaa

SEQ ID NO: 21616 - RNA, 21 nt, artificial
  Chemically synthesized
aguucuucccuguccaaccuc

SEQ ID NO: 21617 - RNA, 21 nt, artificial
  Chemically synthesized
ugaagagggagaagcaugaaa

SEQ ID NO: 21618 - RNA, 21 nt, artificial
  Chemically synthesized
ggauggaaaaggaagacuaga

SEQ ID NO: 21619 - RNA, 21 nt, artificial
  Chemically synthesized
ugaggaaaguggcccauuuaa

SEQ ID NO: 21620 - RNA, 21 nt, artificial
  Chemically synthesized
gguugugaccugaggauuuaa

SEQ ID NO: 21621 - RNA, 21 nt, artificial
  Chemically synthesized
gaggcuugcauaauaagcuaa

SEQ ID NO: 21622 - RNA, 21 nt, artificial
  Chemically synthesized
ggaauaugacggaagaacaua

SEQ ID NO: 21623 - RNA, 21 nt, artificial
  Chemically synthesized
gaaacugggcuguacuuugua

SEQ ID NO: 21624 - RNA, 21 nt, artificial
  Chemically synthesized
caucaucuuuggagaagcaaa

SEQ ID NO: 21625 - RNA, 21 nt, artificial
  Chemically synthesized
cauugauugucagcuacuaau

SEQ ID NO: 21626 - RNA, 21 nt, artificial
  Chemically synthesized
ggaagacuagaggcuugcaua

SEQ ID NO: 21627 - RNA, 21 nt, artificial
  Chemically synthesized
acaggacugagaagaaguaaa

SEQ ID NO: 21628 - RNA, 21 nt, artificial
  Chemically synthesized
cccuuagcuauggaaacucua

SEQ ID NO: 21629 - RNA, 21 nt, artificial
  Chemically synthesized
gguggccuugugaucaaugaa

SEQ ID NO: 21630 - RNA, 21 nt, artificial
  Chemically synthesized
cuuuguuacaggcaccgagaa

SEQ ID NO: 21631 - RNA, 21 nt, artificial
  Chemically synthesized
guucuucccuguccaaccucu

SEQ ID NO: 21632 - RNA, 21 nt, artificial
  Chemically synthesized
cuuacaugcauuugaggucaa

SEQ ID NO: 21633 - RNA, 21 nt, artificial
  Chemically synthesized
gcauuugaggucaaguaagaa

SEQ ID NO: 21634 - RNA, 21 nt, artificial
  Chemically synthesized
agacguuuuucggcuuauaua

SEQ ID NO: 21635 - RNA, 21 nt, artificial
  Chemically synthesized
gacuagaggcuugcauaauaa

SEQ ID NO: 21636 - RNA, 21 nt, artificial
  Chemically synthesized
caaucaacucuaauagugcuu

SEQ ID NO: 21637 - RNA, 21 nt, artificial
  Chemically synthesized
gcauguguauuuccagugcaa

SEQ ID NO: 21638 - RNA, 21 nt, artificial
  Chemically synthesized
agcccuucaauuacccauauc

SEQ ID NO: 21639 - RNA, 21 nt, artificial
  Chemically synthesized
cugagaagaaguaaaaccguu

SEQ ID NO: 21640 - RNA, 21 nt, artificial
  Chemically synthesized
ccacaaggucuacaugaggaa

SEQ ID NO: 21641 - RNA, 21 nt, artificial
  Chemically synthesized
gaagacuagaggcuugcauaa

SEQ ID NO: 21642 - RNA, 21 nt, artificial
  Chemically synthesized
gaagagggagaagcaugaaaa

SEQ ID NO: 21643 - RNA, 21 nt, artificial
  Chemically synthesized
gcaucaucuuuggagaagcaa

SEQ ID NO: 21644 - RNA, 21 nt, artificial
  Chemically synthesized
ccugcuuucuggagugaagua

SEQ ID NO: 21645 - RNA, 21 nt, artificial
  Chemically synthesized
caggacugagaagaaguaaaa

SEQ ID NO: 21646 - RNA, 21 nt, artificial
  Chemically synthesized
aacucugggcugccaugugaa

SEQ ID NO: 21647 - RNA, 21 nt, artificial
  Chemically synthesized
ugagaagaaguaaaaccguuu

SEQ ID NO: 21648 - RNA, 21 nt, artificial
  Chemically synthesized
gacguuuuucggcuuauauaa

SEQ ID NO: 21649 - RNA, 21 nt, artificial
  Chemically synthesized
ccaugugaagagggagaagca

SEQ ID NO: 21650 - RNA, 21 nt, artificial
  Chemically synthesized
gggagaagcaugaaaaagcag

SEQ ID NO: 21651 - RNA, 21 nt, artificial
  Chemically synthesized
ggucaaguaagaagacaugaa

SEQ ID NO: 21652 - RNA, 21 nt, artificial
  Chemically synthesized
caugcauuugaggucaaguaa

SEQ ID NO: 21653 - RNA, 21 nt, artificial
  Chemically synthesized
gcuuucuggagugaaguauaa

SEQ ID NO: 21654 - RNA, 21 nt, artificial
  Chemically synthesized
aagagggagaagcaugaaaaa

SEQ ID NO: 21655 - RNA, 21 nt, artificial
  Chemically synthesized
caucggugaaacuaacagaua

SEQ ID NO: 21656 - RNA, 21 nt, artificial
  Chemically synthesized
gaaggguggccuugugaucaa

SEQ ID NO: 21657 - RNA, 21 nt, artificial
  Chemically synthesized
cagacaaauggaggaauauga

SEQ ID NO: 21658 - RNA, 21 nt, artificial
  Chemically synthesized
ggguggccuugugaucaauga

SEQ ID NO: 21659 - RNA, 21 nt, artificial
  Chemically synthesized
gagccaucggugaaacuaaca

SEQ ID NO: 21660 - RNA, 21 nt, artificial
  Chemically synthesized
ugaagaagagagggaaccaca

SEQ ID NO: 21661 - RNA, 21 nt, artificial
  Chemically synthesized
ggaagaugaugagcuacugca

SEQ ID NO: 21662 - RNA, 21 nt, artificial
  Chemically synthesized
guggccuugugaucaaugaaa

SEQ ID NO: 21663 - RNA, 21 nt, artificial
  Chemically synthesized
gugaaacuaacagauaagcaa

SEQ ID NO: 21664 - RNA, 21 nt, artificial
  Chemically synthesized
ccucaacucaccuaauguuua

SEQ ID NO: 21665 - RNA, 21 nt, artificial
  Chemically synthesized
ugaaaaaaaggagcugaggaa

SEQ ID NO: 21666 - RNA, 21 nt, artificial
  Chemically synthesized
agaugaugagcuacugcacua

SEQ ID NO: 21667 - RNA, 21 nt, artificial
  Chemically synthesized
aggcuugcauaauaagcuaaa

SEQ ID NO: 21668 - RNA, 21 nt, artificial
  Chemically synthesized
gcagcccuucaauuacccaua

SEQ ID NO: 21669 - RNA, 21 nt, artificial
  Chemically synthesized
agaguauuuaggcagauugaa

SEQ ID NO: 21670 - RNA, 21 nt, artificial
  Chemically synthesized
caaugaaacugggcuguacuu

SEQ ID NO: 21671 - RNA, 21 nt, artificial
  Chemically synthesized
accuuuuaacucaccucucaa

SEQ ID NO: 21672 - RNA, 21 nt, artificial
  Chemically synthesized
gaaaaaaaggagcugaggaaa

SEQ ID NO: 21673 - RNA, 21 nt, artificial
  Chemically synthesized
gagaguauuuaggcagauuga

SEQ ID NO: 21674 - RNA, 21 nt, artificial
  Chemically synthesized
gaggaauaugacggaagaaca

SEQ ID NO: 21675 - RNA, 21 nt, artificial
  Chemically synthesized
gcccuucaauuacccauaucc

SEQ ID NO: 21676 - RNA, 21 nt, artificial
  Chemically synthesized
aggucuacaugaggaacucua

SEQ ID NO: 21677 - RNA, 21 nt, artificial
  Chemically synthesized
cacagcaucaucuuuggagaa

SEQ ID NO: 21678 - RNA, 21 nt, artificial
  Chemically synthesized
cagcagcccuucaauuaccca

SEQ ID NO: 21679 - RNA, 21 nt, artificial
  Chemically synthesized
gcagcaucuucacuucuaaau

SEQ ID NO: 21680 - RNA, 21 nt, artificial
  Chemically synthesized
uaauguuuaugagccagacaa

SEQ ID NO: 21681 - RNA, 21 nt, artificial
  Chemically synthesized
accuaauguuuaugagccaga

SEQ ID NO: 21682 - RNA, 21 nt, artificial
  Chemically synthesized
cugagccaucggugaaacuaa

SEQ ID NO: 21683 - RNA, 21 nt, artificial
  Chemically synthesized
uggaggaauaugacggaagaa

SEQ ID NO: 21684 - RNA, 21 nt, artificial
  Chemically synthesized
caaguaagaagacaugaacca

SEQ ID NO: 21685 - RNA, 21 nt, artificial
  Chemically synthesized
cuaacagauaagcaagagaga

SEQ ID NO: 21686 - RNA, 21 nt, artificial
  Chemically synthesized
agacuagaggcuugcauaaua

SEQ ID NO: 21687 - RNA, 21 nt, artificial
  Chemically synthesized
gguguuucccuuagcuaugga

SEQ ID NO: 21688 - RNA, 21 nt, artificial
  Chemically synthesized
auaugacggaagaacauagaa

SEQ ID NO: 21689 - RNA, 21 nt, artificial
  Chemically synthesized
ggucuacaugaggaacucuaa

SEQ ID NO: 21690 - RNA, 21 nt, artificial
  Chemically synthesized
cgagaauguuguauucaguga

SEQ ID NO: 21691 - RNA, 21 nt, artificial
  Chemically synthesized
gacuaaagagagaauguagau

SEQ ID NO: 21692 - RNA, 21 nt, artificial
  Chemically synthesized
ggugaaacuaacagauaagca

SEQ ID NO: 21693 - RNA, 21 nt, artificial
  Chemically synthesized
auuuaagggauggaaaaggaa

SEQ ID NO: 21694 - RNA, 21 nt, artificial
  Chemically synthesized
uaugauucuuuguuacaggca

SEQ ID NO: 21695 - RNA, 21 nt, artificial
  Chemically synthesized
gagagaauguagauauuguga

SEQ ID NO: 21696 - RNA, 21 nt, artificial
  Chemically synthesized
cuauggaaacucuauaagaga

SEQ ID NO: 21697 - RNA, 21 nt, artificial
  Chemically synthesized
aucugagcucucucuggucaa

SEQ ID NO: 21698 - RNA, 21 nt, artificial
  Chemically synthesized
aauguuuaugagccagacaaa

SEQ ID NO: 21699 - RNA, 21 nt, artificial
  Chemically synthesized
cuuccugacaaucaacucuaa

SEQ ID NO: 21700 - RNA, 21 nt, artificial
  Chemically synthesized
ccaggaucuggugaugaugga

SEQ ID NO: 21701 - RNA, 21 nt, artificial
  Chemically synthesized
gcuguacuuuguauauuccaa

SEQ ID NO: 21702 - RNA, 21 nt, artificial
  Chemically synthesized
gcuugcauaauaagcuaaaga

SEQ ID NO: 21703 - RNA, 21 nt, artificial
  Chemically synthesized
gcuuccugacaaucaacucua

SEQ ID NO: 21704 - RNA, 21 nt, artificial
  Chemically synthesized
gcauuuggucaagauuuugaa

SEQ ID NO: 21705 - RNA, 21 nt, artificial
  Chemically synthesized
gauugaaaaggacaccuuuua

SEQ ID NO: 21706 - RNA, 21 nt, artificial
  Chemically synthesized
ugacuaaagagagaauguaga

SEQ ID NO: 21707 - RNA, 21 nt, artificial
  Chemically synthesized
aaaaugucuguagcuccucaa

SEQ ID NO: 21708 - RNA, 21 nt, artificial
  Chemically synthesized
agaagagagggaaccacagca

SEQ ID NO: 21709 - RNA, 21 nt, artificial
  Chemically synthesized
acuagaggcuugcauaauaag

SEQ ID NO: 21710 - RNA, 21 nt, artificial
  Chemically synthesized
ggucuucuuacaugcauuuga

SEQ ID NO: 21711 - RNA, 21 nt, artificial
  Chemically synthesized
guuucagcucuuccaccuaca

SEQ ID NO: 21712 - RNA, 21 nt, artificial
  Chemically synthesized
aggaauaugacggaagaacau

SEQ ID NO: 21713 - RNA, 21 nt, artificial
  Chemically synthesized
agguguucuacacucaucuua

SEQ ID NO: 21714 - RNA, 21 nt, artificial
  Chemically synthesized
ucauugauugucagcuacuaa

SEQ ID NO: 21715 - RNA, 21 nt, artificial
  Chemically synthesized
ccuugagaccacaggguucaa

SEQ ID NO: 21716 - RNA, 21 nt, artificial
  Chemically synthesized
caucuuagugccugagaguau

SEQ ID NO: 21717 - RNA, 21 nt, artificial
  Chemically synthesized
gcaaguccaacucaaggucca

SEQ ID NO: 21718 - RNA, 21 nt, artificial
  Chemically synthesized
ugugaagagggagaagcauga

SEQ ID NO: 21719 - RNA, 21 nt, artificial
  Chemically synthesized
ggaauuguccugcuuucugga

SEQ ID NO: 21720 - RNA, 21 nt, artificial
  Chemically synthesized
gaaacuaacagauaagcaaga

SEQ ID NO: 21721 - RNA, 21 nt, artificial
  Chemically synthesized
ugggauucuuuccauuaugau

SEQ ID NO: 21722 - RNA, 21 nt, artificial
  Chemically synthesized
uguccugcuuucuggagugaa

SEQ ID NO: 21723 - RNA, 21 nt, artificial
  Chemically synthesized
gcacacagcaucaucuuugga

SEQ ID NO: 21724 - RNA, 21 nt, artificial
  Chemically synthesized
aaugggaagacaccuauggaa

SEQ ID NO: 21725 - RNA, 21 nt, artificial
  Chemically synthesized
gcuuauauaagcucuaagaga

SEQ ID NO: 21726 - RNA, 21 nt, artificial
  Chemically synthesized
ucaagguccaugccucuggaa

SEQ ID NO: 21727 - RNA, 21 nt, artificial
  Chemically synthesized
cugaaaaaaaggagcugagga

SEQ ID NO: 21728 - RNA, 21 nt, artificial
  Chemically synthesized
ccucuugagcagucagcaaca

SEQ ID NO: 21729 - RNA, 21 nt, artificial
  Chemically synthesized
cuacaggacugagaagaagua

SEQ ID NO: 21730 - RNA, 21 nt, artificial
  Chemically synthesized
caagguccaugccucuggaau

SEQ ID NO: 21731 - RNA, 21 nt, artificial
  Chemically synthesized
agggauggaaaaggaagacua

SEQ ID NO: 21732 - RNA, 21 nt, artificial
  Chemically synthesized
gguugcauuuggucaagauuu

SEQ ID NO: 21733 - RNA, 21 nt, artificial
  Chemically synthesized
uccugacaaucaacucuaaua

SEQ ID NO: 21734 - RNA, 21 nt, artificial
  Chemically synthesized
ggaagacaccuauggaauugu

SEQ ID NO: 21735 - RNA, 21 nt, artificial
  Chemically synthesized
ggguugcauuuggucaagauu

SEQ ID NO: 21736 - RNA, 21 nt, artificial
  Chemically synthesized
gaagaagagagggaaccacag

SEQ ID NO: 21737 - RNA, 21 nt, artificial
  Chemically synthesized
ugaggucaaguaagaagacau

SEQ ID NO: 21738 - RNA, 21 nt, artificial
  Chemically synthesized
gggacugucuuucagauacau

SEQ ID NO: 21739 - RNA, 21 nt, artificial
  Chemically synthesized
gaaugggaagacaccuaugga

SEQ ID NO: 21740 - RNA, 21 nt, artificial
  Chemically synthesized
ggccuugugaucaaugaaacu

SEQ ID NO: 21741 - RNA, 21 nt, artificial
  Chemically synthesized
ucuucccuguccaaccucugu

SEQ ID NO: 21742 - RNA, 21 nt, artificial
  Chemically synthesized
ccuuagcuauggaaacucuau

SEQ ID NO: 21743 - RNA, 21 nt, artificial
  Chemically synthesized
agcagcccuucaauuacccau

SEQ ID NO: 21744 - RNA, 21 nt, artificial
  Chemically synthesized
guguuucccuuagcuauggaa

SEQ ID NO: 21745 - RNA, 21 nt, artificial
  Chemically synthesized
aguggcccauuuaacaggcaa

SEQ ID NO: 21746 - RNA, 21 nt, artificial
  Chemically synthesized
gcaucuucacuucuaaaugca

SEQ ID NO: 21747 - RNA, 21 nt, artificial
  Chemically synthesized
gaucaaugaaacugggcugua

SEQ ID NO: 21748 - RNA, 21 nt, artificial
  Chemically synthesized
cauagaacucugggcugccau

SEQ ID NO: 21749 - RNA, 21 nt, artificial
  Chemically synthesized
gauacaugguugugaccugag

SEQ ID NO: 21750 - RNA, 21 nt, artificial
  Chemically synthesized
gagggucuucuuacaugcauu

SEQ ID NO: 21751 - RNA, 21 nt, artificial
  Chemically synthesized
caaucuuaccagugcugauca

SEQ ID NO: 21752 - RNA, 21 nt, artificial
  Chemically synthesized
aucggugaaacuaacagauaa

SEQ ID NO: 21753 - RNA, 21 nt, artificial
  Chemically synthesized
gcagcuaccagguguucuaca

SEQ ID NO: 21754 - RNA, 21 nt, artificial
  Chemically synthesized
aagagagggaaccacagcaca

SEQ ID NO: 21755 - RNA, 21 nt, artificial
  Chemically synthesized
ccucuacaggacugagaagaa

SEQ ID NO: 21756 - RNA, 21 nt, artificial
  Chemically synthesized
uggcagcaucuucacuucuaa

SEQ ID NO: 21757 - RNA, 21 nt, artificial
  Chemically synthesized
cugaggaaaguggcccauuua

SEQ ID NO: 21758 - RNA, 21 nt, artificial
  Chemically synthesized
gugaagagggagaagcaugaa

SEQ ID NO: 21759 - RNA, 21 nt, artificial
  Chemically synthesized
aacugggcuguacuuuguaua

SEQ ID NO: 21760 - RNA, 21 nt, artificial
  Chemically synthesized
gauuuugaaugcuuccugaca

SEQ ID NO: 21761 - RNA, 21 nt, artificial
  Chemically synthesized
gugagggucuucuuacaugca

SEQ ID NO: 21762 - RNA, 21 nt, artificial
  Chemically synthesized
cuaagagaagcacuuugggau

SEQ ID NO: 21763 - RNA, 21 nt, artificial
  Chemically synthesized
caugcagcagcccuucaauua

SEQ ID NO: 21764 - RNA, 21 nt, artificial
  Chemically synthesized
acaggcaccgagaauguugua

SEQ ID NO: 21765 - RNA, 21 nt, artificial
  Chemically synthesized
caaaaugucuguagcuccuca

SEQ ID NO: 21766 - RNA, 21 nt, artificial
  Chemically synthesized
gccagaugcacacagcaucau

SEQ ID NO: 21767 - RNA, 21 nt, artificial
  Chemically synthesized
acucauuucauuccuaacaca

SEQ ID NO: 21768 - RNA, 21 nt, artificial
  Chemically synthesized
gaauaugacggaagaacauag

SEQ ID NO: 21769 - RNA, 21 nt, artificial
  Chemically synthesized
guagcuccucaacucaccuaa

SEQ ID NO: 21770 - RNA, 21 nt, artificial
  Chemically synthesized
caguucuucccuguccaaccu

SEQ ID NO: 21771 - RNA, 21 nt, artificial
  Chemically synthesized
cuuagugccugagaguauuua

SEQ ID NO: 21772 - RNA, 21 nt, artificial
  Chemically synthesized
cagccucuacaggacugagaa

SEQ ID NO: 21773 - RNA, 21 nt, artificial
  Chemically synthesized
cuaauguuuaugagccagaca

SEQ ID NO: 21774 - RNA, 21 nt, artificial
  Chemically synthesized
ggacugagaagaaguaaaacc

SEQ ID NO: 21775 - RNA, 21 nt, artificial
  Chemically synthesized
gggucaaucuugcaacaaccu

SEQ ID NO: 21776 - RNA, 21 nt, artificial
  Chemically synthesized
cuggaaugggaagacaccuau

SEQ ID NO: 21777 - RNA, 21 nt, artificial
  Chemically synthesized
ugcauuugaggucaaguaaga

SEQ ID NO: 21778 - RNA, 21 nt, artificial
  Chemically synthesized
auaagaaggguggccuuguga

SEQ ID NO: 21779 - RNA, 21 nt, artificial
  Chemically synthesized
ugcuuucuggagugaaguaua

SEQ ID NO: 21780 - RNA, 21 nt, artificial
  Chemically synthesized
ugagggucuucuuacaugcau

SEQ ID NO: 21781 - RNA, 21 nt, artificial
  Chemically synthesized
cauguguauuuccagugcaau

SEQ ID NO: 21782 - RNA, 21 nt, artificial
  Chemically synthesized
acuucuaaaugcauauccuga

SEQ ID NO: 21783 - RNA, 21 nt, artificial
  Chemically synthesized
cuuagcuauggaaacucuaua

SEQ ID NO: 21784 - RNA, 21 nt, artificial
  Chemically synthesized
uggguugcauuuggucaagau

SEQ ID NO: 21785 - RNA, 21 nt, artificial
  Chemically synthesized
cccuucaauuacccauauccc

SEQ ID NO: 21786 - RNA, 21 nt, artificial
  Chemically synthesized
cagauaagcaagagagauguu

SEQ ID NO: 21787 - RNA, 21 nt, artificial
  Chemically synthesized
gcucucucuggucaauuuuga

SEQ ID NO: 21788 - RNA, 21 nt, artificial
  Chemically synthesized
ccuugugauguuuuucauggu

SEQ ID NO: 21789 - RNA, 21 nt, artificial
  Chemically synthesized
auauggguugcauuuggucaa

SEQ ID NO: 21790 - RNA, 21 nt, artificial
  Chemically synthesized
acugagaagaaguaaaaccgu

SEQ ID NO: 21791 - RNA, 21 nt, artificial
  Chemically synthesized
uuaggcagauugaaaaggaca

SEQ ID NO: 21792 - RNA, 21 nt, artificial
  Chemically synthesized
ggaggaauaugacggaagaac

SEQ ID NO: 21793 - RNA, 21 nt, artificial
  Chemically synthesized
gauggaaaaggaagacuagag

SEQ ID NO: 21794 - RNA, 21 nt, artificial
  Chemically synthesized
cuaccagguguucuacacuca

SEQ ID NO: 21795 - RNA, 21 nt, artificial
  Chemically synthesized
ucuggaaugggaagacaccua

SEQ ID NO: 21796 - RNA, 21 nt, artificial
  Chemically synthesized
aggccugugucuccuugugau

SEQ ID NO: 21797 - RNA, 21 nt, artificial
  Chemically synthesized
caaauggaggaauaugacgga

SEQ ID NO: 21798 - RNA, 21 nt, artificial
  Chemically synthesized
agaagcacuuugggauucuuu

SEQ ID NO: 21799 - RNA, 21 nt, artificial
  Chemically synthesized
aggucaaguaagaagacauga

SEQ ID NO: 21800 - RNA, 21 nt, artificial
  Chemically synthesized
gcuacuaaugauguuuuccua

SEQ ID NO: 21801 - RNA, 21 nt, artificial
  Chemically synthesized
ccagguguucuacacucaucu

SEQ ID NO: 21802 - RNA, 21 nt, artificial
  Chemically synthesized
uuuugaaugcuuccugacaau

SEQ ID NO: 21803 - RNA, 21 nt, artificial
  Chemically synthesized
ugauugucagcuacuaaugau

SEQ ID NO: 21804 - RNA, 21 nt, artificial
  Chemically synthesized
ccugaagaagagagggaacca

SEQ ID NO: 21805 - RNA, 21 nt, artificial
  Chemically synthesized
ccugagaguauuuaggcagau

SEQ ID NO: 21806 - RNA, 21 nt, artificial
  Chemically synthesized
ggaaaaggaagacuagaggcu

SEQ ID NO: 21807 - RNA, 21 nt, artificial
  Chemically synthesized
cacucaucuuagugccugaga

SEQ ID NO: 21808 - RNA, 21 nt, artificial
  Chemically synthesized
gcuccucaacucaccuaaugu

SEQ ID NO: 21809 - RNA, 21 nt, artificial
  Chemically synthesized
cagugagggucuucuuacaug

SEQ ID NO: 21810 - RNA, 21 nt, artificial
  Chemically synthesized
uaggaaaauauggguugcauu

SEQ ID NO: 21811 - RNA, 21 nt, artificial
  Chemically synthesized
gagugaaguauaagaagggug

SEQ ID NO: 21812 - RNA, 21 nt, artificial
  Chemically synthesized
cggcuuauauaagcucuaaga

SEQ ID NO: 21813 - RNA, 21 nt, artificial
  Chemically synthesized
ccgagaauguuguauucagug

SEQ ID NO: 21814 - RNA, 21 nt, artificial
  Chemically synthesized
aaguaagaagacaugaaccaa

SEQ ID NO: 21815 - RNA, 21 nt, artificial
  Chemically synthesized
gcucuuccaccuacagaagga

SEQ ID NO: 21816 - RNA, 21 nt, artificial
  Chemically synthesized
uaagaaggguggccuugugau

SEQ ID NO: 21817 - RNA, 21 nt, artificial
  Chemically synthesized
gcaugaaaaagcagcuaccag

SEQ ID NO: 21818 - RNA, 21 nt, artificial
  Chemically synthesized
ggaaaguggcccauuuaacag

SEQ ID NO: 21819 - RNA, 21 nt, artificial
  Chemically synthesized
uggucaagauuuugaaugcuu

SEQ ID NO: 21820 - RNA, 21 nt, artificial
  Chemically synthesized
gaggaaaguggcccauuuaac

SEQ ID NO: 21821 - RNA, 21 nt, artificial
  Chemically synthesized
ccuauggaauuguccugcuuu

SEQ ID NO: 21822 - RNA, 21 nt, artificial
  Chemically synthesized
uaagcuaaagaggcugaaaga

SEQ ID NO: 21823 - RNA, 21 nt, artificial
  Chemically synthesized
aaucauugauugucagcuacu

SEQ ID NO: 21824 - RNA, 21 nt, artificial
  Chemically synthesized
cugaggauuuaagggauggaa

SEQ ID NO: 21825 - RNA, 21 nt, artificial
  Chemically synthesized
aacuaacagauaagcaagaga

SEQ ID NO: 21826 - RNA, 21 nt, artificial
  Chemically synthesized
guaagaagacaugaaccaagu

SEQ ID NO: 21827 - RNA, 21 nt, artificial
  Chemically synthesized
ccuuuuaacucaccucucaag

SEQ ID NO: 21828 - RNA, 21 nt, artificial
  Chemically synthesized
aggaaaguggcccauuuaaca

SEQ ID NO: 21829 - RNA, 21 nt, artificial
  Chemically synthesized
ggacucauuucauuccuaaca

SEQ ID NO: 21830 - RNA, 21 nt, artificial
  Chemically synthesized
gggauggaaaaggaagacuag

SEQ ID NO: 21831 - RNA, 21 nt, artificial
  Chemically synthesized
gauuuaagggauggaaaagga

SEQ ID NO: 21832 - RNA, 21 nt, artificial
  Chemically synthesized
ucaucuuuggagaagcaaaua

SEQ ID NO: 21833 - RNA, 21 nt, artificial
  Chemically synthesized
caugugaagagggagaagcau

SEQ ID NO: 21834 - RNA, 21 nt, artificial
  Chemically synthesized
caucuucacuucuaaaugcau

SEQ ID NO: 21835 - RNA, 21 nt, artificial
  Chemically synthesized
caugaaccaaguggaccuuga

SEQ ID NO: 21836 - RNA, 21 nt, artificial
  Chemically synthesized
ucaccuaauguuuaugagcca

SEQ ID NO: 21837 - RNA, 21 nt, artificial
  Chemically synthesized
acaugcauuugaggucaagua

SEQ ID NO: 21838 - RNA, 21 nt, artificial
  Chemically synthesized
acuuugggauucuuuccauua

SEQ ID NO: 21839 - RNA, 21 nt, artificial
  Chemically synthesized
caguguucaaucuuaccagug

SEQ ID NO: 21840 - RNA, 21 nt, artificial
  Chemically synthesized
uugagaccacaggguucaaaa

SEQ ID NO: 21841 - RNA, 21 nt, artificial
  Chemically synthesized
cagugcugaucauuuauaugu

SEQ ID NO: 21842 - RNA, 21 nt, artificial
  Chemically synthesized
caccuuuuaacucaccucuca

SEQ ID NO: 21843 - RNA, 21 nt, artificial
  Chemically synthesized
cuuucuggagugaaguauaag

SEQ ID NO: 21844 - RNA, 21 nt, artificial
  Chemically synthesized
ccaugcagcagcccuucaauu

SEQ ID NO: 21845 - RNA, 21 nt, artificial
  Chemically synthesized
auggguugcauuuggucaaga

SEQ ID NO: 21846 - RNA, 21 nt, artificial
  Chemically synthesized
ggaagaacauagaacucuggg

SEQ ID NO: 21847 - RNA, 21 nt, artificial
  Chemically synthesized
aggaaaauauggguugcauuu

SEQ ID NO: 21848 - RNA, 21 nt, artificial
  Chemically synthesized
cagacguuuuucggcuuauau

SEQ ID NO: 21849 - RNA, 21 nt, artificial
  Chemically synthesized
gaagaaguaaaaccguuugcu

SEQ ID NO: 21850 - RNA, 21 nt, artificial
  Chemically synthesized
ucuuagugccugagaguauuu

SEQ ID NO: 21851 - RNA, 21 nt, artificial
  Chemically synthesized
caugguucugguugccuuggu

SEQ ID NO: 21852 - RNA, 21 nt, artificial
  Chemically synthesized
cugccaugugaagagggagaa

SEQ ID NO: 21853 - RNA, 21 nt, artificial
  Chemically synthesized
uauccugagccaucggugaaa

SEQ ID NO: 21854 - RNA, 21 nt, artificial
  Chemically synthesized
aauggaggaauaugacggaag

SEQ ID NO: 21855 - RNA, 21 nt, artificial
  Chemically synthesized
acaugguugugaccugaggau

SEQ ID NO: 21856 - RNA, 21 nt, artificial
  Chemically synthesized
cugacaaucaacucuaauagu

SEQ ID NO: 21857 - RNA, 21 nt, artificial
  Chemically synthesized
gccacaaggucuacaugagga

SEQ ID NO: 21858 - RNA, 21 nt, artificial
  Chemically synthesized
cauuugaggucaaguaagaag

SEQ ID NO: 21859 - RNA, 21 nt, artificial
  Chemically synthesized
cacuuugggauucuuuccauu

SEQ ID NO: 21860 - RNA, 21 nt, artificial
  Chemically synthesized
ggucaauuuugaggaaucuca

SEQ ID NO: 21861 - RNA, 21 nt, artificial
  Chemically synthesized
guugcauuuggucaagauuuu

SEQ ID NO: 21862 - RNA, 21 nt, artificial
  Chemically synthesized
ugaaccaaguggaccuugaga

SEQ ID NO: 21863 - RNA, 21 nt, artificial
  Chemically synthesized
cuuucagauacaugguuguga

SEQ ID NO: 21864 - RNA, 21 nt, artificial
  Chemically synthesized
ucagcucuuccaccuacagaa

SEQ ID NO: 21865 - RNA, 21 nt, artificial
  Chemically synthesized
gaaaaagcagcuaccaggugu

SEQ ID NO: 21866 - RNA, 21 nt, artificial
  Chemically synthesized
guagaugugcauuuuugugaa

SEQ ID NO: 21867 - RNA, 21 nt, artificial
  Chemically synthesized
uaacaggcaaguccaacucaa

SEQ ID NO: 21868 - RNA, 21 nt, artificial
  Chemically synthesized
cugucuuucagauacaugguu

SEQ ID NO: 21869 - RNA, 21 nt, artificial
  Chemically synthesized
caggcaccgagaauguuguau

SEQ ID NO: 21870 - RNA, 21 nt, artificial
  Chemically synthesized
agcuauggaaacucuauaaga

SEQ ID NO: 21871 - RNA, 21 nt, artificial
  Chemically synthesized
cucuggucaauuuugaggaau

SEQ ID NO: 21872 - RNA, 21 nt, artificial
  Chemically synthesized
ggacugucuuucagauacaug

SEQ ID NO: 21873 - RNA, 21 nt, artificial
  Chemically synthesized
agaggcuugcauaauaagcua

SEQ ID NO: 21874 - RNA, 21 nt, artificial
  Chemically synthesized
gugaccugaggauuuaaggga

SEQ ID NO: 21875 - RNA, 21 nt, artificial
  Chemically synthesized
uguagaugugcauuuuuguga

SEQ ID NO: 21876 - RNA, 21 nt, artificial
  Chemically synthesized
auuucauuccuaacacagcau

SEQ ID NO: 21877 - RNA, 21 nt, artificial
  Chemically synthesized
auuugaggucaaguaagaaga

SEQ ID NO: 21878 - RNA, 21 nt, artificial
  Chemically synthesized
uuaagggauggaaaaggaaga

SEQ ID NO: 21879 - RNA, 21 nt, artificial
  Chemically synthesized
uacaggacugagaagaaguaa

SEQ ID NO: 21880 - RNA, 21 nt, artificial
  Chemically synthesized
aaauggaggaauaugacggaa

SEQ ID NO: 21881 - RNA, 21 nt, artificial
  Chemically synthesized
ccugugucuccuugugauguu

SEQ ID NO: 21882 - RNA, 21 nt, artificial
  Chemically synthesized
agauuuugaaugcuuccugac

SEQ ID NO: 21883 - RNA, 21 nt, artificial
  Chemically synthesized
cuugagaccacaggguucaaa

SEQ ID NO: 21884 - RNA, 21 nt, artificial
  Chemically synthesized
ggagaagcaugaaaaagcagc

SEQ ID NO: 21885 - RNA, 21 nt, artificial
  Chemically synthesized
gacugagaagaaguaaaaccg

SEQ ID NO: 21886 - RNA, 21 nt, artificial
  Chemically synthesized
caaguccaacucaagguccau

SEQ ID NO: 21887 - RNA, 21 nt, artificial
  Chemically synthesized
aggaagacuagaggcuugcau

SEQ ID NO: 21888 - RNA, 21 nt, artificial
  Chemically synthesized
gcaccgagaauguuguauuca

SEQ ID NO: 21889 - RNA, 21 nt, artificial
  Chemically synthesized
uguauuuccagugcaauugua

SEQ ID NO: 21890 - RNA, 21 nt, artificial
  Chemically synthesized
auguguauuuccagugcaauu

SEQ ID NO: 21891 - RNA, 21 nt, artificial
  Chemically synthesized
gauugucagcuacuaaugaug

SEQ ID NO: 21892 - RNA, 21 nt, artificial
  Chemically synthesized
ucaucuuagugccugagagua

SEQ ID NO: 21893 - RNA, 21 nt, artificial
  Chemically synthesized
acaguucuucccuguccaacc

SEQ ID NO: 21894 - RNA, 21 nt, artificial
  Chemically synthesized
cuuaccagugcugaucauuua

SEQ ID NO: 21895 - RNA, 21 nt, artificial
  Chemically synthesized
cugagaguauuuaggcagauu

SEQ ID NO: 21896 - RNA, 21 nt, artificial
  Chemically synthesized
uuaccagugcugaucauuuau

SEQ ID NO: 21897 - RNA, 21 nt, artificial
  Chemically synthesized
caucuuuggagaagcaaauag

SEQ ID NO: 21898 - RNA, 21 nt, artificial
  Chemically synthesized
gaaugcuuccugacaaucaac

SEQ ID NO: 21899 - RNA, 21 nt, artificial
  Chemically synthesized
gacggaagaacauagaacucu

SEQ ID NO: 21900 - RNA, 21 nt, artificial
  Chemically synthesized
auauccugagccaucggugaa

SEQ ID NO: 21901 - RNA, 21 nt, artificial
  Chemically synthesized
ugagccacaaggucuacauga

SEQ ID NO: 21902 - RNA, 21 nt, artificial
  Chemically synthesized
gucuccuugugauguuuuuca

SEQ ID NO: 21903 - RNA, 21 nt, artificial
  Chemically synthesized
cucaacucaccuaauguuuau

SEQ ID NO: 21904 - RNA, 21 nt, artificial
  Chemically synthesized
agauaagcaagagagauguuu

SEQ ID NO: 21905 - RNA, 21 nt, artificial
  Chemically synthesized
gggcaguguucaaucuuacca

SEQ ID NO: 21906 - RNA, 21 nt, artificial
  Chemically synthesized
aaaaaaaggagcugaggaaag

SEQ ID NO: 21907 - RNA, 21 nt, artificial
  Chemically synthesized
ucuggagugaaguauaagaag

SEQ ID NO: 21908 - RNA, 21 nt, artificial
  Chemically synthesized
ucaauuuugaggaaucucaga

SEQ ID NO: 21909 - RNA, 21 nt, artificial
  Chemically synthesized
ucuaagagaagcacuuuggga

SEQ ID NO: 21910 - RNA, 21 nt, artificial
  Chemically synthesized
cacacagcaucaucuuuggag

SEQ ID NO: 21911 - RNA, 21 nt, artificial
  Chemically synthesized
ucagugagggucuucuuacau

SEQ ID NO: 21912 - RNA, 21 nt, artificial
  Chemically synthesized
cccauuuaacaggcaagucca

SEQ ID NO: 21913 - RNA, 21 nt, artificial
  Chemically synthesized
cucagacguuuuucggcuuau

SEQ ID NO: 21914 - RNA, 21 nt, artificial
  Chemically synthesized
cggaagaacauagaacucugg

SEQ ID NO: 21915 - RNA, 21 nt, artificial
  Chemically synthesized
cauuucauuccuaacacagca

SEQ ID NO: 21916 - RNA, 21 nt, artificial
  Chemically synthesized
auggaaacucuauaagagaga

SEQ ID NO: 21917 - RNA, 21 nt, artificial
  Chemically synthesized
guuacaggcaccgagaauguu

SEQ ID NO: 21918 - RNA, 21 nt, artificial
  Chemically synthesized
cuuugggauucuuuccauuau

SEQ ID NO: 21919 - RNA, 21 nt, artificial
  Chemically synthesized
aaguggaccuugagaccacag

SEQ ID NO: 21920 - RNA, 21 nt, artificial
  Chemically synthesized
aguaagaagacaugaaccaag

SEQ ID NO: 21921 - RNA, 21 nt, artificial
  Chemically synthesized
caaguggaccuugagaccaca

SEQ ID NO: 21922 - RNA, 21 nt, artificial
  Chemically synthesized
aagacuagaggcuugcauaau

SEQ ID NO: 21923 - RNA, 21 nt, artificial
  Chemically synthesized
gacaaauggaggaauaugacg

SEQ ID NO: 21924 - RNA, 21 nt, artificial
  Chemically synthesized
cuugacaccucagccucuaca

SEQ ID NO: 21925 - RNA, 21 nt, artificial
  Chemically synthesized
gcacuuugggauucuuuccau

SEQ ID NO: 21926 - RNA, 21 nt, artificial
  Chemically synthesized
gagaagaaguaaaaccguuug

SEQ ID NO: 21927 - RNA, 21 nt, artificial
  Chemically synthesized
ccaucggugaaacuaacagau

SEQ ID NO: 21928 - RNA, 21 nt, artificial
  Chemically synthesized
gccagacaaauggaggaauau

SEQ ID NO: 21929 - RNA, 21 nt, artificial
  Chemically synthesized
ugaccugaggauuuaagggau

SEQ ID NO: 21930 - RNA, 21 nt, artificial
  Chemically synthesized
uauucagugagggucuucuua

SEQ ID NO: 21931 - RNA, 21 nt, artificial
  Chemically synthesized
agaagacaugaaccaagugga

SEQ ID NO: 21932 - RNA, 21 nt, artificial
  Chemically synthesized
gccucuacaggacugagaaga

SEQ ID NO: 21933 - RNA, 21 nt, artificial
  Chemically synthesized
agggucuucuuacaugcauuu

SEQ ID NO: 21934 - RNA, 21 nt, artificial
  Chemically synthesized
gugucuccuugugauguuuuu

SEQ ID NO: 21935 - RNA, 21 nt, artificial
  Chemically synthesized
augggaagacaccuauggaau

SEQ ID NO: 21936 - RNA, 21 nt, artificial
  Chemically synthesized
agcugaggaaaguggcccauu

SEQ ID NO: 21937 - RNA, 21 nt, artificial
  Chemically synthesized
agaagaaguaaaaccguuugc

SEQ ID NO: 21938 - RNA, 21 nt, artificial
  Chemically synthesized
gauaagcaagagagauguuuu

SEQ ID NO: 21939 - RNA, 21 nt, artificial
  Chemically synthesized
ugggaagacaccuauggaauu

SEQ ID NO: 21940 - RNA, 21 nt, artificial
  Chemically synthesized
agucuaccagccagaugcaca

SEQ ID NO: 21941 - RNA, 21 nt, artificial
  Chemically synthesized
aauaugacggaagaacauaga

SEQ ID NO: 21942 - RNA, 21 nt, artificial
  Chemically synthesized
guauuuaggcagauugaaaag

SEQ ID NO: 21943 - RNA, 21 nt, artificial
  Chemically synthesized
gggacucauuucauuccuaac

SEQ ID NO: 21944 - RNA, 21 nt, artificial
  Chemically synthesized
uaccagguguucuacacucau

SEQ ID NO: 21945 - RNA, 21 nt, artificial
  Chemically synthesized
gcugaggaaaguggcccauuu

SEQ ID NO: 21946 - RNA, 21 nt, artificial
  Chemically synthesized
uuuugaggaaucucagacguu

SEQ ID NO: 21947 - RNA, 21 nt, artificial
  Chemically synthesized
uuccugacaaucaacucuaau

SEQ ID NO: 21948 - RNA, 21 nt, artificial
  Chemically synthesized
uucuggagugaaguauaagaa

SEQ ID NO: 21949 - RNA, 21 nt, artificial
  Chemically synthesized
agaucuacuggguggacagca

SEQ ID NO: 21950 - RNA, 21 nt, artificial
  Chemically synthesized
gucuuucagauacaugguugu

SEQ ID NO: 21951 - RNA, 21 nt, artificial
  Chemically synthesized
aaugcuuccugacaaucaacu

SEQ ID NO: 21952 - RNA, 21 nt, artificial
  Chemically synthesized
agagucuaccagccagaugca

SEQ ID NO: 21953 - RNA, 21 nt, artificial
  Chemically synthesized
gcaguguucaaucuuaccagu

SEQ ID NO: 21954 - RNA, 21 nt, artificial
  Chemically synthesized
guauaagaaggguggccuugu

SEQ ID NO: 21955 - RNA, 21 nt, artificial
  Chemically synthesized
gaagcacuuugggauucuuuc

SEQ ID NO: 21956 - RNA, 21 nt, artificial
  Chemically synthesized
aaaauauggguugcauuuggu

SEQ ID NO: 21957 - RNA, 21 nt, artificial
  Chemically synthesized
acaaggucuacaugaggaacu

SEQ ID NO: 21958 - RNA, 21 nt, artificial
  Chemically synthesized
agaccacaggguucaaaaugu

SEQ ID NO: 21959 - RNA, 21 nt, artificial
  Chemically synthesized
aaacugggcuguacuuuguau

SEQ ID NO: 21960 - RNA, 21 nt, artificial
  Chemically synthesized
ugaaugcuuccugacaaucaa

SEQ ID NO: 21961 - RNA, 21 nt, artificial
  Chemically synthesized
ucuacaggacugagaagaagu

SEQ ID NO: 21962 - RNA, 21 nt, artificial
  Chemically synthesized
gagccagacaaauggaggaau

SEQ ID NO: 21963 - RNA, 21 nt, artificial
  Chemically synthesized
augugaagagggagaagcaug

SEQ ID NO: 21964 - RNA, 21 nt, artificial
  Chemically synthesized
acaaucaacucuaauagugcu

SEQ ID NO: 21965 - RNA, 21 nt, artificial
  Chemically synthesized
cuaaaugcauauccugagcca

SEQ ID NO: 21966 - RNA, 21 nt, artificial
  Chemically synthesized
uuucggcuuauauaagcucua

SEQ ID NO: 21967 - RNA, 21 nt, artificial
  Chemically synthesized
auuuugaaugcuuccugacaa

SEQ ID NO: 21968 - RNA, 21 nt, artificial
  Chemically synthesized
auguuuaugagccagacaaau

SEQ ID NO: 21969 - RNA, 21 nt, artificial
  Chemically synthesized
gggauucuuuccauuaugauu

SEQ ID NO: 21970 - RNA, 21 nt, artificial
  Chemically synthesized
gaagcaugaaaaagcagcuac

SEQ ID NO: 21971 - RNA, 21 nt, artificial
  Chemically synthesized
uccaugccucuggaaugggaa

SEQ ID NO: 21972 - RNA, 21 nt, artificial
  Chemically synthesized
ucggcuuauauaagcucuaag

SEQ ID NO: 21973 - RNA, 21 nt, artificial
  Chemically synthesized
gcagauugaaaaggacaccuu

SEQ ID NO: 21974 - RNA, 21 nt, artificial
  Chemically synthesized
cucauuucauuccuaacacag

SEQ ID NO: 21975 - RNA, 21 nt, artificial
  Chemically synthesized
uucuucccuguccaaccucug

SEQ ID NO: 21976 - RNA, 21 nt, artificial
  Chemically synthesized
cacaguucuucccuguccaac

SEQ ID NO: 21977 - RNA, 21 nt, artificial
  Chemically synthesized
cuccucuugagcagucagcaa

SEQ ID NO: 21978 - RNA, 21 nt, artificial
  Chemically synthesized
agauccagcuugccuccucuu

SEQ ID NO: 21979 - RNA, 21 nt, artificial
  Chemically synthesized
gaaccaaguggaccuugagac

SEQ ID NO: 21980 - RNA, 21 nt, artificial
  Chemically synthesized
agacaaauggaggaauaugac

SEQ ID NO: 21981 - RNA, 21 nt, artificial
  Chemically synthesized
uuucuggagugaaguauaaga

SEQ ID NO: 21982 - RNA, 21 nt, artificial
  Chemically synthesized
ugaggaaucucagacguuuuu

SEQ ID NO: 21983 - RNA, 21 nt, artificial
  Chemically synthesized
agagggagaagcaugaaaaag

SEQ ID NO: 21984 - RNA, 21 nt, artificial
  Chemically synthesized
ugcauuuggucaagauuuuga

SEQ ID NO: 21985 - RNA, 21 nt, artificial
  Chemically synthesized
caccgagaauguuguauucag

SEQ ID NO: 21986 - RNA, 21 nt, artificial
  Chemically synthesized
cauauccugagccaucgguga

SEQ ID NO: 21987 - RNA, 21 nt, artificial
  Chemically synthesized
ccugagccaucggugaaacua

SEQ ID NO: 21988 - RNA, 21 nt, artificial
  Chemically synthesized
ucggugaaacuaacagauaag

SEQ ID NO: 21989 - RNA, 21 nt, artificial
  Chemically synthesized
guugugaccugaggauuuaag

SEQ ID NO: 21990 - RNA, 21 nt, artificial
  Chemically synthesized
cugcuuucuggagugaaguau

SEQ ID NO: 21991 - RNA, 21 nt, artificial
  Chemically synthesized
caggcaaguccaacucaaggu

SEQ ID NO: 21992 - RNA, 21 nt, artificial
  Chemically synthesized
agagaagcacuuugggauucu

SEQ ID NO: 21993 - RNA, 21 nt, artificial
  Chemically synthesized
augcauuugaggucaaguaag

SEQ ID NO: 21994 - RNA, 21 nt, artificial
  Chemically synthesized
uuuguuacaggcaccgagaau

SEQ ID NO: 21995 - RNA, 21 nt, artificial
  Chemically synthesized
aggacaccuuuuaacucaccu

SEQ ID NO: 21996 - RNA, 21 nt, artificial
  Chemically synthesized
gaaguaaaaccguuugcuggg

SEQ ID NO: 21997 - RNA, 21 nt, artificial
  Chemically synthesized
acguuuuucggcuuauauaag

SEQ ID NO: 21998 - RNA, 21 nt, artificial
  Chemically synthesized
aagauuuugaaugcuuccuga

SEQ ID NO: 21999 - RNA, 21 nt, artificial
  Chemically synthesized
gagaagcacuuugggauucuu

SEQ ID NO: 22000 - RNA, 21 nt, artificial
  Chemically synthesized
cccugaaaaaaaggagcugag

SEQ ID NO: 22001 - RNA, 21 nt, artificial
  Chemically synthesized
uugggauucuuuccauuauga

SEQ ID NO: 22002 - RNA, 21 nt, artificial
  Chemically synthesized
aaggaagacuagaggcuugca

SEQ ID NO: 22003 - RNA, 21 nt, artificial
  Chemically synthesized
cuucuaaaugcauauccugag

SEQ ID NO: 22004 - RNA, 21 nt, artificial
  Chemically synthesized
ucugguugccuugguaggauu

SEQ ID NO: 22005 - RNA, 21 nt, artificial
  Chemically synthesized
cggugaaacuaacagauaagc

SEQ ID NO: 22006 - RNA, 21 nt, artificial
  Chemically synthesized
ggucaagauuuugaaugcuuc

SEQ ID NO: 22007 - RNA, 21 nt, artificial
  Chemically synthesized
cucucuggucaauuuugagga

SEQ ID NO: 22008 - RNA, 21 nt, artificial
  Chemically synthesized
cugagcucucucuggucaauu

SEQ ID NO: 22009 - RNA, 21 nt, artificial
  Chemically synthesized
acugggcuguacuuuguauau

SEQ ID NO: 22010 - RNA, 21 nt, artificial
  Chemically synthesized
cagauugaaaaggacaccuuu

SEQ ID NO: 22011 - RNA, 21 nt, artificial
  Chemically synthesized
ccuugugaucaaugaaacugg

SEQ ID NO: 22012 - RNA, 21 nt, artificial
  Chemically synthesized
gccugugucuccuugugaugu

SEQ ID NO: 22013 - RNA, 21 nt, artificial
  Chemically synthesized
uguuuaugagccagacaaaug

SEQ ID NO: 22014 - RNA, 21 nt, artificial
  Chemically synthesized
uaauaagcuaaagaggcugaa

SEQ ID NO: 22015 - RNA, 21 nt, artificial
  Chemically synthesized
ugguucugguugccuugguag

SEQ ID NO: 22016 - RNA, 21 nt, artificial
  Chemically synthesized
ugugucuccuugugauguuuu

SEQ ID NO: 22017 - RNA, 21 nt, artificial
  Chemically synthesized
aaucuuaccagugcugaucau

SEQ ID NO: 22018 - RNA, 21 nt, artificial
  Chemically synthesized
ucucagacguuuuucggcuua

SEQ ID NO: 22019 - RNA, 21 nt, artificial
  Chemically synthesized
ccacaggguucaaaaugucug

SEQ ID NO: 22020 - RNA, 21 nt, artificial
  Chemically synthesized
caugguugugaccugaggauu

SEQ ID NO: 22021 - RNA, 21 nt, artificial
  Chemically synthesized
uguagcuccucaacucaccua

SEQ ID NO: 22022 - RNA, 21 nt, artificial
  Chemically synthesized
gagaauguuguauucagugag

SEQ ID NO: 22023 - RNA, 21 nt, artificial
  Chemically synthesized
uaccagugcugaucauuuaua

SEQ ID NO: 22024 - RNA, 21 nt, artificial
  Chemically synthesized
gugcugaucauuuauauguca

SEQ ID NO: 22025 - RNA, 21 nt, artificial
  Chemically synthesized
ggaaaauauggguugcauuug

SEQ ID NO: 22026 - RNA, 21 nt, artificial
  Chemically synthesized
aagcagcuaccagguguucua

SEQ ID NO: 22027 - RNA, 21 nt, artificial
  Chemically synthesized
cagguguucuacacucaucuu

SEQ ID NO: 22028 - RNA, 21 nt, artificial
  Chemically synthesized
ccagugcugaucauuuauaug

SEQ ID NO: 22029 - RNA, 21 nt, artificial
  Chemically synthesized
cacuucuaaaugcauauccug

SEQ ID NO: 22030 - RNA, 21 nt, artificial
  Chemically synthesized
aaggguggccuugugaucaau

SEQ ID NO: 22031 - RNA, 21 nt, artificial
  Chemically synthesized
uuaacaggcaaguccaacuca

SEQ ID NO: 22032 - RNA, 21 nt, artificial
  Chemically synthesized
uccugagccaucggugaaacu

SEQ ID NO: 22033 - RNA, 21 nt, artificial
  Chemically synthesized
ugugauguuuuucaugguucu

SEQ ID NO: 22034 - RNA, 21 nt, artificial
  Chemically synthesized
agauugaaaaggacaccuuuu

SEQ ID NO: 22035 - RNA, 21 nt, artificial
  Chemically synthesized
caggaucuggugaugauggag

SEQ ID NO: 22036 - RNA, 21 nt, artificial
  Chemically synthesized
auguuucagcucuuccaccua

SEQ ID NO: 22037 - RNA, 21 nt, artificial
  Chemically synthesized
cagaacuccgagagucuacca

SEQ ID NO: 22038 - RNA, 21 nt, artificial
  Chemically synthesized
ucaaugaaacugggcuguacu

SEQ ID NO: 22039 - RNA, 21 nt, artificial
  Chemically synthesized
gcugaucauuuauaugucaac

SEQ ID NO: 22040 - RNA, 21 nt, artificial
  Chemically synthesized
uugauugucagcuacuaauga

SEQ ID NO: 22041 - RNA, 21 nt, artificial
  Chemically synthesized
auauaagcucuaagagaagca

SEQ ID NO: 22042 - RNA, 21 nt, artificial
  Chemically synthesized
ucuucuuacaugcauuugagg

SEQ ID NO: 22043 - RNA, 21 nt, artificial
  Chemically synthesized
uguuguauucagugagggucu

SEQ ID NO: 22044 - RNA, 21 nt, artificial
  Chemically synthesized
guguauuuccagugcaauugu

SEQ ID NO: 22045 - RNA, 21 nt, artificial
  Chemically synthesized
agagagaauguagauauugug

SEQ ID NO: 22046 - RNA, 21 nt, artificial
  Chemically synthesized
uggagugaaguauaagaaggg

SEQ ID NO: 22047 - RNA, 21 nt, artificial
  Chemically synthesized
caacguaucugagcucucucu

SEQ ID NO: 22048 - RNA, 21 nt, artificial
  Chemically synthesized
uucagugagggucuucuuaca

SEQ ID NO: 22049 - RNA, 21 nt, artificial
  Chemically synthesized
gaugcacacagcaucaucuuu

SEQ ID NO: 22050 - RNA, 21 nt, artificial
  Chemically synthesized
gagaauguagauauugugaag

SEQ ID NO: 22051 - RNA, 21 nt, artificial
  Chemically synthesized
augguucugguugccuuggua

SEQ ID NO: 22052 - RNA, 21 nt, artificial
  Chemically synthesized
ucuccuugugauguuuuucau

SEQ ID NO: 22053 - RNA, 21 nt, artificial
  Chemically synthesized
agccagacaaauggaggaaua

SEQ ID NO: 22054 - RNA, 21 nt, artificial
  Chemically synthesized
gccaucggugaaacuaacaga

SEQ ID NO: 22055 - RNA, 21 nt, artificial
  Chemically synthesized
ggauguuucagcucuuccacc

SEQ ID NO: 22056 - RNA, 21 nt, artificial
  Chemically synthesized
uggcagaacuccgagagucua

SEQ ID NO: 22057 - RNA, 21 nt, artificial
  Chemically synthesized
ccugagccacaaggucuacau

SEQ ID NO: 22058 - RNA, 21 nt, artificial
  Chemically synthesized
agauacaugguugugaccuga

SEQ ID NO: 22059 - RNA, 21 nt, artificial
  Chemically synthesized
gauguuuuucaugguucuggu

SEQ ID NO: 22060 - RNA, 21 nt, artificial
  Chemically synthesized
uacaugguugugaccugagga

SEQ ID NO: 22061 - RNA, 21 nt, artificial
  Chemically synthesized
aauguuguauucagugagggu

SEQ ID NO: 22062 - RNA, 21 nt, artificial
  Chemically synthesized
aaaaagcagcuaccagguguu

SEQ ID NO: 22063 - RNA, 21 nt, artificial
  Chemically synthesized
aaguggcccauuuaacaggca

SEQ ID NO: 22064 - RNA, 21 nt, artificial
  Chemically synthesized
agaaggguggccuugugauca

SEQ ID NO: 22065 - RNA, 21 nt, artificial
  Chemically synthesized
ccagaugcacacagcaucauc

SEQ ID NO: 22066 - RNA, 21 nt, artificial
  Chemically synthesized
uugucagcuacuaaugauguu

SEQ ID NO: 22067 - RNA, 21 nt, artificial
  Chemically synthesized
guaucugagcucucucugguc

SEQ ID NO: 22068 - RNA, 21 nt, artificial
  Chemically synthesized
auggaggaauaugacggaaga

SEQ ID NO: 22069 - RNA, 21 nt, artificial
  Chemically synthesized
ggaaugggaagacaccuaugg

SEQ ID NO: 22070 - RNA, 21 nt, artificial
  Chemically synthesized
ggucaaucuugcaacaaccug

SEQ ID NO: 22071 - RNA, 21 nt, artificial
  Chemically synthesized
cuauaagagagauccagcuug

SEQ ID NO: 22072 - RNA, 21 nt, artificial
  Chemically synthesized
gagcucucucuggucaauuuu

SEQ ID NO: 22073 - RNA, 21 nt, artificial
  Chemically synthesized
cuugcauaauaagcuaaagag

SEQ ID NO: 22074 - RNA, 21 nt, artificial
  Chemically synthesized
aacaggcaaguccaacucaag

SEQ ID NO: 22075 - RNA, 21 nt, artificial
  Chemically synthesized
caugaaaaagcagcuaccagg

SEQ ID NO: 22076 - RNA, 21 nt, artificial
  Chemically synthesized
ucagacguuuuucggcuuaua

SEQ ID NO: 22077 - RNA, 21 nt, artificial
  Chemically synthesized
gagggagaagcaugaaaaagc

SEQ ID NO: 22078 - RNA, 21 nt, artificial
  Chemically synthesized
ucagccucuacaggacugaga

SEQ ID NO: 22079 - RNA, 21 nt, artificial
  Chemically synthesized
gaaaaggaagacuagaggcuu

SEQ ID NO: 22080 - RNA, 21 nt, artificial
  Chemically synthesized
uuaugauucuuuguuacaggc

SEQ ID NO: 22081 - RNA, 21 nt, artificial
  Chemically synthesized
gucuguagcuccucaacucac

SEQ ID NO: 22082 - RNA, 21 nt, artificial
  Chemically synthesized
caacucaccuaauguuuauga

SEQ ID NO: 22083 - RNA, 21 nt, artificial
  Chemically synthesized
auuuaggcagauugaaaagga

SEQ ID NO: 22084 - RNA, 21 nt, artificial
  Chemically synthesized
ugguugugaccugaggauuua

SEQ ID NO: 22085 - RNA, 21 nt, artificial
  Chemically synthesized
uguuucccuuagcuauggaaa

SEQ ID NO: 22086 - RNA, 21 nt, artificial
  Chemically synthesized
ugucuguagcuccucaacuca

SEQ ID NO: 22087 - RNA, 21 nt, artificial
  Chemically synthesized
agcucucucuggucaauuuug

SEQ ID NO: 22088 - RNA, 21 nt, artificial
  Chemically synthesized
ggagugaaguauaagaagggu

SEQ ID NO: 22089 - RNA, 21 nt, artificial
  Chemically synthesized
agggagaagcaugaaaaagca

SEQ ID NO: 22090 - RNA, 21 nt, artificial
  Chemically synthesized
aggcaccgagaauguuguauu

SEQ ID NO: 22091 - RNA, 21 nt, artificial
  Chemically synthesized
uaacagauaagcaagagagau

SEQ ID NO: 22092 - RNA, 21 nt, artificial
  Chemically synthesized
agaugcacacagcaucaucuu

SEQ ID NO: 22093 - RNA, 21 nt, artificial
  Chemically synthesized
ugagaccacaggguucaaaau

SEQ ID NO: 22094 - RNA, 21 nt, artificial
  Chemically synthesized
ugaaaaggacaccuuuuaacu

SEQ ID NO: 22095 - RNA, 21 nt, artificial
  Chemically synthesized
aaauauggguugcauuugguc

SEQ ID NO: 22096 - RNA, 21 nt, artificial
  Chemically synthesized
cuucuuacaugcauuugaggu

SEQ ID NO: 22097 - RNA, 21 nt, artificial
  Chemically synthesized
auuaggaaaauauggguugca

SEQ ID NO: 22098 - RNA, 21 nt, artificial
  Chemically synthesized
gaauguuguauucagugaggg

SEQ ID NO: 22099 - RNA, 21 nt, artificial
  Chemically synthesized
ucuacaugaggaacucuaagu

SEQ ID NO: 22100 - RNA, 21 nt, artificial
  Chemically synthesized
uuaugagccagacaaauggag

SEQ ID NO: 22101 - RNA, 21 nt, artificial
  Chemically synthesized
cuguagcuccucaacucaccu

SEQ ID NO: 22102 - RNA, 21 nt, artificial
  Chemically synthesized
uggccuugugaucaaugaaac

SEQ ID NO: 22103 - RNA, 21 nt, artificial
  Chemically synthesized
aaaaaaggagcugaggaaagu

SEQ ID NO: 22104 - RNA, 21 nt, artificial
  Chemically synthesized
auguuuuucaugguucugguu

SEQ ID NO: 22105 - RNA, 21 nt, artificial
  Chemically synthesized
accuauggaauuguccugcuu

SEQ ID NO: 22106 - RNA, 21 nt, artificial
  Chemically synthesized
uguucaaucuuaccagugcug

SEQ ID NO: 22107 - RNA, 21 nt, artificial
  Chemically synthesized
uccucaacucaccuaauguuu

SEQ ID NO: 22108 - RNA, 21 nt, artificial
  Chemically synthesized
acacagcaucaucuuuggaga

SEQ ID NO: 22109 - RNA, 21 nt, artificial
  Chemically synthesized
auauggguaauugaagggcug

SEQ ID NO: 22110 - RNA, 21 nt, artificial
  Chemically synthesized
uuuuccaucccuuaaauccuc

SEQ ID NO: 22111 - RNA, 21 nt, artificial
  Chemically synthesized
uuggacagggaagaacugugc

SEQ ID NO: 22112 - RNA, 21 nt, artificial
  Chemically synthesized
uuucaaucugccuaaauacuc

SEQ ID NO: 22113 - RNA, 21 nt, artificial
  Chemically synthesized
uggaauauacaaaguacagcc

SEQ ID NO: 22114 - RNA, 21 nt, artificial
  Chemically synthesized
uuggacuugccuguuaaaugg

SEQ ID NO: 22115 - RNA, 21 nt, artificial
  Chemically synthesized
uuuagaagugaagaugcugcc

SEQ ID NO: 22116 - RNA, 21 nt, artificial
  Chemically synthesized
gagguuggacagggaagaacu

SEQ ID NO: 22117 - RNA, 21 nt, artificial
  Chemically synthesized
uuucaugcuucucccucuuca

SEQ ID NO: 22118 - RNA, 21 nt, artificial
  Chemically synthesized
ucuagucuuccuuuuccaucc

SEQ ID NO: 22119 - RNA, 21 nt, artificial
  Chemically synthesized
uuaaaugggccacuuuccuca

SEQ ID NO: 22120 - RNA, 21 nt, artificial
  Chemically synthesized
uuaaauccucaggucacaacc

SEQ ID NO: 22121 - RNA, 21 nt, artificial
  Chemically synthesized
uuagcuuauuaugcaagccuc

SEQ ID NO: 22122 - RNA, 21 nt, artificial
  Chemically synthesized
uauguucuuccgucauauucc

SEQ ID NO: 22123 - RNA, 21 nt, artificial
  Chemically synthesized
uacaaaguacagcccaguuuc

SEQ ID NO: 22124 - RNA, 21 nt, artificial
  Chemically synthesized
uuugcuucuccaaagaugaug

SEQ ID NO: 22125 - RNA, 21 nt, artificial
  Chemically synthesized
auuaguagcugacaaucaaug

SEQ ID NO: 22126 - RNA, 21 nt, artificial
  Chemically synthesized
uaugcaagccucuagucuucc

SEQ ID NO: 22127 - RNA, 21 nt, artificial
  Chemically synthesized
uuuacuucuucucaguccugu

SEQ ID NO: 22128 - RNA, 21 nt, artificial
  Chemically synthesized
uagaguuuccauagcuaaggg

SEQ ID NO: 22129 - RNA, 21 nt, artificial
  Chemically synthesized
uucauugaucacaaggccacc

SEQ ID NO: 22130 - RNA, 21 nt, artificial
  Chemically synthesized
uucucggugccuguaacaaag

SEQ ID NO: 22131 - RNA, 21 nt, artificial
  Chemically synthesized
agagguuggacagggaagaac

SEQ ID NO: 22132 - RNA, 21 nt, artificial
  Chemically synthesized
uugaccucaaaugcauguaag

SEQ ID NO: 22133 - RNA, 21 nt, artificial
  Chemically synthesized
uucuuacuugaccucaaaugc

SEQ ID NO: 22134 - RNA, 21 nt, artificial
  Chemically synthesized
uauauaagccgaaaaacgucu

SEQ ID NO: 22135 - RNA, 21 nt, artificial
  Chemically synthesized
uuauuaugcaagccucuaguc

SEQ ID NO: 22136 - RNA, 21 nt, artificial
  Chemically synthesized
aagcacuauuagaguugauug

SEQ ID NO: 22137 - RNA, 21 nt, artificial
  Chemically synthesized
uugcacuggaaauacacaugc

SEQ ID NO: 22138 - RNA, 21 nt, artificial
  Chemically synthesized
gauauggguaauugaagggcu

SEQ ID NO: 22139 - RNA, 21 nt, artificial
  Chemically synthesized
aacgguuuuacuucuucucag

SEQ ID NO: 22140 - RNA, 21 nt, artificial
  Chemically synthesized
uuccucauguagaccuugugg

SEQ ID NO: 22141 - RNA, 21 nt, artificial
  Chemically synthesized
uuaugcaagccucuagucuuc

SEQ ID NO: 22142 - RNA, 21 nt, artificial
  Chemically synthesized
uuuucaugcuucucccucuuc

SEQ ID NO: 22143 - RNA, 21 nt, artificial
  Chemically synthesized
uugcuucuccaaagaugaugc

SEQ ID NO: 22144 - RNA, 21 nt, artificial
  Chemically synthesized
uacuucacuccagaaagcagg

SEQ ID NO: 22145 - RNA, 21 nt, artificial
  Chemically synthesized
uuuuacuucuucucaguccug

SEQ ID NO: 22146 - RNA, 21 nt, artificial
  Chemically synthesized
uucacauggcagcccagaguu

SEQ ID NO: 22147 - RNA, 21 nt, artificial
  Chemically synthesized
aaacgguuuuacuucuucuca

SEQ ID NO: 22148 - RNA, 21 nt, artificial
  Chemically synthesized
uuauauaagccgaaaaacguc

SEQ ID NO: 22149 - RNA, 21 nt, artificial
  Chemically synthesized
ugcuucucccucuucacaugg

SEQ ID NO: 22150 - RNA, 21 nt, artificial
  Chemically synthesized
cugcuuuuucaugcuucuccc

SEQ ID NO: 22151 - RNA, 21 nt, artificial
  Chemically synthesized
uucaugucuucuuacuugacc

SEQ ID NO: 22152 - RNA, 21 nt, artificial
  Chemically synthesized
uuacuugaccucaaaugcaug

SEQ ID NO: 22153 - RNA, 21 nt, artificial
  Chemically synthesized
uuauacuucacuccagaaagc

SEQ ID NO: 22154 - RNA, 21 nt, artificial
  Chemically synthesized
uuuuucaugcuucucccucuu

SEQ ID NO: 22155 - RNA, 21 nt, artificial
  Chemically synthesized
uaucuguuaguuucaccgaug

SEQ ID NO: 22156 - RNA, 21 nt, artificial
  Chemically synthesized
uugaucacaaggccacccuuc

SEQ ID NO: 22157 - RNA, 21 nt, artificial
  Chemically synthesized
ucauauuccuccauuugucug

SEQ ID NO: 22158 - RNA, 21 nt, artificial
  Chemically synthesized
ucauugaucacaaggccaccc

SEQ ID NO: 22159 - RNA, 21 nt, artificial
  Chemically synthesized
uguuaguuucaccgauggcuc

SEQ ID NO: 22160 - RNA, 21 nt, artificial
  Chemically synthesized
ugugguucccucucuucuuca

SEQ ID NO: 22161 - RNA, 21 nt, artificial
  Chemically synthesized
ugcaguagcucaucaucuucc

SEQ ID NO: 22162 - RNA, 21 nt, artificial
  Chemically synthesized
uuucauugaucacaaggccac

SEQ ID NO: 22163 - RNA, 21 nt, artificial
  Chemically synthesized
uugcuuaucuguuaguuucac

SEQ ID NO: 22164 - RNA, 21 nt, artificial
  Chemically synthesized
uaaacauuaggugaguugagg

SEQ ID NO: 22165 - RNA, 21 nt, artificial
  Chemically synthesized
uuccucagcuccuuuuuuuca

SEQ ID NO: 22166 - RNA, 21 nt, artificial
  Chemically synthesized
uagugcaguagcucaucaucu

SEQ ID NO: 22167 - RNA, 21 nt, artificial
  Chemically synthesized
uuuagcuuauuaugcaagccu

SEQ ID NO: 22168 - RNA, 21 nt, artificial
  Chemically synthesized
uauggguaauugaagggcugc

SEQ ID NO: 22169 - RNA, 21 nt, artificial
  Chemically synthesized
uucaaucugccuaaauacucu

SEQ ID NO: 22170 - RNA, 21 nt, artificial
  Chemically synthesized
aaguacagcccaguuucauug

SEQ ID NO: 22171 - RNA, 21 nt, artificial
  Chemically synthesized
uugagaggugaguuaaaaggu

SEQ ID NO: 22172 - RNA, 21 nt, artificial
  Chemically synthesized
uuuccucagcuccuuuuuuuc

SEQ ID NO: 22173 - RNA, 21 nt, artificial
  Chemically synthesized
ucaaucugccuaaauacucuc

SEQ ID NO: 22174 - RNA, 21 nt, artificial
  Chemically synthesized
uguucuuccgucauauuccuc

SEQ ID NO: 22175 - RNA, 21 nt, artificial
  Chemically synthesized
ggauauggguaauugaagggc

SEQ ID NO: 22176 - RNA, 21 nt, artificial
  Chemically synthesized
uagaguuccucauguagaccu

SEQ ID NO: 22177 - RNA, 21 nt, artificial
  Chemically synthesized
uucuccaaagaugaugcugug

SEQ ID NO: 22178 - RNA, 21 nt, artificial
  Chemically synthesized
uggguaauugaagggcugcug

SEQ ID NO: 22179 - RNA, 21 nt, artificial
  Chemically synthesized
auuuagaagugaagaugcugc

SEQ ID NO: 22180 - RNA, 21 nt, artificial
  Chemically synthesized
uugucuggcucauaaacauua

SEQ ID NO: 22181 - RNA, 21 nt, artificial
  Chemically synthesized
ucuggcucauaaacauuaggu

SEQ ID NO: 22182 - RNA, 21 nt, artificial
  Chemically synthesized
uuaguuucaccgauggcucag

SEQ ID NO: 22183 - RNA, 21 nt, artificial
  Chemically synthesized
uucuuccgucauauuccucca

SEQ ID NO: 22184 - RNA, 21 nt, artificial
  Chemically synthesized
ugguucaugucuucuuacuug

SEQ ID NO: 22185 - RNA, 21 nt, artificial
  Chemically synthesized
ucucucuugcuuaucuguuag

SEQ ID NO: 22186 - RNA, 21 nt, artificial
  Chemically synthesized
uauuaugcaagccucuagucu

SEQ ID NO: 22187 - RNA, 21 nt, artificial
  Chemically synthesized
uccauagcuaagggaaacacc

SEQ ID NO: 22188 - RNA, 21 nt, artificial
  Chemically synthesized
uucuauguucuuccgucauau

SEQ ID NO: 22189 - RNA, 21 nt, artificial
  Chemically synthesized
uuagaguuccucauguagacc

SEQ ID NO: 22190 - RNA, 21 nt, artificial
  Chemically synthesized
ucacugaauacaacauucucg

SEQ ID NO: 22191 - RNA, 21 nt, artificial
  Chemically synthesized
aucuacauucucucuuuaguc

SEQ ID NO: 22192 - RNA, 21 nt, artificial
  Chemically synthesized
ugcuuaucuguuaguuucacc

SEQ ID NO: 22193 - RNA, 21 nt, artificial
  Chemically synthesized
uuccuuuuccaucccuuaaau

SEQ ID NO: 22194 - RNA, 21 nt, artificial
  Chemically synthesized
ugccuguaacaaagaaucaua

SEQ ID NO: 22195 - RNA, 21 nt, artificial
  Chemically synthesized
ucacaauaucuacauucucuc

SEQ ID NO: 22196 - RNA, 21 nt, artificial
  Chemically synthesized
ucucuuauagaguuuccauag

SEQ ID NO: 22197 - RNA, 21 nt, artificial
  Chemically synthesized
uugaccagagagagcucagau

SEQ ID NO: 22198 - RNA, 21 nt, artificial
  Chemically synthesized
uuugucuggcucauaaacauu

SEQ ID NO: 22199 - RNA, 21 nt, artificial
  Chemically synthesized
uuagaguugauugucaggaag

SEQ ID NO: 22200 - RNA, 21 nt, artificial
  Chemically synthesized
uccaucaucaccagauccugg

SEQ ID NO: 22201 - RNA, 21 nt, artificial
  Chemically synthesized
uuggaauauacaaaguacagc

SEQ ID NO: 22202 - RNA, 21 nt, artificial
  Chemically synthesized
ucuuuagcuuauuaugcaagc

SEQ ID NO: 22203 - RNA, 21 nt, artificial
  Chemically synthesized
uagaguugauugucaggaagc

SEQ ID NO: 22204 - RNA, 21 nt, artificial
  Chemically synthesized
uucaaaaucuugaccaaaugc

SEQ ID NO: 22205 - RNA, 21 nt, artificial
  Chemically synthesized
uaaaagguguccuuuucaauc

SEQ ID NO: 22206 - RNA, 21 nt, artificial
  Chemically synthesized
ucuacauucucucuuuaguca

SEQ ID NO: 22207 - RNA, 21 nt, artificial
  Chemically synthesized
uugaggagcuacagacauuuu

SEQ ID NO: 22208 - RNA, 21 nt, artificial
  Chemically synthesized
ugcugugguucccucucuucu

SEQ ID NO: 22209 - RNA, 21 nt, artificial
  Chemically synthesized
cuuauuaugcaagccucuagu

SEQ ID NO: 22210 - RNA, 21 nt, artificial
  Chemically synthesized
ucaaaugcauguaagaagacc

SEQ ID NO: 22211 - RNA, 21 nt, artificial
  Chemically synthesized
uguagguggaagagcugaaac

SEQ ID NO: 22212 - RNA, 21 nt, artificial
  Chemically synthesized
auguucuuccgucauauuccu

SEQ ID NO: 22213 - RNA, 21 nt, artificial
  Chemically synthesized
uaagaugaguguagaacaccu

SEQ ID NO: 22214 - RNA, 21 nt, artificial
  Chemically synthesized
uuaguagcugacaaucaauga

SEQ ID NO: 22215 - RNA, 21 nt, artificial
  Chemically synthesized
uugaacccuguggucucaagg

SEQ ID NO: 22216 - RNA, 21 nt, artificial
  Chemically synthesized
auacucucaggcacuaagaug

SEQ ID NO: 22217 - RNA, 21 nt, artificial
  Chemically synthesized
uggaccuugaguuggacuugc

SEQ ID NO: 22218 - RNA, 21 nt, artificial
  Chemically synthesized
ucaugcuucucccucuucaca

SEQ ID NO: 22219 - RNA, 21 nt, artificial
  Chemically synthesized
uccagaaagcaggacaauucc

SEQ ID NO: 22220 - RNA, 21 nt, artificial
  Chemically synthesized
ucuugcuuaucuguuaguuuc

SEQ ID NO: 22221 - RNA, 21 nt, artificial
  Chemically synthesized
aucauaauggaaagaauccca

SEQ ID NO: 22222 - RNA, 21 nt, artificial
  Chemically synthesized
uucacuccagaaagcaggaca

SEQ ID NO: 22223 - RNA, 21 nt, artificial
  Chemically synthesized
uccaaagaugaugcugugugc

SEQ ID NO: 22224 - RNA, 21 nt, artificial
  Chemically synthesized
uuccauaggugucuucccauu

SEQ ID NO: 22225 - RNA, 21 nt, artificial
  Chemically synthesized
ucucuuagagcuuauauaagc

SEQ ID NO: 22226 - RNA, 21 nt, artificial
  Chemically synthesized
uuccagaggcauggaccuuga

SEQ ID NO: 22227 - RNA, 21 nt, artificial
  Chemically synthesized
uccucagcuccuuuuuuucag

SEQ ID NO: 22228 - RNA, 21 nt, artificial
  Chemically synthesized
uguugcugacugcucaagagg

SEQ ID NO: 22229 - RNA, 21 nt, artificial
  Chemically synthesized
uacuucuucucaguccuguag

SEQ ID NO: 22230 - RNA, 21 nt, artificial
  Chemically synthesized
auuccagaggcauggaccuug

SEQ ID NO: 22231 - RNA, 21 nt, artificial
  Chemically synthesized
uagucuuccuuuuccaucccu

SEQ ID NO: 22232 - RNA, 21 nt, artificial
  Chemically synthesized
aaaucuugaccaaaugcaacc

SEQ ID NO: 22233 - RNA, 21 nt, artificial
  Chemically synthesized
uauuagaguugauugucagga

SEQ ID NO: 22234 - RNA, 21 nt, artificial
  Chemically synthesized
acaauuccauaggugucuucc

SEQ ID NO: 22235 - RNA, 21 nt, artificial
  Chemically synthesized
aaucuugaccaaaugcaaccc

SEQ ID NO: 22236 - RNA, 21 nt, artificial
  Chemically synthesized
cugugguucccucucuucuuc

SEQ ID NO: 22237 - RNA, 21 nt, artificial
  Chemically synthesized
augucuucuuacuugaccuca

SEQ ID NO: 22238 - RNA, 21 nt, artificial
  Chemically synthesized
auguaucugaaagacaguccc

SEQ ID NO: 22239 - RNA, 21 nt, artificial
  Chemically synthesized
uccauaggugucuucccauuc

SEQ ID NO: 22240 - RNA, 21 nt, artificial
  Chemically synthesized
aguuucauugaucacaaggcc

SEQ ID NO: 22241 - RNA, 21 nt, artificial
  Chemically synthesized
acagagguuggacagggaaga

SEQ ID NO: 22242 - RNA, 21 nt, artificial
  Chemically synthesized
auagaguuuccauagcuaagg

SEQ ID NO: 22243 - RNA, 21 nt, artificial
  Chemically synthesized
auggguaauugaagggcugcu

SEQ ID NO: 22244 - RNA, 21 nt, artificial
  Chemically synthesized
uuccauagcuaagggaaacac

SEQ ID NO: 22245 - RNA, 21 nt, artificial
  Chemically synthesized
uugccuguuaaaugggccacu

SEQ ID NO: 22246 - RNA, 21 nt, artificial
  Chemically synthesized
ugcauuuagaagugaagaugc

SEQ ID NO: 22247 - RNA, 21 nt, artificial
  Chemically synthesized
uacagcccaguuucauugauc

SEQ ID NO: 22248 - RNA, 21 nt, artificial
  Chemically synthesized
auggcagcccagaguucuaug

SEQ ID NO: 22249 - RNA, 21 nt, artificial
  Chemically synthesized
cucaggucacaaccauguauc

SEQ ID NO: 22250 - RNA, 21 nt, artificial
  Chemically synthesized
aaugcauguaagaagacccuc

SEQ ID NO: 22251 - RNA, 21 nt, artificial
  Chemically synthesized
ugaucagcacugguaagauug

SEQ ID NO: 22252 - RNA, 21 nt, artificial
  Chemically synthesized
uuaucuguuaguuucaccgau

SEQ ID NO: 22253 - RNA, 21 nt, artificial
  Chemically synthesized
uguagaacaccugguagcugc

SEQ ID NO: 22254 - RNA, 21 nt, artificial
  Chemically synthesized
ugugcugugguucccucucuu

SEQ ID NO: 22255 - RNA, 21 nt, artificial
  Chemically synthesized
uucuucucaguccuguagagg

SEQ ID NO: 22256 - RNA, 21 nt, artificial
  Chemically synthesized
uuagaagugaagaugcugcca

SEQ ID NO: 22257 - RNA, 21 nt, artificial
  Chemically synthesized
uaaaugggccacuuuccucag

SEQ ID NO: 22258 - RNA, 21 nt, artificial
  Chemically synthesized
uucaugcuucucccucuucac

SEQ ID NO: 22259 - RNA, 21 nt, artificial
  Chemically synthesized
uauacaaaguacagcccaguu

SEQ ID NO: 22260 - RNA, 21 nt, artificial
  Chemically synthesized
ugucaggaagcauucaaaauc

SEQ ID NO: 22261 - RNA, 21 nt, artificial
  Chemically synthesized
ugcauguaagaagacccucac

SEQ ID NO: 22262 - RNA, 21 nt, artificial
  Chemically synthesized
aucccaaagugcuucucuuag

SEQ ID NO: 22263 - RNA, 21 nt, artificial
  Chemically synthesized
uaauugaagggcugcugcaug

SEQ ID NO: 22264 - RNA, 21 nt, artificial
  Chemically synthesized
uacaacauucucggugccugu

SEQ ID NO: 22265 - RNA, 21 nt, artificial
  Chemically synthesized
ugaggagcuacagacauuuug

SEQ ID NO: 22266 - RNA, 21 nt, artificial
  Chemically synthesized
augaugcugugugcaucuggc

SEQ ID NO: 22267 - RNA, 21 nt, artificial
  Chemically synthesized
uguguuaggaaugaaaugagu

SEQ ID NO: 22268 - RNA, 21 nt, artificial
  Chemically synthesized
cuauguucuuccgucauauuc

SEQ ID NO: 22269 - RNA, 21 nt, artificial
  Chemically synthesized
uuaggugaguugaggagcuac

SEQ ID NO: 22270 - RNA, 21 nt, artificial
  Chemically synthesized
agguuggacagggaagaacug

SEQ ID NO: 22271 - RNA, 21 nt, artificial
  Chemically synthesized
uaaauacucucaggcacuaag

SEQ ID NO: 22272 - RNA, 21 nt, artificial
  Chemically synthesized
uucucaguccuguagaggcug

SEQ ID NO: 22273 - RNA, 21 nt, artificial
  Chemically synthesized
ugucuggcucauaaacauuag

SEQ ID NO: 22274 - RNA, 21 nt, artificial
  Chemically synthesized
gguuuuacuucuucucagucc

SEQ ID NO: 22275 - RNA, 21 nt, artificial
  Chemically synthesized
agguuguugcaagauugaccc

SEQ ID NO: 22276 - RNA, 21 nt, artificial
  Chemically synthesized
auaggugucuucccauuccag

SEQ ID NO: 22277 - RNA, 21 nt, artificial
  Chemically synthesized
ucuuacuugaccucaaaugca

SEQ ID NO: 22278 - RNA, 21 nt, artificial
  Chemically synthesized
ucacaaggccacccuucuuau

SEQ ID NO: 22279 - RNA, 21 nt, artificial
  Chemically synthesized
uauacuucacuccagaaagca

SEQ ID NO: 22280 - RNA, 21 nt, artificial
  Chemically synthesized
augcauguaagaagacccuca

SEQ ID NO: 22281 - RNA, 21 nt, artificial
  Chemically synthesized
auugcacuggaaauacacaug

SEQ ID NO: 22282 - RNA, 21 nt, artificial
  Chemically synthesized
ucaggauaugcauuuagaagu

SEQ ID NO: 22283 - RNA, 21 nt, artificial
  Chemically synthesized
uauagaguuuccauagcuaag

SEQ ID NO: 22284 - RNA, 21 nt, artificial
  Chemically synthesized
aucuugaccaaaugcaaccca

SEQ ID NO: 22285 - RNA, 21 nt, artificial
  Chemically synthesized
gggauauggguaauugaaggg

SEQ ID NO: 22286 - RNA, 21 nt, artificial
  Chemically synthesized
aacaucucucuugcuuaucug

SEQ ID NO: 22287 - RNA, 21 nt, artificial
  Chemically synthesized
ucaaaauugaccagagagagc

SEQ ID NO: 22288 - RNA, 21 nt, artificial
  Chemically synthesized
accaugaaaaacaucacaagg

SEQ ID NO: 22289 - RNA, 21 nt, artificial
  Chemically synthesized
uugaccaaaugcaacccauau

SEQ ID NO: 22290 - RNA, 21 nt, artificial
  Chemically synthesized
acgguuuuacuucuucucagu

SEQ ID NO: 22291 - RNA, 21 nt, artificial
  Chemically synthesized
uguccuuuucaaucugccuaa

SEQ ID NO: 22292 - RNA, 21 nt, artificial
  Chemically synthesized
guucuuccgucauauuccucc

SEQ ID NO: 22293 - RNA, 21 nt, artificial
  Chemically synthesized
cucuagucuuccuuuuccauc

SEQ ID NO: 22294 - RNA, 21 nt, artificial
  Chemically synthesized
ugaguguagaacaccugguag

SEQ ID NO: 22295 - RNA, 21 nt, artificial
  Chemically synthesized
uaggugucuucccauuccaga

SEQ ID NO: 22296 - RNA, 21 nt, artificial
  Chemically synthesized
aucacaaggagacacaggccu

SEQ ID NO: 22297 - RNA, 21 nt, artificial
  Chemically synthesized
uccgucauauuccuccauuug

SEQ ID NO: 22298 - RNA, 21 nt, artificial
  Chemically synthesized
aaagaaucccaaagugcuucu

SEQ ID NO: 22299 - RNA, 21 nt, artificial
  Chemically synthesized
ucaugucuucuuacuugaccu

SEQ ID NO: 22300 - RNA, 21 nt, artificial
  Chemically synthesized
uaggaaaacaucauuaguagc

SEQ ID NO: 22301 - RNA, 21 nt, artificial
  Chemically synthesized
agaugaguguagaacaccugg

SEQ ID NO: 22302 - RNA, 21 nt, artificial
  Chemically synthesized
auugucaggaagcauucaaaa

SEQ ID NO: 22303 - RNA, 21 nt, artificial
  Chemically synthesized
aucauuaguagcugacaauca

SEQ ID NO: 22304 - RNA, 21 nt, artificial
  Chemically synthesized
ugguucccucucuucuucagg

SEQ ID NO: 22305 - RNA, 21 nt, artificial
  Chemically synthesized
aucugccuaaauacucucagg

SEQ ID NO: 22306 - RNA, 21 nt, artificial
  Chemically synthesized
agccucuagucuuccuuuucc

SEQ ID NO: 22307 - RNA, 21 nt, artificial
  Chemically synthesized
ucucaggcacuaagaugagug

SEQ ID NO: 22308 - RNA, 21 nt, artificial
  Chemically synthesized
acauuaggugaguugaggagc

SEQ ID NO: 22309 - RNA, 21 nt, artificial
  Chemically synthesized
cauguaagaagacccucacug

SEQ ID NO: 22310 - RNA, 21 nt, artificial
  Chemically synthesized
aaugcaacccauauuuuccua

SEQ ID NO: 22311 - RNA, 21 nt, artificial
  Chemically synthesized
cacccuucuuauacuucacuc

SEQ ID NO: 22312 - RNA, 21 nt, artificial
  Chemically synthesized
ucuuagagcuuauauaagccg

SEQ ID NO: 22313 - RNA, 21 nt, artificial
  Chemically synthesized
cacugaauacaacauucucgg

SEQ ID NO: 22314 - RNA, 21 nt, artificial
  Chemically synthesized
uugguucaugucuucuuacuu

SEQ ID NO: 22315 - RNA, 21 nt, artificial
  Chemically synthesized
uccuucuguagguggaagagc

SEQ ID NO: 22316 - RNA, 21 nt, artificial
  Chemically synthesized
aucacaaggccacccuucuua

SEQ ID NO: 22317 - RNA, 21 nt, artificial
  Chemically synthesized
cugguagcugcuuuuucaugc

SEQ ID NO: 22318 - RNA, 21 nt, artificial
  Chemically synthesized
cuguuaaaugggccacuuucc

SEQ ID NO: 22319 - RNA, 21 nt, artificial
  Chemically synthesized
aagcauucaaaaucuugacca

SEQ ID NO: 22320 - RNA, 21 nt, artificial
  Chemically synthesized
guuaaaugggccacuuuccuc

SEQ ID NO: 22321 - RNA, 21 nt, artificial
  Chemically synthesized
aaagcaggacaauuccauagg

SEQ ID NO: 22322 - RNA, 21 nt, artificial
  Chemically synthesized
ucuuucagccucuuuagcuua

SEQ ID NO: 22323 - RNA, 21 nt, artificial
  Chemically synthesized
aguagcugacaaucaaugauu

SEQ ID NO: 22324 - RNA, 21 nt, artificial
  Chemically synthesized
uuccaucccuuaaauccucag

SEQ ID NO: 22325 - RNA, 21 nt, artificial
  Chemically synthesized
ucucuugcuuaucuguuaguu

SEQ ID NO: 22326 - RNA, 21 nt, artificial
  Chemically synthesized
acuugguucaugucuucuuac

SEQ ID NO: 22327 - RNA, 21 nt, artificial
  Chemically synthesized
cuugagaggugaguuaaaagg

SEQ ID NO: 22328 - RNA, 21 nt, artificial
  Chemically synthesized
uguuaaaugggccacuuuccu

SEQ ID NO: 22329 - RNA, 21 nt, artificial
  Chemically synthesized
uguuaggaaugaaaugagucc

SEQ ID NO: 22330 - RNA, 21 nt, artificial
  Chemically synthesized
cuagucuuccuuuuccauccc

SEQ ID NO: 22331 - RNA, 21 nt, artificial
  Chemically synthesized
uccuuuuccaucccuuaaauc

SEQ ID NO: 22332 - RNA, 21 nt, artificial
  Chemically synthesized
uauuugcuucuccaaagauga

SEQ ID NO: 22333 - RNA, 21 nt, artificial
  Chemically synthesized
augcuucucccucuucacaug

SEQ ID NO: 22334 - RNA, 21 nt, artificial
  Chemically synthesized
augcauuuagaagugaagaug

SEQ ID NO: 22335 - RNA, 21 nt, artificial
  Chemically synthesized
ucaagguccacuugguucaug

SEQ ID NO: 22336 - RNA, 21 nt, artificial
  Chemically synthesized
uggcucauaaacauuagguga

SEQ ID NO: 22337 - RNA, 21 nt, artificial
  Chemically synthesized
uacuugaccucaaaugcaugu

SEQ ID NO: 22338 - RNA, 21 nt, artificial
  Chemically synthesized
uaauggaaagaaucccaaagu

SEQ ID NO: 22339 - RNA, 21 nt, artificial
  Chemically synthesized
cacugguaagauugaacacug

SEQ ID NO: 22340 - RNA, 21 nt, artificial
  Chemically synthesized
uuuugaacccuguggucucaa

SEQ ID NO: 22341 - RNA, 21 nt, artificial
  Chemically synthesized
acauauaaaugaucagcacug

SEQ ID NO: 22342 - RNA, 21 nt, artificial
  Chemically synthesized
ugagaggugaguuaaaaggug

SEQ ID NO: 22343 - RNA, 21 nt, artificial
  Chemically synthesized
cuuauacuucacuccagaaag

SEQ ID NO: 22344 - RNA, 21 nt, artificial
  Chemically synthesized
aauugaagggcugcugcaugg

SEQ ID NO: 22345 - RNA, 21 nt, artificial
  Chemically synthesized
ucuugaccaaaugcaacccau

SEQ ID NO: 22346 - RNA, 21 nt, artificial
  Chemically synthesized
cccagaguucuauguucuucc

SEQ ID NO: 22347 - RNA, 21 nt, artificial
  Chemically synthesized
aaaugcaacccauauuuuccu

SEQ ID NO: 22348 - RNA, 21 nt, artificial
  Chemically synthesized
auauaagccgaaaaacgucug

SEQ ID NO: 22349 - RNA, 21 nt, artificial
  Chemically synthesized
agcaaacgguuuuacuucuuc

SEQ ID NO: 22350 - RNA, 21 nt, artificial
  Chemically synthesized
aaauacucucaggcacuaaga

SEQ ID NO: 22351 - RNA, 21 nt, artificial
  Chemically synthesized
accaaggcaaccagaaccaug

SEQ ID NO: 22352 - RNA, 21 nt, artificial
  Chemically synthesized
uucucccucuucacauggcag

SEQ ID NO: 22353 - RNA, 21 nt, artificial
  Chemically synthesized
uuucaccgauggcucaggaua

SEQ ID NO: 22354 - RNA, 21 nt, artificial
  Chemically synthesized
cuuccgucauauuccuccauu

SEQ ID NO: 22355 - RNA, 21 nt, artificial
  Chemically synthesized
auccucaggucacaaccaugu

SEQ ID NO: 22356 - RNA, 21 nt, artificial
  Chemically synthesized
acuauuagaguugauugucag

SEQ ID NO: 22357 - RNA, 21 nt, artificial
  Chemically synthesized
uccucauguagaccuuguggc

SEQ ID NO: 22358 - RNA, 21 nt, artificial
  Chemically synthesized
cuucuuacuugaccucaaaug

SEQ ID NO: 22359 - RNA, 21 nt, artificial
  Chemically synthesized
aauggaaagaaucccaaagug

SEQ ID NO: 22360 - RNA, 21 nt, artificial
  Chemically synthesized
ugagauuccucaaaauugacc

SEQ ID NO: 22361 - RNA, 21 nt, artificial
  Chemically synthesized
aaaaucuugaccaaaugcaac

SEQ ID NO: 22362 - RNA, 21 nt, artificial
  Chemically synthesized
ucucaagguccacuugguuca

SEQ ID NO: 22363 - RNA, 21 nt, artificial
  Chemically synthesized
ucacaaccauguaucugaaag

SEQ ID NO: 22364 - RNA, 21 nt, artificial
  Chemically synthesized
uucuguagguggaagagcuga

SEQ ID NO: 22365 - RNA, 21 nt, artificial
  Chemically synthesized
acaccugguagcugcuuuuuc

SEQ ID NO: 22366 - RNA, 21 nt, artificial
  Chemically synthesized
uucacaaaaaugcacaucuac

SEQ ID NO: 22367 - RNA, 21 nt, artificial
  Chemically synthesized
uugaguuggacuugccuguua

SEQ ID NO: 22368 - RNA, 21 nt, artificial
  Chemically synthesized
aaccauguaucugaaagacag

SEQ ID NO: 22369 - RNA, 21 nt, artificial
  Chemically synthesized
auacaacauucucggugccug

SEQ ID NO: 22370 - RNA, 21 nt, artificial
  Chemically synthesized
ucuuauagaguuuccauagcu

SEQ ID NO: 22371 - RNA, 21 nt, artificial
  Chemically synthesized
auuccucaaaauugaccagag

SEQ ID NO: 22372 - RNA, 21 nt, artificial
  Chemically synthesized
cauguaucugaaagacagucc

SEQ ID NO: 22373 - RNA, 21 nt, artificial
  Chemically synthesized
uagcuuauuaugcaagccucu

SEQ ID NO: 22374 - RNA, 21 nt, artificial
  Chemically synthesized
ucccuuaaauccucaggucac

SEQ ID NO: 22375 - RNA, 21 nt, artificial
  Chemically synthesized
ucacaaaaaugcacaucuaca

SEQ ID NO: 22376 - RNA, 21 nt, artificial
  Chemically synthesized
augcuguguuaggaaugaaau

SEQ ID NO: 22377 - RNA, 21 nt, artificial
  Chemically synthesized
ucuucuuacuugaccucaaau

SEQ ID NO: 22378 - RNA, 21 nt, artificial
  Chemically synthesized
ucuuccuuuuccaucccuuaa

SEQ ID NO: 22379 - RNA, 21 nt, artificial
  Chemically synthesized
uuacuucuucucaguccugua

SEQ ID NO: 22380 - RNA, 21 nt, artificial
  Chemically synthesized
uuccgucauauuccuccauuu

SEQ ID NO: 22381 - RNA, 21 nt, artificial
  Chemically synthesized
aacaucacaaggagacacagg

SEQ ID NO: 22382 - RNA, 21 nt, artificial
  Chemically synthesized
gucaggaagcauucaaaaucu

SEQ ID NO: 22383 - RNA, 21 nt, artificial
  Chemically synthesized
uuugaacccuguggucucaag

SEQ ID NO: 22384 - RNA, 21 nt, artificial
  Chemically synthesized
gcugcuuuuucaugcuucucc

SEQ ID NO: 22385 - RNA, 21 nt, artificial
  Chemically synthesized
cgguuuuacuucuucucaguc

SEQ ID NO: 22386 - RNA, 21 nt, artificial
  Chemically synthesized
auggaccuugaguuggacuug

SEQ ID NO: 22387 - RNA, 21 nt, artificial
  Chemically synthesized
augcaagccucuagucuuccu

SEQ ID NO: 22388 - RNA, 21 nt, artificial
  Chemically synthesized
ugaauacaacauucucggugc

SEQ ID NO: 22389 - RNA, 21 nt, artificial
  Chemically synthesized
uacaauugcacuggaaauaca

SEQ ID NO: 22390 - RNA, 21 nt, artificial
  Chemically synthesized
aauugcacuggaaauacacau

SEQ ID NO: 22391 - RNA, 21 nt, artificial
  Chemically synthesized
caucauuaguagcugacaauc

SEQ ID NO: 22392 - RNA, 21 nt, artificial
  Chemically synthesized
uacucucaggcacuaagauga

SEQ ID NO: 22393 - RNA, 21 nt, artificial
  Chemically synthesized
gguuggacagggaagaacugu

SEQ ID NO: 22394 - RNA, 21 nt, artificial
  Chemically synthesized
uaaaugaucagcacugguaag

SEQ ID NO: 22395 - RNA, 21 nt, artificial
  Chemically synthesized
aaucugccuaaauacucucag

SEQ ID NO: 22396 - RNA, 21 nt, artificial
  Chemically synthesized
auaaaugaucagcacugguaa

SEQ ID NO: 22397 - RNA, 21 nt, artificial
  Chemically synthesized
cuauuugcuucuccaaagaug

SEQ ID NO: 22398 - RNA, 21 nt, artificial
  Chemically synthesized
guugauugucaggaagcauuc

SEQ ID NO: 22399 - RNA, 21 nt, artificial
  Chemically synthesized
agaguucuauguucuuccguc

SEQ ID NO: 22400 - RNA, 21 nt, artificial
  Chemically synthesized
uucaccgauggcucaggauau

SEQ ID NO: 22401 - RNA, 21 nt, artificial
  Chemically synthesized
ucauguagaccuuguggcuca

SEQ ID NO: 22402 - RNA, 21 nt, artificial
  Chemically synthesized
ugaaaaacaucacaaggagac

SEQ ID NO: 22403 - RNA, 21 nt, artificial
  Chemically synthesized
auaaacauuaggugaguugag

SEQ ID NO: 22404 - RNA, 21 nt, artificial
  Chemically synthesized
aaacaucucucuugcuuaucu

SEQ ID NO: 22405 - RNA, 21 nt, artificial
  Chemically synthesized
ugguaagauugaacacugccc

SEQ ID NO: 22406 - RNA, 21 nt, artificial
  Chemically synthesized
cuuuccucagcuccuuuuuuu

SEQ ID NO: 22407 - RNA, 21 nt, artificial
  Chemically synthesized
cuucuuauacuucacuccaga

SEQ ID NO: 22408 - RNA, 21 nt, artificial
  Chemically synthesized
ucugagauuccucaaaauuga

SEQ ID NO: 22409 - RNA, 21 nt, artificial
  Chemically synthesized
ucccaaagugcuucucuuaga

SEQ ID NO: 22410 - RNA, 21 nt, artificial
  Chemically synthesized
cuccaaagaugaugcugugug

SEQ ID NO: 22411 - RNA, 21 nt, artificial
  Chemically synthesized
auguaagaagacccucacuga

SEQ ID NO: 22412 - RNA, 21 nt, artificial
  Chemically synthesized
uggacuugccuguuaaauggg

SEQ ID NO: 22413 - RNA, 21 nt, artificial
  Chemically synthesized
auaagccgaaaaacgucugag

SEQ ID NO: 22414 - RNA, 21 nt, artificial
  Chemically synthesized
ccagaguucuauguucuuccg

SEQ ID NO: 22415 - RNA, 21 nt, artificial
  Chemically synthesized
ugcuguguuaggaaugaaaug

SEQ ID NO: 22416 - RNA, 21 nt, artificial
  Chemically synthesized
ucucucuuauagaguuuccau

SEQ ID NO: 22417 - RNA, 21 nt, artificial
  Chemically synthesized
aacauucucggugccuguaac

SEQ ID NO: 22418 - RNA, 21 nt, artificial
  Chemically synthesized
auaauggaaagaaucccaaag

SEQ ID NO: 22419 - RNA, 21 nt, artificial
  Chemically synthesized
cuguggucucaagguccacuu

SEQ ID NO: 22420 - RNA, 21 nt, artificial
  Chemically synthesized
cuugguucaugucuucuuacu

SEQ ID NO: 22421 - RNA, 21 nt, artificial
  Chemically synthesized
uguggucucaagguccacuug

SEQ ID NO: 22422 - RNA, 21 nt, artificial
  Chemically synthesized
auuaugcaagccucuagucuu

SEQ ID NO: 22423 - RNA, 21 nt, artificial
  Chemically synthesized
cgucauauuccuccauuuguc

SEQ ID NO: 22424 - RNA, 21 nt, artificial
  Chemically synthesized
uguagaggcugaggugucaag

SEQ ID NO: 22425 - RNA, 21 nt, artificial
  Chemically synthesized
auggaaagaaucccaaagugc

SEQ ID NO: 22426 - RNA, 21 nt, artificial
  Chemically synthesized
caaacgguuuuacuucuucuc

SEQ ID NO: 22427 - RNA, 21 nt, artificial
  Chemically synthesized
aucuguuaguuucaccgaugg

SEQ ID NO: 22428 - RNA, 21 nt, artificial
  Chemically synthesized
auauuccuccauuugucuggc

SEQ ID NO: 22429 - RNA, 21 nt, artificial
  Chemically synthesized
aucccuuaaauccucagguca

SEQ ID NO: 22430 - RNA, 21 nt, artificial
  Chemically synthesized
uaagaagacccucacugaaua

SEQ ID NO: 22431 - RNA, 21 nt, artificial
  Chemically synthesized
uccacuugguucaugucuucu

SEQ ID NO: 22432 - RNA, 21 nt, artificial
  Chemically synthesized
ucuucucaguccuguagaggc

SEQ ID NO: 22433 - RNA, 21 nt, artificial
  Chemically synthesized
aaaugcauguaagaagacccu

SEQ ID NO: 22434 - RNA, 21 nt, artificial
  Chemically synthesized
aaaaacaucacaaggagacac

SEQ ID NO: 22435 - RNA, 21 nt, artificial
  Chemically synthesized
auuccauaggugucuucccau

SEQ ID NO: 22436 - RNA, 21 nt, artificial
  Chemically synthesized
aaugggccacuuuccucagcu

SEQ ID NO: 22437 - RNA, 21 nt, artificial
  Chemically synthesized
gcaaacgguuuuacuucuucu

SEQ ID NO: 22438 - RNA, 21 nt, artificial
  Chemically synthesized
aaaacaucucucuugcuuauc

SEQ ID NO: 22439 - RNA, 21 nt, artificial
  Chemically synthesized
aauuccauaggugucuuccca

SEQ ID NO: 22440 - RNA, 21 nt, artificial
  Chemically synthesized
ugugcaucuggcugguagacu

SEQ ID NO: 22441 - RNA, 21 nt, artificial
  Chemically synthesized
ucuauguucuuccgucauauu

SEQ ID NO: 22442 - RNA, 21 nt, artificial
  Chemically synthesized
cuuuucaaucugccuaaauac

SEQ ID NO: 22443 - RNA, 21 nt, artificial
  Chemically synthesized
guuaggaaugaaaugaguccc

SEQ ID NO: 22444 - RNA, 21 nt, artificial
  Chemically synthesized
augaguguagaacaccuggua

SEQ ID NO: 22445 - RNA, 21 nt, artificial
  Chemically synthesized
aaaugggccacuuuccucagc

SEQ ID NO: 22446 - RNA, 21 nt, artificial
  Chemically synthesized
aacgucugagauuccucaaaa

SEQ ID NO: 22447 - RNA, 21 nt, artificial
  Chemically synthesized
auuagaguugauugucaggaa

SEQ ID NO: 22448 - RNA, 21 nt, artificial
  Chemically synthesized
uucuuauacuucacuccagaa

SEQ ID NO: 22449 - RNA, 21 nt, artificial
  Chemically synthesized
ugcuguccacccaguagaucu

SEQ ID NO: 22450 - RNA, 21 nt, artificial
  Chemically synthesized
acaaccauguaucugaaagac

SEQ ID NO: 22451 - RNA, 21 nt, artificial
  Chemically synthesized
aguugauugucaggaagcauu

SEQ ID NO: 22452 - RNA, 21 nt, artificial
  Chemically synthesized
ugcaucuggcugguagacucu

SEQ ID NO: 22453 - RNA, 21 nt, artificial
  Chemically synthesized
acugguaagauugaacacugc

SEQ ID NO: 22454 - RNA, 21 nt, artificial
  Chemically synthesized
acaaggccacccuucuuauac

SEQ ID NO: 22455 - RNA, 21 nt, artificial
  Chemically synthesized
gaaagaaucccaaagugcuuc

SEQ ID NO: 22456 - RNA, 21 nt, artificial
  Chemically synthesized
accaaaugcaacccauauuuu

SEQ ID NO: 22457 - RNA, 21 nt, artificial
  Chemically synthesized
aguuccucauguagaccuugu

SEQ ID NO: 22458 - RNA, 21 nt, artificial
  Chemically synthesized
acauuuugaacccuguggucu

SEQ ID NO: 22459 - RNA, 21 nt, artificial
  Chemically synthesized
auacaaaguacagcccaguuu

SEQ ID NO: 22460 - RNA, 21 nt, artificial
  Chemically synthesized
uugauugucaggaagcauuca

SEQ ID NO: 22461 - RNA, 21 nt, artificial
  Chemically synthesized
acuucuucucaguccuguaga

SEQ ID NO: 22462 - RNA, 21 nt, artificial
  Chemically synthesized
auuccuccauuugucuggcuc

SEQ ID NO: 22463 - RNA, 21 nt, artificial
  Chemically synthesized
caugcuucucccucuucacau

SEQ ID NO: 22464 - RNA, 21 nt, artificial
  Chemically synthesized
agcacuauuagaguugauugu

SEQ ID NO: 22465 - RNA, 21 nt, artificial
  Chemically synthesized
uggcucaggauaugcauuuag

SEQ ID NO: 22466 - RNA, 21 nt, artificial
  Chemically synthesized
uagagcuuauauaagccgaaa

SEQ ID NO: 22467 - RNA, 21 nt, artificial
  Chemically synthesized
uugucaggaagcauucaaaau

SEQ ID NO: 22468 - RNA, 21 nt, artificial
  Chemically synthesized
auuugucuggcucauaaacau

SEQ ID NO: 22469 - RNA, 21 nt, artificial
  Chemically synthesized
aaucauaauggaaagaauccc

SEQ ID NO: 22470 - RNA, 21 nt, artificial
  Chemically synthesized
guagcugcuuuuucaugcuuc

SEQ ID NO: 22471 - RNA, 21 nt, artificial
  Chemically synthesized
uucccauuccagaggcaugga

SEQ ID NO: 22472 - RNA, 21 nt, artificial
  Chemically synthesized
cuuagagcuuauauaagccga

SEQ ID NO: 22473 - RNA, 21 nt, artificial
  Chemically synthesized
aagguguccuuuucaaucugc

SEQ ID NO: 22474 - RNA, 21 nt, artificial
  Chemically synthesized
cuguguuaggaaugaaaugag

SEQ ID NO: 22475 - RNA, 21 nt, artificial
  Chemically synthesized
cagagguuggacagggaagaa

SEQ ID NO: 22476 - RNA, 21 nt, artificial
  Chemically synthesized
guuggacagggaagaacugug

SEQ ID NO: 22477 - RNA, 21 nt, artificial
  Chemically synthesized
uugcugacugcucaagaggag

SEQ ID NO: 22478 - RNA, 21 nt, artificial
  Chemically synthesized
aagaggaggcaagcuggaucu

SEQ ID NO: 22479 - RNA, 21 nt, artificial
  Chemically synthesized
gucucaagguccacuugguuc

SEQ ID NO: 22480 - RNA, 21 nt, artificial
  Chemically synthesized
gucauauuccuccauuugucu

SEQ ID NO: 22481 - RNA, 21 nt, artificial
  Chemically synthesized
ucuuauacuucacuccagaaa

SEQ ID NO: 22482 - RNA, 21 nt, artificial
  Chemically synthesized
aaaaacgucugagauuccuca

SEQ ID NO: 22483 - RNA, 21 nt, artificial
  Chemically synthesized
cuuuuucaugcuucucccucu

SEQ ID NO: 22484 - RNA, 21 nt, artificial
  Chemically synthesized
ucaaaaucuugaccaaaugca

SEQ ID NO: 22485 - RNA, 21 nt, artificial
  Chemically synthesized
cugaauacaacauucucggug

SEQ ID NO: 22486 - RNA, 21 nt, artificial
  Chemically synthesized
ucaccgauggcucaggauaug

SEQ ID NO: 22487 - RNA, 21 nt, artificial
  Chemically synthesized
uaguuucaccgauggcucagg

SEQ ID NO: 22488 - RNA, 21 nt, artificial
  Chemically synthesized
cuuaucuguuaguuucaccga

SEQ ID NO: 22489 - RNA, 21 nt, artificial
  Chemically synthesized
cuuaaauccucaggucacaac

SEQ ID NO: 22490 - RNA, 21 nt, artificial
  Chemically synthesized
auacuucacuccagaaagcag

SEQ ID NO: 22491 - RNA, 21 nt, artificial
  Chemically synthesized
accuugaguuggacuugccug

SEQ ID NO: 22492 - RNA, 21 nt, artificial
  Chemically synthesized
agaaucccaaagugcuucucu

SEQ ID NO: 22493 - RNA, 21 nt, artificial
  Chemically synthesized
cuuacuugaccucaaaugcau

SEQ ID NO: 22494 - RNA, 21 nt, artificial
  Chemically synthesized
auucucggugccuguaacaaa

SEQ ID NO: 22495 - RNA, 21 nt, artificial
  Chemically synthesized
aggugaguuaaaagguguccu

SEQ ID NO: 22496 - RNA, 21 nt, artificial
  Chemically synthesized
cccagcaaacgguuuuacuuc

SEQ ID NO: 22497 - RNA, 21 nt, artificial
  Chemically synthesized
cuuauauaagccgaaaaacgu

SEQ ID NO: 22498 - RNA, 21 nt, artificial
  Chemically synthesized
ucaggaagcauucaaaaucuu

SEQ ID NO: 22499 - RNA, 21 nt, artificial
  Chemically synthesized
aagaaucccaaagugcuucuc

SEQ ID NO: 22500 - RNA, 21 nt, artificial
  Chemically synthesized
cucagcuccuuuuuuucaggg

SEQ ID NO: 22501 - RNA, 21 nt, artificial
  Chemically synthesized
ucauaauggaaagaaucccaa

SEQ ID NO: 22502 - RNA, 21 nt, artificial
  Chemically synthesized
ugcaagccucuagucuuccuu

SEQ ID NO: 22503 - RNA, 21 nt, artificial
  Chemically synthesized
cucaggauaugcauuuagaag

SEQ ID NO: 22504 - RNA, 21 nt, artificial
  Chemically synthesized
aauccuaccaaggcaaccaga

SEQ ID NO: 22505 - RNA, 21 nt, artificial
  Chemically synthesized
gcuuaucuguuaguuucaccg

SEQ ID NO: 22506 - RNA, 21 nt, artificial
  Chemically synthesized
gaagcauucaaaaucuugacc

SEQ ID NO: 22507 - RNA, 21 nt, artificial
  Chemically synthesized
uccucaaaauugaccagagag

SEQ ID NO: 22508 - RNA, 21 nt, artificial
  Chemically synthesized
aauugaccagagagagcucag

SEQ ID NO: 22509 - RNA, 21 nt, artificial
  Chemically synthesized
auauacaaaguacagcccagu

SEQ ID NO: 22510 - RNA, 21 nt, artificial
  Chemically synthesized
aaagguguccuuuucaaucug

SEQ ID NO: 22511 - RNA, 21 nt, artificial
  Chemically synthesized
ccaguuucauugaucacaagg

SEQ ID NO: 22512 - RNA, 21 nt, artificial
  Chemically synthesized
acaucacaaggagacacaggc

SEQ ID NO: 22513 - RNA, 21 nt, artificial
  Chemically synthesized
cauuugucuggcucauaaaca

SEQ ID NO: 22514 - RNA, 21 nt, artificial
  Chemically synthesized
uucagccucuuuagcuuauua

SEQ ID NO: 22515 - RNA, 21 nt, artificial
  Chemically synthesized
cuaccaaggcaaccagaacca

SEQ ID NO: 22516 - RNA, 21 nt, artificial
  Chemically synthesized
aaaacaucacaaggagacaca

SEQ ID NO: 22517 - RNA, 21 nt, artificial
  Chemically synthesized
augaucagcacugguaagauu

SEQ ID NO: 22518 - RNA, 21 nt, artificial
  Chemically synthesized
uaagccgaaaaacgucugaga

SEQ ID NO: 22519 - RNA, 21 nt, artificial
  Chemically synthesized
cagacauuuugaacccugugg

SEQ ID NO: 22520 - RNA, 21 nt, artificial
  Chemically synthesized
aauccucaggucacaaccaug

SEQ ID NO: 22521 - RNA, 21 nt, artificial
  Chemically synthesized
uaggugaguugaggagcuaca

SEQ ID NO: 22522 - RNA, 21 nt, artificial
  Chemically synthesized
cucacugaauacaacauucuc

SEQ ID NO: 22523 - RNA, 21 nt, artificial
  Chemically synthesized
uauaaaugaucagcacuggua

SEQ ID NO: 22524 - RNA, 21 nt, artificial
  Chemically synthesized
ugacauauaaaugaucagcac

SEQ ID NO: 22525 - RNA, 21 nt, artificial
  Chemically synthesized
caaaugcaacccauauuuucc

SEQ ID NO: 22526 - RNA, 21 nt, artificial
  Chemically synthesized
uagaacaccugguagcugcuu

SEQ ID NO: 22527 - RNA, 21 nt, artificial
  Chemically synthesized
aagaugaguguagaacaccug

SEQ ID NO: 22528 - RNA, 21 nt, artificial
  Chemically synthesized
cauauaaaugaucagcacugg

SEQ ID NO: 22529 - RNA, 21 nt, artificial
  Chemically synthesized
caggauaugcauuuagaagug

SEQ ID NO: 22530 - RNA, 21 nt, artificial
  Chemically synthesized
auugaucacaaggccacccuu

SEQ ID NO: 22531 - RNA, 21 nt, artificial
  Chemically synthesized
ugaguuggacuugccuguuaa

SEQ ID NO: 22532 - RNA, 21 nt, artificial
  Chemically synthesized
aguuucaccgauggcucagga

SEQ ID NO: 22533 - RNA, 21 nt, artificial
  Chemically synthesized
agaaccaugaaaaacaucaca

SEQ ID NO: 22534 - RNA, 21 nt, artificial
  Chemically synthesized
aaaagguguccuuuucaaucu

SEQ ID NO: 22535 - RNA, 21 nt, artificial
  Chemically synthesized
cuccaucaucaccagauccug

SEQ ID NO: 22536 - RNA, 21 nt, artificial
  Chemically synthesized
uagguggaagagcugaaacau

SEQ ID NO: 22537 - RNA, 21 nt, artificial
  Chemically synthesized
ugguagacucucggaguucug

SEQ ID NO: 22538 - RNA, 21 nt, artificial
  Chemically synthesized
aguacagcccaguuucauuga

SEQ ID NO: 22539 - RNA, 21 nt, artificial
  Chemically synthesized
guugacauauaaaugaucagc

SEQ ID NO: 22540 - RNA, 21 nt, artificial
  Chemically synthesized
ucauuaguagcugacaaucaa

SEQ ID NO: 22541 - RNA, 21 nt, artificial
  Chemically synthesized
ugcuucucuuagagcuuauau

SEQ ID NO: 22542 - RNA, 21 nt, artificial
  Chemically synthesized
ccucaaaugcauguaagaaga

SEQ ID NO: 22543 - RNA, 21 nt, artificial
  Chemically synthesized
agacccucacugaauacaaca

SEQ ID NO: 22544 - RNA, 21 nt, artificial
  Chemically synthesized
acaauugcacuggaaauacac

SEQ ID NO: 22545 - RNA, 21 nt, artificial
  Chemically synthesized
cacaauaucuacauucucucu

SEQ ID NO: 22546 - RNA, 21 nt, artificial
  Chemically synthesized
cccuucuuauacuucacucca

SEQ ID NO: 22547 - RNA, 21 nt, artificial
  Chemically synthesized
agagagagcucagauacguug

SEQ ID NO: 22548 - RNA, 21 nt, artificial
  Chemically synthesized
uguaagaagacccucacugaa

SEQ ID NO: 22549 - RNA, 21 nt, artificial
  Chemically synthesized
aaagaugaugcugugugcauc

SEQ ID NO: 22550 - RNA, 21 nt, artificial
  Chemically synthesized
cuucacaauaucuacauucuc

SEQ ID NO: 22551 - RNA, 21 nt, artificial
  Chemically synthesized
uaccaaggcaaccagaaccau

SEQ ID NO: 22552 - RNA, 21 nt, artificial
  Chemically synthesized
augaaaaacaucacaaggaga

SEQ ID NO: 22553 - RNA, 21 nt, artificial
  Chemically synthesized
uauuccuccauuugucuggcu

SEQ ID NO: 22554 - RNA, 21 nt, artificial
  Chemically synthesized
ucuguuaguuucaccgauggc

SEQ ID NO: 22555 - RNA, 21 nt, artificial
  Chemically synthesized
gguggaagagcugaaacaucc

SEQ ID NO: 22556 - RNA, 21 nt, artificial
  Chemically synthesized
uagacucucggaguucugcca

SEQ ID NO: 22557 - RNA, 21 nt, artificial
  Chemically synthesized
auguagaccuuguggcucagg

SEQ ID NO: 22558 - RNA, 21 nt, artificial
  Chemically synthesized
ucaggucacaaccauguaucu

SEQ ID NO: 22559 - RNA, 21 nt, artificial
  Chemically synthesized
accagaaccaugaaaaacauc

SEQ ID NO: 22560 - RNA, 21 nt, artificial
  Chemically synthesized
uccucaggucacaaccaugua

SEQ ID NO: 22561 - RNA, 21 nt, artificial
  Chemically synthesized
acccucacugaauacaacauu

SEQ ID NO: 22562 - RNA, 21 nt, artificial
  Chemically synthesized
aacaccugguagcugcuuuuu

SEQ ID NO: 22563 - RNA, 21 nt, artificial
  Chemically synthesized
ugccuguuaaaugggccacuu

SEQ ID NO: 22564 - RNA, 21 nt, artificial
  Chemically synthesized
ugaucacaaggccacccuucu

SEQ ID NO: 22565 - RNA, 21 nt, artificial
  Chemically synthesized
gaugaugcugugugcaucugg

SEQ ID NO: 22566 - RNA, 21 nt, artificial
  Chemically synthesized
aacaucauuaguagcugacaa

SEQ ID NO: 22567 - RNA, 21 nt, artificial
  Chemically synthesized
gaccagagagagcucagauac

SEQ ID NO: 22568 - RNA, 21 nt, artificial
  Chemically synthesized
ucuuccgucauauuccuccau

SEQ ID NO: 22569 - RNA, 21 nt, artificial
  Chemically synthesized
ccauaggugucuucccauucc

SEQ ID NO: 22570 - RNA, 21 nt, artificial
  Chemically synthesized
cagguuguugcaagauugacc

SEQ ID NO: 22571 - RNA, 21 nt, artificial
  Chemically synthesized
caagcuggaucucucuuauag

SEQ ID NO: 22572 - RNA, 21 nt, artificial
  Chemically synthesized
aaaauugaccagagagagcuc

SEQ ID NO: 22573 - RNA, 21 nt, artificial
  Chemically synthesized
cucuuuagcuuauuaugcaag

SEQ ID NO: 22574 - RNA, 21 nt, artificial
  Chemically synthesized
cuugaguuggacuugccuguu

SEQ ID NO: 22575 - RNA, 21 nt, artificial
  Chemically synthesized
ccugguagcugcuuuuucaug

SEQ ID NO: 22576 - RNA, 21 nt, artificial
  Chemically synthesized
uauaagccgaaaaacgucuga

SEQ ID NO: 22577 - RNA, 21 nt, artificial
  Chemically synthesized
gcuuuuucaugcuucucccuc

SEQ ID NO: 22578 - RNA, 21 nt, artificial
  Chemically synthesized
ucucaguccuguagaggcuga

SEQ ID NO: 22579 - RNA, 21 nt, artificial
  Chemically synthesized
aagccucuagucuuccuuuuc

SEQ ID NO: 22580 - RNA, 21 nt, artificial
  Chemically synthesized
gccuguaacaaagaaucauaa

SEQ ID NO: 22581 - RNA, 21 nt, artificial
  Chemically synthesized
gugaguugaggagcuacagac

SEQ ID NO: 22582 - RNA, 21 nt, artificial
  Chemically synthesized
ucauaaacauuaggugaguug

SEQ ID NO: 22583 - RNA, 21 nt, artificial
  Chemically synthesized
uccuuuucaaucugccuaaau

SEQ ID NO: 22584 - RNA, 21 nt, artificial
  Chemically synthesized
uaaauccucaggucacaacca

SEQ ID NO: 22585 - RNA, 21 nt, artificial
  Chemically synthesized
uuuccauagcuaagggaaaca

SEQ ID NO: 22586 - RNA, 21 nt, artificial
  Chemically synthesized
ugaguugaggagcuacagaca

SEQ ID NO: 22587 - RNA, 21 nt, artificial
  Chemically synthesized
caaaauugaccagagagagcu

SEQ ID NO: 22588 - RNA, 21 nt, artificial
  Chemically synthesized
acccuucuuauacuucacucc

SEQ ID NO: 22589 - RNA, 21 nt, artificial
  Chemically synthesized
ugcuuuuucaugcuucucccu

SEQ ID NO: 22590 - RNA, 21 nt, artificial
  Chemically synthesized
aauacaacauucucggugccu

SEQ ID NO: 22591 - RNA, 21 nt, artificial
  Chemically synthesized
aucucucuugcuuaucuguua

SEQ ID NO: 22592 - RNA, 21 nt, artificial
  Chemically synthesized
aagaugaugcugugugcaucu

SEQ ID NO: 22593 - RNA, 21 nt, artificial
  Chemically synthesized
auuuugaacccuguggucuca

SEQ ID NO: 22594 - RNA, 21 nt, artificial
  Chemically synthesized
aguuaaaagguguccuuuuca

SEQ ID NO: 22595 - RNA, 21 nt, artificial
  Chemically synthesized
gaccaaaugcaacccauauuu

SEQ ID NO: 22596 - RNA, 21 nt, artificial
  Chemically synthesized
accucaaaugcauguaagaag

SEQ ID NO: 22597 - RNA, 21 nt, artificial
  Chemically synthesized
ugcaacccauauuuuccuaau

SEQ ID NO: 22598 - RNA, 21 nt, artificial
  Chemically synthesized
cccucacugaauacaacauuc

SEQ ID NO: 22599 - RNA, 21 nt, artificial
  Chemically synthesized
acuuagaguuccucauguaga

SEQ ID NO: 22600 - RNA, 21 nt, artificial
  Chemically synthesized
cuccauuugucuggcucauaa

SEQ ID NO: 22601 - RNA, 21 nt, artificial
  Chemically synthesized
aggugaguugaggagcuacag

SEQ ID NO: 22602 - RNA, 21 nt, artificial
  Chemically synthesized
guuucauugaucacaaggcca

SEQ ID NO: 22603 - RNA, 21 nt, artificial
  Chemically synthesized
acuuuccucagcuccuuuuuu

SEQ ID NO: 22604 - RNA, 21 nt, artificial
  Chemically synthesized
aaccagaaccaugaaaaacau

SEQ ID NO: 22605 - RNA, 21 nt, artificial
  Chemically synthesized
aagcaggacaauuccauaggu

SEQ ID NO: 22606 - RNA, 21 nt, artificial
  Chemically synthesized
cagcacugguaagauugaaca

SEQ ID NO: 22607 - RNA, 21 nt, artificial
  Chemically synthesized
aaacauuaggugaguugagga

SEQ ID NO: 22608 - RNA, 21 nt, artificial
  Chemically synthesized
ucuccaaagaugaugcugugu

SEQ ID NO: 22609 - RNA, 23 nt, artificial
  Chemically synthesized
gcuacuaaugauguuuuccuaua

SEQ ID NO: 22610 - RNA, 23 nt, artificial
  Chemically synthesized
agaacucugggcugccaugugaa

SEQ ID NO: 22611 - RNA, 23 nt, artificial
  Chemically synthesized
ccugagccacaaggucuacauga

SEQ ID NO: 22612 - RNA, 23 nt, artificial
  Chemically synthesized
cguaucugagcucucucugguca

SEQ ID NO: 22613 - RNA, 23 nt, artificial
  Chemically synthesized
ucuguagcuccucaacucaccua

SEQ ID NO: 22614 - RNA, 23 nt, artificial
  Chemically synthesized
gcuuaaaaaucauugauugucag

SEQ ID NO: 22615 - RNA, 23 nt, artificial
  Chemically synthesized
augcuuccugacaaucaacucua

SEQ ID NO: 22616 - RNA, 23 nt, artificial
  Chemically synthesized
gaacauagaacucugggcugcca

SEQ ID NO: 22617 - RNA, 23 nt, artificial
  Chemically synthesized
agauccagcuugccuccucuuga

SEQ ID NO: 22618 - RNA, 23 nt, artificial
  Chemically synthesized
ggaaucucagacguuuuucggcu

SEQ ID NO: 22619 - RNA, 23 nt, artificial
  Chemically synthesized
acucaagguccaugccucuggaa

SEQ ID NO: 22620 - RNA, 23 nt, artificial
  Chemically synthesized
aacucugggcugccaugugaaga

SEQ ID NO: 22621 - RNA, 23 nt, artificial
  Chemically synthesized
uugacaccucagccucuacagga

SEQ ID NO: 22622 - RNA, 23 nt, artificial
  Chemically synthesized
uagaacucugggcugccauguga

SEQ ID NO: 22623 - RNA, 23 nt, artificial
  Chemically synthesized
aacucaagguccaugccucugga

SEQ ID NO: 22624 - RNA, 23 nt, artificial
  Chemically synthesized
guacauauuaggaaaauaugggu

SEQ ID NO: 22625 - RNA, 23 nt, artificial
  Chemically synthesized
agcuacugcacuacugggcagau

SEQ ID NO: 22626 - RNA, 23 nt, artificial
  Chemically synthesized
gugcuuaaaaaucauugauuguc

SEQ ID NO: 22627 - RNA, 23 nt, artificial
  Chemically synthesized
gaagacaccuauggaauuguccu

SEQ ID NO: 22628 - RNA, 23 nt, artificial
  Chemically synthesized
gucuguagcuccucaacucaccu

SEQ ID NO: 22629 - RNA, 23 nt, artificial
  Chemically synthesized
agaucuacuggguggacagcagu

SEQ ID NO: 22630 - RNA, 23 nt, artificial
  Chemically synthesized
agagauccagcuugccuccucuu

SEQ ID NO: 22631 - RNA, 23 nt, artificial
  Chemically synthesized
agcuacuaaugauguuuuccuau

SEQ ID NO: 22632 - RNA, 23 nt, artificial
  Chemically synthesized
gauauugugaaguacauauuagg

SEQ ID NO: 22633 - RNA, 23 nt, artificial
  Chemically synthesized
gaucauuuauaugucaacguauc

SEQ ID NO: 22634 - RNA, 23 nt, artificial
  Chemically synthesized
aaugcauauccugagccaucggu

SEQ ID NO: 22635 - RNA, 23 nt, artificial
  Chemically synthesized
cagaugcacacagcaucaucuuu

SEQ ID NO: 22636 - RNA, 23 nt, artificial
  Chemically synthesized
aguacauauuaggaaaauauggg

SEQ ID NO: 22637 - RNA, 23 nt, artificial
  Chemically synthesized
aaucucagacguuuuucggcuua

SEQ ID NO: 22638 - RNA, 23 nt, artificial
  Chemically synthesized
uccauuaugauucuuuguuacag

SEQ ID NO: 22639 - RNA, 23 nt, artificial
  Chemically synthesized
cugaucauuuauaugucaacgua

SEQ ID NO: 22640 - RNA, 23 nt, artificial
  Chemically synthesized
cauagaacucugggcugccaugu

SEQ ID NO: 22641 - RNA, 23 nt, artificial
  Chemically synthesized
guuguauucagugagggucuucu

SEQ ID NO: 22642 - RNA, 23 nt, artificial
  Chemically synthesized
gaaucucagacguuuuucggcuu

SEQ ID NO: 22643 - RNA, 23 nt, artificial
  Chemically synthesized
acauagaacucugggcugccaug

SEQ ID NO: 22644 - RNA, 23 nt, artificial
  Chemically synthesized
augagcuacugcacuacugggca

SEQ ID NO: 22645 - RNA, 23 nt, artificial
  Chemically synthesized
gaagaacauagaacucugggcug

SEQ ID NO: 22646 - RNA, 23 nt, artificial
  Chemically synthesized
uauaagagagauccagcuugccu

SEQ ID NO: 22647 - RNA, 23 nt, artificial
  Chemically synthesized
uuguauucagugagggucuucuu

SEQ ID NO: 22648 - RNA, 23 nt, artificial
  Chemically synthesized
auuguccugcuuucuggagugaa

SEQ ID NO: 22649 - RNA, 23 nt, artificial
  Chemically synthesized
cuacugcacuacugggcagaugu

SEQ ID NO: 22650 - RNA, 23 nt, artificial
  Chemically synthesized
cuuaaaaaucauugauugucagc

SEQ ID NO: 22651 - RNA, 23 nt, artificial
  Chemically synthesized
aacguaucugagcucucucuggu

SEQ ID NO: 22652 - RNA, 23 nt, artificial
  Chemically synthesized
augucuguagcuccucaacucac

SEQ ID NO: 22653 - RNA, 23 nt, artificial
  Chemically synthesized
aacauagaacucugggcugccau

SEQ ID NO: 22654 - RNA, 23 nt, artificial
  Chemically synthesized
agaugcacacagcaucaucuuug

SEQ ID NO: 22655 - RNA, 23 nt, artificial
  Chemically synthesized
aagcacuuugggauucuuuccau

SEQ ID NO: 22656 - RNA, 23 nt, artificial
  Chemically synthesized
ucauuccuaacacagcaugugua

SEQ ID NO: 22657 - RNA, 23 nt, artificial
  Chemically synthesized
uauaagcucuaagagaagcacuu

SEQ ID NO: 22658 - RNA, 23 nt, artificial
  Chemically synthesized
uacugcacuacugggcagaugug

SEQ ID NO: 22659 - RNA, 23 nt, artificial
  Chemically synthesized
ccacuggcagcaucuucacuucu

SEQ ID NO: 22660 - RNA, 23 nt, artificial
  Chemically synthesized
uaccagccagaugcacacagcau

SEQ ID NO: 22661 - RNA, 23 nt, artificial
  Chemically synthesized
ggacaccuuuuaacucaccucuc

SEQ ID NO: 22662 - RNA, 23 nt, artificial
  Chemically synthesized
uauggaauuguccugcuuucugg

SEQ ID NO: 22663 - RNA, 23 nt, artificial
  Chemically synthesized
auaugucaacguaucugagcucu

SEQ ID NO: 22664 - RNA, 23 nt, artificial
  Chemically synthesized
uaagcucuaagagaagcacuuug

SEQ ID NO: 22665 - RNA, 23 nt, artificial
  Chemically synthesized
auaagcucuaagagaagcacuuu

SEQ ID NO: 22666 - RNA, 23 nt, artificial
  Chemically synthesized
auagaacucugggcugccaugug

SEQ ID NO: 22667 - RNA, 23 nt, artificial
  Chemically synthesized
acguaucugagcucucucugguc

SEQ ID NO: 22668 - RNA, 23 nt, artificial
  Chemically synthesized
cucuuccaccuacagaaggagcu

SEQ ID NO: 22669 - RNA, 23 nt, artificial
  Chemically synthesized
acauauuaggaaaauauggguug

SEQ ID NO: 22670 - RNA, 23 nt, artificial
  Chemically synthesized
guauauuccaaaguauacuuccg

SEQ ID NO: 22671 - RNA, 23 nt, artificial
  Chemically synthesized
aagacaccuauggaauuguccug

SEQ ID NO: 22672 - RNA, 23 nt, artificial
  Chemically synthesized
aagagagauccagcuugccuccu

SEQ ID NO: 22673 - RNA, 23 nt, artificial
  Chemically synthesized
augcauauccugagccaucggug

SEQ ID NO: 22674 - RNA, 23 nt, artificial
  Chemically synthesized
auaagagagauccagcuugccuc

SEQ ID NO: 22675 - RNA, 23 nt, artificial
  Chemically synthesized
aagcucuaagagaagcacuuugg

SEQ ID NO: 22676 - RNA, 23 nt, artificial
  Chemically synthesized
uccaacucaagguccaugccucu

SEQ ID NO: 22677 - RNA, 23 nt, artificial
  Chemically synthesized
gugaaguauaagaaggguggccu

SEQ ID NO: 22678 - RNA, 23 nt, artificial
  Chemically synthesized
ugucuguagcuccucaacucacc

SEQ ID NO: 22679 - RNA, 23 nt, artificial
  Chemically synthesized
uuuaacucaccucucaagguggg

SEQ ID NO: 22680 - RNA, 23 nt, artificial
  Chemically synthesized
ucauuuauaugucaacguaucug

SEQ ID NO: 22681 - RNA, 23 nt, artificial
  Chemically synthesized
agaacauagaacucugggcugcc

SEQ ID NO: 22682 - RNA, 23 nt, artificial
  Chemically synthesized
uuuaugagccagacaaauggagg

SEQ ID NO: 22683 - RNA, 23 nt, artificial
  Chemically synthesized
auauuccaaaguauacuuccggg

SEQ ID NO: 22684 - RNA, 23 nt, artificial
  Chemically synthesized
uguauauuccaaaguauacuucc

SEQ ID NO: 22685 - RNA, 23 nt, artificial
  Chemically synthesized
uucauuccuaacacagcaugugu

SEQ ID NO: 22686 - RNA, 23 nt, artificial
  Chemically synthesized
aacucaccuaauguuuaugagcc

SEQ ID NO: 22687 - RNA, 23 nt, artificial
  Chemically synthesized
uaagagagauccagcuugccucc

SEQ ID NO: 22688 - RNA, 23 nt, artificial
  Chemically synthesized
acugucuuucagauacaugguug

SEQ ID NO: 22689 - RNA, 23 nt, artificial
  Chemically synthesized
uaugucaacguaucugagcucuc

SEQ ID NO: 22690 - RNA, 23 nt, artificial
  Chemically synthesized
gucaaucuugcaacaaccugccc

SEQ ID NO: 22691 - RNA, 23 nt, artificial
  Chemically synthesized
uucuacacucaucuuagugccug

SEQ ID NO: 22692 - RNA, 23 nt, artificial
  Chemically synthesized
cauauuaggaaaauauggguugc

SEQ ID NO: 22693 - RNA, 23 nt, artificial
  Chemically synthesized
uauaggaaaacaucauuaguagc

SEQ ID NO: 22694 - RNA, 23 nt, artificial
  Chemically synthesized
uucacauggcagcccagaguucu

SEQ ID NO: 22695 - RNA, 23 nt, artificial
  Chemically synthesized
ucauguagaccuuguggcucagg

SEQ ID NO: 22696 - RNA, 23 nt, artificial
  Chemically synthesized
ugaccagagagagcucagauacg

SEQ ID NO: 22697 - RNA, 23 nt, artificial
  Chemically synthesized
uaggugaguugaggagcuacaga

SEQ ID NO: 22698 - RNA, 23 nt, artificial
  Chemically synthesized
cugacaaucaaugauuuuuaagc

SEQ ID NO: 22699 - RNA, 23 nt, artificial
  Chemically synthesized
uagaguugauugucaggaagcau

SEQ ID NO: 22700 - RNA, 23 nt, artificial
  Chemically synthesized
uggcagcccagaguucuauguuc

SEQ ID NO: 22701 - RNA, 23 nt, artificial
  Chemically synthesized
ucaagaggaggcaagcuggaucu

SEQ ID NO: 22702 - RNA, 23 nt, artificial
  Chemically synthesized
agccgaaaaacgucugagauucc

SEQ ID NO: 22703 - RNA, 23 nt, artificial
  Chemically synthesized
uuccagaggcauggaccuugagu

SEQ ID NO: 22704 - RNA, 23 nt, artificial
  Chemically synthesized
ucuucacauggcagcccagaguu

SEQ ID NO: 22705 - RNA, 23 nt, artificial
  Chemically synthesized
uccuguagaggcugaggugucaa

SEQ ID NO: 22706 - RNA, 23 nt, artificial
  Chemically synthesized
ucacauggcagcccagaguucua

SEQ ID NO: 22707 - RNA, 23 nt, artificial
  Chemically synthesized
uccagaggcauggaccuugaguu

SEQ ID NO: 22708 - RNA, 23 nt, artificial
  Chemically synthesized
acccauauuuuccuaauauguac

SEQ ID NO: 22709 - RNA, 23 nt, artificial
  Chemically synthesized
aucugcccaguagugcaguagcu

SEQ ID NO: 22710 - RNA, 23 nt, artificial
  Chemically synthesized
gacaaucaaugauuuuuaagcac

SEQ ID NO: 22711 - RNA, 23 nt, artificial
  Chemically synthesized
aggacaauuccauaggugucuuc

SEQ ID NO: 22712 - RNA, 23 nt, artificial
  Chemically synthesized
aggugaguugaggagcuacagac

SEQ ID NO: 22713 - RNA, 23 nt, artificial
  Chemically synthesized
acugcuguccacccaguagaucu

SEQ ID NO: 22714 - RNA, 23 nt, artificial
  Chemically synthesized
aagaggaggcaagcuggaucucu

SEQ ID NO: 22715 - RNA, 23 nt, artificial
  Chemically synthesized
auaggaaaacaucauuaguagcu

SEQ ID NO: 22716 - RNA, 23 nt, artificial
  Chemically synthesized
ccuaauauguacuucacaauauc

SEQ ID NO: 22717 - RNA, 23 nt, artificial
  Chemically synthesized
gauacguugacauauaaaugauc

SEQ ID NO: 22718 - RNA, 23 nt, artificial
  Chemically synthesized
accgauggcucaggauaugcauu

SEQ ID NO: 22719 - RNA, 23 nt, artificial
  Chemically synthesized
aaagaugaugcugugugcaucug

SEQ ID NO: 22720 - RNA, 23 nt, artificial
  Chemically synthesized
cccauauuuuccuaauauguacu

SEQ ID NO: 22721 - RNA, 23 nt, artificial
  Chemically synthesized
uaagccgaaaaacgucugagauu

SEQ ID NO: 22722 - RNA, 23 nt, artificial
  Chemically synthesized
cuguaacaaagaaucauaaugga

SEQ ID NO: 22723 - RNA, 23 nt, artificial
  Chemically synthesized
uacguugacauauaaaugaucag

SEQ ID NO: 22724 - RNA, 23 nt, artificial
  Chemically synthesized
acauggcagcccagaguucuaug

SEQ ID NO: 22725 - RNA, 23 nt, artificial
  Chemically synthesized
agaagacccucacugaauacaac

SEQ ID NO: 22726 - RNA, 23 nt, artificial
  Chemically synthesized
aagccgaaaaacgucugagauuc

SEQ ID NO: 22727 - RNA, 23 nt, artificial
  Chemically synthesized
cauggcagcccagaguucuaugu

SEQ ID NO: 22728 - RNA, 23 nt, artificial
  Chemically synthesized
ugcccaguagugcaguagcucau

SEQ ID NO: 22729 - RNA, 23 nt, artificial
  Chemically synthesized
cagcccagaguucuauguucuuc

SEQ ID NO: 22730 - RNA, 23 nt, artificial
  Chemically synthesized
aggcaagcuggaucucucuuaua

SEQ ID NO: 22731 - RNA, 23 nt, artificial
  Chemically synthesized
aagaagacccucacugaauacaa

SEQ ID NO: 22732 - RNA, 23 nt, artificial
  Chemically synthesized
uucacuccagaaagcaggacaau

SEQ ID NO: 22733 - RNA, 23 nt, artificial
  Chemically synthesized
acaucugcccaguagugcaguag

SEQ ID NO: 22734 - RNA, 23 nt, artificial
  Chemically synthesized
gcugacaaucaaugauuuuuaag

SEQ ID NO: 22735 - RNA, 23 nt, artificial
  Chemically synthesized
accagagagagcucagauacguu

SEQ ID NO: 22736 - RNA, 23 nt, artificial
  Chemically synthesized
gugaguugaggagcuacagacau

SEQ ID NO: 22737 - RNA, 23 nt, artificial
  Chemically synthesized
auggcagcccagaguucuauguu

SEQ ID NO: 22738 - RNA, 23 nt, artificial
  Chemically synthesized
caaagaugaugcugugugcaucu

SEQ ID NO: 22739 - RNA, 23 nt, artificial
  Chemically synthesized
auggaaagaaucccaaagugcuu

SEQ ID NO: 22740 - RNA, 23 nt, artificial
  Chemically synthesized
uacacaugcuguguuaggaauga

SEQ ID NO: 22741 - RNA, 23 nt, artificial
  Chemically synthesized
aagugcuucucuuagagcuuaua

SEQ ID NO: 22742 - RNA, 23 nt, artificial
  Chemically synthesized
cacaucugcccaguagugcagua

SEQ ID NO: 22743 - RNA, 23 nt, artificial
  Chemically synthesized
agaagugaagaugcugccagugg

SEQ ID NO: 22744 - RNA, 23 nt, artificial
  Chemically synthesized
augcugugugcaucuggcuggua

SEQ ID NO: 22745 - RNA, 23 nt, artificial
  Chemically synthesized
gagaggugaguuaaaaggugucc

SEQ ID NO: 22746 - RNA, 23 nt, artificial
  Chemically synthesized
ccagaaagcaggacaauuccaua

SEQ ID NO: 22747 - RNA, 23 nt, artificial
  Chemically synthesized
agagcucagauacguugacauau

SEQ ID NO: 22748 - RNA, 23 nt, artificial
  Chemically synthesized
caaagugcuucucuuagagcuua

SEQ ID NO: 22749 - RNA, 23 nt, artificial
  Chemically synthesized
aaagugcuucucuuagagcuuau

SEQ ID NO: 22750 - RNA, 23 nt, artificial
  Chemically synthesized
cacauggcagcccagaguucuau

SEQ ID NO: 22751 - RNA, 23 nt, artificial
  Chemically synthesized
gaccagagagagcucagauacgu

SEQ ID NO: 22752 - RNA, 23 nt, artificial
  Chemically synthesized
agcuccuucuguagguggaagag

SEQ ID NO: 22753 - RNA, 23 nt, artificial
  Chemically synthesized
caacccauauuuuccuaauaugu

SEQ ID NO: 22754 - RNA, 23 nt, artificial
  Chemically synthesized
cggaaguauacuuuggaauauac

SEQ ID NO: 22755 - RNA, 23 nt, artificial
  Chemically synthesized
caggacaauuccauaggugucuu

SEQ ID NO: 22756 - RNA, 23 nt, artificial
  Chemically synthesized
aggaggcaagcuggaucucucuu

SEQ ID NO: 22757 - RNA, 23 nt, artificial
  Chemically synthesized
caccgauggcucaggauaugcau

SEQ ID NO: 22758 - RNA, 23 nt, artificial
  Chemically synthesized
gaggcaagcuggaucucucuuau

SEQ ID NO: 22759 - RNA, 23 nt, artificial
  Chemically synthesized
ccaaagugcuucucuuagagcuu

SEQ ID NO: 22760 - RNA, 23 nt, artificial
  Chemically synthesized
agaggcauggaccuugaguugga

SEQ ID NO: 22761 - RNA, 23 nt, artificial
  Chemically synthesized
aggccacccuucuuauacuucac

SEQ ID NO: 22762 - RNA, 23 nt, artificial
  Chemically synthesized
ggugaguugaggagcuacagaca

SEQ ID NO: 22763 - RNA, 23 nt, artificial
  Chemically synthesized
cccaccuugagaggugaguuaaa

SEQ ID NO: 22764 - RNA, 23 nt, artificial
  Chemically synthesized
cagauacguugacauauaaauga

SEQ ID NO: 22765 - RNA, 23 nt, artificial
  Chemically synthesized
ggcagcccagaguucuauguucu

SEQ ID NO: 22766 - RNA, 23 nt, artificial
  Chemically synthesized
ccuccauuugucuggcucauaaa

SEQ ID NO: 22767 - RNA, 23 nt, artificial
  Chemically synthesized
cccggaaguauacuuuggaauau

SEQ ID NO: 22768 - RNA, 23 nt, artificial
  Chemically synthesized
ggaaguauacuuuggaauauaca

SEQ ID NO: 22769 - RNA, 23 nt, artificial
  Chemically synthesized
acacaugcuguguuaggaaugaa

SEQ ID NO: 22770 - RNA, 23 nt, artificial
  Chemically synthesized
ggcucauaaacauuaggugaguu

SEQ ID NO: 22771 - RNA, 23 nt, artificial
  Chemically synthesized
ggaggcaagcuggaucucucuua

SEQ ID NO: 22772 - RNA, 23 nt, artificial
  Chemically synthesized
caaccauguaucugaaagacagu

SEQ ID NO: 22773 - RNA, 23 nt, artificial
  Chemically synthesized
gagagcucagauacguugacaua

SEQ ID NO: 22774 - RNA, 23 nt, artificial
  Chemically synthesized
gggcagguuguugcaagauugac

SEQ ID NO: 22775 - RNA, 23 nt, artificial
  Chemically synthesized
caggcacuaagaugaguguagaa

SEQ ID NO: 22776 - RNA, 23 nt, artificial
  Chemically synthesized
gcaacccauauuuuccuaauaug

SEQ ID NO: 22777 - RNA, 23 nt, artificial
  Chemically synthesized
gcccuucaauuacccauaucccc

SEQ ID NO: 22778 - RNA, 23 nt, artificial
  Chemically synthesized
agcccuucaauuacccauauccc

SEQ ID NO: 22779 - RNA, 23 nt, artificial
  Chemically synthesized
cagcccuucaauuacccauaucc

SEQ ID NO: 22780 - RNA, 23 nt, artificial
  Chemically synthesized
gcagcccuucaauuacccauauc

SEQ ID NO: 22781 - RNA, 23 nt, artificial
  Chemically synthesized
agcagcccuucaauuacccauau

SEQ ID NO: 22782 - RNA, 23 nt, artificial
  Chemically synthesized
cggugaaacuaacagauaagcaa

SEQ ID NO: 22783 - RNA, 23 nt, artificial
  Chemically synthesized
ucggugaaacuaacagauaagca

SEQ ID NO: 22784 - RNA, 23 nt, artificial
  Chemically synthesized
aucggugaaacuaacagauaagc

SEQ ID NO: 22785 - RNA, 23 nt, artificial
  Chemically synthesized
caucggugaaacuaacagauaag

SEQ ID NO: 22786 - RNA, 23 nt, artificial
  Chemically synthesized
ccaucggugaaacuaacagauaa

SEQ ID NO: 22787 - RNA, 23 nt, artificial
  Chemically synthesized
gagggagaagcaugaaaaagcag

SEQ ID NO: 22788 - RNA, 23 nt, artificial
  Chemically synthesized
agagggagaagcaugaaaaagca

SEQ ID NO: 22789 - RNA, 23 nt, artificial
  Chemically synthesized
aagagggagaagcaugaaaaagc

SEQ ID NO: 22790 - RNA, 23 nt, artificial
  Chemically synthesized
gaagagggagaagcaugaaaaag

SEQ ID NO: 22791 - RNA, 23 nt, artificial
  Chemically synthesized
ugaagagggagaagcaugaaaaa

SEQ ID NO: 22792 - RNA, 23 nt, artificial
  Chemically synthesized
ggauuuaagggauggaaaaggaa

SEQ ID NO: 22793 - RNA, 23 nt, artificial
  Chemically synthesized
aggauuuaagggauggaaaagga

SEQ ID NO: 22794 - RNA, 23 nt, artificial
  Chemically synthesized
gaggauuuaagggauggaaaagg

SEQ ID NO: 22795 - RNA, 23 nt, artificial
  Chemically synthesized
ugaggauuuaagggauggaaaag

SEQ ID NO: 22796 - RNA, 23 nt, artificial
  Chemically synthesized
cugaggauuuaagggauggaaaa

SEQ ID NO: 22797 - RNA, 23 nt, artificial
  Chemically synthesized
caacucuaauagugcuuaaaaau

SEQ ID NO: 22798 - RNA, 23 nt, artificial
  Chemically synthesized
ucaacucuaauagugcuuaaaaa

SEQ ID NO: 22799 - RNA, 23 nt, artificial
  Chemically synthesized
aucaacucuaauagugcuuaaaa

SEQ ID NO: 22800 - RNA, 23 nt, artificial
  Chemically synthesized
aaucaacucuaauagugcuuaaa

SEQ ID NO: 22801 - RNA, 23 nt, artificial
  Chemically synthesized
caaucaacucuaauagugcuuaa

SEQ ID NO: 22802 - RNA, 23 nt, artificial
  Chemically synthesized
ggaggaauaugacggaagaacau

SEQ ID NO: 22803 - RNA, 23 nt, artificial
  Chemically synthesized
uggaggaauaugacggaagaaca

SEQ ID NO: 22804 - RNA, 23 nt, artificial
  Chemically synthesized
auggaggaauaugacggaagaac

SEQ ID NO: 22805 - RNA, 23 nt, artificial
  Chemically synthesized
aauggaggaauaugacggaagaa

SEQ ID NO: 22806 - RNA, 23 nt, artificial
  Chemically synthesized
aaauggaggaauaugacggaaga

SEQ ID NO: 22807 - RNA, 23 nt, artificial
  Chemically synthesized
gcagcaucuucacuucuaaaugc

SEQ ID NO: 22808 - RNA, 23 nt, artificial
  Chemically synthesized
ggcagcaucuucacuucuaaaug

SEQ ID NO: 22809 - RNA, 23 nt, artificial
  Chemically synthesized
uggcagcaucuucacuucuaaau

SEQ ID NO: 22810 - RNA, 23 nt, artificial
  Chemically synthesized
cuggcagcaucuucacuucuaaa

SEQ ID NO: 22811 - RNA, 23 nt, artificial
  Chemically synthesized
acuggcagcaucuucacuucuaa

SEQ ID NO: 22812 - RNA, 23 nt, artificial
  Chemically synthesized
ggacugagaagaaguaaaaccgu

SEQ ID NO: 22813 - RNA, 23 nt, artificial
  Chemically synthesized
aggacugagaagaaguaaaaccg

SEQ ID NO: 22814 - RNA, 23 nt, artificial
  Chemically synthesized
caggacugagaagaaguaaaacc

SEQ ID NO: 22815 - RNA, 23 nt, artificial
  Chemically synthesized
acaggacugagaagaaguaaaac

SEQ ID NO: 22816 - RNA, 23 nt, artificial
  Chemically synthesized
uacaggacugagaagaaguaaaa

SEQ ID NO: 22817 - RNA, 23 nt, artificial
  Chemically synthesized
cguuuuucggcuuauauaagcuc

SEQ ID NO: 22818 - RNA, 23 nt, artificial
  Chemically synthesized
acguuuuucggcuuauauaagcu

SEQ ID NO: 22819 - RNA, 23 nt, artificial
  Chemically synthesized
gacguuuuucggcuuauauaagc

SEQ ID NO: 22820 - RNA, 23 nt, artificial
  Chemically synthesized
agacguuuuucggcuuauauaag

SEQ ID NO: 22821 - RNA, 23 nt, artificial
  Chemically synthesized
cagacguuuuucggcuuauauaa

SEQ ID NO: 22822 - RNA, 23 nt, artificial
  Chemically synthesized
ggaauaugacggaagaacauaga

SEQ ID NO: 22823 - RNA, 23 nt, artificial
  Chemically synthesized
aggaauaugacggaagaacauag

SEQ ID NO: 22824 - RNA, 23 nt, artificial
  Chemically synthesized
gaggaauaugacggaagaacaua

SEQ ID NO: 22825 - RNA, 23 nt, artificial
  Chemically synthesized
cagugagggucuucuuacaugca

SEQ ID NO: 22826 - RNA, 23 nt, artificial
  Chemically synthesized
ucagugagggucuucuuacaugc

SEQ ID NO: 22827 - RNA, 23 nt, artificial
  Chemically synthesized
uucagugagggucuucuuacaug

SEQ ID NO: 22828 - RNA, 23 nt, artificial
  Chemically synthesized
auucagugagggucuucuuacau

SEQ ID NO: 22829 - RNA, 23 nt, artificial
  Chemically synthesized
uauucagugagggucuucuuaca

SEQ ID NO: 22830 - RNA, 23 nt, artificial
  Chemically synthesized
gguucugguugccuugguaggau

SEQ ID NO: 22831 - RNA, 23 nt, artificial
  Chemically synthesized
ugguucugguugccuugguagga

SEQ ID NO: 22832 - RNA, 23 nt, artificial
  Chemically synthesized
augguucugguugccuugguagg

SEQ ID NO: 22833 - RNA, 23 nt, artificial
  Chemically synthesized
caugguucugguugccuugguag

SEQ ID NO: 22834 - RNA, 23 nt, artificial
  Chemically synthesized
ucaugguucugguugccuuggua

SEQ ID NO: 22835 - RNA, 23 nt, artificial
  Chemically synthesized
ggacucauuucauuccuaacaca

SEQ ID NO: 22836 - RNA, 23 nt, artificial
  Chemically synthesized
gggacucauuucauuccuaacac

SEQ ID NO: 22837 - RNA, 23 nt, artificial
  Chemically synthesized
ggggacucauuucauuccuaaca

SEQ ID NO: 22838 - RNA, 23 nt, artificial
  Chemically synthesized
uggggacucauuucauuccuaac

SEQ ID NO: 22839 - RNA, 23 nt, artificial
  Chemically synthesized
uuggggacucauuucauuccuaa

SEQ ID NO: 22840 - RNA, 23 nt, artificial
  Chemically synthesized
ggauggaaaaggaagacuagagg

SEQ ID NO: 22841 - RNA, 23 nt, artificial
  Chemically synthesized
gggauggaaaaggaagacuagag

SEQ ID NO: 22842 - RNA, 23 nt, artificial
  Chemically synthesized
agggauggaaaaggaagacuaga

SEQ ID NO: 22843 - RNA, 23 nt, artificial
  Chemically synthesized
aagggauggaaaaggaagacuag

SEQ ID NO: 22844 - RNA, 23 nt, artificial
  Chemically synthesized
uaagggauggaaaaggaagacua

SEQ ID NO: 22845 - RNA, 23 nt, artificial
  Chemically synthesized
gaaacuaacagauaagcaagaga

SEQ ID NO: 22846 - RNA, 23 nt, artificial
  Chemically synthesized
ugaaacuaacagauaagcaagag

SEQ ID NO: 22847 - RNA, 23 nt, artificial
  Chemically synthesized
gugaaacuaacagauaagcaaga

SEQ ID NO: 22848 - RNA, 23 nt, artificial
  Chemically synthesized
ggugaaacuaacagauaagcaag

SEQ ID NO: 22849 - RNA, 23 nt, artificial
  Chemically synthesized
uguuuaugagccagacaaaugga

SEQ ID NO: 22850 - RNA, 23 nt, artificial
  Chemically synthesized
auguuuaugagccagacaaaugg

SEQ ID NO: 22851 - RNA, 23 nt, artificial
  Chemically synthesized
aauguuuaugagccagacaaaug

SEQ ID NO: 22852 - RNA, 23 nt, artificial
  Chemically synthesized
uaauguuuaugagccagacaaau

SEQ ID NO: 22853 - RNA, 23 nt, artificial
  Chemically synthesized
cuaauguuuaugagccagacaaa

SEQ ID NO: 22854 - RNA, 23 nt, artificial
  Chemically synthesized
cuagaggcuugcauaauaagcua

SEQ ID NO: 22855 - RNA, 23 nt, artificial
  Chemically synthesized
acuagaggcuugcauaauaagcu

SEQ ID NO: 22856 - RNA, 23 nt, artificial
  Chemically synthesized
gacuagaggcuugcauaauaagc

SEQ ID NO: 22857 - RNA, 23 nt, artificial
  Chemically synthesized
agacuagaggcuugcauaauaag

SEQ ID NO: 22858 - RNA, 23 nt, artificial
  Chemically synthesized
aagacuagaggcuugcauaauaa

SEQ ID NO: 22859 - RNA, 23 nt, artificial
  Chemically synthesized
gugaagagggagaagcaugaaaa

SEQ ID NO: 22860 - RNA, 23 nt, artificial
  Chemically synthesized
aaugcuuccugacaaucaacucu

SEQ ID NO: 22861 - RNA, 23 nt, artificial
  Chemically synthesized
gaaugcuuccugacaaucaacuc

SEQ ID NO: 22862 - RNA, 23 nt, artificial
  Chemically synthesized
ugaaugcuuccugacaaucaacu

SEQ ID NO: 22863 - RNA, 23 nt, artificial
  Chemically synthesized
uugaaugcuuccugacaaucaac

SEQ ID NO: 22864 - RNA, 23 nt, artificial
  Chemically synthesized
uuugaaugcuuccugacaaucaa

SEQ ID NO: 22865 - RNA, 23 nt, artificial
  Chemically synthesized
guauuuaggcagauugaaaagga

SEQ ID NO: 22866 - RNA, 23 nt, artificial
  Chemically synthesized
aguauuuaggcagauugaaaagg

SEQ ID NO: 22867 - RNA, 23 nt, artificial
  Chemically synthesized
gaguauuuaggcagauugaaaag

SEQ ID NO: 22868 - RNA, 23 nt, artificial
  Chemically synthesized
agaguauuuaggcagauugaaaa

SEQ ID NO: 22869 - RNA, 23 nt, artificial
  Chemically synthesized
gagaguauuuaggcagauugaaa

SEQ ID NO: 22870 - RNA, 23 nt, artificial
  Chemically synthesized
ccugaggauuuaagggauggaaa

SEQ ID NO: 22871 - RNA, 23 nt, artificial
  Chemically synthesized
gaaaguggcccauuuaacaggca

SEQ ID NO: 22872 - RNA, 23 nt, artificial
  Chemically synthesized
ggaaaguggcccauuuaacaggc

SEQ ID NO: 22873 - RNA, 23 nt, artificial
  Chemically synthesized
aggaaaguggcccauuuaacagg

SEQ ID NO: 22874 - RNA, 23 nt, artificial
  Chemically synthesized
gaggaaaguggcccauuuaacag

SEQ ID NO: 22875 - RNA, 23 nt, artificial
  Chemically synthesized
ugaggaaaguggcccauuuaaca

SEQ ID NO: 22876 - RNA, 23 nt, artificial
  Chemically synthesized
gagaccacaggguucaaaauguc

SEQ ID NO: 22877 - RNA, 23 nt, artificial
  Chemically synthesized
ugagaccacaggguucaaaaugu

SEQ ID NO: 22878 - RNA, 23 nt, artificial
  Chemically synthesized
uugagaccacaggguucaaaaug

SEQ ID NO: 22879 - RNA, 23 nt, artificial
  Chemically synthesized
cuugagaccacaggguucaaaau

SEQ ID NO: 22880 - RNA, 23 nt, artificial
  Chemically synthesized
ccuugagaccacaggguucaaaa

SEQ ID NO: 22881 - RNA, 23 nt, artificial
  Chemically synthesized
guucuucccuguccaaccucugu

SEQ ID NO: 22882 - RNA, 23 nt, artificial
  Chemically synthesized
aguucuucccuguccaaccucug

SEQ ID NO: 22883 - RNA, 23 nt, artificial
  Chemically synthesized
caguucuucccuguccaaccucu

SEQ ID NO: 22884 - RNA, 23 nt, artificial
  Chemically synthesized
acaguucuucccuguccaaccuc

SEQ ID NO: 22885 - RNA, 23 nt, artificial
  Chemically synthesized
cacaguucuucccuguccaaccu

SEQ ID NO: 22886 - RNA, 23 nt, artificial
  Chemically synthesized
gagaagaaguaaaaccguuugcu

SEQ ID NO: 22887 - RNA, 23 nt, artificial
  Chemically synthesized
ugagaagaaguaaaaccguuugc

SEQ ID NO: 22888 - RNA, 23 nt, artificial
  Chemically synthesized
cugagaagaaguaaaaccguuug

SEQ ID NO: 22889 - RNA, 23 nt, artificial
  Chemically synthesized
acugagaagaaguaaaaccguuu

SEQ ID NO: 22890 - RNA, 23 nt, artificial
  Chemically synthesized
gacugagaagaaguaaaaccguu

SEQ ID NO: 22891 - RNA, 23 nt, artificial
  Chemically synthesized
uccugacaaucaacucuaauagu

SEQ ID NO: 22892 - RNA, 23 nt, artificial
  Chemically synthesized
uuccugacaaucaacucuaauag

SEQ ID NO: 22893 - RNA, 23 nt, artificial
  Chemically synthesized
cuuccugacaaucaacucuaaua

SEQ ID NO: 22894 - RNA, 23 nt, artificial
  Chemically synthesized
gcuuccugacaaucaacucuaau

SEQ ID NO: 22895 - RNA, 23 nt, artificial
  Chemically synthesized
ugcuuccugacaaucaacucuaa

SEQ ID NO: 22896 - RNA, 23 nt, artificial
  Chemically synthesized
ugagaguauuuaggcagauugaa

SEQ ID NO: 22897 - RNA, 23 nt, artificial
  Chemically synthesized
cugagaguauuuaggcagauuga

SEQ ID NO: 22898 - RNA, 23 nt, artificial
  Chemically synthesized
cuacaggacugagaagaaguaaa

SEQ ID NO: 22899 - RNA, 23 nt, artificial
  Chemically synthesized
ggagaagcaugaaaaagcagcua

SEQ ID NO: 22900 - RNA, 23 nt, artificial
  Chemically synthesized
gggagaagcaugaaaaagcagcu

SEQ ID NO: 22901 - RNA, 23 nt, artificial
  Chemically synthesized
agggagaagcaugaaaaagcagc

SEQ ID NO: 22902 - RNA, 23 nt, artificial
  Chemically synthesized
ucuucccuguccaaccucugugc

SEQ ID NO: 22903 - RNA, 23 nt, artificial
  Chemically synthesized
uucuucccuguccaaccucugug

SEQ ID NO: 22904 - RNA, 23 nt, artificial
  Chemically synthesized
ucaucuuuggagaagcaaauagg

SEQ ID NO: 22905 - RNA, 23 nt, artificial
  Chemically synthesized
aucaucuuuggagaagcaaauag

SEQ ID NO: 22906 - RNA, 23 nt, artificial
  Chemically synthesized
caucaucuuuggagaagcaaaua

SEQ ID NO: 22907 - RNA, 23 nt, artificial
  Chemically synthesized
gcaucaucuuuggagaagcaaau

SEQ ID NO: 22908 - RNA, 23 nt, artificial
  Chemically synthesized
agcaucaucuuuggagaagcaaa

SEQ ID NO: 22909 - RNA, 23 nt, artificial
  Chemically synthesized
ggccuugugaucaaugaaacugg

SEQ ID NO: 22910 - RNA, 23 nt, artificial
  Chemically synthesized
uggccuugugaucaaugaaacug

SEQ ID NO: 22911 - RNA, 23 nt, artificial
  Chemically synthesized
guggccuugugaucaaugaaacu

SEQ ID NO: 22912 - RNA, 23 nt, artificial
  Chemically synthesized
gguggccuugugaucaaugaaac

SEQ ID NO: 22913 - RNA, 23 nt, artificial
  Chemically synthesized
ggguggccuugugaucaaugaaa

SEQ ID NO: 22914 - RNA, 23 nt, artificial
  Chemically synthesized
cauuugaggucaaguaagaagac

SEQ ID NO: 22915 - RNA, 23 nt, artificial
  Chemically synthesized
gcauuugaggucaaguaagaaga

SEQ ID NO: 22916 - RNA, 23 nt, artificial
  Chemically synthesized
ugcauuugaggucaaguaagaag

SEQ ID NO: 22917 - RNA, 23 nt, artificial
  Chemically synthesized
augcauuugaggucaaguaagaa

SEQ ID NO: 22918 - RNA, 23 nt, artificial
  Chemically synthesized
caugcauuugaggucaaguaaga

SEQ ID NO: 22919 - RNA, 23 nt, artificial
  Chemically synthesized
cagugcugaucauuuauauguca

SEQ ID NO: 22920 - RNA, 23 nt, artificial
  Chemically synthesized
ccagugcugaucauuuauauguc

SEQ ID NO: 22921 - RNA, 23 nt, artificial
  Chemically synthesized
accagugcugaucauuuauaugu

SEQ ID NO: 22922 - RNA, 23 nt, artificial
  Chemically synthesized
uaccagugcugaucauuuauaug

SEQ ID NO: 22923 - RNA, 23 nt, artificial
  Chemically synthesized
uuaccagugcugaucauuuauau

SEQ ID NO: 22924 - RNA, 23 nt, artificial
  Chemically synthesized
gaauaugacggaagaacauagaa

SEQ ID NO: 22925 - RNA, 23 nt, artificial
  Chemically synthesized
gauuuugaaugcuuccugacaau

SEQ ID NO: 22926 - RNA, 23 nt, artificial
  Chemically synthesized
agauuuugaaugcuuccugacaa

SEQ ID NO: 22927 - RNA, 23 nt, artificial
  Chemically synthesized
aagauuuugaaugcuuccugaca

SEQ ID NO: 22928 - RNA, 23 nt, artificial
  Chemically synthesized
caagauuuugaaugcuuccugac

SEQ ID NO: 22929 - RNA, 23 nt, artificial
  Chemically synthesized
ucaagauuuugaaugcuuccuga

SEQ ID NO: 22930 - RNA, 23 nt, artificial
  Chemically synthesized
gaagacuagaggcuugcauaaua

SEQ ID NO: 22931 - RNA, 23 nt, artificial
  Chemically synthesized
ggaagacuagaggcuugcauaau

SEQ ID NO: 22932 - RNA, 23 nt, artificial
  Chemically synthesized
aggaagacuagaggcuugcauaa

SEQ ID NO: 22933 - RNA, 23 nt, artificial
  Chemically synthesized
gggucuucuuacaugcauuugag

SEQ ID NO: 22934 - RNA, 23 nt, artificial
  Chemically synthesized
agggucuucuuacaugcauuuga

SEQ ID NO: 22935 - RNA, 23 nt, artificial
  Chemically synthesized
gagggucuucuuacaugcauuug

SEQ ID NO: 22936 - RNA, 23 nt, artificial
  Chemically synthesized
ugagggucuucuuacaugcauuu

SEQ ID NO: 22937 - RNA, 23 nt, artificial
  Chemically synthesized
gugagggucuucuuacaugcauu

SEQ ID NO: 22938 - RNA, 23 nt, artificial
  Chemically synthesized
gagccaucggugaaacuaacaga

SEQ ID NO: 22939 - RNA, 23 nt, artificial
  Chemically synthesized
ugagccaucggugaaacuaacag

SEQ ID NO: 22940 - RNA, 23 nt, artificial
  Chemically synthesized
cugagccaucggugaaacuaaca

SEQ ID NO: 22941 - RNA, 23 nt, artificial
  Chemically synthesized
ccugagccaucggugaaacuaac

SEQ ID NO: 22942 - RNA, 23 nt, artificial
  Chemically synthesized
uccugagccaucggugaaacuaa

SEQ ID NO: 22943 - RNA, 23 nt, artificial
  Chemically synthesized
gccugugucuccuugugauguuu

SEQ ID NO: 22944 - RNA, 23 nt, artificial
  Chemically synthesized
ggccugugucuccuugugauguu

SEQ ID NO: 22945 - RNA, 23 nt, artificial
  Chemically synthesized
aggccugugucuccuugugaugu

SEQ ID NO: 22946 - RNA, 23 nt, artificial
  Chemically synthesized
caggccugugucuccuugugaug

SEQ ID NO: 22947 - RNA, 23 nt, artificial
  Chemically synthesized
acaggccugugucuccuugugau

SEQ ID NO: 22948 - RNA, 23 nt, artificial
  Chemically synthesized
acaggcaaguccaacucaagguc

SEQ ID NO: 22949 - RNA, 23 nt, artificial
  Chemically synthesized
aacaggcaaguccaacucaaggu

SEQ ID NO: 22950 - RNA, 23 nt, artificial
  Chemically synthesized
uaacaggcaaguccaacucaagg

SEQ ID NO: 22951 - RNA, 23 nt, artificial
  Chemically synthesized
uuaacaggcaaguccaacucaag

SEQ ID NO: 22952 - RNA, 23 nt, artificial
  Chemically synthesized
uuuaacaggcaaguccaacucaa

SEQ ID NO: 22953 - RNA, 23 nt, artificial
  Chemically synthesized
caugccucuggaaugggaagaca

SEQ ID NO: 22954 - RNA, 23 nt, artificial
  Chemically synthesized
ccaugccucuggaaugggaagac

SEQ ID NO: 22955 - RNA, 23 nt, artificial
  Chemically synthesized
uccaugccucuggaaugggaaga

SEQ ID NO: 22956 - RNA, 23 nt, artificial
  Chemically synthesized
guccaugccucuggaaugggaag

SEQ ID NO: 22957 - RNA, 23 nt, artificial
  Chemically synthesized
gguccaugccucuggaaugggaa

SEQ ID NO: 22958 - RNA, 23 nt, artificial
  Chemically synthesized
ggaaaauauggguugcauuuggu

SEQ ID NO: 22959 - RNA, 23 nt, artificial
  Chemically synthesized
aggaaaauauggguugcauuugg

SEQ ID NO: 22960 - RNA, 23 nt, artificial
  Chemically synthesized
uuaggaaaauauggguugcauuu

SEQ ID NO: 22961 - RNA, 23 nt, artificial
  Chemically synthesized
auuaggaaaauauggguugcauu

SEQ ID NO: 22962 - RNA, 23 nt, artificial
  Chemically synthesized
gguugcauuuggucaagauuuug

SEQ ID NO: 22963 - RNA, 23 nt, artificial
  Chemically synthesized
ggguugcauuuggucaagauuuu

SEQ ID NO: 22964 - RNA, 23 nt, artificial
  Chemically synthesized
uggguugcauuuggucaagauuu

SEQ ID NO: 22965 - RNA, 23 nt, artificial
  Chemically synthesized
auggguugcauuuggucaagauu

SEQ ID NO: 22966 - RNA, 23 nt, artificial
  Chemically synthesized
uauggguugcauuuggucaagau

SEQ ID NO: 22967 - RNA, 23 nt, artificial
  Chemically synthesized
gcuugcauaauaagcuaaagagg

SEQ ID NO: 22968 - RNA, 23 nt, artificial
  Chemically synthesized
ggcuugcauaauaagcuaaagag

SEQ ID NO: 22969 - RNA, 23 nt, artificial
  Chemically synthesized
aggcuugcauaauaagcuaaaga

SEQ ID NO: 22970 - RNA, 23 nt, artificial
  Chemically synthesized
gaggcuugcauaauaagcuaaag

SEQ ID NO: 22971 - RNA, 23 nt, artificial
  Chemically synthesized
agaggcuugcauaauaagcuaaa

SEQ ID NO: 22972 - RNA, 23 nt, artificial
  Chemically synthesized
aggguggccuugugaucaaugaa

SEQ ID NO: 22973 - RNA, 23 nt, artificial
  Chemically synthesized
aaggguggccuugugaucaauga

SEQ ID NO: 22974 - RNA, 23 nt, artificial
  Chemically synthesized
gaaggguggccuugugaucaaug

SEQ ID NO: 22975 - RNA, 23 nt, artificial
  Chemically synthesized
agaaggguggccuugugaucaau

SEQ ID NO: 22976 - RNA, 23 nt, artificial
  Chemically synthesized
cauugauugucagcuacuaauga

SEQ ID NO: 22977 - RNA, 23 nt, artificial
  Chemically synthesized
ucauugauugucagcuacuaaug

SEQ ID NO: 22978 - RNA, 23 nt, artificial
  Chemically synthesized
aucauugauugucagcuacuaau

SEQ ID NO: 22979 - RNA, 23 nt, artificial
  Chemically synthesized
aaucauugauugucagcuacuaa

SEQ ID NO: 22980 - RNA, 23 nt, artificial
  Chemically synthesized
aaaucauugauugucagcuacua

SEQ ID NO: 22981 - RNA, 23 nt, artificial
  Chemically synthesized
gcacaguucuucccuguccaacc

SEQ ID NO: 22982 - RNA, 23 nt, artificial
  Chemically synthesized
cagcagcccuucaauuacccaua

SEQ ID NO: 22983 - RNA, 23 nt, artificial
  Chemically synthesized
cccuucaauuacccauaucccca

SEQ ID NO: 22984 - RNA, 23 nt, artificial
  Chemically synthesized
cugaggaaaguggcccauuuaac

SEQ ID NO: 22985 - RNA, 23 nt, artificial
  Chemically synthesized
gcugaggaaaguggcccauuuaa

SEQ ID NO: 22986 - RNA, 23 nt, artificial
  Chemically synthesized
agcugaggaaaguggcccauuua

SEQ ID NO: 22987 - RNA, 23 nt, artificial
  Chemically synthesized
cuuucuggagugaaguauaagaa

SEQ ID NO: 22988 - RNA, 23 nt, artificial
  Chemically synthesized
gcuuucuggagugaaguauaaga

SEQ ID NO: 22989 - RNA, 23 nt, artificial
  Chemically synthesized
ugcuuucuggagugaaguauaag

SEQ ID NO: 22990 - RNA, 23 nt, artificial
  Chemically synthesized
cugcuuucuggagugaaguauaa

SEQ ID NO: 22991 - RNA, 23 nt, artificial
  Chemically synthesized
ccugcuuucuggagugaaguaua

SEQ ID NO: 22992 - RNA, 23 nt, artificial
  Chemically synthesized
ccuucaauuacccauauccccag

SEQ ID NO: 22993 - RNA, 23 nt, artificial
  Chemically synthesized
cgagaauguuguauucagugagg

SEQ ID NO: 22994 - RNA, 23 nt, artificial
  Chemically synthesized
ccgagaauguuguauucagugag

SEQ ID NO: 22995 - RNA, 23 nt, artificial
  Chemically synthesized
accgagaauguuguauucaguga

SEQ ID NO: 22996 - RNA, 23 nt, artificial
  Chemically synthesized
caccgagaauguuguauucagug

SEQ ID NO: 22997 - RNA, 23 nt, artificial
  Chemically synthesized
gcaccgagaauguuguauucagu

SEQ ID NO: 22998 - RNA, 23 nt, artificial
  Chemically synthesized
agaugugcauuuuugugaaauga

SEQ ID NO: 22999 - RNA, 23 nt, artificial
  Chemically synthesized
uagaugugcauuuuugugaaaug

SEQ ID NO: 23000 - RNA, 23 nt, artificial
  Chemically synthesized
guagaugugcauuuuugugaaau

SEQ ID NO: 23001 - RNA, 23 nt, artificial
  Chemically synthesized
uguagaugugcauuuuugugaaa

SEQ ID NO: 23002 - RNA, 23 nt, artificial
  Chemically synthesized
auguagaugugcauuuuugugaa

SEQ ID NO: 23003 - RNA, 23 nt, artificial
  Chemically synthesized
ccucuugagcagucagcaacagg

SEQ ID NO: 23004 - RNA, 23 nt, artificial
  Chemically synthesized
uccucuugagcagucagcaacag

SEQ ID NO: 23005 - RNA, 23 nt, artificial
  Chemically synthesized
cuccucuugagcagucagcaaca

SEQ ID NO: 23006 - RNA, 23 nt, artificial
  Chemically synthesized
ccuccucuugagcagucagcaac

SEQ ID NO: 23007 - RNA, 23 nt, artificial
  Chemically synthesized
gccuccucuugagcagucagcaa

SEQ ID NO: 23008 - RNA, 23 nt, artificial
  Chemically synthesized
ggcacaguucuucccuguccaac

SEQ ID NO: 23009 - RNA, 23 nt, artificial
  Chemically synthesized
aggcacaguucuucccuguccaa

SEQ ID NO: 23010 - RNA, 23 nt, artificial
  Chemically synthesized
caggcacaguucuucccugucca

SEQ ID NO: 23011 - RNA, 23 nt, artificial
  Chemically synthesized
gcagcagcccuucaauuacccau

SEQ ID NO: 23012 - RNA, 23 nt, artificial
  Chemically synthesized
ugcagcagcccuucaauuaccca

SEQ ID NO: 23013 - RNA, 23 nt, artificial
  Chemically synthesized
ugugaagagggagaagcaugaaa

SEQ ID NO: 23014 - RNA, 23 nt, artificial
  Chemically synthesized
augugaagagggagaagcaugaa

SEQ ID NO: 23015 - RNA, 23 nt, artificial
  Chemically synthesized
caugugaagagggagaagcauga

SEQ ID NO: 23016 - RNA, 23 nt, artificial
  Chemically synthesized
ggacugucuuucagauacauggu

SEQ ID NO: 23017 - RNA, 23 nt, artificial
  Chemically synthesized
gggacugucuuucagauacaugg

SEQ ID NO: 23018 - RNA, 23 nt, artificial
  Chemically synthesized
ggggacugucuuucagauacaug

SEQ ID NO: 23019 - RNA, 23 nt, artificial
  Chemically synthesized
gggggacugucuuucagauacau

SEQ ID NO: 23020 - RNA, 23 nt, artificial
  Chemically synthesized
agggggacugucuuucagauaca

SEQ ID NO: 23021 - RNA, 23 nt, artificial
  Chemically synthesized
ugaaaaggacaccuuuuaacuca

SEQ ID NO: 23022 - RNA, 23 nt, artificial
  Chemically synthesized
uugaaaaggacaccuuuuaacuc

SEQ ID NO: 23023 - RNA, 23 nt, artificial
  Chemically synthesized
auugaaaaggacaccuuuuaacu

SEQ ID NO: 23024 - RNA, 23 nt, artificial
  Chemically synthesized
gauugaaaaggacaccuuuuaac

SEQ ID NO: 23025 - RNA, 23 nt, artificial
  Chemically synthesized
agauugaaaaggacaccuuuuaa

SEQ ID NO: 23026 - RNA, 23 nt, artificial
  Chemically synthesized
cuuuuaacucaccucucaaggug

SEQ ID NO: 23027 - RNA, 23 nt, artificial
  Chemically synthesized
accuuuuaacucaccucucaagg

SEQ ID NO: 23028 - RNA, 23 nt, artificial
  Chemically synthesized
caccuuuuaacucaccucucaag

SEQ ID NO: 23029 - RNA, 23 nt, artificial
  Chemically synthesized
acaccuuuuaacucaccucucaa

SEQ ID NO: 23030 - RNA, 23 nt, artificial
  Chemically synthesized
caucuuuggagaagcaaauaggc

SEQ ID NO: 23031 - RNA, 23 nt, artificial
  Chemically synthesized
cuucaauuacccauauccccaga

SEQ ID NO: 23032 - RNA, 23 nt, artificial
  Chemically synthesized
cuauggaaacucuauaagagaga

SEQ ID NO: 23033 - RNA, 23 nt, artificial
  Chemically synthesized
gcuauggaaacucuauaagagag

SEQ ID NO: 23034 - RNA, 23 nt, artificial
  Chemically synthesized
agcuauggaaacucuauaagaga

SEQ ID NO: 23035 - RNA, 23 nt, artificial
  Chemically synthesized
uagcuauggaaacucuauaagag

SEQ ID NO: 23036 - RNA, 23 nt, artificial
  Chemically synthesized
uuagcuauggaaacucuauaaga

SEQ ID NO: 23037 - RNA, 23 nt, artificial
  Chemically synthesized
auguguauuuccagugcaauugu

SEQ ID NO: 23038 - RNA, 23 nt, artificial
  Chemically synthesized
cauguguauuuccagugcaauug

SEQ ID NO: 23039 - RNA, 23 nt, artificial
  Chemically synthesized
gcauguguauuuccagugcaauu

SEQ ID NO: 23040 - RNA, 23 nt, artificial
  Chemically synthesized
agcauguguauuuccagugcaau

SEQ ID NO: 23041 - RNA, 23 nt, artificial
  Chemically synthesized
cagcauguguauuuccagugcaa

SEQ ID NO: 23042 - RNA, 23 nt, artificial
  Chemically synthesized
gacaaauggaggaauaugacgga

SEQ ID NO: 23043 - RNA, 23 nt, artificial
  Chemically synthesized
agacaaauggaggaauaugacgg

SEQ ID NO: 23044 - RNA, 23 nt, artificial
  Chemically synthesized
cagacaaauggaggaauaugacg

SEQ ID NO: 23045 - RNA, 23 nt, artificial
  Chemically synthesized
ccagacaaauggaggaauaugac

SEQ ID NO: 23046 - RNA, 23 nt, artificial
  Chemically synthesized
gccagacaaauggaggaauauga

SEQ ID NO: 23047 - RNA, 23 nt, artificial
  Chemically synthesized
gccucuacaggacugagaagaag

SEQ ID NO: 23048 - RNA, 23 nt, artificial
  Chemically synthesized
agccucuacaggacugagaagaa

SEQ ID NO: 23049 - RNA, 23 nt, artificial
  Chemically synthesized
cagccucuacaggacugagaaga

SEQ ID NO: 23050 - RNA, 23 nt, artificial
  Chemically synthesized
ucagccucuacaggacugagaag

SEQ ID NO: 23051 - RNA, 23 nt, artificial
  Chemically synthesized
cucagccucuacaggacugagaa

SEQ ID NO: 23052 - RNA, 23 nt, artificial
  Chemically synthesized
ggaagacaccuauggaauugucc

SEQ ID NO: 23053 - RNA, 23 nt, artificial
  Chemically synthesized
gggaagacaccuauggaauuguc

SEQ ID NO: 23054 - RNA, 23 nt, artificial
  Chemically synthesized
ugggaagacaccuauggaauugu

SEQ ID NO: 23055 - RNA, 23 nt, artificial
  Chemically synthesized
augggaagacaccuauggaauug

SEQ ID NO: 23056 - RNA, 23 nt, artificial
  Chemically synthesized
aaugggaagacaccuauggaauu

SEQ ID NO: 23057 - RNA, 23 nt, artificial
  Chemically synthesized
ucagacguuuuucggcuuauaua

SEQ ID NO: 23058 - RNA, 23 nt, artificial
  Chemically synthesized
cucagacguuuuucggcuuauau

SEQ ID NO: 23059 - RNA, 23 nt, artificial
  Chemically synthesized
ucucagacguuuuucggcuuaua

SEQ ID NO: 23060 - RNA, 23 nt, artificial
  Chemically synthesized
gccaucggugaaacuaacagaua

SEQ ID NO: 23061 - RNA, 23 nt, artificial
  Chemically synthesized
agccaucggugaaacuaacagau

SEQ ID NO: 23062 - RNA, 23 nt, artificial
  Chemically synthesized
agaagaaguaaaaccguuugcug

SEQ ID NO: 23063 - RNA, 23 nt, artificial
  Chemically synthesized
accugaggauuuaagggauggaa

SEQ ID NO: 23064 - RNA, 23 nt, artificial
  Chemically synthesized
guaagaagacaugaaccaagugg

SEQ ID NO: 23065 - RNA, 23 nt, artificial
  Chemically synthesized
aguaagaagacaugaaccaagug

SEQ ID NO: 23066 - RNA, 23 nt, artificial
  Chemically synthesized
aaguaagaagacaugaaccaagu

SEQ ID NO: 23067 - RNA, 23 nt, artificial
  Chemically synthesized
caaguaagaagacaugaaccaag

SEQ ID NO: 23068 - RNA, 23 nt, artificial
  Chemically synthesized
ucaaguaagaagacaugaaccaa

SEQ ID NO: 23069 - RNA, 23 nt, artificial
  Chemically synthesized
gacaccuuuuaacucaccucuca

SEQ ID NO: 23070 - RNA, 23 nt, artificial
  Chemically synthesized
ccagguguucuacacucaucuua

SEQ ID NO: 23071 - RNA, 23 nt, artificial
  Chemically synthesized
accagguguucuacacucaucuu

SEQ ID NO: 23072 - RNA, 23 nt, artificial
  Chemically synthesized
uaccagguguucuacacucaucu

SEQ ID NO: 23073 - RNA, 23 nt, artificial
  Chemically synthesized
cuaccagguguucuacacucauc

SEQ ID NO: 23074 - RNA, 23 nt, artificial
  Chemically synthesized
gcuaccagguguucuacacucau

SEQ ID NO: 23075 - RNA, 23 nt, artificial
  Chemically synthesized
gcagcuaccagguguucuacacu

SEQ ID NO: 23076 - RNA, 23 nt, artificial
  Chemically synthesized
agcagcuaccagguguucuacac

SEQ ID NO: 23077 - RNA, 23 nt, artificial
  Chemically synthesized
aagcagcuaccagguguucuaca

SEQ ID NO: 23078 - RNA, 23 nt, artificial
  Chemically synthesized
aaagcagcuaccagguguucuac

SEQ ID NO: 23079 - RNA, 23 nt, artificial
  Chemically synthesized
aaaagcagcuaccagguguucua

SEQ ID NO: 23080 - RNA, 23 nt, artificial
  Chemically synthesized
ccugagaguauuuaggcagauug

SEQ ID NO: 23081 - RNA, 23 nt, artificial
  Chemically synthesized
gccugagaguauuuaggcagauu

SEQ ID NO: 23082 - RNA, 23 nt, artificial
  Chemically synthesized
ugccugagaguauuuaggcagau

SEQ ID NO: 23083 - RNA, 23 nt, artificial
  Chemically synthesized
gugccugagaguauuuaggcaga

SEQ ID NO: 23084 - RNA, 23 nt, artificial
  Chemically synthesized
gcuccucaacucaccuaauguuu

SEQ ID NO: 23085 - RNA, 23 nt, artificial
  Chemically synthesized
agcuccucaacucaccuaauguu

SEQ ID NO: 23086 - RNA, 23 nt, artificial
  Chemically synthesized
uagcuccucaacucaccuaaugu

SEQ ID NO: 23087 - RNA, 23 nt, artificial
  Chemically synthesized
guagcuccucaacucaccuaaug

SEQ ID NO: 23088 - RNA, 23 nt, artificial
  Chemically synthesized
uguagcuccucaacucaccuaau

SEQ ID NO: 23089 - RNA, 23 nt, artificial
  Chemically synthesized
acagcaucaucuuuggagaagca

SEQ ID NO: 23090 - RNA, 23 nt, artificial
  Chemically synthesized
cacagcaucaucuuuggagaagc

SEQ ID NO: 23091 - RNA, 23 nt, artificial
  Chemically synthesized
acacagcaucaucuuuggagaag

SEQ ID NO: 23092 - RNA, 23 nt, artificial
  Chemically synthesized
cacacagcaucaucuuuggagaa

SEQ ID NO: 23093 - RNA, 23 nt, artificial
  Chemically synthesized
gcacacagcaucaucuuuggaga

SEQ ID NO: 23094 - RNA, 23 nt, artificial
  Chemically synthesized
cuggagugaaguauaagaagggu

SEQ ID NO: 23095 - RNA, 23 nt, artificial
  Chemically synthesized
ucuggagugaaguauaagaaggg

SEQ ID NO: 23096 - RNA, 23 nt, artificial
  Chemically synthesized
uucuggagugaaguauaagaagg

SEQ ID NO: 23097 - RNA, 23 nt, artificial
  Chemically synthesized
uuucuggagugaaguauaagaag

SEQ ID NO: 23098 - RNA, 23 nt, artificial
  Chemically synthesized
aaaaaaaggagcugaggaaagug

SEQ ID NO: 23099 - RNA, 23 nt, artificial
  Chemically synthesized
gaaaaaaaggagcugaggaaagu

SEQ ID NO: 23100 - RNA, 23 nt, artificial
  Chemically synthesized
ugaaaaaaaggagcugaggaaag

SEQ ID NO: 23101 - RNA, 23 nt, artificial
  Chemically synthesized
cugaaaaaaaggagcugaggaaa

SEQ ID NO: 23102 - RNA, 23 nt, artificial
  Chemically synthesized
ccugaaaaaaaggagcugaggaa

SEQ ID NO: 23103 - RNA, 23 nt, artificial
  Chemically synthesized
cagcaucuucacuucuaaaugca

SEQ ID NO: 23104 - RNA, 23 nt, artificial
  Chemically synthesized
cagcaucaucuuuggagaagcaa

SEQ ID NO: 23105 - RNA, 23 nt, artificial
  Chemically synthesized
ucuacaggacugagaagaaguaa

SEQ ID NO: 23106 - RNA, 23 nt, artificial
  Chemically synthesized
aaggaagacuagaggcuugcaua

SEQ ID NO: 23107 - RNA, 23 nt, artificial
  Chemically synthesized
acaaggucuacaugaggaacucu

SEQ ID NO: 23108 - RNA, 23 nt, artificial
  Chemically synthesized
cacaaggucuacaugaggaacuc

SEQ ID NO: 23109 - RNA, 23 nt, artificial
  Chemically synthesized
ccacaaggucuacaugaggaacu

SEQ ID NO: 23110 - RNA, 23 nt, artificial
  Chemically synthesized
gccacaaggucuacaugaggaac

SEQ ID NO: 23111 - RNA, 23 nt, artificial
  Chemically synthesized
agccacaaggucuacaugaggaa

SEQ ID NO: 23112 - RNA, 23 nt, artificial
  Chemically synthesized
cauuuaacaggcaaguccaacuc

SEQ ID NO: 23113 - RNA, 23 nt, artificial
  Chemically synthesized
ccauuuaacaggcaaguccaacu

SEQ ID NO: 23114 - RNA, 23 nt, artificial
  Chemically synthesized
cccauuuaacaggcaaguccaac

SEQ ID NO: 23115 - RNA, 23 nt, artificial
  Chemically synthesized
gcccauuuaacaggcaaguccaa

SEQ ID NO: 23116 - RNA, 23 nt, artificial
  Chemically synthesized
ggcccauuuaacaggcaagucca

SEQ ID NO: 23117 - RNA, 23 nt, artificial
  Chemically synthesized
gucaaguaagaagacaugaacca

SEQ ID NO: 23118 - RNA, 23 nt, artificial
  Chemically synthesized
ggucaaguaagaagacaugaacc

SEQ ID NO: 23119 - RNA, 23 nt, artificial
  Chemically synthesized
aggucaaguaagaagacaugaac

SEQ ID NO: 23120 - RNA, 23 nt, artificial
  Chemically synthesized
gaggucaaguaagaagacaugaa

SEQ ID NO: 23121 - RNA, 23 nt, artificial
  Chemically synthesized
uccugcuuucuggagugaaguau

SEQ ID NO: 23122 - RNA, 23 nt, artificial
  Chemically synthesized
guccugcuuucuggagugaagua

SEQ ID NO: 23123 - RNA, 23 nt, artificial
  Chemically synthesized
uguccugcuuucuggagugaagu

SEQ ID NO: 23124 - RNA, 23 nt, artificial
  Chemically synthesized
uuguccugcuuucuggagugaag

SEQ ID NO: 23125 - RNA, 23 nt, artificial
  Chemically synthesized
ggaagaacauagaacucugggcu

SEQ ID NO: 23126 - RNA, 23 nt, artificial
  Chemically synthesized
cggaagaacauagaacucugggc

SEQ ID NO: 23127 - RNA, 23 nt, artificial
  Chemically synthesized
acggaagaacauagaacucuggg

SEQ ID NO: 23128 - RNA, 23 nt, artificial
  Chemically synthesized
gacggaagaacauagaacucugg

SEQ ID NO: 23129 - RNA, 23 nt, artificial
  Chemically synthesized
ugacggaagaacauagaacucug

SEQ ID NO: 23130 - RNA, 23 nt, artificial
  Chemically synthesized
gauugucagcuacuaaugauguu

SEQ ID NO: 23131 - RNA, 23 nt, artificial
  Chemically synthesized
ugauugucagcuacuaaugaugu

SEQ ID NO: 23132 - RNA, 23 nt, artificial
  Chemically synthesized
uugauugucagcuacuaaugaug

SEQ ID NO: 23133 - RNA, 23 nt, artificial
  Chemically synthesized
auugauugucagcuacuaaugau

SEQ ID NO: 23134 - RNA, 23 nt, artificial
  Chemically synthesized
aacagauaagcaagagagauguu

SEQ ID NO: 23135 - RNA, 23 nt, artificial
  Chemically synthesized
uaacagauaagcaagagagaugu

SEQ ID NO: 23136 - RNA, 23 nt, artificial
  Chemically synthesized
cuaacagauaagcaagagagaug

SEQ ID NO: 23137 - RNA, 23 nt, artificial
  Chemically synthesized
acuaacagauaagcaagagagau

SEQ ID NO: 23138 - RNA, 23 nt, artificial
  Chemically synthesized
aacuaacagauaagcaagagaga

SEQ ID NO: 23139 - RNA, 23 nt, artificial
  Chemically synthesized
ggaaugggaagacaccuauggaa

SEQ ID NO: 23140 - RNA, 23 nt, artificial
  Chemically synthesized
uggaaugggaagacaccuaugga

SEQ ID NO: 23141 - RNA, 23 nt, artificial
  Chemically synthesized
cuggaaugggaagacaccuaugg

SEQ ID NO: 23142 - RNA, 23 nt, artificial
  Chemically synthesized
ucuggaaugggaagacaccuaug

SEQ ID NO: 23143 - RNA, 23 nt, artificial
  Chemically synthesized
cucuggaaugggaagacaccuau

SEQ ID NO: 23144 - RNA, 23 nt, artificial
  Chemically synthesized
gauggaaaaggaagacuagaggc

SEQ ID NO: 23145 - RNA, 23 nt, artificial
  Chemically synthesized
acaugcauuugaggucaaguaag

SEQ ID NO: 23146 - RNA, 23 nt, artificial
  Chemically synthesized
uacaugcauuugaggucaaguaa

SEQ ID NO: 23147 - RNA, 23 nt, artificial
  Chemically synthesized
gagagaauguagauauugugaag

SEQ ID NO: 23148 - RNA, 23 nt, artificial
  Chemically synthesized
agagagaauguagauauugugaa

SEQ ID NO: 23149 - RNA, 23 nt, artificial
  Chemically synthesized
aagagagaauguagauauuguga

SEQ ID NO: 23150 - RNA, 23 nt, artificial
  Chemically synthesized
aaagagagaauguagauauugug

SEQ ID NO: 23151 - RNA, 23 nt, artificial
  Chemically synthesized
uaaagagagaauguagauauugu

SEQ ID NO: 23152 - RNA, 23 nt, artificial
  Chemically synthesized
cggcuuauauaagcucuaagaga

SEQ ID NO: 23153 - RNA, 23 nt, artificial
  Chemically synthesized
ucggcuuauauaagcucuaagag

SEQ ID NO: 23154 - RNA, 23 nt, artificial
  Chemically synthesized
uucggcuuauauaagcucuaaga

SEQ ID NO: 23155 - RNA, 23 nt, artificial
  Chemically synthesized
uuucggcuuauauaagcucuaag

SEQ ID NO: 23156 - RNA, 23 nt, artificial
  Chemically synthesized
uuuucggcuuauauaagcucuaa

SEQ ID NO: 23157 - RNA, 23 nt, artificial
  Chemically synthesized
gggucaaucuugcaacaaccugc

SEQ ID NO: 23158 - RNA, 23 nt, artificial
  Chemically synthesized
ggggucaaucuugcaacaaccug

SEQ ID NO: 23159 - RNA, 23 nt, artificial
  Chemically synthesized
cggggucaaucuugcaacaaccu

SEQ ID NO: 23160 - RNA, 23 nt, artificial
  Chemically synthesized
ccggggucaaucuugcaacaacc

SEQ ID NO: 23161 - RNA, 23 nt, artificial
  Chemically synthesized
uccggggucaaucuugcaacaac

SEQ ID NO: 23162 - RNA, 23 nt, artificial
  Chemically synthesized
uagaggcuugcauaauaagcuaa

SEQ ID NO: 23163 - RNA, 23 nt, artificial
  Chemically synthesized
gaauguagauauugugaaguaca

SEQ ID NO: 23164 - RNA, 23 nt, artificial
  Chemically synthesized
agaauguagauauugugaaguac

SEQ ID NO: 23165 - RNA, 23 nt, artificial
  Chemically synthesized
gagaauguagauauugugaagua

SEQ ID NO: 23166 - RNA, 23 nt, artificial
  Chemically synthesized
agagaauguagauauugugaagu

SEQ ID NO: 23167 - RNA, 23 nt, artificial
  Chemically synthesized
uuaagggauggaaaaggaagacu

SEQ ID NO: 23168 - RNA, 23 nt, artificial
  Chemically synthesized
uuuaagggauggaaaaggaagac

SEQ ID NO: 23169 - RNA, 23 nt, artificial
  Chemically synthesized
auuuaagggauggaaaaggaaga

SEQ ID NO: 23170 - RNA, 23 nt, artificial
  Chemically synthesized
gauuuaagggauggaaaaggaag

SEQ ID NO: 23171 - RNA, 23 nt, artificial
  Chemically synthesized
ggauguuucagcucuuccaccua

SEQ ID NO: 23172 - RNA, 23 nt, artificial
  Chemically synthesized
gggauguuucagcucuuccaccu

SEQ ID NO: 23173 - RNA, 23 nt, artificial
  Chemically synthesized
ggggauguuucagcucuuccacc

SEQ ID NO: 23174 - RNA, 23 nt, artificial
  Chemically synthesized
uggggauguuucagcucuuccac

SEQ ID NO: 23175 - RNA, 23 nt, artificial
  Chemically synthesized
cuggggauguuucagcucuucca

SEQ ID NO: 23176 - RNA, 23 nt, artificial
  Chemically synthesized
cccugaaaaaaaggagcugagga

SEQ ID NO: 23177 - RNA, 23 nt, artificial
  Chemically synthesized
cacuggcagcaucuucacuucua

SEQ ID NO: 23178 - RNA, 23 nt, artificial
  Chemically synthesized
cccugaagaagagagggaaccac

SEQ ID NO: 23179 - RNA, 23 nt, artificial
  Chemically synthesized
ccccugaagaagagagggaacca

SEQ ID NO: 23180 - RNA, 23 nt, artificial
  Chemically synthesized
accccugaagaagagagggaacc

SEQ ID NO: 23181 - RNA, 23 nt, artificial
  Chemically synthesized
caccccugaagaagagagggaac

SEQ ID NO: 23182 - RNA, 23 nt, artificial
  Chemically synthesized
ccaccccugaagaagagagggaa

SEQ ID NO: 23183 - RNA, 23 nt, artificial
  Chemically synthesized
ucuacaugaggaacucuaaguau

SEQ ID NO: 23184 - RNA, 23 nt, artificial
  Chemically synthesized
gucuacaugaggaacucuaagua

SEQ ID NO: 23185 - RNA, 23 nt, artificial
  Chemically synthesized
ggucuacaugaggaacucuaagu

SEQ ID NO: 23186 - RNA, 23 nt, artificial
  Chemically synthesized
aggucuacaugaggaacucuaag

SEQ ID NO: 23187 - RNA, 23 nt, artificial
  Chemically synthesized
aaggucuacaugaggaacucuaa

SEQ ID NO: 23188 - RNA, 23 nt, artificial
  Chemically synthesized
cucuacaggacugagaagaagua

SEQ ID NO: 23189 - RNA, 23 nt, artificial
  Chemically synthesized
agccagacaaauggaggaauaug

SEQ ID NO: 23190 - RNA, 23 nt, artificial
  Chemically synthesized
gagccagacaaauggaggaauau

SEQ ID NO: 23191 - RNA, 23 nt, artificial
  Chemically synthesized
caacucaccuaauguuuaugagc

SEQ ID NO: 23192 - RNA, 23 nt, artificial
  Chemically synthesized
ucaacucaccuaauguuuaugag

SEQ ID NO: 23193 - RNA, 23 nt, artificial
  Chemically synthesized
cucaacucaccuaauguuuauga

SEQ ID NO: 23194 - RNA, 23 nt, artificial
  Chemically synthesized
ccucaacucaccuaauguuuaug

SEQ ID NO: 23195 - RNA, 23 nt, artificial
  Chemically synthesized
uccucaacucaccuaauguuuau

SEQ ID NO: 23196 - RNA, 23 nt, artificial
  Chemically synthesized
agaggcugaaagaggccaaugcc

SEQ ID NO: 23197 - RNA, 23 nt, artificial
  Chemically synthesized
aagaggcugaaagaggccaaugc

SEQ ID NO: 23198 - RNA, 23 nt, artificial
  Chemically synthesized
aaagaggcugaaagaggccaaug

SEQ ID NO: 23199 - RNA, 23 nt, artificial
  Chemically synthesized
uaaagaggcugaaagaggccaau

SEQ ID NO: 23200 - RNA, 23 nt, artificial
  Chemically synthesized
cuaaagaggcugaaagaggccaa

SEQ ID NO: 23201 - RNA, 23 nt, artificial
  Chemically synthesized
gggcaguguucaaucuuaccagu

SEQ ID NO: 23202 - RNA, 23 nt, artificial
  Chemically synthesized
ggggcaguguucaaucuuaccag

SEQ ID NO: 23203 - RNA, 23 nt, artificial
  Chemically synthesized
gggggcaguguucaaucuuacca

SEQ ID NO: 23204 - RNA, 23 nt, artificial
  Chemically synthesized
ugggggcaguguucaaucuuacc

SEQ ID NO: 23205 - RNA, 23 nt, artificial
  Chemically synthesized
cugggggcaguguucaaucuuac

SEQ ID NO: 23206 - RNA, 23 nt, artificial
  Chemically synthesized
aggaucuggugaugauggagggg

SEQ ID NO: 23207 - RNA, 23 nt, artificial
  Chemically synthesized
caggaucuggugaugauggaggg

SEQ ID NO: 23208 - RNA, 23 nt, artificial
  Chemically synthesized
ccaggaucuggugaugauggagg

SEQ ID NO: 23209 - RNA, 23 nt, artificial
  Chemically synthesized
cccaggaucuggugaugauggag

SEQ ID NO: 23210 - RNA, 23 nt, artificial
  Chemically synthesized
ccccaggaucuggugaugaugga

SEQ ID NO: 23211 - RNA, 23 nt, artificial
  Chemically synthesized
cuuagcuauggaaacucuauaag

SEQ ID NO: 23212 - RNA, 23 nt, artificial
  Chemically synthesized
ccuuagcuauggaaacucuauaa

SEQ ID NO: 23213 - RNA, 23 nt, artificial
  Chemically synthesized
cccuuagcuauggaaacucuaua

SEQ ID NO: 23214 - RNA, 23 nt, artificial
  Chemically synthesized
ucccuuagcuauggaaacucuau

SEQ ID NO: 23215 - RNA, 23 nt, artificial
  Chemically synthesized
uucccuuagcuauggaaacucua

SEQ ID NO: 23216 - RNA, 23 nt, artificial
  Chemically synthesized
ucuggucaauuuugaggaaucuc

SEQ ID NO: 23217 - RNA, 23 nt, artificial
  Chemically synthesized
cucuggucaauuuugaggaaucu

SEQ ID NO: 23218 - RNA, 23 nt, artificial
  Chemically synthesized
ucucuggucaauuuugaggaauc

SEQ ID NO: 23219 - RNA, 23 nt, artificial
  Chemically synthesized
cucucuggucaauuuugaggaau

SEQ ID NO: 23220 - RNA, 23 nt, artificial
  Chemically synthesized
ucucucuggucaauuuugaggaa

SEQ ID NO: 23221 - RNA, 23 nt, artificial
  Chemically synthesized
cacucaucuuagugccugagagu

SEQ ID NO: 23222 - RNA, 23 nt, artificial
  Chemically synthesized
acacucaucuuagugccugagag

SEQ ID NO: 23223 - RNA, 23 nt, artificial
  Chemically synthesized
uacacucaucuuagugccugaga

SEQ ID NO: 23224 - RNA, 23 nt, artificial
  Chemically synthesized
cuacacucaucuuagugccugag

SEQ ID NO: 23225 - RNA, 23 nt, artificial
  Chemically synthesized
ucuacacucaucuuagugccuga

SEQ ID NO: 23226 - RNA, 23 nt, artificial
  Chemically synthesized
ccuugugaucaaugaaacugggc

SEQ ID NO: 23227 - RNA, 23 nt, artificial
  Chemically synthesized
gccuugugaucaaugaaacuggg

SEQ ID NO: 23228 - RNA, 23 nt, artificial
  Chemically synthesized
aaaggaagacuagaggcuugcau

SEQ ID NO: 23229 - RNA, 23 nt, artificial
  Chemically synthesized
aaaaggaagacuagaggcuugca

SEQ ID NO: 23230 - RNA, 23 nt, artificial
  Chemically synthesized
cugagcucucucuggucaauuuu

SEQ ID NO: 23231 - RNA, 23 nt, artificial
  Chemically synthesized
ucugagcucucucuggucaauuu

SEQ ID NO: 23232 - RNA, 23 nt, artificial
  Chemically synthesized
aucugagcucucucuggucaauu

SEQ ID NO: 23233 - RNA, 23 nt, artificial
  Chemically synthesized
uaucugagcucucucuggucaau

SEQ ID NO: 23234 - RNA, 23 nt, artificial
  Chemically synthesized
guaucugagcucucucuggucaa

SEQ ID NO: 23235 - RNA, 23 nt, artificial
  Chemically synthesized
cugacaaucaacucuaauagugc

SEQ ID NO: 23236 - RNA, 23 nt, artificial
  Chemically synthesized
ccugacaaucaacucuaauagug

SEQ ID NO: 23237 - RNA, 23 nt, artificial
  Chemically synthesized
uuuggggacucauuucauuccua

SEQ ID NO: 23238 - RNA, 23 nt, artificial
  Chemically synthesized
aaaaaaggagcugaggaaagugg

SEQ ID NO: 23239 - RNA, 23 nt, artificial
  Chemically synthesized
caugguugugaccugaggauuua

SEQ ID NO: 23240 - RNA, 23 nt, artificial
  Chemically synthesized
acaugguugugaccugaggauuu

SEQ ID NO: 23241 - RNA, 23 nt, artificial
  Chemically synthesized
uacaugguugugaccugaggauu

SEQ ID NO: 23242 - RNA, 23 nt, artificial
  Chemically synthesized
auacaugguugugaccugaggau

SEQ ID NO: 23243 - RNA, 23 nt, artificial
  Chemically synthesized
gauacaugguugugaccugagga

SEQ ID NO: 23244 - RNA, 23 nt, artificial
  Chemically synthesized
auauggguugcauuuggucaaga

SEQ ID NO: 23245 - RNA, 23 nt, artificial
  Chemically synthesized
aagaagagagggaaccacagcac

SEQ ID NO: 23246 - RNA, 23 nt, artificial
  Chemically synthesized
gaagaagagagggaaccacagca

SEQ ID NO: 23247 - RNA, 23 nt, artificial
  Chemically synthesized
ugaagaagagagggaaccacagc

SEQ ID NO: 23248 - RNA, 23 nt, artificial
  Chemically synthesized
cugaagaagagagggaaccacag

SEQ ID NO: 23249 - RNA, 23 nt, artificial
  Chemically synthesized
ccugaagaagagagggaaccaca

SEQ ID NO: 23250 - RNA, 23 nt, artificial
  Chemically synthesized
guagauauugugaaguacauauu

SEQ ID NO: 23251 - RNA, 23 nt, artificial
  Chemically synthesized
uguagauauugugaaguacauau

SEQ ID NO: 23252 - RNA, 23 nt, artificial
  Chemically synthesized
auguagauauugugaaguacaua

SEQ ID NO: 23253 - RNA, 23 nt, artificial
  Chemically synthesized
aauguagauauugugaaguacau

SEQ ID NO: 23254 - RNA, 23 nt, artificial
  Chemically synthesized
acuaaagagagaauguagauauu

SEQ ID NO: 23255 - RNA, 23 nt, artificial
  Chemically synthesized
gacuaaagagagaauguagauau

SEQ ID NO: 23256 - RNA, 23 nt, artificial
  Chemically synthesized
ugacuaaagagagaauguagaua

SEQ ID NO: 23257 - RNA, 23 nt, artificial
  Chemically synthesized
augacuaaagagagaauguagau

SEQ ID NO: 23258 - RNA, 23 nt, artificial
  Chemically synthesized
uaugacuaaagagagaauguaga

SEQ ID NO: 23259 - RNA, 23 nt, artificial
  Chemically synthesized
ccaugugaagagggagaagcaug

SEQ ID NO: 23260 - RNA, 23 nt, artificial
  Chemically synthesized
gccaugugaagagggagaagcau

SEQ ID NO: 23261 - RNA, 23 nt, artificial
  Chemically synthesized
ugccaugugaagagggagaagca

SEQ ID NO: 23262 - RNA, 23 nt, artificial
  Chemically synthesized
agaccacaggguucaaaaugucu

SEQ ID NO: 23263 - RNA, 23 nt, artificial
  Chemically synthesized
caaucuuaccagugcugaucauu

SEQ ID NO: 23264 - RNA, 23 nt, artificial
  Chemically synthesized
ucaaucuuaccagugcugaucau

SEQ ID NO: 23265 - RNA, 23 nt, artificial
  Chemically synthesized
uucaaucuuaccagugcugauca

SEQ ID NO: 23266 - RNA, 23 nt, artificial
  Chemically synthesized
guucaaucuuaccagugcugauc

SEQ ID NO: 23267 - RNA, 23 nt, artificial
  Chemically synthesized
uguucaaucuuaccagugcugau

SEQ ID NO: 23268 - RNA, 23 nt, artificial
  Chemically synthesized
gugaaguacauauuaggaaaaua

SEQ ID NO: 23269 - RNA, 23 nt, artificial
  Chemically synthesized
ugugaaguacauauuaggaaaau

SEQ ID NO: 23270 - RNA, 23 nt, artificial
  Chemically synthesized
uugugaaguacauauuaggaaaa

SEQ ID NO: 23271 - RNA, 23 nt, artificial
  Chemically synthesized
auugugaaguacauauuaggaaa

SEQ ID NO: 23272 - RNA, 23 nt, artificial
  Chemically synthesized
uauugugaaguacauauuaggaa

SEQ ID NO: 23273 - RNA, 23 nt, artificial
  Chemically synthesized
gagcugaggaaaguggcccauuu

SEQ ID NO: 23274 - RNA, 23 nt, artificial
  Chemically synthesized
guuuaugagccagacaaauggag

SEQ ID NO: 23275 - RNA, 23 nt, artificial
  Chemically synthesized
ugagccagacaaauggaggaaua

SEQ ID NO: 23276 - RNA, 23 nt, artificial
  Chemically synthesized
augagccagacaaauggaggaau

SEQ ID NO: 23277 - RNA, 23 nt, artificial
  Chemically synthesized
uaugagccagacaaauggaggaa

SEQ ID NO: 23278 - RNA, 23 nt, artificial
  Chemically synthesized
uuaugagccagacaaauggagga

SEQ ID NO: 23279 - RNA, 23 nt, artificial
  Chemically synthesized
aaacuaacagauaagcaagagag

SEQ ID NO: 23280 - RNA, 23 nt, artificial
  Chemically synthesized
cugccaugugaagagggagaagc

SEQ ID NO: 23281 - RNA, 23 nt, artificial
  Chemically synthesized
gcugccaugugaagagggagaag

SEQ ID NO: 23282 - RNA, 23 nt, artificial
  Chemically synthesized
ggcugccaugugaagagggagaa

SEQ ID NO: 23283 - RNA, 23 nt, artificial
  Chemically synthesized
aagaaggguggccuugugaucaa

SEQ ID NO: 23284 - RNA, 23 nt, artificial
  Chemically synthesized
caggcaaguccaacucaaggucc

SEQ ID NO: 23285 - RNA, 23 nt, artificial
  Chemically synthesized
gaugugcauuuuugugaaaugaa

SEQ ID NO: 23286 - RNA, 23 nt, artificial
  Chemically synthesized
caugcagcagcccuucaauuacc

SEQ ID NO: 23287 - RNA, 23 nt, artificial
  Chemically synthesized
ccaugcagcagcccuucaauuac

SEQ ID NO: 23288 - RNA, 23 nt, artificial
  Chemically synthesized
gccaugcagcagcccuucaauua

SEQ ID NO: 23289 - RNA, 23 nt, artificial
  Chemically synthesized
ugccaugcagcagcccuucaauu

SEQ ID NO: 23290 - RNA, 23 nt, artificial
  Chemically synthesized
cugccaugcagcagcccuucaau

SEQ ID NO: 23291 - RNA, 23 nt, artificial
  Chemically synthesized
agcucuuccaccuacagaaggag

SEQ ID NO: 23292 - RNA, 23 nt, artificial
  Chemically synthesized
cagcucuuccaccuacagaagga

SEQ ID NO: 23293 - RNA, 23 nt, artificial
  Chemically synthesized
ucagcucuuccaccuacagaagg

SEQ ID NO: 23294 - RNA, 23 nt, artificial
  Chemically synthesized
uucagcucuuccaccuacagaag

SEQ ID NO: 23295 - RNA, 23 nt, artificial
  Chemically synthesized
uuucagcucuuccaccuacagaa

SEQ ID NO: 23296 - RNA, 23 nt, artificial
  Chemically synthesized
cuuaccagugcugaucauuuaua

SEQ ID NO: 23297 - RNA, 23 nt, artificial
  Chemically synthesized
ggcaccgagaauguuguauucag

SEQ ID NO: 23298 - RNA, 23 nt, artificial
  Chemically synthesized
uccccaggaucuggugaugaugg

SEQ ID NO: 23299 - RNA, 23 nt, artificial
  Chemically synthesized
auccccaggaucuggugaugaug

SEQ ID NO: 23300 - RNA, 23 nt, artificial
  Chemically synthesized
uauccccaggaucuggugaugau

SEQ ID NO: 23301 - RNA, 23 nt, artificial
  Chemically synthesized
agcuaaagaggcugaaagaggcc

SEQ ID NO: 23302 - RNA, 23 nt, artificial
  Chemically synthesized
aagcuaaagaggcugaaagaggc

SEQ ID NO: 23303 - RNA, 23 nt, artificial
  Chemically synthesized
uaagcuaaagaggcugaaagagg

SEQ ID NO: 23304 - RNA, 23 nt, artificial
  Chemically synthesized
auaagcuaaagaggcugaaagag

SEQ ID NO: 23305 - RNA, 23 nt, artificial
  Chemically synthesized
aauaagcuaaagaggcugaaaga

SEQ ID NO: 23306 - RNA, 23 nt, artificial
  Chemically synthesized
agaagagagggaaccacagcaca

SEQ ID NO: 23307 - RNA, 23 nt, artificial
  Chemically synthesized
ucauuucauuccuaacacagcau

SEQ ID NO: 23308 - RNA, 23 nt, artificial
  Chemically synthesized
cucauuucauuccuaacacagca

SEQ ID NO: 23309 - RNA, 23 nt, artificial
  Chemically synthesized
acucauuucauuccuaacacagc

SEQ ID NO: 23310 - RNA, 23 nt, artificial
  Chemically synthesized
gacucauuucauuccuaacacag

SEQ ID NO: 23311 - RNA, 23 nt, artificial
  Chemically synthesized
auuuaacaggcaaguccaacuca

SEQ ID NO: 23312 - RNA, 23 nt, artificial
  Chemically synthesized
cuuagugccugagaguauuuagg

SEQ ID NO: 23313 - RNA, 23 nt, artificial
  Chemically synthesized
ucuuagugccugagaguauuuag

SEQ ID NO: 23314 - RNA, 23 nt, artificial
  Chemically synthesized
aucuuagugccugagaguauuua

SEQ ID NO: 23315 - RNA, 23 nt, artificial
  Chemically synthesized
caucuuagugccugagaguauuu

SEQ ID NO: 23316 - RNA, 23 nt, artificial
  Chemically synthesized
ucaucuuagugccugagaguauu

SEQ ID NO: 23317 - RNA, 23 nt, artificial
  Chemically synthesized
cagauugaaaaggacaccuuuua

SEQ ID NO: 23318 - RNA, 23 nt, artificial
  Chemically synthesized
gcagauugaaaaggacaccuuuu

SEQ ID NO: 23319 - RNA, 23 nt, artificial
  Chemically synthesized
ggcagauugaaaaggacaccuuu

SEQ ID NO: 23320 - RNA, 23 nt, artificial
  Chemically synthesized
gaccugaggauuuaagggaugga

SEQ ID NO: 23321 - RNA, 23 nt, artificial
  Chemically synthesized
ugaccugaggauuuaagggaugg

SEQ ID NO: 23322 - RNA, 23 nt, artificial
  Chemically synthesized
gugaccugaggauuuaagggaug

SEQ ID NO: 23323 - RNA, 23 nt, artificial
  Chemically synthesized
ugugaccugaggauuuaagggau

SEQ ID NO: 23324 - RNA, 23 nt, artificial
  Chemically synthesized
ccagaugcacacagcaucaucuu

SEQ ID NO: 23325 - RNA, 23 nt, artificial
  Chemically synthesized
gccagaugcacacagcaucaucu

SEQ ID NO: 23326 - RNA, 23 nt, artificial
  Chemically synthesized
agccagaugcacacagcaucauc

SEQ ID NO: 23327 - RNA, 23 nt, artificial
  Chemically synthesized
cagccagaugcacacagcaucau

SEQ ID NO: 23328 - RNA, 23 nt, artificial
  Chemically synthesized
ccagccagaugcacacagcauca

SEQ ID NO: 23329 - RNA, 23 nt, artificial
  Chemically synthesized
gggauucuuuccauuaugauucu

SEQ ID NO: 23330 - RNA, 23 nt, artificial
  Chemically synthesized
ugggauucuuuccauuaugauuc

SEQ ID NO: 23331 - RNA, 23 nt, artificial
  Chemically synthesized
uugggauucuuuccauuaugauu

SEQ ID NO: 23332 - RNA, 23 nt, artificial
  Chemically synthesized
uuugggauucuuuccauuaugau

SEQ ID NO: 23333 - RNA, 23 nt, artificial
  Chemically synthesized
cuuugggauucuuuccauuauga

SEQ ID NO: 23334 - RNA, 23 nt, artificial
  Chemically synthesized
augacggaagaacauagaacucu

SEQ ID NO: 23335 - RNA, 23 nt, artificial
  Chemically synthesized
uaugacggaagaacauagaacuc

SEQ ID NO: 23336 - RNA, 23 nt, artificial
  Chemically synthesized
auaugacggaagaacauagaacu

SEQ ID NO: 23337 - RNA, 23 nt, artificial
  Chemically synthesized
agaaggagcuggcagaacuccga

SEQ ID NO: 23338 - RNA, 23 nt, artificial
  Chemically synthesized
cagaaggagcuggcagaacuccg

SEQ ID NO: 23339 - RNA, 23 nt, artificial
  Chemically synthesized
acagaaggagcuggcagaacucc

SEQ ID NO: 23340 - RNA, 23 nt, artificial
  Chemically synthesized
uacagaaggagcuggcagaacuc

SEQ ID NO: 23341 - RNA, 23 nt, artificial
  Chemically synthesized
cuacagaaggagcuggcagaacu

SEQ ID NO: 23342 - RNA, 23 nt, artificial
  Chemically synthesized
gaaugggaagacaccuauggaau

SEQ ID NO: 23343 - RNA, 23 nt, artificial
  Chemically synthesized
cugggcuguacuuuguauauucc

SEQ ID NO: 23344 - RNA, 23 nt, artificial
  Chemically synthesized
acugggcuguacuuuguauauuc

SEQ ID NO: 23345 - RNA, 23 nt, artificial
  Chemically synthesized
aacugggcuguacuuuguauauu

SEQ ID NO: 23346 - RNA, 23 nt, artificial
  Chemically synthesized
aaacugggcuguacuuuguauau

SEQ ID NO: 23347 - RNA, 23 nt, artificial
  Chemically synthesized
gaaacugggcuguacuuuguaua

SEQ ID NO: 23348 - RNA, 23 nt, artificial
  Chemically synthesized
guugugaccugaggauuuaaggg

SEQ ID NO: 23349 - RNA, 23 nt, artificial
  Chemically synthesized
gguugugaccugaggauuuaagg

SEQ ID NO: 23350 - RNA, 23 nt, artificial
  Chemically synthesized
ugguugugaccugaggauuuaag

SEQ ID NO: 23351 - RNA, 23 nt, artificial
  Chemically synthesized
augguugugaccugaggauuuaa

SEQ ID NO: 23352 - RNA, 23 nt, artificial
  Chemically synthesized
caggguucaaaaugucuguagcu

SEQ ID NO: 23353 - RNA, 23 nt, artificial
  Chemically synthesized
acaggguucaaaaugucuguagc

SEQ ID NO: 23354 - RNA, 23 nt, artificial
  Chemically synthesized
cacaggguucaaaaugucuguag

SEQ ID NO: 23355 - RNA, 23 nt, artificial
  Chemically synthesized
ccacaggguucaaaaugucugua

SEQ ID NO: 23356 - RNA, 23 nt, artificial
  Chemically synthesized
accacaggguucaaaaugucugu

SEQ ID NO: 23357 - RNA, 23 nt, artificial
  Chemically synthesized
uggcccauuuaacaggcaagucc

SEQ ID NO: 23358 - RNA, 23 nt, artificial
  Chemically synthesized
guggcccauuuaacaggcaaguc

SEQ ID NO: 23359 - RNA, 23 nt, artificial
  Chemically synthesized
aguggcccauuuaacaggcaagu

SEQ ID NO: 23360 - RNA, 23 nt, artificial
  Chemically synthesized
aaguggcccauuuaacaggcaag

SEQ ID NO: 23361 - RNA, 23 nt, artificial
  Chemically synthesized
aaaguggcccauuuaacaggcaa

SEQ ID NO: 23362 - RNA, 23 nt, artificial
  Chemically synthesized
ucuugagcagucagcaacagggu

SEQ ID NO: 23363 - RNA, 23 nt, artificial
  Chemically synthesized
cucuugagcagucagcaacaggg

SEQ ID NO: 23364 - RNA, 23 nt, artificial
  Chemically synthesized
gagccacaaggucuacaugagga

SEQ ID NO: 23365 - RNA, 23 nt, artificial
  Chemically synthesized
cuaaagagagaauguagauauug

SEQ ID NO: 23366 - RNA, 23 nt, artificial
  Chemically synthesized
aaaaucauugauugucagcuacu

SEQ ID NO: 23367 - RNA, 23 nt, artificial
  Chemically synthesized
aaaaaucauugauugucagcuac

SEQ ID NO: 23368 - RNA, 23 nt, artificial
  Chemically synthesized
uaaaaaucauugauugucagcua

SEQ ID NO: 23369 - RNA, 23 nt, artificial
  Chemically synthesized
guguauuuccagugcaauuguag

SEQ ID NO: 23370 - RNA, 23 nt, artificial
  Chemically synthesized
uguguauuuccagugcaauugua

SEQ ID NO: 23371 - RNA, 23 nt, artificial
  Chemically synthesized
uuuugaaugcuuccugacaauca

SEQ ID NO: 23372 - RNA, 23 nt, artificial
  Chemically synthesized
auuuugaaugcuuccugacaauc

SEQ ID NO: 23373 - RNA, 23 nt, artificial
  Chemically synthesized
aauaugacggaagaacauagaac

SEQ ID NO: 23374 - RNA, 23 nt, artificial
  Chemically synthesized
gcuuauauaagcucuaagagaag

SEQ ID NO: 23375 - RNA, 23 nt, artificial
  Chemically synthesized
ggcuuauauaagcucuaagagaa

SEQ ID NO: 23376 - RNA, 23 nt, artificial
  Chemically synthesized
ggaagaugaugagcuacugcacu

SEQ ID NO: 23377 - RNA, 23 nt, artificial
  Chemically synthesized
gggaagaugaugagcuacugcac

SEQ ID NO: 23378 - RNA, 23 nt, artificial
  Chemically synthesized
ggggaagaugaugagcuacugca

SEQ ID NO: 23379 - RNA, 23 nt, artificial
  Chemically synthesized
aggggaagaugaugagcuacugc

SEQ ID NO: 23380 - RNA, 23 nt, artificial
  Chemically synthesized
gaggggaagaugaugagcuacug

SEQ ID NO: 23381 - RNA, 23 nt, artificial
  Chemically synthesized
acagcauguguauuuccagugca

SEQ ID NO: 23382 - RNA, 23 nt, artificial
  Chemically synthesized
cacagcauguguauuuccagugc

SEQ ID NO: 23383 - RNA, 23 nt, artificial
  Chemically synthesized
acacagcauguguauuuccagug

SEQ ID NO: 23384 - RNA, 23 nt, artificial
  Chemically synthesized
aacacagcauguguauuuccagu

SEQ ID NO: 23385 - RNA, 23 nt, artificial
  Chemically synthesized
agugagggucuucuuacaugcau

SEQ ID NO: 23386 - RNA, 23 nt, artificial
  Chemically synthesized
aaaugucuguagcuccucaacuc

SEQ ID NO: 23387 - RNA, 23 nt, artificial
  Chemically synthesized
aaaaugucuguagcuccucaacu

SEQ ID NO: 23388 - RNA, 23 nt, artificial
  Chemically synthesized
caaaaugucuguagcuccucaac

SEQ ID NO: 23389 - RNA, 23 nt, artificial
  Chemically synthesized
ucaaaaugucuguagcuccucaa

SEQ ID NO: 23390 - RNA, 23 nt, artificial
  Chemically synthesized
uucaaaaugucuguagcuccuca

SEQ ID NO: 23391 - RNA, 23 nt, artificial
  Chemically synthesized
gaaaauauggguugcauuugguc

SEQ ID NO: 23392 - RNA, 23 nt, artificial
  Chemically synthesized
auuugaggucaaguaagaagaca

SEQ ID NO: 23393 - RNA, 23 nt, artificial
  Chemically synthesized
aggcagauugaaaaggacaccuu

SEQ ID NO: 23394 - RNA, 23 nt, artificial
  Chemically synthesized
uaggcagauugaaaaggacaccu

SEQ ID NO: 23395 - RNA, 23 nt, artificial
  Chemically synthesized
uuaggcagauugaaaaggacacc

SEQ ID NO: 23396 - RNA, 23 nt, artificial
  Chemically synthesized
uuuaggcagauugaaaaggacac

SEQ ID NO: 23397 - RNA, 23 nt, artificial
  Chemically synthesized
auuuaggcagauugaaaaggaca

SEQ ID NO: 23398 - RNA, 23 nt, artificial
  Chemically synthesized
agugccugagaguauuuaggcag

SEQ ID NO: 23399 - RNA, 23 nt, artificial
  Chemically synthesized
uagugccugagaguauuuaggca

SEQ ID NO: 23400 - RNA, 23 nt, artificial
  Chemically synthesized
cuucacuucuaaaugcauauccu

SEQ ID NO: 23401 - RNA, 23 nt, artificial
  Chemically synthesized
ucuucacuucuaaaugcauaucc

SEQ ID NO: 23402 - RNA, 23 nt, artificial
  Chemically synthesized
aucuucacuucuaaaugcauauc

SEQ ID NO: 23403 - RNA, 23 nt, artificial
  Chemically synthesized
caucuucacuucuaaaugcauau

SEQ ID NO: 23404 - RNA, 23 nt, artificial
  Chemically synthesized
gcaucuucacuucuaaaugcaua

SEQ ID NO: 23405 - RNA, 23 nt, artificial
  Chemically synthesized
ugauguuuuucaugguucugguu

SEQ ID NO: 23406 - RNA, 23 nt, artificial
  Chemically synthesized
gugauguuuuucaugguucuggu

SEQ ID NO: 23407 - RNA, 23 nt, artificial
  Chemically synthesized
ugugauguuuuucaugguucugg

SEQ ID NO: 23408 - RNA, 23 nt, artificial
  Chemically synthesized
uugugauguuuuucaugguucug

SEQ ID NO: 23409 - RNA, 23 nt, artificial
  Chemically synthesized
cuugugauguuuuucaugguucu

SEQ ID NO: 23410 - RNA, 23 nt, artificial
  Chemically synthesized
gaagcacuuugggauucuuucca

SEQ ID NO: 23411 - RNA, 23 nt, artificial
  Chemically synthesized
agaagcacuuugggauucuuucc

SEQ ID NO: 23412 - RNA, 23 nt, artificial
  Chemically synthesized
gagaagcacuuugggauucuuuc

SEQ ID NO: 23413 - RNA, 23 nt, artificial
  Chemically synthesized
agagaagcacuuugggauucuuu

SEQ ID NO: 23414 - RNA, 23 nt, artificial
  Chemically synthesized
aagagaagcacuuugggauucuu

SEQ ID NO: 23415 - RNA, 23 nt, artificial
  Chemically synthesized
uugugaccugaggauuuaaggga

SEQ ID NO: 23416 - RNA, 23 nt, artificial
  Chemically synthesized
uauuaggaaaauauggguugcau

SEQ ID NO: 23417 - RNA, 23 nt, artificial
  Chemically synthesized
caugaggaacucuaaguaucccc

SEQ ID NO: 23418 - RNA, 23 nt, artificial
  Chemically synthesized
acaugaggaacucuaaguauccc

SEQ ID NO: 23419 - RNA, 23 nt, artificial
  Chemically synthesized
uacaugaggaacucuaaguaucc

SEQ ID NO: 23420 - RNA, 23 nt, artificial
  Chemically synthesized
cuacaugaggaacucuaaguauc

SEQ ID NO: 23421 - RNA, 23 nt, artificial
  Chemically synthesized
gacugucuuucagauacaugguu

SEQ ID NO: 23422 - RNA, 23 nt, artificial
  Chemically synthesized
accuaauguuuaugagccagaca

SEQ ID NO: 23423 - RNA, 23 nt, artificial
  Chemically synthesized
caccuaauguuuaugagccagac

SEQ ID NO: 23424 - RNA, 23 nt, artificial
  Chemically synthesized
ucaccuaauguuuaugagccaga

SEQ ID NO: 23425 - RNA, 23 nt, artificial
  Chemically synthesized
cucaccuaauguuuaugagccag

SEQ ID NO: 23426 - RNA, 23 nt, artificial
  Chemically synthesized
acucaccuaauguuuaugagcca

SEQ ID NO: 23427 - RNA, 23 nt, artificial
  Chemically synthesized
ugaggucaaguaagaagacauga

SEQ ID NO: 23428 - RNA, 23 nt, artificial
  Chemically synthesized
uugaggucaaguaagaagacaug

SEQ ID NO: 23429 - RNA, 23 nt, artificial
  Chemically synthesized
uuugaggucaaguaagaagacau

SEQ ID NO: 23430 - RNA, 23 nt, artificial
  Chemically synthesized
caggcaccgagaauguuguauuc

SEQ ID NO: 23431 - RNA, 23 nt, artificial
  Chemically synthesized
acaggcaccgagaauguuguauu

SEQ ID NO: 23432 - RNA, 23 nt, artificial
  Chemically synthesized
uacaggcaccgagaauguuguau

SEQ ID NO: 23433 - RNA, 23 nt, artificial
  Chemically synthesized
uuacaggcaccgagaauguugua

SEQ ID NO: 23434 - RNA, 23 nt, artificial
  Chemically synthesized
guuacaggcaccgagaauguugu

SEQ ID NO: 23435 - RNA, 23 nt, artificial
  Chemically synthesized
aauauggguugcauuuggucaag

SEQ ID NO: 23436 - RNA, 23 nt, artificial
  Chemically synthesized
aaauauggguugcauuuggucaa

SEQ ID NO: 23437 - RNA, 23 nt, artificial
  Chemically synthesized
aggcaccgagaauguuguauuca

SEQ ID NO: 23438 - RNA, 23 nt, artificial
  Chemically synthesized
uaagaaggguggccuugugauca

SEQ ID NO: 23439 - RNA, 23 nt, artificial
  Chemically synthesized
auaagaaggguggccuugugauc

SEQ ID NO: 23440 - RNA, 23 nt, artificial
  Chemically synthesized
uauaagaaggguggccuugugau

SEQ ID NO: 23441 - RNA, 23 nt, artificial
  Chemically synthesized
ggucaauuuugaggaaucucaga

SEQ ID NO: 23442 - RNA, 23 nt, artificial
  Chemically synthesized
uggucaauuuugaggaaucucag

SEQ ID NO: 23443 - RNA, 23 nt, artificial
  Chemically synthesized
cuggucaauuuugaggaaucuca

SEQ ID NO: 23444 - RNA, 23 nt, artificial
  Chemically synthesized
ccuaacacagcauguguauuucc

SEQ ID NO: 23445 - RNA, 23 nt, artificial
  Chemically synthesized
uccuaacacagcauguguauuuc

SEQ ID NO: 23446 - RNA, 23 nt, artificial
  Chemically synthesized
uuccuaacacagcauguguauuu

SEQ ID NO: 23447 - RNA, 23 nt, artificial
  Chemically synthesized
auuccuaacacagcauguguauu

SEQ ID NO: 23448 - RNA, 23 nt, artificial
  Chemically synthesized
cauuccuaacacagcauguguau

SEQ ID NO: 23449 - RNA, 23 nt, artificial
  Chemically synthesized
guucaaaaugucuguagcuccuc

SEQ ID NO: 23450 - RNA, 23 nt, artificial
  Chemically synthesized
gguucaaaaugucuguagcuccu

SEQ ID NO: 23451 - RNA, 23 nt, artificial
  Chemically synthesized
ccccugaaaaaaaggagcugagg

SEQ ID NO: 23452 - RNA, 23 nt, artificial
  Chemically synthesized
cccccugaaaaaaaggagcugag

SEQ ID NO: 23453 - RNA, 23 nt, artificial
  Chemically synthesized
acccccugaaaaaaaggagcuga

SEQ ID NO: 23454 - RNA, 23 nt, artificial
  Chemically synthesized
uauguagaugugcauuuuuguga

SEQ ID NO: 23455 - RNA, 23 nt, artificial
  Chemically synthesized
uuauguagaugugcauuuuugug

SEQ ID NO: 23456 - RNA, 23 nt, artificial
  Chemically synthesized
uuuauguagaugugcauuuuugu

SEQ ID NO: 23457 - RNA, 23 nt, artificial
  Chemically synthesized
gcagaacuccgagagucuaccag

SEQ ID NO: 23458 - RNA, 23 nt, artificial
  Chemically synthesized
ggcagaacuccgagagucuacca

SEQ ID NO: 23459 - RNA, 23 nt, artificial
  Chemically synthesized
uggcagaacuccgagagucuacc

SEQ ID NO: 23460 - RNA, 23 nt, artificial
  Chemically synthesized
cuggcagaacuccgagagucuac

SEQ ID NO: 23461 - RNA, 23 nt, artificial
  Chemically synthesized
gcuggcagaacuccgagagucua

SEQ ID NO: 23462 - RNA, 23 nt, artificial
  Chemically synthesized
guaugacuaaagagagaauguag

SEQ ID NO: 23463 - RNA, 23 nt, artificial
  Chemically synthesized
uaauaagcuaaagaggcugaaag

SEQ ID NO: 23464 - RNA, 23 nt, artificial
  Chemically synthesized
auaauaagcuaaagaggcugaaa

SEQ ID NO: 23465 - RNA, 23 nt, artificial
  Chemically synthesized
acaaucaacucuaauagugcuua

SEQ ID NO: 23466 - RNA, 23 nt, artificial
  Chemically synthesized
gacaaucaacucuaauagugcuu

SEQ ID NO: 23467 - RNA, 23 nt, artificial
  Chemically synthesized
ugacaaucaacucuaauagugcu

SEQ ID NO: 23468 - RNA, 23 nt, artificial
  Chemically synthesized
caaauggaggaauaugacggaag

SEQ ID NO: 23469 - RNA, 23 nt, artificial
  Chemically synthesized
acaaauggaggaauaugacggaa

SEQ ID NO: 23470 - RNA, 23 nt, artificial
  Chemically synthesized
caaugaaacugggcuguacuuug

SEQ ID NO: 23471 - RNA, 23 nt, artificial
  Chemically synthesized
ucaaugaaacugggcuguacuuu

SEQ ID NO: 23472 - RNA, 23 nt, artificial
  Chemically synthesized
aucaaugaaacugggcuguacuu

SEQ ID NO: 23473 - RNA, 23 nt, artificial
  Chemically synthesized
gaucaaugaaacugggcuguacu

SEQ ID NO: 23474 - RNA, 23 nt, artificial
  Chemically synthesized
ugaucaaugaaacugggcuguac

SEQ ID NO: 23475 - RNA, 23 nt, artificial
  Chemically synthesized
uguaugacuaaagagagaaugua

SEQ ID NO: 23476 - RNA, 23 nt, artificial
  Chemically synthesized
uguuuuucaugguucugguugcc

SEQ ID NO: 23477 - RNA, 23 nt, artificial
  Chemically synthesized
auguuuuucaugguucugguugc

SEQ ID NO: 23478 - RNA, 23 nt, artificial
  Chemically synthesized
gauguuuuucaugguucugguug

SEQ ID NO: 23479 - RNA, 23 nt, artificial
  Chemically synthesized
aguggaccuugagaccacagggu

SEQ ID NO: 23480 - RNA, 23 nt, artificial
  Chemically synthesized
aaguggaccuugagaccacaggg

SEQ ID NO: 23481 - RNA, 23 nt, artificial
  Chemically synthesized
caaguggaccuugagaccacagg

SEQ ID NO: 23482 - RNA, 23 nt, artificial
  Chemically synthesized
ccaaguggaccuugagaccacag

SEQ ID NO: 23483 - RNA, 23 nt, artificial
  Chemically synthesized
accaaguggaccuugagaccaca

SEQ ID NO: 23484 - RNA, 23 nt, artificial
  Chemically synthesized
cuccucaacucaccuaauguuua

SEQ ID NO: 23485 - RNA, 23 nt, artificial
  Chemically synthesized
gaaaaagcagcuaccagguguuc

SEQ ID NO: 23486 - RNA, 23 nt, artificial
  Chemically synthesized
ugaaaaagcagcuaccagguguu

SEQ ID NO: 23487 - RNA, 23 nt, artificial
  Chemically synthesized
augaaaaagcagcuaccaggugu

SEQ ID NO: 23488 - RNA, 23 nt, artificial
  Chemically synthesized
caugaaaaagcagcuaccaggug

SEQ ID NO: 23489 - RNA, 23 nt, artificial
  Chemically synthesized
gcaugaaaaagcagcuaccaggu

SEQ ID NO: 23490 - RNA, 23 nt, artificial
  Chemically synthesized
ccucuacaggacugagaagaagu

SEQ ID NO: 23491 - RNA, 23 nt, artificial
  Chemically synthesized
aaugucuguagcuccucaacuca

SEQ ID NO: 23492 - RNA, 23 nt, artificial
  Chemically synthesized
ccuaauguuuaugagccagacaa

SEQ ID NO: 23493 - RNA, 23 nt, artificial
  Chemically synthesized
caacguaucugagcucucucugg

SEQ ID NO: 23494 - RNA, 23 nt, artificial
  Chemically synthesized
ucaacguaucugagcucucucug

SEQ ID NO: 23495 - RNA, 23 nt, artificial
  Chemically synthesized
gucaacguaucugagcucucucu

SEQ ID NO: 23496 - RNA, 23 nt, artificial
  Chemically synthesized
ugucaacguaucugagcucucuc

SEQ ID NO: 23497 - RNA, 23 nt, artificial
  Chemically synthesized
augucaacguaucugagcucucu

SEQ ID NO: 23498 - RNA, 23 nt, artificial
  Chemically synthesized
uuguuacaggcaccgagaauguu

SEQ ID NO: 23499 - RNA, 23 nt, artificial
  Chemically synthesized
uuuguuacaggcaccgagaaugu

SEQ ID NO: 23500 - RNA, 23 nt, artificial
  Chemically synthesized
cuuuguuacaggcaccgagaaug

SEQ ID NO: 23501 - RNA, 23 nt, artificial
  Chemically synthesized
ucuuuguuacaggcaccgagaau

SEQ ID NO: 23502 - RNA, 23 nt, artificial
  Chemically synthesized
uucuuuguuacaggcaccgagaa

SEQ ID NO: 23503 - RNA, 23 nt, artificial
  Chemically synthesized
guucuacacucaucuuagugccu

SEQ ID NO: 23504 - RNA, 23 nt, artificial
  Chemically synthesized
uguucuacacucaucuuagugcc

SEQ ID NO: 23505 - RNA, 23 nt, artificial
  Chemically synthesized
guguucuacacucaucuuagugc

SEQ ID NO: 23506 - RNA, 23 nt, artificial
  Chemically synthesized
gguguucuacacucaucuuagug

SEQ ID NO: 23507 - RNA, 23 nt, artificial
  Chemically synthesized
agguguucuacacucaucuuagu

SEQ ID NO: 23508 - RNA, 23 nt, artificial
  Chemically synthesized
gaagaaguaaaaccguuugcugg

SEQ ID NO: 23509 - RNA, 23 nt, artificial
  Chemically synthesized
cucaucuuagugccugagaguau

SEQ ID NO: 23510 - RNA, 23 nt, artificial
  Chemically synthesized
acucaucuuagugccugagagua

SEQ ID NO: 23511 - RNA, 23 nt, artificial
  Chemically synthesized
ugcauuuggucaagauuuugaau

SEQ ID NO: 23512 - RNA, 23 nt, artificial
  Chemically synthesized
uugcauuuggucaagauuuugaa

SEQ ID NO: 23513 - RNA, 23 nt, artificial
  Chemically synthesized
guugcauuuggucaagauuuuga

SEQ ID NO: 23514 - RNA, 23 nt, artificial
  Chemically synthesized
agguguuucccuuagcuauggaa

SEQ ID NO: 23515 - RNA, 23 nt, artificial
  Chemically synthesized
gagguguuucccuuagcuaugga

SEQ ID NO: 23516 - RNA, 23 nt, artificial
  Chemically synthesized
ggauucuuuccauuaugauucuu

SEQ ID NO: 23517 - RNA, 23 nt, artificial
  Chemically synthesized
auauugugaaguacauauuagga

SEQ ID NO: 23518 - RNA, 23 nt, artificial
  Chemically synthesized
acuuugggauucuuuccauuaug

SEQ ID NO: 23519 - RNA, 23 nt, artificial
  Chemically synthesized
cacuuugggauucuuuccauuau

SEQ ID NO: 23520 - RNA, 23 nt, artificial
  Chemically synthesized
gcacuuugggauucuuuccauua

SEQ ID NO: 23521 - RNA, 23 nt, artificial
  Chemically synthesized
agcacuuugggauucuuuccauu

SEQ ID NO: 23522 - RNA, 23 nt, artificial
  Chemically synthesized
agcucucucuggucaauuuugag

SEQ ID NO: 23523 - RNA, 23 nt, artificial
  Chemically synthesized
gagcucucucuggucaauuuuga

SEQ ID NO: 23524 - RNA, 23 nt, artificial
  Chemically synthesized
ugagcucucucuggucaauuuug

SEQ ID NO: 23525 - RNA, 23 nt, artificial
  Chemically synthesized
ugggcuguacuuuguauauucca

SEQ ID NO: 23526 - RNA, 23 nt, artificial
  Chemically synthesized
cucucucuggucaauuuugagga

SEQ ID NO: 23527 - RNA, 23 nt, artificial
  Chemically synthesized
gcucucucuggucaauuuugagg

SEQ ID NO: 23528 - RNA, 23 nt, artificial
  Chemically synthesized
gcugaucauuuauaugucaacgu

SEQ ID NO: 23529 - RNA, 23 nt, artificial
  Chemically synthesized
ugcugaucauuuauaugucaacg

SEQ ID NO: 23530 - RNA, 23 nt, artificial
  Chemically synthesized
gugcugaucauuuauaugucaac

SEQ ID NO: 23531 - RNA, 23 nt, artificial
  Chemically synthesized
agugcugaucauuuauaugucaa

SEQ ID NO: 23532 - RNA, 23 nt, artificial
  Chemically synthesized
aagagagggaaccacagcacagg

SEQ ID NO: 23533 - RNA, 23 nt, artificial
  Chemically synthesized
gaagagagggaaccacagcacag

SEQ ID NO: 23534 - RNA, 23 nt, artificial
  Chemically synthesized
gucuccuugugauguuuuucaug

SEQ ID NO: 23535 - RNA, 23 nt, artificial
  Chemically synthesized
ugucuccuugugauguuuuucau

SEQ ID NO: 23536 - RNA, 23 nt, artificial
  Chemically synthesized
gugucuccuugugauguuuuuca

SEQ ID NO: 23537 - RNA, 23 nt, artificial
  Chemically synthesized
ugugucuccuugugauguuuuuc

SEQ ID NO: 23538 - RNA, 23 nt, artificial
  Chemically synthesized
cugugucuccuugugauguuuuu

SEQ ID NO: 23539 - RNA, 23 nt, artificial
  Chemically synthesized
ugaaacugggcuguacuuuguau

SEQ ID NO: 23540 - RNA, 23 nt, artificial
  Chemically synthesized
ccucuggaaugggaagacaccua

SEQ ID NO: 23541 - RNA, 23 nt, artificial
  Chemically synthesized
uggagugaaguauaagaagggug

SEQ ID NO: 23542 - RNA, 23 nt, artificial
  Chemically synthesized
aagaagacaugaaccaaguggac

SEQ ID NO: 23543 - RNA, 23 nt, artificial
  Chemically synthesized
uaagaagacaugaaccaagugga

SEQ ID NO: 23544 - RNA, 23 nt, artificial
  Chemically synthesized
ggcuguacuuuguauauuccaaa

SEQ ID NO: 23545 - RNA, 23 nt, artificial
  Chemically synthesized
gggcuguacuuuguauauuccaa

SEQ ID NO: 23546 - RNA, 23 nt, artificial
  Chemically synthesized
augaaacugggcuguacuuugua

SEQ ID NO: 23547 - RNA, 23 nt, artificial
  Chemically synthesized
ugauucuuuguuacaggcaccga

SEQ ID NO: 23548 - RNA, 23 nt, artificial
  Chemically synthesized
augauucuuuguuacaggcaccg

SEQ ID NO: 23549 - RNA, 23 nt, artificial
  Chemically synthesized
uaugauucuuuguuacaggcacc

SEQ ID NO: 23550 - RNA, 23 nt, artificial
  Chemically synthesized
uuaugauucuuuguuacaggcac

SEQ ID NO: 23551 - RNA, 23 nt, artificial
  Chemically synthesized
auuaugauucuuuguuacaggca

SEQ ID NO: 23552 - RNA, 23 nt, artificial
  Chemically synthesized
gaaacucuauaagagagauccag

SEQ ID NO: 23553 - RNA, 23 nt, artificial
  Chemically synthesized
ggaaacucuauaagagagaucca

SEQ ID NO: 23554 - RNA, 23 nt, artificial
  Chemically synthesized
uggaaacucuauaagagagaucc

SEQ ID NO: 23555 - RNA, 23 nt, artificial
  Chemically synthesized
auggaaacucuauaagagagauc

SEQ ID NO: 23556 - RNA, 23 nt, artificial
  Chemically synthesized
uauggaaacucuauaagagagau

SEQ ID NO: 23557 - RNA, 23 nt, artificial
  Chemically synthesized
guuucagcucuuccaccuacaga

SEQ ID NO: 23558 - RNA, 23 nt, artificial
  Chemically synthesized
uguuucagcucuuccaccuacag

SEQ ID NO: 23559 - RNA, 23 nt, artificial
  Chemically synthesized
auguuucagcucuuccaccuaca

SEQ ID NO: 23560 - RNA, 23 nt, artificial
  Chemically synthesized
gauguuucagcucuuccaccuac

SEQ ID NO: 23561 - RNA, 23 nt, artificial
  Chemically synthesized
ggguucaaaaugucuguagcucc

SEQ ID NO: 23562 - RNA, 23 nt, artificial
  Chemically synthesized
aggguucaaaaugucuguagcuc

SEQ ID NO: 23563 - RNA, 23 nt, artificial
  Chemically synthesized
uuucccuuagcuauggaaacucu

SEQ ID NO: 23564 - RNA, 23 nt, artificial
  Chemically synthesized
gcauaauaagcuaaagaggcuga

SEQ ID NO: 23565 - RNA, 23 nt, artificial
  Chemically synthesized
ugcauaauaagcuaaagaggcug

SEQ ID NO: 23566 - RNA, 23 nt, artificial
  Chemically synthesized
uugcauaauaagcuaaagaggcu

SEQ ID NO: 23567 - RNA, 23 nt, artificial
  Chemically synthesized
cuugcauaauaagcuaaagaggc

SEQ ID NO: 23568 - RNA, 23 nt, artificial
  Chemically synthesized
uccuugugauguuuuucaugguu

SEQ ID NO: 23569 - RNA, 23 nt, artificial
  Chemically synthesized
cuccuugugauguuuuucauggu

SEQ ID NO: 23570 - RNA, 23 nt, artificial
  Chemically synthesized
ucuccuugugauguuuuucaugg

SEQ ID NO: 23571 - RNA, 23 nt, artificial
  Chemically synthesized
gaggcugaaagaggccaaugccc

SEQ ID NO: 23572 - RNA, 23 nt, artificial
  Chemically synthesized
agucuaccagccagaugcacaca

SEQ ID NO: 23573 - RNA, 23 nt, artificial
  Chemically synthesized
gagucuaccagccagaugcacac

SEQ ID NO: 23574 - RNA, 23 nt, artificial
  Chemically synthesized
agagucuaccagccagaugcaca

SEQ ID NO: 23575 - RNA, 23 nt, artificial
  Chemically synthesized
gagagucuaccagccagaugcac

SEQ ID NO: 23576 - RNA, 23 nt, artificial
  Chemically synthesized
cgagagucuaccagccagaugca

SEQ ID NO: 23577 - RNA, 23 nt, artificial
  Chemically synthesized
caguguucaaucuuaccagugcu

SEQ ID NO: 23578 - RNA, 23 nt, artificial
  Chemically synthesized
gcaguguucaaucuuaccagugc

SEQ ID NO: 23579 - RNA, 23 nt, artificial
  Chemically synthesized
ggcaguguucaaucuuaccagug

SEQ ID NO: 23580 - RNA, 23 nt, artificial
  Chemically synthesized
uaagagaagcacuuugggauucu

SEQ ID NO: 23581 - RNA, 23 nt, artificial
  Chemically synthesized
cuaagagaagcacuuugggauuc

SEQ ID NO: 23582 - RNA, 23 nt, artificial
  Chemically synthesized
ucuaagagaagcacuuugggauu

SEQ ID NO: 23583 - RNA, 23 nt, artificial
  Chemically synthesized
ggucuucuuacaugcauuugagg

SEQ ID NO: 23584 - RNA, 23 nt, artificial
  Chemically synthesized
cuguacuuuguauauuccaaagu

SEQ ID NO: 23585 - RNA, 23 nt, artificial
  Chemically synthesized
gcuguacuuuguauauuccaaag

SEQ ID NO: 23586 - RNA, 23 nt, artificial
  Chemically synthesized
ugaaccaaguggaccuugagacc

SEQ ID NO: 23587 - RNA, 23 nt, artificial
  Chemically synthesized
augaaccaaguggaccuugagac

SEQ ID NO: 23588 - RNA, 23 nt, artificial
  Chemically synthesized
caugaaccaaguggaccuugaga

SEQ ID NO: 23589 - RNA, 23 nt, artificial
  Chemically synthesized
acaugaaccaaguggaccuugag

SEQ ID NO: 23590 - RNA, 23 nt, artificial
  Chemically synthesized
gacaugaaccaaguggaccuuga

SEQ ID NO: 23591 - RNA, 23 nt, artificial
  Chemically synthesized
ggaggggaagaugaugagcuacu

SEQ ID NO: 23592 - RNA, 23 nt, artificial
  Chemically synthesized
auggaaaaggaagacuagaggcu

SEQ ID NO: 23593 - RNA, 23 nt, artificial
  Chemically synthesized
agcaugaaaaagcagcuaccagg

SEQ ID NO: 23594 - RNA, 23 nt, artificial
  Chemically synthesized
aagcaugaaaaagcagcuaccag

SEQ ID NO: 23595 - RNA, 23 nt, artificial
  Chemically synthesized
gaagcaugaaaaagcagcuacca

SEQ ID NO: 23596 - RNA, 23 nt, artificial
  Chemically synthesized
agaagcaugaaaaagcagcuacc

SEQ ID NO: 23597 - RNA, 23 nt, artificial
  Chemically synthesized
uuuuucggcuuauauaagcucua

SEQ ID NO: 23598 - RNA, 23 nt, artificial
  Chemically synthesized
ggaaaaggaagacuagaggcuug

SEQ ID NO: 23599 - RNA, 23 nt, artificial
  Chemically synthesized
uggaaaaggaagacuagaggcuu

SEQ ID NO: 23600 - RNA, 23 nt, artificial
  Chemically synthesized
augcagcagcccuucaauuaccc

SEQ ID NO: 23601 - RNA, 23 nt, artificial
  Chemically synthesized
caaggucuacaugaggaacucua

SEQ ID NO: 23602 - RNA, 23 nt, artificial
  Chemically synthesized
acuucuaaaugcauauccugagc

SEQ ID NO: 23603 - RNA, 23 nt, artificial
  Chemically synthesized
cacuucuaaaugcauauccugag

SEQ ID NO: 23604 - RNA, 23 nt, artificial
  Chemically synthesized
ucacuucuaaaugcauauccuga

SEQ ID NO: 23605 - RNA, 23 nt, artificial
  Chemically synthesized
uucacuucuaaaugcauauccug

SEQ ID NO: 23606 - RNA, 23 nt, artificial
  Chemically synthesized
uguuacaggcaccgagaauguug

SEQ ID NO: 23607 - RNA, 23 nt, artificial
  Chemically synthesized
cuucuuacaugcauuugagguca

SEQ ID NO: 23608 - RNA, 23 nt, artificial
  Chemically synthesized
ucuucuuacaugcauuugagguc

SEQ ID NO: 23609 - RNA, 23 nt, artificial
  Chemically synthesized
gucuucuuacaugcauuugaggu

SEQ ID NO: 23610 - RNA, 23 nt, artificial
  Chemically synthesized
gagaagcaugaaaaagcagcuac

SEQ ID NO: 23611 - RNA, 23 nt, artificial
  Chemically synthesized
aguguucaaucuuaccagugcug

SEQ ID NO: 23612 - RNA, 23 nt, artificial
  Chemically synthesized
auucuuuguuacaggcaccgaga

SEQ ID NO: 23613 - RNA, 23 nt, artificial
  Chemically synthesized
gauucuuuguuacaggcaccgag

SEQ ID NO: 23614 - RNA, 23 nt, artificial
  Chemically synthesized
uuacaugcauuugaggucaagua

SEQ ID NO: 23615 - RNA, 23 nt, artificial
  Chemically synthesized
cuuacaugcauuugaggucaagu

SEQ ID NO: 23616 - RNA, 23 nt, artificial
  Chemically synthesized
ucuuacaugcauuugaggucaag

SEQ ID NO: 23617 - RNA, 23 nt, artificial
  Chemically synthesized
uucuuacaugcauuugaggucaa

SEQ ID NO: 23618 - RNA, 23 nt, artificial
  Chemically synthesized
gccucuggaaugggaagacaccu

SEQ ID NO: 23619 - RNA, 23 nt, artificial
  Chemically synthesized
ugccucuggaaugggaagacacc

SEQ ID NO: 23620 - RNA, 23 nt, artificial
  Chemically synthesized
augccucuggaaugggaagacac

SEQ ID NO: 23621 - RNA, 23 nt, artificial
  Chemically synthesized
aaguccaacucaagguccaugcc

SEQ ID NO: 23622 - RNA, 23 nt, artificial
  Chemically synthesized
caaguccaacucaagguccaugc

SEQ ID NO: 23623 - RNA, 23 nt, artificial
  Chemically synthesized
gcaaguccaacucaagguccaug

SEQ ID NO: 23624 - RNA, 23 nt, artificial
  Chemically synthesized
ggcaaguccaacucaagguccau

SEQ ID NO: 23625 - RNA, 23 nt, artificial
  Chemically synthesized
aggcaaguccaacucaaggucca

SEQ ID NO: 23626 - RNA, 23 nt, artificial
  Chemically synthesized
uucaugguucugguugccuuggu

SEQ ID NO: 23627 - RNA, 23 nt, artificial
  Chemically synthesized
uuucaugguucugguugccuugg

SEQ ID NO: 23628 - RNA, 23 nt, artificial
  Chemically synthesized
uuuucaugguucugguugccuug

SEQ ID NO: 23629 - RNA, 23 nt, artificial
  Chemically synthesized
uuuuucaugguucugguugccuu

SEQ ID NO: 23630 - RNA, 23 nt, artificial
  Chemically synthesized
aaaugcauauccugagccaucgg

SEQ ID NO: 23631 - RNA, 23 nt, artificial
  Chemically synthesized
uaaaugcauauccugagccaucg

SEQ ID NO: 23632 - RNA, 23 nt, artificial
  Chemically synthesized
cuaaaugcauauccugagccauc

SEQ ID NO: 23633 - RNA, 23 nt, artificial
  Chemically synthesized
ucuaaaugcauauccugagccau

SEQ ID NO: 23634 - RNA, 23 nt, artificial
  Chemically synthesized
uucuaaaugcauauccugagcca

SEQ ID NO: 23635 - RNA, 23 nt, artificial
  Chemically synthesized
uauuuaggcagauugaaaaggac

SEQ ID NO: 23636 - RNA, 23 nt, artificial
  Chemically synthesized
cuauaagagagauccagcuugcc

SEQ ID NO: 23637 - RNA, 23 nt, artificial
  Chemically synthesized
ucuauaagagagauccagcuugc

SEQ ID NO: 23638 - RNA, 23 nt, artificial
  Chemically synthesized
cucuauaagagagauccagcuug

SEQ ID NO: 23639 - RNA, 23 nt, artificial
  Chemically synthesized
acucuauaagagagauccagcuu

SEQ ID NO: 23640 - RNA, 23 nt, artificial
  Chemically synthesized
aacucuauaagagagauccagcu

SEQ ID NO: 23641 - RNA, 23 nt, artificial
  Chemically synthesized
agcuaccagguguucuacacuca

SEQ ID NO: 23642 - RNA, 23 nt, artificial
  Chemically synthesized
gaccacaggguucaaaaugucug

SEQ ID NO: 23643 - RNA, 23 nt, artificial
  Chemically synthesized
cucuaagagaagcacuuugggau

SEQ ID NO: 23644 - RNA, 23 nt, artificial
  Chemically synthesized
gucagcuacuaaugauguuuucc

SEQ ID NO: 23645 - RNA, 23 nt, artificial
  Chemically synthesized
ugucagcuacuaaugauguuuuc

SEQ ID NO: 23646 - RNA, 23 nt, artificial
  Chemically synthesized
uugucagcuacuaaugauguuuu

SEQ ID NO: 23647 - RNA, 23 nt, artificial
  Chemically synthesized
auugucagcuacuaaugauguuu

SEQ ID NO: 23648 - RNA, 23 nt, artificial
  Chemically synthesized
uaagcaagagagauguuuugggg

SEQ ID NO: 23649 - RNA, 23 nt, artificial
  Chemically synthesized
auaagcaagagagauguuuuggg

SEQ ID NO: 23650 - RNA, 23 nt, artificial
  Chemically synthesized
gauaagcaagagagauguuuugg

SEQ ID NO: 23651 - RNA, 23 nt, artificial
  Chemically synthesized
agauaagcaagagagauguuuug

SEQ ID NO: 23652 - RNA, 23 nt, artificial
  Chemically synthesized
cagauaagcaagagagauguuuu

SEQ ID NO: 23653 - RNA, 23 nt, artificial
  Chemically synthesized
ucuuaccagugcugaucauuuau

SEQ ID NO: 23654 - RNA, 23 nt, artificial
  Chemically synthesized
aucuuaccagugcugaucauuua

SEQ ID NO: 23655 - RNA, 23 nt, artificial
  Chemically synthesized
aaugaaacugggcuguacuuugu

SEQ ID NO: 23656 - RNA, 23 nt, artificial
  Chemically synthesized
ugguugccuugguaggauugggc

SEQ ID NO: 23657 - RNA, 23 nt, artificial
  Chemically synthesized
cugguugccuugguaggauuggg

SEQ ID NO: 23658 - RNA, 23 nt, artificial
  Chemically synthesized
ucugguugccuugguaggauugg

SEQ ID NO: 23659 - RNA, 23 nt, artificial
  Chemically synthesized
uucugguugccuugguaggauug

SEQ ID NO: 23660 - RNA, 23 nt, artificial
  Chemically synthesized
guucugguugccuugguaggauu

SEQ ID NO: 23661 - RNA, 23 nt, artificial
  Chemically synthesized
cuauggaauuguccugcuuucug

SEQ ID NO: 23662 - RNA, 23 nt, artificial
  Chemically synthesized
ccuauggaauuguccugcuuucu

SEQ ID NO: 23663 - RNA, 23 nt, artificial
  Chemically synthesized
accuauggaauuguccugcuuuc

SEQ ID NO: 23664 - RNA, 23 nt, artificial
  Chemically synthesized
caccuauggaauuguccugcuuu

SEQ ID NO: 23665 - RNA, 23 nt, artificial
  Chemically synthesized
acaccuauggaauuguccugcuu

SEQ ID NO: 23666 - RNA, 23 nt, artificial
  Chemically synthesized
gaggaaucucagacguuuuucgg

SEQ ID NO: 23667 - RNA, 23 nt, artificial
  Chemically synthesized
ugaggaaucucagacguuuuucg

SEQ ID NO: 23668 - RNA, 23 nt, artificial
  Chemically synthesized
uugaggaaucucagacguuuuuc

SEQ ID NO: 23669 - RNA, 23 nt, artificial
  Chemically synthesized
uuugaggaaucucagacguuuuu

SEQ ID NO: 23670 - RNA, 23 nt, artificial
  Chemically synthesized
uuuugaggaaucucagacguuuu

SEQ ID NO: 23671 - RNA, 23 nt, artificial
  Chemically synthesized
uauccugagccaucggugaaacu

SEQ ID NO: 23672 - RNA, 23 nt, artificial
  Chemically synthesized
auauccugagccaucggugaaac

SEQ ID NO: 23673 - RNA, 23 nt, artificial
  Chemically synthesized
cauauccugagccaucggugaaa

SEQ ID NO: 23674 - RNA, 23 nt, artificial
  Chemically synthesized
gcauauccugagccaucggugaa

SEQ ID NO: 23675 - RNA, 23 nt, artificial
  Chemically synthesized
ugcauauccugagccaucgguga

SEQ ID NO: 23676 - RNA, 23 nt, artificial
  Chemically synthesized
cuugacaccucagccucuacagg

SEQ ID NO: 23677 - RNA, 23 nt, artificial
  Chemically synthesized
ccuugacaccucagccucuacag

SEQ ID NO: 23678 - RNA, 23 nt, artificial
  Chemically synthesized
uccuugacaccucagccucuaca

SEQ ID NO: 23679 - RNA, 23 nt, artificial
  Chemically synthesized
guccuugacaccucagccucuac

SEQ ID NO: 23680 - RNA, 23 nt, artificial
  Chemically synthesized
cguccuugacaccucagccucua

SEQ ID NO: 23681 - RNA, 23 nt, artificial
  Chemically synthesized
cuuucagauacaugguugugacc

SEQ ID NO: 23682 - RNA, 23 nt, artificial
  Chemically synthesized
ucuuucagauacaugguugugac

SEQ ID NO: 23683 - RNA, 23 nt, artificial
  Chemically synthesized
gucuuucagauacaugguuguga

SEQ ID NO: 23684 - RNA, 23 nt, artificial
  Chemically synthesized
ugucuuucagauacaugguugug

SEQ ID NO: 23685 - RNA, 23 nt, artificial
  Chemically synthesized
cugucuuucagauacaugguugu

SEQ ID NO: 23686 - RNA, 23 nt, artificial
  Chemically synthesized
acagauaagcaagagagauguuu

SEQ ID NO: 23687 - RNA, 23 nt, artificial
  Chemically synthesized
ugcacacagcaucaucuuuggag

SEQ ID NO: 23688 - RNA, 23 nt, artificial
  Chemically synthesized
augcacacagcaucaucuuugga

SEQ ID NO: 23689 - RNA, 23 nt, artificial
  Chemically synthesized
gaugcacacagcaucaucuuugg

SEQ ID NO: 23690 - RNA, 23 nt, artificial
  Chemically synthesized
ggaucuggugaugauggagggga

SEQ ID NO: 23691 - RNA, 23 nt, artificial
  Chemically synthesized
gcucuaagagaagcacuuuggga

SEQ ID NO: 23692 - RNA, 23 nt, artificial
  Chemically synthesized
aaaaggagcugaggaaaguggcc

SEQ ID NO: 23693 - RNA, 23 nt, artificial
  Chemically synthesized
aaaaaggagcugaggaaaguggc

SEQ ID NO: 23694 - RNA, 23 nt, artificial
  Chemically synthesized
guauucagugagggucuucuuac

SEQ ID NO: 23695 - RNA, 23 nt, artificial
  Chemically synthesized
uguauucagugagggucuucuua

SEQ ID NO: 23696 - RNA, 23 nt, artificial
  Chemically synthesized
ggagugaaguauaagaagggugg

SEQ ID NO: 23697 - RNA, 23 nt, artificial
  Chemically synthesized
guauaagaaggguggccuuguga

SEQ ID NO: 23698 - RNA, 23 nt, artificial
  Chemically synthesized
aguauaagaaggguggccuugug

SEQ ID NO: 23699 - RNA, 23 nt, artificial
  Chemically synthesized
aaguauaagaaggguggccuugu

SEQ ID NO: 23700 - RNA, 23 nt, artificial
  Chemically synthesized
gaaguauaagaaggguggccuug

SEQ ID NO: 23701 - RNA, 23 nt, artificial
  Chemically synthesized
ugaaguauaagaaggguggccuu

SEQ ID NO: 23702 - RNA, 23 nt, artificial
  Chemically synthesized
uaacacagcauguguauuuccag

SEQ ID NO: 23703 - RNA, 23 nt, artificial
  Chemically synthesized
cuaacacagcauguguauuucca

SEQ ID NO: 23704 - RNA, 23 nt, artificial
  Chemically synthesized
uuucauuccuaacacagcaugug

SEQ ID NO: 23705 - RNA, 23 nt, artificial
  Chemically synthesized
auuucauuccuaacacagcaugu

SEQ ID NO: 23706 - RNA, 23 nt, artificial
  Chemically synthesized
cauuucauuccuaacacagcaug

SEQ ID NO: 23707 - RNA, 23 nt, artificial
  Chemically synthesized
cuguagcuccucaacucaccuaa

SEQ ID NO: 23708 - RNA, 23 nt, artificial
  Chemically synthesized
gaauguuguauucagugaggguc

SEQ ID NO: 23709 - RNA, 23 nt, artificial
  Chemically synthesized
agaauguuguauucagugagggu

SEQ ID NO: 23710 - RNA, 23 nt, artificial
  Chemically synthesized
gagaauguuguauucagugaggg

SEQ ID NO: 23711 - RNA, 23 nt, artificial
  Chemically synthesized
guguucaaucuuaccagugcuga

SEQ ID NO: 23712 - RNA, 23 nt, artificial
  Chemically synthesized
aguccaacucaagguccaugccu

SEQ ID NO: 23713 - RNA, 23 nt, artificial
  Chemically synthesized
gaaccaaguggaccuugagacca

SEQ ID NO: 23714 - RNA, 23 nt, artificial
  Chemically synthesized
aaccaaguggaccuugagaccac

SEQ ID NO: 23715 - RNA, 23 nt, artificial
  Chemically synthesized
aaucuuaccagugcugaucauuu

SEQ ID NO: 23716 - RNA, 23 nt, artificial
  Chemically synthesized
cauuaugauucuuuguuacaggc

SEQ ID NO: 23717 - RNA, 23 nt, artificial
  Chemically synthesized
ccauuaugauucuuuguuacagg

SEQ ID NO: 23718 - RNA, 23 nt, artificial
  Chemically synthesized
agguccaugccucuggaauggga

SEQ ID NO: 23719 - RNA, 23 nt, artificial
  Chemically synthesized
aagguccaugccucuggaauggg

SEQ ID NO: 23720 - RNA, 23 nt, artificial
  Chemically synthesized
caagguccaugccucuggaaugg

SEQ ID NO: 23721 - RNA, 23 nt, artificial
  Chemically synthesized
ucaagguccaugccucuggaaug

SEQ ID NO: 23722 - RNA, 23 nt, artificial
  Chemically synthesized
cucaagguccaugccucuggaau

SEQ ID NO: 23723 - RNA, 23 nt, artificial
  Chemically synthesized
ccuugugauguuuuucaugguuc

SEQ ID NO: 23724 - RNA, 23 nt, artificial
  Chemically synthesized
aagggggacugucuuucagauac

SEQ ID NO: 23725 - RNA, 23 nt, artificial
  Chemically synthesized
cagguguucuacacucaucuuag

SEQ ID NO: 23726 - RNA, 23 nt, artificial
  Chemically synthesized
aagacaugaaccaaguggaccuu

SEQ ID NO: 23727 - RNA, 23 nt, artificial
  Chemically synthesized
gaagacaugaaccaaguggaccu

SEQ ID NO: 23728 - RNA, 23 nt, artificial
  Chemically synthesized
agaagacaugaaccaaguggacc

SEQ ID NO: 23729 - RNA, 23 nt, artificial
  Chemically synthesized
uggagaagcaaauaggccacccc

SEQ ID NO: 23730 - RNA, 23 nt, artificial
  Chemically synthesized
uuggagaagcaaauaggccaccc

SEQ ID NO: 23731 - RNA, 23 nt, artificial
  Chemically synthesized
uuuggagaagcaaauaggccacc

SEQ ID NO: 23732 - RNA, 23 nt, artificial
  Chemically synthesized
cuuuggagaagcaaauaggccac

SEQ ID NO: 23733 - RNA, 23 nt, artificial
  Chemically synthesized
ucuuuggagaagcaaauaggcca

SEQ ID NO: 23734 - RNA, 23 nt, artificial
  Chemically synthesized
augaugagcuacugcacuacugg

SEQ ID NO: 23735 - RNA, 23 nt, artificial
  Chemically synthesized
gaugaugagcuacugcacuacug

SEQ ID NO: 23736 - RNA, 23 nt, artificial
  Chemically synthesized
agaugaugagcuacugcacuacu

SEQ ID NO: 23737 - RNA, 23 nt, artificial
  Chemically synthesized
aagaugaugagcuacugcacuac

SEQ ID NO: 23738 - RNA, 23 nt, artificial
  Chemically synthesized
gaagaugaugagcuacugcacua

SEQ ID NO: 23739 - RNA, 23 nt, artificial
  Chemically synthesized
cauaauaagcuaaagaggcugaa

SEQ ID NO: 23740 - RNA, 23 nt, artificial
  Chemically synthesized
uguuguauucagugagggucuuc

SEQ ID NO: 23741 - RNA, 23 nt, artificial
  Chemically synthesized
auguuguauucagugagggucuu

SEQ ID NO: 23742 - RNA, 23 nt, artificial
  Chemically synthesized
aauguuguauucagugagggucu

SEQ ID NO: 23743 - RNA, 23 nt, artificial
  Chemically synthesized
ccuacagaaggagcuggcagaac

SEQ ID NO: 23744 - RNA, 23 nt, artificial
  Chemically synthesized
accuacagaaggagcuggcagaa

SEQ ID NO: 23745 - RNA, 23 nt, artificial
  Chemically synthesized
caccuacagaaggagcuggcaga

SEQ ID NO: 23746 - RNA, 23 nt, artificial
  Chemically synthesized
ucagauacaugguugugaccuga

SEQ ID NO: 23747 - RNA, 23 nt, artificial
  Chemically synthesized
uucagauacaugguugugaccug

SEQ ID NO: 23748 - RNA, 23 nt, artificial
  Chemically synthesized
uuucagauacaugguugugaccu

SEQ ID NO: 23749 - RNA, 23 nt, artificial
  Chemically synthesized
agcaucuucacuucuaaaugcau

SEQ ID NO: 23750 - RNA, 23 nt, artificial
  Chemically synthesized
ccgagagucuaccagccagaugc

SEQ ID NO: 23751 - RNA, 23 nt, artificial
  Chemically synthesized
uccgagagucuaccagccagaug

SEQ ID NO: 23752 - RNA, 23 nt, artificial
  Chemically synthesized
cuccgagagucuaccagccagau

SEQ ID NO: 23753 - RNA, 23 nt, artificial
  Chemically synthesized
guuucccuuagcuauggaaacuc

SEQ ID NO: 23754 - RNA, 23 nt, artificial
  Chemically synthesized
uguuucccuuagcuauggaaacu

SEQ ID NO: 23755 - RNA, 23 nt, artificial
  Chemically synthesized
guguuucccuuagcuauggaaac

SEQ ID NO: 23756 - RNA, 23 nt, artificial
  Chemically synthesized
gguguuucccuuagcuauggaaa

SEQ ID NO: 23757 - RNA, 23 nt, artificial
  Chemically synthesized
agaaggccuggucaaaggaggcc

SEQ ID NO: 23758 - RNA, 23 nt, artificial
  Chemically synthesized
cagaaggccuggucaaaggaggc

SEQ ID NO: 23759 - RNA, 23 nt, artificial
  Chemically synthesized
ccagaaggccuggucaaaggagg

SEQ ID NO: 23760 - RNA, 23 nt, artificial
  Chemically synthesized
cccagaaggccuggucaaaggag

SEQ ID NO: 23761 - RNA, 23 nt, artificial
  Chemically synthesized
gcccagaaggccuggucaaagga

SEQ ID NO: 23762 - RNA, 23 nt, artificial
  Chemically synthesized
auccugagccaucggugaaacua

SEQ ID NO: 23763 - RNA, 23 nt, artificial
  Chemically synthesized
aggaaucucagacguuuuucggc

SEQ ID NO: 23764 - RNA, 23 nt, artificial
  Chemically synthesized
aauuuugaggaaucucagacguu

SEQ ID NO: 23765 - RNA, 23 nt, artificial
  Chemically synthesized
caauuuugaggaaucucagacgu

SEQ ID NO: 23766 - RNA, 23 nt, artificial
  Chemically synthesized
ucaauuuugaggaaucucagacg

SEQ ID NO: 23767 - RNA, 23 nt, artificial
  Chemically synthesized
gucaauuuugaggaaucucagac

SEQ ID NO: 23768 - RNA, 23 nt, artificial
  Chemically synthesized
gaaguaaaaccguuugcuggggc

SEQ ID NO: 23769 - RNA, 23 nt, artificial
  Chemically synthesized
agaaguaaaaccguuugcugggg

SEQ ID NO: 23770 - RNA, 23 nt, artificial
  Chemically synthesized
aagaaguaaaaccguuugcuggg

SEQ ID NO: 23771 - RNA, 23 nt, artificial
  Chemically synthesized
aaaaagcagcuaccagguguucu

SEQ ID NO: 23772 - RNA, 23 nt, artificial
  Chemically synthesized
cagcuacuaaugauguuuuccua

SEQ ID NO: 23773 - RNA, 23 nt, artificial
  Chemically synthesized
ucagcuacuaaugauguuuuccu

SEQ ID NO: 23774 - RNA, 23 nt, artificial
  Chemically synthesized
uauaugucaacguaucugagcuc

SEQ ID NO: 23775 - RNA, 23 nt, artificial
  Chemically synthesized
uuauaugucaacguaucugagcu

SEQ ID NO: 23776 - RNA, 23 nt, artificial
  Chemically synthesized
uuuauaugucaacguaucugagc

SEQ ID NO: 23777 - RNA, 23 nt, artificial
  Chemically synthesized
auuuauaugucaacguaucugag

SEQ ID NO: 23778 - RNA, 23 nt, artificial
  Chemically synthesized
cauuuauaugucaacguaucuga

SEQ ID NO: 23779 - RNA, 23 nt, artificial
  Chemically synthesized
gugcauuuuugugaaaugaaaac

SEQ ID NO: 23780 - RNA, 23 nt, artificial
  Chemically synthesized
ugugcauuuuugugaaaugaaaa

SEQ ID NO: 23781 - RNA, 23 nt, artificial
  Chemically synthesized
augugcauuuuugugaaaugaaa

SEQ ID NO: 23782 - RNA, 23 nt, artificial
  Chemically synthesized
uuagugccugagaguauuuaggc

SEQ ID NO: 23783 - RNA, 23 nt, artificial
  Chemically synthesized
ggucaaucuugcaacaaccugcc

SEQ ID NO: 23784 - RNA, 23 nt, artificial
  Chemically synthesized
ugagccacaaggucuacaugagg

SEQ ID NO: 23785 - RNA, 23 nt, artificial
  Chemically synthesized
cugagccacaaggucuacaugag

SEQ ID NO: 23786 - RNA, 23 nt, artificial
  Chemically synthesized
uauuuccagugcaauuguagggg

SEQ ID NO: 23787 - RNA, 23 nt, artificial
  Chemically synthesized
guauuuccagugcaauuguaggg

SEQ ID NO: 23788 - RNA, 23 nt, artificial
  Chemically synthesized
uguauuuccagugcaauuguagg

SEQ ID NO: 23789 - RNA, 23 nt, artificial
  Chemically synthesized
agauacaugguugugaccugagg

SEQ ID NO: 23790 - RNA, 23 nt, artificial
  Chemically synthesized
cagauacaugguugugaccugag

SEQ ID NO: 23791 - RNA, 23 nt, artificial
  Chemically synthesized
cauuuggucaagauuuugaaugc

SEQ ID NO: 23792 - RNA, 23 nt, artificial
  Chemically synthesized
gcauuuggucaagauuuugaaug

SEQ ID NO: 23793 - RNA, 23 nt, artificial
  Chemically synthesized
aucuuuggagaagcaaauaggcc

SEQ ID NO: 23794 - RNA, 23 nt, artificial
  Chemically synthesized
aucucagacguuuuucggcuuau

SEQ ID NO: 23795 - RNA, 23 nt, artificial
  Chemically synthesized
auuuugaggaaucucagacguuu

SEQ ID NO: 23796 - RNA, 23 nt, artificial
  Chemically synthesized
gacaccuauggaauuguccugcu

SEQ ID NO: 23797 - RNA, 23 nt, artificial
  Chemically synthesized
aggacaccuuuuaacucaccucu

SEQ ID NO: 23798 - RNA, 23 nt, artificial
  Chemically synthesized
aaggacaccuuuuaacucaccuc

SEQ ID NO: 23799 - RNA, 23 nt, artificial
  Chemically synthesized
aaaggacaccuuuuaacucaccu

SEQ ID NO: 23800 - RNA, 23 nt, artificial
  Chemically synthesized
aaaaggacaccuuuuaacucacc

SEQ ID NO: 23801 - RNA, 23 nt, artificial
  Chemically synthesized
gaaaaggacaccuuuuaacucac

SEQ ID NO: 23802 - RNA, 23 nt, artificial
  Chemically synthesized
ggucaagauuuugaaugcuuccu

SEQ ID NO: 23803 - RNA, 23 nt, artificial
  Chemically synthesized
uggucaagauuuugaaugcuucc

SEQ ID NO: 23804 - RNA, 23 nt, artificial
  Chemically synthesized
uuggucaagauuuugaaugcuuc

SEQ ID NO: 23805 - RNA, 23 nt, artificial
  Chemically synthesized
uuuggucaagauuuugaaugcuu

SEQ ID NO: 23806 - RNA, 23 nt, artificial
  Chemically synthesized
auuuggucaagauuuugaaugcu

SEQ ID NO: 23807 - RNA, 23 nt, artificial
  Chemically synthesized
agugaaguauaagaaggguggcc

SEQ ID NO: 23808 - RNA, 23 nt, artificial
  Chemically synthesized
gagugaaguauaagaaggguggc

SEQ ID NO: 23809 - RNA, 23 nt, artificial
  Chemically synthesized
gggcugccaugugaagagggaga

SEQ ID NO: 23810 - RNA, 23 nt, artificial
  Chemically synthesized
agcucuaagagaagcacuuuggg

SEQ ID NO: 23811 - RNA, 23 nt, artificial
  Chemically synthesized
agacaugaaccaaguggaccuug

SEQ ID NO: 23812 - RNA, 23 nt, artificial
  Chemically synthesized
gcuaaagaggcugaaagaggcca

SEQ ID NO: 23813 - RNA, 23 nt, artificial
  Chemically synthesized
gcaagagagauguuuuggggacu

SEQ ID NO: 23814 - RNA, 23 nt, artificial
  Chemically synthesized
agcaagagagauguuuuggggac

SEQ ID NO: 23815 - RNA, 23 nt, artificial
  Chemically synthesized
aagcaagagagauguuuugggga

SEQ ID NO: 23816 - RNA, 23 nt, artificial
  Chemically synthesized
gaaaaggaagacuagaggcuugc

SEQ ID NO: 23817 - RNA, 23 nt, artificial
  Chemically synthesized
aaacucuauaagagagauccagc

SEQ ID NO: 23818 - RNA, 23 nt, artificial
  Chemically synthesized
aaaauauggguugcauuugguca

SEQ ID NO: 23819 - RNA, 23 nt, artificial
  Chemically synthesized
cuucuaaaugcauauccugagcc

SEQ ID NO: 23820 - RNA, 23 nt, artificial
  Chemically synthesized
aauuguccugcuuucuggaguga

SEQ ID NO: 23821 - RNA, 23 nt, artificial
  Chemically synthesized
gaauuguccugcuuucuggagug

SEQ ID NO: 23822 - RNA, 23 nt, artificial
  Chemically synthesized
ggaauuguccugcuuucuggagu

SEQ ID NO: 23823 - RNA, 23 nt, artificial
  Chemically synthesized
uggaauuguccugcuuucuggag

SEQ ID NO: 23824 - RNA, 23 nt, artificial
  Chemically synthesized
auggaauuguccugcuuucugga

SEQ ID NO: 23825 - RNA, 23 nt, artificial
  Chemically synthesized
ccugugucuccuugugauguuuu

SEQ ID NO: 23826 - RNA, 23 nt, artificial
  Chemically synthesized
accuugagaccacaggguucaaa

SEQ ID NO: 23827 - RNA, 23 nt, artificial
  Chemically synthesized
ugugaucaaugaaacugggcugu

SEQ ID NO: 23828 - RNA, 23 nt, artificial
  Chemically synthesized
uugugaucaaugaaacugggcug

SEQ ID NO: 23829 - RNA, 23 nt, artificial
  Chemically synthesized
cuugugaucaaugaaacugggcu

SEQ ID NO: 23830 - RNA, 23 nt, artificial
  Chemically synthesized
ucuaccagccagaugcacacagc

SEQ ID NO: 23831 - RNA, 23 nt, artificial
  Chemically synthesized
gucuaccagccagaugcacacag

SEQ ID NO: 23832 - RNA, 23 nt, artificial
  Chemically synthesized
cagaucuacuggguggacagcag

SEQ ID NO: 23833 - RNA, 23 nt, artificial
  Chemically synthesized
ccagaucuacuggguggacagca

SEQ ID NO: 23834 - RNA, 23 nt, artificial
  Chemically synthesized
cccagaucuacuggguggacagc

SEQ ID NO: 23835 - RNA, 23 nt, artificial
  Chemically synthesized
ccccagaucuacuggguggacag

SEQ ID NO: 23836 - RNA, 23 nt, artificial
  Chemically synthesized
uccccagaucuacuggguggaca

SEQ ID NO: 23837 - RNA, 23 nt, artificial
  Chemically synthesized
gaugagcuacugcacuacugggc

SEQ ID NO: 23838 - RNA, 23 nt, artificial
  Chemically synthesized
ugaugagcuacugcacuacuggg

SEQ ID NO: 23839 - RNA, 23 nt, artificial
  Chemically synthesized
gaccuugagaccacaggguucaa

SEQ ID NO: 23840 - RNA, 23 nt, artificial
  Chemically synthesized
gugaucaaugaaacugggcugua

SEQ ID NO: 23841 - RNA, 23 nt, artificial
  Chemically synthesized
auauaagcucuaagagaagcacu

SEQ ID NO: 23842 - RNA, 23 nt, artificial
  Chemically synthesized
uauauaagcucuaagagaagcac

SEQ ID NO: 23843 - RNA, 23 nt, artificial
  Chemically synthesized
uuauauaagcucuaagagaagca

SEQ ID NO: 23844 - RNA, 23 nt, artificial
  Chemically synthesized
cuuauauaagcucuaagagaagc

SEQ ID NO: 23845 - RNA, 23 nt, artificial
  Chemically synthesized
cagcuaccagguguucuacacuc

SEQ ID NO: 23846 - RNA, 23 nt, artificial
  Chemically synthesized
guuuuucggcuuauauaagcucu

SEQ ID NO: 23847 - RNA, 23 nt, artificial
  Chemically synthesized
gucaagauuuugaaugcuuccug

SEQ ID NO: 23848 - RNA, 23 nt, artificial
  Chemically synthesized
guuuuucaugguucugguugccu

SEQ ID NO: 23849 - RNA, 23 nt, artificial
  Chemically synthesized
ggggauauggguaauugaagggc

SEQ ID NO: 23850 - RNA, 23 nt, artificial
  Chemically synthesized
gggauauggguaauugaagggcu

SEQ ID NO: 23851 - RNA, 23 nt, artificial
  Chemically synthesized
ggauauggguaauugaagggcug

SEQ ID NO: 23852 - RNA, 23 nt, artificial
  Chemically synthesized
gauauggguaauugaagggcugc

SEQ ID NO: 23853 - RNA, 23 nt, artificial
  Chemically synthesized
auauggguaauugaagggcugcu

SEQ ID NO: 23854 - RNA, 23 nt, artificial
  Chemically synthesized
uugcuuaucuguuaguuucaccg

SEQ ID NO: 23855 - RNA, 23 nt, artificial
  Chemically synthesized
ugcuuaucuguuaguuucaccga

SEQ ID NO: 23856 - RNA, 23 nt, artificial
  Chemically synthesized
gcuuaucuguuaguuucaccgau

SEQ ID NO: 23857 - RNA, 23 nt, artificial
  Chemically synthesized
cuuaucuguuaguuucaccgaug

SEQ ID NO: 23858 - RNA, 23 nt, artificial
  Chemically synthesized
uuaucuguuaguuucaccgaugg

SEQ ID NO: 23859 - RNA, 23 nt, artificial
  Chemically synthesized
cugcuuuuucaugcuucucccuc

SEQ ID NO: 23860 - RNA, 23 nt, artificial
  Chemically synthesized
ugcuuuuucaugcuucucccucu

SEQ ID NO: 23861 - RNA, 23 nt, artificial
  Chemically synthesized
gcuuuuucaugcuucucccucuu

SEQ ID NO: 23862 - RNA, 23 nt, artificial
  Chemically synthesized
cuuuuucaugcuucucccucuuc

SEQ ID NO: 23863 - RNA, 23 nt, artificial
  Chemically synthesized
uuuuucaugcuucucccucuuca

SEQ ID NO: 23864 - RNA, 23 nt, artificial
  Chemically synthesized
uuccuuuuccaucccuuaaaucc

SEQ ID NO: 23865 - RNA, 23 nt, artificial
  Chemically synthesized
uccuuuuccaucccuuaaauccu

SEQ ID NO: 23866 - RNA, 23 nt, artificial
  Chemically synthesized
ccuuuuccaucccuuaaauccuc

SEQ ID NO: 23867 - RNA, 23 nt, artificial
  Chemically synthesized
cuuuuccaucccuuaaauccuca

SEQ ID NO: 23868 - RNA, 23 nt, artificial
  Chemically synthesized
uuuuccaucccuuaaauccucag

SEQ ID NO: 23869 - RNA, 23 nt, artificial
  Chemically synthesized
auuuuuaagcacuauuagaguug

SEQ ID NO: 23870 - RNA, 23 nt, artificial
  Chemically synthesized
uuuuuaagcacuauuagaguuga

SEQ ID NO: 23871 - RNA, 23 nt, artificial
  Chemically synthesized
uuuuaagcacuauuagaguugau

SEQ ID NO: 23872 - RNA, 23 nt, artificial
  Chemically synthesized
uuuaagcacuauuagaguugauu

SEQ ID NO: 23873 - RNA, 23 nt, artificial
  Chemically synthesized
uuaagcacuauuagaguugauug

SEQ ID NO: 23874 - RNA, 23 nt, artificial
  Chemically synthesized
auguucuuccgucauauuccucc

SEQ ID NO: 23875 - RNA, 23 nt, artificial
  Chemically synthesized
uguucuuccgucauauuccucca

SEQ ID NO: 23876 - RNA, 23 nt, artificial
  Chemically synthesized
guucuuccgucauauuccuccau

SEQ ID NO: 23877 - RNA, 23 nt, artificial
  Chemically synthesized
uucuuccgucauauuccuccauu

SEQ ID NO: 23878 - RNA, 23 nt, artificial
  Chemically synthesized
ucuuccgucauauuccuccauuu

SEQ ID NO: 23879 - RNA, 23 nt, artificial
  Chemically synthesized
gcauuuagaagugaagaugcugc

SEQ ID NO: 23880 - RNA, 23 nt, artificial
  Chemically synthesized
cauuuagaagugaagaugcugcc

SEQ ID NO: 23881 - RNA, 23 nt, artificial
  Chemically synthesized
auuuagaagugaagaugcugcca

SEQ ID NO: 23882 - RNA, 23 nt, artificial
  Chemically synthesized
uuuagaagugaagaugcugccag

SEQ ID NO: 23883 - RNA, 23 nt, artificial
  Chemically synthesized
uuagaagugaagaugcugccagu

SEQ ID NO: 23884 - RNA, 23 nt, artificial
  Chemically synthesized
acgguuuuacuucuucucagucc

SEQ ID NO: 23885 - RNA, 23 nt, artificial
  Chemically synthesized
cgguuuuacuucuucucaguccu

SEQ ID NO: 23886 - RNA, 23 nt, artificial
  Chemically synthesized
gguuuuacuucuucucaguccug

SEQ ID NO: 23887 - RNA, 23 nt, artificial
  Chemically synthesized
guuuuacuucuucucaguccugu

SEQ ID NO: 23888 - RNA, 23 nt, artificial
  Chemically synthesized
uuuuacuucuucucaguccugua

SEQ ID NO: 23889 - RNA, 23 nt, artificial
  Chemically synthesized
gagcuuauauaagccgaaaaacg

SEQ ID NO: 23890 - RNA, 23 nt, artificial
  Chemically synthesized
agcuuauauaagccgaaaaacgu

SEQ ID NO: 23891 - RNA, 23 nt, artificial
  Chemically synthesized
gcuuauauaagccgaaaaacguc

SEQ ID NO: 23892 - RNA, 23 nt, artificial
  Chemically synthesized
cuuauauaagccgaaaaacgucu

SEQ ID NO: 23893 - RNA, 23 nt, artificial
  Chemically synthesized
uuauauaagccgaaaaacgucug

SEQ ID NO: 23894 - RNA, 23 nt, artificial
  Chemically synthesized
ucuauguucuuccgucauauucc

SEQ ID NO: 23895 - RNA, 23 nt, artificial
  Chemically synthesized
cuauguucuuccgucauauuccu

SEQ ID NO: 23896 - RNA, 23 nt, artificial
  Chemically synthesized
uauguucuuccgucauauuccuc

SEQ ID NO: 23897 - RNA, 23 nt, artificial
  Chemically synthesized
ugcauguaagaagacccucacug

SEQ ID NO: 23898 - RNA, 23 nt, artificial
  Chemically synthesized
gcauguaagaagacccucacuga

SEQ ID NO: 23899 - RNA, 23 nt, artificial
  Chemically synthesized
cauguaagaagacccucacugaa

SEQ ID NO: 23900 - RNA, 23 nt, artificial
  Chemically synthesized
auguaagaagacccucacugaau

SEQ ID NO: 23901 - RNA, 23 nt, artificial
  Chemically synthesized
uguaagaagacccucacugaaua

SEQ ID NO: 23902 - RNA, 23 nt, artificial
  Chemically synthesized
auccuaccaaggcaaccagaacc

SEQ ID NO: 23903 - RNA, 23 nt, artificial
  Chemically synthesized
uccuaccaaggcaaccagaacca

SEQ ID NO: 23904 - RNA, 23 nt, artificial
  Chemically synthesized
ccuaccaaggcaaccagaaccau

SEQ ID NO: 23905 - RNA, 23 nt, artificial
  Chemically synthesized
cuaccaaggcaaccagaaccaug

SEQ ID NO: 23906 - RNA, 23 nt, artificial
  Chemically synthesized
uaccaaggcaaccagaaccauga

SEQ ID NO: 23907 - RNA, 23 nt, artificial
  Chemically synthesized
uguguuaggaaugaaaugagucc

SEQ ID NO: 23908 - RNA, 23 nt, artificial
  Chemically synthesized
guguuaggaaugaaaugaguccc

SEQ ID NO: 23909 - RNA, 23 nt, artificial
  Chemically synthesized
uguuaggaaugaaaugagucccc

SEQ ID NO: 23910 - RNA, 23 nt, artificial
  Chemically synthesized
guuaggaaugaaaugagucccca

SEQ ID NO: 23911 - RNA, 23 nt, artificial
  Chemically synthesized
uuaggaaugaaaugaguccccaa

SEQ ID NO: 23912 - RNA, 23 nt, artificial
  Chemically synthesized
ccucuagucuuccuuuuccaucc

SEQ ID NO: 23913 - RNA, 23 nt, artificial
  Chemically synthesized
cucuagucuuccuuuuccauccc

SEQ ID NO: 23914 - RNA, 23 nt, artificial
  Chemically synthesized
ucuagucuuccuuuuccaucccu

SEQ ID NO: 23915 - RNA, 23 nt, artificial
  Chemically synthesized
cuagucuuccuuuuccaucccuu

SEQ ID NO: 23916 - RNA, 23 nt, artificial
  Chemically synthesized
uagucuuccuuuuccaucccuua

SEQ ID NO: 23917 - RNA, 23 nt, artificial
  Chemically synthesized
ucucuugcuuaucuguuaguuuc

SEQ ID NO: 23918 - RNA, 23 nt, artificial
  Chemically synthesized
cucuugcuuaucuguuaguuuca

SEQ ID NO: 23919 - RNA, 23 nt, artificial
  Chemically synthesized
ucuugcuuaucuguuaguuucac

SEQ ID NO: 23920 - RNA, 23 nt, artificial
  Chemically synthesized
cuugcuuaucuguuaguuucacc

SEQ ID NO: 23921 - RNA, 23 nt, artificial
  Chemically synthesized
uccauuugucuggcucauaaaca

SEQ ID NO: 23922 - RNA, 23 nt, artificial
  Chemically synthesized
ccauuugucuggcucauaaacau

SEQ ID NO: 23923 - RNA, 23 nt, artificial
  Chemically synthesized
cauuugucuggcucauaaacauu

SEQ ID NO: 23924 - RNA, 23 nt, artificial
  Chemically synthesized
auuugucuggcucauaaacauua

SEQ ID NO: 23925 - RNA, 23 nt, artificial
  Chemically synthesized
uuugucuggcucauaaacauuag

SEQ ID NO: 23926 - RNA, 23 nt, artificial
  Chemically synthesized
uagcuuauuaugcaagccucuag

SEQ ID NO: 23927 - RNA, 23 nt, artificial
  Chemically synthesized
agcuuauuaugcaagccucuagu

SEQ ID NO: 23928 - RNA, 23 nt, artificial
  Chemically synthesized
gcuuauuaugcaagccucuaguc

SEQ ID NO: 23929 - RNA, 23 nt, artificial
  Chemically synthesized
cuuauuaugcaagccucuagucu

SEQ ID NO: 23930 - RNA, 23 nt, artificial
  Chemically synthesized
uuauuaugcaagccucuagucuu

SEQ ID NO: 23931 - RNA, 23 nt, artificial
  Chemically synthesized
uuuucaugcuucucccucuucac

SEQ ID NO: 23932 - RNA, 23 nt, artificial
  Chemically synthesized
agaguugauugucaggaagcauu

SEQ ID NO: 23933 - RNA, 23 nt, artificial
  Chemically synthesized
gaguugauugucaggaagcauuc

SEQ ID NO: 23934 - RNA, 23 nt, artificial
  Chemically synthesized
aguugauugucaggaagcauuca

SEQ ID NO: 23935 - RNA, 23 nt, artificial
  Chemically synthesized
guugauugucaggaagcauucaa

SEQ ID NO: 23936 - RNA, 23 nt, artificial
  Chemically synthesized
uugauugucaggaagcauucaaa

SEQ ID NO: 23937 - RNA, 23 nt, artificial
  Chemically synthesized
uccuuuucaaucugccuaaauac

SEQ ID NO: 23938 - RNA, 23 nt, artificial
  Chemically synthesized
ccuuuucaaucugccuaaauacu

SEQ ID NO: 23939 - RNA, 23 nt, artificial
  Chemically synthesized
cuuuucaaucugccuaaauacuc

SEQ ID NO: 23940 - RNA, 23 nt, artificial
  Chemically synthesized
uuuucaaucugccuaaauacucu

SEQ ID NO: 23941 - RNA, 23 nt, artificial
  Chemically synthesized
uuucaaucugccuaaauacucuc

SEQ ID NO: 23942 - RNA, 23 nt, artificial
  Chemically synthesized
uuuccaucccuuaaauccucagg

SEQ ID NO: 23943 - RNA, 23 nt, artificial
  Chemically synthesized
ugccuguuaaaugggccacuuuc

SEQ ID NO: 23944 - RNA, 23 nt, artificial
  Chemically synthesized
gccuguuaaaugggccacuuucc

SEQ ID NO: 23945 - RNA, 23 nt, artificial
  Chemically synthesized
ccuguuaaaugggccacuuuccu

SEQ ID NO: 23946 - RNA, 23 nt, artificial
  Chemically synthesized
cuguuaaaugggccacuuuccuc

SEQ ID NO: 23947 - RNA, 23 nt, artificial
  Chemically synthesized
uguuaaaugggccacuuuccuca

SEQ ID NO: 23948 - RNA, 23 nt, artificial
  Chemically synthesized
gacauuuugaacccuguggucuc

SEQ ID NO: 23949 - RNA, 23 nt, artificial
  Chemically synthesized
acauuuugaacccuguggucuca

SEQ ID NO: 23950 - RNA, 23 nt, artificial
  Chemically synthesized
cauuuugaacccuguggucucaa

SEQ ID NO: 23951 - RNA, 23 nt, artificial
  Chemically synthesized
auuuugaacccuguggucucaag

SEQ ID NO: 23952 - RNA, 23 nt, artificial
  Chemically synthesized
uuuugaacccuguggucucaagg

SEQ ID NO: 23953 - RNA, 23 nt, artificial
  Chemically synthesized
acagagguuggacagggaagaac

SEQ ID NO: 23954 - RNA, 23 nt, artificial
  Chemically synthesized
cagagguuggacagggaagaacu

SEQ ID NO: 23955 - RNA, 23 nt, artificial
  Chemically synthesized
agagguuggacagggaagaacug

SEQ ID NO: 23956 - RNA, 23 nt, artificial
  Chemically synthesized
gagguuggacagggaagaacugu

SEQ ID NO: 23957 - RNA, 23 nt, artificial
  Chemically synthesized
agguuggacagggaagaacugug

SEQ ID NO: 23958 - RNA, 23 nt, artificial
  Chemically synthesized
agcaaacgguuuuacuucuucuc

SEQ ID NO: 23959 - RNA, 23 nt, artificial
  Chemically synthesized
gcaaacgguuuuacuucuucuca

SEQ ID NO: 23960 - RNA, 23 nt, artificial
  Chemically synthesized
caaacgguuuuacuucuucucag

SEQ ID NO: 23961 - RNA, 23 nt, artificial
  Chemically synthesized
aaacgguuuuacuucuucucagu

SEQ ID NO: 23962 - RNA, 23 nt, artificial
  Chemically synthesized
aacgguuuuacuucuucucaguc

SEQ ID NO: 23963 - RNA, 23 nt, artificial
  Chemically synthesized
acuauuagaguugauugucagga

SEQ ID NO: 23964 - RNA, 23 nt, artificial
  Chemically synthesized
cuauuagaguugauugucaggaa

SEQ ID NO: 23965 - RNA, 23 nt, artificial
  Chemically synthesized
uauuagaguugauugucaggaag

SEQ ID NO: 23966 - RNA, 23 nt, artificial
  Chemically synthesized
auuagaguugauugucaggaagc

SEQ ID NO: 23967 - RNA, 23 nt, artificial
  Chemically synthesized
uuagaguugauugucaggaagca

SEQ ID NO: 23968 - RNA, 23 nt, artificial
  Chemically synthesized
uucaaucugccuaaauacucuca

SEQ ID NO: 23969 - RNA, 23 nt, artificial
  Chemically synthesized
ucaaucugccuaaauacucucag

SEQ ID NO: 23970 - RNA, 23 nt, artificial
  Chemically synthesized
uuuacuucuucucaguccuguag

SEQ ID NO: 23971 - RNA, 23 nt, artificial
  Chemically synthesized
uagcugcuuuuucaugcuucucc

SEQ ID NO: 23972 - RNA, 23 nt, artificial
  Chemically synthesized
agcugcuuuuucaugcuucuccc

SEQ ID NO: 23973 - RNA, 23 nt, artificial
  Chemically synthesized
gcugcuuuuucaugcuucucccu

SEQ ID NO: 23974 - RNA, 23 nt, artificial
  Chemically synthesized
gcacagagguuggacagggaaga

SEQ ID NO: 23975 - RNA, 23 nt, artificial
  Chemically synthesized
cacagagguuggacagggaagaa

SEQ ID NO: 23976 - RNA, 23 nt, artificial
  Chemically synthesized
ccuauuugcuucuccaaagauga

SEQ ID NO: 23977 - RNA, 23 nt, artificial
  Chemically synthesized
cuauuugcuucuccaaagaugau

SEQ ID NO: 23978 - RNA, 23 nt, artificial
  Chemically synthesized
uauuugcuucuccaaagaugaug

SEQ ID NO: 23979 - RNA, 23 nt, artificial
  Chemically synthesized
auuugcuucuccaaagaugaugc

SEQ ID NO: 23980 - RNA, 23 nt, artificial
  Chemically synthesized
uuugcuucuccaaagaugaugcu

SEQ ID NO: 23981 - RNA, 23 nt, artificial
  Chemically synthesized
ccaguuucauugaucacaaggcc

SEQ ID NO: 23982 - RNA, 23 nt, artificial
  Chemically synthesized
caguuucauugaucacaaggcca

SEQ ID NO: 23983 - RNA, 23 nt, artificial
  Chemically synthesized
aguuucauugaucacaaggccac

SEQ ID NO: 23984 - RNA, 23 nt, artificial
  Chemically synthesized
guuucauugaucacaaggccacc

SEQ ID NO: 23985 - RNA, 23 nt, artificial
  Chemically synthesized
uuucauugaucacaaggccaccc

SEQ ID NO: 23986 - RNA, 23 nt, artificial
  Chemically synthesized
gucuucuuacuugaccucaaaug

SEQ ID NO: 23987 - RNA, 23 nt, artificial
  Chemically synthesized
ucuucuuacuugaccucaaaugc

SEQ ID NO: 23988 - RNA, 23 nt, artificial
  Chemically synthesized
cuucuuacuugaccucaaaugca

SEQ ID NO: 23989 - RNA, 23 nt, artificial
  Chemically synthesized
uucuuacuugaccucaaaugcau

SEQ ID NO: 23990 - RNA, 23 nt, artificial
  Chemically synthesized
ucuuacuugaccucaaaugcaug

SEQ ID NO: 23991 - RNA, 23 nt, artificial
  Chemically synthesized
ugacauauaaaugaucagcacug

SEQ ID NO: 23992 - RNA, 23 nt, artificial
  Chemically synthesized
gacauauaaaugaucagcacugg

SEQ ID NO: 23993 - RNA, 23 nt, artificial
  Chemically synthesized
acauauaaaugaucagcacuggu

SEQ ID NO: 23994 - RNA, 23 nt, artificial
  Chemically synthesized
cauauaaaugaucagcacuggua

SEQ ID NO: 23995 - RNA, 23 nt, artificial
  Chemically synthesized
auauaaaugaucagcacugguaa

SEQ ID NO: 23996 - RNA, 23 nt, artificial
  Chemically synthesized
uucuauguucuuccgucauauuc

SEQ ID NO: 23997 - RNA, 23 nt, artificial
  Chemically synthesized
auugucaggaagcauucaaaauc

SEQ ID NO: 23998 - RNA, 23 nt, artificial
  Chemically synthesized
uugucaggaagcauucaaaaucu

SEQ ID NO: 23999 - RNA, 23 nt, artificial
  Chemically synthesized
ugucaggaagcauucaaaaucuu

SEQ ID NO: 24000 - RNA, 23 nt, artificial
  Chemically synthesized
gucaggaagcauucaaaaucuug

SEQ ID NO: 24001 - RNA, 23 nt, artificial
  Chemically synthesized
ucaggaagcauucaaaaucuuga

SEQ ID NO: 24002 - RNA, 23 nt, artificial
  Chemically synthesized
uauuaugcaagccucuagucuuc

SEQ ID NO: 24003 - RNA, 23 nt, artificial
  Chemically synthesized
auuaugcaagccucuagucuucc

SEQ ID NO: 24004 - RNA, 23 nt, artificial
  Chemically synthesized
uuaugcaagccucuagucuuccu

SEQ ID NO: 24005 - RNA, 23 nt, artificial
  Chemically synthesized
cucaaaugcauguaagaagaccc

SEQ ID NO: 24006 - RNA, 23 nt, artificial
  Chemically synthesized
ucaaaugcauguaagaagacccu

SEQ ID NO: 24007 - RNA, 23 nt, artificial
  Chemically synthesized
caaaugcauguaagaagacccuc

SEQ ID NO: 24008 - RNA, 23 nt, artificial
  Chemically synthesized
aaaugcauguaagaagacccuca

SEQ ID NO: 24009 - RNA, 23 nt, artificial
  Chemically synthesized
aaugcauguaagaagacccucac

SEQ ID NO: 24010 - RNA, 23 nt, artificial
  Chemically synthesized
ucuguuaguuucaccgauggcuc

SEQ ID NO: 24011 - RNA, 23 nt, artificial
  Chemically synthesized
cuguuaguuucaccgauggcuca

SEQ ID NO: 24012 - RNA, 23 nt, artificial
  Chemically synthesized
uguuaguuucaccgauggcucag

SEQ ID NO: 24013 - RNA, 23 nt, artificial
  Chemically synthesized
guuaguuucaccgauggcucagg

SEQ ID NO: 24014 - RNA, 23 nt, artificial
  Chemically synthesized
uuaguuucaccgauggcucagga

SEQ ID NO: 24015 - RNA, 23 nt, artificial
  Chemically synthesized
aaacaucacaaggagacacaggc

SEQ ID NO: 24016 - RNA, 23 nt, artificial
  Chemically synthesized
aacaucacaaggagacacaggcc

SEQ ID NO: 24017 - RNA, 23 nt, artificial
  Chemically synthesized
acaucacaaggagacacaggccu

SEQ ID NO: 24018 - RNA, 23 nt, artificial
  Chemically synthesized
caucacaaggagacacaggccug

SEQ ID NO: 24019 - RNA, 23 nt, artificial
  Chemically synthesized
aucacaaggagacacaggccugu

SEQ ID NO: 24020 - RNA, 23 nt, artificial
  Chemically synthesized
gaccuugaguuggacuugccugu

SEQ ID NO: 24021 - RNA, 23 nt, artificial
  Chemically synthesized
accuugaguuggacuugccuguu

SEQ ID NO: 24022 - RNA, 23 nt, artificial
  Chemically synthesized
ccuugaguuggacuugccuguua

SEQ ID NO: 24023 - RNA, 23 nt, artificial
  Chemically synthesized
cuugaguuggacuugccuguuaa

SEQ ID NO: 24024 - RNA, 23 nt, artificial
  Chemically synthesized
uugaguuggacuugccuguuaaa

SEQ ID NO: 24025 - RNA, 23 nt, artificial
  Chemically synthesized
ugucuucccauuccagaggcaug

SEQ ID NO: 24026 - RNA, 23 nt, artificial
  Chemically synthesized
gucuucccauuccagaggcaugg

SEQ ID NO: 24027 - RNA, 23 nt, artificial
  Chemically synthesized
ucuucccauuccagaggcaugga

SEQ ID NO: 24028 - RNA, 23 nt, artificial
  Chemically synthesized
cuucccauuccagaggcauggac

SEQ ID NO: 24029 - RNA, 23 nt, artificial
  Chemically synthesized
uucccauuccagaggcauggacc

SEQ ID NO: 24030 - RNA, 23 nt, artificial
  Chemically synthesized
accaaaugcaacccauauuuucc

SEQ ID NO: 24031 - RNA, 23 nt, artificial
  Chemically synthesized
ccaaaugcaacccauauuuuccu

SEQ ID NO: 24032 - RNA, 23 nt, artificial
  Chemically synthesized
aaaugcaacccauauuuuccuaa

SEQ ID NO: 24033 - RNA, 23 nt, artificial
  Chemically synthesized
aaugcaacccauauuuuccuaau

SEQ ID NO: 24034 - RNA, 23 nt, artificial
  Chemically synthesized
caaaaucuugaccaaaugcaacc

SEQ ID NO: 24035 - RNA, 23 nt, artificial
  Chemically synthesized
aaaaucuugaccaaaugcaaccc

SEQ ID NO: 24036 - RNA, 23 nt, artificial
  Chemically synthesized
aaaucuugaccaaaugcaaccca

SEQ ID NO: 24037 - RNA, 23 nt, artificial
  Chemically synthesized
aaucuugaccaaaugcaacccau

SEQ ID NO: 24038 - RNA, 23 nt, artificial
  Chemically synthesized
aucuugaccaaaugcaacccaua

SEQ ID NO: 24039 - RNA, 23 nt, artificial
  Chemically synthesized
ccucuuuagcuuauuaugcaagc

SEQ ID NO: 24040 - RNA, 23 nt, artificial
  Chemically synthesized
cucuuuagcuuauuaugcaagcc

SEQ ID NO: 24041 - RNA, 23 nt, artificial
  Chemically synthesized
ucuuuagcuuauuaugcaagccu

SEQ ID NO: 24042 - RNA, 23 nt, artificial
  Chemically synthesized
cuuuagcuuauuaugcaagccuc

SEQ ID NO: 24043 - RNA, 23 nt, artificial
  Chemically synthesized
uuuagcuuauuaugcaagccucu

SEQ ID NO: 24044 - RNA, 23 nt, artificial
  Chemically synthesized
uucauugaucacaaggccacccu

SEQ ID NO: 24045 - RNA, 23 nt, artificial
  Chemically synthesized
ucauugaucacaaggccacccuu

SEQ ID NO: 24046 - RNA, 23 nt, artificial
  Chemically synthesized
cauugaucacaaggccacccuuc

SEQ ID NO: 24047 - RNA, 23 nt, artificial
  Chemically synthesized
auugaucacaaggccacccuucu

SEQ ID NO: 24048 - RNA, 23 nt, artificial
  Chemically synthesized
ucauuaguagcugacaaucaaug

SEQ ID NO: 24049 - RNA, 23 nt, artificial
  Chemically synthesized
cauuaguagcugacaaucaauga

SEQ ID NO: 24050 - RNA, 23 nt, artificial
  Chemically synthesized
auuaguagcugacaaucaaugau

SEQ ID NO: 24051 - RNA, 23 nt, artificial
  Chemically synthesized
uuaguagcugacaaucaaugauu

SEQ ID NO: 24052 - RNA, 23 nt, artificial
  Chemically synthesized
uaguagcugacaaucaaugauuu

SEQ ID NO: 24053 - RNA, 23 nt, artificial
  Chemically synthesized
gguuggacagggaagaacugugc

SEQ ID NO: 24054 - RNA, 23 nt, artificial
  Chemically synthesized
uauggguaauugaagggcugcug

SEQ ID NO: 24055 - RNA, 23 nt, artificial
  Chemically synthesized
uggggauauggguaauugaaggg

SEQ ID NO: 24056 - RNA, 23 nt, artificial
  Chemically synthesized
guuaaaugggccacuuuccucag

SEQ ID NO: 24057 - RNA, 23 nt, artificial
  Chemically synthesized
uuaaaugggccacuuuccucagc

SEQ ID NO: 24058 - RNA, 23 nt, artificial
  Chemically synthesized
uaaaugggccacuuuccucagcu

SEQ ID NO: 24059 - RNA, 23 nt, artificial
  Chemically synthesized
uucuuauacuucacuccagaaag

SEQ ID NO: 24060 - RNA, 23 nt, artificial
  Chemically synthesized
ucuuauacuucacuccagaaagc

SEQ ID NO: 24061 - RNA, 23 nt, artificial
  Chemically synthesized
cuuauacuucacuccagaaagca

SEQ ID NO: 24062 - RNA, 23 nt, artificial
  Chemically synthesized
uuauacuucacuccagaaagcag

SEQ ID NO: 24063 - RNA, 23 nt, artificial
  Chemically synthesized
uauacuucacuccagaaagcagg

SEQ ID NO: 24064 - RNA, 23 nt, artificial
  Chemically synthesized
cuggggauauggguaauugaagg

SEQ ID NO: 24065 - RNA, 23 nt, artificial
  Chemically synthesized
ccucacugaauacaacauucucg

SEQ ID NO: 24066 - RNA, 23 nt, artificial
  Chemically synthesized
cucacugaauacaacauucucgg

SEQ ID NO: 24067 - RNA, 23 nt, artificial
  Chemically synthesized
ucacugaauacaacauucucggu

SEQ ID NO: 24068 - RNA, 23 nt, artificial
  Chemically synthesized
cacugaauacaacauucucggug

SEQ ID NO: 24069 - RNA, 23 nt, artificial
  Chemically synthesized
acugaauacaacauucucggugc

SEQ ID NO: 24070 - RNA, 23 nt, artificial
  Chemically synthesized
ucauuucacaaaaaugcacaucu

SEQ ID NO: 24071 - RNA, 23 nt, artificial
  Chemically synthesized
cauuucacaaaaaugcacaucua

SEQ ID NO: 24072 - RNA, 23 nt, artificial
  Chemically synthesized
auuucacaaaaaugcacaucuac

SEQ ID NO: 24073 - RNA, 23 nt, artificial
  Chemically synthesized
uuucacaaaaaugcacaucuaca

SEQ ID NO: 24074 - RNA, 23 nt, artificial
  Chemically synthesized
uucacaaaaaugcacaucuacau

SEQ ID NO: 24075 - RNA, 23 nt, artificial
  Chemically synthesized
ccuguugcugacugcucaagagg

SEQ ID NO: 24076 - RNA, 23 nt, artificial
  Chemically synthesized
cuguugcugacugcucaagagga

SEQ ID NO: 24077 - RNA, 23 nt, artificial
  Chemically synthesized
uguugcugacugcucaagaggag

SEQ ID NO: 24078 - RNA, 23 nt, artificial
  Chemically synthesized
guugcugacugcucaagaggagg

SEQ ID NO: 24079 - RNA, 23 nt, artificial
  Chemically synthesized
uugcugacugcucaagaggaggc

SEQ ID NO: 24080 - RNA, 23 nt, artificial
  Chemically synthesized
guuggacagggaagaacugugcc

SEQ ID NO: 24081 - RNA, 23 nt, artificial
  Chemically synthesized
uuggacagggaagaacugugccu

SEQ ID NO: 24082 - RNA, 23 nt, artificial
  Chemically synthesized
uggacagggaagaacugugccug

SEQ ID NO: 24083 - RNA, 23 nt, artificial
  Chemically synthesized
auggguaauugaagggcugcugc

SEQ ID NO: 24084 - RNA, 23 nt, artificial
  Chemically synthesized
uggguaauugaagggcugcugca

SEQ ID NO: 24085 - RNA, 23 nt, artificial
  Chemically synthesized
uuucaugcuucucccucuucaca

SEQ ID NO: 24086 - RNA, 23 nt, artificial
  Chemically synthesized
uucaugcuucucccucuucacau

SEQ ID NO: 24087 - RNA, 23 nt, artificial
  Chemically synthesized
ucaugcuucucccucuucacaug

SEQ ID NO: 24088 - RNA, 23 nt, artificial
  Chemically synthesized
accauguaucugaaagacagucc

SEQ ID NO: 24089 - RNA, 23 nt, artificial
  Chemically synthesized
ccauguaucugaaagacaguccc

SEQ ID NO: 24090 - RNA, 23 nt, artificial
  Chemically synthesized
cauguaucugaaagacagucccc

SEQ ID NO: 24091 - RNA, 23 nt, artificial
  Chemically synthesized
auguaucugaaagacaguccccc

SEQ ID NO: 24092 - RNA, 23 nt, artificial
  Chemically synthesized
uguaucugaaagacagucccccu

SEQ ID NO: 24093 - RNA, 23 nt, artificial
  Chemically synthesized
ugaguuaaaagguguccuuuuca

SEQ ID NO: 24094 - RNA, 23 nt, artificial
  Chemically synthesized
gaguuaaaagguguccuuuucaa

SEQ ID NO: 24095 - RNA, 23 nt, artificial
  Chemically synthesized
aguuaaaagguguccuuuucaau

SEQ ID NO: 24096 - RNA, 23 nt, artificial
  Chemically synthesized
guuaaaagguguccuuuucaauc

SEQ ID NO: 24097 - RNA, 23 nt, artificial
  Chemically synthesized
uuaaaagguguccuuuucaaucu

SEQ ID NO: 24098 - RNA, 23 nt, artificial
  Chemically synthesized
caccuugagaggugaguuaaaag

SEQ ID NO: 24099 - RNA, 23 nt, artificial
  Chemically synthesized
ccuugagaggugaguuaaaaggu

SEQ ID NO: 24100 - RNA, 23 nt, artificial
  Chemically synthesized
cuugagaggugaguuaaaaggug

SEQ ID NO: 24101 - RNA, 23 nt, artificial
  Chemically synthesized
uugagaggugaguuaaaaggugu

SEQ ID NO: 24102 - RNA, 23 nt, artificial
  Chemically synthesized
gccuauuugcuucuccaaagaug

SEQ ID NO: 24103 - RNA, 23 nt, artificial
  Chemically synthesized
ucuggggauauggguaauugaag

SEQ ID NO: 24104 - RNA, 23 nt, artificial
  Chemically synthesized
ucucucuuauagaguuuccauag

SEQ ID NO: 24105 - RNA, 23 nt, artificial
  Chemically synthesized
cucucuuauagaguuuccauagc

SEQ ID NO: 24106 - RNA, 23 nt, artificial
  Chemically synthesized
ucucuuauagaguuuccauagcu

SEQ ID NO: 24107 - RNA, 23 nt, artificial
  Chemically synthesized
cucuuauagaguuuccauagcua

SEQ ID NO: 24108 - RNA, 23 nt, artificial
  Chemically synthesized
ucuuauagaguuuccauagcuaa

SEQ ID NO: 24109 - RNA, 23 nt, artificial
  Chemically synthesized
acaauugcacuggaaauacacau

SEQ ID NO: 24110 - RNA, 23 nt, artificial
  Chemically synthesized
caauugcacuggaaauacacaug

SEQ ID NO: 24111 - RNA, 23 nt, artificial
  Chemically synthesized
aauugcacuggaaauacacaugc

SEQ ID NO: 24112 - RNA, 23 nt, artificial
  Chemically synthesized
auugcacuggaaauacacaugcu

SEQ ID NO: 24113 - RNA, 23 nt, artificial
  Chemically synthesized
uugcacuggaaauacacaugcug

SEQ ID NO: 24114 - RNA, 23 nt, artificial
  Chemically synthesized
uccgucauauuccuccauuuguc

SEQ ID NO: 24115 - RNA, 23 nt, artificial
  Chemically synthesized
ccgucauauuccuccauuugucu

SEQ ID NO: 24116 - RNA, 23 nt, artificial
  Chemically synthesized
cgucauauuccuccauuugucug

SEQ ID NO: 24117 - RNA, 23 nt, artificial
  Chemically synthesized
gucauauuccuccauuugucugg

SEQ ID NO: 24118 - RNA, 23 nt, artificial
  Chemically synthesized
ucauauuccuccauuugucuggc

SEQ ID NO: 24119 - RNA, 23 nt, artificial
  Chemically synthesized
cuucuucucaguccuguagaggc

SEQ ID NO: 24120 - RNA, 23 nt, artificial
  Chemically synthesized
uucuucucaguccuguagaggcu

SEQ ID NO: 24121 - RNA, 23 nt, artificial
  Chemically synthesized
ucuucucaguccuguagaggcug

SEQ ID NO: 24122 - RNA, 23 nt, artificial
  Chemically synthesized
cuucucaguccuguagaggcuga

SEQ ID NO: 24123 - RNA, 23 nt, artificial
  Chemically synthesized
uucucaguccuguagaggcugag

SEQ ID NO: 24124 - RNA, 23 nt, artificial
  Chemically synthesized
ggacaauuccauaggugucuucc

SEQ ID NO: 24125 - RNA, 23 nt, artificial
  Chemically synthesized
gacaauuccauaggugucuuccc

SEQ ID NO: 24126 - RNA, 23 nt, artificial
  Chemically synthesized
acaauuccauaggugucuuccca

SEQ ID NO: 24127 - RNA, 23 nt, artificial
  Chemically synthesized
caauuccauaggugucuucccau

SEQ ID NO: 24128 - RNA, 23 nt, artificial
  Chemically synthesized
aauuccauaggugucuucccauu

SEQ ID NO: 24129 - RNA, 23 nt, artificial
  Chemically synthesized
uauauaagccgaaaaacgucuga

SEQ ID NO: 24130 - RNA, 23 nt, artificial
  Chemically synthesized
auauaagccgaaaaacgucugag

SEQ ID NO: 24131 - RNA, 23 nt, artificial
  Chemically synthesized
uauaagccgaaaaacgucugaga

SEQ ID NO: 24132 - RNA, 23 nt, artificial
  Chemically synthesized
uaucuguuaguuucaccgauggc

SEQ ID NO: 24133 - RNA, 23 nt, artificial
  Chemically synthesized
aucuguuaguuucaccgauggcu

SEQ ID NO: 24134 - RNA, 23 nt, artificial
  Chemically synthesized
cagcaaacgguuuuacuucuucu

SEQ ID NO: 24135 - RNA, 23 nt, artificial
  Chemically synthesized
uuccaucccuuaaauccucaggu

SEQ ID NO: 24136 - RNA, 23 nt, artificial
  Chemically synthesized
ccacuugguucaugucuucuuac

SEQ ID NO: 24137 - RNA, 23 nt, artificial
  Chemically synthesized
cacuugguucaugucuucuuacu

SEQ ID NO: 24138 - RNA, 23 nt, artificial
  Chemically synthesized
acuugguucaugucuucuuacuu

SEQ ID NO: 24139 - RNA, 23 nt, artificial
  Chemically synthesized
cuugguucaugucuucuuacuug

SEQ ID NO: 24140 - RNA, 23 nt, artificial
  Chemically synthesized
uugguucaugucuucuuacuuga

SEQ ID NO: 24141 - RNA, 23 nt, artificial
  Chemically synthesized
ugagaggugaguuaaaagguguc

SEQ ID NO: 24142 - RNA, 23 nt, artificial
  Chemically synthesized
uaagaugaguguagaacaccugg

SEQ ID NO: 24143 - RNA, 23 nt, artificial
  Chemically synthesized
aagaugaguguagaacaccuggu

SEQ ID NO: 24144 - RNA, 23 nt, artificial
  Chemically synthesized
agaugaguguagaacaccuggua

SEQ ID NO: 24145 - RNA, 23 nt, artificial
  Chemically synthesized
gaugaguguagaacaccugguag

SEQ ID NO: 24146 - RNA, 23 nt, artificial
  Chemically synthesized
augaguguagaacaccugguagc

SEQ ID NO: 24147 - RNA, 23 nt, artificial
  Chemically synthesized
aguguagaacaccugguagcugc

SEQ ID NO: 24148 - RNA, 23 nt, artificial
  Chemically synthesized
guguagaacaccugguagcugcu

SEQ ID NO: 24149 - RNA, 23 nt, artificial
  Chemically synthesized
uguagaacaccugguagcugcuu

SEQ ID NO: 24150 - RNA, 23 nt, artificial
  Chemically synthesized
guagaacaccugguagcugcuuu

SEQ ID NO: 24151 - RNA, 23 nt, artificial
  Chemically synthesized
uagaacaccugguagcugcuuuu

SEQ ID NO: 24152 - RNA, 23 nt, artificial
  Chemically synthesized
caaucugccuaaauacucucagg

SEQ ID NO: 24153 - RNA, 23 nt, artificial
  Chemically synthesized
aaucugccuaaauacucucaggc

SEQ ID NO: 24154 - RNA, 23 nt, artificial
  Chemically synthesized
aucugccuaaauacucucaggca

SEQ ID NO: 24155 - RNA, 23 nt, artificial
  Chemically synthesized
ucugccuaaauacucucaggcac

SEQ ID NO: 24156 - RNA, 23 nt, artificial
  Chemically synthesized
aaacauuaggugaguugaggagc

SEQ ID NO: 24157 - RNA, 23 nt, artificial
  Chemically synthesized
aacauuaggugaguugaggagcu

SEQ ID NO: 24158 - RNA, 23 nt, artificial
  Chemically synthesized
acauuaggugaguugaggagcua

SEQ ID NO: 24159 - RNA, 23 nt, artificial
  Chemically synthesized
cauuaggugaguugaggagcuac

SEQ ID NO: 24160 - RNA, 23 nt, artificial
  Chemically synthesized
auuaggugaguugaggagcuaca

SEQ ID NO: 24161 - RNA, 23 nt, artificial
  Chemically synthesized
ugcuucuccaaagaugaugcugu

SEQ ID NO: 24162 - RNA, 23 nt, artificial
  Chemically synthesized
gcuucuccaaagaugaugcugug

SEQ ID NO: 24163 - RNA, 23 nt, artificial
  Chemically synthesized
cuucuccaaagaugaugcugugu

SEQ ID NO: 24164 - RNA, 23 nt, artificial
  Chemically synthesized
uucuccaaagaugaugcugugug

SEQ ID NO: 24165 - RNA, 23 nt, artificial
  Chemically synthesized
ucuccaaagaugaugcugugugc

SEQ ID NO: 24166 - RNA, 23 nt, artificial
  Chemically synthesized
acccuucuuauacuucacuccag

SEQ ID NO: 24167 - RNA, 23 nt, artificial
  Chemically synthesized
cccuucuuauacuucacuccaga

SEQ ID NO: 24168 - RNA, 23 nt, artificial
  Chemically synthesized
ccuucuuauacuucacuccagaa

SEQ ID NO: 24169 - RNA, 23 nt, artificial
  Chemically synthesized
cuucuuauacuucacuccagaaa

SEQ ID NO: 24170 - RNA, 23 nt, artificial
  Chemically synthesized
cacuuuccucagcuccuuuuuuu

SEQ ID NO: 24171 - RNA, 23 nt, artificial
  Chemically synthesized
acuuuccucagcuccuuuuuuuc

SEQ ID NO: 24172 - RNA, 23 nt, artificial
  Chemically synthesized
cuuuccucagcuccuuuuuuuca

SEQ ID NO: 24173 - RNA, 23 nt, artificial
  Chemically synthesized
uuuccucagcuccuuuuuuucag

SEQ ID NO: 24174 - RNA, 23 nt, artificial
  Chemically synthesized
uuccucagcuccuuuuuuucagg

SEQ ID NO: 24175 - RNA, 23 nt, artificial
  Chemically synthesized
ugcauuuagaagugaagaugcug

SEQ ID NO: 24176 - RNA, 23 nt, artificial
  Chemically synthesized
uugcuucuccaaagaugaugcug

SEQ ID NO: 24177 - RNA, 23 nt, artificial
  Chemically synthesized
uuacuucuucucaguccuguaga

SEQ ID NO: 24178 - RNA, 23 nt, artificial
  Chemically synthesized
uaugcaagccucuagucuuccuu

SEQ ID NO: 24179 - RNA, 23 nt, artificial
  Chemically synthesized
agaguuccucauguagaccuugu

SEQ ID NO: 24180 - RNA, 23 nt, artificial
  Chemically synthesized
gaguuccucauguagaccuugug

SEQ ID NO: 24181 - RNA, 23 nt, artificial
  Chemically synthesized
aguuccucauguagaccuugugg

SEQ ID NO: 24182 - RNA, 23 nt, artificial
  Chemically synthesized
guuccucauguagaccuuguggc

SEQ ID NO: 24183 - RNA, 23 nt, artificial
  Chemically synthesized
uuccucauguagaccuuguggcu

SEQ ID NO: 24184 - RNA, 23 nt, artificial
  Chemically synthesized
gaguuggacuugccuguuaaaug

SEQ ID NO: 24185 - RNA, 23 nt, artificial
  Chemically synthesized
aguuggacuugccuguuaaaugg

SEQ ID NO: 24186 - RNA, 23 nt, artificial
  Chemically synthesized
guuggacuugccuguuaaauggg

SEQ ID NO: 24187 - RNA, 23 nt, artificial
  Chemically synthesized
uuggacuugccuguuaaaugggc

SEQ ID NO: 24188 - RNA, 23 nt, artificial
  Chemically synthesized
uggacuugccuguuaaaugggcc

SEQ ID NO: 24189 - RNA, 23 nt, artificial
  Chemically synthesized
ugguucaugucuucuuacuugac

SEQ ID NO: 24190 - RNA, 23 nt, artificial
  Chemically synthesized
gguucaugucuucuuacuugacc

SEQ ID NO: 24191 - RNA, 23 nt, artificial
  Chemically synthesized
guucaugucuucuuacuugaccu

SEQ ID NO: 24192 - RNA, 23 nt, artificial
  Chemically synthesized
uucaugucuucuuacuugaccuc

SEQ ID NO: 24193 - RNA, 23 nt, artificial
  Chemically synthesized
auacuucacuccagaaagcagga

SEQ ID NO: 24194 - RNA, 23 nt, artificial
  Chemically synthesized
uacuucacuccagaaagcaggac

SEQ ID NO: 24195 - RNA, 23 nt, artificial
  Chemically synthesized
acuucacuccagaaagcaggaca

SEQ ID NO: 24196 - RNA, 23 nt, artificial
  Chemically synthesized
cuucacuccagaaagcaggacaa

SEQ ID NO: 24197 - RNA, 23 nt, artificial
  Chemically synthesized
agcccagaguucuauguucuucc

SEQ ID NO: 24198 - RNA, 23 nt, artificial
  Chemically synthesized
gcccagaguucuauguucuuccg

SEQ ID NO: 24199 - RNA, 23 nt, artificial
  Chemically synthesized
cccagaguucuauguucuuccgu

SEQ ID NO: 24200 - RNA, 23 nt, artificial
  Chemically synthesized
ccagaguucuauguucuuccguc

SEQ ID NO: 24201 - RNA, 23 nt, artificial
  Chemically synthesized
cagaguucuauguucuuccguca

SEQ ID NO: 24202 - RNA, 23 nt, artificial
  Chemically synthesized
aacaucauuaguagcugacaauc

SEQ ID NO: 24203 - RNA, 23 nt, artificial
  Chemically synthesized
acaucauuaguagcugacaauca

SEQ ID NO: 24204 - RNA, 23 nt, artificial
  Chemically synthesized
caucauuaguagcugacaaucaa

SEQ ID NO: 24205 - RNA, 23 nt, artificial
  Chemically synthesized
aucauuaguagcugacaaucaau

SEQ ID NO: 24206 - RNA, 23 nt, artificial
  Chemically synthesized
aacaucucucuugcuuaucuguu

SEQ ID NO: 24207 - RNA, 23 nt, artificial
  Chemically synthesized
acaucucucuugcuuaucuguua

SEQ ID NO: 24208 - RNA, 23 nt, artificial
  Chemically synthesized
caucucucuugcuuaucuguuag

SEQ ID NO: 24209 - RNA, 23 nt, artificial
  Chemically synthesized
aucucucuugcuuaucuguuagu

SEQ ID NO: 24210 - RNA, 23 nt, artificial
  Chemically synthesized
ucucucuugcuuaucuguuaguu

SEQ ID NO: 24211 - RNA, 23 nt, artificial
  Chemically synthesized
uuccauaggugucuucccauucc

SEQ ID NO: 24212 - RNA, 23 nt, artificial
  Chemically synthesized
uccauaggugucuucccauucca

SEQ ID NO: 24213 - RNA, 23 nt, artificial
  Chemically synthesized
ccauaggugucuucccauuccag

SEQ ID NO: 24214 - RNA, 23 nt, artificial
  Chemically synthesized
cauaggugucuucccauuccaga

SEQ ID NO: 24215 - RNA, 23 nt, artificial
  Chemically synthesized
auaggugucuucccauuccagag

SEQ ID NO: 24216 - RNA, 23 nt, artificial
  Chemically synthesized
gccucuagucuuccuuuuccauc

SEQ ID NO: 24217 - RNA, 23 nt, artificial
  Chemically synthesized
cuuacuugaccucaaaugcaugu

SEQ ID NO: 24218 - RNA, 23 nt, artificial
  Chemically synthesized
uuacuugaccucaaaugcaugua

SEQ ID NO: 24219 - RNA, 23 nt, artificial
  Chemically synthesized
cuucacaauaucuacauucucuc

SEQ ID NO: 24220 - RNA, 23 nt, artificial
  Chemically synthesized
uucacaauaucuacauucucucu

SEQ ID NO: 24221 - RNA, 23 nt, artificial
  Chemically synthesized
ucacaauaucuacauucucucuu

SEQ ID NO: 24222 - RNA, 23 nt, artificial
  Chemically synthesized
cacaauaucuacauucucucuuu

SEQ ID NO: 24223 - RNA, 23 nt, artificial
  Chemically synthesized
acaauaucuacauucucucuuua

SEQ ID NO: 24224 - RNA, 23 nt, artificial
  Chemically synthesized
ucucuuagagcuuauauaagccg

SEQ ID NO: 24225 - RNA, 23 nt, artificial
  Chemically synthesized
cucuuagagcuuauauaagccga

SEQ ID NO: 24226 - RNA, 23 nt, artificial
  Chemically synthesized
ucuuagagcuuauauaagccgaa

SEQ ID NO: 24227 - RNA, 23 nt, artificial
  Chemically synthesized
cuuagagcuuauauaagccgaaa

SEQ ID NO: 24228 - RNA, 23 nt, artificial
  Chemically synthesized
uuagagcuuauauaagccgaaaa

SEQ ID NO: 24229 - RNA, 23 nt, artificial
  Chemically synthesized
gcagguuguugcaagauugaccc

SEQ ID NO: 24230 - RNA, 23 nt, artificial
  Chemically synthesized
cagguuguugcaagauugacccc

SEQ ID NO: 24231 - RNA, 23 nt, artificial
  Chemically synthesized
agguuguugcaagauugaccccg

SEQ ID NO: 24232 - RNA, 23 nt, artificial
  Chemically synthesized
gguuguugcaagauugaccccgg

SEQ ID NO: 24233 - RNA, 23 nt, artificial
  Chemically synthesized
guuguugcaagauugaccccgga

SEQ ID NO: 24234 - RNA, 23 nt, artificial
  Chemically synthesized
uuagcuuauuaugcaagccucua

SEQ ID NO: 24235 - RNA, 23 nt, artificial
  Chemically synthesized
uguacuucacaauaucuacauuc

SEQ ID NO: 24236 - RNA, 23 nt, artificial
  Chemically synthesized
guacuucacaauaucuacauucu

SEQ ID NO: 24237 - RNA, 23 nt, artificial
  Chemically synthesized
uacuucacaauaucuacauucuc

SEQ ID NO: 24238 - RNA, 23 nt, artificial
  Chemically synthesized
acuucacaauaucuacauucucu

SEQ ID NO: 24239 - RNA, 23 nt, artificial
  Chemically synthesized
agucuuccuuuuccaucccuuaa

SEQ ID NO: 24240 - RNA, 23 nt, artificial
  Chemically synthesized
gucuuccuuuuccaucccuuaaa

SEQ ID NO: 24241 - RNA, 23 nt, artificial
  Chemically synthesized
ucuuccuuuuccaucccuuaaau

SEQ ID NO: 24242 - RNA, 23 nt, artificial
  Chemically synthesized
cuuccuuuuccaucccuuaaauc

SEQ ID NO: 24243 - RNA, 23 nt, artificial
  Chemically synthesized
uagguggaagagcugaaacaucc

SEQ ID NO: 24244 - RNA, 23 nt, artificial
  Chemically synthesized
agguggaagagcugaaacauccc

SEQ ID NO: 24245 - RNA, 23 nt, artificial
  Chemically synthesized
gguggaagagcugaaacaucccc

SEQ ID NO: 24246 - RNA, 23 nt, artificial
  Chemically synthesized
guggaagagcugaaacaucccca

SEQ ID NO: 24247 - RNA, 23 nt, artificial
  Chemically synthesized
uggaagagcugaaacauccccag

SEQ ID NO: 24248 - RNA, 23 nt, artificial
  Chemically synthesized
uccucagcuccuuuuuuucaggg

SEQ ID NO: 24249 - RNA, 23 nt, artificial
  Chemically synthesized
uagaagugaagaugcugccagug

SEQ ID NO: 24250 - RNA, 23 nt, artificial
  Chemically synthesized
gugguucccucucuucuucaggg

SEQ ID NO: 24251 - RNA, 23 nt, artificial
  Chemically synthesized
ugguucccucucuucuucagggg

SEQ ID NO: 24252 - RNA, 23 nt, artificial
  Chemically synthesized
gguucccucucuucuucaggggu

SEQ ID NO: 24253 - RNA, 23 nt, artificial
  Chemically synthesized
guucccucucuucuucaggggug

SEQ ID NO: 24254 - RNA, 23 nt, artificial
  Chemically synthesized
uucccucucuucuucaggggugg

SEQ ID NO: 24255 - RNA, 23 nt, artificial
  Chemically synthesized
auacuuagaguuccucauguaga

SEQ ID NO: 24256 - RNA, 23 nt, artificial
  Chemically synthesized
uacuuagaguuccucauguagac

SEQ ID NO: 24257 - RNA, 23 nt, artificial
  Chemically synthesized
acuuagaguuccucauguagacc

SEQ ID NO: 24258 - RNA, 23 nt, artificial
  Chemically synthesized
cuuagaguuccucauguagaccu

SEQ ID NO: 24259 - RNA, 23 nt, artificial
  Chemically synthesized
uuagaguuccucauguagaccuu

SEQ ID NO: 24260 - RNA, 23 nt, artificial
  Chemically synthesized
uacuucuucucaguccuguagag

SEQ ID NO: 24261 - RNA, 23 nt, artificial
  Chemically synthesized
cauauuccuccauuugucuggcu

SEQ ID NO: 24262 - RNA, 23 nt, artificial
  Chemically synthesized
auauuccuccauuugucuggcuc

SEQ ID NO: 24263 - RNA, 23 nt, artificial
  Chemically synthesized
gcucauaaacauuaggugaguug

SEQ ID NO: 24264 - RNA, 23 nt, artificial
  Chemically synthesized
cucauaaacauuaggugaguuga

SEQ ID NO: 24265 - RNA, 23 nt, artificial
  Chemically synthesized
ucauaaacauuaggugaguugag

SEQ ID NO: 24266 - RNA, 23 nt, artificial
  Chemically synthesized
cauaaacauuaggugaguugagg

SEQ ID NO: 24267 - RNA, 23 nt, artificial
  Chemically synthesized
auaaacauuaggugaguugagga

SEQ ID NO: 24268 - RNA, 23 nt, artificial
  Chemically synthesized
ggcauuggccucuuucagccucu

SEQ ID NO: 24269 - RNA, 23 nt, artificial
  Chemically synthesized
gcauuggccucuuucagccucuu

SEQ ID NO: 24270 - RNA, 23 nt, artificial
  Chemically synthesized
cauuggccucuuucagccucuuu

SEQ ID NO: 24271 - RNA, 23 nt, artificial
  Chemically synthesized
auuggccucuuucagccucuuua

SEQ ID NO: 24272 - RNA, 23 nt, artificial
  Chemically synthesized
uuggccucuuucagccucuuuag

SEQ ID NO: 24273 - RNA, 23 nt, artificial
  Chemically synthesized
acugguaagauugaacacugccc

SEQ ID NO: 24274 - RNA, 23 nt, artificial
  Chemically synthesized
cugguaagauugaacacugcccc

SEQ ID NO: 24275 - RNA, 23 nt, artificial
  Chemically synthesized
ugguaagauugaacacugccccc

SEQ ID NO: 24276 - RNA, 23 nt, artificial
  Chemically synthesized
gguaagauugaacacugccccca

SEQ ID NO: 24277 - RNA, 23 nt, artificial
  Chemically synthesized
guaagauugaacacugcccccag

SEQ ID NO: 24278 - RNA, 23 nt, artificial
  Chemically synthesized
ccccuccaucaucaccagauccu

SEQ ID NO: 24279 - RNA, 23 nt, artificial
  Chemically synthesized
cccuccaucaucaccagauccug

SEQ ID NO: 24280 - RNA, 23 nt, artificial
  Chemically synthesized
ccuccaucaucaccagauccugg

SEQ ID NO: 24281 - RNA, 23 nt, artificial
  Chemically synthesized
cuccaucaucaccagauccuggg

SEQ ID NO: 24282 - RNA, 23 nt, artificial
  Chemically synthesized
uccaucaucaccagauccugggg

SEQ ID NO: 24283 - RNA, 23 nt, artificial
  Chemically synthesized
cuuauagaguuuccauagcuaag

SEQ ID NO: 24284 - RNA, 23 nt, artificial
  Chemically synthesized
uuauagaguuuccauagcuaagg

SEQ ID NO: 24285 - RNA, 23 nt, artificial
  Chemically synthesized
uauagaguuuccauagcuaaggg

SEQ ID NO: 24286 - RNA, 23 nt, artificial
  Chemically synthesized
auagaguuuccauagcuaaggga

SEQ ID NO: 24287 - RNA, 23 nt, artificial
  Chemically synthesized
uagaguuuccauagcuaagggaa

SEQ ID NO: 24288 - RNA, 23 nt, artificial
  Chemically synthesized
gagauuccucaaaauugaccaga

SEQ ID NO: 24289 - RNA, 23 nt, artificial
  Chemically synthesized
agauuccucaaaauugaccagag

SEQ ID NO: 24290 - RNA, 23 nt, artificial
  Chemically synthesized
gauuccucaaaauugaccagaga

SEQ ID NO: 24291 - RNA, 23 nt, artificial
  Chemically synthesized
auuccucaaaauugaccagagag

SEQ ID NO: 24292 - RNA, 23 nt, artificial
  Chemically synthesized
uuccucaaaauugaccagagaga

SEQ ID NO: 24293 - RNA, 23 nt, artificial
  Chemically synthesized
acucucaggcacuaagaugagug

SEQ ID NO: 24294 - RNA, 23 nt, artificial
  Chemically synthesized
cucucaggcacuaagaugagugu

SEQ ID NO: 24295 - RNA, 23 nt, artificial
  Chemically synthesized
ucucaggcacuaagaugagugua

SEQ ID NO: 24296 - RNA, 23 nt, artificial
  Chemically synthesized
cucaggcacuaagaugaguguag

SEQ ID NO: 24297 - RNA, 23 nt, artificial
  Chemically synthesized
ucaggcacuaagaugaguguaga

SEQ ID NO: 24298 - RNA, 23 nt, artificial
  Chemically synthesized
gcccaguuucauugaucacaagg

SEQ ID NO: 24299 - RNA, 23 nt, artificial
  Chemically synthesized
cccaguuucauugaucacaaggc

SEQ ID NO: 24300 - RNA, 23 nt, artificial
  Chemically synthesized
augcaagccucuagucuuccuuu

SEQ ID NO: 24301 - RNA, 23 nt, artificial
  Chemically synthesized
ugcaagccucuagucuuccuuuu

SEQ ID NO: 24302 - RNA, 23 nt, artificial
  Chemically synthesized
aaaauugaccagagagagcucag

SEQ ID NO: 24303 - RNA, 23 nt, artificial
  Chemically synthesized
aaauugaccagagagagcucaga

SEQ ID NO: 24304 - RNA, 23 nt, artificial
  Chemically synthesized
aauugaccagagagagcucagau

SEQ ID NO: 24305 - RNA, 23 nt, artificial
  Chemically synthesized
auugaccagagagagcucagaua

SEQ ID NO: 24306 - RNA, 23 nt, artificial
  Chemically synthesized
uugaccagagagagcucagauac

SEQ ID NO: 24307 - RNA, 23 nt, artificial
  Chemically synthesized
gcacuauuagaguugauugucag

SEQ ID NO: 24308 - RNA, 23 nt, artificial
  Chemically synthesized
cacuauuagaguugauugucagg

SEQ ID NO: 24309 - RNA, 23 nt, artificial
  Chemically synthesized
uaggaaugaaaugaguccccaaa

SEQ ID NO: 24310 - RNA, 23 nt, artificial
  Chemically synthesized
ccacuuuccucagcuccuuuuuu

SEQ ID NO: 24311 - RNA, 23 nt, artificial
  Chemically synthesized
uaaauccucaggucacaaccaug

SEQ ID NO: 24312 - RNA, 23 nt, artificial
  Chemically synthesized
aaauccucaggucacaaccaugu

SEQ ID NO: 24313 - RNA, 23 nt, artificial
  Chemically synthesized
aauccucaggucacaaccaugua

SEQ ID NO: 24314 - RNA, 23 nt, artificial
  Chemically synthesized
auccucaggucacaaccauguau

SEQ ID NO: 24315 - RNA, 23 nt, artificial
  Chemically synthesized
uccucaggucacaaccauguauc

SEQ ID NO: 24316 - RNA, 23 nt, artificial
  Chemically synthesized
ucuugaccaaaugcaacccauau

SEQ ID NO: 24317 - RNA, 23 nt, artificial
  Chemically synthesized
gugcugugguucccucucuucuu

SEQ ID NO: 24318 - RNA, 23 nt, artificial
  Chemically synthesized
ugcugugguucccucucuucuuc

SEQ ID NO: 24319 - RNA, 23 nt, artificial
  Chemically synthesized
gcugugguucccucucuucuuca

SEQ ID NO: 24320 - RNA, 23 nt, artificial
  Chemically synthesized
cugugguucccucucuucuucag

SEQ ID NO: 24321 - RNA, 23 nt, artificial
  Chemically synthesized
ugugguucccucucuucuucagg

SEQ ID NO: 24322 - RNA, 23 nt, artificial
  Chemically synthesized
aauauguacuucacaauaucuac

SEQ ID NO: 24323 - RNA, 23 nt, artificial
  Chemically synthesized
auauguacuucacaauaucuaca

SEQ ID NO: 24324 - RNA, 23 nt, artificial
  Chemically synthesized
uauguacuucacaauaucuacau

SEQ ID NO: 24325 - RNA, 23 nt, artificial
  Chemically synthesized
auguacuucacaauaucuacauu

SEQ ID NO: 24326 - RNA, 23 nt, artificial
  Chemically synthesized
aauaucuacauucucucuuuagu

SEQ ID NO: 24327 - RNA, 23 nt, artificial
  Chemically synthesized
auaucuacauucucucuuuaguc

SEQ ID NO: 24328 - RNA, 23 nt, artificial
  Chemically synthesized
uaucuacauucucucuuuaguca

SEQ ID NO: 24329 - RNA, 23 nt, artificial
  Chemically synthesized
aucuacauucucucuuuagucau

SEQ ID NO: 24330 - RNA, 23 nt, artificial
  Chemically synthesized
ucuacauucucucuuuagucaua

SEQ ID NO: 24331 - RNA, 23 nt, artificial
  Chemically synthesized
caugcuucucccucuucacaugg

SEQ ID NO: 24332 - RNA, 23 nt, artificial
  Chemically synthesized
augcuucucccucuucacauggc

SEQ ID NO: 24333 - RNA, 23 nt, artificial
  Chemically synthesized
ugcuucucccucuucacauggca

SEQ ID NO: 24334 - RNA, 23 nt, artificial
  Chemically synthesized
agacauuuugaacccuguggucu

SEQ ID NO: 24335 - RNA, 23 nt, artificial
  Chemically synthesized
aaugaucagcacugguaagauug

SEQ ID NO: 24336 - RNA, 23 nt, artificial
  Chemically synthesized
augaucagcacugguaagauuga

SEQ ID NO: 24337 - RNA, 23 nt, artificial
  Chemically synthesized
ugaucagcacugguaagauugaa

SEQ ID NO: 24338 - RNA, 23 nt, artificial
  Chemically synthesized
gaucagcacugguaagauugaac

SEQ ID NO: 24339 - RNA, 23 nt, artificial
  Chemically synthesized
aucagcacugguaagauugaaca

SEQ ID NO: 24340 - RNA, 23 nt, artificial
  Chemically synthesized
uauuuuccuaauauguacuucac

SEQ ID NO: 24341 - RNA, 23 nt, artificial
  Chemically synthesized
auuuuccuaauauguacuucaca

SEQ ID NO: 24342 - RNA, 23 nt, artificial
  Chemically synthesized
uuuuccuaauauguacuucacaa

SEQ ID NO: 24343 - RNA, 23 nt, artificial
  Chemically synthesized
uuuccuaauauguacuucacaau

SEQ ID NO: 24344 - RNA, 23 nt, artificial
  Chemically synthesized
uuccuaauauguacuucacaaua

SEQ ID NO: 24345 - RNA, 23 nt, artificial
  Chemically synthesized
aaaugggccacuuuccucagcuc

SEQ ID NO: 24346 - RNA, 23 nt, artificial
  Chemically synthesized
cuccauuugucuggcucauaaac

SEQ ID NO: 24347 - RNA, 23 nt, artificial
  Chemically synthesized
uauuccuccauuugucuggcuca

SEQ ID NO: 24348 - RNA, 23 nt, artificial
  Chemically synthesized
auuccuccauuugucuggcucau

SEQ ID NO: 24349 - RNA, 23 nt, artificial
  Chemically synthesized
uuccuccauuugucuggcucaua

SEQ ID NO: 24350 - RNA, 23 nt, artificial
  Chemically synthesized
uccuccauuugucuggcucauaa

SEQ ID NO: 24351 - RNA, 23 nt, artificial
  Chemically synthesized
cucucuugcuuaucuguuaguuu

SEQ ID NO: 24352 - RNA, 23 nt, artificial
  Chemically synthesized
gcuucucccucuucacauggcag

SEQ ID NO: 24353 - RNA, 23 nt, artificial
  Chemically synthesized
cuucucccucuucacauggcagc

SEQ ID NO: 24354 - RNA, 23 nt, artificial
  Chemically synthesized
uucucccucuucacauggcagcc

SEQ ID NO: 24355 - RNA, 23 nt, artificial
  Chemically synthesized
uugaucacaaggccacccuucuu

SEQ ID NO: 24356 - RNA, 23 nt, artificial
  Chemically synthesized
ggaccuugaguuggacuugccug

SEQ ID NO: 24357 - RNA, 23 nt, artificial
  Chemically synthesized
uucauuucacaaaaaugcacauc

SEQ ID NO: 24358 - RNA, 23 nt, artificial
  Chemically synthesized
gguaauugaagggcugcugcaug

SEQ ID NO: 24359 - RNA, 23 nt, artificial
  Chemically synthesized
guaauugaagggcugcugcaugg

SEQ ID NO: 24360 - RNA, 23 nt, artificial
  Chemically synthesized
uaauugaagggcugcugcauggc

SEQ ID NO: 24361 - RNA, 23 nt, artificial
  Chemically synthesized
aauugaagggcugcugcauggca

SEQ ID NO: 24362 - RNA, 23 nt, artificial
  Chemically synthesized
auugaagggcugcugcauggcag

SEQ ID NO: 24363 - RNA, 23 nt, artificial
  Chemically synthesized
cuccuucuguagguggaagagcu

SEQ ID NO: 24364 - RNA, 23 nt, artificial
  Chemically synthesized
uccuucuguagguggaagagcug

SEQ ID NO: 24365 - RNA, 23 nt, artificial
  Chemically synthesized
ccuucuguagguggaagagcuga

SEQ ID NO: 24366 - RNA, 23 nt, artificial
  Chemically synthesized
cuucuguagguggaagagcugaa

SEQ ID NO: 24367 - RNA, 23 nt, artificial
  Chemically synthesized
uucuguagguggaagagcugaaa

SEQ ID NO: 24368 - RNA, 23 nt, artificial
  Chemically synthesized
uauaaaugaucagcacugguaag

SEQ ID NO: 24369 - RNA, 23 nt, artificial
  Chemically synthesized
cugaauacaacauucucggugcc

SEQ ID NO: 24370 - RNA, 23 nt, artificial
  Chemically synthesized
ccaucaucaccagauccugggga

SEQ ID NO: 24371 - RNA, 23 nt, artificial
  Chemically synthesized
caucaucaccagauccuggggau

SEQ ID NO: 24372 - RNA, 23 nt, artificial
  Chemically synthesized
aucaucaccagauccuggggaua

SEQ ID NO: 24373 - RNA, 23 nt, artificial
  Chemically synthesized
ggccucuuucagccucuuuagcu

SEQ ID NO: 24374 - RNA, 23 nt, artificial
  Chemically synthesized
gccucuuucagccucuuuagcuu

SEQ ID NO: 24375 - RNA, 23 nt, artificial
  Chemically synthesized
ccucuuucagccucuuuagcuua

SEQ ID NO: 24376 - RNA, 23 nt, artificial
  Chemically synthesized
cucuuucagccucuuuagcuuau

SEQ ID NO: 24377 - RNA, 23 nt, artificial
  Chemically synthesized
ucuuucagccucuuuagcuuauu

SEQ ID NO: 24378 - RNA, 23 nt, artificial
  Chemically synthesized
ugugcugugguucccucucuucu

SEQ ID NO: 24379 - RNA, 23 nt, artificial
  Chemically synthesized
augcuguguuaggaaugaaauga

SEQ ID NO: 24380 - RNA, 23 nt, artificial
  Chemically synthesized
ugcuguguuaggaaugaaaugag

SEQ ID NO: 24381 - RNA, 23 nt, artificial
  Chemically synthesized
gcuguguuaggaaugaaaugagu

SEQ ID NO: 24382 - RNA, 23 nt, artificial
  Chemically synthesized
cuguguuaggaaugaaaugaguc

SEQ ID NO: 24383 - RNA, 23 nt, artificial
  Chemically synthesized
ugaguuggacuugccuguuaaau

SEQ ID NO: 24384 - RNA, 23 nt, artificial
  Chemically synthesized
ccuaaauacucucaggcacuaag

SEQ ID NO: 24385 - RNA, 23 nt, artificial
  Chemically synthesized
cuaaauacucucaggcacuaaga

SEQ ID NO: 24386 - RNA, 23 nt, artificial
  Chemically synthesized
uaaauacucucaggcacuaagau

SEQ ID NO: 24387 - RNA, 23 nt, artificial
  Chemically synthesized
aaauacucucaggcacuaagaug

SEQ ID NO: 24388 - RNA, 23 nt, artificial
  Chemically synthesized
aauacucucaggcacuaagauga

SEQ ID NO: 24389 - RNA, 23 nt, artificial
  Chemically synthesized
uaaaagguguccuuuucaaucug

SEQ ID NO: 24390 - RNA, 23 nt, artificial
  Chemically synthesized
aaaagguguccuuuucaaucugc

SEQ ID NO: 24391 - RNA, 23 nt, artificial
  Chemically synthesized
aaagguguccuuuucaaucugcc

SEQ ID NO: 24392 - RNA, 23 nt, artificial
  Chemically synthesized
uccaucccuuaaauccucagguc

SEQ ID NO: 24393 - RNA, 23 nt, artificial
  Chemically synthesized
ccaucccuuaaauccucagguca

SEQ ID NO: 24394 - RNA, 23 nt, artificial
  Chemically synthesized
caucccuuaaauccucaggucac

SEQ ID NO: 24395 - RNA, 23 nt, artificial
  Chemically synthesized
aucccuuaaauccucaggucaca

SEQ ID NO: 24396 - RNA, 23 nt, artificial
  Chemically synthesized
aagaugaugcugugugcaucugg

SEQ ID NO: 24397 - RNA, 23 nt, artificial
  Chemically synthesized
agaugaugcugugugcaucuggc

SEQ ID NO: 24398 - RNA, 23 nt, artificial
  Chemically synthesized
gaugaugcugugugcaucuggcu

SEQ ID NO: 24399 - RNA, 23 nt, artificial
  Chemically synthesized
augaugcugugugcaucuggcug

SEQ ID NO: 24400 - RNA, 23 nt, artificial
  Chemically synthesized
ugaugcugugugcaucuggcugg

SEQ ID NO: 24401 - RNA, 23 nt, artificial
  Chemically synthesized
agaaucauaauggaaagaauccc

SEQ ID NO: 24402 - RNA, 23 nt, artificial
  Chemically synthesized
gaaucauaauggaaagaauccca

SEQ ID NO: 24403 - RNA, 23 nt, artificial
  Chemically synthesized
aaucauaauggaaagaaucccaa

SEQ ID NO: 24404 - RNA, 23 nt, artificial
  Chemically synthesized
aucauaauggaaagaaucccaaa

SEQ ID NO: 24405 - RNA, 23 nt, artificial
  Chemically synthesized
ucauaauggaaagaaucccaaag

SEQ ID NO: 24406 - RNA, 23 nt, artificial
  Chemically synthesized
agaguucuauguucuuccgucau

SEQ ID NO: 24407 - RNA, 23 nt, artificial
  Chemically synthesized
gaguucuauguucuuccgucaua

SEQ ID NO: 24408 - RNA, 23 nt, artificial
  Chemically synthesized
aguucuauguucuuccgucauau

SEQ ID NO: 24409 - RNA, 23 nt, artificial
  Chemically synthesized
ucggaguucugccagcuccuucu

SEQ ID NO: 24410 - RNA, 23 nt, artificial
  Chemically synthesized
cggaguucugccagcuccuucug

SEQ ID NO: 24411 - RNA, 23 nt, artificial
  Chemically synthesized
ggaguucugccagcuccuucugu

SEQ ID NO: 24412 - RNA, 23 nt, artificial
  Chemically synthesized
gaguucugccagcuccuucugua

SEQ ID NO: 24413 - RNA, 23 nt, artificial
  Chemically synthesized
aguucugccagcuccuucuguag

SEQ ID NO: 24414 - RNA, 23 nt, artificial
  Chemically synthesized
auuccauaggugucuucccauuc

SEQ ID NO: 24415 - RNA, 23 nt, artificial
  Chemically synthesized
ggaauauacaaaguacagcccag

SEQ ID NO: 24416 - RNA, 23 nt, artificial
  Chemically synthesized
gaauauacaaaguacagcccagu

SEQ ID NO: 24417 - RNA, 23 nt, artificial
  Chemically synthesized
aauauacaaaguacagcccaguu

SEQ ID NO: 24418 - RNA, 23 nt, artificial
  Chemically synthesized
auauacaaaguacagcccaguuu

SEQ ID NO: 24419 - RNA, 23 nt, artificial
  Chemically synthesized
uauacaaaguacagcccaguuuc

SEQ ID NO: 24420 - RNA, 23 nt, artificial
  Chemically synthesized
cccuuaaauccucaggucacaac

SEQ ID NO: 24421 - RNA, 23 nt, artificial
  Chemically synthesized
ccuuaaauccucaggucacaacc

SEQ ID NO: 24422 - RNA, 23 nt, artificial
  Chemically synthesized
cuuaaauccucaggucacaacca

SEQ ID NO: 24423 - RNA, 23 nt, artificial
  Chemically synthesized
uuaaauccucaggucacaaccau

SEQ ID NO: 24424 - RNA, 23 nt, artificial
  Chemically synthesized
agcuacagacauuuugaacccug

SEQ ID NO: 24425 - RNA, 23 nt, artificial
  Chemically synthesized
gcuacagacauuuugaacccugu

SEQ ID NO: 24426 - RNA, 23 nt, artificial
  Chemically synthesized
cuacagacauuuugaacccugug

SEQ ID NO: 24427 - RNA, 23 nt, artificial
  Chemically synthesized
uacagacauuuugaacccugugg

SEQ ID NO: 24428 - RNA, 23 nt, artificial
  Chemically synthesized
acagacauuuugaacccuguggu

SEQ ID NO: 24429 - RNA, 23 nt, artificial
  Chemically synthesized
ggacuugccuguuaaaugggcca

SEQ ID NO: 24430 - RNA, 23 nt, artificial
  Chemically synthesized
gacuugccuguuaaaugggccac

SEQ ID NO: 24431 - RNA, 23 nt, artificial
  Chemically synthesized
acuugccuguuaaaugggccacu

SEQ ID NO: 24432 - RNA, 23 nt, artificial
  Chemically synthesized
cuugccuguuaaaugggccacuu

SEQ ID NO: 24433 - RNA, 23 nt, artificial
  Chemically synthesized
uugccuguuaaaugggccacuuu

SEQ ID NO: 24434 - RNA, 23 nt, artificial
  Chemically synthesized
acccuguugcugacugcucaaga

SEQ ID NO: 24435 - RNA, 23 nt, artificial
  Chemically synthesized
cccuguugcugacugcucaagag

SEQ ID NO: 24436 - RNA, 23 nt, artificial
  Chemically synthesized
uccucauguagaccuuguggcuc

SEQ ID NO: 24437 - RNA, 23 nt, artificial
  Chemically synthesized
caauaucuacauucucucuuuag

SEQ ID NO: 24438 - RNA, 23 nt, artificial
  Chemically synthesized
aguagcugacaaucaaugauuuu

SEQ ID NO: 24439 - RNA, 23 nt, artificial
  Chemically synthesized
guagcugacaaucaaugauuuuu

SEQ ID NO: 24440 - RNA, 23 nt, artificial
  Chemically synthesized
uagcugacaaucaaugauuuuua

SEQ ID NO: 24441 - RNA, 23 nt, artificial
  Chemically synthesized
cuacaauugcacuggaaauacac

SEQ ID NO: 24442 - RNA, 23 nt, artificial
  Chemically synthesized
uacaauugcacuggaaauacaca

SEQ ID NO: 24443 - RNA, 23 nt, artificial
  Chemically synthesized
ugauugucaggaagcauucaaaa

SEQ ID NO: 24444 - RNA, 23 nt, artificial
  Chemically synthesized
gauugucaggaagcauucaaaau

SEQ ID NO: 24445 - RNA, 23 nt, artificial
  Chemically synthesized
guucuauguucuuccgucauauu

SEQ ID NO: 24446 - RNA, 23 nt, artificial
  Chemically synthesized
cuucucuuagagcuuauauaagc

SEQ ID NO: 24447 - RNA, 23 nt, artificial
  Chemically synthesized
uucucuuagagcuuauauaagcc

SEQ ID NO: 24448 - RNA, 23 nt, artificial
  Chemically synthesized
agugcaguagcucaucaucuucc

SEQ ID NO: 24449 - RNA, 23 nt, artificial
  Chemically synthesized
gugcaguagcucaucaucuuccc

SEQ ID NO: 24450 - RNA, 23 nt, artificial
  Chemically synthesized
ugcaguagcucaucaucuucccc

SEQ ID NO: 24451 - RNA, 23 nt, artificial
  Chemically synthesized
gcaguagcucaucaucuuccccu

SEQ ID NO: 24452 - RNA, 23 nt, artificial
  Chemically synthesized
caguagcucaucaucuuccccuc

SEQ ID NO: 24453 - RNA, 23 nt, artificial
  Chemically synthesized
ugcacuggaaauacacaugcugu

SEQ ID NO: 24454 - RNA, 23 nt, artificial
  Chemically synthesized
gcacuggaaauacacaugcugug

SEQ ID NO: 24455 - RNA, 23 nt, artificial
  Chemically synthesized
cacuggaaauacacaugcugugu

SEQ ID NO: 24456 - RNA, 23 nt, artificial
  Chemically synthesized
acuggaaauacacaugcuguguu

SEQ ID NO: 24457 - RNA, 23 nt, artificial
  Chemically synthesized
augcauguaagaagacccucacu

SEQ ID NO: 24458 - RNA, 23 nt, artificial
  Chemically synthesized
gaguugaggagcuacagacauuu

SEQ ID NO: 24459 - RNA, 23 nt, artificial
  Chemically synthesized
aguugaggagcuacagacauuuu

SEQ ID NO: 24460 - RNA, 23 nt, artificial
  Chemically synthesized
guugaggagcuacagacauuuug

SEQ ID NO: 24461 - RNA, 23 nt, artificial
  Chemically synthesized
uugaggagcuacagacauuuuga

SEQ ID NO: 24462 - RNA, 23 nt, artificial
  Chemically synthesized
ugaggagcuacagacauuuugaa

SEQ ID NO: 24463 - RNA, 23 nt, artificial
  Chemically synthesized
gaccaaaugcaacccauauuuuc

SEQ ID NO: 24464 - RNA, 23 nt, artificial
  Chemically synthesized
ugucuucuuacuugaccucaaau

SEQ ID NO: 24465 - RNA, 23 nt, artificial
  Chemically synthesized
aagguguccuuuucaaucugccu

SEQ ID NO: 24466 - RNA, 23 nt, artificial
  Chemically synthesized
agguguccuuuucaaucugccua

SEQ ID NO: 24467 - RNA, 23 nt, artificial
  Chemically synthesized
gguguccuuuucaaucugccuaa

SEQ ID NO: 24468 - RNA, 23 nt, artificial
  Chemically synthesized
guguccuuuucaaucugccuaaa

SEQ ID NO: 24469 - RNA, 23 nt, artificial
  Chemically synthesized
uguccuuuucaaucugccuaaau

SEQ ID NO: 24470 - RNA, 23 nt, artificial
  Chemically synthesized
cugccuaaauacucucaggcacu

SEQ ID NO: 24471 - RNA, 23 nt, artificial
  Chemically synthesized
ugccuaaauacucucaggcacua

SEQ ID NO: 24472 - RNA, 23 nt, artificial
  Chemically synthesized
aggauaugcauuuagaagugaag

SEQ ID NO: 24473 - RNA, 23 nt, artificial
  Chemically synthesized
ggauaugcauuuagaagugaaga

SEQ ID NO: 24474 - RNA, 23 nt, artificial
  Chemically synthesized
gauaugcauuuagaagugaagau

SEQ ID NO: 24475 - RNA, 23 nt, artificial
  Chemically synthesized
auaugcauuuagaagugaagaug

SEQ ID NO: 24476 - RNA, 23 nt, artificial
  Chemically synthesized
uaugcauuuagaagugaagaugc

SEQ ID NO: 24477 - RNA, 23 nt, artificial
  Chemically synthesized
aaccagaaccaugaaaaacauca

SEQ ID NO: 24478 - RNA, 23 nt, artificial
  Chemically synthesized
accagaaccaugaaaaacaucac

SEQ ID NO: 24479 - RNA, 23 nt, artificial
  Chemically synthesized
ccagaaccaugaaaaacaucaca

SEQ ID NO: 24480 - RNA, 23 nt, artificial
  Chemically synthesized
cagaaccaugaaaaacaucacaa

SEQ ID NO: 24481 - RNA, 23 nt, artificial
  Chemically synthesized
agaaccaugaaaaacaucacaag

SEQ ID NO: 24482 - RNA, 23 nt, artificial
  Chemically synthesized
uggaaagaaucccaaagugcuuc

SEQ ID NO: 24483 - RNA, 23 nt, artificial
  Chemically synthesized
ggaaagaaucccaaagugcuucu

SEQ ID NO: 24484 - RNA, 23 nt, artificial
  Chemically synthesized
gaaagaaucccaaagugcuucuc

SEQ ID NO: 24485 - RNA, 23 nt, artificial
  Chemically synthesized
aaagaaucccaaagugcuucucu

SEQ ID NO: 24486 - RNA, 23 nt, artificial
  Chemically synthesized
aagaaucccaaagugcuucucuu

SEQ ID NO: 24487 - RNA, 23 nt, artificial
  Chemically synthesized
ucccuuaaauccucaggucacaa

SEQ ID NO: 24488 - RNA, 23 nt, artificial
  Chemically synthesized
augcaacccauauuuuccuaaua

SEQ ID NO: 24489 - RNA, 23 nt, artificial
  Chemically synthesized
ggggauacuuagaguuccucaug

SEQ ID NO: 24490 - RNA, 23 nt, artificial
  Chemically synthesized
gggauacuuagaguuccucaugu

SEQ ID NO: 24491 - RNA, 23 nt, artificial
  Chemically synthesized
ggauacuuagaguuccucaugua

SEQ ID NO: 24492 - RNA, 23 nt, artificial
  Chemically synthesized
gauacuuagaguuccucauguag

SEQ ID NO: 24493 - RNA, 23 nt, artificial
  Chemically synthesized
aaccauguaucugaaagacaguc

SEQ ID NO: 24494 - RNA, 23 nt, artificial
  Chemically synthesized
ugucuggcucauaaacauuaggu

SEQ ID NO: 24495 - RNA, 23 nt, artificial
  Chemically synthesized
gucuggcucauaaacauuaggug

SEQ ID NO: 24496 - RNA, 23 nt, artificial
  Chemically synthesized
ucuggcucauaaacauuagguga

SEQ ID NO: 24497 - RNA, 23 nt, artificial
  Chemically synthesized
cuggcucauaaacauuaggugag

SEQ ID NO: 24498 - RNA, 23 nt, artificial
  Chemically synthesized
uggcucauaaacauuaggugagu

SEQ ID NO: 24499 - RNA, 23 nt, artificial
  Chemically synthesized
ucaugucuucuuacuugaccuca

SEQ ID NO: 24500 - RNA, 23 nt, artificial
  Chemically synthesized
caugucuucuuacuugaccucaa

SEQ ID NO: 24501 - RNA, 23 nt, artificial
  Chemically synthesized
augucuucuuacuugaccucaaa

SEQ ID NO: 24502 - RNA, 23 nt, artificial
  Chemically synthesized
gaauacaacauucucggugccug

SEQ ID NO: 24503 - RNA, 23 nt, artificial
  Chemically synthesized
aauacaacauucucggugccugu

SEQ ID NO: 24504 - RNA, 23 nt, artificial
  Chemically synthesized
auacaacauucucggugccugua

SEQ ID NO: 24505 - RNA, 23 nt, artificial
  Chemically synthesized
uacaacauucucggugccuguaa

SEQ ID NO: 24506 - RNA, 23 nt, artificial
  Chemically synthesized
acaacauucucggugccuguaac

SEQ ID NO: 24507 - RNA, 23 nt, artificial
  Chemically synthesized
cuugaccaaaugcaacccauauu

SEQ ID NO: 24508 - RNA, 23 nt, artificial
  Chemically synthesized
uugaccaaaugcaacccauauuu

SEQ ID NO: 24509 - RNA, 23 nt, artificial
  Chemically synthesized
ugaauacaacauucucggugccu

SEQ ID NO: 24510 - RNA, 23 nt, artificial
  Chemically synthesized
ugaucacaaggccacccuucuua

SEQ ID NO: 24511 - RNA, 23 nt, artificial
  Chemically synthesized
gaucacaaggccacccuucuuau

SEQ ID NO: 24512 - RNA, 23 nt, artificial
  Chemically synthesized
aucacaaggccacccuucuuaua

SEQ ID NO: 24513 - RNA, 23 nt, artificial
  Chemically synthesized
ucugagauuccucaaaauugacc

SEQ ID NO: 24514 - RNA, 23 nt, artificial
  Chemically synthesized
cugagauuccucaaaauugacca

SEQ ID NO: 24515 - RNA, 23 nt, artificial
  Chemically synthesized
ugagauuccucaaaauugaccag

SEQ ID NO: 24516 - RNA, 23 nt, artificial
  Chemically synthesized
ggaaauacacaugcuguguuagg

SEQ ID NO: 24517 - RNA, 23 nt, artificial
  Chemically synthesized
gaaauacacaugcuguguuagga

SEQ ID NO: 24518 - RNA, 23 nt, artificial
  Chemically synthesized
aaauacacaugcuguguuaggaa

SEQ ID NO: 24519 - RNA, 23 nt, artificial
  Chemically synthesized
aauacacaugcuguguuaggaau

SEQ ID NO: 24520 - RNA, 23 nt, artificial
  Chemically synthesized
auacacaugcuguguuaggaaug

SEQ ID NO: 24521 - RNA, 23 nt, artificial
  Chemically synthesized
gaggagcuacagacauuuugaac

SEQ ID NO: 24522 - RNA, 23 nt, artificial
  Chemically synthesized
aggagcuacagacauuuugaacc

SEQ ID NO: 24523 - RNA, 23 nt, artificial
  Chemically synthesized
ccucagcuccuuuuuuucagggg

SEQ ID NO: 24524 - RNA, 23 nt, artificial
  Chemically synthesized
cucagcuccuuuuuuucaggggg

SEQ ID NO: 24525 - RNA, 23 nt, artificial
  Chemically synthesized
ucagcuccuuuuuuucagggggu

SEQ ID NO: 24526 - RNA, 23 nt, artificial
  Chemically synthesized
ucacaaaaaugcacaucuacaua

SEQ ID NO: 24527 - RNA, 23 nt, artificial
  Chemically synthesized
cacaaaaaugcacaucuacauaa

SEQ ID NO: 24528 - RNA, 23 nt, artificial
  Chemically synthesized
acaaaaaugcacaucuacauaaa

SEQ ID NO: 24529 - RNA, 23 nt, artificial
  Chemically synthesized
cugguagacucucggaguucugc

SEQ ID NO: 24530 - RNA, 23 nt, artificial
  Chemically synthesized
ugguagacucucggaguucugcc

SEQ ID NO: 24531 - RNA, 23 nt, artificial
  Chemically synthesized
gguagacucucggaguucugcca

SEQ ID NO: 24532 - RNA, 23 nt, artificial
  Chemically synthesized
guagacucucggaguucugccag

SEQ ID NO: 24533 - RNA, 23 nt, artificial
  Chemically synthesized
uagacucucggaguucugccagc

SEQ ID NO: 24534 - RNA, 23 nt, artificial
  Chemically synthesized
cuacauucucucuuuagucauac

SEQ ID NO: 24535 - RNA, 23 nt, artificial
  Chemically synthesized
cuuucagccucuuuagcuuauua

SEQ ID NO: 24536 - RNA, 23 nt, artificial
  Chemically synthesized
uuucagccucuuuagcuuauuau

SEQ ID NO: 24537 - RNA, 23 nt, artificial
  Chemically synthesized
uaagcacuauuagaguugauugu

SEQ ID NO: 24538 - RNA, 23 nt, artificial
  Chemically synthesized
aagcacuauuagaguugauuguc

SEQ ID NO: 24539 - RNA, 23 nt, artificial
  Chemically synthesized
agcacuauuagaguugauuguca

SEQ ID NO: 24540 - RNA, 23 nt, artificial
  Chemically synthesized
cuuccgucauauuccuccauuug

SEQ ID NO: 24541 - RNA, 23 nt, artificial
  Chemically synthesized
uuccgucauauuccuccauuugu

SEQ ID NO: 24542 - RNA, 23 nt, artificial
  Chemically synthesized
caaaguacagcccaguuucauug

SEQ ID NO: 24543 - RNA, 23 nt, artificial
  Chemically synthesized
aaaguacagcccaguuucauuga

SEQ ID NO: 24544 - RNA, 23 nt, artificial
  Chemically synthesized
aaguacagcccaguuucauugau

SEQ ID NO: 24545 - RNA, 23 nt, artificial
  Chemically synthesized
aguacagcccaguuucauugauc

SEQ ID NO: 24546 - RNA, 23 nt, artificial
  Chemically synthesized
guacagcccaguuucauugauca

SEQ ID NO: 24547 - RNA, 23 nt, artificial
  Chemically synthesized
uacauucucucuuuagucauaca

SEQ ID NO: 24548 - RNA, 23 nt, artificial
  Chemically synthesized
ggcaaccagaaccaugaaaaaca

SEQ ID NO: 24549 - RNA, 23 nt, artificial
  Chemically synthesized
gcaaccagaaccaugaaaaacau

SEQ ID NO: 24550 - RNA, 23 nt, artificial
  Chemically synthesized
caaccagaaccaugaaaaacauc

SEQ ID NO: 24551 - RNA, 23 nt, artificial
  Chemically synthesized
acccuguggucucaagguccacu

SEQ ID NO: 24552 - RNA, 23 nt, artificial
  Chemically synthesized
cccuguggucucaagguccacuu

SEQ ID NO: 24553 - RNA, 23 nt, artificial
  Chemically synthesized
ccuguggucucaagguccacuug

SEQ ID NO: 24554 - RNA, 23 nt, artificial
  Chemically synthesized
cuguggucucaagguccacuugg

SEQ ID NO: 24555 - RNA, 23 nt, artificial
  Chemically synthesized
uguggucucaagguccacuuggu

SEQ ID NO: 24556 - RNA, 23 nt, artificial
  Chemically synthesized
uaaacauuaggugaguugaggag

SEQ ID NO: 24557 - RNA, 23 nt, artificial
  Chemically synthesized
gaacaccugguagcugcuuuuuc

SEQ ID NO: 24558 - RNA, 23 nt, artificial
  Chemically synthesized
aacaccugguagcugcuuuuuca

SEQ ID NO: 24559 - RNA, 23 nt, artificial
  Chemically synthesized
acaccugguagcugcuuuuucau

SEQ ID NO: 24560 - RNA, 23 nt, artificial
  Chemically synthesized
caccugguagcugcuuuuucaug

SEQ ID NO: 24561 - RNA, 23 nt, artificial
  Chemically synthesized
accugguagcugcuuuuucaugc

SEQ ID NO: 24562 - RNA, 23 nt, artificial
  Chemically synthesized
acuucuucucaguccuguagagg

SEQ ID NO: 24563 - RNA, 23 nt, artificial
  Chemically synthesized
ugaguugaggagcuacagacauu

SEQ ID NO: 24564 - RNA, 23 nt, artificial
  Chemically synthesized
uugucuggcucauaaacauuagg

SEQ ID NO: 24565 - RNA, 23 nt, artificial
  Chemically synthesized
ccagagagagcucagauacguug

SEQ ID NO: 24566 - RNA, 23 nt, artificial
  Chemically synthesized
cagagagagcucagauacguuga

SEQ ID NO: 24567 - RNA, 23 nt, artificial
  Chemically synthesized
agagagagcucagauacguugac

SEQ ID NO: 24568 - RNA, 23 nt, artificial
  Chemically synthesized
gagagagcucagauacguugaca

SEQ ID NO: 24569 - RNA, 23 nt, artificial
  Chemically synthesized
agagagcucagauacguugacau

SEQ ID NO: 24570 - RNA, 23 nt, artificial
  Chemically synthesized
aacauucucggugccuguaacaa

SEQ ID NO: 24571 - RNA, 23 nt, artificial
  Chemically synthesized
acauucucggugccuguaacaaa

SEQ ID NO: 24572 - RNA, 23 nt, artificial
  Chemically synthesized
cauucucggugccuguaacaaag

SEQ ID NO: 24573 - RNA, 23 nt, artificial
  Chemically synthesized
auucucggugccuguaacaaaga

SEQ ID NO: 24574 - RNA, 23 nt, artificial
  Chemically synthesized
uucucggugccuguaacaaagaa

SEQ ID NO: 24575 - RNA, 23 nt, artificial
  Chemically synthesized
aggcacuaagaugaguguagaac

SEQ ID NO: 24576 - RNA, 23 nt, artificial
  Chemically synthesized
ggcacuaagaugaguguagaaca

SEQ ID NO: 24577 - RNA, 23 nt, artificial
  Chemically synthesized
gcacuaagaugaguguagaacac

SEQ ID NO: 24578 - RNA, 23 nt, artificial
  Chemically synthesized
cacuaagaugaguguagaacacc

SEQ ID NO: 24579 - RNA, 23 nt, artificial
  Chemically synthesized
acuaagaugaguguagaacaccu

SEQ ID NO: 24580 - RNA, 23 nt, artificial
  Chemically synthesized
ccagcaaacgguuuuacuucuuc

SEQ ID NO: 24581 - RNA, 23 nt, artificial
  Chemically synthesized
auacucucaggcacuaagaugag

SEQ ID NO: 24582 - RNA, 23 nt, artificial
  Chemically synthesized
uacucucaggcacuaagaugagu

SEQ ID NO: 24583 - RNA, 23 nt, artificial
  Chemically synthesized
auucaaaaucuugaccaaaugca

SEQ ID NO: 24584 - RNA, 23 nt, artificial
  Chemically synthesized
uucaaaaucuugaccaaaugcaa

SEQ ID NO: 24585 - RNA, 23 nt, artificial
  Chemically synthesized
ucaaaaucuugaccaaaugcaac

SEQ ID NO: 24586 - RNA, 23 nt, artificial
  Chemically synthesized
uuccauagcuaagggaaacaccu

SEQ ID NO: 24587 - RNA, 23 nt, artificial
  Chemically synthesized
uccauagcuaagggaaacaccuc

SEQ ID NO: 24588 - RNA, 23 nt, artificial
  Chemically synthesized
aagaaucauaauggaaagaaucc

SEQ ID NO: 24589 - RNA, 23 nt, artificial
  Chemically synthesized
uccuaauauguacuucacaauau

SEQ ID NO: 24590 - RNA, 23 nt, artificial
  Chemically synthesized
cauaauggaaagaaucccaaagu

SEQ ID NO: 24591 - RNA, 23 nt, artificial
  Chemically synthesized
auaauggaaagaaucccaaagug

SEQ ID NO: 24592 - RNA, 23 nt, artificial
  Chemically synthesized
uaauggaaagaaucccaaagugc

SEQ ID NO: 24593 - RNA, 23 nt, artificial
  Chemically synthesized
aauggaaagaaucccaaagugcu

SEQ ID NO: 24594 - RNA, 23 nt, artificial
  Chemically synthesized
cucaaaauugaccagagagagcu

SEQ ID NO: 24595 - RNA, 23 nt, artificial
  Chemically synthesized
ucaaaauugaccagagagagcuc

SEQ ID NO: 24596 - RNA, 23 nt, artificial
  Chemically synthesized
caaaauugaccagagagagcuca

SEQ ID NO: 24597 - RNA, 23 nt, artificial
  Chemically synthesized
uggaauauacaaaguacagccca

SEQ ID NO: 24598 - RNA, 23 nt, artificial
  Chemically synthesized
uccucaaaauugaccagagagag

SEQ ID NO: 24599 - RNA, 23 nt, artificial
  Chemically synthesized
ccucaaaauugaccagagagagc

SEQ ID NO: 24600 - RNA, 23 nt, artificial
  Chemically synthesized
acguugacauauaaaugaucagc

SEQ ID NO: 24601 - RNA, 23 nt, artificial
  Chemically synthesized
cguugacauauaaaugaucagca

SEQ ID NO: 24602 - RNA, 23 nt, artificial
  Chemically synthesized
guugacauauaaaugaucagcac

SEQ ID NO: 24603 - RNA, 23 nt, artificial
  Chemically synthesized
uugacauauaaaugaucagcacu

SEQ ID NO: 24604 - RNA, 23 nt, artificial
  Chemically synthesized
ccugugcugugguucccucucuu

SEQ ID NO: 24605 - RNA, 23 nt, artificial
  Chemically synthesized
cugugcugugguucccucucuuc

SEQ ID NO: 24606 - RNA, 23 nt, artificial
  Chemically synthesized
caugaaaaacaucacaaggagac

SEQ ID NO: 24607 - RNA, 23 nt, artificial
  Chemically synthesized
augaaaaacaucacaaggagaca

SEQ ID NO: 24608 - RNA, 23 nt, artificial
  Chemically synthesized
ugaaaaacaucacaaggagacac

SEQ ID NO: 24609 - RNA, 23 nt, artificial
  Chemically synthesized
gaaaaacaucacaaggagacaca

SEQ ID NO: 24610 - RNA, 23 nt, artificial
  Chemically synthesized
aaaaacaucacaaggagacacag

SEQ ID NO: 24611 - RNA, 23 nt, artificial
  Chemically synthesized
auacaaaguacagcccaguuuca

SEQ ID NO: 24612 - RNA, 23 nt, artificial
  Chemically synthesized
uaggugucuucccauuccagagg

SEQ ID NO: 24613 - RNA, 23 nt, artificial
  Chemically synthesized
cacccuucuuauacuucacucca

SEQ ID NO: 24614 - RNA, 23 nt, artificial
  Chemically synthesized
guccacuugguucaugucuucuu

SEQ ID NO: 24615 - RNA, 23 nt, artificial
  Chemically synthesized
uccacuugguucaugucuucuua

SEQ ID NO: 24616 - RNA, 23 nt, artificial
  Chemically synthesized
uuuggaauauacaaaguacagcc

SEQ ID NO: 24617 - RNA, 23 nt, artificial
  Chemically synthesized
uuggaauauacaaaguacagccc

SEQ ID NO: 24618 - RNA, 23 nt, artificial
  Chemically synthesized
uacaaaguacagcccaguuucau

SEQ ID NO: 24619 - RNA, 23 nt, artificial
  Chemically synthesized
ucggugccuguaacaaagaauca

SEQ ID NO: 24620 - RNA, 23 nt, artificial
  Chemically synthesized
cggugccuguaacaaagaaucau

SEQ ID NO: 24621 - RNA, 23 nt, artificial
  Chemically synthesized
ggugccuguaacaaagaaucaua

SEQ ID NO: 24622 - RNA, 23 nt, artificial
  Chemically synthesized
gugccuguaacaaagaaucauaa

SEQ ID NO: 24623 - RNA, 23 nt, artificial
  Chemically synthesized
ugccuguaacaaagaaucauaau

SEQ ID NO: 24624 - RNA, 23 nt, artificial
  Chemically synthesized
cuggaucucucuuauagaguuuc

SEQ ID NO: 24625 - RNA, 23 nt, artificial
  Chemically synthesized
uggaucucucuuauagaguuucc

SEQ ID NO: 24626 - RNA, 23 nt, artificial
  Chemically synthesized
ggaucucucuuauagaguuucca

SEQ ID NO: 24627 - RNA, 23 nt, artificial
  Chemically synthesized
gaucucucuuauagaguuuccau

SEQ ID NO: 24628 - RNA, 23 nt, artificial
  Chemically synthesized
aucucucuuauagaguuuccaua

SEQ ID NO: 24629 - RNA, 23 nt, artificial
  Chemically synthesized
ucuguagguggaagagcugaaac

SEQ ID NO: 24630 - RNA, 23 nt, artificial
  Chemically synthesized
cuguagguggaagagcugaaaca

SEQ ID NO: 24631 - RNA, 23 nt, artificial
  Chemically synthesized
uguagguggaagagcugaaacau

SEQ ID NO: 24632 - RNA, 23 nt, artificial
  Chemically synthesized
guagguggaagagcugaaacauc

SEQ ID NO: 24633 - RNA, 23 nt, artificial
  Chemically synthesized
ggagcuacagacauuuugaaccc

SEQ ID NO: 24634 - RNA, 23 nt, artificial
  Chemically synthesized
gagcuacagacauuuugaacccu

SEQ ID NO: 24635 - RNA, 23 nt, artificial
  Chemically synthesized
agaguuuccauagcuaagggaaa

SEQ ID NO: 24636 - RNA, 23 nt, artificial
  Chemically synthesized
ucagccucuuuagcuuauuaugc

SEQ ID NO: 24637 - RNA, 23 nt, artificial
  Chemically synthesized
cagccucuuuagcuuauuaugca

SEQ ID NO: 24638 - RNA, 23 nt, artificial
  Chemically synthesized
agccucuuuagcuuauuaugcaa

SEQ ID NO: 24639 - RNA, 23 nt, artificial
  Chemically synthesized
gccucuuuagcuuauuaugcaag

SEQ ID NO: 24640 - RNA, 23 nt, artificial
  Chemically synthesized
aaccaugaaaaacaucacaagga

SEQ ID NO: 24641 - RNA, 23 nt, artificial
  Chemically synthesized
accaugaaaaacaucacaaggag

SEQ ID NO: 24642 - RNA, 23 nt, artificial
  Chemically synthesized
ccaugaaaaacaucacaaggaga

SEQ ID NO: 24643 - RNA, 23 nt, artificial
  Chemically synthesized
gggcauuggccucuuucagccuc

SEQ ID NO: 24644 - RNA, 23 nt, artificial
  Chemically synthesized
ugugugcaucuggcugguagacu

SEQ ID NO: 24645 - RNA, 23 nt, artificial
  Chemically synthesized
gugugcaucuggcugguagacuc

SEQ ID NO: 24646 - RNA, 23 nt, artificial
  Chemically synthesized
ugugcaucuggcugguagacucu

SEQ ID NO: 24647 - RNA, 23 nt, artificial
  Chemically synthesized
gugcaucuggcugguagacucuc

SEQ ID NO: 24648 - RNA, 23 nt, artificial
  Chemically synthesized
ugcaucuggcugguagacucucg

SEQ ID NO: 24649 - RNA, 23 nt, artificial
  Chemically synthesized
agcacugguaagauugaacacug

SEQ ID NO: 24650 - RNA, 23 nt, artificial
  Chemically synthesized
gcacugguaagauugaacacugc

SEQ ID NO: 24651 - RNA, 23 nt, artificial
  Chemically synthesized
cacugguaagauugaacacugcc

SEQ ID NO: 24652 - RNA, 23 nt, artificial
  Chemically synthesized
agaaucccaaagugcuucucuua

SEQ ID NO: 24653 - RNA, 23 nt, artificial
  Chemically synthesized
gaaucccaaagugcuucucuuag

SEQ ID NO: 24654 - RNA, 23 nt, artificial
  Chemically synthesized
aaucccaaagugcuucucuuaga

SEQ ID NO: 24655 - RNA, 23 nt, artificial
  Chemically synthesized
ccucaaaugcauguaagaagacc

SEQ ID NO: 24656 - RNA, 23 nt, artificial
  Chemically synthesized
acuuuggaauauacaaaguacag

SEQ ID NO: 24657 - RNA, 23 nt, artificial
  Chemically synthesized
cuuuggaauauacaaaguacagc

SEQ ID NO: 24658 - RNA, 23 nt, artificial
  Chemically synthesized
ggucucaagguccacuugguuca

SEQ ID NO: 24659 - RNA, 23 nt, artificial
  Chemically synthesized
gucucaagguccacuugguucau

SEQ ID NO: 24660 - RNA, 23 nt, artificial
  Chemically synthesized
ucucaagguccacuugguucaug

SEQ ID NO: 24661 - RNA, 23 nt, artificial
  Chemically synthesized
cucaagguccacuugguucaugu

SEQ ID NO: 24662 - RNA, 23 nt, artificial
  Chemically synthesized
ucaagguccacuugguucauguc

SEQ ID NO: 24663 - RNA, 23 nt, artificial
  Chemically synthesized
aguagcucaucaucuuccccucc

SEQ ID NO: 24664 - RNA, 23 nt, artificial
  Chemically synthesized
agccucuagucuuccuuuuccau

SEQ ID NO: 24665 - RNA, 23 nt, artificial
  Chemically synthesized
ccugguagcugcuuuuucaugcu

SEQ ID NO: 24666 - RNA, 23 nt, artificial
  Chemically synthesized
cugguagcugcuuuuucaugcuu

SEQ ID NO: 24667 - RNA, 23 nt, artificial
  Chemically synthesized
ugguagcugcuuuuucaugcuuc

SEQ ID NO: 24668 - RNA, 23 nt, artificial
  Chemically synthesized
gguagcugcuuuuucaugcuucu

SEQ ID NO: 24669 - RNA, 23 nt, artificial
  Chemically synthesized
uagagcuuauauaagccgaaaaa

SEQ ID NO: 24670 - RNA, 23 nt, artificial
  Chemically synthesized
caagccucuagucuuccuuuucc

SEQ ID NO: 24671 - RNA, 23 nt, artificial
  Chemically synthesized
aagccucuagucuuccuuuucca

SEQ ID NO: 24672 - RNA, 23 nt, artificial
  Chemically synthesized
ggguaauugaagggcugcugcau

SEQ ID NO: 24673 - RNA, 23 nt, artificial
  Chemically synthesized
uagaguuccucauguagaccuug

SEQ ID NO: 24674 - RNA, 23 nt, artificial
  Chemically synthesized
gcucaggauaugcauuuagaagu

SEQ ID NO: 24675 - RNA, 23 nt, artificial
  Chemically synthesized
cucaggauaugcauuuagaagug

SEQ ID NO: 24676 - RNA, 23 nt, artificial
  Chemically synthesized
ucaggauaugcauuuagaaguga

SEQ ID NO: 24677 - RNA, 23 nt, artificial
  Chemically synthesized
caggauaugcauuuagaagugaa

SEQ ID NO: 24678 - RNA, 23 nt, artificial
  Chemically synthesized
caacauucucggugccuguaaca

SEQ ID NO: 24679 - RNA, 23 nt, artificial
  Chemically synthesized
ugaccucaaaugcauguaagaag

SEQ ID NO: 24680 - RNA, 23 nt, artificial
  Chemically synthesized
gaccucaaaugcauguaagaaga

SEQ ID NO: 24681 - RNA, 23 nt, artificial
  Chemically synthesized
accucaaaugcauguaagaagac

SEQ ID NO: 24682 - RNA, 23 nt, artificial
  Chemically synthesized
guagcugcuuuuucaugcuucuc

SEQ ID NO: 24683 - RNA, 23 nt, artificial
  Chemically synthesized
cagcacugguaagauugaacacu

SEQ ID NO: 24684 - RNA, 23 nt, artificial
  Chemically synthesized
ucucggugccuguaacaaagaau

SEQ ID NO: 24685 - RNA, 23 nt, artificial
  Chemically synthesized
cucggugccuguaacaaagaauc

SEQ ID NO: 24686 - RNA, 23 nt, artificial
  Chemically synthesized
uacuugaccucaaaugcauguaa

SEQ ID NO: 24687 - RNA, 23 nt, artificial
  Chemically synthesized
acuugaccucaaaugcauguaag

SEQ ID NO: 24688 - RNA, 23 nt, artificial
  Chemically synthesized
cuugaccucaaaugcauguaaga

SEQ ID NO: 24689 - RNA, 23 nt, artificial
  Chemically synthesized
uugaccucaaaugcauguaagaa

SEQ ID NO: 24690 - RNA, 23 nt, artificial
  Chemically synthesized
aggugucuucccauuccagaggc

SEQ ID NO: 24691 - RNA, 23 nt, artificial
  Chemically synthesized
ggugucuucccauuccagaggca

SEQ ID NO: 24692 - RNA, 23 nt, artificial
  Chemically synthesized
gugucuucccauuccagaggcau

SEQ ID NO: 24693 - RNA, 23 nt, artificial
  Chemically synthesized
ggcauggaccuugaguuggacuu

SEQ ID NO: 24694 - RNA, 23 nt, artificial
  Chemically synthesized
gcauggaccuugaguuggacuug

SEQ ID NO: 24695 - RNA, 23 nt, artificial
  Chemically synthesized
cauggaccuugaguuggacuugc

SEQ ID NO: 24696 - RNA, 23 nt, artificial
  Chemically synthesized
auggaccuugaguuggacuugcc

SEQ ID NO: 24697 - RNA, 23 nt, artificial
  Chemically synthesized
uggaccuugaguuggacuugccu

SEQ ID NO: 24698 - RNA, 23 nt, artificial
  Chemically synthesized
accaaggcaaccagaaccaugaa

SEQ ID NO: 24699 - RNA, 23 nt, artificial
  Chemically synthesized
ccaaggcaaccagaaccaugaaa

SEQ ID NO: 24700 - RNA, 23 nt, artificial
  Chemically synthesized
caaggcaaccagaaccaugaaaa

SEQ ID NO: 24701 - RNA, 23 nt, artificial
  Chemically synthesized
aaggcaaccagaaccaugaaaaa

SEQ ID NO: 24702 - RNA, 23 nt, artificial
  Chemically synthesized
ccgauggcucaggauaugcauuu

SEQ ID NO: 24703 - RNA, 23 nt, artificial
  Chemically synthesized
cgauggcucaggauaugcauuua

SEQ ID NO: 24704 - RNA, 23 nt, artificial
  Chemically synthesized
gauggcucaggauaugcauuuag

SEQ ID NO: 24705 - RNA, 23 nt, artificial
  Chemically synthesized
auggcucaggauaugcauuuaga

SEQ ID NO: 24706 - RNA, 23 nt, artificial
  Chemically synthesized
uggcucaggauaugcauuuagaa

SEQ ID NO: 24707 - RNA, 23 nt, artificial
  Chemically synthesized
guccuuuucaaucugccuaaaua

SEQ ID NO: 24708 - RNA, 23 nt, artificial
  Chemically synthesized
ggcaagcuggaucucucuuauag

SEQ ID NO: 24709 - RNA, 23 nt, artificial
  Chemically synthesized
gcaagcuggaucucucuuauaga

SEQ ID NO: 24710 - RNA, 23 nt, artificial
  Chemically synthesized
caagcuggaucucucuuauagag

SEQ ID NO: 24711 - RNA, 23 nt, artificial
  Chemically synthesized
aagcuggaucucucuuauagagu

SEQ ID NO: 24712 - RNA, 23 nt, artificial
  Chemically synthesized
agcuggaucucucuuauagaguu

SEQ ID NO: 24713 - RNA, 23 nt, artificial
  Chemically synthesized
ugaguguagaacaccugguagcu

SEQ ID NO: 24714 - RNA, 23 nt, artificial
  Chemically synthesized
cagacauuuugaacccugugguc

SEQ ID NO: 24715 - RNA, 23 nt, artificial
  Chemically synthesized
aucccaaagugcuucucuuagag

SEQ ID NO: 24716 - RNA, 23 nt, artificial
  Chemically synthesized
ggaaaacaucauuaguagcugac

SEQ ID NO: 24717 - RNA, 23 nt, artificial
  Chemically synthesized
gaaaacaucauuaguagcugaca

SEQ ID NO: 24718 - RNA, 23 nt, artificial
  Chemically synthesized
aaaacaucauuaguagcugacaa

SEQ ID NO: 24719 - RNA, 23 nt, artificial
  Chemically synthesized
aaacaucauuaguagcugacaau

SEQ ID NO: 24720 - RNA, 23 nt, artificial
  Chemically synthesized
ccccaaaacaucucucuugcuua

SEQ ID NO: 24721 - RNA, 23 nt, artificial
  Chemically synthesized
cccaaaacaucucucuugcuuau

SEQ ID NO: 24722 - RNA, 23 nt, artificial
  Chemically synthesized
ccaaaacaucucucuugcuuauc

SEQ ID NO: 24723 - RNA, 23 nt, artificial
  Chemically synthesized
caaaacaucucucuugcuuaucu

SEQ ID NO: 24724 - RNA, 23 nt, artificial
  Chemically synthesized
aaaacaucucucuugcuuaucug

SEQ ID NO: 24725 - RNA, 23 nt, artificial
  Chemically synthesized
auaaaugaucagcacugguaaga

SEQ ID NO: 24726 - RNA, 23 nt, artificial
  Chemically synthesized
uaaaugaucagcacugguaagau

SEQ ID NO: 24727 - RNA, 23 nt, artificial
  Chemically synthesized
acaaaguacagcccaguuucauu

SEQ ID NO: 24728 - RNA, 23 nt, artificial
  Chemically synthesized
gcccaauccuaccaaggcaacca

SEQ ID NO: 24729 - RNA, 23 nt, artificial
  Chemically synthesized
cccaauccuaccaaggcaaccag

SEQ ID NO: 24730 - RNA, 23 nt, artificial
  Chemically synthesized
ccaauccuaccaaggcaaccaga

SEQ ID NO: 24731 - RNA, 23 nt, artificial
  Chemically synthesized
caauccuaccaaggcaaccagaa

SEQ ID NO: 24732 - RNA, 23 nt, artificial
  Chemically synthesized
aauccuaccaaggcaaccagaac

SEQ ID NO: 24733 - RNA, 23 nt, artificial
  Chemically synthesized
cagaaagcaggacaauuccauag

SEQ ID NO: 24734 - RNA, 23 nt, artificial
  Chemically synthesized
agaaagcaggacaauuccauagg

SEQ ID NO: 24735 - RNA, 23 nt, artificial
  Chemically synthesized
gaaagcaggacaauuccauaggu

SEQ ID NO: 24736 - RNA, 23 nt, artificial
  Chemically synthesized
aaagcaggacaauuccauaggug

SEQ ID NO: 24737 - RNA, 23 nt, artificial
  Chemically synthesized
aagcaggacaauuccauaggugu

SEQ ID NO: 24738 - RNA, 23 nt, artificial
  Chemically synthesized
ccgaaaaacgucugagauuccuc

SEQ ID NO: 24739 - RNA, 23 nt, artificial
  Chemically synthesized
cgaaaaacgucugagauuccuca

SEQ ID NO: 24740 - RNA, 23 nt, artificial
  Chemically synthesized
gaaaaacgucugagauuccucaa

SEQ ID NO: 24741 - RNA, 23 nt, artificial
  Chemically synthesized
aaaaacgucugagauuccucaaa

SEQ ID NO: 24742 - RNA, 23 nt, artificial
  Chemically synthesized
aaaacgucugagauuccucaaaa

SEQ ID NO: 24743 - RNA, 23 nt, artificial
  Chemically synthesized
aguuucaccgauggcucaggaua

SEQ ID NO: 24744 - RNA, 23 nt, artificial
  Chemically synthesized
guuucaccgauggcucaggauau

SEQ ID NO: 24745 - RNA, 23 nt, artificial
  Chemically synthesized
uuucaccgauggcucaggauaug

SEQ ID NO: 24746 - RNA, 23 nt, artificial
  Chemically synthesized
uucaccgauggcucaggauaugc

SEQ ID NO: 24747 - RNA, 23 nt, artificial
  Chemically synthesized
ucaccgauggcucaggauaugca

SEQ ID NO: 24748 - RNA, 23 nt, artificial
  Chemically synthesized
ccuguagaggcugaggugucaag

SEQ ID NO: 24749 - RNA, 23 nt, artificial
  Chemically synthesized
cuguagaggcugaggugucaagg

SEQ ID NO: 24750 - RNA, 23 nt, artificial
  Chemically synthesized
uguagaggcugaggugucaagga

SEQ ID NO: 24751 - RNA, 23 nt, artificial
  Chemically synthesized
guagaggcugaggugucaaggac

SEQ ID NO: 24752 - RNA, 23 nt, artificial
  Chemically synthesized
uagaggcugaggugucaaggacg

SEQ ID NO: 24753 - RNA, 23 nt, artificial
  Chemically synthesized
ggucacaaccauguaucugaaag

SEQ ID NO: 24754 - RNA, 23 nt, artificial
  Chemically synthesized
gucacaaccauguaucugaaaga

SEQ ID NO: 24755 - RNA, 23 nt, artificial
  Chemically synthesized
ucacaaccauguaucugaaagac

SEQ ID NO: 24756 - RNA, 23 nt, artificial
  Chemically synthesized
cacaaccauguaucugaaagaca

SEQ ID NO: 24757 - RNA, 23 nt, artificial
  Chemically synthesized
acaaccauguaucugaaagacag

SEQ ID NO: 24758 - RNA, 23 nt, artificial
  Chemically synthesized
aaacaucucucuugcuuaucugu

SEQ ID NO: 24759 - RNA, 23 nt, artificial
  Chemically synthesized
cuccaaagaugaugcugugugca

SEQ ID NO: 24760 - RNA, 23 nt, artificial
  Chemically synthesized
uccaaagaugaugcugugugcau

SEQ ID NO: 24761 - RNA, 23 nt, artificial
  Chemically synthesized
ccaaagaugaugcugugugcauc

SEQ ID NO: 24762 - RNA, 23 nt, artificial
  Chemically synthesized
uccccuccaucaucaccagaucc

SEQ ID NO: 24763 - RNA, 23 nt, artificial
  Chemically synthesized
ucccaaagugcuucucuuagagc

SEQ ID NO: 24764 - RNA, 23 nt, artificial
  Chemically synthesized
ggccacuuuccucagcuccuuuu

SEQ ID NO: 24765 - RNA, 23 nt, artificial
  Chemically synthesized
gccacuuuccucagcuccuuuuu

SEQ ID NO: 24766 - RNA, 23 nt, artificial
  Chemically synthesized
guaagaagacccucacugaauac

SEQ ID NO: 24767 - RNA, 23 nt, artificial
  Chemically synthesized
uaagaagacccucacugaauaca

SEQ ID NO: 24768 - RNA, 23 nt, artificial
  Chemically synthesized
ccacccuucuuauacuucacucc

SEQ ID NO: 24769 - RNA, 23 nt, artificial
  Chemically synthesized
ucacaaggccacccuucuuauac

SEQ ID NO: 24770 - RNA, 23 nt, artificial
  Chemically synthesized
cacaaggccacccuucuuauacu

SEQ ID NO: 24771 - RNA, 23 nt, artificial
  Chemically synthesized
acaaggccacccuucuuauacuu

SEQ ID NO: 24772 - RNA, 23 nt, artificial
  Chemically synthesized
caaggccacccuucuuauacuuc

SEQ ID NO: 24773 - RNA, 23 nt, artificial
  Chemically synthesized
aaggccacccuucuuauacuuca

SEQ ID NO: 24774 - RNA, 23 nt, artificial
  Chemically synthesized
cuggaaauacacaugcuguguua

SEQ ID NO: 24775 - RNA, 23 nt, artificial
  Chemically synthesized
uggaaauacacaugcuguguuag

SEQ ID NO: 24776 - RNA, 23 nt, artificial
  Chemically synthesized
cacaugcuguguuaggaaugaaa

SEQ ID NO: 24777 - RNA, 23 nt, artificial
  Chemically synthesized
acaugcuguguuaggaaugaaau

SEQ ID NO: 24778 - RNA, 23 nt, artificial
  Chemically synthesized
caugcuguguuaggaaugaaaug

SEQ ID NO: 24779 - RNA, 23 nt, artificial
  Chemically synthesized
uuaggugaguugaggagcuacag

SEQ ID NO: 24780 - RNA, 23 nt, artificial
  Chemically synthesized
gacccucacugaauacaacauuc

SEQ ID NO: 24781 - RNA, 23 nt, artificial
  Chemically synthesized
acccucacugaauacaacauucu

SEQ ID NO: 24782 - RNA, 23 nt, artificial
  Chemically synthesized
cccucacugaauacaacauucuc

SEQ ID NO: 24783 - RNA, 23 nt, artificial
  Chemically synthesized
ucagcacugguaagauugaacac

SEQ ID NO: 24784 - RNA, 23 nt, artificial
  Chemically synthesized
aggcauggaccuugaguuggacu

SEQ ID NO: 24785 - RNA, 23 nt, artificial
  Chemically synthesized
uggucucaagguccacuugguuc

SEQ ID NO: 24786 - RNA, 23 nt, artificial
  Chemically synthesized
guggucucaagguccacuugguu

SEQ ID NO: 24787 - RNA, 23 nt, artificial
  Chemically synthesized
aaaugaucagcacugguaagauu

SEQ ID NO: 24788 - RNA, 23 nt, artificial
  Chemically synthesized
gccuguaacaaagaaucauaaug

SEQ ID NO: 24789 - RNA, 23 nt, artificial
  Chemically synthesized
ccuguaacaaagaaucauaaugg

SEQ ID NO: 24790 - RNA, 23 nt, artificial
  Chemically synthesized
ucccauuccagaggcauggaccu

SEQ ID NO: 24791 - RNA, 23 nt, artificial
  Chemically synthesized
cccauuccagaggcauggaccuu

SEQ ID NO: 24792 - RNA, 23 nt, artificial
  Chemically synthesized
ccauuccagaggcauggaccuug

SEQ ID NO: 24793 - RNA, 23 nt, artificial
  Chemically synthesized
cauuccagaggcauggaccuuga

SEQ ID NO: 24794 - RNA, 23 nt, artificial
  Chemically synthesized
auuccagaggcauggaccuugag

SEQ ID NO: 24795 - RNA, 23 nt, artificial
  Chemically synthesized
gaaccaugaaaaacaucacaagg

SEQ ID NO: 24796 - RNA, 23 nt, artificial
  Chemically synthesized
guaucugaaagacagucccccuu

SEQ ID NO: 24797 - RNA, 23 nt, artificial
  Chemically synthesized
cuaagaugaguguagaacaccug

SEQ ID NO: 24798 - RNA, 23 nt, artificial
  Chemically synthesized
aagguccacuugguucaugucuu

SEQ ID NO: 24799 - RNA, 23 nt, artificial
  Chemically synthesized
agguccacuugguucaugucuuc

SEQ ID NO: 24800 - RNA, 23 nt, artificial
  Chemically synthesized
gguccacuugguucaugucuucu

SEQ ID NO: 24801 - RNA, 23 nt, artificial
  Chemically synthesized
gggguggccuauuugcuucucca

SEQ ID NO: 24802 - RNA, 23 nt, artificial
  Chemically synthesized
ggguggccuauuugcuucuccaa

SEQ ID NO: 24803 - RNA, 23 nt, artificial
  Chemically synthesized
gguggccuauuugcuucuccaaa

SEQ ID NO: 24804 - RNA, 23 nt, artificial
  Chemically synthesized
guggccuauuugcuucuccaaag

SEQ ID NO: 24805 - RNA, 23 nt, artificial
  Chemically synthesized
uggccuauuugcuucuccaaaga

SEQ ID NO: 24806 - RNA, 23 nt, artificial
  Chemically synthesized
ccaguagugcaguagcucaucau

SEQ ID NO: 24807 - RNA, 23 nt, artificial
  Chemically synthesized
caguagugcaguagcucaucauc

SEQ ID NO: 24808 - RNA, 23 nt, artificial
  Chemically synthesized
aguagugcaguagcucaucaucu

SEQ ID NO: 24809 - RNA, 23 nt, artificial
  Chemically synthesized
guagugcaguagcucaucaucuu

SEQ ID NO: 24810 - RNA, 23 nt, artificial
  Chemically synthesized
uagugcaguagcucaucaucuuc

SEQ ID NO: 24811 - RNA, 23 nt, artificial
  Chemically synthesized
uucagccucuuuagcuuauuaug

SEQ ID NO: 24812 - RNA, 23 nt, artificial
  Chemically synthesized
gaagacccucacugaauacaaca

SEQ ID NO: 24813 - RNA, 23 nt, artificial
  Chemically synthesized
aagacccucacugaauacaacau

SEQ ID NO: 24814 - RNA, 23 nt, artificial
  Chemically synthesized
agacccucacugaauacaacauu

SEQ ID NO: 24815 - RNA, 23 nt, artificial
  Chemically synthesized
guucugccagcuccuucuguagg

SEQ ID NO: 24816 - RNA, 23 nt, artificial
  Chemically synthesized
uucugccagcuccuucuguaggu

SEQ ID NO: 24817 - RNA, 23 nt, artificial
  Chemically synthesized
ucugccagcuccuucuguaggug

SEQ ID NO: 24818 - RNA, 23 nt, artificial
  Chemically synthesized
ucaggucacaaccauguaucuga

SEQ ID NO: 24819 - RNA, 23 nt, artificial
  Chemically synthesized
caggucacaaccauguaucugaa

SEQ ID NO: 24820 - RNA, 23 nt, artificial
  Chemically synthesized
aggucacaaccauguaucugaaa

SEQ ID NO: 24821 - RNA, 23 nt, artificial
  Chemically synthesized
augcauuuagaagugaagaugcu

SEQ ID NO: 24822 - RNA, 23 nt, artificial
  Chemically synthesized
gcaucuggcugguagacucucgg

SEQ ID NO: 24823 - RNA, 23 nt, artificial
  Chemically synthesized
caucuggcugguagacucucgga

SEQ ID NO: 24824 - RNA, 23 nt, artificial
  Chemically synthesized
aucuggcugguagacucucggag

SEQ ID NO: 24825 - RNA, 23 nt, artificial
  Chemically synthesized
gaguuuccauagcuaagggaaac

SEQ ID NO: 24826 - RNA, 23 nt, artificial
  Chemically synthesized
aguuuccauagcuaagggaaaca

SEQ ID NO: 24827 - RNA, 23 nt, artificial
  Chemically synthesized
guuuccauagcuaagggaaacac

SEQ ID NO: 24828 - RNA, 23 nt, artificial
  Chemically synthesized
uuuccauagcuaagggaaacacc

SEQ ID NO: 24829 - RNA, 23 nt, artificial
  Chemically synthesized
ggccuccuuugaccaggccuucu

SEQ ID NO: 24830 - RNA, 23 nt, artificial
  Chemically synthesized
gccuccuuugaccaggccuucug

SEQ ID NO: 24831 - RNA, 23 nt, artificial
  Chemically synthesized
ccuccuuugaccaggccuucugg

SEQ ID NO: 24832 - RNA, 23 nt, artificial
  Chemically synthesized
cuccuuugaccaggccuucuggg

SEQ ID NO: 24833 - RNA, 23 nt, artificial
  Chemically synthesized
uccuuugaccaggccuucugggc

SEQ ID NO: 24834 - RNA, 23 nt, artificial
  Chemically synthesized
uaguuucaccgauggcucaggau

SEQ ID NO: 24835 - RNA, 23 nt, artificial
  Chemically synthesized
gccgaaaaacgucugagauuccu

SEQ ID NO: 24836 - RNA, 23 nt, artificial
  Chemically synthesized
aacgucugagauuccucaaaauu

SEQ ID NO: 24837 - RNA, 23 nt, artificial
  Chemically synthesized
acgucugagauuccucaaaauug

SEQ ID NO: 24838 - RNA, 23 nt, artificial
  Chemically synthesized
cgucugagauuccucaaaauuga

SEQ ID NO: 24839 - RNA, 23 nt, artificial
  Chemically synthesized
gucugagauuccucaaaauugac

SEQ ID NO: 24840 - RNA, 23 nt, artificial
  Chemically synthesized
gccccagcaaacgguuuuacuuc

SEQ ID NO: 24841 - RNA, 23 nt, artificial
  Chemically synthesized
ccccagcaaacgguuuuacuucu

SEQ ID NO: 24842 - RNA, 23 nt, artificial
  Chemically synthesized
cccagcaaacgguuuuacuucuu

SEQ ID NO: 24843 - RNA, 23 nt, artificial
  Chemically synthesized
agaacaccugguagcugcuuuuu

SEQ ID NO: 24844 - RNA, 23 nt, artificial
  Chemically synthesized
uaggaaaacaucauuaguagcug

SEQ ID NO: 24845 - RNA, 23 nt, artificial
  Chemically synthesized
aggaaaacaucauuaguagcuga

SEQ ID NO: 24846 - RNA, 23 nt, artificial
  Chemically synthesized
gagcucagauacguugacauaua

SEQ ID NO: 24847 - RNA, 23 nt, artificial
  Chemically synthesized
agcucagauacguugacauauaa

SEQ ID NO: 24848 - RNA, 23 nt, artificial
  Chemically synthesized
gcucagauacguugacauauaaa

SEQ ID NO: 24849 - RNA, 23 nt, artificial
  Chemically synthesized
cucagauacguugacauauaaau

SEQ ID NO: 24850 - RNA, 23 nt, artificial
  Chemically synthesized
ucagauacguugacauauaaaug

SEQ ID NO: 24851 - RNA, 23 nt, artificial
  Chemically synthesized
guuuucauuucacaaaaaugcac

SEQ ID NO: 24852 - RNA, 23 nt, artificial
  Chemically synthesized
uuuucauuucacaaaaaugcaca

SEQ ID NO: 24853 - RNA, 23 nt, artificial
  Chemically synthesized
uuucauuucacaaaaaugcacau

SEQ ID NO: 24854 - RNA, 23 nt, artificial
  Chemically synthesized
gccuaaauacucucaggcacuaa

SEQ ID NO: 24855 - RNA, 23 nt, artificial
  Chemically synthesized
ggcagguuguugcaagauugacc

SEQ ID NO: 24856 - RNA, 23 nt, artificial
  Chemically synthesized
ccucauguagaccuuguggcuca

SEQ ID NO: 24857 - RNA, 23 nt, artificial
  Chemically synthesized
cucauguagaccuuguggcucag

SEQ ID NO: 24858 - RNA, 23 nt, artificial
  Chemically synthesized
ccccuacaauugcacuggaaaua

SEQ ID NO: 24859 - RNA, 23 nt, artificial
  Chemically synthesized
cccuacaauugcacuggaaauac

SEQ ID NO: 24860 - RNA, 23 nt, artificial
  Chemically synthesized
ccuacaauugcacuggaaauaca

SEQ ID NO: 24861 - RNA, 23 nt, artificial
  Chemically synthesized
ccucaggucacaaccauguaucu

SEQ ID NO: 24862 - RNA, 23 nt, artificial
  Chemically synthesized
cucaggucacaaccauguaucug

SEQ ID NO: 24863 - RNA, 23 nt, artificial
  Chemically synthesized
gcauucaaaaucuugaccaaaug

SEQ ID NO: 24864 - RNA, 23 nt, artificial
  Chemically synthesized
cauucaaaaucuugaccaaaugc

SEQ ID NO: 24865 - RNA, 23 nt, artificial
  Chemically synthesized
ggccuauuugcuucuccaaagau

SEQ ID NO: 24866 - RNA, 23 nt, artificial
  Chemically synthesized
auaagccgaaaaacgucugagau

SEQ ID NO: 24867 - RNA, 23 nt, artificial
  Chemically synthesized
aaacgucugagauuccucaaaau

SEQ ID NO: 24868 - RNA, 23 nt, artificial
  Chemically synthesized
agcaggacaauuccauagguguc

SEQ ID NO: 24869 - RNA, 23 nt, artificial
  Chemically synthesized
agaggugaguuaaaagguguccu

SEQ ID NO: 24870 - RNA, 23 nt, artificial
  Chemically synthesized
gaggugaguuaaaagguguccuu

SEQ ID NO: 24871 - RNA, 23 nt, artificial
  Chemically synthesized
aggugaguuaaaagguguccuuu

SEQ ID NO: 24872 - RNA, 23 nt, artificial
  Chemically synthesized
ggugaguuaaaagguguccuuuu

SEQ ID NO: 24873 - RNA, 23 nt, artificial
  Chemically synthesized
gugaguuaaaagguguccuuuuc

SEQ ID NO: 24874 - RNA, 23 nt, artificial
  Chemically synthesized
aggaagcauucaaaaucuugacc

SEQ ID NO: 24875 - RNA, 23 nt, artificial
  Chemically synthesized
ggaagcauucaaaaucuugacca

SEQ ID NO: 24876 - RNA, 23 nt, artificial
  Chemically synthesized
gaagcauucaaaaucuugaccaa

SEQ ID NO: 24877 - RNA, 23 nt, artificial
  Chemically synthesized
aagcauucaaaaucuugaccaaa

SEQ ID NO: 24878 - RNA, 23 nt, artificial
  Chemically synthesized
agcauucaaaaucuugaccaaau

SEQ ID NO: 24879 - RNA, 23 nt, artificial
  Chemically synthesized
ggccacccuucuuauacuucacu

SEQ ID NO: 24880 - RNA, 23 nt, artificial
  Chemically synthesized
gccacccuucuuauacuucacuc

SEQ ID NO: 24881 - RNA, 23 nt, artificial
  Chemically synthesized
ucucccucuucacauggcagccc

SEQ ID NO: 24882 - RNA, 23 nt, artificial
  Chemically synthesized
cccaaagugcuucucuuagagcu

SEQ ID NO: 24883 - RNA, 23 nt, artificial
  Chemically synthesized
caagguccacuugguucaugucu

SEQ ID NO: 24884 - RNA, 23 nt, artificial
  Chemically synthesized
uggccucuuucagccucuuuagc

SEQ ID NO: 24885 - RNA, 23 nt, artificial
  Chemically synthesized
aguccccaaaacaucucucuugc

SEQ ID NO: 24886 - RNA, 23 nt, artificial
  Chemically synthesized
guccccaaaacaucucucuugcu

SEQ ID NO: 24887 - RNA, 23 nt, artificial
  Chemically synthesized
uccccaaaacaucucucuugcuu

SEQ ID NO: 24888 - RNA, 23 nt, artificial
  Chemically synthesized
gcaagccucuagucuuccuuuuc

SEQ ID NO: 24889 - RNA, 23 nt, artificial
  Chemically synthesized
gcuggaucucucuuauagaguuu

SEQ ID NO: 24890 - RNA, 23 nt, artificial
  Chemically synthesized
ugaccaaaugcaacccauauuuu

SEQ ID NO: 24891 - RNA, 23 nt, artificial
  Chemically synthesized
ggcucaggauaugcauuuagaag

SEQ ID NO: 24892 - RNA, 23 nt, artificial
  Chemically synthesized
ucacuccagaaagcaggacaauu

SEQ ID NO: 24893 - RNA, 23 nt, artificial
  Chemically synthesized
cacuccagaaagcaggacaauuc

SEQ ID NO: 24894 - RNA, 23 nt, artificial
  Chemically synthesized
acuccagaaagcaggacaauucc

SEQ ID NO: 24895 - RNA, 23 nt, artificial
  Chemically synthesized
cuccagaaagcaggacaauucca

SEQ ID NO: 24896 - RNA, 23 nt, artificial
  Chemically synthesized
uccagaaagcaggacaauuccau

SEQ ID NO: 24897 - RNA, 23 nt, artificial
  Chemically synthesized
aaaacaucacaaggagacacagg

SEQ ID NO: 24898 - RNA, 23 nt, artificial
  Chemically synthesized
uuugaacccuguggucucaaggu

SEQ ID NO: 24899 - RNA, 23 nt, artificial
  Chemically synthesized
acagcccaguuucauugaucaca

SEQ ID NO: 24900 - RNA, 23 nt, artificial
  Chemically synthesized
cagcccaguuucauugaucacaa

SEQ ID NO: 24901 - RNA, 23 nt, artificial
  Chemically synthesized
agcccaguuucauugaucacaag

SEQ ID NO: 24902 - RNA, 23 nt, artificial
  Chemically synthesized
gcugugugcaucuggcugguaga

SEQ ID NO: 24903 - RNA, 23 nt, artificial
  Chemically synthesized
cugugugcaucuggcugguagac

SEQ ID NO: 24904 - RNA, 23 nt, artificial
  Chemically synthesized
cugcuguccacccaguagaucug

SEQ ID NO: 24905 - RNA, 23 nt, artificial
  Chemically synthesized
ugcuguccacccaguagaucugg

SEQ ID NO: 24906 - RNA, 23 nt, artificial
  Chemically synthesized
gcuguccacccaguagaucuggg

SEQ ID NO: 24907 - RNA, 23 nt, artificial
  Chemically synthesized
cuguccacccaguagaucugggg

SEQ ID NO: 24908 - RNA, 23 nt, artificial
  Chemically synthesized
uguccacccaguagaucugggga

SEQ ID NO: 24909 - RNA, 23 nt, artificial
  Chemically synthesized
gcccaguagugcaguagcucauc

SEQ ID NO: 24910 - RNA, 23 nt, artificial
  Chemically synthesized
cccaguagugcaguagcucauca

SEQ ID NO: 24911 - RNA, 23 nt, artificial
  Chemically synthesized
uugaacccuguggucucaagguc

SEQ ID NO: 24912 - RNA, 23 nt, artificial
  Chemically synthesized
uacagcccaguuucauugaucac

SEQ ID NO: 24913 - RNA, 23 nt, artificial
  Chemically synthesized
agugcuucucuuagagcuuauau

SEQ ID NO: 24914 - RNA, 23 nt, artificial
  Chemically synthesized
gugcuucucuuagagcuuauaua

SEQ ID NO: 24915 - RNA, 23 nt, artificial
  Chemically synthesized
ugcuucucuuagagcuuauauaa

SEQ ID NO: 24916 - RNA, 23 nt, artificial
  Chemically synthesized
gcuucucuuagagcuuauauaag

SEQ ID NO: 24917 - RNA, 23 nt, artificial
  Chemically synthesized
gaguguagaacaccugguagcug

SEQ ID NO: 24918 - RNA, 23 nt, artificial
  Chemically synthesized
agagcuuauauaagccgaaaaac

SEQ ID NO: 24919 - RNA, 23 nt, artificial
  Chemically synthesized
caggaagcauucaaaaucuugac

SEQ ID NO: 24920 - RNA, 23 nt, Artificial
  Chemically synthesized
aggcaaccagaaccaugaaaaac

SEQ ID NO: 24921 - RNA, 19 nt, artificial
  Chemically synthesized
caacgugaaugcugcugau

SEQ ID NO: 24922 - RNA, 19 nt, artificial
  Chemically synthesized
ggcuuuuuauauaccaaaa

SEQ ID NO: 24923 - RNA, 19 nt, artificial
  Chemically synthesized
caauuacuauaaauccaaa

SEQ ID NO: 24924 - RNA, 19 nt, artificial
  Chemically synthesized
guguaaaugugcacaauaa

SEQ ID NO: 24925 - RNA, 19 nt, artificial
  Chemically synthesized
gcagcagaaggaacucuua

SEQ ID NO: 24926 - RNA, 19 nt, artificial
  Chemically synthesized
gucuauuucugaaaaugaa

SEQ ID NO: 24927 - RNA, 19 nt, artificial
  Chemically synthesized
gcagcagucuauuucugaa

SEQ ID NO: 24928 - RNA, 19 nt, artificial
  Chemically synthesized
caaucugucugcugaaaua

SEQ ID NO: 24929 - RNA, 19 nt, artificial
  Chemically synthesized
gggagagccucagcauaua

SEQ ID NO: 24930 - RNA, 19 nt, artificial
  Chemically synthesized
agaaggaacucuuaaauaa

SEQ ID NO: 24931 - RNA, 19 nt, artificial
  Chemically synthesized
cgaugauauuaacuguuuu

SEQ ID NO: 24932 - RNA, 19 nt, artificial
  Chemically synthesized
cucagagaaauguaauaaa

SEQ ID NO: 24933 - RNA, 19 nt, artificial
  Chemically synthesized
gaaugcugcugauagugau

SEQ ID NO: 24934 - RNA, 19 nt, artificial
  Chemically synthesized
cuuaaauaagucaguuaaa

SEQ ID NO: 24935 - RNA, 19 nt, artificial
  Chemically synthesized
gauccaaauccgcuaauga

SEQ ID NO: 24936 - RNA, 19 nt, artificial
  Chemically synthesized
ccauuaagaagucccauaa

SEQ ID NO: 24937 - RNA, 19 nt, artificial
  Chemically synthesized
caacuuaaccaggaacaaa

SEQ ID NO: 24938 - RNA, 19 nt, artificial
  Chemically synthesized
agaacaagcugaagaaaau

SEQ ID NO: 24939 - RNA, 19 nt, artificial
  Chemically synthesized
gaaaauucgugcaaugaga

SEQ ID NO: 24940 - RNA, 19 nt, artificial
  Chemically synthesized
gagcaacaaugaacagauu

SEQ ID NO: 24941 - RNA, 19 nt, artificial
  Chemically synthesized
uguaaaugugcacaauaaa

SEQ ID NO: 24942 - RNA, 19 nt, artificial
  Chemically synthesized
ccaauuacuauaaauccaa

SEQ ID NO: 24943 - RNA, 19 nt, artificial
  Chemically synthesized
caacagcagcagauugaaa

SEQ ID NO: 24944 - RNA, 19 nt, artificial
  Chemically synthesized
aggcuuuuuauauaccaaa

SEQ ID NO: 24945 - RNA, 19 nt, artificial
  Chemically synthesized
caagagcaacgaacucaga

SEQ ID NO: 24946 - RNA, 19 nt, artificial
  Chemically synthesized
cagaaaguacugagaaaga

SEQ ID NO: 24947 - RNA, 19 nt, artificial
  Chemically synthesized
aaaugaaaagcuucagaaa

SEQ ID NO: 24948 - RNA, 19 nt, artificial
  Chemically synthesized
gagcaacgaacucagagaa

SEQ ID NO: 24949 - RNA, 19 nt, artificial
  Chemically synthesized
ugaacagauuuuaacagaa

SEQ ID NO: 24950 - RNA, 19 nt, artificial
  Chemically synthesized
caacaaugaacagauuuua

SEQ ID NO: 24951 - RNA, 19 nt, artificial
  Chemically synthesized
caaugaacagauuuuaaca

SEQ ID NO: 24952 - RNA, 19 nt, artificial
  Chemically synthesized
gagaaauguaauaaaugua

SEQ ID NO: 24953 - RNA, 19 nt, artificial
  Chemically synthesized
ccuuaaauaagucaguuaa

SEQ ID NO: 24954 - RNA, 19 nt, artificial
  Chemically synthesized
cagaaggaacucuuaaaua

SEQ ID NO: 24955 - RNA, 19 nt, artificial
  Chemically synthesized
aaagcuucagaaauugaaa

SEQ ID NO: 24956 - RNA, 19 nt, artificial
  Chemically synthesized
aacaaugaacagauuuuaa

SEQ ID NO: 24957 - RNA, 19 nt, artificial
  Chemically synthesized
cgaacaagcggaccaacuu

SEQ ID NO: 24958 - RNA, 19 nt, artificial
  Chemically synthesized
agauuuaaagaaaggaaaa

SEQ ID NO: 24959 - RNA, 19 nt, artificial
  Chemically synthesized
uaaccaacuuaaccaggaa

SEQ ID NO: 24960 - RNA, 19 nt, artificial
  Chemically synthesized
gaagauuuaaagaaaggaa

SEQ ID NO: 24961 - RNA, 19 nt, artificial
  Chemically synthesized
uaaagaaaggaaaacugaa

SEQ ID NO: 24962 - RNA, 19 nt, artificial
  Chemically synthesized
caagaacuacagauucgua

SEQ ID NO: 24963 - RNA, 19 nt, artificial
  Chemically synthesized
agcaauuggaagauuuaaa

SEQ ID NO: 24964 - RNA, 19 nt, artificial
  Chemically synthesized
gcagaaggaacucuuaaau

SEQ ID NO: 24965 - RNA, 19 nt, artificial
  Chemically synthesized
caaugugaauccuacaguu

SEQ ID NO: 24966 - RNA, 19 nt, artificial
  Chemically synthesized
auuggaagauuuaaagaaa

SEQ ID NO: 24967 - RNA, 19 nt, artificial
  Chemically synthesized
agaaaaacguacugaaaau

SEQ ID NO: 24968 - RNA, 19 nt, artificial
  Chemically synthesized
cucuauuuuucauguauga

SEQ ID NO: 24969 - RNA, 19 nt, artificial
  Chemically synthesized
cucucagagcuccaagaua

SEQ ID NO: 24970 - RNA, 19 nt, artificial
  Chemically synthesized
ucgacaagcucccuggaaa

SEQ ID NO: 24971 - RNA, 19 nt, artificial
  Chemically synthesized
uacauaguguggugaagaa

SEQ ID NO: 24972 - RNA, 19 nt, artificial
  Chemically synthesized
gaacgucucuaugggaaaa

SEQ ID NO: 24973 - RNA, 19 nt, artificial
  Chemically synthesized
ggaacaaaauucaaaacuu

SEQ ID NO: 24974 - RNA, 19 nt, artificial
  Chemically synthesized
ggacacucauccuuucuca

SEQ ID NO: 24975 - RNA, 19 nt, artificial
  Chemically synthesized
ggaaguacagacugcaauu

SEQ ID NO: 24976 - RNA, 19 nt, artificial
  Chemically synthesized
aauaaauacccacuuucaa

SEQ ID NO: 24977 - RNA, 19 nt, artificial
  Chemically synthesized
ggaacagcguuuacauuuu

SEQ ID NO: 24978 - RNA, 19 nt, artificial
  Chemically synthesized
ggcccuuaggcucuauuuu

SEQ ID NO: 24979 - RNA, 19 nt, artificial
  Chemically synthesized
auccaaauccgcuaaugau

SEQ ID NO: 24980 - RNA, 19 nt, artificial
  Chemically synthesized
ggagggaagaagugaaauu

SEQ ID NO: 24981 - RNA, 19 nt, artificial
  Chemically synthesized
gaagauccaaauccgcuaa

SEQ ID NO: 24982 - RNA, 19 nt, artificial
  Chemically synthesized
ggcaacagcagcagauuga

SEQ ID NO: 24983 - RNA, 19 nt, artificial
  Chemically synthesized
acauuaaaacagaauucua

SEQ ID NO: 24984 - RNA, 19 nt, artificial
  Chemically synthesized
gacccaagagcaacgaacu

SEQ ID NO: 24985 - RNA, 19 nt, artificial
  Chemically synthesized
gcgaugaugccgaugauau

SEQ ID NO: 24986 - RNA, 19 nt, artificial
  Chemically synthesized
uaccaaaaguauuuuuuga

SEQ ID NO: 24987 - RNA, 19 nt, artificial
  Chemically synthesized
agacagaagcucuuacuga

SEQ ID NO: 24988 - RNA, 19 nt, artificial
  Chemically synthesized
agagaaauguaauaaaugu

SEQ ID NO: 24989 - RNA, 19 nt, artificial
  Chemically synthesized
aacucagagaaauguaaua

SEQ ID NO: 24990 - RNA, 19 nt, artificial
  Chemically synthesized
agcguuuacauuuucuaaa

SEQ ID NO: 24991 - RNA, 19 nt, artificial
  Chemically synthesized
ucagagaaauguaauaaau

SEQ ID NO: 24992 - RNA, 19 nt, artificial
  Chemically synthesized
caaguuccauauacuccau

SEQ ID NO: 24993 - RNA, 19 nt, artificial
  Chemically synthesized
gaugaugccgaugauauua

SEQ ID NO: 24994 - RNA, 19 nt, artificial
  Chemically synthesized
gcaacgaacucagagaaau

SEQ ID NO: 24995 - RNA, 19 nt, artificial
  Chemically synthesized
ugcgcugccucuuguaaca

SEQ ID NO: 24996 - RNA, 19 nt, artificial
  Chemically synthesized
ccacaccaccuaagaauua

SEQ ID NO: 24997 - RNA, 19 nt, artificial
  Chemically synthesized
gcucuuccgugaaaccagu

SEQ ID NO: 24998 - RNA, 19 nt, artificial
  Chemically synthesized
aaaagcuucagaaauugaa

SEQ ID NO: 24999 - RNA, 19 nt, artificial
  Chemically synthesized
ucgagauguuguagaauuu

SEQ ID NO: 25000 - RNA, 19 nt, artificial
  Chemically synthesized
cuacccgaacuauguugga

SEQ ID NO: 25001 - RNA, 19 nt, artificial
  Chemically synthesized
ucgacuacagcaaaaucau

SEQ ID NO: 25002 - RNA, 19 nt, artificial
  Chemically synthesized
ggcaaucugucugcugaaa

SEQ ID NO: 25003 - RNA, 19 nt, artificial
  Chemically synthesized
aagauuuaaagaaaggaaa

SEQ ID NO: 25004 - RNA, 19 nt, artificial
  Chemically synthesized
gaacucagagaaauguaau

SEQ ID NO: 25005 - RNA, 19 nt, artificial
  Chemically synthesized
ugagaacagugaacaaggu

SEQ ID NO: 25006 - RNA, 19 nt, artificial
  Chemically synthesized
gcccuuaggcucuauuuuu

SEQ ID NO: 25007 - RNA, 19 nt, artificial
  Chemically synthesized
ugaucauaugauguacgaa

SEQ ID NO: 25008 - RNA, 19 nt, artificial
  Chemically synthesized
caauuggaagauuuaaaga

SEQ ID NO: 25009 - RNA, 19 nt, artificial
  Chemically synthesized
cguccacaaugugaauccu

SEQ ID NO: 25010 - RNA, 19 nt, artificial
  Chemically synthesized
aagcgacauugaaacugcu

SEQ ID NO: 25011 - RNA, 19 nt, artificial
  Chemically synthesized
cuauuucugaaaaugaaaa

SEQ ID NO: 25012 - RNA, 19 nt, artificial
  Chemically synthesized
gaagaaaauucgugcaaug

SEQ ID NO: 25013 - RNA, 19 nt, artificial
  Chemically synthesized
acaggcuuuuuauauacca

SEQ ID NO: 25014 - RNA, 19 nt, artificial
  Chemically synthesized
agcagacagcguccacaau

SEQ ID NO: 25015 - RNA, 19 nt, artificial
  Chemically synthesized
acuucagcagcagaaggaa

SEQ ID NO: 25016 - RNA, 19 nt, artificial
  Chemically synthesized
aaggagccucuguauggaa

SEQ ID NO: 25017 - RNA, 19 nt, artificial
  Chemically synthesized
uuucuugagcaacaaugaa

SEQ ID NO: 25018 - RNA, 19 nt, artificial
  Chemically synthesized
gacagcguccacaauguga

SEQ ID NO: 25019 - RNA, 19 nt, artificial
  Chemically synthesized
ccagugcucccaguuucua

SEQ ID NO: 25020 - RNA, 19 nt, artificial
  Chemically synthesized
ccacuuaagagauuauugu

SEQ ID NO: 25021 - RNA, 19 nt, artificial
  Chemically synthesized
agcuuagucagcaauugga

SEQ ID NO: 25022 - RNA, 19 nt, artificial
  Chemically synthesized
gaagacagaagcucuuacu

SEQ ID NO: 25023 - RNA, 19 nt, artificial
  Chemically synthesized
ucuauuucugaaaaugaaa

SEQ ID NO: 25024 - RNA, 19 nt, artificial
  Chemically synthesized
caacgaacucagagaaaug

SEQ ID NO: 25025 - RNA, 19 nt, artificial
  Chemically synthesized
cauggaagauccaaauccg

SEQ ID NO: 25026 - RNA, 19 nt, artificial
  Chemically synthesized
cuaccagagugaugcagac

SEQ ID NO: 25027 - RNA, 19 nt, artificial
  Chemically synthesized
aaagcuacccgaacuaugu

SEQ ID NO: 25028 - RNA, 19 nt, artificial
  Chemically synthesized
caaauccgcuaaugaugga

SEQ ID NO: 25029 - RNA, 19 nt, artificial
  Chemically synthesized
ucucagagcuccaagauau

SEQ ID NO: 25030 - RNA, 19 nt, artificial
  Chemically synthesized
auaaauacccacuuucaaa

SEQ ID NO: 25031 - RNA, 19 nt, artificial
  Chemically synthesized
cgcuucacugaggugugaa

SEQ ID NO: 25032 - RNA, 19 nt, artificial
  Chemically synthesized
ugcuguaccagcgcuucaa

SEQ ID NO: 25033 - RNA, 19 nt, artificial
  Chemically synthesized
gaccaagugacaacuggga

SEQ ID NO: 25034 - RNA, 19 nt, artificial
  Chemically synthesized
gggcuaugugcccaaaaac

SEQ ID NO: 25035 - RNA, 19 nt, artificial
  Chemically synthesized
aaaggagccucuguaugga

SEQ ID NO: 25036 - RNA, 19 nt, artificial
  Chemically synthesized
aaauaaauacccacuuuca

SEQ ID NO: 25037 - RNA, 19 nt, artificial
  Chemically synthesized
agucuauuucugaaaauga

SEQ ID NO: 25038 - RNA, 19 nt, artificial
  Chemically synthesized
guaccaagaacuacagauu

SEQ ID NO: 25039 - RNA, 19 nt, artificial
  Chemically synthesized
caaaaguauuuuuugacua

SEQ ID NO: 25040 - RNA, 19 nt, artificial
  Chemically synthesized
cucuggaaggagaguucga

SEQ ID NO: 25041 - RNA, 19 nt, artificial
  Chemically synthesized
aauuggaagauuuaaagaa

SEQ ID NO: 25042 - RNA, 19 nt, artificial
  Chemically synthesized
cugcugaaauagaaagguu

SEQ ID NO: 25043 - RNA, 19 nt, artificial
  Chemically synthesized
aaccugucgagauguugua

SEQ ID NO: 25044 - RNA, 19 nt, artificial
  Chemically synthesized
gcuucacugaggugugaau

SEQ ID NO: 25045 - RNA, 19 nt, artificial
  Chemically synthesized
gcuaccagagugaugcaga

SEQ ID NO: 25046 - RNA, 19 nt, artificial
  Chemically synthesized
cugagaaagagccugagca

SEQ ID NO: 25047 - RNA, 19 nt, artificial
  Chemically synthesized
cuguaccaagaacuacaga

SEQ ID NO: 25048 - RNA, 19 nt, artificial
  Chemically synthesized
ugaauggguuccagucuua

SEQ ID NO: 25049 - RNA, 19 nt, artificial
  Chemically synthesized
cuuuuuauauaccaaaagu

SEQ ID NO: 25050 - RNA, 19 nt, artificial
  Chemically synthesized
ccaggagaacaagcugaag

SEQ ID NO: 25051 - RNA, 19 nt, artificial
  Chemically synthesized
uggaggaaggcuacaucca

SEQ ID NO: 25052 - RNA, 19 nt, artificial
  Chemically synthesized
aagccugaacucccacuga

SEQ ID NO: 25053 - RNA, 19 nt, artificial
  Chemically synthesized
aaauaagucaguuaaagca

SEQ ID NO: 25054 - RNA, 19 nt, artificial
  Chemically synthesized
cugaaaaugaaaagcuuca

SEQ ID NO: 25055 - RNA, 19 nt, artificial
  Chemically synthesized
ggaccaacuugaagaagcc

SEQ ID NO: 25056 - RNA, 19 nt, artificial
  Chemically synthesized
ccgaugauauuaacuguuu

SEQ ID NO: 25057 - RNA, 19 nt, artificial
  Chemically synthesized
cuguauggaaacaugucca

SEQ ID NO: 25058 - RNA, 19 nt, artificial
  Chemically synthesized
aaaaugaaaagcuucagaa

SEQ ID NO: 25059 - RNA, 19 nt, artificial
  Chemically synthesized
ccucaaccauaagcgacau

SEQ ID NO: 25060 - RNA, 19 nt, artificial
  Chemically synthesized
agaaagagccugagcagga

SEQ ID NO: 25061 - RNA, 19 nt, artificial
  Chemically synthesized
agcacugacuguacauagu

SEQ ID NO: 25062 - RNA, 19 nt, artificial
  Chemically synthesized
cagacagugaauucaaguu

SEQ ID NO: 25063 - RNA, 19 nt, artificial
  Chemically synthesized
aaagaagcaggaaguacag

SEQ ID NO: 25064 - RNA, 19 nt, artificial
  Chemically synthesized
uugccucaaccauaagcga

SEQ ID NO: 25065 - RNA, 19 nt, artificial
  Chemically synthesized
cgcuuccuguuccaguuca

SEQ ID NO: 25066 - RNA, 19 nt, artificial
  Chemically synthesized
acuguuuucuugagcaaca

SEQ ID NO: 25067 - RNA, 19 nt, artificial
  Chemically synthesized
aggcccuuaggcucuauuu

SEQ ID NO: 25068 - RNA, 19 nt, artificial
  Chemically synthesized
ccaccaucacaucgugaag

SEQ ID NO: 25069 - RNA, 19 nt, artificial
  Chemically synthesized
cuguuuggugccugaagga

SEQ ID NO: 25070 - RNA, 19 nt, artificial
  Chemically synthesized
cagagaaauguaauaaaug

SEQ ID NO: 25071 - RNA, 19 nt, artificial
  Chemically synthesized
caaugauaaugaguuaccu

SEQ ID NO: 25072 - RNA, 19 nt, artificial
  Chemically synthesized
uuuacauuuucuaaagcaa

SEQ ID NO: 25073 - RNA, 19 nt, artificial
  Chemically synthesized
cgacuacagcaaaaucaug

SEQ ID NO: 25074 - RNA, 19 nt, artificial
  Chemically synthesized
gcugauagugauggaugga

SEQ ID NO: 25075 - RNA, 19 nt, artificial
  Chemically synthesized
auaguguggugaagaaaag

SEQ ID NO: 25076 - RNA, 19 nt, artificial
  Chemically synthesized
caaccugucgagauguugu

SEQ ID NO: 25077 - RNA, 19 nt, artificial
  Chemically synthesized
guggacaauggaaacacca

SEQ ID NO: 25078 - RNA, 19 nt, artificial
  Chemically synthesized
aauggugcucacuuuagca

SEQ ID NO: 25079 - RNA, 19 nt, artificial
  Chemically synthesized
aagcuaugggacauaccca

SEQ ID NO: 25080 - RNA, 19 nt, artificial
  Chemically synthesized
uaaauaagcgcaacaugga

SEQ ID NO: 25081 - RNA, 19 nt, artificial
  Chemically synthesized
aaagaaaggaaaacugaau

SEQ ID NO: 25082 - RNA, 19 nt, artificial
  Chemically synthesized
caccaccuaagaauuacca

SEQ ID NO: 25083 - RNA, 19 nt, artificial
  Chemically synthesized
caaagcuacccgaacuaug

SEQ ID NO: 25084 - RNA, 19 nt, artificial
  Chemically synthesized
ucaccgaaucggacacuca

SEQ ID NO: 25085 - RNA, 19 nt, artificial
  Chemically synthesized
cgugaaguuccugcuggau

SEQ ID NO: 25086 - RNA, 19 nt, artificial
  Chemically synthesized
augaugccgaugauauuaa

SEQ ID NO: 25087 - RNA, 19 nt, artificial
  Chemically synthesized
aaggaacagcguuuacauu

SEQ ID NO: 25088 - RNA, 19 nt, artificial
  Chemically synthesized
agaggacaagucgacuaca

SEQ ID NO: 25089 - RNA, 19 nt, artificial
  Chemically synthesized
cccauacccuuugaucaua

SEQ ID NO: 25090 - RNA, 19 nt, artificial
  Chemically synthesized
gcaucgagauugguaaagu

SEQ ID NO: 25091 - RNA, 19 nt, artificial
  Chemically synthesized
ugaaguuccugcuggauuu

SEQ ID NO: 25092 - RNA, 19 nt, artificial
  Chemically synthesized
caguauugccucaaaugcu

SEQ ID NO: 25093 - RNA, 19 nt, artificial
  Chemically synthesized
ugauauuaacuguuuucuu

SEQ ID NO: 25094 - RNA, 19 nt, artificial
  Chemically synthesized
aaaguauuuuuugacuaga

SEQ ID NO: 25095 - RNA, 19 nt, artificial
  Chemically synthesized
cucagagcuccaagauaug

SEQ ID NO: 25096 - RNA, 19 nt, artificial
  Chemically synthesized
ccucucagagcuccaagau

SEQ ID NO: 25097 - RNA, 19 nt, artificial
  Chemically synthesized
ucucaguauugccucaaau

SEQ ID NO: 25098 - RNA, 19 nt, artificial
  Chemically synthesized
ccaaauaaauacccacuuu

SEQ ID NO: 25099 - RNA, 19 nt, artificial
  Chemically synthesized
cuguauccacggaucaaac

SEQ ID NO: 25100 - RNA, 19 nt, artificial
  Chemically synthesized
cacugaugcagcacuguag

SEQ ID NO: 25101 - RNA, 19 nt, artificial
  Chemically synthesized
uuugacuagaccauucaaa

SEQ ID NO: 25102 - RNA, 19 nt, artificial
  Chemically synthesized
ucaccuaaaggcugauugu

SEQ ID NO: 25103 - RNA, 19 nt, artificial
  Chemically synthesized
gagccucuguauggaaaca

SEQ ID NO: 25104 - RNA, 19 nt, artificial
  Chemically synthesized
ccaccuucagaaaguacug

SEQ ID NO: 25105 - RNA, 19 nt, artificial
  Chemically synthesized
uaaauacccacuuucaaaa

SEQ ID NO: 25106 - RNA, 19 nt, artificial
  Chemically synthesized
aucauaugauguacgaaca

SEQ ID NO: 25107 - RNA, 19 nt, artificial
  Chemically synthesized
guugaagcccaggagaaca

SEQ ID NO: 25108 - RNA, 19 nt, artificial
  Chemically synthesized
gucgacuacagcaaaauca

SEQ ID NO: 25109 - RNA, 19 nt, artificial
  Chemically synthesized
gccucuguauggaaacaug

SEQ ID NO: 25110 - RNA, 19 nt, artificial
  Chemically synthesized
guuccugcuggauuuuggu

SEQ ID NO: 25111 - RNA, 19 nt, artificial
  Chemically synthesized
ugauguacgaacaucuuca

SEQ ID NO: 25112 - RNA, 19 nt, artificial
  Chemically synthesized
ccaacauuaaaacagaauu

SEQ ID NO: 25113 - RNA, 19 nt, artificial
  Chemically synthesized
cacugacuguacauagugu

SEQ ID NO: 25114 - RNA, 19 nt, artificial
  Chemically synthesized
uggagcacugacuguacau

SEQ ID NO: 25115 - RNA, 19 nt, artificial
  Chemically synthesized
gcugcugauagugauggau

SEQ ID NO: 25116 - RNA, 19 nt, artificial
  Chemically synthesized
agcagauugaaaaucagca

SEQ ID NO: 25117 - RNA, 19 nt, artificial
  Chemically synthesized
uccgcuuccuguuccaguu

SEQ ID NO: 25118 - RNA, 19 nt, artificial
  Chemically synthesized
cgaaucggacacucauccu

SEQ ID NO: 25119 - RNA, 19 nt, artificial
  Chemically synthesized
uuaacagaaguuccuauaa

SEQ ID NO: 25120 - RNA, 19 nt, artificial
  Chemically synthesized
ggaaacaaccugucgagau

SEQ ID NO: 25121 - RNA, 19 nt, artificial
  Chemically synthesized
caucuaugagguggaagau

SEQ ID NO: 25122 - RNA, 19 nt, artificial
  Chemically synthesized
ugggagagccucagcauau

SEQ ID NO: 25123 - RNA, 19 nt, artificial
  Chemically synthesized
cagcauauacucuucuccu

SEQ ID NO: 25124 - RNA, 19 nt, artificial
  Chemically synthesized
cauuaaaacagaauucuag

SEQ ID NO: 25125 - RNA, 19 nt, artificial
  Chemically synthesized
cagaagcucuuacugacuu

SEQ ID NO: 25126 - RNA, 19 nt, artificial
  Chemically synthesized
ucacugaugcagcacugua

SEQ ID NO: 25127 - RNA, 19 nt, artificial
  Chemically synthesized
gccgaugauauuaacuguu

SEQ ID NO: 25128 - RNA, 19 nt, artificial
  Chemically synthesized
aaaggaaaacugaaugggu

SEQ ID NO: 25129 - RNA, 19 nt, artificial
  Chemically synthesized
gcaauuggaagauuuaaag

SEQ ID NO: 25130 - RNA, 19 nt, artificial
  Chemically synthesized
gagggaagaagugaaauuu

SEQ ID NO: 25131 - RNA, 19 nt, artificial
  Chemically synthesized
ccaaaaguauuuuuugacu

SEQ ID NO: 25132 - RNA, 19 nt, artificial
  Chemically synthesized
aaacagaauucuagcucuu

SEQ ID NO: 25133 - RNA, 19 nt, artificial
  Chemically synthesized
ccaagaacuacagauucgu

SEQ ID NO: 25134 - RNA, 19 nt, artificial
  Chemically synthesized
uucugaaaaugaaaagcuu

SEQ ID NO: 25135 - RNA, 19 nt, artificial
  Chemically synthesized
gucgagauguuguagaauu

SEQ ID NO: 25136 - RNA, 19 nt, artificial
  Chemically synthesized
cugcucauggaagauccaa

SEQ ID NO: 25137 - RNA, 19 nt, artificial
  Chemically synthesized
ucauaugauguacgaacau

SEQ ID NO: 25138 - RNA, 19 nt, artificial
  Chemically synthesized
cgccuccaaggacugaauu

SEQ ID NO: 25139 - RNA, 19 nt, artificial
  Chemically synthesized
aaacauguccaguguugcu

SEQ ID NO: 25140 - RNA, 19 nt, artificial
  Chemically synthesized
caacugagaacagugaaca

SEQ ID NO: 25141 - RNA, 19 nt, artificial
  Chemically synthesized
gaaccagaggagcucaucu

SEQ ID NO: 25142 - RNA, 19 nt, artificial
  Chemically synthesized
aacaaaauucaaaacuuca

SEQ ID NO: 25143 - RNA, 19 nt, artificial
  Chemically synthesized
cauccagugcucccaguuu

SEQ ID NO: 25144 - RNA, 19 nt, artificial
  Chemically synthesized
cauuaagaagucccauaac

SEQ ID NO: 25145 - RNA, 19 nt, artificial
  Chemically synthesized
aagcuacccgaacuauguu

SEQ ID NO: 25146 - RNA, 19 nt, artificial
  Chemically synthesized
uguagcccaucaccuugga

SEQ ID NO: 25147 - RNA, 19 nt, artificial
  Chemically synthesized
gugcaaugagaggacaagu

SEQ ID NO: 25148 - RNA, 19 nt, artificial
  Chemically synthesized
guccacaaugugaauccua

SEQ ID NO: 25149 - RNA, 19 nt, artificial
  Chemically synthesized
gcgguggaguuaaaaagac

SEQ ID NO: 25150 - RNA, 19 nt, artificial
  Chemically synthesized
aagaucccagcaagcccaa

SEQ ID NO: 25151 - RNA, 19 nt, artificial
  Chemically synthesized
gugugaauuguacguacag

SEQ ID NO: 25152 - RNA, 19 nt, artificial
  Chemically synthesized
uugaagcccaggagaacaa

SEQ ID NO: 25153 - RNA, 19 nt, artificial
  Chemically synthesized
caggcccuuaggcucuauu

SEQ ID NO: 25154 - RNA, 19 nt, artificial
  Chemically synthesized
gaggacaagucgacuacag

SEQ ID NO: 25155 - RNA, 19 nt, artificial
  Chemically synthesized
caagcggaccaacuugaag

SEQ ID NO: 25156 - RNA, 19 nt, artificial
  Chemically synthesized
gaacagauuuuaacagaag

SEQ ID NO: 25157 - RNA, 19 nt, artificial
  Chemically synthesized
cauguuccaggaaaagaag

SEQ ID NO: 25158 - RNA, 19 nt, artificial
  Chemically synthesized
guuuacauuuucuaaagca

SEQ ID NO: 25159 - RNA, 19 nt, artificial
  Chemically synthesized
uaguguggugaagaaaagu

SEQ ID NO: 25160 - RNA, 19 nt, artificial
  Chemically synthesized
aauucaaguuccauauacu

SEQ ID NO: 25161 - RNA, 19 nt, artificial
  Chemically synthesized
gaauccacguguugaacuu

SEQ ID NO: 25162 - RNA, 19 nt, artificial
  Chemically synthesized
uacccgaacuauguuggaa

SEQ ID NO: 25163 - RNA, 19 nt, artificial
  Chemically synthesized
ucgccuccaaggacugaau

SEQ ID NO: 25164 - RNA, 19 nt, artificial
  Chemically synthesized
ggaguuaaaaagacuguac

SEQ ID NO: 25165 - RNA, 19 nt, artificial
  Chemically synthesized
agugaaauuuuuccuucga

SEQ ID NO: 25166 - RNA, 19 nt, artificial
  Chemically synthesized
cugggugugaugaacaaag

SEQ ID NO: 25167 - RNA, 19 nt, artificial
  Chemically synthesized
gaacaaaauucaaaacuuc

SEQ ID NO: 25168 - RNA, 19 nt, artificial
  Chemically synthesized
cuccaagcuaugggacaua

SEQ ID NO: 25169 - RNA, 19 nt, artificial
  Chemically synthesized
ugcucagugugguucucac

SEQ ID NO: 25170 - RNA, 19 nt, artificial
  Chemically synthesized
gaaaaaaauucagcugaac

SEQ ID NO: 25171 - RNA, 19 nt, artificial
  Chemically synthesized
ugccucaaaugcugcucau

SEQ ID NO: 25172 - RNA, 19 nt, artificial
  Chemically synthesized
uacauuuucuaaagcaaca

SEQ ID NO: 25173 - RNA, 19 nt, artificial
  Chemically synthesized
ugaacuuccuuuuggagca

SEQ ID NO: 25174 - RNA, 19 nt, artificial
  Chemically synthesized
cugaauggguuccagucuu

SEQ ID NO: 25175 - RNA, 19 nt, artificial
  Chemically synthesized
cccuuaggcucuauuuuuc

SEQ ID NO: 25176 - RNA, 19 nt, artificial
  Chemically synthesized
agcucuuccgugaaaccag

SEQ ID NO: 25177 - RNA, 19 nt, artificial
  Chemically synthesized
aaauccaaauaaauaccca

SEQ ID NO: 25178 - RNA, 19 nt, artificial
  Chemically synthesized
uacccucucagagcuccaa

SEQ ID NO: 25179 - RNA, 19 nt, artificial
  Chemically synthesized
accggaaacaaccugucga

SEQ ID NO: 25180 - RNA, 19 nt, artificial
  Chemically synthesized
caugaacggcaaucugucu

SEQ ID NO: 25181 - RNA, 19 nt, artificial
  Chemically synthesized
gacauacccaaguccuaca

SEQ ID NO: 25182 - RNA, 19 nt, artificial
  Chemically synthesized
gagauguuguagaauuuug

SEQ ID NO: 25183 - RNA, 19 nt, artificial
  Chemically synthesized
gagcacugacuguacauag

SEQ ID NO: 25184 - RNA, 19 nt, artificial
  Chemically synthesized
ggguuccagucuuacaaug

SEQ ID NO: 25185 - RNA, 19 nt, artificial
  Chemically synthesized
aagaaaauucgugcaauga

SEQ ID NO: 25186 - RNA, 19 nt, artificial
  Chemically synthesized
guacauaguguggugaaga

SEQ ID NO: 25187 - RNA, 19 nt, artificial
  Chemically synthesized
caaauucaguucccugaau

SEQ ID NO: 25188 - RNA, 19 nt, artificial
  Chemically synthesized
acucagagaaauguaauaa

SEQ ID NO: 25189 - RNA, 19 nt, artificial
  Chemically synthesized
agcagcagaaggaacucuu

SEQ ID NO: 25190 - RNA, 19 nt, artificial
  Chemically synthesized
acgugaaugcugcugauag

SEQ ID NO: 25191 - RNA, 19 nt, artificial
  Chemically synthesized
uuggagcacugacuguaca

SEQ ID NO: 25192 - RNA, 19 nt, artificial
  Chemically synthesized
acagcguucaccucugcaa

SEQ ID NO: 25193 - RNA, 19 nt, artificial
  Chemically synthesized
aacagauuuuaacagaagu

SEQ ID NO: 25194 - RNA, 19 nt, artificial
  Chemically synthesized
acagaagcucuuacugacu

SEQ ID NO: 25195 - RNA, 19 nt, artificial
  Chemically synthesized
ccuacaguuuccaggugag

SEQ ID NO: 25196 - RNA, 19 nt, artificial
  Chemically synthesized
uugaaacugcugcagacaa

SEQ ID NO: 25197 - RNA, 19 nt, artificial
  Chemically synthesized
gaaauugaaagaacgaguu

SEQ ID NO: 25198 - RNA, 19 nt, artificial
  Chemically synthesized
agagguacuuucgccucca

SEQ ID NO: 25199 - RNA, 19 nt, artificial
  Chemically synthesized
gcuuuuuauauaccaaaag

SEQ ID NO: 25200 - RNA, 19 nt, artificial
  Chemically synthesized
aaagcgcagcuccaucaca

SEQ ID NO: 25201 - RNA, 19 nt, artificial
  Chemically synthesized
agaacgaguugaagcccag

SEQ ID NO: 25202 - RNA, 19 nt, artificial
  Chemically synthesized
ucugcaaacagcuggugga

SEQ ID NO: 25203 - RNA, 19 nt, artificial
  Chemically synthesized
ugaauucaaguuccauaua

SEQ ID NO: 25204 - RNA, 19 nt, artificial
  Chemically synthesized
cuggaaaggaggaaggaag

SEQ ID NO: 25205 - RNA, 19 nt, artificial
  Chemically synthesized
aggacuucaugggcaccuu

SEQ ID NO: 25206 - RNA, 19 nt, artificial
  Chemically synthesized
gccuccaaggacugaauuu

SEQ ID NO: 25207 - RNA, 19 nt, artificial
  Chemically synthesized
cugagaacagugaacaagg

SEQ ID NO: 25208 - RNA, 19 nt, artificial
  Chemically synthesized
cauucaaagcuacccgaac

SEQ ID NO: 25209 - RNA, 19 nt, artificial
  Chemically synthesized
augaaaagcuucagaaauu

SEQ ID NO: 25210 - RNA, 19 nt, artificial
  Chemically synthesized
gauuuuaacagaaguuccu

SEQ ID NO: 25211 - RNA, 19 nt, artificial
  Chemically synthesized
aaugaaaagcuucagaaau

SEQ ID NO: 25212 - RNA, 19 nt, artificial
  Chemically synthesized
agauggaggaaggcuacau

SEQ ID NO: 25213 - RNA, 19 nt, artificial
  Chemically synthesized
aguuccuauaacaccggaa

SEQ ID NO: 25214 - RNA, 19 nt, artificial
  Chemically synthesized
aagcugggugugaugaaca

SEQ ID NO: 25215 - RNA, 19 nt, artificial
  Chemically synthesized
uucuagcucuuccgugaaa

SEQ ID NO: 25216 - RNA, 19 nt, artificial
  Chemically synthesized
cgaacaucuucagaaaugg

SEQ ID NO: 25217 - RNA, 19 nt, artificial
  Chemically synthesized
guaaaugugcacaauaaac

SEQ ID NO: 25218 - RNA, 19 nt, artificial
  Chemically synthesized
cugcugcagacaaguguga

SEQ ID NO: 25219 - RNA, 19 nt, artificial
  Chemically synthesized
gaaaagugaacgcccuugu

SEQ ID NO: 25220 - RNA, 19 nt, artificial
  Chemically synthesized
gagccucagcauauacucu

SEQ ID NO: 25221 - RNA, 19 nt, artificial
  Chemically synthesized
gaaauagaaagguucagug

SEQ ID NO: 25222 - RNA, 19 nt, artificial
  Chemically synthesized
agugaacgcccuuguagag

SEQ ID NO: 25223 - RNA, 19 nt, artificial
  Chemically synthesized
ccuccaaggacugaauuuu

SEQ ID NO: 25224 - RNA, 19 nt, artificial
  Chemically synthesized
uugugcuguuuuccaggaa

SEQ ID NO: 25225 - RNA, 19 nt, artificial
  Chemically synthesized
ugagaaagagccugagcag

SEQ ID NO: 25226 - RNA, 19 nt, artificial
  Chemically synthesized
acugcgugaacgucucuau

SEQ ID NO: 25227 - RNA, 19 nt, artificial
  Chemically synthesized
caggaacaaaauucaaaac

SEQ ID NO: 25228 - RNA, 19 nt, artificial
  Chemically synthesized
cagauucagcagaggauuu

SEQ ID NO: 25229 - RNA, 19 nt, artificial
  Chemically synthesized
ucaaauucaguucccugaa

SEQ ID NO: 25230 - RNA, 19 nt, artificial
  Chemically synthesized
agaaaguacugagaaagag

SEQ ID NO: 25231 - RNA, 19 nt, artificial
  Chemically synthesized
ggaaaugaacgucccauac

SEQ ID NO: 25232 - RNA, 19 nt, artificial
  Chemically synthesized
agaaaauucgugcaaugag

SEQ ID NO: 25233 - RNA, 19 nt, artificial
  Chemically synthesized
uccaggaaaagaagcagga

SEQ ID NO: 25234 - RNA, 19 nt, artificial
  Chemically synthesized
ggugcucacuuuagcagac

SEQ ID NO: 25235 - RNA, 19 nt, artificial
  Chemically synthesized
gcagauugaaaaucagcag

SEQ ID NO: 25236 - RNA, 19 nt, artificial
  Chemically synthesized
auucaaaacuucagcagca

SEQ ID NO: 25237 - RNA, 19 nt, artificial
  Chemically synthesized
aaggagaguucgaucuggu

SEQ ID NO: 25238 - RNA, 19 nt, artificial
  Chemically synthesized
uugaucauaugauguacga

SEQ ID NO: 25239 - RNA, 19 nt, artificial
  Chemically synthesized
uuaaagcaguguaugguaa

SEQ ID NO: 25240 - RNA, 19 nt, artificial
  Chemically synthesized
cuucuccuccgaucucaca

SEQ ID NO: 25241 - RNA, 19 nt, artificial
  Chemically synthesized
uacccuuugaucauaugau

SEQ ID NO: 25242 - RNA, 19 nt, artificial
  Chemically synthesized
gugcucccaguuucuauau

SEQ ID NO: 25243 - RNA, 19 nt, artificial
  Chemically synthesized
uuaaagaaaggaaaacuga

SEQ ID NO: 25244 - RNA, 19 nt, artificial
  Chemically synthesized
gaucuggugcagaggauca

SEQ ID NO: 25245 - RNA, 19 nt, artificial
  Chemically synthesized
ugguaagcccguuuuaccu

SEQ ID NO: 25246 - RNA, 19 nt, artificial
  Chemically synthesized
guuugcccauuaacuggga

SEQ ID NO: 25247 - RNA, 19 nt, artificial
  Chemically synthesized
gauggaggaaggcuacauc

SEQ ID NO: 25248 - RNA, 19 nt, artificial
  Chemically synthesized
uguuccaggaaaagaagca

SEQ ID NO: 25249 - RNA, 19 nt, artificial
  Chemically synthesized
uguaccaagaacuacagau

SEQ ID NO: 25250 - RNA, 19 nt, artificial
  Chemically synthesized
aauccgcuaaugauggaaa

SEQ ID NO: 25251 - RNA, 19 nt, artificial
  Chemically synthesized
gauauuaacuguuuucuug

SEQ ID NO: 25252 - RNA, 19 nt, artificial
  Chemically synthesized
augaacagauuuuaacaga

SEQ ID NO: 25253 - RNA, 19 nt, artificial
  Chemically synthesized
ugggugugaugaacaaagg

SEQ ID NO: 25254 - RNA, 19 nt, artificial
  Chemically synthesized
gcuuccuguuccaguucac

SEQ ID NO: 25255 - RNA, 19 nt, artificial
  Chemically synthesized
uccagugcucccaguuucu

SEQ ID NO: 25256 - RNA, 19 nt, artificial
  Chemically synthesized
acgaacaagcggaccaacu

SEQ ID NO: 25257 - RNA, 19 nt, artificial
  Chemically synthesized
auguuguagaauuuugcaa

SEQ ID NO: 25258 - RNA, 19 nt, artificial
  Chemically synthesized
uucuucccuucaucaccaa

SEQ ID NO: 25259 - RNA, 19 nt, artificial
  Chemically synthesized
cccaagagcaacgaacuca

SEQ ID NO: 25260 - RNA, 19 nt, artificial
  Chemically synthesized
aaaacagaauucuagcucu

SEQ ID NO: 25261 - RNA, 19 nt, artificial
  Chemically synthesized
gucagcaauuggaagauuu

SEQ ID NO: 25262 - RNA, 19 nt, artificial
  Chemically synthesized
ugaaugcugcugauaguga

SEQ ID NO: 25263 - RNA, 19 nt, artificial
  Chemically synthesized
uggugucaacgugaaugcu

SEQ ID NO: 25264 - RNA, 19 nt, artificial
  Chemically synthesized
gaauggguuccagucuuac

SEQ ID NO: 25265 - RNA, 19 nt, artificial
  Chemically synthesized
auucuagcucuuccgugaa

SEQ ID NO: 25266 - RNA, 19 nt, artificial
  Chemically synthesized
gaaucggacacucauccuu

SEQ ID NO: 25267 - RNA, 19 nt, artificial
  Chemically synthesized
ccaacugagaacagugaac

SEQ ID NO: 25268 - RNA, 19 nt, artificial
  Chemically synthesized
ugcugauagugauggaugg

SEQ ID NO: 25269 - RNA, 19 nt, artificial
  Chemically synthesized
gcucuauuuuucauguaug

SEQ ID NO: 25270 - RNA, 19 nt, artificial
  Chemically synthesized
cuugagcaacaaugaacag

SEQ ID NO: 25271 - RNA, 19 nt, artificial
  Chemically synthesized
ucccuucaucaccaaagga

SEQ ID NO: 25272 - RNA, 19 nt, artificial
  Chemically synthesized
gaaacugcugcagacaagu

SEQ ID NO: 25273 - RNA, 19 nt, artificial
  Chemically synthesized
ccaacauccagaagcugcu

SEQ ID NO: 25274 - RNA, 19 nt, artificial
  Chemically synthesized
gaaaaucagcagcagaugu

SEQ ID NO: 25275 - RNA, 19 nt, artificial
  Chemically synthesized
cuaugggaaaaaaauucag

SEQ ID NO: 25276 - RNA, 19 nt, artificial
  Chemically synthesized
ugucaacgugaaugcugcu

SEQ ID NO: 25277 - RNA, 19 nt, artificial
  Chemically synthesized
cugaacucccacugacagu

SEQ ID NO: 25278 - RNA, 19 nt, artificial
  Chemically synthesized
ugucgagauguuguagaau

SEQ ID NO: 25279 - RNA, 19 nt, artificial
  Chemically synthesized
aaguauuuuuugacuagac

SEQ ID NO: 25280 - RNA, 19 nt, artificial
  Chemically synthesized
gcaaucugucugcugaaau

SEQ ID NO: 25281 - RNA, 19 nt, artificial
  Chemically synthesized
ccuuauauccagguuccca

SEQ ID NO: 25282 - RNA, 19 nt, artificial
  Chemically synthesized
gaggugugaauuguacgua

SEQ ID NO: 25283 - RNA, 19 nt, artificial
  Chemically synthesized
uugacuagaccauucaaag

SEQ ID NO: 25284 - RNA, 19 nt, artificial
  Chemically synthesized
cguucaccucugcaaacag

SEQ ID NO: 25285 - RNA, 19 nt, artificial
  Chemically synthesized
uaugauguacgaacaucuu

SEQ ID NO: 25286 - RNA, 19 nt, artificial
  Chemically synthesized
ggagagccucagcauauac

SEQ ID NO: 25287 - RNA, 19 nt, artificial
  Chemically synthesized
ucucuaugggaaaaaaauu

SEQ ID NO: 25288 - RNA, 19 nt, artificial
  Chemically synthesized
caagcgaaucagugaacug

SEQ ID NO: 25289 - RNA, 19 nt, artificial
  Chemically synthesized
ucgaucuggugcagaggau

SEQ ID NO: 25290 - RNA, 19 nt, artificial
  Chemically synthesized
ggcugauaaagggucaagg

SEQ ID NO: 25291 - RNA, 19 nt, artificial
  Chemically synthesized
uuuuggugucaacgugaau

SEQ ID NO: 25292 - RNA, 19 nt, artificial
  Chemically synthesized
caaacagcugguggagagu

SEQ ID NO: 25293 - RNA, 19 nt, artificial
  Chemically synthesized
auggaaaccuggaagagcu

SEQ ID NO: 25294 - RNA, 19 nt, artificial
  Chemically synthesized
aacgugaaugcugcugaua

SEQ ID NO: 25295 - RNA, 19 nt, artificial
  Chemically synthesized
gaugccgaugauauuaacu

SEQ ID NO: 25296 - RNA, 19 nt, artificial
  Chemically synthesized
gaaaguacugagaaagagc

SEQ ID NO: 25297 - RNA, 19 nt, artificial
  Chemically synthesized
aauugaaagaacgaguuga

SEQ ID NO: 25298 - RNA, 19 nt, artificial
  Chemically synthesized
aaauguaauaaauguaccu

SEQ ID NO: 25299 - RNA, 19 nt, artificial
  Chemically synthesized
accaacuuaaccaggaaca

SEQ ID NO: 25300 - RNA, 19 nt, artificial
  Chemically synthesized
cuccaaggacugaauuuug

SEQ ID NO: 25301 - RNA, 19 nt, artificial
  Chemically synthesized
aagaaaagugaacgcccuu

SEQ ID NO: 25302 - RNA, 19 nt, artificial
  Chemically synthesized
ucccauacccuuugaucau

SEQ ID NO: 25303 - RNA, 19 nt, artificial
  Chemically synthesized
gaauuguacguacaggcuu

SEQ ID NO: 25304 - RNA, 19 nt, artificial
  Chemically synthesized
uugaaaaucagcagcagau

SEQ ID NO: 25305 - RNA, 19 nt, artificial
  Chemically synthesized
aagucgacuacagcaaaau

SEQ ID NO: 25306 - RNA, 19 nt, artificial
  Chemically synthesized
auauuaacuguuuucuuga

SEQ ID NO: 25307 - RNA, 19 nt, artificial
  Chemically synthesized
aacaagcggaccaacuuga

SEQ ID NO: 25308 - RNA, 19 nt, artificial
  Chemically synthesized
agcuucagaaauugaaaga

SEQ ID NO: 25309 - RNA, 19 nt, artificial
  Chemically synthesized
aaucagugaacugcgugaa

SEQ ID NO: 25310 - RNA, 19 nt, artificial
  Chemically synthesized
caucaccuuggagcacuga

SEQ ID NO: 25311 - RNA, 19 nt, artificial
  Chemically synthesized
guggaguuaaaaagacugu

SEQ ID NO: 25312 - RNA, 19 nt, artificial
  Chemically synthesized
gaaacaaccugucgagaug

SEQ ID NO: 25313 - RNA, 19 nt, artificial
  Chemically synthesized
ugaagacagaagcucuuac

SEQ ID NO: 25314 - RNA, 19 nt, artificial
  Chemically synthesized
cccuuugaucauaugaugu

SEQ ID NO: 25315 - RNA, 19 nt, artificial
  Chemically synthesized
aagaagcaggaaguacaga

SEQ ID NO: 25316 - RNA, 19 nt, artificial
  Chemically synthesized
augcucugugggacuacga

SEQ ID NO: 25317 - RNA, 19 nt, artificial
  Chemically synthesized
ccaguuugcccauuaacug

SEQ ID NO: 25318 - RNA, 19 nt, artificial
  Chemically synthesized
caguuaaagcaguguaugg

SEQ ID NO: 25319 - RNA, 19 nt, artificial
  Chemically synthesized
gugucaacgugaaugcugc

SEQ ID NO: 25320 - RNA, 19 nt, artificial
  Chemically synthesized
cacucgccugaacuuccuu

SEQ ID NO: 25321 - RNA, 19 nt, artificial
  Chemically synthesized
auaaauguaccuggagaaa

SEQ ID NO: 25322 - RNA, 19 nt, artificial
  Chemically synthesized
aguucaccuaaaggcugau

SEQ ID NO: 25323 - RNA, 19 nt, artificial
  Chemically synthesized
ugaacgcccuuguagagca

SEQ ID NO: 25324 - RNA, 19 nt, artificial
  Chemically synthesized
ugaaacugcugcagacaag

SEQ ID NO: 25325 - RNA, 19 nt, artificial
  Chemically synthesized
ccaaaccacccaccaaacu

SEQ ID NO: 25326 - RNA, 19 nt, artificial
  Chemically synthesized
uguuccaguucaccuaaag

SEQ ID NO: 25327 - RNA, 19 nt, artificial
  Chemically synthesized
cauaagcgacauugaaacu

SEQ ID NO: 25328 - RNA, 19 nt, artificial
  Chemically synthesized
cugcgugaacgucucuaug

SEQ ID NO: 25329 - RNA, 19 nt, artificial
  Chemically synthesized
gugcuguuuuccaggaaag

SEQ ID NO: 25330 - RNA, 19 nt, artificial
  Chemically synthesized
gacuguacauaguguggug

SEQ ID NO: 25331 - RNA, 19 nt, artificial
  Chemically synthesized
uucaaagcuacccgaacua

SEQ ID NO: 25332 - RNA, 19 nt, artificial
  Chemically synthesized
guacaggcuuuuuauauac

SEQ ID NO: 25333 - RNA, 19 nt, artificial
  Chemically synthesized
cacaacagauucagcagag

SEQ ID NO: 25334 - RNA, 19 nt, artificial
  Chemically synthesized
caagcuaugggacauaccc

SEQ ID NO: 25335 - RNA, 19 nt, artificial
  Chemically synthesized
aucacaucgugaaguuccu

SEQ ID NO: 25336 - RNA, 19 nt, artificial
  Chemically synthesized
gcguucaccucugcaaaca

SEQ ID NO: 25337 - RNA, 19 nt, artificial
  Chemically synthesized
ggaaacauguccaguguug

SEQ ID NO: 25338 - RNA, 19 nt, artificial
  Chemically synthesized
gcagaggaucaucuaugag

SEQ ID NO: 25339 - RNA, 19 nt, artificial
  Chemically synthesized
ugagaggacaagucgacua

SEQ ID NO: 25340 - RNA, 19 nt, artificial
  Chemically synthesized
caccuucagaaaguacuga

SEQ ID NO: 25341 - RNA, 19 nt, artificial
  Chemically synthesized
acugaggugugaauuguac

SEQ ID NO: 25342 - RNA, 19 nt, artificial
  Chemically synthesized
guggugaagaaaagugaac

SEQ ID NO: 25343 - RNA, 19 nt, artificial
  Chemically synthesized
auaugauguacgaacaucu

SEQ ID NO: 25344 - RNA, 19 nt, artificial
  Chemically synthesized
cuuaaccaggaacaaaauu

SEQ ID NO: 25345 - RNA, 19 nt, artificial
  Chemically synthesized
uaggcaacagcagcagauu

SEQ ID NO: 25346 - RNA, 19 nt, artificial
  Chemically synthesized
ucagcagcagucuauuucu

SEQ ID NO: 25347 - RNA, 19 nt, artificial
  Chemically synthesized
ucuggaaggagaguucgau

SEQ ID NO: 25348 - RNA, 19 nt, artificial
  Chemically synthesized
aagaacgaguugaagccca

SEQ ID NO: 25349 - RNA, 19 nt, artificial
  Chemically synthesized
aguuccauauacuccaugu

SEQ ID NO: 25350 - RNA, 19 nt, artificial
  Chemically synthesized
ugaaaaagcgcagcuccau

SEQ ID NO: 25351 - RNA, 19 nt, artificial
  Chemically synthesized
cuagaaaauggucuuaaug

SEQ ID NO: 25352 - RNA, 19 nt, artificial
  Chemically synthesized
gaacaagcggaccaacuug

SEQ ID NO: 25353 - RNA, 19 nt, artificial
  Chemically synthesized
aaaaagcgcagcuccauca

SEQ ID NO: 25354 - RNA, 19 nt, artificial
  Chemically synthesized
agcugaaccgugugaaugg

SEQ ID NO: 25355 - RNA, 19 nt, artificial
  Chemically synthesized
guuuuccaggaaagcugca

SEQ ID NO: 25356 - RNA, 19 nt, artificial
  Chemically synthesized
ccuggagaaaaacguacug

SEQ ID NO: 25357 - RNA, 19 nt, artificial
  Chemically synthesized
ucaccuuggagcacugacu

SEQ ID NO: 25358 - RNA, 19 nt, artificial
  Chemically synthesized
cugaaauagaaagguucag

SEQ ID NO: 25359 - RNA, 19 nt, artificial
  Chemically synthesized
auggaaacauguccagugu

SEQ ID NO: 25360 - RNA, 19 nt, artificial
  Chemically synthesized
cagcuuagucagcaauugg

SEQ ID NO: 25361 - RNA, 19 nt, artificial
  Chemically synthesized
gagagccucagcauauacu

SEQ ID NO: 25362 - RNA, 19 nt, artificial
  Chemically synthesized
cuccagcagugaacacugu

SEQ ID NO: 25363 - RNA, 19 nt, artificial
  Chemically synthesized
gguggaguuaaaaagacug

SEQ ID NO: 25364 - RNA, 19 nt, artificial
  Chemically synthesized
agacccaagagcaacgaac

SEQ ID NO: 25365 - RNA, 19 nt, artificial
  Chemically synthesized
acacucgccugaacuuccu

SEQ ID NO: 25366 - RNA, 19 nt, artificial
  Chemically synthesized
cauuaaaauacaggcccuu

SEQ ID NO: 25367 - RNA, 19 nt, artificial
  Chemically synthesized
ucaaaacuucagcagcaga

SEQ ID NO: 25368 - RNA, 19 nt, artificial
  Chemically synthesized
ucuuaaauaagcgcaacau

SEQ ID NO: 25369 - RNA, 19 nt, artificial
  Chemically synthesized
cuagaccauucaaagcuac

SEQ ID NO: 25370 - RNA, 19 nt, artificial
  Chemically synthesized
acccuuugaucauaugaug

SEQ ID NO: 25371 - RNA, 19 nt, artificial
  Chemically synthesized
ggagccucuguauggaaac

SEQ ID NO: 25372 - RNA, 19 nt, artificial
  Chemically synthesized
aaacugaauggguuccagu

SEQ ID NO: 25373 - RNA, 19 nt, artificial
  Chemically synthesized
cuuggagcacugacuguac

SEQ ID NO: 25374 - RNA, 19 nt, artificial
  Chemically synthesized
gcugauaaagggucaaggc

SEQ ID NO: 25375 - RNA, 19 nt, artificial
  Chemically synthesized
gauguacgaacaucuucag

SEQ ID NO: 25376 - RNA, 19 nt, artificial
  Chemically synthesized
uucguaaccaacuuaacca

SEQ ID NO: 25377 - RNA, 19 nt, artificial
  Chemically synthesized
ggugaagaaaagugaacgc

SEQ ID NO: 25378 - RNA, 19 nt, artificial
  Chemically synthesized
gugaauccuacaguuucca

SEQ ID NO: 25379 - RNA, 19 nt, artificial
  Chemically synthesized
gaucagcuuagucagcaau

SEQ ID NO: 25380 - RNA, 19 nt, artificial
  Chemically synthesized
aaauucagcugaaccgugu

SEQ ID NO: 25381 - RNA, 19 nt, artificial
  Chemically synthesized
cugaauggagucaggugcu

SEQ ID NO: 25382 - RNA, 19 nt, artificial
  Chemically synthesized
gauguggacaauggaaaca

SEQ ID NO: 25383 - RNA, 19 nt, artificial
  Chemically synthesized
cggaccaacuugaagaagc

SEQ ID NO: 25384 - RNA, 19 nt, artificial
  Chemically synthesized
uauacuccauguaccucca

SEQ ID NO: 25385 - RNA, 19 nt, artificial
  Chemically synthesized
aacuucagcagcagaagga

SEQ ID NO: 25386 - RNA, 19 nt, artificial
  Chemically synthesized
aaggaaccuggagaaggca

SEQ ID NO: 25387 - RNA, 19 nt, artificial
  Chemically synthesized
uggaaacauguccaguguu

SEQ ID NO: 25388 - RNA, 19 nt, artificial
  Chemically synthesized
aacgucucuaugggaaaaa

SEQ ID NO: 25389 - RNA, 19 nt, artificial
  Chemically synthesized
aaaagacuguaccaagaac

SEQ ID NO: 25390 - RNA, 19 nt, artificial
  Chemically synthesized
gauccuucuucccuucauc

SEQ ID NO: 25391 - RNA, 19 nt, artificial
  Chemically synthesized
uacagacugcaauuuuaag

SEQ ID NO: 25392 - RNA, 19 nt, artificial
  Chemically synthesized
cgccugaacuuccuuuugg

SEQ ID NO: 25393 - RNA, 19 nt, artificial
  Chemically synthesized
cauacccuuugaucauaug

SEQ ID NO: 25394 - RNA, 19 nt, artificial
  Chemically synthesized
uuacccucucagagcucca

SEQ ID NO: 25395 - RNA, 19 nt, artificial
  Chemically synthesized
aguugaagcccaggagaac

SEQ ID NO: 25396 - RNA, 19 nt, artificial
  Chemically synthesized
uucagcugaaccgugugaa

SEQ ID NO: 25397 - RNA, 19 nt, artificial
  Chemically synthesized
acaggcccuuaggcucuau

SEQ ID NO: 25398 - RNA, 19 nt, artificial
  Chemically synthesized
cacucauccuuucucacac

SEQ ID NO: 25399 - RNA, 19 nt, artificial
  Chemically synthesized
cuuaaauaagcgcaacaug

SEQ ID NO: 25400 - RNA, 19 nt, artificial
  Chemically synthesized
cuauuuuucauguaugagu

SEQ ID NO: 25401 - RNA, 19 nt, artificial
  Chemically synthesized
augcagcacuguagcccau

SEQ ID NO: 25402 - RNA, 19 nt, artificial
  Chemically synthesized
ucaacgugaaugcugcuga

SEQ ID NO: 25403 - RNA, 19 nt, artificial
  Chemically synthesized
auacccuuugaucauauga

SEQ ID NO: 25404 - RNA, 19 nt, artificial
  Chemically synthesized
gccucagcauauacucuuc

SEQ ID NO: 25405 - RNA, 19 nt, artificial
  Chemically synthesized
ucaccaaaggagccucugu

SEQ ID NO: 25406 - RNA, 19 nt, artificial
  Chemically synthesized
aaauggucuuaauggugcu

SEQ ID NO: 25407 - RNA, 19 nt, artificial
  Chemically synthesized
gaaaagcugggugugauga

SEQ ID NO: 25408 - RNA, 19 nt, artificial
  Chemically synthesized
accauucaaagcuacccga

SEQ ID NO: 25409 - RNA, 19 nt, artificial
  Chemically synthesized
cucuucuccuccgaucuca

SEQ ID NO: 25410 - RNA, 19 nt, artificial
  Chemically synthesized
aaaacguacugaaaauggg

SEQ ID NO: 25411 - RNA, 19 nt, artificial
  Chemically synthesized
cuaugugcccaaaaaccug

SEQ ID NO: 25412 - RNA, 19 nt, artificial
  Chemically synthesized
agauguuguagaauuuugc

SEQ ID NO: 25413 - RNA, 19 nt, artificial
  Chemically synthesized
acguacaggcuuuuuauau

SEQ ID NO: 25414 - RNA, 19 nt, artificial
  Chemically synthesized
agauugaaaaucagcagca

SEQ ID NO: 25415 - RNA, 19 nt, artificial
  Chemically synthesized
uuggaagauuuaaagaaag

SEQ ID NO: 25416 - RNA, 19 nt, artificial
  Chemically synthesized
cagucuauuucugaaaaug

SEQ ID NO: 25417 - RNA, 19 nt, artificial
  Chemically synthesized
ugaggugugaauuguacgu

SEQ ID NO: 25418 - RNA, 19 nt, artificial
  Chemically synthesized
aguucgaucuggugcagag

SEQ ID NO: 25419 - RNA, 19 nt, artificial
  Chemically synthesized
ugauggacaagcgaaucag

SEQ ID NO: 25420 - RNA, 19 nt, artificial
  Chemically synthesized
aacgaguugaagcccagga

SEQ ID NO: 25421 - RNA, 19 nt, artificial
  Chemically synthesized
aucagcagcauucacguug

SEQ ID NO: 25422 - RNA, 19 nt, artificial
  Chemically synthesized
uuuugguauauaaaaagcc

SEQ ID NO: 25423 - RNA, 19 nt, artificial
  Chemically synthesized
uuuggauuuauaguaauug

SEQ ID NO: 25424 - RNA, 19 nt, artificial
  Chemically synthesized
uuauugugcacauuuacac

SEQ ID NO: 25425 - RNA, 19 nt, artificial
  Chemically synthesized
uaagaguuccuucugcugc

SEQ ID NO: 25426 - RNA, 19 nt, artificial
  Chemically synthesized
uucauuuucagaaauagac

SEQ ID NO: 25427 - RNA, 19 nt, artificial
  Chemically synthesized
uucagaaauagacugcugc

SEQ ID NO: 25428 - RNA, 19 nt, artificial
  Chemically synthesized
uauuucagcagacagauug

SEQ ID NO: 25429 - RNA, 19 nt, artificial
  Chemically synthesized
uauaugcugaggcucuccc

SEQ ID NO: 25430 - RNA, 19 nt, artificial
  Chemically synthesized
uuauuuaagaguuccuucu

SEQ ID NO: 25431 - RNA, 19 nt, artificial
  Chemically synthesized
aaaacaguuaauaucaucg

SEQ ID NO: 25432 - RNA, 19 nt, artificial
  Chemically synthesized
uuuauuacauuucucugag

SEQ ID NO: 25433 - RNA, 19 nt, artificial
  Chemically synthesized
aucacuaucagcagcauuc

SEQ ID NO: 25434 - RNA, 19 nt, artificial
  Chemically synthesized
uuuaacugacuuauuuaag

SEQ ID NO: 25435 - RNA, 19 nt, artificial
  Chemically synthesized
ucauuagcggauuuggauc

SEQ ID NO: 25436 - RNA, 19 nt, artificial
  Chemically synthesized
uuaugggacuucuuaaugg

SEQ ID NO: 25437 - RNA, 19 nt, artificial
  Chemically synthesized
uuuguuccugguuaaguug

SEQ ID NO: 25438 - RNA, 19 nt, artificial
  Chemically synthesized
auuuucuucagcuuguucu

SEQ ID NO: 25439 - RNA, 19 nt, artificial
  Chemically synthesized
ucucauugcacgaauuuuc

SEQ ID NO: 25440 - RNA, 19 nt, artificial
  Chemically synthesized
aaucuguucauuguugcuc

SEQ ID NO: 25441 - RNA, 19 nt, artificial
  Chemically synthesized
uuuauugugcacauuuaca

SEQ ID NO: 25442 - RNA, 19 nt, artificial
  Chemically synthesized
uuggauuuauaguaauugg

SEQ ID NO: 25443 - RNA, 19 nt, artificial
  Chemically synthesized
uuucaaucugcugcuguug

SEQ ID NO: 25444 - RNA, 19 nt, artificial
  Chemically synthesized
uuugguauauaaaaagccu

SEQ ID NO: 25445 - RNA, 19 nt, artificial
  Chemically synthesized
ucugaguucguugcucuug

SEQ ID NO: 25446 - RNA, 19 nt, artificial
  Chemically synthesized
ucuuucucaguacuuucug

SEQ ID NO: 25447 - RNA, 19 nt, artificial
  Chemically synthesized
uuucugaagcuuuucauuu

SEQ ID NO: 25448 - RNA, 19 nt, artificial
  Chemically synthesized
uucucugaguucguugcuc

SEQ ID NO: 25449 - RNA, 19 nt, artificial
  Chemically synthesized
uucuguuaaaaucuguuca

SEQ ID NO: 25450 - RNA, 19 nt, artificial
  Chemically synthesized
uaaaaucuguucauuguug

SEQ ID NO: 25451 - RNA, 19 nt, artificial
  Chemically synthesized
uguuaaaaucuguucauug

SEQ ID NO: 25452 - RNA, 19 nt, artificial
  Chemically synthesized
uacauuuauuacauuucuc

SEQ ID NO: 25453 - RNA, 19 nt, artificial
  Chemically synthesized
uuaacugacuuauuuaagg

SEQ ID NO: 25454 - RNA, 19 nt, artificial
  Chemically synthesized
uauuuaagaguuccuucug

SEQ ID NO: 25455 - RNA, 19 nt, artificial
  Chemically synthesized
uuucaauuucugaagcuuu

SEQ ID NO: 25456 - RNA, 19 nt, artificial
  Chemically synthesized
uuaaaaucuguucauuguu

SEQ ID NO: 25457 - RNA, 19 nt, artificial
  Chemically synthesized
aaguugguccgcuuguucg

SEQ ID NO: 25458 - RNA, 19 nt, artificial
  Chemically synthesized
uuuuccuuucuuuaaaucu

SEQ ID NO: 25459 - RNA, 19 nt, artificial
  Chemically synthesized
uuccugguuaaguugguua

SEQ ID NO: 25460 - RNA, 19 nt, artificial
  Chemically synthesized
uuccuuucuuuaaaucuuc

SEQ ID NO: 25461 - RNA, 19 nt, artificial
  Chemically synthesized
uucaguuuuccuuucuuua

SEQ ID NO: 25462 - RNA, 19 nt, artificial
  Chemically synthesized
uacgaaucuguaguucuug

SEQ ID NO: 25463 - RNA, 19 nt, artificial
  Chemically synthesized
uuuaaaucuuccaauugcu

SEQ ID NO: 25464 - RNA, 19 nt, artificial
  Chemically synthesized
auuuaagaguuccuucugc

SEQ ID NO: 25465 - RNA, 19 nt, artificial
  Chemically synthesized
aacuguaggauucacauug

SEQ ID NO: 25466 - RNA, 19 nt, artificial
  Chemically synthesized
uuucuuuaaaucuuccaau

SEQ ID NO: 25467 - RNA, 19 nt, artificial
  Chemically synthesized
auuuucaguacguuuuucu

SEQ ID NO: 25468 - RNA, 19 nt, artificial
  Chemically synthesized
ucauacaugaaaaauagag

SEQ ID NO: 25469 - RNA, 19 nt, artificial
  Chemically synthesized
uaucuuggagcucugagag

SEQ ID NO: 25470 - RNA, 19 nt, artificial
  Chemically synthesized
uuuccagggagcuugucga

SEQ ID NO: 25471 - RNA, 19 nt, artificial
  Chemically synthesized
uucuucaccacacuaugua

SEQ ID NO: 25472 - RNA, 19 nt, artificial
  Chemically synthesized
uuuucccauagagacguuc

SEQ ID NO: 25473 - RNA, 19 nt, artificial
  Chemically synthesized
aaguuuugaauuuuguucc

SEQ ID NO: 25474 - RNA, 19 nt, artificial
  Chemically synthesized
ugagaaaggaugagugucc

SEQ ID NO: 25475 - RNA, 19 nt, artificial
  Chemically synthesized
aauugcagucuguacuucc

SEQ ID NO: 25476 - RNA, 19 nt, artificial
  Chemically synthesized
uugaaaguggguauuuauu

SEQ ID NO: 25477 - RNA, 19 nt, artificial
  Chemically synthesized
aaaauguaaacgcuguucc

SEQ ID NO: 25478 - RNA, 19 nt, artificial
  Chemically synthesized
aaaauagagccuaagggcc

SEQ ID NO: 25479 - RNA, 19 nt, artificial
  Chemically synthesized
aucauuagcggauuuggau

SEQ ID NO: 25480 - RNA, 19 nt, artificial
  Chemically synthesized
aauuucacuucuucccucc

SEQ ID NO: 25481 - RNA, 19 nt, artificial
  Chemically synthesized
uuagcggauuuggaucuuc

SEQ ID NO: 25482 - RNA, 19 nt, artificial
  Chemically synthesized
ucaaucugcugcuguugcc

SEQ ID NO: 25483 - RNA, 19 nt, artificial
  Chemically synthesized
uagaauucuguuuuaaugu

SEQ ID NO: 25484 - RNA, 19 nt, artificial
  Chemically synthesized
aguucguugcucuuggguc

SEQ ID NO: 25485 - RNA, 19 nt, artificial
  Chemically synthesized
auaucaucggcaucaucgc

SEQ ID NO: 25486 - RNA, 19 nt, artificial
  Chemically synthesized
ucaaaaaauacuuuuggua

SEQ ID NO: 25487 - RNA, 19 nt, artificial
  Chemically synthesized
ucaguaagagcuucugucu

SEQ ID NO: 25488 - RNA, 19 nt, artificial
  Chemically synthesized
acauuuauuacauuucucu

SEQ ID NO: 25489 - RNA, 19 nt, artificial
  Chemically synthesized
uauuacauuucucugaguu

SEQ ID NO: 25490 - RNA, 19 nt, artificial
  Chemically synthesized
uuuagaaaauguaaacgcu

SEQ ID NO: 25491 - RNA, 19 nt, artificial
  Chemically synthesized
auuuauuacauuucucuga

SEQ ID NO: 25492 - RNA, 19 nt, artificial
  Chemically synthesized
auggaguauauggaacuug

SEQ ID NO: 25493 - RNA, 19 nt, artificial
  Chemically synthesized
uaauaucaucggcaucauc

SEQ ID NO: 25494 - RNA, 19 nt, artificial
  Chemically synthesized
auuucucugaguucguugc

SEQ ID NO: 25495 - RNA, 19 nt, artificial
  Chemically synthesized
uguuacaagaggcagcgca

SEQ ID NO: 25496 - RNA, 19 nt, artificial
  Chemically synthesized
uaauucuuagguggugugg

SEQ ID NO: 25497 - RNA, 19 nt, artificial
  Chemically synthesized
acugguuucacggaagagc

SEQ ID NO: 25498 - RNA, 19 nt, artificial
  Chemically synthesized
uucaauuucugaagcuuuu

SEQ ID NO: 25499 - RNA, 19 nt, artificial
  Chemically synthesized
aaauucuacaacaucucga

SEQ ID NO: 25500 - RNA, 19 nt, artificial
  Chemically synthesized
uccaacauaguucggguag

SEQ ID NO: 25501 - RNA, 19 nt, artificial
  Chemically synthesized
augauuuugcuguagucga

SEQ ID NO: 25502 - RNA, 19 nt, artificial
  Chemically synthesized
uuucagcagacagauugcc

SEQ ID NO: 25503 - RNA, 19 nt, artificial
  Chemically synthesized
uuuccuuucuuuaaaucuu

SEQ ID NO: 25504 - RNA, 19 nt, artificial
  Chemically synthesized
auuacauuucucugaguuc

SEQ ID NO: 25505 - RNA, 19 nt, artificial
  Chemically synthesized
accuuguucacuguucuca

SEQ ID NO: 25506 - RNA, 19 nt, artificial
  Chemically synthesized
aaaaauagagccuaagggc

SEQ ID NO: 25507 - RNA, 19 nt, artificial
  Chemically synthesized
uucguacaucauaugauca

SEQ ID NO: 25508 - RNA, 19 nt, artificial
  Chemically synthesized
ucuuuaaaucuuccaauug

SEQ ID NO: 25509 - RNA, 19 nt, artificial
  Chemically synthesized
aggauucacauuguggacg

SEQ ID NO: 25510 - RNA, 19 nt, artificial
  Chemically synthesized
agcaguuucaaugucgcuu

SEQ ID NO: 25511 - RNA, 19 nt, artificial
  Chemically synthesized
uuuucauuuucagaaauag

SEQ ID NO: 25512 - RNA, 19 nt, artificial
  Chemically synthesized
cauugcacgaauuuucuuc

SEQ ID NO: 25513 - RNA, 19 nt, artificial
  Chemically synthesized
ugguauauaaaaagccugu

SEQ ID NO: 25514 - RNA, 19 nt, artificial
  Chemically synthesized
auuguggacgcugucugcu

SEQ ID NO: 25515 - RNA, 19 nt, artificial
  Chemically synthesized
uuccuucugcugcugaagu

SEQ ID NO: 25516 - RNA, 19 nt, artificial
  Chemically synthesized
uuccauacagaggcuccuu

SEQ ID NO: 25517 - RNA, 19 nt, artificial
  Chemically synthesized
uucauuguugcucaagaaa

SEQ ID NO: 25518 - RNA, 19 nt, artificial
  Chemically synthesized
ucacauuguggacgcuguc

SEQ ID NO: 25519 - RNA, 19 nt, artificial
  Chemically synthesized
uagaaacugggagcacugg

SEQ ID NO: 25520 - RNA, 19 nt, artificial
  Chemically synthesized
acaauaaucucuuaagugg

SEQ ID NO: 25521 - RNA, 19 nt, artificial
  Chemically synthesized
uccaauugcugacuaagcu

SEQ ID NO: 25522 - RNA, 19 nt, artificial
  Chemically synthesized
aguaagagcuucugucuuc

SEQ ID NO: 25523 - RNA, 19 nt, artificial
  Chemically synthesized
uuucauuuucagaaauaga

SEQ ID NO: 25524 - RNA, 19 nt, artificial
  Chemically synthesized
cauuucucugaguucguug

SEQ ID NO: 25525 - RNA, 19 nt, artificial
  Chemically synthesized
cggauuuggaucuuccaug

SEQ ID NO: 25526 - RNA, 19 nt, artificial
  Chemically synthesized
gucugcaucacucugguag

SEQ ID NO: 25527 - RNA, 19 nt, artificial
  Chemically synthesized
acauaguucggguagcuuu

SEQ ID NO: 25528 - RNA, 19 nt, artificial
  Chemically synthesized
uccaucauuagcggauuug

SEQ ID NO: 25529 - RNA, 19 nt, artificial
  Chemically synthesized
auaucuuggagcucugaga

SEQ ID NO: 25530 - RNA, 19 nt, artificial
  Chemically synthesized
uuugaaaguggguauuuau

SEQ ID NO: 25531 - RNA, 19 nt, artificial
  Chemically synthesized
uucacaccucagugaagcg

SEQ ID NO: 25532 - RNA, 19 nt, artificial
  Chemically synthesized
uugaagcgcugguacagca

SEQ ID NO: 25533 - RNA, 19 nt, artificial
  Chemically synthesized
ucccaguugucacuugguc

SEQ ID NO: 25534 - RNA, 19 nt, artificial
  Chemically synthesized
guuuuugggcacauagccc

SEQ ID NO: 25535 - RNA, 19 nt, artificial
  Chemically synthesized
uccauacagaggcuccuuu

SEQ ID NO: 25536 - RNA, 19 nt, artificial
  Chemically synthesized
ugaaaguggguauuuauuu

SEQ ID NO: 25537 - RNA, 19 nt, artificial
  Chemically synthesized
ucauuuucagaaauagacu

SEQ ID NO: 25538 - RNA, 19 nt, artificial
  Chemically synthesized
aaucuguaguucuugguac

SEQ ID NO: 25539 - RNA, 19 nt, artificial
  Chemically synthesized
uagucaaaaaauacuuuug

SEQ ID NO: 25540 - RNA, 19 nt, artificial
  Chemically synthesized
ucgaacucuccuuccagag

SEQ ID NO: 25541 - RNA, 19 nt, artificial
  Chemically synthesized
uucuuuaaaucuuccaauu

SEQ ID NO: 25542 - RNA, 19 nt, artificial
  Chemically synthesized
aaccuuucuauuucagcag

SEQ ID NO: 25543 - RNA, 19 nt, artificial
  Chemically synthesized
uacaacaucucgacagguu

SEQ ID NO: 25544 - RNA, 19 nt, artificial
  Chemically synthesized
auucacaccucagugaagc

SEQ ID NO: 25545 - RNA, 19 nt, artificial
  Chemically synthesized
ucugcaucacucugguagc

SEQ ID NO: 25546 - RNA, 19 nt, artificial
  Chemically synthesized
ugcucaggcucuuucucag

SEQ ID NO: 25547 - RNA, 19 nt, artificial
  Chemically synthesized
ucuguaguucuugguacag

SEQ ID NO: 25548 - RNA, 19 nt, artificial
  Chemically synthesized
uaagacuggaacccauuca

SEQ ID NO: 25549 - RNA, 19 nt, artificial
  Chemically synthesized
acuuuugguauauaaaaag

SEQ ID NO: 25550 - RNA, 19 nt, artificial
  Chemically synthesized
cuucagcuuguucuccugg

SEQ ID NO: 25551 - RNA, 19 nt, artificial
  Chemically synthesized
uggauguagccuuccucca

SEQ ID NO: 25552 - RNA, 19 nt, artificial
  Chemically synthesized
ucagugggaguucaggcuu

SEQ ID NO: 25553 - RNA, 19 nt, artificial
  Chemically synthesized
ugcuuuaacugacuuauuu

SEQ ID NO: 25554 - RNA, 19 nt, artificial
  Chemically synthesized
ugaagcuuuucauuuucag

SEQ ID NO: 25555 - RNA, 19 nt, artificial
  Chemically synthesized
ggcuucuucaaguuggucc

SEQ ID NO: 25556 - RNA, 19 nt, artificial
  Chemically synthesized
aaacaguuaauaucaucgg

SEQ ID NO: 25557 - RNA, 19 nt, artificial
  Chemically synthesized
uggacauguuuccauacag

SEQ ID NO: 25558 - RNA, 19 nt, artificial
  Chemically synthesized
uucugaagcuuuucauuuu

SEQ ID NO: 25559 - RNA, 19 nt, artificial
  Chemically synthesized
augucgcuuaugguugagg

SEQ ID NO: 25560 - RNA, 19 nt, artificial
  Chemically synthesized
uccugcucaggcucuuucu

SEQ ID NO: 25561 - RNA, 19 nt, artificial
  Chemically synthesized
acuauguacagucagugcu

SEQ ID NO: 25562 - RNA, 19 nt, artificial
  Chemically synthesized
aacuugaauucacugucug

SEQ ID NO: 25563 - RNA, 19 nt, artificial
  Chemically synthesized
cuguacuuccugcuucuuu

SEQ ID NO: 25564 - RNA, 19 nt, artificial
  Chemically synthesized
ucgcuuaugguugaggcaa

SEQ ID NO: 25565 - RNA, 19 nt, artificial
  Chemically synthesized
ugaacuggaacaggaagcg

SEQ ID NO: 25566 - RNA, 19 nt, artificial
  Chemically synthesized
uguugcucaagaaaacagu

SEQ ID NO: 25567 - RNA, 19 nt, artificial
  Chemically synthesized
aaauagagccuaagggccu

SEQ ID NO: 25568 - RNA, 19 nt, artificial
  Chemically synthesized
cuucacgaugugauggugg

SEQ ID NO: 25569 - RNA, 19 nt, artificial
  Chemically synthesized
uccuucaggcaccaaacag

SEQ ID NO: 25570 - RNA, 19 nt, artificial
  Chemically synthesized
cauuuauuacauuucucug

SEQ ID NO: 25571 - RNA, 19 nt, artificial
  Chemically synthesized
agguaacucauuaucauug

SEQ ID NO: 25572 - RNA, 19 nt, artificial
  Chemically synthesized
uugcuuuagaaaauguaaa

SEQ ID NO: 25573 - RNA, 19 nt, artificial
  Chemically synthesized
caugauuuugcuguagucg

SEQ ID NO: 25574 - RNA, 19 nt, artificial
  Chemically synthesized
uccauccaucacuaucagc

SEQ ID NO: 25575 - RNA, 19 nt, artificial
  Chemically synthesized
cuuuucuucaccacacuau

SEQ ID NO: 25576 - RNA, 19 nt, artificial
  Chemically synthesized
acaacaucucgacagguug

SEQ ID NO: 25577 - RNA, 19 nt, artificial
  Chemically synthesized
ugguguuuccauuguccac

SEQ ID NO: 25578 - RNA, 19 nt, artificial
  Chemically synthesized
ugcuaaagugagcaccauu

SEQ ID NO: 25579 - RNA, 19 nt, artificial
  Chemically synthesized
uggguaugucccauagcuu

SEQ ID NO: 25580 - RNA, 19 nt, artificial
  Chemically synthesized
uccauguugcgcuuauuua

SEQ ID NO: 25581 - RNA, 19 nt, artificial
  Chemically synthesized
auucaguuuuccuuucuuu

SEQ ID NO: 25582 - RNA, 19 nt, artificial
  Chemically synthesized
ugguaauucuuagguggug

SEQ ID NO: 25583 - RNA, 19 nt, artificial
  Chemically synthesized
cauaguucggguagcuuug

SEQ ID NO: 25584 - RNA, 19 nt, artificial
  Chemically synthesized
ugaguguccgauucgguga

SEQ ID NO: 25585 - RNA, 19 nt, artificial
  Chemically synthesized
auccagcaggaacuucacg

SEQ ID NO: 25586 - RNA, 19 nt, artificial
  Chemically synthesized
uuaauaucaucggcaucau

SEQ ID NO: 25587 - RNA, 19 nt, artificial
  Chemically synthesized
aauguaaacgcuguuccuu

SEQ ID NO: 25588 - RNA, 19 nt, artificial
  Chemically synthesized
uguagucgacuuguccucu

SEQ ID NO: 25589 - RNA, 19 nt, artificial
  Chemically synthesized
uaugaucaaaggguauggg

SEQ ID NO: 25590 - RNA, 19 nt, artificial
  Chemically synthesized
acuuuaccaaucucgaugc

SEQ ID NO: 25591 - RNA, 19 nt, artificial
  Chemically synthesized
aaauccagcaggaacuuca

SEQ ID NO: 25592 - RNA, 19 nt, artificial
  Chemically synthesized
agcauuugaggcaauacug

SEQ ID NO: 25593 - RNA, 19 nt, artificial
  Chemically synthesized
aagaaaacaguuaauauca

SEQ ID NO: 25594 - RNA, 19 nt, artificial
  Chemically synthesized
ucuagucaaaaaauacuuu

SEQ ID NO: 25595 - RNA, 19 nt, artificial
  Chemically synthesized
cauaucuuggagcucugag

SEQ ID NO: 25596 - RNA, 19 nt, artificial
  Chemically synthesized
aucuuggagcucugagagg

SEQ ID NO: 25597 - RNA, 19 nt, artificial
  Chemically synthesized
auuugaggcaauacugaga

SEQ ID NO: 25598 - RNA, 19 nt, artificial
  Chemically synthesized
aaaguggguauuuauuugg

SEQ ID NO: 25599 - RNA, 19 nt, artificial
  Chemically synthesized
guuugauccguggauacag

SEQ ID NO: 25600 - RNA, 19 nt, artificial
  Chemically synthesized
cuacagugcugcaucagug

SEQ ID NO: 25601 - RNA, 19 nt, artificial
  Chemically synthesized
uuugaauggucuagucaaa

SEQ ID NO: 25602 - RNA, 19 nt, artificial
  Chemically synthesized
acaaucagccuuuagguga

SEQ ID NO: 25603 - RNA, 19 nt, artificial
  Chemically synthesized
uguuuccauacagaggcuc

SEQ ID NO: 25604 - RNA, 19 nt, artificial
  Chemically synthesized
caguacuuucugaaggugg

SEQ ID NO: 25605 - RNA, 19 nt, artificial
  Chemically synthesized
uuuugaaaguggguauuua

SEQ ID NO: 25606 - RNA, 19 nt, artificial
  Chemically synthesized
uguucguacaucauaugau

SEQ ID NO: 25607 - RNA, 19 nt, artificial
  Chemically synthesized
uguucuccugggcuucaac

SEQ ID NO: 25608 - RNA, 19 nt, artificial
  Chemically synthesized
ugauuuugcuguagucgac

SEQ ID NO: 25609 - RNA, 19 nt, artificial
  Chemically synthesized
cauguuuccauacagaggc

SEQ ID NO: 25610 - RNA, 19 nt, artificial
  Chemically synthesized
accaaaauccagcaggaac

SEQ ID NO: 25611 - RNA, 19 nt, artificial
  Chemically synthesized
ugaagauguucguacauca

SEQ ID NO: 25612 - RNA, 19 nt, artificial
  Chemically synthesized
aauucuguuuuaauguugg

SEQ ID NO: 25613 - RNA, 19 nt, artificial
  Chemically synthesized
acacuauguacagucagug

SEQ ID NO: 25614 - RNA, 19 nt, artificial
  Chemically synthesized
auguacagucagugcucca

SEQ ID NO: 25615 - RNA, 19 nt, artificial
  Chemically synthesized
auccaucacuaucagcagc

SEQ ID NO: 25616 - RNA, 19 nt, artificial
  Chemically synthesized
ugcugauuuucaaucugcu

SEQ ID NO: 25617 - RNA, 19 nt, artificial
  Chemically synthesized
aacuggaacaggaagcgga

SEQ ID NO: 25618 - RNA, 19 nt, artificial
  Chemically synthesized
aggaugaguguccgauucg

SEQ ID NO: 25619 - RNA, 19 nt, artificial
  Chemically synthesized
uuauaggaacuucuguuaa

SEQ ID NO: 25620 - RNA, 19 nt, artificial
  Chemically synthesized
aucucgacagguuguuucc

SEQ ID NO: 25621 - RNA, 19 nt, artificial
  Chemically synthesized
aucuuccaccucauagaug

SEQ ID NO: 25622 - RNA, 19 nt, artificial
  Chemically synthesized
auaugcugaggcucuccca

SEQ ID NO: 25623 - RNA, 19 nt, artificial
  Chemically synthesized
aggagaagaguauaugcug

SEQ ID NO: 25624 - RNA, 19 nt, artificial
  Chemically synthesized
cuagaauucuguuuuaaug

SEQ ID NO: 25625 - RNA, 19 nt, artificial
  Chemically synthesized
aagucaguaagagcuucug

SEQ ID NO: 25626 - RNA, 19 nt, artificial
  Chemically synthesized
uacagugcugcaucaguga

SEQ ID NO: 25627 - RNA, 19 nt, artificial
  Chemically synthesized
aacaguuaauaucaucggc

SEQ ID NO: 25628 - RNA, 19 nt, artificial
  Chemically synthesized
acccauucaguuuuccuuu

SEQ ID NO: 25629 - RNA, 19 nt, artificial
  Chemically synthesized
cuuuaaaucuuccaauugc

SEQ ID NO: 25630 - RNA, 19 nt, artificial
  Chemically synthesized
aaauuucacuucuucccuc

SEQ ID NO: 25631 - RNA, 19 nt, artificial
  Chemically synthesized
agucaaaaaauacuuuugg

SEQ ID NO: 25632 - RNA, 19 nt, artificial
  Chemically synthesized
aagagcuagaauucuguuu

SEQ ID NO: 25633 - RNA, 19 nt, artificial
  Chemically synthesized
acgaaucuguaguucuugg

SEQ ID NO: 25634 - RNA, 19 nt, artificial
  Chemically synthesized
aagcuuuucauuuucagaa

SEQ ID NO: 25635 - RNA, 19 nt, artificial
  Chemically synthesized
aauucuacaacaucucgac

SEQ ID NO: 25636 - RNA, 19 nt, artificial
  Chemically synthesized
uuggaucuuccaugagcag

SEQ ID NO: 25637 - RNA, 19 nt, artificial
  Chemically synthesized
auguucguacaucauauga

SEQ ID NO: 25638 - RNA, 19 nt, artificial
  Chemically synthesized
aauucaguccuuggaggcg

SEQ ID NO: 25639 - RNA, 19 nt, artificial
  Chemically synthesized
agcaacacuggacauguuu

SEQ ID NO: 25640 - RNA, 19 nt, artificial
  Chemically synthesized
uguucacuguucucaguug

SEQ ID NO: 25641 - RNA, 19 nt, artificial
  Chemically synthesized
agaugagcuccucugguuc

SEQ ID NO: 25642 - RNA, 19 nt, artificial
  Chemically synthesized
ugaaguuuugaauuuuguu

SEQ ID NO: 25643 - RNA, 19 nt, artificial
  Chemically synthesized
aaacugggagcacuggaug

SEQ ID NO: 25644 - RNA, 19 nt, artificial
  Chemically synthesized
guuaugggacuucuuaaug

SEQ ID NO: 25645 - RNA, 19 nt, artificial
  Chemically synthesized
aacauaguucggguagcuu

SEQ ID NO: 25646 - RNA, 19 nt, artificial
  Chemically synthesized
uccaaggugaugggcuaca

SEQ ID NO: 25647 - RNA, 19 nt, artificial
  Chemically synthesized
acuuguccucucauugcac

SEQ ID NO: 25648 - RNA, 19 nt, artificial
  Chemically synthesized
uaggauucacauuguggac

SEQ ID NO: 25649 - RNA, 19 nt, artificial
  Chemically synthesized
gucuuuuuaacuccaccgc

SEQ ID NO: 25650 - RNA, 19 nt, artificial
  Chemically synthesized
uugggcuugcugggaucuu

SEQ ID NO: 25651 - RNA, 19 nt, artificial
  Chemically synthesized
cuguacguacaauucacac

SEQ ID NO: 25652 - RNA, 19 nt, artificial
  Chemically synthesized
uuguucuccugggcuucaa

SEQ ID NO: 25653 - RNA, 19 nt, artificial
  Chemically synthesized
aauagagccuaagggccug

SEQ ID NO: 25654 - RNA, 19 nt, artificial
  Chemically synthesized
cuguagucgacuuguccuc

SEQ ID NO: 25655 - RNA, 19 nt, artificial
  Chemically synthesized
cuucaaguugguccgcuug

SEQ ID NO: 25656 - RNA, 19 nt, artificial
  Chemically synthesized
cuucuguuaaaaucuguuc

SEQ ID NO: 25657 - RNA, 19 nt, artificial
  Chemically synthesized
cuucuuuuccuggaacaug

SEQ ID NO: 25658 - RNA, 19 nt, artificial
  Chemically synthesized
ugcuuuagaaaauguaaac

SEQ ID NO: 25659 - RNA, 19 nt, artificial
  Chemically synthesized
acuuuucuucaccacacua

SEQ ID NO: 25660 - RNA, 19 nt, artificial
  Chemically synthesized
aguauauggaacuugaauu

SEQ ID NO: 25661 - RNA, 19 nt, artificial
  Chemically synthesized
aaguucaacacguggauuc

SEQ ID NO: 25662 - RNA, 19 nt, artificial
  Chemically synthesized
uuccaacauaguucgggua

SEQ ID NO: 25663 - RNA, 19 nt, artificial
  Chemically synthesized
auucaguccuuggaggcga

SEQ ID NO: 25664 - RNA, 19 nt, artificial
  Chemically synthesized
guacagucuuuuuaacucc

SEQ ID NO: 25665 - RNA, 19 nt, artificial
  Chemically synthesized
ucgaaggaaaaauuucacu

SEQ ID NO: 25666 - RNA, 19 nt, artificial
  Chemically synthesized
cuuuguucaucacacccag

SEQ ID NO: 25667 - RNA, 19 nt, artificial
  Chemically synthesized
gaaguuuugaauuuuguuc

SEQ ID NO: 25668 - RNA, 19 nt, artificial
  Chemically synthesized
uaugucccauagcuuggag

SEQ ID NO: 25669 - RNA, 19 nt, artificial
  Chemically synthesized
gugagaaccacacugagca

SEQ ID NO: 25670 - RNA, 19 nt, artificial
  Chemically synthesized
guucagcugaauuuuuuuc

SEQ ID NO: 25671 - RNA, 19 nt, artificial
  Chemically synthesized
augagcagcauuugaggca

SEQ ID NO: 25672 - RNA, 19 nt, artificial
  Chemically synthesized
uguugcuuuagaaaaugua

SEQ ID NO: 25673 - RNA, 19 nt, artificial
  Chemically synthesized
ugcuccaaaaggaaguuca

SEQ ID NO: 25674 - RNA, 19 nt, artificial
  Chemically synthesized
aagacuggaacccauucag

SEQ ID NO: 25675 - RNA, 19 nt, artificial
  Chemically synthesized
gaaaaauagagccuaaggg

SEQ ID NO: 25676 - RNA, 19 nt, artificial
  Chemically synthesized
cugguuucacggaagagcu

SEQ ID NO: 25677 - RNA, 19 nt, artificial
  Chemically synthesized
uggguauuuauuuggauuu

SEQ ID NO: 25678 - RNA, 19 nt, artificial
  Chemically synthesized
uuggagcucugagagggua

SEQ ID NO: 25679 - RNA, 19 nt, artificial
  Chemically synthesized
ucgacagguuguuuccggu

SEQ ID NO: 25680 - RNA, 19 nt, artificial
  Chemically synthesized
agacagauugccguucaug

SEQ ID NO: 25681 - RNA, 19 nt, artificial
  Chemically synthesized
uguaggacuuggguauguc

SEQ ID NO: 25682 - RNA, 19 nt, artificial
  Chemically synthesized
caaaauucuacaacaucuc

SEQ ID NO: 25683 - RNA, 19 nt, artificial
  Chemically synthesized
cuauguacagucagugcuc

SEQ ID NO: 25684 - RNA, 19 nt, artificial
  Chemically synthesized
cauuguaagacuggaaccc

SEQ ID NO: 25685 - RNA, 19 nt, artificial
  Chemically synthesized
ucauugcacgaauuuucuu

SEQ ID NO: 25686 - RNA, 19 nt, artificial
  Chemically synthesized
ucuucaccacacuauguac

SEQ ID NO: 25687 - RNA, 19 nt, artificial
  Chemically synthesized
auucagggaacugaauuug

SEQ ID NO: 25688 - RNA, 19 nt, artificial
  Chemically synthesized
uuauuacauuucucugagu

SEQ ID NO: 25689 - RNA, 19 nt, artificial
  Chemically synthesized
aagaguuccuucugcugcu

SEQ ID NO: 25690 - RNA, 19 nt, artificial
  Chemically synthesized
cuaucagcagcauucacgu

SEQ ID NO: 25691 - RNA, 19 nt, artificial
  Chemically synthesized
uguacagucagugcuccaa

SEQ ID NO: 25692 - RNA, 19 nt, artificial
  Chemically synthesized
uugcagaggugaacgcugu

SEQ ID NO: 25693 - RNA, 19 nt, artificial
  Chemically synthesized
acuucuguuaaaaucuguu

SEQ ID NO: 25694 - RNA, 19 nt, artificial
  Chemically synthesized
agucaguaagagcuucugu

SEQ ID NO: 25695 - RNA, 19 nt, artificial
  Chemically synthesized
cucaccuggaaacuguagg

SEQ ID NO: 25696 - RNA, 19 nt, artificial
  Chemically synthesized
uugucugcagcaguuucaa

SEQ ID NO: 25697 - RNA, 19 nt, artificial
  Chemically synthesized
aacucguucuuucaauuuc

SEQ ID NO: 25698 - RNA, 19 nt, artificial
  Chemically synthesized
uggaggcgaaaguaccucu

SEQ ID NO: 25699 - RNA, 19 nt, artificial
  Chemically synthesized
cuuuugguauauaaaaagc

SEQ ID NO: 25700 - RNA, 19 nt, artificial
  Chemically synthesized
ugugauggagcugcgcuuu

SEQ ID NO: 25701 - RNA, 19 nt, artificial
  Chemically synthesized
cugggcuucaacucguucu

SEQ ID NO: 25702 - RNA, 19 nt, artificial
  Chemically synthesized
uccaccagcuguuugcaga

SEQ ID NO: 25703 - RNA, 19 nt, artificial
  Chemically synthesized
uauauggaacuugaauuca

SEQ ID NO: 25704 - RNA, 19 nt, artificial
  Chemically synthesized
cuuccuuccuccuuuccag

SEQ ID NO: 25705 - RNA, 19 nt, artificial
  Chemically synthesized
aaggugcccaugaaguccu

SEQ ID NO: 25706 - RNA, 19 nt, artificial
  Chemically synthesized
aaauucaguccuuggaggc

SEQ ID NO: 25707 - RNA, 19 nt, artificial
  Chemically synthesized
ccuuguucacuguucucag

SEQ ID NO: 25708 - RNA, 19 nt, artificial
  Chemically synthesized
guucggguagcuuugaaug

SEQ ID NO: 25709 - RNA, 19 nt, artificial
  Chemically synthesized
aauuucugaagcuuuucau

SEQ ID NO: 25710 - RNA, 19 nt, artificial
  Chemically synthesized
aggaacuucuguuaaaauc

SEQ ID NO: 25711 - RNA, 19 nt, artificial
  Chemically synthesized
auuucugaagcuuuucauu

SEQ ID NO: 25712 - RNA, 19 nt, artificial
  Chemically synthesized
auguagccuuccuccaucu

SEQ ID NO: 25713 - RNA, 19 nt, artificial
  Chemically synthesized
uuccgguguuauaggaacu

SEQ ID NO: 25714 - RNA, 19 nt, artificial
  Chemically synthesized
uguucaucacacccagcuu

SEQ ID NO: 25715 - RNA, 19 nt, artificial
  Chemically synthesized
uuucacggaagagcuagaa

SEQ ID NO: 25716 - RNA, 19 nt, artificial
  Chemically synthesized
ccauuucugaagauguucg

SEQ ID NO: 25717 - RNA, 19 nt, artificial
  Chemically synthesized
guuuauugugcacauuuac

SEQ ID NO: 25718 - RNA, 19 nt, artificial
  Chemically synthesized
ucacacuugucugcagcag

SEQ ID NO: 25719 - RNA, 19 nt, artificial
  Chemically synthesized
acaagggcguucacuuuuc

SEQ ID NO: 25720 - RNA, 19 nt, artificial
  Chemically synthesized
agaguauaugcugaggcuc

SEQ ID NO: 25721 - RNA, 19 nt, artificial
  Chemically synthesized
cacugaaccuuucuauuuc

SEQ ID NO: 25722 - RNA, 19 nt, artificial
  Chemically synthesized
cucuacaagggcguucacu

SEQ ID NO: 25723 - RNA, 19 nt, artificial
  Chemically synthesized
aaaauucaguccuuggagg

SEQ ID NO: 25724 - RNA, 19 nt, artificial
  Chemically synthesized
uuccuggaaaacagcacaa

SEQ ID NO: 25725 - RNA, 19 nt, artificial
  Chemically synthesized
cugcucaggcucuuucuca

SEQ ID NO: 25726 - RNA, 19 nt, artificial
  Chemically synthesized
auagagacguucacgcagu

SEQ ID NO: 25727 - RNA, 19 nt, artificial
  Chemically synthesized
guuuugaauuuuguuccug

SEQ ID NO: 25728 - RNA, 19 nt, artificial
  Chemically synthesized
aaauccucugcugaaucug

SEQ ID NO: 25729 - RNA, 19 nt, artificial
  Chemically synthesized
uucagggaacugaauuuga

SEQ ID NO: 25730 - RNA, 19 nt, artificial
  Chemically synthesized
cucuuucucaguacuuucu

SEQ ID NO: 25731 - RNA, 19 nt, artificial
  Chemically synthesized
guaugggacguucauuucc

SEQ ID NO: 25732 - RNA, 19 nt, artificial
  Chemically synthesized
cucauugcacgaauuuucu

SEQ ID NO: 25733 - RNA, 19 nt, artificial
  Chemically synthesized
uccugcuucuuuuccugga

SEQ ID NO: 25734 - RNA, 19 nt, artificial
  Chemically synthesized
gucugcuaaagugagcacc

SEQ ID NO: 25735 - RNA, 19 nt, artificial
  Chemically synthesized
cugcugauuuucaaucugc

SEQ ID NO: 25736 - RNA, 19 nt, artificial
  Chemically synthesized
ugcugcugaaguuuugaau

SEQ ID NO: 25737 - RNA, 19 nt, artificial
  Chemically synthesized
accagaucgaacucuccuu

SEQ ID NO: 25738 - RNA, 19 nt, artificial
  Chemically synthesized
ucguacaucauaugaucaa

SEQ ID NO: 25739 - RNA, 19 nt, artificial
  Chemically synthesized
uuaccauacacugcuuuaa

SEQ ID NO: 25740 - RNA, 19 nt, artificial
  Chemically synthesized
ugugagaucggaggagaag

SEQ ID NO: 25741 - RNA, 19 nt, artificial
  Chemically synthesized
aucauaugaucaaagggua

SEQ ID NO: 25742 - RNA, 19 nt, artificial
  Chemically synthesized
auauagaaacugggagcac

SEQ ID NO: 25743 - RNA, 19 nt, artificial
  Chemically synthesized
ucaguuuuccuuucuuuaa

SEQ ID NO: 25744 - RNA, 19 nt, artificial
  Chemically synthesized
ugauccucugcaccagauc

SEQ ID NO: 25745 - RNA, 19 nt, artificial
  Chemically synthesized
agguaaaacgggcuuacca

SEQ ID NO: 25746 - RNA, 19 nt, artificial
  Chemically synthesized
ucccaguuaaugggcaaac

SEQ ID NO: 25747 - RNA, 19 nt, artificial
  Chemically synthesized
gauguagccuuccuccauc

SEQ ID NO: 25748 - RNA, 19 nt, artificial
  Chemically synthesized
ugcuucuuuuccuggaaca

SEQ ID NO: 25749 - RNA, 19 nt, artificial
  Chemically synthesized
aucuguaguucuugguaca

SEQ ID NO: 25750 - RNA, 19 nt, artificial
  Chemically synthesized
uuuccaucauuagcggauu

SEQ ID NO: 25751 - RNA, 19 nt, artificial
  Chemically synthesized
caagaaaacaguuaauauc

SEQ ID NO: 25752 - RNA, 19 nt, artificial
  Chemically synthesized
ucuguuaaaaucuguucau

SEQ ID NO: 25753 - RNA, 19 nt, artificial
  Chemically synthesized
ccuuuguucaucacaccca

SEQ ID NO: 25754 - RNA, 19 nt, artificial
  Chemically synthesized
gugaacuggaacaggaagc

SEQ ID NO: 25755 - RNA, 19 nt, artificial
  Chemically synthesized
agaaacugggagcacugga

SEQ ID NO: 25756 - RNA, 19 nt, artificial
  Chemically synthesized
aguugguccgcuuguucgu

SEQ ID NO: 25757 - RNA, 19 nt, artificial
  Chemically synthesized
uugcaaaauucuacaacau

SEQ ID NO: 25758 - RNA, 19 nt, artificial
  Chemically synthesized
uuggugaugaagggaagaa

SEQ ID NO: 25759 - RNA, 19 nt, artificial
  Chemically synthesized
ugaguucguugcucuuggg

SEQ ID NO: 25760 - RNA, 19 nt, artificial
  Chemically synthesized
agagcuagaauucuguuuu

SEQ ID NO: 25761 - RNA, 19 nt, artificial
  Chemically synthesized
aaaucuuccaauugcugac

SEQ ID NO: 25762 - RNA, 19 nt, artificial
  Chemically synthesized
ucacuaucagcagcauuca

SEQ ID NO: 25763 - RNA, 19 nt, artificial
  Chemically synthesized
agcauucacguugacacca

SEQ ID NO: 25764 - RNA, 19 nt, artificial
  Chemically synthesized
guaagacuggaacccauuc

SEQ ID NO: 25765 - RNA, 19 nt, artificial
  Chemically synthesized
uucacggaagagcuagaau

SEQ ID NO: 25766 - RNA, 19 nt, artificial
  Chemically synthesized
aaggaugaguguccgauuc

SEQ ID NO: 25767 - RNA, 19 nt, artificial
  Chemically synthesized
guucacuguucucaguugg

SEQ ID NO: 25768 - RNA, 19 nt, artificial
  Chemically synthesized
ccauccaucacuaucagca

SEQ ID NO: 25769 - RNA, 19 nt, artificial
  Chemically synthesized
cauacaugaaaaauagagc

SEQ ID NO: 25770 - RNA, 19 nt, artificial
  Chemically synthesized
cuguucauuguugcucaag

SEQ ID NO: 25771 - RNA, 19 nt, artificial
  Chemically synthesized
uccuuuggugaugaaggga

SEQ ID NO: 25772 - RNA, 19 nt, artificial
  Chemically synthesized
acuugucugcagcaguuuc

SEQ ID NO: 25773 - RNA, 19 nt, artificial
  Chemically synthesized
agcagcuucuggauguugg

SEQ ID NO: 25774 - RNA, 19 nt, artificial
  Chemically synthesized
acaucugcugcugauuuuc

SEQ ID NO: 25775 - RNA, 19 nt, artificial
  Chemically synthesized
cugaauuuuuuucccauag

SEQ ID NO: 25776 - RNA, 19 nt, artificial
  Chemically synthesized
agcagcauucacguugaca

SEQ ID NO: 25777 - RNA, 19 nt, artificial
  Chemically synthesized
acugucagugggaguucag

SEQ ID NO: 25778 - RNA, 19 nt, artificial
  Chemically synthesized
auucuacaacaucucgaca

SEQ ID NO: 25779 - RNA, 19 nt, artificial
  Chemically synthesized
gucuagucaaaaaauacuu

SEQ ID NO: 25780 - RNA, 19 nt, artificial
  Chemically synthesized
auuucagcagacagauugc

SEQ ID NO: 25781 - RNA, 19 nt, artificial
  Chemically synthesized
ugggaaccuggauauaagg

SEQ ID NO: 25782 - RNA, 19 nt, artificial
  Chemically synthesized
uacguacaauucacaccuc

SEQ ID NO: 25783 - RNA, 19 nt, artificial
  Chemically synthesized
cuuugaauggucuagucaa

SEQ ID NO: 25784 - RNA, 19 nt, artificial
  Chemically synthesized
cuguuugcagaggugaacg

SEQ ID NO: 25785 - RNA, 19 nt, artificial
  Chemically synthesized
aagauguucguacaucaua

SEQ ID NO: 25786 - RNA, 19 nt, artificial
  Chemically synthesized
guauaugcugaggcucucc

SEQ ID NO: 25787 - RNA, 19 nt, artificial
  Chemically synthesized
aauuuuuuucccauagaga

SEQ ID NO: 25788 - RNA, 19 nt, artificial
  Chemically synthesized
caguucacugauucgcuug

SEQ ID NO: 25789 - RNA, 19 nt, artificial
  Chemically synthesized
auccucugcaccagaucga

SEQ ID NO: 25790 - RNA, 19 nt, artificial
  Chemically synthesized
ccuugacccuuuaucagcc

SEQ ID NO: 25791 - RNA, 19 nt, artificial
  Chemically synthesized
auucacguugacaccaaaa

SEQ ID NO: 25792 - RNA, 19 nt, artificial
  Chemically synthesized
acucuccaccagcuguuug

SEQ ID NO: 25793 - RNA, 19 nt, artificial
  Chemically synthesized
agcucuuccagguuuccau

SEQ ID NO: 25794 - RNA, 19 nt, artificial
  Chemically synthesized
uaucagcagcauucacguu

SEQ ID NO: 25795 - RNA, 19 nt, artificial
  Chemically synthesized
aguuaauaucaucggcauc

SEQ ID NO: 25796 - RNA, 19 nt, artificial
  Chemically synthesized
gcucuuucucaguacuuuc

SEQ ID NO: 25797 - RNA, 19 nt, artificial
  Chemically synthesized
ucaacucguucuuucaauu

SEQ ID NO: 25798 - RNA, 19 nt, artificial
  Chemically synthesized
agguacauuuauuacauuu

SEQ ID NO: 25799 - RNA, 19 nt, artificial
  Chemically synthesized
uguuccugguuaaguuggu

SEQ ID NO: 25800 - RNA, 19 nt, artificial
  Chemically synthesized
caaaauucaguccuuggag

SEQ ID NO: 25801 - RNA, 19 nt, artificial
  Chemically synthesized
aagggcguucacuuuucuu

SEQ ID NO: 25802 - RNA, 19 nt, artificial
  Chemically synthesized
augaucaaaggguauggga

SEQ ID NO: 25803 - RNA, 19 nt, artificial
  Chemically synthesized
aagccuguacguacaauuc

SEQ ID NO: 25804 - RNA, 19 nt, artificial
  Chemically synthesized
aucugcugcugauuuucaa

SEQ ID NO: 25805 - RNA, 19 nt, artificial
  Chemically synthesized
auuuugcuguagucgacuu

SEQ ID NO: 25806 - RNA, 19 nt, artificial
  Chemically synthesized
ucaagaaaacaguuaauau

SEQ ID NO: 25807 - RNA, 19 nt, artificial
  Chemically synthesized
ucaaguugguccgcuuguu

SEQ ID NO: 25808 - RNA, 19 nt, artificial
  Chemically synthesized
ucuuucaauuucugaagcu

SEQ ID NO: 25809 - RNA, 19 nt, artificial
  Chemically synthesized
uucacgcaguucacugauu

SEQ ID NO: 25810 - RNA, 19 nt, artificial
  Chemically synthesized
ucagugcuccaaggugaug

SEQ ID NO: 25811 - RNA, 19 nt, artificial
  Chemically synthesized
acagucuuuuuaacuccac

SEQ ID NO: 25812 - RNA, 19 nt, artificial
  Chemically synthesized
caucucgacagguuguuuc

SEQ ID NO: 25813 - RNA, 19 nt, artificial
  Chemically synthesized
guaagagcuucugucuuca

SEQ ID NO: 25814 - RNA, 19 nt, artificial
  Chemically synthesized
acaucauaugaucaaaggg

SEQ ID NO: 25815 - RNA, 19 nt, artificial
  Chemically synthesized
ucuguacuuccugcuucuu

SEQ ID NO: 25816 - RNA, 19 nt, artificial
  Chemically synthesized
ucguagucccacagagcau

SEQ ID NO: 25817 - RNA, 19 nt, artificial
  Chemically synthesized
caguuaaugggcaaacugg

SEQ ID NO: 25818 - RNA, 19 nt, artificial
  Chemically synthesized
ccauacacugcuuuaacug

SEQ ID NO: 25819 - RNA, 19 nt, artificial
  Chemically synthesized
gcagcauucacguugacac

SEQ ID NO: 25820 - RNA, 19 nt, artificial
  Chemically synthesized
aaggaaguucaggcgagug

SEQ ID NO: 25821 - RNA, 19 nt, artificial
  Chemically synthesized
uuucuccagguacauuuau

SEQ ID NO: 25822 - RNA, 19 nt, artificial
  Chemically synthesized
aucagccuuuaggugaacu

SEQ ID NO: 25823 - RNA, 19 nt, artificial
  Chemically synthesized
ugcucuacaagggcguuca

SEQ ID NO: 25824 - RNA, 19 nt, artificial
  Chemically synthesized
cuugucugcagcaguuuca

SEQ ID NO: 25825 - RNA, 19 nt, artificial
  Chemically synthesized
aguuuggugggugguuugg

SEQ ID NO: 25826 - RNA, 19 nt, artificial
  Chemically synthesized
cuuuaggugaacuggaaca

SEQ ID NO: 25827 - RNA, 19 nt, artificial
  Chemically synthesized
aguuucaaugucgcuuaug

SEQ ID NO: 25828 - RNA, 19 nt, artificial
  Chemically synthesized
cauagagacguucacgcag

SEQ ID NO: 25829 - RNA, 19 nt, artificial
  Chemically synthesized
cuuuccuggaaaacagcac

SEQ ID NO: 25830 - RNA, 19 nt, artificial
  Chemically synthesized
caccacacuauguacaguc

SEQ ID NO: 25831 - RNA, 19 nt, artificial
  Chemically synthesized
uaguucggguagcuuugaa

SEQ ID NO: 25832 - RNA, 19 nt, artificial
  Chemically synthesized
guauauaaaaagccuguac

SEQ ID NO: 25833 - RNA, 19 nt, artificial
  Chemically synthesized
cucugcugaaucuguugug

SEQ ID NO: 25834 - RNA, 19 nt, artificial
  Chemically synthesized
ggguaugucccauagcuug

SEQ ID NO: 25835 - RNA, 19 nt, artificial
  Chemically synthesized
aggaacuucacgaugugau

SEQ ID NO: 25836 - RNA, 19 nt, artificial
  Chemically synthesized
uguuugcagaggugaacgc

SEQ ID NO: 25837 - RNA, 19 nt, artificial
  Chemically synthesized
caacacuggacauguuucc

SEQ ID NO: 25838 - RNA, 19 nt, artificial
  Chemically synthesized
cucauagaugauccucugc

SEQ ID NO: 25839 - RNA, 19 nt, artificial
  Chemically synthesized
uagucgacuuguccucuca

SEQ ID NO: 25840 - RNA, 19 nt, artificial
  Chemically synthesized
ucaguacuuucugaaggug

SEQ ID NO: 25841 - RNA, 19 nt, artificial
  Chemically synthesized
guacaauucacaccucagu

SEQ ID NO: 25842 - RNA, 19 nt, artificial
  Chemically synthesized
guucacuuuucuucaccac

SEQ ID NO: 25843 - RNA, 19 nt, artificial
  Chemically synthesized
agauguucguacaucauau

SEQ ID NO: 25844 - RNA, 19 nt, artificial
  Chemically synthesized
aauuuuguuccugguuaag

SEQ ID NO: 25845 - RNA, 19 nt, artificial
  Chemically synthesized
aaucugcugcuguugccua

SEQ ID NO: 25846 - RNA, 19 nt, artificial
  Chemically synthesized
agaaauagacugcugcuga

SEQ ID NO: 25847 - RNA, 19 nt, artificial
  Chemically synthesized
aucgaacucuccuuccaga

SEQ ID NO: 25848 - RNA, 19 nt, artificial
  Chemically synthesized
ugggcuucaacucguucuu

SEQ ID NO: 25849 - RNA, 19 nt, artificial
  Chemically synthesized
acauggaguauauggaacu

SEQ ID NO: 25850 - RNA, 19 nt, artificial
  Chemically synthesized
auggagcugcgcuuuuuca

SEQ ID NO: 25851 - RNA, 19 nt, artificial
  Chemically synthesized
cauuaagaccauuuucuag

SEQ ID NO: 25852 - RNA, 19 nt, artificial
  Chemically synthesized
caaguugguccgcuuguuc

SEQ ID NO: 25853 - RNA, 19 nt, artificial
  Chemically synthesized
ugauggagcugcgcuuuuu

SEQ ID NO: 25854 - RNA, 19 nt, artificial
  Chemically synthesized
ccauucacacgguucagcu

SEQ ID NO: 25855 - RNA, 19 nt, artificial
  Chemically synthesized
ugcagcuuuccuggaaaac

SEQ ID NO: 25856 - RNA, 19 nt, artificial
  Chemically synthesized
caguacguuuuucuccagg

SEQ ID NO: 25857 - RNA, 19 nt, artificial
  Chemically synthesized
agucagugcuccaagguga

SEQ ID NO: 25858 - RNA, 19 nt, artificial
  Chemically synthesized
cugaaccuuucuauuucag

SEQ ID NO: 25859 - RNA, 19 nt, artificial
  Chemically synthesized
acacuggacauguuuccau

SEQ ID NO: 25860 - RNA, 19 nt, artificial
  Chemically synthesized
ccaauugcugacuaagcug

SEQ ID NO: 25861 - RNA, 19 nt, artificial
  Chemically synthesized
aguauaugcugaggcucuc

SEQ ID NO: 25862 - RNA, 19 nt, artificial
  Chemically synthesized
acaguguucacugcuggag

SEQ ID NO: 25863 - RNA, 19 nt, artificial
  Chemically synthesized
cagucuuuuuaacuccacc

SEQ ID NO: 25864 - RNA, 19 nt, artificial
  Chemically synthesized
guucguugcucuugggucu

SEQ ID NO: 25865 - RNA, 19 nt, artificial
  Chemically synthesized
aggaaguucaggcgagugu

SEQ ID NO: 25866 - RNA, 19 nt, artificial
  Chemically synthesized
aagggccuguauuuuaaug

SEQ ID NO: 25867 - RNA, 19 nt, artificial
  Chemically synthesized
ucugcugcugaaguuuuga

SEQ ID NO: 25868 - RNA, 19 nt, artificial
  Chemically synthesized
auguugcgcuuauuuaaga

SEQ ID NO: 25869 - RNA, 19 nt, artificial
  Chemically synthesized
guagcuuugaauggucuag

SEQ ID NO: 25870 - RNA, 19 nt, artificial
  Chemically synthesized
caucauaugaucaaagggu

SEQ ID NO: 25871 - RNA, 19 nt, artificial
  Chemically synthesized
guuuccauacagaggcucc

SEQ ID NO: 25872 - RNA, 19 nt, artificial
  Chemically synthesized
acuggaacccauucaguuu

SEQ ID NO: 25873 - RNA, 19 nt, artificial
  Chemically synthesized
guacagucagugcuccaag

SEQ ID NO: 25874 - RNA, 19 nt, artificial
  Chemically synthesized
gccuugacccuuuaucagc

SEQ ID NO: 25875 - RNA, 19 nt, artificial
  Chemically synthesized
cugaagauguucguacauc

SEQ ID NO: 25876 - RNA, 19 nt, artificial
  Chemically synthesized
ugguuaaguugguuacgaa

SEQ ID NO: 25877 - RNA, 19 nt, artificial
  Chemically synthesized
gcguucacuuuucuucacc

SEQ ID NO: 25878 - RNA, 19 nt, artificial
  Chemically synthesized
uggaaacuguaggauucac

SEQ ID NO: 25879 - RNA, 19 nt, artificial
  Chemically synthesized
auugcugacuaagcugauc

SEQ ID NO: 25880 - RNA, 19 nt, artificial
  Chemically synthesized
acacgguucagcugaauuu

SEQ ID NO: 25881 - RNA, 19 nt, artificial
  Chemically synthesized
agcaccugacuccauucag

SEQ ID NO: 25882 - RNA, 19 nt, artificial
  Chemically synthesized
uguuuccauuguccacauc

SEQ ID NO: 25883 - RNA, 19 nt, artificial
  Chemically synthesized
gcuucuucaaguugguccg

SEQ ID NO: 25884 - RNA, 19 nt, artificial
  Chemically synthesized
uggagguacauggaguaua

SEQ ID NO: 25885 - RNA, 19 nt, artificial
  Chemically synthesized
uccuucugcugcugaaguu

SEQ ID NO: 25886 - RNA, 19 nt, artificial
  Chemically synthesized
ugccuucuccagguuccuu

SEQ ID NO: 25887 - RNA, 19 nt, artificial
  Chemically synthesized
aacacuggacauguuucca

SEQ ID NO: 25888 - RNA, 19 nt, artificial
  Chemically synthesized
uuuuucccauagagacguu

SEQ ID NO: 25889 - RNA, 19 nt, artificial
  Chemically synthesized
guucuugguacagucuuuu

SEQ ID NO: 25890 - RNA, 19 nt, artificial
  Chemically synthesized
gaugaagggaagaaggauc

SEQ ID NO: 25891 - RNA, 19 nt, artificial
  Chemically synthesized
cuuaaaauugcagucugua

SEQ ID NO: 25892 - RNA, 19 nt, artificial
  Chemically synthesized
ccaaaaggaaguucaggcg

SEQ ID NO: 25893 - RNA, 19 nt, artificial
  Chemically synthesized
cauaugaucaaaggguaug

SEQ ID NO: 25894 - RNA, 19 nt, artificial
  Chemically synthesized
uggagcucugagaggguaa

SEQ ID NO: 25895 - RNA, 19 nt, artificial
  Chemically synthesized
guucuccugggcuucaacu

SEQ ID NO: 25896 - RNA, 19 nt, artificial
  Chemically synthesized
uucacacgguucagcugaa

SEQ ID NO: 25897 - RNA, 19 nt, artificial
  Chemically synthesized
auagagccuaagggccugu

SEQ ID NO: 25898 - RNA, 19 nt, artificial
  Chemically synthesized
gugugagaaaggaugagug

SEQ ID NO: 25899 - RNA, 19 nt, artificial
  Chemically synthesized
cauguugcgcuuauuuaag

SEQ ID NO: 25900 - RNA, 19 nt, artificial
  Chemically synthesized
acucauacaugaaaaauag

SEQ ID NO: 25901 - RNA, 19 nt, artificial
  Chemically synthesized
augggcuacagugcugcau

SEQ ID NO: 25902 - RNA, 19 nt, artificial
  Chemically synthesized
ucagcagcauucacguuga

SEQ ID NO: 25903 - RNA, 19 nt, artificial
  Chemically synthesized
ucauaugaucaaaggguau

SEQ ID NO: 25904 - RNA, 19 nt, artificial
  Chemically synthesized
gaagaguauaugcugaggc

SEQ ID NO: 25905 - RNA, 19 nt, artificial
  Chemically synthesized
acagaggcuccuuugguga

SEQ ID NO: 25906 - RNA, 19 nt, artificial
  Chemically synthesized
agcaccauuaagaccauuu

SEQ ID NO: 25907 - RNA, 19 nt, artificial
  Chemically synthesized
ucaucacacccagcuuuuc

SEQ ID NO: 25908 - RNA, 19 nt, artificial
  Chemically synthesized
ucggguagcuuugaauggu

SEQ ID NO: 25909 - RNA, 19 nt, artificial
  Chemically synthesized
ugagaucggaggagaagag

SEQ ID NO: 25910 - RNA, 19 nt, artificial
  Chemically synthesized
cccauuuucaguacguuuu

SEQ ID NO: 25911 - RNA, 19 nt, artificial
  Chemically synthesized
cagguuuuugggcacauag

SEQ ID NO: 25912 - RNA, 19 nt, artificial
  Chemically synthesized
gcaaaauucuacaacaucu

SEQ ID NO: 25913 - RNA, 19 nt, artificial
  Chemically synthesized
auauaaaaagccuguacgu

SEQ ID NO: 25914 - RNA, 19 nt, artificial
  Chemically synthesized
ugcugcugauuuucaaucu

SEQ ID NO: 25915 - RNA, 19 nt, artificial
  Chemically synthesized
cuuucuuuaaaucuuccaa

SEQ ID NO: 25916 - RNA, 19 nt, artificial
  Chemically synthesized
cauuuucagaaauagacug

SEQ ID NO: 25917 - RNA, 19 nt, artificial
  Chemically synthesized
acguacaauucacaccuca

SEQ ID NO: 25918 - RNA, 19 nt, artificial
  Chemically synthesized
cucugcaccagaucgaacu

SEQ ID NO: 25919 - RNA, 19 nt, artificial
  Chemically synthesized
cugauucgcuuguccauca

SEQ ID NO: 25920 - RNA, 19 nt, artificial
  Chemically synthesized
uccugggcuucaacucguu

SEQ ID NO: 25921 - RNA, 21 nt, artificial
  Chemically synthesized
gccuuaaauaagucaguuaaa

SEQ ID NO: 25922 - RNA, 21 nt, artificial
  Chemically synthesized
cagucuauuucugaaaaugaa

SEQ ID NO: 25923 - RNA, 21 nt, artificial
  Chemically synthesized
cagagaaauguaauaaaugua

SEQ ID NO: 25924 - RNA, 21 nt, artificial
  Chemically synthesized
ggaacaaaauucaaaacuuca

SEQ ID NO: 25925 - RNA, 21 nt, artificial
  Chemically synthesized
agucuauuucugaaaaugaaa

SEQ ID NO: 25926 - RNA, 21 nt, artificial
  Chemically synthesized
gcaacaaugaacagauuuuaa

SEQ ID NO: 25927 - RNA, 21 nt, artificial
  Chemically synthesized
uaaccaggaacaaaauucaaa

SEQ ID NO: 25928 - RNA, 21 nt, artificial
  Chemically synthesized
gaagauuuaaagaaaggaaaa

SEQ ID NO: 25929 - RNA, 21 nt, artificial
  Chemically synthesized
gcuuuuuauauaccaaaagua

SEQ ID NO: 25930 - RNA, 21 nt, artificial
  Chemically synthesized
ggaagauuuaaagaaaggaaa

SEQ ID NO: 25931 - RNA, 21 nt, artificial
  Chemically synthesized
cguuuacauuuucuaaagcaa

SEQ ID NO: 25932 - RNA, 21 nt, artificial
  Chemically synthesized
caggcuuuuuauauaccaaaa

SEQ ID NO: 25933 - RNA, 21 nt, artificial
  Chemically synthesized
caaauaaauacccacuuucaa

SEQ ID NO: 25934 - RNA, 21 nt, artificial
  Chemically synthesized
aaguacagacugcaauuuuaa

SEQ ID NO: 25935 - RNA, 21 nt, artificial
  Chemically synthesized
ccaauuacuauaaauccaaau

SEQ ID NO: 25936 - RNA, 21 nt, artificial
  Chemically synthesized
aacucagagaaauguaauaaa

SEQ ID NO: 25937 - RNA, 21 nt, artificial
  Chemically synthesized
ugauauuaacuguuuucuuga

SEQ ID NO: 25938 - RNA, 21 nt, artificial
  Chemically synthesized
acaggcuuuuuauauaccaaa

SEQ ID NO: 25939 - RNA, 21 nt, artificial
  Chemically synthesized
ugaaaagcuucagaaauugaa

SEQ ID NO: 25940 - RNA, 21 nt, artificial
  Chemically synthesized
gcaauuggaagauuuaaagaa

SEQ ID NO: 25941 - RNA, 21 nt, artificial
  Chemically synthesized
agauguuguagaauuuugcaa

SEQ ID NO: 25942 - RNA, 21 nt, artificial
  Chemically synthesized
caacauuaaaacagaauucua

SEQ ID NO: 25943 - RNA, 21 nt, artificial
  Chemically synthesized
uuaaaaagacuguaccaagaa

SEQ ID NO: 25944 - RNA, 21 nt, artificial
  Chemically synthesized
aaauaaauacccacuuucaaa

SEQ ID NO: 25945 - RNA, 21 nt, artificial
  Chemically synthesized
ucagcaauuggaagauuuaaa

SEQ ID NO: 25946 - RNA, 21 nt, artificial
  Chemically synthesized
caaugaacagauuuuaacaga

SEQ ID NO: 25947 - RNA, 21 nt, artificial
  Chemically synthesized
gaaaaugaaaagcuucagaaa

SEQ ID NO: 25948 - RNA, 21 nt, artificial
  Chemically synthesized
gucuauuucugaaaaugaaaa

SEQ ID NO: 25949 - RNA, 21 nt, artificial
  Chemically synthesized
aaccaggaacaaaauucaaaa

SEQ ID NO: 25950 - RNA, 21 nt, artificial
  Chemically synthesized
cagcagcagaaggaacucuua

SEQ ID NO: 25951 - RNA, 21 nt, artificial
  Chemically synthesized
ccagugaagacagaagcucuu

SEQ ID NO: 25952 - RNA, 21 nt, artificial
  Chemically synthesized
agauccaaauccgcuaaugau

SEQ ID NO: 25953 - RNA, 21 nt, artificial
  Chemically synthesized
aaugaacagauuuuaacagaa

SEQ ID NO: 25954 - RNA, 21 nt, artificial
  Chemically synthesized
aagccugaacucccacugaca

SEQ ID NO: 25955 - RNA, 21 nt, artificial
  Chemically synthesized
acagcguuuacauuuucuaaa

SEQ ID NO: 25956 - RNA, 21 nt, artificial
  Chemically synthesized
aaguauuuuuugacuagacca

SEQ ID NO: 25957 - RNA, 21 nt, artificial
  Chemically synthesized
caacgugaaugcugcugauag

SEQ ID NO: 25958 - RNA, 21 nt, artificial
  Chemically synthesized
uucacugaggugugaauugua

SEQ ID NO: 25959 - RNA, 21 nt, artificial
  Chemically synthesized
aauaaauacccacuuucaaaa

SEQ ID NO: 25960 - RNA, 21 nt, artificial
  Chemically synthesized
gaaaagcuucagaaauugaaa

SEQ ID NO: 25961 - RNA, 21 nt, artificial
  Chemically synthesized
cacgaacaagcggaccaacuu

SEQ ID NO: 25962 - RNA, 21 nt, artificial
  Chemically synthesized
caauuggaagauuuaaagaaa

SEQ ID NO: 25963 - RNA, 21 nt, artificial
  Chemically synthesized
cccaggagaacaagcugaaga

SEQ ID NO: 25964 - RNA, 21 nt, artificial
  Chemically synthesized
aagacuguaccaagaacuaca

SEQ ID NO: 25965 - RNA, 21 nt, artificial
  Chemically synthesized
uuuaaagaaaggaaaacugaa

SEQ ID NO: 25966 - RNA, 21 nt, artificial
  Chemically synthesized
guacaggcuuuuuauauacca

SEQ ID NO: 25967 - RNA, 21 nt, artificial
  Chemically synthesized
ugaaaaugaaaagcuucagaa

SEQ ID NO: 25968 - RNA, 21 nt, artificial
  Chemically synthesized
caacaaugaacagauuuuaac

SEQ ID NO: 25969 - RNA, 21 nt, artificial
  Chemically synthesized
gagcaacgaacucagagaaau

SEQ ID NO: 25970 - RNA, 21 nt, artificial
  Chemically synthesized
ucaaccauaagcgacauugaa

SEQ ID NO: 25971 - RNA, 21 nt, artificial
  Chemically synthesized
caaagcuacccgaacuauguu

SEQ ID NO: 25972 - RNA, 21 nt, artificial
  Chemically synthesized
augaaaagcuucagaaauuga

SEQ ID NO: 25973 - RNA, 21 nt, artificial
  Chemically synthesized
cagcagaaggaacucuuaaau

SEQ ID NO: 25974 - RNA, 21 nt, artificial
  Chemically synthesized
gacccaagagcaacgaacuca

SEQ ID NO: 25975 - RNA, 21 nt, artificial
  Chemically synthesized
ugaauggguuccagucuuaca

SEQ ID NO: 25976 - RNA, 21 nt, artificial
  Chemically synthesized
cauguuccaggaaaagaagca

SEQ ID NO: 25977 - RNA, 21 nt, artificial
  Chemically synthesized
aaagcgcagcuccaucacaga

SEQ ID NO: 25978 - RNA, 21 nt, artificial
  Chemically synthesized
gacagaagcucuuacugacuu

SEQ ID NO: 25979 - RNA, 21 nt, artificial
  Chemically synthesized
aacuguuuucuugagcaacaa

SEQ ID NO: 25980 - RNA, 21 nt, artificial
  Chemically synthesized
cauuuuugccucaaccauaag

SEQ ID NO: 25981 - RNA, 21 nt, artificial
  Chemically synthesized
ccaguucaccuaaaggcugau

SEQ ID NO: 25982 - RNA, 21 nt, artificial
  Chemically synthesized
ccaccaucacaucgugaaguu

SEQ ID NO: 25983 - RNA, 21 nt, artificial
  Chemically synthesized
gucucucaguauugccucaaa

SEQ ID NO: 25984 - RNA, 21 nt, artificial
  Chemically synthesized
caccuaaaggcugauugugca

SEQ ID NO: 25985 - RNA, 21 nt, artificial
  Chemically synthesized
gcgcuucacugaggugugaau

SEQ ID NO: 25986 - RNA, 21 nt, artificial
  Chemically synthesized
auaaauguaccuggagaaaaa

SEQ ID NO: 25987 - RNA, 21 nt, artificial
  Chemically synthesized
ggugucaacgugaaugcugcu

SEQ ID NO: 25988 - RNA, 21 nt, artificial
  Chemically synthesized
aggcuuuuuauauaccaaaag

SEQ ID NO: 25989 - RNA, 21 nt, artificial
  Chemically synthesized
ggaaacauguccaguguugcu

SEQ ID NO: 25990 - RNA, 21 nt, artificial
  Chemically synthesized
ucgccugaacuuccuuuugga

SEQ ID NO: 25991 - RNA, 21 nt, artificial
  Chemically synthesized
ugacuagaccauucaaagcua

SEQ ID NO: 25992 - RNA, 21 nt, artificial
  Chemically synthesized
caaaaguauuuuuugacuaga

SEQ ID NO: 25993 - RNA, 21 nt, artificial
  Chemically synthesized
aaauugaaagaacgaguugaa

SEQ ID NO: 25994 - RNA, 21 nt, artificial
  Chemically synthesized
accaaaaguauuuuuugacua

SEQ ID NO: 25995 - RNA, 21 nt, artificial
  Chemically synthesized
guccacaaugugaauccuaca

SEQ ID NO: 25996 - RNA, 21 nt, artificial
  Chemically synthesized
agugaauucaaguuccauaua

SEQ ID NO: 25997 - RNA, 21 nt, artificial
  Chemically synthesized
uuaaccaggaacaaaauucaa

SEQ ID NO: 25998 - RNA, 21 nt, artificial
  Chemically synthesized
ggcuuuuuauauaccaaaagu

SEQ ID NO: 25999 - RNA, 21 nt, artificial
  Chemically synthesized
aauaaauguaccuggagaaaa

SEQ ID NO: 26000 - RNA, 21 nt, artificial
  Chemically synthesized
ucuggugcagaggaucaucua

SEQ ID NO: 26001 - RNA, 21 nt, artificial
  Chemically synthesized
cucagagaaauguaauaaaug

SEQ ID NO: 26002 - RNA, 21 nt, artificial
  Chemically synthesized
acaugauccuucuucccuuca

SEQ ID NO: 26003 - RNA, 21 nt, artificial
  Chemically synthesized
cuucccuucaucaccaaagga

SEQ ID NO: 26004 - RNA, 21 nt, artificial
  Chemically synthesized
aggcccuuaggcucuauuuuu

SEQ ID NO: 26005 - RNA, 21 nt, artificial
  Chemically synthesized
gaacaaaauucaaaacuucag

SEQ ID NO: 26006 - RNA, 21 nt, artificial
  Chemically synthesized
gaaacaaccugucgagauguu

SEQ ID NO: 26007 - RNA, 21 nt, artificial
  Chemically synthesized
gacagcguccacaaugugaau

SEQ ID NO: 26008 - RNA, 21 nt, artificial
  Chemically synthesized
guuccaggaaaagaagcagga

SEQ ID NO: 26009 - RNA, 21 nt, artificial
  Chemically synthesized
guucgaucuggugcagaggau

SEQ ID NO: 26010 - RNA, 21 nt, artificial
  Chemically synthesized
cacugaggugugaauuguacg

SEQ ID NO: 26011 - RNA, 21 nt, artificial
  Chemically synthesized
aaccaacuuaaccaggaacaa

SEQ ID NO: 26012 - RNA, 21 nt, artificial
  Chemically synthesized
auguggacaauggaaacacca

SEQ ID NO: 26013 - RNA, 21 nt, artificial
  Chemically synthesized
agcaauuggaagauuuaaaga

SEQ ID NO: 26014 - RNA, 21 nt, artificial
  Chemically synthesized
uuuuuugacuagaccauucaa

SEQ ID NO: 26015 - RNA, 21 nt, artificial
  Chemically synthesized
ucgacuacagcaaaaucauga

SEQ ID NO: 26016 - RNA, 21 nt, artificial
  Chemically synthesized
aagucgacuacagcaaaauca

SEQ ID NO: 26017 - RNA, 21 nt, artificial
  Chemically synthesized
aacuuaaccaggaacaaaauu

SEQ ID NO: 26018 - RNA, 21 nt, artificial
  Chemically synthesized
aaaugaaaagcuucagaaauu

SEQ ID NO: 26019 - RNA, 21 nt, artificial
  Chemically synthesized
uccagugcucccaguuucuau

SEQ ID NO: 26020 - RNA, 21 nt, artificial
  Chemically synthesized
gauuuuaacagaaguuccuau

SEQ ID NO: 26021 - RNA, 21 nt, artificial
  Chemically synthesized
guguaaaugugcacaauaaac

SEQ ID NO: 26022 - RNA, 21 nt, artificial
  Chemically synthesized
agcgaacacucgccugaacuu

SEQ ID NO: 26023 - RNA, 21 nt, artificial
  Chemically synthesized
gaguugaagcccaggagaaca

SEQ ID NO: 26024 - RNA, 21 nt, artificial
  Chemically synthesized
ucaacgugaaugcugcugaua

SEQ ID NO: 26025 - RNA, 21 nt, artificial
  Chemically synthesized
agacagaagcucuuacugacu

SEQ ID NO: 26026 - RNA, 21 nt, artificial
  Chemically synthesized
cgugaaguuccugcuggauuu

SEQ ID NO: 26027 - RNA, 21 nt, artificial
  Chemically synthesized
acuguaccaagaacuacagau

SEQ ID NO: 26028 - RNA, 21 nt, artificial
  Chemically synthesized
cgaugauauuaacuguuuucu

SEQ ID NO: 26029 - RNA, 21 nt, artificial
  Chemically synthesized
acaaccugucgagauguugua

SEQ ID NO: 26030 - RNA, 21 nt, artificial
  Chemically synthesized
aaagcuucagaaauugaaaga

SEQ ID NO: 26031 - RNA, 21 nt, artificial
  Chemically synthesized
cucucagagcuccaagauaug

SEQ ID NO: 26032 - RNA, 21 nt, artificial
  Chemically synthesized
cgagauguuguagaauuuugc

SEQ ID NO: 26033 - RNA, 21 nt, artificial
  Chemically synthesized
gaugauauuaacuguuuucuu

SEQ ID NO: 26034 - RNA, 21 nt, artificial
  Chemically synthesized
auggaagauccaaauccgcua

SEQ ID NO: 26035 - RNA, 21 nt, artificial
  Chemically synthesized
cauuaaaacagaauucuagcu

SEQ ID NO: 26036 - RNA, 21 nt, artificial
  Chemically synthesized
cccugcaagcucaaauucagu

SEQ ID NO: 26037 - RNA, 21 nt, artificial
  Chemically synthesized
gaacagauuuuaacagaaguu

SEQ ID NO: 26038 - RNA, 21 nt, artificial
  Chemically synthesized
ccucucagagcuccaagauau

SEQ ID NO: 26039 - RNA, 21 nt, artificial
  Chemically synthesized
acugggagagccucagcauau

SEQ ID NO: 26040 - RNA, 21 nt, artificial
  Chemically synthesized
uccaaauccgcuaaugaugga

SEQ ID NO: 26041 - RNA, 21 nt, artificial
  Chemically synthesized
ccaccuucagaaaguacugag

SEQ ID NO: 26042 - RNA, 21 nt, artificial
  Chemically synthesized
ugaaaaagcgcagcuccauca

SEQ ID NO: 26043 - RNA, 21 nt, artificial
  Chemically synthesized
agugaacgcccuuguagagca

SEQ ID NO: 26044 - RNA, 21 nt, artificial
  Chemically synthesized
uuaacagaaguuccuauaaca

SEQ ID NO: 26045 - RNA, 21 nt, artificial
  Chemically synthesized
gaacucagagaaauguaauaa

SEQ ID NO: 26046 - RNA, 21 nt, artificial
  Chemically synthesized
cguccacaaugugaauccuac

SEQ ID NO: 26047 - RNA, 21 nt, artificial
  Chemically synthesized
uacguacaggcuuuuuauaua

SEQ ID NO: 26048 - RNA, 21 nt, artificial
  Chemically synthesized
gucaccgaaucggacacucau

SEQ ID NO: 26049 - RNA, 21 nt, artificial
  Chemically synthesized
caggaacaaaauucaaaacuu

SEQ ID NO: 26050 - RNA, 21 nt, artificial
  Chemically synthesized
gccuccaagcuaugggacaua

SEQ ID NO: 26051 - RNA, 21 nt, artificial
  Chemically synthesized
cggacacucauccuuucucac

SEQ ID NO: 26052 - RNA, 21 nt, artificial
  Chemically synthesized
aagcaggaaguacagacugca

SEQ ID NO: 26053 - RNA, 21 nt, artificial
  Chemically synthesized
uccgcuuccuguuccaguuca

SEQ ID NO: 26054 - RNA, 21 nt, artificial
  Chemically synthesized
cugcugauagugauggaugga

SEQ ID NO: 26055 - RNA, 21 nt, artificial
  Chemically synthesized
uccacggagggaagaagugaa

SEQ ID NO: 26056 - RNA, 21 nt, artificial
  Chemically synthesized
augugaauccuacaguuucca

SEQ ID NO: 26057 - RNA, 21 nt, artificial
  Chemically synthesized
aagauccaaauccgcuaauga

SEQ ID NO: 26058 - RNA, 21 nt, artificial
  Chemically synthesized
uauggaaacauguccaguguu

SEQ ID NO: 26059 - RNA, 21 nt, artificial
  Chemically synthesized
agcuacccgaacuauguugga

SEQ ID NO: 26060 - RNA, 21 nt, artificial
  Chemically synthesized
gaaaacugaauggguuccagu

SEQ ID NO: 26061 - RNA, 21 nt, artificial
  Chemically synthesized
uaaccaacuuaaccaggaaca

SEQ ID NO: 26062 - RNA, 21 nt, artificial
  Chemically synthesized
uggaagauuuaaagaaaggaa

SEQ ID NO: 26063 - RNA, 21 nt, artificial
  Chemically synthesized
aaccugucgagauguuguaga

SEQ ID NO: 26064 - RNA, 21 nt, artificial
  Chemically synthesized
ccaaaaguauuuuuugacuag

SEQ ID NO: 26065 - RNA, 21 nt, artificial
  Chemically synthesized
gggaaaaaaauucagcugaac

SEQ ID NO: 26066 - RNA, 21 nt, artificial
  Chemically synthesized
agaaauguaauaaauguaccu

SEQ ID NO: 26067 - RNA, 21 nt, artificial
  Chemically synthesized
gagaaagagccugagcaggau

SEQ ID NO: 26068 - RNA, 21 nt, artificial
  Chemically synthesized
gaugaugccgaugauauuaac

SEQ ID NO: 26069 - RNA, 21 nt, artificial
  Chemically synthesized
cucuguauggaaacaugucca

SEQ ID NO: 26070 - RNA, 21 nt, artificial
  Chemically synthesized
cuuucgccuccaaggacugaa

SEQ ID NO: 26071 - RNA, 21 nt, artificial
  Chemically synthesized
ugcgugaacgucucuauggga

SEQ ID NO: 26072 - RNA, 21 nt, artificial
  Chemically synthesized
uuuuugacuagaccauucaaa

SEQ ID NO: 26073 - RNA, 21 nt, artificial
  Chemically synthesized
cuauaacaccggaaacaaccu

SEQ ID NO: 26074 - RNA, 21 nt, artificial
  Chemically synthesized
cacaccaccuaagaauuacca

SEQ ID NO: 26075 - RNA, 21 nt, artificial
  Chemically synthesized
gauccaaauccgcuaaugaug

SEQ ID NO: 26076 - RNA, 21 nt, artificial
  Chemically synthesized
ugaucauaugauguacgaaca

SEQ ID NO: 26077 - RNA, 21 nt, artificial
  Chemically synthesized
aaugcugcugauagugaugga

SEQ ID NO: 26078 - RNA, 21 nt, artificial
  Chemically synthesized
agaacgaguugaagcccagga

SEQ ID NO: 26079 - RNA, 21 nt, artificial
  Chemically synthesized
cugaaaaugaaaagcuucaga

SEQ ID NO: 26080 - RNA, 21 nt, artificial
  Chemically synthesized
ugauguacgaacaucuucaga

SEQ ID NO: 26081 - RNA, 21 nt, artificial
  Chemically synthesized
aauucagcugaaccgugugaa

SEQ ID NO: 26082 - RNA, 21 nt, artificial
  Chemically synthesized
gucgagauguuguagaauuuu

SEQ ID NO: 26083 - RNA, 21 nt, artificial
  Chemically synthesized
agaaguuccuauaacaccgga

SEQ ID NO: 26084 - RNA, 21 nt, artificial
  Chemically synthesized
uucaaaacuucagcagcagaa

SEQ ID NO: 26085 - RNA, 21 nt, artificial
  Chemically synthesized
uacccucucagagcuccaaga

SEQ ID NO: 26086 - RNA, 21 nt, artificial
  Chemically synthesized
agugaagacagaagcucuuac

SEQ ID NO: 26087 - RNA, 21 nt, artificial
  Chemically synthesized
uuugaucauaugauguacgaa

SEQ ID NO: 26088 - RNA, 21 nt, artificial
  Chemically synthesized
ccgaaucggacacucauccuu

SEQ ID NO: 26089 - RNA, 21 nt, artificial
  Chemically synthesized
acggagggaagaagugaaauu

SEQ ID NO: 26090 - RNA, 21 nt, artificial
  Chemically synthesized
cagcguucaccucugcaaaca

SEQ ID NO: 26091 - RNA, 21 nt, artificial
  Chemically synthesized
uacaggcuuuuuauauaccaa

SEQ ID NO: 26092 - RNA, 21 nt, artificial
  Chemically synthesized
auuuuuugacuagaccauuca

SEQ ID NO: 26093 - RNA, 21 nt, artificial
  Chemically synthesized
agcuaggcaacagcagcagau

SEQ ID NO: 26094 - RNA, 21 nt, artificial
  Chemically synthesized
agagguacuuucgccuccaag

SEQ ID NO: 26095 - RNA, 21 nt, artificial
  Chemically synthesized
cagaaaguacugagaaagagc

SEQ ID NO: 26096 - RNA, 21 nt, artificial
  Chemically synthesized
uccaguucaccuaaaggcuga

SEQ ID NO: 26097 - RNA, 21 nt, artificial
  Chemically synthesized
cuugagcaacaaugaacagau

SEQ ID NO: 26098 - RNA, 21 nt, artificial
  Chemically synthesized
ccaucacaucgugaaguuccu

SEQ ID NO: 26099 - RNA, 21 nt, artificial
  Chemically synthesized
acaagcggaccaacuugaaga

SEQ ID NO: 26100 - RNA, 21 nt, artificial
  Chemically synthesized
gaagugaaauuuuuccuucga

SEQ ID NO: 26101 - RNA, 21 nt, artificial
  Chemically synthesized
cuggugcagaggaucaucuau

SEQ ID NO: 26102 - RNA, 21 nt, artificial
  Chemically synthesized
aagagcaacgaacucagagaa

SEQ ID NO: 26103 - RNA, 21 nt, artificial
  Chemically synthesized
uucagaaaguacugagaaaga

SEQ ID NO: 26104 - RNA, 21 nt, artificial
  Chemically synthesized
uugccucaaccauaagcgaca

SEQ ID NO: 26105 - RNA, 21 nt, artificial
  Chemically synthesized
ugaacagauuuuaacagaagu

SEQ ID NO: 26106 - RNA, 21 nt, artificial
  Chemically synthesized
uuagcagacagcguccacaau

SEQ ID NO: 26107 - RNA, 21 nt, artificial
  Chemically synthesized
uguuuucuugagcaacaauga

SEQ ID NO: 26108 - RNA, 21 nt, artificial
  Chemically synthesized
cugagaacagugaacaaggug

SEQ ID NO: 26109 - RNA, 21 nt, artificial
  Chemically synthesized
gauucagcagaggauuuccgu

SEQ ID NO: 26110 - RNA, 21 nt, artificial
  Chemically synthesized
gugaagacagaagcucuuacu

SEQ ID NO: 26111 - RNA, 21 nt, artificial
  Chemically synthesized
cauacccuuugaucauaugau

SEQ ID NO: 26112 - RNA, 21 nt, artificial
  Chemically synthesized
auucaaaacuucagcagcaga

SEQ ID NO: 26113 - RNA, 21 nt, artificial
  Chemically synthesized
ccacaaugugaauccuacagu

SEQ ID NO: 26114 - RNA, 21 nt, artificial
  Chemically synthesized
ccgauguggacaauggaaaca

SEQ ID NO: 26115 - RNA, 21 nt, artificial
  Chemically synthesized
cuagcucuuccgugaaaccag

SEQ ID NO: 26116 - RNA, 21 nt, artificial
  Chemically synthesized
caccuucagaaaguacugaga

SEQ ID NO: 26117 - RNA, 21 nt, artificial
  Chemically synthesized
caaugugaauccuacaguuuc

SEQ ID NO: 26118 - RNA, 21 nt, artificial
  Chemically synthesized
auggacaagcgaaucagugaa

SEQ ID NO: 26119 - RNA, 21 nt, artificial
  Chemically synthesized
caguuugcccauuaacuggga

SEQ ID NO: 26120 - RNA, 21 nt, artificial
  Chemically synthesized
gaacagugacgagcuguccuu

SEQ ID NO: 26121 - RNA, 21 nt, artificial
  Chemically synthesized
cagauuuuaacagaaguuccu

SEQ ID NO: 26122 - RNA, 21 nt, artificial
  Chemically synthesized
aaacuucagcagcagaaggaa

SEQ ID NO: 26123 - RNA, 21 nt, artificial
  Chemically synthesized
ggaaaaaaauucagcugaacc

SEQ ID NO: 26124 - RNA, 21 nt, artificial
  Chemically synthesized
uucugaaaaugaaaagcuuca

SEQ ID NO: 26125 - RNA, 21 nt, artificial
  Chemically synthesized
cgugcaaugagaggacaaguc

SEQ ID NO: 26126 - RNA, 21 nt, artificial
  Chemically synthesized
gccgucagcagcagucuauuu

SEQ ID NO: 26127 - RNA, 21 nt, artificial
  Chemically synthesized
cgauguggacaauggaaacac

SEQ ID NO: 26128 - RNA, 21 nt, artificial
  Chemically synthesized
cguuucuucacgggucacugu

SEQ ID NO: 26129 - RNA, 21 nt, artificial
  Chemically synthesized
cagauucguaaccaacuuaac

SEQ ID NO: 26130 - RNA, 21 nt, artificial
  Chemically synthesized
agauuuuaacagaaguuccua

SEQ ID NO: 26131 - RNA, 21 nt, artificial
  Chemically synthesized
auuuaaagaaaggaaaacuga

SEQ ID NO: 26132 - RNA, 21 nt, artificial
  Chemically synthesized
cagcguuuacauuuucuaaag

SEQ ID NO: 26133 - RNA, 21 nt, artificial
  Chemically synthesized
ugccgaugauauuaacuguuu

SEQ ID NO: 26134 - RNA, 21 nt, artificial
  Chemically synthesized
aacaaugaacagauuuuaaca

SEQ ID NO: 26135 - RNA, 21 nt, artificial
  Chemically synthesized
caggcccuuaggcucuauuuu

SEQ ID NO: 26136 - RNA, 21 nt, artificial
  Chemically synthesized
uggaagauccaaauccgcuaa

SEQ ID NO: 26137 - RNA, 21 nt, artificial
  Chemically synthesized
ccuguuccaguucaccuaaag

SEQ ID NO: 26138 - RNA, 21 nt, artificial
  Chemically synthesized
acauaguguggugaagaaaag

SEQ ID NO: 26139 - RNA, 21 nt, artificial
  Chemically synthesized
aaaaagcgcagcuccaucaca

SEQ ID NO: 26140 - RNA, 21 nt, artificial
  Chemically synthesized
ggucuuaauggugcucacuuu

SEQ ID NO: 26141 - RNA, 21 nt, artificial
  Chemically synthesized
agucucucaguauugccucaa

SEQ ID NO: 26142 - RNA, 21 nt, artificial
  Chemically synthesized
aagugacaacugggagagccu

SEQ ID NO: 26143 - RNA, 21 nt, artificial
  Chemically synthesized
ugggaauccacguguugaacu

SEQ ID NO: 26144 - RNA, 21 nt, artificial
  Chemically synthesized
cucaaccauaagcgacauuga

SEQ ID NO: 26145 - RNA, 21 nt, artificial
  Chemically synthesized
cguacaggcuuuuuauauacc

SEQ ID NO: 26146 - RNA, 21 nt, artificial
  Chemically synthesized
acucagagaaauguaauaaau

SEQ ID NO: 26147 - RNA, 21 nt, artificial
  Chemically synthesized
gcuguauccacggaucaaacc

SEQ ID NO: 26148 - RNA, 21 nt, artificial
  Chemically synthesized
auucaaguuccauauacucca

SEQ ID NO: 26149 - RNA, 21 nt, artificial
  Chemically synthesized
cgccugaacuuccuuuuggag

SEQ ID NO: 26150 - RNA, 21 nt, artificial
  Chemically synthesized
aguauuuuuugacuagaccau

SEQ ID NO: 26151 - RNA, 21 nt, artificial
  Chemically synthesized
aagagauuauugugcuguuuu

SEQ ID NO: 26152 - RNA, 21 nt, artificial
  Chemically synthesized
aacagcguuuacauuuucuaa

SEQ ID NO: 26153 - RNA, 21 nt, artificial
  Chemically synthesized
uggucuuaauggugcucacuu

SEQ ID NO: 26154 - RNA, 21 nt, artificial
  Chemically synthesized
agagccucagcauauacucuu

SEQ ID NO: 26155 - RNA, 21 nt, artificial
  Chemically synthesized
aacugggagagccucagcaua

SEQ ID NO: 26156 - RNA, 21 nt, artificial
  Chemically synthesized
uggugcucacuuuagcagaca

SEQ ID NO: 26157 - RNA, 21 nt, artificial
  Chemically synthesized
gcuacccgaacuauguuggaa

SEQ ID NO: 26158 - RNA, 21 nt, artificial
  Chemically synthesized
ucccuggaaaggaggaaggaa

SEQ ID NO: 26159 - RNA, 21 nt, artificial
  Chemically synthesized
aagcccaggagaacaagcuga

SEQ ID NO: 26160 - RNA, 21 nt, artificial
  Chemically synthesized
cuacauccagugcucccaguu

SEQ ID NO: 26161 - RNA, 21 nt, artificial
  Chemically synthesized
accaagaacuacagauucgua

SEQ ID NO: 26162 - RNA, 21 nt, artificial
  Chemically synthesized
gaaccagaggagcucaucugu

SEQ ID NO: 26163 - RNA, 21 nt, artificial
  Chemically synthesized
cucucaguauugccucaaaug

SEQ ID NO: 26164 - RNA, 21 nt, artificial
  Chemically synthesized
ugaacugcgugaacgucucua

SEQ ID NO: 26165 - RNA, 21 nt, artificial
  Chemically synthesized
acugcaauuuuaaggguugau

SEQ ID NO: 26166 - RNA, 21 nt, artificial
  Chemically synthesized
gacuagaccauucaaagcuac

SEQ ID NO: 26167 - RNA, 21 nt, artificial
  Chemically synthesized
aagucaguuaaagcaguguau

SEQ ID NO: 26168 - RNA, 21 nt, artificial
  Chemically synthesized
gaaucagugaacugcgugaac

SEQ ID NO: 26169 - RNA, 21 nt, artificial
  Chemically synthesized
guuccuauaacaccggaaaca

SEQ ID NO: 26170 - RNA, 21 nt, artificial
  Chemically synthesized
cuaccagagugaugcagaccu

SEQ ID NO: 26171 - RNA, 21 nt, artificial
  Chemically synthesized
ccuuaaauaagucaguuaaag

SEQ ID NO: 26172 - RNA, 21 nt, artificial
  Chemically synthesized
cugaauggguuccagucuuac

SEQ ID NO: 26173 - RNA, 21 nt, artificial
  Chemically synthesized
agcacuguagcccaucaccuu

SEQ ID NO: 26174 - RNA, 21 nt, artificial
  Chemically synthesized
aaguuccauauacuccaugua

SEQ ID NO: 26175 - RNA, 21 nt, artificial
  Chemically synthesized
acuguagcccaucaccuugga

SEQ ID NO: 26176 - RNA, 21 nt, artificial
  Chemically synthesized
cguuuuaccuucggguucaac

SEQ ID NO: 26177 - RNA, 21 nt, artificial
  Chemically synthesized
acuacagauucguaaccaacu

SEQ ID NO: 26178 - RNA, 21 nt, artificial
  Chemically synthesized
gaaaagaagcaggaaguacag

SEQ ID NO: 26179 - RNA, 21 nt, artificial
  Chemically synthesized
uuuagcagacagcguccacaa

SEQ ID NO: 26180 - RNA, 21 nt, artificial
  Chemically synthesized
ggccuuauauccagguuccca

SEQ ID NO: 26181 - RNA, 21 nt, artificial
  Chemically synthesized
auuguacguacaggcuuuuua

SEQ ID NO: 26182 - RNA, 21 nt, artificial
  Chemically synthesized
gggcaucgagauugguaaagu

SEQ ID NO: 26183 - RNA, 21 nt, artificial
  Chemically synthesized
gggaaaugaacgucccauacc

SEQ ID NO: 26184 - RNA, 21 nt, artificial
  Chemically synthesized
cgaaucggacacucauccuuu

SEQ ID NO: 26185 - RNA, 21 nt, artificial
  Chemically synthesized
cagaaauugaaagaacgaguu

SEQ ID NO: 26186 - RNA, 21 nt, artificial
  Chemically synthesized
agggaagaagugaaauuuuuc

SEQ ID NO: 26187 - RNA, 21 nt, artificial
  Chemically synthesized
gcugaaauagaaagguucagu

SEQ ID NO: 26188 - RNA, 21 nt, artificial
  Chemically synthesized
auccagugcucccaguuucua

SEQ ID NO: 26189 - RNA, 21 nt, artificial
  Chemically synthesized
ccaaaggagccucuguaugga

SEQ ID NO: 26190 - RNA, 21 nt, artificial
  Chemically synthesized
acaccggaaacaaccugucga

SEQ ID NO: 26191 - RNA, 21 nt, artificial
  Chemically synthesized
ggcccuuaggcucuauuuuuc

SEQ ID NO: 26192 - RNA, 21 nt, artificial
  Chemically synthesized
accuucagaaaguacugagaa

SEQ ID NO: 26193 - RNA, 21 nt, artificial
  Chemically synthesized
uuuuaacagaaguuccuauaa

SEQ ID NO: 26194 - RNA, 21 nt, artificial
  Chemically synthesized
gaacacucgccugaacuuccu

SEQ ID NO: 26195 - RNA, 21 nt, artificial
  Chemically synthesized
ucagcagcagaaggaacucuu

SEQ ID NO: 26196 - RNA, 21 nt, artificial
  Chemically synthesized
ucgccuccaaggacugaauuu

SEQ ID NO: 26197 - RNA, 21 nt, artificial
  Chemically synthesized
cagacccaagagcaacgaacu

SEQ ID NO: 26198 - RNA, 21 nt, artificial
  Chemically synthesized
cagcgccuuaaauaagucagu

SEQ ID NO: 26199 - RNA, 21 nt, artificial
  Chemically synthesized
acauuuucuaaagcaacagga

SEQ ID NO: 26200 - RNA, 21 nt, artificial
  Chemically synthesized
cuuaaccaggaacaaaauuca

SEQ ID NO: 26201 - RNA, 21 nt, artificial
  Chemically synthesized
uacugagaaagagccugagca

SEQ ID NO: 26202 - RNA, 21 nt, artificial
  Chemically synthesized
cacuuuagcagacagcgucca

SEQ ID NO: 26203 - RNA, 21 nt, artificial
  Chemically synthesized
cggagggaagaagugaaauuu

SEQ ID NO: 26204 - RNA, 21 nt, artificial
  Chemically synthesized
gagcacugacuguacauagug

SEQ ID NO: 26205 - RNA, 21 nt, artificial
  Chemically synthesized
acuuacccucucagagcucca

SEQ ID NO: 26206 - RNA, 21 nt, artificial
  Chemically synthesized
aagcuucagaaauugaaagaa

SEQ ID NO: 26207 - RNA, 21 nt, artificial
  Chemically synthesized
uuaggcucuauuuuucaugua

SEQ ID NO: 26208 - RNA, 21 nt, artificial
  Chemically synthesized
agguacuuucgccuccaagga

SEQ ID NO: 26209 - RNA, 21 nt, artificial
  Chemically synthesized
gcaacgaacucagagaaaugu

SEQ ID NO: 26210 - RNA, 21 nt, artificial
  Chemically synthesized
cucuauuuuucauguaugagu

SEQ ID NO: 26211 - RNA, 21 nt, artificial
  Chemically synthesized
gacucacugaugcagcacugu

SEQ ID NO: 26212 - RNA, 21 nt, artificial
  Chemically synthesized
agcuaugggacauacccaagu

SEQ ID NO: 26213 - RNA, 21 nt, artificial
  Chemically synthesized
caagaacuacagauucguaac

SEQ ID NO: 26214 - RNA, 21 nt, artificial
  Chemically synthesized
aacgaguugaagcccaggaga

SEQ ID NO: 26215 - RNA, 21 nt, artificial
  Chemically synthesized
gggaauccacguguugaacuu

SEQ ID NO: 26216 - RNA, 21 nt, artificial
  Chemically synthesized
uuaaauaagucaguuaaagca

SEQ ID NO: 26217 - RNA, 21 nt, artificial
  Chemically synthesized
augggaaaaaaauucagcuga

SEQ ID NO: 26218 - RNA, 21 nt, artificial
  Chemically synthesized
cuagaaaauggucuuaauggu

SEQ ID NO: 26219 - RNA, 21 nt, artificial
  Chemically synthesized
guaccuggagaaaaacguacu

SEQ ID NO: 26220 - RNA, 21 nt, artificial
  Chemically synthesized
agcucuuccgugaaaccagug

SEQ ID NO: 26221 - RNA, 21 nt, artificial
  Chemically synthesized
uuggaagauuuaaagaaagga

SEQ ID NO: 26222 - RNA, 21 nt, artificial
  Chemically synthesized
aagcugcagcuagaaaauggu

SEQ ID NO: 26223 - RNA, 21 nt, artificial
  Chemically synthesized
ugucaacgugaaugcugcuga

SEQ ID NO: 26224 - RNA, 21 nt, artificial
  Chemically synthesized
uaggcucuauuuuucauguau

SEQ ID NO: 26225 - RNA, 21 nt, artificial
  Chemically synthesized
aggcuccucacaacagauuca

SEQ ID NO: 26226 - RNA, 21 nt, artificial
  Chemically synthesized
caaguuccauauacuccaugu

SEQ ID NO: 26227 - RNA, 21 nt, artificial
  Chemically synthesized
uaauaaauguaccuggagaaa

SEQ ID NO: 26228 - RNA, 21 nt, artificial
  Chemically synthesized
augcugcucauggaagaucca

SEQ ID NO: 26229 - RNA, 21 nt, artificial
  Chemically synthesized
ugcugaaauagaaagguucag

SEQ ID NO: 26230 - RNA, 21 nt, artificial
  Chemically synthesized
ucucuaugggaaaaaaauuca

SEQ ID NO: 26231 - RNA, 21 nt, artificial
  Chemically synthesized
auaccaaaaguauuuuuugac

SEQ ID NO: 26232 - RNA, 21 nt, artificial
  Chemically synthesized
aaagaagcaggaaguacagac

SEQ ID NO: 26233 - RNA, 21 nt, artificial
  Chemically synthesized
aacgugaaugcugcugauagu

SEQ ID NO: 26234 - RNA, 21 nt, artificial
  Chemically synthesized
aauacaggcccuuaggcucua

SEQ ID NO: 26235 - RNA, 21 nt, artificial
  Chemically synthesized
aauccuacaguuuccagguga

SEQ ID NO: 26236 - RNA, 21 nt, artificial
  Chemically synthesized
agcagacagcguccacaaugu

SEQ ID NO: 26237 - RNA, 21 nt, artificial
  Chemically synthesized
accgaaucggacacucauccu

SEQ ID NO: 26238 - RNA, 21 nt, artificial
  Chemically synthesized
agagaaauguaauaaauguac

SEQ ID NO: 26239 - RNA, 21 nt, artificial
  Chemically synthesized
ugaauggagucaggugcugga

SEQ ID NO: 26240 - RNA, 21 nt, artificial
  Chemically synthesized
gcuucacugaggugugaauug

SEQ ID NO: 26241 - RNA, 21 nt, artificial
  Chemically synthesized
gauauuaacuguuuucuugag

SEQ ID NO: 26242 - RNA, 21 nt, artificial
  Chemically synthesized
ucgugaaguuccugcuggauu

SEQ ID NO: 26243 - RNA, 21 nt, artificial
  Chemically synthesized
uuccuauaacaccggaaacaa

SEQ ID NO: 26244 - RNA, 21 nt, artificial
  Chemically synthesized
caugcugcucagugugguucu

SEQ ID NO: 26245 - RNA, 21 nt, artificial
  Chemically synthesized
ccugaacuuccuuuuggagca

SEQ ID NO: 26246 - RNA, 21 nt, artificial
  Chemically synthesized
gauccuucuucccuucaucac

SEQ ID NO: 26247 - RNA, 21 nt, artificial
  Chemically synthesized
guaccaagaacuacagauucg

SEQ ID NO: 26248 - RNA, 21 nt, artificial
  Chemically synthesized
aaauucagcugaaccguguga

SEQ ID NO: 26249 - RNA, 21 nt, artificial
  Chemically synthesized
ggaagaagugaaauuuuuccu

SEQ ID NO: 26250 - RNA, 21 nt, artificial
  Chemically synthesized
gugaacugcgugaacgucucu

SEQ ID NO: 26251 - RNA, 21 nt, artificial
  Chemically synthesized
ugagaggacaagucgacuaca

SEQ ID NO: 26252 - RNA, 21 nt, artificial
  Chemically synthesized
aucagugaacugcgugaacgu

SEQ ID NO: 26253 - RNA, 21 nt, artificial
  Chemically synthesized
aagacagaagcucuuacugac

SEQ ID NO: 26254 - RNA, 21 nt, artificial
  Chemically synthesized
cugcucauggaagauccaaau

SEQ ID NO: 26255 - RNA, 21 nt, artificial
  Chemically synthesized
agcucaaauucaguucccuga

SEQ ID NO: 26256 - RNA, 21 nt, artificial
  Chemically synthesized
gcuucagaaauugaaagaacg

SEQ ID NO: 26257 - RNA, 21 nt, artificial
  Chemically synthesized
ggacaagcgaaucagugaacu

SEQ ID NO: 26258 - RNA, 21 nt, artificial
  Chemically synthesized
cuuccuuuuggagcaccgcau

SEQ ID NO: 26259 - RNA, 21 nt, artificial
  Chemically synthesized
aaggaacagcguuuacauuuu

SEQ ID NO: 26260 - RNA, 21 nt, artificial
  Chemically synthesized
agccucuguauggaaacaugu

SEQ ID NO: 26261 - RNA, 21 nt, artificial
  Chemically synthesized
cuuaaauaagucaguuaaagc

SEQ ID NO: 26262 - RNA, 21 nt, artificial
  Chemically synthesized
cuccucacaacagauucagca

SEQ ID NO: 26263 - RNA, 21 nt, artificial
  Chemically synthesized
cugaggugugaauuguacgua

SEQ ID NO: 26264 - RNA, 21 nt, artificial
  Chemically synthesized
aaguacugagaaagagccuga

SEQ ID NO: 26265 - RNA, 21 nt, artificial
  Chemically synthesized
aaauaagucaguuaaagcagu

SEQ ID NO: 26266 - RNA, 21 nt, artificial
  Chemically synthesized
cuccaagcuaugggacauacc

SEQ ID NO: 26267 - RNA, 21 nt, artificial
  Chemically synthesized
gucugcugaaauagaaagguu

SEQ ID NO: 26268 - RNA, 21 nt, artificial
  Chemically synthesized
cucaguauugccucaaaugcu

SEQ ID NO: 26269 - RNA, 21 nt, artificial
  Chemically synthesized
ucaccuuggagcacugacugu

SEQ ID NO: 26270 - RNA, 21 nt, artificial
  Chemically synthesized
ucugcaaacagcugguggaga

SEQ ID NO: 26271 - RNA, 21 nt, artificial
  Chemically synthesized
uaacuguuuucuugagcaaca

SEQ ID NO: 26272 - RNA, 21 nt, artificial
  Chemically synthesized
uaccaagaacuacagauucgu

SEQ ID NO: 26273 - RNA, 21 nt, artificial
  Chemically synthesized
aacacucgccugaacuuccuu

SEQ ID NO: 26274 - RNA, 21 nt, artificial
  Chemically synthesized
aaugagaggacaagucgacua

SEQ ID NO: 26275 - RNA, 21 nt, artificial
  Chemically synthesized
ugaugcagcacuguagcccau

SEQ ID NO: 26276 - RNA, 21 nt, artificial
  Chemically synthesized
cuccaaggacugaauuuugcc

SEQ ID NO: 26277 - RNA, 21 nt, artificial
  Chemically synthesized
cccauacccuuugaucauaug

SEQ ID NO: 26278 - RNA, 21 nt, artificial
  Chemically synthesized
cuuacccucucagagcuccaa

SEQ ID NO: 26279 - RNA, 21 nt, artificial
  Chemically synthesized
gagaggacaagucgacuacag

SEQ ID NO: 26280 - RNA, 21 nt, artificial
  Chemically synthesized
ucauaugauguacgaacaucu

SEQ ID NO: 26281 - RNA, 21 nt, artificial
  Chemically synthesized
aagcgaaucagugaacugcgu

SEQ ID NO: 26282 - RNA, 21 nt, artificial
  Chemically synthesized
gugcagaggaucaucuaugag

SEQ ID NO: 26283 - RNA, 21 nt, artificial
  Chemically synthesized
acuucagcagcagaaggaacu

SEQ ID NO: 26284 - RNA, 21 nt, artificial
  Chemically synthesized
aggaaaacugaauggguucca

SEQ ID NO: 26285 - RNA, 21 nt, artificial
  Chemically synthesized
gccgauguggacaauggaaac

SEQ ID NO: 26286 - RNA, 21 nt, artificial
  Chemically synthesized
cauaugauguacgaacaucuu

SEQ ID NO: 26287 - RNA, 21 nt, artificial
  Chemically synthesized
ugcaauuuuaaggguugauca

SEQ ID NO: 26288 - RNA, 21 nt, artificial
  Chemically synthesized
agcgacauugaaacugcugca

SEQ ID NO: 26289 - RNA, 21 nt, artificial
  Chemically synthesized
aaauguaccuggagaaaaacg

SEQ ID NO: 26290 - RNA, 21 nt, artificial
  Chemically synthesized
aacagauucagcagaggauuu

SEQ ID NO: 26291 - RNA, 21 nt, artificial
  Chemically synthesized
ucauuaaaauacaggcccuua

SEQ ID NO: 26292 - RNA, 21 nt, artificial
  Chemically synthesized
cagacucacugaugcagcacu

SEQ ID NO: 26293 - RNA, 21 nt, artificial
  Chemically synthesized
cauuaagaagucccauaaccc

SEQ ID NO: 26294 - RNA, 21 nt, artificial
  Chemically synthesized
cagaggaucaucuaugaggug

SEQ ID NO: 26295 - RNA, 21 nt, artificial
  Chemically synthesized
gcacugacuguacauagugug

SEQ ID NO: 26296 - RNA, 21 nt, artificial
  Chemically synthesized
cuguuuucuugagcaacaaug

SEQ ID NO: 26297 - RNA, 21 nt, artificial
  Chemically synthesized
uaugauguacgaacaucuuca

SEQ ID NO: 26298 - RNA, 21 nt, artificial
  Chemically synthesized
ccuauaacaccggaaacaacc

SEQ ID NO: 26299 - RNA, 21 nt, artificial
  Chemically synthesized
guugaagcccaggagaacaag

SEQ ID NO: 26300 - RNA, 21 nt, artificial
  Chemically synthesized
acaaaauucaaaacuucagca

SEQ ID NO: 26301 - RNA, 21 nt, artificial
  Chemically synthesized
augccgaugauauuaacuguu

SEQ ID NO: 26302 - RNA, 21 nt, artificial
  Chemically synthesized
acaaugugaauccuacaguuu

SEQ ID NO: 26303 - RNA, 21 nt, artificial
  Chemically synthesized
agaaagagccugagcaggaug

SEQ ID NO: 26304 - RNA, 21 nt, artificial
  Chemically synthesized
ucgagauguuguagaauuuug

SEQ ID NO: 26305 - RNA, 21 nt, artificial
  Chemically synthesized
agaacuacagauucguaacca

SEQ ID NO: 26306 - RNA, 21 nt, artificial
  Chemically synthesized
cuaugugcccaaaaaccugcu

SEQ ID NO: 26307 - RNA, 21 nt, artificial
  Chemically synthesized
ggcuaugugcccaaaaaccug

SEQ ID NO: 26308 - RNA, 21 nt, artificial
  Chemically synthesized
gagaaaaacguacugaaaaug

SEQ ID NO: 26309 - RNA, 21 nt, artificial
  Chemically synthesized
aauuggaagauuuaaagaaag

SEQ ID NO: 26310 - RNA, 21 nt, artificial
  Chemically synthesized
gaagcaggaaguacagacugc

SEQ ID NO: 26311 - RNA, 21 nt, artificial
  Chemically synthesized
ugaacgucccauacccuuuga

SEQ ID NO: 26312 - RNA, 21 nt, artificial
  Chemically synthesized
gaaacugcugcagacaagugu

SEQ ID NO: 26313 - RNA, 21 nt, artificial
  Chemically synthesized
ccuccaaggacugaauuuugc

SEQ ID NO: 26314 - RNA, 21 nt, artificial
  Chemically synthesized
guacgaacaucuucagaaaug

SEQ ID NO: 26315 - RNA, 21 nt, artificial
  Chemically synthesized
acuccauguaccuccagcaag

SEQ ID NO: 26316 - RNA, 21 nt, artificial
  Chemically synthesized
ucagagaaauguaauaaaugu

SEQ ID NO: 26317 - RNA, 21 nt, artificial
  Chemically synthesized
gccucuguauggaaacauguc

SEQ ID NO: 26318 - RNA, 21 nt, artificial
  Chemically synthesized
acgugaaugcugcugauagug

SEQ ID NO: 26319 - RNA, 21 nt, artificial
  Chemically synthesized
aaggagccucuguauggaaac

SEQ ID NO: 26320 - RNA, 21 nt, artificial
  Chemically synthesized
gucaacgugaaugcugcugau

SEQ ID NO: 26321 - RNA, 21 nt, artificial
  Chemically synthesized
gaaaaaaauucagcugaaccg

SEQ ID NO: 26322 - RNA, 21 nt, artificial
  Chemically synthesized
gugugaauuguacguacaggc

SEQ ID NO: 26323 - RNA, 21 nt, artificial
  Chemically synthesized
uuuacauuuucuaaagcaaca

SEQ ID NO: 26324 - RNA, 21 nt, artificial
  Chemically synthesized
accggaaacaaccugucgaga

SEQ ID NO: 26325 - RNA, 21 nt, artificial
  Chemically synthesized
auuaacuguuuucuugagcaa

SEQ ID NO: 26326 - RNA, 21 nt, artificial
  Chemically synthesized
ugggagagccucagcauauac

SEQ ID NO: 26327 - RNA, 21 nt, artificial
  Chemically synthesized
aagcagcugccuccaagcuau

SEQ ID NO: 26328 - RNA, 21 nt, artificial
  Chemically synthesized
caccaaaggagccucuguaug

SEQ ID NO: 26329 - RNA, 21 nt, artificial
  Chemically synthesized
aaaaagacuguaccaagaacu

SEQ ID NO: 26330 - RNA, 21 nt, artificial
  Chemically synthesized
gcaucgagauugguaaagugc

SEQ ID NO: 26331 - RNA, 21 nt, artificial
  Chemically synthesized
aaaaugaaaagcuucagaaau

SEQ ID NO: 26332 - RNA, 21 nt, artificial
  Chemically synthesized
cuaugagguggaagaucccag

SEQ ID NO: 26333 - RNA, 21 nt, artificial
  Chemically synthesized
aaaaguauuuuuugacuagac

SEQ ID NO: 26334 - RNA, 21 nt, artificial
  Chemically synthesized
ccgaugauauuaacuguuuuc

SEQ ID NO: 26335 - RNA, 21 nt, artificial
  Chemically synthesized
agcgaaucagugaacugcgug

SEQ ID NO: 26336 - RNA, 21 nt, artificial
  Chemically synthesized
cccguuuuaccuucggguuca

SEQ ID NO: 26337 - RNA, 21 nt, artificial
  Chemically synthesized
ugauggacaagcgaaucagug

SEQ ID NO: 26338 - RNA, 21 nt, artificial
  Chemically synthesized
cacaaugugaauccuacaguu

SEQ ID NO: 26339 - RNA, 21 nt, artificial
  Chemically synthesized
gaacaagcugaagaaaauucg

SEQ ID NO: 26340 - RNA, 21 nt, artificial
  Chemically synthesized
aauguaauaaauguaccugga

SEQ ID NO: 26341 - RNA, 21 nt, artificial
  Chemically synthesized
aaagcgagacugagugguggu

SEQ ID NO: 26342 - RNA, 21 nt, artificial
  Chemically synthesized
accuaaaggcugauugugcag

SEQ ID NO: 26343 - RNA, 21 nt, artificial
  Chemically synthesized
acagaagcucuuacugacuug

SEQ ID NO: 26344 - RNA, 21 nt, artificial
  Chemically synthesized
ucuuaauggugcucacuuuag

SEQ ID NO: 26345 - RNA, 21 nt, artificial
  Chemically synthesized
caugauggacaagcgaaucag

SEQ ID NO: 26346 - RNA, 21 nt, artificial
  Chemically synthesized
aacugagaacagugaacaagg

SEQ ID NO: 26347 - RNA, 21 nt, artificial
  Chemically synthesized
ugugaauccuacaguuuccag

SEQ ID NO: 26348 - RNA, 21 nt, artificial
  Chemically synthesized
gcucuauuuuucauguaugag

SEQ ID NO: 26349 - RNA, 21 nt, artificial
  Chemically synthesized
gaacuuacccucucagagcuc

SEQ ID NO: 26350 - RNA, 21 nt, artificial
  Chemically synthesized
acaccaccuaagaauuaccag

SEQ ID NO: 26351 - RNA, 21 nt, artificial
  Chemically synthesized
gugaacgucucuaugggaaaa

SEQ ID NO: 26352 - RNA, 21 nt, artificial
  Chemically synthesized
acugcgcugccucuuguaaca

SEQ ID NO: 26353 - RNA, 21 nt, artificial
  Chemically synthesized
cggaaacaaccugucgagaug

SEQ ID NO: 26354 - RNA, 21 nt, artificial
  Chemically synthesized
aacugaauggguuccagucuu

SEQ ID NO: 26355 - RNA, 21 nt, artificial
  Chemically synthesized
caagcgaaucagugaacugcg

SEQ ID NO: 26356 - RNA, 21 nt, artificial
  Chemically synthesized
ccuuauauccagguucccagu

SEQ ID NO: 26357 - RNA, 21 nt, artificial
  Chemically synthesized
agacuguaccaagaacuacag

SEQ ID NO: 26358 - RNA, 21 nt, artificial
  Chemically synthesized
agcaacaaugaacagauuuua

SEQ ID NO: 26359 - RNA, 21 nt, artificial
  Chemically synthesized
agcaguguaugguaagcccgu

SEQ ID NO: 26360 - RNA, 21 nt, artificial
  Chemically synthesized
agaacaagcugaagaaaauuc

SEQ ID NO: 26361 - RNA, 21 nt, artificial
  Chemically synthesized
uuguacguacaggcuuuuuau

SEQ ID NO: 26362 - RNA, 21 nt, artificial
  Chemically synthesized
auugugcuguuuuccaggaaa

SEQ ID NO: 26363 - RNA, 21 nt, artificial
  Chemically synthesized
gaaaaagcgcagcuccaucac

SEQ ID NO: 26364 - RNA, 21 nt, artificial
  Chemically synthesized
ccgucagcagcagucuauuuc

SEQ ID NO: 26365 - RNA, 21 nt, artificial
  Chemically synthesized
uacccacuuucaaaacaccca

SEQ ID NO: 26366 - RNA, 21 nt, artificial
  Chemically synthesized
uaaauacccacuuucaaaaca

SEQ ID NO: 26367 - RNA, 21 nt, artificial
  Chemically synthesized
ccauuaagaagucccauaacc

SEQ ID NO: 26368 - RNA, 21 nt, artificial
  Chemically synthesized
acccaagagcaacgaacucag

SEQ ID NO: 26369 - RNA, 21 nt, artificial
  Chemically synthesized
gcuuccuguuccaguucaccu

SEQ ID NO: 26370 - RNA, 21 nt, artificial
  Chemically synthesized
uggaggaaggcuacauccagu

SEQ ID NO: 26371 - RNA, 21 nt, artificial
  Chemically synthesized
aaagaacgaguugaagcccag

SEQ ID NO: 26372 - RNA, 21 nt, artificial
  Chemically synthesized
aaaaauucagcugaaccgugu

SEQ ID NO: 26373 - RNA, 21 nt, artificial
  Chemically synthesized
cugcuggauuuuggugucaac

SEQ ID NO: 26374 - RNA, 21 nt, artificial
  Chemically synthesized
aagaccaagugacaacuggga

SEQ ID NO: 26375 - RNA, 21 nt, artificial
  Chemically synthesized
aagcugaagaaaauucgugca

SEQ ID NO: 26376 - RNA, 21 nt, artificial
  Chemically synthesized
cuacagauucguaaccaacuu

SEQ ID NO: 26377 - RNA, 21 nt, artificial
  Chemically synthesized
uuucuccaguuugcccauuaa

SEQ ID NO: 26378 - RNA, 21 nt, artificial
  Chemically synthesized
cccaacugagaacagugaaca

SEQ ID NO: 26379 - RNA, 21 nt, artificial
  Chemically synthesized
ccaacauuaaaacagaauucu

SEQ ID NO: 26380 - RNA, 21 nt, artificial
  Chemically synthesized
cuucggguucaaccucuccau

SEQ ID NO: 26381 - RNA, 21 nt, artificial
  Chemically synthesized
cuauuuuucauguaugagucg

SEQ ID NO: 26382 - RNA, 21 nt, artificial
  Chemically synthesized
gaaaugaacgucccauacccu

SEQ ID NO: 26383 - RNA, 21 nt, artificial
  Chemically synthesized
ugaauucaaguuccauauacu

SEQ ID NO: 26384 - RNA, 21 nt, artificial
  Chemically synthesized
acugagaacagugaacaaggu

SEQ ID NO: 26385 - RNA, 21 nt, artificial
  Chemically synthesized
ccauucaaagcuacccgaacu

SEQ ID NO: 26386 - RNA, 21 nt, artificial
  Chemically synthesized
uggaaaggaggaaggaaggca

SEQ ID NO: 26387 - RNA, 21 nt, artificial
  Chemically synthesized
ggugaagaaaagugaacgccc

SEQ ID NO: 26388 - RNA, 21 nt, artificial
  Chemically synthesized
cugaagaaaauucgugcaaug

SEQ ID NO: 26389 - RNA, 21 nt, artificial
  Chemically synthesized
auuuuaacagaaguuccuaua

SEQ ID NO: 26390 - RNA, 21 nt, artificial
  Chemically synthesized
cucuaugggaaaaaaauucag

SEQ ID NO: 26391 - RNA, 21 nt, artificial
  Chemically synthesized
caucgagauugguaaagugcc

SEQ ID NO: 26392 - RNA, 21 nt, artificial
  Chemically synthesized
cagcguccacaaugugaaucc

SEQ ID NO: 26393 - RNA, 21 nt, artificial
  Chemically synthesized
uacaggcccuuaggcucuauu

SEQ ID NO: 26394 - RNA, 21 nt, artificial
  Chemically synthesized
ccuuaggcucuauuuuucaug

SEQ ID NO: 26395 - RNA, 21 nt, artificial
  Chemically synthesized
caucaccaaaggagccucugu

SEQ ID NO: 26396 - RNA, 21 nt, artificial
  Chemically synthesized
cagaauucuagcucuuccgug

SEQ ID NO: 26397 - RNA, 21 nt, artificial
  Chemically synthesized
uuccuguuccaguucaccuaa

SEQ ID NO: 26398 - RNA, 21 nt, artificial
  Chemically synthesized
uaagucaguuaaagcagugua

SEQ ID NO: 26399 - RNA, 21 nt, artificial
  Chemically synthesized
caacugagaacagugaacaag

SEQ ID NO: 26400 - RNA, 21 nt, artificial
  Chemically synthesized
auucagcagaggauuuccgua

SEQ ID NO: 26401 - RNA, 21 nt, artificial
  Chemically synthesized
uggacaagcgaaucagugaac

SEQ ID NO: 26402 - RNA, 21 nt, artificial
  Chemically synthesized
agccucagcauauacucuucu

SEQ ID NO: 26403 - RNA, 21 nt, artificial
  Chemically synthesized
gccuuauauccagguucccag

SEQ ID NO: 26404 - RNA, 21 nt, artificial
  Chemically synthesized
agaaggaacucuuaaauaagc

SEQ ID NO: 26405 - RNA, 21 nt, artificial
  Chemically synthesized
agaacagugacgagcuguccu

SEQ ID NO: 26406 - RNA, 21 nt, artificial
  Chemically synthesized
cucaaauucaguucccugaau

SEQ ID NO: 26407 - RNA, 21 nt, artificial
  Chemically synthesized
cucauuaaaauacaggcccuu

SEQ ID NO: 26408 - RNA, 21 nt, artificial
  Chemically synthesized
agcaacgaacucagagaaaug

SEQ ID NO: 26409 - RNA, 21 nt, artificial
  Chemically synthesized
aagaaaagugaacgcccuugu

SEQ ID NO: 26410 - RNA, 21 nt, artificial
  Chemically synthesized
acuagaccauucaaagcuacc

SEQ ID NO: 26411 - RNA, 21 nt, artificial
  Chemically synthesized
aaaggaaaacugaauggguuc

SEQ ID NO: 26412 - RNA, 21 nt, artificial
  Chemically synthesized
gaagaagugaaauuuuuccuu

SEQ ID NO: 26413 - RNA, 21 nt, artificial
  Chemically synthesized
acaggcccuuaggcucuauuu

SEQ ID NO: 26414 - RNA, 21 nt, artificial
  Chemically synthesized
caaaugcugcucauggaagau

SEQ ID NO: 26415 - RNA, 21 nt, artificial
  Chemically synthesized
acccucucagagcuccaagau

SEQ ID NO: 26416 - RNA, 21 nt, artificial
  Chemically synthesized
ggcaucgagauugguaaagug

SEQ ID NO: 26417 - RNA, 21 nt, artificial
  Chemically synthesized
uuaaagaaaggaaaacugaau

SEQ ID NO: 26418 - RNA, 21 nt, artificial
  Chemically synthesized
ucugucugcugaaauagaaag

SEQ ID NO: 26419 - RNA, 21 nt, artificial
  Chemically synthesized
cugaaauagaaagguucagug

SEQ ID NO: 26420 - RNA, 21 nt, artificial
  Chemically synthesized
acucuuaaauaagcgcaacau

SEQ ID NO: 26421 - RNA, 21 nt, artificial
  Chemically synthesized
uuuaacugacuuauuuaaggc

SEQ ID NO: 26422 - RNA, 21 nt, artificial
  Chemically synthesized
uucauuuucagaaauagacug

SEQ ID NO: 26423 - RNA, 21 nt, artificial
  Chemically synthesized
uacauuuauuacauuucucug

SEQ ID NO: 26424 - RNA, 21 nt, artificial
  Chemically synthesized
ugaaguuuugaauuuuguucc

SEQ ID NO: 26425 - RNA, 21 nt, artificial
  Chemically synthesized
uuucauuuucagaaauagacu

SEQ ID NO: 26426 - RNA, 21 nt, artificial
  Chemically synthesized
uuaaaaucuguucauuguugc

SEQ ID NO: 26427 - RNA, 21 nt, artificial
  Chemically synthesized
uuugaauuuuguuccugguua

SEQ ID NO: 26428 - RNA, 21 nt, artificial
  Chemically synthesized
uuuuccuuucuuuaaaucuuc

SEQ ID NO: 26429 - RNA, 21 nt, artificial
  Chemically synthesized
uacuuuugguauauaaaaagc

SEQ ID NO: 26430 - RNA, 21 nt, artificial
  Chemically synthesized
uuuccuuucuuuaaaucuucc

SEQ ID NO: 26431 - RNA, 21 nt, artificial
  Chemically synthesized
uugcuuuagaaaauguaaacg

SEQ ID NO: 26432 - RNA, 21 nt, artificial
  Chemically synthesized
uuuugguauauaaaaagccug

SEQ ID NO: 26433 - RNA, 21 nt, artificial
  Chemically synthesized
uugaaaguggguauuuauuug

SEQ ID NO: 26434 - RNA, 21 nt, artificial
  Chemically synthesized
uuaaaauugcagucuguacuu

SEQ ID NO: 26435 - RNA, 21 nt, artificial
  Chemically synthesized
auuuggauuuauaguaauugg

SEQ ID NO: 26436 - RNA, 21 nt, artificial
  Chemically synthesized
uuuauuacauuucucugaguu

SEQ ID NO: 26437 - RNA, 21 nt, artificial
  Chemically synthesized
ucaagaaaacaguuaauauca

SEQ ID NO: 26438 - RNA, 21 nt, artificial
  Chemically synthesized
uuugguauauaaaaagccugu

SEQ ID NO: 26439 - RNA, 21 nt, artificial
  Chemically synthesized
uucaauuucugaagcuuuuca

SEQ ID NO: 26440 - RNA, 21 nt, artificial
  Chemically synthesized
uucuuuaaaucuuccaauugc

SEQ ID NO: 26441 - RNA, 21 nt, artificial
  Chemically synthesized
uugcaaaauucuacaacaucu

SEQ ID NO: 26442 - RNA, 21 nt, artificial
  Chemically synthesized
uagaauucuguuuuaauguug

SEQ ID NO: 26443 - RNA, 21 nt, artificial
  Chemically synthesized
uucuugguacagucuuuuuaa

SEQ ID NO: 26444 - RNA, 21 nt, artificial
  Chemically synthesized
uuugaaaguggguauuuauuu

SEQ ID NO: 26445 - RNA, 21 nt, artificial
  Chemically synthesized
uuuaaaucuuccaauugcuga

SEQ ID NO: 26446 - RNA, 21 nt, artificial
  Chemically synthesized
ucuguuaaaaucuguucauug

SEQ ID NO: 26447 - RNA, 21 nt, artificial
  Chemically synthesized
uuucugaagcuuuucauuuuc

SEQ ID NO: 26448 - RNA, 21 nt, artificial
  Chemically synthesized
uuuucauuuucagaaauagac

SEQ ID NO: 26449 - RNA, 21 nt, artificial
  Chemically synthesized
uuuugaauuuuguuccugguu

SEQ ID NO: 26450 - RNA, 21 nt, artificial
  Chemically synthesized
uaagaguuccuucugcugcug

SEQ ID NO: 26451 - RNA, 21 nt, artificial
  Chemically synthesized
aagagcuucugucuucacugg

SEQ ID NO: 26452 - RNA, 21 nt, artificial
  Chemically synthesized
aucauuagcggauuuggaucu

SEQ ID NO: 26453 - RNA, 21 nt, artificial
  Chemically synthesized
uucuguuaaaaucuguucauu

SEQ ID NO: 26454 - RNA, 21 nt, artificial
  Chemically synthesized
ugucagugggaguucaggcuu

SEQ ID NO: 26455 - RNA, 21 nt, artificial
  Chemically synthesized
uuuagaaaauguaaacgcugu

SEQ ID NO: 26456 - RNA, 21 nt, artificial
  Chemically synthesized
uggucuagucaaaaaauacuu

SEQ ID NO: 26457 - RNA, 21 nt, artificial
  Chemically synthesized
cuaucagcagcauucacguug

SEQ ID NO: 26458 - RNA, 21 nt, artificial
  Chemically synthesized
uacaauucacaccucagugaa

SEQ ID NO: 26459 - RNA, 21 nt, artificial
  Chemically synthesized
uuuugaaaguggguauuuauu

SEQ ID NO: 26460 - RNA, 21 nt, artificial
  Chemically synthesized
uuucaauuucugaagcuuuuc

SEQ ID NO: 26461 - RNA, 21 nt, artificial
  Chemically synthesized
aaguugguccgcuuguucgug

SEQ ID NO: 26462 - RNA, 21 nt, artificial
  Chemically synthesized
uuucuuuaaaucuuccaauug

SEQ ID NO: 26463 - RNA, 21 nt, artificial
  Chemically synthesized
ucuucagcuuguucuccuggg

SEQ ID NO: 26464 - RNA, 21 nt, artificial
  Chemically synthesized
uguaguucuugguacagucuu

SEQ ID NO: 26465 - RNA, 21 nt, artificial
  Chemically synthesized
uucaguuuuccuuucuuuaaa

SEQ ID NO: 26466 - RNA, 21 nt, artificial
  Chemically synthesized
ugguauauaaaaagccuguac

SEQ ID NO: 26467 - RNA, 21 nt, artificial
  Chemically synthesized
uucugaagcuuuucauuuuca

SEQ ID NO: 26468 - RNA, 21 nt, artificial
  Chemically synthesized
guuaaaaucuguucauuguug

SEQ ID NO: 26469 - RNA, 21 nt, artificial
  Chemically synthesized
auuucucugaguucguugcuc

SEQ ID NO: 26470 - RNA, 21 nt, artificial
  Chemically synthesized
uucaaugucgcuuaugguuga

SEQ ID NO: 26471 - RNA, 21 nt, artificial
  Chemically synthesized
aacauaguucggguagcuuug

SEQ ID NO: 26472 - RNA, 21 nt, artificial
  Chemically synthesized
ucaauuucugaagcuuuucau

SEQ ID NO: 26473 - RNA, 21 nt, artificial
  Chemically synthesized
auuuaagaguuccuucugcug

SEQ ID NO: 26474 - RNA, 21 nt, artificial
  Chemically synthesized
ugaguucguugcucuuggguc

SEQ ID NO: 26475 - RNA, 21 nt, artificial
  Chemically synthesized
uguaagacuggaacccauuca

SEQ ID NO: 26476 - RNA, 21 nt, artificial
  Chemically synthesized
ugcuucuuuuccuggaacaug

SEQ ID NO: 26477 - RNA, 21 nt, artificial
  Chemically synthesized
ucugugauggagcugcgcuuu

SEQ ID NO: 26478 - RNA, 21 nt, artificial
  Chemically synthesized
aagucaguaagagcuucuguc

SEQ ID NO: 26479 - RNA, 21 nt, artificial
  Chemically synthesized
uuguugcucaagaaaacaguu

SEQ ID NO: 26480 - RNA, 21 nt, artificial
  Chemically synthesized
cuuaugguugaggcaaaaaug

SEQ ID NO: 26481 - RNA, 21 nt, artificial
  Chemically synthesized
aucagccuuuaggugaacugg

SEQ ID NO: 26482 - RNA, 21 nt, artificial
  Chemically synthesized
aacuucacgaugugauggugg

SEQ ID NO: 26483 - RNA, 21 nt, artificial
  Chemically synthesized
uuugaggcaauacugagagac

SEQ ID NO: 26484 - RNA, 21 nt, artificial
  Chemically synthesized
ugcacaaucagccuuuaggug

SEQ ID NO: 26485 - RNA, 21 nt, artificial
  Chemically synthesized
auucacaccucagugaagcgc

SEQ ID NO: 26486 - RNA, 21 nt, artificial
  Chemically synthesized
uuuuucuccagguacauuuau

SEQ ID NO: 26487 - RNA, 21 nt, artificial
  Chemically synthesized
agcagcauucacguugacacc

SEQ ID NO: 26488 - RNA, 21 nt, artificial
  Chemically synthesized
cuuuugguauauaaaaagccu

SEQ ID NO: 26489 - RNA, 21 nt, artificial
  Chemically synthesized
agcaacacuggacauguuucc

SEQ ID NO: 26490 - RNA, 21 nt, artificial
  Chemically synthesized
uccaaaaggaaguucaggcga

SEQ ID NO: 26491 - RNA, 21 nt, artificial
  Chemically synthesized
uagcuuugaauggucuaguca

SEQ ID NO: 26492 - RNA, 21 nt, artificial
  Chemically synthesized
ucuagucaaaaaauacuuuug

SEQ ID NO: 26493 - RNA, 21 nt, artificial
  Chemically synthesized
uucaacucguucuuucaauuu

SEQ ID NO: 26494 - RNA, 21 nt, artificial
  Chemically synthesized
uagucaaaaaauacuuuuggu

SEQ ID NO: 26495 - RNA, 21 nt, artificial
  Chemically synthesized
uguaggauucacauuguggac

SEQ ID NO: 26496 - RNA, 21 nt, artificial
  Chemically synthesized
uauauggaacuugaauucacu

SEQ ID NO: 26497 - RNA, 21 nt, artificial
  Chemically synthesized
uugaauuuuguuccugguuaa

SEQ ID NO: 26498 - RNA, 21 nt, artificial
  Chemically synthesized
acuuuugguauauaaaaagcc

SEQ ID NO: 26499 - RNA, 21 nt, artificial
  Chemically synthesized
uuuucuccagguacauuuauu

SEQ ID NO: 26500 - RNA, 21 nt, artificial
  Chemically synthesized
uagaugauccucugcaccaga

SEQ ID NO: 26501 - RNA, 21 nt, artificial
  Chemically synthesized
cauuuauuacauuucucugag

SEQ ID NO: 26502 - RNA, 21 nt, artificial
  Chemically synthesized
ugaagggaagaaggaucaugu

SEQ ID NO: 26503 - RNA, 21 nt, artificial
  Chemically synthesized
uccuuuggugaugaagggaag

SEQ ID NO: 26504 - RNA, 21 nt, artificial
  Chemically synthesized
aaaaauagagccuaagggccu

SEQ ID NO: 26505 - RNA, 21 nt, artificial
  Chemically synthesized
cugaaguuuugaauuuuguuc

SEQ ID NO: 26506 - RNA, 21 nt, artificial
  Chemically synthesized
aacaucucgacagguuguuuc

SEQ ID NO: 26507 - RNA, 21 nt, artificial
  Chemically synthesized
auucacauuguggacgcuguc

SEQ ID NO: 26508 - RNA, 21 nt, artificial
  Chemically synthesized
uccugcuucuuuuccuggaac

SEQ ID NO: 26509 - RNA, 21 nt, artificial
  Chemically synthesized
auccucugcaccagaucgaac

SEQ ID NO: 26510 - RNA, 21 nt, artificial
  Chemically synthesized
cguacaauucacaccucagug

SEQ ID NO: 26511 - RNA, 21 nt, artificial
  Chemically synthesized
uuguuccugguuaaguugguu

SEQ ID NO: 26512 - RNA, 21 nt, artificial
  Chemically synthesized
ugguguuuccauuguccacau

SEQ ID NO: 26513 - RNA, 21 nt, artificial
  Chemically synthesized
ucuuuaaaucuuccaauugcu

SEQ ID NO: 26514 - RNA, 21 nt, artificial
  Chemically synthesized
uugaauggucuagucaaaaaa

SEQ ID NO: 26515 - RNA, 21 nt, artificial
  Chemically synthesized
ucaugauuuugcuguagucga

SEQ ID NO: 26516 - RNA, 21 nt, artificial
  Chemically synthesized
ugauuuugcuguagucgacuu

SEQ ID NO: 26517 - RNA, 21 nt, artificial
  Chemically synthesized
aauuuuguuccugguuaaguu

SEQ ID NO: 26518 - RNA, 21 nt, artificial
  Chemically synthesized
aauuucugaagcuuuucauuu

SEQ ID NO: 26519 - RNA, 21 nt, artificial
  Chemically synthesized
auagaaacugggagcacugga

SEQ ID NO: 26520 - RNA, 21 nt, artificial
  Chemically synthesized
auaggaacuucuguuaaaauc

SEQ ID NO: 26521 - RNA, 21 nt, artificial
  Chemically synthesized
guuuauugugcacauuuacac

SEQ ID NO: 26522 - RNA, 21 nt, artificial
  Chemically synthesized
aaguucaggcgaguguucgcu

SEQ ID NO: 26523 - RNA, 21 nt, artificial
  Chemically synthesized
uguucuccugggcuucaacuc

SEQ ID NO: 26524 - RNA, 21 nt, artificial
  Chemically synthesized
uaucagcagcauucacguuga

SEQ ID NO: 26525 - RNA, 21 nt, artificial
  Chemically synthesized
agucaguaagagcuucugucu

SEQ ID NO: 26526 - RNA, 21 nt, artificial
  Chemically synthesized
aaauccagcaggaacuucacg

SEQ ID NO: 26527 - RNA, 21 nt, artificial
  Chemically synthesized
aucuguaguucuugguacagu

SEQ ID NO: 26528 - RNA, 21 nt, artificial
  Chemically synthesized
agaaaacaguuaauaucaucg

SEQ ID NO: 26529 - RNA, 21 nt, artificial
  Chemically synthesized
uacaacaucucgacagguugu

SEQ ID NO: 26530 - RNA, 21 nt, artificial
  Chemically synthesized
ucuuucaauuucugaagcuuu

SEQ ID NO: 26531 - RNA, 21 nt, artificial
  Chemically synthesized
cauaucuuggagcucugagag

SEQ ID NO: 26532 - RNA, 21 nt, artificial
  Chemically synthesized
gcaaaauucuacaacaucucg

SEQ ID NO: 26533 - RNA, 21 nt, artificial
  Chemically synthesized
aagaaaacaguuaauaucauc

SEQ ID NO: 26534 - RNA, 21 nt, artificial
  Chemically synthesized
uagcggauuuggaucuuccau

SEQ ID NO: 26535 - RNA, 21 nt, artificial
  Chemically synthesized
agcuagaauucuguuuuaaug

SEQ ID NO: 26536 - RNA, 21 nt, artificial
  Chemically synthesized
acugaauuugagcuugcaggg

SEQ ID NO: 26537 - RNA, 21 nt, artificial
  Chemically synthesized
aacuucuguuaaaaucuguuc

SEQ ID NO: 26538 - RNA, 21 nt, artificial
  Chemically synthesized
auaucuuggagcucugagagg

SEQ ID NO: 26539 - RNA, 21 nt, artificial
  Chemically synthesized
auaugcugaggcucucccagu

SEQ ID NO: 26540 - RNA, 21 nt, artificial
  Chemically synthesized
uccaucauuagcggauuugga

SEQ ID NO: 26541 - RNA, 21 nt, artificial
  Chemically synthesized
cucaguacuuucugaaggugg

SEQ ID NO: 26542 - RNA, 21 nt, artificial
  Chemically synthesized
ugauggagcugcgcuuuuuca

SEQ ID NO: 26543 - RNA, 21 nt, artificial
  Chemically synthesized
ugcucuacaagggcguucacu

SEQ ID NO: 26544 - RNA, 21 nt, artificial
  Chemically synthesized
uguuauaggaacuucuguuaa

SEQ ID NO: 26545 - RNA, 21 nt, artificial
  Chemically synthesized
uuauuacauuucucugaguuc

SEQ ID NO: 26546 - RNA, 21 nt, artificial
  Chemically synthesized
guaggauucacauuguggacg

SEQ ID NO: 26547 - RNA, 21 nt, artificial
  Chemically synthesized
uauauaaaaagccuguacgua

SEQ ID NO: 26548 - RNA, 21 nt, artificial
  Chemically synthesized
augaguguccgauucggugac

SEQ ID NO: 26549 - RNA, 21 nt, artificial
  Chemically synthesized
aaguuuugaauuuuguuccug

SEQ ID NO: 26550 - RNA, 21 nt, artificial
  Chemically synthesized
uaugucccauagcuuggaggc

SEQ ID NO: 26551 - RNA, 21 nt, artificial
  Chemically synthesized
gugagaaaggaugaguguccg

SEQ ID NO: 26552 - RNA, 21 nt, artificial
  Chemically synthesized
ugcagucuguacuuccugcuu

SEQ ID NO: 26553 - RNA, 21 nt, artificial
  Chemically synthesized
ugaacuggaacaggaagcgga

SEQ ID NO: 26554 - RNA, 21 nt, artificial
  Chemically synthesized
uccauccaucacuaucagcag

SEQ ID NO: 26555 - RNA, 21 nt, artificial
  Chemically synthesized
uucacuucuucccuccgugga

SEQ ID NO: 26556 - RNA, 21 nt, artificial
  Chemically synthesized
uggaaacuguaggauucacau

SEQ ID NO: 26557 - RNA, 21 nt, artificial
  Chemically synthesized
ucauuagcggauuuggaucuu

SEQ ID NO: 26558 - RNA, 21 nt, artificial
  Chemically synthesized
aacacuggacauguuuccaua

SEQ ID NO: 26559 - RNA, 21 nt, artificial
  Chemically synthesized
uccaacauaguucggguagcu

SEQ ID NO: 26560 - RNA, 21 nt, artificial
  Chemically synthesized
acuggaacccauucaguuuuc

SEQ ID NO: 26561 - RNA, 21 nt, artificial
  Chemically synthesized
uguuccugguuaaguugguua

SEQ ID NO: 26562 - RNA, 21 nt, artificial
  Chemically synthesized
uuccuuucuuuaaaucuucca

SEQ ID NO: 26563 - RNA, 21 nt, artificial
  Chemically synthesized
ucuacaacaucucgacagguu

SEQ ID NO: 26564 - RNA, 21 nt, artificial
  Chemically synthesized
cuagucaaaaaauacuuuugg

SEQ ID NO: 26565 - RNA, 21 nt, artificial
  Chemically synthesized
guucagcugaauuuuuuuccc

SEQ ID NO: 26566 - RNA, 21 nt, artificial
  Chemically synthesized
agguacauuuauuacauuucu

SEQ ID NO: 26567 - RNA, 21 nt, artificial
  Chemically synthesized
auccugcucaggcucuuucuc

SEQ ID NO: 26568 - RNA, 21 nt, artificial
  Chemically synthesized
guuaauaucaucggcaucauc

SEQ ID NO: 26569 - RNA, 21 nt, artificial
  Chemically synthesized
uggacauguuuccauacagag

SEQ ID NO: 26570 - RNA, 21 nt, artificial
  Chemically synthesized
uucaguccuuggaggcgaaag

SEQ ID NO: 26571 - RNA, 21 nt, artificial
  Chemically synthesized
ucccauagagacguucacgca

SEQ ID NO: 26572 - RNA, 21 nt, artificial
  Chemically synthesized
uuugaauggucuagucaaaaa

SEQ ID NO: 26573 - RNA, 21 nt, artificial
  Chemically synthesized
agguuguuuccgguguuauag

SEQ ID NO: 26574 - RNA, 21 nt, artificial
  Chemically synthesized
ugguaauucuuagguggugug

SEQ ID NO: 26575 - RNA, 21 nt, artificial
  Chemically synthesized
caucauuagcggauuuggauc

SEQ ID NO: 26576 - RNA, 21 nt, artificial
  Chemically synthesized
uguucguacaucauaugauca

SEQ ID NO: 26577 - RNA, 21 nt, artificial
  Chemically synthesized
uccaucacuaucagcagcauu

SEQ ID NO: 26578 - RNA, 21 nt, artificial
  Chemically synthesized
uccugggcuucaacucguucu

SEQ ID NO: 26579 - RNA, 21 nt, artificial
  Chemically synthesized
ucugaagcuuuucauuuucag

SEQ ID NO: 26580 - RNA, 21 nt, artificial
  Chemically synthesized
ucugaagauguucguacauca

SEQ ID NO: 26581 - RNA, 21 nt, artificial
  Chemically synthesized
uucacacgguucagcugaauu

SEQ ID NO: 26582 - RNA, 21 nt, artificial
  Chemically synthesized
aaaauucuacaacaucucgac

SEQ ID NO: 26583 - RNA, 21 nt, artificial
  Chemically synthesized
uccgguguuauaggaacuucu

SEQ ID NO: 26584 - RNA, 21 nt, artificial
  Chemically synthesized
uucugcugcugaaguuuugaa

SEQ ID NO: 26585 - RNA, 21 nt, artificial
  Chemically synthesized
ucuuggagcucugagagggua

SEQ ID NO: 26586 - RNA, 21 nt, artificial
  Chemically synthesized
guaagagcuucugucuucacu

SEQ ID NO: 26587 - RNA, 21 nt, artificial
  Chemically synthesized
uucguacaucauaugaucaaa

SEQ ID NO: 26588 - RNA, 21 nt, artificial
  Chemically synthesized
aaggaugaguguccgauucgg

SEQ ID NO: 26589 - RNA, 21 nt, artificial
  Chemically synthesized
aauuucacuucuucccuccgu

SEQ ID NO: 26590 - RNA, 21 nt, artificial
  Chemically synthesized
uguuugcagaggugaacgcug

SEQ ID NO: 26591 - RNA, 21 nt, artificial
  Chemically synthesized
uugguauauaaaaagccugua

SEQ ID NO: 26592 - RNA, 21 nt, artificial
  Chemically synthesized
ugaauggucuagucaaaaaau

SEQ ID NO: 26593 - RNA, 21 nt, artificial
  Chemically synthesized
aucugcugcuguugccuagcu

SEQ ID NO: 26594 - RNA, 21 nt, artificial
  Chemically synthesized
cuuggaggcgaaaguaccucu

SEQ ID NO: 26595 - RNA, 21 nt, artificial
  Chemically synthesized
gcucuuucucaguacuuucug

SEQ ID NO: 26596 - RNA, 21 nt, artificial
  Chemically synthesized
ucagccuuuaggugaacugga

SEQ ID NO: 26597 - RNA, 21 nt, artificial
  Chemically synthesized
aucuguucauuguugcucaag

SEQ ID NO: 26598 - RNA, 21 nt, artificial
  Chemically synthesized
aggaacuucacgaugugaugg

SEQ ID NO: 26599 - RNA, 21 nt, artificial
  Chemically synthesized
ucuucaaguugguccgcuugu

SEQ ID NO: 26600 - RNA, 21 nt, artificial
  Chemically synthesized
ucgaaggaaaaauuucacuuc

SEQ ID NO: 26601 - RNA, 21 nt, artificial
  Chemically synthesized
auagaugauccucugcaccag

SEQ ID NO: 26602 - RNA, 21 nt, artificial
  Chemically synthesized
uucucugaguucguugcucuu

SEQ ID NO: 26603 - RNA, 21 nt, artificial
  Chemically synthesized
ucuuucucaguacuuucugaa

SEQ ID NO: 26604 - RNA, 21 nt, artificial
  Chemically synthesized
ugucgcuuaugguugaggcaa

SEQ ID NO: 26605 - RNA, 21 nt, artificial
  Chemically synthesized
acuucuguuaaaaucuguuca

SEQ ID NO: 26606 - RNA, 21 nt, artificial
  Chemically synthesized
auuguggacgcugucugcuaa

SEQ ID NO: 26607 - RNA, 21 nt, artificial
  Chemically synthesized
ucauuguugcucaagaaaaca

SEQ ID NO: 26608 - RNA, 21 nt, artificial
  Chemically synthesized
caccuuguucacuguucucag

SEQ ID NO: 26609 - RNA, 21 nt, artificial
  Chemically synthesized
acggaaauccucugcugaauc

SEQ ID NO: 26610 - RNA, 21 nt, artificial
  Chemically synthesized
aguaagagcuucugucuucac

SEQ ID NO: 26611 - RNA, 21 nt, artificial
  Chemically synthesized
aucauaugaucaaaggguaug

SEQ ID NO: 26612 - RNA, 21 nt, artificial
  Chemically synthesized
ucugcugcugaaguuuugaau

SEQ ID NO: 26613 - RNA, 21 nt, artificial
  Chemically synthesized
acuguaggauucacauugugg

SEQ ID NO: 26614 - RNA, 21 nt, artificial
  Chemically synthesized
uguuuccauuguccacaucgg

SEQ ID NO: 26615 - RNA, 21 nt, artificial
  Chemically synthesized
cugguuucacggaagagcuag

SEQ ID NO: 26616 - RNA, 21 nt, artificial
  Chemically synthesized
ucucaguacuuucugaaggug

SEQ ID NO: 26617 - RNA, 21 nt, artificial
  Chemically synthesized
gaaacuguaggauucacauug

SEQ ID NO: 26618 - RNA, 21 nt, artificial
  Chemically synthesized
uucacugauucgcuuguccau

SEQ ID NO: 26619 - RNA, 21 nt, artificial
  Chemically synthesized
ucccaguuaaugggcaaacug

SEQ ID NO: 26620 - RNA, 21 nt, artificial
  Chemically synthesized
aaggacagcucgucacuguuc

SEQ ID NO: 26621 - RNA, 21 nt, artificial
  Chemically synthesized
aggaacuucuguuaaaaucug

SEQ ID NO: 26622 - RNA, 21 nt, artificial
  Chemically synthesized
uuccuucugcugcugaaguuu

SEQ ID NO: 26623 - RNA, 21 nt, artificial
  Chemically synthesized
gguucagcugaauuuuuuucc

SEQ ID NO: 26624 - RNA, 21 nt, artificial
  Chemically synthesized
ugaagcuuuucauuuucagaa

SEQ ID NO: 26625 - RNA, 21 nt, artificial
  Chemically synthesized
gacuuguccucucauugcacg

SEQ ID NO: 26626 - RNA, 21 nt, artificial
  Chemically synthesized
aaauagacugcugcugacggc

SEQ ID NO: 26627 - RNA, 21 nt, artificial
  Chemically synthesized
guguuuccauuguccacaucg

SEQ ID NO: 26628 - RNA, 21 nt, artificial
  Chemically synthesized
acagugacccgugaagaaacg

SEQ ID NO: 26629 - RNA, 21 nt, artificial
  Chemically synthesized
guuaaguugguuacgaaucug

SEQ ID NO: 26630 - RNA, 21 nt, artificial
  Chemically synthesized
uaggaacuucuguuaaaaucu

SEQ ID NO: 26631 - RNA, 21 nt, artificial
  Chemically synthesized
ucaguuuuccuuucuuuaaau

SEQ ID NO: 26632 - RNA, 21 nt, artificial
  Chemically synthesized
cuuuagaaaauguaaacgcug

SEQ ID NO: 26633 - RNA, 21 nt, artificial
  Chemically synthesized
aaacaguuaauaucaucggca

SEQ ID NO: 26634 - RNA, 21 nt, artificial
  Chemically synthesized
uguuaaaaucuguucauuguu

SEQ ID NO: 26635 - RNA, 21 nt, artificial
  Chemically synthesized
aaaauagagccuaagggccug

SEQ ID NO: 26636 - RNA, 21 nt, artificial
  Chemically synthesized
uuagcggauuuggaucuucca

SEQ ID NO: 26637 - RNA, 21 nt, artificial
  Chemically synthesized
cuuuaggugaacuggaacagg

SEQ ID NO: 26638 - RNA, 21 nt, artificial
  Chemically synthesized
cuuuucuucaccacacuaugu

SEQ ID NO: 26639 - RNA, 21 nt, artificial
  Chemically synthesized
ugugauggagcugcgcuuuuu

SEQ ID NO: 26640 - RNA, 21 nt, artificial
  Chemically synthesized
aaagugagcaccauuaagacc

SEQ ID NO: 26641 - RNA, 21 nt, artificial
  Chemically synthesized
uugaggcaauacugagagacu

SEQ ID NO: 26642 - RNA, 21 nt, artificial
  Chemically synthesized
aggcucucccaguugucacuu

SEQ ID NO: 26643 - RNA, 21 nt, artificial
  Chemically synthesized
aguucaacacguggauuccca

SEQ ID NO: 26644 - RNA, 21 nt, artificial
  Chemically synthesized
ucaaugucgcuuaugguugag

SEQ ID NO: 26645 - RNA, 21 nt, artificial
  Chemically synthesized
gguauauaaaaagccuguacg

SEQ ID NO: 26646 - RNA, 21 nt, artificial
  Chemically synthesized
auuuauuacauuucucugagu

SEQ ID NO: 26647 - RNA, 21 nt, artificial
  Chemically synthesized
gguuugauccguggauacagc

SEQ ID NO: 26648 - RNA, 21 nt, artificial
  Chemically synthesized
uggaguauauggaacuugaau

SEQ ID NO: 26649 - RNA, 21 nt, artificial
  Chemically synthesized
cuccaaaaggaaguucaggcg

SEQ ID NO: 26650 - RNA, 21 nt, artificial
  Chemically synthesized
auggucuagucaaaaaauacu

SEQ ID NO: 26651 - RNA, 21 nt, artificial
  Chemically synthesized
aaaacagcacaauaaucucuu

SEQ ID NO: 26652 - RNA, 21 nt, artificial
  Chemically synthesized
uuagaaaauguaaacgcuguu

SEQ ID NO: 26653 - RNA, 21 nt, artificial
  Chemically synthesized
aagugagcaccauuaagacca

SEQ ID NO: 26654 - RNA, 21 nt, artificial
  Chemically synthesized
aagaguauaugcugaggcucu

SEQ ID NO: 26655 - RNA, 21 nt, artificial
  Chemically synthesized
uaugcugaggcucucccaguu

SEQ ID NO: 26656 - RNA, 21 nt, artificial
  Chemically synthesized
ugucugcuaaagugagcacca

SEQ ID NO: 26657 - RNA, 21 nt, artificial
  Chemically synthesized
uuccaacauaguucggguagc

SEQ ID NO: 26658 - RNA, 21 nt, artificial
  Chemically synthesized
uuccuuccuccuuuccaggga

SEQ ID NO: 26659 - RNA, 21 nt, artificial
  Chemically synthesized
ucagcuuguucuccugggcuu

SEQ ID NO: 26660 - RNA, 21 nt, artificial
  Chemically synthesized
aacugggagcacuggauguag

SEQ ID NO: 26661 - RNA, 21 nt, artificial
  Chemically synthesized
uacgaaucuguaguucuuggu

SEQ ID NO: 26662 - RNA, 21 nt, artificial
  Chemically synthesized
acagaugagcuccucugguuc

SEQ ID NO: 26663 - RNA, 21 nt, artificial
  Chemically synthesized
cauuugaggcaauacugagag

SEQ ID NO: 26664 - RNA, 21 nt, artificial
  Chemically synthesized
uagagacguucacgcaguuca

SEQ ID NO: 26665 - RNA, 21 nt, artificial
  Chemically synthesized
aucaacccuuaaaauugcagu

SEQ ID NO: 26666 - RNA, 21 nt, artificial
  Chemically synthesized
guagcuuugaauggucuaguc

SEQ ID NO: 26667 - RNA, 21 nt, artificial
  Chemically synthesized
auacacugcuuuaacugacuu

SEQ ID NO: 26668 - RNA, 21 nt, artificial
  Chemically synthesized
guucacgcaguucacugauuc

SEQ ID NO: 26669 - RNA, 21 nt, artificial
  Chemically synthesized
uguuuccgguguuauaggaac

SEQ ID NO: 26670 - RNA, 21 nt, artificial
  Chemically synthesized
aggucugcaucacucugguag

SEQ ID NO: 26671 - RNA, 21 nt, artificial
  Chemically synthesized
cuuuaacugacuuauuuaagg

SEQ ID NO: 26672 - RNA, 21 nt, artificial
  Chemically synthesized
guaagacuggaacccauucag

SEQ ID NO: 26673 - RNA, 21 nt, artificial
  Chemically synthesized
aaggugaugggcuacagugcu

SEQ ID NO: 26674 - RNA, 21 nt, artificial
  Chemically synthesized
uacauggaguauauggaacuu

SEQ ID NO: 26675 - RNA, 21 nt, artificial
  Chemically synthesized
uccaaggugaugggcuacagu

SEQ ID NO: 26676 - RNA, 21 nt, artificial
  Chemically synthesized
guugaacccgaagguaaaacg

SEQ ID NO: 26677 - RNA, 21 nt, artificial
  Chemically synthesized
aguugguuacgaaucuguagu

SEQ ID NO: 26678 - RNA, 21 nt, artificial
  Chemically synthesized
cuguacuuccugcuucuuuuc

SEQ ID NO: 26679 - RNA, 21 nt, artificial
  Chemically synthesized
uuguggacgcugucugcuaaa

SEQ ID NO: 26680 - RNA, 21 nt, artificial
  Chemically synthesized
ugggaaccuggauauaaggcc

SEQ ID NO: 26681 - RNA, 21 nt, artificial
  Chemically synthesized
uaaaaagccuguacguacaau

SEQ ID NO: 26682 - RNA, 21 nt, artificial
  Chemically synthesized
acuuuaccaaucucgaugccc

SEQ ID NO: 26683 - RNA, 21 nt, artificial
  Chemically synthesized
gguaugggacguucauuuccc

SEQ ID NO: 26684 - RNA, 21 nt, artificial
  Chemically synthesized
aaaggaugaguguccgauucg

SEQ ID NO: 26685 - RNA, 21 nt, artificial
  Chemically synthesized
aacucguucuuucaauuucug

SEQ ID NO: 26686 - RNA, 21 nt, artificial
  Chemically synthesized
gaaaaauuucacuucuucccu

SEQ ID NO: 26687 - RNA, 21 nt, artificial
  Chemically synthesized
acugaaccuuucuauuucagc

SEQ ID NO: 26688 - RNA, 21 nt, artificial
  Chemically synthesized
uagaaacugggagcacuggau

SEQ ID NO: 26689 - RNA, 21 nt, artificial
  Chemically synthesized
uccauacagaggcuccuuugg

SEQ ID NO: 26690 - RNA, 21 nt, artificial
  Chemically synthesized
ucgacagguuguuuccggugu

SEQ ID NO: 26691 - RNA, 21 nt, artificial
  Chemically synthesized
gaaaaauagagccuaagggcc

SEQ ID NO: 26692 - RNA, 21 nt, artificial
  Chemically synthesized
uucucaguacuuucugaaggu

SEQ ID NO: 26693 - RNA, 21 nt, artificial
  Chemically synthesized
uuauaggaacuucuguuaaaa

SEQ ID NO: 26694 - RNA, 21 nt, artificial
  Chemically synthesized
aggaaguucaggcgaguguuc

SEQ ID NO: 26695 - RNA, 21 nt, artificial
  Chemically synthesized
aagaguuccuucugcugcuga

SEQ ID NO: 26696 - RNA, 21 nt, artificial
  Chemically synthesized
aaauucaguccuuggaggcga

SEQ ID NO: 26697 - RNA, 21 nt, artificial
  Chemically synthesized
aguucguugcucuugggucug

SEQ ID NO: 26698 - RNA, 21 nt, artificial
  Chemically synthesized
acugacuuauuuaaggcgcug

SEQ ID NO: 26699 - RNA, 21 nt, artificial
  Chemically synthesized
uccuguugcuuuagaaaaugu

SEQ ID NO: 26700 - RNA, 21 nt, artificial
  Chemically synthesized
ugaauuuuguuccugguuaag

SEQ ID NO: 26701 - RNA, 21 nt, artificial
  Chemically synthesized
ugcucaggcucuuucucagua

SEQ ID NO: 26702 - RNA, 21 nt, artificial
  Chemically synthesized
uggacgcugucugcuaaagug

SEQ ID NO: 26703 - RNA, 21 nt, artificial
  Chemically synthesized
aaauuucacuucuucccuccg

SEQ ID NO: 26704 - RNA, 21 nt, artificial
  Chemically synthesized
cacuauguacagucagugcuc

SEQ ID NO: 26705 - RNA, 21 nt, artificial
  Chemically synthesized
uggagcucugagaggguaagu

SEQ ID NO: 26706 - RNA, 21 nt, artificial
  Chemically synthesized
uucuuucaauuucugaagcuu

SEQ ID NO: 26707 - RNA, 21 nt, artificial
  Chemically synthesized
uacaugaaaaauagagccuaa

SEQ ID NO: 26708 - RNA, 21 nt, artificial
  Chemically synthesized
uccuuggaggcgaaaguaccu

SEQ ID NO: 26709 - RNA, 21 nt, artificial
  Chemically synthesized
acauuucucugaguucguugc

SEQ ID NO: 26710 - RNA, 21 nt, artificial
  Chemically synthesized
acucauacaugaaaaauagag

SEQ ID NO: 26711 - RNA, 21 nt, artificial
  Chemically synthesized
acagugcugcaucagugaguc

SEQ ID NO: 26712 - RNA, 21 nt, artificial
  Chemically synthesized
acuuggguaugucccauagcu

SEQ ID NO: 26713 - RNA, 21 nt, artificial
  Chemically synthesized
guuacgaaucuguaguucuug

SEQ ID NO: 26714 - RNA, 21 nt, artificial
  Chemically synthesized
ucuccugggcuucaacucguu

SEQ ID NO: 26715 - RNA, 21 nt, artificial
  Chemically synthesized
aaguucaacacguggauuccc

SEQ ID NO: 26716 - RNA, 21 nt, artificial
  Chemically synthesized
ugcuuuaacugacuuauuuaa

SEQ ID NO: 26717 - RNA, 21 nt, artificial
  Chemically synthesized
ucagcugaauuuuuuucccau

SEQ ID NO: 26718 - RNA, 21 nt, artificial
  Chemically synthesized
accauuaagaccauuuucuag

SEQ ID NO: 26719 - RNA, 21 nt, artificial
  Chemically synthesized
aguacguuuuucuccagguac

SEQ ID NO: 26720 - RNA, 21 nt, artificial
  Chemically synthesized
cacugguuucacggaagagcu

SEQ ID NO: 26721 - RNA, 21 nt, artificial
  Chemically synthesized
uccuuucuuuaaaucuuccaa

SEQ ID NO: 26722 - RNA, 21 nt, artificial
  Chemically synthesized
accauuuucuagcugcagcuu

SEQ ID NO: 26723 - RNA, 21 nt, artificial
  Chemically synthesized
ucagcagcauucacguugaca

SEQ ID NO: 26724 - RNA, 21 nt, artificial
  Chemically synthesized
auacaugaaaaauagagccua

SEQ ID NO: 26725 - RNA, 21 nt, artificial
  Chemically synthesized
ugaaucuguugugaggagccu

SEQ ID NO: 26726 - RNA, 21 nt, artificial
  Chemically synthesized
acauggaguauauggaacuug

SEQ ID NO: 26727 - RNA, 21 nt, artificial
  Chemically synthesized
uuucuccagguacauuuauua

SEQ ID NO: 26728 - RNA, 21 nt, artificial
  Chemically synthesized
uggaucuuccaugagcagcau

SEQ ID NO: 26729 - RNA, 21 nt, artificial
  Chemically synthesized
cugaaccuuucuauuucagca

SEQ ID NO: 26730 - RNA, 21 nt, artificial
  Chemically synthesized
ugaauuuuuuucccauagaga

SEQ ID NO: 26731 - RNA, 21 nt, artificial
  Chemically synthesized
gucaaaaaauacuuuugguau

SEQ ID NO: 26732 - RNA, 21 nt, artificial
  Chemically synthesized
gucuguacuuccugcuucuuu

SEQ ID NO: 26733 - RNA, 21 nt, artificial
  Chemically synthesized
acuaucagcagcauucacguu

SEQ ID NO: 26734 - RNA, 21 nt, artificial
  Chemically synthesized
uagagccuaagggccuguauu

SEQ ID NO: 26735 - RNA, 21 nt, artificial
  Chemically synthesized
ucaccuggaaacuguaggauu

SEQ ID NO: 26736 - RNA, 21 nt, artificial
  Chemically synthesized
acauuguggacgcugucugcu

SEQ ID NO: 26737 - RNA, 21 nt, artificial
  Chemically synthesized
aggaugaguguccgauucggu

SEQ ID NO: 26738 - RNA, 21 nt, artificial
  Chemically synthesized
guacauuuauuacauuucucu

SEQ ID NO: 26739 - RNA, 21 nt, artificial
  Chemically synthesized
uccagcaccugacuccauuca

SEQ ID NO: 26740 - RNA, 21 nt, artificial
  Chemically synthesized
caauucacaccucagugaagc

SEQ ID NO: 26741 - RNA, 21 nt, artificial
  Chemically synthesized
cucaagaaaacaguuaauauc

SEQ ID NO: 26742 - RNA, 21 nt, artificial
  Chemically synthesized
aauccagcaggaacuucacga

SEQ ID NO: 26743 - RNA, 21 nt, artificial
  Chemically synthesized
uuguuuccgguguuauaggaa

SEQ ID NO: 26744 - RNA, 21 nt, artificial
  Chemically synthesized
agaaccacacugagcagcaug

SEQ ID NO: 26745 - RNA, 21 nt, artificial
  Chemically synthesized
ugcuccaaaaggaaguucagg

SEQ ID NO: 26746 - RNA, 21 nt, artificial
  Chemically synthesized
gugaugaagggaagaaggauc

SEQ ID NO: 26747 - RNA, 21 nt, artificial
  Chemically synthesized
cgaaucuguaguucuugguac

SEQ ID NO: 26748 - RNA, 21 nt, artificial
  Chemically synthesized
ucacacgguucagcugaauuu

SEQ ID NO: 26749 - RNA, 21 nt, artificial
  Chemically synthesized
aggaaaaauuucacuucuucc

SEQ ID NO: 26750 - RNA, 21 nt, artificial
  Chemically synthesized
agagacguucacgcaguucac

SEQ ID NO: 26751 - RNA, 21 nt, artificial
  Chemically synthesized
uguagucgacuuguccucuca

SEQ ID NO: 26752 - RNA, 21 nt, artificial
  Chemically synthesized
acguucacgcaguucacugau

SEQ ID NO: 26753 - RNA, 21 nt, artificial
  Chemically synthesized
gucaguaagagcuucugucuu

SEQ ID NO: 26754 - RNA, 21 nt, artificial
  Chemically synthesized
auuuggaucuuccaugagcag

SEQ ID NO: 26755 - RNA, 21 nt, artificial
  Chemically synthesized
ucagggaacugaauuugagcu

SEQ ID NO: 26756 - RNA, 21 nt, artificial
  Chemically synthesized
cguucuuucaauuucugaagc

SEQ ID NO: 26757 - RNA, 21 nt, artificial
  Chemically synthesized
aguucacugauucgcuugucc

SEQ ID NO: 26758 - RNA, 21 nt, artificial
  Chemically synthesized
augcggugcuccaaaaggaag

SEQ ID NO: 26759 - RNA, 21 nt, artificial
  Chemically synthesized
aaaauguaaacgcuguuccuu

SEQ ID NO: 26760 - RNA, 21 nt, artificial
  Chemically synthesized
acauguuuccauacagaggcu

SEQ ID NO: 26761 - RNA, 21 nt, artificial
  Chemically synthesized
gcuuuaacugacuuauuuaag

SEQ ID NO: 26762 - RNA, 21 nt, artificial
  Chemically synthesized
ugcugaaucuguugugaggag

SEQ ID NO: 26763 - RNA, 21 nt, artificial
  Chemically synthesized
uacguacaauucacaccucag

SEQ ID NO: 26764 - RNA, 21 nt, artificial
  Chemically synthesized
ucaggcucuuucucaguacuu

SEQ ID NO: 26765 - RNA, 21 nt, artificial
  Chemically synthesized
acugcuuuaacugacuuauuu

SEQ ID NO: 26766 - RNA, 21 nt, artificial
  Chemically synthesized
gguaugucccauagcuuggag

SEQ ID NO: 26767 - RNA, 21 nt, artificial
  Chemically synthesized
aaccuuucuauuucagcagac

SEQ ID NO: 26768 - RNA, 21 nt, artificial
  Chemically synthesized
agcauuugaggcaauacugag

SEQ ID NO: 26769 - RNA, 21 nt, artificial
  Chemically synthesized
acagucagugcuccaagguga

SEQ ID NO: 26770 - RNA, 21 nt, artificial
  Chemically synthesized
ucuccaccagcuguuugcaga

SEQ ID NO: 26771 - RNA, 21 nt, artificial
  Chemically synthesized
uguugcucaagaaaacaguua

SEQ ID NO: 26772 - RNA, 21 nt, artificial
  Chemically synthesized
acgaaucuguaguucuuggua

SEQ ID NO: 26773 - RNA, 21 nt, artificial
  Chemically synthesized
aaggaaguucaggcgaguguu

SEQ ID NO: 26774 - RNA, 21 nt, artificial
  Chemically synthesized
uagucgacuuguccucucauu

SEQ ID NO: 26775 - RNA, 21 nt, artificial
  Chemically synthesized
augggcuacagugcugcauca

SEQ ID NO: 26776 - RNA, 21 nt, artificial
  Chemically synthesized
ggcaaaauucaguccuuggag

SEQ ID NO: 26777 - RNA, 21 nt, artificial
  Chemically synthesized
cauaugaucaaaggguauggg

SEQ ID NO: 26778 - RNA, 21 nt, artificial
  Chemically synthesized
uuggagcucugagaggguaag

SEQ ID NO: 26779 - RNA, 21 nt, artificial
  Chemically synthesized
cuguagucgacuuguccucuc

SEQ ID NO: 26780 - RNA, 21 nt, artificial
  Chemically synthesized
agauguucguacaucauauga

SEQ ID NO: 26781 - RNA, 21 nt, artificial
  Chemically synthesized
acgcaguucacugauucgcuu

SEQ ID NO: 26782 - RNA, 21 nt, artificial
  Chemically synthesized
cucauagaugauccucugcac

SEQ ID NO: 26783 - RNA, 21 nt, artificial
  Chemically synthesized
aguuccuucugcugcugaagu

SEQ ID NO: 26784 - RNA, 21 nt, artificial
  Chemically synthesized
uggaacccauucaguuuuccu

SEQ ID NO: 26785 - RNA, 21 nt, artificial
  Chemically synthesized
guuuccauuguccacaucggc

SEQ ID NO: 26786 - RNA, 21 nt, artificial
  Chemically synthesized
aagauguucguacaucauaug

SEQ ID NO: 26787 - RNA, 21 nt, artificial
  Chemically synthesized
ugaucaacccuuaaaauugca

SEQ ID NO: 26788 - RNA, 21 nt, artificial
  Chemically synthesized
ugcagcaguuucaaugucgcu

SEQ ID NO: 26789 - RNA, 21 nt, artificial
  Chemically synthesized
cguuuuucuccagguacauuu

SEQ ID NO: 26790 - RNA, 21 nt, artificial
  Chemically synthesized
aaauccucugcugaaucuguu

SEQ ID NO: 26791 - RNA, 21 nt, artificial
  Chemically synthesized
uaagggccuguauuuuaauga

SEQ ID NO: 26792 - RNA, 21 nt, artificial
  Chemically synthesized
agugcugcaucagugagucug

SEQ ID NO: 26793 - RNA, 21 nt, artificial
  Chemically synthesized
ggguuaugggacuucuuaaug

SEQ ID NO: 26794 - RNA, 21 nt, artificial
  Chemically synthesized
caccucauagaugauccucug

SEQ ID NO: 26795 - RNA, 21 nt, artificial
  Chemically synthesized
cacacuauguacagucagugc

SEQ ID NO: 26796 - RNA, 21 nt, artificial
  Chemically synthesized
cauuguugcucaagaaaacag

SEQ ID NO: 26797 - RNA, 21 nt, artificial
  Chemically synthesized
ugaagauguucguacaucaua

SEQ ID NO: 26798 - RNA, 21 nt, artificial
  Chemically synthesized
gguuguuuccgguguuauagg

SEQ ID NO: 26799 - RNA, 21 nt, artificial
  Chemically synthesized
cuuguucuccugggcuucaac

SEQ ID NO: 26800 - RNA, 21 nt, artificial
  Chemically synthesized
ugcugaaguuuugaauuuugu

SEQ ID NO: 26801 - RNA, 21 nt, artificial
  Chemically synthesized
aacaguuaauaucaucggcau

SEQ ID NO: 26802 - RNA, 21 nt, artificial
  Chemically synthesized
aaacuguaggauucacauugu

SEQ ID NO: 26803 - RNA, 21 nt, artificial
  Chemically synthesized
cauccugcucaggcucuuucu

SEQ ID NO: 26804 - RNA, 21 nt, artificial
  Chemically synthesized
caaaauucuacaacaucucga

SEQ ID NO: 26805 - RNA, 21 nt, artificial
  Chemically synthesized
ugguuacgaaucuguaguucu

SEQ ID NO: 26806 - RNA, 21 nt, artificial
  Chemically synthesized
agcagguuuuugggcacauag

SEQ ID NO: 26807 - RNA, 21 nt, artificial
  Chemically synthesized
cagguuuuugggcacauagcc

SEQ ID NO: 26808 - RNA, 21 nt, artificial
  Chemically synthesized
cauuuucaguacguuuuucuc

SEQ ID NO: 26809 - RNA, 21 nt, artificial
  Chemically synthesized
cuuucuuuaaaucuuccaauu

SEQ ID NO: 26810 - RNA, 21 nt, artificial
  Chemically synthesized
gcagucuguacuuccugcuuc

SEQ ID NO: 26811 - RNA, 21 nt, artificial
  Chemically synthesized
ucaaaggguaugggacguuca

SEQ ID NO: 26812 - RNA, 21 nt, artificial
  Chemically synthesized
acacuugucugcagcaguuuc

SEQ ID NO: 26813 - RNA, 21 nt, artificial
  Chemically synthesized
gcaaaauucaguccuuggagg

SEQ ID NO: 26814 - RNA, 21 nt, artificial
  Chemically synthesized
cauuucugaagauguucguac

SEQ ID NO: 26815 - RNA, 21 nt, artificial
  Chemically synthesized
cuugcuggagguacauggagu

SEQ ID NO: 26816 - RNA, 21 nt, artificial
  Chemically synthesized
acauuuauuacauuucucuga

SEQ ID NO: 26817 - RNA, 21 nt, artificial
  Chemically synthesized
gacauguuuccauacagaggc

SEQ ID NO: 26818 - RNA, 21 nt, artificial
  Chemically synthesized
cacuaucagcagcauucacgu

SEQ ID NO: 26819 - RNA, 21 nt, artificial
  Chemically synthesized
guuuccauacagaggcuccuu

SEQ ID NO: 26820 - RNA, 21 nt, artificial
  Chemically synthesized
aucagcagcauucacguugac

SEQ ID NO: 26821 - RNA, 21 nt, artificial
  Chemically synthesized
cgguucagcugaauuuuuuuc

SEQ ID NO: 26822 - RNA, 21 nt, artificial
  Chemically synthesized
gccuguacguacaauucacac

SEQ ID NO: 26823 - RNA, 21 nt, artificial
  Chemically synthesized
uguugcuuuagaaaauguaaa

SEQ ID NO: 26824 - RNA, 21 nt, artificial
  Chemically synthesized
ucucgacagguuguuuccggu

SEQ ID NO: 26825 - RNA, 21 nt, artificial
  Chemically synthesized
uugcucaagaaaacaguuaau

SEQ ID NO: 26826 - RNA, 21 nt, artificial
  Chemically synthesized
guauaugcugaggcucuccca

SEQ ID NO: 26827 - RNA, 21 nt, artificial
  Chemically synthesized
auagcuuggaggcagcugcuu

SEQ ID NO: 26828 - RNA, 21 nt, artificial
  Chemically synthesized
cauacagaggcuccuuuggug

SEQ ID NO: 26829 - RNA, 21 nt, artificial
  Chemically synthesized
aguucuugguacagucuuuuu

SEQ ID NO: 26830 - RNA, 21 nt, artificial
  Chemically synthesized
gcacuuuaccaaucucgaugc

SEQ ID NO: 26831 - RNA, 21 nt, artificial
  Chemically synthesized
auuucugaagcuuuucauuuu

SEQ ID NO: 26832 - RNA, 21 nt, artificial
  Chemically synthesized
cugggaucuuccaccucauag

SEQ ID NO: 26833 - RNA, 21 nt, artificial
  Chemically synthesized
gucuagucaaaaaauacuuuu

SEQ ID NO: 26834 - RNA, 21 nt, artificial
  Chemically synthesized
gaaaacaguuaauaucaucgg

SEQ ID NO: 26835 - RNA, 21 nt, artificial
  Chemically synthesized
cacgcaguucacugauucgcu

SEQ ID NO: 26836 - RNA, 21 nt, artificial
  Chemically synthesized
ugaacccgaagguaaaacggg

SEQ ID NO: 26837 - RNA, 21 nt, artificial
  Chemically synthesized
cacugauucgcuuguccauca

SEQ ID NO: 26838 - RNA, 21 nt, artificial
  Chemically synthesized
aacuguaggauucacauugug

SEQ ID NO: 26839 - RNA, 21 nt, artificial
  Chemically synthesized
cgaauuuucuucagcuuguuc

SEQ ID NO: 26840 - RNA, 21 nt, artificial
  Chemically synthesized
uccagguacauuuauuacauu

SEQ ID NO: 26841 - RNA, 21 nt, artificial
  Chemically synthesized
accaccacucagucucgcuuu

SEQ ID NO: 26842 - RNA, 21 nt, artificial
  Chemically synthesized
cugcacaaucagccuuuaggu

SEQ ID NO: 26843 - RNA, 21 nt, artificial
  Chemically synthesized
caagucaguaagagcuucugu

SEQ ID NO: 26844 - RNA, 21 nt, artificial
  Chemically synthesized
cuaaagugagcaccauuaaga

SEQ ID NO: 26845 - RNA, 21 nt, artificial
  Chemically synthesized
cugauucgcuuguccaucaug

SEQ ID NO: 26846 - RNA, 21 nt, artificial
  Chemically synthesized
ccuuguucacuguucucaguu

SEQ ID NO: 26847 - RNA, 21 nt, artificial
  Chemically synthesized
cuggaaacuguaggauucaca

SEQ ID NO: 26848 - RNA, 21 nt, artificial
  Chemically synthesized
cucauacaugaaaaauagagc

SEQ ID NO: 26849 - RNA, 21 nt, artificial
  Chemically synthesized
gagcucugagaggguaaguuc

SEQ ID NO: 26850 - RNA, 21 nt, artificial
  Chemically synthesized
cugguaauucuuagguggugu

SEQ ID NO: 26851 - RNA, 21 nt, artificial
  Chemically synthesized
uuuucccauagagacguucac

SEQ ID NO: 26852 - RNA, 21 nt, artificial
  Chemically synthesized
uguuacaagaggcagcgcagu

SEQ ID NO: 26853 - RNA, 21 nt, artificial
  Chemically synthesized
caucucgacagguuguuuccg

SEQ ID NO: 26854 - RNA, 21 nt, artificial
  Chemically synthesized
aagacuggaacccauucaguu

SEQ ID NO: 26855 - RNA, 21 nt, artificial
  Chemically synthesized
cgcaguucacugauucgcuug

SEQ ID NO: 26856 - RNA, 21 nt, artificial
  Chemically synthesized
acugggaaccuggauauaagg

SEQ ID NO: 26857 - RNA, 21 nt, artificial
  Chemically synthesized
cuguaguucuugguacagucu

SEQ ID NO: 26858 - RNA, 21 nt, artificial
  Chemically synthesized
uaaaaucuguucauuguugcu

SEQ ID NO: 26859 - RNA, 21 nt, artificial
  Chemically synthesized
acgggcuuaccauacacugcu

SEQ ID NO: 26860 - RNA, 21 nt, artificial
  Chemically synthesized
gaauuuucuucagcuuguucu

SEQ ID NO: 26861 - RNA, 21 nt, artificial
  Chemically synthesized
auaaaaagccuguacguacaa

SEQ ID NO: 26862 - RNA, 21 nt, artificial
  Chemically synthesized
uuuccuggaaaacagcacaau

SEQ ID NO: 26863 - RNA, 21 nt, artificial
  Chemically synthesized
gugauggagcugcgcuuuuuc

SEQ ID NO: 26864 - RNA, 21 nt, artificial
  Chemically synthesized
gaaauagacugcugcugacgg

SEQ ID NO: 26865 - RNA, 21 nt, artificial
  Chemically synthesized
uggguguuuugaaagugggua

SEQ ID NO: 26866 - RNA, 21 nt, artificial
  Chemically synthesized
uguuuugaaaguggguauuua

SEQ ID NO: 26867 - RNA, 21 nt, artificial
  Chemically synthesized
gguuaugggacuucuuaaugg

SEQ ID NO: 26868 - RNA, 21 nt, artificial
  Chemically synthesized
cugaguucguugcucuugggu

SEQ ID NO: 26869 - RNA, 21 nt, artificial
  Chemically synthesized
aggugaacuggaacaggaagc

SEQ ID NO: 26870 - RNA, 21 nt, artificial
  Chemically synthesized
acuggauguagccuuccucca

SEQ ID NO: 26871 - RNA, 21 nt, artificial
  Chemically synthesized
cugggcuucaacucguucuuu

SEQ ID NO: 26872 - RNA, 21 nt, artificial
  Chemically synthesized
acacgguucagcugaauuuuu

SEQ ID NO: 26873 - RNA, 21 nt, artificial
  Chemically synthesized
guugacaccaaaauccagcag

SEQ ID NO: 26874 - RNA, 21 nt, artificial
  Chemically synthesized
ucccaguugucacuuggucuu

SEQ ID NO: 26875 - RNA, 21 nt, artificial
  Chemically synthesized
ugcacgaauuuucuucagcuu

SEQ ID NO: 26876 - RNA, 21 nt, artificial
  Chemically synthesized
aaguugguuacgaaucuguag

SEQ ID NO: 26877 - RNA, 21 nt, artificial
  Chemically synthesized
uuaaugggcaaacuggagaaa

SEQ ID NO: 26878 - RNA, 21 nt, artificial
  Chemically synthesized
uguucacuguucucaguuggg

SEQ ID NO: 26879 - RNA, 21 nt, artificial
  Chemically synthesized
agaauucuguuuuaauguugg

SEQ ID NO: 26880 - RNA, 21 nt, artificial
  Chemically synthesized
auggagagguugaacccgaag

SEQ ID NO: 26881 - RNA, 21 nt, artificial
  Chemically synthesized
cgacucauacaugaaaaauag

SEQ ID NO: 26882 - RNA, 21 nt, artificial
  Chemically synthesized
aggguaugggacguucauuuc

SEQ ID NO: 26883 - RNA, 21 nt, artificial
  Chemically synthesized
aguauauggaacuugaauuca

SEQ ID NO: 26884 - RNA, 21 nt, artificial
  Chemically synthesized
accuuguucacuguucucagu

SEQ ID NO: 26885 - RNA, 21 nt, artificial
  Chemically synthesized
aguucggguagcuuugaaugg

SEQ ID NO: 26886 - RNA, 21 nt, artificial
  Chemically synthesized
ugccuuccuuccuccuuucca

SEQ ID NO: 26887 - RNA, 21 nt, artificial
  Chemically synthesized
gggcguucacuuuucuucacc

SEQ ID NO: 26888 - RNA, 21 nt, artificial
  Chemically synthesized
cauugcacgaauuuucuucag

SEQ ID NO: 26889 - RNA, 21 nt, artificial
  Chemically synthesized
uauaggaacuucuguuaaaau

SEQ ID NO: 26890 - RNA, 21 nt, artificial
  Chemically synthesized
cugaauuuuuuucccauagag

SEQ ID NO: 26891 - RNA, 21 nt, artificial
  Chemically synthesized
ggcacuuuaccaaucucgaug

SEQ ID NO: 26892 - RNA, 21 nt, artificial
  Chemically synthesized
ggauucacauuguggacgcug

SEQ ID NO: 26893 - RNA, 21 nt, artificial
  Chemically synthesized
aauagagccuaagggccugua

SEQ ID NO: 26894 - RNA, 21 nt, artificial
  Chemically synthesized
caugaaaaauagagccuaagg

SEQ ID NO: 26895 - RNA, 21 nt, artificial
  Chemically synthesized
acagaggcuccuuuggugaug

SEQ ID NO: 26896 - RNA, 21 nt, artificial
  Chemically synthesized
cacggaagagcuagaauucug

SEQ ID NO: 26897 - RNA, 21 nt, artificial
  Chemically synthesized
uuaggugaacuggaacaggaa

SEQ ID NO: 26898 - RNA, 21 nt, artificial
  Chemically synthesized
uacacugcuuuaacugacuua

SEQ ID NO: 26899 - RNA, 21 nt, artificial
  Chemically synthesized
cuuguucacuguucucaguug

SEQ ID NO: 26900 - RNA, 21 nt, artificial
  Chemically synthesized
uacggaaauccucugcugaau

SEQ ID NO: 26901 - RNA, 21 nt, artificial
  Chemically synthesized
guucacugauucgcuugucca

SEQ ID NO: 26902 - RNA, 21 nt, artificial
  Chemically synthesized
agaagaguauaugcugaggcu

SEQ ID NO: 26903 - RNA, 21 nt, artificial
  Chemically synthesized
cugggaaccuggauauaaggc

SEQ ID NO: 26904 - RNA, 21 nt, artificial
  Chemically synthesized
gcuuauuuaagaguuccuucu

SEQ ID NO: 26905 - RNA, 21 nt, artificial
  Chemically synthesized
aggacagcucgucacuguucu

SEQ ID NO: 26906 - RNA, 21 nt, artificial
  Chemically synthesized
auucagggaacugaauuugag

SEQ ID NO: 26907 - RNA, 21 nt, artificial
  Chemically synthesized
aagggccuguauuuuaaugag

SEQ ID NO: 26908 - RNA, 21 nt, artificial
  Chemically synthesized
cauuucucugaguucguugcu

SEQ ID NO: 26909 - RNA, 21 nt, artificial
  Chemically synthesized
acaagggcguucacuuuucuu

SEQ ID NO: 26910 - RNA, 21 nt, artificial
  Chemically synthesized
gguagcuuugaauggucuagu

SEQ ID NO: 26911 - RNA, 21 nt, artificial
  Chemically synthesized
gaacccauucaguuuuccuuu

SEQ ID NO: 26912 - RNA, 21 nt, artificial
  Chemically synthesized
aaggaaaaauuucacuucuuc

SEQ ID NO: 26913 - RNA, 21 nt, artificial
  Chemically synthesized
aaauagagccuaagggccugu

SEQ ID NO: 26914 - RNA, 21 nt, artificial
  Chemically synthesized
aucuuccaugagcagcauuug

SEQ ID NO: 26915 - RNA, 21 nt, artificial
  Chemically synthesized
aucuuggagcucugagagggu

SEQ ID NO: 26916 - RNA, 21 nt, artificial
  Chemically synthesized
cacuuuaccaaucucgaugcc

SEQ ID NO: 26917 - RNA, 21 nt, artificial
  Chemically synthesized
auucaguuuuccuuucuuuaa

SEQ ID NO: 26918 - RNA, 21 nt, artificial
  Chemically synthesized
cuuucuauuucagcagacaga

SEQ ID NO: 26919 - RNA, 21 nt, artificial
  Chemically synthesized
cacugaaccuuucuauuucag

SEQ ID NO: 26920 - RNA, 21 nt, artificial
  Chemically synthesized
auguugcgcuuauuuaagagu

SEQ ID NO: 26921 - RNA, 23 nt, artificial
  Chemically synthesized
agauuuuaacagaaguuccuaua

SEQ ID NO: 26922 - RNA, 23 nt, artificial
  Chemically synthesized
gauuuuaacagaaguuccuauaa

SEQ ID NO: 26923 - RNA, 23 nt, artificial
  Chemically synthesized
caaaauucaaaacuucagcagca

SEQ ID NO: 26924 - RNA, 23 nt, artificial
  Chemically synthesized
caccuuggagcacugacuguaca

SEQ ID NO: 26925 - RNA, 23 nt, artificial
  Chemically synthesized
cagauuuuaacagaaguuccuau

SEQ ID NO: 26926 - RNA, 23 nt, artificial
  Chemically synthesized
auggaaacauguccaguguugcu

SEQ ID NO: 26927 - RNA, 23 nt, artificial
  Chemically synthesized
ugaaaaagcgcagcuccaucaca

SEQ ID NO: 26928 - RNA, 23 nt, artificial
  Chemically synthesized
guuucuucacgggucacugucca

SEQ ID NO: 26929 - RNA, 23 nt, artificial
  Chemically synthesized
gaacacucgccugaacuuccuuu

SEQ ID NO: 26930 - RNA, 23 nt, artificial
  Chemically synthesized
caccaucacaucgugaaguuccu

SEQ ID NO: 26931 - RNA, 23 nt, artificial
  Chemically synthesized
acagaaguuccuauaacaccgga

SEQ ID NO: 26932 - RNA, 23 nt, artificial
  Chemically synthesized
cgaucuggugcagaggaucaucu

SEQ ID NO: 26933 - RNA, 23 nt, artificial
  Chemically synthesized
gaguucgaucuggugcagaggau

SEQ ID NO: 26934 - RNA, 23 nt, artificial
  Chemically synthesized
cagcauauacucuucuccuccga

SEQ ID NO: 26935 - RNA, 23 nt, artificial
  Chemically synthesized
cuauaaauccaaauaaauaccca

SEQ ID NO: 26936 - RNA, 23 nt, artificial
  Chemically synthesized
caccuaagaauuaccagccggca

SEQ ID NO: 26937 - RNA, 23 nt, artificial
  Chemically synthesized
cuacagcaaaaucaugaacggca

SEQ ID NO: 26938 - RNA, 23 nt, artificial
  Chemically synthesized
gaaaaagcgcagcuccaucacag

SEQ ID NO: 26939 - RNA, 23 nt, artificial
  Chemically synthesized
cagcagauugaaaaucagcagca

SEQ ID NO: 26940 - RNA, 23 nt, artificial
  Chemically synthesized
guugaagcccaggagaacaagcu

SEQ ID NO: 26941 - RNA, 23 nt, artificial
  Chemically synthesized
acagaauucuagcucuuccguga

SEQ ID NO: 26942 - RNA, 23 nt, artificial
  Chemically synthesized
cugcagcuagaaaauggucuuaa

SEQ ID NO: 26943 - RNA, 23 nt, artificial
  Chemically synthesized
aaaauucagcugaaccgugugaa

SEQ ID NO: 26944 - RNA, 23 nt, artificial
  Chemically synthesized
cugccuccaagcuaugggacaua

SEQ ID NO: 26945 - RNA, 23 nt, artificial
  Chemically synthesized
aaaaagcgcagcuccaucacaga

SEQ ID NO: 26946 - RNA, 23 nt, artificial
  Chemically synthesized
gugaacugcgugaacgucucuau

SEQ ID NO: 26947 - RNA, 23 nt, artificial
  Chemically synthesized
uacuuucgccuccaaggacugaa

SEQ ID NO: 26948 - RNA, 23 nt, artificial
  Chemically synthesized
aaugaacgucccauacccuuuga

SEQ ID NO: 26949 - RNA, 23 nt, artificial
  Chemically synthesized
cauccuuucucacacuucccaca

SEQ ID NO: 26950 - RNA, 23 nt, artificial
  Chemically synthesized
aaauuuuuccuucgacacgagga

SEQ ID NO: 26951 - RNA, 23 nt, artificial
  Chemically synthesized
ccagucucucaguauugccucaa

SEQ ID NO: 26952 - RNA, 23 nt, artificial
  Chemically synthesized
gaucauaugauguacgaacaucu

SEQ ID NO: 26953 - RNA, 23 nt, artificial
  Chemically synthesized
accgaaucggacacucauccuuu

SEQ ID NO: 26954 - RNA, 23 nt, artificial
  Chemically synthesized
guauggaaacauguccaguguug

SEQ ID NO: 26955 - RNA, 23 nt, artificial
  Chemically synthesized
ggcuaugugcccaaaaaccugcu

SEQ ID NO: 26956 - RNA, 23 nt, artificial
  Chemically synthesized
aauacaggcccuuaggcucuauu

SEQ ID NO: 26957 - RNA, 23 nt, artificial
  Chemically synthesized
agaacgaguugaagcccaggaga

SEQ ID NO: 26958 - RNA, 23 nt, artificial
  Chemically synthesized
acaacugggagagccucagcaua

SEQ ID NO: 26959 - RNA, 23 nt, artificial
  Chemically synthesized
agcucaaauucaguucccugaau

SEQ ID NO: 26960 - RNA, 23 nt, artificial
  Chemically synthesized
cauuaaaacagaauucuagcucu

SEQ ID NO: 26961 - RNA, 23 nt, artificial
  Chemically synthesized
gugugaauuguacguacaggcuu

SEQ ID NO: 26962 - RNA, 23 nt, artificial
  Chemically synthesized
accuuggagcacugacuguacau

SEQ ID NO: 26963 - RNA, 23 nt, artificial
  Chemically synthesized
ggacauacccaaguccuacaccu

SEQ ID NO: 26964 - RNA, 23 nt, artificial
  Chemically synthesized
augauguacgaacaucuucagaa

SEQ ID NO: 26965 - RNA, 23 nt, artificial
  Chemically synthesized
cacuuuagcagacagcguccaca

SEQ ID NO: 26966 - RNA, 23 nt, artificial
  Chemically synthesized
gagccucagcauauacucuucuc

SEQ ID NO: 26967 - RNA, 23 nt, artificial
  Chemically synthesized
cuuacccucucagagcuccaaga

SEQ ID NO: 26968 - RNA, 23 nt, artificial
  Chemically synthesized
cuaugagguggaagaucccagca

SEQ ID NO: 26969 - RNA, 23 nt, artificial
  Chemically synthesized
gaaaaaaauucagcugaaccgug

SEQ ID NO: 26970 - RNA, 23 nt, artificial
  Chemically synthesized
cagauucagcagaggauuuccgu

SEQ ID NO: 26971 - RNA, 23 nt, artificial
  Chemically synthesized
cuauaacaccggaaacaaccugu

SEQ ID NO: 26972 - RNA, 23 nt, artificial
  Chemically synthesized
aaaauacaggcccuuaggcucua

SEQ ID NO: 26973 - RNA, 23 nt, artificial
  Chemically synthesized
aaaaaaauucagcugaaccgugu

SEQ ID NO: 26974 - RNA, 23 nt, artificial
  Chemically synthesized
aacagugacgagcuguccuucca

SEQ ID NO: 26975 - RNA, 23 nt, artificial
  Chemically synthesized
cagaacagugacgagcuguccuu

SEQ ID NO: 26976 - RNA, 23 nt, artificial
  Chemically synthesized
cuaagaauuaccagccggcagca

SEQ ID NO: 26977 - RNA, 23 nt, artificial
  Chemically synthesized
acagauuuuaacagaaguuccua

SEQ ID NO: 26978 - RNA, 23 nt, artificial
  Chemically synthesized
cuagaccauucaaagcuacccga

SEQ ID NO: 26979 - RNA, 23 nt, artificial
  Chemically synthesized
aagcucaaauucaguucccugaa

SEQ ID NO: 26980 - RNA, 23 nt, artificial
  Chemically synthesized
gacucacugaugcagcacuguag

SEQ ID NO: 26981 - RNA, 23 nt, artificial
  Chemically synthesized
gccucuuguaacagcguucaccu

SEQ ID NO: 26982 - RNA, 23 nt, artificial
  Chemically synthesized
aacauguccaguguugcugccca

SEQ ID NO: 26983 - RNA, 23 nt, artificial
  Chemically synthesized
auaugauguacgaacaucuucag

SEQ ID NO: 26984 - RNA, 23 nt, artificial
  Chemically synthesized
cuucagcagcagaaggaacucuu

SEQ ID NO: 26985 - RNA, 23 nt, artificial
  Chemically synthesized
cuucagaaauugaaagaacgagu

SEQ ID NO: 26986 - RNA, 23 nt, artificial
  Chemically synthesized
auugaaaaucagcagcagauguu

SEQ ID NO: 26987 - RNA, 23 nt, artificial
  Chemically synthesized
gagccucuguauggaaacauguc

SEQ ID NO: 26988 - RNA, 23 nt, artificial
  Chemically synthesized
aaaacugaauggguuccagucuu

SEQ ID NO: 26989 - RNA, 23 nt, artificial
  Chemically synthesized
auccuucuucccuucaucaccaa

SEQ ID NO: 26990 - RNA, 23 nt, artificial
  Chemically synthesized
ugaagcccaggagaacaagcuga

SEQ ID NO: 26991 - RNA, 23 nt, artificial
  Chemically synthesized
ggccuuauauccagguucccagu

SEQ ID NO: 26992 - RNA, 23 nt, artificial
  Chemically synthesized
aauggucuuaauggugcucacuu

SEQ ID NO: 26993 - RNA, 23 nt, artificial
  Chemically synthesized
uaaaggcugauugugcaggccca

SEQ ID NO: 26994 - RNA, 23 nt, artificial
  Chemically synthesized
auucuagcucuuccgugaaacca

SEQ ID NO: 26995 - RNA, 23 nt, artificial
  Chemically synthesized
aucauaugauguacgaacaucuu

SEQ ID NO: 26996 - RNA, 23 nt, artificial
  Chemically synthesized
aagaagugaaauuuuuccuucga

SEQ ID NO: 26997 - RNA, 23 nt, artificial
  Chemically synthesized
ggagccucuguauggaaacaugu

SEQ ID NO: 26998 - RNA, 23 nt, artificial
  Chemically synthesized
uccaguuugcccauuaacuggga

SEQ ID NO: 26999 - RNA, 23 nt, artificial
  Chemically synthesized
gugaauuguacguacaggcuuuu

SEQ ID NO: 27000 - RNA, 23 nt, artificial
  Chemically synthesized
cgaaucggacacucauccuuucu

SEQ ID NO: 27001 - RNA, 23 nt, artificial
  Chemically synthesized
uaccuucggguucaaccucucca

SEQ ID NO: 27002 - RNA, 23 nt, artificial
  Chemically synthesized
caaaaucaugaacggcaaucugu

SEQ ID NO: 27003 - RNA, 23 nt, artificial
  Chemically synthesized
aaauucaaaacuucagcagcaga

SEQ ID NO: 27004 - RNA, 23 nt, artificial
  Chemically synthesized
uugaaagaacgaguugaagccca

SEQ ID NO: 27005 - RNA, 23 nt, artificial
  Chemically synthesized
ugugaauccuacaguuuccaggu

SEQ ID NO: 27006 - RNA, 23 nt, artificial
  Chemically synthesized
ccuucaucaccaaaggagccucu

SEQ ID NO: 27007 - RNA, 23 nt, artificial
  Chemically synthesized
ucaaauucaguucccugaaugga

SEQ ID NO: 27008 - RNA, 23 nt, artificial
  Chemically synthesized
gaauccuacaguuuccaggugag

SEQ ID NO: 27009 - RNA, 23 nt, artificial
  Chemically synthesized
acguguugaacuuacccucucag

SEQ ID NO: 27010 - RNA, 23 nt, artificial
  Chemically synthesized
aggugaggcccuuucuccaguuu

SEQ ID NO: 27011 - RNA, 23 nt, artificial
  Chemically synthesized
aguugaagcccaggagaacaagc

SEQ ID NO: 27012 - RNA, 23 nt, artificial
  Chemically synthesized
ccaucacaucgugaaguuccugc

SEQ ID NO: 27013 - RNA, 23 nt, artificial
  Chemically synthesized
ugaauuguacguacaggcuuuuu

SEQ ID NO: 27014 - RNA, 23 nt, artificial
  Chemically synthesized
cuccucacaacagauucagcaga

SEQ ID NO: 27015 - RNA, 23 nt, artificial
  Chemically synthesized
cacguguugaacuuacccucuca

SEQ ID NO: 27016 - RNA, 23 nt, artificial
  Chemically synthesized
acugaugcagcacuguagcccau

SEQ ID NO: 27017 - RNA, 23 nt, artificial
  Chemically synthesized
acuuucgccuccaaggacugaau

SEQ ID NO: 27018 - RNA, 23 nt, artificial
  Chemically synthesized
auuuuaaggguugaucagcuuag

SEQ ID NO: 27019 - RNA, 23 nt, artificial
  Chemically synthesized
aggaaaacugaauggguuccagu

SEQ ID NO: 27020 - RNA, 23 nt, artificial
  Chemically synthesized
uuacauuuucuaaagcaacagga

SEQ ID NO: 27021 - RNA, 23 nt, artificial
  Chemically synthesized
cacucauccuuucucacacuucc

SEQ ID NO: 27022 - RNA, 23 nt, artificial
  Chemically synthesized
gcugccucuuguaacagcguuca

SEQ ID NO: 27023 - RNA, 23 nt, artificial
  Chemically synthesized
gaaucggacacucauccuuucuc

SEQ ID NO: 27024 - RNA, 23 nt, artificial
  Chemically synthesized
cucauuaaaauacaggcccuuag

SEQ ID NO: 27025 - RNA, 23 nt, artificial
  Chemically synthesized
aauacccacuuucaaaacaccca

SEQ ID NO: 27026 - RNA, 23 nt, artificial
  Chemically synthesized
ggaaaacugaauggguuccaguc

SEQ ID NO: 27027 - RNA, 23 nt, artificial
  Chemically synthesized
uagaauuuugcaaggaaccugga

SEQ ID NO: 27028 - RNA, 23 nt, artificial
  Chemically synthesized
gacacucauccuuucucacacuu

SEQ ID NO: 27029 - RNA, 23 nt, artificial
  Chemically synthesized
gcuaugggacauacccaaguccu

SEQ ID NO: 27030 - RNA, 23 nt, artificial
  Chemically synthesized
aacagauuuuaacagaaguuccu

SEQ ID NO: 27031 - RNA, 23 nt, artificial
  Chemically synthesized
caaauucaguucccugaauggag

SEQ ID NO: 27032 - RNA, 23 nt, artificial
  Chemically synthesized
cacugacuguacauaguguggug

SEQ ID NO: 27033 - RNA, 23 nt, artificial
  Chemically synthesized
gugaauucaaguuccauauacuc

SEQ ID NO: 27034 - RNA, 23 nt, artificial
  Chemically synthesized
ccgaaucggacacucauccuuuc

SEQ ID NO: 27035 - RNA, 23 nt, artificial
  Chemically synthesized
gaaaugaacgucccauacccuuu

SEQ ID NO: 27036 - RNA, 23 nt, artificial
  Chemically synthesized
aagugaaauuuuuccuucgacac

SEQ ID NO: 27037 - RNA, 23 nt, artificial
  Chemically synthesized
gaaagaacgaguugaagcccagg

SEQ ID NO: 27038 - RNA, 23 nt, artificial
  Chemically synthesized
agaagugaaauuuuuccuucgac

SEQ ID NO: 27039 - RNA, 23 nt, artificial
  Chemically synthesized
uggugcucacuuuagcagacagc

SEQ ID NO: 27040 - RNA, 23 nt, artificial
  Chemically synthesized
uuacccucucagagcuccaagau

SEQ ID NO: 27041 - RNA, 23 nt, artificial
  Chemically synthesized
cucacuuuagcagacagcgucca

SEQ ID NO: 27042 - RNA, 23 nt, artificial
  Chemically synthesized
cuuagucagcaauuggaagauuu

SEQ ID NO: 27043 - RNA, 23 nt, artificial
  Chemically synthesized
aauccacguguugaacuuacccu

SEQ ID NO: 27044 - RNA, 23 nt, artificial
  Chemically synthesized
ucaccuuggagcacugacuguac

SEQ ID NO: 27045 - RNA, 23 nt, artificial
  Chemically synthesized
aaaugaacgucccauacccuuug

SEQ ID NO: 27046 - RNA, 23 nt, artificial
  Chemically synthesized
guaaaugugcacaauaaacccgu

SEQ ID NO: 27047 - RNA, 23 nt, artificial
  Chemically synthesized
uaugauguacgaacaucuucaga

SEQ ID NO: 27048 - RNA, 23 nt, artificial
  Chemically synthesized
aauucuagcucuuccgugaaacc

SEQ ID NO: 27049 - RNA, 23 nt, artificial
  Chemically synthesized
acagauucagcagaggauuuccg

SEQ ID NO: 27050 - RNA, 23 nt, artificial
  Chemically synthesized
cuuuuggagcaccgcauggucuu

SEQ ID NO: 27051 - RNA, 23 nt, artificial
  Chemically synthesized
aacacucgccugaacuuccuuuu

SEQ ID NO: 27052 - RNA, 23 nt, artificial
  Chemically synthesized
gaaaggaggaaggaaggcagcuu

SEQ ID NO: 27053 - RNA, 23 nt, artificial
  Chemically synthesized
uuguaacagcguucaccucugca

SEQ ID NO: 27054 - RNA, 23 nt, artificial
  Chemically synthesized
agcaguguaugguaagcccguuu

SEQ ID NO: 27055 - RNA, 23 nt, artificial
  Chemically synthesized
aaugugaauccuacaguuuccag

SEQ ID NO: 27056 - RNA, 23 nt, artificial
  Chemically synthesized
uauaggaacuucuguuaaaaucu

SEQ ID NO: 27057 - RNA, 23 nt, artificial
  Chemically synthesized
uuauaggaacuucuguuaaaauc

SEQ ID NO: 27058 - RNA, 23 nt, artificial
  Chemically synthesized
ugcugcugaaguuuugaauuuug

SEQ ID NO: 27059 - RNA, 23 nt, artificial
  Chemically synthesized
uguacagucagugcuccaaggug

SEQ ID NO: 27060 - RNA, 23 nt, artificial
  Chemically synthesized
auaggaacuucuguuaaaaucug

SEQ ID NO: 27061 - RNA, 23 nt, artificial
  Chemically synthesized
agcaacacuggacauguuuccau

SEQ ID NO: 27062 - RNA, 23 nt, artificial
  Chemically synthesized
ugugauggagcugcgcuuuuuca

SEQ ID NO: 27063 - RNA, 23 nt, artificial
  Chemically synthesized
uggacagugacccgugaagaaac

SEQ ID NO: 27064 - RNA, 23 nt, artificial
  Chemically synthesized
aaaggaaguucaggcgaguguuc

SEQ ID NO: 27065 - RNA, 23 nt, artificial
  Chemically synthesized
aggaacuucacgaugugauggug

SEQ ID NO: 27066 - RNA, 23 nt, artificial
  Chemically synthesized
uccgguguuauaggaacuucugu

SEQ ID NO: 27067 - RNA, 23 nt, artificial
  Chemically synthesized
agaugauccucugcaccagaucg

SEQ ID NO: 27068 - RNA, 23 nt, artificial
  Chemically synthesized
auccucugcaccagaucgaacuc

SEQ ID NO: 27069 - RNA, 23 nt, artificial
  Chemically synthesized
ucggaggagaagaguauaugcug

SEQ ID NO: 27070 - RNA, 23 nt, artificial
  Chemically synthesized
uggguauuuauuuggauuuauag

SEQ ID NO: 27071 - RNA, 23 nt, artificial
  Chemically synthesized
ugccggcugguaauucuuaggug

SEQ ID NO: 27072 - RNA, 23 nt, artificial
  Chemically synthesized
ugccguucaugauuuugcuguag

SEQ ID NO: 27073 - RNA, 23 nt, artificial
  Chemically synthesized
cugugauggagcugcgcuuuuuc

SEQ ID NO: 27074 - RNA, 23 nt, artificial
  Chemically synthesized
ugcugcugauuuucaaucugcug

SEQ ID NO: 27075 - RNA, 23 nt, artificial
  Chemically synthesized
agcuuguucuccugggcuucaac

SEQ ID NO: 27076 - RNA, 23 nt, artificial
  Chemically synthesized
ucacggaagagcuagaauucugu

SEQ ID NO: 27077 - RNA, 23 nt, artificial
  Chemically synthesized
uuaagaccauuuucuagcugcag

SEQ ID NO: 27078 - RNA, 23 nt, artificial
  Chemically synthesized
uucacacgguucagcugaauuuu

SEQ ID NO: 27079 - RNA, 23 nt, artificial
  Chemically synthesized
uaugucccauagcuuggaggcag

SEQ ID NO: 27080 - RNA, 23 nt, artificial
  Chemically synthesized
ucugugauggagcugcgcuuuuu

SEQ ID NO: 27081 - RNA, 23 nt, artificial
  Chemically synthesized
auagagacguucacgcaguucac

SEQ ID NO: 27082 - RNA, 23 nt, artificial
  Chemically synthesized
uucaguccuuggaggcgaaagua

SEQ ID NO: 27083 - RNA, 23 nt, artificial
  Chemically synthesized
ucaaaggguaugggacguucauu

SEQ ID NO: 27084 - RNA, 23 nt, artificial
  Chemically synthesized
ugugggaagugugagaaaggaug

SEQ ID NO: 27085 - RNA, 23 nt, artificial
  Chemically synthesized
uccucgugucgaaggaaaaauuu

SEQ ID NO: 27086 - RNA, 23 nt, artificial
  Chemically synthesized
uugaggcaauacugagagacugg

SEQ ID NO: 27087 - RNA, 23 nt, artificial
  Chemically synthesized
agauguucguacaucauaugauc

SEQ ID NO: 27088 - RNA, 23 nt, artificial
  Chemically synthesized
aaaggaugaguguccgauucggu

SEQ ID NO: 27089 - RNA, 23 nt, artificial
  Chemically synthesized
caacacuggacauguuuccauac

SEQ ID NO: 27090 - RNA, 23 nt, artificial
  Chemically synthesized
agcagguuuuugggcacauagcc

SEQ ID NO: 27091 - RNA, 23 nt, artificial
  Chemically synthesized
aauagagccuaagggccuguauu

SEQ ID NO: 27092 - RNA, 23 nt, artificial
  Chemically synthesized
ucuccugggcuucaacucguucu

SEQ ID NO: 27093 - RNA, 23 nt, artificial
  Chemically synthesized
uaugcugaggcucucccaguugu

SEQ ID NO: 27094 - RNA, 23 nt, artificial
  Chemically synthesized
auucagggaacugaauuugagcu

SEQ ID NO: 27095 - RNA, 23 nt, artificial
  Chemically synthesized
agagcuagaauucuguuuuaaug

SEQ ID NO: 27096 - RNA, 23 nt, artificial
  Chemically synthesized
aagccuguacguacaauucacac

SEQ ID NO: 27097 - RNA, 23 nt, artificial
  Chemically synthesized
auguacagucagugcuccaaggu

SEQ ID NO: 27098 - RNA, 23 nt, artificial
  Chemically synthesized
agguguaggacuuggguaugucc

SEQ ID NO: 27099 - RNA, 23 nt, artificial
  Chemically synthesized
uucugaagauguucguacaucau

SEQ ID NO: 27100 - RNA, 23 nt, artificial
  Chemically synthesized
uguggacgcugucugcuaaagug

SEQ ID NO: 27101 - RNA, 23 nt, artificial
  Chemically synthesized
gagaagaguauaugcugaggcuc

SEQ ID NO: 27102 - RNA, 23 nt, artificial
  Chemically synthesized
ucuuggagcucugagaggguaag

SEQ ID NO: 27103 - RNA, 23 nt, artificial
  Chemically synthesized
ugcugggaucuuccaccucauag

SEQ ID NO: 27104 - RNA, 23 nt, artificial
  Chemically synthesized
cacgguucagcugaauuuuuuuc

SEQ ID NO: 27105 - RNA, 23 nt, artificial
  Chemically synthesized
acggaaauccucugcugaaucug

SEQ ID NO: 27106 - RNA, 23 nt, artificial
  Chemically synthesized
acagguuguuuccgguguuauag

SEQ ID NO: 27107 - RNA, 23 nt, artificial
  Chemically synthesized
uagagccuaagggccuguauuuu

SEQ ID NO: 27108 - RNA, 23 nt, artificial
  Chemically synthesized
acacgguucagcugaauuuuuuu

SEQ ID NO: 27109 - RNA, 23 nt, artificial
  Chemically synthesized
uggaaggacagcucgucacuguu

SEQ ID NO: 27110 - RNA, 23 nt, artificial
  Chemically synthesized
aaggacagcucgucacuguucug

SEQ ID NO: 27111 - RNA, 23 nt, artificial
  Chemically synthesized
ugcugccggcugguaauucuuag

SEQ ID NO: 27112 - RNA, 23 nt, artificial
  Chemically synthesized
uaggaacuucuguuaaaaucugu

SEQ ID NO: 27113 - RNA, 23 nt, artificial
  Chemically synthesized
ucggguagcuuugaauggucuag

SEQ ID NO: 27114 - RNA, 23 nt, artificial
  Chemically synthesized
uucagggaacugaauuugagcuu

SEQ ID NO: 27115 - RNA, 23 nt, artificial
  Chemically synthesized
cuacagugcugcaucagugaguc

SEQ ID NO: 27116 - RNA, 23 nt, artificial
  Chemically synthesized
aggugaacgcuguuacaagaggc

SEQ ID NO: 27117 - RNA, 23 nt, artificial
  Chemically synthesized
ugggcagcaacacuggacauguu

SEQ ID NO: 27118 - RNA, 23 nt, artificial
  Chemically synthesized
cugaagauguucguacaucauau

SEQ ID NO: 27119 - RNA, 23 nt, artificial
  Chemically synthesized
aagaguuccuucugcugcugaag

SEQ ID NO: 27120 - RNA, 23 nt, artificial
  Chemically synthesized
acucguucuuucaauuucugaag

SEQ ID NO: 27121 - RNA, 23 nt, artificial
  Chemically synthesized
aacaucugcugcugauuuucaau

SEQ ID NO: 27122 - RNA, 23 nt, artificial
  Chemically synthesized
gacauguuuccauacagaggcuc

SEQ ID NO: 27123 - RNA, 23 nt, artificial
  Chemically synthesized
aagacuggaacccauucaguuuu

SEQ ID NO: 27124 - RNA, 23 nt, artificial
  Chemically synthesized
uuggugaugaagggaagaaggau

SEQ ID NO: 27125 - RNA, 23 nt, artificial
  Chemically synthesized
ucagcuuguucuccugggcuuca

SEQ ID NO: 27126 - RNA, 23 nt, artificial
  Chemically synthesized
acugggaaccuggauauaaggcc

SEQ ID NO: 27127 - RNA, 23 nt, artificial
  Chemically synthesized
aagugagcaccauuaagaccauu

SEQ ID NO: 27128 - RNA, 23 nt, artificial
  Chemically synthesized
ugggccugcacaaucagccuuua

SEQ ID NO: 27129 - RNA, 23 nt, artificial
  Chemically synthesized
ugguuucacggaagagcuagaau

SEQ ID NO: 27130 - RNA, 23 nt, artificial
  Chemically synthesized
aagauguucguacaucauaugau

SEQ ID NO: 27131 - RNA, 23 nt, artificial
  Chemically synthesized
ucgaaggaaaaauuucacuucuu

SEQ ID NO: 27132 - RNA, 23 nt, artificial
  Chemically synthesized
acauguuuccauacagaggcucc

SEQ ID NO: 27133 - RNA, 23 nt, artificial
  Chemically synthesized
ucccaguuaaugggcaaacugga

SEQ ID NO: 27134 - RNA, 23 nt, artificial
  Chemically synthesized
aaaagccuguacguacaauucac

SEQ ID NO: 27135 - RNA, 23 nt, artificial
  Chemically synthesized
agaaaggaugaguguccgauucg

SEQ ID NO: 27136 - RNA, 23 nt, artificial
  Chemically synthesized
uggagagguugaacccgaaggua

SEQ ID NO: 27137 - RNA, 23 nt, artificial
  Chemically synthesized
acagauugccguucaugauuuug

SEQ ID NO: 27138 - RNA, 23 nt, artificial
  Chemically synthesized
ucugcugcugaaguuuugaauuu

SEQ ID NO: 27139 - RNA, 23 nt, artificial
  Chemically synthesized
ugggcuucaacucguucuuucaa

SEQ ID NO: 27140 - RNA, 23 nt, artificial
  Chemically synthesized
accuggaaacuguaggauucaca

SEQ ID NO: 27141 - RNA, 23 nt, artificial
  Chemically synthesized
agaggcuccuuuggugaugaagg

SEQ ID NO: 27142 - RNA, 23 nt, artificial
  Chemically synthesized
uccauucagggaacugaauuuga

SEQ ID NO: 27143 - RNA, 23 nt, artificial
  Chemically synthesized
cucaccuggaaacuguaggauuc

SEQ ID NO: 27144 - RNA, 23 nt, artificial
  Chemically synthesized
cugagaggguaaguucaacacgu

SEQ ID NO: 27145 - RNA, 23 nt, artificial
  Chemically synthesized
aaacuggagaaagggccucaccu

SEQ ID NO: 27146 - RNA, 23 nt, artificial
  Chemically synthesized
gcuuguucuccugggcuucaacu

SEQ ID NO: 27147 - RNA, 23 nt, artificial
  Chemically synthesized
gcaggaacuucacgaugugaugg

SEQ ID NO: 27148 - RNA, 23 nt, artificial
  Chemically synthesized
aaaaagccuguacguacaauuca

SEQ ID NO: 27149 - RNA, 23 nt, artificial
  Chemically synthesized
ucugcugaaucuguugugaggag

SEQ ID NO: 27150 - RNA, 23 nt, artificial
  Chemically synthesized
ugagaggguaaguucaacacgug

SEQ ID NO: 27151 - RNA, 23 nt, artificial
  Chemically synthesized
augggcuacagugcugcaucagu

SEQ ID NO: 27152 - RNA, 23 nt, artificial
  Chemically synthesized
auucaguccuuggaggcgaaagu

SEQ ID NO: 27153 - RNA, 23 nt, artificial
  Chemically synthesized
cuaagcugaucaacccuuaaaau

SEQ ID NO: 27154 - RNA, 23 nt, artificial
  Chemically synthesized
acuggaacccauucaguuuuccu

SEQ ID NO: 27155 - RNA, 23 nt, artificial
  Chemically synthesized
uccuguugcuuuagaaaauguaa

SEQ ID NO: 27156 - RNA, 23 nt, artificial
  Chemically synthesized
ggaagugugagaaaggaugagug

SEQ ID NO: 27157 - RNA, 23 nt, artificial
  Chemically synthesized
ugaacgcuguuacaagaggcagc

SEQ ID NO: 27158 - RNA, 23 nt, artificial
  Chemically synthesized
gagaaaggaugaguguccgauuc

SEQ ID NO: 27159 - RNA, 23 nt, artificial
  Chemically synthesized
cuaagggccuguauuuuaaugag

SEQ ID NO: 27160 - RNA, 23 nt, artificial
  Chemically synthesized
uggguguuuugaaaguggguauu

SEQ ID NO: 27161 - RNA, 23 nt, artificial
  Chemically synthesized
gacuggaacccauucaguuuucc

SEQ ID NO: 27162 - RNA, 23 nt, artificial
  Chemically synthesized
uccagguuccuugcaaaauucua

SEQ ID NO: 27163 - RNA, 23 nt, artificial
  Chemically synthesized
aagugugagaaaggaugaguguc

SEQ ID NO: 27164 - RNA, 23 nt, artificial
  Chemically synthesized
aggacuuggguaugucccauagc

SEQ ID NO: 27165 - RNA, 23 nt, artificial
  Chemically synthesized
aggaacuucuguuaaaaucuguu

SEQ ID NO: 27166 - RNA, 23 nt, artificial
  Chemically synthesized
cuccauucagggaacugaauuug

SEQ ID NO: 27167 - RNA, 23 nt, artificial
  Chemically synthesized
caccacacuauguacagucagug

SEQ ID NO: 27168 - RNA, 23 nt, artificial
  Chemically synthesized
gaguauauggaacuugaauucac

SEQ ID NO: 27169 - RNA, 23 nt, artificial
  Chemically synthesized
gaaaggaugaguguccgauucgg

SEQ ID NO: 27170 - RNA, 23 nt, artificial
  Chemically synthesized
aaaggguaugggacguucauuuc

SEQ ID NO: 27171 - RNA, 23 nt, artificial
  Chemically synthesized
gugucgaaggaaaaauuucacuu

SEQ ID NO: 27172 - RNA, 23 nt, artificial
  Chemically synthesized
ccugggcuucaacucguucuuuc

SEQ ID NO: 27173 - RNA, 23 nt, artificial
  Chemically synthesized
gucgaaggaaaaauuucacuucu

SEQ ID NO: 27174 - RNA, 23 nt, artificial
  Chemically synthesized
gcugucugcuaaagugagcacca

SEQ ID NO: 27175 - RNA, 23 nt, artificial
  Chemically synthesized
aucuuggagcucugagaggguaa

SEQ ID NO: 27176 - RNA, 23 nt, artificial
  Chemically synthesized
uggacgcugucugcuaaagugag

SEQ ID NO: 27177 - RNA, 23 nt, artificial
  Chemically synthesized
aaaucuuccaauugcugacuaag

SEQ ID NO: 27178 - RNA, 23 nt, artificial
  Chemically synthesized
aggguaaguucaacacguggauu

SEQ ID NO: 27179 - RNA, 23 nt, artificial
  Chemically synthesized
guacagucagugcuccaagguga

SEQ ID NO: 27180 - RNA, 23 nt, artificial
  Chemically synthesized
caaaggguaugggacguucauuu

SEQ ID NO: 27181 - RNA, 23 nt, artificial
  Chemically synthesized
acggguuuauugugcacauuuac

SEQ ID NO: 27182 - RNA, 23 nt, artificial
  Chemically synthesized
ucugaagauguucguacaucaua

SEQ ID NO: 27183 - RNA, 23 nt, artificial
  Chemically synthesized
gguuucacggaagagcuagaauu

SEQ ID NO: 27184 - RNA, 23 nt, artificial
  Chemically synthesized
cggaaauccucugcugaaucugu

SEQ ID NO: 27185 - RNA, 23 nt, artificial
  Chemically synthesized
aagaccaugcggugcuccaaaag

SEQ ID NO: 27186 - RNA, 23 nt, artificial
  Chemically synthesized
aaaaggaaguucaggcgaguguu

SEQ ID NO: 27187 - RNA, 23 nt, artificial
  Chemically synthesized
aagcugccuuccuuccuccuuuc

SEQ ID NO: 27188 - RNA, 23 nt, artificial
  Chemically synthesized
ugcagaggugaacgcuguuacaa

SEQ ID NO: 27189 - RNA, 23 nt, artificial
  Chemically synthesized
aaacgggcuuaccauacacugcu

SEQ ID NO: 27190 - RNA, 23 nt, artificial
  Chemically synthesized
cuggaaacuguaggauucacauu

SEQ ID NO: 27191 - RNA, 23 nt, artificial
  Chemically synthesized
ggaaaaaaauucagcugaaccgu

SEQ ID NO: 27192 - RNA, 23 nt, artificial
  Chemically synthesized
gggaaaaaaauucagcugaaccg

SEQ ID NO: 27193 - RNA, 23 nt, artificial
  Chemically synthesized
ugggaaaaaaauucagcugaacc

SEQ ID NO: 27194 - RNA, 23 nt, artificial
  Chemically synthesized
augggaaaaaaauucagcugaac

SEQ ID NO: 27195 - RNA, 23 nt, artificial
  Chemically synthesized
gcgaugaugccgaugauauuaac

SEQ ID NO: 27196 - RNA, 23 nt, artificial
  Chemically synthesized
cccgcgaugaugccgaugauauu

SEQ ID NO: 27197 - RNA, 23 nt, artificial
  Chemically synthesized
ccaggaacaaaauucaaaacuuc

SEQ ID NO: 27198 - RNA, 23 nt, artificial
  Chemically synthesized
accaggaacaaaauucaaaacuu

SEQ ID NO: 27199 - RNA, 23 nt, artificial
  Chemically synthesized
aaccaggaacaaaauucaaaacu

SEQ ID NO: 27200 - RNA, 23 nt, artificial
  Chemically synthesized
uaaccaggaacaaaauucaaaac

SEQ ID NO: 27201 - RNA, 23 nt, artificial
  Chemically synthesized
uuaaccaggaacaaaauucaaaa

SEQ ID NO: 27202 - RNA, 23 nt, artificial
  Chemically synthesized
caacgugaaugcugcugauagug

SEQ ID NO: 27203 - RNA, 23 nt, artificial
  Chemically synthesized
ucaacgugaaugcugcugauagu

SEQ ID NO: 27204 - RNA, 23 nt, artificial
  Chemically synthesized
gucaacgugaaugcugcugauag

SEQ ID NO: 27205 - RNA, 23 nt, artificial
  Chemically synthesized
ugucaacgugaaugcugcugaua

SEQ ID NO: 27206 - RNA, 23 nt, artificial
  Chemically synthesized
gugucaacgugaaugcugcugau

SEQ ID NO: 27207 - RNA, 23 nt, artificial
  Chemically synthesized
uggagaaaaacguacugaaaaug

SEQ ID NO: 27208 - RNA, 23 nt, artificial
  Chemically synthesized
cgugaaugcugcugauagugaug

SEQ ID NO: 27209 - RNA, 23 nt, artificial
  Chemically synthesized
aacgugaaugcugcugauaguga

SEQ ID NO: 27210 - RNA, 23 nt, artificial
  Chemically synthesized
cgggcaucgagauugguaaagug

SEQ ID NO: 27211 - RNA, 23 nt, artificial
  Chemically synthesized
ccgggcaucgagauugguaaagu

SEQ ID NO: 27212 - RNA, 23 nt, artificial
  Chemically synthesized
gccgggcaucgagauugguaaag

SEQ ID NO: 27213 - RNA, 23 nt, artificial
  Chemically synthesized
uuccaggaaagcugcagcuagaa

SEQ ID NO: 27214 - RNA, 23 nt, artificial
  Chemically synthesized
uuuccaggaaagcugcagcuaga

SEQ ID NO: 27215 - RNA, 23 nt, artificial
  Chemically synthesized
ggcuuuuuauauaccaaaaguau

SEQ ID NO: 27216 - RNA, 23 nt, artificial
  Chemically synthesized
aggcuuuuuauauaccaaaagua

SEQ ID NO: 27217 - RNA, 23 nt, artificial
  Chemically synthesized
caggcuuuuuauauaccaaaagu

SEQ ID NO: 27218 - RNA, 23 nt, artificial
  Chemically synthesized
acaggcuuuuuauauaccaaaag

SEQ ID NO: 27219 - RNA, 23 nt, artificial
  Chemically synthesized
uacaggcuuuuuauauaccaaaa

SEQ ID NO: 27220 - RNA, 23 nt, artificial
  Chemically synthesized
uaaauguaccuggagaaaaacgu

SEQ ID NO: 27221 - RNA, 23 nt, artificial
  Chemically synthesized
auaaauguaccuggagaaaaacg

SEQ ID NO: 27222 - RNA, 23 nt, artificial
  Chemically synthesized
aauaaauguaccuggagaaaaac

SEQ ID NO: 27223 - RNA, 23 nt, artificial
  Chemically synthesized
uaauaaauguaccuggagaaaaa

SEQ ID NO: 27224 - RNA, 23 nt, artificial
  Chemically synthesized
agccggcagaggacaauaacaac

SEQ ID NO: 27225 - RNA, 23 nt, artificial
  Chemically synthesized
cggcaaucugucugcugaaauag

SEQ ID NO: 27226 - RNA, 23 nt, artificial
  Chemically synthesized
aacggcaaucugucugcugaaau

SEQ ID NO: 27227 - RNA, 23 nt, artificial
  Chemically synthesized
caauuacuauaaauccaaauaaa

SEQ ID NO: 27228 - RNA, 23 nt, artificial
  Chemically synthesized
ccaauuacuauaaauccaaauaa

SEQ ID NO: 27229 - RNA, 23 nt, artificial
  Chemically synthesized
gccaauuacuauaaauccaaaua

SEQ ID NO: 27230 - RNA, 23 nt, artificial
  Chemically synthesized
ugccaauuacuauaaauccaaau

SEQ ID NO: 27231 - RNA, 23 nt, artificial
  Chemically synthesized
uugccaauuacuauaaauccaaa

SEQ ID NO: 27232 - RNA, 23 nt, artificial
  Chemically synthesized
acguacaggcuuuuuauauacca

SEQ ID NO: 27233 - RNA, 23 nt, artificial
  Chemically synthesized
uacguacaggcuuuuuauauacc

SEQ ID NO: 27234 - RNA, 23 nt, artificial
  Chemically synthesized
guacguacaggcuuuuuauauac

SEQ ID NO: 27235 - RNA, 23 nt, artificial
  Chemically synthesized
acauaguguggugaagaaaagug

SEQ ID NO: 27236 - RNA, 23 nt, artificial
  Chemically synthesized
uacauaguguggugaagaaaagu

SEQ ID NO: 27237 - RNA, 23 nt, artificial
  Chemically synthesized
guguaaaugugcacaauaaaccc

SEQ ID NO: 27238 - RNA, 23 nt, artificial
  Chemically synthesized
uguguaaaugugcacaauaaacc

SEQ ID NO: 27239 - RNA, 23 nt, artificial
  Chemically synthesized
acgucucuaugggaaaaaaauuc

SEQ ID NO: 27240 - RNA, 23 nt, artificial
  Chemically synthesized
aacgucucuaugggaaaaaaauu

SEQ ID NO: 27241 - RNA, 23 nt, artificial
  Chemically synthesized
ggcugagaguccgguuuaacccc

SEQ ID NO: 27242 - RNA, 23 nt, artificial
  Chemically synthesized
gggcugagaguccgguuuaaccc

SEQ ID NO: 27243 - RNA, 23 nt, artificial
  Chemically synthesized
cgggcugagaguccgguuuaacc

SEQ ID NO: 27244 - RNA, 23 nt, artificial
  Chemically synthesized
acgggcugagaguccgguuuaac

SEQ ID NO: 27245 - RNA, 23 nt, artificial
  Chemically synthesized
cacgggcugagaguccgguuuaa

SEQ ID NO: 27246 - RNA, 23 nt, artificial
  Chemically synthesized
gcaggaaguacagacugcaauuu

SEQ ID NO: 27247 - RNA, 23 nt, artificial
  Chemically synthesized
agcaggaaguacagacugcaauu

SEQ ID NO: 27248 - RNA, 23 nt, artificial
  Chemically synthesized
aagcaggaaguacagacugcaau

SEQ ID NO: 27249 - RNA, 23 nt, artificial
  Chemically synthesized
cugucgagauguuguagaauuuu

SEQ ID NO: 27250 - RNA, 23 nt, artificial
  Chemically synthesized
ccugucgagauguuguagaauuu

SEQ ID NO: 27251 - RNA, 23 nt, artificial
  Chemically synthesized
aaccugucgagauguuguagaau

SEQ ID NO: 27252 - RNA, 23 nt, artificial
  Chemically synthesized
acagcguuuacauuuucuaaagc

SEQ ID NO: 27253 - RNA, 23 nt, artificial
  Chemically synthesized
aacagcguuuacauuuucuaaag

SEQ ID NO: 27254 - RNA, 23 nt, artificial
  Chemically synthesized
agcagcagaaggaacucuuaaau

SEQ ID NO: 27255 - RNA, 23 nt, artificial
  Chemically synthesized
uucagcagcagaaggaacucuua

SEQ ID NO: 27256 - RNA, 23 nt, artificial
  Chemically synthesized
uguggugaagaaaagugaacgcc

SEQ ID NO: 27257 - RNA, 23 nt, artificial
  Chemically synthesized
guguggugaagaaaagugaacgc

SEQ ID NO: 27258 - RNA, 23 nt, artificial
  Chemically synthesized
aguguggugaagaaaagugaacg

SEQ ID NO: 27259 - RNA, 23 nt, artificial
  Chemically synthesized
uaguguggugaagaaaagugaac

SEQ ID NO: 27260 - RNA, 23 nt, artificial
  Chemically synthesized
accaacuuaaccaggaacaaaau

SEQ ID NO: 27261 - RNA, 23 nt, artificial
  Chemically synthesized
guaaccaacuuaaccaggaacaa

SEQ ID NO: 27262 - RNA, 23 nt, artificial
  Chemically synthesized
gggcaucgagauugguaaagugc

SEQ ID NO: 27263 - RNA, 23 nt, artificial
  Chemically synthesized
ccauguuccaggaaaagaagcag

SEQ ID NO: 27264 - RNA, 23 nt, artificial
  Chemically synthesized
gccauguuccaggaaaagaagca

SEQ ID NO: 27265 - RNA, 23 nt, artificial
  Chemically synthesized
ugccauguuccaggaaaagaagc

SEQ ID NO: 27266 - RNA, 23 nt, artificial
  Chemically synthesized
gugccauguuccaggaaaagaag

SEQ ID NO: 27267 - RNA, 23 nt, artificial
  Chemically synthesized
aggagaacaagcugaagaaaauu

SEQ ID NO: 27268 - RNA, 23 nt, artificial
  Chemically synthesized
cccaggagaacaagcugaagaaa

SEQ ID NO: 27269 - RNA, 23 nt, artificial
  Chemically synthesized
gucuauuucugaaaaugaaaagc

SEQ ID NO: 27270 - RNA, 23 nt, artificial
  Chemically synthesized
agucuauuucugaaaaugaaaag

SEQ ID NO: 27271 - RNA, 23 nt, artificial
  Chemically synthesized
cagucuauuucugaaaaugaaaa

SEQ ID NO: 27272 - RNA, 23 nt, artificial
  Chemically synthesized
gcagcagucuauuucugaaaaug

SEQ ID NO: 27273 - RNA, 23 nt, artificial
  Chemically synthesized
agcagcagucuauuucugaaaau

SEQ ID NO: 27274 - RNA, 23 nt, artificial
  Chemically synthesized
ucaaccauaagcgacauugaaac

SEQ ID NO: 27275 - RNA, 23 nt, artificial
  Chemically synthesized
cucaaccauaagcgacauugaaa

SEQ ID NO: 27276 - RNA, 23 nt, artificial
  Chemically synthesized
cacugaggugugaauuguacgua

SEQ ID NO: 27277 - RNA, 23 nt, artificial
  Chemically synthesized
ucacugaggugugaauuguacgu

SEQ ID NO: 27278 - RNA, 23 nt, artificial
  Chemically synthesized
uucacugaggugugaauuguacg

SEQ ID NO: 27279 - RNA, 23 nt, artificial
  Chemically synthesized
cuucacugaggugugaauuguac

SEQ ID NO: 27280 - RNA, 23 nt, artificial
  Chemically synthesized
gggagagccucagcauauacucu

SEQ ID NO: 27281 - RNA, 23 nt, artificial
  Chemically synthesized
ugggagagccucagcauauacuc

SEQ ID NO: 27282 - RNA, 23 nt, artificial
  Chemically synthesized
acugggagagccucagcauauac

SEQ ID NO: 27283 - RNA, 23 nt, artificial
  Chemically synthesized
aacugggagagccucagcauaua

SEQ ID NO: 27284 - RNA, 23 nt, artificial
  Chemically synthesized
cacggagggaagaagugaaauuu

SEQ ID NO: 27285 - RNA, 23 nt, artificial
  Chemically synthesized
uccacggagggaagaagugaaau

SEQ ID NO: 27286 - RNA, 23 nt, artificial
  Chemically synthesized
gguccacggagggaagaagugaa

SEQ ID NO: 27287 - RNA, 23 nt, artificial
  Chemically synthesized
agaaggaacucuuaaauaagcgc

SEQ ID NO: 27288 - RNA, 23 nt, artificial
  Chemically synthesized
cagaaggaacucuuaaauaagcg

SEQ ID NO: 27289 - RNA, 23 nt, artificial
  Chemically synthesized
agcugggugugaugaacaaaggu

SEQ ID NO: 27290 - RNA, 23 nt, artificial
  Chemically synthesized
aagcugggugugaugaacaaagg

SEQ ID NO: 27291 - RNA, 23 nt, artificial
  Chemically synthesized
gcuagaaaauggucuuaauggug

SEQ ID NO: 27292 - RNA, 23 nt, artificial
  Chemically synthesized
agcuagaaaauggucuuaauggu

SEQ ID NO: 27293 - RNA, 23 nt, artificial
  Chemically synthesized
cagcuagaaaauggucuuaaugg

SEQ ID NO: 27294 - RNA, 23 nt, artificial
  Chemically synthesized
gcagcuagaaaauggucuuaaug

SEQ ID NO: 27295 - RNA, 23 nt, artificial
  Chemically synthesized
ugcagcuagaaaauggucuuaau

SEQ ID NO: 27296 - RNA, 23 nt, artificial
  Chemically synthesized
ccgaugauauuaacuguuuucuu

SEQ ID NO: 27297 - RNA, 23 nt, artificial
  Chemically synthesized
gccgaugauauuaacuguuuucu

SEQ ID NO: 27298 - RNA, 23 nt, artificial
  Chemically synthesized
ugccgaugauauuaacuguuuuc

SEQ ID NO: 27299 - RNA, 23 nt, artificial
  Chemically synthesized
augccgaugauauuaacuguuuu

SEQ ID NO: 27300 - RNA, 23 nt, artificial
  Chemically synthesized
agggcuaugugcccaaaaaccug

SEQ ID NO: 27301 - RNA, 23 nt, artificial
  Chemically synthesized
gagggcuaugugcccaaaaaccu

SEQ ID NO: 27302 - RNA, 23 nt, artificial
  Chemically synthesized
ggagggcuaugugcccaaaaacc

SEQ ID NO: 27303 - RNA, 23 nt, artificial
  Chemically synthesized
gggagggcuaugugcccaaaaac

SEQ ID NO: 27304 - RNA, 23 nt, artificial
  Chemically synthesized
cgggagggcuaugugcccaaaaa

SEQ ID NO: 27305 - RNA, 23 nt, artificial
  Chemically synthesized
cgagccggcagaggacaauaaca

SEQ ID NO: 27306 - RNA, 23 nt, artificial
  Chemically synthesized
guacgaacaucuucagaaauggg

SEQ ID NO: 27307 - RNA, 23 nt, artificial
  Chemically synthesized
uguacgaacaucuucagaaaugg

SEQ ID NO: 27308 - RNA, 23 nt, artificial
  Chemically synthesized
auguacgaacaucuucagaaaug

SEQ ID NO: 27309 - RNA, 23 nt, artificial
  Chemically synthesized
gauguacgaacaucuucagaaau

SEQ ID NO: 27310 - RNA, 23 nt, artificial
  Chemically synthesized
ggcuguauccacggaucaaaccc

SEQ ID NO: 27311 - RNA, 23 nt, artificial
  Chemically synthesized
gggcuguauccacggaucaaacc

SEQ ID NO: 27312 - RNA, 23 nt, artificial
  Chemically synthesized
ggggcuguauccacggaucaaac

SEQ ID NO: 27313 - RNA, 23 nt, artificial
  Chemically synthesized
uggggcuguauccacggaucaaa

SEQ ID NO: 27314 - RNA, 23 nt, artificial
  Chemically synthesized
cuggggcuguauccacggaucaa

SEQ ID NO: 27315 - RNA, 23 nt, artificial
  Chemically synthesized
cucagagaaauguaauaaaugua

SEQ ID NO: 27316 - RNA, 23 nt, artificial
  Chemically synthesized
acucagagaaauguaauaaaugu

SEQ ID NO: 27317 - RNA, 23 nt, artificial
  Chemically synthesized
aacucagagaaauguaauaaaug

SEQ ID NO: 27318 - RNA, 23 nt, artificial
  Chemically synthesized
gaacucagagaaauguaauaaau

SEQ ID NO: 27319 - RNA, 23 nt, artificial
  Chemically synthesized
caaggaacagcguuuacauuuuc

SEQ ID NO: 27320 - RNA, 23 nt, artificial
  Chemically synthesized
gccaaggaacagcguuuacauuu

SEQ ID NO: 27321 - RNA, 23 nt, artificial
  Chemically synthesized
ugccaaggaacagcguuuacauu

SEQ ID NO: 27322 - RNA, 23 nt, artificial
  Chemically synthesized
uugccaaggaacagcguuuacau

SEQ ID NO: 27323 - RNA, 23 nt, artificial
  Chemically synthesized
gcaacagcagcagauugaaaauc

SEQ ID NO: 27324 - RNA, 23 nt, artificial
  Chemically synthesized
ggcaacagcagcagauugaaaau

SEQ ID NO: 27325 - RNA, 23 nt, artificial
  Chemically synthesized
agcccaggagaacaagcugaaga

SEQ ID NO: 27326 - RNA, 23 nt, artificial
  Chemically synthesized
aagcccaggagaacaagcugaag

SEQ ID NO: 27327 - RNA, 23 nt, artificial
  Chemically synthesized
gaaugcugcugauagugauggau

SEQ ID NO: 27328 - RNA, 23 nt, artificial
  Chemically synthesized
ugaaugcugcugauagugaugga

SEQ ID NO: 27329 - RNA, 23 nt, artificial
  Chemically synthesized
gugaaugcugcugauagugaugg

SEQ ID NO: 27330 - RNA, 23 nt, artificial
  Chemically synthesized
ucagcaauuggaagauuuaaaga

SEQ ID NO: 27331 - RNA, 23 nt, artificial
  Chemically synthesized
gucagcaauuggaagauuuaaag

SEQ ID NO: 27332 - RNA, 23 nt, artificial
  Chemically synthesized
gcaaaaucaugaacggcaaucug

SEQ ID NO: 27333 - RNA, 23 nt, artificial
  Chemically synthesized
agcaaaaucaugaacggcaaucu

SEQ ID NO: 27334 - RNA, 23 nt, artificial
  Chemically synthesized
cagcaaaaucaugaacggcaauc

SEQ ID NO: 27335 - RNA, 23 nt, artificial
  Chemically synthesized
cuuaaauaagucaguuaaagcag

SEQ ID NO: 27336 - RNA, 23 nt, artificial
  Chemically synthesized
gccuuaaauaagucaguuaaagc

SEQ ID NO: 27337 - RNA, 23 nt, artificial
  Chemically synthesized
cgccuuaaauaagucaguuaaag

SEQ ID NO: 27338 - RNA, 23 nt, artificial
  Chemically synthesized
cugucugcugaaauagaaagguu

SEQ ID NO: 27339 - RNA, 23 nt, artificial
  Chemically synthesized
ucugucugcugaaauagaaaggu

SEQ ID NO: 27340 - RNA, 23 nt, artificial
  Chemically synthesized
aucugucugcugaaauagaaagg

SEQ ID NO: 27341 - RNA, 23 nt, artificial
  Chemically synthesized
aaucugucugcugaaauagaaag

SEQ ID NO: 27342 - RNA, 23 nt, artificial
  Chemically synthesized
ggagaacaagcugaagaaaauuc

SEQ ID NO: 27343 - RNA, 23 nt, artificial
  Chemically synthesized
caccgaaucggacacucauccuu

SEQ ID NO: 27344 - RNA, 23 nt, artificial
  Chemically synthesized
ucaccgaaucggacacucauccu

SEQ ID NO: 27345 - RNA, 23 nt, artificial
  Chemically synthesized
gucaccgaaucggacacucaucc

SEQ ID NO: 27346 - RNA, 23 nt, artificial
  Chemically synthesized
cgucaccgaaucggacacucauc

SEQ ID NO: 27347 - RNA, 23 nt, artificial
  Chemically synthesized
ccgucaccgaaucggacacucau

SEQ ID NO: 27348 - RNA, 23 nt, artificial
  Chemically synthesized
gccaugauggacaagcgaaucag

SEQ ID NO: 27349 - RNA, 23 nt, artificial
  Chemically synthesized
ggccaugauggacaagcgaauca

SEQ ID NO: 27350 - RNA, 23 nt, artificial
  Chemically synthesized
uggccaugauggacaagcgaauc

SEQ ID NO: 27351 - RNA, 23 nt, artificial
  Chemically synthesized
guggccaugauggacaagcgaau

SEQ ID NO: 27352 - RNA, 23 nt, artificial
  Chemically synthesized
ggacaagcgaaucagugaacugc

SEQ ID NO: 27353 - RNA, 23 nt, artificial
  Chemically synthesized
uggacaagcgaaucagugaacug

SEQ ID NO: 27354 - RNA, 23 nt, artificial
  Chemically synthesized
auggacaagcgaaucagugaacu

SEQ ID NO: 27355 - RNA, 23 nt, artificial
  Chemically synthesized
agauccaaauccgcuaaugaugg

SEQ ID NO: 27356 - RNA, 23 nt, artificial
  Chemically synthesized
aagauccaaauccgcuaaugaug

SEQ ID NO: 27357 - RNA, 23 nt, artificial
  Chemically synthesized
agcggcgguggaguuaaaaagac

SEQ ID NO: 27358 - RNA, 23 nt, artificial
  Chemically synthesized
ccagcggcgguggaguuaaaaag

SEQ ID NO: 27359 - RNA, 23 nt, artificial
  Chemically synthesized
acagcguccacaaugugaauccu

SEQ ID NO: 27360 - RNA, 23 nt, artificial
  Chemically synthesized
gacagcguccacaaugugaaucc

SEQ ID NO: 27361 - RNA, 23 nt, artificial
  Chemically synthesized
agacagcguccacaaugugaauc

SEQ ID NO: 27362 - RNA, 23 nt, artificial
  Chemically synthesized
ccauuaagaagucccauaacccc

SEQ ID NO: 27363 - RNA, 23 nt, artificial
  Chemically synthesized
gccauuaagaagucccauaaccc

SEQ ID NO: 27364 - RNA, 23 nt, artificial
  Chemically synthesized
ugccauuaagaagucccauaacc

SEQ ID NO: 27365 - RNA, 23 nt, artificial
  Chemically synthesized
uugccauuaagaagucccauaac

SEQ ID NO: 27366 - RNA, 23 nt, artificial
  Chemically synthesized
cuugccauuaagaagucccauaa

SEQ ID NO: 27367 - RNA, 23 nt, artificial
  Chemically synthesized
guacagacugcaauuuuaagggu

SEQ ID NO: 27368 - RNA, 23 nt, artificial
  Chemically synthesized
aguacagacugcaauuuuaaggg

SEQ ID NO: 27369 - RNA, 23 nt, artificial
  Chemically synthesized
aaguacagacugcaauuuuaagg

SEQ ID NO: 27370 - RNA, 23 nt, artificial
  Chemically synthesized
caacuuaaccaggaacaaaauuc

SEQ ID NO: 27371 - RNA, 23 nt, artificial
  Chemically synthesized
ccaacuugaagaagcccaacucg

SEQ ID NO: 27372 - RNA, 23 nt, artificial
  Chemically synthesized
accaacuugaagaagcccaacuc

SEQ ID NO: 27373 - RNA, 23 nt, artificial
  Chemically synthesized
gaccaacuugaagaagcccaacu

SEQ ID NO: 27374 - RNA, 23 nt, artificial
  Chemically synthesized
ggaccaacuugaagaagcccaac

SEQ ID NO: 27375 - RNA, 23 nt, artificial
  Chemically synthesized
agaacaagcugaagaaaauucgu

SEQ ID NO: 27376 - RNA, 23 nt, artificial
  Chemically synthesized
gagaacaagcugaagaaaauucg

SEQ ID NO: 27377 - RNA, 23 nt, artificial
  Chemically synthesized
caagucgacuacagcaaaaucau

SEQ ID NO: 27378 - RNA, 23 nt, artificial
  Chemically synthesized
acaagucgacuacagcaaaauca

SEQ ID NO: 27379 - RNA, 23 nt, artificial
  Chemically synthesized
gacaagucgacuacagcaaaauc

SEQ ID NO: 27380 - RNA, 23 nt, artificial
  Chemically synthesized
gggaaaugaacgucccauacccu

SEQ ID NO: 27381 - RNA, 23 nt, artificial
  Chemically synthesized
ggggaaaugaacgucccauaccc

SEQ ID NO: 27382 - RNA, 23 nt, artificial
  Chemically synthesized
aggggaaaugaacgucccauacc

SEQ ID NO: 27383 - RNA, 23 nt, artificial
  Chemically synthesized
gaggggaaaugaacgucccauac

SEQ ID NO: 27384 - RNA, 23 nt, artificial
  Chemically synthesized
ggaggggaaaugaacgucccaua

SEQ ID NO: 27385 - RNA, 23 nt, artificial
  Chemically synthesized
aaccauaagcgacauugaaacug

SEQ ID NO: 27386 - RNA, 23 nt, artificial
  Chemically synthesized
gccugaacuuccuuuuggagcac

SEQ ID NO: 27387 - RNA, 23 nt, artificial
  Chemically synthesized
cgccugaacuuccuuuuggagca

SEQ ID NO: 27388 - RNA, 23 nt, artificial
  Chemically synthesized
ucgccugaacuuccuuuuggagc

SEQ ID NO: 27389 - RNA, 23 nt, artificial
  Chemically synthesized
cucgccugaacuuccuuuuggag

SEQ ID NO: 27390 - RNA, 23 nt, artificial
  Chemically synthesized
acucgccugaacuuccuuuugga

SEQ ID NO: 27391 - RNA, 23 nt, artificial
  Chemically synthesized
gaaaauucgugcaaugagaggac

SEQ ID NO: 27392 - RNA, 23 nt, artificial
  Chemically synthesized
agaaaauucgugcaaugagagga

SEQ ID NO: 27393 - RNA, 23 nt, artificial
  Chemically synthesized
aagaaaauucgugcaaugagagg

SEQ ID NO: 27394 - RNA, 23 nt, artificial
  Chemically synthesized
gaagaaaauucgugcaaugagag

SEQ ID NO: 27395 - RNA, 23 nt, artificial
  Chemically synthesized
ccccgcgaugaugccgaugauau

SEQ ID NO: 27396 - RNA, 23 nt, artificial
  Chemically synthesized
uccccgcgaugaugccgaugaua

SEQ ID NO: 27397 - RNA, 23 nt, artificial
  Chemically synthesized
uugagcaacaaugaacagauuuu

SEQ ID NO: 27398 - RNA, 23 nt, artificial
  Chemically synthesized
cuugagcaacaaugaacagauuu

SEQ ID NO: 27399 - RNA, 23 nt, artificial
  Chemically synthesized
ucuugagcaacaaugaacagauu

SEQ ID NO: 27400 - RNA, 23 nt, artificial
  Chemically synthesized
aacugagaacagugaacaaggug

SEQ ID NO: 27401 - RNA, 23 nt, artificial
  Chemically synthesized
caacugagaacagugaacaaggu

SEQ ID NO: 27402 - RNA, 23 nt, artificial
  Chemically synthesized
ccaacugagaacagugaacaagg

SEQ ID NO: 27403 - RNA, 23 nt, artificial
  Chemically synthesized
cccaacugagaacagugaacaag

SEQ ID NO: 27404 - RNA, 23 nt, artificial
  Chemically synthesized
ccccaacugagaacagugaacaa

SEQ ID NO: 27405 - RNA, 23 nt, artificial
  Chemically synthesized
gagaaaaacguacugaaaauggg

SEQ ID NO: 27406 - RNA, 23 nt, artificial
  Chemically synthesized
uguaaaugugcacaauaaacccg

SEQ ID NO: 27407 - RNA, 23 nt, artificial
  Chemically synthesized
ccacaaugugaauccuacaguuu

SEQ ID NO: 27408 - RNA, 23 nt, artificial
  Chemically synthesized
uccacaaugugaauccuacaguu

SEQ ID NO: 27409 - RNA, 23 nt, artificial
  Chemically synthesized
guccacaaugugaauccuacagu

SEQ ID NO: 27410 - RNA, 23 nt, artificial
  Chemically synthesized
uggaagauccaaauccgcuaaug

SEQ ID NO: 27411 - RNA, 23 nt, artificial
  Chemically synthesized
auggaagauccaaauccgcuaau

SEQ ID NO: 27412 - RNA, 23 nt, artificial
  Chemically synthesized
acuacagauucguaaccaacuua

SEQ ID NO: 27413 - RNA, 23 nt, artificial
  Chemically synthesized
aacuacagauucguaaccaacuu

SEQ ID NO: 27414 - RNA, 23 nt, artificial
  Chemically synthesized
agaacuacagauucguaaccaac

SEQ ID NO: 27415 - RNA, 23 nt, artificial
  Chemically synthesized
aagaacuacagauucguaaccaa

SEQ ID NO: 27416 - RNA, 23 nt, artificial
  Chemically synthesized
gaaagcugcagcuagaaaauggu

SEQ ID NO: 27417 - RNA, 23 nt, artificial
  Chemically synthesized
ggaaagcugcagcuagaaaaugg

SEQ ID NO: 27418 - RNA, 23 nt, artificial
  Chemically synthesized
aggaaagcugcagcuagaaaaug

SEQ ID NO: 27419 - RNA, 23 nt, artificial
  Chemically synthesized
gccgauguggacaauggaaacac

SEQ ID NO: 27420 - RNA, 23 nt, artificial
  Chemically synthesized
ggccgauguggacaauggaaaca

SEQ ID NO: 27421 - RNA, 23 nt, artificial
  Chemically synthesized
uggccgauguggacaauggaaac

SEQ ID NO: 27422 - RNA, 23 nt, artificial
  Chemically synthesized
uuggccgauguggacaauggaaa

SEQ ID NO: 27423 - RNA, 23 nt, artificial
  Chemically synthesized
uuugccaauuacuauaaauccaa

SEQ ID NO: 27424 - RNA, 23 nt, artificial
  Chemically synthesized
aggaaaagaagcaggaaguacag

SEQ ID NO: 27425 - RNA, 23 nt, artificial
  Chemically synthesized
ccaggaaaagaagcaggaaguac

SEQ ID NO: 27426 - RNA, 23 nt, artificial
  Chemically synthesized
uccaggaaaagaagcaggaagua

SEQ ID NO: 27427 - RNA, 23 nt, artificial
  Chemically synthesized
gaguugaagcccaggagaacaag

SEQ ID NO: 27428 - RNA, 23 nt, artificial
  Chemically synthesized
acgaguugaagcccaggagaaca

SEQ ID NO: 27429 - RNA, 23 nt, artificial
  Chemically synthesized
aacgaguugaagcccaggagaac

SEQ ID NO: 27430 - RNA, 23 nt, artificial
  Chemically synthesized
gcuguauccacggaucaaacccc

SEQ ID NO: 27431 - RNA, 23 nt, artificial
  Chemically synthesized
gggacauacccaaguccuacacc

SEQ ID NO: 27432 - RNA, 23 nt, artificial
  Chemically synthesized
ugggacauacccaaguccuacac

SEQ ID NO: 27433 - RNA, 23 nt, artificial
  Chemically synthesized
uaugggacauacccaaguccuac

SEQ ID NO: 27434 - RNA, 23 nt, artificial
  Chemically synthesized
agcggaccaacuugaagaagccc

SEQ ID NO: 27435 - RNA, 23 nt, artificial
  Chemically synthesized
aagcggaccaacuugaagaagcc

SEQ ID NO: 27436 - RNA, 23 nt, artificial
  Chemically synthesized
caagcggaccaacuugaagaagc

SEQ ID NO: 27437 - RNA, 23 nt, artificial
  Chemically synthesized
acaagcggaccaacuugaagaag

SEQ ID NO: 27438 - RNA, 23 nt, artificial
  Chemically synthesized
aacaagcggaccaacuugaagaa

SEQ ID NO: 27439 - RNA, 23 nt, artificial
  Chemically synthesized
gcgacauugaaacugcugcagac

SEQ ID NO: 27440 - RNA, 23 nt, artificial
  Chemically synthesized
agcgacauugaaacugcugcaga

SEQ ID NO: 27441 - RNA, 23 nt, artificial
  Chemically synthesized
aagcgacauugaaacugcugcag

SEQ ID NO: 27442 - RNA, 23 nt, artificial
  Chemically synthesized
uaagcgacauugaaacugcugca

SEQ ID NO: 27443 - RNA, 23 nt, artificial
  Chemically synthesized
cucucaguauugccucaaaugcu

SEQ ID NO: 27444 - RNA, 23 nt, artificial
  Chemically synthesized
ucucucaguauugccucaaaugc

SEQ ID NO: 27445 - RNA, 23 nt, artificial
  Chemically synthesized
gucucucaguauugccucaaaug

SEQ ID NO: 27446 - RNA, 23 nt, artificial
  Chemically synthesized
agucucucaguauugccucaaau

SEQ ID NO: 27447 - RNA, 23 nt, artificial
  Chemically synthesized
acccaagagcaacgaacucagag

SEQ ID NO: 27448 - RNA, 23 nt, artificial
  Chemically synthesized
cagaaaguacugagaaagagccu

SEQ ID NO: 27449 - RNA, 23 nt, artificial
  Chemically synthesized
ucagaaaguacugagaaagagcc

SEQ ID NO: 27450 - RNA, 23 nt, artificial
  Chemically synthesized
uucagaaaguacugagaaagagc

SEQ ID NO: 27451 - RNA, 23 nt, artificial
  Chemically synthesized
cuucagaaaguacugagaaagag

SEQ ID NO: 27452 - RNA, 23 nt, artificial
  Chemically synthesized
uuccaggaaaagaagcaggaagu

SEQ ID NO: 27453 - RNA, 23 nt, artificial
  Chemically synthesized
guuccaggaaaagaagcaggaag

SEQ ID NO: 27454 - RNA, 23 nt, artificial
  Chemically synthesized
uguuccaggaaaagaagcaggaa

SEQ ID NO: 27455 - RNA, 23 nt, artificial
  Chemically synthesized
ugggaauccacguguugaacuua

SEQ ID NO: 27456 - RNA, 23 nt, artificial
  Chemically synthesized
uugggaauccacguguugaacuu

SEQ ID NO: 27457 - RNA, 23 nt, artificial
  Chemically synthesized
guugggaauccacguguugaacu

SEQ ID NO: 27458 - RNA, 23 nt, artificial
  Chemically synthesized
gguugggaauccacguguugaac

SEQ ID NO: 27459 - RNA, 23 nt, artificial
  Chemically synthesized
aagugaacgcccuuguagagcag

SEQ ID NO: 27460 - RNA, 23 nt, artificial
  Chemically synthesized
aaagugaacgcccuuguagagca

SEQ ID NO: 27461 - RNA, 23 nt, artificial
  Chemically synthesized
aaaagugaacgcccuuguagagc

SEQ ID NO: 27462 - RNA, 23 nt, artificial
  Chemically synthesized
gaaaagugaacgcccuuguagag

SEQ ID NO: 27463 - RNA, 23 nt, artificial
  Chemically synthesized
aaaugaaaagcuucagaaauuga

SEQ ID NO: 27464 - RNA, 23 nt, artificial
  Chemically synthesized
aaaaugaaaagcuucagaaauug

SEQ ID NO: 27465 - RNA, 23 nt, artificial
  Chemically synthesized
gaaaaugaaaagcuucagaaauu

SEQ ID NO: 27466 - RNA, 23 nt, artificial
  Chemically synthesized
ugaaaaugaaaagcuucagaaau

SEQ ID NO: 27467 - RNA, 23 nt, artificial
  Chemically synthesized
cugaaaaugaaaagcuucagaaa

SEQ ID NO: 27468 - RNA, 23 nt, artificial
  Chemically synthesized
gcuuagucagcaauuggaagauu

SEQ ID NO: 27469 - RNA, 23 nt, artificial
  Chemically synthesized
agcuuagucagcaauuggaagau

SEQ ID NO: 27470 - RNA, 23 nt, artificial
  Chemically synthesized
ucagcuuagucagcaauuggaag

SEQ ID NO: 27471 - RNA, 23 nt, artificial
  Chemically synthesized
aucagcuuagucagcaauuggaa

SEQ ID NO: 27472 - RNA, 23 nt, artificial
  Chemically synthesized
gagcaacgaacucagagaaaugu

SEQ ID NO: 27473 - RNA, 23 nt, artificial
  Chemically synthesized
agagcaacgaacucagagaaaug

SEQ ID NO: 27474 - RNA, 23 nt, artificial
  Chemically synthesized
aagagcaacgaacucagagaaau

SEQ ID NO: 27475 - RNA, 23 nt, artificial
  Chemically synthesized
ugaacagauuuuaacagaaguuc

SEQ ID NO: 27476 - RNA, 23 nt, artificial
  Chemically synthesized
augaacagauuuuaacagaaguu

SEQ ID NO: 27477 - RNA, 23 nt, artificial
  Chemically synthesized
aaugaacagauuuuaacagaagu

SEQ ID NO: 27478 - RNA, 23 nt, artificial
  Chemically synthesized
acaaugaacagauuuuaacagaa

SEQ ID NO: 27479 - RNA, 23 nt, artificial
  Chemically synthesized
agcaacaaugaacagauuuuaac

SEQ ID NO: 27480 - RNA, 23 nt, artificial
  Chemically synthesized
aacaaugaacagauuuuaacaga

SEQ ID NO: 27481 - RNA, 23 nt, artificial
  Chemically synthesized
agagaaauguaauaaauguaccu

SEQ ID NO: 27482 - RNA, 23 nt, artificial
  Chemically synthesized
ucagagaaauguaauaaauguac

SEQ ID NO: 27483 - RNA, 23 nt, artificial
  Chemically synthesized
gcugaaauagaaagguucagugc

SEQ ID NO: 27484 - RNA, 23 nt, artificial
  Chemically synthesized
ugcugaaauagaaagguucagug

SEQ ID NO: 27485 - RNA, 23 nt, artificial
  Chemically synthesized
cugcugaaauagaaagguucagu

SEQ ID NO: 27486 - RNA, 23 nt, artificial
  Chemically synthesized
ucugcugaaauagaaagguucag

SEQ ID NO: 27487 - RNA, 23 nt, artificial
  Chemically synthesized
cagcguucaccucugcaaacagc

SEQ ID NO: 27488 - RNA, 23 nt, artificial
  Chemically synthesized
acagcguucaccucugcaaacag

SEQ ID NO: 27489 - RNA, 23 nt, artificial
  Chemically synthesized
aacagcguucaccucugcaaaca

SEQ ID NO: 27490 - RNA, 23 nt, artificial
  Chemically synthesized
uaacagcguucaccucugcaaac

SEQ ID NO: 27491 - RNA, 23 nt, artificial
  Chemically synthesized
acuguuuucuugagcaacaauga

SEQ ID NO: 27492 - RNA, 23 nt, artificial
  Chemically synthesized
aacuguuuucuugagcaacaaug

SEQ ID NO: 27493 - RNA, 23 nt, artificial
  Chemically synthesized
uaacuguuuucuugagcaacaau

SEQ ID NO: 27494 - RNA, 23 nt, artificial
  Chemically synthesized
uuaacuguuuucuugagcaacaa

SEQ ID NO: 27495 - RNA, 23 nt, artificial
  Chemically synthesized
gagguacuuucgccuccaaggac

SEQ ID NO: 27496 - RNA, 23 nt, artificial
  Chemically synthesized
gagagguacuuucgccuccaagg

SEQ ID NO: 27497 - RNA, 23 nt, artificial
  Chemically synthesized
ggagagguacuuucgccuccaag

SEQ ID NO: 27498 - RNA, 23 nt, artificial
  Chemically synthesized
gggagagguacuuucgccuccaa

SEQ ID NO: 27499 - RNA, 23 nt, artificial
  Chemically synthesized
aaagcuucagaaauugaaagaac

SEQ ID NO: 27500 - RNA, 23 nt, artificial
  Chemically synthesized
aaaagcuucagaaauugaaagaa

SEQ ID NO: 27501 - RNA, 23 nt, artificial
  Chemically synthesized
ugaaaagcuucagaaauugaaag

SEQ ID NO: 27502 - RNA, 23 nt, artificial
  Chemically synthesized
augaaaagcuucagaaauugaaa

SEQ ID NO: 27503 - RNA, 23 nt, artificial
  Chemically synthesized
ccacgaacaagcggaccaacuug

SEQ ID NO: 27504 - RNA, 23 nt, artificial
  Chemically synthesized
uccacgaacaagcggaccaacuu

SEQ ID NO: 27505 - RNA, 23 nt, artificial
  Chemically synthesized
cagacccaagagcaacgaacuca

SEQ ID NO: 27506 - RNA, 23 nt, artificial
  Chemically synthesized
ucagacccaagagcaacgaacuc

SEQ ID NO: 27507 - RNA, 23 nt, artificial
  Chemically synthesized
gucagacccaagagcaacgaacu

SEQ ID NO: 27508 - RNA, 23 nt, artificial
  Chemically synthesized
cgucagacccaagagcaacgaac

SEQ ID NO: 27509 - RNA, 23 nt, artificial
  Chemically synthesized
ccgucagacccaagagcaacgaa

SEQ ID NO: 27510 - RNA, 23 nt, artificial
  Chemically synthesized
aagacuguaccaagaacuacaga

SEQ ID NO: 27511 - RNA, 23 nt, artificial
  Chemically synthesized
aaagacuguaccaagaacuacag

SEQ ID NO: 27512 - RNA, 23 nt, artificial
  Chemically synthesized
agauuuaaagaaaggaaaacuga

SEQ ID NO: 27513 - RNA, 23 nt, artificial
  Chemically synthesized
aagauuuaaagaaaggaaaacug

SEQ ID NO: 27514 - RNA, 23 nt, artificial
  Chemically synthesized
gaagauuuaaagaaaggaaaacu

SEQ ID NO: 27515 - RNA, 23 nt, artificial
  Chemically synthesized
uggaagauuuaaagaaaggaaaa

SEQ ID NO: 27516 - RNA, 23 nt, artificial
  Chemically synthesized
ucguaaccaacuuaaccaggaac

SEQ ID NO: 27517 - RNA, 23 nt, artificial
  Chemically synthesized
uucguaaccaacuuaaccaggaa

SEQ ID NO: 27518 - RNA, 23 nt, artificial
  Chemically synthesized
uuggaagauuuaaagaaaggaaa

SEQ ID NO: 27519 - RNA, 23 nt, artificial
  Chemically synthesized
auuggaagauuuaaagaaaggaa

SEQ ID NO: 27520 - RNA, 23 nt, artificial
  Chemically synthesized
acggagggaagaagugaaauuuu

SEQ ID NO: 27521 - RNA, 23 nt, artificial
  Chemically synthesized
ccuggaaaggaggaaggaaggca

SEQ ID NO: 27522 - RNA, 23 nt, artificial
  Chemically synthesized
cccuggaaaggaggaaggaaggc

SEQ ID NO: 27523 - RNA, 23 nt, artificial
  Chemically synthesized
ucccuggaaaggaggaaggaagg

SEQ ID NO: 27524 - RNA, 23 nt, artificial
  Chemically synthesized
cucccuggaaaggaggaaggaag

SEQ ID NO: 27525 - RNA, 23 nt, artificial
  Chemically synthesized
gcucccuggaaaggaggaaggaa

SEQ ID NO: 27526 - RNA, 23 nt, artificial
  Chemically synthesized
ucuccaguuugcccauuaacugg

SEQ ID NO: 27527 - RNA, 23 nt, artificial
  Chemically synthesized
uucuccaguuugcccauuaacug

SEQ ID NO: 27528 - RNA, 23 nt, artificial
  Chemically synthesized
uuucuccaguuugcccauuaacu

SEQ ID NO: 27529 - RNA, 23 nt, artificial
  Chemically synthesized
cuuucuccaguuugcccauuaac

SEQ ID NO: 27530 - RNA, 23 nt, artificial
  Chemically synthesized
uaaagaaaggaaaacugaauggg

SEQ ID NO: 27531 - RNA, 23 nt, artificial
  Chemically synthesized
uuaaagaaaggaaaacugaaugg

SEQ ID NO: 27532 - RNA, 23 nt, artificial
  Chemically synthesized
uuuaaagaaaggaaaacugaaug

SEQ ID NO: 27533 - RNA, 23 nt, artificial
  Chemically synthesized
auuuaaagaaaggaaaacugaau

SEQ ID NO: 27534 - RNA, 23 nt, artificial
  Chemically synthesized
gauuuaaagaaaggaaaacugaa

SEQ ID NO: 27535 - RNA, 23 nt, artificial
  Chemically synthesized
gggaagaagugaaauuuuuccuu

SEQ ID NO: 27536 - RNA, 23 nt, artificial
  Chemically synthesized
agggaagaagugaaauuuuuccu

SEQ ID NO: 27537 - RNA, 23 nt, artificial
  Chemically synthesized
gagggaagaagugaaauuuuucc

SEQ ID NO: 27538 - RNA, 23 nt, artificial
  Chemically synthesized
ggagggaagaagugaaauuuuuc

SEQ ID NO: 27539 - RNA, 23 nt, artificial
  Chemically synthesized
caagaacuacagauucguaacca

SEQ ID NO: 27540 - RNA, 23 nt, artificial
  Chemically synthesized
ccaagaacuacagauucguaacc

SEQ ID NO: 27541 - RNA, 23 nt, artificial
  Chemically synthesized
accaagaacuacagauucguaac

SEQ ID NO: 27542 - RNA, 23 nt, artificial
  Chemically synthesized
uuguacguacaggcuuuuuauau

SEQ ID NO: 27543 - RNA, 23 nt, artificial
  Chemically synthesized
auuguacguacaggcuuuuuaua

SEQ ID NO: 27544 - RNA, 23 nt, artificial
  Chemically synthesized
agcaauuggaagauuuaaagaaa

SEQ ID NO: 27545 - RNA, 23 nt, artificial
  Chemically synthesized
ccuaaaggcugauugugcaggcc

SEQ ID NO: 27546 - RNA, 23 nt, artificial
  Chemically synthesized
accuaaaggcugauugugcaggc

SEQ ID NO: 27547 - RNA, 23 nt, artificial
  Chemically synthesized
caccuaaaggcugauugugcagg

SEQ ID NO: 27548 - RNA, 23 nt, artificial
  Chemically synthesized
ucaccuaaaggcugauugugcag

SEQ ID NO: 27549 - RNA, 23 nt, artificial
  Chemically synthesized
uucaccuaaaggcugauugugca

SEQ ID NO: 27550 - RNA, 23 nt, artificial
  Chemically synthesized
gcagcagauugaaaaucagcagc

SEQ ID NO: 27551 - RNA, 23 nt, artificial
  Chemically synthesized
agcagcagauugaaaaucagcag

SEQ ID NO: 27552 - RNA, 23 nt, artificial
  Chemically synthesized
acagcagcagauugaaaaucagc

SEQ ID NO: 27553 - RNA, 23 nt, artificial
  Chemically synthesized
aacagcagcagauugaaaaucag

SEQ ID NO: 27554 - RNA, 23 nt, artificial
  Chemically synthesized
caaugugaauccuacaguuucca

SEQ ID NO: 27555 - RNA, 23 nt, artificial
  Chemically synthesized
acaaugugaauccuacaguuucc

SEQ ID NO: 27556 - RNA, 23 nt, artificial
  Chemically synthesized
cacaaugugaauccuacaguuuc

SEQ ID NO: 27557 - RNA, 23 nt, artificial
  Chemically synthesized
ugaucagcuuagucagcaauugg

SEQ ID NO: 27558 - RNA, 23 nt, artificial
  Chemically synthesized
uugaucagcuuagucagcaauug

SEQ ID NO: 27559 - RNA, 23 nt, artificial
  Chemically synthesized
uggacaauggaaacaccaaugcc

SEQ ID NO: 27560 - RNA, 23 nt, artificial
  Chemically synthesized
guggacaauggaaacaccaaugc

SEQ ID NO: 27561 - RNA, 23 nt, artificial
  Chemically synthesized
uguggacaauggaaacaccaaug

SEQ ID NO: 27562 - RNA, 23 nt, artificial
  Chemically synthesized
auguggacaauggaaacaccaau

SEQ ID NO: 27563 - RNA, 23 nt, artificial
  Chemically synthesized
ccgagccggcagaggacaauaac

SEQ ID NO: 27564 - RNA, 23 nt, artificial
  Chemically synthesized
gccgagccggcagaggacaauaa

SEQ ID NO: 27565 - RNA, 23 nt, artificial
  Chemically synthesized
aauuggaagauuuaaagaaagga

SEQ ID NO: 27566 - RNA, 23 nt, artificial
  Chemically synthesized
caauuggaagauuuaaagaaagg

SEQ ID NO: 27567 - RNA, 23 nt, artificial
  Chemically synthesized
ccuauaacaccggaaacaaccug

SEQ ID NO: 27568 - RNA, 23 nt, artificial
  Chemically synthesized
uccuauaacaccggaaacaaccu

SEQ ID NO: 27569 - RNA, 23 nt, artificial
  Chemically synthesized
uuccuauaacaccggaaacaacc

SEQ ID NO: 27570 - RNA, 23 nt, artificial
  Chemically synthesized
guuccuauaacaccggaaacaac

SEQ ID NO: 27571 - RNA, 23 nt, artificial
  Chemically synthesized
gaaagagccugagcaggauggcc

SEQ ID NO: 27572 - RNA, 23 nt, artificial
  Chemically synthesized
agaaagagccugagcaggauggc

SEQ ID NO: 27573 - RNA, 23 nt, artificial
  Chemically synthesized
gagaaagagccugagcaggaugg

SEQ ID NO: 27574 - RNA, 23 nt, artificial
  Chemically synthesized
ugagaaagagccugagcaggaug

SEQ ID NO: 27575 - RNA, 23 nt, artificial
  Chemically synthesized
agaaaaacguacugaaaaugggg

SEQ ID NO: 27576 - RNA, 23 nt, artificial
  Chemically synthesized
caccaaaggagccucuguaugga

SEQ ID NO: 27577 - RNA, 23 nt, artificial
  Chemically synthesized
ucaccaaaggagccucuguaugg

SEQ ID NO: 27578 - RNA, 23 nt, artificial
  Chemically synthesized
aucaccaaaggagccucuguaug

SEQ ID NO: 27579 - RNA, 23 nt, artificial
  Chemically synthesized
caucaccaaaggagccucuguau

SEQ ID NO: 27580 - RNA, 23 nt, artificial
  Chemically synthesized
cagugaagacagaagcucuuacu

SEQ ID NO: 27581 - RNA, 23 nt, artificial
  Chemically synthesized
ccagugaagacagaagcucuuac

SEQ ID NO: 27582 - RNA, 23 nt, artificial
  Chemically synthesized
gccagugaagacagaagcucuua

SEQ ID NO: 27583 - RNA, 23 nt, artificial
  Chemically synthesized
ugccagugaagacagaagcucuu

SEQ ID NO: 27584 - RNA, 23 nt, artificial
  Chemically synthesized
uugccagugaagacagaagcucu

SEQ ID NO: 27585 - RNA, 23 nt, artificial
  Chemically synthesized
cucuauuuuucauguaugagucg

SEQ ID NO: 27586 - RNA, 23 nt, artificial
  Chemically synthesized
gcucuauuuuucauguaugaguc

SEQ ID NO: 27587 - RNA, 23 nt, artificial
  Chemically synthesized
aggcucuauuuuucauguaugag

SEQ ID NO: 27588 - RNA, 23 nt, artificial
  Chemically synthesized
gaucaucuaugagguggaagauc

SEQ ID NO: 27589 - RNA, 23 nt, artificial
  Chemically synthesized
gaggaucaucuaugagguggaag

SEQ ID NO: 27590 - RNA, 23 nt, artificial
  Chemically synthesized
gcucauggaagauccaaauccgc

SEQ ID NO: 27591 - RNA, 23 nt, artificial
  Chemically synthesized
ugcucauggaagauccaaauccg

SEQ ID NO: 27592 - RNA, 23 nt, artificial
  Chemically synthesized
cugcucauggaagauccaaaucc

SEQ ID NO: 27593 - RNA, 23 nt, artificial
  Chemically synthesized
gcugcucauggaagauccaaauc

SEQ ID NO: 27594 - RNA, 23 nt, artificial
  Chemically synthesized
uguagaauuuugcaaggaaccug

SEQ ID NO: 27595 - RNA, 23 nt, artificial
  Chemically synthesized
uuguagaauuuugcaaggaaccu

SEQ ID NO: 27596 - RNA, 23 nt, artificial
  Chemically synthesized
guuguagaauuuugcaaggaacc

SEQ ID NO: 27597 - RNA, 23 nt, artificial
  Chemically synthesized
cucucagagcuccaagauauggc

SEQ ID NO: 27598 - RNA, 23 nt, artificial
  Chemically synthesized
ccucucagagcuccaagauaugg

SEQ ID NO: 27599 - RNA, 23 nt, artificial
  Chemically synthesized
cccucucagagcuccaagauaug

SEQ ID NO: 27600 - RNA, 23 nt, artificial
  Chemically synthesized
acccucucagagcuccaagauau

SEQ ID NO: 27601 - RNA, 23 nt, artificial
  Chemically synthesized
uacccucucagagcuccaagaua

SEQ ID NO: 27602 - RNA, 23 nt, artificial
  Chemically synthesized
ugcgugaacgucucuaugggaaa

SEQ ID NO: 27603 - RNA, 23 nt, artificial
  Chemically synthesized
acugcgugaacgucucuauggga

SEQ ID NO: 27604 - RNA, 23 nt, artificial
  Chemically synthesized
auggguuccagucuuacaauggc

SEQ ID NO: 27605 - RNA, 23 nt, artificial
  Chemically synthesized
aauggguuccagucuuacaaugg

SEQ ID NO: 27606 - RNA, 23 nt, artificial
  Chemically synthesized
gaauggguuccagucuuacaaug

SEQ ID NO: 27607 - RNA, 23 nt, artificial
  Chemically synthesized
ugaauggguuccagucuuacaau

SEQ ID NO: 27608 - RNA, 23 nt, artificial
  Chemically synthesized
ucgacaagcucccuggaaaggag

SEQ ID NO: 27609 - RNA, 23 nt, artificial
  Chemically synthesized
gucgacaagcucccuggaaagga

SEQ ID NO: 27610 - RNA, 23 nt, artificial
  Chemically synthesized
ggucgacaagcucccuggaaagg

SEQ ID NO: 27611 - RNA, 23 nt, artificial
  Chemically synthesized
gggucgacaagcucccuggaaag

SEQ ID NO: 27612 - RNA, 23 nt, artificial
  Chemically synthesized
ugggucgacaagcucccuggaaa

SEQ ID NO: 27613 - RNA, 23 nt, artificial
  Chemically synthesized
cagacucacugaugcagcacugu

SEQ ID NO: 27614 - RNA, 23 nt, artificial
  Chemically synthesized
acagacucacugaugcagcacug

SEQ ID NO: 27615 - RNA, 23 nt, artificial
  Chemically synthesized
uacagacucacugaugcagcacu

SEQ ID NO: 27616 - RNA, 23 nt, artificial
  Chemically synthesized
guacagacucacugaugcagcac

SEQ ID NO: 27617 - RNA, 23 nt, artificial
  Chemically synthesized
uguacagacucacugaugcagca

SEQ ID NO: 27618 - RNA, 23 nt, artificial
  Chemically synthesized
cccagacagugaauucaaguucc

SEQ ID NO: 27619 - RNA, 23 nt, artificial
  Chemically synthesized
ccccagacagugaauucaaguuc

SEQ ID NO: 27620 - RNA, 23 nt, artificial
  Chemically synthesized
accccagacagugaauucaaguu

SEQ ID NO: 27621 - RNA, 23 nt, artificial
  Chemically synthesized
gaccccagacagugaauucaagu

SEQ ID NO: 27622 - RNA, 23 nt, artificial
  Chemically synthesized
ggaccccagacagugaauucaag

SEQ ID NO: 27623 - RNA, 23 nt, artificial
  Chemically synthesized
cagugcucccaguuucuauaugg

SEQ ID NO: 27624 - RNA, 23 nt, artificial
  Chemically synthesized
ccagugcucccaguuucuauaug

SEQ ID NO: 27625 - RNA, 23 nt, artificial
  Chemically synthesized
uccagugcucccaguuucuauau

SEQ ID NO: 27626 - RNA, 23 nt, artificial
  Chemically synthesized
auccagugcucccaguuucuaua

SEQ ID NO: 27627 - RNA, 23 nt, artificial
  Chemically synthesized
uccccaacugagaacagugaaca

SEQ ID NO: 27628 - RNA, 23 nt, artificial
  Chemically synthesized
cuccccaacugagaacagugaac

SEQ ID NO: 27629 - RNA, 23 nt, artificial
  Chemically synthesized
acuccccaacugagaacagugaa

SEQ ID NO: 27630 - RNA, 23 nt, artificial
  Chemically synthesized
augauggacaagcgaaucaguga

SEQ ID NO: 27631 - RNA, 23 nt, artificial
  Chemically synthesized
caugauggacaagcgaaucagug

SEQ ID NO: 27632 - RNA, 23 nt, artificial
  Chemically synthesized
aacagaaguuccuauaacaccgg

SEQ ID NO: 27633 - RNA, 23 nt, artificial
  Chemically synthesized
uaacagaaguuccuauaacaccg

SEQ ID NO: 27634 - RNA, 23 nt, artificial
  Chemically synthesized
uuaacagaaguuccuauaacacc

SEQ ID NO: 27635 - RNA, 23 nt, artificial
  Chemically synthesized
uuuaacagaaguuccuauaacac

SEQ ID NO: 27636 - RNA, 23 nt, artificial
  Chemically synthesized
uuuuaacagaaguuccuauaaca

SEQ ID NO: 27637 - RNA, 23 nt, artificial
  Chemically synthesized
ugcagaggaucaucuaugaggug

SEQ ID NO: 27638 - RNA, 23 nt, artificial
  Chemically synthesized
gugcagaggaucaucuaugaggu

SEQ ID NO: 27639 - RNA, 23 nt, artificial
  Chemically synthesized
uggugcagaggaucaucuaugag

SEQ ID NO: 27640 - RNA, 23 nt, artificial
  Chemically synthesized
cuggugcagaggaucaucuauga

SEQ ID NO: 27641 - RNA, 23 nt, artificial
  Chemically synthesized
aagaaaagugaacgcccuuguag

SEQ ID NO: 27642 - RNA, 23 nt, artificial
  Chemically synthesized
ggugugaauuguacguacaggcu

SEQ ID NO: 27643 - RNA, 23 nt, artificial
  Chemically synthesized
aggugugaauuguacguacaggc

SEQ ID NO: 27644 - RNA, 23 nt, artificial
  Chemically synthesized
gaggugugaauuguacguacagg

SEQ ID NO: 27645 - RNA, 23 nt, artificial
  Chemically synthesized
ugaggugugaauuguacguacag

SEQ ID NO: 27646 - RNA, 23 nt, artificial
  Chemically synthesized
cauuuuugccucaaccauaagcg

SEQ ID NO: 27647 - RNA, 23 nt, artificial
  Chemically synthesized
ccauuuuugccucaaccauaagc

SEQ ID NO: 27648 - RNA, 23 nt, artificial
  Chemically synthesized
gccauuuuugccucaaccauaag

SEQ ID NO: 27649 - RNA, 23 nt, artificial
  Chemically synthesized
ccgauguggacaauggaaacacc

SEQ ID NO: 27650 - RNA, 23 nt, artificial
  Chemically synthesized
agaagcaggaaguacagacugca

SEQ ID NO: 27651 - RNA, 23 nt, artificial
  Chemically synthesized
agcuaugggacauacccaagucc

SEQ ID NO: 27652 - RNA, 23 nt, artificial
  Chemically synthesized
aagcuaugggacauacccaaguc

SEQ ID NO: 27653 - RNA, 23 nt, artificial
  Chemically synthesized
caagcuaugggacauacccaagu

SEQ ID NO: 27654 - RNA, 23 nt, artificial
  Chemically synthesized
ccaagcuaugggacauacccaag

SEQ ID NO: 27655 - RNA, 23 nt, artificial
  Chemically synthesized
uccaagcuaugggacauacccaa

SEQ ID NO: 27656 - RNA, 23 nt, artificial
  Chemically synthesized
ggaacaaaauucaaaacuucagc

SEQ ID NO: 27657 - RNA, 23 nt, artificial
  Chemically synthesized
aggaacaaaauucaaaacuucag

SEQ ID NO: 27658 - RNA, 23 nt, artificial
  Chemically synthesized
ucgugaaguuccugcuggauuuu

SEQ ID NO: 27659 - RNA, 23 nt, artificial
  Chemically synthesized
aucgugaaguuccugcuggauuu

SEQ ID NO: 27660 - RNA, 23 nt, artificial
  Chemically synthesized
acaucgugaaguuccugcuggau

SEQ ID NO: 27661 - RNA, 23 nt, artificial
  Chemically synthesized
cacaucgugaaguuccugcugga

SEQ ID NO: 27662 - RNA, 23 nt, artificial
  Chemically synthesized
ggacacucauccuuucucacacu

SEQ ID NO: 27663 - RNA, 23 nt, artificial
  Chemically synthesized
cggacacucauccuuucucacac

SEQ ID NO: 27664 - RNA, 23 nt, artificial
  Chemically synthesized
ucggacacucauccuuucucaca

SEQ ID NO: 27665 - RNA, 23 nt, artificial
  Chemically synthesized
aucggacacucauccuuucucac

SEQ ID NO: 27666 - RNA, 23 nt, artificial
  Chemically synthesized
aaucggacacucauccuuucuca

SEQ ID NO: 27667 - RNA, 23 nt, artificial
  Chemically synthesized
cgaacacucgccugaacuuccuu

SEQ ID NO: 27668 - RNA, 23 nt, artificial
  Chemically synthesized
gcgaacacucgccugaacuuccu

SEQ ID NO: 27669 - RNA, 23 nt, artificial
  Chemically synthesized
agcgaacacucgccugaacuucc

SEQ ID NO: 27670 - RNA, 23 nt, artificial
  Chemically synthesized
cagcgaacacucgccugaacuuc

SEQ ID NO: 27671 - RNA, 23 nt, artificial
  Chemically synthesized
acagcgaacacucgccugaacuu

SEQ ID NO: 27672 - RNA, 23 nt, artificial
  Chemically synthesized
uagcagacagcguccacaaugug

SEQ ID NO: 27673 - RNA, 23 nt, artificial
  Chemically synthesized
uuagcagacagcguccacaaugu

SEQ ID NO: 27674 - RNA, 23 nt, artificial
  Chemically synthesized
gucucuaugggaaaaaaauucag

SEQ ID NO: 27675 - RNA, 23 nt, artificial
  Chemically synthesized
aaaagaagcaggaaguacagacu

SEQ ID NO: 27676 - RNA, 23 nt, artificial
  Chemically synthesized
guaccuggagaaaaacguacuga

SEQ ID NO: 27677 - RNA, 23 nt, artificial
  Chemically synthesized
uguaccuggagaaaaacguacug

SEQ ID NO: 27678 - RNA, 23 nt, artificial
  Chemically synthesized
auguaccuggagaaaaacguacu

SEQ ID NO: 27679 - RNA, 23 nt, artificial
  Chemically synthesized
aauguaccuggagaaaaacguac

SEQ ID NO: 27680 - RNA, 23 nt, artificial
  Chemically synthesized
aauaaauacccacuuucaaaaca

SEQ ID NO: 27681 - RNA, 23 nt, artificial
  Chemically synthesized
aaauaaauacccacuuucaaaac

SEQ ID NO: 27682 - RNA, 23 nt, artificial
  Chemically synthesized
caaauaaauacccacuuucaaaa

SEQ ID NO: 27683 - RNA, 23 nt, artificial
  Chemically synthesized
guggaguuaaaaagacuguacca

SEQ ID NO: 27684 - RNA, 23 nt, artificial
  Chemically synthesized
accauaagcgacauugaaacugc

SEQ ID NO: 27685 - RNA, 23 nt, artificial
  Chemically synthesized
cuguuccaguucaccuaaaggcu

SEQ ID NO: 27686 - RNA, 23 nt, artificial
  Chemically synthesized
ccuguuccaguucaccuaaaggc

SEQ ID NO: 27687 - RNA, 23 nt, artificial
  Chemically synthesized
uccuguuccaguucaccuaaagg

SEQ ID NO: 27688 - RNA, 23 nt, artificial
  Chemically synthesized
uuccuguuccaguucaccuaaag

SEQ ID NO: 27689 - RNA, 23 nt, artificial
  Chemically synthesized
guaugguaagcccguuuuaccuu

SEQ ID NO: 27690 - RNA, 23 nt, artificial
  Chemically synthesized
uguaugguaagcccguuuuaccu

SEQ ID NO: 27691 - RNA, 23 nt, artificial
  Chemically synthesized
guguaugguaagcccguuuuacc

SEQ ID NO: 27692 - RNA, 23 nt, artificial
  Chemically synthesized
aguguaugguaagcccguuuuac

SEQ ID NO: 27693 - RNA, 23 nt, artificial
  Chemically synthesized
aaggaacagcguuuacauuuucu

SEQ ID NO: 27694 - RNA, 23 nt, artificial
  Chemically synthesized
aaaaagacuguaccaagaacuac

SEQ ID NO: 27695 - RNA, 23 nt, artificial
  Chemically synthesized
ccgggagggcuaugugcccaaaa

SEQ ID NO: 27696 - RNA, 23 nt, artificial
  Chemically synthesized
auuuuugccucaaccauaagcga

SEQ ID NO: 27697 - RNA, 23 nt, artificial
  Chemically synthesized
cccuaagaccaagugacaacugg

SEQ ID NO: 27698 - RNA, 23 nt, artificial
  Chemically synthesized
ccccuaagaccaagugacaacug

SEQ ID NO: 27699 - RNA, 23 nt, artificial
  Chemically synthesized
accccuaagaccaagugacaacu

SEQ ID NO: 27700 - RNA, 23 nt, artificial
  Chemically synthesized
gaccccuaagaccaagugacaac

SEQ ID NO: 27701 - RNA, 23 nt, artificial
  Chemically synthesized
ggaccccuaagaccaagugacaa

SEQ ID NO: 27702 - RNA, 23 nt, artificial
  Chemically synthesized
aaaugcugcucauggaagaucca

SEQ ID NO: 27703 - RNA, 23 nt, artificial
  Chemically synthesized
aggcccuuaggcucuauuuuuca

SEQ ID NO: 27704 - RNA, 23 nt, artificial
  Chemically synthesized
caggcccuuaggcucuauuuuuc

SEQ ID NO: 27705 - RNA, 23 nt, artificial
  Chemically synthesized
acaggcccuuaggcucuauuuuu

SEQ ID NO: 27706 - RNA, 23 nt, artificial
  Chemically synthesized
uacaggcccuuaggcucuauuuu

SEQ ID NO: 27707 - RNA, 23 nt, artificial
  Chemically synthesized
ugcugcugauagugauggaugga

SEQ ID NO: 27708 - RNA, 23 nt, artificial
  Chemically synthesized
augcugcugauagugauggaugg

SEQ ID NO: 27709 - RNA, 23 nt, artificial
  Chemically synthesized
aaugcugcugauagugauggaug

SEQ ID NO: 27710 - RNA, 23 nt, artificial
  Chemically synthesized
agauucguaaccaacuuaaccag

SEQ ID NO: 27711 - RNA, 23 nt, artificial
  Chemically synthesized
acagauucguaaccaacuuaacc

SEQ ID NO: 27712 - RNA, 23 nt, artificial
  Chemically synthesized
uacagauucguaaccaacuuaac

SEQ ID NO: 27713 - RNA, 23 nt, artificial
  Chemically synthesized
gggugugaugaacaaaggugugg

SEQ ID NO: 27714 - RNA, 23 nt, artificial
  Chemically synthesized
ugggugugaugaacaaaggugug

SEQ ID NO: 27715 - RNA, 23 nt, artificial
  Chemically synthesized
auccaaauccgcuaaugauggaa

SEQ ID NO: 27716 - RNA, 23 nt, artificial
  Chemically synthesized
acuacagcaaaaucaugaacggc

SEQ ID NO: 27717 - RNA, 23 nt, artificial
  Chemically synthesized
gacuacagcaaaaucaugaacgg

SEQ ID NO: 27718 - RNA, 23 nt, artificial
  Chemically synthesized
cgacuacagcaaaaucaugaacg

SEQ ID NO: 27719 - RNA, 23 nt, artificial
  Chemically synthesized
ucgacuacagcaaaaucaugaac

SEQ ID NO: 27720 - RNA, 23 nt, artificial
  Chemically synthesized
ccauuaacugggagagguacuuu

SEQ ID NO: 27721 - RNA, 23 nt, artificial
  Chemically synthesized
cccauuaacugggagagguacuu

SEQ ID NO: 27722 - RNA, 23 nt, artificial
  Chemically synthesized
gcccauuaacugggagagguacu

SEQ ID NO: 27723 - RNA, 23 nt, artificial
  Chemically synthesized
ugcccauuaacugggagagguac

SEQ ID NO: 27724 - RNA, 23 nt, artificial
  Chemically synthesized
uugcccauuaacugggagaggua

SEQ ID NO: 27725 - RNA, 23 nt, artificial
  Chemically synthesized
auugaaagaacgaguugaagccc

SEQ ID NO: 27726 - RNA, 23 nt, artificial
  Chemically synthesized
aauugaaagaacgaguugaagcc

SEQ ID NO: 27727 - RNA, 23 nt, artificial
  Chemically synthesized
aaauugaaagaacgaguugaagc

SEQ ID NO: 27728 - RNA, 23 nt, artificial
  Chemically synthesized
gaaauugaaagaacgaguugaag

SEQ ID NO: 27729 - RNA, 23 nt, artificial
  Chemically synthesized
gacagaagcucuuacugacuugg

SEQ ID NO: 27730 - RNA, 23 nt, artificial
  Chemically synthesized
agacagaagcucuuacugacuug

SEQ ID NO: 27731 - RNA, 23 nt, artificial
  Chemically synthesized
aagacagaagcucuuacugacuu

SEQ ID NO: 27732 - RNA, 23 nt, artificial
  Chemically synthesized
gaagacagaagcucuuacugacu

SEQ ID NO: 27733 - RNA, 23 nt, artificial
  Chemically synthesized
ugaagacagaagcucuuacugac

SEQ ID NO: 27734 - RNA, 23 nt, artificial
  Chemically synthesized
ucaaaacuucagcagcagaagga

SEQ ID NO: 27735 - RNA, 23 nt, artificial
  Chemically synthesized
uucaaaacuucagcagcagaagg

SEQ ID NO: 27736 - RNA, 23 nt, artificial
  Chemically synthesized
auucaaaacuucagcagcagaag

SEQ ID NO: 27737 - RNA, 23 nt, artificial
  Chemically synthesized
uuagucagcaauuggaagauuua

SEQ ID NO: 27738 - RNA, 23 nt, artificial
  Chemically synthesized
caggcuccucacaacagauucag

SEQ ID NO: 27739 - RNA, 23 nt, artificial
  Chemically synthesized
gccaggcuccucacaacagauuc

SEQ ID NO: 27740 - RNA, 23 nt, artificial
  Chemically synthesized
agccaggcuccucacaacagauu

SEQ ID NO: 27741 - RNA, 23 nt, artificial
  Chemically synthesized
cagccaggcuccucacaacagau

SEQ ID NO: 27742 - RNA, 23 nt, artificial
  Chemically synthesized
acauuaaaacagaauucuagcuc

SEQ ID NO: 27743 - RNA, 23 nt, artificial
  Chemically synthesized
aacauuaaaacagaauucuagcu

SEQ ID NO: 27744 - RNA, 23 nt, artificial
  Chemically synthesized
caacauuaaaacagaauucuagc

SEQ ID NO: 27745 - RNA, 23 nt, artificial
  Chemically synthesized
acccgaacuauguuggaaauuuu

SEQ ID NO: 27746 - RNA, 23 nt, artificial
  Chemically synthesized
uacccgaacuauguuggaaauuu

SEQ ID NO: 27747 - RNA, 23 nt, artificial
  Chemically synthesized
cuacccgaacuauguuggaaauu

SEQ ID NO: 27748 - RNA, 23 nt, artificial
  Chemically synthesized
gcuacccgaacuauguuggaaau

SEQ ID NO: 27749 - RNA, 23 nt, artificial
  Chemically synthesized
ucagcugaaccgugugaauggca

SEQ ID NO: 27750 - RNA, 23 nt, artificial
  Chemically synthesized
uucagcugaaccgugugaauggc

SEQ ID NO: 27751 - RNA, 23 nt, artificial
  Chemically synthesized
auucagcugaaccgugugaaugg

SEQ ID NO: 27752 - RNA, 23 nt, artificial
  Chemically synthesized
aauucagcugaaccgugugaaug

SEQ ID NO: 27753 - RNA, 23 nt, artificial
  Chemically synthesized
aaauucagcugaaccgugugaau

SEQ ID NO: 27754 - RNA, 23 nt, artificial
  Chemically synthesized
accauucaaagcuacccgaacua

SEQ ID NO: 27755 - RNA, 23 nt, artificial
  Chemically synthesized
gaccauucaaagcuacccgaacu

SEQ ID NO: 27756 - RNA, 23 nt, artificial
  Chemically synthesized
agaccauucaaagcuacccgaac

SEQ ID NO: 27757 - RNA, 23 nt, artificial
  Chemically synthesized
uagaccauucaaagcuacccgaa

SEQ ID NO: 27758 - RNA, 23 nt, artificial
  Chemically synthesized
ugccucaaccauaagcgacauug

SEQ ID NO: 27759 - RNA, 23 nt, artificial
  Chemically synthesized
uugccucaaccauaagcgacauu

SEQ ID NO: 27760 - RNA, 23 nt, artificial
  Chemically synthesized
uuugccucaaccauaagcgacau

SEQ ID NO: 27761 - RNA, 23 nt, artificial
  Chemically synthesized
uuuugccucaaccauaagcgaca

SEQ ID NO: 27762 - RNA, 23 nt, artificial
  Chemically synthesized
uuuagcagacagcguccacaaug

SEQ ID NO: 27763 - RNA, 23 nt, artificial
  Chemically synthesized
cuuuagcagacagcguccacaau

SEQ ID NO: 27764 - RNA, 23 nt, artificial
  Chemically synthesized
guuuuaccuucggguucaaccuc

SEQ ID NO: 27765 - RNA, 23 nt, artificial
  Chemically synthesized
cguuuuaccuucggguucaaccu

SEQ ID NO: 27766 - RNA, 23 nt, artificial
  Chemically synthesized
ccguuuuaccuucggguucaacc

SEQ ID NO: 27767 - RNA, 23 nt, artificial
  Chemically synthesized
cccguuuuaccuucggguucaac

SEQ ID NO: 27768 - RNA, 23 nt, artificial
  Chemically synthesized
cagugaacugcgugaacgucucu

SEQ ID NO: 27769 - RNA, 23 nt, artificial
  Chemically synthesized
ucagugaacugcgugaacgucuc

SEQ ID NO: 27770 - RNA, 23 nt, artificial
  Chemically synthesized
aucagugaacugcgugaacgucu

SEQ ID NO: 27771 - RNA, 23 nt, artificial
  Chemically synthesized
aaucagugaacugcgugaacguc

SEQ ID NO: 27772 - RNA, 23 nt, artificial
  Chemically synthesized
agacccaagagcaacgaacucag

SEQ ID NO: 27773 - RNA, 23 nt, artificial
  Chemically synthesized
uaccaaaaguauuuuuugacuag

SEQ ID NO: 27774 - RNA, 23 nt, artificial
  Chemically synthesized
auaccaaaaguauuuuuugacua

SEQ ID NO: 27775 - RNA, 23 nt, artificial
  Chemically synthesized
uauaccaaaaguauuuuuugacu

SEQ ID NO: 27776 - RNA, 23 nt, artificial
  Chemically synthesized
auauaccaaaaguauuuuuugac

SEQ ID NO: 27777 - RNA, 23 nt, artificial
  Chemically synthesized
uauauaccaaaaguauuuuuuga

SEQ ID NO: 27778 - RNA, 23 nt, artificial
  Chemically synthesized
gugaagacagaagcucuuacuga

SEQ ID NO: 27779 - RNA, 23 nt, artificial
  Chemically synthesized
ucuggugcagaggaucaucuaug

SEQ ID NO: 27780 - RNA, 23 nt, artificial
  Chemically synthesized
aucuggugcagaggaucaucuau

SEQ ID NO: 27781 - RNA, 23 nt, artificial
  Chemically synthesized
aggagauggaggaaggcuacauc

SEQ ID NO: 27782 - RNA, 23 nt, artificial
  Chemically synthesized
gaggagauggaggaaggcuacau

SEQ ID NO: 27783 - RNA, 23 nt, artificial
  Chemically synthesized
gugaggagauggaggaaggcuac

SEQ ID NO: 27784 - RNA, 23 nt, artificial
  Chemically synthesized
caaugagaggacaagucgacuac

SEQ ID NO: 27785 - RNA, 23 nt, artificial
  Chemically synthesized
gcaaugagaggacaagucgacua

SEQ ID NO: 27786 - RNA, 23 nt, artificial
  Chemically synthesized
ugcaaugagaggacaagucgacu

SEQ ID NO: 27787 - RNA, 23 nt, artificial
  Chemically synthesized
gucgagauguuguagaauuuugc

SEQ ID NO: 27788 - RNA, 23 nt, artificial
  Chemically synthesized
aggagccucuguauggaaacaug

SEQ ID NO: 27789 - RNA, 23 nt, artificial
  Chemically synthesized
aaggagccucuguauggaaacau

SEQ ID NO: 27790 - RNA, 23 nt, artificial
  Chemically synthesized
aaaggagccucuguauggaaaca

SEQ ID NO: 27791 - RNA, 23 nt, artificial
  Chemically synthesized
caaaggagccucuguauggaaac

SEQ ID NO: 27792 - RNA, 23 nt, artificial
  Chemically synthesized
ccgucagcagcagucuauuucug

SEQ ID NO: 27793 - RNA, 23 nt, artificial
  Chemically synthesized
gccgucagcagcagucuauuucu

SEQ ID NO: 27794 - RNA, 23 nt, artificial
  Chemically synthesized
cgccgucagcagcagucuauuuc

SEQ ID NO: 27795 - RNA, 23 nt, artificial
  Chemically synthesized
gcgccgucagcagcagucuauuu

SEQ ID NO: 27796 - RNA, 23 nt, artificial
  Chemically synthesized
agcgccgucagcagcagucuauu

SEQ ID NO: 27797 - RNA, 23 nt, artificial
  Chemically synthesized
caaguuccauauacuccauguac

SEQ ID NO: 27798 - RNA, 23 nt, artificial
  Chemically synthesized
ucaaguuccauauacuccaugua

SEQ ID NO: 27799 - RNA, 23 nt, artificial
  Chemically synthesized
uucaaguuccauauacuccaugu

SEQ ID NO: 27800 - RNA, 23 nt, artificial
  Chemically synthesized
auucaaguuccauauacuccaug

SEQ ID NO: 27801 - RNA, 23 nt, artificial
  Chemically synthesized
aauucaaguuccauauacuccau

SEQ ID NO: 27802 - RNA, 23 nt, artificial
  Chemically synthesized
acuagaccauucaaagcuacccg

SEQ ID NO: 27803 - RNA, 23 nt, artificial
  Chemically synthesized
gacuagaccauucaaagcuaccc

SEQ ID NO: 27804 - RNA, 23 nt, artificial
  Chemically synthesized
ugacuagaccauucaaagcuacc

SEQ ID NO: 27805 - RNA, 23 nt, artificial
  Chemically synthesized
uugacuagaccauucaaagcuac

SEQ ID NO: 27806 - RNA, 23 nt, artificial
  Chemically synthesized
uuugacuagaccauucaaagcua

SEQ ID NO: 27807 - RNA, 23 nt, artificial
  Chemically synthesized
gauguuguagaauuuugcaagga

SEQ ID NO: 27808 - RNA, 23 nt, artificial
  Chemically synthesized
agauguuguagaauuuugcaagg

SEQ ID NO: 27809 - RNA, 23 nt, artificial
  Chemically synthesized
gagauguuguagaauuuugcaag

SEQ ID NO: 27810 - RNA, 23 nt, artificial
  Chemically synthesized
cacuguagcccaucaccuuggag

SEQ ID NO: 27811 - RNA, 23 nt, artificial
  Chemically synthesized
gcacuguagcccaucaccuugga

SEQ ID NO: 27812 - RNA, 23 nt, artificial
  Chemically synthesized
agcacuguagcccaucaccuugg

SEQ ID NO: 27813 - RNA, 23 nt, artificial
  Chemically synthesized
cagcacuguagcccaucaccuug

SEQ ID NO: 27814 - RNA, 23 nt, artificial
  Chemically synthesized
gcagcacuguagcccaucaccuu

SEQ ID NO: 27815 - RNA, 23 nt, artificial
  Chemically synthesized
gaugaugccgaugauauuaacug

SEQ ID NO: 27816 - RNA, 23 nt, artificial
  Chemically synthesized
ugcgcugccucuuguaacagcgu

SEQ ID NO: 27817 - RNA, 23 nt, artificial
  Chemically synthesized
cugcgcugccucuuguaacagcg

SEQ ID NO: 27818 - RNA, 23 nt, artificial
  Chemically synthesized
acugcgcugccucuuguaacagc

SEQ ID NO: 27819 - RNA, 23 nt, artificial
  Chemically synthesized
cacugcgcugccucuuguaacag

SEQ ID NO: 27820 - RNA, 23 nt, artificial
  Chemically synthesized
gcacugcgcugccucuuguaaca

SEQ ID NO: 27821 - RNA, 23 nt, artificial
  Chemically synthesized
ccacaccaccuaagaauuaccag

SEQ ID NO: 27822 - RNA, 23 nt, artificial
  Chemically synthesized
agccacaccaccuaagaauuacc

SEQ ID NO: 27823 - RNA, 23 nt, artificial
  Chemically synthesized
aagccacaccaccuaagaauuac

SEQ ID NO: 27824 - RNA, 23 nt, artificial
  Chemically synthesized
uuaggcucuauuuuucauguaug

SEQ ID NO: 27825 - RNA, 23 nt, artificial
  Chemically synthesized
cuuaggcucuauuuuucauguau

SEQ ID NO: 27826 - RNA, 23 nt, artificial
  Chemically synthesized
uucuugagcaacaaugaacagau

SEQ ID NO: 27827 - RNA, 23 nt, artificial
  Chemically synthesized
gcucuuccgugaaaccagugcag

SEQ ID NO: 27828 - RNA, 23 nt, artificial
  Chemically synthesized
agcucuuccgugaaaccagugca

SEQ ID NO: 27829 - RNA, 23 nt, artificial
  Chemically synthesized
uagcucuuccgugaaaccagugc

SEQ ID NO: 27830 - RNA, 23 nt, artificial
  Chemically synthesized
cuagcucuuccgugaaaccagug

SEQ ID NO: 27831 - RNA, 23 nt, artificial
  Chemically synthesized
ucuagcucuuccgugaaaccagu

SEQ ID NO: 27832 - RNA, 23 nt, artificial
  Chemically synthesized
aacucuuaaauaagcgcaacaug

SEQ ID NO: 27833 - RNA, 23 nt, artificial
  Chemically synthesized
aggaacucuuaaauaagcgcaac

SEQ ID NO: 27834 - RNA, 23 nt, artificial
  Chemically synthesized
ugugcuguuuuccaggaaagcug

SEQ ID NO: 27835 - RNA, 23 nt, artificial
  Chemically synthesized
uugugcuguuuuccaggaaagcu

SEQ ID NO: 27836 - RNA, 23 nt, artificial
  Chemically synthesized
auugugcuguuuuccaggaaagc

SEQ ID NO: 27837 - RNA, 23 nt, artificial
  Chemically synthesized
uauugugcuguuuuccaggaaag

SEQ ID NO: 27838 - RNA, 23 nt, artificial
  Chemically synthesized
aaugaaaagcuucagaaauugaa

SEQ ID NO: 27839 - RNA, 23 nt, artificial
  Chemically synthesized
ugcaauuuuaaggguugaucagc

SEQ ID NO: 27840 - RNA, 23 nt, artificial
  Chemically synthesized
cugcaauuuuaaggguugaucag

SEQ ID NO: 27841 - RNA, 23 nt, artificial
  Chemically synthesized
acugcaauuuuaaggguugauca

SEQ ID NO: 27842 - RNA, 23 nt, artificial
  Chemically synthesized
agcugcagcuagaaaauggucuu

SEQ ID NO: 27843 - RNA, 23 nt, artificial
  Chemically synthesized
aagcugcagcuagaaaauggucu

SEQ ID NO: 27844 - RNA, 23 nt, artificial
  Chemically synthesized
aaagcugcagcuagaaaaugguc

SEQ ID NO: 27845 - RNA, 23 nt, artificial
  Chemically synthesized
uccgcuaaugauggaaacuggcc

SEQ ID NO: 27846 - RNA, 23 nt, artificial
  Chemically synthesized
auccgcuaaugauggaaacuggc

SEQ ID NO: 27847 - RNA, 23 nt, artificial
  Chemically synthesized
aauccgcuaaugauggaaacugg

SEQ ID NO: 27848 - RNA, 23 nt, artificial
  Chemically synthesized
agugaagacagaagcucuuacug

SEQ ID NO: 27849 - RNA, 23 nt, artificial
  Chemically synthesized
agugcucccaguuucuauauggg

SEQ ID NO: 27850 - RNA, 23 nt, artificial
  Chemically synthesized
accuucagaaaguacugagaaag

SEQ ID NO: 27851 - RNA, 23 nt, artificial
  Chemically synthesized
ugcuggauuuuggugucaacgug

SEQ ID NO: 27852 - RNA, 23 nt, artificial
  Chemically synthesized
cugcuggauuuuggugucaacgu

SEQ ID NO: 27853 - RNA, 23 nt, artificial
  Chemically synthesized
ccugcuggauuuuggugucaacg

SEQ ID NO: 27854 - RNA, 23 nt, artificial
  Chemically synthesized
uccugcuggauuuuggugucaac

SEQ ID NO: 27855 - RNA, 23 nt, artificial
  Chemically synthesized
uuuugacuagaccauucaaagcu

SEQ ID NO: 27856 - RNA, 23 nt, artificial
  Chemically synthesized
uuuuugacuagaccauucaaagc

SEQ ID NO: 27857 - RNA, 23 nt, artificial
  Chemically synthesized
uuuuuugacuagaccauucaaag

SEQ ID NO: 27858 - RNA, 23 nt, artificial
  Chemically synthesized
auuuuuugacuagaccauucaaa

SEQ ID NO: 27859 - RNA, 23 nt, artificial
  Chemically synthesized
uauuuuuugacuagaccauucaa

SEQ ID NO: 27860 - RNA, 23 nt, artificial
  Chemically synthesized
ucgugcaaugagaggacaagucg

SEQ ID NO: 27861 - RNA, 23 nt, artificial
  Chemically synthesized
uucgugcaaugagaggacaaguc

SEQ ID NO: 27862 - RNA, 23 nt, artificial
  Chemically synthesized
auucgugcaaugagaggacaagu

SEQ ID NO: 27863 - RNA, 23 nt, artificial
  Chemically synthesized
aauucgugcaaugagaggacaag

SEQ ID NO: 27864 - RNA, 23 nt, artificial
  Chemically synthesized
aaauucgugcaaugagaggacaa

SEQ ID NO: 27865 - RNA, 23 nt, artificial
  Chemically synthesized
gcccuuaggcucuauuuuucaug

SEQ ID NO: 27866 - RNA, 23 nt, artificial
  Chemically synthesized
gaggaaggcuacauccagugcuc

SEQ ID NO: 27867 - RNA, 23 nt, artificial
  Chemically synthesized
ggaggaaggcuacauccagugcu

SEQ ID NO: 27868 - RNA, 23 nt, artificial
  Chemically synthesized
uggaggaaggcuacauccagugc

SEQ ID NO: 27869 - RNA, 23 nt, artificial
  Chemically synthesized
auggaggaaggcuacauccagug

SEQ ID NO: 27870 - RNA, 23 nt, artificial
  Chemically synthesized
aagcuacccgaacuauguuggaa

SEQ ID NO: 27871 - RNA, 23 nt, artificial
  Chemically synthesized
aaagcuacccgaacuauguugga

SEQ ID NO: 27872 - RNA, 23 nt, artificial
  Chemically synthesized
gccaccuucagaaaguacugaga

SEQ ID NO: 27873 - RNA, 23 nt, artificial
  Chemically synthesized
acagugaauucaaguuccauaua

SEQ ID NO: 27874 - RNA, 23 nt, artificial
  Chemically synthesized
cagacagugaauucaaguuccau

SEQ ID NO: 27875 - RNA, 23 nt, artificial
  Chemically synthesized
aagucgacuacagcaaaaucaug

SEQ ID NO: 27876 - RNA, 23 nt, artificial
  Chemically synthesized
gugaagaaaagugaacgcccuug

SEQ ID NO: 27877 - RNA, 23 nt, artificial
  Chemically synthesized
uggugaagaaaagugaacgcccu

SEQ ID NO: 27878 - RNA, 23 nt, artificial
  Chemically synthesized
cugaaaaagcgcagcuccaucac

SEQ ID NO: 27879 - RNA, 23 nt, artificial
  Chemically synthesized
cccugaaaaagcgcagcuccauc

SEQ ID NO: 27880 - RNA, 23 nt, artificial
  Chemically synthesized
ccccugaaaaagcgcagcuccau

SEQ ID NO: 27881 - RNA, 23 nt, artificial
  Chemically synthesized
gccccugaaaaagcgcagcucca

SEQ ID NO: 27882 - RNA, 23 nt, artificial
  Chemically synthesized
ugaagaagcccaacucggagcgg

SEQ ID NO: 27883 - RNA, 23 nt, artificial
  Chemically synthesized
uugaagaagcccaacucggagcg

SEQ ID NO: 27884 - RNA, 23 nt, artificial
  Chemically synthesized
cuugaagaagcccaacucggagc

SEQ ID NO: 27885 - RNA, 23 nt, artificial
  Chemically synthesized
acuugaagaagcccaacucggag

SEQ ID NO: 27886 - RNA, 23 nt, artificial
  Chemically synthesized
aacuugaagaagcccaacucgga

SEQ ID NO: 27887 - RNA, 23 nt, artificial
  Chemically synthesized
ugagaacagugaacaagguggcc

SEQ ID NO: 27888 - RNA, 23 nt, artificial
  Chemically synthesized
cugagaacagugaacaagguggc

SEQ ID NO: 27889 - RNA, 23 nt, artificial
  Chemically synthesized
acugagaacagugaacaaggugg

SEQ ID NO: 27890 - RNA, 23 nt, artificial
  Chemically synthesized
ugaucauaugauguacgaacauc

SEQ ID NO: 27891 - RNA, 23 nt, artificial
  Chemically synthesized
uugaucauaugauguacgaacau

SEQ ID NO: 27892 - RNA, 23 nt, artificial
  Chemically synthesized
uuugaucauaugauguacgaaca

SEQ ID NO: 27893 - RNA, 23 nt, artificial
  Chemically synthesized
ccuuugaucauaugauguacgaa

SEQ ID NO: 27894 - RNA, 23 nt, artificial
  Chemically synthesized
cgaaucagugaacugcgugaacg

SEQ ID NO: 27895 - RNA, 23 nt, artificial
  Chemically synthesized
gcgaaucagugaacugcgugaac

SEQ ID NO: 27896 - RNA, 23 nt, artificial
  Chemically synthesized
cucaaaugcugcucauggaagau

SEQ ID NO: 27897 - RNA, 23 nt, artificial
  Chemically synthesized
ugccucaaaugcugcucauggaa

SEQ ID NO: 27898 - RNA, 23 nt, artificial
  Chemically synthesized
uugccucaaaugcugcucaugga

SEQ ID NO: 27899 - RNA, 23 nt, artificial
  Chemically synthesized
ccagacagugaauucaaguucca

SEQ ID NO: 27900 - RNA, 23 nt, artificial
  Chemically synthesized
agcguccacaaugugaauccuac

SEQ ID NO: 27901 - RNA, 23 nt, artificial
  Chemically synthesized
cuccauguaccuccagcaagcca

SEQ ID NO: 27902 - RNA, 23 nt, artificial
  Chemically synthesized
acuccauguaccuccagcaagcc

SEQ ID NO: 27903 - RNA, 23 nt, artificial
  Chemically synthesized
uacuccauguaccuccagcaagc

SEQ ID NO: 27904 - RNA, 23 nt, artificial
  Chemically synthesized
auacuccauguaccuccagcaag

SEQ ID NO: 27905 - RNA, 23 nt, artificial
  Chemically synthesized
uauacuccauguaccuccagcaa

SEQ ID NO: 27906 - RNA, 23 nt, artificial
  Chemically synthesized
uggguuccagucuuacaauggca

SEQ ID NO: 27907 - RNA, 23 nt, artificial
  Chemically synthesized
caguucaccuaaaggcugauugu

SEQ ID NO: 27908 - RNA, 23 nt, artificial
  Chemically synthesized
ccaguucaccuaaaggcugauug

SEQ ID NO: 27909 - RNA, 23 nt, artificial
  Chemically synthesized
uccaguucaccuaaaggcugauu

SEQ ID NO: 27910 - RNA, 23 nt, artificial
  Chemically synthesized
uuccaguucaccuaaaggcugau

SEQ ID NO: 27911 - RNA, 23 nt, artificial
  Chemically synthesized
guuccaguucaccuaaaggcuga

SEQ ID NO: 27912 - RNA, 23 nt, artificial
  Chemically synthesized
auaagcgacauugaaacugcugc

SEQ ID NO: 27913 - RNA, 23 nt, artificial
  Chemically synthesized
cauaagcgacauugaaacugcug

SEQ ID NO: 27914 - RNA, 23 nt, artificial
  Chemically synthesized
ccauaagcgacauugaaacugcu

SEQ ID NO: 27915 - RNA, 23 nt, artificial
  Chemically synthesized
cuauuucugaaaaugaaaagcuu

SEQ ID NO: 27916 - RNA, 23 nt, artificial
  Chemically synthesized
ucuauuucugaaaaugaaaagcu

SEQ ID NO: 27917 - RNA, 23 nt, artificial
  Chemically synthesized
cugaagaaaauucgugcaaugag

SEQ ID NO: 27918 - RNA, 23 nt, artificial
  Chemically synthesized
agcugaagaaaauucgugcaaug

SEQ ID NO: 27919 - RNA, 23 nt, artificial
  Chemically synthesized
guuccauauacuccauguaccuc

SEQ ID NO: 27920 - RNA, 23 nt, artificial
  Chemically synthesized
aguuccauauacuccauguaccu

SEQ ID NO: 27921 - RNA, 23 nt, artificial
  Chemically synthesized
aaguuccauauacuccauguacc

SEQ ID NO: 27922 - RNA, 23 nt, artificial
  Chemically synthesized
gcuucagaaauugaaagaacgag

SEQ ID NO: 27923 - RNA, 23 nt, artificial
  Chemically synthesized
agcuucagaaauugaaagaacga

SEQ ID NO: 27924 - RNA, 23 nt, artificial
  Chemically synthesized
aagcuucagaaauugaaagaacg

SEQ ID NO: 27925 - RNA, 23 nt, artificial
  Chemically synthesized
uuaaaaagacuguaccaagaacu

SEQ ID NO: 27926 - RNA, 23 nt, artificial
  Chemically synthesized
acuucagcagcagaaggaacucu

SEQ ID NO: 27927 - RNA, 23 nt, artificial
  Chemically synthesized
aacuucagcagcagaaggaacuc

SEQ ID NO: 27928 - RNA, 23 nt, artificial
  Chemically synthesized
aaacuucagcagcagaaggaacu

SEQ ID NO: 27929 - RNA, 23 nt, artificial
  Chemically synthesized
aaaacuucagcagcagaaggaac

SEQ ID NO: 27930 - RNA, 23 nt, artificial
  Chemically synthesized
gaccagcggcgguggaguuaaaa

SEQ ID NO: 27931 - RNA, 23 nt, artificial
  Chemically synthesized
cagcgccuuaaauaagucaguua

SEQ ID NO: 27932 - RNA, 23 nt, artificial
  Chemically synthesized
acaagcugaagaaaauucgugca

SEQ ID NO: 27933 - RNA, 23 nt, artificial
  Chemically synthesized
aacaagcugaagaaaauucgugc

SEQ ID NO: 27934 - RNA, 23 nt, artificial
  Chemically synthesized
gaacaagcugaagaaaauucgug

SEQ ID NO: 27935 - RNA, 23 nt, artificial
  Chemically synthesized
uuucuugagcaacaaugaacaga

SEQ ID NO: 27936 - RNA, 23 nt, artificial
  Chemically synthesized
uuuucuugagcaacaaugaacag

SEQ ID NO: 27937 - RNA, 23 nt, artificial
  Chemically synthesized
guuuucuugagcaacaaugaaca

SEQ ID NO: 27938 - RNA, 23 nt, artificial
  Chemically synthesized
uguuuucuugagcaacaaugaac

SEQ ID NO: 27939 - RNA, 23 nt, artificial
  Chemically synthesized
uggagcacugacuguacauagug

SEQ ID NO: 27940 - RNA, 23 nt, artificial
  Chemically synthesized
uuggagcacugacuguacauagu

SEQ ID NO: 27941 - RNA, 23 nt, artificial
  Chemically synthesized
cuuggagcacugacuguacauag

SEQ ID NO: 27942 - RNA, 23 nt, artificial
  Chemically synthesized
ccggaaacaaccugucgagaugu

SEQ ID NO: 27943 - RNA, 23 nt, artificial
  Chemically synthesized
accggaaacaaccugucgagaug

SEQ ID NO: 27944 - RNA, 23 nt, artificial
  Chemically synthesized
caccggaaacaaccugucgagau

SEQ ID NO: 27945 - RNA, 23 nt, artificial
  Chemically synthesized
acaccggaaacaaccugucgaga

SEQ ID NO: 27946 - RNA, 23 nt, artificial
  Chemically synthesized
ugacuguacauaguguggugaag

SEQ ID NO: 27947 - RNA, 23 nt, artificial
  Chemically synthesized
aggaaaagcugggugugaugaac

SEQ ID NO: 27948 - RNA, 23 nt, artificial
  Chemically synthesized
acauccagugcucccaguuucua

SEQ ID NO: 27949 - RNA, 23 nt, artificial
  Chemically synthesized
caucgagauugguaaagugccac

SEQ ID NO: 27950 - RNA, 23 nt, artificial
  Chemically synthesized
ggcaucgagauugguaaagugcc

SEQ ID NO: 27951 - RNA, 23 nt, artificial
  Chemically synthesized
cauuuagcugaaguguggagggg

SEQ ID NO: 27952 - RNA, 23 nt, artificial
  Chemically synthesized
ccauuuagcugaaguguggaggg

SEQ ID NO: 27953 - RNA, 23 nt, artificial
  Chemically synthesized
gccauuuagcugaaguguggagg

SEQ ID NO: 27954 - RNA, 23 nt, artificial
  Chemically synthesized
ugccauuuagcugaaguguggag

SEQ ID NO: 27955 - RNA, 23 nt, artificial
  Chemically synthesized
cugccauuuagcugaagugugga

SEQ ID NO: 27956 - RNA, 23 nt, artificial
  Chemically synthesized
guuaaagcaguguaugguaagcc

SEQ ID NO: 27957 - RNA, 23 nt, artificial
  Chemically synthesized
aguuaaagcaguguaugguaagc

SEQ ID NO: 27958 - RNA, 23 nt, artificial
  Chemically synthesized
ccacuuaagagauuauugugcug

SEQ ID NO: 27959 - RNA, 23 nt, artificial
  Chemically synthesized
gccacuuaagagauuauugugcu

SEQ ID NO: 27960 - RNA, 23 nt, artificial
  Chemically synthesized
agccacuuaagagauuauugugc

SEQ ID NO: 27961 - RNA, 23 nt, artificial
  Chemically synthesized
gagccacuuaagagauuauugug

SEQ ID NO: 27962 - RNA, 23 nt, artificial
  Chemically synthesized
acagcgccuuaaauaagucaguu

SEQ ID NO: 27963 - RNA, 23 nt, artificial
  Chemically synthesized
cacagcgccuuaaauaagucagu

SEQ ID NO: 27964 - RNA, 23 nt, artificial
  Chemically synthesized
ugaugccgaugauauuaacuguu

SEQ ID NO: 27965 - RNA, 23 nt, artificial
  Chemically synthesized
augaugccgaugauauuaacugu

SEQ ID NO: 27966 - RNA, 23 nt, artificial
  Chemically synthesized
cucauggaagauccaaauccgcu

SEQ ID NO: 27967 - RNA, 23 nt, artificial
  Chemically synthesized
cccugcaagcucaaauucaguuc

SEQ ID NO: 27968 - RNA, 23 nt, artificial
  Chemically synthesized
ccccugcaagcucaaauucaguu

SEQ ID NO: 27969 - RNA, 23 nt, artificial
  Chemically synthesized
accccugcaagcucaaauucagu

SEQ ID NO: 27970 - RNA, 23 nt, artificial
  Chemically synthesized
caccccugcaagcucaaauucag

SEQ ID NO: 27971 - RNA, 23 nt, artificial
  Chemically synthesized
ucaccccugcaagcucaaauuca

SEQ ID NO: 27972 - RNA, 23 nt, artificial
  Chemically synthesized
ccaagugacaacugggagagccu

SEQ ID NO: 27973 - RNA, 23 nt, artificial
  Chemically synthesized
accaagugacaacugggagagcc

SEQ ID NO: 27974 - RNA, 23 nt, artificial
  Chemically synthesized
gaccaagugacaacugggagagc

SEQ ID NO: 27975 - RNA, 23 nt, artificial
  Chemically synthesized
agaccaagugacaacugggagag

SEQ ID NO: 27976 - RNA, 23 nt, artificial
  Chemically synthesized
aagaccaagugacaacugggaga

SEQ ID NO: 27977 - RNA, 23 nt, artificial
  Chemically synthesized
agucaguuaaagcaguguauggu

SEQ ID NO: 27978 - RNA, 23 nt, artificial
  Chemically synthesized
aagucaguuaaagcaguguaugg

SEQ ID NO: 27979 - RNA, 23 nt, artificial
  Chemically synthesized
uaagucaguuaaagcaguguaug

SEQ ID NO: 27980 - RNA, 23 nt, artificial
  Chemically synthesized
auaagucaguuaaagcaguguau

SEQ ID NO: 27981 - RNA, 23 nt, artificial
  Chemically synthesized
cuaccagagugaugcagaccugg

SEQ ID NO: 27982 - RNA, 23 nt, artificial
  Chemically synthesized
gcuaccagagugaugcagaccug

SEQ ID NO: 27983 - RNA, 23 nt, artificial
  Chemically synthesized
cgcuaccagagugaugcagaccu

SEQ ID NO: 27984 - RNA, 23 nt, artificial
  Chemically synthesized
gcgcuaccagagugaugcagacc

SEQ ID NO: 27985 - RNA, 23 nt, artificial
  Chemically synthesized
ugcgcuaccagagugaugcagac

SEQ ID NO: 27986 - RNA, 23 nt, artificial
  Chemically synthesized
caaagcuacccgaacuauguugg

SEQ ID NO: 27987 - RNA, 23 nt, artificial
  Chemically synthesized
ucaaagcuacccgaacuauguug

SEQ ID NO: 27988 - RNA, 23 nt, artificial
  Chemically synthesized
uucaaagcuacccgaacuauguu

SEQ ID NO: 27989 - RNA, 23 nt, artificial
  Chemically synthesized
auucaaagcuacccgaacuaugu

SEQ ID NO: 27990 - RNA, 23 nt, artificial
  Chemically synthesized
caaauccgcuaaugauggaaacu

SEQ ID NO: 27991 - RNA, 23 nt, artificial
  Chemically synthesized
ccaaauccgcuaaugauggaaac

SEQ ID NO: 27992 - RNA, 23 nt, artificial
  Chemically synthesized
ucucagagcuccaagauauggca

SEQ ID NO: 27993 - RNA, 23 nt, artificial
  Chemically synthesized
auaaauacccacuuucaaaacac

SEQ ID NO: 27994 - RNA, 23 nt, artificial
  Chemically synthesized
cgcuucacugaggugugaauugu

SEQ ID NO: 27995 - RNA, 23 nt, artificial
  Chemically synthesized
gcgcuucacugaggugugaauug

SEQ ID NO: 27996 - RNA, 23 nt, artificial
  Chemically synthesized
ggcgcuucacugaggugugaauu

SEQ ID NO: 27997 - RNA, 23 nt, artificial
  Chemically synthesized
gggcgcuucacugaggugugaau

SEQ ID NO: 27998 - RNA, 23 nt, artificial
  Chemically synthesized
agggcgcuucacugaggugugaa

SEQ ID NO: 27999 - RNA, 23 nt, artificial
  Chemically synthesized
guugccaaggaacagcguuuaca

SEQ ID NO: 28000 - RNA, 23 nt, artificial
  Chemically synthesized
ccugcaagcucaaauucaguucc

SEQ ID NO: 28001 - RNA, 23 nt, artificial
  Chemically synthesized
acccuuugaucauaugauguacg

SEQ ID NO: 28002 - RNA, 23 nt, artificial
  Chemically synthesized
uacccuuugaucauaugauguac

SEQ ID NO: 28003 - RNA, 23 nt, artificial
  Chemically synthesized
ugcuguaccagcgcuucaacacc

SEQ ID NO: 28004 - RNA, 23 nt, artificial
  Chemically synthesized
cugcuguaccagcgcuucaacac

SEQ ID NO: 28005 - RNA, 23 nt, artificial
  Chemically synthesized
gcugcuguaccagcgcuucaaca

SEQ ID NO: 28006 - RNA, 23 nt, artificial
  Chemically synthesized
agcugcuguaccagcgcuucaac

SEQ ID NO: 28007 - RNA, 23 nt, artificial
  Chemically synthesized
aagcugcuguaccagcgcuucaa

SEQ ID NO: 28008 - RNA, 23 nt, artificial
  Chemically synthesized
ucugaaaaugaaaagcuucagaa

SEQ ID NO: 28009 - RNA, 23 nt, artificial
  Chemically synthesized
uucugaaaaugaaaagcuucaga

SEQ ID NO: 28010 - RNA, 23 nt, artificial
  Chemically synthesized
caacagauucagcagaggauuuc

SEQ ID NO: 28011 - RNA, 23 nt, artificial
  Chemically synthesized
acaacagauucagcagaggauuu

SEQ ID NO: 28012 - RNA, 23 nt, artificial
  Chemically synthesized
cacaacagauucagcagaggauu

SEQ ID NO: 28013 - RNA, 23 nt, artificial
  Chemically synthesized
cucacaacagauucagcagagga

SEQ ID NO: 28014 - RNA, 23 nt, artificial
  Chemically synthesized
acacagcgccuuaaauaagucag

SEQ ID NO: 28015 - RNA, 23 nt, artificial
  Chemically synthesized
gcacacagcgccuuaaauaaguc

SEQ ID NO: 28016 - RNA, 23 nt, artificial
  Chemically synthesized
agcacacagcgccuuaaauaagu

SEQ ID NO: 28017 - RNA, 23 nt, artificial
  Chemically synthesized
uaagaccaagugacaacugggag

SEQ ID NO: 28018 - RNA, 23 nt, artificial
  Chemically synthesized
aagcugaagaaaauucgugcaau

SEQ ID NO: 28019 - RNA, 23 nt, artificial
  Chemically synthesized
aaguuccuauaacaccggaaaca

SEQ ID NO: 28020 - RNA, 23 nt, artificial
  Chemically synthesized
gaaguuccuauaacaccggaaac

SEQ ID NO: 28021 - RNA, 23 nt, artificial
  Chemically synthesized
gggcuaugugcccaaaaaccugc

SEQ ID NO: 28022 - RNA, 23 nt, artificial
  Chemically synthesized
aggguugaucagcuuagucagca

SEQ ID NO: 28023 - RNA, 23 nt, artificial
  Chemically synthesized
aaggguugaucagcuuagucagc

SEQ ID NO: 28024 - RNA, 23 nt, artificial
  Chemically synthesized
uaaggguugaucagcuuagucag

SEQ ID NO: 28025 - RNA, 23 nt, artificial
  Chemically synthesized
uuaaggguugaucagcuuaguca

SEQ ID NO: 28026 - RNA, 23 nt, artificial
  Chemically synthesized
ccauacccuuugaucauaugaug

SEQ ID NO: 28027 - RNA, 23 nt, artificial
  Chemically synthesized
ucccauacccuuugaucauauga

SEQ ID NO: 28028 - RNA, 23 nt, artificial
  Chemically synthesized
gucccauacccuuugaucauaug

SEQ ID NO: 28029 - RNA, 23 nt, artificial
  Chemically synthesized
gcagaggaucaucuaugaggugg

SEQ ID NO: 28030 - RNA, 23 nt, artificial
  Chemically synthesized
gauucguaaccaacuuaaccagg

SEQ ID NO: 28031 - RNA, 23 nt, artificial
  Chemically synthesized
uguaccaagaacuacagauucgu

SEQ ID NO: 28032 - RNA, 23 nt, artificial
  Chemically synthesized
cuguaccaagaacuacagauucg

SEQ ID NO: 28033 - RNA, 23 nt, artificial
  Chemically synthesized
acuguaccaagaacuacagauuc

SEQ ID NO: 28034 - RNA, 23 nt, artificial
  Chemically synthesized
caaaaguauuuuuugacuagacc

SEQ ID NO: 28035 - RNA, 23 nt, artificial
  Chemically synthesized
ccaaaaguauuuuuugacuagac

SEQ ID NO: 28036 - RNA, 23 nt, artificial
  Chemically synthesized
accaaaaguauuuuuugacuaga

SEQ ID NO: 28037 - RNA, 23 nt, artificial
  Chemically synthesized
cucuggaaggagaguucgaucug

SEQ ID NO: 28038 - RNA, 23 nt, artificial
  Chemically synthesized
ucucuggaaggagaguucgaucu

SEQ ID NO: 28039 - RNA, 23 nt, artificial
  Chemically synthesized
gucucuggaaggagaguucgauc

SEQ ID NO: 28040 - RNA, 23 nt, artificial
  Chemically synthesized
gcgucucuggaaggagaguucga

SEQ ID NO: 28041 - RNA, 23 nt, artificial
  Chemically synthesized
ugucugcugaaauagaaagguuc

SEQ ID NO: 28042 - RNA, 23 nt, artificial
  Chemically synthesized
acaaccugucgagauguuguaga

SEQ ID NO: 28043 - RNA, 23 nt, artificial
  Chemically synthesized
aacaaccugucgagauguuguag

SEQ ID NO: 28044 - RNA, 23 nt, artificial
  Chemically synthesized
aguauuuuuugacuagaccauuc

SEQ ID NO: 28045 - RNA, 23 nt, artificial
  Chemically synthesized
aaguauuuuuugacuagaccauu

SEQ ID NO: 28046 - RNA, 23 nt, artificial
  Chemically synthesized
aaaguauuuuuugacuagaccau

SEQ ID NO: 28047 - RNA, 23 nt, artificial
  Chemically synthesized
aaaaguauuuuuugacuagacca

SEQ ID NO: 28048 - RNA, 23 nt, artificial
  Chemically synthesized
caaaugcugcucauggaagaucc

SEQ ID NO: 28049 - RNA, 23 nt, artificial
  Chemically synthesized
ucaaaugcugcucauggaagauc

SEQ ID NO: 28050 - RNA, 23 nt, artificial
  Chemically synthesized
auuuuggugucaacgugaaugcu

SEQ ID NO: 28051 - RNA, 23 nt, artificial
  Chemically synthesized
gauuuuggugucaacgugaaugc

SEQ ID NO: 28052 - RNA, 23 nt, artificial
  Chemically synthesized
ggauuuuggugucaacgugaaug

SEQ ID NO: 28053 - RNA, 23 nt, artificial
  Chemically synthesized
gguggaguuaaaaagacuguacc

SEQ ID NO: 28054 - RNA, 23 nt, artificial
  Chemically synthesized
cugcgcuaccagagugaugcaga

SEQ ID NO: 28055 - RNA, 23 nt, artificial
  Chemically synthesized
auucguaaccaacuuaaccagga

SEQ ID NO: 28056 - RNA, 23 nt, artificial
  Chemically synthesized
acugagaaagagccugagcagga

SEQ ID NO: 28057 - RNA, 23 nt, artificial
  Chemically synthesized
uacugagaaagagccugagcagg

SEQ ID NO: 28058 - RNA, 23 nt, artificial
  Chemically synthesized
guacugagaaagagccugagcag

SEQ ID NO: 28059 - RNA, 23 nt, artificial
  Chemically synthesized
aguacugagaaagagccugagca

SEQ ID NO: 28060 - RNA, 23 nt, artificial
  Chemically synthesized
agaaaauggucuuaauggugcuc

SEQ ID NO: 28061 - RNA, 23 nt, artificial
  Chemically synthesized
uagaaaauggucuuaauggugcu

SEQ ID NO: 28062 - RNA, 23 nt, artificial
  Chemically synthesized
cuagaaaauggucuuaauggugc

SEQ ID NO: 28063 - RNA, 23 nt, artificial
  Chemically synthesized
acucuuaaauaagcgcaacaugg

SEQ ID NO: 28064 - RNA, 23 nt, artificial
  Chemically synthesized
uccagaagcugcuguaccagcgc

SEQ ID NO: 28065 - RNA, 23 nt, artificial
  Chemically synthesized
auccagaagcugcuguaccagcg

SEQ ID NO: 28066 - RNA, 23 nt, artificial
  Chemically synthesized
cauccagaagcugcuguaccagc

SEQ ID NO: 28067 - RNA, 23 nt, artificial
  Chemically synthesized
acauccagaagcugcuguaccag

SEQ ID NO: 28068 - RNA, 23 nt, artificial
  Chemically synthesized
aacauccagaagcugcuguacca

SEQ ID NO: 28069 - RNA, 23 nt, artificial
  Chemically synthesized
aacugaauggguuccagucuuac

SEQ ID NO: 28070 - RNA, 23 nt, artificial
  Chemically synthesized
aaacugaauggguuccagucuua

SEQ ID NO: 28071 - RNA, 23 nt, artificial
  Chemically synthesized
cuuuuuauauaccaaaaguauuu

SEQ ID NO: 28072 - RNA, 23 nt, artificial
  Chemically synthesized
gcuuuuuauauaccaaaaguauu

SEQ ID NO: 28073 - RNA, 23 nt, artificial
  Chemically synthesized
agauggaggaaggcuacauccag

SEQ ID NO: 28074 - RNA, 23 nt, artificial
  Chemically synthesized
gagauggaggaaggcuacaucca

SEQ ID NO: 28075 - RNA, 23 nt, artificial
  Chemically synthesized
aagccugaacucccacugacagu

SEQ ID NO: 28076 - RNA, 23 nt, artificial
  Chemically synthesized
caagccugaacucccacugacag

SEQ ID NO: 28077 - RNA, 23 nt, artificial
  Chemically synthesized
gcaagccugaacucccacugaca

SEQ ID NO: 28078 - RNA, 23 nt, artificial
  Chemically synthesized
agcaagccugaacucccacugac

SEQ ID NO: 28079 - RNA, 23 nt, artificial
  Chemically synthesized
cagcaagccugaacucccacuga

SEQ ID NO: 28080 - RNA, 23 nt, artificial
  Chemically synthesized
gguacuuucgccuccaaggacug

SEQ ID NO: 28081 - RNA, 23 nt, artificial
  Chemically synthesized
agguacuuucgccuccaaggacu

SEQ ID NO: 28082 - RNA, 23 nt, artificial
  Chemically synthesized
uuuaaggguugaucagcuuaguc

SEQ ID NO: 28083 - RNA, 23 nt, artificial
  Chemically synthesized
uuuuaaggguugaucagcuuagu

SEQ ID NO: 28084 - RNA, 23 nt, artificial
  Chemically synthesized
ccaauggaaaccuggaagagcuc

SEQ ID NO: 28085 - RNA, 23 nt, artificial
  Chemically synthesized
gccaauggaaaccuggaagagcu

SEQ ID NO: 28086 - RNA, 23 nt, artificial
  Chemically synthesized
ugccaauggaaaccuggaagagc

SEQ ID NO: 28087 - RNA, 23 nt, artificial
  Chemically synthesized
augccaauggaaaccuggaagag

SEQ ID NO: 28088 - RNA, 23 nt, artificial
  Chemically synthesized
aaugccaauggaaaccuggaaga

SEQ ID NO: 28089 - RNA, 23 nt, artificial
  Chemically synthesized
aaauaagucaguuaaagcagugu

SEQ ID NO: 28090 - RNA, 23 nt, artificial
  Chemically synthesized
uaaauaagucaguuaaagcagug

SEQ ID NO: 28091 - RNA, 23 nt, artificial
  Chemically synthesized
uuaaauaagucaguuaaagcagu

SEQ ID NO: 28092 - RNA, 23 nt, artificial
  Chemically synthesized
aagaagcaggaaguacagacugc

SEQ ID NO: 28093 - RNA, 23 nt, artificial
  Chemically synthesized
aaagaagcaggaaguacagacug

SEQ ID NO: 28094 - RNA, 23 nt, artificial
  Chemically synthesized
uuucugaaaaugaaaagcuucag

SEQ ID NO: 28095 - RNA, 23 nt, artificial
  Chemically synthesized
auuucugaaaaugaaaagcuuca

SEQ ID NO: 28096 - RNA, 23 nt, artificial
  Chemically synthesized
gcggaccaacuugaagaagccca

SEQ ID NO: 28097 - RNA, 23 nt, artificial
  Chemically synthesized
gacugcaauuuuaaggguugauc

SEQ ID NO: 28098 - RNA, 23 nt, artificial
  Chemically synthesized
agacugcaauuuuaaggguugau

SEQ ID NO: 28099 - RNA, 23 nt, artificial
  Chemically synthesized
aauggagucaggugcuggaggcc

SEQ ID NO: 28100 - RNA, 23 nt, artificial
  Chemically synthesized
gaauggagucaggugcuggaggc

SEQ ID NO: 28101 - RNA, 23 nt, artificial
  Chemically synthesized
ugaauggagucaggugcuggagg

SEQ ID NO: 28102 - RNA, 23 nt, artificial
  Chemically synthesized
cugaauggagucaggugcuggag

SEQ ID NO: 28103 - RNA, 23 nt, artificial
  Chemically synthesized
ccugaauggagucaggugcugga

SEQ ID NO: 28104 - RNA, 23 nt, artificial
  Chemically synthesized
cuguauggaaacauguccagugu

SEQ ID NO: 28105 - RNA, 23 nt, artificial
  Chemically synthesized
ucuguauggaaacauguccagug

SEQ ID NO: 28106 - RNA, 23 nt, artificial
  Chemically synthesized
cucuguauggaaacauguccagu

SEQ ID NO: 28107 - RNA, 23 nt, artificial
  Chemically synthesized
ccucuguauggaaacauguccag

SEQ ID NO: 28108 - RNA, 23 nt, artificial
  Chemically synthesized
gccucuguauggaaacaugucca

SEQ ID NO: 28109 - RNA, 23 nt, artificial
  Chemically synthesized
ucagcagaggauuuccguaccgc

SEQ ID NO: 28110 - RNA, 23 nt, artificial
  Chemically synthesized
uucagcagaggauuuccguaccg

SEQ ID NO: 28111 - RNA, 23 nt, artificial
  Chemically synthesized
auucagcagaggauuuccguacc

SEQ ID NO: 28112 - RNA, 23 nt, artificial
  Chemically synthesized
gauucagcagaggauuuccguac

SEQ ID NO: 28113 - RNA, 23 nt, artificial
  Chemically synthesized
agauucagcagaggauuuccgua

SEQ ID NO: 28114 - RNA, 23 nt, artificial
  Chemically synthesized
gcacaauaaacccgucucacccc

SEQ ID NO: 28115 - RNA, 23 nt, artificial
  Chemically synthesized
ugcacaauaaacccgucucaccc

SEQ ID NO: 28116 - RNA, 23 nt, artificial
  Chemically synthesized
gugcacaauaaacccgucucacc

SEQ ID NO: 28117 - RNA, 23 nt, artificial
  Chemically synthesized
ugugcacaauaaacccgucucac

SEQ ID NO: 28118 - RNA, 23 nt, artificial
  Chemically synthesized
augugcacaauaaacccgucuca

SEQ ID NO: 28119 - RNA, 23 nt, artificial
  Chemically synthesized
gagaguucgaucuggugcagagg

SEQ ID NO: 28120 - RNA, 23 nt, artificial
  Chemically synthesized
ggagaguucgaucuggugcagag

SEQ ID NO: 28121 - RNA, 23 nt, artificial
  Chemically synthesized
aggagaguucgaucuggugcaga

SEQ ID NO: 28122 - RNA, 23 nt, artificial
  Chemically synthesized
aaggagaguucgaucuggugcag

SEQ ID NO: 28123 - RNA, 23 nt, artificial
  Chemically synthesized
agguggaagaucccagcaagccc

SEQ ID NO: 28124 - RNA, 23 nt, artificial
  Chemically synthesized
gagguggaagaucccagcaagcc

SEQ ID NO: 28125 - RNA, 23 nt, artificial
  Chemically synthesized
ugagguggaagaucccagcaagc

SEQ ID NO: 28126 - RNA, 23 nt, artificial
  Chemically synthesized
augagguggaagaucccagcaag

SEQ ID NO: 28127 - RNA, 23 nt, artificial
  Chemically synthesized
uaugagguggaagaucccagcaa

SEQ ID NO: 28128 - RNA, 23 nt, artificial
  Chemically synthesized
gugugaugaacaaagguguggcg

SEQ ID NO: 28129 - RNA, 23 nt, artificial
  Chemically synthesized
ggugugaugaacaaagguguggc

SEQ ID NO: 28130 - RNA, 23 nt, artificial
  Chemically synthesized
auuaacuguuuucuugagcaaca

SEQ ID NO: 28131 - RNA, 23 nt, artificial
  Chemically synthesized
uauuaacuguuuucuugagcaac

SEQ ID NO: 28132 - RNA, 23 nt, artificial
  Chemically synthesized
auauuaacuguuuucuugagcaa

SEQ ID NO: 28133 - RNA, 23 nt, artificial
  Chemically synthesized
agcacugacuguacauagugugg

SEQ ID NO: 28134 - RNA, 23 nt, artificial
  Chemically synthesized
gagcacugacuguacauagugug

SEQ ID NO: 28135 - RNA, 23 nt, artificial
  Chemically synthesized
gugugaggagauggaggaaggcu

SEQ ID NO: 28136 - RNA, 23 nt, artificial
  Chemically synthesized
agugugaggagauggaggaaggc

SEQ ID NO: 28137 - RNA, 23 nt, artificial
  Chemically synthesized
aagugugaggagauggaggaagg

SEQ ID NO: 28138 - RNA, 23 nt, artificial
  Chemically synthesized
caagugugaggagauggaggaag

SEQ ID NO: 28139 - RNA, 23 nt, artificial
  Chemically synthesized
uuuuugccucaaccauaagcgac

SEQ ID NO: 28140 - RNA, 23 nt, artificial
  Chemically synthesized
agcccguuuuaccuucggguuca

SEQ ID NO: 28141 - RNA, 23 nt, artificial
  Chemically synthesized
cgcuuccuguuccaguucaccua

SEQ ID NO: 28142 - RNA, 23 nt, artificial
  Chemically synthesized
ccgcuuccuguuccaguucaccu

SEQ ID NO: 28143 - RNA, 23 nt, artificial
  Chemically synthesized
uccgcuuccuguuccaguucacc

SEQ ID NO: 28144 - RNA, 23 nt, artificial
  Chemically synthesized
uuccgcuuccuguuccaguucac

SEQ ID NO: 28145 - RNA, 23 nt, artificial
  Chemically synthesized
guuccgcuuccuguuccaguuca

SEQ ID NO: 28146 - RNA, 23 nt, artificial
  Chemically synthesized
auacaggcccuuaggcucuauuu

SEQ ID NO: 28147 - RNA, 23 nt, artificial
  Chemically synthesized
caagcgaaucagugaacugcgug

SEQ ID NO: 28148 - RNA, 23 nt, artificial
  Chemically synthesized
acaagcgaaucagugaacugcgu

SEQ ID NO: 28149 - RNA, 23 nt, artificial
  Chemically synthesized
cauugaaacugcugcagacaagu

SEQ ID NO: 28150 - RNA, 23 nt, artificial
  Chemically synthesized
acauugaaacugcugcagacaag

SEQ ID NO: 28151 - RNA, 23 nt, artificial
  Chemically synthesized
ccaccaucacaucgugaaguucc

SEQ ID NO: 28152 - RNA, 23 nt, artificial
  Chemically synthesized
gccaccaucacaucgugaaguuc

SEQ ID NO: 28153 - RNA, 23 nt, artificial
  Chemically synthesized
ggccaccaucacaucgugaaguu

SEQ ID NO: 28154 - RNA, 23 nt, artificial
  Chemically synthesized
cggccaccaucacaucgugaagu

SEQ ID NO: 28155 - RNA, 23 nt, artificial
  Chemically synthesized
ccggccaccaucacaucgugaag

SEQ ID NO: 28156 - RNA, 23 nt, artificial
  Chemically synthesized
uugcaaggaaccuggagaaggca

SEQ ID NO: 28157 - RNA, 23 nt, artificial
  Chemically synthesized
uuugcaaggaaccuggagaaggc

SEQ ID NO: 28158 - RNA, 23 nt, artificial
  Chemically synthesized
uuuugcaaggaaccuggagaagg

SEQ ID NO: 28159 - RNA, 23 nt, artificial
  Chemically synthesized
auuuugcaaggaaccuggagaag

SEQ ID NO: 28160 - RNA, 23 nt, artificial
  Chemically synthesized
cuguuuggugccugaaggauggc

SEQ ID NO: 28161 - RNA, 23 nt, artificial
  Chemically synthesized
gcuguuuggugccugaaggaugg

SEQ ID NO: 28162 - RNA, 23 nt, artificial
  Chemically synthesized
ggcuguuuggugccugaaggaug

SEQ ID NO: 28163 - RNA, 23 nt, artificial
  Chemically synthesized
gggcuguuuggugccugaaggau

SEQ ID NO: 28164 - RNA, 23 nt, artificial
  Chemically synthesized
ggggcuguuuggugccugaagga

SEQ ID NO: 28165 - RNA, 23 nt, artificial
  Chemically synthesized
cuguaccagcgcuucaacacccu

SEQ ID NO: 28166 - RNA, 23 nt, artificial
  Chemically synthesized
gcuguaccagcgcuucaacaccc

SEQ ID NO: 28167 - RNA, 23 nt, artificial
  Chemically synthesized
caaugauaaugaguuaccuuccc

SEQ ID NO: 28168 - RNA, 23 nt, artificial
  Chemically synthesized
ccaaugauaaugaguuaccuucc

SEQ ID NO: 28169 - RNA, 23 nt, artificial
  Chemically synthesized
gccaaugauaaugaguuaccuuc

SEQ ID NO: 28170 - RNA, 23 nt, artificial
  Chemically synthesized
ugccaaugauaaugaguuaccuu

SEQ ID NO: 28171 - RNA, 23 nt, artificial
  Chemically synthesized
augccaaugauaaugaguuaccu

SEQ ID NO: 28172 - RNA, 23 nt, artificial
  Chemically synthesized
gcuccucacaacagauucagcag

SEQ ID NO: 28173 - RNA, 23 nt, artificial
  Chemically synthesized
ggcuccucacaacagauucagca

SEQ ID NO: 28174 - RNA, 23 nt, artificial
  Chemically synthesized
aggcuccucacaacagauucagc

SEQ ID NO: 28175 - RNA, 23 nt, artificial
  Chemically synthesized
uuuacauuuucuaaagcaacagg

SEQ ID NO: 28176 - RNA, 23 nt, artificial
  Chemically synthesized
guuuacauuuucuaaagcaacag

SEQ ID NO: 28177 - RNA, 23 nt, artificial
  Chemically synthesized
gcguuuacauuuucuaaagcaac

SEQ ID NO: 28178 - RNA, 23 nt, artificial
  Chemically synthesized
agcuaggcaacagcagcagauug

SEQ ID NO: 28179 - RNA, 23 nt, artificial
  Chemically synthesized
cagcuaggcaacagcagcagauu

SEQ ID NO: 28180 - RNA, 23 nt, artificial
  Chemically synthesized
gcagcuaggcaacagcagcagau

SEQ ID NO: 28181 - RNA, 23 nt, artificial
  Chemically synthesized
aaggaaaacugaauggguuccag

SEQ ID NO: 28182 - RNA, 23 nt, artificial
  Chemically synthesized
aaaggaaaacugaauggguucca

SEQ ID NO: 28183 - RNA, 23 nt, artificial
  Chemically synthesized
gaaaggaaaacugaauggguucc

SEQ ID NO: 28184 - RNA, 23 nt, artificial
  Chemically synthesized
agaaaggaaaacugaauggguuc

SEQ ID NO: 28185 - RNA, 23 nt, artificial
  Chemically synthesized
aagaaaggaaaacugaauggguu

SEQ ID NO: 28186 - RNA, 23 nt, artificial
  Chemically synthesized
gcugauagugauggauggacgcc

SEQ ID NO: 28187 - RNA, 23 nt, artificial
  Chemically synthesized
ugcugauagugauggauggacgc

SEQ ID NO: 28188 - RNA, 23 nt, artificial
  Chemically synthesized
cugcugauagugauggauggacg

SEQ ID NO: 28189 - RNA, 23 nt, artificial
  Chemically synthesized
gcugcugauagugauggauggac

SEQ ID NO: 28190 - RNA, 23 nt, artificial
  Chemically synthesized
cuuaauggugcucacuuuagcag

SEQ ID NO: 28191 - RNA, 23 nt, artificial
  Chemically synthesized
ucuuaauggugcucacuuuagca

SEQ ID NO: 28192 - RNA, 23 nt, artificial
  Chemically synthesized
gucuuaauggugcucacuuuagc

SEQ ID NO: 28193 - RNA, 23 nt, artificial
  Chemically synthesized
uggucuuaauggugcucacuuua

SEQ ID NO: 28194 - RNA, 23 nt, artificial
  Chemically synthesized
aauggugcucacuuuagcagaca

SEQ ID NO: 28195 - RNA, 23 nt, artificial
  Chemically synthesized
uaauggugcucacuuuagcagac

SEQ ID NO: 28196 - RNA, 23 nt, artificial
  Chemically synthesized
uuaauggugcucacuuuagcaga

SEQ ID NO: 28197 - RNA, 23 nt, artificial
  Chemically synthesized
cuccaagcuaugggacauaccca

SEQ ID NO: 28198 - RNA, 23 nt, artificial
  Chemically synthesized
uaaauaagcgcaacauggaggug

SEQ ID NO: 28199 - RNA, 23 nt, artificial
  Chemically synthesized
uuaaauaagcgcaacauggaggu

SEQ ID NO: 28200 - RNA, 23 nt, artificial
  Chemically synthesized
cuuaaauaagcgcaacauggagg

SEQ ID NO: 28201 - RNA, 23 nt, artificial
  Chemically synthesized
ucuuaaauaagcgcaacauggag

SEQ ID NO: 28202 - RNA, 23 nt, artificial
  Chemically synthesized
aaagaaaggaaaacugaaugggu

SEQ ID NO: 28203 - RNA, 23 nt, artificial
  Chemically synthesized
caccaccuaagaauuaccagccg

SEQ ID NO: 28204 - RNA, 23 nt, artificial
  Chemically synthesized
acaccaccuaagaauuaccagcc

SEQ ID NO: 28205 - RNA, 23 nt, artificial
  Chemically synthesized
cacaccaccuaagaauuaccagc

SEQ ID NO: 28206 - RNA, 23 nt, artificial
  Chemically synthesized
ugcaggaaaagcugggugugaug

SEQ ID NO: 28207 - RNA, 23 nt, artificial
  Chemically synthesized
gugcaggaaaagcugggugugau

SEQ ID NO: 28208 - RNA, 23 nt, artificial
  Chemically synthesized
ggugcaggaaaagcuggguguga

SEQ ID NO: 28209 - RNA, 23 nt, artificial
  Chemically synthesized
cauucaaagcuacccgaacuaug

SEQ ID NO: 28210 - RNA, 23 nt, artificial
  Chemically synthesized
cccgucaccgaaucggacacuca

SEQ ID NO: 28211 - RNA, 23 nt, artificial
  Chemically synthesized
cgugaaguuccugcuggauuuug

SEQ ID NO: 28212 - RNA, 23 nt, artificial
  Chemically synthesized
ccauauacuccauguaccuccag

SEQ ID NO: 28213 - RNA, 23 nt, artificial
  Chemically synthesized
uccauauacuccauguaccucca

SEQ ID NO: 28214 - RNA, 23 nt, artificial
  Chemically synthesized
uuccauauacuccauguaccucc

SEQ ID NO: 28215 - RNA, 23 nt, artificial
  Chemically synthesized
aggacgaaagcgagacugagugg

SEQ ID NO: 28216 - RNA, 23 nt, artificial
  Chemically synthesized
aaggacgaaagcgagacugagug

SEQ ID NO: 28217 - RNA, 23 nt, artificial
  Chemically synthesized
gcaaggacgaaagcgagacugag

SEQ ID NO: 28218 - RNA, 23 nt, artificial
  Chemically synthesized
cgcaaggacgaaagcgagacuga

SEQ ID NO: 28219 - RNA, 23 nt, artificial
  Chemically synthesized
agugaauucaaguuccauauacu

SEQ ID NO: 28220 - RNA, 23 nt, artificial
  Chemically synthesized
ugagaggacaagucgacuacagc

SEQ ID NO: 28221 - RNA, 23 nt, artificial
  Chemically synthesized
augagaggacaagucgacuacag

SEQ ID NO: 28222 - RNA, 23 nt, artificial
  Chemically synthesized
aaugagaggacaagucgacuaca

SEQ ID NO: 28223 - RNA, 23 nt, artificial
  Chemically synthesized
uuccugcuggauuuuggugucaa

SEQ ID NO: 28224 - RNA, 23 nt, artificial
  Chemically synthesized
acgucccauacccuuugaucaua

SEQ ID NO: 28225 - RNA, 23 nt, artificial
  Chemically synthesized
aacgucccauacccuuugaucau

SEQ ID NO: 28226 - RNA, 23 nt, artificial
  Chemically synthesized
ugaaguuccugcuggauuuuggu

SEQ ID NO: 28227 - RNA, 23 nt, artificial
  Chemically synthesized
gugaaguuccugcuggauuuugg

SEQ ID NO: 28228 - RNA, 23 nt, artificial
  Chemically synthesized
caguauugccucaaaugcugcuc

SEQ ID NO: 28229 - RNA, 23 nt, artificial
  Chemically synthesized
ucaguauugccucaaaugcugcu

SEQ ID NO: 28230 - RNA, 23 nt, artificial
  Chemically synthesized
cucaguauugccucaaaugcugc

SEQ ID NO: 28231 - RNA, 23 nt, artificial
  Chemically synthesized
ucucaguauugccucaaaugcug

SEQ ID NO: 28232 - RNA, 23 nt, artificial
  Chemically synthesized
ugauauuaacuguuuucuugagc

SEQ ID NO: 28233 - RNA, 23 nt, artificial
  Chemically synthesized
augauauuaacuguuuucuugag

SEQ ID NO: 28234 - RNA, 23 nt, artificial
  Chemically synthesized
gaugauauuaacuguuuucuuga

SEQ ID NO: 28235 - RNA, 23 nt, artificial
  Chemically synthesized
agagugaugcagaccuggaggcc

SEQ ID NO: 28236 - RNA, 23 nt, artificial
  Chemically synthesized
cagagugaugcagaccuggaggc

SEQ ID NO: 28237 - RNA, 23 nt, artificial
  Chemically synthesized
ccagagugaugcagaccuggagg

SEQ ID NO: 28238 - RNA, 23 nt, artificial
  Chemically synthesized
accagagugaugcagaccuggag

SEQ ID NO: 28239 - RNA, 23 nt, artificial
  Chemically synthesized
uaccagagugaugcagaccugga

SEQ ID NO: 28240 - RNA, 23 nt, artificial
  Chemically synthesized
acgguucagcugaauuuuuuucc

SEQ ID NO: 28241 - RNA, 23 nt, artificial
  Chemically synthesized
cgguucagcugaauuuuuuuccc

SEQ ID NO: 28242 - RNA, 23 nt, artificial
  Chemically synthesized
gguucagcugaauuuuuuuccca

SEQ ID NO: 28243 - RNA, 23 nt, artificial
  Chemically synthesized
guucagcugaauuuuuuucccau

SEQ ID NO: 28244 - RNA, 23 nt, artificial
  Chemically synthesized
guuaauaucaucggcaucaucgc

SEQ ID NO: 28245 - RNA, 23 nt, artificial
  Chemically synthesized
aauaucaucggcaucaucgcggg

SEQ ID NO: 28246 - RNA, 23 nt, artificial
  Chemically synthesized
gaaguuuugaauuuuguuccugg

SEQ ID NO: 28247 - RNA, 23 nt, artificial
  Chemically synthesized
aaguuuugaauuuuguuccuggu

SEQ ID NO: 28248 - RNA, 23 nt, artificial
  Chemically synthesized
aguuuugaauuuuguuccugguu

SEQ ID NO: 28249 - RNA, 23 nt, artificial
  Chemically synthesized
guuuugaauuuuguuccugguua

SEQ ID NO: 28250 - RNA, 23 nt, artificial
  Chemically synthesized
uuuugaauuuuguuccugguuaa

SEQ ID NO: 28251 - RNA, 23 nt, artificial
  Chemically synthesized
cacuaucagcagcauucacguug

SEQ ID NO: 28252 - RNA, 23 nt, artificial
  Chemically synthesized
acuaucagcagcauucacguuga

SEQ ID NO: 28253 - RNA, 23 nt, artificial
  Chemically synthesized
cuaucagcagcauucacguugac

SEQ ID NO: 28254 - RNA, 23 nt, artificial
  Chemically synthesized
uaucagcagcauucacguugaca

SEQ ID NO: 28255 - RNA, 23 nt, artificial
  Chemically synthesized
aucagcagcauucacguugacac

SEQ ID NO: 28256 - RNA, 23 nt, artificial
  Chemically synthesized
cauuuucaguacguuuuucucca

SEQ ID NO: 28257 - RNA, 23 nt, artificial
  Chemically synthesized
caucacuaucagcagcauucacg

SEQ ID NO: 28258 - RNA, 23 nt, artificial
  Chemically synthesized
ucacuaucagcagcauucacguu

SEQ ID NO: 28259 - RNA, 23 nt, artificial
  Chemically synthesized
cacuuuaccaaucucgaugcccg

SEQ ID NO: 28260 - RNA, 23 nt, artificial
  Chemically synthesized
acuuuaccaaucucgaugcccgg

SEQ ID NO: 28261 - RNA, 23 nt, artificial
  Chemically synthesized
cuuuaccaaucucgaugcccggc

SEQ ID NO: 28262 - RNA, 23 nt, artificial
  Chemically synthesized
uucuagcugcagcuuuccuggaa

SEQ ID NO: 28263 - RNA, 23 nt, artificial
  Chemically synthesized
ucuagcugcagcuuuccuggaaa

SEQ ID NO: 28264 - RNA, 23 nt, artificial
  Chemically synthesized
auacuuuugguauauaaaaagcc

SEQ ID NO: 28265 - RNA, 23 nt, artificial
  Chemically synthesized
uacuuuugguauauaaaaagccu

SEQ ID NO: 28266 - RNA, 23 nt, artificial
  Chemically synthesized
acuuuugguauauaaaaagccug

SEQ ID NO: 28267 - RNA, 23 nt, artificial
  Chemically synthesized
cuuuugguauauaaaaagccugu

SEQ ID NO: 28268 - RNA, 23 nt, artificial
  Chemically synthesized
uuuugguauauaaaaagccugua

SEQ ID NO: 28269 - RNA, 23 nt, artificial
  Chemically synthesized
acguuuuucuccagguacauuua

SEQ ID NO: 28270 - RNA, 23 nt, artificial
  Chemically synthesized
cguuuuucuccagguacauuuau

SEQ ID NO: 28271 - RNA, 23 nt, artificial
  Chemically synthesized
guuuuucuccagguacauuuauu

SEQ ID NO: 28272 - RNA, 23 nt, artificial
  Chemically synthesized
uuuuucuccagguacauuuauua

SEQ ID NO: 28273 - RNA, 23 nt, artificial
  Chemically synthesized
guuguuauuguccucugccggcu

SEQ ID NO: 28274 - RNA, 23 nt, artificial
  Chemically synthesized
cuauuucagcagacagauugccg

SEQ ID NO: 28275 - RNA, 23 nt, artificial
  Chemically synthesized
auuucagcagacagauugccguu

SEQ ID NO: 28276 - RNA, 23 nt, artificial
  Chemically synthesized
uuuauuuggauuuauaguaauug

SEQ ID NO: 28277 - RNA, 23 nt, artificial
  Chemically synthesized
uuauuuggauuuauaguaauugg

SEQ ID NO: 28278 - RNA, 23 nt, artificial
  Chemically synthesized
uauuuggauuuauaguaauuggc

SEQ ID NO: 28279 - RNA, 23 nt, artificial
  Chemically synthesized
auuuggauuuauaguaauuggca

SEQ ID NO: 28280 - RNA, 23 nt, artificial
  Chemically synthesized
uuuggauuuauaguaauuggcaa

SEQ ID NO: 28281 - RNA, 23 nt, artificial
  Chemically synthesized
ugguauauaaaaagccuguacgu

SEQ ID NO: 28282 - RNA, 23 nt, artificial
  Chemically synthesized
gguauauaaaaagccuguacgua

SEQ ID NO: 28283 - RNA, 23 nt, artificial
  Chemically synthesized
guauauaaaaagccuguacguac

SEQ ID NO: 28284 - RNA, 23 nt, artificial
  Chemically synthesized
cacuuuucuucaccacacuaugu

SEQ ID NO: 28285 - RNA, 23 nt, artificial
  Chemically synthesized
acuuuucuucaccacacuaugua

SEQ ID NO: 28286 - RNA, 23 nt, artificial
  Chemically synthesized
ggguuuauugugcacauuuacac

SEQ ID NO: 28287 - RNA, 23 nt, artificial
  Chemically synthesized
gguuuauugugcacauuuacaca

SEQ ID NO: 28288 - RNA, 23 nt, artificial
  Chemically synthesized
gaauuuuuuucccauagagacgu

SEQ ID NO: 28289 - RNA, 23 nt, artificial
  Chemically synthesized
aauuuuuuucccauagagacguu

SEQ ID NO: 28290 - RNA, 23 nt, artificial
  Chemically synthesized
gggguuaaaccggacucucagcc

SEQ ID NO: 28291 - RNA, 23 nt, artificial
  Chemically synthesized
ggguuaaaccggacucucagccc

SEQ ID NO: 28292 - RNA, 23 nt, artificial
  Chemically synthesized
gguuaaaccggacucucagcccg

SEQ ID NO: 28293 - RNA, 23 nt, artificial
  Chemically synthesized
guuaaaccggacucucagcccgu

SEQ ID NO: 28294 - RNA, 23 nt, artificial
  Chemically synthesized
uuaaaccggacucucagcccgug

SEQ ID NO: 28295 - RNA, 23 nt, artificial
  Chemically synthesized
aaauugcagucuguacuuccugc

SEQ ID NO: 28296 - RNA, 23 nt, artificial
  Chemically synthesized
aauugcagucuguacuuccugcu

SEQ ID NO: 28297 - RNA, 23 nt, artificial
  Chemically synthesized
auugcagucuguacuuccugcuu

SEQ ID NO: 28298 - RNA, 23 nt, artificial
  Chemically synthesized
aaaauucuacaacaucucgacag

SEQ ID NO: 28299 - RNA, 23 nt, artificial
  Chemically synthesized
aaauucuacaacaucucgacagg

SEQ ID NO: 28300 - RNA, 23 nt, artificial
  Chemically synthesized
auucuacaacaucucgacagguu

SEQ ID NO: 28301 - RNA, 23 nt, artificial
  Chemically synthesized
gcuuuagaaaauguaaacgcugu

SEQ ID NO: 28302 - RNA, 23 nt, artificial
  Chemically synthesized
cuuuagaaaauguaaacgcuguu

SEQ ID NO: 28303 - RNA, 23 nt, artificial
  Chemically synthesized
auuuaagaguuccuucugcugcu

SEQ ID NO: 28304 - RNA, 23 nt, artificial
  Chemically synthesized
uaagaguuccuucugcugcugaa

SEQ ID NO: 28305 - RNA, 23 nt, artificial
  Chemically synthesized
ggcguucacuuuucuucaccaca

SEQ ID NO: 28306 - RNA, 23 nt, artificial
  Chemically synthesized
gcguucacuuuucuucaccacac

SEQ ID NO: 28307 - RNA, 23 nt, artificial
  Chemically synthesized
cguucacuuuucuucaccacacu

SEQ ID NO: 28308 - RNA, 23 nt, artificial
  Chemically synthesized
guucacuuuucuucaccacacua

SEQ ID NO: 28309 - RNA, 23 nt, artificial
  Chemically synthesized
auuuuguuccugguuaaguuggu

SEQ ID NO: 28310 - RNA, 23 nt, artificial
  Chemically synthesized
uuguuccugguuaaguugguuac

SEQ ID NO: 28311 - RNA, 23 nt, artificial
  Chemically synthesized
gcacuuuaccaaucucgaugccc

SEQ ID NO: 28312 - RNA, 23 nt, artificial
  Chemically synthesized
cugcuucuuuuccuggaacaugg

SEQ ID NO: 28313 - RNA, 23 nt, artificial
  Chemically synthesized
ugcuucuuuuccuggaacauggc

SEQ ID NO: 28314 - RNA, 23 nt, artificial
  Chemically synthesized
gcuucuuuuccuggaacauggca

SEQ ID NO: 28315 - RNA, 23 nt, artificial
  Chemically synthesized
cuucuuuuccuggaacauggcac

SEQ ID NO: 28316 - RNA, 23 nt, artificial
  Chemically synthesized
aauuuucuucagcuuguucuccu

SEQ ID NO: 28317 - RNA, 23 nt, artificial
  Chemically synthesized
uuucuucagcuuguucuccuggg

SEQ ID NO: 28318 - RNA, 23 nt, artificial
  Chemically synthesized
gcuuuucauuuucagaaauagac

SEQ ID NO: 28319 - RNA, 23 nt, artificial
  Chemically synthesized
cuuuucauuuucagaaauagacu

SEQ ID NO: 28320 - RNA, 23 nt, artificial
  Chemically synthesized
uuuucauuuucagaaauagacug

SEQ ID NO: 28321 - RNA, 23 nt, artificial
  Chemically synthesized
cauuuucagaaauagacugcugc

SEQ ID NO: 28322 - RNA, 23 nt, artificial
  Chemically synthesized
auuuucagaaauagacugcugcu

SEQ ID NO: 28323 - RNA, 23 nt, artificial
  Chemically synthesized
guuucaaugucgcuuaugguuga

SEQ ID NO: 28324 - RNA, 23 nt, artificial
  Chemically synthesized
uuucaaugucgcuuaugguugag

SEQ ID NO: 28325 - RNA, 23 nt, artificial
  Chemically synthesized
uacguacaauucacaccucagug

SEQ ID NO: 28326 - RNA, 23 nt, artificial
  Chemically synthesized
acguacaauucacaccucaguga

SEQ ID NO: 28327 - RNA, 23 nt, artificial
  Chemically synthesized
cguacaauucacaccucagugaa

SEQ ID NO: 28328 - RNA, 23 nt, artificial
  Chemically synthesized
guacaauucacaccucagugaag

SEQ ID NO: 28329 - RNA, 23 nt, artificial
  Chemically synthesized
agaguauaugcugaggcucuccc

SEQ ID NO: 28330 - RNA, 23 nt, artificial
  Chemically synthesized
gaguauaugcugaggcucuccca

SEQ ID NO: 28331 - RNA, 23 nt, artificial
  Chemically synthesized
guauaugcugaggcucucccagu

SEQ ID NO: 28332 - RNA, 23 nt, artificial
  Chemically synthesized
uauaugcugaggcucucccaguu

SEQ ID NO: 28333 - RNA, 23 nt, artificial
  Chemically synthesized
aaauuucacuucuucccuccgug

SEQ ID NO: 28334 - RNA, 23 nt, artificial
  Chemically synthesized
auuucacuucuucccuccgugga

SEQ ID NO: 28335 - RNA, 23 nt, artificial
  Chemically synthesized
uucacuucuucccuccguggacc

SEQ ID NO: 28336 - RNA, 23 nt, artificial
  Chemically synthesized
gcgcuuauuuaagaguuccuucu

SEQ ID NO: 28337 - RNA, 23 nt, artificial
  Chemically synthesized
cgcuuauuuaagaguuccuucug

SEQ ID NO: 28338 - RNA, 23 nt, artificial
  Chemically synthesized
accuuuguucaucacacccagcu

SEQ ID NO: 28339 - RNA, 23 nt, artificial
  Chemically synthesized
ccuuuguucaucacacccagcuu

SEQ ID NO: 28340 - RNA, 23 nt, artificial
  Chemically synthesized
caccauuaagaccauuuucuagc

SEQ ID NO: 28341 - RNA, 23 nt, artificial
  Chemically synthesized
accauuaagaccauuuucuagcu

SEQ ID NO: 28342 - RNA, 23 nt, artificial
  Chemically synthesized
ccauuaagaccauuuucuagcug

SEQ ID NO: 28343 - RNA, 23 nt, artificial
  Chemically synthesized
cauuaagaccauuuucuagcugc

SEQ ID NO: 28344 - RNA, 23 nt, artificial
  Chemically synthesized
auuaagaccauuuucuagcugca

SEQ ID NO: 28345 - RNA, 23 nt, artificial
  Chemically synthesized
aagaaaacaguuaauaucaucgg

SEQ ID NO: 28346 - RNA, 23 nt, artificial
  Chemically synthesized
agaaaacaguuaauaucaucggc

SEQ ID NO: 28347 - RNA, 23 nt, artificial
  Chemically synthesized
gaaaacaguuaauaucaucggca

SEQ ID NO: 28348 - RNA, 23 nt, artificial
  Chemically synthesized
aaaacaguuaauaucaucggcau

SEQ ID NO: 28349 - RNA, 23 nt, artificial
  Chemically synthesized
cagguuuuugggcacauagcccu

SEQ ID NO: 28350 - RNA, 23 nt, artificial
  Chemically synthesized
agguuuuugggcacauagcccuc

SEQ ID NO: 28351 - RNA, 23 nt, artificial
  Chemically synthesized
gguuuuugggcacauagcccucc

SEQ ID NO: 28352 - RNA, 23 nt, artificial
  Chemically synthesized
guuuuugggcacauagcccuccc

SEQ ID NO: 28353 - RNA, 23 nt, artificial
  Chemically synthesized
uuuuugggcacauagcccucccg

SEQ ID NO: 28354 - RNA, 23 nt, artificial
  Chemically synthesized
uguuauuguccucugccggcucg

SEQ ID NO: 28355 - RNA, 23 nt, artificial
  Chemically synthesized
cccauuucugaagauguucguac

SEQ ID NO: 28356 - RNA, 23 nt, artificial
  Chemically synthesized
ccauuucugaagauguucguaca

SEQ ID NO: 28357 - RNA, 23 nt, artificial
  Chemically synthesized
cauuucugaagauguucguacau

SEQ ID NO: 28358 - RNA, 23 nt, artificial
  Chemically synthesized
auuucugaagauguucguacauc

SEQ ID NO: 28359 - RNA, 23 nt, artificial
  Chemically synthesized
ggguuugauccguggauacagcc

SEQ ID NO: 28360 - RNA, 23 nt, artificial
  Chemically synthesized
gguuugauccguggauacagccc

SEQ ID NO: 28361 - RNA, 23 nt, artificial
  Chemically synthesized
guuugauccguggauacagcccc

SEQ ID NO: 28362 - RNA, 23 nt, artificial
  Chemically synthesized
uuugauccguggauacagcccca

SEQ ID NO: 28363 - RNA, 23 nt, artificial
  Chemically synthesized
uugauccguggauacagccccag

SEQ ID NO: 28364 - RNA, 23 nt, artificial
  Chemically synthesized
uacauuuauuacauuucucugag

SEQ ID NO: 28365 - RNA, 23 nt, artificial
  Chemically synthesized
acauuuauuacauuucucugagu

SEQ ID NO: 28366 - RNA, 23 nt, artificial
  Chemically synthesized
cauuuauuacauuucucugaguu

SEQ ID NO: 28367 - RNA, 23 nt, artificial
  Chemically synthesized
auuuauuacauuucucugaguuc

SEQ ID NO: 28368 - RNA, 23 nt, artificial
  Chemically synthesized
gaaaauguaaacgcuguuccuug

SEQ ID NO: 28369 - RNA, 23 nt, artificial
  Chemically synthesized
aaauguaaacgcuguuccuuggc

SEQ ID NO: 28370 - RNA, 23 nt, artificial
  Chemically synthesized
aauguaaacgcuguuccuuggca

SEQ ID NO: 28371 - RNA, 23 nt, artificial
  Chemically synthesized
auguaaacgcuguuccuuggcaa

SEQ ID NO: 28372 - RNA, 23 nt, artificial
  Chemically synthesized
gauuuucaaucugcugcuguugc

SEQ ID NO: 28373 - RNA, 23 nt, artificial
  Chemically synthesized
auuuucaaucugcugcuguugcc

SEQ ID NO: 28374 - RNA, 23 nt, artificial
  Chemically synthesized
ucuucagcuuguucuccugggcu

SEQ ID NO: 28375 - RNA, 23 nt, artificial
  Chemically synthesized
cuucagcuuguucuccugggcuu

SEQ ID NO: 28376 - RNA, 23 nt, artificial
  Chemically synthesized
auccaucacuaucagcagcauuc

SEQ ID NO: 28377 - RNA, 23 nt, artificial
  Chemically synthesized
uccaucacuaucagcagcauuca

SEQ ID NO: 28378 - RNA, 23 nt, artificial
  Chemically synthesized
ccaucacuaucagcagcauucac

SEQ ID NO: 28379 - RNA, 23 nt, artificial
  Chemically synthesized
ucuuuaaaucuuccaauugcuga

SEQ ID NO: 28380 - RNA, 23 nt, artificial
  Chemically synthesized
cuuuaaaucuuccaauugcugac

SEQ ID NO: 28381 - RNA, 23 nt, artificial
  Chemically synthesized
cagauugccguucaugauuuugc

SEQ ID NO: 28382 - RNA, 23 nt, artificial
  Chemically synthesized
agauugccguucaugauuuugcu

SEQ ID NO: 28383 - RNA, 23 nt, artificial
  Chemically synthesized
gauugccguucaugauuuugcug

SEQ ID NO: 28384 - RNA, 23 nt, artificial
  Chemically synthesized
cugcuuuaacugacuuauuuaag

SEQ ID NO: 28385 - RNA, 23 nt, artificial
  Chemically synthesized
gcuuuaacugacuuauuuaaggc

SEQ ID NO: 28386 - RNA, 23 nt, artificial
  Chemically synthesized
cuuuaacugacuuauuuaaggcg

SEQ ID NO: 28387 - RNA, 23 nt, artificial
  Chemically synthesized
aaccuuucuauuucagcagacag

SEQ ID NO: 28388 - RNA, 23 nt, artificial
  Chemically synthesized
accuuucuauuucagcagacaga

SEQ ID NO: 28389 - RNA, 23 nt, artificial
  Chemically synthesized
ccuuucuauuucagcagacagau

SEQ ID NO: 28390 - RNA, 23 nt, artificial
  Chemically synthesized
cuuucuauuucagcagacagauu

SEQ ID NO: 28391 - RNA, 23 nt, artificial
  Chemically synthesized
gaauuuucuucagcuuguucucc

SEQ ID NO: 28392 - RNA, 23 nt, artificial
  Chemically synthesized
aaggaugaguguccgauucggug

SEQ ID NO: 28393 - RNA, 23 nt, artificial
  Chemically synthesized
aggaugaguguccgauucgguga

SEQ ID NO: 28394 - RNA, 23 nt, artificial
  Chemically synthesized
ggaugaguguccgauucggugac

SEQ ID NO: 28395 - RNA, 23 nt, artificial
  Chemically synthesized
gaugaguguccgauucggugacg

SEQ ID NO: 28396 - RNA, 23 nt, artificial
  Chemically synthesized
augaguguccgauucggugacgg

SEQ ID NO: 28397 - RNA, 23 nt, artificial
  Chemically synthesized
cugauucgcuuguccaucauggc

SEQ ID NO: 28398 - RNA, 23 nt, artificial
  Chemically synthesized
ugauucgcuuguccaucauggcc

SEQ ID NO: 28399 - RNA, 23 nt, artificial
  Chemically synthesized
gauucgcuuguccaucauggcca

SEQ ID NO: 28400 - RNA, 23 nt, artificial
  Chemically synthesized
auucgcuuguccaucauggccac

SEQ ID NO: 28401 - RNA, 23 nt, artificial
  Chemically synthesized
gcaguucacugauucgcuugucc

SEQ ID NO: 28402 - RNA, 23 nt, artificial
  Chemically synthesized
caguucacugauucgcuugucca

SEQ ID NO: 28403 - RNA, 23 nt, artificial
  Chemically synthesized
aguucacugauucgcuuguccau

SEQ ID NO: 28404 - RNA, 23 nt, artificial
  Chemically synthesized
ccaucauuagcggauuuggaucu

SEQ ID NO: 28405 - RNA, 23 nt, artificial
  Chemically synthesized
caucauuagcggauuuggaucuu

SEQ ID NO: 28406 - RNA, 23 nt, artificial
  Chemically synthesized
gucuuuuuaacuccaccgccgcu

SEQ ID NO: 28407 - RNA, 23 nt, artificial
  Chemically synthesized
cuuuuuaacuccaccgccgcugg

SEQ ID NO: 28408 - RNA, 23 nt, artificial
  Chemically synthesized
aggauucacauuguggacgcugu

SEQ ID NO: 28409 - RNA, 23 nt, artificial
  Chemically synthesized
ggauucacauuguggacgcuguc

SEQ ID NO: 28410 - RNA, 23 nt, artificial
  Chemically synthesized
gauucacauuguggacgcugucu

SEQ ID NO: 28411 - RNA, 23 nt, artificial
  Chemically synthesized
gggguuaugggacuucuuaaugg

SEQ ID NO: 28412 - RNA, 23 nt, artificial
  Chemically synthesized
ggguuaugggacuucuuaauggc

SEQ ID NO: 28413 - RNA, 23 nt, artificial
  Chemically synthesized
gguuaugggacuucuuaauggca

SEQ ID NO: 28414 - RNA, 23 nt, artificial
  Chemically synthesized
guuaugggacuucuuaauggcaa

SEQ ID NO: 28415 - RNA, 23 nt, artificial
  Chemically synthesized
uuaugggacuucuuaauggcaag

SEQ ID NO: 28416 - RNA, 23 nt, artificial
  Chemically synthesized
acccuuaaaauugcagucuguac

SEQ ID NO: 28417 - RNA, 23 nt, artificial
  Chemically synthesized
cccuuaaaauugcagucuguacu

SEQ ID NO: 28418 - RNA, 23 nt, artificial
  Chemically synthesized
ccuuaaaauugcagucuguacuu

SEQ ID NO: 28419 - RNA, 23 nt, artificial
  Chemically synthesized
gaauuuuguuccugguuaaguug

SEQ ID NO: 28420 - RNA, 23 nt, artificial
  Chemically synthesized
cgaguugggcuucuucaaguugg

SEQ ID NO: 28421 - RNA, 23 nt, artificial
  Chemically synthesized
gaguugggcuucuucaaguuggu

SEQ ID NO: 28422 - RNA, 23 nt, artificial
  Chemically synthesized
aguugggcuucuucaaguugguc

SEQ ID NO: 28423 - RNA, 23 nt, artificial
  Chemically synthesized
guugggcuucuucaaguuggucc

SEQ ID NO: 28424 - RNA, 23 nt, artificial
  Chemically synthesized
acgaauuuucuucagcuuguucu

SEQ ID NO: 28425 - RNA, 23 nt, artificial
  Chemically synthesized
cgaauuuucuucagcuuguucuc

SEQ ID NO: 28426 - RNA, 23 nt, artificial
  Chemically synthesized
augauuuugcuguagucgacuug

SEQ ID NO: 28427 - RNA, 23 nt, artificial
  Chemically synthesized
ugauuuugcuguagucgacuugu

SEQ ID NO: 28428 - RNA, 23 nt, artificial
  Chemically synthesized
gauuuugcuguagucgacuuguc

SEQ ID NO: 28429 - RNA, 23 nt, artificial
  Chemically synthesized
aggguaugggacguucauuuccc

SEQ ID NO: 28430 - RNA, 23 nt, artificial
  Chemically synthesized
ggguaugggacguucauuucccc

SEQ ID NO: 28431 - RNA, 23 nt, artificial
  Chemically synthesized
gguaugggacguucauuuccccu

SEQ ID NO: 28432 - RNA, 23 nt, artificial
  Chemically synthesized
guaugggacguucauuuccccuc

SEQ ID NO: 28433 - RNA, 23 nt, artificial
  Chemically synthesized
uaugggacguucauuuccccucc

SEQ ID NO: 28434 - RNA, 23 nt, artificial
  Chemically synthesized
caguuucaaugucgcuuaugguu

SEQ ID NO: 28435 - RNA, 23 nt, artificial
  Chemically synthesized
gugcuccaaaaggaaguucaggc

SEQ ID NO: 28436 - RNA, 23 nt, artificial
  Chemically synthesized
ugcuccaaaaggaaguucaggcg

SEQ ID NO: 28437 - RNA, 23 nt, artificial
  Chemically synthesized
gcuccaaaaggaaguucaggcga

SEQ ID NO: 28438 - RNA, 23 nt, artificial
  Chemically synthesized
cuccaaaaggaaguucaggcgag

SEQ ID NO: 28439 - RNA, 23 nt, artificial
  Chemically synthesized
uccaaaaggaaguucaggcgagu

SEQ ID NO: 28440 - RNA, 23 nt, artificial
  Chemically synthesized
guccucucauugcacgaauuuuc

SEQ ID NO: 28441 - RNA, 23 nt, artificial
  Chemically synthesized
uccucucauugcacgaauuuucu

SEQ ID NO: 28442 - RNA, 23 nt, artificial
  Chemically synthesized
ccucucauugcacgaauuuucuu

SEQ ID NO: 28443 - RNA, 23 nt, artificial
  Chemically synthesized
cucucauugcacgaauuuucuuc

SEQ ID NO: 28444 - RNA, 23 nt, artificial
  Chemically synthesized
auaucaucggcaucaucgcgggg

SEQ ID NO: 28445 - RNA, 23 nt, artificial
  Chemically synthesized
uaucaucggcaucaucgcgggga

SEQ ID NO: 28446 - RNA, 23 nt, artificial
  Chemically synthesized
aaaaucuguucauuguugcucaa

SEQ ID NO: 28447 - RNA, 23 nt, artificial
  Chemically synthesized
aaaucuguucauuguugcucaag

SEQ ID NO: 28448 - RNA, 23 nt, artificial
  Chemically synthesized
aaucuguucauuguugcucaaga

SEQ ID NO: 28449 - RNA, 23 nt, artificial
  Chemically synthesized
caccuuguucacuguucucaguu

SEQ ID NO: 28450 - RNA, 23 nt, artificial
  Chemically synthesized
accuuguucacuguucucaguug

SEQ ID NO: 28451 - RNA, 23 nt, artificial
  Chemically synthesized
ccuuguucacuguucucaguugg

SEQ ID NO: 28452 - RNA, 23 nt, artificial
  Chemically synthesized
cuuguucacuguucucaguuggg

SEQ ID NO: 28453 - RNA, 23 nt, artificial
  Chemically synthesized
uuguucacuguucucaguugggg

SEQ ID NO: 28454 - RNA, 23 nt, artificial
  Chemically synthesized
cccauuuucaguacguuuuucuc

SEQ ID NO: 28455 - RNA, 23 nt, artificial
  Chemically synthesized
cggguuuauugugcacauuuaca

SEQ ID NO: 28456 - RNA, 23 nt, artificial
  Chemically synthesized
aaacuguaggauucacauugugg

SEQ ID NO: 28457 - RNA, 23 nt, artificial
  Chemically synthesized
aacuguaggauucacauugugga

SEQ ID NO: 28458 - RNA, 23 nt, artificial
  Chemically synthesized
acuguaggauucacauuguggac

SEQ ID NO: 28459 - RNA, 23 nt, artificial
  Chemically synthesized
cauuagcggauuuggaucuucca

SEQ ID NO: 28460 - RNA, 23 nt, artificial
  Chemically synthesized
auuagcggauuuggaucuuccau

SEQ ID NO: 28461 - RNA, 23 nt, artificial
  Chemically synthesized
uaaguugguuacgaaucuguagu

SEQ ID NO: 28462 - RNA, 23 nt, artificial
  Chemically synthesized
aaguugguuacgaaucuguaguu

SEQ ID NO: 28463 - RNA, 23 nt, artificial
  Chemically synthesized
guugguuacgaaucuguaguucu

SEQ ID NO: 28464 - RNA, 23 nt, artificial
  Chemically synthesized
uugguuacgaaucuguaguucuu

SEQ ID NO: 28465 - RNA, 23 nt, artificial
  Chemically synthesized
accauuuucuagcugcagcuuuc

SEQ ID NO: 28466 - RNA, 23 nt, artificial
  Chemically synthesized
ccauuuucuagcugcagcuuucc

SEQ ID NO: 28467 - RNA, 23 nt, artificial
  Chemically synthesized
cauuuucuagcugcagcuuuccu

SEQ ID NO: 28468 - RNA, 23 nt, artificial
  Chemically synthesized
guguuuccauuguccacaucggc

SEQ ID NO: 28469 - RNA, 23 nt, artificial
  Chemically synthesized
uguuuccauuguccacaucggcc

SEQ ID NO: 28470 - RNA, 23 nt, artificial
  Chemically synthesized
guuuccauuguccacaucggcca

SEQ ID NO: 28471 - RNA, 23 nt, artificial
  Chemically synthesized
uuuccauuguccacaucggccaa

SEQ ID NO: 28472 - RNA, 23 nt, artificial
  Chemically synthesized
uuggauuuauaguaauuggcaaa

SEQ ID NO: 28473 - RNA, 23 nt, artificial
  Chemically synthesized
cuguacuuccugcuucuuuuccu

SEQ ID NO: 28474 - RNA, 23 nt, artificial
  Chemically synthesized
guacuuccugcuucuuuuccugg

SEQ ID NO: 28475 - RNA, 23 nt, artificial
  Chemically synthesized
uacuuccugcuucuuuuccugga

SEQ ID NO: 28476 - RNA, 23 nt, artificial
  Chemically synthesized
cuuguucuccugggcuucaacuc

SEQ ID NO: 28477 - RNA, 23 nt, artificial
  Chemically synthesized
uguucuccugggcuucaacucgu

SEQ ID NO: 28478 - RNA, 23 nt, artificial
  Chemically synthesized
guucuccugggcuucaacucguu

SEQ ID NO: 28479 - RNA, 23 nt, artificial
  Chemically synthesized
gggguuugauccguggauacagc

SEQ ID NO: 28480 - RNA, 23 nt, artificial
  Chemically synthesized
gguguaggacuuggguauguccc

SEQ ID NO: 28481 - RNA, 23 nt, artificial
  Chemically synthesized
guguaggacuuggguauguccca

SEQ ID NO: 28482 - RNA, 23 nt, artificial
  Chemically synthesized
guaggacuuggguaugucccaua

SEQ ID NO: 28483 - RNA, 23 nt, artificial
  Chemically synthesized
gggcuucuucaaguugguccgcu

SEQ ID NO: 28484 - RNA, 23 nt, artificial
  Chemically synthesized
ggcuucuucaaguugguccgcuu

SEQ ID NO: 28485 - RNA, 23 nt, artificial
  Chemically synthesized
gcuucuucaaguugguccgcuug

SEQ ID NO: 28486 - RNA, 23 nt, artificial
  Chemically synthesized
cuucuucaaguugguccgcuugu

SEQ ID NO: 28487 - RNA, 23 nt, artificial
  Chemically synthesized
uucuucaaguugguccgcuuguu

SEQ ID NO: 28488 - RNA, 23 nt, artificial
  Chemically synthesized
gucugcagcaguuucaaugucgc

SEQ ID NO: 28489 - RNA, 23 nt, artificial
  Chemically synthesized
ucugcagcaguuucaaugucgcu

SEQ ID NO: 28490 - RNA, 23 nt, artificial
  Chemically synthesized
cugcagcaguuucaaugucgcuu

SEQ ID NO: 28491 - RNA, 23 nt, artificial
  Chemically synthesized
ugcagcaguuucaaugucgcuua

SEQ ID NO: 28492 - RNA, 23 nt, artificial
  Chemically synthesized
agcauuugaggcaauacugagag

SEQ ID NO: 28493 - RNA, 23 nt, artificial
  Chemically synthesized
gcauuugaggcaauacugagaga

SEQ ID NO: 28494 - RNA, 23 nt, artificial
  Chemically synthesized
cauuugaggcaauacugagagac

SEQ ID NO: 28495 - RNA, 23 nt, artificial
  Chemically synthesized
auuugaggcaauacugagagacu

SEQ ID NO: 28496 - RNA, 23 nt, artificial
  Chemically synthesized
cucugaguucguugcucuugggu

SEQ ID NO: 28497 - RNA, 23 nt, artificial
  Chemically synthesized
aggcucuuucucaguacuuucug

SEQ ID NO: 28498 - RNA, 23 nt, artificial
  Chemically synthesized
ggcucuuucucaguacuuucuga

SEQ ID NO: 28499 - RNA, 23 nt, artificial
  Chemically synthesized
gcucuuucucaguacuuucugaa

SEQ ID NO: 28500 - RNA, 23 nt, artificial
  Chemically synthesized
cucuuucucaguacuuucugaag

SEQ ID NO: 28501 - RNA, 23 nt, artificial
  Chemically synthesized
acuuccugcuucuuuuccuggaa

SEQ ID NO: 28502 - RNA, 23 nt, artificial
  Chemically synthesized
cuuccugcuucuuuuccuggaac

SEQ ID NO: 28503 - RNA, 23 nt, artificial
  Chemically synthesized
uuccugcuucuuuuccuggaaca

SEQ ID NO: 28504 - RNA, 23 nt, artificial
  Chemically synthesized
uaaguucaacacguggauuccca

SEQ ID NO: 28505 - RNA, 23 nt, artificial
  Chemically synthesized
aaguucaacacguggauucccaa

SEQ ID NO: 28506 - RNA, 23 nt, artificial
  Chemically synthesized
aguucaacacguggauucccaac

SEQ ID NO: 28507 - RNA, 23 nt, artificial
  Chemically synthesized
guucaacacguggauucccaacc

SEQ ID NO: 28508 - RNA, 23 nt, artificial
  Chemically synthesized
cugcucuacaagggcguucacuu

SEQ ID NO: 28509 - RNA, 23 nt, artificial
  Chemically synthesized
ugcucuacaagggcguucacuuu

SEQ ID NO: 28510 - RNA, 23 nt, artificial
  Chemically synthesized
gcucuacaagggcguucacuuuu

SEQ ID NO: 28511 - RNA, 23 nt, artificial
  Chemically synthesized
cucuacaagggcguucacuuuuc

SEQ ID NO: 28512 - RNA, 23 nt, artificial
  Chemically synthesized
ucaauuucugaagcuuuucauuu

SEQ ID NO: 28513 - RNA, 23 nt, artificial
  Chemically synthesized
caauuucugaagcuuuucauuuu

SEQ ID NO: 28514 - RNA, 23 nt, artificial
  Chemically synthesized
aauuucugaagcuuuucauuuuc

SEQ ID NO: 28515 - RNA, 23 nt, artificial
  Chemically synthesized
auuucugaagcuuuucauuuuca

SEQ ID NO: 28516 - RNA, 23 nt, artificial
  Chemically synthesized
uuucugaagcuuuucauuuucag

SEQ ID NO: 28517 - RNA, 23 nt, artificial
  Chemically synthesized
aaucuuccaauugcugacuaagc

SEQ ID NO: 28518 - RNA, 23 nt, artificial
  Chemically synthesized
aucuuccaauugcugacuaagcu

SEQ ID NO: 28519 - RNA, 23 nt, artificial
  Chemically synthesized
cuuccaauugcugacuaagcuga

SEQ ID NO: 28520 - RNA, 23 nt, artificial
  Chemically synthesized
uuccaauugcugacuaagcugau

SEQ ID NO: 28521 - RNA, 23 nt, artificial
  Chemically synthesized
acauuucucugaguucguugcuc

SEQ ID NO: 28522 - RNA, 23 nt, artificial
  Chemically synthesized
cauuucucugaguucguugcucu

SEQ ID NO: 28523 - RNA, 23 nt, artificial
  Chemically synthesized
auuucucugaguucguugcucuu

SEQ ID NO: 28524 - RNA, 23 nt, artificial
  Chemically synthesized
gaacuucuguuaaaaucuguuca

SEQ ID NO: 28525 - RNA, 23 nt, artificial
  Chemically synthesized
aacuucuguuaaaaucuguucau

SEQ ID NO: 28526 - RNA, 23 nt, artificial
  Chemically synthesized
acuucuguuaaaaucuguucauu

SEQ ID NO: 28527 - RNA, 23 nt, artificial
  Chemically synthesized
uucuguuaaaaucuguucauugu

SEQ ID NO: 28528 - RNA, 23 nt, artificial
  Chemically synthesized
guuaaaaucuguucauuguugcu

SEQ ID NO: 28529 - RNA, 23 nt, artificial
  Chemically synthesized
ucuguuaaaaucuguucauuguu

SEQ ID NO: 28530 - RNA, 23 nt, artificial
  Chemically synthesized
agguacauuuauuacauuucucu

SEQ ID NO: 28531 - RNA, 23 nt, artificial
  Chemically synthesized
guacauuuauuacauuucucuga

SEQ ID NO: 28532 - RNA, 23 nt, artificial
  Chemically synthesized
gcacugaaccuuucuauuucagc

SEQ ID NO: 28533 - RNA, 23 nt, artificial
  Chemically synthesized
cacugaaccuuucuauuucagca

SEQ ID NO: 28534 - RNA, 23 nt, artificial
  Chemically synthesized
acugaaccuuucuauuucagcag

SEQ ID NO: 28535 - RNA, 23 nt, artificial
  Chemically synthesized
cugaaccuuucuauuucagcaga

SEQ ID NO: 28536 - RNA, 23 nt, artificial
  Chemically synthesized
gcuguuugcagaggugaacgcug

SEQ ID NO: 28537 - RNA, 23 nt, artificial
  Chemically synthesized
cuguuugcagaggugaacgcugu

SEQ ID NO: 28538 - RNA, 23 nt, artificial
  Chemically synthesized
uguuugcagaggugaacgcuguu

SEQ ID NO: 28539 - RNA, 23 nt, artificial
  Chemically synthesized
guuugcagaggugaacgcuguua

SEQ ID NO: 28540 - RNA, 23 nt, artificial
  Chemically synthesized
ucauuguugcucaagaaaacagu

SEQ ID NO: 28541 - RNA, 23 nt, artificial
  Chemically synthesized
cauuguugcucaagaaaacaguu

SEQ ID NO: 28542 - RNA, 23 nt, artificial
  Chemically synthesized
auuguugcucaagaaaacaguua

SEQ ID NO: 28543 - RNA, 23 nt, artificial
  Chemically synthesized
uuguugcucaagaaaacaguuaa

SEQ ID NO: 28544 - RNA, 23 nt, artificial
  Chemically synthesized
guccuuggaggcgaaaguaccuc

SEQ ID NO: 28545 - RNA, 23 nt, artificial
  Chemically synthesized
ccuuggaggcgaaaguaccucuc

SEQ ID NO: 28546 - RNA, 23 nt, artificial
  Chemically synthesized
cuuggaggcgaaaguaccucucc

SEQ ID NO: 28547 - RNA, 23 nt, artificial
  Chemically synthesized
uuggaggcgaaaguaccucuccc

SEQ ID NO: 28548 - RNA, 23 nt, artificial
  Chemically synthesized
guucuuucaauuucugaagcuuu

SEQ ID NO: 28549 - RNA, 23 nt, artificial
  Chemically synthesized
uucuuucaauuucugaagcuuuu

SEQ ID NO: 28550 - RNA, 23 nt, artificial
  Chemically synthesized
cuuucaauuucugaagcuuuuca

SEQ ID NO: 28551 - RNA, 23 nt, artificial
  Chemically synthesized
uuucaauuucugaagcuuuucau

SEQ ID NO: 28552 - RNA, 23 nt, artificial
  Chemically synthesized
caaguugguccgcuuguucgugg

SEQ ID NO: 28553 - RNA, 23 nt, artificial
  Chemically synthesized
aaguugguccgcuuguucgugga

SEQ ID NO: 28554 - RNA, 23 nt, artificial
  Chemically synthesized
ugaguucguugcucuugggucug

SEQ ID NO: 28555 - RNA, 23 nt, artificial
  Chemically synthesized
gaguucguugcucuugggucuga

SEQ ID NO: 28556 - RNA, 23 nt, artificial
  Chemically synthesized
aguucguugcucuugggucugac

SEQ ID NO: 28557 - RNA, 23 nt, artificial
  Chemically synthesized
guucguugcucuugggucugacg

SEQ ID NO: 28558 - RNA, 23 nt, artificial
  Chemically synthesized
uucguugcucuugggucugacgg

SEQ ID NO: 28559 - RNA, 23 nt, artificial
  Chemically synthesized
ucuguaguucuugguacagucuu

SEQ ID NO: 28560 - RNA, 23 nt, artificial
  Chemically synthesized
cuguaguucuugguacagucuuu

SEQ ID NO: 28561 - RNA, 23 nt, artificial
  Chemically synthesized
ucaguuuuccuuucuuuaaaucu

SEQ ID NO: 28562 - RNA, 23 nt, artificial
  Chemically synthesized
caguuuuccuuucuuuaaaucuu

SEQ ID NO: 28563 - RNA, 23 nt, artificial
  Chemically synthesized
aguuuuccuuucuuuaaaucuuc

SEQ ID NO: 28564 - RNA, 23 nt, artificial
  Chemically synthesized
uuuuccuuucuuuaaaucuucca

SEQ ID NO: 28565 - RNA, 23 nt, artificial
  Chemically synthesized
guuccugguuaaguugguuacga

SEQ ID NO: 28566 - RNA, 23 nt, artificial
  Chemically synthesized
uuccugguuaaguugguuacgaa

SEQ ID NO: 28567 - RNA, 23 nt, artificial
  Chemically synthesized
uuuccuuucuuuaaaucuuccaa

SEQ ID NO: 28568 - RNA, 23 nt, artificial
  Chemically synthesized
uuccuuucuuuaaaucuuccaau

SEQ ID NO: 28569 - RNA, 23 nt, artificial
  Chemically synthesized
aaaauuucacuucuucccuccgu

SEQ ID NO: 28570 - RNA, 23 nt, artificial
  Chemically synthesized
ugccuuccuuccuccuuuccagg

SEQ ID NO: 28571 - RNA, 23 nt, artificial
  Chemically synthesized
gccuuccuuccuccuuuccaggg

SEQ ID NO: 28572 - RNA, 23 nt, artificial
  Chemically synthesized
ccuuccuuccuccuuuccaggga

SEQ ID NO: 28573 - RNA, 23 nt, artificial
  Chemically synthesized
cuuccuuccuccuuuccagggag

SEQ ID NO: 28574 - RNA, 23 nt, artificial
  Chemically synthesized
uuccuuccuccuuuccagggagc

SEQ ID NO: 28575 - RNA, 23 nt, artificial
  Chemically synthesized
ccaguuaaugggcaaacuggaga

SEQ ID NO: 28576 - RNA, 23 nt, artificial
  Chemically synthesized
caguuaaugggcaaacuggagaa

SEQ ID NO: 28577 - RNA, 23 nt, artificial
  Chemically synthesized
aguuaaugggcaaacuggagaaa

SEQ ID NO: 28578 - RNA, 23 nt, artificial
  Chemically synthesized
guuaaugggcaaacuggagaaag

SEQ ID NO: 28579 - RNA, 23 nt, artificial
  Chemically synthesized
cccauucaguuuuccuuucuuua

SEQ ID NO: 28580 - RNA, 23 nt, artificial
  Chemically synthesized
ccauucaguuuuccuuucuuuaa

SEQ ID NO: 28581 - RNA, 23 nt, artificial
  Chemically synthesized
cauucaguuuuccuuucuuuaaa

SEQ ID NO: 28582 - RNA, 23 nt, artificial
  Chemically synthesized
auucaguuuuccuuucuuuaaau

SEQ ID NO: 28583 - RNA, 23 nt, artificial
  Chemically synthesized
uucaguuuuccuuucuuuaaauc

SEQ ID NO: 28584 - RNA, 23 nt, artificial
  Chemically synthesized
aaggaaaaauuucacuucuuccc

SEQ ID NO: 28585 - RNA, 23 nt, artificial
  Chemically synthesized
aggaaaaauuucacuucuucccu

SEQ ID NO: 28586 - RNA, 23 nt, artificial
  Chemically synthesized
ggaaaaauuucacuucuucccuc

SEQ ID NO: 28587 - RNA, 23 nt, artificial
  Chemically synthesized
gaaaaauuucacuucuucccucc

SEQ ID NO: 28588 - RNA, 23 nt, artificial
  Chemically synthesized
ugguuacgaaucuguaguucuug

SEQ ID NO: 28589 - RNA, 23 nt, artificial
  Chemically synthesized
gguuacgaaucuguaguucuugg

SEQ ID NO: 28590 - RNA, 23 nt, artificial
  Chemically synthesized
guuacgaaucuguaguucuuggu

SEQ ID NO: 28591 - RNA, 23 nt, artificial
  Chemically synthesized
auauaaaaagccuguacguacaa

SEQ ID NO: 28592 - RNA, 23 nt, artificial
  Chemically synthesized
uauaaaaagccuguacguacaau

SEQ ID NO: 28593 - RNA, 23 nt, artificial
  Chemically synthesized
uuucuuuaaaucuuccaauugcu

SEQ ID NO: 28594 - RNA, 23 nt, artificial
  Chemically synthesized
ggccugcacaaucagccuuuagg

SEQ ID NO: 28595 - RNA, 23 nt, artificial
  Chemically synthesized
gccugcacaaucagccuuuaggu

SEQ ID NO: 28596 - RNA, 23 nt, artificial
  Chemically synthesized
ccugcacaaucagccuuuaggug

SEQ ID NO: 28597 - RNA, 23 nt, artificial
  Chemically synthesized
cugcacaaucagccuuuagguga

SEQ ID NO: 28598 - RNA, 23 nt, artificial
  Chemically synthesized
ugcacaaucagccuuuaggugaa

SEQ ID NO: 28599 - RNA, 23 nt, artificial
  Chemically synthesized
gcugcugauuuucaaucugcugc

SEQ ID NO: 28600 - RNA, 23 nt, artificial
  Chemically synthesized
cugcugauuuucaaucugcugcu

SEQ ID NO: 28601 - RNA, 23 nt, artificial
  Chemically synthesized
gcugauuuucaaucugcugcugu

SEQ ID NO: 28602 - RNA, 23 nt, artificial
  Chemically synthesized
cugauuuucaaucugcugcuguu

SEQ ID NO: 28603 - RNA, 23 nt, artificial
  Chemically synthesized
uggaaacuguaggauucacauug

SEQ ID NO: 28604 - RNA, 23 nt, artificial
  Chemically synthesized
ggaaacuguaggauucacauugu

SEQ ID NO: 28605 - RNA, 23 nt, artificial
  Chemically synthesized
gaaacuguaggauucacauugug

SEQ ID NO: 28606 - RNA, 23 nt, artificial
  Chemically synthesized
ccaauugcugacuaagcugauca

SEQ ID NO: 28607 - RNA, 23 nt, artificial
  Chemically synthesized
caauugcugacuaagcugaucaa

SEQ ID NO: 28608 - RNA, 23 nt, artificial
  Chemically synthesized
ggcauugguguuuccauugucca

SEQ ID NO: 28609 - RNA, 23 nt, artificial
  Chemically synthesized
gcauugguguuuccauuguccac

SEQ ID NO: 28610 - RNA, 23 nt, artificial
  Chemically synthesized
cauugguguuuccauuguccaca

SEQ ID NO: 28611 - RNA, 23 nt, artificial
  Chemically synthesized
auugguguuuccauuguccacau

SEQ ID NO: 28612 - RNA, 23 nt, artificial
  Chemically synthesized
guuauuguccucugccggcucgg

SEQ ID NO: 28613 - RNA, 23 nt, artificial
  Chemically synthesized
uuauuguccucugccggcucggc

SEQ ID NO: 28614 - RNA, 23 nt, artificial
  Chemically synthesized
uccuuucuuuaaaucuuccaauu

SEQ ID NO: 28615 - RNA, 23 nt, artificial
  Chemically synthesized
ccuuucuuuaaaucuuccaauug

SEQ ID NO: 28616 - RNA, 23 nt, artificial
  Chemically synthesized
cagguuguuuccgguguuauagg

SEQ ID NO: 28617 - RNA, 23 nt, artificial
  Chemically synthesized
agguuguuuccgguguuauagga

SEQ ID NO: 28618 - RNA, 23 nt, artificial
  Chemically synthesized
gguuguuuccgguguuauaggaa

SEQ ID NO: 28619 - RNA, 23 nt, artificial
  Chemically synthesized
guuguuuccgguguuauaggaac

SEQ ID NO: 28620 - RNA, 23 nt, artificial
  Chemically synthesized
ggccauccugcucaggcucuuuc

SEQ ID NO: 28621 - RNA, 23 nt, artificial
  Chemically synthesized
gccauccugcucaggcucuuucu

SEQ ID NO: 28622 - RNA, 23 nt, artificial
  Chemically synthesized
ccauccugcucaggcucuuucuc

SEQ ID NO: 28623 - RNA, 23 nt, artificial
  Chemically synthesized
cauccugcucaggcucuuucuca

SEQ ID NO: 28624 - RNA, 23 nt, artificial
  Chemically synthesized
ccccauuuucaguacguuuuucu

SEQ ID NO: 28625 - RNA, 23 nt, artificial
  Chemically synthesized
uccauacagaggcuccuuuggug

SEQ ID NO: 28626 - RNA, 23 nt, artificial
  Chemically synthesized
ccauacagaggcuccuuugguga

SEQ ID NO: 28627 - RNA, 23 nt, artificial
  Chemically synthesized
cauacagaggcuccuuuggugau

SEQ ID NO: 28628 - RNA, 23 nt, artificial
  Chemically synthesized
auacagaggcuccuuuggugaug

SEQ ID NO: 28629 - RNA, 23 nt, artificial
  Chemically synthesized
aguaagagcuucugucuucacug

SEQ ID NO: 28630 - RNA, 23 nt, artificial
  Chemically synthesized
guaagagcuucugucuucacugg

SEQ ID NO: 28631 - RNA, 23 nt, artificial
  Chemically synthesized
uaagagcuucugucuucacuggc

SEQ ID NO: 28632 - RNA, 23 nt, artificial
  Chemically synthesized
aagagcuucugucuucacuggca

SEQ ID NO: 28633 - RNA, 23 nt, artificial
  Chemically synthesized
agagcuucugucuucacuggcaa

SEQ ID NO: 28634 - RNA, 23 nt, artificial
  Chemically synthesized
cgacucauacaugaaaaauagag

SEQ ID NO: 28635 - RNA, 23 nt, artificial
  Chemically synthesized
gacucauacaugaaaaauagagc

SEQ ID NO: 28636 - RNA, 23 nt, artificial
  Chemically synthesized
cucauacaugaaaaauagagccu

SEQ ID NO: 28637 - RNA, 23 nt, artificial
  Chemically synthesized
gaucuuccaccucauagaugauc

SEQ ID NO: 28638 - RNA, 23 nt, artificial
  Chemically synthesized
cuuccaccucauagaugauccuc

SEQ ID NO: 28639 - RNA, 23 nt, artificial
  Chemically synthesized
gcggauuuggaucuuccaugagc

SEQ ID NO: 28640 - RNA, 23 nt, artificial
  Chemically synthesized
cggauuuggaucuuccaugagca

SEQ ID NO: 28641 - RNA, 23 nt, artificial
  Chemically synthesized
ggauuuggaucuuccaugagcag

SEQ ID NO: 28642 - RNA, 23 nt, artificial
  Chemically synthesized
gauuuggaucuuccaugagcagc

SEQ ID NO: 28643 - RNA, 23 nt, artificial
  Chemically synthesized
cagguuccuugcaaaauucuaca

SEQ ID NO: 28644 - RNA, 23 nt, artificial
  Chemically synthesized
agguuccuugcaaaauucuacaa

SEQ ID NO: 28645 - RNA, 23 nt, artificial
  Chemically synthesized
gguuccuugcaaaauucuacaac

SEQ ID NO: 28646 - RNA, 23 nt, artificial
  Chemically synthesized
gccauaucuuggagcucugagag

SEQ ID NO: 28647 - RNA, 23 nt, artificial
  Chemically synthesized
ccauaucuuggagcucugagagg

SEQ ID NO: 28648 - RNA, 23 nt, artificial
  Chemically synthesized
cauaucuuggagcucugagaggg

SEQ ID NO: 28649 - RNA, 23 nt, artificial
  Chemically synthesized
auaucuuggagcucugagagggu

SEQ ID NO: 28650 - RNA, 23 nt, artificial
  Chemically synthesized
uaucuuggagcucugagagggua

SEQ ID NO: 28651 - RNA, 23 nt, artificial
  Chemically synthesized
uuucccauagagacguucacgca

SEQ ID NO: 28652 - RNA, 23 nt, artificial
  Chemically synthesized
ucccauagagacguucacgcagu

SEQ ID NO: 28653 - RNA, 23 nt, artificial
  Chemically synthesized
gccauuguaagacuggaacccau

SEQ ID NO: 28654 - RNA, 23 nt, artificial
  Chemically synthesized
ccauuguaagacuggaacccauu

SEQ ID NO: 28655 - RNA, 23 nt, artificial
  Chemically synthesized
cauuguaagacuggaacccauuc

SEQ ID NO: 28656 - RNA, 23 nt, artificial
  Chemically synthesized
auuguaagacuggaacccauuca

SEQ ID NO: 28657 - RNA, 23 nt, artificial
  Chemically synthesized
cuccuuuccagggagcuugucga

SEQ ID NO: 28658 - RNA, 23 nt, artificial
  Chemically synthesized
uccuuuccagggagcuugucgac

SEQ ID NO: 28659 - RNA, 23 nt, artificial
  Chemically synthesized
ccuuuccagggagcuugucgacc

SEQ ID NO: 28660 - RNA, 23 nt, artificial
  Chemically synthesized
cuuuccagggagcuugucgaccc

SEQ ID NO: 28661 - RNA, 23 nt, artificial
  Chemically synthesized
uuuccagggagcuugucgaccca

SEQ ID NO: 28662 - RNA, 23 nt, artificial
  Chemically synthesized
acagugcugcaucagugagucug

SEQ ID NO: 28663 - RNA, 23 nt, artificial
  Chemically synthesized
cagugcugcaucagugagucugu

SEQ ID NO: 28664 - RNA, 23 nt, artificial
  Chemically synthesized
agugcugcaucagugagucugua

SEQ ID NO: 28665 - RNA, 23 nt, artificial
  Chemically synthesized
gugcugcaucagugagucuguac

SEQ ID NO: 28666 - RNA, 23 nt, artificial
  Chemically synthesized
ugcugcaucagugagucuguaca

SEQ ID NO: 28667 - RNA, 23 nt, artificial
  Chemically synthesized
ggaacuugaauucacugucuggg

SEQ ID NO: 28668 - RNA, 23 nt, artificial
  Chemically synthesized
gaacuugaauucacugucugggg

SEQ ID NO: 28669 - RNA, 23 nt, artificial
  Chemically synthesized
aacuugaauucacugucuggggu

SEQ ID NO: 28670 - RNA, 23 nt, artificial
  Chemically synthesized
acuugaauucacugucugggguc

SEQ ID NO: 28671 - RNA, 23 nt, artificial
  Chemically synthesized
cuugaauucacugucuggggucc

SEQ ID NO: 28672 - RNA, 23 nt, artificial
  Chemically synthesized
ccauauagaaacugggagcacug

SEQ ID NO: 28673 - RNA, 23 nt, artificial
  Chemically synthesized
cauauagaaacugggagcacugg

SEQ ID NO: 28674 - RNA, 23 nt, artificial
  Chemically synthesized
auauagaaacugggagcacugga

SEQ ID NO: 28675 - RNA, 23 nt, artificial
  Chemically synthesized
uauagaaacugggagcacuggau

SEQ ID NO: 28676 - RNA, 23 nt, artificial
  Chemically synthesized
uguucacuguucucaguugggga

SEQ ID NO: 28677 - RNA, 23 nt, artificial
  Chemically synthesized
guucacuguucucaguuggggag

SEQ ID NO: 28678 - RNA, 23 nt, artificial
  Chemically synthesized
uucacuguucucaguuggggagu

SEQ ID NO: 28679 - RNA, 23 nt, artificial
  Chemically synthesized
ucacugauucgcuuguccaucau

SEQ ID NO: 28680 - RNA, 23 nt, artificial
  Chemically synthesized
cacugauucgcuuguccaucaug

SEQ ID NO: 28681 - RNA, 23 nt, artificial
  Chemically synthesized
ccgguguuauaggaacuucuguu

SEQ ID NO: 28682 - RNA, 23 nt, artificial
  Chemically synthesized
cgguguuauaggaacuucuguua

SEQ ID NO: 28683 - RNA, 23 nt, artificial
  Chemically synthesized
gguguuauaggaacuucuguuaa

SEQ ID NO: 28684 - RNA, 23 nt, artificial
  Chemically synthesized
guguuauaggaacuucuguuaaa

SEQ ID NO: 28685 - RNA, 23 nt, artificial
  Chemically synthesized
uguuauaggaacuucuguuaaaa

SEQ ID NO: 28686 - RNA, 23 nt, artificial
  Chemically synthesized
caccucauagaugauccucugca

SEQ ID NO: 28687 - RNA, 23 nt, artificial
  Chemically synthesized
accucauagaugauccucugcac

SEQ ID NO: 28688 - RNA, 23 nt, artificial
  Chemically synthesized
cucauagaugauccucugcacca

SEQ ID NO: 28689 - RNA, 23 nt, artificial
  Chemically synthesized
ucauagaugauccucugcaccag

SEQ ID NO: 28690 - RNA, 23 nt, artificial
  Chemically synthesized
cuacaagggcguucacuuuucuu

SEQ ID NO: 28691 - RNA, 23 nt, artificial
  Chemically synthesized
agccuguacguacaauucacacc

SEQ ID NO: 28692 - RNA, 23 nt, artificial
  Chemically synthesized
gccuguacguacaauucacaccu

SEQ ID NO: 28693 - RNA, 23 nt, artificial
  Chemically synthesized
ccuguacguacaauucacaccuc

SEQ ID NO: 28694 - RNA, 23 nt, artificial
  Chemically synthesized
cuguacguacaauucacaccuca

SEQ ID NO: 28695 - RNA, 23 nt, artificial
  Chemically synthesized
cgcuuaugguugaggcaaaaaug

SEQ ID NO: 28696 - RNA, 23 nt, artificial
  Chemically synthesized
gcuuaugguugaggcaaaaaugg

SEQ ID NO: 28697 - RNA, 23 nt, artificial
  Chemically synthesized
cuuaugguugaggcaaaaauggc

SEQ ID NO: 28698 - RNA, 23 nt, artificial
  Chemically synthesized
gguguuuccauuguccacaucgg

SEQ ID NO: 28699 - RNA, 23 nt, artificial
  Chemically synthesized
ugcagucuguacuuccugcuucu

SEQ ID NO: 28700 - RNA, 23 nt, artificial
  Chemically synthesized
ggacuuggguaugucccauagcu

SEQ ID NO: 28701 - RNA, 23 nt, artificial
  Chemically synthesized
gacuuggguaugucccauagcuu

SEQ ID NO: 28702 - RNA, 23 nt, artificial
  Chemically synthesized
acuuggguaugucccauagcuug

SEQ ID NO: 28703 - RNA, 23 nt, artificial
  Chemically synthesized
cuuggguaugucccauagcuugg

SEQ ID NO: 28704 - RNA, 23 nt, artificial
  Chemically synthesized
uuggguaugucccauagcuugga

SEQ ID NO: 28705 - RNA, 23 nt, artificial
  Chemically synthesized
gcugaaguuuugaauuuuguucc

SEQ ID NO: 28706 - RNA, 23 nt, artificial
  Chemically synthesized
cugaaguuuugaauuuuguuccu

SEQ ID NO: 28707 - RNA, 23 nt, artificial
  Chemically synthesized
aaaauccagcaggaacuucacga

SEQ ID NO: 28708 - RNA, 23 nt, artificial
  Chemically synthesized
aaauccagcaggaacuucacgau

SEQ ID NO: 28709 - RNA, 23 nt, artificial
  Chemically synthesized
auccagcaggaacuucacgaugu

SEQ ID NO: 28710 - RNA, 23 nt, artificial
  Chemically synthesized
uccagcaggaacuucacgaugug

SEQ ID NO: 28711 - RNA, 23 nt, artificial
  Chemically synthesized
agugugagaaaggaugagugucc

SEQ ID NO: 28712 - RNA, 23 nt, artificial
  Chemically synthesized
gugugagaaaggaugaguguccg

SEQ ID NO: 28713 - RNA, 23 nt, artificial
  Chemically synthesized
ugugagaaaggaugaguguccga

SEQ ID NO: 28714 - RNA, 23 nt, artificial
  Chemically synthesized
gugagaaaggaugaguguccgau

SEQ ID NO: 28715 - RNA, 23 nt, artificial
  Chemically synthesized
ugagaaaggaugaguguccgauu

SEQ ID NO: 28716 - RNA, 23 nt, artificial
  Chemically synthesized
aaggaaguucaggcgaguguucg

SEQ ID NO: 28717 - RNA, 23 nt, artificial
  Chemically synthesized
aggaaguucaggcgaguguucgc

SEQ ID NO: 28718 - RNA, 23 nt, artificial
  Chemically synthesized
ggaaguucaggcgaguguucgcu

SEQ ID NO: 28719 - RNA, 23 nt, artificial
  Chemically synthesized
gaaguucaggcgaguguucgcug

SEQ ID NO: 28720 - RNA, 23 nt, artificial
  Chemically synthesized
aaguucaggcgaguguucgcugu

SEQ ID NO: 28721 - RNA, 23 nt, artificial
  Chemically synthesized
cacauuguggacgcugucugcua

SEQ ID NO: 28722 - RNA, 23 nt, artificial
  Chemically synthesized
acauuguggacgcugucugcuaa

SEQ ID NO: 28723 - RNA, 23 nt, artificial
  Chemically synthesized
cugaauuuuuuucccauagagac

SEQ ID NO: 28724 - RNA, 23 nt, artificial
  Chemically synthesized
agucuguacuuccugcuucuuuu

SEQ ID NO: 28725 - RNA, 23 nt, artificial
  Chemically synthesized
ucaguacguuuuucuccagguac

SEQ ID NO: 28726 - RNA, 23 nt, artificial
  Chemically synthesized
caguacguuuuucuccagguaca

SEQ ID NO: 28727 - RNA, 23 nt, artificial
  Chemically synthesized
aguacguuuuucuccagguacau

SEQ ID NO: 28728 - RNA, 23 nt, artificial
  Chemically synthesized
guacguuuuucuccagguacauu

SEQ ID NO: 28729 - RNA, 23 nt, artificial
  Chemically synthesized
uguuuugaaaguggguauuuauu

SEQ ID NO: 28730 - RNA, 23 nt, artificial
  Chemically synthesized
guuuugaaaguggguauuuauuu

SEQ ID NO: 28731 - RNA, 23 nt, artificial
  Chemically synthesized
uuuugaaaguggguauuuauuug

SEQ ID NO: 28732 - RNA, 23 nt, artificial
  Chemically synthesized
ugguacagucuuuuuaacuccac

SEQ ID NO: 28733 - RNA, 23 nt, artificial
  Chemically synthesized
gcaguuucaaugucgcuuauggu

SEQ ID NO: 28734 - RNA, 23 nt, artificial
  Chemically synthesized
agccuuuaggugaacuggaacag

SEQ ID NO: 28735 - RNA, 23 nt, artificial
  Chemically synthesized
gccuuuaggugaacuggaacagg

SEQ ID NO: 28736 - RNA, 23 nt, artificial
  Chemically synthesized
ccuuuaggugaacuggaacagga

SEQ ID NO: 28737 - RNA, 23 nt, artificial
  Chemically synthesized
cuuuaggugaacuggaacaggaa

SEQ ID NO: 28738 - RNA, 23 nt, artificial
  Chemically synthesized
aagguaaaacgggcuuaccauac

SEQ ID NO: 28739 - RNA, 23 nt, artificial
  Chemically synthesized
agguaaaacgggcuuaccauaca

SEQ ID NO: 28740 - RNA, 23 nt, artificial
  Chemically synthesized
gguaaaacgggcuuaccauacac

SEQ ID NO: 28741 - RNA, 23 nt, artificial
  Chemically synthesized
guaaaacgggcuuaccauacacu

SEQ ID NO: 28742 - RNA, 23 nt, artificial
  Chemically synthesized
agaaaauguaaacgcuguuccuu

SEQ ID NO: 28743 - RNA, 23 nt, artificial
  Chemically synthesized
guaguucuugguacagucuuuuu

SEQ ID NO: 28744 - RNA, 23 nt, artificial
  Chemically synthesized
uuuugggcacauagcccucccgg

SEQ ID NO: 28745 - RNA, 23 nt, artificial
  Chemically synthesized
ucgcuuaugguugaggcaaaaau

SEQ ID NO: 28746 - RNA, 23 nt, artificial
  Chemically synthesized
ccaguugucacuuggucuuaggg

SEQ ID NO: 28747 - RNA, 23 nt, artificial
  Chemically synthesized
caguugucacuuggucuuagggg

SEQ ID NO: 28748 - RNA, 23 nt, artificial
  Chemically synthesized
aguugucacuuggucuuaggggu

SEQ ID NO: 28749 - RNA, 23 nt, artificial
  Chemically synthesized
guugucacuuggucuuagggguc

SEQ ID NO: 28750 - RNA, 23 nt, artificial
  Chemically synthesized
uugucacuuggucuuaggggucc

SEQ ID NO: 28751 - RNA, 23 nt, artificial
  Chemically synthesized
uggaucuuccaugagcagcauuu

SEQ ID NO: 28752 - RNA, 23 nt, artificial
  Chemically synthesized
ugaaaaauagagccuaagggccu

SEQ ID NO: 28753 - RNA, 23 nt, artificial
  Chemically synthesized
gaaaaauagagccuaagggccug

SEQ ID NO: 28754 - RNA, 23 nt, artificial
  Chemically synthesized
aaaaauagagccuaagggccugu

SEQ ID NO: 28755 - RNA, 23 nt, artificial
  Chemically synthesized
aaaauagagccuaagggccugua

SEQ ID NO: 28756 - RNA, 23 nt, artificial
  Chemically synthesized
uccauccaucacuaucagcagca

SEQ ID NO: 28757 - RNA, 23 nt, artificial
  Chemically synthesized
ccauccaucacuaucagcagcau

SEQ ID NO: 28758 - RNA, 23 nt, artificial
  Chemically synthesized
cauccaucacuaucagcagcauu

SEQ ID NO: 28759 - RNA, 23 nt, artificial
  Chemically synthesized
cugguuaaguugguuacgaaucu

SEQ ID NO: 28760 - RNA, 23 nt, artificial
  Chemically synthesized
gguuaaguugguuacgaaucugu

SEQ ID NO: 28761 - RNA, 23 nt, artificial
  Chemically synthesized
guuaaguugguuacgaaucugua

SEQ ID NO: 28762 - RNA, 23 nt, artificial
  Chemically synthesized
ccacaccuuuguucaucacaccc

SEQ ID NO: 28763 - RNA, 23 nt, artificial
  Chemically synthesized
cacaccuuuguucaucacaccca

SEQ ID NO: 28764 - RNA, 23 nt, artificial
  Chemically synthesized
uuccaucauuagcggauuuggau

SEQ ID NO: 28765 - RNA, 23 nt, artificial
  Chemically synthesized
gccguucaugauuuugcuguagu

SEQ ID NO: 28766 - RNA, 23 nt, artificial
  Chemically synthesized
ccguucaugauuuugcuguaguc

SEQ ID NO: 28767 - RNA, 23 nt, artificial
  Chemically synthesized
cguucaugauuuugcuguagucg

SEQ ID NO: 28768 - RNA, 23 nt, artificial
  Chemically synthesized
guucaugauuuugcuguagucga

SEQ ID NO: 28769 - RNA, 23 nt, artificial
  Chemically synthesized
aaaguaccucucccaguuaaugg

SEQ ID NO: 28770 - RNA, 23 nt, artificial
  Chemically synthesized
aaguaccucucccaguuaauggg

SEQ ID NO: 28771 - RNA, 23 nt, artificial
  Chemically synthesized
aguaccucucccaguuaaugggc

SEQ ID NO: 28772 - RNA, 23 nt, artificial
  Chemically synthesized
guaccucucccaguuaaugggca

SEQ ID NO: 28773 - RNA, 23 nt, artificial
  Chemically synthesized
uaccucucccaguuaaugggcaa

SEQ ID NO: 28774 - RNA, 23 nt, artificial
  Chemically synthesized
gggcuucaacucguucuuucaau

SEQ ID NO: 28775 - RNA, 23 nt, artificial
  Chemically synthesized
ggcuucaacucguucuuucaauu

SEQ ID NO: 28776 - RNA, 23 nt, artificial
  Chemically synthesized
gcuucaacucguucuuucaauuu

SEQ ID NO: 28777 - RNA, 23 nt, artificial
  Chemically synthesized
cuucaacucguucuuucaauuuc

SEQ ID NO: 28778 - RNA, 23 nt, artificial
  Chemically synthesized
ccaagucaguaagagcuucuguc

SEQ ID NO: 28779 - RNA, 23 nt, artificial
  Chemically synthesized
caagucaguaagagcuucugucu

SEQ ID NO: 28780 - RNA, 23 nt, artificial
  Chemically synthesized
aagucaguaagagcuucugucuu

SEQ ID NO: 28781 - RNA, 23 nt, artificial
  Chemically synthesized
agucaguaagagcuucugucuuc

SEQ ID NO: 28782 - RNA, 23 nt, artificial
  Chemically synthesized
gucaguaagagcuucugucuuca

SEQ ID NO: 28783 - RNA, 23 nt, artificial
  Chemically synthesized
uccuucugcugcugaaguuuuga

SEQ ID NO: 28784 - RNA, 23 nt, artificial
  Chemically synthesized
ccuucugcugcugaaguuuugaa

SEQ ID NO: 28785 - RNA, 23 nt, artificial
  Chemically synthesized
cuucugcugcugaaguuuugaau

SEQ ID NO: 28786 - RNA, 23 nt, artificial
  Chemically synthesized
uaaaucuuccaauugcugacuaa

SEQ ID NO: 28787 - RNA, 23 nt, artificial
  Chemically synthesized
cugaaucuguugugaggagccug

SEQ ID NO: 28788 - RNA, 23 nt, artificial
  Chemically synthesized
gaaucuguugugaggagccuggc

SEQ ID NO: 28789 - RNA, 23 nt, artificial
  Chemically synthesized
aaucuguugugaggagccuggcu

SEQ ID NO: 28790 - RNA, 23 nt, artificial
  Chemically synthesized
aucuguugugaggagccuggcug

SEQ ID NO: 28791 - RNA, 23 nt, artificial
  Chemically synthesized
gagcuagaauucuguuuuaaugu

SEQ ID NO: 28792 - RNA, 23 nt, artificial
  Chemically synthesized
agcuagaauucuguuuuaauguu

SEQ ID NO: 28793 - RNA, 23 nt, artificial
  Chemically synthesized
gcuagaauucuguuuuaauguug

SEQ ID NO: 28794 - RNA, 23 nt, artificial
  Chemically synthesized
aaaauuuccaacauaguucgggu

SEQ ID NO: 28795 - RNA, 23 nt, artificial
  Chemically synthesized
aaauuuccaacauaguucgggua

SEQ ID NO: 28796 - RNA, 23 nt, artificial
  Chemically synthesized
aauuuccaacauaguucggguag

SEQ ID NO: 28797 - RNA, 23 nt, artificial
  Chemically synthesized
auuuccaacauaguucggguagc

SEQ ID NO: 28798 - RNA, 23 nt, artificial
  Chemically synthesized
ugccauucacacgguucagcuga

SEQ ID NO: 28799 - RNA, 23 nt, artificial
  Chemically synthesized
gccauucacacgguucagcugaa

SEQ ID NO: 28800 - RNA, 23 nt, artificial
  Chemically synthesized
ccauucacacgguucagcugaau

SEQ ID NO: 28801 - RNA, 23 nt, artificial
  Chemically synthesized
cauucacacgguucagcugaauu

SEQ ID NO: 28802 - RNA, 23 nt, artificial
  Chemically synthesized
auucacacgguucagcugaauuu

SEQ ID NO: 28803 - RNA, 23 nt, artificial
  Chemically synthesized
uaguucggguagcuuugaauggu

SEQ ID NO: 28804 - RNA, 23 nt, artificial
  Chemically synthesized
aguucggguagcuuugaaugguc

SEQ ID NO: 28805 - RNA, 23 nt, artificial
  Chemically synthesized
guucggguagcuuugaauggucu

SEQ ID NO: 28806 - RNA, 23 nt, artificial
  Chemically synthesized
uucggguagcuuugaauggucua

SEQ ID NO: 28807 - RNA, 23 nt, artificial
  Chemically synthesized
caaugucgcuuaugguugaggca

SEQ ID NO: 28808 - RNA, 23 nt, artificial
  Chemically synthesized
aaugucgcuuaugguugaggcaa

SEQ ID NO: 28809 - RNA, 23 nt, artificial
  Chemically synthesized
augucgcuuaugguugaggcaaa

SEQ ID NO: 28810 - RNA, 23 nt, artificial
  Chemically synthesized
ugucgcuuaugguugaggcaaaa

SEQ ID NO: 28811 - RNA, 23 nt, artificial
  Chemically synthesized
cauuguggacgcugucugcuaaa

SEQ ID NO: 28812 - RNA, 23 nt, artificial
  Chemically synthesized
auuguggacgcugucugcuaaag

SEQ ID NO: 28813 - RNA, 23 nt, artificial
  Chemically synthesized
gagguugaacccgaagguaaaac

SEQ ID NO: 28814 - RNA, 23 nt, artificial
  Chemically synthesized
agguugaacccgaagguaaaacg

SEQ ID NO: 28815 - RNA, 23 nt, artificial
  Chemically synthesized
gguugaacccgaagguaaaacgg

SEQ ID NO: 28816 - RNA, 23 nt, artificial
  Chemically synthesized
guugaacccgaagguaaaacggg

SEQ ID NO: 28817 - RNA, 23 nt, artificial
  Chemically synthesized
agagacguucacgcaguucacug

SEQ ID NO: 28818 - RNA, 23 nt, artificial
  Chemically synthesized
gagacguucacgcaguucacuga

SEQ ID NO: 28819 - RNA, 23 nt, artificial
  Chemically synthesized
agacguucacgcaguucacugau

SEQ ID NO: 28820 - RNA, 23 nt, artificial
  Chemically synthesized
gacguucacgcaguucacugauu

SEQ ID NO: 28821 - RNA, 23 nt, artificial
  Chemically synthesized
cugaguucguugcucuugggucu

SEQ ID NO: 28822 - RNA, 23 nt, artificial
  Chemically synthesized
cuagucaaaaaauacuuuuggua

SEQ ID NO: 28823 - RNA, 23 nt, artificial
  Chemically synthesized
uagucaaaaaauacuuuugguau

SEQ ID NO: 28824 - RNA, 23 nt, artificial
  Chemically synthesized
agucaaaaaauacuuuugguaua

SEQ ID NO: 28825 - RNA, 23 nt, artificial
  Chemically synthesized
gucaaaaaauacuuuugguauau

SEQ ID NO: 28826 - RNA, 23 nt, artificial
  Chemically synthesized
ucaaaaaauacuuuugguauaua

SEQ ID NO: 28827 - RNA, 23 nt, artificial
  Chemically synthesized
ucaguaagagcuucugucuucac

SEQ ID NO: 28828 - RNA, 23 nt, artificial
  Chemically synthesized
cauagaugauccucugcaccaga

SEQ ID NO: 28829 - RNA, 23 nt, artificial
  Chemically synthesized
auagaugauccucugcaccagau

SEQ ID NO: 28830 - RNA, 23 nt, artificial
  Chemically synthesized
gauguagccuuccuccaucuccu

SEQ ID NO: 28831 - RNA, 23 nt, artificial
  Chemically synthesized
auguagccuuccuccaucuccuc

SEQ ID NO: 28832 - RNA, 23 nt, artificial
  Chemically synthesized
guagccuuccuccaucuccucac

SEQ ID NO: 28833 - RNA, 23 nt, artificial
  Chemically synthesized
guagucgacuuguccucucauug

SEQ ID NO: 28834 - RNA, 23 nt, artificial
  Chemically synthesized
uagucgacuuguccucucauugc

SEQ ID NO: 28835 - RNA, 23 nt, artificial
  Chemically synthesized
agucgacuuguccucucauugca

SEQ ID NO: 28836 - RNA, 23 nt, artificial
  Chemically synthesized
gcaaaauucuacaacaucucgac

SEQ ID NO: 28837 - RNA, 23 nt, artificial
  Chemically synthesized
cauguuuccauacagaggcuccu

SEQ ID NO: 28838 - RNA, 23 nt, artificial
  Chemically synthesized
auguuuccauacagaggcuccuu

SEQ ID NO: 28839 - RNA, 23 nt, artificial
  Chemically synthesized
uguuuccauacagaggcuccuuu

SEQ ID NO: 28840 - RNA, 23 nt, artificial
  Chemically synthesized
guuuccauacagaggcuccuuug

SEQ ID NO: 28841 - RNA, 23 nt, artificial
  Chemically synthesized
cagaaauagacugcugcugacgg

SEQ ID NO: 28842 - RNA, 23 nt, artificial
  Chemically synthesized
agaaauagacugcugcugacggc

SEQ ID NO: 28843 - RNA, 23 nt, artificial
  Chemically synthesized
gaaauagacugcugcugacggcg

SEQ ID NO: 28844 - RNA, 23 nt, artificial
  Chemically synthesized
aaauagacugcugcugacggcgc

SEQ ID NO: 28845 - RNA, 23 nt, artificial
  Chemically synthesized
aauagacugcugcugacggcgcu

SEQ ID NO: 28846 - RNA, 23 nt, artificial
  Chemically synthesized
guacauggaguauauggaacuug

SEQ ID NO: 28847 - RNA, 23 nt, artificial
  Chemically synthesized
uacauggaguauauggaacuuga

SEQ ID NO: 28848 - RNA, 23 nt, artificial
  Chemically synthesized
acauggaguauauggaacuugaa

SEQ ID NO: 28849 - RNA, 23 nt, artificial
  Chemically synthesized
cauggaguauauggaacuugaau

SEQ ID NO: 28850 - RNA, 23 nt, artificial
  Chemically synthesized
auggaguauauggaacuugaauu

SEQ ID NO: 28851 - RNA, 23 nt, artificial
  Chemically synthesized
cggguagcuuugaauggucuagu

SEQ ID NO: 28852 - RNA, 23 nt, artificial
  Chemically synthesized
ggguagcuuugaauggucuaguc

SEQ ID NO: 28853 - RNA, 23 nt, artificial
  Chemically synthesized
gguagcuuugaauggucuaguca

SEQ ID NO: 28854 - RNA, 23 nt, artificial
  Chemically synthesized
guagcuuugaauggucuagucaa

SEQ ID NO: 28855 - RNA, 23 nt, artificial
  Chemically synthesized
uagcuuugaauggucuagucaaa

SEQ ID NO: 28856 - RNA, 23 nt, artificial
  Chemically synthesized
uccuugcaaaauucuacaacauc

SEQ ID NO: 28857 - RNA, 23 nt, artificial
  Chemically synthesized
ccuugcaaaauucuacaacaucu

SEQ ID NO: 28858 - RNA, 23 nt, artificial
  Chemically synthesized
cuugcaaaauucuacaacaucuc

SEQ ID NO: 28859 - RNA, 23 nt, artificial
  Chemically synthesized
cuccaaggugaugggcuacagug

SEQ ID NO: 28860 - RNA, 23 nt, artificial
  Chemically synthesized
uccaaggugaugggcuacagugc

SEQ ID NO: 28861 - RNA, 23 nt, artificial
  Chemically synthesized
ccaaggugaugggcuacagugcu

SEQ ID NO: 28862 - RNA, 23 nt, artificial
  Chemically synthesized
caaggugaugggcuacagugcug

SEQ ID NO: 28863 - RNA, 23 nt, artificial
  Chemically synthesized
aaggugaugggcuacagugcugc

SEQ ID NO: 28864 - RNA, 23 nt, artificial
  Chemically synthesized
caguuaauaucaucggcaucauc

SEQ ID NO: 28865 - RNA, 23 nt, artificial
  Chemically synthesized
acgcuguuacaagaggcagcgca

SEQ ID NO: 28866 - RNA, 23 nt, artificial
  Chemically synthesized
cgcuguuacaagaggcagcgcag

SEQ ID NO: 28867 - RNA, 23 nt, artificial
  Chemically synthesized
gcuguuacaagaggcagcgcagu

SEQ ID NO: 28868 - RNA, 23 nt, artificial
  Chemically synthesized
cuguuacaagaggcagcgcagug

SEQ ID NO: 28869 - RNA, 23 nt, artificial
  Chemically synthesized
uguuacaagaggcagcgcagugc

SEQ ID NO: 28870 - RNA, 23 nt, artificial
  Chemically synthesized
cugguaauucuuagguggugugg

SEQ ID NO: 28871 - RNA, 23 nt, artificial
  Chemically synthesized
gguaauucuuaggugguguggcu

SEQ ID NO: 28872 - RNA, 23 nt, artificial
  Chemically synthesized
guaauucuuaggugguguggcuu

SEQ ID NO: 28873 - RNA, 23 nt, artificial
  Chemically synthesized
cauacaugaaaaauagagccuaa

SEQ ID NO: 28874 - RNA, 23 nt, artificial
  Chemically synthesized
auacaugaaaaauagagccuaag

SEQ ID NO: 28875 - RNA, 23 nt, artificial
  Chemically synthesized
aucuguucauuguugcucaagaa

SEQ ID NO: 28876 - RNA, 23 nt, artificial
  Chemically synthesized
cugcacugguuucacggaagagc

SEQ ID NO: 28877 - RNA, 23 nt, artificial
  Chemically synthesized
ugcacugguuucacggaagagcu

SEQ ID NO: 28878 - RNA, 23 nt, artificial
  Chemically synthesized
gcacugguuucacggaagagcua

SEQ ID NO: 28879 - RNA, 23 nt, artificial
  Chemically synthesized
cacugguuucacggaagagcuag

SEQ ID NO: 28880 - RNA, 23 nt, artificial
  Chemically synthesized
acugguuucacggaagagcuaga

SEQ ID NO: 28881 - RNA, 23 nt, artificial
  Chemically synthesized
cauguugcgcuuauuuaagaguu

SEQ ID NO: 28882 - RNA, 23 nt, artificial
  Chemically synthesized
guugcgcuuauuuaagaguuccu

SEQ ID NO: 28883 - RNA, 23 nt, artificial
  Chemically synthesized
cagcuuuccuggaaaacagcaca

SEQ ID NO: 28884 - RNA, 23 nt, artificial
  Chemically synthesized
agcuuuccuggaaaacagcacaa

SEQ ID NO: 28885 - RNA, 23 nt, artificial
  Chemically synthesized
gcuuuccuggaaaacagcacaau

SEQ ID NO: 28886 - RNA, 23 nt, artificial
  Chemically synthesized
cuuuccuggaaaacagcacaaua

SEQ ID NO: 28887 - RNA, 23 nt, artificial
  Chemically synthesized
uucaauuucugaagcuuuucauu

SEQ ID NO: 28888 - RNA, 23 nt, artificial
  Chemically synthesized
gcugaucaacccuuaaaauugca

SEQ ID NO: 28889 - RNA, 23 nt, artificial
  Chemically synthesized
cugaucaacccuuaaaauugcag

SEQ ID NO: 28890 - RNA, 23 nt, artificial
  Chemically synthesized
ugaucaacccuuaaaauugcagu

SEQ ID NO: 28891 - RNA, 23 nt, artificial
  Chemically synthesized
aagaccauuuucuagcugcagcu

SEQ ID NO: 28892 - RNA, 23 nt, artificial
  Chemically synthesized
agaccauuuucuagcugcagcuu

SEQ ID NO: 28893 - RNA, 23 nt, artificial
  Chemically synthesized
gaccauuuucuagcugcagcuuu

SEQ ID NO: 28894 - RNA, 23 nt, artificial
  Chemically synthesized
ggccaguuuccaucauuagcgga

SEQ ID NO: 28895 - RNA, 23 nt, artificial
  Chemically synthesized
gccaguuuccaucauuagcggau

SEQ ID NO: 28896 - RNA, 23 nt, artificial
  Chemically synthesized
ccaguuuccaucauuagcggauu

SEQ ID NO: 28897 - RNA, 23 nt, artificial
  Chemically synthesized
caguaagagcuucugucuucacu

SEQ ID NO: 28898 - RNA, 23 nt, artificial
  Chemically synthesized
cccauauagaaacugggagcacu

SEQ ID NO: 28899 - RNA, 23 nt, artificial
  Chemically synthesized
cuuucucaguacuuucugaaggu

SEQ ID NO: 28900 - RNA, 23 nt, artificial
  Chemically synthesized
cacguugacaccaaaauccagca

SEQ ID NO: 28901 - RNA, 23 nt, artificial
  Chemically synthesized
acguugacaccaaaauccagcag

SEQ ID NO: 28902 - RNA, 23 nt, artificial
  Chemically synthesized
cguugacaccaaaauccagcagg

SEQ ID NO: 28903 - RNA, 23 nt, artificial
  Chemically synthesized
guugacaccaaaauccagcagga

SEQ ID NO: 28904 - RNA, 23 nt, artificial
  Chemically synthesized
agcuuugaauggucuagucaaaa

SEQ ID NO: 28905 - RNA, 23 nt, artificial
  Chemically synthesized
gcuuugaauggucuagucaaaaa

SEQ ID NO: 28906 - RNA, 23 nt, artificial
  Chemically synthesized
cuuugaauggucuagucaaaaaa

SEQ ID NO: 28907 - RNA, 23 nt, artificial
  Chemically synthesized
uuugaauggucuagucaaaaaau

SEQ ID NO: 28908 - RNA, 23 nt, artificial
  Chemically synthesized
uugaauggucuagucaaaaaaua

SEQ ID NO: 28909 - RNA, 23 nt, artificial
  Chemically synthesized
cgacuuguccucucauugcacga

SEQ ID NO: 28910 - RNA, 23 nt, artificial
  Chemically synthesized
gacuuguccucucauugcacgaa

SEQ ID NO: 28911 - RNA, 23 nt, artificial
  Chemically synthesized
acuuguccucucauugcacgaau

SEQ ID NO: 28912 - RNA, 23 nt, artificial
  Chemically synthesized
cuuguccucucauugcacgaauu

SEQ ID NO: 28913 - RNA, 23 nt, artificial
  Chemically synthesized
uuguccucucauugcacgaauuu

SEQ ID NO: 28914 - RNA, 23 nt, artificial
  Chemically synthesized
caugaaaaauagagccuaagggc

SEQ ID NO: 28915 - RNA, 23 nt, artificial
  Chemically synthesized
gagcacuggauguagccuuccuc

SEQ ID NO: 28916 - RNA, 23 nt, artificial
  Chemically synthesized
agcacuggauguagccuuccucc

SEQ ID NO: 28917 - RNA, 23 nt, artificial
  Chemically synthesized
gcacuggauguagccuuccucca

SEQ ID NO: 28918 - RNA, 23 nt, artificial
  Chemically synthesized
cacuggauguagccuuccuccau

SEQ ID NO: 28919 - RNA, 23 nt, artificial
  Chemically synthesized
uuccaacauaguucggguagcuu

SEQ ID NO: 28920 - RNA, 23 nt, artificial
  Chemically synthesized
uccaacauaguucggguagcuuu

SEQ ID NO: 28921 - RNA, 23 nt, artificial
  Chemically synthesized
ucucaguacuuucugaagguggc

SEQ ID NO: 28922 - RNA, 23 nt, artificial
  Chemically synthesized
uauauggaacuugaauucacugu

SEQ ID NO: 28923 - RNA, 23 nt, artificial
  Chemically synthesized
auggaacuugaauucacugucug

SEQ ID NO: 28924 - RNA, 23 nt, artificial
  Chemically synthesized
caugauuuugcuguagucgacuu

SEQ ID NO: 28925 - RNA, 23 nt, artificial
  Chemically synthesized
caagggcguucacuuuucuucac

SEQ ID NO: 28926 - RNA, 23 nt, artificial
  Chemically synthesized
agggcguucacuuuucuucacca

SEQ ID NO: 28927 - RNA, 23 nt, artificial
  Chemically synthesized
gugauggagcugcgcuuuuucag

SEQ ID NO: 28928 - RNA, 23 nt, artificial
  Chemically synthesized
gauggagcugcgcuuuuucaggg

SEQ ID NO: 28929 - RNA, 23 nt, artificial
  Chemically synthesized
auggagcugcgcuuuuucagggg

SEQ ID NO: 28930 - RNA, 23 nt, artificial
  Chemically synthesized
uggagcugcgcuuuuucaggggc

SEQ ID NO: 28931 - RNA, 23 nt, artificial
  Chemically synthesized
ccgcuccgaguugggcuucuuca

SEQ ID NO: 28932 - RNA, 23 nt, artificial
  Chemically synthesized
cgcuccgaguugggcuucuucaa

SEQ ID NO: 28933 - RNA, 23 nt, artificial
  Chemically synthesized
gcuccgaguugggcuucuucaag

SEQ ID NO: 28934 - RNA, 23 nt, artificial
  Chemically synthesized
cuccgaguugggcuucuucaagu

SEQ ID NO: 28935 - RNA, 23 nt, artificial
  Chemically synthesized
uccgaguugggcuucuucaaguu

SEQ ID NO: 28936 - RNA, 23 nt, artificial
  Chemically synthesized
ggccaccuuguucacuguucuca

SEQ ID NO: 28937 - RNA, 23 nt, artificial
  Chemically synthesized
gccaccuuguucacuguucucag

SEQ ID NO: 28938 - RNA, 23 nt, artificial
  Chemically synthesized
ccaccuuguucacuguucucagu

SEQ ID NO: 28939 - RNA, 23 nt, artificial
  Chemically synthesized
gauguucguacaucauaugauca

SEQ ID NO: 28940 - RNA, 23 nt, artificial
  Chemically synthesized
auguucguacaucauaugaucaa

SEQ ID NO: 28941 - RNA, 23 nt, artificial
  Chemically synthesized
uguucguacaucauaugaucaaa

SEQ ID NO: 28942 - RNA, 23 nt, artificial
  Chemically synthesized
uucguacaucauaugaucaaagg

SEQ ID NO: 28943 - RNA, 23 nt, artificial
  Chemically synthesized
cguucacgcaguucacugauucg

SEQ ID NO: 28944 - RNA, 23 nt, artificial
  Chemically synthesized
guucacgcaguucacugauucgc

SEQ ID NO: 28945 - RNA, 23 nt, artificial
  Chemically synthesized
aucuuccaugagcagcauuugag

SEQ ID NO: 28946 - RNA, 23 nt, artificial
  Chemically synthesized
uuccaugagcagcauuugaggca

SEQ ID NO: 28947 - RNA, 23 nt, artificial
  Chemically synthesized
uccaugagcagcauuugaggcaa

SEQ ID NO: 28948 - RNA, 23 nt, artificial
  Chemically synthesized
uggaacuugaauucacugucugg

SEQ ID NO: 28949 - RNA, 23 nt, artificial
  Chemically synthesized
guaggauucacauuguggacgcu

SEQ ID NO: 28950 - RNA, 23 nt, artificial
  Chemically synthesized
uggcuugcuggagguacauggag

SEQ ID NO: 28951 - RNA, 23 nt, artificial
  Chemically synthesized
ggcuugcuggagguacauggagu

SEQ ID NO: 28952 - RNA, 23 nt, artificial
  Chemically synthesized
gcuugcuggagguacauggagua

SEQ ID NO: 28953 - RNA, 23 nt, artificial
  Chemically synthesized
cuugcuggagguacauggaguau

SEQ ID NO: 28954 - RNA, 23 nt, artificial
  Chemically synthesized
uugcuggagguacauggaguaua

SEQ ID NO: 28955 - RNA, 23 nt, artificial
  Chemically synthesized
ugccauuguaagacuggaaccca

SEQ ID NO: 28956 - RNA, 23 nt, artificial
  Chemically synthesized
acaaucagccuuuaggugaacug

SEQ ID NO: 28957 - RNA, 23 nt, artificial
  Chemically synthesized
caaucagccuuuaggugaacugg

SEQ ID NO: 28958 - RNA, 23 nt, artificial
  Chemically synthesized
aaucagccuuuaggugaacugga

SEQ ID NO: 28959 - RNA, 23 nt, artificial
  Chemically synthesized
aucagccuuuaggugaacuggaa

SEQ ID NO: 28960 - RNA, 23 nt, artificial
  Chemically synthesized
ucagccuuuaggugaacuggaac

SEQ ID NO: 28961 - RNA, 23 nt, artificial
  Chemically synthesized
gcagcaguuucaaugucgcuuau

SEQ ID NO: 28962 - RNA, 23 nt, artificial
  Chemically synthesized
cagcaguuucaaugucgcuuaug

SEQ ID NO: 28963 - RNA, 23 nt, artificial
  Chemically synthesized
agcaguuucaaugucgcuuaugg

SEQ ID NO: 28964 - RNA, 23 nt, artificial
  Chemically synthesized
aagcuuuucauuuucagaaauag

SEQ ID NO: 28965 - RNA, 23 nt, artificial
  Chemically synthesized
agcuuuucauuuucagaaauaga

SEQ ID NO: 28966 - RNA, 23 nt, artificial
  Chemically synthesized
cucauugcacgaauuuucuucag

SEQ ID NO: 28967 - RNA, 23 nt, artificial
  Chemically synthesized
cauugcacgaauuuucuucagcu

SEQ ID NO: 28968 - RNA, 23 nt, artificial
  Chemically synthesized
gagguacauggaguauauggaac

SEQ ID NO: 28969 - RNA, 23 nt, artificial
  Chemically synthesized
agguacauggaguauauggaacu

SEQ ID NO: 28970 - RNA, 23 nt, artificial
  Chemically synthesized
gguacauggaguauauggaacuu

SEQ ID NO: 28971 - RNA, 23 nt, artificial
  Chemically synthesized
cucguucuuucaauuucugaagc

SEQ ID NO: 28972 - RNA, 23 nt, artificial
  Chemically synthesized
ucguucuuucaauuucugaagcu

SEQ ID NO: 28973 - RNA, 23 nt, artificial
  Chemically synthesized
cguucuuucaauuucugaagcuu

SEQ ID NO: 28974 - RNA, 23 nt, artificial
  Chemically synthesized
aguucuugguacagucuuuuuaa

SEQ ID NO: 28975 - RNA, 23 nt, artificial
  Chemically synthesized
agaguuccuucugcugcugaagu

SEQ ID NO: 28976 - RNA, 23 nt, artificial
  Chemically synthesized
gaguuccuucugcugcugaaguu

SEQ ID NO: 28977 - RNA, 23 nt, artificial
  Chemically synthesized
aguuccuucugcugcugaaguuu

SEQ ID NO: 28978 - RNA, 23 nt, artificial
  Chemically synthesized
guuccuucugcugcugaaguuuu

SEQ ID NO: 28979 - RNA, 23 nt, artificial
  Chemically synthesized
uuuuaacuccaccgccgcugguc

SEQ ID NO: 28980 - RNA, 23 nt, artificial
  Chemically synthesized
uaacugacuuauuuaaggcgcug

SEQ ID NO: 28981 - RNA, 23 nt, artificial
  Chemically synthesized
ugcacgaauuuucuucagcuugu

SEQ ID NO: 28982 - RNA, 23 nt, artificial
  Chemically synthesized
gcacgaauuuucuucagcuuguu

SEQ ID NO: 28983 - RNA, 23 nt, artificial
  Chemically synthesized
cacgaauuuucuucagcuuguuc

SEQ ID NO: 28984 - RNA, 23 nt, artificial
  Chemically synthesized
ucuguucauuguugcucaagaaa

SEQ ID NO: 28985 - RNA, 23 nt, artificial
  Chemically synthesized
cuguucauuguugcucaagaaaa

SEQ ID NO: 28986 - RNA, 23 nt, artificial
  Chemically synthesized
uguucauuguugcucaagaaaac

SEQ ID NO: 28987 - RNA, 23 nt, artificial
  Chemically synthesized
guucauuguugcucaagaaaaca

SEQ ID NO: 28988 - RNA, 23 nt, artificial
  Chemically synthesized
cacuauguacagucagugcucca

SEQ ID NO: 28989 - RNA, 23 nt, artificial
  Chemically synthesized
acuauguacagucagugcuccaa

SEQ ID NO: 28990 - RNA, 23 nt, artificial
  Chemically synthesized
cuauguacagucagugcuccaag

SEQ ID NO: 28991 - RNA, 23 nt, artificial
  Chemically synthesized
acaucucgacagguuguuuccgg

SEQ ID NO: 28992 - RNA, 23 nt, artificial
  Chemically synthesized
caucucgacagguuguuuccggu

SEQ ID NO: 28993 - RNA, 23 nt, artificial
  Chemically synthesized
aucucgacagguuguuuccggug

SEQ ID NO: 28994 - RNA, 23 nt, artificial
  Chemically synthesized
ucucgacagguuguuuccggugu

SEQ ID NO: 28995 - RNA, 23 nt, artificial
  Chemically synthesized
cuucaccacacuauguacaguca

SEQ ID NO: 28996 - RNA, 23 nt, artificial
  Chemically synthesized
guucaucacacccagcuuuuccu

SEQ ID NO: 28997 - RNA, 23 nt, artificial
  Chemically synthesized
uagaaacugggagcacuggaugu

SEQ ID NO: 28998 - RNA, 23 nt, artificial
  Chemically synthesized
guggcacuuuaccaaucucgaug

SEQ ID NO: 28999 - RNA, 23 nt, artificial
  Chemically synthesized
ggcacuuuaccaaucucgaugcc

SEQ ID NO: 29000 - RNA, 23 nt, artificial
  Chemically synthesized
ccccuccacacuucagcuaaaug

SEQ ID NO: 29001 - RNA, 23 nt, artificial
  Chemically synthesized
cccuccacacuucagcuaaaugg

SEQ ID NO: 29002 - RNA, 23 nt, artificial
  Chemically synthesized
ccuccacacuucagcuaaauggc

SEQ ID NO: 29003 - RNA, 23 nt, artificial
  Chemically synthesized
cuccacacuucagcuaaauggca

SEQ ID NO: 29004 - RNA, 23 nt, artificial
  Chemically synthesized
uccacacuucagcuaaauggcag

SEQ ID NO: 29005 - RNA, 23 nt, artificial
  Chemically synthesized
ggcuuaccauacacugcuuuaac

SEQ ID NO: 29006 - RNA, 23 nt, artificial
  Chemically synthesized
gcuuaccauacacugcuuuaacu

SEQ ID NO: 29007 - RNA, 23 nt, artificial
  Chemically synthesized
cagcacaauaaucucuuaagugg

SEQ ID NO: 29008 - RNA, 23 nt, artificial
  Chemically synthesized
agcacaauaaucucuuaaguggc

SEQ ID NO: 29009 - RNA, 23 nt, artificial
  Chemically synthesized
gcacaauaaucucuuaaguggcu

SEQ ID NO: 29010 - RNA, 23 nt, artificial
  Chemically synthesized
cacaauaaucucuuaaguggcuc

SEQ ID NO: 29011 - RNA, 23 nt, artificial
  Chemically synthesized
aacugacuuauuuaaggcgcugu

SEQ ID NO: 29012 - RNA, 23 nt, artificial
  Chemically synthesized
acugacuuauuuaaggcgcugug

SEQ ID NO: 29013 - RNA, 23 nt, artificial
  Chemically synthesized
aacaguuaauaucaucggcauca

SEQ ID NO: 29014 - RNA, 23 nt, artificial
  Chemically synthesized
acaguuaauaucaucggcaucau

SEQ ID NO: 29015 - RNA, 23 nt, artificial
  Chemically synthesized
agcggauuuggaucuuccaugag

SEQ ID NO: 29016 - RNA, 23 nt, artificial
  Chemically synthesized
gaacugaauuugagcuugcaggg

SEQ ID NO: 29017 - RNA, 23 nt, artificial
  Chemically synthesized
aacugaauuugagcuugcagggg

SEQ ID NO: 29018 - RNA, 23 nt, artificial
  Chemically synthesized
acugaauuugagcuugcaggggu

SEQ ID NO: 29019 - RNA, 23 nt, artificial
  Chemically synthesized
cugaauuugagcuugcaggggug

SEQ ID NO: 29020 - RNA, 23 nt, artificial
  Chemically synthesized
ugaauuugagcuugcagggguga

SEQ ID NO: 29021 - RNA, 23 nt, artificial
  Chemically synthesized
aggcucucccaguugucacuugg

SEQ ID NO: 29022 - RNA, 23 nt, artificial
  Chemically synthesized
ggcucucccaguugucacuuggu

SEQ ID NO: 29023 - RNA, 23 nt, artificial
  Chemically synthesized
gcucucccaguugucacuugguc

SEQ ID NO: 29024 - RNA, 23 nt, artificial
  Chemically synthesized
cucucccaguugucacuuggucu

SEQ ID NO: 29025 - RNA, 23 nt, artificial
  Chemically synthesized
ucucccaguugucacuuggucuu

SEQ ID NO: 29026 - RNA, 23 nt, artificial
  Chemically synthesized
accauacacugcuuuaacugacu

SEQ ID NO: 29027 - RNA, 23 nt, artificial
  Chemically synthesized
ccauacacugcuuuaacugacuu

SEQ ID NO: 29028 - RNA, 23 nt, artificial
  Chemically synthesized
cauacacugcuuuaacugacuua

SEQ ID NO: 29029 - RNA, 23 nt, artificial
  Chemically synthesized
auacacugcuuuaacugacuuau

SEQ ID NO: 29030 - RNA, 23 nt, artificial
  Chemically synthesized
ccaggucugcaucacucugguag

SEQ ID NO: 29031 - RNA, 23 nt, artificial
  Chemically synthesized
caggucugcaucacucugguagc

SEQ ID NO: 29032 - RNA, 23 nt, artificial
  Chemically synthesized
aggucugcaucacucugguagcg

SEQ ID NO: 29033 - RNA, 23 nt, artificial
  Chemically synthesized
ggucugcaucacucugguagcgc

SEQ ID NO: 29034 - RNA, 23 nt, artificial
  Chemically synthesized
gucugcaucacucugguagcgca

SEQ ID NO: 29035 - RNA, 23 nt, artificial
  Chemically synthesized
ccaacauaguucggguagcuuug

SEQ ID NO: 29036 - RNA, 23 nt, artificial
  Chemically synthesized
caacauaguucggguagcuuuga

SEQ ID NO: 29037 - RNA, 23 nt, artificial
  Chemically synthesized
aacauaguucggguagcuuugaa

SEQ ID NO: 29038 - RNA, 23 nt, artificial
  Chemically synthesized
acauaguucggguagcuuugaau

SEQ ID NO: 29039 - RNA, 23 nt, artificial
  Chemically synthesized
aguuuccaucauuagcggauuug

SEQ ID NO: 29040 - RNA, 23 nt, artificial
  Chemically synthesized
guuuccaucauuagcggauuugg

SEQ ID NO: 29041 - RNA, 23 nt, artificial
  Chemically synthesized
ugccauaucuuggagcucugaga

SEQ ID NO: 29042 - RNA, 23 nt, artificial
  Chemically synthesized
guguuuugaaaguggguauuuau

SEQ ID NO: 29043 - RNA, 23 nt, artificial
  Chemically synthesized
acaauucacaccucagugaagcg

SEQ ID NO: 29044 - RNA, 23 nt, artificial
  Chemically synthesized
caauucacaccucagugaagcgc

SEQ ID NO: 29045 - RNA, 23 nt, artificial
  Chemically synthesized
aauucacaccucagugaagcgcc

SEQ ID NO: 29046 - RNA, 23 nt, artificial
  Chemically synthesized
auucacaccucagugaagcgccc

SEQ ID NO: 29047 - RNA, 23 nt, artificial
  Chemically synthesized
uucacaccucagugaagcgcccu

SEQ ID NO: 29048 - RNA, 23 nt, artificial
  Chemically synthesized
uguaaacgcuguuccuuggcaac

SEQ ID NO: 29049 - RNA, 23 nt, artificial
  Chemically synthesized
ggaacugaauuugagcuugcagg

SEQ ID NO: 29050 - RNA, 23 nt, artificial
  Chemically synthesized
cguacaucauaugaucaaagggu

SEQ ID NO: 29051 - RNA, 23 nt, artificial
  Chemically synthesized
guacaucauaugaucaaagggua

SEQ ID NO: 29052 - RNA, 23 nt, artificial
  Chemically synthesized
gguguugaagcgcugguacagca

SEQ ID NO: 29053 - RNA, 23 nt, artificial
  Chemically synthesized
guguugaagcgcugguacagcag

SEQ ID NO: 29054 - RNA, 23 nt, artificial
  Chemically synthesized
uguugaagcgcugguacagcagc

SEQ ID NO: 29055 - RNA, 23 nt, artificial
  Chemically synthesized
guugaagcgcugguacagcagcu

SEQ ID NO: 29056 - RNA, 23 nt, artificial
  Chemically synthesized
uugaagcgcugguacagcagcuu

SEQ ID NO: 29057 - RNA, 23 nt, artificial
  Chemically synthesized
uucugaagcuuuucauuuucaga

SEQ ID NO: 29058 - RNA, 23 nt, artificial
  Chemically synthesized
ucugaagcuuuucauuuucagaa

SEQ ID NO: 29059 - RNA, 23 nt, artificial
  Chemically synthesized
gaaauccucugcugaaucuguug

SEQ ID NO: 29060 - RNA, 23 nt, artificial
  Chemically synthesized
aaauccucugcugaaucuguugu

SEQ ID NO: 29061 - RNA, 23 nt, artificial
  Chemically synthesized
aauccucugcugaaucuguugug

SEQ ID NO: 29062 - RNA, 23 nt, artificial
  Chemically synthesized
uccucugcugaaucuguugugag

SEQ ID NO: 29063 - RNA, 23 nt, artificial
  Chemically synthesized
cugacuuauuuaaggcgcugugu

SEQ ID NO: 29064 - RNA, 23 nt, artificial
  Chemically synthesized
gacuuauuuaaggcgcugugugc

SEQ ID NO: 29065 - RNA, 23 nt, artificial
  Chemically synthesized
acuuauuuaaggcgcugugugcu

SEQ ID NO: 29066 - RNA, 23 nt, artificial
  Chemically synthesized
cucccaguugucacuuggucuua

SEQ ID NO: 29067 - RNA, 23 nt, artificial
  Chemically synthesized
auugcacgaauuuucuucagcuu

SEQ ID NO: 29068 - RNA, 23 nt, artificial
  Chemically synthesized
uguuuccgguguuauaggaacuu

SEQ ID NO: 29069 - RNA, 23 nt, artificial
  Chemically synthesized
guuuccgguguuauaggaacuuc

SEQ ID NO: 29070 - RNA, 23 nt, artificial
  Chemically synthesized
gcagguuuuugggcacauagccc

SEQ ID NO: 29071 - RNA, 23 nt, artificial
  Chemically synthesized
ugcugacuaagcugaucaacccu

SEQ ID NO: 29072 - RNA, 23 nt, artificial
  Chemically synthesized
gcugacuaagcugaucaacccuu

SEQ ID NO: 29073 - RNA, 23 nt, artificial
  Chemically synthesized
cugacuaagcugaucaacccuua

SEQ ID NO: 29074 - RNA, 23 nt, artificial
  Chemically synthesized
ugacuaagcugaucaacccuuaa

SEQ ID NO: 29075 - RNA, 23 nt, artificial
  Chemically synthesized
caucauaugaucaaaggguaugg

SEQ ID NO: 29076 - RNA, 23 nt, artificial
  Chemically synthesized
ucauaugaucaaaggguauggga

SEQ ID NO: 29077 - RNA, 23 nt, artificial
  Chemically synthesized
cauaugaucaaaggguaugggac

SEQ ID NO: 29078 - RNA, 23 nt, artificial
  Chemically synthesized
ccaccucauagaugauccucugc

SEQ ID NO: 29079 - RNA, 23 nt, artificial
  Chemically synthesized
ccugguuaaguugguuacgaauc

SEQ ID NO: 29080 - RNA, 23 nt, artificial
  Chemically synthesized
acgaaucuguaguucuugguaca

SEQ ID NO: 29081 - RNA, 23 nt, artificial
  Chemically synthesized
cgaaucuguaguucuugguacag

SEQ ID NO: 29082 - RNA, 23 nt, artificial
  Chemically synthesized
gaaucuguaguucuugguacagu

SEQ ID NO: 29083 - RNA, 23 nt, artificial
  Chemically synthesized
ggucuagucaaaaaauacuuuug

SEQ ID NO: 29084 - RNA, 23 nt, artificial
  Chemically synthesized
gucuagucaaaaaauacuuuugg

SEQ ID NO: 29085 - RNA, 23 nt, artificial
  Chemically synthesized
ucuagucaaaaaauacuuuuggu

SEQ ID NO: 29086 - RNA, 23 nt, artificial
  Chemically synthesized
cagaucgaacucuccuuccagag

SEQ ID NO: 29087 - RNA, 23 nt, artificial
  Chemically synthesized
agaucgaacucuccuuccagaga

SEQ ID NO: 29088 - RNA, 23 nt, artificial
  Chemically synthesized
gaucgaacucuccuuccagagac

SEQ ID NO: 29089 - RNA, 23 nt, artificial
  Chemically synthesized
ucgaacucuccuuccagagacgc

SEQ ID NO: 29090 - RNA, 23 nt, artificial
  Chemically synthesized
gaaccuuucuauuucagcagaca

SEQ ID NO: 29091 - RNA, 23 nt, artificial
  Chemically synthesized
ucuacaacaucucgacagguugu

SEQ ID NO: 29092 - RNA, 23 nt, artificial
  Chemically synthesized
cuacaacaucucgacagguuguu

SEQ ID NO: 29093 - RNA, 23 nt, artificial
  Chemically synthesized
gaauggucuagucaaaaaauacu

SEQ ID NO: 29094 - RNA, 23 nt, artificial
  Chemically synthesized
aauggucuagucaaaaaauacuu

SEQ ID NO: 29095 - RNA, 23 nt, artificial
  Chemically synthesized
auggucuagucaaaaaauacuuu

SEQ ID NO: 29096 - RNA, 23 nt, artificial
  Chemically synthesized
uggucuagucaaaaaauacuuuu

SEQ ID NO: 29097 - RNA, 23 nt, artificial
  Chemically synthesized
ggaucuuccaugagcagcauuug

SEQ ID NO: 29098 - RNA, 23 nt, artificial
  Chemically synthesized
gaucuuccaugagcagcauuuga

SEQ ID NO: 29099 - RNA, 23 nt, artificial
  Chemically synthesized
agcauucacguugacaccaaaau

SEQ ID NO: 29100 - RNA, 23 nt, artificial
  Chemically synthesized
gcauucacguugacaccaaaauc

SEQ ID NO: 29101 - RNA, 23 nt, artificial
  Chemically synthesized
cauucacguugacaccaaaaucc

SEQ ID NO: 29102 - RNA, 23 nt, artificial
  Chemically synthesized
gguacagucuuuuuaacuccacc

SEQ ID NO: 29103 - RNA, 23 nt, artificial
  Chemically synthesized
ucugcaucacucugguagcgcag

SEQ ID NO: 29104 - RNA, 23 nt, artificial
  Chemically synthesized
uccugguuaaguugguuacgaau

SEQ ID NO: 29105 - RNA, 23 nt, artificial
  Chemically synthesized
uccugcucaggcucuuucucagu

SEQ ID NO: 29106 - RNA, 23 nt, artificial
  Chemically synthesized
ccugcucaggcucuuucucagua

SEQ ID NO: 29107 - RNA, 23 nt, artificial
  Chemically synthesized
cugcucaggcucuuucucaguac

SEQ ID NO: 29108 - RNA, 23 nt, artificial
  Chemically synthesized
ugcucaggcucuuucucaguacu

SEQ ID NO: 29109 - RNA, 23 nt, artificial
  Chemically synthesized
gagcaccauuaagaccauuuucu

SEQ ID NO: 29110 - RNA, 23 nt, artificial
  Chemically synthesized
agcaccauuaagaccauuuucua

SEQ ID NO: 29111 - RNA, 23 nt, artificial
  Chemically synthesized
gcaccauuaagaccauuuucuag

SEQ ID NO: 29112 - RNA, 23 nt, artificial
  Chemically synthesized
ccauguugcgcuuauuuaagagu

SEQ ID NO: 29113 - RNA, 23 nt, artificial
  Chemically synthesized
gcgcugguacagcagcuucugga

SEQ ID NO: 29114 - RNA, 23 nt, artificial
  Chemically synthesized
cgcugguacagcagcuucuggau

SEQ ID NO: 29115 - RNA, 23 nt, artificial
  Chemically synthesized
gcugguacagcagcuucuggaug

SEQ ID NO: 29116 - RNA, 23 nt, artificial
  Chemically synthesized
cugguacagcagcuucuggaugu

SEQ ID NO: 29117 - RNA, 23 nt, artificial
  Chemically synthesized
ugguacagcagcuucuggauguu

SEQ ID NO: 29118 - RNA, 23 nt, artificial
  Chemically synthesized
guaagacuggaacccauucaguu

SEQ ID NO: 29119 - RNA, 23 nt, artificial
  Chemically synthesized
uaagacuggaacccauucaguuu

SEQ ID NO: 29120 - RNA, 23 nt, artificial
  Chemically synthesized
aaauacuuuugguauauaaaaag

SEQ ID NO: 29121 - RNA, 23 nt, artificial
  Chemically synthesized
aauacuuuugguauauaaaaagc

SEQ ID NO: 29122 - RNA, 23 nt, artificial
  Chemically synthesized
cuggauguagccuuccuccaucu

SEQ ID NO: 29123 - RNA, 23 nt, artificial
  Chemically synthesized
uggauguagccuuccuccaucuc

SEQ ID NO: 29124 - RNA, 23 nt, artificial
  Chemically synthesized
acugucagugggaguucaggcuu

SEQ ID NO: 29125 - RNA, 23 nt, artificial
  Chemically synthesized
cugucagugggaguucaggcuug

SEQ ID NO: 29126 - RNA, 23 nt, artificial
  Chemically synthesized
ugucagugggaguucaggcuugc

SEQ ID NO: 29127 - RNA, 23 nt, artificial
  Chemically synthesized
gucagugggaguucaggcuugcu

SEQ ID NO: 29128 - RNA, 23 nt, artificial
  Chemically synthesized
ucagugggaguucaggcuugcug

SEQ ID NO: 29129 - RNA, 23 nt, artificial
  Chemically synthesized
caguccuuggaggcgaaaguacc

SEQ ID NO: 29130 - RNA, 23 nt, artificial
  Chemically synthesized
aguccuuggaggcgaaaguaccu

SEQ ID NO: 29131 - RNA, 23 nt, artificial
  Chemically synthesized
gacuaagcugaucaacccuuaaa

SEQ ID NO: 29132 - RNA, 23 nt, artificial
  Chemically synthesized
acuaagcugaucaacccuuaaaa

SEQ ID NO: 29133 - RNA, 23 nt, artificial
  Chemically synthesized
gagcucuuccagguuuccauugg

SEQ ID NO: 29134 - RNA, 23 nt, artificial
  Chemically synthesized
agcucuuccagguuuccauuggc

SEQ ID NO: 29135 - RNA, 23 nt, artificial
  Chemically synthesized
gcucuuccagguuuccauuggca

SEQ ID NO: 29136 - RNA, 23 nt, artificial
  Chemically synthesized
cucuuccagguuuccauuggcau

SEQ ID NO: 29137 - RNA, 23 nt, artificial
  Chemically synthesized
ucuuccagguuuccauuggcauu

SEQ ID NO: 29138 - RNA, 23 nt, artificial
  Chemically synthesized
acacugcuuuaacugacuuauuu

SEQ ID NO: 29139 - RNA, 23 nt, artificial
  Chemically synthesized
cacugcuuuaacugacuuauuua

SEQ ID NO: 29140 - RNA, 23 nt, artificial
  Chemically synthesized
acugcuuuaacugacuuauuuaa

SEQ ID NO: 29141 - RNA, 23 nt, artificial
  Chemically synthesized
gcagucuguacuuccugcuucuu

SEQ ID NO: 29142 - RNA, 23 nt, artificial
  Chemically synthesized
cagucuguacuuccugcuucuuu

SEQ ID NO: 29143 - RNA, 23 nt, artificial
  Chemically synthesized
cugaagcuuuucauuuucagaaa

SEQ ID NO: 29144 - RNA, 23 nt, artificial
  Chemically synthesized
ugaagcuuuucauuuucagaaau

SEQ ID NO: 29145 - RNA, 23 nt, artificial
  Chemically synthesized
ugggcuucuucaaguugguccgc

SEQ ID NO: 29146 - RNA, 23 nt, artificial
  Chemically synthesized
gaucaacccuuaaaauugcaguc

SEQ ID NO: 29147 - RNA, 23 nt, artificial
  Chemically synthesized
aucaacccuuaaaauugcagucu

SEQ ID NO: 29148 - RNA, 23 nt, artificial
  Chemically synthesized
ggccuccagcaccugacuccauu

SEQ ID NO: 29149 - RNA, 23 nt, artificial
  Chemically synthesized
gccuccagcaccugacuccauuc

SEQ ID NO: 29150 - RNA, 23 nt, artificial
  Chemically synthesized
ccuccagcaccugacuccauuca

SEQ ID NO: 29151 - RNA, 23 nt, artificial
  Chemically synthesized
cuccagcaccugacuccauucag

SEQ ID NO: 29152 - RNA, 23 nt, artificial
  Chemically synthesized
uccagcaccugacuccauucagg

SEQ ID NO: 29153 - RNA, 23 nt, artificial
  Chemically synthesized
acacuggacauguuuccauacag

SEQ ID NO: 29154 - RNA, 23 nt, artificial
  Chemically synthesized
cacuggacauguuuccauacaga

SEQ ID NO: 29155 - RNA, 23 nt, artificial
  Chemically synthesized
acuggacauguuuccauacagag

SEQ ID NO: 29156 - RNA, 23 nt, artificial
  Chemically synthesized
cuggacauguuuccauacagagg

SEQ ID NO: 29157 - RNA, 23 nt, artificial
  Chemically synthesized
uggacauguuuccauacagaggc

SEQ ID NO: 29158 - RNA, 23 nt, artificial
  Chemically synthesized
gcgguacggaaauccucugcuga

SEQ ID NO: 29159 - RNA, 23 nt, artificial
  Chemically synthesized
cgguacggaaauccucugcugaa

SEQ ID NO: 29160 - RNA, 23 nt, artificial
  Chemically synthesized
gguacggaaauccucugcugaau

SEQ ID NO: 29161 - RNA, 23 nt, artificial
  Chemically synthesized
guacggaaauccucugcugaauc

SEQ ID NO: 29162 - RNA, 23 nt, artificial
  Chemically synthesized
uacggaaauccucugcugaaucu

SEQ ID NO: 29163 - RNA, 23 nt, artificial
  Chemically synthesized
ggggugagacggguuuauugugc

SEQ ID NO: 29164 - RNA, 23 nt, artificial
  Chemically synthesized
gggugagacggguuuauugugca

SEQ ID NO: 29165 - RNA, 23 nt, artificial
  Chemically synthesized
ggugagacggguuuauugugcac

SEQ ID NO: 29166 - RNA, 23 nt, artificial
  Chemically synthesized
gugagacggguuuauugugcaca

SEQ ID NO: 29167 - RNA, 23 nt, artificial
  Chemically synthesized
ugagacggguuuauugugcacau

SEQ ID NO: 29168 - RNA, 23 nt, artificial
  Chemically synthesized
ccucugcaccagaucgaacucuc

SEQ ID NO: 29169 - RNA, 23 nt, artificial
  Chemically synthesized
cucugcaccagaucgaacucucc

SEQ ID NO: 29170 - RNA, 23 nt, artificial
  Chemically synthesized
ucugcaccagaucgaacucuccu

SEQ ID NO: 29171 - RNA, 23 nt, artificial
  Chemically synthesized
cugcaccagaucgaacucuccuu

SEQ ID NO: 29172 - RNA, 23 nt, artificial
  Chemically synthesized
gggcuugcugggaucuuccaccu

SEQ ID NO: 29173 - RNA, 23 nt, artificial
  Chemically synthesized
ggcuugcugggaucuuccaccuc

SEQ ID NO: 29174 - RNA, 23 nt, artificial
  Chemically synthesized
gcuugcugggaucuuccaccuca

SEQ ID NO: 29175 - RNA, 23 nt, artificial
  Chemically synthesized
cuugcugggaucuuccaccucau

SEQ ID NO: 29176 - RNA, 23 nt, artificial
  Chemically synthesized
uugcugggaucuuccaccucaua

SEQ ID NO: 29177 - RNA, 23 nt, artificial
  Chemically synthesized
cgccacaccuuuguucaucacac

SEQ ID NO: 29178 - RNA, 23 nt, artificial
  Chemically synthesized
gccacaccuuuguucaucacacc

SEQ ID NO: 29179 - RNA, 23 nt, artificial
  Chemically synthesized
uguugcucaagaaaacaguuaau

SEQ ID NO: 29180 - RNA, 23 nt, artificial
  Chemically synthesized
guugcucaagaaaacaguuaaua

SEQ ID NO: 29181 - RNA, 23 nt, artificial
  Chemically synthesized
uugcucaagaaaacaguuaauau

SEQ ID NO: 29182 - RNA, 23 nt, artificial
  Chemically synthesized
ccacacuauguacagucagugcu

SEQ ID NO: 29183 - RNA, 23 nt, artificial
  Chemically synthesized
cacacuauguacagucagugcuc

SEQ ID NO: 29184 - RNA, 23 nt, artificial
  Chemically synthesized
agccuuccuccaucuccucacac

SEQ ID NO: 29185 - RNA, 23 nt, artificial
  Chemically synthesized
gccuuccuccaucuccucacacu

SEQ ID NO: 29186 - RNA, 23 nt, artificial
  Chemically synthesized
ccuuccuccaucuccucacacuu

SEQ ID NO: 29187 - RNA, 23 nt, artificial
  Chemically synthesized
cuuccuccaucuccucacacuug

SEQ ID NO: 29188 - RNA, 23 nt, artificial
  Chemically synthesized
gucgcuuaugguugaggcaaaaa

SEQ ID NO: 29189 - RNA, 23 nt, artificial
  Chemically synthesized
ugaacccgaagguaaaacgggcu

SEQ ID NO: 29190 - RNA, 23 nt, artificial
  Chemically synthesized
uaggugaacuggaacaggaagcg

SEQ ID NO: 29191 - RNA, 23 nt, artificial
  Chemically synthesized
aggugaacuggaacaggaagcgg

SEQ ID NO: 29192 - RNA, 23 nt, artificial
  Chemically synthesized
ggugaacuggaacaggaagcgga

SEQ ID NO: 29193 - RNA, 23 nt, artificial
  Chemically synthesized
gugaacuggaacaggaagcggaa

SEQ ID NO: 29194 - RNA, 23 nt, artificial
  Chemically synthesized
ugaacuggaacaggaagcggaac

SEQ ID NO: 29195 - RNA, 23 nt, artificial
  Chemically synthesized
aaauagagccuaagggccuguau

SEQ ID NO: 29196 - RNA, 23 nt, artificial
  Chemically synthesized
cacgcaguucacugauucgcuug

SEQ ID NO: 29197 - RNA, 23 nt, artificial
  Chemically synthesized
acgcaguucacugauucgcuugu

SEQ ID NO: 29198 - RNA, 23 nt, artificial
  Chemically synthesized
acuugucugcagcaguuucaaug

SEQ ID NO: 29199 - RNA, 23 nt, artificial
  Chemically synthesized
cuugucugcagcaguuucaaugu

SEQ ID NO: 29200 - RNA, 23 nt, artificial
  Chemically synthesized
ggaacuucacgaugugauggugg

SEQ ID NO: 29201 - RNA, 23 nt, artificial
  Chemically synthesized
gaacuucacgaugugaugguggc

SEQ ID NO: 29202 - RNA, 23 nt, artificial
  Chemically synthesized
aacuucacgaugugaugguggcc

SEQ ID NO: 29203 - RNA, 23 nt, artificial
  Chemically synthesized
acuucacgaugugaugguggccg

SEQ ID NO: 29204 - RNA, 23 nt, artificial
  Chemically synthesized
cuucacgaugugaugguggccgg

SEQ ID NO: 29205 - RNA, 23 nt, artificial
  Chemically synthesized
ugccuucuccagguuccuugcaa

SEQ ID NO: 29206 - RNA, 23 nt, artificial
  Chemically synthesized
gccuucuccagguuccuugcaaa

SEQ ID NO: 29207 - RNA, 23 nt, artificial
  Chemically synthesized
ccuucuccagguuccuugcaaaa

SEQ ID NO: 29208 - RNA, 23 nt, artificial
  Chemically synthesized
cuucuccagguuccuugcaaaau

SEQ ID NO: 29209 - RNA, 23 nt, artificial
  Chemically synthesized
gccauccuucaggcaccaaacag

SEQ ID NO: 29210 - RNA, 23 nt, artificial
  Chemically synthesized
ccauccuucaggcaccaaacagc

SEQ ID NO: 29211 - RNA, 23 nt, artificial
  Chemically synthesized
cauccuucaggcaccaaacagcc

SEQ ID NO: 29212 - RNA, 23 nt, artificial
  Chemically synthesized
auccuucaggcaccaaacagccc

SEQ ID NO: 29213 - RNA, 23 nt, artificial
  Chemically synthesized
uccuucaggcaccaaacagcccc

SEQ ID NO: 29214 - RNA, 23 nt, artificial
  Chemically synthesized
aggguguugaagcgcugguacag

SEQ ID NO: 29215 - RNA, 23 nt, artificial
  Chemically synthesized
ggguguugaagcgcugguacagc

SEQ ID NO: 29216 - RNA, 23 nt, artificial
  Chemically synthesized
gggaagguaacucauuaucauug

SEQ ID NO: 29217 - RNA, 23 nt, artificial
  Chemically synthesized
ggaagguaacucauuaucauugg

SEQ ID NO: 29218 - RNA, 23 nt, artificial
  Chemically synthesized
gaagguaacucauuaucauuggc

SEQ ID NO: 29219 - RNA, 23 nt, artificial
  Chemically synthesized
aagguaacucauuaucauuggca

SEQ ID NO: 29220 - RNA, 23 nt, artificial
  Chemically synthesized
agguaacucauuaucauuggcau

SEQ ID NO: 29221 - RNA, 23 nt, artificial
  Chemically synthesized
cugcugaaucuguugugaggagc

SEQ ID NO: 29222 - RNA, 23 nt, artificial
  Chemically synthesized
ugcugaaucuguugugaggagcc

SEQ ID NO: 29223 - RNA, 23 nt, artificial
  Chemically synthesized
gcugaaucuguugugaggagccu

SEQ ID NO: 29224 - RNA, 23 nt, artificial
  Chemically synthesized
ccuguugcuuuagaaaauguaaa

SEQ ID NO: 29225 - RNA, 23 nt, artificial
  Chemically synthesized
cuguugcuuuagaaaauguaaac

SEQ ID NO: 29226 - RNA, 23 nt, artificial
  Chemically synthesized
guugcuuuagaaaauguaaacgc

SEQ ID NO: 29227 - RNA, 23 nt, artificial
  Chemically synthesized
caaucugcugcuguugccuagcu

SEQ ID NO: 29228 - RNA, 23 nt, artificial
  Chemically synthesized
aaucugcugcuguugccuagcug

SEQ ID NO: 29229 - RNA, 23 nt, artificial
  Chemically synthesized
aucugcugcuguugccuagcugc

SEQ ID NO: 29230 - RNA, 23 nt, artificial
  Chemically synthesized
cuggaacccauucaguuuuccuu

SEQ ID NO: 29231 - RNA, 23 nt, artificial
  Chemically synthesized
uggaacccauucaguuuuccuuu

SEQ ID NO: 29232 - RNA, 23 nt, artificial
  Chemically synthesized
ggaacccauucaguuuuccuuuc

SEQ ID NO: 29233 - RNA, 23 nt, artificial
  Chemically synthesized
gaacccauucaguuuuccuuucu

SEQ ID NO: 29234 - RNA, 23 nt, artificial
  Chemically synthesized
aacccauucaguuuuccuuucuu

SEQ ID NO: 29235 - RNA, 23 nt, artificial
  Chemically synthesized
ggcguccauccaucacuaucagc

SEQ ID NO: 29236 - RNA, 23 nt, artificial
  Chemically synthesized
gcguccauccaucacuaucagca

SEQ ID NO: 29237 - RNA, 23 nt, artificial
  Chemically synthesized
cguccauccaucacuaucagcag

SEQ ID NO: 29238 - RNA, 23 nt, artificial
  Chemically synthesized
guccauccaucacuaucagcagc

SEQ ID NO: 29239 - RNA, 23 nt, artificial
  Chemically synthesized
cugcuaaagugagcaccauuaag

SEQ ID NO: 29240 - RNA, 23 nt, artificial
  Chemically synthesized
ugcuaaagugagcaccauuaaga

SEQ ID NO: 29241 - RNA, 23 nt, artificial
  Chemically synthesized
gcuaaagugagcaccauuaagac

SEQ ID NO: 29242 - RNA, 23 nt, artificial
  Chemically synthesized
uaaagugagcaccauuaagacca

SEQ ID NO: 29243 - RNA, 23 nt, artificial
  Chemically synthesized
ugucugcuaaagugagcaccauu

SEQ ID NO: 29244 - RNA, 23 nt, artificial
  Chemically synthesized
gucugcuaaagugagcaccauua

SEQ ID NO: 29245 - RNA, 23 nt, artificial
  Chemically synthesized
ucugcuaaagugagcaccauuaa

SEQ ID NO: 29246 - RNA, 23 nt, artificial
  Chemically synthesized
uggguaugucccauagcuuggag

SEQ ID NO: 29247 - RNA, 23 nt, artificial
  Chemically synthesized
caccuccauguugcgcuuauuua

SEQ ID NO: 29248 - RNA, 23 nt, artificial
  Chemically synthesized
accuccauguugcgcuuauuuaa

SEQ ID NO: 29249 - RNA, 23 nt, artificial
  Chemically synthesized
ccuccauguugcgcuuauuuaag

SEQ ID NO: 29250 - RNA, 23 nt, artificial
  Chemically synthesized
cuccauguugcgcuuauuuaaga

SEQ ID NO: 29251 - RNA, 23 nt, artificial
  Chemically synthesized
acccauucaguuuuccuuucuuu

SEQ ID NO: 29252 - RNA, 23 nt, artificial
  Chemically synthesized
cggcugguaauucuuagguggug

SEQ ID NO: 29253 - RNA, 23 nt, artificial
  Chemically synthesized
ggcugguaauucuuagguggugu

SEQ ID NO: 29254 - RNA, 23 nt, artificial
  Chemically synthesized
gcugguaauucuuagguggugug

SEQ ID NO: 29255 - RNA, 23 nt, artificial
  Chemically synthesized
caucacacccagcuuuuccugca

SEQ ID NO: 29256 - RNA, 23 nt, artificial
  Chemically synthesized
aucacacccagcuuuuccugcac

SEQ ID NO: 29257 - RNA, 23 nt, artificial
  Chemically synthesized
ucacacccagcuuuuccugcacc

SEQ ID NO: 29258 - RNA, 23 nt, artificial
  Chemically synthesized
cauaguucggguagcuuugaaug

SEQ ID NO: 29259 - RNA, 23 nt, artificial
  Chemically synthesized
ugaguguccgauucggugacggg

SEQ ID NO: 29260 - RNA, 23 nt, artificial
  Chemically synthesized
caaaauccagcaggaacuucacg

SEQ ID NO: 29261 - RNA, 23 nt, artificial
  Chemically synthesized
cuggagguacauggaguauaugg

SEQ ID NO: 29262 - RNA, 23 nt, artificial
  Chemically synthesized
uggagguacauggaguauaugga

SEQ ID NO: 29263 - RNA, 23 nt, artificial
  Chemically synthesized
ggagguacauggaguauauggaa

SEQ ID NO: 29264 - RNA, 23 nt, artificial
  Chemically synthesized
ccacucagucucgcuuucguccu

SEQ ID NO: 29265 - RNA, 23 nt, artificial
  Chemically synthesized
cacucagucucgcuuucguccuu

SEQ ID NO: 29266 - RNA, 23 nt, artificial
  Chemically synthesized
cucagucucgcuuucguccuugc

SEQ ID NO: 29267 - RNA, 23 nt, artificial
  Chemically synthesized
ucagucucgcuuucguccuugcg

SEQ ID NO: 29268 - RNA, 23 nt, artificial
  Chemically synthesized
aguauauggaacuugaauucacu

SEQ ID NO: 29269 - RNA, 23 nt, artificial
  Chemically synthesized
gcuguagucgacuuguccucuca

SEQ ID NO: 29270 - RNA, 23 nt, artificial
  Chemically synthesized
cuguagucgacuuguccucucau

SEQ ID NO: 29271 - RNA, 23 nt, artificial
  Chemically synthesized
uguagucgacuuguccucucauu

SEQ ID NO: 29272 - RNA, 23 nt, artificial
  Chemically synthesized
uugacaccaaaauccagcaggaa

SEQ ID NO: 29273 - RNA, 23 nt, artificial
  Chemically synthesized
uaugaucaaaggguaugggacgu

SEQ ID NO: 29274 - RNA, 23 nt, artificial
  Chemically synthesized
augaucaaaggguaugggacguu

SEQ ID NO: 29275 - RNA, 23 nt, artificial
  Chemically synthesized
accaaaauccagcaggaacuuca

SEQ ID NO: 29276 - RNA, 23 nt, artificial
  Chemically synthesized
ccaaaauccagcaggaacuucac

SEQ ID NO: 29277 - RNA, 23 nt, artificial
  Chemically synthesized
gagcagcauuugaggcaauacug

SEQ ID NO: 29278 - RNA, 23 nt, artificial
  Chemically synthesized
agcagcauuugaggcaauacuga

SEQ ID NO: 29279 - RNA, 23 nt, artificial
  Chemically synthesized
gcagcauuugaggcaauacugag

SEQ ID NO: 29280 - RNA, 23 nt, artificial
  Chemically synthesized
cagcauuugaggcaauacugaga

SEQ ID NO: 29281 - RNA, 23 nt, artificial
  Chemically synthesized
gcucaagaaaacaguuaauauca

SEQ ID NO: 29282 - RNA, 23 nt, artificial
  Chemically synthesized
cucaagaaaacaguuaauaucau

SEQ ID NO: 29283 - RNA, 23 nt, artificial
  Chemically synthesized
ucaagaaaacaguuaauaucauc

SEQ ID NO: 29284 - RNA, 23 nt, artificial
  Chemically synthesized
ggccuccaggucugcaucacucu

SEQ ID NO: 29285 - RNA, 23 nt, artificial
  Chemically synthesized
gccuccaggucugcaucacucug

SEQ ID NO: 29286 - RNA, 23 nt, artificial
  Chemically synthesized
ccuccaggucugcaucacucugg

SEQ ID NO: 29287 - RNA, 23 nt, artificial
  Chemically synthesized
cuccaggucugcaucacucuggu

SEQ ID NO: 29288 - RNA, 23 nt, Artificial
  Chemically synthesized
uccaggucugcaucacucuggua

SEQ ID NO: 29289 - RNA, 19 nt, artificial
  Chemically synthesized
cgacgcuacucagaugaaa

SEQ ID NO: 29290 - RNA, 19 nt, artificial
  Chemically synthesized
gugggaacauggauuuuga

SEQ ID NO: 29291 - RNA, 19 nt, artificial
  Chemically synthesized
ucaugaacauucucaauaa

SEQ ID NO: 29292 - RNA, 19 nt, artificial
  Chemically synthesized
cauguuccgugccuucaaa

SEQ ID NO: 29293 - RNA, 19 nt, artificial
  Chemically synthesized
ccacagaacucaugaacau

SEQ ID NO: 29294 - RNA, 19 nt, artificial
  Chemically synthesized
gauccugucugcagucaca

SEQ ID NO: 29295 - RNA, 19 nt, artificial
  Chemically synthesized
ggcugcagcugacuaugua

SEQ ID NO: 29296 - RNA, 19 nt, artificial
  Chemically synthesized
cugguuaacucguucuuga

SEQ ID NO: 29297 - RNA, 19 nt, artificial
  Chemically synthesized
gcucuaggacacucuaaca

SEQ ID NO: 29298 - RNA, 19 nt, artificial
  Chemically synthesized
gagcaucucuauaacauga

SEQ ID NO: 29299 - RNA, 19 nt, artificial
  Chemically synthesized
gacaaauccaggugaacau

SEQ ID NO: 29300 - RNA, 19 nt, artificial
  Chemically synthesized
cacauuacuccaacauuga

SEQ ID NO: 29301 - RNA, 19 nt, artificial
  Chemically synthesized
gaccgaucagggaccauuu

SEQ ID NO: 29302 - RNA, 19 nt, artificial
  Chemically synthesized
cccagugccuuugucuaua

SEQ ID NO: 29303 - RNA, 19 nt, artificial
  Chemically synthesized
ggacaaauccaggugaaca

SEQ ID NO: 29304 - RNA, 19 nt, artificial
  Chemically synthesized
guucgacacugaccgauca

SEQ ID NO: 29305 - RNA, 19 nt, artificial
  Chemically synthesized
ccagugccuuugucuauau

SEQ ID NO: 29306 - RNA, 19 nt, artificial
  Chemically synthesized
gaaugagcaucucuauaac

SEQ ID NO: 29307 - RNA, 19 nt, artificial
  Chemically synthesized
acccugaucugaagacuga

SEQ ID NO: 29308 - RNA, 19 nt, artificial
  Chemically synthesized
cugaaugagcaucucuaua

SEQ ID NO: 29309 - RNA, 19 nt, artificial
  Chemically synthesized
gaacauucucaauaagguu

SEQ ID NO: 29310 - RNA, 19 nt, artificial
  Chemically synthesized
ugaacauucucaauaaggu

SEQ ID NO: 29311 - RNA, 19 nt, artificial
  Chemically synthesized
ucugaagacugaugguuuu

SEQ ID NO: 29312 - RNA, 19 nt, artificial
  Chemically synthesized
caugaacauucucaauaag

SEQ ID NO: 29313 - RNA, 19 nt, artificial
  Chemically synthesized
ccauguuccugguuaacuc

SEQ ID NO: 29314 - RNA, 19 nt, artificial
  Chemically synthesized
cagugccuuugucuauauu

SEQ ID NO: 29315 - RNA, 19 nt, artificial
  Chemically synthesized
gaacauggauuuugacaac

SEQ ID NO: 29316 - RNA, 19 nt, artificial
  Chemically synthesized
ugaaugagcaucucuauaa

SEQ ID NO: 29317 - RNA, 19 nt, artificial
  Chemically synthesized
caacauccagggcccaauu

SEQ ID NO: 29318 - RNA, 19 nt, artificial
  Chemically synthesized
gaucauccgacgcuacuca

SEQ ID NO: 29319 - RNA, 19 nt, artificial
  Chemically synthesized
gaaagugggaacauggauu

SEQ ID NO: 29320 - RNA, 19 nt, artificial
  Chemically synthesized
acacgacacccugaucuga

SEQ ID NO: 29321 - RNA, 19 nt, artificial
  Chemically synthesized
aucucuauaacaugaucau

SEQ ID NO: 29322 - RNA, 19 nt, artificial
  Chemically synthesized
gaacucaugaacauucuca

SEQ ID NO: 29323 - RNA, 19 nt, artificial
  Chemically synthesized
ccaggaggaaauaaacaug

SEQ ID NO: 29324 - RNA, 19 nt, artificial
  Chemically synthesized
cucaugaacauucucaaua

SEQ ID NO: 29325 - RNA, 19 nt, artificial
  Chemically synthesized
gcacuugugaugccuccau

SEQ ID NO: 29326 - RNA, 19 nt, artificial
  Chemically synthesized
gcaguuccggagacucuuu

SEQ ID NO: 29327 - RNA, 19 nt, artificial
  Chemically synthesized
ugucugcagucacaucuuu

SEQ ID NO: 29328 - RNA, 19 nt, artificial
  Chemically synthesized
gacuauguauuccugaacu

SEQ ID NO: 29329 - RNA, 19 nt, artificial
  Chemically synthesized
augagcaucucuauaacau

SEQ ID NO: 29330 - RNA, 19 nt, artificial
  Chemically synthesized
gcaucucuauaacaugauc

SEQ ID NO: 29331 - RNA, 19 nt, artificial
  Chemically synthesized
gggaccauuugcaguagug

SEQ ID NO: 29332 - RNA, 19 nt, artificial
  Chemically synthesized
guucucucaguacuuguua

SEQ ID NO: 29333 - RNA, 19 nt, artificial
  Chemically synthesized
gguuaacucguucuugaag

SEQ ID NO: 29334 - RNA, 19 nt, artificial
  Chemically synthesized
uuacccagcuucucaacau

SEQ ID NO: 29335 - RNA, 19 nt, artificial
  Chemically synthesized
agaugaaagugggaacaug

SEQ ID NO: 29336 - RNA, 19 nt, artificial
  Chemically synthesized
ucagggaccauuugcagua

SEQ ID NO: 29337 - RNA, 19 nt, artificial
  Chemically synthesized
ugaacucccaggugccuuu

SEQ ID NO: 29338 - RNA, 19 nt, artificial
  Chemically synthesized
aaagugggaacauggauuu

SEQ ID NO: 29339 - RNA, 19 nt, artificial
  Chemically synthesized
cugcugacccacaagcuuu

SEQ ID NO: 29340 - RNA, 19 nt, artificial
  Chemically synthesized
aagccuagcacuugugaug

SEQ ID NO: 29341 - RNA, 19 nt, artificial
  Chemically synthesized
gaucugaagacugaugguu

SEQ ID NO: 29342 - RNA, 19 nt, artificial
  Chemically synthesized
acagaacucaugaacauuc

SEQ ID NO: 29343 - RNA, 19 nt, artificial
  Chemically synthesized
gcugggcuuugaggaauuc

SEQ ID NO: 29344 - RNA, 19 nt, artificial
  Chemically synthesized
uuuguucucucaguacuug

SEQ ID NO: 29345 - RNA, 19 nt, artificial
  Chemically synthesized
uuucaucugaguagcgucg

SEQ ID NO: 29346 - RNA, 19 nt, artificial
  Chemically synthesized
ucaaaauccauguucccac

SEQ ID NO: 29347 - RNA, 19 nt, artificial
  Chemically synthesized
uuauugagaauguucauga

SEQ ID NO: 29348 - RNA, 19 nt, artificial
  Chemically synthesized
uuugaaggcacggaacaug

SEQ ID NO: 29349 - RNA, 19 nt, artificial
  Chemically synthesized
auguucaugaguucugugg

SEQ ID NO: 29350 - RNA, 19 nt, artificial
  Chemically synthesized
ugugacugcagacaggauc

SEQ ID NO: 29351 - RNA, 19 nt, artificial
  Chemically synthesized
uacauagucagcugcagcc

SEQ ID NO: 29352 - RNA, 19 nt, artificial
  Chemically synthesized
ucaagaacgaguuaaccag

SEQ ID NO: 29353 - RNA, 19 nt, artificial
  Chemically synthesized
uguuagaguguccuagagc

SEQ ID NO: 29354 - RNA, 19 nt, artificial
  Chemically synthesized
ucauguuauagagaugcuc

SEQ ID NO: 29355 - RNA, 19 nt, artificial
  Chemically synthesized
auguucaccuggauuuguc

SEQ ID NO: 29356 - RNA, 19 nt, artificial
  Chemically synthesized
ucaauguuggaguaaugug

SEQ ID NO: 29357 - RNA, 19 nt, artificial
  Chemically synthesized
aaauggucccugaucgguc

SEQ ID NO: 29358 - RNA, 19 nt, artificial
  Chemically synthesized
uauagacaaaggcacuggg

SEQ ID NO: 29359 - RNA, 19 nt, artificial
  Chemically synthesized
uguucaccuggauuugucc

SEQ ID NO: 29360 - RNA, 19 nt, artificial
  Chemically synthesized
ugaucggucagugucgaac

SEQ ID NO: 29361 - RNA, 19 nt, artificial
  Chemically synthesized
auauagacaaaggcacugg

SEQ ID NO: 29362 - RNA, 19 nt, artificial
  Chemically synthesized
guuauagagaugcucauuc

SEQ ID NO: 29363 - RNA, 19 nt, artificial
  Chemically synthesized
ucagucuucagaucagggu

SEQ ID NO: 29364 - RNA, 19 nt, artificial
  Chemically synthesized
uauagagaugcucauucag

SEQ ID NO: 29365 - RNA, 19 nt, artificial
  Chemically synthesized
aaccuuauugagaauguuc

SEQ ID NO: 29366 - RNA, 19 nt, artificial
  Chemically synthesized
accuuauugagaauguuca

SEQ ID NO: 29367 - RNA, 19 nt, artificial
  Chemically synthesized
aaaaccaucagucuucaga

SEQ ID NO: 29368 - RNA, 19 nt, artificial
  Chemically synthesized
cuuauugagaauguucaug

SEQ ID NO: 29369 - RNA, 19 nt, artificial
  Chemically synthesized
gaguuaaccaggaacaugg

SEQ ID NO: 29370 - RNA, 19 nt, artificial
  Chemically synthesized
aauauagacaaaggcacug

SEQ ID NO: 29371 - RNA, 19 nt, artificial
  Chemically synthesized
guugucaaaauccauguuc

SEQ ID NO: 29372 - RNA, 19 nt, artificial
  Chemically synthesized
uuauagagaugcucauuca

SEQ ID NO: 29373 - RNA, 19 nt, artificial
  Chemically synthesized
aauugggcccuggauguug

SEQ ID NO: 29374 - RNA, 19 nt, artificial
  Chemically synthesized
ugaguagcgucggaugauc

SEQ ID NO: 29375 - RNA, 19 nt, artificial
  Chemically synthesized
aauccauguucccacuuuc

SEQ ID NO: 29376 - RNA, 19 nt, artificial
  Chemically synthesized
ucagaucagggugucgugu

SEQ ID NO: 29377 - RNA, 19 nt, artificial
  Chemically synthesized
augaucauguuauagagau

SEQ ID NO: 29378 - RNA, 19 nt, artificial
  Chemically synthesized
ugagaauguucaugaguuc

SEQ ID NO: 29379 - RNA, 19 nt, artificial
  Chemically synthesized
cauguuuauuuccuccugg

SEQ ID NO: 29380 - RNA, 19 nt, artificial
  Chemically synthesized
uauugagaauguucaugag

SEQ ID NO: 29381 - RNA, 19 nt, artificial
  Chemically synthesized
auggaggcaucacaagugc

SEQ ID NO: 29382 - RNA, 19 nt, artificial
  Chemically synthesized
aaagagucuccggaacugc

SEQ ID NO: 29383 - RNA, 19 nt, artificial
  Chemically synthesized
aaagaugugacugcagaca

SEQ ID NO: 29384 - RNA, 19 nt, artificial
  Chemically synthesized
aguucaggaauacauaguc

SEQ ID NO: 29385 - RNA, 19 nt, artificial
  Chemically synthesized
auguuauagagaugcucau

SEQ ID NO: 29386 - RNA, 19 nt, artificial
  Chemically synthesized
gaucauguuauagagaugc

SEQ ID NO: 29387 - RNA, 19 nt, artificial
  Chemically synthesized
cacuacugcaaaugguccc

SEQ ID NO: 29388 - RNA, 19 nt, artificial
  Chemically synthesized
uaacaaguacugagagaac

SEQ ID NO: 29389 - RNA, 19 nt, artificial
  Chemically synthesized
cuucaagaacgaguuaacc

SEQ ID NO: 29390 - RNA, 19 nt, artificial
  Chemically synthesized
auguugagaagcuggguaa

SEQ ID NO: 29391 - RNA, 19 nt, artificial
  Chemically synthesized
cauguucccacuuucaucu

SEQ ID NO: 29392 - RNA, 19 nt, artificial
  Chemically synthesized
uacugcaaauggucccuga

SEQ ID NO: 29393 - RNA, 19 nt, artificial
  Chemically synthesized
aaaggcaccugggaguuca

SEQ ID NO: 29394 - RNA, 19 nt, artificial
  Chemically synthesized
aaauccauguucccacuuu

SEQ ID NO: 29395 - RNA, 19 nt, artificial
  Chemically synthesized
aaagcuugugggucagcag

SEQ ID NO: 29396 - RNA, 19 nt, artificial
  Chemically synthesized
caucacaagugcuaggcuu

SEQ ID NO: 29397 - RNA, 19 nt, artificial
  Chemically synthesized
aaccaucagucuucagauc

SEQ ID NO: 29398 - RNA, 19 nt, artificial
  Chemically synthesized
gaauguucaugaguucugu

SEQ ID NO: 29399 - RNA, 19 nt, artificial
  Chemically synthesized
gaauuccucaaagcccagc

SEQ ID NO: 29400 - RNA, 19 nt, artificial
  Chemically synthesized
caaguacugagagaacaaa

SEQ ID NO: 29401 - RNA, 21 nt, artificial
  Chemically synthesized
acucaugaacauucucaauaa

SEQ ID NO: 29402 - RNA, 21 nt, artificial
  Chemically synthesized
aacucaugaacauucucaaua

SEQ ID NO: 29403 - RNA, 21 nt, artificial
  Chemically synthesized
uucaaaucucuugacaaagau

SEQ ID NO: 29404 - RNA, 21 nt, artificial
  Chemically synthesized
aguucugggaggaugacucca

SEQ ID NO: 29405 - RNA, 21 nt, artificial
  Chemically synthesized
uagcacuugugaugccuccau

SEQ ID NO: 29406 - RNA, 21 nt, artificial
  Chemically synthesized
augaacauucucaauaagguu

SEQ ID NO: 29407 - RNA, 21 nt, artificial
  Chemically synthesized
ucucaguucugggaggaugac

SEQ ID NO: 29408 - RNA, 21 nt, artificial
  Chemically synthesized
ucaguucugggaggaugacuc

SEQ ID NO: 29409 - RNA, 21 nt, artificial
  Chemically synthesized
uuauugagaauguucaugagu

SEQ ID NO: 29410 - RNA, 21 nt, artificial
  Chemically synthesized
uauugagaauguucaugaguu

SEQ ID NO: 29411 - RNA, 21 nt, artificial
  Chemically synthesized
aucuuugucaagagauuugaa

SEQ ID NO: 29412 - RNA, 21 nt, artificial
  Chemically synthesized
uggagucauccucccagaacu

SEQ ID NO: 29413 - RNA, 21 nt, artificial
  Chemically synthesized
auggaggcaucacaagugcua

SEQ ID NO: 29414 - RNA, 21 nt, artificial
  Chemically synthesized
aaccuuauugagaauguucau

SEQ ID NO: 29415 - RNA, 21 nt, artificial
  Chemically synthesized
gucauccucccagaacugaga

SEQ ID NO: 29416 - RNA, 21 nt, artificial
  Chemically synthesized
gagucauccucccagaacuga

SEQ ID NO: 29417 - RNA, 23 nt, artificial
  Chemically synthesized
gacgccauguuccgugccuucaa

SEQ ID NO: 29418 - RNA, 23 nt, artificial
  Chemically synthesized
ugguuaacucguucuugaagggc

SEQ ID NO: 29419 - RNA, 23 nt, artificial
  Chemically synthesized
cugguuaacucguucuugaaggg

SEQ ID NO: 29420 - RNA, 23 nt, artificial
  Chemically synthesized
ccugguuaacucguucuugaagg

SEQ ID NO: 29421 - RNA, 23 nt, artificial
  Chemically synthesized
gauggauagcgacaccacaggca

SEQ ID NO: 29422 - RNA, 23 nt, artificial
  Chemically synthesized
ugauggauagcgacaccacaggc

SEQ ID NO: 29423 - RNA, 23 nt, artificial
  Chemically synthesized
gugauggauagcgacaccacagg

SEQ ID NO: 29424 - RNA, 23 nt, artificial
  Chemically synthesized
cgugauggauagcgacaccacag

SEQ ID NO: 29425 - RNA, 23 nt, artificial
  Chemically synthesized
ccgugauggauagcgacaccaca

SEQ ID NO: 29426 - RNA, 23 nt, artificial
  Chemically synthesized
gcaggguuccaccugaaugagca

SEQ ID NO: 29427 - RNA, 23 nt, artificial
  Chemically synthesized
agcaggguuccaccugaaugagc

SEQ ID NO: 29428 - RNA, 23 nt, artificial
  Chemically synthesized
cagcaggguuccaccugaaugag

SEQ ID NO: 29429 - RNA, 23 nt, artificial
  Chemically synthesized
gcagcaggguuccaccugaauga

SEQ ID NO: 29430 - RNA, 23 nt, artificial
  Chemically synthesized
gccaggcccaggaggaaauaaac

SEQ ID NO: 29431 - RNA, 23 nt, artificial
  Chemically synthesized
ccgauccugucugcagucacauc

SEQ ID NO: 29432 - RNA, 23 nt, artificial
  Chemically synthesized
gccgauccugucugcagucacau

SEQ ID NO: 29433 - RNA, 23 nt, artificial
  Chemically synthesized
ggccgauccugucugcagucaca

SEQ ID NO: 29434 - RNA, 23 nt, artificial
  Chemically synthesized
gaccgaucagggaccauuugcag

SEQ ID NO: 29435 - RNA, 23 nt, artificial
  Chemically synthesized
cccucacugccuugcuauaggag

SEQ ID NO: 29436 - RNA, 23 nt, artificial
  Chemically synthesized
ccccucacugccuugcuauagga

SEQ ID NO: 29437 - RNA, 23 nt, artificial
  Chemically synthesized
cccccucacugccuugcuauagg

SEQ ID NO: 29438 - RNA, 23 nt, artificial
  Chemically synthesized
gcccccucacugccuugcuauag

SEQ ID NO: 29439 - RNA, 23 nt, artificial
  Chemically synthesized
cgcccccucacugccuugcuaua

SEQ ID NO: 29440 - RNA, 23 nt, artificial
  Chemically synthesized
cccagcuucucaacauccagggc

SEQ ID NO: 29441 - RNA, 23 nt, artificial
  Chemically synthesized
acccagcuucucaacauccaggg

SEQ ID NO: 29442 - RNA, 23 nt, artificial
  Chemically synthesized
cugaccgaucagggaccauuugc

SEQ ID NO: 29443 - RNA, 23 nt, artificial
  Chemically synthesized
ccccagugccuuugucuauauuc

SEQ ID NO: 29444 - RNA, 23 nt, artificial
  Chemically synthesized
gccccagugccuuugucuauauu

SEQ ID NO: 29445 - RNA, 23 nt, artificial
  Chemically synthesized
ugccccagugccuuugucuauau

SEQ ID NO: 29446 - RNA, 23 nt, artificial
  Chemically synthesized
gugccccagugccuuugucuaua

SEQ ID NO: 29447 - RNA, 23 nt, artificial
  Chemically synthesized
guucgacacugaccgaucaggga

SEQ ID NO: 29448 - RNA, 23 nt, artificial
  Chemically synthesized
aguucgacacugaccgaucaggg

SEQ ID NO: 29449 - RNA, 23 nt, artificial
  Chemically synthesized
caguucgacacugaccgaucagg

SEQ ID NO: 29450 - RNA, 23 nt, artificial
  Chemically synthesized
caggcaagcugggcuuugaggaa

SEQ ID NO: 29451 - RNA, 23 nt, artificial
  Chemically synthesized
cucaguucugggaggaugacucc

SEQ ID NO: 29452 - RNA, 23 nt, artificial
  Chemically synthesized
ucucaguucugggaggaugacuc

SEQ ID NO: 29453 - RNA, 23 nt, artificial
  Chemically synthesized
ucucucaguucugggaggaugac

SEQ ID NO: 29454 - RNA, 23 nt, artificial
  Chemically synthesized
cugccaggcccaggaggaaauaa

SEQ ID NO: 29455 - RNA, 23 nt, artificial
  Chemically synthesized
ccugggaaaugugcuuggaggcc

SEQ ID NO: 29456 - RNA, 23 nt, artificial
  Chemically synthesized
gccugggaaaugugcuuggaggc

SEQ ID NO: 29457 - RNA, 23 nt, artificial
  Chemically synthesized
ggccugggaaaugugcuuggagg

SEQ ID NO: 29458 - RNA, 23 nt, artificial
  Chemically synthesized
gggccugggaaaugugcuuggag

SEQ ID NO: 29459 - RNA, 23 nt, artificial
  Chemically synthesized
ggggccugggaaaugugcuugga

SEQ ID NO: 29460 - RNA, 23 nt, artificial
  Chemically synthesized
ccaagccuagcacuugugaugcc

SEQ ID NO: 29461 - RNA, 23 nt, artificial
  Chemically synthesized
gccaagccuagcacuugugaugc

SEQ ID NO: 29462 - RNA, 23 nt, artificial
  Chemically synthesized
gcuauaggagucaccuggagccu

SEQ ID NO: 29463 - RNA, 23 nt, artificial
  Chemically synthesized
ugcuauaggagucaccuggagcc

SEQ ID NO: 29464 - RNA, 23 nt, artificial
  Chemically synthesized
ggcagcaggguuccaccugaaug

SEQ ID NO: 29465 - RNA, 23 nt, artificial
  Chemically synthesized
aggcagcaggguuccaccugaau

SEQ ID NO: 29466 - RNA, 23 nt, artificial
  Chemically synthesized
caacauccagggcccaauuugcc

SEQ ID NO: 29467 - RNA, 23 nt, artificial
  Chemically synthesized
auagcgacaccacaggcaagcug

SEQ ID NO: 29468 - RNA, 23 nt, artificial
  Chemically synthesized
gauagcgacaccacaggcaagcu

SEQ ID NO: 29469 - RNA, 23 nt, artificial
  Chemically synthesized
ggauagcgacaccacaggcaagc

SEQ ID NO: 29470 - RNA, 23 nt, artificial
  Chemically synthesized
uggauagcgacaccacaggcaag

SEQ ID NO: 29471 - RNA, 23 nt, artificial
  Chemically synthesized
ccagcuucucaacauccagggcc

SEQ ID NO: 29472 - RNA, 23 nt, artificial
  Chemically synthesized
aggugaacauccaggaguggcug

SEQ ID NO: 29473 - RNA, 23 nt, artificial
  Chemically synthesized
caggugaacauccaggaguggcu

SEQ ID NO: 29474 - RNA, 23 nt, artificial
  Chemically synthesized
ccaggugaacauccaggaguggc

SEQ ID NO: 29475 - RNA, 23 nt, artificial
  Chemically synthesized
uccaggugaacauccaggagugg

SEQ ID NO: 29476 - RNA, 23 nt, artificial
  Chemically synthesized
cccuggcucuaggacacucuaac

SEQ ID NO: 29477 - RNA, 23 nt, artificial
  Chemically synthesized
ccaggaggaaauaaacaugcccc

SEQ ID NO: 29478 - RNA, 23 nt, artificial
  Chemically synthesized
ggagaugacauggaggucagcgc

SEQ ID NO: 29479 - RNA, 23 nt, artificial
  Chemically synthesized
uggagaugacauggaggucagcg

SEQ ID NO: 29480 - RNA, 23 nt, artificial
  Chemically synthesized
cuggagaugacauggaggucagc

SEQ ID NO: 29481 - RNA, 23 nt, artificial
  Chemically synthesized
gcuggagaugacauggaggucag

SEQ ID NO: 29482 - RNA, 23 nt, artificial
  Chemically synthesized
ggcuggagaugacauggagguca

SEQ ID NO: 29483 - RNA, 23 nt, artificial
  Chemically synthesized
gcacuugugaugccuccaugccc

SEQ ID NO: 29484 - RNA, 23 nt, artificial
  Chemically synthesized
agcacuugugaugccuccaugcc

SEQ ID NO: 29485 - RNA, 23 nt, artificial
  Chemically synthesized
gagaugacauggaggucagcgcc

SEQ ID NO: 29486 - RNA, 23 nt, artificial
  Chemically synthesized
cucuaacaagcucuguccacggg

SEQ ID NO: 29487 - RNA, 23 nt, artificial
  Chemically synthesized
gccugcugacccacaagcuuuug

SEQ ID NO: 29488 - RNA, 23 nt, artificial
  Chemically synthesized
ggccugcugacccacaagcuuuu

SEQ ID NO: 29489 - RNA, 23 nt, artificial
  Chemically synthesized
gcaguuccggagacucuuugccc

SEQ ID NO: 29490 - RNA, 23 nt, artificial
  Chemically synthesized
ggcaguuccggagacucuuugcc

SEQ ID NO: 29491 - RNA, 23 nt, artificial
  Chemically synthesized
cggcaguuccggagacucuuugc

SEQ ID NO: 29492 - RNA, 23 nt, artificial
  Chemically synthesized
ccggcaguuccggagacucuuug

SEQ ID NO: 29493 - RNA, 23 nt, artificial
  Chemically synthesized
uccggcaguuccggagacucuuu

SEQ ID NO: 29494 - RNA, 23 nt, artificial
  Chemically synthesized
gguugugacacgacacccugauc

SEQ ID NO: 29495 - RNA, 23 nt, artificial
  Chemically synthesized
cugggaaaugugcuuggaggccu

SEQ ID NO: 29496 - RNA, 23 nt, artificial
  Chemically synthesized
ucugcagucacaucuuugugggg

SEQ ID NO: 29497 - RNA, 23 nt, artificial
  Chemically synthesized
gguuaacucguucuugaagggcg

SEQ ID NO: 29498 - RNA, 23 nt, artificial
  Chemically synthesized
cuauaggagucaccuggagccuc

SEQ ID NO: 29499 - RNA, 23 nt, artificial
  Chemically synthesized
ccucucucaguucugggaggaug

SEQ ID NO: 29500 - RNA, 23 nt, artificial
  Chemically synthesized
cccucucucaguucugggaggau

SEQ ID NO: 29501 - RNA, 23 nt, artificial
  Chemically synthesized
aacucccaggugccuuugaggca

SEQ ID NO: 29502 - RNA, 23 nt, artificial
  Chemically synthesized
gaacucccaggugccuuugaggc

SEQ ID NO: 29503 - RNA, 23 nt, artificial
  Chemically synthesized
ugaacucccaggugccuuugagg

SEQ ID NO: 29504 - RNA, 23 nt, artificial
  Chemically synthesized
gugaacucccaggugccuuugag

SEQ ID NO: 29505 - RNA, 23 nt, artificial
  Chemically synthesized
auguauuccugaacuggagcccc

SEQ ID NO: 29506 - RNA, 23 nt, artificial
  Chemically synthesized
ggaggaaauaaacaugccccagu

SEQ ID NO: 29507 - RNA, 23 nt, artificial
  Chemically synthesized
aggaggaaauaaacaugccccag

SEQ ID NO: 29508 - RNA, 23 nt, artificial
  Chemically synthesized
caggaggaaauaaacaugcccca

SEQ ID NO: 29509 - RNA, 23 nt, artificial
  Chemically synthesized
gccgugauggauagcgacaccac

SEQ ID NO: 29510 - RNA, 23 nt, artificial
  Chemically synthesized
cacuugugaugccuccaugcccc

SEQ ID NO: 29511 - RNA, 23 nt, artificial
  Chemically synthesized
caguagugaacucccaggugccu

SEQ ID NO: 29512 - RNA, 23 nt, artificial
  Chemically synthesized
gcaguagugaacucccaggugcc

SEQ ID NO: 29513 - RNA, 23 nt, artificial
  Chemically synthesized
ugcaguagugaacucccaggugc

SEQ ID NO: 29514 - RNA, 23 nt, artificial
  Chemically synthesized
auccuaggcggagucaucagcgc

SEQ ID NO: 29515 - RNA, 23 nt, artificial
  Chemically synthesized
cauccuaggcggagucaucagcg

SEQ ID NO: 29516 - RNA, 23 nt, artificial
  Chemically synthesized
gcauccuaggcggagucaucagc

SEQ ID NO: 29517 - RNA, 23 nt, artificial
  Chemically synthesized
cgcauccuaggcggagucaucag

SEQ ID NO: 29518 - RNA, 23 nt, artificial
  Chemically synthesized
gcgcauccuaggcggagucauca

SEQ ID NO: 29519 - RNA, 23 nt, artificial
  Chemically synthesized
gggccugcugacccacaagcuuu

SEQ ID NO: 29520 - RNA, 23 nt, artificial
  Chemically synthesized
uggcuggagaugacauggagguc

SEQ ID NO: 29521 - RNA, 23 nt, artificial
  Chemically synthesized
cuggcuggagaugacauggaggu

SEQ ID NO: 29522 - RNA, 23 nt, artificial
  Chemically synthesized
caguucugggaggaugacuccag

SEQ ID NO: 29523 - RNA, 23 nt, artificial
  Chemically synthesized
ucaguucugggaggaugacucca

SEQ ID NO: 29524 - RNA, 23 nt, artificial
  Chemically synthesized
ugggaaaugugcuuggaggccug

SEQ ID NO: 29525 - RNA, 23 nt, artificial
  Chemically synthesized
gccuagcacuugugaugccucca

SEQ ID NO: 29526 - RNA, 23 nt, artificial
  Chemically synthesized
cugcagucacaucuuuguggggc

SEQ ID NO: 29527 - RNA, 23 nt, artificial
  Chemically synthesized
ggccgugauggauagcgacacca

SEQ ID NO: 29528 - RNA, 23 nt, artificial
  Chemically synthesized
gccuugcuauaggagucaccugg

SEQ ID NO: 29529 - RNA, 23 nt, artificial
  Chemically synthesized
gggaaaugugcuuggaggccuga

SEQ ID NO: 29530 - RNA, 23 nt, artificial
  Chemically synthesized
gcagucacaucuuuguggggccu

SEQ ID NO: 29531 - RNA, 23 nt, artificial
  Chemically synthesized
ugcagucacaucuuuguggggcc

SEQ ID NO: 29532 - RNA, 23 nt, artificial
  Chemically synthesized
agccuagcacuugugaugccucc

SEQ ID NO: 29533 - RNA, 23 nt, artificial
  Chemically synthesized
acacccuucacgguugcuaccca

SEQ ID NO: 29534 - RNA, 23 nt, artificial
  Chemically synthesized
cacacccuucacgguugcuaccc

SEQ ID NO: 29535 - RNA, 23 nt, artificial
  Chemically synthesized
gcacacccuucacgguugcuacc

SEQ ID NO: 29536 - RNA, 23 nt, artificial
  Chemically synthesized
ggcacacccuucacgguugcuac

SEQ ID NO: 29537 - RNA, 23 nt, artificial
  Chemically synthesized
uggcacacccuucacgguugcua

SEQ ID NO: 29538 - RNA, 23 nt, artificial
  Chemically synthesized
aaugugcuuggaggccugaucag

SEQ ID NO: 29539 - RNA, 23 nt, artificial
  Chemically synthesized
augugcuuggaggccugaucagc

SEQ ID NO: 29540 - RNA, 23 nt, artificial
  Chemically synthesized
acauccagggcccaauuugcccu

SEQ ID NO: 29541 - RNA, 23 nt, artificial
  Chemically synthesized
aacauccagggcccaauuugccc

SEQ ID NO: 29542 - RNA, 23 nt, artificial
  Chemically synthesized
gcccucucucaguucugggagga

SEQ ID NO: 29543 - RNA, 23 nt, artificial
  Chemically synthesized
agaugacauggaggucagcgcca

SEQ ID NO: 29544 - RNA, 23 nt, artificial
  Chemically synthesized
ucaucagcugcuuggucaggcug

SEQ ID NO: 29545 - RNA, 23 nt, artificial
  Chemically synthesized
cuucaucagcugcuuggucaggc

SEQ ID NO: 29546 - RNA, 23 nt, artificial
  Chemically synthesized
aguucugggaggaugacuccagu

SEQ ID NO: 29547 - RNA, 23 nt, artificial
  Chemically synthesized
cuaacaagcucuguccacggguc

SEQ ID NO: 29548 - RNA, 23 nt, artificial
  Chemically synthesized
cagcuucucaacauccagggccc

SEQ ID NO: 29549 - RNA, 23 nt, artificial
  Chemically synthesized
aauuugcccugccuggaguuccc

SEQ ID NO: 29550 - RNA, 23 nt, artificial
  Chemically synthesized
caauuugcccugccuggaguucc

SEQ ID NO: 29551 - RNA, 23 nt, artificial
  Chemically synthesized
ccaauuugcccugccuggaguuc

SEQ ID NO: 29552 - RNA, 23 nt, artificial
  Chemically synthesized
cccaauuugcccugccuggaguu

SEQ ID NO: 29553 - RNA, 23 nt, artificial
  Chemically synthesized
gcccaauuugcccugccuggagu

SEQ ID NO: 29554 - RNA, 23 nt, artificial
  Chemically synthesized
acuugugaugccuccaugccccg

SEQ ID NO: 29555 - RNA, 23 nt, artificial
  Chemically synthesized
caguuccggagacucuuugccca

SEQ ID NO: 29556 - RNA, 23 nt, artificial
  Chemically synthesized
auuugcccugccuggaguucccc

SEQ ID NO: 29557 - RNA, 23 nt, artificial
  Chemically synthesized
uucugggaggaugacuccagucc

SEQ ID NO: 29558 - RNA, 23 nt, artificial
  Chemically synthesized
guucugggaggaugacuccaguc

SEQ ID NO: 29559 - RNA, 23 nt, artificial
  Chemically synthesized
uucgacacugaccgaucagggac

SEQ ID NO: 29560 - RNA, 23 nt, artificial
  Chemically synthesized
cuauauucugcucccagccugcc

SEQ ID NO: 29561 - RNA, 23 nt, artificial
  Chemically synthesized
aguuccggagacucuuugcccag

SEQ ID NO: 29562 - RNA, 23 nt, artificial
  Chemically synthesized
agcuucucaacauccagggccca

SEQ ID NO: 29563 - RNA, 23 nt, artificial
  Chemically synthesized
auauucugcucccagccugccag

SEQ ID NO: 29564 - RNA, 23 nt, artificial
  Chemically synthesized
uguauuccugaacuggagcccca

SEQ ID NO: 29565 - RNA, 23 nt, artificial
  Chemically synthesized
uauaggagucaccuggagccucg

SEQ ID NO: 29566 - RNA, 23 nt, artificial
  Chemically synthesized
guauuccugaacuggagccccag

SEQ ID NO: 29567 - RNA, 23 nt, artificial
  Chemically synthesized
uauuccugaacuggagccccaga

SEQ ID NO: 29568 - RNA, 23 nt, artificial
  Chemically synthesized
uugaaggcacggaacauggcguc

SEQ ID NO: 29569 - RNA, 23 nt, artificial
  Chemically synthesized
gcccuucaagaacgaguuaacca

SEQ ID NO: 29570 - RNA, 23 nt, artificial
  Chemically synthesized
cccuucaagaacgaguuaaccag

SEQ ID NO: 29571 - RNA, 23 nt, artificial
  Chemically synthesized
ccuucaagaacgaguuaaccagg

SEQ ID NO: 29572 - RNA, 23 nt, artificial
  Chemically synthesized
ugccuguggugucgcuauccauc

SEQ ID NO: 29573 - RNA, 23 nt, artificial
  Chemically synthesized
gccuguggugucgcuauccauca

SEQ ID NO: 29574 - RNA, 23 nt, artificial
  Chemically synthesized
ccuguggugucgcuauccaucac

SEQ ID NO: 29575 - RNA, 23 nt, artificial
  Chemically synthesized
cuguggugucgcuauccaucacg

SEQ ID NO: 29576 - RNA, 23 nt, artificial
  Chemically synthesized
uguggugucgcuauccaucacgg

SEQ ID NO: 29577 - RNA, 23 nt, artificial
  Chemically synthesized
ugcucauucagguggaacccugc

SEQ ID NO: 29578 - RNA, 23 nt, artificial
  Chemically synthesized
gcucauucagguggaacccugcu

SEQ ID NO: 29579 - RNA, 23 nt, artificial
  Chemically synthesized
cucauucagguggaacccugcug

SEQ ID NO: 29580 - RNA, 23 nt, artificial
  Chemically synthesized
ucauucagguggaacccugcugc

SEQ ID NO: 29581 - RNA, 23 nt, artificial
  Chemically synthesized
guuuauuuccuccugggccuggc

SEQ ID NO: 29582 - RNA, 23 nt, artificial
  Chemically synthesized
gaugugacugcagacaggaucgg

SEQ ID NO: 29583 - RNA, 23 nt, artificial
  Chemically synthesized
augugacugcagacaggaucggc

SEQ ID NO: 29584 - RNA, 23 nt, artificial
  Chemically synthesized
ugugacugcagacaggaucggcc

SEQ ID NO: 29585 - RNA, 23 nt, artificial
  Chemically synthesized
cugcaaauggucccugaucgguc

SEQ ID NO: 29586 - RNA, 23 nt, artificial
  Chemically synthesized
cuccuauagcaaggcagugaggg

SEQ ID NO: 29587 - RNA, 23 nt, artificial
  Chemically synthesized
uccuauagcaaggcagugagggg

SEQ ID NO: 29588 - RNA, 23 nt, artificial
  Chemically synthesized
ccuauagcaaggcagugaggggg

SEQ ID NO: 29589 - RNA, 23 nt, artificial
  Chemically synthesized
cuauagcaaggcagugagggggc

SEQ ID NO: 29590 - RNA, 23 nt, artificial
  Chemically synthesized
uauagcaaggcagugagggggcg

SEQ ID NO: 29591 - RNA, 23 nt, artificial
  Chemically synthesized
gcccuggauguugagaagcuggg

SEQ ID NO: 29592 - RNA, 23 nt, artificial
  Chemically synthesized
cccuggauguugagaagcugggu

SEQ ID NO: 29593 - RNA, 23 nt, artificial
  Chemically synthesized
gcaaauggucccugaucggucag

SEQ ID NO: 29594 - RNA, 23 nt, artificial
  Chemically synthesized
gaauauagacaaaggcacugggg

SEQ ID NO: 29595 - RNA, 23 nt, artificial
  Chemically synthesized
aauauagacaaaggcacuggggc

SEQ ID NO: 29596 - RNA, 23 nt, artificial
  Chemically synthesized
auauagacaaaggcacuggggca

SEQ ID NO: 29597 - RNA, 23 nt, artificial
  Chemically synthesized
uauagacaaaggcacuggggcac

SEQ ID NO: 29598 - RNA, 23 nt, artificial
  Chemically synthesized
ucccugaucggucagugucgaac

SEQ ID NO: 29599 - RNA, 23 nt, artificial
  Chemically synthesized
cccugaucggucagugucgaacu

SEQ ID NO: 29600 - RNA, 23 nt, artificial
  Chemically synthesized
ccugaucggucagugucgaacug

SEQ ID NO: 29601 - RNA, 23 nt, artificial
  Chemically synthesized
uuccucaaagcccagcuugccug

SEQ ID NO: 29602 - RNA, 23 nt, artificial
  Chemically synthesized
ggagucauccucccagaacugag

SEQ ID NO: 29603 - RNA, 23 nt, artificial
  Chemically synthesized
gagucauccucccagaacugaga

SEQ ID NO: 29604 - RNA, 23 nt, artificial
  Chemically synthesized
gucauccucccagaacugagaga

SEQ ID NO: 29605 - RNA, 23 nt, artificial
  Chemically synthesized
uuauuuccuccugggccuggcag

SEQ ID NO: 29606 - RNA, 23 nt, artificial
  Chemically synthesized
ggccuccaagcacauuucccagg

SEQ ID NO: 29607 - RNA, 23 nt, artificial
  Chemically synthesized
gccuccaagcacauuucccaggc

SEQ ID NO: 29608 - RNA, 23 nt, artificial
  Chemically synthesized
ccuccaagcacauuucccaggcc

SEQ ID NO: 29609 - RNA, 23 nt, artificial
  Chemically synthesized
cuccaagcacauuucccaggccc

SEQ ID NO: 29610 - RNA, 23 nt, artificial
  Chemically synthesized
uccaagcacauuucccaggcccc

SEQ ID NO: 29611 - RNA, 23 nt, artificial
  Chemically synthesized
ggcaucacaagugcuaggcuugg

SEQ ID NO: 29612 - RNA, 23 nt, artificial
  Chemically synthesized
gcaucacaagugcuaggcuuggc

SEQ ID NO: 29613 - RNA, 23 nt, artificial
  Chemically synthesized
aggcuccaggugacuccuauagc

SEQ ID NO: 29614 - RNA, 23 nt, artificial
  Chemically synthesized
ggcuccaggugacuccuauagca

SEQ ID NO: 29615 - RNA, 23 nt, artificial
  Chemically synthesized
cauucagguggaacccugcugcc

SEQ ID NO: 29616 - RNA, 23 nt, artificial
  Chemically synthesized
auucagguggaacccugcugccu

SEQ ID NO: 29617 - RNA, 23 nt, artificial
  Chemically synthesized
ggcaaauugggcccuggauguug

SEQ ID NO: 29618 - RNA, 23 nt, artificial
  Chemically synthesized
cagcuugccuguggugucgcuau

SEQ ID NO: 29619 - RNA, 23 nt, artificial
  Chemically synthesized
agcuugccuguggugucgcuauc

SEQ ID NO: 29620 - RNA, 23 nt, artificial
  Chemically synthesized
gcuugccuguggugucgcuaucc

SEQ ID NO: 29621 - RNA, 23 nt, artificial
  Chemically synthesized
cuugccuguggugucgcuaucca

SEQ ID NO: 29622 - RNA, 23 nt, artificial
  Chemically synthesized
ggcccuggauguugagaagcugg

SEQ ID NO: 29623 - RNA, 23 nt, artificial
  Chemically synthesized
cagccacuccuggauguucaccu

SEQ ID NO: 29624 - RNA, 23 nt, artificial
  Chemically synthesized
agccacuccuggauguucaccug

SEQ ID NO: 29625 - RNA, 23 nt, artificial
  Chemically synthesized
gccacuccuggauguucaccugg

SEQ ID NO: 29626 - RNA, 23 nt, artificial
  Chemically synthesized
ccacuccuggauguucaccugga

SEQ ID NO: 29627 - RNA, 23 nt, artificial
  Chemically synthesized
guuagaguguccuagagccaggg

SEQ ID NO: 29628 - RNA, 23 nt, artificial
  Chemically synthesized
ggggcauguuuauuuccuccugg

SEQ ID NO: 29629 - RNA, 23 nt, artificial
  Chemically synthesized
gcgcugaccuccaugucaucucc

SEQ ID NO: 29630 - RNA, 23 nt, artificial
  Chemically synthesized
cgcugaccuccaugucaucucca

SEQ ID NO: 29631 - RNA, 23 nt, artificial
  Chemically synthesized
gcugaccuccaugucaucuccag

SEQ ID NO: 29632 - RNA, 23 nt, artificial
  Chemically synthesized
cugaccuccaugucaucuccagc

SEQ ID NO: 29633 - RNA, 23 nt, artificial
  Chemically synthesized
ugaccuccaugucaucuccagcc

SEQ ID NO: 29634 - RNA, 23 nt, artificial
  Chemically synthesized
gggcauggaggcaucacaagugc

SEQ ID NO: 29635 - RNA, 23 nt, artificial
  Chemically synthesized
ggcauggaggcaucacaagugcu

SEQ ID NO: 29636 - RNA, 23 nt, artificial
  Chemically synthesized
ggcgcugaccuccaugucaucuc

SEQ ID NO: 29637 - RNA, 23 nt, artificial
  Chemically synthesized
cccguggacagagcuuguuagag

SEQ ID NO: 29638 - RNA, 23 nt, artificial
  Chemically synthesized
caaaagcuugugggucagcaggc

SEQ ID NO: 29639 - RNA, 23 nt, artificial
  Chemically synthesized
aaaagcuugugggucagcaggcc

SEQ ID NO: 29640 - RNA, 23 nt, artificial
  Chemically synthesized
gggcaaagagucuccggaacugc

SEQ ID NO: 29641 - RNA, 23 nt, artificial
  Chemically synthesized
ggcaaagagucuccggaacugcc

SEQ ID NO: 29642 - RNA, 23 nt, artificial
  Chemically synthesized
gcaaagagucuccggaacugccg

SEQ ID NO: 29643 - RNA, 23 nt, artificial
  Chemically synthesized
caaagagucuccggaacugccgg

SEQ ID NO: 29644 - RNA, 23 nt, artificial
  Chemically synthesized
aaagagucuccggaacugccgga

SEQ ID NO: 29645 - RNA, 23 nt, artificial
  Chemically synthesized
gaucagggugucgugucacaacc

SEQ ID NO: 29646 - RNA, 23 nt, artificial
  Chemically synthesized
aggccuccaagcacauuucccag

SEQ ID NO: 29647 - RNA, 23 nt, artificial
  Chemically synthesized
ccccacaaagaugugacugcaga

SEQ ID NO: 29648 - RNA, 23 nt, artificial
  Chemically synthesized
cgcccuucaagaacgaguuaacc

SEQ ID NO: 29649 - RNA, 23 nt, artificial
  Chemically synthesized
gaggcuccaggugacuccuauag

SEQ ID NO: 29650 - RNA, 23 nt, artificial
  Chemically synthesized
cauccucccagaacugagagagg

SEQ ID NO: 29651 - RNA, 23 nt, artificial
  Chemically synthesized
auccucccagaacugagagaggg

SEQ ID NO: 29652 - RNA, 23 nt, artificial
  Chemically synthesized
ugccucaaaggcaccugggaguu

SEQ ID NO: 29653 - RNA, 23 nt, artificial
  Chemically synthesized
gccucaaaggcaccugggaguuc

SEQ ID NO: 29654 - RNA, 23 nt, artificial
  Chemically synthesized
ccucaaaggcaccugggaguuca

SEQ ID NO: 29655 - RNA, 23 nt, artificial
  Chemically synthesized
cucaaaggcaccugggaguucac

SEQ ID NO: 29656 - RNA, 23 nt, artificial
  Chemically synthesized
ggggcuccaguucaggaauacau

SEQ ID NO: 29657 - RNA, 23 nt, artificial
  Chemically synthesized
acuggggcauguuuauuuccucc

SEQ ID NO: 29658 - RNA, 23 nt, artificial
  Chemically synthesized
cuggggcauguuuauuuccuccu

SEQ ID NO: 29659 - RNA, 23 nt, artificial
  Chemically synthesized
uggggcauguuuauuuccuccug

SEQ ID NO: 29660 - RNA, 23 nt, artificial
  Chemically synthesized
guggugucgcuauccaucacggc

SEQ ID NO: 29661 - RNA, 23 nt, artificial
  Chemically synthesized
ggggcauggaggcaucacaagug

SEQ ID NO: 29662 - RNA, 23 nt, artificial
  Chemically synthesized
aggcaccugggaguucacuacug

SEQ ID NO: 29663 - RNA, 23 nt, artificial
  Chemically synthesized
ggcaccugggaguucacuacugc

SEQ ID NO: 29664 - RNA, 23 nt, artificial
  Chemically synthesized
gcaccugggaguucacuacugca

SEQ ID NO: 29665 - RNA, 23 nt, artificial
  Chemically synthesized
gcgcugaugacuccgccuaggau

SEQ ID NO: 29666 - RNA, 23 nt, artificial
  Chemically synthesized
cgcugaugacuccgccuaggaug

SEQ ID NO: 29667 - RNA, 23 nt, artificial
  Chemically synthesized
gcugaugacuccgccuaggaugc

SEQ ID NO: 29668 - RNA, 23 nt, artificial
  Chemically synthesized
cugaugacuccgccuaggaugcg

SEQ ID NO: 29669 - RNA, 23 nt, artificial
  Chemically synthesized
ugaugacuccgccuaggaugcgc

SEQ ID NO: 29670 - RNA, 23 nt, artificial
  Chemically synthesized
aaagcuugugggucagcaggccc

SEQ ID NO: 29671 - RNA, 23 nt, artificial
  Chemically synthesized
gaccuccaugucaucuccagcca

SEQ ID NO: 29672 - RNA, 23 nt, artificial
  Chemically synthesized
accuccaugucaucuccagccag

SEQ ID NO: 29673 - RNA, 23 nt, artificial
  Chemically synthesized
cuggagucauccucccagaacug

SEQ ID NO: 29674 - RNA, 23 nt, artificial
  Chemically synthesized
uggagucauccucccagaacuga

SEQ ID NO: 29675 - RNA, 23 nt, artificial
  Chemically synthesized
caggccuccaagcacauuuccca

SEQ ID NO: 29676 - RNA, 23 nt, artificial
  Chemically synthesized
uggaggcaucacaagugcuaggc

SEQ ID NO: 29677 - RNA, 23 nt, artificial
  Chemically synthesized
gccccacaaagaugugacugcag

SEQ ID NO: 29678 - RNA, 23 nt, artificial
  Chemically synthesized
uggugucgcuauccaucacggcc

SEQ ID NO: 29679 - RNA, 23 nt, artificial
  Chemically synthesized
ccaggugacuccuauagcaaggc

SEQ ID NO: 29680 - RNA, 23 nt, artificial
  Chemically synthesized
ucaggccuccaagcacauuuccc

SEQ ID NO: 29681 - RNA, 23 nt, artificial
  Chemically synthesized
aggccccacaaagaugugacugc

SEQ ID NO: 29682 - RNA, 23 nt, artificial
  Chemically synthesized
ggccccacaaagaugugacugca

SEQ ID NO: 29683 - RNA, 23 nt, artificial
  Chemically synthesized
ggaggcaucacaagugcuaggcu

SEQ ID NO: 29684 - RNA, 23 nt, artificial
  Chemically synthesized
uggguagcaaccgugaagggugu

SEQ ID NO: 29685 - RNA, 23 nt, artificial
  Chemically synthesized
ggguagcaaccgugaagggugug

SEQ ID NO: 29686 - RNA, 23 nt, artificial
  Chemically synthesized
gguagcaaccgugaagggugugc

SEQ ID NO: 29687 - RNA, 23 nt, artificial
  Chemically synthesized
guagcaaccgugaagggugugcc

SEQ ID NO: 29688 - RNA, 23 nt, artificial
  Chemically synthesized
uagcaaccgugaagggugugcca

SEQ ID NO: 29689 - RNA, 23 nt, artificial
  Chemically synthesized
cugaucaggccuccaagcacauu

SEQ ID NO: 29690 - RNA, 23 nt, artificial
  Chemically synthesized
gcugaucaggccuccaagcacau

SEQ ID NO: 29691 - RNA, 23 nt, artificial
  Chemically synthesized
agggcaaauugggcccuggaugu

SEQ ID NO: 29692 - RNA, 23 nt, artificial
  Chemically synthesized
gggcaaauugggcccuggauguu

SEQ ID NO: 29693 - RNA, 23 nt, artificial
  Chemically synthesized
uccucccagaacugagagagggc

SEQ ID NO: 29694 - RNA, 23 nt, artificial
  Chemically synthesized
uggcgcugaccuccaugucaucu

SEQ ID NO: 29695 - RNA, 23 nt, artificial
  Chemically synthesized
cagccugaccaagcagcugauga

SEQ ID NO: 29696 - RNA, 23 nt, artificial
  Chemically synthesized
gccugaccaagcagcugaugaag

SEQ ID NO: 29697 - RNA, 23 nt, artificial
  Chemically synthesized
acuggagucauccucccagaacu

SEQ ID NO: 29698 - RNA, 23 nt, artificial
  Chemically synthesized
gacccguggacagagcuuguuag

SEQ ID NO: 29699 - RNA, 23 nt, artificial
  Chemically synthesized
gggcccuggauguugagaagcug

SEQ ID NO: 29700 - RNA, 23 nt, artificial
  Chemically synthesized
gggaacuccaggcagggcaaauu

SEQ ID NO: 29701 - RNA, 23 nt, artificial
  Chemically synthesized
ggaacuccaggcagggcaaauug

SEQ ID NO: 29702 - RNA, 23 nt, artificial
  Chemically synthesized
gaacuccaggcagggcaaauugg

SEQ ID NO: 29703 - RNA, 23 nt, artificial
  Chemically synthesized
aacuccaggcagggcaaauuggg

SEQ ID NO: 29704 - RNA, 23 nt, artificial
  Chemically synthesized
acuccaggcagggcaaauugggc

SEQ ID NO: 29705 - RNA, 23 nt, artificial
  Chemically synthesized
cggggcauggaggcaucacaagu

SEQ ID NO: 29706 - RNA, 23 nt, artificial
  Chemically synthesized
ugggcaaagagucuccggaacug

SEQ ID NO: 29707 - RNA, 23 nt, artificial
  Chemically synthesized
ggggaacuccaggcagggcaaau

SEQ ID NO: 29708 - RNA, 23 nt, artificial
  Chemically synthesized
ggacuggagucauccucccagaa

SEQ ID NO: 29709 - RNA, 23 nt, artificial
  Chemically synthesized
gacuggagucauccucccagaac

SEQ ID NO: 29710 - RNA, 23 nt, artificial
  Chemically synthesized
gucccugaucggucagugucgaa

SEQ ID NO: 29711 - RNA, 23 nt, artificial
  Chemically synthesized
ggcaggcugggagcagaauauag

SEQ ID NO: 29712 - RNA, 23 nt, artificial
  Chemically synthesized
cugggcaaagagucuccggaacu

SEQ ID NO: 29713 - RNA, 23 nt, artificial
  Chemically synthesized
ugggcccuggauguugagaagcu

SEQ ID NO: 29714 - RNA, 23 nt, artificial
  Chemically synthesized
cuggcaggcugggagcagaauau

SEQ ID NO: 29715 - RNA, 23 nt, artificial
  Chemically synthesized
uggggcuccaguucaggaauaca

SEQ ID NO: 29716 - RNA, 23 nt, artificial
  Chemically synthesized
cgaggcuccaggugacuccuaua

SEQ ID NO: 29717 - RNA, 23 nt, artificial
  Chemically synthesized
cuggggcuccaguucaggaauac

SEQ ID NO: 29718 - RNA, 23 nt, artificial
  Chemically synthesized
ucuggggcuccaguucaggaaua

SEQ ID NO: 29719 - RNA, 23 nt, artificial
  Chemically synthesized
cgcuugcuggauccaccacaagu

SEQ ID NO: 29720 - RNA, 23 nt, artificial
  Chemically synthesized
ucgcuugcuggauccaccacaag

SEQ ID NO: 29721 - RNA, 23 nt, artificial
  Chemically synthesized
ccccagcugacauggaaauacag

SEQ ID NO: 29722 - RNA, 23 nt, artificial
  Chemically synthesized
gccccagcugacauggaaauaca

SEQ ID NO: 29723 - RNA, 23 nt, artificial
  Chemically synthesized
ccgucuucgacaaccugaugcag

SEQ ID NO: 29724 - RNA, 23 nt, artificial
  Chemically synthesized
cccgucuucgacaaccugaugca

SEQ ID NO: 29725 - RNA, 23 nt, artificial
  Chemically synthesized
gcccgucuucgacaaccugaugc

SEQ ID NO: 29726 - RNA, 23 nt, artificial
  Chemically synthesized
ugcccgucuucgacaaccugaug

SEQ ID NO: 29727 - RNA, 23 nt, artificial
  Chemically synthesized
cugcccgucuucgacaaccugau

SEQ ID NO: 29728 - RNA, 23 nt, artificial
  Chemically synthesized
cagaggacuacacgcucaaggug

SEQ ID NO: 29729 - RNA, 23 nt, artificial
  Chemically synthesized
ccagaggacuacacgcucaaggu

SEQ ID NO: 29730 - RNA, 23 nt, artificial
  Chemically synthesized
cccagaggacuacacgcucaagg

SEQ ID NO: 29731 - RNA, 23 nt, artificial
  Chemically synthesized
ccccagaggacuacacgcucaag

SEQ ID NO: 29732 - RNA, 23 nt, artificial
  Chemically synthesized
uccccagaggacuacacgcucaa

SEQ ID NO: 29733 - RNA, 23 nt, artificial
  Chemically synthesized
cgacaaccugaugcagcagaagc

SEQ ID NO: 29734 - RNA, 23 nt, artificial
  Chemically synthesized
accugaaugucacccgcaaggcc

SEQ ID NO: 29735 - RNA, 23 nt, artificial
  Chemically synthesized
uaccugaaugucacccgcaaggc

SEQ ID NO: 29736 - RNA, 23 nt, artificial
  Chemically synthesized
cuaccugaaugucacccgcaagg

SEQ ID NO: 29737 - RNA, 23 nt, artificial
  Chemically synthesized
ccuaccugaaugucacccgcaag

SEQ ID NO: 29738 - RNA, 23 nt, artificial
  Chemically synthesized
gcagaagcugguggaccagaaca

SEQ ID NO: 29739 - RNA, 23 nt, artificial
  Chemically synthesized
agcagaagcugguggaccagaac

SEQ ID NO: 29740 - RNA, 23 nt, artificial
  Chemically synthesized
cagcagaagcugguggaccagaa

SEQ ID NO: 29741 - RNA, 23 nt, artificial
  Chemically synthesized
acugaagcugggaggcaaaggcu

SEQ ID NO: 29742 - RNA, 23 nt, artificial
  Chemically synthesized
cacugaagcugggaggcaaaggc

SEQ ID NO: 29743 - RNA, 23 nt, artificial
  Chemically synthesized
acacugaagcugggaggcaaagg

SEQ ID NO: 29744 - RNA, 23 nt, artificial
  Chemically synthesized
cacacugaagcugggaggcaaag

SEQ ID NO: 29745 - RNA, 23 nt, artificial
  Chemically synthesized
acauggacgcccaguacuacggg

SEQ ID NO: 29746 - RNA, 23 nt, artificial
  Chemically synthesized
uacauggacgcccaguacuacgg

SEQ ID NO: 29747 - RNA, 23 nt, artificial
  Chemically synthesized
cuacauggacgcccaguacuacg

SEQ ID NO: 29748 - RNA, 23 nt, artificial
  Chemically synthesized
ugagcuggaaggagugagagggg

SEQ ID NO: 29749 - RNA, 23 nt, artificial
  Chemically synthesized
augagcuggaaggagugagaggg

SEQ ID NO: 29750 - RNA, 23 nt, artificial
  Chemically synthesized
gaugagcuggaaggagugagagg

SEQ ID NO: 29751 - RNA, 23 nt, artificial
  Chemically synthesized
ggaugagcuggaaggagugagag

SEQ ID NO: 29752 - RNA, 23 nt, artificial
  Chemically synthesized
gcuucacagucgucuucgacacg

SEQ ID NO: 29753 - RNA, 23 nt, artificial
  Chemically synthesized
gcuucaugggcauggacaucccg

SEQ ID NO: 29754 - RNA, 23 nt, artificial
  Chemically synthesized
ggcuucaugggcauggacauccc

SEQ ID NO: 29755 - RNA, 23 nt, artificial
  Chemically synthesized
cggcuucaugggcauggacaucc

SEQ ID NO: 29756 - RNA, 23 nt, artificial
  Chemically synthesized
gcggcuucaugggcauggacauc

SEQ ID NO: 29757 - RNA, 23 nt, artificial
  Chemically synthesized
agcggcuucaugggcauggacau

SEQ ID NO: 29758 - RNA, 23 nt, artificial
  Chemically synthesized
gaggcaaaggcuacaagcugucc

SEQ ID NO: 29759 - RNA, 23 nt, artificial
  Chemically synthesized
ggaggcaaaggcuacaagcuguc

SEQ ID NO: 29760 - RNA, 23 nt, artificial
  Chemically synthesized
gggaggcaaaggcuacaagcugu

SEQ ID NO: 29761 - RNA, 23 nt, artificial
  Chemically synthesized
ugggaggcaaaggcuacaagcug

SEQ ID NO: 29762 - RNA, 23 nt, artificial
  Chemically synthesized
cugggaggcaaaggcuacaagcu

SEQ ID NO: 29763 - RNA, 23 nt, artificial
  Chemically synthesized
gugucaaaguggagaggcagguc

SEQ ID NO: 29764 - RNA, 23 nt, artificial
  Chemically synthesized
ggugucaaaguggagaggcaggu

SEQ ID NO: 29765 - RNA, 23 nt, artificial
  Chemically synthesized
cggugucaaaguggagaggcagg

SEQ ID NO: 29766 - RNA, 23 nt, artificial
  Chemically synthesized
gcggugucaaaguggagaggcag

SEQ ID NO: 29767 - RNA, 23 nt, artificial
  Chemically synthesized
ggcggugucaaaguggagaggca

SEQ ID NO: 29768 - RNA, 23 nt, artificial
  Chemically synthesized
ccauucccgaggugcucaagaac

SEQ ID NO: 29769 - RNA, 23 nt, artificial
  Chemically synthesized
cccauucccgaggugcucaagaa

SEQ ID NO: 29770 - RNA, 23 nt, artificial
  Chemically synthesized
gcaucuccgucaacaacgugcug

SEQ ID NO: 29771 - RNA, 23 nt, artificial
  Chemically synthesized
cgcaucuccgucaacaacgugcu

SEQ ID NO: 29772 - RNA, 23 nt, artificial
  Chemically synthesized
ccgcaucuccgucaacaacgugc

SEQ ID NO: 29773 - RNA, 23 nt, artificial
  Chemically synthesized
cccgcaucuccgucaacaacgug

SEQ ID NO: 29774 - RNA, 23 nt, artificial
  Chemically synthesized
ccccgcaucuccgucaacaacgu

SEQ ID NO: 29775 - RNA, 23 nt, artificial
  Chemically synthesized
aggacuacacgcucaaggugucg

SEQ ID NO: 29776 - RNA, 23 nt, artificial
  Chemically synthesized
gaggacuacacgcucaagguguc

SEQ ID NO: 29777 - RNA, 23 nt, artificial
  Chemically synthesized
gggacaaaacccaccuuguugga

SEQ ID NO: 29778 - RNA, 23 nt, artificial
  Chemically synthesized
ggggacaaaacccaccuuguugg

SEQ ID NO: 29779 - RNA, 23 nt, artificial
  Chemically synthesized
aggggacaaaacccaccuuguug

SEQ ID NO: 29780 - RNA, 23 nt, artificial
  Chemically synthesized
gaggggacaaaacccaccuuguu

SEQ ID NO: 29781 - RNA, 23 nt, artificial
  Chemically synthesized
ggcaaaggcuacaagcugucccc

SEQ ID NO: 29782 - RNA, 23 nt, artificial
  Chemically synthesized
aggcaaaggcuacaagcuguccc

SEQ ID NO: 29783 - RNA, 23 nt, artificial
  Chemically synthesized
ugcacaaguucacguccauccgc

SEQ ID NO: 29784 - RNA, 23 nt, artificial
  Chemically synthesized
cugcacaaguucacguccauccg

SEQ ID NO: 29785 - RNA, 23 nt, artificial
  Chemically synthesized
gcugcacaaguucacguccaucc

SEQ ID NO: 29786 - RNA, 23 nt, artificial
  Chemically synthesized
cgcugcacaaguucacguccauc

SEQ ID NO: 29787 - RNA, 23 nt, artificial
  Chemically synthesized
ccgcugcacaaguucacguccau

SEQ ID NO: 29788 - RNA, 23 nt, artificial
  Chemically synthesized
cucuguggaggaccugauugcca

SEQ ID NO: 29789 - RNA, 23 nt, artificial
  Chemically synthesized
gcucuguggaggaccugauugcc

SEQ ID NO: 29790 - RNA, 23 nt, artificial
  Chemically synthesized
ggcucuguggaggaccugauugc

SEQ ID NO: 29791 - RNA, 23 nt, artificial
  Chemically synthesized
gggcucuguggaggaccugauug

SEQ ID NO: 29792 - RNA, 23 nt, artificial
  Chemically synthesized
ggggcucuguggaggaccugauu

SEQ ID NO: 29793 - RNA, 23 nt, artificial
  Chemically synthesized
cacugcaaacugcuggacaucgc

SEQ ID NO: 29794 - RNA, 23 nt, artificial
  Chemically synthesized
ccacugcaaacugcuggacaucg

SEQ ID NO: 29795 - RNA, 23 nt, artificial
  Chemically synthesized
cgcugauucagggcgaguacaug

SEQ ID NO: 29796 - RNA, 23 nt, artificial
  Chemically synthesized
ccgcugauucagggcgaguacau

SEQ ID NO: 29797 - RNA, 23 nt, artificial
  Chemically synthesized
gaaacagaggagagucccagagc

SEQ ID NO: 29798 - RNA, 23 nt, artificial
  Chemically synthesized
cuguccuaccugaaugucacccg

SEQ ID NO: 29799 - RNA, 23 nt, artificial
  Chemically synthesized
gcugggaggcaaaggcuacaagc

SEQ ID NO: 29800 - RNA, 23 nt, artificial
  Chemically synthesized
agcugggaggcaaaggcuacaag

SEQ ID NO: 29801 - RNA, 23 nt, artificial
  Chemically synthesized
agaggggacaaaacccaccuugu

SEQ ID NO: 29802 - RNA, 23 nt, artificial
  Chemically synthesized
agccccagcugacauggaaauac

SEQ ID NO: 29803 - RNA, 23 nt, artificial
  Chemically synthesized
gagccccagcugacauggaaaua

SEQ ID NO: 29804 - RNA, 23 nt, artificial
  Chemically synthesized
gccagcacagaaacagaggagag

SEQ ID NO: 29805 - RNA, 23 nt, artificial
  Chemically synthesized
cgccagcacagaaacagaggaga

SEQ ID NO: 29806 - RNA, 23 nt, artificial
  Chemically synthesized
gcgccagcacagaaacagaggag

SEQ ID NO: 29807 - RNA, 23 nt, artificial
  Chemically synthesized
cgcgccagcacagaaacagagga

SEQ ID NO: 29808 - RNA, 23 nt, artificial
  Chemically synthesized
cugaggaugagcuggaaggagug

SEQ ID NO: 29809 - RNA, 23 nt, artificial
  Chemically synthesized
ccugaggaugagcuggaaggagu

SEQ ID NO: 29810 - RNA, 23 nt, artificial
  Chemically synthesized
gccugaggaugagcuggaaggag

SEQ ID NO: 29811 - RNA, 23 nt, artificial
  Chemically synthesized
ggccugaggaugagcuggaagga

SEQ ID NO: 29812 - RNA, 23 nt, artificial
  Chemically synthesized
ccucccuggguucagaaaugcug

SEQ ID NO: 29813 - RNA, 23 nt, artificial
  Chemically synthesized
cccucccuggguucagaaaugcu

SEQ ID NO: 29814 - RNA, 23 nt, artificial
  Chemically synthesized
ccccucccuggguucagaaaugc

SEQ ID NO: 29815 - RNA, 23 nt, artificial
  Chemically synthesized
uccccucccuggguucagaaaug

SEQ ID NO: 29816 - RNA, 23 nt, artificial
  Chemically synthesized
uuccccucccuggguucagaaau

SEQ ID NO: 29817 - RNA, 23 nt, artificial
  Chemically synthesized
gcucaagaacuacauggacgccc

SEQ ID NO: 29818 - RNA, 23 nt, artificial
  Chemically synthesized
gguagagcugauccagagcacag

SEQ ID NO: 29819 - RNA, 23 nt, artificial
  Chemically synthesized
ggguagagcugauccagagcaca

SEQ ID NO: 29820 - RNA, 23 nt, artificial
  Chemically synthesized
gccgcugauucagggcgaguaca

SEQ ID NO: 29821 - RNA, 23 nt, artificial
  Chemically synthesized
cccgcugcacaaguucacgucca

SEQ ID NO: 29822 - RNA, 23 nt, artificial
  Chemically synthesized
aacagaggagagucccagagcag

SEQ ID NO: 29823 - RNA, 23 nt, artificial
  Chemically synthesized
aggcaucaccuucaucgcagcca

SEQ ID NO: 29824 - RNA, 23 nt, artificial
  Chemically synthesized
caggcaucaccuucaucgcagcc

SEQ ID NO: 29825 - RNA, 23 nt, artificial
  Chemically synthesized
ccaggcaucaccuucaucgcagc

SEQ ID NO: 29826 - RNA, 23 nt, artificial
  Chemically synthesized
gccaggcaucaccuucaucgcag

SEQ ID NO: 29827 - RNA, 23 nt, artificial
  Chemically synthesized
agccaggcaucaccuucaucgca

SEQ ID NO: 29828 - RNA, 23 nt, artificial
  Chemically synthesized
cccuggguucagaaaugcugccu

SEQ ID NO: 29829 - RNA, 23 nt, artificial
  Chemically synthesized
ucccuggguucagaaaugcugcc

SEQ ID NO: 29830 - RNA, 23 nt, artificial
  Chemically synthesized
cucccuggguucagaaaugcugc

SEQ ID NO: 29831 - RNA, 23 nt, artificial
  Chemically synthesized
accugaugcagcagaagcuggug

SEQ ID NO: 29832 - RNA, 23 nt, artificial
  Chemically synthesized
caaccugaugcagcagaagcugg

SEQ ID NO: 29833 - RNA, 23 nt, artificial
  Chemically synthesized
aaguggagaggcaggucuuuggg

SEQ ID NO: 29834 - RNA, 23 nt, artificial
  Chemically synthesized
cacccuaccuguucagugucccg

SEQ ID NO: 29835 - RNA, 23 nt, artificial
  Chemically synthesized
ccacccuaccuguucaguguccc

SEQ ID NO: 29836 - RNA, 23 nt, artificial
  Chemically synthesized
gccacccuaccuguucagugucc

SEQ ID NO: 29837 - RNA, 23 nt, artificial
  Chemically synthesized
ugccacccuaccuguucaguguc

SEQ ID NO: 29838 - RNA, 23 nt, artificial
  Chemically synthesized
cugccacccuaccuguucagugu

SEQ ID NO: 29839 - RNA, 23 nt, artificial
  Chemically synthesized
ccgucucaaaguacucccaggcg

SEQ ID NO: 29840 - RNA, 23 nt, artificial
  Chemically synthesized
cccgucucaaaguacucccaggc

SEQ ID NO: 29841 - RNA, 23 nt, artificial
  Chemically synthesized
ccccgucucaaaguacucccagg

SEQ ID NO: 29842 - RNA, 23 nt, artificial
  Chemically synthesized
gccccgucucaaaguacucccag

SEQ ID NO: 29843 - RNA, 23 nt, artificial
  Chemically synthesized
ggccccgucucaaaguacuccca

SEQ ID NO: 29844 - RNA, 23 nt, artificial
  Chemically synthesized
cgucuucgacaaccugaugcagc

SEQ ID NO: 29845 - RNA, 23 nt, artificial
  Chemically synthesized
cccaagcccgacuugcuguuuug

SEQ ID NO: 29846 - RNA, 23 nt, artificial
  Chemically synthesized
ccuccauccacugcaaacugcug

SEQ ID NO: 29847 - RNA, 23 nt, artificial
  Chemically synthesized
cccuccauccacugcaaacugcu

SEQ ID NO: 29848 - RNA, 23 nt, artificial
  Chemically synthesized
ccccuccauccacugcaaacugc

SEQ ID NO: 29849 - RNA, 23 nt, artificial
  Chemically synthesized
uccccuccauccacugcaaacug

SEQ ID NO: 29850 - RNA, 23 nt, artificial
  Chemically synthesized
guccccuccauccacugcaaacu

SEQ ID NO: 29851 - RNA, 23 nt, artificial
  Chemically synthesized
gucuucaucggccgcuacuacac

SEQ ID NO: 29852 - RNA, 23 nt, artificial
  Chemically synthesized
cgucuucaucggccgcuacuaca

SEQ ID NO: 29853 - RNA, 23 nt, artificial
  Chemically synthesized
acgucuucaucggccgcuacuac

SEQ ID NO: 29854 - RNA, 23 nt, artificial
  Chemically synthesized
gacgucuucaucggccgcuacua

SEQ ID NO: 29855 - RNA, 23 nt, artificial
  Chemically synthesized
uguccuaccugaaugucacccgc

SEQ ID NO: 29856 - RNA, 23 nt, artificial
  Chemically synthesized
gcaaacugcuggacaucgcuugc

SEQ ID NO: 29857 - RNA, 23 nt, artificial
  Chemically synthesized
gacaaaacccaccuuguuggagc

SEQ ID NO: 29858 - RNA, 23 nt, artificial
  Chemically synthesized
ccauccacugcaaacugcuggac

SEQ ID NO: 29859 - RNA, 23 nt, artificial
  Chemically synthesized
cuccauccacugcaaacugcugg

SEQ ID NO: 29860 - RNA, 23 nt, artificial
  Chemically synthesized
aguggagaggcaggucuuugggg

SEQ ID NO: 29861 - RNA, 23 nt, artificial
  Chemically synthesized
gaggaugagcuggaaggagugag

SEQ ID NO: 29862 - RNA, 23 nt, artificial
  Chemically synthesized
ccagugcuucacagucgucuucg

SEQ ID NO: 29863 - RNA, 23 nt, artificial
  Chemically synthesized
cccagugcuucacagucgucuuc

SEQ ID NO: 29864 - RNA, 23 nt, artificial
  Chemically synthesized
ccccagugcuucacagucgucuu

SEQ ID NO: 29865 - RNA, 23 nt, artificial
  Chemically synthesized
gcccaagcccgacuugcuguuuu

SEQ ID NO: 29866 - RNA, 23 nt, artificial
  Chemically synthesized
ugaugcagcagaagcugguggac

SEQ ID NO: 29867 - RNA, 23 nt, artificial
  Chemically synthesized
cugaugcagcagaagcuggugga

SEQ ID NO: 29868 - RNA, 23 nt, artificial
  Chemically synthesized
ccugaugcagcagaagcuggugg

SEQ ID NO: 29869 - RNA, 23 nt, artificial
  Chemically synthesized
gcacagaaacagaggagaguccc

SEQ ID NO: 29870 - RNA, 23 nt, artificial
  Chemically synthesized
gacuacacgcucaaggugucgca

SEQ ID NO: 29871 - RNA, 23 nt, artificial
  Chemically synthesized
ggacuacacgcucaaggugucgc

SEQ ID NO: 29872 - RNA, 23 nt, artificial
  Chemically synthesized
uguuuuguucugugguuuucccc

SEQ ID NO: 29873 - RNA, 23 nt, artificial
  Chemically synthesized
cuucaucggccgcuacuacacug

SEQ ID NO: 29874 - RNA, 23 nt, artificial
  Chemically synthesized
cugccugucugucucuccaucug

SEQ ID NO: 29875 - RNA, 23 nt, artificial
  Chemically synthesized
ccugccugucugucucuccaucu

SEQ ID NO: 29876 - RNA, 23 nt, artificial
  Chemically synthesized
gccugccugucugucucuccauc

SEQ ID NO: 29877 - RNA, 23 nt, artificial
  Chemically synthesized
ugccugccugucugucucuccau

SEQ ID NO: 29878 - RNA, 23 nt, artificial
  Chemically synthesized
ugaccgugacaacaacagggugg

SEQ ID NO: 29879 - RNA, 23 nt, artificial
  Chemically synthesized
gaucacacugaagcugggaggca

SEQ ID NO: 29880 - RNA, 23 nt, artificial
  Chemically synthesized
cgaucacacugaagcugggaggc

SEQ ID NO: 29881 - RNA, 23 nt, artificial
  Chemically synthesized
gcgaucacacugaagcugggagg

SEQ ID NO: 29882 - RNA, 23 nt, artificial
  Chemically synthesized
cgcgaucacacugaagcugggag

SEQ ID NO: 29883 - RNA, 23 nt, artificial
  Chemically synthesized
ccgcgaucacacugaagcuggga

SEQ ID NO: 29884 - RNA, 23 nt, artificial
  Chemically synthesized
cgacaaguccagcaccuacguga

SEQ ID NO: 29885 - RNA, 23 nt, artificial
  Chemically synthesized
acaacaacagggugggcuucgcc

SEQ ID NO: 29886 - RNA, 23 nt, artificial
  Chemically synthesized
gacaacaacagggugggcuucgc

SEQ ID NO: 29887 - RNA, 23 nt, artificial
  Chemically synthesized
ugacaacaacagggugggcuucg

SEQ ID NO: 29888 - RNA, 23 nt, artificial
  Chemically synthesized
gugacaacaacagggugggcuuc

SEQ ID NO: 29889 - RNA, 23 nt, artificial
  Chemically synthesized
cgugacaacaacagggugggcuu

SEQ ID NO: 29890 - RNA, 23 nt, artificial
  Chemically synthesized
uucagggcgaguacaugaucccc

SEQ ID NO: 29891 - RNA, 23 nt, artificial
  Chemically synthesized
uguuucgugcauuggaagacccc

SEQ ID NO: 29892 - RNA, 23 nt, artificial
  Chemically synthesized
ccuggguucagaaaugcugccug

SEQ ID NO: 29893 - RNA, 23 nt, artificial
  Chemically synthesized
ucugcagcugaccucuguugucc

SEQ ID NO: 29894 - RNA, 23 nt, artificial
  Chemically synthesized
cucugcagcugaccucuguuguc

SEQ ID NO: 29895 - RNA, 23 nt, artificial
  Chemically synthesized
ccucugcagcugaccucuguugu

SEQ ID NO: 29896 - RNA, 23 nt, artificial
  Chemically synthesized
uccucugcagcugaccucuguug

SEQ ID NO: 29897 - RNA, 23 nt, artificial
  Chemically synthesized
uggacaucgcuugcuggauccac

SEQ ID NO: 29898 - RNA, 23 nt, artificial
  Chemically synthesized
cuggacaucgcuugcuggaucca

SEQ ID NO: 29899 - RNA, 23 nt, artificial
  Chemically synthesized
gcuggacaucgcuugcuggaucc

SEQ ID NO: 29900 - RNA, 23 nt, artificial
  Chemically synthesized
ugcuggacaucgcuugcuggauc

SEQ ID NO: 29901 - RNA, 23 nt, artificial
  Chemically synthesized
cugcuggacaucgcuugcuggau

SEQ ID NO: 29902 - RNA, 23 nt, artificial
  Chemically synthesized
cagaaaugcugccugccugucug

SEQ ID NO: 29903 - RNA, 23 nt, artificial
  Chemically synthesized
gggguagagcugauccagagcac

SEQ ID NO: 29904 - RNA, 23 nt, artificial
  Chemically synthesized
ggggguagagcugauccagagca

SEQ ID NO: 29905 - RNA, 23 nt, artificial
  Chemically synthesized
gcgacaaguccagcaccuacgug

SEQ ID NO: 29906 - RNA, 23 nt, artificial
  Chemically synthesized
agcgacaaguccagcaccuacgu

SEQ ID NO: 29907 - RNA, 23 nt, artificial
  Chemically synthesized
aucccgcugcacaaguucacguc

SEQ ID NO: 29908 - RNA, 23 nt, artificial
  Chemically synthesized
gaucccgcugcacaaguucacgu

SEQ ID NO: 29909 - RNA, 23 nt, artificial
  Chemically synthesized
ggaucccgcugcacaaguucacg

SEQ ID NO: 29910 - RNA, 23 nt, artificial
  Chemically synthesized
aggaucccgcugcacaaguucac

SEQ ID NO: 29911 - RNA, 23 nt, artificial
  Chemically synthesized
caggaucccgcugcacaaguuca

SEQ ID NO: 29912 - RNA, 23 nt, artificial
  Chemically synthesized
guccuaccugaaugucacccgca

SEQ ID NO: 29913 - RNA, 23 nt, artificial
  Chemically synthesized
acaucgcuugcuggauccaccac

SEQ ID NO: 29914 - RNA, 23 nt, artificial
  Chemically synthesized
gacaucgcuugcuggauccacca

SEQ ID NO: 29915 - RNA, 23 nt, artificial
  Chemically synthesized
ggacaucgcuugcuggauccacc

SEQ ID NO: 29916 - RNA, 23 nt, artificial
  Chemically synthesized
acaacagcgacaaguccagcacc

SEQ ID NO: 29917 - RNA, 23 nt, artificial
  Chemically synthesized
agcugaccucuguuguccucccc

SEQ ID NO: 29918 - RNA, 23 nt, artificial
  Chemically synthesized
cagcugaccucuguuguccuccc

SEQ ID NO: 29919 - RNA, 23 nt, artificial
  Chemically synthesized
gcagcugaccucuguuguccucc

SEQ ID NO: 29920 - RNA, 23 nt, artificial
  Chemically synthesized
ugcagcugaccucuguuguccuc

SEQ ID NO: 29921 - RNA, 23 nt, artificial
  Chemically synthesized
cugcagcugaccucuguuguccu

SEQ ID NO: 29922 - RNA, 23 nt, artificial
  Chemically synthesized
cuggguucagaaaugcugccugc

SEQ ID NO: 29923 - RNA, 23 nt, artificial
  Chemically synthesized
acuacacgcucaaggugucgcag

SEQ ID NO: 29924 - RNA, 23 nt, artificial
  Chemically synthesized
gcccauucccgaggugcucaaga

SEQ ID NO: 29925 - RNA, 23 nt, artificial
  Chemically synthesized
accgugacaacaacagggugggc

SEQ ID NO: 29926 - RNA, 23 nt, artificial
  Chemically synthesized
gaccgugacaacaacaggguggg

SEQ ID NO: 29927 - RNA, 23 nt, artificial
  Chemically synthesized
gcacaaguucacguccauccgcc

SEQ ID NO: 29928 - RNA, 23 nt, artificial
  Chemically synthesized
uucacagucgucuucgacacggg

SEQ ID NO: 29929 - RNA, 23 nt, artificial
  Chemically synthesized
cuucacagucgucuucgacacgg

SEQ ID NO: 29930 - RNA, 23 nt, artificial
  Chemically synthesized
ggcccaagcccgacuugcuguuu

SEQ ID NO: 29931 - RNA, 23 nt, artificial
  Chemically synthesized
gcaaaggcuacaagcugucccca

SEQ ID NO: 29932 - RNA, 23 nt, artificial
  Chemically synthesized
ucuccgucaacaacgugcugccc

SEQ ID NO: 29933 - RNA, 23 nt, artificial
  Chemically synthesized
aucuccgucaacaacgugcugcc

SEQ ID NO: 29934 - RNA, 23 nt, artificial
  Chemically synthesized
caucuccgucaacaacgugcugc

SEQ ID NO: 29935 - RNA, 23 nt, artificial
  Chemically synthesized
ucuccuucuaccugagcagggac

SEQ ID NO: 29936 - RNA, 23 nt, artificial
  Chemically synthesized
cuucuccuucuaccugagcaggg

SEQ ID NO: 29937 - RNA, 23 nt, artificial
  Chemically synthesized
cgucucaaaguacucccaggcgg

SEQ ID NO: 29938 - RNA, 23 nt, artificial
  Chemically synthesized
caacagcgacaaguccagcaccu

SEQ ID NO: 29939 - RNA, 23 nt, artificial
  Chemically synthesized
ucacagucgucuucgacacgggc

SEQ ID NO: 29940 - RNA, 23 nt, artificial
  Chemically synthesized
gucucuccaucuguuuggugggg

SEQ ID NO: 29941 - RNA, 23 nt, artificial
  Chemically synthesized
gaaaugcugccugccugucuguc

SEQ ID NO: 29942 - RNA, 23 nt, artificial
  Chemically synthesized
gguucagaaaugcugccugccug

SEQ ID NO: 29943 - RNA, 23 nt, artificial
  Chemically synthesized
ggguucagaaaugcugccugccu

SEQ ID NO: 29944 - RNA, 23 nt, artificial
  Chemically synthesized
uggguucagaaaugcugccugcc

SEQ ID NO: 29945 - RNA, 23 nt, artificial
  Chemically synthesized
acaaguucacguccauccgccgg

SEQ ID NO: 29946 - RNA, 23 nt, artificial
  Chemically synthesized
cacaaguucacguccauccgccg

SEQ ID NO: 29947 - RNA, 23 nt, artificial
  Chemically synthesized
cccccagugcuucacagucgucu

SEQ ID NO: 29948 - RNA, 23 nt, artificial
  Chemically synthesized
gucucaaaguacucccaggcggu

SEQ ID NO: 29949 - RNA, 23 nt, artificial
  Chemically synthesized
ucagggcgaguacaugauccccu

SEQ ID NO: 29950 - RNA, 23 nt, artificial
  Chemically synthesized
cuucaugggcauggacaucccgc

SEQ ID NO: 29951 - RNA, 23 nt, artificial
  Chemically synthesized
guuuuguucugugguuuuccccu

SEQ ID NO: 29952 - RNA, 23 nt, artificial
  Chemically synthesized
uuuguucugugguuuuccccucc

SEQ ID NO: 29953 - RNA, 23 nt, artificial
  Chemically synthesized
uuuuguucugugguuuuccccuc

SEQ ID NO: 29954 - RNA, 23 nt, artificial
  Chemically synthesized
caaaggcuacaagcuguccccag

SEQ ID NO: 29955 - RNA, 23 nt, artificial
  Chemically synthesized
guuucgugcauuggaagacccca

SEQ ID NO: 29956 - RNA, 23 nt, artificial
  Chemically synthesized
aaacccaccuuguuggagccugc

SEQ ID NO: 29957 - RNA, 23 nt, artificial
  Chemically synthesized
aaaacccaccuuguuggagccug

SEQ ID NO: 29958 - RNA, 23 nt, artificial
  Chemically synthesized
aaaggcuacaagcuguccccaga

SEQ ID NO: 29959 - RNA, 23 nt, artificial
  Chemically synthesized
aacugcuggacaucgcuugcugg

SEQ ID NO: 29960 - RNA, 23 nt, artificial
  Chemically synthesized
uuucgugcauuggaagaccccac

SEQ ID NO: 29961 - RNA, 23 nt, artificial
  Chemically synthesized
acccuaccuguucagugucccgg

SEQ ID NO: 29962 - RNA, 23 nt, artificial
  Chemically synthesized
cucuccaucuguuuggugggggu

SEQ ID NO: 29963 - RNA, 23 nt, artificial
  Chemically synthesized
ucucuccaucuguuugguggggg

SEQ ID NO: 29964 - RNA, 23 nt, artificial
  Chemically synthesized
uucgugcauuggaagaccccacc

SEQ ID NO: 29965 - RNA, 23 nt, artificial
  Chemically synthesized
ucuccaucuguuuggugggggua

SEQ ID NO: 29966 - RNA, 23 nt, artificial
  Chemically synthesized
ucucaaaguacucccaggcggug

SEQ ID NO: 29967 - RNA, 23 nt, artificial
  Chemically synthesized
uucaugggcauggacaucccgcc

SEQ ID NO: 29968 - RNA, 23 nt, artificial
  Chemically synthesized
acuugugguggauccagcaagcg

SEQ ID NO: 29969 - RNA, 23 nt, artificial
  Chemically synthesized
cuugugguggauccagcaagcga

SEQ ID NO: 29970 - RNA, 23 nt, artificial
  Chemically synthesized
cuguauuuccaugucagcugggg

SEQ ID NO: 29971 - RNA, 23 nt, artificial
  Chemically synthesized
uguauuuccaugucagcuggggc

SEQ ID NO: 29972 - RNA, 23 nt, artificial
  Chemically synthesized
cugcaucagguugucgaagacgg

SEQ ID NO: 29973 - RNA, 23 nt, artificial
  Chemically synthesized
ugcaucagguugucgaagacggg

SEQ ID NO: 29974 - RNA, 23 nt, artificial
  Chemically synthesized
gcaucagguugucgaagacgggc

SEQ ID NO: 29975 - RNA, 23 nt, artificial
  Chemically synthesized
caucagguugucgaagacgggca

SEQ ID NO: 29976 - RNA, 23 nt, artificial
  Chemically synthesized
aucagguugucgaagacgggcag

SEQ ID NO: 29977 - RNA, 23 nt, artificial
  Chemically synthesized
caccuugagcguguaguccucug

SEQ ID NO: 29978 - RNA, 23 nt, artificial
  Chemically synthesized
accuugagcguguaguccucugg

SEQ ID NO: 29979 - RNA, 23 nt, artificial
  Chemically synthesized
ccuugagcguguaguccucuggg

SEQ ID NO: 29980 - RNA, 23 nt, artificial
  Chemically synthesized
cuugagcguguaguccucugggg

SEQ ID NO: 29981 - RNA, 23 nt, artificial
  Chemically synthesized
uugagcguguaguccucugggga

SEQ ID NO: 29982 - RNA, 23 nt, artificial
  Chemically synthesized
gcuucugcugcaucagguugucg

SEQ ID NO: 29983 - RNA, 23 nt, artificial
  Chemically synthesized
ggccuugcgggugacauucaggu

SEQ ID NO: 29984 - RNA, 23 nt, artificial
  Chemically synthesized
gccuugcgggugacauucaggua

SEQ ID NO: 29985 - RNA, 23 nt, artificial
  Chemically synthesized
ccuugcgggugacauucagguag

SEQ ID NO: 29986 - RNA, 23 nt, artificial
  Chemically synthesized
cuugcgggugacauucagguagg

SEQ ID NO: 29987 - RNA, 23 nt, artificial
  Chemically synthesized
uguucugguccaccagcuucugc

SEQ ID NO: 29988 - RNA, 23 nt, artificial
  Chemically synthesized
guucugguccaccagcuucugcu

SEQ ID NO: 29989 - RNA, 23 nt, artificial
  Chemically synthesized
uucugguccaccagcuucugcug

SEQ ID NO: 29990 - RNA, 23 nt, artificial
  Chemically synthesized
agccuuugccucccagcuucagu

SEQ ID NO: 29991 - RNA, 23 nt, artificial
  Chemically synthesized
gccuuugccucccagcuucagug

SEQ ID NO: 29992 - RNA, 23 nt, artificial
  Chemically synthesized
ccuuugccucccagcuucagugu

SEQ ID NO: 29993 - RNA, 23 nt, artificial
  Chemically synthesized
cuuugccucccagcuucagugug

SEQ ID NO: 29994 - RNA, 23 nt, artificial
  Chemically synthesized
cccguaguacugggcguccaugu

SEQ ID NO: 29995 - RNA, 23 nt, artificial
  Chemically synthesized
ccguaguacugggcguccaugua

SEQ ID NO: 29996 - RNA, 23 nt, artificial
  Chemically synthesized
cguaguacugggcguccauguag

SEQ ID NO: 29997 - RNA, 23 nt, artificial
  Chemically synthesized
ccccucucacuccuuccagcuca

SEQ ID NO: 29998 - RNA, 23 nt, artificial
  Chemically synthesized
cccucucacuccuuccagcucau

SEQ ID NO: 29999 - RNA, 23 nt, artificial
  Chemically synthesized
ccucucacuccuuccagcucauc

SEQ ID NO: 30000 - RNA, 23 nt, artificial
  Chemically synthesized
cucucacuccuuccagcucaucc

SEQ ID NO: 30001 - RNA, 23 nt, artificial
  Chemically synthesized
cgugucgaagacgacugugaagc

SEQ ID NO: 30002 - RNA, 23 nt, artificial
  Chemically synthesized
cgggauguccaugcccaugaagc

SEQ ID NO: 30003 - RNA, 23 nt, artificial
  Chemically synthesized
gggauguccaugcccaugaagcc

SEQ ID NO: 30004 - RNA, 23 nt, artificial
  Chemically synthesized
ggauguccaugcccaugaagccg

SEQ ID NO: 30005 - RNA, 23 nt, artificial
  Chemically synthesized
gauguccaugcccaugaagccgc

SEQ ID NO: 30006 - RNA, 23 nt, artificial
  Chemically synthesized
auguccaugcccaugaagccgcu

SEQ ID NO: 30007 - RNA, 23 nt, artificial
  Chemically synthesized
ggacagcuuguagccuuugccuc

SEQ ID NO: 30008 - RNA, 23 nt, artificial
  Chemically synthesized
gacagcuuguagccuuugccucc

SEQ ID NO: 30009 - RNA, 23 nt, artificial
  Chemically synthesized
acagcuuguagccuuugccuccc

SEQ ID NO: 30010 - RNA, 23 nt, artificial
  Chemically synthesized
cagcuuguagccuuugccuccca

SEQ ID NO: 30011 - RNA, 23 nt, artificial
  Chemically synthesized
agcuuguagccuuugccucccag

SEQ ID NO: 30012 - RNA, 23 nt, artificial
  Chemically synthesized
gaccugccucuccacuuugacac

SEQ ID NO: 30013 - RNA, 23 nt, artificial
  Chemically synthesized
accugccucuccacuuugacacc

SEQ ID NO: 30014 - RNA, 23 nt, artificial
  Chemically synthesized
ccugccucuccacuuugacaccg

SEQ ID NO: 30015 - RNA, 23 nt, artificial
  Chemically synthesized
cugccucuccacuuugacaccgc

SEQ ID NO: 30016 - RNA, 23 nt, artificial
  Chemically synthesized
ugccucuccacuuugacaccgcc

SEQ ID NO: 30017 - RNA, 23 nt, artificial
  Chemically synthesized
guucuugagcaccucgggaaugg

SEQ ID NO: 30018 - RNA, 23 nt, artificial
  Chemically synthesized
uucuugagcaccucgggaauggg

SEQ ID NO: 30019 - RNA, 23 nt, artificial
  Chemically synthesized
cagcacguuguugacggagaugc

SEQ ID NO: 30020 - RNA, 23 nt, artificial
  Chemically synthesized
agcacguuguugacggagaugcg

SEQ ID NO: 30021 - RNA, 23 nt, artificial
  Chemically synthesized
gcacguuguugacggagaugcgg

SEQ ID NO: 30022 - RNA, 23 nt, artificial
  Chemically synthesized
cacguuguugacggagaugcggg

SEQ ID NO: 30023 - RNA, 23 nt, artificial
  Chemically synthesized
acguuguugacggagaugcgggg

SEQ ID NO: 30024 - RNA, 23 nt, artificial
  Chemically synthesized
cgacaccuugagcguguaguccu

SEQ ID NO: 30025 - RNA, 23 nt, artificial
  Chemically synthesized
gacaccuugagcguguaguccuc

SEQ ID NO: 30026 - RNA, 23 nt, artificial
  Chemically synthesized
uccaacaagguggguuuuguccc

SEQ ID NO: 30027 - RNA, 23 nt, artificial
  Chemically synthesized
ccaacaagguggguuuugucccc

SEQ ID NO: 30028 - RNA, 23 nt, artificial
  Chemically synthesized
caacaagguggguuuuguccccu

SEQ ID NO: 30029 - RNA, 23 nt, artificial
  Chemically synthesized
aacaagguggguuuuguccccuc

SEQ ID NO: 30030 - RNA, 23 nt, artificial
  Chemically synthesized
ggggacagcuuguagccuuugcc

SEQ ID NO: 30031 - RNA, 23 nt, artificial
  Chemically synthesized
gggacagcuuguagccuuugccu

SEQ ID NO: 30032 - RNA, 23 nt, artificial
  Chemically synthesized
gcggauggacgugaacuugugca

SEQ ID NO: 30033 - RNA, 23 nt, artificial
  Chemically synthesized
cggauggacgugaacuugugcag

SEQ ID NO: 30034 - RNA, 23 nt, artificial
  Chemically synthesized
ggauggacgugaacuugugcagc

SEQ ID NO: 30035 - RNA, 23 nt, artificial
  Chemically synthesized
gauggacgugaacuugugcagcg

SEQ ID NO: 30036 - RNA, 23 nt, artificial
  Chemically synthesized
auggacgugaacuugugcagcgg

SEQ ID NO: 30037 - RNA, 23 nt, artificial
  Chemically synthesized
uggcaaucagguccuccacagag

SEQ ID NO: 30038 - RNA, 23 nt, artificial
  Chemically synthesized
ggcaaucagguccuccacagagc

SEQ ID NO: 30039 - RNA, 23 nt, artificial
  Chemically synthesized
gcaaucagguccuccacagagcc

SEQ ID NO: 30040 - RNA, 23 nt, artificial
  Chemically synthesized
caaucagguccuccacagagccc

SEQ ID NO: 30041 - RNA, 23 nt, artificial
  Chemically synthesized
aaucagguccuccacagagcccc

SEQ ID NO: 30042 - RNA, 23 nt, artificial
  Chemically synthesized
gcgauguccagcaguuugcagug

SEQ ID NO: 30043 - RNA, 23 nt, artificial
  Chemically synthesized
cgauguccagcaguuugcagugg

SEQ ID NO: 30044 - RNA, 23 nt, artificial
  Chemically synthesized
cauguacucgcccugaaucagcg

SEQ ID NO: 30045 - RNA, 23 nt, artificial
  Chemically synthesized
auguacucgcccugaaucagcgg

SEQ ID NO: 30046 - RNA, 23 nt, artificial
  Chemically synthesized
gcucugggacucuccucuguuuc

SEQ ID NO: 30047 - RNA, 23 nt, artificial
  Chemically synthesized
cgggugacauucagguaggacag

SEQ ID NO: 30048 - RNA, 23 nt, artificial
  Chemically synthesized
gcuuguagccuuugccucccagc

SEQ ID NO: 30049 - RNA, 23 nt, artificial
  Chemically synthesized
cuuguagccuuugccucccagcu

SEQ ID NO: 30050 - RNA, 23 nt, artificial
  Chemically synthesized
acaagguggguuuuguccccucu

SEQ ID NO: 30051 - RNA, 23 nt, artificial
  Chemically synthesized
guauuuccaugucagcuggggcu

SEQ ID NO: 30052 - RNA, 23 nt, artificial
  Chemically synthesized
uauuuccaugucagcuggggcuc

SEQ ID NO: 30053 - RNA, 23 nt, artificial
  Chemically synthesized
cucuccucuguuucugugcuggc

SEQ ID NO: 30054 - RNA, 23 nt, artificial
  Chemically synthesized
ucuccucuguuucugugcuggcg

SEQ ID NO: 30055 - RNA, 23 nt, artificial
  Chemically synthesized
cuccucuguuucugugcuggcgc

SEQ ID NO: 30056 - RNA, 23 nt, artificial
  Chemically synthesized
uccucuguuucugugcuggcgcg

SEQ ID NO: 30057 - RNA, 23 nt, artificial
  Chemically synthesized
cacuccuuccagcucauccucag

SEQ ID NO: 30058 - RNA, 23 nt, artificial
  Chemically synthesized
acuccuuccagcucauccucagg

SEQ ID NO: 30059 - RNA, 23 nt, artificial
  Chemically synthesized
cuccuuccagcucauccucaggc

SEQ ID NO: 30060 - RNA, 23 nt, artificial
  Chemically synthesized
uccuuccagcucauccucaggcc

SEQ ID NO: 30061 - RNA, 23 nt, artificial
  Chemically synthesized
cagcauuucugaacccagggagg

SEQ ID NO: 30062 - RNA, 23 nt, artificial
  Chemically synthesized
agcauuucugaacccagggaggg

SEQ ID NO: 30063 - RNA, 23 nt, artificial
  Chemically synthesized
gcauuucugaacccagggagggg

SEQ ID NO: 30064 - RNA, 23 nt, artificial
  Chemically synthesized
cauuucugaacccagggagggga

SEQ ID NO: 30065 - RNA, 23 nt, artificial
  Chemically synthesized
auuucugaacccagggaggggaa

SEQ ID NO: 30066 - RNA, 23 nt, artificial
  Chemically synthesized
gggcguccauguaguucuugagc

SEQ ID NO: 30067 - RNA, 23 nt, artificial
  Chemically synthesized
cugugcucuggaucagcucuacc

SEQ ID NO: 30068 - RNA, 23 nt, artificial
  Chemically synthesized
ugugcucuggaucagcucuaccc

SEQ ID NO: 30069 - RNA, 23 nt, artificial
  Chemically synthesized
uguacucgcccugaaucagcggc

SEQ ID NO: 30070 - RNA, 23 nt, artificial
  Chemically synthesized
uggacgugaacuugugcagcggg

SEQ ID NO: 30071 - RNA, 23 nt, artificial
  Chemically synthesized
cugcucugggacucuccucuguu

SEQ ID NO: 30072 - RNA, 23 nt, artificial
  Chemically synthesized
uggcugcgaugaaggugaugccu

SEQ ID NO: 30073 - RNA, 23 nt, artificial
  Chemically synthesized
ggcugcgaugaaggugaugccug

SEQ ID NO: 30074 - RNA, 23 nt, artificial
  Chemically synthesized
gcugcgaugaaggugaugccugg

SEQ ID NO: 30075 - RNA, 23 nt, artificial
  Chemically synthesized
cugcgaugaaggugaugccuggc

SEQ ID NO: 30076 - RNA, 23 nt, artificial
  Chemically synthesized
ugcgaugaaggugaugccuggcu

SEQ ID NO: 30077 - RNA, 23 nt, artificial
  Chemically synthesized
aggcagcauuucugaacccaggg

SEQ ID NO: 30078 - RNA, 23 nt, artificial
  Chemically synthesized
ggcagcauuucugaacccaggga

SEQ ID NO: 30079 - RNA, 23 nt, artificial
  Chemically synthesized
gcagcauuucugaacccagggag

SEQ ID NO: 30080 - RNA, 23 nt, artificial
  Chemically synthesized
caccagcuucugcugcaucaggu

SEQ ID NO: 30081 - RNA, 23 nt, artificial
  Chemically synthesized
ccagcuucugcugcaucagguug

SEQ ID NO: 30082 - RNA, 23 nt, artificial
  Chemically synthesized
cccaaagaccugccucuccacuu

SEQ ID NO: 30083 - RNA, 23 nt, artificial
  Chemically synthesized
cgggacacugaacagguagggug

SEQ ID NO: 30084 - RNA, 23 nt, artificial
  Chemically synthesized
gggacacugaacagguagggugg

SEQ ID NO: 30085 - RNA, 23 nt, artificial
  Chemically synthesized
ggacacugaacagguaggguggc

SEQ ID NO: 30086 - RNA, 23 nt, artificial
  Chemically synthesized
gacacugaacagguaggguggca

SEQ ID NO: 30087 - RNA, 23 nt, artificial
  Chemically synthesized
acacugaacagguaggguggcag

SEQ ID NO: 30088 - RNA, 23 nt, artificial
  Chemically synthesized
cgccugggaguacuuugagacgg

SEQ ID NO: 30089 - RNA, 23 nt, artificial
  Chemically synthesized
gccugggaguacuuugagacggg

SEQ ID NO: 30090 - RNA, 23 nt, artificial
  Chemically synthesized
ccugggaguacuuugagacgggg

SEQ ID NO: 30091 - RNA, 23 nt, artificial
  Chemically synthesized
cugggaguacuuugagacggggc

SEQ ID NO: 30092 - RNA, 23 nt, artificial
  Chemically synthesized
ugggaguacuuugagacggggcc

SEQ ID NO: 30093 - RNA, 23 nt, artificial
  Chemically synthesized
gcugcaucagguugucgaagacg

SEQ ID NO: 30094 - RNA, 23 nt, artificial
  Chemically synthesized
caaaacagcaagucgggcuuggg

SEQ ID NO: 30095 - RNA, 23 nt, artificial
  Chemically synthesized
cagcaguuugcaguggauggagg

SEQ ID NO: 30096 - RNA, 23 nt, artificial
  Chemically synthesized
agcaguuugcaguggauggaggg

SEQ ID NO: 30097 - RNA, 23 nt, artificial
  Chemically synthesized
gcaguuugcaguggauggagggg

SEQ ID NO: 30098 - RNA, 23 nt, artificial
  Chemically synthesized
caguuugcaguggauggagggga

SEQ ID NO: 30099 - RNA, 23 nt, artificial
  Chemically synthesized
aguuugcaguggauggaggggac

SEQ ID NO: 30100 - RNA, 23 nt, artificial
  Chemically synthesized
guguaguagcggccgaugaagac

SEQ ID NO: 30101 - RNA, 23 nt, artificial
  Chemically synthesized
uguaguagcggccgaugaagacg

SEQ ID NO: 30102 - RNA, 23 nt, artificial
  Chemically synthesized
guaguagcggccgaugaagacgu

SEQ ID NO: 30103 - RNA, 23 nt, artificial
  Chemically synthesized
uaguagcggccgaugaagacguc

SEQ ID NO: 30104 - RNA, 23 nt, artificial
  Chemically synthesized
gcgggugacauucagguaggaca

SEQ ID NO: 30105 - RNA, 23 nt, artificial
  Chemically synthesized
gcaagcgauguccagcaguuugc

SEQ ID NO: 30106 - RNA, 23 nt, artificial
  Chemically synthesized
gcuccaacaagguggguuuuguc

SEQ ID NO: 30107 - RNA, 23 nt, artificial
  Chemically synthesized
guccagcaguuugcaguggaugg

SEQ ID NO: 30108 - RNA, 23 nt, artificial
  Chemically synthesized
ccagcaguuugcaguggauggag

SEQ ID NO: 30109 - RNA, 23 nt, artificial
  Chemically synthesized
ccccaaagaccugccucuccacu

SEQ ID NO: 30110 - RNA, 23 nt, artificial
  Chemically synthesized
cucacuccuuccagcucauccuc

SEQ ID NO: 30111 - RNA, 23 nt, artificial
  Chemically synthesized
cgaagacgacugugaagcacugg

SEQ ID NO: 30112 - RNA, 23 nt, artificial
  Chemically synthesized
gaagacgacugugaagcacuggg

SEQ ID NO: 30113 - RNA, 23 nt, artificial
  Chemically synthesized
aagacgacugugaagcacugggg

SEQ ID NO: 30114 - RNA, 23 nt, artificial
  Chemically synthesized
aaaacagcaagucgggcuugggc

SEQ ID NO: 30115 - RNA, 23 nt, artificial
  Chemically synthesized
guccaccagcuucugcugcauca

SEQ ID NO: 30116 - RNA, 23 nt, artificial
  Chemically synthesized
uccaccagcuucugcugcaucag

SEQ ID NO: 30117 - RNA, 23 nt, artificial
  Chemically synthesized
ccaccagcuucugcugcaucagg

SEQ ID NO: 30118 - RNA, 23 nt, artificial
  Chemically synthesized
gggacucuccucuguuucugugc

SEQ ID NO: 30119 - RNA, 23 nt, artificial
  Chemically synthesized
ugcgacaccuugagcguguaguc

SEQ ID NO: 30120 - RNA, 23 nt, artificial
  Chemically synthesized
gcgacaccuugagcguguagucc

SEQ ID NO: 30121 - RNA, 23 nt, artificial
  Chemically synthesized
ggggaaaaccacagaacaaaaca

SEQ ID NO: 30122 - RNA, 23 nt, artificial
  Chemically synthesized
caguguaguagcggccgaugaag

SEQ ID NO: 30123 - RNA, 23 nt, artificial
  Chemically synthesized
cagauggagagacagacaggcag

SEQ ID NO: 30124 - RNA, 23 nt, artificial
  Chemically synthesized
agauggagagacagacaggcagg

SEQ ID NO: 30125 - RNA, 23 nt, artificial
  Chemically synthesized
gauggagagacagacaggcaggc

SEQ ID NO: 30126 - RNA, 23 nt, artificial
  Chemically synthesized
auggagagacagacaggcaggca

SEQ ID NO: 30127 - RNA, 23 nt, artificial
  Chemically synthesized
ccacccuguuguugucacgguca

SEQ ID NO: 30128 - RNA, 23 nt, artificial
  Chemically synthesized
ugccucccagcuucagugugauc

SEQ ID NO: 30129 - RNA, 23 nt, artificial
  Chemically synthesized
gccucccagcuucagugugaucg

SEQ ID NO: 30130 - RNA, 23 nt, artificial
  Chemically synthesized
ccucccagcuucagugugaucgc

SEQ ID NO: 30131 - RNA, 23 nt, artificial
  Chemically synthesized
cucccagcuucagugugaucgcg

SEQ ID NO: 30132 - RNA, 23 nt, artificial
  Chemically synthesized
ucccagcuucagugugaucgcgg

SEQ ID NO: 30133 - RNA, 23 nt, artificial
  Chemically synthesized
ucacguaggugcuggacuugucg

SEQ ID NO: 30134 - RNA, 23 nt, artificial
  Chemically synthesized
ggcgaagcccacccuguuguugu

SEQ ID NO: 30135 - RNA, 23 nt, artificial
  Chemically synthesized
gcgaagcccacccuguuguuguc

SEQ ID NO: 30136 - RNA, 23 nt, artificial
  Chemically synthesized
cgaagcccacccuguuguuguca

SEQ ID NO: 30137 - RNA, 23 nt, artificial
  Chemically synthesized
gaagcccacccuguuguugucac

SEQ ID NO: 30138 - RNA, 23 nt, artificial
  Chemically synthesized
aagcccacccuguuguugucacg

SEQ ID NO: 30139 - RNA, 23 nt, artificial
  Chemically synthesized
ggggaucauguacucgcccugaa

SEQ ID NO: 30140 - RNA, 23 nt, artificial
  Chemically synthesized
ggggucuuccaaugcacgaaaca

SEQ ID NO: 30141 - RNA, 23 nt, artificial
  Chemically synthesized
caggcagcauuucugaacccagg

SEQ ID NO: 30142 - RNA, 23 nt, artificial
  Chemically synthesized
ggacaacagaggucagcugcaga

SEQ ID NO: 30143 - RNA, 23 nt, artificial
  Chemically synthesized
gacaacagaggucagcugcagag

SEQ ID NO: 30144 - RNA, 23 nt, artificial
  Chemically synthesized
acaacagaggucagcugcagagg

SEQ ID NO: 30145 - RNA, 23 nt, artificial
  Chemically synthesized
caacagaggucagcugcagagga

SEQ ID NO: 30146 - RNA, 23 nt, artificial
  Chemically synthesized
guggauccagcaagcgaugucca

SEQ ID NO: 30147 - RNA, 23 nt, artificial
  Chemically synthesized
uggauccagcaagcgauguccag

SEQ ID NO: 30148 - RNA, 23 nt, artificial
  Chemically synthesized
ggauccagcaagcgauguccagc

SEQ ID NO: 30149 - RNA, 23 nt, artificial
  Chemically synthesized
gauccagcaagcgauguccagca

SEQ ID NO: 30150 - RNA, 23 nt, artificial
  Chemically synthesized
auccagcaagcgauguccagcag

SEQ ID NO: 30151 - RNA, 23 nt, artificial
  Chemically synthesized
cagacaggcaggcagcauuucug

SEQ ID NO: 30152 - RNA, 23 nt, artificial
  Chemically synthesized
gugcucuggaucagcucuacccc

SEQ ID NO: 30153 - RNA, 23 nt, artificial
  Chemically synthesized
ugcucuggaucagcucuaccccc

SEQ ID NO: 30154 - RNA, 23 nt, artificial
  Chemically synthesized
cacguaggugcuggacuugucgc

SEQ ID NO: 30155 - RNA, 23 nt, artificial
  Chemically synthesized
acguaggugcuggacuugucgcu

SEQ ID NO: 30156 - RNA, 23 nt, artificial
  Chemically synthesized
gacgugaacuugugcagcgggau

SEQ ID NO: 30157 - RNA, 23 nt, artificial
  Chemically synthesized
acgugaacuugugcagcgggauc

SEQ ID NO: 30158 - RNA, 23 nt, artificial
  Chemically synthesized
cgugaacuugugcagcgggaucc

SEQ ID NO: 30159 - RNA, 23 nt, artificial
  Chemically synthesized
gugaacuugugcagcgggauccu

SEQ ID NO: 30160 - RNA, 23 nt, artificial
  Chemically synthesized
ugaacuugugcagcgggauccug

SEQ ID NO: 30161 - RNA, 23 nt, artificial
  Chemically synthesized
ugcgggugacauucagguaggac

SEQ ID NO: 30162 - RNA, 23 nt, artificial
  Chemically synthesized
gugguggauccagcaagcgaugu

SEQ ID NO: 30163 - RNA, 23 nt, artificial
  Chemically synthesized
ugguggauccagcaagcgauguc

SEQ ID NO: 30164 - RNA, 23 nt, artificial
  Chemically synthesized
gguggauccagcaagcgaugucc

SEQ ID NO: 30165 - RNA, 23 nt, artificial
  Chemically synthesized
ggugcuggacuugucgcuguugu

SEQ ID NO: 30166 - RNA, 23 nt, artificial
  Chemically synthesized
ggggaggacaacagaggucagcu

SEQ ID NO: 30167 - RNA, 23 nt, artificial
  Chemically synthesized
gggaggacaacagaggucagcug

SEQ ID NO: 30168 - RNA, 23 nt, artificial
  Chemically synthesized
ggaggacaacagaggucagcugc

SEQ ID NO: 30169 - RNA, 23 nt, artificial
  Chemically synthesized
gaggacaacagaggucagcugca

SEQ ID NO: 30170 - RNA, 23 nt, artificial
  Chemically synthesized
aggacaacagaggucagcugcag

SEQ ID NO: 30171 - RNA, 23 nt, artificial
  Chemically synthesized
gcaggcagcauuucugaacccag

SEQ ID NO: 30172 - RNA, 23 nt, artificial
  Chemically synthesized
cugcgacaccuugagcguguagu

SEQ ID NO: 30173 - RNA, 23 nt, artificial
  Chemically synthesized
ucuugagcaccucgggaaugggc

SEQ ID NO: 30174 - RNA, 23 nt, artificial
  Chemically synthesized
gcccacccuguuguugucacggu

SEQ ID NO: 30175 - RNA, 23 nt, artificial
  Chemically synthesized
cccacccuguuguugucacgguc

SEQ ID NO: 30176 - RNA, 23 nt, artificial
  Chemically synthesized
ggcggauggacgugaacuugugc

SEQ ID NO: 30177 - RNA, 23 nt, artificial
  Chemically synthesized
cccgugucgaagacgacugugaa

SEQ ID NO: 30178 - RNA, 23 nt, artificial
  Chemically synthesized
ccgugucgaagacgacugugaag

SEQ ID NO: 30179 - RNA, 23 nt, artificial
  Chemically synthesized
aaacagcaagucgggcuugggcc

SEQ ID NO: 30180 - RNA, 23 nt, artificial
  Chemically synthesized
uggggacagcuuguagccuuugc

SEQ ID NO: 30181 - RNA, 23 nt, artificial
  Chemically synthesized
gggcagcacguuguugacggaga

SEQ ID NO: 30182 - RNA, 23 nt, artificial
  Chemically synthesized
ggcagcacguuguugacggagau

SEQ ID NO: 30183 - RNA, 23 nt, artificial
  Chemically synthesized
gcagcacguuguugacggagaug

SEQ ID NO: 30184 - RNA, 23 nt, artificial
  Chemically synthesized
gucccugcucagguagaaggaga

SEQ ID NO: 30185 - RNA, 23 nt, artificial
  Chemically synthesized
cccugcucagguagaaggagaag

SEQ ID NO: 30186 - RNA, 23 nt, artificial
  Chemically synthesized
ccgccugggaguacuuugagacg

SEQ ID NO: 30187 - RNA, 23 nt, artificial
  Chemically synthesized
aggugcuggacuugucgcuguug

SEQ ID NO: 30188 - RNA, 23 nt, artificial
  Chemically synthesized
gcccgugucgaagacgacuguga

SEQ ID NO: 30189 - RNA, 23 nt, artificial
  Chemically synthesized
ccccaccaaacagauggagagac

SEQ ID NO: 30190 - RNA, 23 nt, artificial
  Chemically synthesized
gacagacaggcaggcagcauuuc

SEQ ID NO: 30191 - RNA, 23 nt, artificial
  Chemically synthesized
caggcaggcagcauuucugaacc

SEQ ID NO: 30192 - RNA, 23 nt, artificial
  Chemically synthesized
aggcaggcagcauuucugaaccc

SEQ ID NO: 30193 - RNA, 23 nt, artificial
  Chemically synthesized
ggcaggcagcauuucugaaccca

SEQ ID NO: 30194 - RNA, 23 nt, artificial
  Chemically synthesized
ccggcggauggacgugaacuugu

SEQ ID NO: 30195 - RNA, 23 nt, artificial
  Chemically synthesized
cggcggauggacgugaacuugug

SEQ ID NO: 30196 - RNA, 23 nt, artificial
  Chemically synthesized
agacgacugugaagcacuggggg

SEQ ID NO: 30197 - RNA, 23 nt, artificial
  Chemically synthesized
accgccugggaguacuuugagac

SEQ ID NO: 30198 - RNA, 23 nt, artificial
  Chemically synthesized
aggggaucauguacucgcccuga

SEQ ID NO: 30199 - RNA, 23 nt, artificial
  Chemically synthesized
gcgggauguccaugcccaugaag

SEQ ID NO: 30200 - RNA, 23 nt, artificial
  Chemically synthesized
aggggaaaaccacagaacaaaac

SEQ ID NO: 30201 - RNA, 23 nt, artificial
  Chemically synthesized
ggaggggaaaaccacagaacaaa

SEQ ID NO: 30202 - RNA, 23 nt, artificial
  Chemically synthesized
gaggggaaaaccacagaacaaaa

SEQ ID NO: 30203 - RNA, 23 nt, artificial
  Chemically synthesized
cuggggacagcuuguagccuuug

SEQ ID NO: 30204 - RNA, 23 nt, artificial
  Chemically synthesized
uggggucuuccaaugcacgaaac

SEQ ID NO: 30205 - RNA, 23 nt, artificial
  Chemically synthesized
gcaggcuccaacaagguggguuu

SEQ ID NO: 30206 - RNA, 23 nt, artificial
  Chemically synthesized
caggcuccaacaagguggguuuu

SEQ ID NO: 30207 - RNA, 23 nt, artificial
  Chemically synthesized
ucuggggacagcuuguagccuuu

SEQ ID NO: 30208 - RNA, 23 nt, artificial
  Chemically synthesized
ccagcaagcgauguccagcaguu

SEQ ID NO: 30209 - RNA, 23 nt, artificial
  Chemically synthesized
guggggucuuccaaugcacgaaa

SEQ ID NO: 30210 - RNA, 23 nt, artificial
  Chemically synthesized
ccgggacacugaacagguagggu

SEQ ID NO: 30211 - RNA, 23 nt, artificial
  Chemically synthesized
acccccaccaaacagauggagag

SEQ ID NO: 30212 - RNA, 23 nt, artificial
  Chemically synthesized
cccccaccaaacagauggagaga

SEQ ID NO: 30213 - RNA, 23 nt, artificial
  Chemically synthesized
gguggggucuuccaaugcacgaa

SEQ ID NO: 30214 - RNA, 23 nt, artificial
  Chemically synthesized
uacccccaccaaacagauggaga

SEQ ID NO: 30215 - RNA, 23 nt, artificial
  Chemically synthesized
caccgccugggaguacuuugaga

SEQ ID NO: 30216 - RNA, 23 nt, Artificial
  Chemically synthesized
ggcgggauguccaugcccaugaa

SEQ ID NO: 30217 - RNA, 19 nt, artificial
  Chemically synthesized
cugugaagauaguuauaaa

SEQ ID NO: 30218 - RNA, 19 nt, artificial
  Chemically synthesized
caaacuucaucaagaguaa

SEQ ID NO: 30219 - RNA, 19 nt, artificial
  Chemically synthesized
gacacuaagucaaguuaaa

SEQ ID NO: 30220 - RNA, 19 nt, artificial
  Chemically synthesized
gauuaaagaucucaaaaaa

SEQ ID NO: 30221 - RNA, 19 nt, artificial
  Chemically synthesized
gguaaaaguacguaauuaa

SEQ ID NO: 30222 - RNA, 19 nt, artificial
  Chemically synthesized
caaggauguuuaaaaucua

SEQ ID NO: 30223 - RNA, 19 nt, artificial
  Chemically synthesized
gaaauaucaccaaaaaaua

SEQ ID NO: 30224 - RNA, 19 nt, artificial
  Chemically synthesized
guaaaaguacguaauuaaa

SEQ ID NO: 30225 - RNA, 19 nt, artificial
  Chemically synthesized
cugagaagaucauauuuau

SEQ ID NO: 30226 - RNA, 19 nt, artificial
  Chemically synthesized
uggaaauaucaccaaaaaa

SEQ ID NO: 30227 - RNA, 19 nt, artificial
  Chemically synthesized
caaagaugauaaaauagau

SEQ ID NO: 30228 - RNA, 19 nt, artificial
  Chemically synthesized
ucaacuucauggaaagaaa

SEQ ID NO: 30229 - RNA, 19 nt, artificial
  Chemically synthesized
caugcuaaguacccaaaua

SEQ ID NO: 30230 - RNA, 19 nt, artificial
  Chemically synthesized
aaagaauggugucaaugaa

SEQ ID NO: 30231 - RNA, 19 nt, artificial
  Chemically synthesized
auggaaauaucaccaaaaa

SEQ ID NO: 30232 - RNA, 19 nt, artificial
  Chemically synthesized
ccaaguuucuaagauuuaa

SEQ ID NO: 30233 - RNA, 19 nt, artificial
  Chemically synthesized
acguuuaaauaucuuugaa

SEQ ID NO: 30234 - RNA, 19 nt, artificial
  Chemically synthesized
auuugagugcagaauuuaa

SEQ ID NO: 30235 - RNA, 19 nt, artificial
  Chemically synthesized
gcagaggaugaaagauuaa

SEQ ID NO: 30236 - RNA, 19 nt, artificial
  Chemically synthesized
guuuauuggugucauauua

SEQ ID NO: 30237 - RNA, 19 nt, artificial
  Chemically synthesized
gaaaauucaaacuucagaa

SEQ ID NO: 30238 - RNA, 19 nt, artificial
  Chemically synthesized
gaggaagacuguuacuaca

SEQ ID NO: 30239 - RNA, 19 nt, artificial
  Chemically synthesized
cguuuaaauaucuuugaaa

SEQ ID NO: 30240 - RNA, 19 nt, artificial
  Chemically synthesized
gagugcagaauuuaaauaa

SEQ ID NO: 30241 - RNA, 19 nt, artificial
  Chemically synthesized
ggacauuacuagugacuca

SEQ ID NO: 30242 - RNA, 19 nt, artificial
  Chemically synthesized
gcaagacugcccuuagaaa

SEQ ID NO: 30243 - RNA, 19 nt, artificial
  Chemically synthesized
caccaaaaaauacuuaaua

SEQ ID NO: 30244 - RNA, 19 nt, artificial
  Chemically synthesized
cauugauuaaagaucucaa

SEQ ID NO: 30245 - RNA, 19 nt, artificial
  Chemically synthesized
cccacucuaugaaucaaua

SEQ ID NO: 30246 - RNA, 19 nt, artificial
  Chemically synthesized
acaguuuauuggugucaua

SEQ ID NO: 30247 - RNA, 19 nt, artificial
  Chemically synthesized
gaggauugcucaacaacca

SEQ ID NO: 30248 - RNA, 19 nt, artificial
  Chemically synthesized
ggaaauaucaccaaaaaau

SEQ ID NO: 30249 - RNA, 19 nt, artificial
  Chemically synthesized
agaagaucauauuuaugua

SEQ ID NO: 30250 - RNA, 19 nt, artificial
  Chemically synthesized
ccacuuugccucuaaauua

SEQ ID NO: 30251 - RNA, 19 nt, artificial
  Chemically synthesized
aggaauugcucuugucaua

SEQ ID NO: 30252 - RNA, 19 nt, artificial
  Chemically synthesized
cgaaaauguucaauaaugu

SEQ ID NO: 30253 - RNA, 19 nt, artificial
  Chemically synthesized
ggugucauauuauacaaua

SEQ ID NO: 30254 - RNA, 19 nt, artificial
  Chemically synthesized
gauacuaacugcucucaga

SEQ ID NO: 30255 - RNA, 19 nt, artificial
  Chemically synthesized
cuuugaaaguuuguauuaa

SEQ ID NO: 30256 - RNA, 19 nt, artificial
  Chemically synthesized
gaagauaguuauaaacuga

SEQ ID NO: 30257 - RNA, 19 nt, artificial
  Chemically synthesized
aaauagaugagaucaagaa

SEQ ID NO: 30258 - RNA, 19 nt, artificial
  Chemically synthesized
ucagaaaauucaaacuuca

SEQ ID NO: 30259 - RNA, 19 nt, artificial
  Chemically synthesized
ugacugacaucaacuccaa

SEQ ID NO: 30260 - RNA, 19 nt, artificial
  Chemically synthesized
gguacauuuuaucauuuau

SEQ ID NO: 30261 - RNA, 19 nt, artificial
  Chemically synthesized
ggguacauuuuaucauuua

SEQ ID NO: 30262 - RNA, 19 nt, artificial
  Chemically synthesized
ugcaauuaguguuugaaaa

SEQ ID NO: 30263 - RNA, 19 nt, artificial
  Chemically synthesized
gcuaaguacccaaauagga

SEQ ID NO: 30264 - RNA, 19 nt, artificial
  Chemically synthesized
ugcaaucaaagaugauaaa

SEQ ID NO: 30265 - RNA, 19 nt, artificial
  Chemically synthesized
aguguauguuaguacaaau

SEQ ID NO: 30266 - RNA, 19 nt, artificial
  Chemically synthesized
cuaaauuaccucugauaau

SEQ ID NO: 30267 - RNA, 19 nt, artificial
  Chemically synthesized
gugucauauuauacaauau

SEQ ID NO: 30268 - RNA, 19 nt, artificial
  Chemically synthesized
uuugagugcagaauuuaaa

SEQ ID NO: 30269 - RNA, 19 nt, artificial
  Chemically synthesized
ccaaguugcugaaucaaug

SEQ ID NO: 30270 - RNA, 19 nt, artificial
  Chemically synthesized
aaaacaaacuucaucaaga

SEQ ID NO: 30271 - RNA, 19 nt, artificial
  Chemically synthesized
cuaugaaucaauagaagaa

SEQ ID NO: 30272 - RNA, 19 nt, artificial
  Chemically synthesized
gagugaaaaacaacaaauu

SEQ ID NO: 30273 - RNA, 19 nt, artificial
  Chemically synthesized
ugcagaggaugaaagauua

SEQ ID NO: 30274 - RNA, 19 nt, artificial
  Chemically synthesized
ugugaauucacauagaaaa

SEQ ID NO: 30275 - RNA, 19 nt, artificial
  Chemically synthesized
guuugaaaagauucuuaau

SEQ ID NO: 30276 - RNA, 19 nt, artificial
  Chemically synthesized
aaauaaggcucuaccucaa

SEQ ID NO: 30277 - RNA, 19 nt, artificial
  Chemically synthesized
uagagugaaaaacaacaaa

SEQ ID NO: 30278 - RNA, 19 nt, artificial
  Chemically synthesized
ucacauagaaaacauuaaa

SEQ ID NO: 30279 - RNA, 19 nt, artificial
  Chemically synthesized
ugauuaaagaucucaaaaa

SEQ ID NO: 30280 - RNA, 19 nt, artificial
  Chemically synthesized
gaugaaagauuaagauuau

SEQ ID NO: 30281 - RNA, 19 nt, artificial
  Chemically synthesized
gcuaugaccuuuugcugaa

SEQ ID NO: 30282 - RNA, 19 nt, artificial
  Chemically synthesized
gaaagaaagaagcguauga

SEQ ID NO: 30283 - RNA, 19 nt, artificial
  Chemically synthesized
gaagaucauauuuauguaa

SEQ ID NO: 30284 - RNA, 19 nt, artificial
  Chemically synthesized
aauaaugucccauguaaaa

SEQ ID NO: 30285 - RNA, 19 nt, artificial
  Chemically synthesized
ugaaauaucaguuacugaa

SEQ ID NO: 30286 - RNA, 19 nt, artificial
  Chemically synthesized
ggauuggaauugaggaaga

SEQ ID NO: 30287 - RNA, 19 nt, artificial
  Chemically synthesized
caaacuucagaaaugaaau

SEQ ID NO: 30288 - RNA, 19 nt, artificial
  Chemically synthesized
gaaagaauggugucaauga

SEQ ID NO: 30289 - RNA, 19 nt, artificial
  Chemically synthesized
uguuugaaaagauucuuaa

SEQ ID NO: 30290 - RNA, 19 nt, artificial
  Chemically synthesized
caaucaaagaugauaaaau

SEQ ID NO: 30291 - RNA, 19 nt, artificial
  Chemically synthesized
caaaauagaugagaucaag

SEQ ID NO: 30292 - RNA, 19 nt, artificial
  Chemically synthesized
aguuuguauuaaaugugaa

SEQ ID NO: 30293 - RNA, 19 nt, artificial
  Chemically synthesized
gcuggagucaugacacuaa

SEQ ID NO: 30294 - RNA, 19 nt, artificial
  Chemically synthesized
ccauauuucuaaacuuugu

SEQ ID NO: 30295 - RNA, 19 nt, artificial
  Chemically synthesized
uagaugagaucaagaauga

SEQ ID NO: 30296 - RNA, 19 nt, artificial
  Chemically synthesized
aacugugaagauaguuaua

SEQ ID NO: 30297 - RNA, 19 nt, artificial
  Chemically synthesized
gaauuuaaauaaggcucua

SEQ ID NO: 30298 - RNA, 19 nt, artificial
  Chemically synthesized
aauugugaauucacauaga

SEQ ID NO: 30299 - RNA, 19 nt, artificial
  Chemically synthesized
guacguaauuaaauaaugu

SEQ ID NO: 30300 - RNA, 19 nt, artificial
  Chemically synthesized
uguaaauguaaacugugaa

SEQ ID NO: 30301 - RNA, 19 nt, artificial
  Chemically synthesized
guauuugagugcagaauuu

SEQ ID NO: 30302 - RNA, 19 nt, artificial
  Chemically synthesized
ggcaucaacuucauggaaa

SEQ ID NO: 30303 - RNA, 19 nt, artificial
  Chemically synthesized
caacauauuuguagauuuu

SEQ ID NO: 30304 - RNA, 19 nt, artificial
  Chemically synthesized
agguaaaaguacguaauua

SEQ ID NO: 30305 - RNA, 19 nt, artificial
  Chemically synthesized
guuauaaacugaagcagau

SEQ ID NO: 30306 - RNA, 19 nt, artificial
  Chemically synthesized
aaaauagaugagaucaaga

SEQ ID NO: 30307 - RNA, 19 nt, artificial
  Chemically synthesized
augcaauuaguguuugaaa

SEQ ID NO: 30308 - RNA, 19 nt, artificial
  Chemically synthesized
uugugaauucacauagaaa

SEQ ID NO: 30309 - RNA, 19 nt, artificial
  Chemically synthesized
ucuguaguaugaauguaau

SEQ ID NO: 30310 - RNA, 19 nt, artificial
  Chemically synthesized
uuauuggugucauauuaua

SEQ ID NO: 30311 - RNA, 19 nt, artificial
  Chemically synthesized
uuggugucauauuauacaa

SEQ ID NO: 30312 - RNA, 19 nt, artificial
  Chemically synthesized
guaaauauaucaccacuau

SEQ ID NO: 30313 - RNA, 19 nt, artificial
  Chemically synthesized
ucgaaagaauggugucaau

SEQ ID NO: 30314 - RNA, 19 nt, artificial
  Chemically synthesized
uugagugcagaauuuaaau

SEQ ID NO: 30315 - RNA, 19 nt, artificial
  Chemically synthesized
aauagaugagaucaagaau

SEQ ID NO: 30316 - RNA, 19 nt, artificial
  Chemically synthesized
aauacugcuugguuuuuua

SEQ ID NO: 30317 - RNA, 19 nt, artificial
  Chemically synthesized
auugauuaaagaucucaaa

SEQ ID NO: 30318 - RNA, 19 nt, artificial
  Chemically synthesized
ccaaaaaauacuuaauagu

SEQ ID NO: 30319 - RNA, 19 nt, artificial
  Chemically synthesized
ggauguuuaaaaucuaguu

SEQ ID NO: 30320 - RNA, 19 nt, artificial
  Chemically synthesized
guagauuuuuaauaucuca

SEQ ID NO: 30321 - RNA, 19 nt, artificial
  Chemically synthesized
acucuaugaaucaauagaa

SEQ ID NO: 30322 - RNA, 19 nt, artificial
  Chemically synthesized
ggaugaaagauuaagauua

SEQ ID NO: 30323 - RNA, 19 nt, artificial
  Chemically synthesized
ccaagugacugacaucaac

SEQ ID NO: 30324 - RNA, 19 nt, artificial
  Chemically synthesized
ucuaaauuaccucugauaa

SEQ ID NO: 30325 - RNA, 19 nt, artificial
  Chemically synthesized
ggaaccaccuaaagaacuu

SEQ ID NO: 30326 - RNA, 19 nt, artificial
  Chemically synthesized
aaagcuuggucuagaguga

SEQ ID NO: 30327 - RNA, 19 nt, artificial
  Chemically synthesized
gauuuuaccauauuucuaa

SEQ ID NO: 30328 - RNA, 19 nt, artificial
  Chemically synthesized
ggaagcgguuuacgaguga

SEQ ID NO: 30329 - RNA, 19 nt, artificial
  Chemically synthesized
uauacauagcaaugguaaa

SEQ ID NO: 30330 - RNA, 19 nt, artificial
  Chemically synthesized
aaauguaaacugugaagau

SEQ ID NO: 30331 - RNA, 19 nt, artificial
  Chemically synthesized
aaacuucaucaagaguaaa

SEQ ID NO: 30332 - RNA, 19 nt, artificial
  Chemically synthesized
ucaccaaaaaauacuuaau

SEQ ID NO: 30333 - RNA, 19 nt, artificial
  Chemically synthesized
aaaaauacuuaauagucca

SEQ ID NO: 30334 - RNA, 19 nt, artificial
  Chemically synthesized
agugcagaauuuaaauaag

SEQ ID NO: 30335 - RNA, 19 nt, artificial
  Chemically synthesized
agaaaauucaaacuucaga

SEQ ID NO: 30336 - RNA, 19 nt, artificial
  Chemically synthesized
ucaauaaugucccauguaa

SEQ ID NO: 30337 - RNA, 19 nt, artificial
  Chemically synthesized
uauagguaaaaguacguaa

SEQ ID NO: 30338 - RNA, 19 nt, artificial
  Chemically synthesized
auaugauucuguaguauga

SEQ ID NO: 30339 - RNA, 19 nt, artificial
  Chemically synthesized
ggaauuauaaaauauaggu

SEQ ID NO: 30340 - RNA, 19 nt, artificial
  Chemically synthesized
gaauucacauagaaaacau

SEQ ID NO: 30341 - RNA, 19 nt, artificial
  Chemically synthesized
gaauguaaucaguguaugu

SEQ ID NO: 30342 - RNA, 19 nt, artificial
  Chemically synthesized
agauuuuaccauauuucua

SEQ ID NO: 30343 - RNA, 19 nt, artificial
  Chemically synthesized
gugaaaaacaacaaauuca

SEQ ID NO: 30344 - RNA, 19 nt, artificial
  Chemically synthesized
uucagaaaugaaauccaaa

SEQ ID NO: 30345 - RNA, 19 nt, artificial
  Chemically synthesized
caauuaguguuugaaaaga

SEQ ID NO: 30346 - RNA, 19 nt, artificial
  Chemically synthesized
gaaaguuuguauuaaaugu

SEQ ID NO: 30347 - RNA, 19 nt, artificial
  Chemically synthesized
acaauauuucaauugugaa

SEQ ID NO: 30348 - RNA, 19 nt, artificial
  Chemically synthesized
uggaaggccugcaucauga

SEQ ID NO: 30349 - RNA, 19 nt, artificial
  Chemically synthesized
auugugaauucacauagaa

SEQ ID NO: 30350 - RNA, 19 nt, artificial
  Chemically synthesized
aagauaguuauaaacugaa

SEQ ID NO: 30351 - RNA, 19 nt, artificial
  Chemically synthesized
agaucauauuuauguaaag

SEQ ID NO: 30352 - RNA, 19 nt, artificial
  Chemically synthesized
gcaaucaaagaugauaaaa

SEQ ID NO: 30353 - RNA, 19 nt, artificial
  Chemically synthesized
aaacaaacuucaucaagag

SEQ ID NO: 30354 - RNA, 19 nt, artificial
  Chemically synthesized
caagacugcccuuagaaau

SEQ ID NO: 30355 - RNA, 19 nt, artificial
  Chemically synthesized
aacauaugauucuguagua

SEQ ID NO: 30356 - RNA, 19 nt, artificial
  Chemically synthesized
guguuugaaaagauucuua

SEQ ID NO: 30357 - RNA, 19 nt, artificial
  Chemically synthesized
uugcaaucaaagaugauaa

SEQ ID NO: 30358 - RNA, 19 nt, artificial
  Chemically synthesized
auagguaaaaguacguaau

SEQ ID NO: 30359 - RNA, 19 nt, artificial
  Chemically synthesized
ccaacauauuuguagauuu

SEQ ID NO: 30360 - RNA, 19 nt, artificial
  Chemically synthesized
cacauagaaaacauuaaau

SEQ ID NO: 30361 - RNA, 19 nt, artificial
  Chemically synthesized
cuauccuacguuuaaauau

SEQ ID NO: 30362 - RNA, 19 nt, artificial
  Chemically synthesized
aguuuauuggugucauauu

SEQ ID NO: 30363 - RNA, 19 nt, artificial
  Chemically synthesized
gaaaugaaauccaaagcuu

SEQ ID NO: 30364 - RNA, 19 nt, artificial
  Chemically synthesized
uucuguaguaugaauguaa

SEQ ID NO: 30365 - RNA, 19 nt, artificial
  Chemically synthesized
agagugaaaaacaacaaau

SEQ ID NO: 30366 - RNA, 19 nt, artificial
  Chemically synthesized
auguuaguacaaaugucua

SEQ ID NO: 30367 - RNA, 19 nt, artificial
  Chemically synthesized
aaguuuguauuaaauguga

SEQ ID NO: 30368 - RNA, 19 nt, artificial
  Chemically synthesized
gauuuuuaauaucucauga

SEQ ID NO: 30369 - RNA, 19 nt, artificial
  Chemically synthesized
ccgaaaauguucaauaaug

SEQ ID NO: 30370 - RNA, 19 nt, artificial
  Chemically synthesized
caacaaauucaguucugag

SEQ ID NO: 30371 - RNA, 19 nt, artificial
  Chemically synthesized
guguuuggaauuauaaaau

SEQ ID NO: 30372 - RNA, 19 nt, artificial
  Chemically synthesized
aaaucaucaucuggauuua

SEQ ID NO: 30373 - RNA, 19 nt, artificial
  Chemically synthesized
cuaaagaacuuccauuuau

SEQ ID NO: 30374 - RNA, 19 nt, artificial
  Chemically synthesized
ucaaacuucagaaaugaaa

SEQ ID NO: 30375 - RNA, 19 nt, artificial
  Chemically synthesized
auguaaucaguguauguua

SEQ ID NO: 30376 - RNA, 19 nt, artificial
  Chemically synthesized
uguugacuugaguaaauau

SEQ ID NO: 30377 - RNA, 19 nt, artificial
  Chemically synthesized
uucacauagaaaacauuaa

SEQ ID NO: 30378 - RNA, 19 nt, artificial
  Chemically synthesized
aaguuucuaagauuuaaga

SEQ ID NO: 30379 - RNA, 19 nt, artificial
  Chemically synthesized
gaaaaacaacaaauucagu

SEQ ID NO: 30380 - RNA, 19 nt, artificial
  Chemically synthesized
agaaaauucagacuaucau

SEQ ID NO: 30381 - RNA, 19 nt, artificial
  Chemically synthesized
uagguaaaaguacguaauu

SEQ ID NO: 30382 - RNA, 19 nt, artificial
  Chemically synthesized
aauguaaacugugaagaua

SEQ ID NO: 30383 - RNA, 19 nt, artificial
  Chemically synthesized
aucaccaaaaaauacuuaa

SEQ ID NO: 30384 - RNA, 19 nt, artificial
  Chemically synthesized
caauauuucaauugugaau

SEQ ID NO: 30385 - RNA, 19 nt, artificial
  Chemically synthesized
guuugacuauuauauaugu

SEQ ID NO: 30386 - RNA, 19 nt, artificial
  Chemically synthesized
ugagugcagaauuuaaaua

SEQ ID NO: 30387 - RNA, 19 nt, artificial
  Chemically synthesized
uaccucugauaauucuaga

SEQ ID NO: 30388 - RNA, 19 nt, artificial
  Chemically synthesized
aauuaguguuugaaaagau

SEQ ID NO: 30389 - RNA, 19 nt, artificial
  Chemically synthesized
guuuguauuaaaugugaau

SEQ ID NO: 30390 - RNA, 19 nt, artificial
  Chemically synthesized
uacguuuaaauaucuuuga

SEQ ID NO: 30391 - RNA, 19 nt, artificial
  Chemically synthesized
gaugagaucaagaaugaca

SEQ ID NO: 30392 - RNA, 19 nt, artificial
  Chemically synthesized
guugacuugaguaaauaua

SEQ ID NO: 30393 - RNA, 19 nt, artificial
  Chemically synthesized
uucaaacuucagaaaugaa

SEQ ID NO: 30394 - RNA, 19 nt, artificial
  Chemically synthesized
cauuuauggaggauuuuuu

SEQ ID NO: 30395 - RNA, 19 nt, artificial
  Chemically synthesized
cuagauuaucguccaaaag

SEQ ID NO: 30396 - RNA, 19 nt, artificial
  Chemically synthesized
aaaauucaaacuucagaaa

SEQ ID NO: 30397 - RNA, 19 nt, artificial
  Chemically synthesized
caacuucauggaaagaaag

SEQ ID NO: 30398 - RNA, 19 nt, artificial
  Chemically synthesized
cauccucaaggacauuacu

SEQ ID NO: 30399 - RNA, 19 nt, artificial
  Chemically synthesized
uguuaguacaaaugucuau

SEQ ID NO: 30400 - RNA, 19 nt, artificial
  Chemically synthesized
aaacugugaagauaguuau

SEQ ID NO: 30401 - RNA, 19 nt, artificial
  Chemically synthesized
gagauuuuaccauauuucu

SEQ ID NO: 30402 - RNA, 19 nt, artificial
  Chemically synthesized
uuucaauugugaauucaca

SEQ ID NO: 30403 - RNA, 19 nt, artificial
  Chemically synthesized
aguaaauauaucaccacua

SEQ ID NO: 30404 - RNA, 19 nt, artificial
  Chemically synthesized
gacuugaguaaauauauca

SEQ ID NO: 30405 - RNA, 19 nt, artificial
  Chemically synthesized
uagcuuugugacaugucau

SEQ ID NO: 30406 - RNA, 19 nt, artificial
  Chemically synthesized
gaucaagaaugacaauguc

SEQ ID NO: 30407 - RNA, 19 nt, artificial
  Chemically synthesized
cucuugcagagaaaauuca

SEQ ID NO: 30408 - RNA, 19 nt, artificial
  Chemically synthesized
guuuauaacucugagaaga

SEQ ID NO: 30409 - RNA, 19 nt, artificial
  Chemically synthesized
gauaauucuagagauuuua

SEQ ID NO: 30410 - RNA, 19 nt, artificial
  Chemically synthesized
cagauaccuggaaccaccu

SEQ ID NO: 30411 - RNA, 19 nt, artificial
  Chemically synthesized
ucuaacauaugauucugua

SEQ ID NO: 30412 - RNA, 19 nt, artificial
  Chemically synthesized
caaguuucuaagauuuaag

SEQ ID NO: 30413 - RNA, 19 nt, artificial
  Chemically synthesized
uggugucauauuauacaau

SEQ ID NO: 30414 - RNA, 19 nt, artificial
  Chemically synthesized
ccuuuugcugaaauaucag

SEQ ID NO: 30415 - RNA, 19 nt, artificial
  Chemically synthesized
accaaaaaauacuuaauag

SEQ ID NO: 30416 - RNA, 19 nt, artificial
  Chemically synthesized
aaggaaugcacacucacca

SEQ ID NO: 30417 - RNA, 19 nt, artificial
  Chemically synthesized
ugauaauucuagagauuuu

SEQ ID NO: 30418 - RNA, 19 nt, artificial
  Chemically synthesized
uugauuaaagaucucaaaa

SEQ ID NO: 30419 - RNA, 19 nt, artificial
  Chemically synthesized
ucaaggacauuacuaguga

SEQ ID NO: 30420 - RNA, 19 nt, artificial
  Chemically synthesized
uaugauucuguaguaugaa

SEQ ID NO: 30421 - RNA, 19 nt, artificial
  Chemically synthesized
gacucagaaaauucaaacu

SEQ ID NO: 30422 - RNA, 19 nt, artificial
  Chemically synthesized
uacuauccuacguuuaaau

SEQ ID NO: 30423 - RNA, 19 nt, artificial
  Chemically synthesized
aauucaguucugaguauau

SEQ ID NO: 30424 - RNA, 19 nt, artificial
  Chemically synthesized
guaaaguauauguauuuga

SEQ ID NO: 30425 - RNA, 19 nt, artificial
  Chemically synthesized
aguacguaauuaaauaaug

SEQ ID NO: 30426 - RNA, 19 nt, artificial
  Chemically synthesized
ucaucuggauuuaggaauu

SEQ ID NO: 30427 - RNA, 19 nt, artificial
  Chemically synthesized
aaauaucaguuacugaaca

SEQ ID NO: 30428 - RNA, 19 nt, artificial
  Chemically synthesized
acuucagaaaugaaaucca

SEQ ID NO: 30429 - RNA, 19 nt, artificial
  Chemically synthesized
ugcugaaauaucaguuacu

SEQ ID NO: 30430 - RNA, 19 nt, artificial
  Chemically synthesized
auccaaagcuuggucuaga

SEQ ID NO: 30431 - RNA, 19 nt, artificial
  Chemically synthesized
ugcacacucaccagcaaca

SEQ ID NO: 30432 - RNA, 19 nt, artificial
  Chemically synthesized
aaggauguuuaaaaucuag

SEQ ID NO: 30433 - RNA, 19 nt, artificial
  Chemically synthesized
auaugcaauuaguguuuga

SEQ ID NO: 30434 - RNA, 19 nt, artificial
  Chemically synthesized
auuggugucauauuauaca

SEQ ID NO: 30435 - RNA, 19 nt, artificial
  Chemically synthesized
aacauggaaauaucaccaa

SEQ ID NO: 30436 - RNA, 19 nt, artificial
  Chemically synthesized
ugccuuggugcucaucuua

SEQ ID NO: 30437 - RNA, 19 nt, artificial
  Chemically synthesized
ugacaucaacuccaaggga

SEQ ID NO: 30438 - RNA, 19 nt, artificial
  Chemically synthesized
guaugaauguaaucagugu

SEQ ID NO: 30439 - RNA, 19 nt, artificial
  Chemically synthesized
gaacuuggaaggccugcau

SEQ ID NO: 30440 - RNA, 19 nt, artificial
  Chemically synthesized
uugaguaaauauaucacca

SEQ ID NO: 30441 - RNA, 19 nt, artificial
  Chemically synthesized
aaucaauagaagaagcuau

SEQ ID NO: 30442 - RNA, 19 nt, artificial
  Chemically synthesized
gaaagauuaagauuaugcu

SEQ ID NO: 30443 - RNA, 19 nt, artificial
  Chemically synthesized
uaguaugaauguaaucagu

SEQ ID NO: 30444 - RNA, 19 nt, artificial
  Chemically synthesized
agaugauaaaauagauucu

SEQ ID NO: 30445 - RNA, 19 nt, artificial
  Chemically synthesized
auuaguguuugaaaagauu

SEQ ID NO: 30446 - RNA, 19 nt, artificial
  Chemically synthesized
uauuugagugcagaauuua

SEQ ID NO: 30447 - RNA, 19 nt, artificial
  Chemically synthesized
auucaaacuucagaaauga

SEQ ID NO: 30448 - RNA, 19 nt, artificial
  Chemically synthesized
uugacuugaguaaauauau

SEQ ID NO: 30449 - RNA, 19 nt, artificial
  Chemically synthesized
auagcaaugguaaaaucau

SEQ ID NO: 30450 - RNA, 19 nt, artificial
  Chemically synthesized
acugcucucagagaaagua

SEQ ID NO: 30451 - RNA, 19 nt, artificial
  Chemically synthesized
acuauccuacguuuaaaua

SEQ ID NO: 30452 - RNA, 19 nt, artificial
  Chemically synthesized
aacagaaaguucaacugcu

SEQ ID NO: 30453 - RNA, 19 nt, artificial
  Chemically synthesized
uugccuuggugcucaucuu

SEQ ID NO: 30454 - RNA, 19 nt, artificial
  Chemically synthesized
uaaucaguguauguuagua

SEQ ID NO: 30455 - RNA, 19 nt, artificial
  Chemically synthesized
acugcccuuagaaauucua

SEQ ID NO: 30456 - RNA, 19 nt, artificial
  Chemically synthesized
cuaaguacccaaauaggag

SEQ ID NO: 30457 - RNA, 19 nt, artificial
  Chemically synthesized
uaugcaauuaguguuugaa

SEQ ID NO: 30458 - RNA, 19 nt, artificial
  Chemically synthesized
cauauuucuaaacuuuguu

SEQ ID NO: 30459 - RNA, 19 nt, artificial
  Chemically synthesized
gaauugaggaagacuguua

SEQ ID NO: 30460 - RNA, 19 nt, artificial
  Chemically synthesized
ccuacguuuaaauaucuuu

SEQ ID NO: 30461 - RNA, 19 nt, artificial
  Chemically synthesized
agcuaugaccuuuugcuga

SEQ ID NO: 30462 - RNA, 19 nt, artificial
  Chemically synthesized
agauaguuauaaacugaag

SEQ ID NO: 30463 - RNA, 19 nt, artificial
  Chemically synthesized
auguugacuugaguaaaua

SEQ ID NO: 30464 - RNA, 19 nt, artificial
  Chemically synthesized
ucucugaucucgcgcaaga

SEQ ID NO: 30465 - RNA, 19 nt, artificial
  Chemically synthesized
ugaagauaguuauaaacug

SEQ ID NO: 30466 - RNA, 19 nt, artificial
  Chemically synthesized
ugaaaaacaacaaauucag

SEQ ID NO: 30467 - RNA, 19 nt, artificial
  Chemically synthesized
aaacauggaaauaucacca

SEQ ID NO: 30468 - RNA, 19 nt, artificial
  Chemically synthesized
ggaaucaucaaggaaugca

SEQ ID NO: 30469 - RNA, 19 nt, artificial
  Chemically synthesized
uuaaaaucuaguugggaaa

SEQ ID NO: 30470 - RNA, 19 nt, artificial
  Chemically synthesized
aacuucauggaaagaaaga

SEQ ID NO: 30471 - RNA, 19 nt, artificial
  Chemically synthesized
uuuacuggguacauuuuau

SEQ ID NO: 30472 - RNA, 19 nt, artificial
  Chemically synthesized
uaguacaaaugucuaucca

SEQ ID NO: 30473 - RNA, 19 nt, artificial
  Chemically synthesized
gcccaagugacugacauca

SEQ ID NO: 30474 - RNA, 19 nt, artificial
  Chemically synthesized
caagugacugacaucaacu

SEQ ID NO: 30475 - RNA, 19 nt, artificial
  Chemically synthesized
aaauauagguaaaaguacg

SEQ ID NO: 30476 - RNA, 19 nt, artificial
  Chemically synthesized
gugcagaauuuaaauaagg

SEQ ID NO: 30477 - RNA, 19 nt, artificial
  Chemically synthesized
ucaaagaugauaaaauaga

SEQ ID NO: 30478 - RNA, 19 nt, artificial
  Chemically synthesized
aucaaggaaugcacacuca

SEQ ID NO: 30479 - RNA, 19 nt, artificial
  Chemically synthesized
acugugaagauaguuauaa

SEQ ID NO: 30480 - RNA, 19 nt, artificial
  Chemically synthesized
ugcuagauuaucguccaaa

SEQ ID NO: 30481 - RNA, 19 nt, artificial
  Chemically synthesized
uaaggcucuaccucaaaga

SEQ ID NO: 30482 - RNA, 19 nt, artificial
  Chemically synthesized
agcaaugguaaaaucauca

SEQ ID NO: 30483 - RNA, 19 nt, artificial
  Chemically synthesized
uuuauuggugucauauuau

SEQ ID NO: 30484 - RNA, 19 nt, artificial
  Chemically synthesized
uaaauauaucaccacuauu

SEQ ID NO: 30485 - RNA, 19 nt, artificial
  Chemically synthesized
uucuguaaauguaaacugu

SEQ ID NO: 30486 - RNA, 19 nt, artificial
  Chemically synthesized
uuuaaaaucuaguugggaa

SEQ ID NO: 30487 - RNA, 19 nt, artificial
  Chemically synthesized
aaauaucaccaaaaaauac

SEQ ID NO: 30488 - RNA, 19 nt, artificial
  Chemically synthesized
cuagagauuuuaccauauu

SEQ ID NO: 30489 - RNA, 19 nt, artificial
  Chemically synthesized
uccaaagcuuggucuagag

SEQ ID NO: 30490 - RNA, 19 nt, artificial
  Chemically synthesized
uacaauauuucaauuguga

SEQ ID NO: 30491 - RNA, 19 nt, artificial
  Chemically synthesized
caaguugcugaaucaaugg

SEQ ID NO: 30492 - RNA, 19 nt, artificial
  Chemically synthesized
ccucugauaauucuagaga

SEQ ID NO: 30493 - RNA, 19 nt, artificial
  Chemically synthesized
uguaaauacugcuugguuu

SEQ ID NO: 30494 - RNA, 19 nt, artificial
  Chemically synthesized
guaguaugaauguaaucag

SEQ ID NO: 30495 - RNA, 19 nt, artificial
  Chemically synthesized
gaccuuuugcugaaauauc

SEQ ID NO: 30496 - RNA, 19 nt, artificial
  Chemically synthesized
aacugcucucagagaaagu

SEQ ID NO: 30497 - RNA, 19 nt, artificial
  Chemically synthesized
uacccaaauaggaguguau

SEQ ID NO: 30498 - RNA, 19 nt, artificial
  Chemically synthesized
uagagauuuuaccauauuu

SEQ ID NO: 30499 - RNA, 19 nt, artificial
  Chemically synthesized
gcugaaauaucaguuacug

SEQ ID NO: 30500 - RNA, 19 nt, artificial
  Chemically synthesized
gcucaaaacuaccuacuuc

SEQ ID NO: 30501 - RNA, 19 nt, artificial
  Chemically synthesized
auuuauggaggauuuuuuu

SEQ ID NO: 30502 - RNA, 19 nt, artificial
  Chemically synthesized
aaacuuuguuuauaacucu

SEQ ID NO: 30503 - RNA, 19 nt, artificial
  Chemically synthesized
auaucaccaaaaaauacuu

SEQ ID NO: 30504 - RNA, 19 nt, artificial
  Chemically synthesized
ucuuugaaaguuuguauua

SEQ ID NO: 30505 - RNA, 19 nt, artificial
  Chemically synthesized
guguuaaugcccaagugac

SEQ ID NO: 30506 - RNA, 19 nt, artificial
  Chemically synthesized
ugauucugccuccaaggau

SEQ ID NO: 30507 - RNA, 19 nt, artificial
  Chemically synthesized
aggaaugcacacucaccag

SEQ ID NO: 30508 - RNA, 19 nt, artificial
  Chemically synthesized
uuaccauauuucuaaacuu

SEQ ID NO: 30509 - RNA, 19 nt, artificial
  Chemically synthesized
auggaaucaucaaggaaug

SEQ ID NO: 30510 - RNA, 19 nt, artificial
  Chemically synthesized
aguuucuaagauuuaagau

SEQ ID NO: 30511 - RNA, 19 nt, artificial
  Chemically synthesized
cuuugccucuaaauuaccu

SEQ ID NO: 30512 - RNA, 19 nt, artificial
  Chemically synthesized
ucugagaagaucauauuua

SEQ ID NO: 30513 - RNA, 19 nt, artificial
  Chemically synthesized
ugcuaaguacccaaauagg

SEQ ID NO: 30514 - RNA, 19 nt, artificial
  Chemically synthesized
gucuguugcuagauuaucg

SEQ ID NO: 30515 - RNA, 19 nt, artificial
  Chemically synthesized
ugacaugucaugaacccau

SEQ ID NO: 30516 - RNA, 19 nt, artificial
  Chemically synthesized
ucugauaauucuagagauu

SEQ ID NO: 30517 - RNA, 19 nt, artificial
  Chemically synthesized
augauucuguaguaugaau

SEQ ID NO: 30518 - RNA, 19 nt, artificial
  Chemically synthesized
uaaaguauauguauuugag

SEQ ID NO: 30519 - RNA, 19 nt, artificial
  Chemically synthesized
guuuaaauaucuuugaaag

SEQ ID NO: 30520 - RNA, 19 nt, artificial
  Chemically synthesized
aaaguauauguauuugagu

SEQ ID NO: 30521 - RNA, 19 nt, artificial
  Chemically synthesized
gaugauaaaauagauucuu

SEQ ID NO: 30522 - RNA, 19 nt, artificial
  Chemically synthesized
agaagaagcuaugaccuuu

SEQ ID NO: 30523 - RNA, 19 nt, artificial
  Chemically synthesized
agaugagaucaagaaugac

SEQ ID NO: 30524 - RNA, 19 nt, artificial
  Chemically synthesized
guucaauaaugucccaugu

SEQ ID NO: 30525 - RNA, 19 nt, artificial
  Chemically synthesized
gaucauauuuauguaaagu

SEQ ID NO: 30526 - RNA, 19 nt, artificial
  Chemically synthesized
gugacaugucaugaaccca

SEQ ID NO: 30527 - RNA, 19 nt, artificial
  Chemically synthesized
aauucacauagaaaacauu

SEQ ID NO: 30528 - RNA, 19 nt, artificial
  Chemically synthesized
gaaaagauucuuaauagcu

SEQ ID NO: 30529 - RNA, 19 nt, artificial
  Chemically synthesized
cuucauggaaagaaagaag

SEQ ID NO: 30530 - RNA, 19 nt, artificial
  Chemically synthesized
aacuucaucaagaguaaau

SEQ ID NO: 30531 - RNA, 19 nt, artificial
  Chemically synthesized
auacauagcaaugguaaaa

SEQ ID NO: 30532 - RNA, 19 nt, artificial
  Chemically synthesized
cagaacagaaaguucaacu

SEQ ID NO: 30533 - RNA, 19 nt, artificial
  Chemically synthesized
ccacucuaugaaucaauag

SEQ ID NO: 30534 - RNA, 19 nt, artificial
  Chemically synthesized
uuguuuauaacucugagaa

SEQ ID NO: 30535 - RNA, 19 nt, artificial
  Chemically synthesized
gauuuaagauucuccuuac

SEQ ID NO: 30536 - RNA, 19 nt, artificial
  Chemically synthesized
ucaugaacccauguuugca

SEQ ID NO: 30537 - RNA, 19 nt, artificial
  Chemically synthesized
acauaugauucuguaguau

SEQ ID NO: 30538 - RNA, 19 nt, artificial
  Chemically synthesized
uucugaguauaugcaauua

SEQ ID NO: 30539 - RNA, 19 nt, artificial
  Chemically synthesized
aagauucuccuuacuacua

SEQ ID NO: 30540 - RNA, 19 nt, artificial
  Chemically synthesized
aguccaccaaaaggcaaga

SEQ ID NO: 30541 - RNA, 19 nt, artificial
  Chemically synthesized
aagcagauaccuggaacca

SEQ ID NO: 30542 - RNA, 19 nt, artificial
  Chemically synthesized
acuggguacauuuuaucau

SEQ ID NO: 30543 - RNA, 19 nt, artificial
  Chemically synthesized
cugcccuuagaaauucuag

SEQ ID NO: 30544 - RNA, 19 nt, artificial
  Chemically synthesized
uugaaaagauucuuaauag

SEQ ID NO: 30545 - RNA, 19 nt, artificial
  Chemically synthesized
caaggaaugcacacucacc

SEQ ID NO: 30546 - RNA, 19 nt, artificial
  Chemically synthesized
cacagcagaacagaaaguu

SEQ ID NO: 30547 - RNA, 19 nt, artificial
  Chemically synthesized
accagcaacaccaagugca

SEQ ID NO: 30548 - RNA, 19 nt, artificial
  Chemically synthesized
cucagaaaauucaaacuuc

SEQ ID NO: 30549 - RNA, 19 nt, artificial
  Chemically synthesized
ugugaagauaguuauaaac

SEQ ID NO: 30550 - RNA, 19 nt, artificial
  Chemically synthesized
ccauuuauggaggauuuuu

SEQ ID NO: 30551 - RNA, 19 nt, artificial
  Chemically synthesized
uaaacugugaagauaguua

SEQ ID NO: 30552 - RNA, 19 nt, artificial
  Chemically synthesized
uggguacauuuuaucauuu

SEQ ID NO: 30553 - RNA, 19 nt, artificial
  Chemically synthesized
aaaguagcuuugugacaug

SEQ ID NO: 30554 - RNA, 19 nt, artificial
  Chemically synthesized
uuauacauagcaaugguaa

SEQ ID NO: 30555 - RNA, 19 nt, artificial
  Chemically synthesized
uaucaccaaaaaauacuua

SEQ ID NO: 30556 - RNA, 19 nt, artificial
  Chemically synthesized
guucuuacgucuguugcua

SEQ ID NO: 30557 - RNA, 19 nt, artificial
  Chemically synthesized
ugaaaagauucuuaauagc

SEQ ID NO: 30558 - RNA, 19 nt, artificial
  Chemically synthesized
aaaauauagguaaaaguac

SEQ ID NO: 30559 - RNA, 19 nt, artificial
  Chemically synthesized
aaguugcugaaucaaugga

SEQ ID NO: 30560 - RNA, 19 nt, artificial
  Chemically synthesized
gaacccauguuugcaauca

SEQ ID NO: 30561 - RNA, 19 nt, artificial
  Chemically synthesized
gagaagaucauauuuaugu

SEQ ID NO: 30562 - RNA, 19 nt, artificial
  Chemically synthesized
uuugcugaaauaucaguua

SEQ ID NO: 30563 - RNA, 19 nt, artificial
  Chemically synthesized
uggaauuauaaaauauagg

SEQ ID NO: 30564 - RNA, 19 nt, artificial
  Chemically synthesized
ucuaugaaucaauagaaga

SEQ ID NO: 30565 - RNA, 19 nt, artificial
  Chemically synthesized
auuuauuagcgcugaagag

SEQ ID NO: 30566 - RNA, 19 nt, artificial
  Chemically synthesized
uucuaagauuuaagauucu

SEQ ID NO: 30567 - RNA, 19 nt, artificial
  Chemically synthesized
guucaacugcuucguaauu

SEQ ID NO: 30568 - RNA, 19 nt, artificial
  Chemically synthesized
uucgugagcucgucucuga

SEQ ID NO: 30569 - RNA, 19 nt, artificial
  Chemically synthesized
uaguguuugaaaagauucu

SEQ ID NO: 30570 - RNA, 19 nt, artificial
  Chemically synthesized
ccaaagcuuggucuagagu

SEQ ID NO: 30571 - RNA, 19 nt, artificial
  Chemically synthesized
cuccuaccucugguucuua

SEQ ID NO: 30572 - RNA, 19 nt, artificial
  Chemically synthesized
ucucaugauucugccucca

SEQ ID NO: 30573 - RNA, 19 nt, artificial
  Chemically synthesized
uuauaaacugaagcagaua

SEQ ID NO: 30574 - RNA, 19 nt, artificial
  Chemically synthesized
ucuagagauuuuaccauau

SEQ ID NO: 30575 - RNA, 19 nt, artificial
  Chemically synthesized
aaugcccaagugacugaca

SEQ ID NO: 30576 - RNA, 19 nt, artificial
  Chemically synthesized
aaggcaagacugcccuuag

SEQ ID NO: 30577 - RNA, 19 nt, artificial
  Chemically synthesized
caaaaaauacuuaauaguc

SEQ ID NO: 30578 - RNA, 19 nt, artificial
  Chemically synthesized
aacuccaagggauuggaau

SEQ ID NO: 30579 - RNA, 19 nt, artificial
  Chemically synthesized
aaauucaguucugaguaua

SEQ ID NO: 30580 - RNA, 19 nt, artificial
  Chemically synthesized
gugaauucacauagaaaac

SEQ ID NO: 30581 - RNA, 19 nt, artificial
  Chemically synthesized
gcucucagagaaaguagcu

SEQ ID NO: 30582 - RNA, 19 nt, artificial
  Chemically synthesized
uaggaguguaugcagagga

SEQ ID NO: 30583 - RNA, 19 nt, artificial
  Chemically synthesized
aauuaccucugauaauucu

SEQ ID NO: 30584 - RNA, 19 nt, artificial
  Chemically synthesized
aauucaaacuucagaaaug

SEQ ID NO: 30585 - RNA, 19 nt, artificial
  Chemically synthesized
acuccaagggauuggaauu

SEQ ID NO: 30586 - RNA, 19 nt, artificial
  Chemically synthesized
cuuggugcucaucuuaaug

SEQ ID NO: 30587 - RNA, 19 nt, artificial
  Chemically synthesized
aaaugucuauccacaggcu

SEQ ID NO: 30588 - RNA, 19 nt, artificial
  Chemically synthesized
ucaucaagaguaaaugcag

SEQ ID NO: 30589 - RNA, 19 nt, artificial
  Chemically synthesized
agaaaugaaauccaaagcu

SEQ ID NO: 30590 - RNA, 19 nt, artificial
  Chemically synthesized
uaugaauguaaucagugua

SEQ ID NO: 30591 - RNA, 19 nt, artificial
  Chemically synthesized
cugcucucagagaaaguag

SEQ ID NO: 30592 - RNA, 19 nt, artificial
  Chemically synthesized
ucaauugugaauucacaua

SEQ ID NO: 30593 - RNA, 19 nt, artificial
  Chemically synthesized
uaccauauuucuaaacuuu

SEQ ID NO: 30594 - RNA, 19 nt, artificial
  Chemically synthesized
ccuuagaaauucuagccug

SEQ ID NO: 30595 - RNA, 19 nt, artificial
  Chemically synthesized
ucuaaacuuuguuuauaac

SEQ ID NO: 30596 - RNA, 19 nt, artificial
  Chemically synthesized
guaaauguaaacugugaag

SEQ ID NO: 30597 - RNA, 19 nt, artificial
  Chemically synthesized
uaucaccacuauugcugga

SEQ ID NO: 30598 - RNA, 19 nt, artificial
  Chemically synthesized
guuucuaagauuuaagauu

SEQ ID NO: 30599 - RNA, 19 nt, artificial
  Chemically synthesized
uaaauuaccucugauaauu

SEQ ID NO: 30600 - RNA, 19 nt, artificial
  Chemically synthesized
cuuugcacaguuuauuggu

SEQ ID NO: 30601 - RNA, 19 nt, artificial
  Chemically synthesized
ugagaagaucauauuuaug

SEQ ID NO: 30602 - RNA, 19 nt, artificial
  Chemically synthesized
guccaaaaguguuaaugcc

SEQ ID NO: 30603 - RNA, 19 nt, artificial
  Chemically synthesized
gugaagauaguuauaaacu

SEQ ID NO: 30604 - RNA, 19 nt, artificial
  Chemically synthesized
auuaccucugauaauucua

SEQ ID NO: 30605 - RNA, 19 nt, artificial
  Chemically synthesized
uaguugggaaaacaaacuu

SEQ ID NO: 30606 - RNA, 19 nt, artificial
  Chemically synthesized
caauagaagaagcuaugac

SEQ ID NO: 30607 - RNA, 19 nt, artificial
  Chemically synthesized
cugaaucaauggagcccuc

SEQ ID NO: 30608 - RNA, 19 nt, artificial
  Chemically synthesized
aaugucuauccacaggcua

SEQ ID NO: 30609 - RNA, 19 nt, artificial
  Chemically synthesized
agauuuaagauucuccuua

SEQ ID NO: 30610 - RNA, 19 nt, artificial
  Chemically synthesized
aagcgguuuacgagugacu

SEQ ID NO: 30611 - RNA, 19 nt, artificial
  Chemically synthesized
aauucuagagauuuuacca

SEQ ID NO: 30612 - RNA, 19 nt, artificial
  Chemically synthesized
auucacauagaaaacauua

SEQ ID NO: 30613 - RNA, 19 nt, artificial
  Chemically synthesized
ucaguucugaguauaugca

SEQ ID NO: 30614 - RNA, 19 nt, artificial
  Chemically synthesized
aaauucaaacuucagaaau

SEQ ID NO: 30615 - RNA, 19 nt, artificial
  Chemically synthesized
uaaagaacuuccauuuaug

SEQ ID NO: 30616 - RNA, 19 nt, artificial
  Chemically synthesized
cuacguuuaaauaucuuug

SEQ ID NO: 30617 - RNA, 19 nt, artificial
  Chemically synthesized
ggagauacuaacugcucuc

SEQ ID NO: 30618 - RNA, 19 nt, artificial
  Chemically synthesized
cgucuguugcuagauuauc

SEQ ID NO: 30619 - RNA, 19 nt, artificial
  Chemically synthesized
aaagaccuuugcacaguuu

SEQ ID NO: 30620 - RNA, 19 nt, artificial
  Chemically synthesized
guucaaagacgcuucuggg

SEQ ID NO: 30621 - RNA, 19 nt, artificial
  Chemically synthesized
auucuguaguaugaaugua

SEQ ID NO: 30622 - RNA, 19 nt, artificial
  Chemically synthesized
gacaugucaugaacccaug

SEQ ID NO: 30623 - RNA, 19 nt, artificial
  Chemically synthesized
guucugaguauaugcaauu

SEQ ID NO: 30624 - RNA, 19 nt, artificial
  Chemically synthesized
uagauuaucguccaaaagu

SEQ ID NO: 30625 - RNA, 19 nt, artificial
  Chemically synthesized
ccauuuuugccuuggugcu

SEQ ID NO: 30626 - RNA, 19 nt, artificial
  Chemically synthesized
ccaaacauggaaauaucac

SEQ ID NO: 30627 - RNA, 19 nt, artificial
  Chemically synthesized
aguguuugaaaagauucuu

SEQ ID NO: 30628 - RNA, 19 nt, artificial
  Chemically synthesized
aggauguuuaaaaucuagu

SEQ ID NO: 30629 - RNA, 19 nt, artificial
  Chemically synthesized
guugcugaaucaauggagc

SEQ ID NO: 30630 - RNA, 19 nt, artificial
  Chemically synthesized
agaacagaaaguucaacug

SEQ ID NO: 30631 - RNA, 19 nt, artificial
  Chemically synthesized
uaaauaaggcucuaccuca

SEQ ID NO: 30632 - RNA, 19 nt, artificial
  Chemically synthesized
gaacauggaaucaucaagg

SEQ ID NO: 30633 - RNA, 19 nt, artificial
  Chemically synthesized
auaguuauaaacugaagca

SEQ ID NO: 30634 - RNA, 19 nt, artificial
  Chemically synthesized
cagcuuauacauagcaaug

SEQ ID NO: 30635 - RNA, 19 nt, artificial
  Chemically synthesized
augauucugccuccaagga

SEQ ID NO: 30636 - RNA, 19 nt, artificial
  Chemically synthesized
uccuacguuuaaauaucuu

SEQ ID NO: 30637 - RNA, 19 nt, artificial
  Chemically synthesized
cacuaagucaaguuaaagg

SEQ ID NO: 30638 - RNA, 19 nt, artificial
  Chemically synthesized
cuguaguaugaauguaauc

SEQ ID NO: 30639 - RNA, 19 nt, artificial
  Chemically synthesized
auccuacguuuaaauaucu

SEQ ID NO: 30640 - RNA, 19 nt, artificial
  Chemically synthesized
caaacauggaaauaucacc

SEQ ID NO: 30641 - RNA, 19 nt, artificial
  Chemically synthesized
aaagaaagaagcguaugac

SEQ ID NO: 30642 - RNA, 19 nt, artificial
  Chemically synthesized
uagcaaugguaaaaucauc

SEQ ID NO: 30643 - RNA, 19 nt, artificial
  Chemically synthesized
aucguccaaaaguguuaau

SEQ ID NO: 30644 - RNA, 19 nt, artificial
  Chemically synthesized
ugacuugaguaaauauauc

SEQ ID NO: 30645 - RNA, 19 nt, artificial
  Chemically synthesized
aaaagauucuuaauagcug

SEQ ID NO: 30646 - RNA, 19 nt, artificial
  Chemically synthesized
uaccuggaaccaccuaaag

SEQ ID NO: 30647 - RNA, 19 nt, artificial
  Chemically synthesized
uacucuugcagagaaaauu

SEQ ID NO: 30648 - RNA, 19 nt, artificial
  Chemically synthesized
uuuuacuggguacauuuua

SEQ ID NO: 30649 - RNA, 19 nt, artificial
  Chemically synthesized
uguauguuaguacaaaugu

SEQ ID NO: 30650 - RNA, 19 nt, artificial
  Chemically synthesized
cuuuguacucuugcagaga

SEQ ID NO: 30651 - RNA, 19 nt, artificial
  Chemically synthesized
aauauagguaaaaguacgu

SEQ ID NO: 30652 - RNA, 19 nt, artificial
  Chemically synthesized
accucugguucuuacgucu

SEQ ID NO: 30653 - RNA, 19 nt, artificial
  Chemically synthesized
auccucaaggacauuacua

SEQ ID NO: 30654 - RNA, 19 nt, artificial
  Chemically synthesized
uuuauaacuaucuucacag

SEQ ID NO: 30655 - RNA, 19 nt, artificial
  Chemically synthesized
uuacucuugaugaaguuug

SEQ ID NO: 30656 - RNA, 19 nt, artificial
  Chemically synthesized
uuuaacuugacuuaguguc

SEQ ID NO: 30657 - RNA, 19 nt, artificial
  Chemically synthesized
uuuuuugagaucuuuaauc

SEQ ID NO: 30658 - RNA, 19 nt, artificial
  Chemically synthesized
uuaauuacguacuuuuacc

SEQ ID NO: 30659 - RNA, 19 nt, artificial
  Chemically synthesized
uagauuuuaaacauccuug

SEQ ID NO: 30660 - RNA, 19 nt, artificial
  Chemically synthesized
uauuuuuuggugauauuuc

SEQ ID NO: 30661 - RNA, 19 nt, artificial
  Chemically synthesized
uuuaauuacguacuuuuac

SEQ ID NO: 30662 - RNA, 19 nt, artificial
  Chemically synthesized
auaaauaugaucuucucag

SEQ ID NO: 30663 - RNA, 19 nt, artificial
  Chemically synthesized
uuuuuuggugauauuucca

SEQ ID NO: 30664 - RNA, 19 nt, artificial
  Chemically synthesized
aucuauuuuaucaucuuug

SEQ ID NO: 30665 - RNA, 19 nt, artificial
  Chemically synthesized
uuucuuuccaugaaguuga

SEQ ID NO: 30666 - RNA, 19 nt, artificial
  Chemically synthesized
uauuuggguacuuagcaug

SEQ ID NO: 30667 - RNA, 19 nt, artificial
  Chemically synthesized
uucauugacaccauucuuu

SEQ ID NO: 30668 - RNA, 19 nt, artificial
  Chemically synthesized
uuuuuggugauauuuccau

SEQ ID NO: 30669 - RNA, 19 nt, artificial
  Chemically synthesized
uuaaaucuuagaaacuugg

SEQ ID NO: 30670 - RNA, 19 nt, artificial
  Chemically synthesized
uucaaagauauuuaaacgu

SEQ ID NO: 30671 - RNA, 19 nt, artificial
  Chemically synthesized
uuaaauucugcacucaaau

SEQ ID NO: 30672 - RNA, 19 nt, artificial
  Chemically synthesized
uuaaucuuucauccucugc

SEQ ID NO: 30673 - RNA, 19 nt, artificial
  Chemically synthesized
uaauaugacaccaauaaac

SEQ ID NO: 30674 - RNA, 19 nt, artificial
  Chemically synthesized
uucugaaguuugaauuuuc

SEQ ID NO: 30675 - RNA, 19 nt, artificial
  Chemically synthesized
uguaguaacagucuuccuc

SEQ ID NO: 30676 - RNA, 19 nt, artificial
  Chemically synthesized
uuucaaagauauuuaaacg

SEQ ID NO: 30677 - RNA, 19 nt, artificial
  Chemically synthesized
uuauuuaaauucugcacuc

SEQ ID NO: 30678 - RNA, 19 nt, artificial
  Chemically synthesized
ugagucacuaguaaugucc

SEQ ID NO: 30679 - RNA, 19 nt, artificial
  Chemically synthesized
uuucuaagggcagucuugc

SEQ ID NO: 30680 - RNA, 19 nt, artificial
  Chemically synthesized
uauuaaguauuuuuuggug

SEQ ID NO: 30681 - RNA, 19 nt, artificial
  Chemically synthesized
uugagaucuuuaaucaaug

SEQ ID NO: 30682 - RNA, 19 nt, artificial
  Chemically synthesized
uauugauucauagaguggg

SEQ ID NO: 30683 - RNA, 19 nt, artificial
  Chemically synthesized
uaugacaccaauaaacugu

SEQ ID NO: 30684 - RNA, 19 nt, artificial
  Chemically synthesized
ugguuguugagcaauccuc

SEQ ID NO: 30685 - RNA, 19 nt, artificial
  Chemically synthesized
auuuuuuggugauauuucc

SEQ ID NO: 30686 - RNA, 19 nt, artificial
  Chemically synthesized
uacauaaauaugaucuucu

SEQ ID NO: 30687 - RNA, 19 nt, artificial
  Chemically synthesized
uaauuuagaggcaaagugg

SEQ ID NO: 30688 - RNA, 19 nt, artificial
  Chemically synthesized
uaugacaagagcaauuccu

SEQ ID NO: 30689 - RNA, 19 nt, artificial
  Chemically synthesized
acauuauugaacauuuucg

SEQ ID NO: 30690 - RNA, 19 nt, artificial
  Chemically synthesized
uauuguauaauaugacacc

SEQ ID NO: 30691 - RNA, 19 nt, artificial
  Chemically synthesized
ucugagagcaguuaguauc

SEQ ID NO: 30692 - RNA, 19 nt, artificial
  Chemically synthesized
uuaauacaaacuuucaaag

SEQ ID NO: 30693 - RNA, 19 nt, artificial
  Chemically synthesized
ucaguuuauaacuaucuuc

SEQ ID NO: 30694 - RNA, 19 nt, artificial
  Chemically synthesized
uucuugaucucaucuauuu

SEQ ID NO: 30695 - RNA, 19 nt, artificial
  Chemically synthesized
ugaaguuugaauuuucuga

SEQ ID NO: 30696 - RNA, 19 nt, artificial
  Chemically synthesized
uuggaguugaugucaguca

SEQ ID NO: 30697 - RNA, 19 nt, artificial
  Chemically synthesized
auaaaugauaaaauguacc

SEQ ID NO: 30698 - RNA, 19 nt, artificial
  Chemically synthesized
uaaaugauaaaauguaccc

SEQ ID NO: 30699 - RNA, 19 nt, artificial
  Chemically synthesized
uuuucaaacacuaauugca

SEQ ID NO: 30700 - RNA, 19 nt, artificial
  Chemically synthesized
uccuauuuggguacuuagc

SEQ ID NO: 30701 - RNA, 19 nt, artificial
  Chemically synthesized
uuuaucaucuuugauugca

SEQ ID NO: 30702 - RNA, 19 nt, artificial
  Chemically synthesized
auuuguacuaacauacacu

SEQ ID NO: 30703 - RNA, 19 nt, artificial
  Chemically synthesized
auuaucagagguaauuuag

SEQ ID NO: 30704 - RNA, 19 nt, artificial
  Chemically synthesized
auauuguauaauaugacac

SEQ ID NO: 30705 - RNA, 19 nt, artificial
  Chemically synthesized
uuuaaauucugcacucaaa

SEQ ID NO: 30706 - RNA, 19 nt, artificial
  Chemically synthesized
cauugauucagcaacuugg

SEQ ID NO: 30707 - RNA, 19 nt, artificial
  Chemically synthesized
ucuugaugaaguuuguuuu

SEQ ID NO: 30708 - RNA, 19 nt, artificial
  Chemically synthesized
uucuucuauugauucauag

SEQ ID NO: 30709 - RNA, 19 nt, artificial
  Chemically synthesized
aauuuguuguuuuucacuc

SEQ ID NO: 30710 - RNA, 19 nt, artificial
  Chemically synthesized
uaaucuuucauccucugca

SEQ ID NO: 30711 - RNA, 19 nt, artificial
  Chemically synthesized
uuuucuaugugaauucaca

SEQ ID NO: 30712 - RNA, 19 nt, artificial
  Chemically synthesized
auuaagaaucuuuucaaac

SEQ ID NO: 30713 - RNA, 19 nt, artificial
  Chemically synthesized
uugagguagagccuuauuu

SEQ ID NO: 30714 - RNA, 19 nt, artificial
  Chemically synthesized
uuuguuguuuuucacucua

SEQ ID NO: 30715 - RNA, 19 nt, artificial
  Chemically synthesized
uuuaauguuuucuauguga

SEQ ID NO: 30716 - RNA, 19 nt, artificial
  Chemically synthesized
uuuuugagaucuuuaauca

SEQ ID NO: 30717 - RNA, 19 nt, artificial
  Chemically synthesized
auaaucuuaaucuuucauc

SEQ ID NO: 30718 - RNA, 19 nt, artificial
  Chemically synthesized
uucagcaaaaggucauagc

SEQ ID NO: 30719 - RNA, 19 nt, artificial
  Chemically synthesized
ucauacgcuucuuucuuuc

SEQ ID NO: 30720 - RNA, 19 nt, artificial
  Chemically synthesized
uuacauaaauaugaucuuc

SEQ ID NO: 30721 - RNA, 19 nt, artificial
  Chemically synthesized
uuuuacaugggacauuauu

SEQ ID NO: 30722 - RNA, 19 nt, artificial
  Chemically synthesized
uucaguaacugauauuuca

SEQ ID NO: 30723 - RNA, 19 nt, artificial
  Chemically synthesized
ucuuccucaauuccaaucc

SEQ ID NO: 30724 - RNA, 19 nt, artificial
  Chemically synthesized
auuucauuucugaaguuug

SEQ ID NO: 30725 - RNA, 19 nt, artificial
  Chemically synthesized
ucauugacaccauucuuuc

SEQ ID NO: 30726 - RNA, 19 nt, artificial
  Chemically synthesized
uuaagaaucuuuucaaaca

SEQ ID NO: 30727 - RNA, 19 nt, artificial
  Chemically synthesized
auuuuaucaucuuugauug

SEQ ID NO: 30728 - RNA, 19 nt, artificial
  Chemically synthesized
cuugaucucaucuauuuug

SEQ ID NO: 30729 - RNA, 19 nt, artificial
  Chemically synthesized
uucacauuuaauacaaacu

SEQ ID NO: 30730 - RNA, 19 nt, artificial
  Chemically synthesized
uuagugucaugacuccagc

SEQ ID NO: 30731 - RNA, 19 nt, artificial
  Chemically synthesized
acaaaguuuagaaauaugg

SEQ ID NO: 30732 - RNA, 19 nt, artificial
  Chemically synthesized
ucauucuugaucucaucua

SEQ ID NO: 30733 - RNA, 19 nt, artificial
  Chemically synthesized
uauaacuaucuucacaguu

SEQ ID NO: 30734 - RNA, 19 nt, artificial
  Chemically synthesized
uagagccuuauuuaaauuc

SEQ ID NO: 30735 - RNA, 19 nt, artificial
  Chemically synthesized
ucuaugugaauucacaauu

SEQ ID NO: 30736 - RNA, 19 nt, artificial
  Chemically synthesized
acauuauuuaauuacguac

SEQ ID NO: 30737 - RNA, 19 nt, artificial
  Chemically synthesized
uucacaguuuacauuuaca

SEQ ID NO: 30738 - RNA, 19 nt, artificial
  Chemically synthesized
aaauucugcacucaaauac

SEQ ID NO: 30739 - RNA, 19 nt, artificial
  Chemically synthesized
uuuccaugaaguugaugcc

SEQ ID NO: 30740 - RNA, 19 nt, artificial
  Chemically synthesized
aaaaucuacaaauauguug

SEQ ID NO: 30741 - RNA, 19 nt, artificial
  Chemically synthesized
uaauuacguacuuuuaccu

SEQ ID NO: 30742 - RNA, 19 nt, artificial
  Chemically synthesized
aucugcuucaguuuauaac

SEQ ID NO: 30743 - RNA, 19 nt, artificial
  Chemically synthesized
ucuugaucucaucuauuuu

SEQ ID NO: 30744 - RNA, 19 nt, artificial
  Chemically synthesized
uuucaaacacuaauugcau

SEQ ID NO: 30745 - RNA, 19 nt, artificial
  Chemically synthesized
uuucuaugugaauucacaa

SEQ ID NO: 30746 - RNA, 19 nt, artificial
  Chemically synthesized
auuacauucauacuacaga

SEQ ID NO: 30747 - RNA, 19 nt, artificial
  Chemically synthesized
uauaauaugacaccaauaa

SEQ ID NO: 30748 - RNA, 19 nt, artificial
  Chemically synthesized
uuguauaauaugacaccaa

SEQ ID NO: 30749 - RNA, 19 nt, artificial
  Chemically synthesized
auaguggugauauauuuac

SEQ ID NO: 30750 - RNA, 19 nt, artificial
  Chemically synthesized
auugacaccauucuuucga

SEQ ID NO: 30751 - RNA, 19 nt, artificial
  Chemically synthesized
auuuaaauucugcacucaa

SEQ ID NO: 30752 - RNA, 19 nt, artificial
  Chemically synthesized
auucuugaucucaucuauu

SEQ ID NO: 30753 - RNA, 19 nt, artificial
  Chemically synthesized
uaaaaaaccaagcaguauu

SEQ ID NO: 30754 - RNA, 19 nt, artificial
  Chemically synthesized
uuugagaucuuuaaucaau

SEQ ID NO: 30755 - RNA, 19 nt, artificial
  Chemically synthesized
acuauuaaguauuuuuugg

SEQ ID NO: 30756 - RNA, 19 nt, artificial
  Chemically synthesized
aacuagauuuuaaacaucc

SEQ ID NO: 30757 - RNA, 19 nt, artificial
  Chemically synthesized
ugagauauuaaaaaucuac

SEQ ID NO: 30758 - RNA, 19 nt, artificial
  Chemically synthesized
uucuauugauucauagagu

SEQ ID NO: 30759 - RNA, 19 nt, artificial
  Chemically synthesized
uaaucuuaaucuuucaucc

SEQ ID NO: 30760 - RNA, 19 nt, artificial
  Chemically synthesized
guugaugucagucacuugg

SEQ ID NO: 30761 - RNA, 19 nt, artificial
  Chemically synthesized
uuaucagagguaauuuaga

SEQ ID NO: 30762 - RNA, 19 nt, artificial
  Chemically synthesized
aaguucuuuaggugguucc

SEQ ID NO: 30763 - RNA, 19 nt, artificial
  Chemically synthesized
ucacucuagaccaagcuuu

SEQ ID NO: 30764 - RNA, 19 nt, artificial
  Chemically synthesized
uuagaaauaugguaaaauc

SEQ ID NO: 30765 - RNA, 19 nt, artificial
  Chemically synthesized
ucacucguaaaccgcuucc

SEQ ID NO: 30766 - RNA, 19 nt, artificial
  Chemically synthesized
uuuaccauugcuauguaua

SEQ ID NO: 30767 - RNA, 19 nt, artificial
  Chemically synthesized
aucuucacaguuuacauuu

SEQ ID NO: 30768 - RNA, 19 nt, artificial
  Chemically synthesized
uuuacucuugaugaaguuu

SEQ ID NO: 30769 - RNA, 19 nt, artificial
  Chemically synthesized
auuaaguauuuuuugguga

SEQ ID NO: 30770 - RNA, 19 nt, artificial
  Chemically synthesized
uggacuauuaaguauuuuu

SEQ ID NO: 30771 - RNA, 19 nt, artificial
  Chemically synthesized
cuuauuuaaauucugcacu

SEQ ID NO: 30772 - RNA, 19 nt, artificial
  Chemically synthesized
ucugaaguuugaauuuucu

SEQ ID NO: 30773 - RNA, 19 nt, artificial
  Chemically synthesized
uuacaugggacauuauuga

SEQ ID NO: 30774 - RNA, 19 nt, artificial
  Chemically synthesized
uuacguacuuuuaccuaua

SEQ ID NO: 30775 - RNA, 19 nt, artificial
  Chemically synthesized
ucauacuacagaaucauau

SEQ ID NO: 30776 - RNA, 19 nt, artificial
  Chemically synthesized
accuauauuuuauaauucc

SEQ ID NO: 30777 - RNA, 19 nt, artificial
  Chemically synthesized
auguuuucuaugugaauuc

SEQ ID NO: 30778 - RNA, 19 nt, artificial
  Chemically synthesized
acauacacugauuacauuc

SEQ ID NO: 30779 - RNA, 19 nt, artificial
  Chemically synthesized
uagaaauaugguaaaaucu

SEQ ID NO: 30780 - RNA, 19 nt, artificial
  Chemically synthesized
ugaauuuguuguuuuucac

SEQ ID NO: 30781 - RNA, 19 nt, artificial
  Chemically synthesized
uuuggauuucauuucugaa

SEQ ID NO: 30782 - RNA, 19 nt, artificial
  Chemically synthesized
ucuuuucaaacacuaauug

SEQ ID NO: 30783 - RNA, 19 nt, artificial
  Chemically synthesized
acauuuaauacaaacuuuc

SEQ ID NO: 30784 - RNA, 19 nt, artificial
  Chemically synthesized
uucacaauugaaauauugu

SEQ ID NO: 30785 - RNA, 19 nt, artificial
  Chemically synthesized
ucaugaugcaggccuucca

SEQ ID NO: 30786 - RNA, 19 nt, artificial
  Chemically synthesized
uucuaugugaauucacaau

SEQ ID NO: 30787 - RNA, 19 nt, artificial
  Chemically synthesized
uucaguuuauaacuaucuu

SEQ ID NO: 30788 - RNA, 19 nt, artificial
  Chemically synthesized
cuuuacauaaauaugaucu

SEQ ID NO: 30789 - RNA, 19 nt, artificial
  Chemically synthesized
uuuuaucaucuuugauugc

SEQ ID NO: 30790 - RNA, 19 nt, artificial
  Chemically synthesized
cucuugaugaaguuuguuu

SEQ ID NO: 30791 - RNA, 19 nt, artificial
  Chemically synthesized
auuucuaagggcagucuug

SEQ ID NO: 30792 - RNA, 19 nt, artificial
  Chemically synthesized
uacuacagaaucauauguu

SEQ ID NO: 30793 - RNA, 19 nt, artificial
  Chemically synthesized
uaagaaucuuuucaaacac

SEQ ID NO: 30794 - RNA, 19 nt, artificial
  Chemically synthesized
uuaucaucuuugauugcaa

SEQ ID NO: 30795 - RNA, 19 nt, artificial
  Chemically synthesized
auuacguacuuuuaccuau

SEQ ID NO: 30796 - RNA, 19 nt, artificial
  Chemically synthesized
aaaucuacaaauauguugg

SEQ ID NO: 30797 - RNA, 19 nt, artificial
  Chemically synthesized
auuuaauguuuucuaugug

SEQ ID NO: 30798 - RNA, 19 nt, artificial
  Chemically synthesized
auauuuaaacguaggauag

SEQ ID NO: 30799 - RNA, 19 nt, artificial
  Chemically synthesized
aauaugacaccaauaaacu

SEQ ID NO: 30800 - RNA, 19 nt, artificial
  Chemically synthesized
aagcuuuggauuucauuuc

SEQ ID NO: 30801 - RNA, 19 nt, artificial
  Chemically synthesized
uuacauucauacuacagaa

SEQ ID NO: 30802 - RNA, 19 nt, artificial
  Chemically synthesized
auuuguuguuuuucacucu

SEQ ID NO: 30803 - RNA, 19 nt, artificial
  Chemically synthesized
uagacauuuguacuaacau

SEQ ID NO: 30804 - RNA, 19 nt, artificial
  Chemically synthesized
ucacauuuaauacaaacuu

SEQ ID NO: 30805 - RNA, 19 nt, artificial
  Chemically synthesized
ucaugagauauuaaaaauc

SEQ ID NO: 30806 - RNA, 19 nt, artificial
  Chemically synthesized
cauuauugaacauuuucgg

SEQ ID NO: 30807 - RNA, 19 nt, artificial
  Chemically synthesized
cucagaacugaauuuguug

SEQ ID NO: 30808 - RNA, 19 nt, artificial
  Chemically synthesized
auuuuauaauuccaaacac

SEQ ID NO: 30809 - RNA, 19 nt, artificial
  Chemically synthesized
uaaauccagaugaugauuu

SEQ ID NO: 30810 - RNA, 19 nt, artificial
  Chemically synthesized
auaaauggaaguucuuuag

SEQ ID NO: 30811 - RNA, 19 nt, artificial
  Chemically synthesized
uuucauuucugaaguuuga

SEQ ID NO: 30812 - RNA, 19 nt, artificial
  Chemically synthesized
uaacauacacugauuacau

SEQ ID NO: 30813 - RNA, 19 nt, artificial
  Chemically synthesized
auauuuacucaagucaaca

SEQ ID NO: 30814 - RNA, 19 nt, artificial
  Chemically synthesized
uuaauguuuucuaugugaa

SEQ ID NO: 30815 - RNA, 19 nt, artificial
  Chemically synthesized
ucuuaaaucuuagaaacuu

SEQ ID NO: 30816 - RNA, 19 nt, artificial
  Chemically synthesized
acugaauuuguuguuuuuc

SEQ ID NO: 30817 - RNA, 19 nt, artificial
  Chemically synthesized
augauagucugaauuuucu

SEQ ID NO: 30818 - RNA, 19 nt, artificial
  Chemically synthesized
aauuacguacuuuuaccua

SEQ ID NO: 30819 - RNA, 19 nt, artificial
  Chemically synthesized
uaucuucacaguuuacauu

SEQ ID NO: 30820 - RNA, 19 nt, artificial
  Chemically synthesized
uuaaguauuuuuuggugau

SEQ ID NO: 30821 - RNA, 19 nt, artificial
  Chemically synthesized
auucacaauugaaauauug

SEQ ID NO: 30822 - RNA, 19 nt, artificial
  Chemically synthesized
acauauauaauagucaaac

SEQ ID NO: 30823 - RNA, 19 nt, artificial
  Chemically synthesized
uauuuaaauucugcacuca

SEQ ID NO: 30824 - RNA, 19 nt, artificial
  Chemically synthesized
ucuagaauuaucagaggua

SEQ ID NO: 30825 - RNA, 19 nt, artificial
  Chemically synthesized
aucuuuucaaacacuaauu

SEQ ID NO: 30826 - RNA, 19 nt, artificial
  Chemically synthesized
auucacauuuaauacaaac

SEQ ID NO: 30827 - RNA, 19 nt, artificial
  Chemically synthesized
ucaaagauauuuaaacgua

SEQ ID NO: 30828 - RNA, 19 nt, artificial
  Chemically synthesized
ugucauucuugaucucauc

SEQ ID NO: 30829 - RNA, 19 nt, artificial
  Chemically synthesized
uauauuuacucaagucaac

SEQ ID NO: 30830 - RNA, 19 nt, artificial
  Chemically synthesized
uucauuucugaaguuugaa

SEQ ID NO: 30831 - RNA, 19 nt, artificial
  Chemically synthesized
aaaaaauccuccauaaaug

SEQ ID NO: 30832 - RNA, 19 nt, artificial
  Chemically synthesized
cuuuuggacgauaaucuag

SEQ ID NO: 30833 - RNA, 19 nt, artificial
  Chemically synthesized
uuucugaaguuugaauuuu

SEQ ID NO: 30834 - RNA, 19 nt, artificial
  Chemically synthesized
cuuucuuuccaugaaguug

SEQ ID NO: 30835 - RNA, 19 nt, artificial
  Chemically synthesized
aguaauguccuugaggaug

SEQ ID NO: 30836 - RNA, 19 nt, artificial
  Chemically synthesized
auagacauuuguacuaaca

SEQ ID NO: 30837 - RNA, 19 nt, artificial
  Chemically synthesized
auaacuaucuucacaguuu

SEQ ID NO: 30838 - RNA, 19 nt, artificial
  Chemically synthesized
agaaauaugguaaaaucuc

SEQ ID NO: 30839 - RNA, 19 nt, artificial
  Chemically synthesized
ugugaauucacaauugaaa

SEQ ID NO: 30840 - RNA, 19 nt, artificial
  Chemically synthesized
uaguggugauauauuuacu

SEQ ID NO: 30841 - RNA, 19 nt, artificial
  Chemically synthesized
ugauauauuuacucaaguc

SEQ ID NO: 30842 - RNA, 19 nt, artificial
  Chemically synthesized
augacaugucacaaagcua

SEQ ID NO: 30843 - RNA, 19 nt, artificial
  Chemically synthesized
gacauugucauucuugauc

SEQ ID NO: 30844 - RNA, 19 nt, artificial
  Chemically synthesized
ugaauuuucucugcaagag

SEQ ID NO: 30845 - RNA, 19 nt, artificial
  Chemically synthesized
ucuucucagaguuauaaac

SEQ ID NO: 30846 - RNA, 19 nt, artificial
  Chemically synthesized
uaaaaucucuagaauuauc

SEQ ID NO: 30847 - RNA, 19 nt, artificial
  Chemically synthesized
aggugguuccagguaucug

SEQ ID NO: 30848 - RNA, 19 nt, artificial
  Chemically synthesized
uacagaaucauauguuaga

SEQ ID NO: 30849 - RNA, 19 nt, artificial
  Chemically synthesized
cuuaaaucuuagaaacuug

SEQ ID NO: 30850 - RNA, 19 nt, artificial
  Chemically synthesized
auuguauaauaugacacca

SEQ ID NO: 30851 - RNA, 19 nt, artificial
  Chemically synthesized
cugauauuucagcaaaagg

SEQ ID NO: 30852 - RNA, 19 nt, artificial
  Chemically synthesized
cuauuaaguauuuuuuggu

SEQ ID NO: 30853 - RNA, 19 nt, artificial
  Chemically synthesized
uggugagugugcauuccuu

SEQ ID NO: 30854 - RNA, 19 nt, artificial
  Chemically synthesized
aaaaucucuagaauuauca

SEQ ID NO: 30855 - RNA, 19 nt, artificial
  Chemically synthesized
uuuugagaucuuuaaucaa

SEQ ID NO: 30856 - RNA, 19 nt, artificial
  Chemically synthesized
ucacuaguaauguccuuga

SEQ ID NO: 30857 - RNA, 19 nt, artificial
  Chemically synthesized
uucauacuacagaaucaua

SEQ ID NO: 30858 - RNA, 19 nt, artificial
  Chemically synthesized
aguuugaauuuucugaguc

SEQ ID NO: 30859 - RNA, 19 nt, artificial
  Chemically synthesized
auuuaaacguaggauagua

SEQ ID NO: 30860 - RNA, 19 nt, artificial
  Chemically synthesized
auauacucagaacugaauu

SEQ ID NO: 30861 - RNA, 19 nt, artificial
  Chemically synthesized
ucaaauacauauacuuuac

SEQ ID NO: 30862 - RNA, 19 nt, artificial
  Chemically synthesized
cauuauuuaauuacguacu

SEQ ID NO: 30863 - RNA, 19 nt, artificial
  Chemically synthesized
aauuccuaaauccagauga

SEQ ID NO: 30864 - RNA, 19 nt, artificial
  Chemically synthesized
uguucaguaacugauauuu

SEQ ID NO: 30865 - RNA, 19 nt, artificial
  Chemically synthesized
uggauuucauuucugaagu

SEQ ID NO: 30866 - RNA, 19 nt, artificial
  Chemically synthesized
aguaacugauauuucagca

SEQ ID NO: 30867 - RNA, 19 nt, artificial
  Chemically synthesized
ucuagaccaagcuuuggau

SEQ ID NO: 30868 - RNA, 19 nt, artificial
  Chemically synthesized
uguugcuggugagugugca

SEQ ID NO: 30869 - RNA, 19 nt, artificial
  Chemically synthesized
cuagauuuuaaacauccuu

SEQ ID NO: 30870 - RNA, 19 nt, artificial
  Chemically synthesized
ucaaacacuaauugcauau

SEQ ID NO: 30871 - RNA, 19 nt, artificial
  Chemically synthesized
uguauaauaugacaccaau

SEQ ID NO: 30872 - RNA, 19 nt, artificial
  Chemically synthesized
uuggugauauuuccauguu

SEQ ID NO: 30873 - RNA, 19 nt, artificial
  Chemically synthesized
uaagaugagcaccaaggca

SEQ ID NO: 30874 - RNA, 19 nt, artificial
  Chemically synthesized
ucccuuggaguugauguca

SEQ ID NO: 30875 - RNA, 19 nt, artificial
  Chemically synthesized
acacugauuacauucauac

SEQ ID NO: 30876 - RNA, 19 nt, artificial
  Chemically synthesized
augcaggccuuccaaguuc

SEQ ID NO: 30877 - RNA, 19 nt, artificial
  Chemically synthesized
uggugauauauuuacucaa

SEQ ID NO: 30878 - RNA, 19 nt, artificial
  Chemically synthesized
auagcuucuucuauugauu

SEQ ID NO: 30879 - RNA, 19 nt, artificial
  Chemically synthesized
agcauaaucuuaaucuuuc

SEQ ID NO: 30880 - RNA, 19 nt, artificial
  Chemically synthesized
acugauuacauucauacua

SEQ ID NO: 30881 - RNA, 19 nt, artificial
  Chemically synthesized
agaaucuauuuuaucaucu

SEQ ID NO: 30882 - RNA, 19 nt, artificial
  Chemically synthesized
aaucuuuucaaacacuaau

SEQ ID NO: 30883 - RNA, 19 nt, artificial
  Chemically synthesized
uaaauucugcacucaaaua

SEQ ID NO: 30884 - RNA, 19 nt, artificial
  Chemically synthesized
ucauuucugaaguuugaau

SEQ ID NO: 30885 - RNA, 19 nt, artificial
  Chemically synthesized
auauauuuacucaagucaa

SEQ ID NO: 30886 - RNA, 19 nt, artificial
  Chemically synthesized
augauuuuaccauugcuau

SEQ ID NO: 30887 - RNA, 19 nt, artificial
  Chemically synthesized
uacuuucucugagagcagu

SEQ ID NO: 30888 - RNA, 19 nt, artificial
  Chemically synthesized
uauuuaaacguaggauagu

SEQ ID NO: 30889 - RNA, 19 nt, artificial
  Chemically synthesized
agcaguugaacuuucuguu

SEQ ID NO: 30890 - RNA, 19 nt, artificial
  Chemically synthesized
aagaugagcaccaaggcaa

SEQ ID NO: 30891 - RNA, 19 nt, artificial
  Chemically synthesized
uacuaacauacacugauua

SEQ ID NO: 30892 - RNA, 19 nt, artificial
  Chemically synthesized
uagaauuucuaagggcagu

SEQ ID NO: 30893 - RNA, 19 nt, artificial
  Chemically synthesized
cuccuauuuggguacuuag

SEQ ID NO: 30894 - RNA, 19 nt, artificial
  Chemically synthesized
uucaaacacuaauugcaua

SEQ ID NO: 30895 - RNA, 19 nt, artificial
  Chemically synthesized
aacaaaguuuagaaauaug

SEQ ID NO: 30896 - RNA, 19 nt, artificial
  Chemically synthesized
uaacagucuuccucaauuc

SEQ ID NO: 30897 - RNA, 19 nt, artificial
  Chemically synthesized
aaagauauuuaaacguagg

SEQ ID NO: 30898 - RNA, 19 nt, artificial
  Chemically synthesized
ucagcaaaaggucauagcu

SEQ ID NO: 30899 - RNA, 19 nt, artificial
  Chemically synthesized
cuucaguuuauaacuaucu

SEQ ID NO: 30900 - RNA, 19 nt, artificial
  Chemically synthesized
uauuuacucaagucaacau

SEQ ID NO: 30901 - RNA, 19 nt, artificial
  Chemically synthesized
ucuugcgcgagaucagaga

SEQ ID NO: 30902 - RNA, 19 nt, artificial
  Chemically synthesized
caguuuauaacuaucuuca

SEQ ID NO: 30903 - RNA, 19 nt, artificial
  Chemically synthesized
cugaauuuguuguuuuuca

SEQ ID NO: 30904 - RNA, 19 nt, artificial
  Chemically synthesized
uggugauauuuccauguuu

SEQ ID NO: 30905 - RNA, 19 nt, artificial
  Chemically synthesized
ugcauuccuugaugauucc

SEQ ID NO: 30906 - RNA, 19 nt, artificial
  Chemically synthesized
uuucccaacuagauuuuaa

SEQ ID NO: 30907 - RNA, 19 nt, artificial
  Chemically synthesized
ucuuucuuuccaugaaguu

SEQ ID NO: 30908 - RNA, 19 nt, artificial
  Chemically synthesized
auaaaauguacccaguaaa

SEQ ID NO: 30909 - RNA, 19 nt, artificial
  Chemically synthesized
uggauagacauuuguacua

SEQ ID NO: 30910 - RNA, 19 nt, artificial
  Chemically synthesized
ugaugucagucacuugggc

SEQ ID NO: 30911 - RNA, 19 nt, artificial
  Chemically synthesized
aguugaugucagucacuug

SEQ ID NO: 30912 - RNA, 19 nt, artificial
  Chemically synthesized
cguacuuuuaccuauauuu

SEQ ID NO: 30913 - RNA, 19 nt, artificial
  Chemically synthesized
ccuuauuuaaauucugcac

SEQ ID NO: 30914 - RNA, 19 nt, artificial
  Chemically synthesized
ucuauuuuaucaucuuuga

SEQ ID NO: 30915 - RNA, 19 nt, artificial
  Chemically synthesized
ugagugugcauuccuugau

SEQ ID NO: 30916 - RNA, 19 nt, artificial
  Chemically synthesized
uuauaacuaucuucacagu

SEQ ID NO: 30917 - RNA, 19 nt, artificial
  Chemically synthesized
uuuggacgauaaucuagca

SEQ ID NO: 30918 - RNA, 19 nt, artificial
  Chemically synthesized
ucuuugagguagagccuua

SEQ ID NO: 30919 - RNA, 19 nt, artificial
  Chemically synthesized
ugaugauuuuaccauugcu

SEQ ID NO: 30920 - RNA, 19 nt, artificial
  Chemically synthesized
auaauaugacaccaauaaa

SEQ ID NO: 30921 - RNA, 19 nt, artificial
  Chemically synthesized
aauaguggugauauauuua

SEQ ID NO: 30922 - RNA, 19 nt, artificial
  Chemically synthesized
acaguuuacauuuacagaa

SEQ ID NO: 30923 - RNA, 19 nt, artificial
  Chemically synthesized
uucccaacuagauuuuaaa

SEQ ID NO: 30924 - RNA, 19 nt, artificial
  Chemically synthesized
guauuuuuuggugauauuu

SEQ ID NO: 30925 - RNA, 19 nt, artificial
  Chemically synthesized
aauaugguaaaaucucuag

SEQ ID NO: 30926 - RNA, 19 nt, artificial
  Chemically synthesized
cucuagaccaagcuuugga

SEQ ID NO: 30927 - RNA, 19 nt, artificial
  Chemically synthesized
ucacaauugaaauauugua

SEQ ID NO: 30928 - RNA, 19 nt, artificial
  Chemically synthesized
ccauugauucagcaacuug

SEQ ID NO: 30929 - RNA, 19 nt, artificial
  Chemically synthesized
ucucuagaauuaucagagg

SEQ ID NO: 30930 - RNA, 19 nt, artificial
  Chemically synthesized
aaaccaagcaguauuuaca

SEQ ID NO: 30931 - RNA, 19 nt, artificial
  Chemically synthesized
cugauuacauucauacuac

SEQ ID NO: 30932 - RNA, 19 nt, artificial
  Chemically synthesized
gauauuucagcaaaagguc

SEQ ID NO: 30933 - RNA, 19 nt, artificial
  Chemically synthesized
acuuucucugagagcaguu

SEQ ID NO: 30934 - RNA, 19 nt, artificial
  Chemically synthesized
auacacuccuauuugggua

SEQ ID NO: 30935 - RNA, 19 nt, artificial
  Chemically synthesized
aaauaugguaaaaucucua

SEQ ID NO: 30936 - RNA, 19 nt, artificial
  Chemically synthesized
caguaacugauauuucagc

SEQ ID NO: 30937 - RNA, 19 nt, artificial
  Chemically synthesized
gaaguagguaguuuugagc

SEQ ID NO: 30938 - RNA, 19 nt, artificial
  Chemically synthesized
aaaaaaauccuccauaaau

SEQ ID NO: 30939 - RNA, 19 nt, artificial
  Chemically synthesized
agaguuauaaacaaaguuu

SEQ ID NO: 30940 - RNA, 19 nt, artificial
  Chemically synthesized
aaguauuuuuuggugauau

SEQ ID NO: 30941 - RNA, 19 nt, artificial
  Chemically synthesized
uaauacaaacuuucaaaga

SEQ ID NO: 30942 - RNA, 19 nt, artificial
  Chemically synthesized
gucacuugggcauuaacac

SEQ ID NO: 30943 - RNA, 19 nt, artificial
  Chemically synthesized
auccuuggaggcagaauca

SEQ ID NO: 30944 - RNA, 19 nt, artificial
  Chemically synthesized
cuggugagugugcauuccu

SEQ ID NO: 30945 - RNA, 19 nt, artificial
  Chemically synthesized
aaguuuagaaauaugguaa

SEQ ID NO: 30946 - RNA, 19 nt, artificial
  Chemically synthesized
cauuccuugaugauuccau

SEQ ID NO: 30947 - RNA, 19 nt, artificial
  Chemically synthesized
aucuuaaaucuuagaaacu

SEQ ID NO: 30948 - RNA, 19 nt, artificial
  Chemically synthesized
agguaauuuagaggcaaag

SEQ ID NO: 30949 - RNA, 19 nt, artificial
  Chemically synthesized
uaaauaugaucuucucaga

SEQ ID NO: 30950 - RNA, 19 nt, artificial
  Chemically synthesized
ccuauuuggguacuuagca

SEQ ID NO: 30951 - RNA, 19 nt, artificial
  Chemically synthesized
cgauaaucuagcaacagac

SEQ ID NO: 30952 - RNA, 19 nt, artificial
  Chemically synthesized
auggguucaugacauguca

SEQ ID NO: 30953 - RNA, 19 nt, artificial
  Chemically synthesized
aaucucuagaauuaucaga

SEQ ID NO: 30954 - RNA, 19 nt, artificial
  Chemically synthesized
auucauacuacagaaucau

SEQ ID NO: 30955 - RNA, 19 nt, artificial
  Chemically synthesized
cucaaauacauauacuuua

SEQ ID NO: 30956 - RNA, 19 nt, artificial
  Chemically synthesized
cuuucaaagauauuuaaac

SEQ ID NO: 30957 - RNA, 19 nt, artificial
  Chemically synthesized
acucaaauacauauacuuu

SEQ ID NO: 30958 - RNA, 19 nt, artificial
  Chemically synthesized
aagaaucuauuuuaucauc

SEQ ID NO: 30959 - RNA, 19 nt, artificial
  Chemically synthesized
aaaggucauagcuucuucu

SEQ ID NO: 30960 - RNA, 19 nt, artificial
  Chemically synthesized
gucauucuugaucucaucu

SEQ ID NO: 30961 - RNA, 19 nt, artificial
  Chemically synthesized
acaugggacauuauugaac

SEQ ID NO: 30962 - RNA, 19 nt, artificial
  Chemically synthesized
acuuuacauaaauaugauc

SEQ ID NO: 30963 - RNA, 19 nt, artificial
  Chemically synthesized
uggguucaugacaugucac

SEQ ID NO: 30964 - RNA, 19 nt, artificial
  Chemically synthesized
aauguuuucuaugugaauu

SEQ ID NO: 30965 - RNA, 19 nt, artificial
  Chemically synthesized
agcuauuaagaaucuuuuc

SEQ ID NO: 30966 - RNA, 19 nt, artificial
  Chemically synthesized
cuucuuucuuuccaugaag

SEQ ID NO: 30967 - RNA, 19 nt, artificial
  Chemically synthesized
auuuacucuugaugaaguu

SEQ ID NO: 30968 - RNA, 19 nt, artificial
  Chemically synthesized
uuuuaccauugcuauguau

SEQ ID NO: 30969 - RNA, 19 nt, artificial
  Chemically synthesized
aguugaacuuucuguucug

SEQ ID NO: 30970 - RNA, 19 nt, artificial
  Chemically synthesized
cuauugauucauagagugg

SEQ ID NO: 30971 - RNA, 19 nt, artificial
  Chemically synthesized
uucucagaguuauaaacaa

SEQ ID NO: 30972 - RNA, 19 nt, artificial
  Chemically synthesized
guaaggagaaucuuaaauc

SEQ ID NO: 30973 - RNA, 19 nt, artificial
  Chemically synthesized
ugcaaacauggguucauga

SEQ ID NO: 30974 - RNA, 19 nt, artificial
  Chemically synthesized
auacuacagaaucauaugu

SEQ ID NO: 30975 - RNA, 19 nt, artificial
  Chemically synthesized
uaauugcauauacucagaa

SEQ ID NO: 30976 - RNA, 19 nt, artificial
  Chemically synthesized
uaguaguaaggagaaucuu

SEQ ID NO: 30977 - RNA, 19 nt, artificial
  Chemically synthesized
ucuugccuuuugguggacu

SEQ ID NO: 30978 - RNA, 19 nt, artificial
  Chemically synthesized
ugguuccagguaucugcuu

SEQ ID NO: 30979 - RNA, 19 nt, artificial
  Chemically synthesized
augauaaaauguacccagu

SEQ ID NO: 30980 - RNA, 19 nt, artificial
  Chemically synthesized
cuagaauuucuaagggcag

SEQ ID NO: 30981 - RNA, 19 nt, artificial
  Chemically synthesized
cuauuaagaaucuuuucaa

SEQ ID NO: 30982 - RNA, 19 nt, artificial
  Chemically synthesized
ggugagugugcauuccuug

SEQ ID NO: 30983 - RNA, 19 nt, artificial
  Chemically synthesized
aacuuucuguucugcugug

SEQ ID NO: 30984 - RNA, 19 nt, artificial
  Chemically synthesized
ugcacuugguguugcuggu

SEQ ID NO: 30985 - RNA, 19 nt, artificial
  Chemically synthesized
gaaguuugaauuuucugag

SEQ ID NO: 30986 - RNA, 19 nt, artificial
  Chemically synthesized
guuuauaacuaucuucaca

SEQ ID NO: 30987 - RNA, 19 nt, artificial
  Chemically synthesized
aaaaauccuccauaaaugg

SEQ ID NO: 30988 - RNA, 19 nt, artificial
  Chemically synthesized
uaacuaucuucacaguuua

SEQ ID NO: 30989 - RNA, 19 nt, artificial
  Chemically synthesized
aaaugauaaaauguaccca

SEQ ID NO: 30990 - RNA, 19 nt, artificial
  Chemically synthesized
caugucacaaagcuacuuu

SEQ ID NO: 30991 - RNA, 19 nt, artificial
  Chemically synthesized
uuaccauugcuauguauaa

SEQ ID NO: 30992 - RNA, 19 nt, artificial
  Chemically synthesized
uaaguauuuuuuggugaua

SEQ ID NO: 30993 - RNA, 19 nt, artificial
  Chemically synthesized
uagcaacagacguaagaac

SEQ ID NO: 30994 - RNA, 19 nt, artificial
  Chemically synthesized
gcuauuaagaaucuuuuca

SEQ ID NO: 30995 - RNA, 19 nt, artificial
  Chemically synthesized
guacuuuuaccuauauuuu

SEQ ID NO: 30996 - RNA, 19 nt, artificial
  Chemically synthesized
uccauugauucagcaacuu

SEQ ID NO: 30997 - RNA, 19 nt, artificial
  Chemically synthesized
ugauugcaaacauggguuc

SEQ ID NO: 30998 - RNA, 19 nt, artificial
  Chemically synthesized
acauaaauaugaucuucuc

SEQ ID NO: 30999 - RNA, 19 nt, artificial
  Chemically synthesized
uaacugauauuucagcaaa

SEQ ID NO: 31000 - RNA, 19 nt, artificial
  Chemically synthesized
ccuauauuuuauaauucca

SEQ ID NO: 31001 - RNA, 19 nt, artificial
  Chemically synthesized
ucuucuauugauucauaga

SEQ ID NO: 31002 - RNA, 19 nt, artificial
  Chemically synthesized
cucuucagcgcuaauaaau

SEQ ID NO: 31003 - RNA, 19 nt, artificial
  Chemically synthesized
agaaucuuaaaucuuagaa

SEQ ID NO: 31004 - RNA, 19 nt, artificial
  Chemically synthesized
aauuacgaagcaguugaac

SEQ ID NO: 31005 - RNA, 19 nt, artificial
  Chemically synthesized
ucagagacgagcucacgaa

SEQ ID NO: 31006 - RNA, 19 nt, artificial
  Chemically synthesized
agaaucuuuucaaacacua

SEQ ID NO: 31007 - RNA, 19 nt, artificial
  Chemically synthesized
acucuagaccaagcuuugg

SEQ ID NO: 31008 - RNA, 19 nt, artificial
  Chemically synthesized
uaagaaccagagguaggag

SEQ ID NO: 31009 - RNA, 19 nt, artificial
  Chemically synthesized
uggaggcagaaucaugaga

SEQ ID NO: 31010 - RNA, 19 nt, artificial
  Chemically synthesized
uaucugcuucaguuuauaa

SEQ ID NO: 31011 - RNA, 19 nt, artificial
  Chemically synthesized
auaugguaaaaucucuaga

SEQ ID NO: 31012 - RNA, 19 nt, artificial
  Chemically synthesized
ugucagucacuugggcauu

SEQ ID NO: 31013 - RNA, 19 nt, artificial
  Chemically synthesized
cuaagggcagucuugccuu

SEQ ID NO: 31014 - RNA, 19 nt, artificial
  Chemically synthesized
gacuauuaaguauuuuuug

SEQ ID NO: 31015 - RNA, 19 nt, artificial
  Chemically synthesized
auuccaaucccuuggaguu

SEQ ID NO: 31016 - RNA, 19 nt, artificial
  Chemically synthesized
uauacucagaacugaauuu

SEQ ID NO: 31017 - RNA, 19 nt, artificial
  Chemically synthesized
guuuucuaugugaauucac

SEQ ID NO: 31018 - RNA, 19 nt, artificial
  Chemically synthesized
agcuacuuucucugagagc

SEQ ID NO: 31019 - RNA, 19 nt, artificial
  Chemically synthesized
uccucugcauacacuccua

SEQ ID NO: 31020 - RNA, 19 nt, artificial
  Chemically synthesized
agaauuaucagagguaauu

SEQ ID NO: 31021 - RNA, 19 nt, artificial
  Chemically synthesized
cauuucugaaguuugaauu

SEQ ID NO: 31022 - RNA, 19 nt, artificial
  Chemically synthesized
aauuccaaucccuuggagu

SEQ ID NO: 31023 - RNA, 19 nt, artificial
  Chemically synthesized
cauuaagaugagcaccaag

SEQ ID NO: 31024 - RNA, 19 nt, artificial
  Chemically synthesized
agccuguggauagacauuu

SEQ ID NO: 31025 - RNA, 19 nt, artificial
  Chemically synthesized
cugcauuuacucuugauga

SEQ ID NO: 31026 - RNA, 19 nt, artificial
  Chemically synthesized
agcuuuggauuucauuucu

SEQ ID NO: 31027 - RNA, 19 nt, artificial
  Chemically synthesized
uacacugauuacauucaua

SEQ ID NO: 31028 - RNA, 19 nt, artificial
  Chemically synthesized
cuacuuucucugagagcag

SEQ ID NO: 31029 - RNA, 19 nt, artificial
  Chemically synthesized
uaugugaauucacaauuga

SEQ ID NO: 31030 - RNA, 19 nt, artificial
  Chemically synthesized
aaaguuuagaaauauggua

SEQ ID NO: 31031 - RNA, 19 nt, artificial
  Chemically synthesized
caggcuagaauuucuaagg

SEQ ID NO: 31032 - RNA, 19 nt, artificial
  Chemically synthesized
guuauaaacaaaguuuaga

SEQ ID NO: 31033 - RNA, 19 nt, artificial
  Chemically synthesized
cuucacaguuuacauuuac

SEQ ID NO: 31034 - RNA, 19 nt, artificial
  Chemically synthesized
uccagcaauaguggugaua

SEQ ID NO: 31035 - RNA, 19 nt, artificial
  Chemically synthesized
aaucuuaaaucuuagaaac

SEQ ID NO: 31036 - RNA, 19 nt, artificial
  Chemically synthesized
aauuaucagagguaauuua

SEQ ID NO: 31037 - RNA, 19 nt, artificial
  Chemically synthesized
accaauaaacugugcaaag

SEQ ID NO: 31038 - RNA, 19 nt, artificial
  Chemically synthesized
cauaaauaugaucuucuca

SEQ ID NO: 31039 - RNA, 19 nt, artificial
  Chemically synthesized
ggcauuaacacuuuuggac

SEQ ID NO: 31040 - RNA, 19 nt, artificial
  Chemically synthesized
aguuuauaacuaucuucac

SEQ ID NO: 31041 - RNA, 19 nt, artificial
  Chemically synthesized
uagaauuaucagagguaau

SEQ ID NO: 31042 - RNA, 19 nt, artificial
  Chemically synthesized
aaguuuguuuucccaacua

SEQ ID NO: 31043 - RNA, 19 nt, artificial
  Chemically synthesized
gucauagcuucuucuauug

SEQ ID NO: 31044 - RNA, 19 nt, artificial
  Chemically synthesized
gagggcuccauugauucag

SEQ ID NO: 31045 - RNA, 19 nt, artificial
  Chemically synthesized
uagccuguggauagacauu

SEQ ID NO: 31046 - RNA, 19 nt, artificial
  Chemically synthesized
uaaggagaaucuuaaaucu

SEQ ID NO: 31047 - RNA, 19 nt, artificial
  Chemically synthesized
agucacucguaaaccgcuu

SEQ ID NO: 31048 - RNA, 19 nt, artificial
  Chemically synthesized
ugguaaaaucucuagaauu

SEQ ID NO: 31049 - RNA, 19 nt, artificial
  Chemically synthesized
uaauguuuucuaugugaau

SEQ ID NO: 31050 - RNA, 19 nt, artificial
  Chemically synthesized
ugcauauacucagaacuga

SEQ ID NO: 31051 - RNA, 19 nt, artificial
  Chemically synthesized
auuucugaaguuugaauuu

SEQ ID NO: 31052 - RNA, 19 nt, artificial
  Chemically synthesized
cauaaauggaaguucuuua

SEQ ID NO: 31053 - RNA, 19 nt, artificial
  Chemically synthesized
caaagauauuuaaacguag

SEQ ID NO: 31054 - RNA, 19 nt, artificial
  Chemically synthesized
gagagcaguuaguaucucc

SEQ ID NO: 31055 - RNA, 19 nt, artificial
  Chemically synthesized
gauaaucuagcaacagacg

SEQ ID NO: 31056 - RNA, 19 nt, artificial
  Chemically synthesized
aaacugugcaaaggucuuu

SEQ ID NO: 31057 - RNA, 19 nt, artificial
  Chemically synthesized
cccagaagcgucuuugaac

SEQ ID NO: 31058 - RNA, 19 nt, artificial
  Chemically synthesized
uacauucauacuacagaau

SEQ ID NO: 31059 - RNA, 19 nt, artificial
  Chemically synthesized
cauggguucaugacauguc

SEQ ID NO: 31060 - RNA, 19 nt, artificial
  Chemically synthesized
aauugcauauacucagaac

SEQ ID NO: 31061 - RNA, 19 nt, artificial
  Chemically synthesized
acuuuuggacgauaaucua

SEQ ID NO: 31062 - RNA, 19 nt, artificial
  Chemically synthesized
agcaccaaggcaaaaaugg

SEQ ID NO: 31063 - RNA, 19 nt, artificial
  Chemically synthesized
gugauauuuccauguuugg

SEQ ID NO: 31064 - RNA, 19 nt, artificial
  Chemically synthesized
aagaaucuuuucaaacacu

SEQ ID NO: 31065 - RNA, 19 nt, artificial
  Chemically synthesized
acuagauuuuaaacauccu

SEQ ID NO: 31066 - RNA, 19 nt, artificial
  Chemically synthesized
gcuccauugauucagcaac

SEQ ID NO: 31067 - RNA, 19 nt, artificial
  Chemically synthesized
caguugaacuuucuguucu

SEQ ID NO: 31068 - RNA, 19 nt, artificial
  Chemically synthesized
ugagguagagccuuauuua

SEQ ID NO: 31069 - RNA, 19 nt, artificial
  Chemically synthesized
ccuugaugauuccauguuc

SEQ ID NO: 31070 - RNA, 19 nt, artificial
  Chemically synthesized
ugcuucaguuuauaacuau

SEQ ID NO: 31071 - RNA, 19 nt, artificial
  Chemically synthesized
cauugcuauguauaagcug

SEQ ID NO: 31072 - RNA, 19 nt, artificial
  Chemically synthesized
uccuuggaggcagaaucau

SEQ ID NO: 31073 - RNA, 19 nt, artificial
  Chemically synthesized
aagauauuuaaacguagga

SEQ ID NO: 31074 - RNA, 19 nt, artificial
  Chemically synthesized
ccuuuaacuugacuuagug

SEQ ID NO: 31075 - RNA, 19 nt, artificial
  Chemically synthesized
gauuacauucauacuacag

SEQ ID NO: 31076 - RNA, 19 nt, artificial
  Chemically synthesized
agauauuuaaacguaggau

SEQ ID NO: 31077 - RNA, 19 nt, artificial
  Chemically synthesized
ggugauauuuccauguuug

SEQ ID NO: 31078 - RNA, 19 nt, artificial
  Chemically synthesized
gucauacgcuucuuucuuu

SEQ ID NO: 31079 - RNA, 19 nt, artificial
  Chemically synthesized
gaugauuuuaccauugcua

SEQ ID NO: 31080 - RNA, 19 nt, artificial
  Chemically synthesized
auuaacacuuuuggacgau

SEQ ID NO: 31081 - RNA, 19 nt, artificial
  Chemically synthesized
gauauauuuacucaaguca

SEQ ID NO: 31082 - RNA, 19 nt, artificial
  Chemically synthesized
cagcuauuaagaaucuuuu

SEQ ID NO: 31083 - RNA, 19 nt, artificial
  Chemically synthesized
cuuuaggugguuccaggua

SEQ ID NO: 31084 - RNA, 19 nt, artificial
  Chemically synthesized
aauuuucucugcaagagua

SEQ ID NO: 31085 - RNA, 19 nt, artificial
  Chemically synthesized
uaaaauguacccaguaaaa

SEQ ID NO: 31086 - RNA, 19 nt, artificial
  Chemically synthesized
acauuuguacuaacauaca

SEQ ID NO: 31087 - RNA, 19 nt, artificial
  Chemically synthesized
ucucugcaagaguacaaag

SEQ ID NO: 31088 - RNA, 19 nt, artificial
  Chemically synthesized
acguacuuuuaccuauauu

SEQ ID NO: 31089 - RNA, 19 nt, artificial
  Chemically synthesized
agacguaagaaccagaggu

SEQ ID NO: 31090 - RNA, 19 nt, artificial
  Chemically synthesized
uaguaauguccuugaggau

SEQ ID NO: 31091 - RNA, 21 nt, artificial
  Chemically synthesized
cauggaaauaucaccaaaaaa

SEQ ID NO: 31092 - RNA, 21 nt, artificial
  Chemically synthesized
caaaauagaugagaucaagaa

SEQ ID NO: 31093 - RNA, 21 nt, artificial
  Chemically synthesized
ugaagauaguuauaaacugaa

SEQ ID NO: 31094 - RNA, 21 nt, artificial
  Chemically synthesized
uagguaaaaguacguaauuaa

SEQ ID NO: 31095 - RNA, 21 nt, artificial
  Chemically synthesized
guauuugagugcagaauuuaa

SEQ ID NO: 31096 - RNA, 21 nt, artificial
  Chemically synthesized
gauucuguaguaugaauguaa

SEQ ID NO: 31097 - RNA, 21 nt, artificial
  Chemically synthesized
gguaaaaguacguaauuaaau

SEQ ID NO: 31098 - RNA, 21 nt, artificial
  Chemically synthesized
agguaaaaguacguaauuaaa

SEQ ID NO: 31099 - RNA, 21 nt, artificial
  Chemically synthesized
aauucaaacuucagaaaugaa

SEQ ID NO: 31100 - RNA, 21 nt, artificial
  Chemically synthesized
acuucagaaaugaaauccaaa

SEQ ID NO: 31101 - RNA, 21 nt, artificial
  Chemically synthesized
caauugugaauucacauagaa

SEQ ID NO: 31102 - RNA, 21 nt, artificial
  Chemically synthesized
gagugaaaaacaacaaauuca

SEQ ID NO: 31103 - RNA, 21 nt, artificial
  Chemically synthesized
uagugacucagaaaauucaaa

SEQ ID NO: 31104 - RNA, 21 nt, artificial
  Chemically synthesized
aaaucuaguugggaaaacaaa

SEQ ID NO: 31105 - RNA, 21 nt, artificial
  Chemically synthesized
caaacuucaucaagaguaaau

SEQ ID NO: 31106 - RNA, 21 nt, artificial
  Chemically synthesized
guuuauuggugucauauuaua

SEQ ID NO: 31107 - RNA, 21 nt, artificial
  Chemically synthesized
cauugauuaaagaucucaaaa

SEQ ID NO: 31108 - RNA, 21 nt, artificial
  Chemically synthesized
gcagauaccuggaaccaccua

SEQ ID NO: 31109 - RNA, 21 nt, artificial
  Chemically synthesized
cagaaaauucaaacuucagaa

SEQ ID NO: 31110 - RNA, 21 nt, artificial
  Chemically synthesized
cuggguacauuuuaucauuua

SEQ ID NO: 31111 - RNA, 21 nt, artificial
  Chemically synthesized
aauugugaauucacauagaaa

SEQ ID NO: 31112 - RNA, 21 nt, artificial
  Chemically synthesized
aguuuauuggugucauauuau

SEQ ID NO: 31113 - RNA, 21 nt, artificial
  Chemically synthesized
caaggauguuuaaaaucuagu

SEQ ID NO: 31114 - RNA, 21 nt, artificial
  Chemically synthesized
cuacguuuaaauaucuuugaa

SEQ ID NO: 31115 - RNA, 21 nt, artificial
  Chemically synthesized
uggaaauaucaccaaaaaaua

SEQ ID NO: 31116 - RNA, 21 nt, artificial
  Chemically synthesized
gagauuuuaccauauuucuaa

SEQ ID NO: 31117 - RNA, 21 nt, artificial
  Chemically synthesized
gagaagaucauauuuauguaa

SEQ ID NO: 31118 - RNA, 21 nt, artificial
  Chemically synthesized
caccaaaaaauacuuaauagu

SEQ ID NO: 31119 - RNA, 21 nt, artificial
  Chemically synthesized
caaaaaauacuuaauagucca

SEQ ID NO: 31120 - RNA, 21 nt, artificial
  Chemically synthesized
cuacuauccuacguuuaaaua

SEQ ID NO: 31121 - RNA, 21 nt, artificial
  Chemically synthesized
gaauguaaucaguguauguua

SEQ ID NO: 31122 - RNA, 21 nt, artificial
  Chemically synthesized
cucuaaauuaccucugauaau

SEQ ID NO: 31123 - RNA, 21 nt, artificial
  Chemically synthesized
aguguuugaaaagauucuuaa

SEQ ID NO: 31124 - RNA, 21 nt, artificial
  Chemically synthesized
uauuugagugcagaauuuaaa

SEQ ID NO: 31125 - RNA, 21 nt, artificial
  Chemically synthesized
acauggaaauaucaccaaaaa

SEQ ID NO: 31126 - RNA, 21 nt, artificial
  Chemically synthesized
aacugugaagauaguuauaaa

SEQ ID NO: 31127 - RNA, 21 nt, artificial
  Chemically synthesized
ucuguaaauguaaacugugaa

SEQ ID NO: 31128 - RNA, 21 nt, artificial
  Chemically synthesized
guauguuaguacaaaugucua

SEQ ID NO: 31129 - RNA, 21 nt, artificial
  Chemically synthesized
ugaguaaauauaucaccacua

SEQ ID NO: 31130 - RNA, 21 nt, artificial
  Chemically synthesized
agaaaauucaaacuucagaaa

SEQ ID NO: 31131 - RNA, 21 nt, artificial
  Chemically synthesized
cucuaugaaucaauagaagaa

SEQ ID NO: 31132 - RNA, 21 nt, artificial
  Chemically synthesized
gcaauuaguguuugaaaagau

SEQ ID NO: 31133 - RNA, 21 nt, artificial
  Chemically synthesized
aacauggaaauaucaccaaaa

SEQ ID NO: 31134 - RNA, 21 nt, artificial
  Chemically synthesized
ccaaguuucuaagauuuaaga

SEQ ID NO: 31135 - RNA, 21 nt, artificial
  Chemically synthesized
caguuuauuggugucauauua

SEQ ID NO: 31136 - RNA, 21 nt, artificial
  Chemically synthesized
uguauuugagugcagaauuua

SEQ ID NO: 31137 - RNA, 21 nt, artificial
  Chemically synthesized
aaaaucuaguugggaaaacaa

SEQ ID NO: 31138 - RNA, 21 nt, artificial
  Chemically synthesized
aaacaaacuucaucaagagua

SEQ ID NO: 31139 - RNA, 21 nt, artificial
  Chemically synthesized
guauaugcaauuaguguuuga

SEQ ID NO: 31140 - RNA, 21 nt, artificial
  Chemically synthesized
aaucaguguauguuaguacaa

SEQ ID NO: 31141 - RNA, 21 nt, artificial
  Chemically synthesized
caaauucaguucugaguauau

SEQ ID NO: 31142 - RNA, 21 nt, artificial
  Chemically synthesized
ucaauaaugucccauguaaaa

SEQ ID NO: 31143 - RNA, 21 nt, artificial
  Chemically synthesized
acucuaugaaucaauagaaga

SEQ ID NO: 31144 - RNA, 21 nt, artificial
  Chemically synthesized
gaaauaucaccaaaaaauacu

SEQ ID NO: 31145 - RNA, 21 nt, artificial
  Chemically synthesized
uuacuacuauccuacguuuaa

SEQ ID NO: 31146 - RNA, 21 nt, artificial
  Chemically synthesized
cguuuaaauaucuuugaaagu

SEQ ID NO: 31147 - RNA, 21 nt, artificial
  Chemically synthesized
aaauuaccucugauaauucua

SEQ ID NO: 31148 - RNA, 21 nt, artificial
  Chemically synthesized
aauagaugagaucaagaauga

SEQ ID NO: 31149 - RNA, 21 nt, artificial
  Chemically synthesized
caaucaaagaugauaaaauag

SEQ ID NO: 31150 - RNA, 21 nt, artificial
  Chemically synthesized
cacauugauuaaagaucucaa

SEQ ID NO: 31151 - RNA, 21 nt, artificial
  Chemically synthesized
uugagugcagaauuuaaauaa

SEQ ID NO: 31152 - RNA, 21 nt, artificial
  Chemically synthesized
auucaaacuucagaaaugaaa

SEQ ID NO: 31153 - RNA, 21 nt, artificial
  Chemically synthesized
ggguacauuuuaucauuuauu

SEQ ID NO: 31154 - RNA, 21 nt, artificial
  Chemically synthesized
gauuuaagauucuccuuacua

SEQ ID NO: 31155 - RNA, 21 nt, artificial
  Chemically synthesized
cauaugauucuguaguaugaa

SEQ ID NO: 31156 - RNA, 21 nt, artificial
  Chemically synthesized
guuuaaaaucuaguugggaaa

SEQ ID NO: 31157 - RNA, 21 nt, artificial
  Chemically synthesized
agggaagcgguuuacgaguga

SEQ ID NO: 31158 - RNA, 21 nt, artificial
  Chemically synthesized
cuuauacauagcaaugguaaa

SEQ ID NO: 31159 - RNA, 21 nt, artificial
  Chemically synthesized
ucagaaaauucaaacuucaga

SEQ ID NO: 31160 - RNA, 21 nt, artificial
  Chemically synthesized
auggaaauaucaccaaaaaau

SEQ ID NO: 31161 - RNA, 21 nt, artificial
  Chemically synthesized
acuacuauccuacguuuaaau

SEQ ID NO: 31162 - RNA, 21 nt, artificial
  Chemically synthesized
gaaaauucaaacuucagaaau

SEQ ID NO: 31163 - RNA, 21 nt, artificial
  Chemically synthesized
aauacuuaauaguccaccaaa

SEQ ID NO: 31164 - RNA, 21 nt, artificial
  Chemically synthesized
caucuaacauaugauucugua

SEQ ID NO: 31165 - RNA, 21 nt, artificial
  Chemically synthesized
ggugucauauuauacaauauu

SEQ ID NO: 31166 - RNA, 21 nt, artificial
  Chemically synthesized
uguuuauaacucugagaagau

SEQ ID NO: 31167 - RNA, 21 nt, artificial
  Chemically synthesized
auguaaucaguguauguuagu

SEQ ID NO: 31168 - RNA, 21 nt, artificial
  Chemically synthesized
uauauguauuugagugcagaa

SEQ ID NO: 31169 - RNA, 21 nt, artificial
  Chemically synthesized
ccaacauauuuguagauuuuu

SEQ ID NO: 31170 - RNA, 21 nt, artificial
  Chemically synthesized
acaaacuucaucaagaguaaa

SEQ ID NO: 31171 - RNA, 21 nt, artificial
  Chemically synthesized
uggugucauauuauacaauau

SEQ ID NO: 31172 - RNA, 21 nt, artificial
  Chemically synthesized
ggaaauaucaccaaaaaauac

SEQ ID NO: 31173 - RNA, 21 nt, artificial
  Chemically synthesized
guguuugaaaagauucuuaau

SEQ ID NO: 31174 - RNA, 21 nt, artificial
  Chemically synthesized
caauuaguguuugaaaagauu

SEQ ID NO: 31175 - RNA, 21 nt, artificial
  Chemically synthesized
aguuauaaacugaagcagaua

SEQ ID NO: 31176 - RNA, 21 nt, artificial
  Chemically synthesized
aaacauggaaauaucaccaaa

SEQ ID NO: 31177 - RNA, 21 nt, artificial
  Chemically synthesized
auacuuaauaguccaccaaaa

SEQ ID NO: 31178 - RNA, 21 nt, artificial
  Chemically synthesized
ucuagagugaaaaacaacaaa

SEQ ID NO: 31179 - RNA, 21 nt, artificial
  Chemically synthesized
gaaaguuuguauuaaauguga

SEQ ID NO: 31180 - RNA, 21 nt, artificial
  Chemically synthesized
aauauagguaaaaguacguaa

SEQ ID NO: 31181 - RNA, 21 nt, artificial
  Chemically synthesized
ccuacguuuaaauaucuuuga

SEQ ID NO: 31182 - RNA, 21 nt, artificial
  Chemically synthesized
gaguaaauauaucaccacuau

SEQ ID NO: 31183 - RNA, 21 nt, artificial
  Chemically synthesized
auuugagugcagaauuuaaau

SEQ ID NO: 31184 - RNA, 21 nt, artificial
  Chemically synthesized
acaguuuauuggugucauauu

SEQ ID NO: 31185 - RNA, 21 nt, artificial
  Chemically synthesized
agagauuuuaccauauuucua

SEQ ID NO: 31186 - RNA, 21 nt, artificial
  Chemically synthesized
cucugagaagaucauauuuau

SEQ ID NO: 31187 - RNA, 21 nt, artificial
  Chemically synthesized
gaggaugaaagauuaagauua

SEQ ID NO: 31188 - RNA, 21 nt, artificial
  Chemically synthesized
augacacuaagucaaguuaaa

SEQ ID NO: 31189 - RNA, 21 nt, artificial
  Chemically synthesized
gaagaucauauuuauguaaag

SEQ ID NO: 31190 - RNA, 21 nt, artificial
  Chemically synthesized
cuagagugaaaaacaacaaau

SEQ ID NO: 31191 - RNA, 21 nt, artificial
  Chemically synthesized
aguaaauauaucaccacuauu

SEQ ID NO: 31192 - RNA, 21 nt, artificial
  Chemically synthesized
agauaccuggaaccaccuaaa

SEQ ID NO: 31193 - RNA, 21 nt, artificial
  Chemically synthesized
agagaaaauucagacuaucau

SEQ ID NO: 31194 - RNA, 21 nt, artificial
  Chemically synthesized
uuugcaaucaaagaugauaaa

SEQ ID NO: 31195 - RNA, 21 nt, artificial
  Chemically synthesized
auguuugcaaucaaagaugau

SEQ ID NO: 31196 - RNA, 21 nt, artificial
  Chemically synthesized
uuaucauuuauuagcgcugaa

SEQ ID NO: 31197 - RNA, 21 nt, artificial
  Chemically synthesized
ggcuguaaauacugcuugguu

SEQ ID NO: 31198 - RNA, 21 nt, artificial
  Chemically synthesized
acucagaaaauucaaacuuca

SEQ ID NO: 31199 - RNA, 21 nt, artificial
  Chemically synthesized
cuuuguuuauaacucugagaa

SEQ ID NO: 31200 - RNA, 21 nt, artificial
  Chemically synthesized
caaguuucuaagauuuaagau

SEQ ID NO: 31201 - RNA, 21 nt, artificial
  Chemically synthesized
ugauuaaagaucucaaaaaag

SEQ ID NO: 31202 - RNA, 21 nt, artificial
  Chemically synthesized
accuaaagaacuuccauuuau

SEQ ID NO: 31203 - RNA, 21 nt, artificial
  Chemically synthesized
gaauucacauagaaaacauua

SEQ ID NO: 31204 - RNA, 21 nt, artificial
  Chemically synthesized
cuaacauaugauucuguagua

SEQ ID NO: 31205 - RNA, 21 nt, artificial
  Chemically synthesized
cuguaaauacugcuugguuuu

SEQ ID NO: 31206 - RNA, 21 nt, artificial
  Chemically synthesized
gcaaucaaagaugauaaaaua

SEQ ID NO: 31207 - RNA, 21 nt, artificial
  Chemically synthesized
aaacuuuguuuauaacucuga

SEQ ID NO: 31208 - RNA, 21 nt, artificial
  Chemically synthesized
aaacugugaagauaguuauaa

SEQ ID NO: 31209 - RNA, 21 nt, artificial
  Chemically synthesized
uguugacuugaguaaauauau

SEQ ID NO: 31210 - RNA, 21 nt, artificial
  Chemically synthesized
gugaagauaguuauaaacuga

SEQ ID NO: 31211 - RNA, 21 nt, artificial
  Chemically synthesized
aacaaacuucaucaagaguaa

SEQ ID NO: 31212 - RNA, 21 nt, artificial
  Chemically synthesized
cugagaagaucauauuuaugu

SEQ ID NO: 31213 - RNA, 21 nt, artificial
  Chemically synthesized
uugcaaucaaagaugauaaaa

SEQ ID NO: 31214 - RNA, 21 nt, artificial
  Chemically synthesized
aaauguaaacugugaagauag

SEQ ID NO: 31215 - RNA, 21 nt, artificial
  Chemically synthesized
guuugcaaucaaagaugauaa

SEQ ID NO: 31216 - RNA, 21 nt, artificial
  Chemically synthesized
cugugaagauaguuauaaacu

SEQ ID NO: 31217 - RNA, 21 nt, artificial
  Chemically synthesized
guaaauguaaacugugaagau

SEQ ID NO: 31218 - RNA, 21 nt, artificial
  Chemically synthesized
ugccuuggugcucaucuuaau

SEQ ID NO: 31219 - RNA, 21 nt, artificial
  Chemically synthesized
uauuggugucauauuauacaa

SEQ ID NO: 31220 - RNA, 21 nt, artificial
  Chemically synthesized
uagcaaugguaaaaucaucau

SEQ ID NO: 31221 - RNA, 21 nt, artificial
  Chemically synthesized
uaaacugugaagauaguuaua

SEQ ID NO: 31222 - RNA, 21 nt, artificial
  Chemically synthesized
uggguacauuuuaucauuuau

SEQ ID NO: 31223 - RNA, 21 nt, artificial
  Chemically synthesized
auaugcaauuaguguuugaaa

SEQ ID NO: 31224 - RNA, 21 nt, artificial
  Chemically synthesized
uucaauaaugucccauguaaa

SEQ ID NO: 31225 - RNA, 21 nt, artificial
  Chemically synthesized
auagguaaaaguacguaauua

SEQ ID NO: 31226 - RNA, 21 nt, artificial
  Chemically synthesized
uguuuaaaaucuaguugggaa

SEQ ID NO: 31227 - RNA, 21 nt, artificial
  Chemically synthesized
uaguguuugaaaagauucuua

SEQ ID NO: 31228 - RNA, 21 nt, artificial
  Chemically synthesized
uaugcaauuaguguuugaaaa

SEQ ID NO: 31229 - RNA, 21 nt, artificial
  Chemically synthesized
uagaugagaucaagaaugaca

SEQ ID NO: 31230 - RNA, 21 nt, artificial
  Chemically synthesized
uugacuugaguaaauauauca

SEQ ID NO: 31231 - RNA, 21 nt, artificial
  Chemically synthesized
agugacugacaucaacuccaa

SEQ ID NO: 31232 - RNA, 21 nt, artificial
  Chemically synthesized
aaauacuuaauaguccaccaa

SEQ ID NO: 31233 - RNA, 21 nt, artificial
  Chemically synthesized
ugagaagaucauauuuaugua

SEQ ID NO: 31234 - RNA, 21 nt, artificial
  Chemically synthesized
aaaauagaugagaucaagaau

SEQ ID NO: 31235 - RNA, 21 nt, artificial
  Chemically synthesized
cagaauuuaaauaaggcucua

SEQ ID NO: 31236 - RNA, 21 nt, artificial
  Chemically synthesized
auuggugucauauuauacaau

SEQ ID NO: 31237 - RNA, 21 nt, artificial
  Chemically synthesized
guaugaauguaaucaguguau

SEQ ID NO: 31238 - RNA, 21 nt, artificial
  Chemically synthesized
agaggaugaaagauuaagauu

SEQ ID NO: 31239 - RNA, 21 nt, artificial
  Chemically synthesized
ucaguguauguuaguacaaau

SEQ ID NO: 31240 - RNA, 21 nt, artificial
  Chemically synthesized
aguguauguuaguacaaaugu

SEQ ID NO: 31241 - RNA, 21 nt, artificial
  Chemically synthesized
uuugagugcagaauuuaaaua

SEQ ID NO: 31242 - RNA, 21 nt, artificial
  Chemically synthesized
aaaauauagguaaaaguacgu

SEQ ID NO: 31243 - RNA, 21 nt, artificial
  Chemically synthesized
ccauuuauggaggauuuuuuu

SEQ ID NO: 31244 - RNA, 21 nt, artificial
  Chemically synthesized
ugcaaucaaagaugauaaaau

SEQ ID NO: 31245 - RNA, 21 nt, artificial
  Chemically synthesized
aaaacaaacuucaucaagagu

SEQ ID NO: 31246 - RNA, 21 nt, artificial
  Chemically synthesized
uacuauccuacguuuaaauau

SEQ ID NO: 31247 - RNA, 21 nt, artificial
  Chemically synthesized
uaguuauaaacugaagcagau

SEQ ID NO: 31248 - RNA, 21 nt, artificial
  Chemically synthesized
uauguuaguacaaaugucuau

SEQ ID NO: 31249 - RNA, 21 nt, artificial
  Chemically synthesized
agaacagaaaguucaacugcu

SEQ ID NO: 31250 - RNA, 21 nt, artificial
  Chemically synthesized
agugagggaagcgguuuacga

SEQ ID NO: 31251 - RNA, 21 nt, artificial
  Chemically synthesized
uacuacuauccuacguuuaaa

SEQ ID NO: 31252 - RNA, 21 nt, artificial
  Chemically synthesized
guuucuaagauuuaagauucu

SEQ ID NO: 31253 - RNA, 21 nt, artificial
  Chemically synthesized
auaugauucuguaguaugaau

SEQ ID NO: 31254 - RNA, 21 nt, artificial
  Chemically synthesized
auugugaauucacauagaaaa

SEQ ID NO: 31255 - RNA, 21 nt, artificial
  Chemically synthesized
acauugauuaaagaucucaaa

SEQ ID NO: 31256 - RNA, 21 nt, artificial
  Chemically synthesized
cucugauaauucuagagauuu

SEQ ID NO: 31257 - RNA, 21 nt, artificial
  Chemically synthesized
uucuguaaauguaaacuguga

SEQ ID NO: 31258 - RNA, 21 nt, artificial
  Chemically synthesized
auggaaucaucaaggaaugca

SEQ ID NO: 31259 - RNA, 21 nt, artificial
  Chemically synthesized
gugaauucacauagaaaacau

SEQ ID NO: 31260 - RNA, 21 nt, artificial
  Chemically synthesized
uuaucguccaaaaguguuaau

SEQ ID NO: 31261 - RNA, 21 nt, artificial
  Chemically synthesized
acucugagaagaucauauuua

SEQ ID NO: 31262 - RNA, 21 nt, artificial
  Chemically synthesized
uauccuacguuuaaauaucuu

SEQ ID NO: 31263 - RNA, 21 nt, artificial
  Chemically synthesized
ccauauuucuaaacuuuguuu

SEQ ID NO: 31264 - RNA, 21 nt, artificial
  Chemically synthesized
guaaaguauauguauuugagu

SEQ ID NO: 31265 - RNA, 21 nt, artificial
  Chemically synthesized
acauagcaaugguaaaaucau

SEQ ID NO: 31266 - RNA, 21 nt, artificial
  Chemically synthesized
cuauccuacguuuaaauaucu

SEQ ID NO: 31267 - RNA, 21 nt, artificial
  Chemically synthesized
cugauaauucuagagauuuua

SEQ ID NO: 31268 - RNA, 21 nt, artificial
  Chemically synthesized
aaaggcaagacugcccuuaga

SEQ ID NO: 31269 - RNA, 21 nt, artificial
  Chemically synthesized
uccaaggauguuuaaaaucua

SEQ ID NO: 31270 - RNA, 21 nt, artificial
  Chemically synthesized
cccaaauaggaguguaugcag

SEQ ID NO: 31271 - RNA, 21 nt, artificial
  Chemically synthesized
ugaaauaucaguuacugaaca

SEQ ID NO: 31272 - RNA, 21 nt, artificial
  Chemically synthesized
ugugaauucacauagaaaaca

SEQ ID NO: 31273 - RNA, 21 nt, artificial
  Chemically synthesized
uuggugucauauuauacaaua

SEQ ID NO: 31274 - RNA, 21 nt, artificial
  Chemically synthesized
acauaugauucuguaguauga

SEQ ID NO: 31275 - RNA, 21 nt, artificial
  Chemically synthesized
auagcaaugguaaaaucauca

SEQ ID NO: 31276 - RNA, 21 nt, artificial
  Chemically synthesized
aaauauagguaaaaguacgua

SEQ ID NO: 31277 - RNA, 21 nt, artificial
  Chemically synthesized
ugaaaaacaacaaauucaguu

SEQ ID NO: 31278 - RNA, 21 nt, artificial
  Chemically synthesized
gugaaaaacaacaaauucagu

SEQ ID NO: 31279 - RNA, 21 nt, artificial
  Chemically synthesized
auuacuagugacucagaaaau

SEQ ID NO: 31280 - RNA, 21 nt, artificial
  Chemically synthesized
acuuuguuuauaacucugaga

SEQ ID NO: 31281 - RNA, 21 nt, artificial
  Chemically synthesized
uuaagauucuccuuacuacua

SEQ ID NO: 31282 - RNA, 21 nt, artificial
  Chemically synthesized
uauagguaaaaguacguaauu

SEQ ID NO: 31283 - RNA, 21 nt, artificial
  Chemically synthesized
aaucaauagaagaagcuauga

SEQ ID NO: 31284 - RNA, 21 nt, artificial
  Chemically synthesized
gaagauaguuauaaacugaag

SEQ ID NO: 31285 - RNA, 21 nt, artificial
  Chemically synthesized
aucaagaaugacaauguccaa

SEQ ID NO: 31286 - RNA, 21 nt, artificial
  Chemically synthesized
aacuucagaaaugaaauccaa

SEQ ID NO: 31287 - RNA, 21 nt, artificial
  Chemically synthesized
acaaauucaguucugaguaua

SEQ ID NO: 31288 - RNA, 21 nt, artificial
  Chemically synthesized
uaaauacugcuugguuuuuua

SEQ ID NO: 31289 - RNA, 21 nt, artificial
  Chemically synthesized
gugacugacaucaacuccaag

SEQ ID NO: 31290 - RNA, 21 nt, artificial
  Chemically synthesized
uaguugggaaaacaaacuuca

SEQ ID NO: 31291 - RNA, 21 nt, artificial
  Chemically synthesized
cuguaaauguaaacugugaag

SEQ ID NO: 31292 - RNA, 21 nt, artificial
  Chemically synthesized
agauaguuauaaacugaagca

SEQ ID NO: 31293 - RNA, 21 nt, artificial
  Chemically synthesized
gcccaagugacugacaucaac

SEQ ID NO: 31294 - RNA, 21 nt, artificial
  Chemically synthesized
aggcaucaaaagcauuuugag

SEQ ID NO: 31295 - RNA, 21 nt, artificial
  Chemically synthesized
auguugacuugaguaaauaua

SEQ ID NO: 31296 - RNA, 21 nt, artificial
  Chemically synthesized
aaacaacaaauucaguucuga

SEQ ID NO: 31297 - RNA, 21 nt, artificial
  Chemically synthesized
uguaaacugugaagauaguua

SEQ ID NO: 31298 - RNA, 21 nt, artificial
  Chemically synthesized
augcaauuaguguuugaaaag

SEQ ID NO: 31299 - RNA, 21 nt, artificial
  Chemically synthesized
auuucaauugugaauucacau

SEQ ID NO: 31300 - RNA, 21 nt, artificial
  Chemically synthesized
aauguaaacugugaagauagu

SEQ ID NO: 31301 - RNA, 21 nt, artificial
  Chemically synthesized
caugcuaaguacccaaauagg

SEQ ID NO: 31302 - RNA, 21 nt, artificial
  Chemically synthesized
cuccaagggauuggaauugag

SEQ ID NO: 31303 - RNA, 21 nt, artificial
  Chemically synthesized
uuugcugaaauaucaguuacu

SEQ ID NO: 31304 - RNA, 21 nt, artificial
  Chemically synthesized
ucaucaaggaaugcacacuca

SEQ ID NO: 31305 - RNA, 21 nt, artificial
  Chemically synthesized
ugacaugucaugaacccaugu

SEQ ID NO: 31306 - RNA, 21 nt, artificial
  Chemically synthesized
ccucugauaauucuagagauu

SEQ ID NO: 31307 - RNA, 21 nt, artificial
  Chemically synthesized
aaguguuaaugcccaagugac

SEQ ID NO: 31308 - RNA, 21 nt, artificial
  Chemically synthesized
guuuuuuacuggguacauuuu

SEQ ID NO: 31309 - RNA, 21 nt, artificial
  Chemically synthesized
uaaagaacuuccauuuaugga

SEQ ID NO: 31310 - RNA, 21 nt, artificial
  Chemically synthesized
ccaaagcuuggucuagaguga

SEQ ID NO: 31311 - RNA, 21 nt, artificial
  Chemically synthesized
uacauagcaaugguaaaauca

SEQ ID NO: 31312 - RNA, 21 nt, artificial
  Chemically synthesized
guaaacugugaagauaguuau

SEQ ID NO: 31313 - RNA, 21 nt, artificial
  Chemically synthesized
uagagugaaaaacaacaaauu

SEQ ID NO: 31314 - RNA, 21 nt, artificial
  Chemically synthesized
ggaugaaagauuaagauuaug

SEQ ID NO: 31315 - RNA, 21 nt, artificial
  Chemically synthesized
aucaguguauguuaguacaaa

SEQ ID NO: 31316 - RNA, 21 nt, artificial
  Chemically synthesized
uaagauucuccuuacuacuau

SEQ ID NO: 31317 - RNA, 21 nt, artificial
  Chemically synthesized
aaguagcuuugugacauguca

SEQ ID NO: 31318 - RNA, 21 nt, artificial
  Chemically synthesized
cccauguaaaaccugcuacaa

SEQ ID NO: 31319 - RNA, 21 nt, artificial
  Chemically synthesized
uuauuggugucauauuauaca

SEQ ID NO: 31320 - RNA, 21 nt, artificial
  Chemically synthesized
ugagggaagcgguuuacgagu

SEQ ID NO: 31321 - RNA, 21 nt, artificial
  Chemically synthesized
agugaaaaacaacaaauucag

SEQ ID NO: 31322 - RNA, 21 nt, artificial
  Chemically synthesized
aaacuucagaaaugaaaucca

SEQ ID NO: 31323 - RNA, 21 nt, artificial
  Chemically synthesized
accuuuugcugaaauaucagu

SEQ ID NO: 31324 - RNA, 21 nt, artificial
  Chemically synthesized
guaguaugaauguaaucagug

SEQ ID NO: 31325 - RNA, 21 nt, artificial
  Chemically synthesized
uuucaauugugaauucacaua

SEQ ID NO: 31326 - RNA, 21 nt, artificial
  Chemically synthesized
aguacaaaugucuauccacag

SEQ ID NO: 31327 - RNA, 21 nt, artificial
  Chemically synthesized
gaagcagauaccuggaaccac

SEQ ID NO: 31328 - RNA, 21 nt, artificial
  Chemically synthesized
guuugaaaagauucuuaauag

SEQ ID NO: 31329 - RNA, 21 nt, artificial
  Chemically synthesized
aaauauaucaccacuauugcu

SEQ ID NO: 31330 - RNA, 21 nt, artificial
  Chemically synthesized
ugcaauuaguguuugaaaaga

SEQ ID NO: 31331 - RNA, 21 nt, artificial
  Chemically synthesized
gauuaaagaucucaaaaaagc

SEQ ID NO: 31332 - RNA, 21 nt, artificial
  Chemically synthesized
aauccaaagcuuggucuagag

SEQ ID NO: 31333 - RNA, 21 nt, artificial
  Chemically synthesized
ugcuaaguacccaaauaggag

SEQ ID NO: 31334 - RNA, 21 nt, artificial
  Chemically synthesized
gagaaaguagcuuugugacau

SEQ ID NO: 31335 - RNA, 21 nt, artificial
  Chemically synthesized
cauccucaaggacauuacuag

SEQ ID NO: 31336 - RNA, 21 nt, artificial
  Chemically synthesized
cugcucucagagaaaguagcu

SEQ ID NO: 31337 - RNA, 21 nt, artificial
  Chemically synthesized
ugaauucacauagaaaacauu

SEQ ID NO: 31338 - RNA, 21 nt, artificial
  Chemically synthesized
uuuuuuacuggguacauuuua

SEQ ID NO: 31339 - RNA, 21 nt, artificial
  Chemically synthesized
aaucuaguugggaaaacaaac

SEQ ID NO: 31340 - RNA, 21 nt, artificial
  Chemically synthesized
aguguuaaugcccaagugacu

SEQ ID NO: 31341 - RNA, 21 nt, artificial
  Chemically synthesized
guagcuuugugacaugucaug

SEQ ID NO: 31342 - RNA, 21 nt, artificial
  Chemically synthesized
cugguuuggagauacuaacug

SEQ ID NO: 31343 - RNA, 21 nt, artificial
  Chemically synthesized
ugucaugaacccauguuugca

SEQ ID NO: 31344 - RNA, 21 nt, artificial
  Chemically synthesized
ccauguuugcaaucaaagaug

SEQ ID NO: 31345 - RNA, 21 nt, artificial
  Chemically synthesized
uaugaaucaauagaagaagcu

SEQ ID NO: 31346 - RNA, 21 nt, artificial
  Chemically synthesized
aacaaauucaguucugaguau

SEQ ID NO: 31347 - RNA, 21 nt, artificial
  Chemically synthesized
ucaaggaaugcacacucacca

SEQ ID NO: 31348 - RNA, 21 nt, artificial
  Chemically synthesized
ucaccaaaaaauacuuaauag

SEQ ID NO: 31349 - RNA, 21 nt, artificial
  Chemically synthesized
accauauuucuaaacuuuguu

SEQ ID NO: 31350 - RNA, 21 nt, artificial
  Chemically synthesized
ucaauugugaauucacauaga

SEQ ID NO: 31351 - RNA, 21 nt, artificial
  Chemically synthesized
aaaguagcuuugugacauguc

SEQ ID NO: 31352 - RNA, 21 nt, artificial
  Chemically synthesized
auguauuugagugcagaauuu

SEQ ID NO: 31353 - RNA, 21 nt, artificial
  Chemically synthesized
uggagauacuaacugcucuca

SEQ ID NO: 31354 - RNA, 21 nt, artificial
  Chemically synthesized
uugaaaagauucuuaauagcu

SEQ ID NO: 31355 - RNA, 21 nt, artificial
  Chemically synthesized
agcagaacagaaaguucaacu

SEQ ID NO: 31356 - RNA, 21 nt, artificial
  Chemically synthesized
uacuuaauaguccaccaaaag

SEQ ID NO: 31357 - RNA, 21 nt, artificial
  Chemically synthesized
aggcuuuguucgaaagaaugg

SEQ ID NO: 31358 - RNA, 21 nt, artificial
  Chemically synthesized
uaaucaguguauguuaguaca

SEQ ID NO: 31359 - RNA, 21 nt, artificial
  Chemically synthesized
uguuugcaaucaaagaugaua

SEQ ID NO: 31360 - RNA, 21 nt, artificial
  Chemically synthesized
auccuacguuuaaauaucuuu

SEQ ID NO: 31361 - RNA, 21 nt, artificial
  Chemically synthesized
uuuauaacucugagaagauca

SEQ ID NO: 31362 - RNA, 21 nt, artificial
  Chemically synthesized
uuauaacucugagaagaucau

SEQ ID NO: 31363 - RNA, 21 nt, artificial
  Chemically synthesized
cauggaaucaucaaggaaugc

SEQ ID NO: 31364 - RNA, 21 nt, artificial
  Chemically synthesized
aguaugaauguaaucagugua

SEQ ID NO: 31365 - RNA, 21 nt, artificial
  Chemically synthesized
caucaucuggauuuaggaauu

SEQ ID NO: 31366 - RNA, 21 nt, artificial
  Chemically synthesized
accucugauaauucuagagau

SEQ ID NO: 31367 - RNA, 21 nt, artificial
  Chemically synthesized
cuccaaggauguuuaaaaucu

SEQ ID NO: 31368 - RNA, 21 nt, artificial
  Chemically synthesized
gacucagaacuuggaaggccu

SEQ ID NO: 31369 - RNA, 21 nt, artificial
  Chemically synthesized
cuucaucaagaguaaaugcag

SEQ ID NO: 31370 - RNA, 21 nt, artificial
  Chemically synthesized
ucuaguugggaaaacaaacuu

SEQ ID NO: 31371 - RNA, 21 nt, artificial
  Chemically synthesized
cuaagauuuaagauucuccuu

SEQ ID NO: 31372 - RNA, 21 nt, artificial
  Chemically synthesized
cuucagaaaugaaauccaaag

SEQ ID NO: 31373 - RNA, 21 nt, artificial
  Chemically synthesized
cuaaauuaccucugauaauuc

SEQ ID NO: 31374 - RNA, 21 nt, artificial
  Chemically synthesized
caccacuauugcuggagucau

SEQ ID NO: 31375 - RNA, 21 nt, artificial
  Chemically synthesized
aaaugaaauccaaagcuuggu

SEQ ID NO: 31376 - RNA, 21 nt, artificial
  Chemically synthesized
agcauuuugagcaggagagua

SEQ ID NO: 31377 - RNA, 21 nt, artificial
  Chemically synthesized
caugaacccauguuugcaauc

SEQ ID NO: 31378 - RNA, 21 nt, artificial
  Chemically synthesized
agauuuaagauucuccuuacu

SEQ ID NO: 31379 - RNA, 21 nt, artificial
  Chemically synthesized
acuugaguaaauauaucacca

SEQ ID NO: 31380 - RNA, 21 nt, artificial
  Chemically synthesized
cuguugcuagauuaucgucca

SEQ ID NO: 31381 - RNA, 21 nt, artificial
  Chemically synthesized
auaguuauaaacugaagcaga

SEQ ID NO: 31382 - RNA, 21 nt, artificial
  Chemically synthesized
cuugaguaaauauaucaccac

SEQ ID NO: 31383 - RNA, 21 nt, artificial
  Chemically synthesized
gaaugacaauguccaagacac

SEQ ID NO: 31384 - RNA, 21 nt, artificial
  Chemically synthesized
caucaacuccaagggauugga

SEQ ID NO: 31385 - RNA, 21 nt, artificial
  Chemically synthesized
aaggacauuacuagugacuca

SEQ ID NO: 31386 - RNA, 21 nt, artificial
  Chemically synthesized
auccaaagcuuggucuagagu

SEQ ID NO: 31387 - RNA, 21 nt, artificial
  Chemically synthesized
auguaaacugugaagauaguu

SEQ ID NO: 31388 - RNA, 21 nt, artificial
  Chemically synthesized
augaauguaaucaguguaugu

SEQ ID NO: 31389 - RNA, 21 nt, artificial
  Chemically synthesized
guaaaaucaucaucuggauuu

SEQ ID NO: 31390 - RNA, 21 nt, artificial
  Chemically synthesized
cuguaguaugaauguaaucag

SEQ ID NO: 31391 - RNA, 21 nt, artificial
  Chemically synthesized
ugaaucaauagaagaagcuau

SEQ ID NO: 31392 - RNA, 21 nt, artificial
  Chemically synthesized
cacuaagucaaguuaaaggcu

SEQ ID NO: 31393 - RNA, 21 nt, artificial
  Chemically synthesized
uaagauuuaagauucuccuua

SEQ ID NO: 31394 - RNA, 21 nt, artificial
  Chemically synthesized
uacuucuuucucaggcaucaa

SEQ ID NO: 31395 - RNA, 21 nt, artificial
  Chemically synthesized
acucuugcagagaaaauucag

SEQ ID NO: 31396 - RNA, 21 nt, artificial
  Chemically synthesized
gauuuuaccauauuucuaaac

SEQ ID NO: 31397 - RNA, 21 nt, artificial
  Chemically synthesized
cauuuugagcaggagaguauu

SEQ ID NO: 31398 - RNA, 21 nt, artificial
  Chemically synthesized
cauuuauggaggauuuuuuug

SEQ ID NO: 31399 - RNA, 21 nt, artificial
  Chemically synthesized
gaaaauucagacuaucauccu

SEQ ID NO: 31400 - RNA, 21 nt, artificial
  Chemically synthesized
ccaaacauggaaauaucacca

SEQ ID NO: 31401 - RNA, 21 nt, artificial
  Chemically synthesized
ugcuagauuaucguccaaaag

SEQ ID NO: 31402 - RNA, 21 nt, artificial
  Chemically synthesized
gugacucagaaaauucaaacu

SEQ ID NO: 31403 - RNA, 21 nt, artificial
  Chemically synthesized
auagaugagaucaagaaugac

SEQ ID NO: 31404 - RNA, 21 nt, artificial
  Chemically synthesized
aaauucaaacuucagaaauga

SEQ ID NO: 31405 - RNA, 21 nt, artificial
  Chemically synthesized
aaggauguuuaaaaucuaguu

SEQ ID NO: 31406 - RNA, 21 nt, artificial
  Chemically synthesized
aaauccaaagcuuggucuaga

SEQ ID NO: 31407 - RNA, 21 nt, artificial
  Chemically synthesized
aaauguucaauaaugucccau

SEQ ID NO: 31408 - RNA, 21 nt, artificial
  Chemically synthesized
auauagguaaaaguacguaau

SEQ ID NO: 31409 - RNA, 21 nt, artificial
  Chemically synthesized
ugagaucaagaaugacaaugu

SEQ ID NO: 31410 - RNA, 21 nt, artificial
  Chemically synthesized
cacucuaugaaucaauagaag

SEQ ID NO: 31411 - RNA, 21 nt, artificial
  Chemically synthesized
aucauuuauuagcgcugaaga

SEQ ID NO: 31412 - RNA, 21 nt, artificial
  Chemically synthesized
uauguauuugagugcagaauu

SEQ ID NO: 31413 - RNA, 21 nt, artificial
  Chemically synthesized
ggauugcucaacaaccaugcu

SEQ ID NO: 31414 - RNA, 21 nt, artificial
  Chemically synthesized
cuuuugcugaaauaucaguua

SEQ ID NO: 31415 - RNA, 21 nt, artificial
  Chemically synthesized
cagacuaucauccucaaggac

SEQ ID NO: 31416 - RNA, 21 nt, artificial
  Chemically synthesized
cagcuuauacauagcaauggu

SEQ ID NO: 31417 - RNA, 21 nt, artificial
  Chemically synthesized
aguucugaguauaugcaauua

SEQ ID NO: 31418 - RNA, 21 nt, artificial
  Chemically synthesized
gacaugucaugaacccauguu

SEQ ID NO: 31419 - RNA, 21 nt, artificial
  Chemically synthesized
agugacucagaaaauucaaac

SEQ ID NO: 31420 - RNA, 21 nt, artificial
  Chemically synthesized
cuagauuaucguccaaaagug

SEQ ID NO: 31421 - RNA, 21 nt, artificial
  Chemically synthesized
aggaugaaagauuaagauuau

SEQ ID NO: 31422 - RNA, 21 nt, artificial
  Chemically synthesized
caauaaugucccauguaaaac

SEQ ID NO: 31423 - RNA, 21 nt, artificial
  Chemically synthesized
ugugaacauggaaucaucaag

SEQ ID NO: 31424 - RNA, 21 nt, artificial
  Chemically synthesized
ugcagaggaugaaagauuaag

SEQ ID NO: 31425 - RNA, 21 nt, artificial
  Chemically synthesized
gcuuggucuagagugaaaaac

SEQ ID NO: 31426 - RNA, 21 nt, artificial
  Chemically synthesized
ugaguauaugcaauuaguguu

SEQ ID NO: 31427 - RNA, 21 nt, artificial
  Chemically synthesized
ugauucuguaguaugaaugua

SEQ ID NO: 31428 - RNA, 21 nt, artificial
  Chemically synthesized
ucugauaauucuagagauuuu

SEQ ID NO: 31429 - RNA, 21 nt, artificial
  Chemically synthesized
gaaaugaaauccaaagcuugg

SEQ ID NO: 31430 - RNA, 21 nt, artificial
  Chemically synthesized
uaacugcucucagagaaagua

SEQ ID NO: 31431 - RNA, 21 nt, artificial
  Chemically synthesized
caacaaccaugcugggcaucu

SEQ ID NO: 31432 - RNA, 21 nt, artificial
  Chemically synthesized
auucuagccugguuuggagau

SEQ ID NO: 31433 - RNA, 21 nt, artificial
  Chemically synthesized
cagcagaacagaaaguucaac

SEQ ID NO: 31434 - RNA, 21 nt, artificial
  Chemically synthesized
acaacaaauucaguucugagu

SEQ ID NO: 31435 - RNA, 21 nt, artificial
  Chemically synthesized
agaccuuugcacaguuuauug

SEQ ID NO: 31436 - RNA, 21 nt, artificial
  Chemically synthesized
gacugcccuuagaaauucuag

SEQ ID NO: 31437 - RNA, 21 nt, artificial
  Chemically synthesized
aggaagacuguuacuacaguu

SEQ ID NO: 31438 - RNA, 21 nt, artificial
  Chemically synthesized
aaaaaauacuuaauaguccac

SEQ ID NO: 31439 - RNA, 21 nt, artificial
  Chemically synthesized
aauucuagagauuuuaccaua

SEQ ID NO: 31440 - RNA, 21 nt, artificial
  Chemically synthesized
ucccauguaaaaccugcuaca

SEQ ID NO: 31441 - RNA, 21 nt, artificial
  Chemically synthesized
aggaauugcucuugucauacc

SEQ ID NO: 31442 - RNA, 21 nt, artificial
  Chemically synthesized
uacaguugagacucagaacuu

SEQ ID NO: 31443 - RNA, 21 nt, artificial
  Chemically synthesized
uaaaaucuaguugggaaaaca

SEQ ID NO: 31444 - RNA, 21 nt, artificial
  Chemically synthesized
agaaaguagcuuugugacaug

SEQ ID NO: 31445 - RNA, 21 nt, artificial
  Chemically synthesized
accuuugcacaguuuauuggu

SEQ ID NO: 31446 - RNA, 21 nt, artificial
  Chemically synthesized
aaagaaagaagcguaugacac

SEQ ID NO: 31447 - RNA, 21 nt, artificial
  Chemically synthesized
ucaccacuauugcuggaguca

SEQ ID NO: 31448 - RNA, 21 nt, artificial
  Chemically synthesized
acuggguacauuuuaucauuu

SEQ ID NO: 31449 - RNA, 21 nt, artificial
  Chemically synthesized
uguaaauguaaacugugaaga

SEQ ID NO: 31450 - RNA, 21 nt, artificial
  Chemically synthesized
cugaaauaucaguuacugaac

SEQ ID NO: 31451 - RNA, 21 nt, artificial
  Chemically synthesized
aaauagaugagaucaagaaug

SEQ ID NO: 31452 - RNA, 21 nt, artificial
  Chemically synthesized
gaccuuugcacaguuuauugg

SEQ ID NO: 31453 - RNA, 21 nt, artificial
  Chemically synthesized
guugggaaaacaaacuucauc

SEQ ID NO: 31454 - RNA, 21 nt, artificial
  Chemically synthesized
uaccuacuucuuucucaggca

SEQ ID NO: 31455 - RNA, 21 nt, artificial
  Chemically synthesized
gaguauaugcaauuaguguuu

SEQ ID NO: 31456 - RNA, 21 nt, artificial
  Chemically synthesized
uagagauuuuaccauauuucu

SEQ ID NO: 31457 - RNA, 21 nt, artificial
  Chemically synthesized
gacacuaagucaaguuaaagg

SEQ ID NO: 31458 - RNA, 21 nt, artificial
  Chemically synthesized
caaagaugauaaaauagauuc

SEQ ID NO: 31459 - RNA, 21 nt, artificial
  Chemically synthesized
acuccaagggauuggaauuga

SEQ ID NO: 31460 - RNA, 21 nt, artificial
  Chemically synthesized
uguaaucaguguauguuagua

SEQ ID NO: 31461 - RNA, 21 nt, artificial
  Chemically synthesized
ucaugacacuaagucaaguua

SEQ ID NO: 31462 - RNA, 21 nt, artificial
  Chemically synthesized
augaaucaauagaagaagcua

SEQ ID NO: 31463 - RNA, 21 nt, artificial
  Chemically synthesized
aucaucaucuggauuuaggaa

SEQ ID NO: 31464 - RNA, 21 nt, artificial
  Chemically synthesized
accucugguucuuacgucugu

SEQ ID NO: 31465 - RNA, 21 nt, artificial
  Chemically synthesized
uuaaugcccaagugacugaca

SEQ ID NO: 31466 - RNA, 21 nt, artificial
  Chemically synthesized
ucauuuauuagcgcugaagag

SEQ ID NO: 31467 - RNA, 21 nt, artificial
  Chemically synthesized
ccaaaaaauacuuaauagucc

SEQ ID NO: 31468 - RNA, 21 nt, artificial
  Chemically synthesized
uuuaaauaaggcucuaccuca

SEQ ID NO: 31469 - RNA, 21 nt, artificial
  Chemically synthesized
aacauaugauucuguaguaug

SEQ ID NO: 31470 - RNA, 21 nt, artificial
  Chemically synthesized
uugagcaggagaguauuacua

SEQ ID NO: 31471 - RNA, 21 nt, artificial
  Chemically synthesized
ucaaagaccuuugcacaguuu

SEQ ID NO: 31472 - RNA, 21 nt, artificial
  Chemically synthesized
uaaauuaccucugauaauucu

SEQ ID NO: 31473 - RNA, 21 nt, artificial
  Chemically synthesized
auaacucugagaagaucauau

SEQ ID NO: 31474 - RNA, 21 nt, artificial
  Chemically synthesized
acccaaauaggaguguaugca

SEQ ID NO: 31475 - RNA, 21 nt, artificial
  Chemically synthesized
uauaugcaauuaguguuugaa

SEQ ID NO: 31476 - RNA, 21 nt, artificial
  Chemically synthesized
caacuccaagggauuggaauu

SEQ ID NO: 31477 - RNA, 21 nt, artificial
  Chemically synthesized
uguauguuaguacaaaugucu

SEQ ID NO: 31478 - RNA, 21 nt, artificial
  Chemically synthesized
ccucugguucuuacgucuguu

SEQ ID NO: 31479 - RNA, 21 nt, artificial
  Chemically synthesized
ccuacuucuuucucaggcauc

SEQ ID NO: 31480 - RNA, 21 nt, artificial
  Chemically synthesized
uuugccuuggugcucaucuua

SEQ ID NO: 31481 - RNA, 21 nt, artificial
  Chemically synthesized
agugcagaauuuaaauaaggc

SEQ ID NO: 31482 - RNA, 21 nt, artificial
  Chemically synthesized
uuacuagugacucagaaaauu

SEQ ID NO: 31483 - RNA, 21 nt, artificial
  Chemically synthesized
cgaaaauguucaauaaugucc

SEQ ID NO: 31484 - RNA, 21 nt, artificial
  Chemically synthesized
gaaagauuaagauuaugcucu

SEQ ID NO: 31485 - RNA, 21 nt, artificial
  Chemically synthesized
gacuguuacuacaguugagac

SEQ ID NO: 31486 - RNA, 21 nt, artificial
  Chemically synthesized
cuugcagagaaaauucagacu

SEQ ID NO: 31487 - RNA, 21 nt, artificial
  Chemically synthesized
cuaaacuuuguuuauaacucu

SEQ ID NO: 31488 - RNA, 21 nt, artificial
  Chemically synthesized
ccaagugacugacaucaacuc

SEQ ID NO: 31489 - RNA, 21 nt, artificial
  Chemically synthesized
uacuagugacucagaaaauuc

SEQ ID NO: 31490 - RNA, 21 nt, artificial
  Chemically synthesized
ucuagagauuuuaccauauuu

SEQ ID NO: 31491 - RNA, 21 nt, artificial
  Chemically synthesized
agucaaguuaaaggcuuuguu

SEQ ID NO: 31492 - RNA, 21 nt, artificial
  Chemically synthesized
aacucugagaagaucauauuu

SEQ ID NO: 31493 - RNA, 21 nt, artificial
  Chemically synthesized
uaguacaaaugucuauccaca

SEQ ID NO: 31494 - RNA, 21 nt, artificial
  Chemically synthesized
cuacaguugagacucagaacu

SEQ ID NO: 31495 - RNA, 21 nt, artificial
  Chemically synthesized
guguauguuaguacaaauguc

SEQ ID NO: 31496 - RNA, 21 nt, artificial
  Chemically synthesized
gcagaacagaaaguucaacug

SEQ ID NO: 31497 - RNA, 21 nt, artificial
  Chemically synthesized
uucuguaguaugaauguaauc

SEQ ID NO: 31498 - RNA, 21 nt, artificial
  Chemically synthesized
agauacuaacugcucucagag

SEQ ID NO: 31499 - RNA, 21 nt, artificial
  Chemically synthesized
uaccauauuucuaaacuuugu

SEQ ID NO: 31500 - RNA, 21 nt, artificial
  Chemically synthesized
ugacacuaagucaaguuaaag

SEQ ID NO: 31501 - RNA, 21 nt, artificial
  Chemically synthesized
uuaccauauuucuaaacuuug

SEQ ID NO: 31502 - RNA, 21 nt, artificial
  Chemically synthesized
cagguguucaaagacgcuucu

SEQ ID NO: 31503 - RNA, 21 nt, artificial
  Chemically synthesized
ugugaagauaguuauaaacug

SEQ ID NO: 31504 - RNA, 21 nt, artificial
  Chemically synthesized
ugaagcagauaccuggaacca

SEQ ID NO: 31505 - RNA, 21 nt, artificial
  Chemically synthesized
auauguauuugagugcagaau

SEQ ID NO: 31506 - RNA, 21 nt, artificial
  Chemically synthesized
uugugacaugucaugaaccca

SEQ ID NO: 31507 - RNA, 21 nt, artificial
  Chemically synthesized
ugagugcagaauuuaaauaag

SEQ ID NO: 31508 - RNA, 21 nt, artificial
  Chemically synthesized
acuuaauaguccaccaaaagg

SEQ ID NO: 31509 - RNA, 21 nt, artificial
  Chemically synthesized
auguuuaaaaucuaguuggga

SEQ ID NO: 31510 - RNA, 21 nt, artificial
  Chemically synthesized
gccuuggugcucaucuuaaug

SEQ ID NO: 31511 - RNA, 21 nt, artificial
  Chemically synthesized
aaguucaacugcuucguaauu

SEQ ID NO: 31512 - RNA, 21 nt, artificial
  Chemically synthesized
uucggaggauugcucaacaac

SEQ ID NO: 31513 - RNA, 21 nt, artificial
  Chemically synthesized
caaaaggcaagacugcccuua

SEQ ID NO: 31514 - RNA, 21 nt, artificial
  Chemically synthesized
uugccucuaaauuaccucuga

SEQ ID NO: 31515 - RNA, 21 nt, artificial
  Chemically synthesized
aaaucaucaucuggauuuagg

SEQ ID NO: 31516 - RNA, 21 nt, artificial
  Chemically synthesized
ucagaaaugaaauccaaagcu

SEQ ID NO: 31517 - RNA, 21 nt, artificial
  Chemically synthesized
uagcuuugugacaugucauga

SEQ ID NO: 31518 - RNA, 21 nt, artificial
  Chemically synthesized
cccuuagaaauucuagccugg

SEQ ID NO: 31519 - RNA, 21 nt, artificial
  Chemically synthesized
aucaacuccaagggauuggaa

SEQ ID NO: 31520 - RNA, 21 nt, artificial
  Chemically synthesized
ggaaagaaagaagcguaugac

SEQ ID NO: 31521 - RNA, 21 nt, artificial
  Chemically synthesized
auuaccucugauaauucuaga

SEQ ID NO: 31522 - RNA, 21 nt, artificial
  Chemically synthesized
cucaugauucugccuccaagg

SEQ ID NO: 31523 - RNA, 21 nt, artificial
  Chemically synthesized
uucaaacuucagaaaugaaau

SEQ ID NO: 31524 - RNA, 21 nt, artificial
  Chemically synthesized
uugcagagaaaauucagacua

SEQ ID NO: 31525 - RNA, 21 nt, artificial
  Chemically synthesized
cuacuucuuucucaggcauca

SEQ ID NO: 31526 - RNA, 21 nt, artificial
  Chemically synthesized
ucaucaagaguaaaugcagug

SEQ ID NO: 31527 - RNA, 21 nt, artificial
  Chemically synthesized
caucaaaagcauuuugagcag

SEQ ID NO: 31528 - RNA, 21 nt, artificial
  Chemically synthesized
aauacugcuugguuuuuuacu

SEQ ID NO: 31529 - RNA, 21 nt, artificial
  Chemically synthesized
aagaccuuugcacaguuuauu

SEQ ID NO: 31530 - RNA, 21 nt, artificial
  Chemically synthesized
uuuuuuggugauauuuccaug

SEQ ID NO: 31531 - RNA, 21 nt, artificial
  Chemically synthesized
uucuugaucucaucuauuuug

SEQ ID NO: 31532 - RNA, 21 nt, artificial
  Chemically synthesized
uucaguuuauaacuaucuuca

SEQ ID NO: 31533 - RNA, 21 nt, artificial
  Chemically synthesized
uuaauuacguacuuuuaccua

SEQ ID NO: 31534 - RNA, 21 nt, artificial
  Chemically synthesized
uuaaauucugcacucaaauac

SEQ ID NO: 31535 - RNA, 21 nt, artificial
  Chemically synthesized
uuacauucauacuacagaauc

SEQ ID NO: 31536 - RNA, 21 nt, artificial
  Chemically synthesized
auuuaauuacguacuuuuacc

SEQ ID NO: 31537 - RNA, 21 nt, artificial
  Chemically synthesized
uuuaauuacguacuuuuaccu

SEQ ID NO: 31538 - RNA, 21 nt, artificial
  Chemically synthesized
uucauuucugaaguuugaauu

SEQ ID NO: 31539 - RNA, 21 nt, artificial
  Chemically synthesized
uuuggauuucauuucugaagu

SEQ ID NO: 31540 - RNA, 21 nt, artificial
  Chemically synthesized
uucuaugugaauucacaauug

SEQ ID NO: 31541 - RNA, 21 nt, artificial
  Chemically synthesized
ugaauuuguuguuuuucacuc

SEQ ID NO: 31542 - RNA, 21 nt, artificial
  Chemically synthesized
uuugaauuuucugagucacua

SEQ ID NO: 31543 - RNA, 21 nt, artificial
  Chemically synthesized
uuuguuuucccaacuagauuu

SEQ ID NO: 31544 - RNA, 21 nt, artificial
  Chemically synthesized
auuuacucuugaugaaguuug

SEQ ID NO: 31545 - RNA, 21 nt, artificial
  Chemically synthesized
uauaauaugacaccaauaaac

SEQ ID NO: 31546 - RNA, 21 nt, artificial
  Chemically synthesized
uuuugagaucuuuaaucaaug

SEQ ID NO: 31547 - RNA, 21 nt, artificial
  Chemically synthesized
uaggugguuccagguaucugc

SEQ ID NO: 31548 - RNA, 21 nt, artificial
  Chemically synthesized
uucugaaguuugaauuuucug

SEQ ID NO: 31549 - RNA, 21 nt, artificial
  Chemically synthesized
uaaaugauaaaauguacccag

SEQ ID NO: 31550 - RNA, 21 nt, artificial
  Chemically synthesized
uuucuaugugaauucacaauu

SEQ ID NO: 31551 - RNA, 21 nt, artificial
  Chemically synthesized
auaauaugacaccaauaaacu

SEQ ID NO: 31552 - RNA, 21 nt, artificial
  Chemically synthesized
acuagauuuuaaacauccuug

SEQ ID NO: 31553 - RNA, 21 nt, artificial
  Chemically synthesized
uucaaagauauuuaaacguag

SEQ ID NO: 31554 - RNA, 21 nt, artificial
  Chemically synthesized
uauuuuuuggugauauuucca

SEQ ID NO: 31555 - RNA, 21 nt, artificial
  Chemically synthesized
uuagaaauaugguaaaaucuc

SEQ ID NO: 31556 - RNA, 21 nt, artificial
  Chemically synthesized
uuacauaaauaugaucuucuc

SEQ ID NO: 31557 - RNA, 21 nt, artificial
  Chemically synthesized
acuauuaaguauuuuuuggug

SEQ ID NO: 31558 - RNA, 21 nt, artificial
  Chemically synthesized
uggacuauuaaguauuuuuug

SEQ ID NO: 31559 - RNA, 21 nt, artificial
  Chemically synthesized
uauuuaaacguaggauaguag

SEQ ID NO: 31560 - RNA, 21 nt, artificial
  Chemically synthesized
uaacauacacugauuacauuc

SEQ ID NO: 31561 - RNA, 21 nt, artificial
  Chemically synthesized
auuaucagagguaauuuagag

SEQ ID NO: 31562 - RNA, 21 nt, artificial
  Chemically synthesized
uuaagaaucuuuucaaacacu

SEQ ID NO: 31563 - RNA, 21 nt, artificial
  Chemically synthesized
uuuaaauucugcacucaaaua

SEQ ID NO: 31564 - RNA, 21 nt, artificial
  Chemically synthesized
uuuuuggugauauuuccaugu

SEQ ID NO: 31565 - RNA, 21 nt, artificial
  Chemically synthesized
uuuauaacuaucuucacaguu

SEQ ID NO: 31566 - RNA, 21 nt, artificial
  Chemically synthesized
uucacaguuuacauuuacaga

SEQ ID NO: 31567 - RNA, 21 nt, artificial
  Chemically synthesized
uagacauuuguacuaacauac

SEQ ID NO: 31568 - RNA, 21 nt, artificial
  Chemically synthesized
uaguggugauauauuuacuca

SEQ ID NO: 31569 - RNA, 21 nt, artificial
  Chemically synthesized
uuucugaaguuugaauuuucu

SEQ ID NO: 31570 - RNA, 21 nt, artificial
  Chemically synthesized
uucuucuauugauucauagag

SEQ ID NO: 31571 - RNA, 21 nt, artificial
  Chemically synthesized
aucuuuucaaacacuaauugc

SEQ ID NO: 31572 - RNA, 21 nt, artificial
  Chemically synthesized
uuuuggugauauuuccauguu

SEQ ID NO: 31573 - RNA, 21 nt, artificial
  Chemically synthesized
ucuuaaaucuuagaaacuugg

SEQ ID NO: 31574 - RNA, 21 nt, artificial
  Chemically synthesized
uaauaugacaccaauaaacug

SEQ ID NO: 31575 - RNA, 21 nt, artificial
  Chemically synthesized
uaaauucugcacucaaauaca

SEQ ID NO: 31576 - RNA, 21 nt, artificial
  Chemically synthesized
uuguuuucccaacuagauuuu

SEQ ID NO: 31577 - RNA, 21 nt, artificial
  Chemically synthesized
uacucuugaugaaguuuguuu

SEQ ID NO: 31578 - RNA, 21 nt, artificial
  Chemically synthesized
ucaaacacuaauugcauauac

SEQ ID NO: 31579 - RNA, 21 nt, artificial
  Chemically synthesized
uuguacuaacauacacugauu

SEQ ID NO: 31580 - RNA, 21 nt, artificial
  Chemically synthesized
auauacucagaacugaauuug

SEQ ID NO: 31581 - RNA, 21 nt, artificial
  Chemically synthesized
uuuuacaugggacauuauuga

SEQ ID NO: 31582 - RNA, 21 nt, artificial
  Chemically synthesized
ucuucuauugauucauagagu

SEQ ID NO: 31583 - RNA, 21 nt, artificial
  Chemically synthesized
aguauuuuuuggugauauuuc

SEQ ID NO: 31584 - RNA, 21 nt, artificial
  Chemically synthesized
uuaaacguaggauaguaguaa

SEQ ID NO: 31585 - RNA, 21 nt, artificial
  Chemically synthesized
acuuucaaagauauuuaaacg

SEQ ID NO: 31586 - RNA, 21 nt, artificial
  Chemically synthesized
uagaauuaucagagguaauuu

SEQ ID NO: 31587 - RNA, 21 nt, artificial
  Chemically synthesized
ucauucuugaucucaucuauu

SEQ ID NO: 31588 - RNA, 21 nt, artificial
  Chemically synthesized
cuauuuuaucaucuuugauug

SEQ ID NO: 31589 - RNA, 21 nt, artificial
  Chemically synthesized
uugagaucuuuaaucaaugug

SEQ ID NO: 31590 - RNA, 21 nt, artificial
  Chemically synthesized
uuauuuaaauucugcacucaa

SEQ ID NO: 31591 - RNA, 21 nt, artificial
  Chemically synthesized
uuucauuucugaaguuugaau

SEQ ID NO: 31592 - RNA, 21 nt, artificial
  Chemically synthesized
aauaaaugauaaaauguaccc

SEQ ID NO: 31593 - RNA, 21 nt, artificial
  Chemically synthesized
uaguaaggagaaucuuaaauc

SEQ ID NO: 31594 - RNA, 21 nt, artificial
  Chemically synthesized
uucauacuacagaaucauaug

SEQ ID NO: 31595 - RNA, 21 nt, artificial
  Chemically synthesized
uuucccaacuagauuuuaaac

SEQ ID NO: 31596 - RNA, 21 nt, artificial
  Chemically synthesized
ucacucguaaaccgcuucccu

SEQ ID NO: 31597 - RNA, 21 nt, artificial
  Chemically synthesized
uuuaccauugcuauguauaag

SEQ ID NO: 31598 - RNA, 21 nt, artificial
  Chemically synthesized
ucugaaguuugaauuuucuga

SEQ ID NO: 31599 - RNA, 21 nt, artificial
  Chemically synthesized
auuuuuuggugauauuuccau

SEQ ID NO: 31600 - RNA, 21 nt, artificial
  Chemically synthesized
auuuaaacguaggauaguagu

SEQ ID NO: 31601 - RNA, 21 nt, artificial
  Chemically synthesized
auuucugaaguuugaauuuuc

SEQ ID NO: 31602 - RNA, 21 nt, artificial
  Chemically synthesized
uuugguggacuauuaaguauu

SEQ ID NO: 31603 - RNA, 21 nt, artificial
  Chemically synthesized
uacagaaucauauguuagaug

SEQ ID NO: 31604 - RNA, 21 nt, artificial
  Chemically synthesized
aauauuguauaauaugacacc

SEQ ID NO: 31605 - RNA, 21 nt, artificial
  Chemically synthesized
aucuucucagaguuauaaaca

SEQ ID NO: 31606 - RNA, 21 nt, artificial
  Chemically synthesized
acuaacauacacugauuacau

SEQ ID NO: 31607 - RNA, 21 nt, artificial
  Chemically synthesized
uucugcacucaaauacauaua

SEQ ID NO: 31608 - RNA, 21 nt, artificial
  Chemically synthesized
aaaaaucuacaaauauguugg

SEQ ID NO: 31609 - RNA, 21 nt, artificial
  Chemically synthesized
uuuacucuugaugaaguuugu

SEQ ID NO: 31610 - RNA, 21 nt, artificial
  Chemically synthesized
auauuguauaauaugacacca

SEQ ID NO: 31611 - RNA, 21 nt, artificial
  Chemically synthesized
guauuuuuuggugauauuucc

SEQ ID NO: 31612 - RNA, 21 nt, artificial
  Chemically synthesized
auuaagaaucuuuucaaacac

SEQ ID NO: 31613 - RNA, 21 nt, artificial
  Chemically synthesized
aaucuuuucaaacacuaauug

SEQ ID NO: 31614 - RNA, 21 nt, artificial
  Chemically synthesized
uaucugcuucaguuuauaacu

SEQ ID NO: 31615 - RNA, 21 nt, artificial
  Chemically synthesized
uuuggugauauuuccauguuu

SEQ ID NO: 31616 - RNA, 21 nt, artificial
  Chemically synthesized
uuuugguggacuauuaaguau

SEQ ID NO: 31617 - RNA, 21 nt, artificial
  Chemically synthesized
uuuguuguuuuucacucuaga

SEQ ID NO: 31618 - RNA, 21 nt, artificial
  Chemically synthesized
ucacauuuaauacaaacuuuc

SEQ ID NO: 31619 - RNA, 21 nt, artificial
  Chemically synthesized
uuacguacuuuuaccuauauu

SEQ ID NO: 31620 - RNA, 21 nt, artificial
  Chemically synthesized
ucaaagauauuuaaacguagg

SEQ ID NO: 31621 - RNA, 21 nt, artificial
  Chemically synthesized
auaguggugauauauuuacuc

SEQ ID NO: 31622 - RNA, 21 nt, artificial
  Chemically synthesized
auuuaaauucugcacucaaau

SEQ ID NO: 31623 - RNA, 21 nt, artificial
  Chemically synthesized
aauaugacaccaauaaacugu

SEQ ID NO: 31624 - RNA, 21 nt, artificial
  Chemically synthesized
uagaaauaugguaaaaucucu

SEQ ID NO: 31625 - RNA, 21 nt, artificial
  Chemically synthesized
auaaauaugaucuucucagag

SEQ ID NO: 31626 - RNA, 21 nt, artificial
  Chemically synthesized
uaaucuuaaucuuucauccuc

SEQ ID NO: 31627 - RNA, 21 nt, artificial
  Chemically synthesized
uuuaacuugacuuagugucau

SEQ ID NO: 31628 - RNA, 21 nt, artificial
  Chemically synthesized
cuuuacauaaauaugaucuuc

SEQ ID NO: 31629 - RNA, 21 nt, artificial
  Chemically synthesized
auuuguuguuuuucacucuag

SEQ ID NO: 31630 - RNA, 21 nt, artificial
  Chemically synthesized
aauaguggugauauauuuacu

SEQ ID NO: 31631 - RNA, 21 nt, artificial
  Chemically synthesized
uuuaggugguuccagguaucu

SEQ ID NO: 31632 - RNA, 21 nt, artificial
  Chemically synthesized
augauagucugaauuuucucu

SEQ ID NO: 31633 - RNA, 21 nt, artificial
  Chemically synthesized
uuuaucaucuuugauugcaaa

SEQ ID NO: 31634 - RNA, 21 nt, artificial
  Chemically synthesized
aucaucuuugauugcaaacau

SEQ ID NO: 31635 - RNA, 21 nt, artificial
  Chemically synthesized
uucagcgcuaauaaaugauaa

SEQ ID NO: 31636 - RNA, 21 nt, artificial
  Chemically synthesized
aaccaagcaguauuuacagcc

SEQ ID NO: 31637 - RNA, 21 nt, artificial
  Chemically synthesized
ugaaguuugaauuuucugagu

SEQ ID NO: 31638 - RNA, 21 nt, artificial
  Chemically synthesized
uucucagaguuauaaacaaag

SEQ ID NO: 31639 - RNA, 21 nt, artificial
  Chemically synthesized
aucuuaaaucuuagaaacuug

SEQ ID NO: 31640 - RNA, 21 nt, artificial
  Chemically synthesized
cuuuuuugagaucuuuaauca

SEQ ID NO: 31641 - RNA, 21 nt, artificial
  Chemically synthesized
auaaauggaaguucuuuaggu

SEQ ID NO: 31642 - RNA, 21 nt, artificial
  Chemically synthesized
uaauguuuucuaugugaauuc

SEQ ID NO: 31643 - RNA, 21 nt, artificial
  Chemically synthesized
uacuacagaaucauauguuag

SEQ ID NO: 31644 - RNA, 21 nt, artificial
  Chemically synthesized
aaaaccaagcaguauuuacag

SEQ ID NO: 31645 - RNA, 21 nt, artificial
  Chemically synthesized
uauuuuaucaucuuugauugc

SEQ ID NO: 31646 - RNA, 21 nt, artificial
  Chemically synthesized
ucagaguuauaaacaaaguuu

SEQ ID NO: 31647 - RNA, 21 nt, artificial
  Chemically synthesized
uuauaacuaucuucacaguuu

SEQ ID NO: 31648 - RNA, 21 nt, artificial
  Chemically synthesized
auauauuuacucaagucaaca

SEQ ID NO: 31649 - RNA, 21 nt, artificial
  Chemically synthesized
ucaguuuauaacuaucuucac

SEQ ID NO: 31650 - RNA, 21 nt, artificial
  Chemically synthesized
uuacucuugaugaaguuuguu

SEQ ID NO: 31651 - RNA, 21 nt, artificial
  Chemically synthesized
acauaaauaugaucuucucag

SEQ ID NO: 31652 - RNA, 21 nt, artificial
  Chemically synthesized
uuuuaucaucuuugauugcaa

SEQ ID NO: 31653 - RNA, 21 nt, artificial
  Chemically synthesized
cuaucuucacaguuuacauuu

SEQ ID NO: 31654 - RNA, 21 nt, artificial
  Chemically synthesized
uuaucaucuuugauugcaaac

SEQ ID NO: 31655 - RNA, 21 nt, artificial
  Chemically synthesized
aguuuauaacuaucuucacag

SEQ ID NO: 31656 - RNA, 21 nt, artificial
  Chemically synthesized
aucuucacaguuuacauuuac

SEQ ID NO: 31657 - RNA, 21 nt, artificial
  Chemically synthesized
auuaagaugagcaccaaggca

SEQ ID NO: 31658 - RNA, 21 nt, artificial
  Chemically synthesized
uuguauaauaugacaccaaua

SEQ ID NO: 31659 - RNA, 21 nt, artificial
  Chemically synthesized
augaugauuuuaccauugcua

SEQ ID NO: 31660 - RNA, 21 nt, artificial
  Chemically synthesized
uauaacuaucuucacaguuua

SEQ ID NO: 31661 - RNA, 21 nt, artificial
  Chemically synthesized
auaaaugauaaaauguaccca

SEQ ID NO: 31662 - RNA, 21 nt, artificial
  Chemically synthesized
uuucaaacacuaauugcauau

SEQ ID NO: 31663 - RNA, 21 nt, artificial
  Chemically synthesized
uuuacaugggacauuauugaa

SEQ ID NO: 31664 - RNA, 21 nt, artificial
  Chemically synthesized
uaauuacguacuuuuaccuau

SEQ ID NO: 31665 - RNA, 21 nt, artificial
  Chemically synthesized
uucccaacuagauuuuaaaca

SEQ ID NO: 31666 - RNA, 21 nt, artificial
  Chemically synthesized
uaagaaucuuuucaaacacua

SEQ ID NO: 31667 - RNA, 21 nt, artificial
  Chemically synthesized
uuuucaaacacuaauugcaua

SEQ ID NO: 31668 - RNA, 21 nt, artificial
  Chemically synthesized
ugucauucuugaucucaucua

SEQ ID NO: 31669 - RNA, 21 nt, artificial
  Chemically synthesized
ugauauauuuacucaagucaa

SEQ ID NO: 31670 - RNA, 21 nt, artificial
  Chemically synthesized
uuggaguugaugucagucacu

SEQ ID NO: 31671 - RNA, 21 nt, artificial
  Chemically synthesized
uugguggacuauuaaguauuu

SEQ ID NO: 31672 - RNA, 21 nt, artificial
  Chemically synthesized
uacauaaauaugaucuucuca

SEQ ID NO: 31673 - RNA, 21 nt, artificial
  Chemically synthesized
auucuugaucucaucuauuuu

SEQ ID NO: 31674 - RNA, 21 nt, artificial
  Chemically synthesized
uagagccuuauuuaaauucug

SEQ ID NO: 31675 - RNA, 21 nt, artificial
  Chemically synthesized
auuguauaauaugacaccaau

SEQ ID NO: 31676 - RNA, 21 nt, artificial
  Chemically synthesized
auacacugauuacauucauac

SEQ ID NO: 31677 - RNA, 21 nt, artificial
  Chemically synthesized
aaucuuaaucuuucauccucu

SEQ ID NO: 31678 - RNA, 21 nt, artificial
  Chemically synthesized
auuuguacuaacauacacuga

SEQ ID NO: 31679 - RNA, 21 nt, artificial
  Chemically synthesized
acauuuguacuaacauacacu

SEQ ID NO: 31680 - RNA, 21 nt, artificial
  Chemically synthesized
uauuuaaauucugcacucaaa

SEQ ID NO: 31681 - RNA, 21 nt, artificial
  Chemically synthesized
acguacuuuuaccuauauuuu

SEQ ID NO: 31682 - RNA, 21 nt, artificial
  Chemically synthesized
aaaaaaauccuccauaaaugg

SEQ ID NO: 31683 - RNA, 21 nt, artificial
  Chemically synthesized
auuuuaucaucuuugauugca

SEQ ID NO: 31684 - RNA, 21 nt, artificial
  Chemically synthesized
acucuugaugaaguuuguuuu

SEQ ID NO: 31685 - RNA, 21 nt, artificial
  Chemically synthesized
auauuuaaacguaggauagua

SEQ ID NO: 31686 - RNA, 21 nt, artificial
  Chemically synthesized
aucugcuucaguuuauaacua

SEQ ID NO: 31687 - RNA, 21 nt, artificial
  Chemically synthesized
auagacauuuguacuaacaua

SEQ ID NO: 31688 - RNA, 21 nt, artificial
  Chemically synthesized
agcaguugaacuuucuguucu

SEQ ID NO: 31689 - RNA, 21 nt, artificial
  Chemically synthesized
ucguaaaccgcuucccucacu

SEQ ID NO: 31690 - RNA, 21 nt, artificial
  Chemically synthesized
uuuaaacguaggauaguagua

SEQ ID NO: 31691 - RNA, 21 nt, artificial
  Chemically synthesized
agaaucuuaaaucuuagaaac

SEQ ID NO: 31692 - RNA, 21 nt, artificial
  Chemically synthesized
auucauacuacagaaucauau

SEQ ID NO: 31693 - RNA, 21 nt, artificial
  Chemically synthesized
uuuucuaugugaauucacaau

SEQ ID NO: 31694 - RNA, 21 nt, artificial
  Chemically synthesized
uuugagaucuuuaaucaaugu

SEQ ID NO: 31695 - RNA, 21 nt, artificial
  Chemically synthesized
aaaucucuagaauuaucagag

SEQ ID NO: 31696 - RNA, 21 nt, artificial
  Chemically synthesized
ucacaguuuacauuuacagaa

SEQ ID NO: 31697 - RNA, 21 nt, artificial
  Chemically synthesized
ugcauuccuugaugauuccau

SEQ ID NO: 31698 - RNA, 21 nt, artificial
  Chemically synthesized
auguuuucuaugugaauucac

SEQ ID NO: 31699 - RNA, 21 nt, artificial
  Chemically synthesized
auuaacacuuuuggacgauaa

SEQ ID NO: 31700 - RNA, 21 nt, artificial
  Chemically synthesized
uaaauaugaucuucucagagu

SEQ ID NO: 31701 - RNA, 21 nt, artificial
  Chemically synthesized
aagauauuuaaacguaggaua

SEQ ID NO: 31702 - RNA, 21 nt, artificial
  Chemically synthesized
aaacaaaguuuagaaauaugg

SEQ ID NO: 31703 - RNA, 21 nt, artificial
  Chemically synthesized
acucaaauacauauacuuuac

SEQ ID NO: 31704 - RNA, 21 nt, artificial
  Chemically synthesized
augauuuuaccauugcuaugu

SEQ ID NO: 31705 - RNA, 21 nt, artificial
  Chemically synthesized
agauauuuaaacguaggauag

SEQ ID NO: 31706 - RNA, 21 nt, artificial
  Chemically synthesized
uaaaaucucuagaauuaucag

SEQ ID NO: 31707 - RNA, 21 nt, artificial
  Chemically synthesized
ucuaagggcagucuugccuuu

SEQ ID NO: 31708 - RNA, 21 nt, artificial
  Chemically synthesized
uagauuuuaaacauccuugga

SEQ ID NO: 31709 - RNA, 21 nt, artificial
  Chemically synthesized
cugcauacacuccuauuuggg

SEQ ID NO: 31710 - RNA, 21 nt, artificial
  Chemically synthesized
uguucaguaacugauauuuca

SEQ ID NO: 31711 - RNA, 21 nt, artificial
  Chemically synthesized
uguuuucuaugugaauucaca

SEQ ID NO: 31712 - RNA, 21 nt, artificial
  Chemically synthesized
uauuguauaauaugacaccaa

SEQ ID NO: 31713 - RNA, 21 nt, artificial
  Chemically synthesized
ucauacuacagaaucauaugu

SEQ ID NO: 31714 - RNA, 21 nt, artificial
  Chemically synthesized
ugaugauuuuaccauugcuau

SEQ ID NO: 31715 - RNA, 21 nt, artificial
  Chemically synthesized
uacguacuuuuaccuauauuu

SEQ ID NO: 31716 - RNA, 21 nt, artificial
  Chemically synthesized
aacugaauuuguuguuuuuca

SEQ ID NO: 31717 - RNA, 21 nt, artificial
  Chemically synthesized
acugaauuuguuguuuuucac

SEQ ID NO: 31718 - RNA, 21 nt, artificial
  Chemically synthesized
auuuucugagucacuaguaau

SEQ ID NO: 31719 - RNA, 21 nt, artificial
  Chemically synthesized
ucucagaguuauaaacaaagu

SEQ ID NO: 31720 - RNA, 21 nt, artificial
  Chemically synthesized
uaguaguaaggagaaucuuaa

SEQ ID NO: 31721 - RNA, 21 nt, artificial
  Chemically synthesized
aauuacguacuuuuaccuaua

SEQ ID NO: 31722 - RNA, 21 nt, artificial
  Chemically synthesized
ucauagcuucuucuauugauu

SEQ ID NO: 31723 - RNA, 21 nt, artificial
  Chemically synthesized
cuucaguuuauaacuaucuuc

SEQ ID NO: 31724 - RNA, 21 nt, artificial
  Chemically synthesized
uuggacauugucauucuugau

SEQ ID NO: 31725 - RNA, 21 nt, artificial
  Chemically synthesized
uuggauuucauuucugaaguu

SEQ ID NO: 31726 - RNA, 21 nt, artificial
  Chemically synthesized
uauacucagaacugaauuugu

SEQ ID NO: 31727 - RNA, 21 nt, artificial
  Chemically synthesized
uaaaaaaccaagcaguauuua

SEQ ID NO: 31728 - RNA, 21 nt, artificial
  Chemically synthesized
cuuggaguugaugucagucac

SEQ ID NO: 31729 - RNA, 21 nt, artificial
  Chemically synthesized
ugaaguuuguuuucccaacua

SEQ ID NO: 31730 - RNA, 21 nt, artificial
  Chemically synthesized
cuucacaguuuacauuuacag

SEQ ID NO: 31731 - RNA, 21 nt, artificial
  Chemically synthesized
ugcuucaguuuauaacuaucu

SEQ ID NO: 31732 - RNA, 21 nt, artificial
  Chemically synthesized
guugaugucagucacuugggc

SEQ ID NO: 31733 - RNA, 21 nt, artificial
  Chemically synthesized
cucaaaaugcuuuugaugccu

SEQ ID NO: 31734 - RNA, 21 nt, artificial
  Chemically synthesized
uauauuuacucaagucaacau

SEQ ID NO: 31735 - RNA, 21 nt, artificial
  Chemically synthesized
ucagaacugaauuuguuguuu

SEQ ID NO: 31736 - RNA, 21 nt, artificial
  Chemically synthesized
uaacuaucuucacaguuuaca

SEQ ID NO: 31737 - RNA, 21 nt, artificial
  Chemically synthesized
cuuuucaaacacuaauugcau

SEQ ID NO: 31738 - RNA, 21 nt, artificial
  Chemically synthesized
augugaauucacaauugaaau

SEQ ID NO: 31739 - RNA, 21 nt, artificial
  Chemically synthesized
acuaucuucacaguuuacauu

SEQ ID NO: 31740 - RNA, 21 nt, artificial
  Chemically synthesized
ccuauuuggguacuuagcaug

SEQ ID NO: 31741 - RNA, 21 nt, artificial
  Chemically synthesized
cucaauuccaaucccuuggag

SEQ ID NO: 31742 - RNA, 21 nt, artificial
  Chemically synthesized
aguaacugauauuucagcaaa

SEQ ID NO: 31743 - RNA, 21 nt, artificial
  Chemically synthesized
ugagugugcauuccuugauga

SEQ ID NO: 31744 - RNA, 21 nt, artificial
  Chemically synthesized
acauggguucaugacauguca

SEQ ID NO: 31745 - RNA, 21 nt, artificial
  Chemically synthesized
aaucucuagaauuaucagagg

SEQ ID NO: 31746 - RNA, 21 nt, artificial
  Chemically synthesized
gucacuugggcauuaacacuu

SEQ ID NO: 31747 - RNA, 21 nt, artificial
  Chemically synthesized
aaaauguacccaguaaaaaac

SEQ ID NO: 31748 - RNA, 21 nt, artificial
  Chemically synthesized
uccauaaauggaaguucuuua

SEQ ID NO: 31749 - RNA, 21 nt, artificial
  Chemically synthesized
ucacucuagaccaagcuuugg

SEQ ID NO: 31750 - RNA, 21 nt, artificial
  Chemically synthesized
ugauuuuaccauugcuaugua

SEQ ID NO: 31751 - RNA, 21 nt, artificial
  Chemically synthesized
auaacuaucuucacaguuuac

SEQ ID NO: 31752 - RNA, 21 nt, artificial
  Chemically synthesized
aauuuguuguuuuucacucua

SEQ ID NO: 31753 - RNA, 21 nt, artificial
  Chemically synthesized
cauaaucuuaaucuuucaucc

SEQ ID NO: 31754 - RNA, 21 nt, artificial
  Chemically synthesized
uuuguacuaacauacacugau

SEQ ID NO: 31755 - RNA, 21 nt, artificial
  Chemically synthesized
auaguaguaaggagaaucuua

SEQ ID NO: 31756 - RNA, 21 nt, artificial
  Chemically synthesized
ugacaugucacaaagcuacuu

SEQ ID NO: 31757 - RNA, 21 nt, artificial
  Chemically synthesized
uuguagcagguuuuacauggg

SEQ ID NO: 31758 - RNA, 21 nt, artificial
  Chemically synthesized
uguauaauaugacaccaauaa

SEQ ID NO: 31759 - RNA, 21 nt, artificial
  Chemically synthesized
acucguaaaccgcuucccuca

SEQ ID NO: 31760 - RNA, 21 nt, artificial
  Chemically synthesized
cugaauuuguuguuuuucacu

SEQ ID NO: 31761 - RNA, 21 nt, artificial
  Chemically synthesized
uggauuucauuucugaaguuu

SEQ ID NO: 31762 - RNA, 21 nt, artificial
  Chemically synthesized
acugauauuucagcaaaaggu

SEQ ID NO: 31763 - RNA, 21 nt, artificial
  Chemically synthesized
cacugauuacauucauacuac

SEQ ID NO: 31764 - RNA, 21 nt, artificial
  Chemically synthesized
uaugugaauucacaauugaaa

SEQ ID NO: 31765 - RNA, 21 nt, artificial
  Chemically synthesized
cuguggauagacauuuguacu

SEQ ID NO: 31766 - RNA, 21 nt, artificial
  Chemically synthesized
gugguuccagguaucugcuuc

SEQ ID NO: 31767 - RNA, 21 nt, artificial
  Chemically synthesized
cuauuaagaaucuuuucaaac

SEQ ID NO: 31768 - RNA, 21 nt, artificial
  Chemically synthesized
agcaauaguggugauauauuu

SEQ ID NO: 31769 - RNA, 21 nt, artificial
  Chemically synthesized
ucuuuucaaacacuaauugca

SEQ ID NO: 31770 - RNA, 21 nt, artificial
  Chemically synthesized
gcuuuuuugagaucuuuaauc

SEQ ID NO: 31771 - RNA, 21 nt, artificial
  Chemically synthesized
cucuagaccaagcuuuggauu

SEQ ID NO: 31772 - RNA, 21 nt, artificial
  Chemically synthesized
cuccuauuuggguacuuagca

SEQ ID NO: 31773 - RNA, 21 nt, artificial
  Chemically synthesized
augucacaaagcuacuuucuc

SEQ ID NO: 31774 - RNA, 21 nt, artificial
  Chemically synthesized
cuaguaauguccuugaggaug

SEQ ID NO: 31775 - RNA, 21 nt, artificial
  Chemically synthesized
agcuacuuucucugagagcag

SEQ ID NO: 31776 - RNA, 21 nt, artificial
  Chemically synthesized
aauguuuucuaugugaauuca

SEQ ID NO: 31777 - RNA, 21 nt, artificial
  Chemically synthesized
uaaaauguacccaguaaaaaa

SEQ ID NO: 31778 - RNA, 21 nt, artificial
  Chemically synthesized
guuuguuuucccaacuagauu

SEQ ID NO: 31779 - RNA, 21 nt, artificial
  Chemically synthesized
agucacuugggcauuaacacu

SEQ ID NO: 31780 - RNA, 21 nt, artificial
  Chemically synthesized
caugacaugucacaaagcuac

SEQ ID NO: 31781 - RNA, 21 nt, artificial
  Chemically synthesized
caguuaguaucuccaaaccag

SEQ ID NO: 31782 - RNA, 21 nt, artificial
  Chemically synthesized
ugcaaacauggguucaugaca

SEQ ID NO: 31783 - RNA, 21 nt, artificial
  Chemically synthesized
caucuuugauugcaaacaugg

SEQ ID NO: 31784 - RNA, 21 nt, artificial
  Chemically synthesized
agcuucuucuauugauucaua

SEQ ID NO: 31785 - RNA, 21 nt, artificial
  Chemically synthesized
auacucagaacugaauuuguu

SEQ ID NO: 31786 - RNA, 21 nt, artificial
  Chemically synthesized
uggugagugugcauuccuuga

SEQ ID NO: 31787 - RNA, 21 nt, artificial
  Chemically synthesized
cuauuaaguauuuuuugguga

SEQ ID NO: 31788 - RNA, 21 nt, artificial
  Chemically synthesized
aacaaaguuuagaaauauggu

SEQ ID NO: 31789 - RNA, 21 nt, artificial
  Chemically synthesized
ucuaugugaauucacaauuga

SEQ ID NO: 31790 - RNA, 21 nt, artificial
  Chemically synthesized
gacaugucacaaagcuacuuu

SEQ ID NO: 31791 - RNA, 21 nt, artificial
  Chemically synthesized
aaauucugcacucaaauacau

SEQ ID NO: 31792 - RNA, 21 nt, artificial
  Chemically synthesized
ugagagcaguuaguaucucca

SEQ ID NO: 31793 - RNA, 21 nt, artificial
  Chemically synthesized
agcuauuaagaaucuuuucaa

SEQ ID NO: 31794 - RNA, 21 nt, artificial
  Chemically synthesized
aguugaacuuucuguucugcu

SEQ ID NO: 31795 - RNA, 21 nt, artificial
  Chemically synthesized
cuuuugguggacuauuaagua

SEQ ID NO: 31796 - RNA, 21 nt, artificial
  Chemically synthesized
ccauucuuucgaacaaagccu

SEQ ID NO: 31797 - RNA, 21 nt, artificial
  Chemically synthesized
uguacuaacauacacugauua

SEQ ID NO: 31798 - RNA, 21 nt, artificial
  Chemically synthesized
uaucaucuuugauugcaaaca

SEQ ID NO: 31799 - RNA, 21 nt, artificial
  Chemically synthesized
aaagauauuuaaacguaggau

SEQ ID NO: 31800 - RNA, 21 nt, artificial
  Chemically synthesized
ugaucuucucagaguuauaaa

SEQ ID NO: 31801 - RNA, 21 nt, artificial
  Chemically synthesized
augaucuucucagaguuauaa

SEQ ID NO: 31802 - RNA, 21 nt, artificial
  Chemically synthesized
gcauuccuugaugauuccaug

SEQ ID NO: 31803 - RNA, 21 nt, artificial
  Chemically synthesized
uacacugauuacauucauacu

SEQ ID NO: 31804 - RNA, 21 nt, artificial
  Chemically synthesized
aauuccuaaauccagaugaug

SEQ ID NO: 31805 - RNA, 21 nt, artificial
  Chemically synthesized
aucucuagaauuaucagaggu

SEQ ID NO: 31806 - RNA, 21 nt, artificial
  Chemically synthesized
agauuuuaaacauccuuggag

SEQ ID NO: 31807 - RNA, 21 nt, artificial
  Chemically synthesized
aggccuuccaaguucugaguc

SEQ ID NO: 31808 - RNA, 21 nt, artificial
  Chemically synthesized
cugcauuuacucuugaugaag

SEQ ID NO: 31809 - RNA, 21 nt, artificial
  Chemically synthesized
aaguuuguuuucccaacuaga

SEQ ID NO: 31810 - RNA, 21 nt, artificial
  Chemically synthesized
aaggagaaucuuaaaucuuag

SEQ ID NO: 31811 - RNA, 21 nt, artificial
  Chemically synthesized
cuuuggauuucauuucugaag

SEQ ID NO: 31812 - RNA, 21 nt, artificial
  Chemically synthesized
gaauuaucagagguaauuuag

SEQ ID NO: 31813 - RNA, 21 nt, artificial
  Chemically synthesized
augacuccagcaauaguggug

SEQ ID NO: 31814 - RNA, 21 nt, artificial
  Chemically synthesized
accaagcuuuggauuucauuu

SEQ ID NO: 31815 - RNA, 21 nt, artificial
  Chemically synthesized
uacucuccugcucaaaaugcu

SEQ ID NO: 31816 - RNA, 21 nt, artificial
  Chemically synthesized
gauugcaaacauggguucaug

SEQ ID NO: 31817 - RNA, 21 nt, artificial
  Chemically synthesized
aguaaggagaaucuuaaaucu

SEQ ID NO: 31818 - RNA, 21 nt, artificial
  Chemically synthesized
uggugauauauuuacucaagu

SEQ ID NO: 31819 - RNA, 21 nt, artificial
  Chemically synthesized
uggacgauaaucuagcaacag

SEQ ID NO: 31820 - RNA, 21 nt, artificial
  Chemically synthesized
ucugcuucaguuuauaacuau

SEQ ID NO: 31821 - RNA, 21 nt, artificial
  Chemically synthesized
guggugauauauuuacucaag

SEQ ID NO: 31822 - RNA, 21 nt, artificial
  Chemically synthesized
gugucuuggacauugucauuc

SEQ ID NO: 31823 - RNA, 21 nt, artificial
  Chemically synthesized
uccaaucccuuggaguugaug

SEQ ID NO: 31824 - RNA, 21 nt, artificial
  Chemically synthesized
ugagucacuaguaauguccuu

SEQ ID NO: 31825 - RNA, 21 nt, artificial
  Chemically synthesized
acucuagaccaagcuuuggau

SEQ ID NO: 31826 - RNA, 21 nt, artificial
  Chemically synthesized
aacuaucuucacaguuuacau

SEQ ID NO: 31827 - RNA, 21 nt, artificial
  Chemically synthesized
acauacacugauuacauucau

SEQ ID NO: 31828 - RNA, 21 nt, artificial
  Chemically synthesized
aaauccagaugaugauuuuac

SEQ ID NO: 31829 - RNA, 21 nt, artificial
  Chemically synthesized
cugauuacauucauacuacag

SEQ ID NO: 31830 - RNA, 21 nt, artificial
  Chemically synthesized
auagcuucuucuauugauuca

SEQ ID NO: 31831 - RNA, 21 nt, artificial
  Chemically synthesized
agccuuuaacuugacuuagug

SEQ ID NO: 31832 - RNA, 21 nt, artificial
  Chemically synthesized
uaaggagaaucuuaaaucuua

SEQ ID NO: 31833 - RNA, 21 nt, artificial
  Chemically synthesized
uugaugccugagaaagaagua

SEQ ID NO: 31834 - RNA, 21 nt, artificial
  Chemically synthesized
cugaauuuucucugcaagagu

SEQ ID NO: 31835 - RNA, 21 nt, artificial
  Chemically synthesized
guuuagaaauaugguaaaauc

SEQ ID NO: 31836 - RNA, 21 nt, artificial
  Chemically synthesized
aauacucuccugcucaaaaug

SEQ ID NO: 31837 - RNA, 21 nt, artificial
  Chemically synthesized
caaaaaaauccuccauaaaug

SEQ ID NO: 31838 - RNA, 21 nt, artificial
  Chemically synthesized
aggaugauagucugaauuuuc

SEQ ID NO: 31839 - RNA, 21 nt, artificial
  Chemically synthesized
uggugauauuuccauguuugg

SEQ ID NO: 31840 - RNA, 21 nt, artificial
  Chemically synthesized
cuuuuggacgauaaucuagca

SEQ ID NO: 31841 - RNA, 21 nt, artificial
  Chemically synthesized
aguuugaauuuucugagucac

SEQ ID NO: 31842 - RNA, 21 nt, artificial
  Chemically synthesized
gucauucuugaucucaucuau

SEQ ID NO: 31843 - RNA, 21 nt, artificial
  Chemically synthesized
ucauuucugaaguuugaauuu

SEQ ID NO: 31844 - RNA, 21 nt, artificial
  Chemically synthesized
aacuagauuuuaaacauccuu

SEQ ID NO: 31845 - RNA, 21 nt, artificial
  Chemically synthesized
ucuagaccaagcuuuggauuu

SEQ ID NO: 31846 - RNA, 21 nt, artificial
  Chemically synthesized
augggacauuauugaacauuu

SEQ ID NO: 31847 - RNA, 21 nt, artificial
  Chemically synthesized
auuacguacuuuuaccuauau

SEQ ID NO: 31848 - RNA, 21 nt, artificial
  Chemically synthesized
acauugucauucuugaucuca

SEQ ID NO: 31849 - RNA, 21 nt, artificial
  Chemically synthesized
cuucuauugauucauagagug

SEQ ID NO: 31850 - RNA, 21 nt, artificial
  Chemically synthesized
ucuucagcgcuaauaaaugau

SEQ ID NO: 31851 - RNA, 21 nt, artificial
  Chemically synthesized
aauucugcacucaaauacaua

SEQ ID NO: 31852 - RNA, 21 nt, artificial
  Chemically synthesized
agcaugguuguugagcaaucc

SEQ ID NO: 31853 - RNA, 21 nt, artificial
  Chemically synthesized
uaacugauauuucagcaaaag

SEQ ID NO: 31854 - RNA, 21 nt, artificial
  Chemically synthesized
guccuugaggaugauagucug

SEQ ID NO: 31855 - RNA, 21 nt, artificial
  Chemically synthesized
accauugcuauguauaagcug

SEQ ID NO: 31856 - RNA, 21 nt, artificial
  Chemically synthesized
uaauugcauauacucagaacu

SEQ ID NO: 31857 - RNA, 21 nt, artificial
  Chemically synthesized
aacauggguucaugacauguc

SEQ ID NO: 31858 - RNA, 21 nt, artificial
  Chemically synthesized
guuugaauuuucugagucacu

SEQ ID NO: 31859 - RNA, 21 nt, artificial
  Chemically synthesized
cacuuuuggacgauaaucuag

SEQ ID NO: 31860 - RNA, 21 nt, artificial
  Chemically synthesized
auaaucuuaaucuuucauccu

SEQ ID NO: 31861 - RNA, 21 nt, artificial
  Chemically synthesized
guuuuacaugggacauuauug

SEQ ID NO: 31862 - RNA, 21 nt, artificial
  Chemically synthesized
cuugaugauuccauguucaca

SEQ ID NO: 31863 - RNA, 21 nt, artificial
  Chemically synthesized
cuuaaucuuucauccucugca

SEQ ID NO: 31864 - RNA, 21 nt, artificial
  Chemically synthesized
guuuuucacucuagaccaagc

SEQ ID NO: 31865 - RNA, 21 nt, artificial
  Chemically synthesized
aacacuaauugcauauacuca

SEQ ID NO: 31866 - RNA, 21 nt, artificial
  Chemically synthesized
uacauucauacuacagaauca

SEQ ID NO: 31867 - RNA, 21 nt, artificial
  Chemically synthesized
aaaaucucuagaauuaucaga

SEQ ID NO: 31868 - RNA, 21 nt, artificial
  Chemically synthesized
ccaagcuuuggauuucauuuc

SEQ ID NO: 31869 - RNA, 21 nt, artificial
  Chemically synthesized
uacuuucucugagagcaguua

SEQ ID NO: 31870 - RNA, 21 nt, artificial
  Chemically synthesized
agaugcccagcaugguuguug

SEQ ID NO: 31871 - RNA, 21 nt, artificial
  Chemically synthesized
aucuccaaaccaggcuagaau

SEQ ID NO: 31872 - RNA, 21 nt, artificial
  Chemically synthesized
guugaacuuucuguucugcug

SEQ ID NO: 31873 - RNA, 21 nt, artificial
  Chemically synthesized
acucagaacugaauuuguugu

SEQ ID NO: 31874 - RNA, 21 nt, artificial
  Chemically synthesized
caauaaacugugcaaaggucu

SEQ ID NO: 31875 - RNA, 21 nt, artificial
  Chemically synthesized
cuagaauuucuaagggcaguc

SEQ ID NO: 31876 - RNA, 21 nt, artificial
  Chemically synthesized
aacuguaguaacagucuuccu

SEQ ID NO: 31877 - RNA, 21 nt, artificial
  Chemically synthesized
guggacuauuaaguauuuuuu

SEQ ID NO: 31878 - RNA, 21 nt, artificial
  Chemically synthesized
uaugguaaaaucucuagaauu

SEQ ID NO: 31879 - RNA, 21 nt, artificial
  Chemically synthesized
uguagcagguuuuacauggga

SEQ ID NO: 31880 - RNA, 21 nt, artificial
  Chemically synthesized
gguaugacaagagcaauuccu

SEQ ID NO: 31881 - RNA, 21 nt, artificial
  Chemically synthesized
aaguucugagucucaacugua

SEQ ID NO: 31882 - RNA, 21 nt, artificial
  Chemically synthesized
uguuuucccaacuagauuuua

SEQ ID NO: 31883 - RNA, 21 nt, artificial
  Chemically synthesized
caugucacaaagcuacuuucu

SEQ ID NO: 31884 - RNA, 21 nt, artificial
  Chemically synthesized
accaauaaacugugcaaaggu

SEQ ID NO: 31885 - RNA, 21 nt, artificial
  Chemically synthesized
gugucauacgcuucuuucuuu

SEQ ID NO: 31886 - RNA, 21 nt, artificial
  Chemically synthesized
ugacuccagcaauagugguga

SEQ ID NO: 31887 - RNA, 21 nt, artificial
  Chemically synthesized
aaaugauaaaauguacccagu

SEQ ID NO: 31888 - RNA, 21 nt, artificial
  Chemically synthesized
ucuucacaguuuacauuuaca

SEQ ID NO: 31889 - RNA, 21 nt, artificial
  Chemically synthesized
guucaguaacugauauuucag

SEQ ID NO: 31890 - RNA, 21 nt, artificial
  Chemically synthesized
cauucuugaucucaucuauuu

SEQ ID NO: 31891 - RNA, 21 nt, artificial
  Chemically synthesized
ccaauaaacugugcaaagguc

SEQ ID NO: 31892 - RNA, 21 nt, artificial
  Chemically synthesized
gaugaaguuuguuuucccaac

SEQ ID NO: 31893 - RNA, 21 nt, artificial
  Chemically synthesized
ugccugagaaagaaguaggua

SEQ ID NO: 31894 - RNA, 21 nt, artificial
  Chemically synthesized
aaacacuaauugcauauacuc

SEQ ID NO: 31895 - RNA, 21 nt, artificial
  Chemically synthesized
agaaauaugguaaaaucucua

SEQ ID NO: 31896 - RNA, 21 nt, artificial
  Chemically synthesized
ccuuuaacuugacuuaguguc

SEQ ID NO: 31897 - RNA, 21 nt, artificial
  Chemically synthesized
gaaucuauuuuaucaucuuug

SEQ ID NO: 31898 - RNA, 21 nt, artificial
  Chemically synthesized
ucaauuccaaucccuuggagu

SEQ ID NO: 31899 - RNA, 21 nt, artificial
  Chemically synthesized
uacuaacauacacugauuaca

SEQ ID NO: 31900 - RNA, 21 nt, artificial
  Chemically synthesized
uaacuugacuuagugucauga

SEQ ID NO: 31901 - RNA, 21 nt, artificial
  Chemically synthesized
uagcuucuucuauugauucau

SEQ ID NO: 31902 - RNA, 21 nt, artificial
  Chemically synthesized
uuccuaaauccagaugaugau

SEQ ID NO: 31903 - RNA, 21 nt, artificial
  Chemically synthesized
acagacguaagaaccagaggu

SEQ ID NO: 31904 - RNA, 21 nt, artificial
  Chemically synthesized
ugucagucacuugggcauuaa

SEQ ID NO: 31905 - RNA, 21 nt, artificial
  Chemically synthesized
cucuucagcgcuaauaaauga

SEQ ID NO: 31906 - RNA, 21 nt, artificial
  Chemically synthesized
ggacuauuaaguauuuuuugg

SEQ ID NO: 31907 - RNA, 21 nt, artificial
  Chemically synthesized
ugagguagagccuuauuuaaa

SEQ ID NO: 31908 - RNA, 21 nt, artificial
  Chemically synthesized
cauacuacagaaucauauguu

SEQ ID NO: 31909 - RNA, 21 nt, artificial
  Chemically synthesized
uaguaauacucuccugcucaa

SEQ ID NO: 31910 - RNA, 21 nt, artificial
  Chemically synthesized
aaacugugcaaaggucuuuga

SEQ ID NO: 31911 - RNA, 21 nt, artificial
  Chemically synthesized
agaauuaucagagguaauuua

SEQ ID NO: 31912 - RNA, 21 nt, artificial
  Chemically synthesized
auaugaucuucucagaguuau

SEQ ID NO: 31913 - RNA, 21 nt, artificial
  Chemically synthesized
ugcauacacuccuauuugggu

SEQ ID NO: 31914 - RNA, 21 nt, artificial
  Chemically synthesized
uucaaacacuaauugcauaua

SEQ ID NO: 31915 - RNA, 21 nt, artificial
  Chemically synthesized
aauuccaaucccuuggaguug

SEQ ID NO: 31916 - RNA, 21 nt, artificial
  Chemically synthesized
agacauuuguacuaacauaca

SEQ ID NO: 31917 - RNA, 21 nt, artificial
  Chemically synthesized
aacagacguaagaaccagagg

SEQ ID NO: 31918 - RNA, 21 nt, artificial
  Chemically synthesized
gaugccugagaaagaaguagg

SEQ ID NO: 31919 - RNA, 21 nt, artificial
  Chemically synthesized
uaagaugagcaccaaggcaaa

SEQ ID NO: 31920 - RNA, 21 nt, artificial
  Chemically synthesized
gccuuauuuaaauucugcacu

SEQ ID NO: 31921 - RNA, 21 nt, artificial
  Chemically synthesized
aauuuucugagucacuaguaa

SEQ ID NO: 31922 - RNA, 21 nt, artificial
  Chemically synthesized
ggacauuauugaacauuuucg

SEQ ID NO: 31923 - RNA, 21 nt, artificial
  Chemically synthesized
agagcauaaucuuaaucuuuc

SEQ ID NO: 31924 - RNA, 21 nt, artificial
  Chemically synthesized
gucucaacuguaguaacaguc

SEQ ID NO: 31925 - RNA, 21 nt, artificial
  Chemically synthesized
agucugaauuuucucugcaag

SEQ ID NO: 31926 - RNA, 21 nt, artificial
  Chemically synthesized
agaguuauaaacaaaguuuag

SEQ ID NO: 31927 - RNA, 21 nt, artificial
  Chemically synthesized
gaguugaugucagucacuugg

SEQ ID NO: 31928 - RNA, 21 nt, artificial
  Chemically synthesized
gaauuuucugagucacuagua

SEQ ID NO: 31929 - RNA, 21 nt, artificial
  Chemically synthesized
aaauaugguaaaaucucuaga

SEQ ID NO: 31930 - RNA, 21 nt, artificial
  Chemically synthesized
aacaaagccuuuaacuugacu

SEQ ID NO: 31931 - RNA, 21 nt, artificial
  Chemically synthesized
aaauaugaucuucucagaguu

SEQ ID NO: 31932 - RNA, 21 nt, artificial
  Chemically synthesized
uguggauagacauuuguacua

SEQ ID NO: 31933 - RNA, 21 nt, artificial
  Chemically synthesized
aguucugagucucaacuguag

SEQ ID NO: 31934 - RNA, 21 nt, artificial
  Chemically synthesized
gacauuuguacuaacauacac

SEQ ID NO: 31935 - RNA, 21 nt, artificial
  Chemically synthesized
caguugaacuuucuguucugc

SEQ ID NO: 31936 - RNA, 21 nt, artificial
  Chemically synthesized
gauuacauucauacuacagaa

SEQ ID NO: 31937 - RNA, 21 nt, artificial
  Chemically synthesized
cucugagagcaguuaguaucu

SEQ ID NO: 31938 - RNA, 21 nt, artificial
  Chemically synthesized
acaaaguuuagaaauauggua

SEQ ID NO: 31939 - RNA, 21 nt, artificial
  Chemically synthesized
cuuuaacuugacuuaguguca

SEQ ID NO: 31940 - RNA, 21 nt, artificial
  Chemically synthesized
caaaguuuagaaauaugguaa

SEQ ID NO: 31941 - RNA, 21 nt, artificial
  Chemically synthesized
agaagcgucuuugaacaccug

SEQ ID NO: 31942 - RNA, 21 nt, artificial
  Chemically synthesized
caguuuauaacuaucuucaca

SEQ ID NO: 31943 - RNA, 21 nt, artificial
  Chemically synthesized
ugguuccagguaucugcuuca

SEQ ID NO: 31944 - RNA, 21 nt, artificial
  Chemically synthesized
auucugcacucaaauacauau

SEQ ID NO: 31945 - RNA, 21 nt, artificial
  Chemically synthesized
uggguucaugacaugucacaa

SEQ ID NO: 31946 - RNA, 21 nt, artificial
  Chemically synthesized
cuuauuuaaauucugcacuca

SEQ ID NO: 31947 - RNA, 21 nt, artificial
  Chemically synthesized
ccuuuugguggacuauuaagu

SEQ ID NO: 31948 - RNA, 21 nt, artificial
  Chemically synthesized
ucccaacuagauuuuaaacau

SEQ ID NO: 31949 - RNA, 21 nt, artificial
  Chemically synthesized
cauuaagaugagcaccaaggc

SEQ ID NO: 31950 - RNA, 21 nt, artificial
  Chemically synthesized
aauuacgaagcaguugaacuu

SEQ ID NO: 31951 - RNA, 21 nt, artificial
  Chemically synthesized
guuguugagcaauccuccgaa

SEQ ID NO: 31952 - RNA, 21 nt, artificial
  Chemically synthesized
uaagggcagucuugccuuuug

SEQ ID NO: 31953 - RNA, 21 nt, artificial
  Chemically synthesized
ucagagguaauuuagaggcaa

SEQ ID NO: 31954 - RNA, 21 nt, artificial
  Chemically synthesized
ccuaaauccagaugaugauuu

SEQ ID NO: 31955 - RNA, 21 nt, artificial
  Chemically synthesized
agcuuuggauuucauuucuga

SEQ ID NO: 31956 - RNA, 21 nt, artificial
  Chemically synthesized
ucaugacaugucacaaagcua

SEQ ID NO: 31957 - RNA, 21 nt, artificial
  Chemically synthesized
ccaggcuagaauuucuaaggg

SEQ ID NO: 31958 - RNA, 21 nt, artificial
  Chemically synthesized
uuccaaucccuuggaguugau

SEQ ID NO: 31959 - RNA, 21 nt, artificial
  Chemically synthesized
gucauacgcuucuuucuuucc

SEQ ID NO: 31960 - RNA, 21 nt, artificial
  Chemically synthesized
ucuagaauuaucagagguaau

SEQ ID NO: 31961 - RNA, 21 nt, artificial
  Chemically synthesized
ccuuggaggcagaaucaugag

SEQ ID NO: 31962 - RNA, 21 nt, artificial
  Chemically synthesized
auuucauuucugaaguuugaa

SEQ ID NO: 31963 - RNA, 21 nt, artificial
  Chemically synthesized
uagucugaauuuucucugcaa

SEQ ID NO: 31964 - RNA, 21 nt, artificial
  Chemically synthesized
ugaugccugagaaagaaguag

SEQ ID NO: 31965 - RNA, 21 nt, artificial
  Chemically synthesized
cacugcauuuacucuugauga

SEQ ID NO: 31966 - RNA, 21 nt, artificial
  Chemically synthesized
cugcucaaaaugcuuuugaug

SEQ ID NO: 31967 - RNA, 21 nt, artificial
  Chemically synthesized
aguaaaaaaccaagcaguauu

SEQ ID NO: 31968 - RNA, 21 nt, artificial
  Chemically synthesized
aauaaacugugcaaaggucuu

SEQ ID NO: 31969 - RNA, 23 nt, artificial
  Chemically synthesized
guuuuuuacuggguacauuuuau

SEQ ID NO: 31970 - RNA, 23 nt, artificial
  Chemically synthesized
cguaauuaaauaauguuuuuggu

SEQ ID NO: 31971 - RNA, 23 nt, artificial
  Chemically synthesized
uguuuaaaaucuaguugggaaaa

SEQ ID NO: 31972 - RNA, 23 nt, artificial
  Chemically synthesized
aacuuuguuuauaacucugagaa

SEQ ID NO: 31973 - RNA, 23 nt, artificial
  Chemically synthesized
aagauuuaagauucuccuuacua

SEQ ID NO: 31974 - RNA, 23 nt, artificial
  Chemically synthesized
guuaaugcccaagugacugacau

SEQ ID NO: 31975 - RNA, 23 nt, artificial
  Chemically synthesized
uaaaauauagguaaaaguacgua

SEQ ID NO: 31976 - RNA, 23 nt, artificial
  Chemically synthesized
cauuuuugccuuggugcucaucu

SEQ ID NO: 31977 - RNA, 23 nt, artificial
  Chemically synthesized
cuaaacuuuguuuauaacucuga

SEQ ID NO: 31978 - RNA, 23 nt, artificial
  Chemically synthesized
aaacuuuguuuauaacucugaga

SEQ ID NO: 31979 - RNA, 23 nt, artificial
  Chemically synthesized
auuuaagauucuccuuacuacua

SEQ ID NO: 31980 - RNA, 23 nt, artificial
  Chemically synthesized
aaugaaauccaaagcuuggucua

SEQ ID NO: 31981 - RNA, 23 nt, artificial
  Chemically synthesized
cacuaagucaaguuaaaggcuuu

SEQ ID NO: 31982 - RNA, 23 nt, artificial
  Chemically synthesized
auguuuaaaaucuaguugggaaa

SEQ ID NO: 31983 - RNA, 23 nt, artificial
  Chemically synthesized
acguaauuaaauaauguuuuugg

SEQ ID NO: 31984 - RNA, 23 nt, artificial
  Chemically synthesized
ccuuagaaauucuagccugguuu

SEQ ID NO: 31985 - RNA, 23 nt, artificial
  Chemically synthesized
cugcucucagagaaaguagcuuu

SEQ ID NO: 31986 - RNA, 23 nt, artificial
  Chemically synthesized
acuguuacuacaguugagacuca

SEQ ID NO: 31987 - RNA, 23 nt, artificial
  Chemically synthesized
gaaauucuagccugguuuggaga

SEQ ID NO: 31988 - RNA, 23 nt, artificial
  Chemically synthesized
gcccuuagaaauucuagccuggu

SEQ ID NO: 31989 - RNA, 23 nt, artificial
  Chemically synthesized
aacaaccaugcugggcaucugga

SEQ ID NO: 31990 - RNA, 23 nt, artificial
  Chemically synthesized
aauucuagagauuuuaccauauu

SEQ ID NO: 31991 - RNA, 23 nt, artificial
  Chemically synthesized
aaauucuagccugguuuggagau

SEQ ID NO: 31992 - RNA, 23 nt, artificial
  Chemically synthesized
aagaaugacaauguccaagacac

SEQ ID NO: 31993 - RNA, 23 nt, artificial
  Chemically synthesized
ccaaaaggcaagacugcccuuag

SEQ ID NO: 31994 - RNA, 23 nt, artificial
  Chemically synthesized
cuuagaaauucuagccugguuug

SEQ ID NO: 31995 - RNA, 23 nt, artificial
  Chemically synthesized
agaaauucuagccugguuuggag

SEQ ID NO: 31996 - RNA, 23 nt, artificial
  Chemically synthesized
auaaaauauagguaaaaguacgu

SEQ ID NO: 31997 - RNA, 23 nt, artificial
  Chemically synthesized
uaaauuaccucugauaauucuag

SEQ ID NO: 31998 - RNA, 23 nt, artificial
  Chemically synthesized
aacugcucucagagaaaguagcu

SEQ ID NO: 31999 - RNA, 23 nt, artificial
  Chemically synthesized
cuuucacuucggaggauugcuca

SEQ ID NO: 32000 - RNA, 23 nt, artificial
  Chemically synthesized
uuauaacucugagaagaucauau

SEQ ID NO: 32001 - RNA, 23 nt, artificial
  Chemically synthesized
caccaaaaggcaagacugcccuu

SEQ ID NO: 32002 - RNA, 23 nt, artificial
  Chemically synthesized
agguguucaaagacgcuucuggg

SEQ ID NO: 32003 - RNA, 23 nt, artificial
  Chemically synthesized
caugucaugaacccauguuugca

SEQ ID NO: 32004 - RNA, 23 nt, artificial
  Chemically synthesized
ugacaugucaugaacccauguuu

SEQ ID NO: 32005 - RNA, 23 nt, artificial
  Chemically synthesized
cauuuugagcaggagaguauuac

SEQ ID NO: 32006 - RNA, 23 nt, artificial
  Chemically synthesized
acucaccagcaacaccaagugca

SEQ ID NO: 32007 - RNA, 23 nt, artificial
  Chemically synthesized
uaauaguccaccaaaaggcaaga

SEQ ID NO: 32008 - RNA, 23 nt, artificial
  Chemically synthesized
uauaaaauauagguaaaaguacg

SEQ ID NO: 32009 - RNA, 23 nt, artificial
  Chemically synthesized
cuuugcacaguuuauugguguca

SEQ ID NO: 32010 - RNA, 23 nt, artificial
  Chemically synthesized
uccuuacuacuauccuacguuua

SEQ ID NO: 32011 - RNA, 23 nt, artificial
  Chemically synthesized
uacaaaugucuauccacaggcua

SEQ ID NO: 32012 - RNA, 23 nt, artificial
  Chemically synthesized
caucuggauuuaggaauugcucu

SEQ ID NO: 32013 - RNA, 23 nt, artificial
  Chemically synthesized
aauguucaauaaugucccaugua

SEQ ID NO: 32014 - RNA, 23 nt, artificial
  Chemically synthesized
acacuaagucaaguuaaaggcuu

SEQ ID NO: 32015 - RNA, 23 nt, artificial
  Chemically synthesized
acauuuuaucauuuauuagcgcu

SEQ ID NO: 32016 - RNA, 23 nt, artificial
  Chemically synthesized
uaaugcccaagugacugacauca

SEQ ID NO: 32017 - RNA, 23 nt, artificial
  Chemically synthesized
acucagaacuuggaaggccugca

SEQ ID NO: 32018 - RNA, 23 nt, artificial
  Chemically synthesized
guuuaaauaucuuugaaaguuug

SEQ ID NO: 32019 - RNA, 23 nt, artificial
  Chemically synthesized
auuuuugccuuggugcucaucuu

SEQ ID NO: 32020 - RNA, 23 nt, artificial
  Chemically synthesized
ucaucaaggaaugcacacucacc

SEQ ID NO: 32021 - RNA, 23 nt, artificial
  Chemically synthesized
auuuuaucauuuauuagcgcuga

SEQ ID NO: 32022 - RNA, 23 nt, artificial
  Chemically synthesized
auaaaauguacccaguaaaaaac

SEQ ID NO: 32023 - RNA, 23 nt, artificial
  Chemically synthesized
accaaaaacauuauuuaauuacg

SEQ ID NO: 32024 - RNA, 23 nt, artificial
  Chemically synthesized
uuuucccaacuagauuuuaaaca

SEQ ID NO: 32025 - RNA, 23 nt, artificial
  Chemically synthesized
uucucagaguuauaaacaaaguu

SEQ ID NO: 32026 - RNA, 23 nt, artificial
  Chemically synthesized
uaguaaggagaaucuuaaaucuu

SEQ ID NO: 32027 - RNA, 23 nt, artificial
  Chemically synthesized
augucagucacuugggcauuaac

SEQ ID NO: 32028 - RNA, 23 nt, artificial
  Chemically synthesized
uacguacuuuuaccuauauuuua

SEQ ID NO: 32029 - RNA, 23 nt, artificial
  Chemically synthesized
agaugagcaccaaggcaaaaaug

SEQ ID NO: 32030 - RNA, 23 nt, artificial
  Chemically synthesized
ucagaguuauaaacaaaguuuag

SEQ ID NO: 32031 - RNA, 23 nt, artificial
  Chemically synthesized
ucucagaguuauaaacaaaguuu

SEQ ID NO: 32032 - RNA, 23 nt, artificial
  Chemically synthesized
uaguaguaaggagaaucuuaaau

SEQ ID NO: 32033 - RNA, 23 nt, artificial
  Chemically synthesized
uagaccaagcuuuggauuucauu

SEQ ID NO: 32034 - RNA, 23 nt, artificial
  Chemically synthesized
aaagccuuuaacuugacuuagug

SEQ ID NO: 32035 - RNA, 23 nt, artificial
  Chemically synthesized
uuucccaacuagauuuuaaacau

SEQ ID NO: 32036 - RNA, 23 nt, artificial
  Chemically synthesized
ccaaaaacauuauuuaauuacgu

SEQ ID NO: 32037 - RNA, 23 nt, artificial
  Chemically synthesized
aaaccaggcuagaauuucuaagg

SEQ ID NO: 32038 - RNA, 23 nt, artificial
  Chemically synthesized
aaagcuacuuucucugagagcag

SEQ ID NO: 32039 - RNA, 23 nt, artificial
  Chemically synthesized
ugagucucaacuguaguaacagu

SEQ ID NO: 32040 - RNA, 23 nt, artificial
  Chemically synthesized
ucuccaaaccaggcuagaauuuc

SEQ ID NO: 32041 - RNA, 23 nt, artificial
  Chemically synthesized
accaggcuagaauuucuaagggc

SEQ ID NO: 32042 - RNA, 23 nt, artificial
  Chemically synthesized
uccagaugcccagcaugguuguu

SEQ ID NO: 32043 - RNA, 23 nt, artificial
  Chemically synthesized
aauaugguaaaaucucuagaauu

SEQ ID NO: 32044 - RNA, 23 nt, artificial
  Chemically synthesized
aucuccaaaccaggcuagaauuu

SEQ ID NO: 32045 - RNA, 23 nt, artificial
  Chemically synthesized
gugucuuggacauugucauucuu

SEQ ID NO: 32046 - RNA, 23 nt, artificial
  Chemically synthesized
cuaagggcagucuugccuuuugg

SEQ ID NO: 32047 - RNA, 23 nt, artificial
  Chemically synthesized
caaaccaggcuagaauuucuaag

SEQ ID NO: 32048 - RNA, 23 nt, artificial
  Chemically synthesized
cuccaaaccaggcuagaauuucu

SEQ ID NO: 32049 - RNA, 23 nt, artificial
  Chemically synthesized
acguacuuuuaccuauauuuuau

SEQ ID NO: 32050 - RNA, 23 nt, artificial
  Chemically synthesized
cuagaauuaucagagguaauuua

SEQ ID NO: 32051 - RNA, 23 nt, artificial
  Chemically synthesized
agcuacuuucucugagagcaguu

SEQ ID NO: 32052 - RNA, 23 nt, artificial
  Chemically synthesized
ugagcaauccuccgaagugaaag

SEQ ID NO: 32053 - RNA, 23 nt, artificial
  Chemically synthesized
auaugaucuucucagaguuauaa

SEQ ID NO: 32054 - RNA, 23 nt, artificial
  Chemically synthesized
aagggcagucuugccuuuuggug

SEQ ID NO: 32055 - RNA, 23 nt, artificial
  Chemically synthesized
cccagaagcgucuuugaacaccu

SEQ ID NO: 32056 - RNA, 23 nt, artificial
  Chemically synthesized
ugcaaacauggguucaugacaug

SEQ ID NO: 32057 - RNA, 23 nt, artificial
  Chemically synthesized
aaacauggguucaugacauguca

SEQ ID NO: 32058 - RNA, 23 nt, artificial
  Chemically synthesized
guaauacucuccugcucaaaaug

SEQ ID NO: 32059 - RNA, 23 nt, artificial
  Chemically synthesized
ugcacuugguguugcuggugagu

SEQ ID NO: 32060 - RNA, 23 nt, artificial
  Chemically synthesized
ucuugccuuuugguggacuauua

SEQ ID NO: 32061 - RNA, 23 nt, artificial
  Chemically synthesized
cguacuuuuaccuauauuuuaua

SEQ ID NO: 32062 - RNA, 23 nt, artificial
  Chemically synthesized
ugacaccaauaaacugugcaaag

SEQ ID NO: 32063 - RNA, 23 nt, artificial
  Chemically synthesized
uaaacguaggauaguaguaagga

SEQ ID NO: 32064 - RNA, 23 nt, artificial
  Chemically synthesized
uagccuguggauagacauuugua

SEQ ID NO: 32065 - RNA, 23 nt, artificial
  Chemically synthesized
agagcaauuccuaaauccagaug

SEQ ID NO: 32066 - RNA, 23 nt, artificial
  Chemically synthesized
uacaugggacauuauugaacauu

SEQ ID NO: 32067 - RNA, 23 nt, artificial
  Chemically synthesized
aagccuuuaacuugacuuagugu

SEQ ID NO: 32068 - RNA, 23 nt, artificial
  Chemically synthesized
agcgcuaauaaaugauaaaaugu

SEQ ID NO: 32069 - RNA, 23 nt, artificial
  Chemically synthesized
ugaugucagucacuugggcauua

SEQ ID NO: 32070 - RNA, 23 nt, artificial
  Chemically synthesized
ugcaggccuuccaaguucugagu

SEQ ID NO: 32071 - RNA, 23 nt, artificial
  Chemically synthesized
caaacuuucaaagauauuuaaac

SEQ ID NO: 32072 - RNA, 23 nt, artificial
  Chemically synthesized
aagaugagcaccaaggcaaaaau

SEQ ID NO: 32073 - RNA, 23 nt, artificial
  Chemically synthesized
ggugagugugcauuccuugauga

SEQ ID NO: 32074 - RNA, 23 nt, artificial
  Chemically synthesized
ucagcgcuaauaaaugauaaaau

SEQ ID NO: 32075 - RNA, 23 nt, artificial
  Chemically synthesized
cuuggucuagagugaaaaacaac

SEQ ID NO: 32076 - RNA, 23 nt, artificial
  Chemically synthesized
acugugaagauaguuauaaacug

SEQ ID NO: 32077 - RNA, 23 nt, artificial
  Chemically synthesized
aacugugaagauaguuauaaacu

SEQ ID NO: 32078 - RNA, 23 nt, artificial
  Chemically synthesized
aaacugugaagauaguuauaaac

SEQ ID NO: 32079 - RNA, 23 nt, artificial
  Chemically synthesized
uaaacugugaagauaguuauaaa

SEQ ID NO: 32080 - RNA, 23 nt, artificial
  Chemically synthesized
ugcuagauuaucguccaaaagug

SEQ ID NO: 32081 - RNA, 23 nt, artificial
  Chemically synthesized
uugcuagauuaucguccaaaagu

SEQ ID NO: 32082 - RNA, 23 nt, artificial
  Chemically synthesized
guugcuagauuaucguccaaaag

SEQ ID NO: 32083 - RNA, 23 nt, artificial
  Chemically synthesized
ccuggaaccaccuaaagaacuuc

SEQ ID NO: 32084 - RNA, 23 nt, artificial
  Chemically synthesized
uaccuggaaccaccuaaagaacu

SEQ ID NO: 32085 - RNA, 23 nt, artificial
  Chemically synthesized
auaccuggaaccaccuaaagaac

SEQ ID NO: 32086 - RNA, 23 nt, artificial
  Chemically synthesized
caaacuucaucaagaguaaaugc

SEQ ID NO: 32087 - RNA, 23 nt, artificial
  Chemically synthesized
acaaacuucaucaagaguaaaug

SEQ ID NO: 32088 - RNA, 23 nt, artificial
  Chemically synthesized
aacaaacuucaucaagaguaaau

SEQ ID NO: 32089 - RNA, 23 nt, artificial
  Chemically synthesized
aaacaaacuucaucaagaguaaa

SEQ ID NO: 32090 - RNA, 23 nt, artificial
  Chemically synthesized
aaaacaaacuucaucaagaguaa

SEQ ID NO: 32091 - RNA, 23 nt, artificial
  Chemically synthesized
accagcaacaccaagugcaaaga

SEQ ID NO: 32092 - RNA, 23 nt, artificial
  Chemically synthesized
aagccaaaauagaugagaucaag

SEQ ID NO: 32093 - RNA, 23 nt, artificial
  Chemically synthesized
gacacuaagucaaguuaaaggcu

SEQ ID NO: 32094 - RNA, 23 nt, artificial
  Chemically synthesized
ugacacuaagucaaguuaaaggc

SEQ ID NO: 32095 - RNA, 23 nt, artificial
  Chemically synthesized
augacacuaagucaaguuaaagg

SEQ ID NO: 32096 - RNA, 23 nt, artificial
  Chemically synthesized
caugacacuaagucaaguuaaag

SEQ ID NO: 32097 - RNA, 23 nt, artificial
  Chemically synthesized
ugauuaaagaucucaaaaaagcc

SEQ ID NO: 32098 - RNA, 23 nt, artificial
  Chemically synthesized
uugauuaaagaucucaaaaaagc

SEQ ID NO: 32099 - RNA, 23 nt, artificial
  Chemically synthesized
auugauuaaagaucucaaaaaag

SEQ ID NO: 32100 - RNA, 23 nt, artificial
  Chemically synthesized
cauugauuaaagaucucaaaaaa

SEQ ID NO: 32101 - RNA, 23 nt, artificial
  Chemically synthesized
ucaagaaugacaauguccaagac

SEQ ID NO: 32102 - RNA, 23 nt, artificial
  Chemically synthesized
aucaagaaugacaauguccaaga

SEQ ID NO: 32103 - RNA, 23 nt, artificial
  Chemically synthesized
gaucaagaaugacaauguccaag

SEQ ID NO: 32104 - RNA, 23 nt, artificial
  Chemically synthesized
gguaaaaguacguaauuaaauaa

SEQ ID NO: 32105 - RNA, 23 nt, artificial
  Chemically synthesized
agguaaaaguacguaauuaaaua

SEQ ID NO: 32106 - RNA, 23 nt, artificial
  Chemically synthesized
uagguaaaaguacguaauuaaau

SEQ ID NO: 32107 - RNA, 23 nt, artificial
  Chemically synthesized
auagguaaaaguacguaauuaaa

SEQ ID NO: 32108 - RNA, 23 nt, artificial
  Chemically synthesized
uauagguaaaaguacguaauuaa

SEQ ID NO: 32109 - RNA, 23 nt, artificial
  Chemically synthesized
caaggauguuuaaaaucuaguug

SEQ ID NO: 32110 - RNA, 23 nt, artificial
  Chemically synthesized
uccaaggauguuuaaaaucuagu

SEQ ID NO: 32111 - RNA, 23 nt, artificial
  Chemically synthesized
cuccaaggauguuuaaaaucuag

SEQ ID NO: 32112 - RNA, 23 nt, artificial
  Chemically synthesized
gaaauaucaccaaaaaauacuua

SEQ ID NO: 32113 - RNA, 23 nt, artificial
  Chemically synthesized
ggaaauaucaccaaaaaauacuu

SEQ ID NO: 32114 - RNA, 23 nt, artificial
  Chemically synthesized
uggaaauaucaccaaaaaauacu

SEQ ID NO: 32115 - RNA, 23 nt, artificial
  Chemically synthesized
auggaaauaucaccaaaaaauac

SEQ ID NO: 32116 - RNA, 23 nt, artificial
  Chemically synthesized
cauggaaauaucaccaaaaaaua

SEQ ID NO: 32117 - RNA, 23 nt, artificial
  Chemically synthesized
gccugguuuggagauacuaacug

SEQ ID NO: 32118 - RNA, 23 nt, artificial
  Chemically synthesized
agccugguuuggagauacuaacu

SEQ ID NO: 32119 - RNA, 23 nt, artificial
  Chemically synthesized
acuacuauccuacguuuaaauau

SEQ ID NO: 32120 - RNA, 23 nt, artificial
  Chemically synthesized
uacuacuauccuacguuuaaaua

SEQ ID NO: 32121 - RNA, 23 nt, artificial
  Chemically synthesized
uuacuacuauccuacguuuaaau

SEQ ID NO: 32122 - RNA, 23 nt, artificial
  Chemically synthesized
guaaaaguacguaauuaaauaau

SEQ ID NO: 32123 - RNA, 23 nt, artificial
  Chemically synthesized
ucaauaaugucccauguaaaacc

SEQ ID NO: 32124 - RNA, 23 nt, artificial
  Chemically synthesized
uucaauaaugucccauguaaaac

SEQ ID NO: 32125 - RNA, 23 nt, artificial
  Chemically synthesized
acauggaaauaucaccaaaaaau

SEQ ID NO: 32126 - RNA, 23 nt, artificial
  Chemically synthesized
aacauggaaauaucaccaaaaaa

SEQ ID NO: 32127 - RNA, 23 nt, artificial
  Chemically synthesized
aaacauggaaauaucaccaaaaa

SEQ ID NO: 32128 - RNA, 23 nt, artificial
  Chemically synthesized
agcagaacagaaaguucaacugc

SEQ ID NO: 32129 - RNA, 23 nt, artificial
  Chemically synthesized
cagcagaacagaaaguucaacug

SEQ ID NO: 32130 - RNA, 23 nt, artificial
  Chemically synthesized
acagcagaacagaaaguucaacu

SEQ ID NO: 32131 - RNA, 23 nt, artificial
  Chemically synthesized
cacagcagaacagaaaguucaac

SEQ ID NO: 32132 - RNA, 23 nt, artificial
  Chemically synthesized
ugccuccaaggauguuuaaaauc

SEQ ID NO: 32133 - RNA, 23 nt, artificial
  Chemically synthesized
ccuuggugcucaucuuaauggcc

SEQ ID NO: 32134 - RNA, 23 nt, artificial
  Chemically synthesized
gccuuggugcucaucuuaauggc

SEQ ID NO: 32135 - RNA, 23 nt, artificial
  Chemically synthesized
ugccuuggugcucaucuuaaugg

SEQ ID NO: 32136 - RNA, 23 nt, artificial
  Chemically synthesized
uugccuuggugcucaucuuaaug

SEQ ID NO: 32137 - RNA, 23 nt, artificial
  Chemically synthesized
uuugccuuggugcucaucuuaau

SEQ ID NO: 32138 - RNA, 23 nt, artificial
  Chemically synthesized
agcaggagaguauuacuagagcu

SEQ ID NO: 32139 - RNA, 23 nt, artificial
  Chemically synthesized
gagcaggagaguauuacuagagc

SEQ ID NO: 32140 - RNA, 23 nt, artificial
  Chemically synthesized
ugagcaggagaguauuacuagag

SEQ ID NO: 32141 - RNA, 23 nt, artificial
  Chemically synthesized
uacuuaauaguccaccaaaaggc

SEQ ID NO: 32142 - RNA, 23 nt, artificial
  Chemically synthesized
auacuuaauaguccaccaaaagg

SEQ ID NO: 32143 - RNA, 23 nt, artificial
  Chemically synthesized
aauacuuaauaguccaccaaaag

SEQ ID NO: 32144 - RNA, 23 nt, artificial
  Chemically synthesized
aaauacuuaauaguccaccaaaa

SEQ ID NO: 32145 - RNA, 23 nt, artificial
  Chemically synthesized
cugagaagaucauauuuauguaa

SEQ ID NO: 32146 - RNA, 23 nt, artificial
  Chemically synthesized
ucugagaagaucauauuuaugua

SEQ ID NO: 32147 - RNA, 23 nt, artificial
  Chemically synthesized
acucugagaagaucauauuuaug

SEQ ID NO: 32148 - RNA, 23 nt, artificial
  Chemically synthesized
aacucugagaagaucauauuuau

SEQ ID NO: 32149 - RNA, 23 nt, artificial
  Chemically synthesized
caaagaugauaaaauagauucuu

SEQ ID NO: 32150 - RNA, 23 nt, artificial
  Chemically synthesized
ucaaagaugauaaaauagauucu

SEQ ID NO: 32151 - RNA, 23 nt, artificial
  Chemically synthesized
aucaaagaugauaaaauagauuc

SEQ ID NO: 32152 - RNA, 23 nt, artificial
  Chemically synthesized
aaucaaagaugauaaaauagauu

SEQ ID NO: 32153 - RNA, 23 nt, artificial
  Chemically synthesized
caaucaaagaugauaaaauagau

SEQ ID NO: 32154 - RNA, 23 nt, artificial
  Chemically synthesized
ucaacuucauggaaagaaagaag

SEQ ID NO: 32155 - RNA, 23 nt, artificial
  Chemically synthesized
aucaacuucauggaaagaaagaa

SEQ ID NO: 32156 - RNA, 23 nt, artificial
  Chemically synthesized
gcaucaacuucauggaaagaaag

SEQ ID NO: 32157 - RNA, 23 nt, artificial
  Chemically synthesized
uugggaaaacaaacuucaucaag

SEQ ID NO: 32158 - RNA, 23 nt, artificial
  Chemically synthesized
cccauguuugcaaucaaagauga

SEQ ID NO: 32159 - RNA, 23 nt, artificial
  Chemically synthesized
acccauguuugcaaucaaagaug

SEQ ID NO: 32160 - RNA, 23 nt, artificial
  Chemically synthesized
aacccauguuugcaaucaaagau

SEQ ID NO: 32161 - RNA, 23 nt, artificial
  Chemically synthesized
caugcuaaguacccaaauaggag

SEQ ID NO: 32162 - RNA, 23 nt, artificial
  Chemically synthesized
ggcaugcuaaguacccaaauagg

SEQ ID NO: 32163 - RNA, 23 nt, artificial
  Chemically synthesized
uggcaugcuaaguacccaaauag

SEQ ID NO: 32164 - RNA, 23 nt, artificial
  Chemically synthesized
aaagaauggugucaaugaagcca

SEQ ID NO: 32165 - RNA, 23 nt, artificial
  Chemically synthesized
gaaagaauggugucaaugaagcc

SEQ ID NO: 32166 - RNA, 23 nt, artificial
  Chemically synthesized
agugacucagaaaauucaaacuu

SEQ ID NO: 32167 - RNA, 23 nt, artificial
  Chemically synthesized
uagugacucagaaaauucaaacu

SEQ ID NO: 32168 - RNA, 23 nt, artificial
  Chemically synthesized
cuagugacucagaaaauucaaac

SEQ ID NO: 32169 - RNA, 23 nt, artificial
  Chemically synthesized
ccaaaaguguuaaugcccaagug

SEQ ID NO: 32170 - RNA, 23 nt, artificial
  Chemically synthesized
guccaaaaguguuaaugcccaag

SEQ ID NO: 32171 - RNA, 23 nt, artificial
  Chemically synthesized
caccaagugcaaagaggaaggau

SEQ ID NO: 32172 - RNA, 23 nt, artificial
  Chemically synthesized
acaccaagugcaaagaggaagga

SEQ ID NO: 32173 - RNA, 23 nt, artificial
  Chemically synthesized
aacaccaagugcaaagaggaagg

SEQ ID NO: 32174 - RNA, 23 nt, artificial
  Chemically synthesized
caacaccaagugcaaagaggaag

SEQ ID NO: 32175 - RNA, 23 nt, artificial
  Chemically synthesized
caguguauguuaguacaaauguc

SEQ ID NO: 32176 - RNA, 23 nt, artificial
  Chemically synthesized
ucaguguauguuaguacaaaugu

SEQ ID NO: 32177 - RNA, 23 nt, artificial
  Chemically synthesized
aucaguguauguuaguacaaaug

SEQ ID NO: 32178 - RNA, 23 nt, artificial
  Chemically synthesized
aaucaguguauguuaguacaaau

SEQ ID NO: 32179 - RNA, 23 nt, artificial
  Chemically synthesized
uaaucaguguauguuaguacaaa

SEQ ID NO: 32180 - RNA, 23 nt, artificial
  Chemically synthesized
ccaaguuucuaagauuuaagauu

SEQ ID NO: 32181 - RNA, 23 nt, artificial
  Chemically synthesized
cccaaguuucuaagauuuaagau

SEQ ID NO: 32182 - RNA, 23 nt, artificial
  Chemically synthesized
ccccaaguuucuaagauuuaaga

SEQ ID NO: 32183 - RNA, 23 nt, artificial
  Chemically synthesized
cccccaaguuucuaagauuuaag

SEQ ID NO: 32184 - RNA, 23 nt, artificial
  Chemically synthesized
acccccaaguuucuaagauuuaa

SEQ ID NO: 32185 - RNA, 23 nt, artificial
  Chemically synthesized
cuucagaaaugaaauccaaagcu

SEQ ID NO: 32186 - RNA, 23 nt, artificial
  Chemically synthesized
acuucagaaaugaaauccaaagc

SEQ ID NO: 32187 - RNA, 23 nt, artificial
  Chemically synthesized
aacuucagaaaugaaauccaaag

SEQ ID NO: 32188 - RNA, 23 nt, artificial
  Chemically synthesized
aaacuucagaaaugaaauccaaa

SEQ ID NO: 32189 - RNA, 23 nt, artificial
  Chemically synthesized
acguuuaaauaucuuugaaaguu

SEQ ID NO: 32190 - RNA, 23 nt, artificial
  Chemically synthesized
uacguuuaaauaucuuugaaagu

SEQ ID NO: 32191 - RNA, 23 nt, artificial
  Chemically synthesized
cuacguuuaaauaucuuugaaag

SEQ ID NO: 32192 - RNA, 23 nt, artificial
  Chemically synthesized
ccuacguuuaaauaucuuugaaa

SEQ ID NO: 32193 - RNA, 23 nt, artificial
  Chemically synthesized
uccuacguuuaaauaucuuugaa

SEQ ID NO: 32194 - RNA, 23 nt, artificial
  Chemically synthesized
auuugagugcagaauuuaaauaa

SEQ ID NO: 32195 - RNA, 23 nt, artificial
  Chemically synthesized
uauuugagugcagaauuuaaaua

SEQ ID NO: 32196 - RNA, 23 nt, artificial
  Chemically synthesized
guauuugagugcagaauuuaaau

SEQ ID NO: 32197 - RNA, 23 nt, artificial
  Chemically synthesized
uguauuugagugcagaauuuaaa

SEQ ID NO: 32198 - RNA, 23 nt, artificial
  Chemically synthesized
auguauuugagugcagaauuuaa

SEQ ID NO: 32199 - RNA, 23 nt, artificial
  Chemically synthesized
uaugcagaggaugaaagauuaag

SEQ ID NO: 32200 - RNA, 23 nt, artificial
  Chemically synthesized
guuuauuggugucauauuauaca

SEQ ID NO: 32201 - RNA, 23 nt, artificial
  Chemically synthesized
aguuuauuggugucauauuauac

SEQ ID NO: 32202 - RNA, 23 nt, artificial
  Chemically synthesized
caguuuauuggugucauauuaua

SEQ ID NO: 32203 - RNA, 23 nt, artificial
  Chemically synthesized
acaguuuauuggugucauauuau

SEQ ID NO: 32204 - RNA, 23 nt, artificial
  Chemically synthesized
gaaaauucaaacuucagaaauga

SEQ ID NO: 32205 - RNA, 23 nt, artificial
  Chemically synthesized
agaaaauucaaacuucagaaaug

SEQ ID NO: 32206 - RNA, 23 nt, artificial
  Chemically synthesized
cagaaaauucaaacuucagaaau

SEQ ID NO: 32207 - RNA, 23 nt, artificial
  Chemically synthesized
ucagaaaauucaaacuucagaaa

SEQ ID NO: 32208 - RNA, 23 nt, artificial
  Chemically synthesized
gaggaagacuguuacuacaguug

SEQ ID NO: 32209 - RNA, 23 nt, artificial
  Chemically synthesized
uugaggaagacuguuacuacagu

SEQ ID NO: 32210 - RNA, 23 nt, artificial
  Chemically synthesized
auugaggaagacuguuacuacag

SEQ ID NO: 32211 - RNA, 23 nt, artificial
  Chemically synthesized
ugaacccauguuugcaaucaaag

SEQ ID NO: 32212 - RNA, 23 nt, artificial
  Chemically synthesized
cguuuaaauaucuuugaaaguuu

SEQ ID NO: 32213 - RNA, 23 nt, artificial
  Chemically synthesized
ugagugcagaauuuaaauaaggc

SEQ ID NO: 32214 - RNA, 23 nt, artificial
  Chemically synthesized
uugagugcagaauuuaaauaagg

SEQ ID NO: 32215 - RNA, 23 nt, artificial
  Chemically synthesized
uuugagugcagaauuuaaauaag

SEQ ID NO: 32216 - RNA, 23 nt, artificial
  Chemically synthesized
caaggacauuacuagugacucag

SEQ ID NO: 32217 - RNA, 23 nt, artificial
  Chemically synthesized
ggcaagacugcccuuagaaauuc

SEQ ID NO: 32218 - RNA, 23 nt, artificial
  Chemically synthesized
ucaccaaaaaauacuuaauaguc

SEQ ID NO: 32219 - RNA, 23 nt, artificial
  Chemically synthesized
aucaccaaaaaauacuuaauagu

SEQ ID NO: 32220 - RNA, 23 nt, artificial
  Chemically synthesized
uaucaccaaaaaauacuuaauag

SEQ ID NO: 32221 - RNA, 23 nt, artificial
  Chemically synthesized
auaucaccaaaaaauacuuaaua

SEQ ID NO: 32222 - RNA, 23 nt, artificial
  Chemically synthesized
acauugauuaaagaucucaaaaa

SEQ ID NO: 32223 - RNA, 23 nt, artificial
  Chemically synthesized
cacauugauuaaagaucucaaaa

SEQ ID NO: 32224 - RNA, 23 nt, artificial
  Chemically synthesized
acacauugauuaaagaucucaaa

SEQ ID NO: 32225 - RNA, 23 nt, artificial
  Chemically synthesized
aaaaggcaagacugcccuuagaa

SEQ ID NO: 32226 - RNA, 23 nt, artificial
  Chemically synthesized
cccacucuaugaaucaauagaag

SEQ ID NO: 32227 - RNA, 23 nt, artificial
  Chemically synthesized
ccccacucuaugaaucaauagaa

SEQ ID NO: 32228 - RNA, 23 nt, artificial
  Chemically synthesized
accccacucuaugaaucaauaga

SEQ ID NO: 32229 - RNA, 23 nt, artificial
  Chemically synthesized
aaccccacucuaugaaucaauag

SEQ ID NO: 32230 - RNA, 23 nt, artificial
  Chemically synthesized
uaaccccacucuaugaaucaaua

SEQ ID NO: 32231 - RNA, 23 nt, artificial
  Chemically synthesized
ugcacaguuuauuggugucauau

SEQ ID NO: 32232 - RNA, 23 nt, artificial
  Chemically synthesized
uugcacaguuuauuggugucaua

SEQ ID NO: 32233 - RNA, 23 nt, artificial
  Chemically synthesized
gaggauugcucaacaaccaugcu

SEQ ID NO: 32234 - RNA, 23 nt, artificial
  Chemically synthesized
uucggaggauugcucaacaacca

SEQ ID NO: 32235 - RNA, 23 nt, artificial
  Chemically synthesized
cacucaccagcaacaccaagugc

SEQ ID NO: 32236 - RNA, 23 nt, artificial
  Chemically synthesized
acacucaccagcaacaccaagug

SEQ ID NO: 32237 - RNA, 23 nt, artificial
  Chemically synthesized
cacacucaccagcaacaccaagu

SEQ ID NO: 32238 - RNA, 23 nt, artificial
  Chemically synthesized
gcacacucaccagcaacaccaag

SEQ ID NO: 32239 - RNA, 23 nt, artificial
  Chemically synthesized
agaagaucauauuuauguaaagu

SEQ ID NO: 32240 - RNA, 23 nt, artificial
  Chemically synthesized
gagaagaucauauuuauguaaag

SEQ ID NO: 32241 - RNA, 23 nt, artificial
  Chemically synthesized
ugagaagaucauauuuauguaaa

SEQ ID NO: 32242 - RNA, 23 nt, artificial
  Chemically synthesized
aguagcuuugugacaugucauga

SEQ ID NO: 32243 - RNA, 23 nt, artificial
  Chemically synthesized
aaguagcuuugugacaugucaug

SEQ ID NO: 32244 - RNA, 23 nt, artificial
  Chemically synthesized
aaaguagcuuugugacaugucau

SEQ ID NO: 32245 - RNA, 23 nt, artificial
  Chemically synthesized
ccacuuugccucuaaauuaccuc

SEQ ID NO: 32246 - RNA, 23 nt, artificial
  Chemically synthesized
ggccacuuugccucuaaauuacc

SEQ ID NO: 32247 - RNA, 23 nt, artificial
  Chemically synthesized
aggccacuuugccucuaaauuac

SEQ ID NO: 32248 - RNA, 23 nt, artificial
  Chemically synthesized
ucuguaaauguaaacugugaaga

SEQ ID NO: 32249 - RNA, 23 nt, artificial
  Chemically synthesized
uucuguaaauguaaacugugaag

SEQ ID NO: 32250 - RNA, 23 nt, artificial
  Chemically synthesized
uuucuguaaauguaaacugugaa

SEQ ID NO: 32251 - RNA, 23 nt, artificial
  Chemically synthesized
auuucuguaaauguaaacuguga

SEQ ID NO: 32252 - RNA, 23 nt, artificial
  Chemically synthesized
cagcaacaccaagugcaaagagg

SEQ ID NO: 32253 - RNA, 23 nt, artificial
  Chemically synthesized
uggcagcuuauacauagcaaugg

SEQ ID NO: 32254 - RNA, 23 nt, artificial
  Chemically synthesized
auggcagcuuauacauagcaaug

SEQ ID NO: 32255 - RNA, 23 nt, artificial
  Chemically synthesized
aggaauugcucuugucauacccc

SEQ ID NO: 32256 - RNA, 23 nt, artificial
  Chemically synthesized
uaggaauugcucuugucauaccc

SEQ ID NO: 32257 - RNA, 23 nt, artificial
  Chemically synthesized
uuaggaauugcucuugucauacc

SEQ ID NO: 32258 - RNA, 23 nt, artificial
  Chemically synthesized
uuuaggaauugcucuugucauac

SEQ ID NO: 32259 - RNA, 23 nt, artificial
  Chemically synthesized
ccgaaaauguucaauaauguccc

SEQ ID NO: 32260 - RNA, 23 nt, artificial
  Chemically synthesized
cccgaaaauguucaauaaugucc

SEQ ID NO: 32261 - RNA, 23 nt, artificial
  Chemically synthesized
ccccgaaaauguucaauaauguc

SEQ ID NO: 32262 - RNA, 23 nt, artificial
  Chemically synthesized
cccccgaaaauguucaauaaugu

SEQ ID NO: 32263 - RNA, 23 nt, artificial
  Chemically synthesized
cccaagugacugacaucaacucc

SEQ ID NO: 32264 - RNA, 23 nt, artificial
  Chemically synthesized
gcccaagugacugacaucaacuc

SEQ ID NO: 32265 - RNA, 23 nt, artificial
  Chemically synthesized
ugcccaagugacugacaucaacu

SEQ ID NO: 32266 - RNA, 23 nt, artificial
  Chemically synthesized
augcccaagugacugacaucaac

SEQ ID NO: 32267 - RNA, 23 nt, artificial
  Chemically synthesized
aaugcccaagugacugacaucaa

SEQ ID NO: 32268 - RNA, 23 nt, artificial
  Chemically synthesized
agcuuggucuagagugaaaaaca

SEQ ID NO: 32269 - RNA, 23 nt, artificial
  Chemically synthesized
aagcuuggucuagagugaaaaac

SEQ ID NO: 32270 - RNA, 23 nt, artificial
  Chemically synthesized
ggugucauauuauacaauauuuc

SEQ ID NO: 32271 - RNA, 23 nt, artificial
  Chemically synthesized
uggugucauauuauacaauauuu

SEQ ID NO: 32272 - RNA, 23 nt, artificial
  Chemically synthesized
uuggugucauauuauacaauauu

SEQ ID NO: 32273 - RNA, 23 nt, artificial
  Chemically synthesized
auuggugucauauuauacaauau

SEQ ID NO: 32274 - RNA, 23 nt, artificial
  Chemically synthesized
uauuggugucauauuauacaaua

SEQ ID NO: 32275 - RNA, 23 nt, artificial
  Chemically synthesized
gugacucagaaaauucaaacuuc

SEQ ID NO: 32276 - RNA, 23 nt, artificial
  Chemically synthesized
cagagaaaauucagacuaucauc

SEQ ID NO: 32277 - RNA, 23 nt, artificial
  Chemically synthesized
uugcagagaaaauucagacuauc

SEQ ID NO: 32278 - RNA, 23 nt, artificial
  Chemically synthesized
ccaaacauggaaauaucaccaaa

SEQ ID NO: 32279 - RNA, 23 nt, artificial
  Chemically synthesized
ggagauacuaacugcucucagag

SEQ ID NO: 32280 - RNA, 23 nt, artificial
  Chemically synthesized
cuaacugcucucagagaaaguag

SEQ ID NO: 32281 - RNA, 23 nt, artificial
  Chemically synthesized
acuaacugcucucagagaaagua

SEQ ID NO: 32282 - RNA, 23 nt, artificial
  Chemically synthesized
uacuaacugcucucagagaaagu

SEQ ID NO: 32283 - RNA, 23 nt, artificial
  Chemically synthesized
auacuaacugcucucagagaaag

SEQ ID NO: 32284 - RNA, 23 nt, artificial
  Chemically synthesized
gcuuugugacaugucaugaaccc

SEQ ID NO: 32285 - RNA, 23 nt, artificial
  Chemically synthesized
agcuuugugacaugucaugaacc

SEQ ID NO: 32286 - RNA, 23 nt, artificial
  Chemically synthesized
uagcuuugugacaugucaugaac

SEQ ID NO: 32287 - RNA, 23 nt, artificial
  Chemically synthesized
cuuugaaaguuuguauuaaaugu

SEQ ID NO: 32288 - RNA, 23 nt, artificial
  Chemically synthesized
ucuuugaaaguuuguauuaaaug

SEQ ID NO: 32289 - RNA, 23 nt, artificial
  Chemically synthesized
aucuuugaaaguuuguauuaaau

SEQ ID NO: 32290 - RNA, 23 nt, artificial
  Chemically synthesized
uaucuuugaaaguuuguauuaaa

SEQ ID NO: 32291 - RNA, 23 nt, artificial
  Chemically synthesized
auaucuuugaaaguuuguauuaa

SEQ ID NO: 32292 - RNA, 23 nt, artificial
  Chemically synthesized
ugaagauaguuauaaacugaagc

SEQ ID NO: 32293 - RNA, 23 nt, artificial
  Chemically synthesized
ugugaagauaguuauaaacugaa

SEQ ID NO: 32294 - RNA, 23 nt, artificial
  Chemically synthesized
aaauagaugagaucaagaaugac

SEQ ID NO: 32295 - RNA, 23 nt, artificial
  Chemically synthesized
aaaauagaugagaucaagaauga

SEQ ID NO: 32296 - RNA, 23 nt, artificial
  Chemically synthesized
ugacucagaaaauucaaacuuca

SEQ ID NO: 32297 - RNA, 23 nt, artificial
  Chemically synthesized
acccccgaaaauguucaauaaug

SEQ ID NO: 32298 - RNA, 23 nt, artificial
  Chemically synthesized
cacccccgaaaauguucaauaau

SEQ ID NO: 32299 - RNA, 23 nt, artificial
  Chemically synthesized
cuagagugaaaaacaacaaauuc

SEQ ID NO: 32300 - RNA, 23 nt, artificial
  Chemically synthesized
ucuagagugaaaaacaacaaauu

SEQ ID NO: 32301 - RNA, 23 nt, artificial
  Chemically synthesized
ugacugacaucaacuccaaggga

SEQ ID NO: 32302 - RNA, 23 nt, artificial
  Chemically synthesized
gugacugacaucaacuccaaggg

SEQ ID NO: 32303 - RNA, 23 nt, artificial
  Chemically synthesized
agugacugacaucaacuccaagg

SEQ ID NO: 32304 - RNA, 23 nt, artificial
  Chemically synthesized
aagugacugacaucaacuccaag

SEQ ID NO: 32305 - RNA, 23 nt, artificial
  Chemically synthesized
gguacauuuuaucauuuauuagc

SEQ ID NO: 32306 - RNA, 23 nt, artificial
  Chemically synthesized
ggguacauuuuaucauuuauuag

SEQ ID NO: 32307 - RNA, 23 nt, artificial
  Chemically synthesized
uggguacauuuuaucauuuauua

SEQ ID NO: 32308 - RNA, 23 nt, artificial
  Chemically synthesized
cuggguacauuuuaucauuuauu

SEQ ID NO: 32309 - RNA, 23 nt, artificial
  Chemically synthesized
acuggguacauuuuaucauuuau

SEQ ID NO: 32310 - RNA, 23 nt, artificial
  Chemically synthesized
uacuggguacauuuuaucauuua

SEQ ID NO: 32311 - RNA, 23 nt, artificial
  Chemically synthesized
caguucugaguauaugcaauuag

SEQ ID NO: 32312 - RNA, 23 nt, artificial
  Chemically synthesized
ucaguucugaguauaugcaauua

SEQ ID NO: 32313 - RNA, 23 nt, artificial
  Chemically synthesized
uucaguucugaguauaugcaauu

SEQ ID NO: 32314 - RNA, 23 nt, artificial
  Chemically synthesized
auucaguucugaguauaugcaau

SEQ ID NO: 32315 - RNA, 23 nt, artificial
  Chemically synthesized
gugaacauggaaucaucaaggaa

SEQ ID NO: 32316 - RNA, 23 nt, artificial
  Chemically synthesized
augugaacauggaaucaucaagg

SEQ ID NO: 32317 - RNA, 23 nt, artificial
  Chemically synthesized
aaugugaacauggaaucaucaag

SEQ ID NO: 32318 - RNA, 23 nt, artificial
  Chemically synthesized
aaaugugaacauggaaucaucaa

SEQ ID NO: 32319 - RNA, 23 nt, artificial
  Chemically synthesized
aguugggaaaacaaacuucauca

SEQ ID NO: 32320 - RNA, 23 nt, artificial
  Chemically synthesized
ugcaauuaguguuugaaaagauu

SEQ ID NO: 32321 - RNA, 23 nt, artificial
  Chemically synthesized
augcaauuaguguuugaaaagau

SEQ ID NO: 32322 - RNA, 23 nt, artificial
  Chemically synthesized
uaugcaauuaguguuugaaaaga

SEQ ID NO: 32323 - RNA, 23 nt, artificial
  Chemically synthesized
auaugcaauuaguguuugaaaag

SEQ ID NO: 32324 - RNA, 23 nt, artificial
  Chemically synthesized
uauaugcaauuaguguuugaaaa

SEQ ID NO: 32325 - RNA, 23 nt, artificial
  Chemically synthesized
aagaccuuugcacaguuuauugg

SEQ ID NO: 32326 - RNA, 23 nt, artificial
  Chemically synthesized
aaagaccuuugcacaguuuauug

SEQ ID NO: 32327 - RNA, 23 nt, artificial
  Chemically synthesized
gcuaaguacccaaauaggagugu

SEQ ID NO: 32328 - RNA, 23 nt, artificial
  Chemically synthesized
ugcuaaguacccaaauaggagug

SEQ ID NO: 32329 - RNA, 23 nt, artificial
  Chemically synthesized
augcuaaguacccaaauaggagu

SEQ ID NO: 32330 - RNA, 23 nt, artificial
  Chemically synthesized
gaccuuuugcugaaauaucaguu

SEQ ID NO: 32331 - RNA, 23 nt, artificial
  Chemically synthesized
augaccuuuugcugaaauaucag

SEQ ID NO: 32332 - RNA, 23 nt, artificial
  Chemically synthesized
uaugaccuuuugcugaaauauca

SEQ ID NO: 32333 - RNA, 23 nt, artificial
  Chemically synthesized
ugcaaucaaagaugauaaaauag

SEQ ID NO: 32334 - RNA, 23 nt, artificial
  Chemically synthesized
uugcaaucaaagaugauaaaaua

SEQ ID NO: 32335 - RNA, 23 nt, artificial
  Chemically synthesized
uuugcaaucaaagaugauaaaau

SEQ ID NO: 32336 - RNA, 23 nt, artificial
  Chemically synthesized
guuugcaaucaaagaugauaaaa

SEQ ID NO: 32337 - RNA, 23 nt, artificial
  Chemically synthesized
uguuugcaaucaaagaugauaaa

SEQ ID NO: 32338 - RNA, 23 nt, artificial
  Chemically synthesized
aguguauguuaguacaaaugucu

SEQ ID NO: 32339 - RNA, 23 nt, artificial
  Chemically synthesized
aaugcacacucaccagcaacacc

SEQ ID NO: 32340 - RNA, 23 nt, artificial
  Chemically synthesized
gaaugcacacucaccagcaacac

SEQ ID NO: 32341 - RNA, 23 nt, artificial
  Chemically synthesized
aggaaugcacacucaccagcaac

SEQ ID NO: 32342 - RNA, 23 nt, artificial
  Chemically synthesized
ccccaaacauggaaauaucacca

SEQ ID NO: 32343 - RNA, 23 nt, artificial
  Chemically synthesized
cccccaaacauggaaauaucacc

SEQ ID NO: 32344 - RNA, 23 nt, artificial
  Chemically synthesized
acccccaaacauggaaauaucac

SEQ ID NO: 32345 - RNA, 23 nt, artificial
  Chemically synthesized
cacccccaaacauggaaauauca

SEQ ID NO: 32346 - RNA, 23 nt, artificial
  Chemically synthesized
cuaaauuaccucugauaauucua

SEQ ID NO: 32347 - RNA, 23 nt, artificial
  Chemically synthesized
ucuaaauuaccucugauaauucu

SEQ ID NO: 32348 - RNA, 23 nt, artificial
  Chemically synthesized
cucuaaauuaccucugauaauuc

SEQ ID NO: 32349 - RNA, 23 nt, artificial
  Chemically synthesized
ccucuaaauuaccucugauaauu

SEQ ID NO: 32350 - RNA, 23 nt, artificial
  Chemically synthesized
gugucauauuauacaauauuuca

SEQ ID NO: 32351 - RNA, 23 nt, artificial
  Chemically synthesized
ccaaguugcugaaucaauggagc

SEQ ID NO: 32352 - RNA, 23 nt, artificial
  Chemically synthesized
gccaaguugcugaaucaauggag

SEQ ID NO: 32353 - RNA, 23 nt, artificial
  Chemically synthesized
aggccaaguugcugaaucaaugg

SEQ ID NO: 32354 - RNA, 23 nt, artificial
  Chemically synthesized
caggccaaguugcugaaucaaug

SEQ ID NO: 32355 - RNA, 23 nt, artificial
  Chemically synthesized
ucuaugaaucaauagaagaagcu

SEQ ID NO: 32356 - RNA, 23 nt, artificial
  Chemically synthesized
cucuaugaaucaauagaagaagc

SEQ ID NO: 32357 - RNA, 23 nt, artificial
  Chemically synthesized
acucuaugaaucaauagaagaag

SEQ ID NO: 32358 - RNA, 23 nt, artificial
  Chemically synthesized
aaucuaguugggaaaacaaacuu

SEQ ID NO: 32359 - RNA, 23 nt, artificial
  Chemically synthesized
aaaucuaguugggaaaacaaacu

SEQ ID NO: 32360 - RNA, 23 nt, artificial
  Chemically synthesized
aaaaucuaguugggaaaacaaac

SEQ ID NO: 32361 - RNA, 23 nt, artificial
  Chemically synthesized
uaaaaucuaguugggaaaacaaa

SEQ ID NO: 32362 - RNA, 23 nt, artificial
  Chemically synthesized
uuaaaaucuaguugggaaaacaa

SEQ ID NO: 32363 - RNA, 23 nt, artificial
  Chemically synthesized
agagugaaaaacaacaaauucag

SEQ ID NO: 32364 - RNA, 23 nt, artificial
  Chemically synthesized
uagagugaaaaacaacaaauuca

SEQ ID NO: 32365 - RNA, 23 nt, artificial
  Chemically synthesized
ugugaauucacauagaaaacauu

SEQ ID NO: 32366 - RNA, 23 nt, artificial
  Chemically synthesized
uugugaauucacauagaaaacau

SEQ ID NO: 32367 - RNA, 23 nt, artificial
  Chemically synthesized
auugugaauucacauagaaaaca

SEQ ID NO: 32368 - RNA, 23 nt, artificial
  Chemically synthesized
aauugugaauucacauagaaaac

SEQ ID NO: 32369 - RNA, 23 nt, artificial
  Chemically synthesized
caauugugaauucacauagaaaa

SEQ ID NO: 32370 - RNA, 23 nt, artificial
  Chemically synthesized
guuugaaaagauucuuaauagcu

SEQ ID NO: 32371 - RNA, 23 nt, artificial
  Chemically synthesized
uguuugaaaagauucuuaauagc

SEQ ID NO: 32372 - RNA, 23 nt, artificial
  Chemically synthesized
guguuugaaaagauucuuaauag

SEQ ID NO: 32373 - RNA, 23 nt, artificial
  Chemically synthesized
aguguuugaaaagauucuuaaua

SEQ ID NO: 32374 - RNA, 23 nt, artificial
  Chemically synthesized
uaguguuugaaaagauucuuaau

SEQ ID NO: 32375 - RNA, 23 nt, artificial
  Chemically synthesized
cuacaguugagacucagaacuug

SEQ ID NO: 32376 - RNA, 23 nt, artificial
  Chemically synthesized
acuacaguugagacucagaacuu

SEQ ID NO: 32377 - RNA, 23 nt, artificial
  Chemically synthesized
uacuacaguugagacucagaacu

SEQ ID NO: 32378 - RNA, 23 nt, artificial
  Chemically synthesized
uuacuacaguugagacucagaac

SEQ ID NO: 32379 - RNA, 23 nt, artificial
  Chemically synthesized
aaauaaggcucuaccucaaagac

SEQ ID NO: 32380 - RNA, 23 nt, artificial
  Chemically synthesized
uuaaauaaggcucuaccucaaag

SEQ ID NO: 32381 - RNA, 23 nt, artificial
  Chemically synthesized
uuugccucuaaauuaccucugau

SEQ ID NO: 32382 - RNA, 23 nt, artificial
  Chemically synthesized
cagauaccuggaaccaccuaaag

SEQ ID NO: 32383 - RNA, 23 nt, artificial
  Chemically synthesized
aggcuuuguucgaaagaauggug

SEQ ID NO: 32384 - RNA, 23 nt, artificial
  Chemically synthesized
aaggcuuuguucgaaagaauggu

SEQ ID NO: 32385 - RNA, 23 nt, artificial
  Chemically synthesized
aaaggcuuuguucgaaagaaugg

SEQ ID NO: 32386 - RNA, 23 nt, artificial
  Chemically synthesized
uaaaggcuuuguucgaaagaaug

SEQ ID NO: 32387 - RNA, 23 nt, artificial
  Chemically synthesized
ccauguaaaaccugcuacaaaug

SEQ ID NO: 32388 - RNA, 23 nt, artificial
  Chemically synthesized
gucccauguaaaaccugcuacaa

SEQ ID NO: 32389 - RNA, 23 nt, artificial
  Chemically synthesized
ugucccauguaaaaccugcuaca

SEQ ID NO: 32390 - RNA, 23 nt, artificial
  Chemically synthesized
uucugccuccaaggauguuuaaa

SEQ ID NO: 32391 - RNA, 23 nt, artificial
  Chemically synthesized
ucacauagaaaacauuaaauuau

SEQ ID NO: 32392 - RNA, 23 nt, artificial
  Chemically synthesized
uucacauagaaaacauuaaauua

SEQ ID NO: 32393 - RNA, 23 nt, artificial
  Chemically synthesized
auucacauagaaaacauuaaauu

SEQ ID NO: 32394 - RNA, 23 nt, artificial
  Chemically synthesized
aauucacauagaaaacauuaaau

SEQ ID NO: 32395 - RNA, 23 nt, artificial
  Chemically synthesized
gaauucacauagaaaacauuaaa

SEQ ID NO: 32396 - RNA, 23 nt, artificial
  Chemically synthesized
cuucggaggauugcucaacaacc

SEQ ID NO: 32397 - RNA, 23 nt, artificial
  Chemically synthesized
acuucggaggauugcucaacaac

SEQ ID NO: 32398 - RNA, 23 nt, artificial
  Chemically synthesized
gaugaaagauuaagauuaugcuc

SEQ ID NO: 32399 - RNA, 23 nt, artificial
  Chemically synthesized
aggaugaaagauuaagauuaugc

SEQ ID NO: 32400 - RNA, 23 nt, artificial
  Chemically synthesized
gaggaugaaagauuaagauuaug

SEQ ID NO: 32401 - RNA, 23 nt, artificial
  Chemically synthesized
agaggaugaaagauuaagauuau

SEQ ID NO: 32402 - RNA, 23 nt, artificial
  Chemically synthesized
ggaaggccugcaucaugauggcc

SEQ ID NO: 32403 - RNA, 23 nt, artificial
  Chemically synthesized
uggaaggccugcaucaugauggc

SEQ ID NO: 32404 - RNA, 23 nt, artificial
  Chemically synthesized
uuggaaggccugcaucaugaugg

SEQ ID NO: 32405 - RNA, 23 nt, artificial
  Chemically synthesized
cuuggaaggccugcaucaugaug

SEQ ID NO: 32406 - RNA, 23 nt, artificial
  Chemically synthesized
ggaaagaaagaagcguaugacac

SEQ ID NO: 32407 - RNA, 23 nt, artificial
  Chemically synthesized
auggaaagaaagaagcguaugac

SEQ ID NO: 32408 - RNA, 23 nt, artificial
  Chemically synthesized
gaagaucauauuuauguaaagua

SEQ ID NO: 32409 - RNA, 23 nt, artificial
  Chemically synthesized
aauaaugucccauguaaaaccug

SEQ ID NO: 32410 - RNA, 23 nt, artificial
  Chemically synthesized
ugaaauaucaguuacugaacagg

SEQ ID NO: 32411 - RNA, 23 nt, artificial
  Chemically synthesized
cugaaauaucaguuacugaacag

SEQ ID NO: 32412 - RNA, 23 nt, artificial
  Chemically synthesized
ugcugaaauaucaguuacugaac

SEQ ID NO: 32413 - RNA, 23 nt, artificial
  Chemically synthesized
agacuaucauccucaaggacauu

SEQ ID NO: 32414 - RNA, 23 nt, artificial
  Chemically synthesized
ucagacuaucauccucaaggaca

SEQ ID NO: 32415 - RNA, 23 nt, artificial
  Chemically synthesized
uucagacuaucauccucaaggac

SEQ ID NO: 32416 - RNA, 23 nt, artificial
  Chemically synthesized
auucagacuaucauccucaagga

SEQ ID NO: 32417 - RNA, 23 nt, artificial
  Chemically synthesized
aagggauuggaauugaggaagac

SEQ ID NO: 32418 - RNA, 23 nt, artificial
  Chemically synthesized
ucaaacuucagaaaugaaaucca

SEQ ID NO: 32419 - RNA, 23 nt, artificial
  Chemically synthesized
uucaaacuucagaaaugaaaucc

SEQ ID NO: 32420 - RNA, 23 nt, artificial
  Chemically synthesized
auucaaacuucagaaaugaaauc

SEQ ID NO: 32421 - RNA, 23 nt, artificial
  Chemically synthesized
aauucaaacuucagaaaugaaau

SEQ ID NO: 32422 - RNA, 23 nt, artificial
  Chemically synthesized
uuaguguuugaaaagauucuuaa

SEQ ID NO: 32423 - RNA, 23 nt, artificial
  Chemically synthesized
uaccucaaagaccuuugcacagu

SEQ ID NO: 32424 - RNA, 23 nt, artificial
  Chemically synthesized
cuaccucaaagaccuuugcacag

SEQ ID NO: 32425 - RNA, 23 nt, artificial
  Chemically synthesized
ucauuuauuagcgcugaagagcc

SEQ ID NO: 32426 - RNA, 23 nt, artificial
  Chemically synthesized
aucauuuauuagcgcugaagagc

SEQ ID NO: 32427 - RNA, 23 nt, artificial
  Chemically synthesized
uaucauuuauuagcgcugaagag

SEQ ID NO: 32428 - RNA, 23 nt, artificial
  Chemically synthesized
cucugauaauucuagagauuuua

SEQ ID NO: 32429 - RNA, 23 nt, artificial
  Chemically synthesized
accucugauaauucuagagauuu

SEQ ID NO: 32430 - RNA, 23 nt, artificial
  Chemically synthesized
uaccucugauaauucuagagauu

SEQ ID NO: 32431 - RNA, 23 nt, artificial
  Chemically synthesized
uuaccucugauaauucuagagau

SEQ ID NO: 32432 - RNA, 23 nt, artificial
  Chemically synthesized
ucuagccugguuuggagauacua

SEQ ID NO: 32433 - RNA, 23 nt, artificial
  Chemically synthesized
gcaaucaaagaugauaaaauaga

SEQ ID NO: 32434 - RNA, 23 nt, artificial
  Chemically synthesized
aguuuguauuaaaugugaauuuu

SEQ ID NO: 32435 - RNA, 23 nt, artificial
  Chemically synthesized
aaguuuguauuaaaugugaauuu

SEQ ID NO: 32436 - RNA, 23 nt, artificial
  Chemically synthesized
aaaguuuguauuaaaugugaauu

SEQ ID NO: 32437 - RNA, 23 nt, artificial
  Chemically synthesized
gaaaguuuguauuaaaugugaau

SEQ ID NO: 32438 - RNA, 23 nt, artificial
  Chemically synthesized
ugaaaguuuguauuaaaugugaa

SEQ ID NO: 32439 - RNA, 23 nt, artificial
  Chemically synthesized
ccaaucuuuguacucuugcagag

SEQ ID NO: 32440 - RNA, 23 nt, artificial
  Chemically synthesized
agccaaucuuuguacucuugcag

SEQ ID NO: 32441 - RNA, 23 nt, artificial
  Chemically synthesized
ugcuggagucaugacacuaaguc

SEQ ID NO: 32442 - RNA, 23 nt, artificial
  Chemically synthesized
uugcuggagucaugacacuaagu

SEQ ID NO: 32443 - RNA, 23 nt, artificial
  Chemically synthesized
auugcuggagucaugacacuaag

SEQ ID NO: 32444 - RNA, 23 nt, artificial
  Chemically synthesized
ucugaguauaugcaauuaguguu

SEQ ID NO: 32445 - RNA, 23 nt, artificial
  Chemically synthesized
guucugaguauaugcaauuagug

SEQ ID NO: 32446 - RNA, 23 nt, artificial
  Chemically synthesized
ccauauuucuaaacuuuguuuau

SEQ ID NO: 32447 - RNA, 23 nt, artificial
  Chemically synthesized
accauauuucuaaacuuuguuua

SEQ ID NO: 32448 - RNA, 23 nt, artificial
  Chemically synthesized
uaccauauuucuaaacuuuguuu

SEQ ID NO: 32449 - RNA, 23 nt, artificial
  Chemically synthesized
uuaccauauuucuaaacuuuguu

SEQ ID NO: 32450 - RNA, 23 nt, artificial
  Chemically synthesized
uuuaccauauuucuaaacuuugu

SEQ ID NO: 32451 - RNA, 23 nt, artificial
  Chemically synthesized
uagaugagaucaagaaugacaau

SEQ ID NO: 32452 - RNA, 23 nt, artificial
  Chemically synthesized
ccaagggauuggaauugaggaag

SEQ ID NO: 32453 - RNA, 23 nt, artificial
  Chemically synthesized
guaaacugugaagauaguuauaa

SEQ ID NO: 32454 - RNA, 23 nt, artificial
  Chemically synthesized
uguaaacugugaagauaguuaua

SEQ ID NO: 32455 - RNA, 23 nt, artificial
  Chemically synthesized
uacuggcucaaaacuaccuacuu

SEQ ID NO: 32456 - RNA, 23 nt, artificial
  Chemically synthesized
gaauuuaaauaaggcucuaccuc

SEQ ID NO: 32457 - RNA, 23 nt, artificial
  Chemically synthesized
agaauuuaaauaaggcucuaccu

SEQ ID NO: 32458 - RNA, 23 nt, artificial
  Chemically synthesized
cagaauuuaaauaaggcucuacc

SEQ ID NO: 32459 - RNA, 23 nt, artificial
  Chemically synthesized
gcagaauuuaaauaaggcucuac

SEQ ID NO: 32460 - RNA, 23 nt, artificial
  Chemically synthesized
ucaauugugaauucacauagaaa

SEQ ID NO: 32461 - RNA, 23 nt, artificial
  Chemically synthesized
uucaauugugaauucacauagaa

SEQ ID NO: 32462 - RNA, 23 nt, artificial
  Chemically synthesized
uuucaauugugaauucacauaga

SEQ ID NO: 32463 - RNA, 23 nt, artificial
  Chemically synthesized
ucuguugcuagauuaucguccaa

SEQ ID NO: 32464 - RNA, 23 nt, artificial
  Chemically synthesized
augagaucaagaaugacaauguc

SEQ ID NO: 32465 - RNA, 23 nt, artificial
  Chemically synthesized
agaugagaucaagaaugacaaug

SEQ ID NO: 32466 - RNA, 23 nt, artificial
  Chemically synthesized
caucaucuggauuuaggaauugc

SEQ ID NO: 32467 - RNA, 23 nt, artificial
  Chemically synthesized
ucaucaucuggauuuaggaauug

SEQ ID NO: 32468 - RNA, 23 nt, artificial
  Chemically synthesized
aucaucaucuggauuuaggaauu

SEQ ID NO: 32469 - RNA, 23 nt, artificial
  Chemically synthesized
aaucaucaucuggauuuaggaau

SEQ ID NO: 32470 - RNA, 23 nt, artificial
  Chemically synthesized
gagugagggaagcgguuuacgag

SEQ ID NO: 32471 - RNA, 23 nt, artificial
  Chemically synthesized
ggagugagggaagcgguuuacga

SEQ ID NO: 32472 - RNA, 23 nt, artificial
  Chemically synthesized
gggagugagggaagcgguuuacg

SEQ ID NO: 32473 - RNA, 23 nt, artificial
  Chemically synthesized
ggggagugagggaagcgguuuac

SEQ ID NO: 32474 - RNA, 23 nt, artificial
  Chemically synthesized
uggggagugagggaagcgguuua

SEQ ID NO: 32475 - RNA, 23 nt, artificial
  Chemically synthesized
aauaggaguguaugcagaggaug

SEQ ID NO: 32476 - RNA, 23 nt, artificial
  Chemically synthesized
guacguaauuaaauaauguuuuu

SEQ ID NO: 32477 - RNA, 23 nt, artificial
  Chemically synthesized
aguacguaauuaaauaauguuuu

SEQ ID NO: 32478 - RNA, 23 nt, artificial
  Chemically synthesized
aaguacguaauuaaauaauguuu

SEQ ID NO: 32479 - RNA, 23 nt, artificial
  Chemically synthesized
aaaguacguaauuaaauaauguu

SEQ ID NO: 32480 - RNA, 23 nt, artificial
  Chemically synthesized
aaaaguacguaauuaaauaaugu

SEQ ID NO: 32481 - RNA, 23 nt, artificial
  Chemically synthesized
uguaaauguaaacugugaagaua

SEQ ID NO: 32482 - RNA, 23 nt, artificial
  Chemically synthesized
uaguugggaaaacaaacuucauc

SEQ ID NO: 32483 - RNA, 23 nt, artificial
  Chemically synthesized
cuaguugggaaaacaaacuucau

SEQ ID NO: 32484 - RNA, 23 nt, artificial
  Chemically synthesized
aucuaguugggaaaacaaacuuc

SEQ ID NO: 32485 - RNA, 23 nt, artificial
  Chemically synthesized
uauguauuugagugcagaauuua

SEQ ID NO: 32486 - RNA, 23 nt, artificial
  Chemically synthesized
auauguauuugagugcagaauuu

SEQ ID NO: 32487 - RNA, 23 nt, artificial
  Chemically synthesized
auuggcaucaacuucauggaaag

SEQ ID NO: 32488 - RNA, 23 nt, artificial
  Chemically synthesized
caacauauuuguagauuuuuaau

SEQ ID NO: 32489 - RNA, 23 nt, artificial
  Chemically synthesized
ccaacauauuuguagauuuuuaa

SEQ ID NO: 32490 - RNA, 23 nt, artificial
  Chemically synthesized
gccaacauauuuguagauuuuua

SEQ ID NO: 32491 - RNA, 23 nt, artificial
  Chemically synthesized
agccaacauauuuguagauuuuu

SEQ ID NO: 32492 - RNA, 23 nt, artificial
  Chemically synthesized
uuugcugaaauaucaguuacuga

SEQ ID NO: 32493 - RNA, 23 nt, artificial
  Chemically synthesized
accaccuaaagaacuuccauuua

SEQ ID NO: 32494 - RNA, 23 nt, artificial
  Chemically synthesized
aaccaccuaaagaacuuccauuu

SEQ ID NO: 32495 - RNA, 23 nt, artificial
  Chemically synthesized
auauagguaaaaguacguaauua

SEQ ID NO: 32496 - RNA, 23 nt, artificial
  Chemically synthesized
guuauaaacugaagcagauaccu

SEQ ID NO: 32497 - RNA, 23 nt, artificial
  Chemically synthesized
aguuauaaacugaagcagauacc

SEQ ID NO: 32498 - RNA, 23 nt, artificial
  Chemically synthesized
auaguuauaaacugaagcagaua

SEQ ID NO: 32499 - RNA, 23 nt, artificial
  Chemically synthesized
guacaaaugucuauccacaggcu

SEQ ID NO: 32500 - RNA, 23 nt, artificial
  Chemically synthesized
aguacaaaugucuauccacaggc

SEQ ID NO: 32501 - RNA, 23 nt, artificial
  Chemically synthesized
uaguacaaaugucuauccacagg

SEQ ID NO: 32502 - RNA, 23 nt, artificial
  Chemically synthesized
uuaguacaaaugucuauccacag

SEQ ID NO: 32503 - RNA, 23 nt, artificial
  Chemically synthesized
caaaugugaacauggaaucauca

SEQ ID NO: 32504 - RNA, 23 nt, artificial
  Chemically synthesized
gagaaaauucagacuaucauccu

SEQ ID NO: 32505 - RNA, 23 nt, artificial
  Chemically synthesized
agagaaaauucagacuaucaucc

SEQ ID NO: 32506 - RNA, 23 nt, artificial
  Chemically synthesized
guauaugcaauuaguguuugaaa

SEQ ID NO: 32507 - RNA, 23 nt, artificial
  Chemically synthesized
uguaaaaccugcuacaaauggca

SEQ ID NO: 32508 - RNA, 23 nt, artificial
  Chemically synthesized
auguaaaaccugcuacaaauggc

SEQ ID NO: 32509 - RNA, 23 nt, artificial
  Chemically synthesized
cauguaaaaccugcuacaaaugg

SEQ ID NO: 32510 - RNA, 23 nt, artificial
  Chemically synthesized
ucuguaguaugaauguaaucagu

SEQ ID NO: 32511 - RNA, 23 nt, artificial
  Chemically synthesized
uucuguaguaugaauguaaucag

SEQ ID NO: 32512 - RNA, 23 nt, artificial
  Chemically synthesized
auucuguaguaugaauguaauca

SEQ ID NO: 32513 - RNA, 23 nt, artificial
  Chemically synthesized
gauucuguaguaugaauguaauc

SEQ ID NO: 32514 - RNA, 23 nt, artificial
  Chemically synthesized
ugauucuguaguaugaauguaau

SEQ ID NO: 32515 - RNA, 23 nt, artificial
  Chemically synthesized
aaaaucaucaucuggauuuagga

SEQ ID NO: 32516 - RNA, 23 nt, artificial
  Chemically synthesized
agcaacaccaagugcaaagagga

SEQ ID NO: 32517 - RNA, 23 nt, artificial
  Chemically synthesized
uuauuggugucauauuauacaau

SEQ ID NO: 32518 - RNA, 23 nt, artificial
  Chemically synthesized
uuuauuggugucauauuauacaa

SEQ ID NO: 32519 - RNA, 23 nt, artificial
  Chemically synthesized
gaaucaauagaagaagcuaugac

SEQ ID NO: 32520 - RNA, 23 nt, artificial
  Chemically synthesized
ugaaucaauagaagaagcuauga

SEQ ID NO: 32521 - RNA, 23 nt, artificial
  Chemically synthesized
augaaucaauagaagaagcuaug

SEQ ID NO: 32522 - RNA, 23 nt, artificial
  Chemically synthesized
uaugaaucaauagaagaagcuau

SEQ ID NO: 32523 - RNA, 23 nt, artificial
  Chemically synthesized
aguaaauauaucaccacuauugc

SEQ ID NO: 32524 - RNA, 23 nt, artificial
  Chemically synthesized
ugaguaaauauaucaccacuauu

SEQ ID NO: 32525 - RNA, 23 nt, artificial
  Chemically synthesized
uugaguaaauauaucaccacuau

SEQ ID NO: 32526 - RNA, 23 nt, artificial
  Chemically synthesized
uguucgaaagaauggugucaaug

SEQ ID NO: 32527 - RNA, 23 nt, artificial
  Chemically synthesized
uuguucgaaagaauggugucaau

SEQ ID NO: 32528 - RNA, 23 nt, artificial
  Chemically synthesized
uauauguauuugagugcagaauu

SEQ ID NO: 32529 - RNA, 23 nt, artificial
  Chemically synthesized
caacaaccaugcugggcaucugg

SEQ ID NO: 32530 - RNA, 23 nt, artificial
  Chemically synthesized
ucaacaaccaugcugggcaucug

SEQ ID NO: 32531 - RNA, 23 nt, artificial
  Chemically synthesized
cucaacaaccaugcugggcaucu

SEQ ID NO: 32532 - RNA, 23 nt, artificial
  Chemically synthesized
gcucaacaaccaugcugggcauc

SEQ ID NO: 32533 - RNA, 23 nt, artificial
  Chemically synthesized
gucaugaacccauguuugcaauc

SEQ ID NO: 32534 - RNA, 23 nt, artificial
  Chemically synthesized
acuaucauccucaaggacauuac

SEQ ID NO: 32535 - RNA, 23 nt, artificial
  Chemically synthesized
ggagucaugacacuaagucaagu

SEQ ID NO: 32536 - RNA, 23 nt, artificial
  Chemically synthesized
aacauggaaucaucaaggaaugc

SEQ ID NO: 32537 - RNA, 23 nt, artificial
  Chemically synthesized
aauacugcuugguuuuuuacugg

SEQ ID NO: 32538 - RNA, 23 nt, artificial
  Chemically synthesized
aaauacugcuugguuuuuuacug

SEQ ID NO: 32539 - RNA, 23 nt, artificial
  Chemically synthesized
uaaauacugcuugguuuuuuacu

SEQ ID NO: 32540 - RNA, 23 nt, artificial
  Chemically synthesized
guaaauacugcuugguuuuuuac

SEQ ID NO: 32541 - RNA, 23 nt, artificial
  Chemically synthesized
uguaaauacugcuugguuuuuua

SEQ ID NO: 32542 - RNA, 23 nt, artificial
  Chemically synthesized
accaaaaaauacuuaauagucca

SEQ ID NO: 32543 - RNA, 23 nt, artificial
  Chemically synthesized
aggauguuuaaaaucuaguuggg

SEQ ID NO: 32544 - RNA, 23 nt, artificial
  Chemically synthesized
aaggauguuuaaaaucuaguugg

SEQ ID NO: 32545 - RNA, 23 nt, artificial
  Chemically synthesized
uuugagcaggagaguauuacuag

SEQ ID NO: 32546 - RNA, 23 nt, artificial
  Chemically synthesized
guagauuuuuaauaucucaugau

SEQ ID NO: 32547 - RNA, 23 nt, artificial
  Chemically synthesized
uguagauuuuuaauaucucauga

SEQ ID NO: 32548 - RNA, 23 nt, artificial
  Chemically synthesized
uuguagauuuuuaauaucucaug

SEQ ID NO: 32549 - RNA, 23 nt, artificial
  Chemically synthesized
uuuguagauuuuuaauaucucau

SEQ ID NO: 32550 - RNA, 23 nt, artificial
  Chemically synthesized
auuuguagauuuuuaauaucuca

SEQ ID NO: 32551 - RNA, 23 nt, artificial
  Chemically synthesized
ucuccuuacuacuauccuacguu

SEQ ID NO: 32552 - RNA, 23 nt, artificial
  Chemically synthesized
uucuccuuacuacuauccuacgu

SEQ ID NO: 32553 - RNA, 23 nt, artificial
  Chemically synthesized
auucuccuuacuacuauccuacg

SEQ ID NO: 32554 - RNA, 23 nt, artificial
  Chemically synthesized
gauucuccuuacuacuauccuac

SEQ ID NO: 32555 - RNA, 23 nt, artificial
  Chemically synthesized
ugagacucagaacuuggaaggcc

SEQ ID NO: 32556 - RNA, 23 nt, artificial
  Chemically synthesized
uugagacucagaacuuggaaggc

SEQ ID NO: 32557 - RNA, 23 nt, artificial
  Chemically synthesized
guugagacucagaacuuggaagg

SEQ ID NO: 32558 - RNA, 23 nt, artificial
  Chemically synthesized
gugagggaagcgguuuacgagug

SEQ ID NO: 32559 - RNA, 23 nt, artificial
  Chemically synthesized
uggaaccaccuaaagaacuucca

SEQ ID NO: 32560 - RNA, 23 nt, artificial
  Chemically synthesized
cuggaaccaccuaaagaacuucc

SEQ ID NO: 32561 - RNA, 23 nt, artificial
  Chemically synthesized
aaguucaacugcuucguaauugg

SEQ ID NO: 32562 - RNA, 23 nt, artificial
  Chemically synthesized
aaaguucaacugcuucguaauug

SEQ ID NO: 32563 - RNA, 23 nt, artificial
  Chemically synthesized
ugagaucaagaaugacaaugucc

SEQ ID NO: 32564 - RNA, 23 nt, artificial
  Chemically synthesized
uccaaagcuuggucuagagugaa

SEQ ID NO: 32565 - RNA, 23 nt, artificial
  Chemically synthesized
auccaaagcuuggucuagaguga

SEQ ID NO: 32566 - RNA, 23 nt, artificial
  Chemically synthesized
uccucaaggacauuacuagugac

SEQ ID NO: 32567 - RNA, 23 nt, artificial
  Chemically synthesized
auccucaaggacauuacuaguga

SEQ ID NO: 32568 - RNA, 23 nt, artificial
  Chemically synthesized
cauccucaaggacauuacuagug

SEQ ID NO: 32569 - RNA, 23 nt, artificial
  Chemically synthesized
ucauccucaaggacauuacuagu

SEQ ID NO: 32570 - RNA, 23 nt, artificial
  Chemically synthesized
ucuugcagagaaaauucagacua

SEQ ID NO: 32571 - RNA, 23 nt, artificial
  Chemically synthesized
cucuugcagagaaaauucagacu

SEQ ID NO: 32572 - RNA, 23 nt, artificial
  Chemically synthesized
acucuugcagagaaaauucagac

SEQ ID NO: 32573 - RNA, 23 nt, artificial
  Chemically synthesized
gauuuuaccauauuucuaaacuu

SEQ ID NO: 32574 - RNA, 23 nt, artificial
  Chemically synthesized
agauuuuaccauauuucuaaacu

SEQ ID NO: 32575 - RNA, 23 nt, artificial
  Chemically synthesized
gagauuuuaccauauuucuaaac

SEQ ID NO: 32576 - RNA, 23 nt, artificial
  Chemically synthesized
agagauuuuaccauauuucuaaa

SEQ ID NO: 32577 - RNA, 23 nt, artificial
  Chemically synthesized
uagagauuuuaccauauuucuaa

SEQ ID NO: 32578 - RNA, 23 nt, artificial
  Chemically synthesized
gagggaagcgguuuacgagugac

SEQ ID NO: 32579 - RNA, 23 nt, artificial
  Chemically synthesized
uauacauagcaaugguaaaauca

SEQ ID NO: 32580 - RNA, 23 nt, artificial
  Chemically synthesized
uuauacauagcaaugguaaaauc

SEQ ID NO: 32581 - RNA, 23 nt, artificial
  Chemically synthesized
cuuauacauagcaaugguaaaau

SEQ ID NO: 32582 - RNA, 23 nt, artificial
  Chemically synthesized
ggcucuaccucaaagaccuuugc

SEQ ID NO: 32583 - RNA, 23 nt, artificial
  Chemically synthesized
aggcucuaccucaaagaccuuug

SEQ ID NO: 32584 - RNA, 23 nt, artificial
  Chemically synthesized
auaaggcucuaccucaaagaccu

SEQ ID NO: 32585 - RNA, 23 nt, artificial
  Chemically synthesized
gcaucaaaagcauuuugagcagg

SEQ ID NO: 32586 - RNA, 23 nt, artificial
  Chemically synthesized
ggcaucaaaagcauuuugagcag

SEQ ID NO: 32587 - RNA, 23 nt, artificial
  Chemically synthesized
aggcaucaaaagcauuuugagca

SEQ ID NO: 32588 - RNA, 23 nt, artificial
  Chemically synthesized
caggcaucaaaagcauuuugagc

SEQ ID NO: 32589 - RNA, 23 nt, artificial
  Chemically synthesized
ucaggcaucaaaagcauuuugag

SEQ ID NO: 32590 - RNA, 23 nt, artificial
  Chemically synthesized
caacuccaagggauuggaauuga

SEQ ID NO: 32591 - RNA, 23 nt, artificial
  Chemically synthesized
ucaacuccaagggauuggaauug

SEQ ID NO: 32592 - RNA, 23 nt, artificial
  Chemically synthesized
aucaacuccaagggauuggaauu

SEQ ID NO: 32593 - RNA, 23 nt, artificial
  Chemically synthesized
aaauguaaacugugaagauaguu

SEQ ID NO: 32594 - RNA, 23 nt, artificial
  Chemically synthesized
uaaauguaaacugugaagauagu

SEQ ID NO: 32595 - RNA, 23 nt, artificial
  Chemically synthesized
guaaauguaaacugugaagauag

SEQ ID NO: 32596 - RNA, 23 nt, artificial
  Chemically synthesized
aaacuucaucaagaguaaaugca

SEQ ID NO: 32597 - RNA, 23 nt, artificial
  Chemically synthesized
cugguuuggagauacuaacugcu

SEQ ID NO: 32598 - RNA, 23 nt, artificial
  Chemically synthesized
agagaaaguagcuuugugacaug

SEQ ID NO: 32599 - RNA, 23 nt, artificial
  Chemically synthesized
ucucagagaaaguagcuuuguga

SEQ ID NO: 32600 - RNA, 23 nt, artificial
  Chemically synthesized
aauucagacuaucauccucaagg

SEQ ID NO: 32601 - RNA, 23 nt, artificial
  Chemically synthesized
aaauucagacuaucauccucaag

SEQ ID NO: 32602 - RNA, 23 nt, artificial
  Chemically synthesized
aauaucaccaaaaaauacuuaau

SEQ ID NO: 32603 - RNA, 23 nt, artificial
  Chemically synthesized
aaaaauacuuaauaguccaccaa

SEQ ID NO: 32604 - RNA, 23 nt, artificial
  Chemically synthesized
aaaaaauacuuaauaguccacca

SEQ ID NO: 32605 - RNA, 23 nt, artificial
  Chemically synthesized
agugcagaauuuaaauaaggcuc

SEQ ID NO: 32606 - RNA, 23 nt, artificial
  Chemically synthesized
aauauagguaaaaguacguaauu

SEQ ID NO: 32607 - RNA, 23 nt, artificial
  Chemically synthesized
aaauauagguaaaaguacguaau

SEQ ID NO: 32608 - RNA, 23 nt, artificial
  Chemically synthesized
aaaauauagguaaaaguacguaa

SEQ ID NO: 32609 - RNA, 23 nt, artificial
  Chemically synthesized
uuacuggguacauuuuaucauuu

SEQ ID NO: 32610 - RNA, 23 nt, artificial
  Chemically synthesized
uuuacuggguacauuuuaucauu

SEQ ID NO: 32611 - RNA, 23 nt, artificial
  Chemically synthesized
auaugauucuguaguaugaaugu

SEQ ID NO: 32612 - RNA, 23 nt, artificial
  Chemically synthesized
cauaugauucuguaguaugaaug

SEQ ID NO: 32613 - RNA, 23 nt, artificial
  Chemically synthesized
acauaugauucuguaguaugaau

SEQ ID NO: 32614 - RNA, 23 nt, artificial
  Chemically synthesized
aacauaugauucuguaguaugaa

SEQ ID NO: 32615 - RNA, 23 nt, artificial
  Chemically synthesized
uaacauaugauucuguaguauga

SEQ ID NO: 32616 - RNA, 23 nt, artificial
  Chemically synthesized
ggaauuauaaaauauagguaaaa

SEQ ID NO: 32617 - RNA, 23 nt, artificial
  Chemically synthesized
uggaauuauaaaauauagguaaa

SEQ ID NO: 32618 - RNA, 23 nt, artificial
  Chemically synthesized
uuggaauuauaaaauauagguaa

SEQ ID NO: 32619 - RNA, 23 nt, artificial
  Chemically synthesized
uuuggaauuauaaaauauaggua

SEQ ID NO: 32620 - RNA, 23 nt, artificial
  Chemically synthesized
guuuggaauuauaaaauauaggu

SEQ ID NO: 32621 - RNA, 23 nt, artificial
  Chemically synthesized
ugaauucacauagaaaacauuaa

SEQ ID NO: 32622 - RNA, 23 nt, artificial
  Chemically synthesized
gugaauucacauagaaaacauua

SEQ ID NO: 32623 - RNA, 23 nt, artificial
  Chemically synthesized
auuacuagugacucagaaaauuc

SEQ ID NO: 32624 - RNA, 23 nt, artificial
  Chemically synthesized
ugaauguaaucaguguauguuag

SEQ ID NO: 32625 - RNA, 23 nt, artificial
  Chemically synthesized
augaauguaaucaguguauguua

SEQ ID NO: 32626 - RNA, 23 nt, artificial
  Chemically synthesized
uaugaauguaaucaguguauguu

SEQ ID NO: 32627 - RNA, 23 nt, artificial
  Chemically synthesized
guaugaauguaaucaguguaugu

SEQ ID NO: 32628 - RNA, 23 nt, artificial
  Chemically synthesized
cuagagauuuuaccauauuucua

SEQ ID NO: 32629 - RNA, 23 nt, artificial
  Chemically synthesized
gugaaaaacaacaaauucaguuc

SEQ ID NO: 32630 - RNA, 23 nt, artificial
  Chemically synthesized
agugaaaaacaacaaauucaguu

SEQ ID NO: 32631 - RNA, 23 nt, artificial
  Chemically synthesized
uucagaaaugaaauccaaagcuu

SEQ ID NO: 32632 - RNA, 23 nt, artificial
  Chemically synthesized
accuaaagaacuuccauuuaugg

SEQ ID NO: 32633 - RNA, 23 nt, artificial
  Chemically synthesized
caccuaaagaacuuccauuuaug

SEQ ID NO: 32634 - RNA, 23 nt, artificial
  Chemically synthesized
accuacuucuuucucaggcauca

SEQ ID NO: 32635 - RNA, 23 nt, artificial
  Chemically synthesized
uaccuacuucuuucucaggcauc

SEQ ID NO: 32636 - RNA, 23 nt, artificial
  Chemically synthesized
cuaccuacuucuuucucaggcau

SEQ ID NO: 32637 - RNA, 23 nt, artificial
  Chemically synthesized
acuaccuacuucuuucucaggca

SEQ ID NO: 32638 - RNA, 23 nt, artificial
  Chemically synthesized
caauuaguguuugaaaagauucu

SEQ ID NO: 32639 - RNA, 23 nt, artificial
  Chemically synthesized
gcaauuaguguuugaaaagauuc

SEQ ID NO: 32640 - RNA, 23 nt, artificial
  Chemically synthesized
ccaaauaggaguguaugcagagg

SEQ ID NO: 32641 - RNA, 23 nt, artificial
  Chemically synthesized
cccaaauaggaguguaugcagag

SEQ ID NO: 32642 - RNA, 23 nt, artificial
  Chemically synthesized
acccaaauaggaguguaugcaga

SEQ ID NO: 32643 - RNA, 23 nt, artificial
  Chemically synthesized
uugaaaguuuguauuaaauguga

SEQ ID NO: 32644 - RNA, 23 nt, artificial
  Chemically synthesized
uuugaaaguuuguauuaaaugug

SEQ ID NO: 32645 - RNA, 23 nt, artificial
  Chemically synthesized
acuucauggaaagaaagaagcgu

SEQ ID NO: 32646 - RNA, 23 nt, artificial
  Chemically synthesized
aacuucauggaaagaaagaagcg

SEQ ID NO: 32647 - RNA, 23 nt, artificial
  Chemically synthesized
caacuucauggaaagaaagaagc

SEQ ID NO: 32648 - RNA, 23 nt, artificial
  Chemically synthesized
acaauauuucaauugugaauuca

SEQ ID NO: 32649 - RNA, 23 nt, artificial
  Chemically synthesized
uacaauauuucaauugugaauuc

SEQ ID NO: 32650 - RNA, 23 nt, artificial
  Chemically synthesized
auacaauauuucaauugugaauu

SEQ ID NO: 32651 - RNA, 23 nt, artificial
  Chemically synthesized
uauacaauauuucaauugugaau

SEQ ID NO: 32652 - RNA, 23 nt, artificial
  Chemically synthesized
uuauacaauauuucaauugugaa

SEQ ID NO: 32653 - RNA, 23 nt, artificial
  Chemically synthesized
aacuuggaaggccugcaucauga

SEQ ID NO: 32654 - RNA, 23 nt, artificial
  Chemically synthesized
aagauaguuauaaacugaagcag

SEQ ID NO: 32655 - RNA, 23 nt, artificial
  Chemically synthesized
acgucuguugcuagauuaucguc

SEQ ID NO: 32656 - RNA, 23 nt, artificial
  Chemically synthesized
uacgucuguugcuagauuaucgu

SEQ ID NO: 32657 - RNA, 23 nt, artificial
  Chemically synthesized
uuacgucuguugcuagauuaucg

SEQ ID NO: 32658 - RNA, 23 nt, artificial
  Chemically synthesized
cuuacgucuguugcuagauuauc

SEQ ID NO: 32659 - RNA, 23 nt, artificial
  Chemically synthesized
ucuuacgucuguugcuagauuau

SEQ ID NO: 32660 - RNA, 23 nt, artificial
  Chemically synthesized
agaucauauuuauguaaaguaua

SEQ ID NO: 32661 - RNA, 23 nt, artificial
  Chemically synthesized
aagaucauauuuauguaaaguau

SEQ ID NO: 32662 - RNA, 23 nt, artificial
  Chemically synthesized
uggcuguaaauacugcuugguuu

SEQ ID NO: 32663 - RNA, 23 nt, artificial
  Chemically synthesized
gcuggcuguaaauacugcuuggu

SEQ ID NO: 32664 - RNA, 23 nt, artificial
  Chemically synthesized
agcuggcuguaaauacugcuugg

SEQ ID NO: 32665 - RNA, 23 nt, artificial
  Chemically synthesized
ucuaacauaugauucuguaguau

SEQ ID NO: 32666 - RNA, 23 nt, artificial
  Chemically synthesized
aucuaacauaugauucuguagua

SEQ ID NO: 32667 - RNA, 23 nt, artificial
  Chemically synthesized
auuaguguuugaaaagauucuua

SEQ ID NO: 32668 - RNA, 23 nt, artificial
  Chemically synthesized
auguuugcaaucaaagaugauaa

SEQ ID NO: 32669 - RNA, 23 nt, artificial
  Chemically synthesized
uuuaaaaucuaguugggaaaaca

SEQ ID NO: 32670 - RNA, 23 nt, artificial
  Chemically synthesized
ucaugauucugccuccaaggaug

SEQ ID NO: 32671 - RNA, 23 nt, artificial
  Chemically synthesized
cucaugauucugccuccaaggau

SEQ ID NO: 32672 - RNA, 23 nt, artificial
  Chemically synthesized
ucucaugauucugccuccaagga

SEQ ID NO: 32673 - RNA, 23 nt, artificial
  Chemically synthesized
aucucaugauucugccuccaagg

SEQ ID NO: 32674 - RNA, 23 nt, artificial
  Chemically synthesized
uaucucaugauucugccuccaag

SEQ ID NO: 32675 - RNA, 23 nt, artificial
  Chemically synthesized
gaagcucuuucacuucggaggau

SEQ ID NO: 32676 - RNA, 23 nt, artificial
  Chemically synthesized
gggaagcucuuucacuucggagg

SEQ ID NO: 32677 - RNA, 23 nt, artificial
  Chemically synthesized
ggggaagcucuuucacuucggag

SEQ ID NO: 32678 - RNA, 23 nt, artificial
  Chemically synthesized
uggggaagcucuuucacuucgga

SEQ ID NO: 32679 - RNA, 23 nt, artificial
  Chemically synthesized
acuccaagggauuggaauugagg

SEQ ID NO: 32680 - RNA, 23 nt, artificial
  Chemically synthesized
aacuccaagggauuggaauugag

SEQ ID NO: 32681 - RNA, 23 nt, artificial
  Chemically synthesized
guaaaaucaucaucuggauuuag

SEQ ID NO: 32682 - RNA, 23 nt, artificial
  Chemically synthesized
gguaaaaucaucaucuggauuua

SEQ ID NO: 32683 - RNA, 23 nt, artificial
  Chemically synthesized
ugguaaaaucaucaucuggauuu

SEQ ID NO: 32684 - RNA, 23 nt, artificial
  Chemically synthesized
augguaaaaucaucaucuggauu

SEQ ID NO: 32685 - RNA, 23 nt, artificial
  Chemically synthesized
ucauggaaagaaagaagcguaug

SEQ ID NO: 32686 - RNA, 23 nt, artificial
  Chemically synthesized
uucauggaaagaaagaagcguau

SEQ ID NO: 32687 - RNA, 23 nt, artificial
  Chemically synthesized
agagccaacauauuuguagauuu

SEQ ID NO: 32688 - RNA, 23 nt, artificial
  Chemically synthesized
ucaucaagaguaaaugcaguggc

SEQ ID NO: 32689 - RNA, 23 nt, artificial
  Chemically synthesized
uucaucaagaguaaaugcagugg

SEQ ID NO: 32690 - RNA, 23 nt, artificial
  Chemically synthesized
cuucaucaagaguaaaugcagug

SEQ ID NO: 32691 - RNA, 23 nt, artificial
  Chemically synthesized
acuucaucaagaguaaaugcagu

SEQ ID NO: 32692 - RNA, 23 nt, artificial
  Chemically synthesized
cacauagaaaacauuaaauuaua

SEQ ID NO: 32693 - RNA, 23 nt, artificial
  Chemically synthesized
uuguacucuugcagagaaaauuc

SEQ ID NO: 32694 - RNA, 23 nt, artificial
  Chemically synthesized
uuuguacucuugcagagaaaauu

SEQ ID NO: 32695 - RNA, 23 nt, artificial
  Chemically synthesized
cucaaggacauuacuagugacuc

SEQ ID NO: 32696 - RNA, 23 nt, artificial
  Chemically synthesized
aguucaacugcuucguaauuggc

SEQ ID NO: 32697 - RNA, 23 nt, artificial
  Chemically synthesized
cuauccuacguuuaaauaucuuu

SEQ ID NO: 32698 - RNA, 23 nt, artificial
  Chemically synthesized
acuauccuacguuuaaauaucuu

SEQ ID NO: 32699 - RNA, 23 nt, artificial
  Chemically synthesized
uacuauccuacguuuaaauaucu

SEQ ID NO: 32700 - RNA, 23 nt, artificial
  Chemically synthesized
gaaaugaaauccaaagcuugguc

SEQ ID NO: 32701 - RNA, 23 nt, artificial
  Chemically synthesized
agaaaugaaauccaaagcuuggu

SEQ ID NO: 32702 - RNA, 23 nt, artificial
  Chemically synthesized
ucagaaaugaaauccaaagcuug

SEQ ID NO: 32703 - RNA, 23 nt, artificial
  Chemically synthesized
aaaauacuuaauaguccaccaaa

SEQ ID NO: 32704 - RNA, 23 nt, artificial
  Chemically synthesized
augucuauccacaggcuaacccc

SEQ ID NO: 32705 - RNA, 23 nt, artificial
  Chemically synthesized
aaugucuauccacaggcuaaccc

SEQ ID NO: 32706 - RNA, 23 nt, artificial
  Chemically synthesized
aaaugucuauccacaggcuaacc

SEQ ID NO: 32707 - RNA, 23 nt, artificial
  Chemically synthesized
caaaugucuauccacaggcuaac

SEQ ID NO: 32708 - RNA, 23 nt, artificial
  Chemically synthesized
augauucuguaguaugaauguaa

SEQ ID NO: 32709 - RNA, 23 nt, artificial
  Chemically synthesized
aaguguuaaugcccaagugacug

SEQ ID NO: 32710 - RNA, 23 nt, artificial
  Chemically synthesized
aaaguguuaaugcccaagugacu

SEQ ID NO: 32711 - RNA, 23 nt, artificial
  Chemically synthesized
aaaaguguuaaugcccaagugac

SEQ ID NO: 32712 - RNA, 23 nt, artificial
  Chemically synthesized
auguuaguacaaaugucuaucca

SEQ ID NO: 32713 - RNA, 23 nt, artificial
  Chemically synthesized
uauguuaguacaaaugucuaucc

SEQ ID NO: 32714 - RNA, 23 nt, artificial
  Chemically synthesized
guauguuaguacaaaugucuauc

SEQ ID NO: 32715 - RNA, 23 nt, artificial
  Chemically synthesized
uguauguuaguacaaaugucuau

SEQ ID NO: 32716 - RNA, 23 nt, artificial
  Chemically synthesized
cucaggcaucaaaagcauuuuga

SEQ ID NO: 32717 - RNA, 23 nt, artificial
  Chemically synthesized
uacccccaaguuucuaagauuua

SEQ ID NO: 32718 - RNA, 23 nt, artificial
  Chemically synthesized
gauuuuuaauaucucaugauucu

SEQ ID NO: 32719 - RNA, 23 nt, artificial
  Chemically synthesized
agauuuuuaauaucucaugauuc

SEQ ID NO: 32720 - RNA, 23 nt, artificial
  Chemically synthesized
uagauuuuuaauaucucaugauu

SEQ ID NO: 32721 - RNA, 23 nt, artificial
  Chemically synthesized
aacaacaaauucaguucugagua

SEQ ID NO: 32722 - RNA, 23 nt, artificial
  Chemically synthesized
aaacaacaaauucaguucugagu

SEQ ID NO: 32723 - RNA, 23 nt, artificial
  Chemically synthesized
aaaacaacaaauucaguucugag

SEQ ID NO: 32724 - RNA, 23 nt, artificial
  Chemically synthesized
guguuuggaauuauaaaauauag

SEQ ID NO: 32725 - RNA, 23 nt, artificial
  Chemically synthesized
uguguuuggaauuauaaaauaua

SEQ ID NO: 32726 - RNA, 23 nt, artificial
  Chemically synthesized
uuguguuuggaauuauaaaauau

SEQ ID NO: 32727 - RNA, 23 nt, artificial
  Chemically synthesized
cuuguguuuggaauuauaaaaua

SEQ ID NO: 32728 - RNA, 23 nt, artificial
  Chemically synthesized
ccuuguguuuggaauuauaaaau

SEQ ID NO: 32729 - RNA, 23 nt, artificial
  Chemically synthesized
uaaaaucaucaucuggauuuagg

SEQ ID NO: 32730 - RNA, 23 nt, artificial
  Chemically synthesized
cuaaagaacuuccauuuauggag

SEQ ID NO: 32731 - RNA, 23 nt, artificial
  Chemically synthesized
aaauucaaacuucagaaaugaaa

SEQ ID NO: 32732 - RNA, 23 nt, artificial
  Chemically synthesized
auguaaucaguguauguuaguac

SEQ ID NO: 32733 - RNA, 23 nt, artificial
  Chemically synthesized
aauguaaucaguguauguuagua

SEQ ID NO: 32734 - RNA, 23 nt, artificial
  Chemically synthesized
uguugacuugaguaaauauauca

SEQ ID NO: 32735 - RNA, 23 nt, artificial
  Chemically synthesized
auguugacuugaguaaauauauc

SEQ ID NO: 32736 - RNA, 23 nt, artificial
  Chemically synthesized
gauguugacuugaguaaauauau

SEQ ID NO: 32737 - RNA, 23 nt, artificial
  Chemically synthesized
ugauguugacuugaguaaauaua

SEQ ID NO: 32738 - RNA, 23 nt, artificial
  Chemically synthesized
cugauguugacuugaguaaauau

SEQ ID NO: 32739 - RNA, 23 nt, artificial
  Chemically synthesized
auuuugagcaggagaguauuacu

SEQ ID NO: 32740 - RNA, 23 nt, artificial
  Chemically synthesized
cuucuuucucaggcaucaaaagc

SEQ ID NO: 32741 - RNA, 23 nt, artificial
  Chemically synthesized
acuucuuucucaggcaucaaaag

SEQ ID NO: 32742 - RNA, 23 nt, artificial
  Chemically synthesized
ucuuucucaggcaucaaaagcau

SEQ ID NO: 32743 - RNA, 23 nt, artificial
  Chemically synthesized
uucuuucucaggcaucaaaagca

SEQ ID NO: 32744 - RNA, 23 nt, artificial
  Chemically synthesized
aaguuucuaagauuuaagauucu

SEQ ID NO: 32745 - RNA, 23 nt, artificial
  Chemically synthesized
caaguuucuaagauuuaagauuc

SEQ ID NO: 32746 - RNA, 23 nt, artificial
  Chemically synthesized
gacuguuacuacaguugagacuc

SEQ ID NO: 32747 - RNA, 23 nt, artificial
  Chemically synthesized
agacuguuacuacaguugagacu

SEQ ID NO: 32748 - RNA, 23 nt, artificial
  Chemically synthesized
aagacuguuacuacaguugagac

SEQ ID NO: 32749 - RNA, 23 nt, artificial
  Chemically synthesized
caaauucaguucugaguauaugc

SEQ ID NO: 32750 - RNA, 23 nt, artificial
  Chemically synthesized
acaaauucaguucugaguauaug

SEQ ID NO: 32751 - RNA, 23 nt, artificial
  Chemically synthesized
aacaaauucaguucugaguauau

SEQ ID NO: 32752 - RNA, 23 nt, artificial
  Chemically synthesized
gaaaaacaacaaauucaguucug

SEQ ID NO: 32753 - RNA, 23 nt, artificial
  Chemically synthesized
ugaaaaacaacaaauucaguucu

SEQ ID NO: 32754 - RNA, 23 nt, artificial
  Chemically synthesized
agaaaauucagacuaucauccuc

SEQ ID NO: 32755 - RNA, 23 nt, artificial
  Chemically synthesized
aauguaaacugugaagauaguua

SEQ ID NO: 32756 - RNA, 23 nt, artificial
  Chemically synthesized
aaauaucaccaaaaaauacuuaa

SEQ ID NO: 32757 - RNA, 23 nt, artificial
  Chemically synthesized
ucgugagcucgucucugaucucg

SEQ ID NO: 32758 - RNA, 23 nt, artificial
  Chemically synthesized
uucgugagcucgucucugaucuc

SEQ ID NO: 32759 - RNA, 23 nt, artificial
  Chemically synthesized
uuucgugagcucgucucugaucu

SEQ ID NO: 32760 - RNA, 23 nt, artificial
  Chemically synthesized
uuuucgugagcucgucucugauc

SEQ ID NO: 32761 - RNA, 23 nt, artificial
  Chemically synthesized
cuuuucgugagcucgucucugau

SEQ ID NO: 32762 - RNA, 23 nt, artificial
  Chemically synthesized
caauauuucaauugugaauucac

SEQ ID NO: 32763 - RNA, 23 nt, artificial
  Chemically synthesized
aaguuaaaggcuuuguucgaaag

SEQ ID NO: 32764 - RNA, 23 nt, artificial
  Chemically synthesized
agaaaguagcuuugugacauguc

SEQ ID NO: 32765 - RNA, 23 nt, artificial
  Chemically synthesized
gagaaaguagcuuugugacaugu

SEQ ID NO: 32766 - RNA, 23 nt, artificial
  Chemically synthesized
guuugacuauuauauauguguau

SEQ ID NO: 32767 - RNA, 23 nt, artificial
  Chemically synthesized
uguuugacuauuauauaugugua

SEQ ID NO: 32768 - RNA, 23 nt, artificial
  Chemically synthesized
auguuugacuauuauauaugugu

SEQ ID NO: 32769 - RNA, 23 nt, artificial
  Chemically synthesized
aauguuugacuauuauauaugug

SEQ ID NO: 32770 - RNA, 23 nt, artificial
  Chemically synthesized
uaauguuugacuauuauauaugu

SEQ ID NO: 32771 - RNA, 23 nt, artificial
  Chemically synthesized
uuugcacaguuuauuggugucau

SEQ ID NO: 32772 - RNA, 23 nt, artificial
  Chemically synthesized
auuaccucugauaauucuagaga

SEQ ID NO: 32773 - RNA, 23 nt, artificial
  Chemically synthesized
aauuaccucugauaauucuagag

SEQ ID NO: 32774 - RNA, 23 nt, artificial
  Chemically synthesized
aaauuaccucugauaauucuaga

SEQ ID NO: 32775 - RNA, 23 nt, artificial
  Chemically synthesized
aauuaguguuugaaaagauucuu

SEQ ID NO: 32776 - RNA, 23 nt, artificial
  Chemically synthesized
guuuguauuaaaugugaauuuua

SEQ ID NO: 32777 - RNA, 23 nt, artificial
  Chemically synthesized
auccuacguuuaaauaucuuuga

SEQ ID NO: 32778 - RNA, 23 nt, artificial
  Chemically synthesized
cccuccuaccucugguucuuacg

SEQ ID NO: 32779 - RNA, 23 nt, artificial
  Chemically synthesized
acccuccuaccucugguucuuac

SEQ ID NO: 32780 - RNA, 23 nt, artificial
  Chemically synthesized
ggacccuccuaccucugguucuu

SEQ ID NO: 32781 - RNA, 23 nt, artificial
  Chemically synthesized
acagaaaguucaacugcuucgua

SEQ ID NO: 32782 - RNA, 23 nt, artificial
  Chemically synthesized
aacagaaaguucaacugcuucgu

SEQ ID NO: 32783 - RNA, 23 nt, artificial
  Chemically synthesized
gaacagaaaguucaacugcuucg

SEQ ID NO: 32784 - RNA, 23 nt, artificial
  Chemically synthesized
agaacagaaaguucaacugcuuc

SEQ ID NO: 32785 - RNA, 23 nt, artificial
  Chemically synthesized
cagaacagaaaguucaacugcuu

SEQ ID NO: 32786 - RNA, 23 nt, artificial
  Chemically synthesized
uaucguccaaaaguguuaaugcc

SEQ ID NO: 32787 - RNA, 23 nt, artificial
  Chemically synthesized
uuaucguccaaaaguguuaaugc

SEQ ID NO: 32788 - RNA, 23 nt, artificial
  Chemically synthesized
auuaucguccaaaaguguuaaug

SEQ ID NO: 32789 - RNA, 23 nt, artificial
  Chemically synthesized
uggauuuaggaauugcucuuguc

SEQ ID NO: 32790 - RNA, 23 nt, artificial
  Chemically synthesized
cuggauuuaggaauugcucuugu

SEQ ID NO: 32791 - RNA, 23 nt, artificial
  Chemically synthesized
ucuggauuuaggaauugcucuug

SEQ ID NO: 32792 - RNA, 23 nt, artificial
  Chemically synthesized
aucuggauuuaggaauugcucuu

SEQ ID NO: 32793 - RNA, 23 nt, artificial
  Chemically synthesized
guugacuugaguaaauauaucac

SEQ ID NO: 32794 - RNA, 23 nt, artificial
  Chemically synthesized
aaaauucaaacuucagaaaugaa

SEQ ID NO: 32795 - RNA, 23 nt, artificial
  Chemically synthesized
cauuuauggaggauuuuuuugcc

SEQ ID NO: 32796 - RNA, 23 nt, artificial
  Chemically synthesized
ccauuuauggaggauuuuuuugc

SEQ ID NO: 32797 - RNA, 23 nt, artificial
  Chemically synthesized
uccauuuauggaggauuuuuuug

SEQ ID NO: 32798 - RNA, 23 nt, artificial
  Chemically synthesized
uuccauuuauggaggauuuuuuu

SEQ ID NO: 32799 - RNA, 23 nt, artificial
  Chemically synthesized
guaaucaguguauguuaguacaa

SEQ ID NO: 32800 - RNA, 23 nt, artificial
  Chemically synthesized
uucacuucggaggauugcucaac

SEQ ID NO: 32801 - RNA, 23 nt, artificial
  Chemically synthesized
uuucacuucggaggauugcucaa

SEQ ID NO: 32802 - RNA, 23 nt, artificial
  Chemically synthesized
aaaaacaacaaauucaguucuga

SEQ ID NO: 32803 - RNA, 23 nt, artificial
  Chemically synthesized
aucauccucaaggacauuacuag

SEQ ID NO: 32804 - RNA, 23 nt, artificial
  Chemically synthesized
uaucauccucaaggacauuacua

SEQ ID NO: 32805 - RNA, 23 nt, artificial
  Chemically synthesized
uguuaguacaaaugucuauccac

SEQ ID NO: 32806 - RNA, 23 nt, artificial
  Chemically synthesized
uuuaucauuuauuagcgcugaag

SEQ ID NO: 32807 - RNA, 23 nt, artificial
  Chemically synthesized
uuuuaucauuuauuagcgcugaa

SEQ ID NO: 32808 - RNA, 23 nt, artificial
  Chemically synthesized
auguaaacugugaagauaguuau

SEQ ID NO: 32809 - RNA, 23 nt, artificial
  Chemically synthesized
ucuagagauuuuaccauauuucu

SEQ ID NO: 32810 - RNA, 23 nt, artificial
  Chemically synthesized
auuucaauugugaauucacauag

SEQ ID NO: 32811 - RNA, 23 nt, artificial
  Chemically synthesized
uauuucaauugugaauucacaua

SEQ ID NO: 32812 - RNA, 23 nt, artificial
  Chemically synthesized
auauuucaauugugaauucacau

SEQ ID NO: 32813 - RNA, 23 nt, artificial
  Chemically synthesized
aauauuucaauugugaauucaca

SEQ ID NO: 32814 - RNA, 23 nt, artificial
  Chemically synthesized
gaaucaucaaggaaugcacacuc

SEQ ID NO: 32815 - RNA, 23 nt, artificial
  Chemically synthesized
ggaaucaucaaggaaugcacacu

SEQ ID NO: 32816 - RNA, 23 nt, artificial
  Chemically synthesized
uggaaucaucaaggaaugcacac

SEQ ID NO: 32817 - RNA, 23 nt, artificial
  Chemically synthesized
cugaucucgcgcaagagugacac

SEQ ID NO: 32818 - RNA, 23 nt, artificial
  Chemically synthesized
cucugaucucgcgcaagagugac

SEQ ID NO: 32819 - RNA, 23 nt, artificial
  Chemically synthesized
ucucugaucucgcgcaagaguga

SEQ ID NO: 32820 - RNA, 23 nt, artificial
  Chemically synthesized
ucucaggcaucaaaagcauuuug

SEQ ID NO: 32821 - RNA, 23 nt, artificial
  Chemically synthesized
uucucaggcaucaaaagcauuuu

SEQ ID NO: 32822 - RNA, 23 nt, artificial
  Chemically synthesized
acugaagcagauaccuggaacca

SEQ ID NO: 32823 - RNA, 23 nt, artificial
  Chemically synthesized
aacugaagcagauaccuggaacc

SEQ ID NO: 32824 - RNA, 23 nt, artificial
  Chemically synthesized
aaacugaagcagauaccuggaac

SEQ ID NO: 32825 - RNA, 23 nt, artificial
  Chemically synthesized
auaaacugaagcagauaccugga

SEQ ID NO: 32826 - RNA, 23 nt, artificial
  Chemically synthesized
gcaaugguaaaaucaucaucugg

SEQ ID NO: 32827 - RNA, 23 nt, artificial
  Chemically synthesized
agcaaugguaaaaucaucaucug

SEQ ID NO: 32828 - RNA, 23 nt, artificial
  Chemically synthesized
uagcaaugguaaaaucaucaucu

SEQ ID NO: 32829 - RNA, 23 nt, artificial
  Chemically synthesized
auagcaaugguaaaaucaucauc

SEQ ID NO: 32830 - RNA, 23 nt, artificial
  Chemically synthesized
cugaagcagauaccuggaaccac

SEQ ID NO: 32831 - RNA, 23 nt, artificial
  Chemically synthesized
gacuugaguaaauauaucaccac

SEQ ID NO: 32832 - RNA, 23 nt, artificial
  Chemically synthesized
ugacuugaguaaauauaucacca

SEQ ID NO: 32833 - RNA, 23 nt, artificial
  Chemically synthesized
uugacuugaguaaauauaucacc

SEQ ID NO: 32834 - RNA, 23 nt, artificial
  Chemically synthesized
uaugauucuguaguaugaaugua

SEQ ID NO: 32835 - RNA, 23 nt, artificial
  Chemically synthesized
aaucaucaaggaaugcacacuca

SEQ ID NO: 32836 - RNA, 23 nt, artificial
  Chemically synthesized
aggauugcucaacaaccaugcug

SEQ ID NO: 32837 - RNA, 23 nt, artificial
  Chemically synthesized
uuggagauacuaacugcucucag

SEQ ID NO: 32838 - RNA, 23 nt, artificial
  Chemically synthesized
uuuggagauacuaacugcucuca

SEQ ID NO: 32839 - RNA, 23 nt, artificial
  Chemically synthesized
guuuggagauacuaacugcucuc

SEQ ID NO: 32840 - RNA, 23 nt, artificial
  Chemically synthesized
gcaucuaacauaugauucuguag

SEQ ID NO: 32841 - RNA, 23 nt, artificial
  Chemically synthesized
uggcaucuaacauaugauucugu

SEQ ID NO: 32842 - RNA, 23 nt, artificial
  Chemically synthesized
cuggcaucuaacauaugauucug

SEQ ID NO: 32843 - RNA, 23 nt, artificial
  Chemically synthesized
ucuggcaucuaacauaugauucu

SEQ ID NO: 32844 - RNA, 23 nt, artificial
  Chemically synthesized
guacucuugcagagaaaauucag

SEQ ID NO: 32845 - RNA, 23 nt, artificial
  Chemically synthesized
cucucagagaaaguagcuuugug

SEQ ID NO: 32846 - RNA, 23 nt, artificial
  Chemically synthesized
uuguuuauaacucugagaagauc

SEQ ID NO: 32847 - RNA, 23 nt, artificial
  Chemically synthesized
uuuguuuauaacucugagaagau

SEQ ID NO: 32848 - RNA, 23 nt, artificial
  Chemically synthesized
ugguuuuuuacuggguacauuuu

SEQ ID NO: 32849 - RNA, 23 nt, artificial
  Chemically synthesized
uugguuuuuuacuggguacauuu

SEQ ID NO: 32850 - RNA, 23 nt, artificial
  Chemically synthesized
cuugguuuuuuacuggguacauu

SEQ ID NO: 32851 - RNA, 23 nt, artificial
  Chemically synthesized
gauaauucuagagauuuuaccau

SEQ ID NO: 32852 - RNA, 23 nt, artificial
  Chemically synthesized
ugauaauucuagagauuuuacca

SEQ ID NO: 32853 - RNA, 23 nt, artificial
  Chemically synthesized
cugauaauucuagagauuuuacc

SEQ ID NO: 32854 - RNA, 23 nt, artificial
  Chemically synthesized
ucugauaauucuagagauuuuac

SEQ ID NO: 32855 - RNA, 23 nt, artificial
  Chemically synthesized
gaagcagauaccuggaaccaccu

SEQ ID NO: 32856 - RNA, 23 nt, artificial
  Chemically synthesized
gaccuuugcacaguuuauuggug

SEQ ID NO: 32857 - RNA, 23 nt, artificial
  Chemically synthesized
gaagaagcuaugaccuuuugcug

SEQ ID NO: 32858 - RNA, 23 nt, artificial
  Chemically synthesized
uagaagaagcuaugaccuuuugc

SEQ ID NO: 32859 - RNA, 23 nt, artificial
  Chemically synthesized
auagaagaagcuaugaccuuuug

SEQ ID NO: 32860 - RNA, 23 nt, artificial
  Chemically synthesized
gauuuaggaauugcucuugucau

SEQ ID NO: 32861 - RNA, 23 nt, artificial
  Chemically synthesized
ccuuuugcugaaauaucaguuac

SEQ ID NO: 32862 - RNA, 23 nt, artificial
  Chemically synthesized
ucaaggaaugcacacucaccagc

SEQ ID NO: 32863 - RNA, 23 nt, artificial
  Chemically synthesized
aucaaggaaugcacacucaccag

SEQ ID NO: 32864 - RNA, 23 nt, artificial
  Chemically synthesized
ugguuuggagauacuaacugcuc

SEQ ID NO: 32865 - RNA, 23 nt, artificial
  Chemically synthesized
acauagcaaugguaaaaucauca

SEQ ID NO: 32866 - RNA, 23 nt, artificial
  Chemically synthesized
uacauagcaaugguaaaaucauc

SEQ ID NO: 32867 - RNA, 23 nt, artificial
  Chemically synthesized
auacauagcaaugguaaaaucau

SEQ ID NO: 32868 - RNA, 23 nt, artificial
  Chemically synthesized
guacccaaauaggaguguaugca

SEQ ID NO: 32869 - RNA, 23 nt, artificial
  Chemically synthesized
aguacccaaauaggaguguaugc

SEQ ID NO: 32870 - RNA, 23 nt, artificial
  Chemically synthesized
aaguacccaaauaggaguguaug

SEQ ID NO: 32871 - RNA, 23 nt, artificial
  Chemically synthesized
uaaguacccaaauaggaguguau

SEQ ID NO: 32872 - RNA, 23 nt, artificial
  Chemically synthesized
uacaguugagacucagaacuugg

SEQ ID NO: 32873 - RNA, 23 nt, artificial
  Chemically synthesized
uucuagccugguuuggagauacu

SEQ ID NO: 32874 - RNA, 23 nt, artificial
  Chemically synthesized
aagaagcuaugaccuuuugcuga

SEQ ID NO: 32875 - RNA, 23 nt, artificial
  Chemically synthesized
aucguccaaaaguguuaaugccc

SEQ ID NO: 32876 - RNA, 23 nt, artificial
  Chemically synthesized
gcucuuucacuucggaggauugc

SEQ ID NO: 32877 - RNA, 23 nt, artificial
  Chemically synthesized
agcucuuucacuucggaggauug

SEQ ID NO: 32878 - RNA, 23 nt, artificial
  Chemically synthesized
aagcucuuucacuucggaggauu

SEQ ID NO: 32879 - RNA, 23 nt, artificial
  Chemically synthesized
uucuuacgucuguugcuagauua

SEQ ID NO: 32880 - RNA, 23 nt, artificial
  Chemically synthesized
gacaucaacuccaagggauugga

SEQ ID NO: 32881 - RNA, 23 nt, artificial
  Chemically synthesized
ugacaucaacuccaagggauugg

SEQ ID NO: 32882 - RNA, 23 nt, artificial
  Chemically synthesized
cugacaucaacuccaagggauug

SEQ ID NO: 32883 - RNA, 23 nt, artificial
  Chemically synthesized
acugacaucaacuccaagggauu

SEQ ID NO: 32884 - RNA, 23 nt, artificial
  Chemically synthesized
guaaaguauauguauuugagugc

SEQ ID NO: 32885 - RNA, 23 nt, artificial
  Chemically synthesized
uguaaaguauauguauuugagug

SEQ ID NO: 32886 - RNA, 23 nt, artificial
  Chemically synthesized
auguaaaguauauguauuugagu

SEQ ID NO: 32887 - RNA, 23 nt, artificial
  Chemically synthesized
uauguaaaguauauguauuugag

SEQ ID NO: 32888 - RNA, 23 nt, artificial
  Chemically synthesized
uuauguaaaguauauguauuuga

SEQ ID NO: 32889 - RNA, 23 nt, artificial
  Chemically synthesized
uaaaaguacguaauuaaauaaug

SEQ ID NO: 32890 - RNA, 23 nt, artificial
  Chemically synthesized
ucaucuggauuuaggaauugcuc

SEQ ID NO: 32891 - RNA, 23 nt, artificial
  Chemically synthesized
aucaucuggauuuaggaauugcu

SEQ ID NO: 32892 - RNA, 23 nt, artificial
  Chemically synthesized
gacugcccuuagaaauucuagcc

SEQ ID NO: 32893 - RNA, 23 nt, artificial
  Chemically synthesized
agacugcccuuagaaauucuagc

SEQ ID NO: 32894 - RNA, 23 nt, artificial
  Chemically synthesized
aagacugcccuuagaaauucuag

SEQ ID NO: 32895 - RNA, 23 nt, artificial
  Chemically synthesized
uacccaaauaggaguguaugcag

SEQ ID NO: 32896 - RNA, 23 nt, artificial
  Chemically synthesized
uuuugcugaaauaucaguuacug

SEQ ID NO: 32897 - RNA, 23 nt, artificial
  Chemically synthesized
cuuuugcugaaauaucaguuacu

SEQ ID NO: 32898 - RNA, 23 nt, artificial
  Chemically synthesized
aauccaaagcuuggucuagagug

SEQ ID NO: 32899 - RNA, 23 nt, artificial
  Chemically synthesized
aaauccaaagcuuggucuagagu

SEQ ID NO: 32900 - RNA, 23 nt, artificial
  Chemically synthesized
gaaauccaaagcuuggucuagag

SEQ ID NO: 32901 - RNA, 23 nt, artificial
  Chemically synthesized
ugaaauccaaagcuuggucuaga

SEQ ID NO: 32902 - RNA, 23 nt, artificial
  Chemically synthesized
ccaaaugugaacauggaaucauc

SEQ ID NO: 32903 - RNA, 23 nt, artificial
  Chemically synthesized
aauaaggcucuaccucaaagacc

SEQ ID NO: 32904 - RNA, 23 nt, artificial
  Chemically synthesized
augcacacucaccagcaacacca

SEQ ID NO: 32905 - RNA, 23 nt, artificial
  Chemically synthesized
ugcuugguuuuuuacuggguaca

SEQ ID NO: 32906 - RNA, 23 nt, artificial
  Chemically synthesized
cugcuugguuuuuuacuggguac

SEQ ID NO: 32907 - RNA, 23 nt, artificial
  Chemically synthesized
aguauaugcaauuaguguuugaa

SEQ ID NO: 32908 - RNA, 23 nt, artificial
  Chemically synthesized
guguuaaugcccaagugacugac

SEQ ID NO: 32909 - RNA, 23 nt, artificial
  Chemically synthesized
aacuaccuacuucuuucucaggc

SEQ ID NO: 32910 - RNA, 23 nt, artificial
  Chemically synthesized
aaacuaccuacuucuuucucagg

SEQ ID NO: 32911 - RNA, 23 nt, artificial
  Chemically synthesized
uuucucaggcaucaaaagcauuu

SEQ ID NO: 32912 - RNA, 23 nt, artificial
  Chemically synthesized
uuuuugccuuggugcucaucuua

SEQ ID NO: 32913 - RNA, 23 nt, artificial
  Chemically synthesized
gacugacaucaacuccaagggau

SEQ ID NO: 32914 - RNA, 23 nt, artificial
  Chemically synthesized
aguaugaauguaaucaguguaug

SEQ ID NO: 32915 - RNA, 23 nt, artificial
  Chemically synthesized
uaguaugaauguaaucaguguau

SEQ ID NO: 32916 - RNA, 23 nt, artificial
  Chemically synthesized
uguaguaugaauguaaucagugu

SEQ ID NO: 32917 - RNA, 23 nt, artificial
  Chemically synthesized
gaacuuggaaggccugcaucaug

SEQ ID NO: 32918 - RNA, 23 nt, artificial
  Chemically synthesized
agaacuuggaaggccugcaucau

SEQ ID NO: 32919 - RNA, 23 nt, artificial
  Chemically synthesized
cagaacuuggaaggccugcauca

SEQ ID NO: 32920 - RNA, 23 nt, artificial
  Chemically synthesized
ucagaacuuggaaggccugcauc

SEQ ID NO: 32921 - RNA, 23 nt, artificial
  Chemically synthesized
cugguucuuacgucuguugcuag

SEQ ID NO: 32922 - RNA, 23 nt, artificial
  Chemically synthesized
cucugguucuuacgucuguugcu

SEQ ID NO: 32923 - RNA, 23 nt, artificial
  Chemically synthesized
uaacucugagaagaucauauuua

SEQ ID NO: 32924 - RNA, 23 nt, artificial
  Chemically synthesized
auaacucugagaagaucauauuu

SEQ ID NO: 32925 - RNA, 23 nt, artificial
  Chemically synthesized
aaucaauagaagaagcuaugacc

SEQ ID NO: 32926 - RNA, 23 nt, artificial
  Chemically synthesized
accacuauugcuggagucaugac

SEQ ID NO: 32927 - RNA, 23 nt, artificial
  Chemically synthesized
caccacuauugcuggagucauga

SEQ ID NO: 32928 - RNA, 23 nt, artificial
  Chemically synthesized
ucaccacuauugcuggagucaug

SEQ ID NO: 32929 - RNA, 23 nt, artificial
  Chemically synthesized
aucaccacuauugcuggagucau

SEQ ID NO: 32930 - RNA, 23 nt, artificial
  Chemically synthesized
gaaagauuaagauuaugcucugg

SEQ ID NO: 32931 - RNA, 23 nt, artificial
  Chemically synthesized
ugaaagauuaagauuaugcucug

SEQ ID NO: 32932 - RNA, 23 nt, artificial
  Chemically synthesized
augaaagauuaagauuaugcucu

SEQ ID NO: 32933 - RNA, 23 nt, artificial
  Chemically synthesized
cuguaguaugaauguaaucagug

SEQ ID NO: 32934 - RNA, 23 nt, artificial
  Chemically synthesized
aucaguuacugaacaggcaggcc

SEQ ID NO: 32935 - RNA, 23 nt, artificial
  Chemically synthesized
uaucaguuacugaacaggcaggc

SEQ ID NO: 32936 - RNA, 23 nt, artificial
  Chemically synthesized
auaucaguuacugaacaggcagg

SEQ ID NO: 32937 - RNA, 23 nt, artificial
  Chemically synthesized
aauaucaguuacugaacaggcag

SEQ ID NO: 32938 - RNA, 23 nt, artificial
  Chemically synthesized
ggagaguauuacuagagcuuugc

SEQ ID NO: 32939 - RNA, 23 nt, artificial
  Chemically synthesized
aggagaguauuacuagagcuuug

SEQ ID NO: 32940 - RNA, 23 nt, artificial
  Chemically synthesized
agaugauaaaauagauucuuauu

SEQ ID NO: 32941 - RNA, 23 nt, artificial
  Chemically synthesized
aagaugauaaaauagauucuuau

SEQ ID NO: 32942 - RNA, 23 nt, artificial
  Chemically synthesized
aaagaugauaaaauagauucuua

SEQ ID NO: 32943 - RNA, 23 nt, artificial
  Chemically synthesized
guuguuuuucacucuagaccaag

SEQ ID NO: 32944 - RNA, 23 nt, artificial
  Chemically synthesized
caguuuauaacuaucuucacagu

SEQ ID NO: 32945 - RNA, 23 nt, artificial
  Chemically synthesized
aguuuauaacuaucuucacaguu

SEQ ID NO: 32946 - RNA, 23 nt, artificial
  Chemically synthesized
guuuauaacuaucuucacaguuu

SEQ ID NO: 32947 - RNA, 23 nt, artificial
  Chemically synthesized
uuuauaacuaucuucacaguuua

SEQ ID NO: 32948 - RNA, 23 nt, artificial
  Chemically synthesized
cacuuuuggacgauaaucuagca

SEQ ID NO: 32949 - RNA, 23 nt, artificial
  Chemically synthesized
acuuuuggacgauaaucuagcaa

SEQ ID NO: 32950 - RNA, 23 nt, artificial
  Chemically synthesized
cuuuuggacgauaaucuagcaac

SEQ ID NO: 32951 - RNA, 23 nt, artificial
  Chemically synthesized
gaaguucuuuaggugguuccagg

SEQ ID NO: 32952 - RNA, 23 nt, artificial
  Chemically synthesized
aguucuuuaggugguuccaggua

SEQ ID NO: 32953 - RNA, 23 nt, artificial
  Chemically synthesized
guucuuuaggugguuccagguau

SEQ ID NO: 32954 - RNA, 23 nt, artificial
  Chemically synthesized
gcauuuacucuugaugaaguuug

SEQ ID NO: 32955 - RNA, 23 nt, artificial
  Chemically synthesized
cauuuacucuugaugaaguuugu

SEQ ID NO: 32956 - RNA, 23 nt, artificial
  Chemically synthesized
auuuacucuugaugaaguuuguu

SEQ ID NO: 32957 - RNA, 23 nt, artificial
  Chemically synthesized
uuuacucuugaugaaguuuguuu

SEQ ID NO: 32958 - RNA, 23 nt, artificial
  Chemically synthesized
uuacucuugaugaaguuuguuuu

SEQ ID NO: 32959 - RNA, 23 nt, artificial
  Chemically synthesized
ucuuugcacuugguguugcuggu

SEQ ID NO: 32960 - RNA, 23 nt, artificial
  Chemically synthesized
cuugaucucaucuauuuuggcuu

SEQ ID NO: 32961 - RNA, 23 nt, artificial
  Chemically synthesized
agccuuuaacuugacuuaguguc

SEQ ID NO: 32962 - RNA, 23 nt, artificial
  Chemically synthesized
gccuuuaacuugacuuaguguca

SEQ ID NO: 32963 - RNA, 23 nt, artificial
  Chemically synthesized
ccuuuaacuugacuuagugucau

SEQ ID NO: 32964 - RNA, 23 nt, artificial
  Chemically synthesized
cuuuaacuugacuuagugucaug

SEQ ID NO: 32965 - RNA, 23 nt, artificial
  Chemically synthesized
ggcuuuuuugagaucuuuaauca

SEQ ID NO: 32966 - RNA, 23 nt, artificial
  Chemically synthesized
gcuuuuuugagaucuuuaaucaa

SEQ ID NO: 32967 - RNA, 23 nt, artificial
  Chemically synthesized
cuuuuuugagaucuuuaaucaau

SEQ ID NO: 32968 - RNA, 23 nt, artificial
  Chemically synthesized
uuuuuugagaucuuuaaucaaug

SEQ ID NO: 32969 - RNA, 23 nt, artificial
  Chemically synthesized
gucuuggacauugucauucuuga

SEQ ID NO: 32970 - RNA, 23 nt, artificial
  Chemically synthesized
ucuuggacauugucauucuugau

SEQ ID NO: 32971 - RNA, 23 nt, artificial
  Chemically synthesized
cuuggacauugucauucuugauc

SEQ ID NO: 32972 - RNA, 23 nt, artificial
  Chemically synthesized
uuauuuaauuacguacuuuuacc

SEQ ID NO: 32973 - RNA, 23 nt, artificial
  Chemically synthesized
uauuuaauuacguacuuuuaccu

SEQ ID NO: 32974 - RNA, 23 nt, artificial
  Chemically synthesized
auuuaauuacguacuuuuaccua

SEQ ID NO: 32975 - RNA, 23 nt, artificial
  Chemically synthesized
uuuaauuacguacuuuuaccuau

SEQ ID NO: 32976 - RNA, 23 nt, artificial
  Chemically synthesized
uuaauuacguacuuuuaccuaua

SEQ ID NO: 32977 - RNA, 23 nt, artificial
  Chemically synthesized
caacuagauuuuaaacauccuug

SEQ ID NO: 32978 - RNA, 23 nt, artificial
  Chemically synthesized
acuagauuuuaaacauccuugga

SEQ ID NO: 32979 - RNA, 23 nt, artificial
  Chemically synthesized
cuagauuuuaaacauccuuggag

SEQ ID NO: 32980 - RNA, 23 nt, artificial
  Chemically synthesized
uaaguauuuuuuggugauauuuc

SEQ ID NO: 32981 - RNA, 23 nt, artificial
  Chemically synthesized
aaguauuuuuuggugauauuucc

SEQ ID NO: 32982 - RNA, 23 nt, artificial
  Chemically synthesized
aguauuuuuuggugauauuucca

SEQ ID NO: 32983 - RNA, 23 nt, artificial
  Chemically synthesized
guauuuuuuggugauauuuccau

SEQ ID NO: 32984 - RNA, 23 nt, artificial
  Chemically synthesized
uauuuuuuggugauauuuccaug

SEQ ID NO: 32985 - RNA, 23 nt, artificial
  Chemically synthesized
caguuaguaucuccaaaccaggc

SEQ ID NO: 32986 - RNA, 23 nt, artificial
  Chemically synthesized
aguuaguaucuccaaaccaggcu

SEQ ID NO: 32987 - RNA, 23 nt, artificial
  Chemically synthesized
auauuuaaacguaggauaguagu

SEQ ID NO: 32988 - RNA, 23 nt, artificial
  Chemically synthesized
uauuuaaacguaggauaguagua

SEQ ID NO: 32989 - RNA, 23 nt, artificial
  Chemically synthesized
auuuaaacguaggauaguaguaa

SEQ ID NO: 32990 - RNA, 23 nt, artificial
  Chemically synthesized
auuauuuaauuacguacuuuuac

SEQ ID NO: 32991 - RNA, 23 nt, artificial
  Chemically synthesized
gguuuuacaugggacauuauuga

SEQ ID NO: 32992 - RNA, 23 nt, artificial
  Chemically synthesized
guuuuacaugggacauuauugaa

SEQ ID NO: 32993 - RNA, 23 nt, artificial
  Chemically synthesized
auuuuuuggugauauuuccaugu

SEQ ID NO: 32994 - RNA, 23 nt, artificial
  Chemically synthesized
uuuuuuggugauauuuccauguu

SEQ ID NO: 32995 - RNA, 23 nt, artificial
  Chemically synthesized
uuuuuggugauauuuccauguuu

SEQ ID NO: 32996 - RNA, 23 nt, artificial
  Chemically synthesized
gcaguugaacuuucuguucugcu

SEQ ID NO: 32997 - RNA, 23 nt, artificial
  Chemically synthesized
caguugaacuuucuguucugcug

SEQ ID NO: 32998 - RNA, 23 nt, artificial
  Chemically synthesized
aguugaacuuucuguucugcugu

SEQ ID NO: 32999 - RNA, 23 nt, artificial
  Chemically synthesized
guugaacuuucuguucugcugug

SEQ ID NO: 33000 - RNA, 23 nt, artificial
  Chemically synthesized
gauuuuaaacauccuuggaggca

SEQ ID NO: 33001 - RNA, 23 nt, artificial
  Chemically synthesized
ggccauuaagaugagcaccaagg

SEQ ID NO: 33002 - RNA, 23 nt, artificial
  Chemically synthesized
gccauuaagaugagcaccaaggc

SEQ ID NO: 33003 - RNA, 23 nt, artificial
  Chemically synthesized
ccauuaagaugagcaccaaggca

SEQ ID NO: 33004 - RNA, 23 nt, artificial
  Chemically synthesized
cauuaagaugagcaccaaggcaa

SEQ ID NO: 33005 - RNA, 23 nt, artificial
  Chemically synthesized
auuaagaugagcaccaaggcaaa

SEQ ID NO: 33006 - RNA, 23 nt, artificial
  Chemically synthesized
agcucuaguaauacucuccugcu

SEQ ID NO: 33007 - RNA, 23 nt, artificial
  Chemically synthesized
gcucuaguaauacucuccugcuc

SEQ ID NO: 33008 - RNA, 23 nt, artificial
  Chemically synthesized
cucuaguaauacucuccugcuca

SEQ ID NO: 33009 - RNA, 23 nt, artificial
  Chemically synthesized
gccuuuugguggacuauuaagua

SEQ ID NO: 33010 - RNA, 23 nt, artificial
  Chemically synthesized
ccuuuugguggacuauuaaguau

SEQ ID NO: 33011 - RNA, 23 nt, artificial
  Chemically synthesized
cuuuugguggacuauuaaguauu

SEQ ID NO: 33012 - RNA, 23 nt, artificial
  Chemically synthesized
uuuugguggacuauuaaguauuu

SEQ ID NO: 33013 - RNA, 23 nt, artificial
  Chemically synthesized
uuacauaaauaugaucuucucag

SEQ ID NO: 33014 - RNA, 23 nt, artificial
  Chemically synthesized
uacauaaauaugaucuucucaga

SEQ ID NO: 33015 - RNA, 23 nt, artificial
  Chemically synthesized
cauaaauaugaucuucucagagu

SEQ ID NO: 33016 - RNA, 23 nt, artificial
  Chemically synthesized
auaaauaugaucuucucagaguu

SEQ ID NO: 33017 - RNA, 23 nt, artificial
  Chemically synthesized
aagaaucuauuuuaucaucuuug

SEQ ID NO: 33018 - RNA, 23 nt, artificial
  Chemically synthesized
agaaucuauuuuaucaucuuuga

SEQ ID NO: 33019 - RNA, 23 nt, artificial
  Chemically synthesized
gaaucuauuuuaucaucuuugau

SEQ ID NO: 33020 - RNA, 23 nt, artificial
  Chemically synthesized
aaucuauuuuaucaucuuugauu

SEQ ID NO: 33021 - RNA, 23 nt, artificial
  Chemically synthesized
aucuauuuuaucaucuuugauug

SEQ ID NO: 33022 - RNA, 23 nt, artificial
  Chemically synthesized
cuucuuucuuuccaugaaguuga

SEQ ID NO: 33023 - RNA, 23 nt, artificial
  Chemically synthesized
uucuuucuuuccaugaaguugau

SEQ ID NO: 33024 - RNA, 23 nt, artificial
  Chemically synthesized
cuuucuuuccaugaaguugaugc

SEQ ID NO: 33025 - RNA, 23 nt, artificial
  Chemically synthesized
cuugaugaaguuuguuuucccaa

SEQ ID NO: 33026 - RNA, 23 nt, artificial
  Chemically synthesized
ucaucuuugauugcaaacauggg

SEQ ID NO: 33027 - RNA, 23 nt, artificial
  Chemically synthesized
caucuuugauugcaaacaugggu

SEQ ID NO: 33028 - RNA, 23 nt, artificial
  Chemically synthesized
aucuuugauugcaaacauggguu

SEQ ID NO: 33029 - RNA, 23 nt, artificial
  Chemically synthesized
cuccuauuuggguacuuagcaug

SEQ ID NO: 33030 - RNA, 23 nt, artificial
  Chemically synthesized
ccuauuuggguacuuagcaugcc

SEQ ID NO: 33031 - RNA, 23 nt, artificial
  Chemically synthesized
cuauuuggguacuuagcaugcca

SEQ ID NO: 33032 - RNA, 23 nt, artificial
  Chemically synthesized
uggcuucauugacaccauucuuu

SEQ ID NO: 33033 - RNA, 23 nt, artificial
  Chemically synthesized
ggcuucauugacaccauucuuuc

SEQ ID NO: 33034 - RNA, 23 nt, artificial
  Chemically synthesized
aaguuugaauuuucugagucacu

SEQ ID NO: 33035 - RNA, 23 nt, artificial
  Chemically synthesized
aguuugaauuuucugagucacua

SEQ ID NO: 33036 - RNA, 23 nt, artificial
  Chemically synthesized
guuugaauuuucugagucacuag

SEQ ID NO: 33037 - RNA, 23 nt, artificial
  Chemically synthesized
cacuugggcauuaacacuuuugg

SEQ ID NO: 33038 - RNA, 23 nt, artificial
  Chemically synthesized
cuugggcauuaacacuuuuggac

SEQ ID NO: 33039 - RNA, 23 nt, artificial
  Chemically synthesized
auccuuccucuuugcacuuggug

SEQ ID NO: 33040 - RNA, 23 nt, artificial
  Chemically synthesized
uccuuccucuuugcacuuggugu

SEQ ID NO: 33041 - RNA, 23 nt, artificial
  Chemically synthesized
ccuuccucuuugcacuugguguu

SEQ ID NO: 33042 - RNA, 23 nt, artificial
  Chemically synthesized
cuuccucuuugcacuugguguug

SEQ ID NO: 33043 - RNA, 23 nt, artificial
  Chemically synthesized
gacauuuguacuaacauacacug

SEQ ID NO: 33044 - RNA, 23 nt, artificial
  Chemically synthesized
acauuuguacuaacauacacuga

SEQ ID NO: 33045 - RNA, 23 nt, artificial
  Chemically synthesized
cauuuguacuaacauacacugau

SEQ ID NO: 33046 - RNA, 23 nt, artificial
  Chemically synthesized
auuuguacuaacauacacugauu

SEQ ID NO: 33047 - RNA, 23 nt, artificial
  Chemically synthesized
uuuguacuaacauacacugauua

SEQ ID NO: 33048 - RNA, 23 nt, artificial
  Chemically synthesized
aaucuuaaaucuuagaaacuugg

SEQ ID NO: 33049 - RNA, 23 nt, artificial
  Chemically synthesized
aucuuaaaucuuagaaacuuggg

SEQ ID NO: 33050 - RNA, 23 nt, artificial
  Chemically synthesized
ucuuaaaucuuagaaacuugggg

SEQ ID NO: 33051 - RNA, 23 nt, artificial
  Chemically synthesized
cuuaaaucuuagaaacuuggggg

SEQ ID NO: 33052 - RNA, 23 nt, artificial
  Chemically synthesized
uuaaaucuuagaaacuugggggu

SEQ ID NO: 33053 - RNA, 23 nt, artificial
  Chemically synthesized
agcuuuggauuucauuucugaag

SEQ ID NO: 33054 - RNA, 23 nt, artificial
  Chemically synthesized
gcuuuggauuucauuucugaagu

SEQ ID NO: 33055 - RNA, 23 nt, artificial
  Chemically synthesized
cuuuggauuucauuucugaaguu

SEQ ID NO: 33056 - RNA, 23 nt, artificial
  Chemically synthesized
uuuggauuucauuucugaaguuu

SEQ ID NO: 33057 - RNA, 23 nt, artificial
  Chemically synthesized
aacuuucaaagauauuuaaacgu

SEQ ID NO: 33058 - RNA, 23 nt, artificial
  Chemically synthesized
acuuucaaagauauuuaaacgua

SEQ ID NO: 33059 - RNA, 23 nt, artificial
  Chemically synthesized
cuuucaaagauauuuaaacguag

SEQ ID NO: 33060 - RNA, 23 nt, artificial
  Chemically synthesized
uuucaaagauauuuaaacguagg

SEQ ID NO: 33061 - RNA, 23 nt, artificial
  Chemically synthesized
uucaaagauauuuaaacguagga

SEQ ID NO: 33062 - RNA, 23 nt, artificial
  Chemically synthesized
uuauuuaaauucugcacucaaau

SEQ ID NO: 33063 - RNA, 23 nt, artificial
  Chemically synthesized
uauuuaaauucugcacucaaaua

SEQ ID NO: 33064 - RNA, 23 nt, artificial
  Chemically synthesized
auuuaaauucugcacucaaauac

SEQ ID NO: 33065 - RNA, 23 nt, artificial
  Chemically synthesized
uuuaaauucugcacucaaauaca

SEQ ID NO: 33066 - RNA, 23 nt, artificial
  Chemically synthesized
uuaaauucugcacucaaauacau

SEQ ID NO: 33067 - RNA, 23 nt, artificial
  Chemically synthesized
cuuaaucuuucauccucugcaua

SEQ ID NO: 33068 - RNA, 23 nt, artificial
  Chemically synthesized
uguauaauaugacaccaauaaac

SEQ ID NO: 33069 - RNA, 23 nt, artificial
  Chemically synthesized
guauaauaugacaccaauaaacu

SEQ ID NO: 33070 - RNA, 23 nt, artificial
  Chemically synthesized
uauaauaugacaccaauaaacug

SEQ ID NO: 33071 - RNA, 23 nt, artificial
  Chemically synthesized
auaauaugacaccaauaaacugu

SEQ ID NO: 33072 - RNA, 23 nt, artificial
  Chemically synthesized
ucauuucugaaguuugaauuuuc

SEQ ID NO: 33073 - RNA, 23 nt, artificial
  Chemically synthesized
cauuucugaaguuugaauuuucu

SEQ ID NO: 33074 - RNA, 23 nt, artificial
  Chemically synthesized
auuucugaaguuugaauuuucug

SEQ ID NO: 33075 - RNA, 23 nt, artificial
  Chemically synthesized
uuucugaaguuugaauuuucuga

SEQ ID NO: 33076 - RNA, 23 nt, artificial
  Chemically synthesized
caacuguaguaacagucuuccuc

SEQ ID NO: 33077 - RNA, 23 nt, artificial
  Chemically synthesized
acuguaguaacagucuuccucaa

SEQ ID NO: 33078 - RNA, 23 nt, artificial
  Chemically synthesized
cuguaguaacagucuuccucaau

SEQ ID NO: 33079 - RNA, 23 nt, artificial
  Chemically synthesized
cuuugauugcaaacauggguuca

SEQ ID NO: 33080 - RNA, 23 nt, artificial
  Chemically synthesized
aaacuuucaaagauauuuaaacg

SEQ ID NO: 33081 - RNA, 23 nt, artificial
  Chemically synthesized
gccuuauuuaaauucugcacuca

SEQ ID NO: 33082 - RNA, 23 nt, artificial
  Chemically synthesized
ccuuauuuaaauucugcacucaa

SEQ ID NO: 33083 - RNA, 23 nt, artificial
  Chemically synthesized
cuuauuuaaauucugcacucaaa

SEQ ID NO: 33084 - RNA, 23 nt, artificial
  Chemically synthesized
cugagucacuaguaauguccuug

SEQ ID NO: 33085 - RNA, 23 nt, artificial
  Chemically synthesized
gaauuucuaagggcagucuugcc

SEQ ID NO: 33086 - RNA, 23 nt, artificial
  Chemically synthesized
gacuauuaaguauuuuuugguga

SEQ ID NO: 33087 - RNA, 23 nt, artificial
  Chemically synthesized
acuauuaaguauuuuuuggugau

SEQ ID NO: 33088 - RNA, 23 nt, artificial
  Chemically synthesized
cuauuaaguauuuuuuggugaua

SEQ ID NO: 33089 - RNA, 23 nt, artificial
  Chemically synthesized
uauuaaguauuuuuuggugauau

SEQ ID NO: 33090 - RNA, 23 nt, artificial
  Chemically synthesized
uuuuugagaucuuuaaucaaugu

SEQ ID NO: 33091 - RNA, 23 nt, artificial
  Chemically synthesized
uuuugagaucuuuaaucaaugug

SEQ ID NO: 33092 - RNA, 23 nt, artificial
  Chemically synthesized
uuugagaucuuuaaucaaugugu

SEQ ID NO: 33093 - RNA, 23 nt, artificial
  Chemically synthesized
uucuaagggcagucuugccuuuu

SEQ ID NO: 33094 - RNA, 23 nt, artificial
  Chemically synthesized
cuucuauugauucauagaguggg

SEQ ID NO: 33095 - RNA, 23 nt, artificial
  Chemically synthesized
uucuauugauucauagagugggg

SEQ ID NO: 33096 - RNA, 23 nt, artificial
  Chemically synthesized
ucuauugauucauagaguggggu

SEQ ID NO: 33097 - RNA, 23 nt, artificial
  Chemically synthesized
cuauugauucauagagugggguu

SEQ ID NO: 33098 - RNA, 23 nt, artificial
  Chemically synthesized
uauugauucauagagugggguua

SEQ ID NO: 33099 - RNA, 23 nt, artificial
  Chemically synthesized
auaugacaccaauaaacugugca

SEQ ID NO: 33100 - RNA, 23 nt, artificial
  Chemically synthesized
uaugacaccaauaaacugugcaa

SEQ ID NO: 33101 - RNA, 23 nt, artificial
  Chemically synthesized
agcaugguuguugagcaauccuc

SEQ ID NO: 33102 - RNA, 23 nt, artificial
  Chemically synthesized
ugguuguugagcaauccuccgaa

SEQ ID NO: 33103 - RNA, 23 nt, artificial
  Chemically synthesized
gcacuugguguugcuggugagug

SEQ ID NO: 33104 - RNA, 23 nt, artificial
  Chemically synthesized
cacuugguguugcuggugagugu

SEQ ID NO: 33105 - RNA, 23 nt, artificial
  Chemically synthesized
acuugguguugcuggugagugug

SEQ ID NO: 33106 - RNA, 23 nt, artificial
  Chemically synthesized
cuugguguugcuggugagugugc

SEQ ID NO: 33107 - RNA, 23 nt, artificial
  Chemically synthesized
acuuuacauaaauaugaucuucu

SEQ ID NO: 33108 - RNA, 23 nt, artificial
  Chemically synthesized
cuuuacauaaauaugaucuucuc

SEQ ID NO: 33109 - RNA, 23 nt, artificial
  Chemically synthesized
uuuacauaaauaugaucuucuca

SEQ ID NO: 33110 - RNA, 23 nt, artificial
  Chemically synthesized
ucaugacaugucacaaagcuacu

SEQ ID NO: 33111 - RNA, 23 nt, artificial
  Chemically synthesized
caugacaugucacaaagcuacuu

SEQ ID NO: 33112 - RNA, 23 nt, artificial
  Chemically synthesized
augacaugucacaaagcuacuuu

SEQ ID NO: 33113 - RNA, 23 nt, artificial
  Chemically synthesized
gagguaauuuagaggcaaagugg

SEQ ID NO: 33114 - RNA, 23 nt, artificial
  Chemically synthesized
gguaauuuagaggcaaaguggcc

SEQ ID NO: 33115 - RNA, 23 nt, artificial
  Chemically synthesized
guaauuuagaggcaaaguggccu

SEQ ID NO: 33116 - RNA, 23 nt, artificial
  Chemically synthesized
ucuucacaguuuacauuuacaga

SEQ ID NO: 33117 - RNA, 23 nt, artificial
  Chemically synthesized
cuucacaguuuacauuuacagaa

SEQ ID NO: 33118 - RNA, 23 nt, artificial
  Chemically synthesized
uucacaguuuacauuuacagaaa

SEQ ID NO: 33119 - RNA, 23 nt, artificial
  Chemically synthesized
ucacaguuuacauuuacagaaau

SEQ ID NO: 33120 - RNA, 23 nt, artificial
  Chemically synthesized
ccucuuugcacuugguguugcug

SEQ ID NO: 33121 - RNA, 23 nt, artificial
  Chemically synthesized
ccauugcuauguauaagcugcca

SEQ ID NO: 33122 - RNA, 23 nt, artificial
  Chemically synthesized
cauugcuauguauaagcugccau

SEQ ID NO: 33123 - RNA, 23 nt, artificial
  Chemically synthesized
gggguaugacaagagcaauuccu

SEQ ID NO: 33124 - RNA, 23 nt, artificial
  Chemically synthesized
ggguaugacaagagcaauuccua

SEQ ID NO: 33125 - RNA, 23 nt, artificial
  Chemically synthesized
gguaugacaagagcaauuccuaa

SEQ ID NO: 33126 - RNA, 23 nt, artificial
  Chemically synthesized
guaugacaagagcaauuccuaaa

SEQ ID NO: 33127 - RNA, 23 nt, artificial
  Chemically synthesized
gggacauuauugaacauuuucgg

SEQ ID NO: 33128 - RNA, 23 nt, artificial
  Chemically synthesized
ggacauuauugaacauuuucggg

SEQ ID NO: 33129 - RNA, 23 nt, artificial
  Chemically synthesized
gacauuauugaacauuuucgggg

SEQ ID NO: 33130 - RNA, 23 nt, artificial
  Chemically synthesized
acauuauugaacauuuucggggg

SEQ ID NO: 33131 - RNA, 23 nt, artificial
  Chemically synthesized
ggaguugaugucagucacuuggg

SEQ ID NO: 33132 - RNA, 23 nt, artificial
  Chemically synthesized
gaguugaugucagucacuugggc

SEQ ID NO: 33133 - RNA, 23 nt, artificial
  Chemically synthesized
aguugaugucagucacuugggca

SEQ ID NO: 33134 - RNA, 23 nt, artificial
  Chemically synthesized
guugaugucagucacuugggcau

SEQ ID NO: 33135 - RNA, 23 nt, artificial
  Chemically synthesized
uugaugucagucacuugggcauu

SEQ ID NO: 33136 - RNA, 23 nt, artificial
  Chemically synthesized
uguuuuucacucuagaccaagcu

SEQ ID NO: 33137 - RNA, 23 nt, artificial
  Chemically synthesized
guuuuucacucuagaccaagcuu

SEQ ID NO: 33138 - RNA, 23 nt, artificial
  Chemically synthesized
gaaauauuguauaauaugacacc

SEQ ID NO: 33139 - RNA, 23 nt, artificial
  Chemically synthesized
aaauauuguauaauaugacacca

SEQ ID NO: 33140 - RNA, 23 nt, artificial
  Chemically synthesized
aauauuguauaauaugacaccaa

SEQ ID NO: 33141 - RNA, 23 nt, artificial
  Chemically synthesized
auauuguauaauaugacaccaau

SEQ ID NO: 33142 - RNA, 23 nt, artificial
  Chemically synthesized
uauuguauaauaugacaccaaua

SEQ ID NO: 33143 - RNA, 23 nt, artificial
  Chemically synthesized
gaaguuugaauuuucugagucac

SEQ ID NO: 33144 - RNA, 23 nt, artificial
  Chemically synthesized
gaugauagucugaauuuucucug

SEQ ID NO: 33145 - RNA, 23 nt, artificial
  Chemically synthesized
gauagucugaauuuucucugcaa

SEQ ID NO: 33146 - RNA, 23 nt, artificial
  Chemically synthesized
uuuggugauauuuccauguuugg

SEQ ID NO: 33147 - RNA, 23 nt, artificial
  Chemically synthesized
cucugagagcaguuaguaucucc

SEQ ID NO: 33148 - RNA, 23 nt, artificial
  Chemically synthesized
cuacuuucucugagagcaguuag

SEQ ID NO: 33149 - RNA, 23 nt, artificial
  Chemically synthesized
uacuuucucugagagcaguuagu

SEQ ID NO: 33150 - RNA, 23 nt, artificial
  Chemically synthesized
acuuucucugagagcaguuagua

SEQ ID NO: 33151 - RNA, 23 nt, artificial
  Chemically synthesized
cuuucucugagagcaguuaguau

SEQ ID NO: 33152 - RNA, 23 nt, artificial
  Chemically synthesized
ggguucaugacaugucacaaagc

SEQ ID NO: 33153 - RNA, 23 nt, artificial
  Chemically synthesized
gguucaugacaugucacaaagcu

SEQ ID NO: 33154 - RNA, 23 nt, artificial
  Chemically synthesized
guucaugacaugucacaaagcua

SEQ ID NO: 33155 - RNA, 23 nt, artificial
  Chemically synthesized
acauuuaauacaaacuuucaaag

SEQ ID NO: 33156 - RNA, 23 nt, artificial
  Chemically synthesized
cauuuaauacaaacuuucaaaga

SEQ ID NO: 33157 - RNA, 23 nt, artificial
  Chemically synthesized
auuuaauacaaacuuucaaagau

SEQ ID NO: 33158 - RNA, 23 nt, artificial
  Chemically synthesized
uuuaauacaaacuuucaaagaua

SEQ ID NO: 33159 - RNA, 23 nt, artificial
  Chemically synthesized
uuaauacaaacuuucaaagauau

SEQ ID NO: 33160 - RNA, 23 nt, artificial
  Chemically synthesized
gcuucaguuuauaacuaucuuca

SEQ ID NO: 33161 - RNA, 23 nt, artificial
  Chemically synthesized
uucaguuuauaacuaucuucaca

SEQ ID NO: 33162 - RNA, 23 nt, artificial
  Chemically synthesized
gucauucuugaucucaucuauuu

SEQ ID NO: 33163 - RNA, 23 nt, artificial
  Chemically synthesized
ucauucuugaucucaucuauuuu

SEQ ID NO: 33164 - RNA, 23 nt, artificial
  Chemically synthesized
ugaaguuugaauuuucugaguca

SEQ ID NO: 33165 - RNA, 23 nt, artificial
  Chemically synthesized
cauuauugaacauuuucgggggu

SEQ ID NO: 33166 - RNA, 23 nt, artificial
  Chemically synthesized
auuauugaacauuuucgggggug

SEQ ID NO: 33167 - RNA, 23 nt, artificial
  Chemically synthesized
gaauuuguuguuuuucacucuag

SEQ ID NO: 33168 - RNA, 23 nt, artificial
  Chemically synthesized
aauuuguuguuuuucacucuaga

SEQ ID NO: 33169 - RNA, 23 nt, artificial
  Chemically synthesized
ucccuuggaguugaugucaguca

SEQ ID NO: 33170 - RNA, 23 nt, artificial
  Chemically synthesized
cccuuggaguugaugucagucac

SEQ ID NO: 33171 - RNA, 23 nt, artificial
  Chemically synthesized
ccuuggaguugaugucagucacu

SEQ ID NO: 33172 - RNA, 23 nt, artificial
  Chemically synthesized
cuuggaguugaugucagucacuu

SEQ ID NO: 33173 - RNA, 23 nt, artificial
  Chemically synthesized
gcuaauaaaugauaaaauguacc

SEQ ID NO: 33174 - RNA, 23 nt, artificial
  Chemically synthesized
cuaauaaaugauaaaauguaccc

SEQ ID NO: 33175 - RNA, 23 nt, artificial
  Chemically synthesized
uaauaaaugauaaaauguaccca

SEQ ID NO: 33176 - RNA, 23 nt, artificial
  Chemically synthesized
aauaaaugauaaaauguacccag

SEQ ID NO: 33177 - RNA, 23 nt, artificial
  Chemically synthesized
auaaaugauaaaauguacccagu

SEQ ID NO: 33178 - RNA, 23 nt, artificial
  Chemically synthesized
uaaaugauaaaauguacccagua

SEQ ID NO: 33179 - RNA, 23 nt, artificial
  Chemically synthesized
cuaauugcauauacucagaacug

SEQ ID NO: 33180 - RNA, 23 nt, artificial
  Chemically synthesized
uaauugcauauacucagaacuga

SEQ ID NO: 33181 - RNA, 23 nt, artificial
  Chemically synthesized
aauugcauauacucagaacugaa

SEQ ID NO: 33182 - RNA, 23 nt, artificial
  Chemically synthesized
auugcauauacucagaacugaau

SEQ ID NO: 33183 - RNA, 23 nt, artificial
  Chemically synthesized
uuccuugaugauuccauguucac

SEQ ID NO: 33184 - RNA, 23 nt, artificial
  Chemically synthesized
ccuugaugauuccauguucacau

SEQ ID NO: 33185 - RNA, 23 nt, artificial
  Chemically synthesized
cuugaugauuccauguucacauu

SEQ ID NO: 33186 - RNA, 23 nt, artificial
  Chemically synthesized
uugaugauuccauguucacauuu

SEQ ID NO: 33187 - RNA, 23 nt, artificial
  Chemically synthesized
ugaugaaguuuguuuucccaacu

SEQ ID NO: 33188 - RNA, 23 nt, artificial
  Chemically synthesized
aaucuuuucaaacacuaauugca

SEQ ID NO: 33189 - RNA, 23 nt, artificial
  Chemically synthesized
aucuuuucaaacacuaauugcau

SEQ ID NO: 33190 - RNA, 23 nt, artificial
  Chemically synthesized
ucuuuucaaacacuaauugcaua

SEQ ID NO: 33191 - RNA, 23 nt, artificial
  Chemically synthesized
cuuuucaaacacuaauugcauau

SEQ ID NO: 33192 - RNA, 23 nt, artificial
  Chemically synthesized
uuuucaaacacuaauugcauaua

SEQ ID NO: 33193 - RNA, 23 nt, artificial
  Chemically synthesized
ccaauaaacugugcaaaggucuu

SEQ ID NO: 33194 - RNA, 23 nt, artificial
  Chemically synthesized
caauaaacugugcaaaggucuuu

SEQ ID NO: 33195 - RNA, 23 nt, artificial
  Chemically synthesized
acacuccuauuuggguacuuagc

SEQ ID NO: 33196 - RNA, 23 nt, artificial
  Chemically synthesized
cacuccuauuuggguacuuagca

SEQ ID NO: 33197 - RNA, 23 nt, artificial
  Chemically synthesized
acuccuauuuggguacuuagcau

SEQ ID NO: 33198 - RNA, 23 nt, artificial
  Chemically synthesized
aacugauauuucagcaaaagguc

SEQ ID NO: 33199 - RNA, 23 nt, artificial
  Chemically synthesized
cugauauuucagcaaaaggucau

SEQ ID NO: 33200 - RNA, 23 nt, artificial
  Chemically synthesized
ugauauuucagcaaaaggucaua

SEQ ID NO: 33201 - RNA, 23 nt, artificial
  Chemically synthesized
cuauuuuaucaucuuugauugca

SEQ ID NO: 33202 - RNA, 23 nt, artificial
  Chemically synthesized
uauuuuaucaucuuugauugcaa

SEQ ID NO: 33203 - RNA, 23 nt, artificial
  Chemically synthesized
auuuuaucaucuuugauugcaaa

SEQ ID NO: 33204 - RNA, 23 nt, artificial
  Chemically synthesized
uuuuaucaucuuugauugcaaac

SEQ ID NO: 33205 - RNA, 23 nt, artificial
  Chemically synthesized
uuuaucaucuuugauugcaaaca

SEQ ID NO: 33206 - RNA, 23 nt, artificial
  Chemically synthesized
agacauuuguacuaacauacacu

SEQ ID NO: 33207 - RNA, 23 nt, artificial
  Chemically synthesized
gguguugcuggugagugugcauu

SEQ ID NO: 33208 - RNA, 23 nt, artificial
  Chemically synthesized
guguugcuggugagugugcauuc

SEQ ID NO: 33209 - RNA, 23 nt, artificial
  Chemically synthesized
guugcuggugagugugcauuccu

SEQ ID NO: 33210 - RNA, 23 nt, artificial
  Chemically synthesized
uggugauauuuccauguuugggg

SEQ ID NO: 33211 - RNA, 23 nt, artificial
  Chemically synthesized
ggugauauuuccauguuuggggg

SEQ ID NO: 33212 - RNA, 23 nt, artificial
  Chemically synthesized
gugauauuuccauguuugggggu

SEQ ID NO: 33213 - RNA, 23 nt, artificial
  Chemically synthesized
ugauauuuccauguuugggggug

SEQ ID NO: 33214 - RNA, 23 nt, artificial
  Chemically synthesized
uagaauuaucagagguaauuuag

SEQ ID NO: 33215 - RNA, 23 nt, artificial
  Chemically synthesized
agaauuaucagagguaauuuaga

SEQ ID NO: 33216 - RNA, 23 nt, artificial
  Chemically synthesized
gaauuaucagagguaauuuagag

SEQ ID NO: 33217 - RNA, 23 nt, artificial
  Chemically synthesized
aauuaucagagguaauuuagagg

SEQ ID NO: 33218 - RNA, 23 nt, artificial
  Chemically synthesized
ugaaauauuguauaauaugacac

SEQ ID NO: 33219 - RNA, 23 nt, artificial
  Chemically synthesized
gcuccauugauucagcaacuugg

SEQ ID NO: 33220 - RNA, 23 nt, artificial
  Chemically synthesized
cuccauugauucagcaacuuggc

SEQ ID NO: 33221 - RNA, 23 nt, artificial
  Chemically synthesized
ccauugauucagcaacuuggccu

SEQ ID NO: 33222 - RNA, 23 nt, artificial
  Chemically synthesized
cauugauucagcaacuuggccug

SEQ ID NO: 33223 - RNA, 23 nt, artificial
  Chemically synthesized
agcuucuucuauugauucauaga

SEQ ID NO: 33224 - RNA, 23 nt, artificial
  Chemically synthesized
gcuucuucuauugauucauagag

SEQ ID NO: 33225 - RNA, 23 nt, artificial
  Chemically synthesized
cuucuucuauugauucauagagu

SEQ ID NO: 33226 - RNA, 23 nt, artificial
  Chemically synthesized
aaguuuguuuucccaacuagauu

SEQ ID NO: 33227 - RNA, 23 nt, artificial
  Chemically synthesized
aguuuguuuucccaacuagauuu

SEQ ID NO: 33228 - RNA, 23 nt, artificial
  Chemically synthesized
guuuguuuucccaacuagauuuu

SEQ ID NO: 33229 - RNA, 23 nt, artificial
  Chemically synthesized
uuuguuuucccaacuagauuuua

SEQ ID NO: 33230 - RNA, 23 nt, artificial
  Chemically synthesized
uuguuuucccaacuagauuuuaa

SEQ ID NO: 33231 - RNA, 23 nt, artificial
  Chemically synthesized
cugaauuuguuguuuuucacucu

SEQ ID NO: 33232 - RNA, 23 nt, artificial
  Chemically synthesized
ugaauuuguuguuuuucacucua

SEQ ID NO: 33233 - RNA, 23 nt, artificial
  Chemically synthesized
aauguuuucuaugugaauucaca

SEQ ID NO: 33234 - RNA, 23 nt, artificial
  Chemically synthesized
auguuuucuaugugaauucacaa

SEQ ID NO: 33235 - RNA, 23 nt, artificial
  Chemically synthesized
uguuuucuaugugaauucacaau

SEQ ID NO: 33236 - RNA, 23 nt, artificial
  Chemically synthesized
guuuucuaugugaauucacaauu

SEQ ID NO: 33237 - RNA, 23 nt, artificial
  Chemically synthesized
uuuucuaugugaauucacaauug

SEQ ID NO: 33238 - RNA, 23 nt, artificial
  Chemically synthesized
agcuauuaagaaucuuuucaaac

SEQ ID NO: 33239 - RNA, 23 nt, artificial
  Chemically synthesized
gcuauuaagaaucuuuucaaaca

SEQ ID NO: 33240 - RNA, 23 nt, artificial
  Chemically synthesized
cuauuaagaaucuuuucaaacac

SEQ ID NO: 33241 - RNA, 23 nt, artificial
  Chemically synthesized
uauuaagaaucuuuucaaacacu

SEQ ID NO: 33242 - RNA, 23 nt, artificial
  Chemically synthesized
auuaagaaucuuuucaaacacua

SEQ ID NO: 33243 - RNA, 23 nt, artificial
  Chemically synthesized
caaguucugagucucaacuguag

SEQ ID NO: 33244 - RNA, 23 nt, artificial
  Chemically synthesized
aaguucugagucucaacuguagu

SEQ ID NO: 33245 - RNA, 23 nt, artificial
  Chemically synthesized
aguucugagucucaacuguagua

SEQ ID NO: 33246 - RNA, 23 nt, artificial
  Chemically synthesized
guucugagucucaacuguaguaa

SEQ ID NO: 33247 - RNA, 23 nt, artificial
  Chemically synthesized
gucuuugagguagagccuuauuu

SEQ ID NO: 33248 - RNA, 23 nt, artificial
  Chemically synthesized
cuuugagguagagccuuauuuaa

SEQ ID NO: 33249 - RNA, 23 nt, artificial
  Chemically synthesized
aucagagguaauuuagaggcaaa

SEQ ID NO: 33250 - RNA, 23 nt, artificial
  Chemically synthesized
cuuuaggugguuccagguaucug

SEQ ID NO: 33251 - RNA, 23 nt, artificial
  Chemically synthesized
caccauucuuucgaacaaagccu

SEQ ID NO: 33252 - RNA, 23 nt, artificial
  Chemically synthesized
accauucuuucgaacaaagccuu

SEQ ID NO: 33253 - RNA, 23 nt, artificial
  Chemically synthesized
ccauucuuucgaacaaagccuuu

SEQ ID NO: 33254 - RNA, 23 nt, artificial
  Chemically synthesized
cauucuuucgaacaaagccuuua

SEQ ID NO: 33255 - RNA, 23 nt, artificial
  Chemically synthesized
cauuuguagcagguuuuacaugg

SEQ ID NO: 33256 - RNA, 23 nt, artificial
  Chemically synthesized
uuguagcagguuuuacaugggac

SEQ ID NO: 33257 - RNA, 23 nt, artificial
  Chemically synthesized
uguagcagguuuuacaugggaca

SEQ ID NO: 33258 - RNA, 23 nt, artificial
  Chemically synthesized
uuuaaacauccuuggaggcagaa

SEQ ID NO: 33259 - RNA, 23 nt, artificial
  Chemically synthesized
auaauuuaauguuuucuauguga

SEQ ID NO: 33260 - RNA, 23 nt, artificial
  Chemically synthesized
uaauuuaauguuuucuaugugaa

SEQ ID NO: 33261 - RNA, 23 nt, artificial
  Chemically synthesized
aauuuaauguuuucuaugugaau

SEQ ID NO: 33262 - RNA, 23 nt, artificial
  Chemically synthesized
auuuaauguuuucuaugugaauu

SEQ ID NO: 33263 - RNA, 23 nt, artificial
  Chemically synthesized
uuuaauguuuucuaugugaauuc

SEQ ID NO: 33264 - RNA, 23 nt, artificial
  Chemically synthesized
gguuguugagcaauccuccgaag

SEQ ID NO: 33265 - RNA, 23 nt, artificial
  Chemically synthesized
guuguugagcaauccuccgaagu

SEQ ID NO: 33266 - RNA, 23 nt, artificial
  Chemically synthesized
gagcauaaucuuaaucuuucauc

SEQ ID NO: 33267 - RNA, 23 nt, artificial
  Chemically synthesized
gcauaaucuuaaucuuucauccu

SEQ ID NO: 33268 - RNA, 23 nt, artificial
  Chemically synthesized
cauaaucuuaaucuuucauccuc

SEQ ID NO: 33269 - RNA, 23 nt, artificial
  Chemically synthesized
auaaucuuaaucuuucauccucu

SEQ ID NO: 33270 - RNA, 23 nt, artificial
  Chemically synthesized
ggccaucaugaugcaggccuucc

SEQ ID NO: 33271 - RNA, 23 nt, artificial
  Chemically synthesized
gccaucaugaugcaggccuucca

SEQ ID NO: 33272 - RNA, 23 nt, artificial
  Chemically synthesized
ccaucaugaugcaggccuuccaa

SEQ ID NO: 33273 - RNA, 23 nt, artificial
  Chemically synthesized
caucaugaugcaggccuuccaag

SEQ ID NO: 33274 - RNA, 23 nt, artificial
  Chemically synthesized
gugucauacgcuucuuucuuucc

SEQ ID NO: 33275 - RNA, 23 nt, artificial
  Chemically synthesized
gucauacgcuucuuucuuuccau

SEQ ID NO: 33276 - RNA, 23 nt, artificial
  Chemically synthesized
uacuuuacauaaauaugaucuuc

SEQ ID NO: 33277 - RNA, 23 nt, artificial
  Chemically synthesized
cagguuuuacaugggacauuauu

SEQ ID NO: 33278 - RNA, 23 nt, artificial
  Chemically synthesized
ccuguucaguaacugauauuuca

SEQ ID NO: 33279 - RNA, 23 nt, artificial
  Chemically synthesized
cuguucaguaacugauauuucag

SEQ ID NO: 33280 - RNA, 23 nt, artificial
  Chemically synthesized
guucaguaacugauauuucagca

SEQ ID NO: 33281 - RNA, 23 nt, artificial
  Chemically synthesized
aauguccuugaggaugauagucu

SEQ ID NO: 33282 - RNA, 23 nt, artificial
  Chemically synthesized
uguccuugaggaugauagucuga

SEQ ID NO: 33283 - RNA, 23 nt, artificial
  Chemically synthesized
guccuugaggaugauagucugaa

SEQ ID NO: 33284 - RNA, 23 nt, artificial
  Chemically synthesized
uccuugaggaugauagucugaau

SEQ ID NO: 33285 - RNA, 23 nt, artificial
  Chemically synthesized
gucuuccucaauuccaaucccuu

SEQ ID NO: 33286 - RNA, 23 nt, artificial
  Chemically synthesized
uggauuucauuucugaaguuuga

SEQ ID NO: 33287 - RNA, 23 nt, artificial
  Chemically synthesized
ggauuucauuucugaaguuugaa

SEQ ID NO: 33288 - RNA, 23 nt, artificial
  Chemically synthesized
gauuucauuucugaaguuugaau

SEQ ID NO: 33289 - RNA, 23 nt, artificial
  Chemically synthesized
auuucauuucugaaguuugaauu

SEQ ID NO: 33290 - RNA, 23 nt, artificial
  Chemically synthesized
uuaagaaucuuuucaaacacuaa

SEQ ID NO: 33291 - RNA, 23 nt, artificial
  Chemically synthesized
acugugcaaaggucuuugaggua

SEQ ID NO: 33292 - RNA, 23 nt, artificial
  Chemically synthesized
cugugcaaaggucuuugagguag

SEQ ID NO: 33293 - RNA, 23 nt, artificial
  Chemically synthesized
ggcucuucagcgcuaauaaauga

SEQ ID NO: 33294 - RNA, 23 nt, artificial
  Chemically synthesized
gcucuucagcgcuaauaaaugau

SEQ ID NO: 33295 - RNA, 23 nt, artificial
  Chemically synthesized
cucuucagcgcuaauaaaugaua

SEQ ID NO: 33296 - RNA, 23 nt, artificial
  Chemically synthesized
uaaaaucucuagaauuaucagag

SEQ ID NO: 33297 - RNA, 23 nt, artificial
  Chemically synthesized
aaaucucuagaauuaucagaggu

SEQ ID NO: 33298 - RNA, 23 nt, artificial
  Chemically synthesized
aaucucuagaauuaucagaggua

SEQ ID NO: 33299 - RNA, 23 nt, artificial
  Chemically synthesized
aucucuagaauuaucagagguaa

SEQ ID NO: 33300 - RNA, 23 nt, artificial
  Chemically synthesized
uaguaucuccaaaccaggcuaga

SEQ ID NO: 33301 - RNA, 23 nt, artificial
  Chemically synthesized
ucuauuuuaucaucuuugauugc

SEQ ID NO: 33302 - RNA, 23 nt, artificial
  Chemically synthesized
aaaauucacauuuaauacaaacu

SEQ ID NO: 33303 - RNA, 23 nt, artificial
  Chemically synthesized
aaauucacauuuaauacaaacuu

SEQ ID NO: 33304 - RNA, 23 nt, artificial
  Chemically synthesized
aauucacauuuaauacaaacuuu

SEQ ID NO: 33305 - RNA, 23 nt, artificial
  Chemically synthesized
auucacauuuaauacaaacuuuc

SEQ ID NO: 33306 - RNA, 23 nt, artificial
  Chemically synthesized
uucacauuuaauacaaacuuuca

SEQ ID NO: 33307 - RNA, 23 nt, artificial
  Chemically synthesized
cucugcaagaguacaaagauugg

SEQ ID NO: 33308 - RNA, 23 nt, artificial
  Chemically synthesized
cugcaagaguacaaagauuggcu

SEQ ID NO: 33309 - RNA, 23 nt, artificial
  Chemically synthesized
gacuuagugucaugacuccagca

SEQ ID NO: 33310 - RNA, 23 nt, artificial
  Chemically synthesized
acuuagugucaugacuccagcaa

SEQ ID NO: 33311 - RNA, 23 nt, artificial
  Chemically synthesized
cuuagugucaugacuccagcaau

SEQ ID NO: 33312 - RNA, 23 nt, artificial
  Chemically synthesized
aacacuaauugcauauacucaga

SEQ ID NO: 33313 - RNA, 23 nt, artificial
  Chemically synthesized
cacuaauugcauauacucagaac

SEQ ID NO: 33314 - RNA, 23 nt, artificial
  Chemically synthesized
auaaacaaaguuuagaaauaugg

SEQ ID NO: 33315 - RNA, 23 nt, artificial
  Chemically synthesized
uaaacaaaguuuagaaauauggu

SEQ ID NO: 33316 - RNA, 23 nt, artificial
  Chemically synthesized
aaacaaaguuuagaaauauggua

SEQ ID NO: 33317 - RNA, 23 nt, artificial
  Chemically synthesized
aacaaaguuuagaaauaugguaa

SEQ ID NO: 33318 - RNA, 23 nt, artificial
  Chemically synthesized
acaaaguuuagaaauaugguaaa

SEQ ID NO: 33319 - RNA, 23 nt, artificial
  Chemically synthesized
auugucauucuugaucucaucua

SEQ ID NO: 33320 - RNA, 23 nt, artificial
  Chemically synthesized
cuuccucaauuccaaucccuugg

SEQ ID NO: 33321 - RNA, 23 nt, artificial
  Chemically synthesized
uuauaacuaucuucacaguuuac

SEQ ID NO: 33322 - RNA, 23 nt, artificial
  Chemically synthesized
uauaacuaucuucacaguuuaca

SEQ ID NO: 33323 - RNA, 23 nt, artificial
  Chemically synthesized
aaguagguaguuuugagccagua

SEQ ID NO: 33324 - RNA, 23 nt, artificial
  Chemically synthesized
gagguagagccuuauuuaaauuc

SEQ ID NO: 33325 - RNA, 23 nt, artificial
  Chemically synthesized
agguagagccuuauuuaaauucu

SEQ ID NO: 33326 - RNA, 23 nt, artificial
  Chemically synthesized
gguagagccuuauuuaaauucug

SEQ ID NO: 33327 - RNA, 23 nt, artificial
  Chemically synthesized
guagagccuuauuuaaauucugc

SEQ ID NO: 33328 - RNA, 23 nt, artificial
  Chemically synthesized
uuucuaugugaauucacaauuga

SEQ ID NO: 33329 - RNA, 23 nt, artificial
  Chemically synthesized
uucuaugugaauucacaauugaa

SEQ ID NO: 33330 - RNA, 23 nt, artificial
  Chemically synthesized
ucuaugugaauucacaauugaaa

SEQ ID NO: 33331 - RNA, 23 nt, artificial
  Chemically synthesized
uuggacgauaaucuagcaacaga

SEQ ID NO: 33332 - RNA, 23 nt, artificial
  Chemically synthesized
gacauugucauucuugaucucau

SEQ ID NO: 33333 - RNA, 23 nt, artificial
  Chemically synthesized
cauugucauucuugaucucaucu

SEQ ID NO: 33334 - RNA, 23 nt, artificial
  Chemically synthesized
gcaauuccuaaauccagaugaug

SEQ ID NO: 33335 - RNA, 23 nt, artificial
  Chemically synthesized
caauuccuaaauccagaugauga

SEQ ID NO: 33336 - RNA, 23 nt, artificial
  Chemically synthesized
aauuccuaaauccagaugaugau

SEQ ID NO: 33337 - RNA, 23 nt, artificial
  Chemically synthesized
auuccuaaauccagaugaugauu

SEQ ID NO: 33338 - RNA, 23 nt, artificial
  Chemically synthesized
cucguaaaccgcuucccucacuc

SEQ ID NO: 33339 - RNA, 23 nt, artificial
  Chemically synthesized
ucguaaaccgcuucccucacucc

SEQ ID NO: 33340 - RNA, 23 nt, artificial
  Chemically synthesized
cguaaaccgcuucccucacuccc

SEQ ID NO: 33341 - RNA, 23 nt, artificial
  Chemically synthesized
guaaaccgcuucccucacucccc

SEQ ID NO: 33342 - RNA, 23 nt, artificial
  Chemically synthesized
uaaaccgcuucccucacucccca

SEQ ID NO: 33343 - RNA, 23 nt, artificial
  Chemically synthesized
cauccucugcauacacuccuauu

SEQ ID NO: 33344 - RNA, 23 nt, artificial
  Chemically synthesized
aaaaacauuauuuaauuacguac

SEQ ID NO: 33345 - RNA, 23 nt, artificial
  Chemically synthesized
aaaacauuauuuaauuacguacu

SEQ ID NO: 33346 - RNA, 23 nt, artificial
  Chemically synthesized
aaacauuauuuaauuacguacuu

SEQ ID NO: 33347 - RNA, 23 nt, artificial
  Chemically synthesized
aacauuauuuaauuacguacuuu

SEQ ID NO: 33348 - RNA, 23 nt, artificial
  Chemically synthesized
acauuauuuaauuacguacuuuu

SEQ ID NO: 33349 - RNA, 23 nt, artificial
  Chemically synthesized
uaucuucacaguuuacauuuaca

SEQ ID NO: 33350 - RNA, 23 nt, artificial
  Chemically synthesized
gaugaaguuuguuuucccaacua

SEQ ID NO: 33351 - RNA, 23 nt, artificial
  Chemically synthesized
augaaguuuguuuucccaacuag

SEQ ID NO: 33352 - RNA, 23 nt, artificial
  Chemically synthesized
gaaguuuguuuucccaacuagau

SEQ ID NO: 33353 - RNA, 23 nt, artificial
  Chemically synthesized
uaaauucugcacucaaauacaua

SEQ ID NO: 33354 - RNA, 23 nt, artificial
  Chemically synthesized
aaauucugcacucaaauacauau

SEQ ID NO: 33355 - RNA, 23 nt, artificial
  Chemically synthesized
cuuuccaugaaguugaugccaau

SEQ ID NO: 33356 - RNA, 23 nt, artificial
  Chemically synthesized
auuaaaaaucuacaaauauguug

SEQ ID NO: 33357 - RNA, 23 nt, artificial
  Chemically synthesized
uuaaaaaucuacaaauauguugg

SEQ ID NO: 33358 - RNA, 23 nt, artificial
  Chemically synthesized
uaaaaaucuacaaauauguuggc

SEQ ID NO: 33359 - RNA, 23 nt, artificial
  Chemically synthesized
aaaaaucuacaaauauguuggcu

SEQ ID NO: 33360 - RNA, 23 nt, artificial
  Chemically synthesized
ucaguaacugauauuucagcaaa

SEQ ID NO: 33361 - RNA, 23 nt, artificial
  Chemically synthesized
uaaauggaaguucuuuagguggu

SEQ ID NO: 33362 - RNA, 23 nt, artificial
  Chemically synthesized
aaauggaaguucuuuaggugguu

SEQ ID NO: 33363 - RNA, 23 nt, artificial
  Chemically synthesized
uaauuacguacuuuuaccuauau

SEQ ID NO: 33364 - RNA, 23 nt, artificial
  Chemically synthesized
agguaucugcuucaguuuauaac

SEQ ID NO: 33365 - RNA, 23 nt, artificial
  Chemically synthesized
gguaucugcuucaguuuauaacu

SEQ ID NO: 33366 - RNA, 23 nt, artificial
  Chemically synthesized
uaucugcuucaguuuauaacuau

SEQ ID NO: 33367 - RNA, 23 nt, artificial
  Chemically synthesized
agccuguggauagacauuuguac

SEQ ID NO: 33368 - RNA, 23 nt, artificial
  Chemically synthesized
gccuguggauagacauuuguacu

SEQ ID NO: 33369 - RNA, 23 nt, artificial
  Chemically synthesized
ccuguggauagacauuuguacua

SEQ ID NO: 33370 - RNA, 23 nt, artificial
  Chemically synthesized
cuguggauagacauuuguacuaa

SEQ ID NO: 33371 - RNA, 23 nt, artificial
  Chemically synthesized
ugaugauuccauguucacauuug

SEQ ID NO: 33372 - RNA, 23 nt, artificial
  Chemically synthesized
aggaugauagucugaauuuucuc

SEQ ID NO: 33373 - RNA, 23 nt, artificial
  Chemically synthesized
ggaugauagucugaauuuucucu

SEQ ID NO: 33374 - RNA, 23 nt, artificial
  Chemically synthesized
uuucaaacacuaauugcauauac

SEQ ID NO: 33375 - RNA, 23 nt, artificial
  Chemically synthesized
ugccauuuguagcagguuuuaca

SEQ ID NO: 33376 - RNA, 23 nt, artificial
  Chemically synthesized
gccauuuguagcagguuuuacau

SEQ ID NO: 33377 - RNA, 23 nt, artificial
  Chemically synthesized
ccauuuguagcagguuuuacaug

SEQ ID NO: 33378 - RNA, 23 nt, artificial
  Chemically synthesized
acugauuacauucauacuacaga

SEQ ID NO: 33379 - RNA, 23 nt, artificial
  Chemically synthesized
cugauuacauucauacuacagaa

SEQ ID NO: 33380 - RNA, 23 nt, artificial
  Chemically synthesized
ugauuacauucauacuacagaau

SEQ ID NO: 33381 - RNA, 23 nt, artificial
  Chemically synthesized
gauuacauucauacuacagaauc

SEQ ID NO: 33382 - RNA, 23 nt, artificial
  Chemically synthesized
auuacauucauacuacagaauca

SEQ ID NO: 33383 - RNA, 23 nt, artificial
  Chemically synthesized
uccuaaauccagaugaugauuuu

SEQ ID NO: 33384 - RNA, 23 nt, artificial
  Chemically synthesized
uccucuuugcacuugguguugcu

SEQ ID NO: 33385 - RNA, 23 nt, artificial
  Chemically synthesized
auuguauaauaugacaccaauaa

SEQ ID NO: 33386 - RNA, 23 nt, artificial
  Chemically synthesized
uuguauaauaugacaccaauaaa

SEQ ID NO: 33387 - RNA, 23 nt, artificial
  Chemically synthesized
gucauagcuucuucuauugauuc

SEQ ID NO: 33388 - RNA, 23 nt, artificial
  Chemically synthesized
ucauagcuucuucuauugauuca

SEQ ID NO: 33389 - RNA, 23 nt, artificial
  Chemically synthesized
cauagcuucuucuauugauucau

SEQ ID NO: 33390 - RNA, 23 nt, artificial
  Chemically synthesized
auagcuucuucuauugauucaua

SEQ ID NO: 33391 - RNA, 23 nt, artificial
  Chemically synthesized
gcaauaguggugauauauuuacu

SEQ ID NO: 33392 - RNA, 23 nt, artificial
  Chemically synthesized
aauaguggugauauauuuacuca

SEQ ID NO: 33393 - RNA, 23 nt, artificial
  Chemically synthesized
auaguggugauauauuuacucaa

SEQ ID NO: 33394 - RNA, 23 nt, artificial
  Chemically synthesized
cauugacaccauucuuucgaaca

SEQ ID NO: 33395 - RNA, 23 nt, artificial
  Chemically synthesized
auugacaccauucuuucgaacaa

SEQ ID NO: 33396 - RNA, 23 nt, artificial
  Chemically synthesized
aauucugcacucaaauacauaua

SEQ ID NO: 33397 - RNA, 23 nt, artificial
  Chemically synthesized
ccagaugcccagcaugguuguug

SEQ ID NO: 33398 - RNA, 23 nt, artificial
  Chemically synthesized
cagaugcccagcaugguuguuga

SEQ ID NO: 33399 - RNA, 23 nt, artificial
  Chemically synthesized
agaugcccagcaugguuguugag

SEQ ID NO: 33400 - RNA, 23 nt, artificial
  Chemically synthesized
gaugcccagcaugguuguugagc

SEQ ID NO: 33401 - RNA, 23 nt, artificial
  Chemically synthesized
gauugcaaacauggguucaugac

SEQ ID NO: 33402 - RNA, 23 nt, artificial
  Chemically synthesized
guaauguccuugaggaugauagu

SEQ ID NO: 33403 - RNA, 23 nt, artificial
  Chemically synthesized
acuugacuuagugucaugacucc

SEQ ID NO: 33404 - RNA, 23 nt, artificial
  Chemically synthesized
gcauuccuugaugauuccauguu

SEQ ID NO: 33405 - RNA, 23 nt, artificial
  Chemically synthesized
ccaguaaaaaaccaagcaguauu

SEQ ID NO: 33406 - RNA, 23 nt, artificial
  Chemically synthesized
caguaaaaaaccaagcaguauuu

SEQ ID NO: 33407 - RNA, 23 nt, artificial
  Chemically synthesized
aguaaaaaaccaagcaguauuua

SEQ ID NO: 33408 - RNA, 23 nt, artificial
  Chemically synthesized
guaaaaaaccaagcaguauuuac

SEQ ID NO: 33409 - RNA, 23 nt, artificial
  Chemically synthesized
uaaaaaaccaagcaguauuuaca

SEQ ID NO: 33410 - RNA, 23 nt, artificial
  Chemically synthesized
uggacuauuaaguauuuuuuggu

SEQ ID NO: 33411 - RNA, 23 nt, artificial
  Chemically synthesized
cccaacuagauuuuaaacauccu

SEQ ID NO: 33412 - RNA, 23 nt, artificial
  Chemically synthesized
ccaacuagauuuuaaacauccuu

SEQ ID NO: 33413 - RNA, 23 nt, artificial
  Chemically synthesized
cuaguaauacucuccugcucaaa

SEQ ID NO: 33414 - RNA, 23 nt, artificial
  Chemically synthesized
aucaugagauauuaaaaaucuac

SEQ ID NO: 33415 - RNA, 23 nt, artificial
  Chemically synthesized
ucaugagauauuaaaaaucuaca

SEQ ID NO: 33416 - RNA, 23 nt, artificial
  Chemically synthesized
caugagauauuaaaaaucuacaa

SEQ ID NO: 33417 - RNA, 23 nt, artificial
  Chemically synthesized
augagauauuaaaaaucuacaaa

SEQ ID NO: 33418 - RNA, 23 nt, artificial
  Chemically synthesized
ugagauauuaaaaaucuacaaau

SEQ ID NO: 33419 - RNA, 23 nt, artificial
  Chemically synthesized
aacguaggauaguaguaaggaga

SEQ ID NO: 33420 - RNA, 23 nt, artificial
  Chemically synthesized
acguaggauaguaguaaggagaa

SEQ ID NO: 33421 - RNA, 23 nt, artificial
  Chemically synthesized
cguaggauaguaguaaggagaau

SEQ ID NO: 33422 - RNA, 23 nt, artificial
  Chemically synthesized
guaggauaguaguaaggagaauc

SEQ ID NO: 33423 - RNA, 23 nt, artificial
  Chemically synthesized
ggccuuccaaguucugagucuca

SEQ ID NO: 33424 - RNA, 23 nt, artificial
  Chemically synthesized
gccuuccaaguucugagucucaa

SEQ ID NO: 33425 - RNA, 23 nt, artificial
  Chemically synthesized
ccuuccaaguucugagucucaac

SEQ ID NO: 33426 - RNA, 23 nt, artificial
  Chemically synthesized
cacucguaaaccgcuucccucac

SEQ ID NO: 33427 - RNA, 23 nt, artificial
  Chemically synthesized
uggaaguucuuuaggugguucca

SEQ ID NO: 33428 - RNA, 23 nt, artificial
  Chemically synthesized
ggaaguucuuuaggugguuccag

SEQ ID NO: 33429 - RNA, 23 nt, artificial
  Chemically synthesized
ccaauuacgaagcaguugaacuu

SEQ ID NO: 33430 - RNA, 23 nt, artificial
  Chemically synthesized
caauuacgaagcaguugaacuuu

SEQ ID NO: 33431 - RNA, 23 nt, artificial
  Chemically synthesized
ggacauugucauucuugaucuca

SEQ ID NO: 33432 - RNA, 23 nt, artificial
  Chemically synthesized
uucacucuagaccaagcuuugga

SEQ ID NO: 33433 - RNA, 23 nt, artificial
  Chemically synthesized
ucacucuagaccaagcuuuggau

SEQ ID NO: 33434 - RNA, 23 nt, artificial
  Chemically synthesized
gucacuaguaauguccuugagga

SEQ ID NO: 33435 - RNA, 23 nt, artificial
  Chemically synthesized
ucacuaguaauguccuugaggau

SEQ ID NO: 33436 - RNA, 23 nt, artificial
  Chemically synthesized
cacuaguaauguccuugaggaug

SEQ ID NO: 33437 - RNA, 23 nt, artificial
  Chemically synthesized
acuaguaauguccuugaggauga

SEQ ID NO: 33438 - RNA, 23 nt, artificial
  Chemically synthesized
uagucugaauuuucucugcaaga

SEQ ID NO: 33439 - RNA, 23 nt, artificial
  Chemically synthesized
agucugaauuuucucugcaagag

SEQ ID NO: 33440 - RNA, 23 nt, artificial
  Chemically synthesized
gucugaauuuucucugcaagagu

SEQ ID NO: 33441 - RNA, 23 nt, artificial
  Chemically synthesized
aaguuuagaaauaugguaaaauc

SEQ ID NO: 33442 - RNA, 23 nt, artificial
  Chemically synthesized
aguuuagaaauaugguaaaaucu

SEQ ID NO: 33443 - RNA, 23 nt, artificial
  Chemically synthesized
guuuagaaauaugguaaaaucuc

SEQ ID NO: 33444 - RNA, 23 nt, artificial
  Chemically synthesized
uuuagaaauaugguaaaaucucu

SEQ ID NO: 33445 - RNA, 23 nt, artificial
  Chemically synthesized
uuagaaauaugguaaaaucucua

SEQ ID NO: 33446 - RNA, 23 nt, artificial
  Chemically synthesized
gucacucguaaaccgcuucccuc

SEQ ID NO: 33447 - RNA, 23 nt, artificial
  Chemically synthesized
ugauuuuaccauugcuauguaua

SEQ ID NO: 33448 - RNA, 23 nt, artificial
  Chemically synthesized
gauuuuaccauugcuauguauaa

SEQ ID NO: 33449 - RNA, 23 nt, artificial
  Chemically synthesized
auuuuaccauugcuauguauaag

SEQ ID NO: 33450 - RNA, 23 nt, artificial
  Chemically synthesized
gcaaaggucuuugagguagagcc

SEQ ID NO: 33451 - RNA, 23 nt, artificial
  Chemically synthesized
caaaggucuuugagguagagccu

SEQ ID NO: 33452 - RNA, 23 nt, artificial
  Chemically synthesized
aggucuuugagguagagccuuau

SEQ ID NO: 33453 - RNA, 23 nt, artificial
  Chemically synthesized
ccugcucaaaaugcuuuugaugc

SEQ ID NO: 33454 - RNA, 23 nt, artificial
  Chemically synthesized
cugcucaaaaugcuuuugaugcc

SEQ ID NO: 33455 - RNA, 23 nt, artificial
  Chemically synthesized
ugcucaaaaugcuuuugaugccu

SEQ ID NO: 33456 - RNA, 23 nt, artificial
  Chemically synthesized
gcucaaaaugcuuuugaugccug

SEQ ID NO: 33457 - RNA, 23 nt, artificial
  Chemically synthesized
cucaaaaugcuuuugaugccuga

SEQ ID NO: 33458 - RNA, 23 nt, artificial
  Chemically synthesized
ucaauuccaaucccuuggaguug

SEQ ID NO: 33459 - RNA, 23 nt, artificial
  Chemically synthesized
caauuccaaucccuuggaguuga

SEQ ID NO: 33460 - RNA, 23 nt, artificial
  Chemically synthesized
aauuccaaucccuuggaguugau

SEQ ID NO: 33461 - RNA, 23 nt, artificial
  Chemically synthesized
aacuaucuucacaguuuacauuu

SEQ ID NO: 33462 - RNA, 23 nt, artificial
  Chemically synthesized
acuaucuucacaguuuacauuua

SEQ ID NO: 33463 - RNA, 23 nt, artificial
  Chemically synthesized
cuaucuucacaguuuacauuuac

SEQ ID NO: 33464 - RNA, 23 nt, artificial
  Chemically synthesized
ugcauuuacucuugaugaaguuu

SEQ ID NO: 33465 - RNA, 23 nt, artificial
  Chemically synthesized
agcaguuaguaucuccaaaccag

SEQ ID NO: 33466 - RNA, 23 nt, artificial
  Chemically synthesized
caugucacaaagcuacuuucucu

SEQ ID NO: 33467 - RNA, 23 nt, artificial
  Chemically synthesized
ucacaaagcuacuuucucugaga

SEQ ID NO: 33468 - RNA, 23 nt, artificial
  Chemically synthesized
ccuugaggaugauagucugaauu

SEQ ID NO: 33469 - RNA, 23 nt, artificial
  Chemically synthesized
cuugaggaugauagucugaauuu

SEQ ID NO: 33470 - RNA, 23 nt, artificial
  Chemically synthesized
auuaaguauuuuuuggugauauu

SEQ ID NO: 33471 - RNA, 23 nt, artificial
  Chemically synthesized
uugguggacuauuaaguauuuuu

SEQ ID NO: 33472 - RNA, 23 nt, artificial
  Chemically synthesized
ugguggacuauuaaguauuuuuu

SEQ ID NO: 33473 - RNA, 23 nt, artificial
  Chemically synthesized
gagccuuauuuaaauucugcacu

SEQ ID NO: 33474 - RNA, 23 nt, artificial
  Chemically synthesized
aauuacguacuuuuaccuauauu

SEQ ID NO: 33475 - RNA, 23 nt, artificial
  Chemically synthesized
auuacguacuuuuaccuauauuu

SEQ ID NO: 33476 - RNA, 23 nt, artificial
  Chemically synthesized
uuacguacuuuuaccuauauuuu

SEQ ID NO: 33477 - RNA, 23 nt, artificial
  Chemically synthesized
aaaugauaaaauguacccaguaa

SEQ ID NO: 33478 - RNA, 23 nt, artificial
  Chemically synthesized
aaugauaaaauguacccaguaaa

SEQ ID NO: 33479 - RNA, 23 nt, artificial
  Chemically synthesized
acauucauacuacagaaucauau

SEQ ID NO: 33480 - RNA, 23 nt, artificial
  Chemically synthesized
cauucauacuacagaaucauaug

SEQ ID NO: 33481 - RNA, 23 nt, artificial
  Chemically synthesized
auucauacuacagaaucauaugu

SEQ ID NO: 33482 - RNA, 23 nt, artificial
  Chemically synthesized
uucauacuacagaaucauauguu

SEQ ID NO: 33483 - RNA, 23 nt, artificial
  Chemically synthesized
ucauacuacagaaucauauguua

SEQ ID NO: 33484 - RNA, 23 nt, artificial
  Chemically synthesized
uuuuaccuauauuuuauaauucc

SEQ ID NO: 33485 - RNA, 23 nt, artificial
  Chemically synthesized
uuuaccuauauuuuauaauucca

SEQ ID NO: 33486 - RNA, 23 nt, artificial
  Chemically synthesized
uuaccuauauuuuauaauuccaa

SEQ ID NO: 33487 - RNA, 23 nt, artificial
  Chemically synthesized
uaccuauauuuuauaauuccaaa

SEQ ID NO: 33488 - RNA, 23 nt, artificial
  Chemically synthesized
accuauauuuuauaauuccaaac

SEQ ID NO: 33489 - RNA, 23 nt, artificial
  Chemically synthesized
uuaauguuuucuaugugaauuca

SEQ ID NO: 33490 - RNA, 23 nt, artificial
  Chemically synthesized
uaauguuuucuaugugaauucac

SEQ ID NO: 33491 - RNA, 23 nt, artificial
  Chemically synthesized
gaauuuucugagucacuaguaau

SEQ ID NO: 33492 - RNA, 23 nt, artificial
  Chemically synthesized
cuaacauacacugauuacauuca

SEQ ID NO: 33493 - RNA, 23 nt, artificial
  Chemically synthesized
uaacauacacugauuacauucau

SEQ ID NO: 33494 - RNA, 23 nt, artificial
  Chemically synthesized
aacauacacugauuacauucaua

SEQ ID NO: 33495 - RNA, 23 nt, artificial
  Chemically synthesized
acauacacugauuacauucauac

SEQ ID NO: 33496 - RNA, 23 nt, artificial
  Chemically synthesized
uagaaauaugguaaaaucucuag

SEQ ID NO: 33497 - RNA, 23 nt, artificial
  Chemically synthesized
gaacugaauuuguuguuuuucac

SEQ ID NO: 33498 - RNA, 23 nt, artificial
  Chemically synthesized
aacugaauuuguuguuuuucacu

SEQ ID NO: 33499 - RNA, 23 nt, artificial
  Chemically synthesized
aagcuuuggauuucauuucugaa

SEQ ID NO: 33500 - RNA, 23 nt, artificial
  Chemically synthesized
ccauaaauggaaguucuuuaggu

SEQ ID NO: 33501 - RNA, 23 nt, artificial
  Chemically synthesized
cauaaauggaaguucuuuaggug

SEQ ID NO: 33502 - RNA, 23 nt, artificial
  Chemically synthesized
ugaugccugagaaagaaguaggu

SEQ ID NO: 33503 - RNA, 23 nt, artificial
  Chemically synthesized
gaugccugagaaagaaguaggua

SEQ ID NO: 33504 - RNA, 23 nt, artificial
  Chemically synthesized
augccugagaaagaaguagguag

SEQ ID NO: 33505 - RNA, 23 nt, artificial
  Chemically synthesized
ugccugagaaagaaguagguagu

SEQ ID NO: 33506 - RNA, 23 nt, artificial
  Chemically synthesized
agaaucuuuucaaacacuaauug

SEQ ID NO: 33507 - RNA, 23 nt, artificial
  Chemically synthesized
gaaucuuuucaaacacuaauugc

SEQ ID NO: 33508 - RNA, 23 nt, artificial
  Chemically synthesized
ccucugcauacacuccuauuugg

SEQ ID NO: 33509 - RNA, 23 nt, artificial
  Chemically synthesized
cucugcauacacuccuauuuggg

SEQ ID NO: 33510 - RNA, 23 nt, artificial
  Chemically synthesized
ucugcauacacuccuauuugggu

SEQ ID NO: 33511 - RNA, 23 nt, artificial
  Chemically synthesized
ucacauuuaauacaaacuuucaa

SEQ ID NO: 33512 - RNA, 23 nt, artificial
  Chemically synthesized
cacauuuaauacaaacuuucaaa

SEQ ID NO: 33513 - RNA, 23 nt, artificial
  Chemically synthesized
acgcuucuuucuuuccaugaagu

SEQ ID NO: 33514 - RNA, 23 nt, artificial
  Chemically synthesized
cgcuucuuucuuuccaugaaguu

SEQ ID NO: 33515 - RNA, 23 nt, artificial
  Chemically synthesized
gcuucuuucuuuccaugaaguug

SEQ ID NO: 33516 - RNA, 23 nt, artificial
  Chemically synthesized
ugaauucacaauugaaauauugu

SEQ ID NO: 33517 - RNA, 23 nt, artificial
  Chemically synthesized
gaauucacaauugaaauauugua

SEQ ID NO: 33518 - RNA, 23 nt, artificial
  Chemically synthesized
aauucacaauugaaauauuguau

SEQ ID NO: 33519 - RNA, 23 nt, artificial
  Chemically synthesized
auucacaauugaaauauuguaua

SEQ ID NO: 33520 - RNA, 23 nt, artificial
  Chemically synthesized
uucacaauugaaauauuguauaa

SEQ ID NO: 33521 - RNA, 23 nt, artificial
  Chemically synthesized
ucaugaugcaggccuuccaaguu

SEQ ID NO: 33522 - RNA, 23 nt, artificial
  Chemically synthesized
cugcuucaguuuauaacuaucuu

SEQ ID NO: 33523 - RNA, 23 nt, artificial
  Chemically synthesized
gacgauaaucuagcaacagacgu

SEQ ID NO: 33524 - RNA, 23 nt, artificial
  Chemically synthesized
acgauaaucuagcaacagacgua

SEQ ID NO: 33525 - RNA, 23 nt, artificial
  Chemically synthesized
cgauaaucuagcaacagacguaa

SEQ ID NO: 33526 - RNA, 23 nt, artificial
  Chemically synthesized
gauaaucuagcaacagacguaag

SEQ ID NO: 33527 - RNA, 23 nt, artificial
  Chemically synthesized
auaaucuagcaacagacguaaga

SEQ ID NO: 33528 - RNA, 23 nt, artificial
  Chemically synthesized
uauacuuuacauaaauaugaucu

SEQ ID NO: 33529 - RNA, 23 nt, artificial
  Chemically synthesized
auacuuuacauaaauaugaucuu

SEQ ID NO: 33530 - RNA, 23 nt, artificial
  Chemically synthesized
aaaccaagcaguauuuacagcca

SEQ ID NO: 33531 - RNA, 23 nt, artificial
  Chemically synthesized
accaagcaguauuuacagccagc

SEQ ID NO: 33532 - RNA, 23 nt, artificial
  Chemically synthesized
ccaagcaguauuuacagccagcu

SEQ ID NO: 33533 - RNA, 23 nt, artificial
  Chemically synthesized
auacuacagaaucauauguuaga

SEQ ID NO: 33534 - RNA, 23 nt, artificial
  Chemically synthesized
uacuacagaaucauauguuagau

SEQ ID NO: 33535 - RNA, 23 nt, artificial
  Chemically synthesized
uaagaaucuuuucaaacacuaau

SEQ ID NO: 33536 - RNA, 23 nt, artificial
  Chemically synthesized
uuaucaucuuugauugcaaacau

SEQ ID NO: 33537 - RNA, 23 nt, artificial
  Chemically synthesized
uguuuucccaacuagauuuuaaa

SEQ ID NO: 33538 - RNA, 23 nt, artificial
  Chemically synthesized
cauccuuggaggcagaaucauga

SEQ ID NO: 33539 - RNA, 23 nt, artificial
  Chemically synthesized
auccuuggaggcagaaucaugag

SEQ ID NO: 33540 - RNA, 23 nt, artificial
  Chemically synthesized
uccuuggaggcagaaucaugaga

SEQ ID NO: 33541 - RNA, 23 nt, artificial
  Chemically synthesized
ccuuggaggcagaaucaugagau

SEQ ID NO: 33542 - RNA, 23 nt, artificial
  Chemically synthesized
cuuggaggcagaaucaugagaua

SEQ ID NO: 33543 - RNA, 23 nt, artificial
  Chemically synthesized
auccuccgaagugaaagagcuuc

SEQ ID NO: 33544 - RNA, 23 nt, artificial
  Chemically synthesized
ccuccgaagugaaagagcuuccc

SEQ ID NO: 33545 - RNA, 23 nt, artificial
  Chemically synthesized
cuccgaagugaaagagcuucccc

SEQ ID NO: 33546 - RNA, 23 nt, artificial
  Chemically synthesized
uccgaagugaaagagcuucccca

SEQ ID NO: 33547 - RNA, 23 nt, artificial
  Chemically synthesized
ccucaauuccaaucccuuggagu

SEQ ID NO: 33548 - RNA, 23 nt, artificial
  Chemically synthesized
cucaauuccaaucccuuggaguu

SEQ ID NO: 33549 - RNA, 23 nt, artificial
  Chemically synthesized
cuaaauccagaugaugauuuuac

SEQ ID NO: 33550 - RNA, 23 nt, artificial
  Chemically synthesized
uaaauccagaugaugauuuuacc

SEQ ID NO: 33551 - RNA, 23 nt, artificial
  Chemically synthesized
aaauccagaugaugauuuuacca

SEQ ID NO: 33552 - RNA, 23 nt, artificial
  Chemically synthesized
aauccagaugaugauuuuaccau

SEQ ID NO: 33553 - RNA, 23 nt, artificial
  Chemically synthesized
cauacgcuucuuucuuuccauga

SEQ ID NO: 33554 - RNA, 23 nt, artificial
  Chemically synthesized
auacgcuucuuucuuuccaugaa

SEQ ID NO: 33555 - RNA, 23 nt, artificial
  Chemically synthesized
aaaucuacaaauauguuggcucu

SEQ ID NO: 33556 - RNA, 23 nt, artificial
  Chemically synthesized
gccacugcauuuacucuugauga

SEQ ID NO: 33557 - RNA, 23 nt, artificial
  Chemically synthesized
ccacugcauuuacucuugaugaa

SEQ ID NO: 33558 - RNA, 23 nt, artificial
  Chemically synthesized
cacugcauuuacucuugaugaag

SEQ ID NO: 33559 - RNA, 23 nt, artificial
  Chemically synthesized
acugcauuuacucuugaugaagu

SEQ ID NO: 33560 - RNA, 23 nt, artificial
  Chemically synthesized
uauaauuuaauguuuucuaugug

SEQ ID NO: 33561 - RNA, 23 nt, artificial
  Chemically synthesized
gaauuuucucugcaagaguacaa

SEQ ID NO: 33562 - RNA, 23 nt, artificial
  Chemically synthesized
aauuuucucugcaagaguacaaa

SEQ ID NO: 33563 - RNA, 23 nt, artificial
  Chemically synthesized
gagucacuaguaauguccuugag

SEQ ID NO: 33564 - RNA, 23 nt, artificial
  Chemically synthesized
gccaauuacgaagcaguugaacu

SEQ ID NO: 33565 - RNA, 23 nt, artificial
  Chemically synthesized
aaagauauuuaaacguaggauag

SEQ ID NO: 33566 - RNA, 23 nt, artificial
  Chemically synthesized
aagauauuuaaacguaggauagu

SEQ ID NO: 33567 - RNA, 23 nt, artificial
  Chemically synthesized
agauauuuaaacguaggauagua

SEQ ID NO: 33568 - RNA, 23 nt, artificial
  Chemically synthesized
gaccaagcuuuggauuucauuuc

SEQ ID NO: 33569 - RNA, 23 nt, artificial
  Chemically synthesized
accaagcuuuggauuucauuucu

SEQ ID NO: 33570 - RNA, 23 nt, artificial
  Chemically synthesized
caagcuuuggauuucauuucuga

SEQ ID NO: 33571 - RNA, 23 nt, artificial
  Chemically synthesized
uuugguggacuauuaaguauuuu

SEQ ID NO: 33572 - RNA, 23 nt, artificial
  Chemically synthesized
gggguuagccuguggauagacau

SEQ ID NO: 33573 - RNA, 23 nt, artificial
  Chemically synthesized
ggguuagccuguggauagacauu

SEQ ID NO: 33574 - RNA, 23 nt, artificial
  Chemically synthesized
gguuagccuguggauagacauuu

SEQ ID NO: 33575 - RNA, 23 nt, artificial
  Chemically synthesized
guuagccuguggauagacauuug

SEQ ID NO: 33576 - RNA, 23 nt, artificial
  Chemically synthesized
uuacauucauacuacagaaucau

SEQ ID NO: 33577 - RNA, 23 nt, artificial
  Chemically synthesized
cagucacuugggcauuaacacuu

SEQ ID NO: 33578 - RNA, 23 nt, artificial
  Chemically synthesized
agucacuugggcauuaacacuuu

SEQ ID NO: 33579 - RNA, 23 nt, artificial
  Chemically synthesized
gucacuugggcauuaacacuuuu

SEQ ID NO: 33580 - RNA, 23 nt, artificial
  Chemically synthesized
uggauagacauuuguacuaacau

SEQ ID NO: 33581 - RNA, 23 nt, artificial
  Chemically synthesized
ggauagacauuuguacuaacaua

SEQ ID NO: 33582 - RNA, 23 nt, artificial
  Chemically synthesized
gauagacauuuguacuaacauac

SEQ ID NO: 33583 - RNA, 23 nt, artificial
  Chemically synthesized
auagacauuuguacuaacauaca

SEQ ID NO: 33584 - RNA, 23 nt, artificial
  Chemically synthesized
ucaaaaugcuuuugaugccugag

SEQ ID NO: 33585 - RNA, 23 nt, artificial
  Chemically synthesized
uaaaucuuagaaacuugggggua

SEQ ID NO: 33586 - RNA, 23 nt, artificial
  Chemically synthesized
agaaucaugagauauuaaaaauc

SEQ ID NO: 33587 - RNA, 23 nt, artificial
  Chemically synthesized
gaaucaugagauauuaaaaaucu

SEQ ID NO: 33588 - RNA, 23 nt, artificial
  Chemically synthesized
aaucaugagauauuaaaaaucua

SEQ ID NO: 33589 - RNA, 23 nt, artificial
  Chemically synthesized
uacucagaacugaauuuguuguu

SEQ ID NO: 33590 - RNA, 23 nt, artificial
  Chemically synthesized
acucagaacugaauuuguuguuu

SEQ ID NO: 33591 - RNA, 23 nt, artificial
  Chemically synthesized
cucagaacugaauuuguuguuuu

SEQ ID NO: 33592 - RNA, 23 nt, artificial
  Chemically synthesized
cuauauuuuauaauuccaaacac

SEQ ID NO: 33593 - RNA, 23 nt, artificial
  Chemically synthesized
uauauuuuauaauuccaaacaca

SEQ ID NO: 33594 - RNA, 23 nt, artificial
  Chemically synthesized
auauuuuauaauuccaaacacaa

SEQ ID NO: 33595 - RNA, 23 nt, artificial
  Chemically synthesized
uauuuuauaauuccaaacacaag

SEQ ID NO: 33596 - RNA, 23 nt, artificial
  Chemically synthesized
auuuuauaauuccaaacacaagg

SEQ ID NO: 33597 - RNA, 23 nt, artificial
  Chemically synthesized
ccuaaauccagaugaugauuuua

SEQ ID NO: 33598 - RNA, 23 nt, artificial
  Chemically synthesized
cuccauaaauggaaguucuuuag

SEQ ID NO: 33599 - RNA, 23 nt, artificial
  Chemically synthesized
uuucauuucugaaguuugaauuu

SEQ ID NO: 33600 - RNA, 23 nt, artificial
  Chemically synthesized
guacuaacauacacugauuacau

SEQ ID NO: 33601 - RNA, 23 nt, artificial
  Chemically synthesized
uacuaacauacacugauuacauu

SEQ ID NO: 33602 - RNA, 23 nt, artificial
  Chemically synthesized
ugauauauuuacucaagucaaca

SEQ ID NO: 33603 - RNA, 23 nt, artificial
  Chemically synthesized
gauauauuuacucaagucaacau

SEQ ID NO: 33604 - RNA, 23 nt, artificial
  Chemically synthesized
auauauuuacucaagucaacauc

SEQ ID NO: 33605 - RNA, 23 nt, artificial
  Chemically synthesized
uauauuuacucaagucaacauca

SEQ ID NO: 33606 - RNA, 23 nt, artificial
  Chemically synthesized
auauuuacucaagucaacaucag

SEQ ID NO: 33607 - RNA, 23 nt, artificial
  Chemically synthesized
aguaauacucuccugcucaaaau

SEQ ID NO: 33608 - RNA, 23 nt, artificial
  Chemically synthesized
gcuuuugaugccugagaaagaag

SEQ ID NO: 33609 - RNA, 23 nt, artificial
  Chemically synthesized
cuuuugaugccugagaaagaagu

SEQ ID NO: 33610 - RNA, 23 nt, artificial
  Chemically synthesized
augcuuuugaugccugagaaaga

SEQ ID NO: 33611 - RNA, 23 nt, artificial
  Chemically synthesized
ugcuuuugaugccugagaaagaa

SEQ ID NO: 33612 - RNA, 23 nt, artificial
  Chemically synthesized
agaaucuuaaaucuuagaaacuu

SEQ ID NO: 33613 - RNA, 23 nt, artificial
  Chemically synthesized
gaaucuuaaaucuuagaaacuug

SEQ ID NO: 33614 - RNA, 23 nt, artificial
  Chemically synthesized
gagucucaacuguaguaacaguc

SEQ ID NO: 33615 - RNA, 23 nt, artificial
  Chemically synthesized
agucucaacuguaguaacagucu

SEQ ID NO: 33616 - RNA, 23 nt, artificial
  Chemically synthesized
gucucaacuguaguaacagucuu

SEQ ID NO: 33617 - RNA, 23 nt, artificial
  Chemically synthesized
gcauauacucagaacugaauuug

SEQ ID NO: 33618 - RNA, 23 nt, artificial
  Chemically synthesized
cauauacucagaacugaauuugu

SEQ ID NO: 33619 - RNA, 23 nt, artificial
  Chemically synthesized
auauacucagaacugaauuuguu

SEQ ID NO: 33620 - RNA, 23 nt, artificial
  Chemically synthesized
cagaacugaauuuguuguuuuuc

SEQ ID NO: 33621 - RNA, 23 nt, artificial
  Chemically synthesized
agaacugaauuuguuguuuuuca

SEQ ID NO: 33622 - RNA, 23 nt, artificial
  Chemically synthesized
gaggaugauagucugaauuuucu

SEQ ID NO: 33623 - RNA, 23 nt, artificial
  Chemically synthesized
uaacuaucuucacaguuuacauu

SEQ ID NO: 33624 - RNA, 23 nt, artificial
  Chemically synthesized
uuaaguauuuuuuggugauauuu

SEQ ID NO: 33625 - RNA, 23 nt, artificial
  Chemically synthesized
cgagaucagagacgagcucacga

SEQ ID NO: 33626 - RNA, 23 nt, artificial
  Chemically synthesized
gagaucagagacgagcucacgaa

SEQ ID NO: 33627 - RNA, 23 nt, artificial
  Chemically synthesized
agaucagagacgagcucacgaaa

SEQ ID NO: 33628 - RNA, 23 nt, artificial
  Chemically synthesized
gaucagagacgagcucacgaaaa

SEQ ID NO: 33629 - RNA, 23 nt, artificial
  Chemically synthesized
aucagagacgagcucacgaaaag

SEQ ID NO: 33630 - RNA, 23 nt, artificial
  Chemically synthesized
gugaauucacaauugaaauauug

SEQ ID NO: 33631 - RNA, 23 nt, artificial
  Chemically synthesized
cuuucgaacaaagccuuuaacuu

SEQ ID NO: 33632 - RNA, 23 nt, artificial
  Chemically synthesized
gacaugucacaaagcuacuuucu

SEQ ID NO: 33633 - RNA, 23 nt, artificial
  Chemically synthesized
acaugucacaaagcuacuuucuc

SEQ ID NO: 33634 - RNA, 23 nt, artificial
  Chemically synthesized
auacacauauauaauagucaaac

SEQ ID NO: 33635 - RNA, 23 nt, artificial
  Chemically synthesized
uacacauauauaauagucaaaca

SEQ ID NO: 33636 - RNA, 23 nt, artificial
  Chemically synthesized
acacauauauaauagucaaacau

SEQ ID NO: 33637 - RNA, 23 nt, artificial
  Chemically synthesized
cacauauauaauagucaaacauu

SEQ ID NO: 33638 - RNA, 23 nt, artificial
  Chemically synthesized
acauauauaauagucaaacauua

SEQ ID NO: 33639 - RNA, 23 nt, artificial
  Chemically synthesized
augacaccaauaaacugugcaaa

SEQ ID NO: 33640 - RNA, 23 nt, artificial
  Chemically synthesized
ucucuagaauuaucagagguaau

SEQ ID NO: 33641 - RNA, 23 nt, artificial
  Chemically synthesized
cucuagaauuaucagagguaauu

SEQ ID NO: 33642 - RNA, 23 nt, artificial
  Chemically synthesized
ucuagaauuaucagagguaauuu

SEQ ID NO: 33643 - RNA, 23 nt, artificial
  Chemically synthesized
aagaaucuuuucaaacacuaauu

SEQ ID NO: 33644 - RNA, 23 nt, artificial
  Chemically synthesized
uaaaauucacauuuaauacaaac

SEQ ID NO: 33645 - RNA, 23 nt, artificial
  Chemically synthesized
ucaaagauauuuaaacguaggau

SEQ ID NO: 33646 - RNA, 23 nt, artificial
  Chemically synthesized
cguaagaaccagagguaggaggg

SEQ ID NO: 33647 - RNA, 23 nt, artificial
  Chemically synthesized
guaagaaccagagguaggagggu

SEQ ID NO: 33648 - RNA, 23 nt, artificial
  Chemically synthesized
aagaaccagagguaggagggucc

SEQ ID NO: 33649 - RNA, 23 nt, artificial
  Chemically synthesized
uacgaagcaguugaacuuucugu

SEQ ID NO: 33650 - RNA, 23 nt, artificial
  Chemically synthesized
acgaagcaguugaacuuucuguu

SEQ ID NO: 33651 - RNA, 23 nt, artificial
  Chemically synthesized
cgaagcaguugaacuuucuguuc

SEQ ID NO: 33652 - RNA, 23 nt, artificial
  Chemically synthesized
gaagcaguugaacuuucuguucu

SEQ ID NO: 33653 - RNA, 23 nt, artificial
  Chemically synthesized
aagcaguugaacuuucuguucug

SEQ ID NO: 33654 - RNA, 23 nt, artificial
  Chemically synthesized
ggcauuaacacuuuuggacgaua

SEQ ID NO: 33655 - RNA, 23 nt, artificial
  Chemically synthesized
gcauuaacacuuuuggacgauaa

SEQ ID NO: 33656 - RNA, 23 nt, artificial
  Chemically synthesized
cauuaacacuuuuggacgauaau

SEQ ID NO: 33657 - RNA, 23 nt, artificial
  Chemically synthesized
gacaagagcaauuccuaaaucca

SEQ ID NO: 33658 - RNA, 23 nt, artificial
  Chemically synthesized
acaagagcaauuccuaaauccag

SEQ ID NO: 33659 - RNA, 23 nt, artificial
  Chemically synthesized
caagagcaauuccuaaauccaga

SEQ ID NO: 33660 - RNA, 23 nt, artificial
  Chemically synthesized
aagagcaauuccuaaauccagau

SEQ ID NO: 33661 - RNA, 23 nt, artificial
  Chemically synthesized
gugauauauuuacucaagucaac

SEQ ID NO: 33662 - RNA, 23 nt, artificial
  Chemically synthesized
uucauuucugaaguuugaauuuu

SEQ ID NO: 33663 - RNA, 23 nt, artificial
  Chemically synthesized
ggcaaaaaaauccuccauaaaug

SEQ ID NO: 33664 - RNA, 23 nt, artificial
  Chemically synthesized
gcaaaaaaauccuccauaaaugg

SEQ ID NO: 33665 - RNA, 23 nt, artificial
  Chemically synthesized
caaaaaaauccuccauaaaugga

SEQ ID NO: 33666 - RNA, 23 nt, artificial
  Chemically synthesized
aaaaaaauccuccauaaauggaa

SEQ ID NO: 33667 - RNA, 23 nt, artificial
  Chemically synthesized
uuguacuaacauacacugauuac

SEQ ID NO: 33668 - RNA, 23 nt, artificial
  Chemically synthesized
guugagcaauccuccgaagugaa

SEQ ID NO: 33669 - RNA, 23 nt, artificial
  Chemically synthesized
uugagcaauccuccgaagugaaa

SEQ ID NO: 33670 - RNA, 23 nt, artificial
  Chemically synthesized
ucagaacugaauuuguuguuuuu

SEQ ID NO: 33671 - RNA, 23 nt, artificial
  Chemically synthesized
cuaguaauguccuugaggaugau

SEQ ID NO: 33672 - RNA, 23 nt, artificial
  Chemically synthesized
uaguaauguccuugaggaugaua

SEQ ID NO: 33673 - RNA, 23 nt, artificial
  Chemically synthesized
guggauagacauuuguacuaaca

SEQ ID NO: 33674 - RNA, 23 nt, artificial
  Chemically synthesized
cuucagcgcuaauaaaugauaaa

SEQ ID NO: 33675 - RNA, 23 nt, artificial
  Chemically synthesized
uucagcgcuaauaaaugauaaaa

SEQ ID NO: 33676 - RNA, 23 nt, artificial
  Chemically synthesized
auaacuaucuucacaguuuacau

SEQ ID NO: 33677 - RNA, 23 nt, artificial
  Chemically synthesized
agaaauaugguaaaaucucuaga

SEQ ID NO: 33678 - RNA, 23 nt, artificial
  Chemically synthesized
cuaugugaauucacaauugaaau

SEQ ID NO: 33679 - RNA, 23 nt, artificial
  Chemically synthesized
uaugugaauucacaauugaaaua

SEQ ID NO: 33680 - RNA, 23 nt, artificial
  Chemically synthesized
augugaauucacaauugaaauau

SEQ ID NO: 33681 - RNA, 23 nt, artificial
  Chemically synthesized
ugugaauucacaauugaaauauu

SEQ ID NO: 33682 - RNA, 23 nt, artificial
  Chemically synthesized
gagugugcauuccuugaugauuc

SEQ ID NO: 33683 - RNA, 23 nt, artificial
  Chemically synthesized
agugugcauuccuugaugauucc

SEQ ID NO: 33684 - RNA, 23 nt, artificial
  Chemically synthesized
gugugcauuccuugaugauucca

SEQ ID NO: 33685 - RNA, 23 nt, artificial
  Chemically synthesized
gugucacucuugcgcgagaucag

SEQ ID NO: 33686 - RNA, 23 nt, artificial
  Chemically synthesized
gucacucuugcgcgagaucagag

SEQ ID NO: 33687 - RNA, 23 nt, artificial
  Chemically synthesized
ucacucuugcgcgagaucagaga

SEQ ID NO: 33688 - RNA, 23 nt, artificial
  Chemically synthesized
caaaaugcuuuugaugccugaga

SEQ ID NO: 33689 - RNA, 23 nt, artificial
  Chemically synthesized
aaaaugcuuuugaugccugagaa

SEQ ID NO: 33690 - RNA, 23 nt, artificial
  Chemically synthesized
ugguuccagguaucugcuucagu

SEQ ID NO: 33691 - RNA, 23 nt, artificial
  Chemically synthesized
gguuccagguaucugcuucaguu

SEQ ID NO: 33692 - RNA, 23 nt, artificial
  Chemically synthesized
guuccagguaucugcuucaguuu

SEQ ID NO: 33693 - RNA, 23 nt, artificial
  Chemically synthesized
uccagguaucugcuucaguuuau

SEQ ID NO: 33694 - RNA, 23 nt, artificial
  Chemically synthesized
ccagaugaugauuuuaccauugc

SEQ ID NO: 33695 - RNA, 23 nt, artificial
  Chemically synthesized
cagaugaugauuuuaccauugcu

SEQ ID NO: 33696 - RNA, 23 nt, artificial
  Chemically synthesized
agaugaugauuuuaccauugcua

SEQ ID NO: 33697 - RNA, 23 nt, artificial
  Chemically synthesized
gaugaugauuuuaccauugcuau

SEQ ID NO: 33698 - RNA, 23 nt, artificial
  Chemically synthesized
gugguuccagguaucugcuucag

SEQ ID NO: 33699 - RNA, 23 nt, artificial
  Chemically synthesized
guggugauauauuuacucaaguc

SEQ ID NO: 33700 - RNA, 23 nt, artificial
  Chemically synthesized
uggugauauauuuacucaaguca

SEQ ID NO: 33701 - RNA, 23 nt, artificial
  Chemically synthesized
ggugauauauuuacucaagucaa

SEQ ID NO: 33702 - RNA, 23 nt, artificial
  Chemically synthesized
uacauucauacuacagaaucaua

SEQ ID NO: 33703 - RNA, 23 nt, artificial
  Chemically synthesized
ugagugugcauuccuugaugauu

SEQ ID NO: 33704 - RNA, 23 nt, artificial
  Chemically synthesized
cagcaugguuguugagcaauccu

SEQ ID NO: 33705 - RNA, 23 nt, artificial
  Chemically synthesized
cugagagcaguuaguaucuccaa

SEQ ID NO: 33706 - RNA, 23 nt, artificial
  Chemically synthesized
ugagagcaguuaguaucuccaaa

SEQ ID NO: 33707 - RNA, 23 nt, artificial
  Chemically synthesized
gagagcaguuaguaucuccaaac

SEQ ID NO: 33708 - RNA, 23 nt, artificial
  Chemically synthesized
cuacagaaucauauguuagaugc

SEQ ID NO: 33709 - RNA, 23 nt, artificial
  Chemically synthesized
acagaaucauauguuagaugcca

SEQ ID NO: 33710 - RNA, 23 nt, artificial
  Chemically synthesized
cagaaucauauguuagaugccag

SEQ ID NO: 33711 - RNA, 23 nt, artificial
  Chemically synthesized
agaaucauauguuagaugccaga

SEQ ID NO: 33712 - RNA, 23 nt, artificial
  Chemically synthesized
cugaauuuucucugcaagaguac

SEQ ID NO: 33713 - RNA, 23 nt, artificial
  Chemically synthesized
cacaaagcuacuuucucugagag

SEQ ID NO: 33714 - RNA, 23 nt, artificial
  Chemically synthesized
gaucuucucagaguuauaaacaa

SEQ ID NO: 33715 - RNA, 23 nt, artificial
  Chemically synthesized
aucuucucagaguuauaaacaaa

SEQ ID NO: 33716 - RNA, 23 nt, artificial
  Chemically synthesized
aaaauguacccaguaaaaaacca

SEQ ID NO: 33717 - RNA, 23 nt, artificial
  Chemically synthesized
aaauguacccaguaaaaaaccaa

SEQ ID NO: 33718 - RNA, 23 nt, artificial
  Chemically synthesized
aauguacccaguaaaaaaccaag

SEQ ID NO: 33719 - RNA, 23 nt, artificial
  Chemically synthesized
augguaaaaucucuagaauuauc

SEQ ID NO: 33720 - RNA, 23 nt, artificial
  Chemically synthesized
ugguaaaaucucuagaauuauca

SEQ ID NO: 33721 - RNA, 23 nt, artificial
  Chemically synthesized
gguaaaaucucuagaauuaucag

SEQ ID NO: 33722 - RNA, 23 nt, artificial
  Chemically synthesized
guaaaaucucuagaauuaucaga

SEQ ID NO: 33723 - RNA, 23 nt, artificial
  Chemically synthesized
aggugguuccagguaucugcuuc

SEQ ID NO: 33724 - RNA, 23 nt, artificial
  Chemically synthesized
caccaauaaacugugcaaagguc

SEQ ID NO: 33725 - RNA, 23 nt, artificial
  Chemically synthesized
cagcaaaaggucauagcuucuuc

SEQ ID NO: 33726 - RNA, 23 nt, artificial
  Chemically synthesized
gcaaaaggucauagcuucuucua

SEQ ID NO: 33727 - RNA, 23 nt, artificial
  Chemically synthesized
caaaaggucauagcuucuucuau

SEQ ID NO: 33728 - RNA, 23 nt, artificial
  Chemically synthesized
augacaagagcaauuccuaaauc

SEQ ID NO: 33729 - RNA, 23 nt, artificial
  Chemically synthesized
guaacugauauuucagcaaaagg

SEQ ID NO: 33730 - RNA, 23 nt, artificial
  Chemically synthesized
gcuggugagugugcauuccuuga

SEQ ID NO: 33731 - RNA, 23 nt, artificial
  Chemically synthesized
cuggugagugugcauuccuugau

SEQ ID NO: 33732 - RNA, 23 nt, artificial
  Chemically synthesized
gagcaguuaguaucuccaaacca

SEQ ID NO: 33733 - RNA, 23 nt, artificial
  Chemically synthesized
ugaugauuuuaccauugcuaugu

SEQ ID NO: 33734 - RNA, 23 nt, artificial
  Chemically synthesized
gaugauuuuaccauugcuaugua

SEQ ID NO: 33735 - RNA, 23 nt, artificial
  Chemically synthesized
augauuuuaccauugcuauguau

SEQ ID NO: 33736 - RNA, 23 nt, artificial
  Chemically synthesized
ugcauacacuccuauuuggguac

SEQ ID NO: 33737 - RNA, 23 nt, artificial
  Chemically synthesized
gcauacacuccuauuuggguacu

SEQ ID NO: 33738 - RNA, 23 nt, artificial
  Chemically synthesized
cauacacuccuauuuggguacuu

SEQ ID NO: 33739 - RNA, 23 nt, artificial
  Chemically synthesized
auacacuccuauuuggguacuua

SEQ ID NO: 33740 - RNA, 23 nt, artificial
  Chemically synthesized
ccaaguucugagucucaacugua

SEQ ID NO: 33741 - RNA, 23 nt, artificial
  Chemically synthesized
aguaucuccaaaccaggcuagaa

SEQ ID NO: 33742 - RNA, 23 nt, artificial
  Chemically synthesized
ucagcaaaaggucauagcuucuu

SEQ ID NO: 33743 - RNA, 23 nt, artificial
  Chemically synthesized
gggcauuaacacuuuuggacgau

SEQ ID NO: 33744 - RNA, 23 nt, artificial
  Chemically synthesized
gcaauccuccgaagugaaagagc

SEQ ID NO: 33745 - RNA, 23 nt, artificial
  Chemically synthesized
caauccuccgaagugaaagagcu

SEQ ID NO: 33746 - RNA, 23 nt, artificial
  Chemically synthesized
aauccuccgaagugaaagagcuu

SEQ ID NO: 33747 - RNA, 23 nt, artificial
  Chemically synthesized
uaaucuagcaacagacguaagaa

SEQ ID NO: 33748 - RNA, 23 nt, artificial
  Chemically synthesized
uccaaucccuuggaguugauguc

SEQ ID NO: 33749 - RNA, 23 nt, artificial
  Chemically synthesized
ccaaucccuuggaguugauguca

SEQ ID NO: 33750 - RNA, 23 nt, artificial
  Chemically synthesized
caaucccuuggaguugaugucag

SEQ ID NO: 33751 - RNA, 23 nt, artificial
  Chemically synthesized
aaucccuuggaguugaugucagu

SEQ ID NO: 33752 - RNA, 23 nt, artificial
  Chemically synthesized
gcacucaaauacauauacuuuac

SEQ ID NO: 33753 - RNA, 23 nt, artificial
  Chemically synthesized
cacucaaauacauauacuuuaca

SEQ ID NO: 33754 - RNA, 23 nt, artificial
  Chemically synthesized
acucaaauacauauacuuuacau

SEQ ID NO: 33755 - RNA, 23 nt, artificial
  Chemically synthesized
cucaaauacauauacuuuacaua

SEQ ID NO: 33756 - RNA, 23 nt, artificial
  Chemically synthesized
ucaaauacauauacuuuacauaa

SEQ ID NO: 33757 - RNA, 23 nt, artificial
  Chemically synthesized
cauuauuuaauuacguacuuuua

SEQ ID NO: 33758 - RNA, 23 nt, artificial
  Chemically synthesized
gagcaauuccuaaauccagauga

SEQ ID NO: 33759 - RNA, 23 nt, artificial
  Chemically synthesized
agcaauuccuaaauccagaugau

SEQ ID NO: 33760 - RNA, 23 nt, artificial
  Chemically synthesized
ggcuagaauuucuaagggcaguc

SEQ ID NO: 33761 - RNA, 23 nt, artificial
  Chemically synthesized
gcuagaauuucuaagggcagucu

SEQ ID NO: 33762 - RNA, 23 nt, artificial
  Chemically synthesized
cuagaauuucuaagggcagucuu

SEQ ID NO: 33763 - RNA, 23 nt, artificial
  Chemically synthesized
cugcauacacuccuauuugggua

SEQ ID NO: 33764 - RNA, 23 nt, artificial
  Chemically synthesized
caguaacugauauuucagcaaaa

SEQ ID NO: 33765 - RNA, 23 nt, artificial
  Chemically synthesized
aguaacugauauuucagcaaaag

SEQ ID NO: 33766 - RNA, 23 nt, artificial
  Chemically synthesized
cacucuagaccaagcuuuggauu

SEQ ID NO: 33767 - RNA, 23 nt, artificial
  Chemically synthesized
acucuagaccaagcuuuggauuu

SEQ ID NO: 33768 - RNA, 23 nt, artificial
  Chemically synthesized
cucuagaccaagcuuuggauuuc

SEQ ID NO: 33769 - RNA, 23 nt, artificial
  Chemically synthesized
ucuagaccaagcuuuggauuuca

SEQ ID NO: 33770 - RNA, 23 nt, artificial
  Chemically synthesized
gaugauuccauguucacauuugg

SEQ ID NO: 33771 - RNA, 23 nt, artificial
  Chemically synthesized
ggucuuugagguagagccuuauu

SEQ ID NO: 33772 - RNA, 23 nt, artificial
  Chemically synthesized
ugguguugcuggugagugugcau

SEQ ID NO: 33773 - RNA, 23 nt, artificial
  Chemically synthesized
uguacccaguaaaaaaccaagca

SEQ ID NO: 33774 - RNA, 23 nt, artificial
  Chemically synthesized
guacccaguaaaaaaccaagcag

SEQ ID NO: 33775 - RNA, 23 nt, artificial
  Chemically synthesized
uucaaacacuaauugcauauacu

SEQ ID NO: 33776 - RNA, 23 nt, artificial
  Chemically synthesized
gucagucacuugggcauuaacac

SEQ ID NO: 33777 - RNA, 23 nt, artificial
  Chemically synthesized
gccugagaaagaaguagguaguu

SEQ ID NO: 33778 - RNA, 23 nt, artificial
  Chemically synthesized
ccugagaaagaaguagguaguuu

SEQ ID NO: 33779 - RNA, 23 nt, artificial
  Chemically synthesized
aaaugcuuuugaugccugagaaa

SEQ ID NO: 33780 - RNA, 23 nt, artificial
  Chemically synthesized
uaagaugagcaccaaggcaaaaa

SEQ ID NO: 33781 - RNA, 23 nt, artificial
  Chemically synthesized
aucccuuggaguugaugucaguc

SEQ ID NO: 33782 - RNA, 23 nt, artificial
  Chemically synthesized
cauacacugauuacauucauacu

SEQ ID NO: 33783 - RNA, 23 nt, artificial
  Chemically synthesized
auacacugauuacauucauacua

SEQ ID NO: 33784 - RNA, 23 nt, artificial
  Chemically synthesized
acacugauuacauucauacuaca

SEQ ID NO: 33785 - RNA, 23 nt, artificial
  Chemically synthesized
caugaugcaggccuuccaaguuc

SEQ ID NO: 33786 - RNA, 23 nt, artificial
  Chemically synthesized
augaugcaggccuuccaaguucu

SEQ ID NO: 33787 - RNA, 23 nt, artificial
  Chemically synthesized
ugaugcaggccuuccaaguucug

SEQ ID NO: 33788 - RNA, 23 nt, artificial
  Chemically synthesized
gaugcaggccuuccaaguucuga

SEQ ID NO: 33789 - RNA, 23 nt, artificial
  Chemically synthesized
cuagcaacagacguaagaaccag

SEQ ID NO: 33790 - RNA, 23 nt, artificial
  Chemically synthesized
agcaacagacguaagaaccagag

SEQ ID NO: 33791 - RNA, 23 nt, artificial
  Chemically synthesized
uaaauaugaucuucucagaguua

SEQ ID NO: 33792 - RNA, 23 nt, artificial
  Chemically synthesized
aaauaugaucuucucagaguuau

SEQ ID NO: 33793 - RNA, 23 nt, artificial
  Chemically synthesized
ggucauagcuucuucuauugauu

SEQ ID NO: 33794 - RNA, 23 nt, artificial
  Chemically synthesized
gucaugacuccagcaauaguggu

SEQ ID NO: 33795 - RNA, 23 nt, artificial
  Chemically synthesized
ucaugacuccagcaauaguggug

SEQ ID NO: 33796 - RNA, 23 nt, artificial
  Chemically synthesized
caugacuccagcaauagugguga

SEQ ID NO: 33797 - RNA, 23 nt, artificial
  Chemically synthesized
augacuccagcaauaguggugau

SEQ ID NO: 33798 - RNA, 23 nt, artificial
  Chemically synthesized
ccagagcauaaucuuaaucuuuc

SEQ ID NO: 33799 - RNA, 23 nt, artificial
  Chemically synthesized
cagagcauaaucuuaaucuuuca

SEQ ID NO: 33800 - RNA, 23 nt, artificial
  Chemically synthesized
agagcauaaucuuaaucuuucau

SEQ ID NO: 33801 - RNA, 23 nt, artificial
  Chemically synthesized
cacugauuacauucauacuacag

SEQ ID NO: 33802 - RNA, 23 nt, artificial
  Chemically synthesized
ggccugccuguucaguaacugau

SEQ ID NO: 33803 - RNA, 23 nt, artificial
  Chemically synthesized
gccugccuguucaguaacugaua

SEQ ID NO: 33804 - RNA, 23 nt, artificial
  Chemically synthesized
ccugccuguucaguaacugauau

SEQ ID NO: 33805 - RNA, 23 nt, artificial
  Chemically synthesized
cugccuguucaguaacugauauu

SEQ ID NO: 33806 - RNA, 23 nt, artificial
  Chemically synthesized
gcaaagcucuaguaauacucucc

SEQ ID NO: 33807 - RNA, 23 nt, artificial
  Chemically synthesized
caaagcucuaguaauacucuccu

SEQ ID NO: 33808 - RNA, 23 nt, artificial
  Chemically synthesized
aauaagaaucuauuuuaucaucu

SEQ ID NO: 33809 - RNA, 23 nt, artificial
  Chemically synthesized
auaagaaucuauuuuaucaucuu

SEQ ID NO: 33810 - RNA, 23 nt, Artificial
  Chemically synthesized
uaagaaucuauuuuaucaucuuu

SEQ ID NO: 33811 - RNA, 19 nt, artificial
  Chemically synthesized
cggugaaacuaacagauaa

SEQ ID NO: 33812 - RNA, 19 nt, artificial
  Chemically synthesized
cucuaauagugcuuaaaaa

SEQ ID NO: 33813 - RNA, 19 nt, artificial
  Chemically synthesized
ggaggaauaugacggaaga

SEQ ID NO: 33814 - RNA, 19 nt, artificial
  Chemically synthesized
gcauuuuugugaaaugaaa

SEQ ID NO: 33815 - RNA, 19 nt, artificial
  Chemically synthesized
gcagcaucuucacuucuaa

SEQ ID NO: 33816 - RNA, 19 nt, artificial
  Chemically synthesized
ggacugagaagaaguaaaa

SEQ ID NO: 33817 - RNA, 19 nt, artificial
  Chemically synthesized
ggaauaugacggaagaaca

SEQ ID NO: 33818 - RNA, 19 nt, artificial
  Chemically synthesized
ccauuaugauucuuuguua

SEQ ID NO: 33819 - RNA, 19 nt, artificial
  Chemically synthesized
caacucuaauagugcuuaa

SEQ ID NO: 33820 - RNA, 19 nt, artificial
  Chemically synthesized
cuagaggcuugcauaauaa

SEQ ID NO: 33821 - RNA, 19 nt, artificial
  Chemically synthesized
ggacucauuucauuccuaa

SEQ ID NO: 33822 - RNA, 19 nt, artificial
  Chemically synthesized
cauuuuugugaaaugaaaa

SEQ ID NO: 33823 - RNA, 19 nt, artificial
  Chemically synthesized
gaaacuaacagauaagcaa

SEQ ID NO: 33824 - RNA, 19 nt, artificial
  Chemically synthesized
gaauaugacggaagaacau

SEQ ID NO: 33825 - RNA, 19 nt, artificial
  Chemically synthesized
ggacugucuuucagauaca

SEQ ID NO: 33826 - RNA, 19 nt, artificial
  Chemically synthesized
ccagacaaauggaggaaua

SEQ ID NO: 33827 - RNA, 19 nt, artificial
  Chemically synthesized
gggacucauuucauuccua

SEQ ID NO: 33828 - RNA, 19 nt, artificial
  Chemically synthesized
gugaaaugaaaacauguaa

SEQ ID NO: 33829 - RNA, 19 nt, artificial
  Chemically synthesized
gguucugguugccuuggua

SEQ ID NO: 33830 - RNA, 19 nt, artificial
  Chemically synthesized
guauuuaggcagauugaaa

SEQ ID NO: 33831 - RNA, 19 nt, artificial
  Chemically synthesized
gaagagggagaagcaugaa

SEQ ID NO: 33832 - RNA, 19 nt, artificial
  Chemically synthesized
agacuagaggcuugcauaa

SEQ ID NO: 33833 - RNA, 19 nt, artificial
  Chemically synthesized
aagagagaauguagauauu

SEQ ID NO: 33834 - RNA, 19 nt, artificial
  Chemically synthesized
acucuaauagugcuuaaaa

SEQ ID NO: 33835 - RNA, 19 nt, artificial
  Chemically synthesized
gauguuuuccuauaauaua

SEQ ID NO: 33836 - RNA, 19 nt, artificial
  Chemically synthesized
uaaugauguuuuccuauaa

SEQ ID NO: 33837 - RNA, 19 nt, artificial
  Chemically synthesized
ugaaguacauauuaggaaa

SEQ ID NO: 33838 - RNA, 19 nt, artificial
  Chemically synthesized
gacaaauggaggaauauga

SEQ ID NO: 33839 - RNA, 19 nt, artificial
  Chemically synthesized
cagugcugaucauuuauau

SEQ ID NO: 33840 - RNA, 19 nt, artificial
  Chemically synthesized
gcagcuaccagguguucua

SEQ ID NO: 33841 - RNA, 19 nt, artificial
  Chemically synthesized
gggauucuuuccauuauga

SEQ ID NO: 33842 - RNA, 19 nt, artificial
  Chemically synthesized
cuauggaaacucuauaaga

SEQ ID NO: 33843 - RNA, 19 nt, artificial
  Chemically synthesized
aauagugcuuaaaaaucau

SEQ ID NO: 33844 - RNA, 19 nt, artificial
  Chemically synthesized
gagagaauguagauauugu

SEQ ID NO: 33845 - RNA, 19 nt, artificial
  Chemically synthesized
acuagaggcuugcauaaua

SEQ ID NO: 33846 - RNA, 19 nt, artificial
  Chemically synthesized
auuuggucaagauuuugaa

SEQ ID NO: 33847 - RNA, 19 nt, artificial
  Chemically synthesized
caacucaccuaauguuuau

SEQ ID NO: 33848 - RNA, 19 nt, artificial
  Chemically synthesized
ugaagagggagaagcauga

SEQ ID NO: 33849 - RNA, 19 nt, artificial
  Chemically synthesized
gaaaugaaaacauguaaua

SEQ ID NO: 33850 - RNA, 19 nt, artificial
  Chemically synthesized
uagauauugugaaguacau

SEQ ID NO: 33851 - RNA, 19 nt, artificial
  Chemically synthesized
ugcauuuuugugaaaugaa

SEQ ID NO: 33852 - RNA, 19 nt, artificial
  Chemically synthesized
ggcagcaucuucacuucua

SEQ ID NO: 33853 - RNA, 19 nt, artificial
  Chemically synthesized
ugauguuuuccuauaauau

SEQ ID NO: 33854 - RNA, 19 nt, artificial
  Chemically synthesized
aguauuuaggcagauugaa

SEQ ID NO: 33855 - RNA, 19 nt, artificial
  Chemically synthesized
aaaaguauauguuaggaua

SEQ ID NO: 33856 - RNA, 19 nt, artificial
  Chemically synthesized
agauauugugaaguacaua

SEQ ID NO: 33857 - RNA, 19 nt, artificial
  Chemically synthesized
agugcuuaaaaaucauuga

SEQ ID NO: 33858 - RNA, 19 nt, artificial
  Chemically synthesized
ugacuaaagagagaaugua

SEQ ID NO: 33859 - RNA, 19 nt, artificial
  Chemically synthesized
gauugucagcuacuaauga

SEQ ID NO: 33860 - RNA, 19 nt, artificial
  Chemically synthesized
uuucuggagugaaguauaa

SEQ ID NO: 33861 - RNA, 19 nt, artificial
  Chemically synthesized
gcccuucaauuacccauau

SEQ ID NO: 33862 - RNA, 19 nt, artificial
  Chemically synthesized
gaaguacauauuaggaaaa

SEQ ID NO: 33863 - RNA, 19 nt, artificial
  Chemically synthesized
uauugugaaguacauauua

SEQ ID NO: 33864 - RNA, 19 nt, artificial
  Chemically synthesized
uaauagugcuuaaaaauca

SEQ ID NO: 33865 - RNA, 19 nt, artificial
  Chemically synthesized
ggaagacaccuauggaauu

SEQ ID NO: 33866 - RNA, 19 nt, artificial
  Chemically synthesized
cuuuguauauuccaaagua

SEQ ID NO: 33867 - RNA, 19 nt, artificial
  Chemically synthesized
uacuaaugauguuuuccua

SEQ ID NO: 33868 - RNA, 19 nt, artificial
  Chemically synthesized
uauuuaggcagauugaaaa

SEQ ID NO: 33869 - RNA, 19 nt, artificial
  Chemically synthesized
guugugaccugaggauuua

SEQ ID NO: 33870 - RNA, 19 nt, artificial
  Chemically synthesized
gguugugaccugaggauuu

SEQ ID NO: 33871 - RNA, 19 nt, artificial
  Chemically synthesized
gggcaguguucaaucuuac

SEQ ID NO: 33872 - RNA, 19 nt, artificial
  Chemically synthesized
aacucuaauagugcuuaaa

SEQ ID NO: 33873 - RNA, 19 nt, artificial
  Chemically synthesized
guacuuuguauauuccaaa

SEQ ID NO: 33874 - RNA, 19 nt, artificial
  Chemically synthesized
ugugaaaugaaaacaugua

SEQ ID NO: 33875 - RNA, 19 nt, artificial
  Chemically synthesized
augauguuuuccuauaaua

SEQ ID NO: 33876 - RNA, 19 nt, artificial
  Chemically synthesized
uaccagugcugaucauuua

SEQ ID NO: 33877 - RNA, 19 nt, artificial
  Chemically synthesized
caucaucuuuggagaagca

SEQ ID NO: 33878 - RNA, 19 nt, artificial
  Chemically synthesized
gagaauguagauauuguga

SEQ ID NO: 33879 - RNA, 19 nt, artificial
  Chemically synthesized
aguacauauuaggaaaaua

SEQ ID NO: 33880 - RNA, 19 nt, artificial
  Chemically synthesized
cuaaagagagaauguagau

SEQ ID NO: 33881 - RNA, 19 nt, artificial
  Chemically synthesized
aaugauguuuuccuauaau

SEQ ID NO: 33882 - RNA, 19 nt, artificial
  Chemically synthesized
gaauguagauauugugaag

SEQ ID NO: 33883 - RNA, 19 nt, artificial
  Chemically synthesized
uguacuuuguauauuccaa

SEQ ID NO: 33884 - RNA, 19 nt, artificial
  Chemically synthesized
gugaaguacauauuaggaa

SEQ ID NO: 33885 - RNA, 19 nt, artificial
  Chemically synthesized
guacauauuaggaaaauau

SEQ ID NO: 33886 - RNA, 19 nt, artificial
  Chemically synthesized
uauauaagcucuaagagaa

SEQ ID NO: 33887 - RNA, 19 nt, artificial
  Chemically synthesized
gcugaucauuuauauguca

SEQ ID NO: 33888 - RNA, 19 nt, artificial
  Chemically synthesized
cauuuauaugucaacguau

SEQ ID NO: 33889 - RNA, 19 nt, artificial
  Chemically synthesized
agaauguagauauugugaa

SEQ ID NO: 33890 - RNA, 19 nt, artificial
  Chemically synthesized
guaagaagacaugaaccaa

SEQ ID NO: 33891 - RNA, 19 nt, artificial
  Chemically synthesized
gauauugugaaguacauau

SEQ ID NO: 33892 - RNA, 19 nt, artificial
  Chemically synthesized
ucuaauagugcuuaaaaau

SEQ ID NO: 33893 - RNA, 19 nt, artificial
  Chemically synthesized
ggaaugggaagacaccuau

SEQ ID NO: 33894 - RNA, 19 nt, artificial
  Chemically synthesized
cugacaaucaacucuaaua

SEQ ID NO: 33895 - RNA, 19 nt, artificial
  Chemically synthesized
cuaaugauguuuuccuaua

SEQ ID NO: 33896 - RNA, 19 nt, artificial
  Chemically synthesized
gggaagacaccuauggaau

SEQ ID NO: 33897 - RNA, 19 nt, artificial
  Chemically synthesized
ccagugcugaucauuuaua

SEQ ID NO: 33898 - RNA, 19 nt, artificial
  Chemically synthesized
cauuaugauucuuuguuac

SEQ ID NO: 33899 - RNA, 19 nt, artificial
  Chemically synthesized
guucuacacucaucuuagu

SEQ ID NO: 33900 - RNA, 19 nt, artificial
  Chemically synthesized
auguagauauugugaagua

SEQ ID NO: 33901 - RNA, 19 nt, artificial
  Chemically synthesized
ucggugaaacuaacagaua

SEQ ID NO: 33902 - RNA, 19 nt, artificial
  Chemically synthesized
gugcuuaaaaaucauugau

SEQ ID NO: 33903 - RNA, 19 nt, artificial
  Chemically synthesized
ugaaaugaaaacauguaau

SEQ ID NO: 33904 - RNA, 19 nt, artificial
  Chemically synthesized
ucauuuauaugucaacgua

SEQ ID NO: 33905 - RNA, 19 nt, artificial
  Chemically synthesized
gggcuguacuuuguauauu

SEQ ID NO: 33906 - RNA, 19 nt, artificial
  Chemically synthesized
caugaggaacucuaaguau

SEQ ID NO: 33907 - RNA, 19 nt, artificial
  Chemically synthesized
caccgagaauguuguauuc

SEQ ID NO: 33908 - RNA, 19 nt, artificial
  Chemically synthesized
uuguauauuccaaaguaua

SEQ ID NO: 33909 - RNA, 19 nt, artificial
  Chemically synthesized
gaaaacauguaauaaaaag

SEQ ID NO: 33910 - RNA, 19 nt, artificial
  Chemically synthesized
cuucacuucuaaaugcaua

SEQ ID NO: 33911 - RNA, 19 nt, artificial
  Chemically synthesized
gauucuuuccauuaugauu

SEQ ID NO: 33912 - RNA, 19 nt, artificial
  Chemically synthesized
cugaucauuuauaugucaa

SEQ ID NO: 33913 - RNA, 19 nt, artificial
  Chemically synthesized
caacguaucugagcucucu

SEQ ID NO: 33914 - RNA, 19 nt, artificial
  Chemically synthesized
gagaguauuuaggcagauu

SEQ ID NO: 33915 - RNA, 19 nt, artificial
  Chemically synthesized
caaugaaacugggcuguac

SEQ ID NO: 33916 - RNA, 19 nt, artificial
  Chemically synthesized
ugcagcagcccuucaauua

SEQ ID NO: 33917 - RNA, 19 nt, artificial
  Chemically synthesized
ggcuguacuuuguauauuc

SEQ ID NO: 33918 - RNA, 19 nt, artificial
  Chemically synthesized
uugggauucuuuccauuau

SEQ ID NO: 33919 - RNA, 19 nt, artificial
  Chemically synthesized
gcagcagcccuucaauuac

SEQ ID NO: 33920 - RNA, 19 nt, artificial
  Chemically synthesized
uguuucccuuagcuaugga

SEQ ID NO: 33921 - RNA, 19 nt, artificial
  Chemically synthesized
ucaacucaccuaauguuua

SEQ ID NO: 33922 - RNA, 19 nt, artificial
  Chemically synthesized
gaagcacuuugggauucuu

SEQ ID NO: 33923 - RNA, 19 nt, artificial
  Chemically synthesized
aaagagagaauguagauau

SEQ ID NO: 33924 - RNA, 19 nt, artificial
  Chemically synthesized
augguugugaccugaggau

SEQ ID NO: 33925 - RNA, 19 nt, artificial
  Chemically synthesized
gacaaucaacucuaauagu

SEQ ID NO: 33926 - RNA, 19 nt, artificial
  Chemically synthesized
ggaagaugaugagcuacug

SEQ ID NO: 33927 - RNA, 19 nt, artificial
  Chemically synthesized
uuauauaagcucuaagaga

SEQ ID NO: 33928 - RNA, 19 nt, artificial
  Chemically synthesized
gaaugcuuccugacaauca

SEQ ID NO: 33929 - RNA, 19 nt, artificial
  Chemically synthesized
gcuuaaaaaucauugauug

SEQ ID NO: 33930 - RNA, 19 nt, artificial
  Chemically synthesized
uccucuugagcagucagca

SEQ ID NO: 33931 - RNA, 19 nt, artificial
  Chemically synthesized
gggacugucuuucagauac

SEQ ID NO: 33932 - RNA, 19 nt, artificial
  Chemically synthesized
uauggaaacucuauaagag

SEQ ID NO: 33933 - RNA, 19 nt, artificial
  Chemically synthesized
ccaucggugaaacuaacag

SEQ ID NO: 33934 - RNA, 19 nt, artificial
  Chemically synthesized
uugcauaauaagcuaaaga

SEQ ID NO: 33935 - RNA, 19 nt, artificial
  Chemically synthesized
augaugagcuacugcacua

SEQ ID NO: 33936 - RNA, 19 nt, artificial
  Chemically synthesized
gcaccgagaauguuguauu

SEQ ID NO: 33937 - RNA, 19 nt, artificial
  Chemically synthesized
uuuguauauuccaaaguau

SEQ ID NO: 33938 - RNA, 19 nt, artificial
  Chemically synthesized
uuuggucaagauuuugaau

SEQ ID NO: 33939 - RNA, 19 nt, artificial
  Chemically synthesized
gauaagcaagagagauguu

SEQ ID NO: 33940 - RNA, 19 nt, artificial
  Chemically synthesized
cacuuugggauucuuucca

SEQ ID NO: 33941 - RNA, 19 nt, artificial
  Chemically synthesized
aagaagacaugaaccaagu

SEQ ID NO: 33942 - RNA, 19 nt, artificial
  Chemically synthesized
ggucaaguaagaagacaug

SEQ ID NO: 33943 - RNA, 19 nt, artificial
  Chemically synthesized
uugugaaaugaaaacaugu

SEQ ID NO: 33944 - RNA, 19 nt, artificial
  Chemically synthesized
gaggcuugcauaauaagcu

SEQ ID NO: 33945 - RNA, 19 nt, artificial
  Chemically synthesized
cucaccuaauguuuaugag

SEQ ID NO: 33946 - RNA, 19 nt, artificial
  Chemically synthesized
ggcaaguccaacucaaggu

SEQ ID NO: 33947 - RNA, 19 nt, artificial
  Chemically synthesized
cugguugccuugguaggau

SEQ ID NO: 33948 - RNA, 19 nt, artificial
  Chemically synthesized
agggagaagcaugaaaaag

SEQ ID NO: 33949 - RNA, 19 nt, artificial
  Chemically synthesized
uaaaaaucauugauuguca

SEQ ID NO: 33950 - RNA, 19 nt, artificial
  Chemically synthesized
uuucccuuagcuauggaaa

SEQ ID NO: 33951 - RNA, 19 nt, artificial
  Chemically synthesized
ugugaccugaggauuuaag

SEQ ID NO: 33952 - RNA, 19 nt, artificial
  Chemically synthesized
gcucuaagagaagcacuuu

SEQ ID NO: 33953 - RNA, 19 nt, artificial
  Chemically synthesized
aaggacaccuuuuaacuca

SEQ ID NO: 33954 - RNA, 19 nt, artificial
  Chemically synthesized
uccugcuuucuggagugaa

SEQ ID NO: 33955 - RNA, 19 nt, artificial
  Chemically synthesized
ucuguagcuccucaacuca

SEQ ID NO: 33956 - RNA, 19 nt, artificial
  Chemically synthesized
gauuuaagggauggaaaag

SEQ ID NO: 33957 - RNA, 19 nt, artificial
  Chemically synthesized
uggguugcauuuggucaag

SEQ ID NO: 33958 - RNA, 19 nt, artificial
  Chemically synthesized
agaaguaaaaccguuugcu

SEQ ID NO: 33959 - RNA, 19 nt, artificial
  Chemically synthesized
gcccauuuaacaggcaagu

SEQ ID NO: 33960 - RNA, 19 nt, artificial
  Chemically synthesized
caaguaagaagacaugaac

SEQ ID NO: 33961 - RNA, 19 nt, artificial
  Chemically synthesized
cuacaggacugagaagaag

SEQ ID NO: 33962 - RNA, 19 nt, artificial
  Chemically synthesized
uaaagagagaauguagaua

SEQ ID NO: 33963 - RNA, 19 nt, artificial
  Chemically synthesized
ggucuucuuacaugcauuu

SEQ ID NO: 33964 - RNA, 19 nt, artificial
  Chemically synthesized
uuuugugaaaugaaaacau

SEQ ID NO: 33965 - RNA, 19 nt, artificial
  Chemically synthesized
aagcaagagagauguuuug

SEQ ID NO: 33966 - RNA, 19 nt, artificial
  Chemically synthesized
cucauuucauuccuaacac

SEQ ID NO: 33967 - RNA, 19 nt, artificial
  Chemically synthesized
auuaugauucuuuguuaca

SEQ ID NO: 33968 - RNA, 19 nt, artificial
  Chemically synthesized
uaaaaaguauauguuagga

SEQ ID NO: 33969 - RNA, 19 nt, artificial
  Chemically synthesized
auauugugaaguacauauu

SEQ ID NO: 33970 - RNA, 19 nt, artificial
  Chemically synthesized
aaguacauauuaggaaaau

SEQ ID NO: 33971 - RNA, 19 nt, artificial
  Chemically synthesized
acaccuauggaauuguccu

SEQ ID NO: 33972 - RNA, 19 nt, artificial
  Chemically synthesized
gcaucuucacuucuaaaug

SEQ ID NO: 33973 - RNA, 19 nt, artificial
  Chemically synthesized
ucaauuuugaggaaucuca

SEQ ID NO: 33974 - RNA, 19 nt, artificial
  Chemically synthesized
aaaaggagcugaggaaagu

SEQ ID NO: 33975 - RNA, 19 nt, artificial
  Chemically synthesized
agcuacuaaugauguuuuc

SEQ ID NO: 33976 - RNA, 19 nt, artificial
  Chemically synthesized
cuacuaaugauguuuuccu

SEQ ID NO: 33977 - RNA, 19 nt, artificial
  Chemically synthesized
ugguugugaccugaggauu

SEQ ID NO: 33978 - RNA, 19 nt, artificial
  Chemically synthesized
cucucuggucaauuuugag

SEQ ID NO: 33979 - RNA, 19 nt, artificial
  Chemically synthesized
uauuuauguagaugugcau

SEQ ID NO: 33980 - RNA, 19 nt, artificial
  Chemically synthesized
cuggaaugggaagacaccu

SEQ ID NO: 33981 - RNA, 19 nt, artificial
  Chemically synthesized
cuaccagguguucuacacu

SEQ ID NO: 33982 - RNA, 19 nt, artificial
  Chemically synthesized
acauauuaggaaaauaugg

SEQ ID NO: 33983 - RNA, 19 nt, artificial
  Chemically synthesized
acucaagguccaugccucu

SEQ ID NO: 33984 - RNA, 19 nt, artificial
  Chemically synthesized
ugcuuaaaaaucauugauu

SEQ ID NO: 33985 - RNA, 19 nt, artificial
  Chemically synthesized
uuuccauuaugauucuuug

SEQ ID NO: 33986 - RNA, 19 nt, artificial
  Chemically synthesized
gucaagauuuugaaugcuu

SEQ ID NO: 33987 - RNA, 19 nt, artificial
  Chemically synthesized
gaauuguccugcuuucugg

SEQ ID NO: 33988 - RNA, 19 nt, artificial
  Chemically synthesized
agauugaaaaggacaccuu

SEQ ID NO: 33989 - RNA, 19 nt, artificial
  Chemically synthesized
auauuuauguagaugugca

SEQ ID NO: 33990 - RNA, 19 nt, artificial
  Chemically synthesized
acuaaugauguuuuccuau

SEQ ID NO: 33991 - RNA, 19 nt, artificial
  Chemically synthesized
guauauuccaaaguauacu

SEQ ID NO: 33992 - RNA, 19 nt, artificial
  Chemically synthesized
gagaauguuguauucagug

SEQ ID NO: 33993 - RNA, 19 nt, artificial
  Chemically synthesized
cuuaaaaaucauugauugu

SEQ ID NO: 33994 - RNA, 19 nt, artificial
  Chemically synthesized
ugcacuacugggcagaugu

SEQ ID NO: 33995 - RNA, 19 nt, artificial
  Chemically synthesized
aaguggaccuugagaccac

SEQ ID NO: 33996 - RNA, 19 nt, artificial
  Chemically synthesized
accacaggguucaaaaugu

SEQ ID NO: 33997 - RNA, 19 nt, artificial
  Chemically synthesized
cagcagcccuucaauuacc

SEQ ID NO: 33998 - RNA, 19 nt, artificial
  Chemically synthesized
gucaaguaagaagacauga

SEQ ID NO: 33999 - RNA, 19 nt, artificial
  Chemically synthesized
ucugguugccuugguagga

SEQ ID NO: 34000 - RNA, 19 nt, artificial
  Chemically synthesized
ccacaaggucuacaugagg

SEQ ID NO: 34001 - RNA, 19 nt, artificial
  Chemically synthesized
caaguggaccuugagacca

SEQ ID NO: 34002 - RNA, 19 nt, artificial
  Chemically synthesized
gcucuuccaccuacagaag

SEQ ID NO: 34003 - RNA, 19 nt, artificial
  Chemically synthesized
aagaugaugagcuacugca

SEQ ID NO: 34004 - RNA, 19 nt, artificial
  Chemically synthesized
aaacuaacagauaagcaag

SEQ ID NO: 34005 - RNA, 19 nt, artificial
  Chemically synthesized
gucuguagcuccucaacuc

SEQ ID NO: 34006 - RNA, 19 nt, artificial
  Chemically synthesized
ugacaccucagccucuaca

SEQ ID NO: 34007 - RNA, 19 nt, artificial
  Chemically synthesized
uuccauuaugauucuuugu

SEQ ID NO: 34008 - RNA, 19 nt, artificial
  Chemically synthesized
aaacugggcuguacuuugu

SEQ ID NO: 34009 - RNA, 19 nt, artificial
  Chemically synthesized
uucagauacaugguuguga

SEQ ID NO: 34010 - RNA, 19 nt, artificial
  Chemically synthesized
uugugaaguacauauuagg

SEQ ID NO: 34011 - RNA, 19 nt, artificial
  Chemically synthesized
aaaaaguauauguuaggau

SEQ ID NO: 34012 - RNA, 19 nt, artificial
  Chemically synthesized
ugcauaauaagcuaaagag

SEQ ID NO: 34013 - RNA, 19 nt, artificial
  Chemically synthesized
ggaauuguccugcuuucug

SEQ ID NO: 34014 - RNA, 19 nt, artificial
  Chemically synthesized
aaauauggguugcauuugg

SEQ ID NO: 34015 - RNA, 19 nt, artificial
  Chemically synthesized
ugaggucaaguaagaagac

SEQ ID NO: 34016 - RNA, 19 nt, artificial
  Chemically synthesized
cagaacuccgagagucuac

SEQ ID NO: 34017 - RNA, 19 nt, artificial
  Chemically synthesized
augcagcagcccuucaauu

SEQ ID NO: 34018 - RNA, 19 nt, artificial
  Chemically synthesized
auugugaaguacauauuag

SEQ ID NO: 34019 - RNA, 19 nt, artificial
  Chemically synthesized
cuccucaacucaccuaaug

SEQ ID NO: 34020 - RNA, 19 nt, artificial
  Chemically synthesized
accgagaauguuguauuca

SEQ ID NO: 34021 - RNA, 19 nt, artificial
  Chemically synthesized
acucaccuaauguuuauga

SEQ ID NO: 34022 - RNA, 19 nt, artificial
  Chemically synthesized
gaaaaggacaccuuuuaac

SEQ ID NO: 34023 - RNA, 19 nt, artificial
  Chemically synthesized
ucaaugaaacugggcugua

SEQ ID NO: 34024 - RNA, 19 nt, artificial
  Chemically synthesized
cuugagcagucagcaacag

SEQ ID NO: 34025 - RNA, 19 nt, artificial
  Chemically synthesized
cagauaagcaagagagaug

SEQ ID NO: 34026 - RNA, 19 nt, artificial
  Chemically synthesized
uuugggauucuuuccauua

SEQ ID NO: 34027 - RNA, 19 nt, artificial
  Chemically synthesized
aucuucacuucuaaaugca

SEQ ID NO: 34028 - RNA, 19 nt, artificial
  Chemically synthesized
aggcaaguccaacucaagg

SEQ ID NO: 34029 - RNA, 19 nt, artificial
  Chemically synthesized
agggauggaaaaggaagac

SEQ ID NO: 34030 - RNA, 19 nt, artificial
  Chemically synthesized
uugcauuuggucaagauuu

SEQ ID NO: 34031 - RNA, 19 nt, artificial
  Chemically synthesized
caccuauggaauuguccug

SEQ ID NO: 34032 - RNA, 19 nt, artificial
  Chemically synthesized
aggcacaguucuucccugu

SEQ ID NO: 34033 - RNA, 19 nt, artificial
  Chemically synthesized
ugaucauuuauaugucaac

SEQ ID NO: 34034 - RNA, 19 nt, artificial
  Chemically synthesized
aaaaggacaccuuuuaacu

SEQ ID NO: 34035 - RNA, 19 nt, artificial
  Chemically synthesized
cuaauagugcuuaaaaauc

SEQ ID NO: 34036 - RNA, 19 nt, artificial
  Chemically synthesized
cucaucuuagugccugaga

SEQ ID NO: 34037 - RNA, 19 nt, artificial
  Chemically synthesized
uaggaaaauauggguugca

SEQ ID NO: 34038 - RNA, 19 nt, artificial
  Chemically synthesized
agacaaauggaggaauaug

SEQ ID NO: 34039 - RNA, 19 nt, artificial
  Chemically synthesized
uggucaagauuuugaaugc

SEQ ID NO: 34040 - RNA, 19 nt, artificial
  Chemically synthesized
aagcuaaagaggcugaaag

SEQ ID NO: 34041 - RNA, 19 nt, artificial
  Chemically synthesized
acugcacuacugggcagau

SEQ ID NO: 34042 - RNA, 19 nt, artificial
  Chemically synthesized
ggcaguguucaaucuuacc

SEQ ID NO: 34043 - RNA, 19 nt, artificial
  Chemically synthesized
uauguagaugugcauuuuu

SEQ ID NO: 34044 - RNA, 19 nt, artificial
  Chemically synthesized
aaauauuuauguagaugug

SEQ ID NO: 34045 - RNA, 19 nt, artificial
  Chemically synthesized
aggaauaugacggaagaac

SEQ ID NO: 34046 - RNA, 19 nt, artificial
  Chemically synthesized
cuguagcuccucaacucac

SEQ ID NO: 34047 - RNA, 19 nt, artificial
  Chemically synthesized
ugaccugaggauuuaaggg

SEQ ID NO: 34048 - RNA, 19 nt, artificial
  Chemically synthesized
uuauguagaugugcauuuu

SEQ ID NO: 34049 - RNA, 19 nt, artificial
  Chemically synthesized
gaucaaugaaacugggcug

SEQ ID NO: 34050 - RNA, 19 nt, artificial
  Chemically synthesized
gcuaccagguguucuacac

SEQ ID NO: 34051 - RNA, 19 nt, artificial
  Chemically synthesized
cagauacaugguugugacc

SEQ ID NO: 34052 - RNA, 19 nt, artificial
  Chemically synthesized
uucacuucuaaaugcauau

SEQ ID NO: 34053 - RNA, 19 nt, artificial
  Chemically synthesized
ggucuacaugaggaacucu

SEQ ID NO: 34054 - RNA, 19 nt, artificial
  Chemically synthesized
uacauauuaggaaaauaug

SEQ ID NO: 34055 - RNA, 19 nt, artificial
  Chemically synthesized
ucagcucuuccaccuacag

SEQ ID NO: 34056 - RNA, 19 nt, artificial
  Chemically synthesized
augucaacguaucugagcu

SEQ ID NO: 34057 - RNA, 19 nt, artificial
  Chemically synthesized
ugaucaaugaaacugggcu

SEQ ID NO: 34058 - RNA, 19 nt, artificial
  Chemically synthesized
gaaacugggcuguacuuug

SEQ ID NO: 34059 - RNA, 19 nt, artificial
  Chemically synthesized
uggaaacucuauaagagag

SEQ ID NO: 34060 - RNA, 19 nt, artificial
  Chemically synthesized
uauggaauuguccugcuuu

SEQ ID NO: 34061 - RNA, 19 nt, artificial
  Chemically synthesized
guagaugugcauuuuugug

SEQ ID NO: 34062 - RNA, 19 nt, artificial
  Chemically synthesized
auggaauuguccugcuuuc

SEQ ID NO: 34063 - RNA, 19 nt, artificial
  Chemically synthesized
gucuuucagauacaugguu

SEQ ID NO: 34064 - RNA, 19 nt, artificial
  Chemically synthesized
uucuuuccauuaugauucu

SEQ ID NO: 34065 - RNA, 19 nt, artificial
  Chemically synthesized
aauguuguauucagugagg

SEQ ID NO: 34066 - RNA, 19 nt, artificial
  Chemically synthesized
uguauauuccaaaguauac

SEQ ID NO: 34067 - RNA, 19 nt, artificial
  Chemically synthesized
ugucagcuacuaaugaugu

SEQ ID NO: 34068 - RNA, 19 nt, artificial
  Chemically synthesized
agaguauuuaggcagauug

SEQ ID NO: 34069 - RNA, 19 nt, artificial
  Chemically synthesized
uggaauuguccugcuuucu

SEQ ID NO: 34070 - RNA, 19 nt, artificial
  Chemically synthesized
guccugcuuucuggaguga

SEQ ID NO: 34071 - RNA, 19 nt, artificial
  Chemically synthesized
caacucaagguccaugccu

SEQ ID NO: 34072 - RNA, 19 nt, artificial
  Chemically synthesized
auugaaaaggacaccuuuu

SEQ ID NO: 34073 - RNA, 19 nt, artificial
  Chemically synthesized
ugaggaacucuaaguaucc

SEQ ID NO: 34074 - RNA, 19 nt, artificial
  Chemically synthesized
aagcucuaagagaagcacu

SEQ ID NO: 34075 - RNA, 19 nt, artificial
  Chemically synthesized
auagugcuuaaaaaucauu

SEQ ID NO: 34076 - RNA, 19 nt, artificial
  Chemically synthesized
uguauucagugagggucuu

SEQ ID NO: 34077 - RNA, 19 nt, artificial
  Chemically synthesized
gagcucucucuggucaauu

SEQ ID NO: 34078 - RNA, 19 nt, artificial
  Chemically synthesized
auaagcucuaagagaagca

SEQ ID NO: 34079 - RNA, 19 nt, artificial
  Chemically synthesized
cuugagaccacaggguuca

SEQ ID NO: 34080 - RNA, 19 nt, artificial
  Chemically synthesized
gugagggucuucuuacaug

SEQ ID NO: 34081 - RNA, 19 nt, artificial
  Chemically synthesized
gcuguacuuuguauauucc

SEQ ID NO: 34082 - RNA, 19 nt, artificial
  Chemically synthesized
uucuggagugaaguauaag

SEQ ID NO: 34083 - RNA, 19 nt, artificial
  Chemically synthesized
cuuuccauuaugauucuuu

SEQ ID NO: 34084 - RNA, 19 nt, artificial
  Chemically synthesized
cucuacaggacugagaaga

SEQ ID NO: 34085 - RNA, 19 nt, artificial
  Chemically synthesized
cauauuaggaaaauauggg

SEQ ID NO: 34086 - RNA, 19 nt, artificial
  Chemically synthesized
uagcuccucaacucaccua

SEQ ID NO: 34087 - RNA, 19 nt, artificial
  Chemically synthesized
auauuaggaaaauaugggu

(The sequence listing continues in the following parts.)

1. A compound having the structure:
5′(N)ₓ—Z3′ (antisense strand)
3′Z′—(N′)_{y}-z″5′ (sense strand)
wherein each of N and N′ is a ribonucleotide which may be unmodified or modified, or an unconventional moiety;
wherein each of (N)x and (N′)y is an oligonucleotide in which each consecutive N or N′ is joined to the next N or N′ by a covalent bond;
wherein Z and Z′ may be present or absent, but if present is independently 1-5 consecutive nucleotides covalently attached at the 3′ terminus of the strand in which it is present;
wherein z″ may be present or absent, but if present is a capping moiety covalently attached at the 5′ terminus of (N′)y;
each of x and y is independently an integer between 18 and 40;
wherein the sequence of (N′)y is substantially complementary to the sequence of (N)x; and
wherein (N)x comprises an antisense sequence present in any of Tables A-AQ.

2. The compound of claim 1, wherein the covalent bond joining each consecutive N or N′ is a phosphodiester bond.

3. The compound of claim 1, wherein x=y.

4. The compound of claim 3, wherein each of x and y is 19, 21 or 23.

5. The compound of claim 1, wherein Z and Z′ are absent.

6. The compound of claim 1, wherein one of Z or Z′ is present.

7. The compound of claim 1, wherein each of N or N′ is unmodified in its sugar residue.

8. The compound of claim 1, wherein at least one N or N′ comprises a modification in its sugar residue.

9. The compound of claim 8, wherein the modification comprises a modification at the 2′ position.

10. The compound of claim 9, wherein the modification at the 2′ position comprises the presence of an amino, a fluoro, an alkoxy or an alkyl group.

11. The compound of claim 10 wherein the modification comprises the presence of an alkoxy group.

12. The compound of claim 11, wherein the alkoxy group is methoxy (2′-O-methyl) group.

13. The compound of claim 1, wherein alternating ribonucleotides in (N)ₓ are 2′-O-methyl modified and alternating ribonucleotides in (N′)_{y} are 2′-O-methyl modified.

14. The compound of claim 13, wherein each N at the 5′ and 3′ termini in (N)ₓ are modified in their sugar residues, and each N′ at the 5′ and 3′ termini of (N′)_{y} are unmodified in their sugar residues.

15. The compound of claim 14, wherein both (N)ₓ and the (N′)_{y} are non-phosphorylated at both their 3′ and 5′ termini or wherein both (N)ₓ and (N′)_{y} are phosphorylated at the 3′ termini.

16. The compound according to claim 1 wherein (N′)y comprises at least one unconventional moiety.

17. The compound according to claim 16 wherein the unconventional moiety is selected from a mirror nucleotide and a nucleotide joined to an adjacent nucleotide by a 2′-5′ internucleotide phosphate bond.

18. The compound according to claim 17 wherein (N)x comprises 2′O Methyl modified ribonucleotides at positions 2, 4, 6, 8, 11, 13, 15, 17, 19 and (N′)y comprises at least one L-deoxyribonucleotide at the 3′ penultimate position.

19. A pharmaceutical composition comprising a compound of claims 1 or a vector capable of expressing such a compound in an amount effective to inhibit the gene; and a pharmaceutically acceptable carrier.

20. A method of treating a subject suffering from a disease or condition selected from a neurodegenerative disease or disorder including spinal cord injury, Alzheimer's disease (AD) and Amyotrophic Lateral Sclerosis (ALS); acute renal failure (ARF); hearing loss; an ophthalmic disease including glaucoma and ischemic optic neuropathy (ION); a respiratory disease including acute respiratory distress syndrome (ARDS), chronic obstructive pulmonary disease (COPD) and other acute lung and respiratory injuries; injury (e.g. ischemia-reperfusion injury) in organ transplant including lung, kidney, bone marrow, heart, pancreas, cornea or liver transplantation; nephrotoxicity, pressure sores, dry eye syndrome or oral mucositis, comprising administering to the subject an siRNA compound which inhibits expression of a gene selected from SOX9, ASPP1, CTSD, CAPNS1, FAS and FAS ligand in an amount effective to treat the disease or condition.

21. The method according to claim 20 wherein the siRNA comprises an oligomer whose sequence is present in any one of Tables A-AQ.

22. A method of treating a subject suffering from a disease or condition selected from the group consisting of spinal cord injury, Alzheimer's disease (AD) and Amyotrophic Lateral Sclerosis (ALS) comprising administering to the subject an siRNA which inhibits expression of a gene selected from SOX9, ASPP1, CTSD, CAPNS1, in an amount effective to treat the disease or condition.

23. A method of treating a subject suffering from an ophthalmic disease or condition selected from the group consisting of glaucoma, ION and an eye disease secondary to diabetes comprising administering to the subject an siRNA which inhibits expression of a gene selected from SOX9, ASPP1, CTSD, CAPNS1, in an amount effective to treat the disease or condition.

24. A method of treating a subject suffering from dry eye syndrome comprising administering to the subject an siRNA which inhibits expression of a gene selected from FAS and FAS ligand in an amount effective to treat the disease or condition.

25. A compound according to any one of claim 1 for use in therapy for treating a patient in need of neuroprotection.

26. A compound according to claim 25, wherein the patient is in need of optic nerve neuroprotection.

27. A compound according to claim 1 formulated for intranasal administration, for intratracheal administration, or for topical non-invasive administration as an eye drop or ear drop.
